United States Patent Application Publication US 2025/0222082 A1 - sequence listing, part 3

SEQ ID NO: 5671 - protein, 150 aa, Methanobrevibacter ruminantium
MNKDNSSLNKNNLNLEKENSSLEKILKPESKLNSSLDLVSNMISDLDSDIESRLNSDLESSSSSFSDLYRNYLIEDNEIYLEMSISKDEFFKMMKFLYVLIDSYRLELNNIEVLDTGDGLLNICSSILMEDESNIKIIEAFLINNDFGND

SEQ ID NO: 5672 - protein, 247 aa, Methanobrevibacter ruminantium
MLLKIIENKKIKANQKEFDRFLERFHNNKKTFTVDCDHINLDYFNSESYVTIRHRKPNKESIYYTSFFKERDEVTYLFGLARENVVCTSSYMDMGAQIRPTLVAVLNLEDSSKSTIVFAEDSEEYNNVILLRIDCSQLNNDELTVLKNKNKITKLKDGKGFINFGAIGDFTTLKNIRNFISNVTFEYDNGLYAKIINVSIPINNSFSKPDSDVLKDRFYNFDKLDSDLVVIDPNEDDDSNKRILKIN

SEQ ID NO: 5673 - protein, 1562 aa, Methanobrevibacter ruminantium
MKNHSFMFLDSDFQDISNFCMRMEKNIVEGDGVDAVIWAGKIAERVTHYITKFVGIDLNELDQNKKLNTLYSKGIIPEDKYNKLDSIRQYRNIATHHELRDEMNIAKKTHKDVFNILSWFYGTYKGDEAYYKLKYPGVTYRHDESFLNQLKENINNNVKTIDNNKATTAIKSANDHIYQHDVDYNVHSYFNQNNVEFNPELNAYTAFFIFDDKKVTIGHFKTREVAVRKGYRFVLNEDFRMFQYFNGCLLPERLEDGSYSDSKGIDFDMEEKLWKASFDDKDLGYFISENSAIIARKEYIDTLPLPESKNGSYSDYKEISFDLNHKLWYIKKEGKILDYYDSEREAIHNLSNVYRLDIDLEDLGIVQDKNDSRWKIFYKNKYVTTCDTKEEAIKKRLSHISSFAPPKRNKDGEYSIHKGIYYDDKNLIWVLTIKGETLGFFDSEEDAFNYKKEFLKSKGFDVSDLIFHQEELFDDSFDFKVRLNSEENAVDYDKDNDEWVIYFRGNEIGRKASEDEARKFRRAYLKEMPYPPRKSNGNYSFIDGIDYDINSHLWLAKNGEELIGHFDSEEDAFYGLKEALVKEGFDVRDMHFINSDIKSNDENDGNLSNIVNPSKDYLIKDNSTKDYLSDGSVSNEDSSAEASNQKDGSDKLISFYDVFRTNTGNYILSDSEESLSDSEESLSDSVESLSDSVESINKPVESADEDFKNNSESIANDSAFETDNGRGVIDQEFLADGDKQFNMGAIIQEDNSKNINEYKKSSFYGIANQNQDDRLSDDLSIPYLESEDNYEYMEDLNLEQLNLDENNGFLNISENLFKSSNRKELKEIKLNSYDSNNFRREMVLSYNDSYLCVSLQGMVNKDELKDIIFLDILDNMVKLNYSKVDEEYFSIFINVQYKLSTIDLVTLINLLSDLGWEFDLLDKLAISNDINLNSLVQSKIGKIRDKRKAHSNELIKSSHNEDSLISKSKINDSIVSNESDSNKGSSKFKENLSLYDKFSLSSNDAEDSDAQKAKDKSLKSKDYLDANPISKRKSYPKQESISSKNKKSNSKSEKAIIRGGVRVSLEEAHEIDNAEENKVIKSKIIDKKPEMVKDFKTTSLDSLLEANRIKEEERLNSTSDDIGDDLSIEDNSDTFKDDLNSNGLETLENGLNLIKEGLNSAENDLDYAEDVLNSEEDDLDSAEDVLNPEEDDLGSVEDVLNPEEDDLGSVEDVLNPEEDNYVSESSLNDDFDSLDYSDSLEDSTDSSFDYGDVLGEDNSNSNSIEDIFNDEDDLDSEGLLDEDSDDVDFLEKVSSDLSSTNLFDESADLSANDLFDGYNDSSSSDLFDDESETSFEDELDNIGSSNQEDLSTESNDSDSNLEEIGSLKETAEQTESESDSTASKVSKPKVKKAKKPKKVPADAFDEKYANSTEIEYDEESDKWLAFLGGDLIRSFNTPKEAYIERKKLLRRKVKRPKRGMNGRYSEFEGIDFNTQEGLWTSSVNDIIVCYSITEKEAHKKRTMFVDLILDKFDVSEEEFTEDLLEEIKSTNLEDLFADLSDEDLNDSSNLSLKEVKKELNKF

SEQ ID NO: 5674 - protein, 99 aa, Methanobrevibacter ruminantium
MEEIRKELIKFQMERDWKRYHTPENLAKSISIEAAELLEHFQWQKEYDKDEVVDELADVFNYCFLMADALDVDVKEIVFNKMKKNAIKYPPKVSSDDLK

SEQ ID NO: 5675 - protein, 257 aa, Methanobrevibacter ruminantium
MDDFLSNFVLKEEETSLSDSKKDVLKFLKQIGVDTRFVSFFEKDNEKRIYIENLRFSRFSRKRTSIFNNEYPDIEVVRSSLFQKICLRASKTLSNSLDPKDRVIIPKMDNEYNELLFIVLESYSRKYGIIFIEYDENENINLKDFNAIVSPLNLNQEVNHILNDIFDGKGIEWDRKFDLSSLYGFNASDIKDKKIIFPFINVPQEWIYDFLGIEKEYVIDYDNDDIGDSFMGFLSEINPQFKENVLAASSFLETHQK

SEQ ID NO: 5676 - protein, 298 aa, Methanobrevibacter ruminantium
MVDGKTKILGVIGDPIEHTFSPAMQNAGLEALNLNYIYLPFHVKSDNLNSAIEGAKTLGIRGLNVTIPHKREVITCLDEVDPIANMIGAVNTIKFDYDENEGISTKGYNTDAYGCLRAIEEKASVKDKKITIVGAGGASRAIAFQMASSDIGELSILNRNFNKAESLANDIKSNLKQLNDNFNLNINAYDMDSLKREIQESEILIDTTPIGMYPNINDKPIASADMMHDDLIVNDIVYTPMETSLIKEAKKANAEVVYGYKMLLYQGIRSFEIWLGEEAPVKEMENALLKVFRHLNGF

SEQ ID NO: 5677 - protein, 179 aa, Methanobrevibacter ruminantium
MNLCMTTLRMSLAEKRQHLSKLFLEVLKEHSGTISVYDLMSVTAELREDTKYVQDKYREETNAVYVKYFLGRIKNIRDDNNQYDGSIDKDDFIESVATLKSYQEGESKTSKTKFPLIYAIVSLYTTYILEEPIHPVGTPFPGSLKVTQKNGVFYCPVKEANLESPNAVCKMCIAEQLEF

SEQ ID NO: 5678 - protein, 1539 aa, Methanobrevibacter ruminantium
MSKTNKKKLFLSILIILSVLISLSSVSAINTNDSSIQDNGDLSIQDSIDEISQFDESEQLNKINKDSPESNFNQELSNDSKDISADSNQDLMGFENYDFKYNTKSSYSNALKDSNVINVTGSTFQDIQDAIDRANDGDILYLKSYKFHGNGTAISINKPLTIIGSYEANNKSHYLDAYLKSRILYIDSDDVTLINIHFDYGGNIDNNGNGGAIYLDGTNCAIVNCSFKGNHAWLGGAIFQSNNSNDLYVGGCKFVENNAQIGAGITTCGFNCLVSNCSFENNSAVTAGAIMTDTQKNGDMTFFRLENSTFINNNATGGGGAINFDGYYQSVYNCKFIDNYAKNSGGAIYGSLKPFDVSLCQFYNNYANTGGAIRGTANYNVSDCRFINNSAHHAGAVFLHSYSNVIDSYFENNYAEANGGAICTDSNTVGVIIKGSTLIGNNATTGSAIMMVSSRSIIENCNFSGNIGKSEGAIYSIHDCNISHCIFDSNQAEKGGAFYIYRGNNSNIDNCRFINNSANSSGGAIYWYVNKGKISNSYFEENQARYGSAIYCSNVEADSGFIITDCDFINNHPKEDGSNTKGGAIYLYDQLKCIIVANSTFEYNYASRGGAIYVEGDVNLIANSTFKYNKADIFSLSAYNDNANLIVTLRGYENYMNAIYAEKTVDFHNVTYWDGEFVTGDYPIKRNLEAGINIILDCRGNGHSLNVTKMTNSMGEVIFDEMRTLPSGTYAYQVSVPDNSYYTAKKLKPDIFNVPYLCENILGIDVADISYDQYPVVNITANYTGNYTVYIANSSYDVTFTDQDVERGRVLGYNITITDEDVVKGEKLIVIPHLFDIKDGYGAYVQLRAIDQENVELVYIQNRTSFNVYKAASALEAEGAVAVNGSDIELNYMAQNGTVTIESIKKDGSLLENGTDYNFTVNDDKIIITGLDAGHYIANLTLIVDDYHNSSSIDVSIDVLIKTSIDVADSISIAETESSLINATLSPEEAGLLNYQSDNETVAVIDNDGRITGILKGNATIFVSYAGNEDYSPSNATVKINVYPLVDLKINKTANVSKAFVDNMIKFTVSVVNDGPSNASGVYVDETLSSILDLISNSSTKGSYDGNKWLVGNLNNGESASLTIVAKINRAGIISNDVTVKANEADSNQSNNNCSISIEGLMIETVLTVPNVTSSYNMDKNFTISLKDINGNPIGDANITVDLNGKKSYITDSNGQIKLSTTGLAVDTHVLNVTFAGNYKYNGSSSSSKIVIIKDSSKLNATDIISTYNDDDYLIVSLTNSQNNPIAGANVFVDLAGKRNYTTDSNGQIKVSLKNLIPDNYNASIAFGGNENYTESSTSAMVTVKRAKTSFNYTDMNTVAFDSKLEGRVGEYFKFKLLDNNGKPIAGRQVFIGFNGVKYNRTTNETGEAQLQINLKYANHYTFAIAFLGDDCYSGSFNVALISVTEQTPVLTTSPKTYKSSAKTKVLTATLKSSRESALPGKKVTFTINGKVYSANTNEDGIATVKVSLSKKGTYSFTVQFGGDSTYKKITKSSKLTIK

SEQ ID NO: 5679 - protein, 1686 aa, Methanobrevibacter ruminantium
MDKKVSKTNKKKLLLSILILFSILVSLSSVSAASDLIQDYEDLTIQNSYDDLIIQDSFNEDLIQDSSNTELKTQDSSIDNLKETINQTESIDDTLTNQDLSSLQDSSKENIKDSNLKSSRLGKSITVKGNTFQSIQSAIDGAEAGDTIILSENMFKGDNYYGLGEQIYINKSLTIMGSSQFGSQYIILNALHSSRIFNITADNVTISNIQFTNGYVVGEPGGAIYWFGNNGKIINSYFSLNCANSSMEWDIEGGAIYFGLKFKNQYIENCLFKYNSAYDGGALYTCSQNTTISKCTFDSNFGISNNAGGMANGAALSFSAKDVYVIDSTFLNNDAPEGWGGAVYIYKHGYEPYFFNCSFKNNSAAFGGAICWLTDGGTFLNCTFENNHATGGDAIPHGGAIYKIGRNGGNIINSTFTRNYATTGSAIYLNAYLNIDNCTFTDNQADSEGAIYIITDNVTIRNCLFDKNYAYNYGAAIFSWDHDNIKVENSRFIENHARNEGGAIYFLGKNCQIYGCLFEGNRVSNFYSFGGAVFMEISGEDTSILDCSFKNNSALYKGGALYISYGSSEKIAIINSSFEDNSASNGGAIQADWNLSLIANSSFEDNSASYGGAIQVFGSVDLIANSSFEDNSASYGGAIHVFRSIGLIANSTFKNNYANSLEINQSKESYGRVFTFKGKENYINAIYTEDYSLNFENVTYWDGSFVTSGSPIKSDCEAGIKIRIVLRQGVSAGPVVLNITKITNIKGEVVFNEYNGLSPGIYYYEAYHPKDSYYSESEKLSGMITVPKKATDNTLAISLDDSIYGEDLKVNVNTDVSGEYRIYIANSNYDAIFTDDDVAKGNVLAYDITVNENELKGNKWTILKNSLNVKNGYGAYIQFADLEDGENYINIHNRTSFNVYKAESSIDANETIAIEGDGAEVNYTIENGTASIDNIRRGSAILEEGTDYNFTVTPDKIIITGLDMGNYTVKLKTIVDSNYNPSTKEVFICILGRTAIDVQESVAIEKDKSYLLSPTLIPEDAGTLRYISNDESIVKVDSKGNLTAISEGNTTIMVLFDGNDIYAPSNATVKVSVYSGSMPTSIKVNKSFELYMDESIDMGAVLDPANAGNLTYKSSNEKIVKVDNYGKITGLGQGKANITVSFSGNEKFLASNATALVTVYPLVDLKIAKSANVSGEVYIGDKIKFVITVSNNGPSNATGVYVNEALNSNLVLASNSTTKGNYDGSKWTIGNLNKGETVNLTIIANVKSVGNIDNKVIANSTERDSNYTNNIASISTIKALPIVDLSINVTSNKKSLNVGDTFTYTINLINLGPSKATNIIVDELLSQFIELVNVNLSIGNYDNSTSVWSVDQLDPNSPVSLNLTVKAIRAGKIENSVTAYSNEKDSNESNNNFTLSINCVKINTQLTANNITTSYNLNKDLIIGLNDSKGNPLSGFIVSVDLNGKKNYTTDSNGQIKIPTKSLIPDTYNATIRFEGNEKYYSSHASAIIVVKRASTSLNYTNMNTVAFDSNIEGRVGEYFQFQLLDNDGKPIAGKQVFIGFNGVKYNRTTNQTGEARLQINLKYANHYTFAIAFLGDNNYSGDFQVALINVTEQTPVLTTSPKTYKSTAKTKALTATLKSSRGQALAGKKITFTLNGKVYSGNTNSDGIATVNVSLSKKGTYSFTAQYGGDSTYKKVTKSSKLTIK

SEQ ID NO: 5680 - protein, 433 aa, Methanobrevibacter ruminantium
MEFERPRGTRDFLFEEMRERKMAEDTLRNVFENYGFGEVQTPLFEDLKLFTTKSGEEIVDQLYNFKDKGDRDLALRPEITAPIARLYLNELQKTSKPIKIYYYGSCFRYERPQKGRFRQFWQFGCELIGAKTPEGEAEVIAMCNNAIEELGITTAEFNVNHLGIIRGLFAHFDIDTATQREIMVVIDKGDKDLLKDSLVGENPIIKDKPELNEVLFKLMDMVGDSSIIKDIEELVAPYEETQEALEEFKELVKTLESFQVFNYKLNLGVARGLDYYTGIVFEVYVEGLGAQKQVCGGGTYNLVKLFGGEDVVSTGFALGFDRLMNAIEELNGKVELEPIVNTYVAAISDSTRHNAFSIAQDLRKANIPTEVDLSRKKFKKILAYANKIDVKYTVLVGERDLEEGKVTIKDMLTGEQELVAIDEVVDYIKGKLY

SEQ ID NO: 5681 - protein, 137 aa, Methanobrevibacter ruminantium
MELNFRLNMGGEDLVIAVAQDYETNDVLMVAFMNKEAVEQTLKTKKAHYYSTSRQKQWLKGESSGNVQTVKEMYIDCDADAIIMKVDQIGAACHEGYRSCFFRQLDIDKENIDLDSLTDEDISIISERLFDPKEMYG

SEQ ID NO: 5682 - protein, 720 aa, Methanobrevibacter ruminantium
MDFNDYDYDSEYNNDEEEYNDEIKRIVPDTSAIIEGNVEKIIKEKGLNYPEIIIPEAVIAELEHQANNQRPTGLRGLENLKKLQEMAEIGELSIRITGRRPTKFEKDNAKLGEIDGLIRDVAKDELALLITSDKIQAKTAEAQGIPVIYYAQEYKGSIDLKIAKFFDEETMSVHLKENVPPMAKKGKPGHIKLVKLADEKFTFKQLEFIAEEILEKERYDPKTYLEVDRQGAIVVQSRDLRISIARPPFAEALEITAVRPVAEVSLDEYHLSSQLIDRLTNSARGILISGSPGAGKSTFAQAIAKFYDEDLNKVVKTMESPRDLQVADTITQYAPLEGDMEKTADILLLVRPDFTIYDELRKNHDFSIFADMRLAGVGMIGVVHATKPIDAISRIANRVDLGTIPSIVDTTIYIENGEISAIYENKLTVKVPTGMEERDLARPVIEVRDFETGTLVNEIYTYGEQTIVMDIGMVEESKKAKDKEEKTPVQIIAEREILRTMKRIVPKAAMEVSMENDRRVNIYMSEKYIPKVIGKGGKRIAELEEDIGISMNIEPLDKAPDSFSERLSKRSKKKKSKKEKKKKSKKSGLKEYNGVEDGELSEDGLKDYNKDNYFDFTDDNEDYYEDYEDYDDSDILEDDYEELFYDTFEVFPKVRKSRVELPIGKKYVGKSFDIFIEDEFLFNATVSKKGNVKVHRKLKSYGKIVSALDAGDRIIAKVRK

SEQ ID NO: 5683 - protein, 255 aa, Methanobrevibacter ruminantium
MKLGASIFPRKIIPIEKSLDYFESNRYIEYMEIFHDYPNRDIDVEKDLIDKFNSYDLKYTVHAPFIEVNPASVNPALAKASVDEIKRSVDLANLLDSDIVVIHPGRAIFTNDMEYMASVYRIAEENLKVIGEYAKDNGVMTCIENLPRLRGFMYQDINQLNETLERTGLPMTLDIGHAYTAGFDVDDVSFDCISHIHIHDNDGIRDSHLPLGEGIIDFKRFFEIFDKYDGIYNFELGSKEYIEKSIDYLKGLKLI

SEQ ID NO: 5684 - protein, 257 aa, Methanobrevibacter ruminantium
MKIGASMLATEDKTMKESLDYFDSNKYIEYVEILHDYPYRELNDDKELIDLINSYDLKYTIHSPFIDLNIASLNSALAKLSVEEIKRSIDLANMIDSDIVVAHPGFVSFNGRGKEDIIYEIGREGLVEIGDYAKDNGVNACIENLPKIEGFMYQDVNQLNDTLVELELPMTLDIGHAHTAGFSPDEIYFDSVKHIHVHDNPGDDDTHLALGDGTFDVNGFFDVFTKNGYDGIYMLELNHIDFIQKTLDYMKNLGLID

SEQ ID NO: 5685 - protein, 433 aa, Methanobrevibacter ruminantium
MWNEEIETMPREDIYELQLKKLQSTVKRAFDKIPYYNKKYSEANVFPEDIETLEDIEKLPFLTKDDLRACYPFGMFAVDKKEIIEVHSSSGTTGKPVVSGYTQNDIDNWGEIVARGLTMMGLDSDDIIQNTHGYGLFTGGFGVHYGAHRLGATIIPISTGQTRRQVEIMADFGTTCLIFTPSYGIYLGEVAKEEGIDFDKLGLKAIGFGAEMWTAEMRDRIEETFKTKAYNIYGLTELMGPGVGIECSAQNGLHIAEDFFYPEIINPKTGETLAEGKHGELVLTNLERESMPIIRFRTKDLTALHYDTCKCGRTLARMERITGRSDDMIKVKGVAIFPSQIEKALLKVSNIEPHYQIIVTRPDIMDEIEIKVEASASLFSDDIKEMMAVKRKIGEYIQNETGIAVNVSLVAPKSIPRSTKGKIQRVIDKRNLH

SEQ ID NO: 5686 - protein, 144 aa, Methanobrevibacter ruminantium
MYKITQLSIFLENRRGKLYNTLNLLAKNDINIRALFLADTTEFGILRLVVQDPIKAKDILEENDHIVKMTPIIGAELDDTPGGLSTVLKIIKDEEIDLEYLYAFTHEKTEKAILLLQADDLDNLIGILTAYKVPLVPAEEVYNL

SEQ ID NO: 5687 - protein, 316 aa, Methanobrevibacter ruminantium
MVKVCIIGVTGVIGKNVAFKLARADTVDEIVFFTREKSLSKAKGEIYDMYDALAAEDIDCKLTPTSDYKDMAGSQIILITAGAPRKEGMERSDLAHTNAQIVYNYAKQIAIHAPDSIILIATNPVDVMTAVALEASGFNKKRVIGLGNHLDSLRLKTYFARRLDINSSEVHTRVVGEHGERMVPLLSSTTIGGIPLKYFIKDVKLDLPDIVKTLRNAGNTIISKKGATEYGPAYAISNLITTIITNIHKILTVSMYLEGEIADVEGVCLGVPVVLSKKGAAMIVPIHMNDYEVNKFQIAANHVRELTNEVLERLEK

SEQ ID NO: 5688 - protein, 834 aa, Methanobrevibacter ruminantium
MYKDAILVRGAKVHNLKNIDVDIPLGKIVAIAGVSGSGKSSLALGVLYAEGSRRYLEALSTYTRRRITQSEKANVESVQYVPAALALHQRPNVPNIRSTFGTSTELLNSLRLLYSRCGSYICPNGHILKPSLNVAREIELECDVCGERFYGLGAEEYAFNSDGACPNCSGTGIERVIDDSTLVPNENKTLEEGAVESWNMFGINWMYHVAGELGVRVDVPFKDLSDKEKEIVYKGPSVKRYINIPSKNGKLFELNAEYRNAHRAVEEALKNAKTEKGLTRINKYLKIRECSQCHGTRLNKRANSTLLGGINISQACQMTLEDIVKWIPNVINNLPKEMQDMANNIAEEFMDNAKILLDLGLSYISLDRPSNTLSTGELQRVQLARTLRNPTTGVLYVLDEPSIGLHPANVEGLIKVMNRLIEDGNSIILVDHDVRILRIADYLIELGPSAGSNGGKIIAEGTIDEINKNKESLISGFLSNEEKIIIRKKSDKNSIFKNGSIDISTCQIHNVKPMDISFPKGKLTVVSGVSGSGKTTLLLESLYPAVKSLINDENIPNNIKSIDAKNINKIELIDSVPIGKNVRSTVSTYSGVLDDLRKIFAKLDSSIERNLKASDFSYNTGSLRCPSCNGTGTISMDVQFLPDVEITCPDCNGLRYSDEAGEIMLGHLSISDIMALTIDEAIDELSNIEDESIDPLLKRAINKLAKLSNLGLGYLTIGESTPSLSGGEAQRLKLASEIGKSQRNSIFIFDEPSIGLHPLDVKVLLNVFQTLIDDGATIIVIEHDLDIIANADYIIDIGIDDKHMGGEILAKGTLEDILNSKDSLTANYLNEINL

SEQ ID NO: 5689 - protein, 165 aa, Methanobrevibacter ruminantium
MVNEKMEAALNAQLNAEVYSGYLYLSMAAYFEDVDLAGFANWMRVQAAEELEHGMKFYDYLIRRGASVTLTAIDAPQTEWESPLAAFEHVLEHEKMVTGLINDLVDLAIEEKDHATNNFLQWFVEEQVEEEENAMENLAKLKLAGDDNSLLYKLNEEFAGRGAAE

SEQ ID NO: 5690 - protein, 51 aa, Methanobrevibacter ruminantium
MVFVCDICGYEYNPEAGDPDNGIEPGTAFADLPDDWTCPLCGAEKADFVEE

SEQ ID NO: 5691 - protein, 52 aa, Methanobrevibacter ruminantium
MAQHRCTICGYVYDSETGEERRDLAAGTEWEDVPDDFTCPLCGAVKTMFRAQ

SEQ ID NO: 5692 - protein, 205 aa, Methanobrevibacter ruminantium
MISLKTIVINAGPKKRGFNAEMAKSALRGAQSVGAEVEFIDLYRLKFTGCLSCLICMRDDFESCKCFLRDDLSPLIDRILDADCLLIAAPIFFSNPSSHYMALLERLIFCIVSNKGENLFKGKVNVGLIYTFHYDKGYFEESVRPHFKHSEDILKMLNGEVEIYSAEYDSKKTYSTSFDGEISSEDECFTLNLEKTYEIGAKLSN

SEQ ID NO: 5693 - protein, 136 aa, Methanobrevibacter ruminantium
MFKNILVASDGSKCGDKAVDIAIDLASKYDARVAALYIMDFGLDLSYDDMDDAGGAVLDDITAKGKEKDVVVVEHIITADPIQDMETMIRKINPDIAIFGAFGKSTDKEDKIRYDKIGRVALNALKVAKVPVLLVK

SEQ ID NO: 5694 - protein, 573 aa, Methanobrevibacter ruminantium
MISIKNLSKSYKLENGEELPALKNINLEVEDGEILGIIGTSGSGKTTLLRILRGVEKFDEGEFTIGRYTIKPDSSQFYYNQVKKETAIHLQRSFGIWPESVLDNVVRKLYGAKYGDESGTDFEIAHDQFDKEAMEIIELVGLEHKADHLASVLSGGEKQRLIMARQLAKKPAVMLLDEPATMACPKTKQEILDAIKKINDELGITVILVSHLPEIHKFLADRVVLMEDGEIVKDGDVNEVVDEFLKDIEEPVDIDIESTDETIIKAIDIDKRFYLLKGKNVLHMKDVNLEVNRGNVLSLVGPSGAGKTVLLRMLGGLDYPDSGDVLFKLVNKEDGEEEIRWVNIENASLDRMEIRRNLGFMHQEFALMYYATIQSQLAVKLGYKRWDMVEEAKKRAKENGLPDILLDALYQLTDLPEREAKARLEQIGLDPTILDELFPKFPETQIKEEVKDLFEALDLPLDILPRRSYELSGGQKVRAMLALVLVSKPDILLLDEPFGDLDPKTLRIVANSLKRICKEFGTTLVMVSHNTDFIKELSNRAVFIDQGHLKDDSEDVDKLVDDFIGFCKADYLM

SEQ ID NO: 5695 - protein, 861 aa, Methanobrevibacter ruminantium
MNINLKKITFLCLVLVLIGLISFNSISANDLGTVLEDNDNNGLNDLNNDDFINSDVNSDSINKEAISNLKSLNSQDESTSSDSNNSASSNSNSSVASSSNSSASSNSANSNSSTSSNSANSNSSVSSNSTNSNSSASSNSTNSNSSASSNSTNSNANTNNSSSDASKTQTIKLSSQEESALNEFLNAIKTTTKGTIVLKNDLVLNQTISLNNNITIDGRNHSISSLDVTNMFKTFAKITLKNIVFTNYHEIENLRAILNSGELTVLNCQFNGFSYLTNGSAIYNSKKLTVQGTKFNNNYVNNSGGAIYSTGTLTINNSSFNKNHAGKNGGAIYSTLNLILNQSVFSNNSANESGGALYSKGSGLNIKYSRFNNNSASLNGGALYSSSNSTVISYSNFVSNFVEAYDKASNGGAAFIYYGSKIAYSNFTSNHCKTTLTNSSQKKSIQSMGGALFYYGGNHTLSFSNFNKNSVENDGGAVRIAKNVGKFTLNKCNFTNNNASYEDGGAISLATPNITISNSIFKNNFANEDGGAIDTFSLGSYKVNVLIKNCLFNSNTAFKAAGAIYLGVNTVQSIVNSNFTSNKATVAGAFYIESISVSISNCIFSSNKADNVSKKTIYNKQGKVVSHSGGAVFVKNGSTVTIKNSLFKSNKATSGGAITNHGKMVIDKCNFTSNSATNGGALYGGGKTSTIRNSIFYKNSATKTGGALFINEGNVNMKSSMIVSNTAKSYSVYSTVSITLNNNWWGNTLSIKDKSPKTLGLTNVKVSTWLHLKIRAKTTKLAKGKTTTLTIDLRYNNNDKLVSTAFNNPLTLTVSEGTLSSKKVNLKNGKATVKFKKTNSKTAVVKVKLLGKTARCTIKTK

SEQ ID NO: 5696 - protein, 351 aa, Methanobrevibacter ruminantium
MGMKNLILSKSDQFNHYKDKANQLKKENKELKLKNEELEFKNNELSPELEEGISLIIPSYKGENHIQPLLESLEKQTISKDLFEVIFIVNGEMDSTIDILTDFAKSNPDMNIIISYTSEGGVSNARNIGIRIAKREYIGFLDDDDFISDNYLKALYDHIAPNRVVLSNFIDIDEETGEEIGSRLVPYSMNREGIFNDVVVKLTNLSIITTAKIIPALAVKGTDFNPNLNNGVDVSYYARLYPKNHFEFYFVSKEEGAVYYRIRRSGSISRQETSYQFNVLDRLKVIDDINESYKQVDKSDELYVHFLKILFDAQTYFIGLYLDEYPQDREKVIEEVRKHNFEYFSYEKLEG

SEQ ID NO: 5697 - protein, 213 aa, Methanobrevibacter ruminantium
MSFSLESIGIKAGGRYETIYTTMNKAGEMDAAPIGLKYIGDYDVAARIFEGSKTLKNIQETGIFVVNITNDPSVFARSLYDNLKEEEFVKDDDIVYLKNADAYFIALVKSIEEMKPEHDHVNEGAKNYIIKAEPLKIIINRQGAKALNRGLFAFLESLVDYTRVDIIDDEKKEEYKKRFIENERVIQRVAEDDVKENMAILKEKMIEKGLDLE

SEQ ID NO: 5698 - protein, 372 aa, Methanobrevibacter ruminantium
MYNENVASKTKKILDSALDGPISVEDGNYLMNLKGSEIFPLLATADAIREKVVGDNVTFINNCNINFTNICKVRCGFCAFGKDADDPDAYHLSDEEILKKAEGAVRTGAREFTLMGGVLEDADIEYYEHLLKLLKSEYPDIEIHGFSPMMIKDAALKSEMPIEEAFKILKKAGLGTLPGTAAEILTDRSREIICPKKVTTQEWIDIIKTAHNAGITGSATMMYGHIETMEERVEHLDILRNIQLETGGFNEFIPMTFMHEYSPIFLEGQENLGATGTQDLKLYAVSRLMFHDIIPNIQVSWVKMGFRFAQVSLLAGANDLGGTLGGDELSEASGAPDGVDASIKDLSRLVRDLGRVPLERNSEYTEFYPIEL

SEQ ID NO: 5699 - protein, 178 aa, Methanobrevibacter ruminantium
MKRKNRGLLIGRMQPVHNGHIEVIKETLEEVDEIIIGIGSAQLSHELKDPFTAGERVLMMRNALIEEGIDLNKTYIIPIEDINRNKLWVSQVEMVSPPFKKVYSGNSLVQVLFSEEGYEVIAPELFDRKVLSGTEIRKRILMDEDWQSLVPKATVEIIEEINGVDRIKHLNKKEISEL

SEQ ID NO: 5700 - protein, 145 aa, Methanobrevibacter ruminantium
MVIKIVEKDDEYFTIGDLIEEIKKSDRVDEAGAIYSFEGIVRGEEENLTVDKLTLTLPDKEKGLEQIESIVETAKVKHGVFEISVIHFIGEFYTGDQLFLVVVLGPHRGETLEALTEVVERVKHEIDFKKEELSNQGTKIIMAGG

SEQ ID NO: 5701 - protein, 68 aa, Methanobrevibacter ruminantium
MAISARNGIKGTVESVKLGKVMASIKIKVEDPALITAVITKESAEDLDLAVGDDVSAIIKSTQVMVAK

SEQ ID NO: 5702 - protein, 68 aa, Methanobrevibacter ruminantium
MAISARNGLKGKIEDVKLGEVMASIKIAVDEPAVITAVITRESAEELSLAEGDEVSAVIKSTEIMVEK

SEQ ID NO: 5703 - protein, 68 aa, Methanobrevibacter ruminantium
MAISARNGIKGTVESVKLGEVMASIKIKVEDPALITAAITAESAEELELAVGDEVKAIIKSTEIMVAK

SEQ ID NO: 5704 - protein, 68 aa, Methanobrevibacter ruminantium
MAISARNGLKGKIEDVKLGAVMASIKIAVDEPAVITAVITRESAEELALAEGDEVSAVIKSTEIMVEK

SEQ ID NO: 5705 - protein, 68 aa, Methanobrevibacter ruminantium
MVISARNGLTGKIDSIKLGEVMASIKIAVDEPAIITAIITKESAEDLGLAEGDKVKAIIKSTNIMVEK

SEQ ID NO: 5706 - protein, 407 aa, Methanobrevibacter ruminantium
MSANKKFIRDSIHGNLPLNSFELEILDYPQLQRLRRVKQLGFIYLIYPGANHSRFEHSIGTMHLASKLADQLELNDDDKDLVRIAGLLHDAGHGPFSHVSEAVFDVPHEELTAFVVKNTSLADKLSEKFNTSEIIDIINGKGKLGPIISGELDMDRMDYLIRDSHYTGVAYGVIDTERIISNLKLERELILDIKGVQAAEAALVARYLMYPSVYQHHTTRIVNAMFRRCLRHMIHQDILNPKEMYKYDDADMISMCRNSEGFSRDIMERIDNRRLLKVAKSIPVNRFENPDKIFKISKEELLKAEEEISQDFNIDRNYLIINLPEYPRFDEMKTWVSFGDKLYHLNEISSIVGALSSARFNSPDICLYVPKEDLEKTKRIKLENYLDLPEEVRRYDTIHFNQSKLFD

SEQ ID NO: 5707 - protein, 184 aa, Methanobrevibacter ruminantium
MIIIAITGASGVIYGVELLKALKQLKIETGLLISNPAKIVIEYELEESVEEIKSLADHYFESEEIDSSVNSGSFKFDSAVIIPCSMKTVSAIANGYASNSITRLADVALKERRTLVLVPRETPLRDVHLENMLRISKEGGIILPAMPAFYHDPKDISDMTNFIVGKVLDVLKIDNDMFKRWEKE

SEQ ID NO: 5708 - protein, 187 aa, Methanobrevibacter ruminantium
MIKDFDFINTCDISGFIKEEIRAIALYKSDVSKEDIVLDINCGIGEISTEFSKLSKEVYCIDEDNTAIEFSKTNIEKHGDIDKVKFINQDPLSAIRSIIDFDIAIIKANDDNIGEIIEEIHNRINSKGRIIILTNILDFALMSVNKLDELLYNPTISQIDVSKGQQLNKGVKLISDNPMTMIYVKKR

SEQ ID NO: 5709 - protein, 243 aa, Methanobrevibacter ruminantium
MNNQNKYSCIVLAGGMSRRMGQDKGSMIIYNKPMILHILERLNHKINDAVIVLNNAERISIYRNLLNQYADNDIEENFDYELSFIEDEVKSKGPISGVMTGLKNIKTDYALVLPCDSPFISGEYIESMFGILDENPLADAIIPFHIKSNKDKFKDNEEFNFKNADEMSLEMKIQNSEPLHSIYKKDNLNNIKSLLDDDSLYVKSFIRSLKSPVFIEVDNKVLFDDDFKNLNKQEDIDNLKFKK

SEQ ID NO: 5710 - protein, 232 aa, Methanobrevibacter ruminantium
MDILNKFDIVPNDMELYETAFTHSSYASKHHLNDYERLEFLGDSVLNMLTSEFLQNMHPDFGEGKLTKLRANYVCQNALIVYSHEFGLDKCVKLNLEDNALTDNEVISITADVFESFLGAIYLDQGISKCKEFLTITVFPYIENEQIFFHDYKSTIKEYGDAIDKEITYELIEEHGAPHDKTFVMKILIDGVDFGHGVGKSKKEAEQVAACNAIKTLRLDHGQDVAYMRLYK

SEQ ID NO: 5711 - protein, 152 aa, Methanobrevibacter ruminantium
MLLNWCEEITNIDPSINFRATGGWLKTVTGLDKSVLNGYSLVGEFVKSGDYKHEYSDGLYLDCNKEGKKSKPKQDFRLFRLKNGKLTLIDQVYDGKKNWACEFWESVSEELNPNFRESEADKIISLILDKTGKDKKLLREVQSQLDLVISEI

SEQ ID NO: 5712 - protein, 170 aa, Methanobrevibacter ruminantium
MTKSLILYFSRAGENYTSQGIKNIEIGNTEVIANYIKEFTEADMFKMEPLNDYPEDYMQCTEVAQKELNDDARPELKEYIEDISEYDMIYLGFPNWWNTMPMPVWTQLEKLDFDGKTIKPFVTHEGSGFGKSEKDIKNLCPGVKLAKGLSIRGSSVEDSKKKVKHWVKKG

SEQ ID NO: 5713 - protein, 61 aa, Methanobrevibacter ruminantium
MKGTPSMGKKNKKTHIRCRRCGKNSYHVRKKVCASCGFGRSSRLRSYSWQNKKSTTRQRLV

SEQ ID NO: 5714 - protein, 77 aa, Methanobrevibacter ruminantium
MSGQQNVQRPLDALGKAVNSPVLIKLKGEREFRGILKSFDLHMNLVLDDAEELEKGEVLRRLGTVLIRGDNIVYISP

SEQ ID NO: 5715 - protein, 234 aa, Methanobrevibacter ruminantium
MVELRVNAGNVKNPNVHKIGIIALGSHLENHGPALPIDTDAKIASHIAFQASLESGAKFLGVIYPAHELKEINHGIHVSLEDLTDEIVKVLKSAKKFLRISSVIIVNGHGGNLPIVTTLYDIEERTGLLITLNSKIIESEGPHGGSGELSMAKALGIIDESQVENQTNLEEYGEVGLYMFGEARRNDPNIEEGALDVEENGVYVDDVYGQELLKLAINSVLLDVEKQLDSHYGY

SEQ ID NO: 5716 - protein, 181 aa, Methanobrevibacter ruminantium
MIKLIKIIDFFNLNLLNGFKVLILKIKKRYFLKKKKVKEIKSELGDYGSFINNKDTLEMLEAEDYNFILVNGEPYIIIINDKPYPTLKAALNMELDSKVVVVDMGAVRFVTKGADIMSPGIVDADESIVPDDIVIIVEETHNKPLAIGISLITGPEMVENSEGKAIKSIHYVGDAIWNLEV

SEQ ID NO: 5717 - protein, 495 aa, Methanobrevibacter ruminantium
MSDKNEWGSNLSFVLAMVGSAVGLGNIWRYPYVLYSNGGGAFYIPYIVAILLMGIPFLILEYGVGYNFKSSFPKAIRKISSKAEYLGWLLPTSVFIIMIYYSCILGWDGIYVILSFFKGWGADPNTFFASTLLQSSESVSGITNFIPVIAIVMLISWGIVWYISHKDLEEGLGRVSKILVPLLFIIMIVIVLFSLTLPGAMIGLNELFSPDWNLLLDFNIWMAAFGQIIFSLSLGMSIAFTYASYTGKEGDIITNTLAITFANCAFENFCALGVFSILGYMSLQSGTAVADLVTQGTGLVFVAYPTVLNVLGQYAYVIGPLFFITVYLAGLTSILSTIEPLSFSIQNKFTWSRKKTMTVLCLIGAVLSMMYATAYGGTLLGYVDAYINQIAILFGVILECIVFAWIFKCENIIPILNERSKTIKLGKWWVVIVKYILPLFITIVWIGGVLDTINDGSTDQLIVFGILTVILLGLTALFTHLPATNEEWDETEYRL

SEQ ID NO: 5718 - protein, 149 aa, Methanobrevibacter ruminantium
MVNDEKSLSRMSKTDYYLAIAFAVSKRSTCLKRHYGAVIVNNDEIISTGYNGNPRGEENCCDRGSCKRMDVPSNSGDYSDCFSVHAEQNAMISASRNEMIGATIYLAGEMFKDDSWFEIEDAEPCPICFRMIKNSGVKKIVSKGVVIDL

SEQ ID NO: 5719 - protein, 807 aa, Methanobrevibacter ruminantium
MEGEQNNLRPYIEDFFRDLQLYDDYKNGHHYKDLLEGSIILFLEKENTYTAYEIYENFFMIYQITDEDKSHGHKTESIDISESNSLLKLVNVMKDYEENTGDLIEKQRDHFIHSVNVFILGLAIYASNHKYRNAFEAYVTDSPYKKYYKTADGEFSAEEFLYRWGIASLFHDIGYPVEIIGKQLSKFINDSSQSISQKYKVNTAVNFKNFNELNSIIKLDPKFPIIYRMDYPETNFIDVYKPTNLMAHQIFTDLYVDSDIRAIDEFDELNEYLYKLVVHLDGFVDYMTSNNFIDHGFFSSIFVLNSYGAIMQKHYLNDDEEKFDYYINKYAYFFYPVLNSATSILLHNYFRGTLNEKESKTDEFNLGKLEPMQNPLAFLLIFCDELQEWNRRPIGLKDKAKNHVHDIKININENQVLVDYIVKNSALGLNFSENKEELINNLLDVTSIFSNGLKVNITPYLDEKYPLEDISLSEVETPRILLRHVEEIARASHNRYNEIGKAHGNPDEPYESLSPKRKLSSIRQTKEFPMKLNLIGCEMVSENDPRDEYSLSDDELDFLAEREHEAWCREKRNVGYISHHDAFKRGLIDDAEYDRLCRTNEEGCETNKHNKIESPERNLYVHSNIIPYDELNQYSKNKDRRPFEDLPDNLKLIKNNPLKIVENRYKLFTVAMHNEYMDYIAGKKEVPEFKDLPFELQQINYKQTYLIAKYLNEIGYEIVEKDDERPAVTKFENNKETGYLAGREHNAWYLRKLNDGCTNGKNKDGTDNPRINPWDELDYSLKKPNMNTFKKLPKLCLKADLKIIKNK

SEQ ID NO: 5720 - protein, 264 aa, Methanobrevibacter ruminantium
MNDKLIELPNYGRLMVVSDLHGNLNDYEKYIDLWDCQDPDFHIVFLGDLIHSPYFNDKSVELLDDVIEKDKKYSNFHVLLGNHEWAHIVHRDIFKNGENIREDFEYLISYKKGTIEPAITEYIRFFKSMPFFVKTENGLFLSHAGPSRKVKSIEDFNGIFDGDYHNPILDDFLWLRPKRNLYGRRNILTDSNLYDEGDIFNFLNIVGANCMVVGHSPVDGYKQYGNQLIISSSFQTEDKVYLDIDLSKEIKHMRDLLDCIRYFD

SEQ ID NO: 5721 - protein, 119 aa, Methanobrevibacter ruminantium
MIDSFRYALNGIAVSIKDERNLKIQMIVMMLVIIAGFLLKISRTEWIICIILFALVISAEMINTAIENAIDYTREMTVDKDNDLARIAKDVSAGAVLVIAIASAIVGLIIFIPKVLLLL

SEQ ID NO: 5722 - protein, 84 aa, Methanobrevibacter ruminantium
MEEIIQTLKEIEKENNIEILYAIESGSRAWGFSNEESDYDIRFIFKRPIKDYISLKNNKDALDITIDDYDIVGWDIKKDFKPPL

SEQ ID NO: 5723 - protein, 147 aa, Methanobrevibacter ruminantium
MGNCDFLNELPDFDKDVLKYHYASIAFNVWKEALDREEMDRKSTKRYLYCIRCILAWKSADLGKDSSISIFELMEDSEINDDLKSDINTLIDYYKSLCKNELDEELIDRLSIWIDDTVKNIKDHYPKKEKKDMSLYDDVLFKVLEIE

SEQ ID NO: 5724 - protein, 277 aa, Methanobrevibacter ruminantium
MGFKEDNKDKYLDPFKRVTVDVGSSFNRINVSADVIGNRIRITVPKDKSGNLTGTIVENIALENSTWIFEPVADEIMEDRIDRKLSPRKYMDLSKFDFERGFLPKEILDDLVYPINYRKDYSPFAKKVLEHPNDEIRKIALGYIDDEDVLASIILFSKDKDLSLFVLEHIKDKSILLDIVRNDFNYYYFTGAVDIFYDMDKLPLKLFDLDIRKAALERIDDKELLFDLAFDCEEWFKPIDMIKDNNLLSKKELDSLNLYAQNREIREIIKSRLKNEL

SEQ ID NO: 5725 - protein, 579 aa, Methanobrevibacter ruminantium
MCGIVGCILKDKQKSVAPILLECVENLDYRGYDSVGIATFDGSIHVKKDKGKIPEVDEKLDLADMPGNFGIAHVRWPSTGIASKENAHPQLDESDSIAVVHNGSLKNYDELKGELIADGFKFKSTTDTEVIPHLIRKYMNEGLDLEHAFRKTIERLDGSYAIAVISKEESNKILATRYQSPLKIGISDDAYFISSDIPAIINYTRKIILPAEGEMVILDEDGVHVHDEDGNEIEKEILVIPWTAQMASKGDHPYYMIKEILEQPDAVEFTLGERENIQRIVDDLGDIKNICFVACGTSYHASLTGKYLLQHLAKIKTDVVLASEFKYTADTLDKDTLVVFISQSGETLDSMNALRIAKETSPTLAIVNNIGSSMTEEAKYTIITQAGPEKGVAATKTYIAQLTAIYLFAGLLANDEKLINELYNVPGYIREVLKKSSEIEVLSKRYSFADDLFYLGRGFSYPIALEGALKLKEISLIHAEGYASGELKHGPLALINHKIPVIVILPPGSDYEDTMVNLEEVKARKAIILSICAEGDAKAECKSRDVFTVNSKVSETIAPLVYTVPLQLLAYYVTLEKVA

SEQ ID NO: 5726 - protein, 1034 aa, Methanobrevibacter ruminantium
MIANSPKEIKSRLIEIYNEELLNLNIFIKNRDELKGNKDLRYLLLERIKEEFDYLDDEELFILLSFYQTIPSFYRKTFNKILEASIDKNYIEIQDELLKLVEIIKEEISNIDGAIEEQNLKIEEKLLKSLYSKDNQNGENSDINHLNEGKSLDINNLTDEEILELYNISDEEFSQLQDYYEWEIFESDFLNEEILEDYDESAFLDIAYNHKDAEVRGFALGMVLKPYVWLDFLFNDPDLFVRKSALFYLFKERYLNDIEDIDYLGKIPIEIDFNLDYSDAIDDFKIDESLFNRHDKIIISEISIKDDDLIVKTDPKNSYEHAVSKIRSQDALKAIANYHNQWSVRYIAVNKITDIDYLYDIALNGFNKDAKPRHGILYYPGEISEGDVLKSLLNRLLRLKNLSDEDSQSFLKELFYKSKDSIIKRYCLSKIEDDVFLVNLANTEANPSFARVCLDTIKDEDYLILLSIAIITNPRFKGKNQDLYDGLCEGGIGDEDSFIRESQFDEIDYHNIRAYASKILIALPRKTLNETLESFSLKLDIPNLKEHRVFKPIINKRITDILGDLAKIDESPLVRSIAVLGLEDTNDLMSIALDDEDDKVSFNAIKKLNDDNFIEYYLKETNRKAYYLVEGNLVKDQSLLKKIALNDSWGPTRSEAVRNIKDEDLLIGIAKNDPEAIVRREAVLKIKNQSALIDIAYEDEDDLVRDFAISNIDDEDVLEDLIYKNEDSNILRTILSKLDNEEIIKDFAYNHPRGIVRNAAISNIDDNRVLVDIAKTDEDWTVRRNIIARLVGKFIKSSVDVYEDKYLNHLKRREYYNSLIKGDNEKFKSENKVKSSENEKNEYADASSIVLYEDDEPYTLQDLLVDRALNDESEKVRAFVVSYIDDEYFLFYIVSNDKSIKVQLSAIDGIKRNELLAKIFIKSKNHHVYRKAISRIRYEYILLKLVCLKNYYGELWPKRQMAEARMEELGFKSPLIKKEDNRKNKFFRPIFDIRDYQRDLELLDRLDKEYKNRSNNSDDSDGSSDDFQFKRIVF

SEQ ID NO: 5727 - protein, 153 aa, Methanobrevibacter ruminantium
MKLMFVCTGNTCRSVMAEYLFKTMISGDIEISSAGIMAKDGSSPSLNTIDVCKKHGLDVSNHKATNVKRSNIKDMDLVLTLEESHRNTLLNMYPNLSIYTIKEFNDVDYVYDIEDPYNQSLEVYEATFNEIKESLEKIDPDKLLSYGFNVEKD

SEQ ID NO: 5728 - protein, 126 aa, Methanobrevibacter ruminantium
MIMDNMWIEALKNKYRFEFKGLINVEDLFDLKLEDLDYIYKNLKRDENDLQVDSLLDANKNPLKGELDCKINIVKSIFQMKVAEIEKAKIAMANKAQKEKILAIIENKQDQELSEKSIEELRKNLR

SEQ ID NO: 5729 - protein, 670 aa, Methanobrevibacter ruminantium
MRDRLFNHFNENMAPRKLFIVDRDWEELWNMYLDGFPREMNPIYRERRELDCSACRSFFKRMANVVALDEDTGDFISLFAGETNGEKEVFRALDEYVKSAKIKDVFMSDTQRVGIESNHEMLDSGSVHTWYHFYVDVPSEYVGNLSQKAIYRNNRIVLENSTQRISQDAVDTVLELIASNSLYRGDQWEDALKSFKDYLKEYEANDMDEDLFYWIKSIELGSLLVRIKNHSIGVLLMDVTQGVPLDEAVSNYERIVAPTNYQRPKPIFSKRMLEDAQEKINELGFGESIYRRYANMADLSINDVLFANRDYTSEIQDNQNFFDKLKELTVNRARNFDKVQEISLEDFVESILPTALEVELYLSYDLSNNFMSLIAPVNRDAPSMFKWDNPFSWAYKNNIADSLMKERVKALGGDVDVDLRFTIQWNDNEWDKNDLDAHCTTPEGEEIYFSHMRSSKTGGWLDVDIINPEKNVPAVENIQFKDRNQMIPGDYLFRVHQYTYRGGDDGFKAEIEFDGRIFNFIYPMRLYQNEYVDVAKVSLGEDGNFTLNSFLDNQTASAKEWNLNYNRFVPVSLICYSPNYWGDNAVGNKHIFFILKDCLNDGRPNPWFNEYLVSELRDHRKVTEALATIAKVEESDEQLSGIGFSFTQKNKVTLKVKSENIERVFNVVIG

SEQ ID NO: 5730 - protein, 394 aa, Methanobrevibacter ruminantium
MGTLPLGNDNDLDDSQFYNRAEEISFISENLELTKKGSTPTILLTGIRGVGKTALMKKLKKDFQKDGYIVVYMELSGMNKYKKDSLDRFCFMKLFYESIINAYKESNILSINTQILKYIKTRNFKIDKISSFEKIPIPIITTEEDYSKFAGFVMDLPQMIYDDFKDEINGVLIFMDEFQILKQLDEDVNGFLWYIRSIIQSQKNIGYIFSGSMSLKDDLIADIAGQKGAFGGRILNYEIKRFSYETTKNYLNEKADYLNFTEEGFERFYHCTKGNLYYVNSFARLLPPNIELNEEKVNSEFDKSLPYLVIHLSSEWYKLSNQEQRIVIALIEGPLKRIEIANKLQVTSGAIGSSLKTLQNKMLIEMDNNKYQIYDSIFKAWLKKEYREKGDYPF

SEQ ID NO: 5731 - protein, 1479 aa, Methanobrevibacter ruminantium
MGFFDKLKNALESGNKSHDKRESQKNEAISDNPRGDSLSDNKNRNSLPDNQNRNSSDNNNVRNFKYLDDLIHSGQKDIVLDCDIVLADSEIESYKRGIDIGGSNITLDGNGHVVDGRNKAEIFKVSSKNLAIKNLRIENGYSELDSIIDVFSKGELHLSNCSFFKNSNESHRIFGDNLVCIGSIIRNMGELTIHHCHIRNNSSRGQGGTIKNTGTLNISDSIFEYNLSLEDGGAIFNEGLLKLSDSRFEFNHSNKRGGAIHNEFNGETIIENSSFDKNGGRKSANDISNRFNLVLKDMHSDLKIDNEWTVFIEKGKSFDIDNKGGIIEFAPLNNDEKSFTFLKELLDGNDSQIDLMHDIKLDIANDEQLYFPDGINFNRDNLIFNGNGHTIDALRMRNIFTLAGNDIIFRNVNLENGFSKLSNGAAISMKEGFLKIYEVEFRDNAAYNGGAISIKDASVSIDSSIFRHNAANAIKFETGGGAIYNENGSLSIIDTLFISNSSLWGEGGAILNKSGALSLNNCDFTDNRSVKNGNDISNYDSLRICKCSFESDKANNSNSDSGEITNSNLGSKINNSNSDSGEISIFNNNLSKLYDSNFNHSIIINKGLLKIDKDFPIKSAQIKNSGKLKAYNFNDKQIEGIDINNEDGGKLVFVIDGVEVLNTVEISQKWIEIKIFISSTFKDMHSERDYLITEVFPELSKWCKERRILLTEVDLRWGITREDSRSGNSINICLQYIDKCRPFFICFLGQRRGRIPEKGERKVTEETFINFPKVSNLVGHLSVTEMEIEHATTLPLFKLLENDFDNEHAKRALFFLRENPFEDVDLSPAQRDIYLNRKPEDDEKLSQLKDLIREKCIFFDYSCIWDENMELYELSSSKGGLTDFTCNGRPLSEVIIAEVKKQIENEFPDYKPVKTDDIFLDDAMLQNLEIMSISHDFVGKQKEIDYINEFIESDNERLLLVKGAEGIGKNTLLSRVHALLNEKGISSIMRISNATAKSNSSSNLSLSIGSEIGLFNGEEALYKGVKHALDDEFLKQLSDSGVRVLIISNADKLNDRLVFNEIPDNLHIILSCGESYEIAILHKELIIEGFEDISEREQLINEYLNHILKNLNQAQKELIISNPASKSPLFLKILLNELKNFGSYENLVEKIEGFGDSTLSAFEELLRALENDASFANGFARDTLLLLIYSKHGLNEEELVFGLESLSHIDARSKLRLFLYRMGDYILAIEDRYFIKFDEFKKAILGLYGDCEQRIREILVEIYKNNILKSPDSLANGSDEILYNLELLKDYDGIMNVLNDDRLINGIHPSCIFLGYKYGKFYGPSKEYLGFTMIDSKDKFEFFSQIALVLAKKSADSLKYAMKAYPHPHTQWPRKFRNENDSESFMKYQDAFYAIPMFIEAACRYANKAIKDEEDLDKLREFKSEFDKRINGVDSFLNYMSNFGSSQLDLGYKVEALADDAIFSLDNLNEYYNGGVSEK

SEQ ID NO: 5732 - protein, 731 aa, Methanobrevibacter ruminantium
MSRRDKMIAKIKELMYKPEYIRNIGICAHIDHGKTTLSDNLLAGAGLISEDLAGEALGMDTKKDEQERGITIDAANASMVQEYEGEQYLINLIDTPGHVDFGGDVTRAMRAVDGAVVVVCAVDGVMPQTETVLKQALRENVKPVLFINKVDRLINELKLGPEELLKQLTSIIVEVNALIKSLAPKDKKNEWMVNVEEGSVAFGSAFKNWAINIPKMQETKFTFKDIIDYCNEGKEDELKQLLPLTEVLLNMVVKHLPSPNVAQVYRVPKIWDGDIESEVGQTMIKMSPDGPLAGMITNVAVDKHAGIVATCRIYGGTLEKSSEIYLVGSHGKARVQQAGIFMGAETIDTGKVPVGNIAYLTGVKGASAGETICSADCIIDEFEPIDHISEPVVTVAVEAKNTKDLPKLIEVLRQVSKEDPTIKVEINETTGEQLISGMGELHLEVVTNRIINDKKLEILVSEPIIVYKESVLGHSPVIEGKSPNKHNRFYIDVQPLDKPLYDALIEGDLKEGRIKTKETAQDFIELGMDKEEARRVWDVYNRSMFINMTRGIQYLDEVKELLLEGFEAALKDGPLANEEAVGLKFILSDAKLHEDAVHRGPAQVLPAIKKAIYASIMSANPCLLEPIQKVFISAPLEYMGNCNKDIQNRRGRIIGQETKGVIAEMDFEVPIAKMFGFAGDIRSATGGKGDFSTEMKGFETLPIYLQDDIVRQIRTRKGLSPEPYGPEHYSA

SEQ ID NO: 5733 - protein, 661 aa, Methanobrevibacter ruminantium
MTIPVMYDLDEERLRALNKDEKKEDRLFSISLLNPFYPLDSLVTDEEEDLDIRIAALDCLDLFGVTLYHIDIDSVPKELALAVIEMLDDGSKLKEIALNHNDIDYRIKALENKHLTDEDALKYIIENESAPKLRSLAACHPCLNDSKFLEGLALNDDDEDVRAAAVSNYSTKGVDVLKKVISDDEDIVRIPALKNLVFKYNLFNPSLNKKFNFKKKFHDMSWHMISSIDDYVPKEMDNDEGIRDLIDFELLDQIYISSANECYNELIDKLKIFFEKALYHYEIHNPFDESKLENDSYRKKMYDKLKLAEGDQRSFYLYQMAYDGGHAYLNFYLDYLNGLDYDSYLGDSDSSNEDSDLKKLFNESNDSYSLDKEIEESYFIDLAYADSNCEMVRLAIEAISDNSVLFDFAKNGKTSDIRKTAIKRLTDSAYLLDLAVNQIDKDIREANFYDDDWICDYISDNSNDYFDIFNTYDFYSHDLEHYERLFDNRLDSFYYEKVAWNYYRNTISFCLLERIDNYLDLVYAIKNTRSFVLRDLVIYKIENPLFLTDIALNAIDERIRYTAFGRIESKAFLKYVYLNSNDFRIKLLYLSKTTDNAILEEAFLNEENDVLRKYVLDNSNFKISPKVIEHCINEESVISDYAENKFAEQFVNYRLMDKKFL

SEQ ID NO: 5734 - protein, 123 aa, Methanobrevibacter ruminantium
MGFIMIINKLFNMNEDNEIYLVIILVLAPLIFSIIDFTSCLVDHGVITWFNCYTFKTYICFIPILLICSIIAKVIWREKSLKDVLEIAFAPLFFWLIEIGFALFVSLFIGVFIDMIIGIEAMV

SEQ ID NO: 5735 - protein, 158 aa, Methanobrevibacter ruminantium
MANWCENKLTVKGTSEELVKLIEEHVIDGELSYKTFATEHRLFGENHFDLDEILNERISEIVFWFSTKWSPVPAEKVCEEINQTYPTLKAELSFFSAESGFWGQYSDYGGEEYYELKEEDIEKTSEEFFKFGLEEGFLEKTESGKYAFTHDVPTFRLL

SEQ ID NO: 5736 - protein, 1587 aa, Methanobrevibacter ruminantium
MSLMEWKYATIFISSSFIDMHAERDYLIKKVFPELEEWCEEHKIHLSNIDLRWGVPEEISNNKSTIEKCLINIDESRPFFLCFLAQRRGWIPDFAEDISDDTFKRYEEIAAYSGLSATEMEIEHALLSPLKDFLNDDDELPENLRTRHSLFFIRDKSSLDEITDAQKRVYTNYGLVDAEHGEFIPGEYDSEGNCIREPKIIDDLSLKTKEIIEDADNSSQKIVDRIIKMKGDCDLPEDEKKVHIEITKYTGDWNRNLKIPEIEALTNKDKDDPEKKVRRYNDYEWMGRLSNFKEVKEDYKDISLIKKSENIESKIGRPLKDVIIEQMKRQLELEFPENFKEDEDLTEEERILQNELNQQDNFAYLNSQGYIPIKKDTDILSKYIEDADESRICLVSSEAGFGKTMLLANLAIQLEKKYTNKYDETRPNQKAIYKRFCGASNLSSKAFSLWDTIIQEAGLTEDDDFKIPKNLDELKKSIDKILDKISQKGESVIIIDAVNQMPDGLEMLKWLPAPESSNLKIIISCKEDNEDKELCLESLKFIKDRNAICPYFEDGHEDELGGEYKNYSFELKALEDCKNEKTKIINAYLKNYLKELSNKDIETICSFDASKNPLFLKVLLAELRVFASFEKLRDEIQEFIKDEFADESKLTSEDSSNHSDDSEGSKKQSQGSPKTAFNHVLERLEHDEDLVEGEALVPLIFALLANARVGLSRDEMASIIKAAKPDLDDEYIRDTINLNLRQVKPFMARKEGRDDFFYESFKLAAQERYAPKNIPKNERLNEYFKDKEDSDKLINVNALLADYFLKDALGQDSADSNDKTLDLSTIDGFNFKGENIRSYNELPYHANESRDFDRLKDILSSYSFIKNKINLSDINNLIVDYQFKDFEDAQHPFIKDEEDHSIVLIGRALELSAPILSDDKSELPAQLYGRMVDLRDDEVISPLIDEIEADYEMVLKPKSNSLYSPKSSIIKRPKVNGTKSTSSIEITDDKLLISANEDGTLNLFDLESNDLEILEEPHDSKVIRIIPTDEGQNMLMASSNGQINKWDINNRSIFKDDDNIYPKINANITDIYLSGTYNKIYASSHEGIFTIDLDTKELCEEKEIEHKKYNQILVPRRNEAILVCDEKEVDGWDVYEKRKAYNRQHQQNPAGEESSTQLDSSEEIRFMGLNKRFLTLISENGQMKFWNTLKNSGGGESIDEAQVCSPHDKFAQAITLEKEDQIITISDMGVLRVWNIPRPRQPKFEIAKIEGSDIPMDIQTGIKSPTAIDYFTDGDERWVIVANENNDISVIDLNKKVEANKETKHSESVLSIKIDGNHMITASDNGEIFAWDLNKEECINKFASEFRVNSISYDRDKSQLLLSGVKKEKDGNKIYKIASRDATDMWEPIKVQDDGSDSKKSKKLIDLNADDRDNPNPVIDIAQISDGMVFIEEKKISMPDYEAGFDKKATSLATQFDSNLAFVGFEDGSISSYPRETEFDAGINSPVVKIRVSGDRLVAGFKDGSVVIFDLSGTKTASFKAHDKAITNIYLDESRLITISEDKTLKFWKNDECTYTYFLDIFATSVSVNDGKLILGDTLGNLRFFEL

SEQ ID NO: 5737 - protein, 761 aa, Methanobrevibacter ruminantium
MMRQIRRNTIDFAIDLGTSDSVIACFNGQESEIIKNHSTGEDHTPSAVYIDSLGEIHVGRIAKEAVLKCPSNATSEFKLNMGFPIPFLFESSQIKMYPEQLSAELLKDLRKSIYHQTNQNIEEIVITVPANSNPLKTKATKEAAELAGFKSVYLILEPVAAAIAYGLRAKKEDTGIWMIYDLGGGTFDVSLVKANGQEIEKLATSGEDNLGGKLFDWKIVDDYFTPKIIDDLNLTDFRRDNPNYLKVFSILKNEAEKAKIALSGSDNDIKDYELSIEKLIEIGDKSYDFNYILGKEDLMNIMKPFLKITFNHCYEVLEESNLSIDDVEKIILVGGSTLSSILRDSLKDEFDRPLEYGINPLTVVAQGASIYAGTIEKQFIECENHRFALILDYEKIGFKDNIDINGKVFALDEKYSFLDYSIEITGSNGEIIYIEDSKTGNPTERIDLDIDGNFRLNLNVKDSYNEFLINIYDGNGDLVELDENSPNSIHYKKALNPGYPILSSSISLYLDEDSSLILKNSEDLIDLDTENDFIIEYSKRFNSSYPIASKGDIIPMSRKEILHTSKIIKKGDGDSFIKFSFYFGELILANYNTLLGQIVITGNDIIDDLPKDSEIELNININESNMIDFEVFIPYLRQSFNNSFSFNNYNNYNGFIDNYDNLKSKHDEIIKKYNKIRDFARDEDKKELFLKNGIYQSIERVYENIEEIEEKEIIDYLDILVDMARYDKIAVYPSLEYLNYLDDVLDECKFFLTIADVELSI

SEQ ID NO: 5738 - protein, 552 aa, Methanobrevibacter ruminantium
MVLLNYNQTKDMIEDYFHGQYEVLKFLGEGSFAQVFLVKQNFLNDKRAMKIIKEPLSNTKNIDHIFHEVQIASQLHHENILDIYDAGLIGDIAYFVLEYVSGGDLEDYRTSYLKANRPIPIHISLDIIKQILMGLGTLHSSNPIIIHRDLKTKNILMNYGDERLIVKISDFGFARELSSNADDFEVGGTKPYMAPECFNGVFSTRSDVYAVGVIFYLLLAGEFPYRLSDYVIGDIVDGKPWKIDLKPPSHFNQNVPKFVDKLVLKALDVNPNKRHIDAKDFENDLDKAIEKFKEYSYYKEYLNELKGLEELDELDNLGKLGELGEFGELKELEESSRIAELKESSKLGESNKDSKDQDHILNDNILEAFRLAKTEDGLDEASSILEKEVLKDYEIRKTYGKTLRLWKGDYPDAKLISEAFTVTLKGENYKLAIDLLREAFAYNPILKDTYGYYIDLWSIFIDLNKNKDFIISINRLENLMDRNDKIRDIYKDSIDTLKSYDEDRILNEAIDLADRGNLIDASKLLELLVVYDDEIRKDYAYKLSLWKQDLSM

SEQ ID NO: 5739 - protein, 381 aa, Methanobrevibacter ruminantium
MKKKLEYIQTEKIKNKNYEFYRNIENNKTVIFRKTKFGKREKVNIIDSDDLTEQIINLSYNKSSRNKKIQFPYDKICKFVFKNNFQACNIVFKLGIDFNYFLDTEVINQIFESTRSDIVICAKEEIIYIIEFQKDKLKKKDKIRFGNYQTNLHNYYHGRKVIVFVISFDPNEELGDIPYGYDKEYGFTMHVKSFNELDAEETINIINKRIRTRAKINFIDIVLLHFLPFMKSHRSQEELLRIAVDLTNQIRTLNEDKILELKITQTVLAQEILSEEEFEELFKVIKMEDTGLVEEVRQLYWEHKIRNDMNELNQMRNELNERSNQLNERSNQLNERSNELKEEGKIEVAINLLKLKQPFDLIAKATELSESTIRSLQKTIL

SEQ ID NO: 5740 - protein, 267 aa, Methanobrevibacter ruminantium
MSEEEIDYTEFIDFEDSNLISFKLAAINNKVRFSILEILRDFQKLNMNKDKTFKKDPYYSRELNEILLKKYDINISLQMLGQHMKQLLTAGLIEEVPLKKEVPNKIGARNVKGYILKPDAFEELFLEINFLSDELLSFFDLYKINQKFHDEDYCILTIFNGADKGKTFKVHKDDTVLIGRKADFSKGDLASFAILLDNSYTAVSNVGKPHLKLFYKDDSWCILDEGSTNGTFIGQNEVATGRITPLKKNSFLKLSRGEGGAVIYCSF

SEQ ID NO: 5741 - protein, 256 aa, Methanobrevibacter ruminantium
MNIRPSYSYASILNVFIEEKYKDNLGCFRNTNFYDVLDFQSDDSSFYYDMAFFSFYYGDYKSSFFLSQKAMILGHDEGDLKLLRLAAFNELSPIKKLLFDSIKEEFSNIIKEDDEELFLFYLEDMHYLEIALNQKDINVEEDFLNLISNLYIQVKYMDYVDYYAMINLYQFFYINKFYSEALLLINEILARNLNVFNLNRKLDVLFNINDIPGAYDVYQDIRLLDPNYFDSSPNREEMYLEVFTEHFFKNSLGKLE

SEQ ID NO: 5742 - protein, 238 aa, Methanobrevibacter ruminantium
MTNLELNILDLSLNELLRTVNKTESILKDQYDEIKEFRDIILTARNLRFDNGNDATIFLAGSGRSGFVAKFFAMRLMHLGFHVYVFGETLVPPVHDGDIILFISKSGGENAVTDSIESTKLENIKKSKSSPSKNNMIFENVKILSVCGSFDCYLASHSDAKIVIEAERDRKSTKEESERFDSLGFNSNELVIMGTGFEDSALLILDALVVEMMNNLGLCEEDLENNHENINRPKVSKK

SEQ ID NO: 5743 - protein, 370 aa, Methanobrevibacter ruminantium
MFELSGKYNTAKVFADNIDNDSVSQIIQFLNQPIAKDQSIRMMPDVHAGSNCVIGTTMTITDKAVPNLVGSDIGCGMETVYLDTDEIDFNRFDEIVRKYVPHGYDIRENPHPYIKKLRLTEMRCYFDLEAGSQGNFSLGTLGGGNHFIEVGKDKEENLVLVVHTGSRRIGADVCEYYQNQALKSFKRMHKTATNKELIYCEGQLFEDYIHDMKIMQEFASWNRKAIIETILSHYGMDYTDSFTTIHNYIDTDHNQMILRKGAVSAYKGEKLLIPINMREGSLICKGKGNKDWNCSAPHGAGRLMSRREAKDKISLKEYENAMKGIFTNSVNRGTIDESPMAYKPIEAIVNNIQDTVEIIDIIKPVYNFKA

SEQ ID NO: 5744 - protein, 244 aa, Methanobrevibacter ruminantium
MEVEGDKMNFKEFEELINSGVKEISLNEDISLEDKTQAPIEIKTDGLVIDGKNHIIDGNNKLPILYIKASNITLKNIIFKNGFSEDYSGAITNYSNDLKVEHCQFIDNSTENAGDLYGGAIYNGENSKLTVEKSIFKENDSDFGGAIFIDSDSTVKINNSVFELNISEFDGGAIYNKGELIIDKSIFNQNMAFKGGAIFNENSLTINDSHFKNNKASDGNDIQTENEDISISNSLCEFINNDNY

SEQ ID NO: 5745 - protein, 370 aa, Methanobrevibacter ruminantium
MNFTEFEELLGGEAKEISLYEDVILESDEDYRRGIELKRDGLVIDGKGHVIDAMERAKAFHIQGDNITIKNLKFKNAVSHKGNGGGAIENVGKELSIKNSHFFNNCSLGPLGGGAICSFEDMNINDCIFESNTSVRSDGGAIYLETFFKPNVTVIMKNCSFKNNYADGGFKDFGSNAGAIFNKNANLYLFDCNFEDNGVVSAYDSSSESIQNKNGIITMDNCCFNTRESHSIFNLGFLLINSSRFYHHPENLEIQGSIFNRGFVGLLYGERNQYKVELDGKVLDSSDIGDLINEYKKTYNLDTKEVGFIFKKNIIESINDLSSDNFNLEDFNLGDINLSDYKDDEYLMDLLKNKIDLIYSGDFEDSDESI

SEQ ID NO: 5746 - protein, 136 aa, Methanobrevibacter ruminantium
MLYYRGAGWADWDLDNFGSRISYIDDFPFNILKALLSYFETGDEQSVEFNAEGWFYTFKFSSDVRVGERVIYESTIDFANDFICEIEERMGLWAFFPSRRTSDEDYYELVDLIVKIRTELLDKDLINKWIDIISQS

SEQ ID NO: 5747 - protein, 586 aa, Methanobrevibacter ruminantium
MMGDYMNTDYLKEFEELNHTTESLFDLGISGLLIILKDGTNLTSWSELSNPDDILYLSADFRCKENYTEFSNFKNAKVLILQNYVRPNFGVGSLFFKEADLITKLSTWHSLVAFYGINWDISSTDSLKNMFANCLSLEYAYFEDWDTSHIRNFWGMFVACCSLKAIDGMENWDLSSAENMESMFESCMSLEDISFLSDWDMSNVENIFEMFRDCYSLKDASCLNWKFKNLKNGDNLFANCRKLESFPSWYDDEFINQFGIRNQLNLIDDDSFFYKIAGGFDPQDIFIAVGYIRDEECLKRLLRDSSVHFYARRAALLNPNLNDTEILEEFADSKDYVERAYAIENPNFTNIGIIRRLANNDKSHLVRFKAENKLKELKSEGLEIIEDYPREFKQAFEGHDRERASLVLSQWRGYDSTDANFILAKVISDSSDEEIEFSETFEAYIISMEEKPQDPSLFNWFSSTAVECMEKRVDEDIGFSQLFNNMYKSHMNSTDYATAFLDFFQDILENDRVEKLNLLRGLVDSWDTDCPDDANMHCAYVILNIKKISKDELEDRIAKAKVCIPENLNSYPKLMAFMNAVLEADK

SEQ ID NO: 5748 - protein, 314 aa, Methanobrevibacter ruminantium
MELEERIEEALEYIQNDSNYALELFNGILKEDPHNINALNGKGSALMKLHRNQEALDAFNDSLSVEENPSAYLNKGIILKINGDYRNALKSFDRALNYNPRLASIVSLLKNEILEIFEKESTDISLLYDFNESCTALIKKAYGYKNQGLLWDALDCLEEAVKQDPKSENSINDIIKKLILTIKKEFLYKEINSKSTKIDKLKFQTIKSIIVEDNPHKTLLLTNKIFEINENDLDALNYQGIAYFSLGEYIKSIESFDKCLSINPNYTYCSFNKGLVLRRMGLLNESLDCFNKVMNESDFLNKVKPFQEEVLTKI

SEQ ID NO: 5749 - protein, 200 aa, Methanobrevibacter ruminantium
MKTIAKPFQNSIDIKKSQFICRLFPAQTEKEAKDIIKEISEEYKDATHNCTAYVVSDGEGYDDNGEPGGTAGRPMLNVLKKNEINNVVAIVTRYFGGIKLGAGGLVRAYSKSVLECLAIAEIVEMELYELFRFTFEYQDIKAIDAEVRAKNLAVIEKQYEAQVIYFVATDNVGIVKSVQDKLAKQVKIEHLGSRYLEKIV

SEQ ID NO: 5750 - protein, 169 aa, Methanobrevibacter ruminantium
MEDRKAKFIVYVVVCLLAFICSSTVFSMTGGLSDWIVSNVNTNEDANNNGYIDSSEGQYYSDSDGQYYSSSDSYDNSNGGSGFLDGLFSSSDNSESNYYSSSDEEPDFLARLIREFIGGSSTTDSYYDSSDSNYYYEDTSNGYDLGNGFSYDLNELFTKTDNKLNQLFN

SEQ ID NO: 5751 - protein, 1170 aa, Methanobrevibacter ruminantium
MIVLNKRKKSWEIYPIGSPKGALNTKRQAEFVGILRFMEGEDGLSIKRFLIKSDKEEKPLAPSKAINLLRSQAVFLAQKDDEMEAFLEKNNVKVRFTNICQHCSYEGYVTIINSDFSYNYHDQLICKSCAEETIKRELQLRGYDKKVFRNFKKVLEKTGSLDDVLEMLSPRFDPLAHTDLTLFDTIKVHEDKIPKIAMKRLKVPKEFRDVLLKDNQYLLPVQYLAIREGLLKDENLLVVSATGSGKTLVGELAGVPKALNGKKFLFLTPLVALANQKYRDFKKRYEPLGLKVAIKVGMNRIKAKGELKLPDSNIADADIVVGTYEGIDFLLRSGKSDLLNDLGLVLIDEIHTISDEERGLRLNGLIKRIEHLFPNTQVIGLSATIKNPKTLAQDFNMKLVQYKERPVPLERHIVFVNGDVQRRLLMRKLVQREFYSTSSKGFSGQTLIFTNSRRKTHKIANFLSGKGINASAYHAGLSYFKKEKIEKDFSKGKIAAVVTTAALAAGVDFPASQVIFESLLMGNKWISPNEFSQMLGRAGRPSYHDRGIIYLVPEIGSEFDGESEESVALDLLESDVENIIVDYTEDGSLEQILADISSRSLTKVRDVINFYKDIPVPIDINTALEELRDKKAIEIHADDTIDVTRFGKAVAMSFLSIDDGVIIKDSINDKNYLSQYYSKPFFKTNLRELRRLSDRIDEENEEILNRNRKIQHKLDQLKKNESQKKEDKDKEDKTDKKNKKSKKNKSKKSKDSKKDKGKDNSKKSKKSEDSKKDKKNKNNSNKSKKDKSENKNKSNKSNKSKKDKSENKNKSNKSNKSKKDKSENKNKSNKSNKKNSSNKEFKDSKKDKKSKNSKDNKSESSKKDKKSNKSNKYNKYNKSNKYNKSKKSNKNNKNSSSKNKNDNSKDSNKDKTNHKESKSESNQSKNLEKDSHPISKDYKNSNASVSDDLKDYSKKVMYNKRINMSKKQHKTIEDKPILVNKLNFKENIFSEINPRMSKKEVNANNLLKVQSIALDLELFENAYLAPVVHKQIVSALKVNFSTRLFSESTLDIISSGEAIAKLDIKFQDALLKLQIDFLRCDCNDRPFCECLQRGISYYILNQRLNKRDPIDISKSLLKEYQIQAYPGDIFSWLDAYVRNLDAIKRVAQAYGKKDIVKEADKLIKIIETGK

SEQ ID NO: 5752 - protein, 322 aa, Methanobrevibacter ruminantium
MNILINGTGAIGIGLGASMISQGANVSFFAREETANAIRKNGIKRTGIFNHYSFGPESFKVYTDYKDIPDNEFDFVLVSSKTIANDDISRKLNEHKSILKEDAKIIIFQNGFANDEPYLRFFPKEQVYCARVITGFKRPERYISEVTVHTEPILLGSLQKDDDGEFIDSRPVSIISKMINDSGIPSETTEELDKFLWAKMLYNCSLNPLGAILNGNYGKLMENEYSVKIMNELIDEIFEVIKASGYRTNWDSPEEYREVFYSKLVPDTYNHRSSTLQDISKRQKTEIDTLNGKVIELGEKYGVDVSVNKTIYNIIKTIESEF

SEQ ID NO: 5753 - protein, 162 aa, Methanobrevibacter ruminantium
MIIVTTICVILILIVLFYGLFPGLTNSNDNSDNNLIIQNQTSHFTIDIENGTYLSGEGKSKMVDSNYSTLESYENFTISGYEAYEIELDNGSWYIVSLYKVDYNTPSSDWVYNSDVDEDGNAYIFFNSKGEYYGYFINIPSSSDPSTFENLSFLTSIFHYNH

SEQ ID NO: 5754 - protein, 80 aa, Methanobrevibacter ruminantium
MSDVGKTVITTIITLVTTAFGLVAGLAWNDAIQKLIDSVMGPGDALTGLFTYAVIVTILAVVVTIILARIAAKMGVELEE

SEQ ID NO: 5755 - protein, 128 aa, Methanobrevibacter ruminantium
MEEIVFKPIGYIKSKYETVENMPKSPREGMEDEAELIVNEEYLESMSDMKAGKEYMVIFYFHKSNGFKQRVPFRGDGPITGLFSTHAPNRPNPIGVSIIKVKEINGNVIKFNGVDMLNGTPVLDIKDA

SEQ ID NO: 5756 - protein, 112 aa, Methanobrevibacter ruminantium
MKRVVAVFRQQKFEDVKRALLAIGCEGMTISEVKGRGRQLGVKESYRGSNYCIDLIPKTRLELIVNEDDLEDVIDTIIESARTGEIGDGKIFVSDVEEVIRIRTGERGSKAV

SEQ ID NO: 5757 - protein, 403 aa, Methanobrevibacter ruminantium
MVVLSAGDTAWVLIATILVLLMSIPEVAFFYSGLTKRKNVLNTMFLTFIAFSIASIIWVVYGYPFAFGDVSISGLIAQPAHFFMSGIGIEDLTGTIPTILFIVFQLTFAGLTAALISGSIVGRMKVSAWIVFIIAWVTLVYVPIAHWVWGGGFLMQMGSLDFAGGTVVHINSGVTALALALVLGRRKDTSLLPHNLGYSVLGAGFLWFGWMGFNGGSALAANGLAASAILVSNVAAATALITWVIIDIVKVGKPTMLGAITGGVAGLVAITPAAGFVDVPAAIVIGFVTTFVSYFAIYYLKTRFGYDDALDVFGVHGLSGIWGAIATGIFAVPAVGGAAGLLYGNPGQVTIQVISVIVTIVYAFTISFILAKILDKTMGIRVDEKTEIEGLDTKIHKESGYRL

SEQ ID NO: 5758 - protein, 139 aa, Methanobrevibacter ruminantium
MKSDKRAKFAIFFSIAILALGLSNIAAVWTGDLISGSLPVINETDKLIALDNDNFSPASLNTVYEEKKVVEVVNDTSDANDTDSTPNNADSNTESDDTSNSNNNNNNQNSNGNGNQNTNPNNNAEPSSGGSAGQTETEE

SEQ ID NO: 5759 - protein, 189 aa, Methanobrevibacter ruminantium
MEENKKFAQKVKDIRERQQMSIEELAEKSGVKLEVLQAMENGEIIPSLTPLTKMAKALGVRLGTFLDDTEQLGPVVVRDGKMENTLYFSGREDVANATNLEFHSLGAGKHDRHMDPFMIDIDHDDEYELSSHEGEEFIYVMEGEIEVVYGQDSITLSKGDSIYYDSVVPHHLHAKAEKAKILAVLYTPF

SEQ ID NO: 5760 - protein, 554 aa, Methanobrevibacter ruminantium
MSELFTELPIGKFFEMQVEKQPDHEFMVYPDRNLRFTYEQFNERVDNLAKGMLSIGIEPGDRVGIWAKNVPEWLTFMFATAKIGAAIVTINTAYQSHELEYVLKQSEMKAIAMTDGFRDTSYFDIIYGLVPEIKERERGNLKSEEFPYLEYIIHVGQEKHRGMYNTNELLLLGMNYDNDKYQEIKDAVTQYDVINMQYTSGTEGFPKGVMLTSRNILNDGYYIGENMNYTEKDRLLLQVPLFHCFGTVLGVMAVITHGSTMVVLEEYDPLLAISPIQKEKCTSVYGVPTMFIGMMNHPMFDMFDMSSLRTGIMAGSTCPVETMKDAINKMNMKEITSVYGLTEAGPGFTQTNAADSFEKKISTVGRKFPNIEVKIVDPETGEELGPGETGEIMCRGFNVMKGYYNMPEKTAETIEPDGWLHSGDLATVDEDGYYSIVGRIKDMIIRGGENIYPREIEEYLFTHECVQDVQVAGIPDEKYGEIVGAFIIKEPGYDDITEADIRDFCIGSIARYKVPKYVFFVDEFPLTTSGKIQKYKLGDIGLKLLEERRERGEL

SEQ ID NO: 5761 - protein, 292 aa, Methanobrevibacter ruminantium
MTLVLIGPACEDLIIIGNEKSSRIGGASYFQSFVYEEFYDDYIAIVNAQNTDLINEFPDMSKTELILKDDTHYFINEYPDKDNRDIRKQSTNFADIPILADDLKAIFNNLGLNEDNIDAFVINPLNSNDIPLETLEYLNSFNLPIFISLQGFLRFKDKDNSMVLKSYEDLDYIFNIAEAIFLDEKELKIVSDEDKSDSKIEIQDIGFDEKTNTIFIITNGSKGSRITDFKGINIKIDSVKCDNIVDATGCGDSYMAAFISNLLNGNDLKDSGDFASLIASKKLEFFGPYRTD

SEQ ID NO: 5762 - protein, 183 aa, Methanobrevibacter ruminantium
MNILNLPLNILIGNGISFFASIALILSCVVNDKREAYKYQVIEALILTVSSAFFLSWTGILTMLIAAARNYLVMNERLSSRLAIIFIIITLIICPLINTMGLIGLLPMIGIIQLTICNYYLKTIKWIKVAFIVNVLIYAVYFIGIYDLVSCATQVITAIIGFISLVKLIKDEKEGNIDSQPNN

SEQ ID NO: 5763 - protein, 90 aa, Methanobrevibacter ruminantium
MSDDELYRRAERKVDEKIGFYKHLYSYIGVNILLFAINAITSFGKWWFYWVTIFWGIGIVIHFLKTFVLTGKLEDNREEMIQKEMEKMKK

SEQ ID NO: 5764 - protein, 316 aa, Methanobrevibacter ruminantium
MKRLFKLVEKYFFIIIIIAVAIAVVFPGSFDWVMGEFMGINIINILLGIILFGMGTTLKIENFVNVFKRPKEILLGVGAQYIIMPLVAIGVASLFGLNEALTVGLVLVGTVPGGTASDVITFLAKGDLALSVSLTAVSTVISPILTPLITLILIGNNIAFNPVDMFISIVQIVILPIAIGLLLNYKFPDFCEELKDYLPAVSSLVIAIIVAGVIGANKQAILGSSVVIIAAIVVQYFIAMLLGFVIGYLSGMKRKQMVTIAIELAFQNSGLSTSLAKTHFPALSLATVPGALYSVWQNFAGSILAYIFRKYFTDEE

SEQ ID NO: 5765 - protein, 938 aa, Methanobrevibacter ruminantium
MSENRCYDPDCDAEDCRNPQHYNYICFDPDCNDEKCLNEEHYNKQLLRDYQESTDLSVYDHREEIDYDEDVDISLCGCPDCADDHDHNHDHDHDHHHHHDHDHNHEHSHEHEHSYSHEHEHEHSHEHGHEHGDEHSHEHSHDHDHGHDHEHEHGDEHSHEHSHDHEHESEDTCGCGCDDDDCHDDLEEHSHEHDHSHDHHEHDHEHHHEHEHDHHSHEHEDEHHHNEEHSHEHEHSHEHDHDHEHHHEHSHDHDHSHDHHGHDHSHHDHDHGDSCGCGEDHDDDDFSLCACPDCADDDDDDHGQEELLAEGKPLIYNRPIQIMVSSGILFITGHILEFLSFSPTIVTIIYMLGALIAGYEIAILAYKSLVKRHTVGPALLVVIACIASFIIGHGEEGAAVALLYYIAEFLEDLAEHRAKRSIKSLVEIAPETARVKVGDGEESRRIEEVKVGEIVLVKPGDKVPLDGEVVYGTSSINQASITGESLPVTKTVGDEVFSGTVNEDGYLEVVVTKEAKDSVINKIVTLVKRSQLNRSTTETMVEKISKYYTPLMIIIAACVAFVPPLVFGQDLIDWIYKALSIMVISCPCAFLISTPIGMVSAITSATKKGVLIKGSTYVEEMRNVKAVIFDKTGTLTEGKLELNDINIINDEYSEEEIVRIAASLENSSSHPIAQAIVNYANEKEIGFEEIEDFRNVPGKGIIGNIGGKQYYAANESLIEGSQFNISQEEINQYSAEGKTLIFIGDEQSVIASITVMDRIRDNASEVIKDLKSQGVKTFMLTGDNKIAAGKVADEIGLDYVYSNLLPEDKLNILDTLRNKFGDVAMVGDGINDAPALARANIGIAMGAAGSDVAIETADVALMQDDISKLPYLFSLSQKTMNIIKQNITLAIVVKALFVILAILGLITLMMSVGIGDLGLTLVVILNSFRIAMVKDPLF

SEQ ID NO: 5766 - protein, 127 aa, Methanobrevibacter ruminantium
MKDYKEPTNDNHNDDLCEVFHPHEESIERAKKHVLSEEEYSDLAEFFKIFGNPTRLKIISLLSFEDLCVCDICESLGLNQNAVSNQLRILRAHNIVKFEKEGKSARYSLTDLHVEMIYKMGLEHMTE

SEQ ID NO: 5767 - protein, 212 aa, Methanobrevibacter ruminantium
MGKVFIMSYIFIDESGDLGTKKSSSKYFVMAGIKVEDSQKLDRVIRKIKRDDKKNIITSNEIKGSNLPHDIKIKILKKLDSVNYQVFIIIFEKINRYKVNDGYDNIKLYDLLACELAKQIDISSSSKIFIDKSKNKKEEIVNFNKAFLENLNNFKKFPIKLEHANSMSYKGLQIADLISWAIFQSVEHNNNEFIDLIKNKKIKRVFEEKKNL

SEQ ID NO: 5768 - protein, 60 aa, Methanobrevibacter ruminantium
MNSEFIILFSHILPLILGFFSILLMINGIMDKQKVITAFGIILFLAAAFSPFVVLPILGV

SEQ ID NO: 5769 - protein, 231 aa, Methanobrevibacter ruminantium
MLEIIPVIDLMNSVAVSGKSGNRETYTPLQTIYASSSDPLEIALSLKSAGAKEMYIADLDFIERNGNNNIFKIKEVNSVLPVILDVGVDKLETFEFLLEFAYKIIVATETLESIEELGKIFEKYPKERIIVSVDVKNNELYAKNMDLDLEGFKEVLRRIDPNEIILLDISSVGTEGGFNKPLLESFEEFKDKIILGGGITPDEISQLDALGIRKALVGTALHKGQIRLNPF

SEQ ID NO: 5770 - protein, 207 aa, Methanobrevibacter ruminantium
MEKSEIEHYLRDIWVREYERGEKLVVDEFNADDIELLAKKEYIKTDDGFVNLTENGEYLGRSLVRKHRIAEKVVADLFLADMDEMEELADQIEHVMSAEVEENICRILGNPENCPHNNPIPKGDTTPGISKEYSVPLVSCHSGESGEVSHIKTEDARKLRKIMNLGLIPGSRICLIQKFPNYVFQLGNTQLAVDKELANEIFIKLDE

SEQ ID NO: 5771 - protein, 72 aa, Methanobrevibacter ruminantium
MDENDNKSQIIKCEFCGFTFQKCDGISCDSCPINCKTVRCPNCGYEILPESKSYKFLEDGVKKIRNRLFKSI

SEQ ID NO: 5772 - protein, 682 aa, Methanobrevibacter ruminantium
MSESITPNGGAKYSNNKNKALASKKGNDSYYKNVLLIGSPNVGKSLTFNKLTGMTAMVSNYPGTTVDIDEGNFTYENKTVHITDPPGLYDLNTITEEERVAKLLVLDKRFDLMVHVVDAKNIEKSIDLTLQLIDAGKEVILVLNMMDELEKMGATVDAPSLSHELGIPVVLTAAAQNRGLDDLKHTIVNYDSIENQILSESKTLLDVDYGRSIEIAISEIQRNIKGNYPVSKRYLAVSLLEGDEDSEDLLMESEDWDNLSQVIGAQKAKFDQPVKYLTKLRLADYAKHIKSSFTTIDSVNIQDTDSLGEKLSRIMIHPFYGLIILACVLFFGLYLIVGVLGAGILVDFLENTIFGQYINPAVTSVVVQYIPWVPIQNLFVGEYGIVTLGLTYGFGIILPIVSLFFIVFSILEDSGYLPRLALLVDNGFKRIGLSGRSVIPFVLAVGCGSMATMVTRTLETKRERNIATMLMALTIPCSAQLGVIMALLSARPRSIWIWLAVIVFNFVVIGYLAKRFVPGAQPSFFMELPPLRWPKLSHIAKKTWTRLVMYIKELIPIFILISVIIWALDLVGIFQWIIACVTPIVNAIGLPGSTSSSFVLGFFRRDFGAAGLMTIQNQLTGVQLLVASVTLTLFLPCVAQLMIMIKERGVKLAGLIAVMSIVLAFSMGFIVNFILTSLNVVL

SEQ ID NO: 5773 - protein, 398 aa, Methanobrevibacter ruminantium
MIETDVLVIGAGPAGSAAAKHAALGGADVILIDKKSEIGTPKRCAEGIYDHGLKWLGIEPDPAWAVQRINGGTLIAPDKTRLTLDETILPEKGYIIERKVFDKYMAMDAARAGAQIMVKTQAKSIQRGEDSKGSFYTVDCEQMGEIIEVKARIVIAADGPESRVAKAFGVNSTTKPKYMMSGVQYEMVGVNCERMDLIELHLGAFAGGGYAWVFPKGDDIANVGIGISSESDRPAIDYLNEFIESYPPLKDAKPVELNVGGDPIGGLIGQIYSDNLLVCGDAAGQVDPITGGGIILGMLGGMTAGQVASRAIKDGDYSKERLKEYDELYDEYTQGAIPKLAVGRDVYLSLSDDDLNQIIHAFEGLDYKSMSPKDILKVFFKLSPRLALKFRKLFKVVL

SEQ ID NO: 5774 - protein, 302 aa, Methanobrevibacter ruminantium
MFNKKMVLAISLLAVIFASMCIVSADDSGEGSFKELAKLVSGDNKTGVITLTKNFANTDGYDADGIKITGDNLVIRGEEGKDITIDAKSAGRIFNANGTKNVTFENIHFVNGNSSDAGGAVLLGEEPSSSVKNCQFDNCYSDAFGGAVDGNAIGCTFEDCSANYHGGAIFDGSATNCTFNDCFSKSCGGSKFPIIRQPIANFTDCYSYWQGGALYEVEAIGCDFKNCYSSEGGSMCGGSAFNCNFQDSLAKNGNGGATLNTTAKGCSFSGCSVTNGEGNAMYGGTATDCKLDKADAVKVNFK

SEQ ID NO: 5775 - protein, 146 aa, Methanobrevibacter ruminantium
MANLSFINNNFKMIVGILSIILAIVVYFITPPYIEFYLIFVFLIPAIALIVPNDAIKNSRAIGALTFILVIIVAYFAISGMLGAYDVLTNMYVNGLINSTPSTSDISACSNGYLMVLIYALFNIFCGALFFKRTSSIDDVDDEDAF

SEQ ID NO: 5776 - protein, 468 aa, Methanobrevibacter ruminantium
MQLDFNHVLTRISDYEKPIVLNHDVVLTRSEAHQFKKGIEIKRDNIVIDGNGHSIDARGKNRIFNVLSKNVVIKNFTFKNGFSEKFGGAIRVAGECKLINCTFENNRAKKGGNDISNGSELSICHCNFSDADGSINNLGTIYLLKDEEHEIKPLISNNGEIKRIIPKHDVSFLINGDKDHIKGALIRIGDKSGFSNDEGACVLEGIEEGKHSLEVSAEHYISFNGNIDVSENNVLFDIQLERLIQRHDIKILVKHKGEPVSDAIVSVGGIKGSTDENGECIFDDVEEGEISVKVNSNEYENQKYTITVSDNKTTFPINLGFTHLITPFPASDEDPYIFASYSHDDANRVFLELKRFHDCGLNIWYDEGIESGLGWQGVVESKLKACTLFIAFISANAVESINVRREIFLAINKKIPVVPIYLEKTELQYGLDLQLSPVQAILKYAMTEEFYVERCRRAFVMYGLMDEE

SEQ ID NO: 5777 - protein, 252 aa, Methanobrevibacter ruminantium
MAKVTSIFFSPSETTKKVVNQIAENFKEEKSICDLLYFNDKKEFESDDIVIVGMPVFAGRLPKTASERLSKLTGNNTKAIAVANYGNAHVNDALIELVDILNENNFDVIAAASTVSHHSIFDGVALGRPDEDDIEKINDFAQKAIEKIENGGSLESDIPGNRPYTDYKQLPFVVACDVDKCVFCLECVSVCPEKAIPDDDPADIDLEICSRCTACINICPEDARSFAGDAFLSKKPLFEEANAERKEPEFYF

SEQ ID NO: 5778 - protein, 98 aa, Methanobrevibacter ruminantium
MEAKLKKLTQEDIDDISDFFAGVIDKKIASSVKSQKEILAMDIDIEVAYNDENEELMVDVDVDITTDELSNLSDEKVNQLIEDSYVELDEYINDNYRK

SEQ ID NO: 5779 - protein, 115 aa, Methanobrevibacter ruminantium
MEIPQNVQHQLNQFQQLQQQAQAVTVQKQNVDIQLRETETALDELKKTPEDAEVYKSAGNLLIKVERASTLEDLEDKVETLKLRQQTMQRQEERVMKKLEEMQASIQQAMQGLQG

SEQ ID NO: 5780 - protein, 44 aa, Methanobrevibacter ruminantium
MELTLDGNSIKIKIDAEDATSFRASINSAIKWIKLAVEINELVE

SEQ ID NO: 5781 - protein, 163 aa, Methanobrevibacter ruminantium
MLISTSRKPSQKTRTFCKNFSHAFGFDYTNRGKSSLRDLLVKAKQLGHDGLVLVYQIKGNPSKLTFYDLEENERLALLISVNTTNERLHIKPEELKIRSTVPELDILAEVLGIEVTKEPQDSNYIRISYADYDDESNFAILYFINKKGEQIDFRINVKKIVEP

SEQ ID NO: 5782 - protein, 43 aa, Methanobrevibacter ruminantium
MYKCPECGEEVDHKGYMENKCPKCRYRILFKKVPEVRKLVKAR

SEQ ID NO: 5783 - protein, 89 aa, Methanobrevibacter ruminantium
MARTKKVGITGRFGARYGRKAKRSVKNIEENMKKKHVCPKCDRPYVKRVSAGIWECKKCGVVFTGGAYVPETPMAKSATRSIKRVVGGE

SEQ ID NO: 5784 - protein, 263 aa, Methanobrevibacter ruminantium
MDIVPEITRKSITRLINDGKRADGRAFDERRDIFIEPNVIDKAEGSARVKLGDTQVIVGVKPTIGEPFADTPNLGVLMTNCELLPMAAPGFEPGPPSPESIELARVVDRGIRESELVDLEKLCIEEGKKVWMLFIDLHVIDYDGNLFDCANLAVMSALLNTKLPVAEYIDDEVVLSEDETMDLPVRDKLALSTFVKIGNGLILDPSLEEEEILDARITIGVTDEGNHICSMQKGGEEPLTRDDILDAVHLAFETKDDLLSYLD

SEQ ID NO: 5785 - protein, 236 aa, Methanobrevibacter ruminantium
MFFIISENEKLRGDGRAYDELRPIKIEAGVLKRADGSAYLEVGGNKILASVYGPRESYIRRLLKPNTGVIRVRYNMAPFSVDDRKRPGPDRRSTEISKIAADALRPALMLESFPRSMVDVSIEVIEAEGGTRCAGITAAAVALADAGIPMKDIVVGCAAGKVNDEIVLDLSEKEDKEGQADVPIAIMPRTGEITLLQADGNLTEEEFEEALDLAIEGCMKISEIQHEALKTRYSSQ

SEQ ID NO: 5786 - protein, 491 aa, Methanobrevibacter ruminantium
MGSICMIYVNEKDLVVPGELLAEDDYYSGRGTFEDDGKICSKLLGLVSLRNKKISVIPLKSKYIPKKGDVVIGKIDDVRFSMWGVDINSPYSGILPASEVFGREKKELSRVFDIGDVLFLRIVDVDEVKKVKLGLKGRGMGKFRGGVIVDIAPTKVPRLIGKKGSMINMIKDKTGCKIVVGQNGLVWVKGNEDMEQIVKNTIKLIEREAHTSGLTDRVKNKLCLLIDGELPEEETEVMEEKEEIVEESFEEGLKKPEIQDFRDEVEKEIAEEMALEESEEDLDEEFDDSEELDDSDEEFDDSEDISDDEDFDDSEDDLDSEEEIDYADSEDDEDELAIEELEEKVETEEFMDDSDEDSDFIEEDIIELDEDAESLNEEDDEEEFDVLEESEAEIFDEAEVLDGAEEISDDELEEVINEAISEDEESQDDSIEDESEDEEEKEKEEKSKKPKFLDTFEYINEQKKKNKSSFDLSRADNSDSPTLNISQRRGI

SEQ ID NO: 5787 - protein, 234 aa, Methanobrevibacter ruminantium
MVNIDDAIIARLESYGEKFEILVDPDLAADFRNPDNEKEIDIEEILAVEEIFKDSKKGDKASEESMRKVFDTTDVLEVAEQILHKGNVQLTAEQRRQMQEDKRKQVVAKIAREGINPQTGLPHPAVRIENAMNESKVKIDAFKSVDEQVQTTLKAIKVLIPIKFEKIKMAVRLPSTAAGNGYSAIRPFGTILNEEWQQDGSWIAIVEMPGGLQDDFNHKMASISGGEAETKVIK

SEQ ID NO: 5788 - protein, 47 aa, Methanobrevibacter ruminantium
MSVKKLIIKKVILSKTARKTAKKGIMFVVPSDFFDRHRHLGKIVDMM

SEQ ID NO: 5789 - protein, 294 aa, Methanobrevibacter ruminantium
MQPLQQQNAGYDRAITVFSPDGRLFQVEYAREAVKRGTTSLGLKSKDGVVLIVDKRTVSRLVEAKSIEKIFQIDDHIGVATSGLVADARALVERARIESQINKITYNEPILVGGLAKKICDLKQLYTQNGGVRPFGSALIIGGVNGEETRLYETDPSGALIEYKATAIGSGVQAAVDVFEERYEEDLSLEDAINLGLDALYEATEGRTTEDSVEIAVIEVATQAYRKLSDEEVSGYVKDLLERNAEEEEPEEEAEEEAVEEAVEESEEAEDAAEESEEETSEEEASEDKDSAEE

SEQ ID NO: 5790 - protein, 747 aa, Methanobrevibacter ruminantium
MNFMKTNLKKTTIILALLMAILILSIGAISANDLTSADSNVDMNNDLNTNLDSNDIIANSNSNSIDAEIDEANYSNQRADAKEKLKESNSLIENENTEGNTQIEDENSSPSNKTDTSISIETNSIERGSDLTIYLKDINGTGIANEKLSIQIINKTYTRTTDSKGSALFKINLASGKYPIAISYNGSEDYESSSDDFNISVSPMKTKINMLSNSIVNGRKLTIELLDKNNNPLKYKKISIILNKKLYNLTTGKDGKVSLNINLNPGKFPIQITFSGDANYHTVSKSSAIDVYKLKSSFTVPKTSIIKGKYLYVYLKDSEGKAIPSAKVAFKINGVSSTKTTDKNGRISQKIGLKVGNYTVQLNYNGDKSHLKKVQSFKIRSCNSKTKFTVANYTVVRGKYLSVYLKDSENANLANKKVTFTYLKKSYTKTTDSNGKASLKMTEAGTTTVNLQFKGTGPYLKSSANVKIKVLKNTTADIIAKNQTRHLNGSSTIRYYVKLTDNNGNPIENETIELKVRCNNITTGSGNKITKKTIVLSSDNIINKSEDKKLLNEMAKILRAKGYKVIVSGIGPNYHVSDVRDYSNVCVFSLVGGVDSGMFVDMSHSYYKNYLKKYKNQFVLGCVAPPVYLNLGNMTWLKRAHDDDYSPKSFKGLYYPGKYFNTVTKLDYVYGDGAEELVNNFLNYAKKGKSIDLGQSVPKTTTTYKLTTDKNGNAYVDLQVGTYTISSSILGNNYKVDTQTSKVNVIK

SEQ ID NO: 5791 - protein, 125 aa, Methanobrevibacter ruminantium
MKLKVLPPTLRKNHHYLILDVKSEVKLSKDDIVHYIWDACIRYWGENHSSNFNLWVMRHYPIEETIYNNEPVFNYKTVLRCQRSYEDDVRSALATLNRYNKKKISINTIGISGTVKSGINKFIDE

SEQ ID NO: 5792 - protein, 323 aa, Methanobrevibacter ruminantium
MKFHDLNIRGTDYNNDLALIKEAYKFGWDYLNLNYSQDHYKEALSYKDDLLEEISLFEWKDSYRNKYNSQSIEISMGINIQNANSNEIRKIVNKYRNNCSYMSALGGDLKVNRSVCENHRMDVLSRPYYKRRDSGMNHVLAKEAARNNVAIELCFRDVLKNSLKFRANIISSFKEIMMFHRKYNFPIILTTDSKSIYDIRSTKDIVGFFKSIGFSDKEIYNGFYYYPREIIDFNRQRKNMVIKGVKVIEGASDFTEIDSKTPKFEESECFDEAISQKEDDFFDCDESEDDFSDYDEEDEVFVGESEDEFTDVEFESLEKEDLL

SEQ ID NO: 5793 - protein, 146 aa, Methanobrevibacter ruminantium
MIHNIRYRVFIYENEDKDKVLEALLNILPTAEPEAEEAEGLLEEKMLILTGAISKKRETKEFLNTLIESIGEDQLIKLYNDLDRKMDEKGNLFLRLSKEKALDEEWEILDGGDSIHLKIKIAAYPAKKEVALKKIKEVFPEDIINA

SEQ ID NO: 5794 - protein, 183 aa, Methanobrevibacter ruminantium
MMYKYIRDAWKNPDESYVRELMWQRVPKWRKQPAITRIDRPTRIDRARSLGYRAKKGFVVVRVKVRRGGRRKTRFKHGRRPKRMGVNKITMAKSIQRIGEERVAKKYPNMEVLNSYWVWSDGKYKYFEVILVDPQSPSIKNDPKINWICEKQHRSRALRGLTSAGKKGRGRRNGGKGSEKRLK

SEQ ID NO: 5795 - protein, 139 aa, Methanobrevibacter ruminantium
MIKCDNCGLKFDDDTEICPNCGNKLDSTQSVQETEEASKKCPSCGSLIGINEFICPSCGNKIEELKIIRTCPNCGVNLDDDAVFCDNCGANLSSTSDQIQEFNKSLIESNKSLMDQIADLLTKFGKFIDDLFSSFKKDK

SEQ ID NO: 5796 - protein, 306 aa, Methanobrevibacter ruminantium
MVKCSNCGAEVGDASFCFSCGEKVDGGNVDSNICPKCGTENSKGTVFCVGCGQKFDNALVPESVARKQKEWELRRQQIIERYDQLADEFGIKDKDYFLTSVVRVNMLEEKTTKHKVWGSVGSYGGNKTTIDGFFLIEDDKFVFMEIDNRDWKKVNAGINNFYFDKIVSMRITKRLGDISRYEDITKRTSLNSAHAIKRAIQNDIQSLKATRFKDLIVNNDSADMFDRLLIKLVDNTSFEIRLPSFEFGENLVALFEISRNSPQTVVIETDSKPSKADLLKEYKELLDSGAITEEEYDELKKEVLSS

SEQ ID NO: 5797 - protein, 177 aa, Methanobrevibacter ruminantium
MLVRNLDFLSIPKEFSKVELDIYEGKSIVLVYIENKGYSLVLKKNNENDSIFLLKTDLAPDNIDSDKEDFINVIKMLLDKIYEGAEIKEYEKQHHEHVFLQLMDLLIEGETVETITEESKIYADIEKGFMKLELDIMDNKINSLNSAIGEISGNLNNLGSKVEDSKIENRLKKTFSQ

SEQ ID NO: 5798 - protein, 182 aa, Methanobrevibacter ruminantium
MKDPNMDRILEDNRKLMEENRKLKEDLKELKNEFYQFKKNSRPGKPFNLENNDDYKPSGNYYFHNNFKEEFDDANIKYNSKDNPEGSFHNDSANIVDMSLISFLARSNKRVEILKSLNQGDKIPSTISKEIDDSSHHVSKYLSSLKEKELVVCMNEEDKRFRFYRITAKGKYYLEIIQNNQY

SEQ ID NO: 5799 - protein, 181 aa, Methanobrevibacter ruminantium
MADLKGTKTEENLKAALAGESQARVKYEFYASQAKKDGYVEIKDIFQESSDNEKEHAKIWFKLLNGGKVPDTLTNLADAAAGEHEEWTSMYKEFAETAREEGFDDIAALFDAAGATEKAHEDRYNALTDKIKADKVFKKDEEIAWKCNNCGYIHYGKDAPEVCPLCDHPQAHFRKQDTSYI

SEQ ID NO: 5800 - protein, 325 aa, Methanobrevibacter ruminantium
MCTASEYLTENHYFGRNFDYEISYKERVCITPRNYEFKYRKIDDMKSHYAIIGIAAGIDEYPLYYDACNEKGVAIAGLNFAGNAIYREMEEDMVNVTPFEFIPYLLSQADSVEDVKELLQNLNLVNINYSENLPLSPLHWMISDKDSSIIVEPLEDGLKVYDNPVGVLTNNPKFDMQLFNLNDYRNLSVKTPENTFSKNLNLDDYSRGMGAIGLPGDLSSASRFVKVAFTKENSFSGTSESESVSQFFHILGSVEQQKGLTFINDPDLYEYTIYSSCYNTNKGILYYKTYDNHQITAVDLNREDLDGDGLIIYPLINEAQINFIN

SEQ ID NO: 5801 - protein, 181 aa, Methanobrevibacter ruminantium
MKILALIGSPRKHSNCEAIVDEIAKGAEENGHEVIKYIIQDLDIAPCSGCELCRKGKDCRYTDDGTEIIDQLADGASVILASPIYFGQMSAQAKTIVDRFYSIFNNPNKSFSKDAKAAIVLTHAYPGDYDAYLQLTIAQPFQNNTEMEFIGAIDAGDLKFPGDVKDKPEILREAYELGKKF

SEQ ID NO: 5802 - protein, 258 aa, Methanobrevibacter ruminantium
MASCNIGKKFIAELIGTFFLVFFGTGAAVVTLLISDSVTPGKAGIGLLGGLGDWIAIALAFGLTVMACIYLFGKISGAHLNPAVTIGLLASKNISAIDSIYYIVAQVIGACLGSLLLYVCLGAQAVTIGGLGATAPGMGVGYLPALIAECIGTFFLMLVVMGVAVDEKAEPGFAGISIGMTVAAVIIVLGAFTGASINPARTFGPYLMDTLLGGTNFWGFFPIYLIGPIVGAVLAAILYGYLAKGNDACALPQPFFEE

SEQ ID NO: 5803 - protein, 498 aa, Methanobrevibacter ruminantium
MKELYEKMINESVAALQADIDVISANRYNDFKIVDAKPYADAVAGMTCIDGQAKSVIDLHKKSVESHYKVLTSVAETIRPEDDPFIEHYQTPPILEILCEEDGEFADSMATFIQAIADSETLITRESVRRYGGFYGPTCVVDFALMPGSTSNVVNQILKTIHIPVMHKQAILSAKSWGMNTSYGIGDSFAHAIENGATAAEAAAKEVESMQMIYKEPVEAQGKLMDDAGHSSFDVRAFMEGYKKEMRPVVKAAMDDGVHYGNIVTVPAYCVGDIGHHIGQASYNMCKDDVTLAIIQATAKVMEASLKDNIGKFMHPSQVLNLATGSTACATEYILELDGFNSTMVVDLLTKRFHNFVQQYPTRGAAAELHNCDFMDMIHRGSTYISAARKARSSAKIDLVPKVNGFAVDLGAITHNEVLMNPQRYTYPACGITVRFSSLMRLADYPCLLTPEPVTATMMTNIIALNKEVPGSPVRGCKNCASCIIDAKHEYCQWKESV

SEQ ID NO: 5804 - protein, 208 aa, Methanobrevibacter ruminantium
MNEIVLNHPLITHKLAILRDVNTGTKEFRELVTEISTLLCYEATKDAKLEEAEIETPLAKMKTGKLNEDNYAVVPILRAGMGMVEGIINVIPNAKVGHIGLYRNEETFEPVEYYYKMPDGIGDRIAMIIDPMLATGGSVSATIDKLKADGVKQIKFLCIVAAPEGIRALEANHPDVQIYCATVDEHLNPNAYIVPGLGDAGDRIYGTK

SEQ ID NO: 5805 - protein, 395 aa, Methanobrevibacter ruminantium
MNSTVGEPVLSVPVALITSGIGTLIYVICTRNRSPVYLGSSFAFIAPMVAGYAIGGKSSIFSALMVVGLVYVAIAIIIRATGKEWINKLLPPVIVGPMIMVIGLCLAPTAIQEIGLDQAVVPINNIIVALAAFLTTAVIAIRGKGVLKVIPFLIGIIVAYVVAALLGMVDFSGFFSASLFEVPEFYMPFINYSFNPTALLTIVPIALVTMVEHVGDHKVLGEIIGRDLIQDPGLNKTLLGDGLATFFAALLGGPANTTYGENTSVVGLTRVASIYVIGLTAVFAVIFAFSGHLTALLAAMPNPVIGGVAILLYGFIAVNGVKLLIQEEVDFNNNKNIVVAATMLVLGLGGATLSVAQGDLSVSISGMALAAIAGVILNLIIPERKEDNKFVPEVK

SEQ ID NO: 5806 - protein, 159 aa, Methanobrevibacter ruminantium
MAKLTFRNASEEDVPLILEFIKKLADYEHRLDEVIATEEALKYWIFDKQQAEVIFALEDGKEIGFAFFFLSFSTYIANVNMHLEDLFIDPEYRGNGYGKALLRELAKIVKERGYGRFEWTCLDWNQPSKDFYKSIGAKQKDWNVFHFTGQELEDFINED

SEQ ID NO: 5807 - protein, 574 aa, Methanobrevibacter ruminantium
MYIKSFFNDLNLTKKDGIYLLALTVFSILYTVHLIDVNYTLNFKSDPFVYLINGLVYAGMQGHIENYSYGMFLTPVVSFLTSLLFRMGIVDKIAIMIVSGVISILGEIGLYLLFKTKFNEVYSFFGCILFASFHIVLTIWGGGGIDIPVCAFSIITFLFMVLAVDKNPKYYIPTSIFLIISIFTKYDALFIIPILFLYYLTKHDFFNLVDLALSDRDELKIVIKNYIKSEEFKYIVISLIIAVVLFILFCEVIWSYGANLTFLTQSQESLNGFNSAKAARSHFYYNDKKFYIRNLYTFFYPQISQEFSLIIPAIIAIGTVFNFANIIRRRKEYPMVRDYKTPHFKYLLVGLIIILIPIAIIGFKYISHMVTNVALLTICVCLLSLADKFDIDKRTFNLDIFFLAWIFVFAVFFSFITIKGQRYLIIALPAVVYFVLRTIEEIFNKFKDSNILKITLIIIAAIIIVYSLSFTFTDGNFDTERNNTAIQEVYDYLVEYDPDYLNKNLSSDYSYGSRFGTWTLKKDVRYVKLGVIDQSESDYLIVKHDNVSLANYTEIYRAGKIKLYQNNMYDNSSI

SEQ ID NO: 5808 - protein, 244 aa, Methanobrevibacter ruminantium
MSIVSANDLNSIDDSIEADNLNSIEIEDIQVDSVESDDLEKSNIDEKVLSDGESDGDSGNETETLSSGDENNESDVSSNPNEGVATNLELDNDADKENVKIGELVTWTLEAKNYGPYDAENTQVYDELPEGLEYVSHTVTKGEFNPETGIWKIGDLKVGEKEYLKIVTKAVTTGEKVNKANLTSDTDIIDPDECYEEEEIDVEDDDDNHFEKVIHSKQLPRVGNPIFLLILSLLTVLGLNTRKK

SEQ ID NO: 5809 - protein, 484 aa, Methanobrevibacter ruminantium
MDYDVIYIGSGNASWQGARFLRKEGLKILIIEKSLYGGTCANRGCNSKALLDAPYEIKAFADNFEGYGKSGNFEVDWPALMKLKRKRIANMAPFLDGKYKEYDLDVAHGEGYIVDEHTVRVGDKTFTTDKIVICTGLKPIIPDIKGKEYLHDSTDFLDIEELPKHAIIIGGGFVGMEFASILAEAGLEADVIIRGNMALKFFHQPYVQNVIEILKEKNIRFHFNETVNEVIKDDSVVIENPEERVNIFENAQNTDDDLRDPDAKVDNKAYENAFTVNCDSGLSLTGDYVIAAMGRTANVDTIGLENVGLDYTKAGIKVNNYLQTAVPNIYACGDIADTGIAKLVTVAIHQSKYLGKALLGDAEEIVYPVVPAVAYTIPRIATVGVPAYIAEQSDEYDVHRIRYGKSYSLELKNDTRSEAKVIVDKDLNIVGAEIYAADAENVANMFTFIINQKITLEELDNMIYAFPSSSSVCLYKLHNIHYKF

SEQ ID NO: 5810 - protein, 397 aa, Methanobrevibacter ruminantium
MKILVVQESDWLKRNPHQQHHLMDRMVLRGHEVKVIDYPIDWPKEDSKGLIFHREVHENVSKVKPEADIEVIRPSFIKEPGLNYASLYFTHKKEIKKQIDEFKPDIIMSLGLLNAYTGSKLAKQHGIPFVYYLIDVLYALIPEKAFQSFGKKVNMKAIENSDLVITINQKLKELAMELGSKPETTILIDAGIDLNDFDPQLDDSNIRNMYNISEDDTVLFFMGWIYEFAGMKELAMELGKNKEKYPHMKILIVGDGDAYDRMVEIKEEYDLGDQLILTGKQPYERIPEFLASADFCLLPAYIDEEIMQDIVPIKLYEYLAMEKVVIASELPGISKEFGYGNGIEYVQKAEEVLETAQRILDEGRYEEISKKGREYVKSNDWEAITDKFENALEELIK

SEQ ID NO: 5811 - protein, 179 aa, Methanobrevibacter ruminantium
MRICVYGAGSTQIKSKYTDEAYKLGEEIAKRGHDLVFGGGSTGIMGAVSKGAIDNHGKVLGIAPEWMEEFEGICKDCDEFIYTESMDERKKLFLENSDAFIIAPGGIGTLDEFYEVIVLKKLNRHDKKIVIFNMFNYYDHMLEMIDFMIEEGVIRAGRDKKTFKIADSIEKVFKILERE

SEQ ID NO: 5812 - protein, 163 aa, Methanobrevibacter ruminantium
MSHPHVESINNMNASSLIGIMEESKITYVRENLDIHLHASQIKLLKQVRKHEKPHHKRIRVKRYEQAEKSDLFNLHLDLYLNNYKKLAKKGLIEIDEDPENGLPYDCALTEKGKEVLDDIDRLEKDWEKVVHIDDNDLEALKRIALDSFEISYQHKKKQNFIF

SEQ ID NO: 5813 - protein, 106 aa, Methanobrevibacter ruminantium
MGEKVFYGKGIRRIKEEDPQLYDSIENLDKNIWNANSLDYRTQKLIAIAISATNPESSSFLKQLSKAKKELDISRDEVMDVLKVVLLTSGMMPFNKALEVVNKLYD

SEQ ID NO: 5814 - protein, 111 aa, Methanobrevibacter ruminantium
MRVSIMKEEVFYGKGMERVKKEDEGLYQAIVGLNEAVWNGKVLDYKTQKLIAIGIAASNADSRATERQIMSAKKELGVTRDEVVDVLKVVLLTSGMQPFNKALQIANKVFE

SEQ ID NO: 5815 - protein, 251 aa, Methanobrevibacter ruminantium
MNSKGKYLVLFLILILSFSIISASFAYTGTGFSHDIPFSKYSSQSNSDILNKYNNTDCHSEIKGICTYVADGDTIDVEGVGRVRFVGVNTPERGVTAYICSKRFVQKFCLNKEVSLDVDDSKRNDRYGRTLAVVIVDGKNLNEMLLKEGLAEIMYIPPSEFYPYDWSSDSTTSSSYTSGSSSSNSGGSYSSSSFTSGSTVSAPYVGSANSHKFHYSTCKWGKKISDKNRVTFNSRSDAISQGYAPCKACQP

SEQ ID NO: 5816 - protein, 137 aa, Methanobrevibacter ruminantium
MKMPEKIDNMMFAPCGMNCKLCIKHISKSNPCPGCLIDSPNKTKNALKCKIKKCLETKRVKYCGRCSEFPCKLMKKQDKNYKKRYNYSTLDNAKRITYTGINRIMLEDKLNWECPSCGGIISIQERVCSDCGLNKED

SEQ ID NO: 5817 - protein, 170 aa, Methanobrevibacter ruminantium
MAAIICPRCGKMNDGSLDFCIYCGTYFDDYNEEDNNDNLFFIRSMTNDGRPGKKQVVRLNEMPDNLQKPKHRLAILLGYLFAILGGLIGFVFAIYLITRKDKNARRHGLIQLVILLIEYALIGVLILNGQLDINMVLDPFNMTRMNNITQLYNSSQMNVSGSNISSLFGF

SEQ ID NO: 5818 - protein, 613 aa, Methanobrevibacter ruminantium
MKKNLSLKNILILSLIFLFVLSIGSSFATEDLNTTGDNNLIDDNAMADTLSDEKEISYQKPLMSDENSNSNNGSDEEKVISSNNSKSESFLIIRPNESSITVLGGNFQDLQDAIDYASDNYTIYLICNMLGEGKPIIVNKSVVIEGNGHTLDANYSSRIFCILSDNVVLKNLELIHGYQRAYDSYKLRPYDSKNFDNAPALTQEFFDYSVPPLNSTDDIEYGWGPAIKWLGNNGTLIDSAILNNKIDYANDIGEGKAVSWLGTGGRIINTFMVSNEYHHFFVPWGIVGYQQKSEGKVLDTSPHGVYYGNIEGNVYFLDVALNVLPNLDVKNVTSYYGEGKKISFNLNHGNASFVNESLELSILSKKYNYTFNVFSDENGNFEFNLPKNLSVGSYNLIVGFNDGKNNISSNTTVKINKATVSVSAPDFKAQYYSGAKYTLKLINAKTKKPISGMKVNLNVYNGEKVKTYTVKTNNKGIATFDKFTLPSVIYDAGKHKVTISVDKSYDLSKKEFTVQISKAKTDIKLSKTSFKYKKSDNLKISIKNQIKKTAISGLKLKVKVYTGKKYKTYTLKTDKNGMVKINTKILSKGSHKIQITSEDKRYLVSKTTSIKVA

SEQ ID NO: 5819 - protein, 985 aa, Methanobrevibacter ruminantium
MKRNIYFIILLVTLFLISMSVVSAANDADVSYIDDEIVSDEYLELSDSEMGISDIDYDDIESDMLENEIKENGLSDNNDVLKSNLPENEFKESNYNEYYEDIMNSNSQKYGEFINFLINNKSFEFRENSLSEDGYFLYATKNYTLRLWDGVNYTILKDDYYFASTAEKSGYFVNESFYDDIIYYHEYNYYLDEEFLGWLMWNANYKKVFVSGSIEDKVDISSVVNPEKGGSPKSGNLPSSYDLRDYGFVTPVKDQGNTANCWAFATMAALESHLLKTENTSYTLSPQWDFSENNLKNVMSSLGRNGTDKLVNSGGNMLMSLAYLIRWSGPINESDDPYNSNYTNISEDVYPLKHVQGVKFIPNRQNYLDNDYIKESVLENGAVYISMYWDSFFEKNDAYYFYNGSGYNFNSNYMHAVTIVGWDDNYPKNNFLIQSEGMGNGAFIIKNSWGTNAGNNGYYYVSYYDQMLGFDNTYAGFAFTNVENVTNYDYNYNYNPLGFTNVFPVNSTSAKFANQWAALKSGTLKSFGLYVVSPSICTANLIVNGISIGNTTSYLSSAGFHTILFNQAAYVNVGQTFRVEITLQHIGSSHTYIPLEERIENYSNVVSGYNQSFLWLRKNGVDQWVDLKTEVDNANICLHVYTECIEGLLETHVRSNNLVTYFNTSSLNATLVDGSGNPIANKLIYFKLLNVTYNRTTDSNGKVSLPIHLNPGSYKFLISFLGDSIYHKSNRLVNVKVNKMHTNINQNVSTVHQGEYLGLILKDSNGKALSGQKVAFCLLSVTYNRTTDSAGKAKLLIRLNPRKYTFTLKFFGTAGYYACNKTFNLTVLSAKSGQSYEMGIDDYDGKNIDENIIINNETFESSDVVNNDIMYMYNDTQYYNIINEDKGYYNNHSNDINFELLDNDQNYIYSDLNLLELLNNDQNDICFDLNLLEYIDFDKTDYYNDNLYNLEHYYMKDSLTENEDLYICENKLNIHDLNQIKIGGI

SEQ ID NO: 5820 - protein, 331 aa, Methanobrevibacter ruminantium
MSKYNEYQDKTILVTGGAGCVGSNLTRKLAELGAEKVIILDNMSSAYEWNVPTNENVELIQGDILDDEELKRVFKMKPDYVFHLAAHFANQNSVDNPETDLMVNGIGILKVLQYAQLTGVERFVYSSSGCGVYGLDSKMPFEEHDISISLHTPYQVTKLLGELYTNYFHNLYDMPIVNARFFNVFGPGEVPGKYRNVIPNFFYWSMTKQALPITGDGTETRDWTFVGDIVNGLLSMGVEEEAIGEAINLGSGKDHRVIDMANKVNQLTGNEEGIAYVARRNWDAKTKLLSSIDKAKDILGYKPTVSFDDGLERVYGWFTDNWEDIERDAEF

SEQ ID NO: 5821 - protein, 257 aa, Methanobrevibacter ruminantium
MEIEHTHELIKDVFGMNMKEARLLDDLLKTNDLSEILELGFAHGVSSCYFASTLKDMGKGHLTTIDNTTAKTRNPNIEELLKKTGLEEYVTYYFEAVSYNWRLMKLIEENNGPIFDFCYIDGAHDWNNDGFAFLLVDKLLKPGGIIIFDDYNWSFSRSPSMSQSPRVLAMSKEEQETPQIKKVYDMLVKTHPNYHNFKILNDNSWALAQKKEEEDLFENQVNKLESENRKLRKKQKEIMSSNSWKMTKPLRQLRNKK

SEQ ID NO: 5822 - protein, 211 aa, Methanobrevibacter ruminantium
MKAKEMMDKKFVYVSKDDTIEAVSIKMEESKRFTAPVLDKDMKLEGWITSFNITKGLREGKKLISEVMDPVENILAIKEDEAAKNAVIEISKHKLISVPIIDDENKVIGVCRSVDVVDSMSSLYDIKVSKIYEAMEKELKGVTWDELMEASAKISTRTTGVKITAEEYEKNIQNATFGEAIWATGGLEKFFAGLISVGEIVIARKVGRARR

SEQ ID NO: 5823 - protein, 275 aa, Methanobrevibacter ruminantium
MEIKLKKQIETLEREITLKSVDLDEDIEDFNVDIHSYEDNDKLITISPRCVRCNLCVEECPINVISSSTWLKRAKIGEGCVQCEICAQTCPVSCIYVWDGETVIKEDDSVEYTLKELKVPHRNLKMEDISINREVCIGCGSCLKYCPTNAISLRSKEFIEAHGEECPEVGAIDSEHGHMYSYIDKDRCCGCGSCANLCIQGAITLKRDLGPVVIYSHLDVNQDICVACELCEDNCPVGAIKVVDGEIVLNNDKCIRCKECSSRCPVGALNLVSDN

SEQ ID NO: 5824 - protein, 342 aa, Methanobrevibacter ruminantium
MDEKDLKSSNNVTAEDLGVDEIVYDAINVDVIGFGALNVDKLYRVGHIAEIDEESFIKGEEQSPGGSAANTIIGLSKLGCSTSYIGKIADDEEGDLLEYNLMVNNVYLTNLIYADSGNSGKVLGFVSDEGDRALYVDPGVNDDITIDEINPLNVNACKILHYTSFVGDSFNAQKELLNVLGDDIVLSFDPGMLYVKKGVLELKEILERTNILLINENELKILFEDHYKEKLSVSKDLTFRDLAVFIRDDGIDTVVVKRGENGVYAINKDDDEVKAPAFKCEAVDTTAAGDSFNAGFLYSYLKGYDLAKSCLIANWVASRSVQAIGISGLPNLEELEEFISSL

SEQ ID NO: 5825 - protein, 296 aa, Methanobrevibacter ruminantium
MVNYDKVEDTFFESFDGMYIRALITAEDELTVKEAAYDATATPSAVIGRVEAGVESFVSGDKTPDGRPGAIVQFWLTDDLAKFEKELSYRIRQDILVKPFTRVFSITENPVGSIPMMESVGHCGDGYEWEIEEYGRKMINVPIAVPDFQIESELAYAEGIMGGNFWYMCSTKEAVLKAGRIIIDTIMEVDGVCTPFGICSAASKPETNFPEIGPSTNHPYCPSLRERLGKESKVPEGVNYIPEIVINAVSQEAMNLAIKKAVDAIIDIGGVERISAGNFEGQLGEHKTNLLDILKE

SEQ ID NO: 5826 - protein, 368 aa, Methanobrevibacter ruminantium
MVKKVFITDCEGPLTLNDNAYELAAEFIEDGDKLFKIISRFDDYLVDEVHLENYHAGDTLKLIVPFYKLAGLTNEKMIEFSRNNIYIVDGSKDTLKLANELMDSYIVSTSYGQYIEALCNYMNFPFENTYHTQLDIDGATNFNQSDKKSSTIGVKSPLFIEELKKVEEFRKIILEHGDENEDDFNVLYDIFFNEFPKLEINKYIQSVKTVGGKGKQIAVEDIVERLSLEEGSIIYMGDSITDVEPLQYARDNGGLSVSFNGNEYPLNVAEIAVISDNTIVSSILIDLHSRFDKDYVIDFVKAYAEKGPDDAFKDFEVDYSLVEEFEKIFYNRQAPIIDIITDENRDYLLGLSKKMRNGIRGKDIGGLG

SEQ ID NO: 5827 - protein, 37 aa, Methanobrevibacter ruminantium
MIHKKYYMKNEFYLLIKEINQNMMFIYSKEYYPKTGR

SEQ ID NO: 5828 - protein, 483 aa, Methanobrevibacter ruminantium
MVTVNPIPRPLRDVHIEYEIDNEKCINCSDKPCLGVCPIDAVYQDENTKLIKLDEHCFGCVLCSNACPYDAIHIKKTLSEPIRENVPNINKKLCRACGACVNACKSGAIHLKSTGGEEMHSEIDENKCIRCGYCFRACPTDAIKYGEILPKTVKEGKTLCIDHDQCIGCMTCTRICPSKGAINVGKTNKLPFIDPAYCARCEECMHACPTYAIDYVEREEAFESFNKIKTLEIASEILDRDINKISKGITNIDNVLVKLLDDISKDYHFDDFDYENSMDIRDVPRGMEFSDVEIFTCTNCRSIVVNVTEYLNERLNAQLNKDLDVVKVLDLVEFFPPSLGIEVVEENCISCGLCMDVCPTKSISLDGPNPIKIDTDNSCVYCGLCAEACNFEAIKLAEEFFTNRNHEIFFIKRDLRGRRNGTVEINHSACQLCEVCIKNCPVDAMSVEDDMITVNHDECISCRNCEGICPVNAARVSTIWQFL

SEQ ID NO: 5829 - protein, 344 aa, Methanobrevibacter ruminantium
MSSIIWYIYEFARKTWIDGFFDAKSKEDIAHKPDRFRDFPNVIKENCIGCGSCTASCPSPNAIKLIRDSDTEDAFGLIYPVINKASCIRCGFCAEVCPSTPKTLECGENHFIREEFNIIPSKRKYIVDDYLCIRCHKCMDACEVGAIEEFDDRVSVNQSKCISCGKCLEACPVKGAMRGVFVNNLEEQKKIINLAVTTLEDYIESKQDDLIQLGTDKLFLDELPFKPIFDKSLNILNDKEVVHEVLEDAINRLKIRIITWDSENCKKCQMCIPDCPTGAISFDYDKDTIVRDKEKCLRCSICYQTCPFGVIKYFLAKFNLDKNDNDEEVIHISVKASQLAERRA

SEQ ID NO: 5830 - protein, 375 aa, Methanobrevibacter ruminantium
MILPIGPIHPGLKEPLRLKLQTQGEKVIKAEIDYGYVHRGIEKIMEGKTWQKCIYLSERICGICSYEHTQTFAETLEGISGVQAPLRAQYLRVITNEIDRIQSHLLANSTFFKTLDHETLFMHVLALREYAMDSLELLTGNRVNLGWNVVGGVRMDADERHFNAILENMKKIEDGFDRHVALFEEAPIVALRAKGVGVMTKEEAIKGHAVGPIGRASGIKHDLREEHYTYKDHFDFKPIWRKEGDNYARTLNRLYEVEQSIDLVRQAIENMPKGDIRTPVDIPSGYGEWRNEAPRGEVRYMAETNGDLIKRISIRTPSIMNIDSCARYMLKDVATVADAVSTYASSDPCIACTERVAITDIDSGKYTTKDFFEVK

SEQ ID NO: 5831 - protein, 153 aa, Methanobrevibacter ruminantium
MLKKLKDIVRKSSIHVCIVNCGGCNGCDVELVALLSPRYDLEQYGIYVHNNPREADVLLVTGAVTEQWRDNLRRIYAKAPEPKIVVAVGNCPQSGDVFAQEGGRVLAPVSDFIPVDAAIPGCPPRPSEILEAVLTVAPGAIAAKGRAQDARKD

SEQ ID NO: 5832 - protein, 127 aa, Methanobrevibacter ruminantium
MNSEEKYEMMKLRVLHSFKWEKDLTIPLSEEFGISKEEFEEILMNRFDMSDLENMHATFEIANREKIKRQMHLDLRLYWLSDVAKLISEEDADRICHQLTKDVIQHGKKYEDALDEGRAQIVELLRE

SEQ ID NO: 5833 - protein, 110 aa, Methanobrevibacter ruminantium
MEELYYMIYIIVFIVGSILGLLLSYKKHMEPFIISEIDVLTLVLAIVGWFLLLNHGLIGFVSSVILLTIAFFCIGLAIGRRPGYGRKETAIGILVAVIVWILTSGVIFKF

SEQ ID NO: 5834 - protein, 51 aa, Methanobrevibacter ruminantium
MNDEKGMRVLTFISCFRSLYCCRFSSILPKHSSISYGYNRFNIRSIYIDAK

SEQ ID NO: 5835 - protein, 286 aa, Methanobrevibacter ruminantium
MNLMAQILINVVIAFLAGSLLLGFHRKVMARVQLRPGPPIIQYLLHSLKFFFKETSFPKTASMPFYVGITVILAGIWVTGVIVGPVCKGSLMIIFGIYAIHKIVEHNAGSSSGSPYGKLSCVRAVFSAAGELPLFAVIAVVFLLTGTMDIGGIIQYQAANGPLAFKIPLAAIMFFTLIVTKSPYSPFAITKGKEIITGFETEHFGMLRGYIMFSESIAWYILLWLFLTIFFAPIGVVGYLIGMILICVITGFINATTPMLNPNHSVMAQISIAVICVVGSIIMIII

SEQ ID NO: 5836 - protein, 71 aa, Methanobrevibacter ruminantium
MKKMEMASYIILIASVLAILYALIFNPADWIVYAIAIVCIPFLVLSFGLLTMSKPIKEEEEERREEPFTGY

SEQ ID NO: 5837 - protein, 222 aa, Methanobrevibacter ruminantium
MLIENLGGDFLGTIPLGDIVLYLNPLHIFLFVTILLFTALIAISRTETQVEAMFGSLDENKVAVGLKEFKHRRFLAIICGIATAGAMITGDLFNFTLFMALIGIVNIGIVSAVKQVEVLNSAYQYGLIAMMCGLPLFGGAAIILAATGTLSLFELASIPANPMMIFGALVMLIGVCGESGIAPFFASKAEMFRTPGSPFILIIHLSSLFLIVRFIEILLTIL

SEQ ID NO: 5838 - protein, 225 aa, Methanobrevibacter ruminantium
MVASVIPQVVPAFYSSMYTTALYGGLIVAFIGLIGVAMEKRDIQILILTDIVGLAMLIVVAAVGTDLSEALILPGLVVELAEIMAISEILISREMRKADKDTSFSPMPLDIDMEIMTTAPNFIALLLIGYGIFLSGFTGGAVAGGGIVIYVLSRKVRGLPIFVLDGVGAISGISWCLWIIGFIFFFILPQYWLLSLFLAALGLLLKVASKIGLIGILMREEYGRK

SEQ ID NO: 5839 - protein, 199 aa, Methanobrevibacter ruminantium
MPKIAKLWNKLADPKNIPRLFAVILGLLLIAGFLIPMGLNTDQIYTRPAPQSQMDAGLPLAPYDRGGEVLESPGITEAQYPENAENLGWINSYMTPIAEMLKGISPYFGTSICSSPGGLIDEILYYTRGFDTILESSILMMAFIIASWLAINFTMDRTKDERDIAEDVKRAIASSDRLANEVEESNRKAREKQAKKEFR

SEQ ID NO: 5840 - protein, 86 aa, Methanobrevibacter ruminantium
MFNLAIWVYLGLALAIFGSLATVWGPGVKDPVIRTINTEVASVGVSLILLCYNSTLALLTLIATTIIVTLILFRAISRLEEIGADV

SEQ ID NO: 5841 - protein, 113 aa, Methanobrevibacter ruminantium
MLEFINIETISMALMIIGAIGVVLLKKPLDKIIMVSVLEAGLFLAIVSFKYLDVAFLTAVLDPLSIIVFLLALIKINKVRKSKLEDYSTLDKLNISTENLEEKSLDKNSEGGK

SEQ ID NO: 5842 - protein, 92 aa, Methanobrevibacter ruminantium
MYIEIIGVITILMALRAVITKNRAEKLLYINVIGFCVSAIIALYIKTTFGFVLAAAFFISSTIGSNAIAYSLKDLEDEISYDKDMEERDEEN

SEQ ID NO: 5843 - protein, 166 aa, Methanobrevibacter ruminantium
MDMIIGIILAAVISWINFVVVDTFLGLPEAPGVKGAETVGYSIKERKGDLAGGFFQGNILCSPDASAGTLIAAIGVYALGIQGGLIAALLVYIGNRLCADPGYAGTCGALTMTLLIFIFSFVGIEVEMFICGMVIAIFTIQGIHHPTSSRLLGKIAKSFGRYTKYE

SEQ ID NO: 5844 - protein, 108 aa, Methanobrevibacter ruminantium
MISIGANGFQLLINYIVAIVVAVIIAFALRLPLLPERPIRFSWTTSALFPTPIFAIGILAIFYSLNVYWIYDGLILSVIVGLASALFVKYGFDYIFPKPPQIEDGGNV

SEQ ID NO: 5845 - protein, 311 aa, Methanobrevibacter ruminantium
MKDKNVVVTGGLGFIGSHIVDALIDDNKVTIIDNLSSGKMENLNNPNHENLTIIKEDLMDADLEKILKDKDYVFHLAALASVPGSVAEPLRYNQNNIDASLKLFIACKNNNIKKVIFSSSSAVYGENPNMPLKESENFLPCSPYAAQKASCELYLKSFHESYGLDYVALRYFNVFGPRQDENSPYAAVIPKFISAILNGESPVIYGDGEQSRDFIYVKEIAKANILSAESDYNGVINVALGKSMTINRLFEIISDVLESDIDVKYLDERPGDIKHSLADISNLDKISFKPDEDKFEEQLRETVKWFISQME

SEQ ID NO: 5846 - protein, 497 aa, Methanobrevibacter ruminantium
MKIEVLDTTLRDGEQTPGISLNTIKKLRIATKLDEIGVNSIEAGSAITSEGEREAIKAITSQGLNAEIVSFSRTLIKDVDYCLECDVDAVNIVVPTSDLHLQYKLKKTQDEMLEDAVKVTEYAKDHGVKVELAAEDSTRTDIQYLRKIFKATIDAGADRICPCDTLGILTPLKSFNFYKQFTDLGVPVSAHCHNDFGLAVANTLSAIDGGASRFHATINGLGERAGNAALEEVVVSLYTLYKDESNERKYETDIKIDQIYSTSKLVSRLSNAYLAPNKPIVGENAFAHESGIHADGVIKNSATYEPIMPELVGHRRKFVIGKHVGTKGLNNRLEELGLEVNKKQLNDIFYKVKDLGDKGKTVTDTDLEAIAEHVLNIEQEKKINLDELTIVSGNKIRPTASIKLNIENEEVIEADVGIGPVDAAINAVNKGIKSFADIQLEEYHVDAVTGGTDALIEVIIKLSSGDKIISARATEPDIINASVEAYIDGVNRLLENK

SEQ ID NO: 5847 - protein, 174 aa, Methanobrevibacter ruminantium
MKYNKELANLDNVEILGFKGTIESIPKTLEEIDNIRNSCCDVGTIQLMNADAIAGPKHLEHGTIHAMNAFERGDNLANDLGIEILLRTSAQRQISKAFKILGLKEGEMNIAVVMIDCPDYFIDELSNIFIRDDSVLEADESKLMKIYDIPEKELKTIHLSDILIDKTSKLIIAQ

SEQ ID NO: 5848 - protein, 480 aa, Methanobrevibacter ruminantium
MFAIVSLSAVSASDDFSSSLADDSDSDILAIDDIAQKDSSHKLMDEEDISVEFEIDDGDDDTSYDSYYDDSPGDDWSNYEDYDPELISEDAILTKIEVLNVPSHYGDDNISFRLIDLNTGLPIPDVNLGLQDSYDYDVYSFFTDEDGVVVYPIPVKVGDFSIVIGFYEDMMVVNELDDMVCNFTKLNVSIPTVPASIKITKTGTYYNDTVLKVSLVSSVKEVLSNQKINLTFSNGKKATVKTNSKGIANYALKFAPGNYSVTAALVSDGIVEANKSSLKNIKIIKAPGTLSPTALSTTYASGKYFQIKLTNSKTKKAIGGVKLNLKVYTGKKYKTVTVTTGSNGIAKFSASTLSVGTHKVIVTVKDTKYVSASSKTSSIKISKASRAISAPKVTAKYKSSSTFKVTVKNKASKKILSGVQVSLKVYTGKKFKTYNVKTNSKGVASFNTKSLTKANHKVIVNIKASANYNAASATSYINIK

SEQ ID NO: 5849 - protein, 500 aa, Methanobrevibacter ruminantium
MEENPIDFKDNSINSKALKDSDYEHASDELSQDLYNRIINAKENEIILIEPGTYKIHKVHLTKNITLQGTGDPREVIIDGEQLGSVFFINDINVTAQFYNLTIINGLSDNFGGGICIETGNTYVDNCIFINNTALNITNGGAISNYGNETNRSYLFINNSLFIGNHADHDGGAVTTCYAISDIYNSVFINNSAVRDGGAIRVSVYGYGNVQDCIFIGNHADEWAGAYYSWAGNSSIDRCIFLNNTAGTNGGAVMVSGSLNLTNSLIVNNTGGETGGSFYIQQPMFDAKTVINVNNNIITNNSSPLGKEIFVKWNATQLLFPNFNNNDWGDEDPTGPDVVDPNNVSDRIIPERTKRITVLYDKLNWGLLDRYTDVLDDYYGKSSSSDSKANSDTKTNSSGLKFDTENKTNDDSKEEQGSILNNSNGFALLNHNNSSSSNSTAGGGLEKKDNSTFVSPKDYQKMVELFEDNPSASKSTDIRYFAVLAFILLVFLVGLARKRK

SEQ ID NO: 5850 - protein, 337 aa, Methanobrevibacter ruminantium
MNLKFKKPSRESQMAMSKVAIGEDNIDYHNMAEEKLSNATNHQYAKLVNSGNAAILTAMNSIDGAILIPDQGAWNGFKQIANFLNKDLITVTTNQCIIDLDYLQESINQNDDNIDLDDENNKSALFLTSFAAYTAEQDIKEIAKFLHKYNILLAEDASGAICDMKGDLANGKYSDIIIGSTGSPKIINVEDGGFITTNDNSLLEKSRLILKTSKCSNITACGISHEIEYAKDNLNKTIDFTLNLKEKLNDSTDFEVFHSNKRGINLILKTNDPKSLSYKLRQEFALDSHGMITKCPNYNRLKEKAVAIEIKNLDISCLNEHNSNQIFNTIKKYEDFA

SEQ ID NO: 5851 - protein, 397 aa, Methanobrevibacter ruminantium
MRTSKATKNAYLAKLTEKIQMQSVNVGRDLDGSTPPSVFIGRWSYPKVYAGPMMVAQTGDTAIMDSPESWIGQNKTQEDIIGYRMNLVRGKQLISIKDLENPFVEKLQDISLAAKSIDSEATFGSRPSGAMFNEESMPHGPSAVIEKFDIDAVKWDRQLEKSFYDTDLKARDAVMNLHNKDVPFSAMQKAFSVGAFGIKKNRRLVPTRWSITACDSTIADSLLKEVRHYNIMDSYRVYEFSSLKNYYAIILTPTEWQYEWFEAFIKILGKEEMIFSDYETNTDKREYSCVGGCYYTAKMAVLDKLAKLKLQSGVIILREAYSGYVPLGVFNVRENIKYAMNGDYKEFESLKDSLAYCSTKLKIPISKYVKQSNLLNELLHSQQTTLDAFFKKSPDLQ

SEQ ID NO: 5852 - protein, 308 aa, Methanobrevibacter ruminantium
MLEPKEFISDAIAKIKEEIGDEKTIIALSGGVDSSVCSVLTQEAIGDNLTAVFVNHGLLREGEAEQVCSVFEERLNFKYIDASDEFLSELAGVEDPEEKRKIIGRVFIEVFEREAQAVDAKYLVQGTIAPDWIETEGEIKTHHNMALPSGMVLKVVEPVRDLYKDEVRLVGTELGLPDSIVQRQPFPGPGLGVRVVGDLTRENLAVCRAADAIVREEVEKAGLDKELWQYFAVLTDTKVTGVKGDERDFGYLVIIRLISSIDAMTATVPEMPWEVIRTISKRITSEVSEVTHVALSISDKPPSTIEFC

SEQ ID NO: 5853 - protein, 79 aa, Methanobrevibacter ruminantium
MFDNADDFKKKALDNKDELKREYINIPIGEDEQSFRISGIGEKAIKIEKYVKYDDMVDAVESGKEEGLEAVIMKFVEEY

SEQ ID NO: 5854 - protein, 188 aa, Methanobrevibacter ruminantium
MKILVINNKGQYNHRIQRTLQNLKIPSELVKNKLSISEIEEKEPIGLILGGGPSIDGVGNAAEYIKHFDIPILGICLGHQLIAKTFGGEVATSDTESYAQVKININEENPLFKGLTSPMDVWSSHKDEVHSLPEDFDIIAESSLCDIEAMKHKEKEIYGIQFHPEVHHTPKGEYIFKNFYEICQNYNE

SEQ ID NO: 5855 - protein, 48 aa, Methanobrevibacter ruminantium
MEIDELITYLIIIAVVAILIKIFSWLLPIFVILAVAYVIYLYITENNA

SEQ ID NO: 5856 - protein, 481 aa, Methanobrevibacter ruminantium
MKRRYKVLFLLAILTIISINAISASEIGLDDNNAIDENDGFKIKQDIMSEKIISDNEDADSNNANDVNTDSSDEVNEDNVIEQNTDTDTVDEDEEDPIIPVDTRLFNPDSVIKGNDLNIVLKDIDNNPLANQTIKFNINDKQYQRTTDKTGTAKLKINLSPKTHTFFIEYDGCDEYYPTNLVFDLKVIKPVQTKLSVKSTIVYKNNKLMVYLKTSDNKALANQKIKIGLPKKTYTRTTDKNGLASLNINLNPKTYSINLSYDGKGKYLPTSKKIKIHVFENELLGSTYYGKVELLKGIGNSSSKVKIAYVVGLHVLEHQIHDEVYNIMKQKTSMHYSYNVYKITLTKKSGNYNTDRMRGQILAKNYIVPHVNKQKYNLVVDVHSTTGVYYKKSYFIHVPQNRHKPSLNLANKAIKIINTLDKQSKIVYWSPDSQTSPPYLTLPIMKAGTPTFVFETLTSEPVSRSKYRANILINAVDKLFG

SEQ ID NO: 5857 - protein, 315 aa, Methanobrevibacter ruminantium
MIFMENYDIIIVGAGPAGLTAGMYAGRQNSKTLIIDRGFAGGLGLEVPLMQNYPGFDLISGMELIQKMKAQTENYCEIKENETIQSIEKTEDGFLLKTRTSPLLMSEESDEIREFKAKAIILATGASHRHLNVPGEAEFLGRGVAYCATCDGMFFIDRTVLMVGGGNSAAQEALYLKNLGCNVKLVHRRDQLRCEHHLQKALEEKEIEVIWNATVEEIKGDMVVESVRLNRNGQEEDYKTDGVFIAIGDDPSNEIAKELGIDLDEDGYIITDKRQATSVEHVYSAGDITGGVKQWVVACGEGAVAAISAYNDLNL

SEQ ID NO: 5858 - protein, 615 aa, Methanobrevibacter ruminantium
MMGLEIHQQLNTKHKLFCPCSTELTDDEFDDGIIRNLRPTQSELGQIDRAALQESLRHMTFKYESFNNHTCLVEMDDEPPHALNREALDICITIASLLNMKMVDEFHTMRKQVIDGSNTGGFQRTGLAATDGYLDTPYGRVAIESLGLEEDAARRIDSDDEFTQFRLDRLGIPLAEITTDPSMHHPEQIKEVAYMIGQVLRSTNVKRGLGTIRQDVNISITRGARVEIKGVQDLDLMPEIVEREVQRQLALADIKDELIARNASVDDTIYDLDEVFKDTSSKILSKANCIKGIILRGFDGLIGKEVQPGRRFGTELSSYAKKMGVSGLFHTDELPAYGIKADEVDAMKEFLKIGPQDAIIIVAHDEDIAINALNEVIRRAEMAFDGVVEETRKALDDGNTEYMRPLPTANRMYLETDIPLFQITDDMVEPIKNNLPELPDAKKERIKAEYKLSEDLASQIVRRLLGDTFESLLARVKVDPTTVASVLVSDLRDLKRERYNVDVLTEDKLVEVFSLLEANKISKDALKDLLVEVCKNPDENVEKIAEDANLTLLSEEEVRAIIHEIAQNNESMIKERNMGAMGPLMGMSMKQLKGKADGSLVNKIVREEIQNILNG

SEQ ID NO: 5859 - protein, 435 aa, Methanobrevibacter ruminantium
MTYKEISKEFLDKANVTIGDVIKVTKEDISYEGILLDRSEDAKDAYIVIKLDSGYNVGVNIESATIELIEKGDQPKIGFEGDTIEKDPNKQNISIISTGGTVSSIIDYKTGAVHPKFTAEDLLRANPELLDLANYDVKALYNILSENMKPEYWVKAAESIADDISSGADGIVIAHGTDTMHYTSAALSFMIKTPVPIVVTGAQRSSDRPSTDAFLNIYNSCGAALSDIAEVTVLMHNSLDDGDCALHKGTKVRKMHTSRRDTFRSIDSEPIALLRDGKVKSVNLPYVKRGENELELNTDIESKVALIKSFPGISSDIIDYHIDKGYKGLLIEGTGLGHVPDYMVDSLQRANDEGIPVVMTSQCLYGTINMNVYSTGRLLQDAGVISGVDMTPECAYVKLAWALGQSDSLDEVKKIIQTNIAGELNESSSLKYFLN

SEQ ID NO: 5860 - protein, 279 aa, Methanobrevibacter ruminantium
MELTSYLSQIIISVIIFIILCLLANQVKKIIEKHYGIHLNPNDFLPIEEIKSLMQLYFLLIILLIYICIMNFFFNNFGISGELIFINSLIDIILSVFLVTIYYDGSTRGKIISIFLLPIVSISYILFGGSLIRYWDFIRIPILLYLVVIFYNKFIDYTERNNLGKTILILLSIIYTGILLTIVLEKQNPIDAVAMVTNAITSNGYAALGDSEGGVLTSVFLAWGGYIISGVATATLAADIIHRNSRKKFRNMETKIDNLENKIDNLERIIVESQKENEE

SEQ ID NO: 5861 - protein, 142 aa, Methanobrevibacter ruminantium
MADKFSKEKRSYIMSRIRGKDTKPEILVRSYLFSKGLRFRKNDKRYPGSPDVVLPKYNTVVFVHGCFWHLHEGCKHAKIPKSNVEYWEKKLYGNRDRDKRNKKELEDMGWNVITVWECNLKKDKREKTLFELYNQIISEDED

SEQ ID NO: 5862 - protein, 204 aa, Methanobrevibacter ruminantium
MVAALCTEALGKDRVIGVLMPNGVQSDIDYAKLLVSHLDIKHYIINIRDAVDGVLSQMTKSGIEISEQTRINLPPRIRMSTLYAISQSNNGRVANNCNLSEDWVGYATRYGDGAGDFSPLSNLTVSEVKEIGRSLNLPSEIVDKVPIDGLSDQSDEEKLGFTYDVLDKYIRTGEIEDKTTKERIDYLHDLNKFKLELMPSFEYK

SEQ ID NO: 5863 - protein, 497 aa, Methanobrevibacter ruminantium
MTDIKVDKNVEKAKSSQVEERVIKKPESLYDSFPRKGNDIYNTHYCAGCGHGILHKLIAEVMDELNIQDRCVMISPVGCSVFGYYYFNCGNVQTAHGRAPAVATGISRAEDNAIVMSYQGDGDLASIGLNETLQAANRGEKIAVFFVNNTVYGMTGGQMAPTTLVGERTVTCQNGRDPHYAGYPLHMCELVDNLKAPVFIERVSLANPKLIRKAKIAIKKALMIQKEGKGYSFVEVLSPCPTNIRRDVKGVEDFLINEMGKEFPVKRFRDLSKERAPVERNVSDFSIESLDKAFGVDRTKEIAEVEDDFEDCKVKIVGFGGQGVLSTGLTLAQAACSEGKEVSWYPSYGPEQRGGTSNCSVTISAKTIGSPVVEECDVLIAMNKPSLEKYSIDVKEGGTILYDSRAGNYTNDNLDVKDNVKIISIPAREIATEIGNAKAMNTAILGALMELGKDSPILSQDAFAEGIKETFAAKPKLIDINLKVLDAGAKWLRENIN

SEQ ID NO: 5864 - protein, 388 aa, Methanobrevibacter ruminantium
MSNQIVKGNTAVIIGALYAGCDCFFGYPITPASEILHEASKYFPMLGRKFVQAESEEASVNMIYGGASTGHRVMSASSGPGISLMQEGFTYLAGAELPAVIVDVMRAGPGLGNIGPEQGDYNQIVKGGGHGNYKNIVLAPNSVQEMCDLTMKAFELSNKYRNPVVVLADAVLGQMAEPLKFPEEAVEPVIDNSWSVRGSKETMNNLVTSIFLDFNQLEDFNFQIQEKYEKIRENEVVYEEYMLDDAEYVIVSYGTSSRLSRTAVDIAREKGIKLGLLRPITLFPFPEKRIKELADEGVQFISVEMSNGQLREDIKAAANYDEVHLVNRMGGNVIELKDILNEIYQMVGSDERHKVDSEDKEFDKSYLSDKDYKEELDNDNYHNHRMVD

SEQ ID NO: 5865 - protein, 84 aa, Methanobrevibacter ruminantium
MKVNQIKPYPIISKNNCKACLRCITACKEGCLKLSEEINDSGYQYAEYTGEGCIGCGDCYYTCPEPLAIEVHIPKRLRKSAGDA

SEQ ID NO: 5866 - protein, 554 aa, Methanobrevibacter ruminantium
MTSLIGNFVNRVDFKSYKDFYDNFEFNVPKDFNFGFDVVDEYARIDPDKKALIWCDDYEKRVFTFLDMKKLSNQTANFFKSQGINKGDAVLLTLKNRYEFWICMVALHKIGAIAIPTTHMVKLHDIVYRVESASIKMVVTVEEDQLLPDFEQCEKELDIELKKVLVNSFRDGWFNFDNEIAKMSEEFERPTGDEATHEDETFLIYFSSGTTGNPKMVAHAHTYAIGHLITAKYWHNVVEDGVHHTSADTGWGKAVWGNLYGQWIAGAAIFIYDYVRFNGLDLMEKIIENKVNTFCAPPTIYRFLIKEDLSQFDFSDIQYATTAGEPLPPEVFKRFKEFTGLEIKEGFGQTETTLSLATFIWMESKTGCVGKPSPAFKIGLLDEEGNPVDIGSEGEISFDVSGGRPVGLFKEYYRNQEKTDEAWYNGYYHCGDTAYVDEDGYYTFVGRNDDIIKSSGYRIGPYEVENAVISRPSVLECAITGVDDELRGQIVKATIVLAKGYKPSEELKKEIQDHVKHETAPYKYPRMVEFVEELPKTISGKIQRKIIRTRKSIY

SEQ ID NO: 5867 - protein, 186 aa, Methanobrevibacter ruminantium
MIEMSDVNKDIGMRIRELRELSDITTEDMANELDVDEETYISYEDGIIDIPASFLYQIAHIFKVDLALILTGEETRMTYFDVTRADKGFAVDRRKEYKYENLCKKFVHKKAEMFIVTVDPKEDAMPSLNSHAGQEFNYILEGTVKIFIKDNEIILNEGDSIFFDATCEHAMVALNDETAKFLAVIM

SEQ ID NO: 5868 - protein, 122 aa, Methanobrevibacter ruminantium
MVNREDCVIFKQEYGNELLVNQQYVKIRAKEEGFMSFNLRVPKEDMEGIENFFKGFKIPEPILIDIACTGNIHCYFKGISPIINKPEYSFISVSVQELKKEIVEEEQEIGIPAHECVGCGLH

SEQ ID NO: 5869 - protein, 365 aa, Methanobrevibacter ruminantium
MSFLTLILKNPFRSKSRAILAIIGIGIGIATIIALGAITDGMIASADDTLHAGGCDFTVSGKIESTSSQMATFGTSTIDEDYIDKIANVTGVKDAIGMYMTVLMTTNSPYFAVVGLDPEDYQVSDLTITEGRMYKNDTNEIVIGKIASENEEKGVGDTITLDDKKFKIVGIYESGNTLQDQGGFTAIKNSQKLSKDEGKISSIYIKVNDGEDVDKVRDRITDKYGDNLTTISSLSDLEMTKNMIDMLNGASLAISLLAIIIGAVGIINTMLTSVFERTRELGVLKAVGWSDEKILLMIVGESIVITIVAGIIGSIVGVIGVELLAASKIMQLLNPVYSVDIFVKAFAIALFVGIIGGIYPALKSH

SEQ ID NO: 5870 - protein, 238 aa, Methanobrevibacter ruminantium
MANIIEIKNLVKSYENGNIKALNGIDLTIEEGEFVSIIGPSGSGKSTLLNMLGALDIADSGSINVAGYDLTVNKNLNKFRGEKIGFIFQLHNLIPNISVVENIEIPMYSQGKSSKEMRKKALELLDMVDLKDKANMKPNKLSGGERQRVAIARSLANDPSIILADEPTGSLDSKTSTKILEQIHKLHKEKNITLIIVTHDMTVAKLADRVIEVLDGKILNAEESTLLDNKIEIKVNLF

SEQ ID NO: 5871 - protein, 459 aa, Methanobrevibacter ruminantium
MQTNKNIESIIGDPKKAINRLTYPTILSMLLMFANNLIDSMWVSGLGAEPLAALGFMSPLYLVIIGFGSGVGAGANSLISRLIGAKRYDESNNAAIHSIIIALIVSIIISIIGMFFLDDLLVLFGAGSVLDYAMDYGMIIFLSSIIILFPAIVSSLFRAEGDIRRATVPLVVNAILNIIFDPIFIYIFNWGVKGAAIATVLSTLVNLLMMLYWYLVKRDTFIKLSLEYFHSKMEIYKEILFVSIPASLEELIYSIVAICFNYLIMITAGTMEVAVFTVVWRFVSIAFLPCISIGISTITVAGIAYGARNYENFKTTINYSTFLSFTITLIICIIFFVFAYPISETFNFISGDAEMISRTAEVLRIMVFYNIVIPFGGTAVYVYQAIGSGFKSLAITILRELILSVFLAYLFGIVLKMGIFGVYLGAIVGMAIGCFIGFTCIKIYQGKFKKECESLNQPV

SEQ ID NO: 5872 - protein, 344 aa, Methanobrevibacter ruminantium
MDLLLILSQEHDKLPLAELRAVLETEEIETELEMVCPGLVLLKELEEDVFDDYYRLLVRRLGYTHEVHQLIKTVDCSDLESEVKSIDWSEFIDENFAVRVKRFNSEIDTVDTERKIGGYILTSTDNISVNLSNPKSFIRVVAYKNTIYLCYGKYQLNKKYFEEMKPHKRPFFHPGCMSPKLARCMVNLSRVKEGDLVLDPFCGTGGILIEAGLIGAKVVGCDIDWRMKNGTATNLEYAGITDYKTHVVDIREMEMYEEADAVVTDPPYGISTTTCGEGASGIFKEFLESIEHSMKEDALLVMASPDSLDIDSLFKDVGFVLLERYAIKMHRSLTRIISVIAKID

SEQ ID NO: 5873 - protein, 432 aa, Methanobrevibacter ruminantium
MSFDYDVAIVGAGPIGSSLAYELAQNGLKVCLIDKKKRIGLPLQCAGIVNKRISSLCDIPKELILNEAKGAFIHSKNHSLTVSKKESQAYVLDRVAFDQYLFNRAREHLDTYLSSKVVDIDTELGIVQFKFDCEIKTIRSKIIVGADGPLSLSAKKVNSKLNYFNASQYLVKVDKIDEMSFVDLYAWGDLFPGFIWAIPVYSNIYRIGLFSEDDYKSQSKMLDDYLENEFRYDEYEVLEKYKGKIPIYDKSNKLFKNRLILIGDAASQVKPTTGGGILIGLESVQFAKDAILNALNTLDFDKIDFDLVGGSDSNEDDSDLNDANYKEELNNFLDELSKILENYQNDFENRFSKEFEIQFKVQKSLSTLSNDDLDYVLTKLKEKDADKLISEYGDMDNQSKLVKEFLKRGLIFSLAPKIHKKELAKIWLLNKD

SEQ ID NO: 5874 - protein, 636 aa, Methanobrevibacter ruminantium
MFGKDKKENSNEKVLYEGQPNLIVYSKSIFIAVILLGFLFFLYSTGIQYIGNMQVYMIESTKLPLTRYFAIAVFVIIMVVILYIIIKFLSWTSIKYTITESRVIVEKGIIFNKKNYMPFNTIQDVSRSQSILGKAFSVGTITLYSAYDGKDMSLKDVSNPKKIEDLIFENMRTTHLRSHNLYDDSYGNPYNNSYNNHNNHWGYDNYGDSYQNRDFKPIRPNSDEKVHYNRMEDLDDLELVDVKERKRNLREIRRKAKNSRGNNYNNQPIDGPSNNYNRNSNYDPNYNRNSNYKQNPNYNNRNNYDDFGYDDYESGYNQRSKRAPQGNRGYSKRNANQYRDDSRANHQHRETIRESYQRNPNKYFAQNYEKFHQDNLEAQNRGGESFNEMNPLDSNDYYGMDDDFISDEEFDSTINKAMENIGDNIKFKPNNHSRVVNSHEDFDSRVVNSHEDFDSRMNDSYDDFASGSRHNTDYANSNQNRHYNSNYPDDRQFRSNQSYEGDYRQSRSNQPYEGDYRQSRPNRSYDDGYGHSGSNPNYNNSYDQSNYGYDDYRQSNNPPRLNKQSSSDNYHKSNNRNRSSNYRNRSYNNQENYNSYNDMEDNSNNYEESDKKGKKKKKNKDSNDLLEKHSRKFRRS

SEQ ID NO: 5875 - protein, 98 aa, Methanobrevibacter ruminantium
MIFVLAKAIPKDEEACEKIVEFAQDLIENSRKEDGNIDYNLYSNTCDGTLLFVEQWESKEILGAHLQTEHFLTFGKNIADLVAAELDIAVYEAEATDL

SEQ ID NO: 5876 - protein, 227 aa, Methanobrevibacter ruminantium
MKVAVIGGTGPQGLGIAKRFAIEGVEVIVGSRKEEKALTIVEETIEELKDYDLNIVGMANEDAAKEGDILILTVPLAAQKPTLEGIKEFCTDKIVLDATVPLETAIGGKPFRFIDLMEGSAAERTAKILDGTGAKVICAFCNISNSHLSNIPNEIDCDCLIAGDDKEAKEIATELINKLPGVKAIDTGILEKSRIIEKITPLLIGLNIKYRSHYGGLRITGIPQFED

SEQ ID NO: 5877 - protein, 358 aa, Methanobrevibacter ruminantium
MATFKGFAMKRLNEIGWVEKEVPECGPMDAIIKPTCVSPCTSDIHTVWEGAIGDRRDMILGHEAVGEVVEVGSMVKKFKPGDRVIVPAITPDWDDEAAQRGFPSQTTEPLGGWKFSNFKDGVFGERFHVNMADANLTFIPDGLSDEGACMLTDMWSTGMMGSENANIPLGGTVLVIGIGAVGLSAIAGAKCLGAGRLFAAGTRPISVEVAKKYGATDIINYKNGPIDEQVRELTDGAGVDSVVIAGGNLENTWAEAIKSAKAGGTVSNVNYLSGADNVLIPRVEWGCGMSNINITNGLCPGGAVRMERLADLALCGRQDPELLVTHKFKGLEKIEDALLLMKDKPKDLIKPVVMLDID

SEQ ID NO: 5878 - protein, 274 aa, Methanobrevibacter ruminantium
MIISEELFEGICDLDDFNLLKFVISSELRLKILFSLYESSKSIKELESEINRKSGNISRGLNELKSCKLITKLPNKLFAISSTGFLVAKNLENLMDNMGSIESNGEFWENHSIKSIPNKFLKELSIFNNSTLVKSTITDFAKPINLYLENIKKSTYICMILPVFSKIFNDAVNDAIIEHDGYLDLVTTKNIYDLSIKSDSDNKIKSLVRDKKIKFYIVDDLPNIFFTVSDQFASLYLFFDDVVFDNSEMLLLEDDLNLNDAYRFYRFFKNEILK

SEQ ID NO: 5879 - protein, 286 aa, Methanobrevibacter ruminantium
MTNRFEEENFLELQEDIKFLINSEIRLKILGCLYNSSASIKQIEAITNYSYSSILDNINKLEQKKFIYSIEDKFYLYNKTRLKLNSILYFNKSATFLRENSDFLNQSLIDINSEAIKDLSALEGSRLIESNNIDLFKSTEIFQRSLMGFKFLKGIFPYFHPRHDDIISYWIDNDCTVELILPDEVSEAVKNFIIDYVPKSPGIKNRFVKLKPNDHNIQLAFTVSDKCFVLALYTKSGQFNQNAVLVSTNPEAITFGLKLFEEYEELCGDYVSLENLIYPNGREDDY

SEQ ID NO: 5880 - protein, 424 aa, Methanobrevibacter ruminantium
MDDSPNEVPELNRPTKIDNIEEPKTVDELQKELDLLKAENQKTKRNLMWKVRKLEKDKILTENEKIRLERELKSLRGEVERFRSPPLVIATITEIIDDSRMTVKSSTGPSFLINYSKFLDEDLLKPGSRVALNQQTFGVVEVLPSEKDANVSGMEIEAKPDVTYDMIGGLDEQIIEVKETVELPLKHPELFEKVGIDPPKGILLYGPPGTGKTLLAKAVANETNATFIKVVASEFVKKYIGEGARMVREVFELAKEKAPSIIFIDELDAVAAQRLKSSTSGDREVQRTLMQLLAELDGFESRGDIGIIGATNRPDILDPALLRPGRFDRFIEVPAPNEDGRREILKIHTKKMNIDPEVRMSELVELTEGLSGADLKAICTEAGMFAIREERDHIIKADFEDAINKIMGKNKTGTLDDNGGVMFG

SEQ ID NO: 5881 - protein, 167 aa, Methanobrevibacter ruminantium
MNCEICGKEIEGKPLRTKIDGSVLLVCNDCAKFGRVQRDTPLERKFVTRDKKGRKEANAKTRPKKTYTRNEEPMDELVEDFNLVVRQAREAKGWKREELAAKIYEKASVINRIESGKILPDLKLARKLEKTLNIKLIEKYDDMDLEAYKSSSAGPNTLGSIVKIKRK

SEQ ID NO: 5882 - protein, 140 aa, Methanobrevibacter ruminantium
MALILIRGENNAKILNAIADVERHANLTLETKPKKVDPKFADKLVENVLKSPLRTKSKVATAFRVKEDTTIAILQVKKIHPPAHIVVVSNTYDGYRELSKIINEGKVFKGYYSNKSSSGTRMKDYKLTKTSTNEGLNIYM

SEQ ID NO: 5883 - protein, 408 aa, Methanobrevibacter ruminantium
MLFSVIATVSATCNVIVITDPSGEDPNGAAAGSMSFANNMFQSSFIMSKDDGYAMLSGGEGNGTERNYAIIAALAAMQHGATPASAAALASGFKGIRLVIGGPSMGAAIGGDYNAYLVVVDDAGTIKVTHHTGGVVQLPQGSKGAIIHLRNSAGNPMYGTAERVRRETAVNIGKMIRDGYPATYIVGKAMKEVAEDSGEKYGGGAVNLVSSISTGDMFVPDQVNTTGYPMDENYSKSCEKCGWATGFPDAERYNVCPYCGSELTVNSATDVLIDSITVSKDSVSVSVYGSDRLGLSDITREVVKASVKKYGYNASTIAGSLNKGINNGLIVGVDYVEPSDLNVKPDVRAVGVYYNPLPNGRSSPAWNLPINSMVLTILGTIQTAIGFVLIMLVIFRTRLLKSFKDRVS

SEQ ID NO: 5884 - protein, 165 aa, Methanobrevibacter ruminantium
MFIKIRRDTLIILLLAFILILCGRLIIYVAYASSAQVEEGVPIAGIIVKGNDIVPIDNIRYNVENSGLREGSYIDGDILKTSIRELPVTEAEANAEKFVKRSTIPGTTIAPIAGADVNVNKQTGIVTVTVIEDFSTINITGNSTTSTDFTENEPSKSVYNYSLAG

SEQ ID NO: 5885 - protein, 374 aa, Methanobrevibacter ruminantium
MIIPTLGCPSNCSYCWGSEDNAELMDIDVIKQIVEWLADFRDEPVHFTFHGGEPLLAGYDFYKEALPLLNDAETHETEGFSLQSNLWLLDEEMVELFSKYNIAISTSIDGPKEINDYQRGEGYYDKTMKSVKLATDHNIQINFVCTFTSYSKDFSDEIYDFFKANGLNLKIHAALPSLRGNNADPWALPQDEHGKLLIDWLDKYLYDLDKFVIMDLDHIAKSSLRRVGTLCTFNDCMGTTLAVGHDGSIYPCYRFVGMDEYIMGNVYDKPSMETLEQSEAWEKLMEFKNFVDEDCADCKFIKFCRGGCPYNGIVATQSPRAVDPQCEAYKMIFGEVSRRANEDFKKNAMAAFGGAPRVRKEGDPFSIMDLMTKM

SEQ ID NO: 5886 - protein, 72 aa, Methanobrevibacter ruminantium
MKFEDLMAKCPKCGSQDKTAVRRFIDNHHAHAELKEFKCDNCGFVYETGKDYEDNEDETIKKGLIKELNKTM

SEQ ID NO: 5887 - protein, 348 aa, Methanobrevibacter ruminantium
MDYSIKSGIFGLVVADALGVPYEFKDKHYCDMNPMTDMIGHGTYNQEAGTWSDDSSIALATLDGLTDYEFGEDDVEGMRIKNFAEIIDYDSIAHKFADWLINKKYTPHGDVFDVGNTTSHAIYSFYAGKVDALHASGAGKKDAGNGSLMRILPVSFLIYFLSLKYDFDEEGEMEAIHNLSSITHRTLRCQMACGIYIKIAIELLKNYFDSEDDSNLLELVNNGINSAKEYYETKEEFAHELSIYEDVFSLEIQDFDRDDIKGSGYVVEALKAALWCLLNNDDYKDTALAAVNLGHDTDTTAAIAGGLAGIYYGYDNIPSNWLDKIAKSDYIGELCNNLSDYLFEILED

SEQ ID NO: 5888 - protein, 259 aa, Methanobrevibacter ruminantium
MSLEILKKGTSENFLLKQIIRKNFTSKYKDSVLGILWSFFNPLITMALLTAIFSSVFARNIENFPVYFLTGRCVIDFFNSGTKIAMTSLKKNSGILNKIFVPRYVFALGGIFSEFINFLMSMIVLIVIMIVTRAPFHLYAIFSVIPIAILFILILGVGLTLSILCTKFTDIEYLYKIFTSLLVYACAIFYPIDIVPQPIRQYMELNPIYGIIAQFREFVMYGRFPSTKLMLITFLTSIVIFIIGVIIFKKYQNRITLEL

SEQ ID NO: 5889 - protein, 409 aa, Methanobrevibacter ruminantium
MDNKNENSNKIKTQLIPSIHNTVSLQAHLTTKDGEPIVGEEVVYKLYSIDKSFLTQYSRITNEEGLVHLTLNIKHKVYIEICYEGSEKYESNNVMTFRTKPSDDEKNVKTKHPLQVQREEKLEQKKIEEKKKNLLDFQQKQKDLESVDEDNIAIELKNVNLSFTIGSDKIDNLKEYVIRTIKRTKEKKTIFKATDDVSFKIYKGEKVGLIGFNGAGKSTLLKIISGVYTPDDGEVIVNGKIAPLLSLGAGFDKNYTGRENIFLNGAILGYNEEFLNSKYDEILEFSELGQFINLPVKNYSSGMLSKLGFSIATIVEPDILILDEVLGVGDVNFKRKSREKLNSLIESNITVLLVSHTISEIRNICEKAIWLENGKIREIGEVNDICDKYLEEAKKVSDDKTKKLKPKRF

SEQ ID NO: 5890 - protein, 226 aa, Methanobrevibacter ruminantium
MASIVAIIPAYNEEEALADVIAKTSKYVDRVIIVNDGSADRTADVAIEAGAELINHPTNLGKGEALKSGFEAITDDSIIVTIDGDGQHNPDEIPIILKPIIEDGVDLVNGSRYLYGHEENTPAYRRVGQRVLDIATNISAGIKVTDSQSGFRAFSPKARNCFRFKDTGFGIESEMLVDAAEAGLKIVEVPITVRYDVDGSTKDPVTHGVGVLLKIMKDKAVRTFKK

SEQ ID NO: 5891 - protein, 323 aa, Methanobrevibacter ruminantium
METQRIMVTGGSGFIGTNLVNELRSRGHEVLSVDLLHHEDEADLYSDSYSDYVRGDIRNYRQMERIFDDNDKFDYVYNLAAEYGRWNGEGYYENLWETNVIGLKNMIRLQEKLGFRMISFSSAEVYGDYEGIMSEDVMENRPIKDTYQMNDYAISKWAGELMCMNSATMFGTETVRVRPVNCYGPHEAYSPYKGFIPIFIYKALHGLPYSVHKGHKRIIDYVEDTANTFANIVDNFIPGEVYNVGSKQEWEMTIEEYSDLVLEAVGIDDSLVTYTPAEDFTTKVKTIDFSKAIRDLKHDPKVSPKEGIKRTVEWMKWYYRIED

SEQ ID NO: 5892 - protein, 180 aa, Methanobrevibacter ruminantium
MTNKSPEEEIEELKAQLSKYRKENRILKERCASYEDRIEHFAIERKELSRAITQFESLELELRQYDLEELIQNTRKLNHRIDILRRYLQTEREDNEKLNELINKLTKELDDANYEISRLTTEFHKLRVRKNQRTYFLENRLDIAYTKLAQLKYTLNEFEELGFWDRLRGKKPESYDDIDI

SEQ ID NO: 5893 - protein, 281 aa, Methanobrevibacter ruminantium
MKAVIPAAGLGTRFLPATKAQPKEMLPVYDKPTIQYVIEESVNSGVDDILIVTGKGKRSIEDHFDRSFELEHHLKTKGKEDFLKEIEYISDLADIHFIRQKKQKGLGDAIYCAKKHVGNDPFVVMLGDTITKDTVPCTKQLIDIYEKYEKSVIALEEVPDEKVERYGIIGGEEIEDSIYKIDKLVEKPPLRVAPSNLAIMGRYVLTPDIFDCIENVEPGYGGEIQLTDALSKLDEIYGQVFKGESYDIGNRIDWLKTSLRFALEDDSARDDILEFIKEEII

SEQ ID NO: 5894 - protein, 137 aa, Methanobrevibacter ruminantium
MNFKIKAKGHKNVLSLHKSTFEITKDKDLSLSGDCIIGLDIDKCMLDFPKEFKEKLANDETIVTVKLKSPNAYDEIVGYGHHDLTLDHPTDIVCRKSDFICSRTLMIKSDKAAIDLNRDLIEDLANGESLDVEIILS

SEQ ID NO: 5895 - protein, 312 aa, Methanobrevibacter ruminantium
MIINTGLRTDIPGFFSKWFYNRIEEEYVYVRNPYYKSQVFHYKLNPELVDCIIFCTKNPKPMLSNLDKISEFNQFWFVTITPYKKEIEPNVPSVNKVIKSFKELSSQTGKESVSLRYDPILINDKYTLDYHIEAFEKIASSLSDHTSEIIISFIDLYEKTKRNFPQAREVSKEERLIIGKEFSNIARENNLILKTCVEGKELDKFGIDSSGCMTKEVIERAIHNKLDVRVKKSRNRPCDCLLNNDIGEYNTCNHGCLYCYANSNKQLVKRNFKRHDPDSPILIGNIREEDEIKEINQESFLIHEDTVQTKLF

SEQ ID NO: 5896 - protein, 152 aa, Methanobrevibacter ruminantium
MKGTYCLIISMKKSDKIKIGNLYPEAYKFKKGYYVYIGSAMNSLISRLNRHLSDDKKMHWHIDYLLTSEYSEIREILFTDSEKRIECDLANEIAEDGLEIEGFGCSDCNCNSHLIFFNRKRDALRRVKDAYESLGIEYYDLKYFRTIDNKKD

SEQ ID NO: 5897 - protein, 960 aa, Methanobrevibacter ruminantium
MKIIFKRCLVLISLIFILILTLGLVSASNNINQINDMNCSVYEDYSENIITADLNSNSNELNSDFAYGDSDSEEILDEPSQKLKTGSDNSDFKDIQNLIDNAKENDVIELSGTYTGDSLIVVNKSLTLKSSSSATLDGEFLNELMAINAPNVILDNINFINANYTGLSVNNNYVTIQNCNFDGCINGELGCALIIHGNNVNVLNSNFTNNVANKSSCHHTDGAAIYLIGNDCQIDNCSFINNWGYNFETSSSGGAIWIKGNNIVINNSYFFNNSATAEVGWTFHGEEITYLADGYGGAAFLVGKNVKIINSLFDSSLSHAQGGALYYKSAYDCSIINSTFLNSFSVGEGGVIYLGQNIDGLMIDSCNFINNTADGLDGVLVKYTDLGSVLYASKFAENVVITNSSLLNNKGTSAVYFLGNNLNISNSIIENNNLSTAVIYMNGSMNDNFWSKNFDSADEFKNDCFIIRDNESQVPDTWFNLVCDGLDSLKAKGVYDYNMSFVLKDASLDNHASKISLTNNLPNYHINLKNSAKNKINPNELVIVDNQADFTYDYIESAKDSIDVYDDYNNLILSKKVLSGITYINDSGNDTKDLQDAIDSASSGSLISLSNKTYVLDTILINKDIHISGEENTTVMLSNSSDYIFKISNCSAANYSDYGIAISNINFILDNGDIVALAEAVNGSGSLSIDVASIKITDNSFTSREGVVRESITILELDSQRAVLAPTRNISISNNSLEIGMNPFDFNVKSVINGSDVRVDVGGNLASKKASQIICKDMVTKAIASNVDSRSGEYFNVSLKDSQGKPLQNKFVQIGFNGAVYNRTTNESGELRLQINLAYKGVYTFAISYLGDDECNGSFEVAKITVNPQSPILMANNAKYKVSSTKTLSASFKSMKGSPISGKTIKFTVDGKTYSGKTNSNGIASVKVSLNKKGTYKFTAKFAGDNTFAAVTKSAKVVIS

SEQ ID NO: 5898 - protein, 267 aa, Methanobrevibacter ruminantium
MKRQKKIAIYGKGGIGKSTTVANIAAAYSEDNKKVMVIGCDPKSDTTRTLCGKRIPTIVHTLKDNKKPELDDLVFEGFNKIKCVESGGPEPGVGCAGRGVIVAMKRLENLNAFEEEFDVILYDVLGDVVCGGFSVPLREDYADEVFIVSSGEYMSLYAANNISRGIKKLKGNLGGIICNCKGIDNEEEIVNSFAKEIGTQVIGVIGRSNLIQRSELDAKTVVEYAPESIESDAYRKLAKDIFDNDNYSTPQPMEDEDFENFFKSFID

SEQ ID NO: 5899 - protein, 419 aa, Methanobrevibacter ruminantium
MVELLAPAGNFISLSSALKNGADAVYIGLEDLNMRVNASNFSLEDIKKASEMTKEYGAKLYVCTNTIMKDKDIEMLKDQLPYIKEYGADGIILSDISLIELASQNGLEAHVSVQENTTNFYALKTLERLGAKRAILSRELSLDEIKEITRKLKESDSTIETEVFIHGAMCMAISGRCFLSYGLYGRSANCGDCLQPCRKEWKLSFEENEDDDVINFSDCDDESFIISQSYDDSYRTNFFSPKDMALIEHIPELIEAGIDSFKIEGRARSPDYVAAAVSVYRQAIDLYYDDPDNWQFNPEWMEELMKVFNRGYDTGFYFDTPYEISENNQSKFIKRDIGKVVNYYNKIRVAELKIWDDLALGEEIMIQGPTTGSITHVIESMQIDGKSIEKAEKGSNVAIAIDEKLRESDFVYKLVPREE

SEQ ID NO: 5900 - protein, 480 aa, Methanobrevibacter ruminantium
MKDKCGIVGIHSKDSSKDVSHLIYYGLYALQHRGQESAGIATYNINYGLNFHCGMGLVTDVFNNSLINSLSGNVGIGHVRYSTTGQSKIENSQPFFTELDDGFIAMAHNGDIVNSGSLRDELTKKGYQFKSGTDSEVVCYLIKEAYEKDKDILNVIDAVSQKLIGSYSLVILINDELYVLRDPMAMKPLILGQTNDHFVVASESVAFDVIDAEIIRDMAPGELLYFKNNEINSYILPSAKGSRRAHCMFEYVYFARPDSVIDDRSVYNTRLRIGEALFKENPIDADLVLPVPDSSIPAAIGYSRASGIPYGEGLIKNRYVGRTFIMPTQEEREIAVRLKLNPLKHELVGKRVVVIDDSIVRGTTSESLVRILKAAGAKEVHMLIGCPPVIAPCYYGVALATKDELIAANLEIEEIRKQLGADTLGYISIESLIEAIGIDGDSLCLGCITEDYPTEIPEDLEAESYYDYYQDLKDAVEEDE

SEQ ID NO: 5901 - protein, 470 aa, Methanobrevibacter ruminantium
MNNDFESDEFNSNDNNNNDFESKLVDIRIVLTDLNYIEAISKAVSNFDLSNFNVNISSIIPSSDIEIAKNTIIGADLVLIATSSDFEGKELYSNFKRALKTDYNFVEYLKLPSLDELEDYDYDYDEDNTFEDEIANSIIRAGLYSISNLSSINKSKKAYYNVKKDFDDSRLRFEKITKENDILLNESKQIREKNEKLREEVKILQKDLDNIKSDYSDLKSRFESIHSKNSLEVFSLMELWQDLFNETFTEEIYRFILISTDNFRPKNLMIGQGAICAESKEDAMDWLKIIKTAFILSDTNKQELNFNNFNSNFKFEDLDSNISSSQNLDSNISNTRYDLDSNDSNLFSSLDSNIFNAHNSDSSDEFIYNERFEGNNNSQEEFRQLDFDDAFDLNDNEGQESFNQNDLDNSYNSKDDPSDEINVFNLKSLKGFREESDEDESDENGDYSYDEDDDLDEADDLFNPFSNIWD

SEQ ID NO: 5902 - protein, 324 aa, Methanobrevibacter ruminantium
MILITGGAGYIGSHINKLLNKSGYETIVLDNLSKGHKKAVKWGSLVNADLSDSDKLREIFQNNDIEAVMHFAAFSSVAESVEEPEKYFKNNFENTANLLRIMKEFRVRKFIFSSTAALYGIPKEIPISESAELKPINPYGESKLMVENLLKDESDFGGLKYVSLRYFNAAGADLDCEIGEDHNPESHLIPLVLDAAIGRRNSISIFGDDYDTPDGTCIRDYIHVQDLADAHLKALQYLEEPFNDSNIFNLGNGNGFSVKEVIDTCKKVTGIDFEVKVEGRRPGDPDILIADSKKAEEVLKWKPEYPDLEDIVESAWNWHKKLHG

SEQ ID NO: 5903 - protein, 396 aa, Methanobrevibacter ruminantium
MIKTDVLVIGAGPAGSSAARFAAKGGVDVILMDKKSEIGAPKRCAEGVSKKTFDKLDLEMDPHWVTQEIAGVRLVAPDGTDVWLDEDVIDLPEAGYILERKVFDKHMAMEAGREGAQIKIKTQAKGLKREEDGSFTVTCESMGETFDINAKIIIGADGPESHVARWAGLKAYTKPKHMEAGVQFEMCNAKMEKSNVLEFYFGSVAPGGYFWLFPKGDDIVNAGLAIIPDMAGDKSAYEYLVDAVNNCYATKDAQPVELNVGGDPVGGLVKEMYGDNIMLCGDAASQVNPLTGGGITNGMMGGRFAGEVAAEAIKAGDCSKDFLKKYEDLVKEEMGHEMQKYTKVCDYLWTLDDDDLNSIAHAFQDMEFTKISTTELVKAVIKVQPKAALKLGKLFL

SEQ ID NO: 5904 - protein, 54 aa, Methanobrevibacter ruminantium
MIVKDWCSYCGCCAGVCARNCIEVKETALVISDDCNDCGICVKACPLAALELEE

SEQ ID NO: 5905 - protein, 201 aa, Methanobrevibacter ruminantium
MPSFLNIRGNNHDPKDPQLIRDGIKLGVNYKRFSKEPVLGKNILLRSNTVIYNDVIIGDDFKTGHNVVVRDHTTIGDDVLIGTNTVIEGGCKIGSNVSIQSNVYIPRNSIIEDNVFVGPCACFTNDRYPVRVEYDLKGPQLRKGCSVGGNTTFLSNIEVGEGAIVAAGAVVTRSVPPYYLAIGTPAKIKPLPTSLRVPNMI

SEQ ID NO: 5906 - protein, 103 aa, Methanobrevibacter ruminantium
MTKHVCPRCGSTNVEWIIPQNWSKWECRDCSYTGPIIDADDDLIAEIKADWEENKEKYIEEEYARAEQMASGEDERLDEEMEIAEEDELSDEELDKKLEELDL

SEQ ID NO: 5907 - protein, 386 aa, Methanobrevibacter ruminantium
MVYDVSALLSHINRIRREIGHEEVNIEIKEVLYNIETNEMWIITNDRPDKSAVIGKGGWVVGRLREELQINSIHVESYSDFLTKEYRMGLSLNKLKSFVTTEDLSDDVKLSLYNLIDLLTIKSDNLYSFDFKSYFDDLENGPYSYFEAEKPVAIVALSGGTDSSFSLILAKKLGFNPIAVTVDPGTIVLPNQFKYNIDKLTSKLDVKHEYIPVAYDDIIEDSLAGRFHPCGRCSKRIEETLFKYAVDNDIPMVIFGDMLSTGSQCITEQFYGENSEDSVSQDLEDSVSSDLEDSFNTELEDSINHKLIRLNLPAALAVSKLENKALTSHYELNKFKGFGCPLLYEVHKKFPHMKKYSIQRILRETRSSALEPGEALDLIWSFYKTD

SEQ ID NO: 5908 - protein, 472 aa, Methanobrevibacter ruminantium
MKIRTGRLEKEMTDEAAVYTSSLEFDRFIFDADIRCNYAHTSMLKAQGIIDSEIADKILDALDKLSEEGFDALEFDHSVEDVHMAVENYVTKLVGPEAGFMHTAKSRNDQVATDIRLLLRDRISEIQIAILEFIEGILELAKEHKETVMIGYTHLQHAQPITLAHHLMAHAQALKRDYQRLDDTYKRVNLNPLGSAAMATTSFPIDRELTTRLLGFDDYLENSMDGVSSRDHIAEAVFDLTALCTTLSKICEELVLWSTYEFGIVSMADEYSSTSSIMPQKKNPDVAEVARSKCAIVNGELMTILTILKAIPYTYNRDLQEITPHLWNACDVAYDTLKITNHMLLTVTFNTERCLELAGANFATATDLADIMVRERKIPFRTAHKIVGRIVNEAVAEGLNPSEIDGAYVDNVADELGFDKLNLDDDLIHNALNPIENVKIRNVPGGPSPEMVQLAIDNMNIFLDVEFEKQGI

SEQ ID NO: 5909 - protein, 52 aa, Methanobrevibacter ruminantium
MATKKELYTVEGDKIVRKNPFCPRCSEGVFMADHGDRYACGKCGYTEMKTKE

SEQ ID NO: 5910 - protein, 104 aa, Methanobrevibacter ruminantium
MEIEITEKKENILFDRTEVKFNCLYEGEATPKLLDVKSKLVALLDTKKELIVVDNIQPGYGEPKATGYAKVYGREASLLDVEKPSVIAKNKEPEAPAEEEDEAE

SEQ ID NO: 5911 - protein, 166 aa, Methanobrevibacter ruminantium
MFRIDENSIDEFKKPLGVLYPDFEDAIPMIKEASFLISVGDQTIKNLLDNDLYPNLGIIDNRIQRKDHNHDIIRTENILKADNPAGTITEDLWETIELAISSILEDEDTRIIEVKGEEDLAVLPCLLIAPEDAVILYGQPNEGLVFVNVFEAKDKATRLMTFFNKE

SEQ ID NO: 5912 - protein, 276 aa, Methanobrevibacter ruminantium
MGYLTDLFKEALVYPLSNIVTLIILGVLLTISKFPNVLSSFGVDVDFQLIIIFALISFVVSLFMDGYSLAVIKDAVDFNVSMPAFDIMKNFIDGVKVWVLKILYYIIPTIITIFVALLTGGVDAILNIFRFIGENQELLSNLNTPAELINAIPQEYIATFLTSLFITAIVAIILYIIFGLLYNIGLCRLAKYDSFNEGINFKAIINDIKAIGLGTYILWYIILFLIIFAISIVMGLIAAIPYIGIILLNLLFAPFIFLLVNRSLGLLYTKAEGYNG

SEQ ID NO: 5913 - protein, 60 aa, Methanobrevibacter ruminantium
MALQACTHCNLLTEKQQCPECKNPTSTNWSGLLIITDPENSDIARELGIKKAGEYALRVR

SEQ ID NO: 5914 - protein, 189 aa, Methanobrevibacter ruminantium
MTTIEGTVRIPPHRFGEPLEDVAIETLNESYNGQLDKNLGLIVGVTSIEEMGEGVLIMGDGAAYHNVIFNAIFFKPEQQEVVEGEVIDIAEFGAFVRIGPMDGLVHVSQVTDDYINYDPRNASLIAKESKKILTEGDRVRARIVTLSLKGKTVQESKIGLTMRQPNLGKFEWIEKEKAKALEKKMAKVE

SEQ ID NO: 5915 - protein, 133 aa, Methanobrevibacter ruminantium
MKSESREVFIDTNFFMIPFQFNVDIIEEFKRVLPNYKLVTTTFVIDELKGLKNNNKGKVRLAAGLGLRIAQSDEIEIRNVSLNDGESVDDALIRISKVLATNDIVLKKKAKKNGIALVFLRQKKYLAVDGYLA

SEQ ID NO: 5916 - protein, 407 aa, Methanobrevibacter ruminantium
MKVQSDVNIGLVGHVDHGKTTLTKALSGVWTDTHSEETKRGISIRLGYADIEFRKCPNCEEPLCYTTKEVCEHCGSETELIKKVSFVDAPGHETLMATMLSGAAIMDGAVLVIAANEECPQPQTKEHLMALDVIGVKDVVVVQNKVDIVPRERAIESYKEIKEFVKGTCAEDAPIIPVSAQQGANIDILIKAIDETIVTPEKDLDKPARMHVARSFDINKPGSHPDKIKGGVIGGSLTQGTLKIGDTIEIRPGINVKENKQNKWISLSSEIIGLQAGGEAVEEVGPGGLIGVATKLDPALTKADSLSGSVAGMEGTLPDVLHSFDMKTELLERVVGTKEERDVDPIKLKELLMINCGTTTTVGIVTSVKKNISVDLKLPVCADKGDRVALSRRVGARWRLIGFGIIQ

SEQ ID NO: 5917 - protein, 129 aa, Methanobrevibacter ruminantium
MAFKIVVSEKELSYQLEVEEAKQLNGLTIGEEFDGQIVGLDGYTLKITGGSDKNGFAMKRDVDGPRRIKSLLTGGVGYNPKVDGVKRRKTVRGNTISEDIVQINTIVTKAGSKSIPEILNPEEEEEAEE

SEQ ID NO: 5918 - protein, 596 aa, Methanobrevibacter ruminantium
MKIRSPIVSVLGHVDHGKTTLLDYIRGSTVADREAGGITQHIGATEIPIDTINEICGEFISKLAIKDTIPGLFFVDTPGHAAFTSLRKRGGALADLAILIVDINEGFKPQTYEAINILKMYKTPFIVVANKIDRLFGWETHEGASFMESYNKQAPRIKSDLDLKIYELMGKLHEEGFQSERFDHVTDFASQISIVPICAKSGEGVIELIALLLGLAQQYLTQQLEISEDAPAKGTVLEVKEEVGLGITVDSIIYDGVIRDGDEIALMDANNVVTTKIRSILRPLPLEEMRDSKNKFKKVDEVVAAAGIKIAAPNLDDVVSGSPLRVLSDQEDVEAELLKELEDITVDTDDEGILVKADTLGSLEAVVHLLKEMDLPIRSAEIGDISKRDVINASIAMDENEEYGVIIAFNVKVHPKAEDDLKNSGVKLFAGDVIYQITEDYEAWIEERKEAQKKQWLDAIIKPAKIMILPKLIFRQSKPAICGIEVEAGTIKTGYSLMDANGDYVGVVASMEDKGETLQAMPRGQRVAMAINDAVAGKDFEEGDSLYVDIPEKHFKVLEREFKDKLTEDEFLALDEIVEIKRKRDSDWGKLGLFEY

SEQ ID NO: 5919 - protein, 150 aa, Methanobrevibacter ruminantium
MIERSFVMMKPDAVSRRLMGQILSRFEDKGLKIVAMKLRQIDEDLAKEHHGEHKEKPFFGGLVEYITSSPALTMVIEGDDAISVIRKMVGATNPKEADIGTIRGDFGMDTGRNIIHASDAPESAAREIALFFDEEEICDYSMSDNAWIYE

SEQ ID NO: 5920 - protein, 53 aa, Methanobrevibacter ruminantium
MRTCSFCGKEIEEGTGKMYVKRDGTIYFFCSSKCEKNMIKLGRVPRKVKWVKQ

SEQ ID NO: 5921 - protein, 68 aa, Methanobrevibacter ruminantium
MEEGSPAEVIEVLHRTGMTGEIMQVKCRILEGRDKGRILTRNIMGPVREGDILMLLDTIREAKEIRTP

SEQ ID NO: 5922 - protein, 135 aa, Methanobrevibacter ruminantium
MDGKSQMKKEVNYMANIYVKFDTPEEIANKAEEALEVAQNTGKVAKGTNEVTKFIERGNAALVVIAEDVDPAEIVAHIPVLAEEKEIPYVYLATKDKVGAAAGLSVGTASACIVDAGDAADLVEEVVEKVAELKE

SEQ ID NO: 5923 - protein, 65 aa, Methanobrevibacter ruminantium
MELPIAPIGRILKNAGAERVADAAKEELAEAIEEYGNEIAQKAVNFARHAGRKTVKAEDIKLAIK

SEQ ID NO: 5924 - protein, 398 aa, Methanobrevibacter ruminantium
MIRCVSCGEEYEDDEVIYNCKKCGSVLEVEMEVDVPKSTFEGRRDNLWKYKECLPVDADKRVSLDEGGTPFCRCEKLGKELGIDLYVKVEGSNPTGSFKDRGMTIGMTKAMMLGVDTVGCASTGNTSASLAAYAARAGLRCAVFLPAGKVALGKLAQAMFHGAEVFSINGNFDEALEAMTQLAREKYLYLLNSINPFRLEGQKTIGYEIVHDLGWESPDRIVLPVGNAGNISAIWKGITEFHNAGFMDDVPMMTGIQAEGACPIANAYRDNTMDMVPVENPETIATAIRIGAPVSAVKALRAIYDSNGMAETVTDEEILAAQKLLARTEGVGVEPASAASIAGLKKLVEQGDVDKGERVVCVVTGHLLKDPNTAIDACVDPVQVDADIDKIKEILLNK

SEQ ID NO: 5925 - protein, 233 aa, Methanobrevibacter ruminantium
MEDFKYYKNKIKEEIKLAFAHNKYFLIVSALIFIIPMFVGYFYSDQITPYIQPMVDTFEENIRNGTVTLSTKSLFANNVEVAIILYALSALGAILGIVVLANNGLFIGFYGANFELTRYVLLTLPHGIFEISAIIIATTGGFVILSFVLNFLYNVIYPDYSYTDIFDPYFSDAKITVGQRFKSSFKKHGHRIKESFILLCVSVILLIIAAFIEANITIPFAYWICSLFGISLI

SEQ ID NO: 5926 - protein, 363 aa, Methanobrevibacter ruminantium
MIDPWASFSLDYDKLVNQFGIKKFEEVLDSIEDPARLMKRGVIFGHRDFDKLVPLINGGKDFAVMTGMMPSGQMHIGHKMVIDQLNWYFKKGASLSLSIADMESYAARGISFNQAKDIAINEYLKNYIALGLDLTADNVNVYLQSQNKTLNDLTFKLAKKVNFNNMHAIYGFNESTNIAHLYVPLVQVADILLPQTEEFGGPKQVVVPVGVDQDPHLRLTRDIAAKMNEEYGFLAPASTYHRFLTGLTGDKMSSSKPNTAIYLNETPKQAEKKVKSSKTGGRETLDEQKELGGRPDECVIYEMLVYHLIDDDKELDKIREECINGELMCGHCKVHTAELMKDFFEDLKVKQEESLDIAESLLD

SEQ ID NO: 5927 - protein, 171 aa, Methanobrevibacter ruminantium
MRGDLSDGIVTVKIGEGNERAISLNQKSQFGKLSEDCLELSLMEASYLMESGRLDIYEDDEKCQLDYIIDMIKDQDLYGKYLVYRDLKNRGYIIKTGFKYGSEFRLYERGTGPGKSHSDFLVKVLYEANEVNVLDFASYVRVSHGVNKKLLLAVVDDDFDVTYYNIEWTRP

SEQ ID NO: 5928 - protein, 217 aa, Methanobrevibacter ruminantium
MAREISENIEEYLETLYKFGSKDSYVSTTTLSKELGIAPGSVTQMLKKLEDIGYIDYVPYKGAFLTAEGNKIAQKITRKHRILEKFLKDVLNIKDENLHAQACAMEHSLSDEAERAICHMLEHPDTCPDDNIIPACDFNFESCEDCLNDHLDFDDIEERDFNLFSISQLSKGDEGEVLFIRGSDDALAQCVRVGITVGSKVKIEESESPNFLFYHSK

SEQ ID NO: 5929 - protein, 482 aa, Methanobrevibacter ruminantium
MSSNSLSSNELNSNQLNSNQLNSNSISNSNSNSNQKANSKDSRLILLNDKNLKVNGTEEKYFIKLVDGNGNPIPYVDLIFNIDSSIEFVGGTVRTDENGIAYIFMDFSYPGPYTVYASFEGDGNHNPSSTLSSTVSVYKDTEISSLQSYGYLGENFSFKITSCGEPVSNQKVLISIDNKNYTATTDSEGIAKVKLPNQQKTYSISCNFSNRVYYYGSSLSKNIPVYKRAFTQPNCYALLRKSTFTVTLKGADGKILSNRTLRFIVDGKEYNKTTNSKGAASINIDLERGEYRINYYFNTDGVYGPVSNYTDLNVVDPSGQYKRLLNVKSSASAKIYLTGGGYATVTSLIKSTAKSITKKYKTNFEKAVAIYNYVRDNLDYQYYYNTRKGATKTLKTKSGNCCDHANLVVALCRASGIPARYSNSKYCVFGSGLRSGHVWAQIYVGGTWYSADATSSRNTLGHIENWDTKTNKKDYNFRNLPF

SEQ ID NO: 5930 - protein, 115 aa, Methanobrevibacter ruminantium
MSRTWSFYKSFKNLIVGVNIRTKLLFLSALLILLLSISSVSADSSIDDSNLDIDSNLGIDSNLDLNADLYADLNNFDDFNNLNNYDYSNNYVDYSDILEGDSLIWKLKRIIILIN

SEQ ID NO: 5931 - protein, 1010 aa, Methanobrevibacter ruminantium
MLLAVLLMGFVLISSVSAIDIDEASSSSDLSDSSISNDYLVANSGDDSVASSSASSSIAADDSDLSNNASSSNVNFENEVLSTNNNEDTESEIVKDSKNQLSSSSLQASTKTKTTLKGSGSSVYRGNPYYVTLTDSNGKVLASQKVTFNILGKNYTRTTDSKGVASININLAKGKYNIACLYAGTENYASSKLSVALTVNLMSTKINTGGSTVKKGNAYSVTLTDGNGKALSSQKVTLNILGKNYTRTTDSKGVASIAINLAAGKKFTLTASYAGSANYLSSKVSATVTVQKGDTSIKPSGTSIVKGNSYSFTLVDGSGKGLANQKVAIKISGKSYSRTTNSNGVASIAINLAAGKKYSIVCSYAGSSNYKASSSTVSLSVTNPSTNSKTFSIAKIEAAATNLKAYVNKNKAVPTTVSVGGTNLKISEFSYLMSKAIVNLNSNNTNAITLPSGIYNGASASNSLNATVYKAQYVDLSKRVYNYIDKNKVPAAYGTVYNANGASLGNAGFNLYTFAFAKILDFHKTNKYLPNYCSFDSSVFKASNGSSSSNSSSSTNSSSSTNSSSGSSNSSGSGSSTPAVTVKATSLKAASTSVIRGDDYSVTLTDSSGNALANQKITFALSSSSYTRTTNSKGVASLTLNLAGGKYSITTSYAGTSAYKASKLTNTVTISNSSSRFFLNDIETAAENVKTYVTKNKALPNTVTVAGTQLTLSQFSYVMAKAIHNINASNSNYISLKSVASSNSTGDYLDTTVYRAQYMNLTNRVISFVESDKITPTFATVYNSNGKSVGKAEFKLYTFAFAKILAFYKTNNYLPTYCTFQSSAIGVVPDVATNVTINSKINANMNQFKVGLNEKNTVSNLSAYLVGTGQSTITTNIKNVAAQLTKGLNSTATKALAIYNFVRDDISYSYYSDSRKGADGTLSSGSGNCVDQASLVVALCRAAGIPARYSHAQGCTFSSGLVTGHVWAQILVDGVWYSADATSVRNSLGNIVNWNTNSYHSMKQYAAVPF

SEQ ID NO: 5932 - protein, 1298 aa, Methanobrevibacter ruminantium
MEDNLLKNRKLILISIFLVSLLAISAVSANEDVDNGLIDSDDSILQSAEVSDSAIGSDSILQSAEVSDSTIESDSIELEDKGNVLKSSDNASFELDDKNNIGSADSELEDDYLEPKEKNVLSMDENAWFYNYIVWYDGDDGDWVSLDFVDDLKNPENITIRLNSYDTPFDGVDLAVINDYDYSITKLTTDDNGTVVYNVPYEVDELSVFVGFWYDGDFVATYGNWESYTICAVNWGTWYRDPSKRTYDFYVSVSDMDTYESPIGAQVVFTSDSNQYVGTIDENERAIIPKVSYGTYDVKVIYDGYCILNLSDSSAIEFYDDHHTDPDSLGDERIDYMYVDSSGVVYLDLCYDGSLKVPDNSTYEPYGDDNPSGGGSGNQSGGTVANGTFTSLQSLFNRAAANSTISLTRDYVYDDGFDIKGIVINKDLTINGNAHTLDALGKSRIFYVNNSTVKFNNILFANGNATLGGAIYNGSAVNCLFINNTAQDGGAIYYGSALVCDFINNSASRNGGAIYSGGAVNCSFINNSANLGGAAIYDSLFAVNSTFVGNTLASSNPTGGSATTDVSVVSFNPITTYIPSPPSMTGSIGWGGAVLDFTRPVIYTDYNETFYLLTNFTLQQDGFNNYGNVQLTGRDLVFKSLYPYSGNYSMALIISGQIFTPTYVLGENDTYEAHFKLNGLSLGLHMVYAYVDFGYPEYYSYRIGGGYMDRVAYDRTAEIIFPILINKTVEISSSNLNKYYGGTGKYTVTLTDGGNPIANANLNVSLAGKTYPLKTNANGQASMDINLTPGTYEAVCTYDGVSQRSNIIVRSTINLQNLTGIYQNAKVNATFLNAAGSPLANTKVSFRVGSKTYSATTNANGLATANVDLAAGTYDVIAINPVNNEQKTSKLTISKAKSSISLSSTSNNDKVTLTASLSPSTASGNVTFNLNNKNYTAKISSGKASQTITGLNEGNYTANAYYSGDSNLNSSSASTKVVVKIVIPTKIIYKNMTTGPVAKSDGRIGNYFCVKLVDGSNNALTGLPIKIGFNGKIYDRTTDSNGEARLQINLANADIYTFAICYLGDDDHQASFEVAKIDVNKKYPKPNSANGNSNGVPAQETISNTKLKTYIQYSNMTTKSVLKSDGRVGDYFEVKLLDNNKKAMANVPIKIGFNGKIYDRTTDSNGGAKLQINLLKPTTYTFAIAYLGDSKYQASFEVAKIVVKAQSPKLTAPKKTFKANAKTKSVSATLISERGKPMASQSLKFTINGKTYTAKTNSNGVATVNISLNKKGTYSCTVKFAGVTGANAKTTKTTIKIS

SEQ ID NO: 5933 - protein, 549 aa, Methanobrevibacter ruminantium
MAQINQPMYILRDDTERFQGRQALRMNIFASQLLASIVRTTLGPKGMDKMLVDKMGDVVVTNDGATILQEMDIAHPAAKMLVEIARKQENVVGDGTTTVVIIAGELLKKAQELMEDGTPVPTILMGYRLAVAKAMEILFDISFDARDKDTLFGIAKTAMTGKGSDYAKDELAELLVQAVKKVEEGEEVDKTLIKIHRINGGSVEDSKIVDGIFIDQGRANETMPKEIHDAKIALMKYPLELKDLENAKVDFTDPLQMQIFLDNEQEMLKEIADKIIDSGCNVLFCQKGIDDVVQHYLSKEGIMAFKRVKNTDVKRIMKATGAELITNIEDLTPDVLGKADYIHQERVFDQILTFIEGCDEPKASSILIRGSTRHISSEIERAMEDALGVVAATIEEGKVVSGGGSPEIEIARQLRLYANSIGGREQLAIIAFADALEIVPRTLSENAGLNTIDLLVELRAAHEDNPYMGLDVFEGKVVDMKEAGVIEPQKVKKQAIQSAQEACEMILRIDDLVAAAGALQKPDPDENLDNSGMPPAPGMGGMGGMPPMM

SEQ ID NO: 5934 - protein, 259 aa, Methanobrevibacter ruminantium
MNLEGVEKTMLLTLYTKAKHSQKPNHKFFDYMAIDIISEIDYDFSIADKDRSMQMGVISRTIVLDDMVSEYIRSHPKCTIVNIASGMDTRFNRLDNGIIKWYNVDLENSANFRLNYIKDTERVKTLAYSAMDPSWAEEIEASGDVLFIIEGLTMYLTEVENKQILDIIDENFKSCTIFTEIMPPVSVENVKEKSVEEMDAKFIWGVQDGFELRRLNPRFNWVKDVNLFDGMNVYKPITKLFTWIPFIRRRMDFIAVLEK

SEQ ID NO: 5935 - protein, 145 aa, Methanobrevibacter ruminantium
MNRNKIIVLLVLLIAVVGFTMGPACAASTTIKVGNYKDVGKGDRISTFNVPKDAQYLKGVYAVIFYHGKNGDDFRPHTYVLSKIKVYYKNKKGKIVTRSSTAKNLSGLSILSTKQVSGYTPYKMDVSYRKMTNAEKKKICGSLVY

SEQ ID NO: 5936 - protein, 324 aa, Methanobrevibacter ruminantium
MMRKNDRSSINPFTGKEHYDTVDDDKFLEGCFQGYYQELQRSQLLDNTPEGQFIVQVAVKLINTVNEFLTKIGRQDYVEGYYEWDVHLVANNSVNACCMPGGKIIVYSGIFSIANTEERMAFILAHEMAHALLDHGRTRASAQSTKNTAASVAWVGSFALDMVGLGGLGSLARAATNIASVGSQYFLLQPWGRDHEFEADKLGMIICHLAGYDIREVPKFWKEFAGDKASNFDFFSTHPSDAKRIEVMEASEIEILNTTDFYSKPVLPETPKATGERKNTNAKPQEPQAKAVADNKSTHFCTNCGSEVAPDDNFCTNCGAKIGK

SEQ ID NO: 5937 - protein, 66 aa, Methanobrevibacter ruminantium
MIEEHNQKSVEELVENFSYVYVYFADGRSIRISKEKKFEFKDNKFYIYDKDIEVNIVDIELIEFTD

SEQ ID NO: 5938 - protein, 285 aa, Methanobrevibacter ruminantium
MKKSVFKILIALALILLAVSIVSSNDLSDSNVSSDLTVDSDSISSDDTGSSDTSSDDSNQDDVSQDKTNDKKLSDSQSDSSKDTQDTDDNNTDNGSDKCNLIITKKGNEKVKVGDTVEWTIEVKNSLNTAENISVDEFLPQNFEFKSAKASKGNYAVEIANWDIGNLKENESATLVIKAQALKAGNFTNVANLTTDSDNINGKVLSAKADVEVLSENKKNETPVGPKKNKDNNSTVKKIHKLIKNQTNNTNMTPIDFKKSGNSLFAVIIAALAVLGIFLGRRRIN

SEQ ID NO: 5939 - protein, 406 aa, Methanobrevibacter ruminantium
MKADAYKIVDNVYWVGVLDWDIRDYHGYTLDGTTYNCYLVFGEDKVALIDNVYPGKSEQFWGRIKDAFEKEGREFKIDVVVQNHIENDHSGSLGEVVAKFPDVEVYCSKKAEPGLKNHLPELEDFEFNTVKTGDTLDIGGKTFQFVNAPMLHWPDSMFTMLMEDGILFSNDAFGQHICVSERLDTDVDPVILTDAARKYYANLITLASPMVGRKIDELAELGIVDNLKMIAPCHGQIFTNPEFIIDLYQKWSTGSYEGNKITFIYDTMHHSTQRMAHAMAEGVMSEGVKVKMYFMHDDDKSDAVTDVLDSKAIFVGAPTMMNNPFPGIGDVMYYLNCLSFGNIEKKKAVVFGSKGWAGGSARILAANLEGAGFEVVEQMEIDFKPNEEILEECYELGKKVAQLIKE

SEQ ID NO: 5940 - protein, 280 aa, Methanobrevibacter ruminantium
MSLKYFNNLTYEEIGEYNDKIVLFLHPKLLSHWIWKKQIEEYDKYFNNYHCIFIDLPHHGESKFDGKFSIEESSDILIEFIKHLLNNKKSESINIVAIGLGASIAIEILNKETHLINHIILSGLEIAQIREKEEETIIKRLAKTKAEYLNMKPDQFIIKAYLRYYGIRKEYYDDLEKSLDIPIRKEEEIAYKSLNYIIPDFSKETIEKDNILLVYGNKDNFNSTKSAIKLKKLFFNAKLIEIEKGNHLWNIIDYELFNQVIINFIQKEIIFNDERIKEID

SEQ ID NO: 5941 - protein, 304 aa, Methanobrevibacter ruminantium
MKIGVIGYGNMGSMIANNILELNLLLADEELIVSNRHIEKIEELIERYPDGKVQITDDNTELAKSCEKIIISVTTPNFKEVLDEITPFINEKTHIIYTCAGLDFEHISSFYDGKLSLVIPSLASTVTSNNAISSIGRRKGITLIKHNEKVDIQDSYFLEDLFNEFSYVRTLKDHNFFFEENGNLASNNPKLEICTILTSCSPAFIALMIDNFAERISNISDLSKDEAEDMILKTVIGTAILKEDKKISNSEIIEKVATEGGITAEGIDLLDKRLNSIYKKLINTLLNRYEEVSKEMDELYLKDN

SEQ ID NO: 5942 - protein, 646 aa, Methanobrevibacter ruminantium
MAKRNFSESLGKIVTLLKKDFTDVFTKNPVVPIVLLAIIILPSLYALINIQACWDPYDNTGNIEIAVANLDNGTTFEGESLNVGNEIEDELKGNDDFYWVFVNETELREGVKNGTYYSGIIIPKNFSKSIKSITTDDPHSAELEYIVNRKSNPMASKLSDSAAKAVYNKINAKIVQFINVVAYSKLGELQSALSQGAGQMSSGAVQLSSGSAQVNSGASQVKSGSNQVKSAANQVQSGGAEVQSGSEEIKSHASEVKSGANQVSQGSSQIQSSSQQIQAGSSQVQSSAKQLDSSVDVDKLPSDDLKHVVNSSKQLANASSNLAGSSSQLANGSVQLANGSVQLADGSVQLADGSVRLADGSVRLANGSVQLADGSVQLAEGSLSLAAGSQLLANSAAYALFAASSSLSGAASSLSSITGVDENQIGSYIYSPVTLNEIELNPVDNYGSEVAPFYLVLSMWVGALITCVMLRTGQSTGTEYSPSEMYFGKLLIFMVMAVLETTVTLIGASILGIEMSNPVLFVLSAYFIALVFMLICYSLTSALGQLGKGIAVIWLVFQISGTGGIYPIQLMGPILQAVSPYMPMTHGITLLREAALGLVWSNYIHSFLILIAMGLITLILALIIKVFADKRAHWFEEKLNETDLFH

SEQ ID NO: 5943 - protein, 112 aa, Methanobrevibacter ruminantium
MNPKQLKKMERQMKKMGMDMKSIDDVEEVIIRCADKEIIITNADVSAMNVMGQETYQVTGTAVEVEREVELVIPDEDIEMVASTAGVSVEAAEEALRECGGDLAEAIMKLSN

SEQ ID NO: 5944 - protein, 666 aa, Methanobrevibacter ruminantium
MFEIKAKDMRGRVGVLKTNHGEIKTPNLMPVIHPRKQTVDVKEYGADIVITNAYLIYKDEELSKKALDVGLHELINFDGPIMTDSGSFQLSVYGDVDITNKEVIEFQEAIGTDIGTSLDIPTGPYVDREKAEEDLEITIERAKEAISYVKDNDYEMKINSVVQGSTYPDLREYCATELTKLDADLYPIGAVVPLMEMYHYRDLVDAVMHSVKCLPDSKARHLMGAGHPMIFALCVAMGCDLFDSAAYILYAEADRLLTTRGTVKLENLNEMPCSCEVCCKYTPDDLRAMDKEERVQLIAQHNLHVSFAELRLIRQAIYEGSLMELVEERCRAHPMLLDGLRHLGEYSFDLEKYDPRSKKSAFFYTGPESLKRAEVTRHLNKLNEMDKRKNLVVLPTYTKPYTKHLTNSFNELFVYAKDESLSEDAECKIENGETDFMVLDTPFCLIPLELDEVYPLSQSDAPRIRDKMAIEFARDFLIDFAEDYDNVLIHPNVLEELELDYIEEYNYPEEIKFEKDDIKKLKAIADYQFGNGAGDALFTGKIKIEKSKKTGKIRHVYDKNQIIVNMRASDSFLILSKLGAKRLAAIEGMRNKVMIDNSVESFARDGKSVFAKFIKDCDENIRSNDEVLIVNEQGELLAFGKALLNYSEMLDFNTGQAIKTRKGFKD

SEQ ID NO: 5945 - protein, 617 aa, Methanobrevibacter ruminantium
MKINSFRVLLFIIIISLSFIGFSTISAVDLSDSCCDTLISDGSDGIILGGSDDISLSDENNNLNFDLNDNPDFNLDYDSNSYPNLNLSSNSNSKSSSNTYGNDFTLSRFKSVLTSSYNLNGGSFEDIQSAINHAADGDDIILNGTFTTTGSVIVINKTLTIIGSPNAVLDAKNISKIFLVEADGVNLKNLTFINGKSRNESDNGPYQGTVNWQGSNGTIVNCSFINNSGDEKSYGASILWKGSYGKISDSIFKNSYSGANGGAIFALGENLTINNSEFINNHGKEGGAIYFGGSSAMWIINSIFINNSADSGGALAACAMNRQVINSKFIGNSANNGGSISWCGSNGLISNSTFINNSADQKGGSILFTGTNNLVKGSVFINSSANIGGAINSLNRLNYINDLRFENNNASLGEDCYGDLEFKRFSTSIASEDMVTSAIDANLDGRNGEYFNVSLKDEYGNPLINKDIKIGFNGRIYNRTTDSNGQASLQINLKYSMVYTFAICFLGNDDFYGSFTVSKITVKTQKPNLEVNNFKYKSSTKSKVIKATLKSSRNNPIQGKTISFTVNNKVYTAKTDSKGIASVNVSLSSKKTYAFTVKYAGDDTYSSVSKSANILVY

SEQ ID NO: 5946 - protein, 407 aa, Methanobrevibacter ruminantium
MTYIEEATVIDDTIYDLINEAFENERKYNDPVYRNSIFKGHKEYFVKTDDGSYSIKSKEINNKVETLHTSTGAISESFEKFIKPLKLDYSQDIAILDICAGLGYNTSAAIDDFMKNSTEDANLQIDLLEISKPTLAAGLMVPSPIKAHDITKKAIEDALIAEDYASLSLEEESIPDNINLNIFIDDARKVIQKLEDNVYDAIFLDPFSQNMAPELVSVDFFREFRRVIKDNGIVCTYTSSAPVRMAFIEADFYVSLGPIFGRFQGGTLASPSPKNLTKSLPKNDEIKMALSDVGIPFRDPNLNLSSKEILDNRTEERHNARHNTKISSAVKTPIFLAQEMDDEPLKRRVERNLRKMNIPGVLSEEAFYLVGPEENYSEDYAEDNNSRTRVIEMAKRLDEIKNNKVIF

SEQ ID NO: 5947 - protein, 157 aa, Methanobrevibacter ruminantium
MDVKIKEKLDNLFNYISNALSSIYSRKDEKDYHDFISSINGRLICMADILDESEEFEREYYTFLKIKKMIYYVLENIESINREDCLRVFDSFSKFNLLILLKFNYLDGGISQEEYQTKFDDFTLYLREFREYFYLNVYEKDGRFDALINEVSYIFVN

SEQ ID NO: 5948 - protein, 125 aa, Methanobrevibacter ruminantium
MDKKINLINFFWEEILFGLFKEKSEFLSCFVKCSNEVPSKFEINKDYLLNKLQLYNCGLNNFRKYCDLWHSLENLGIHEEDRKIILDAHDFAKDQFTIFVTVDEEFYNAVKSFSKLNIDKYKLLN

SEQ ID NO: 5949 - protein, 96 aa, Methanobrevibacter ruminantium
MDFIDTNIAIAYTFFPDKYFKTVDDFIVNSTEFYCSNNVCEEYKRKYKSIFTSFEYFFDEIILALENNNRIFLNKCSFEQFVLSQTSDIIWIWIKK

SEQ ID NO: 5950 - protein, 173 aa, Methanobrevibacter ruminantium
MYNINEKITLPRIEIKMDVKIKEILKNFLNNISNTLTSLNNKNDEEKSLELISSMKEYLLDFAMFLKELKEFQKEFSFFLVIRRMLNYVLDNYGSLCSSKRSVIFDSLFKFFELLRIKLSFLEGIYSKSSYLSYFNKFDTYLDEVKTEYYLNIYQRTGEFDDVIPRISQIILD

SEQ ID NO: 5951 - protein, 677 aa, Methanobrevibacter ruminantium
MGLFDNIKKIRNKESANSSSAILASTYNKINRRFGVGTDASSYIAKNMHKFYITSSKFSKGVQIKNLLRKLDITIHPEGFIYFLDEFRNLDYHGQIINSPIDYSLILDYSIYDLNEFYFNPKEGPGFRNQSSDYNREMLAILDGIELLIYEINKALAKSSRDDKSKYIRIFEDIIDKKASHFEEALQRILFLNQLLYQTGHSLNSLGRLDRILEDYYYNDLNDGYITNKEALELIKDFLKALDSYSWYKTDDESGLASQLITLGGKYIDEFGEYYFYNDLTYIFLEAIGQVNPKDVKIALRLSYKTPDDLIHLALDCLNENTIYIEEGVAVSFIIDNRIFTADGATIEANIDSNIVFSNDEAIIPRLLDFGYSSDDAYNYILSAHLEPTFISCLDEGNLSSISLLKPLNDIFEDKNELRFIINLDYLMELYKNNLKKEIEEKISALDQIQWNQDPFLSLFSAESYENQLDISQGGSRNNHFGIRFYGLQNTVNSLYNLKKIVFEDKTIDLIELDKMRKNNFKRGKYQETFLLLKNNPVRFPQNNPEIANISNEIIAFIGDSIKDYKNSLDGKLKFGLSAPRYMIKNDKRASFDATLKDIPPARLLISSQKTNSDIFIFNSSLDYKSSAINGNLIELNINTNDKQLTNILVEAIGYGFDQLQINLIREEIITKEDTEE

SEQ ID NO: 5952 - protein, 211 aa, Methanobrevibacter ruminantium
MNSDKKITKESSILDIGCGNGNFLSQLKRGGYKNLTGIDLFIEEENILEGINLIQTSLEDYKPSEKFDLIVSNHAFEHMDNQLANLKCFENLIKDDGLILLRIPIKSEPIWKRYGVNWFQIDAPRHFFLHTLKSFEILCDKTDLKILDVIFDSGYAQFVFSENYQNDIAWGEDGWTDFRSNKKLIKKYKKETNFLNSQGQGDQCMFVLKKI

SEQ ID NO: 5953 - protein, 108 aa, Methanobrevibacter ruminantium
MRILNGENMKCPICENEENNLTFIIKEMQIGLREEFEYIECSNCGCLFIKEIPKDIDKYYDTDYAPHLKPKSFNEIIFDKGSAIILSNSILSNLIPKEFVPPPFKINK

SEQ ID NO: 5954 - protein, 66 aa, Methanobrevibacter ruminantium
MTVSFLFVNGAASVLLNAIDKEKAVTKIYIMAVIFNVCLNLVLIPMFSYDGEAISTVLSVKYLLSF

SEQ ID NO: 5955 - protein, 37 aa, Methanobrevibacter ruminantium
MIIIPLSIGIFFYARLIIDFIYSNQYSLASTLIQIIV

SEQ ID NO: 5956 - protein, 475 aa, Methanobrevibacter ruminantium
MNQIKSIFKNTGWLSVSQVITSICAFLWTIIIARYLGVSDYGIVSFAVSFTGLMGIVMDLGISTYITREIAKHKDLVRKYFNNIFLFKLILAIILFILSGLILYVMGYSHLTIIVTLVFTIELIFMSMTTFLNGVFQAFEKVKYQAIGAILNSSFLLIGILITLGFDLGVISIAFAYTVAYSIYFSYMFLSYVKTFSRPHLELDTNFIREVIIKSIPFGLTNFFYSIYFSIDIVMLSYLAGDYATGLYKSAYNIINVFTTFFVVYQSVIFPVMSKFFKESQNLIKVSYELSVKYLLLIIIPISIGIFFYARPVVDLIYSNQYSLASTPVQILIWTVSFLFVNGAAAVLLNAIDKEKTVTKIYIIAAIFNVCLNLILIPRFSYDGAAIATVLSEILITIITLYHIFKTDYKPDLGLLKNVIKLIVCGIILFVALYYLNLSLWFAIPVGFIVYLISLFITKSIDDNDRYVIRELINR

SEQ ID NO: 5957 - protein, 258 aa, Methanobrevibacter ruminantium
MLMSIICVYNDEEVLEKYLLESLKTQNEEYELILIDNRNHEFNSAASALNYGGKKAKGEILLFVHQDVEFYENNLKDIKYYFENCQNLGIAGVQGVSEENYGRITTNIVSGIPKSTVSDYSITDITETQTLDELLLIIPKEVFGKYQFDEETCYDWHLYGADYCLNIKQKGYSVVLFPITLYHVSEGGSMSLEYFKTLKKVLNKYKYDYNRIYTNCLLSHEPNNQLKLDILYYSEILHIRNPITNFLSNFNFLKKILK

SEQ ID NO: 5958 - protein, 333 aa, Methanobrevibacter ruminantium
MQTVGMILCGGFGKRLRPVTEKVPKPLVEIKEDYAILDKQLFDFKNAGINEVYLLAGFLHEKIQERYGDEYKGIKINYVIEDEPLGTLNAIRLGMEALGEDKQVVIRNGDIVADINLKKMIEYGERSDYFVTMFVTKMTSPYGIVDISGDKITAFKEKPLLDYYINGGIYFTKGLLDFGEFKTGDIEKTLFPVLAKENKLGYYREDDLFWMAIDTSKELESVQKEYENKTDKPWGYEKVLIYTDKYLTKELYLKEGFQTSFHYHNDKDETMYIMSGAGYIEFEDRKEYFGKNDSIRIKPGVVHSIIATENTTLHEVSTPFLDDTIRVKDYYTR

SEQ ID NO: 5959 - protein, 335 aa, Methanobrevibacter ruminantium
MSEKKKIKVKFVDFQDSLKENDNFFIDSLKKNFDVEVSDDPDYLFFGAYGYKHLDYDCIRIMWTIENYVPDFNICDYALAYDIIEFGDRYLRFPFFLNRPEIENVRKTIERKPIDTSVKTDFCSFVVSNEWGDDYRIRLFHELSKYKKVDSGGRSLNNIGGPIGMGLDKKFEFDVTHKFSFALENAQNRGYTTEKIFDAFAAGCIPIYWGDPNIEEEFNPKSFINCNDLTVEEAVEKIKEVDQNDELYHAMLNEPTFLGDLDKYLQDFDDFLFNICNQPLEKAYRRDRIMKGKTQEHQYKLINRFYYKPYFFLIKVAQKLHIEFIGRKIYHFIRD

SEQ ID NO: 5960 - protein, 266 aa, Methanobrevibacter ruminantium
MSSQNIQIYVVSHSEEDIKNIDSNDIYTPLFVGRAGKDNLGFVSDDTGDNISNKNSSYCELTGLYWMWKNSPADIIGLVHYRRYFANWRLGKRLEREDIEKIFSEYDIILPKKTTALLGSVYEDYDHWNYAKDLDLCEEVIGEQCPEYLDSYKRVVEGKDLYYYNMFIAPKEVIAPYCDWVFPILAEVEKRVDMTGYDDYQKRIYGFLTERLFDVWMDKQNLRVKECELKVNGLRLNVHMWIVKRKIVRWAYVHIYMGLLHKDMRR

SEQ ID NO: 5961 - protein, 365 aa, Methanobrevibacter ruminantium
MKYDYLIVGSGLFGSVFAYEMNRRGKSCLVIEKRSHIGGNVYTEEKHNINVHKYGAHIFHTNNKEVWNYINQFAEFNRYTNSPVANYKGELYNLPFNMNTFYQMWGVKTPEEAKAKIKQQKAEANIDEPQNLEEQAISLIGRDIYEKLVKGYTEKQWGRDCTDLPSFIIKRLPVRFTFDNNYFNDLYQGIPMGGYTKIIEKMLDGIDVELNTDFLEDKDKWMAMADRVLFTGMIDEYYDYCFGELEYRGLDFEFETLDMENYQGNAVINYTDRETPYTRIIEHKHFENAVSDKTVITREYPKAWEKGQEAYYPMNDERNTELFNRYNDLADKEGNVIFGGRLGMYRYFDMWQVIDEALKLVKSLE

SEQ ID NO: 5962 - protein, 60 aa, Methanobrevibacter ruminantium
MEIQYLLNQALENENIREIEIVVKILKEFEKITQIKFELLHKELMEKPKKGLKQSKFSII

SEQ ID NO: 5963 - protein, 51 aa, Methanobrevibacter ruminantium
MNQNSKKEFEKRYEEFSNFFFKCEIEYHTLKGKTKHLMAKKYLSLFDMEYL

SEQ ID NO: 5964 - protein, 193 aa, Methanobrevibacter ruminantium
MYMNTPSQKNIDIKNYERIFKEKINFVVEKISRFFKGTSQEDSFLNEKLLDLSDPFIKSRIKEIKETTESIAEYLKIEYINYDEYYDFREIQSMMNQTLDYGSIEELKIILKIFNEFKNLTEFKFELLSNKSHSKSISFKDIDEESKEIFEKRYGEFSKFFFNRKREYYAIFEGECEEDVSEFFELMKKHALK

SEQ ID NO: 5965 - protein, 227 aa, Methanobrevibacter ruminantium
MKLFIDSNVIIGYCIEIDYWHYYAENLMKNENIYWSTTVKGESEYKLEKLIKTYSNFFNQIKEDLDKEIISKTEFIKLVKSIEYINNKKVPFEQENLANLVWTKGGWLDDVNSIELNENLNLISQGLKKKMYRNYNYCDEMLNLYERQFKAEYIQLVKRLEELKRGNREIHSPDSEILVDCHDLSLSQNLDMGFITSDGDIVYFKKEIKKMTNIKDIIYLKNVHRYT

SEQ ID NO: 5966 - protein, 275 aa, Methanobrevibacter ruminantium
MTISPKRILYLDEVRSLAIMLVVIGHLARLFSYNYNSWLFCSGVFSLTRIGVPLFFTVSGSLLLTRKYEVKKFLEKRFKRVCLPFFSWIIIYIVAGVLIWHYDLTFEYVVNTAFGVGDYSALFWFIWSLIGVYLLIPVISSFIREEGNWGAEYLILITIILSLLYTFGFFDYPQMKYNFRVIFNFFPVLGYFIMGSYIHNKKFKYSDKKMFAIGCVLFIVGICGHFAKIYLKGLGGLSLAPIDFFDICVIMETIGLFIAFKYASTKWDKRKDARN

SEQ ID NO: 5967 - protein, 85 aa, Methanobrevibacter ruminantium
MQEIEFRETKLGEVIVLFASCSFGIYFSHYILMRYIMYNGFLAPIRKTHALFWLPVSSIIIIGLSWLLIYVMSKIPYVRIASGVK

SEQ ID NO: 5968 - protein, 594 aa, Methanobrevibacter ruminantium
MCGIVGCVLKEGKVAPILFDSISKLEYRGYDSIGIACADEDKINLKKDSGKIAEVDAKLDLCDLEGKYGIAHVRWATHGDPSKINSHPHLNGDGTIAVVHNGIIENYLSIKEELEGEGYQFVSDTDTEVIPHLIDKYMKTGLDLTQSVRKVIGVIEGAYALAAISSAEPNRIVATRKDSPLIVGIGDSEFFVASDYPAILKYTNNIAFLEKGEIVILDEDGVKFLDENDQEMTKEIEVIEWSPEMAEKGGYDHFMIKEINEQSTAIKNTLNEKDKVKEIVDEVKGTINRVVFVACGTSYHASLTGKYLIESLVGIPTEVLLASEFKYSAKALNDKTLVIFISQSGETADTLKALDVANETSKTLAIVNVRGSSATRRADYVIQTQAGPEIGVAATKTYVSQLVAIYLFSALLGEDHELLKRLEKVPDYIEEVLQKRDEIKEISKKYKRDKDAFFIGRGFSYPIALEGALKLKEISYIHAEGYAAGELKHGPIALIDRNIPVVVVIPPGQDHKKIMSNLQEVKARGADVLGIGAVGDEDLISESDDTFLINCDVDDIIAPLVYIVPLQLLSYHVSVIRELDPDKPKNLAKCVTVE

SEQ ID NO: 5969 - protein, 235 aa, Methanobrevibacter ruminantium
MENAPNKEDIKKIAGDDLSKAELKKRIIELYDSGQTMMDIADSVNRSKIYVSNVIHGFYDEDEIKVRQYDKLRGKAKLDFSRYRSSTGIYRVSYVENKRSGNDYWSYQYYDDGRLKRIVSVNLYKLKTVVTEKGLDWFEFTEEAKEMVLKDKENFDESSLKRTNKTGFYRVTKRKTNTKQGYTWAYSFKENNHLYFVSSISISKLKEKVLSNGWEWEELTEEATRLVEEDSKKRI

SEQ ID NO: 5970 - protein, 249 aa, Methanobrevibacter ruminantium
MIEMDSKKLLYEGKAKSVFQGENADEVIIDFRDDMTAGDGARKESMGKKGYFNSIICAKIFETLEEAGVETQLIELTEPCVMKARKLDMIPIEVIVRNIATGSIIRKFPFEDKSPFNPPLIQMDFKADEFHDPMLNDAIAIALGIASQEDLDKLRELALKVNEVMSKMFKEIGIILVDFKIEFGKDSQGNIILGDEISPDSCRLWDAETLDMLDKELFRQGKDDEVIDAYEEVFNRLLTEEDKAKWNIK

SEQ ID NO: 5971 - protein, 90 aa, Methanobrevibacter ruminantium
MMYDIEVKVSLKAGMLNPEATTIQRSLSLLGYEVKGTKTKEIISFVMEAESEDDARAKVDDMCQKLLCNPIIHNYTIKIIKMDFTCASCE

SEQ ID NO: 5972 - protein, 217 aa, Methanobrevibacter ruminantium
MAIGIIRFPGTNCDRDVYKAIDLAGGEAEYIWWNNEDLTDYDGIVIPGGFSYGDYLRAGAIASNTPVVEGVKALVKEEKPVLGICNGAQILGEIGLVPGLFITNEVPKFNCEWSRLKVANNKTPFTKNFDLGQIIDIPIAHAEGRFYTKDIDLLKDQDQIVLQFAEENPNGSMEAITGVSDESGLVVAMMPHPERATTKLLGSDDGLEFFKGMLDSI

SEQ ID NO: 5973 - protein, 237 aa, Methanobrevibacter ruminantium
MPVYLIGAGPGDPDLITLKAVKALNKADVVLYDYLANDEILKHAPDTAKRIYVGKKAGEHYKTQDEINQLIIEEAKENENVVRLKGGDPFVFGRGGEELLALAEEGIDFEVIPGVTSAIGAPTSMAFPITHRAVATSFTVVTGHEDPTKENKQVKWDYTADTLIILMGIGNIKENTAEIMKYRDPDTPACAIESGTLPNERVVFGTLATIADKEINTPAILVIGKVIDVFKQIKGIE

SEQ ID NO: 5974 - protein, 239 aa, Methanobrevibacter ruminantium
MEIGEIITDSLKYPINNIKALIIYIVLGIVAGLVLVLTGVGVGAGAIANSAAATGIVGIIGIIIFFLIYLLILGYELDVINFGIERRDDAPEIDFARQITNGIKWYITCFIYMLIPTIIMIILSYLNQTLGLIVGIILFIIAAFALLMAQCRLAHTDSLGEALNIPEAIKDITKVGIIKIIAVFLILVILGLVVSFILGLFSVLGDVGTYIGAILSGIFTIYLAFVVFRASGLLYSDAV

SEQ ID NO: 5975 - protein, 503 aa, Methanobrevibacter ruminantium
MKILFLNLPYEFNISRASRWPEKTKSGTLYYPYWLAYCVGVCEREGYDCKLVDCITKAYTTEDTVEEVKNYQPDYIMAEITTPTCAYDYTVINAIKEAYPKAKILIGGTHATILPDAVLKECLGIDYLLRQEYDYTVGELISSDDVASVKGVSYRVNSDGVDIASLGINLLTEPVDFEVRHTEDREPLEDLDSLPYVSKVYQKYLNFDDYAYAFAQKPMIQIVSSRGCPNQCNFCSYPSTMGGRIYRTRSVTDLADEFEYILKELPEIKEIFIEDDTFTVNQPRVIEFCDEIIKRGLKPIWSCNTRVDLTYETMKKMKDAGCRLLVCGYESGNQDVLNETKKGITLEQSRAFAENARKLDIKVFGCFMIGLTGDSLETIDETYKFAQSVYPDMCFFQQAVPFPGTGFYDWAKENGYLITEDYSKWLNEDRYLNCLVDYPYADHKEIEKLRDSLMSKYYFSFAYIVKTFLANLDWVEFKRVMRGGTQYITFRLKKALNKSDNLD

SEQ ID NO: 5976 - protein, 258 aa, Methanobrevibacter ruminantium
MKKKIAITRPQERSKAAKEFIENYGSEAIIVPTLELKLENTESLKNLMEKSNELDWLIFTSVSSIESIFEFYPDFLDKLNPECKIATIGTKTAELGIKKGLPIDIIPKDYTAEGLLEEFERIDLNNKNVGVPRTFSARTILPEGLKNMGANVILAESYKSVIPEDTSKIEKLIQCILDEKIDGITFTSPLTVSNLFEIAKDEDKDNLVEKLSTTTLTVAIGPITGNILNQLGVNHIYPKRYTVKDMIDLMFRELNNRE

SEQ ID NO: 5977 - protein, 301 aa, Methanobrevibacter ruminantium
MNGEYLMFIDSDDTYPKDACEILLNKIEEYGCDIAFGRYLRHYPEENFIRKSYTPYIDTLDEPYLSYLDDLVKGSNFKGIVGSLWKNIFSKFFYGSSIDMNKFNSKESDNSHPKELDKNYKNNKEIFIRNIKDENKEEIAILKILPSFWTKIYRSELISKNNINFPECVSAEDLNFLLEAYFKSENGILFLNDKIVYNYFMRLEVVDKSVTKNINFRLVYDSIKAYRLSSELCDNFNIKNKDLFLNPYLLNWISLWLSRKNTKEENKIFLEEFDKLDKTKKYGLKYKLILKTTKLLLKIKS

SEQ ID NO: 5978 - protein, 107 aa, Methanobrevibacter ruminantium
MKEVMIWPIYLDADKSLNEGRKISQEYAISEPRIKEIEKAAQKLKYKYTVEEDKSYPGEWYNKSGRIIIETDDSKKEILMNLSNSIKDIREARKNYKPTKKGKKGKK

SEQ ID NO: 5979 - protein, 480 aa, Methanobrevibacter ruminantium
MIETLPPDMKQKYEEAKELIESSEDIKIYSHTDCDGISSGAILSTILKRIGKDYEIEIVNLDVLEDLEIEHELTIFSDLGSGQPVDKHAKKDSKILILDHHPPLREMDYPDSVEYTYLEINPMFHDIDGSQEICGGGLCYLLAKEFGYRDLSWIGVLAAIGDMQNTKTGKLQGMNKTILQDAKEEGLVSSDTDLSLYGRQTRPLFVALSYFSDVKLPITNNKNETIALLQRLGIPRRIKDESVPSGERATTLSDLNDAQKRALTSELIRMISNEIPPRYSIYVPKLVIADTYEFLAEEDGTFLRDASEFSTAMNACVRNNEEVVALKILEGNRAEALDALEIISKDHRGYLAENIQSIEDEHKIIQMKNLQYFDGSGIRSNVVGTIAGMVLSYGDWRKPMIAFTQVSDENQDLKISLRCSRLLAYDGIHFGNIIREVAQSLGGNGGGHNVACGAYIPKDKKDEFLNLMNEKLEGKLALED

SEQ ID NO: 5980 - protein, 275 aa, Methanobrevibacter ruminantium
MEILQKRGALTHFQILGEISKQEPNLKQKDLAERLGITIQAVSENIKTLTELEYITSKDGRAPYKITQKGIAKVKKDAIILRKYTDSVLETMTYYKSTWPAIAKEDLKEGDEVGLYMENGRLYASINAQTSAYADVILDTKKGFDVALTNLKGTIEIKDSKILIVTLPPIKDGGSRSADLDLVKGIYEGNYENYGLSSIDKVAAIGTTSHAVANNLGIPIDIEFGVSEASQSAVRKGLNVMILSIGDMSKNISKDLEDANIQYQVIDAKKSVKTA

SEQ ID NO: 5981 - protein, 231 aa, Methanobrevibacter ruminantium
MENKLIRQDTSDLDIVNHPEIKGLQIIEGKINFPISWLNQQGYCEYTLYLQYLKGIKTMPTQAMTTGTKEHLKLEEEFKQTATPSSFDDAFKESKEKEILSREMFVIDSEEGVRGFIDEIWMTPDEIVIIDDKPGNRAYPSSMNQVRAYCLAFKNMIGDDNRIIRGALRQRGTDNIFWSEIFDEKVEENILYLIHRMHGLFEGTKPFIPTKNGNKCRACRYQSYCEHKVDI

SEQ ID NO: 5982 - protein, 146 aa, Methanobrevibacter ruminantium
MDLFVKRIIAYILDFFVVSAFMWIFSYLAYFFINYLNMFQIYHYFIFILPILILVYFTFLEKNIGATVGKKLMFIEVKSTVAKRSRNGRNYNLTYGQAFIRSLSKIYWFPIIIDVILGKIAGKTRLLDGFSKTTVVEERVDRYLYY

SEQ ID NO: 5983 - protein, 336 aa, Methanobrevibacter ruminantium
MKIGMSHGAGGEVMGNLISETILNNLSKKAVEGGLGLDALDDGATIPLGDYEIVFTTDGHTVNPLFFPGGDIGRISAAGTINDVSVMGAKPLAISNAMILQEGFPIEDLDKIIKSMSATCEEADVAVITGDTKVMEQDKLEGIVIVTTGIGIAKKGEVIKDSTLSVGDKIIISGSVGDHGMSLMSFREGFGFETELKSDVAPMWGIISKALEVGGVTAMKDPTRGGLANCINEMARKSGVGVLLQDEAIPVKQEVRAASEMLGIDPYEVANEGKVLMGVKAEKAEEILEAIKTDKYGADAAIIGEVIDDDKVLIETGIGGIRILETPIADPVPRVC

SEQ ID NO: 5984 - protein, 125 aa, Methanobrevibacter ruminantium
MAICQGKSTRTPSGARRVANRGKRKSELGRESAETKLGDKNLRKIRTRGGNVKNRLARDNKINVVDAEGKAQTVEIFGVIENTANPNYVRRNIITKGAIVETAAGKAKVTSRPGQDGVINGVLIE

SEQ ID NO: 5985 - protein, 226 aa, Methanobrevibacter ruminantium
MPESPEQLAIEKEIQIQKDKFLNFFNGELPDTMELEFEGFYRRGFFVSKKRYAVIENEKIIAKGLELVRRDWAPIAKKTQEEILMAILKEGDVKKAEKIISKVLRKIKSGDIATKDLIIHTQITKNLDDYKQIGPHVIAAREIEAHGIKVGKGTIVQYIISKGKGSISQRAVPYEYSEGVEYDKEYYIENQLIPAVSRMMEPLGYDKNRLRELASTERQQSLDAFF

SEQ ID NO: 5986 - protein, 226 aa, Methanobrevibacter ruminantium
MTKAVFFDIDDTLLDTSSFADLARHAAIESMCNNGLPLEPDEAYDLLKDIIKEKGSNYSKHFNILTKEVLGKEDPLLVAIGMTTYHNVKFALLRPFPRTSAILIYLKSNGYKLGAITNGITIKQWEKLVRLNLYHFFDIVITSEEVGVEKPDPEIYLEACRRMACDVKKSVMVGNKLDIDCMGAVNAGMSAILVNSTLDEEEKERVNNEDIDIIVLDSISDVDTVL

SEQ ID NO: 5987 - protein, 262 aa, Methanobrevibacter ruminantium
MAQIKCPDCGKEQEDTNKFCKNCGANLSNVKAEEVKLDLDAAPTEEKIDLNTAPTEEKLDTDASEVKETPKAPVENKKICSKCGHELNNEKFCPRCGQSTASIVPYEAKTESQGENNDKTCPSCGTKVTTEKFCPNCGSKIEEKKPVQTQNAPQKYCRNCGNPIDPKAEICPKCGVRQLTVVKKEPLFSLILSLIFPGLGQFYNNQTHKGIFLIIGAIVSIVLTIFVIGVLLYMLVWLYGMYDAYSTTIALNNGEYVEDKLF

SEQ ID NO: 5988 - protein, 90 aa, Methanobrevibacter ruminantium
MSDFEEVMTEYIKISKHREKVFKTLKDGSKKPSDIARETNLNINSVSLSLKQLTEKELVYLLNPDDKKGRLYKLTEIGETIIKEFDEKTE

SEQ ID NO: 5989 - protein, 258 aa, Methanobrevibacter ruminantium
MTKIRLISWNVNGIRAIHKKGFLDWFNEEKADIVNLQETKAKIEQLPKKLINVPGYTSYFHSAERGGYSGVATYTSIEPNEVINGMGIEKFDIEGRLIRLDFDDFTLLNIYYPNGGRDEERLQYKLDFYDAFLDYANDLRDQGKNLVICGDLNTAHKEIDLARPKQNEDVSGFLPIEREWVSKFLDNGYVDTFRMLHENEKEKYTWWSYRTRARERNVGWRLDYFFVNEEFKDNVRASYIISEVMGSDHCPIALEIEI

SEQ ID NO: 5990 - protein, 515 aa, Methanobrevibacter ruminantium
MSEVIDKIINELHIYEKKLLKELEKNEDLSPDEIAQDTGLNIKSVMSAAGILASKGIITVKKDVEEKFSLTKYGKKYAEIGLPERRILNELQEKKELHMKDLAKIDSLEKKEINIAIGWLVRKGWAKINKGVVTITEVGESSKDKLGDDEVLLNLLNEKGSLSQDELDEDMANGLAALKDRKKLIASEKTTSHSFQLNDLAYEILDKGFDLTEEATQLTHEQLKDGSWAKLKYRPYDINAEYPIFFPGKEHPLRRIIQEIREIFLNLGFTEAKGEYLESAFWNFDSLFQPQDHAAREMQDTFYVKNPLTCDLPDDDLVERVAKTHEDGGNTNSEGWHYDWDADIARQSVLRTHTTGISTQALANWELPIKMFSVGRVFRRETFDYKHLPEFHQVEGLVAAPGINYQNLLGTLKEFYKKLGFEVRFRPAYFPYTYLSTECEIYLEEKESWIELGGCGMFRPEVLEPLGVKVPALAFGLGIERLAMIRYDLSDIRMLYKSDISWLREVPLEEGINFE

SEQ ID NO: 5991 - protein, 299 aa, Methanobrevibacter ruminantium
MEANQIAKLAQIASALEVSGYPKPGNVHRTRNYDDMVFEDFIISGVVIGDTIRELANHTQSIDDLSDANLGKYILEAVAETNKWIANNTNLGIMMMCVPIAAAASISDDFSQIQENVGKLMDATTVEDAVDLYDAINLADAGGMGDQDEFDVTSEKAKDELRANNQTMFDVLKISAPWDRLASELTSKMPVSFEIGYPTFTGFCNSCEDVDKINKATVLTFMTLLSEIPDTLISRKYGDEVAKDVSLKAKELLEFKDDDDFVEKLLEFDDYLYENKYNPGTTADLTAASIFISYLDKEF

SEQ ID NO: 5992 - protein, 331 aa, Methanobrevibacter ruminantium
MDFPNTRMRRYRKNSKIRDIVRETKLNKEDLIYPIFVKEDLKDDEKEEISTMPGEFRFSINGAVEYAKTLEAKGLRSIIIFGIPSDSEKDEIASPAYSPTGIVQKTVRKLKAETDLVVITDVCLCEYTSHGHCGILKENEDTDFGYEILNDESLKFLAKTAVSHAEAGADIVAPSDMMDGRVAAIREALDEAGYYNTMIMSYSVKFASSFYAPFREAACSSPSVGNRKSYQMDPANAREAIREAELDVTEGTDFLMVKPALPYLDIIKTVKDEFNLPLVTYNVSGEFSMIMAGIENGYLTEDSIMESLLCIKRAGADLIISNFAPYALDHL

SEQ ID NO: 5993 - protein, 366 aa, Methanobrevibacter ruminantium
MTNTIGKIFRITSFGSSHGKALGAIVDGCPANLELSEEDIQIELNKRRPGTSALTTARKEQDQVEILSGVFEGKTDGTPITGVVYNTNQKSKDYSSLKNTPRPGHGDYCWIERYGNYDYNGGGRGSGRITIGHVIGGAIAKKLLSAKGIKIISHVVQIGDIRAKEANIESLEENITKNNVRCGDLEVAKLMEDLILSKKEEGNSVGGVVETIALGVPAGLGEPVFGKIDGDLAKVLMNINAVKGVEIGLGFGVATKTAKEINDEFYYERDDVKTKTNNSGGILGGMTNGMPIVSRIAIKPTPSISQIQETIDLNKKENTTIEIKGRHDPCICPRVTAVAESATAIVLADHMIRSGFIHPTNLEKRV

SEQ ID NO: 5994 - protein, 313 aa, Methanobrevibacter ruminantium
MKITFLGSGGGRFTTISQKRMTGGFRLDNFGGKNYHIDPGPGALVRSYQFGVNPTKIDGIYISHSHTDHYGDAEILIEAMTRGMTKNNGIIMGSRSVFEKYKRWGPAISNYHRSNSKNLILVPNKIKRFPDFSIKGTDTIHGDPTGVGFQMEANNLKVSYTSDTRYFEELKKYHKGADILIGSVLRHDDDAIKGHMCTDDFINLVGDVKPKLAIMTHFGFKMIAANPVEQAIKVSKNTGVRTLAAFDGMLVDVNEKYPQKSRMLRLKDRFAAHMKQEDVYSTNFKVKSNKRNKMRNKKKYYNNNDSNNSFSSK

SEQ ID NO: 5995 - protein, 308 aa, Methanobrevibacter ruminantium
MSLIIAYVGKKGCVMAADKRRIAYFGLKEQREILEQEIYSGEIHNDEELYARAEELDVNLKVTDNACKVKSIENVAIGEVSSRGTMETKRKRIYGTSNGFKIIELSGSHVLNSKRGVSSIIVFGNKVTKSLANKMIQERWKPSFSLKYMGEIFGEILKDIAEITPSVGKDYDVIIEKNNLAKSQVQDYIDEVAERDVKVLAKFRAQLREQLMEQNENIKLASTIIEEGSVGEIVIIDDTLIEVKLNPDVRAFDVNWKVLAGPGENVLMVVDDSEGLDKGDEIVIEDEVLCVKKNKANLKCDIILCHLE

SEQ ID NO: 5996 - protein, 126 aa, Methanobrevibacter ruminantium
MVKINEIYRCNHCGNIIEGIVEGAGELVCCGEPMELLEPRQLEEGGVKHIPVVTKEDGKIVVKMGEVEHPMLEEHYINFVQLTIGDQVFRANLKPGEEPKAVFDINAEIEDIKAIEYCNIHGLWHA

SEQ ID NO: 5997 - protein, 169 aa, Methanobrevibacter ruminantium
MKKNIFLIAIILIAVVAVSGCINSPMDNINNNMKELNTDITEGDTDYNSAINYINNKDFISGTDNIQIAKDKFNDADEKLSNIEQYKSSLNESIYLDYLYLIKEEVSIKRQASDELYLALQYYTNNDFSSGNSYAQSANSLMNQAKVLQDERNQIVENNPDLFKKAGII

SEQ ID NO: 5998 - protein, 780 aa, Methanobrevibacter ruminantium
MKEACPKCNGTGLVAVDTKICDACDGTGYEDTFEMKNHFKGVTSNARAKFDLDADQDIPCEVCNGKGVVDVFEDCPYCKGTGQINVCNSCGKAIPDDKDYCDECNEKQLEEKMNKVKERLENPKKLKVESDIEGKEIVYELDGLCDMSDLEINSLYKGKVTRVERYGVFVSLNNQVWGLMRTSNPHNKVGDTIFVRISQIKERKREVDMVPAHVFKGEYVVKKLSKNIGRTKIETLDESSLKSIVKVYGEVIQIQQTSGPTIFTITDETSITWAAAFNEPGVRMYPEIEVGDIVEVIGEVNQHNGEIQIESESISKLDSDEAEAMKELIDIALDKKAEPDDVDFLIESPVLERLKPKMREAAKVIRRAVLDGRSILVRHHNDADGICSGVAIEKAVIPYLKENNPDNDAEYHYFKRSPSKAPFYELEDVVKDLSFALEDLDRHGQKLPLIVLLDNGSTEEDIVALMQAKIYDIEIVVIDHHSPGNLITKTLRNGETVSGDVESAPEDIMGGTVAVDEYVDTHVNPYLVGGDSQITAGALATEVAHFINPEIEDLIKHLPGIAALGDHAESDEAEQYVELAASKGYSRDRLKQIAECIDFEAYFLRFMNGRGIIDTILGVDNIDKHPKMVDALYKEYLRRVDTQMKAALPNIKRVKLDNGIYFNVLDVEKYAHKFTFPAPGKTCGFVHDKIVKEIGDDKPIITLGHGPDFGVLRATDTVHQLFGFNVNNIVISLADKIPQAGIDGGGHECAGSIKYIEGLGKQVLTELLNEVSEMTDSSKN

SEQ ID NO: 5999 - protein, 124 aa, Methanobrevibacter ruminantium
MYSDKVMDHFANPRNSGEIENASGEGTVGNPTCGDLMTIYIDVDDDEVIQDIKFKTFGCGAAIATSSMITEIAKGMAVDEALKITRNDVADALDGLPPIKMHCSNLAADALAEAIKDYKEKQEE

SEQ ID NO: 6000 - protein, 402 aa, Methanobrevibacter ruminantium
MIYMDNSATSPVKEEVFNAMVPYLKEEFGNPSAFYSLGRSAKKAVETARENVAKLINAETREIIFTSGGTESDNMAIKGIAFKLEDKGKHIITTVIEHPAVLRTCEYLETKGFEVTYLPVKENGILDIEDLKEAIRDDTILISVMHANNEIGTIQPIEEVGGIAKEKGITFHVDAVQSVGKIPVDVKKANIDLLSISSHKLYGPKGVGALFIRKGVRIETLIHGGGQENNLRSGTENVPGIVGFGKAAEIAYNNLDANIEKLQEIRDLLIGEVLDKVPEAYLNGDREERLPNNASFRFAAIEGEGLILRLDAKGINGATGSACSSKNLKASYVLSALGLEDAEIHGSLRLSLGVENSIEDVEVVSDAIADVVGSLRQMSPLWDNEKNESLELDESKFTDVDH

SEQ ID NO: 6001 - protein, 439 aa, Methanobrevibacter ruminantium
MTNKNYGLSTLGLHAGQEEPDPATGARAVPIYQTSSYVFSNTDEAANRFALQEFGQIYSRLTNPTSDAFEARIAAIEGGNSAISAASGLAAISYALLNITPPGDEIVSANNLYGGTYQLFDYTFKDLARNVIFVDSQDYDAFEAAITDKTKAIYAESLGNPKLDVPDFERLAEIAHSHDIPLIIDNTAAVGLVRPLEHGADVIAASATKFVGGHGTAVGGYIVDSGKFNWGNGKFPTISEPDPSYHGINYWEIFGDFPGLGNIAYTLRIRARLLRDLGATLAPVHSFIFLQGLETLTIRMEKHSENALKVAQFLDNHPAVSWVNYPGLEHHPSHETAKKYLGDKFGALIAFGIKGGLEAGKEFIDNVELLSLLANIGDAKSLVIHPASTTHQQLTPEEQESTGVTQDLIRLSIGLEDVDDIIADIDQALAKVSEKFGDD

SEQ ID NO: 6002 - protein, 699 aa, Methanobrevibacter ruminantium
MTDLNKMFNPDSVAIVGASNSEGKVGYIIVNNMINDGFKGNIYPINPKDDEIQGLKAYKNVSDLPEVPDLVIVSIPSVLVNPVVEECGEFGVKNMVVITAGFKEIGGDGVERENQLVALGEKYGINIIGPNSLGITDSHTPLNASFSQIMPPEGNIAFISQSGAMMVAIIDWSVTSGIGFSKIISLGNKAGTTEIELIEYLSYDDETAVVICYLESITEDDDFVRTLRKVSYKKPVIILKSGSSSAGAEAASSHTGALAGSDIAFDTAFKQSGVFRVTTMDELFDVGLAFSKCPLPTGRNLAIITNAGGGGVLSVDAMERYNLDLVKFDEKTNARLKEAVPEEGSIKNPIDVLGDAPVIRYKESLEAVLDSDDVDGLVVMVCPTASADADGIADALVEGASGFDKPVIAVNMGGPIFENANDVLRDNGIPTYVFPETAVKVFDYLARFAAVQDRNYDDPVGELDDVDKEAVEEIFAKVKAEERDTLLGSEAYAVAEAYGIEAAPIKLATSAEEAGQLAEEMEFPVVLKIASDKILHKSDIGGVKVGIQSKEEAEEVFEEIMANAKKAHPDIVPNGVEVQKMMDSGIEVLVGMVRDSQFGPMIAFGMGGVLVNLLEDVSFKLAKGLTTDEIAEQMESTKVMGLLKGFRGEAPGDIEAVKSAIIRIAKLTLDFPEISELDINPIFVYEKGSSALDIKIKLA

SEQ ID NO: 6003 - protein, 480 aa, Methanobrevibacter ruminantium
MTREKGELNTLFADKIKLFVCGPTVYDDAHIGHGRTYISFDTIKRYLEFKGYSVFYLQNITDIDDKIINRAKESGIDSKYLAEKFEKRFIEDMAALNVTSVNYFARATDHIEEILDQIQRLIDKGYAYVTETGVYFEVAKFEDYGKLSNRKLEDLETHRIDIDSSKKSPHDFALWKNREAPEYAGEPVWDSPWGKGRPGWHIEDTAITEKYFGPQYDIHGGGLDLIFPHHDSEIAQMEAVSGKEPLVQYWMHTGFLNVSGEKMSKSLGNFITIRELLKEYSGDTFRLFVLLTHYRSPIDFSEVSLHQAERNVSRIKNYLENLDEKINDIFEKGNLSEDLLKLAELEENEFDEELINFDYFKSNYPALKEGVNEFFTSMDDDFSTPKAIAAIFSFIKQSNKDLEEDDLIIDDLLAIKHWFKDISQILGIDFFVYKDETSGNEAELLDIIADVRLKLRAEKKYDLSDEIRDKLISLGIEVSD

SEQ ID NO: 6004 - protein, 126 aa, Methanobrevibacter ruminantium
MKPPCEMVVWYIIPAIRSELAKDLLKLGMKQKKISELMDITQPAVSQYLTDKRGSGIGFNDDVKALIQEFANDLNDGTATKFDIIPRTCYICKRIKTEDVICQIHKEKGHMPADCQACLGSEAHLL

SEQ ID NO: 6005 - protein, 246 aa, Methanobrevibacter ruminantium
MFDDLKDDLQAAKARDPAARSSLEILCCYPGIWAILLHRWNHWLWTHNLPFWGRFFSQISRFLTGIEIHPGAQIGKRVFIDHGMGIVIGETTIVGDDVLIYQGVVLGGTSLSKGKRHPTVEDAVVIGSGAKVLGNITLGCSSKIGAGAVVLQDVPRGATAVGVPSRIIHEDRKCVLDLEHEFPDPVSSAIDLLFERQEELEKRINILSHFHDIDHVEFSHDPKVEEVFKGADEKSFYKLNNIIEDE

SEQ ID NO: 6006 - protein, 318 aa, Methanobrevibacter ruminantium
MVNIPELKRGIANDMTEAIGNTPLVRLNRLTEGLEAEVLVKVESFNPVSSIKDRIAVNLIETAEKDGLLKEDSVIIEPTSGNTGIGLSFVAAAKGYKLILTMPETMSIERRKLLAVFGAEIVLTPGSEGMGGAIAKAKELAESTPNSFMPQQFENKANSEIHRLTTGPEIWRDTDGEVDIVVSAAGTGGTVTGIAQYIKPLKAEFKAVAVEPASSQTLGKGEKGPHKIQGIGPGFVPDVLDVDLIDEVVPVKDEDAGNTLLRLAREEGIFTGISSGAATWAGLELAKRPENKGKTIVVILPDTGERYLSTEWVFGDLF

SEQ ID NO: 6007 - protein, 201 aa, Methanobrevibacter ruminantium
MTLFKYIITSSPIGEITIIWRKKPQFQIEEIIISNPNQTSSQIAKEKYEKEGELAINKKSKQLNKVLREMENYFNEKDYKFSLKYLNLDKLKPFQRAVLEAEFKTEKGTVNTYKDLAKEIGSPKAYRAVGSALAKNPFPIIIPCHRTVKGDRTIGGFSGFAGGLESKKTLLELDGLMIQGKKIVGDSPIISLDKTSQTKLV

SEQ ID NO: 6008 - protein, 215 aa, Methanobrevibacter ruminantium
MRGFKMNDEEKIREIFRRLNEVYTIRTFHDHDPYKVLIRTILSQRTRDENTDQAANALFEVYPDIYAVADAPVEHVQELIKPAGFYRVKAARILEVSRILIDQYGGEVPREMDEMLKLPGVGRKTANCVIVFAFQDAAIPVDTHVHRISNRWGIADTKDPEETEQVLMEKVPKDLWVDLNDLMVQFGQTICRPIGPQCDKCPISDLCDYDVSKLE

SEQ ID NO: 6009 - protein, 455 aa, Methanobrevibacter ruminantium
MNLKIKNFSKINGTVKAPSSKSYSHRAVILASLSEGKSKLFDVLYSEDVLSTIRACEALGARIDKKKEIILKGDKSQTVDYLEVYGTGGKLHNVSDDPSSDMIDLANSGTTLRIMTSVAALSDNEVIFTGDDSLKTRPMGALIDALETLGVKIESLNENNKAPLKIYPGYEGGQTDILGSISSQFISSILISAPLSENGVELEVYPEFVSKPYVDMTISILEKFGISVEEEEYQFHETCKKEHTDCLGVKFIVKPQKYIASDYIVEGDFSSASYLLAATAIAGGYIRVQNLFADSKQGDKLILDILEEMGANVTVFDDYVSLRSDGNLKGIDVNLSNAPDLLLTVAVLGALAEGKTTISGVKHGRLKETDRIDTTCRELEKLGCKLEEFEDGMTIYGNTISDGIVESHGDHRLAMAFSLIGLKHDVEVENGECFDVSFPNFIEAMAEIGIDLELK

SEQ ID NO: 6010 - protein, 539 aa, Methanobrevibacter ruminantium
MQRKTLSRFDEIVKILRKYDMDKVLGQTTRNRISPFRSGSENKELLKEDFPERLRLTLQELGTTFIKFGQLLSTRPDLVGERISEELSQLHDDNPPIDFEEIKVIIEEDLGGNLKDFFTEFSDTALATASIAQVHEAKLHSGERVAVKVQKTNVQEIVETDLNIMKFLANESDRFNTTFKHLNLPAVVKEFDRSIHKEMDFDNELMNIRHLRDNFIHNDKIIVPTIYPDYSSERVLTMEYVDGVKLSEVIAGDDPKYNKILIADRMVRAYFKQIFLDGFFHADPHPGNIFITDDNSICFIDFGMMGVLDENFRQDLAELMICFSNRDIDGLINQLIYMNILNVKTDISILKGDLNDLFAKYYGVELSRFNGVIEDLLFLMQKYDVMLPNEFVLMARGLSMVENIGLSLDPDIDIVEIIKPFARKLMIQKYNPKKMVHNARNTFFTVEHMLRALPSLVSKTFYKVDEGELTINIEVKQISEITNQISLAIIIAALVIGSSLAMMVEAGPKLFGLPLLGFVGFTISLALGVFTVVRYFMDF

SEQ ID NO: 6011 - protein, 136 aa, Methanobrevibacter ruminantium
MSLDRFIEAQKEDYDMAFREINNGRKRNHYMWYIFPQIKGLGHSSTSRYYGIDGLEEAKEYMENEYLSNNLIKISQKLLDLETDDPIEIFGSTDSKKLKSSMTLFELVSDNEVFSLVLEKYFDGNRDERTLDLANK

SEQ ID NO: 6012 - protein, 261 aa, Methanobrevibacter ruminantium
MKGIIGAIAGDIIGSTHEFHPIKTKDFSLFNKKSHFTDDTVMTLAIADWLIEDKNSRDVLIQKLKFYGQKYPNAGYGRMFMQWVLSENPLPYGSWGNGSAMRVSPVAWAGESLEEVQQLARLSSEVTHNHPEGIKGALATADAIYLARIGSSKEEIKEHIEIRYDYDLDRTVDEIRPGYKFDVSCAGCVPESIICFLEADDFEDTIRNTVSLGGDADTMAAIAGPIAAAYWEVPRNIAYKSIHRLDYRLLNVLIKFEDKFL

SEQ ID NO: 6013 - protein, 242 aa, Methanobrevibacter ruminantium
MSKRIIFILMLIALLGLSAVAAVDADPLTDNQLNPTIFYLDFNHGALNDGFKKEFDLFEYVPTFDSVDLYNDGENVSVSFYSLNPTIDVDNLNDEIIDYTFEVMEDPKANITTLKDGIRNICSEYGADDVKINVDSVIGEDEIPVIFTTEGDSMLPTIKSGDKVLVNKSHNIHVGNLVSANSSEYGPICKRVADIDGDSVYLVSDNKKVTREYYDDYYVEYKGITTWVNIDDIDGVIIDIMN

SEQ ID NO: 6014 - protein, 73 aa, Methanobrevibacter ruminantium
MVEITSKTKYMDLLNEYPLLKTDLVKKNPKFGFLVTPMGKISLWESDLSEVSERAEMTVEDTVNLFIELVNSY

SEQ ID NO: 6015 - protein, 352 aa, Methanobrevibacter ruminantium
MKHRLNLDNKDPNYILLKEIFKIMDSRKSKSILASYGFKNLNRTIFTFKIIFISMFFGIDIPFILNELKSKKELRKYFNISEVLTADQVYKIFSEINSEKLIKCLNRILNSRNMVKRIGKKTFIVDATPVDVDINFHRNKKTKEHLEKINLKWSYSSSKGYYIGFKATVVLDYDSMNPVCILVHSGAPNDAKLFEEILENLQKRRIIRKGDTLIFDKGYYTYKNYQIGISKYKIIPFIFPKEKFSRTRLDDILTYPLAVFNKTKRIMKEKRLYNSLKMELMKKIDSWEKFKPIRGKIEDFFKLLKQGLNMREIHKYTPKSVEKTVYLNVFLGALIISQGFYSKTTIQQLSEN

SEQ ID NO: 6016 - protein, 939 aa, Methanobrevibacter ruminantium
MNAFLTLIIFIIHFIWRNILTNKEIPKDYDHKSEEKWQKKWEGDEIYKFIGDGTRPRYIIDTPPPYPTGLLHMGHILNWAYMDFNARYRREKGMDVLFPQGWDCHGLPTEVKVEETHNIKKNDVTRAEFRDMCTELTSHNIELMRGQMRSVGFSQDWSREYITMTPEYRKRTQLSFLKMYDQGLIYQGIHPVNWCPRCETAIAFAEVEYSENTTFLNYVNFPPADVPEEVLANVEGNSYVRYADCPDNADASVPGVLIATTRPELMSACVAVVVHPDDERYNQLLGKYVEVPLSGQKVKIIADEEVDMEYGTGAVMICTFGDKTDVAWVNKYDLDVIEAISEQGILTAAAGRYEGMELQDAKKQTIEDLKSEGYLTKQEEVDQNVGQCWRCKTPIEILVKKQWFVGVTKLIEESKKASNEMRWVPEHMESRLLNWADAMEWDWCISRQRLFATPIPVWYCKDCGKVILPKEEQLPIDPTIDKPLEPCQCGCNEFIPEEDVLDTWMDSSISPLSVADWPNPGWEEIFPSSIRPQGHDIIRTWAFYTTLRCLALTGQKPFDDIVINGMVFGEDGYKMSKSRGNVTGPEEVIAEYGADPLRLWAANSVPGSDVAFDWKNIKHGYKFIRKFWNAFRFISMHIFDEESEKALSGDIESIKAKLNPMDTWIFAKLNKVNKIVDTAFYDYNYATAINTIEQFIWHDFCDEYIEAVKYRLYNDDISEESRIAAKYTLRTVIEDSLKLLAPIAPFFAEEVYQYFDEDKSIHSTLWPEIDPNLDSTQVEEDGDLAIELIGEVRRFKSASKIPLNADVESTTVYINEKTENLKDVFEYFADDIKGTLKIQDFKVTSGKPEVHEKVIEIEPDMSKIGPTFKKNAGQVIGFIKSTDPNEIAKQLEEDGEIAIADGVITEDFLKMKKEIVGASGKKVDILQSEKLGVIVEVVR

SEQ ID NO: 6017 - protein, 118 aa, Methanobrevibacter ruminantium
MHLLWFYVAIVLAISDEIHSRIVWGYVRDFYIVFGGIISSSLDSVMETWIVHEGLEALFHMIFVSIVFFSLKIGFLAALIHFLLDVSHSIVIRHMPWLPHRALHFVIECLFFIAVFGL

SEQ ID NO: 6018 - protein, 551 aa, Methanobrevibacter ruminantium
MPVITFKYQDLKDLGIDMEKDELINTLPMMASDIEDYDDEEIKVEFFPNRPDNLSVEGVARSFKGFLGLETGIPKYEIVPSGEKVTVSPEVAEIRPFIKFAKIENVDFSGDKIKYIMDFQENLHWVIGRDRKKVAIGVHNADVISGPYKYIATPKDENAFVALEMEEEMTPGEILTQHKKGEKYAHLIDKFDKYPLILDKDNQVLSMPPIINGELTKLTEDTKNIIVDVTGTDEIAVTQALDILCASFAEVGGQVKSMEVEYEDRTVISPDFTPKVKTVHVDLTNELIGGTDLSPEDIKKLLEKARFDANILNENELEVFIPPYRVDILHEVDIVENITIQYHINAVEAKLPDITTVANEHNWFKSEKTIRELMVGLGFQEIMSLMLTSEESQYEKMNAEEIDHVQVSKPITISGTMIRTSLLNSLMEFLEDNKHQDLPQKIFEIGDVLYMDESKENKTKSAKKLAGMICHSSANFTEIKSTVSSVLSNLGYTMEISNSTNGSFIPGRAADVIGESKSGKVVGFFGEISPEVIRNFELEYPVTAFEIEFKL

SEQ ID NO: 6019 - protein, 232 aa, Methanobrevibacter ruminantium
MAQVFNYHCRSCDFYFTIHNYRFCFDDKMDCIEEYMALFTDSDYGNDSLIKGRVIEKYCSSCQKTVRIYQFTPDSSIYTTDASFDFLKFYIPKKHDFLLESIDFHKELIELIENNENLKKISSFIEDNHVYNIYELNLNHYLNTKRSGFNSNQLIKDIGLYLDAINDNLDRFDDFIICMNSTEDNYNLDLEGKMFDMDVCPECGEEFYPISLKNPCPICGKNTMERSREMID

SEQ ID NO: 6020 - protein, 555 aa, Methanobrevibacter ruminantium
MLLNDKSELLKSLSILFLLIVLITSFNSVYANSDNFDSAKSSDLIFSDSNNVYIENIDCSDSILINVYSNKKDSNLGSYFVGSSSDSYLKDSNSDSAFVVSNSEDSYLEDSNLNHSKNYLSSQSLSASSKSKVILTTSNLSASYKTKNFTAKLTDLNKNPIAGAKLSFVILSKTYYRTTDKDGLASLMINLAPGKYNISTKFEGDSNYSSAVVKNSITISKKKLSISSSDLSKKYGDSNSFQVKITDNGNPISDIKVALKLSAKTYYRTSDKNGLVSLPINLIIGKYIINSSVYDNKFYYSNTNSNNIIVSSQNPYNLSVLKWGTKGNIKKNSVLMNNIPKSSLTNAIISACNNGTPLIQFGNGSGKKVFINAGVHGHELSSQAAAFKLINNIYNSKKKINGTVYIVPVLCPKMTEQNARYFNNVNLNSVANKNGTVSNKLVNLALSLKVDVLGDFHCTRPNGDPGKNVAMGTSSPMASSATLAKYISKTTGYSSLIYKKAGEEYPGAVEDVCNLKGITSVTCEALTPHGKIASGSVGKSYNMMIALLKYYGITI

SEQ ID NO: 6021 - protein, 142 aa, Methanobrevibacter ruminantium
MIINKSLKINSNSNFQIIDITNEISRILDEIKFNEPNSISNGILTIFTKHSTSAIVVNENERGLLSDFEFILDELVADKNNYAHDRIDNNASSHLKSFLLGSSETIPIVDGKIDLGTWQSIFFVELDGPRRNRTIDLVFIGE

SEQ ID NO: 6022 - protein, 40 aa, Methanobrevibacter ruminantium
MITCNVCGHLNPPSALVCENCGSDLSDSPDLGGGFDDDDR

SEQ ID NO: 6023 - protein, 172 aa, Methanobrevibacter ruminantium
MSENQEDETRKTNNYEFDNSGFKAKDYDDAEEFEIWDLEQIFKDRVKILQDLNNEFWEAYEGSKTEASGRRKDKKERLEPLSVRVKPHTKRFLKEDSILSAREILEIYEEFYNGRDDYIKSLKRDEIQLKEELSEIEEKLKNAQEFTEKLNEIKIQKDQEKERAKKIKINIE

SEQ ID NO: 6024 - protein, 47 aa, Methanobrevibacter ruminantium
MYRYENDRLASHEIDPTTPSKYVYWNAKRLLEVLKEVEATKKQNQDK

SEQ ID NO: 6025 - protein, 210 aa, Methanobrevibacter ruminantium
MSDKVKAEEVKSEETQVKDVDLVFLLDKSGSMYGVVRDTIGGFNSFIEREREKNPNTHVTLVLFDTEYNVLYTRKPIAEVEELTKNEYYADGCTALLDAIGTTINRLDRQVNNDVLFVITTDGLENSSREFSKSDIKNMIANHNWEFLFIGADIDSYGEALTLGIDESHAANYEKTSAGLGALFDSVGDAHEEISRGGSLDDMSWKRRLG

SEQ ID NO: 6026 - protein, 537 aa, Methanobrevibacter ruminantium
MTLDYQLSEIKELENQEELISIIQNPNLDDLRRSAAASNYNLNNKDFLKELASNINLNYKIRRGAIKNLNLDDQSLFIDIGLNDENIQIRRAAIKRITDQDTLTIIARESLDFASRLIAVEKISDIAVRLDIAVKDSNDLVSFKAVDLYPFLSTLNSLFYNFNCSGRYVDNALKLIDFIDLCLSKDFNKESHDALNKFKDYLNDLINIKLSDLKEVPYHLEKSFSRRVLTNMAILTWDLAFAIIDYTEDDYELLKIFNVQNDIRIRLAALKKIKSEHFLIDIVSNFRTGHSLYDDTLGSLQRRFSYDLDECLSIHKFTQEELIDLAVYSGFKKTRRIVVKYIGDMELLEYWALNDSYTGFRREIVSLPNFNNKELLSKLVFEDDCDRVRLYAVRKINDQEILSKLAVDDSYWAVREEAVSKIRDESILIDRALNDPNVMIIIAALKNPNLNDRQTINKIGSYPNFWVTKIIAEHPLTDDETLIDIALNNPWNYPREKAIERIYDKDVLKYIAENDKDPWISLISESRLRKLDENENV

SEQ ID NO: 6027 - protein, 101 aa, Methanobrevibacter ruminantium
MTNQVIEDMAEVCHDEWVKWSKNISEELALAIDVLKKDIEFAHEKGVENKEAIELVEKFESRLERWGALWIPYEDLTEEMKDSDRKYAIKMFDIAEEALKE

SEQ ID NO: 6028 - protein, 79 aa, Methanobrevibacter ruminantium
MIVEKVSKNDQWEDYFIKSKSSNKEYIITIDLLEGTVSCDCEDFKYRKENLRFGGVRLSDKANHCKHIKKILEIRDDLD

SEQ ID NO: 6029 - protein, 296 aa, Methanobrevibacter ruminantium
MKKIYLIFPILAGIMFGSTGIFVRTLTENGIDSTTLLFLRFSIAIIYMLIAIVLTDKSLIKVSKEDIPLFLICGLCILGLNLCYNNSINTVPLSLAAVLLSTAPVFVVIFAYFIFNEKISSAKVISIILVIIGCILTTGLLEESMIPITSIGLISGIGSAIFWAIYTIASRKSIDRGKHTFTILFYSLIIITIVTIPFTNFGQIESFVLANPANNIIFLLLHSLISFALPYILITISLNHLDAGTVVILSSGEPVAALVFGAIVYNEIPSPLMFCGIIITIIALISLSRKIEMKSE

SEQ ID NO: 6030 - protein, 170 aa, Methanobrevibacter ruminantium
MNNKYFLGIIIIIIAVLAVIFAFSLDYQTNYLNGSSNGSVNTNENSSFNQSNNGLQTNVQLTISAEQSFPMEKIAEEIKTHPAYEGYDEDTLKWLETFNGSIMFTSKDYFVVMDKNDAENLPTSFVNDAFIYDDFTCDIIEKRSLGKDLKDIIYVKNVKFENQRIVPMIF

SEQ ID NO: 6031 - protein, 71 aa, Methanobrevibacter ruminantium
MFEKQGFIERRIFKNKESFMYKGFFSHKEDFINKGDFIEKEKSLKKQNFIKGKYANLIFKMDDDCIILKGG

SEQ ID NO: 6032 - protein, 343 aa, Methanobrevibacter ruminantium
MKTTLDNKSVKNNSRNSKNVRSNLRDNRSMRTNLRASRNMKTGLGDVNIQSNDEATKKCPSCGSVDFEIDYARSEVSCKSCGLVLEENIIDFSPSGTAINRDGQNLTQNGAPCSITKHDKGLATDFKLENLKHDRARWARIRRLQKQSRVSGSRERNLARAFSELSLLISNLSLPRDVNKEAASIYRRALEKDLVRGRSISLLISASLYAACRVCRVPRTFDEIAEVSTGSKKSIAKNYRFLNRELALKIRPASPVDYIPRFASMLELSSPVVVKSIEIINELNEKGLIAGKTPAGVAAAALYYSSRVLGERRTQKEIASVVGVTEVTIRTRYKEMTKGLNLN

SEQ ID NO: 6033 - protein, 94 aa, Methanobrevibacter ruminantium
MSQARNLEKDVSSSKAYFKGENELSINSNINETKFNEMTDSDSNFFGTRFILNLSLILKLILKKQMKVISQIEIISNNQKTSKQFQYKIIQKTL

SEQ ID NO: 6034 - protein, 175 aa, Methanobrevibacter ruminantium
MTILDGILEDNKKFVESFEGEEMSHHAQKKLAILTCMDCRLIDFFEPALGLERGDAKIVRNAGNSIVGEDAIRSIGAALYNLGAEEVLVVGHTECGMAGADAEALKEKMLARGIKEEDIAKYDIAEWIGGFDDEEENVLNVVEKIKNHPLIPEVPVHGLIIDIVTGELKVLKEDY

SEQ ID NO: 6035 - protein, 278 aa, Methanobrevibacter ruminantium
MANNGHGHHGAANLTPEQQKKMIEQEMKLFEHMKNIKYKIAVMSGKGGVGKSTVAANLAEAFQKKGLLTGILDADIHGPNIPKMLDVEGEDVIISNGEMIPVMSRNGIKVMSMGFLIDSQDTPIIWRGPQKSGSIKQFMADTAWGDLDVLIIDNPPGTGDEPLTVLQSLPEVDAVIMVTTPNSLSHEDVLKCVGMVKMLHIDKIGLIENMSYYVCPHCGEKTNIFGESQGEDFANEMGVKYLGNLPLTEQVPESANKDSTMVNAYAESEVATKFFRND

SEQ ID NO: 6036 - protein, 998 aa, Methanobrevibacter ruminantium
MLLVLMALLILAMSCVSASNASDNLDDLTISDSNSLDLVSTSNSDILSSDSGVSSDDSSNDASGDVLGSDVSSNESNNQSQSTLDSNNQSQSGLDSDNSTLLDSQSNNQSNSESSDSSDSSETVIKNATSISVSSKTVVRGNSLNITLKDNASTLLSNKTVTFTFNGKTYNKTTNAKGIASLTLTATPKKYLVKIAFVGDELYEASSKSVNVTLSKTPTSISNSGKSIVRGKLYKLTLKDAKGKALSGKKISISFNGKKYTKTTNSNGQVNLTINVNVGKTYKMTYKFAGDSNYLSSSGSVSIKVKMGTSIIGSGSSIVKGKSYTVTLKNANGAVLSNQKIAFTLSGKTYNRTTNAKGQASLKIGLSSGKTYNLTYKYAGNSYYGGSSGKVSLFVKTPTTMKNSGKTIVSGETYKVTLKDADGKSLANKKVSITFNNKTYAKTTNSNGQASLTIKGTFGRSYPLSYKFAGDSKYGPSSGSLCLRVKKATSLKGSASSIVQGKSYTVTLKDSNSTPLANQTIVFTLDTKKYNRTTNAKGQASLKIGLAAGKTYNLAYKYSGTSYYNGSSGSVKLKVKFPTSLTNSGKSVMNGTGYNIVLKDSKSNLVSNKTISIGFNGKTYDEITDANGTVTLLIDANVPKTYKMTYKFAGDSDYGASSGTVNLTVKFKNAFTISQIISASSSLKSYVLKNKKVPATVSVNGVSLNLTSFTYLMAKATISINSNKTSGSILLVPVDSNYTNNGSRINANLYKANYIDLAKKVISSAEANKLVPNSVSTNIGLVSHDLYSFGLAKALVFFNSDHYLPNYLILSSDDVGEKHSTVIPSNARGNASQFKAGLNEAETLTAAQIAKYLVASGHDATNSEIKALAAKLVSGKTSLWDKANAIFTFARDNITYSYYADSKKGAAGTLSSKSGNCCDHSNLIVSLCRAANITARFSHAQGCTFSSGLVAGHVWAQIYIDGVWYTADATSRRNSLGNIVNWNTNHYNTLKQYDHLSF

SEQ ID NO: 6037 - protein, 825 aa, Methanobrevibacter ruminantium
MINRLRKDFGRIIKLIIFLILEVILFFAITQTFGGIIIPDLKTAFAIIIALSILNALLWPTITYLSLRFIVLTLGFGTFLIDGVLLYIISLFIPGVSINGIALFSIPLLIGLISSMLSIILNIDDDYTYYRYILEKEMKVIHRNIPKKEGFLFLEIDGLSYRIIKEALDNGDMPTLKSWIDKGSHRLISWETDLSSQTSSSQAGILHGNNNNIPAFRWVEKDHENRIISSNGRTDSKLIEKRISNGKGLLSLNGASRSNLFSGDAKDHLLTFSRFSDSESINSNSWFYLYSTPYVIARILVLFIFDMIMELLSRVRHLFKNIQPRLKWRGLKYFVARAGTNVVLREATTFTLIGDVFAGEHNVIYATYMGYDEIAHHSGIEDFDSFYSLRQIDKQFKHIENAINNSNRDYKIIVLSDHGQSNGPSFKQKFDISLNDLLSEFLPENITVHSILHSNDDHFSKEFSINHLGSENLEKLDKRVENTKEKLDIKIDNTKEKLDHRIDNTKEKLDHRIDNTKEKLDHRIDNTKEKIDTTKEKLDHRIDNTKEKIDTTKEKLDHRIDNTKERIDSNLDYTKEKINTSFDGELINTWDKLIKFKNKSSNKAFLDKLRKKRTLINNDEPIIDRINNVSEDLSEDLEVNIELSKEKITSDKAAQTIVLSSGNLGLIYFTDWSNRMSYEQIEDAFPGLINQLASHDGIGFVMVKSDIYGTLVFSNDNLFYLESEEYVGENFLDKFGKNTVQKLKRTDKFAHVPDILVNSEYNMETNEVYAFEELIGSHGGIGGTQQYPFILCPSNWESEEIFGAENVYKFFMKEINKSWNQSKNK

SEQ ID NO: 6038 - protein, 162 aa, Methanobrevibacter ruminantium
METKKMFLVILLFAFIVIGGSYSVFAIVSNGGGNNSLSWDNITIAGPSGNVSDDGNNSDDGLLGIFNSGDSSDSSSSNSNTGSSSSQSSSSPARSSSSSSSSSSQSSSSQSSSSQSSSSSSSSSSSSSQSSSGSSYDSGSGGSVVESGGHYYDVNSGDELDW

SEQ ID NO: 6039 - protein, 168 aa, Methanobrevibacter ruminantium
METENLIIVILLVLIAMAGIFCAFLYTFGTGGNDLAPVEPNLTANQTNVTNMTNDTANATTVDAPLNNGAYGSSSIDSSSSNGLSGSNSYNGGSNTYNGGSNTNNGGSNTNNGGSSSSDSGNGGSVAPDSGNGGSSDSGNGGSVAPDSGGGGSSSGGSEPAASGESSN

SEQ ID NO: 6040 - protein, 498 aa, Methanobrevibacter ruminantium; identical to SEQ ID NO: 4553

SEQ ID NO: 6041 - protein, 203 aa, Methanobrevibacter ruminantium
MKVLLINGSPHKEGCTFTALSEIKNQLEKEDIDSEIFWIGTKPVRGCIACKKCGHKEGKCAFDDDPANEIIDKLIEADGVIVGSPVYYAGPNGALCAVLDRVFYASGGRFAFKPAASVVSGRRGGASASFDRLNKYFTISNMPIISSQYWNMVHGNTPEEVRQDLEGLQTMRTLAKNMAWMLKSIENSDLPNLEDKIATNFVR

SEQ ID NO: 6042 - protein, 264 aa, Methanobrevibacter ruminantium
MKERLDKYLVNNNLIASRTKSKEMIKSKNVKVNDKIITKASYTVRDGDKVEIINDESLRYVSRGGLKLEGAIDSFNLNFNEKSIMDIGSSTGGFTDCGLQHGAKRVVAIDVGTDIMTTSLRDDDRVDLYEQMNFKNAPSSLFKDIDIIVSDVSFISLKHIIDRIAQEDDDFELVFLIKPQFECGKEIADQFKGIITDKEVHKDVILEIKEYFKTKGYYLIDLDVSKIKGKSGNIEYLGHFKANEKVREIDIEEVIDRAFIDEEN

SEQ ID NO: 6043 - protein, 130 aa, Methanobrevibacter ruminantium
MELDSEQVVKRIEELRKDYSCSQATLMGICEVGGMPTEELALLAKGFSGGIGGTFSEGTCGAVTGAVMALGFLGADEKQIISASKKLFNEFKDKYESVTCGYISKDGDDKSPCVEVCLFAGEKVCEYLKE

SEQ ID NO: 6044 - protein, 697 aa, Methanobrevibacter ruminantium
MIKKVTNVIDEITDFLFGLKMTIISGIFLLIAVIFMIFGIDTPIYLNPAWGTVIISGIPMLLLAMTRLIREKWVSSALLIAIAMVASLLIGEIFAAGEVAWIMALGALLEDWTVERAKKGLRNLINLTPQTGRRIVGDSEEVISVDEIRIGDVLRILPGESVPVDGEIIKGSSSLDQSIMTGESLPIDKEVGDEVFCGTMNMYGAIDIKATSLGENSSLQKLIDLVKAADEKQAPTQRIADKWATWLVPVALAIAIVAWLVTGNIERGVTVLVVFCPCALILATPTAIMAAIGQATKYGVLIKSGEALETLGALNTLVFDKTGTLTYGNLAVSDIISLKDDLDEMDVLRIVASCEKLSEHPLAKAIVNYANEAKVDIEEPEDFKMYPGKGVYCKNSYGHICAGNSKFLNENNIDFNIGSKDDLDVDSILNHLKQEGKASIIVALNGEIIALIGLSDVMREDSKAMIESLHDLGTETVLLTGDNTETANYFASRLGIGKVYGNLLPQEKLDWIERFKDEGKKVCMIGDGVNDAPALKTADVSVAMGSVGSDVAIEAADIALLGDDIGKIPYLKKLSNSTLFTIKANIIISMTINAVAIVCSVLGLLNPVTGAIVHNAGSCLVVLNAALLYDRKFDDSIKRIDTENVEHSHYHFHNDGEHSHSHEGIRIIDEIKTDNGIKHMHIHKHALNRQSCEAYHN

SEQ ID NO: 6045 - protein, 273 aa, Methanobrevibacter ruminantium
MSCYKYWGKIEEIANKLSSYGDLDNEGLSALDGTDIDEITKILDEIEVIAHDKEIDFDSAKHILDDEKMNKALQLIRKFYVYIGARLERENALTILEADDPKVALDSFHFYDRYIGLIDNERQLANFNENKTFVFLGSGPLPLTIIMFNMVTGCKCIGIEQDPDVADLSRKVLKRLDLDEGIEIVTGNEKTIAELDYDILMIAAFAEPKDRVFANVWDIVDEDTPVLYRTYTGMRAILYSPVTEKDTRGFHKEVMLLPRGKTNNTSVLIRKIS

SEQ ID NO: 6046 - protein, 203 aa, Methanobrevibacter ruminantium
MELTGKNISFKYSSGSRQILKDVNITVDNKKILGLFGDSGSGKSSLCKILAGHIKRYEGEVRLDGQEIPKGFDPIQLIYQHPEKVMNPKWKMHDVLGESWEVPDDLLEDFGIQKSWLNRWPAELSGGELQRFSVLRALNPNTKFLIADEMTTMLDAITQVQIFESVLKIVKERNMGLLVVSHDRDLMDIICDEVIYLDDINNI

SEQ ID NO: 6047 - protein, 354 aa, Methanobrevibacter ruminantium
MSDLINVSNISISFTQYVKGLNQRELKVITDLTLDIKEGEIVAVLGSSGSGKSLLAHAILGILPHNANLSGTMVYKGEVLTEELKEKLRGDEIALIPQSVNFLDPLMKVSDQVIGECKDEAEEKEKRAKQRAIFEKYNLSEEVDDMYPFQLSGGMARRVLVSTALLTNPKLVIADEPTPGLDEESVEETLNHLRQMAADNVGVLLITHDIDAALKVANRIAIFYSGYVIEIANAEDFSGEGENLLHPYTKSLFKALPLNGFELTKGHQPLHGEIPVGCPYYDRCPHKMDDCDKTRPHLIPIDENKRVRCFKYEGEIKDSSEEQVVDSSEEQVVDSSEEQVMDSSEDQIKDGSEE

SEQ ID NO: 6048 - protein, 286 aa, Methanobrevibacter ruminantium
MDESANKMNKFDVLGSMNLRTKTLLAIGLSAFILIVVVLVSFFIDPTSITTDWSIMNQPPSLEHLFGTDWMGRDMFTRTIKGLGLSVQIGFFASILSSIIAVALAFLSSFNKYLDSFVSWLIDVFLSIPHILLIILISIALGGGAFGVLVGVAFTHWTSLARVLRAEIKRIKTSEFVTISERLGKSKFWIARKQILPLVISQVIVGTILIFPHAIMHEASVTFLGFGLSPHEPAIGIILSESMKYLATGNWWLALFPGLALLILVLLFDIAGENIKKMLDPASAND

SEQ ID NO: 6049 - protein, 330 aa, Methanobrevibacter ruminantium
MLDKQKILKFLGYKLVRFAILLIVVILLSFILIDMSPINPVNAYISNMVVSPEKIAKLEAYWGVNQPITEKLINWLGNIITGDFGTSLIYRTPVLQVIAEKFTASLILMLTSWVISGILGFALGVLAGFKRDTWIDRVVKVYCYVLQSAPTFWIALLVVMVFSIYLGWFPVSGGVPIGALSQDVSFFDWLKHLILPAFTLSILGVASIALYTRDKLIEVMTTDYFLFAKARGESGWTLIKRHGIRNILLPAITLQFLSFSELFGGTVLVEQVFMYPGIGQAAVSAGLRSDVPLLLGIVIFSAIFVYCGNLIADILYNFVDPRIREGEENG

SEQ ID NO: 6050 - protein, 537 aa, Methanobrevibacter ruminantium
MDKKIIIGAVVALLVIIVGAAVLMGGGTTERGPGEIVVAAYSHGGEPEAGFDPIAGWNYYAEPLIQSTLLKMTPNGTYAKDLATDYEISDDYKTYTVDLRKDVKFTDGSDLTAEDVAFTYNAAKESGASLDLSALDKAEAQGDYKVKFTLNKSDSTFLDKMAYIGIVPSDSYNNESYGENPIGSGPYKFVQWDKGQQVILEKNPDYYGKQPEIEKITILFAQNEAAFNLAKNGEADIVAVPLEYGKEKLDGYTMYLQDTIDVRGVSLPSVPDTGELSPDDNYTIGNNVTCDIAIRKALNYGINRTALAEGALNGLGYPSYDGIAHQLPWANKEAAIEDGDVAYANKTLEEAGWVDSDGDGIREKNGTKASFKIYYSASAPERQALAVGAAEQAKQFGIEIEPVGAEWDEIYPNEFSQGVLWGYGSTDPSDMYGEYYSSSDFNPARVNNSAVDKHMDDAFAESREDSYKDWSAVSWDGSTGISPKGDANWLWLGEIKYGYFVNDRVDISNDTALLQPHGGDLFSNVYDWTMTNATAEK

SEQ ID NO: 6051 - protein, 321 aa, Methanobrevibacter ruminantium
MVSVNLEAKKTVDVMIEKADDLNIAVSKLENGATVIDCGVNVAGSFKAGELYTKVCLGGLADVGISIPGDLSEKFALPSVKIKTDFPAISTLGAQKAGWSVSVGDFFALGSGPARALSLKPAETYEEIDYKDEADLAILTLEADVLPGEDVAQYIADECGVDVANVFLLVAPTASLVGSIQIAGRVVENGTYKMLEFLKFDVKKVVHAAGIAPIAPIDPDGLKAMGKTNDAVLFGGRTYYYVKSEEGDDIAAVAAQLPSSAADGYGKPFFDVFKDAGFDFYQIDKGMFAPAEVVINDLTTGKLYKEGFVNAELLKKSFGIE

SEQ ID NO: 6052 - protein, 318 aa, Methanobrevibacter ruminantium
MITTVVGSFGIDLKEPKTLGEKIKSSIGMYDPYKIAIEEAVKLQLDCGIDIIGDGQPRGDMVGSFVKHIPGFSYEMNSSVIVSKIRAPQVDIMIKDLKYAKKVLEAEIKARNMSGDEANRKGVKLMLTGPSTIVHSSRLESFYKERNPAIIDCAYALRREVESAEKAGASYVQIDDPFLSTGMVDLKVAKESIGILTDGIEMPMAMHVCGNLDGCFKEIAKFPIDILDCEFAGNNVNIGILEENASLLSGKKLGFGCVDSAMNAVDDKEEVRALVQRGIDAVGKENMLLDPDCGLRKVDIPIAMEKLKILSDLAREFN

SEQ ID NO: 6053 - protein, 102 aa, Methanobrevibacter ruminantium
MSFCLETYLQQNDDYKILIQRSGVKQCYKLIEDNAKEIIHVNPGDKVLGARLIGLPPIPVGINEEEGTILITYTKPCHGTAAIEIPISQEEIQNVRDMDIGA

SEQ ID NO: 6054 - protein, 153 aa, Methanobrevibacter ruminantium
MKALVLLGCPEAPSQTPIGLYASYKLGQMGYDVTVSSNPAAGKILDISDPEGVYVKKRVDIEKCLDEIEEGDYDLLVGCVHKDAAATFFITYYHILKCKALALVFSRDAEEVAEFADMVESSTDADIIAVRAFHNPNPIKVRFDKYLKTLEEE

SEQ ID NO: 6055 - protein, 169 aa, Methanobrevibacter ruminantium
MGLISDTHISEKRGKLSNQILESFKGVDLILHAGDISSQTVLDKLNSIAPTIAVEGNNDRARKTLDLNPSEIIEIDGIRILLIHGDKLPSRDFDKYCKFALKENADILISGHSHRPHLERQEDILMINPGSPNRPIKSDASIAILTIDEEKEHKNKLDKVKVEFIKIEK

SEQ ID NO: 6056 - protein, 38 aa, Methanobrevibacter ruminantium
MLICPICGYPLDSDGRCWNCGYWVETHPLDPFQPGSGY

SEQ ID NO: 6057 - protein, 42 aa, Methanobrevibacter ruminantium
MLDCPVCGSELDEKGQCWVCGYNMAPCDHPDDYDYDDFEPQL

SEQ ID NO: 6058 - protein, 167 aa, Methanobrevibacter ruminantium
MTFKKEKFIKLLMFIISRSSDNYNVGKTVLSNMLYFIDFNYFETYGESLTNEIYIKSYLGAVPSHFDEIVRELIYYNKIYRRREPYYYHHINKYYLTSLHNIDLDYKELIVVGGVLDNLMGFSAVEIVDYISGDAPFKIAGFDEPLDYSFVFYRDFDYSVRNLDYYW

SEQ ID NO: 6059 - protein, 602 aa, Methanobrevibacter ruminantium
MKNIRQTLSTIGKMLSPLKKSIPSIFLIFIFLLIDVYCNLTLPSYTADIVDVGIQNTDFNYIISVGTMMMTMVLIGVLATIALSYFSSKVSAAYGRDLREISYEKILKFSNFELNKISRSSLITRNTNDVYQIQIFLGLLFTTILFAPILGIGSIIKAMELGTDLLWIIVVTFASVAILLGIIFIRTVPYFKVMQELIDKINQTSREILMGMPVIKAFIRQDYEEERFEKTNEEFKEVNLHVFKTLFLMIPAMTMILNVMIVLILYFGAYDAINGKILTGTIIAFIQYSTQIVISFLMLGGFTIMIPRILVSGRRVGEVLNTEISISDGPIDKIDENPTIEFKNVGYSYPGSEKETLKDISFKLEKGKTTAIIGGTGSGKSTILNLIPRLQDVTEGQILVNDKNIKEYKLSTLRERISYTPQKAILFQGTVRSNMQVGKEDATDEEIEKALNIAQVDFIESLDDEVTQGASNFSGGQKQRLSIARSIMDKRDFYLFDDCFSALDMNTEAKVKENLKDLKESSSILIISQRISTIMDADEIIVLDEGKIIDKGGHDYLYKNCDIYKEIVSSQIERSEDLIYDNEETASFTIDSSSIKKAAGGK

SEQ ID NO: 6060 - protein, 595 aa, Methanobrevibacter ruminantium
MAPRPRRLPPEKPTNVKEAIKNIFGLLMGYKLKLSITVICGILSTVFSVISPLLIGLATTAIFDGINSGNMNLEYIINLLITVVILYIISAVFSYLQSYFLLEITTDISYNLRKELIEKITHLSMGEMDKNTRGDILSRITNDVDSLQTGLNQTFNQLLSGVITIVGVTIMMLSINIWLTLATIVLIPIAFLIITFVTKHSQDYYTKQLTYRGSLNGQIEESFTGHEIIRSYNQEEQSMETFREDNENWYEQEWKSKFYSSLSAPLMNFISNFQYVIIAVLGAVFVLQNAIAVGDILAFIQYSKNFTTPIQQITRVMNMVQTAMAASERIFGFLEIENEENPSKEKIEKINDSITFENVTFGYTKDEPVIKNLTFTAKKGEKIAIVGETGAGKTTIVKLLMRFYDVDDGEIKIDGVNINSYDKHSVRSLVGMVLQDTWLFNDTIYNNIKYGKLDATEEEIISASKEAHADHFIRQIPEGYQSELNEDVDNISHGQKQLLTIARTIISNKQILILDEATSSVDTRTEKIIQKAMDKLMEKRTSFVIAHRLSTVRDADKIIVIEDGRIIEQGSHEELLEQKGYYYNTLNTQRRENIV

SEQ ID NO: 6061 - protein, 200 aa, Methanobrevibacter ruminantium
MNGGNNLDNNCKNLGNILNPTEVNNQLLFHKFIMINEILDKRNKKQNPEMKSITKGQGRLIVLLKRKDKLSTKELSEILNVSVSSLNETLNKLEQKNFIKKVPSEKDKRILLVELTEEGRQLEFKNHEDIDIFDFLSKEEKENLNDYLNQLTLSLHEKFKREDPEKYAKIVKNRKEIFDKYFKDENNNETCFEFIDCSKK

SEQ ID NO: 6062 - protein, 245 aa, Methanobrevibacter ruminantium
MANAIITGGSRGIGKAMALKLGELGYNVVINYRSDSSKQLTEDVIAEIKDKYGVEAIAVQADVSKFEDCKKLVEAAVDAFGEEIDALVNNAGITNNSNFIDLEPERYEAVINTNLVSMMHMCHLCLPYMVDRDTAIVCTASVGGLTGVINQADYCAAKTGVIGLCRALALEFAPRKVRVNSIAPGMIMTDMLRGVNQDELNALAATIPLGHIGEVEEIAGALEYILTAPYLTGQVISPNGGFVLQ

SEQ ID NO: 6063 - protein, 343 aa, Methanobrevibacter ruminantium
MKIWIDISNAPHVRFFKDVIKYFEDEGDDVLVTARKFGDIHKLMDMYDIDFISVGKHGVTLEEKLKESAERVVNLADLISGEGFDVALSKHSIELPRVAFGLGIPSLFVLDNEHAMAANKLTLPLCSKIIVPNIIDMWKLMEYGANPNDIIRYNGTSELMHFNNFVFNENIFEDLGLDLPLQRTILMRPEPSLASYLNTDCRKSVLSPVVDVLKEYANILILPRFKEQAEIFEGIKNVTILKPPVDTSSIIKACDLVIGAGGTMNREAAILQTPVISCYPGDTLSVDQFYVNNGLMYRTTDLEDITKQALSFIVNPHKPIDFKTDDLFDLIVKNTYELGGSKK

SEQ ID NO: 6064 - protein, 253 aa, Methanobrevibacter ruminantium
MHKVADVEVAKNIMDANAKLAHKNLHLLEDHDIFCVDFVGAIGSGKTALIEEIIENVDEKIGVIAGDVISKFDAGRIESHNVPVVGLNTGKECHLDAHLVGHGLGDLPLDDIDYLFIENVGNLICPVDFELGSHMRVVVVSVTEGDDTVEKHPLIFQNSDLVIINKIDLAEAVGASVDKMVCDAKRLNPDVKVITSSLKEGKGLDEVIAAIEDCKAHVAEHHHHHDHEHEHDHSHDHEHSHGHDHSHSHEHSH

SEQ ID NO: 6065 - protein, 124 aa, Methanobrevibacter ruminantium
MHELAMAQGILNAVLETAEANNAIEVTEIVIEIGKLAMLNPEQLKFMLGVLCSETIAENAELIVEDIDVEIKCHNCDFEGVANVDDSDHYAPMILCPKCESHRVEVKNGKDVTVRNISIEKEDE

SEQ ID NO: 6066 - protein, 306 aa, Methanobrevibacter ruminantium
MIIGGSASQKLAANVAKELGDVLCPIETKKFPDGERYIRIKSEVDKEVTIIQSTGFPQDENLVELLFLIRTVKDLGAEHVKVVVPYLGYGRQELRFKDGEAISAQLVANLIEESGADEFISINLHEDSVRDFFNIPTANLSAMPPIAEYIANTVENPIIIAPDKGALGFAEEIAEILGCNCTYMSKVRLGPDKVETTIVDIHSDFDSEDLAKVKKDSKVNIDSVKDKEAIIIDDIIATGGTIVNAIGILKEHGAKSVDVYCVHPVLVNDAVLKISAAGARELASTDTLKSDVSSISVAKIIADVLR

SEQ ID NO: 6067 - protein, 367 aa, Methanobrevibacter ruminantium
MLLIAQNHFQLILEVGLILLATMIFVINLVPLSLSVVTFLSLFLSGGFTILFGADLAFLVLSFGQHEFTHPFGPIALLAIVTALASLKVMEGSGVDISRLKNIVYVFLIAITVFGGAMHRSFLLLWFIGLFIGYTIISKSFRQKSILTIRRILMFFLAALVAFGLLELVSRILSMEVFSPLLRISRLAQNSLASLKLVIGNTQLIGHDPASSYWSDSTGFADGYISLPMQFILMFGLPFPLFFGLLVTKKDTIDYMLPGIFGYAYDFGYLTFVILLLLVLFTIIIGLLVLREYRLKREKNNKKYLGKEVLLIGSLTGFIAQAIIGLFLFNRTINGMALLTFLFLGSLVLAHVVTIRRDSNEVLSQQI

SEQ ID NO: 6068 - protein, 159 aa, Methanobrevibacter ruminantium
MVNIKTVALAVIAIIVVLLAIFAVSNVVILAQDDTEGGIPGVDMAALWSLNGGFQWIYPGSSFDPEGRTLHNIYMLDDPYGEVKTIMQYTYNVDPHILVIINDQAAAHIFGDNILDTIRQHDWVEGHSRGDAVGMSITSVNPLPIIPDILMGNIKIMFI

SEQ ID NO: 6069 - protein, 724 aa, Methanobrevibacter ruminantium
MEEKKIESTDVEVNESKDLNLDSTVENNEIDKTEELDASSEIDENEELGTSSEVRETIVIDTASEVVEADVVSETIDSSESVKDEEEDSNPLDVEYVEEDGKRRIKPMLDYESLSNTSEIEVPPLLIDQVIGHEESVETIKKAAKQRRNVLLIGDPGVGKSMLAKGMAELLPPEVLEDVLVYPNGEDSNYPLIRTVPAGQGKKIVKANKANAKSGDEKKMMITMFATAAIFVLGILYQRIFEAIIAALLVIFISMQIKPKANNMSPKLLVNNGDKRFAPFMDATGAHAGALLGDVRHDPYQSGGLGTPAHERVESGMIHKAHKGVLYIDEIGTMSMKTQQELLSAMQEKKYAITGQSENSSGAMVRSQAVPCDFVLVASGNIQVLEGMHIAMRSRIRGYGYGVFMKDYMEDTEENRKKLVQFVAQEVKNDGRIPHFATDALDEIILEAKRRAGRKNALTLRLRELGGLVRSSGDVAIEEGADLVTAEHVVTAKRFARTLEQQIVDRSIIQRKEYSVFHSSGGKIGMVNGLAVMGDRSGIVMPIAAEMAPANSKNEGKIIVTGKLGEIALDSVQNVSAIIKKYTQVDISNHDIHVQFLQSYDGVEGDSASVSITAAVISAVEGIPIDQSIALTGSLSVRGDVMPIGGATAKIEAAAEAGIKKVLLPKSNMEDVMLEKKYEDMIEIVPIETIEDVLENILINGSKKEKLINKNERNQWSSHKQGLY

SEQ ID NO: 6070 - protein, 546 aa, Methanobrevibacter ruminantium
MTKCLMIQGTASNAGKSLIVAALCRIYTKRGYKVAPFKSQNMSLNSYTTKENKEIAIAQVLQAKAANIEPTVDMNPILLKPKGESCSQVIIQGEAVGNKDFFRKYDKTKATQRDIDNNLMDDEDYRIIAKEAVIDSLNNLKEDYDIIIMEGAGSPAEINLREGDLANMGAAEIADANVLLVGDIDKGGVFASIAGTFLLLDDADRSRFKGVIINKFRGKQELLCSGIERLEEIIQVPVLGIVPYAENLQLPEEDSASLKEHNWTKEFKNNDDHIIIGVVKLPKIANFTDIDPFDTEDDVEVRMIEVHNYKDKIKDIDALILPGTRNSTEDIMELEKTGLAQEIRKLSNESKIPIIGICGGYQILGNKIYDKNHKESKLDEVEGLGLLDIESEFIRESKVVKQSIGRIEINDNITGLNNSDENNIFYEIFSKINGETVSGYELHEGTTNLISAKPLFKIEKGIGNNDNDQFDGAYSKNVFGTYFHGIFNNYNLRREFLNHLRKNKGLDEKTGEDPYETSVENSLEKLANIVEEALDMDYIDKLVFDE

SEQ ID NO: 6071 - protein, 386 aa, Methanobrevibacter ruminantium
MRDVAIIGASQTKFGELWDVSFRELISQAGLGAIEDANLSGADLEAMFVGNMSAGLFVGQEHIASLISDSMGMNPVPCTRVEAACASGGLALRQGIMAVASGYHDVVVAAGVEKMTDVVDATPAIATASDQEWEAQQGATFPSLYAMIAQRHMYEYGTTREQLAMMSVVNHKNASNNPNAQFPFEVTVDKVLNSSPVADPLTLLDCSPVSDGAAAIVICAAEKAKEYTDTPIYVRASAQSSGTIALHSRKDITTLDATIAASRKAYDMAGVTVKDIDATEVHDCFSINGLLAIEDLGFAKKGEGGKVLEEGQTNIDGDCPINPSGGLKARGHPLGATGIAQAAEIVWQLRGEAGKRQVDGAEIGMTHNVGGTGGTCAVHIFGRDLN

SEQ ID NO: 6072 - protein, 346 aa, Methanobrevibacter ruminantium
MAGIVGYGANVPSYRIKVEEIAKVWGDNPESISNGLIVNEKSVPSSDEDTATIAVSSARYALRRAQIDPQDIGAVYVGSESHPYAVKPTATIVAEAIGATPDMTAADLEFACKAGTAGIQAVMGLVDSGMIKYGLAIGADTSQGAPGDALEYTASAGGAAYIIGNKDTIADFGTTYSFTTDTPDFYRREGQPYPSHGGRFTGDPAYFKHVLGAAKGLLEKTDSKVEDYDYAIFHQPNGKFYLRAAKKLGFTPEQYKDGLLTPNVGNTYSGAVPLALSNVLDKAEPGDKIFIVSYGSGAGSDGFTLTVNDRIDEVRNLAPTTEEILSKKIYVDYAVYAKFKGKLRMA

SEQ ID NO: 6073 - protein, 88 aa, Methanobrevibacter ruminantium
MSSGLTIGLLSLIIFGNIENLILASQGVVKAANPLKLAIFSLICVSCWLILGTVCTQQLQNYGIYIEFIGGFAIFVLGLQSMIEAARG

SEQ ID NO: 6074 - protein, 95 aa, Methanobrevibacter ruminantium
MSFAESLKEYKPFLGLLIFGNIENLVLAAQGVIEGADPFLVAGASVCFVIIWQFIGVFGTKSAMKYSRHIEFIGGFAIFVLGIQSMLPLIYQLLG

SEQ ID NO: 6075 - protein, 222 aa, Methanobrevibacter ruminantium
MSDEKMERVEDNELLINARKPEGELGDQLLDRMNKSHESLAQWGVSHLDISKDDIILDIGCGGGVNVERFLKMTENKVYGLDYSEVAVEKSKKLNQKAIEEGRCEVIQGSVSELPFDDEIFDIVTGFETVYFWPDFVNDLKEVRRVLKEDGIIFICNEAIPRDGDARQEELKELLDMNIYSDDELDQSLRQAGFSDLIIFDKSSSKVESKDVSGWICAIAKK

SEQ ID NO: 6076 - protein, 155 aa, Methanobrevibacter ruminantium
MTFGNDKENIFVKNVVDYGDLSKSDRSSNLGRFFPNRQSPKSDFDSVPSSIDEKIINILTFKDEGDSNGSNNDGTSDDSVDGVDYSLFDEELEYICSLGFNPFEEGGINRDSLEEHFNPYLENHPEELAFLSVFEDFTLVQMNFSDMIKEVYFEE

SEQ ID NO: 6077 - protein, 536 aa, Methanobrevibacter ruminantium
MAQGQPIFILPEGTNRLLGRDAQRTNILAGKVLAETVRTTLGPKGMDKMLVDGLGDIVVTNDGVTILKEMDIEHPAAKMLVEVAKTQEDEVGDGTTTAVIIAGELLKKSETLLDMDIHPTIIAMGYRQAAEKAQEILDDIAIEDISREMLVKVAMTAMTGKGTEKAREPLANLIVDAVQQVADDGVVETDHIKIEKKDGAVVEESTLIQGVIVDKEKVHPGMPSELKDAKVVLINSPLEVKETEVDAEIRITDPAQMQAFIEQEEQMVRDMVNKVADSGATVLFAQKGIDDLAQHYLAKAGIMAVRRVKKSDIEKLAKATGATVVSNLDDLTEADLGSAGSVIQKKISGDDMIFVEECQEPKAVTLLVRGSTKHIVAEIDRAVDDAIGVVAATVEDGQVVAGGGAPEIAMAKKLKEYAQSISGREQLAVTAFAESLEIVPKTLAENAGLDSIDSLVDLRAAHEKSPYMGLNVFTGDVTDMKEEGVVEPKRVKKQAIQSASEAAEMILRIDDVIASSGTSAGDMPMDPGMGGMPPMM

SEQ ID NO: 6078 - protein, 338 aa, Methanobrevibacter ruminantium
MVERANINPAMMLWARKRAGYINGFEEDLPKDIKSKYKSWESGEEKPTWTQLRKASKKFCLPSAFFFLEKVPEDDDFPKMINYRKLDADDIFENNSPSLIKQIRKSQSRREHYLDLLYELEENIPSFEIYEGSLNKKHVSNYIREKLGISLETQKTWIRKNKSKDSRHYNFLNKWKEIITRKIGVLIFESEGVALNEMRGLCIFHKEVPIILLNGKDSVNGRIFSLFHELTHLLLGQSAICGDDENIDEEIFYNAVAGEFLVPNEDLCKNTNADNMDTISNGAGGNYLNNQIKYNGEPYCAVVLEAYEKGIINGGEFSRFTNLNKKFIPFMFNRYLFS

SEQ ID NO: 6079 - protein, 91 aa, Methanobrevibacter ruminantium
MEEFRQQLVDKVVFSLVNTKQISNDDLDKRNNSISLDVRKLIIGRVLDKVNSNINYEGENLSYAQIIDKQAKKIVNYLINGEKYTGFSLRW

SEQ ID NO: 6080 - protein, 231 aa, Methanobrevibacter ruminantium
MKILIEGYNKSIHKRDNQILIMEKEGELEKINIKKIDDITIIGKGSITFDALRLISENNVRLMSIDYFGKINYTLEYPSNENIFLRKQQYKTSENHKGLIIAREMIMSKMINQKSTIKTLNKNKKLENVKIFERNINEAIKQIGSLRFGERTDIEKSKMKMMGIEGSASVDYWLAVNELLPKEIGFFSRNNRHPNDITNASLNYAYAILASEVNKALVINGLDSYCGFPAF

SEQ ID NO: 6081 - protein, 91 aa, Methanobrevibacter ruminantium
MKVLVSFEIKFKTNKEKIISILKHFGFRRMQENLYFGDVEYDELYAMQSDIMENIREYDSILTIPICKSCYLKLNVFGRNLSFKDELYKIF

SEQ ID NO: 6082 - protein, 3053 aa, Methanobrevibacter ruminantium
MNKSKKTMIMLIMAILVLLTMASVSASELEDIQVTASNGTSDAVIASEANSAYPDNAIITSEKENGDENIIATDNGKIGYENDDKTIIATNGNGGNIGYEDDDNTLITSDKELNALDKGKYQSLSVGDYHSFEELQTILNQADGGETIELNYDYSLGAGGSTLKLTKGLTINGNNHTLYGVGLDRILYISSLNTQPIILNDIIFKDGGKKDSYTNLETNWGGAIYYNPTTEGGAIGGEPADFIINNCTFENNGAVNGGGAIFWNGSLKIIDSRFFNNEIELGSGGAVYANGNLTAIGCSFSNNRVRHGLIGMDMLTTTFTDEGYWAKVIQYYSFYSVDVIPPTGGAIFCNGTCKINDSSFDNNQAGEANEMGTGGGAIHSMNDITVCNSTFTNNKAYDQHGGAILCNRSGFIYNSTFRNNVANVGGAISCFYYLNAEGSTFSNNGGEIGTTWMDEHSFDFLIDNFIGSIPIIGDIYGALQNFLDLLGVESVDVLTGQYFSVGGALYTGLDCNVDKCTFERNHAAEGGGAIYSERKVTAKNSAFSSNKVFRGDSAVSELMSSQGKNRDGGAIHAENATTIRNSEFSGNSAPSKGGAVYCAHHLEMSDSSFLYNTAYQNGGALYADTIGTISNTKFSGNSVTKGSGDGGAVYIIAQSDARFESCEFSANTAESDGGAIYIANSNSLLRLNKCTFIQNIAHLDGGAFNCRGKTEIKNSVFKRNSVDGDGQTENSQGGAAFSKGDMSISDSSFEQNMAKHHGGAAYTDGKMTVKNSNFTVNSANNGGAIYASVMNDEVTNSIFKKNTGTNGDGGAIYINDKSWPKFDSCVFSDNKCVVKSSVENSQGGAIYVRNDDSELKVTNSNFTGNAAGQGGAIFSGKVNEITNSVFKKNGASKSGGAVYIEPNCNPKIRQSVFEENVGGDKGGAVYLNSKYSYLELTGCNFTKNTAKEGGGVYAQQMSAKVSSNRFISNKATDGKGGGIYVRNYHITETVKRYTTEFVDCTFTSNTCTDNGGGLCMDSTYSVLKITSCNFTSNTAKNNGGGVWAHMINSIQWSSFSKNKATEGKGGGVHIKNDYPNRIADNPKTEVKNCQFDSNTCKDEGGGLHVESEHAKLTLTSSTFRFNSAGRGGGVYAHKVISINSCGFHNNSANYVKNNGDGGAIYIENDNDFEIKSCRFEGNTAKSRGGAIYMDSYEIKTKISYSTFVDNYAGRDDHSSTLYTFMAGHSVFTKGTYTNISLCWFGSNNPSFTEQLVDQNRVSSDKEKKPSDFGAEYLKINIKINNTRPIAGNPYKVTVYFTGNVNNNVVSFSSNTLYHSTGKFGGDGTYSNIKADKNDMTADVVLTPESRQIWGQLDHQKVYLNVNPLTKNSTMVEIRSCEDIKYPDALEVNYTLVNYTISNAEAATYIINDSEGNTVKSGNLTSPETLYVEGLKPGTYSITITIPETYYYLSSNATASFDVFKGDIEELRIVVNNRTYPEEVKAIVYASVDEDYEVTIGEETKTVTVIGGIGQVNFGSLETDTYEATVSFGGSDLYEPISNATEFTVYPEEEGTNFEIDTNASEITYGASIKVTHKLPEDATGTIKYYLNNGTVLGELPVEEKLTLDLDAGYYVIFANYSGDESFEPDWDSADVLVKQVETEFHIGLQQQVISGNPAYVTHSISEGATGTISYYLSNGTFLGEVQVGETYVSPKWKVGIYNITANYSGDRNFVPASDSMEFRINPDFSFDIYLDEDDVIYGQTTTVRPSLPYDATGTVEFYYNDTYLGKVTIGQYEIIMVDGEEYYETPGVELPEFDVGVHEIVGKYLGDKNYDPAIANVRLTVLSTETVFEINASPSEIKYGEAAAVIHKLPSLAVGTILYYLSDGTSLGELYYYEDLALPKLAVGSYEILANYSGDENFNNASASTTLTINKADPDFEIYIAFPSYDFGDSPVVFVNLPDDATGNISYYLSDGTFLGELPVDERLSLPILNVGTHTIIGNYSGDGNYNNASASMTVTVNEVSMEFNLGISAEEISYGETATVTHRLPSLAKGNITYYLSDGTLLGELPVSENLTLPKLDVGTYIIIGNYSGDENFDGDSANVTLTVIQADPAFAISISAEEAAYGETVTVSPALPEDATGTVIYYLSNGTILGELAADENLTLPTFDVDVYDILANYSGDKNYLNASAETALIVSQADPGFEISISAEEAAYGETVTASPVLPEDATGTVIYYLSNGTILGELPVDESLTLPTFDVGTYTILANYSGDSNYLDASAEKELTLIKADSTLEINDIAFDYSKTGSAEAKTSGAEGIVASVAGHDEAVVEVNGNEITVSGLDAGSYTLSVSTIVDDNHNSASKNITVTVKKIDSSLSVEGLELDYGESGNVDAAAEGATGISAKIGSKSIGVNGYSIPISGLDAGKYNLTVTTIPDRNHNPVTKTAQITVNKIDSTLEANDMAFDYEGTGTSSVTYTGATGVKASVIGQPNAKVNVKGKEISVSGLDAGNYTLEITTIPDKNHKAVSQTVNVTVNKIDSKLDFNNLVDYGSAMNVTVKTEGASGIMAEIDGKELGVDKYTIPISALDAGEYDLTVTTIPNSNHNPVSKTVKVTITKLDSELAVEDLEFDYNSTGTTNATFEGATGITAKVVGQPNATVEINGNSISVSGLKPGSYTLEVTTVPDENHNPVTAKSAIRVNKLETAISANDISTVHGADKNLTAIIRDINGNPVANATVSVSLNGSKKYVSDSSGQISIPLKSLAAGNYTATISFAGTEIYGKSSASIKVAVDKEPTSIAATNVNTQYGLEDYITAVLKDGQGNPLGGVKLNVDLDGNRTIVTDSNGQIKIATKDLTAGNYIATISFAGNGNYMASESNAIVNINRTGTRFNFKNMTTTAFDYRIEGRIGKYFYFQLVDEDGNPLANKNVCIGFNGVKYNRTTNETGWTKLQINLRCVNLYTFAVTFSGDDNYTGAFNVAMINVTHQSPKLTAGNKSYKASANTKTLTAKFKSFKGTAIVGKKITFTVNGKKYSAITDKKGIATVNVSLNKKGTYKYTAAFAGDSTYKKVSVTSKLTIK

SEQ ID NO: 6083 - protein, 184 aa, Methanobrevibacter ruminantium
MTTTAFDFKIEGRIGKYFYFQLLDEYGNPVAGKNVSIGFSGRIYNRTSNETGWAKLQINLKYSGYYTFAVNFGGDDEYAAAFDVAAINVTIQTPKLTTSSKTYKASAKTKKLTATFKSYKGTPIPSKKITFTINGKKYTAKTNKKGVATVKVSLSKKGTYKFTASFAGDRTYKKVTKSAKLTIK

SEQ ID NO: 6084 - protein, 54 aa, Methanobrevibacter ruminantium
MEIDDYFDIFGPSGHASMMYPGDLAGGAENVANCRCWVRYTNERPSNLKPYGTI

SEQ ID NO: 6085 - protein, 139 aa, Methanobrevibacter ruminantium
MYLTKFCPKCGEENEDVAQFCSNYGHDFKDVNQRMKESKRENSSFPLSGTKILLCIVLLIVLIIAAFLFTGGNADKPQNITMIKENTYGFTFVNRGVLFYNYHLDEVLPICRMISRAMTLRQDSTMQMTHWLRSIMITI

SEQ ID NO: 6086 - protein, 269 aa, Methanobrevibacter ruminantium
MNQLKEEVDSRMKSIEDNASEKTKQKLQKKQKKIDDISEADIDEQIETLEKENKKLKRYQRILDALQEKMEIDSGRVMGLTDGIFSIVMTLLIFGITLPSTEILTDAGLSSFISSILPNIGVTLVSFILLASFWIYHHEFIKLKCLNLVYLWLSMFYLATVCFIPFTTTLIGTYPEFRLSTNIFGINILLVIIFFLLMLNYASKRGFLDEEVIEKDKKYVHHTLYIILGLAVIINLLDFSVNENFIYLFFLVPIISTIRDVRFKLKNTE

SEQ ID NO: 6087 - protein, 686 aa, Methanobrevibacter ruminantium
MANDNERLQQLVRSSLLENNKLKMEIVKLKENENSLKSDKEFDELKKEYEASLSEKDQEILDLKDSHQSDLDELKLKYDDDLKTKENEISALKIQHKQDLENKSTEISNIKVKHNDELKLKDSEIDQLKQKHDEELRLKDNEIIDIEYDFDNKLKLKDSEINSLKEQFNQDLKSKSLELADFLEKFDEDIKSKNDEIDQIKEDYNKEIISKDMEIESLTNSLNANIEVLNKSKDLLSSKDETIDKLNDKVKELSDMNDSLSNMKESFDAELTNFKTLELGELNLKLRNALNDITSKDNEIQSISNDLKIANNDIVDLKRQLNESKTNANELNLKLATALSSLDDKNIEIQALNNRIASQNENIIDLKNNLVNKDNLVALQRELDSRDVAIREKDVQIQLLKDKSVSREEYAKVKNELSKKDLQIKRLNEVKDLFFELSDNSFMDSQSSSVVNKTSSDDKSLMELNNIKKELELAKENKVKFKIVEENLLDDEKASADLDKKVKLDESKLNTDLEELVNSEIDNFDDLVKSRDAKAEESKSTDASSSKGDYTSSQTNLAGLESSKAPQSDNAEIQKLKEELESYKKQEAEYKKQQEELNKYKDVYEKLTSPQLKNLNSIQSQIYYLLPDEAMDTLSIKDYLNEVAFKNLSFGNTKNILKSLERKGYVEVVKKENDIFFWKKLPIPAE

SEQ ID NO: 6088 - protein, 51 aa, Methanobrevibacter ruminantium
MIYMMNLRESLTHMRSNGLPLLNQMKVNLSVDYYNKYILTHKKTYFSKYYS

SEQ ID NO: 6089 - protein, 121 aa, Methanobrevibacter ruminantium
MNNTTKILIGVLMGLLIVGAAVMFVSATAINDVSDGNSFMGQVQNTANHVKNVASNDIKSGSNIIGGGSEFNSQEGNGYFYQINYTDGNFRQYDTKTGKLIGSGFNEDQSILGNDDGFNLE

SEQ ID NO: 6090 - protein, 553 aa, Methanobrevibacter ruminantium
MQEKIDLVSLPKKSFWKLSIPIIAFCIFDAIYGIVDMLWVSRISVEAFYAIGVSIPITSLIFSFGDSIGQGTNSMMSRFIGTGDYESAYNTLIHGILIANIIWLILVLCLIFAQGILFKVDDADSYILIFDYMVPMIIFAYVFILNNLFSETFQAEGNSHTPTILIIGSNILNIILDPIFIFDLNLGIKGAAYASVLSSLITFSVLMFLYTHGRTKIPLSRKYFKFRSYILVEIFKVTFPNFLDDAIWSFTMSFINVILIGTMGEIGPILYSVSNKIRSLLNAPTKGYGRGLMSVTGHLFGAEQFDKLKEMYKYVLKIAVCTSLVIMIVFFFVRNWAFGLFSITGMDNEIFWIAVGGIIMMTILPFSTISSKMLDGFGKSLYSLLITIIKVAIEIALISLLTQYLKDGSSVLIGIILSEIISSIVYYKFLGYLFDHFDKKYEFKYTVKAFTIKRKDKREKRRERIRQNIEEKKLRKEEKKEEFRQNIEEKKLRKEEKKEEFRQNIEEKKMRKEEKKEEFRQNIEEKKARKEEKKEEFRQGLEERKEKRKEKID

SEQ ID NO: 6091 - protein, 398 aa, Methanobrevibacter ruminantium
MGSKNFQYLDELIHSSANEIILDSDIVLDFDEESEYDDGIKLDVDDLTIDGNGHVIDAKDGLCRLKNHAKNITFKNLCFKNFKSKFPISNQSGDLIFENCRFIHNQGTIYNYFGNIWLKNCCFYRNYLSRSSSGYSVCIYNAKDSKAFVSDSHFYQNEVNYPHYGLILNDGLIEVKNSIFHENKGEDCEICVIFNRKGELLVDNCKFKDNKNVYCSYDFAELIVSILNEAGKVSLSNSTFENENRILGSIKNMGICRIIDCKFKDSLIYNSQWYSSVSRPDELDFGPYLEVEDSSFANKYDEGVIANSGLCKIASCNIDGRSYLNNDDVLFIDEKDFNLLKDNIINSGEIVFDYDRDVPIYESFKGHGKSNGTNSNLEDDLDNDKSDDGYPPLGALFR

SEQ ID NO: 6092 - protein, 213 aa, Methanobrevibacter ruminantium
MAMDLTDIGIEEGQKYEGIYTTMSKDGVKNAAPIGIVCKGKDKLGCRLFVGTKTLKNIMETRKYVVNITFDPINFVNSTIGNLDIEEFTDDEDIAILKNAEAYVICEVTDIRKMDPIKDHITSNGEAYIISSDVVKIVKNNPCAKALNRGVFALLECLTNYTRLDLVSKEQQDYFIGRFNENNRMIKRVSGPDTIKAMEILKNSMIEKGFDVE

SEQ ID NO: 6093 - protein, 356 aa, Methanobrevibacter ruminantium
MSRNFKYLDDLILRKDKKIVLDFDIELTEDEELEYWDGIKLDKDVLIDGKGHRIDACGKARIFDCSGKHIRLKNIILKNGKAINGGAIKISKDSNLEIIESKFIYNIANGTCNEGNGGAIFNKGNLKLLKSTFENNMAKGEGGAIRNYGKLNIAESIFNKNKAKRGAAIINRNDLTISKTIFDDNTAEWYGGAIFHNWGQASILESEFINNSVTEDHGNGGAICNWMRSQLNITKSSFKQNISGSAGAIYNASDCKLNISQSAFKENSARYAGAIVNYGKASIQKSVFGANKSNKFEGGAIFNYSEGNLIISQSVFESNISERVGGAIYSENDNSLKLNNCKFKHNKPDNFNVGSK

SEQ ID NO: 6094 - protein, 321 aa, Methanobrevibacter ruminantium
MKHRLNLDNKDPNYILLKEIFKIMDSRKSKSILASYGFKNLNRTIFTFKIIFISMFFGIDIPFILNELKSKKELRKYFNISEVLTADQVYKIFSEINSEKLIKCLNRILNSRNMVKRRGKKTFIVDATPVDLDINFRRNKKSKEHLRKLNLKWSYSSSKGYYIGFKATVVMDYDSMNPVCILIHSGAPNDAGLFEEILENLQKRRIIRKGDTLIFDKGYYGYKNYQIGIGKYKIVPFIFPKEKFNRTRLDDILTYPLAVFNKTKKIMEEKRLYNKLKKELLEKLDSWEKFKPIRGKIEDFFQIIETRLEYERNPQIYSKIS

SEQ ID NO: 6095 - protein, 100 aa, Methanobrevibacter ruminantium
MSQERYKHIRESLFDYINAFLINKYDELYYFNMYESAENMNWDVEYIFKLKYSLTFHEKKNLEIRIRKDLKKFLKEKFEMNIYELAILIILEDNELHSKI

SEQ ID NO: 6096 - protein, 79 aa, Methanobrevibacter ruminantium
MFYIEGENIKYEILPYKKGKKVIIYLKKTENGFVRKNKCFGTHYLEQIFDYNNKLLKETIYENPNFVDLTNFPIDLDYD

SEQ ID NO: 6097 - protein, 49 aa, Methanobrevibacter ruminantium
MNLEVFKMARILIPNYEFVKNWSEDELNDFLTTPAGIPHELMHIVRKVV

SEQ ID NO: 6098 - protein, 244 aa, Methanobrevibacter ruminantium
MECYHLLRKENYSLVRKKIENFLEKYPLKISEENYFYFNNKFEENFYFIFFIHSKYVNVSQKEDVLKNYKILKYDYPFILAAYGETLIEFDEFSKAKYFLELANKISPFDIGILRQLLRIYCIELDREKIEEIFNYALDIVYDEYYLFYIYEFLSEYYLQINQIEIGNLLSQIAKEESFNVAEKHYIKDLFNKYDINLGFNEELISHMEYIVNLLNKKGDFTESYLLNQDCADLKRFNRKFKYY

SEQ ID NO: 6099 - protein, 134 aa, Methanobrevibacter ruminantium
MSNIEKINSEIKDYVNYVQKGGKLEPFFEDICLVTTELVGFRKISNFEDLFSQFKKGDYLALFRDTQNELDELAIVVKWNNLMIGYVPRKHIPILSSLMDSGKEIYAIIDDLILDELFKDLFFETVKIKIFLKE

SEQ ID NO: 6100 - protein, 252 aa, Methanobrevibacter ruminantium
MSMIVHSEYKKLKDHLYDLVYEYEDLINHICPNIEMEYLLKFGIYEYELYKKELELNKLKFKLKLLQTEINHQNELDLNEIDKKVIDKYTEYANNLKNSMNELENIIKHKDNYFQLDEEDEKELKRIYKILIKKLHPDLNFHQENFKKELFIKVTNAYKNGDLEELKALYAMLPDEDIEEKSSLNELKELIHSFEIKIEKIKNEYPYNKLDLLSNEKEIGEYKINIQYLIDSCNEEIEEYSNKINEIIENQH

SEQ ID NO: 6101 - protein, 349 aa, Methanobrevibacter ruminantium
MVKVGVLGATGMVGQRFIQLLADHPDFEIAALAASSRSAGKKYEDATTWYMNDEMPESVRDIKVIETDPAHMDKDVEIVFSSLPADFAAKVEPEYAKDFVVASNASAMRMKKDIPLVIPEVNPQFLDMIEAQQKNNNWDGFIVTNPNCSTIALTLTLKPIYDNFNINRIYVSTMQAVSGAGYNGVPSMAILDNLVPYIGGEEEKMESETLHLLGSLDGDEVVPANFSLSASCHRVPVIDGHTEAVFVELDEEADIDKIKKTMADFRGLPQELGLHSAPEQPVIVKEEDDRPQPRMDRMAYGGMAATVGRLRKDQAFDNSFKYVLVGHNTIRGAAGASILNAELINKQIL

SEQ ID NO: 6102 - protein, 272 aa, Methanobrevibacter ruminantium
MIKVAVTGASGRMGSGIIRKISEQDDMEVVAAIEMPNTPLAGVDAGEKAGIGKIGVPIVGSEDLEKALEESGAEVLVDFTIAPAAVETIKRAADCGVNLVVGTTGFTEEQAQGNADVIKEKNIKAVISSNFSIGVNVFFKVLKDLTPILNDFDIEIIEAHHNQKADAPSGTAMTAFEVVAGALGRNPEEVGVYGRQGQVGKRTKEEIGMHAVRGGDIVGDHTVLYVGDGERLEVKHMAHTREVFIAGVIRALRFVGSAEPGKVNDMTDVLGI

SEQ ID NO: 6103 - protein, 297 aa, Methanobrevibacter ruminantium
MRFEGTAVAMVTPFHEDGSIDEEGYRQNINWLIDNDVDGLVAVGTTGESATLTHDEHRKVLDILIDEVDGRVTTIAGTGSNATSEALDLTKYADDAGADMALLITPYYNKPQQHGVIEHYTQIANSVDIDLIAYNVPSRTSLDMAPQTIVELAKVDNIAALKEASSDVDKASKTMKLLRDEGLEDEIVILSGSDELTLPLMSIGARGVISASANIDPRTMVQMVNNILDGNYDKAMELHYQQYDLIKALFIETSPAPAKEALNMMGMPAGPLRLPLVPMLEENKAILRKALEDAGIL

SEQ ID NO: 6104 - protein, 405 aa, Methanobrevibacter ruminantium
MGLIVAKFGGTSIGNGKRIRKAAQSVVNEYMDGKKVVVVVSAINKTTDELVAIADESIGKEVTEKQLAEILSLGERTSIRVFSSVLESLGVKSEYIDPSHELWPVITDDNYGKAQIDFERTEEQAQGLLSLLEQGIIPVVCGFLGRTENGEVTTLGRGGSDVTAFLLGHCLKADNVIIVTDVDGVMSTDPRKIDEAEKLDYISVEEMRDLATHGAQVLHPHALRFKDPEIKAKIISFEKGDLSDPGTEIVGPFEDSMGKKVCLHHEPISVVAVVGEDLLNQIGLLAKMTSLVADANINIYGISAGQNSITLFLDKEEADDAYHLLHDLVIAEDNLSSISLGRDIAMLTMINPDFIETPGVITEITNPLKENHINIVEISSSQTAIVLFINWEDGKAAYDLIKEVL

SEQ ID NO: 6105 - protein, 65 aa, Methanobrevibacter ruminantium
MGNIRTSFVKRISKELIETHKGKFTTDFEENKILVAEYSTVSTKHLRNKIAGYITRLVRQEANKA

SEQ ID NO: 6106 - protein, 107 aa, Methanobrevibacter ruminantium
MDEKELMSIYETEEEARNVLLKSRKRIDEIDNDLVNLISERTSLAKDIVSAKVFLGMEIYDKSREDEVHAKVSKLAQEKNIDDDILSDIMNMLTILSKNKQREFLEE

SEQ ID NO: 6107 - protein, 289 aa, Methanobrevibacter ruminantium
MHYINAKTILSSKNGMNLYRGCSHGCIYCDSRSKIYNMNHDFEDIEVKENGIRLLKNALKRKREKVMIGTGSMTDPYIPLESNLKFMRESLELIYKYGHGFTCITKSDLILRDLDLIKKINENTKAVVQMTLTTADDELCKILEPNVCTTKERVNVLKTLNENNIPTIVWLCPILPYINDTEENINQILDYCIDANVKGILCFGMGMTLREGNREYFYKKLDEHFPGLKERYRRTYRNSYGIKSPNNKKLMKIFLQRTDEHGIMNNIEDIFEYLHEFPSHESTKQTTLM

SEQ ID NO: 6108 - protein, 305 aa, Methanobrevibacter ruminantium
MIDLAKIVKSPGSATVINAISTGFGSAFGIDLNITCEAEFSSQGIDCSSDLGVDPNLMNICVKSVLSHYNIGKDLSQDDLLNDLDFGNGEGIKIRTKSNLPLGSGLSSSSALSNSVVMATAGLISDEFFLKPLSDFEMINLGIDASLEAGVTITGAFDDASASFFGGLTITDNMERKILHQEKLPEYDILVFMPDKESLSGSSDVNRMKLVGSYVKMAFEEAMNKRYLKALTLNGLLYGTALNFDNNIALDALSAGALASGLSGTGSSFVAIVEEDTIDDVKDAWASFDGNVIETKVNNEGTRFI

SEQ ID NO: 6109 - protein, 285 aa, Methanobrevibacter ruminantium
MSENNRTLITIGIGAFIIIAILLLIALVLPFSNLAVDNDEIAVITISDTITYGDNSTSAHTSKKEIESELNDAYSNPKIKGIVLDIDSGGGSLVASDEISDLIKKSPKPIVSYIGDKGFDEAYQIASATDYIFASSSSSLGGIGLSYINTDRYSDEKVTGVFNEKYLKNNKTKSNSKVKSANDLANAQKMVDQDYTLFIKKIAENRNLTADYVAELAHGKKYNGNEAKKLGLIDEIGSKSQSIEKAAKLSNATNYTVITYPEPQKKLTEILGENDIFNLKELIKI

SEQ ID NO: 6110 - protein, 83 aa, Methanobrevibacter ruminantium
MVYKVEVFTSPTCPHCPGAVRLVEKAKEELGDALDVTIYNTAEAEAMEIARKYHIMYVPTIIIDGEIKFQGAPSYDELMAELK

SEQ ID NO: 6111 - protein, 368 aa, Methanobrevibacter ruminantium
MKIAMVGQFPPHIGGVGVHIHSLAKQLIREGHEVYVITYPHKDIKDIDGIHVIGTKGINIPGLRGLMFGINAKKELKKLINEENIDIIHGHYLFPAGWASVKAGKSTNTKTYVTAHGSDIFEMYKKQKFMRPFIKKVLSDADIVLAVSNALKDEIIKIDVPGIKEKIKIHWNSVDIEKYKTTEENKDKFKKELVNEYNLDPNKPMILFVGNIIKRKNVNLLVEAKRLIKTDANLVIVGEGSELGKLKEKVKNDDKINDVYFTGARRDVEDIYPSCDLLVLPSFSESFGLVLIEALACGNAVIGSNIGGIKEIITEDVGLLINPNDSQDLANAIDKILQDEELLNKFKSNARNRAKDFSKTELPYDELK

SEQ ID NO: 6112 - protein, 156 aa, Methanobrevibacter ruminantium
MGEKEFTHLTESGVHMVEVGAKAQQRRTAIASGKIHLQKETIRMIENAEIKKGNVLTTAQIAGIQAVKKTSDLIPLCHPLNLSGIDIEFEVEEEEITAICECRLTGQTGVEMEAITGVSVALLTIWDMTKAVEKDENGQYPNTRISDIKVLKKEKI

SEQ ID NO: 6113 - protein, 690 aa, Methanobrevibacter ruminantium
MKNIPTNIKQIINDCYPYIKEFNPAQKAVIESGYLENDKNYIIAIPTASGKTVLGVMAALQSILSGGKAVYAAPLISIQNEKVKEFKKFEEHGISVGKHPSSSDLSIMVFESFDVLTRFSWDVLRDVDTIIIDEFHMIGEYSRGPTIECAITRAKIINPNLRIIALSATLENMSEIENWLDATVIEHDYRPVPLNKDVLDTEMFNTKNKNDVVVKVIEKAIEDDSQALSFVSTRRFTESLANYVAEKLKKKTTDEQKKRFKEVADKILEVPEKKGSRPTSTCLKLAESCENGAVFHHAGLFSEQKEIIEEEFRNGNILMIAATPSLMYGVNLPSKYVVIRDYTRWTSQGPQAIPVFDYEQMSGRAGRPQYDNAGYSYLIAKSMEEASTLEERYIYGDIEPTNSKLIENKDAVFRQIIAQVASTISKTPEDLEDFFKKTFYGYQMTNNSSMSFFAEESLKFEIQNALEFLLQNQILQATPSGLKTTALGNLIAKSNYTVETAVKVKEYANLVDQFSAEELIYHLAQTPDMPLISFKGRRSKDPVREKLANYGLFALEIANPEATAVSLIEWIDERNEYEIENAYNVYASSTRRAAYEASLLVRFTKNTLEVLGKYNYSKDLDFLSARLYYGVKEDIIPLVIGVKRLGRKRARALVNTFGEDLRPVSENELQKVDGIGPKLAKSIRNFADNY

SEQ ID NO: 6114 - protein, 100 aa, Methanobrevibacter ruminantium
MSFCDIRGETIDIGAFIRYTGTGTISKVVDLKEEDKQQWVKLDEPALWYAADSLEVVDEKDLINVETVDRDTLEKVKDIKEGYEELNANLNDIQGCEGGG

SEQ ID NO: 6115 - protein, 151 aa, Methanobrevibacter ruminantium
MKIKQLLGMLVLDDNANEIGKIIDADFEPETGAITKIVVSLKKNFLTSDQLDVEYNDVKSIGDYVLLKITIDKETKIKEAEEAKKAEKEAKKEAKKAEREAKKAAKEAEKEEAVAEQIEKQVEVVEAEIVDDAEEAEEAVEAEETTDVKVE

SEQ ID NO: 6116 - protein, 568 aa, Methanobrevibacter ruminantium
MDKACRIIIEDIMNGKITTRRELEVEKRQLCRDRKLKKFMSNSVILEHASLEEKKIVSNLLRKKPTRTISGVAIVAVMCHPHQCPHGRCFYCPESDIAPPSYTGEEPAALRGRMFKFHPYVQCYNRLKQLHKVGHPIDKVELIIMGGTFPSKDICYQEWFVSQCLKAMCDFGIILENISQIDDIESIKREGLLKYHPYSNNELKTYPPNDYVLIDDIQRINENSKVRCIGMTFETRPDYCKEPHVDRMLDMGVTRVELGVQTIYNHIYEKIKRGHKVEDVIEANRILRDSGVKVAMHMMPGLFPLARENPRIEQCPEQDLKMFKEIFNNENFKPDMLKIYPCLVTEGSELHKLYKEGKYRPYTDEEAVELIVQIKKILPKWVRTMRIQRDIPSTLIEAGVKKSNLGELVYNRLEEEKINCQCIRCREIGHKKTEQDYSIDDYRLFQEDYTAVGGKEHFLSIEDKNEESLAGFLRLRMPTEQAHREEIRDNTAIVRELHVYGNMIKIGHKGNAIGQHTGFGERLLKKAEEISIDQNKEELLIISGIGARNYYRKFGYERKGPYMAKKLI

SEQ ID NO: 6117 - protein, 240 aa, Methanobrevibacter ruminantium
MITAEELAQYIEFTNLDNTATEEQMKAFFDKAKEYNFYAVVVLPHYVKLAKEELKDTDMKVVTVVDFPLGAGTTESKVAEAKDAIKNGADEIDMMANIPAIKEHNFKAVKEDIIAVKEAVGDHILKVIIENALLTVDEKAGASAMCEAGGADFVKTSSGFNGNEHFYALMESLRIMKKNAPHKEIKAAGGINNYKLVNNVIAAGVTKIGTSSGHIIMDQFNHVMDNQKVSPEQKTGPRLI

SEQ ID NO: 6118 - protein, 66 aa, Methanobrevibacter ruminantium
MSELPIAPVGRILKNAGAQRISDDAKVALAEALEEKGDELAKKAVNFARHAGRKTVKAEDIKLAIK

SEQ ID NO: 6119 - protein, 428 aa, Methanobrevibacter ruminantium
MDNMKVFIETYGCTFNQADSEIMAGILNENNIGLVSTEEEADAIIVNTCYVKLPTESKVINRIKNLQKQYPDKKIIVGGCMVEVDPKKLEAIGPNCSWIGPHQLNKTADVVKSTIGGEIVREFGFSDEPKVCVPKIRKDPYIHVIQICEGCLGACTYCCTRFARGHLNSYPIKDIVEEARLAIEDGCVEIELTAQDTSAFGKDTGEKLSDLIKEVASLDGDFRVRVGMMHPRNIGNDLDNLIEAFKMEKVYDFIHLPIQSGSDKVLREMGRNHTVDDYKNIVYSFKQAIPDITIATDIIIGYPTETEEDFMKTAELIREIKFNLIHLSKYQHREGAISSSLDNIPFDDMKRRSKYLSEIKFEMLEEENKFLQDREMDALVVEKGSKGGFIAKTNSYIPVVVQDVNLGEFIKVHIDKTTGTYLIGHKID

SEQ ID NO: 6120 - protein, 210 aa, Methanobrevibacter ruminantium
MVCPVCGSDDAIVLKNKLIDAKSKEIRELLLKCGECGSVYKERLTQDKPKPFRLIISEHEDTHKVSIDLYPDEELRVGDFLMSELGEVKITSLELPDEKRVQKAIASEVKTIWASSEEIPARFGVSIDLHGKVASFKCETDRDFKIAVDDIIKIDKYVARVHVIKTEERKTTKGYAKARVIKRVYAKPVKFNHFDYDLSKFIVSFKPLNK

SEQ ID NO: 6121 - protein, 161 aa, Methanobrevibacter ruminantium
MAEIKGKVWNFGDNIDTDVIIPGRYLRTFNPNDLALHVLEGERPDFTKNVEKGDVILAGENFGCGSSREQAPVAIKAAGVDVIIAKSFARIFYRNAINIGLPVVVADIEADDGDIVSVDLENGIIINETKDTKVEFQAFKEFMVNILSDGGLVKHYLKTKE

SEQ ID NO: 6122 - protein, 326 aa, Methanobrevibacter ruminantium
MIIRAPSRLHMSLIDLNGSYKRIDGGIGLALKDPQFVLQSEETNEKGYTLEFADSISEDSREECIEKIPKAAEKIAELCDIESGFHFKVLEAYPPHSGLGSGTQISVCTAHLMTETVGQKYTSRELSTMVGRGGTSGIGTFAHDLGGFIVDGGHSLEEKPGFLPSSASKAKPATLIARYDFPEEWDILLALPEVKEHMHDQQEVNVFQTYCPIPKTEVEQVSHLILMNLLPFLLEKDIVNFGWAIKELQKVGFNKLEHSLDASFLPTMEAIDEAGAYGTGISSFGPTLYTVFDKNNKDIVKAAGEIVGEDRVKVVKAQNHGYVLEK

SEQ ID NO: 6123 - protein, 509 aa, Methanobrevibacter ruminantium
MFIKKTTSLCPHCLKPLEAEVYQEDGKVWIEKECPEHGVFKNTYWSDAELYDRVDQVDSITQDLENPMVNKVAKCPQNCGICSEHESYTVLGLIDVTNRCNLKCPICFANAATSKKLFEPTQEEIRQMLRNLRGEKPVPTPAIQYAGGEPTVRKDLPDLIRMAREEGFSHTQIATNGIRIAKKEGYAQELKDAGLNTVYLQFDGVTEEPYLVARNKNLLDVKLEAIEKCREVGLGVVIVPTVVKGVNDQQVGDIIRFAIQNIDIIHGVNFQPVSFSGRTPSDQVEEQRITIPDFLNLVEEQTDGQISKDDFYSATSVQPVSKFIGALRNEEPPVTLNCHQHCGSATYIFMDNDKIIPITRFMDIDKFLTFLNKYTEKLEDGGFAIKSRVLASAAKNLPKVLNEDEAPTGLDMKRILLDIFKTQSYDALGEFHINSLLISCMHFMDPFNFDTDRVKDCVIHYAVPDGRVIPFCTMNSIYRQGIEDEFSTPLNQKMTEFNDKTGEEEEDAD

SEQ ID NO: 6124 - protein, 100 aa, Methanobrevibacter ruminantium
MKLSEWIIINKIPNNKILTILEEYENIEAIEFNDPEDVKAEVEEHGLRYVAHKYGVNEKALKEYGWRFKKRDAKGKKREETPIIKTDEQKPLVDIFGDEE

SEQ ID NO: 6125 - protein, 191 aa, Methanobrevibacter ruminantium
MALELMNLLISILGAVYFMLPAYVANLSGLAFGGGTPIDGGANYRDGNRIIGNGVTWKGCINGTIIGTLVGVVLGIVGMYYGDLSTLTGGVIDLHVYGSLFSGLILGFLMAFGALFGDAVGSFIKRRMNLQSGQPAPIMDQLDFVLGALIFSLLVVRISWSFFIIICLLSILLHLSSNTIAYLLGIKDVWY

SEQ ID NO: 6126 - protein, 229 aa, Methanobrevibacter ruminantium
MGKIFKIVTIILIVIALAILGVFIYSDGHSEKIGENNLGVVYKVTYGHSNDPNVTIGIVSGMHSREKLHQYVLPYVSKAFAFLHPDVKIVNYIVNVTKDPEDFTKGRANGESLVHDYVVKDVKKEDFDVVIIGHDHEPGYGEAYYIATPVMDNASVKLAKKVTKDIGFNHYTRNKSQPTTSTSILKVDKPIVDAGTRVFVYEIPEVDGKVNAFYKSYQLVNATYNRLKK

SEQ ID NO: 6127 - protein, 340 aa, Methanobrevibacter ruminantium
MKVAGFDIGGANTDLAIIDFENDEIKEIKTDFEYLPMWSDNNRLGNVLIDLIEKICPLEEIDAVGISMTAELVDAFETKTEGVLDIATTCEKLFECPVAYIGVDKVLSLAELVQNPIEVAAANWIATSQIIAEIEKDCIFVDTGSTTTDIIPIKDGRECAKGRTDFERSATGELVYTGTLRTNLTSFVDSVPLNGNQYRVASELFASTADVYNVLGLISEDDFTCATCDGAGKSKEDSARRISRILCADLDILSKEDILEIADYIHKEQVKQIASGLKDVSDREGLTKVVVTGLGKDILCAEAARLLGLEVKSMGDYYTDDECTVAPAIGTAIMMKNYLK

SEQ ID NO: 6128 - protein, 388 aa, Methanobrevibacter ruminantium
MDLKDVTDDSILVFELFTASGIEDLSIVSEAVELIRSLVNDLKDEDTYVLIAEPFKNIFDDFDFDVKTITIDNLEEWLEENAYIFDRAMFIAAENDMNLYNLTKLLENKAVKVYGSDSYAVKLCSDKYETFDYLINRVNQPMTYNILLNKKTYWKRAIQIFFDKINGDYGDGSDNGAVPIMQKPKDIPVLDNSDRDEVKKYKLIAKPRFGVDCESLKIISSKRDIDELEEIYPEGSRFIVQEFIPGDVCSVTLISDGKNAIPISLNKQIVEIDENGGKYLGGYVPYEHEMKEKAFEVAKKACESIPGIKGCVGVDLIIADDVYLIEINSRFTTSYVGLSKVANINIGKTIVDLIDKKISIEELGEIEYKDKVSFYKDENGILDIKIGE

SEQ ID NO: 6129 - protein, 442 aa, Methanobrevibacter ruminantium
MKIAIVLGTRPEIIKMASVMDEIENRGHELLLIHTGQHYDKEMSENFFIDLKLPTPNYNIHVGSGSHGAQTGKMMEGIEEVLLDEKPDILLVQGDTNAVLAGALVASKLHIPVGHVEAGLRSFDETMPEEINRLAADICSKLYFVPTEESAINLAMEGISRKRIFITGNTVVDACFRNLEISKSRDKDQYDEGLQELDIDNMDNILTLTMHRAETVDDKERLTNIIEALEELSDMNIIFPIHPRTKKTMENFNLFDRLNDLPHVHIIKPVGYLDFLLLISKSTIILTDSGGLQEEAITLDVPALTLRYNTERPETVTAGGNILVGSDKEVILENARKILDDEDFANRMKSAKNPYGMGNAAELMIKIIEESDKNDTLKMVAPDEVMASFTRHMKAVDEDITVVDFEEKNNSLIKIAFQGEDIKYPYDELNLNGLTIIYEDYS

SEQ ID NO: 6130 - protein, 213 aa, Methanobrevibacter ruminantium
MFEFTKNELRDLVIAFIVLSIAFAIANVKFDLHAFISILPIVMFGVGVGFLLHELGHKYVANKYGYKAEFKLWPIGLLIALITSLIGWVFALPGEAKITAENIDEETTGKIAIAGPMANIGLGLLFIVIAAITYPLKSSFTLFELIYLVSTVGFSVNAFLATFNILPFYTLDGTKVMKWSVKAFIVAFAIAAIMMLSSMFIGAENMILMLIGS

SEQ ID NO: 6131 - protein, 225 aa, Methanobrevibacter ruminantium
MNQELIINNKEYRKTEPLESLNMFKGQLYETIVTTQSNEHIKNAAPIGVICKDSNHIVIHLDNCVHTHRNIIENGELIVNITKDPLIFTYSTIGELDDEYFDEFNGFPLIKDSLGFFKAHVIKKINKKRENDFNDGIGHVVTCEVEDIFIREYNEIVPLNRAMNAVIESLVYYCRFDAKYKHMQKEIWTHMKELNRVAQKVGNEKEKKSMKAILDKMRENHDYLD

SEQ ID NO: 6132 - protein, 154 aa, Methanobrevibacter ruminantium
MEDVSEFKGINGQLVSFKNEVEGADKITFIGSPGVCTPFAELLSYAVRNKENHFIPLLDIDDAHQFEFKPYGMVLKDEVSNPRDADVVVLLGGLTMPKYEVAFDDLNALIGDVLKEDGKIVGVCFMDMFAKAGWLDKVDFDSVIDASILGVVKK

SEQ ID NO: 6133 - protein, 268 aa, Methanobrevibacter ruminantium
MADKDKIFEDNAYDDSEYIYNDTYEGSRNDYDVEYDESEDYEYEEPLISLFDIVKEYDKGKVIALNKVNLDIYEGEFVSIIGPSGSGKSTLLNMLGALDVPTSGEIFIDGLNIGKEKDLSDFRRETIGFVFQLHNLIPNLSVWDNVQIPLVGTGLPEKEMKKRANEMIDAVGLSDKKKQKPNKLSGGERQRVAIARALVNKPSIILADEPTGSLDTKTGSMVLNLLRAMHDVYNVTLIVVTHDMEVARMADRMITIKDGQIVKDVDNF

SEQ ID NO: 6134 - protein, 378 aa, Methanobrevibacter ruminantium
MRFISLIIKNPFRNKTRSFLSIVGIAIGIATIVALGLITTGMEQSVQTTMNEGAAEITVTNITSIGAGTIDSSLVDELKNITNVSRTAGILSATDQNFVDMASSNDMSSMESSTRLYGINRADLDLEGIKDINGSFFEEGTKQAIIGKQYAQMNNMSIGDNISALGEEFEIVGVFETGGVLADSGVYVSLETLDEVTGAEGKVNQVIVKTDEGVNDTVVADAIEDKYENLTTITSEEMSQMLDNVIGILDAVSVAVSALAIIVGAIGIVNTMVMSVYERTKEIGVLKSVGWKSRKILKMIIGETLVLTILSGIVGSAFGILIAEVGVRLMGDTDFALGYSPSTFIMAFGITIVVGLIGGIYPAYKASKLAPTEALRYE

SEQ ID NO: 6135 - protein, 290 aa, Methanobrevibacter ruminantium
MKRTALKIAYIGTHFHGFQRQPDVRTVEEELIYHLRKLEYIDDLKASRFRIAGRTDAGVHSLGNVISFQSEKEVRVNQINNSLPDDIQIIAWAPVRFGFKPRFAKRRWYRYILFEEDLDIDLLRKTAEVFKGTHDFTNFTKRKQKTTVRTIEDIRITKPIIDEEDKNKKSDFAHLNKSYSPIFVDIYGESFLWNMVRKMMRIFLDVNYGKLTLDDVERLLNPEEGEPRAYIKVVDAENLILMDIEYEGIRFRYDDYACERFRRYLIDNLFELQKTYSITESMLNCLDDLI

SEQ ID NO: 6136 - protein, 298 aa, Methanobrevibacter ruminantium
MRKEKESKESISIYDNYKIDMELKHTDKQYYFIFYKRRLFLINNKIPLVKDLISLNINDSDVKNSIYIGQFHSKDCFAVELDEEFDCEHYIKANDDSQFIELYFVFDIDEETYLVAGRAIQIIDWENTHQYCGRCGAKTVTSDIEMAKVCPECGFTSFTRICPAIITSIIKKDESELDQEGRPINKVLMARHSYHTAPRYALIAGFLEAGESVEEAVKREVMEEVGIEVKDIEYFGSQSWPFPNSLMIGCICKYKSGEIKVDENEILKAKWFKKEDIERPASEISIFSKLLKNFIENY

SEQ ID NO: 6137 - protein, 204 aa, Methanobrevibacter ruminantium
MELIAKNISFKYPSAKDYLLKDVSIELDNKKIVGLIGDSGSGKSTLCKILSGYITKYEGEVTFDGQPFHKKGFKPVQLIYQHPEKVMNPKWKMDQVLSESWDVDDATLSEFGIQKSWLTRFPQELSGGELQRFSVVRSLNPNTKFLIADEMTTMLDAITQAQIIDSVLKIVKERKMGFLLVSHDMDLVETVCDEKIYFKDLNKA

SEQ ID NO: 6138 - protein, 446 aa, Methanobrevibacter ruminantium
MDKLLDVENVSISFIQYTKGLNQRDLKVITDLTLDISEGEILAVLGSSGSGKSLLAHAIFGILPENARLNGKIKFKGKELSQADKEEIRGKGIVLVPQSVNFLDPLMKISDIAIGHCDSEEEKKEKKIKQREIFEHYNLGPEVDEMYPFQLSGGMARRVLVSTALLADPDLVVADEPTPGLDEKTVEETLNHFKHMKDDGIGVLLITHDIHAALEVADRIGIFYSGYVIEIALKEDFSGDGENLLHPYTKALYKALPANGFEVIKGHQPLHGEIVKGCPYYDRCDWRFDRCKEERPELMDIGLKKIRCFKYDGVTEDMIKDGAIEETAEANIEDAANEVVEKAAELVDESNIEESAEAVEGAEEAVSETEDAIEEEVAEAVEGAEEAVEGAEEAVEVPEEAVEEGTEEAVEESSEEAVEESSEEAVEESSEETVEESSEEAVEEGA

SEQ ID NO: 6139 - protein, 168 aa, Methanobrevibacter ruminantium
MDIKIKEIENDESQIKSVQEFLYAQIKIEYGIGPMPEFHYDIDGLKDYYILPKRNAFFAAYDGDKIVATAGVRAYDKDYEFFKGQYNEENTASIWRLMVDEQYRRNGLARILVKKIEEFAKEEGYKEIYLNTHRYLEAALPFWNSLGYTVTIEEDDYDETNHMIKVLV

SEQ ID NO: 6140 - protein, 284 aa, Methanobrevibacter ruminantium
MIKKKTNDKEQWFIYRANLRTKTLVIIGLAALIIISIFVCGYFIRDIPTNFASANQMPSLEHLFGTDWMGRDMFQRTIAGLGLSIMVGFIASVLSTIISIVLGLFSSFNKFADEAVAGIIDLFGSIPHILLIIIVSIMFGGGVWGVIMGVGLTHWTPLARVLRSEVKEIKTKEYIALSENLGRNKVWIAIKHIFPLIISQIIVGVILMFPHAIMHEAAITFLGFGLPPHEPAIGVILAESMHYLSAGYWWLAFYPGLSLLIVVLLFDLIGENVEKLLNPETAQS

SEQ ID NO: 6141 - protein, 329 aa, Methanobrevibacter ruminantium
MNKQKIAKYFGWKLVRFVVLMIAVAIFSFVLLDLSPIDPVNAYLKGAAVTEAQRAILQQYFGTNVPLPEKIFHWLMDLLQGNLGTSLIYRRPVMDVIIDKFMASLALMTISWILSGIIGFALGVVAGKNKGSWIDKAVKVYCYAIQSAPSFWVGMLISMVFSVYLGWFPIGFGVPIGVRSTDATFIEWATRLVLPTLTLSLVGLAPIAMYTRNELVQVLSSDYVLFAKSRGEKGWALIKDHGLRNIMLPAITLQFLSFSELFGGAVMVEQVFSYPGIGQTAVAAGLQNDVPLFLGIVVISAIFVFVGNLLADISYYFIDPRIKENEFND

SEQ ID NO: 6142 - protein, 539 aa, Methanobrevibacter ruminantium
MDKKTIIIAAVAILVIAGIAVFAFGGGGSSDSDPTHLTVATHSNMAEPEAGFNPLTGWGCGHMNYNPLVQSCLFKTDKNGDIVPDLATNYSISADGLKWTVKVRDDVKFSDNSTFDAKDVAFTFNTAKDTETDLDLTNLKKVTAKDDKTVVFELEEPRSTFIYDLRYVGIVPEEYDNATYGEHPIGTGPYVLDHWDKGQQAIFKANDNWYGDKPYFTQITMLFPEEATWLELAKSGQVDIAPVATSALNESVDGYNFVEKSAGRAQGISLPYLEDTGKTSPAGAKIGNNVTADKSIREALNIGVNRDKICEEVFSGHASPEYTSVDTRSFANPNAKVKDGDVAKAKQILKEGGWEDTDGDGIVEKDGVKASFDLYYPPDYLDRQSLATVFAEQAKDLGIQVNLQGADWDTIYANMYSSASVMQQTSPDPYKSIYQQYHSKEADDFYMNPNLYNNTASDMLMEQAMHSNDFKLADSLWAQSALVNGGGWGPAGDAPWVWLANYNYNYFVKEDIDMGDQPDGLGNDFLINVVDWTRTNSTA

SEQ ID NO: 6143 - protein, 230 aa, Methanobrevibacter ruminantium
MSLSIELEKYLKGNGAIEVGYADITNFTPKKGLNTGVVFFITYPKEVIRNMANAPTLEYLYELIDLNTRLDALGMICEEFLINKGYKAYAQTKKRLGGNFGEFNSFELPHKTIATRAGMGWIGKSALFTTFKYGSALRLCSVLTDAPLEIGEPIIKSRCGKCMICKEACPGGAISGRNWDYTLKRNDFYDDKKCEKYALIVSEENLGKPDTVCGKCIYACPHTQKYVKRT

SEQ ID NO: 6144 - protein, 186 aa, Methanobrevibacter ruminantium
MNVNIKELGNDPEEIKNVQNFLFHMIKLEFGYDYVPEWHQDIVNMEDYYINPERNAFFVAYSESGEIIATIGLRAYDKNFEKFEGIYSNDTTSSIWRLFVDRRYRRCGLASKMFSVAENFAKDRDYKNIYLHTHRTLEGALQFWMKMGFIITLDEGDELETVHMEKFIQKLKISPQAGILTYAIKL

SEQ ID NO: 6145 - protein, 241 aa, Methanobrevibacter ruminantium
MLTFIQMEFLKLKRSKIFLLSVLMAVLPALLMYIATFAFDEVQAFDALFTNVNMYMSVLFAVLIFAIIMAYLFGREYNEHTLKMMLTIPISRGKFLMSKYLMFLIWILILTVITSLSTMIFGFAAGLSGFTVNLLINSFAQLLFANLLLFLTFSPFVFISLFVTNMVPAMVGGASLTLVNMLVYGQTWAPYVPWVCPYLIASGEIAEYGINMLLPYGLVFATFIVGIVISYLYFTKKDVPL

SEQ ID NO: 6146 - protein, 355 aa, Methanobrevibacter ruminantium
MSQLINYYFIIKGDFVTDYVIETTNLSKKYSKKYVVDSIDMHVERGKIYGLLGKNGAGKTTTMCMLLNLVAPSDGDILLFGMNPKEHSKEVYSNIGSIIETPGFYENLTAYENLEIVSKLRGKYNPLIIKMVLEMVNLDHEKTKKFKDYSLGMKQRLGIAAAIMHNPELLILDEPINGLDPFGIKEIRDLLKRLSREYGVTILISSHILSEIENIADVIGFMDEGCLIDEITKEELHTRLNKFVEFEVSDIDLAVDLLKDTGFEENGDFTFARNIGNYIEDMNSLKSFESDGYVNSEDGFESSENAIGGTIHLLTNLDLRDQFNKLFVSSGIDVRKVNLCEENLEEFFTRIVSSA

SEQ ID NO: 6147 - protein, 251 aa, Methanobrevibacter ruminantium
MKNEKTENENNKNTSSPLVKYLFQTRFFLFGLTKKSKTIKKIFNKVFFEDNELFILPNKSTVNKSNTKITANIEIKESFQKDDSEFLPSEILKEIIKEANNIFIMNKCICRSSSNCKDYPHDFGCIFLGPASKKISSKYGKAATVEEALEHVDMADKLGLSHLIGRNKFDSLLMNVGPKEELLTICHCCPCCCLWKIIPDLDDEISNKIKRLEDVEVNALDDKCKMCKKCLEENVCISNAISLEDDKITID

SEQ ID NO: 6148 - protein, 39 aa, Methanobrevibacter ruminantium
MGCGHCVQACKFDAIRLNYSRKSVDSVINRIEELVDYKN

SEQ ID NO: 6149 - protein, 246 aa, Methanobrevibacter ruminantium
MSFQDNKMLIMPAVDIRGGKCVQLVQGKPGSEQVVIENPEKVAKKWEDAGAEVVHVIDLDGALESVTNIETIKKILNEVSVPIQLGGGIRSIEYAEELLNLDIDRLIIGTMGIKNPEIISKLSNEYGSERVMISLDSKDNKVVIKGWQEKIDKSASEISKEFQELGAGSILFTNVDVEGLLGGFYVDPVIDLVDSVDIPVVYSGGVTSLDDLKQLQTTGAKGVVIGSALYKDKIKLEDALKYQNIE

SEQ ID NO: 6150 - protein, 150 aa, Methanobrevibacter ruminantium
MKVMATGAFDILHPGHGLYLEKAKELGGEDAVLAVVIARDSTVKKKKRIPVIDENQRLEMIKYLKPVDEAYIGHDGDMFEIVEEIKPDIIAIGFDQGHDVNKLQEELDKRGIKAKAMRVEAHRIADLDSTCKIIKKIRNSDFEEDYVNCD

SEQ ID NO: 6151 - protein, 338 aa, Methanobrevibacter ruminantium
MVSIAIVGGSGYTGGELIRILSAHPEAEIVDITSRQFEGTPVHKVHPHIRGTDLVFRNKKPSELDADIIFTATPHGASMKIVPDLIETGAKVIDLSGDYRFNDIDVYEKWYGIEHTSDLKGVFGLPEIHREEIKKTTLLANPGCFVTGAILSGYPLSKAKLAERMIFDSKTGVSGAGVNPTTSTHYPNIGDNVNPYKVTSHRHMPEIQQELGAFSDVKISFTPHLVPVIRGILTTNHCFLVDGADITSEEVLDIYKETYKGEPFIQILEDGEIPRLSSVRGSNYAQIGCFEIDETGRLVIISAIDNLVKGASGQAVHNMNIMCGFDEKTGLDFFGMHP

SEQ ID NO: 6152 - protein, 162 aa, Methanobrevibacter ruminantium
MNRIILYYSEGGTTQQVAETLAINLRCDICRIRDLKSRDGYKNRLFSTFDAFRESKTEIYPPRLDLSEYDTIYIGTPIWANNPTPAIITLIDRYNFLGKDVVLFTTSTNSEGENTFNKMDMKLRARGARVVQEFNIKTKDKSLEMISEDTEKAIKNLDLELY

SEQ ID NO: 6153 - protein, 385 aa, Methanobrevibacter ruminantium
MFDKIMENHKALIAIPIILALLSLALISFNGIEQGVELKGGSLAELQLTGSTSVNDLESQLTKELNTNNIKVTSNGENKVTVELENNVNSSTFSKAIDGKAKVISYNEIGPVLSEEAMGQIYIAMLFAFLFMAVTVFIVFREPVPSVAIILAALCDILIALGGMSILHIPLSIASVGALLMLIGYSVDTDILLTTRLLKRREGTVDERARNAMHTGLTMSCAAIAAMGILYIVTVIIMPEATTLSNISAVLVIGLIGDILSTWLMNLGILKTYIDWRQSKKQDKFNIDAPKSNESKSKSKEEDGKSESKSFKDRFKRSKDDDSKDSESEDSSKDSESKDSSNDIDSSEEEKSSGKDKKSSKKTKSNKKGNKRKTKKSKKKGKGGK

SEQ ID NO: 6154 - protein, 407 aa, Methanobrevibacter ruminantium
MASNLSKFFKDRQVIILIICLIISIISISFLGVEQGLDLKGGSSIQLQLEHPVNDSTMKVVTSVLDKRLNLYGVTDVKVRSSGDQMVIVEMAGKSPEEVERLIGNPGIFEAKIDNKTVLVGSDVATVDAPVVGESGEWQVPFTLTTEGAKKFAELAKGKGGHEVVMYLDGKQIDDHPPALAEELASGEAVTEVQVTGGAEDVETAKAESNEVFTVLKTGSLPVKIHTVGSNTVSPELGQQFAQGALIAGLLAILGISAVVYIRYRRAFLAIPILITTLSEIIIILGVASIIHWNIDLAAIAGLIASVGTGVDDQIIITDEVLHHDDENTRHRRTRTQMNVKNALFIIFASAGTLIAAMLPLAYVGFARGSSGIGTIAGFAFTTIIGVLIGVFITRPAYAKFIELFVS

SEQ ID NO: 6155 - protein, 413 aa, Methanobrevibacter ruminantium
MVIVVGTGAGGAIIAMKLAKANIPVTIIERGPYIASKDAYETYDMKYYDKRFESEQSLDLLKTTCVGGSTIVAAGNGVRVLEEEFKDLGIDLSKEYETIEELIGVHQMDDDHIGEGTRLFLESAKECGFDAIKMPKFIRDEDCKPCGKCSFGCPRDAKWSGKDFIDIAIENGAELIENAEVTKILTAHKSASGVEYIQDGQVKTIESDLVILAAGAIDTAVILQKTGIDAGNKLFFDPFISVGGVLKDIKYNTEVQMNGLAIGNEYILAPHFSSFISKYIKETYPEVEDKDILSIMVKVQDDMVGSVDIDGNVKKFNTIGDIRRLGQGAAAAGSILQKAGVDATTMTSTVFRGAHPGGTAAIGEVVDKNLKTEIDGLYLGDASVIPISPGKPPILLILALAERLANHLIEEVI

SEQ ID NO: 6156 - protein, 142 aa, Methanobrevibacter ruminantium
MWEMVWPILLVILSNTIYNICTKSTPGNVNAFGTLMITYITAAILTAIIFVFLVKPENVMVELSHVNWTSVVLGIAIVGLELAYIFAFRAGWKVSSASIVANIGLAIVLVFVGAILYGENITLKQLGGIFICAVGLFLINMG

SEQ ID NO: 6157 - protein, 153 aa, Methanobrevibacter ruminantium
MTKVELKVKPIENGTVIDHIPANKALQVLKILGLPKKGTNVTLAMNVHSRLGYKDIVKFENRELAHTEIDKISLIAPDATINIIRDYEIVSKNKVRKVNELNGIIKCTNPKCISNTEEPLETKFYLVDSNPITVRCHYCERLVQYDEIYNQFE

SEQ ID NO: 6158 - protein, 2255 aa, Methanobrevibacter ruminantium
MKLNKFFIISIILIIFLSISAISAENTDNALSTDTHSNDNVLSTDSRSNENALTNENTLLTDTHSNENALTTDPLTKENTHSYKDSEKSLSSDAFNKTIYVNKTGSDEGDGSEANPYATLKKSISQLDDSDNAVIYIGPGNYTGENNSALEINLDHKDHDGSLSIIGDSNGGTVFDGENLNPIIISISEDSIVTLINITFTHGKNNMGSAIRSSGNLTIDNCIFTENYATNLAALYVDKHSPLTVMNSKFLENRAKQCADIYFSQNSEIILLNNLFEGSTAEYSYAYSPSVSLQTGKSLVKGNTFKNLTGAYYKGALYIAYNNGINIANITDNTFINCNYTGTDGAILFFQNAYLKNNKFIDCHSSTAFLYSNTEFNAYLSFEDAEIDGTTFFLKANVTDDMGNKVKNAKVIFYLNGENVGSASSDNNGVAMISIKKLLENGEYVISGTQSYSEINPFGVNVKNATARVNYDHSSLEVWVSTDGDDGSGNGSEDNPFKTLRKALDYGTASAVNLTVHVKNGIYNGDDNRDLSYSTLGKITIVGESYSNVVIDGENITKSIFAFSSTLDVTLINLTLINCPSTLINAYTLSMMDNIVINSGTIRAQTGNNGVTIDNLRVINGTDQAITGYNLRLTNSRFENCDGLTHTGLIWLSTNNNKVTYLENNTFFNNTIAGSAGGGAAYYIQSDLISINNTFDSNWITESRGENVAYAGGRHIISINDKFINNEVPKYVAQYRSIGNEECEIIVENITFINNKASGNGAGLATTGAIVKGGKFINNSASGNGGAIYLLNHDNTSSYCQMSLEDVIFENNSATCGKDIFIEGSSGNNIFTYLNNLTIVANDLNVTSLSDNLTVSVFHPSGAIIGGGEISFYLDGEYIGKSTLVNQNASLEYVGFKNNTIYEFTSIYEYASLNDTYIDGIVSTKIPYALENIELYVSDGSGDDENGNGSISNPFKSISKALSEGYQKSTNITVHILEGTYTGSLNSNLRIPTTVNILLIGEGAAKTIISDSSSDYFITALKGKCELRISQMTLNRAARDTQSAIYIEEESNVAIDNVTFIGGQGNYGGAINTAGNLSIRNSYFHDNGYADRTLRANAYYGGAICNDGTLIIDNTIFESDHAGRLSEIANQGTLYMNNSKVIDSINAYSINMDLVAIGAYGGQKGEITIENSQFIVSSKTINELNDRIYDPTRALTCLGIGSCQHAILINSTFIGEGAVFSPYVFGGINSNNLASGGCTMIPGDLEVYNSTFRNVQAVNIIYSRTDNVRYHSQRVFEGCLFDNVEYIIAVLNTGNFSVEMHDCVILSDDLAKIGFGSEKTMKMDISNNWWSSNDGSYDNATLGTTNYISNCVVKLKEISSETVHPESYLILTLNSSNRTGLLQDAILAFKAYDGENISDYDGALYPRNFEMSAINATLDDLEGTIINKAINPFEGVENSGYYIEAIVDNQKVNLTVHDSLSIGNAYILAENISINYNETQINVTVLEENGKRADGGNVSLKLHDKTYISEIINGTAIFDIDVLPKGDYLLNYSLNRPKVYHSISNSSNLTVIPFKINAYANASNIKVGEDAIVIAYLDKDAGGNVTLGEEIQKVNDGTATFIISNLAKGDYTYQLSYSGDEKYDNETFHVSFSVNLKDASISVENDTLDLFVGSNETIVATISPIGLAVNYSCSNESVAMVDENGVVSAVGAGMAVITLTVGDDVTYSKNSSSVTVIVSKIPTIIEIVNDTISLEVTDSLDSIASLNPEEGGNLNYAISDDLIAKIDNGQITALSEGSAIITVSFDGNDKYTKAQNKSIKIIVNLKEASVSAFSNIDLLVGENDTLSPKTSPEGLDVRYESNDTSVVLVDNGQAIAVGEGNATITLTVGGDGVYAENTTTVKVSVSRIATMIEIEKDTIELKVNEESPIGAILEPDVGNLTYSISDESIAKVENGKIIALAEGNASLSISFAGDERYIGTNASVEIRVNKINTILTETDITTTYKEEGYLIATLKDSQNNPISGAVLTVDLDGIKNYTTDSNGQIKIATNNLIPDTYTARISFAGNENYSSSNGNASVTVKRIGTKLNFNDMNTTAFDSNIEGRIGEYFYFQLVDCDGNPLANKKVIIGFNGVKYNRQTNETGWAKIQINLKYANSYTFAIAFLGDDNYSGSFNFAVIRVSQQTPKLTASSKTYKSSAKTKTLTATLKSSSGKAIAGKKISFRLNGKVYTANTNSLGVATVKVSLNKKGTYSFTAQFSGDSTYKKVTKTAKLTIK

SEQ ID NO: 6159 - protein, 456 aa, Methanobrevibacter ruminantium
MEEHIDLFKSILNKIEDKVDYADIRAGTGNNTSITMKDNQIQDINTGLSTVARIRVLNNGAWGFATTNDFSKLEEISEKAIKISNSLKGDITLAECDIIEDAVAIEQKIKLSDVSIEEKKEIIQDANKASNVGNVISTTVRYGDAESKTAFLSSEGSCILTDNARVSLSLNAVASNGELIQFHHDSLGGVKGFEVLKNADIESFGRKVGEKATELLDAKPAPSGRFTIIADNSLTGVFIHEAVGHAVEADLVLQDDSILHDQMNKKIGSDIVNIYDDSSNKDGFGYYPYDVEGVKTRKNQIVKDGDLISYLSSRESAGKLDIPLTGNARSSISDQPIVRMSNTYLQPGDLSFDELIEDIKDGIYLKGSRGGQVDTGKGIFQFNASEAYKIENGELKDHFRDVSLSGNILETLKCVDAIGSDFKLSVGFCGKGGQTAPVGDGGPHTRILNAMVGGSS

SEQ ID NO: 6160 - protein, 185 aa, Methanobrevibacter ruminantium
MLSEDDGKYLLELAKDAIETYVKEHDKIDVPSDCPEHLREKLGVFVTLNKNNNLRGCIGYPEPIFPLVEATIESAISAAVRDPRFPEVGESELDSLEYEITVLTKPELIEVDKPIDYLDNIIIGEDGLIVEKGFYRGLLLPQVAPEHNMDKEEFLSHTCLKAGLRPDTWLNKDTKVFKFQGQIFK

SEQ ID NO: 6161 - protein, 351 aa, Methanobrevibacter ruminantium
MMLPTIPTPDELLDKGFRRGKKAADLRRGEKMPKRLKGKRIEETRVITACQVIKDRLKMILDRTPEIEELPEFYQDYIDITVGVDDFKQALGAVNWAYGIITQLEKEYGAKIRKAPSERATGLRKQAYGRISSVVHKIEKDLDFLDFAKQSLRNMPTVDFDAISIVIAGFPNVGKSTLLTHITDAEPQVANYPFTTKGIQIGHFEKRWQHYQIIDTPGLLDRPIGDMNDIELNAMVALEHLADAILFIFDASETCGYALENQYNLLEEIKNVFDAPIIYLFNKMDISDYDGARHDYVQEYIDKTENPLLISAAEGEGLEEIIQLIQQVEKREIAEEDEDEYEDDENYFDLT

SEQ ID NO: 6162 - protein, 197 aa, Methanobrevibacter ruminantium
MAEDMSENIETKSDFKDKAEEFKAKAEARTEANKEKWDETYNKGKDVAGKVGENLSKTIDDTIIAMKAMQKNFDDKYQSYKETSATNKISVDLAETKDFYYLQAYLAGVAKEDISIEATDSSISINAELKNILCSIEEDEENPANLIITGVKTGVAERTIKLGAEIVKEEISAKQDNGILFITIPKKEIPTTKIDIE

SEQ ID NO: 6163 - protein, 67 aa, Methanobrevibacter ruminantium
MAIPKAPVNRIIKDAGAERVSAEAVDALVAYLEEDAAAISKKAIEYAKIAKRQTVKADDIALAIKNE

SEQ ID NO: 6164 - protein, 223 aa, Methanobrevibacter ruminantium
MEFYIINGGPRKKYNTAELLKKASEGIKDELKDIDEDVNIHQIHLYDLNFKGCKSCFHCKRIGGKYYAQCPIKDDLLELLPKVQNSDGIIFGSPIYFGEITGELRSFLERFLFSILVYGGESNAPKRMPMAMIYTMNVTEEGFNLFYGDKFDILENAMANLISKPYSLKVYDTFQFSDYSKYENYAFDPELKAKRKEEHFPIDLDNAYNLGKKIAQDSLKLNE

SEQ ID NO: 6165 - protein, 336 aa, Methanobrevibacter ruminantium
MRYKMYDEMMEQPEALRRTFASESENMANISKIAGSVETIYLIGCGSSISTCYSVRDALASVSDLRIEVFTGYEFVYNKKLNDGENSLFIATSQSGETADTLTALKRANEFNIDTVSISNEPESSMIKEAKYPIVTLGNTETAILGTKTYITQLACLYQILFPASGYEKTDEIMEQLANMPDLVQELLESTEEDNKNLAEELKDEEGFYCLGSGVNYGLAYKLAMTMLMEGAIKHACPLYSAEYRHGLIERAEEGVPLIFLDADLESDELTKRAIANARDELKANCIIYNLRDYADINPLLAPFVFVVPLEWFVYYLAHFNGEDPGSTRHIGKVRY

SEQ ID NO: 6166 - protein, 181 aa, Methanobrevibacter ruminantium
MNVDLSKASMNVGQQYEAILTTINNEGKTNAAPFGVRIIEEDKVMLKIFEGGNTIKNIKDNGEFIVNITNDPIMFSYATTTSIPDEYLSRINYDDHEFAHISNADAYFICKVYSIKEGMRKDNIKDSEANVIKADVLELKINSPCVRPMNRGIHALMESLVNYSRINIVDKDTQDFFYRKI

SEQ ID NO: 6167 - protein, 456 aa, Methanobrevibacter ruminantium
MQEANEDIDLIVNHPKQAINKLALPIIFSNFFMVLNNIIDGIWVAGLGSNSLAAVGFVTPLFFAMVGFANGLGAGANSLISRCIGAENYQGAGNSAIHSMMLSIIVTIFATIVLLVFLNPLLMLMGAGEIIEETSNYGYIILVGAYSIFLPAMMAAIFRSEGEINRASYPLMLNAIINMILDPIFIYVLGWGVKGAAFATVLAGTFATLPMVYWMFIKQDSFLKIKLSEYKTNLKIYKDILVVGIPASIEQFIISFVSILMNYWLTLLAGTLAVAAYTATWRLVSIGVSPIIGIGVAALTVGGAAYGAKNLKNFKTALNYSAILGIISSIIICSIFFVFAEQLSFIFSYSADSAILAPRVVDALRILCFFILLMPLGVISGNLFQAMGKGTISLVLTILRSFILEVIFAGIFAFVFDWADIGIYTGLVCGMMCGSIVSYLYINYYLKKHEDYFIVK

SEQ ID NO: 6168 - protein, 624 aa, Methanobrevibacter ruminantium
MDEKTIDYEGNIITVSAEGLDEDIEIGDITITDAEPPEGDLVITARILEVEIKEVYPAEIVIENGLFKDAIPIITDDDSLLDLDYDGVLIPGFIDSHCHIESSKLSPSNFAKVALTHGTTSVVADPHEIANVLGIDGVRFMIEDGNKVPFDFYYGAPSCVPATPFESSGAIIDSKDVAELLSHDEIVALGEMMNFPGVLAEDEEVIAKIKAAHDFGKPIDGHAPLLSGDDLKKYISYGISTDHECSNFAEAAEKKRAGMKIMVREGSSAKDMDNLFDADERFNYIIEEEMRGNIIADSTDEAMAVPPFDFLVCDDVDARDLSKGHLNKLVKKAISMGINPKEAIAMATFNPAEHYGLNCGSIDPGKIANFVLVDDLKNLNISKVWVHGELVVDDGEVLFDVEAPEIINNFDLDEVKPSDFDATMEMGYVSSLMDETTNVFVIEAYDGELITGKLEESLLIKNKVIQPDIDKDIIKIAVINRYGGNNITNGFIKGFNIKKGAIATTVSHDSHNIVAIGTNSEEMADAVNLIRQHQGGLAVVCKEDGIQDILDLPIAGLMSDKDAEYVASKLVELFNLVRGLGCTLTSPFMTLSFMALLVIPAFKISDLGLFDFEKFDFIDLIHNI

SEQ ID NO: 6169 - protein, 405 aa, Methanobrevibacter ruminantium
MYKREIELSGHIIDSLTLPKTMDIIMDNGGDFDILEFDIGKRKSDTSKAKIMVSAESPDILNSILDELNFIGVSISEIEEVNLVPSPKDKVAPEGFYSTSHHVTHIYYKGKWILVDKIEMDCLIVIDEENETASCKPIADLKKGDLIVVGREGVKITPPQRSRGKQGVFEFMNSDVSSEKPMMSIINDVATEIKNVKANGGKIALVGGPAIVHTGSAPIVAKLIKEGIIDVIFAGNALATHDIECDQFGTSLGVKIETGEVVAHGHTHHMRAINRINKSGSIKAAVEDGTLKSGIMYECIKNDVPFVLAGSIRDDGPLPDVITDTAESQKLMRHYAQEVDMVIMISTMLHSIATGNLLPSRVKSICVDINPSTVTKLADRGSAQVVGIVTDVGAFLPVLYNALHD

SEQ ID NO: 6170 - protein, 241 aa, Methanobrevibacter ruminantium
MFIGLLAPAIVSTVFIMLSGSDLLKKDFKNKMIGFYKVKWLNVIWAVIVFAIVIVCSILLSLLFGQPIDQFSFTESFSFTGVGIAGAFITITLASIIEEVGWKGYCEDSIGNYMNWFWESMIFGVLWSFWHFPLIFISGTYQAGLMVNPLYVINFFVSGIPMGFVITWVYLESDRSILACMIFHFFVNFMQEKIALTPETKCLETIVITVVAILIVMAKKDMFFETRHVGRLLEYNSSQQQ

SEQ ID NO: 6171 - protein, 204 aa, Methanobrevibacter ruminantium
MKKGEKRKQELLKIAYDMFLTRGYENTSVDEIIEKAQIAKGTYYYHFQSKEQMLEEVIDMMIDSEIETAKQIIGMDISVPQKIVGIIASMKPTEVEQPIKDTLFQPENVLMHHKVRKQLIDVLTPLLSEVIQEGVDEGIFECDNIPERVKMLLIISDGTFNEGTFSERDISVFIDMTEKLLGAENGTMSFIYDLIDKSEMEGAQ

SEQ ID NO: 6172 - protein, 69 aa, Methanobrevibacter ruminantium
MGLILFFLSYFLLFLFSQIHHSFYDIIIIASPICHSKSQGIYLYMMMFKLLLKNKNRPIVEKLFRRILG

SEQ ID NO: 6173 - protein, 324 aa, Methanobrevibacter ruminantium
MLFNTYEPGKFAFSHESVDYYDLINSEDNLNGSSDFSKSKKWGIIGVPFDSTCSYHHGSRYAPTIIREASFGLEQYNSEFDKLLDGEFYDCGDLNVVHGNCKRTCEILEDSVNDLIEANIKPIIIGGEHSVTLGSVNALSALEDKNNLNDITVIHLDAHRDIIDEYIGEKYSHATIMKRIYDLEPKELIQIGIRSFSEEERDFVEDKENIISFYAKDIKNQNIHLNEDVSTFEDLLSKLDSIEGKVYISIDMDVFDPSVAPSVGNPTPNGLFLADVQAIFEALSFNEEIDIIGFDLVELASDRLGDISGVLAAKVIYDFLTLFA

SEQ ID NO: 6174 - protein, 135 aa, Methanobrevibacter ruminantium
MSTKVVELKTVKVGKYIVLDGEASKVTSLTTSSPGKHGAAKARLEAVGIFDGQKRSLVKPVDTKVEVPILDKRVGQILAVMGDQVQIMDLESYETFELPIPAEFEDEIRGAVGTDLGVEYIIALGNMKIMRTKKV

SEQ ID NO: 6175 - protein, 153 aa, Methanobrevibacter ruminantium
MRIAIVSGNAEGPTELNAFDNALYEAKIGDVNLIKVSSMLEANTKIEKLPKLKAGSMVNCVLSSIVSSNPGENLTACVAVAIGDELGCAVEVDGIDKDPEDLKDEATKMVKYMMDKRNVKINELIVEEAHHTVKNIGSAIAAVIYITDDILEE

SEQ ID NO: 6176 - protein, 621 aa, Methanobrevibacter ruminantium
MNQDDIQICKEIATTVFKNVENLLDGQVGNPKAGEFVKIGADGTPTSHIDIIAEDEVIKLLKDADFESYLISEEIGELRLGKGKQQSVSLSEELLNNTPENKKEEEEIPRYIFLIDPLDGTSNAVKNIPAYGMSIAVANVPIGREATLEDVQLGFVKNYSNGNFYEAVKGNGAKENGQPLTPSKETDITKITLGGFTKSKTLSVSKLVDTARRMRVLGSVVLELAYIANGKYDAFLDLRGSRIIDIAASKLIVEEAGAIVTNKYGEKLNNRLSIYEKAVVVSAGNEDLHKQIIKIINNDELDKVTSVAIVSRVDEYKSVLFSLKIFETLIEKNIETVLETSLAEKLEEIKEDPELHKIIAKTMNETPEIAMHIESLNFNYEFMDYAKQLNELRTDIAIILGGDGTLLRTQNQLTKEIPIFGINMGTVGFLTEIEVENTFKALDAILDGEWSKEKRTQLIISHENESFRALNEVVIMTARPAKMLHYEVSVDGEVVEELRADGLIISTPSGSTAYSMSAGGPIVDPKVGAFIIIPICPYKLGVRPFVVSDTSEIRIKLLRQGKKAIFVMDGQIQKEVNYLEELVIKKSEKDVYFMRINKKYFYKKVKDKLNEGGLESINRVL

SEQ ID NO: 6177 - protein, 544 aa, Methanobrevibacter ruminantium
MNVFLVDLTHGGVKISSELSKSKRFEKVFAYDLYSTLKEEDEHLLKTYDVTILKDFDSFKEELKENSKELLKSEKEKENNSKDLIINPIHSSLNIKDLLNQITEEINPNNDLTHLYEIINHHQATKLVLENWKEETKKHDIKTIEITGVKGKTSTAFLLKEIFLENNQNTLLLSSLGAYLFRKNQDKEMELILQKNISITPANIINTIQLAKKIANPKCSYFPKCAANKNKQEENELFEEYNNNPYHNLNYDIAIFENSLGVCGLGDIGILTNLVENYPIAKGSSNAMEAKRQVFDCSLVIIEYETLNEFYKGESEEYKDKINSFSLNNNKANVFCKNIDFDIDNTQIKITYQDFKTRNKNTINGEFTLNCFAPGPHHVLNILTAVSTALALEIDEKTIIAGISKFNGIDGRTQVKTVENSIIIEEINPGINTKAIESSINMIKDIDNYYIIIGGKYGVTCEEIDEEKLSNYLNNYLTDNPNTKLILTDEVGKSLKEKLDLLNDKDEYEIMFIENYEEARDLAINENKNILFIYRSNYSQVSKR

SEQ ID NO: 6178 - protein, 289 aa, Methanobrevibacter ruminantium
MIVGTRGSKLALVQTDYIRQCLYNITGEEVEKNIIKTKGDKITNSQLYNMDSKGLFTRELDNALLDEEVDFAVHSLKDVPTELNEDLEIVAVPIRESPNEVLISNYSWSELEEGSTLGTSSLRREAFCKHHNKDFELKPIRGNVETRIEKVMDGQVDATIMAEAGLNRLGLQKYIKAKFPTDYIMPAAGQGALAVMTRKDSEHKETIRKLNHYFSHQEVLAEKTILEEIGVGCQWPIGAISGIKNNQLELKSILLDKNGEILYQKTLSGSIREAKEMGVQIGKEMIEFI

SEQ ID NO: 6179 - protein, 315 aa, Methanobrevibacter ruminantium
MRTINVGVIGVGAMGYNHARVYSKLENANLVAVADVVKPTLDKVCKKYNTKGYSEIEDLLKNPEIEAVSVCVPTTFHHEVVMQAIKYGKHVLVEKPIAFTAEEAQEMIDAAKEAGVKLATGHVERFNPAVQKAKELIKNEVIGDLVAISAKRVGPFPPRIKDVGVAIDLAIHDLDVMNFLIEEPVKQVYATMSSRLDQSDFEDHAEIMVSFEEDITGILEVNWLTPYKRRQIEITGTDGIITVDYIDQSIEVYGKFAQDIQIKPVEPLSEELNSFLTKIGNDETPEITGEDGLKALKMVLAANKSSKEHSPINFR

SEQ ID NO: 6180 - protein, 204 aa, Methanobrevibacter ruminantium
MNQELINRAQELRNHGFTTGEIADELNVSMDTARWLTLQKTEEPVETEAPVDIAINWNSLGGSATRLRYVSAALSDIALKHGDIDLVVGIATSGIPFATIMADVIEELTGTTTCVSIFHPKKHRTNPTNSDEGAISSNFGTVEGKRIVVVDDVTTSGDTIKDVIKVVKDHGGNPIVVTVLIDKSGLEEVDGVPIESLIKVSQLR

SEQ ID NO: 6181 - protein, 268 aa, Methanobrevibacter ruminantium
MEFNIVKELNGQFDPIVLIKTDEKPEDALAPKPGRGGCVMSFVAQSIAKRKVTAFGRENITCGGVSAGFGWGTGFKTDKDKEFQATFLSLGLDSAKDKDAFLERLSYLPKPTQEMFKKGERIFSDFDTAYENIQNRPLYDEGEYVVFKPIELLEEGETPDSVIFTANTMELSAILQLNGSFRAESAHIMTPQASACQAIGAFTFEQEDSDNPIPVLSPLDFAARAHMRRLIPDDYMNLSMPWKLFLKLEELSKNSVFQTHFWDDFGNK

SEQ ID NO: 6182 - protein, 473 aa, Methanobrevibacter ruminantium
MIENNICLLTDSYKLTHHYLHPKGTEKIYSYLESRTGAEFNKTIFYGLQYILKKYLEGNVVSEEKVLEAERIVDAHIAPGIFNTDDWMYIAQELDGKLPVKIKAVAEGSPVNVGNVLMTVENTDKRAYWLPNYLESLLLQVWYPSTIATLSAEVKKLCNFYLDVTGSSKDNLNFMLHDFGYRGASSTESSRLAGSAHLLSFSGTDTVPSLAIPVNYYNTNEIQGFSVQATEHSVMTAMGPEGEMEQAINVVRNAHDGILSIVIDSYNYKNFLENACIKGHKLNEEINEFLKRTEGNKIVFRPDSGEPISTTIDCLEIIERGFGTHNTDKGYKIFNENIGLLWGDGLDYQKIRDILFGIKAQGWAAENLIFGMGGGLHTAVNRDTQRNAFKCSAQLRDGEWIDIFKKPLDTSKKSKKGRFKLIRNDKFEYSTVPIETEGKDQLRTVFKDGELLIDDSFEEIKKRTETYNMFPIK

SEQ ID NO: 6183 - protein, 457 aa, Methanobrevibacter ruminantium
MEESKTRFEGVESILGDPKKAIWKLSIPLIISLFITSLYSVIDAVWVSSLGADALAGVGFVSPIFIALMGIGNGLGAGATSAISKYIGEGDKKKSDNGAVHAIVITVIVSIFTTLLFLIFLRDILLSMGASNTIDYAMDYGVILVSGSILVILSNSLYGVLRGEGDGNRTMYAMLFASILNMILDPIFIYYLGLGVKGAAIATLISLLFVNLLLFYWFYIKKDTYLRPFLSNYRFDKDITVDILKVGFPASLELVNNALFAALFSLLLTVVASTDAVAVYSTGWRVVTIATTPMLAVGTALISVVAANYGARRYEDILLAHRYSMKIAVLFGFIAAIVVYVFAPQIVSIFAYTGTSMRLSSQLIAFLSVIVIYFPTMGYGVTSTFLFQGTGNGITAMFQTILRETVFTLGFAIILAVVLGYGEYGAWWGIILGELVVNTITMFWADWHVKRLIRSNN

SEQ ID NO: 6184 - protein, 139 aa, Methanobrevibacter ruminantium
MEENNYIVFKKQYGNIKRPRTKEVSINQNGVKIYEKDQSMIINIVLPIEDSMKVYQFFEEFNLGEDIQFNISNTGDFECVFRGISSVIDKDSYSSFSITVQEKYQRPDQLQVEADCNQVDEYGNPIQQCIGCGLHRDEI

SEQ ID NO: 6185 - protein, 312 aa, Methanobrevibacter ruminantium
MIDEIYDYYEKRLSTSNSILKMRGIDEEINKLPLGINLDIANILSTIDIYDYDEKKAAKKIKEAYVEVFKEGIYLGIGFGKILKFNYAKSHPENYVECLEEDYQHFTFYDFKIEVLKKIIPPIKVKKFTQERHPKEINYRNESFEDIRSYTCINVETQWEDKFDFEVNPDAKEMEDYIRQREVKSYEDNEELKKCVDDLKMGIQNILFQKFFEALEVDLEKAENGCENNLRFDEETAKDVFISPVFSNLEGEFKIRELVNKYLIHVFNEGKIIGLLNGIKIVLEDIQNDRLDYEEMNSMSSRESFLYIKEGL

SEQ ID NO: 6186 - protein, 281 aa, Methanobrevibacter ruminantium
MINEIVNGYKNQQKVYLSSIIKTLNLDIPDVLSVYPKSNHDLDKIFKEIKLIDKDENILEPLEEFYIDTLKRGILSSIPLGKSFMVKLHRDDEEHFNEVLRMNSGLFLNYVPKISSLEDLEKCTPKYGERDYYKMKEEEQVIVIVEGILRSFCEFTTDNNLMVDYHFEELFDVLDIDLKLAKKRCNKRIKLGNKSKIGIISAIYKNKNGKFRVTDLVKEHCQTIFEEGMRLGIRNGIKIVMDDVHSKRIDPDDFSTMELNELSAYFYKEINEELEQLARNC

SEQ ID NO: 6187 - protein, 407 aa, Methanobrevibacter ruminantium
MQKDNSNQNNDLKQGISDSNQEKDLNHKTNNSNQNKDFNNRISNYNQEMGFKNKSNNSKQENDSKNDLDSNKNINPFKQKDDDFDKALDKNYLEEYNTQYYYSISQCTSLDNSSQGRLVSNILLNLIESLENYLLKIARIDYINSYFDWDFHLLNSSFENAFCMPGGKVLVYSGILSIADNEERIAYILAHEMAHALLNHPRDYIIVKDKEYNNVLLFKPFSLNQEFEADRLAMMILKWADYDIGNIPSFCQFLRGNYNKFNYFSTHPLSDDRLMNMESLIAEINNLKDDCFAPIIKNDRSNALIYTKRYAGSQYNDKDNEIEDRPKVFCTNCGYYEDSDAVFCSNCGSRMDDKSRCDRCGALIDPGDVFCTNCGNVLVDDYKCFNCGHKIKPGDVFCVNCGIKLIR

SEQ ID NO: 6188 - protein, 132 aa, Methanobrevibacter ruminantium
MATFSSIEEAREFFKGDKFATNIGVQLDELEDDSCVCSLELCDDFRNAYGAVMGGAIFTLGDFAFAVLSNQLHRPTVGLQVSINYLSGAKGEKLIAKAHYKKNGRTTSVINVDIIDDTGREIAQFVGTGYKM

SEQ ID NO: 6189 - protein, 335 aa, Methanobrevibacter ruminantium
MKDIFDECQFGEFKLKSRIIRTGGWERDTEDGGFLKPKVFDRYEKMAGNEVGLIVSEMFALDPKDRFYPYCANMNYKGFIKDYKQVTNLSHHFEVPILGQLAFFFFDDGTNQKAEPNDISLEGIRKLQAEVVMAAKKFSFAGFDGIQINMAHNFYLARFINPYFNQRTDDYGGSTEKRMRIVVEIIKLIKKMVGCHVSFRINAVDGRKGGMTLDESFKIAKILAEAGADSVQITARTISFKFGETGDHAFLSYADRMAKELDIPVILGGTLRDMKTMNEILNETDIEFLSLAKPFVAQQDFLSEWKENGDGVSRCRACNNCYGKKESNCFQFGDE

SEQ ID NO: 6190 - protein, 191 aa, Methanobrevibacter ruminantium
MLELDKLLDIFNAGDTLVMDEEATDACNYYSAEAQKITCELNYQYNDFDKRRELFSKLINQELDDEFRVFTPFFTDFGKNIHLGKNVFINAGCKFQDQGGIYIGDDVLIGHNVVMATLNHDENPNNRANLIAAPIRIGNKVWIGSNATILPGVSIGDGAIIAAAAVVTKDVEENSIVAGVPAKFIRKVKTD

SEQ ID NO: 6191 - protein, 467 aa, Methanobrevibacter ruminantium
MAGLNLIDSVMYYPILIIVMAIAGLYFTFKTRGVQIRLFLESIRILTEPPDEEGSISSLQAMLVSTASRVGTGNIIGVSTALCLGGPGACFWMWVMCIIGASSAFMESTLAQIYKRKDKEGVFYGGPAYYIEHGLHKHKLALLFCVFLLATYAVGFNMLCSFNLQSTFMEYPFYHPSITPIIIGAVLAIITCYCLLGGGKRIVSVTSTLVPVMGVSYVIICLIVILFNIQNVPVMFLLIFRDAFDFQSILGGVAGSCMVYGIKRGLYSNEAGVGSAPNASASADVSHPAKQGLAQTLSVYIDTLLLCTASALMCLSTGVVRDAAVSGAPYVQNAISSVFGWIGPIFITVAMILFAFTSLIGNLYYTNNVLMFMNNEKMPSKRFVHIFHIACSLIIFIGAIIPMDAAWAMADITMGGMTLINLPVCLLLSKAAIDCLKDYERQKKMGLKPVFKASSIGLNEEELDWWK

SEQ ID NO: 6192 - protein, 111 aa, Methanobrevibacter ruminantium
MAIPKAPVKRIMKEEGAERVSAEAVDALVDYLETDADAIARKAIDYAKLAKRQTVKAEDIALAIGRPETSESTAENPHNLLEVVQKVLDAAADGKGFEEIIKSFMKLEKKE

SEQ ID NO: 6193 - protein, 444 aa, Methanobrevibacter ruminantium
MSYVDEVIDLIVKENPDEPEFHQAVKEVLESLRVVIEENEEQYRKDALLERLVNPERQIKFRVPWVDDNGQVQVNTGYRVQFNSAIGPYKGGLRFHPSVNVGIIKFLGFEQIFKNSLTGLPIGGGKGGSNFDPKGKSDREVMAFCQSFMTELCKYIGADTDVPAGDIGVGGREIGYLFGQYKRIQGLYEGVLTGKGLTFGGSLARTEATGYGLLYFANAMLKANGETLEGKTVIMSGAGNVAIYAIEKAYQLGAKPVTCSDSTGWIYDPEGIDVELLKEIKEVRRERLTAYAEARPSAEYHEGKGVWTVKADVAFPCATQNELDIDDAKTLVENGVIAVAEGANMPTTLEATEYLIENGVLFSPGKASNAGGVATSALEMSQNSQRLSWTFEEVDSRLQTIMEDIFANVDAAAKEYGFEKNYVVGANIAGFLKVVDAMNAQGIV

SEQ ID NO: 6194 - protein, 182 aa, Methanobrevibacter ruminantium
MKILISNLKGKELVEIAMKNQIDKLISVYSNYNETSLLDQYMTKENIKISTTNAIDACKQLTDIIRHQDTDDEIYVASDGNFLGSMLNFVANKEAADYIFYSFNNQIIQMPRLSINLSETKMKILKSLNETEQTAILIGKNIGISRAMVYKHINSLMEDGLVGQTKQYEKYYLTNAGKMLII

SEQ ID NO: 6195 - protein, 79 aa, Methanobrevibacter ruminantium
MAEDKQEPLSPIEEIKKEYLEKIDYFGNRRSKYALYKKFSKKYNLNRRVFIHILNEAHEDVGSPKRYELRRQTPKDYKR

SEQ ID NO: 6196 - protein, 279 aa, Methanobrevibacter ruminantium
MLIVYCLNFYMVFFMFYLVGLGLFDEKDISLKGIETLKKVDKVYAEFFTSRLFGSNFESIEETIGKEIIVLDRTQVEEESVFLKEAKEIDVALITGGDPLIATTHSDFLVECARDGTDFEVIHGSSILSSAPAISGLQAYKFGKVTTIPFPDLEYNYFPKSPYMAIEENLKNDMHTLVLLDIQAHKDKYMTINEGLENLMTIKDNLEREGMIDENSLAIGIARVGSKDNVVKAGYIKDLLDYDFGGPLHCIVIPSKLHIVEAEYLVHVADGPKEILDDL

SEQ ID NO: 6197 - protein, 467 aa, Methanobrevibacter ruminantium
MNVFRSFIDILSDRTVNERGYFFSNKALFALFLPLLVEQALEFCVGLADSMMVASLGEVAISGVSLVDFLVQLLIFSFSALATGGAVIAGQYLGNDEPEKACDASNQLVWFTTILAVIMAVLVLIFRPFLINLFFGQIEPDVFNTSSIYLSYMAISIPFIAIYNSGAAIFRTMNKANLPMQIMFVCDILNVIGNAILLFVFGFGVEGVAIPTVLARALAAVIMIYFVLQERYEIHIRKTLRHKFDWVLLRKVLNVGIPYGVENGVFQLGRILILSLVSTFGTIAIAANSVGYAIGIFSVLPGFAINLGLTAVISRCVGHNDYEQAKFYNKKILIITFLSHLAINLLIFALLPYILQIYNLSPAASALTYQMVVWHGIFAVLIWPIAFTLPTTFRGAGDAKWPMAVSLSVMFICRIALSYVIADFMGVGVFGTWIAMFIDWYVRAAFYVYRYFSGKWMEYRAVGTNLS

SEQ ID NO: 6198 - protein, 486 aa, Methanobrevibacter ruminantium
MILNHYILSGINEKIGEMEEEFQLMLLASEIVDCCFNFFEIERKTSKVGRPHFEIKNMIKLIFYGYINKITSSVVLAHNAKYNFLYSFISHGCEPSDRTIRDYRKNFMSIFQLIMSFTLIATYKLGLSDFKYIAIDGTIKQAYNSPFNIIKEKDIRLLIKHYMVEELTKNEIKKLRKTAKKFLKDKTKTDEEKVDILFEWWRLLDFSGQSSLGLNDHDARWMKIKDKGQIYPKFSYNLQLGTDTESKLICGVNVVQNPTDHYQIPALMNQIISNLNLKPTKISADTIYLTLANLNYLDNLGITALIPTSQQNRENSGEKPNNRFAIGYFVFDEYKNVFICPEGQELTLDGIYQAHPEKGGGNKLKAVYSNFNACNNCINKGVCFKTGHRSITRYVHELAYKTERIISSEKGIEEYKLRSSTVESHNGTFKRVYLYDFIPITGLKRVQGLMFAIVASYNLIRFLNLIKENNMSLQSVINSIRYISSS

SEQ ID NO: 6199 - protein, 365 aa, Methanobrevibacter ruminantium
MLTIKIPVQNIEATRQIVLKHKILDYDYKIKVENGFGHIPIREETEDEILSKVIEECKEEIIKQNSDYTIEVVDLNQNEELETVKRYPRSITELLKDKLSDEEIEELKKSFDIIGDVVIVEIPEELEAHKKEIGEATLQFTKRKTVYMKRSAVEGITRTRQLELIAGEDNPITIHKEHGTRLKLDVKNVYFSPRLATERKRVQEETKDGEEILDMFAGIGPFPIVIAREKNVDITAVDINEYAIKYLNENIKLNKLQPNAHITAICGDTRIVADNELKGRKFDRIIMNLPGLAPDFLDLAVSMCKDGGVIHYYEFSEGFSQGIERAQIACEKQNKEVEILNTRKVKSTSPGMWHVVIDCKVSDKK

SEQ ID NO: 6200 - protein, 319 aa, Methanobrevibacter ruminantium
MRTLEWEDNKLKLIDQTKLPDELTYVYCSNYKQVITAIKDMIVRGAPAIGVSAAFGMALAQLAGEDMEKVAVEMKNARPTAVNLMWAVDRVMKAENMLDEALEMAREDINTNLAIGEYGAELIDDGDTVLTHCNAGALACVDYGTALGVFRSAFNQGKNIQVICDETRPRGQGASLSVWEMQQEGIPVKLIPDVASGYLMSIGKIDKVVIGADRVAHDGIANKIGSFMVALAAKRFDIPFYVAAPISTFDKEISIFDTEIEERDPNEVIYYGGARICPEGTEVINPAFDIVPKDLITGVITEKGVFDLNNLEKDFKELF

SEQ ID NO: 6201 - protein, 296 aa, Methanobrevibacter ruminantium
MTKKDITCGGDHKGARFAHITKVHPCYNEKLHDKVGRVHVPIAPKCNIGCNFCIRSINTDEDRPGVAGSIMDADAAVEHVLNVTKDSAITVVGVAGPGDSLANEATFEFFEKINKVKPDLIKCMSTNGLLLPKYAERIAELGVNTVTVTVNAVDPEILKEINGFIFYEGKVYKGLEAAEILSKNQLEGIKKITDLGVVVKVNIVLIPGLNDEHIPEIARTVKECGADLVNVLPLIPLNKMADYPRPGCMEIEKARGEVEEYLPVFRACTQCRADAYGIPGKKHEDHHIGNAPQSHF

SEQ ID NO: 6202 - protein, 188 aa, Methanobrevibacter ruminantium
MYIESNDPEGAKVYDMIIRQIFQDLVLPPSIDDMKAYVNPNEVCFIIAIKMRKTSQHITLKEVANVDYNAEDDTTVVIIDNENYLPNILKRLWEINGRENVHQPSRYVIHLPGEKNVSDLVVDDPHENLKRRIYDAVFRIVPEGFKIMKDMSEGDIVCIVATDELIKDEWVEKAKGYMVELNTPKTWD

SEQ ID NO: 6203 - protein, 411 aa, Methanobrevibacter ruminantium
MVQIALVSCGTEYSGIQKEIEKAALKFGAEIILPEIDLDYINEAYEKFGFSAQSSSLKLMIARAMSIVEGRCKPDAVFIATCFRCAEGALVRNEVRRFIQNNTRIPVVTYSFTERTKADELFIRMEALATTVTRRSILAREKQEGLTLGLDSGSTTTKAVLMENNKVIGTGWTSTKDIIESAKTAAAEAFDNTDYNWDDVDGIGTTGYGRFTMGREFGAELIQEELSVNAKGAVYLADCQKGEATVLDIGGMDNKVITVNNGIPDNFTMGGICAGASGRFLDMTSRRLDVDITELGPLAVQGDWRKAMLNSYCIVFGIQDLVTTLAAGGSKADVAAAACHSVSEQVYEQQLQEIDIREPLIQVGGTSLISGLVEAVSETLGGIEVIVPEYSQHIGAVGAALLVSGMGKRHE

SEQ ID NO: 6204 - protein, 168 aa, Methanobrevibacter ruminantium
MVKVAIYPPNSLILADLIERKGHAPLALQKQIRQKIKDPEIDSPPMNITEEDPINGLKYAAIEVPSGVRGRMSIIGPLIDAAEAAIIVDGAPFGFGCVGCARTNELSIFCLRKKDIPVLEVVYPDDEDGTVLMVNQIMEFLDSLPGGGGDMEGDNDVLGEQIGTKGGK

SEQ ID NO: 6205 - protein, 168 aa, Methanobrevibacter ruminantium
MPANLCITPDLGKEDMDPEVSTRMIILSSKANVSESEVVNFLHMLNLPLTIKWTCYGAMISGKDKYVRQAIRELRKLDPYGIFTKERGFAPGDPRRCRGHRYGPREGFHQMEKEFRILDYVGEALKNPRDVEIEKKEPVSVDYFKEVLDKALEESEGSSKEKSEDDNK

SEQ ID NO: 6206 - protein, 522 aa, Methanobrevibacter ruminantium
MKRGKPMLIKINGEDVDIPEGSTIKDAIELSNAPYKKGSIVCLIKGESEIQSNVLKYKIKTPKGSILIELEVSEKSKPLTDFFKENYSLFSSNNVRWETSNEVAIGPVESNFEPSHDEFRYFDNDVLISLSGFSKEATHIIFVKDDHSNVYGVPKYSDRGVFARIIGGRRTLFSLTDDDEILSIEPVIERSTVTDSTGGSNLEEVLEEGNQLFTYALLEPNAKSPASVEHLFSLIRNNKIQVDFESNSFLGFYELNGLTKDAEEISERKRGTVTLRSEGNGKGRVYVYREDRVRAETHTNLATVKQGMELFDTAKKGDFITVLSDPERIMLMMLTQKEAEEKMQSLGIKHVRDGNLDDDAIVVIQTPENTIDILENKEVTTFGLASDELVKIKLTDKAPRTRWYLEKISGLAEKPVGTLKVYFAVPDMNMFMFNGDTDESKGLIPENIPTDIVKAGEIAVTNMSRKNLGLIGIRTIDTDEFGPTGEAFSATNIVGEVVGNIEGLNKLKDGSTLYIYEVYDEE

SEQ ID NO: 6207 - protein, 227 aa, Methanobrevibacter ruminantium
MSLLEVKNLKKSFGDNVVLKDISFSVEKGEVLSIIGPSGSGKSTLLRCITDLETEDSGEINFDGTFGLVFQNFNLFPHHSVMKNITNAPLKVQKRDKAEVYEHARDLLKKMGLSDKEDAYPSELSGGQQQRVSIARALCMKPDILFFDEPTSALDPELTGEILAVIKDLAAEHMTMVIVTHEMNFARNVSDTIIFMDEGVIVEEGSPEEVFSSDNQRMKEFLGKFYE

SEQ ID NO: 6208 - protein, 217 aa, Methanobrevibacter ruminantium
MLLSKILEELLWGMGTSIEIFLLTLLFSIPLGLAVAAGRMSSFKPLQWFMKAYISIMRGTPLMLQLIVVFFGPYYIFGMTLSRDYRMIAVIIAFTINYAAYFAEIFRGGIESIPNGQYEAAQVLGYTRVQTFFIIILPQVVKIVLPSITNEVITLVKDTSLSFVLAIPEMFTVAKQIAAAEASISALLIAGGFYYVFNALVAIIMERFEKRLDYYDT

SEQ ID NO: 6209 - protein, 274 aa, Methanobrevibacter ruminantium
MKKKIAIILGIALLAFLVIGASSAGFLDFLGGDGTATNDDNTFIVGFDAEFPPYGYKDDNGEYVGFDLDLAQEVCDRNNWTLVKQPIDWDAKDSELDSGSIDCIWNGFTINGREDDYTWSEPYIDNKQVVVVKTDSGINSLADLDGKIVETQKDSSALAALEGDNKTLADTFKDLTQVADYNTAFMDLETGACDAVAIDIGVAQYQISQKGSDQYKMLDEEISSEQYGIGFKKGNDQLKDQVQKTLDEMFEDGTVEKLAQKYDTYGVPGALIQK

SEQ ID NO: 6210 - protein, 325 aa, Methanobrevibacter ruminantium
MNFNELVKSLQEFIGVSRKNSIEKVTKALSETYNISGDVLLDFGDDASAIDIGNGQVVLLAADGIWGQLMSVNPYWAGYCSVLVNVNDIAAMGGRPIAMVNTLSINDDEIYDGVLQGIVDGCRKFNVPMVGGHLHPDAEFNSLDVAIAGIAKKDSLITSAGANVGDKVIVAIDTDGRQHPQFVLNWDTTYEKDAKLVQDQISVMQEIAEAHLPTAGKDISNPGTLGTLEMLLEASGVGAFVELERIPRNPDVSWEEWLMAYPGAAFVMTAKEENCQEIIDRLSPYSFEVAVVGDVIEDKMLVLKSGDEEAVLFDQRKNPVLVLGN

SEQ ID NO: 6211 - protein, 210 aa, Methanobrevibacter ruminantium
MTLLGHHIHDKLFLSKDTLEIPFDEEADSPENFKSIMFNVFKSYVIESIKEVVPSFVEKDHEYNVVNSYEGFVEEDYEFEDLDDFIQELEYGSYEGSNEIYVDEDGSLVEEVYIEDGEVPLEEVYIEYDDVPVEEIFVEHDSDDDIYVEHESVEEIFVEHDDGSIDEIIVEHEPNENIVYEDAPVEEIFVEHEPNEEIVYEDAPLEEIFC

SEQ ID NO: 6212 - protein, 413 aa, Methanobrevibacter ruminantium
MEIGVVVHGPGIIDSGWAIKIIDILSNYGNVHCRLGGTMGRTAVIDAALEDAIDISLKLLPSQSLELFNREGVDIIFLLNYGKSPETGRVFGYKVFNHYFKQISNEDYLATNHKPLYDASVPVIQIERPGEEDGSIISWNTELNEQLSKSRKGRFKLGLGKKNMVESLSFNFEELFDHLKTSLNLVEVTPEEVVSNYFSNNQERKDEEDIEKILRSYDDYDISHYTYRKIHGVSPDENIFINGIVVGYSNGDSIVLVARDGLIADIINGTIKYHGLEKLGPVDLERVIVKTGLLRKSDDVNPRVLSNKDISLKDTERHIYSGEISEDDYSFKVAYVDHAAYDIYKFKDFDLVVTIGDDTSLVASDILYRFDIPIIGITDGDLDKVVENGFVNEKSTIIEVASGFDDIAGPSHS

SEQ ID NO: 6213 - protein, 168 aa, Methanobrevibacter ruminantium
MSDLYYVLDASAFINGFEPKSDFNITVSEITDEVKDLKSRLILNQAIDDGKIIIQEAQKEFLDKLDETIAKSGDDLRLSGPDKKLLAVALALLDEGKEIKVLTDDYSMQNVLKILDIPYESIITEGIKGVYNWKKTCEGCKKEYPADYPFDDCEICGSKVFKRRIKTY

SEQ ID NO: 6214 - protein, 172 aa, Methanobrevibacter ruminantium
MKSETMELHKKKAPIKVSCGIITLSDRFSNDKEGKEKDLSGKYLIDELSKKYDVDDYTIIPDEKDILKDTIESMIDNGIDVIITTGGTGLESRDITIETVEPLFEKEMKGFGEIFRAISYEELGAGSLLSRATAGVYKKTLIFCMPGSPNAVKTGMKIFYEELGHLKKHAQK

SEQ ID NO: 6215 - protein, 176 aa, Methanobrevibacter ruminantium
MCMVSKEYLIEILKENKVFEQGEFTLASGKKSNYYVNMKRAITEPEILSTIAKLINEKIDDDTDKIAGPALGAVPIATAVSLESKKPLLMIRKEKKGYGTSKLIEGDLNEGDKVILVEDVTTTGGSLLKAINAIVDNGGVVQKAFVVVDREEGAMETFANEGITLEPLISVSEFFE

SEQ ID NO: 6216 - protein, 94 aa, Methanobrevibacter ruminantium
MRIAKELIGKEVLGTDVTVMGKVVDVDIDVEDNIIESIIVSKGGIQESLNISKSELVIPFDMISKIGDKILLKDAFGEDLDQMADEIQDLKNQL

SEQ ID NO: 6217 - protein, 37 aa, Methanobrevibacter ruminantium
MMVFGIEDPWIWGVYVLLIGMTLVCVAYGALNWNNED

SEQ ID NO: 6218 - protein, 549 aa, Methanobrevibacter ruminantium
MNYFLLGIVFIVYFLMVGYVGYLAWKRTNSSEDFLVAGRETHPYIMALSYGATFISTAAIVGFGGVAGKYGMGILWLAFLNILVGIFIAFVFFGKRTRKMGKNLNSLTFPEFLGRRFDSKFIQYFSGVLIFCAMPIYAAVVLIGAARFMESSLMLDFNLALFILAVVICGYVLFGGLKGVMYTDALQGTIMFIGMLILLVFIYWVLGGVTEANTALTNMAHLYPPDALAEGGTGWTSFPKLGSPFWWTLVTTIIMGVGIGALAQPQLAVRFMTVKSNKELHRSLLIGAVFIAVMTGTAYIVGSLCNVYFYQNFGQIAIDYVGGNMDSIIPTFISTALPEWFVYIFLLSLLAAAMSTLSSQYHTQGTALGHDIVDAFKNRGTTREYTDEEILEGSSKEETRIGFISVSQLGILIAVVLSLIIGLILPGGIVALGTSLFMGLCAAAFLPVYCAALFWKRATRKGAIAGLLSGTFTSLFLLVFVYKKTAVGLGICKALTGMDMLINVMPWYSIDVMVFAIPVSVIFTVVVSLLSPPMDEKVIKRSFEGLSEE

SEQ ID NO: 6219 - protein, 433 aa, Methanobrevibacter ruminantium
MIWNQNAECMDKEEKEEMQLALLQKQVKRVYEKVPFYREKFDKAGFHPDDLKTLDDITKIPFTTKADLREAYPFGLFAVSDDEIIEIHSTSGTTGTPVVSGYTQKDIDIWGECTARAIAMAGGDKNSKIQNSYGYGLFTGGFGIDHGAKVMGATVIPMSSGNTARQLKIMEDFQSDILTCTPSYAMYLAESLEKEGYTADDISLHGGIFGAEMWTEEMRRSLEEKLGITAHNIYGLTELMGPGVAAECKYQTGLHIQEDHFYPEIIDPETEEILEDGKRGELVLTNLTREGMPVIRFRTKDMTALRRDECPCGRTTVRMDRITGRSDDMLKIKGVMVYPSQIETAILQIEGLTANYQIHVSRPHTLDEIEVKVETSPEVFSDEMKKIEEFERRIAKKIQSAIGISVDVTLVEPESLPRSEGKAIRVIDERNFD

SEQ ID NO: 6220 - protein, 143 aa, Methanobrevibacter ruminantium
MSVKQLSVFLENKEGKLKKAVNAMSQAGVNIRALSIADSSKYGILRLIVSDNELAIKALKEENFTVKETEVIVVGVKDEPNGLNTMLEILEKEHINVEYLYAFVSSKTDEAIVVVKIGNYEDGLKALENANANLLSKEDLAEL

SEQ ID NO: 6221 - protein, 425 aa, Methanobrevibacter ruminantium
MLDRLKSISLGNWILIGMVLGLITGVILNLYVHSQFIDIILIDNVFYLGGNIFIKLMKMLVVPLVFCSIVVGVASISDIRKIGTIGGRTILIYLITTALAVSIALLIASFIHPGAGLHMAGLATASNVSTNVTITNTILGMVPDNPINSLANGDMLPVIIFGVLVGIILAKLKEETETINKVFEEGNTIMMEMTSIVMKFAPIGVFCLMAKTFATLGFDGLMPLSKYVICVLIGLAVQAFIVYPSLMVIFTRLNPIKFFKKFYSVMLFAFSSSTSNATIPLNLEKLSELGVSREVSSFTIPLGATINMDGTAIMQGVAVMFAAQAYGMDLGASALLTVIFTAVMASIGTAGVPSVGLITLNMVFTSIGLPVDAIGIIMGIDHILDMFRTAVNVTGDAICTIIVSFKNKSIDLDVFNGKKQAEGSS

SEQ ID NO: 6222 - protein, 92 aa, Methanobrevibacter ruminantium
MPFKIDSAIVKKDMDSGKYDLVDPEGKFSQADALMVINSDDFITVQLIINAILRNDFKAWKDVKWEGGDSLKSLLVKLGYGKEEIVEMLKEF

SEQ ID NO: 6223 - protein, 1058 aa, Methanobrevibacter ruminantium
MPVDKDINKVLIIGSGPIQIGQAAEFDYSGSQACKSLREEGLETVLVNSNPATIQTDMDMADTVYTEPLTAELVAQIIEKENIDAILPTMGGQTGLNIATELGKLGLLEGIKVIGSDVQTIADVEDRDLFANFMDRLDEPIPKCHAVESVEGALEAVEEIGYPVIVRPAFTLGGTGGGIAHNKEELIEVTTHGLDMSYINQVLIDESVLGWKEIEFEVMRDKNDTCIIVCNMENVDPMGIHTGDSIVVAPIQNLNDEVCQRLRDASIKIIRNLGINGGCNIQFALNPETNEYKIIEVNPRVSRSSALASKATGYPIAKISSKVALGLTLDEIQNDITKETPASFEPSIDYIVVKIPRWPFDKFKGIDRKIGVQMKATGEVMAIGRTYEEAIQKAIRSLDIGLHGFEYLEYTEDNLANPTDERLFHMYSAIKDGRSVEELAELSKMDAFFLYKIENIVEFENQVTKEALEDEEFLLKAKKLGFSNFTLAKLAGIEEEDVKALLDKFDIKPSYKMVDTCAAEFEAKTPYYYSSYDKGNELVKSDNRKILIIGAGPIRIGQGIEFDYCCVHSSLALKDQGIETILVNNNPETVSTDYDVSDDLFFEPLTYEDIMGIIEQVEPEGVIVQFGGQTSINLSVPLAKAGVKILGTPYESIDRVEDRERFTEVLNDLHIHQAPYGLANSFDEAKEAAERIGFPVLVRPSYVIGGRAMEIVYGVDELEEYMKEAVKVSPEHPILVDKFLEDAVELDVDLLCDGEDVFIAGIMEHIEEAGVHSGDSACVIPPQTIPEHLLEVIRENTRKLALELDVIGLMNIQYAVKLDEERVYIIEANPRASRTVPFVSKAIGVPLAKVATSLMMGKTLKDFNLTKEIKINHVAVKESVFPFLKLTESDSVLGPEMKSTGESIGIDENFGLAFYKSQLSAGMDLPKEGNLFISVREQDQPKIQPIAEKAHALGFNIMATKGTANSIFDVPITRVKKVSQGQPNIKEAILDGKVDMIINTPHGEQASKDGYTIRRLAVELGIPYVTTLAGARAALNAIAAVKENDLKVKSLNEHIANI

SEQ ID NO: 6224 - protein, 359 aa, Methanobrevibacter ruminantium
MGNEAKLALEDGTVLKGKAFGYETTTVGELAFSTGMSGYTESLTDPSFKGQILMSTYPLEGNYGVSEDWYQSDSVHVEGFVVREACKKLSNFGTKKTLDDFLKEFKVSGIEDIDTRDLTLKIREKGSLKAALATEEIDDDELVAKAREHTSITELDLVPLVSTPEIKAFGDFDKTVAIIDCGVKRNIIKCFLENNIGVALFPYDTDYQTILDYGVDGLMVSSGPGNPERLTSTIENVEKLLNRFPVFGICMGQQVIAKAFGATTYKMKFGHRGANQPVKDLNTGKVFITSQNHGFCIDPESLAGSDLELNQINLNDGTPEGFLHKELPLRTIQYHPESGPGPNDTKVLFEEFGQMIREY

SEQ ID NO: 6225 - protein, 249 aa, Methanobrevibacter ruminantium
MSHFDNSDFNKDLDVNNQYDPVKGNDKAFNGKYSLNFSISHNDPNFSNLAMSSSIISETTLEEDCILLKKKSLLKRKSLGSQKIYYREILELDLIKSTLSSLYSSIRIVYSKNGYSKRVLSLSSSDGFAVRWFYDALVVKYSYVKSGLDKKYDFNSNESDWIEANESNKNTSLSGDLTNSNDLNDSSIKEDDLNNSNGSNSGDESHNSLSSKQSKLSDFVSQMNKELSEEETRSLKKKMKFERCSSGEY

SEQ ID NO: 6226 - protein, 129 aa, Methanobrevibacter ruminantium
MFLDRFSLERNDLNFRKYNLAILIASLLLYLLNIYFLSSFGDFFKFYFDDLFAIMVLFSFLNLVFPYKIDNFWIIVIITIFAAFFWEYVALFIKPGSVFDYLDILAYFLSMVIYLILIYAFEGELNVSF

SEQ ID NO: 6227 - protein, 75 aa, Methanobrevibacter ruminantium
MEDEVIDVEDYEVKETAIVVSDDEEDNDYSKSSNDNNYTSNTTFRTATISLSNEKLIILALVAIVLIAIFLLTFC

SEQ ID NO: 6228 - protein, 76 aa, Methanobrevibacter ruminantium
MNQFCPKCGAKLLDPYAKFCSQCGTNLTEKKEINIDELPEERIDLREGMTNTNKGMYRYTKWGRRKKKPVNWDMEK

SEQ ID NO: 6229 - protein, 116 aa, Methanobrevibacter ruminantium
MRSLEEIGAKIEELNDKIAGIRAEDEENLTNELKVILAGSELQSIILTSTLTSKEQQVRDLLDKFVQRGDELNERYEEASIEDDAAAKNQLHAMIWTNDIRIDTLKWVLEEEDVGI

SEQ ID NO: 6230 - protein, 472 aa, Methanobrevibacter ruminantium
MVLICPILAEEAHATTVFLTSDNVLGHDEDMQMLNDIKQQIETKSNGQITVIVDENASNPGEGTRAMNADCDIAVTIAYACAGNLVDLGSYSVQSTKKIIYVNAGSLDLTSINFLRRSYDDNWSSSSFASLQNPGQYLYDSGITLLQPGQKFYGETDNGNLDHCSSEIDGYIADEVMKQVYSNGVIRKLDSDYINRHKLDPKYLAEDSKKIVDGFGTPMADSYGSYTTQQLLYMSASYLVGYSLDVPQQFAPPENPAEYSAFTKGTYSFNEYCEMADIVVDYMNEHGKAPDSISYKGATISYYDLVYNFALLTQDDFDAAHMNFPQNADFQKYNSNILLDILPIAIIIVVIIAVAIIIRKLIKKGRRGIKRIKNRGKDNNYYRNQASGNRSRKSRGGSRDNYSRNSARYNNSRGNQSSRKSRNSGRPRNSRNSRDSRNSKNKRSTKLFHKNVDLDQYDNSRSKEPKRLNKKR

SEQ ID NO: 6231 - protein, 309 aa, Methanobrevibacter ruminantium
MTSQTSEKENQELIDSLNNEIDYLKEILTSKIFEEEHLLNFTCRDIETDYALKFGVYKYKIKGYKLKIKKTKRTIELIKKMVNRQEINLFNKKLEEMQPNQAKINETKINKPRLNMKEIEDHIENEFKEEDIELETETARTNILIEEHRNNLDRRVPVREIDALYKECIRKMHPDLLFNPTEYEESLFFNAKEAYEDRDFEELEATYNLIHTHKIEETPQTVEEMERFIEHLEIHIKLEEREISNIINSKPYTQQKFLLNQKKVNDYREGLVKSLLEVEKEYIKCKRELTDLKSKNNLSYKLDLTKKDN

SEQ ID NO: 6232 - protein, 148 aa, Methanobrevibacter ruminantium
MLIREFLPSDLARVYQIEVESFSTPYDIPILKQLYDIGAGFLVATENGQVVAYIIFWLKEENLGHIIALAVDRKFRGQHIATRLLMMAVTVLRNCSVPKITLEVKAQNTPAISFYEKFGFKIERKVPNYYEDGSDAYVMYFYTDSIKN

SEQ ID NO: 6233 - protein, 137 aa, Methanobrevibacter ruminantium
MWDDLEEYIENLSNDYSSKNNRKTKIVEIGVGKFQTISDHLRENENIELIMTDIDPANENVVKDDVFNPNMDIYKGADIIFSIRPPGEIQEAIMKIRDEIDCTLIIKPLFNEDLNIKAKGMKLKNYNRASFYIYQKE

SEQ ID NO: 6234 - protein, 906 aa, Methanobrevibacter ruminantium
MIEEILKTYNTTIEGLTNHEAKERLEKYGPNKIQEQESDGLLKLFLSQFADALIFLLIIAAIISYLIGNHLDAVVIVIVVIINSIIGFIQEYRAENAMQELKSLVSKEAHVRREGKTKIIPAEKLTIGDIVLIEEGNKVPADLLLVESYDLTIDESLLTGESEEVRKNADYSNMGNLEEKIRNISSHYQEEELREKIVSMNSNVLSGRGTGVVIAVGMDTTIGKIATMIQEEDEETPLAKKVDKLGKRIGALSIAVCIGVFFIDFFQDYNIIEGFMTAVSLAVAAIPEGLPAVLTLTLALGMQKMAKSNAIVKKLSSVETLGSCTFICTDKTGTLTENRMTVREDFLLDNDKSVLISGLCNNAKYETVDEGEYESLEKDNNRARNSSEEDSKKTENSKEESQLIGNPTDIAAYNFAKGHGFDKLDPEHSYTRLDEIPFDSNRKRMSVIYKKETQNETEYYIFTKGAPELILNLSDRIEKDGNIKEIDSETISKINRKIDEMTNKTLRVIGLSYKQIDEEDYNKIKNSHNDNKIHDIQEELERNLIFTGLLGIMDPPRAEAIDAVASCQKAGIEVVMITGDHKDTATAIAREIGILSKEDCESLSKHVLTGEELDRLNDDEYRNIVEEIKVYARVYPEQKRRIIDILQSKDHIVSMTGDGVNDAPALKKAAIGVAMGSGTEVTKESADMIIQDDNFATIVSSIKEGRTIYDNLKRFLKFQLSTNIGAILTITIGSLLPIPTPFTPIQLLWINIIMDGPPAQSLGLEASEDNIMERPPERGELLDKKTLIKITISGIVMTIGTLSLFIYELGLNSPYGKTKAITMAFTVFVLYQLFNALNYRSKSNVKNKMLIFSLIGTFILQVLVIYVPYLQIIFKTCPIEPFDWILVIILSAIILVTDKIANRLIN

SEQ ID NO: 6235 - protein, 40 aa, Methanobrevibacter ruminantium
MNLIADIASGLFWMSLVMIGGFIVVIALMTLIGKGSSADF

SEQ ID NO: 6236 - protein, 102 aa, Methanobrevibacter ruminantium
MNQARIKLTGTDPEKLNYVCDQLKKISERTGVDISGPIPLPTKKLVVPTRKSPDGEGKATWEKWELRIHKRLVGIGADERAMRQVMKVNVPDNVSIEIELKN

SEQ ID NO: 6237 - protein, 413 aa, Methanobrevibacter ruminantium
MAKEKEHLNLAFIGHVDHGKSTLVGHLLLKAGAIAEQQLDEGEDKFRFVMDKLGEERERGVTIDLAHQKFSTNKYDYTVVDCPGHRDFVKNMITGASQADAAVLVVAANDGVMPQTKEHMFLSMTLGIKQLIIAINKMDMVDYSEDRYNEVKDEVSDLLRSIGRDPASTPFIPMSAFEGDNIKELSGNMSWYKGDALMTALDKLVPPEKPVDLPLRIPIQDVYSITGVGTVPVGRVETGIMKQGDNVIFEPAGVSGEVKSIEMHHETFPEAEPGDNIGFNVRGVGKNDIRRGDVAGHTADAPTVAKEFTAQVVVLQHPGVITVGYTPVFHCHTSQTACTFLDLTSKLDPATGQPEATKPDFIKTGDAAIVQIKPTKPMVMEEAANIPPMGRFAIRDMGQTVAAGLCLKVTDKK

SEQ ID NO: 6238 - protein, 735 aa, Methanobrevibacter ruminantium
MVMILSRRDKMIAKIKELMYQPKNIRNIGICAHIDHGKTTLSDNLLAGAGMISEELAGDQRFLDFDEQEQARGITIDAANVSMVHEYHGDEYLINLIDTPGHVDFGGDVTRAMRAVDGAVVVVCAVEGIMPQTETVLRQALREKVKPVLFINKVDRLINEVKLGPEELANKFIGIINEANKLITKMAPKDKKDEWLVKVDDGSVAFGSAYHNWAINIPMMQETGINFKDIIDYCNDENQKELAKKVPLADVLLGMVVEHLPSPEVSQQYRCPNIWDGDIESEAGQTMINTSPDGPLAVMVTNVSVDKHAGEVATGRVYGGTVEQGSEVYLVGGQARSRVQQVGVFFGPERVPTEKVPAGNIVYITGAKGATAGETICSPENKIVEFEGIEHISEPVVTVAVEAKNTKDLPKLIEVLRQTAKEDPTIHVNINEETGEHLVSGMGELHLEVIGVRINNKGVDILTSEPIVVYRETVAGKTPNPVEGKSPNKHNRLYLEVSPLDDSIFEALQNGDIKEGKIKAKEEAQQFIDHGLDKEEARRVWDVYNKSLFINMTRGIQYLDEIKELVIEGFESALEEGPVANEIAMGMKFTLVDAKLHEDAVHRGPAQILPAIRNAIKGGMMMADPTLLEPVQKVFINTPTDYMGSVTKEILNRRGQIIDMPTEGDMVNVEAKVPVAEMFGFAGEIRSATQGRCLWSTENSGFERLPRELQGQIVREIRQRKGLAPEPFGPDHYLG

SEQ ID NO: 6239 - protein, 186 aa, Methanobrevibacter ruminantium
MAKLFNKWDLDEVEVEDLGLKRYICLDETIVPHTLGRHVKRQFAKSNVSIVERLMNKIMRTERNSGKKNKAYNIVKEALEIINRRTKQNPVQVLVKAIENTSPREETTRIKYGGIGYQVAVDISPQRRVDLSLGFLTRGTLQSAFKNKRSVAECLASEIIFASEEDTRSFALQKKEEKERVAKAAH

SEQ ID NO: 6240 - protein, 141 aa, Methanobrevibacter ruminantium
MPGLFAAKKLKKNRQNFKWKDVDYKRRALRLDVKADPLEGAPQARGIVIEKVGVEAKQPNSAIRKCIRVQLIKNGKQITAFAPGDGAIGFIDEHDEVMIEGIGGPSGRSMGDIPGVRWKVSKVNNVALSEMVSGKIDKPVR

SEQ ID NO: 6241 - protein, 134 aa, Methanobrevibacter ruminantium
MRFIALFESMTGAMVKDCIIDDENSKVTFVVKNGDMGLAIAKGGTTVTKVKKAVGRGVEIIEYNEDPEQFIKNILSPAELKSIKIVTKNNDEKIAFVNTDSSNKRIAIGKGGINIERAKLLAKRQHNISNIVLK

SEQ ID NO: 6242 - protein, 99 aa, Methanobrevibacter ruminantium
MMDVERGIRVAVDTGDVTLGSEKSIQSLKLGKGKLAVVAANSPKEILEDVEYYANLSEIPFIVYEGTSVDLGSVCGKPFTVATLIINDPGDSTILEAMG

SEQ ID NO: 6243 - protein, 414 aa, Methanobrevibacter ruminantium
MAKYDISMIKDNNYYKEQCEHAEESLNKKWYSESILTMAITLEELTEELIKYTKNISDGKLSQRDKIWILKDNGITNYNIYNYLREANISRNKLVHGEIPRNYSNTFSMYKNFLKIVFWYDENYVIGKLNTKSKLKQYLNKVCDDSHILNIIEQEINDGAITENHQIIKRHNKELIDYVESLNIELEIKEKLIKDIYSGVTKNRSQIEEKIKREKKDPIIGVVNIVNTENMMKYTIQSTDIDKEVKENMEKLENNTHENKQLQEDYNKYGPESFTTETVNICKNEELSKITKEDEIIFNANKSYNNRKKDINPKIGIANIINTETLMKYTIQSTDLDKEIEENIGKLENNTHENKQLQEDYNKYGPESFTIETVNICKNEELSKILKEDEIIFNANKSYNNNKKEETGEKNHTL

SEQ ID NO: 6244 - protein, 584 aa, Methanobrevibacter ruminantium
MLGGINLNNEDIIIGIDFGTTNSAACIYKDEKFQIIPSAMGYDYFPSVVAVNENGELLVGHHAKKQMASNASNSVAEFKLKMGENETIKFNGEDKLPQEITSYVLGRIKRDAEAYLGKPINKAVISVPASFDNDARNATMEAGEIAGFEVEALVDEPTAACLTYSLTKNFLGNILVFDMGGGTLDIIIGAFDGSELVPKVTTGARFGGRNITMALRDYLQRDFEEQNGLKLEDYITPEYDPLIDLYNATEIAKIELSSTKTTNVHIDSIVMTDKGQRINLDKNVNRSDLNKLSDEVVKGSKEKVLEALKDAKLTKDDIDFLVFVGGPTKMPLIRESIEKLLGKSAAEGIDPMVCVAQGASIYKGGPITVGTINSLTLSVVINEKESDPLIPKNTPLPAEVTKEYHTMRDNQTSANIQIVEGESILAKENHTLHSFTLRGLPPRPKGEVAIQVKLKVDKNGIMGLSAKELSTNKKLSATFDSSNRMSSEEIKKAGLDNENLLSDYEEKIKQRNIINDAEEVIFEGKKLIENYSGHMLISDKNRVNENIEKLEGLLVIPKNFELIKLITKDLRNLIEKIESEDFYY

SEQ ID NO: 6245 - protein, 683 aa, Methanobrevibacter ruminantium
MVNKGSNDDFNCNNWELGRIFARKGNFTEADIRFEAELNHSLSPNSLVLDDHGHLLNRMGKYQDAIDKFRNLLNSDENYVSSLFGIGISYIGLNKLGDALKYFEKVNELDEEHADAWYYSAIIYGNPFYPKYDLNVAKIRYKNYQKSKESYINDPKYFSKPFDNLSWEELHDYYKCNSLFRIIEQSLDKGILDEFLNFSNDYKRLYCFDEEGLDKQFDIFRLFENDTPLADKIDKFHEDKNIEDKFESAGFEEDLIEGLSFKLGMMSIDDKKMLNELMDYSKSSQLSFNDINDLIRENVLDEDMSLDDFYENREYIVKNRIKKNNSEYERNVEKRVNTELKNQIAINKRLNDNLIEKDEVIEKLNDNLIEKDEVIEKLNENLNDKEEVNQKIEDKLRNNYELLSDENINQPEHRFDNYDFSTKEIKSSFSGLKESMDSYLEDMESYLNECQDVSSMNILSGINNQCYQDDLEYIKNECGISDVDLKTLKSAFKDFYNGKFGSASYNFSLERLRKTIGKTSELKKYRYFLKLTSKSREKILEEEDFNWLIIKNLKLKDYKNEKEKKINKGKKLKKEKYPIGWFNLGNICFDYANSQSVKTTVKAGNNAMDAYELAYFCYKCAEDSISNQEENSKYEFNFKDTKNEQEFKNNVVRMISNCEIKILQQEIKGELKKLDKLQGKFNW

SEQ ID NO: 6246 - protein, 545 aa, Methanobrevibacter ruminantium
MVDAEAKLDAIKKVEKVLKKNKIDFPQSYIDELASAYIRRDLTDKELNTLVLKVEEAYERAHIEAGEAVGTVAAQSVGEPGTQMTMRTFHYAGVAELNVTLGLPRLIEIVDARKKISTPTMDIYFEDEYKNDEEFVRKLANQIGKSTINDILADYDIDYFNYKIVTVLDNEKIESRRLDIDDIISRVQKTFKKLEIINYGDDELIEEEAKDIEDVDSDVEETDIAKVDKVDETGMAKADSDAEETGMAKADSEEDSETIQVSDEEVQEPSNINLKKSDENITLIFEPSKRTIRELRLLGDKVRDLQISGTKGIGKVIIRKDDAEWVLHTEGSNLGAIFKIEGIDKVRSTTNDIHEIEVVLGIEAARNAIVYELNRTLSDQGLTVDIRHIMLVADMMTSEGTVKSIGRHGISGEKSSVLARAAFEETGKHLLHASIRGEVDDLTGIIENIIIGQPIPLGTGSVSVTMKPDAYPITAGITKRGKGKSGGSASESKEVNSGIAKGGKGKSGGSASESKEVNSGIAKGGKGKSGGSASESKEVNSGITP

SEQ ID NO: 6247 - protein, 926 aa, Methanobrevibacter ruminantium
MSPDQIREMSVVNITRPDTYDEDGYPIENGLMDSRLGVIDPSLKCRTCGEKGGECQGHFGMIDLARPVIHVGFGDDIHKILRSTCNECGRVLLDEEEIEEYTEKLNELQEAGESTEDLIKEVYKICKAKKAKDVCPHCGAEQEDIKIVKPIGIIEVRKEYDENGELLTDANGNPVTTDYDLTASEVREKLERIPDEDAYVLGVNPEVARPEWMVLTVLPVPPVTVRPSITLDTGERSEDDLTHKLVDILRINQRLIENMDAGAPQLIVEDLWQLLQYHVTTYFDNEASGVPPARHRSGRPLKTLAQRLKGKEGRFRSNLSGKRVNFSARTVISPDPNISINEVGVPEMIAKEVTVPTYVNEWNIEDLREAILNGPDAHPGANYVRKYNDRIKDYNKVRVLDSNKETVAEMLTCGDIVMRHLKDGDIVLFNRQPSLHRMSMMAHEVRVLPYKTFRLNLCVCPPYNADFDGDEMNMHVFQTDESRAEAKSLMRVQEHILSPRFGGPIIGAIHDHISGAYLLTRDGFTVPEDDAFQMIRKSHLLKCPYDEYLKRDLDEKEYKQQIKEYNEKLKRKHRDWTGKELFSLLLPSTLNMNYRAEICRKCEECMAEACEYDSYVVIKDGQLTHGAIDEAAYGSFSGKILDNIVKEYGPAYAKEFLDRSTDLAICGIMKTGITTSTNDEEIPEEAIEVIDAHLDNAEQKVDKLIETYEMGELQPLPGRSAEETLEMRIVQVLGEARDAAGDIAAGYLTMGKQSPDDSYDHVMAVENHSVVMAKTGARASMLNLAQITACVGQQSVRGGRITRGYLARPLPHFRKHELGARAKGFVHSSYKEGLDPVEFFFHAMGGREGLVDTAIRTAQSGYMQRRLVNALEDLNVRSDGLVTDNKNQVIQTVFGEDGIDPAKSDFGKVANLDKLIDEMRIKDEGK

SEQ ID NO: 6248 - protein, 603 aa, Methanobrevibacter ruminantium
MVKAKIYINGKLTGTCDEPEEFVKEMRARRRSGEIHNEMNITYYDENHEIYIFTDPGRARRPLILVEKGEPLLKDEHIEAITKGELKWDNLFELGLLEYLDAEEEENSYIAMNLSQLNEDHTHLEIDPSTMLGICAGIIPFSDHNSSPRNTMEAGMTKQALGLYVSNYALRTDTRGHLLHHPQTPLVKTRIIDAINYDDRPSGQNLVVALMSYEGYNMEDAMILNKSSLERGMGRSSFFRSYEASERRYPGGQEDKFERPEKGVKGYRSEEAYKNLDEDGIVNPESHVESGDVLIGKTSPPRFLGEIDEFGTVAEKRRETSVTVRHGEKGIVDAVLLTETVEGSKLTKIRVRDTRQPEFGDKFASRHGQKGVVGLILSQDDIPFTEDGVVPDIIVNPHAIPSRMSVGQVLEMVAGKAGCMEGHRMDGTPFNDNVEGEIKRALHDNGFESAGCESLYNGVTGERIEAEIFVGVAYYQKLHHMTTDKVYARSTGPVQVLTRQPTEGRAREGGLRFGEMERDCLIAHGAALALKERLLDESDKYEAVVCNECGMLAVYDKNKNKMYCPICGDSETYPVEISYAFKLLLDELKSLCIFPKLILGDKA

SEQ ID NO: 6249 - protein, 520 aa, Methanobrevibacter ruminantium
MNNETWGLVDSFFDKYDIVDHHIKSYNDFVENRIQNIIDITEPITIENEKGNYTLRTGKLTIEKPFTKEADGSKSMIYPTEARLRNLNYSAHMYLEMALHDNNSDEEEELENVYIGELPLMLKSSICHLHGLSDEELVKRGEDPKDPGGYFIVNGSERAVVTMEEIAPNKIILERIDEIEDRHAKAIVTSIKSGFRARITLEYKKPRKSGVFLRISFPYVPGEIPLVILLRALGLSTDGEIISKISDDFNFQMYIADDLQVSEKDLKLDSDLLLSLSNEERDEYLQKAAIKYIGNRVAKGMTEEYRIKRAEDVIDRYLLPHMGIESDKRYDKAIYLAEMTEMLLQVIEGQREPHDKDHYTNKRLRVSGDLTEDLFRVAFSSLTRDMSYRLERSLSRGKELSIKQAVRSDVLTENIKHAIATGNWVGGRAGVSQLLDRVSYMATLSHLRRVVSPLTRSQPHFEARDLHPTQFGKICPNETPEGPNCGLVKNLALMCKISEGFDPEDIVNIISTMDNVDMID

SEQ ID NO: 6250 - protein, 82 aa, Methanobrevibacter ruminantium
MKFDILEHNAVPKHEILTKSEIKKIFSKLDYDVSQLPKIKIDDPVSKAIGAKEGDVLKITRESQTAGTFITYRLVDGFTANK

SEQ ID NO: 6251 - protein, 304 aa, Methanobrevibacter ruminantium
MTNEIIKENTEKIEEILNGIEEAMENVKAKSPLTHCITNFVTINDCANAALAIGGSPIMTNDSQEVAEIGNIASAIVINIGQVSQLQINSIKKSCEHANKTNTPIVFDPVGAGVSNIRNTITKEMVEFYELTAIRGNMSEIKAIVNLIDLEIKDNEKKDSAGKGVDVAESDIITRDNLYTNGLIVRELAKELETVVMASGPIDIISDGEYTFALENGDAMMPLITGSGCMLSTIIGTYIGANEPLIGAITASALMAIAGENAAEAVKKDNLGPGSFRNFLIDNLYKVTADDISKRANLFEIDLN

SEQ ID NO: 6252 - protein, 219 aa, Methanobrevibacter ruminantium
MFKAMKKEDKMNKSSIDYSVYLVTDHRGKTDEEILNIIEQAIKGGTSVVQIREKTASTKDFYNLALKAKEITEKYNVPLIVNDRIDIALAVKSDGVHIGQDDMPAKVAREIIGEEMILGVSASTVEEAMKAESDGADYIGSGAVFPTATKDDADSVSKEELKEIVNSTSIPVVAIGGITIENAESLKDAEIDGFSVVSAIMNADDPKKASEILKEIYNR

SEQ ID NO: 6253 - protein, 410 aa, Methanobrevibacter ruminantium
MAKFNTIDDFDVNGKTVLMRIDINSPVDPNSGIILDDTRMKIHAETIKELSLKGAKTVLLAHQSRPGKNDFTTFKQHAEVLSKAVGMDVKYVDSIFSSTAKEAILALEPGQILLLENVRFYSEEQLKRSPEEEATSVLVKSLSPLIDYFINDAFAAAHRSQTSLVGFTTVVPSAAGRVMEKELTVIGNALENVQHPCVFALGGMKADDSIMVTENVLENGTADYVLVSGLVANIFIWAAGYDIKSTNENFIEARGYLDMVDKCRDLIKRFPGKIIYPQDVAVSVLGDRADVTIENIPDASIFDIGRQSLIEYSKIIREAKTIFANGPAGVFEDPKFAIGTEDIINAIASSEGFSIIGGGHIAAACVNLGYGDKMDHISSGGGASINMLAGKPLAAVQALEASAELFNNKE

SEQ ID NO: 6254 - protein, 224 aa, Methanobrevibacter ruminantium
MSLKTPVVILNFKTYLESSGQKALDLANALESAGEESGITMVAVPQAIDIYRIKEETSIPVLAQHIDAVSPGGHTGSNLFESFVANGVDGTLLNHSECRMTLADIAEVVQKTKGADLISCVCTNNIETSMAAATLAPDFVAVEPPELIGTGIPVSKADPEVVEGSVSKVKAINKDVQVLCGAGISTGEDMAAAIDLGAEGVLLASGIIKAENPKDALLDLVSKI

SEQ ID NO: 6255 - protein, 304 aa, Methanobrevibacter ruminantium
MTFTKEEQAKLEYSGYRFVGEHGHAAAKTCHWTRKSIKNEGVCYKEQFYGVKSHRCLQMSPAVPFCHQKCSFCWRDLSQTRTEWEGEYDDPKTIIEGAIKAQNNLLCGFGGNKKADRKKLEESKRPTNAAISLAGEPTLYPEIDELIGEFHRQDFTTFLVSNGMYWEKLGSLENEPTQLYVSLDAPNEKVYNELCNPQIDDGWGKLNKTLELMPSFKNNTAIRITSVKGKNMFNTDEYAELINKADPTYVEVKAYMFVGSSRKRLSMDNMPRFHEVNDFAKEIADKTGRELTKYSEASRVVLLE

SEQ ID NO: 6256 - protein, 374 aa, Methanobrevibacter ruminantium
MKFFEHSAKKVFESEGIKILEGHVVYSPEEAMEVATEFGRPIVLKSQVLVGGRGKAGGIKFADNPGEALEIANELLKLEIKGEKVKHLLIEEKANIKKEFFLSVSNDRANRRPIIMASAEGGVEIEELAKTSPEKIIRYNVNPLKEFLPYEAREIARKMGVGSELISPLGSIIWKLYNVYDKYDAEVAEINPLILTDDGLIAADAKLEIENDALFRHQDLVKQNRFKQKDFAFVKLDGDIAVIGNGAGLTLTGMDMVTLFGGKPATFLDIGGGASEETINKALSLVLNYPPVKVVFLNVLGGITRADDVARGVIAALEANKWDVNIVIRLTGTNEEEGQRLFDEAGIPYEISLEEAAKKAVEMCNEIKAKEAGK

SEQ ID NO: 6257 - protein, 193 aa, Methanobrevibacter ruminantium
MFGKFKVKKYFSELNKAYYSNDFKKAIKYADIILEMDKNNLEVLKYKYNSLANMGDYENALVCIDEIITLEKSCMALLNKGTTLCYMNRIEEGFKLLDYVIDNCEEYEAAFINKCNFFFMLEEFDEALSLSDKILNMHPDCSNAYDTKSFIYYKREEYDSSLIYANKALEKNPNNNIALERKERLLSILNSKD

SEQ ID NO: 6258 - protein, 181 aa, Methanobrevibacter ruminantium
MRTEVRIAGFGGQGVIMAGIIIGKAASLYDNINAVQTQSYGPEARGGASRTEIVVSDEEIDYPKVTSPDILVAMSHEALIKYMGDLKDEGVLIIDPDMIVEEEIVDFVKEHKIKLYRAPATKTATEDVGLRIVANIVMIGAIVKVTNVVSVDAAKKAILDSVPKGTEDKNIQAFEAGYALI

SEQ ID NO: 6259 - protein, 287 aa, Methanobrevibacter ruminantium
MVEVKESPYKKYLREDRLPHIFCPGCGNGTVMSAFLKGLEGTDIDFENIAMVSGIGCSSRIPGYVKCDSLHTTHGRALSFATGLKVGNPDLDVVVFSGDGDCASIGGNHLIHAARRNINLTVICINNNIYGMTGGQISPTSPKGSFGTTAPYGSRDMPFNLAELVSAAGASYVARWTTTHPLQLSKAIQKGLENNGFSFIEVVSQCPTYFGRKNKLKTPLSMFQYIKENSVNKRRAEKMEEDELEGKIIVGEFANKPHDELTDSIKKLIEENSNMPLAIKSAFEELD

SEQ ID NO: 6260 - protein, 376 aa, Methanobrevibacter ruminantium
MAEERFVQGNEACALGAIAANCRFFAGYPITPSTEIAEQMSILLPKYGGAFVQMEDEIASVGAIIGASWSGLKAMTATSGPGISLMQENIGYGFITETPIVIINVQRGSPSTGQPTMSAQADMMQVRWGSHGDYEPIALAPSSVQEFFDFTIKAFNLAEEYRVPVTVLADEVVGHMREKLIIPDEIEIVKRTRPEKPDGQYLPFDAPMDGTTPMPAFGDGFNIHVTGLTHDERGYPDTNDPESHTKLVERLCNKVIMNRKDICSVKKEQCDDADIVIVSCGSPYRSVGAAMKKAREEGIKVGSLKIDTPWPFPEEEIAEIAKTASDIIVPEMNLGQMVHEVERAAKGEANVHLIGKIGGILHKPEEILAKIKEISG

SEQ ID NO: 6261 - protein, 68 aa, Methanobrevibacter ruminantium
MIIIDSKLCKGCDICIATCPKKVYSKSDKVNTKNVYLPFPEHEEGCTKCGLCELSCPDQAIYVEKEVE

SEQ ID NO: 6262 - protein, 42 aa, Methanobrevibacter ruminantium
MDLNDLNKNNLKQKKNHQVLKDLKINNLIIIFLDLTQYINNN

SEQ ID NO: 6263 - protein, 123 aa, Methanobrevibacter ruminantium
MGAKEKYFSNISNRERAIFEGAISMGALFHQFVGTPFNRKTAESLEKAMEESFTLQPCIDKVEVSIDLDRLDKAMTEFEYTSLSGDMLDVKIYSKVDDVLAVIRIEFIEELNYPLMYVEDIIE

SEQ ID NO: 6264 - protein, 253 aa, Methanobrevibacter ruminantium
MDLKNIKIATIITIIAFIIIGLYALTEVNYFSYKNVVEHDDINASVVIIPSIGVFEKINNVSISQGVYIDQMSNLPTKGDVVLFGHRTLQGSPFLRLDSLKKGDIVTLEWPEIGEINYTVKSSKIVPASYGLYLNESHMEGDIHNQEIYLITCHPLGSSAERLIVVGELNSTSLINETALEENPHASWAWYITLGFFALGLIVSFLSPEEERKIILAVVIIITIILVYFCLFPISSQIWADQLGWLNSMMGVN

SEQ ID NO: 6265 - protein, 643 aa, Methanobrevibacter ruminantium
MSNRFNSFKKGISKVKNISPKIKGNSNRKKNNSKNKRSKSTIEYIVPENSPLRKNSTDLDSDSGFFNSDYLDDLPEGVSYTRPVGDLSEGVTYTHPADDSYDLDGVDKRYAKYIFGDDLSDRNFKDPRDSSYMEDLDNNDGLNNEFGRNRNFHKSRNYADKRFNNDLDNNGENYKNDSYLDESYSDFSFKKDLDNGYLNGDAYLSNSDFSDFDKDYLDDSNFKSSHSKKASLKSNGIKSKLLNFKDGLLNKDDNSKSRFGKIVFILIFLVLASSMFYFFVYQPFQDELNLEKNAKLNELNTLYKGPLEAHENAYILKNQIESENDINELKKIDILMYATKDWRTYHKSKIVSSKDNFGRVMLAYGDENKNLIMSVKDANEFVGDNDGRVLSNIQFEKVDTIIVPVSISRLQASAGLISVGSIVDIYSLKDNYSYGGDEDSNFESSSALNESSEGLVENQSEDNEDLGGGEDISKMPVDSNPEEDSGFSQNGEPDVSGATVLAILRSKDSGVIDSSISKSNTLVEGNLTDPYENTSSYTNDVEELLKASVFNSYDDNKALEYYLNSYGIKLSNYERMSNLADLDSEYLVLLEVPRSDVSFVINNMDNLILTIPTEFAPNWVIGELNETYYDNIYNYDLNSSSFI

SEQ ID NO: 6266 - protein, 314 aa, Methanobrevibacter ruminantium
MRLKSVGMGYFLAVSDAISILNIAFGFLAILMVIDNNLIYASLCILLAVVFDSVDGWVSRKLNRVDPLGFGMNIDSLADIVSFGAAPMAILYSIGSSISSWAGYLIAIVCMITLVCGLLRLTRYNVIADKINYRGFVGLPIPATAIILVTYYLSGLFNIAVAAVLMLLASFLMISTIRYPKVDNYYLIGLGALMILLLILPIQVFIGPINLPALVLFVLALVYMFMTFLEFFIDDDMTFDRDKASDKVSNVREITESKVSSSVTNVKDVFKNMKDTINQISNEDLDVGLKEDAEEEKEKEEKEVKEAEIVEEVE

SEQ ID NO: 6267 - protein, 283 aa, Methanobrevibacter ruminantium
MIEERIQILRRAAQISTEDREEKVWCVIAGNDRLVDDIAYNAITRQGQSPDYPLGENVSITSKHSYKKFDCIMLKGETLKIRELKNKTHEEGGASLQITTTSLERQPNLLVVIGPEESMKRFVGQTSRQEVKIDILLEDHTTGFIKSEPKSTKIPKFLKNFFNPIIESSEVILSVLLISVKDEGDIDKVKGISQENSLFGIDLKSTIQDKEIARLKERKAREKAKKEEAEKKEKEEKEKAKKESEKKEKEEKEKAKKEESKEDKKEIEKGETKEDKKEEDKKD

SEQ ID NO: 6268 - protein, 356 aa, Methanobrevibacter ruminantium
MSIFGNEDAIEIEPTRVVKNSLGIDLGTLNTVIAKPSGDKFDLYQIPSVVAVKRDDPTAVLAVGEEAKKMLGRTPEDIIAVRPLKKGVIENIAQAQALLIRAMEIGINEGETVERIVIGIPGDSSEVEKNAAEEIGRKAGAEYVLVISEGLAAAIGAGLPIAEPMGTMVLDIGAGSTDIVVISLGGINDIETVRCGGDDIDNRIVELIEEKYNVAISIHDAEAAKIEVGMVHCSEEFENLNYEVIGKSLETNRPKKVVIDSMLVADAAEPIIKQVIGGLNLILERLPAELMMGIYNNTVAVGGSSRLRGIKERIFDESEIPIKISDDPMTVVAKGTAIVAAEPLALEPEVRLKAMK

SEQ ID NO: 6269 - protein, 79 aa, Methanobrevibacter ruminantium
MDMKTIYLSEEVYNRLSLLALESENYNDLIARLIDVYENSYFDELSDAEADFYNERIKYFENGDYEGIRKVDLKFFGKN

SEQ ID NO: 6270 - protein, 219 aa, Methanobrevibacter ruminantium
MNTLGLDEAGRGPVLGPMVVAGIVIPEKKEKIIERMGVKDSKRITPKRRAVLYRKLTRMFDYETVEISAKDIDLLRAKGVNLNQIEKLAMMRIIAKLKADTIIIDSLDIKEGRLEEEMQNFVGEGSKVIAEHKADDKYIVVGAASIIAKTKRDEIINQINKEYIRSTGNKDGIGSGYPSDPKTKNFLKNYKYDEMPDFVRRSWGTVQRIKEAEEAEKSL

SEQ ID NO: 6271 - protein, 205 aa, Methanobrevibacter ruminantium
MYLGRIISAGKTEDGKPFVAYRVSSRSFPNRQVKVLEDEAAIIPKEGFEKDIFKNSYIAYDCIKTVGDIAIISNGSQTNPIADKISIGMNIRDAMAYSLITLDYEKDDYNTPRIAAVVKGGDDFEAYIGIVTDSKILVEKIDEGAQFISTYEKNSPEDVVYSAETPDDACKFIFDEGAFAEFENPVCSVAAIFDGKWNISGLNPE

SEQ ID NO: 6272 - protein, 133 aa, Methanobrevibacter ruminantium
MAIDIKRHKEKLRQDEPEIKLVPFIDILFTLLIFLVVTSTFGAATVDDNGSGSGKPNMTDTTGDAEYYLIPVAGLQKVTVDGVDMSSEIKGNAIGVHARVLDQGDVQIKTSEHAIIIKAPPGMSPQEAVHTPE

SEQ ID NO: 6273 - protein, 279 aa, Methanobrevibacter ruminantium
MIIEMLTDGFNMIMEMLQSGGVITYIILLLGIYGLLISIRKIFYLRKISKIDATEIMGTITSSMEQGGAIEALKNISHYKNPVSRIMSEALKIGYKNKTEVEESMEQIFIVELSKMTNGISALKTIIELAPFLGLIGTVLGIWMTFKNLGVNPDAAAMAEGIYIALITTIAGLTVAIILMPLYTYIKGLIDDEMDKIELATKMTNWSYAVIKIRVYEKLPCVVEALQEADGIVSVKEITDPYSNIQISFKPSMLEKSISNIILEKCDVKSEITESKLRQ

SEQ ID NO: 6274 - protein, 254 aa, Methanobrevibacter ruminantium
MTLELFGLKKIPLVKKGDDIAKIIEDDLKEEDIQLENGDILLIAETLISKAEGNIIKMDDVEVSDKAIEIAEKCKKDPKIVETILQESNEIVAVGPNFIVTETKHGFVCANSGIDESNVEDGLATPMPENPDKSAKEIREYLEEKYQKEIAIIITDTQGRAFRVGAIGTAIGCSGINPLWVRIGDTDLYGRALETTEVATADELAAAASLLMGQADEGIPIVLIRGFDAFNILRDTETGIKPLLRPKEFDVFRK

SEQ ID NO: 6275 - protein, 169 aa, Methanobrevibacter ruminantium
MVEINYSCTNCDFSFLDKNLIFYLDTANETERIDNLEEILNDKTDNLELIETSLNKESSDKMTKALIAGFLYENYCPHCKQLIKTYVPEDNKLFTDQEMEKILKKEISKNKQENNNFKILFFDFKNTLYRDRRKILESNECPNCNKEMSLVISEKTPCPECGEKLKEDF

SEQ ID NO: 6276 - protein, 301 aa, Methanobrevibacter ruminantium
MITILSGGTGTPKLIQGIKEIYPEEEISVIVNTVENEYFSGGYVAADCDTVMYTFADMIDDQFFYGIIGDTFKIRNILIEMGTTELLKIGDMDRAIKIQKTILLEEGKTLSEIVEHQKNKLGVKAKIIPMSDEDSEIKIITKEHGELDFHDFLIKHQCEGEVLEVKYSDVKPSPNVIGTIKDADKVIIGPSNPITSIRPIIAIEGVEEALKEKKVIAVSPFLGEAAFSGPAAKFMNAFGYEASSKGVAELYKPFLDTFIIDNEDKDKKEELEKIIPNIVVANTFMKTIEDKINLAKVVLEL

SEQ ID NO: 6277 - protein, 253 aa, Methanobrevibacter ruminantium
MIQMTLIQIDNYGPWTVTPRPRTESDLQILQAELFADVQRQIAAKKGLVFFTRFDNLLAVTNGLNEEDHMRIQRSIRNRYPITISMGVGAAETAHEAQRLATIALQKEGGAQSSGRKEILAINNLIENPEDSFVQAAHIDINSVTETLTDIESAFDTSFMVNKAQHYLMTKLREKGALLFFIGGDNFMSPCNGLSEEDLTNILKEIDEEIGIGLKAGIGRADNMEDAAYMADIGLEIIREGNNKEWIHVIEEL

SEQ ID NO: 6278 - protein, 237 aa, Methanobrevibacter ruminantium
MAGITNAEFAMKLIPYGFDTVTIGGYNTDSESIDACEKIIARGRKEFNYPKEEIYSVIENEVNAIKDSFNVQVSANLRGSTPDPLIKISKIEKLDIIEINCHCRQEELVAVGCGQSMLLRPDLEDYIREVVKKSESKVSMKMRANVEGVDNLEIAKLAEDCGVDYLHIDAMKMGVRDADFYLIKEIAENTNIFIIGNNSINSISQAEKMLNAGANGISIARAAISGKLNFDLNQIKI

SEQ ID NO: 6279 - protein, 326 aa, Methanobrevibacter ruminantium
MAGTMKAWRINELGKPPVLEDVPIPEPGFGEILIKMKGAGMCRTDLEVIDEGFITVPFVGPFTFGHENAGTVAKLGPGVDTVEVGQNVIVDTLHACGKCQYCLSGRDNFCEVASARGLKEDGGMAEYMIADAREVAPLGDLDPTEYVALADAGLSPYGAVQTAKPFIPNNGTAVVIGVGGLGFYCCQYLALTTSARVIVVNRSADKMAKMTNFGADELVVLDDNAYDKIMELTDGKGVDAVFDFVGRDNTLELAAQITKGLGLISILGLGGGTLPVSWTTVKPGVMVRLTQGGTITDLYEIMDLAKAGKITVQAQKYPFSKVFRSS

SEQ ID NO: 6280 - protein, 85 aa, Methanobrevibacter ruminantium
MSKLSKLPNIGKVLEKQLNDVGIKTDEDLIDLGSKEAWLKIKEVDDSACLNRLMALEGAIQNIRWHNLSQEDKDNLREFYNSQKI

SEQ ID NO: 6281 - protein, 219 aa, Methanobrevibacter ruminantium
MVRPKIERRIVKKPSYTCIQHGDISREEDFESIKMNLDEFEAIRLGDYHNIKQKEAAELMGISQPTFHRIINSARKKTAMSLIEGRKIEINNENFYSEDKIYICNNCGFQWNNPKKEYANCPDCKSENIERIKVNLNESDYINNNPNKIKTNSQICDIDNTDVPLNERKSFGGPGSGRGPSKACECPNCGHIAPKIKGFPCRNIKCPECGTPLCGSKHK

SEQ ID NO: 6282 - protein, 536 aa, Methanobrevibacter ruminantium
MSFITLKNINKSFNGEPVLKDINLTIEEGSTLGILGRSGSGKSVLINMLRGTKEYAPDSGQVLFDLAICENKKCLHVEPASKAGGKCPECGAELQAKQIDFWNAGRLEKAAIRRRISIMLQRNFALYDEQTVIDNVLNAMGDEGRYEEENIYNAIDLLEMVQMSHRVTHVARDLSGGEKQRVVLARQLAKNPMLLLADEPTGTLDPQTAEKLHQTLIEGVKDEGISMVITSHWPEVMNHLADDAIWLDNGEIIEHGAPDTIVENFLKTVPKAEQVEKIEHTEEIIKVQDIKKHYYSIERGVVKAVDGVSLTINQGEIYGIVGLSGSGKTTLTKMMIGLTEPSAGELVIRLGDDWIDMKKPGPLNRGRVTPYLGLLHQEYSLYPHRDVLGNLTDAISLNLPAEFAKIKAAHILETVGFEKDKSMSMLTKWPDELSGGERHRVALAQVLIKEPNIVVLDEPTGTMDPVTRIIVTNSILKARDELDQTFVIISHDMDFVLDVCDKASLMRGGKLLSTGTPEEIVAELTGEEKADMIKDH

SEQ ID NO: 6283 - protein, 160 aa, Methanobrevibacter ruminantium
MAWDDAPSHICRGGDVRGLAFCCPPVKPCPVMNALREVGITPQEFLEIKQKFARETRLGEGPATCFGSLVWCCKTSKPCPLRDMTLNQIKMTEDEYMTLKKQLSEEILKAGKPKDNSAEAMALAETFNISVEEAKKTLEDCDNDLRMAVKLLKLKELDNE

SEQ ID NO: 6284 - protein, 207 aa, Methanobrevibacter ruminantium
MGLTSLFLEVENKNVFILGTGEVATRRAHRFLDKGANVILAGNSIDEELSKKGAILTPIKDLEELVKWSDIIVTASGDDELCEYIASISQGKLINRADKPEKGNIIAPTSFLIDDIEISIYTNGQSPLMARELRKKIQSIITEEDILEIKLQDYARKLLKEKVEDQKTRKQYLLKILNNTQIKQCLKEKNLDKAKGLAEEIINSEFN

SEQ ID NO: 6285 - protein, 398 aa, Methanobrevibacter ruminantium
MIINIRVDHTLADIETMEKVSKDLKELFSNLKENFNISEYIEINTCNRYEYFLYTNVDDDSLDCDNEYVIIEYDDSAILHLFRMTSGLESMIIGEDQILGQIKDSKKKSEKEGHCGKTLDTIFTKAIHVGQVVRNKTKINQGSISIGSAAVDLAEEHLGDLQDKHVLVIGAGKMGTLVAKALAEKNLKAIFVANRTYYKAVKLAEELDGEAILFDNLEEKLLNADLVISSTGSPHPIVNKERLMKVFGDEVPEKMIFIDIANPRDIEDDVKELGIDLFNIDDLRGIAEKNKKLREKEVIAAEKIIENEFNLLKESFNLIEINSILGSLRESMEEIRQRESQKGIVKLNAVDARDIKVIDKMTKSIVNKIFYDISEKVKISAKNNEEDVIKMCEAILKR

SEQ ID NO: 6286 - protein, 375 aa, Methanobrevibacter ruminantium
MKSDNKSSKIKKSEVYIKSSSDSIDKEAEELILESAGYPFNFALLEGPHLEISDNVLFEQYAIEQWSGTLVKTGSYLFDQKIIPDYAFKVLKVFPENSIISENTSIVVADVDKDKRSSIKSKQYDVHFDDIVGQENAKSKSKLIYKYLQNPDKFGTWAPKNVLFYGAPGTGKTMLAKALANELDIRLYLVKSTSLIGEHVGDAASRIHELFEAASRNAPSLIFIDEIDAIALHRSFQSLRGDVAEIVNSLLTEMDGISPNDGVVTIAATNNPSAIDFAIRSRFEEEIEFKLPSDDERREIIMLNLDTFPLDYDLDIEKLVKVSKRMSGRDIKEKLLKTALHNAIINDKQTVDMDDVAFALGVNKYKEEEVKGMFE

SEQ ID NO: 6287 - protein, 278 aa, Methanobrevibacter ruminantium
MKDKVIFGPAGKPIDFKGKAFESPEYLGPRGLYAFEYQSTYGVRIGESSAIKLRESAERNGVLMSMHCPYYINVCSKEEEKIDSSIERLIQSAKVGEYMGAYRLVFHPGFYSNRKADVCMDLAKETYRRLLLRCEEEGIEDFTFAPETTGKRSQLGNIDEIIEMCASFDHFEPTIDFAHVHARGRGILNKKDDYNCIFSKLEDNLDIDRLHCHFTTIEYSHKGERKHHTLAEGDEYGPHIKDLLLNLIENDWKATIICETPLIDQDALRMKKLYDSLI

SEQ ID NO: 6288 - protein, 338 aa, Methanobrevibacter ruminantium
MKSVAINGFGTIGKRVADAVAAQDDMKVIGVSKTRPNFEARTAVEEKGYPLYIGIPEREPLFKEAGIEIAGTVEDMIQEADIVVDCTPGNIGPQNLEMYKKAGVKAIYQGGEDHELTGLSFNSFANYDDSYGADYARVVSCNTTGLTRTLHTLNPLVDIKKVRAVMVRRGSDPSEIKKGPINAIVPNPPKVPSHHGPDVQTVMKGIDVTTMALLVPTTLMHQHNLMVEIGNDVTKEEVIEALEKRSRVMVVEAAAGLDSTAALMEYAKDLGRSRNDLYEIPVWKESINVVDNELFYMQAVHQESDVVPENVDAIRAMLEMESDNEKSIAKTNKAMGIF

SEQ ID NO: 6289 - protein, 183 aa, Methanobrevibacter ruminantium
MVFMIDLDQLKKEINDLTKDYKGFEFKYIDTDSIVVEPWTRLKCQYGCPNYGKTLVCPPFTPKAEEFIGMVNSYKTAILFQISLASLEDDIGGITKVSVDIENLCAHFGYYKAFGMGAGPCMVCKSKGEECSLDACKYPNEARPSGEACGVDIHKTIENNGYDILGIDEENNSYFCYGIVLLE

SEQ ID NO: 6290 - protein, 361 aa, Methanobrevibacter ruminantium
MANTFFSKIVKSLWVLASFIPTLNGLGFAYIGAKEFKNNWIIEGVIYEIPWFLLFIFVNNEDLGVFFATIGLLGMAVSFVRSLYVYYKHKDILIDDDAESRISTEKSITSFWVIFSVIIFLNGLGLIYVGFKRNVRQWILEGAFFEFLWLLFFITPSNKALNSFIISLGFIGMILSVIRTFMVYFEEERMDGGFYSPTAVKKEPPAQNPIENTINSYSENNLSDDDIVPEFKGYKTQVEDLKDAFKTKEDNVNNLLSKRFTKEELSYGRFKSVVNEFHKTFYSQADSTLTMINLAPEYSERVDETIKNKIGLMDSLLGEMNNLLEELILNDGLPEKSDEEITELFENMHNLINSVDDYNKE

SEQ ID NO: 6291 - protein, 114 aa, Methanobrevibacter ruminantium
MNFNKKILLIIALVFIASVGIVAAEDATVDPYTFTIPDDYTIATSDDTTCAMQKDATHAISFATGVSDDIEAAKQNFISQGKTLLKEESMNYNDMDITLQAFSADVDGTTIICL

SEQ ID NO: 6292 - protein, 550 aa, Methanobrevibacter ruminantium
MENNDLENLRKLIQDILDFAKTHSDTLDEDSAPLWYFAKGKFNITLDALLLNDILCFLSFLGLSDGNISSDELNFINYVLNFNFTKSDLELYLKNNLIDDYSESLPPSFFVFYEFDKFALENGKLTESIVDSLFEVFNGIGHLFIALDNESSLEKNILDSFLDNIKKQLADLRGFQYELMVLALKNDLIDNMLDTNSIDGFSDSNLDTSFDSDLDNPQLDDSFLDKVDDFFFNNESDDDFVSSVDSSNDDLNMGGDDSLDSDSQSNSSSPSDSDSQKDNKKSIQESLDKLNKLVGLEAVKSDVNSLINLIQIRKLREQRGIKQPDMSLHLVFSGNPGTGKTTVARLLSDIYCQLGLLSKGHLVETDRSGLVAGYVGQTAIKTQEVIQEAMGGILFIDEAYALSSAKGENDFGQEAIDTILKAMEDNRDDFIVIVAGYPDLMDEFLHSNPGLESRFNKHLYFEDYNPQELFDIFVSMASETNLKLDEKAEEFLKGHFEDVYNSRDDNFANGRYVRNIYEKVLSNQANRLVGMEDISDDDLNTLTLEDFKDF

SEQ ID NO: 6293 - protein, 658 aa, Methanobrevibacter ruminantium
MGIKEFFLNKEKRKIVAIEKDLNNNLSILGGYSMGIKEYFIEKIDIIFILISIIAIALDLLGVDIYGISLIWIAIIFCGIPIFKEAAIGLYTEFDIKADVLVTIAIISSILIGELFAAGVIAVIMAIGGYLEEYTVSKTRAGIEKLVDLTPRKGRLIENYNKSNESEREISADLIEVGDILKVVPGETVPVDGKIISGETSIDQSVLTGESIPVDKLEGDEVFSGTINLYGSFVMKAIKKGEDSSLQRLIKLVEFSNPNDAEIVKTADKWATLIVVIAFICAVLALVFTGEIIRAVTVLVVFCPCALVLATPTAIMASIGNLSKRGILVKEGITIEKLAKVDRVVFDKTGTLTYGKPTLTDVIVYDEETEEKELIHLLASLENLSEHPLAKAIVKYYMDNYDDTLLKLSDFEMIIAKGVKANLNGSNICAGNLEFFKSLGIDIPEEFIEEIVSPSLEKGATAIYIAKDSRFLGCALLSDVLRKDASDLVVQLRRLKVVSTLLTGDNKQAAEYIAKEADIVDYQYNCLPEDKISTIKKFQSLKLNVAMIGDGINDAPSLRQANVGISMGGVGSNISIEASDVCLVSDDIKYVPHLLALSRKTIRTINRGIAFALILNILATVLAMYGMIGPIEGAFVHNIGSVIVIIYSSLLLRYEYAN

SEQ ID NO: 6294 - protein, 86 aa, Methanobrevibacter ruminantium
MDSENLHRRLKKIIGQLNAIDRMIDEDIPCENILMQINASKSALHRVGYIIVEGHLDNCIKNAMEKGDTDEALADISSILEYYSRL

SEQ ID NO: 6295 - protein, 149 aa, Methanobrevibacter ruminantium
MSSEKRNSKDQSYLGFELIEVEDYYLLSNTEKLLETVKKDWFKSLMDEIRELVGKHYPDFVIYLAYVDHGDDGTILGYVNVREDDNKRDEEYSEVALNKEMLEICEKHKEDKILFVTIPRKRKSFIKLKKGSIREHFKEALLKLGAKPL

SEQ ID NO: 6296 - protein, 362 aa, Methanobrevibacter ruminantium
MTGESTHEHTHKEQRRQYTFNKLKAFGQEIIEDIEKNKVPTLKIPSRGTGNIVYDEDKRYYILGDRYGRRSLGNVKQIRKLGQMVYVANFCKDLVQRDKTATIREMYYISEGWGIEFNTQQESNIVGEDLEVALGATREDLGLMPEEDGASVYGDITLLDGDYEINAARAGKSGYTISPTIDQVELLDCGADFLLAVETMGMFHRLVQEKAHERYNCLIVGLKGQAARATRRFIKRVNEELGLPVYICNDGDPWGFHIAQVIISGSAKLAHVNHDLATPDAKFIGVTASDIQNYDLPTDPLKDIDVLRLKELSKDPRYQTDFWQTEIKKMLKLGKKAEQQSFSKYGLEYVVDTYFPEKLGLN

SEQ ID NO: 6297 - protein, 599 aa, Methanobrevibacter ruminantium
MSQQAQELFENFNELTPSEFFRKNKQMLGFSGKIRSLTIVFHELITNSFDAAEEAGILPEISIKLDRLGKDHYVLTHSDNGPGIPEEFVMKVYCQMFAGSKFRNIQSRGQQGLGCSGCVLLSQMTTGESTHVTSGWMENGELKGVKMEFKMDVKQNKGDLIKKSEFTPTGTGVCIKLHFKEVSYSLAEQGAFEYIRRTMIANPHAKITFRDPSAHKYIFKRAAEIVPVLPQEVLPHPKGVTADDIITIAKFTDKRNFKSMLTSSLSRMSSKKVSELQELTGIDMKKRPKNMEWAEAEKIVEAFGKMKFMAPPTSGLIPIGEEQIEKGMKLILKPEFITTITRSPVTYKGGVAFIVEAGIAYGGDAGRIVNEQRKSEILRFANRVPLTFDAGSCAITEALRSIDWRRYGLRDLDNTPLTLFVNIISTQVPYLSTGKQSIAPEPEIVHEIRQATMKIARRLQKHIRSKKAEKEKAMRSKIFEDYVPVIIEEAASLAETEVPDYKPVLAKVTRRALAEIMGEKVEEEEEEEDFVDSLLEELDEFGHTVDKEHSARKDRIQESDLDEAFIDDEKPRKRSKKSKKSEGADEGQSTLFDSEEQEE

SEQ ID NO: 6298 - protein, 203 aa, Methanobrevibacter ruminantium
MNELPETDYLRVPSDRIGALIGTKGETKHLIENATNTHLDIDSDDCTVAIYPGENMEDPLGVWKANHIVKAIARGFNPHVALKLNKDDTYLEIIKLPLYVGKSKKAMARYKGRIIGKDGKTREIIVDMAEVDMAIYGKTVSLIGELDNVMVAKEAVEMILNGSRHKSVYAFLENKKNERKMKEFKEVVGIEKDEIEFRDDLDD

SEQ ID NO: 6299 - protein, 77 aa, Methanobrevibacter ruminantium
MSLLDNIDKIHTTEMGVGRIQRNLGIDVDPVEYCILKIKDKDAVIEEKGKNYYVTVDDCIITVNKHSFTIITAHKKK

SEQ ID NO: 6300 - protein, 259 aa, Methanobrevibacter ruminantium
MDDENPRVAKADAEVQKLISRKRTKDADDRKVSSEIFDKATLQVLYKLANQGHLDVLNGAISTGKEANVLKGIKEDGSIVAVKIYRIATSDFKKMQYYIAGDPRFNVRSSNKRQLINNWVNKEFRNLTRLKDAGVNVPEAITSLNNVLIIEFIGDEDGNPAPTVKNLPPQDPAHFYEQLVEQMDRFINKANLIHGDLSSYNILNFDEKPVIIDVSQSVVRDHIIANELLARDIKNISFEFSKMGVDTSIEDLTNRLIKD

SEQ ID NO: 6301 - protein, 106 aa, Methanobrevibacter ruminantium
MFRRQILAKPQNNQQEYRRVRTPKKGEIPGVVEQIMGHGKLKVRCADGNIRMTRIPGKVKKRIWIREGDVVLVKPWDFQSDQKADVIWRYTRTESNWLERKGYLKM

SEQ ID NO: 6302 - protein, 404 aa, Methanobrevibacter ruminantium
MGVEFLNIIESDEAKEIIKEKFEECYTAQSEIIDIAESANRITYSKIESKIDFPPFNRSLKDGFAIKAEDSYGVNEENPKKLKVIDFLEAGSFTDKTVELGSCVEISTGAPIPDGADAVIMVEFSYKSDENPELEDDEVEILTSVTPSQDIGQKGSDVKKGQVILDENILLNPPKIGVIAAQGIDTVEVYKKPKVGIISTGNELLTNQEELRPGKIYDVNSEMIRAGVNACGAEGECLGIVRDNYDDLKNKITESLKECDILLCSGGTSAGVGDNIRHILDELGTVYIHGITVQPGKPTILGVVDGKIIIGLPGNPVSAIVIFNVFVAPAIKKLAGFKQEEEQKTIKGKLAKRIHSPIGRMQYQLVKVEGDSVIPIFKDSGAIFSLASAAGYTKKSQKQNPNLV

SEQ ID NO: 6303 - protein, 155 aa, Methanobrevibacter ruminantium
MEIQEKTIEDQKVAIMNYKGYLKDMEILISKLTGWIELEEIETVGDLFAIFYNNPRTAKEDEVVYDVGIPINPELDPDETEEIRIVTIIEHKVLSGLHYGSIDNIQETYNIMAEYSIENKYDIIGSPKEVYIKSKFDVEDEEDMITEIQLPVIKM

SEQ ID NO: 6304 - protein, 102 aa, Methanobrevibacter ruminantium
MAEEEKSSKKKSKRELEKELNSKVDKIIEKNFEDFKSQDELEDFIQKAFDDKASQYNKKIELKEKELDKKFKASRENDNKKIDRKIREMDRKLKLRYKTMLK

SEQ ID NO: 6305 - protein, 437 aa, Methanobrevibacter ruminantium
MIYEIAEEAKREISKYSDTYEIYIDRTELLELDSQKTELNFAKEDLSLGVGIRIIKDGAIGFAFTSDMDEIAKTCENAYLNSKLNTKDEFYSFAEYEKLPVVKGTYDKRFKDLDLDELTGSLKSVLNSVEDYGCQVSSGGFSAAEGETLIINSNGVEAYDNSTGFAIGVSINAVKDGELTTAYDSDSSCLYDLDGMALVEDICNLAMDSLGGEDIETSDRDVVLDYHAATGLLSTFLSGFNADNVQRGRSRIADKMDEKIITENLSIYDDSTIDGGLNSSRCDDEGTASKRTCLVEDGVLKGFLYDIYTANKDGVKSSSNGFRSSYLGTPSVGASNLLFDFKSHRNLDDIDDAFLVTDVLGAHTANPITGDFSVEASNSFLVSNGDKKPIKKAMISGNIYDLLADAEAVGTETKQRGSFIIPKIFLPNVRVVGNNSN

SEQ ID NO: 6306 - protein, 234 aa, Methanobrevibacter ruminantium
MVKIEAIAVDVDGTITDGRRRVCHSALDALRKAEDAGIPVIIATGNISHFSYAVATLVGTTGGLVCENGGVIYHDGYNDNRVIVLGDISKAQKAYDFLFDKFGKDIPFRIVEDSDARVSEITFYKNMSSEPLKEMLKDFDVEVYDSGFALHLTDPAVDKGTGLAKLANLVGYNVENIMCIGDSENDIDFLLAGGFKVAVANACDELKEIADYVCENKYGDGVAEAIDKFVFNQE

SEQ ID NO: 6307 - protein, 317 aa, Methanobrevibacter ruminantium
MMASMKEMADAILKRINDLAVPVKIMHVCGSHEHTIMEHGIRSLLPPEIEIVAGPGCPVCVVPSREIDECLQLVEKGVTVTTFGDMLRVPGSNGSLAEAKAEGADVRVVYGIPNAVEIAEKIDNDVVFMSAGFETTAPATASELLKKPPENFSIISCHRLIPPALDFLINSGETNLNALIQPGHVCTILGTEPFEKFSTEYGIPQAVAGFNPLDILMSVYMILRQIDRGEPRIDNEYKRAVRTEGNVIGKEMMDEVFHVESREWRGFPKIPDSVLEVNDEFSQWNAREKYDIEVKDVTEAPKGCICGPILRGLAKPY

SEQ ID NO: 6308 - protein, 574 aa, Methanobrevibacter ruminantium
MYKDNKILVVIPARGGSKGIPRKNIRFLGKKPLIAHTIEMGKASKYVDELVVTTDDEEIKFISEKFGAETIKRDGKLAEDSIPLDPVIYDAAIQKEGKSNEKYDVVITVQPTSPLLKTKTLDLAIEKLLNPDNENKDYDTIISVVDDRHLSWGYDEKEKKYFPLYKERVNRQYLPKAYKETGSIFATRREFVKEDSRLGENIGLIEVSKQESIDIDNYEDWWVAERILNKKKILIKADASHEIGTGHIYRGLSIASKLVNHEVIFLLDEAQELGIEIVKNNNYPFITHNSNKGKGKEADEKAKEEIIEKIVEYDPDIIINDILNTNSKYTKTLRDNGFFIVNFEDVGGGVKYAHLVFDALYEHKIPLKNLYSGHRYYILKDEFYYQSFKKIDKEVNRILLTFGGTDPNNLTEKTLEAILESKYQNEIEIILGLGYSKKEEIQEKYKDNERISIYENVKNMSEHMHNADLIFTSAGRTMYEIASLGVPCICLCQNERELSHIFGNIEHGFINLGLGSRVSKEDLIRTLENTINDYELRIEMNKRMGNVDLKHGFDNIRKLIKKEYKNWKAEQLNK

SEQ ID NO: 6309 - protein, 279 aa, Methanobrevibacter ruminantium
MESKDITNIEEIIPSNDVYPLVNLLFQSKLFKSKEINTNSLAISCLDLIDKNRIKITFNEEIESIKISKNPLLKTKGQLEKELELMKNIKFTINSKEMKKLDKRDQIILKMFKDINKNHEFDLKSMYDKILKQDIAIKFAKYFKDYSKSLERETKYSLENYKDLIKDGEFTFKGNEISNEWKEFKSSLKSDKSLYSQDAEIIDKYLIYGRCLEIEKDVLKNIEKANPDYDSELYRFLRHNGADLLKLIFDKALANSKIERKGDGSVPVGNSKYFVPGFG

SEQ ID NO: 6310 - protein, 356 aa, Methanobrevibacter ruminantium
MTIFNEEPFLIAEIGVNYYDIAKKENISNMDAAKLMVKEAHDAGCNAVKFQSYKANTIASKNSPAYWDTNEEPTQSQYELFKKFDSFGEAEYREIADYCKEIGILFLSTPFDFDSIDYLDDFMDVYKISSSDLTNIPFIKKIANKGKDIIISTGASTLDEVKLAIETIENANDKYKKGEAGIGIMHCVLSYPTANEDANLLMIKNLKDLYPNYEIGYSDHTKPDENMLILTTAYLYGATILEKHYTLDKTLQGNDHYHGMDPDDIRKFNKNIELIKTINGQYDKIPLPCEGESRKQARRSIIAKEEIGEGTIITEDMLTYKRPGTGISPSEIDNVVGKKAKITIPEDELIQYDFLE

SEQ ID NO: 6311 - protein, 508 aa, Methanobrevibacter ruminantium
MTFTVKEICQHIWSLEEKYELNHKEIQGCYPWQLIRMYLYYEITRKTNVFESAQQSSLSLADKVNTFLPFIKNSILSNPLSGKDTKDVLIFDHPRKVILNGEYQDIYSYFLKDILIKNNKSFETIESPYLNNHFRSSANKKENNVKYNDRILLGSFINKTKNRGKLPFTDEEKDFIETIKRELESAFKIEINLFNIIEDHILNFQYDYKKYIELLEKRKPKQVYLVVAYENKALVAACKKKNIEIIELQHGTISPYHLGYSYPKNTMLMNNTIKEIEYFPDKILSFGDYWQNSSSFPIESDKIISMGFPYFEDNSKTFMKMADEDKNKKQILFISQGVIGKYLSELAYELAKELNEKNKKNDLENSENNESDLENNNYTFIYKLHPGEYGTWRENYEYLNKANEFDNFKVIDKSEPPLYELFAKSNYQIGAFSTAIYEGLAFNCKTFIIDVPGVEYLDDLIDKNIVKKVKSSEELINFIEDEDNLDLKEYDKDYFFKNFDESIFDEIL

SEQ ID NO: 6312 - protein, 480 aa, Methanobrevibacter ruminantium
MSEYVRFIQRIGLVGITNILISLSSLIFIPIITKSFTTAEYGMWAQVNTTIALVPNIANLGLPYTMVRFLSAEKDKEKIRDSFYPMISLTFISTVIICLLFLIFGHPIADALFNGSMQVLYITTAISFFACMNLMLITYFRTFQEMKRYSLFLVLQSYIGVFVSIYLTYAGYNIETVVLGLLTGYAAVFIMMAFLIVRHLGFSFGKWSNLKEQLAFALPTIPSNVSSWVVDSSDKYVIGILLGSVAVGCYSPGYALGSILLMFLSPFAVLLPTILPEHYEKGDMAEVDKYLSYSMKYYLLLTVPAAVGMSVLSKPLLYIITTPEIALGGYMVTPFVCLGAIFMGMYGITNNILILEKNTMILGKLWIIVAISNIVLNLILVPYLNIIGAAIATLLCYMLAFGVTAIASRKTMRLPFNRKELVKILIASAIMGAVVYMMNPSGIVNVLVAILVGVVVYFAIIFVLKAVTRKEIGIFKDLVK

SEQ ID NO: 6313 - protein, 168 aa, Methanobrevibacter ruminantium
MISKIFNIKQSIKRAYYTYRVKRVSKSCGDNLTVNNYSYVTPKTSLADNVNFNGMKIQGTANVSIGSNFHSGIDCMIITDSHNYEGEAIPYDETVISKDVVIEDNVWIGNRVIILPGVCIGEGAIIQAGSVVVKDIPKCAIAGGHPAKVFSSRDKEHYEKLKEEGKFH

SEQ ID NO: 6314 - protein, 661 aa, Methanobrevibacter ruminantium
MKVVVCENCGAKYQLNDDDDINAFECSNCSGSLKELESFSDEEIPKQSDESSGSDSVLVYCINCGLKFQIEKDDNINDFECASCGGPLDYLSNKSEESQESQISQDSQGSDSYYETVSYVQSDDIIPIHADPNYSDSDDIIPIHAESDSQTPYYEELIESDEIYANQYEDDDQYYVSEYEKVLQSDADSYYEDEYDDQYYQTDLQEEGSGQISLDELYYTSEYPAYDGTDEIIPIHAEKRYMEDSQDSGFAYGPNGKYAEDYLEEEYIEEEYVDSVEEESPYVEVIDIPEDELPETPVVLTRQVLSEEDQRLFDRVQNQMVFDSPEEYEAFKAARYKYYVGLLDILKEEYLLSMENEFKSGRSVKNLIKKGGETVKQSNLYADDSDSLVSPETVELMKSNRKYEPKKSNADVIIIAGFFIVIVSLAYYFFVSQIMYVLIAFALGLVILAYGAYKKYVFNEYIARGRIIRERLLALPNDFYVFYAVQPPQSKDIINHVVVGPTGIFTILSQRYDSKDYKNKLKSDTETGDMLSESASIQDYRQKKNTLELQTDYDDNQSRFQFGNEEIHFTQNSQIKRKALELNEDLAIFLDKKGFNGIYIEPLIGFVNDDLAILNVILTNEDLFIDELFNKVIRGRKRLDELTVAKIARLLSYYSANCDVY

SEQ ID NO: 6315 - protein, 390 aa, Methanobrevibacter ruminantium
MNILHVAHFFYPCLSAGGVVNASYQIALNQVKDNNVHVYTSDSCKQRLKFEDGRYDVDVDGIKVDYFRNLSNRFKLATMLDTPLSAYFRIRKDIKNHDIIHIHEHRQTLAILVSHYARKNNIPYIVQAHGSVLPFFQKEGLKNIFDKAFGFKILHNASCVFALTEVEKEQYIKMGVSEDKIEIVPLGINIEEYENLPEPGKFRSRFNIADGDKLILFVGRIHEIKGLDLLIDAFNLLIKDSSSPIKLAIVGPDDGYLDTLNERIAENNLESQVIITGPLYKREKHEALVDCDLFVMPSKYESFTTSGLEAMACGKPLVLTKNNHIHDWVDGNVGISCDDDEISLKEAMKKLLFDDDLSETFSSNGKKLIKEKYNWDMINEQILSIYNRFI

SEQ ID NO: 6316 - protein, 595 aa, Methanobrevibacter ruminantium
MMFSNISKDLNIERKDYLCLFLLLVYSAIITVLLINFNESIGIYCSDVYIYLYNSLVFARMGYNNTYLYLSPLDFGLVELHFLFRLGFVNEVSIYAVTGVFSIFGSLGIYVLLKRYFNSLLSLAGGVLFTSFSLNLLWWANGTLDLPAVGLSVWAILFLILAVDESPKYYILSFVFLVLSIFTRYTCLFLIPLFLLYYLSKHDLFGFLDSLISDRKEAFSSLRSFLKTEEFRYLMIALVLALIVAVLFISVILYYGAELSFLEQGSTFASGSKGALDDYAHTTDTLFYFHDFLNFLFSQKVIFQENFIPTLTGASYLAYLILFILIIGISLGIYRFFNKNKSEDKKQFDNVNSSISNLKEFSFKTSHFKTLLYIGLLLSLAIAILGFKINSIITIAFLLIGLVIIFSLLKSKGLDRKDYSVPIFMIGWFLVYFIFFTFLNIKVNRYIITVFPAFIYFVILALNEIIGLLDGKSLKIGDLNLSNIIPIVLIVLCMFSAFSFTSTFEDNLDFNDYKIVADYLIDYDGDYASKDIAVFKQRTFNWWLKDSTIAVTTDQLDFLESSNITYYICDEDLKLENYTKIYNYKDIFLYERVNN

SEQ ID NO: 6317 - protein, 293 aa, Methanobrevibacter ruminantium
MNPYLEIIRPGNAVMAAISVVLMMIVGHYYDLPIILCAVIVFVCTGAGNTINDVFDYKIDEINKPNRPIPSGRISLKNARNYSYLLFAIGIILSFVIDYMINSIWPSVIVVPAVVIMYLYARNLKAMPLIGNITVATLTGFCFVIAGTVIACATSSLRILFISIYLGLFALFMTLAREIVKDMEDIEGDKLEGARTFPILYGKKIPSIVSIILIVVTTLMCPVLYIFGIFNVFYMIVMIVPICMFLYCAYSLKLNPPEEVCAKVSKNLKIAMLISFVAFVLGSFDWFSIFAAL

SEQ ID NO: 6318 - protein, 456 aa, Methanobrevibacter ruminantium
MKKVILIAFYFNQVNEIASKRLRALAKYLPQFGWEVVVIVPDLGYEPSSNADLSSRIITTEYEDMFSHIFTKFKPGDKSKLNDKSDNHSTSDSQKLKDSSSVSNPIASKAISIAGEVFAYPDGMKYWYGPAYEAASKIVEEEKIDAIISSSWPITCHTIAKDISDKYNIPWIADLRDLWNMDPYISHTFIRDYFEKRLELKTFENTDVLTTTTDLAAKTLATLHPNNRIVPILSGYDEDDFKFLESVLEENNDSDSSEDSVSAGDSNSSEGSVSAENSNSSEDSITTVDSTDRKLKLIYAGSLYGGKRDPTLLFKAIRQLEDESKLDSSNISIEFYGDSGNLEEIAREYSLLDIIKIGGRISHEEVLKKQLDSDVLLLISWNNEKEKMFIPGKIYEYFALQKPVLSIGYKEGSLKDLIEDTNVGYHVSDLESTKKVILDIYNEFISLGKVEFKIRN

SEQ ID NO: 6319 - protein, 364 aa, Methanobrevibacter ruminantium
MSKIKIAIVGIGNCASSLIQGIYYYKDKNPEDAIGLMHWKIGEWDPTDIEVVAAFDIDKRKVGKTIDEAIFAKPNCTTVFQEEIPKSDVKVCMGPVLDGVSEHMADFEEDYTFVVADEEPVDVVEVLKESGAEILLSYLPVGSEEAARFYAQCALDANIAYINCMPVFIVSDPEWDAKFREKGIPIVGDDIKAQIGATITHRTLSNLFKERGVKLDHTYQINTGGNTDFMNMLNRKRLDSKKESKTEAVQAVLAERMDPHDIHIGPSDYVPWQKDNKVCFLRMEGRTFGDVPMEIELRLSVEDSPNSAGCVIDAIRCCKLGLERGIGGQLTSISSYVMKHPPEQFTDDEAAAKVEAFIKGEIER

SEQ ID NO: 6320 - protein, 573 aa, Methanobrevibacter ruminantium
MKVKITETAFRDAHQSLLATRMRTRDMVPIAEEMDKVGYHAIEAWGGATFDTCIRFLNEDPWERLRILKENFTNTPLQMLLRGQNLLGYKHYADDIVTKFVEKSYENGVDIFRIFDAMNDIRNMEQSIKVAKAQGAHVQGTISYTISPVHTVDKFVEFAKELEALECDSIAIKDMAGLISPAVVFELVSRLKEETDLLVNLHSHCTSGITPISYYAACQAGVDILDTAISPLAWGTSQPPTESIVASLQGTEYDTGLDLKTLNQIKKYFETLRAKYEGYIDPISERIDTDVLMYQIPGGMLSNLISQLKQQNALDRYQDVLEEMPRVREDMGYPPLVTPTSQIVGIQAVMNVINGERYKIVSNEVKDYMKGYYGRAPAPINEEIAKKIIGDEERITCRPADLIEPEYDKFKKEAEDLKNFEKEEDVLTLAMLPPVAKQFLNGEIKEEDFPEKKVIDDGGISAIPTEYSVEVDGDVFDVKIMPTGYIKIDGEGSEPAPVIEGAITASMQGMVLKIKVNTGDKVQKGSVVAVLEAMKMENDIYAEEDGIVEQIFVEEGDTVNAGDNIMVIKGLDE

SEQ ID NO: 6321 - protein, 201 aa, Methanobrevibacter ruminantium
MDKRINFVSISRFTLLVAIFLLIINKIQFHAKILDYMALALAIFAIICIIIFIIQFKKGLVEFPIKVVVETNVDKALADGAITEEQAENIPKRVVLNANDIFLNLVFNLAIANHFDLLPVDVLREYIPDIPPANLMRLYEKSREISDDLNDYFRSQKFLNKADVITRSDEIKTYLRETYPWMDDVTLDNTFDYFFLGIGNG

SEQ ID NO: 6322 - protein, 424 aa, Methanobrevibacter ruminantium
MVFIIDPQNAGISGNMIIGALVDLGADGEKVKNLMEDVAYDFGEVEVSITKVNKSGIEANFCNVKTIHDEDENNHHIHFPDFIDKIDSLKELDIENLTDEILDMAKNVFKRIAISESRVHGKSLEEVHFHEVGAADAVADVLGAICAYFDLDMDKERVVGLPISVGGGTVKTAHGIIPVPAPASLDILKGLNEDEFNDFYKGEAQCRGGPVESELATPTGCALYMEFCDEFLEFAPMMSPERIAYGCGSKEFDFPNVIRVIKSKDTNEKHRVCVIETNIDHMSGEELGFLFDLLLDAGASDVSMVPIVMKKNRPGQLIKVISKPLLVDHLVNILFKQTGTLGIRVSENTHRGIAERHFVPLDININDRIYTINFKIGLIGDEIISHRPEYEDLKRISLEEDIPLTEIKEVANTMIRDFLENNRE

SEQ ID NO: 6323 - protein, 405 aa, Methanobrevibacter ruminantium
MSKKNKANKNKKKKESDQTIHELEIGKLIKNEDVLYINNPDYFLTFSDLEISDGIDIIENIMILSKDYVSFNRQYEDEKISDVELMEITEEYKENNNIEGGYISQSFDNSQFIINSYNDITIITVISNDLEVQKFTDNLKVVNSWKGFHNAKINFGQIILIDHALSPKLLIQLYKTATKQKAKFFESLHMPLHINNILNNEDFLVIASNLPEETLNQDYIMEIGLDITNMEYEDDKLDLEEFQERIEDGVTISCEDAIRKINLNIGILDYFVSEGILIGDLVELGMELLENTEPTDELKEKLKKQLLKSVSDRNINALIMAAIRLEDDFRKQRVREIDLNEKLVHFYPDEIIGVAIANQISGTKGVLNYRRYSRHKPGILYGLGPILSNTFAGLVAGCMTKILEE

SEQ ID NO: 6324 - protein, 278 aa, Methanobrevibacter ruminantium
MKEKNNDDYFEKQNPSILRSIGGLFTFSTILPLNIYTTIDEMAKMTWFWPVLNGIVGLIAAIIAFILCRFAHLDGLVIGAIIYGFLLIINGYNHFDGLMDFGDGVMVHGDPEKKLRIMKDPMTGVGGIATGFIVGTITIALYSSLIDYSYMISPDFILLIIVAEIAAKIGLTTCCITSKAGKEGIGKYFIKYMNIKNYIVGLIICLIIASLLSMRIGSQIGILGIIGGAFGGALTALIAKRHLKIANGDVLGTSNELGRLFSLLAMLIAISMHFSVLI

SEQ ID NO: 6325 - protein, 185 aa, Methanobrevibacter ruminantium
MTINVLRLDHRIGRDTRITTHVCLTARAFGASKVWLAGEEDHSMMRSVRDIADRWGGDFEIEYNNSYMEVIMNWREKGGKIVHLTMYGAQAHEVVDEVRESSDDILIIVGGAKVPTKVYKNADWNVSVTTQPHSEVAALAIFQHLLMEGKEFDLEFKDPVFEVIPTAHGKTVNVHNENRKLNKKE

SEQ ID NO: 6326 - protein, 373 aa, Methanobrevibacter ruminantium
MQRRGTTNLPLHGGHTPRWLFDRMTKLSGAITEVVIDEYGPNEFLNRISNPYWFQAFSCVLGFDWHSSGTTTTTLGALKSSIDPEKHGIYISGGKGSASRKTPQGIVRAGEIFNLKSSHVDNMVNSSKLSAKVDNSCIQDGYTLYVHNFFITEKGDWAVVQQGMNTETKYARRYHWMGENVDSFLQDPHNGISCDKKEKEALNMASKDSVEAQKISVDLINDNPNHLRDYFKRKDSNQLLLTDFSISQENTLTLPPHHQVLDMDLSDKEFQVLKNAWEIQPENYEELILLNGIGPKKIRALALISDLVFGEPASWKDPVKYTFSHGGKDGFPYPVDRDVYDNSIATVKDALYQAKLDKYDKMKALKRLDDFIS

SEQ ID NO: 6327 - protein, 166 aa, Methanobrevibacter ruminantium
MKRITTPISDDDINDLKIGDKISLSGKMYCGRDAVLPKLSKSIENGQEDKYPFDFKGMAIMHTAFSVAGIAPTTSNKAEIESSMEALSSAGVKFHIGKGSLSDETKKTLDKYNSIFIVTPPVAALLTNNVISKKCVAYEEEGMEAFFELEVKDIPGIVAIAHGKSL

SEQ ID NO: 6328 - protein, 388 aa, Methanobrevibacter ruminantium
MNKEPISEEEIFKELDFYQSQDCKYSDGRILGSMCTQAHPIAQKAFIQFLESNLGDPGLFKGTKAIEDKVLKMIGSFLSIENPVGHIVTGGTEANIMAIRAARNIARDEKGISQGEIIVPQSAHFSFKKASDILNLKLREIVLDDSYQLDASFVEDEINENTVAIVGVAGTTELGMIDPIEELSNIALENNIHLHVDAAFGGFSIPFLKEIGYGLPEFDFSLKGVKSITVDPHKMGLAPIPAGGILFRNEEYLDSISVNSPYLTIKHQSTIVGTRMGATSAATFAVMKYLGKDGYARLAKESLDNAIFLAESVKQLGYELVVEPKLNIVAFNHPKLETDDLAQLIEKRDWKVSCSSCPKAIRVILMNHIKREHIVELISDLKDISESI

SEQ ID NO: 6329 - protein, 756 aa, Methanobrevibacter ruminantium
MYVIKFEDLGKDDIGIAGGKGANLGELTQAGIPVPPGFVVTSETYKKFMMDTGIFNSVMDILDQTDINNTKELQEAAEEIKRIVIETPIPEDISTYIIEAYNQLSQKVGVDEADVAIRSSATAEDLPEASFAGQQDTFLHVQGIDNVIEYVRKCWASLFEARAIFYREENNFEHSQVYIAVVVQQMVDSEKAGVMFTVNPSTGENIALIEGSWGLGESVVSGTVTPDNYVVSKENNELLNITVSDKKTMFTNDENGTSIQVDVPEDKRNERVLSDEELEKLVEMAKRVEGHYGKPQDTEWAFHGGNLFLLQSRPITTLGDAEEKASEEDVDLEVLIKGLGASPGLASGTVKVILSLDELDKVQEGDVMVTTMTTPDMVPAMKRANGIVTDEGGVTCHAAIISRELGIPCVVGTGDATTTLKENDKVTADGKKGLVYKGIIKGEEPAEAAAVQVSATPLITVTEVKANVSMAEAAPKAAATGADGVGLLRTEHMMLSTGVHPRKFILDGEEDKLVDVIAEGVLKVADEFYPKPVWYRTLDAPTDEFITLEGGEDEPREHNPMLGWRGIRRELDEPEILKAEFKAIKKLHDKGYTNIGIMIPLSQHPSELRRAKEICREVGLEPQVDVEFGMMVEIPAAAILIDEYIAEGIDFVSLGTNDLTQYTLAVDRNNEFVAKHYREEHPAVMALIERTIKHCAAAGVTCSICGQAGSVPHIVEKLVKFGITSVSSNTDAVEEVRKTVARAEKKIMLDAARKQL

SEQ ID NO: 6330 - protein, 160 aa, Methanobrevibacter ruminantium
MVRAYSRREYIRKIPNNRIVQYDMGNLSEDFPVRLSLAVKKPAQIRHNALEAARIASNRYMQRSAGRLGYHLKLRVYPHNIVRENPMATGAGADRVQSGMRNAFGKAISVEALVKTNQKVMSIDVNPKNFEDAKVALKRAGMKLPVSCKIVVEKGAELIK

SEQ ID NO: 6331 - protein, 78 aa, Methanobrevibacter ruminantium
MKIKSNIRLKYNNSKNAEIVYKSLEVDNEGFLESELNSDEIEYNIKSDKLGSFLNTADDLIASEILIEDPFKKQPKKD

SEQ ID NO: 6332 - protein, 409 aa, Methanobrevibacter ruminantium
MECYNHPDREAVTTCSVCGKAVCPDCAMEIAGNVYCKDCVNEIVTQSIMEKASTQAPKEAAEPITEEVQEAEAVEEAIEEPVEIITPVQQEEVEEIIPETPKKAPENFEPEVEYETEYVETYDEDGVEDSYYENPEIIPEPEPEYKERERIVKEEAKAKEEEEIIEPVHKTEDIPKEAYMDDMEADFYEEQPSKAPSKDLEAKYEKYLEDLYYDEDEIEEEIYEAPKTQKRRSKPRRPQREDSYYDEDHKRSPRNYSNQGEYYINPREEEFEEEEFITPSHSRKRARSEETESYEELKRRIERNYAKEQEAKENRRFRRSKKSKKQKRPDYEYDELENIQEMHSFPEYEKEDKIGILDIILAIILIVLIILLILYVIYLFRLNGEYFSFIDSLLGLVRDPSGYISYVLN

SEQ ID NO: 6333 - protein, 256 aa, Methanobrevibacter ruminantium
MAIQDGDFVRVDFTGSIKETDEIFDTTSEDIAEEAGILVENKKYGPIPIIVGGNHLLPAIEEAIIGSEAGESVHVSVTPENGFGQRNPNLIQLIPMKEFKKQGMTPVRGMKISTENGNGKIISVNGGRVKVDFNHDLAGKNLEYDVTVVELIEDDEEKIKSMIELHYSYPNMDYDNIEIKFDGSTVSIKLDEITRFDQQSYMDVTFARFRISKDIWDNMDYEKVQFVDEFEKIVEEAPDEEVEAEVETEVEADAEE

SEQ ID NO: 6334 - protein, 395 aa, Methanobrevibacter ruminantium
MPSIDFIRNILKEDKKTFCNDYKKAQKSLSDDDGYSNGSSQSKQSYEKTNEESTSNPLIADFTEYSPLHNGHFHCMKTAKSKIPNGLFVAIVPGLFERSGRGLPYIMHRNVRAEIAIEVGADIVVEGPPMGIMGSGQYSLCLCKMFQALNTDFIPRGYRPFDGYDEILKRISMGHGVAPKPYKIVDMDTKETILEGKLEEDNYVIVSFSKSLKRIGFDFKDKFIFVPRIEGVSGTLIRKACSENKLEDVESMLPPETLRILKRELDNDNAPLHDQRDYEVILNSANNLSYDELIKLNFFSEKLANEFIEKRENKEFESISEIEDAIFYGFSSHYKNRVLSILETQMRGDVISNYINTYPFNVRVLNYKNETVLTQFEEKVLNDHPFVNSIELTNE

SEQ ID NO: 6335 - protein, 65 aa, Methanobrevibacter ruminantium
MSEETKIKRVTIHVESELDYEFRRLASQKFRFEPKWYSKAIKEAILLWIENNPEEDFEDLPEEDT

SEQ ID NO: 6336 - protein, 417 aa, Methanobrevibacter ruminantium
MFDLVLKNLKLVGESGEFYIAIQDGKIAKMSKTPISADNEMDIKGQYVLPGLIDPHVHFRDPGLTYKEDFKTGSMAAANGGFTFVMDMPNTLPKTNTYKAFKDKLEMANSKSVVNFGLHSGHSSFEEMERILELNPMSFKVFMDLESDERLREIFKNISNLDGNPILTVHAEKQSIVRENTERLSEDLELKDKPISYSYARSAESEIESISQTISLSKEFGNNLHICHLSTKKGMELAKENNISYEFTPHHLLFDNSYFDKFGTIVKTNPPLRESKDKVNVSDIDSDSMIGTDHAPHSLEEKNKGVWDSSPGIPSLETVLSLLLTEVNKSNLDFNLIPKIFAENPAKRFNLKNKGFIKENYDADFVVVDLNKEGTFNIDEFYTKAEYSPFDGMDYQGAATMTIIGGEVIMEDNELFI

SEQ ID NO: 6337 - protein, 410 aa, Methanobrevibacter ruminantium
MIVFNEDSCIKCGACEGVCPTAAIEVGDHIVYCDTCSEEPKCAEVCTKGALQVDDIAIDEEGNTQVRLIFNKTKCDECGDCVDACPSKTLKLDPEDSQLLKGFCVMCQKCVDICPVDVIGVPGIKEPASRVIEPEGAVYIDDCKGCGVCVAECPVDAITLSAYGEPIEVDEDKCIQCGVCSQSCPWNAIFIAGNAKPAKRSKVMKSFTLDADACIGCNSCVDACPGDFISPKSDLTVALPEACAACGLCVNVCPVDAIDLDVEYGASKFDSTEGICWDGEKCLYDGGCALKCPTEAIRVVTKRGMEVPSRQKDMGEQSFIMCVRCGACANVCPNDALQLDYVDKEIDGETVMRDRIIFNPSKCDECGECIDACPYDMLHKAYKVNLPIAGFCTLCEQCLAKCTPEALSLK

SEQ ID NO: 6338 - protein, 470 aa, Methanobrevibacter ruminantium
MEPVTRIEGHAKITVHLDEAGNVEDTRLHVMEFRGFEKFLQGRPAEEVPRIVPRICGICDVQHHLAAAKAVDQIYGFNDDDILPAAYKMRELMNWGSYMHSHALHFYFLAAPDLVVPNGTRKTRNVFQIIQDMPEVALQAIKIRRNGLDIVSATGGRPIHPTSSTPGGISTELDEETQADLLAKAKENVELAQATIELAVPILEEKIDLVKTLGYFGDTRHCGIVTKDGDWDVYNGKVRIKDKDGSIYTEYRNLEYKDIVAEHVKPYSWLKFPYIKELGYPEGIYRVAPLSRINVCDKMPDAAPLAQGALEDFRDRFGYAQYPLLFHWARLIELLASAEMAVDALEQDLSGDKFPDALERTAGEGAGIVEAARGTLIHHYTTDDEGLITQANIIVATIQNNPAMEMGIQQVAKDYIKPGVEVDDKIFNLMEMVIRAHDPCLSCATHTMDSQMRLATVEVYDSEGNLINKI

SEQ ID NO: 6339 - protein, 308 aa, Methanobrevibacter ruminantium
MADKAKVGTMWLGGCSGCHLSIADFHESLLDVLELAQFEFSPVLCDTKYDEVPELDVLIVEGGIRNEENRELAEMLREKAGLVIAYGTCAAYGGIPGLGNLHTVEELTTEGYINSCSTVNPEGIIPNEDVPTLESRVRPLGEAIQVDLLIPGCPPKSDVVAEAILTLLNGGTIELPTTNLCEVCPREKPPAGLAMDFIKRQFEIGKPEDDLCLIAQGLVCMGPATVSLCGAQCPSIAIPCRGCYGPTAKVNDAGAKMISAIASDYGVNEDKTVDPEQVADQLDDIVGTFYTYTLPAALVPAKMQKGGK

SEQ ID NO: 6340 - protein, 141 aa, Methanobrevibacter ruminantium
MSEDVKIVMFCCNWCSYGGADTAGTARMQYPPNIRVIRVMCSGRIDPQFILKAFRDGADGVFVAGCHMGDCHYDAGNYKLDRRMRLVYKLVEDMGIGRERVHHDWISASEGEKFASSVKMMVDRIKDLGPSPLKAQLDAEG

SEQ ID NO: 6341 - protein, 139 aa, Methanobrevibacter ruminantium
MSKYFLDANFIIAIFREIETNNELAISTCEELLSNHECYISNGVFNEIITILMMRTKDIELTVKAYYFMKDNLTIINEFEISMFNDRVFEMFKRYNSKSFKVGFTDCSIAFLYKYYGLDYIVTFDKNFKVFDDVNLLDL

SEQ ID NO: 6342 - protein, 81 aa, Methanobrevibacter ruminantium
MIDIIANTKMYKNKQTIIPSEVRDRFNVDEDTIIEWGVDEFGDLRITFRKKVTLKDVAGMIKKENDVEGDWKIDRGVYLNE

SEQ ID NO: 6343 - protein, 407 aa, Methanobrevibacter ruminantium
MANDALRAKDKKAALGTDIVIENFSKEEVNAFDVLDDIDDVDKKTKRTLLKVGVDTESEERAGSFLQMDQSNVFSSSISNSVEVMNTGIALEKYSWLKDYMWNAVKPDADKYTAQTALREVEEESYSGYFVRSLPGTKEVFPVQACMFIADQDVMQTAHNIIIAEENSELHLITGCATGEDVSSALHVGVSEMYLKPGSKITFTMVHNWAEQVEVRPRTAILQAENTTYINNYILTSPVNSIQSYPTTHCNGENARALFQSIQSGTKDSIIDVGSRALLNAPNTSAEIISRAVANDESSIYSRGHLAGNVPNVKGHLECHGLVLDDGSSIYAVPELEANAANLEMSHEAAVGQIDEEEIYYLTSRGLTEEEAASMIVRGFLSMDITGLPDELAAETQRMIDMSLDGM

SEQ ID NO: 6344 - protein, 252 aa, Methanobrevibacter ruminantium
MLLEVKDLVVEVEGKRVLNGVNLAIREGETHVLLGPNGAGKSTLFLTILGFPKYEVVEGSIIFNGEDITGLSTTERVQKGLGVSFQNPPAIRGVSVRDLLKFESKQDPDEDLNPRMQELAKKLKFSDEFLDRDVNRGFSGGEVKRSEILQLLAQEPLFTMFDEPDSGVDIENVELLAGELNVLLDKDKKPGQRKRAGLLITHLGYILNFVKADKAHVLMHGIIACSGDPDEILEDIRKEGFKGCVGCAECGK

SEQ ID NO: 6345 - protein, 89 aa, Methanobrevibacter ruminantium
MENAVAKPNPHRREEKLWSEIKNYQVATNNARILGVLDELIINEKTGKIVDIAVKIESGRNIHVKGAKRRGDLLLIPFTKLRKLENSLL

SEQ ID NO: 6346 - protein, 210 aa, Methanobrevibacter ruminantium
MIIALVMAGGKGLRLKSNIEKPLFPINDKPLMDYVLDNLKKSKYIEKTVVAVSPNGENTKSYLKDDLNFSDFHDDFYNSTKTDFYLDTKGIGFVEDLSEILTCFENHSKDDILLFINADLPLVDENIIDYIIEYYLDHDKPALSTLVPVEIFEEYGIPYTYDFNGKVPAGINILRSENVVQEEEVLIIPRYELVFNINTIETSILASKFL

SEQ ID NO: 6347 - protein, 492 aa, Methanobrevibacter ruminantium
MSFLDKIFNKGPKPIIAESQSRDLSILKAGNRPQGPGVMVAQQDEYYVTASVELGNTTTKCVIMATNLNNSQSYLINKTVNMTRDVRAPKPDEEVFGKTVWGIELSKESVADMIKDTVLESLKKAHVDMDEDLDFVVRSTGVTAGFATTQEVGQMVKALADGCLDAGISHTKMAPAMSSAHLPKRLQKYTLLDNVMFDGAVVSVVPPKGKEVVANEMEGELVTAGIKLGAKWTEVDYRNPCVSLDFGSTLAGRIVNKDEPYASTVGNFLGLAGVISDSLAKGSKQIDQKNGAALDLFDPKLLKKADGKKHQEKAKQYAKEAHELINICKVPEGIDRFGTVPLDAAGAKAAGTCLIGCDVGTNADGLDGLVEIGAKIYEDEGIPTLLATMDHVSANIVYRVLDVAFEENLILDGSILGVTGRAGITGKKPELILEYAQDKFKDVVFVEDGLALGSAIMARCMNSMGTQKNPLGGNQGERCILKKRMQAQGTIE

SEQ ID NO: 6348 - protein, 293 aa, Methanobrevibacter ruminantium
MGGQPGEYPTVLAGTIFYGGHKIISDEKAGDFDKDAAEGLIKTMEEMSDVTGNPCVVQTFGATAEAMVKYLEFVGDICDKPFLIDSTAAAAKIAGVEYVQEAGLAERAVYNSLSMAAEAGEIEAVANSDIDASILLGFNPMTPGVPGKLEIWETGGSVIDEGILEMAERCGITKPWMDVAVTPLGQGAGPAVRTSYAVKAKWGYPVGSGIHNVPSAWDWLRQYKKEHKEAWPVCDIGSNIVQQMAGGDFVLFGPIENSRLAFPACGMADIMIAEAARDIGTEPIEAHPLNLLL

SEQ ID NO: 6349 - protein, 83 aa, Methanobrevibacter ruminantium
MSEEESVPQIIVSTDDMAAAINKLDEAEEKVEFAVGEYFQRLGQQNGRDIGILYGIILGLVILIVSIEFGLVSAMSTMLTSLV

SEQ ID NO: 6350 - protein, 68 aa, Methanobrevibacter ruminantium
MVRFSNKPNTRGIRNASNNVEYRAKLLGREGRLFAGVISTRFSGMAIGIGLALALAVVIPYLAKLCGL

SEQ ID NO: 6351 - protein, 245 aa, Methanobrevibacter ruminantium
MADKKPAADNWPVVSGDYIVGDPESPVAVTTLASHNEDIPAAAGAAIAGPCKTENLGIEKVVANIISNPNIRFLILCGAEVQGHITGQSIQALHENGCDPEKKKITGATGAIPFVENIPMEGVERFQQQVELVDLIDNEDGGAITAKVKECIEKDPGAFEEDAMVIEVKEGDDDEDEGEEIRPISAETALLEARIRNIDTQVKLVGAVQRNMAGNYSGKVQGIMIGLIFTLVIGFLLLMAPLLGA

SEQ ID NO: 6352 - protein, 106 aa, Methanobrevibacter ruminantium
MVLPLIQFIPELNLNLDPETGLLGAGGGDLIILSMDEINGEIAKVEAAADELMNSLDPNSAPLGSFPGREGNFVIAGTLTNMVYGFIIGMFLIMAAMPILTAMGVL

SEQ ID NO: 6353 - protein, 272 aa, Methanobrevibacter ruminantium
MSAGGSGAPAEGAVNANVMLAVGIIGGLIGIYASSFEPTIGPVIACLGAVCAILWGVLAIRSVASYGLGTGVPSIGYMSLGIGVIGALAGVGIIAAFKLKGLEMLGPILALVFAMLIGLLVAIVAKKIVGMKIPVMERCTAEIAGAAALAVLGFSSAIAGGYSIDLLLTAVVAPGFIALFYILVTMAIQHPFNACLGPNEDQVRTLKCGASTAFLTMIITGILAISAGGYAWFAILVVGLIGWYVSFKMFVNASYEAAASVKWSGLWPKVEE

SEQ ID NO: 6354 - protein, 233 aa, Methanobrevibacter ruminantium
MDLLIFIICVVIAGIIMGGGVHFIPVGGAPAAMATATGVGTGTAMLAAGAGLTGLITAASMTGQPVWLIVLAGAVGSMLMMGITMLIGNFIYIFGVGVVPASGKAAVDPITGWNQEKYKTPGTEGHGIPTVCYISGIIGGLLGGAGGGLVYWAINEFATANLTGFDATVIAGLAAILSVGMFFINSVTASYNIGGTIEGFVDPKFKRLPTGILACAVVSLVAAIFMVLMIGGI

SEQ ID NO: 6355 - protein, 290 aa, Methanobrevibacter ruminantium
MDPITLGVVALMGAAATIAGAAEDLESDIGSQSNPNSQVQLAPQMGHLHRMINKAASGEPVAYGCWCGISGAIAALAMGMGIIPIVAIAMGSTVAALVHAIYTVTSHMGRIVGQSQFEQPLFMDVLTQSLGPIAAHGFIASFGIVGIAYLMTLPLDGLGHPFPLPLLAVLWGITIGAIGSSTGDVHYGAESEYQKFDYGGGTPVAIQGDIVTKAPLGAKNSIDVGNFCAKYGGPLTGFCFGLIVFVSFWITVVFGALGGQIVGIVIVILLIAANYLLEKSTRAKFGPYEE

SEQ ID NO: 6356 - protein, 550 aa, Methanobrevibacter ruminantium
MADKKFLDAMTKKFKEAPEEKTTTFYNMGGWTQSERKTEFVNEGKAIAEARGIPMYNPDIGNPLGQRALMSYQLSGTDTFVEGDDLHFINNAAMQQAWDDIRKTVIVGLNTAHNVLEKRLGMEVTPETITNYLEVVNHAMPGAAAVQEHMVETNPLLVDDSYVKVFTGDDDLAAEIDPAFVLDINKEFPEEQAEALKAEVGGAIWQIVRVPSVVGRVCDGGTTSRWSAMQIGMSMISAYGQCAGEGATGDFAYASKHAEVIGMGTYLPIRRARAGNELGGVPFGFMADICQATRVTDDPVESALEVVALGAALYDQIWLGSYMSGGVGFTQYATAAYTDNVLDDFSYFGKDYVEDKYGDLCSAPNDMDTVLDVGSAVTFYSLEQYEEYPALLETHFGGSQRAAVVSAASGISTAFATGNAQTGLSAWYLAQYLHKEQHSRLGFYGYDLQDQCGAANVFAIRNDEGLPLELRGPNYPNYAMNVGHQGEYAGIAQAPHSARGDAFAVNPLVKIAFADKNLPFDFTKVRAEFAKGALREFEPAGERSIIIPAK

SEQ ID NO: 6357 - protein, 250 aa, Methanobrevibacter ruminantium
MAQYYPGTSQVAENRRKFTNPDVELEVLREISDEDVVKLLGHRAPGEEYKSVHPPLDELDEPDDIIREIVEPIDGAKAGDRVRYIQFVDSMYFAPAQPFLRARSYVYRYRGIDTGTLSGRQIIEARERDVERISKEILENEYFDTARTGIRGAGVHGHSLRLDENGLMFDMLRRQVLNKETGNVEMVKDQIGRELDEPVVLGEPLDEETLRAKTTIYRCDGEAYKDDEDAVTVLRQIHVTRSQFGYNPEY

SEQ ID NO: 6358 - protein, 198 aa, Methanobrevibacter ruminantium
MIGRCTHLVDCRETRGLGEGGGIAQRGTFAECGSDVLAVAMSPGRRHITKPVCEITFGLREANLLTSTMILDAGSGVPHDAPAGGAGNAFGLTDKEVEQMQKFKVIVVHLGGVRNHITYKARLILRNVNKPCVIICEYPVDFEDFAKIGVKTAKVMPDEVKTEGKIMNIVSGVIRGQTVSQEKLDEIIRKVRLTLGDA

SEQ ID NO: 6359 - protein, 151 aa, Methanobrevibacter ruminantium
MDIEIFPHRILGTDTTEKVLNDLESLDSVKRTVIQGPRLPPQDEIDRIYGDRRIIVVNGEEVELKVKTGRIFVELYDESGIEEIRAICDKHIDTGFDINTSKAQYIRKQKTVTDGLKYGENTEIPEELIGIADTRSKFNEHVSILRKDGLE

SEQ ID NO: 6360 - protein, 443 aa, Methanobrevibacter ruminantium
MAKFDDKVDLYDDRGSLVESDVPIEALSPLRNPAIKNIISGVKRTVAVNLEGIEKSLKTASVGGAKSKILGREMDLDIVAQADSINASLKEMLQVTEDDDTKCEILSGGKRILVQIPTIRLDSSAEYSVATLATATALTQAIIKEFDVSMYDANMVKAAILGRYPQSVEYMGSNLKTMLDVPQKLEGPGYSLRNIKANDFVAATLKNTLQATALASIFEQTAMFEMGDAVGAYERMHLLGLAYQGLNADNMVLGLVQDNAKEGTVGSIVQDTIAKAEADGVIAVEKELTDYNMYATNDAAKWNAYAAAGCTAAIMVNVGAARAAQGIPSTILYFNDNIEFATGLPGIDFGRAEGVAVGFSFFSHSIYGGGGPGLFNGNHVVTRHSKGFTIPCVAAGMALDAGTQLFSPEATSGLIKEVYSEIDEFREPLKYVALAAAEIKGDI

SEQ ID NO: 6361 - protein, 416 aa, Methanobrevibacter ruminantium
MQVIADLGGTPGKDCRGYCKFCYFRKVKPLTEALGCQHCPPNKVGCERCLEGVQEAGKPFQQPFTVLSEVQMALMMNPVRDANLKVNISGGGDVSCYPQLEELIASLYQWQLPIHLGYTSGKGIDDGDIASRFLNYGVNEVTYTIFSVDPALRKQWMLDPTPEESLKAAQLFAEGADLHAAAVIIPGVNDGQALVDTCNKLEEWGAKALMMMRFANSYDQGLILGNEPVIEGVVPHEPLEFEELVKEINSEYDMRVTGTPLGDPTIGAPFIIAKDEYEEFLGILPEVRGEATLLTSKIAAPFLKKIFDKIAPDNVNVVATKKDIACLMTKQDLEALDLDELKDAVILPGRAFIHILDAERILSSDGKQRLVGFGPDTLSVDGELSSGMSEEEVIEHELGSFIELIEAINFFGMRRL

SEQ ID NO: 6362 - protein, 73 aa, Methanobrevibacter ruminantium
MKIRKRIKKLKRIKKLKRIKKLKRIKKLKRIKKLKRIKKLKRIKKLKRIKKLKRIKKLKRIKKLKRIKKLEKE

SEQ ID NO: 6363 - protein, 304 aa, Methanobrevibacter ruminantium
MYETLTFTGGIHKSEELKELIEDLGGFVLQSNILQMELVLNMAVPIDDVKIIEDKANELLGELSVAPMAGSEIAIVSPTLARHHLPHAACDISEYLRRYGAKDNMIGLARGHGKGTAGISETEKALIEEHDIAIFALGSFKQCIVDKAYLYNDIDIPVIVTGAPEIDLEELPGVDAYVPGLGRIPRRLKRGENIRALKHLVQTIEDLLEKRKKELAQDPPIVPSILVKNEIENQVPAIEGVFSPTPVTSQLSGLRVKLDYDNYHEEIENVVIGEQKLKDIANIKKSHFYDYILVELLTESSLVD

SEQ ID NO: 6364 - protein, 554 aa, Methanobrevibacter ruminantium
MGVNMYAENNILVGANENTEVYLLSKLANRHGLIAGATGTGKTVTLKTLAEAFSDMGVPVFLADMKGDVSGLAKIGEPSSKTTERMEKYNLADKGFIFKSYPVEFWDLYGEKGLPIRVTISEMGPQLLSKILNLTEAQEGVLNIVFRVADDENLLLIDIKDLKSMINHVSDNAELYESKYGAVAKKSATTLLRSLLALEEQGGDMFFGEPALELEDFMQCDDEGKGIINILDSVKLSTAPELYSTFLLWMISELYEKMPEVGDMDKPKFIFFFDEAHLLFDDMAPAVQKKIEQIVKLIRSKGVGLYFISQSPSDIPDSVLAQLGNRVQHALHAYTPKEQKAVKTAAETFRPNPAFDTKEVISNLGTGEALVSVLEEKGAPSVVEQVDILPPQSYIGAIEDNFRAELMSISPLRGKYKEAVDRESAYEMLLNKIDNNPNIQTEIPPEAPIRDIPNQAEQAPSQPQAQQAPQQAPSQPQAQQAPQEEAPKQKGLLDDVIGIAVGTAVDQMTKQNKTTRSRKTTKQTTVEKATSTMVNTAAREVTKGIIRGLFGNMK

SEQ ID NO: 6365 - protein, 122 aa, Methanobrevibacter ruminantium
MVELDREELYRQLEEMENDLRLYPIEEGLEDDIIDYINGKELSDNEKWDLENRLEDFFYGAKLKCRKPTYYFTDGFEFYVTEIYIDFRILEHVRKSFPKFNQLSVSSEIEQGFSTLSVKLTL

SEQ ID NO: 6366 - protein, 265 aa, Methanobrevibacter ruminantium
MKLNINKETCTGCKLCETVCIRDNIIVVDKKAVEVDNGDCFDCGHCLAICPSNSISLKGFDGQKDRVGEYNPKEIPVSSEDYLNLLKQRRSIRWFKKKKIDKETFNKLFEAAYYSPSAQNAQDVEFVVLDNELDEFMHLVYDIISAEEDKFFRIKQFGEYLRGEGDYKNHPLLWEGHQMILAFSRNSANALIASTRLELFAYTMGLGGFYSLFTLKADELDHDRLMEFFPGIDSHKHMYSAFVIGYPRVKYRRTVPHKGIDVYYR

SEQ ID NO: 6367 - protein, 179 aa, Methanobrevibacter ruminantium
MSIYDFEVKDINGNMVSLKEYEGQVLLIVNSATECGFTPQYNELTQIFDELNEEGFTILDFPCNQFGKQAPGTGEEIAEACRATFLVQYPIFEKIEVNGENEEPLYTYLKSEQPFVDITGEDAERLKGILESINPDYMDSNDIKWNFTKFLVDREGNVVARFEPTQSLDDVKAQIKELL

SEQ ID NO: 6368 - protein, 152 aa, Methanobrevibacter ruminantium
MSILVAYYSRTNVTKKVAESIANQLDADIEEIVPKVKYDGKIGYMRGGKDAISEKIIDLDSLKYNPADYDLIYLGTPVWAGRAATPVISYIKQNEGSFNDVKFFVTAGGSGFEGTIEQLGKYVGKAPLKTLSLTTKQVKRDEFKDELASFIE

SEQ ID NO: 6369 - protein, 370 aa, Methanobrevibacter ruminantium
MTIISKKVELIELFYDLIFVYAISRLTSIISEPVNGGIAPFSLFAYIITSFVILQAWLYFTNYVNRYGQWKWYEYVIAIINMIAVIYMANTISSTWNNYFVFNVSMLIMLFTVVFLYSVHAIKEKSLKGAAGNSITILLVVCSIYIISTLSILFGHMDVVIWLNVLAILTGAFLPFFLKGKFDKSIINFPHLIERFELLTIITFGEAVVGITHFFNVNNFDFVPILVFLIVIGMFGSYVLQIHYLVDHHREERSLRLMFSHYFIVISINLVTVAFELIHSGEINYWIPSLMVIISLIVFYLSIMANKEYYYDGLELRKKDIALMVLISLIGSIAILLSVGSIYGFLIGALIITLANFGVLLNKYQKFNDN

SEQ ID NO: 6370 - protein, 116 aa, Methanobrevibacter ruminantium
MLFIYYPRCSTCQKAKKWLDENGFDYDEQHIVDDNPDYEQLKALYEKSGLPLKRFFNTSGKIYREMQLKDKLADMDEEEQLNLLATNGMLVKRPIIETEDTCLTGFRQKEWEEKLK

SEQ ID NO: 6371 - protein, 276 aa, Methanobrevibacter ruminantium
MDYIRQTEVIQWNDGAYQTINEESVEDEYTYLFIDYLPPRKFSTYPKDLEDFAVGYCLGEGLIKDYSDIKSIQLDGTNILVTTTLSHDPEEDLEQEGIVQEKKGNCEHACVCRLLEYQGVNSDNAGGIRSELKTIEPNTSDLKIDASQIIKDIEHLTDEAKIWQRTAGVHVAQLKYEDKIIIREDVSRHVAVDKVIGAASREGYDFSKCYISYSGRMPADMLIKVIRVGIPIILSNAAPAASGIDVAQTGNITMIGFIRDKRFTVFTAPERVNLDA

SEQ ID NO: 6372 - protein, 401 aa, Methanobrevibacter ruminantium
MKYNFESIIDRKNTNSLKWDLFGDEYPMWVADMDFYAAPLIYESVNRKANHGVYAYSFVNEDVYDSYINWWKKYGLDMKKEELLFATGVMPSITSIIRAFTEIGDNVLIQTPVYHVFFYVILDNGRNVVENQLIYNPDSDDVETAYVIDFDDLEKIFKDPKTKLMLLCNPHNPVGKIWKKDDLERIAVLAKKYDVIVVSDEIHCDLTDPDMTYIPFASLDDDLSKNSITCISPSKTFNIAGLQSSAVFTQNKGFYEVLKGQLATDFFSHPNIFSIDATIASYKSEDWLNELREVLFNNKMIVKEFLEENIPEIRLVPANATYLLWLDCSKLNKNEDIESSNYEFSKTLSEFLREEVGLFLSPGVQFGQNGDNFLRMNIACPKDLLIEGLNALKEGIDKFKS

SEQ ID NO: 6373 - protein, 172 aa, Methanobrevibacter ruminantium
MADFEEIIKIRRSIREYEDKEVEDEKIEKILRAGMQAPGSRLGAEPWEFLIIKNKEVLTKIGEIKPRVTNAPVAILLIANIERAFYKTVWQQDMSAAAENMLLEAVNLGLGGLWNGVAPDEERMGKIADIVGLPKDDNLKPFCIITLGYPAEGWENKFMDKFDESRIHYETY

SEQ ID NO: 6374 - protein, 190 aa, Methanobrevibacter ruminantium
MNKPVFYDADCLECFLFVDATYILEELFSKIIIPEQVYNEIMEENTPSLVKRNFKKLKEGFVEIQEMPFGSSQYLAYKSIEKGFWSKAGQICGSGESAAMALAHLNNGIIASNNLSDVEEYIESLDIGLITSSMILTKALEMEIISEDTASSLYLAMIERGIKLPQDSFWEYFDKLYEIDCKRFLKNDFP

SEQ ID NO: 6375 - protein, 240 aa, Methanobrevibacter ruminantium
MNSTVLAEILRHEWGIESFASVNIRSLVYNNIRNLTVLWFPMKANISGCCSKTNEDKVIFINTNHSIGRQNFTLAHELYHLLYEDIDDFIVCGINMNTPSERNADEFASTLLIPDSALYWFRNKNQIDDWSVEDLIKCEQYYQVSRSTMLNRLKSLNWISQDQYDEFGLNVVAEVNRLGYETGLYKPSPQDQKYSSIGELVRLTEKAYGKKKITGGKRKEILLKCFRNDILYDNEVNKLE

SEQ ID NO: 6376 - protein, 108 aa, Methanobrevibacter ruminantium
MIDVVAKNLKDLRKKNGYTQEQVSDYLGITQSNLSKIENGERNFNMTLLDKLCLLYNCSPEYLIGETDLYEKSTIAFRSDEKVDLNVVAKMNEITGFLKLLRSLDGVD

SEQ ID NO: 6377 - protein, 273 aa, Methanobrevibacter ruminantium
MKRSIIFLTIILSLFLVIGYASAGLFDFSSDDAGSGENTDDVFVVGFNSQFPPFGYKENGEYTGFDIELAKEVARRNNWTFKPVPIIDWNTKRFELDSNEVDCIWSEFTIDGREDDYTWSQPYFNNTKLVIVRGDSDINDLDDLKGKTLEVQQGSSILNTIEKNETLKRKFAKIEQVDGYDTAFMDLESGVCDVIIIDSGLGRYLVSEKHNDTKILNQTISNEKYGVAFEKGNTELRDKVQKTLDEMYADGTVEKIAQKYSKYGIPDGVIYPE

SEQ ID NO: 6378 - protein, 147 aa, Methanobrevibacter ruminantium
MFIIFPLFSANLISIIIGISVLIFGIGLAYSSFITHEISGALSSVMGIFGIVMIIFGLCFIFAINAISFLVGLQFYIVAFMLIMIAVVGFLSDSNVARTGALLYLVLGIVILLIAMFAAENPILITIILGVILIAQGIMGLIYGNEI

SEQ ID NO: 6379 - protein, 425 aa, Methanobrevibacter ruminantium
MLDIKLFRENPDLIFDSEKKRFRSTENAEKVIEYDTLWREGESRLNSLRAEKNKLSKSFKQAKKDGNIEEVIAQSKAVAEEIKELGPKIEEYKQLREDYRYKVGNIIDEDVPVSDTEDDNLIVRTVGELPDFDFEPLNHVDLIEKIDGADIETAASIAGARFYYLKRDILHLNLALIQFALNELEERGYIPLQTPFFVKGEVAAETSELGEFEETLYKVENEDLYLIATAEQTLAALHRDEIINPEDLPMRYCALSTCFRKEAGSHGKDTLGIFRVHQFEKIEQFIFSTPEESKNEHHRLLEVTEDIYKKLGLPYQIVAIVSSALNDNAAIKYDLEAWFPGSKTYRELVSCTNCGDYQARKTKTRYGRAGSGDAQTLHTLNSTAIATERTMCCILENYQQDDGSVKVPEVLVPYMGGKTVIEARK

SEQ ID NO: 6380 - protein, 193 aa, Methanobrevibacter ruminantium
MIVVTTPMCKQIVEWAGLKEFKVNKFPDEEEGDLAILLSESKVKMNSLTLKLNTFSQIRESILKVSNYCFEHDLTDHLLSDDDIDDIFSSYDLKYANLGDDDFDKIRESNSNKKVKVYSEFLKDIVLDIGALVVDEDYSYVVYPDYLKDIVDKNEDFTDSSIVFIEMPSHGKVSKNPLERTEERYSILINSLI

SEQ ID NO: 6381 - protein, 260 aa, Methanobrevibacter ruminantium
MQIIKTSETEAEKVIINLSQEKSHSKDVSIMVDALRASTTVTIALDYFKEVIPAFTPEEARELSLKHNAVLAGERKGVKLEGFDIGNSPGEIKEFETNKKSMVLTTSNGIMTMENMQNPKHVLVGGFINAKSVAKAAVELAEEEIEIVMGGYNHEFAIEDFLAAGEILFYIEKELKERNMTPKENDGSNYELKDREGFSEYAISAILASRNLELTNEQVLKSKSGKRLSYLNYSDDVELCMKRNITENVGILKDGKIVLY

SEQ ID NO: 6382 - protein, 388 aa, Methanobrevibacter ruminantium
MRRECLKIIGTAHVSQNSVEEVKEAILEDKPEVVAIELDRGRYIRLMNERNGIVEDDQIHITKIIKENKVGVFLVTTILSYMQNKIGDDLDIKPGSEMIGAIDAAEETGSRIALIDRDINITLQRVLNHMSTWEKLKFIYGIIGGLLSSDDEELDVEALKEQSAIDEAMGYFKEISPGAYEALVNERDAYLANSILHIPEDHVIAVVGAGHKEGINRYLDNPETIPPHSELIDMDKKGGIPWLKIILALIPISFVVIFFLAWMNGIHIEGDIVQFIVISMIMGFLGSILSGSKLASAIIGGLVAPLTIIHPLLAAGWFSGLAEAKFRKVRKQDINNIGKIESFRDLWNNNIFRILLVVVGTNLGVSLATLVILPSQVFIPLFMKIFGG

SEQ ID NO: 6383 - protein, 91 aa, Methanobrevibacter ruminantium
MYVIFRCDCGRVLYAKQGVKTRKCTCGKTIKVKSRRILQKVETANDASLAVQKMQEEIYGGTAFKTADEYKANKFINQLDRRMKEYEDGDF

SEQ ID NO: 6384 - protein, 448 aa, Methanobrevibacter ruminantium
MEMDSIIIISEILIIIILIVLNGLFSLAEIAVVSARRIRMQKIADDGDKRALLVLDSMDHTSEFLSTVQVGITFTAIITGALGGTTFSEPLGNYLSQFIPYSYQISFIIVILLTSYFTILVGEIVPKRMALNDPEGYALSTAKFMQISSIICKPIVKLLDSSTNLALRIVGPSPKEDVVTEEEVKLLIEEGIEDGTIAEEEEDIIKRVFRLDDQKVDMIMTPRNEIIWLDLEDEIEINKAKIIASKRSIFPVADAELDDFIGVVQAKDLLSKIFEGEDVDIRANVKSPLVVPENMLSMDLLKEFKENREYVHMVLVVDEFGSVVGLITLNDLLEGIVGDIPGIDEEDDPKAVERKDHTWLIDGRFSIEDFKDLFEIEKEMPNEVEDGYTTIAGFILSHAGKIPETGEIFHEDKFTFEIVDMDGNHIDKILVTINEEDSDKLDLESKED

SEQ ID NO: 6385 - protein, 313 aa, Methanobrevibacter ruminantium
MELIIQIILLIIGFVLLIKGADVFVDGASNVAYNLKIPTIIVGLTIVAFGTSAPEAAVSITSAFAGTNAISLGNVVGSNIFNILAVVGVSALLGTLTVDKVLIKRDFPFLVVSSIGLLLIATIFGEISRLCGIIFLIIIIAYVYVLVQEARQDKEAMSEEIEVKLSIPKAAIYIVIGIAGIIIGSDLVVDSSSYIASVFGLSDVLIGLTIVAIGTSLPELVTSITALKKGDNGIVIGNVLGSSIFNILFILGISGAIMPLPIAPEMVWDILLMTVITIIGAAFAYTKNEVDKKEGAVLVALFILYMAFVILRN

SEQ ID NO: 6386 - protein, 167 aa, Methanobrevibacter ruminantium
MDSKKLILVTALAFLAIVSIASVSAWDLFGTADETSSTAKTTIAGHDFNIPDGYQKNESYVLDNETTNSNGAIFYSTAESYYKGADDIIYIQVADYSYPGYEANLTTAQLLKSGLGDKETINGHEGLIAENEFDGLKVHAFFYAEDGDCITVITSDDNLFEQIIPEA

SEQ ID NO: 6387 - protein, 451 aa, Methanobrevibacter ruminantium
MNVNKKIFLLVIFIISISIAGVYCADIHQDSDLTAILSNETDSGLTAIMSNETDSFGCCSIVLQLDGNESIMCYRRDSNYTADVFIEKVNWHGKPAIKQYKTDNKYFNHVIITNDGWIIGLGGIDDGIDSEICENITAKMITKDYSISEDYLTQIQEIKKKYGRGHVVIKAPNGNYGFATPTKLKTGTLNVGEYISIPNNYELSRRGYVSLDEPDKIEAMINLSRTDLYGDDRREIITYDVHLNGNNNTTDIYISNEDGSLIGKDYTGCVDNVIFNNVTIEGKDIPIAPNYKSLGSMSFEVDKVNLSLTDLAFIVVGVVLVIALLFVLLLRLIRFIKTRRSRRSAPRRTRRETPRSSRGSAPSRTRRESPSRTRRETPRPNLRNARRRDTEEDRRRNDLRRNVLQNIVEDKRRSEPRRNVRRNTRNNRGRRRGQNRGRQQTKRPPTLYRKE

SEQ ID NO: 6388 - protein, 285 aa, Methanobrevibacter ruminantium
MSINKEEFNEKIFSRINNLIDDYQLIKEGEKIAIALSGGKDSVLTLHALKNYKDSADFDFELVAILVDEGIDGYRQHGIDAAVNNAQLLEIPLIQKSFKEEEGFALDDIYSYFKSACIPCGVFRRNILNKTAYEIGADKIATGHNLDDEIQSFLMSFSRGDTVKFSKFGPELDQIHEKLVPRIKPLWNTPEKEVGMWAILNGVEIHLDECPYSNLSLRAKIKEFLNKTESKHPGTKENVLNSFIKTLDVENVRTVLSECERCGEPTSGRVCKACEIKDIISENRD

SEQ ID NO: 6389 - protein, 91 aa, Methanobrevibacter ruminantium
MGIEESGVGEYVSKAVQIIEESGLNYQITAMGTQIETDNLNKLYEVCANVQEAIFEMGVPRVYTVLKIDDRRDKENRTLKEKVKSVEDRIK

SEQ ID NO: 6390 - protein, 157 aa, Methanobrevibacter ruminantium
MAPVVEQPVEEWDKDIAIDLTGVFYCCKAFGEYMVKQEYGKIINMGSIHSRVALTGGLITGYTSAKGGVYNLTKTLAAEWAPYNITVNAIGPAYFESELTADVVGDEQFDMLIKAFCPMGRWGKEGELDGIAIYLASDASSFCTGQLINIDGGWTAI

SEQ ID NO: 6391 - protein, 367 aa, Methanobrevibacter ruminantium
MADIKVSIASPIIEEEEINAVVEVMKSGMIAQGPKVIEFEKEFADFVGAKYGIATNSGTSALHVALLAAGIGKGDEVITTPFTFAATGNSILYTGARPVFVDINEDTFTIDPCKIEEAITDKTKAIMPVQLYGQAADMDPIMKIAKEHDLIVIEDAAQAHGAEYKGKKVGNLGDMACFSFYPTKNMTTSEGGMITTNNEEFAENARIYRAHGSATKYHHDVLGYNFRMTDIGAAIGIEQLKKIDGFNDKRIENAKYLNEGLADCDLVETPVVEDGYKHVYHQYTVKVKDGKRDALSDYLIENGIGNGIYYPIPLYDQVLYTDMGYNQSLEVTDKTVKEVLSLPIHAKLTKFDLDLIIEKVKKASKEL

SEQ ID NO: 6392 - protein, 405 aa, Methanobrevibacter ruminantium
MEEYKDNFPQEELKTYTEDELKIIEEGKVKIKFPDFDKVSSDAPVFYNPKMEFNRDNSILALQAYQKEVDREINICDLFGGSGIRGIRYKKEIEGVGEVSVNDISPLANEFTRINAELNDVEVNIDQKEANIELRTNMGLFDVIDIDPFGTPSPFVDSAAYNLKRDSLLCLTATDTSCLSGTYPEPCIRKYNAKPYKSEYYHENGIRIIIGFAALTLAKYQKHIEVKMSHSTEHYMRVYLKIIKGSKATDKSLKNIGYISHCKNCLYRTESHGLATSVPDICPECGEKLVTAGPLWLGPIQNKEFIESMIEIADEKELNTKKKVLKLLNSCKMEADAPATFYDIHKICRSLKISAPKLDLVFDKLKENGFYAVKTHYSPLGIKTDASSRELIEIVKELAEEVENK

SEQ ID NO: 6393 - protein, 159 aa, Methanobrevibacter ruminantium
MCAKVNEDIIQLDETDISILKIINDDVRISYRQISRDLGISVGTVHNRIDKMLKTGVIEKFAPVLNHKKLGYALTSIIGVNVKGQELEQWEHDISKNKNVVGLYDVTGQYDAIVIAKFKDTDELDTFLKELLKTGCIEKTITQTVLNIVKEDVGSADIL

SEQ ID NO: 6394 - protein, 313 aa, Methanobrevibacter ruminantium
MVVCLPDTQDDAPRIPIHLSRVGVTGVKKLLTLKRKEKRPIILLPTFDAFVDLPSDQKGTHMSRTPEAISEVVEEVAQSSQKGVESLCADIVTRMLEKHEYAKRVEVSMVSDYMFMKDSPVTDNRSQEMGKLIANAVGIREDDDTISIRKSIGAEVIGMTVCPCAQESVREVDKNNLLKFLDEETCQKVLDTVTFASHNQRGVGTILIEVPEDEYVDGEKLIEIIESSMSSPISELLKRPDENAVVMNAHKNPVFVEDCVRTMNEKIVKEFSHLPDDTLITTRQENQESIHRHNAFAEKVSTLGSLKEELNIN

SEQ ID NO: 6395 - protein, 93 aa, Methanobrevibacter ruminantium
MIFMENFENQKFCQSCAMPMTEELYGTNADGSKNDEYCIYCFKDGEFTSDMTMEEMMNFCIEKMVEVHPEMDKEEASKMMNEVFPMLKRWAKD

SEQ ID NO: 6396 - protein, 394 aa, Methanobrevibacter ruminantium
MNVLVCSMSAMAETAGPYGRARALVEALKASGIDVATCMAEDINYKPIDGIKNYYLNVPMPLGLPKPIATRTFPIAQKLGIIERKNVGSFEDVLHFTGNIDYKYLCESVANIRKAINDFNPDIIYSEFNISAILASKLENKRLYATISYPTQTEYASNPKYAKGLKKFLRENNLPDVNSSLDLFNWADKSFVPSIYELEPIDKDNVTFCGTWKNLNEGSVFKENDENMDSTDERNAILVYMGSGTISPNKMFKEIKDAFIGTEYQVYIASLGLEKSDFDNIHIDKRWDFSKLLNESVLFINHGGQNSVVDGFIYGVPQLICPGRVFERIYNGKSVEKVDAGKILEITDFKGEIIKSESEKIIKDDSFRNNSKSIGDKLKSLNGIDLIIDSIKKG

SEQ ID NO: 6397 - protein, 447 aa, Methanobrevibacter ruminantium
MKMYKINVSNISRLRTYTDGDGVSTLIGSMGCPLRCAYCFNPFSWDGSLEPKTYAVDELYEEVKRDNIYFLSTGGGLVFGGGEPLLYHEFIKEFIKKYKSTGWKFTLETSLSVKKDILRDIIDYIDFFIVDTKDMNKNRYELYTKGDYELFLSNLKFLIDKVGSDGIRVRVPKIPKLNTVDDVKTNYRTLKDMGFSNIDVFNYVEIAKHRKISRVALENKKDFDERLYENKIKFVEDYILSEIMLKVPPILDFHIKKFPNSFNKKFEFLFEYDSIFNDDLFFLKEVVISKLQECYDYLDLKYGFFVIFYPVGYLENRLDDSCFDLSIMNNLVKSFEGLDEIDKEKHALELWEENKWEYIEFKYFCHDLNHLKNFYVNFKDHGYKLDSKYILSNAYDVCPSDFVVHINLRKTGKTYNIVEEDYSTHLLVQKFDKDMNLISQSIFEKGI

SEQ ID NO: 6398 - protein, 89 aa, Methanobrevibacter ruminantium
MKGKDKCELLKNIRQKIADENNIEYTAVECTFQGDCTGTCPKCESELEYLDKELEKKQNAGENINIKNIFSSDDFDKSEYGLLDENILG

SEQ ID NO: 6399 - protein, 141 aa, Methanobrevibacter ruminantium
MVDEIDRFDGKYLFLSNFYICDVEYDGILYPHTEAAFHAQKVFDDETKMKFTNVTPKQSKRLGRKVKLREDWNEVKDNIMYEVCKAKFEQNPDIRKLLLETGDATLIEGNTWNDQYWGVCRGKGRNQLGKTLMRIREELRE

SEQ ID NO: 6400 - protein, 510 aa, Methanobrevibacter ruminantium
MNETKKQVSWMPLILVAFASFIIALDATFMNVSISPLVIDLNTDVGTIQTIISFYTLITASLMLISSKMQDVFGKKKIFLTGALVYGLGAFIASISQNAIMLFIGWSLLEGIGGALMTPATISIISGTYDGQMRTTALAISSAIVGIAAAIGPLFGGVVTTFLSWRYGFVFELLIILIIFIFRKRIPNFASTASKKDLDITGSLLSAIGLILLVLGVLMISGKTIGLSIGLIIASIIVLIGFGLFEKRRKANGKMPLFDVSLLKDRNLSRGTLIRLITAIAMGGSLFSISIYLQTVLKLSAFNTGIVLLPLTFGMLIFSIMAPKFAIRLSHKYAMIIGFSIAIVGCLLLSYQFTLTTRFIDLLPGMFIYGAGLGFPMALSVDTALINTPPESQSSASGFVSTGQSLGMSMGTAIIGIILIVGAVGGMHDAINTYAPDKVTNQEFHDNVQGYFEKLGNVNTTELKHENSLKEKIVSKVVQDAMRLVMYVTALLLAIGGALTFTLKKQKIKG

SEQ ID NO: 6401 - protein, 529 aa, Methanobrevibacter ruminantium
MGNKEEKKAARQRFDEIIGVAKRHHLAKLLTNNEDDEDFEVSDLRYAMEELGPAFIKLGQLLATRPDMVGNDIADDLKLLRDNTPATPFEEMRKVIEGELGKPLEEVYSEFNEEPLGSASIGQVYRATLKESGMEVAVKVQKPGIYDVIVPDVKILNNLAGTVDKHVSGSRTYNLPAMAKEFERSIFKELDYMEEVRNINKITNNFKDVEYIKIPEVYPEYCSSKLINMELIDGYEVTDLFDNEIEGINNTEIAQYGTQSYLKQVLIDGFFHADPHPGNLFVTKDAKLCYIDFGMMGVVNDTFRSNFAQLILLLLDGNSHHLINQLLYMNIISPEQNTDEFREDVDDLLNSYIGVDLDQMDGIFDNLMNVMINHNIILPREFIMIGRGILLIEDAGNRLDPHFNLTAELEEFAKKMIRTKFEPGNLVGGGFNYIVEIEHLLKDLPDRLNSTLDKVEKGELELNMNHTGLDDLKNQLSIALIVSALLVGSSIAILADKGPKVWDISAIGFFGFLFSAILGAYLVIKYIRK

SEQ ID NO: 6402 - protein, 155 aa, Methanobrevibacter ruminantium
MYKKLMILALFCFIVIGSASAADFKINDGFNSSLSDYSFYNEDQNMYINIWDYDDEILSEAYLENSSSYRIVSGENNTYNFVFDSYNDMDHVISYITKGYVALDCGVLEIAEVDGKKQIILVSKEGTNVDSLKTCYDELMKFNQNNNIEPIADAI

SEQ ID NO: 6403 - protein, 645 aa, Methanobrevibacter ruminantium
MRINKSLLMISLLLISILAISAASAADDMVDADIDLASSEISEVSVDDVQATDKNVLSDADEVSVVTQNTPYNENATIDISVNGTLADDSTIKLFIDGEDKGDLNLSAEGKASYVIPASTLDVGKYFIEAVVHNGTSSFGGRSTLNITKVTPIVSVSDVTVKSGDYITIPFNVTDDKGKAIPGDVIVTIVWENDVISKHIKLNDNSSAGFNIADIIGIFGGNSTGNGTGTGIGDLFNRNGTNGTGNGTGIGDLFNRNGTNGTGNGTGIGDLFNRNGTNGTGNGTGIPGIGGNSTGNGTGNGTGDFDIASILAMLMGGGNNTGAKFAYVFEKGVYNVSVEYLSNRNYNGAINDTAKLTITPLEDVLINATIETAKNMSDNTTVSILLTDGYEKPIAGGEINVFLNGEDKGKVTANEEGKASIAFSNLLKGDYELLLNYKETNKTFDFFVNVERMGTVIEYEDMNTTSVNEKVDGRIGEYFQVTLKDNEGKALANRFVQIGFNGKIYNRTTDDKGQTKLQINLFYTGDYTFAVCYLGDDAYNASFIVAKIKVSKQTPKITTKDATYKADAKTKNIKVTLKSAKDNAIKDKKISVTVNGKTYTAKTDEKGVATVNVSLSKKGTYSFTAKYAGDSGYAQVSTKGILTLK

SEQ ID NO: 6404 - protein, 81 aa, Methanobrevibacter ruminantium
MELVIFKAENKLEEIFLNAQLKMQKAKNELIKNMEKDIEKAIELAAIEVETQIIKENIDIAVDALEETIEEEKADLAERFE

SEQ ID NO: 6405 - protein, 153 aa, Methanobrevibacter ruminantium
MSEILPKITGQIIGHFNAFKGSRPAFHGEHTLIVRGISRDKIEIEEMEPKLAELEDILKAREVDVLSDAGKNFVEKVDSYIRDAESIDTAPDSGGLLRMKEQLETMGLHVEYKLFLMPYAGAFVAIWKDKSGFGPLYVEVTASEREETDNDMK

SEQ ID NO: 6406 - protein, 363 aa, Methanobrevibacter ruminantium
MSNLSNIDFENLSRNDLISILECKKEDILKIMDLANSKRENTFVTYSKNVFIPITKICKNDCGYCAFKQSPDDPDATILLEKEEILATLKEAEKYGCKEALFTMGEDADEEPAVKIKLEKLGYENMPDYIYDICKMTVEETDLLPHTNAGNFSYEDMKKLKEYNISMGMMLENSSERLMNTIAHKKSPGKDPKIRLETIENAGKLNIAYTTGILIGIGETKEEIADSLLKIKELCDKYGHIQEVIIQNFTVSPGIEMESHEEPSLLDMVRTVAAAQLLFDEDVSVQVPPNLNYETSQIFLLCGTDDWGGVSPLSEDYVNPSSPWPTLERLEKLTNDAGYQLKERLAIYDKYINEKYIEKSYIN

SEQ ID NO: 6407 - protein, 440 aa, Methanobrevibacter ruminantium
MTNEDNKNMTIIGASRGLGKWIAQHLKEDFNITITSRNQAEGQEVANELKVSYNNDNIDAIKDANIIIFSVPIEHMATTIKEVAPHAPKGSLLMDVASIKKEPAEALEKYAPKDVEILPCHPMFGPRVPTLKRQIVVLTPIENRSNSWTLVKEYLEKKECEIVITSPDEHDKYMSIVQGLTHFSFISLASTIKKLNINVKKSRSFSSPVYSLMLDMISRVVYQNPYLYYSIQKNNKETAYARDALIKESMRLSKLIEEGDEEDFVKAIAESAEHIDEIEEALVRSDKAISMLNQKANILTKLIGEEVGLEDAFSKKAYIGIVRKVSSQTVTIENENNEEIELKISSIDIMDKDELFQWKKKNLKLESFDLTAKFPSSANEDYLLKMFKRIEPVIDANIIFKDKEIEKDLRTYKFHYSLFNKQEKDYVEKYIQGIGGILIK

SEQ ID NO: 6408 - protein, 256 aa, Methanobrevibacter ruminantium
MKWKKIGDILIIDDNFDLDLNDEKTLKDLAHRHKVKSIIRIEKIEGQKREPTIDILYGEDTETIHKENGCLFNLDLSKVMWAKGNNNERLRIAKLVQKDETVLDMFAGIGYFSIPIGVHSQAKQIYSIEINPNSYHFLKRNIELNKINKKAGYDRMIPILGDCAIEAPKYSADRVLMGYVKTTHHFLHPAMECVKDGGIIHYHETVPDKLIETRPYERVKEMAWNCGEREVEVLNIQRIKRYAPGVEHIVLDARIY

SEQ ID NO: 6409 - protein, 207 aa, Methanobrevibacter ruminantium
MSNKNTFEGTTTVGITCKDGVVFASERRASMGNLVAHKVAEKIFKIDNHIAATIAGSVADAQTLMKVISAETSLYRLRNGKDISLEAAAAVSSNILHSSPAYVQTLIGGVDDTGASIYSLDAAGGMIKDTFISTGSGSTFAYGVLEDRFYEDITVEEATEVAIRAIKAATERDTFSGNGFLVANVTKDGFKMLEKEEVDAIIEKINS

SEQ ID NO: 6410 - protein, 636 aa, Methanobrevibacter ruminantium
MASNVLEQIKEEITKKLPEEVKLANIEFEGPEVVIYTKNPDIIADNGDLIRNLAKDLRKRIIIRSDKSVLDSYEDAIKKVEEIVPEDAEINDIKFDEVTNEIVIEATKPGLVIGKYGVTSRDIVRNTGWAPKILRTPPMRSEIIDRIRNTLLNNSKERKKFLQTLGARIHQGGKYPSDWVRLTAMGGFKEVGRSCMLLQTPNSRVLLDCGVNVAGQDDKTSFPMLGVPEFSIQDLDAVVLSHAHLDHCGFIPYLYHYGYEGPVYCTSATRDLMTLLQMDYIDIAHRDNNPLPFNAKHVQKEVKHTITLDYGVVTDISPDIKLTLHNAGHIIGSAMCHFHIGDGAHNLLYTGDFKYEKSRLLEPATTRFPRVESCIMESTYGGHEDVTPSRNNAEKELMKTIYKTIKRGGKVLLPVFAVGRAQELMIVLEEYMHHDIIETVPIHLDGMIWEATAVHTARPEYLSKELRDQILHMSRNPFMTESFNQVQNNAERKEIVEGEPSIILSTSGMMTGGNSVEYFKWLCEDKKNTLIFVGYQSEGSLGRKIQKGHKQLPFEDEDGKTRVFNVEMEVKTIEGFSGHSNRRQLMEFAKRLHPRPDKIITCHGDPYKTVDLASSIHRSFKVETKTPVILDAVRLQ

SEQ ID NO: 6411 - protein, 339 aa, Methanobrevibacter ruminantium
MVTYSESGVDIDLEALTVSKLASKLKPTLEYRNIITDSGHFAALVELGDKAIAMSTDGVGSKILVAKMMEKYDTVGIDMIAMVVNDILCVGAEPIALVDYLAVEEPDPKVAEEIADGLVKGATESKIAIIGGETASLPGIVKDFDLAGTGIGFVDKDKIITGADIQEGDILIGLRSSGIHSNGLSLARRAIFEDGGFTVDDKMPNSDTTIGEELLKPTQLYVKAIIDLLGQGFNIKGLAHMTGGGVNNLSRLKDGIGFEITDYPEPQDIFKLIYQQGVPLEEMYKVFNMGIGFTVIASPEEADAVLEALNKNIESYIVGKVIGEEKIVVKTFEGTEITY

SEQ ID NO: 6412 - protein, 329 aa, Methanobrevibacter ruminantium
MNISVNKERELVKEILTKIGVKENQADVVTEATIDSDLKGFTSHGLGRFPQYIRGIKRGHIQIDGEYDIVQETESIALIDGKSLFGQYIAHEAMSLAIEKAKKTGIAAVGTFNANHFGITGYYSDLAIRNDTIGIVICNTEPGVAPLGGKKAILGTNPVAIGIPSDTYIAVDMATSVSARGKLLEAQRKGEEIPPNTAIDKDGNPTTDPEAALEGSILPFGGVKGYALSLMIEIMSGPLVNAAFGTKVTGTAGDYKENCNKGDLFVAIDPSKFVPIEQFKADVEEFVTEIRESGDTFIPGDLEVKRIAENEVKGLDIDEKLYDTLENNL

SEQ ID NO: 6413 - protein, 130 aa, Methanobrevibacter ruminantium
MVKPVKIHDNNLWDKFVKETESYWAVLSPGTVIAIFIGETDKNFLLIERKEGTVESKFNINNSLNMMDTGLFFTITEEDASDLLDDSSLLTTFIKEGKLGIFCLVDDYAMAEKGLDTLLSDLGFAPSCAI

SEQ ID NO: 6414 - protein, 127 aa, Methanobrevibacter ruminantium
MEEKIALAACSGMSPNGLVARVAVHDLAIDDHEILSICMGSTSANVEGFTRVLDKYPILAINGCEGNCVGKILKEKGVDIVGELNVGDILAETEYKANDAARLDDEGEICVKIVKDIIEDKINELSE

SEQ ID NO: 6415 - protein, 638 aa, Methanobrevibacter ruminantium
MVKRNIVLLDIDYITHDEKAVIRLFGKVKGGESNDIIAIDDSFVPYLYILPLEDIDKCIKDINGLKEEGEIEFTKLEKVNKKDLQVPKEFIKMTLNHPQDVPKYRDKIWDLNSVKQLREHDIPFYRRYLIDNALVPMAELELEGELIDSFETVDSDDESLEILKLSCPPKTANTDFQEFRMMSFDLEVRNPHGMPNPDQDEIIMIGIDSNVGVRKVISTKGDEFDDDEEMDFIEIVETEKEMIERFVQTVKDANIDIIIGYNSDNFDFPYLRDRAKRWEVDLDLGVDGSGLKFLRRGYANSAAFRGLLHVDLYLVMRRYMSLDRYTLERVYLEFFGEEKIDVPGERIYEFWDNGGDELKNLFKYSLDDVVATLKIAMETLPLNLELTRIVRQPFFDVTRMSTGQQAEWFLVRKAYEVDEVVPNKPNMTMNNIRERGSNSGGYVKEPEIGLHENLVQFDFKSLYPTLIISKNISPDVLVTDNISYNAKFEDFETGYDEIDSVLEETPSEDLDEEDYYVCPEHFFKFKKEPQGFIPSAIEDVLNERFRVKNRMKQTEDPVLRKSLDVQQQALKRLANTMYGVYGFLRFRWYSFECAQAITAWGRQHIKKAMKEAEDFGFKAIYADTDGFYAKYVPEMKKE

SEQ ID NO: 6416 - protein, 361 aa, Methanobrevibacter ruminantium
MVLLGAMIAYGLTPIANKIQTKIKYPSISIFLALILVVIPLILLFAYVFYEITVFADVFFNSSDLAGMDINNALNAFVGNLPVELQGFIKPYMGSLSTGLESALSYVLAYTVKLVKGFSNVLIQLFVLICSIYYFTRDGDLIWENIFVFIPNEHKAFFDRTFYEIANVLKSIFYGHFLTAVIIGVMGGVGYYLLGYKFALFLGIITGIFQLIPIFGPWIVYWALAIYAIFVAGDIVQAVLTVLWGFVLSLSDMYIRPVLASNYADMPSLILLVGFMAGPYVFGIVGFILGPLILGVCYAVIKSLKEELEKDNWNSGDEEGSDDGDSEDVKEISDNLDEVSDDKKDSNEDSKDLDLGIEEKI

SEQ ID NO: 6417 - protein, 269 aa, Methanobrevibacter ruminantium
MNVPQVLEIKRIIEETPSIKTFIFDWTMVGENIPTPGQFVMVWNFNDEKPMSISYIDIAKGELGITVKNVGEFTNQLHSLEVGDRLGLRGPYGNGFDTDLRDMKVLAIGGGVGMAPIASFAEEALKNKAIVDVVCAAQTKDELLFDERLKEKGATVYTCTDDGSCGFKGFATHRAIELMAMKKYDWAVVCGPEVMMKPLYGTLESNMIDGEYSMERYMKCAIGVCGQCCVDNTGWRICVEGPVFSTDQMSEIIEFGEFHRTASGLKEFY

SEQ ID NO: 6418 - protein, 278 aa, Methanobrevibacter ruminantium
MLKTKLCGISLKNPLMLAAGVLGSHASSLNWILNSGAGAVVSKSFSKEPNEGYKNPTTVAVEGGIINAIGLSSPGVDAFIEELESVNRIKGRSIASIYGATPDEFSYVAGKIESLVDMIEMNISCPHAMEGYGASIGQNPDLTREFVSAVKDTVSVPVLAKLTPNVTNISEIAIAAEEGGADGLTLINSLGPGMKIDIITGNPILANKFGGMSGPAIKPIAVRCVYDAYEATDIPIVGVGGIRNYTDVVEFLYAGASAVQIGTSIMYEGPEIFGRIRK

SEQ ID NO: 6419 - protein, 426 aa, Methanobrevibacter ruminantium
MEYYITQFIAGFIAFDEDLKIANYKLFDDENIVSNNLKIENKELLEEEIELINELSSDDSTIIIETRKRRSQYKELDNYENIIVETPNKGGEHLRNNLESILLEIGFLNDDKENIDDVEENISNLEEPNQEKYSEITKIYEDIASLKVKESSQEEDKLLIQAINTVDDLDESISKLVERIRDWYTIYFPEMDTIGSNETYIKLIAESENREDIIKNHKEHFDIDLDFSTGADIEEYDLIMVKSFAESIYSLQRSRKDLEKYIDTKMEEIAPNLRDLLGPTLGAKLIAHIGSIKRLATYPASTVQIMGAEKAIFRHLKTGERPPKHGLIFQHPSVRGAKWWNRGKVARNLALKITLAVRKDVFSGEYDPKIAEDYLKKVEEIEKENPFPKKTSSRRKSERQMEKDKKSKKYKGNKKNKKNKKRKKRK

SEQ ID NO: 6420 - protein, 216 aa, Methanobrevibacter ruminantium
MEIFLKDQDIVTRNLRPGIKVYDEKLIQEEGSEIEYRSWNPRRSKLAAALLNGLESLKLENDSKVLYLGASTGTTVSHISDIAYDGLIYAVEFSPVSMKKLIRLSKQRPNIAPLLEDATKPKNYLNKVEKVDLVYCDVAQEKQSELFMNNMKLFLKEDGQGLITIKARSIDVVQKPKKIFKEEEKKLKANGYSILEKIKLEPYEKDHIAFLVEKSF

SEQ ID NO: 6421 - protein, 406 aa, Methanobrevibacter ruminantium
MEIVLCVTGSVAAVETVKLAREFKRQGHSVKAFMTQEATKIIHPNALEFATGQEVVLELTGKIEHVKYSQADLILVAPATANTISKFAYRISDNPVNTLLITAYGHDTPIVFVPSMHDSMYDAVSENVAKLKEEGIVFLNPRLDEGKAKFPAIGDIVLESIRTVNLDRVKKNLTDDSLDESEIEDLNMEMLSKIAGLNVLISLGGTFEEIDPIRGISNRSSGKMGLELAKEAYRLGANLKILAAHHEVEIPKVFDVIDAKSSSVMSEKTIELVPDFDVFIATAAVSDFAPIVKEDYKISSSLNLSLEFEPVAKIIHQIKKINPDIFLVGFKAEYNIPEERMIQCAKTQMQDAGTDLVVANDVYKKGCEFGSDSNEVILVSDEIKKVGLNSKSEIAKSIFKEIANKI

SEQ ID NO: 6422 - protein, 187 aa, Methanobrevibacter ruminantium
MKKIIGIIFIIVILVIGGSLVYKNYKDSQNTVDKSQESIEISKNGITMLIPGDWVEAKSESNTTAIAAADPASKDSAGFSSVNINIEKKTSYNSLSYEFNNNYKALGRDSSYDILYEGNVSIAGTEGMEAGYTSSKTGFLKQHKAIWFKQGDDLYVILCTAPQSKFAEEESTFDFIINNLKFNNSTN

SEQ ID NO: 6423 - protein, 244 aa, Methanobrevibacter ruminantium
MNQDKMKLMQILKNLERDYNDGLISEEKYIYLSNQYRHKIDTIDTSNRIRTMQGKKKVSPRPYSKYEDANYQKSRDEDERLVEKYIHNPESYNINSRGKKTKSGGTSPWYIALAVIFLLFAFGAGISFGIFSENTNSDVGDIITASATINDTAFPEVKQTYKYNRTSNYTKYSSNSYSSDYSSGSSYNSYNSYGGSGYSSGGSGYSSGGSGYSSGGSGYSSGGSSYSSGGSGYSSGGSGSVSID

SEQ ID NO: 6424 - protein, 275 aa, Methanobrevibacter ruminantium
MINDKVAFLGPQGTFSHEAASLLSDNLISYCSIQSVMDAVERGECRYGLVPIENSIEGPVSLTLDSLIHNFDLKIRNEIIIPINHNLLAASDISVDEVENVYSHAQALGQCQPYLERHNMVAHYTLSTAAAAKHVAETGEDAAIGTLKAAELYDLKVIDTNIQENYNNETRFVVLDTEDSPITGNDKTSISFSLFEDKPGGLYELLGYFASENINLTKIESRPSKEGLGHYIFFVDLEGHRLDENIAKILNNLEDNTSFFKILGSYPVYSRELFD

SEQ ID NO: 6425 - protein, 272 aa, Methanobrevibacter ruminantium
MKIKNIMSENVVSIDKNLNICDCLRMMYKDNLSRIPVTSTNENKKSLVGIISEKDIANKLGSVKYGNLAPSHFHVSTVMVKDLITVDADDDLTDVANILIEKNIGAIPVLSDGEMVGIVTKSDFIYLCKAKAYEKVSVKDIMTPDIISISANDRLIHARKVIMDSGVGRLLLTEDNELAGIITSKDIAKALVSFRKHTPEKHMASKIKELVAGDYMSTNVQTISEDTSIPELADAMLETGYNGYPVVDSNDQIIGIVTQSDLLKLIYEMETQ

SEQ ID NO: 6426 - protein, 294 aa, Methanobrevibacter ruminantium
MNRGSVEHESKVAENEGEIMTLAKKEVISIPQTKTIKEAAEMMIEHEFRRLPVTQPGSNKLLGIVTAMDILDFLGGGSKFDIIEKKHNDNFLAAINDQVKEIMTRGVISVGPKATIRESVTKMTENGIGSLPIVDKEGKLVGIVTERDFALALAGSLTNETVGDLMIKDVITTTCGTPIESCSKIMVRNNLRRIPVVEEDKLVGIVTSTDILRFFGDKEMFASMTSNSGLDVLKRQISDIVKPNISVTESYVKLGDLCDLLAEKNIGGVPVVDDNKLVGIITERDILNAVLSKK

SEQ ID NO: 6427 - protein, 370 aa, Methanobrevibacter ruminantium
MAEIKKQVRTRDFIISTDGLLFASTNYIHPEDRIISFLRYIPDENGDREKDGIKYSKVGSDEAYAYLRENHPDYLYFCDVTNVEMMGVPIDKVERIIKPEERLKGLRETYIPIINEKLEKGEDLDYKEELMSKLIDLSDFFHYMASIDYNDLGISGSILPGLQKAGTSDLDFVVFGLENHRNAIKAYKENKDKPVYIEELDKEITLNRINDDFWDFVYDKRIKDDSLTKEEFAWYEERKSNRGLIRETLFDILATRNYDEIEGTWGDTVYEPEGFAKVNCTIKSALGAFDNPAVYTIEDVEILEGPDIEISELASLTHTYAGEVIDGEEVVARGKIEKVLKNGEFEKYRILVGTTRESLNEYIKLRESPV

SEQ ID NO: 6428 - protein, 1498 aa, Methanobrevibacter ruminantium
MKYKKELIFICFIICMLSMASVCASDVNDTYINQNDLKIDNQDNCINYEKVVYTEENLENNLISTEDSLEDSNSIEPSDSFKQKNSLNEGNSDERLNPEIDVALNSIHVNETAEVNVTVRNASGYVLVSVDDQSFNKDLTDYQARFNITGLGFGNHNIAVYYGGDDNYLPGFKLETISVEKYQTQISEIEIGEVYYGEDAIIEVSVPNGVEGDITIKINDTLQTVITEAIHDGMALFSVSGLAVGSYSLDATYNGNDYYENDTASAEFEVKKADPNLSVVSFECTVYDNATILASINEEIHDEFVNITVGDEKYEDCPIEDYGMIAFTGGVLSNFSSYRILIEYGGNENFESAMIEAFVTPKKITTYGLDIIAQNISINDDEIISVVVPDHVDDVVVWVDGQSYRNCSFENNVAVFNVTGLGEGVYTVTATVNDTEFDHKNFTSIFTVSKVLPSIGISINETEIYVGDNVKIIVSLPIDVSENVSIVFDDRELSQKPVDGNATFYIDCLSYGNKSVPAIYYGDEKYRTAVESINFTVNKVPSFLNVAVENISISDNEVINFSLANDASGNITVIVNDETYIVAVSGGKGTLTVPKLNQGVYSVNASYNGDGKYLPSLNNSESFKVLVNSGQMEIIDERNNTVSVYLWDGATGNLSVKIDGKVYNATVVDGFAQVVISNASYGAHHAYVLYEDNESDLKLESVVDVFVPKYLSPIGINSSILKVGDIGYINVTVPMGASGNISLEIDGKSYLIAIDNGIAEFEVENLTAGDKTIFVKYSGDKVYSQNSTSESLTVFKQESSTHCSIEDISVGDVAQIKITGPSDVLGTVIVIINGSEYTASISNGEGILNVYNLQNGDYDIELSYLENSKYLSSEYRDNLSVSKIQTAISSSNIVCQYNYEGYLNVSLKDIKGNPISCAELSIDLDGVKNLVSDVNGQVKIPTKDLDANDYSVLISFAGDEKYLPSNATVNVTVNKDIPQIIASNLIADYKSDDYLIIGLEDSQSNPLAGFDLSIALNGIDGDYDVYSTDSNGIVKVPIKDLAANDYIASIVFKGNANYDAINSTVKVTVEKALSSLFALDLVTVHESDDYMIIALKDSCGNPLVGFDLSVDLNGIDGDYSFNEVYSTDSNGMVKVSTKDLDANTYDVKVKFDGNENYTESNITGSIIVREDIIIVPNASIAFTANDSSVSAILSNLDGVPISNASLDISVNGDESTLITDANGRVAIKINGNSTVIASYKDENNLSTTGYLNVIVKDNITVVEKNNTIYVNQTVEVPVYINQTVEVPVYINQTVEVPVYVNVTPNRTATMIVYNNMTTVAVAKVDGRVGEYFYVSLKDAKGNPLANKLVQIGFNGRVYDRTTNATGGVGLQINLGNEGKYTFAICFLGDDNYTGSFEVALITVSKHSPKLTAPAKSFKASAKTKSLTATFKSSNGNPISGKKLSFTVNGKTYTGTTNAKGVATVKISLNKKGTYSCTVKYAGDTMYKATTTKFNVKIV

SEQ ID NO: 6429 - protein, 312 aa, Methanobrevibacter ruminantium
MLSISTIKTYMFCPLKLYFQSEIDEIYDEEEYFVPKTLKDLRIDIQDLLHKNLRLVKKDMELKEIEETLSKGVFNQIETTFEIIEELNETKKEKERREKSSIYKDSNIEFLDEDRQILNASLEDNDGTLEDLDNEEDEIKKLKDEIIDEVNLNLKILSLKASQAMKNLEKDGNEIQNLFFQSSMYNTLIRDLGIDLIGVIDKIEVEKGKYFPILLKTSNPPSKGVWQSDEIELIANALLVEGEFNTYITVGFVEYLKIGERRPIVIDTFARKKFFKLLTKINKIVEDGEIPHVKTSVKKCRNCEYRELCEKA

SEQ ID NO: 6430 - protein, 219 aa, Methanobrevibacter ruminantium
MSSISLTITTKEEKGVLDEITDVLTSHGVNISYVHLYVKEDVGTLNLELENINELDELIRDLKSKDFILDIEIHGSLNDIFGKRVLIFGGGAQVSQVAVGAITEADRHNIRGERISVDTIPLVGEANITEAVEAVSRLPRVGVLVLAGSLMGGKITEAVRKIKEEHEDIIIITLNMPGSVTKEADLIVTDPIQAGVMAVMAVASTAVFDVKRLKGNNKF

SEQ ID NO: 6431 - protein, 87 aa, Methanobrevibacter ruminantium
MKFVIRPYHMMSLGGYIVEYDFPYRDIIIVNKTSEHIKFEIPVFDESWIEETRALGLEVIPVRKEDSYLNMYRKAHADLDAFKAKLD

SEQ ID NO: 6432 - protein, 332 aa, Methanobrevibacter ruminantium
MSYEISLISILEVVLTLIIALFIGVLIPGIERKYVQARIQQRIGPPVTSPGLWASIKFLYKENIQPNSMAPGLYKAMPVLCFIVVLAIFLVLMPYNYQFMAFSSLIAIVGFLKVEEVAYVLMGSLSESVMSANLRFPDHIKGAARPDSLVSSIEDISSKRSLRMIVFGSFPLYLALFVPAALSKSIYLADIVAYQQANGPFLFTLAGIIGAVVFFVGYMIILNEYPFSYIKAKSDVIEGPYMELASKYRSFVYVTRGFLIFTLGLVFSVLFLGIPPVLFSWKFIAAVIVSLILPVIMASISAFSPIFTNKQLYPTILLVSAMGVLAIVIALF

SEQ ID NO: 6433 - protein, 391 aa, Methanobrevibacter ruminantium
MEEKKAKKQEIIETEIQMGTVHPAALEPYRVRFFVEDEIIKDAEITIGVNHRGIERVMEGLPVEKANMLTEKICGICSNSHTWNSVRTAEKGLGVEVPDRAVYIRVIVGELERLHSHLLYLGHGCETLAHETFSMRVFYIRETIMDLLAMIGGNRVQYGCSIIGGVRPRCELDDNRIQRILDGMDLVEKNVLDFANRFVKDSVVASRISGTGYIPQEQALKLAVSGPTLRATGVKRDLRTDMYEYDNFDYDIITQDTCDVQAQLLMRVFEIFEAIKIVRQAIRDLPEGKITDRSWEMIDTDLIESYIEVPRGTLYHSYAIEDGRVRHCIIRTPSMSNIGAMQYACIDNHITDGQLCIVQCDPCFTCSDRAIEVYDTNYNKLDKSILKSNIH

SEQ ID NO: 6434 - protein, 148 aa, Methanobrevibacter ruminantium
MSLKTLSRSKAIHIMLVYTGGCNGCDIEIVNAVLSPKFDMEQYGVFLTWNPREADILVVTGPVTYDNRKPLEDIYNAIPNPKLVVAAGSCALMGGVYKNCHGDIPSEEIEGPVENVIPVDAKVPGCAVRPQDVLAGVVAALPHLLNAD

SEQ ID NO: 6435 - protein, 222 aa, Methanobrevibacter ruminantium
MKDVIKIMLNGTYTNFKRILFASDRVTDMELRNAILTGTVEPDKKVDEQACIGCGGCANVCPTGAVTMKPLQTPVKIKEGWVKTEVPELDPFKCVVCYWCHDFCPIYSFFEEAGTIHPGNVGEINIDTAELLSEPIKISQEKISFIAQYLSDKSLLSENIVSDADEIENVGAGLERVSKIKDIQDNINEKYEKDAKRSSALADDSNESSSESDESSKNEGGE

SEQ ID NO: 6436 - protein, 486 aa, Methanobrevibacter ruminantium
MYLTTNKCDGQGDCIRNCPTEAIRFVDNKAFSCMCCGACFEACPNHAIFKNKYGGYVVDRAKCNGCGVCQFTCPIESIHIDNGIVKGICSRCGVCEDVCSRNARTDTDNLVLDKQKVLLNSMKMVANTVGYRAGVKKIENMKLPVKSDKSADRVCVSTDMEKCVKCGRCAYYCPTRAIEVIIQDEGFCVGCKICEDLCPTGALKDGQYDKNLCTLCLACVENCINDALKVKDFKIVRNIKDSSMDNPLCSNTKGTIVSCLNCGLCREKFDSPALIKKENALRYDPSQDKDSEENNEKRLEAIYNCPVSTLSENEDNKLFGYCVSCGKCTQVCNEQARSFQTISWDGEVSDDCISCGICAELCPKEAISLKRGTINVDLDKCIMCETCGIHCPTDAIPKTTSTKYKISGGFNYIDENLCVKCGLCKDICGEEAIYTVDISNEDVNLGTKNKNLRFVVDDDKCIYCGACMNICPSKSFIFEREFNRVN

SEQ ID NO: 6437 - protein, 92 aa, Methanobrevibacter ruminantium
MFVLANLLIGPIIISVIFGFVLGSRIHLDEKNSFKFTASGIIALIIGALIVSYGIGQFPYYNDLPIATTFLGALFGLLIGSALLGGRAKGDH

SEQ ID NO: 6438 - protein, 174 aa, Methanobrevibacter ruminantium
MAEDKDLKTTKKSPNWNKDESSPILKIMVLPISFIIASLGIMVILGGHITPGGGFQGGAMIAGAIILSVVVYTVNGSPLKLSHRFISLLESVGALAYVLLGLAGLALTGSFLYNVGGNLYGLVPQAIAAIFKYPDLTNAGMVPYLNIAVGLKVLVGLSAIVIAFSQFKKLAEEE

SEQ ID NO: 6439 - protein, 131 aa, Methanobrevibacter ruminantium
MSDKTSIRSILMVVATIIFASSLFDALYGFKNLIQPGISLVYTAIGTQLAPNMVTLVVFDWRGFDTLGESLILVTAVLVVLLIFGKGKILDKNVNADNGTADSNLTHEADLEIGDSDLELDGADLNEGDDE

SEQ ID NO: 6440 - protein, 111 aa, Methanobrevibacter ruminantium
MTLYQKFLDSVKELKSSFSKDPTTMNNVSGAMAAEFLILVGLILAALFFRHINIAACIVVVILAAILFFTNMPLASKIKSEQSDSLEKMLFYVLIVLGILISVIYWGLKYV

SEQ ID NO: 6441 - protein, 493 aa, Methanobrevibacter ruminantium
MNYLIPLMVVIPILAALIVNILGGKDKTVKAFSIIVGLAIPIIAILAAIGVQYFGGHDPGLLANSLPSNLVGTLVASYNTGIVYIFDNIERIFIFLMGIVAFLSIFTYFTEKKEVSGPYLYLIFMGLASVIALLLSNDIFNMYVFFEITALTQVGIIVASSTEDNYEIALKYLILGSIGGPMLLLGVGFVLGTIGSVNITDIIYAISNNFVDPYSPGLVIGFALILFGWLYSAGLPPFHTIKSAVYSKARPNGSAILQGFSVLCMLAFGIAMYKIFAYIPGFNTAIIVFAILAMVLSIAMSAMEVDFRRMIAFLAVGELGFIALGFGIGTQMSIAAALFQAANEIVITAMLFIGFGSIYYLTNTSDTRKLGGLIGVDSLMGVMILLGGCALAGVPPFNGFVSKLMLVQAALEAGYTELAILAVIVSVVIFFTFVKAFHSVFLEPKPKDLKFVNEKIPRVTVFSVAVLLIICLALGLFPNIVTDVFIPFAGGLI

SEQ ID NO: 6442 - protein, 122 aa, Methanobrevibacter ruminantium
MIMDIQLASLFASGALIIIGLIAAIFIDNIIKKIIGIAFIEEGVNLFLICLGYKAGGVVPIFLPGMTADWFAQNSAYPLPQALVLTSIVIGASTLAVMLALAMVLYRKHGTLSAKEILGDEK

SEQ ID NO: 6443 - protein, 76 aa, Methanobrevibacter ruminantium
MIEYIIIIVAVISAIIALLQEDLLKSAILVGISGFFIAVLFHLLLAPDVALTQAIVEGAIVPVFIALAVYKTKGGA

SEQ ID NO: 6444 - protein, 188 aa, Methanobrevibacter ruminantium
MALGLEGMNLITIIQSILLIISALIIIIAAIGILRMDKDMPNVVYARIHILGMIDVAGIIAFIGLGQPLFALIYIFLAPLLAHALANAYFHAEDDLNNPVLNPNLLNEESDESELEESVDVAEQDGEEPEESVDVAEQDGEDSDSEETSENVEEDSDSEEEASNEDVDNKTTEEDVENLNNSEGDDND

SEQ ID NO: 6445 - protein, 88 aa, Methanobrevibacter ruminantium
MIMELLLISECFLIIALVVFLFASMRIITYKTVSMGLIGTSSLTLAITLILICVGMMWGIEFFKDIALVLLLLGIVGTIAYATFLRRA

SEQ ID NO: 6446 - protein, 104 aa, Methanobrevibacter ruminantium
MFLSRIYYAIAYLVVLILEIIKATIDMAGRIFKGDQYDPIVIDIDTELKRPISQTILANSITLTPGTLSVDLDSESQVIKVAVIAPRDVKDIIPFEPYIKGMLE

SEQ ID NO: 6447 - protein, 245 aa, Methanobrevibacter ruminantium
MSSYKGHTIFAFILSLLMFYDPFAIALAVIGANIPDFDHEFKRNHVLIIISIGMILSIFLYLLNLPIYLGLIIALLGLIFLLSSHRGFTHSILGAVVISIAIFLLVYFGMDLSSYFNLNTITNIPLNYVILVGILIFLAVLFLNKQLASIFILLMLFFITLVYFGIVPVFKINVYSLIFSVFLGLFSHMILDSFSPAGIKPFSPFSDRKCYKKLGLLLFALIIALYLILFPNKLDFYLNLLPHFY

SEQ ID NO: 6448 - protein, 248 aa, Methanobrevibacter ruminantium
MTQEKNNLDLDHISYETGGFISANKNILNNLNLTKNTKYILKESIKGTPIIKLGTNYPKVMMVAGIHGNELAPQISALNLIDQIHDLDLLGTVYIVPFACPKASMLNSRYFDGKDLNRTSHIEGSVGDLILKKAVELEVSAIGDFHSSAPNSNPGKEGVFCTEVPTMASFRLADFISKVTGSEKIVYSSAGIPFKGALEDEANLKGIPAVTCEVLSAIGYANERICYRSIIQMKAFLQYFGFFDRYME

SEQ ID NO: 6449 - protein, 391 aa, Methanobrevibacter ruminantium
MEKVVLAFSGGLDTTVCVKLLEEEYNYEVVTACVDVGQPQEELEKSQNSADNINAGKHYIIDAKDEFAEEYIARGIKANAEYEGYPLSTALARPLIAMKIIEVAEKEGATAIAHGCTGKGNDQFRFEAIIRSMSDFKVIAPIREMNLTRTEEQAYAKEHGLNLSYDKIYSIDENLWGRAIEGDVLEDPANEPPEEIYEWTKSAEDAKDTPTKVAIEFEEGVPIAIDGEIMGLVDLINKANEIAGENGVGRVDIIENRMIGLKSRETYEVPGAKLLIAAHQALEQLVLTTDELRFAQYMSGLYADLVYSALWQEPLREDIDQAIDHMQRRVSGKVVMKLFKGSIQPLSRESPFSLHSIEQITFEDKETEQSEVEGMIKYHGLQAANYQKLNR

SEQ ID NO: 6450 - protein, 220 aa, Methanobrevibacter ruminantium
MPNTGRCKELLVEDAVVYLRPSDNPNRKTKYSLYYVENNGALVAMFSQEANKIVFDAINKNKVKELSNYSIIESEKTIGSSRIDIYLANHKSNFKDNADSKSIGEDSKEDIIDETYVEVKSVTLIKDGVAQFPDAPTDRGRKHLEELISLKKEGIRAVVFFLVEHPNGNSFRPNWENDPKFSETLVKAYDEGVEILVYKTRNDFEGIELVGDCLDFNLNK

SEQ ID NO: 6451 - protein, 522 aa, Methanobrevibacter ruminantium
MDPIDMMATDYNCEYLGLSRLCLMENAGKSISDEIAILSTYKYSRPVKIVIFTGSGGNGGDGFVAARHLLNRGFEVDVYALNTADQIKSGDALDNLKILMNLEPRVSRLSVQFIKDSADLDKIKLDNNSPCIVLDCLLGTGIKGKLREKVRKTVELINAINGLRVAIDVPSGLDPLTGEIADIAVDADYTVCFHKVKTGVKLAGEGKVGGIITCDIGIPIEAELFVEGGDLLRLNNRPSSSHKGNNGKILIVGGSLDYYGAPAISAKASIATGADLVYIYTPKSAALPIKSFSEDFIVKEAKGDYLSIDDLDDILEMASKVDAVLIGPGSAQNEDTMKLFNVLAMKIDKPLVLDADALKLVDFSLINKKEDIIITPHYSEFKSFFKNQIPRDIERNLDNIVNLNDDSDFVKVNDKIDALQSITASFDGSVILKGQYDFIFNKNKLKINRTGNPGMTVGGTGDALAGIAVSLLSQGLDSWTSAILAPYLNGKAGDLAMDAQGYGFGAQDLTQYLGAVMANLID

SEQ ID NO: 6452 - protein, 386 aa, Methanobrevibacter ruminantium
MKNRNVWRIIMSEIKKYMEDLKKNKTGLKGILVIILIFAYGILGSYYIMNLNINNSIYYTIITIATVGYGDIIPVTPLEKFFSTSLALTGIGLIAYIFTIIITSFEENLHDIRSGRHMEKRLAKMEDHYILCGFGRVGTAVYEELMKRNQKVIIIEKNEDKLEDIEETENVVPFNANATEDKTLKKLNIDKSLGVIVTTGSDVDNLFIVLTTREMNKDAWIISRASKKENIKRLKHAGANKVISPEVSGGTDIYFAAVQPNLVHITQKHGIDYLEREFEILKKHNCHLENIEYHFPGIKTPVTRTIGVLDEEEKDHFIDMVKNNPEVHESMDVMYETVNGVHSHWISGPDKSHVDMVIEELKKEGNLLGVNLDFKEINEFTKQFKE

SEQ ID NO: 6453 - protein, 188 aa, Methanobrevibacter ruminantium
MKEYLSETKSIDYMNPIIQEKVKELKEQSSDDADYIKRAFLFVRDEIPHSWDIQTNTVSRTASDVLKNKTGICWTKSCLLAALLRANEIPSGISYQLLTIGEDDSFGHMIHALNTVYMDDLDKWIRMDARENVGDDDEEFSLDKDYLAFSPREEFGEVDYQDNNPDLDEKLINLLEKTENLLEMELDF

SEQ ID NO: 6454 - protein, 295 aa, Methanobrevibacter ruminantium
MEINGVEIKETYAEGFGIKVTRILVTAATAKLAKIAATEATGYATSVIGCPAEAGIDCFVPSECTPDGRPGYAIMICHASKKALDHELMERIGMCVLTAPTAAAFNLLESEDELKTAFKLKYFGDGFEKDCCIDGRKVHSIPIMSGDFIVESTFGFKAGVAGGNFFILAKDQITGVKAAQMAVAAIRNIPGTITPFPGGMVASGSKVGSNKYSFLPASTNEKMCVTLKDQVDSDIREDAEGVFEIVIDGLDEESVKKAMKAGIVAACSVDGVLEISAGNFDGKLGAYILNLHDLF

SEQ ID NO: 6455 - protein, 423 aa, Methanobrevibacter ruminantium
MKNKKLIIFLIFGLAIMAAMLYFIGIDQVVDALKYSNLWFVLLAVLLQIFTYFLYTWRWQIINKSAGMTLGIWKLLPMVLVSLAVNNITPSGRGGGEPVRAYLLAKEGHYKFEDTFATVIADRALDTFPFVILAILTIIAIIFSVSLPVYWIVILVLCVVGITAIVILLLYVCINEAFGVRLTEWILKITKRFYKNYNDALEKRIVEAVASFQSTMNALIRDKNIIYYALPLSFIIWVFEILRVYVVFLAFGAKVSPIIIGEVFILASLVGMVPLLPGGLGAIDGVMILFYSRSGITASLSAAATVVERSISFGMTTILGLIFLMKYGTSILDASFKLAESEKAENLEEITEDEQKILDQLSEDGDKSEDSDENREEAVLEVLDGEPSIEVVDEEPTIEVIDDEPTIDVLDEKEEAIDEKVKN

SEQ ID NO: 6456 - protein, 496 aa, Methanobrevibacter ruminantium
MKRKYITKADLFIVLHYLGYIMQGLGVVLIVPTLVALIYGEYDPIAPFMIPCFVSFVLGTAFSKKFKDYTKLRLKHGMLISSFAWLWASLIGASIMVLSLGIPFVDAIFENMSAWTGSGMTFFVNVEVLPKSILFLRSLEQWLGGLGIVIIFIGILIRAGTAASRLYKSEAREEKIKPNITNTLRKALEIYLIYTAVGIFLFILAGLPIFDAINITFTSISTGGMSIKNANVGFYQDSIVYLISMFLMILGATSFTIHYKIVKTKGKALFKDVQFQLLITLIIVAGAFFIATNKMVPIEELFTIVSAVTTTGANVVDPHVLATWNGSTLIVLMVLMLIGGSSGSTGGGLKLIRIITVLKGMNLTVTNLVSPEGRVVNTRIGGKKINEREIKEASAYIVTFLMFLVFGWIIMTMYGYDPFTALFDVISIQSNNGLSTGIVYGGLPLPLKLTLIFLMWIGRLEIIPVLVLFRTFYGLVNPKRRIKQMKKTNGNDKKTN

SEQ ID NO: 6457 - protein, 224 aa, Methanobrevibacter ruminantium
MYIVIMGGGRVGLSLADRLIIHGYDVTIIENNDELCDHASEELDAMIICGNGTDTKTLEEANIEEADVFVATTGNDESNLLSCILVKEYTNGKIIARVSNPDHEEAFKKVGIDKVISPERTAAGFLEKVITRPNVADLMAFGAGNAEILDMTIQNPKVFGKKVSEFSPTKDYIIISKNNDNHELEIPQPDDILSNGDKISILVKRNAFEKAEKKFMGAGGLFGF

SEQ ID NO: 6458 - protein, 215 aa, Methanobrevibacter ruminantium
MEKIKNVYCIEGLMADSNSYLIDNNDGDGDYNYILVDTGTGQSNAFLFSQLGEIGVKPEDIDLIVNTHCHFDHVGGNDFFPNAKIAIHKKDAVALRDPDSELTVSSLFGAIVRKHDVDIELEEGDKIANFDVILTPGHTSGGISLWDGEILICGDTIFANGGVGRMDIGGSPIDMKDSLMRLKEFDVEYLLPGHGPWVKNGKEHVKMSCLNMGIR

SEQ ID NO: 6459 - protein, 112 aa, Methanobrevibacter ruminantium
MRAPASGGATKKPLPDVVAGNGKIYLAIEVKTTTKDKIYIDHPQIDALIEFSDIFGATPYLGMKFKYTKWLFLAPENILKTKNGNYKIEKDYCLEKALELDEICGFDTQVKF

SEQ ID NO: 6460 - protein, 343 aa, Methanobrevibacter ruminantium
MNFLNENHYRDSMNEIDSIETLELINKANSLSLKKGYTEISLERAVFLSWWCDKGDCKFCYMSTQKDKIKDPKKARRRVNNILAEAEMCSRLGWNIEFLSGGYKSFTTSEIKSIAENIHSITGDGVWLNTGITDELEEYGKEIKGITGAVEAANPEFQREVCPSKPLNQISNMLDKAGDLGFKKAITIILGLGESLEDVEYLKDYIKEHKIDRVIFYSLNPHPETIYVNSSQPASLYYANVVSSIRLAFPDIEIICGTWIDNLANIGILILSGANGITKFPLFKMFGTKYGKRVEEEVKWTGRTLKGTFTDKDKLGPEKSQINPEFDQYIKRYIKESLKNKYQ

SEQ ID NO: 6461 - protein, 451 aa, Methanobrevibacter ruminantium
MMCGLEIHVQLETDSKLFCNCPTNYQEAPANTNVCPVCLNQPGAKPFPTNEKAIENALMISLMLNCKIDKNFTYFMRKHYDYPDLPCGYQKTSVPIGYEGELNGVRIREIHMEEDPGQYKPDRGIVDFNRSGIPLIEIVTEPDMHSPEEARNFLKELIRVLQYSGGARGEGTMRADVNVSINGGNRVEMKNINSIKGAYKALNFEVIRQKNLMKRGVEVKQETRAYLESQMITVSMRMKEDADDYRFIPDPDLPPMKISDEQIDKVLDIMPEAPHNKVKRFVTDYGIDEESAKVLTSELDLAQCYEEVAKEVDPVFAAKWMRDELKRVLTYNKLDFADSGILADDLIELFNMLQNKEITTKAGQRVIEQMPNSKQTPREIAEEMGLIGVVKDDEVLAAAKQALEENPKAVDDYHNGEKASLNFLMGQVMRLTKGKADPRETVKILRDLLEE

SEQ ID NO: 6462 - protein, 283 aa, Methanobrevibacter ruminantium
MEGKTMEQEKAAVRDYMTKNVITVRYDSLNNDVIALMKETKHDGYPVVDEEGHIVGIITAYDLLLKDWETEYVKSIMSQEVIVAREDMHINDASRVMFRHGISRLPVVDKERHVKGIMTNTDIVRSHIERSTPTKVSAFRETMEKLYDIKTTLTREQVPVDKIKPTQDRVYADELQGRTYELEKGLAEPTIVVKTGDRYILVDGHHRAVATVQLGLDKIDSYVVDFNQDITLGMEKTAEKQGLKTFNDITIIDDDQHPLIALTETIKTANQKQKISEITKNKN

SEQ ID NO: 6463 - protein, 95 aa, Methanobrevibacter ruminantium
MDEKILREVYNVLESRRDSPIDSYTSNIMKDSDKKAEDKILEKIAEECGETIIASKNDENLVYESVDLIFHTLLLLVYKGVEFDEILEEFDRRRK

SEQ ID NO: 6464 - protein, 215 aa, Methanobrevibacter ruminantium
MFILIFRDFDPEIHDVYKVAELIYDVDYRTFVHVFKSKEEGVEAIKNRLTFEFAEDREDENELFYLFFDDEDTEEKEIIGMFNGGKGVQHSLFKDILEQFKHLKFSEALGLSKVSFMDNFVLVDVGDDDFYICELAICSNQRGKGYGTEALDQLIQLARDLNCKRVVLDADFRNDGAFRLYSSKGFKVFNKKSFGFPGKKRGMRNMELILDNARE

SEQ ID NO: 6465 - protein, 271 aa, Methanobrevibacter ruminantium
MMKKILKRLAEGEISIEECETLLRAENIRQLDDIANIDISRKDRTGFPEAILADSKDYEDLLAIVKGFFDDEFDLKDNIIITRLSKERYGLLSQDLSYLLDNGIKFDYNPRARILVIYKDKLVDFNPEYGKIGILTAGTSDIPIAEEAKVIVEQGGCEVLSSYDIGVAGIHRLFPKIAYMVEEDVSAFIVCAGMEGALPSVVAGLVDVPVIAVPTSVGYGVGADGKAALYSMLQSCAPGLSVVNIDNGFGAGVYALTIVKNIAKKVKMSKE

SEQ ID NO: 6466 - protein, 815 aa, Methanobrevibacter ruminantium
MESIKVLVEGIVQGVGFRPFVYRIATELELVGYVRNLGNVVEIILQGTDNQLADFIYKLQNELPPIAKINNLRTEDIEIDSPYTDFTIKESSDSFSGTSVIPPDLAICDKCLEEINDPQNRRYKYPFNACTDCGPRFTVIENVPYDRDKTTMDDFPLCDECEIEYKNPLDRRYHAEASCCEVCGPSLKLMKNETEEGISTDKEGNEIKAMKRTAIDTESNDPLKDTARLLDEGKIFAIKGIGGTHLVANVKDEKAVSTLRERLGRKNQAFAVMSPDIETVRTFAIVSDEEEKTLLSKERPIVILKKSKDYDFAESVSPRLHNIGVMLPYAPLHHLLFNETDSPAYIMTSANVPGEPMMITNEEILQNLDEIADYYLIHNRRILNRCDDSVARFRNNELAFIRRSRGYTPEPYDLKGKYTDINPDFDNLNILALGPELDVTFTILKNSKAYVSQHIGNTNKYRTYEFLQEAIKHMMRITKTDSFDAIACDLHPQFFTTRLAKEYAEKYDCPLIPVQHHHAHGISLLNDHYDDNDLNEMIIIAADGVGYGADGNSWGGEILYTDIKGFERMASLMPQKMPGGDLCTKYPARMMASILSNPESDYENEKYTKEYIEELLNNNYLDSFKHGSVEIKSLFRQMETNLNVGINTSTGRVLDSVSTALHICDERSYEGEASMKLESYAFEYKGEGSLDDFPIIVKEYEDENGKRLILDTTAILRYIIDKIEEGEDLHKIAAAGQKAVSIGLAKLAIESAKEKGITTIGATGGVFYNEAITDYIKTYIEKEGFDFIQHINSCPGDGSVSLGQAIVAGTNLNNF

SEQ ID NO: 6467 - protein, 165 aa, Methanobrevibacter ruminantium
MKRKVIMILAILLAVGMTLTAVSAEDSWSFNFSSEENSDGGSINFENGKLTIQGIEFTIPDGYEMDESSKKVAEDAEDFDAKYSACKFTKGDDEIVVNVFFTDGDFENLSANNADQVEKTLNDIKGLYEENKYGDNTPTFTYIEDGKVVKINAPNDEIIESVMGK

SEQ ID NO: 6468 - protein, 280 aa, Methanobrevibacter ruminantium
MKKSSIIIFFAVFEIIAILLFITLNDIFYLFNFTYIGACLSIGLYLYNVDSKYSKYARNFIQLAIGLYMLVYLGIISRENMMIEGFWYYLFLGVFEAAVIHYLVAKILGPFLFGRGWCGYACWTAMILDLLPYKTPNKNLDHERKNFGFIRYILFIASLIGVGLLFMMNVPNLSTVMFYLFIAGNIVYYTVGIILAYALKDNRAFCKYICPTTVFLKIGARYSLLKVKYKRENCISCNKCYRVCPMDVDICNNDKNKKNGTECILCLSCAKECGNDALFL

SEQ ID NO: 6469 - protein, 171 aa, Methanobrevibacter ruminantium
MENEGQNQQNLNDVDMEAILDVMGCKTRRDIMDLLREEPRFVSEISQELQIGQKAIIEHLRAMEDIGILTSSTKKVVRGRPRKYYDMPNDVNVNITITKNTFNVAISQDMLNANHVPQLPSGDEWSKLLDIEKRIDQGHTEAIEELKSQIRLYDNLKERAEYILERTYNKY

SEQ ID NO: 6470 - protein, 230 aa, Methanobrevibacter ruminantium
MANKKEEEKEEESEDAKKSTKDKIKSKISKSSDDSSSDNEESSSDKEESSKDDEKDKELAKLNEDLEKKDEEIGELKSHIQRLQADFDNFRKQNDKQKQDLIRFANEGLIVKFLDVYEDMERALENSKTEEELREGLELIYSKMKGTLEKEGVEEIPAVGEKFDPFKHEALLTVDSPDHENNEIVDELMKGYTLKGKVIKYSKVRVCKKAKKAEINKAEEAKDDEDKKEE

SEQ ID NO: 6471 - protein, 631 aa, Methanobrevibacter ruminantium
MADAKKEKIIGIDLGTSNSAASVLVGGKPTVIPSAEGASQYGKAFPSYVAFTEDGQQLVGEPARRQAVTNPENTISAIKRKMGTDYKVTIQGKQYTPQEISAKILQKIKKDAESFLGEPVEKAVITVPAYFDDNQRTATKDAGTIAGLDVVRLVNEPTAASLAYGIDKQDDDDDVNILVFDLGGGTLDVTIMEFGGGVFEVQSTSGDTQLGGTDMDNAIMKYLADEFKAETGIDLMNDDQAVQRLREAAEKAKIELSTTLTSEVNLPFISMGADGKPHNLINNLTRAKLEELVDPIVNKCGQPIKQALDDAKMTKNDINKIILVGGPTRMPVVQKFVENYIGKPVERGIDPMECVAMGAAIQGGVLAGEIKDLVLLDVTPLSLGIETLGGVSTTLIERNTTIPAKKSQIFSTAADNQPSVDIHVVQGERKMAADNTTLGRFQLVGIPPAPRGMPQIEVTFDIDANGIINVTAQDKGTGKEQSITITSSTKLSDEEIEKAVKEAEMNAEADKKKQEEIEVRNNADSMIYTAEKTINEEEIKDKVSDEERTNIERLVAELRELISGDDIPAIKDKTDELTKVVQDIGARIYQEAAAAQQAAQGAAGGAGPDPSAGPSNDDDDGTIDAEFEEKD

SEQ ID NO: 6472 - protein, 391 aa, Methanobrevibacter ruminantium
MRKLAEKRDYYEVLGVDRTADEKEIKKAYRKLARKYHPDVAEEDKKEEATEKFKEISEAYAVLSDEEKRQRYDQFGHAGMDGFSNEDIFRNVNFEDIFQGFGGGGGFEDIFDILFGGSSRSRHYNAGPRRGGDIYTETTITLEEAASGVEKDIKIRHDVLCPECGGSRAEPGSEVETCPVCGGTGQRKQIRQSLFGQVMNVVQCGECKGTGKIIKEPCHNCKGKGTVKEDKTISVKIPAGVETGNRLRVSGEGHAGDLGGGNGDLYVEINVKPHKDFERDGANLYYEKQISFVQASLGDTVDIPTIDGAVELKIPAGTQSGTVFRLKEKGMPQMRRSTKGNLYVTITVVVPQKLNKEQQKLLRKFAQISGDEISVYKKGIFDKVRDAINNP

SEQ ID NO: 6473 - protein, 256 aa, Methanobrevibacter ruminantium
MKLMMYSIKMRSAKGGPHEEGGKHISGAERILREDEIEEELINVYRRAITHEKGKPDFINLKIEAIDEDKILYKKRLNIIQHKVSSKEEGLKLAKELLIKNTVSEEAAKEGISSIQKLKESIHGAMLLDKDSGKRIDDKGIKGVRVTGIASADIKKYKESLKRDGREGLHLEEALILASKIASCKAIVAELCWSDDPSYVIGYVGTKENYHRIPILKDKGNPVGGRVFFVDTSQLNDNYTLEDLIDYLEKQIVLIE

SEQ ID NO: 6474 - protein, 414 aa, Methanobrevibacter ruminantium
MNPNLEMKLKEELEELKNNNLNRTIDDLRFISSTKAIDKDGKEFLVFGTNNYLGLTHQPDVINASKKASTYGTGSTGSRLTTGASFEARELEENLSKFKSTESTLIFNTGYMANLGIIYTLTKEDDIIFSDQLNHASIIDGTRISKAKVRVYKHKDTKDLENLIQTEIKELKEKNINSSNFFIVTDGVFSMDGDIAPLPELVEIANKYNCCLIIDDAHATGVIGKTGKGTVEYYKDKTGIDLTESVDLQIGTLSKALASEGGFVCGKKTYIDYLINKSRPFIFSTALSPSTIASANAALNLLKKNSNEYLTKLQNNTKLMRNLLKEGGLNVIDGETPIIPIIIGPADLTNKFSKELEKEGILVSAIRPPSVPKGESRLRLTVIATHTKEEITFTAKTIIKIWNDLKKKLEYENH

SEQ ID NO: 6475 - protein, 3176 aa, Methanobrevibacter ruminantium
MNKRIFLYIALIFIISLLSFSAVSANEDISSDNLILDENVYDEKIILDDVQDKNIISDNDYDDVIPVENANDNAILAGNDEELILDENNSEISEDNKNDKTKLSDPNTYSFTRLNQAINSGASVINLTDNYQYTEGDESFIHGIMISRSITINGNGMTISGSGVARIFEVFTSNVIINNITFRDAYAEGDSNRQNYGGAIFMYGSDSIVQHCKFINNNANNAGGGAIVLVGSNSRVEYSDFTGNNGQNGGAVYLYGNNTKAIYCNFTSNNASEKGGAVYTYGSDITVEFCNFTNNSAYLEGGAIDWEGERGTVKHSSFANNTANNNGGAISWYTANGTVEHSNFINNRMATFGGAIWWYGEKGTVKHSNFTNNSGRNGGAIQWSKNDGTVENSNFTNNTAILAGAVRWVADNGTIKYSRFINNHGYSAGAIDYHLTYANISGCLFINNTSDYRANVYEDLFESKSYSNFNNNILLNNGGNEINFNTSEGFNADYNWFGDNSLNYLDKPNIYSNTWLFLQPIVNHDSVFLGESCEITFRLYSYDGTEVHEYDNALVYPIKLTLNSNYGNVNDTVGLEEKAIFTPQTLGYTSVDVYAEGSYIGSVPINVYVPSFSDLNRTINGNEDSIITLNKHYIFDPETDAAFINGVIINRTVTINGNGFTINGSNNARIFQVTASNVAINNVTFANGYANGSTDEDKDGGAIHWSGANGNIENSTFYNNHATGAGGAIIWQAQYGNVSTCLFINNTADDGANVYHNNYPSDSHSNFNNNIMLYNGNNEVHFTVYNGSNADYNWFGHNSSNYNDATTGIIGDIWLFLNATANPDTILISNSSEISYKLYAYNGREIQEYDNHLLYPITLTLSSTNGIVNDNVALEEKVIFTPQNLGTATVTAKAAGTDIQTISIKVFEASFSDLNRTINGNEGFEIILDKNYAYIPEIDAAFINGINITHTVTINGNGNTINGLDKARIFQVTAPNVTIDNITFINGYANDDGGAINWQGPNGIIINSEFINNHATSAGGAIRWFAQYGNVSACLFINNTADDGASVYYNDYPSDSHSNFNNNIMLYNGNNEVHFTVYEGSNADYNWFGNNLSNYNERPTGFDGNVWLFLNATANPLTISISESSEIRYKLYAYDGRNILDYNRTLLYPINLTLTSLNGNIEDITEDKAIFAPENLGIATVTTKAEGIDIQKISINVLYGTIFYGSFSDLNRTINGNEDAEITLDKNYAYNPEIDTAFINGIVINRTLTINGNGFTINGSNKAPIFHITGDNVTINNISFVNGYANAYVNGYDGEDMRGGAIYWQGRNGKVTYSNFTNNNANDGGAIYWFGTDGIVEYSNFINNNANDGGAIYWFGTDGIVEYSNFINNNANDGGAIYWFGQNGNVENSVFTQNHAGSYGGAIYCSGAESIVEYSNFTNNNAYNGGAIYWFGQNGNVENSVFTQNHAGSYGGAIYCSGAESIVEYSNFTNNNAFNGGAIYWFGQNGNVENSVFTQNHATFAGGAIYCSGAESIVKYSNFTNNDAIKGGAIYWNGRNGNVENSVFTQNHVDNDGGALYWDDSEGKVTSCIFVNNTAETKHSGHLILPMGRGGAIYWNGRNGNVENSVFTQNHVDNDGGALYWVDSEGEVTSCIFVNNAADVEASVYYNERGAYSNFSNNIMLNNGKNEIKFKIFDRSNIDYNWFGNNLSNYNEKPGGFEGNIWLFLNATVDPNMLLLGESSEITFRLYAYDGTNVIEYDNDLIYPINLTLISSNGNINETVGLEETAIFTPQNVGTAIVTAKAEGFDIQTVSINVRAASFSDLNRTINGNEDAEITLGKYYEFDPETDGAFIHGIIINRTVTINGNGTTINASGKARIFQVIADNVTLNNITFTNGNASGEGADRSGGAIRWEGANGIISYSNFTFNHAYLTGGAIIWSGENGTVKHSSFSQNDVDGSGGAIRWAGAKGTITDSDFYLNSATDAGAIWWLGAYGTVKYSNLINNHAGSRGGAIMWSGENGNVTYSNFSLNNGGSGTGYDGGGAIFWDHLNGTVSYSNFSNNHINGHGGAIAWHEQYGNVSSCLFVNNTATDGASVYHNDHSESYSNFNNNILLNNGENEIHYDVYDGSNADYNWFGNNGSNYNEKPAGSVGNVWLFLNATADPNPISILGSSDVSFKLYAYDGLDLIEYDNNLLYPIILSLSSSNGNINDTAGLDEKIIFTPQNIGTATVTAKAEGIFQTLSINVYPPSFSDLNRTINGNDDDEITLDKYYEFNPELDSAFIHGIIINRTVTINGNGSTINGSSKARIFQVIAPDVVLNNITFANGNANGENEGGYGGAILWEGDNGRVEDSTFINNNASGYGGAIFGGNCSDNVIFQNNHAGIEGDDWYVPKPVISVNDFTSTYKSGEKLYVNVSYVGTQIDGINVTISVFDSSNQLIGNYSCLSGDGWTVDLDAGNYNALVFVDSDEYGYGEETIALTINKRASQISANPLNTTYNGNENIIMILKDNYNESIANATVLVDFNGEKNLTTDENGQIVVSANGIVPGEYWAQFIFDGSKNYDGSDEKVKVIISKASTSLSSENMNVSYNESKYLIATLKDQYSNPLAEISIEFKSNSSTVKNENTDNKGQAKLLIDFNPGTYNIDISFAGNSLYDASYATVTVVVNPSDDSGNGTEPSGNGSSGNGTSPEGNGTSPGGNGTSPSGNGTSPGGNGTSPSGNGTSPGGNGTDPGGNGTSPSGNGTDPGGNGTSPSGNGTSPGGNGTDPSGNGTSPGGNGTDPGGNGTSSTVKDTLIGISTSTVIYGNDELINLTLTTADKTPIDGVIELRVGNSIYNVTITGGKGSKALSNLTIGNYTVTADYKGDSEYNSSTASSSFTVRDRIETRIIYNNMTTAPVGANDGRIGNYFRVKLVDENNQALAGVPIQIGFNGRIYNRTTDSEGGAKLQINLAKEDGYTFAICFKGDDNYNASFEVAKIDVNKKYPKPNSANSESAEPANKTQKNTRLETSILYKDMKTESVLKAEGRAGKYFEIQLVDNNKKALAGVPIKIGFNGVVYDRITNATGGAKLQINLLKVTQYTFAIAYLGDSKYQASFEVAKITVNKQTPKITAPQKTFKAKAKTKTVTATLKSQRGTLLSGKKIKFTVNGKTYTGTTNSKGVASVKVSLSKKGTYTATAKFDGDANTKATSVKFKVKIS

SEQ ID NO: 6476 - protein, 113 aa, Methanobrevibacter ruminantium
MARHKSNKRLNKGEEEDPMSGAANLVDAMLVIAVGLLVFLVISWNMQGIVFNEDMTPEEKQEVMQQMQQVTELEEGQELNDTPDVSNSSGKGYTEMGKVYKDSSTGKLIMVEG

SEQ ID NO: 6477 - protein, 214 aa, Methanobrevibacter ruminantium
MVTVIPGSDLLTSALNVVSQSLQIPVIVFLLIFAVYAVITVGGLISEYSSRKKVPVKVIKDLIYAISRSEDVTELENILKNARIPKNQKRVLINIARSGELKKDSREALAEKLIENEEDIIEKKLQKTDIVTKIGPTLGLMGTLIPMGPGLAALGSGDVTTLSNAIIVAFDTTVVGIGSGAVAYVVSKVRRRWYEQYLSNLDALSKAVLDRLNE

SEQ ID NO: 6478 - protein, 241 aa, Methanobrevibacter ruminantium
MFCGEKMDTISMLWQFGILAAVLVFGIKLGLAVGLANLSKKYLATVCIGYGAGVLILAQISSYFATEITELIYTYNSLFFIIMAVIMILAGIFTIREWKVFEKNTTAATCAAVIAPCPCCFGSIIVSILLVAPTVGLGAVDLSVYVAAALVLTIIVTYFASSIFVRYVDKPYPIVLGNFMFFLGIYFLLSALVIPNIAAIMNKSMGSISIVSMESLAGSIVALVLLVVIGIVFSRKNNILS

SEQ ID NO: 6479 - protein, 1875 aa, Methanobrevibacter ruminantium
MKYNKKIFFLFLLLCLIIPQAIYAGDVDDLSDAGNYTRDNSPLTISSTYQSSTYGSDGGYDDKNENIYILDKVSDGDKSKTCCSKDLSLDNACSMDKSSCSKSNSACSKGISSDKDSSNLSNTYLVSENNYNDFNVDIDLNDKLSDLDLNNDLSLNKDLTLNLNSNNDMDYLNLEEVIQTDGTLTYEGDLDQTYLNDESLNQDVQNDDSLNKNDLKSPLSDENTFNIFIISDNTGNNLFDAVACEILDNSNFSNVKFNIRSGNQINAMSEDEIYELMAPCDAFIGQWVSSNVDAVLTSLLNNHPELSNKKLFLILEPPTGNINSSSSSLNLVRNSTIDYKKIFNGISNDDLINYFKATKRGNNFESIQEYIDNEGSSFNSIFNNLVLYKDINDKANLKNELLYILYLLGHGCSYESANFTGVQASGIFRDRWYSFDEYVLTFFNESRNRTIGILESTMYIQSQQLDLVNEITERLESKGYNVIPIYCPAGNAEQLNIMVKYWTSACSNISGFLENPQDFDIYVDGIISMVAYGVGGENFTNATKFFEDANVPIFRAVHSEYITNEQWELSPVGLSTTKSDKWWHVTIAESQGIFDATYVGGVDSYISNRTGAIILTFVPVHENIELLTDRVDAWVDLKYTPNEDKNISIVYYNYPPGKQNIGASYLDAITSVYNMLYTLKDEGYYLTDLPNNVSELEDMMIACGINVANWAPGEVEKLANRSGVALLPVDEYLEWFDSLDDIVKVQITEGPVAYIGQMVRRAVLINYTDEVETMVNDWYNQIKALLPENQTVAATNILDKLVNSLKLYANASSDGDENASLYYDEFLRYYDEFKSLNVSGLNGWGEAPGNIMLVNRNGTDYFVIPGLTFGNVFIGPEPQRGWEADIENLYHCTAVAPTHQYLAAYYYMQTRQSNAMVFVGRHATHEWLPGKEVLLSYNDYGSIVVGKVPQVYFYITDGLAEAIQAKRRGFAVLISHLDSPKSYTHLYGNLTVLATLLEEYDNNHIIIESDSDKDNQAITYQVIKDNQTITYQVINQELEDNLTRAIKDLVIANNYYLTIGFTAEELNNTDMFSLSSTLNAFLKNTQNTLYPLGLHAIGQKWTDEDLANTVAIIVSHDFEYGGKKTNLFDQLSLYYYGEKYSNLTPLKRDYILNRSVDVCKALIYWDTETVSDTIGIGSPEFIESLNIAKKYIDLYNQCISLELEEMVSALNGGYVPVNIGGESVTVPQVLPTGANMYQDQSSELPTQKAWDYAKTLSLLTLADLNDTTEKIIMGIWCVETARDDGALVSTVLYLLGMEPVWHNSSSAGFDEEGIPTGKKVEDLPNVIALENLTRPDGWAKKRIDVTVITSGLFRDLYSSQARLMDNAYRMALACSYYTIVNNKTIMDSEYGPQVYDALRSIMRSISFKGMSNESLEDNYVAKHWLEDCIYYLSLGYNSTVSGEYAITRIFAPPNGDYGAGISKLVSMSWTWNDTDELSEFYIGRMGNMYSKYYWGDTNPVVFMRALSDTDHIVVSRNTNQYGVLDNDDFFDYWGGLSMTVEYLSNKTPTMNVLMYANKDNAYVATFENVFYNELNTRYLNPEWIKGMMQEGYSGSRYMSNKFISNLWGWQVTRPSSVSETVWDDVYNTYYKDKYGLGVKSWLQSGNNAYSLISMSGTMLNSAYSGYWDADDATLSDIANTWAQATVANGVACCDCSCGNVAMMQWAFKYVNADLLAKLMPKLYDATQNPLFYTNSSDMPTNSSNIDRRTTNSSAESNNTETVQTNSSSNSQQSANGNTNIPGASGGYMVGTEADAQSDMASDSDAGMNDANGEGRSVEVTKSTSTPVAPKDVSMPIAIIVCVICLVALIGFGYFRNRKDDDDYYNDDDDDDYEYK

SEQ ID NO: 6480 - protein, 1805 aa, Methanobrevibacter ruminantium
MKTNYKIILISIILLGLVMSFGAVSAADLNTVQSGEVSGGVDIASSNPGVENGELTYEIPDSVENIQYAGLFVDSYTAGSSNLVYGSEANITLTKNGESEQIASERLVASVGSADGEVYVINDHTTKCFADYMMTYNLTDRLQDAKGNITITVNATPIEGYTFYNKIKLIGLVFTYDDGDGDQFHYWVNAGSSWVKTDSGETSKATFKLGNVNYDPTVATLDNFALSSQDGVYTFNGKEMDESIVTETGVYYYIHHKFDILDKIKNMTNTLVYTPGEGSYSFRNVLSVVKLVKTVPVYAKVNISSEYDDIVFSGTENLLKVGITNNGTGSASYLLDLYADGKKVNSSQISLAAGREAVISLIDNTIRPSAADTVSGADNKKINYTVVVSDKNTGEVLDESSIFPNLLYNGYLGKGLAYPAEKISSFKNITVNGGMIIESLGDSTYLDASMTGKTDSWTIDLPDGAFFTDAFVYVPYNLDNGNVPMFTSTFNGAAVNPIASYRDQPNIGENAKNGYGLLVYDVGELIKAGVNSFALSKEAGIAGVYPSTLIAFYNLTDSDLLTSAFIFNGADLLSNEYNSLGRDVSSDNILSIGAFDGLVSAKLHVFAADCQAGEGDLTVNGKSYKNVWAGTNRSVGDYVVDLGKSTNASNEVSFISTASNILALQQLAVVQYNVPSVKASLVSEYSNAVFAGTNNVLSLNITNNGKFDSIYTVDFYVDGKKQNSTEISLKSGANKGLYLIDDTIRPIDASTVNGADNPKVNYTVVIIDKEKSMVLDEITITPSLLYNGNLGKDLAYPAENITSFRNITVSGGVIVDTLDDSTYINSQATNRTDIWNVNVADGDVFTDAFVYVPYNWDKTNGYMPVWNARFNGVAVSPLVSYRDQSNIGFFGKNGYGLVVYDVSKLIKSGENTFTLEKEAGITAVYPSTLMAFYNATSSNSLKTIYIYNGADLLANENNFLNRTVASDSHLDISSFKEVISAKLYVFSAGAQKGEGNIIFNNKTYKDVWNGTVNSVDSFIIDLGKSPSVSNDVSFVSTGSTIMALQQLIVLDYYVSSVKANVSSEYSGAVFAGTDNVLKVDLTNDGQGGSVYVLDFYIDGKIVNSTEIPLDAGKSTEIFLVDDKIRPVDASTVNGANNAKVNYTITVTDKASGLVLYEASLNPIVLYNGNLGKDLAYPAENISFFDAITVNGGVIIDTLDDSTYLGAKTTGRTDVWKVEIPKDGKIVDGFVYVSYNWDKTNGSMPIWNVSFNGVSVSPVAHYRDQSNMGTYGKYGYGLVVYDVGELIKSAENKFTLEKENGTTAVYPSTLLAFYNRTESNNRTTVYMYNGADLLSNANNFLGRTVASNAALDLALNPNDEIKSSRLYVFAASGQSGEGKLIVNNKTFNNVYNGSANSVDAYIIDLGKSPSASNNVSFIATGSTILALQQFVVVDAIHQSSEELQKMINSARAGSTLNLGSNVFKDVSNVIINKDLTITGGTIYAREGETIFVVTDRSAGGPKEVNITGVKFVLDNANTILQARAVNGSTPTSIDVASINIKKNNISFVDDDVVPESITVLDLKSQRSSIAPTRNLTISGNNLIAGICPFMFEVTSFNGKDSVVVPEGGNIPDKKASVIHYEDMVTTAINTNIEGRVGKYFEVNLTDSNGNPLKDKKVQIGFNGVVYDRTTNATGGVKLQINLGYKGTYTFAIAFLGDDYYNGSFVVAKIKVNTQKTKISTSSKTYKASAKTKAISATLKDASSNPISGKKLSFTVNGKTYSATTNSKGTATVNVSLSKKGTYSFTVKYAGDDMYAGATSSSKVVIK

SEQ ID NO: 6481 - protein, 3451 aa, Methanobrevibacter ruminantium
MKNRKFLIVSLILIVLMLALGSAYAADLSPVTNGTVSGGVDVATANPYASQTGGQEIQSGELSYDVPEDVSDVQYAGLFVNVYGGSAQGDYGAQSNVSITSNGETSQIASESLNYTDGSGDGTVYIVNDHITKVYSDYQMIYNITDRVQGATGQIKINVTNTKLEGYANFDGRIKLIGLVFAYNDGSNNRFDYWVDSGQAWSNSADSVTKANFTVGTVSPFLSANIRNIALSSTDGNYSFNKQELTGGELISDSMFKYHKWDVTDLLKNKTNNLTFNSTKSFKNVLSVLTVTKNLEEIFVSPDGTGTGTTADDPTTMDKAAPALANNGIIHVLDGTYTQSKRYDIRANYSSIVAVNPGNVIFDGNNSVANIRVYGANVTLDGLTFTHGKGTGGGVYFDSDANGGLVTNCIFKDINNTGAGGAVYISGSKNVMIENCKFINTTSTGTGGGAIYIAGDNATVKECSFENATGKDGGAIRVNSRDFAVVRDSNFTGCVATTGGAISWVGKYGNVTNCTFTDNQATGSSNGGGAIYWQENFGLINNCTFIRNKAQVYGGAVNWAAGKINGTIVNSIFKENSAGRDGGAYYSAAGANEMLIMYCSFEDNEADANGGAMGFRADQCYLLDCNFTSNHAKQNGSAVMLYSNVANFLGIGNCNFVDNSADVLNYSIVNNAGKLKLSENNITTNDLRDGIYTNGSILTDVYLYLIVNETNDAASNVVYADIGDEVPIDVYLVDDNSNLINGIGLSVEINGTNITEFDLDGYTYKTSYTPSEIGTYYVTGNYSKAELSNILTGSIVVGEEPVSAIEIAFRGEYVNTTYAGVENLIAVSLHNTGSLDGNYLVEFYVDGELAGTEESKVNAGYTSDINFIDEKIRDLNESTILGHDNLQANYTVIVKDNETQEVIGESSYFPYVLYNGYLSKKYEYSDEFISSFRNVTFNGGYFINTTGSYSGNSNPGLTDIWTLPALGEGASFAGAYVYVAYTWDKTENGPSDWASSFNDESIPIVAQYRDQSNMGTSGSYGYGLVVYDVSSLIKEGQNKYSLTKGDTAIYPRTLVAFYNVTESSTVKTMYMYNGADLLYYGSYNVLERLVMTDSVLNISTEGNVLGSNLYVFAASAQAGEGNLLVNGEKYEDVWNGTTSSVEEKVFDLGDNPLASNEISFVSTGSTILALQQFVLVEYEAYSADVTIASEYNGACYAGTENALKVNVTNDGLEKANYLIELYADGVRVDYEHVEIDVGESNVLTLIDDTIRPVTEDTVNGADNQKVNYTVYVSAAGSLLAEKTITPTIWYNGYLGKDYAYPNETISYFDTITVNGGVIIETLNDTTYMGATVLNRTDVWELDVPDDVEFADAFIYIGYNWDKTGANIPVLNLTFNGETVAPMESYRDQSNLGSSGKYGYGLIVYDVSGLVEAGENTLLIEKEFNKTAVYPSTLVAFYNQEVPDVITTVYMYHGADLLYNSYNLLGRDVESNSVLEVELVDDLASADLLVFAASAQAGEGNLIVNNETYENVWSGSTNSTNVFGVDILDSLKQSNEVSFVSTGGTILALQQFIVFEYDVTSAKAKVSTEYSNSAYAGTDNVLKLDLTNNGTVDTVYHIDLYADGDLVDSIEAEIDCGENSTLYLIDDTIRPVTENTINGNNNAKVNYTVVISDNATDEILDEITITPVLVYNGYLGKDYAYPNDTIQFFDAITVNGGVIIDTLNDTTYLGTKTTNRTDVWTVDVPNDAEFVEAFVYLAYNWDKTNGTCPVFNTTFNGETVTPIAHYRDQSNLGTSSAKYGYGLLVYDVSEYIAAGENSFELLKDYDVTAVYPSTLVAFYDVEDSPILTTAYMFNGADLLYNAYNFLGRPVESNSVLYIDSVDDIDEATLVVFAASGQAGEGNLIVNGDEYTNVWEGTSNSAAAYMINLTDSIAESNNVSFVSTGGTILALQQFVIVSEYAPYAKADIISEYKGVAFAGTNNVLKVNVTNVAEEDAVFNVTLYADGVEIGSQLIEVGAYGSAIAMFTDEKIRPVTENTVKGADNEKVNYTAVVRDVDDLVEDAEATITPDILYNGNLGKDLAYPAEEITFFDSITVNGGIYIEIQNDSSYLASGATNRTDIWNIEAPEDADFVAGFVYVAYNWDKTSAGIPALNITFNGVSVAPVAHYRDQSNMGTYGKYGYGLLVYDVSDLLEAGDNVFTLTKDANMTAIYPSVLVAGYDQEVSDSMKTIYMFNGADLLSNANNFLGRVVASNSVLDIELPDDVIDCALGIFAASSQKGEGNLIVNGESFEDVWNGSSNSVQACVFNLTDDIEESNTVSFVATGSTILALQQFIFVEYELVSVDAKLGSEYNNVAFAGTDNVLEFNITNDGTIPTAYTIEFYIDGELADTLELELANGESDSLYLVDPTIRPVDETTVNGADNAKVNYTVVITDNSTGDVLDIITITPSVLYNGNLGKDLAYPAGEITFFDVITVNGDIIVIGMNDSTYLGSKTTGRTDVWDLTTNEDIIFAAGYLYVAYNWDKTPAGMPVWNTTFNGVTVTPVAHYRDQSNMGTYGKYGYGLIVYDVSDLIVAGENTFTLEKENGTTAVYPSTLVAFYNMPESSTYVTTYLYNGADLLSNANNFLGRLVASNSTLDIDSFDNIVGADLLVFAASAQAGEGSLVINGDLVADIWNGSSNSVDAYAIDLGKNPKASNEVSFVATGSTILALQQFIVVEYNVPSAEASLVSEYSNVAFAGTNNVLQFNLTNNGALNTSYIVDFYIDGKKVNSTQIALNSGESFGQYFIDDTIRPVDASTVNGAANAKVNYTVLVSDKDTGLILDEVTLTPSVLYNGNLGKDLAHPPEEIVLFDTITVNGDVIIDTLDDSTYLGAKTTGRTDEWNLTVPSDADFEVAYLYVAYNWDKTASGMPEWNTTFNGVNVTPVAHYRDQSNMGTYGKYGYGLYIYDVSDLIKAGLNTFTLGKENGTTAVYPSTLVALYNVNESNVLTTVSLFNGADLLSNANNFLNRTVASNNVLELDFTVFDEILSSQLYVFAASAQAGEGNLIVNNETFTNVWNGTSNSVDAYIVDLGNDPSLSNDVSFVATGSTILALEQFVVVKSKYQTSSDLQKLIDAAEPGSTLDLGDNVFQDVANVVIDKNLTIKGGSIMGKAGETIFVIPAKSANGPDEVNITGVDFIVEDANVIVQATADNGSSPTSIDTPNIRISDNFIDMIDGSVVPESVTVLKLDSERGVLAPTGELKVTDNAIAAGIKPFEFDVTGVSNGSDTNIPEGGNIPAKQASVIHYQDMETTAVNSKIEGRVGKYFEVNLTDTNGNPLANKFVQIGFNGVVYNRTTNETGGVKLQINLGYKGTYTFAISYLGDDYYNGSFVVSKIKVSTQNTKLTTAAKTYKASAKTKTLTATLKSSVYNKPINGKKVTFTVNGKSYSATTNAKGVATVKVSLSTKKTYSFTAKFAGDDMYTKSSVTGKVTIK

SEQ ID NO: 6482 - protein, 116 aa, Methanobrevibacter ruminantium
MARRRCNRRFESEEEDPMAGTANLVDAMLVIAVGLLVFLVLAWNMQSVLFNEQLTQEEKQQVMDAMNQEMTEVQEGQILNETPDTSNATGQGYTEMGKVYKDPSTGKLIMVQNNSA

SEQ ID NO: 6483 - protein, 248 aa, Methanobrevibacter ruminantium
MTLAIGNTLIFADEAIYQGANNGLFAIFSNTNGTGFPFLDSSLTAITQALQIPVIILLLIFLVFAVVTLGKLLSEYLSRKKVPIKLIKEMIYSIYDAQSAEEIKNIVNSSDIQSSQKTILCELADSEHLGKKSRETLARRLIDNEEDKITQNLQKTDIVTRIGPTLGLMGTLIPMGPGLAALGTGDVTTLASAITIAFNTTVIGIGAGAAAYFASKIRRRWFGEYLANLDALMDAILDNINKRDDRLE

SEQ ID NO: 6484 - protein, 1370 aa, Methanobrevibacter ruminantium
MNSNKTYAVLGLLLLLILSIGAISAEDSIDDMSLTDINSADNSNINQINAIDNSIDTSTDSSIDTDNSIETNLDSSIEDKNSTDAKNTLSSNSLASTYKITEKDYLTYFDKDGNILSGKLKSGDTIDLSGTFSKKAFVINIPLTITSSDGTAKLLNSNINLVSGAQGSMVSNLNMNTSVEKTPALSAVNVTKVSFVNNTVLSTATGSYALLLNTVNNSDVLFNTFQTTCFVEGWGHPSALVLSGSNYNNISSNNVIVNDSNGIYLTGYLGGGSMGDSTQGSNTYNYIYNNTVHSVRGVEWAKDKDGNKPLPSSFCYGIQVMGAYNEIIENTVYNMYRGISATQTGNKVVNNNLSNIHGTWYSGGTNDDGADYTIYVTTNSIVKDNSISDSKIGDSTAAIHAAANTNVTNNVLSNIEGTGVLIEGNNVVCNKNSLLGLTNDGIIAKGNVSNIDISGNIINASETAVSLVKTSRSLAPHDITVSENTIFTTKENPISYEEAYSTNITVENNRIIKEASNGTDPSTEGNGTYYIIDSNFYNYFDNTGYLKSTIKENDILIFVGPIESKDKIYINNKVNITGIDAVFKDTTIIVLDDGVVIDGITINNPNEAKNDREWGIQVNGAKDVTIKNCNITIYDAFSAYAVYLIDSSDCKLINNNLEAKGDYLTSAVLLYNTNNTVLSGNSLKTIGTGQNYTFLNESCLDGCLDGCLDGCLDGCLDGCLDGCLDGCLDGCADGCADGCLDGAQGVNHIISGIFRTYGLFMVYSSNNNVTDNKVDVSSALEKGYATYIESTNAIGGIFIHHNSNNNIIKSNNITLNGNDPFMYGAGVVGGNSNHTDYVSSNNQFESNAINVKSPYYAIGILLGYNSSKSTLKSNKISLSANNYSYNIASYKSSENTVDGTVTVLKDTIVTSTNITAQSNSPIVLNLTVLDEDNKTVTVGSLLAYVNNTLVNSTSIKGQSTSLGIGAYPKGTYDLVVLYVNGGIYRVGAGACQFNVSDVINTGNGTKDIQNALDNAKDGATVDLGNQEYNNVVNVQIKKNVTITGGKISGDGSNPIFVITPKSKGGPNNVSITGVEFNLGNGNIVALATADNGTSPLSIDTAQISIKNNVFNAVDGAVPESIKVLELDSERGVLSPTNDISVKSNTLSSGINPFEFKVTSVANNNSINVPSGGNLAQKQVSQIQYQDMETMAVNAKIEGRVGKYFVVNLTDDAGKPLADKFIQIGFNGAVYDRTTDEKGQAKLQINLGYKGTYTFAVCFLGDDNYNGSFVVAKIKVNTQKTKLTTASKTYKASAKTKSISATLKDASGNAISGKKLTFSVNGKSYSATTNAKGVATVKVSLSSKGTYSFTAKYAGDDMYASSTASGKITIK

SEQ ID NO: 6485 - protein, 1164 aa, Methanobrevibacter ruminantium
MINKRIISLSLLIILVFLIIGLSAVSAEDSSKAADLDLNSSSVSNIDLSSNSVAIESNSNSIASESSSNIVLDNKSSDTTDIQTDSDSSSDDNLNHDSNSKIKSDNSKKVHTITESNYSLYFDSNGYLNNSLVSSNDTINLSGNFSSKYFRFSIPLTITSLENDAFLRNSPIIITGVSNENYVYDAIVSNLTIESDLANISAVWVIGSSNIKVLNNNIFTTGHNGYPIALDSFVYNCILANNTIKTIVPVSEAMSSKDIDEDNQTNNSDNSSWQHSGISLRDAHYNTVVDNDITVENSYGVYLCYGASISNYNVIANNTIRATSETPSFWCYGVYITGNYNLIYGNDFYHLYQGVHSSYPYNSIVSNNFYDIDGLDDNYGAGGDFGIYGGNNTLIANNSIYNAKLYNAGILVGTNSEVYGNYIQINSSGEGIRIGDKEGGSYSKVYNNTVDFLDGKGICLYGEPNSTLVYDNILNSISSIDSLDLSAESKGSGLGIGIYSHYQSRAKRPYNISTCNNTIYTSNDYAIDISQSSTKAYTCYGNLVFGKGIIYPMEVVYVPDYGEGNVYEVSEDNFYTYFDSSNKLSDKVKDGDSLIFVGEFSPKGKITLNKEVNLFGYGALLKNTTVFINAPNCRVHNFTIVNNGIDEYNLWGVYVFEADNASIVGNNISILDKNTSYGIYLCDSYDNNVSDNTISCQGDNLVFSLLTYEAYDTLFENNKILAIGTDELYPYYETICIDGVHSISELSKTYGVILDSSSRNQFIHNDIEVTSTLEGFHVPYNPSVNILIGLYIYYASNYNNISENNVYVHGHDPFLYGVGSSGDDTSKSVTYACENIFSHNNITVEGDYFVMGMILRHNSKDTIVDSNHFRLNSNNYTYGITLEISEGAKVTNNVLNSTGNAGIYAMELYASNNNDIKSNEIYASASYSSVALYASSNNNVTHNVIKTYGNKVQEPAQGPEHPDSVDLFNTGISLQKFSSGNNISDNIIETDGDAAVDFDETSTGNTVGNNELSSTKGGGNAAVNDRTGKNMVYGNTGSRYVPNSNSSSNSNNQNSGERNTVPTNGSSNRYNDGGEESGSSAFGQVDLGLLATAMSSVGEGTGDVGETGDGESDLIVSELEEVASKSMAGGLSVPVAALLLVLMFCFSFLNAKDEDDENDDENEE

SEQ ID NO: 6486 - protein, 1684 aa, Methanobrevibacter ruminantium
MDFKKAIPLFALLLLILFIIGSSSAASSDLSSSPADNENLEIDSFDSNEDLTVNTNTNYIESGNNLEIDYKSNSKESVNATNDIKEETVDYNEDISVEKNNLKSSKLSSVYKITESNYSNYFNKSGNILSNVNPGDTLDFSGSFNNKDFKIDIPLTVTSSDGAQFIDCSFKFNKGSDGSNISNLNINSSRLQSPLIYLDSVSNMNVFNNNLFSCASKSYALCFSNVSYSSAYHNTLQTTAFVVGWGHPSAFVLAGANNLNISSNNVIVNDSNGIYFTTYVGDTISANLINENNYIFNNTVHSVRGVEWAVDENGTTPLPSSFCYAIQVMGSGNKLLNNTVYNAYRGISASGSNSVVAGNVVYDIKGNYYSGNTKDDGGDYGINVGPNSIVENNTIYNSHFNKNSGVAISVGSNTTVRYNNITNINGTGADLSKNFIEFSHNRIDNVSDNGIRVKGQYGNTNISDNFINSTDSSITLLRSSKDKYPSRINIENNDFYTDVSPIYYLEGYIGKLTAKDNTLNGSSISDISIDVPSSSETKVSINSTKIDFNESVLIMPTVSAYGLSLEGLVDIIVNSQKIATVPIGSNYTFTPTEAGSFSINANFTGNEEYKPSESAVLILTVTPKETTTSIIISPSTVELNDTVVISPFVRYNGTLLEGFVDILLDGEKLDTVEIGSDYSYVPNSSGSFYISASFSGGNGYGASVSDMLILTVNESSSIEDPDDPTNLTVSSILISPNTVEVNDTVLISPFVRCNGTLLEGLVDILIDGEKLDSVVIGSDYAYVPSTAGTFNISASYAGGNGYEPSVSDIVVLTVNEKQIIDNGTDNNGTDNNGTDTNGTGTNGTDTNGTDNNGTDTNGTDTNGTENNGTDTDQIKIIINDDNYSDYFDNGYPIDLDVDGNYTLIIDSLNNKDIIIPSGFNINIIGKEGSGTINNGTIQLGDGTDEVGDVKISNLTFNNYNKDAIVINEIAYDLTVENNKIIINTEASPGNLYFSVYGINAKGYVDSLAVRDNDIFLNGSAPYLYGVSLGGYGAIANPQNIFVQNNTININSTASMGMAEGIYLDNPINAAVLDNKINIESINDVYVYGMQIADSAFSAIGEGKTGVKSPYDIMIESNDLNLKSKYMVYGITILDYGCDGSLNELGQPMTNMMDLDTTIQNNNLVADSEKAVMGIVGKTYNMSVLCNNLSVIGGSIEGVASHDALGVDNYALGVQYSGKDYTVLVKDNTVSTNVLAEYLNNKDYEAYVSFVNNTIYHIDGPSSGNDTPENGTGDNGTNTNGTDINGTDTNGTDNNGTNNGTNGTNGTDTNNTDNITKRTVKDLQELIDNATSGSVVDLGNFEYLDVSNIDISKDISIVGNNTVIRTAGDGKPVFNIKEGLSSVSISGIEFMANNGDVLIRAKAVNSTSRLAIETPEINIINNTVIKSDDGVVAESVTVLELDSSRCILAPTNDIKVSNNTLEIGMNPFNFVVESVINAADVNVPVGGDLQSKVKSVIHYEDMDTVAVAKADGRVGKYFEVNLTDSDGNPLSGKFVQIGFNGAVYNRTTNETGGVRLQINLGYKGTYTFAISYLGDENYNGSFVVAKIKVSTQNTKITSSSKTYKASAKTKTLTATLKSSVNGNLISGKKLTFTVNGKSYTATTNSKGVASVKVSLSSKKTYSFTVKYAGDDTYSSSSASGKLTIK

SEQ ID NO: 6487 - protein, 2968 aa, Methanobrevibacter ruminantium
MKLKKFSVILAVLLVAILAIGAVSAESVSDTDVAAVAAVDDTAGTVSVDDSIDDVSVDTTDNDVKNSLSAVALEDGESVSYEINDTSYSTYFKDDGTATDELSEMGGYTLNIGTLTNKDIQIISGSDINITAKDGEGFINNGTIILGGDEFPGSIIVSGLTFTNTNKDAIQVLDYTTDVSIYDNNMNIIGISSLSSDPNFSVYGVSANGFISGLYIENNTMSVEGDALSYGIEVGAYSDGAYALSNPQDILISGNTIDVSTSGAMAEPMYLSDVWDVTVVNNFVTAESVNAPAYGIQVADSAMWASYMDPNYDGDLSSPNNVLIDGNTFILNSDFMIYGITTINYGWDGIEMESYALPLNITVSNNNVYANSKKGVMGIAGQIYNLTVIDNTVIAIGGSAEGLYTGDLLGNGTYALYIDYDGNYAEDTYYVVVKDNDVFTNVTKEYAFNNDYERVIFENNEDLKTFVIDDETYSIFFNDDGTSDVLEDMEDYTLMIGPLNNKDIVLDSGSEIVILGLDEGYINNGTIVLDGVSDVYVSDLVFVNVNKDAFYIGDESNEIVIVDNAIVLVGKAAESTNPYFSLYAISANGYVTGLNITDNSIYITGDAPYSYGISLSAYAAEFNPEDITIYNNTIEMSLSEGSSMAEAIYLDCPSDATIEENNITIETVGNTFAYGIQVADTLPAAYEYASYRGELTSPELVTIKGNTLNISSEYMIYGITVLSEGALVNGSGDLALCQFELFLNVSENTIYADSTKGVIGLAGKVYNITMNNNDLYVTGGDASDVFSYDDLGVGTYAVGIKYNGDSEDGNYYADVFENNIFTNVSAEYINDETVLDEYVFFNNFIPLDLGIVLEADKDALEIGDLINYTITVVNNGPNAASDVYVSFELSDILLLVTAPEEYDAEFELLNVSDLAVGQEKVYNIVAQVIDGGYLLSTAYVDCYEDDTYMDNNTASLDMIAVPIVIDDSNYANYFNENGYLKDDVIATGTVVLFGNLTNKDLFINAPLLISDCKDTKLVNTTIALVEGADGTLISGLVFDYTAKDSGFAIISVNDGVSDVLIRSNNITVTDIPDYVTAVAIGVYGAVNGSEDITIEDNFINMTGGNAYTYGINVQNYDQGWVPGEGASGVEILENTIILSGTGMEEAIFLSGLEDVYVYKNTIVSASFGENTGCDAYGIAAANVSELIIEENQMGVGSNQMAFGIAITTKSNDVDVFNNSIDVEGTGAIGVGVQDSTDVSVTFNTICAYGDDFTSIQTYDSLGTANAAILDETGEALIENNTIYEYFPITISDDNYATYFDESGKIKNDSGIAGGDLIFLDELTNKALTIDIPLTIKGVPLNALVNTTITLLADASGSTVTKLNMEFTGDENTGSVGIIYVLGASDVEITDNVIIVPAFVDKTGAKYGSSLYAIEVESGADGCSYIDISDNVIDIIGSARYLYGIDVFQTWGSENKNSYVAICDNFISVVGASRMSEGIYASGVDELEILNNTITSVGQAAAYGIGTDTLTDSIISDNGMEVNAGTQAYGITNTYSDGVEITANVISSTGEGAIGIGTNSEDVTIAKNQITINGNDYTTITSADTLGTDNAAILDTTGEATIENNTITENCPITINDGNYATYFDENGSLKNNSGIADGDLIFFGELSNKKFNIDNYLIIKGANNNKLVNTTIALTAGASGSTLSRLNMEFTGDNTTGSVGLIYVLGASDIEISQNTITVIDFVDKAGAKYGSSLYAIEVESGENGCSFIDISNNIIDITGSARYLYGIDVFQTWQAPMRNSDIAITNNFIMIDPASRMSEGIYASGIDNAIIANNTIISESDAAAYGIGTDSLANSTIADNVVRAAAATQAYGITNTYSTNVDIVNNTVNAEGIGAVGIGFMGSEGVTVADNLIAITGGDYTSITSSDSLGTANAAILDKDNKGTISYNNVTENIPVTINDGNYDNYFNEDGYIRNDSGFNDGDLVFFEKLSNKNIVLDMPLTVKGAPGNKLVNTTITVLDDASGSTITCLDMEFTGDENTGSVGIIYVLGASDVEISYNNITVPNFVDKTGAKYGSSLYAIEVESGQDGCSYVDISNNIIDITGSARYLYGIDVFQTWQAPNKNSYIAIADNEISIQSASRMSEGIYASGIEFAEISNNIINSVGEAAAYGIGTDTLSNSIIEDNDIVVLAGTQAYGVTSTYSDTVNLTGNNISAVGVGAIGVGSNSDNVNIDKNEISILGQDYTAITSADSLGTGNAAILDKGTKTTIGNNTIEEVAPIIIEDNSYDKYFDENGQIKEDAPIGSGDVVYMGVLTGKDMVFDIPVAILPADNSKLTDSTIKVVEGADGTTINGLDIEYTGDENTGSKNIINVVGASDVTISNNNIIVPDFVNKAGSKYGSSVAAIAVESGAAGTDNTTITGNNIEVNGSANYLYGIDAFTTWGANTTNSNLKIENNNVSVNGGARMAEAVYVSDSKNVTIDNNDVEASSEAAAYGIATDQLSHAKITDNDVAVLAGTTGYGITATTSGEDVLIESNDVEVLGMSAIGVGLSNQDAAIVKDNTIDIIGGDYSSVTSADNLGTANAAILDKDNKNTNLVVENNTMTENGKAVNTTHSGNSSAELQAIIDAAPAGSTVDLDGVLYADISNVVIDKNLTITNGTIVGKAGEAIFVIPAKSENGPDEVNINGMEFLVNDATVIAKATADNGTTPTSIDTPAISIKNNTIDMANDDVVPESVTVLELDSERGVLAPTSEIAVEGNTIATGVDPFEFKVTGVADDSGNVVVEKGGNIPAKQASVIHYQDMETTAVNSKIEGRVGKYFEVNLTDTNGNPLANKFVQIGFNGVVYNRTTNETGGVKLQINLGYKGTYTFAISYLGDDYYNGSFVVSKIKVSTQNTKLTTAAKTYKASAKTKTLTATLKSSVYNKPINGKKVTFTVNGKSYSATTNAKGVATVKVSLSTKKTYSFTAKFAGDDMYTKSSVTGKVTIK

SEQ ID NO: 6488 - protein, 177 aa, Methanobrevibacter ruminantium
MEIIELIAIIILVAAIVFLIYYYFQTVNGGSFDIDDLKDHLTISKREAATATVNLDDDEAEEKVSVGKKIKYTFKDIDKSYSNTTDAFSKRLDAFLDERSEELIENWSLVTTDDLESLEKRCVTACDSIDDLEKRFSEYSNVTNEKLEDLDKRIKALEEDSELLEEDAETIEKEADE

SEQ ID NO: 6489 - protein, 134 aa, Methanobrevibacter ruminantium
MANEIIPSEIFILILVVILAFVVIIIALQWKKVRQSDNTLKLMEKEIELKKIAMVEKDLENKRLMENPISLPSEQQEQLTQIRDSTAKVMSDVGYLHSEINERLARLEAQTELKKLEKMLAEIEDKEKKLNKGK

SEQ ID NO: 6490 - protein, 309 aa, Methanobrevibacter ruminantium
MVDEIKSYEEAGKIVSKVRSDASKMIENGLPILDLVEFVESEILKSGAGIAFPCNVSINEITAHYTSPAGDTNKMVTGDLVKLDLGAEVNGYIADSAVTIMVPGDNLEELFDEDTLEKNQRIIDASAAGLEAAISTVRAGVKVCDVGRAVEEAIAEYGLNPVRNLTGHSLEHWNLHAGISVPNYDNNDPTILEEGQAVAIEPFATDGEGIVNDCPYAYIFSFMQSKPFRMKNTQRMLNHIEKNYRYLPFSGRWLTESFNERRVNTGLKQLGDAMAIYPYAALKERTGAWVSQKEHTMIVESDGCKITTL

SEQ ID NO: 6491 - protein, 1471 aa, Methanobrevibacter ruminantium
MKVYKMILISLILVILSISCVSANDLTNDAIQGDLSDIDYSFTIDDDLSNSDNSLDVSSDLKENSCLDEIDLDKESNQNTTKILSSNQLDSNLLDSNQLESDQLSSNQLDSSLLNSNQLNLSNTYTVSQSTYSKYFDKNGYVKTSVVAPYDTIDLSGNIISKNFIFTIPCHITSSNNAKLTNCMIKFENMTADGRSSVSNLYIRNSVEWCPGVFLEGSTNVDVYGNDIYCTGANGNPVRVIYSNYSNIFGNKLETYFTGYMNLSWKRAGILLGDSHYNNIFSNDVTIKDSNPIYLTTYGFEKSNHNTIYNNTVRSSAISEDSGLSNPSAWAYGIHLMGDYNIALNNTIHNVYRGIDSEGSFNILAGNIIFNLTGGYFEGNDGTEGGDYGIHASYDNIVANNTIFNSKLTGSAIYLMPNNTAYGNIVYNISGHNGLEFNYYADNCKVYNNIIDVPVESPIYVFGRMNNLLIENNILTSVDSSSILVKKQSNSKYPTDVTIRNNLIMGYSKTFNQSPIDYSQIKSDANIISFNNSIAVYNDTYFNYFAEIGNVRDYSDWIDLNNTINYSDSYNYNALVFVGNFSSITDNITKTDYIIPLKDIVNSRISDVYRNVPYNEYKSMMETLNEIYTDIVFNGPSPVDLRGVDSGGNSSDSNQTPMDGNGSMNESSDNGSDNSTNSSLDNLDDEVKDSYENLIDNINSTENASDVYVINDANYALYFNEDGSFRDDFPIEFGNTLRFANLTNKMFKIDIPLKIISDSEDSSLLNCFISLEGESSNTIISNLKFELDNLSSNIDFISIKDGVSNVLIYNNTFKLDIDSSDSLIDSPLSDDASLSAIRLYGSDYISRNIFIENNIIDFKSNFGQLYGIYLSNKMDYLNSKTNPSGFIIRNNVFSIDSNGLINAIYSDSVKNLLLENNLFNLSSNGNLEDSSLIYGLDLVKVDNLTMINNQFSINSTYLACGINSSDSSGFNLSNNQFSVDSAYLAYGLNLKNTNNFNLHNNDFYIDSGSFAHALDLDDCNNFNIANNLINASGADIKRNLNASNLAVFIQDDLNDNVLKNGYLYISELNGSLKGNGLYENDFKSPIVHTDNSTRDLQNLIDFAVEGDTVELGNMVFADLDTINIYKNLTINGGIFVSGNWRPLFHILPNDELLNHSSSDSYNSYRSFDYLNIQNGAYYLDNADLLILAEACNGTDSLSIQVPSLNICDNEFMLLDDSTVAESINILKLLSSRAILAPTNDISIENNILVSGMNPFVFEVSSIMTGSDIDIAHGPLNPKKASKIIFEDMVTTAFDSNVEGRIGKYFEVTLKDENGNALSNKAIQIGFNGRIYNRTTDENGSASLQINLAYKGTYTFAISFLGDEYYNGSFEVAKITVKKQTPKLDVSNVTYKSSAKSKTWTAKLTTSYGSLLKNKKVYITIDGKTYTTRTNSKGIASLKVSLSTKKTYKFTVKFEGDDTYNSLTKTAKLTIK

SEQ ID NO: 6492 - protein, 294 aa, Methanobrevibacter ruminantium
MNEKNESAFPIRCDPEDEIFVKCMSRIKEFPQYITGYDDIEGPYESRFISSGYRNLNLDSVRIRSDKSSINIEHHSSISQEAMRRNYEYAVNVFNATGQAVYPFIFYTGDLPVDKITYMNQLNYFHPQWFILKEKDGMKRLNNIKYKTDNDIDMHIFEFLDYIWLPKFKLEITIEECIRELVKLYNKLSADEFILNFTKECLALWVGRYIKDQDELKYMARCLNMSKIEERPFEESLRGVIFARKLEEAEEKGVEKNRIDFITKALKQMSPQEVSDLFDIPIDSILSVQNQYSK

SEQ ID NO: 6493 - protein, 281 aa, Methanobrevibacter ruminantium
MAFGTYKDVVSARATDKAIQKVAQDGGIVTALLTYALEENIIEGAIVAGNTEDPWKPEPTIAMTPEEIIAAAGTKYTFSPNAIRLKEAVRQYGLEKIGTVGTPCQIMGLRKMQSYPFATRFVADKLALIIGIFCMENFPRDSLKTFIEGKMNSSLEGVNKMDIGKGKFWITDVEGESGLPLKETHGYEQAGCNICLDYVAELADVSTGSVGSPDGWSTVFTRTDSGADIFTAAVEAGVIETKPMDDVKPGLELLEKLANGKKDKGRKEIERRVNMGLPSPF

SEQ ID NO: 6494 - protein, 319 aa, Methanobrevibacter ruminantium
MLARIKNSIRKFLGLEAKPDAEDDEAKAETQDKLKQEIKKEVEAQSKPAEEAKKEADAKAEEEAQAKKEAESSKALKESSTQEVEKVADKPKIGYIHMSGCTGDGMSLTENYDILSTLLTDMVDIVYGTTLVDLWEMPEMDLALVEGSVCLQDEHSVKELMEVREKAGLVCAFGSCAMTGCFTRYARGGQLAQPKHESFVPISDLVKVDCAIPGCPASPEIIAKVVVALINGDMDYLQPMLDMAACNLACGCDLQTNVVSKALCCGCGTCVLACPTRALEMVEGRPSHNKNRCIKCGACTTHCPRTWFPAEQIKKDLGL

SEQ ID NO: 6495 - protein, 157 aa, Methanobrevibacter ruminantium
MPYDAGRLVVGCGNVLFKDDGFGPMVIHALEDYFKENNLEMPKDTQFIDAGTGATHFIFSMPDDNWKKVIVVDVVEWNAEPGTLKIFSPYDMPKGKYENAHTWPVEEPLHDLVDMGIEVVIVGCKPKEITAPDVDMGLTEPVEAAIPKAIEMILNEL

SEQ ID NO: 6496 - protein, 385 aa, Methanobrevibacter ruminantium
MEIDDEGIVTKGRYFSITPVRGLEKMVTGKAPETAPVLCQRICGVCPIPHTLASVEAMDDSLDIEIPKAAALLRELTISASNLNSHAIHHFLVAPDFVPEDLFKTAVDSVGTIRKNAQYVVDMVAGEGIHPSDVRIGGMARNISELARKKLYARLKALVPVVDNHVELMTNLILEKDIPEGLGVIDAPVFASDVVYGKRDFFDLDRFTEIVPEAWYDDPEVGKRACTTIPLYDGVNVETGPRARVDKFQGYKERGVVAQHLSRAREMKTYLSRAIAILDELDTAANTLADFDPRGTNKLGIGVIEAPRGTDVHMAQVKDGKTAFYSALVPTTWNIPTMGPATEGFHHEWGPHVIRAYDPCLSCATHVMVVDDEDKSVVENKMVRI

SEQ ID NO: 6497 - protein, 184 aa, Methanobrevibacter ruminantium
MDNSNIIISVIIVLCIAAGVTAYGISEGDNAVFSDLTGFSPSSTDSGDTGIGNTTGNNSQGGGITAGQTNVATNTGGSSSGGSSGSGSSGSGSGSGSGSSGSGGSSSGNGGGNTNPSPSPSKISAAQAKNIAAGAIAEEGAYISSVSDTGSAYVCYISNAEGTNVGYITVSYGGAIIEGAGGAP

SEQ ID NO: 6498 - protein, 200 aa, Methanobrevibacter ruminantium
MDNSSILISVIIVLCIAAGVTAYGLTNDSNTVFNDLSGFTPDESGDTGIGNNTTGGNGNSGSGITAGTTDSGSGTGSSGTGTGSSSSSSSSSSSSSSSSSSSNTQQKAWKPKVSPEKAKALATSAARNSGWPGAYCYSATYNSGGYYVCLLKDDAGNTGYAHIGSGTGRFLEGSWSKQVTKEPNEVEDDYKENETSNITE

SEQ ID NO: 6499 - protein, 397 aa, Methanobrevibacter ruminantium
MLVNADLHIHSCFSMATSKDMLIENIAPKSLEKGLKLVGTGDAFHPKWLDIIRQSTEYKGDGIYSRGDCDFVLTTEVEGKHKVHHVIIIPDLDIAHELSAKLVSSNKFIDGRPKTPLGGAELLELVREYDCMIGPAHSFTPWTGMYKYYDSIYDCYDKRPDFVELGLSADTDMADCIKELSDFVFLSNSDAHSPWPHRLGREFNQIEMDDVSFSSLKKAFKHKTVKANYGMLPNLGKYHMTACTKCYKLVDPIIAKENKMICSCGGRIKKGVDYRISEIADFSQPKHPSHRPPYVHLMPLGELISMVYDKGVTTKTVQGIWQKMVDNFGPEIDVLIKTPLDEIEKIDSDVSLAIQGFREKTLNITPGGGGKYGEISFSEDFNKTEKKESVTTLDSFF

SEQ ID NO: 6500 - protein, 187 aa, Methanobrevibacter ruminantium
MSKKRCPWAEDVEEIYVKYHDEEWGVPTYDDRELFEMLVLESFQAGLSWITILKKRDNFKEAFDNFDVVKVSEYDDAKVEELRNNAGIIRHKGKINSAINNANVFIEIQNEFKSFSNYIWGFTDNKVLKDTEENYKTNSPLSDKIAKDLKKRGMKFVGTTIIYSYLEAIGVIDNHIHECFKYKEESD

SEQ ID NO: 6501 - protein, 158 aa, Methanobrevibacter ruminantium
MKSSVLLEEIKENIQNYDIDHIKENLKKEDINPISKQVSEFNLKNYDEIMETKISEEDDFEISDEMIYSMKNEIDLFFKGCSPESEDSFKKFIESICLYLSLIAKKPLHPVGMDFKNGNTVHEEIEDGNTVYYCDLKEYFGKQEKDYYTCKFCVCKTV

SEQ ID NO: 6502 - protein, 335 aa, Methanobrevibacter ruminantium
MAFKDIFKFKQGETTFIFVGGKGGVGKTSISSATALWLAKQGKKTLIVSTDPAHSLSDSLETKIGHYPVEICENLYAVEIDPDKAMEEKQRALESQKSMATADQLLGLDFLGEQMDLASASPGADEAAAFEVFLSVMTSNEYDVVVFDTAPTGHTLRLLSFPEVMDSWVGKLMKARSKLGAAASALKNIIPFMDAENDIQSSQELEETKKQINEAKAVLSDPDRTTFKMVVIPEEMSIYESERAIEALNKYDITTDSIIVNQVMPDISDCDFCHSRYMLQQKRLALIDQKFSDQVVAQVPLFKDEVKGKEKLLKLAEILYEGKDNDEVEASVIQL

SEQ ID NO: 6503 - protein, 43 aa, Methanobrevibacter ruminantium
MFVEEIPEEKFYSNRIRDEFIEEVVEKIENNILQNKYRKYLDY

SEQ ID NO: 6504 - protein, 49 aa, Methanobrevibacter ruminantium
MFYEERVEDQFSTYRNREEFIRELLDVVDNKITDEEMEDIYQLLDIPRN

SEQ ID NO: 6505 - protein, 253 aa, Methanobrevibacter ruminantium
MTICISAICTENNEEHIVFAVDHMITTGLGQFEHSINKYNVLNENVVGMMAGNALLMDYFFDEDYSENSFSEILDIFEEKFKEKRLNIIEKEILDVYSIDLDFIRDILKGPITNDFQAAILKKIAKTKLESAILLMGFENNKARIAEVSDYGIGNFNRINFHTIGSGSIQAQNTLMFQKHSKKDDLRTTLYNVYKAKKNAEVMQGVGQDTEIGFLNNGSIVMLDKKNMGILDNVYALELNWGKEHKEVGALDF

SEQ ID NO: 6506 - protein, 359 aa, Methanobrevibacter ruminantium
MLEIKHTICPSCSVGCGLNIVSKDGAVVGTYPYKRHPINEGKNCSNGRGSILQFENKINAPSLVQNGELVESDADSIIAAIKKELDAIDASELAIICSDKNTNEEIDAIKKFAEDFGTDKIGFYGYNFPKFSGEIANYNDINNAKFILAIGDIYGENPLAARRIVLAKDKEAKFFNIDDVEKSITALNADEYIQFSDKATFADAIASVKGELNEEAVIVLNKIADAEDFKLVEDLASETGAKLLPILNGPNSKGAMDKIDPLTKDEIIDLIDGSKVLIVVNDNLLDYLSESDIKGKAFIANISNFEDEFTKFSNVVLPGKAWVEKEGTFTNAEGLTQSFAASADLGEGLSEIEIFEKLA

SEQ ID NO: 6507 - protein, 384 aa, Methanobrevibacter ruminantium
MSENLMLAKSKENEITDSGACGGAVSSIFQYLLSQGIVDGVLTLNKGEDVYDGIPRLLTDASEVIETCGSLHCAPTMVGDLISSFLSDQKIAVAVKPCDAKAVNELVKRHRINPENIITIGLNCGGTVRPETAQEMIEKFYEVDPADVVKEEIDKGKFIIEMADGSEKGIKIDDLEDEGYGRRDNCQRCELKVPRNADLACGNWGSEPGWTFVEVNTEKGNEIIEGAKAEGFIETKDPSEKALEMRGKVENIMIKMGKRNTKKQLEDEALTLEEWENQWNKCIKCFACRDVCPICWCHECELEKSYFKDDGQAPPDPLSFHGVRLSHMSPSCVNCGQCDDVCPMEIPVSKLFHKLQVKYEGQTGYVAGVGDEKPPLYSPQKENF

SEQ ID NO: 6508 - protein, 133 aa, Methanobrevibacter ruminantium
MADDIKIVGFCCNWCCYGGADTAGTARMQYPPNIRIIRVMCSGRINPSMVFKAFREGADGVFVGGCHIGDCHYDAGNYKWNRRALMTKDIIEEFGIDKERFRFEWISASEGEKFQRTMKEFYNTISQLGPRNK

SEQ ID NO: 6509 - protein, 957 aa, Methanobrevibacter ruminantium
MTNNEIEKKWQKKWADAKLFQSDPNEKEKLFLTVAYPYPSGAMHIGHGRTYTVPDVFARFKRMEGYNVLFPMAWHVTGAPVIGIADRIKRKDPWTLDLYERVHKVPHDTLPSLEDPINIVKYFSNEYHTVMDDMGYSIDWRREFRTIDPTYKKFITWQAKKLKSLGLIKQGEHPVKYCPHDENPVGDHDLLEGEGVGVNELTLIKFEVEPGLYIVPATFRPETIFAATNVWLNPEVHYIEVEVKTGANAREKWIISNEAFLNLSNQHDLEIVGDIDPKPLIGKYVKNPLNGEPLPIFPASFVDPEYGSGTVFSVPAHAPADYIALRDLKENEELIKDFDIKEEVAKAEPLNVVTVEGYGEFPAVEVVERMGIENQNDPKVQDATDELYKAEHSKGYISDHIEKYAGKRVAFIRDEIKADMIEAGSADIMYDFAERPVICRCGNKCVVKVMDDQWFIRYGDEEWTEKTQKVLAQETIIPEEIRSNFEYYLDWLDDWACSRRVGLGTRVPWDDQWLIEPLSDSTMYMSYYTIAKYLKDMDPEDLNEAFFEKVFLGVDSDEITVPEETVNQIQEEFNYWYPLDWRLSAKDLVGNHLSFLMFTHAAIYPEEKWPKGTVVFGMGLLEGNKMSSSKGNVILLADAIEQYSADVVRLFLMASAEPWQDFDWREKEVRGTQRRLEWFREFAQKVEDIKGEKLDLSNIEEVPLERSIDKWMINQLNIHIKEATEALEVFQTRQALQHALFLLKKDLDHYLYRVQDLIEAKDPAVIYVLSTLLSNWIRLLAPFTPHTSEELWSKYGGEGFVSFAKWPEYNEDLISKEIERSESLVQNIVKDINEIKNIVDTDPEKIHLYLAPEWKWELYKIADEVGKPDIGQIMGKAIKADIYDNKKEIANVAKRISKEMIKTRYIGKIDEETILNDAKDFIESEVGSEIVIHTDDSYDPQNKARNAMPYKPAIFME

SEQ ID NO: 6510 - protein, 457 aa, Methanobrevibacter ruminantium
MKKNKLEKGCEKMSADDKKLDQIIKTIEANDIKFLRLELADIHGLPKSMAVPLKNANDVEDIVNDGLLFDGSSVAGLASINDSDLLAKPDINTFSTIPWRPESKGTSRFICDIYTTEGTPYDGDPRGILKKTLEKAEKRGYQYNVGPEPEFFIIKKDENGNYVPADEAEYFDVEPLDQGTDIRREIVFGLEELGFDVEVSHHEVAAGQHEVDFKYADALKTADAVITFKEAVKAVANNLGVKATFMPKPFIGINGSGMHCNQSLFKDGENIFYDPNTETQVSQEALYFIGGLLKHAQALSAILSPTVNSYKRLVPGYEAPCYIAYGFKNRSTLLRIPASRGLGTRIECRSADPSCNPYLAFSALLEAGLDGMDNKLDPGEPTEENLFAFSEEEIAEKGISNLPTSLWEAYHALEEDDVIIGALGDKVFNQFYNIKRAEWDAYRIQVFDYERDEYLNV

SEQ ID NO: 6511 - protein, 305 aa, Methanobrevibacter ruminantium
MCGIAGVIYKDKKTHPVGEALTSMLESLQHRGPDSAGYAIYGSLDFPENYYQLNIEVKRRRGALDNLKSLLNQISPIYEEEIIKSVGDSDVYKCKIALDEFSLLQPWIREIDELENVRVINGSHSFEMIKDVGKVKDIAERFDVQSRMGTHGIGHTRFATESGVDRYHAHPYQSYIIPDITVVHNGQITNYWKIRDPLERKGHTFESFNDTECIVHYMADKLNQGYKLEEALDQAVIDLDGPFSILVGTPNGIGIAKDKLGLRPGVMVETDEVFAIASEEMALHDVTDSNEIEQIAPGETRAYTI

SEQ ID NO: 6512 - protein, 215 aa, Methanobrevibacter ruminantium
MKEYIINAKDMEEKELNRAIKEQAAHHDKLIINNPESRHNICAGLSEDVDIEINGSAGYFVGTMVNGPKIHINGNAGWFAGDNMTKGELIIEGTAGDGAGQGIYGGTVIVKGSTGSRTGEIMKGGTVIIGGNSGFMTGLLMMGGKLIILGDVTDDVGESIMRGSIYVLGEVKSLGKNAIMEETTDEDLKDLEETLTKYGFEDIDYSNFKKIVNIQ

SEQ ID NO: 6513 - protein, 364 aa, Methanobrevibacter ruminantium
MSEHKIAMVGTPCEIMAASKLQDYTDSPIEVKLGLFCMENFSYKYFVNFLKEYDLKMDDIEKFQIDKGFLFLILKTKETVKIPLSVAKRIIRKNCNICVELTSETSDISIGSIGSDDGWSTLIVRSEKGEEIVKGAIEQRFIEVEELEESKFQLLNKLAQGKINRNLEHIEQREFLARPVLYQREKDDDSISKEISESDFSDLKSNVIDIGACVLCGACEYACPDNLIIIDDTKPRMKGQCPPDCHACFAVCPRTFIEEHLRNDNEKPIGDYINVYTVRSLKHSQGQDGSIVTTILDYLLSNEIVTEALIVDKKDDLAWKPYAKLTKDIDQVVKSGGTKYSVCPVFKPLKEINEESSTTEEGVN

SEQ ID NO: 6514 - protein, 495 aa, Methanobrevibacter ruminantium
MSFTVERKIEICRQNNDRPGCCWYLCDNPNKSACKNCYSCYSNCPHGVYEVINDEPLPIHQENCVGCKICEEMCPTHAIYVRPLVDEGRGIWSNSTMVEIKRKSQTGSYKVRGCGLTRRIPSFDDLSILPAQVSRPPIDSYRETCKTSVVLGDRFAENPIEIDTPIMIGAMSFGALSKEAKIALAIGSSKVGSITNTGEGGMLPEERHYADKLIAQYASGRFGVSASYLNNAEAVEIKIGQGAKSGMGGHLLAHKVTAEVARVRNIPEGTSALSPARHMDIVGPEDLGMKINQLREITDWKVPIIVKFASGRVEQDVKIAAKAGADIIVVDGMQGGTGAGPEVVTEHAGIPTIEAIVKADDALKEINLRSEVSLVAAGGIRSGADVAKAIALGADAVYVATSALISIGCKVCQSCSEGICPKGIATQDRALRRRLDPIRKGQQVANYIEAMTQEVTSLTQQAGNTDIENLERQDLVALTMEASQLTGVPMVSQRY

SEQ ID NO: 6515 - protein, 880 aa, Methanobrevibacter ruminantium
MAAFDRIKSGIPGLDSALDNIRLGDNVVWNVTNLNEFSYFVNPYIKQAKEDNRNLIYIRFANHPPLIEMTEEDFRLLEIEQNNPETEFSMIERDGIKIYLVNPYNQFETFTLEVHRIIEKEGFDAFYVFDCLSDLQAVWSTDLMMGNFFKVTCPFLFQLDTVAYFPIIRGRHSYDAIAKIRETTQLFLNVYSNSPEEVYVSPLKVWNRYSQTMFLGHKFNPRTGFVKVLQDGQEVSKYYKTINSDKYMNGQTLDSWERYMLKVRREYEEGKNIDEECDKICELMMTKDEKMLSKIKEYFSFEDYTTIYDRRVGSGLVGGKSCGMLLARKIIERNCPEIYNNIFEPDDSFYIGSDLFYTYIVSNDLWDLRVKQRTPEGYYKYGKELEEALKNGSFSDQTKREFIKMLDYFGQNPIIVRSSSFLEDGYGNAFAGKYESVFCVNRGSLEERLAAFEEAVKVVYSSTMNISALEYRKINGLDDTDEQMALLVQRVSGSYHGDYFFPTAAGVGFSYSPYSPLPDMDNSKGMLRLVMGLGTKAVDRTKKDYPRIINLDKPEVTMAKDIKEKHRYSQHYLDVIDLKEISLHDIPVDEGLSVIPRYSKNMLVEHDREAERMFRDRGQRREIVFVNCEGIVKNDAFIETMKEIMSTLQTAYDYPVDIEYTVNVGEDKSFNINLLQCRPLQVMVNNEAIEMPEDKNVFFHIKESSMGMSRKNTIDTICYVDPHKYYEYPYAQKSSISRVISDVNAYLKSNNKTAILIVPGRIGTSSPELGIPVVFADISYFSAILEESYSDAGYMPELSFGSHMFQDLVEADIYYGALFENEKKLEFNKDMVYDYPNILKDINPNLSEEIYDMIQVIDFDENKAELYHDMNKDETLCIFK

SEQ ID NO: 6516 - protein, 451 aa, Methanobrevibacter ruminantium
MNKSKKCAEKDLAHIWHPASQMKDYEDFPPIVIDHAKGVHLYDVDGKEYTDIISSWWCNILGHCNEEVSQALKDQLDELDHVLFANFSHKTIIELSERLIKVMPKGLNRFSFVDNGSASVECALKMAFQYCAQTGRAQKKRFMCFTDAYHGETLGALSVGALDEYSSVFEPIMIDTIKIEAPDCYRCPYGKTRNDCDCQCFEHAERAFEEHGHETCAMIIEPLIQGSAGMKIYPPLYLKKLRELCDKHDVLLIADEIATGFGRTGKFFAVDHANITPDIMCVSKGLTNGYMAMAVACTTDEIYNAFYGDYEDNIAFMHSHTYAGNPLAASVANATLKIMERDRIIENNQEKAIWLNKRFHNTFDEHPNVGEIRQMGLINAIELVEDKESKKGFDSSLRIGYKIYREALKDGLMLRPLGNVMYFNPPLVITKEELDESLAICKKAIDKVLLD

SEQ ID NO: 6517 - protein, 532 aa, Methanobrevibacter ruminantium
MTKFIFLIILLKFMRKEILIAAIAIILILCGGVFAASNMQIADIATFSLNAIDLEDRGSLIVDSEDITASKGYYNSSASDENVVLVKNYSLRLSNSIVNKTGDTGSSGDDADFYGINSAVLVNSNGSVELSDVEIETNSKGSNGVFVTNAVSDSNSNSSSSSGSPIVDSTERHDGKSDAEEPGGVPPEKPVEDGPSVYGGSSGGKGALSDGNQSMPAPGASSSDVEGSSSADISNVRITTHGDKSRGLDATFGGKIIASDVEINTDGQSCAALATDRGEGEVHVKNCILNTGVDEKSGRGSPIIYSTGNITADNSEGCAHVSQIACIEGKNSIALSNCEFSAGAGGNREDNGEYVDLGGVFIYQSMSGDADVGTSLFDANCCVLSIEEDSEYYKTAPMFHVTNTKAIVKLASTELNFGSGVLLNVSGQSQWGTVGSNGGELEFDASDEILDGDVFVDSISSLNMSLASTSFIGAVNPDDDFGETNLVIDSDSDWTLDGDSHLSSLENNGDIDYNGHTLYVDGKAYTESNPFK

SEQ ID NO: 6518 - protein, 232 aa, Methanobrevibacter ruminantium
MSKGLFVLGTGTDVGKTYVTGLLLKYIRDNGYNASYFKAALSGAIRDNEGKLIPGDAVEVINMAGLEEDTDFLVPYIYETAVSPHLASQIEGNPVELDKVKHAYEEVSKKYDYIVMEGSGGIVCPIRYDGQGCKSNILLEDIIKCLDLNVLLVADAGLGTINSVITTVDYLKNRDIQVCGILLNNFKDMPMENDNLKMIEELGGVDVIAKIYKNDKNLSLDVQLDVLMNYFK

SEQ ID NO: 6519 - protein, 326 aa, Methanobrevibacter ruminantium
MYNIIELKDKVLNNYKVTKEDALNLLDVPLDELSDAANEIREFFCSNKFDVCTLINVKNGRCSEDCKFCAQSNHYDTDIDIYPFLSKEELVGKSNSLLDAGFKRISYVASGRKIRDKEFDIVVSALEQLNKDRTDEFHLCLSLGLLSEEQISTLKNLNVERIHNNLESSRDYFSNICTTHSYDEKLDTIDLIKDKNLMVCSGGIFGMGESFEDRIDLAIQLRDLGVKSIPINVLNPIKGTPVENNKILSNDEVCRLIAIFRFINPDAFIRMAGGRTLLGDNGRKAFQSGANAAILGNMLTTSGVELEEDFKLLEELGFEITYSIDA

SEQ ID NO: 6520 - protein, 237 aa, Methanobrevibacter ruminantium
MDERGKKYLLKEDREFQTDLGIIKKEQMERATIGDTIITHLDKEFKVIKPTVNDFIDLMERRCSILIQKDIGTVLARTGLGAGDRVIDAGTGAGAIALNFGNVVGDKGQVYTYEIREDFAEIAKRNIDNFGIKNIEVKNQDIKEGIDEEEIDLVFLDLPKPFEIFEDVKKALRLGGWLAVYAPYIDQAEVAYRIAKKLDFRDLTILETLEREMEIRPQGTRPKTRMVGHSGYLVFCS

SEQ ID NO: 6521 - protein, 842 aa, Methanobrevibacter ruminantium
MVTYIEHPLIRPNAAEARIYQQVLAANVLKNGNTMIVAPTALGKTIIAILVAADRLQKLKGSKVLILAPSKPLAIQHEENFKHFLNLPCTSITGAVKTDEREKRWDASSIICATPQTIESDLLNERYTLDDVSLLVFDECHHAVGSYSYVYLAHRYVKESNNHLILGLTASPGHDKSKIKEVCENLFIQDITIKTEDDPDVKPYFNPIQIDWVRVQLGEELEKIRDLVNKALKVRLKGLKSLGVINTVSVTKRDVLKARSRVQRKIGQSVNPPKECFQAISILSAVINLQHSLELLETQGVVPFNDYIKRLRKKTTKAAKNILLDPNFSKAIYFAKEAEEKGLEHPKMNKLVELLKLELGVDEAQTRLTSLRNDSDSSMDEKVKEDSPKIIVFTQFRDTLDMIHERCEREGIKSVRFFGQGTSDGKKGLTQKEQKKIIKSFKTGNYDVLISTSVAEEGIDIPAVDLVIMYEPVPSEVRMIQRRGRTGRKSSGRMKVLITEKTRDEGYYWTSMRREDKMKTQLATQEAIEELKLNAVEKIEVEKSAKDLGKREKVIIEDPRDDDSSDNFEEEAKNEDIEEISLENDNEEKQKELMEKEAKKKQSLEDSIIEELAKSSTSDELVVYVDSREGNSRVIRALDTIGVKVKVNTMAVADYQVSDDVAIERKTASDFVDSIVDKRLFKQAKAMMEEFKKPILILEGDDFYTGFINPNAIRGSMASIAIDYGISIIPTRTPEDTAAMIKRIAIREQQGEKKSIQIRTERKPQNLWEQQLFIIESLPNIGPVHAKNLLEHFGSVKAVLQADEKQLQEVDGIGKKTAKSIKEVVDGKYLYFKKPEKNEKLI

SEQ ID NO: 6522 - protein, 5066 aa, Methanobrevibacter ruminantium
MKFEKISMLISIVLISLIALGAVSAADDVAADDAVAPATVDEVQTIDNTITNDDISYESTDIIVNDTGDSADSKAKTTSLSANAVNEGETLSFTQLAADVSSSPSMLSGAYYKYDPSTDTAFENGITLTNGLTIIGGGATIDGDNQARIFNIPEGVSVTIMGVTLINGAADEGAAIYNSGKLTLMNAKVNDNTAVKSGGGIYNNGGEVLVTSSEFDGNDLTDRTVNGYGGAAIYSNGGSVTITDTNVTNNLKNIVHRGGTGTYTGDLSSAAVTSNNADLTVTNSRFIANSGSYGGAIYSGESTSANLLVSGSTFEDNFAFNGGAIDIVGTSYTISDSTFKNNNVKGTGSTNSNYASGGAICVQDANNPGLISGCDFEANSGVVGGAVNCENTMVLDCTFTDNTANSANSETFNGKTNNRGGFAGAIYNEGTITISDCEFDDNAGRGEGIRVKNAEISDSSFTNTRIDTCQNSNVLLTNNTYNNPDRDVQAASGTQVTVDVADGDIPNANTAPYIVGDLTFTDLQALIDSGSSGIRLTGNVIKTAEEETTFADGLNVDKTVTIYGAEGKVIQANSGKIFNVAEGKTLTLRNATLQGSGETAITNYGTVYLYLADNNQFTDCGDVLIDNHGRTTETGLTTFTQLNNLIGLVNGGTVYIGESKITKAEDEKEAYKNGIVIDKDLSILGSYNTYYKYVKTSINANNDGRIFTVAEGKSLSLKYINVTNGAADEGAGVYVSEDATLIADTANFIKNTAVTKGGAIYSEGTVDLTNVNIKNNTISKTDGVMADDNGGAALYNNGGTATLDKVNVTDNQKTYVIGDIMDGVVVSKGATTITNSYFANNSGRWGGAITQTGTDQTLTVEDTIFEENTAIFGAAIFDNSPLVVKDCKFYNNSAIGPGSPGTSNSQGAAILVMDDTASADISGSEFINNTADCGGAVSLAGVGSDSSIDDCTFIDNTAYADGGAVYFWTESASVTVTDSEFISNTAPYGGAIENEGLGDLIVDGCEFTENTASLRGGAIISSGDTSVSNSKFTDNEASGNTNAIYLYNSGSSLSLSNNVITGSDDAQIYVKEGIDVVTPLKVKILNNETVNINMVPYDITATVTDDKGNNIVDLAFRFTVGDDVVDGISIDAATGVYTATFTPTQAGEFVVSTNLANADEVQTGTLNVFRTLTDLKAIIDANTNGTIDLDGNYAYNAEFDSALTDGIVINKDIVINGNGFTICGENSTRLFHVTSGFLTLKNATVCHGAAEKGAGVYVDHGSKLSTDYVTFTENTAVKRGGAIYSEGMVYIGNSVLDSNNITFRSANDDNGGAAVYNLNGQLTIEKSNITNNLKDIVIRNGNAGDLLVGVVVTTGDTLIKDSYFANNTGSWGGAISSLGYMNTDDYTLTVKGTTFEGNNATFGGAIFVESSNLVVDDCIFNENTGVGKGSDGTSNTQGGAIVVHPTGSKATITNSKFNKNSANTGGAVSLAGVGQDSLIEGCTFTDNTANDGGAVYLWTGGNAIVTVKDSSFSDNTANFGSAISSDGTLSLSHNEIANDYTITPIGSYDGTIVSAIYVTTLNGETIITGNPTQNLTATITDDNGNPIVEKGLVLEVYGEEVETSYDKTTGIHSAIHTFTKPNSYRITAKGFDQDHTTPGYIVYTGGTFNELQDLINAAEEGATITLDHSIVYDEEFDGVPFLDGITVNKTVTIVGAEGVEICANNLARVFKVTDGATLTLKDATVCHGTAQKGAGVYVDAGASLIADNVTFTKNTAVKRGGAIYSEGMVYIGNSVLDSNNITFRSANDDNGGAAVYNLNGQLTIEKSNITNNLKDIVIRNGNAGDLLVGVVVTSGETLITDSYFANNTGSWGGAISSLGYMNNEDYTLTVIGTTFEGNNATFGGAIFVESSNLVVDDCTFNENAGVGKGSPGSASTQGGAIVVFPSGTKATITDSRFNKNSANTGGAVSLAGVDQDSLIEGCTFTENTGNDGGAVYLWTQGDATVTVKDSTFTGNTAGWGNAISTDGALKLEGNTISSTSADVGNWAGTIDSKVYAQILANDTYNWHMGGFVINATLTDDMGNLINDHNFNYVITKEGATDSISVPATFYTSLGYYQGTFTPADIGTYLISLDYAVEEVNTSVVVVSRSLIDLANIIAADEDGIIDLDDSYTYIEEFDSSIVDGIVIGKDVTINGNGHTICGDDKARLFHVTDKALTLNNVTLCHGNALNGGAVYVESAATLNANNAEFNENTATYRGGAIWSTGTVNVKDSSFDNNNITYRARNVDNGGAAIFNNGTLNVDHSNFTNDLVGYVVRTGDTNSPQLIDGIILSSGVAVINNSHFENNSGTYGGAITAVPIASLGSTATSLTVENCEFINNLAYCGAGISINADGNGKTTYSIKNSTFIGNNATGVGSTGSTSAGGAISIARDSEGTITDSKFYNNTATTGGAIDVSATRSSSKVTIDNCDFENNTATAGDGGAVRISKNNLEVAVKNSNFTNNDATGDGAAIYNNGVLTLEGNKVTSGETEIYVGPNGSVVNSIVKAIFLGDAEDNTILAFLGDEVHPYATLTDDNGNAIYDVDFNITVDGVEYETSYDDSTQQYTATYTILHAGDNIVSTNYDAQKTDGKYDVPKANATIVVTTESISVGDKATVNINLTGTDGVGLNGTVKITINKAFTDTVVTENGINVTEVEGLEIGEYFVYVYFEGNSDYNPEYNYTLFRVTGNVSYFNVTIEDVTYDDAATIKVTVQDGPIDDPDNGVTGIVLVTIQGKDVNFENTYSVSVIAGEGSYTVEGLAPGNYSYAAKLLADELYNEAYLEPQNFTVFENPYSELEVTDDGPIASGETVNITATLTDFQGNPIEGATLEVYDTGVWIANITTNAEGIAETSIDNLGYGLHDITVIFNDTVHDVQTETVTVSVTPKKGTFTDLQYLIDTADGRLVLPYDFAFDAAYDEQFFLTGVLVDDNIIISGAGHIIDGMKKARILYINAPNVKIFNVSFVNGKSDVGAAIYTEADYLLVDSCYFANNDPEAGAAIYAESGVTDVEETIFFNNTAVNGGAIYVESGATLNVADSEFNQNTATYRGGAIWSNGTVNVKDSSFDKNDITYRVKNDDNGGAAIFNNGTLNVVNSRFTNNLLNYVIRTGDDNHPELVDGVILSSGKAKISNSHFENNSGTYGSAITALPIGTELSDLTVENCEFITNLAYCGAAIYVGSGTTLFYINDCVFIGNNATGVGSNGYVATGGAIKIAKKATGIIADSQFYNNSAANGGAIDISATSGNTASVLIDSCVFGYNVADQGGAIYIDNRTTVNLYDSTLYYNEGEALNYHIFLNGDATLGFEGNNFYTTIPTIVAEDTYAYGETITINGTFDWGVNNKPINMIYTINGAPGTAEVVDGNYTILIDNQPDVGDYTIVITAFTDENGNVYHVETAQKTISVTKATPILSVEGDEYLMPPSDDATVTISLTDKDGNGIKGTVIVTVAGETYLVETDEDGDGELTINDLPATTWAIDAKFIGNDNYNEVVNDTEEITFIADVAYFDIIIEDGVYGDKLTVIVENATDIDGNSLTGMVTGMISTGDDDISFIVYVNNGQGTNTTTTAGGVGKFTGDAYFYDSMMEFMSGPEECSAYVSPANATLYLVPWDADDLSSDIAYGDTIEFGAAVFGVNLEELNGTVYYIITELNKKGEIAIVNGSGAVNLTDILDVGTYTVISYFVDDKGNYDPESSVNYTNFKVAKATPTLNVENAQQVYADTNTITFNVTGIDDKGVKGTVIAIKPISEDVSGAIYDPETGLGELTFNGLVVGDNPIVVKFLSDDDNYANAEKTINITITQATLAIDSTITTQEIVYGKDVEADVTVTGIVQEDTVIANVSLYDNATGELLDSFNIALGLEDSISFEDLEVGDYYYTIEFTSELYAGDNFTSEVFTVNTAEILDLDSSNVDNVSYGEGIDITVYVDGMIEGDLIEVNFTVVDATTGDDVFNGTYNISNGDVITVPPLDVGKYSYSVSFYGDDKYNTGGADSIAAVGSFEVLDMSDVDVLVTADESITYGEKVTVEIDPIVSEGGLPVTGTATIYVYDDPASVDPVYVLADVELDKDGATAVLDTILPTGEYWIVVDFESDDGYYDGRGVTSTIVDLALAKLSIDPITVTYGETIPITVTALGNGGELLNGTVEFKIYGPGFEGTVTVKNGTGVTNITERFDVGTYTIIAAFGDDGANYEGFNITSLEITPATPIVRVTGSEVEYGEPSTVTVSVSDIDGMPLSGKVIVTVDWVVDGLTQVIDLDDSNEASFDLSPYVHQGTYDVTVTYIANGNYGEAVNDTETVNVTASTTATVNVEVPEDVSYGDELTIKVTAEDGAGEQIPLEAVNVTVNGETKEYPVDENGTVNLGVLPAGDNEITVALDDGTHKPTKTEATAKVAPAEAVVFVDTDNDNPSYGDVVVVTVNATNKDKPIDADACLVVDGYLIGYYDLEDGQVEISIKDLAPGKHEIEVSVANGNYSEGSYGRAIVNVDKATPVISAEGETVEWGEVATVKVNATGANGEKLNIPLVVRVIWEVSGVDELIEIENGTGEAAFQISNYVAPGTYNVTVIFLGNDEYYPVNNTEAKIILTEPKTVEMEVSITPDEYGKATNVTVTLKDVASKPLEGSTVTVTVDGKEYANATIGEDGTVTVPVEGLEAGNHTIAVDFDDGEHSPVHEEENIAIEPSTDATVEATVNVGENETTVDVIVKDSTGEGINGTVIVYVDGEPVANTTVGNDTSSVSIGQLAPGDHTVDVEFVNPNYAPTSYSTHVTESTSLTNMTVKVDKKNILYGESDITATIEFTSEGKALDGVVEVLLNGEAQNVTVTGGKATVKFSDLAADHYTVVSNFAGNATYAPSSDSANFVVERKATKFNYNDMNTTAVNPNVDGRIGEYFYFQLVDQDGKALANKSVSIGFNGKVYNRTTNETGWAKLQINLRIVFGYTFAISFLGDDNYTGAFNVALINVSAQTPKLSTSSKVYKASAKTKTLTAKLLTSSGNVDKGKKLTFTVNGKSYSATTNDKGVASVKVSISQKGTYSFTVKNAKDNTYASVSKTAKLVIK

SEQ ID NO: 6523 - protein, 597 aa, Methanobrevibacter ruminantium
MFKLQSLELSGMSDEELKGLNLEGKTFGVIGVCGVVGNLVARIIMDNGYEVIGTDISSKEDCRFYSSFDDYDIEIFFGGHPDEFFKQIDFIVPPPSMSDDAKVLELAREKGIDILHLGDIFKLFKANKPILCISGTNGKTTTTTLLKHIAYSNGISPAEHNLKGMQGNNEFIPSLQTRLHGDVAILETGTDGTPGGLKSVIDLTHPNYGILTNITIDHLVDPDDHKDGVDESLSAISLDIGDDEVSHIDRGFLEYARVKGELIEGIEENDGLLIYNSDDPTIVGLLDKLNYSGKSISFGVEIDEFDNFELEIDEFDFDSSFDSVSPIKIHTKPCWCGRDIKIYETISGSGFYECQCGIKYEKPVYIAKDIDLMNRSFNLASRDDEFEFKLTLDGLHNVYNAVGAIIAAKEFLGLSNQDIQKGLSTFKGVAGRMEIIDKIEDTTIMVDYAHNPAGVETILDAISKIYDKTCVVITVSSESGVEGDFDILDSAIGKVDYIVPASHDCRYAADKLIELTKENRQEELHLNSVYTLDELCKTFVLTDEDLKQESIKTLGASEDQVIGGLKEALNLDTDIILIIGEAAFKFESAIKDFCDSL

SEQ ID NO: 6524 - protein, 498 aa, Methanobrevibacter ruminantium
MNVIVVGAGNAGRPVARLLNYAGHTVKITDPKNIEDFHMDVQKTLRLMESEGVELDLGVFKPSLDGIDTVYLSPTVPENSPAYKIIKEADLDVFTNDDFGRLADSFIDIDIIGITGSVGKTSTTHMVTEIFRTAGYQVWICSSMTQNLVSEVIVDGIIKGIPEKSDIAVLELPHGTAGLMAELKLKVGALLNIYEEHLSEFGGSMERYTQRKMFIAKNSENFITSIHCKDTVKEARPDAIFYAMVKDLPAYDPSKKSLFFDKIANFEEIAIGEGQVCNFIGDSAKGAIEIGYKFRNKSNELRKGSFQSEFHMMSYYYENAVAATAIAMAYGLSVEIIKEGLANFKGLSVHMEYIGDYNGREVYIDASYLIEGITVALDFLGDRSLVLLLDNFDTSTYRDKKETGKLMGKYANVMVATGFNEVYQRVDLEPAQELLDAAVDSDAVKVIAGTMQEGAELAIKYSKPGDTILHLGPQLMQDPEGIMEKIVTGLEEGCKKYK

SEQ ID NO: 6525 - protein, 323 aa, Methanobrevibacter ruminantium
MKRPKKMYNPEDMFIKRSNTYLGRVMHSFLKLPGRYVNSRTNQYPDFFGKERKTDATILVDLELEMEESEVLESSYEVFVSEKETEEIPQLAECLHNEKGKMIIDIEDESSKVDKQTLAKDFEYNYIIHYESGLPVYSVITTPIPLKRCKTCYISGNTVFKPIIKSYDEMDGEAKLKEFQEKYERGEYFSDLEGYELISIPRMYGEKGNEVIEEVCILFNKIKMKNGRVKIQLARCLDCLINKYGGTLEEINRLEGLINMTKLINLEKEYEDRLRQEGEEKGRQKGRQEGRLEGKLELARQFVEELGVDKVSKISKIEKNLLL

SEQ ID NO: 6526 - protein, 117 aa, Methanobrevibacter ruminantium
MYGQKGNEVIEEVCILFNKIKMKNGRVKIQLARCLDCLINKYGGTLEEINRLEGLINMTKLINLEKEYEDRLRQEGEEKGRQEGKLELARKLVKEYGVDEVVRISGLSKEKILNEKN

SEQ ID NO: 6527 - protein, 411 aa, Methanobrevibacter ruminantium
MFLTNEEEKMANGEYGETIRKSMDILIALGDIYGAEKFVDIKSAQVSGVSYKTIGQAGLEYLEDLASTSEIIYNENGTISDKSGIATISATLNPAGTDLDNWEDFGFPADFARKQVDICNAYGALGISTTCTCTPYLIGNVPRFGDHVSWSESSAVAYVNSVIGARTNREGGPGALAAAIVGKTPLYGFHLEENRKANLLVEVESELERADFGALGYAVGQIVKDGIPYFKMQNKPYEVSNGNLKALGAALASSGAVALYHVEDVTPEFANAAIDDVENKITITKDDIVSTREKLSTADGYADLVCLGCPHASLEEVKEVAEIVKGKKIKNELWVCTSINIKEAAKRLGYLETIEKAGGKICCDTCMVVAPIEQMGYEVIGVNSAKAANYVPSMCGLRVIYNDIEDLLDFE

SEQ ID NO: 6528 - protein, 319 aa, Methanobrevibacter ruminantium
MDIGKLVGNTPMIRIDYEYEGKTGSIYTKLEFYNYSGSIKDRIALYIIEKEKERGNLKDGQAIIEVTSGNTGIAFSAIGALFGHEVHIFMPDWVSLERRKLIQMYGAEVHLVSKEDGGFKKALELVDDFADEIGAYKPLQFDNELNVEAQYETTGQEIIDDLPDVNAFVSGIGTGGTLMGIGKRLKDYNPESKVFALEPSTLSILKMGMDEGSHLIEGIGDDFIPGIVDEDVIDDIVLIHDCDAINMSKIIAQKLGLGIGISSGANFLASVIMDNDDLKIATVFPDDNKKYITTKLSEPIDENPELISNKINIIDFEVV

SEQ ID NO: 6529 - protein, 432 aa, Methanobrevibacter ruminantium
MLKKHIENEDIIRLISHNDADGLSAAGVIANAIKEEGGQFHITIVPRLKPDVIRDVSKEKYELYVFSDMGSACIKQLNRLKSDVIVADHHQPSEHEPKDNLIHVNPHLFGIDGSRHLSGAGSSYLVVRNMNKKHLAYMALIGAFGDMQCANRFTGINQLILKDGQEAGNLELHEDLKIVSKAQEPLYKSIAYTLNPALPGLTGRLDNSQELLEKMGVSYGISFLDLEDEEKDVVKDELVKVNPQIFGDVYSVPSEHPVLRDLEEYSSILDACGKNKEYGLALSIILGEREKSLDEALKLQKRYREDLTKGFEWISREGAQQLGSIQYLYSEDKVLKSIMGTIAGVGMSAKILSDEKPVIGLSRLHNDIKVSGRATRFLVARGVNLGKALADASVNFGGQGGGHDIAAGAMIPYEAKDNFLHLLDQIVEDQLQ

SEQ ID NO: 6530 - protein, 132 aa, Methanobrevibacter ruminantium
MARPDWIMYSNEEIEEFIVKFKREGKTASQIGIILRDQYGIPSVKEVTGEKITEILRRNGHADEYPEDLMNLIRRAVNIRDHLEENPKDLHGRRGLTIIESRIRRLGRYYAANGQLPEGWRYDPTKAALLVK

SEQ ID NO: 6531 - protein, 185 aa, Methanobrevibacter ruminantium
MITFITGNEHKVIEAENIFQIFGVKLEHIDLGYMEPQGTLEDVSKFGAKYACQELNRPVIVEDAGLFIRALNGFPGTYSSYVQDSLGNENILKLMDGIDDRYAEFRSVIGYCAPNSEPKVFLGRVKGQIAHEERGNLGFAFDPIFLVPEEGKTFGELTTEEKNQFSHRRNSLEKFINWYVSQDDE

SEQ ID NO: 6532 - protein, 565 aa, Methanobrevibacter ruminantium
MISLGIEGTAEKTGIGIVDSDGNVLAMAGKQLYPEVGGIHPREAAEHHAKWIPQLIPQAMEEAGLDYKDIDLISFSQGPGLGPALRIVASSARSLALSLGIPIVGVNHCIGHVEIGKLDTGAKNPVTLYVSGGNSQVIAYESGRYRIFGETLDIAIGNCLDHFGRETGLGHPGGPVVEKLAKDGSYIDLPYVVKGMDFSFSGLLSSALRAHENGERIEDICFSLQETAFAMLVEVTERALAHTEKDEVLLCGGVSANSRLRDMMKIMAEEHYAKFYMPEMKYSGDNGVMIAWLGQLMYDNFGPLDIKDTAIIQRFRTDEVDAPWVDNRKEKLNLPEELKAKGAESDIFEAKWLGMDAIVKQRVSKSYRIREIDDKIRRQRTKSEAKILSDVKKTGIRSPILYDINLDEKYIVMEKLNGPLVKDVMHKLDYDKRKELSYAIGENIRLFHDGDIIHGDLTGSNMILLSDDSNDSNDDFSKSDDDFNNGVNLDNLDFANNLAIFDFGLGKYSDLLEDKAADLLVLKKSFQSIDYDIANECFNWILESYGSDKIIDNIADIESRGRYTH

SEQ ID NO: 6533 - protein, 354 aa, Methanobrevibacter ruminantium
MIEGLKTYGSDKIVDELKDLKNPIFICTIATTETSKIPGLTGAGATPELTKYTPAGDAELILEGEVKCMKDIPQTVIGEVVTPTPSMITKGSLALCDCPVMVLDAGSEIKAQTDVFDISDGKHGMDIRTGKAVEDSEELFEKGYSLGEILSEKHGYIVVGESLPAGTTTALGVLVGLGYDAKGKVSGCMNTNPHEMKNELVDEGLKNAGIVPSKDNNPFDVVNAVGDPMLPAVAGLIMGSSVPVVLAGGTQLTAACAIVKALDDEFDFSNTCLATTSFVVKDETANILDIISQIDDITVNAVNPNFEISKVEGLKNYTKGYIKEGAGAGGAMFLALLLGNDINSIRESIEDACS

SEQ ID NO: 6534 - protein, 66 aa, Methanobrevibacter ruminantium
MANDNFQVNKQFAKFKGKNVLIGLKNWEEVEGKIITIDNFLNLVLDDGNGLKVIKGGKVAFISIQE

SEQ ID NO: 6535 - protein, 48 aa, Methanobrevibacter ruminantium
MAINQLEATLQAVTHTLAKLEKEGCSDEKLLKELREERDKLLHELNLN

SEQ ID NO: 6536 - protein, 260 aa, Methanobrevibacter ruminantium
MIHMKILLSNDDGVNASGILAAKHAVEDLGDAIIVAPSNQQSGIGHALTLFEPLRVNKVILADNDIGYGVSGTPTDAVTIALFELLDECPDLAISGINTGMNTGKAELTTSGTLGAAIETATFNIPTIAVSQHVSDDDLKFDEGEIEIDFSSSVKVLRELVKKIIKDGFPKGIDILNLNVPSHPDSYEPVICPLGDRMYWPVVEKRHDPRGREYYWINGDEYVGNPKDSDIDILNQNIPTITPLTLDMTHNMDYLREWYG

SEQ ID NO: 6537 - protein, 236 aa, Methanobrevibacter ruminantium
MLSIGQCYLEFVNKILKEGKETYKDSDHHLKEYLGNYYYIDDPLDLKFRAKYQHMTPELMLEEIKKGRYDIDACPIKGDALYEYVKSFEIRDDQGFVYTYPNRILEHFGVDQFEVMKERILTATGSNRAVAVTYDPKLDHDREDIPCLQFVQMLVRDGELTIHVIFRSNDIFGAFYSNMFFICYMGIKMKEEVNKEIMGEKLNFGGIHYHSTSGHIYNNDMRAARKLISANKAALK

SEQ ID NO: 6538 - protein, 399 aa, Methanobrevibacter ruminantium
MEKPQLVNFIAKVLEDSGFKVYKNFKTSQQTVDIYAVLPTSMGDFGMVVACKNYDKEWEVGIDVLKEMEVIGKKLKASKVSVVTSSGFSSQAKRYAEERKIKLVDRNDLVALAKKYNNKKKQENEPVRLRKESPANIDRDSFYNRDVSRDYIDNVNGTQYDAGLNRVPNPYDSYEEYESDIDYYENQVGGIDLSGYSAYDDDLYRAEFLNRHPSNESNYNGLLIANNRDPYVNSKPSSNSRSLFSRNKATEKLSSLNSRGYTKNTNNNNNRQRNSRTTTVSRNKSPSRNFISSRDNALSKFSRNESRSSGGLKEMIKPILGNTIVSIIVVIVVAYLIAFILGSIVKVPTGYLGLTELAVALVLSYGLVFYTDRGSDVLVKGTIIFFISLVVLMIILIAF

SEQ ID NO: 6539 - protein, 307 aa, Methanobrevibacter ruminantium
MAFDENGKVWMDGEFVALKDAKISVLSHVIHYGSAVFEGIRCYETENGPAVFRLQDHVHRLFDSAKIYKMDIPFTEEEICDAIIETIKVNNLKSCYIRPITYRGFGELGVNPLNCPVETTIAVWEWGAYIGEEEMEQGANIGISTWRKPAPGTLPVLAKAAANYMNSQLANLEAGEHGYDEAIQLDYHGHVAEGSGENIFIVEKGKIVTPDLGSSILQGITRDSIMTIAKDLGYEVSQETISRERLYLADEVFFTGSAAEVTPIRAIDNRQIGIGSRGPVTKELQEKYFDAVNGRSEDIHNWLTYVE

SEQ ID NO: 6540 - protein, 274 aa, Methanobrevibacter ruminantium
MDILQAIIIGLVQGLTEFLPVSSSAHLIFIQQALGLSNVPLAFDVLLHVGTLVAVFVYFFSDIIQMIQGFFYSLLDLRDGNFIPEIRRDPYKKLAWLTIIATIPVGVVGILFNDIIEEMFTGLTIPAFLLLITGCLLYVSQRMNSGKIDVQNITIKEALLMGCGQAIAVLPGLSRSGTTIAAGLFAGLDKEFAAKFSFILSIPAILGAAVVQLKDLSGGNIEIGACLVGFIVAVISGYFAISFLLKIVREKSLDIFAYYCWIVGVIVLVGSILL

SEQ ID NO: 6541 - protein, 333 aa, Methanobrevibacter ruminantium
MVYVGMDHGTTGISFAIMDDEKVLDVFKISREDSKAGRVSAIEELSKRIDLEDIDLMIITYAMGDGISTILPMEKVENRGILSIGGAGKVTGGGTSVYSEIENANLPVLMIPGLHKDCDWLDPLFRAAYSHHASPEKVSIVYNAYLETQWENMVVADISSNSVDLLIEDGKIKGAIDACCGAMGIVHGPLDLEMIRDIDEGKRTANECFSHAGAVKIANVDNKVALMKDELLEMYSKGDERAVLAIDTMIMTVAMEIAGLIAVSKNEIDGIVLTGSMGSMKEPVDFEAGLNKYFKNKYETRIISSESGAIGAAQIARDIFNGKRDIMGIKVDY

SEQ ID NO: 6542 - protein, 331 aa, Methanobrevibacter ruminantium
MKMYYDDDVDAEVVADKTIAVIGYGSQGRGQSRNMADSGLNVIVGLREGGSSWQKAIDDGMNVKTIEEAAEAADIIHILLPDETQEKVYKEQIAPYVEAGNTISFSHGYNIHFGLIQPGEDVNIVMFAPKGPGSRVRTTYLEGFGIPGLVAIEQDATGDALQLALGMAKAVGLTRAGVIETTFKEETETDLFGEQTVLCGGLTALIKAGFETLVEAGYQPEIAYFETCHEVKLIVDDIYENGMAGMWHDVSNTAEYGGLTRGNRVITDATKAEMKAILGEIQDGTFKKEFADENATDAANLKEMRAAEERETIEVVGKRLRIACGLQKEDE

SEQ ID NO: 6543 - protein, 163 aa, Methanobrevibacter ruminantium
MREKSHVISTLVEHKPGVLQKVAGLLNRRGFNIDSITVGASEVEGLARMVFVVKGDEKVLEQVIKQLHKLVEVVKIKDLDPEYVLKRELCLVKVKTTKEKSRSEIIEYADIFKAKIIDVCDDFITMEVTGNPEKIDSFLRLLKPFGIKKIARTGPTAIARGHH

SEQ ID NO: 6544 - protein, 631 aa, Methanobrevibacter ruminantium
MRGGDAIIKALMDKGVDTIFGYPGGTVIPFYDMLYDSDLRHILVRHEQCAAHAAEGYARASGKVGVCLATSGPGATNLVTGIANAYMDSSPIIAITGQVVSNLIGNDAFQEVDIIGITMPITKHSYQPKDANDIPSIINTSIEIASTGRNGPVLIDVPKEVQEMELDEYVLGTIPTPGYKPSVKGNDKQIAKAAKMLLEAEKPIILAGGGTILADASSELRQVAELVNAPVATTLMGKGVIDEKDDLSIGMLGMHGKQVANQSVNKSDCLLAVGVRFSDRTTGKLEKFMPDAQVIHIDIDPAEIGKNVPVDLPIVGDAKIVLAKLADELASSRFAEEFDDDELSGSKIIKGLMENDLAKELYKSKLVKEIESSKFKENYEFNYDSYSPWLKSVVDFKNATIPRVSYSDIPLKPQQVIKEIASSITDDTIVTTDVGIHQMWAAHFLDISKPRKFISSGGLGTMGFGLPAAIGAKVACPDDAVLAIVGDGGFLMVSQELATIKEHDIPVVIAMLNNRKLGMVYQWQNKMYDKRYSETDMGNTPDFVKLAESYGINAVKVEEVDKTQEVLSKALKDNEAILLDITVEKDEFIPMFPPGGAITDLLGEYKYESDVKNVDLEQKESEDSQTVEGGK

SEQ ID NO: 6545 - protein, 458 aa, Methanobrevibacter ruminantium
MIFSKLENNQLLKKLLNGEIKMKVLVVGTGAREHAICDALKDDVDLYAYMSKNNPGISKISTFKKGDEGEVDEVAKFAKENEIELAVIGPEAPLGKGIVNALEAVGVPCVGPAQESARIETDKSFMRNLFEKYQIKGSLTYKVFDNYEDISAFLDTYEKDVVVKPVGLTGGKGVKIVGDHLKDNQDAKAYAKEVMDNAMGGFAQVIIEEKVVGEEFTIQAFCDGENLAAMPAAQDHPHAFENDQGLITGGMGSYSDVGGLLPFLTQEDYDEAVDIMKETLKAIAKETTPYKGILYGQFMLSKDGPKLIEYNARFGDPEAMNVLPLLKTPMVDVCKAIVDGKLEDVEFEDKASVCKYIVPDGYPDTPHAGELIEIDEEAIEALGAKVFYAAVSQEDDGVHLSGSRALGIVAQGDTIAEAEKIAEEACGLVEGNVYHRRDVGTEALIQKRIDHMEAIRNE

SEQ ID NO: 6546 - protein, 298 aa, Methanobrevibacter ruminantium
MNECVIFMSKQAKSKNTIIKKAKKLERQGKYIKALKVCDSYLDNERSEETLIQLKIDILVNLYNNDTFINEINENKSKITDFIERDEEIELLKLYNTLDNYLELNSQNMADERKVGTYLAGGLLVDNLETILVLNEMAKDNKAENKEPFKANSDLLEFIYNVKKTSYQYLDLILPNSLELLANSNFNIEAIISKIRQFLEPKKSTDSKEESIKENEEDDSDQSDSKNALKSKDDTELISDYSIEDEMKGLKEMISYLNDKNEFKKALIYQRRLVKLAREENIRAEQDHDSKQKTLSDY

SEQ ID NO: 6547 - protein, 304 aa, Methanobrevibacter ruminantium
MRSLLSVCDIEEEVETILNIASDFKAGKIEEKPLKDQKLAMIFQKSSTRTRVSFEVGMYELGGTALFLSTNDIQLGRGEPIKDTAKVLSRFVDVIMIRAIEHDDVIELERESDVPIINGLTNLEHPCQALADMLTVKEHKGGFDGKFVYVGDGNNVCNSLLLICGCLGMDMAIACPDEYRPNEEITKKAKEYAKANNSTITITSDIEEAVSGADVIYTDVWVSMGDEEESEKRRADFKDYQVNQNLIDMADDDVIFMHCLPAIRGEEVSAEVIDGPHSVVYDQAENRMHAQKAVLYYFLKELYK

SEQ ID NO: 6548 - protein, 327 aa, Methanobrevibacter ruminantium
MEFNDPALEHLVNKITVALNENNKEDAAHYMDIIIDKYPEVANILMNSIEFQNIMAQNEDVEGEEASDDFAIQPGSAMELDEEKIINDMNAMLDIEPTTAQEYIQKGTVLTVTEEYEKALECFDKALELDENNLSALISKGNTLELMEKFDDASKVYDDVMNTEVEEVYDLMSKGYIFEGHQRYNDALKTYDKALQKERYNANILFLKGSCLIKLEQYQKAIDSLEEAIERYSENPYETIFELENAYHNKGVSLHAIGEDDDALEAFSLALGLNPEYYYSYYEIGIIQEDREKYDSALKNYNKFLEYDNTDSEVVEAKERVEELLKE

SEQ ID NO: 6549 - protein, 573 aa, Methanobrevibacter ruminantium
MYFKIKTEAEEALRKAVDQFDCEFDEEIKLEFPPNPELGDLASTISFQLAKLLRKAPNLIAPEVVEKIELPEIFERVEATGPYVNFFINHDIFAKQLLDSVDEDYGQLAAVDEKIILEHTSANPNGPLHIGHIRNSVIGDSLRRLLTKAGYNVDTQYYVNDMGRQLAMIVYGMEELGLKLEDQPASKIDHKVGELYFKVNQMIKEDESLNDGVDATIRKYEGGPSELDEKFEYAVNSCLEGVKETLKRMNVKHDAFVWEGQFVRTGIVDNLTQELYDIGYARQEEVLYLDLSEFDIPKELVLRRADGTSLYSTRDIAYHIYKSKNCDKIIDIFGSDHKLAARQVELALEILEEIEPNSDKIEVIFYEFITLPEGSMSTRRGVFISVDELMDEAVRRATEEIISRRPDLDKETIDKIAEEIGIGAIRYYIARLSPEKHITFKWDEALSFERGCASIQYAHARACKLLKKAQEEKGIDLADLTVEDTWSLDENEKELVKLIAKFPSLVEDSAKIRRVHPIAQYCQDLASAFNRFYKAEQVIGSDVENARLLLVEKSRITLRNALDLLGVSAPDMM

SEQ ID NO: 6550 - protein, 137 aa, Methanobrevibacter ruminantium
MKEIAIYLILIIIVLIAAQHLNVVVSGSMEPVMYRGDIVVLQKANLFGIHEFDPHDVQVGDIVVYNAAWYDSPVIHRVINTAEINGTTCFEIKGDNNNKSDPYWVTPEQITDRVITINGQPLVIPKIGYITLWVKGL

SEQ ID NO: 6551 - protein, 551 aa, Methanobrevibacter ruminantium
MNSDNIKKGVQRAPHRSLLRACGLNDNDFDKPFIGIANSYTDIVPGHIHLRELVDYVKEGIREAGAIPFEFDTMAICDGIAMNHDGMKYSLASREIVVSTVESMTMGHCFDGLVLMPSCDKVVPGMLMAAARLDIPSIFLTGGPMAPSTYKGKNADLITVFEAVGELSSGKITEDELFELESCACSGAGSCSGLFTANTMACITETLGMSLPYCATTLALSEEKKKLAIETGKRIVEMVKEDLRPSQIMTQEAFENAIAMDMALGGSSNTALHIPAIAYELEEKGVHADLDLFDQISDKVAHIALLSPAGQDTMADLHNDGGIPAVLKTISSKLDTSVMTCTGKTLEENLKDASVTGNGVIHTLDDPIHEAGGLTVLKGNLAPNGSIVKSAAVPEDLMHLKGPAKVYNSEEEAVEAIFDHQLKEGDILVIRCEGPKGGPGMREMLNPTSAIMGMGIKNVGLITDGRFSGGTRGPCIGHVSPEAMSGGPIAALKDGDIIEIDIANGNLSVELSDEEIKERIEKADLPEKKVKGWLNIYRRSVSSADEGAILR

SEQ ID NO: 6552 - protein, 107 aa, Methanobrevibacter ruminantium
MDIKGTPINVEDMIQYQKDSVVSMEIIKKELGTVTLFAFDQGQGLSEHSAPFDAMVQIVDGEAEITLAGEPHTVKKGEMIIMPANVPHALQAVNMPYKMVLTMIKSD

SEQ ID NO: 6553 - protein, 432 aa, Methanobrevibacter ruminantium
MSDFNMFCYQCSQTARGSACTNAGVCGKNATVARLQDNLIFSMKGISAYNYHCKELGVSDESVDEFLTKGLYTTLTNVNFDIGDLVQLALDSGEANFKVMKMLKEAHIENFGEPVPAEVKVGAQEGPGILVTGHDLKALEELLKQCEGTDVKVYTHSEMLPAHGYPELAKYESLAGQLGGSWIDQRKVFADYNVAILGTTNCVLPPKDAYADRLFTMDIVKIPGAQVIEDYDFKPLIDKAIELGGLEAEELSTISTGFGLSTILSLAPKIKELVLEGKIKRFFLVAGCDSPNPRMSYYREFVENVPEDCIVLTLACNKFRFNNLELGDIEGIPRLLDLGQCNDAIVAIELAVALCELFEMELNDLPLTIVLSWMEQKAAAILWTLLYLGKTDMFIGPVLPAWANDDILNVLVENFNLTPISTPKEDIKKVMG

SEQ ID NO: 6554 - protein, 264 aa, Methanobrevibacter ruminantium
MENIIESLEKFGLTRYEAKAYIGMTNIISGKAEDIAKASEIPRSKIYSTLKELDKKGFITITHTRPIEYKVVPPREVYKRKKEELIKELEDSEEKLDEIYNSQISEVQAPIWLIKTSKNIINKEVEIVKKTRKSLNMRVGFLLEGEGEELIKAFNSIPRNIPIKILASPYCYINQERIDIIELFESARLENLEIIKADIPFVKIIIRDEKELFRTIVKFTGKEKSVLPETAVGVLNQYSDICKNFDERFVNQFNRIKAKKSSMN

SEQ ID NO: 6555 - protein, 251 aa, Methanobrevibacter ruminantium
MMLNYLFNILNTNTFLLNPKERVIQGILLFILMSVFSLLFISFITLASPNLFFPLLISFELLMLFLGLNISLHSIYTNYFNMLVSENPVLLSYEGVIVNLLCLSLGAFSFWLSIAIFIGPFWAFFSFALAWLLPLWIMFFRRDIFNEKSKVISKNSDKLIGYSPIWFYLFGCVSLFIPFLVMFKIVFFSKFNFLALGLIIITLIETILIFCPDYWDKILPFDIRTKKGTFIYFLLSILILSCISIILYKIV

SEQ ID NO: 6556 - protein, 132 aa, Methanobrevibacter ruminantium
MFEAGMIALPTGLPGLALLGLGTVLTAYGSGMFDDLGTDHPGYAKPENQLNFGLSMGLNFIGLGASEGLARGVLYKEVQEKLVTGFVPSIKAYGKTIMDESLGKGNAKISTVIWAYVENSVILAIENSINGG

SEQ ID NO: 6557 - protein, 258 aa, Methanobrevibacter ruminantium
MLKAIFKGGDFQCSQGNGTIIFELADNSSKLIFGPDGSVASLISSDILENNYLNGGMDLGTFNFLKNSTIISNLKSIVNSSYYDINCLSNWIISLVNDSDINFTAIVSYLSDPKLVASVVGGLLFEAGMIALPTGLPGLALLGLGTVLTAYGSGMFDDLGTDHPGYAKPENQLNFGLSMTLNFLGLGGSEGFLRGVLYNEVQEKLVVGFVPSIKAYGKTIIKETFYDDNGVLAGVAKSYFDNILQNILFDTFLKWGVR

SEQ ID NO: 6558 - protein, 362 aa, Methanobrevibacter ruminantium
MAKKVLIIVTGRGLGGDAGIALNVYNALTKRGMECEIALDESAPGILFKKNNMEWNKVIIPQAGGHSATLKTTVNAATRSVKALFKTRSLIKEKKFDLVLGILGGGAIIGALAAKITRTPSVSLLITPLDTKICGKIGTPIILPENNLFLEPNIPDRMVKSFLPVNDNISLGDKKKALDKLNEHCSELKKKNPDAMEFDPSKQTIVFSSGSSLFEKTAQAIDQFSKYSDRFNLVLCGDPLEEEFYKYIDETKIINVGFIDWVNDLLHLADLAVLTNDGLMLHEAMVCNLPVVILKRVKYGRYHDMVSIFKGATIECDLEDLDEAIFDVVDNYDDYAKNTATYKEAILSVGDNIADIVEKSFK

SEQ ID NO: 6559 - protein, 152 aa, Methanobrevibacter ruminantium
MKNWKIIGLILIILLAVVSVSGCIGDDSSSDTTSISADALNITEDGTYDSKEEVAAYIDEYHKLPSNYITKSEAKALGWHGGSVEKYAPGKCIGGDIFSNRQSILPIGHEYKECDIDTLGADSRGPKRIVFSTDDYEVYYTGDHYASFEHLT

SEQ ID NO: 6560 - protein, 79 aa, Methanobrevibacter ruminantium
MNEIVLFGEDMKEDPHKYIKETLDFPDYYGENLDALFDCLSEVYNKTIIIKDSVLVDEDIIQTFVDANDENPDMDLILD

SEQ ID NO: 6561 - protein, 608 aa, Methanobrevibacter ruminantium
MRVLLIHSDYIKYQVKNKTPVAEEIEEAKESNAFEEALVVFTAVEKEDEKNPNAVVKNLVAEVKKTNEEVNAERIVLYPYAHLSSSLSGPKVGVQVLKDAEAALKEEGFEVFRVPFGWYKAFELSCKGHPLSELSRTIGAEEEAEEEEEEKKPSKWLIFDDGETIEPKEYNYQSKDLEKLVAYELGEGASDEGEPPHVKIMREKELCDYEIASDIGNLKWYPKGRLVRDLLADYVYNFVVDLGAMPIETPIFYDLANDAIREHAAKFGERQYKTATKKDLMLRFACCFGAFRVLGDSFLTWKNLPAKVYELSTYSFRFEKRGEVVGLKRLRAFTMPDMHSFCADMPQALEEFDAQVDMCVQTGVDLDVNYEAIFRATEDFYEENKEWMEATAKRIGKPLLLEILPERKHYWSCKIDFAAIDYLGRPIENPTVQIDVESGKRFGIEYIDEEENPQNPIILHCSPTGSVERVICSLLENTAKEDGKAPMLPTWLSPSQVRILPIGEKHLEYANQLADKIAAENIRVDLDNSDDRVGKKIRSASKEWVPYIIVIGDKEVENDVYSVTVRESGEKVDMTAEELIAEVKAKTEGMPFRRLPLPRNTAERINFK

SEQ ID NO: 6562 - protein, 346 aa, Methanobrevibacter ruminantium
MLNLNKKTIIGVILCFILAIPSFLLGNLFPIIGGPIIAILLGMIIASFWKDKGSAEEGINFTSKYILQLAVVFLGFGLNLGVIVATGIQSLPIIIGTISIALIVAYIMMKVLKMERNSAILIGVGSSICGGSAIAATAPVIGANDEEVAQSISIIFFFNVIAAIIFPMLGRMLGFSTVNGDAFGIFAGTAINDTSSVTAAAATWDNMWGLGSATLDKAATVKLTRTLAIIPITLALSYIIGKKDNGEKSNEEGFSLKRAFPTFIAFFILASIITTVAVFLGVDASLFIPMKEISKFLIVMAMLAIGLNSDIVKLVRTGGKPLLLGASCWIAITIVSLILQHLLGIW

SEQ ID NO: 6563 - protein, 412 aa, Methanobrevibacter ruminantium
MVKKDDTMFIGEALIGDGDELAHVDLLIGRKDGPVGNAFANGLSQLSVGHTPLLSVIRPNLMTKPATIIIPKVTVGDLDDASKIFGPAQTAVGRAVADAVEEGIIPKNKAEEWVINASVLISPAAEDYRKIYQYNYAATKLAIKRALDGYPDMKKVLYEKDRGTHAIMGFKAIKLYEPPYLQVALDLDNEEAMARIIKQLPNRERILLEAGTPLVKKFGVGIVGKIRELAPSAFIIADLKTLDVGRVEVKMAADETADAVAISGLGTIESIEKAIHETRKQGIYSILDMMNVDNFTEKLQQINKDLMPDIVLLHRNVDLESKLRAEGKNLDDISAWGNIKEIKEITGGLAAVAGGITPEKAEEAFEKGADIIIAGRYIIGSGDPRRAAEDFLAHMPVDPNHMRVVMEDDEQI

SEQ ID NO: 6564 - protein, 104 aa, Methanobrevibacter ruminantium
MGFCNSCGRPMGRNDYGTNEDGSPNQDYCKDCFQNGEFTEPDITINEMIIRNAERMLRRNRDLREEEATGILCNFLPNLKRWNPNPDDEIEDEDEPVRGYRGGF

SEQ ID NO: 6565 - protein, 337 aa, Methanobrevibacter ruminantium
MDFVKGIVKKYFRSYNRTLKDGTKKTYKTEQVQVTIPKSDNVFDDKEEVFILSKNQFDEIQDNEELISAMELFNAMQSEDIKNLNYSLDEARQELYSNSSKLESFTLELDDSKLELDKSNKKLLILKEDCSNLRDQLEESKLTIVNLKDQLDNKNFIIEDLNEYVNSLNNKVDSLNGEIDNLNTINAELNDNLNNLTNELNNNELNNGLGNGLNGFNNGNGLNGNGYNNGLDNNGLGNGLNGNGYDNNNLYGYNNGLNINNNHLLSSTVDEDSEVLISDVKSSVSFDYSDYIELQREYIVLLRKYEEAQENLYNEKVKVIHYRSLLEKFKAFIARLE

SEQ ID NO: 6566 - protein, 5985 aa, Methanobrevibacter ruminantium
MISFLIILLLNKGGHFINTKIINSILIILILFCFISLLGTASAEDIYTDDIASIDASNDFESIEISNEEVSTNAVENLDVSADDSDYVVNGSSSKNVLTANELSATYDLSGSSVQNISDLFNSGTIQSGDVIYLGNQSISSSWDEWTGNHLINVNVSNIIISGGSSSNPDGTSTINANGAKLFNIQASGVTLTNIKVINAHGGNGPGCINFDGSDCSIINCEFENCQYAQGGAIHGTSSASNLIITNCNFTNNVGRWGGSGGAIYLEGSGCKVTDSRFEGNTAQNYGAIYCAGDINLNNCNFTSNGPGAIYGGGNTEVIDCNFISNTGSSVTVISGGSTKVRNSNFTDNAGASIYSGGNTEIKDVIFTNNGAGSYNNKNVGSVYSGGATTDVSNSKFDNNAGIAIYANENAFVDGCNITNGGVAIYSGSDANISNSIIENNSADQAIVYIYGIGKVNNSNFTNNTVSGHTHGGALSLIGDNSEVSDSIFADNTAGASGGAIYTTGENTMIKNCSFTDNTVMQDYGHAGAVDVVGVNTKIIDCNFTNNSAPNGGAVYGGSYGLSLSNSVFEDNNASTGGALYIYHDDFAITNCNFTDNDASSQGGAIYIASECHNEQMTGCNFSGNTAPRGSAIYCDGDGKVTDCNFDVKPDLTVSGGNSSLTVTLGSDYSNVVVGDIEGVSGGSVTPLVDAQVTVEIFDSRGNLVDSVTNATDENGKIKYDYSGLSYGSYTYRASHMDGDTLITKEGTLTRQASLDVRTGYPALTSTLGLQTSIDGTAVENDPFVNEDITVEIFDSRGNLVDSVTNATDENGQVYYDYSNLQRGTYTYRVTSSDGQTEEGPLSMGEVVGDNFSAIQAAIDNAPSGGVIFLQGKTYLNDIQGQMVIDKPITIIGTDGTVLDAQGISRVFEITSDADNVNLANMTLTNGNDVYGGAIYLQSGCDDGTLTDVVFDSNTAELAGGAIYNAGGNRWTIDNTTFTENEAHGETNYIYRGGGAIWSCDAEMILSNTTFVNNQAPYGGALRGAFDIYDSLFDNNTATDGNGGAIDVTTEEFLYDTLILEFRNSTFVNNDAKGSRGDDRAQGGAIHIYHLQEVNMYDCFCENNTADRGGAVDFYELGKTWVDNCTFVNNNASSEGGGLAIFCNSSTFKDSNVSNNIAGTDGGAIWVIGHNSLFNNVTSENNTASRGGSSYIEGENTTIYNSTFNNNNALYNESLGSQSGIGGALDILGDNCKVIGVTSVNNTAELGGSTFIRGDNTLVQNTNLSNNTAVFNESRNETSGIGGALDVVGNNCQIINVTSDNNNAYRGGSTFIRGNDTVIRNSTFDNNNATLRGGGLNIAGEGCTIFNVDVSNNAAGENGGGIYVIADGTEFRNITADNNTAERGGGAFVEGNDIIIDNGTFNGNKAIFNESKPDESGIGGALDIKGHGCNVTNVDSFNNTAYRGGSTFIRGDNTYLENCTLDGNNATLRGGGLNIAGENCTIHNVDISNNTAGLMGGGIYVIADGTVFRNITADNNSAERGGAVFVEGNDIIIDNATFNDNKAIFNESRPDDSGLGGALDIKGDGCNVTNVNSFNNTAYRGGSTFIRGDNTHVENCTLEGNNATLRGGGLNIAGENCTVYNVDVSNNTAGLMGGAIYVVANGTEFRNITANNNSAERGGGAFIEGNNVTIDNATFNNNRAIFNETRPDESGLGGALDIKGDGCNVTNVNSTNNTAYRGGSTFIRGDDTYVANCTLDGNNATLRGGGLNIAGDRCIIDDVDVSNNNAGLMGGGIYVVSNGTEFRNITADNNTAERGGSAFINGTGITIRDGELNNNRAIYNESRPDESGLGGGFDIVGDNILVDSVHSNNNSAYRGGSTFIRGSNVTVQNCNLDNNTATVRGGGLNIGGGDGCKVINVSVSNNDAGEDGGAVYVIGDFSLFDNVNSTNNTAQRGGSSFIAGNNVTVINCNLDNNTASNRGGGLDVNGSGCVFENVTLSNCHADKEGGAVYVRGDNVTFNNVTSENNTAERGGSSFVAGDNCKVINCDLNNNNATWRGGGLDVTGTNCLFENVTLSNCHSDEDGGAVYISGDDNRFVNVTSVNNTAVNYGGSTYIGGTSNSVENCTISNNIAYNGGGIFIEGEDSKFTNNNITFNKAIATDEDHDFNIMGGGVFILGGNSNFTNNNISSNHAKDNGGGVQIFFGPDTFMDKIYAFNNTAENGGFANLLYCDNLNVTNSTFYSNHATGDISLDRGEGGAFHMSYATNIDVQGNFSYNTATNGSAIYSDGSDIRVHDSSFFDNQAHSWFLLITPSDETYLKGQDVIINISHIGGDNIANAIHNRDAESSITVRNVTYPFYNNGVLINKTTPIDEDIPIEIIGYENSDNGNLIYIDDLEDNQVIYYNITNRDTNESILVGFNKTDISGTVSLRLTNLPAGNYVVSAYYPETTYYTEIRNVSSFRVIDVDMVANKTVDNQTSNVGDIRDWNVTIWNDGASEAQNVTIIDFLPDGLNLTDNLTIHFYNGTGGLWNNAVLNLTSNNLTFSVYNKADGTWINGVASYDESSNTWTYYVLSLADNRTFAYSVFNQSDYTDAFGEARYYEDINSWTYRNISYDVDNADWYYYTFEYDDHTYVYGVFNGSYFVDAFGEARYYEDINSWTYRNISYDATTGNWYYYTFDYGGNTFVYGVFDESFFVDAFGTAIYDDGSWNYENISYNATDGKWYYYSLNYGDDSNNVTYYIFNPENFVDVFGSNYHYNAENNTYVYVNAYYDAETDSLIRNDTIYNVSSGIWTINNRLVVPELVSINPNVSYISPEKIYLVNKISLSIANHTNSTDISLDVGRFDGNGSVLMNLVTNVTKRGNFTNIVNVTTDSPEKNYTNNVANNSTIVYNDLVINKTVSDNLTNVSGIVDWNVTVLNNGTFEAVNVTMNDYLPDGLDLTNLTVKVYNGTGSLWTNATLDLSTMTLSFSVYNETSGEWISGIAAYDQAAKTWTYYVLALDDDVLTYTAFDETFFSNLFGDAFYNESSNVWTFVNRTYDEVTGDLISEVNTTYDNNTGIWTIGDKTFVEYKVNLTLVNGTNSTNLTLGINSLDENSTMVMNLVTNVTKYGIFTNVANVTTVTPETNYTNNVANNTTETLTNITVTKVWDDANNQDGIRPTSVNITLIGSDGSERSVLVTGTGGVWNYTFTDLPMFNSSGDSIVYTVNESVVPNGYDVSYNQSNWTVYNTHVPEVTNITVTKVWEDANNQDGIRPTSVNITLIGSDGSERSVLVTGTGGVWNYTFTDLPMFNSSGDSIVYTVNESVVPNGYDVSYNQSNWTVYNTHVPEVTNITVTKVWEDANNQDGIRPSSVNITLIGSDGTERSVLVTENNGVWNYTFTDLPVYNGTTDPIVYTVNESVVPDGYEVSYNQSNWTVYNTHIPELVNITVTKVWEDANNQDGIRPTSVNITLIGSDGTERSVLVTENNGVWNYTFTDLPVYNGTTDPIVYTVNESVVPDGYEVSYNQSNWTVYNTHIPELVNITVTKVWEDANNQDGIRPTSVNITLIGSDGSERSVLVTETDGVWNYTFTDLPVYNGTTDPIVYTVIESVVPDGYEVSYNQSNWTVYNAHVPEVTNITVTKVWEDANNQDGIRPSSVNITLIGSDGTERSVLVTETDGVWNYTFTDLPVYNGTTDPIVYTVIESVVPVGYEVSYNQSNWTVYNTHVPEIVNITVTKIWEDANNQDGIRPGSVNITLIGSDGTERSVLVTENNGVWNYTFTDLPVYNGTTDPIVYTVNESVVPVGYEVSYNQSNRTVYNTHVPEIVNITVTKIWEDANNQDGIRPGSVNITLIGTDGTERSVLVTENNGVWNYTFTDLPVYNGTTDPIVYTVNESVVPVGYEVSYNQTNWTVYNTHVPEIVNITVTKIWEDANNQDGIRPISVNITLIGSDGTERSVLVTGTDGWNYTFKDLPKFNGTTVPIVYTVNESVVPVGYEVSYNQTNWTVYNTHVPELVNITVTKVWEDANNQDGIRPISVNITLIGSDGTERSVLVTGTDGWNYTFKDLPKFNGTTVPIVYIVNESVVPVGYDVSYNQSNWTVYNTHVPNVTEINVTKVWNDSNDKYGIRPSNVTIELFADGKKVNETNLTARGAWTYTFSGLPQYNNGKLINYTIGEVRVDGYSVLITNNTVGNWTVTNTPIAVPNMTVQKIANDKVVYIGNVTSFTILVRNTGDCNLSGVYVVDSDYSAGLSYLRYENGSRDWTYDGAKWTLVGNLTTDNPTANFTVYFTVVDNGTLVNNVSAGSNLTNETNGTNNTTAYRPNMTIQKVSNDEVVYVGNITSFTIVVTNTGDCNLSDIVVTDSDFSAGLSYLTYANGTRNWNYDAVGHTWSLVGDLTNGSSAEFTVFFTVIDNGTLVNNASVRSNLTNETNATNNTTAYRPNMTIQKISNDEVVYVGNITSFTIVVTNTGDCNLSDIVVTDSDFSAGLSYLTYANGTRNWNYDAVGHTWSLVGDLTNGSSAEFTVFFTVIDNGTLVNNASVRSNLTNETNATNNTTAYRPNMTIQKISNDEVVYVGNITSFTIVVTNTGDCNLSDIVVTDSDFSAGLSYLTYANGTRNWNYDAVGHTWSLVGDLTNGSSAEFTVFFTVIDNGTLVNNASVRSNLTNETNATNNTTAYRPNMTIQKISNDEVVYVGNITSFTIVVTNTGDCNLSDIVVTDSDFSAGLSYLTYANGTRNWNYDAVGHTWSLVGDLTNGSSAEFTVFFTVIDNGTLVNNASVRSNLTNETNATNNTTAYRPNMTIQKISNDEVVYVGNITSFTIVVTNTGDCNLSEIVVTDNDYSLGLKYSRYENSSRLWNYNGGKFTLVGDLAPGNSANLTVFFIVVDNGTLVNNASVKSNLTNETNATNNTTAYRPNMTVQKVSNDQLVYVGNETSFTIIVTNTGDCNLTGVYIKDDDFSKGLQYNNKFVPVKGTWTYAGGRWNLEGQLTVGDNASITVYFTVIDNGTLVNNATAGSNLTNETNATNNTTAYRPNMTVQKISNDGVVYLGNTTSFTIVVTNTGDCSLSEIVVTDNDYSAGLQYSRYANTSSKWNYDGDKFTLVGDLAPGASANLTVFFIVIDNGTLVNNASVKSNLTNETNATNNTTAYRPNMTVEKLIYEDTVYVGDTAIFTIFVKNTGDCSLSDVVICEYWFSEGLEYNGVWVPNGDRKWDYDDETRTWTLIGDLAPEGFASFVVYFNVTKNGTLYNNISAKSNLTNETNATNSTRAYLPNMTVMKVANDEIVYLGNTTSFTIVVSNTGDCNLSEVVVTDTDYSTGLKYKNYINGSANWNYNNGEWSLVGDLTPGSSANFTVFFTVVENGTLVNNASASSNLTNKTNTTNNTTAYSPKMTVLKISNDESVYVGNITSFTILVSNVGDCDLSGIYVIDDDYSNGLLYNRYENSSRKWNYDGSRWTLVGSLEPGDSANFTVFFDVVENGTLVNNVSAGSNLTNETNNTNNTTAKPVCDLIIYKAVNATEILVYDIVEWKITVVNLGPDTALDVIVKDLLDNGLELISVSGGNYNNITGEWNIGDLEPNTPVSLSLVTRVLVNGTIVNTATVNTTSHESNYTNNNASNFTEADYLCDLVISKAVNCTNCNVSDLVQWNITVTNLGPHDASNVIVKEILPKGLELIDYNVSVGNFNEVISEWSIGTLEKDTAVSLVLVTKVLIDGTLINIATVNTTTLDNNYTNNVANNTTVASPICDLVISKIVNATKVNIDDILTWTVRVTNNGPSEALNVCVSDILPEGLMFVGYKASTGRYDDESGTWTVGKLSSGSSATINIYTKVIELGNITNPVSVNTTTVESNYSNNKANNTTEVYPIVDLVIEKSSDKIKYNVNDTMHWIIKVMNEGPCDAIEVYVYDALPASTKFIAYNSSKGTFDAAKGIWSIGDLANGEEVTLDICCKALISGNFTNNATVNCSITDKNTSNNFDNATIEIADNKSDNPDPIPDKPKHGVDISLRTGNPLLIFLMAIFAIFGGIGLRCRKE

SEQ ID NO: 6567 - protein, 198 aa, Methanobrevibacter ruminantium
MKILGICGSPRDGASSFLLKRALNELEKEENFETKFISVKDKNISPCTHCNFCLESKGECSIEDDMNEIYDSLKQADGIIFASPVHFGSISAQLKAVIDRCQALIMEDLDIFKNKVGISIVVGGDRCGGQELAIQQINTFYLLNKIIPLSGGSFGANLGACLWSQDEGTDGVKNDEYGLKTLDMTINHFKEFLLEFKQ

SEQ ID NO: 6568 - protein, 522 aa, Methanobrevibacter ruminantium
MSEESSSSKVAKGSAIILIGNVIFRVGGYIYRFLMASLLGPAAYGILGLTTPFQGIFQVLSAAGLPPAIAKYVSEYNALDEKDLARQTIFTSLKIMVFLGLFFGFIMVFVAAPIITNYYHKPEALLPLQAVGLITPFSVIVGGFRGAFQGVYKMEYILYTRAIEQIFMILMATALVLLGLSTLGAVLGSVLGFVASAISAVYIFKRYMGKYIPPANPDFKFPLKDELKLAKTLIFFSIPVTVAALAEMGIYSICTLLMGAFLPAAAIGYFTAADPIARLPLVVSNSLATTILPATSEAYALKDQVLLEKYVTAPYKYGMFFVIPMCVGIAIFARGIMGLVYFTNAAYMNGAVSLAILVVGMTFYSVYTISGSIVQGIGNPRIPMYILIIGCVITLGLGWYLIPLFGIEGGALATTISSFIMMVPMFLIQFRMTKTHAPYSFLIKVTVASLIMAIVSIIVPNNVYGLITGIVVCPIVYVIMVILLKTLSHEDVAEFRKYANKLGPIRKYANKLLDFIDKHSSD

SEQ ID NO: 6569 - protein, 230 aa, Methanobrevibacter ruminantium
MTDVKAGVEYKINIDGNSFLLDEKKFNLLLYINESGSITEAAKRTKISYRTALHYIEKIETTLNIAIVSTKKGGTGGGGGTKLTEEGLQIVKECKKINAIMELHRDVNELEAEILEVDASKGIMKIKMEDLTMTMPLNKKYVVGDKILALISYDNIFIMLEPQASSIRNIFKGIVTEMRLQDEMVRVKIDIGGVDIFSDITLSAGKDLDLNLGKEVYIGFKALSIATLKL

SEQ ID NO: 6570 - protein, 34 aa, Methanobrevibacter ruminantium
MARVSNLSYCHVCTLCAMKCGPDAIKIIRNAPDE

SEQ ID NO: 6571 - protein, 200 aa, Methanobrevibacter ruminantium
MNIEKRDIMERTAKVSRKTSETDIEIEMNIDGKGKYDIDTGVKFFDHMLESFSRHSFIDLNIKAIGDIEIDDHHTVEDVGILLGEAFAKAIGDKKGIRRMGHAIVPMDDSVATVAIDISGRSYCNMSLDFRNDKIGDLSSDIIVHFFESFASSAKINIYGTCEGFNDHHKAEAVFKAFAKSIYDACKIEHDEILSTKGVL

SEQ ID NO: 6572 - protein, 406 aa, Methanobrevibacter ruminantium
MMNYNYDIDMENPFEPGKSVSPDRFKGREKNIKKILRDMGKVQKGNVQHFFLTGNKGMGKTSLAEFVKEYVEINYGMIGIYVSNKGNNSLNSLITAIIQAFLNKIPRNVLFEKIKTLFSSIESVEIIGNRVSFKPSKSLIVDIEKDFPYYLNQIIKDLPTNNGVFLIIDDINGLSESKKFVDWYKRFADTIEVNRGDFNLPLYVLFAAYPDKFDSLVYEEPSFGRIFHYDEIDRLSDLEVKEFFKDTFSSVNKQINDNSLELLSYFSGGIPLIMQEIGYSIYWLSEKTTIDEEDVLNGIMEAIGELESKQIRNIVNQISSDDFEDLLLKIASQKQQSYIETDFKEKLNWDEYNIWDEFLDCMIKLGVIKTSNRKSNLKFSFSNQFYFTYFWLKSLNLHEEFAKIES

SEQ ID NO: 6573 - protein, 166 aa, Methanobrevibacter ruminantium
MASIDYFECEDCGFRWKDQGPLLFFLNENNKIEEYILLISNMNLDSNSNISGDIIETYCTNCDKKIKIYIISTIKSPYDEDSAIESIRKLADENQIDNKALKPFIRSSDLKDNFYIVDLYRNFYSNKDYHCPNCDSIISKYILSKNKCPKCGGEISSVDGLCLDKF

SEQ ID NO: 6574 - protein, 278 aa, Methanobrevibacter ruminantium
MVVKIGIVKSGNIGTSPVLDLLLDERADRPNIDVRVFGSGAKMNPEQVEDVVPKLDQFDPDFCIFISPNPGAPGPARARELLSEKDLPAIIIGDAPGKGKKDEMDEQGLGYIIVMSDPMIGAKREWLDPTEMAIFNADILKVLAETGALRLVQKTLDAVIAAADAGEEIELPKLIVTAEKAVEAAGFANPYAKAKAIAAYEMAGAVAGLDMKGCFMTKGFENFIPLVAAAHEIASAAAKLAQEAREIEKSNDTVLRTPHMKEGNLGCKVDLISKPVDK

SEQ ID NO: 6575 - protein, 222 aa, Methanobrevibacter ruminantium
MLKILAADKMDKKLIVRYIMLIVGVIIMSMGIALSIKATLGTSPISSVPAVLSIAFPWTVGEFTIVFNALLVIFQMVLLRKITISQIAQMLVCVLFGYMIDFSLLILNFPNPTDYISQWILCIISCFVLAFGLLIEVKSDITMLPGDGSVVAIAEVTNRDFGQIKPFFDLTIVSIAAILALVFLGHLEGVREGTIFAAIVVGLIIQFYDRIFGYNIDAYLAD

SEQ ID NO: 6576 - protein, 104 aa, Methanobrevibacter ruminantium
MKKVKITVMKKARYDDLIEKYENPLEHECEVELGDVFIANGWEKPEDFCSSAWDSISPFVLALSSGGEDLYDGWMKDKKSAMISCNDGFRPVSFYLEAMDEDAD

SEQ ID NO: 6577 - protein, 374 aa, Methanobrevibacter ruminantium
MNSKNIAIAGEITPSKTIIPLIQRLNELDKEDKLNFKINKIYGLYHGESSKLLLEPYCDELYDIGQGRRGQKKNSTAKLAYLISRDIIKAFNALKGNNIDLLITAGNAGDVRKSIVAANLLKIPILHIEQDIYNPIEVISHANLVTVPKEDYKDYLERKYNLKNVASIDGYPMAKYVDNHIKDNNLIDKEEIYGEYGVKEFVLVVLGGDLKDDEIEPLIRSVEQLNLKTLIAPYRFDRNLVESLVLSPNIKVLPQYVDLLSFMNAASHLIYAAGMGLTIEAGVFNIPSLKIEGFHKTHGSVDLARELNIPIVKIDEIPDAFEKLSAHQDNNLVKNSEIAIDKLVDLINGFDENGLQKSGFKSTKQIWNSRKVFR

SEQ ID NO: 6578 - protein, 393 aa, Methanobrevibacter ruminantium
MNLENKSIDLLNPFIIIAMVIVFIIIALPMWYAYQKLPSPSMDLFLYIGLGLIFFIFGILISNLLLNRFLKKDLSLDSLKDTIKISISKNPKKLSIFESYSRKEMILVIMVLIGIILQIINIVRLGGIPLFSATLKAEAAGKIWLASYIIFLPFINILLAEFNRDSHYLLVFLGLLLFTLTGYRTTPIAIVLSILITLYYTRNIKFKYQVLFLGLFLVIAVALLLAIGFIAVQAISWQHWSLNPIELVSYRAAFTLNVLGHAISNQFATAGKLFYSTLTGFFTHTDPRVLVGQATLGRNHSITSTIFGPALLDFGLIGMCIQMLLIGFILKTLHSIQKHKKEVYSAFYGILLAQTIIWIETGPTDVVVWIFYLIAIVLMALFFLKGSSRDLEA

SEQ ID NO: 6579 - protein, 5651 aa, Methanobrevibacter ruminantium
MRNKKIFIFTLMIVMLLSLAAVSANDLDNLEVDDGNVVSTDTVINDVPMESTSSDKIALNVDSTQSNTTEILNENEIITNNSTLSIDLNESITNEISSDHEDSYQADSNQEDSYFTSDGNIYVKVKTSMLKADGDQIYYIHPAGSPTATGTRDDPLDSMNSALNLFTSDGTHTIVVMDGIYKDTYYDYNNTDVDTNLSNLIIKSDEGASPHFNLSTSDYRRSLYWAFTGENITIDGLKFTDSQYGSFNEDGVYKYHTVLRFINSTNVLVENCVFDNDGYLINATDSSDVVIKNCNVSNSNRSNVFNVLNSSFTVQDSNLSKIRDSYITNSSFKLINNTICNNVNSNLFTVKNSSLDIINNTFKDSNYSSYYVFRIYNNNETYANFTGNNFTNLTGTDYLLQVNYYVNDNTTVSFVNNSLKDVSLGLNIRYSNLTMDGNSFDNLSLSSRPSYSGISTSYSNVSFTNNNFTNSDSYIYLGYGVNATIENNNFTDNIPSYYGLLRAEGNSHDIKENNFTNNKGNCSIIQHYSGNATIHGNHFYNNSLNGCGHVINVTSTSGSEIYKNDFVNNSADNGTVYLYGSSNVHDNNFTNNSVTGLGGAIYSYSFYNINTTIKENVFDGNNASFGGAIYYENYPSYNNKREIVNNTFINNSADFGGAIYSNKSINNIIDDNDFINNSAQIGGAIFVDYLYINDFRYNNTNNTISNNLFAENNAQSGGAVVLYSQNSTVEGNRFISNNASRYGGGALITSGNNSIIVNNTFANNTAQLYGGAIGTNDSKIIDNKFENNSAYQAGAILTINSTIHNNDFVGNEATRGPAIVYIDDFNYTALTYYTYNCSCENCSNCSGCSDCECCVTTIVDPETGDEIKIINCSNCDGCNCTCENSTVTEHNITLLYNNTGIDIDEDVYAYHENQLLRVAKENNGMYYLYDNVNVTSAENYTYWAYCIEQNNSYPWLGNGTLGVHVDDLYFVRNSLDDSYVGDYLKILISYFYHNLDEDKINVKEYIYIFTDTDYRSNNDRIIQKIIKLANNESTVLENGNNWINGVYNCLEFSTFINPTTRQNLILINGCEPLDKPDFNITKKANATHVKTGDYINYTILVTNNGTCNLHGLKVTERMNSMLIYMGFDDVSDNWTQTGDMEWMLNRTLKVNESAELHIYFMTNKVTSYTNITNVIEARSDESDTKIAEEHIETIYPKLVYRKVSVDPVAYPESTIRFILLVKNIGTANAYNVAIEDSGFSSSQLLYQGTWSNYKGTWYNSGSSATSTGRFTLNGYLAPNQEAGVYVSFKLKEGVKGTTVSNSFNVYLNNTWDGSASNFTRVVSSAMKVEKLWVDPLPIATIGDEVTFAINVSNVGEANLTGVYVEDFFPSGLEYIRFYNTDAHNWTHYETLDGTHRFILQNTLPNSQTSRTLSSSIIYVVFKANEIGDLTNTAIVKSDYTENVTDNETIIISPYGMKVEKFSNNPISQSDNQVSYVIRVTNTGIYNLTDVYVNESQNEYMVYDHFEDSSNKWIYNDSGDSPRWVYNGSLENNTYSDFIVYYNITKIPENGLIKNTVRVYSNETVERNASNETKVYKLSLWKVSNNPVSRLGDQISFTIVVKHEYNGNSYDKDLYLDGVFVKELIPDGLTYDHYVDESGKWSYDYNTDNWVYSGTLVPNTETNFTLFFNVTKMENLTNVVILGTNQSNNVTVNNSSDSRYYSMLVDKISLNETVFKGNITEFLIKVTNNGDLNLTNVTIREVIPDGLVYVGYLNKTGKWIYEGGNGASSDDQPMWTYQGILAPGESAEFIILFNATETGTFLNIVYGTSNETEEFVAENTTKVLNPLLYVDKVTLNQTVYRGDLTAFEIFIVNIGDCDLHDLYIDEIFPDGLVYYGLVDDTGSLSYDEKTQRISFDGTLKVRETLVFTVIFNTTKVGNFTNKVEVGSNETKKEYANNTTQVLEKDLNVTKVANNKTVVKGDKTEFTIDITNVGECNLTNVYVYEESFEGLSYYAYIDETGKWFKNGNKWIYDGVLKPGESVKFTVVFNTNETGNFTNIIVAGADGIPNKTANNTTEVLICDISIEKLTLNKTVISGEDTQFAIRVKNIGLGNLTDVTVTDSFPEGLTYKTFIDNSGKWSKNGNKWIYDGVLKPGESAEFIVVFATNQTGNFTNFVSVSTNETKSKNASNKTEVVLADVEIQKITLNKTVISGEETLFEIVVTNKGIIDLSDITVTDSFPEGLTYKTYIDESGKWSNSGNIWTYDGVLAPGESAGFIVVFDTNQTGNFTNFVSVKTNETKSKNASNKTEVLVADIEIQKITLNRTVISGQETMFEIVVTNKGLVDLSNVIVADSFPEGLTYKTYIDESGKWAVNNNKWLYNGVLAPGESAGFIVVFDTNQTGNFTNFVSVSSNETKTKNASNITEVLLADIAIQKITLNRTVVSGQETMFEIVVTNTGIIDLTNVVVTDTFPEGLTYKTFIDESGKWSNSGNTWAYDGVLAPGESSGFIVIFDTKDPGNFTNIVSVISNQTGNKSARNITEVIVADVGIQKITLNRTVYSGEETQFEIVVTNTGIIDLTNVVVTDTFPEGLTYKTFIDESGKWSNSGNKWVYDGILTPGKSAGFIVVFDTKDIGNFTNVVSVNTTEVGPKYSYNITEVIIKENKTNHTNETPPGPNPPGPSPPGPNPPGPNPPKPHVPTHPHKPIVPTNPNQPKLVKSNKNPLSDVKAGNPIALLLIVLVVLGSVPFASCDSGGTRRRRKTKERKAAKHKEIDKKKGIIILSGCLLLMVSVSAISAADTGDLGYDDAGSDVAVQSVSHEPAQYSYSTSENMAYDSYDYGDYNDYGGYGDYGDYGDYDGYDTYNDYYILDNNETVYEDGMENSADGNSADAANGQANQYAEDGSDMELYSIDDESYDSNDNYDNYKEYSYDDDSSREDASSIVRYNDCTVNGDNKVKSIYTSSSLAEGEGVVVYVSLDGRTGAEGTYDDPLLTIGAALTKLSTVSSTETKTIILKGGNYSGNNYRYLSTRLNNLIIKAEDGAEVNVDLRGMNQNSLYWTFYGDNVTVSGINFMNANMTSYNLNNYHAVLKFINSSNSRVEDCSFSNLKSYGILAGNSTDVVISNCNFTNGSSRMFSITNSSVTVEDSIMKNFSTSYIRNSTFTMVNSTVTDFNDDDIFNFANTDLDIRDNTFKNLTFPNKTNFQRFGVFYAWDDNAGISYNFINNTFANFTGTDAYMIYRSASSSVKPMCKVNFTDNNVSNVSVGVNIYYGNITVENNSFDHMSPANTLRFSYSNIDIRDNNFTDSNSTHVYSDRCNGTIEYNNFINNSALPVSAEWGNLNISFNNFTDNKGNFSAGAIQSTGVVNIFNNTFCNNSARVGAVNVASISSNKTIYNNTFVNNTGVSGTLYVNGNATVHDNRFIDNNVSENGGAIYAAYDNSYNNYYNISANITDNIFDGNIANKGGAIYYEQYNSAYGLDNLANNTFVNNKAEYGGAIYSNKTVNVTISENEFVNNSATIGGAIFLDNYTSAFNTGTNITLNNFTNNSAQSAGAVVVYGNNTNVIGNNFVGNNATRYGGGALVTDGANGLIYNNTFENNTAFLYAGAIGTNNSKIINNTFTNNNAYQAGAILTINSTIHNNTFSGNDATRAPSVGYIDNYNYTVSSYYVYYCSSEDCSGCTACESCTSTIIDPITGAEIKVINCSNGDVPECICEDSVATLYNISLLYNNEGLNLDEDVYVYDESTILRVALNNNDMYFLYENASIPNASEYHYWAYCIEQNNSKPWQWNGTTGVLVDDLYFVRNSLDGSYVGDYIKVLVSYFYFNLDEDVYNLKDYVYVFTDTDYRANTDRVIRRVINLTEREDTSLVNGNNWINGVYNCLSFHSFIMPTTRQNLILINSCMAMQTPDFNPQKIANKENVGTGDIVNYTVTVYNNGTVSLHNVTVTERPNSMLTYLSFTDFRNQGWVQTGEMTWVLNRPLKVHETGTFNINFRVNNVTYLTNITNYIDVGCDEVSNKSAFTRTETKWPRIQVQKITLDQNVTPGSTVRFLLLVKNIGTLEASNITLVDNFNRNELEYEYRWDSYKGNWSGGHGWGGSSSSWHVDTLYLNQVLYPGQEAGVIIYFKVPNNVTVGSAYNSVNAYRNGTSEGYSSNYTIIQRPYFSIWKTLVSSKTSTIGEEVVFQINVQNTGYVNLTGVYVEDILPIGLKYLRFYNTDNHNWTHFVDEDGKHRFLLQNTLPTYYSDSQNYVARLYIVCNATEYGNWYNLATGYTEQTNKSTSQANVTIIPFGVSIEKVSNNPISQVGDQVSFTIRVRNTGIYNLTDVYVNETRNSYMVFDHFVDNSGKWILNESYATSGVPSWNYNGTFEVGAVSEFDVFYNVTNINYYGNITNTAYVSSNQTTNRSVSNQTAAYNIKVRKISNNATARVGDQVSFTIQISRDGYSWESPFSLYGIHVKDLVPDGLVFDHADNSYYWIYNESDETWYYRSGLTAGRTISLTLYFNVTKAANITNVAIVGVNNSTVKTANNTTNSIYHNLQVEKVTLNETVYPGNITEFLVRVNNTGDNNLTNVFVKENIPNGLVYYDYINKTGKWNYTEDDDGPIWLYDGILAPGAFGEFIIRFNTTVPGIFVNNVVAGSNETSNKSTENSTKVLGPIISVGKITLNKTVYIGELTEFRIKVSNDGDCNLSGVYVVEYIPDGLKFVEFKDESGLWTYNESSRTFYYNGILERDDSLEFVVVFNATRAGNFTNVVHAGSNVTNESVANNTTEALDVRMDIQKVTLNETVFTGQETGFVIVVSNTGLKDLTDVRLKEIYPDGLVYSRFIDDSGKWFNRGDYWIYNGVLAVGESTNFTVIFNTTKSGTFNNTIIVSSNETGPKNTSNTTKVVVANVTVAKITLNETVMSGEQTSFDIVVTNDGIYNLTGVVVTDAFPEGLAYSGFVDASGKWIFDDSKGNAWIYNGTLAPGESASFTVVFDTDEVGEFTNIVKVSTNQTQDKNASNITKVIKLIPNVAIQKVTLNRTVYSGEQTSFEIIVRNNGEMNLTAVTVTDAFPEGLAYSGFVDASGKWIFDDAKGNAWIYDGILAPGESASFTVVFDTNQTGNFTNIVTVSSNQTKEKNASNITEVIIKSVPGIEIIKITINRTVYSGEQTSFDIVVSNDGNVNLSNVTVIDSFPEGLTYSNFIDDTGKWFNIGNKWIYNGILLPGESAGFRIVFDTNKSGNFTNHVKVTSNETGEKNSSNVTEVIFADVAIQKITLNRTVYSGEQTCFDIVVTNVGEIDLTNVVVADSFPEGLDYSSFVDESGKWIFDDAKGNAWIYDGILAPGESAGFTVVFDTNITGNFTNIATVSSNQTSERNASNITEVIKLIPDIAIQKITLNRTVYSGEQTCFDIVVTNVGETNLTNVVVADSFPEGLDYSSFVDESGKWIFDETKGNAWIYDGILAPGESAGFTVVFDTNLTGNFTNLATVSCNETEDKNASNITEVIKLVPDIAIIKVTLNRTVYSGQQTSFDIIVSNVGETNLTNVVVTDTFPEGLTYNSFIDETGKWIFDEEKGNAWAYNGTLALGEYASFTVVFDTNLTGNFTNYVSVTSNETGEKNSSNVTEVIKVPKNDTPPVPVPPEPVVPPEPVTPPEPVIPNKKVPRHELPRTGNPLMVLLIALAAVGLSSVRRKRE

SEQ ID NO: 6580 - protein, 502 aa, Methanobrevibacter ruminantium
MGLFRVKRIPDEKQIKLGIRTLDFNIPEDHISRFVGDFIDEYYPLLGIKENKKKKGRDSFPVKEMLKLLIYAKIEHIDSMRFLADMVKYHDVYKFVGNGICPSERSLQRYREKYGKYYNELLKATLKKASDVDYTDFNEVSIDGTIKKAYNSKNKVITEKETEILTRYFEGGRVSQEELDKLHKPAREILENKKISNQEKLYLLDDIKTQFTLSGQKSVPVTDIEARWMKSKKGNSQISYNIQSAVDYDTKMICAINVVQAPTDHYQLPKIVDKAINNTNVIPRFVLADTIYLNEESLSYLADNQINGVIPDRKQSKEKIGRLNKNPYHKDHFKYFPEIDAFECPEGQIMYFFNKYTEKNDDLDKPDKIKRLYSNYGACKACNCRENCLSSTQTHRTITEYGGSLKKAMWEKMETEEYMEEYAKRSSVEGPFGILKEQFHIESEVVIGKTKTEERILLDAVAYNLIRLFNLEQEIKNDKEDIVDFCEKISVQEKLEVRATIF

SEQ ID NO: 6581 - protein, 229 aa, Methanobrevibacter ruminantium
MLEKEVKQYKRGNSFTYRIDLSKKDNFEGGEKIMIFRMSEYEAYLNEIEDLKSQIEENNKTISELRESRSEANSNINNVVDNHNKEIADKNKEIMDLIEENKSAIQKCYDIIEEKDKLLTQANEEIRIEREKTDATRKQAQEDILNERKRHDELTLEKDKQLKLVNEQLQDSLKDIAYKDKVITADRLLIERYKNRGFVDRLLNRLPDDSDLKIDDVKETYVLEAEKKE

SEQ ID NO: 6582 - protein, 45 aa, Methanobrevibacter ruminantium
MILSLHLFCYGYFFIDFDDIVLSLHSICNLFFIDFDDIVIASIGY

SEQ ID NO: 6583 - protein, 480 aa, Methanobrevibacter ruminantium
MKVVLAGTGSAVGKTTISTGIMKALSDENVQPFKVGPDFIDPSYHTIATGNVSRNLDSFFMTDFQIINSFERALKKSNSNMGIIEGVRGLYEGISPIGDVGNTASIAKAIDAPVVLLMDARSLVKSAAAVVLGFKALDPDVRIEGVILNKVKGQRHYKKAKESVEKLADVPVIGGIPRDDKITVEERHLGLVPALEKERITRNINLWGEIAEEYIDLDALKDIMKTSSKSTARDNKNIAMEKHEDDFNREHTEAIDLEVTNDSKPGQLWKTGNRNKVKIGVAQDEIFTFYYKETLESLEENSAEIVPFSPLKDEHLPDVDALYIGGGYPEVFKKELSDNKTMLNDINKFHKENRPIYGECGGLIYLSKSIDGLDMVGAVPYSSEMTNKVQGLNYVVARANQDNLISNEGDVFRAHEFHYTKLNIDKTDSLVFDVLRGRGVLNNMDGVCVNNTLANYIHIHACSHPNFGYNFTINISELDI

SEQ ID NO: 6584 - protein, 371 aa, Methanobrevibacter ruminantium
MSTLEKMQVLADSAQYDLCDYVSHSKSSQVNLPGIYHATGHNGCKIPLFKTLMSNKCKNDCKYCINQSKRDFTRLELSPEELAKAFLHYYNNGYVNGLFLSSGISNEIDETMNKTIETARILRRDYGYQDYIHLKIIPGSSKDSIKRAMSLANRVSLNIEAATKDGLSEITSTKDYNKDILKRIDWMHQIAKKNPDYAKSGHTTQLIVGANDESDYEILKRMDSLYRKADLRRSYFSAFSPVEGTDFEKREACSSDRTAQLYHADALLNDYKFKVKELVFDEDDKLFLNEDPKILAAREMDIFPVEINTAPYRELIRVPGIGPKSARRIMSIRKKMPFKKLEDLQKLGVVIKRAEPYIQLEGAYQNSLDNY

SEQ ID NO: 6585 - protein, 71 aa, Methanobrevibacter ruminantium
MSLEEIPFEEQLRGVILEGEIERAELKGVEKGRNIIIIKLLETMNPQEISESLDLPLDTILSIQESHTKNV

SEQ ID NO: 6586 - protein, 295 aa, Methanobrevibacter ruminantium
MADAKDSKDDKVYHLEDLLFVKCLVQFEEFPQYITGFKDIRNSFDSRFASSSNFSSLNLDCVRQREDLSLIDIEHHSSIRPDLMRRNYEYAVNLYNVTGYTVHPFIFYTGDLPVNKIIRMNDFNTFQPQWFILKEKDGMKSLNNINYKTFNKIDWNVFDAIDFAWIPKFDIDMSIEDCIVELAEIYKMMPADNKFLQFCRESLKLWTGKYIKDKERLDKVKECLNMSELEEIPFEEQLRGVILEGELERAKLKGEEKNRIDFISKALKHMSPKEVSNMFELPIEYVDEIANSYSK

SEQ ID NO: 6587 - protein, 511 aa, Methanobrevibacter ruminantium
MYAINMEQNKKELNIPDEIKIFDTTLRDGEQAPGIALTVDEKIKIAQRLDELGVNVIEMGFPTVSSGERKAAREMVSLGFSSELCGLARVVQKDIDALIDSDLSYAHLFIGTSPLHRDYKLKKSKTEILSQSMEMVEYAKDHGLKVEFSAEDATRTELNYLIEFYKGVESAGADIINVPDTVGILVPSTTRTLIRTLRKKINLPISLHFHNDFGLAVSNSLIGIEEGANQAHCTINGIGERAGNTSLEELVVSLKIAYGANLTVDTTKLYDTSNFIGSITGIKMPPTKPIVGDNAFAHESGIHVDGILKNSSTYEPIAPEIVGHKRRIALGKHTGHAAIKSKLEEFNIEVTQKQFDNIYNQVKTLGDKGKCLTDDDLRSIAITEIGTSGKEYIKLLGLSVMTGESVSATATIKLSIDGKIMETSQIGVGPVDASVLALKTLVQDRVNISLDEYRLEAITGGTDALAETFVVISDDKGNKATGRATREDVILSSVIAVINSINRILDIQENC

SEQ ID NO: 6588 - protein, 263 aa, Methanobrevibacter ruminantium
MATVDSFLPDFIQTTFFSGYTIFNTVIYTLILLIFIIAIIKMFKKIKIDPISIIYPIIPYIFLGSLIRALVDNGVYPKTVFLITPGLYILVGLITIASLLFSLFLYNRKNIDYRYTLSIIGVILLIPNIIMIPRLNIIPVIYVLITWIIASSIFVLISYIIPFFKDRINLSIISAHMFDASTTFVAVEFFNYSEQHVLANTLYQLFDTSITMFPMKIIVIVAVLYIIDQYFDDETIKSLLKLTVFVLGLAPGLRNFLTMAIGV

SEQ ID NO: 6589 - protein, 221 aa, Methanobrevibacter ruminantium
MKFDPHIHSVFSGDSRSEPIDILIQAQKIGLDAIAISDHNEIKGSRLARSIPGDIIVVPSIEISTEKGHMLGLGVDEIIPKGLSAVETVDRIHDAGGLAIVPHPFSYYRHGLFCNVDSNLGVDGVETKNARYIFGYSNKQAQTLAERKRLARLGASDSHFLESIGDAYTEVNTKGYDSVDGILKAIKHRRCRAMGHGTSNFLVAKEVFVKKVLRRYPKRDE

SEQ ID NO: 6590 - protein, 358 aa, Methanobrevibacter ruminantium
MKILAIDVGTGTEDILLYDTEKEIENSMKLVIPSPHLTIGQMISESESDLYFDGVIMGGGKIKDRCLEHMEKGYKIVFEELSGKTIRDNIEQVKSFGFEVVKEGSFDKELNEDSSLKYADYQKISLKDVDVDKLIDIFKSFDLDLEVDELIIAVQDHGYSEDMGDRDFRFEKIKEKLPEPLPPEVFAMEREEVPEYFTRMQSVIQSLEESNPEFKPVLMDTKFASLAGVCYDKEVLKLNSFIVMDIGNGHTTVASIENGKIQGVFEHHTRDLSPERFEELVLALADGTIKHEDVHDEGGHGAFALNPISKIEKVVVAGPKRALVEKTNLDYYHAAPGGDVMMTGTVGLVKSMEYLRKN

SEQ ID NO: 6591 - protein, 433 aa, Methanobrevibacter ruminantium
MQYRIDLTNDEVPTKWYNINADLPVELPAPKNSEGKDQISTLPQIFVNECLNQEFSTERYIKIPSEVRELYQRLGRPTPLCRARGLEEKLNTPAKIYYKREDTSPTGSHKLNSAIAQAYYAKKEGIERITTETGAGQWGTALCLAASMMDIECTVYMVRVSYDQKPFRKTIMQLYDGNVHASPSENTEVGRKVLAETPDTPGSLGIAISEAVEDALKYDDVKYTLGSVLNHVILHQTTIGQEIKLQLEKAEEEPDTMIACVGGGSNFGGSLFPFIKDKIQGNSDTEFIAVEPSACPTLTEGEYRYDFGDNMGFTPLLKMFTLGHNFVAPSVHAGGLRYHGMNTQISLLKNEGYITPVTAHQRDVFAAGKMFAMCEGVIPAPETNHAIKAAIDEAKKCKETGEEKTIVVNFSGHGLMDFKGYASYMDGSMENSK

SEQ ID NO: 6592 - protein, 258 aa, Methanobrevibacter ruminantium
MGETIAVMNQKGGCGKTTTVVNLATSLAAMGKAVLVVDMDPQANATTSFGINKTEIKKTVYTALVNECSVQKATIPTRIENLFLLPSNIDLSGIEVELSKEDNYHIALKKLLEPIKGIFDYIIIDLPPSLGIITINSLIAADSVIIPIQAEYFALEGLADLMNTINLVETRLRSPTPIKGIVLTLYDARTRLGREVYGELKNYFKGKEYIFKTVIPRNIRLAEAPSYGKPCIAYDPESKGSIAYLKMARELLKLDGEI

SEQ ID NO: 6593 - protein, 248 aa, Methanobrevibacter ruminantium
MAKKQNSGLGRGLDSLIPKIKEIEQDVEEGLSLEDLLKKSDDEEEIEETVEETVEEEAIEEQEDISTEETETEEEPDEEEDEPVVEKDETEEEKIEIEDEPKEELETEAKEEETSNYTNIFSNDDEIVTENSTKTIEISSSKNNDKNIESSVNLNKETEESIKINEDKTKENDSDSVLSEKEEKLVYEVIETVEKNPRITLWSARSAAVLRYLRKTEPEFSISNEASNLIDEAIAQKYPEIWTLFNHL

SEQ ID NO: 6594 - protein, 252 aa, Methanobrevibacter ruminantium
MKLGFSLLSLFMKEVDEMLEIAVENGFDSVELLAEGPYRQDILLERKEITETFHSYDLDIYIHGVNVDINLASLNEGIRKESVKQTKECLDLADEIGAIGVTAHPGKIGRPEKYLREMALGFLTESTHELVAYAEDKEAKISIENMPERFSYLGNRAYELENLTNETGCNITIDLGHVNTCKDQLSFFEIPNILYYHINDNDGIKDKHQAIGDGTLDLNLLKYVDNGIIELNNFDNVLKSKKVIEDFLAKNQ

SEQ ID NO: 6595 - protein, 268 aa, Methanobrevibacter ruminantium
MIKMTKKAIVFDNSGTLLERFRVIKDLSTGEFITHVNSLDLIDSCLNAALVVLQFNTNRLKDLDPNTLISDFVLENNIDFDISYYSTDVSKEEIKAILEKDTAIIKDITDTFPLLKERVPGMELCNGSAVIIDIEEERISYTITSAGQLFSGVKDTIAKLQDSGTDVFIASGDRSGDIRKLANITGVPEDHAFATASTDRKAEIVANLQDEGYKVMMVGDGPNDILAFQKADAAVLTTEQKDGDFPDKLKSYADFVIEDISEVLQIDF

SEQ ID NO: 6596 - protein, 316 aa, Methanobrevibacter ruminantium
MHLDSPLKIKNICLSNRIVMPPMAREESIDGKVTYPLIEYYRMRAKSTGLIIVEHEYVREEGKSSPKQLSMADDSVIDGYIELTESIHREGSFAIAQINHGRYGSISSNNVNLNGISIEEIEDIKKAFVEAAVRSQKSGFDGVEIHAAHEYLLNQFYSPYTNKRTDEYGGSLENRMRLHNEIIREIREAVGDDYIIAIRFGAYDYLEGGSKMEDIPAAVKSFVESGVDMIDISGGLCRYQNPYSREPGYFKDLSKIAKESCDIPVILTGGVKKAKDAERLINEGYCDLIGIGRALLMDGDWSKKAIRKVRKIKSDK

SEQ ID NO: 6597 - protein, 93 aa, Methanobrevibacter ruminantium
MRARERRARLMSLYIYIVMTMIQTKVSARNQTTIPSKIRKKYNVQPNDIVEWKENRNGELTVTFRKRISFRDMIGKGTIKTTTNALDLEKDLY

SEQ ID NO: 6598 - protein, 352 aa, Methanobrevibacter ruminantium
MFEKRKIKRLSNHLNNSYDAEDYVSALSYCDMILDIDSNNPHALFNKAKILVIQGELLEAMSYYKKALQTGFFDMSTWVDEVSYYMDGDISSTNYKLSNRNEISLELCEICLEKYAKDIFFSIYKSQALDNLGRFEESLNAISLDLTPADGELYVFQCIGQCFPLSNLNRWEDLLETSSNGLKLKSEDPSLNSFKAKALYYLNRLNESEGFFNKYIQLTNDSRAYNFLSKIEFKRKNYTSALKLINNAIQLSKKEHLDLLESNVLIEDDGIYENDYYMKSLILLKLNELDKSNKIIDCLMEKEESAKNYCLKARILYEMKDYRTSLSFVNKSLDLKSDCSEAIELKEKLGEF

SEQ ID NO: 6599 - protein, 372 aa, Methanobrevibacter ruminantium
MFTKIKINKLFKELDSALNNQNFDKALIILNNILILDENNLGALYKKALILYNKGEYEKSLSVLDHLLSIDYCIDAFLLKGRVYCNLNDYENSLNSYKEASINFDLDKMNNEMTYYASHPSLFDKGIHTKIFIDLCNIILDNADIIEVRLFKSYVLSEIGRSRDALNNVNYILAHNPNNEKAISLKSSILISLNHFDEALALINEGLNLYPNNLQLIDTKARLYYALSDYDEALEICKEYNSMDDFGNYYLLSKIEYKKGDYSLALKNIDIALDKFFKNPNFDDKKEFSHAYYWYKSLILSKLDRFDEANKICDCLIEKEESAKNYCLKSMILFKEGNYTDALIFIDKALELDCECDKALELKNNIEDKLSS

SEQ ID NO: 6600 - protein, 501 aa, Methanobrevibacter ruminantium
MSNNQISGCSYALYLDGSDNGSFIGNKIFNNDYGILAKYSNINLFKNNSVFNNWIAIEDSSKYNQFLSNNIHDNYQGIRLIASNSALIENTNVYNNYLGILKYSSSFINKSASVYNNTLINVQSLNDGEIVIQDNMWYCGPAALSIIFESLGLSLSQEDIAKIAGTNTNGTSLYGLYQACIKKGFNPSVLKINSSDLMTNDLAVLLINEDYHFSVIYSINDTDIVLNDPSIGLFVLSRETFDEMFSGYVLDVEPIKDRVSNVSIAKMKTIVGTVFPALAYGGYLALAGVTVIAGSLAIVWNSNSHYNSKSIQKPHYTWKPNNKIHFPRNVKYPTSTGNNGNRPKVSYNPVTSSISGNKYYTNNKVYTYNYKSSNRKVSSSNAAIIAYQEAYNYYLSTKNNERAKVEKPTNITSYNYFLKDVKAFEKGSYKFSLGPKGPDDDLYDSAKIVKALYRDATRNYNYGKFLINTGNKSRGICYIFLATFEISFIPAIIYNQLSLNP

SEQ ID NO: 6601 - protein, 467 aa, Methanobrevibacter ruminantium
MKKGVLMNILEKLNAIKNQEITAKENVESYIKVIEEKNDELNAFLELNKEDAIAKAEEIDAKIKAGEEVGALAGLVFGIKANINVEDLIISAASKTLEDYIGSYDATVVKLIKAEDGIIIGINNMDEFAAGSSTETSYYGAVNNPAAPGRIPGGSSGGSAAAAAAGMCDIAIGSDTGGSIRNPSSHCGVYGMKPTYGAVSRQGLLDLSMSLDQIGPMARDVTGITLALDTIVKYDPTECTTLKWDAPNFTEIALSVKDKEKPLEGMKIATCKEFKEVTNDEINEIIDESVAKLESLGAEVVELSFDYIDICLPTYYLINYVEFFSATRKYDGRKYGSRIEEVCGPEVLRRIQMGSYISQKEFSGKYYQKALQARSLIRNAINDMLEGVDLIVGPTVPKLPHKLGEELEPMEMYAYDVLTVIANLAGIPAASLKAGEVDGIPVGLQLQAKPQDDAKIVKAMAAFEYAQ

SEQ ID NO: 6602 - protein, 189 aa, Methanobrevibacter ruminantium
MMSELEKLKSGLVYCYDDEEVSAIKDNAIYQSFRYNNIDPNDKQKQYDALEEILGSCGDDVWIGKRFSFDNGKNIHIGNNFTGNYNLTILDIREVYIGDNVMIGPHTLITTVGHPLEPKGRRKHLAMADSIHIGDDVWIGGNVTILPGVNIGNNVVIGAGAVVTKDIPDNSLAIGVPAKVVREIENDIE

SEQ ID NO: 6603 - protein, 287 aa, Methanobrevibacter ruminantium
MTDNSSNMGSNSDKKEFDSDRKEFNSDKEFNSKKEFDSKKEFNSKKEFDSKKKDFNSKKFNSNYKSNRSRNNINTIQDLKNSIELKENKINDLKELLEIKDEEKQEVEYELSLKDQELNDLQSKLDILTVENEELTIELNEKESKISKLNNALVKCKYEKDKVDLVLKNEVNIEKSRLKEMDNLNNTIKEKIAIIHDKQEQINYLRTLIDDYKDQTKNNTDNLDLQLKKITKTYEGLLNQKDSIIEKQEQNINELIESQKQIAKDNKATITRLELEIGKYREELKKS

SEQ ID NO: 6604 - protein, 264 aa, Methanobrevibacter ruminantium
MVKCSKCGSENKSEAKFCHSCGAKLDIKDPYNLDGKSREYGSTTGKSAGSASAYYDHSANSGGSSSDSTGGIDNFRNMSNFKKIIFACCAVFIVLFILSLAAQALGFDMEPYSENKTAYHNYSSLDLDDDGALCLEELEIEYSNISSSKMSDIFKKSDKNRNHLIRGAEYDMLNYYVNEHFKDLEKKKNEKTSSSSSSSSSSSGSSSYKSPFTTSGSSDDGAETCPFCGSEAVYESGNSYKCAECGRTISNPDDLDLNYDEGYY

SEQ ID NO: 6605 - protein, 408 aa, Methanobrevibacter ruminantium
MKKCSKCGSENPDNAKFCHNCGSKDFGTNENICPKCGESNVKEAKFCHKCGASLSSNSSSGSSSSYNPTGMNGPFGAGANDKPGSVMNGPFGAGANDKPGSVMNGPFGAGANGVADSFAFDPSSNDKSSSSSNSNSSSNSNSSSNYSSSSNSNSSSNSNSSSNSNSSSNSNSSSNNQGSTASSANQSNSTASTKNQSNSTISSTTANTGNEGPGLKKICCCYVPVILLVLFIIFAILLNAFPENFSATYDDEFYQLDIDGDGRLSLSEASQLNPGMSDSSISSYFNEADKNNNGYLIGHEFDDFYSDVKPYSSSSSSSSSSNSHKYSSSSSSSSSSSSSSSSDYDSSSDGYVLTCPYCGSEAIYESGSYYKCADCGSIIHNPDDLELNYQEGYMDLLAPIVQINLGGV

SEQ ID NO: 6606 - protein, 129 aa, Methanobrevibacter ruminantium
MIKMEITGIVTTGLGKAAYFLGQDFYKSQFNEKCGFTPFPGTLNLIVEENKLEDIRLMKNSCTNVIKPDQGFGGVKHIRAYLNENIVGAIVFPDKTTHDENYLEFISKDKLRDKYNFKDGDEVVITIDI

SEQ ID NO: 6607 - protein, 569 aa, Methanobrevibacter ruminantium
MSWLVVLIVFLLASIKSTKNPSVSVVIPAFNEEATVAQVVTVARKLSYISEVIVVDDGSTDKTVEEAERAGATVISHKGNQGKGVAIKTGFKNSHGDIVAFIDADVSNFTPTKIDKIIKPILEGKTDITKTKFARESGRVTELTAKPLLSFFFPELNYEQPLSGQFAGKRSALNKIKFEKDYGVDVGIVLDADVHGISILEVDIGDIQHDMSSLADLNKMANEVVRTIIDRAVDYGRVTMMDTLGNYIRMAIMGLSLIILGLFMIFFVPFIPLVISVLVALVGIALTIAYIIKIVQRSIPILRKGDTSTALKSFVKMHFPVIVSGLILILMLSTFLSAATFNDGRISVELTSRNFVYSPSDDYHQTISVRGPYTIDSAIENETDMVRIPPDALSTLEMSANDTMIIDGEYYSVNTSREGEVDVFRLSKAVRHDLDLYPREVIPNSRLAEVFNGVIVNHNINFNNSSEVMEGYVQFSISPKATNATFFNLTLDNESLLSSVGNFKNDSYYTIAYDDDILCAFTGDDIKKGNVTFEYAGKDGMIVFEDRNNTSIRNFIDSDRDSFVKLYTL

SEQ ID NO: 6608 - protein, 104 aa, Methanobrevibacter ruminantium
MIALVLAPTVLSLFTSSVTAAALVIVGILMIVQLKEVDWDNMVVAASVFMTIIMMLLTYSISLGIAWGFVTYAVAAIATGKAKEFSWIMWLMVIIFAAYVFFGL

SEQ ID NO: 6609 - protein, 331 aa, Methanobrevibacter ruminantium
MLNKFFKLDENNTDIKTEFLAGLTTFLAMAYILGVNPTMLAEGGMPATGVFFATALASGVSCIIMGLVSKYPVGLAPGMGMNALFTYTIILAMGNTWETALAAVFVSSIIFLLITISGLREAILNALPFDLKLAIGAGIGFFLAFIGLKGAGIIVADPATLVGMGTILSAPALLAVIGILLTLILYIKKVPAAVFLGLVITAILGVIFTLFGFGAGDPLMPAIPTEFISFNFDTSVVGAFLKGFSQLFTNIPNLIMILFSLLFVTFFDTTGTLIPLANQCGFVDEEGKADGIDKAFLGDAISGIIGAILGTSTLTAYVESATVLVLVVEQV

SEQ ID NO: 6610 - protein, 3079 aa, Methanobrevibacter ruminantium
MSIKRILLTSLMLFIIIFSISFVSANENVTNDVSTNELSTQTVSNDITTSESISDTSLDSGENRGLDEIKSNSTEESSSSNLDLEDGTLNNDEIESDDCLTKNGKEATLQANKLSLDINMSRGTAQDVLDAIVRISSQGGGTLYLNGGTYTEGGHARVYNNDTDSFRNIVRNDGIVDISNVRVVGGSVDNPNQYATFQPNTRDSTSLAFSGYGVWDGNGTRYYPDSGFNLTNVTFENLNCTGRFFSFNSGYLTDCVFNNLESYQHLFFVTGAYNDGGKPIVLTNCNFTNSKQTYRGDGPGDGTDGTGQFGVVFGAEMYGCNFINTSTATHGGAFCLSDEWISAACVPSKLVDCNFINITSRWFAVYIHGNYSNTTRFITEPQVVENCSFINCTATGEFGGALGISHNNVIINNTEFIHNVGGKGSAIMVGGINNTHDGFLGVNTQGNNITIYNCTFEDNIAKIEGQSSAHSTDPPFTTYPTGYGGAVYVYGNHTKIIDSTFNNNTADDSCGAAIYIRGDNTTVVNSEFYNHTSENGTIYLVGNDCKIKDSLFHDNDADSTGACIFVEGNRAEIGNTTFVNNTAPNGGCVFIIGDHTLVDNDTKFITNNATNGAGIYVNGSNTMILNTSFINNTAVNGSGAFIYGHDTDVNGSYFEGNDATNGGAVFIEGNINDISNNTFLRNNATNQGGAVYIDGNHTKVNYNNFTENEAIPISEDQETGLGGAIFIRGNDTNTTANTFLHNKARNGSAIYTDGTNFYLHNDHFLENQAWSYLLITTADPAESLYKEQDIEINVLYRAGDNIINAIHNRNKPNETHFMNVTYSHSEFGNITTSPADQYVEPVDGVENSREGELLYQDDRENYQQIELRVEHENGDLALPRTPFRTNIYGNVNTTLNKSSLRKGLYVVGAEHIEDWNYKFIMNSTSFRILDTMDIMVNKTSDKEEYFQDEIAEWELIFHNTDNGTDAENVTMTDHLPNVFELMNLSYMFYTPTEAITNATLYLNNNTLRYGVYNSSSQQWVYGDARYNASANSWTYYFFDYDNVTYVYTEFNADDFVPVFGPVIYSNSTDVCYDNISYNIPEEDWYYDTIMVNGQEVRYGHFNATEFEQYFGPSYYDEDNKTWVWIHRGEDPLNPGQETDLRTIYDPESNIWVIDDYMHYPERKTVTEKVVFTIVNDTANNLTHLSLYARDFDVNVTGYVNFTTNCTRSGDYTNVVNVTTPDYDWDLSNNVANRSVLVDPLPNKTVSNTTPYYHDYVDYNLTIMNTGNSTYDQILTVVDSLPEGLVYNTTVGILYADQIGETLVENQGRTVTWNVTNIPANTNATIIVRVYVDALGNLTNNMTLIAPSGDNRTVNATITPVTYTDVSVNKTVEKEEYFINDTIVWTITVSVAGNGSNATNVNLSDVLPPEVEYISTNGTYDNATNSWYIGNMTNGSSVSITIDTRAIRVAENVTNVANVSCNETEWDYENNRDNATVSIIPVPQKTVNETNPTFGKYVDYNLTIINNGAEPYTDTLTVVDNLPEGLAYNNTVSILYADQVGDTIVENNNRTITWYVTNIPANTNATIIVRVYVGILGEQINNYTLIGPKGSNRTVNASIVVEPKVDISVEKTSDKINYFEGETVIWTITVSNANNATPATNVTLKDILPEEVEFVSANDTYSNETGIWYIGDMANGTSRTIVINTTAIRSKTNVTNVASVNCTEKEWNYTNNVDNATINIYPLINKTVSNSTPDYGDEVEYNLTVINTGDVMFNETVTLVDRLPEGVDFIKVLNEDGLKVISFDHSTKNLTWVVTNISANTKATITILANCTLVGLQENTWTIYGPEGMNRTVNATIVVGPKVDVSVEKTSDKINYFEGETVIWTITVHNANNGTNATNVTLKDILPEEVLYVSSNGTYNNNTGIWYIGNMTNGSSRTIVINTTAIKSKANVTNVANVSCNETEWNYTNNVDDAVINIYPLINKTVSNPTPDYHEEIEYNLTVENTGDIMFNETVTLVDRLPIGVDFIKVVNVTGLKVISFDNTTKNLTWNVTNITAHTKATITILAVCNAIGVQDNTWTIYGPEGMNRTVNATIEVKPIVDVSITKVADQEIYHIGDNVTWIITVHNAWNGTNATNVNVNDILPKEVEYLTHTVTQGQYNNRTGIWTIGFMANGTSQTLTIVSVAKINKTDITNVANVSCSEKEWNYSNNRDYATIEIVDTPINKTASKPVPDYHEEIEYYLTVTNLANETYNKTVTLVDSLPEGVTFLRVVNETGLRVLGFERRGNHQIWNVTDIEPNTTAVITILARCDAVGTKINNWTIYYPNGDSETVNATIEVKPIVDVSITKVADQEIYHIGDNVTWIITVHNAWNGTNATNVNVNDILPKEVEYLTHTVTQGQYNNRTGIWTIGFMANGTSQTLTIVSVAKINKTDITNVANVSCSEKEWNYSNNRDNATIEIVDTPINKTASKPVPDYHEEIEYYLTVTNLANETYNKTVTLVDSLPEGVTFLRVVNTSGLRVLSFNSTEKVQTWTVTDIEANTTAVITILARCDAVGIEINNWTIYYPNGDSKKVETPIDVQPIVDLSTTKTSNKDVYFLDDTAVWTITVHNAWNGTNATNVVIDELFPSEFEIINYTTTKGRYDPSARAWTIDFMENGTTETLVITSVATVVTPFVDNPVNVTSDERDWNLSNNPSNKSVKVIDIPDPEKTVNNATPYYNDTVVYSLTIKNTGDIKYTNKLTVIDSMPQGLEYVKTVGISGAKLIKEVVKGQVITWTITNISAHSNAVIKVRVRAKALGNLTNNLTIVTPHANKTVNCTITPVPIADLAVTKTNDHYGKDCLNSTFVYWTIKVVNYGPNTAVNAIAKDILPEGIIYLSDDSDGAYDYETGIWTIGNLAKGKSVTMTIETIVDAIDTRINNKVVVSSDTYDPDKSNNRDNSSIKVISIADLKLTKTANVTKTYVGENFTYTITVVNLGPDTAVNSRVYDVLPKGVKLLSFNESKGSYNPQTGKWAIGDMALGEEVTLKVNVRALTTGKIVNEARVESDTYDNDTSNNNDSATVIVIGDNPPIKMLPTGNPILIALLSLLAIVGVTLRRKS

SEQ ID NO: 6611 - protein, 728 aa, Methanobrevibacter ruminantium
MMIADTLSQELNIKISQAESVIKLIDDGNTIPFIARYRKELTGSLDDEVLRKFDDRLKYLRNLEEKKETVLNSIEEQGKLTDELKQSILDCKTLVELEDLYRPYKPKRRTRATIAKEKGLEELANIILAQEIEVPLEEIAEDYITKDDSVEEELRVNTVEEAIGGAQDIIAEIISDNASFRSLIRELSYEDGELISEAKDKDADSVYDMYYEYSEEVSKIASHRVLAINRGEKEKFLKIKISAPEEDIISYLTRHVLINKGGKPTKPIYNKYTEETLKEAIQDSYKRLIAPAIERELRNQLFEKAEDKSIKLFSKNLEQLLMQAPIINKVVLGWDPAFRTGCKLAVVDEYGKVLDTTVVYPTEPQNKIAETRSTVRDLIFKYDINIIAIGNGTASRESEAIVADIIKDLDVQYVIVNEAGASVYSASELATEEFPDYNVGERSAISIARRLQDPLAELVKIDPKSIGVGQYQHDMNQKKLGESLDNVVEKSVNNVGVDVNTASVSLMEHVAGISKTVAKNIVSYREENGKFYTRDELLNVKKLGPKAFEQCAGFMKVKGPNPLDNTTVHPESYGATIAFLSFLGYSIEDLENKKIKESDLDLTDKQFEDMAQELGIGSITLKDIAKELKKPGRDPRDEMPQPILRKDVLTMEDLEKGMVLSGTVRNIVDFGIFVDIGVHQDGMVHKSEITDSQYVNHPMDFVSVGDIIDVKVLDVDIPKRRIQLSMII

SEQ ID NO: 6612 - protein, 349 aa, Methanobrevibacter ruminantium
MERVRLQYIDLLKFFAIFSIIALHVFLVWPKAKVMGIKVYSLSSIVRFGVPVFIMISGALLLNRDIEIGSFLKKRINRITYPFLFFYIITFIFIALTNHTHEQQNIFAFRWYFWTILGVYLSIPIINKYIQHSSLKEIEYFIYIFIFASIFYQFTYFFEIKQYFYLTLFLSPLGYLVLGYYLSKKDFNLSTSKMIVISIILFILSTSIKICGQLGYIPITENFVASQSVILSSWLDVSFIGILQAASFFLLCKSIYEASKGIFSPIKKFLESNIISKFVLSVSRASYGMYLINLIPTVIVYYYIQPMNLTGSQVFLAIPLISIIIFLVSWIIIVILCKIPYIKYVSGYS

SEQ ID NO: 6613 - protein, 1178 aa, Methanobrevibacter ruminantium
MKTRISVIIPIYNVHEFLEDCIESVLAQTINHWDLVDDYQRNLQIILVDDGSTDDSGEIAKSYAAKYENVEYRYEENQGLGHARNYGCEFAEGDYIIFIDSDDIIPPKAYERMYRIALKNDSDLTIGSVWRFNSKLTWASNIHEIAFGGTKELTHIKESPELFYDTTAWNKLIKFSFWKEHGFQFPEGILYEDIPVTMPMHYLANNVSIVYENCYLWRVRDGISKSITQTTDDLKNVEDRLYVMGLVDKFFNENVKEEELHRVKNLKWIKNDLMIFINKLKSMDIDESQEIIDLLLDYIDRNIDPKYFDEINEIEKLKYEYLFERDFDRLLKLLNYEHVNFYTLNIHSKGSDVVIEGDKDVFKTSSFIVNDFIKEGKKAKYIQKVNLEEEALEVSGFVVIPGLEAKEFKDVEYSFYLVNSENRKKIALRHEQIYLGNINSYRLRFGKKFSYKAAGYTVFVPYELIEDNEDFLGENKIIVVFKQRGVTHNIFAGNAKKNVRSRSENRAVLIGKTYMSIGYDKNNEIIINVSKARHSYDRIEIEDDDLCIFGPYDGDVFLHYNKSFISPESNIPFAYDDGNQCYRLDLDNIRSTEGQILYDNGESLVYKDKELLCLYSSKGQCVISSLLDHNIKINKFKNFSLVSEISERNNEIDIVSRLHSLDLGDRQLKSATLYFFLDKNQSSYPIAEAKIIKDVSTTQDSHIGDNAYIDDKDSEDIDSSSLNGENTYELNFKFNMNNKIITENLYHGYFDLLIRYDFGDLVFSTPIHLLDDFKALLKKKVFHFTIYRGNAWTLRIRAKKKWNWWDGRPRIYTRAYRIFKHLPINKKRIMFESMWGAKYSCNPRYLYEYIDENHPDYECIWSLNDEHIPINGNGIRVRRWTLKYFYYLATSKYFVDNVNFNERYEKREPQRYVQTMHGTPLKTLGLDVPGDFPTKASEERFIERCSRWDYITVQSEYVEDIARSCFKFDKDFLRYGYPRTSMLYTMNNEEDINKIKERMNIPLDKKVILYAPTWRKKNKVEIMLDFQSFKESLSDDYILILRLHHLMFSADFAPIEDDFVYDLSRHDSIEELYLISDILITDYSSVMFDYSILDRPIILFAYDLEDYAEKLRGFYIDIQENKPGPILFSSKEVEDAISNIEKTEEDTKYLREEFRNKFIPYECANSSEKIFNDLVSGK

SEQ ID NO: 6614 - protein, 1224 aa, Methanobrevibacter ruminantium
MKTRVSVIIPIYNVYEFLEECLESVVNQTINDMELTDGYERNLQIILIDDGSTDSSPIIAKEYAQNYENIEYHHEVNQGLGHARNYGCEFAEGDYIIFLDSDDKLSPNAYEWMYKTAIRNDSDMTIGGFWRFNSKKYKISNINKIAFNGNKEKTHISESPELFYDTTAWNKLIKHSFWKKHNFQFPEGILYEDIPVTIPMHFLANNVSIVYENCYLWRIREGKSKSITQTTTEIKNLEDRLYVMGLVDKFFDENVDDERLRHVKTMKWLKTDLLIFIRKLRSMDKEQGYKIMSLIRDYIQNNIDADEFKYLNEYERLKYEYLMDDEIDKIVSILNFKAENIKETKVYQKNGHIMFNADKEVFKQSPFYIDQYIRERYNRKYIQDIEIRDDGFLIRGFMLIPGLDIKNFKDREHRFHLTNANSHKKIKIDSEDVETGNISSFNIRFGRGFSYDAAGYKIFIPFSKICDDEDFFGENRISVDFKLNGIYQSPFLSYEKKELCQNFFLGYAKKDIRQKTNMKAVIYKNTYFLIRYTLKDEIIIEALPLKNYFKEIRLDENVLKLDSDHIGNLYIYYEADSINEEEKIAFEYDNEDKSYQIDIRKLKKKPGKILCDGENSIYKSKELILLDSKYGQCLISTLNDYYLDIYYFDSLTQVLDIRQNRDRIDIDAKLYSNRFNETRSTYKADRIKTAKLYFKDDSSKENYILSDGMIDRQTGDIKFSIDFSNKEITKNLYEKIHDLYVEYAYDETSTEEEAIVNKEVDESEYDSVSKEEKENNKIEKTENEPVPVEGRNNKINEESRFSTELYLFKGDDKTISKSYYEYKVYHDLKGFLKLKVLKRWPVYEDTPGKRLKHSQISYKLFSKLPINKKRIMFESIWGGKYSCNPRYLYEYIDENYPHYECIWSFKDEHYPIKGNGKCVRRSSLKYLYYLATSKYLINNVNFKKHFIKRKGQVEIQTMHGTPLKTIGLDAPGEFPTKKSQKDYIKKNKNWDYLTVQSDYVAEISRTCFKYEKDFLKFGYPRTDILYTKNNKEDIQSIKERMGLPSDKKVILYAPTWRFKNNFDLMLDLKSFKESLKDEYILILRLHHFSAGGWKQPLDDDFVYDFSGYGSIEELYLISDILITDYSSVMFDYAILDRPIILFAYDLEEYDEKLRGFYMDIESNKPGPILHSSKEVEEAILNIEKTEMKYKDLRRSFKERFNQYECENSSEKIFNKVIDKKKNKK

SEQ ID NO: 6615 - protein, 696 aa, Methanobrevibacter ruminantium
MQDPKISVIIPIYNTEDYIEETLLSVINQTIFDEIEVIIVDDESTDNSKYIIEKYALDYSNIQVFHQKNEGQGISRNYGLSKSKGEYIHFLDSDDYLPPTAYETLYNMALKNESDIVIGNVLRFALYNVWEESLYKNAYNDFDEDIAIMSLNERPSILWDTLVTNKLFNREFLIRKNIRFPNKKISFQDIPFSLESYILADSISFSKEIFHYWRLRSNQSSVTQQDKSLKNIKDRLEILRIVQNLLEKYEVEEEIRNYEYSKWLNHDLKFFLKRFNYYPKEYHEELFEEVYGIVKIIPDALIDSLNSYKKVLFTMIRNKDYENFLLFAPLENELYKNPEIPSFLNDEYKSYFDFEKAMEEEELNIELLDFKNDNDNLYIDFDGYLNYLSPNDNYKIIAKLVDENDYENPLLVNHLENKQIAIPFYLLKDKKRAQIKVIYEFESFKKTAYLKNRHRKSIEREKFFIDLDLGKNSYLYLDIREKNIENYIDIIDISFNSKEFTIKAKSKKSIDKISMENIISFEKIAYPIYDLKYEENEDNNLKNEENGEYTFKFKIPYYDILKSAVKKWELNCDEYFNSIKLSETFEFFTETYKIKFVNTRNKILIENEIFNPIKMIYALNHENTDLKLNIKTLKGENSRLNKEIKKTNEKNEILNEENKKLIDKNKTLNKENKKLNKKIEEYKSRKVVKIVDSLKN

SEQ ID NO: 6616 - protein, 212 aa, Methanobrevibacter ruminantium
MILGTYLIMPIFNRWIKDCSIREVEYFLAIWLITCIFDNTLLIGFPVTLTYFTGPIGMVVLGYYLRHTDRKIFNSLPYALAFLLIGMIVIMLCSYFLSSPEGMYVFDRYSILLAIEVVGIFTLYKVIDKKELKIFHKENGFFRRASFSIAKYSYGIYLCHEFIMNIFIIIFLKHAPFKVTLLLVFVCTLGTSWALLALLNRVPYLNRIIGAK

SEQ ID NO: 6617 - protein, 97 aa, Methanobrevibacter ruminantium
MNWVVIPEYSLIPSLNWFITDFLGTCCRCGVDIFLMLSGALSLGRDWDIKSFLGKRIPRITYPYLFWATLLISIMLVAVYFNPDLLKLFFGISHSFI

SEQ ID NO: 6618 - protein, 335 aa, Methanobrevibacter ruminantium
MMIPKVMIILGSASDKDIAMKSIKILEKLQIPYSLKVASAHRTHDKVKKLVKDATDKGVEVFIGIAGLAAHLPGAIAAYTHRPVIGVPVDGAVGGLDALYACVQMPFPTAVTTVGINRGDNAAILAGEIIASYDEKVGQNISDLRVEYQEKVEAGEKELIESIEGEYFQKDFLEEEKYEKIEFEELDDTPDVMILAGSYSDMEIAKNVAILLERMRINYKLDYISPIRHAKDFESYMSKRNNAKIFIAISGLSALVAGSVVALTEKPVIGVPCSKKLNGQDALLTMANMPPGVPVGTVGIDNGRNAAIVAGEILAISNKEIEENLKWIKYKNADL

SEQ ID NO: 6619 - protein, 420 aa, Methanobrevibacter ruminantium
MAEELNIIQIDEELDAEYEAAKVLRKYPKDTVMLNNIKGYDIPVVSGICNTREKIAQSLGCQVDEILYKIIDGMNNPTPITKFIDLKDEYDSKRVDLGKIPILTHYKRDGGAYITAGVVFAKDPETGIQNASIHRMLVLEKNKLAIRIVPRNLYTYFQKAKDMGKDLDISIAIGMEPSILLACTTSIPIDADEMEVANRFKNGELELVNCKNGIKVPEADIIFEGKILIDETAPEGPFVDLTDTYDYVREEPVIKLSKMYLKKENPMYHAILPAGFEHKLLQGMPQEPRIFNAVKNTVPTVQNVVLTEGGCCWLHAAVSIKKQTEGDGKNIIMAALAAHPSLKHVVVVDEDVNIFDPQDIEYAIATRVKGDDDIIIVPKARGSSLDPKASEIDGTTTKVGVDATKSILEPHKFERVSFSE

SEQ ID NO: 6620 - protein, 323 aa, Methanobrevibacter ruminantium
MDKVGIIGAGSLGTALAQTVANNVDTVYLHLRREELAKTINSTGYNSEYYPNTKLKNNIIATTDMNDLIDCKIIFLSIPSSAFRSTLENLKEVISEDTILVTTAKGIEYPSLKSMGRLIEEYFDENFVALSGPNFASEIVLNLATVSNIASRSSENAIKVKKVLSTPEFKVKIIDDVVGLEICGVIKNINAIANGICEGMNINENARYAVLTKGFEDTGRIIEAFGGKISTASEYCGFGDLVLTSTSSESRNHTLGMLYGQRIIVDEKASGIVFEGKNSIMAIKDICNNTNTNSVVVNFVYDVIVKQIPPKIAFKDLWNNIEE

SEQ ID NO: 6621 - protein, 363 aa, Methanobrevibacter ruminantium
MMSEDSILLTIKSFTDLQTEINNTANGGILILEGYYKYNSNLDSNFLQKGVLVNKNITIFGNGCVIDGNNTSSLMEINANNNTVKIYDLNFINGHQNTWNYGRVSITNSIAYFNNCSFLNSTNGYYGSVYIAKTSQAHFNNCIFNNNYAKFGGAIFNNNIMYCKNCSFENNSAQSGGSLCINGENNGVENTNNYTYLENCSFSDNSSTAHGAVIYCDEWSKGCFNNCSFEKNSATTSGGAITIDGANIDINNCSFNKNKTGTSSTYNGGAIWIIKNDISGASNVNILNTSFSNNSASQDGGAIYLNGTCVLKISNSSFNNNTATRYGGSIRNYQGTATAYLCGFLKSSDATYGTITKNGCYGP

SEQ ID NO: 6622 - protein, 238 aa, Methanobrevibacter ruminantium
MIGVILAAGMGTRLMPLTKDIPKALLKINETTLLERMIKNCINADISKFIVVVGYNKDKVIDLCPEIAEKYDIEIKTIENEKYDVTNTSVSTYLASKFIEENDLDDFILVNGDNVVDPEIITRLAVSQNTGMIIDNFKELNEESFKLIIDDESFNEDKTIANGKINSIGKGLDIPSSTGEFIGVSKVVSDDVAQFNRILEKLIEEDPQNYYDFAYKDLSLIKTIDFVLTNGLKMDRNR

SEQ ID NO: 6623 - protein, 406 aa, Methanobrevibacter ruminantium
MAEEKRSFKKLIKDILYISAKRSARALYYIGSYIIPANEKIILFESSNGRNYTGNPKYIYEEIVSQGLDKEYKCVWSFMHPDKKIPGNAIQAKRSFFKFLYYTLRSGTWIFDSRHLYYLKKNKKTKYIQTWHGTPLKKLALDMDYIDMSGNQDIEAYHEEFRKNTSAWQYLISQNEYSSNIFRRAFDFKGEMLEIGYPRNDILVNKDNEKDIDEIKTRLNIPKDKKIILYAPTWRDNQFYTKGQYKFATEMDFDRLYEEFSDDYALIIKFHYLVKENMDWSKYNDFIIECDADWDIQELYLISDMMITDYSSVMFDYSILKRPMIFFAYDLDDYKNNLRDFYFDMVEDVPGPICQTNEELVDFIKNYSENAYKNTFGEKYEKWNDKFNQFDDGKASQKIINLIKER

SEQ ID NO: 6624 - protein, 350 aa, Methanobrevibacter ruminantium
MKESSFYIKLYEENNSTDHISNSNKSVQCNLCARECKIKNNNTGFCKSQKNIDGKLFALNYQRIASYHIDPIEKKPLYHFLPGSSTYSIGGFGCNFSCLNCQNYMLSMNSYNENNSIKILPERIVKNALDNDCLSISWTYNEPTLYFEFAEETSRLAHSQGLKNVFISNGYMGEEVLKETVSFIDGFNIDLKFFDDELYRKICGGRLDIVLDNLRTIYESKKKYNNHLEITTLLINDLNTEKEHIRAISRFVLDELGPEVPLHFSRFFPMYKMTDKAPTDIDYLIRAREIAISEGLEYVYLGNMPADNNTYCPECGELLIERNRYCNRDKNRIKDGCCVNCGHELNFVFD

SEQ ID NO: 6625 - protein, 413 aa, Methanobrevibacter ruminantium
MKSTLKVSDIGEKQLIERIIEKSKLCSLKNPFDLDDFNSNYPSSNFKTSIGDDSALLNQNLNTNHYLVASSDMLIQSSHFPREMTYYQMGYKSVIVNVSDLASMGAKNIGFLLNIAIPKDTSLDNFDDLICGIIRACDNYNIPLVGGDTNEASEIILSGTAIGQVEKGKALMKHGFKEGDLVSISDHLGYAALGFELLKIKEENIDKYNDIIFQINKIDPTVKDLALFKALKPEAKYEEGRILASHNSQENRISATDITDGLASEFYEILNADKKYYLFNKDTESHNPNDSNDSNDLNNQQNNQNNTNNQDVIDEYDDSNYSKGIRIYEDKLPVDDEFKQIADVLGIDYLDLFLHIGEDFELLFTINKELKSQLENDMNFYVIGEITNNNTVEIVLSNGDIKNISSKGYEHLK

SEQ ID NO: 6626 - protein, 227 aa, Methanobrevibacter ruminantium
MNLIKGLDKNNGLDLILHAPGGDVGATESIIDYLYEVFNGDIRVIIPQIAMSGGTMIACSSKEIIMGKQSSLGPIDPQFNGIPAEIVIKEFYRAKNEISEKPETIPFWQTNISKYPPAFIILCENARKWSDEILDKSLRYAMFDGSDEEKINKIRLELGSHENTKSHGRHLSAKDCQELGLKISYLEDDDEFQDTVLSIHHACMNFFSINKDCCKIVANNDSKFFIQ

SEQ ID NO: 6627 - protein, 55 aa, Methanobrevibacter ruminantium
MAVEFNEVIKMNESYVKRLYRDLGIPYYRPKKDKGDEEFDFFPKYDLMHWIPLKV

SEQ ID NO: 6628 - protein, 106 aa, Methanobrevibacter ruminantium
MFKIRKLSNKIIVLLICGLLICSIQACSASCTAVYVGPDVSADGSTIIARCNDHQGVWGNHITVTPRVENKSSRLMAVCEDGSVKTELPATTYKYTATPYMNSTKA

SEQ ID NO: 6629 - protein, 483 aa, Methanobrevibacter ruminantium
MDNQNQWNSRIAFLLSMIGAAVGLGNIWRYSYVVYSNGGGTFFIPYLVAILIMGIPFLVLEYGIGFRHKDSFSNILKSINPKLEYISWALVLIIYFVLIYYLVIVSWDLVYLGSSINFSWGADSALYFVQNVGGSSNLSNMASFIIPTTISMVLVWICVWYISHKDLNEGIGKASKILIPLLFGIMAFIIVFALTLPGAGIGISALLNPDWQMLLNVNIWLAAFSQIIFSLSMGESISLTYASYLPEGSKLTDNVLIVVFANCAFEVCTAFGIFSILGYMSYTSGTPIVELVSEGTGLVFVVFPMIFNIMGAIGHIIAPLLFIAILFAGITSAVAVFEPMINSTVHKLNWSRKKAVTVWSIVGCIVSLLFTTGISSYLVGIVDSFITEFCILLLIAIQSIIFTWFYDIEGVIPILNENDRVKVGKTWVFVLKYILPILLFFMWASGVYHLLLNANTFELIVYGLITVFIIILTYVFTNIPEKS

SEQ ID NO: 6630 - protein, 153 aa, Methanobrevibacter ruminantium
METILTNEKDERFIELSNELNNEYYSNIGEDSLKYLDYNTLEDPHVVLLVLNWGNPIACASYRIFDEQSVEIRRVYVKKRYRNKKIAYKLVKALEKLAMENNFKYSIIETGSENMAAINLYKKLGYEKIDNFGFFKDDDACICMRKEFKTLIF

SEQ ID NO: 6631 - protein, 155 aa, Methanobrevibacter ruminantium
MHQKFMEEAIKEAEISSKEGGLPIGAVLVKENQIISRGHNRLIQKDSSILHAEMDAIENAGRLNHEDYQKCTLYTTLSPCPMCSGAVILYNIPRVVIGDNQTLMGAEKLLKDNGVEIIVLNDDKCKELFEDFVNNNPGIWENELAKVGNTTELKE

SEQ ID NO: 6632 - protein, 322 aa, Methanobrevibacter ruminantium
MIIMSEDTAVLLLSHGSSLPYAEEVFKDICAKFKEQTEFDAEVGYMKVAKPSLPEAINILKERNPGLKRIIATPVFLAPGIHTNIDIPIILGLEPKETDPRQPDGNYPEGHYLYGLEEVDFDGELKLIDAIGPNPRLIEIINNRIDTALEDSKLDDDAKTAVLLVSHGSRLNYNKEFISCVFQQFEEQTDYVCDFAFMELVDPNIPTTINKLVSENEVDRLIVVPVFIAPGVHTTRDIPTILGLIEDDGSGHHHHHHHDHDHDHSHDHGHDHDHGHSHGHHHHHHAHGDEKMEFDGEILYPEPICDDDILIEILETMVKEAL

SEQ ID NO: 6633 - protein, 132 aa, Methanobrevibacter ruminantium
MSDTVRTWRHIQQRYNLIGSKCTTCGQVFFPQRVICPECRRKGNIEDIQFSGKGKIHTYSVIRTPTSDFKKIAPYAVAIIELEEGAKVTAQIVDADVDDIQIGDPVEMVFRKIREDGPDGVISYGFKFKIVK

SEQ ID NO: 6634 - protein, 385 aa, Methanobrevibacter ruminantium
MTIKKYFKTRKGTKKSVQERDYDSDYSNKGLHKESRIKNLLNDNKGNYSIVISAILLISFLILSIIVLNTVLEEREEHTDTIASNQYQYIIEDYKRNLPNIEREALEELSLYVIENKRPCFNSRDDLKEIIDEKLAQKNQEYYQNYNIEINSSIIGIENTSDPFSYKFKTYISSVKGDFSYEEIDESYVNCYNLKDPVPVLFCGDDSSFRIEDYSLLGDSDFGTHDSNFENDDSSSNQKVFYGHSLAKFLRRHHVENYSFYENASSPFIIKRCPYDPYKHHGDDNGRIMKNCRDNGYYHESADGACYLCRLEGKSGCDHYGFETFINPQKTNETGGVSACGSDHVIFSDDIYPGVEVIYNSENGLNEILYLDPHGHKVKYGMSEY

SEQ ID NO: 6635 - protein, 338 aa, Methanobrevibacter ruminantium
MYSSELILSLILIIFIIGIMANITDSVNEKVLSQEELSSLEAISIESVDYLLNNPGSPMNWEEDEGLNNGIVSRRIIPGLAINKKSVENGFFYEESSSDEEIIPNSISYIKLLKLQSNYDDLINRNLFNSTLKSSITIYPHSDIDIIAMGDDLESSSDVVAINRTVRCDYLSNFVIYRFNDFELYGENYKKTELCNHDSNVNLSNHSNDRRYFWLCKNFRIYRSSLNNYNYYLISDSSIRHANSYYILESLNRTRDDMERLNDEVIELNPFFAEDMVNSSNEIYSIHFKVPHDDIDDFKTVMVAIHKNMTDEIVSNNQLRYDYFNSGEVDFVLKTAYR

SEQ ID NO: 6636 - protein, 144 aa, Methanobrevibacter ruminantium
MSTTIRINKDVKELLKLKSVETGVSQIDLANRYILYGIKYDDTPSKPIKSIEEIEKLLNYDEIRESVEEIDLKDYEYEIPQGISLVKEGEENKPINTEEEIKKILKYDKPEGDDVSRSIAGIIKTEEVTDAVKLKKERLKERYK

SEQ ID NO: 6637 - protein, 130 aa, Methanobrevibacter ruminantium
MIFLDTTYIIALINENDKYHKKALKLMEDVDYEKKMTNSVVFVESLNMLDKRSTQKDIDNIVNKLYQLDKIHCVNSANIKNSLNIFKFYNGSINFADCTIIDSMITYRINEIISFDSDFDKVKGIKRIYI

SEQ ID NO: 6638 - protein, 762 aa, Methanobrevibacter ruminantium
MLVKKMLRDLSDHKIQFVSIFLMAFLGVFAFTGINGEVVGITDVSTHYYEDTNLADGWIYGENFDKDTLKDIKNMEEVKNAHREMVVDTVANYSSDPDITLHILEGKQEISKFHLFKGKDFNPNDKEGIWIDKRFADARDLDIGDKISLKFDGKTVSKTIRGIIYSPEYVYYIQEGSMIPDFSQVGYAFMPSKGADFDIEYNRITIDGKKELDAKEFSSEVSELLGQYTYAQFVPREDNVGVSTLQDEIDQHNMFSGIFPIIFVMVALLTLLTTMSRVISSQRTQIGTLKAMGYDNTTIILHYLSYGFFLSFAGSLLGLIIGPLTLPYLFYPSMSAMYSLPYWGPAWNLSFFLVAALMVIISVLVTFISVKTINDENPADSIKPKVPKAVSSGIMERTKIWKKMGFNGRWNYRDAKRNKVRAIMSIFGVFACALLIMSAFGMYDSMNDVQDWQYNQIYNYNSKLYLDENITDAQLSTVVKDTNGEEMMEQAIEVKYRGNKHTASMTVYNDSELFRPTDINRNYIEIDPDGVAISDRLAEVLGLKVGDKVRWHLVGNPKWIDSEITQTYSTPFGQGIIMSEKTYEKYGGDDYNYSTNVVLTEDKDIKNYTGVTSVSTREDIVKGWEDMTEAMNLMVYVLIIFAVILAVVVLYNLGLLSFTEIQREIATLKVLGFNTKSLRRLLLTQNLWFSTIGFILAIPGAYILMEAMMGSTGADYYFPINIYPLNFIISLIMTFGLSILVNLLFSRKIKKVNMVESLKSNE

SEQ ID NO: 6639 - protein, 234 aa, Methanobrevibacter ruminantium
MTTMIEFQNVSREYQSGDHILKALDNLSLKIEKGEFVVILGPSGAGKSTFLNLLGGLDTATSGKIIVNGENIADYDDNQLTKYRAKEVGFIFQFYNLIPNLTAKENIELMSDITNLKVDGNKILDSVGLLDHANQFPAQLSGGEQQRVSIARAIAKQPAMLLCDEPTGALDSNTGVLILSLLQTMCHEKNTTVVIVTHNAKLADAADKLIRIKNGQIEEVKINENPLDINEIEW

SEQ ID NO: 6640 - protein, 443 aa, Methanobrevibacter ruminantium
MKMIRQFGESSIALVVNLILFLFNGIKYIFTLPNRIYVYIKLFLEDTDAVLKESLIALSICAVGDLCAGIILGNMEFFLKTYPGLMVIIPGAIGMRGNIFGSFGSRLSTHLHIGTLSPEFKRSEILSENITASLILTMVLSILLAVIAKGVCIAFGFKSISIYDFVLISFIAGLISTIIMLPITMFISLKSFEGGWDPDNITTPFIAAVGDFFTLPAIILSVIIVGFISIIPIVKMIVFVAVIFVTIAALIAGYTAKSDVRHIVRQSTPVLFICSLLGTFAGGILNDSLTTLLKNQTLLTLVPLFSGESGGLVSILGARLSSGLHSGLIDPVLRPKKHTVENFVAILTLSVVMYPVIGFLAESSTIAFGNIGVGILESMSISFLAGMILILLMLLVVFYISTISYRRGLDPDNIVIPLSTSLTDSISTLILIVVSLGLLNYVF

SEQ ID NO: 6641 - protein, 202 aa, Methanobrevibacter ruminantium
MPSVKDILIEMKDMSELMVDLAYSAVLFNNRAAAEEVITLENKLNSMNYEIKKQSLVAARSLEDAEKLTTLLEIAEAAESIGNAAKDLADLTLKGFEPHPVFKMVMEESEKTIIRLNVDESSVLVNNSLGDLLLLNRTGMRIISIRRGDSWIYGPDKNTVIIAGDVLIAKGSEAGTEIIEKLAEGEMDLEDLVNMEDFIDDN

SEQ ID NO: 6642 - protein, 454 aa, Methanobrevibacter ruminantium
MMIHLIGIGNDKGNITLNAFKAIKEADVIINYNDIDLSFFDSEIKDKEIISAIDLINDIDLEDDLDLNDDVAENIDSDEDLDSEINSDDLESNIISDDLESNIISDDLESNIISDDLESNVGSDDLESDIDSDDSSDIDLEDDLKSNPLLERILQENFLIELAISKSLESKQVALIVSDDPNILGLSNRFLQIKSKYSDVKYKIYPGVSSISQSASIVGAPLGDFALIDLSNPITSLSEIEDKVKHILDANLVLAIKNPIDDKREDGREAYNLIKSIINEYNDELLTAIVYSDGYYSIDEFKNIYDEDIDENSIFFIGNKLSYILEESMVTSSDYIVETKLISWSIEFFERYLNGEVPRGLDYDCDFLPCHVNLEACDFCYCPFYPCADGVTGGEWIKDRDVWSCQHCDWIHLEEPCVAIREGLDDILKEIDDLKDKHIELLKLRRKSLLKTLK

SEQ ID NO: 6643 - protein, 261 aa, Methanobrevibacter ruminantium
MKISRIILILLLFVVFFEIGLFSSYTIVNAEVPNPQELWDMQVNTVSSFFSPENVGGLLIKDPDNINVTNKYDLATELAEVAEVDGVNVENMTITTSADTDEEPFNATVTAFGYSTPKGNSGSIVISGQPDYKIVASVQIKHTINGYEADLDTINIESILKVYDSNDAKNVSYSGYDSGPSGASQSYSYSSDSSSSNDNAYISSDSSSGSSSYDSGASSSSGSYSGGSSYDSGASSGSGSSSGSGSGDVVINLLSPIFSFI

SEQ ID NO: 6644 - protein, 657 aa, Methanobrevibacter ruminantium
MTAETLLKFARKGIILTPGAYDLILGSDNPLDLSSSIILKLKSGKYSNEDLVPVDEKQIKEMMKALGISVKENKGLDHGSLDDFGSRTSGEGLERKIETRPEKTVEKAVEPQQAVETREQKPQQTFKPTQEKTVEKPIEKPQQTFEPNQQRTVEKPIEKPQQTFETPAKQTRAEKPIKPQIKPISAEKPTEAPQRQETKEIEKTIEKPKSDKPKVNAGYPSDHIVKIDNVEVSEETKKKYRRNLTESKVNFDGFKVLKDTSNKSYTSGEIGNLIEYFQNRYKKLSDILSKRPELRTWQKINEITETQTDLNLIVMITDIKSTKNGHYFIEVEDDTGSMPILVSKDNDQLIRAAKNLMKDEVIGIVAQKRPGNELAICQNIIDPGVPRIAKKEVNFGTVFTSDIHIGSSTFLEDAFTRFIKWINGDFGSEEQMEMANNVKYMIIGGDIVDGIGVYPNQDKELAIKDITAQYDEAARLVGDIRSDVKIIITPGNHDASRVAEPQPAVPEKYAKSLYELNNVEFLSNPSMVSLDGLEVLIYHGRGIDDMVMGSNDFSHERNDLVMKEFLNKRHLAPLYGERTPLASELEDHLVIDRVPDVLHTGHVHINTYTNYKGIHCINSGTFQTQTEFQKIYNIVPTPAEVPIIDVGGNYKQLKFID

SEQ ID NO: 6645 - protein, 195 aa, Methanobrevibacter ruminantium
MEKEIVKSVVEMSAYVFERGLVSGKAGNVSARFKTDHGDIVAITPTLKSLADLEDKDIILVDSEGNNLTKGKPSSELGMHLAIYREKPDVYGIVHTHSPYATGFAFSNKRIKRLEGFGQIKSEYIKDIDYYKPGSEELAKNAAEALKEEDVIVLRNHGVIATGSTVKEAATLVEFVEESAKTQFVTLVLNSLDEK

SEQ ID NO: 6646 - protein, 163 aa, Methanobrevibacter ruminantium
MKIEFDTIGTIHSPFKELEGMPIQPTGAKGIKGEIHIKDEYKPGLKDITGFSHLILIYHLHKTNGNALEVKPFMDNKTHGVFATRSPKRPNNIGMTVVALDSVDDDCVLHISNVDILDGTPLLDIKPYVPQLHEDTIVDLRIGWFETNHKKAKTQKADDRFIN

SEQ ID NO: 6647 - protein, 82 aa, Methanobrevibacter ruminantium
MTNETFEEVSQILKHIMENPSVPRNIRRAADESFNTLNNEEEDETVRASAVIIKLDEISNDPNIPVHARTLIWEILSKLEAI

SEQ ID NO: 6648 - protein, 118 aa, Methanobrevibacter ruminantium
MVKNEKFITVICFNKFHGKKIFKIGSILKLVKEPDNAYDAEAIRIEMRYAGKVGYLANSVKTVVRGTMSAGRVYDKINDEAAYAQVKFISNENVIARILEEEEIKDLKRDPESDLNFI

SEQ ID NO: 6649 - protein, 335 aa, Methanobrevibacter ruminantium
MSNTEKINVNVESNKDKGFSDDINTIFINFNGLNISLELMEKQSYKNMDIIPIKTDSFAKKDFITLKKGFEMGLVEIKELENEEVNTVICKNDAVVPLILIDGDEIIGAKQNRIMNESLLIPAKSQVKIPVSCTEHGRWRFKSNEREFQHSDYSLNFESRRIKSIARNECRDYQSDVWSHISDLEDRHSFRSRTSSMNDNYEHSKTAQDDYIKNLMIADGANGLICFINGEFKGLELFYNHSIYKEYYEKTLRSYIIEAISYGGNNTVGEELFRVINGEMNDLSSSEFIEYETVGLGKNIRFATKGGSGSGLIFEDELVHMTYFKEDSNKNYEIL

SEQ ID NO: 6650 - protein, 341 aa, Methanobrevibacter ruminantium
MITELYSNSIYMLLTILLFSLAVDLLLGEFPMQIHPVVWIGKIISFFKNILIKYDNKIAGLILSIAVIIVSSLIVLIPMAIARYLLPYNDMMIYLFKLIAILLLTSTFSVKLLLDSARDVEKDLRNNNLNKARQAVSYLVSRDTNELNKEHVISAVIETLSENIPDSYVSTVFYYSIVGIIASLCGIGDFDVIILAVLAAFIHRVVDTMDSMVGYKTKELYNIGFIPAHLDDALNYIPARFSGALIVVSAMFLRLNWKNALFIMRRDANNCDSPNSGYTMATVAGALNIQLEKEGVYTLGDNINPINVDCIEKAVDLARLTIFLVTIFFMFVFMDLILLML

SEQ ID NO: 6651 - protein, 154 aa, Methanobrevibacter ruminantium
MAVIDEEQVREWLMEEDMIREKIYDENANFHYIINFPNNNAMDVIQPRTKEDVLLIGCATEVSQVEQDMIKNTDKAINQEFIWNVRFALNEMLLDFELEHPDDQLKRFIITEDIFSDGLTKHVLVKSIKKVFKAKLQCIWLLGKTYGTVQMKKE

SEQ ID NO: 6652 - DNA, 194 bp, Methanobrevibacter gottschalkii
  source 1..194: mol_type = genomic DNA
ttgacagtcccagaaacttctgaaattttagcttcatttggctttaaaaacttgaataaacaagtatttacttttaaaattatatttatcagcatgttatttggtttagatattccattcatcttgagtgagcttgaatctaaagaaaaacttcgtaaatactttaatatttctgaagtttggagtgctgatca

SEQ ID NO: 6653 - DNA, 249 bp, Methanobrevibacter gottschalkii
  source 1..249: mol_type = genomic DNA
gtgggagacaaattattaattatgtacaagcaaaataattgtctcccatttcttatattggaagataagacatataattttgtcggtgattttgttgatccgattcgacatgaaaataaatgtgaaattttagataattctgttcagattatcctgccaattcaaagtattctcgataataacttctttgttaactcagatggtgttattgaataccgtgaacgccattgttgtaaatgtggatcatga

SEQ ID NO: 6654 - DNA, 1053 bp, Methanobrevibacter gottschalkii
  source 1..1053: mol_type = genomic DNA
ttgtattcaataaaatcagtaaaagaaattcaagatttaaatccattcatagtagtaggttgtggtggaggaggtgaaaaattctccaatcttgaaggggtagaaactgttggattcatagatgataatgttaaaaaacaaggaaaagaattctgtggctatattgtagcaggtagcttggatgaaagtcttaaacatgcaaaaaacgcaaagtcattagttattatgcttcctattggtgcagagggttcagctttaaaatatgcagttcaggctattgatgcaggattaaatgttatcacttcatttagatcattatccataactgaaaacatttctttaaaaaaatttgctgatgcaaaaggtgttgtaatcaaagacattggtcctagattggacgttgttaaaacaattgcaggtgttgctcctaaaaagtcttgtgaggtattaccaaaaatttcatatgaatcaaaagcaccagtaatcttcgttggagggacttcccaggaatgcgggaaaagaaccactacaaaaaaattaggtattgcaagcatgaaaagaggattgactcctgccattatatctactgatgagatgggattggaagaacctactgattttaactttagggctggaagtttatctgcaatggatgttccagcagcagtattatctgcaattaaatacgcagaagaaacaaaacaaccggatattattttcattgaaggtcaatccagtttgactgaaaaaggaaatcctcacccaagaggattgtctgcagccatattaattggtgcagctcctgatgccgttattgttggacacagaccaaaccacccatacagagaacctagaggtattgaagaagaaatcagagctattgaagctgttgaacctactaaggttgttggtttgtccatcaaccttaaaaatgctgacctggatttatgtcctgaattcttcgaatccaaatacaatttacctgctgaggatgtttataacaatggtgctgataaattattagatgcgatattcgaatatttaggggagtaa

SEQ ID NO: 6655 - DNA, 534 bp, Methanobrevibacter gottschalkii
  source 1..534: mol_type = genomic DNA
atgagctttatggataatttaaaaagaagtttaggctatgaagaaacagaagatagtgaaaaaaaagaaggtggaagttttaacttttctgaatttgtaaatgattttactaaatctgttaaaaattcaagagaacagtataaacaatcaaaacaacaggaaactgcacaacaacaatacaggccggctcctgaaccacaacaagctcatagaacagctccagtttacgatgattttgatgatgattttgtgattactccagaacaatctttttatgaaatcgtactgattaggccaaaaactcttgatgacatcaattatatggttgaccaaatcctcgaagagaaaaatcccatcattgttgatttatcctttttggaaaaagaaagtgaagccaactttaaattagcaggagataaaattagacaaatgagaacaaaatatggtgctcaggcattattacttacacgctctgaagataagaatttaattattctttctcctagaaaagtaaaattggtcaataaaggatga

SEQ ID NO: 6656 - DNA, 915 bp, Methanobrevibacter gottschalkii
  source 1..915: mol_type = genomic DNA
atgctcattaaaaagataccaattccaattgcaggtttagcccttgctttattatcattaggcaatctattgcaagacatgaatcctaatgtcaagtatttatttggagctatgggtgcaattatcattgttttaacaattcttaaagctattttttatccggaagatgttaaagatgattttaaaaatcctgtaattgcaagcagttccgggactttttcaatgagtttaatgctttcatctacatatgctctggaatttatgccaaatatttcatatattgtatggattattggaatcagcttacatattttgttaatgatttactttacatatcatttcatcatacgaaattttaatataactgatgtttatccaagttactggattgtttatgttggagtctcaatggctgcaattaccgcaccacttcatggccataaagaaataggattcatatttttagtcataagttttatttcaatgctaataacattgcctttaatgatttatagatatgtcaaatattcagaaatgcctgatgccaataaaccaacaacatgtattttcacagcacttatgagcatactgcttgttggatatataaattcagcaccggcaatttcaacggcatttataatctgcttatattgtattgcatgcttattctacatattttcattctacaaattagttgaatacagaactttaaagttttatccgagttttgcagcatttacatttccgtttgtaataagtgcacttgcaacaaaagacatcgtaaaaatagtaggttcaaatacactattatcttcagtacaaacagttgaaacattgatagcagtaattgtagtattctatgtattatttgaatactgcgaatttttaaaaaatagcaaaaaaagtagaaattaa

SEQ ID NO: 6657 - DNA, 756 bp, Methanobrevibacter gottschalkii
  source 1..756: mol_type = genomic DNA
atgattgatacgcatattcatgctgatgcaagaagcagtgaagactttaaagaaatgtatttatccggaattgattgtgcaataacttgcagctattatccgtacaaaattgatgctgaaaacatcttattgaatcatttaaatagaattttagaatatgatactctaagagcatcacaatacggtttagatttaaaagtagctttagggattcatccgacaaacagtattgagaatcctcagatgatttttgatgaaatgtataattggattgaaaataaacagattgtagctattggagaaattggtcttgaagatttaactgaaacagaaatagacatattcaaaaaacagttagatattgctgatgagacaaattcaaaggtcatcatccatacaccaaggaaaaaaaaattagaagttctaaaagtaatcttggatattgtgccgcagcatttagatgaatcacaagcagtaattgatcatgtcaatcaagaagttatcggagaagttattgatagaaattatatgcttggaataacagtacaaccccaaaaacttgatgttgatggagctatcgatattttggataatttcggatttgataattttcttttaaatagtgatatgagcaacaaaccatcagaccacctttctgttgctaaaactattcgtgagttatccagacttggctataaaaaaagcagcatagataaaatatcccacagaaatgcttcagattattttaaaatttag

SEQ ID NO: 6658 - DNA, 900 bp, Methanobrevibacter gottschalkii
  source 1..900: mol_type = genomic DNA
ttgtttctgattgtaggtagtttatatgcagtttcactttttcacattttctcacttcaagagattttatattttttagtaataaaaaataatgatgtaagtaatactcgattggtgattaatttggaaaataatgaaaactatttaaaaagctatgatttgatttcagaagaagtaaaatatcttactaattcaataattagattaaaaatattggcaacattatttaagtgtcctttaaatatgaaagatataaacggcatcacttccctaagttacagttcaatatccagcaatctgcataatttagagttgaaaggtcatgtttacagagaacacaataagtattttttatcaaactctactaaattggaagtggagcaagttttaaagttaggtaacttaataaatctattaaatgatttctttaatattttggataaacatcttgttgacatgattcctaatcagtcagttgctgaattatacttgcttggcaatgcatgtcttatggaatccgatggtgttgatgtatataggatttataaatatattgaagatgcactaaatgctgcagaagaagttaaatgtgttttgcctttttactatgaaacattcaatgataaactaaatgatttggttaaaaatgacaaaaaagttgaggcaatggttccacttagtctttttgaggtctttgatgaaaaatcggaaattggaaagttatcttttttcagtaatgataaaacctttttgttgattattactcatgaattaatgattttaggtctttttaaagaagatggttattttgatcaaaatagattattgacttctaaaaatagtgattcaataaaatgggctaacaatctgtatgaaaattttaaaattaaaaataaatga

SEQ ID NO: 6659 - DNA, 1695 bp, Methanobrevibacter gottschalkii
  source 1..1695: mol_type = genomic DNA
atgaatcatgataaaatgtcaaatataagttcaaaaagaggattcttatggccttcatttgaaatttactctggtgtgtctggttttacagattatggacctcttggagctagtctaaaaaataatatcatgcagaaatggagaaagcaatatgtatccggtgaaggattttacgaaattgaaggtccgaccgtaatgccaaaagaagttttaaaagcatcagggcatgttgataactttaccgatccgatgtgtaaatgtgaagactgtggagaagtattcagagcggatcacattattgaagaagttattggtgaagatgtggaaagccttgagaatgaagaacttgaccagatagttattgacaataacattaaatgtccggaatgcggcggtaacttatcaaacatttggaattacaatttaatgtttaaaacagaaattggagctaaaggagataaaataggttacatgagacctgaaactgcacaaggaatcttcattttattcaaacgtttggaaagatttttcagaggaaaactcccatttggagcggttcaacttggtaaagcatacagaaatgaaatttccccaagacaaggagttattagacttagagaattcacacaagcagaagcagaaatctttttaaaccctaaagaaaagacacatccaaaattctcacaaatagaaaatgtcatattgcgcctaaactcacaagaagttcaggaaaaaaatttagaaccattggaaatcactgctcgtgaagcacttgacaaaggaattgtagctaacgaaatgttaatctaccagttatacttagctcgtaaatttttaactgaaattggaattcctgaagatgttttaagattcagacaacacttaaaaggggaaatggcccactatgcacttgactgttgggacgttgaagttaaaaccgacaaatatggttgggttgaaattataggaatagctgatagaggggattatgacttaagttcacactccaaatacagtaatgatgaactaaacgtgtttattgaatacgataaacctaaaaaagttcaaaaaaccattgttaagccaaatttatctaaattcggacctatatttaaaggggattcacctaaagtaaaacaggctattgaagatgcaaatgttgaagatattaaatcagcaattaaatctgaaggtaaatttacagtagaattagataaagtatatgaagtgccagaagacttactcatctttgaagatgttgaagaagagataaccggtgaaaaaatcattcctcacgttattgaaccatcatttggtattgatcgtattacatattccgtcttattacattcatttacagaaactgaaggaaaagattacttcagatttgacaaaagtgttgctccagttcaacttggaatttttcctcttgttaacaaagaaggacctcgtgaaattgcccaagaattaactgaacaattcagaatgaacggatttaaagtagaatatgatgctaccggaactattggtaaaagatatgccagagctgacgaaattggtattcctattgcagttactgttgactttgatacattagatgataatcaggtaactgtcagagacagggacagcgaagctcaagaaagaatcccaatagcagaattagcagattacgtggaaaaatattataaatga

SEQ ID NO: 6660 - DNA, 585 bp, Methanobrevibacter gottschalkii
  source 1..585: mol_type = genomic DNA
atggctattttaagtgataaagacataaaaaaatatttagaagaaggtaaaatcggtattgaacctcttttagatgaaaaacagatacaaccatcttcagttgatatgagattaggagatgaatttaaagtatttaaagttattagaaaaccctacattgatccaaaagatgaagaagacattgcatcgtatatggaatcaactactgttaatgaaggtgaagcatttattattcatcctaatgaatttgcccttgccactacattagaatatgttaaagtacctgatgatttagttgcaagagttgaaggccgttcaagtatgggaaggcttggtgttacaatgcatgttacagcaggttttattgatcccggttttgaaggtaaaatcacattagaaatatcaaatattggtgcgatgccggttgctttataccccggccagagagtatgtcaaattgtatttgaaaccatgaccacaccttcagaagttccttacggacatccagataggcaaagcaaatatatggggcaaactagtcctgaaagtagtagagttaaattagattacgaattaaaaaaataa

SEQ ID NO: 6661 - DNA, 831 bp, Methanobrevibacter gottschalkii
  source 1..831: mol_type = genomic DNA
atgagaagaataagatttgtagacatcagcatattcgtccttaaatatatttttaactggagattttggattgcggagattaccaaaaaatctaaaatatacaaaaaattcatcgataaaatgctttttgaagaagatgaaattgttgttgtgcccaatactgttaatataaataaaaaaattgagtctgaaggctctgaatttttaccaacagacattattaaagaagttgttaaacgcagcgaagacattgtaattatgaacacatgcctttgtagagaatcaaatgactgtcaggattatcctcacgatatcggatgtatatttcttggtccaaccactagaaagattccgaatcatattggtaagaaagctactgttgacgaagcgttagctcaaattgacaaagctgatgaggcgggattaacccatattattggaagaaataaaattgatactatttggatgaatatacgacctggaaaaggacttttaacaatatgccattgctgtccttgttgttgtttatggaaagtttatccgaatttagatgaggatataagtgataaaatagaaaaacttaatggtgttgaaataaagcttcatgaagataactgcaaacattgtatgaaatgtttagatgacatttgcatgtatggctccatcagtttagagaataataaaataactattgattatgatacttgtaaaggctgtggcctttgtgttaatgcttgtaaatttgatgcaattacaatagattatactgctaaaactattgacaacatagttaatagaattgatgatttaattgaaattaaagaattataa

SEQ ID NO: 6662 - DNA, 909 bp, Methanobrevibacter gottschalkii
  source 1..909: mol_type = genomic DNA
ttgattaaaataggagatactgcagttagtgaggaaaaagtagttgaaactacctctctaaactcacctaaagaaaaagaaaaatcagatgatgagaaaaaatcaacttcaactaaaaaagctaagtctacaagccagtctagaggaactgcaagagcaaaattaataaaaaagcaggaaaaaaaagaaattagtctttttaaagaaaatatttacattgtttttgttgaatgtgaaactcccggaaatattggttttcttgcaagaactatggcaaatttcggattgaagaatttagtattaattaatccacccacattaacaaatgaagcatattatcaggcgacccatggcaaatatattgttgagaatgcaaaaatataccctaccctggatgatttttatcaatcccaaagaattgattttaaagttgcttcaacagggatggccggtggaagttataatttatcaagaattccaattagacccgaagaacttggcaggtcaatgaatgtttcaaataaaatagcaatattatttggaagagaaggaaatggacttacaaataaagaaattgaggattgtgacatttgtgtttcaattccgaccgatccaacttatcctattatgaatatttcccatgcagcggcaatcatattttatgaattatttagaaataaacatgactatggtgctgaaggacttgatgaaagtagtgatttggaaaaagaatttttattaatggatatgaaagagataatcaacagtttggatattccagaccataaaaaaagaaatggtcttaaaacttttaacaacataatttcaagagctttcattacatcaagagaagcacatacttttaaaggcatattaaggcgaatgaaaaataaatttggtgaacaatga

SEQ ID NO: 6663 - DNA, 1476 bp, Methanobrevibacter gottschalkii
  source 1..1476: mol_type = genomic DNA
atgattaaagtttatgtttcaagatttaatagagggattgacacagaaccacatctggagtgttatgacattaatgaaacacctaatatgaaggttcttgatgcacttcaagccattaatgaaaaatatgatgcagacattagttttagaagctcatgtagagcaggacaatgcggttcctgtggaattttatttaacggaaatggagcacttgcatgtcaaaaagaaattaaagatggagcaataattgaaccacttaaattcccagtcattaaagatttaattgtcgatacttcaagcattgaagcaaaagtaaaagatttagaattatctcttcagtgcagtcatgaatgtagcgaattagattccagcataacaaaaaaagatactgcagatactaaaaaagtaagaaattgcattgagtgttattcttgctattcaacttgtcctgttgtcaatattgcaacagaagaatttggtggaccttatttaatgagatatatcaataaatttgacactgatccaagagacaactttgataggcttaaagaggccttagatgaaggattatataattgtaccagttgcggcaaatgtttatctgtttgtccgaaaaatattaacacatttggtgatgcgatagaaaaaatgagagctattgcagttgcaaacggttcaggtcctctcccaaagcatgttgcatttaaagaaaatattttaaaaaccggaagatctgtaaaaactgacaaaccaacatttattgaagaaacaaaaaacaaaacaggttcaaaaatagcattttttactgggtgtatggttgattacaaatttccggaagttggtcataaattagttaaaatcttaaaagaaaatggaattgacattgatgttccagaaggccaagtgtgttgtggttctccacttttaagaactggtcagacagacattgtacaggatcttgttgataaaaataaagaagtattcaaagattatgataccattattaccgtttgttctggatgtggagctactttaaaaaataatcatccagaattcggttcaaaattaaatgtgatggacattagtgaatttttagtagataaactcgatgaaagtaaacttaaagacgttaatatgactgttacatatcatgatccatgccacttagccagaagtcaaggcattaaagatgcgcctagagagattattgagaaaatacccggtgttgaatttaaagaaatgttatatccttgtcaatgttgtggtgcaggtggaggaatcaaatccggaaaaccggaaattgcaatggaattggcaaaatcaaaagcagaaatggttaaagataccggtgctgatgcagttgttacaatatgtcctttttgcgaattgaatattcaagacggtttaaatgaaataggatatgacaacatcaaatgtatacatattttagagttattagataaagcttatgaataa

SEQ ID NO: 6664 - DNA, 780 bp, Methanobrevibacter gottschalkii
  source 1..780: mol_type = genomic DNA
atgaaaattaaagctgttaaattatttgaaaatggatttatgactcagccttttgcttttggtggtgaaaaaggtgcagaaaattttgatgcatcagttaaatataggtcaagtcttcaaaattatgtaatcgatacaggtgatgaagtgattcttgttgacacgggactgccttcagaacttccagaacagcctcgtgatgataatgcacctatatggagtggggataagattaaagattatgttcctgcattaaaagaggcaggttatgatattgaagatattacaaaaatactcgtaactcacaaacatttggaccatacgggggaattaaaaaaattcccaaatgctgaaatattcatgtcaaaaacagaagctggtgaagttgatttggaatctgataatataattggtgttgattttgatgatggggaatattataattttaagaaatcacaaaaaattgctaatggagtatatttaattgaagcgaaaggacatacattaggtaatagtatggttattgtagaatgtgatgatgtattttacatgttgcatggtgatattacatatactgatgaagcattatatgaaaataagttatctattgtttttgaggatattggtgctgcaagagaaactcttgacaatgtccgtgaattcattaagaataataaaaccgtatatctttcaacacacactccattaggttatgaaaatcttgaaaataataaaataattgatttggaaaatcctcctgaatctatttatccaaattaa

SEQ ID NO: 6665 - DNA, 1887 bp, Methanobrevibacter gottschalkii
  source 1..1887: mol_type = genomic DNA
atgaatttaaaagaattagtcacaggagattctggtgaaaaacgatttttactaggtaatgaagctgctgtaagaggtcttatcgaagcaggcatttctattgcggctacttatcctggaactccttcatctgaaattggaaatgtgttatcagtattggctaaggatgctaatatttattttgagttttctactaatgaaaaagtcgcaatggaggttgcagcaactgcagctgtatccggtcttagatcatttacattcatgaaacatgttggtatgaatgttgcggctgattcattcatgacaactgcttattcaggggtcaatggtggaatggttattttatctgctgatgatccgtctcttttctcatctcaaaatgagcaagacacacgtaattatgcaaaattggcaaatgtacctattttagagccatctaactgtcaggaagttaaagacatggtaaaatatgcatttgatttatcagaacaatttaaattgcctgtcatcgttagaacaactactcgcgtatctcacatgaggggtgttgttgaatttggtgatgtgagagataactcatcaaataatgataatcattggaagagaggtcattttaacaaagacccatcaaaatatgttcctgtacctgcttttgcaggggatatgcatgtaagactttgggacaaaatccgcaaaatcgaggaagtaagcaataaaagcaaatttaactgtgaatggggtactggtaaaaaatacggattaatagcttcaagcagtgcatttaattatgcttgtgatgttgtaaaattcaataatttagatattaagatcttaaaattaggattttcatatccgtttccacagaataaagtcattgaatttttaagtgatttggatgaagtatttgttgtagaggaagtggatccaatcattgagagagatactttagtttgtattggttctaaaaacctcaatgttcaagttcacggtaaattggatggaacattcccgatttatcatgaattcaactctgatattgttgctgagggattaaacaaagtattgaactttaaagaaaataaatcagttcaattcactcaaagtttagaaaaattaagtgaagacattccatctcgtgctccggttttatgtgcaggatgtcctcacagagcaatgtattatggaatcaatattgcaattgaagaattgggattaaaacccgaagatgtaatctttgcatcagatatcggatgttacacattaggtattaacccaccatacaatgcagctgattatttgctgtctatgggttctagtgtgggagacggttgcggattctctgtttcaacagatcaaaaagtagctagtttcattggagattctacatttttccatagcggtatctctcctttgataaatgcagtacacaacaaacacaactttgttctaactgtattggacaacaggattaccgcaatgactggtggtcaaccaaaccctggaattccagttgatggtatgggtgatgatgctccagaagtatctattcgtaaactggctttagcttgtggttgtgattttgtacgtgtaatcaatccatttaacttggagcaagttgttaagacttacagagaagcatttgaaagaaaagatgctgcagtaataatatcaaaagctccatgtactttaattaaaggattaactagaaaacctcctgtaaaattcattgaaagtaactgtaacaattgtgataaatgtgtaaaagaattagcttgtcctgctatttctaaaattaatggaaaaattactattgatgaatcccaatgtgatggatgtacagcatgtattcaggtatgtaaatatggtgccttggaagatggtaggtga

SEQ ID NO: 6666 - DNA, 648 bp, Methanobrevibacter gottschalkii
  source 1..648: mol_type = genomic DNA
atggatgtacagcatgtattcaggtatgtaaatatggtgccttggaagatggtaggtgagaaaatggataatcattataatatttatatttgtggtgttggaggtcaaggaattattaaaacttcaacaattattggtgaagctgcaatgaatcaaggtttagatgtagtaatgagtgaaattcatggaatgtctcaaagaggaggatctgtttctactgaattaaagatagggggttacaattcgtcaatcattccaaaacaaggtgcagatatgttactttcttttgaaccggttgagacaataagaggattggataaggtaaacagtgaaactaaaattgtttacaatactcatccaatcatcccctcttcaactgataagcaatatcctaatgtagatagtattactaaaactttaaaagaaaactttaaatatgttcttccaattgatggaactcaattagcgatggatgctggaagtgttttagcgttgaacatggttcttttaggtgcggtaacagctgatgacaaattcccattaacaaaagaatctgttattgaagcaatgaaaaacaatttaaaacctaaattccatgaaatgaatttaaaagctattgaaagtggatataactccattaaaagttaa

SEQ ID NO: 6667 - DNA, 279 bp, Methanobrevibacter gottschalkii
  source 1..279: mol_type = genomic DNA
atggcttataaaattgacaatgcaatcataaaaaaagataggaatgggaaagtaactttgattgatccagaaaatgtttttggtgatgaagatgcatttattgctgttaaaagtgatgatttaattactattcaacttttgatcaatgctattatgaaaaatgattttaaaagttggaaagaattaggtgctattcctgaaactgaaccaattaaaagcctatttgtccgcttaggttactcaagggaagatatagctaatatgctgaaagagttttag

SEQ ID NO: 6668 - DNA, 432 bp, Methanobrevibacter gottschalkii
  source 1..432: mol_type = genomic DNA
atggcagtaaaacaaatttcagttttcgtggaaaataaagaaggcagaatcaaaaaagctattaatacattagcagaagaaaacattaatattcgtgctctttcaatagctgatacaaccaaatacggaattttaagattaattgtttcagataatgagaaagcaatagctgctcttgaaaaagatggatttattgtaaaggaaaacgaagtcatacttttagcagttccggataaacctaatggattaaattcaacattagcaatatttgatgaaaaaggaattaatttagaatatttgtatgcatttgtaagtagtaaaactgatgcggctattgttgttatgagattagaaaatatggaaaaagctatcgaagcattgcaagatagcaatgttaaaatcttgaaaacagaagacattaaagatttatag

SEQ ID NO: 6669 - DNA, 1305 bp, Methanobrevibacter gottschalkii
  source 1..1305: mol_type = genomic DNA
atgttttgggacgaaaaagccgaatgtatgagtaaagaagaaaaagaaaaaatacaactcaaaagacttcaaaaatctgttaaactcgcatatgaaaatgtagagttttataaaaaaagatttgacgaaattggtttaaaaccggaagacatcaaaactttaaaagatattgaaaaaattccatttactactaaaagcgatttaagagaagcttatccattaggcttacttgcagttccacgtgaagacattgtagaagtacatgcatcatctggaactactggaaaaccaacagttactgcatatactcaaaatgatttagatatctggggagaatgtattgcacgtggcctcaaaatggcaggtgccaaaaaagattacattatccaaaatgcatacggatacggattattcactggaggatttggaattcaccatggtggaaacatgatgggaaccattacaatcccaatttcagcaggaaacactcaaagacaactcgacactatggtggatttccaaagtgatattttaacttgcactccatcttatgcagcatatatcggagaatctcgtgaaaaagctggaatttcattagatgagattaatttaaaagcaggaatccatggagcagagatgtggactgatgaaatgagaaaaagaatcgaaacatcacttggaattaaaacccataacatttacggtctaacagaagttatgggtcctggtgttgctcaggaatgtggtgaacaaaatggaatgcacattcaagatgatcatttttatccagaaatcattgaccctgaaactggtgaaacactaggatacggtgaaaaaggagaacttgtattaacttccttgactaaaactggtatgcctattttaagattcagaacaaaggatttaacttctttaattggtgaagcatgtgactgtggaagaacaaccgttagaatgacaagaatcactggcagaagtgatgatatgctaaaaatcaaaggagtaatggtattcccatcacaaatcgaaaaagcattacttaaaatccaaggtatcagccataattacatgattcatgtaacaagaccggatattttagatgaagtagaagttaaagtagaagcttcaaaagaattattctttgatgaaatgaaagaaatggaaaaagttgaaaagcaaattcaggcatctatcagatctgaaacaggacttagagtggatgtaacaatttgtgaacctgaatcccttccaagaagtgaaggtaaagcggtgcgtgtaattgatgaaagaaattttgaggactaa

SEQ ID NO: 6670 - DNA, 876 bp, Methanobrevibacter gottschalkii
  source 1..876: mol_type = genomic DNA
ttgatatcaatttttcatttattttttaaaaaaactatttatagttctttaattctaaatttaattggtgatattttgaattttaagtttaaagagtgtaaaacagagttcgatgggggaaattttgaagaagcattggatattttgggtgaaattgaaaatgatgatgaggattataaatttgctttgatgcttaaatataattgtctgatgggtcttggttgttatggtgatgctttaactattataaatatgttgattcatgaaaatccctatatgtctttattttggtttgataaggttaaatgtcattatttccttaaagatttaacaaatgctgctggtgcgttatatcatgttgaacatatcattgatttaaaggatgttgttgaaattattgactttgtgaaattatgtaatatgattggagagcatgtaattgcattgaaatattgtaatattgtattggatacagatgaaaaccagattgatgcattacttgaaaaatcattgatttcaaatattattgatgacaagaacatgatgaatgaatgtggtgataaactttttgaattaagtggagataatttatctttattgatggtttcttttgcactaaaattattttctgggatgtatcgtgacagttttaatattattctgaatataaattgtatggattcaaaaatggggttaatattaaagaaaattatttataatcagatgctttgtgatttaaatattcaaattgtgatggaaagcaatgctgaattaacaattgatgagtttatattattgttatttgattatagatattatggagttgaatctggtgaagttaaaaatgttaggtacatgatagtgaaacaagattga

SEQ ID NO: 6671 - DNA, 1611 bp, Methanobrevibacter gottschalkii
  source 1..1611: mol_type = genomic DNA
atgaacgtaatgattttagcaatcgtatttataatctacatattttcacttgtttttgtaggttattatgcatacaaaaaaactaattcctctgaagactttatgattgctggtaaagatactcacccattcatcatggcaatgagttatggggctacatttatttcgacagcggctattgttggttttggaggtgttgctagtgaatatggtatgagtgttttatggttagcattcttgaacattatcattggggtatttatcgcattcgtatttttaggaaaacgaactcgtaggatgggccatgcattaaattcattaacttttcccgaatttttaggtaaacgttttaacagtaacttcatccattatttctcaggattagttattttctgtgcaatgccgctttatgcagcagtagtattaattggagctgcaagattcttagagtcttcactattaattgatttcagcattgctttgcttatattgtcaattattattacattctatgtattgttcggtggtattcgtggtgtaatgtatactgatgctttacaaggaagtattatggttgtggctatggtatttttgcttgtatttgtttattggttacttggaggaatcgatattgcaaacactgcattaacaaatatggtcaatttatatcctgccaatgcaattgcaacaggaggtactggatggacggcatttccagaatttggaactccattttggtggtcacttgtatcttcaacacttattggtgtaggtattggagtacttgcccaaccttcattaattgtaagattcatgacagttaaatcagataaagaattaaacagatctgttttaattggaggtattttcattgcaatcatgccaactactgcatatattgtaggatctctttcaaatgtgtatttctatgataagttaggtaaaattgcagtagatgttgttggaggaaacattgataaggttattccaacatttattacaatggcattgcctgaatggtttgtatacattttcttattgtcattaattgcagctgctatgtcaacaatatcttctcaattgcacactcaaggtactgcatttggtgtagatatctatggtacattaagaaacaaatccaaacaaaaattagatcaagtaagtatttccagagtaggtattcttattgctattatttcagcattagtaatggcattttcacttccgggaagtgtagttgcactcggaacaagtttattctttgaaatctgtgcagcggcatttttacctgtatttttgggagcactttactggaaaggaatcacaaggctcggagccatttcaggaattatatctggaactttagtcagtttgttctggttaatgtttgtattcaaaaagactgcacttggacttggaatttgtaaatttgtctttggtgttgaaacattgctgcctgttgcaccatggccatttattgatgtaatgttgatagctgttccaatttcagcaatattcacaatcgtagtaagtttacttacaaaacctttggaacaagaggtaattgacaaggcatttgaaaacatagatgaaaaaggaagtgatgcataa

SEQ ID NO: 6672 - DNA, 114 bp, Methanobrevibacter gottschalkii
  source 1..114: mol_type = genomic DNA
atgatgattttgggaattgaagacccaatgatttggggagtatatgtcggaattatcttatctacacttttatgtgttgtttatggtattgtaaactggaataatggagattaa

SEQ ID NO: 6673 - DNA, 720 bp, Methanobrevibacter gottschalkii
  source 1..720: mol_type = genomic DNA
atgaaagaattatttagtaattttggaagaattcaaaaaaatgatcctgaatttcatgaaatatttgaaaaatttgcttatggtgaagtatttgaatattctaatttatctgaaaaagaatctattttagtgacattagcatcattacttgcatgccaatcacctaaagcatttaaaaagattttactggcggctcttgacatggacttaactgccgaggagattaaagaattactttatcaatcagttccatatgtgggatttgcacgtgcacacaacttttttgggattgttattaaggtgttcaataaaaaaggcatagaattacctttgcctaatagatcaaatactaatccggaaaataggcacaaaaaaggtcgtgaacttcaggataagtactttggtgctgaaataattcaaatgatgaatgataacactccagccgatcaacagcatttcaatagatttttagaaggattctgttttggtgatttttacacaagggacggtttaaatgatcaagaaagagaattaatcacttttgtatttttggcatccttaggaggatgtgaaagccaactaatgggtcatattcaaggtaatttgaatgccggtaatgataaagaaaaattaatttcggcattaactgttgtcatgccctatattgggtttccaagaacccttaatgcattaagtattgttaatgaaagttgtgaataa

SEQ ID NO: 6674 - DNA, 435 bp, Methanobrevibacter gottschalkii
  source 1..435: mol_type = genomic DNA
atgaatatatcaaatagaagtgtaaaaatgtcaaatatcgagaaagttgatgaaattttatcaaaagcagaagtattttatcttgcaacagtatatggagaaaaaccaaaagtaaggcccttaggattccatttattaattgatggcaaaatttactttggtgtaggaacttttaaagaagtttataaacagatagaatcaaatcaaaatgtagaaatagctgcatgggatggagaacactttttaagatactacggagtagcagatttaaccaaaaatgatgcaattgttgaaaaagcattcgaacttatgcctgaaatagctgaaatgtatgaagctaatggatgggaaatgggtgttttctaccttaatgatgcaaccgcagaaataaggaacatgatgaatgttgaagagacctatgaatttaaatattaa

SEQ ID NO: 6675 - DNA, 1077 bp, Methanobrevibacter gottschalkii
  source 1..1077: mol_type = genomic DNA
atgttaattattttgatagtgttgggtgttgccactcacttatttttgactccttctagtgtggaaacagaaggctctaaaaatataactgacatgttaaatagaactgttgaagttccaaatggggttaataatgttatagctacttctccgccaatgactactgtattatatatgctttcacctgaaaagttaaaagcagttaacttccaatggactgaagatgaattgaaatatgtgccatctgaatatgccaatttaccagttgttggtggttggtatggtacacaagatgggagctatgaagaatttattgctgctgaacccgatattgtgattgaatctattgatgaagggggggatggtgatgcattcactgttcaggaacgtcaagataaatttggcaaaattccagttcttgccgttaaagacactacaaatgttgaaaaaataggagattccatttcattcatgggtgaagttataggtacggaagacaaagctaatcaacttaatgagtttaatactaaatatttggatattgtacatgataaatcatctaaattagtggatagtaataaaaaaacagtttattatgcagcgagtagtgatggtttacaaacttacccgtcaggtgcttctcatggtcaattgattgatttgattggggggaaaaatgttgctgattcattaaatcaaggtaatactacttcaggtgtacaagtatccattgaacaggtaattaagttggatccggatgttataataactaatgatatgcatttctataataaagtgtataatgattcaagttgggctcatttgaaagctgttaaaaataaaaaggtttatgtatctccacaatctccatttaaatggtttgataaacctgttggtgctaatatgattattggtgttccatggactgctaaagtaatctatcctgaagattataaagatattaatatggtggatgtaactaaagagttctatagtaatttctatcattttgatttaaatgataatcaggcaaaagagattttacttgattcaggacttaaagaatcaaatttatag

SEQ ID NO: 6676 - DNA, 1014 bp, Methanobrevibacter gottschalkii
  source 1..1014: mol_type = genomic DNA
atggataatgattcaaaggatgttattagtatcatacttttaatttttctccctattattttatttttcacctcatttttattgggcagatatcctattagtccaatagatgtgataaatactatattgtgcccaatattcccacaattggaagtttcaccaactataactactattgtctttgaaattagacttccaaggattattgcagctattgtagttggggctgcacttgcgatggcaggagctgcatttcagagtatttttaaaaatcctcttgtctctccggatttacttggtgtgtctaatggtgcaggttttggggcggcattggcaattttaataagtggtgcaggtgttgtaactcaaatatttgcatttgcttttggaattatttctgtttcagtcacttatttaatttcaagagcatataaagctggtggaattttaatattggtattatctggagttgcaatctctgcatttttcagtgcattaatttcagctattaaatttatagccgatccagatgataaattgcccgagattgtttactggttaatgggaagtttggcttctattacgatggatcaattaataatgattattattccaataattgttggtatgattattcttttaactcttagatggcatatgaatttacttgctatgggtgatgaagaagctcaatctttgggtttaaatccaacaagagtaaggctattgattattgcaggttgtactttattaacttctgcagcagtttctgtaagtggaataattggttggattggtcttgttattccacatatggctcgtatgatagttggtcctgataataagatattaatccccgcttcattaagctttggcgcaagtttcctgttattgattgataatatttcaagagccataatttcaattgaaattccgattggtatattgacagctattataggtgttcctatttttttatacttacttaaaagggggtattctgaatgggcataa

SEQ ID NO: 6677 - DNA, 804 bp, Methanobrevibacter gottschalkii
  source 1..804: mol_type = genomic DNA
atgggcataactaataatttttatgaggttaaaaatatttcattttcgtatgatggcaatgaaatattctcagatattagtttttcaattgaaaaaggagatgtattgtgtattttagggccgaacggtactggaaaaacaacgttaataaaatgtcttaatggattacatgaaatcggttctggtgaaattttaattaaagggaaaaatattaaaaaattatcatttaaagaaatatctagaaatattggttacatccctcaaaatcacgcaccttcatttccatttaaagtaattgatgttgtgcttatgggaagagcaccatatttaaatttaattgatgctcctagaaaaaaagacatgggaattgcattaaattctttaaagactttgggtattgacaatctcaaagataaagaatacactaacttaagtggtggtgagatgcaattagtattcttggcaagaatattatgtcaacaacctgatattttgatattggatgaaccaacttctcatttggattttggaaatcaaattaaacttttggaaattattgataatttggcggcatccggactttcaattatcatgtcttctcattttcctgatcatgcttttttaagttcaaataaagttgctattatgaaagatggttgttttatagattttggaagtcctaatgatgttgtaactgaagaaaatttaaaaaaagcatattcaattgatgtaaagttaattgaattggaaaataaaagaaaagtttgtgttcctttaaaaacaaactttgaattaagtttataa

SEQ ID NO: 6678 - DNA, 570 bp, Methanobrevibacter gottschalkii
  source 1..570: mol_type = genomic DNA
atgaatgaacaagattatgatgaacaattagcaaaagcagcgaagtttcacggtcatatatgtggtggaattgcaataggaactaaattggcaatgtatgggcttgaattgcttggaatggagttcaatcaaaaacataaaaatttaattgtatttttagaaattgacaggtgtatgtctgatgcagttcagtctgttactggttgttctatgggtaaaagaactcttaaacaaatgtattatggtaaatttgcagctactttttataatcaggatactggtgaagctttaaggattactgatgcagatgctaataaaaaattcaaagatgaagaaacaaaagaagaaatgattgatcgttttagaagaactctccctgaagagctatttaaagtgaataaagtaaaaatcgaattaaatcctggagatatgcctggcaaaccttatacaacaacattttgttctgtatgtggtgaaaaagtatctgatggtcgtcatatacttaggggcggtaaacctatttgcaggtcttgtgctgaaggatcatattatgaattaattgaagattaa

SEQ ID NO: 6679 - DNA, 2061 bp, Methanobrevibacter gottschalkii
  source 1..2061: mol_type = genomic DNA
atgaggaaatgtttcgtgattatattggttctatgcttgttattttcattaaacatttgctttgctcaggatatatctaattcaacagattttacttttcaaaatagtaattttgattatttggaaaaaactgatagtgttaatttgattagtacttcagataaaattagcacacatattgatgtggtaagtaatactacatttgatggtactgtggactattttaaaattaaattgtctgatgaaaataacaaatcagttccaaatgctaaagtgatatttacagttaatggggttagttatgataaaaatactgattcacagggtatctcttcacttcaaattaatttggctgatggttcatataaagtcatttctaaattcgttggagactctaattataaatcttcatcaaaatcaacaacaattactattgataatactcgcattgtagaagatggattaaacaatgctgaaattcaaaatataattgatgatgctaaagaaggtaatgtgatattatttaaaggaaatagttattcaaatatcaatttagtgattaataaacgtcttacactaatttctactgttaatacagtattaaaatcaagttcatcatctccaacaattacaattaaaggaaaagaagcttcttattcaattgttaaaggatttaaaattcaaggaaatggtgatggtgttgtagtggatggatcgaattacgtaagaattttaaataatgacattactgctgatggagtaggaatcacggcatttaatgttaaatatatcaatattactggtaataatattgttaaaaatggtaaatgtggaattattctttattcaacagagaaatcttacataatcaataatgtaattaacaataataatgcaaatggaattgtattgacaaaatctgatattacatatatcgatagtaacactatttcaaacaatgctcgttatggtattttattaacaaacaaattcaatggtaattcttataaaaatggtcctgaaaatgtttatattactaaaaacactatcaataataataaatgggatggtatttctgtaaataatgcagaagataatattaacattaaaggaaatacaattgttggaaatgatgaaagtggtatttctgttaatgttgtaggttcctacaaaattcaatctaatattataactaatagttatactggtgttagattcgatgaggatcatgttcaaaagaaaaaccaagaaattacttataatgcaatttatggaaatgctcatgttcaaattgaagctaaatcatataatggtgttaatcctttatctgtaggagataattggtatactgatgatggattattatgtcctaaaatcaaaacaaataatttaaaatttactgtaactcaaattggaaaaaatcaattccaagcaacttttgttgattctaatggcaatattgcaagtttactccctgatagggagttaaaatataaaaccaatgatggtaaaatcgcaactgttatgattaaaggaggaataggaacatttactgtcacggcttctgatgcagatattattaagtctactgtggatcgcacaagcagaaaaaatgtttatgattcgaattctccaactaaaactccacaaaatggtcaatctccaacatatgattatcctaacatagattatggtggaggacaaggcaatggaaatggtcaaggtggaaatgcaaataatggtaatgggtcttcacaaaaatctagtgatgattctggaaatagctcaaatagtaaaaaaatggaaccaaatagtaatccagtaaatcaagcaaacgatgtatctcaaagttatgacacttcgcaaagcatggctcgagctgatgcatctgagattagtggtggagcaaattcaggctcacaatctattgcaaaacaaattataattgaagatgatgaattttttatagttaaaggtctttcattaatagtattgttaatattattaacaataggattttattatcgtgatgatataaatgagatgagatctaaactttaa

SEQ ID NO: 6680 - DNA, 1458 bp, Methanobrevibacter gottschalkii
  source 1..1458: mol_type = genomic DNA
gtgagtatcaatgataatctaggagatgcatcatcagatttagaaaatgaaatcattaattcaaaaaatggagatataatattgataaaacctggaacatataatatccacaatataaccattaccaataaaactatcacactccaaggaattggaaatccaagtgatattataattgatggaggtaaacagtcaagtatttttttgataaacaatattactacctgcgtaacatttaagaatttaacattcattaatggtttatcctacaattttggtggtgcaatatgcattaatacaggtagtgtttatatagataactgccagttcatcaacaacacagcactcaacaataccaatgcaggtgccatatccaattacggaaatgaagataacaaagcatacctccttgtaaacaacaccttattcatgaataatcatgcagaccatgatggaggggctgtaacaacatgttacgctaattctgacatgtataattgtgtatttataaataatactgcagttagagatggtggagcagtgcgagttagtgtttatgggtatggccatgtagaagattgtatttttatgtacaatcatgctgatgagtggggcggagcatactacagttggtcaggtacttctaaaatcaatagatgcatatttatgaacaatactgcaggaacaaatggtggagcagtaatggtttcaggcaatttagaccttgaaaattcaattattgtaaacaatagtggtggaaaaactggaggttcattctacattcaagaaccaatgtatcaagcaaaaacctatattaatgttaacaataatttaattacaaataattcttcacctaaaggtcaagaaatctatgtaaaatggagacattcacaaaacttataccctgactttaatgataatgattggggaagcgaagatccaaatgattacaaaataaatgacccggataatgttactgcaagaagtaaagtgaaaactacaactgataagtccaatttattagatgaattgaatttcaatgcattaaacaaatactatgatttaattaaagattacttcccagaaaactatttagaaaatatcaaaaaacaagcagaatcaaaagctaatcaaaataaagaaaacaataagaacaatactccaaataacaaagacgaacatggacttaaagattcaaacaataccaaaaatagtttaaatgattctaaaataatattatccaataaaacaaccgaaaatatagaaacagagaattatttaatttcttctaattcaaccacacccataggagatgatgaaaaagcatatgaattaaatgaaacaaaaagtgtttccaaatcccaatctccaagattactatacttagttatttgtttagtaattacaataatagcattatttattggatatggaaaagaaaattcaaaggataaatag

SEQ ID NO: 6681 - DNA, 2865 bp, Methanobrevibacter gottschalkii
  source 1..2865: mol_type = genomic DNA
ttgattggtgtggtctgtgctgaggataataatgtaacagaaaatgcaacgaatgaagattttcaagctattcagattttaattgataatgcaaatcctggtgattcgatatatttagaaaataaaacttatcagggtagtggatctccaataattgttaataaatctgttaatgtttatggggttgattcttctaagactattttggatgcaagtaacaaatcaagtatttttttaatctctaaagatgttaaagttaatttcaatggtttaactcttactaatggttataatgaaactaaaggtggagcgatatataatttaggtattttaaatattaccaactctaaaatttccagtaactatgctgaaagtggtgctatacgtaatgagggtactggtaaattaactatttcaaattctttatttgataaaaattgcggaagttttggtgcagctattgataattatgtcgggtatttaaatattgttgatacaacattcacaaataatgattgtcttgaaggtggagcaatctataacagatttggtgaatttttagtttataattgcacatttattaataactctgcagctcgtggtggtggagtttataataatagaggtggcatgtatatttacaattccagattcatagcaaataatgtttatgatttaggaggaggaattaaaagttggggttcttgtgaagtgtataatacagtattaataaataatactgcaaaacaaggtggaggaatttatgtatctgaatttacattaattgctgaaaattgttttgttgaaaataattctgctcattggggtggtggaatcgctgttgaagcaaaagctactgcaaaaattaaaaatgccactattataaataacttggctgaccgtggtgcaggtattgatataaatatgggatctattgatttacaggactccattgttaataataatgttgcaaaatatggtgcgggtggaatttactttgctttgttgtcttcaacagtaaaaaatacttatatatgtaacaacatcgctaatacatcaggtggaggttgttatatttatggatttaggggtgttgttgtaaatttcactaatgtgattattaataataattctgcttctaaaggtggagcaatttacagtactggaactgcaaatattcaaaacagtattttaaattcaaataatgcttataaaggtggagctatttataatgaacttaatttaacagttaaagattctcaattttttgaaaatacagctgatagttggggtggagctatttataataacttaaattcatttatagataatgttgttttaaattcaaatgaagttaaacaatttggtggagctatttataatgaaaaattagtcaatgctaaaaattctctttttgaatcaaataaagcattacaagcaggagcaatttattctacaaatgacttaataattgataattctcaatttatcaaaaattatgttaaacgtaactattgtgttctaatgcttagtaaaggtgatgtgaatattacaaattcattattcaaattcaacacaaatgctgatgaagggggttgtatttttaattataatgcaaatttattaattgatgcttctcagtttatttcaaatgatgcaagaagttatggtgcagctattgataattctggtaatttaactataaaaaattcattgttttataaaaataaagcatatggtgcagcagctattgataattcaggtaatttagttataatcaaatctaatttcactgataatgttgctactaataatggtggtgctattgacagcaatggtaaattgattattattggttcaatttttaagaataatctcgctggaaataatggtggagcattaatacttagaggagatacgactgtaacccattcgattatctataataatcatgacaaaaatggttatgcaattttcaataaaggtgttgaaaatatatctctttcaaataattggtggggcagtaataatcctgattttgaaaaattattgaacatgggaacttctgatgattttaattggattattatgagtttttcaagtaataatcaattaattcaatataaaaattctattttgaatataaatttcgataacgttaaagataaaatgggtaatgtttataaaattaactcaacagaattgttgcctatttttaaaatagcattgtcaaattacggtgaggttactatatctaatggatttaaatctatgaataaaaatattccattaatcacatctatttcagcaaaaattgataatcaaagtattattttaaaaattactccaacaaataaaagaataattgataataagaacattgttgttgattataatggaaaagttacttataaagttcgtgttgttggtgttgatggaaaaatcgtcggcgcaaatgtagctgtggttatgaaaattgcaggtaaaaaatacactgttaaaactaataaaaatggttttgtatctaaattattcagtttaactccaggtaaatattcaattattacaacatataaaggatttacagttaaaaatagtataactgttaaaaaagtattatatgctaaaagcatcactaagaaaaaatctaaaaagattacatattctgtctcattaaaaataagcaatggaaaaccaattgcaggtaaaaaaattacttttaaaattaagagtaaaacttacactgctaaaactaataaaaaaggggtggcagttgttagctttaagaatttaaaagtgggtaaatattcagttattgttaactatttaaattcaaaggttaaaacaactctaaaaataaaataa

SEQ ID NO: 6682 - DNA, 4419 bp, Methanobrevibacter gottschalkii
  source 1..4419: mol_type = genomic DNA
atgaaaattaataaaattttagtattattatcgtttatattggttgttcttatttgtactaattcagtttcagctttttcagatgatagtaatttaacagatgatttatcaagttttgcaagtgattttgataaatcaaatttaggtcagaatatcgaagtgaatttagataagttaagttttagtgaagattctcctttatcggatactataattgttgaagaagttgaaaaagatcacaatgaaatggatgattcaacaatacaaaaagcaatcaataatgcaaaggcaggagatacaataattatcaatgggacaagttatgtgcactgtcactttattattgataaaaaattaacaataataagtaatgttggaacaactatggaaccatgtggtagtgatgctgtatctggacataggggtattttttatatttctcctgaagctagtgggactgtaatcagtggttttactatacgaaatgatgttgctaaagctgatgattatggaattcttgtaagaggggcggatgatgttaaaattcaaaactgtgttatttataataatggattgtcttctgatgcaattagagtggaaaatacaaaaaacacagtaattgaaaatgtctcaatatcaaaagcatttaatgggattcgaattctagattctgaaaatgtcaacataagtgattcattcattgataatgcaaaatattgtattaatgttattgactctaataaaattaacttagtttctaataatattactaataataaaatttcaggaattgcaatttcaggttcaagtaaaaatattaatattctttctaataacatttctaaagggcatgttggtattaatttaaccgtagctaatcatgtttatattatcagtaattatatcggactttcggataaatatggtgtttatacaaattgtaatataactaaaatggaaattaaaggtaatttcatagataggaatggtaactacaatattttcaatgatcatcgtgttaaaaatttatttgtaaacggcggggagaataaacaagtaattaataataattatatgattggtggggataatcaagataggccagtatggcatcaagtttatgaatatcgtcctggaaagggtgataatacatataatcctgaaacagatacttatacttatgttggggaggataatggagattattatggtcatcaaagtggaacatttatgggttatgtattagctattaatcaatttttgcaatgtccaaacatatatttcactttccccactaatggtgtaactccatggacaaaaactggaaattataatttatatttaagtgaaattactcaagttaaaaaaggagtatattcaatttcaatagttgatgttgatggaaatttagctgaagagattagttctgtacctgttactttttatttaatgaaaaataacacggataataatggtaaacaaaaagctcctcaagaagatgatgtttctaaagttgtcatgatgaaaaatggtactgcaactgtgagattttacccggatgagtttaaggaatctgataatattttacttgcaagtttcccaggtatcggcaataacatatattctaatatgtatagtccatataaattattcagcattgatgataaattcatcccaggaaatgtaactgaaacaaaagtcactgtttctaatttaaatacatatcctaactcaaatgcaatttttaaagtaattttaatagatttaactggtaatgctattgcaaatgagttagtaaacttcaaaattaatggtaaatcttatggtgctacaacagatgttaatggtgtagctaaaataaagatttcacaatcaaaagaaggaacttatacaatagctgtcaattatattggtgatgatattgattatacttccagtagtgctcaagctaaagttgccgtcaaaaaaatatctactaaaattctatcttcaaatgtgtatatgattccaaatattgctgaatattattctatcactttaaaagatgcatcaggtcatggaatttcatatcaaaaagtgacttttaaacttaataagaaaatatacactgtaaaaacaaataaaaatggtgttgcaaaacttaaacttaaatttactaaaaaaacaacttattatattcatgttaattttgaaggaaatagtaaatacaaagcggtttcaaaaacaaataaaataattgttaaatattcctctaaaattgctaaattaacagttcctaaagttacaattcttccaaaaacatataaatattacacaatttctctaaaaaatactaatggtaaaggaattgcaaaacaaaaaatcactgttaaattaaatggtaaaacttatattaaaacaacaaatggtaaaggtaatgttgcaattaaagttaaattctcaaaacttggagcctataaagtatctgcaatttacaaaggaagtaaaatttataaaaaaacttcttcaaatggtaaaattgtagttgccaagtcatctactaaatttacagctcctaaagttacaattcttccatatgagaagaaagtatacactacaactttaaaaacaagtgctggaaaagctttaagcaaacaaaagattaccattgttcttaatggcaaaacatattctaagacaactaatagtaaaggtcaagctagtattaatgttaaattttcatcagaaaatgtttattctgttatattgaaatattctggaaatggatattataaatctagtaaagcaacaggcaccataacagtttcaaaaatatctactcagctaataagttataataaaacatttgctattgattcaactaaaaacttcaccatatctcttaaagataaatctggtaaaacattatcaaatcagaatatcacttttttatttaataatcaaaatttaacaaaaataacagatgaaaatggtattgcttctgttaatttagatgcaaatgtaggatcttttgaaataatctcaaaatattgtggaaataatcaatataaatctatatccaatacaaacatgattacaatttctaataaaacaaatgttgtatttgttgatgcaagtttgccaaattctgaaattcaaaaaattttcgatgattgtaaaaatggaagtaatgttgaattcttagggaacagttataatgatatttcattaaatattaacaaaccattaaatatttactctgaaaatagaattactttaaatgctaaatcaatgagtccagtatttaaagttttagcatctgatgtgaaaatttgtaatttatccattgttggaaactcttatgatggaattgagattaacaatgctgttaatgttgtaatatttgaaaataatattttaaatcgtttggatcaatctaaaataggtgaatatatgttgagtacaatttctcttccagggtatgggataaatgttattgactcaaaaaatgttgaaatttctaataattcaatcaacacatttgaaagtggaatttttgtttcaaattctaataatttaagtattaactcaaatgtgttaaaagaaaataattatgggattaagtatggatttaatgtttcaaattctaacattacaaacaatatgatttctgaaagtattggtttatatacaaatttagttcctgaaggtccgcgcggatatggtgtatttttaaataattctgcagtaaatgtaacaattgctaaaaataatatttcttggaatcatttagggatttccattgatgcaaattattcaacaggtattttaataactagtaatttaatttctgataatgtacttgagggaattaggtttaatgaaggttatgatttggctaaaaatgctattgaacctgttgtgactgataatgcaatatatagaaatggtagaggtccaagtatgatgattttaggtgaattaagtgcaaaccctgcaggaatttatggtcctggtgcatttaatgattctttaaaattaaaattaggtgctaattggtatggtaaaaatctgattgttacatgggataatgatactggggttgttggttatggaacaatgtgtccaagaattaatacaacaggaattgcatttaaagagataacttgtgtgaatccaggtacttattctattacattttataaaaatgatgaagttgcctcaaaattgccagtatttaatatgtatgctacgttaaatgacaatgttgaaattgtgtttgatgttataaatggtgttggggtgtttacttttgatactcaaaaattcactactggtgaaaatgtaattaaagtgtctagtggttctttaaatgattctgataggatttttaaagttgaaatgtctaagacattagatgatagtgaagttccaatttaa

SEQ ID NO: 6683 - DNA, 549 bp, Methanobrevibacter gottschalkii
  source 1..549: mol_type = genomic DNA
atgacaattaaaaggtgtagttgggtaactgatgaagaaatctatattaaatatcatgatgaagaatggggagtcccaacacatgacgaccaagaattatttgaaatgcttgttctagaatcattccaagcaggcctttcttggattacaatacttaaaaaaagagaaaatttcagaaaagcatttgataactttgattacatgaaaatttctgagtataaagaagataaagttaatgaattaaaagaaaataaaggaattattcgccacaaaggaaagattaatgctgcaatcaataatgctaaaatatttatggaaattcaaaatgaatttgaaagctttgattcatatatttggggatttagcaatgggaaaataattaaagctgaatttaaaactgaatctgaattatcaaaaaccatttcaaaagatttaaaaaaacgtggaatgaaatttgtaggtccaacaatagtctattcatatcttgaatctattggaattattgataatcatcaaaaaagttgttttaaatttaataaaactgattaa

SEQ ID NO: 6684 - DNA, 1353 bp, Methanobrevibacter gottschalkii
  source 1..1353: mol_type = genomic DNA
atgaataacgctttaaaattgaaattgagcatgttttttctcatgatgtttgtcatgattttttatatgttggtatttggaaaagttaatattgtaattggtttaatggttgttgttgcagcgttattaaatttaggtaatgatttatcatacaatcctaaattatcctttattaaagtattttctcttttaatgattttaggatttgcatcttatcttaataatcctataactgcttttggttgtattttaacatttttcatagtatttggaacaacatttacatcttatcatttgttcggaactcatgtttatttgccatttttaatgatttattttatgatggtagtcattccagtacctcttgaagctttgccgatgaggttattatctttggcaatcggagctattttcattgtgggcttaaatctaaaggttaatggtaaaaaatattctaaattatctaaatttacaatttcttcactgattaatgaacttcttgaagcaattgatttgaaattagatggaaaggaagtttcaatggatagttttaatgtagctaatggattttataggagtattttttctaaatttgaatataaatatttcccaaatcaaaagcatgaatgtatcttaaatattctaaaatcttttcaatatatcggttggagtttatctaattatgaattgtctgtaaatgaattaacccatattaaacgaattttaaatgatatcaaaaattttaaattttcagaaattgaagaaattacaggtgaaactaaagaaatgaatttaattcttttaaacttaaaaataattgtaaacgaagcaagtaaaaaaaatatagaaaaagagaagaaaattccaaataaatatgttgtattcaatgtattaaaacatttaattaaaagacaattttcatttaaatcagctaaattcacttttgcatttaaaatggctgttgttttaacattatgggaagttataacattaatatttaattttccatatacaaaatggttatattttgcatcaattccattaatgcttccatatattgatgatgttgcacatactgctaaaagtcgtatgggaggaacattaattggagtttctgcatttgcagtaatcatgattgctttacagtatattcccatttcttcttatattgcaatgattattgtattgatagcctcactatttggtatggttttttcacttcaaaataaattgaaattatcctcattcacaacattaatgtcagttacagtatctctgatgtatatcacaccacctaaggctattaaaaatactgtgggttattgttgcaatgattgttgtaacctttattaa

SEQ ID NO: 6685 - DNA, 426 bp, Methanobrevibacter gottschalkii
  source 1..426: mol_type = genomic DNA
atgattgttgtaacctttattaattatggatttttgccattttctgttgaaaaagagaccaagaataatttaaaaacatcttatgtgttaaatagatgttttgtaaatttaattaaattaaaatgtgagggtaaaaatattaacaaaacatcattgcttgctgtaagtagtatggttcatgaaaatattgaattaactaacaataataaagaattgtatcaaatgcaaactaaaacaacgaatatttctaattcaattttaaattatattgaaatttatggaatatcttcagaaatgaaagttaaaattattaaagtaatcgaaaataaaggtaattttgacaatcatgaaaatattattctatattctataaattatgtagtgaatttattgaatgaagaaaaaaatttaatagaatctatatga

SEQ ID NO: 6686 - DNA, 1143 bp, Methanobrevibacter gottschalkii
  source 1..1143: mol_type = genomic DNA
atggtagagttagggttagggatgatgagactcccggttttagatgaaaatgatttttcaagtgtagattatgatcaaattacaaaaatgattgatgcattaatggatgctggtttcaactgttttgatactgcttatccatatcatgaaggtttaagtgaagttgctttaagaaaatgtctggttgaaagatatcctagggattcttttaaggtcttcgataaattgcccacttttgcaattaccgaagaatcacaacttgaaccaatttttaaagagcagcttgaacgatgcggtgttgaatatttcgattattatttgatgcataatgtaagcggatattctgaaaaaggatggttggatgttgattcattttcatttgcaaataagaaaaaagaagaaggatacatcaaacatttaggattatctactcatgctaatgcagaatttttagataatatgttaacaatccatccagaaatggaattcgttttactccaaattaattatcttgattgggaagatgaaggaattgaatctaggaaatgttgggaagttgcaagaaaacacaataaaccaataatggtgatggaagcatttaaaggcggttttttatctgatgttcctaaagaagcagaaaaactcatgaaagagtatgctccagacaaatctgttgtatcttgggcaatgagatttgtagctaatttggatggtgtatttctagttttaactggtgcaagcagtcttgaacaagttgaagaaaatattgttgagtttaataatgcaactcctcttaatgatgaagaattaaatgttattagtgaagtttcagagattattaatgctaatattactgtagattgtacaaaatgcagatattgtgttgattcttgcagtgaggagattgatattgcaaaactttttgatttatacaataaagagaagattcttggtgaaaatgactggtctcctataggtaatgcttatgtgaattattctaaaattcctggtgttggaattgcttcagattgtactgaatgtgaattatgtattgaggaatgccctcaagaaatcaatattcctgaagttttaaaagatgttgcaaaaacatttgaaactgaaggttatggttttacaaactga

SEQ ID NO: 6687 - DNA, 351 bp, Methanobrevibacter gottschalkii
  source 1..351: mol_type = genomic DNA
atgatacctggtatgaacaaaagacaaatgaaacaaatggaaaagcaaatgaaaaaaatgggtatgaaaatggaggaacttgaaggagttcgtgaagttgttattcgttttgatgaaaaagagttaattattgacaatcctagtgtgagtttaatgaatgtgatgggtcaagaaacttatcaagttgaaggcaaagctcatgaagtagaacttgattatgaaattgaaattccagaagaagatattgagatggtagctaatagtgcaggagtttctgcaaataaagcaaaagaagcacttgaagaatgtagaggtgatcttgcagaagctatcatgaaattaaatcaatag

SEQ ID NO: 6688 - DNA, 744 bp, Methanobrevibacter gottschalkii
  source 1..744: mol_type = genomic DNA
atgactcttattgtgcatatttcagatttgcatgtttgtgaaaatgaatttgatgaagatatttttatgcaagctgtttctgaaattaataatttaaaacctgacatgattatattaactggggatataactaatagcgggtattactatgagtttcaacaagcaactaaatatttggagatgtttgaagctccgttatttgctgttccaggaaaccatgatgctcgtaatttgggttatcaaacttttgaagaattaattggggagcgtagttggaaattaactatgggcggtaatttgactgtaattggtcttgacagcagctctccggatgaaaatagaggacacattggtaatcctcaacatatgtggttagaacatcaattagatgaatgtacaattaatgagaacttttctatcgtagctttacatcatcatgtaatttctattcctcaaacaggacgtgaacgtaatgttttatctgatgcaggggatgtattaaaaacattaactaatcatgaagttgatttggtattgtcaggacataaacatgttcccaatatatggaaactaaacaatactattgtcgttaatgcaggttctctttgttctaaaaagcttagaggtaaaataaagaattcttatatgatatataatgttacagaagatgaaatagaaatttttctcaataatattaatggggaaaaatttttatttggaaaatacgcgagaaatgtgttataa

SEQ ID NO: 6689 - DNA, 1026 bp, Methanobrevibacter gottschalkii
  source 1..1026: mol_type = genomic DNA
atgaaagtggttgtagatgcttctaatgtagcttttagtgttaaaaatgaaatgggacaacctcaaatgtctaatattcttgcagctgttaaggcattagaagaaggtgaagatgaatttgtaataattgccgatgcatcacttcgtcatgatattgatgataaagaaacatttttgaaattattggaaagtgagaacgtagaagaagtccctgcaggtaatgatgcagatcattttattttggatattgcttcacgtgaaaaagcaaaagtattgtcaaatgataaatttagggattatgctgctgaatttaggaatatttcttctattaggattccattcataattgagaataatagactaacatttggtaaacctaagaaagctaaaaaagataaaaacatccttcaacacatatgtgatgaaattataaaagaattgaactttaaaaaatgggaaatttacacaggtaaagagggtttagaaatttcaccattaaatattgctaagcaagcgattattcgcattgataatgagaataatacggaatccaaacttgaaaacatcttttctaaaatcccaatgtttaataaaattgtagagatggttgatgatgttgaaatagctgcaccatatgtgatttttgtattggtgcatcctaaagattataaacttgctgttaaaaatgcaggtaacatatccgttactgttgcagatagattaggccttgagaaaaaacctctaattgcagttagaaatgatttattcaccaaacaaggtaattttgaattaaatattatgttggctgatgaagtaactgaatatgctccatataacatttcagttcgtgtatgtgatagtgatgaaatatttattaaaagaaattcaaggaatattgcaagcacaattgctggaaggctcggatcatggaaattcccatttgtttctgtaaaaccagatatgcttttagaaaaacctggtgattttgaaatagaactggaaaaaggaggaggattagatggttaa

SEQ ID NO: 6690 - DNA, 1203 bp, Methanobrevibacter gottschalkii
  source 1..1203: mol_type = genomic DNA
atggttaatccattaactaaatctttaattaaggtaactactaacttaactccaatttctgttggaactaaattttttccaacaaattcactagaaacagaatatgttgaattatttaattatactcaaactattctttttgaacttgataaagcagaaataacctccgattccattttagaaaacttaattcgggatgttggtgtggaaaaccttccaaaagattataatttttatgaattaaaaccagctgaaaaccggattgaagaatatgcattagtaagtaatattatcatgggcaatgatcgttatttttacatcgaacttcaaaatccttctcatttaattaatatttttgtaaaaatcattgaaaatgaaaaaggggaagttgtagaaaaaactgcaacagaattagttgctaaaatgctaagtaaaaatgatgcgattcgtgtagctattgaattaattggtattggtttgtctgaaggaattcaagtaatttctgctgttggaatgactggtgcggcatctattgaaagagcaatacattatactcaaaacgtaggcagttttccaggtattgcatttactaagttaggtggggaatatgcgcttgtttttgattctccatttttacttcaagaatcaaggcctgttgacttggaaaattatttattcattgatttaatcgattcgactaaattcattgataaaaatggtcgtaatcaacttgttgatttgatgacaggtattaaaaatttcattgaaacggaatgtaatggtgagttagaagggtatcgtgaaggtggggatgattttattgcaaggtttccatctaaagacttagcaatacgcgctggacttgatgcagcatggttcgcacttgataatggtgcgaaaataagggcaggtgttggtagaagtagaagggaagcaggtgagagagcccaacttgttgatgatttaaaatcaactgcaccattgtctttggttgtatttgaattagcaaatggtttgtatgcatataatattccgtctgaatttacaagaactttaattaatttaatagaaaatgaaaaagcaaaattaattggtgtttttgtttttgtgtttatatttgcatttataatgtccattttagggcttggagtatttagtttcataggtgttataatagcattagtttatgcatttgtagcttaa

SEQ ID NO: 6691 - DNA, 378 bp, Methanobrevibacter gottschalkii
  source 1..378: mol_type = genomic DNA
atgagaagaaaaaaagatgataagagggttttattttctccaaatagtaatcgtccaaagcattctaataaaagaaaattaaatttacctaattttcaacgtcaacctcaacgttcacgcaaacaaagtaaatggggcaatgttactgtatttcttattattttagctttagttgcatttgttgttggtgcaggaatgggggtatcattaagttttgataatgatgatggtcctcattggaagaatgttactgaagagatgactactaatttaaatgagactgataattttacttatgatgaagaagtagatggtgttgattttaatagtaatgaaacattaactgaactaaatgttactgttaaaccatcatattaa

SEQ ID NO: 6692 - DNA, 1224 bp, Methanobrevibacter gottschalkii
  source 1..1224: mol_type = genomic DNA
atggagtttattaaagatttatctggtggattttctgttatagaaaatcttatggtatctggagctcgtgaaggtaaatttggcgttgcaattatctattcaccaaatagtacagcatctgcagttttcacttctaataaagtagttgcagctccagttaactatactaaaaatgtacttaaaaaaggaattatttcagccgttcttgtaaatagcggcaatgctaattgttttacaggcaaaaaaggatttaaagattgtgaaaccttagctgaattagtgtctaatgatttaaatctacctaaggatgaaattgctatttcttcaacaggagtcattggccgggaaatgccgattgatattatttctaaagttgcttatgaatcactttcaaaattaggaaacggccctgaaaattccctggccgctgcaaaagctataatgacaactgatactttcccaaaagaatgtgcaattgaagttacattaaccactggtgaaactgttaaaattgcaggcattactaaaggaagtggaatgattgctccaaatatgggaaccatgctttcatttattgtaactgatgctgtaattccatctgatgaaattaataaagcattaaagaaatctgcagatatcagttttaacatgattgttgttgatggggatgaaagcactaatgatacctgtctgatgatggctaatggtacatctaatgttgaagttgtaaatgaaggtaaattggattctaatttccaagaagctctaaattatatttgcattgatttagctaaaaaaatggctcgtgacggtgaaggcgctactaaattcattgaagctaatgtttacggtgcaaaaaatgaaacagatgcaaaattggctgcaaaatcaatcatatcctcaaatttatttaaatctgcagtatttggtggtgacccaaattgggggagaattgtatctgcaattggttattcaggttgtgatttgaatcctgatattgtaacaatagctattgcagatgattcagatgatgtggatcttgtttgtaatggtaaaattttagcatttgaaaatactccaaatcttaaaagagctgaaaaaataatgcaatcaaaaaatgttaaagtaaatattgacatgcatctaggtgatggtgaagcaactgcttggggttgtgatttaacatatgattatgttaaaatcaatgcagaatatactacataa

SEQ ID NO: 6693 - DNA, 105 bp, Methanobrevibacter gottschalkii
  source 1..105: mol_type = genomic DNA
atggctaaagttaaaggaactaacagaagaactagacaaaaaagaagttacactaaacctggtagtaaaagaggaaggggagttaaacaaacttggaaaaaataa

SEQ ID NO: 6694 - DNA, 591 bp, Methanobrevibacter gottschalkii
  source 1..591: mol_type = genomic DNA
atgaatggacatagagctcatggattttcaagtgtacattttttagattctgatgaaattttaaatgagttgaatcttaaaggtgatgaaactttcatggatgctgggtgtggtgatggccacattgcaataaaagtaattgaggactatcttccaaaaggcactgtttatgcagttgatgtttatggagcgtctattgaagatatggaaacatataaaaatgaaaacaatgttgaaaatttaattaatattgaagcagatattcctaaaggaattccgggtgttgaagatgagtctgtcgatgttgttttgatggttaatgtttttcacggatttaaagcttcaagaactattgatgatgcaattgaggaacttaaaagaattattaaaaaagatggtaaaattgcaattatggattataaagcatgggatgttccaaagggaccaccaactgcatttagaagttctcctgaagaattagaagaaatttttaataagcatggtcttaaaatgacttatctaaatgaagaaattggtgaagatattcctgagggtaaatctcataactttattgtattccaaaaagagtaa

SEQ ID NO: 6695 - DNA, 804 bp, Methanobrevibacter gottschalkii
  source 1..804: mol_type = genomic DNA
atgaaatctatgaaaactgtagctgttgcgattatagcaatagtagttattgttgctgtagggttatatcttactggttcagtaggtacttcaaatggagacctaaatggccaagatgttcaattagctgctgcagctagtttgaaaaatgtttatgatgaaaaattaatccctatgtttgaagaaaaatatcctggtgtaaaagttactcctacttatgcttcaagtggggatttacaaaaacaaattgaaaatggtttaaaagctgatgtgttcatgtctgctggcaataaacagatggatgctttaatcaatgaaagttatgttgataatgattccaatgttaaatttttagaaaacaagcttgttttaatcgtatctgctgattcaaatgtgaatgtctcttcatttgaagatttaaaaaatgtaaatggcactattgctattggtgatcctgaatctgtacctgccggacaatatgctaatgaatcattacataatcttggtatttgggatgatgttgaatctaaattatctttgggaactgatgtaacagcagtattaaatcaagtagctcaaggatctgctgattgtggtcttgtatacactactgatgctaaatctagtgatgaggttaaagtaatttgtgaagctcctgaagattctttaaaagatattgtttatcctgtagctccaattaaagattctgaacatgctgatgctgcaaacaaatttatggagttcttacaaactcctgaagctcaaagtgtatttgaagactacggatttacaattcatgaatag

SEQ ID NO: 6696 - DNA, 675 bp, Methanobrevibacter gottschalkii
  source 1..675: mol_type = genomic DNA
atgatggattggacacctattttaatttctatgaaaactgcaagtttatcaatttttataactttttttttaggtttaattgttgcttggggcattgttaaaattaaaaaggactcaataaaaatagtacttgatggtatttttacactcccaattgtacttcctcctactgttgtggggttttttttattgtatatttttggtgttaggggtcctattggtagttttcttatagacttttttgctgtgaaaatagctttttcatggtccgcaacggttattgccgcagttgtcatgtcttttcctttaatgtatcgttctgccagaggagcatttgaacaagtcgattctaatttattggatgctggtcgtacattaggcatgtcggagtggaaaattttctggaaagttttatttgcaaatgcattacctggaattatcagtggtggaattcttgcttatgctcgtggtctaggtgaatttggtgctacagctatgattgctggtaatattgcaggacaaaccagaactctccctatggcggtttactccgaagtggctgctggcaatatgggggatgcttttaattatgtaatattcattattattattgcatttatcgctattttcattatggattttgtttctatacgtaaagaaaaacaatggaaatag

SEQ ID NO: 6697 - DNA, 1185 bp, Methanobrevibacter gottschalkii
  source 1..1185: mol_type = genomic DNA
atgagatgtgttggtactgttgtgcgtggaataagaacaccaattattaaagaaaatgatgatttggcaaatatagttgtagattcagttatggctgcaaaagaaagtgaaggatttgaatttaaaaataaggatattgttgcaattaccgaagcagtagtgggtatttcagaaggaaattatgtaactgttgacgacgttgcacaagatttgcaaaacaaattcccctctaaaaatataggagtaacaaatcctattttaagtagaaatagattttcgattattctaaaaggtattgcacgaggaatggacaaaattacccttttaacttcttttcctgcagatgaagtgggaaatggaattttagacgaagaagttttagatgctagtgaatataatttagcaagtgttatttctgaagaagaatacaaaaaaacattcggatcctggaaacacccatttactggaattaatatgattgatctttacagggaattaattgaaagtgaagactgtgaagttgaatttgttttttccaatgatgtaaaaacaatacttgattataataaagacattttaacttgtgacatacatacaagagaaaaaacaacaaaattacttaaatccgagggagctaatgtttatggattgcacaatgttttaagtgaaccgattggagactccggttttaatcctgattacggagtgctcggttcaaacaaagcaactgaagaaaaattaaaattattcccaaaaacaggaaataaattagtcaatgaaattcaaaaaagattaaataacattactggtaagcaaattgaagttatggtttatggtgatggagcatttaaagatcctgtaggacatatttgggaattagcagatccagttgtttcaccagcacatacaagtggattaataggaactccgaatgaaattaaattaaagtatgtttcagataacaaattcgcaaatcttagaggtgaagaattaaaagatgctattaaagaagaaattaaaaacaaagacaaagatttgactggacaaatgattacacaaggaaccacaccaagaagattaactgatttaatcggttcactatgtgatttaacaagcggttctggagataagggaacaccagtcatatttatccaaggatactttgacaatctagcaaatgactga

SEQ ID NO: 6698 - DNA, 594 bp, Methanobrevibacter gottschalkii
  source 1..594: mol_type = genomic DNA
atggagcataaacatcatggaaaatcaagtgcaaagtttctagattctgatgagattttaagtgagttaaatcttaaaggtgatgaagtttttatggatgctggatgtggtgatggatacattaccaaaaaagcaatcaaagattatcttcctaacggttttgtttatgcagtagacagttacgataaggctattgaattgatggaaatatataaaaaagataatgcaattgaaaacttgattaatattgaagcagatatttcaaaagggattcctgatgttgaggaagattctgttgatgttttattaatggttaatgtatttcatggatttattgaaagttcccatcgtgatgcagttattgaggagttatctcgtataattagaaatgatggtagaattgctatcatggattttagacctgttgaattgtcgttcggacctccaattgaaattaaatgtggtccggatgagttggagaaactttttaatgaatatcactttaaaaaaattcatctgaatgaaaaaatgggtccaaaaggtcctaatgggaattctcattatattataatatttggaaaggagcaattttaa

SEQ ID NO: 6699 - DNA, 711 bp, Methanobrevibacter gottschalkii
  source 1..711: mol_type = genomic DNA
atgatttttgctgcaattctggctggtggaataggatcaagaatgggtggaactgacactcctaaacaatttttaacattaggaaataaacctgttattattcatactattgaaaaatttgttataaatgaaaaaattgataaaataattgttttaacacctaaaaattttattaatcatacaaatcatttaattgaggaatatattttgtataaggatgacattattgtcattgaaggtggcagaacaagaaatgatacattgatgaatggtattgattatattaatgaacattatggaatagatgaagattcaattatcctcactcacgattcggtacgtccatttgtgactcataggattattgaagataatattgatgctgcaaaaaaatatggtgcatgtgatactgtaattcctgctactgatactattgttgagagcatcaatggtaagactattgaaagcattcctgtaagggattattattaccagggtcagacaccacagagcttcaatataaagaaactttttaatttaatcaatagtttaacggaagaagaatctaatattcttacagatgcgtgtaaaatattcgcacttaaagatgaagatgtatatctagttgaaggggaattgacaaatattaaaatcacatacccctatgatttaaaactagcaaatacgatacttgaggatattcatgattaa

SEQ ID NO: 6700 - DNA, 1017 bp, Methanobrevibacter gottschalkii
  source 1..1017: mol_type = genomic DNA
atgattaatattgtttatagattaaaatctccaaaattttttgaagaagcaattgatgaaattgaattagaaggggttattgttagacctacttatctttcaatatgtcaggcagatcaaagatactatcagggatcacgtccagcggaaatacttgaaaaaaaattacctatggcattaattcatgaaggaattggtgaagttgtatttgatgagtcaggtaaacttaaatctggagataaagttgttatgattccaaacactcctgagggaaaagatgtttatagggctaattactcttatgattccaaattcaggggtagtggttttgatgggtttacttctgatttaattaaattacaatctgatagggttgttaaaatacctaatgagtttaatcctcatgttgctgcatttatcgagttaatgacagtatcatatcaaggaatttccagatttagtgaaatagctatcactccaaaagatgttttgggagtttggggagatggaaatttaggattcattacagcacttttcctaaaagagaaattccccgaatctaaagtgtatgtatttgggaaacatttggaaaatcttaatttgttctcatttgctgatggtatttatcagatacataatgttccaaaagatttgctaattgatcatgcttttgaatgtgtaggttcaagcgcatctcaatcggcaattgaacagatcatagatttaatcaatccgcaaggatcaataaacttatttggagtaagtgaataccctatacctctgaatactcgtatggttttagaaaaaggattgactattcagggaaatagccgttctgaaagagaagattttgttggagttgtagaaaccctaaaacaaaaccctaaactttttgaatatttgggaaaattagttacaaatatatgtgaaataaattcattgaatgatttaaaagaatcttttgataaagactatatctctaattttggtaaaacaattttaaaatgggacaaataa

SEQ ID NO: 6701 - DNA, 525 bp, Methanobrevibacter gottschalkii
  source 1..525: mol_type = genomic DNA
atgaaaaaacaagattttctaatgaaaacaaaacttatacaagaaacttttaatgataaaaggaaaattaagtgccagattcctatacagaatttaaaattagaaaaccatatccatcaagagggcagcatttttattactgaaaatgatgagattattgatttagaactacagctaacaaactttactgaagatgaacttgtaaaatatgttgaacttgcagaagcattgtatgaaacaaacaacaaatatgtttcaatatacataatctgcccaaatacagttaatatttgtgttaaagaatgtgaaattaaatctgaagcggaatttagcataaaattagcagctgttgaagagaatcctgcagaaattttactcaatataataaaaaataaaatcatcaaaggcgaaatacttgataatgaagatttatatgcattatcaatgatgccattaatatgtaaaaaagaagagagaaattattttagaaaagaatatttcaaaataattaataatctcaattaa

SEQ ID NO: 6702 - DNA, 1365 bp, Methanobrevibacter gottschalkii
  source 1..1365: mol_type = genomic DNA
atggttaataaaaatgtagcattaatgaggggagaacctgaaatagctgtaaaaaaattagctataccaattatgatatcaatgattttaactgcattatacaacattattgatggtatttgggtagctggtcttggaccaacggctattgcaggaattggatttgtaacaccaatatttatggtgttaaacggagcgagtgttggacttggaaacggagcaacaagtagtatttcaagatttattggtgcaaaaaaccatgaaatggcaaataaatctgcaacacattcattatttatttttttaatagcatcaatcattttaacaattattttcatgatgatgcaaaagccattacttgtaagttatggagcaagtggacaaacattaaatgaagcaatagcatatgctacaccattatttttaggattgataggatttatgttttcaaatggatgtagtggaatccttcgtggagaaggagatatgaaacgtgcaatgtatgttgtaatccttacagtcatattaaatgcaatattagatccgttatttatttacacaataggattaggttcagcaggagcatcccttgcaacaatagccagttcatcaattgcggcattagttatgttatactggattttagttaaaaaggacacttatgttaatgttactattaaaaaattcaagttagacatgaatttaacaaaagatattttaaaagttggaatcccctcatcacttgatatgctaatcatggcgattgcaatgtccatttatctaatcgtaatatctcaagttggaggagattatggaatagcaacatttacatctggtcaaagattatatttatttgcaataatgccacttacagctattggatctgcagttattgcagtgtctggaagtgcatttggtgctaagaatggtgattatttatcacggacccatatttatggttcaaaatttggtttgatattaggaactataattactttaattttagtaatttttgcaacacccttatctacattatttgcatatacaccggaaaccaccaatttagttccgggaattgcattatatcttcaagtagtatgtccaacattaatattaacaggcataggaattccatcaagctttttttatcaagggattggaaaaggaatttatagtttaatgtttaccatacttagagaaatcatatttgtagttcctttaatctttttatttgtgtacatattccatttagatattttaggaatctggttaggattatgtataggaagggcaattgcaagcacattgaattacatatttgcaagatatgaagtcagaagaattagatcaaaatttggaaattaa

SEQ ID NO: 6703 - DNA, 1836 bp, Methanobrevibacter gottschalkii
  source 1..1836: mol_type = genomic DNA
atgagtaaaataaattttggtaacattgttgaaatcataaagcatgattttaaagcgtcattttcaaatcccatagtgacaattgtattaattgcaataattattctaccttcactttatgctcttctgaatatccaagcatgttggaatccatatgaaaatactaatgaagtagaatttgcaatagctaacttagataacggatcaacatttgaaggtacatatttaaatgttggaaatgaaattgttaaagatttgaaaaataatactaaattcgattggaagtttgtaactgaagatgaactgcggaaaggggttcatgatggggattattatgcaggcattataatacctaaaaatctgagtgaaaatatagcatccattacatctgataatccaaaacaagcggaacttgaataccttgtgaatatcaaatcaaatccagtagctacaaaattaacggacacaggtgcaaatacagtttatactacagttaatgcaaaaattgttcagattataaaccttgcagcttacggaaaactcggagatttaaaagatggtctttcatctggtgcaggtcagttatacagtggtggaagccagctttctgcaggtgctgcaaaaatatcttccggtgcaggacaagtatcctctggagtgagtgatgttcaaaatggagcaagccaagtgcaaagtggtgctaatcaagttcagcaaggttcatctgcaattaacaatggtgcaagtgatgttaagcaaggatcagcatcaattaaacagagtgctagtgacttagaaaaaggatcacaacaaatacaatcacaggtagatccatcaacacttccagaacctatgaaacaatatgttgaaggcaatattaaacttgcaaatggaagcggagaattagctaaaggttcatcccaattagccgatggttctgtaaaacttgcagatagttcatcgaaattggctaatggtgctagcaatgttgcgggtggtgcaaatcaagtagctggaggttctgttgaacttgcaaaaggatcattaagccttgcagcaggtgctcaaatgctttcaggttctgcatcacaagcattgttctcagctgctggagctctaagttcatctgcaaattcactttcaagcattactggaatcaatgaaactgaacttggagattatttctactccccaataaaattagataggcaggaagtattctcagtaccagattacggatccaatgtagctcctttctatatcgtattatcaatgtgggttggtgctattattacttgtgtaatgatcacaccgggaaccagtcaagggacaaaatacaaacccgttgaaatgtactttggtaaagttatactgtttgtagtaatgagcatgctccaggcggcagttactataagtggggcttatatcttaggcatttatataagtaattcaccattatttatattctctgcaatactggtatcggtaatatttatgattttagtatattccatcatatctgcattaggacaagtgggaaaaggaataggagtaatacttttagtgcttcaaatatctggaactggaggaatttacccaattgaaattatgcaagatttcttccaaacattatatccgtacttgccaatgacatatgctattacattgatacgtgaagcacaattaggtgttgtttggtctaattaccttccagcattagttgttcttgtatcgattggaatagttaccattattgtggctgcacttattaaacagaaagcagataaatcctcaaaatactttgaagaacgtttaaaagaaagtggattattttag

SEQ ID NO: 6704 - DNA, 204 bp, Methanobrevibacter gottschalkii
  source 1..204: mol_type = genomic DNA
atgaatttaatattgagtaatgaaaaagacattaatatgaaattttgtccaaaatgtatgagagaattaaagaaggtttttcatggtgaaccaacaactgaattagctattgagtcattagaaaatgaaataatcattggaaatagttgtatgggcaattacaactactactgtgaatactgtgatgaatttttccaattataa

SEQ ID NO: 6705 - DNA, 927 bp, Methanobrevibacter gottschalkii
  source 1..927: mol_type = genomic DNA
gtgagtgaacaaaaattagaagttttcaatgttttaaattttttagataatggctatgagattgatgatattttaaatgaaggtaaattcggaacttttccttcagcacaggactgtattaaatacatgattgatgaaggatatctcaaaggtgaatttaatgctgcaattcataatgatggcaaatcattaactgcagaagaggtatctaaaaaatatacagttgctgaattgaaagatcttttaagagaaaatggtttgaaagtttcaggtaaaaaacaggaacttgttgaaagacttttacctgcattaagtggtgaaattacagtagagccagataatggggaatctgttgatttagcattaactgataaagcacaagaattcttaaatgaaaatgattggatggatttatatatgttcgcacttgttgcattcaggtttgaggattatgaaacctacagaaaaaattcatcagaagacaatattcagactgctttaaaattctgtgatgaaattatttcaagagcattaatcgctaatcaatttttagtattcatcgatgcattatctgctaaagctcatgtttatgcttatgataaagattatgaatctttcttagattatgatttacaacgtttcattttaggattaaatcctatagtaatggattcacaaacttatgctaattatgatgctattaattatgcaaatgtaattaatttaaagaatgtaattgaacaacttgatttaggtagtttaaagaaaagatttgataaaatatgggataagtctaatattaaaagtattactgtgcctaaaaagacttgttataaaattttacagaaagctttggccggttcagatgttgaagagctcaattttaatgtaactcaaaaatattttgttaggaaatttggagtttaa

SEQ ID NO: 6706 - DNA, 591 bp, Methanobrevibacter gottschalkii
  source 1..591: mol_type = genomic DNA
atgagaaataaagttgctggaattgtctttattgttggtagtttgtattatgttctagctgaagccgtttctgcaactttctttaatgcttctttatttaatacttattcttttcataccatttccgaacttggaatccctaatgtaaattcccctttgttttggttaatgaattctgcgtttattttaattggtttgacacttatttttggtaatttttataaatttaaagattttttagttaaaaataggattataatctatattttaacactaatgacctcaactggagtcattatggttggttggattcatgggggaaatccatttactttaggttatcatatgttaggtgctatgatggctatttttggtggtaatgttcttctgattgttatttcaagatccatgtctgaatattctaaatttcaaaaaactacattggttctaggaatatttggtttagctgtattttggattatgtttttcaatatggaaagtatttacatgccggtttttgaaagactttcagtttatacaatgattatctggtgttttttaactggttgttatataatttctagagagtaa

SEQ ID NO: 6707 - DNA, 249 bp, Methanobrevibacter gottschalkii
  source 1..249: mol_type = genomic DNA
atgacaaacttagataaatctgttgaagaagaaattttagcaatcattgaaaaatatcaaaaagaagatactaaacttttgaattatcttattactgatgatgaaattacctttttctcaccattagcaaatggtaattcaattactgcagaagacttacacaaagttgcagatattttaaaaggaacatttaaaggaatgcaaattgttaatcaagaatacagatttactttcgaaatcggtttataa

SEQ ID NO: 6708 - DNA, 678 bp, Methanobrevibacter gottschalkii
  source 1..678: mol_type = genomic DNA
atgtctgaggataatgatcttaaaaattttcttataaaaaaaggtgcaagcaaagtaggatttgccaatgttgatggattagctgagggattcatagatttgccttatggaattagtcttgttttaaaaattcctaaaaaagcaatgatttacatagaaaatgaagattatgagtcttattggtcttgttttcattcactaatagacagattaactgaaatttccattaaaggtgaaaagtacatcaaaaatcacggatatgatgcatttgctcttacaatgagtagaaatgagtgcgatatgaaaagattattaagtatattgccttataagacaatagccactaaatccgggcttggttggattggtcgttctgcactttttgttactccagattatggatctgccgttgtattgggcggaatattgactaatatgccacttacattcggaacacaaattacagattcacaatgtgatgactgtgaaaattgtcaaaaagcctgccctgttggtgccattaatcctcaaaaatggaatactaaattaaatagaaatgacattatcgatatcggaaaatgtagagaatatattgttgagcaatataagaatggtttaggctgcacaaagtgtatgtatgaatgcaaacttacaaaaaaatatttggggagattataa

SEQ ID NO: 6709 - DNA, 864 bp, Methanobrevibacter gottschalkii
  source 1..864: mol_type = genomic DNA
atgaaagatatagatgttttaattgaagctttaccttatattaaaaaatttcatgataagaaaatattgattaaatatggtggacatgcaatggtggatgataaagcaaagtcctccacagctcgcgatactgttttacttaaatatgttggaatgaaacctttgattgtacatggtggaggtccagaaatctcaagatccatgaataaacttggaaaacaagccaaattcatcaaagggttaagagtcactgatgaagaaactatggaaataattgaaatggtgttagttggtaaaatatcaactgaaatcgtatcagaacttattaaacacgatggtcaggcaataagtttgtctggaaaagattcaagtctaatatttgctcacaaaaaaggagcaagtaaaattgatgaagaacttgttgatttaggtcttgttggtgaggttgattgcataaacactaatctgcttgaaatgtttctagataatgattatattcctgtaatttctccagtgggtattgctgaagatggaaccagtcttaatttaaatgcagatactgcagcaggggaagttgcaagtgctattggtgctgaaaaattaattattttaactgatgttccaggcgttttgagagatccttcagacccgacatcattgattcaaaaaattaaagttgatgagataccttctcttattgatgagggcattatctctggaggtatgattccgaaaatagaaacttgcattaatgctattaataatggtgttggatcatgtcacattattgatggtcgtaaaaaacattcaatacttttagaaatatttaccacaaatggtataggaactatgatttataaataa

SEQ ID NO: 6710 - DNA, 1470 bp, Methanobrevibacter gottschalkii
  source 1..1470: mol_type = genomic DNA
atgttaaatattactacatttttagatgccaattcaaaacgtctagacaaagatgttttattcaatccaactaccggagagaaatatagttctggagaaattttatcaatcgtctccgaaattggtaggatcttaaaagaattaggaatcaaaaaaggcgatagaatcctaatttatttaaaaaattcagaagaatacttgttttcactttttgcaatatggagaataggtgcaatagccattccaacaaacagagtttttacagccaatgaactcgaatacattgtcagtgactcaaaagcaaaattaatgattactgatgaagaagcaaaagacctcattaatgttgaaacatatattcctaaaaacatttccagttttaaaaattgcaaagtcctggaatctgaaaatactgattgggacgatttatgtcaattacaatatacttcaggaaccacagggcagcctaaaggtgcaatgctcacacatggaaattattttactgctatacacaacgagtgtgatgttttaactttaaaacaagatgatgtatttttaggaatttatccgatggctcatgttggcctatcatgggcaatagctgccttaagagccgctgcatattacatattaatagaaaaattcaatatggatgaatatttagaattatgtgaaaaagaaaaagtcagcgttttaactggaatgcctccagtaatacattcattaactacaattgatgcccgtaagcaacttaaaaccgtacgcgaaattatttcaggtggaggaccattgcataagaaaatatggaaagatttccaccagacttaccaaataccaattatcaatgcatatggactatccgaaacaattgtaattggaactggaactgtcatcaggccggaagactattgggaggcggatagatttgaaagtgtaggtcacccagtctgtttttcagaagtgaaaatcgtcgatgaacatgattctgatataattttaccaaaatatgaacagggggaaatcgcacttagaggaccggcagttgcaaaaggatattggggcaatgaggaaaaaacaaaatcatcatttttagatgatggatggtttttaacaggagatatcggatatcttgatgaagacaaccgcctattcattacagaccgtaagaaagatatgattgtaatgagcggctggaaaatttatccaacagaagtagaggaagtattgataaaatatcctgcagttaaggaaatagctattttcagcataaatgactgtcacaggggagaaattccagttgctgcagttgtttggaaagatggtgaagaatgtgaaggattagtcagttatgcgcgtaaaaacctatccagatataaagttccaagaaagatatttacacttaatgaacttccaagagtaaacggctggaaattgcttagaagagaattaaggaaaatgtttaaggaatag

SEQ ID NO: 6711 - DNA, 1059 bp, Methanobrevibacter gottschalkii
  source 1..1059: mol_type = genomic DNA
ttgaattatcatttaaatataattaatgcaatattattaatatacgaacaaattgttgtaagtgaaataatgtacgatattgcagtaataagtggagatggaataggcagagaagtaatgtctgcctgtgaatatttacttgataaattagacttaaaattaagtttcaaatatggagaagcgggttttgattgttttaataaaaatggaacaacattacctgaagaaacaattaaactagctaatgatagtgatgcagtactattcggagcatcgacttcaacccctggacaaccaagtccgattattaatttgagaaaagagcttaatgtttatgcaaatataaggccaattaaatcatacaaaggaataaattcaattcatgatgacattgactttgtaatcgttagagaaaatacagaaggattatattcccaagctgaatatggtgatgaaaataaagtgattgcagagagaataatcactcgcagagcatctgagagaatatccaaagcagcatttaatttatgcgtaaaaagaggtcaaagcaaagtcacttgtgttcataaaagtaatgtattaaaaaagactgatggagtattcaaagaaagtttttacaaaatagccaaagaatatcctcaaataaaaactgaagacttctatgttgatgcaaccgcaatgtatctaattacacaacctcaaaattttgatgttattgtatcgagcaatttgtttggagacatattatctgatgaaagtgcaggacttgttggtggacttggtctcgccccatctggaaatataggtgatcataatggattattcgaacctgttcatggatcagcaccagacattgcgggaaaaaatattgcaaacccatgttctatgatactatctgcttcaatgatgttagattatttaggagaatgggaaatctcaaatgatataaaaggtgcgattgaaaaagttatttccgactgcaagattagaactccggatttaggaggagactcttcaactatggaagttacaaaggcaatagttaaggagataatataa

SEQ ID NO: 6712 - DNA, 465 bp, Methanobrevibacter gottschalkii
  source 1..465: mol_type = genomic DNA
atggaaagcactattgaagaattaattgaattattaaatgataaggatgattacgttgttgaagatgcaataggacaattagaattaaaaggtgcagatgcacttgaacctttaatggatgcattatcacacagaaagaaaaatgtcagattacatgccgctactcttttaggtgcaattaatgatgaaaaagctattccttcattaattgaaacattaaaagacaataacaaacttgtcagaagagaagcatctactgctttatctcgtatgggtgcaccagctgttgatccattaattgaaactttggctgctgaagattggagagtaaggggagctgctgcttgggcacttggaaacttaggtgataaaaaagcaatccatgaacttgaaaaattgcttgatgatgaaagtgcttttgtaaaagcaggtgctaaaagcgctattgaatctattcagaaataa

SEQ ID NO: 6713 - DNA, 891 bp, Methanobrevibacter gottschalkii
  source 1..891: mol_type = genomic DNA
atgcattataccggaccagtttatcgccctccccctgaggcaaacacaccacttttggaagtaacatatggttgctcttggaatgagtgttccttttgcacaatgtatgatacgcaaaagtttggaatatctccaattgaagatatcgaggaagatttggctgagttatctcagttttatcctaaagatttaaaaagaatatttcttgtgaatggagatgcttttgcacttcaggcaaaaaagttatttgctatttcagatttaatccatgaatattttccagaagttgagtgcataacctgttatgcatcaattaaaaacataaaaccaaaatcagatgaggatctggaaaaacttaggcaaaaaggattcaatgaattatatattggtcttgaaacagcctataatccggcattaaaccagatgagaaaagaatatactcaaaaagatgaatatgaacaactcgaaagaattcaaaatgtaggaatggattacaatgctttgttaatgttaggtgttgctggaagaggcaattataaggaaaatattgatgcaacaatcaatttgttaaatacatttaagcctaagattgtaggtcctctaacaacatccgttcaaaatccttcccctctgcatgaaatgaaattgaaaggggagtttgttgaagctactgaaagggaaatgatttgtgaagaattaatgcttttggaaaatcttgagatggatgatgattgctttttcttcggtggtcatccgtataatttaataagattcagtgattcttttaaaaacaaggataaaatgattgaaaaccttaaaaatcaagtattccaaattgatgaattaagacagggaatacttgatactgtacttccaaggggcaatttgtaa

SEQ ID NO: 6714 - DNA, 528 bp, Methanobrevibacter gottschalkii
  source 1..528: mol_type = genomic DNA
atgagaatttgtctttatggatctggaagcgctgaaatagatgaaatttataccgatgcagcatatgaattaggctgtatgatggcacagaaaggacatactcttgttttcggtggtggagacactggaatgatgggtgcatgtgcccatggagttcaagacacaaatggaaaatcaataggaatagctccaaaatggattgaaaactttgaaccattatgtaaggaatgcagcaaatttatttatgttgactcaatggatgagagaaaaaataaatttttagaaaattcagatgcatttattatcacacctggcggaattggaactttagatgaattttttgaaatcatcactcttaaaaagctcgaacaacatgataaagagattattgtttttaatattgatggtttttacaataaaatgtttgatatgattgatgacatggctcaaaaaggatttttatataatcaatatgaaattttcaaaattgcaaatacacttgaagaaatttttaactatttcgactaa

SEQ ID NO: 6715 - DNA, 555 bp, Methanobrevibacter gottschalkii
  source 1..555: mol_type = genomic DNA
atggaaagtgaatacatattaatcgaacttaaagaattatcttcacatgacaccattacaaaaaaagaattaatgggtttattaaaaaaatatgccagcatcatatcagtatatgatttaatgatggctacagcacatatgagaaaagatggagaatatgttcatgctaattaccgtgaaaaatacctggaagtttatattaaatacttcatcatgcgtatgaaagaagtcttggaaaatgaagactacaattataaaactaacattgataagaaatctttcgatcaatcttttcccatgcttgagagaacatttgaaaaagaaagattaacagcatcaaaagatgataaattcccattaatctatgtcattactgcattatacacaacatttattttagaagaaccgattcatccagttggaagtgaattcccaggaagtttaaaagtagaaaaacgaaatggagaattttactgtccagtgaaagataatcagaaagataacaccaatgcaatctgccatttatgtcttgcagaacaaacccccgatatttag

SEQ ID NO: 6716 - DNA, 645 bp, Methanobrevibacter gottschalkii
  source 1..645: mol_type = genomic DNA
atgtctgaaaattttatggagattacaaaggaagatatcgaaaatatcgaaaatgcattaaaaagtaatgcagattataaattaaataatactaaatttgacattaaatcatttgaaaaaggtggggacattagtttaattcaatatgttgctgatgtggaaaatgaattggtttttcaaactaaggaggaaaacggcaaatattatatttcggaaatatttggtttatttatggacaacattattaacggaaatgtttcaagagatgttttccagtcagtaagcgattatttccatgaggttattgcaggtgaaaaaaacgactttgaagatgaaaaagaagagttaattaattttttagttttaactgaagaatatgatgcaaataaattggaaatggatttaaatccgtctaaaatacgtgaagattataaaaaagattatggtgaaatttatggtgatgactctttaaacagagttcaaaaaagtctagcattaaaggaattgttgcacatgtcaatttgtcaggttgttaatgacattgatttatttttcacaagaccttatgatttaactcctgaagagaatgctgaaaagaataaacaagaacaaaaagcacttgaaaatgaactgcaaatgtcataa

SEQ ID NO: 6717 - DNA, 468 bp, Methanobrevibacter gottschalkii
  source 1..468: mol_type = genomic DNA
atgataactattaccaaaaaagaagaagtggttttagaccaagttaaaatattcaacttggaatattctgatggaattccagtaaatattttaagaaaagaattaggatttcatgaatatgatttagttcatattcttgaagagctgcaagataaggatttggttatctttagagataataaagttagcttatctgaaagtgaaaaagaaattaacactgttaattctaaaaaagatattgaacagttagaattaaatttgaaagaaaaagaatcttataatttaatcaaaagtttggttgatgataaaaatctgatttcaaaatatactcttgagggtcatttactttacggcgatttaaaactcactaatttcaggatgtatcatattattttatctcttcagaataaaggtcttctaaaacctattgataaaagtgatggggaatattacctcttggttgaataa

SEQ ID NO: 6718 - DNA, 438 bp, Methanobrevibacter gottschalkii
  source 1..438: mol_type = genomic DNA
atgtcattaccaaaaaaattactcgctgattttgacgaagtactaaaagataggggatatcaatctcgttcaaaaggaattcgtgatgcacttcaggattatattgtgagatatcaatggatgaattccatggaaggtcaaagaataggtattgtaaccattatctatgatcaccactatactggtgttatggaaaatttggctgaaatccaacacagcttcagaaatgagattaacactagtatgcatattcacatgactgataaatattgtatggaaattgtagtggtaaatggagatattgctgaaattcgtgatttgactgaaagaatcatgagacttaaaggagttgaacacgtaaaactcacaagtacagcaaacggtgaagagtttagtgaacctggtcactcacatgatcatggttatcaccaccattaa

SEQ ID NO: 6719 - DNA, 768 bp, Methanobrevibacter gottschalkii
  source 1..768: mol_type = genomic DNA
atgaaatttaaaacaacatcttaccattttgatttacttaaagataatgatagagtttctgctttttttgaggccataaatgattatgagggaaataataatttagcttatgatttgggatgcggtattggtgttttgtcttactttttaaaggatcatttcggggaagtcacttctcttgaaattgataaaaaagcatattgttgtgctaaagaaaatttaaagtcattcgataatgttgaagtagttaatgaggatgttttgaaatataattttacaaaaaaagcggatttgattgtttgtgaaatgttagacactgcattaatagatgaagaagagatacctgttcttaattatgctaaacaatttttaaaagaagatggcaagattatacctcagggaattattaacactgccgaacttgttaatcttgaaagacattatgttcattgggatgaggaagtaaattatgaagtgtattcaaagccaatagtctattccgaattcaattttttaaatgaaattaatccggaatttggggcgtatctgacattaaaaacagataaatctgggattattaatggattgaagattacaagttatactaaacttaacgataagttaattgttggaccatcgccaatgttaaacccaccattattaattccattagatgaaaagtcagtaaatgtaaatgatttaataaatgtaaaactaaaatatataatgggaaatggaatagaaagtattcgcactgaatattattaa

SEQ ID NO: 6720 - DNA, 483 bp, Methanobrevibacter gottschalkii
  source 1..483: mol_type = genomic DNA
ttgtcttttgatttagaattaaatgattttataatggattttaaaaaattggtggtattgggtgttggtaacgagcttaaaagtgatgatggtgttggaccttttattattaagaaattaattgaggaaaatattgttaatgataatttaatactgattaatgccgagacggttcctgaaaatttcacaggcaaaatcagaaaagaacaaccaagccacataattattgttgatgcatgtttaatgggagctcaaccgggagatatcaaaattgttgataaagatgattttgcaaatattggcatttcaactcattcaatgtcattatcctattttgttagatatttagaaagaagtaatgactttaaaataatatttgttggaattgaacctgaaactatggagtggggtgaaaatccgacagaaaaagttgaaaatactgcttattatttcattgatttgttaaaggagtgtatattatga

SEQ ID NO: 6721 - DNA, 1095 bp, Methanobrevibacter gottschalkii
  source 1..1095: mol_type = genomic DNA
atgaaattattattcattggttcaagattatatgatgatatagattggtatgtaaagagaaaaaacattgaaagtgttttaacagaatctaatgaaaatgcgattaatcttgatttgcccgatcaagtatttattgttcctcgtggaatggatgggccaaaacaagttgcattaatgcaaaaagttgatgctattgttccattaataggaattgaccctccattaatggatgttgcactcatgaaagaagaaattgaggaaaaatatggaattcctgttattgctgcaggtgtcagggcagttgaactgacttctaataaaatcgaaactaaaaaattttataaagaaattggtgttgtaactcccgattatcaaattttaaacgatcctgaagatttaactttggattttccagttgtgctgaaacaaggtgaaggtcaaggtggaaaagatattaaaattgctaaatcaattgatgatgtcaatgaatactttgaaaatttcaatcaggcattgtgcgaagaatttattgaaggatctgaaatttctattgaagtattaggatttaatggagaatatgttgctttacctccgatatataagggtgaaactactttggaaggtacacatccactaaataaaattaaaactggcccttgcatggttcaaggattggataataatttggttcaacatactgcatataaaattgccaaaaacttagcatctgatggcattttcgagatggatttcatgtattcagcaaaaaaagaccagttatatgctattgaagttaatacacgtccgaatggaacaagatatttaacaactgcgacttgtggtgttaactcattatgtgaactggttaatatggctattggggaattttcattacataatatttcggataaattaggatattattattcaactgaaattccaattggaaattatgaaggtcctgctccaattaaacctgaaaaatcatttgagaataatgattttgttgtccatggtcctgcgggttatcaaagagttactgcaagggcggattcaaaagataatcttgaaagtttagtttcaaaattagtataa

SEQ ID NO: 6722 - DNA, 1071 bp, Methanobrevibacter gottschalkii
  source 1..1071: mol_type = genomic DNA
atgaataatacagatatgttaattctttttttaataacattatgtgctacaatattctttacatggtatattaaaagaatattaattaaagcaaggattgctgataatcctatagttagtgaacatagacataaaagtggtactcctacaatggggggtatcgcattcttatttacaatctctttaattattgcgttgtattatcaaaatactccgatcttgcttgtatcttttataatgcttgcagggggaattgtgggtttggttgatgatttaattggtcttaaagttaaagaagttcaaaaaatcgttgtaaatacttcaagtgatgttattactcttggaaggttggatgttgaacctaatgaagaagtacgtgtagctactcctaaagcaaaagctgaagttgatgatttgcttaaggatggtaaagtagaagttgttggtgaagttccaattaaaactgaacctggcgaacttgaaaaaattatatgtcaaattgtattgggattattcttcgctttaactggcatcattactgcagtaggtggtttcaaattaggtgttttagctattcctgttgttgtaatagctattcttggttctattaattctattaatcttattgatggtatggatggtcttgcagcaggtattgttggaattgcttcaattgcttgttgtgtatatggttatttatttggacctgcatcaattattcctccattcctaattctttcaggtttatgcttaggattcttagtatttaacaagcatcctgcatcaatatttatgggggatactggatcatttgttttgggtactggttatgcagctgctgttttagtatgcgatattccttactttggagttcttgcattaggcgtaccgattatttcagttgtggttagtttacttcacagagcacatattatcaaattaccagtagaaccactgcatcacactttaaatcattatggtatgtctgaaacaagaattatagttagttattggggaattacatttttattatgtataattggtattcttgctaagatgtatgtattttaa

SEQ ID NO: 6723 - DNA, 1431 bp, Methanobrevibacter gottschalkii
  source 1..1431: mol_type = genomic DNA
atggatattcaagagttagttagattagttgagggtgaacttgtcggtaatgttgattttttttcaattgatgggttttcgggtagatttacttttttaaatgatgcacacacaggagacattgttgtaagacattggattgatggtaatggtgttgctatggcatttaaaaagaatattgcatgtttaataacacaaactccaaaagatgatgctattgaaatggcagaaaaacttaattttccattagtgattacaaataaaattgaacttgctaatgctttagcactttcacatacaattgataaatattctcataattcaactaatgttgtcataaccggaacaaatggtaaatcaactacttctcatttaatttatcatattttaaacaatgctggttttcatgttctcacaaacactgatagtgaatctgaattcaacacgttaattgatccgatggtttctaaattaatttctgatgaagttaaaaaaaatggtaaattggattatttggttattgaagtttctgaggttcaaggatggcttggaaaactaatgaaaaatcatgcagcattaatgagtgaagctattaaaccacaggttggcgtaataactaatattgcaatggatcatattggtcttgtaaattccattgatgatgtgtttaatgaaataactgcagttccaaaagcaataggtgatggaatatgtattttaaatcatgatgatgaactagttaggaaattaaatgcaaaaaatccattttacacctcaatgtctaaaatagatggcgataatgcagtatattttgatgacgggactatttattataatgataatccaattttaactattggggagttgccattcaccggtaaacattttatacaaaatatattatccgctattggcgcatgtatttctctaaatttaccaattgaggatattgttgatggagttagatcttataaggcacttaatagacgttttacaaaattaaatgatgaacctttaatttatgatgattttgcacataatcctgatggaattaaagcaacaatatccgaaaccctaaaattacttcctgataatcaaaaattatatgttgtttgtgctattagaggatcaaggggtgttgaaattaatcaattaaatgttgaagctattgttgaatctatggatgatggcattgaattagtattatcttcaagtaatgatgttgttaataatttaaattgggttaatgaaaatgaaaaagaagttttcttcaatgttttgaatcaaaataatattgattatgttcattttgacaatttaaaagattgcttaaatgaagtttataacaaagcagataaaaaagatattattttattaattggtgctcagggaatggatcatgcggagttccttttaaaggacataatataa

SEQ ID NO: 6724 - DNA, 441 bp, Methanobrevibacter gottschalkii
  source 1..441: mol_type = genomic DNA
atgtttataaagattagaagagacacattaataattttattattggcgtttattttgattctttgtggtcgtttaattacctatgttgcgtttgcatcttctgatgaaataaacgatggtattgctatttctggtgttattattaaaggtaatgatatagttccggttgatactatcagatcaaatgttatgcaggcaggttttagggatggtagtgtaatttatggtgatattttaaaaacttccaaaagggaagtttcacttcaagatgctattcagacggctcaagaatttgcaacacggtcaacagtgcccggtacatctgtacaacctattactgcagctgatgttcaagtggataagaatacaggtgtagttacagtcactgttatagaagatttttcatctgttgaattagacaataaaacaagtggtggataa

SEQ ID NO: 6725 - DNA, 1260 bp, Methanobrevibacter gottschalkii
  source 1..1260: mol_type = genomic DNA
ttgaataaattaaaactttcacttgtattttttgcagtattgttattgacaatgagtagtgtagcagctacttgtaatattatagttatcactgatccttcgggtaatgatcctaatggtgcagctgctggaagtatgtcttttgcagataatatgttccagtcaactttcttattatctagatctaatcattttgctgtactttctggaggtactggtagttcagatactaggttggattctattgttgatgcagttgccagtttggaaaataatgcttctgcagcatcagctgcttcattagcttctcaatttaagggagcacgtcttgttgttggcggtcctaatattggtgctgctgttggaggttcatttaatgcatatgtaattacagttgacgattcaagtaatgatattaaagtaaccccttataatagtggtgtggcaacattgcagccgggtcaaaaaggagctattattcacttgaggaatactgctggaaatccattatatggtactgcagattctgtaagaaaagaaactgcaatgaatattggtaagatgattagggatggttatcctgcaactactattcttgctgaagctatgggtgaagtggctaaagattctggtgaaaaatatggtgggggtggagtaaaccttgtatctggcatttcaacttcagatatgtttacaccaaaagaattgaattccactggttatccgatggatgaagaatattccaaggtttgtgatagctgcggatgggcaatgggttttccagctgcagaagcctatgaaaaatgtcctgtttgtggtggagatcttagaactgtttatgcatatcaggcattaggtgatgcgttaactgttagctctaaagccgttagtgtttcagtctatggaagtgatagaccaggtttagcagaaactactaaagaaattgttgaagcatccgtttctaaatatggttatgatgcatctgcaatttcaggttcaattaatagaggtattaataatggtcttttagtaggtgttgatcatgttgaacctaaagatattaatgtaaaacaaggttcaaaagcagttggagtttattacaaatcacttcctagtgaaagatcatctcctgcgtgggatttaccgattgatggaaatattttaacaatacttggaagtatccaaacggctgttggtattatcttgattttattagtattattcagaagtagattgcttaaatctttccaaaatcggtga

SEQ ID NO: 6726 - DNA, 432 bp, Methanobrevibacter gottschalkii
  source 1..432: mol_type = genomic DNA
atggcattaattttaatcagaggagaaacaaattcaaaattacttaatgcaattgcagacatggaacgtcatggtaatttgaatttaataactaaacctaaggtggtcgactctaaatttgctgattcattggttgaaaaaattttaaattcaaaacttagaacaaaatctaaagttgccactgcgttttttgtaaaagaggatactacattgagtattatgcaagtaaaaaagattcatcctccagcacatgtagttgttgttagtgatgaatatgagggttatcataaattaaagaaattattagataatgctaaagtattccaaggttattattctcataaggcaaaaaatgatgggttaatagattattcaattaaagggaaaaaaagacatgttaaaaatgaaaaattgaacagctatataaaataa

SEQ ID NO: 6727 - DNA, 495 bp, Methanobrevibacter gottschalkii
  source 1..495: mol_type = genomic DNA
atggaatgtgaaatctgtggtaaaacagtacccgaaaataatccaattagagcaaaaattgaaggatcagttatggttgtatgtaaagagtgttcaaaacttggaacaatacaaaaagcaccacaacaaccaaaatttagacaacaacctaaaggaaaaaaagcaaagaatactaaaaataccggaaattattctagaagagatgaaccctcagaagaattaattgaagattttaacctaaaaattagaaaagcaagagagacaaaaaattggtctcgtgaggatttaggtaagaaaattaatgaaagagtatcagttattaccagaattgaaactggaaaaatgacacctgatactaaattaaccaaaaaaattgaaaaaactttaaatataaaacttcttgaaaaagtaaataatattgatttaaatcaatttataaatacctccacaggtgaacgcgccttaggaagtataatgaaaataaaaagaaaatag

SEQ ID NO: 6728 - DNA, 1257 bp, Methanobrevibacter gottschalkii
  source 1..1257: mol_type = genomic DNA
atggatgatttcaatgatttggaaaactcttcaaaagaacaattaatggaaaaagtagaagatttacaaaatgaaattgatttgttaaaagaagaaaaatccaaagcaaaaagtaacttaatgtggaaagttagaaaattagaaaaagataaagtcttaatagaaaatgaaaagattagacttgagagagaaactaaatcattacgttcagaagttgataggtttagatctccacctttggtgttagctactattactgaagtcttagatgataatagaatgactgttaaaagtagcacaggacctagtttccttgttaattactcaaaattcttagatgaaaaattattagttccgggttcaagggttgcattgaatcaacaaactttcggtattgttgaagttttaccgtctgaaaaagatgctaatgtttctggaatggaaattgaaactaaaccggatattacctacgaaaaaattggtggattggaagaacaaattagggaagttaaagaaacagttgaattacctttaactgaaccagaattattcgaaaatgtaggaattgaaccccctaaaggaatattgttgtatggtcctccgggaactggtaaaacattacttgcaaaagctgttgcaaatgaaactaatgctacctttattaaaattgtagcttctgagtttgttaaaaaatacattggggaaggagcaagattagtacgtgaagtatttgaactggctaaagaaaaagctcctgctattatattcatcgatgaacttgatgctgttgcagctaaaagacttaaaagttccaccagtggagatagggaagttcaaagaacattaatgcagcttttagcagagttagatggatttgaatccaggggggatattggtattattggtgcaaccaacaggccagatattttagatcctgcattattgcgtcctggtcgttttgatagatttattgaagttccacttccaaatgttgatggaagacgtgaaattcttaaaatccatactaaaaatatgtcttttgatgaagaagcagatcttgatttacttgcggatctaactgaaggtttatctggtgctgatttaaaagcagtatgtactgaagcaggcatgtttgcaattcgtgaaaaacgtgataaaataactgtcactgactttatggatgctattgacaaagtcatgagtaaaaataaagaagacgaaatgtttaatactgaagcaggagtaatgtttggataa

SEQ ID NO: 6729 - DNA, 960 bp, Methanobrevibacter gottschalkii
  source 1..960: mol_type = genomic DNA
atgttatttaataaaaatgagaataaagctaatgaacgaattatttataaaacaaaatcaaatgtgattttaggttgtaaaaaagctatctatgggcttgttttattgattattgttttatccatttcaccaatcatgattaaattcattgctaaaatgcaagtgtatttaatttctcaaattcaattacctttaactaggtatgcagctatagctttttttgttattattctcattattgtaatatatattatatggcatattattggatggtattctcttgaatatacattaactgattcaagaattatggtcaaatctggtgttatatcaactaaaaagaattacatgccttatgcaacaattcaagatgttactacttctcaaagtattcttgcaagattatttcatataggtactgtatctgtttttagcgcttatgataataatcgattagaattaaaaaatatttcaaatccttctgaagttgaagaaataatattttcaaatatgagaggttccagaactttccagcctcaacagtccagacctataaattatcaccaacaggataattatttagataatggatcttatctgggtagaaatgaaatgtatgatgaatttgaacccattactcctataactcatgaaaaagacagctatcagggaagagattatgaatattatcctgaagataggggttttgaaaattctgatcaaataagacatgaatatgaatatgaaccatatgatgatattgatagatttgttgaagaatttgaacctcataagaattatcctaatgaaatatatgatgatgaattggatgaggattattatgaatttggttcaaaaaatcattatgatgaaaaaagaaatgaagttatagacaacgattcaaacagtctatccagtgaaaaagttattagaagacattttgataaatttaaaaaataa

SEQ ID NO: 6730 - DNA, 1035 bp, Methanobrevibacter gottschalkii
  source 1..1035: mol_type = genomic DNA
atggaattattatgtatacagtcacaagaacatcctgaattacctcttgcagagttaaaagcggttatggaatgtgaaaatatttctgcagagatagatgttataacagaaggtttagttattttaaaaaatatttcaaatgataatattgattcgtattatgaaattttaactagaagattaggttatactcatgaaatacatgaaattataaaagaatctaatactgataattttgacgaggatatattatctatcaactggtcagagtatattgatgggacttttgctgttcgtgtgaaaagatttaatacagaaatcggtactgttgcaactgagcgaagagcaggttctttaattctttcaaattctgataatattaaagttaatttatcaagacctgaaaccttaatccgtatagttgttcataaaaatgatttttacattgctattgaaagaattaaattaaataaaaaacattttgaagatagcaaaccacataaaagaccatttttttatcctggctccatgaatcctaagttagctagatgtatggttaatttatcaagagttaaggaaggtcaattattacttgatccattttgtggaactggaggaatcttgattgaagcagggttaattggttgtaaattagttggatcagatatttactggaaaatgaaaaatgggacatcaattaatttagattattatggaattactgattatagaacatttaatattgatgtacgcgagcttaaaatgtatgaaaaagtaatggctgtagttactgatccaccttatggcatttccacatctactggagatattgaaggagaagatatttttaaagaattctttaaatctatctataacaatatgagggatgatgcttatctttgcatggctagtcctcattatgttgatttaaaaccaatggctgatgagatagggtttgatattgtagagcagtatggaattaaaatgcatagaagtttaactagaataatttccgttatttgtaaaaaacattag

SEQ ID NO: 6731 - DNA, 141 bp, Methanobrevibacter gottschalkii
  source 1..141: mol_type = genomic DNA
tcaataaaaagaatcacatacactacttttgtcgaaacaaaagaagaattaataaaattatttaaaaaagaatattataagataataaataatgaatcattctttaataaatgggtatcgaaatacattcttaaaagttag

SEQ ID NO: 6732 - DNA, 906 bp, Methanobrevibacter gottschalkii
  source 1..906: mol_type = genomic DNA
atgtttaaggataggatagttaattattatattgataaatcgatggaatatggtcataatcatttaaataaaaaagcaattgattgtgttgataaaatattgtttttggataagaataatgctagggctttgtcatttaaagggctttattatgcttttctttttgaaaaggagaaatcgtttgaatgtttcagtgaaatccttaaaaataatcctgatgatgtacattgttattatagaaaaggcttggcatgcatggagttagaaaagtatgaacaagcaatcaattgttttaaaaaagtattggatgttgatcctcatcatccaatagttttaaggtacattagttcatgttatttgtatttggaagaatatgatttagcttttaattccattaatgatgtattaaaagaggatatggaaaatcctgaactattacttagtttaagtctttattatgatgttttggaaatgtatgatgaatcattaaatattttaaataaaataattgaaaaaaatcctaatgaagataatgcattattacaaatggctattgtttatagaaatcaagaaatgtatgatgatgcattaaaatatattgaattggctttaaatattaatgccgattgtattgtttcaaaatcaataaaatataatttattagcttatgttggtgattttgaacattctttacagggttttgatgagatttctaaaacatattttgatggttggggtgtaattgaatcgtattatagttattatggcgagtcattggaggtaatggggaaatatgaggatgcattaaaggtatatgatgaatatttggaaaaatacccaaatttcccaaaaaaaatgattgaaaatatgaaaactgatgtcaaaaaattaattaaacaatgttaa

SEQ ID NO: 6733 - DNA, 204 bp, Methanobrevibacter gottschalkii
  source 1..204: mol_type = genomic DNA
atgggttcagctgaagaagtgggtaaatatttaaaaaagttatataaaaattataaagatgcgaaaagtaaaggtgaagtattaaagtttgtaaaatctaatattaaagaattatttgctttgtctttgtattttgaatcaattgaaactgtaaacttattaataaatttatttttatatgaactagaaaaagataagggatag

SEQ ID NO: 6734 - DNA, 753 bp, Methanobrevibacter gottschalkii
  source 1..753: mol_type = genomic DNA
ttgatagagattcatgataaattaggaacattggatgaattattggttataattgatgatttactacttgatgaaagatatgattataatgaattattagttcaaaaaggaaatatattatctattcaaggaaaggataaaattgcaatgaaatgttttgataaggtgttgcaagatgattcaactaatttatgggcttattattttaaatgctatgttttaaataaatctgatgatttaagtaattttgataagttattttcaatggttaaatcacaatctccagatgaatattatatatggttattaataggagtacttttttcccgtaacgacagatttgatgatgcattatactgtattgatgaaagtataaatagatatgatggacaagaagatagttggttgtacaaaggattgattttttatgaaatgggcaaatacgatgaagcgttgtctgctattgatattgctttaaaaattaatccaaaagattcttatctttatcttacaaaaagtgttattcttaatgcaatggaaaaatatgatggagcaattttttattctaataaatgtttagaattagataaaaataatgtattgtgtttgtataatttatccctgtctctttataatcaaaataaatttgatgaatcattaaaatattgtgaatctgctttaaaaatagatcctaactattgtttatcattgaatctttatgctgaaattttacgccataaaaaaaaggtttga

SEQ ID NO: 6735 - DNA, 900 bp, Methanobrevibacter gottschalkii
  source 1..900: mol_type = genomic DNA
atgtttaaggataggatagttaattattatattgataaatcgatggaatatggtcataatcatttaaataaaaaagcaattagatgtgttgataaaatattgttctttgataagaataatgctagggctttgtcatttaaagggctttattatgcttttctttttgaaaaggagaaatcgtttgaatgtttcagtgaaattcttaaaaataatcatgatgatgtacattgttattatagaaaaggattggcatgtatggagttaatagaatatgaacaagcagtggattgttttaaaaaagtattggatgttgatccccatcatccaatagttttaaggtacattagttcatgttatttgtatttgggagaatatgatttagtttttaattccattaatgatgtattaaaagatgatggggaaaatcctgaactattacttagtttaagtctttattatgatgctttggaaatgtatgatgaatcattaaatattttaaataaaataatagaaaaaaatcctaatgataatgatgcattattacaaatggctactgtttatgaaaatcaagaaatgtatgatgatgcattaaaatatattgaattggctttaaatattaatgtcgatagtattgttttaaaatcaataaaatataatttattagctcatgttggtgattttgaacattctttacagggttttgatgagatttctaaaacatgttttgatggttggggtgtaatggaattgtattatatttattatggaggtgcattggaggtaatggggaaatatgaggatgcattaaatttatatgatgaatatttggaaaaatacccaaatttcccaaaagaaatgattgaaaatatgaaggaagatgccttaaagttgattaagtaa

SEQ ID NO: 6736 - DNA, 4041 bp, Methanobrevibacter gottschalkii
  source 1..4041: mol_type = genomic DNA
atgttacaagcaaaaaaaacaataacagtaacagttaaaagtatccctacaagtttaacagtaaatgatttaacatgtaattatggggaagataattcttatttatatgctactttaaaagacactaaaaataataaatttctaaatgggcaaacaatcacttttaaaattaatgataaaattataaatgttgttagtgataataagggtagagccaaaatcaaaattgatgaaaaaccgggattatacaatgtgattgtttcatttactaaaagtccatatgcaagtattagtaaaaagattaatgttaatgtaatatcattcaatccaactgtgaattatgatgggggattttacaataagtcatatttaaatttatcattaaatatcaataatgctaaattgattaagtattgtttgaataatgatagttggagtcaatctgataaatcagtatcatttattttaacaaatgggatctatgatttatattatagtaatggtagtgggagtattttccatgaacattatttgattgacaataattgtcctgttgtttggagtaattttggttcagacttatatgattcttctattattgttaatttgtccagttgggataatcttgatgccaatcctaaaatttattattcgttagatgaatccaattttaaattgtatgaaaatttattgaatatttcaaggacaacattattaaaattttattcaattgattttaatggtcataaaagcgaaacaaaaacttgtaattatatttttgaaaaaataggtaatttgaattcaggaagaggatttacaacaatccaatcagcaattgatgattcaaatacccataatggtgatataattaaaattagtgaaggtttatacaatgaaccattaactgttaataaattcgttactatgattgggattaatgctactttaacaagtagggatccttcccgtccagttattggaattactggtggtggaagtaatagtgttatttatggatttaaaattaaagattcggagcatggtgttgttatttatcatgcagataatgtttctgtaattaataatcaatttatcaatgtggttaaatctatagaaatagatgatgataaaaatactttggttgcttataattctattgattcagataaatttttaaatttcatgtctggtgttgctattagaaaatcagataatctaatggtttttaataataatatttcattaaattctgatacgggtgctggtggaatcgttgttacaaatattacttcaaataatatttctattgttaataatagaataaccaataaaaacaatttaaatggtattggattgtatgttatctgttcaaatgtaagtattgattctaacaatgtttctaattttaatgctggattgtatgttgtttcatctaattctcatgtaactcacaatgaatttaaaaataataatcatggagtatttttaagagtctcagttaataatacttatgcttttaataatattcatgataatatattatgtggttttgttttagatacctctcttttatcgtataatgattcatgttacttgaatagattatgtgataattctcaatatgatttttactcagaagcaaacagtgattatgtaattaatgataattggtggggtgaaaacactcctaaaatttctattaatcgttctattcttgctaacatttataatgctactggaaatgtaattatgaactcttggatggttgcacatttattttcatcttcttataaaataaatgaaaataacaatattgaaagagctaaattttatgttgatttaacttataataatataggaaatgatttgtcatataaaggttatattccaaataatttaaaatcttttattggagtatttaatggggatggagctaaaaaatccaatatttcatatttgcatgagggtaaatcttttgttgattttgaattaaatgatttatttaaaaaccatgaaaatatcactgtcatgtctatttttgacaatgtaaaaatactaaactcttttaataaaaaggttacaattgatataatgctattttcttctgcatgggattttgaaaataattattttgtaaataagacttatcagattccattcagcaataatgcttcttggattacattttgctggtctgaaacaggattatttactggtaaaatttatgtaatagttaatggtgaaatcttagatgaaattaatatccacaatcttttttatcaaaaatttaaaaataattattccacaaatgtttttgaagctattaagttgctggatactgtttttgccagtacgaaagaaggtgtttgggcacctaatggttattatttcagttttgcaaaagcagctaatattgattttagagattataattctgtttataatagatttttaaattatattaaattatattatgatttaacagactctgatttaaattttgttaaaaattataaaggttttttcattgattttattgatatgactattgattttcatggtgatatgactccagatattaactttgattataatggagttcataaacttttaaagcctccatctagttatgctcatcgtataagtaatatttattacactgatattgaagatgaaaataatattagtattggttatgaaggtatgcgcagttttgcaattgttaaagataatttaactaatgatgatttgcaattttggttaaatcaaaaagaattatatgctccaggtttgatgaaagccgcttatggtacttttttaacttctttgttagtgatttatgaaaatgaccgtgtggctgatgaatctgcaattaaatttaatgtgacttggtctcgtattagtcctgtttgtgtttctttgtgtaatgattataattgtttatatgttactggggagtctgatcatggaatgggtcgggaagcgataggaaatattagtgatgtttggaagtttaattttgcaacaagtttcagtttcagtctggtggagcagttggtcggtaataatatttggaatgatacgacaataggtagtgttactcttggtttaattgaaagttattttaataatgaaacaatggaaatttttacaagtaacggatatatatttattaaatgtgagaatgacggtaatactttgttgtttttagatttgaagactggaattgttcgggactatttcagttattatggtttacttgggacaatgccatgttatcatgataacataacagaaaatgcatggaaatatggaaataatctattaaataatatgggcagagaattcaatgatttaaaaaatatttttggtattggagtaatatctgcaacgttaattggggaggtcgaattcattggtttagaaatgagtggaattggatcagctttaattgaaggatctgaaattggattattgtttggggaaatttcaattgctccaatcatgttaatatcattgccaattatcatgtttttattccctgaacaggttaatgaagtatggatgaactttgcaagcttatttaatccatattataaggattatcctgatattccaatttatgaaaatacttatcctgcaaatataataaatcctcctaaattagtattagatggtaaatcatcagatgattatattatttcacaacttaaaaataatagaaattttaataataagtataaaagatataattctaatgttaataaggataatataaattttaaaataaaaataggacctattcctagtggaaaaggtccaaaggatatggataatcttggttcagctgaagaagttggtaaatatttaaaagaattatataaaaattataaagatgcgaaaagtaaaggtgaagtattaaagtttgtaaaatctaatattaaagaattatttgctttgtctttgtattttgaatcaattgaaactgtaaatttattaataaatttgtttttatatgaaatagaaaaagataagggatag

SEQ ID NO: 6737 - DNA, 801 bp, Methanobrevibacter gottschalkii
  source 1..801: mol_type = genomic DNA
gtgaagaagttttataaagcagttttattgttgactttttgtttttttatttgtttggactgtgtttgtgcagtttcagataatgtagttgaaaatgatactttaagtgttgattgtcaagtaggagaattgtgctcggatactattgaagtttcatcagataactattatattgataataatgttgttaattcatcagatattaactttacagatgtttattccggtaatgttgtgaaaaaagttaaatctacagttaaaacatcgattactgcaaaagatataactaaatattttcaagatggtacaagtgttaaagcttatttgaaaaattcaaatggtaaagttttatctggaaaaaagatcactgttacttattctggtaaaacttactctcgtacaactgattccaaaggttgtgttagttgggatgttaaaaaagggcctggaacctattcggtgaaattttctttcaaagcaagtggttataaaagcagcagtaaaacagcaaaagttacagtaaaagcaatgccaacaacattaacagccaataatcttgtttttacatatggtgatacaaacaataaattaaaagcaacactaaaaaataaaaaaggcaaatcaattgttaataaaacagttgtttttaatttcagtggtaaaaaatatattaagaaaacgaattctaaaggagttgcgtgtctaacaattactgcaaaaccaaaaacataccctacagccatctcatttacaaatgctaattatgttacaagcaaaaaaaacaataacagtaacagttaa

SEQ ID NO: 6738 - DNA, 945 bp, Methanobrevibacter gottschalkii
  source 1..945: mol_type = genomic DNA
atgagaaaaccttatgttatactgattggaagtgcatcaggaattggaaaatcaactatttctgctgaacttgcaaaagcattaaatataaaacatttaattgaaagtgattttataagagccgttgttcgcggtattattggtaaagaatatgctcctgctcttcacagctcatcttatgatgcatacaaacatattagaaataaaagcagatacgacagttatgatgaacttgtatctgccggatttgatgatcacgcatcatatgtaattcctgctctggaaaagattattcaaagagcaattaccgattatgatgatatcattattgaaggagttcatctcgttccaggattaataaatatagaacagtttagagatgaagcaaatatttattttttcattttaatttctgatgaagagtctcataaagaaagatttgttaaaagagctattcagatccacagaggtggaaaacagctagatttctttaaagagaatagaatcatacatgaccacttattgactcaagctcaaaataataatgttaccatcatagatacagaatccattgaatcaagtttagagggaatcttatccataataaataaatcatgcacaacaatcaaattaattaacacaattgatgaattagaagatgttgttgatatcataagcaataaaaacaacggtactcttgaaaaaattacatataacattaaaggatttaaagaaccattaattagaaatattgatgtttacgatacaaaatccgcaaatagatttataaatagtattaatgaaaataaagataaaaaagaatacttatcacaattatacgaattatctgaattcagagaggccagaatttgcgcttcaaatcaagataacttagataaaatcataaaagaattacaaaataaaggatatgttttagatgaatga

SEQ ID NO: 6739 - DNA, 579 bp, Methanobrevibacter gottschalkii
  source 1..579: mol_type = genomic DNA
atgaatgaaatggaaattaatgaaatgattataaaatgtcctgcttgctctgttgaaggtgttgccaaatcaataatgaaagaaatcgaaatacctcattttggaaaagttttagaaacaacaatacaatgtcctgattgcggatttaaacatagcgacattatagccttagagcaaaatgatcctgccagatatgttattgaaataaataaaaacaatttatccgtcagagttgttagatcacagtcagcaactgttttaatccccgaacttggtgttaaagtagaacctggtccaaaatctgaagggtatgtaacaaatgttgaaggtatcctcactcgttttgaagatgcagttaaaaaagctttaaacttatttgatgatgatgcttcacaagaaaacggaacaaatactcttaaagaaatacaaaatcttaaaaaaggaaacggaactgcaactttaattattttagatccatttggtcaaagtaatgttgtaagtgataatgttgaaatttccgaaattcctgaaaatgaattaaatacattaaaaacaggttttagtcatatagaagaataa

SEQ ID NO: 6740 - DNA, 435 bp, Methanobrevibacter gottschalkii
  source 1..435: mol_type = genomic DNA
atgtctgaagaagaaatgatggaagaaacttcagaagaattcattgatgaagatggggaaaaattgcctttcgctaaagcagaagttgttcgtttaatgaaagaaaatcttgatgatgacaaaatgattagagaaagagtaaaagtagaaatgaacaaatttttaggtgatgttttaaaaaatgtatgtaaacaattaaatgattatccatacaccactgttgaatacgaaatgcttaaagaatctacttacccttacactaacattgaaaggataaaccaggaaaaagaaagaattttattacatttggaagctattaaagcagattgtaatgcattggctatggatgtgcaaaaaacattaaaattaaaagatgttgtagaggaagatacattcagcttcacagcacctagtgaagaagacgaagaagaataa

SEQ ID NO: 6741 - DNA, 4248 bp, Methanobrevibacter gottschalkii
  source 1..4248: mol_type = genomic DNA
atgttaaacaaaattcaaaagatagttattggcaaacctttcctcatttcattaatctttgtttgtctaatctttacttctcttggagttagcattgagcattcatatgctgcagatttaaacgagagtgataaattggggtctggtgtaaatgttgaagataaactagaaaattctcagaaaaataaatcaatgtcggatactaatcaaaatcccgcattaaaagcaaaaacttattcagtaaacggaggtacttttagggatattcaaaatgctattgataaatcaagtgcaggagatacaataaaattaagcggtaaatttgtttcaaaaggtgatgataccatttctatgtcaaagaaattaacaatcacttcaccatcccaagcaattttagatggtaaaaattcaacaacaattttaaaaatatttacaggagcaacacaatctaaattatcgaatctgagatttgtaaatggatattctgatagtaaaggcggtgctattgtaatttcagctaaatcaattgcatttgacaagtgtgtttttgaaaataattatgcaaatttaagttcgggagcaatacatactccatatagggcaatagctacacaaggtatgttaattaaaaattgtaatttcacaaataatggtgcaggaattgccgctggagctttaggaatattcggacatgattttttaattgagaattgtgcttttagttcaaattacgttaaaggatatggcgaatgttatggcggtgctattcagataggattggatacggaaccgtcttatggtaatgttagaaattgcagatttattaataataaagctatatcctctactggcttaggtcatgcaggagcaggatgtgttagaaatggttcttcctattataactgtatttttattaataatagtgcggattggggtgctgctttgacatatcatgcatctggcaatttaaataattgtactctgattaataataccgccactaaatatggtggtgctgtagctattatgatgaattacctgaatttcatgaatttaaatattacaaacagtatttttaaaggaaataaagctcctttaggtggtgcggttaaattggatgggttaaatataaaaattgaagaatccacatttgatgataattatgcatctgagtatggtggtgctgttaatatcaatgcaacaaatgttaaaatcataaattctaaatttaacagaaatattgcaaatattgatggtggtgctgtatttatcaaaggtaaagacactacagttaagaattcaaaattcatatcaaatgaagcaatacctgatgttaaaaaattaaatgatggattaggtggagctatttatgtaaacagtacaaaagtgcttgctcagaataatgagtttaaactaaatactgcaagaaatggaagtgcaatttactttgatagaaatggtcttgaatttaaactggtaaataatacattatatcaaaatcaggcttgggtttacaggttaccgatttttgctcatgatatctattatggggagtcagaaaacatcaaatcagtaatttatggagggaataacattgcagattttgataatttaaaagtatcaaatgcaatttataatgcagccagcaataataaaattgaaattgatggggaacacccagttttaggagcaactaccagcggtaagttatatcaggatgaccgtgaatataatgtgagggtattgatgatggtaagacatgaagatggaactattgtatacaataactctttaaacactaactatctaggtgcagtatctggtaagctggataatttaaagcctggaaagtattatgttaccgcaaaacattttgaagataattactacaaagcaattgccaatacaaccgtattcaatgttcttccaaaaactgataataaaatcttaaaatcaagtaatggaaactcaattgcttataaagacacagtcatctggacattgaatattacaaacaatggtccaaatgattcaaccggtgttgtagtatatgatgtacttcctgaaggattaatttgggtaaatgatgacagtaatggagcatataatccaaaaactggtgttttaacaataggatctttaaaagttggtgaaactatagttttaaatataatgactaaagttaatgctactggaaaaattgtaaacaaagctaatgtaactggaaatgaatatgatattaatttagacaataatcatgatgaaaaagaaatcaacgtacctcctactgttgatttggcaataattaagaaggtcaatatcaccactccaaactatggtgattcggttatctggacattaacagtttctaattccggtcctgatgttgcccatgatgtaaaagtaacagatattttttcagattcattaatttggattgaagatgactctcttggaaaatataatccgaaaactggaatttggaatattggaactttaaacaaaggcaaaacaattgaacttaatattgtctcacaagttaatcaaactggaaatattacaaataatgtttctgtgacatctcgtgaacatgatattgatttatcaaataatgtagctaataaaactatatttgttattaaatcaggagatttgtctattttaaaaacagttaatgtaagtgatgctaattatggtgaaatagttaaatggactctcactgcatataataatggtcccaacaaagttaatggggttacagttcaggatattcttcctaaaggattaatgcttcttaactacacggcaagtaaaggattttacgatgatggcgtatgggttgtgtgttgtcttgaaaaaggaaaaactgaaactttggagttaatatgtaaagtcaacagaacaggaaatattacaaatattgctaaaatctcaggaatagaatatgatcctaatctggacaataatctagacaatgaatctattattgttccacctgcatcggacatttcagtcataaaacaagttgatagtaaaaatccttactttggagatattataacttggattattgaagttacaaacaaaggtccggatagggcaactaatattagagtaactgatgaattgccagaaggtttaatatttaaagactatgtttcaacttgtggtgtttaccaaaacggtgtttggttcttagattatctaaatgcaggtgatagtgaatatctaaatattagttgtcatgtcgggcaattgggcattattgtaaatgatgtgtctgcaatagcaaatgaatttgacattaacctgtcagataatcattataatgagtcaattaatgtattgccagtctcagatctttcaattgaaaaatttgtcaatgtttcaaatgctaattataaagatttgataaaatggacactgatagtttcaaataatggttttaatgatgcaactgatgttgttgttgaagatattttacctgattctttagaatttattagtgcaaatggtgattatgaagagggtatttggtatgttggtgatttaggtgttggtaattcaaaaacattagatatagttacaagaatcattaaaacaggagatattactaatgtagccgctgtatattgtagtgaagacgatcccgatttgtcaaacaatgaagctgaggatactgttcatgttgggcctgcagctgatttgtcaattacaaaaacagtttctaaacatgcatatgaaattggacaaatacttacttacaatattaatgtaaataacaatggtcctgatgatgcggtaaatgttaaagttagtgaagaattccctaaatctttacatctgaaatcatttaagatgtcagctggtgaatttaatgcttacagtaatgtttggtcaatagataaacttgcagctggtggtgaggaaaaattacgcatggaatttgaagcgttgtctgaaggaatctttaaaaatactgcttctgttgtaagtgatacttttgataatgatttgaataataatcatgattcggctttagttaaaattattgctaatacttcagataaaattataaatgatttaactgataattttactaaaagtaatgttgttaaagctgaaaatatcaaacagccagtttattgtcttgaaaaacattctactgcaaatttcatagaattactatctatttctgtaattgtttctatgatttttggaggaggtgatatttttagaaaaaggtaa

SEQ ID NO: 6742 - DNA, 1149 bp, Methanobrevibacter gottschalkii
  source 1..1149: mol_type = genomic DNA
atgaaaaaacaaatagcgataatattaatgattctgttaatagctgcaccaattgtgcaaggagtgtgtgcatcaaaaactgcattcattacatcagataatttaatagatgaaaaaactgatacaaatatgctaaattcaattaagaattatgttgaagagataagtaacggtgaaattcaagtaatcgtcgataacgaagctccaggacctggagaaggttggcgatcaataagtgtaacaagtgatgtgagtattgacatagcagcatcagatgctggaaactacatacaacttgcatctgcagcaactgctggaaacaaacaaattatctttataaacactggtgattttgacttagataaccattctaattttttgagaagagcatgggatgacaattattcaaatgaatcacttgcaggagtgcgtgaccccggaacacttcttaacaatgcaggaatacaatatatccaacttgctaaagactatccggacaatattgataataatggtcttttagataaatatgatgataaaatgaaccatgaaatagctgagaaaatagtcaatattgttaataactatgacaacagttcaacaaaagaattaagtgataatttaatagtaaaaaataaaatatccccaaaaggaatggctgatgcaagtaaaatgcttgttgaaagtggagataaagaaatgaatggaccatatggttcctattcaacaccacaattactttatcagaccagtacttatctcaatggtgatggaattgacattcctaaagactataaaaaaccagacaacccattaggaatttcatttttaaccaaagacacttacagtgtttatgattatttcaaaatggcaggaatagttaaaaattatatggatgcgaatggaaaagcaccagattcgattgaatatgaaggagcccatataagctattatgatttaacatataattttgctaaaatagttcaaaatcatactgatgcaaatcatatgggctttgaaagtgagtatcactttgataaagtaaacgattcaatattattacatatattaccatttgtattaatatttgttgtgttattcctagcatatatgcttatgaaaagaattaaaagatttaaaagaaaatag

SEQ ID NO: 6743 - DNA, 684 bp, Methanobrevibacter gottschalkii
  source 1..684: mol_type = genomic DNA
atgaaaagatatatatcagaattaataggaacaatggttcttgtattattcggttgtggaagtgctgctattgcaggttccatgttaggtacagttggtattgcattagcatttggtttatcaattgttgctatggcctacgttattggagacatctcaggatgtcacatcaaccctgctgtttcaattggtatgtggattgatggaagattagaaacaaaagatttagttatgtacatcgtattccaatgtattggtgcaattattggaattggtcttttagctattattattaactctgcaccagttcttggaggttatgaagccacaggacttggtcaaaatggatttggatctgcatccagtgtaggtttaaatgtttttggagcaataattgttgagataattctgacctttgtatttgtatttacagttcttggagttactaaaaaagcagaaaatggtgcggttgcaggcatagttattggtttaactcttgcatttgtacatattatgggaattccattgactggaacttctgttaacccagcacgtagtatagcacctgcactattcctcggtggacaagcactcgaacaagtttgggtatttattttagcaccgattattggtgcaattattgcaggtaccttatttaaaggattaacctcagaggatgaataa

SEQ ID NO: 6744 - DNA, 693 bp, Methanobrevibacter gottschalkii
  source 1..693: mol_type = genomic DNA
atgaattttcaagaacaaatttacattagaaaatcttgccgtaaatatatggatgatgctattgacatggatttgattcatgattttatggaatcggttaagctattaaatagcgaaattaattataattatgaaattctaacccatgaggaagttaatgttcgtaaccgttggtctgctccttactatttagctatttactccgagaaaaaagaaaattatttaacaaatataggttttattttccaacaactttgcctatatcttcaaagcataagtattggaacttgttgggttggaatggatgttccaaagaataaatcttctgattttgtaattgcaatagcttttggtaagtctgatgagatgacaagggatttatctaaattcagaagaaaagaattatctaaaatctgtgattatgaagatgaaaaactaattcctgcacagcttgctccatcagctattaactcacagccatggtattttaaacatacaaatgagggttttgatgtttatcaggtaaaacagaatatattgaaacgtcaagttcttaaaaaatggaatccaattgatatgggaattgctttagcccatatgtatgtgtctaatgaaaaaagatttgaatttgaaattaaagctaattttgatagtattgaaggtcatacttatattggaagtattaaaatttaa

SEQ ID NO: 6745 - DNA, 678 bp, Methanobrevibacter gottschalkii
  source 1..678: mol_type = genomic DNA
atgaaaattgtaatcgcaattggaggatcaattttacttaaagaatatgattgtaaaaaatttcaggaatatagtgctattttaaaagatttatctactgaacatgaattattcgttgtagtaggtggtggaaaacctgctagagaatatattaatgtagttcgtgatttaggtgccggtgaagcacaatgtgatgacattggaattgaagtaacaagaatcaatgctaaattaatgctttcagcccttggtgatgcggcatatcaaagagtacctcacaatttccaagaagctttagaattctcagctactggaaaaataatagtaatgggaggaactgaacctgcacacagtactgatgcagtatctgcaattttagcagaatacattcaagcagataaactcatcaacttaacttctgttgatggaatgtatacaaaagatcccaataaatttgatgatgcagagcttgtttctgaaattaccgcaactgaattgcttaactttttaagtgataaagatgttaaagctggaacttatgaattcttcgacactactgctgttcagatgattaaaagatctgatttggaaactgttattacaaacggttttaaaccagaaaacttaattaaagcagtcaacggagaaactgtaggaacaaaaattattaacgaatag

SEQ ID NO: 6746 - DNA, 789 bp, Methanobrevibacter gottschalkii
  source 1..789: mol_type = genomic DNA
gtggataatcttgttgatattggcctgaatttaatgcattcttcatttaaaaaagacagagttgaacttattgaggaagcaaaaaaagtaggtgttaaccaattcattatcacaggaactaatgttcattcaagccagatggcagctgaatatgcttcaaaataccccggaactttgttttcaacttcaggtgtccatccacatgatgctaaaacatgcaatggacacacaatgttcgaacttgaaaaaatagctaaaaatgattgtgttgtggctattggagaatgcggtcttgattataacagaaacttctccccacaagatttgcaaagaaaatggtttgaagctcaaattgaagtggctgaaaggataaatatgccattattcttacatgaaagagaagcacatgaagatttatacaacatattaaaaagacatgataatgttattgaaaaatcagtagtgcattgttttactggaacaaaacaagaagcacaaaattatattgatttaggttgttttattggtgttaccggatggatttgcgatatgaaaagaggaagaaatcttcaagaagcagtaagtgcaattcctcctgaaaaattaatgattgaaacagatgcaccctttttaataccaaaaaatttcgaatttaaacctaaaaaaaatagaaatgaaccaaaatatttacctcatatcctcgaaacaattgcactttgcatgggaatagatgctgaagagcttggagagcaagttagcagaaatactaaagaattttttaaaatataa

SEQ ID NO: 6747 - DNA, 192 bp, Methanobrevibacter gottschalkii
  source 1..192: mol_type = genomic DNA
atggcagtagaacctcacaaacattgtccgatatgtggaactccaattccattaaatgaacttgtatgctcaccagattgtcaaaaagtctgggatgcaagattagcacagactaaaagaactagaattatattgtacataataattgcaatattcttaataatatgggcaattatgacctttatgaaatag

SEQ ID NO: 6748 - DNA, 324 bp, Methanobrevibacter gottschalkii
  source 1..324: mol_type = genomic DNA
atgattttaacctcttcaaatacactcgttaataaacaaatagttgaatataaaggattagttactggtgaatcactcatcggatcaaatatctataaagacttattctcgggtgttcgtgatgttgtaggtggaagaacatccaaatatgaagaagaattaaaaaaagcaagagatattgcttttaaaagtatggaagagaaagctgaaaatttaggtgcaaatgctataattggacttaaaatatcttacgataatctcggcggcactatgggaaatacaattcttgtaactgcttatggtactgctgtgaaatgtgaataa

SEQ ID NO: 6749 - DNA, 849 bp, Methanobrevibacter gottschalkii
  source 1..849: mol_type = genomic DNA
atgaaatttaaagtaccggaaaaacctgaaaatttacaagaaagactcatatgcataattttcggcacttttgttggaactgcagtctatgtattattcttatacttgaatatagcaattttaggctggaatttaggattgatttttgcaccattgcttgcaggatatgctgaaacaatgcttgcagaaagaatgctgagtagtgataccggtgctataagcgcatttattctttttgcaggtacaacattttatagttttattctagtaaatcctacacttggtgcaaattttatcacattcggagcaaccgcagtaatcttacaggcagcattccctacattaatcaattacatattacttgttattataattggagctatcttttacattttaagatttgttaaaaaaacacttacaagaatttatcttaaaataaaacatataatatacaaatacattcttaaaaagccatttgaagtcaaacctaaagctattgaatattatgatgaactcagaaataatcaagaaattaatagccttggagttatttttatgaccagtactgatgttcccgataaacatgttattaatttaggtcagtttcagtctacagtgattttagaaaaagaacctgacctattggatttaaatcccaaagaaagggaaaatcacacattgacaatattaaaatcaggaaaagacaaatgtttaattggtttaactgataaaataaaagctgctggtggtaatggcattattgatttagatattcaatacattaaaattggatttggtggtgaaagttaccagataagtgcaatgggaatgggagtatatataaattaa

SEQ ID NO: 6750 - DNA, 204 bp, Methanobrevibacter gottschalkii
  source 1..204: mol_type = genomic DNA
atggataaaaaaatgattgtatcaataattggatatattgtagcattgttaatccctattgttggattagtatatggagcaatattgtttttctttaaaaaagaagaaccaacatatcgaaaacatggcagattgattatttatttctcaatcgtgatttttgttgcaactttaatagccaaattattaataggcggattctag

SEQ ID NO: 6751 - DNA, 360 bp, Methanobrevibacter gottschalkii
  source 1..360: mol_type = genomic DNA
atgaaggaaaatagaaaaattggagaaaattttgatgttaatgatgcagaagatatttttgataagttaaggaatgtaaaagggaaaacaaagcctaaaggtgaaagtaaatttaagaatatatcttatcttatgaatgaagctcagtacttggaaaaaaatggccaacttggtgaagctgttgagttatacaaacagattatttttattctaccagattctataaaagcttatgaggcaatagccaatatttatcaaaagcaaggagacattgattctgaaaaagagattttaaaaaaagctattagtaactgtaaggaaaatgatgagtttaaaaaaagattaaatgaaataacttga

SEQ ID NO: 6752 - DNA, 810 bp, Methanobrevibacter gottschalkii
  source 1..810: mol_type = genomic DNA
atgtttacaatcgaatattttgtaggtttgattttaattggtatatttgcaggtttcgcatcaggacttctaggtgttggtggaggatttttaataactcctcttcaatttttcttattaaagtatattggtgttgcaccagatcttgctatactaatatcttttggaacaagccttgcaatcattattccaacatcacttagtggtgcttatagacacacaaaatcaatggataatattttaaaaccaggaattcgtttaggtatttttggagtaattggtggttttgtagggggtttcgttgcatcagcacttccttcaagaacattagaaattatatttggtcttttattattattcatagcttttaacaatattgttaatattaataaagaaagagaaaaagctagaattccatttaattggacaagtattggactcattggtttgcttgttggattttcatctggacttttaggagtcggtggaggaatatttttaatagctattttaacagcacttcttggattttcaatgattgaagcaattggaacctcttcaatatttattagtctaacagcaatcgggggatttttatcttacatgattactggttggggagtaagcacatttccatattcaataggttatgtaaatatcattaacttagttttaattgcatgtttttctgtacctatggcgtcatttggtgcaaaaatggcacatagggttcctcaaaagaagttaaaaataatattctcaatagtaattttgtacatggcattgaaaatgttaggagtattaccttaa

SEQ ID NO: 6753 - DNA, 1059 bp, Methanobrevibacter gottschalkii
  source 1..1059: mol_type = genomic DNA
atgaaagttaataaaactatcttagttggatttttattcttattgattggagcattcatatttgtatctgacctcttaaatccccttataagaccggtaactcatttatttttaatgggatcatcgaaaggaaaagacattatattttttggtcttttaggattgcttctaattttatcacaagtaatacccagaaaaatcgatgctacccgatatttgaaaatatcaattgttatcggatttgttttacttgtatttggaaatcttctggaagttgtatttagactacaaatgggaatcaaacttaacactgtgttttgttctatgtccagcacgatgagttctacaagtattttacatactcatttgttaaagtccattttaggtgaagttttaactaaaataattggaccattcattcaaagcaacatcaatacaggtgttggactatatgcatatgtcccagatattagttttttagtggttttaatcattccaattttatttatcacacttattttagcaaatcaaaaaagaccatggtttacaaactttttaattgcttttttttcaagttgtcttcttatcggatcatttgatggaggtctttgggccacaccctcccttgtaggtcttttaggattatggattgtttatagaaatggatattacttaaacttacatttaggaaaaatcataaaagataaaaaattattaaaggctaatgaaaatatccaaccatcatatagaaatattggtttaagtgaagcaaaatatttattcaatagatttttaccaatcctaataattcttattgttatagctttaagatttactgtagcttttgctggtgcagaacccgattattatacagtagaaatagtcaacatgacagataatgttgattttggagacattccaatagaaaaaataagcaatgaaacatatcatgtagattccaattataatgaaatggaattaattaatgatttaaaagtaccattaaataattcctgcaagtactacacagtttcttggaatgcatattcctatttatag

SEQ ID NO: 6754 - DNA, 1032 bp, Methanobrevibacter gottschalkii
  source 1..1032: mol_type = genomic DNA
atgttaaattcaatttttaaatattcttatggtgtaatagtttgtttaatcatcgctattccatccttaattttggggaatttatttccagttattggcggtccaattattgcgattatcttaggaatgttgattgcttttgcatggcatgaaaaagaaagttttgatgaaggaataagttttacatctaaatatgtcttacaaacagcagttgttcttttaggatttggattaaacttgaatataattttaaaaactggaattcaatctcttccaattattattgcaacaatttccgtcgctttaattgttgcatttattatgcaaaaaattctaaatatcgaggaaaaatcagcaatactaatcggtgttggttcatcgatttgcgggggttcagctattgctgcaacagcacctgtaattaatgcagatgaagaacaagttgcacagtcaatttctgtaatattcttcttcaatgttcttgctgcaattattttcccatttttaggaaaaataattggtttttcaacagttgatgggggaccatttggtctatttgcaggaactgcaattaatgacacttcatctgtaactgcagccgctgctacctgggataatatgtggggacttggaagtcaaactcttgataaagcaagtactgttaaattaacacgtacattagcaattattccaatcactttagcattatcagttttcacttcaaaaaaatcagagtatgttggtggggaattttcacttaaaaaagcatttccaatgtttattttatattttgtaattgcttccgttatcacgactcttgcagtaagcttaggtgtggatgcaaatgtatttttaccatttaaagaattaagtaaattctttatcatattggctatggctgctattggattacatactgatattgtaaaattagttaaatccggaacaaaaccaataattcttggagctacctgttggattgctattattattgtaagtatttcaattcagtttactttagggataatttaa

SEQ ID NO: 6755 - DNA, 888 bp, Methanobrevibacter gottschalkii
  source 1..888: mol_type = genomic DNA
atgaaaaaaatctattttattttacccatcctagccggaataatgtttggatccggtggagtatttgttcgaacattaatggtaaatggaattgattcaacaacgcttctttttttaaggttttcaatagcaataatccccataatgatagcaattttagtaactgataaaagtttgttaaaaatagatttaatagacatttcattatttttagtttgtggaatatgtattgtaggacttaatttgtgctacaacgaatcaatgggaaatattcccctttcattagctgcagttttattatcacttgcaccaatttatgtcattataattgcttattttacatttaaagaaaaaattacaagaaaaaaaataatttgtatggcattagccatatttggttgtattctaatgactggtgttttggaaactagtttaagcaacattccattttacggaatcactgcaggtattggtgcgggattattctgggcgatttatttaatggcttctaaaaaatcaattgaaaatggaaaacacacatttacaatacttatttattcaattacaattatttcaatgggattgcttccatttacaaactttggacaaatcacaaatttcatttcaattaatcccattttagttataatattcttaataatgcactcaacattttcatttgcccttccatatattttctcaactgtgagtttagagcatatagattcaggaatagcttcaatattattatctggagcagaaccgtttgcagcacttatatttggattaatattctactcagaaattccaacatttctgatgttttgcggatttatattgactatcattgcaatgatggcgttaagtagaaaagaagaaatcaaataa

SEQ ID NO: 6756 - DNA, 1896 bp, Methanobrevibacter gottschalkii
  source 1..1896: mol_type = genomic DNA
atgattttaagcattattatacctacctacaatgaagaaaaatacctcccaattctcctagagagcattaaaaaacaaagctttgaggattatgaaattatagtagctgatgcaaattcaactgacaatacccgaaacatagcacaagaatatggttgtataatagtagatggaggcttacctgcaataggtagaaataatggtgctaatgttgcaaaaggagatattttactttttcttgactcagatttaaaattaacagatgagtatctaagagatgttgtatatgaatttaaaatggagagacttggaatagcaattacccgcatggaaccactttcaaacaaagttgaagataaactattccatgattttgcaaatttcttcatggttagtgttgaaaacattaaacctcatggtgcaggatgctatggaataatctccaaaagaaaattgcacgaagagtgtaatggatttgatgaatccctaacttttggagaagatactgattatattgaacgattagcaaaaaaagaacgttttagagtattaagaaaagctaaaattggtgtttcaacaaggcgacttgaagaagaaggaattacaacattaatcagacagtacggtaaaagcactgtaaatgactttttaggaaaaagaactgatgctaatgagttaaattataaatttgaccatggacatgatagaattgctgaatcaaaaatgtcaggaattgaaaaaagtgcagaaaaaattaacgtaattaaagagacttatgatgaatcaaaagaaaaagtcaacaaagcaagatcccttctaaacactaaaactgaaagagataaaaaaatagtcttttactgtgtttgtggcgaaggaatgggtcatgcaataagaactggagtaatcgttgataaaattaaagatgaatatgatgtttacttattttcaagtgacagagcttacgaatatttaaaatccaaattcaataatgtttataaaattggaggatttaacacagtatacattaacaataaagtaaataatttaaaaaccctttcaaatgctctgaaaagaaatcccggcaatataaaaacaggatatgaaactttatataaaaaagcaagagaacttagaccagatgttattgtaacagattttgaaatttatgcaacaatggtttctaaacttctaaatattccattaattagtttagataacatccatatgattactcaaactaaaatcgattatccaaaagacaaatatgttgaaatggttaaagcaaaaggagtaattaaaacatatgttgttaaaccaaaagtacatatccttacaagctttttttatcctaaattaaaacctaaaaagaatgctataatctaccctccaattatacgtgaagatattttaaatttaaagcctagtaaaggtgaccatgtaattgtttatcaaacaagtaaagaaagtggaaaacttgttcgtaagttaaaatctcttaataatgaaaagttcattgtttatggatttaataaaaatgaaatagatggcaatttaacttataaagagtttaatgaagatgttttctacgatgatttggcatcatctaaagcggttatttgtaatggaggatttacattcatatcagaagcaatacatcttaaaaaaccaatttattctgttcccgctattggaaacttcgaacaaacattaaatggatattatgttcaaaaattaggttacggagaataccatgaagttatgaatgcttctaaagttaaaaaattcttatcaagactttcaaaatatcaaaaaagacttgataaagttaaaaaaacaaacaatgatggaattgtgcgtgaattaaaatatagaattgaaaaatattcaaaacagtaa

SEQ ID NO: 6757 - DNA, 1455 bp, Methanobrevibacter gottschalkii
  source 1..1455: mol_type = genomic DNA
ttgttgagcaaaaaattaatactgattacagtactattaggtttattggcaatttcaactgtaagtgctgctgacaatactgaaagtgacattattggagccgatgggttaaacagcacaagcaatataccaatggatgctccaagaacatttactcagttaaatgaagcaataactccatacaccagtattgatttagagcatgattatagatatgataatgagacagattccgaatttgctaatggagttcccattaccaagaatataactattgatggtaaaggtcatacacttgatggaaattatcttgcccgtatttttattataaaagaagattgtacggcagtttttaagaacattaacttcattaacggtaaggcaagcaccaatggcggagcaatttatggagtttgtaatgcagaaaactgcaatttccttaataatactgcagtaaaagatggtggagcaatacatctaagtaacgccaataactgtaattttattaacaattacgtattaaatggtagaggtggagcaatgtataaaggttatgcaacaaactgcatatttactgacaactccgcagtgactggcggagcactctttgaaaactctgcaacaaaatgtaagttcaccaataattttgcaaaagagaatggtggagcattatatggaggatttgctgttcaatgtaattttaataagaattccgcaaagaataatggtggagcactttataaaggttcagcccactactgtaatttcagtgataattatgcagtaaatcatggcggaggaatgtatggaggtgccggtgaatactgcttctttaaaaacaatgcagcaaaatcaggacatgatgcatacagaagctccctcaaaaaaactaagacaactatttatataaagcctacaactactgcccattatggtgattatgtagttataaccttaaaaaatattaaaaacaaagttgtgagtggtgttaaggtaagtgtttttattaatggtaaaaaatatgctacaaaaattaccaacaaatatggtcaaattaaaattgatacacgaaacggttttgttattaaaaaatacactattaagtcaaagtttgcagaagattccaattactacgcatcatcaaaaacagttaaaattactattaaaaagtcaacaccaaaaataactgcaaattcaaaaacattcaaaaaatcaactaaaatcaaaaaatacagcataaccttaaaaaccaaacaaggaaaaattatgaaaaataaaaaaattacattaaatgtcaatcatagatattattatgcaacaaccaattataaaggaattgcaacatttaaaattaccaaactattatataaaggtaaatttactgctacaactggatatgctggtagtaaatattacaatgcattaactaaaaaatccaccattattgtccgatag

SEQ ID NO: 6758 - DNA, 297 bp, Methanobrevibacter gottschalkii
  source 1..297: mol_type = genomic DNA
atgattattgttcaagctaaagctattcctaaagatgaaacaagtaaaaatagaataattgaatttgctcaagatttgattaaaaaatcgaaagaagaatctggtaatattgattataatttatttgttaatacagatgataatacattattatttgttgaacaatgggattctgtagaaattctcaaaaatcacttgaaaacagaacattttataaaatttggtgaaaacatatcagatttagttgtaagtgatttagaaattaatgtatttgatgcaaattcaatatctttataa

SEQ ID NO: 6759 - DNA, 1077 bp, Methanobrevibacter gottschalkii
  source 1..1077: mol_type = genomic DNA
atggcaactttcaaaggttttgcaatgaaaaaattaaatgaaactggttgggttgaaaaagaagttcctgaatgtgggccactcgatgctattattaaacctacatgtgtatctccatgcacttcagatattcatactgtatgggaaggagcaattggagatcgtaaggacatgattttaggtcatgaagcagtaggtgaggtagttgaagttggtaaattggtacaaaactttaaaccgggtgataaagtaattgtgccggcaatcactccagattgggatgatgaagctgcacaaagaggtttcccttcacaaaccatggaaccattaggtggatggaaattctcaaactttaaagatggtgtttttggtgaaagattccatgtaaatttagcagatgcaaacttagcacatatgccagatgggttgtcagatgaaggagcatgcatgttagtggacatgtggtctactggtatgatgggttctgaaaatgctgatattccgttaggtggaagtgtacttgtcataggaattggagctgtaggactttcagctattgcgggtgcaaagttattaggtgctggaagactatttgcagcaggaacaagaccaatttctgtaaaagtagcaaaaaagtatggtgcaactgatataattaattataaggaagggccaattgatgaacaagtaatggaattaaccgatggtgcaggagtcgattctgtagttattgccggaggtaatcttgaaaacacatggaaagaagcaatttcaagtgcaaaagcaggaggaactgtttctaatgtaaattatttgagtggagcagacaatgttttaatacctcgtgttgaatggggttgtggtatgtctaacataaacattaaaaatggattatgtcctggtggtcgtgttagaatggaaagactagccgatcttgctttatgtggtagacaagacccagaacttttggtcactcacaaatttgaaggtttggataaaattgaagacgcactttatttaatgaaagaaaaaccaaaagatttaatcaagcctgttgtaatgcttgatttggattaa

SEQ ID NO: 6760 - DNA, 261 bp, Methanobrevibacter gottschalkii
  source 1..261: mol_type = genomic DNA
atggatgacgaaacattaaaaaaatttgcatatgtaaatatcagttcttaccgtgtgaaaacaatgaaagctcttaaagatgatgtaaaaacaccaaccaatattgcaaaagaagcaggaatacttccaaatcatatttcaaaagtccttcgtgaattaaaagaaagtggaatagctgaatgtattaatgaagaagcaagaaaaggacgtttatacaggttaacagatgttggagaagaaatagttgataaattagactaa

SEQ ID NO: 6761 - DNA, 936 bp, Methanobrevibacter gottschalkii
  source 1..936: mol_type = genomic DNA
atggctaaagcacaggaagaagaacttaaagaaccaacagtatgtcctgaatgcggatcaactgaattaataggggactatgaaagagcagaagttgtatgttctcgttgcggattagttattgatgaaaatcttgtggatatgggtcctgaatggagggcatttgaccatgaacaaagagacaaacgtacaagagtgggtgctccaattacatacaccattcacgataaaggtttaagtaccatgattgattggagaaataaagacatctatggtcgtgatattcctgcaagaaacagggcacaatggtacagattaagaaaatggcaaaggaaaattagaatttccggagcaaccgaaagaaacttagcatttgcattaagtgaacttgatcgtgattcctcaagattggggcttccaagaagtgtaagggaagctgcaagtgtagtgtacagaagtgcagtagataacaaattaatcagaggaagaagtattgaaggagtagtagcagcatcattatacgctgcatgtagacgttgtaatgttccacgtactttagatgaaattgccgaagtatccagagtaactaaaaaagaagtgggccgtacatacagattcttgactcgtgaattaaacattaaattaccaccaacttctccagttgattatgttcctagattcgcatcagaacttggactttctggtgaagcacagtccaaagctattgaaattattgaaaaagcaatggaaaaaggattaacttcaggaagagggccgacaggtgtagcggctgcagcattatacattgcatctgttttgcttggagatagaaaaacccaaagagatgtagctgaaatcgccggtgttactgaagtaactatcagaaacaggtataaagaactcacagaacagttagaaatgggtgttactttataa

SEQ ID NO: 6762 - DNA, 303 bp, Methanobrevibacter gottschalkii
  source 1..303: mol_type = genomic DNA
atgaaattattaggcaaaagtttgcatatagcaaattcaggaaaattaattgctcgaacaaccaagacaccttcaccgggagctatagtgtttgatagtaataagaaaaaaattggtaaagtaggctatgtttttggacctactgcgaatccctatgtatcaattagattatttagacaagcaaatagggaagaaattgagagaaactgtggtgaaaaattatttgtatcaaaaccaaaatccaaaaagactagaaaaaggaggatgagatcacgccaaaagaaaccacaaaacaaaaaatag

SEQ ID NO: 6763 - DNA, 744 bp, Methanobrevibacter gottschalkii
  source 1..744: mol_type = genomic DNA
atgtcaattagtccaaaggatttattaaataaaaataaaaatttgaacaaacgattagatattagtgaaatttgtttagataatgttacaattaatgatttaaaatttaatggggataactatgatgaatatattaatctccattctcttttagaaaatatatcgacatgccaggtttcagatgcatttaacgggatttcaagacaatccggtgtaattcaaaagataaaaccaattaataatcgaagagtattcggcagaatatttacagcagaaactactagtggggactggggaacttctgcaatggcaattgatgaggctgatgagggagacatattattctttaaagttgacagtgaggagatggcaatttggggtgagcttgcttcaacttgtgctcgtgataatggaattaaagctaccgtaatttacggttcagcacgtgatttggatgcattgttgtatatggattatccagtatttgcatcaaattactgtcctaatgcagggttggctctaggtttaggtagcttaaacgaatcattggatatagaaggatttaaagttaatcctggagattttttaattggagatgaatgtggtattgttgtaattcctcaagaattgtttgtaaaaacaatgtttgcttctttagatattaaaattaaagaatccctcatcattgataaaattgcattgggaaatacattatcgcagattgtgggtcttggaaaaaaatag

SEQ ID NO: 6764 - DNA, 1260 bp, Methanobrevibacter gottschalkii
  source 1..1260: mol_type = genomic DNA
atgggaaaaggtgaagaattaactacaacaaaatatttaattcatgctcaaattactgctaatggtattgtagaaaaacctgatgttgttggtgctgtatttgggcaaactgaaggattactcagtaatgatttggatttaagagaattacaaagaactgggagaatcggaagaattcaagttaacattcattccaatagtggaagagcaaaaggagaaattgtaattccatcaagtttggacagagttgaaactgccatccttgccgcatctcttgaaactattaatcgtgtaggtccttgtgaagctgaaattcaaaccaccaaagttgaagatgtaagggcggttaaaagagaacaagttgtcaaccgtgctaaagaaatttacaaaaacatggttgaaagcgttggtcctaccagcattaaaatgattgaagaagtaagagaggcaatgagagttcatgaaatctccgaatatggagaagatcgattacctgccggccctgccatccactcatctgatgcgattatagtagtggaaggacgtagtgatgttttaaacttactcaaatacggtattaaaaacactgtcgctgttgaaggtgtaagtgtaccccattccattggtgagttaagtaaaaaaagaaccacaactgcattcgtcgatggagatagaggtggagaactcatcttaaaagaacttttacaaattggtgatgttgactttattacacgtgctccaaaaggaaaagaagttgaagatttggaaaaagacgaagttttagtcgcacttagggacaaagttcctacagcacaattcctagctaccaccaatatcttaaatgaaaatcctaaaaaagaacacatcaaaaatcgtaataataacagaaacaacactaaatacgataaaaaacaaaaatacaataataaccgccgtgaagaacagcatgttgtagatgaaccggttattgaagatgatgaagtaagtctaatgaaagacatgcttagagaattcgaaggaaccggtgttggagcaatattggatgaagcattaaatatgactaaagaagttgaagtggaaaacatctatgaagaaattaaaaacatagaaggaactgctgatgctgtgatatttgacggagttatcagccaaagattagttgatgcagcctcagaaaaaggcattaaaaaattagtagcatttaaatccgtcaatattgttaaaaaaccgcataatgttaaaattataactattaattaa

SEQ ID NO: 6765 - DNA, 612 bp, Methanobrevibacter gottschalkii
  source 1..612: mol_type = genomic DNA
atgaatattaatattgaaaactactacagtactagaaaaaatgtttttgaaagaattcaagatgctggtactgcaaccaaagtactcatgtcattaatgatggcatgttttactggtataatggcacaaataattattccattaccatggactccagttccagttactgctcaaacatttgcagtattatgttctggtttattattaggtaaaaaatatggatgtctaagccaaattttatatgttgttttaggtgtagcatttattccatggtttggaggaatgaccggtggatttgaaacattactcggatcaactggcggattccttattggatttattattgcatcctgctttatcggaacaataactgaaaaatatgctgatgctcgtaatttcaaaaaaatggcggctgtaattggtattgcaaatttctcattaatttacattccaggacttttaggccttgcattatggttaaacttaactcaaggcacaagcgttggtattgttgatcttttaatgatgggacttgtaccatttatcgccggagatattgtaaaaatattaggtgcggcatccgtgtccaaagtatttttaccaaaagaataa

SEQ ID NO: 6766 - DNA, 399 bp, Methanobrevibacter gottschalkii
  source 1..399: mol_type = genomic DNA
atgaaacttattttaagaggacatcatttattgtgtcttaaaggttttcaaggctatggatacgatgaaaaatttacaaaaaacatgactgatattaattcaaagcgaaaatcaccagagacagttattaaattaacaaactctcctgacgatatttgtaaagcatgtcccaatttaagaaacaatatatgtgagaatgaagctcaaaatgataaaattgttttaatggacgatcaagtattggaaaaattagattcctcaaaagaatataattcagttgagctatttaaaagaattgaacatatttttaatacaaaagagagtgtttgtgaaatttgctttaactgcatatggcatgagaaatgtttattttatcaaaagattggaaaacgaatttag

SEQ ID NO: 6767 - DNA, 810 bp, Methanobrevibacter gottschalkii
  source 1..810: mol_type = genomic DNA
atgaaagaaaaagtaaatctgtctggtgttagtgaaacaatgctagttccattatattcgagagcattggaaagcaatagaaaaaatcctgcattctatgataaaactgcaataggaattgttaaaaatcttgattacaattttaaagaacgatttaaagaatctaaaaataaaatgaacttttggggatgtgcggcaagaactattatattggatgatgaggtttctaaatatattaaaaataatccggaatgttctgttgttaatttagcatgcggtttggatgatagatttagtagggtcgataacggtaaaataaattggtataatattgattttgaaaatataatttcgttaagggataagctcatagataaaaaagacagagttacagatattcctacttcagcacttgatttttgttggattgataaaattgaaaataaagataatgtactgattatagctgaaggttttttaatgtatttatctgaagaagatgtaaaaaatttgttttttaagatttctgaaagttttggaaaagttgaactgcttttagaattaatgactcattggatggtaaaaaaccaaaagaaacatgacactgtaaaacagactggagctgtatttagatggggtataaatgaaaccgaagactttgaaatgatttgtccaatgtttaaaatgactggggattataatttaacaaatgtgatgaaaagatattctccgatttttattacaattgcatctccatttttaaaacctagaaataaccggattggaaaatttgaaaaattaattctataa

SEQ ID NO: 6768 - DNA, 225 bp, Methanobrevibacter gottschalkii
  source 1..225: mol_type = genomic DNA
atgttcaattcaaagtttttaatattaattattggtgttttaataattggtttggcattatcctgttatttctattcgtcagataatttccatgagtctgattctagtttaaatgaaaggcatgatgatgtggtttatctctggatgttggatgataacggaaagttgaaactggttccgacaactgaaacttattctgaagggtctgcaagtgatccagactaa

SEQ ID NO: 6769 - DNA, 2289 bp, Methanobrevibacter gottschalkii
  source 1..2289: mol_type = genomic DNA
ttggaaaataaaatcaacgcaggatacggttccacaataacattagaaaatgattatgaatatgaggaatctggatatagttctggaatagaaattactcaggatataactattgatgggaaaggtcatacaatcgacgccaaaggacaaacaagaattttcgatgtggaagcaggcaaggtaacattgaaaaatattacttttaaaaatggaatgcaaaacttcttttttggtggtggagccattctctggaagtcacttgatggaatcattactaattgtacttttataaataactatgctccgtctggtggagcaattcgcttggaagcctgggacaatacaatatctgattgtactttcataagaaacactgccaatcaaggaggagctataaatttgaatacaactaattacgcttcaatttccaattgtgtttttgtgaataatgatatttactcagtgcaaggtgatggatgtaaaataaacaacaatattttcatgagttgttcaattggttttgactttactcgaaattataatattgataataattggtttgggaataatgcaagtaattatacttataaaccaaatgagttttgtaataattggttgtttttaaatgcaacaacagatcccaacacagtttcagtttcaaacactgcagacattatctttaaattatatgcctataattcaacttcaggaaacatctctaaatatgataatgcgccatttaaaaatcttaatttaacaatcactgcaacaaatggtaatattgataagaatattgctaaattaggagaaactatcaaatatactgcttccagtgttggaactggcaatgtatctgccaaagtggaaaatgtagaatatacaattggattagacatcattccaatagaaactaagcttatacttaattcgactgatacaattattgatagcatcagtactgttggcatcaatgtaactgatattaataataatcctttaagtggtgttgttaaattaacaatcaaagataataaaggtaatgaatacaacactactgtaacagtgaaaactggcattactacttacatatatcctgcagataaaacaaatatcagtaaaattgtaaatataactggtttttatcttggaaatgatactttagggtatgttgattctccagtagcagaaaccaaatttagggttgataaacttaacgctactgtaaaccttgtagtaaacaattacacaatcagaaacttctcagtaaacattacagtaactggtaaaaatactgacagaatagtagaaaatggtagtttaataatctatgcaaatagagaaaaaattgacgagataaatattacagatggtaaagctgaaaatatattattaaatatcaccaaaataggaaattatgaattatcagttgcatatagtggaaataacgtattcaatgaaaacaatactttttcaaaaaatgtaactgctataaaaataagtactattatttcagcaaataacattatcactacttataacactgataaatacttagaaattactttattagatagtgaaaaaaatccattaaacaatgcaacattatctgttgacttgaatggggctaaaaaatacacaacttataaaaatggacaaataaaaatagcattaggtagtttagttccgaaaacatacactgcaaaagtaagttttgccggaaatgatatttatagtccctattctaccagctttaaggttgtagttgaaaaagcgacaccaacaataactgcaaaaacaaaaatctttaaatttgaggacaaaaccaaaaaatacactataactctcaagaacaacaaaggaattgtaatgaaaaacacaaaagttactttaactattaatggaaaaacctacactgcaacaacaaacactaacggtgtagcaactttcaaatttaataaattgaataaaaaaggaacatatactgcatctatcacatattcaggagataaatattacaacaaactaatcaaaaaagctaaaataaaaataaaagcacctgcctggaaaacagtagcaaaaggtagcaaaaataaggcaatagttaaaaaaattcaaaagactttgaaaaacaatggatactaccttaagtacaatggaagatacttgaaaatagatggaattttccaaaaatatactcaaattgccgtaaaacatttccaaaaagcaaataaacttaaaacaactggaaaagtagattacaaaactgctaaaaaactaaaaataatttaa

SEQ ID NO: 6770 - DNA, 147 bp, Methanobrevibacter gottschalkii
  source 1..147: mol_type = genomic DNA
atgaaagaaattaatattgtagaaataattaaaaataaagataaattagaaaaacacgaaggatatcttcccatacccattttacattggattgacataggtaaatgggagatatttttagaaaaacatgataagaagttatattag

SEQ ID NO: 6771 - DNA, 144 bp, Methanobrevibacter gottschalkii
  source 1..144: mol_type = genomic DNA
atgaaattattcaaaacggaaattacagttttaggaaatgaaaatacaaaaggattagcattaaatggtcgttgttctcatggtaaatttcaggacatgctcgagaacatgaattattacttggaaaaaatacataatatatag

SEQ ID NO: 6772 - DNA, 1185 bp, Methanobrevibacter gottschalkii
  source 1..1185: mol_type = genomic DNA
atggaaaaattgttacttattggaattgatacaagaagcatgattaacagtgcactccagcttgatttcgaactattttccaccagttatttttcaacttcagacacaccaaccattaaaaatcaaaaaattattttaaaggaaaagtatggtgaaagttgcggtgcttttgaaaatcagtttagtaacctcgacattttagaattttcaaaagattatcttgatgaagttgactatatcattcccatttccggtgtgtctccaagtgatttttctaaaagacacaaaaggaaaattttgggaacaactaatgtttgtgatattgaaaacaaatttaaatttttcaaaaagatcaaaaatgaattcttaactcccatgacttttaagttgtctgatgtagatgaagcaattgaaattgataagagttatccgaatagtcaatttattttgaaacctgtaaaaggaagtggtggatataatataaatctcttaaataatgtaagtgattttcaatttaatgatagcgaattcattttgcaagaatatgttacaggaatcaatgtaagttcatcaattttatcaactgcccatgctgcaaaaacaataatgaactcaagattacttacactgaatgattttggaaaacaagataatttcatatacgctggaaacatactgcccttaaccaatgaatcagtaatggcagaatttaatggaatagatgacattattaaagagatgaatgaaacttcagagaatttggcacttgaatttaatctcctcggttctaatggtgtcgattatatcattaatgaaaaaggactgtatgtaattgaacttaacccaagacttcaaggtacatttgaatgtgtggaaaaaacacttggaataaatatgcttgatgcacacattaaagcatgcagaggtgaacttgttgatattcccgaaccaaaatgttattcctataaaaaaattatctactcaccaacaagaatgaaatacgaaaaaataaatttggataacatttatgacctgccgcacataggatcaataactgaaaaatcagaaccattactcacaatcatagacagcgataaggattttaaaaaattatacgaaaaagtagaattagctagtgaactaattaataagaaagctaaattacaccaatcagatataaaataa

SEQ ID NO: 6773 - DNA, 234 bp, Methanobrevibacter gottschalkii
  source 1..234: mol_type = genomic DNA
ttgtttatttttaaaataagctattataatttatttactgtaataaatttttttactagaaattttttaaagaacggtgcaaacatgaaaagaaatccaattgaccaatttatgaaagatccggacaataaggctaaaatatttatctggatgacacgagcaatgattataactacatttatgattacaattggagttatattatttattttatatctgattggtgtaatttag

SEQ ID NO: 6774 - DNA, 684 bp, Methanobrevibacter gottschalkii
  source 1..684: mol_type = genomic DNA
atggcacaagatattatagatggaattaatccaactcgtatggaattgttatctcttaaaaacagaactaaacttgctatcaaagggcatggtttgctcaaggaaaaaagggatgctttaattaaagagttttttgatatcttggatcgtgtcaaaggtattcgtgaaaacgcagaacaaagtcttaaagaagcaaatgatgctttacttgaagctcaaattgcaatgggtgatttagctgtcagaaaagcagcattatctgttaaagaatctattgatgtggaaattacatcaagaagtgttatgggtgttgctgtgcctgtaaccaatgttaaaatggaggaaagatctattattgacagaggttatggattttctgataccactatccagttagacgaagctgctaagaaattcgaggaatcattaaagtatttaattgaacttggggaagtagaaaaaactattttcttacttgctgaagaaattgaagctactaaacgtagagtaaatgctttagaacatattatgattcctagattccaaaatactgaaaagtatattgatatgagactccaagaaatggaaagggaaaacttcgtaagattgaaaatgattagatcaactattgagaagaacgaaaaagctgctgctgaagcagctgctgcagaaaatgcagaataa

SEQ ID NO: 6775 - DNA, 1392 bp, Methanobrevibacter gottschalkii
  source 1..1392: mol_type = genomic DNA
atgaatacaaatattaaaactagagaatatactactgtatccgaagtctcaggtcctttaatggttgttgaaggagtagaaggcgttggttacaatgaaattgtagatattgaaacacctactggtgaaaaaagaagtggacaagttcttgaagtaactaaagatgttgctgttatccaagtatttgaaggaaccactgacttgaacactaaagatactaaaaccagatttactggtcaaaccgcaaaaattggcgtatccagagacatgatgggacgtatttttaacggtatcggtaaaccaattgacggtggacctgaaattattcctgatgaagaattagatattaatggggctcctatgaaccctgcttcccgtgaattccctgaagaatttattcaaactggtatctctaccattgacggaatgaacacattagtgagaggacaaaaacttcctatcttttcaggatctggtttacctcacaatgacttggctgtacaaatcgctagacaagctaaagtattaggtgctgatgatgaatttgcagtaatttttgcagctatgggtattactaacgaagaagcaaacttcttcatgagagacttcgaacgtactggagcattagaaaaattaacagtattcatgaacttagcagacgaccctgctattgaaagaatcttaactccaaaaatggctttaactactgctgaatactacgcatttaccttaggcatgcaagtgttagttatcttaactgatatgactaactactgcgaagctttaagggaaatttccgcagcaagagaagaagtacctggaagaagaggttatcctggttacatgtacacagaccttgcaggtatttatgaaagagcaggacgtatcgacggtaaagaaggttcaattactcaaatgcctatcttggtcatgcctcaagacgatattacccacccaattcctgatttaactggttatattactgaaggacaaattgtattaagtagggaactctcaagaaaaggtatttatcctcctgtagatgtgcttccttcactttcccgtttgatgagtggtggtattggtggagacaaaacaagagatgaccacagtggtgtatctgaccaactctattctgcatatgcagaaggtcgtgaattaagagatttagttgcggttgtaggggaagaagcacttactgaaagagatcaaaaattcttagaatttgctcaagcatttgaagaccaattcattacccaaagtaaagatgaagatagatctatcttcgaatctttggatcttggttggaatttactcaaaatcttacctaaatccgagctcaaaagggttaaagaagaattcattgaacaataccttcctaaagatgaataa

SEQ ID NO: 6776 - DNA, 1743 bp, Methanobrevibacter gottschalkii
  source 1..1743: mol_type = genomic DNA
atgattattgaaggaaatattattaagattgctgggcctgttattgtcgcagatggtatgagaggggctcagatgcttgagatggttagggtaggtaacgaaaagcttattggagagattattgagcttgaaggtgacactgctactatccaagtatatgaagaaacagcaggtatccaacctggtgaagtagttgaatgtactggtggagcattatccgtagaacttggtcctggtgtaatgagttccatttttgatggtattcaaagacctttaagaattatcagagaagcttctggtgatttcattgctagaggtattgatgtagattccattaataaagagaaaaaatgggaattcaaacctgttgctaaagtcggagatgtcttaaaagctggagatgtacttggtgaagtacaagaaacttctgcagtattgcacaaaatcatggttcctcctgcacttgaaggtgaagttactgaaattgcagctgaaggtgaatacaccattttagaggacattgctgaagttggtggacaaaaagtacaaatgctccaaaaatggcctgttaaaaaaagccgtccttatgtaagaaaattagatccagatgtacctttagtaactggtcaaagagcacaagatactttcttctctgtagctaaaggtggagcggcagctattcctggtcctttcggatccggtaaaactgttacacagcaacaattagctaaatgggcagatgcagatatcgttgtatacattggatgtggagaacgtggtaacgaaatgactgaagtacttactgaattcccattccttgacgaccctaaaactggtaacccattaatggacagaactgttcttattgcaaacacttcaaacatgccagtagcagctcgtgaagcatgtgtatacacaggtattactattgctgaatattaccgtgatcaaggttacgatgtagcgctcatggctgattcaacctccagatgggctgaagctatgagggagatttctggaagattagaagaaatgcctggggaagaaggttatccggcatacttagcatccagattagctcaattctacgaaagagcaggaagagtagaaactattggttccgaacctcatgtagcatctatttctgttgttggtgcagtatctcctcctggtggggacttatctgaacctgttactcaaaacacattacgtatctgtaaagtgttctgggcattagatgcatctcttgcagataaacgtcacttcccttcaattgactggttacaaagttattcattatatgtggacagtattgaaggctggtgggctgataatgtagctgcagactggagagcaacccgtgaccaagctatgggtttattgcaaaaagaatctgagttacaagaaattgtacaattagttggtcctgatgctttacctgaaactgaccaagctactttagaaacaactcgtatgttaagagaagacttcttacaacaaaatgcatttgacgatgtagacacttactgtgctcctactaaacaataccaaatgttaaaaactattctcttattctacaaagaatctcttgcagctgttaacagaggagctccaattgcaactattgcagctttacctgttaaagaagaaattggtaaaatgaaatacataccacaagatgaatttgatgcaaaaattgcagatattcaagctgcagttgtaaaacaatgcagtgaggcttaa

SEQ ID NO: 6777 - DNA, 318 bp, Methanobrevibacter gottschalkii
  source 1..318: mol_type = genomic DNA
atgagttcagtagcagttattggtgatattgacaccgtttctggttttagacttggtggtgtcaaacaggcagttgttgtaaaaacttctgaggaagctattgcagcttttgataaatttttagaagacgaaatttcaattattatcattactcaattaatggcaaatgaaataagagaacatattaataggaaaattggttcaagtgttttaccaatgataattgaaatacctggtaaagatgggtcctctgaaggatcatctgatcaaataaatgaccttattagaagagttatcggggtagagatggttaaatga

SEQ ID NO: 6778 - DNA, 1155 bp, Methanobrevibacter gottschalkii
  source 1..1155: mol_type = genomic DNA
atggcagatcaaattgctactttgataagttctgtaggacttacacaagaaacattcttagtgctctgtgtaatctcattacttgttgttggtgcagtagtagtaatcattacatctagaccaattttggacatttatccttatcttaatccaagtgcaagagtaagagctagaaaaggaagattgtttgatgaaaaacaaatttctgaaattgttgaaaccagcaatattgaagaagttgaaaattatctcaaaggtgttcctgaatatgctgatgttttagatgaatatccccttgataaagcattagatgttgaacgtgctaatacttacgagtttattgcaagattagctcctaaagatattaaagctcctttcgcagtaatgtctaaaaaagcagatattgacaatatcaaaagtcttttaactgcaaaagaagtcggttatgatgctgatgaaaccaaagaattattaattccttgtggtgctttatataatgacttagaatctttagctgatgctgaaaatgtaactgatattgttacaagtttggataacacagaatatgctgcagttttagaagatgctcttccacaatatgaaaatactaacatgattcttccattagaatctgctttagataaatattacttgggcaaattattacgttctactgatgttccttctgatgaaaataaacaaattttatatgcatatgttggaactcaagtggatgtaactaatcttaaactaattataagggctaaagaagatggccttgattatgatgcaatctctccttatatattagatgaaggataccaattacgtgaatggaaacttaaagatttaatggaatctcctgatgttacaaatgtagtgtctggattggaaggtaccaaatattctagtgcattaactgatgtggttccagtttacaatgaaactggctcagttgcagtatttgaaaaagcattggatgtttatgcttccgaatattcaaaatctttagcatctaaaaaaccattaggtattggtccaattattggttatttaagtcaaaaagaaaatgaaattaaaaatttaaaaattattgcaagagcaaaaagagaagttgatttccctaatgctaaaatcatggagatgttaatatga

SEQ ID NO: 6779 - DNA, 612 bp, Methanobrevibacter gottschalkii
  source 1..612: mol_type = genomic DNA
atgagctcaggcacagataaaattgtttcaagcattatgtctgaagcccaagagaaagctgatgtaatcattcaagaggttaatgcagaagtttcagctattcaggcaaaagctgataaaactgctgaagttgaaaaaacaagaatcttagaaaatggtaaaaaacaatctgatatgagatatcagcaaattatctctgaagctaagatgaatgctcgtagagcaaaattaggcgctaaagaagaagtaatcgaagctgctttcagtcaagctgttggtgaattaaaagaaaaagcttcttccagaagtgcagattatgaagattcattaattaaaatgattaaagaagctgctgatgaaattggcggtgatgatttaattatccaattaaatgaagctgacacaaatcaatttaaaagtgaaatatcttcaggtaatgctttcgaaattgaaggaatcaaattcgaattaggtgaacctatcaatactattggtggagcagtcttaaaaactaataatggagatattgaagtaaataacactattgaagcaagattagatagatttaaaagtatcttacgtagtgaagttgctaatgtattatttaaataa

SEQ ID NO: 6780 - DNA, 486 bp, Methanobrevibacter gottschalkii
  source 1..486: mol_type = genomic DNA
atggtagaaattgctttaggtactgctttagcagctattggtgctggagtagcaattggatttgccggtttaggttccggtttagggcaaggtatggcagctgctggttctgtaggagcagtggcagaagacaatgacatgtttgcaagaggtattattttctctgcattaccagaaactcaggctatttacggtttcttggttgcaatcttattattagtattctcaggattattaggtggaggtcaaggattacctactgaagccggtattgtagctataggtgtaggtgcatctattggttttgccggtttaggttccggtatgggacaaggtatggcagcagcatcctctgttggtgctattgttgaagacaatgatatgtttgctcgtggtattattttctctgcattaccagagacacaagctatttacggtttcttgattgctattttacttatggtattcggtggaatcttaggttaa

SEQ ID NO: 6781 - DNA, 2001 bp, Methanobrevibacter gottschalkii
  source 1..2001: mol_type = genomic DNA
atgttcaagacagctagaatgcgtaaaattagaattgttacacttgataagtatgtagcacctacagtggatgctctccacgaatcagggcttatacaagtcagtgatatttctgaaagcattcagcaagatcctgaattagcagaattagtaactccttcaaaagctacaccttacacaggtaagttatcttcacttctcatgaaaacaaatggtatatctgaactattaggaaattctatatcagaaggccatgggttaaaagacactttaatgtcttttattagtcctgatatgccagttcaaaaagaagtagaaaaattggatactcctgcttttattgaaaaagctgaagaaactttagctaaggtggaaagtaagacaagtgttattgaaggcaaacttgctgcactcgactcagaaacaagtgaactaaagtctaataaaagtttggctaaacgtttatctcattttgacatggatttagcgcttttaaaagattcaaagtacacttctactactgttggaaggattaatgctgaatctacttcagaaatcaaaaatgaattaagtaacttgactgatgaattagaaatatttactgttcctatggatgatgatgacggtgaagtcattgctgtagtgacattaaaagaatttagtgatgatgtttattcaacacttcgtaaattcgactttgagaaaattgaagtagctaatgttgaaggcactcctcaacatattatttcaagtgctgattctcgtttattgactattgaatcagaacgtgctgctgttaaaaaagaattaagagcagtcgctgaacaatgggatgatgaaatattagctctcaaagaacaattagaaaatgaaaaagataagaacgaaattctttcatcttttgttcaaactaaagatgcttatgttcttgaggcatgggtacctgtaaaagatacagaggaagttgaacaattagttgaaaaaagttctgagggacattgtgcctttgaaacaattgaaattgaaggtacagatgatgaagatgttcctattttacaacaaaatggatggtatgcaaaacctttcgaattcctcgtagatatgtactctccagtacgttacaacgaaattgatccaacaatatttgttgcaattacattcccgttcttcttcggtttctgcttaaccgatgcaatttatgggttagttgtatctgcaattggtgtagtaattattagaggtttaggtaaagttaaagaatctatgcgttcatttggatggattttggtttgggctggtctatgggctgttattttaggtttgttaactaatggttttattggggacttcccagaaagaattgcaggattccgtttaccaactgtatttgctccagtcgaagcattcaaacatcctgatactattttattaatagctatcggagtcggtcttctttacactaatgttggatttttacttggtgctattgacaacttgagatacggtaatgtgaaagaagctattggatctcagctctgctggtttgttttcgaagctggtattattctcctcgctttaggttacatgatgcctgcaatcggcatggttggcatggctttaggtggaattttaattattgcaactattggaatgttggtatgggctaatggcgcatatggtgttatggatattttcggttacatgggagatgttttatcttacgcacgtcttttagcattatgtttggctactggtggtattgctatgacagtaaacatcttagcgcaaatgttaaacaacatggttccgcatgtaggtatagtacttgcgatatttgtctttatatttggacatattgcaaactttgctttccaggtattaggtgcatttattaattctttacgtcttaactatgtagaatttttctcacaattctttatgagtggtaaaggaaaattcgaagcttttaaagcaaataggacatttacaaaacttaaataa

SEQ ID NO: 6782 - DNA, 315 bp, Methanobrevibacter gottschalkii
  source 1..315: mol_type = genomic DNA
atggcagagatatcagacgcaatcgcaatgataaaaaaagcagaatctgatgctgaacaacttattgcggattcacaagcgcaatcaaaagatatgattgctgatgcaaacttaaaagctgaggaatccgtttcagaagttaaaatttcagcagaagaagaagctcaaaaaactgtttttgatgcagaagataaagctaaaaaagaagcacaatctatctctgaacagtccaaagttgaagttaaatctttaaaagataaagctatgggcaatgttgatgaagcggcttctattattgtcaaaaatatattgtag

SEQ ID NO: 6783 - DNA, 351 bp, Methanobrevibacter gottschalkii
  source 1..351: mol_type = genomic DNA
atggcaaatattaaaatgttcaaattactaggggtattagtctctttattgttaatcatatggggaattcttccattcttaagacatcaaccaataacaacagatgtcattgctactgcaatcatattgattatgatagctgttgcttacatgattatcatgttcaatccaagttggacaaaggcagttttcttctttgaaggtattattattgctgttgcaggatatatgttacttgcatttccatataacttagagttcgcattagtgggtgtaattataattgcaattgctattcttgcttatttacagaaattacctcctaaaatattaagattgttttatagataa

SEQ ID NO: 6784 - DNA, 330 bp, Methanobrevibacter gottschalkii
  source 1..330: mol_type = genomic DNA
atggaacgagcagtctggataattttaaacaataatttttcacttacattagacagtgaaataaaagatgaaaaaatagtaaataaaagattctcaccgggaagtgatttatggacatcagaactcccgcaattaagttttagtgacgaaaatattcaaaaggattatgatgaatttatatctgatatcatctcattattctctgaaccaagtgttgataaaatatttattgatgcaaagattggtgaagaatccgaatatgtgaatgctaaaaatccattagttataagaaaaatagaagaatatagtgtggatgaaattataggatag

SEQ ID NO: 6785 - DNA, 339 bp, Methanobrevibacter gottschalkii
  source 1..339: mol_type = genomic DNA
atgaaactttttatattgtctgctaacgattcaagagatatggatgacatatctcaaaaattatctttaaaaaaattcaaaattactcaaactgagaacaattatattttaatgtgtaaaaaaaggtatgggaatattttaatccatgcaatctgtttaataattgctctttcatatgtttggccagttttaatagtaaatgttatttattttacttattcatatttatgggcttctccaaatgtattaatcactactgagagtctagatgatgaaggtaatcctttggaattcagcagcatggatgaaatattaaaaaaagctacagctatcctataa

SEQ ID NO: 6786 - DNA, 510 bp, Methanobrevibacter gottschalkii
  source 1..510: mol_type = genomic DNA
atggaatttatagatgtgataaatgaaagatacagtgtcagaggatacttagacaaagaagtagaacaagaaaaactagaatttgtattaaaagcagcaacaatagctccgacaggagtcaacaaccaaccttttaaagtctatgtcattgattctaaaaaatataaagagaaattatctaaaatttataaagctaaatggtttgttgaagcgccatatgtattggccgttgttgcattaagaaatgaagcatgggtaagaccatgggattctaaaaacattgcagatattgatgccactattgtaatggaccacatgattcttgcagctactgacgtagggcttggaacatgctatgtcggtgcatttaagaaaaattatgcacacaaattcttgggattaaatgaaaatgaagaagtagtgctattcactcctcttgggtatggtaatgttgaacctcgtgagactccaagaaaggatttaaatgattttgtagtatacaaagattaa

SEQ ID NO: 6787 - DNA, 804 bp, Methanobrevibacter gottschalkii
  source 1..804: mol_type = genomic DNA
atgcaggaaaataattttaaaattgataggcattctttaaaaacagcgatttcacgtgttgaaactgataaaatcgtaacaagagggtataatcaaagagatttaattgaaaaaataagatacagtgatatggtttttttacttttaaaaggaagattgccttccattattgaaggaaaaatatttaatcatgttcttgtttcattttgtgatcatggtgtgactccaccaagtactcaaacagcgcgtatcgttacctcttcaggttcgccagtcaactcagcagttgccggtgcattattgtcttttggacataagcatgccggtgctattgaaaaaacaatggatttatatcaatcaaaaatcaattcattgtacttaactgatgatgctgaaattgataacaaacaaattgctggtttagctattgaaatttatcaagaatatatacttaaagataaaaaagtacctggttttggtcataggtatcataatattgatccaagagcagataaattaatggaaattgtcattaaagaaggttttattggacctcatataaagttagcattagctcttgaagatctaatttaccaaaaaaagcaaattcgtcttaatgtggacggtgcaaatgcggctattttatcagatttaggtttcactccagatttgggattaggaatatttataattggtagaattccaggaattattgcacacattcatgaagaaaaaatgaatgaagatgaatttagaagattttgcgatcttgatgacgtaatataccaacaaagaggtaaataa

SEQ ID NO: 6788 - DNA, 873 bp, Methanobrevibacter gottschalkii
  source 1..873: mol_type = genomic DNA
atggatattttggaggatatttcaaaaacaatcattgatgcatcaacaactctttcccaagacaaattcaatgcattgaaaagatctattgatgcagaagataatgaaaatgctaaatgggcattggaacaaattttagagaattataaggtagctcaagatattaaattccctttatgcgatgatacgggcattcctcatgtaattattgaaattggtgaagatagagaaatttcaggagatctgctcaatcagattcataagggaatagagttaggtttaaataatcttccagcaagaccaatggctgtaattggagatgaagttcaaagaattgaacaaagtaaaggtttatttgaaaaacctggaatgcttcgcccagtatctatattaatagacacggcaaatgatgaatcaacatataaaagggacatatcttctgatacgttaaatattcattttttacttgaaggcgggggtccagaaattagagctaacacatttagggtgtatcataaaagatcttttgacaatgtaattaataccgcatgtggctggcttgaagaatctctaagaatgttgggttgcactccatcaatcccatcaattggtatcggtagaacacattttgaatcaacttctcttcttttaaaatccattgcttatgggaatttagataatcaaagtgaacatgaacaaaaaataactcaaagattaaatgaaacttgtattgggcctatggggtttggcggaaaaaccacggttttgggtacttatctaaatattggaaatcagagagcaagtggtgttagaatagtgtctgttaggccgtcttgttttgttgagccaagagtagcaacattaaaattgtaa

SEQ ID NO: 6789 - DNA, 903 bp, Methanobrevibacter gottschalkii
  source 1..903: mol_type = genomic DNA
atggagaatacaaaaaaattcctcaaaaaaattggtataaaggaagtttacgatgactttaaatcagataagcgttttgatgatgggggacaatatcgttttgaagttcctggaattcaatccccaaaaacaatggaggctcttttaaccgaatcaatcaaacagggcatttttattcatagggtaactcaaactaaaggaatcatgatgttgactgatgaagagattggtaagatgattgatttagccattgactacggatgtgaattgttcttggcagtaggtccaagagcaacctatgatacctcagcaacagtccatactaaagagggaagcagaataggatatcgtcttagaggttatgataacctagtttatgcaattgaggatgtaaaaagagcttgcagattaggtgttcgcggaatattgctgtatgatgagggactgctttgggcattaaatcaaatgagggcagaaggtgaaattccagaaaatgttcattttaaattatctgctcatgcaggtcattcaaatcctgcttctgctaaactgcttgaagctcaagggttaaattcacttaatcctgtaagagacttgcaaatttcaatgcttgcagctattagatatgcctgtagtatggcaattgatctgcatactgaaaatccaaaatcaactggagggtttattaggcattatgaagttccaaaatttattaaagttgcatctcctgtttatttaaaaactggtggttcggttgcagcaaatcataactgggatacaacggaaaaagaagcattagctcgtataaaacaagtttcacttgtaaaaaggattattgatgaatattatccggatgcaatagtatctcctgtgaaatctagtgatttgtctattccagagtga

SEQ ID NO: 6790 - DNA, 1407 bp, Methanobrevibacter gottschalkii
  source 1..1407: mol_type = genomic DNA
atgtttttacaaaatatttctaaatttatatcgaactatcgttatgaacaggcaacggtggaatcactgactactgtaaaagctgcttttttagatttttttggagtaacatataggggaatgagtgaagaagcgccctcaattgcattaaatactattgaagagatattgccaaaaaggaattcaaatcttactgcatccatcattggccaaaatttcaaaacagatattttaagtgctgcttttgtaaatggtattgcggcacatgtattggaattggatgatggtcataggggggctcaacttcatttgggtgcagtaatattctcaacagctcttgcaatttcagaagcttatgacttaaccggcagggaatttttggaaggtgttattgtaggttatgaagttggaattttactcggtcaacttgtaaatccaaaacatagaaataagggatttcatacaactggaacaataggaacattcattgcaggggtagttgcttctaaattattaaaacttgatgaaaaacagactttaaatgcattagggttatgtggaactcaggctgctggtcttttagaatctgatcatgggggatccatgggtaaagtattgcatgttggaaaagcatcatataatggtattttatcagcatttcttgctagaaatggttttactggtagtggaactatatttgatggagatgaaggttttttaaaaacaatggttttagataacacaaatcatgatattgatgagttttcttttgaaaatgctctcaaaaatattggaaaagtaagggttagggatatctattttaaaaaatatccattctgcagacacttgcattcttcaatagatacagcattaaagcttaaagcaagtattggggatgaatataatcatattcaaaatgttgcagttaaaacatatgaaattgcagcagaacacaacaatttccatcctaaaaatttggaagaattaaaacaaagccttccatatgctgttgctatttctcttgttgtcggtgaagttagtgttgataaaattaatcaattaatcgaatttggtcttttagaaaattattctactgttgatgatgtgaatgctattaaaaacattgtaaatgggatgattatcttatcagatgataagttaaatgagttatatccttctaaaagaccttcaaatgtcattattaaattagatgatgttttcagaaatggaattttccaaaatatcacattccttccaaaaggtgattttgaaaatccattacaattaagagaattaattgataaatttaaaggtttgaatcctcattatgatattaaaaatctaacagttattgattctcttgaagattataatatgaaatatgttgttcgtaaattgaaagggtag

SEQ ID NO: 6791 - DNA, 489 bp, Methanobrevibacter gottschalkii
  source 1..489: mol_type = genomic DNA
atggttgatattattgatggttcagaaaatatatcagttcatggtattttaaactgggttttgcttttaactatattctcaatcattactgttgttggaaattacattggttataaacatcctattggcgatgcattaattggcatgttcttattatcattaattacgcttattggtgtttggatggagagatatttgccattggatatttcttcaattatttatatcagtataattggtattgtccttgcatttcctggaatgcccacatctaagactttactttactatgtttctcaagttgaattaatatccattgttacagtatttttagcatatgtgggtattggtatgggtaaaagttgggatgaatttaaagcattaggtccaaaggcagttattattacaattcttgttattgcatccacatatctgggtttagcattggtggcacaagttatattgatgttgactggtgttcaaatctga

SEQ ID NO: 6792 - DNA, 897 bp, Methanobrevibacter gottschalkii
  source 1..897: mol_type = genomic DNA
ttgtcaataatatcaaagagaaataatgatacggaagatattaggcatatttatcgtgataaaactgataggcgtattttaaaaaagaacccatggaaggactatggattgcacattagtgtacttattttggttgtaattgcagagcttattggaccaatgaagattcctgtagcaaaaggagtcgaaatttcaataatgcctttgttatacacaatgattctaggtttaatattttatttagcaaaaccaattacttggattcaaagaaagcaatctagagttgctgaaggagcaatgatgctatttattggtgttttaattgcaaaattagcagtttctagtggccaatctattcatttaatttttgaaatgggtccggctttaatgctgcaggaattggggcatttagctacaattttaattgcacttcctattgcattattgcttggatttaaacgggaagctattggtatgacttcatctattggtcgtgaacctgaagttgcagttgttgttgacaaatatggttttaattcaccggaatcaagaggtattttcgcactttttattgttggaacaattattgggacagtattcattagtttcttaactagtatctgtgtttcagtaataccgctacatccatatgcattcgctatggccagtggtgtaggcagtgcaagtatgaacgctgcttcactagctccgactgttgcggcatttccacaattagcaactcaaattgaggcatttgcaggattcagtaatttgctctctttttccgttggtatttatattgtaatatttgttgcaattcctttaacagaaaaattatatgggattttagaacctaaaattggaagagaccctattgtagatgaggaggaggggtaa

SEQ ID NO: 6793 - DNA, 1269 bp, Methanobrevibacter gottschalkii
  source 1..1269: mol_type = genomic DNA
gtgattataattaatattttacatattggaatagatgatactgattctcctgatggaatgtgtactacatacttagcaagccagattattaataaatttgaagaaaatggaatcaatttagtggattatccacgtttgataagattaaatccttttgctcgttttaaaactcgtggaaatggtggggttagttttaggattccaaaggatgataatgtggatttagctaaaaagattgttctggaagaagttgaaaaattatccatgtttgactgtgataatacaaatcctggtgtgattttctatgatggagaaattacagaagagatggagaattatgcttttagagcaatttataagttcatcactattgaagaagctgaaaagcttgcaaaatctgttggctgtgaaattcacaaattcaaaaaaggaagaggaatcatcggatctgttgcagctatcagtttaccgttgaaagattatacttttgaactgttaacttatcgtgcatctgagaattatggaactaaaagacaaattgattatgattctgtttataaaatggataaagaaacctttcccgatacttttgaaaatattgattattctgaggagtatattgcaattgaacctaaaacaccatgccctgtgttatatggtatcagatcaaataatgttgagtcccttaaaatcgcaaaagatattgttcaagtttcagaacctattgctgattggtgtatttttaaaacaaatcagcatactgatatgcacattcaaaaagttagtaacatttcctctatggaacaatttggatgttatgagattattggagaagttaaaaacaaacctaagattattgatggagggcatatgtttttctatatctctgatgattctggtgagattgagtgtggtgcatatgaaccaactaaaaattttagaaaattaatttcacatttgcgtccgggggatattataaaggtctttggtgggattggcgaacaaaatacatttaatattgagaaatttcaagttgttaaattaaatgatactgaatataaaaatccaatttgtgaatgtggtaaaagaatgacttctgctggtaaaaataagggattcaaatgtaaaaaatgtggcaataaaattcaatcagataaaaaagttcctattaaggtaactcgttttttaaaaaatgctcaattttatgaaacacctgtttctgcaaggagacacttatcaaaaccaatctgtagaatgtatttagattaa

SEQ ID NO: 6794 - DNA, 933 bp, Methanobrevibacter gottschalkii
  source 1..933: mol_type = genomic DNA
atgttaactcgaggaaacttgttacaacaaactgaaaaattattaaaatcccaaggttttaaaacctcagatatctatgaacacggttcatttgatattgtagcgagaaaaaacttgttaattttacttttaaaaacatttttaaatattgacagcattaatgaacagaatgctcatgaaatgaatcaattagcaaatatattccttgcttccccgataattatcggagaaaaatcaagaaatggtatccttgaagaaggagtaatctatgaaagatatgacattccaacaattggatttgaaacttttaaaaatatgattttatacaatgaatatcctgaaatattagctgatcgcggaggttattttgttaaaattgatggtaatgttataaaacagtaccgtgaagaatattcaatgtcacttaaggatttagcaaaccttgcacatgtatcccgcgcaacaatgtataaatatgaaaacggcattgtccgtgcaaatactgaaactgcaatgattttagaagaaatattaaatacaaaagttacccttgacattgatttgttaaaacaacctcaaaaagataaaattgaatatagtgatgatgttaaagacttatccaaattaggttatggtgttctatcaactaacaaaagccccttcgatgctgttgcaaaaatgaaaacttcagacaaacattcaccattaatggcaaatgttgaaaaaaacagaactgaaaaaaccttgaaaagaatggctattcctctaaaagacttatcactggttacaacatcagaacctgtttttataataaataacgataaaattaaagaatctattggtaaaatcccagttatcaaatcttgggagttaaaagagtttgaaaattcaaaagaattattaaagatgattagagaaagaaaagaaaattag

SEQ ID NO: 6795 - DNA, 387 bp, Methanobrevibacter gottschalkii
  source 1..387: mol_type = genomic DNA
atggaaaatttacaaattacaaaaatggaaaaccacccaatcaaatggatttgcaactttaaaggacaaacagctattggaatctgtggtaaaactcaaaaaatagctatgtttgcatcagatgacagagtttcaaaaatattagatgatattgtaatcggaactgatgaatctcaagagggatatggttgtgaagaaaaaaacagatgctgtaattttgattgtgaactttgtgaaatttcaccaagacaatacctgcaaatcactggtaaaaaaccatccaataaaaatataaaagatttaattaacggtttagcagatttgaataattctcttgaagaaaaaaatctcgtcccgtttgaagaatatgaagttgttaatttttaa

SEQ ID NO: 6796 - DNA, 795 bp, Methanobrevibacter gottschalkii
  source 1..795: mol_type = genomic DNA
atgttttttgatgatttaacatttaaagaaaaaataattccaaaaacaattcttggatactctccatttgttgctgaaccatttttggggcatcgctccatgttatataaaagggatttgtatgataatccacaagctattgcagatgttattgtagaatcatataatcagggagttagggctattaatctttttaatgattcccaattacttaaagcatatgatattgcatgcgatcagggttgcaatatgaaggtaatagctactattggtaaaactgaagttgattatttaaatccaaattatgaaattgcaaaagaaaccgattgggatgatgatattgagttatttaatagctatgattgtccattaatgttagttgatgagtttattgtcgatgcttatgactggagattaacttcaaagatattggattgcattaatgatacagattctctttcaggattaatcacggcatttccacttaggacaactaatttaattcctgaaaatttaaatatggatttatttgatttttatatggttcctttcaatgctatttcttatatgatggatataactgcttttaatgcatctcaaagggaagaattcaaacaaaaattaactagtttaaataaaaaagtaattgcttctaggatttttgcatgtggcattctaaaaccgaaagaagcatttgaattctataaaaaaatagattacattgatttaatttcaattggtgtggctaaagtcgaagaagctcgtgaagattttactcttctaaaagaatattaa

SEQ ID NO: 6797 - DNA, 339 bp, Methanobrevibacter gottschalkii
  source 1..339: mol_type = genomic DNA
atggttagtatggaagaattcccaatatcaagtgcaaattttatttcaggatataagattgttgaaaataaaggatttgtatatggtttaactgtacgtgcaagaggtattggtggagacattggtgctggtcttaaaggacttttgggtggagaaattaaacaatatgttactatgatggaagattcaagagaagaatctattcaaagatgtattgaacatgcaaaagaattgggtgcaaatgcaattatttctgtaagaatggactctgatagtatttctcaaaacatgcaagaagttttaacttatggaactgcagttataattgaaaaagaatag

SEQ ID NO: 6798 - DNA, 1575 bp, Methanobrevibacter gottschalkii
  source 1..1575: mol_type = genomic DNA
atgaaagtacttattgctgatgctattaacgaaaagggtattgaaaatttaaaagaagtagctgatgttgttgttaacaccagcattactcctgatgaattagcagataccatccatgaatacaatggaattgtagtaagaagccgtacaaaattaactgcagacattattgaaaaagcagacaatttacaaattattgcaagagcaggtgtcggagtagacaatatagaccttaatgctgcaactgaaaaaggaatcatggttgtaaattccccagaatcaacttcagttactgtagctgaacacacaatgggattaattttaagtatggcacgtaaaatttctatagcagataaatctgttaaagaaggaaaatgggaaaagaaaaaattcatgggtgtggaacttagaaacaaaacccttggtgtaataggaatgggaagaattggatctcaagtagtaaatagatgtaaagcgtttggaatggatgcaatggcatacgatccatatttaccagaagaagttgcaaaacaaatgtgtgtggatttaactgatttagaaactgttcttaaaaatgcagatttcattacaatccatgtaccccttacacctgaaactaaacactcaatttccacagaacaattcgaaataatgaaagatactgcatttatcgtaaattgtgctcgtggtggaatcattgatgaaaaagcattatatgatgcattggttaatgataaaattggtggtgctgcacttgacgtgtatgaagaagaacctcctgctgaagattcaaaattatttgaacttgacaatattgttttaacaccccacatagcagcttcaactaaagaagctcaaagagatgctgccattattgtagctgatgaaattatagatttagcaaatggaaatactcctaaaaatgtattgaaccttccacgtatcgataaaaatacttacaatgaattatctccatacatggaattatgtgaaaaattaggttgttttgtttctcaaggaattaatggcaaactcaaagaaattgaaattatttacagcggagaactttccgaaattgataacctcgaaatattatccagaactgtcattcaaggtgctgtaaatccattcttaagttcaccagtaaacgcagttaatgctgcattagttgctaaagatagaggaatcagcattactgaaggtagaaaaaataattcaaaaggatatgaatccttaattaaagttattgctaaaagtgaaaatgaaaccttcacggctgaaggaacccaattacatgaatccagaattttaaaagtaaacgattattgggttgatgttattcctaaaggacacatgttcattgctaaatatgaagatgttcctggaagtattggtaaaattggtactaaattaggcgagcataatgtaaacattggaattatgcaagttggaagagatgaaaaaggtggaagagcaattatggttctaactttagataaagaagtgccaaaagaagtaattagtgaaatccaagctttagataatgtttatgaagctactggaattgaattataa

SEQ ID NO: 6799 - DNA, 681 bp, Methanobrevibacter gottschalkii
  source 1..681: mol_type = genomic DNA
atgagttttatttcaaagttattcggaaataatgatgacgaatttgaagaggttagagttgatcgggaagttctgaactctgtaatttattattcaaaacaggcatatccaaatgaatttttagcatttttggatggtaaaattaaaaacaggatattgtacattactggtttaatatttattcctggtgaaacctgcgagactggggctgtcattcacagtgagatggttccaatgaatacaaaatactttggatcagttcactcacaccctggaccaagtgcaagtccgtcagatgctgatttgatgactttttcaaaaaacggatattttcatatgattgtatgtttgccttactcttacaatacatttaaagcatatgataggcatggagaatctattgattatattgttggtgattatgcttatttggtcaatgatgatcttgatgaattttttgatgaggatgatgtactgactgataatgatgagtttaaaccaggatttttcgatgaagatgatgatgaatttttcaaaaatcttgatgaggaaaaagtcaatcactatgatgaattcgaaaaaaggaatcaaataaacaatcaactaccgaataatgtaataaaaatagaacttaataatgatggcaatgtcaaaaaaatttcaaggcgatttaaagactga

SEQ ID NO: 6800 - DNA, 723 bp, Methanobrevibacter gottschalkii
  source 1..723: mol_type = genomic DNA
atgaaggagtatgaagtttattcttcgctgaaagttccaataaactctaaaattattgttcgtttggatggtaggaattttcatcaattagctcgtgatttaaatttaattaaaccatatgatgaaaatttctataaagttctttctaaagtttgtgaagatttatttaaagagttttcacctatttttatttatgcattctcagatgaaataagtcttcttttagataatattcccttcaatggcagaatcgaaaaaatcgattcagtaatggccagttttgcatccagttcttttgttattaattataatgccaaattcaaaaaaccaccttcttttgactcacgtgttattccaatttcagatgatgatgttttagaatatttcaaatggagacaggatgaatcctggaggaactgtgttaattcccatggcatatttcaccttagatctaactatccggaaaatctgtcaaataataaaataaaaggcatgaacttaagtgatatacatgaattattattccaaaatggcattaacttaaatgacattgacacttataaaaaaagaggaattggagtatataggaaaaataaaaaagttgtaggtttcaacaaaaaagaaaataaaaaacagatatcatacagaagttatgtttgcacagattggaatcttccaaaatttaacaaagaattctttaagaacatgggtgttttaaaatga

SEQ ID NO: 6801 - DNA, 765 bp, Methanobrevibacter gottschalkii
  source 1..765: mol_type = genomic DNA
atgaaagtcggtattataggctgcggggctattgctaatattattactggcagcatcgctcctgaaaataatggtattgaaattgcatacttttttgataaagatgtagaaagagcagagaatttggcaagtttggctggtggtgtagcagtacttaattttgatgacatgttgaatgatgtggatttagttttggaatgtgcttcaccagattcagttaaaaaatatgctccaattattcttaaaaaaggaattgacatgattactatgagtattggtgcatttatggataaagatttttataatgaagttttaaaaattgccagagagaataatgctaaaatacatttgccatctggtgctgttgttggcctcgatggaattaaagcggtagctaaattcggtcttaaagaaattaatcttgtaacccgtaaatctccaagatctcttggaaaaaatattgatattgaggaagttttattcgaaggaaaagcttccgaagcggtcaaacaatttccattaaacattaatgtagcggcaacaattagtatggcatgtaacagggacattgatgtaaagattattgttgatcctaaagttgatagaaatgttcatgaaattactgctaaaggggattttggtgaatttaaaacaaccacaatgaatttcccttgtgaagctaaccctaaaacaagcatgttagcggcactttcagcaattagactacttaaaagtttcaatgaaaccattagtgtgggtatgtaa

SEQ ID NO: 6802 - DNA, 402 bp, Methanobrevibacter gottschalkii
  source 1..402: mol_type = genomic DNA
atggtagaagtttcaaaattacgcagtttagatatttatactaacacaggacattatgttggtcgtgtagaagatgttgttcttaatattaggttaggaactatttcaaaattacaggttagagctattgaacaagaaagaaaacctgctggtgttcttaactcttttttaggaagtatccgtggggaagttccggaagaaaatgatatgaaatctttccaaaatgatttattaacagtggactttgataaggttcaagctattggagatatcatgttaattaaccctagagatattaaaaaaataaaccctgaaccgcaagttcctgatgctgtagctccaaaacaacctgaaactcaaccacaagaaactcaagttcaatttgatgctgaaagattatag

SEQ ID NO: 6803 - DNA, 723 bp, Methanobrevibacter gottschalkii
  source 1..723: mol_type = genomic DNA
atgtgggatacaacaaaagattatagaattttagtagcaagtaaagcaagagaaaattatctcaatctcattccaacagcttcttttagaggaagttggaacaaaaaacaagctattgatttaggaaaacaaatgaatagcgatttccaatcattaatttattcctacctcgaaggagaggaattagtaaactctccggatgttgcatcattaaaagaaaaaggggaaaaaattattgaatatttaggaggtccagattggaataagaaattcttaagtaatgctcctaaagaagatagggaaaaaacccaagaaaatattgcaaaagtaagatttttcttagatacaattattggcttaaaagacagattatctcttggtccgattaatgatcccattattggggttgacattagagttggggaggtaatgagcgttactaaacatcctaaaaatgacaaattactgatctgtaatgtgaatcttggaaaacgtgcaattacagtcctcactaacgatttaaatgttaaagatgataacaaagttggtgtctccctactcccaccacaatcctttagtgacattgtaagtgaaggaatgttccttggaatgaatggaaatatacttaaaagtgttgaaggagaacttggtgaaatgccaaaaggaattccaatggaatcccttaacgaaacacgcaaccttgttgaaaactatctaaaataa

SEQ ID NO: 6804 - DNA, 1413 bp, Methanobrevibacter gottschalkii
  source 1..1413: mol_type = genomic DNA
atggatatgttaatcggcggaaaacacatttcaagtgaagatttagaagatgtaattaatccgtatactggtgaagtaattgatactgttccaattgctcatagacagactgctgaactggctattgaatctgcaaataatgccagagaaagtttatctgaaatgtcagcatttaaagtttcaaataatttgttcaatgttgttcttaaattaaaagaaaaacgtcagatgtttgccgaatctttaactttggaagttggaaaacctataattgaatctctacttgaagttgataggtcaattgaaacattaaaacttgcagctgaagaagcaaaaagaatttatggtgaaagtgtacctttagatgcaggaatgggaggtaaaggattttttgcatttactcaaaaggtaccattgggtgttgtagtggccatcaccccatttaattatcctcttaatttgacaatccataaaatagcaccagcaatagcatgtaaaaataccgtaattgtaaaaccgccaacagaagcaccattaacagttatgaaattctgcgaattattaaatgaagaatttccagatggtgttgtaaatgttgttacaggatatggttctgaagttggagatcatttggtggtatctccggaagttaacaaaatttcttttactggaagtgtaacaaccggactcatgatttcacaaaaagcaggaatgaaaaaaactactttggaacttggcggaaatgacccaacagttattttaaaagatgctgatttaaataatgctgtaaaaggaattgttaatggagcatttttaaatgcaggtcaggtttgtatgggtgttaaaagagtaattgtagaagatgaaattgccgatgaatttgcagagaaattagtggctgcaactcaaaaattagtcatgggaaatccattggattctaaaacaactcttggaacattgatttccgagaaagctgcgatacaagtggaagaaacagttaataatgctgttagtatgggtgcaaagatattaactggaggtaatcgtgatggtgcattttacgaggccactgtaattgataatgttacaacagacatggatttaattttaaatgaaacatttggtccggtagcacctattattcgtgttaaaaatgtagatggggctattgaagttgctaataacacggattatggtcttcaggcaggtgtattcacaggtgattatgcatctgcaatgagatgtgctcaagaaattgaaactggaacggtttttattaataaacagtccacatttagaactgataatatgccttttgggggatttaaaaacagtggtgttggcaaagaaggaataaaatatgcagttgatgaaatgactaaaacaaaattaataggtctaaatttaagataa

SEQ ID NO: 6805 - DNA, 582 bp, Methanobrevibacter gottschalkii
  source 1..582: mol_type = genomic DNA
atggaaactacaagatttgaaacattttttgatgcaatcatagcaattatcataacagttcttgttttaaaagttccccaaccagcaaccccaacgattggtgctattttaaagttaaatacaatatttattgcatatttaatcagttttttaactttatacaacctttggtatgccaatcataatctgcttaaaattatagatattattgacaattcagctgtttggagttatggagcaatgacatttatcctttcattattaccctattttactctttggcttgctaatgatattaattcaatacctgcagaaacaatgttcggattaatattcatttttacacatattttcaatagattggctactaaatcaatttatagaagcaacccctataataaacagttgattgaattgaattttgattcacatatccaaagtatcccattaattattttaatcatcggatttatcctaacttatacaatttatgctcctggaatctatgttagctgtctgcttgcagttattttttggatttctctcagtaaaataaaaagaggatgtaataatggaaactga

SEQ ID NO: 6806 - DNA, 573 bp, Methanobrevibacter gottschalkii
  source 1..573: mol_type = genomic DNA
atggaaactgaaagatttgaagcattatttgatgcaattttagcaattataattacaatgattgttttggaaattccccttgcaagcacaggcagttgggaagctctttttgatttaaaatatgagtttctgatttatgcagtcagttttatagtatgttttaacttttggaattacaacaataatatattccatcttgtaaataagatagattataaagttatttggacaatggcaattacattatttgtattttcatttttaccatatcttacctcatttgttggtgaaaacttctatttattcctaccacaatttttgtatggtttgagctttatcatcactgcaatcctttcaatgataattggtaacttcctaaaacaagcagatcctggaaatattgcattgcatattgcattaagtaagcactatccgatgtatgcaactataatcacagtttcaattggaatgattattggttatttcatatatcctccagcaattattgcatgttgtttactttccattttaggagtatggttcataccaagaattatattccacatgaaatag

SEQ ID NO: 6807 - DNA, 948 bp, Methanobrevibacter gottschalkii
  source 1..948: mol_type = genomic DNA
atgaatttggtttttaaatttattgaaaagtattattgtttaattcttttatttttagttgtcattgctttaatttatccaatttcatttaattgggttttaaatagctatggtaatcttaatattttaaatttgcttttaagcattgttcttttcactatggggacaacccttaaggtggataatttcataagtgtgtttaaaaatcctaaagaaattattattggaatttcatctcaatatattataatgccttttttagcatttgctcttgcaagtattttttcccttgatgcagcactaactgttggagttatcttagttggcacagttccggggggtactgcttctgatgtaataacatttcttgcaaaaggagatgtggcattatcagtatctttaacagcaatatctacttttttatcacctattgtaactcctttgataactttggtgttaatcggcaatcagattgctttcaatccggtggatatgtttttatctattgttcagattgtaattgttcctgtcatattgggattattgcttaattataaattcccctcattttgtaaaattttagaggaatatctgccgggaatttcagcaattgtagtttgtgtgattgttgcagggataatgggtgcaaataaacaagctattttaacatcatctcttgttataatggtagttatcataactcaatatttcttagcaatggcattaggttgtttgatgggttatttatttggaatgaaaagggaacatattattacaatagctattgagcttgcttttcaaaattctggattgtcaaccagtcttgcaaaaactcattttccaaatttattgattgcaactgttcctggagcattatattctgtttggcagaactttgcaggttcaataattgcttatttattaaacagttattttattgaagaataa

SEQ ID NO: 6808 - DNA, 183 bp, Methanobrevibacter gottschalkii
  source 1..183: mol_type = genomic DNA
atggatgatagtgctcaaacatcagcggagttcattttactttttggaggaatatttgtagtggttttactggttatttatatgtataataattatatggatgatttgggtggtgaaattaagtcaaaagaagttaatgaattcaataatcaattaaatgctcttaaggtttatttcaaatag

SEQ ID NO: 6809 - DNA, 927 bp, Methanobrevibacter gottschalkii
  source 1..927: mol_type = genomic DNA
atgaaatttaatataatcaataatttaactttatttttagacaataatgttcctgagaaatatttatttaaaataaatgaatttttgctgagtgggtctatttctacagaagcaagtaaagttttatctataattataattttcattcttgtaacagaaatttttctagtaattgcattaactctctttaatttgccattttcaatattaatattcccatttttcataattcctataatttttacatatattattgtccaacaagaaaaaagagctcaagaaattgagcatactgcaccagattttttaagacaactttccagcatgcttcaggtgggtttaagctttgaaaatgcaatggaggacatgtcccattattctagtggaccactttatgatgaaatcagaagggcaataattgaaattcggatgggtcaaaattttgatgatgcatggcgtgcaatgtctaagcgattaaaatcaaaagagttagagcgaatttttggtattatattggatggtaggaaaagtggatcaagtatttcaacagtattactcgatgtttcaaatgatttaagggatttaatggcacttaaacgtgagagaaaatcagctgttatgatgtcagtcatgtttttattaatctcggcaattgttgcaactccatttgcaatgggtatggttagtgtttattctaattttatgcaaagctatggaatggaatctgaaatgattatttccgccccattagttggtgaaatgtatcttataattcattcttttttggttggattcataataagtgttataatgtatggtgaggtaaaaacgggacttaagttttccctgcctcttgtagcagcatctttcggaatattttatataatttccacatttggcggaacactgtttatggggggtttttaa

SEQ ID NO: 6810 - DNA, 1017 bp, Methanobrevibacter gottschalkii
  source 1..1017: mol_type = genomic DNA
atgaacttacatttaaataatattctaaaagacattaaaaaagacggtgttcaagcttatttacttacacaatttacaaatatcgaatatatttcaggatataaaccgaccagttttgctttttgtatacttaaagaaaatccaatcatttatgtgtctggaatggatatggaaattgcaaatcgcgattcaacaatcgaagttaaacaatatgaatcctatgatttaatgataaaagagctaaaagaagaaggaattaaaaatcttgcaattgaaccaacactaccttacagtacttatgcccgttttaaggatgattttgaaatatctgataaatcatatgttgataagcaacgtatgattaaaacaccttctgaaattgaaaaaatcacaaaagccacagaaatagctcaaaaatcatttttacaattagatattttaaataataatggaacagaaagggaagtggcttttaatcttgttcgttacatgattgataatggagcttcaaaagaatcatttgaaacaattgtaacaagtggagctaattcaagccttccccatgcgattcctgaagctaaaaaattggaaaggccaattttaattgattggggagctatttttaagggatattgttctgataatactcgtacaattgtatatgctgaaagccagcaagaaatttgggatattgttgcagaagctcatgataaggcaataaaatctgttaaagtgggtatgaaatgttgtgaagttgataaagttgctagggatattattgctgaatatggttatggtgataattatattcactcaacaggccatagcttggggttaaatattcatgagactccaggtttttccgctcgtgatgaaactgtcattgaaaaaggtatggtaataacagtcgaaccgggaatatatttggaagggaaatttggagttagacttgaagatactgtgatcatttctaaaaaagcaaatgttattggcgatttgccacttaatattgaataa

SEQ ID NO: 6811 - DNA, 642 bp, Methanobrevibacter gottschalkii
  source 1..642: mol_type = genomic DNA
atgtttaaatttacaagtagtgaaataagagatttaataattgcgtttatcgttatctctctcagttttgcaatagtaaatggtggaagaaacccctctgctgtgcttagcattttaccaattgttatggttggtgtgggagcaggtttcattctgcacgaacttgggcataaatttgtctcaatgaaatatggatattgggcagaatttaaattatggcctcagggattgatatttgcacttgttagttcatttttaggattcgtatttgcagctccaggtgcagtatatacttatgcaaattatatgactgatgagattaatggtaaaatatccattgcaggacctgttgtcaacattattcttgcattaatatttttagcaatatgtgttgcaatttatccatctgcatttaactccgaaacatcagtattaatattcattatttgttccgtaggttattcaatcaacagttttcttgcggcattcaacttaataccaattggaaacttagatggatctaaagtattaacatggaatgctggaatctggactattacaattgctattgccggaataatgacagtgatgtctatgacaatgggtgttgaaaccatagtaagaattattttaggattttaa

SEQ ID NO: 6812 - DNA, 1203 bp, Methanobrevibacter gottschalkii
  source 1..1203: mol_type = genomic DNA
atgacagagaagctcacatatttcgaaggaacacacagagttattgcaccgaaaaaaacaattgaaattaacgaaaataagttaaggattgctggaattacacgtattgcagacattactgatttagataggataggaatgcctgttttcactgcaattagaccaactgcagaagatggagcaattagcatttatggtggaaaaggaatctcaaaagaccatgcaaaagcttcagctatgatggaaggttttgagagatattccgctgaaaaacaagaagctgatgaaacattaattgcaacaaccagtgcaattactcagaaaggaaaatatgccaatcctaaaacattaaatctgcctcaaaaatatgaaaaagaggatattagtaaaatacctcttgaatggaatatagcaactgatttaatttcgggtgaggaatattatgttccttcaaatgcagtattccacccttataatcatgaaaataatgttcaaagtttatttaaatcaaacaccaatggccttgcatccggaaatattttagatgaagccattttgcatggaatctttgaagtaattgagagagatgcatggagtatttttgagttaactcataaaaattattcgcaaattaaattagatagcattgaaagtgaattaattaacacaataattaataaattcgagtctaatggaattaaaattaaattaatggattttacagcagacattaaaattccaacaatagccgcttcagcagatgacaccattacaaaagatgcaggactattgacattaggcatgggaacacatttagatcctgaagttgcagtcttaagggctttaacagaagttgctcaaagtagagcaacacaaatcaatggtgctcgtgaagataccgtaagagcagattttgcacgtgaagcaggctatgaaaggatgaaaagaataaataaatactacttcagagaggaagaaaaacaaatcaacttccaggatattgaaaataaatccacaacatcaatcaatgccgatttagatatcgtgaaaaaagaattaatagctaatgacattaaacagattttatacactaacttaacaagaccagaacttaatgttagtgttgtaagagtaataattcctgaaatggaaatatatgctcttgatccaacacgtgcaggatacagatttttaagagtatga

SEQ ID NO: 6813 - DNA, 651 bp, Methanobrevibacter gottschalkii
  source 1..651: mol_type = genomic DNA
atgaaaatcataatttatacaggactttcaattccttttgatgaagcaaaagaaattttagattcacatgataacatcgaggtaatctacaaaaaacctattaaaagaggagatttgggtcatgacattaaagagaatcctgatataatagcaataatagatggtgtatttcaccaaaactctgcagtaggacatagagaaattcttagtgtgatgaaaaaaggagttaaagtttatggttcttccagcatgggtgcacttagagcatcagaacttgacacactcggaatggagggtgtgggatactgttataatgaatatgcaagtggaaatgtcacttcagatgatgatgttgcagtaatgcttgactcagataccttagaagccatttcagttcctttaattagtatgaattatgtttttactaatgctgtaaatgaaaatatcctcacccaagaagaaaaagacgagttaatcagaattacaaaagaaacttattatcctaaaagaaactatgctcagacattatcaaaatctggtctgaatagggataaaaaagaaaaactaattaattttattcgtacttcagaagatatcaaaaaagaagatgcaaaagcattactaagccatattaaatatgtgattgaatga

SEQ ID NO: 6814 - DNA, 1011 bp, Methanobrevibacter gottschalkii
  source 1..1011: mol_type = genomic DNA
atgagattagaagataaaatcaatatcgttaggaatatcttaaaagataagaatgtggctatcggtttttcagggggaagtgattctacattaattatttatttagcttcaatgtttgcaaaaaatacgttagccgtaacaatagataatcatctgatgccgactgaatttattgaacatgcaaaaagagtaacatcctccttaggagttaaacatgaaattattgacatagatttctataaagaccctgattttttaaaaaatactcctaaaagatgttatacctgccgtaatttgatgtatggagaaattaaaaaagttgcaaatgaaaatggatttgattatatttgtgatggcaataacattagtgatctagtcgataatcgtccgggaattttaattacttatgctaatgaatttaaaacaccattaattgaagcaaaattaacttcaaaagaaattcatgaatacttagataaaaacaatattccttattcaaaatctactacttgtcttgcaacaagaattaaaactaacaccccaataactaaagaaaaaattgaaaatattagttattgtgaagattatattttatcaaatactgagtgcgaaactgtaaaagttagagatcttggaagcatttgtatgtgtgaagttgacaagattgatgaaattattaatgaaaataaatttaaacagattaatgatgaattaaaaaaacaaggatatgaaaaagtatcattaaacttatcagaaattaaaaataatggagagattattcttaattatattgatggttcattttcatataaacttccattcacaatcaacattgccgatacaaaaaaacaattaaaaaataaaattatttgccaaacaaaagaaaaaatagaaatagaaaatattgatatttttgatacgggattaataaaaggaaataattttaagaactatgaagatgcattaaataaatttatgcatgttctaaccaaattgagaaggaacatttag

SEQ ID NO: 6815 - DNA, 459 bp, Methanobrevibacter gottschalkii
  source 1..459: mol_type = genomic DNA
atggctgttaatccagtattagtgattaaggtagttgataatactagtgttggcgttcgtgcgagattatatgatgatttctctgaacacaacattgttttaaactctgttcttacttattggtgggcaaataatatgcctccagccgttaaatttttagaactttttgattctgttatcaaaagaaccatcaatgaaataatgcctcataaaacattaaatttaaaatatgaggttaaagcagatgatattttagaaaatgcttctcaaattgaaataactttgatttctatctcggcagatggtgtagggtttaaaattgatgggaaatctgttttcttaaaagatttaagaaaagttgaagaggattttgaacctaaagaattttcaacaacttttgatcaatgcatcgaaactccggatattgttttaaaaaaatataaggaaatgaaaaactaa

SEQ ID NO: 6816 - DNA, 846 bp, Methanobrevibacter gottschalkii
  source 1..846: mol_type = genomic DNA
atgttagttaaaagaacaatgtctaaaaatgtagttagtgtttctgttccaggtaacagagacaaagttttagacttaatgaggaaagaaaaaaaagcagtattgccagttgttaaaggagacactgatatattagtaggaatagttactcgttccgatttaattaataatcctgatgaagaacaaattgcaatgttaatgagtagagatttaatcactgtaagtcctggtgatgatgtaattgatgctgctcgtaaaatgatggataatgatgttagaagagttcctgtagtggatgatgatggaaaattagttggaattatcacatctttcgatttagtatctaatgctttaactaaaactgaaattaatgatgttgttgaaaattatatgattactactgttccaacaacttgggaaaaggctccattaaatgtagcatttgaatctatgaatcaatttggtctaaaatctattttagcacttgatgatgatgctaaattgtctggaattttaactgaaacagatttcatttctgaaattgaaattatctctgaaagaagtgaacacagttctactgtgggtactgaaggagataaatggtcttgggacagcacttcagtattgtacatcgagaaaaatcatttaaaattcactgataaaactgtttgtgatgttgctgtaggtaatgtcgaagtagctaattctaaaactaaagtttcagactgcgctaaaaaaatgaaaaccttaaacattgaacaaattcctgttattggtgttgaaggtaatttagttggtcttgtaagggctagtgatttaatcaaagcattagttccacaagaatag

SEQ ID NO: 6817 - DNA, 423 bp, Methanobrevibacter gottschalkii
  source 1..423: mol_type = genomic DNA
atgtataaaaaaatattggtcccaacagatggatcagaattcgcaaaaaaagctcaaaaacatgctttattcttagcagagatatctggggctgagataattgctataagtgttacagagaataattttgttaacggacttccattagatgatgaagtataccagttaaatcaaatcttaaaagaaagatctgaagaaaatcttaaagaatttgataaattaaatgaaaatgatttgaaaattactcatatagttagagaagggtcacctgctaaagttattcttgaggtggcaaaagaagaaaatattgatttaatagtaataggtagttctggtaaatctggattcgatagatttattatgggtagtgtagcagataaagttgttaattcagctaaatgtgcagtgcttgtaattcattaa

SEQ ID NO: 6818 - DNA, 1155 bp, Methanobrevibacter gottschalkii
  source 1..1155: mol_type = genomic DNA
atgtttactatagcaaatggaatcatattgaaaggtaaagatttggttcctactcgtgaaaatattgttgttgatgatggaagaatcattgaaattggaaagggattcctagagggtaaaattattgatgttgatgggtctgtagtttgtccttcttttataaatggccatatgcatattggtgattctattattaaggatgaggggtatggtttatctttaagtgaaatggtgaaacctcccaatggggttaaacatgttgcattatccgatgttagtgatgatgaattgatacaggcgatgaaatattcaatgtgggatatggtttatggtggaacaacacatttcattgattatcgtgaaggtggattaaaaggtgttaaacttttaagaaaggcatctgaggacattcccataaaaccaattattttaggccgtgacgatagtttttatggtgatgatccagatttaagcaaagttaaaatagctattcgcaaacttcttaaatttgcagatggcattgctccaagtggttttggagaaataacaatggatgttgcagaacttatttcaaaggaatgtgaaaaagcaggtaaaatttcatcaattcatgttgctgaatctgaattgaatcaaattgaatctcttaatgcttgcggattaagtgaaatcgaaaagggagttattaataatttttctcagttggtacaccttactaatccaaaaaatgaggatttaaattcagtttcagtatctgctcaaaatgttgttgtatgtccaagagcaaatgcaacattgaatgtgggaatagttcctttaaataaaatgcttgatttaggaataacacccttgcttggaacagataatgtaatgattaattcaccgaatatgcttcgtgaattggaatttactttaaaaataatctctgtttattataaaaagtatattgatccttccaatcttttaaaaatggcaacaacaaatatttgcggattcggaattaacaatgttattgataaatcactaataactgaagataatttagctgaatttaatgtattcaattctttttccaaaaatccttaccttaatataataaatcgttgtgaaacgaaaaatatattatataggattaatagaagaacaatcatataa

SEQ ID NO: 6819 - DNA, 531 bp, Methanobrevibacter gottschalkii
  source 1..531: mol_type = genomic DNA
gtgtatagagttaagtacaacaataaagattatggggagtttaaaaaattatctgacgcattatatgaaagagatgcattatttttttgtaattttgattatgatctgcttgttgaatgtgatcttgaaaacaagtatgaaaatatggttctaccaccattccctgaaaaaagaccaaaaggtagaattaaaggaaccaaagttaataaaaaagaaagagaaggagaaattctcttcaaccacaaaattaaaaaattctacattcaaaaaggcgatgaaacaattggccaatatgatacaatgaccgaagctttttactacaaaaagatattaatggccaacaagtgggataaaaatattttaaaaacaaatatcactaaaaaaattgaagttaatataattattgatccagcagttgaatatgaagtacagttaaacttttgccctaaatgtaaaaatagattaaaaattggagagaccgaatgtccttcctgcggaatcaatatcgaagaatatttatttaatagataa

SEQ ID NO: 6820 - DNA, 3177 bp, Methanobrevibacter gottschalkii
  source 1..3177: mol_type = genomic DNA
atgccagttgataaggatattaaaaaagtattaattattggttctggacctattcaaatcggacaagcagcggaatttgattattcaggatcacaagcatgtaaatcactaagagaagagggaatagagacagttcttgttaacagtaatccggctacaattcaaacagacattgacatggcagatactgtttacacagaaccattgactccggaagttgttgctaaaattatcaaagaagaaaatgtagattcaatattgccaactatgggtgggcagacaggattaaatatcgcaacaggtcttggagatttgggattgcttgatggaattaaagttttaggctctgatgttcagacaattaaagatgtagaggatcgtgatttattcgcaaatcttatggataaaattggtgaggagattcctaaatgtcatgcagttgaaagtgtagaagcagcacttgaagcagtagatgatattggttatccagttattgtaaggccggcattcaccttaggtggtactgggggtggaattgctcataacgaagaagaattaattgaaattgcaactcatggattagatatgagtttcattaatcaggtactcatcgacgagtcagttctcggatggaaagaaatagaatttgaagtaatgagggataaagaggatacttgcatcattgtatgtactatggaaaatatagatcctatgggtatccacacaggagacagtgttgttgttgcccctattcaaaacttatgtgatgaaactatccagaagatgagggatgcatccattaaaattatcagagcactaggaattagaggcggatgtaacatccaatttgcacttaacccagaaactgatgaatacaaagtcatcgaagtaaatcctcgtgtatctagaagtagtgctcttgcgtctaaagcaacaggttatccaattgctaaaatctcttctaaaatagctttaggattaactttagatgaaattaaaaatgacattaccaaagaaacaccggcttcttttgaaccagctattgattatgttgttattaaaattcctagatggccttttgataaattcaaaggtgtaagccgtgaagttggagttcaaatgaaagcaactggtgaagtaatggctatcggaagaacttttgaagaggcattccaaaaagcacttagatcacttgatatgggattcgacggttttgaatacattgattacactgaagaagatttggcgcatcctactgataaaatctacttccaaatttattcagctattaaagatgggatggatattgataagattagagaaattaccaatattgataacttttttttatataaaatcagaaacattgttaactttgaagatagtgtaactgctgataaattaaacgatgaagatttcttaagaaaagctaaacaaattggttgttctaataaaagattagctgatttatctggccaaactgaagagtatattaaaaacttactttcaagatataacattaaaccatcatataaaatggtagatacttgtgctgctgaatttgaagcaaaaactccatattactatagcagttatgataaaggaaatgagcttgtatcaaccaacaagaaaaaagttgtaatccttggagcgggaccaatcagaataggtcaaggtattgaatttgattactgttgtgtacattcttctttagctttaaaagaagaaggaattgaaactattttaatcaacaataatcctgaaactgtaagtactgattatgatatttctgacaaattattcttcgaaccacttacatttgaagatgtaatgggtgttattgaacaagaaaaaccagatggggtaattgttcaatttggtggtcagacatctattaatttatcagtgccattggcaaatgctggtgttaaaatcttaggtactccatatgagagcattgatagagttgaagatagggaattatttgctgaacttttagaaaaattacacattcaccaagctccatatggaacagctaattcatttgaagaagcaaaagaaattgcagaaaaaatcactttcccggttcttgtacgtccatcatatgtaattggtggaagagctatggaaattgtttatgataacaatgaacttgaagaatatatgaaagaagctgtaaaagtatctccagaacacccaattttagttgataagtttttggaagatgctattgagcttgatgtagatattttatgtgatggtgaagatgtgttcattgcaggaatcatggaacatattgaagaagcaggagttcactctggagattctgcatgtgtaatacctcctcaaacaattcctgaatatattttagatactattcgtgaaaattcaaccaaattagctcttgaattaaatgttaaaggattaatgaacattcaatatgcagtaaaacttgatgaagaaatggtttatattattgaagctaatcctcgtgcaagtagaactgtaccatttgtaagtaaagcaattggtgttccattagcaaaagtagcaacttggattatgcaaggagctaaattaagagacttcgatttaactaaagaaattaaattaaatcatgttgcagtaaaagagtctgtatttccattcttaaaacttccggaatctgatactgttcttggtccagaaatgaaatccactggtgagagtattggtattgatgaaacttatggcatggcgttctataaatcacaactttcaggaggtatggaattacctaaggagggtaaaatatttatcagtgttaaagaggcagataaaaagaaaatcagacctattgctgagactgcagctaatttgggttttgatttaatagcaactgatggtactgctgatgctactggtattgattcggttgaaaagatattaaaagtatctcaaggttctcctaacattagagatgctattttaaacaaagaaattgatttgattattaacacttctgaaggtaaacaatctgctaaagatggttatataattagacgtcttgctattgaacttggtattccatatgttacaacacttgcaggagcaagagcagttttaaatgcaataaaagctattcaaaataatgaaatcaatgtaaaatctttaaatgactatgttggtggagaataa

SEQ ID NO: 6821 - DNA, 1083 bp, Methanobrevibacter gottschalkii
  source 1..1083: mol_type = genomic DNA
atggtaaaaatagctaaattagctttagaagatggtactattttaaaaggtgaggcattcggttatgaaaccactaaattgggagaacttattttttctactggtatgggtggttatactgaatctttaactgatccgtcttttaagggagaaattttaatgtctacttacccattagagggaaatcatggtgtaagtgagaagtggtatcaatcagataaaattcaagcggaaggttttgtttgtcgtgaggtttgtcgtgaggtttcaaatttcggacctcaaaaaacattggatgattttttaaaagaatttaagactcccggaattagtgggattgatactcgtgatttaacacttaaaattcgtgaaagaggttctcttaaagcggcaataacaactgaaaatatttctgatgatgaactaattaatttagctagttcacaaccgagtattgaggatatggatgttgtcccgttagtgtctacaaaagaaatcaaaatgttcaatggagatgctgataggaaggttgcattaattgattgtggtgttaaaaagaatattattaactcatttttagaaaggaatattggtgtaatattattcccttatgatactgattataaaactgttttagattattctcctaatggtttaatgattacatctggacctggaaatcctgatagggtatctgaaactattgaaaccatgaaaaagttatcaaacagattaccgatttttggtatctgtatgggtcaacaactaatagctaaatcttttggagctagatcatataaaatgaaatttgggcacaggggagaaaaccaacctgttaaagatttaaatactggaaaagtatttattacttcacaaaaccatggattcaccattgataaagaatcattaaaagaaactgatttagtattaactcaaattaacttgaatgatggaactccagaaggtatatcacataaagaattgccattacattgtatacagtaccatcctgaagcaggacctggccctaatgatacaaggaatatttttgacaaatttaatcaaatgatggatgattactaa

SEQ ID NO: 6822 - DNA, 1521 bp, Methanobrevibacter gottschalkii
  source 1..1521: mol_type = genomic DNA
atggatgcaaaatctgaagaaatatttaaaaaacatttaaacaattctaaagaatatgtaaaattcaaaaaacttgttaatgaaacaagagtttatgatattccaaaagaattaaccggtgaattaagagcataccaaaagataggttattcctggatagttcagaacattaaatataactttggatgcatattggctgatgacatgggtcttgggaaaacaatacaagttttaactgcaattcttcactttaaagagcaaaaacattatgattatgagccatccttaattatagtacctcctacattgttatccaactgggaaaatgaaattaaaaaattcacgcctacactttcctattatatttatcatggtgctaacagaacattcccattagatgaatatgacattattttaacatcatatggagtaattagactggatttagatatgtttttagataaaaaatggttcatatgtgttattgatgaggctcagaacattaaaaatccaaacacacaacaaacaaaagcaataaaaagtgttcctgcatttaataaaattgctcttacaggaacaccaattgaaaataaactaactgattattggtcaatatttgattttgtaaataaaggctatttatcaacattagacaatttcaaaagagattatgtttttagaatcgaaaggttggaagaaacatcaactttagaaaattttaaaacaataactaagccatttgtgttaagacgtcttaaaactgatgacaacatcaaagatgagcttcccgacaaaattgttaatgacatatactgtagcttaaccaaaaaacaagtattactctataatgcaataatggaaggaatttttgaagatttggaaggtaaaacaggtattgaaagaaaaggaattattttaaatattataactggattaaaacaagcctgcaatcaccctgcacaatatttgcgttcagataatcctaaaattaatgaatctggaaaaatggagttattgataacaattttagaaaatattttagatgttaatgaaaaagtaataatatttacccaatatgccaaaatgggtgagattattaaaaaattagtttctaagaaattaaaaacagacgttttattcttacatggctcacttacacaagaaaaacgatcagatataatttcaacattccaggaagatgaagatcataaaattttagttgcaacccttaaaactggaggtgtgggattaaatttaactgccgcacaaaatgttattcattatgacttatggtggaatccggcaatagaaaatcaagcaacagatcgtgtacatcgaattggtcaagaaaaagatgttatggtatatagatttataacaaaaggaacattagaagaagtaattgatgagatgagtaaaaataagttgaatctggctgaaaaagcaattagtaatgatgaaactttcatcaccgaaatgagtgatgaagaacttaaggaaaaattatctttaagattataa

SEQ ID NO: 6823 - DNA, 825 bp, Methanobrevibacter gottschalkii
  source 1..825: mol_type = genomic DNA
ttggatagaataattgaatatatgcttgaagaagataagggatttggagatattacttctgaagcacttgtggaaaaagatttggaagttaatgcatatatcatttcaaaagatgaaggtattttggcaggaatgaacattgtcaaagatttatttgaagagtttgatgttgaagttgtatataatttagaagatgggagtaaaattacaaaaaaagatttattgatgtctgttaaaggtaatgcaaggacaattttacttcttgaaaggactgtgctcaacttatcaatgaggatgagtggagtggccagtgccgctagttattattcttctttagttaaaaatcatgatgtgagaattgctggaactcgtaaaacttctccggcattggctaaatttgataaatatgcattaaaagtaggtggtgtagatactcatcgttttagtttggatgatatggttttaattaaagataatcatattgccgtattcaaatctcctttagatgctcttttaaaagcaaaagctaatgttagtttttctaaaaaaatcgaaattgaagttgaaacattatccgatgccattgaatgtgtaaaaaataaagcggatattgtgatgcttgataatatgagtggaaatgaagttaaagaggtcatcgatgaacttgaaaaattaaacattcgtcaaaattctttaattgaagtttctggcggtattactgaagacaatatcatggattatgttgaatctggtgtggatattatttcaattggtgctttaacccattcctctagaagtttgaatttcagtttgaaaattgaataa

SEQ ID NO: 6824 - DNA, 894 bp, Methanobrevibacter gottschalkii
  source 1..894: mol_type = genomic DNA
atggaaattatatttttaggaacttcatcagcagtacattcttatactagaaatcaccctgcaattattctaaaagcatttggtgagattatattatttgattgtggtgaaggaacacaaagacaattaatttttgctaaaataagtcctatgaaaatatctaagatttttattagtcattatcatggcgatcatattctaggccttccaggactattacagtcaatgaattttagaggcagagaaactaaattaacaatatatgggccaaaaggtttgaatgcattaaaaaatgcaatattaaacttaggatattgtaaaattgattttccaattgaatttattgaaattggtacagaaactattgaatgttgtgaagaatacataatccgatcacaacatgtcaatcaccaagttccatgcttagcatatgctgtagaagaacttaaaaaaccaagatttctccgtcaaaaagcaattgaattaggcgttcctgttggacctgcttttggaaaattacacaatggtgaagaaatagaaatcaatggtaaaataatcaaacctgaacaagtattagggcctgcaagaaaaggaattaaaataacttattctggtgatactgcaccctgtgaagaaatgattgattttgcaaaagattcaaccattttaatccatgaatcaacatatatgaatgaagatgccgataaagcagaagaaaacttccattcaacatcttcggatgctgcaagaatagctaaaaaaagtaactccaaacaattagttttaacacatttcagtacgagatatgcaacattagatgatttacttaaagaagcaaaaaaaatttttaagaatacaaaactggcaaaagattttatgaaaatagagatttaa

SEQ ID NO: 6825 - DNA, 756 bp, Methanobrevibacter gottschalkii
  source 1..756: mol_type = genomic DNA
atgaacatatcagtaacattaaataatcctgcatggacgttaatttatattttaatagttattatcgccacatcttttttaactagactaattgcctttttaatgaataaaatgaaacgttttcacaacaatgaggctgcaatttatcttacaagagatataataaattatataatctattttattgcattaatgattattttacaattttttggaataaatctggcaggaacattattgagtttgggaatagcaggtatagctttgagttttgctgctaaagatttaatatcaaatttattctcaggaataacattgattattggaaaaagtattcaagttggggatacaattgaaataaacaataaaaaaggaattgttgaaagaataacccttagatcaactattatttctgatgacagtggtgttaaaaagattattccaaactccacattgacaaattacccctacttacactttaaaactcctgaaaaatatagagtagacatccaaaccggattgtcattaaatattgatgttgaggaatttgaaaaatacattgttaaaaaaatattagaatatgatggaatattaaaaaatccaaaaccatccgtttattcaaaaggaatcacttttgaagaaactcagctcaaagtatcgttttgggtaaaagaatttaatagtaaagataaatataaattaacaattacaaacgaaattagaaaatttacaaaaatgggtgaaaaagatgagtaa

SEQ ID NO: 6826 - DNA, 918 bp, Methanobrevibacter gottschalkii
  source 1..918: mol_type = genomic DNA
atgagtaatacacttcaaaaagaaattttaaaattaaaagaagaaaaaaatgcaataatacttgcacataattaccagccaaaagaagttcaagaaatcgcagattttcttggagattcattagaattatgtattaaagcttctgaaattgatgataaagatttagtaatattttgtggtgtagatttcatggccgaaaccgcatttatattaaaccccgataaaaaaattgttattccaacattagaagctgaatgtccaatggcacatatgttgcctgaagatgtgcttttaaaagcaaaagaagaaaatcctgatgcaggagttatcctttatgtaaacagtattgctgaagctaaacaacatgcagatacattatgtacttcagctaatgcagtaaaagttgcacaaagcttgcctcatgataaaatattatttggaccagataaaaatttaggaactcatgtagccgataaaatcgataaggtaatcattcctgtgcctaaagatggtcattgttatgttcatagattattccatgttgaagatgttgagcttaaaagagaacaatatcctaatgcggaaataatttgtcacccagaatgtgatattaaagttcaaaaagcatgtgataaagtaatgtccactggaggaatgttaaaatacattgcaacaagtgataaagaagaatttgtaattggaactgaaattgacatgattacaagaatcaatgcagaagtacctggaaaaaaattatatcctttacttgaaggagctatttgtgaaacaatgaaattgcacacacttgaaaaaataagagattcacttgtaaacgaagctccacaagtcacattaccaaaagatgttgctgataaatcaaaaaaagctgttcaacatatgcttgatgtatcaaaataa

SEQ ID NO: 6827 - DNA, 1029 bp, Methanobrevibacter gottschalkii
  source 1..1029: mol_type = genomic DNA
atgtggggtgttagtatttttcgagaattaaatattgaatttagcaattttatcatgtcttcttttgaatttgaatctggtagaattcttaaagatgtcaatgttgaatatagtactatgggatttccaaaatatgatgaagatggaaacattactaatgcgattgtattttgccccactcttaaaggggaacgttctgttttagctaatcttcataatgctttgactatggataatatttctaatgatgatgagtttgcttttatccgtgataaaaaatatttttttattaggattgtttcattaggttctccggagtcatgttctccttccaccactgatttaaaacataattttcctaattatacttttagagactgtgttaattttaaaaaacagtttttaaaagaaaaatttaatttggattcagttttagctattgttggtgaaggagtagggggttgtgaagtatttacctgggcttgtgaatatccggattatatggaattcatattatccatgaataatctggctaaactatctggaactagttatatatttttcaaaagcatggaaagtgtattagaatcaaacgataaaatttattctgatgtatatgatccatctttgtccaaattggttgttgcagttaacaagatgctgttcttaaattatttatcaagaaacatgctttccaatttatcaagggatgaacttgatgcgttattggataattttgtagaagatggtttattcagggatgttcatgatttgaaatacctttgtgattgtcttttagagtatgatgtgaatgataaattatctaatataaaagctaagaccatacttatagcaatagaaggtcaatttttggtaaatgttgaaaaagaagttttaccactggaaaatgcaattgatgatgtggaggttatggtgattcagttagatgaaggggaatttgataatggggagtcatattcttctgtttttaaaatattttcatttttaaatgaatatggagtagaataa

SEQ ID NO: 6828 - DNA, 279 bp, Methanobrevibacter gottschalkii
  source 1..279: mol_type = genomic DNA
gtgattgttaaaattttaaattatggtgatgttggtaatcttaaattcattgaatatggcatatatggattattatcaactcaaattgattatcttatggaaaatttagaggaggaaacctcaattaatgaggatgtattaatcattaaaatgtattttgaaagtaagttatatcctttccaaagtggtgctgcaaaattcagattagatgatttcgtcgctcgtgaagaaatagaaatggctatgtttttgtcaagttttttagaggatatggtgtga

SEQ ID NO: 6829 - DNA, 1011 bp, Methanobrevibacter gottschalkii
  source 1..1011: mol_type = genomic DNA
atgtgggggattataatttacgatgaaaattattttatatcaaaaaatgaatattttacattgaattcatttgaatttgagaatggtggtgtattaaatgatgtaaacgtggagtatatgtcattcggaactccaatttatgatgacaatggaattataaaaaatgctattgtctattgccatggatctttaggcagttactcttcaataaaaaaacttgcaccattattaggtgaaaatgatgcttttgatgaaaataaatattttttcatttgtatttcagcgttaggatcaccagggtcctgttccccatcaagcactgatttaaaaaataaattcccaaaatattctatcagggatgttgtaaaatttcaaaaaaaatttttagctgaaaaatttaacatcaatcatgttttagggatgattggtaattccatggggggttttgtttgtcttacttcagcaataaatttcccagattatgcagattttattatttgcggtgttagtagctataaagttgcggggcatgattttatactatcacaatttgtaaatgaaatcattgaatctgatccggattataataaaggagatttgacttattctttaattagaacattaagaatagcttgtttggctgaatttaattttggattatcaaaaaaagcattaagggatatgtctaaaattgaattaagttctgaatttgaaaattttggtaatgaaagtattgaaacagatatttatgatttaaaatattgtaatgaagcatgcatgtattttgatgttgaagaagaattgggcaatatcaaatcaaaaacattaataattgcatgtaatcaggatcctcattttccacctgaattggatgctattccaatgtctaaaatgataaatgggtctaaattagtaataatggattcagatttagggcatttatgttttaatgaattggatactatttcaaatgaattaaaggagttcatggagggattgggtgattgttaa

SEQ ID NO: 6830 - DNA, 783 bp, Methanobrevibacter gottschalkii
  source 1..783: mol_type = genomic DNA
atgaaatataaaattttagaaaagcctagttgtgaagatggatatgatctggttcaagaagctctacgtaaaaaaacaacaatactaatctttgcttgctgtaaagttagttatgaaggaagggcattaagtgaactcaactggggagaacgtataattatgattaaaccagatggaacatttttaatccatcaagaaaaaaaagtagaacctgtgaattggcaacctccaaaatcaagaaccagaagttacattaaaaatgacaatttgttcttagaaagccatagaagaactccaaaagaattgctgactgtagaaattagaaaaatccaatttataaattatgcaaatattgaagactttgaggaacttgaacaggcaggatatgaaaaagatatgggtgacatgataatggaaaaaccacacatgattgaagaaggttttacacctactgcccgcgaatatagtgtggaacatggatttatagacattttaggaaaagacagtgataataatttaatggttcttgaattaaaagcacgaaaagctggaattacagcagtgaaacaacttagaagatatcttcaggatttagaaaatacagacaatgattatttaaaagagtgtgaatctcaaaagaaaaaaattagaggactgcttgttgcaccttcaattatggatgatgctttggaattactggaaaatgaaggtatcgagtttgtatctattgaacctccacgtgagttaaaaagagataaaaaagtaacattagatgcattttaa

SEQ ID NO: 6831 - DNA, 480 bp, Methanobrevibacter gottschalkii
  source 1..480: mol_type = genomic DNA
atgcttagtgaagaaatgattgatattaatgatataaattatgctatttataaaattgggcattgggaaaataactatgaaattaatcaaattggtttatctaatgaaattccggttactaaaaatactttaaagcatgtaaaactttcaatggtagaaattaggacttctagatttgaattatctgataaaatagttaatggttttgtagctattgcaattcatttaaattccaatgttcaaaacatggaattggatgaactgattgaacttgaagaaaaagaatatcaaaatattttaaaggaacttgataatctggaattattggatgataatgaatccattcctttggatagtgaagactatcttatttataaattggaaaaagattgccatgtaacgaaatctgttcctgctaatttgtacaccataaattatcataacaatgaattgaagaaaattgaagatgcattagattaa

SEQ ID NO: 6832 - DNA, 693 bp, Methanobrevibacter gottschalkii
  source 1..693: mol_type = genomic DNA
gtgaaaaaatgtcccgaatgtggaaatcctagttatgatggagccccagtttgtggaaactgtggatataaattccctaaagctaaaaattcagtgcctaaaggagaagatatcttcaaaaaagaacacaaaaaggaaccttccaatgacgaaagtacacttactattataaaacagaaaaagcttattattggaataatcttagttataactttaattttaatttgtggaatctttttaactggatcaaccaataaatcttcaccgattcaaaatgttgacacagaaaaatatagtgcaggatcattttcattcaaatatcctggtgattggcaggaactaaaccaaactgatgaagaacatccaggagctatattttataaagcagcaaacaacacaactgttgaatattacaatgtcagcagtagtgcatcatctttaaaagaaataaaccaaaatagaatcacacatgctcaaagtgtaggtgcttctgtcacccttcttgaaacaataacattagatggtagaaatgcatcaaatattatcttagaaaacgctgatggaaactacacaagatatgtttcaatgtttagtaatggagaactatatgtattcagactttctggagattccgtcaattccattacatctgatgaaattaatagtgtgataaattctgcagacatagcttaa

SEQ ID NO: 6833 - DNA, 828 bp, Methanobrevibacter gottschalkii
  source 1..828: mol_type = genomic DNA
atgacaaaaattaaactcgctttatgtcaaatgaatgttgttgataacaaaaaagaaaatatcaaaagagcacattcaatgattaaagaaagcgtatctaaaaatgctgattttataatattgcccgaaatgtttaattgcccatattcaaacgataaatttattgagtatggtgaaaaagaaaataatagtcctacacttaacgagatttctgaattagctaaaacaaacaaagtatacattctcgcaggatccattcctgaaagagaagagaataaattgtataatactagctatctttttgacaaacaaggaaatgttattgcaaaacacaggaagatgcatctttttgatattgatgttaaaggaaaagtaacattcaaagaatcagatgtgttaactgcaggcaataaagttacagtagctgaaactgaatttggaaaaataggcattggaatctgttacgatatccgttttcccgaacttgcacgaattatggttgaaaatggagcattaatactagtttatcctggtgcttttaacatgacaactggttcttcccattgggaactgctatttcgctcaagagctattgacaatcaagcattttgcattggcgttgcacctgcattaaataaaaatgctagttatcatagttacgggcattcgattattgtaaatccttggggaaaagtaatagctcaagctagtgaaaaagagagtttgataatttcagaaattgatttaaatgaaataaaaaaaataagggaagagttacccctcataaaaaataaaagaaatgacatctacaagattattctaagataa

SEQ ID NO: 6834 - DNA, 849 bp, Methanobrevibacter gottschalkii
  source 1..849: mol_type = genomic DNA
atgtctaatttaagttttgatgaagctatttctaacttatctgctgaagatgttggagttagaaaagaagctataaaatcattagttggaattactgatgaaaaagctattgaaccattaattaaagctactactgatgataatgcacaagtcagattcaaagcggctgaaattttaggaaatatgggtgatttggctgttgataaattaatcaatgaatttaataatgctgaaggtaaagataaaagatttttggcttttgcacttaaagaaactgaagataatagaattattccttattttgttgaagcaactgaagatgatgattttggagttagaaaagttgctgtacgtgctttaggagaacttcaagctataaatgaacttgaatcaatttcaaaatgccttaaagatgaagattggggtgttagattagctactattcaagctttaggtgattttgcaactgatgaatcaattaaattaattaaagatgctagaaaaagtgaagatgataaggacttcaaaaagtcttgtaataaagccattaaaaaagctgaaaaaagacaaaaagcaaaagcatctggaaaagccatagtaaaagtcattccaatgagcactattaaagaaatggaaaagagcaatatacaaaaagccattaaagaatatgaacgatatgttgaagcaaaacaagcaaaagatgctccatacaaacgtttatgtgtattgtataggaaagctaacgactatgaaaatgaagttagggtaattgaaactgcaattgaagtatttgcagataatgataaaaaattatcttactttgagaaaagattagctaaattaaaatag

SEQ ID NO: 6835 - DNA, 771 bp, Methanobrevibacter gottschalkii
  source 1..771: mol_type = genomic DNA
atgaaaaactattttgatattaaagacaaagttgcagttattactggtgcttcttctggtcttggctggcaaattgctcaagcatatgcaagccaaggtgcaaaattagcactatttgcaagaagagaagaaagacttcaagaaaatatcgctgaaatagaaaaagaattcggaaccgaagcgatctatgccgtatgtgatgttggaaattatgacagtatcactgaagctgttgcaaaagttatggatgcttatggaagaattgacattttagttaatgcggcaggtatgggaaacaacaaaatggttactgatcaatccaacgaagaatgggaaagacacattcacattgacttaagtggtgtttattacatgtgtaaggctgttggagaagtcatgattgaacaggaatatggtaaaatcattaacattggttcaatccactctagagttatcttccctggtggaggaattagtgcatactcctcagctaaaggtggggtaatgaacttaactaaaaacttggcagttgaatgggcaaaatataatattactgtaaatgctattggtcctgcagtatttgaaacagaattgactgttgattcaattgaaatggatggatttatggatcttattaaagcatattgtcctgctggtcgtttaggtaaacctggtgaattagatggtatagctatttacttagcatctgatgcatctagtttctgtactggtcaattaatttgtattgatggtggatggactgctatttaa

SEQ ID NO: 6836 - DNA, 2598 bp, Methanobrevibacter gottschalkii
  source 1..2598: mol_type = genomic DNA
atgattgaagagcaaactaaaatctactctaaaaaacaaatttttaaaaccttacatccatgggttcaaaaatggtttgacttacaattcgaagattttacacctgcacagaaaaaatcaatcatagacattcacaaaaggaacaacattctaatttcatcaccaacaggatctggaaaaacattaactgcatttttatccataattagtgaattaacaacacttgccgataccgatcaactagaagataaagtgtattgcatttacatttcacctctaaaggcattagataatgatattgaaaaaaatctagaagaaccattaaaaggaattgaagaaatagctggaaaagatttaggaatacgaaaagctgtaagaacaggtgatacttcacaatatcaaagacaaaaaatgcttaaaaaacctccacacattttaatcacaactcccgaaacattatccatattacttgttgcccctaagtttagagaaaaattaagtggagttaaatatgttattgttgatgaaatacattcactagccgaaaataaacgtggagttcatttaagtttatctttagagagattgcaacacttaattggacaatatactcggattggactttcagcaactgtaagtccgcttgaagaagttgcaagattccttgtaggttatgaatacggtattgaacgtgactgtaaacttgttaaaatcaactatttaaaagaactggatatgcaggtaatgtgtcctgtaagtgacattgtaatagcagatgaagaagatactcgtcttgggatgtacgatttattagatgatttaatccaagaaaataaaactacattaatctttacaaatacccgtagcggaacagaacgttttgtttataacttaaagaaaatgtatcctatgaattataatgattcaaatataatggcccatcactcctcactttcaaaagaagttcgtcttgacacagagaataaattaaaggaaggaaaactcaaagtagtagtttcatcaacatctcttgagcttggaatagatattggatacatagaccttgttgttttaataaattcacccaaatctgttgcaagagcacttcagagaattggaagaagcggacacaaattacatgaaaaatctagaggcagaattattgtaacgaatcgtgacgatttagttgaatgctctgttttgcttaaaaatgcaaaagaaggaaaaatagacaatattaatattccaactaactgtttagatgttctagcccaacatatctatggaatgagtattgaaaatccatgggacattgattatgcttatgatgtgataaaaaaaagctattgctataaaaacttaccaagggatgattatgaagatgtattaagttacatggccggcgaatatcctgaacttgaagagagatatgtttacgctaagatttggattgactataaagaaaatacttttggaaaacgtgggaaattagccagaatgatttattcaactaatattggaacaatacctgatagttctggtgttttggtcaaatgtgatggagaaactgttggaaaaatcgaagaaaacttcatggaaagattaaaaaaaggagatactttcgttttaggaggtaggatttatagattcaactatgggaaaggaatgacaatcaatgtaactcctgcaagtggacctccaacaataccttcatggttttcacagcagttaccattatcttttgaccttgcaatggatattcaacgtttcagatcccatatggaaaccaaatttgaatatcgaagaagtaaagaagaaataatggattttatttttgattacttatatgttgatgattttgcagctaattccatttatgaatattttgttgaacaatataaatatgccaaaattccaagtaatcgccttttactcgttgaatactataaaggatttggtggaagaaattttgtaatatttcattcattatttggaagaaaagtaaatgatgccctatcacgtgctgttggatatgttgttgcacatcaatataatacaaatattacaatttcaattacagacaatggtttttatttgagttcagatggtaaaattggtggattagaatcatttaaacaattaacccctgaaaactttgaaacaatattaacaaattccctaaacaaaacagaaacacttgcatcacgatttagacactgtgctggaagatctctaatgactctaaggaaatacaaaggagaatccaaatcagccggtcgtcaacaagttcgtggaaaaatattgctaaaatttgttcaggacatggacgataatttctcaatattaaaagaagctagaagagaagcgcttgaagattacatggatattaaaaatgctttgaaagtaataaacatgattgataacgaatccatggaaataaaaaccataaatactgtgataccaagcccatttgcatttaatttagtttcacaaggatatttagatattctaaatcagaatgacaaagcagaatttacaaaaagaatgcataaagcaatacttgatcagattaaagataaattaaaagacatttattag

SEQ ID NO: 6837 - DNA, 462 bp, Methanobrevibacter gottschalkii
  source 1..462: mol_type = genomic DNA
atgaaaaccttactcgtttattattccaggacagatgtaactaaaaaaatagctaaaatgattcaagagaaaattaattgtgatattgaagaaataactgacgacgacaaatattctggaaaacttggatttttaaaaggtggaatgaatgcttcaatgggaagaacaagcgacattaatattatttcaaaaaatccaacagattatgatttaattatcattggaacaccagtttgggcttcaaatatagcaactccaatttacacttacttgatgaaatacaataaagacttcaaaaatgtagcttcattctgtacatgcatgggcaacggatatgaaaaaaccttaaaaaatatctcagaaataactggaaaagaacaaatttccaccatgttttttactgcagaagacattaaaaacccagaagaaaaaataaatatttttattaatgaaatcaaataa

SEQ ID NO: 6838 - DNA, 369 bp, Methanobrevibacter gottschalkii
  source 1..369: mol_type = genomic DNA
atgactaaatggaaagcagtgattataggtttcatattagctgtaatagttaaatcatttttcgcacaatatgaatttattggattattatttgttggattcatcacaggttatatcgcacatgacggagcacttagtggcttatggaatgctgctgttgctggagcattaggaaccattgtttgtgctatattatttgttttagttgcaactttaggtggaagtttattcggtattttcggaggattaactggatttaccctctcaggaattacaagcataaccatagtattaggttatttaatttattattcaatcgtaatgggaataactggagcgttaggtggaataatagcttctaaaaaataa

SEQ ID NO: 6839 - DNA, 408 bp, Methanobrevibacter gottschalkii
  source 1..408: mol_type = genomic DNA
atgaatatgttttcagagataaatataaaggcattagtttttggagctgcaatagctgcagcatgtatattaataggataccagtattgggattggttatatcccttttcagcgataggacttatctatgcaggatatggacaatcaaacatcaaaattggaactgcaatgggagcattagcatccacaccagtagcaatattaacattacaaggatatttaggaacatttaaagaaggattttttacaacagaaaatggaatacttgcagtgaccctgaccgttattgctgttggtgcatttatcggttttgttggtgcatgggctaaaagagatcgcataaaagcattagaacaatataatcaaaaacagaaaatcggtaaaaacaaaaacaagaaacaaaagtaa

SEQ ID NO: 6840 - DNA, 1092 bp, Methanobrevibacter gottschalkii
  source 1..1092: mol_type = genomic DNA
atgggaaaagttaaaaaggaagatatcttggatatcttggctaaatatgacaaaagtgaaataacaatagctacccttggaagccatacctccttacatattttgcaaggtgcaaaagaagaaggatttagaacagctattgtttgtgaaaaaggaagggaaattccatatcaaagatttgatgttgcagatgaatatatccttgtcgataaatttaaagacattgtaaatgaagatgttcaacaaaaacttagagatatgaatgctattgtggttcctcatggatcttttgttgcatatgctggtttggataatgttgaagataagttcaatgtccctatgtttggtaatagggatgtacttagatgggaggctgaaagggacaaagaaagacaattgcttgttgaaggtggcgtaagaatacctttcaaatataatggtccttcagaaattgacaggccagtaatggttaagttcccgggtgcgagaggtggaagaggttactttgttgcctcatctactgaagaatttgatgcaaaaattgaagctatgaaagcacgtggatggttagaagataaagatgtagaagcggcacatattgaagaatatgtttccggttgtaattactgcatacactatttctattctgcattagatgatactgttgaattaatgggtatggatacaagatacgaatccagtattgatggttttgtaagaatgcctgcaaaagatcaattggatattgatttaagtccttcttatgttgttactggtaaccatcctgctgtaattcgtgaatctttacttccgcaagtatttgatatggctgataaattaactgaaagtgctaaaaagttagttgcaccaggattgaatggtcctttctgcatgcaaactttagtaaatgataatttagaagtaatctgttttgaaattagtgcaagaactgacggcggtacaaatacatttatggatggttctccttattcatatctaacttatggtaaaccaatgagtatgggtagaaggattgctcttgaaatcaaacgtgcgatagaaagagaagaattagaaaaaataataacataa

SEQ ID NO: 6841 - DNA, 531 bp, Methanobrevibacter gottschalkii
  source 1..531: mol_type = genomic DNA
atgttaatcggtttaatttcagacacacatattcctgatagagcaaaagaaataccgcaaaaagtaattgatgcttttaaagatgttgatttaatattgcatgctggagatttaacatctatgaaagttatagaagaattggaaaaaatagcaccaactatagtaatacaaggaaatatggacagaataaatggaattgaccttccaaaaacaaaagtaatcactgcagaagacctgaaaattggtttagtgcatggagaagtttatcctagagcagacacacaacaattattatatattgcaaaacaattacaggtcgacattttagtatctggacattcacaccaaccaaaaattgaacaaatagaaggtgttttacttttaaatccaggcagtccaattgtgccaaggcttgcagatagaactgtgatgttacttgaaattaacaaacaagaagtaaatgtagaaattaaaaaaattggtgcgcctgtctgtagtgcacttgactttgacaaatataagagggattga

SEQ ID NO: 6842 - DNA, 639 bp, Methanobrevibacter gottschalkii
  source 1..639: mol_type = genomic DNA
atgggaagcagatggcagatggaaaaacataatgacccatattataaaaaagctaaacaagaggaatatcgctcaagagcatcatataaactcaaacaacttgataaaaaatataaactaatcaaagaaggaaacacagtcgttgatcttggagcagcacctggaggatggtctcaagttgctcttgaaaaagttggagatgaaggaattgttgttggagtggatttaaatagattcaaaaaattccatgaagaaaattattatgggctcagaggagacttcacaacacctgaaattcaagaaaaaatcatgaccctcattggaggaaaagcaaaagtagtaatgtctgatgcatcaccatcattatgcggaattaagaatattgatcagcttagatctattgatttagttaatgttgtaatcgaaattgctgaaaacatattagaagaaaaaggaaatcttgtaatgaaagtattccaaggtcccgaatataaaaacatgctagattctcttaaaggaaaattcagacatgtgagaacaacaaaaccagcatcatcacgtaaaaaaagttctgaaatgtatgttattggcttagaatatatgccaaataaacgaaatagaaaaaaaagaaaaaattag

SEQ ID NO: 6843 - DNA, 420 bp, Methanobrevibacter gottschalkii
  source 1..420: mol_type = genomic DNA
atgagaaaatctagattaagtttatttaaatctacttctatgatgatttctgttgttggaatcataatgataatttcaacaattatcgttgtggcatatgtggggtatagtattgtttcatccagtattactaatgatatatcctctggaacacaatatgatgagcttgcagaacttaaagctgaatacagcaatttgtctgttaaatttgataatattaaatcaacatattatgcaggtgatgctgatgatgttaaagtttataatgatgctaaactagagttatctcgggctaattccgctattgaaaatgttcaaagtgctttagatgcagataaaccatctaatgatgttgatagtagaattgtttttgctaaagaaaaacttgaatctgctgaaaaggcttataatagtctctaa

SEQ ID NO: 6844 - DNA, 2004 bp, Methanobrevibacter gottschalkii
  source 1..2004: mol_type = genomic DNA
atgaattcaactactaaatcacaaacatcaattgcaaaatttgaagaattttttgctacatcatataaggacgacgtattcaaaatccttgaacaataccctgatgaacgatcacttaatgtagattatcgtgcattagaaatatttgatcctgacttagcagatttattaatagataaaccagaagaagttatcgatgctgctaaaatagctataaaaaatattgatccacttgttaaagatgcagatatcaacattcgttttgaacatttaagtaacattattcccttaaaaacacttttaagtaaatatatcggaacttttgttgctgcagatgggattgtaagaaaaactgatgaaatcagaccccgtattgaaactggagtgtttgaatgtagaggttgtatgagattacatgaagtagaacaaagttcagcaaatagaataatagaaccttcattatgtagcgaatgtggaggacgatcatttagattacttcaagaagaatcaaaatatgttgatacgcagactgcaagaatgcaagaacctttagaaaatttatctggaggaactgaacctaaacagatgttaatgatattagaagatgatttagtagataaattaaatcccggagataaagtaagaattaccggaacattaaaaactttcagagaggaaagaagcggtaaatttaaaaattacatttatgtaaatcatattgaaccccttgaacaagaatttgaagaattgcaactttccgaagaagatgaagaacaaatcatcgaattatcaaaagaccctaatatttatgataaaatcatcaaatcaacagcaccatccattagaggatatagggatgtaaaagaagcgatagccctacagttatttggaggggccgctaaacaactagaagatgaaaccaaattaagaggagatatccatattcttattgttggggatcctggtattggtaaatcccaaatattaaaatatgtttctagactcgctccaagaagtatttatacaagtggtaaaggtacaaccggtgcaggtttaacagctgcagctgtaagagatgaacttggaggatggtctcttgaagcaggagcattagtgcttggagatcaaggtaatgtttgtgtcgatgagctcgataaaatgagatcggaagatagatcagcacttcacgaagcattagaacaacaaaccgtaagtattgcaaaagcaggcattatggcaacattaaattccagatgttccgtacttgcagcagcaaaccccaaatttgggagatttgacagatacaaagtgcttgcagaacaaattgatttacctgccccaattatttctcgtttcgatttgatttttgtaattgaagataaaccaagtaaagaaagagattcaaaattagcagagcatattttaaaaactcaccaattcaacactgttgattacgaaattgaacctgaattacttagaaaatatatcgcttatgctcgtaaaaatgttaatccaagattaacagaagaagctaatgaagttttaaaagaattttatgtgagtacaagaaacagcaatcctgaagaacaaggagcagttcctattactgcaaggcaactagaagcaattatccgtttatccgaagccagtgctaaaattaaacttaaagaaactgttgataaagaagatgcagaaaaagctgttagattacagttagcttgtcttaaggaagttggtgttgatcctgaaactggagaattagatgctgatatcgtaagtggtggaacaccaaaatcagatagagataaaatacaaagagtaacagaagaaatcaaacagcttgaagaagaatatgctggacaagctcctttaaatgtattaatatccaatatgagtgacaaatatggagtaagtgaagataaaacagaacaaattgtcaaaaacttggtccagaaaggagtcatataccagccagtgaatggatacttcaaacgtgtggtttaa

SEQ ID NO: 6845 - DNA, 408 bp, Methanobrevibacter gottschalkii
  source 1..408: mol_type = genomic DNA
atggataaatacgaagatttattagaaagagcaattgaccaattacctcctgaagtatttgaacataaaagatttaaaatccctaaagcttattcagatattcaaggtaatagaacattcattaaaaacttcaaagatgttgcagaaggtttaaacagagatccgcaacacttactaaaattcttaatgagagaattaggtactgcaggaaatattgaaggtcaaagagcaattttacaaggtaaatttactcattacttaattaatgaaagaattgaagattatgtagataaatatgtaatttgtcatgaatgtaacagaccagatacccgaattatcagagaaggtagaatattcttacttaaatgtgctgcatgcggtgcaacagcacctttaaaatctttatag

SEQ ID NO: 6846 - DNA, 1044 bp, Methanobrevibacter gottschalkii
  source 1..1044: mol_type = genomic DNA
atgttttgtccagagtgtggaagtactgataaaaaaatgattggcaacatctgcataaactgttttttaaaagattttcagatgattgaactgcctaaaagaatcgaagttcaaatttgtagccattgtaatagtaaacttgaagaaggaaaatggagcgaagaattcattcccgaagaagaaataatttacagagcacttgagcgaaacataaaaatagatgataaagtctcaaatgaaattattaatttagaaattgaccaaatgaaaggtacaatcgccaaatgctatgtagaaattgttggagatgttgaaggaactgaaattgaagaaactcaagaaactgaagttaaaattttaaaaaccgtttgtccaacatgcagtaaaatacaatctggatattatgaatcagtcatacaattcagagcagataaaagagaaataaaaagcgaagaatatgacaaagctgatgaaatagttgaaaaaactttaataaaacaactaaaaaatgacaaattagcatattgcccacaaatagcaaaacctaaagaaggtcatgattattacattggatcactgaaaagtggtagaaaagttgctgaggctttaaaagaagagtttggaggaacaattaaagaatctccaagacttatcagtgaagataaatctactggaaaaggattatacagaatttggatttcagttagaatacctgaatttgaaattaatgactttatcatgtttgaagataaactaattcaagtaacaagtattgataagaatagaattgttggtaacgatattaaaacaggtaaaaaacagaatattccattaaaaaatatggaaaaaattaaacttattaaaaaatcatcagatattgaaacaacaacaataatttcaatgtctccaagtacaatacaaattttagaccctgctgattactccgcagttgatttagaaatgaaagatgaatttgctaattataatattggagacgaaataagacttataaaaatcgataattacacatatttactaaactaa

SEQ ID NO: 6847 - DNA, 963 bp, Methanobrevibacter gottschalkii
  source 1..963: mol_type = genomic DNA
atgaatattgaagaaaagattcagttaatcgaagagggaaccttagaagttatagacactgaagaattaaaagaagtacttgctaaaaaagaacctatagcttatacaggttacgaaccttctggtaaaatccatttaggacatgctgtaactgtacaaaaactcaaacaattgcaaaaattaggattcaaaataaaaatcctcctagcagattaccatgcatttttaaatggaaaaggaactattgaagaaattgctgaaactgctgagtacaataaaaaatgttttcaagctctcggtcttgatgaaaaaactgaatatatttacggttcatcattccaattagaacccgattatactgataaagtctatcaattagctacaatgaccactttaaaaagagcaaggagaagtatggatcaagtaagtcgtgcagatgataatccaaaagtagctagtgtaatttatccgattatgcaaactgtagatatggctgcacttaaagtagacattgctcttggaggtatggaacagagaaaaatccaaatgttggcacgtgaaaacttagagaaaattggggaaaatgttcctatttgtattcacaccccattattacatggtcttgatggagatgcaaaaatgtcttcaagtaaaggaaattatattgcagttgatgactccattaaagatattactaaaaaaatcaataaaagttactgtccacagggtgaaattaaaggcaatccaatgattgaaattgcagaaacatttgtttatccaaatgaagaaaagttactcattaaaagacctgaaaaattcggtggagacattgaactcacacatgatgaattaataaaagaatttagtgaaggtaatttacacccaatggatttaaaaaatggaattaaagatttcttaattgaattctttgctcctgtaagagaatacatggaggaaaactaa

SEQ ID NO: 6848 - DNA, 210 bp, Methanobrevibacter gottschalkii
  source 1..210: mol_type = genomic DNA
atggttgaagaaaaagaagaattcgaaatgggtttgccaaatggtgttggtgaacaaatgcttgctcatgcattcgaaaaatttgatattaaattagagcagactgagtttggacccaaacttatcggagaatatgatgaacttataaaagtaaaagaattcttagaaactggaattcgtgacagactaaaagaattagaaggagaataa

SEQ ID NO: 6849 - DNA, 579 bp, Methanobrevibacter gottschalkii
  source 1..579: mol_type = genomic DNA
atgtatattgtatttgaaggaattgatggtgctggaaaatcaactcaaattcaattattaaagcaatggcttgaagataacgggtttagagttgaaacgttagttgaaccaacagattcagaagttggaaaactaattagaaaaatattgcaacgtccagatgcaacaacagacaatgttcaaaaaacattggggcttctctttgcagcggataggatgttaataatggataaactggaagataaatcgaaaataattatttcagataggtcttttatttcaagtttagcttatcaagaacctgttgattggattgaagttttaaataagtatgctaaaaagcctgatttattagttttacttgatttggatgttaaaaaatcagttgcaagaacctctggtgaggatacattcgaaaatgaggaatttttaatcggtgttaaagataattatttaaaattagctaaaaattatacaagtgaaattattgacgcaaataatggtgtaaataaagtatcttcagatatcaaaaaagtgattgcaccatatctcggaatctgtccggattgtatacaataa

SEQ ID NO: 6850 - DNA, 2535 bp, Methanobrevibacter gottschalkii
  source 1..2535: mol_type = genomic DNA
atgaataatcaatcaaggtgtaaaaataaaatggttttaaaagaattattagctccagcaggttcctatgatgtattagtaactgcggttaatgctggtgcagatgcagtttatattgcaggaccaaattatggtgcaagagcatatgctaaaaactttacaattgaagaactggaaaaagcagtgaactatgctcatttaaatggtgttaagattcatgtaacagtcaatacattagtcaataactttgaaatagcagatgtgttgaattatttatttaaattatatcaaattggagtagatgcagttattgtacaagattttggattaatttggcttttaaaaacttttatcccagatttagaagttcatgcatcaacacaaatgggattaaataattacagttcaattaaatgggcttcagacaataatataaaaagagtagttttaccaagagaagttaatataaatcaaataaaaaaaacctataatcaacttaaaaaagacaatatcagtatggatcttgaggtatttggtcatggcgcattgtgttattgtgttagtggaaaatgctatatgtcttcatacaatagtggtagaagtggaaatagaggagcttgtgcccaaccatgtagaagacaatatcgtttaaaatacagaggttacaatataggaaatggatttttactttcaactcatgatttagctacttacaaaaatataaaagaaatttcaaatgcaggagttaaatctcttaaattagaaggcagaatgaaatccaaagattacattggaacaatagtaaatagttacagaaacattattgatggcaaccccggaaactatgaaaaagatttgcaccttgtttttaatagaaattttaccagcggatacattatgggcgataaacctggagaagtaatgggaagagaaagttcaggtcacgaaggattatacataggagatataaccaacattgaaggaacaaaagttactattgaaataaaaaataaagaaattccggttattttagaacctggagacggaattgcatttaaatataatggtaaaattaaagggatttatttagaaaatatcataaaacaagatgaaaatgaaatcataatagatacaacacgtctcgttaaagaaggaactgaagtatttatcagttattcttcatcaacccatgaatatcttaaacaatttgaaaaagaaaccattaaaaatcacattggccttaatttatcattaacttgggacaaggaattgaacttatacaccaaagttgaatattatgttgatggagaattaattaattttagacataaatcactggacatgttcgaaaaagcaaaaaataaaccagtagatgaaaaaacaattgaaaatcaacttaataaaactggtgaaacaccattcttcattgaaaaaatccagtttaataatatgcctaatgatatgttcatacaaattcgtaaaattaatcagattagacgtgagatactagataatgcaaccgagttgttaatgaaacattacacaccaactaaaaaggcagtaaaagaagtgcgtaagaacttaactaaattttttgaagattatgaaaataacaaagggaaaattaaacaaaaaacacctaaattgtcattattcattgatgacctatcacagataagagcagcctcaggatttggcttgaaaagaatttattttgatggtacctgtcattataacaacccagatgattattttaaaaatattaaagataccttaatgaaaggcagtttaatggcatcacctacagaatttgtttgggttttatcctcctttatgacacaaaaagatgcaattaaatgtaatgaaattgtaaaagaacttgaaaatgaaggaatcatcatttctgtaatgggagattttcctggaatgaatgatatatttgaatgtccagtatatggaaatcataatttaaatgtttggaatagtttttgtgtacgtgatttaaacgaagcaggatttaaatcattaattttatcatctgaactctcaggtcatgaaattaaagaattaatacgtaggaatcatgatagaaatattgatttagaaatgattgttaatggaaacttagaagtgattgtgagtaaagatgacttcactaatttaaatgacggtaaagatttcattatttcaaatgatgcggattatgcaatactagaagataaaaaaaggaaaaaattcaaatataaagtgttctttgactacaacagacaaagtcacatcatcaataaagattgtttatgtttaattgaagagataaatgaaattaaagaatttggtcttgattcattgattcttgattgcagatattctaacgaaaaatatacaacacaaatattatcaatttataatgaaagccttcataataaagatcaagatgagctgtccaaatacaaatatcaaattatggatttttcacaatcctacattaacaaaggaaattacattgaaggcagattacacgaggataaaaaatga

SEQ ID NO: 6851 - DNA, 2418 bp, Methanobrevibacter gottschalkii
  source 1..2418: mol_type = genomic DNA
atgaggattcctgaactacttgcacctgttgggtcaatggatcatttaaaagttgcaataaatgctggagctagttctgtttatttatctggaaaagaatatggtgctcgtaaatatgcaactaactttactttagatgaaattaatgaagcagtagacacagcacatatacataatgttaaagtttatgttactgtgaatacattaattaaagaagatgaactggaagatgtaatcaactatgtttccaatctatatgcaataggagtagatgctgttttagtgcaagatttaggattggtcgaattgattaacaaacacataccaaaattaaaaattcatgcatcgacacaaatgacctgtgaaaatcagttaaaattaaattatttagaacaaaaaggaataaaacgtgttgtactcccacgtgaaatgagaaaagaagaaatcaaatcacttaatacaaatatggaacttgaaatatttgtacatggggctttatgttactcttattcaggacaatgcttaatgagtagtttcaaaggtggacgtagtggaaatagaggaacctgtgcacaaccttgtcgccaaaaatataaaattgaaggaattggaaaagaaaattattatttgtctccttgtgatttaagtttatttaacaaattaaaagaaattttagaactaaatattgactgtatcaaaatagaaggcaggatgaggaacaaagaatatttagctattgtaattaatgcttatcgtaaagcattgaataaattaaaaagtaaaaaagagattgaaaacgaaaatataaatcttgtattcaatagaggtctgtgtgaaggattatttaatgattctccaaaaagaagtttaaaagccggacatattggattaaaaattggtcatgtgataaaatccgagaaaaatcaaatcgccatcaaattagatgattccatcaaaacaatacctgaaaaaggagatggattgttaataattaaaaataatgatgattatggatttgaaatatcccaaaatccaattataacctccctaaatcattttaaaactggtaaaaataaaccaatgaaaaatttaacccgtagagacaaaattttaattgttaaaaaagtatggcaaaataaaaagagtacttttaatttaaatgaatctgacgtgtatttaacaaaaaaaaacaaattaactaaaaaagttaaagaaatagaatcaaaaggatccagttttatcaaatccaaattagtacttacattttccattaaaaataagtatccaacacttaaaggaaaattaacgcttcaaaataaaaaagaagttgaaagtgaagttattggaaatactccttttgaaaaacctatcaaaaagagcattaatagagaggtaattaaaaaacagctccaaaaaattgataattacccttataacattattcaaattaatatcaattatgacggaacattatttattccaataaggaaaattaatgaacttagaagaaatttatttgaaagattagaaaaagaagctatcaattcctttaaacatgaaaataaaaaaattaaattaaaacaatataataatgaaactaatgaatccaaatacaatatttctttttacacaaacaatttaaaacatttagaacacattgaaaatgttgaaagagtttatctagaaattccaaataatgatgactcattaattctctcagaagaaaaacctaatattagttatatgattaactttatcaaacaagcttatgaaatttcttatgataaagattataagttaatctggaaatggccagatataactcatgataacttaatcaaatcattgaataaggtaaggggcatattaaataaaatgcattatactttaccaattatgagcaatagttttaatggggagtatggattttattcaatgaatattacaaataatgagacaatcaacagtcttaaggactataaaattttaacattatcaccggaattaactaaaaaagattatgaaaatattattaaacattgcagatatcctaaaaaagttgaaatcttagttcaaggatcagtcgaacttatgaaaactagatatccgttactttatggtgcagaagttaaaaagaattataaaaattatttaattgataagaaaaacaataaatatcctattcataaaagcatttcatcacaggaattaagcatttttaatgatagcgaactttctttaattaatgaaataaaacatttgaaaaacatcaattattctaattttgcaatagatggaagatataaggacgatgaatattataaaatgattgatatctataactgcgcaattaacggatacattaacgaaaaagagttaaaaaaatatagttctaaaaatacaatcgcgaattattaa

SEQ ID NO: 6852 - DNA, 1926 bp, Methanobrevibacter gottschalkii
  source 1..1926: mol_type = genomic DNA
atgcaaagggaaataattacattgcagaatattaaaggaattggagataaaatctctgaaaaaattataaaaagtgttggaggtgaaaaagaactccaaaagattgttgacaatgctgatgttgaaaaaataaccaacattgatggaataagtcaaagaaaagcaattgatatcatgaatcaattactgaataatccgaaatctgaatttataaaaagtgatagagctatggaaatttatgaagacatcattaacaagatattagcatattctaacacttcatattcaaaaaatagaatattattactttcaccttcaaaagatattaaaaaaattaactcacaacttgattttgtaatggatgcaaaagaacatgtttcaaaacttccaataatcaaattaaaaggattgatgaagaatctaaaagaagttgaagaagtaaaaaccgaatatgatccaagtaaggtcattcttgttgaaagtgaagaagataactcatatcttactgatttaggattaaaccagtattatcccataataactgcaagtgattcaccattactccaagaggaaatgatgaattatgatttggtattttatgtatattcccaagggatacttgattttgaagggatgccaaatcttataatgataaatattgaggataatgattatgaaatagttcccgaaaaaataatcaatttctttattcaaaataaagatttattcacaagagttcatgaaatacaaaaaatccgaaataaagacagtgtacttggagaaatagtccccattattgatgaattaaatatcattgataaaagagaagtcaatattgaaaaacttgtttattcccttaaagaggatatggataatgaattagaaaaatcaattaaacaaattgatcttgaaggaaatgaaattcttaacctattaaataataatttccctccaaagattagtaaaatatttgatgacattatcaataaacgaaaagatattatccgtgaaaaaactggattgagttttgatccatttttaagaacatatcccattgaaatagatgatgcagaaatacaaagaataacacttgaacaatcctctaaaaaagaaaacgatatttttgatattaaaagaagtgcagcaatagaattaaattcaattaaaaagaaagctattgaagaagttgaagatgctataaaatttgactacgaatttagcttaggcagttttgcatacgaatatgatttatgtagacccaagtttagtgaagaaattcaactaaccggagcattgcatttagaactagcacttaaaaaagataaagaattcattcaaaaaataaattaccaactgacacaaaaagaaaatatttcattactaactggagcgaatagcggtggtaaaacaacactgcttgagactttaacacaaatatcaataatggcgcaaatgggactcccagtatgtgcggacaatgtacaaatcaaattattcgatgaaatttatcatttctctaaaaaaagatcactcgatgcaggagcatttgaatcatttttaaatgtattcataccaattgtaactacaaatagtgaaaaattagtattattagatgaacttgaaggaataacagaacttgatgcagcagttaaaatcatatcaacattcatagatatgataaaagaatcaaattcttatggagtaatcgtcactcatatggcaagagaactcatgaactatactgatattcgagtggatggtatcgaagcgaaagggttagatgaaaagtataatttaattgttgatagaacacccagaatgaatttccttgcaaaaagtacccccgaattaattttaaaaagaatatatgaaaaatcagatgataatttgaaggctgtttattctagaatattggaaaaattctaa

SEQ ID NO: 6853 - DNA, 1482 bp, Methanobrevibacter gottschalkii
  source 1..1482: mol_type = genomic DNA
gtgatttttttgaatattaaagtatttgatactacattacgtgatggagaacagactccgggtgtttctttaactcaacaagagaaattaagaattgcaactaagcttgatgagattggtattgattatattgaggcaggttctgctattacttcaaaaggagaaagaaaatcaattaaaggaattgcacaacaaggttttaatgcagaaatattaagtttctcaagacctttatcagttgatattgattattgtttagaatgtgatgttgatggtgttaatttagttgttccaacttctgatttgcatatttctgataaattaaaaattacacgtgatgaattaattcaattgtccaataatgctgttgattattgtaaggatcatggtttaattgttgaattatcagcagaagatgcatcaagaagtgatactgattttttaaaatctgtttatctaagtgctataaatcatggtgctgatagaatttgtgtttgtgatactgtaggtatattgacaccagattcttcatttgaattatttgataaattaaatgaggatattaatgttcctattgctgctcattgtcataatgattttggtcttgctgttgctaatactttatccgccttgaaaggtggtgcaacagaattccattcaactattaatggtattggtgagcgagcgggaaatacttcttttgaggaatgtgttgttagtattgacagattattgacaaatttttcaactaatgtcaatattcatgaaatttatgatatttctaaattagttgccagatcaactggtgtgtatattcaacctaataaagcaattgttggtgaaaatgcatttgctcatgaatcaggtatacattctgatggcattattaaaaattctgcaacatatgaacctatgactcctgaacttgttggccgtaaacgtaagtttgttataggaaaacacatggggactcatggtttggagaatagacttaaagaaattggtttatcagttaataaaactcaacttcaacaaatttgtaatgatattaaagagttagctgataaaggaaaaactgttactgatgttgatttacatgtaatagcggataatgttttagagataaatcatgaggataggattaaacttgatgagttaactattgtttccggaaataagataatgccaactgcatcggttaaaataacttttgatgatgaagaaattcttaatgctggagtcggtttaggtcctgttgatgccgccattaatgctgttaaaacagttgatgcattcagtgatgttgaattaattgagtatcatgtagatgctattactggcggtactgatgcattcattgatgtaatcattaaattacaaaaaggggataaagttgtatctgctcgtggtacggaaccggatatcattaatgctagtgtgaaggcgtatatttctggagttaatagattattacgcgattag

SEQ ID NO: 6854 - DNA, 492 bp, Methanobrevibacter gottschalkii
  source 1..492: mol_type = genomic DNA
atgtatatggaaaatattcagattttaggtttaaagggtactattgattcagttagtgaaacacttaatttaattgatggtattaaagaagatagtgaaataatccaacttttaaatgcagattccattgcttcaagaaatcatataattcatggtgttaatcaagcgattcttgcttttgatagatgtgaaaatttagctaaagatttaagtgttgaaattgttcttagatgttctgcccaaaggcagatttcaaaagcatttgaaattttaggtttaaaagaaggatacatgaatttatgtgcaattttagttaatagtaaaaatcatacttctgaattatctgaaatattctcattagatgataatgtttttattccagatgatgagattttaatgaaaatctataaaattagtgatattgagataaaaaacatgtctcttgaagatattattattgacagaattacaaaactcactgtaaattattaa

SEQ ID NO: 6855 - DNA, 954 bp, Methanobrevibacter gottschalkii
  source 1..954: mol_type = genomic DNA
atgtttaaatttaaaaccccctcagagaaaacaagacaaacaatgtctaaagttgcattaggtaaaaccaatataaactttgaagaaagatgcacagaaaaaataaaaaggttaaccgaaaaggaagaagttaaaattacttcaagtggaaataacagtatttttattgcactttcagctattaaaggagacattatcattcctgatcaaggaggttggcatggatttaaacagattgcaaaattcttaaataagaatatcattacattaaaaacagatttaggtttaattaaccctaaatatattgatgaactggatttaagagaaggttctgcattaatttatactagttttgccggatactgtgccgagcaagacactaaatcaattgcaaagtattgtaaaaataataatattctaacaatcgaagatgcttcagccggaattggagatagtgaaaaaaaacttggaaaatattcggatataatacttgcatcaacaggatcacctaaaataatcaatgttggtcagggcggttttattgcaagcaatgaaagtgaaattttcaaagaagatttaatgccccaaaaattaagcaaaacatcagaaattgtatgtagtggtatagatagtgaacttgataatattgcagaaaaattaaatcttacagtaaatgctacaaactatctaaaaaaatatattaataatgcattacatccaaataaaagaggtgttaatgtaattatactgcatgatgatgcgaaagcaattggttggaatttgaaaaaaaaattaactaccgataaaagtggatttattacaacttgccccaattataatcgtgtgaaacaaaaagcaatatcaattgaaattaaaaatcttgattacaattgccttaaaaaagagcatttagataaaataattgaagaaatggaaattaataatttacagtga

SEQ ID NO: 6856 - DNA, 1173 bp, Methanobrevibacter gottschalkii
  source 1..1173: mol_type = genomic DNA
atgaaaactactaaaaatgcttatcttgccaaattaacggaacaaatccaaatgaaatccgttaaagttggaaaaaatcttgaaggaacaactccaccatcagtgtttattggaagatggtcatatccaaaagtatatgctggaccaatgatgagttcacaaatgggagacacatctatcatggacacaccagaagattggattggtcaaaataaaacacaagatgaaattattaattatagaatgaatcttgtacgtggaaagcaattaataaaaattgatgatttagaaaatccgtttattgaaaaacttcaagacatatcacttgcatccaaatcaattgatagtgaagcgacctttggaagaagaccaactggatccgtgcttacagaagacagtatgcctcatggtccaagcgcagttattgaaaaatttgatattgatgcagttaaatgggataggcaacttgaaaaaacattttatgatacagatttaaaatcaactgatgcaattgttaatcttcacaataaagatgtgccatttaccgctatgcagaaagcattttcggttggtgctattgggactaaaaacaaaagaaaacttgttccaactcgctggtccattacagcatgtgattcgacacttgcagatgaatttttaaaaaaggtaagaaaattcgaaaaattagatacatacagagtctttgaatttggtgctctaaacaattattatgtaattatcttaacacctacagaatggcaatacgaatggtatgaagcatttattagattaatgaaaaatgaagagttaatcttttcagattatgaaacaaatggtggtaaaaaagagtattcaattgttggtggatgttattatactgcaaaaatggtagtcttagactatttaatgcaaatcaaaaaacaatcagggcttttaattttaagagaagcttatgatggttatgtgcctttaggtgttttcaatgtaagagaaaacataaaagaagcaatgcaaagaccatacatagaatttgaaaccctagaatcatgtcttgaatacgcaggaactaaacttcgaatacctatcaatagatatgtaaaacagggaactttaatgaatgaaatgctccatacaaaacaaaccacacttgatatgtactttaaaagtggataa

SEQ ID NO: 6857 - DNA, 936 bp, Methanobrevibacter gottschalkii
  source 1..936: mol_type = genomic DNA
atgaataaaatgttaagcccaaaagagtttattgaagattcaatacaaaaaattaaggatcaaattggtgatgaaaaagcaattattgcattatctggaggagtagatagttcagtatgttctgtcctcgtgcaagaagctattggtgataatttaaccgcagtatttgtggatcacggtcttttaagagaaggggaagttgaacaagtaactaatacttttaaagatagattgaatttaaaatttgttgatgcttctgatgaatttatggatgctcttgatggtattgaagatccggaattaaaaagaaaaattatcggaaaaatatttgtagatgtatttgaaagagaagcaattaaatctggtgctaaattcctagtacaaggaactattgctcctgactggattgaaactaaaggtgaaattaaatcccatcacaacttagcccttccaagtggaatgaaattgaaagtatgtgaaccaatccgtgacttatacaaagatgaagtaagagaaatcggtgacgaactcaacatacctgcatctacagtttacagacaaccatttccgggacctggtcttggcgtgcgtgttgtcggagcacttacaaaagaaaatgttgaagtatgcagaaaagcaaacaaaattgtttgtgatgaaatcgaagctgcaggtatcgataaagatgtatggcaatactttgccgtattaaccaacaccaaagttaccggtgttaaaggagatcaaagagactttggatacttagttgtagttagagtagttaactctattgatgctatgactgcatctgtcgctgaacttccttgggaagttattcaaactatatcaaaaagaattacctcagaaatttctgaagttacccatgtcgctttatctgtaagcgataaaccacctgcaaccattgaattctgttaa

SEQ ID NO: 6858 - DNA, 258 bp, Methanobrevibacter gottschalkii
  source 1..258: mol_type = genomic DNA
atgattgataatgctgatgatttaagagataaagcaaatgaatttaaaatcggattaaaaaaacaatccataaacgttcaaattggagacgaagaatacagttttagaatttctggaattggacaaaaatctgtaaaattagaaaaatatgttaaatttgatgaaatatttgaagctattgaatcaggaaatgacaatggtcttgaaactataatcaaacagttcatcgaggattacgaagaagaggatgatgaataa

SEQ ID NO: 6859 - DNA, 558 bp, Methanobrevibacter gottschalkii
  source 1..558: mol_type = genomic DNA
atgacaattttagtaattaataacaaaggccaatataaccatagaatcgctagaagtttacaatatttaaagattccctcaaaattagtttcaaacaatttatctattgaagaaattgaagctgaaaatcctattggattaattttaggtggtggaccatcaatagaagatgctggtttaagtgaagaatacattaaatattttgacatacctattttaggaatatgccttggtcatcagttaattgctaaagtttacggaggagaagttactacttcagatactgaaagttatgctcaagttaaaattgatattaagaatgatgaaaacttattcgaaggcctagctcctgaaatcgatgtttggtcatcccataaagatgaagtgaaaacaattcccgatgaattcgaaatcttggctagttctaacttatgcaatgttgaatcatttaaacataaagataaagatgtatatggaattcaattccacccagaagtacatcacactccaaaaggagaagcaatatttaataatttttataaaatctgtaaaaaatag

SEQ ID NO: 6860 - DNA, 147 bp, Methanobrevibacter gottschalkii
  source 1..147: mol_type = genomic DNA
atggaacttaaagatttaatatttgttattgctgcaattttaatagcagtagttttacttaaaatatttttctggttattgccagtgattgtagtattaataattgcattctttatttatgtatacttgcaagatcgttataactaa

SEQ ID NO: 6861 - DNA, 915 bp, Methanobrevibacter gottschalkii
  source 1..915: mol_type = genomic DNA
atgaatcaatatgatatcatcattatcggagcaggacctggtgggttgactgcaggaatatatgccggccgtcaaggaactaaaaatttaataattgataaagacctggcaggcggacttggccgtgaagttcctgaaatggaaaattatcctggttttgataaaatttcaggacttgaattagtagagaaaatgaaagaacaagcaattaaaaactgtgatttgcatgaaatggaaaatgtggaagaaatcataagaacagatgatgaatacagattcactgttaaaacagataaagacgcttatcaatcaaaaattattattcttgcaactggaagttcacataggcaattaaatgtgaaaggtgaggaagaatttagaggaaaaggagttagttactgtgcaacttgtgatggatttttctttgctggtcgtgacattgtaatggtgggtggaggaaacagcgctcttcaagaagcgttatacttgaataatcttggagctaatgttacattaattcatagaagaggtgaatttagagcccaaaaacacttacaggatatgattaaaaaagaaggcattaaaacaattttaaatgcaaccgttgaagaaataaaaggtgatatgcttgttgaatctgtcttattaaaagacaatgaaactaacgaaatgaaagaagttccaactaatggtgttttcattagtgtcggttatatgcctcacacaaagcttgcatatcaattaggagtcacattagatgaatctggacatgtcataattgacaaatctcaaaaaactaatattgactatgtatatgcaataggtgatgtttgcattggtttaaaacagtgggttgtagcttgcggagaaggtgcagttgctgcaacttccgcatttgaagacattcaaaattag

SEQ ID NO: 6862 - DNA, 432 bp, Methanobrevibacter gottschalkii
  source 1..432: mol_type = genomic DNA
atgttttgtgaaaaatgtggtaaagaaattccagataatacacgattttgtagtaattgtggaaaccaaattaaaaaaccaaacaacaaaataactgaagagaagaatatgtatcttgcattattcctttcaatttttttgatgggtttaggaatatattatgcaggaaataagaaaaaaggaattatactttttattttcatattaatatccaaccgtatgagaaaatttcaaatattcattataattgcaataatactctggatatatgcaatatatgaaacatacatagatgtcaaaagagcaaatggtgaggaaaatccaaatttacttgaagatataaacaatttcaccacttctaaacattttgttcatataatcgcaatagcattattatttgcagtatcttattttttaataagcaaattgtag

SEQ ID NO: 6863 - DNA, 750 bp, Methanobrevibacter gottschalkii
  source 1..750: mol_type = genomic DNA
atgaaaatgtgcaatcgttgcggtgcagaaaataaagataaaagtaatttttgttcaaactgtggtgctatattaaataatcctaaacctactcatagctatgataaaaaattaatagaacgatttatggatgctaatataattcttaaattaatcataatcattgttgcagtttttgtattttttgttgcttcagcatggatagggcatattttttttggaatgcctttggaattttatactgagggagatgcaacttatcatttatctcaatttaataaattggaccttgatggtgatggcaatcttactttttatgaagtaaaaggtttagcatcagatatttcgcaggataatctttcagggatatttgatgccgccgataaaaataacaatggtgttttaaaaggatctgaatttgatggctatcttcagtttattgataaatattataaagaattaggaaagcagcaaaaagctgaaagaaaaaattcagcacaacaaaaaagtagttcttcttcatcaagttctaatccatcatttcaagatgagggacatgaaatctgcccagtgtgtggtggaaatcaatttactgaattttacaattcacaatatggtgaaatgaattggcaatgtgattactgtggtgaaatatttcgcagtgatgatgagttttatatagattattgggaatcaaatggcattaagtgtatattgcctgcactggagaataatttagatataatctag

SEQ ID NO: 6864 - DNA, 1041 bp, Methanobrevibacter gottschalkii
  source 1..1041: mol_type = genomic DNA
atggaagatgaaattgtttgtcctaaatgtcataaaagaaatgatcttcataaattctgcatttattgtggtcataaactgttggatgatgatcagattggattaattcttgataatcctgaacagtattgtcttaactgtggaagacttgttaagaaaggccaaaagaaatgtgaatgcggatatgaatttagtgatataaactgtccagaatgcaattcaaaaaattcatatacaaacagattctgcacaacatgtggaaagaaactttggacatctaatgtgtataattataaatattctaaacatctttttgaaaagcatattctgaaggaagtgttaccatattcattacgtaatacatcattataccaacgtcccaaaatggattttacacttaatcatttattgtattgcaatgagtatcttaatggattaaaaagcgctaaatctaaaatagatgagtatttatgtgaaataggttcaagatggaaagttgtttctcctaattattgtataaattgtattaatataataaagccggatgaatgctcctgtacaaaatgtggatcgattttatttgcggataaaaaaagagttgattgtcttcaaactaaaaataaatatgttaaacctaaatttgataatgtggaattgaaatggacttcaaaattttctaatgattatttagattctttagctcctgcaatcggcgaatcacagtttgaatatagggagagacttaaatgggaatttgctgaaaataattatcataaaataagcataattggcgcaattgaccgtaaacggaaagatgaaggccgtaaaagacagatagaagagcgtaaaagactggaagaagaatatataaggcaatttggaggaggttattgtagttcaagttgcagatatcactacgaagaaattataactcctcgcgggataagtgctgattatactgatgatatgtatggtgttgactattgttgtaggttaggacattttgtatctcatggaagtttttgtaaagattatgaatag

SEQ ID NO: 6865 - DNA, 753 bp, Methanobrevibacter gottschalkii
  source 1..753: mol_type = genomic DNA
atgacaaataagatatgttttgaatgtggaattgaacaagatgatgcattcaattactgcataaattgtggggcattactttctaatgaaaatgatgattcattatcaaacagtaatgaatatagattgccagaagatattgaaaatcaaaatgatgaatatgataatctcaatgatgtaaaaacttgtcctaaatgcgggattgaacaggaaatttttgctaagttctgcagaaattgtggggcttcattttccagtgaaaataaggatgaaatcacaattagatgtgagtattgtggtgctgagttaaatgatgaggcattctgtcctgattgcggaaaagccactggcataacaatatgtacaaactgcaggcaaaaaatagtgaatgaagacttttgttctatttgtggatatcaaattaatcataaaattaaaatatgtgctaattgtggaagtaaaatcgatgcaatggctaaagtctgcgcacattgcggtgcaaaaataattaaaaaaaatcctcttatagcattaggtttttcatttgttttcccaggattaggccaattatataataatcaaaaccataaagggtttattcttattattgctaatataatttcttttatattgtgttttatttttattggaataatattagtcattttaatatggatatatgcaatgtatgatgcggccacttctgcaatagctataaataagggagaaattctcgaggacaaactcttttaa

SEQ ID NO: 6866 - DNA, 1866 bp, Methanobrevibacter gottschalkii
  source 1..1866: mol_type = genomic DNA
atggattatgaaaaattaggattgaaaatgggacttgaaattcaccaacaactaaacagtgaacataaattattctgtccttgtaaaacagaacttgttgatgatgattttgacggaatagttcaaagaaagttaagaccaacccaatcagaacttggagaaatcgatagagccgcacttcaagaatctttaagaggtttaaatttcaaatacgaaaacttcgcaaaacatacctgccttgttgaaaatgacgatgaaccacctcacagtttaaatgaagaagcgcttgacatttgcattacaatagcttgtttaatgaacatgcacattgttgatgaattccatacaatgagaaaacaggttattgatggaagtaacactggtgggttccagaggacaggtatggttgcaactgatggatacttggaaacaccatacggaaaagttgtaatcgaaagtcttggtcttgaagaagatgcggcaagaagaattgaaaccaaagatggatttactgaatttagattagacagattaggcatacctcttgctgaagttacaacagacccttcaatgcaccatcctgatcaagtacgtgaagttgcatacatgcttgggcaaatattgcgaagcaccaatgttaaaagaggtcttggaactatcagacaagatttaaatatttccattgccgaaggcgcacgtgtagagattaaaggtgtgcaggacttggatttaatggcagaaattgtaaaccgtgaaatccaaaggcaattagttttaattgacattaaaaaagaacttgtagctagaaatgcagaagtattagatgaaatccatgatttagatgaattattcaaagacactgaatccaaaatattaaaatcggccgaaactattaaagcagtggttttaaaaggttatgatggtttaattggtcgggaagtgcaacctggaagaagatttggtagtgaaattgcaagctatgctaaaaaacgtggagtatctggtattttccactctgatgagttaccggcatacggaattacccaagaagaagtagataacgtgactgattacttaaacattggtgaggatgatgcgtttattattgtagctcacgatgaagatattgcaatatcagcacttgaagaagttaaaagaagagcttcacttggcctagatggtgtggttgaagaaacccgtaaagcattagaagatggcaatactgaatatatgagaccccttccaactgcaaataggatgtatcttgaaactgacattccgttgtttaaaattactgctgatagaattgaacctatttcaaataatctacctgaattgcctgacgttaaacaagcaagaattattaaagaatataatttaagtgaagatttagcaacacagcttgttaaaagacaagaggcagacatgtttgaagctattattgctgatgttagcatagatgcaacacctgtagcatcacttcttgcatatgatctacgtgagatcaaaagagaaggtcatgacattaccgcgttaggtcttgatcactttaaagaaatattcactttactcgcagaaggcaaaattgcaaaagatagtgtgcgtaaacttgcaattgaaacaattaaagcacctgaaagcgatgtggctgaaattgcagagataaacaacttaactatgcttagcgaagatgatgttgtaaaaatcatttctgaaattgttgctaaaaatgaaggaatggtaaaagaacgtcaaatgggagctatgggtcctttaatgggaatgtgcatgaaacaacttaaaggaaaagctgacggtggcatggttaacaaaactgtgcgttcagaaattcaaaaattaatttag

SEQ ID NO: 6867 - DNA, 1311 bp, Methanobrevibacter gottschalkii
  source 1..1311: mol_type = genomic DNA
atgacttacaaagaaaatgctgagaaatttattgaaacctatggtttaagcataggggataaaatccaagtaaacaaggaagatatcacctatactggtatcttacttgataggcccgaggatgctgatgatggatatttagtcttgaaattatccagcggatacaacattggagtagctattgagaatactgctgctgagttaattgaaaaaggtgaaaaacctaaaatcggatttggaaaaagtgaaattccagcagatccaaaaaaacagaatatttcaattgtttcaactggaggtacagtgtcctccgttattgattataggactggagcggtgcatccggcatttacagcttcagaccttgtaaaagcaaatcctgaattattggattatgccaactacaatgttaaagcattatataatatattaagtgaggatatgaaaccagaatactgggtaaaagcagctcgtgaaatagctaatgacatttcaaatggaagtgatggtgttgtaatagcccatggtactgatacaatgcattatacggcagctgcattaagttttatgttaaaaaccccagtgccaattatattaactggtgcacaaagaagttcagataggccttcaagcgatgccaacattaacctgattgattctgttgttgctgcaaaatctgacattgcagaagtatgtgtatgcatgcatggaagcttaaatgacaaatacacttacttgcacaagggaactaaggtcagaaaaatgcatacctcaagaagagatacttttagaagtattaatgcccaaccaatagctaaaattgaaaacaaaaaaattaacattaacccggattatgcatacaccaaacgtggtgtaaatgggttagaattaaatgcaaatattgaagaaaaggttggatttattaaaagtttcccgggaatttcttctgattacattgaatatcacattgataatggatataaaggccttgttgttgaaggaactggtcttggacatgttcccaatgacttaattgactcatttaaaagagcaagagatgaaaatattccggtcattatgacttcacaatgcctatatggaagagtgaatatgaatgtttattcaactggacgcaatattattgattctggcgtaatttccggagtagacatgacacctgaaactacttatgtaaaattatgttgggcattaggtcaaagtgacagttacaatgaagtaaaagaaattatgcatgaagatattgcaggtgaatttagtgaaaaatcttccattaaagatttcttaaactag

SEQ ID NO: 6868 - DNA, 1446 bp, Methanobrevibacter gottschalkii
  source 1..1446: mol_type = genomic DNA
atgagtgataaagaaattggtaaagattatgaattaaaagtacgtagaaatccacaatcccttttagaagaatatccaagaaaaggaaacaacatccaatcaactcactattgtgctggttgtggacacggaattatacataaattaatcgcagaatgtatggatgaacttggaatacaagatcgatgcgttatgatttctcctgtcggatgttcagtatacgcatacttctattttaactgtggaaactttcaaactgctcatggaagagcacctgcagtagctactggtatttcaagagcagaagataactcaattgttatgagctaccaaggagatggagacctcgcatccatcggtttaaatgaaaccttgcaagcggctaacagaggggaaaaaattgcagtattctttgtaaacaatactgtatacggaatgaccggtggacaaatggctccaacaacattagttggagaaaaaactgtcacttgccaaaccggaagagatcctaattatacaggacaccctacccatatgtgtgagctaattaacactttaaaagctccagtatacattgaaagagtttctcttgcaaatccattgaaaatcagacttgcaaaatatgccattaagcaagcattaactgttcaaaaagaagggaaaggatattcatttgttgaaatcttatccccctgtcctactaacttaaaacaagatgtgaaaagtgctcaaaaatttattgaggaacaaatggaaaaagagttccccgttaaaaatttcagaaatgatttatacaaaagagaatctatccaaagaccagttagtgatttttccactgaaacattagacaaagtattcaatgtaaatagagatggaaactccggttatgttgatgatgcaagcatcagttcaaccagtattaaagtatccggatttggcggtcaaggagtattaagtgcagggcttactattgctcatgctgcttgtgatgaaggaaaacatgtttcatggtatcctagttatggaccagaacaaagaggaggaaaatccaattgttcagttgtaatttcaaatgaaaccattgggactcccgttgttgatgaaatggatattcttattgcattaaataaaccttccctagaacaattctcacaagatgtaaaaactggaggaacaatactttacgattcaaaaattggtgaatttgaaactgatagagatgtcaatgtaattgcaatgccttgtgtggacattgcagaagaacatggaaatgcaagaactgcaaataccgcattactcggtggattgactgaattaactgatgctttaaaacgtgaatcttatgaaaatgctattcgtgatatgtttgcttcaaaaccaaaagtaattgatgtgaacattgatgttttaaaagcaggagcagaatggttgaaaaacaattcatag

SEQ ID NO: 6869 - DNA, 1116 bp, Methanobrevibacter gottschalkii
  source 1..1116: mol_type = genomic DNA
atgagcaatcaaatggtaaaaggaaataccgcagttattattggtgcaatgtatgcaggttgtgattgtttctttggatatccaattacacctgcaagtgaaattttacatgaagcatccaaatacttcccaatggttggaagaaattttgttcaagctgaaagtgaagaagcatctattaacatggtttatggtgcatctggaaccggtcatagagttatgactgcttcatcaggacccggtatcagtttaatgcaagaaggatttacctaccttgctggtgcagaattacctgcagttatcgttgatattatgagagcaggacctggacttggaaacattggacctgaacaaggagattacaatcaaattgttaaaggcggaggacatggaaactatagaaatatagtcttagcaccaaacagtgttcaggaaatgtgtgacttaaccatgaaagcatttgaacttgccgataaatggagaaaccctgttgttgttttagccgatggtactttaggccagatggcagaaccgttagaatttccagctgaagctgttaaacctgaaattgatgaatcttgggcagttaggggaactgaaaacacaatgggaaatcttattacctcaattttcaatgactttgatgaattagaagacttcaactacaaacttcaagaaaaatatgcgaaaattgatgctgaagaagttattgttgatgaatatcaagttgaagatgcagatattgttttggtatcatatggcattagcagtagaatcgcaagatctgctgttgacaaaagccgtgaaagtggtataaaagttggacttttaagacctatcaccttatctccttttccaactgaaagaattaaagaattagctgataaaggtgttgaatttatttctgttgaaatgagtaatggtcaattactagctgacgtgcaatttgcagctcttagaagagaaaaaactcaccttgtaaacagaatgggtggaaacctaattgaattaaaacaaattcttgctaaaatctatgaaatagccggatttgaagatcatgatttagatttatctaaaagaagcgctgaaaaggctagtccaaatattattgactga

SEQ ID NO: 6870 - DNA, 291 bp, Methanobrevibacter gottschalkii
  source 1..291: mol_type = genomic DNA
atgattgaagaagagatatcttacccagttattaataaagagatttgcaaaggctgtatgagatgtatagtcggatgtcctcaaaatgcaatactactcagtgaagacatgaataacgcaggatatcaatttgcttattatagtggaaatggttgtactggatgtaaagactgttactttacttgtccggagccattaggattagaagtacatcaaataaaaaatattactaataattcaattgcaaaaatgattaaagctaaagtggctagcaaagggggaattaaatga

SEQ ID NO: 6871 - DNA, 1674 bp, Methanobrevibacter gottschalkii
  source 1..1674: mol_type = genomic DNA
atgacatcattaataggaaatttcgtagaaagagttgattttaactcttatgaagactttatgaaaaatttcaagctcaaatatgaacccgactacaactttggatttgatgtagtcgacaaatatgcagaaatagatccggataaagttgctttaatctggactaacgacaatgacgaaaaccacactttcacattcaaggatatgaaagagtactctaacaaaactgttaacttacttagaaaattaggaattaagaaaggcgataaagtaatgctcactttaaaaaacagatacgaatggtggttctgtatggttgcattacataaaattggtgcaattgtaattcctgcaactcacatgttaaaacttcacgatatcgatttcagattaaaacaagcagaagtgaaagcagttatcagtgttgaagaagattcgttgcttcctgattttgaagaagctgaaaaaggattagattgggatttaataaaacttgtaattgaaaccgatagagatggatggattaacttcaatgaagcgattgaaaaagaaagttccgtttatgaaagaccaactggtgatgaaaacccaatggctgatgaggtattcttaatttactttacttcaggaacaagtggaaacccaaaaatggtttcacatgcacacacttatggtttaggccacattccaactgctaaatactggcataatgtaatagaagatggtgttcatcacagtgcagcagatactggatggggaaaagctgtatggggaaacctttacggccaatggattgccggaacttcagtatttatttatgattacgaaagatttaacggaatcaaattacttgaaaaaattattgaacataaagtgaacactttctgtgcacccccaaccgtttacagattcttaattaaagaaaatattgaaggatacgacttttctaatttaacttatgtaacaactgcaggagaaccacttccaccagaagtgtctgaaaaattctatgaaatttcaggtttaagaattaaagaaggatttggacaaactgaaacaactttatctattgcaacattcatttggttagatgcaaaagttggatgcttaggtaaaccttctccactttacaatttaaaattattagatgaaagcaataacgaagttgacattggtgagaaaggagaactctgtttcgacatatccaatggaccaactccaggactgttcaaagaatattataaagaccctgtaaaacaagcggaacagtgtcatgacggtttttactactgtggagatactgcatgggtagatgaagatggatatgttcacttcgttggaagaaacgatgacatcattaaatcttcaggttaccgtattggaccattcgaagtagaaagtgcagttttatcccatgaagcagtattgcattgtgcaattactgcatatcctgatgaagtaagaggtcaaattgtaaaagcaagcattgttttacaaccaggatatgaaccatcaaataaacttacaaaagacattcaaaatcatgttaaaaatgttacagctccatataaatacccaagaatggttgaatatgtagatgatataccagaaaccataagcggtaaaactagaagagttgaaatcagagaaaacgatcagaaaaaatttaattag

SEQ ID NO: 6872 - DNA, 663 bp, Methanobrevibacter gottschalkii
  source 1..663: mol_type = genomic DNA
atgaattatcatgattttgaaaaacctttatataatgataaattcaaactttctatatgttatactattaacataattattaaaatcaattataaaaaacaggtgtttattttgaatgaatacaacaaagatattggaaacagaattagagaattaagagaattgtcagatattaccattagtgaaattgcatctgacttaaacattaaagaagaaacatacattcaatatgaaaatggagaagtagacatcccagcaagcttcttgtatgaacttgcacatatttttaaagttgatttaggattattattaaccggtgaagaaagcagaatgagcatttttgacgtgacccgtgcaaataaaggtgttgcagtagatagaagaaaagaatatttgcatgaaaacttatgttcaaaattcatccataaaaaagcagaaacattccttgttgttgtggatcctgaaaaaaaccctgttccttcactcaattcacaccccggacaagaattcaactatgtccttgaaggttctttaaaaatatacatccacaataatgaaataatacttaatgaaggagactcaatattctttgactccgcccacagacatgctatggtagcacttaacgataaaccagctaaattcttagcagtaatcatataa

SEQ ID NO: 6873 - DNA, 372 bp, Methanobrevibacter gottschalkii
  source 1..372: mol_type = genomic DNA
atgtcaactaatgagattggtactaaagtacttttcaaaaaacaattaggtttgaattatgagatagaccagaaatatgttggtttaaagatgaaggaaaataatattttgtctttcaatttcagagttcctggtgatttaaaagatgaagttgaagcatattttaaaagatttaaattaggtgaacccattttagttgatattggtggaactggagatatcaaatgtgattttaaaggtatttcacctgttttaaaaaataaagatgaatttgatcaatatttcatttcagctactcttcaggaagataaaacttatgatccgatggaagaggaaaaatgtgaaacttgtagtggatgcggattccactga

SEQ ID NO: 6874 - DNA, 390 bp, Methanobrevibacter gottschalkii
  source 1..390: mol_type = genomic DNA
atgtttaatttaatagatagtaccctattttttgcttcttatggcaacatttttgggcttgctaatatagcagttagtccgattgatatcattttagcttatgttgtggctattgttatctcaattattatggcttttgttttaaaagttccattattgccaagcaaaccatataggtattcttttgatgtttgtgcggtatatccaactccaattattgccattggtattttttcaatatttttagtattgaattatacttttatatataatggtttagttttagctattataattggtattttatctgcattatttgtgaaatatttatttaattttgtatttccaaaacctctaaatgaagatgaaggggatgaaattaatgaatga

SEQ ID NO: 6875 - DNA, 498 bp, Methanobrevibacter gottschalkii
  source 1..498: mol_type = genomic DNA
atgaatgaggtaattggaataataattgccgcagttctatgctggttgaattttgttattgtagatacatattttggacttcccgagcaacctggtgttagaggggctgggataattggtcaagatgtcgaaaaaagagggggagacattgctggtggatttttccaaggaaacattacatgttctccggatgcatctgctggcacattattagcttctattggatatttagttttaggaattcccggtggaataattgctgcattttttgtatttattggaaatagattatgtgcagatcctgggtatgcagggacctgtggaagcctaacagcaacttgcattatattcatatgttcatttttaggtatgactccagaaatgttcattgtggggatggttattgcaatattgactgttatgggcataagtcagaccaaagcttcagtcatattaggtaaagttgcaaaaaaattcaataggcatgctagagagtga

SEQ ID NO: 6876 - DNA, 249 bp, Methanobrevibacter gottschalkii
  source 1..249: mol_type = genomic DNA
atgtatggagaaattattggtgtcatagtcatattcgtagcattaagggctttagtaacaagaaatagggcagaacggctattgtacttaaatgtcataggatttggggtatcagctattgtagcttttgtaattaatactccatttgctctcattgttgctgcagcattctttatatgttctacaattagtgctaatgcgattgcttataccttaaaaaggttagatgacgaaattcttttggagtag

SEQ ID NO: 6877 - DNA, 270 bp, Methanobrevibacter gottschalkii
  source 1..270: mol_type = genomic DNA
atggagtttttcgtatcaattattgcaattgctttaatgattatcggtgcatttggcatcatattcatgaaaaaaccattggacaaagtcataatgttttcagtgctggatgcgggttttgtattggtaattgttttatttaaatatttggatgttgcaatgtttgcagcattagcagatccattgtctactttagtattcattttagctattgttaaaataaatgaggttagaaaaaagaaaattataagtggtggtacagatgattag

SEQ ID NO: 6878 - DNA, 261 bp, Methanobrevibacter gottschalkii
  source 1..261: mol_type = genomic DNA
atgattagtgttccattattcttttactttggaattttccttgcaattgtaggaagtattgctactgcatggggtcctggtgttaaagatccgattataagaacattcaatactgaagtagcttcaattggggtctgtctggtgttattatgttacaaccatgttttggcattattgacattacttgcaacaactgttattattagtctaattttatttagagctattattcgtttggaagagatgggggcaaacatatga

SEQ ID NO: 6879 - DNA, 594 bp, Methanobrevibacter gottschalkii
  source 1..594: mol_type = genomic DNA
atgagaattggagttttatggaataaacttgctgagcctaaaaatattccacgtttgtttgcatttagtttaggaataattttaattttagggcttattgtcccaatggctttaaatcctgatcagttatatgtaagacctgctccacaagagcaaattggtgatggtctatctattgcaccttatgataggggtggagaagtattaactcaacctggacagattaatccccaatatccagataattccagagaactgggaatgataacagcttatatgtctccaatatcacaatgggtatcttcaatttccccatactttggaacatcaatttattcatctcctggtgggctcatagatgaaatattatattatacaagaggttttgatactatcttggaatcttcaatcttgatgatgtcattcattattgcttcatggttgtctattaattatacaatgaatagaaaaaatgatgaatctgaaatcaaaaaagatgttaaaaaagctattaaagattcaacaaaagtagctaatgaaattagtgttagcgatgctaaagccagagcaaaacagttaaggagggataattaa

SEQ ID NO: 6880 - DNA, 696 bp, Methanobrevibacter gottschalkii
  source 1..696: mol_type = genomic DNA
atggtatttataccacagttcgttcccgctgcattcttaaatatgtatttgcctgcaatttatgcaggtttaattgttggttttattggatcaatggcaatagcattaaaaagagaggaaattcatattcttatcttaactgatattgtaggtcttgctatgatatttattgtatctgctgttggaactgaccttgcagaagcactgatcttgccgggtttagtagtggaacttgcagaaaccttagcgatttcagaaattttgattacaagagaaatgcgcataattgagaataatccgagaaaaaacttatctaattcatcttccctattcccgcaactatttgcattaaatatggagatattgaatacagcacctaatttcattgcattagtattgattgcttatggtatatttttaaccggttttactggaggggcagtagctggtggaggaattgtattatatgcattgtctaaaaaggcaagaggacttccagtacttgtcttggatggtattgctggagtctcaggtattgcatggtgtttatggataatcggatttttatttttctttgtaactccacaatattggttattaagtttattcttagcagcatgcggattattattaaaagtagcttcaaaagttggtttaattggactacttatgagagaggacatagacaaggagtaa

SEQ ID NO: 6881 - DNA, 672 bp, Methanobrevibacter gottschalkii
  source 1..672: mol_type = genomic DNA
atggattttgttacactcggtggaaatttacttggaacaattccccttggagatattgtattatatttgactccgtttaatttgttcttatttgcagtcttacttggattcacagtaatgataggattaagtaaacctgaaactcagattgaagctacaatgcactatttaagtaatacggaagttaaagttggagaaaaagaattcaagcaaagaagatttttatctgtactttgcggtattgcatctgcaggtgcaatgattacgggggatttatttaacttcacattattcatggcattggttggaatgttgaatattggtatagtgtcagctgtaagacaaactagtgtattgaactccgcatttaattatggtttaatcgctatgatgtgtagtttaccattgtttggtggtgcatcaatcattcttgcatcaactggaactttgtcccttgcagtgttatctcagatgcctgtaagtccgatggttgtctttggtgcaacattgatgttactgggtattttaggtgaaagtggagtagctccgttctttgcaagtaaagcagagatgtttaggactgctggatctccatttattgttattattcatttaagttcattatttataattgtaagggcagtcgaaattttattattggtattatggtaa

SEQ ID NO: 6882 - DNA, 231 bp, Methanobrevibacter gottschalkii
  source 1..231: mol_type = genomic DNA
atggtaagtgatagtatggatagtcaaaaaagtttatgtattattttattggtattatcaacaatagctattatagcttgtttagttgtaaacttcgaggcatggattgtttatactatagctatctttggtataccggtatgggtattatctttaggtttgctcactatggctaaaccaagacctgaagatgcagaagaaagggtgaaagaaccatttactggatattag

SEQ ID NO: 6883 - DNA, 873 bp, Methanobrevibacter gottschalkii
  source 1..873: mol_type = genomic DNA
atgaatttaatggcagatattttaattcaagttattattgcattcattgcaggaagtttgcttcttggtctgcataggaaaatcatggcccgtgttcaaaagcgtccaggaccacctatagttcaacatttgttgcactctttgaaatttttctttaaagaaactgcattcccaaaaactgtttcaaaattattttacataggtattgtatttatattggctttaatatggattgttggtgttattgcaggtcctgtagctcatgattctttattaatcctatttggtgtgtatgctgtttacaaaattgttgaacataactccggatcaagttcaggttcaccatatggtaaattaagttgtgtaagggcagtattgtctgcagcaactgaacttccattgtttgcagcaattatatttgtttatttggtaaccggttcaatgaacattggggaaattattacttatcagtctgttaatggtcctttagtatttactattccacttgcagctttaatgttctttatgctgattattacaaaatcaccatattctccatttgcaataacaaaagataaagcattaatttcaggttttgaaacagaacattttggatttttaaggggattcatgttattttcagaatctattgcatggtatgtgatgttgtgggtattcttaactatattcttcggtcctctaaatgctgttggatatgtgattggaatgattgtaattacatttattacaggatttattaatgctacaactccaatactctctccaaatcattcagttatgactcaaatcactattggtgcaatctgcttctttggaacaataatcatgttatttggtggggtggtgttatga

SEQ ID NO: 6884 - DNA, 255 bp, Methanobrevibacter gottschalkii
  source 1..255: mol_type = genomic DNA
atgaatagtgaggatgtaatagtttatttcacagcattagttgctattggtatagttgttgtaggtttgttaacaaccgtattccattcatcggttattgctccgatagtaattattggaattattttaagcatttttgtattgtgcactcgaagtaatttttcacataagatagaaagtattgaaaagatatgttttgtaataacattaattgcaattatttgttcatttatattgctttatagaccaatgtag

SEQ ID NO: 6885 - DNA, 306 bp, Methanobrevibacter gottschalkii
  source 1..306: mol_type = genomic DNA
atgttagattatatgatttatattcttgtatttgctgtaggttccattcttggtttactttacagttacaaattacatggtgaaccttatgttgtagacactgagtttaatgtattattggctgttgtttcagttgcaggttggtgtttgggtttcttatcaggtaacataattttatcagctattggtttcctcttggcaggttttgtgatggggggaagaccaggatatggtaggagagaaactgctgttggtttaatagttgcaattgttgcatatttattattgaagtgtgggatgttgtga

SEQ ID NO: 6886 - DNA, 393 bp, Methanobrevibacter gottschalkii
  source 1..393: mol_type = genomic DNA
atggatgaaaatgctaaattaaaagtaatgcaagaaagaataattaaaagttatgcttggcaaagagatattataattccactttctaatgaatttaattgcactaatgaagagttggaagaattattcttcgatttattggatatgaattcacttgaatctttacacggcacatttgattcagctagggatatttgtttatatcaaaaattcaatgctgatttaagactatgttggtttatcgattctttagaagtgatatctcaagaggaaggtaaaaaactaaaaatgagattagttgaagaagttaaaaaaggcagatcttatgatgatgttttaaaagaaggaagattggaattatttgaattattaaaaaaagaaactaattattga

SEQ ID NO: 6887 - DNA, 450 bp, Methanobrevibacter gottschalkii
  source 1..450: mol_type = genomic DNA
atgttagacgctgttaaagatgctgtgaggaaaagctcaattcatgtctgtattgtgaattgtgggggatgtaatggctgtgatgtggaagttgttgcattattatctccaagatatgatttggaacaatatggtatttatgttcagaataatcctcgtgaagctgatgtcttattgttaactggtgctgtaaccgaacaatggattcataatctaaaaagagtttatgataaagctccagaaccaaaaattgtagtagctgttggaaattgcccccaatccggagatgtatttgcccaagaaggaggccatgttcatgcacctgcatctaattttatcccagttgatgcggctattcctggatgtccacctagacctagtgaaattttagaagctattctgtctgtgggtccacaagctattgcagatcgtgggagggaagagaaatga

SEQ ID NO: 6888 - DNA, 1125 bp, Methanobrevibacter gottschalkii
  source 1..1125: mol_type = genomic DNA
atgattgtaccgattggtcctattcatccagctttaaaagaacctataaggcttaaacttcaaactgagggtgaaagagttgttaaagcagaaattgaatatgggtatgttcacagaggaatcgaaaaaataattgaaggacaaacatggcagaaaggaatttatctttctgaaagagtatgcggtatttgttcatatgaacatactcaaacatttgcagaaacaattgaaaagatttctaatgttgatgttccactaagggctcaatttttaagggtaattacaaatgaactagatagaattcaaagccatttgcttgctaattcaacatttttcaaatcaatggatcatgaaacattatttatgcatgttttggaattaagggaatatgcaatggattctattgaattattaactggaaatagagttaatatgggttggaatgttgttggtggagtcaggatggatgctgatgaacgtcacttcaaacctatattggaaaaccttaaaaaaattgaagaaggttttgacactacaagggcattgtttgccgaaggtcctgctttagcattaaggtgtaaaggaattggtcacatgagtaaaaaggaagctattaaaggacgtgctgtcggtcctattggaagagcttcggatattaaagaagattataggattggccattacacttatgatgattactttgattttaaggtaattagaagaaaagagggagataactacgcaagaacattaactagatttgatgaaattccagaatctataagtttgatcagacaagcaattgaaaacatgcctaagggtgagattcgtactcctgctgatttgaaatctggttatgcaatgaataaaaatgaagctccccgtggtgaagttacatacatgattgaaactaatggtaatttaattaagcatatttctattagaactccaagtattgcaaatatggattcatgtgcaaaatacatgattcgggatgttccaactgttgcagatgcggtttcaacttatgcatcatgtgatccttgtgttgcttgtgctgaaagagtagctattactaatgaacatggaaaaacagaacttaaaaatatttatgaggtgatatag

SEQ ID NO: 6889 - DNA, 1026 bp, Methanobrevibacter gottschalkii
  source 1..1026: mol_type = genomic DNA
gtgtcatctctaatgtggtatatctttgattttgcaagaaaagcatgggctgatgcattcactaatgcaaaaactaatcctgagattgcagaaaaaccagaaagatttagagattttcctaaagtaaataaggaatattgtataggttgtggagcatgtactgtttcatgcccttctccaaacgcaattaaaattgtaagggaaaaagatgatgaaacaggtgaaggttcaacatatccagttattactccgggtgcatgtatccgttgtggtttttgtgcagaagtatgtccaacagaaccgaaaacattggaatgtggtttaaatcatttgattttacctgaatttaatcttattccgtcaaaaagacaattcattgttgatgattatttatgcattaaatgtaaaaagtgtattaaaaaatgtcctgttgaagcaataagtcttattgatggtaatgttgtagttgatcaacttaagtgtatttcttgcggggaatgtctagaggtatgtccggttaatggtgcaatgaagggtgtttttgttgataacttacaagatcagaaagaattaattttattgactgtaaattatcttgaagagtttattaatagtaaagaagaggatttaagatcattagatcataatggtcttttacaatatgatgtgccgctttccaacatttgggatgaagcattgaaaataattcctgatgaagaaatatcacttgaaatcattactaatgctgttaacagacttaaagttagaattattgattgggataaatcaaaatgtaaaaaatgccagttatgcatacctgattgtccaactggttgtatttcatttgatgaaattaatgatacaattgtaagggataaagatagatgtttaagatgtagtatctgttatcagacctgtccattttcagttattaaatatttcatagctaaattcgcctttgatgatggtgaaaatattcatgttactgttaaagcatctaatttaaatgaggatattgtggagtga

SEQ ID NO: 6890 - DNA, 1359 bp, Methanobrevibacter gottschalkii
  source 1..1359: mol_type = genomic DNA
atgattgatagttatactaaaacaccaagaccattaagacatgttgatgttgagtatttaatagatcaaacaaaatgtgctaattgtaaagataaaccttgtcttgaatcctgtcctattgatgctatctatttggataatgaagaaggtcttattaaaataaaaagtacttgttttggttgtgtattgtgccgtaatgcttgtccatatgatgctatttcacttgaagtacatatggattcacctataaaagaaaatgttccaaatattaatgtaaaattatgtaaagcatgtggggcctgtgttcaagcatgtaaaaaaggttcaattcatattgtttcagatggaaaacaacctcctcatagtgaaattgataaagatacttgtgtgcgttgcggatactgttttagagtgtgtccgactgatgcgattaaatatggtcaattacttcctaaaacagttaaaggaggtaaggcagttgttgttaaccaggataattgtattggttgcatgacttgtataagagtttgtccatcaatgggagctcttaatgttgctagaactaacaaattgccttatattaatccgggatattgtgcaaggtgtgaggaatgtatgcattcttgcccatcaggagctattaaatattcttcacgtaaaaaagcttataagatgtacagtgagataaaatcttttgatattgtatctgaaattgttgatcatgatattaaaatactttcacttgatttgatcagtttaaataaagttttacaaaaagtaggcaaatcaatagctttagaatttaatgaccaaaactttgaaaatttcattgagtataaagtaaatgatttaatggagagggaattgagtattagtcttaattccaatattgaagttggagaatttacaaaacttgtcggatcttatttaatggataggaatattgaaatttataataataaatgtattgcttgtggagattgttataatgtatgtccggttggtgcaattgagctaaatggtccaaatccaatctccatttcagataattgtatttattgcggaaaatgtgttgaacaatgtaaatttgatgcgataggtgcttatgatgattatttctatagtaaagatactgatttgtattatgccagatcttatttacgtggtcaaagattaggggattttacactttcgaattcaaaatgtcaggcatgtgcaatttgtgtgaataattgcccaactggtgcattaacattaggtgatgatattattgagtttgatgatgaaaaatgtatttattgtagaaattgtgaggcaatatgtcctcttgacgcaattaggatagttaactttaggtga

SEQ ID NO: 6891 - DNA, 1047 bp, Methanobrevibacter gottschalkii
  source 1..1047: mol_type = genomic DNA
atgtttgaaaaatcatttatcacggattgcgaaggcccactgactttaaatgataatgcatttgaattggcagccaattttattgaaaatggtgggaaattatttaaaatacttagtttatatgatgattatttggtagatattgttaaaaaagaaaattataaggcaggtaatactttaaaattaattttaccattttttattgctgaaaatttgaaaaatgatgatttaattgatttttcacaaaaacatatttattcagttgaggattcaaaattccttttaacttatttgcaaaaagtaatgaatacatatatagttagtactagttatggtcaatatattgaagcaatatctaattatatgaatttaccttttaagaatacattttacacaaaggtaaatctagataacattacaccaactgtccaggaaatcaataaaattaatgaattcaaacagttgattttagaaaatccaaaagattatgatctatttgatgatattttcttctcacgaattacaaaaatggacatctatgaaaaaatcaaaaatgtggaagtagtcggtgggcaaggaaaaaaattagctattgaccaaatcattgaaagagataatatcgataaggatgaaattttctatattggggacagtatcacagacgtggaacctttagattttgcttgtataaacaatggaatcagtgtatcatttaatggtaatgaatatcccctcaaggttgctgaaatagctattgtatctccaagtgcagttgcaacagcagtaatagctaatatatatgtaaattatgataaaaataaagtaatggaatttattaaaggttacaataatttaaatgattatgaaaaattatttgatgattacaatgtcgatggagaaattaagaataggtttttctcatttttcaatagtggaaaatatcctttaatcgaaattatcaatgaaagtaactttgatgaaattttaaaagcaagtaaggaaatgagaaacaatattcgtggtaaagatataggcggattaggttaa

SEQ ID NO: 6892 - DNA, 891 bp, Methanobrevibacter gottschalkii
  source 1..891: mol_type = genomic DNA
atgagttatgaaaaagtaaaagacacattcttcgaggcttttgaaggaaaatatgtaagagctttaattacaggacctagtgaaaaaattgtaaaatgggcggcttatgattccacttcaactcccagtgcagttatcggaagagtggaaggtggtgttgaaggatttttagatgaatcccagactccagatggaagattcggtgctgttgtccaatattggttagggggagatgatgttggcaagttcgcttttgaattgtcctacagattaagacaagatgttttagtaaaaccatttacacgtatttttgattattctgcatccaacagtgatgaatgcattgaaatgatggatattgtaggccactgtggtgatggatatgaatggattgttgaagaatatggtagaaaaatgattaatgttccgattgcagttcctgattttcaaattgaagaaaaattcaaaattaacaatgggattatgggaggaaacttctggtatttgtgcactacagctcaagcagtaatagaagcaggtgaagcagtaattgatgcaataatgaatgttgaaggagctaccacaccatttgatatttgttctgcagcttcaaaaccagaaacaaactatcctgaaattgggccaaccacaaatcatgtttattgcccttctttaaaagaatctttaggagatatttctaaagttccggaaggcattaattatattcctgaaattgtaataaatgcagtggatgaaaagtcaatgaataaagcagttaaggcaggtattgatgctgctttggaatttgaaggagtagttggaatatcagcaggcaattttgacggtaagcttggagataaaaatataaatttattagatattttgaagtaa

SEQ ID NO: 6893 - DNA, 948 bp, Methanobrevibacter gottschalkii
  source 1..948: mol_type = genomic DNA
atggaaattctagacgatgatattaatgcagaagtagtgggatttggagcactgaatgttgataaactttattctgttgcaaatattgcaggtaaagatgaagaaagttttataaaaagtgaaactgacactccaggtggctctgcagcaaacactattgtgggactatcaagattaggttgttccacatctattattggaaagatagctgaagataatgatggtgatttaatagaatacaatttagccattaatggtgtttactcaaataacttaatttattccgaaacaggttcaactggaaaatgtttgggatttgttgatgatgagggtgagaggtgcctatatatcaatcctggagttaatgatgaaattcagcttggtgaaataaatccattaaacataatgagatgtaaaataatgcattacacctcttttgttggagattcttttaaaacacaaattgaattattggatttattaaatgaaaatactgtattaagttttgatcctggaatgttatatgttcaaaaaggatttgatgagttaaaacctattcttgataggacaggcatattgctcattaatgaatctgaattaagattattatgcaataattataaatcttccttaaaagaattggctattggatttttagatttgggaattgaaaccgtcgttgtaaaacagggagctaaaggagtgtttgcaattaataactcaacagattgtttcgtcgaatcttatgaatgtgatgttgtagacactactggtgccggagacagttttaacagcggatttttatattctttcttaaaaggatatgatttggaaaaatcttgccgaatcggaaattgggttgctagtaaatctattgaaggatttggaatggataaatttccttccgctaaagatttagaggacttcttaagtgaatttaattattaa

SEQ ID NO: 6894 - DNA, 828 bp, Methanobrevibacter gottschalkii
  source 1..828: mol_type = genomic DNA
atgaatgtatcttttataaagcagatgaaggatttagaacgtgaagtccttttaaaatctgttgaattagatgatgatagtgatgatttccaatttgaactagatgattttagtgcaaatgatgaaatcattgcagttgcacctaaatgtgtaaggtgcaatacatgtgttggggaatgtccggttaatgcaattgaaccagctaatatttttagaatagctaaaataactgacaagtgtgttaaatgtgaaatttgtgttcaatcatgtccagtttctgcaattaaattgattgataactcaatcgtttatgatggggagaatgaagaaaatataattgaatataaattatccaatatcagttcccgtcatagggtagtccgtatgaataatatttcaatcgattactcatgtgataataattgggatgactgttcaaaattatgtccaacaaatgcgttcactcttgaatttaaagagttttttgatgatttggatatggatttaggtattgaactcatagatgatgagttatatccatatgttaatgaaaaaatgtgtataggatgcggagcttgtgctgaaatatcacttaatgacaatgcaatagaattggaccgttatattgggccgattattcacagtcgtttcattgatgttaatcatgatttgtgtgtgaattgttatttatgtgaagaaaattgtccgaccggagctattgagttagttgatggtaaagttgttttagatgatgataaatgtattagatgtattgaatgcactcgtcattgtccggtagtagctttaaaaagagttgagattgaataa

SEQ ID NO: 6895 - DNA, 636 bp, Methanobrevibacter gottschalkii
  source 1..636: mol_type = genomic DNA
atgagagctaaagagttaatggataaaaattttgtatatttaaatgcaaatgatagtgtaattgaagtttcaaaagtcatggaagaaattagacgttttacttgtcctgttgtaaatgataataaacaattaatcggatgggtaacttcttttgatattactaaaggtttaagggaaggtaatgaaaaaatttcagatataatgagcggttatgaagaaattgggactgttcatgcagatgatcctgcaagaaaagcagtaattttaaccgcaaacaataaattcgtaactgtacctgttgtaaacgatgataaacaaatcattggtatggttcgtgcttgcgatattgttgaattgttatctgaattatacgatattaaagtttcaaaattatatgaagcaatgcaaaatcaacttaaaggagttacttgggaagaattaatggctgcatctgctcttgtttctcaaaaaactactggtgttaagatttctcctgaagcatatgaagaaaatattatgaattccacttttggagaggctatctggtctactggtggtttggaaaaattctttgctggtttaatctctgttggggaattggtaattgctcgtagagttggaaaagcaagaagataa

SEQ ID NO: 6896 - DNA, 642 bp, Methanobrevibacter gottschalkii
  source 1..642: mol_type = genomic DNA
atgaatttgaattttgactttactgaaaaaagagtaattattactgcatttttctgtatggctttcacaattgcaaatttaatcactgttaaagttatcaatattggatttttaggtatggaaactcctgccggggttttaatctatcctttggtatatattttaacaaacgtaatcgcagatgtttatggtgaaaaaatagcgcaaagaacaattattttaggtctttgtgttgatattttatttgtcttcatgacaactttaatattgttcttaccgtctccagcgtactatactggagattcaagccttgcatttgtatttacccaaactccaagaattcttgttgcatcttacattagttacttaatcggtaacttcgtaaatgcaagaatcactgctaaagtaaacgaaggtaaagaatattcatctaccaaaaacttaggtattcttgctttcagtgagctaattgataattttgtatttatcggtcttgcattcgttggcgtattcgcagttactgatattttaataatgattgtttctcactggattttaagtttgatttggagtgcaattgctcaaccatttacaaaaatgactgtaaaatgggctgaaaaaggaaaacctgcagaagcttaa

SEQ ID NO: 6897 - DNA, 366 bp, Methanobrevibacter gottschalkii
  source 1..366: mol_type = genomic DNA
atggaattaaaatatataatagtattatttgatggtgaatttatgaaattcaaatctaaattttttatttcattgttgattatttttgttttgagtattgtggctgtacctgctagtgatgttaattctacagatttttctcaattaaatgatactgttctagattcaagttttaatgataatttaagtactgttgaaacttcaaacaactcgaaaacagtaaataatacaaataatggtgatatggttcaaattattaaaaccaatcctaaaatcactgttaaatcaacatatttaaaaagtaaagataaattagaatttaatttcaaaaatgcttctggaaacccactgaaatctaaaagctga

SEQ ID NO: 6898 - DNA, 1572 bp, Methanobrevibacter gottschalkii
  source 1..1572: mol_type = genomic DNA
atggtcttcatcggtaataaaaaatattcggtttacactaattctaaaggtgttgctaatttaaacattaacttggttgctaaaacttataaattaactatttcttttgaaggtgatgataattataatgctgttaataaaataatgtatttacgcatctctaaattatcaactagaatcacttgttataaaaactttgtagttaaaggaaataatttgtatttctatttatttgattcttattataatccagtctcatgtaaaaaattgattgtaaagtacaaaggaaaaacagttactaaaacatcaaataaaaatggcagaatttcttataaaatcaaatcatcaggatctaaacattcccttcatgttaaatttaaaggtgatggtcagtttaagtcatcttcaaagtatcataaattttatataacaactttttcaccattgaaaataggcaactctaaacttttaactaatggatatttaagaatttatttaaatggtttaactaaatcttcaatttctaaaaaaacaattgtaattaaagttgcgagcaaaaaattttctaaaaaatcctcttctgaggggattgttgttttaaaaccaaatgtatgtgctaaggcatatactgttagtgcgaaatttggcaaatatgttgtttataaaaaaatgaaatgtattgaaggcaatgtgaaagatccattgaaatataatattccaacaaaaagtggtgttccagatattgatgtaatgcctggaaattatgttatgggagacaataatgcaagatacacattaacaaaaatacaatataatgaagttataaaaagagacagttattgtttgtttttaaataataaattatccaaatatactttttttaaaacaaaaaataatcccaatactaatcatattattcagcgagaaaaatggaatgttattgaaagggcaataaatcttaagattgttgggaaaaataaagctaattattggctaagtgaaatttcagttttacttaagggtaaatcatataaatatcctgaagtaaggaagactcaatctacaaactattattgtggtcccaattcagctagtgtttgtactcaggttttgaaaaattattattgtgaaaaatatctcgcaaagttaatgggtacaaatcgtagggagggtacaaaatgtcaatggattattgatggtttaaataaattaggttttaatgcaacttacttctacaaagcatcttttgataatgcattaaatgagcttaaaaaaggcggtgctgcattagtattccatgcacctcgccattatgtttctattttggatatcagttctgatggtaaaaaagttttagtgagcaattcttatggaagttatgataatattccaactaaatggactaaaataagttatatgaaaactaagttttctaaatgggaggagagtgtgattgtaagaagtaattacaagctttctgattctgtaaatgatagtgtaaattgtttctataacagtatgggtacaaattggtatcgccatagtactagtcaaaaaatgggtttagtttaa

SEQ ID NO: 6899 - DNA, 1290 bp, Methanobrevibacter gottschalkii
  source 1..1290: mol_type = genomic DNA
atggttgaagaaaatagtaatatgctacttggggttcgtgataagcctcctgcgcttaggtgggttttacttgctatacagcatgtatgtgcaatgttcggagctacaattttagttccgatagttgttaacaccactgcaggtgcagatgttttatcaattcctgtagcattagtcacatctggtataggtacattaatctatcttgtttgcactcgtggaagaagtccggtatacttgggaagctcttttgcattcattgctcctatggttgcagggtatgcattagctggtaaatctagtgtattttcagctttgatgcttgttggtttggtatatgttgctgtatcatgcattattagaatttctggtaaagcatggattaataaattattgcctccggtaattgttggtcccatgattatggtcatcggattgtctcttgctccaactgctattagtgaaatcggtttagatttagcagtagtaccatggaaaaacctggtcgttgcattgattgcatttttaactactgcatttttggcagttcgtggaaaaggaattttacgcgtaatcccttttttgattggtattattgtaggatatattgcagcggcggctcttggtatggttgattttactcaagcattaactgcaaatgtggttgaaattcctaaattttacttgccatttatgaattataatttaaactttgctgcagtccttacaattgttccaattgctttagtaacaatggtggagcatattggagaccataaagtattgagtgaaatcattggtcgtgatctaattgaagatcctggtcttgacagaactttgcttggggatggtcttgcaacattccttgcagcattattgggaggtcctgcaaacactacttatggtgaaaacacttctgttgtaggcatgacacgagttgcatctgtttatgttattgctcttgcagctattatagcaattatatttgcattctcaggacatttgacttcacttttaacagcaattcccgctcccgttttaggcggtatttctgtattattatacgggtttatttgtgtaaatggtcttaaaattttaattcacaaccaagttgactttaacaacactaaaaatgttgttgtagctgcaaccatgcttgttttaggtttaggtggagcaacattatccgttgtttatggcaatttgtctcttgctatgtcaggaatgtctcttgcagcagtcatcggtgtaattttaaatcttgtaataccggaggaaaaacatgaatga

SEQ ID NO: 6900 - DNA, 627 bp, Methanobrevibacter gottschalkii
  source 1..627: mol_type = genomic DNA
atgaatgaatttgttttaaatcacccattgataactcataaacttgcatttttaagagatatcaatactggaactaaagaattcagagaacttgtaactgaaatttcaacaattcttgtttatgaagcaatgagggatgcacaacttgaaaaaacaactattgaaactccccttgagaaaatggaaacaggaacccttaatgaaaataactatgcaattgttccaatattgagagctggaatgggcatgattgatggagtgttaaatgtaattccaaatgcaaaaattggtcatattggtctttacagaaatgaagaaacattcgaacctgttgaatattattataaaatgcctgaagggattaaaaatagggaagttctagtagttgatcctatgcttgcaacaggtggaagtgcatcagcaacaatttcccggcttaaacaagatggtgtaactaaaatcaagttgttatgtattgtagctgctccacaaggtattgaaacaatcgaaaacgaccatcctgatgttaaaatattttgtgcaactgttgacagggaattaaacgaaaatgcatatatccttccaggtcttggagatgctggagatagggtatatggaactaaataa

SEQ ID NO: 6901 - DNA, 993 bp, Methanobrevibacter gottschalkii
  source 1..993: mol_type = genomic DNA
atggtttcaaaagaattcattgaaaaagaatggattaaagcatataatgcccttaatccttttttagatgttaatggagcatatgaactccgtaaattattatgtgatttaagaaataatgaaaaattcatatttatttcagataatgttgattatacctgtattattgaacttgatgaattaaaagatgatattccaatttttaaatatgcatcagattgttttaaaatttttggaatttttagtaaatctcaattgagcaaacttcattttgcatctgtttatgatataattgtttatagttgtgttagtgaacttaaaagagatttatcatataatgagagaaaaaaaatttattactgtaatttaattcataaattgactttgaatcaggatatttcatctaatttcaatcaaaattttaaatataataatgaactatttaatcaaatgaaaaaaataaggtggaattcttctgcaaataagttaaaaaatattatatacagagatttgatgggtacactcactttagaattaaatactgattcaggagttacttcttcatttggtgaatgtgcagagtatttagcatgttgtaatgtatttaatgataatcgtttagaagtaatgcctgatgatgtggttaaatcttggttattaacattgaatttatttttaatggatttacgtccctatattaaagattttaattcagctagtgatatgattgctgatactggaagtgaatttaaacctattaatatttcggaaggtcaatctaacaataaatcatcatctataattcgaaaagtcttagcgggagttttaagcataattattgtctttctgttgcttattgtaatgtcaacgatattaatattgatttttggagatgctttggataatttcattggtttacttaggccagttggtataataggtttggctttggctgcagctttgggtaaaaaaatatacgataaacttgtttga

SEQ ID NO: 6902 - DNA, 993 bp, Methanobrevibacter gottschalkii
  source 1..993: mol_type = genomic DNA
atgtttgaattttattatgaaaaggatattcaaaaaaattttggagatttggataaatttgatgatgttttaaatttatttgaacttaaaaatttaatcaatgatttcattaataatgaaaaatatgttttcattattgaaaatattgattttgaaatgtttgaaactatggaaaaatctagaaaatattcaacatttattaataatgcttttaatggtttaaaatcatttaaatattggattcaaccatcaataatgaattttaattcatttactagtgtttattcaataattgtttatagttgtattattgcatatggtagaatgttaagtaatgatgaattagaatcaataatcttttcagattttccaattaaattaactttggtcatggatgatttttacaacataaataatgttccattattggataaagatttcttcaggacaattcgtgatgttaaattagataaatcagcaaaaaaattagataaatttatttatcatggatttttacttaatttagcagaacctggaaatcattatgtagctgttgttgttgaattttcatattgtgcaagttatttttccagatgttatgcatattcaagaaaaaataaatttgttacaattaatgacattgctgatggatggattttaacttttaaattatttttaaatgatataagaggttatattgatggtttggagtcaaatagtccttgtgctattgtcccttctctaaaatcacataaaaagattaaagttgaagaagaaaataatggaagttttaatattaaaaagataattgcaatattcttatccatattgtttttttgttttttaatattagttgttgaagatatttcatatattctaactggaagttattattattctggtgcaccaactactcgttatgcaatatttggatttattttatttttaactagtatgttttattctttggttaaaaatattctcaaattttaa

SEQ ID NO: 6903 - DNA, 990 bp, Methanobrevibacter gottschalkii
  source 1..990: mol_type = genomic DNA
atgtttgattataatttcaaaaagagtattgaaaaaaactttaatgaattagaaaaattcaattatttgaaaaattttaatgaacttaaaaatttattgttaactatatctgaaaatgaaagatatattttcatatcgaaaaacattgattttaatgcgcaaccgttaatggataaacctaaaaatcattcaaaatttataattaatgcatataatggtttggaatcttttaaatattggattaaactttcaattatgaattataatttttttgttggagtttattctattatcatgtatagttgttcatgttcttatggaagacctatggatattattgaatttgaacatgttctaaattcgaatcttccttataaattaactgtatatttggatgatttcgataaatatgatgatttttctagtcttagtgaagaattttttagaacaattagagatatgaaactagataaaaaggctaatgaaattgaaaagattatttacagaaagttttggtcaaatttgactattaattatggcactgaaaatagggtggatgtacagtttgcatattgtgcaaattatttatctaggtgttatgcatttaatagggggagaaatgttgtctctgttgaagatattgctgatgcatggattttaactttaaaattatttttaaatgatttacgtccatatattagaggtttagaatcaaatagtccttgtgctagtttaccttctgtaaattcttacaagaatattgaagttgacaatgataatggttcggttaatgtaaaaaagatatttgcaatattgttgtcaatattgtttttttcattaataattatggtttttcagtataccgccaatttgttaactggagattattattatcctaattctcctcaagacagatatgttttagcaggcatttttttattccccactagtatgttttatggaataattaaaaagattcttaaaatttaa

SEQ ID NO: 6904 - DNA, 993 bp, Methanobrevibacter gottschalkii
  source 1..993: mol_type = genomic DNA
atggttcagtttcctcaaaagactattgatgaatggattaatgaagattatgaaaaacttgatgtatttatggatgctgattctatggaggatctccgtgaattgattttaagttttaaatatgatgataaatttgcttttctttcagaaaatattcattatcagacagatattaataactattcagataataataatttatatttggatgcaaatgatgttttgggagattttggttttatttttagtaattctcacttatcatctgtttgtattgattcattattttttgtgattgaatgcagttgcattggtgaacttcgtagggaattgtcaaatattgagaaagaaaaagtttattatagtgatttgggttataaattaactttaggtcaagaaaattttttaaaaataaagaactatgaagtaatcaataaaacatttttcaaaaaacttagcaaaattaaatggagtagtaattccaaaaatttggataaatatattaagaacttttgggatactattacattacaatatgatacatattatcatattgttagttcatttagtgtttgtgcaaattattttgcttgttgtagagcattgacttctggtaggttggaggtgtcgaatgaaggggtaattcaatcttggttattaacattaaatttatttttaatggatttacgtccatatattaaagattttaattcagctagtgctatgatttctgatactggaagtgaatttaaacctattaatatttcggaaggtcaatctaacaataaatcttcatctataattcgaaaagttttagcgggagttttaagcataatcattgtctttctgttgctttttgctatgtctgcaatattaatattgatttttggagatgctgtggataattatgttgattcacttaggccagttggtataataggtttggctttggctgcagctttgggtaaaaaaatatacgataaacttgtttga

SEQ ID NO: 6905 - DNA, 960 bp, Methanobrevibacter gottschalkii
  source 1..960: mol_type = genomic DNA
atgaagcaagaaaatacctattctccagttagtagtttgttttcaaagcaattaaatctttcggattttggttttgaaaaacccgcactcaaaaaaattaaagaaattaacaaagagataaaacccaataaactcttaaaattcatcaaatatacatttaaatactcaaaaattgtgttaaataagtattcaagtcatttttcgaagcatgacttcacacaacctgcattattcacacttttagctgtgaaaatctacacaagaagtacatacagacaaataacagatttattagaactttctgacaaaatacaggaacatttacacttaaaaaaggtcccacactacacaacactccagaaattctttcaaagacttccaacatcaatattacaagaattaaacaaattaatattacaaaatcatcaaataactggtaaaataattgctttagatggaagcggcttcactaatgactacgcagacaaatattacgcaataatgaggcgaaaagaaagaaaaagctacataaaaaaccatatttcaatcgatgtagatacaagattaatactccatttcgcagctcaaagaggcccaagatttgacacacgatttgcaatccctgcaataagaaatataaagaaatataacccaaaatacatactagcagaccgagcatacgacacagaacccatcagaaaatgcattaacgaagaagcaaaagcagaagatcaaataccattaaaaaccagagcaaaaaacggacattaccgattaaaaagtaaaaaacaattcaaacaagaaatatattccagaagaaacaatgtagaatcaatattcagcgtaattaaaagaatatttaatggaacaaatagaagcagaagcttacaactgtcaaataaagaaacaaaactcaaaaatacaatttataatatttacagatcaactcaaattcaataa

SEQ ID NO: 6906 - DNA, 777 bp, Methanobrevibacter gottschalkii
  source 1..777: mol_type = genomic DNA
gtggaaaaaggaattcgttttgatgaaaattttattagtgaagttattttcagaattgaatttccaactattaaaaagttaactggtaatgatgaagaagtagttaaagattttgctaataaaatttcaggcactttccctatttcagaagttattcctcataataaaattaatttagatattgatattaattcagggcaacttccaaaaattactcgagaaggagatttagtttggatatttaaaagccataataacaaaaagattgttacattgacagctaatgatttagttttagaatatcgagatagggtatattctggttttactaattttttagatgaaattttattactgatggacgcttttaatcagtttgattaccaaaaattaaactttttaggattaagatatattaatcaaattactgataaaaatgttaataataatgtttctgaattttttagtctggatttaacaaatatggcgattattaataatcttgagaaaaataatgaaaatttggtacagatatttactaaggtaaattttaaaaaagatgattatttaatgactatgcaatatggattatttaatccacgtttccctaatgtggatgcagataagatgttcatattggattatgactgtgtgcttcataatattagtcatgttggggaaattaaagataatttaattgatatgaatcatttaatttttgataagtttgattattcaataaccgctaagtttgaaaaaattattaaaggagaatga

SEQ ID NO: 6907 - DNA, 447 bp, Methanobrevibacter gottschalkii
  source 1..447: mol_type = genomic DNA
atgagtcctccagaagttattcgtgatgatgatacatatattacattgcctgctagtttaaaggatgaatattttgaatcaaaacctatatcttactctaaatattttgagtcatttgaattcaaatttaatgagttatctaatgattttaatcttattaatattatggagattcaagattttattttacttcatgatgatttatttgattatttgagtcaaattaaattattattgcaaaaatatttctcagaatatgattattgtttagaattttattcagatccagaaatacaatcattaaatcaattagtaatctatattaatggagatgaatcttcttttgatgaggattggagttcattaaaaagaatgaatagtgaaattaatgatttatgtaatttcccaaatagtgttaaacatttaatttctgtggacttgtggtga

SEQ ID NO: 6908 - DNA, 1275 bp, Methanobrevibacter gottschalkii
  source 1..1275: mol_type = genomic DNA
atggttgttaaatatttgccaagaatattggatgatgatttggaaaaatgtcttacaatgattggtgcaattcttattgttggaccaaagtggtgcggcaagacaactactgcagaacagcatgcaaacagtgtattaaaactacaagataaagacaattacaaatcaaacatgatgtgggcagacatagaaccttcacgattattgaaaggggacaaaccacgattaatcgacgaatggcaggtggctccagtattatgggattcagttagaacaagcgttgatgaaagcgaagattatggattgtatattttaaccggttcgacagtagttgatgaagatagtataatgcattctggaaccggaagaatccataggatgttgatgaggcctatgagcttgtatgaaagcggcgaatccaatgggcaaatttcaattatggatttattcaacaatcctgacatcaacattaatgaatgtgaatccgatttaacaattgatgatttgatatttgcagcatgtcgtggcggatggcctgattcactgaaccaaaaaacccgagagggcaaactgtttgttgcatataattatttggaaaatatctgtaatactgatgtttctgccgttgatggggttaaaagagatcctgatagagtaagattattattgcgttcacttgcaagaaacaattctacattggctaaggaccagactatcattgatgatatgaatgctaatttcatggatataagtaggccaacatactattcatatgttgatgcattaaaaagattattcgtaattgaagacaataggggatggtcacctaacatcaaatccaaatcagcaatccgatcaggaaataagaaagtgttcatagacccttcaatcgcagtagctgcactaaatgcaaaccctgaatccatgattaatgatttgaatacattcggtttcatttttgaaaacttatgcattcgtgatttaagcatctataccaattctcatggtggaaaagtttcatattaccatgacaagtcaggtttggaaatcgactgtgttgttcacttaagagatggaagatatgcattaatagaatgcaaacttggaaatgatggaatagaagaaggctctcaaaatctacttaaaatcaatggtttaattgaaaagaatgacaaattggacaatcctacatttcttgcagtattgaccggtggaaaatatgcatacactcgtccagacggggttaaagtttttccaattggctgtttaagatag

SEQ ID NO: 6909 - DNA, 96 bp, Methanobrevibacter gottschalkii
  source 1..96: mol_type = genomic DNA
atggttgaaaaacaaaatctaagtacaactgaagaaggtagggcttctattagtgaaagatttttggaaaaacttttaggaaaaatccattcttaa

SEQ ID NO: 6910 - DNA, 222 bp, Methanobrevibacter gottschalkii
  source 1..222: mol_type = genomic DNA
atggctgaaactacagacaaagttattgtaattgtaggatatcttcttgctatatttatacctatattaggtttaattgcaggaatagtattatactttgtaaaaaaagaagatccattctaccaaaaacatgcaaaatatattataatcgtttcaatagtcgtatgggctttaagcgccatatttgtgggaatgctcaatgttggattagacggtttttaa

SEQ ID NO: 6911 - DNA, 1116 bp, Methanobrevibacter gottschalkii
  source 1..1116: mol_type = genomic DNA
atgaataaaagtgatttgaaaagagatttttatatgctcaaagggccacttgccaagaaaggttatgactggtggtggcattccttaaccgcatatgataaagaaactggtgaagaaaaacctttcttcattgagtactttgtatgtaatccagaattagctgaagaggaacctactcttggacaattgcctgaaaatcaaaaagccggtaaaaaaccatcttattgtatgatcaaagcaggcacctggggtaaaaatgcaaagcaaattcataatttttactcaatgaaatattttgaatgtccggatgatgaattaaatatcaaagtaggggattgcagcttaacagaaactcatatgagcggatttgcaagagttagtgaagaagaatctcgtgatcatccagaatatatgagtgatgctggagatatgatgtgggatttagacattgataaacaaatcgcttttaatgttggttatggtgctaatggtcttttcaggaaattaaattcatttgaaatgttttggcatgctgaaggaattaaaactcaatatagtggaacaatctggcttgatggtagggaatatgaagtgattcctgaaaaatcttatggttatgcagataaaaactggggaggagacttcacatcaccttggctttggatttcctcatgtaacttaactagtcttaaaaccggtaaaaaattaaataattctgcttttgaagcaggtgggggaagaccaaaagcattcggaatttccattcctcgcaaattattaatcggtttttactacgaaggtaaaatgtatgaatataactttgctagattctggaatatggttaagattgattttgactttgaagaaggtgaagacgtacatacatggcatgtaaatgcaagtaacaaagactctaaaatggaattggtgctttattgcaaacgtgaagatatgttgttaatcaactatgaggctccaacaggtaaaaaattacacaataggttatggaatggaggaaatggatggggtgaaatcaaattatacaaaaaagatggaactctcattgaccatgtaaaaatggaaaataccggctgtgaatacggagagtattgctaa

SEQ ID NO: 6912 - DNA, 699 bp, Methanobrevibacter gottschalkii
  source 1..699: mol_type = genomic DNA
atggtattcacagacatcattgcattaattgtggtttatatttatgtagctattatttttgtagtggctgaaatggttttaaaaacaagacctgaaatttcacgtaaatttttgcatatcatggttggtaacatgatatttgcaatgccattttttgcaaatccgtggaacatggtttggtttttaacactgcccattacaattgcattattcttcttaactgactactcgccaattaaaatagaaaacagtgtaactgagtctggccatgcattgggattgtttttctatgctggaatttggacaatattaattgcaatatttacaataattgctcctgctagtgactctaagttattcctttggattgtagcattagctattgtccctatggtatatggtgatggatttgcagcattaattggtcaaaaattcggtaaaattaaatatacagtatttggaggaaccaaatctcttgaaggatcacttacaatgttcgttgttacctctgtaatgggtgtatttgtgtggatggtattctattcaatcggttgtacaatgcctgaatttaatattgttagtatcttggcaatttctgcagttgcaacagcatgtgaagcattcagttacggtggaattgataatttaacagttcctgtaatcacttctattttatatttcttagtggctattttatag

SEQ ID NO: 6913 - DNA, 420 bp, Methanobrevibacter gottschalkii
  source 1..420: mol_type = genomic DNA
atgaaagtaaaattaattgaaaaatttgcattaggtgcttttgtaggttgttttattgtaatgtgtgtcatggttttaatatctctttatcagggtcctcagaatattcgatttagcggcattgacataataaattcatttttcgggtcaatcgttgcaggttggggatttactttttcaggatttatttatgataaagaagatttgcctttaacatttcaagttatcattcagatgggtgtcggcatgacaatattgctattaattgcaatttatcttaaatggatgccgattaatttgggtatcggtccaatagtaacttggattgcaatagcttgtatatttgccattattttctggtttggtttttatatttattattatttagttgcacgtgacttgaataataaattgaaataa

SEQ ID NO: 6914 - DNA, 1779 bp, Methanobrevibacter gottschalkii
  source 1..1779: mol_type = genomic DNA
atggataataaaaagatatttctgtctttcatattgtttattctcattgcaatttctgtaagtgcagtttctgcagtggatgctgataatgctactttggctgaagatgcaattccgactgatgcggatgttgttcaaactaaagttaataatgcaaattcaggagatactattacattggaagacaaaacatatgattttgctaatcaaactgtaacaattgatggtagggataaaatcaccattagaggtactggtaacactattattaaagggcatggtggccaaaattcaaaaacaggtgctttatttatagtatctgaaagtattggtgtaacttttaaggatattactttcattgacaccaacccaaataataatttcacttatgatggtaatgtggaaggatatggtattacttttgatggatcaggtgctgaaaatggtgttgtagataattgtagttttgcagattttaatactgctgttaatgtgaaatcttgtaattatgtaactgttaaaaacagtaaattcagtggtggttatgctactaaacttattaatgatccaactgtaaacaaagaaaagggttctaaagttgtaagtgctggtggatctttattcctcagtgttttaaattgtacttttgatggaccaatgctcgatgcagtatctatctatggtggtagtggagatgctaaaataattggaaatactttcaaagataatgtatatgctattttctttggtggtgcatctactgaaggtactttcattaatgataatactttcattgaatgtggtcaatttgttaaagatgcaaatactacttggggaggataccctgtaatcagtatagaaaaagcttctgatagtgtttacatgaataataatactttctatgcagttaataataataaattaattgcagctgaatctgctaatactgctcatggcgctccaagtactttaggcgatattaacatcactaactctaatgtaaatcttgctaatgataatgttgttgctggttctgtaactttcttacatattttaagtagaactggagacatcaatcctaaagctcctattactttaactggaaataaatatgctaaaggtgttaaagctgttgttgtatggtacaatgactggggtgttgaagattcagaaaatattgtgattccacaagctcctgaaccaactcctgctcctgttgctgtttcaacttctatttcttctgctaatttagctatttatgctggtaactccggtaagattaaactcactttaaaagatgcaaatggtgttgctgttgctaataaaactgtaaatattgtaattgatggtgttgctaaaactgtaactactgatgataatggtattgcaattttatctgttaaatattctaattctggaactcattatgctactttagctttcactggtgataatgattacactggatctattaaaacagttaaaattagcgtacttaaaaaagtcactgctttaaccattactaaaaaaacatttaaagttaaaactaaaaataaaaaagtaactactgttcttaaatctggtaaaacagttcttaaatacaaaaaggttactttaaaagttaaaggtaaaacttacactgcaaaaactaattccaaaggtattgctacttttaatattaaaatagctaaaaaaggtacctttaaagcattaactaaatttgctggtgatggtgcttacaaagcagcaagtaaatatagttatgtttatgtaagatag

SEQ ID NO: 6915 - DNA, 651 bp, Methanobrevibacter gottschalkii
  source 1..651: mol_type = genomic DNA
atggatttgattggggggtatttattagtaattttactattatttactgcaaatattgctttaatattaggcgattataaacttgataatattaaattagttgctttatcttcaatttgtttcattgtttcatttatattgatgtatgcttcaagttttttaaatgtttcattgtcttttttaattgatacttttagttatgtcttttttattatttttcttgcacttgttgttgtaataattaagtatataaaaaataataattttaaacatgcattatatctaactttagttacatttttaattacaatatttctgtttgcttctcagtcaaatctgaatgtttttaacataattgtgtactctttatttatttttattattttatttgttgtttatcaactttcaaaattattgcatcatgcaaaaatgcaatataatgtaataacaagtgaatatatgtttttattttcaatagttatttttatttttgctttaacttatgattccactaaatctctcaactatacttcatttaaggcttttttaattttaactcctacttatcagttaatttatgtgattattgcatttgttgttattttgattattggtgtatttataaatgagattaaaggaggaaattcatga

SEQ ID NO: 6916 - DNA, 642 bp, Methanobrevibacter gottschalkii
  source 1..642: mol_type = genomic DNA
atgattattcaaggaactgagacattaacttcgattattcatatattttccgaaagcttattaacacctgttgttgtgttacttgttgtttcaggagtaattatcattcttgctttgggtggtttgattaatgagtatatttcaagaaaacctattagttcaaatgatttagaaaatttagttaggagaatttcattttcaaataatgtggatcaaatgaaaagtgaaatcactaatagtaatttatttaattatcaaaaagaaattttaattagaattgctaataattatgatattggttgtgatgcaagaaaagcatttgctagtgaactaatatctgcagaagaaacaatattaataaaaaaaacgaataaaactgatattttagtccgtgttggtcctagtttaggtcttttaggtactttaattccattaggcccaggtcttgcagcacttggaacgggagatattgcaactcttgctcaatcattaactattgcttttgatacaactgtaactggtttaactattggcgcattagcatttgtagtttcaaaatataaaaagcaatggtatgaggcagaattaatagatgttgaaactcttgcagaaactgaattagaagttatcaataattggtga

SEQ ID NO: 6917 - DNA, 300 bp, Methanobrevibacter gottschalkii
  source 1..300: mol_type = genomic DNA
atgcttagaaaaaaaagaaggatttcagaatctgttgatgatgatccaatgggtggtttaaataatctttcagatgctatgcttgttttagctttaggttttttaatatttgcaatcatggcattatctgttaatccagacatgattactgagcaaacccaaacaaaagaagtttcaacagcaaatacatttactcaaaattatactgatgctggtggactggaagatagtggatatagtgaagttggtaaagtttatgaggatccaagtactggtaaactggtaatggtatcaggttaa

SEQ ID NO: 6918 - DNA, 402 bp, Methanobrevibacter gottschalkii
  source 1..402: mol_type = genomic DNA
atgaaaatgccagaaactttagattcgaaattactagcaccctgcggaattaattgcattagctgtgaaaaataccaaaatccatgttccggatgcttaataagtaatgatgggaagagcaaagctagtttgaagtgcaaaattaaaacttgttttgattccaaaagttttagttattgcggacgatgcagtgaatttccatgtcctctaatgaaaaaacactcaaagaaatatgttaaaaggcatgatttaaacactcttgaaagtgctaaaagaataaaaaccaccggtattggacgcatgatgagtcaggatcatgatgaatggttatgtccggagtgcggcggtgttattaaatttcaaactaaaaaatgtagtgaatgtggcattaaaaaagaatag

SEQ ID NO: 6919 - DNA, 741 bp, Methanobrevibacter gottschalkii
  source 1..741: mol_type = genomic DNA
atgtcaattattatttctcctgaatttaagaaattaaaaaacagattatctgatttaatattgatacatcatgaacttttattgcagatttgtccaaatattgaaagagagtatcttcttaagtttggttctcttgaatatgagctttataagaaagacgttaaattatcaatgcttaagcgaaaacttcaattgatacaaattcaaattagcactgaagaagaaattgatattgaacttattgatgaaatattggaagaggaattctttaagtataaggagaatattaaaaaacacatggatgaattaaatggtgcaatggaagagcaacacatttgtttattatcaaaaaaagatactaaaaggcttaaattaatatataaacaatgtgttttgaaactgcatcctgatttaaatcctaatttatctaatcgtgaaaaagatttatttattcaaattacagaagcatttaaaaatggcaacttgaatgcattggaatctttatattactttgttccaaataaaaaagtagaatttgaatctgaaatagaacgtttgcaggaattaatcgaatgtgaggaaaaggagatagctgagattaaagaaaaatatccatataataaaaaagagttgttattagatgataatgaaatttatgagtatgaagtcatgcttaataatttaatcactcaatttgatgatgatattcaaagatgtatggatgaaattgatttgatttaa

SEQ ID NO: 6920 - DNA, 558 bp, Methanobrevibacter gottschalkii
  source 1..558: mol_type = genomic DNA
atgtataaatatattagagatgcatggaaaaatccggatgagtcttacgtacgtgaactcatgtggcaaagagctcctaaatggagaagacaaaaagtagttcaaagaattgataggcctactagactcgacagagctagaagcttaggttacagagctaaaaaaggtttcgttttagtaagaaccagagtaagacgtggtggaagaagaaaaactcgtcgtttcaacggtcgtaaacctaaaagaatgggtgtaaacaaaattacccaagcaaaatctcttcaaagaattgctgaagaacgtgtagctaaaaaataccctaacttagaagtattaaactcttactgggtatgggctgacggaaaatataaatatttcgaagttattttagtagatccacaaagtccttctattgtcaacgataaaaaaatcaattggatttgttctaaaaaacacactaatagagctctcagaggtttaactagtgctggtaacaaaggacgtggaattaaatctaaaggaaaaggctcagaacaagctagaagaagaaaattataa

SEQ ID NO: 6921 - DNA, 423 bp, Methanobrevibacter gottschalkii
  source 1..423: mol_type = genomic DNA
atgattcataatatcaaatttagagctttcgtttatgaaaatgaaagtgttgatgaaatttctcaagctattttaaatttacttcctgaagctgaaattaatgtggaggaagctgaagggttgctggaagataggattcttattttaactggtgtcgtatctaaaaaaagatacacaaagactttttttaacaaacttttagaatctgctgatttggataagttaaacaatgatttagagtgtaaaatggatgaaaaaggaaattggtttttaagatttgataaaactgatgctctagatgaaaaattaaccattttagataaaggcgattcgattcacttaaaaattaaaattgctgcttttccagctaaaaaacaaatcgcagttgataaagtacgcaaagctatttcaggttgtgtttaa

SEQ ID NO: 6922 - DNA, 378 bp, Methanobrevibacter gottschalkii
  source 1..378: mol_type = genomic DNA
atggaaaaacaaagtaaaattcttattgttttattaatcgtttttttaatatgtgttggtgtattctggtttcagtttaacaataatgtttcaacattcatgattgtcaatgaaactcatgtaactgaaaacagttcgttttctgggatgttagtcgattcttatggcaatggcgtagcgaatcaaacaattgcctatcacgaacctggagggaatgtgggaactctaactactgatgaaaatggtgagtttactgttgaacttgccaaatatttatccaattcaacaagtgacaattattatggtgatttcaaattctctggaaatggcaaatatcagggatgcgcatatgaaggtaatgttactgtaggaatttaa

SEQ ID NO: 6923 - DNA, 1191 bp, Methanobrevibacter gottschalkii
  source 1..1191: mol_type = genomic DNA
atgactgatttgccttggggaaataaccagaatttaactgatgaagaattttacaacagagaaagcgaattgataaacatcaaaaatatcttgcattcaactggtcagggccatgccccggatttattattaacaggtataaggggagtaggtaaaacagtctttctcaaaaaactaaaaagggaacttgatggcgaatatttggttgtatatattgatttttcaaaatccaaatgttatcaaaaaaatcagatgagcattatcggattgatgggacatttcttcaaagaattgattcttgaatcaaaaaataaaggattaaacacattagacaagcagatagaaaaatatttcaaatccaatgattttaaaatcagagagtttatacggcttgacaaaatacctataccaatattctcaaaagaaacaaacgaagaaaaacttattgattttgcattaaatctgcctgaaaaaatatatgatgaaaatcaagataaaattaaaggtgttttaattttcattgacgaatttcaaattataaaagaactaaacaattacaaagaatcgtttttatggaaaattagaagctacattcaaaaccagagaaacatagcatacatattttcagggtcaatgagcctacaagacaaactaatatcagaaattgcaagccaaaacggggcatttggcggaagaatgatttcaattaacataaacccctttgaaaaagaaacagtcaggaattatttatccaaaaaaaccccgtatatccaattcactgatgacggttttgatagattttacaaattcacctctggagtcccgtcatatgtaaatatattcgcatcactgcttccgataaacgagcaactggatgatgatgcaataaaaatgtattttgataaaaaaatccaagctataagttctcatttaataaatatatgggcaagattatcttttagagaacaaaccataatcataactctacttgaaaaaccgctgagaagaatagacatagcaaatgaatttggaatatccacaggatcattaagcaattatttaaacaatcttcaaaatcaaggattaataagtctcaacaatggtttatacgagattgctgagcctattcttaaaagatggttggaattagaatttaaagaaaaaggaatttatccctacagaaatatataa

SEQ ID NO: 6924 - DNA, 348 bp, Methanobrevibacter gottschalkii
  source 1..348: mol_type = genomic DNA
atgaaaggtgaagtattttatggaaaaggaattagagaattggaaggagaataccctgatttatatgagttagtaacagatattaatgatactgtttggaatggtaaggtattggattataaaactcaaaaattgattgcaatcggtattactgcttctcgtgctgatcctagagctattaaaaaacaaattagaagtgctattgaagtattgggaattaccaaagaggaaattgtggatgttttaagggttgttttattaacatctggaatgccggcattttccaaatcacttcaaatattaaacagtgttacagcagctattgaagaagagaaacaagaagaatga

SEQ ID NO: 6925 - DNA, 933 bp, Methanobrevibacter gottschalkii
  source 1..933: mol_type = genomic DNA
atgaattcaaacaaaaaatttttctcaagaataggatttaattacttaatttatgcagtattttcattagtaattacaatgattttagcaaatattattgcatatacaagtccagaaatccttaataatataaatacatcaacaacaataacagctatatgcaattatattttaccattacccgttttcatatatttaatgggaaaattagattcaaaaaaactagaaatccataaaataaatgctagaacatttttaaaatatctctgcattacatttacattgatgtggattgggaatattatcggagttataataactaccgcacttagcggagctattcaaagcgacatatcaaatcccattcaggacctgattaattcaactggaatctggttgaatatcgtgctgataagtattatcggacctgtttttgaagaatttttctttagaaagctattgattgacagaacaattaaatacggtgcaagaacttcaatagttttatctgcagtcatgtttggactgttccatggaaatttaaatcagttcttttattctgcattaataggtggattttttgcatatgtttatattaaaaccggaaagataacttatacaatactattacatatgattattaacctactgggatctgttgtaagtttatttttaaacagtagtgtgactaacctcatcaccggtacaatcaatccatttgatttaatttttgtacttttgtacttggcaatacttataattacattaataattggtttaactaaccttttaaattataaacaagcaaaatttaatggacaaaaaacagaaatatcattacagaaaccattaaaaacaatattcctaaatctaggaatgttctgttttataatattttttacaataaaaatggtcttgcaagtgataaattaa

SEQ ID NO: 6926 - DNA, 267 bp, Methanobrevibacter gottschalkii
  source 1..267: mol_type = genomic DNA
atggtacatagaaatattttaaaaaaatgtgttgaacataagcatgcgttgctctttgcagcaggtattgcaactgcagttgttgggaaaaaagtcattgaatcaaaatctgtaaaaaatgcagcaacaaaaggcatggcaaatgtaatgtctataaaaaaagatgctgaagaatgttttcaagatatgaaagaaaatgctgaagatattgttgtagatgcccacaaggaagataaaaaagaaatttatgatgaatcacaagaataa

SEQ ID NO: 6927 - DNA, 2130 bp, Methanobrevibacter gottschalkii
  source 1..2130: mol_type = genomic DNA
atgaaatatgaggtggtgtatgataacggatctcgcctaagagttcgttctggccaatgggctttcactaaagaggaaggttatggtcttgcttcattactgttaaatcaaaattttatccatgaggtgctgacttcacatagaaatggtagtattttaatgtattatgatgaaggcattgataataaagataaaatttttgatattttggataagattggtttggatgatttatttgaagctgaacctactcaaattcaaatttctaaagaaatcagtgaagatttttataaaaaaatagctaaaatgattctaaataggggaatttataagttatttttaccaattcccgtaagaaatgctttaacagtatatcatgccatgaaatatatatggaatggttttgatagtttaactagttttaatgttgatgtggcattacttgatggtgctgctgttgctggcgcattattaaataaacattacaaacctgcaagttcaatgatgttcttattgtcaatctccgatgcactagaggactacacattacaaaaagctaaaagcactctaaaagatagcttagctttaaatattgatacagtatgggtagtaggagaagacggtgaagaaaaacaatgttcagcagtagaaattagtaagggggataaaatcaaagttcacatgggggatgtaattccagtagatggaaaagtaatcgaaggtgaaggtttagtcaatgaagcttctatgaccggtgaaccattagctgttcataaaatgaatgggaagacggttcatgctggaactgttgttgaagaaggtaatctgattgttgaagtatattcgatgaataaagaaacaagattaaataaaattattcatctgattgaaaattcagaagaattaaaagctgaaagccaaagtaaagcggaaaaacttgcagattcaattgttccatacagttttattgcaactgctttaacttactttattacaggaagcccaacaaaagcattgtctgttttgatggttgatttctcatgtgcaattaaattaacaacaccactatctattatttcagcaatgcgtgaagcatctgataatagaatgatggttaaaggtggaaaattccttgaaaattatgccaatgcagatactattgtatttgataaaactggaactttaactaatgctgctcctaaggttgttgatgtaatttcaatgtctaaaaaatacgattgtgacgagattttaagaatggctgcatgtattgaggaacactttgcacacagtattgctacggcgattgtaaaggaggctgaaaaacaaggtttaaaacatgaagaagatcacagtgaagttgaatatattgtagcacacggtattgtaactgaatatgaaggtaaacgtgcagttattggttcaagacactttttattcgatgatgagaaagtcaaagtgactaaaagtcaggaaaagaaaatcaatgagaaaattaaagaacattctgtagtttacttggccattgatggcaaacttgaaggtattatctgtattgatgatcctatacgcaaggaagcaaaatatgttatagaagaacttaaatctttaggtattgaaaatattataatgcttaccggtgacagtgaaagcggggctcgtgctggagctaatgctttgggaataacagattatagatcacaagtacttcctgaagataaatcaagaattgttgaagaattaaaagcagaaggcaggattgtaataatggtgggggatggaattaatgattctcctgctcttgcagctgcggatgtgtctgtttcaatgaaacattcatcagatatcgctcgtgaagttgcagatatttccttattgtctgatgatttatatgaccttgtcactcttagaaaactaagtactggaatgctggataaaattaataataactatcataatattgttgcagtaaatggttctcttttagttttaggtgttttgggaataatcccgccagcaacatcttcaatggtgcataatttatccacgatgttatttggacttttaagtacaagatccgttttaactgacgaggaatatattaaagatatagaagtgaaagctatttaa

SEQ ID NO: 6928 - DNA, 750 bp, Methanobrevibacter gottschalkii
  source 1..750: mol_type = genomic DNA
atgttagataattataaaaataaatttattccattgattttaccagtagttttaatatttttttggtatattataactaatgcactggcattgttctcttcatatattttgcccggaccgcttgatgtggtaaattcagcattagtagtaatagaaaatggtaaactcttgacaaatactattgatacattatataaagtatttgctggtttgattttagcatccattgtagctattcctcttggaattgtacttggatggtataaaaccttagaagatatatgtactttcgtaatcagcattttaagaccaattccaccagttgcatggattccattttccatcttatggtttggaataggtacttttccagctgtattcattatatttatgggttgcgtatttccaattttagtatatacaattgatggtgttaaaagaacagacaaggttttagttgaatctgctcaaacacttggtgctaatgactggaatattttaagaagagtagtattgccttctactataccatatatcgtttccggtttgaaagttggtattggtattgctttaatgtgtactatttcagcagagatgattggatcaagtagtggtttaggttatatgattttaattgcaacaaacctttttgatacaggtacaactgttgttggtatggttgtaattggtttgattggacttgtatttgactttgtatttagcagagctcaagataaaatcttctggtag

SEQ ID NO: 6929 - DNA, 753 bp, Methanobrevibacter gottschalkii
  source 1..753: mol_type = genomic DNA
atgtcaattgaagttaaggatatttataaaaaatttgaaactaaaaaatcagaaaatctctctgttttggaaaatattaatttaactattgatgatggtgaattagtatgtcttttagggccgtctggatgtggtaaaacaactcttttaagattgattgcaggtcttgacactccaacttctggtgaaattgttgcaaacggtgaagttgttaaaaaaccatctggtgatagggcggttattttccaacaatattcattattcccatggttaacagttcttcagaatgtaactttcggtttggagatgacaaaaccgggttctaaagaagaaaatattgccgccgctgaaaggtacttgacaagtgttggtttaattgactttaaagatagctatcctcatgaactttctggtggtatgaaacaaagagttgcaattatcagatctttgcttaatcattcacctatcttactgatggatgaaccgttttctgcattggatatgcaaaatagacatagtcttcaagaacagctaattggtgtctggaaaagatttgaaaatacaatagtttttgtaactcacgacgttgatgaagcaatctatttagcagacaaaattgttattttagacaaaaatcccggcaggattgcaaacattgttgaagtggatttggaaaggccgagaaaaagagaatcacaagaattcctcgctcttcaagaatctatagttagtcaattaaatatggatgaatga

SEQ ID NO: 6930 - DNA, 372 bp, Methanobrevibacter gottschalkii
  source 1..372: mol_type = genomic DNA
atgaatcgtgatgatttagaagattatattgaagataactattctgcagaacctgaatttccatggctgaagttcccaaattatgaagtgttccgtcatgatgataatcggaaatggtttgctctgattatggatgtttctaagagtaagctgggtttggatggggatgaaattcttgatgttgtaaatttcaagtgtgatcagatacttatagattctttaactactgaaccgggatttttcccggcatatcatatgaataaagaaaactggattactgttgctcttgatggaagcgtatctgatgaaaaaataataatgttgctggatataagctttgagttaacagcatctaataagaaaatagattag

SEQ ID NO: 6931 - DNA, 813 bp, Methanobrevibacter gottschalkii
  source 1..813: mol_type = genomic DNA
atgaacattctaatatctaatgatgatggagttaatgcagcaggaatcttagctgccaagcaggcagttgaggatttggccaatgtttatgttgtagcaccagataaaaataatagtagtgtaggccgtcgcatttcactatttaaacatttaaaaattgattcatgtgaacttgaagacggcagtccagcatgctctgtttcaggcagtcctgctgatgctgtaattgttggtgcagattatataatggatgaaaagccggatctggttataactggaataaatcaaggactgaatatcagttgtgatataacctcgtcaggtactgtttgtgccgctttggaagcagttagtttaggcattcccgcaatagctgtttcattgtttattgatccaaaaacttcctataaacaggatgaaaatggtgaatggtatatggattatgattttaattttgcaaaaaaggttttgcatgatttagtattaaaaataatcgatgaaggatttcccaaaggagttgacttatttaacttaaacataccgaccaattataaatcccaagaggttaaaattacttacttatcacataaaatgattgataaaaaagtcattgataataccaatgaagaaaaaaaggaattatttaactatcccttagacgaaaatcaagaaagtgatgatttaattatgattgcttccgatttaatcaaagaatatgaggaaggcagtgatggatacgctcttcttgttgagaagtgtcctagtctaactccccttaatgttaatatgacctcaaaaaagttaaattggtaa

SEQ ID NO: 6932 - DNA, 735 bp, Methanobrevibacter gottschalkii
  source 1..735: mol_type = genomic DNA
atgatagtaatgtcaattgcaggtgttgatccatcagctggcgcaggtatctatgccgatttaaaaacatttcaagctattggagtttatggaaccggaattgtaacagcacttactgcacaaaatccatataaattcttttcagcttcaccagttttaccagaatacattgaagaacaaatggattcagtgcttgattcatatgaagtagaatttatcaaaactggaatgttatattccccagaaattattaaattagtttcaaaaaagattaaggaatatgacctgaaagcagtagttgatcctgtaatggttgcaacatcaagtggaaatctaacaaaagaagacattgcagatgcatttaataagtatttacttccaaattcaatattaaccacaccaaacatagctgaagctgaaaaactaacaaaatttgaaataaaaactaaagaagatgcttttaaagcttcaaaaaggatagtttgcaataacattattacaggaggtcatttagacggcctaaatactatcaatattgatggtgaaattacaactataaaacaagaattaataaaaacagacaatttacatggtacaggttgtaatttatcatcagcaattgttgcatatctcgctaaaaacaatgaacttgacacatcaatcataaaagcattgaattatgtgtatgaaggaataaaaaatggaaattatggaacattaatagctaaaatataa

SEQ ID NO: 6933 - DNA, 672 bp, Methanobrevibacter gottschalkii
  source 1..672: mol_type = genomic DNA
atggataatatctatgcaataattccagtcagtaagttcaaaaatgctaaaaccagactttccccatttttatcagaagaagaaagggaaaaactattaaaggtaatgcttcaggatgtaactgacactttaaaaaagcatgtagataaaatattcattattagcagagatgaagatgttttaaaatatgcaaaaagcttaaacttagatactatcctggaaaataaagattcaaacctgaataaagcattaaaacaagctatgaaggaatgcaaaggaaaagtaaggaaagttattattgttccttctgatgttcctttgattggaaaaacaaatatttcaatcttaattgaagcttccaaaaacttagatttcattattgttccgtcaaaaggtggtggaaccaatatgattataatgaagcctatggcaatacctactaaatttgaaggattcagttacagagagcatgttaatgttgctgagagaaaaaaattaaatccgcaggttcatgattcatttttcatggcattagatgttaatacagcgcaagatttaggtgaaattatgattcatggagaacatactcataccaggaaatacttgaaagaacttaaagttaaagtagaaccttaccgtggaactgaacgtttaaaagtaacaagaggatag

SEQ ID NO: 6934 - DNA, 1404 bp, Methanobrevibacter gottschalkii
  source 1..1404: mol_type = genomic DNA
atggtggaaaattttgatgaatggtttcatgatattttagaaaatgcgaatattactgattcaagatatcctattaaaggaatggcaatttggatgccatacggttttcaaattagaaaacactcaatgaacattattaaaaaactactggataaagatcatgaagaagtactttttccaatgcttgttcctgaaagtgaacttgcaaaagaaggaattcatgtaaaaggattcgaagatgaagtatattgggtaactaaaggtggtcaaagagaattaaacgaacaattagcacttagacccaccagtgaaactgcaatttatccaatgtattcattatggattagaacccacatggatcttccaattaaatattatcaaattgtaaacacattcagatatgaaacaaaacatacaagacctttaattcgtgtcagagaaattacaacatttaaagaagctcataccgctcattcaactaaagaagaatcagatgaacaaattcaagactttattgcaatttataaagaattttttgatgaattaggaattccatacctaatttccaaaagacctgaatgggacaaattcccgggtgccgattatacaatggcttttgatgtaattatgcctaatggtaaaaccttacagataggcaccatccataacttaggtcagacttttgcaaaaacatttgatataacctttgaagataaagatggagaacacaaacttgtatatcaaacctgtgcaggagtatctgatagagtaatcgcttccgtaatcgggattcacggagatgaaaccggtttacgtttaccacctaaagtatcaccaaaccaggttacaattattccaatcttatttaaaaaaggaaaagaagaagttttagcaaaatgtgctgaaataaaagcccaattagaagaaacaggacttagagtaaatatcgatgatagggacataaggcccggcaaaaaattccatgattgggaattgaaaggaacaccattaaaacttgaacttggacctagagacttggaaaataatattacagtagctatgagaagagatgaaggaaaaaaaatcgaaattgctcttgatagctcattatcagataatgttattgatctattaaataaaacccaagaaaacttatctgaatctgcttggaacttccaaaaatcccatgttaaattcacagaaaggttagatgaaattaaagatcttgttgaaacaggcaatgttgttaaattccattggtgtggagacgaagctatcggtagagacattgaagaaaaaacaggatatgacatattaggtatccaggaagaaatatccgaaggtgaatgcatctccggtaaagggaatgcaaaatacattgctttgatggctaaaacatactaa

SEQ ID NO: 6935 - DNA, 1044 bp, Methanobrevibacter gottschalkii
  source 1..1044: mol_type = genomic DNA
atgactaataggaaaatacaaatgcctcgtgaagtttacatagatccgggtattgtacatgatacggctgaaatttgtaattctttacatttgggtaatgattttttaatagtaacaggttctcatacttatgatattggtgcaagacctgttattgaaagcttagagaaaaataatttatcttatgatgtaattaaggttgatgttgcttctgaagaatccatttcagaagttgaagaattaatcactccagaaactactgttttaggtgttggtggaggaaaagttattgatgtagctaaattatcttcattcaatcagggtgtatactttgtatctatgccaacaacagcctcacatgacggtatcgtatctcctttagcatcaataaagaatccaaacacttcaatatctgctactgcacactccccaatagcagttattgctgattctgagattattgcacagtctccattcagattacttgcagcaggttgtgctgatttaatagctaactttacagctattaaagattgggaattggctcatcgtttaaaaaatgaagcatttagtgaatctgcagctgcattatccataatgtcagctcatttaatcactgataatatagctaatatcaaacctaatcttgaacccagtgcacgtattgttatgaaatctttattcagtggaggaatggcaattagtattgctggttcatcacgtcccgcaagtgggtctgaacatctgttttctcatgcattggataaaattcttgataaacctgctttgcatggtgaacaatgcggtattggtacaataatgatgatgtatttacatggtggtgattggagagttattaaaaacgcattggaatcagttcaagctccaacaactgctgtggaagttggtatttctgatgaagaaattattgatgcattagttatggcgaataaaatcaggcctgaaagatacactattttaggggataatggtgtttctcgtgaagcagcctatgagcttgcttataaaactgaggtgatttag

SEQ ID NO: 6936 - DNA, 438 bp, Methanobrevibacter gottschalkii
  source 1..438: mol_type = genomic DNA
atgattacattaataggtaaagatttggctaaagaaggtcaagaatttgtttttttaggtccggctgatgaatgtgaaaattgcagatttaaatcatcttgtgttggaaacttagaattaaacagaaaatatgttgttgtaaatgttaaggaaaatgagcaaaaatgcccgattcactccagtggacttgtaattcctgttgaaattgatagggcacaaattgatgtattgactgcttctaaaaatatttttgaaggatcaacatttacatttaatgctcctgattgtgatgaggtatgtgaattccatgatttatgtttccctgagggattacaagaagatgacaaatgtcttgtcttgaataacaatggcaaacataatggggaatgcaaaaaaggattcaaactcaataaacttactttaggatttgtgatatga

SEQ ID NO: 6937 - DNA, 690 bp, Methanobrevibacter gottschalkii
  source 1..690: mol_type = genomic DNA
atgatgaaaaatactagtggtaacagttccagtaaaaagaatgcaggttataaagctgcagagtatgtagaagatggaatggttttaggattgggaactggttcaacaactcactttttcattgaaaaggtgggcatgagaatcaaagaggaaggaataagcataaaaggtattccaacttcatttcagtcattattgattgcaaaacaatggaatattccaataaccactttggaagaaaatgatattgatttatctgttgatggggcagatgaagtggacagagaatttaatttaattaaaggtgggggagcagctcatacaaaagaaaagatagttgattatgctgcaaaacaattcattgttattgtggatgaatcaaaatttgttgataaattaggtgattttcctgtacctgtcgaagtattgcctgatgcatcccgtatggcaattaaagagttagaggacatgggggctgaatgtgaaattagaatggctcaaagaaaagatggtcctgtaatcacagataatggtaattttgtaattgatgctaaatttgataaaatagaatcaccaagacaccttgaaattgatataaatactattcctggtgttgttgaaaacggtatatttacccaaatggttgataaagttattattggtactgatgaaggtactaaagaattgtag

SEQ ID NO: 6938 - DNA, 222 bp, Methanobrevibacter gottschalkii
  source 1..222: mol_type = genomic DNA
atgcctattggtgctggaatgccatttgatttaaaagatatgagttacaaaatagcaattattttcggagctttacttgtaatttatggtgttttgtggttgcttgctgagttgaaaataattcctgcaatattatttgttatatttcctcaaattgtattgattttaattggaatttgcattatttactttgctttcgatcgtaagaagaaatattactga

SEQ ID NO: 6939 - DNA, 2985 bp, Methanobrevibacter gottschalkii
  source 1..2985: mol_type = genomic DNA
atgaataaaaagggatatatattagttatatcattagttttaattatgttattttgtttaagtacagtatctgccaaagatacagatttaaatgcaaatacattagaaaaaagtaatgatgtgactatattaaatgaaggcgatagcaatgttagtcaaatacattcacaacataccgttaaagttggatcagatagtgattccatccaaaatacaattgattgtatgaacgatggagacatacttaattttgaaaccggaacttacaaggatatatgtatttatgtaaacaaaagcattacaataaatggtaatggagcggaattaataggatatgacactccttctaaaagcaacactcctgaaattatctacaacgataccggtaaaggaggatatgcaattggaaattttgctactttatacattgttaaggctgacaatgttgtaattaatggtttgaaaataaccggcggtgcaaatagtacttccacttattctaatgcattaatatatgcaatgaactcaaaaaatttaactttcaaaagcaatgttttagagggatcttcttggggattatacttccaatactgcactgacggacatgtaacaaacaacatcattaaaaatcaggcagtgactggatttttaaactttggatctgcaagaacctcaattgaaaacaacaaagtaatcaatgctaaaaaccatggcatcgatgtaagacatggtacaggaccaaacgttaaaattattaataacacagtaattggttcaaaagaaggaatctatttaatgcattctacaggacatgttgcagctaacaacactttaataaactgcactattagttcaattagttgttacggttctaaaaatattaaattaaatggaaataaaatgcaaaaatctagaattggcgttttactcggaggaggatacgagaacatcactgttggtgaaaacatgtttactttagataatttaccatatcctccaacatttgcatattatattgcagaagcaaaatctgaataccagaatgatgaagatataatgggtacttttagtgacagttctttatatactcctaactttgtagcatttactggaattgacgtccctaaagatattggaattaattatgatcccattttagaaaaaacaggaccagaatggatagttccagaaggagcttcaagttctgagattcaaaatatgattaataatatgaacaatggcgatactctaagtttcactcaaaatgctatttacaatgaaatttcaatctacacagacaaaaacattaaaatattaggtaacaatgccactttagtcggatgcagtggaattaactttaacaatacccactacttggataatgtagctgaaaaagttagaaaatcaactaatgagggtggatatgcaataggatacaatgcagtattatacatattgaatacaaccaatgttgttgtaagtgacttaaatattaaagcacaataccctaaatatgattctagcaaagttgaaacaactactaatgagtataagacagtggggatttatgccgattccaattcaggattagtaattactggttgtgatgtaaccggtgcttcttggggtattttccaacagtattgtaaaaatagcaccattatcagaaataatattcatgacatttacactacaggcattatgaactttggttcacctaatggaattattgccggaaatacagttactgatgctgccaatcatggtatcgatgtaagacatggtacaggaccgaacgtgactatctttaataacacaatttcaggtgcaaaagaaggaatttatcttatgcactctaaaggacactctgcatacaataacacgattctaaattgtaaaatcagtgggattacagcctacggatctggaaatgaagtgctttttaacaataccatttctggaagtagacttggtattttgcttggaggaggatattacaatataaccattggtaaaaatacattcaagttagattcattaccatttccacctacttttgtaacttatcttgcaagagcggataataaatatcaatctgaagatgatgtcattagaacttactccgataaagaaactgcagcagttgatgctaacgacataactgtcggatataaaaaaggtgaattcaacattactttaattggacaaaatggtgataaattatcatatgaagatttatccatatctattaatggtgctaatttcacagctaaaaccgatgaaaagggcattgcagttattcctctttcattaacaactggaatttataatatgaccattaaatttgcaggtaatgacaattatgcaccaataaatgtgactaaaactgttacagttaatgatgacagaattaaaaccattttatctgcaactagtaaaaccctttatttaactatcatttctaaaggatattcatacaaagtcacatttaaagatatgaatggaaaagcaattgcaaataaaaaaataagttttaaaattgatggtaaaacctatagtgcaactacttcttcaactggaatagctaatattaaaataaaagctacaactactggaaataaaaaagcaacaattagctttaagggtgatgataaatatgctccagtcactaaaactttaactgtaaaagttataaaacaatcatccaaaatcagcgcttataaaaagacttttaaagtaaaaataaaaactaaaaaatacaccattactttaaaaaacaataaaggtaaagcaatttacaaaggcactgtttatattaaagttaaaggcaaaacttataaagcagttaccaattctaaaggtaaagctacatttaagattaccaaattaactaaaaaaggtaaattcactgcaaccatcaaatattacgggaacaaatattacagttccaccagtaaacaagtattaataagaacaagaagataa

SEQ ID NO: 6940 - DNA, 1716 bp, Methanobrevibacter gottschalkii
  source 1..1716: mol_type = genomic DNA
ttgaataaatctttaaatattttattcatatgttttgttgctttattggtcatttcatgtgttaatgcggcaaatgacaatccaaataattctgatgatatttccaattatcaaataagttctgatttatcaaatactgaaattcaaacaatgttggataatgcaaaagaaggagatcaatttgaatttactgacagggaatataagaatatttctttagttgtagataaaaagttgaatattgtctctaaaaagaattcaaatattcatacttcaaataaaatagctgataaagcaagaaatttgggattaaacaattctttcggattttatttcacttctaatagtggtggaagttttttatatgggttaacaattatatctaatagtgattacggtatcgttgttgataaatctgataatacgacaattaaaaatgttgttataaaaaatgggaatgttggtattttggttaaaaactccaataatgcggatataattcagaataatatttcaaaagcaaattccaatagtattcatttagaaaatgtatctaaatcaataatttcaaaaaatacaatttcttataatgggagatctggaatccatgcttcaaatatatactattgtaatgtaactaacaatactgttcatcataataaatttaatggaatttcattgtacaataaaacaactggaaatatcattaaattcaatttagcttatgaaaaccctaatggaatttatataaattcacagtcagattttgatgttgttaattcaaatacattcactaaaaatcgacgtaatactgattatgaattaggtgctttcgaatcaggtaatggactgctatttggtgctgattttaaaacggcaaaagagggaaagtcttcaagattggaagttaaatataatgttttaactcataatgagggataccaggctaaaaacaatccggatcttccaacatttaaacttggggataactggtttgactcaactgatgatgagaatacttttgtttgtccaatgcttcttgcaggtattatgaaaatgggaactatatctgttaaaaacggttttggtcttcagatgtatgatacaaatggtgaagcagtcacagaatttggtacatttgacaccacagttaatgttaatggaaaccaatatacagcaaaatttgtaaatggtaaagcaattattgatgccaatctggatccggataaagaatatgaaattgaagtaattattggggataaaccagttaaatttacttatagaacctcatctggtgataaaaatgatgaatcagattcacaaacatcaacagatggtgacttcggaataaatcatcatgattttattgatgctatgggaaatgatgcttcaaaaggtgttgggaactcagaaaatggaacttcaagtgctcattttgcaaattcagaacaatctggagctcatggaactaatgcttcgggtaattttcaagattcatctgataatggtgatagtgtattaactaatgggaatgctaatgctggagattccagtaaaggtgaacaatctgaagaaggaaaagcatatgaaatagttcctcaaagcaaaatttcaaaagaaatcactgatacttcaggtattattgtattaagtattgtttctattctgggaatgattatttatgggtactggaggaaacctgaaatagagaattaa

SEQ ID NO: 6941 - DNA, 405 bp, Methanobrevibacter gottschalkii
  source 1..405: mol_type = genomic DNA
atgaaagttaaatctgtttctttaaaaataagtagtaatgaaaaatttgaaataattgatattacatctaaaattaatgaattaattgaaatcgatgaaggcattgtatctattttttcaaaacattccacatcagctattgttgttaatgaaaatgaggatggattattaaaagatttggaagttagtcttgatgatattatttcagataaatttagctattcccatgatatgattgacaataatgcaagatcacatttaaagtcttttttattgtcttcaagtgaaaatttgcctataaaaaatggcagactggatttgggtacttggcaatcagtattttttgtagaattggatggaccaagatatgataggacaataattttgacaatggttggtgaataa

SEQ ID NO: 6942 - DNA, 1659 bp, Methanobrevibacter gottschalkii
  source 1..1659: mol_type = genomic DNA
atgccagttataacatttaaatatcaagatttaaaagatttaggaatcaatatggaaaaaaatgaactaatagacactttaccaatgatgtctagtgatattgaagactttaatgatgaagaaattaaagtagaattcttccccaacagaccagacaacttatctgttgaaggggtggccagatcatttaaagggtttattggtcaggaagtgggttttccagactataaaattgaagaatctggagaatatgttatcgtggataaagatgttgcagcaatcagaccatacattggatttgctaaaattaataatgttgatttttctggagataaattaaaatatattatggatttccaagaaaacctccactgggtaattggaagagacagaaaaaaagtagctataggtattcacaatgcagatgccgtaaatggtccatttaaatatattgcaactccaaaagatgcaaatgctttcgttccacttgaaaaagatattgaaatgactcctgatgaaatcttaaccgaacatgaaaaaggtaaagattatgctcatttaatccgaaattttgataaatacccattgattcttgataaaaataataatgtgttgtctatgccaccaattattaatggagagttaactaaacttaaagaagacacacataacattattgttgatgtaactggtactgatgcaaaagcagttaaccaaacattgaatattatctgttcctcatttgcagaagttgggggtcaaattaaatccatggaagttaaatatgaagataaaactctcgtaactcctgatttaactccacaagaaatgaatgttcatgtagatactgctaatgagttaattggtggaaccgatttaactgcagaagatattagagaattattattaaaagcacgttttgatgctgaaattattagtgaaaacgaaataaaaactattatcccctcttacagagtagacattttacatgaagtagatatcattgaaaatatcgctgtacaataccatattaacgatgtgatagctgaacttccagatatcaatactgtagcttatgaaaataactggtttaaatcagaagcgaccattcgtgaagtaatgattgcaatgggattccaagaagtgatgagtttaatgcttactaacgaagaggcacattacaagaaaatgaaccaagaagaaaagcctcatgttcaagttgcaagacctattacaattgatagaaccatgattagaaccagcttaattaattcacttatggagtttttagaagacaacaaacacgaagatttacctcaaaagatatttgaaatcggagatgttttatacttagatgaaactaaggaaaataaaactgtttcttctaaaaaattagctgcactcgtttgtcactccactgctaacttcagtgaaataaaatcaattatgagcagtgttttatcaaatctaggatacactatggatattagtgatagtgagaataagaccttcattgaaggaagggcagctgatgtggttggtgaggctcaaaaaggtataatcaaaggattctttggtgaagtatcacccgaagtcattacaaattttacattggactatccagtaatcgggtttgaaattgaatttattaacaaataa

SEQ ID NO: 6943 - DNA, 357 bp, Methanobrevibacter gottschalkii
  source 1..357: mol_type = genomic DNA
atgcaaatgatatggttttatgttgctattgttttagctataagtgatatattacacaccacactcatgtggaaagttttaaataacttttatatattattgggtgtttttattcaacaatctacacattctacatggcagacttgggtaatacatgaaataatggaagctgcatttcattttatcattttatcaatagttttcttaaatccaactattggactgctagcagccctaattcattttgtaatagatgtatcccatacagtattaatacgtaatatgggtgaattagaacatagagctcttcattttgttgttgaatctctattcttcatattaatctatggattatag

SEQ ID NO: 6944 - DNA, 2712 bp, Methanobrevibacter gottschalkii
  source 1..2712: mol_type = genomic DNA
atgtcaaatgaagaaattcctaaagactatgattttaaaaaagagaagttttgggagaaaaaatgggaagatgaagatatctacagatatattggagatggatctcgtcccagatacataattgatactcccccaccatacccaacaggacttattcacttaggtcatgttttaaattgggtttatattgatatgaatgcaagatatagaagattgaaaggacatgatgtattattcccacaaggatgggattgtcatggtcttccaactgaagtgaaagttgaagaaactcatggtattaaaaaaaatgatgtttccagagctcaattccgagaatattgtgtcgatttaactacaaaaaatattgctagtatgaaatctcaaatgaaagcaatgggattttcacaagattggaatcgtgaatttattaccatgactcccgaatacagaaaaagaacccaatattcttttttaaaaatgtatgaggaaggattaatctatcaaggcattcacccggtaaattggtgtcctcgttgtgaaacagctattgcttttgcggaagtagaatatagtgataatactacatttttaaactatgttaacttcccgcctgcagtagatgattcatatgatgatattgtatcttcacaatcatctggtaaacaggctagtccgaatgatgaaggtattttgattgcaactacaagacctgaattaatggctgcttgtgtagcagttgtaattcatccagaagatgaaagatacactcatcttttaggtaaatatgttgaagttcctttatcacatcaaaaagtaaagatcattgcagatgaagaggtggatcctgaattcggtacaggtgcagtaatgatttgtacctttggtgataaaactgatgtaagctgggtaaataaatatgatttagaaatcattgatattatggatgagacaggcattttgaccgaagctgctggaagatatgctggaatggatttgccaagtgctaaaaaacaaacaattgaagacttggatgctgaaggttacttattaaaacaagaacaagtagaccaaaatgtcgggcaatgttggagatgcaaaactcctattgaaattcttgttaaaaaacaatggttcgttgctgtaagggaattaatcaaaaagaccaaggatgcagcagaagaaatgaactgggtaccggaacacatgaaatctcgtatggtaaactgggcagattctatggaatgggattggtgtatttcaagacaaagaatttttgcaactccaattcctgtatggtattgtaaagactgtggtaaagtcattttgccggatgtggaagatctgccaattgatccaactcaagataaacctaaacatgcatgtgaatgcggatgcgaagaatttatccctgaagaagatgtacttgatacttggatggattcctctatttcaccattatctattgcaggatggcctaatgaagactatattaaccacttcccagcggatattcgtccgcaggggcatgatattattcgtacttgggcgttctacacaacacttagatgcttagctctcacaggtcaaaaaccgttttcggatattgtaattaatggtatggtatttggtgaagatggatataaaatgagtaaatccagaggaaatgtaattggtccggaagaagtcattgaacaatatggtgcagatgcacttagaacttgggctgcaaacagtgtaccgggatctgatgtaatatttgattggaaagatattaaacacgggtatcgtttcttaagaaaattctggaatgcattcagatttatcagcatgcaaatttttgatgaaaaggtatcctatgatgaaattaaagatgatttagggcctctagatttatggattttatctaaactcaacaacttaaataaaaatgtcgacaaggcatttgccgaatacaactttgcagatacaattagctcaattgaaggatttttctggcatgatttctgtgatgaatatattgaagctgtaaaatacagactatacactgatgtatcagatgaatctaaaagagcagctaaatacactttaagatgtgtagttgaaacatccttaaaattgcttgctccaattgttccattctttgttgaagaagtatatcaatacttcgataatcaatctatccataccacttcatggccggaagtaattgaagagttaatcagtgaagaaatggaagttaaaggtgaaactacagttgaattaattgatgaagtaagaagatttaaatcagcatcaaaaattccattaaatgcagaactctcagaagtcaatgtatacacatccaacaacgatttaattgatgtatttaatcagtttgatgatgatattaaaggtactttaaaaattaacaatctagaaattagttctggaaaaccagaagttcatgaaaaaacaattgaagttgagccggatatgtctcaaatcggacctaaattcaaaggagatgctggtaaaattattggatatttaaagtctaccgacattgaagaaattgccaatgttttagatgaatctcatgaacttactattggtgaaattgttgttcctgaagacatgttaaatatcaaaaaagagattgttggagcatcaggtaaaaaggttgatatcctacagtctgaaaacttagacatgattgttgaagtaattagataa

SEQ ID NO: 6945 - DNA, 630 bp, Methanobrevibacter gottschalkii
  source 1..630: mol_type = genomic DNA
atgagatatctagtacatgttcaagaagcagtttctgaaaataagaaattaatattgcttatgtcagttatttttatcatatctgttgcggtaggctttatttttcaagacattatttataaagaaatatcaccaatttttgaaaagatggttagagagtttgttaatgatcctaatagtaatttaggatttgaaatattcattaataatatcagagcatccctacttacatatgttctatcagtattttttgctttaatggcagttttttcgttaatattaaatggaattatccttggtgctgtaggtggagcatacatgtccgcagatccagtttacaatgggataatgtttttggctttaattcttcctcatggaatttttgagattcctgcattaattttctcatctgttgcaggaattcttttattcaaattcatattcaaatatctcaaaacatttgtcaaaagggatgatttgagtttaaaagagatattggatatgcataaagttatcattaaacattcaatcattttattgattctgtcttttgttttatttgttattgcagcagctattgaaggaaatttcactggtgcttttgctaaatggattcaaactttattttaa

SEQ ID NO: 6946 - DNA, 165 bp, Methanobrevibacter gottschalkii
  source 1..165: mol_type = genomic DNA
atgactaagattaaaataagattatttggtattgttagaaatttaggtttactggatttatgtgttcatttttatccggaactgaatcaaaaaacaacagaatgtaaaaaaataggtgatattatacataatagaaatattaaaataaagtttgaatccatttag

SEQ ID NO: 6947 - DNA, 405 bp, Methanobrevibacter gottschalkii
  source 1..405: mol_type = genomic DNA
atgggattactcgataaagtagtaggtcatgcagaagtaggtggagacacccaaattgtagaagaatatctcgctccaggtgaagaaattatccaatcattccatttcctaagagatgcagttatattgactaattatggaatatatgacattgatgtacagggattaagtggtaaaaaagtgcaagttaaattttatcctaaaaaaacaattaaaacaatttcgtttgaaagtgcaggctcttttgattttgatgttgatatcaaaatcggagtaagtaacaatccagttgttttaatggaaggcggagcaatgaatatgccaatctcattcaaagttccaaaagcacaagctgaagaagcaaaacaaatcatacacttagtaaaagaacattacttattataa

SEQ ID NO: 6948 - DNA, 1317 bp, Methanobrevibacter gottschalkii
  source 1..1317: mol_type = genomic DNA
atgattcttaaggtaaaaaatatttcaaatattggtggtgaggttaaggcacctccatctaaaagttattctcacagggcagttatattagcttcattagctaaaggcacctctaaactttatgatatgctattttctgaagatactttagcatctattagagtgtgtaaggcattgggtgctcaaattaataagaaagatggttatttggaagttataggaactaatggcaggcttcataattcctgtgatgggccaattgaccttgcaaattcaggaactactctcagattgatgacatctgtatctgcattaagtgataatgaagttattttaaccggtgatgaatctcttaagacaagaccgatgggtcttttgatggatgctttaaaaccattgggagtcgaaaccgaatcattgaatggtgatgataaagcaccaatattgattaaaccgggttatcttggtggtgaaactaatatcatgggtaatgttagctcacagttcatctcatcaattttaatatctgcaccattgtctaaatgtggtgttaatctatatgtgctgcccgaatttaagtcaaaaccttatgtttatatgacttgggacatcatgagaaaattcggcattagatcagttaaggcttattatttaaagcatgattcttgtaatcaggaacaccaaagctgcagaattgatgaatttaaaatcaaaaaacaggagtatattgcttgtgattatactgttgaaggagattattcctctgcatcttatttgcttgcattgattgccattaatggtggcagtgccagagttaaaaatttattcaggacatcaaaacaaggtgataaatttattttagatattcttcaaagaatgggtgcaaccattgtacgtggtgatgattatgttgaaattacatcaaagggtaatttaaaggcgattgatgttgatttatccaatgctcctgatttattgattactgttgcagttctggcggcaatggccgaaggaacaacaaatattacaggtgttgctcatgcaagagtaaaggaaacggatagaattgatactacttgcagggagctggaaaaacttggatgttgcttggaggaacatgaagatgggatgagcataactggtggtgtatcatcaggtgttgttgattctcatggagaccacaggctcgcaatggctttttccctaattggccttaaacatgacattaaaattacaaatggggaaatatttgatgtttcattccctgatttcatagaaacaatggcgaaacttggatttgaattggagttggtatga

SEQ ID NO: 6949 - DNA, 630 bp, Methanobrevibacter gottschalkii
  source 1..630: mol_type = genomic DNA
atgaataaggaagaaaggataattagattagttgaatgtttggacaatacttttgagataaggacatttcagaatcatgatccctatcaggtgttaattagaactattctctctcagagaactcgtgatgaaaacacagatcaggctactaataatctattttctaaatataaagatatttatgaagttgcagaggcaccgattgatgatgtaaaggaattgatcaggcctgcgggattttataatgtaaaggccgcaagaattcaggaggtttcacaaattttaattgaccagtatggtggtgaagttccaaatactgttgaagaaatgataaaacttcctggtgtgggtagaaaaactgctaattgtgtaatggtttttgcttttgaacttcctgcaattccggttgatactcatgttcatagaatttcaaatagattgggtttggttgatactaaaaatcctgaagatactgaagttgaacttactaaaattgctcctaaagatttgtggatcaagttaaatgatttgatggtgcagtttggtcaaaatatctgcaagccaatgtctcctcaatgtgagatttgtccttgtagtgaaatttgcgattattttaaggaaaatatttga

SEQ ID NO: 6950 - DNA, 948 bp, Methanobrevibacter gottschalkii
  source 1..948: mol_type = genomic DNA
atggtaaatgttccagaattaaaaagaggagtacttgacagtgttgttgatgcgattggaaacacaccaatcataaaattgaacaatttgactaaggatttggatgcagaaattgatgtaaagatggaagcattcaacccaacaggcagtgtaaaggatcgtgttgctgttgcaatgattgaagatgcagaggaaaaaggattgcttaaagatgattctgtaattattgaaccaactagtggaaatactggtattggaataggttttgccgccgctgcaaaaggttataatgtaatattgactatgcctgaaaccatgtctgttgaaagaagaaagcttttagctatctatggtgctgaaattgtattgactccaggttcggaaggtatggatggagctattgcaaaggcagaagaattacacagagaaaatcccaactcagttattttaggtcaatttgataatgaagctaatgtggccatacactacaaaacaactggccaggaaattttaagagatactgaaggaaatgttgattatgttgttgcaggggtaggtactggaggtactgttaccggcattggtaaagcattaaaagaagttcttcctgatgttaagattgtcgctgtggaacctgaagaatcacaaacattggccaagggtgcaaaaggacctcataagatccagggaattggtgcaggatttgttccgtcaatttatgattcagatgttattgatgagattattccagtacctagtgatgaagcaggaaaaactttaattgctcttgctaaagaagaaggtatctttgcaggtatttcttcaggagctgctacttgggctgctttacaattggctatgcgtaaagaaaataaaggtaaaagaattattgctatcttaccggataatggtgaaagatatctctctgtagaatggttatttgaataa

SEQ ID NO: 6951 - DNA, 714 bp, Methanobrevibacter gottschalkii
  source 1..714: mol_type = genomic DNA
atgtttaataatttgagggctgagattaaagctattaaggaaaaggatccggcggcaaggtcaacattagaaattttcttatgttaccctggattttatgctttattgatgcataggattagtcattggctttggaatcgttctttaaaacttctcgctcgtatgaattctaatttagctagatttataacgggcattgaaattcaccctggtgcaacatttggtaaacgggtgttcattgatcatggtatgggtgttgttgttggagaaacagcaattgtaggtgatgatgtattgatttatcagggagtaattcttggtggaaccagtacggaaaaaactaaaagacatcctactgttgaaaaaggagttattattggtgctggtgctaaagtaatgggcaatattactattggggaatattctaaaattggtactggtgctgttgttttaaaggatgttcctcctgaatctacttgtgtcggtgttcctggtcgtattgtgaaacgtaaaggcgtacctcatgaaaaagttgatttagatcacaataaacttccagaccctgttgcagatgcgattattactattaataagcatcttcaagaaaatgatgagcatattaaaattttgtttgacaaaaatgaaatctgtttaactgatgatattagggatgaacaagaaaccctagaagatttatttaaaagagaggagtga

SEQ ID NO: 6952 - DNA, 375 bp, Methanobrevibacter gottschalkii
  source 1..375: mol_type = genomic DNA
atgaaaccgccttgtgaaattgtagtctggtatgtaatacctgctattagatcagaattagcgaaagaattattgaatttaggaatgaaacaaaaagatgtttcagaacttatggatattactcagccagctgtatcccaatatattactgacaaacgtggcagtggaattaaactagatgataatgttagggacatgattaaaaattttgctcgccaattgtctgtaggtgaagctactaaagctgatttgatttcaacaacatgtaaaatttgtaatcatgttaaattatctgacgttttagatcagcttaatattgacaagtctgagcttggtgaagattgtcaatcttgtttgggttctgaagtaaattag

SEQ ID NO: 6953 - DNA, 1347 bp, Methanobrevibacter gottschalkii
  source 1..1347: mol_type = genomic DNA
atggatgtctattcaactttaactcgtagtaaggagaattttgtaactattaataaaaatagggttaacttatttgtatgcggtccaactgtttatgatgatgctcatattggtcatggaagaacatacatttcttttgatacaataaaaagatatttggaatacaagggttatgcagtattttatattcaaaatattacagatattgatgataaaatcattaacagatcaaaagaaagtggaattccagcaagcatcctagctcgtaaattcgaaaaaagatacattgaagacatgcacaaattaaatgtcaatggtgttaatttatttgcaagagcaactgatcatgttgatgaaatattggatcaaatacaaagattaattgataagggatttgcttatgaaactgaagatggggtttactttgaaattgataaattccctgaatttggtaaactttcaaacagaaacgttgaagaattagaatcacacagagatattgtagaaactactaaaaagaatcctcaagattttgcactttggaaaaaacgtattgatgtagatgaaccaacttggccatctccatggggtgaaggaagacctggatggcatattgaagatactgcaatcactgaatattactttggctctcaatatgatgcgcatggtggaggattagatttgattttcccacatcacgaagctgaaattactcaaatggaagcagtaagcggaaaagctccaatggtaaaattctggttacacaccggatttttaaatgttaatggcgaaaaaatgtcaaaatcattaaataacttcattaccatacgtgaattacttgaagattatgaaccagatactttcagattcttcgtactttcaactcattataggagtcccattgatttttcaaaagagtcacttcaccaatctgaaaaaagcttagatagaattagaaaatactatgaacttttagatgttgaagttgatgaaaataaatatgaatgtgatgttttagctcctcacatggaagaattttttaatagtatggatgatgactttaacactccaaaagctattgcagctatttttggattaataaatgatactaaaaaagaattatctgaattttctagtgaagataagagagctattaaatcatttttagatgatgcatcccatatttttggtgttagctttgaagctgaagaagtaaatgctggattggatgatttgcttaatgtaatttctgaagtcagatcagagttaagggcaagcaaacagtatgatttatctgataaaattagagatgagctgcaaaaattaggttatgaaataaatgattaa

SEQ ID NO: 6954 - DNA, 210 bp, Methanobrevibacter gottschalkii
  source 1..210: mol_type = genomic DNA
atgttgaaagttcggatatggaaattattattaggtgtcctgattttatccaaatcttttgaaaaagagattatttcagaagatactgcaaattcattatggattgctatggtaaataatggtatacatttgcctaaagatttgtttttggattattgtagtagactttatgaaattgattgtgaaaagttcttaatggattatttttaa

SEQ ID NO: 6955 - DNA, 1299 bp, Methanobrevibacter gottschalkii
  source 1..1299: mol_type = genomic DNA
atgaataataaagattatggtttagcaacattaggtgtacgtgcaggtcaacaaccagatcctgcaactggggctcaagcagttcctatttatcagacaacttcatatgtatttaaagatgcaagtgaagctgctaggagattcgcccttcaagagtttggtcaaatttattccagacttactaatcctaccagcgatgtatttgaagcaagaatagctgctattgaaggtggtaattcaggtctttcaacatcaagtggtcttgcagcaatttcatatgcaattttaaatgtaactggtcctggagacaacattgtttctgccgacaacctttacggcggtacttaccaattatttaactatactttcaaagatttagcacgtgaagtcaaatttgtaaattcacaggatttgcaagctttcgaagatgcaattgatgaaaaaacaaaagcaatttatgtggaatctattggtaatccaaaattagatgtacctgactttgaagcattagcagaaattgcacattctcatgatattccattgattgtggataacacggtgggtgttggattagttaggccattattacacggagctgatgtaattgctgcttctgcaactaaatatgttggcggtcatggaactgctgttggaggatatattgttgactccggtaaatttaactggggtaatggcaagttcgataatttcacaaaagcagatccaagttatcatggattagtattttgggatgcatttggtgatgttccagaattgggaaacattgcatttactgtaagagcaagggcaagacttttaagagatctgggagcaactcaagcaccggtacatagcttcattttcttacagggacttgaaagtttagatgtacgtgtaaaaagacattctgaaaatgcactcaaagtagctaaatttttagaatcacatcctaaagttaactgggtaaattatcctggattggaatctcatgcaacttatgaaaataataaaaaatacttaaaaaatcattttgcaggtatcttaggatttggtgttaaaggtggagaggaagcaggtaaaaaggtcattgaaaacttaaaattgttctccatacttgcaaacattggtgatgcaaaaagtcttgcaatacatcctgcaagtacaacacaccagcaattaactcctgaggaacaggaagcaacaggtgtaacacctgattttattaggctttctattggtttggaagatgctgatgatttaattgaagatttaagtcaagctttagattgtattgactga

SEQ ID NO: 6956 - DNA, 1206 bp, Methanobrevibacter gottschalkii
  source 1..1206: mol_type = genomic DNA
atgtatttagacaactcagctactacacaagttagcaaagaagtttttgaagaaatgaaaccatatttcagagaagagtttggaaatccttcaactctttataaacttggtcgtgaatctaaaaaagcgttagatcaagctcgtcaaagagtggcgaatgccattaatgcaaagcctgaggaaatctatttcaccagtggtggatcagagtcagataatttggcaattaaagggattgtttttaaattagcaaaaaaaggtaaacatataatcacaactgaaatcgaacatcctgctgtcaaaaggactttacaattcttggagtctttggattttaaagtcacttatctgccggtttatgaaaatggcattattaaaattgacgacttgaaggaagctattactgatgaaactattttaattagtgtcatgcatggtaataatgaactcggcaccatacagccaattgaagaaatcggtaaggttgctcgtgaaaaaggaattaattttcataccgatgcagttcaaactttcggtaaaattgaagttgatgttgaaaaattaaatgtggatttgcttgctttatcttctcataaaatcaatggaccaaaaggtgtcggagcattatatatcaaaaaaggaactcgtttagaaccgttaattcatggtggaggtcaggaaaaaggaattcgctccggtactgaaaatgtccctggaattgttggatttggaaaagcatgtgaattagcagcagatcaacttgatgaacactatgaaaagttaacatcaatcagaaatgaaatctctgataaaatattaaatactattcctgaagcttatttaaatggtgatgcagaaaaaagattgccgaatctacttaatttcagatttaaagctattgaaggtgaatctttaattttactgcttgatgcaaaaggttatcaggcttcaactggatctgcatgttcttctaatacattagaagcatccccagttttaacagcattaggattggatcctgttgatgtacatggatcacttagaatatcccttgctcctgaaagtgaagaatttgatgtagatgattttgttaatactgttgccgaatcagttgcaagattaagagaaatgtcaccactctggaatcaggaaattgattatgatggtgtaatgtgtagaaaaaatgataattgtaaaaggtgttaa

SEQ ID NO: 6957 - DNA, 372 bp, Methanobrevibacter gottschalkii
  source 1..372: mol_type = genomic DNA
atggattattcagaaaaagtaatggatcatttcgcaaatccaagaaatagtaggaaaatggaagatgcaaatggggttggaactgttggaaacccgacatgtggagacttaatgacaatttatattaaagttgaagataacattattaaagatatttcattccaaacatttggttgcggtgcagcaattgcaacaagtagtatgattactgaaattgctgttggaaaaacattagaggaagcattaaaaatctcaagaaatgatgttgcagaagaattggatgggcttccaccagttaaaatgcactgttcaaaccttgctgctgatggtcttcaagctgctatcgaaaactattatgaaaacaatcaataa

SEQ ID NO: 6958 - DNA, 372 bp, Methanobrevibacter gottschalkii
  source 1..372: mol_type = genomic DNA
atggcaaattttgtaaaatgtgataaatgtggaagtattttaggtatgtttgttaaaggtgaaggagaagtctgcagtccagatttacttgaaattcctgtacaaaccgaaggagacaaagctcctaaacacaaacctgttgttgaagttgacggagacaaattaactgtaaaagttggagaagttgctcatcctatggatgatgatcattatatccaatttgttgctgttgaaattggttctgaattatatgcaaaatgcttcaaaccaggggatgttgcagaagcaactttcactattggtgcagacaaatctgctgatgctgtagcatatgcattctgtaatttacacggactttggtccagtgaataa

SEQ ID NO: 6959 - DNA, 519 bp, Methanobrevibacter gottschalkii
  source 1..519: mol_type = genomic DNA
gtgtctagttatagtaaattaataatttttattttagttttattatttatttctgcagctattttctttattgatagttcaatggatagtattaatagaaccatgcctggtgttagtgattctattgttaacggggataaagagtataatgaagctgttcaattagtcaatgataaaagttttgatgaagcaaagactaaagcagtatctgcagagaataactataataatagtttaattaaattaaatggtatacgaaataatttttcttctgatataaatgaagttcaagaagaatatattggcactgttattaaagaattggaattaaaaattaatgctgtcaataatctaaaagaagctattgactgttttaaaatcaattcaaattacacaggtacgaattatgcttcaaaagctaatgatctaatgtatgaggctacagagtaccagcatgaacgtaattcaatagtaaaaaataattcaaatttattcaaacaacaaaattttgttatatga

SEQ ID NO: 6960 - DNA, 2283 bp, Methanobrevibacter gottschalkii
  source 1..2283: mol_type = genomic DNA
atgaccaaggagtttttaaagttgaaaacaaagtgtccaaaatgtaaaggaattggttcagtagttgtggactataaagaatgtaaagcctgtggtggaactggctatgaagatgatgcttttaatattggtaatcattttaaaggtgtaaacagtaatgcaaaagcgaaatttgacttaggcggagaagaagatattccatgtgaagcatgcaatggaaaaggtcaaatcgaagtttttgaagaatgttctcattgtcatggaactggtcagattaatgtatgtagagattgcgggaaatcaattggagatcaacatgatttatgtgctgagtgcgaggagaaaagaaaattggaaaaagctaagcacgataaatttgaagctcgtagaagtgcggcccgtgatgtttacatcttagattcattatgtaaaatgagtgatattgacaaagacaaattatacaaaggaagaattacaagggttgaaaaatatggtgcttttgttactctaaacaataatgtttggggacttatgaggggtgacaactttggttataatgttggagatgatgtaattgtatatgttactgcaattaaatctagagaaagaaaaatagacttagctccagctcatgttgaatcttataatattaaaaaattaactaaaacattcccaaggactttaataggtaaactcgaagagaaaaaaggtaggatggttagaattgatggggaggttcaacagatccaacaaacttccggtccaactatattcataattagtgatgaaactggttctagtgaaattgcagcgtttgataaagcaggtgagagatcatatccggaaatcgaactgggtgatgcagtgcaagttgtcggtgaagttaatgaacatggtggaaagacacaaattgagtcatcttcaatggtaaaactcaacgaagaaaatactgcaaaattacataaattaattgacgatgcattaaacaagaaagctgaaccacaacatgttgatttcttagttgaaagtgatattttaaacagacttaaacctaagatgagggaagctgcacaaaaaatcagaagagcaatacttgatggtaggacaattttactcagacaccataatgatgcagatggtatttgttcaggtgttgcaatggaaaaagctattattccattaatagagaaagtaaatcctagcaatgatgctcaatattattatttcaaaagatctcctagtaaagctccattttatgaacttgaggatgttgttaaagatttatcttttgcactggaggatcaagaaaggcatggtcaaaaattgccattaattgttcttttagataatggatcaactgaagaggatattgttgctttgatgcaagccaaaatttatgatatcgaagttgttgttattgaccatcattctcccggtgaattacttactaaaaatattcaagatggaaaaatatatggagctacagttgcagttgatgaatatgttgactgtcatgtaaatccttatttggttggtggagattcacagcttactgcaggagctcttgcaacagaagttgcacacttaattaatccggatgtaaaagaagtaatcaaacatctgccggctgttgcagcattaggagataaggctgaatgcagcgaggctgaccaatatttggaaattgctaatcagaaaggttttgaaagagaacatttagctaaaattgcagaatgtgttgactttgaagcatttttcttaagatttatgaatggccgaggaataatggatacaattcttgctgttgataatattgataaacatgaaaagatgattgatgcattatataaggaatatcaaaaaagagttgacactcaacttaaagcaacacttccgaatattaaaagaactcaatttgaaaacggaatttactttaatctcattgatgttgaaaaatatgcacataagtttacattccctgctccaggtaaaacttgcggttttgtccatgataatgtaaaacaggagttaggtgaagataaacctattgtaacattagggcatggtcctgattttggagtgttcagagctactgatgctgttaatgaacaatatggatttaatgtaaatgaaattgtatctaaaatgatggattcagtgcctcaagcaggtattgatggaggaggtcatgaatgtgccggatccatcaaatatattgagggattaggggaagaagttttatcaaaagttattggagaaatccaatccttatctaaaaactaa

SEQ ID NO: 6961 - DNA, 894 bp, Methanobrevibacter gottschalkii
  source 1..894: mol_type = genomic DNA
atgactttagagaattattgtaaaaaatgcggccataggattcttccaaataatccatattgtcccggatgcggatgtaaaacaatttacacagaaaatgacgaatcttatgtttttacaccaccggtacatgatattggattttttaatttttcaattgatttttctccatatattatgagtaatcgggatgatttcaaatatgatatatgtcattgcggatacctaaatgatgtaaccaatgaattttgttatatgtgtggtgcaaaaagattccatagtaaactagctagatttttaaaaaacagatccaaaccaaaatttaatttggataatgttttatgtgaatgcggtgctgttaactctaaagagaattccttttgtgaaatgtgtggaaaacagctgcatgaacatgaaactaaaatatacaaaagtaataattacagtaattttaatttggaatttaagaattctgttttctgcttttgcggtgaagaaaacgaagaatcttctcaattctgtagaaactgcggattgccgttgataaattatggtcatttatctgacatggcattattatgtgtttgttctactttaaatgatattaactcttctttttgtattgaatgtggattaaacttaaaaaaagagaattctcttattgtttgtgtttgtggacataaaaatcctatttcggctaaattttgtcaaaattgtgaaaggccattaaatcctaaaagattaattaactcaaaaatcctttgttcatgtggggaaattcttgactggaatacagagttctgccctaattgtggcaaaaatattaaaaataggatgattataaggaattctattaacaatacagtaaagagtcttaaaagtatatttaggtag

SEQ ID NO: 6962 - DNA, 978 bp, Methanobrevibacter gottschalkii
  source 1..978: mol_type = genomic DNA
ttgaaaaaatgtgatgtttgcggaactttaaattttaaagataataattactgtactcattgtggcaataaatttatttttgagcatgtctgtccttattgtggttcaattaatgaggattatgcgaatttctgtgctaattgtaatgggcaaatcaatccaatttctattaatgatttcgatatattatttagtgaatttaatgaaaattgtttattaaatgctaaaataagtgatgaaaaatataatgatttattaagaaatatttttttaagagcagattttacagaaattcatggcaataccataaaagataaaattctaaacttagctagtattttcacgcaatgtaaacctaaatcaagaggctatgaaagaggatttatatttttaggcaattatatttattatgatgatagattagacgaatctgttcaaattgcaactattattcatgaattagcacattatttaatattcagtattattgaatccttattgtgtgatatatttaatgtaaaaacatcaacaacattacaaagcttcatatggtattttttaatgattcctgaatttaaaatcatgaatgaatactgtgcacatactgttgaaggcagattcattccatatggatatcagaattatggttcttttaatctattggtaaaaaacacatcttttgatgaagattctataaaaaccatggaaatgttcggtaattcatttgcaaatgaaataatcatttatctggaaaaatatattggaaatgatttaagacaggaaataaaattacaatataaaatggatttaaaaagtccgagttatgattcaatattaatggaaactgatgagtgttttaatttaaatgataaaaataggatgttattgaaaattttgtatgatgtttttaaggaagcttcaaatccaaatgttatatgtgagttaaaaaatattaaagaggggattgatttaaattaa

SEQ ID NO: 6963 - DNA, 297 bp, Methanobrevibacter gottschalkii
  source 1..297: mol_type = genomic DNA
atgggaaatgaaaaagacgaacttttgaaattaacttcatatgttcaaatttctaaatatagagaaaaaacactcaaatccattggtgatgatgtaaaaatacccactaacatcgcaaaagatagtggaattagaactaatcatatttcaaaggttctaagtgaattaaaaagcaaagaaattgttgaatgtataaatgaagaagctcgtaaaggaagattatacagattaacagatactggaaaggacgtattagaaactattaaagtaaaagaggaaaaagaaaataaggattaa

SEQ ID NO: 6964 - DNA, 612 bp, Methanobrevibacter gottschalkii
  source 1..612: mol_type = genomic DNA
atgaaatgtaagtattgtggtattgagaataagaaaagtgctaaattttgtacaagttgtggtaaaccactaaatgaaagtcccgaacctaccggagggaactctaaacttatcataattgcattaattgctattataataattcttgttggaactattggattttttgtattgaacaataattttaatagtcatgatagtgagattccaaataatacagtttcttctcaggaaagtaactctgcaaatattcaagattccgataatggtggggatgtcaaaactcaggtgacatcatctcagacaactaactctaaatcatgggagccgattggaagttattcaggttcaggttcaggttctaaaacaattacggtacctgaaggtaaaataaaagtggaattttctgcatatcctattaaaaattatgctactaattatttaacagtttccggatctaatggtgagtctggtggagtagattggggttctcatagtgctgttaagactaaatctgattcatttatctatacttccagctcttctgagacatttactattgattattatgaaactgtaagttgggaagttcatttttacaggtatcagtaa

SEQ ID NO: 6965 - DNA, 711 bp, Methanobrevibacter gottschalkii
  source 1..711: mol_type = genomic DNA
atgttttttgatctgaatattaaagggagtacattagaaaataatatcaaattagctaaagaagcttctttttatggttggaatcatattaatttttcatataatgcaaacaactttttaaatgcattaaattttaaagatgagttgaataaggcattgggagatatcattgactttgattatactttagaaatcaaatcgtcaaacattaatgatattcggaagtctgttaataaatttaggaataggtcctcatgtatctccgttgttggcggtgatttaaaggtcaatagagccacattagaaaatataaaaatagatgttttatcaagaccatatcttagaagatatgattgtggtttaaatcatgtacttgcaaaggaagcagaaaagaataatgtagcagtcgagttatgttttaaggatgtattgaaaagctatttgtcttatagatcaaaaattctttctaattttaaagatatttatacattgtatagaaaatttgactttcctttggtgctgtcttcaagagcggaatctgtatttgatattagaactactcatgattttattactttttttaaacaaaccggtttaacagatgcagaaattaataaatcctttaaaacagcagataatattttaaaatacaataagaatagggaaaatttaattttgaagggtgttatgagggttacagatgaaacttaa

SEQ ID NO: 6966 - DNA, 357 bp, Methanobrevibacter gottschalkii
  source 1..357: mol_type = genomic DNA
atgaaacttaaggtattgccacctacacttaggaaaaataataggtatcttactgtagatgttaaggttacctgtcaaattacaaaagatgatttagttgcaattgtctgggatgcatgtatccgttttcagggggaacttaacactgctaattttaatttatgggttatgaaattctttgaaattgaaaaacgtgatgattattataggtatagatcaattatcagatgtcaacgggattatgttgatgaagtaaggtcttcttttgctttgaccaatagatatggtaataatatgatttcaattactactattggattgtcgggtactataaaatcatctggaaaatacatttag

SEQ ID NO: 6967 - DNA, 768 bp, Methanobrevibacter gottschalkii
  source 1..768: mol_type = genomic DNA
atgcaacctttacaaaatgctggatatgatagagcaattactgtatttagcccagatggaagacttttccaagtagaatatgcaagagaagctgttaaaagaggaactacatctataggtgtaaaaagttctgaaggtattgttttagctgttgataaaagaactacttctaaattagttgaagcatcatctattgaaaaaatattcaaaattgatgatcacattggagcagctacttcaggtcttgttgctgatgcaagagctttagttgaaagagcaagagttgaagcacaaataaataaaataacttatagtgaacctattcgcgtaactagcttatctaaaaaattatgtgacatgttacaattatacactcaaaatggtggagtaagaccatttggttctgctttaatcattggtggagtatatgatggtgtatgtaaattattcgaaactgacccaagcggagcattaattgaatacaaagctacagctattggttcaggcagatctgcagctatggaaatctttgaagaaaaatacgaagatgatttaacattagatgaagctattgaattagcattaactgctattaatgaagctactgatcatgatactgtatctaataatgtagaaatagccgttattaaagtcgatggcgaaaaatatgtaaaactttctcaagatgaagtacagaaatacattgatgaagtacttgttgaagaagaggaagaagagtctgctgattctcaagaagatgaagaataa

SEQ ID NO: 6968 - DNA, 702 bp, Methanobrevibacter gottschalkii
  source 1..702: mol_type = genomic DNA
atggtaaatattgatgaagctattatcgctaaatatgaatactgtggtgaacattttgagatattggttgaccctgatttagcagctgattttagaaatcctgatggcccagatgttgccattgaagatcttttagctgttgaagaaatttttaaagactccaaaaaaggggataaagcttctgatgaagctatgaataaaatatttgaaactactgatcctattgaagtttctaaaattatacttgaaaaagggactgtacaattaactgctgaccaaaaaaggaaaatgcaagaagacaaaagaaaattagttattaataaaattgctaaggaagcagttaatcctcaaaatggtttacctcatcctgtccagagaattgaaaatgcatgtgatgaggcccgagttaaatttgatcctttcacttctgttgaccagcaagtacaaactgctcttaaagctatcaaaccacttattccaattagatttgaaagagttaaagttgctgttagattacctggagcatctgctggaagtgcttattccattattcatggatttggtgaaattattaatgaagaatggcaacaagatggctcatggattggtattattgaaatgccgggtggtcttcaagataagttttctgcaaaaatggccgaaatttcaggtggaaatgcagaaactaaaactattaaataa

SEQ ID NO: 6969 - DNA, 921 bp, Methanobrevibacter gottschalkii
  source 1..921: mol_type = genomic DNA
atgatatatgtggaaaataaagatttagttattcctggtcagatattagctgacgatgaatactattctggaagaggtacctttaaagagaatggtaaggtttgttcttctttaatgggacttgtttctttgaggaataaaaaacttagagttattcctcttaaaagtaaatatgttcctaaaaaaggagatgttgtaataggtaagattagtgatgttagattctcaatgtggaatgtagacattaattcaccttattctggaattttacctgcttttgaagtgttcggtcgtgaaaaaaaagaactcaataaagtctatgatattggggatgttctatttttaagagttgtcgatgttgatgaaatcaaaaaggcaaaactcggtttgaaaggaagaggaatgggtaaatttaaaggaggaatcatcgtagatattgctccaactaaagttcctagattgattggtaaaaaaggttctatgatcaacatgattaaggataaaactaattgtaaaattgtcgttggtcaaaatggtcttgtctgggtaaaaggtgacaaggacatggaacagcttaccaaaaatataattcatttaattgaagctgaagctcatacttctggtttgaccaataagattaaaaacaaattatatttagctattgatggggaactgcctcctgaagaagctgaagaagagcaagattttgttttggaaaaacctaaacttcaagattttaaagaagaattagaacaagaagaacgcgcaaaacatgaagcaaaagaaataaaagaaaaaggagataagcctaatattgctgaagttatcgaggagttaaaaagaaaaaataaaagtaaaaaagataatggattatcttatggagataactcaaataattcttttatattgaataataaataa

SEQ ID NO: 6970 - DNA, 696 bp, Methanobrevibacter gottschalkii
  source 1..696: mol_type = genomic DNA
atgtcagagtttattagaaaggatggtaggaaatatgatgaattacgtcctattaaaattgaagcaggtgtacttgaacgtgcagatggttcagcttacttggaatttggtggaaataaaattttagtagctgtttatggtcctagagaatcttatattagaagattgcttaaaccaaatactggagtaattagatgcaggtataatatggctccattctcagtagatgacagaaaaaggccaggaccagatagaagatcatctgaaatttctaaaattacagcggatgcattaaggccagctttaatgttggaaaattatcctcgttcaatgattgatgtttatatagaagtaatagaagctgaaggtggaactcgttgtgctggaattacagctgcttctgttgcacttgttgatgcaggaattcctatgaaggatattgttgtaggttgtgctgcaggtaaagttgatgatgaagttgtacttgatttatctgaatatgaggataaagaaggtcaagcggatatcccaattgctataatgccaagaactggggaaattactttattacaaagtgatggtgacttaactgaagaagaattccaaaaggctatagatttagctatggaagggtgtcttaaagttagtgaacttcaaaaagaagctttaatgaaaaagtattctacagaacagtga

SEQ ID NO: 6971 - DNA, 786 bp, Methanobrevibacter gottschalkii
  source 1..786: mol_type = genomic DNA
atggatatagtaccagaaattacaagacaaagtattgctgaccttatcaaaaatgataaaagggaagatggtagggatttaactgaatatagggatattactattgaaactgatgttatctctaaagctgaaggttctgctcgtgtaaaacttggtggaactcaagtcattgttggtattaaaccacagcttggaactccattccctgatactccggatttgggagttttaatgactaattgtgaaatgttaccaatggctgatccttgttttgaaccgggacctcctagtgaagattctattgaacttgcacgtgtggttgataggggtattcgtgaaagtcagttaattgatttggataagttatgtgttgaagaaggaaagcatgtatggatgttgtttgtagatttacatattattgataactgcggaaatctttttgatgcatgtgaattagcagtcatggctgctttaaaatctactaaattgcctgttgcaaatattgttgatgatgaggtagttattagtgatgatgaaacttttgatttaccaattaataatgaattagcattatgcacttttgttaaaattgctgataaaatggtaattgatccaacattagatgaacaaagagttgcatgtgctcgtttgaatgttggtgttactaaagatggtcacatctgttcaatgcagaaaggtggcgaagaacctttaactaaggatgaaattttctattgtgtaaatactgcaatgggaaaagttaatgaattaattgaaaatctttaa

SEQ ID NO: 6972 - DNA, 630 bp, Methanobrevibacter gottschalkii
  source 1..630: mol_type = genomic DNA
atgagtaatacaattaaaaatgatgaaaatattaaatcttgcatcattttatgtggtgggcaaagtagaagaatgggtcaagacaaaggttcgatgattattcaaaataaacctatgataaaacacatactttctactttaaacaagcatatcgatgaagtaataattgttttaaatgaccaagtaagagttgataaatatgctaaatttatcaatcctgaagaatacacctattccatcacattcctaaaagataaaattaaaagtaaaggaccactgtccggaattatgactgggcttggtgaaataaaaagtgattacgctttaattttaccatgcgacagcccatatgtttcagaagattatattcaaactattttttcacagatagatagtgattatcaagctattgttccttatcatgatgaaaataataaattgaaaacatcagagcctcttcattcaatctataaaaaagataccattaccgaaattgaaaaactagttaatgaagatgtattacatattaaaggattaatagaaaagataacaacaaagtttattttaattgataataaaaaaatagaaaaaaaagaatttagaaatcttaatcgtccagaagacatttaa

SEQ ID NO: 6973 - DNA, 762 bp, Methanobrevibacter gottschalkii
  source 1..762: mol_type = genomic DNA
atggatgaacatgagaaatggaaaattaaattttcacttttaatggttgttttaataatcattatttatggatcaaattacctcgtactaggagacggagaacatattatttcatatgtttggacacacttaggttttattcctgtagatattctcgttgtagcattcttacttgaaggaattatcgaaagaaaagaaaaagaagcaatgcttgaaaaattagacatgctcatgagtactttcttctctgaattaggtaatgatttaataactcaattaagtactgctaacagacataaagcaagtactgccagtttaaaatcaattaaaaattgggatgacgaagattatgaagataaacttgaagaacttaaaaattccccaattgaattcacagcaaatattgcaccagaaaatagagagaagtttttagaggatttaagagaattgcttgttaacaaaagagaatttatccttaatttaataaataacccaaatctacttgaaaaagaagaatttactagtttgattaatgctattcttcacttagatgaagaattagagcacagaaaagatttagctttagtaaatgatattgactttggacatttaaatggagatatgaacagagtatacaatattctagtacatgaatgggtttattatttaaaatatcttaacaaacatcacccatacatgattgcattaatgatacgtactaacccatttgacgaagatgcaagtgtatatgttacagaataa

SEQ ID NO: 6974 - DNA, 564 bp, Methanobrevibacter gottschalkii
  source 1..564: mol_type = genomic DNA
atgttagatgataaggattttattaaatcctgtgatgtgccgggacctacaaaagaagctattagggctataattttatataaatcagaagtaacatctaaagacaaagtcgtcgattgcggatgcggaactggaggaattacttgtgaattttcccaaagagccggtgaagtaatatcaattgatacagacccagaagcaattgatgtgacttcaaaaaaccttaaaaaatttggtcttggagataatgtcactttaattaatgataatggctcaaaagcattaaaaaatattaaagatattgatattgccattgtgggaggcagcggcagacaacttgaaaatatcttagatatcattaatgaaaacttaaattcaaaaggtagaataattattacagctattttagttgatacaaaggttgaagcaattaataaactcaaagatttaggatataatccaaaaataatggaagttaatgtttctaatggaagagttcttgatcgtggtgttttaatgattagtgaaaacccaatagcaattattactgctaaaaaaagataa

SEQ ID NO: 6975 - DNA, 549 bp, Methanobrevibacter gottschalkii
  source 1..549: mol_type = genomic DNA
atgatagttgtcggaattactggagcaagtggagtaatatatggaataaaactccttgaagctctaaaagaattaaatattgaaagtgcattagtgataagtgatttagctaaagttgttattgaatcagaaacagattatacatttgaggacgtaataaaattatcaaacacatattttgattttcatgatttaactgcatctataaatagcggatcatttaaaacagatggcctagtcatagtaccatgcacaatgaaaactttatcatcaatagctaatggatatggggcaaatacaataactagagtggcagatgtcagtttaaaagaaaaaagaccaactattattgtccctcgtgaaactccacttagaagcattcacttacaaaatatgctaacattatcacaagaaggagcaacaattttaccagcaatgcccggattttactcaaatcctaaaacgattgatgatcagatcaattttgttgttggaaaaattttagactcgttaaaaattgaaaataatttatttaaaaggtgggaataa

SEQ ID NO: 6976 - DNA, 1227 bp, Methanobrevibacter gottschalkii
  source 1..1227: mol_type = genomic DNA
atgagtgaaaaaaagaaatttatcagagatagtgtctatggagatattaacctaaacgattttgaagtaaaaattatggatatgccgcaattccaacgcctaagacgaattaaacagttgggattgattagcttaatttatcccggtgcaacccatactagatttgagcattcaattggaacaatgaatttaggatcaaaacttgcagaagaacttgatttgaaaaaagatgagatagaattaatcagatcttcatcattattacatgacattggccacggtccgttttcacatgtatccgaaggagttctatcggttcctcatgaagaattaacaaaatttgttgtcactaagacatccatgagagaattacttgaagaaaaattcgatgttaatgaaattgtagatattgttaatggaaaaggatatcttggcccgatcgtttctggtgaactggatgttgatagaatggattatcttttaagagattcacataataccggtgttgcatatggcattatagactatgaaaggattatatccaatttgaaattagaaaatggattaatattagatattaaaggagttcaagctgctgaaggagctcttgtttcaagatacttcatgtaccctagtgtttaccaacaccacacaactagaatcgtcaattcaatgtttagaagagctttaaaaaagattattgatgagaaaataatcaatgaaaaggatatttacaaatatgacgataccgacatgattagcatatttagacattgcgacaatacatttgcaaatgacattatgaacagattagacaatagacgcataatgaaaagagtgaaaacaataaggctcaataatttcaaatttcctgaaaaaatgtataaaatcaaagcaaaaacattaagaaaagctgaagaagaaattgctgaagattatggtcttgataaagattatgtttttataaatattgctgaataccctcgttttgatgaaatgaaaacacaagttaatgtagatggaaaattatatccattgacaaaaatatcaaatattattggtgcattaagtaaagcaagatttaatatacctgacataagtgtttatgtagacaatagcgaaagatccaagtttgataaattcaaattagaaaattacttagaattacctgagattgacagagaaaagttccatggaattcattatgaccagattaaattaatatag

SEQ ID NO: 6977 - DNA, 288 bp, Methanobrevibacter gottschalkii
  source 1..288: mol_type = genomic DNA
atgaaaggctcagttaaagcgaaattaattgtatttatggttattgcactacttgcattcggtattagttctgcatttgctagtctaataataagtgattcgcctgattcatacaaattgattcccatcaaaaatgattcatttgaaccgaactacattaataaagtcccgactattcttccgaaagttgaaacaaataacactacaaatattactacaaataaaactaattataacatgaccaatttgaattatacaaatcagtgggttgaaacatacgaaaattaa

SEQ ID NO: 6978 - DNA, 1218 bp, Methanobrevibacter gottschalkii
  source 1..1218: mol_type = genomic DNA
atggttatgtttagtgcgggtgacactgcttgggttcttgtttgtacacttcttgtacttttgatgagtattccggcagtagcattcttttatggaggattaagcaaaagaaaaaatgttcttaatacaatttttttaacttttattgcattttcaataattagtgtaatatgggttatttttggttatcaatttgcatttggatcagatattaatggattaataggttcaccaactaatttcttcttacaaggaattggaattgatgacttaagtggatcaattccaacattattatttgtcatgttccaatgtgcatttgcaggattaacttgtgcaattatgtctggagctttggttggaagaatgaaaacaaaagcttgggttattttcactgtattgtgggtatgtcttgtttatgtccctattgctcattgggtatggggaggaggatggctaatgcagatgggtgcacttgactttgcaggtggtgcggtagttcacattaactcaggtatttcagcattggctgttgcattagtattaggaagaagaaaaaacacatcattaattccacataacttaggatatgctgttttaggtgcagcactactctggtttggatggatgggattcaatggaggatcaggcttagcagcaaatggacttgcagcaaatgcaataatagtatctaatgttgcagcagcaactggtcttattgtttggacaattattgatacatatcttgttggaaaaccaacagttttaggtgcaatctctggtgcggttgcgggacttgtaggtatcactccggcagcaggatttgttgatgtatatggagcattaattattggtgctgtagctccattagtatcttactttgcagtatattacttaaaaccaaaacttggttatgacgatgcattagatgtatggggaatacatggtatgtctggtgtgtggggtgcagttgcaactggtatatttgcagtgcctgcagtaaatgaagcagcaggattgattgctggaaacgcaaatcaggttgtgattcaagtgatgagtgttgtagctacaattgtttatgcatttacaataagttttattcttgctaaagtgttagataaagctatggatggaattagagttgaagaaagtgatgaaattggtggattagacaataatcttcataaagaatctgcatataatttcaattcataa

SEQ ID NO: 6979 - DNA, 339 bp, Methanobrevibacter gottschalkii
  source 1..339: mol_type = genomic DNA
atgaaacgtatcgttgcaattataagacctgaaaaatttgaagatgttaaaagagaattaatcgaagtcggctgtgagggaatgacagtttcagaggtaaaaggaagaggaagtcaaaaaggcataagggaatcctacagaggttcaaatttttgcattgacctaattccaaaaacacgtattgaaattgttgtcaatgatgacagattagatttaattgttgataagattattgaaggagcttatacaggaaacattggggatggaaaaattttcatacaatctgttgataatgtaattagaattagaacaaatgaacatggggatgaagctgtgtag

SEQ ID NO: 6980 - DNA, 612 bp, Methanobrevibacter gottschalkii
  source 1..612: mol_type = genomic DNA
atgattcaaatggctaaaaaaaatattttagctttaataatacttattctgattatcattatttttggaatgaatctgtttaataatactgtaaacatctatcttgatggggaaaatgtaagtgttgaaacacaaacttttgaagatatcgattctaacagtttaaacaaagatatctgtagttatacattaaatgttatgaataatacaacatccgatgtggaaactttaaaaaatggagtagaaaagctttgttatcaacatggtcttgaagatgctgaaataaacattgattcaagtttaggacatgatcagatcccaattattgtccatgttgacggaacatcaatgcttccaacattacaaaacggacaaacagttttagtaaataaaactcatgattttgaagttggtgatattgttgttgcagaatctaaggaatatggtggaattattaaaagggttgacaaaattgatgaaaataaagttcatttaataagtgacaacaaaaatatttcatatgagtatattgatggagcactatatcaaatcaaaggtataacaacatgggtagatatttctgatgtcaacggtgtggttattgattattaa

SEQ ID NO: 6981 - DNA, 678 bp, Methanobrevibacter gottschalkii
  source 1..678: mol_type = genomic DNA
atgtattctcagacaaaaatcgcaattccaatttttcaaaatgattataaaaatgtaattgaagtagctaatgactgtatcaaaaagggagcagatgttttagaattcagaattgatgctcttgaaaatccaaatattcgtgaaataaaacaaacaattgaagaaattaattttccaattattgctactaacagaataattacagaaggtggattttttaaaggaacagaggaagaaagatttaacatattatatgaatgttgtgatttagttgattatgtggacattgaacttcaaagtaacgacgaatacattaataaaattcatgacactggagttacaaccataatttcttatcatgattttgaaaaaacacccaaattaagtgaaataacatatattgttgaaaaagaacaggaattgggagatattgccaaagttgcatttatgccacaaaaccttgatgacactttaacaatcttagccgttctttcccattgtaaagatacaattgccatttctatgggtgaattgggaagctatactcgcattatggcttcaaaatttgattcaccaattacatttgcagccgggagtgatgttacagccccaggacaaattgacatcgaaactatgaaagcattactcaatatgaatttaaatataatggatgaatga

SEQ ID NO: 6982 - DNA, 726 bp, Methanobrevibacter gottschalkii
  source 1..726: mol_type = genomic DNA
ttgaaaattactgcaataggtgcagatatatcaaaaaacgatgtatcttgcagtactatgctagtagaaaatattgaaaaaagcctttataaagttaaaaaattaggtgcaagagatgttgctttaactaatgtcacaggtgatgatgttgttgtaagcgcatttgttgaagatgatttgcttgaaattgtaaatgaaggtattgttaatgttttaaaagaaagtgcagagaacttaggggatttatctggaatttcacaaactcctgaaggtgctggtgaaggaatttcatatgccgaatcaactgttagaaaagatagatatcctgatgctattgttttaggttttgatacatatgggggggaaccatttgttgcagatgttgctaattcaaccatcgatgctgcaaaaggcatgaaaaatttaactgatgtttcggattacatcgaatctaaaataagaaaaatacctggtgtcggttatgtttcaccagaaaccgatgatcctgttgttgtagctaccgttgaaaatatagaatctgttggtgtaatagctagtgcaatgattggggctgcactcggaaataaaaatgtgtatttagttaaaagaggaacaacttgtaatgtattaccaggtagtgtaatattttcagctactgcatttatgaatgggaatataattgatttggctgttccatttgaaaataaaactaggatattaagatag

SEQ ID NO: 6983 - DNA, 864 bp, Methanobrevibacter gottschalkii
  source 1..864: mol_type = genomic DNA
atgattttattaaataaagatacaaaatgtttagttcaaggaataactggcaaacaaggttcattccatacagaacaaatgttaaattataatactaatattgttgcaggaattactcctggtaagggcggacgaatgtttttggaccagattccaatttttaactcaatagaagaagcaaaagaagaaactgacattaatgcttcaattatttttgttcctgcaaaatttgcaaaagatgctgcatttgaagcaataagacacttggatttagttgttattatttcagaacacattccagttcatgacagtatgcagattatggcatatgcaaaacaaatgggaacaaccattattggtccaaatactccgggaattatatctccgggaattggcaaattaggaatcatgcctactcatatctttaaaaaaggtaatgtcggcttaatttcaagaagtggtacattaacatatgaaattgctaatgaacttactaatgctggaatcggtcagagtacagcagtaggtattggtggggatccggtaactggggataattatgtggatattttaaaaagatttgatgaagataaggatactgatgctgttgttttaattggtgagattggaggaacagcagaagaaagagctggaaaattcattgctgaagaaatgaccaaacctgttgtatcttacatagcaggaagaactgcacctccaggtaaaagaatggggcatgctggagctattatccaagggaattctggtactgttgaaagcaagaccagagctttaaatgaagctggtgttgaagtagcagcaaaaccgtctgaaattgtaaatttacttaaaaaggttatgtga

SEQ ID NO: 6984 - DNA, 1203 bp, Methanobrevibacter gottschalkii
  source 1..1203: mol_type = genomic DNA
atgtcaaatcaggaaattattgataaattattaaatggtgaaatgaaactttatcaggtggatagggaagtttcagcaaaagaggcaacagatattagaagagaatttttagaacaaaaatattctattaaattagataatatctcaaattatactcttgatatggaaagagcatctgctcgtaatattgaaaattccattggagtattacaacttccaatgggtatagcaggaccattaaaaatcaatggtgaatgctgcagtcgtgaagtatttgtacccctcgctacatctgaaggagcacttgtagcttctattaataggggtgcatcaactattactgcgtctggtggtgcaaatgtaagaataacctcagatattatgactcgtgcaccagtaattaagtgtgaaggtgtgggtgatgcattaaaaattaaacaatggtttattgataattttgatgaattaaaatctattgcggaaagcacaacttctcatggtaaattaatcaaaattgatcctattttaatagttggaagttatgtttatccaagatttgttttttcaactggggacagtatgggaatgaatatggtaacaatagcttctgaaaaaattttagataaactggcacaagatactagtgcagttcatgtggcattaagtggtaatgtttgtgttgataagaaacctgctgcgataaacattgttgaaggaagaggaaaaagtgttatagcagatatattggtgccaaaagatatagtgttaaaaaagcttaaaacaactgctgaagcaattgttgaagtgaacatggctaaaaatttaattggttcggcagcagctggaagtatgggatttaatgcacattatgcaaacatggttgcagcaatatttttggcaactggtcaggatcctgctcatgttgctgaaggttcattaggtattacaacagcagaagatagggatggagatttatatttttctgttaatctgccggatttgccagtagctactgttggtggaggaacaagtcttgaagttgctcatgagggattggagattcttggtgttgcaggttctgataaagcacgtgaatttgcagagattgttgcatgtactgtacttgcaggtgaattatctcttgttggagcattagctgcaggacaccttgcaagagctcatcaggaacttggaagaggataa

SEQ ID NO: 6985 - DNA, 207 bp, Methanobrevibacter gottschalkii
  source 1..207: mol_type = genomic DNA
atggatgattttcttgatgaattatatccggaaatcactcttgaaactgaggatattgtaatgacaatatcattaaaaaaagattattctcagactaaagatgttaatgtgagaaaaaaggaatttataaaggatttaaatgattttataaaagaatttgaagagacttcggaatcattggagtttatgagatattttgatgattag

SEQ ID NO: 6986 - DNA, 639 bp, Methanobrevibacter gottschalkii
  source 1..639: mol_type = genomic DNA
atgatttttgattcattctatacattcttaggacagcttgtagtttttttagcaatcctcattataatattattcattgtcatattagttttaggagttttaatagctaggaaaaatgaaattaaatttccaagatttattttatttgttgttgattccctatacttcccgttcaaatcaatagcaaactttttaaaacttgatgaatacttgattgatgatatctcaattaaagtaagagatgaattgaacaaagaaaaatttagatcaataccctctgaaaaaacattaatattcctaccccactgtttaagacataaaaattgtcctgcaacactccaaaaagaaggattaaactgtactgaatgcggattatgttcaattggtgtcgttaagaaaaaagccgaaccaatgggatataaaatgtatattgttccaggatccagttttgttaaaaaaatagttaaagaaaacaagttcaaagccgtgcttggagtggcttgtcatgaagatttgaaccagatgatgatgttattatctgatttttgccctcaaggagttttgcttgaaaaaacaggttgttttgaaacaaaagtaaatattaagaaaatattcgaaaaattagactcaaaatactaa

SEQ ID NO: 6987 - DNA, 453 bp, Methanobrevibacter gottschalkii
  source 1..453: mol_type = genomic DNA
atgaatattgattttaaaaataatgaaatactatttcttgaaggagaaactggaatagtgggtattgttaaagtagcacatgataataaaatgttatttattgcaacacatgataaccaggaaatagttcaatttttagaatctgatgatattattgctgtgtctaactttaaaaaagataaaagaacaattcgctcacaggcttatctcagtcgtgaagaatcttcaccacttatcattttaaacaaagaccatccttcaactaaacgtttagaaactgttatatcaattggtgatgaagttaacctaaattgtaatattatccccggaacccatcctgaacaaaatgttttatgttcatgtgacagtttatctggacttaaaataataaaaaccccaactgggatcaaattaaataaagaatttgataattttacaatcgaaaaattttag

SEQ ID NO: 6988 - DNA, 156 bp, Methanobrevibacter gottschalkii
  source 1..156: mol_type = genomic DNA
atgtgttccggtggagggccaatggccgatattgatataaaaaaattaaaaacaaaaaaatacttttgtaaagactgtggaaattcatttaaaggccttggaaaaaaagtagtttgtccatcatgccaaagtgaaaatgttgaacttgtagagtaa

SEQ ID NO: 6989 - DNA, 1017 bp, Methanobrevibacter gottschalkii
  source 1..1017: mol_type = genomic DNA
atgtacgaaaaaataataaacaatattaaattaaatttaggtgaaaataaagatttaaatcggaaatatctggcatcacaaatagaaaactataaagatcatccatataacctggaaattacaaaagagatttcacgcatgatgtgggattgtttaagtgatgaggaaaaaagagaatttatagaaatttcagaaaatgaaactccggtaattgatattttagaagagatttacccaatgattgaaatgggaaagtatgataatgcactagacaagcttaatggatttatgaaaactttccaaccaatgtttgaagatgatgcagtaaatgaataccacttcttcaccaatcaattggaagaagaaatattcaataaatatattggtgctaaaaaagaaatgagatacataccaaataaccatcctctacttgatttgtattatgtatatggattcctccttttagaaaaacatgaactaaaagaagcagaattttatctaaaaaaggcactgaaaattaacccagtttcttcaaggatactgttagagttatctgatatttataagactaaagcacctaattttaataaattttacatgtacacaatacaagcacttgaatatgcatattacccgcaggatcttgcaagatgctataggaacttaggtcagttttatatggaagaaatgaatttcgagatggccgccgcattatataattatagtatgaaatacgaattaaatccgattgtatacagcaaacttcagtatataaaatcaaaaggaaccaatattgaattggagttagaagaatgtttaaacactttaaaagataaaaaaattcagattgatgtgaatccatttattttaaaaacattagaagagttatcagataaatatgatgaaaaacaagcattacatcaagcattatatttttatgaattacaatatgacctgaatcatgaacaagatatacttgaaaaaattaataatattaaaagagtaatgaatcattaa

SEQ ID NO: 6990 - DNA, 1644 bp, Methanobrevibacter gottschalkii
  source 1..1644: mol_type = genomic DNA
atggcaaatcaaccaattttcatccttcctgaagggactgaaagatattccaaaagagatgctctaagaatgaatatcactgccgctaaagttttagcaggtattgtaagaactactttaggtcctaaaggtatggataaaatgttagttaattcattaggtgatgtaactgtaactaatgatggtgcaactattatgagtgaaatggatattgcacaacctgcagctagaatgcttgtggaaacagctaaaaaacaagaagaaattgttggtgatggtactacatctgttgttgtaattgctggtgaattattatctaaagctgaagaattattagatgatggaattgcaacttctgttgttgtaaaaggatttagaaatgcaacagaaaaagccgtggaacttttacaaggtattgctattgatgctgatgataaagaaactcttaaaaaagtggcagttactgcaatgagtggtaaaggatctgattatgctaaagaacatttagctgatcttgttgttgaagctgctttaagaattgaagaagatggaaaatctgatattgagaatattaatattcaaagagtctccggagattcagttgaagattctttcttggctgaaggtattgtaattgataaagcacccctttctaaagctatgcctaaagatattaaaaatgcaaaaattgctatcatgaaatatcctattgaattaaaagatattaacactgatgcaaaaattgatattactagtcctgatcaatttgaaatgttcttaaaaaatgaagaacagatgattagggatttagtggataaagttgttgattctggagctaatgtattattctgtcagaaaggtattgatgatatggcggaacattacttgaaaaaagcaggaatcatgactttcaaaagagttaaaaaatcagatatggaaagaattgcaaaagctactggcgctaaattagtaactgatattgaagatttgtctgaagataaattaggttctgcaggtcacgtatatctcgataaattatttgatcatgaattgacattcattgaagaatgcgaaaacccaaaagcgtcttctattgttcttagaggcagtacccgttatgtaaccgaacagatttcaagagctattgatgatgcgttaggtgtagttgccgctactatcgaagaaggtaaagtcctcattggtggaggagcatgtgaaattgatttggtaaaacaattaagggattatggtgaaacagtaaatggaagagaacaattagctattttaaaatatgctgaagcattagaagttattcctagaaccttagttgaaaatgcaggtttggatactattaacttgattgctgatttaaaagctgctcacgaggagtctaatttaattggtattaatgtattcactggtgaagttgtagacatgaaagaagctggtgttattgaaccgttaagagtgaagatccaggctttacagtcagctggcgctgctagtgaaatgattttacgtattgatgatatgattgcagcaagaaacgcacttaactctactggacctgacgagtctggcaatgatgctagcggtatgcctcctatgcctggcatgggtggaggaatgcccccaatgatgtaa

SEQ ID NO: 6991 - DNA, 3939 bp, Methanobrevibacter gottschalkii
  source 1..3939: mol_type = genomic DNA
ttgaacaaacaattattactcacttttctttttgtacttgcagtgatattatctgttagtgcaatttcagctagtgatgtaaatgttacagattcttacacaacaagtgtagcggatggcgcatcaaatgtctcagttcctattgaaaattctgatgattcatcagtactttctctatcaagcgaatcagatgttggcaatgtatcatctaagaattctgaatctgtaaaatcaaatactttatcaactaactcggatactaactctttaagtaataggggaaatgatgttttagaagtgaataataccgcttctccaactattaatgcatctgaaactattgcttcaaaagatattactaagtattataaaggaagcacaggttatactgctaaatttttagatatgcatggtaatccattaaacgggtcagatgttaaaattactgttaatggtgttacttatactaaaaaaactaatagtgtaggtgttgcttctttagcgattaatcttaaacccggaacttacaaaatagtttcagaaaatctcattacaggttataaattaaccaatactattaaagtattgtcaaccattaatgcaaatgacgttactaaagtttatactgacggaaagaagttttatgcaacctttttgaaaagtaatggtaaagctttagctaatgcatatatcaagtttaagattaatggaaaaacatactctaagaaaactaatagcaagggtgttgctagtctatcaatgactaaccttaaaaaaggtacttataaaatggtctcttataataaggatggtctaactaaaactaatactgttaaagttgtttctaagactagttcaaagcttaataccaatgcctatactttccttaaaagcgatagtaaaaatattaaagttactttacttaacggtttaggatatgcaccaggttcaggtaaaataatcaagttcaccgtaaatggtaaaacttattctgctaaaaccaacagtaaaggtgtagcttcacttaaattaccttatttaaaagcaggtacttatacagtaaaatacaagttttctggaaatacattttatactgcatctagtgcatctaataaattatatattcttccaagtaaaactgctactttcactgtgaaaagcacaacaacttttggtaaaggtgctaatactcctttcaaggttgctttaacttcaggtagtgttcctttagtaaaaaaaactattactttaactgtaaatggaaagtcatatgataaaactactgatagtaatggaatcgtttcaatacctattgatttacaaaatggcaaatatacagtaacctataaattcaatggtgattctaaagtaaatgctaaaaccggatcttcttcaattatagttaaggaaagaacttccactaaagttacttggaaaagtggaacatctttctatcagggtgctcagtcttataaagttttattgcaggattctaatggtaaagctttagcaagtaaagttgttaaattaactgtaaatggtaagacttattcagcaacaacttcatcaaatggatatgctacatttaatgtaaatttagctcctggaaattactcaatttcactaaaatatcctggagataattcttatgctccaagcaatggaaatgtaaaagtcagtgttgagaaaaaagaaaatacaggatatgggtattgggtttatggtgaagacatgagcaatgttgaccttaaatcattagcttccaaaggaactagcgatttattcttaaactttaaagcaattgagcttcatggtcaatctaaagttgaatcatggattgctagcgctaataagttaggaatgagagttcatatttggatgcaaatattctatgaaggtggaaaatgggtcaatcctgttaaaaatggaaaaccatatgaggcattttttgagaaaaaaataactgaagctcaaggatatgcaaaaatcaaaggtgtggcaggtatacactttgattatttaagatattcaggtaatggtgaaagtgctgctcataaaactcctggtggtgctgcagcaataagtcaattcgttgaggatgctactgaagctattcataatattgattctaatattatcgtttcagctgcattgatgcctgaaactaccagtattttaaaatactatggtcaggattactcggtaattagtaaatacttagatgtagttattccaatgatttataaaggaaattatggtaaaacttcagcttggattactacaactacaaaatggtttgtagataattctaatggtgctcaagtatgggcaggcttacagggatataaatctgatagtaatgttactaaattgtctgcttccacaatcaaaactgatgcacaggctgcattagatggtaaagctccaggtgtaattatatttagatggggtgtaactaactttgtagatttcagttcattatctgacaaatccacatccccaagtactactggatccgtaactattgcagatataattgcagcagcaaataatttgaaaaatgttattaattcaaagaatacaatccctgcaacagttagcgttggtgggtcaagttattcaactgctcagtttttatacatgatgaccgaagctgttaagaagattaatggtggtaaaacttcatcacaaatattgcctatatctgttggagttccaacaaatccatctggttcatttaaatcaggtaatatcgcatccagcgaatatgtgaatatggcaatcagtattaatagtttcattatggaaaatggtagagctccgaatttcgcttcatcatcttcattaggcactattgattatgattctttagttgaaatgtttgctgatattttaacagactataaagataataataaattgccaacttctgtaaaagtggacaatggtacaaaatccgaagtcataactgccaaaacaatatccatcaaggatatcgttactggtgcgactaatttgaaaaaatattataatgattataagaagttgccttccactgttactgcaggtaaaattacattcaaattatctgaatttgtttacttgatgagtaaagctattaatcaaatcggaaaatctaatacaaaggcaattactataatcactggtataggtaatccaacaaatccttctggagataatattaattcaaaatatttatcaaaatcagagtatcttaaagttgcattaaatgtgactaattatataaataaaaataaagtagctcctaattatgtttcatccagtcttggtaaaattatctactctgaatatgtcgatgcattttcacgtatcctggcattttatggtaatgaaaatcgtttaccaaatacagtaactattagttattcatcaggatccggatcaaattctggaactggtgcaactggaactggtttaaatgaagcacttaaaaatggtactgagttgtcacaatatcttaaagctactaaaaattgtcaggtagacaattctaagattaaagatattgttaacaaagtgactaaaggtttaacatctgttaaagataaagctactgcaatttataattatgtaagagacaatttggattatagtttctattacaatactaaatatggtgctgtaggtgctttaaatgctaaaaaaggaaattgtgtcgatcattcacacttgttagtcgccatgtttagaactgctgatattcatgccaggtatgttcacggtaaatgtacattttccagtggaagtacttatggtcacgtatgggttcaggtgttagttgataagaaatggacagttgcagatgcaacaagttcaagaaattctcttggaaaagtagcaaattggaatactaataaattttcatttaataattattattctgaacttggtttctaa

SEQ ID NO: 6992 - DNA, 714 bp, Methanobrevibacter gottschalkii
  source 1..714: mol_type = genomic DNA
atggctaacggtaaaattagtgaaaatattgaagaataccttgaagttctttattgcaatggaagtaatggggaacaggtttctaccactaaattatctgatgaattaggtattgcacctggaagcgtaactcaaatgcttaaaaaattagaaaaattaggatatattgattatactccatataaaggagctactttgactcatgaaggcatgaaaatagctagaaaaattacaagaaaacatagaattttagaaaaattcttgttggatgttttaaaagttaaagaagaaaatatccatgaacaggcttgtgaaatggaacatgctttatcagatgaagcggaaagagctttatgtaatatgttacaacatcctgatgtatctcctgatgataatgttattcctgcttgtaattttaattttgaaagttgcagtcaatgtttttctcagaaagattttgatcaaattatcaatagggaattcaacttattgtctatttcagaattaacctctgatactgaaggaactatttcattcattcgtggaaataccgaccttttggacagtattgcagatttgaacattaaagttggatgccagttaaattatgcaattaatgataataaggatgaagattcttatttggttttcattgatgatgaagagtttaatattcctaaagaaatggctaataatatttttattagaatttaa

SEQ ID NO: 6993 - DNA, 516 bp, Methanobrevibacter gottschalkii
  source 1..516: mol_type = genomic DNA
atgcgtggtagtttatcaaatgatattgtatctattaagattgaagagggaagcaaaaaaccaatagctttacatgaaaaaagtctttttggtaaaattgaagctgattcattaaatctttctttaattgaagcttgttatttgttggaaaaaggtcgtttaaatatttatgaagatgatttcgaatgtagtgttggttacatcattgatcttttaaaagaacaagatttatttggaaaatatgttgtttaccgtgatttaaaagaccgtggttttgtaattaaaactggttttaaatatggatctgaatttagattgtataatcgtggaagaggtccgggtcagggacattctgattatttagttaagattatttttgaaaattatgaaattaatgctcttgactttgcaagctatgttagagtttcacatggagttaacaaaaaactactgttggctattgtggatgatgattttgatattacttactataatattgaatggactagaccttaa

SEQ ID NO: 6994 - DNA, 1116 bp, Methanobrevibacter gottschalkii
  source 1..1116: mol_type = genomic DNA
gtgagtgttggtgataatatggggaatttgatagatccatgggcatcatttagtttagattatgataagttagttaatcaattcggtattggtaaattttcagatattataaatgaaattaaaaatcctcaaagattaatgaaaagaggagtgatatttggacatagggaattcagtgaaattaataatttaatcaatcaaaataaagattttgctgttgtaactggtatgatgccaagcggtcaaatgcatattggtcataaaatggttgttgaccaattaaaatggtatcaggaaaaaggagcaatgctgtctcttcctattgcagatttggaatcttatgcggctcgcggaatgagttttgaaaaaggtcgtgaaattgcagtaaatgaatatttaacaaactggatagcactagggcttgatttggaaaaagataatgtaaatgtatatttgcaatctcaaaataaagcacttcaagatttggctttcatggcatccagtaaaactaatttcaatcaactcaagtcaatatatggattcacaccttctacaaatattgcccacattcaagcaccattggttcaggttgcagacatattacttccacaaattgaagagttcggaggtccgaaaaaggttgtagtcccggttggaatagaccaggatcctcatattagattaacaagggatattgctcaaaaacttcatgaagatttggggcttttaactccggcatctacatatcataggtttttgacaggtttgactggtgataaaatgagtagttccaaaccatctacagcaatttatcttaatgatgatacaaaagaggctgttaaaaaagtcagatctgctaaaactggtggtagggaaagcttaaaagagcaacaggaattaggtggagaagttgataagtgtgtaatttatgaaatgttgttatatcactttattgatgatgatggtgaacttgaaaaaattaggcatgaatgtttaagcggaactctccgttgtggggactgtaaagttaggactgctgaattggtggaaaaattcatggatgagttaaaagaaaaacaggttgaggctcgtgaaatagctaaaactttattataa

SEQ ID NO: 6995 - DNA, 1197 bp, Methanobrevibacter gottschalkii
  source 1..1197: mol_type = genomic DNA
atgattagatgtgtatcttgtggagaagaatatggtgatgatgaagtaatctacacttgtgaaaaatgcggatccgtacttgaactcgtcaacgaaatagatgtttctaaagacatttttgatggtagaaaggatactttgtggaaatttaaagaatgcattcctgtagatgaaaacaaaattgtttctcttgaagaaggtggaactccattctgtaaatgtgataaactgggaaaagaacttggagtaaatttgtatgttaaagtagaaggttctaatcctactggaagttttaaggacagaggaatgactgttggcatgactaaagcaatggagttaggtgttgatactgttggctgtgcttcaactggaaatacttctgcatcgttatctgcttatgcagcccgtgcaggattaagatgtattgtgttcttaccttctggaaaagttgctttaggaaaattagctcaagcaatgttccacggagctgaagtaatgtctattgatggaaacttcgatgaggctcttgaagcaatgactgctcttgcattggaaaaacatctttacttattaaattcaattaatccatacagattagaaggacaaaaaaccattggttatgagattgttcgtgatttaggctggcaagctcctgacaggattattttaccagttggcaatgctggaaatatttctgcaatctggaaaggtgtttcagaattttataatgccggatttattaaagatttgcctatgatgacaggtattcaagctgaaggtgcttgtcctgtaactaatgcatttaaaaaaggagatagaaaagtggtacctgtagaaaatccagaaactattgctacagctatacgtataggagctcctgtaagtgatattaaagcactaaatgcaatttatgattcaaatggttattctgaaactgtaactgatgaggaaatccttgatgcgcaaaagttgcttgcaagaacagagggtattggtgttgaaccggcttctgcagcttctattgcaggtcttaaaaaacttgttgatgaaggtgtagttgacaagggtgagacaatcacttgtgttgttactggacacttattgaaggatcctaatactgctattgaagcatgtaccaaacctactcaggttgatgctgatattgacaccttaagaaaaatcttaatgaataaataa

SEQ ID NO: 6996 - DNA, 201 bp, Methanobrevibacter gottschalkii
  source 1..201: mol_type = genomic DNA
atggctgaattaccattcgctcctgtaggaagaattttaaaaaatgcaggtgcacaaagagtaagtgatgatgcaaaagttgctttagctgaagctattgaagattatggaaatgatatcgctgctaaagctataggttttgctcgtcatgctggtagaaaaactgtaaaagctgaagatgtaaaattagcaatcaaatag

SEQ ID NO: 6997 - DNA, 369 bp, Methanobrevibacter gottschalkii
  source 1..369: mol_type = genomic DNA
atggcaaacatttatgtaaaatttgacacacctgaagaattagctaaacaagctgaagaagcattagaaactgcttttaccactggtaaagtagcaaaaggaaccaacgaagtaactaaattcatcgaaagaggagatgcagcattagttgttatcgcagaagatgttgatcctgctgaaattgttgcacacatccctgttttagctgatgaaaaagaaattccttacgtttacttacctactaaagaacaagttggtggagctgctggattaactgttggtactgcatctgcatgtattgtggacgctggtgatgctgaagctgctgttgctgaaatcgtagaaaaagttgctgaattaaaagattag

SEQ ID NO: 6998 - DNA, 207 bp, Methanobrevibacter gottschalkii
  source 1..207: mol_type = genomic DNA
atggaagaaggaactcctgctgaagtcattaaagttttaaaaagaactggtatgactggtgaggtaatgcaaattaaatgcagaatcctcgatggtagagataaaggaagaattttaacaagaaacattatggggcctgtaagggaaggtgacattttaatgttacttgatacaattagagaagctaaggaaattagaactccttaa

SEQ ID NO: 6999 - DNA, 162 bp, Methanobrevibacter gottschalkii
  source 1..162: mol_type = genomic DNA
atgagaacttgttcattctgtggtaaagaaattgaagagggtacaggtaaaatgtacgtcaaaagagatggctcaatttatttcttttgtagcagtaaatgtgaaaaaaatatgattaaacttggaagggttccaagaaaagttaaatgggttaaagaatga

SEQ ID NO: 7000 - DNA, 453 bp, Methanobrevibacter gottschalkii
  source 1..453: mol_type = genomic DNA
atgattcaaaaaagttttgttatgatgaaacccgacgctgttcaaagacgtcttatgggtaaagttttgtctcgttttgagcaaaaaggtcttaaaattgttgcttgtaaactgattcagattgatgaagaattagcaaaaactcattatggtgaacatgcagataaaccattcttcccaggtttagttgaatacattacttcttcaccatctttagctatggtaattgaaggagacgaagctattaccactattaggaaattagttggtgcaactaatcctttagaagcagatcttggaactattagaggagattttggtatggatactggaagaaacattattcacgcatcagatgctcctgaatctgctgaaagagaaattgctcttttctttaatgaagatgaaatttgcgattatcaaattgttgataacgatttaatttatgaataa

SEQ ID NO: 7001 - DNA, 1791 bp, Methanobrevibacter gottschalkii
  source 1..1791: mol_type = genomic DNA
atgaaaatcagatccccgattgtatcagttttaggacatgtggaccatggtaagaccaccttgttggattatattagaggaagtaccattgcagataaagaagcaggcggtattactcaacatattggtgctacagaaattccaaatgatactattgaagaaatctgtggaaatttcatatcaagattaactatcaaagatttaatcccgggattattctttattgatactcctggccacgctgcatttactagtttaagaaaacgtggtggagcattagctgatttagcaattttgattgttgatattaatgatggatttaaaccacaaacttatgaagctttaaatattcttaaaatgtataagactccatttattgttgttgctaataaaattgatagaatttttggttgggagacccatgaaggagcttcttttagtgaatctttcaatcaacaagctcaaagtgttaaacaagaattggatcttaaactttacgaacttgttggtactcttcataaagaaggtttccaatctgaaagatttgacagagtcagtaattttgcttcacagattagtattattcctattagtgctagatcaggtgaaggtattattgaagtattagcaatgctgctcggactcgctcaagaatatttaactgaacaattagaaattaatgaagatgctcctgctaaaggtactatcttggaaattaaagaggaagtaggattaggtcttactgttgacagtattatttatgatggtgttctacgaactaatgatgaaattgctttaatcaattcttcaaatgaagttgtaactactaaaattaggtctattttaagaccacttccgcttgaagaaatgagagattctaaaaagaaattcagaaaattagatgaagttgttgcagctgcaggtattaagattgctgcaccaaatttagatgatgttgtttcaggttcaccacttagagtactaagtgaggaagaagacgttgaagaacaactcctgaaagaaattgaagatattactattaacacagaagatgaaggtcttttagttaaagcagatacattaggttctcttgaggctgtagttaagttgttaagagatttaaatatacctattcgtgaagcagacattggtgatgtaagtcgtagggatattattaactctaaaattgcattaaatgaaaatgaagcgcatggtgccataattgcttttaatgtggatgttcaccctaactctttagatgatttaagcaactctgatgttaaacttttcaaaggagatgttatatatcaaatcattgaggactatcaggaatggactgatgaaattgaaagagctaaaaagaaagcattttatgatgctatagttaaacctgcaaaatttgttgcattacctaaattagttttccgtcaaagtaaaccggcaattattggaatcgaatcacttagcggtacagttaaacaaggtcaagttttaattaacaaaaatggagaatatgttggtgtaatagccagtatggaagataaaggtgaaacattgccttctattcctagaggtcaaagggtggctatggctattaaagatgctattgttggaaaacatttcgatgaaggtgatgaattatatattgatgtttctgagaaacattataaattcattgaaagagaattcaaggataaattaactgaagatgaatttgaaactctttatgaactcgtagagattaaacgtaaaaaagatcctgattggggtaaattcggtctttttgaataa

SEQ ID NO: 7002 - DNA, 384 bp, Methanobrevibacter gottschalkii
  source 1..384: mol_type = genomic DNA
atggcattcaaagttgttgtatctcaaggtgctgaaactcatcaaattgaagtagatgaaactaaagcttttaatggtttaactatcggtgaagaatttgatggcggacttgtcggtttagatggttatactttaaaagtaaccggtggtagtgataaaaacggtttcactatgaaaaaagatgttactggtactagaagaatcaaaagtttattaactggcggtatcggttatcatcctaaagctgacggtgttaaaagaagaaaaactgttagaggaaacactattgctgaagatattgtacaaatcaacactgtagttactcaagctggaaataaatcaatagctgatattattggtgctggtgaagaagaggaagaatag

SEQ ID NO: 7003 - DNA, 1215 bp, Methanobrevibacter gottschalkii
  source 1..1215: mol_type = genomic DNA
gtgaacgtacaatcagatgttaacataggtttagttggtcatgtagatcatggtaaaaccactcttacaaaagcattgtcaggaatctggactgatactcatagtgaggaaacaaaaagaggtatttctatccgtttaggatatgcagatattgaatttaggaaatgtccagaatgtggtgaacctgaatgttacactactgatgataaatgtccgatttgtgggagtgaaacagaattaattagaaaagtgtcatttgttgatgctccaggtcacgaaactcttatggcaactatgttatctggtgctgcaattatggatggtgcagtattagttattgctgcaaatgaaacttgtccacaaccacaaactaaagaacatctcatggcgcttgatgtcatcggtgtaaaagatgttattgtagttcaaaataaaattgatattgtttcaaaagaaagggctattgaaagttataatgaaattaaggaatttgttaaaggtacttgtgcggaagatgctttgattatccctgtttctgctcaacaaggagctaatgtagatattttgattgaagcaatgcttaaacaaattcaacctcctgaaaggaatgttgatgacactgcattaatgcatgtagcaagatcatttgatattaataaacctggttcaggtgctgataaaattaaaggcggggttattggaggcactttgattcaaggtaaattcaaacttggcgatactattgaaatcagaccgggccctactaatgatggtaagaggatgactttaacatcagagattattggtcttgaagctaatggtgaacaagttgaagaaattggtcctggagggcttgttggtattgcaactaaattagatccatctttaactaaatcagattcactatccggtacagttgctggtgaagaaggtactttacctgatgtattagatagtttcaaaatggatgctaatttacttgatcgtgttgtcggtactaaagaagaacgtgatgttgctccgattaaacttaaagaacctttaatgattaattgcggtactacaacaacaatcggtgttgtaacatctactaagaaaaacgatgttgaagtaacactaaagttacctgtgtgtgcaagtccgggtgatagagtagctttaagtcgtagagttggagcccgttggagattaattggttacggtattattaaatag

SEQ ID NO: 7004 - DNA, 393 bp, Methanobrevibacter gottschalkii
  source 1..393: mol_type = genomic DNA
atgaactctaaagaagttgtaattgataccaatttttttatggttccttttcagttcaatgttgatatcatcactgaacttgaaaaattattaccttcttataatttgactactccaagctttgttatcaatgaattgaagggtttgaaaagaaataaaaatgcaaaaacaaggttaaatgcaaatttagctttaaaattagctaattcttcaaaagttgaaataaaggatatttcattgcttgaaaatgaaactgtggatgatgcgttacttagagtttcagaagttttagctacgaatgatattgaactgaaaaatcgtgcaaaggacaaaggtataaccgttgcatatttaagacaaaaaaaatatattgctgttgatggcaaaatataa

SEQ ID NO: 7005 - DNA, 585 bp, Methanobrevibacter gottschalkii
  source 1..585: mol_type = genomic DNA
ttgtattatagaacaaaaattaaggatactgtaagaattccaccttacaagtttgaaagtcctattaatgaagtcgctattgaaactttaaacgaacagtatgctggtcgtttagataaaaaattaggtttactcatttgtgttaatgatattcttgaaattggtgaaggtaaactcattattggtgatggagctacataccataatgttgttttcgaagcaattttctttaaacctgaacaacatgaaattttcgatggtgaagtaattgatattgttgattatggagcttttgtgagaatcggatctatggatggtttaatccatgtttcccaagtaactgatgattatattacttatgatgctaaaagaggtgctttacttgcaaaagaatctaacaaagttttagaagaaggggacttagttagggctagagcagttagtgtttctattaaagatgaatcaaataataacattgaaaatagtaggaattctaagattcctctcacaatgagacaaactaatctgggcagatttgaatggattgaagaagcaaaacaaaaaagtaagaaggttaaagaatga

SEQ ID NO: 7006 - DNA, 177 bp, Methanobrevibacter gottschalkii
  source 1..177: mol_type = genomic DNA
atgaaagcttgtactgtttgtaaaatgatttcaaataaagatcattgtcctaattgtggaaatccaacttctgacaattggagcggtcttttgattataactgatcctgaagaatccaatgtagctcgtgaattgaatattactgttgcgggcgaatactgtttaagagtaagatag

SEQ ID NO: 7007 - DNA, 507 bp, Methanobrevibacter gottschalkii
  source 1..507: mol_type = genomic DNA
gtgttacgtttggatacagaaaataaagatataatgtctgagctcaaaaggcctttaggtaaattatatcctaactttgaagatgcaattgatgaaattaaatcttctgagtttttaatttctgttggtgatgcaacattcggtaatcttactaaatatgaattatacccgaatattggtataattgataatgtaattcaaagaaaaaatcatactcatgaaattatacgtgcagaacatattttgaaagctgaaaatcccgctggaactattactgatgatctatgggaaaccataggacacgctcttgaattatctaactctggcgaatgttatgtaattgaagtagcaggggaagaagatcttgctgttcttccttgcatcataatggcaaatccggaaactaccattttatatggtcagccaaatgaaggtttagtgcttttaaaagtttctgatttaaaaaataaagctaaaaaacttattgacggatttatcaaagaataa

SEQ ID NO: 7008 - DNA, 315 bp, Methanobrevibacter gottschalkii
  source 1..315: mol_type = genomic DNA
atggaaatcgaatttatcgaagaaaaagaaaataaattatttaacagaaaagaaattaaattctatgttgattatgatggtgaagcaactcctaaaatcttagatattaaatctaaattagttgctttgttaaacactaaaaaagatttaattgtagttgataatgtacagcctcactacggtgaacctaaagcattaggatatgctaaagtttacgcaactgtagatgacttaaaatacattgaaactaatcacgtattagctaaaaacgaagaacctgaagaagctgcagaagaagcagaagatgaagaatag

SEQ ID NO: 7009 - DNA, 153 bp, Methanobrevibacter gottschalkii
  source 1..153: mol_type = genomic DNA
atggtaaaaaaatctgatctgtataaagtagatggcgacaaaattgaaagaaaaaatccaatttgtcctcgttgtggtgaaggtgtattcatggctgatcatggtgacagattcgcttgtggtaaatgcggatacactgaaatgaaaaaataa

SEQ ID NO: 7010 - DNA, 1422 bp, Methanobrevibacter gottschalkii
  source 1..1422: mol_type = genomic DNA
ttggataatattagaaatggtcgttttaaaactggaatgactgatgaagctgcaatttacacttcatcacttgaagcggataaacttctttttgaagctgatattaaaactaattttgctcatacttcaatgttaaaacatgaagggattgttgatgaagaaattgcggataaaattttatgtgctcttgattctcttaaagaagaaggttatgatgcattagtattcgacccttctgttgaagatgtgcacatggctattgagaactatgttacttctaaaatcggccctgatgctggttttatgcatactgccaaatcacgtaatgatcaagtggcttgtgatgttagattagttttaagagaagaaattatcaacattcaagttggtattttagaatttatggaaggccttgttgaaatggccggtgaacatttggaggatgtcttcattggttttactcatttgcaacatgcccaaccaatcactattgcccatcatttaatggctcatgtacaggctcttaaaagagattatgaacgtttaaatgacacttataaacgtgttaatttaaatccattaggttctgcagcaatggcaactacgagttttccaattaataggcaattaacaactgatttgcttggctttgatgcatatttggaaaattcaatggatggagtttccacaagagatttcattgctgagagtgtttttgacttggtatctttatgcactacattatctaaaatctgtgaagagttagttttatggagcacctatgaatttggcgttattgaaatggcagatgagtattcatcaacttcttctattatgcctcaaaagaaaaatcctgatgttgctgaacttgcaagaggtaaatgcgcaattgtcaacggtgaattggttactattttaactattcttaaagcaattgcatacacttataatagagatttacaagaaattactccgcacctatggaattctttaaaagtaactaaagacactttatctattgtgactaaaatgttgttgtctgttgaatttaaaactgaaagatgtgctgaacttgcaggtaaaaattttgcaactgcaactgatttggcagatattatggttcgtgaaaaacaaattccatttaggactgctcataaaatcgttggaagaattgttaatgaagcaacaactaaaaacatggtggaagaggacatcacttctaaattcattgatgatatttcagctgaattaggttttgacaaattaaacttggctgatgatttaattcaaagagctttaaatcctgttgaaaatgtaagaattagatctgttcctggtggacccgcacctgaaatggttgaaattgcacgtgaaaacattaaagaatttttaaatgctgaatttgaaaaacatggaatttaa

SEQ ID NO: 7011 - DNA, 189 bp, Methanobrevibacter gottschalkii
  source 1..189: mol_type = genomic DNA
atgatgcataaaatttgtcctagatgcggatctagaaaagtaaaatggataataccgcaaaattggtctcaatgggtttgttatgactgtgattacacaggaccagtcattgagggcaatgatgatttagctgaagaaatacacgaaaactatctaaaatcaaaaaacaagaaaaacaaaaatgattaa

SEQ ID NO: 7012 - DNA, 1017 bp, Methanobrevibacter gottschalkii
  source 1..1017: mol_type = genomic DNA
atgtatactgaagaatttattttaaatgaagttaattcaataagagaagacattggccatgataaagtaaatatttatattgaagaaatttattttaatgaaaacaccaatgaattatggattatcactgaagacaggccagataaatcagccattattggaaaaggaggttgggttgttggtaaactcagagaaaaattaggtcttgaaagcattcatgttgaatcatatggtgactttttaaataaaaaatacaaattagacttatcaaaaaagactattctaaacttaaattcagattcagttggcttaaaaaacctggaaaaagttattgacgataagatatcaagtatttacagttttaatttcgagaattatttaagtgaaaatgaatttaaaaaatcatacaaacatgaagcagtagttgcattgtccggtggtgttgacagtagtttttcattaattttagctaaaaaactcggattcaaccctattgctgttacagttgatcctggaacaatcatactcccaaaacaatttaaacggaatatcaaaaaaatatgtgatgaattagatatttctcatgaatacctcagaactgattattcagaggttattaatgaatcatttacaggtaaggttcatccatgcggaagatgttcaaaaaatactgaagaactcgtaagagaatatgcaaaatcaaaagaaattccaataattatctttggtgatatgcttgcaactggtagtcaatgtataaattcacaatatgattcattatatcgattgaatcttccagcaagtttaagtaccagcaaacaagagataaaatcattgattgaaaaatataatttaagtacattcaaaggattcggttgtccacttctttatgaagttcacagaaaatttccacatatgaaaaaattttcaatacagagaattcttagagaaacacgttcaggagcattagaacctggagaagcattagatttaatatggagcttttataagatttga

SEQ ID NO: 7013 - DNA, 2049 bp, Methanobrevibacter gottschalkii
  source 1..2049: mol_type = genomic DNA
atggggagaggatttaaattgaaaattgataaatttttattattaattttgatattttttattttgttatcttgtgttagtttagtttctgcttccaatactgttgatacaaatttaactcatgatgcaagtagtgatgctaatatcggaattaatgatattgaatcttattcttctggtgttttttctgatgatgtgaaatcaacaggtaatgttattgttaatcagagaaattataagatgtattttgatgatagcaatgttttaaaaaaggagtatggcggcaaaatcatcgcgtttagtggtaagttcactgataaaggtgttattactattgattccgaaaatactaaaattactggtcgaaatacattgtttaacaatactgtttttaacatcaaatctaatggtgtgatgttgactaatttaaattttgttttaaataaggaatttagtgataatgaaggtgcttgtgtactgattaatggtgacaatgtcactgtctataatgttgatattgattataatgtgcctaaaaatgttaccggatttggaatctattccaatggtttggatgaaagtttatctgatgttaaactggtcaacaatactgttcggcttcatggtaatgctttaaatgatgggtataattatggggtggtattgactaatactcgtgatgctattgtttatggtaatattattgattgtcagcttcctttgagggctgttaattggatggctgaaatatatggaggtataagtatggatgcagtatccgggctggctgcgggctcatgtaatggcttaagactttccaataactacatcagatgtgttgtcaatggtgttgctcagggcgaacctacattggatgctgtactgatttatgcatgtcacaattcgacaatagaaaacaatacaattattgaaaatgattatgttacaaaaaagggtgatgttaattatttgtatggtttggatttgtatttgtctaatgatgttgtaatctatggtaatgacattcatattcgcacaagcggaggtaaagaggctcacggtactgcttatccgattcaagtaactggacaggcagaaaatatcctgattgcatttaacaatttgagcagttacagtaacggacctaatataggtatttattcacaaaactattatggagtaactcatctggatattattagcaattttattaatgttacaggtcatgcaagcaaacacagttgggctttggttgctggaattgaagtgcaggattccgatgacagaataatgaacaataccattattgttgatactgtgaataaatttgaaaaaggatacaacgtttacggcataagctattcacaacgaaccgatggagatcacaattataatattcagtataataatgtctcaaccaatagtgaccatgctgttgcactgaaaggcagtggcagttccactgtcagtaattccattgttgccaataatattttaaagggcagaaaatatggtggaaaccgtgcagcatacattactggaggaacaggtaatgttattattaataatactgatgggtcccgtcctgttcataaaatgactgatgatgagtattccgataatttgaaattttatctttcaagtccttttaaaggaaacggtctgggattgggttggcttgacggtgatggaaactccataatcggcaatggtgacagaaatggcaattcattaaataatggaaatagcggtttggttaacaataaggtttatggtaataatcttaattatagtgaatcgcaagcacgtaatggtgttttaaattcaacatattacacttatggttcttcaggtactgatattgccagtgcttcttcatcttctggttcaggtgctggaagcagtaactctgagtcatctgatgtgaaatcctatgaagtaactaaaaaaattaatgataatttaattcatattcctattgttattatggctgttattgcattaattttactaatcatcggatataaaagaaaagaacacaaagaataa

SEQ ID NO: 7014 - DNA, 3300 bp, Methanobrevibacter gottschalkii
  source 1..3300: mol_type = genomic DNA
ttgaaactgaataaaataatcgttttatcattattccttgtacttatctgttttattggagcagcaagtgcaactgaagatgtcaatgatacagcaattgctgattcagaaattgatgaagtaagtgctgtagatattgaacaatctgttgacgataatgagataacagaaattcaaagcagtgatgaatcaaataaggttcttgcaaggggaacacctactactgcgaaggattggaatacattaagaacaaaatgtgaaaaaacaactgatcaatatataacattgactggtactagttatccaattggaacttatataacttttaaaaatagtgctacaattgttggtagtgatgttagttacattactggaggttctacttcaaatactccttttgtaaataataattctgctttaacactacattttattaatgtgaaatttttaaatgttaatgctaagaatttgttagagcttgatggtactgtttatttggataattgtacttttgataatgttcaaactgcaaccggacacaattctgtaatttataatactaataatttgatgtatttgactggttgtaatattactaattgtcatactggttatggtgctgttagtaattataactctggaagtacaacaagtcctgtaatgtatgttgatgattgtaggtttattaataatagtgctagtgtagaaccgggtgctattaataattgtggaattttatatgtaaataactctgaatttgatggtaaccatgcaaactggtgggctggagcaattcatactcatacaaatgctcaaacagaaattgaaaatactaattttagaagaaacactgctggatggaatggtggtgcattattcacctacagcaaacttaaaataaaaaattgtacttttgaagacaacaactgtaccactaacaatggtggtggagcaatcggagcatacaactatggatcaggatacaatataacaatagattcatctagatttaattataatacaaacctttgctatgcatacacaaatatttcaactacttcagttggtcgtggaggagcaatctctgtacttaatggaggttatttaactgtttataattcaaatttcactggaaactatgcaaaaataggtcaggcaattgcagctgcaacctataattatgaaaatggaactggtggaaacccacacattaaaatatgcaacaataaatttacagaccacactgcaactggaattgatactgtagttattactggaaatgattatatattcaacaacaatgtatttataaatagttatcaaaacaccatttatacaggaactggaaacacatacaattctgcagctttgccgggtaatctgaattccaaattgaatttaaaaacaaaattaagagcaactaatactgaaattttatctgattatcaggatcatgatgttgtttatgttaatgtttcttcagataaagatgcagaagatgacaatgttcatggtcaaagttgggatgatgcttatggtggtttggagtgttttgtaatggcaataaattatcttcataataatgggataatttatattgcagatgggcgttataatgaggactatggctatgaatactcaatagctcatggaaactttactatgattggtcaaggtccaaaaactaatatagagaagattataacaactgtatatggaggtagtgatcaaaattctactcataattttatcaatttatctttcactggtaaagattttggtataaatgctaatttcattaattgtacatttttaggttcaatttcaatttcaaaaggtctcacatatcatgatcctaatcatgttgtggaatatggttatgctcaaacttatttcatgaactttaataactgtgttttcaaggatgtcaatactactaatgctttagttactctttataagtatggtgctgtgaactttactaattgtatttttgaaaatattactgctgattcaattgtttatcgtaatgatattaattattttgaagaggatggaatttcatttaaaaactgcactttcactaactgtaaatataatggtattgctgattccttagctaattttgatgatgctgttgttattgaggattgtacttatgatagtgaagttgctttaggaacaactgaagttaatggtcattattatataaatgctactaaacttaaagttactgctgttggcacaagtatttcaattaaatctaatgaaaataatgtaattgttaatttaactgatgttaacggtaatcctgttgctaatgcaggtataatttatagtattgccggaaccaatgccagtgcaactactggcgctgacggtactttcactctttctaatttaaaaggtattgtaaacatcactgtttactattcaggcaatgaatcttatttagcttctaataaatctgataatttcatatttaaatacaatactgctgtttccagtgcggttaatggtgatgatattctaatcattttaaaagatgatgagaacaatccaattgcaaacgctaatgtaatttatacagtcaacggcattgactacaatgcaaccacagatgaaaatggaacagtaactgtttccaatttaaaaggtaaatttgcattcaacgtattatataaaggagacacactacacacagcttccaatgcttcaaacacattcatcttcaaatatggtacaaaaattacagcaaaaaaagtaacagccacttacaatgttgctaaaaacttagttatcacattaaaagatgaaaacggaattgctattgcaggtaaaaaagtaaccgttaaagtcggatctatccgcaagactttaactactaatgctaaaggtcaggctactttaaaagtcagcaatcttttgcctaaaacatactctgcaaccgtaacttatgctggtgatgatacacacattaaatcctcagttaaagttaaggttgttgttaaaaaagcaacacttaaagtatctgctaaggctaaaaaattcaaaaaatcattaaaaaccaagaaatattctattgttttgaaaaataatgtgggcaaagtcctgaaaaagactaaagttacattaaaaataaaaggaaaaacattcaaagcatacaccaacagcaaaggcattgccacatttaaaattaccaagttaactaaaaaaggtaaatacaatgcttacattaagtttgctggaagcaaatactacaacagcttaaacaaaaaagtcaaaataaccttaaaatag

SEQ ID NO: 7015 - DNA, 360 bp, Methanobrevibacter gottschalkii
  source 1..360: mol_type = genomic DNA
ttgaggaaaataaaatcattaatcaatcttagaattgttaattgcacaaataacgagttaaaatcagaacttaaaaatattttgaccgatgataaactagatgaaaataagatttacaataaattaaaagaagaaaatacattagaaacattaaaaaatgaatttaatgaattcatatcaaacagcaatagttctgaaaaacaatttttagtaaaaataaagaataaagcaaataaattaaaccctgaaaaacacacaaacatagaaaatattcaaaaagaaataatcattaaattactaaataaagacaatataatcaataatttacaaaaaaagaaaatttgtactaatattggataa

SEQ ID NO: 7016 - DNA, 5595 bp, Methanobrevibacter gottschalkii
  source 1..5595: mol_type = genomic DNA
ttgaaaaactcagatgatgttttaaatatcgatgttttaaaccaaaattctactgttaattatccaaggagccataaaacaattgaaattacacaggataattatgaaaattattttaatattagaacaggaaagattattgatgcctcatgtatttctaagggagatactttaaaaattggcaatatttcaaatagggcttttgttatagatcgtcaacttatattaatgccaatctcttctaatgataagattagtaatggttttatccatcttattaaaggaagtgatggttctactgtaacaaatcttactattaataatacaaaagatagattaaatattttaggtggaaatgtaggtcaattacatggtatttggttatcaaattctaataataatcttatttcatataatacaataaggattgcaaatgctgcaggcgtttatgccatgcctatgggttggtcaagcaataatagaattatttacaataatatgaaaacatatatcacatgtaatatggttatgggacaatgtcattataatttaatttcacataatagtttagaattgttaagttattccgatacatctgttacaaatttaatttattttaatccttttgggcatgccgattatagtggttctggattatgtaaatataatatgatttcattcaatgattttaaaggtttttctaatgggcctatgtccattttattacaaagtgtttatgaaaatcatgatggcactgttattgcaaataacactttttctaaaggctcatatgctattcatttatttggtaacaatatttctgtttatggtaatgtagtactcaatagtggtattggtatttctgtttttggacgtaatttttctgttcataataatgctgtaattggtgacagtcaaggttatggtattatggcagaagcgaatggtggttcgctgtgtaatgtttataataataatattacttttatagatgtttataatgcaatatttattggtaatcatgtcaaagcttataataattatataaatatcaaagaatatggggtgagtatatttattaaaggtaactgctccaatattcatgataataggattaataacaaacatgatgctggtatatcagtattaggtaataataacactataaataacaatattattaataccaaaaatataggtattacactacctgctagatctactaactgccgttattataataatacatttaccaataataaaattaatagtgaaagttatggtatttatattgatggtttagtttataattgtataatattggataatattattgaaactaatagtactatgggcatttttaaagacataactgatgaattatccaatattgaagaaaataacatggttaatggtgttattttagattcaacatatattattgtcaataatactaactatcataaatattttgataaatatgggcatttaacatttaaattcgaaaaaaataaaactaaaataatatttttaacatttttaacaaataaaaatttaatttttcaggaaaaaataaatgtaattagtaataaaatgaacaatttactaattaatgttacaattacttttgaaaccaatgccagtggttcattaatacgtgattttaattttattaatcatgataaagaagctattattctaaatggtgttaatgatgttacagtcactaggaataatattacaaatttatttagaaatggcagtttatctaattcagctgtattgattcaagatgtttgtgaaaatcttataatatcctataataatatatatgtaaattcaagaacacattgttatacttatgcaatcaatgctccttcaattaatccagctactcataaaatgaataacaaattatctaaaagagttaatattttagataatacaataatcatgatttcttcaggtattacagaagctatttacactgatactctatctgaaagtaattttatttctaataaaattaatattatttctaaaaattatggatatggtattgcagtttctaatatgattggaaggttatctgatattaatgtttcaaataatgaaattgttatccatagtgagcaaatggcatatttaatcgaacttctccaagtggataattcaacaattgaaaataataagttatatggtaaaagtaatggagtctatgctattggtatatattggtctgataatatttctgttaataataatgccatttctgtatttggtggaaatttatctaaaattttagaaatatctgatgtattaggtatcggaaattcagctatagcaatacttaggaattcatctaaaattattatttccgaaaatattatttatgctaatctttcaaaaacaatatttgacaatactactgatgggattataaatgcatcttttaattcatttattattgataatgagaactataactgttattttaatgaggttggagaattatattctaatgttgtaataaaaaatagtactttgctaattcataatttaacaaaaaatcaattattgattataaatgatctagttaaaatctcatcttatgatttaaattcaccctcttcaatttcaataatttttaaaaataatgcatcaaattcaattatttccaatgcatcttttattaattcttcaattgatttaatcaatgtttcaaatattaatattataaataacacttttaactcttcaaatagttgtatattaaatattaatggtggagaaaaaaatttatttgttaataatgagctatttattaattctactgatatttcagtgattaatctcaataaaactttattaaatattataaaaaataataatattaaattcaatacatctaattctaaaattataactattaataattctaatttcacattgattagtaataatgtaataataggcatatccgattcattaatttttatttgttctaagggttcaagttatgataatatttataaaaatatattaaatgctaatgcttcgtcaatatgcggatatttagcttctaatgcaaaatggagtagtattagttataataatattttaattaataaatcaaccaatcagtcagctatatattattgtaataactcatctaataatacaattaatgaaaactatattatttcatattcactaaatgctaatgactatgcagtttcagtaatttcaaatgaaagtttatcaaatttaataattaaaaactatttaataagttctaatggatttaaacgagctaattttgcagtatacgctccatttgatttggttaaagataattctccatttgacatttatgtttcatgtaatggaagtgatgttgtaggagatggtagtattgataatccttatgctacaatcaaaaaagctattgaaaatagtttaaatttgtatgttatacatgtatttgatggaaattatactgagtctaatattattattgataagaatttaacacttgttgctgttaatttaggtaaagttttcattgatgttcaaattaatcaattatttgatatacttgaagataatactttatcaatttctggctttttaattggaaatgctcataatgttgatggaggatccgtatttattaacaatggtaagttgttcattaataatgtagttatatttaattcctcatcttattttgataattctcatccaatatttgaccaaaatataacttatcatgaagataatttaattgataaagcacatacagttgattgttctaatacaggtaaaggcggagcaattctcaataacggtgaattaattattaattcatctatcttttttaataattttgggcatcgtggtggtgtaatagctgattatggcaaaactattataaattcatctattttttataataatcggggaattcatggaggatgtatttattcagattcaaaaaataatttgtttgtaattaactctatttttaataataacacagcagtaacttcaatagacttttgtaaaatcatgttacattccattggttggtcaattggagagaattatatttataattataaatctgaatgtgattcaccaattggtgctggtggagtaatttatactaaaaatacttcagtattaattaaaaattcatcttttatttataattctgctcgtattggtggtgtaatagccacacaatgtgatatttttacacaactatcaaattttatttctgatgttaatttatatattgataattgttattttaatagtaataaggctaatgatactagatttaaagatgatccactttatttaaagaactatgattattttaacgattataatggaggagttgtttatggaacatacaataaactatatataaatgcttctaatttttattataatcaggttattaataatggaggagttttatatgctaaagctaatgatggtaagataatagactctattttcaataataatcgtgcaggaagtaatggtggtgctttagatatttcaaaaaatttccttatcatgagatcaattatttcaaataattcagctagatatggtggagctattgaatatgattcttatacctattatgggcatattcaagacaactttaacatttataattccaccatatctaataataaagctttaaatgctggtggtgcatttaacataggttctggaaatgtttctgttcatgattcaaatattgtaaataattttgcaccttctggtactacaataaattctcatggaatcaaatacgctattgatatgagatataactattggggtgtattgccaaatggtcatattggacctgatgactcagtttggaatgtgaatcataatttatttaaaccatggtacaaacaatgggtagaatggaagccaaaagtcattgaatcaaataattctggttttaactctaattctagtaatcataatccttatatcaatcctaattccaactctggtggaaataatcataataatccaatatctacaggatctagttcttccactacaacttcaattggtggagctaatgggaataatcatggatacggtaatgggaaatactttggttcaggtgatggaaataatttgggtccgagtagtggaaatggaggtttttatttagctattccaggttataataaatataatgggcaaaatgtgaattcaaatacctcatcaaattcacataagtctcaaaatcgtggaaatgttgattcagatagcctcagtaaatcaaatagttcaaaatataatcctgatttagtttctgctggttttactgttaatgctgcttcatctccatcaagttctcaaagaggaatagaacgtgctagtaaggaatcaggttctttaagtgattcagcatcttatgaaattactaaaaaaattaaagaagtcttttatgatgagaaccatataactacgtttattttatttataattattatattgtttttaataattttaggatacaaatatggagttggtaaatttgatgaatga

SEQ ID NO: 7017 - DNA, 6582 bp, Methanobrevibacter gottschalkii
  source 1..6582: mol_type = genomic DNA
atgtcatatactaaatttattttaatattatcaataatattcctactgtttgcttcaatagcttttgttagtgctgctgatactaatacgagcattgtagaagaaccaatggatgttaaacataatttatgtgatattaataattctttagaaaatcaagaaatttatgtcagtccattaggtgatgatgatgctaatggaagttttcaaaatcctgtttcctccattcatcatgctgttgcaatggcaaaaaataattctaaagttattttaatggagggggaatataaaggtgcaaataatacatttattttaattaataaaaatttaacaattgaatctttttcaaataatgttgttattaatggagagaataaacatgcattttttaaaataaccccctcttcttctttaatacttaataatattaaatttattaatggatatacagattcttattctcaattaggtattattaataatcttggaacattagtgataaacaattcttcatttaataatatgaactctattatgggaacattttttaatgaaggaactttaaaaattgaaaataccaaggttactaatgcagtttctttaacaatggctcaaatattaactaatattgggaatactactatattaaattcccaattaattgaaaacaatgaatattcttcaattgatgttgttgtttataattataataggattagtattgttaattctcaagttaataatttattttcaaataagaaatattctgaagattcatataatttagcttcaattcttattaataattctaagttagataacattgatcttgaagatgcatttgtttgtattcacaactctcaaatcacatttaaatctatttttaatggttgtaatgtttctgttgatgagagtacatttctttataataagtctcttttttcaataattaatgtaatgaattcaaattttacagcgattcattcagtttttaattctcctatttcaactaaacgttcgcatgttaatataacatattctgcaattttaagatcaatatctggaaatgcctataaatgttatctttatgctccttataattggtggggtattaattcaggtccatcttatcaatactttacagatgttaatgttagttattgggcaatatctactttcgaatatgaatctgactatattccaattaatcctaattccacttttacaacaacattaaataaatggagtgatgggaattctacatttgaatttaaaacagaagaatatttaccgtttagacatttgaaatttgaatctcaaaatggtaaatttttatattcatctgcaaatatcgaaaaagttttttcaaattatttaattggaaacaatcttgattgtcaagttcatgttattatagactttcaaaggttgactcttagaattggagaaggtttaactaactataattattttgtctcaacagaagggcatgacggtttaggaaatggtactttcgaacatccatttaagacaataaattatgctgtttccaaagtaggaaatggaaacactatttgtttattagaagggatttataaaggcaattggaattctaatgttacaattacgaagaatataactattgttggattaggaaatgtaaatttactaagatctaatgattatagtatcttcaatattaaagaatggggaagtttgtctttaaaaaacattaatttctctgttgatataattgattatgcacatccattaattattttaaatggtgggaatttatctattatcaattgttctttttcaaatataacttctacaaatgttatccacacatctaatgggatagaacataatggaattgttaatatatctgattcttattttgcagatatttcaggctcaatattaatagggtctgctaaagtaagtgtttcaaattctttatttgaaaaaattaaatgctataggataattcaaggatatgaatattataatgtactatttgcaatttcatcttccatagaaatttatagttcctgttttcaaaataatttaatgggtattgtaaatttacatccatttttttattcatcatcaaaacttagatattctcaatatagtaatgcatattcaagatatgcttatattaaaaacacaaaatttgaaaataatgtatttttcgataagaattcttattattcaagtaatggaattggattggatatttataatgaaaatgaacatttttatggaattatagataactgttcattcattaataataaaggtcaattagccatcgccaccagtgttaattcatcaatatttatgaataattttgaatcccgttatggttatagtatggtttatgctgatttaattaataattcagtttttattaataataaaaatctgtatgaagattataataatgtatttatcggtaatggcatagctagtgctggatgtatattggagtctatttttatgtataatgaagctgcttttggtggagctattgcagatacaaaagaagcccattattgtgtttttgtaaataacacttctaaatatggtggtaacgatatttattcttattcaggagatgtagattattctagtaattggtggggtgataatcaaaaaccaaactctgataaagtttttattttccttggaactttaactttgaataattgggtcataatgacatttgagtctgtttcaaattctattattaaagcttcattaaatgctcttaataatggggaaggtaatatttgtaaaattaaccacaacatgccttctcgcatggtttatttcaaaattaatcatggaagtctttctccagagaatactttacttataaataattctgcttatacaaacatgacttataatttaaatttagattttaaagtctatgcaagaattgataatcaactattagagttagatattagaaatacaaaaactctcttaataatggaagatgttatttttaaaggtaaaagtaataattttgctgttgatttaatcaatattaatggttataaaatatttaatcaaacattagttgttgaaattattgatgagaataatacacagaatatatttacaattcaaactgatgataatggtcatgcagaatttaatgtagattatccagttggtatttatcaggtaaatattaattatttaggtaatggatattttgataaatgcaattctacttctataatgaaaataataaaatctaatacttatttaattagttataatcaaacatattacggcaaaaataacttgtttaaatctgtattatttggtgaaggaaataagaaattaagcaacatgactataaaattcacgattatagattctaaaggtaatttaagggaaatctattctttaacaaatcaagacgccactagtgaaattattatcaatttggatgtaggtgagtatacaataaggtctgaatttttaggtgatttatggtattcttattcaagcagtatttctcatatattggtcaatcctgttagttccacactaattgtttctaatgttacattatatggtgtgggtgatgtttataatattactttaaaagatattcatggatcattgatacgtggtgaaaatattattgtcacaataactcaaggagcatcatgtgataaatttacattaaaaacagataataatggtgttgcaaaattaactataaactatttacctggagtttataatgttaaagctcagtttttaggagatagtatatatgcccctactagtggtgagggagttattaaagttgaaaaaatttttactataatttcagggttccatcattgtattttaccattaaatgggatatacacagttgttttaagtgatatgtatgggcgacgtgtcaataatgaatctgtaacattatccttatataaaggcaatctaataaagaaatacacaattaatactgatgctaatggagaagctgattttgttataaaccttgaagaaggaacttatctaacaacttttgaatatggtggaaataaatggtattgtgatgcaactaatgctgcaactattgttattagtaaaaaagttaatttatccaacattaatataaattcaacagatttggttcagtattatggggaaaataaatatttcataataaaatttaatgatcctaatgcatatagccaatatggcaaaaaaattggagttacaatatcttctggctcatggtcacaatcttatgaagttttcactgatatttttggtcttgcacgtttaaaaatcaatttgaatcctggagaatataatattacttacaaatattcaaatagtcattataatatatttggcacatcttcaaatactatacatgtttataaaatgcctgctgttttaatagcgaataatattgtgatgaaaagtaatgaacaacaattatatgaaataaatctcagagatattaataataatcctatcaaaaacatgcttgtaaatattgatattgatggtgtgaaatataattccactacaaatgatgagggtatagctaaaatattacttagtttgggtgttggaaagcatattattagttataattttatcaatccaaattatttgtcctcaaactcatcatctgttattctagttgttgatagtgataaaataccttcaaatttatattcacaagatattaatgcatttgataatcaaatattaaatttcactatacgattgtcagacatgttaaataatagcatatcaagttctgaagtaatacttgagctttttacattttatggagagtcaattattaatattactggtatcacagattccaacggaagaattagctttgatttaaatttagattatggaaaatatatagctaatttacattataatggaaatgctttgtatttagctagctattcaactaatacgattaatattgaatcagctgataatcgtacaaaaaccattttatttaatgtagagacaaaattaactaattctaaatattatgttattttgtccgatattaatggaactttgcttgttaataaagaaattaaatttatcattggaaataaaacaattacttccataactgatgaaaaaggaagagcttacttggaattaaacctaaatcctaattattatattataaaagctatttttaatggggataaggattacaaatcagtttctagtttgaaaaagatatttatttcaggtgaactaacgcatttatatgctataccattagttaaatattataggaatggaactcaatttcatgcaagacttgtgaattctaaaggagttcctttaattaataaaatattatctattttattggaagggaattattataattgtacaactgatgaaaatggatggattacattaaatattgacttaaaaccaggattttatgatgtggaatgttactattattcaaataatactgatgaaaattcttttgataaaaccaatatcacagtattatctactgttttaggtcaaagtgaagtgaaatattatggagattatccttatttaacaattaaatttttagatggtgcgggaaatctaattaaaaacacaagttttgttattgatattgatggtaagaaatactctgcacaaactaatgatgagggtatttttaattttaatcttaatttaaattcaggaagtcatcttatttcagttaacaatccttatgatgggttatttgtgacgtataaattagatattttaacaactatttgctcaaataatctagttaaagtttttaacaatggagtttcatatactgcgcaattacttgatagctttggaaatccattaaaaaataaaaacgtaaaaataattattaatggtgttttatattataaaaaaacagatgttaagggtattttagaattaaatatggattttaatcctaaaatttatcttgtgacagtttttaatccagttactaaagaatatattgaaaatacagttaaaatattgccaacacttattaataacaagaatataaatatgtatttctcgaattgtgctttttataaagttcgtgccattggaagtgatggtaaaattgttgaatcgggggtaattgttaaaattaaagttaatggaaaatcttacaaaattaaaacaaataaagatggttatgctttgtttaaaataaacttaaaacctggaaaatatataattactgcagaatacaattcatacattgtatcaaataaaattaatgtaaaatcattactaacagctaaaaacatttttcataaaaaagctaaaaagattaaattttcatctaaattagttgatattaaaggaaaagcattaaaaggtaaaaaaataacttttaaatttaaaggaaaagtctataaagttaaaactaataaaaatggaatagccacacttacgattaagaatttaaaagttggaaaatatactataatgtcaatatggaataaattcaggataaaaaacactattaaaattaaaaaataa

SEQ ID NO: 7018 - DNA, 5736 bp, Methanobrevibacter gottschalkii
  source 1..5736: mol_type = genomic DNA
gtgagtaaaattctgaaaataaataaaataatattagttggtattgttttattgactattttatcattaaatgcagttagtgcatatgataattcaaataacactgaagagtatctttcttcggaaaattatgaggaaatacttagtgcagactcttttaatgataataatattcttgcttcagcaagttataataaaacaatttatgtaaattacactggagatgactcaggatcaggcagtcaaaacagcccatatgctacattaaataaagccatatctaatgtaaatgattctgataatgcagttgtatatttaagtgctggaagatttagtggtgaaaataatacggatttaagtattaatttagctcataggaattataacagtagtttaactattattggagcaggtaatggtcaaactatactcgatggaaatgatgaatcagccattttcacatcaattagtgctgattctattgtaactttaataaatattacatttacacatggaaaatctgaaattggttcagttatgactacttctggaaatttaaccatagataattgtatttttgataataattatgctactagttctgcagcaatttatgcagaaaatacagaagatataaaaattacaaattcagtatttaaaaataattatggacatgaaggatgtgcagatttttattgtgaaggcagtgaatcaacaataatagatattatcaattctacatttataaattcaacaacaccatatttatatagtttaccctcttttttaatccaatattcaaatgcaaatattattggaaataaatttgaaaatataactggagtatatcattctggaacatttgaattaaaatatggatatggtaaacgtaaagtaattaataatacatttattaattgtaattatactggaaataacgatggaggcataatttatatttcaaatacctatcttaaaaataatcaatttataaactgtacttcaaaaaaagctttaatctattctttaactgaatttaatgcatatctcaaatttaaaaatgcgacaattaatggaactgaatttaaattatattgtgaagtaacagatgatttaaacaatagtgtaagtacttatggagaagttcatttctttattaatgatgaaaaaataaagtccagcagatccaataatggtactgcttcaatatctgtgattaaattattagataatggtgattacacacttagtggaacttattactattatgaaaatccatttgaagttaatgtgaaaaatgcaacactccatgttgattttaatcatgaccccctagaattatgggtatcaaatgatggtaatgatacaactggtaatggaagtgaaaataatccatttaaaacacttaaacatgcattaaattatggatttgaaaatacaatagatttaactattcacatgaaagatggagtttatactggaagtgacaataaagatttatcttactctaatgttggtaaattaactatttttggtgaatcttatagaaataccataattgatgcagaaaacacaaaaaagatttttaattttggtgaatatctaaatgtgacattagcaaacctgaccctaagaaatacaagtggaaatgtcatttctgcttatattctaaaaatctatgattctgttattgaacatgctgattctttaaatggagaatatagtgatacatctaaaataatttttaataatctaacttacactaacagtggtggaatatacatatacaatgcagaaatttacaattccaaatttaaaaattgtaacaatactaaaaataattgccttttacggataggttctcttggaaataatataatacatattgaaaacactactataatcaacaataccgttaacggacgacatggttcttctattgttagtatctctggaaatagtgtattaataaataacgattacattaataatactgttattagtgaaaattcgaagtatatttttcaaagttattctaataaattaatatctgtaaacgaaactttcataggaaacaatgtgtccagttatatagcatattatgatattaatggaaataacgttgaaataataattgaaaatattacttttaaaaataattatgtaaaaaccgatggatccgggttagctattaagaccggaagaattaaaggtgcaaaatttattaataatactgctttaaataatggcggagctattattatcttacctcattataccggcagtcaagttccgaaatgcattcttgaaaatgtattttttgaaaataatagtgcaaataatggtaaagacatatttattgaaaaggccaatatcggttatgaaaacggacaattagacaacattacagtaacttttaatagcttaattacacataatttacaagatattgtgattgcaaatattagtcatgttagtggagctgttattggtggtggaatgattgaatttgatttaaatggctcatatatgggagttgcagaagttattaatggtgtagctaaattaaattatttaggatttacaaaaaacggcaattatactttaagtggttcatataactatgaatcaaacaccaccatttataatagtgctgttgttaatgtaattcttaatccattaaaagaaaatattacttcatatgtttctgatagtagaggagatgatgaaaatggaaatggttcatatgaaaatccttacaaaaccattgaaaatgcattaaacgaaggttataaacaatctaaagtaatttttatcaaagtattggaaggtaactataccggtaaattcaataataatattacaatttatgattctttaaatatcacaattattggtgaaggaattgataaaacaatcatcacaggaaataatactaaaaacaactggtttataaccgtattacatgcaggtaatggatttttaaaattaataaatatgaccattagtgaaattaattataattataaaaacatgaatagtcaaaaatctgcggttgttattgaaaaaggtgctaatgtatttattgatagtgttaaatttactaaaaatcgtggatacaacggcggtgcaatcaataatcaaggtacattaaacattattaactctattttttataataatggtgattcaagttatggtggatctatatataacaaaggtataacaatcattgacaattcatcatttattgcaaatcatgctaaatattgttctgatatgtttaatgagggtattttaaatatttacaattcaaatattcaagattctatgcgtaccaatggttggacaggaaacacccttgtaattggaggccttggcaatataagcattattaattccaaaatatttaggacaggtaaaatgcctttagaactcattgatccagacgatacatatgctgataatccagcatttactataagtattggaacaattggaagtataacattaataaatacaacaatagatggtcatgatgccaaatatactggacctaatttttatattacaaataatgctgctataagttggtctgtctctacaaatattaaaattcacaattccagtttcttaaatttaaataacattctaaataatcaaatgggaaatttaataataaagtcatcatttattaaaaatgtatccaacctgattatgtcaacaagcaattataatctaactgtaataaactcttactttgcagatggaacaatatccactgaaaaatacgatatatccaatatttacttaaataataattggtggggaagtaattctaaacctacttataaagtagataatgttgatacaactcctgaaacctggttaatactaacattaaatcaaagtaataaagaaagtttattaaaagacattattttatcttttaaagttactgatggtgaaaacataacagattatacaggatatttatatcctagaccatttacaatgtctgctataaacgctacattagaatatgccaatggaaatattattaatcatcttatcaatcaaatcaatatggcgaaaaatgcaactagttattatatagaagctaaaatagataaccaaacagttaatttaacaagtaatataacccataatgttactatcattgctaatgatatagaatttgattatggaactaaaacaattactgtgaatgttttattcgacaacttatctgcagatgatgaaattattactttaaaagttaataataaagagtattctactaaaatcaataatggtatagctatctttaatattgacacattagttcgtggaacatatacattaaactacagtataaatgctactgaattacatgacaatgtaataaattcatccacactaattgtaaacggaatagatccaaatattaatgcaagttctaaagcagtgctggttggaaataatgtgacagtaacaataacaataccttctgacttaacaggaacaataaatgttatcttaaataataaaacatatgtggcagaaatacatgataataaagctattgcaatcattcctaatttagcacaaggaaattacttagcaaatgttatctattctggagacgaaaaatacttagctaaaaatacaacattaaacattaaagtacttgaaattaatatttcagcaccgaatgttgaaaaatactacaaaggttctgaaaaactacgagttatcgtaatagatagtgaaggaaatgcaattgttggtcaaagtgttcaaattaaacttaataatgtaaattacacagaaatcaccaaccaggaagggattgtaagtgtaaatcttgacttaaatgttggaaaatattctgcaacaattttagttaatgataaaaaaattaacacagaaataactatcaaatccacaatccaaggatttaatatgatcagaggatataatagtggattagattatcaagcaactttattaaatgatgatggaacaccattagacaatacacttgtaaaactcaaaatcggaaatagtatatatgaagttagaagtaatgcaaatggagttgttaaattaaacaaaaaattagcaattggaacatacactgtattaattacaaatccatctaattttgaaacacaaacagctactttaaagattgtttctagaataaataataataaaaacataattggtgattatttatctggatttagctataaagttcgcatcattggtgataatggtaaatccgtaggagctagagaaattgttaaatttaaaattaacaaaaaaacttacaatatcaaaacagataaaaacggttatgcaagtttaaaaataacattaactccaaaaacatatcaaattactgcaacatacaaaggtcaaagtgttaagaacaaaataaccgttaaacaaatacttaaaacagcgaaaaaaattaatatcagaaaatctgcaaaaaaattaactttaaaagcaacattaaaaaaatccaacaaaaaaccacttaaaaacaaaaaaataacattcaaatttaaaggtaaaacctacaccactaaaacaaacaataaaggaatagctaaaattatcattaaaaagaatgttattaaaaaactcaaggcaggtaaaaaatatacagtaaaagtgacctatgtaaaagacataatcacaggatccgtaaaagttaaaagatag

SEQ ID NO: 7019 - DNA, 1152 bp, Methanobrevibacter gottschalkii
  source 1..1152: mol_type = genomic DNA
atgaaatacagaaagttaggaaatactggtgttgaagtatctgaaatagcttttggtgctgaatttttagtagaaaggccttatagggatactgaagttttaattaaagcatgtgaggaacacgggattaattttgttgattgctggatgagtgaacctgatgtacgttcacatttaggtaaagctattaaacctaatcgtgaaaaatgggtaattcaaggccacattggagctacttggcaaaataatcaatatgtaagaactcgtgaaatggataaggtaattcctgcttttgaagattttatggaaagatttcaaattgacacacttgactttggaatgattcactatgttgatcaaattgatgattataatgaaataattaatggtcaattcattgaatatgttcgtaagttaaaagaagaaggaacaatcgctcatattggattaagtactcataatcctgatattggacttttagctgctcaaaatcctgaaattgaattattaatgttttctattaatcctgcatttgacatgtttggtccaatggaggatattgaggaatataggaaagaggatgcatatggtgatgaaaaattatcttctattaacccccaaagagcagaattatatgaatcatgtgagaagagtgggactgctttaacagtaatgaagggttttgccggtggaaatttattaagtgctgaaacatcaccatttggtgttgtattaactccagttcaatgtattcattatgctttagagcaaaaaggggtttcaagtatttttgttggtgtgaaaaccgttgatgaacttttagaatccttaaaatactgtgaagcaacagaaaatgaaaaagattatgcagaaattttaagaacagctccaaaacactcgtttgagggacaatgcacctattgtgggcattgcactccatgcacctcggaaatagatatatcaatggtaataaaattatttgaccttgcaaaaaatcatgatgaggttccggcaagtattagggaacattataataatttaaaatatgatgcaacagattgcagtgcatgcggggactgtgaagaaagatgtccatttgatgtagctattgtggatgtgatggaaaacattcaatgcttattctctcaatga

SEQ ID NO: 7020 - DNA, 1452 bp, Methanobrevibacter gottschalkii
  source 1..1452: mol_type = genomic DNA
atgtatgaaaaagaagaaattatcagcgattacattaaagaggaattatccgatgtacctaatattttagataatgaattaacattggatggcagaagttttgaacatagaaaagagtttgaatttattaaacatcatattgatgagtttttagaaaaaacaaccaataaccgttatttcgcacttcccggcttaagaggtgtcgggaaaacaacactactataccaaacctatgagtacctgtttaaatccaaaaacatcaacccaaatcaaatactgttcatttcatgcgaaaacctaaatgacatagtggattttaaaatcatagatgttgtaaaacagtttttagaaacctaccacaacaccaccctaagaagactggacaaaaagatattcctgctcatcgacgaatcacaacatgacaaaaaatgggcattgtccggaaagaggatatatgacaaaaccaaaaatatattcatgattttcacaggttcatcagcattgaatcttgaatacgatgcagattcagcaagaagactgctcaaagaaaacatcactccactaaactacaatcagcacctgaaactaaaatacaactacaatgccgccaacgtttcagcatccctcaaaaaattaattttcgaaggagacataaccgatgcagtcagctgcgaacaacagataaatcaggatttaatcaacatcaatggctattcaacaaccgactggaatgaatttttaaaatatggaggatttccaacatcactctttgaaaacaacccccatataatctgcaaaaacataactggaatgataaataaagtaatatcacatgatatgggaacaatatcctcaataacctcaaccagccaaacacatgccaaccgcttactgagatttctggcactccaaaagccaggagacatttcacaggaaaaaatgggaacataccttggaacctcaaagggcaatgttagaaacattctagacattcttgaaaaaacccaactcatatttcactgcgaaccccatatcgcatcacctaaaagatccatcaagtcatgggagtatttttttgcaacatcaagcataaaacatatcctgacatcatcaataggcaatcttaattcaaataaaaatgcatatcttggagttcttttggaaaatcttgttgcatcaacattattctatctgagcaatgaagaaggaaactatttcacattatactatgatcctgaagacagagtcaatgtcgattttgtaattcagggcgagttccaaaaggcaatacctattgaagtgagcatgggcaaaaagaagaaaaggcaaatagcgactgcaattgagcgttacaatgcggattatggaataataatttcaaatacaactaaaacaatagcgaaaaaagataatattatttatctgcctccaaaaacattctcatttttataa

SEQ ID NO: 7021 - DNA, 846 bp, Methanobrevibacter gottschalkii
  source 1..846: mol_type = genomic DNA
atgcaatttttaattttaaacaatggaattaaaatgccgattttgggatttggaacataccaaatacctccagaagaaacaaaacaggctgtacttgatgcaattgatgtaggttatagattaattgatacagcacaattctataaaaatgaaaaagaagttggtgaagcgattaaagagtgtggtgttgaccgtgaagagttattcattacaacaaaagtatggataaataattatggttatgaaaactgtcttgattctattaaagaatccttggaaaaattaggtctggattatattgatttggtcttaattcatcaacctttctctgattattatggtgcttatagtgctttggaagatttatacgaagcaggcattatcaaagcgattggggtatctaacttttatccagatagattaactgatatctgcttatttaatcgcagaatcatccctcaaatcaatcaggttgaggtaaatccatttaatgggcaatatgctgcacaagcaaacatggagaaaaatggagttcaaatgcaggcttgggcaccatttggacaaggtaggcatggcatgtttgaaaatgaaacattaaaaaaaattggtgagaaaaatggtggcaggacaccagctcaagtaattttaagatggttggttgaaagaagcattgttgttttagcaaaatcaactcacaaagaaagaatggctgaaaacattgatatttttgactttgcacttgatgaggaggacatgatggaaataatgaatttggataatggtgaaaccctgtttttcaaccaccaaaatccggaagttgttgaaaggtttgaggatataagttaa

SEQ ID NO: 7022 - DNA, 1287 bp, Methanobrevibacter gottschalkii
  source 1..1287: mol_type = genomic DNA
atggcatatgaaattaaaaacaagaagaatatttcaacaattggagtgcatgcaggccaagaggaagttgatgaaacaggttcacgtgtaactccaatttatcagacaacatcttatgtatttgactcaccagaacaggccgcaaatagatttgcacttaaagaaggaggaaacatttactcaagacttacaaaccctactactgaagcatttgaaaggagaatggcagctgttgaaggtggaacatctgcatatgcaactgcaactggaatgtctgcaatcttttatgcaattatcaacataacctctgttggagataacattgtatctgcagataatttgtatggcggaacctatgaattatttgaaaatacattagaagatttgggacgtagtgtaacttttgttgattcacagtctcctgaattattcgaggaagctattgatgataaaacaaaagcaatttatgtggaatctattggaaatccaaaattggacatcccagattttgataggttagctgaaattgcacattcacatggaattccattaattgcagacaatactgttggaatcgggtctgtaagaccatttgaccatggaacagacattattgcatcctccgctacaaaatacattggcggtcatggaactactcttggcgggattatcattgaaaagggtgactttgactggatgagtggaaaattcccatcattgtccgaacctgatgcaacatataatggattagtatttggagaagcattcaaagattctgcttttacaacaagaatcagaacagtcgttggaagagacactggtgctgtaccttctccattcggatcatttttacttttacaaggtttagaaacactaggacttagaattgaaaggcatgcttcaaacgcaatggctgttgcagaacatttggaggcacatcctaaagtagcttgggtaacatattccggtttggaatcatctcctaaccataagatagctaaaaaatatgctgaaaaaggatatggtggaatagtatcatttggtcttaaagcaggttatgatggggctttaaaattcattgaaaatgttgagttaatctcatttttagcgaatattggtgatgcaaaatcattagttactcatccggcttccactactcattcccaattgtctgaagaacaacagttatctactggggtaacaccggatttaattagattttctgttggtattgaagatttggaagatattttggctgatgtggatcaagctttagataaaatttaa

SEQ ID NO: 7023 - DNA, 5112 bp, Methanobrevibacter gottschalkii
  source 1..5112: mol_type = genomic DNA
atgaaattttttagaaaaaaaccaagaatatttttgatacttttaattgtaatgatatgcttttgtttattctcacaactggctttcgccgaaaatatcaatgaaagtgaagttgttggaaatgcagaaattgaaaataatttaagcagtactaatgataattttgaagtttcaaaagatataggttataacgtctctaaaaagatttcaacggataattcaaatgaaaatttaagaaattctcaacacatgactttatttataattagtgataatccgggaacaaatattctggataaagctattttagaactttccaatgaaaataagataaatggtgtaaatttaattattagaaatggaaatcaagtaaaatcaatgaatgaaaatgaattaagttatttattatctgattgtgatgcttttataggtgaatggattagtagtgatgtcgattctgtattgacaagtgttttagtaaaaaatcctgatttgtctaataaaaaattatttcttgtattggaacctccttcaggcaatttaaactcggggtccagttcattgaatctaattaggaataataccttgaattataataagatatttacaaattattccaatgaagagttaattaattattttaagaatactaaaaggggcaactcatattctaacattaataattatttaacaaatggaaacggaaaaaatttcgattcaatttttaatcgattagttctttataaggatttgaatgataaaaataatttgaaaaatcaaatattgtttattttaaattatttgggcgttgatgttagttatgaacagccaacatttaccggtgttaaaaactatggtatttatagggatagatggtactccttggatgagtatatttctactttttttaaagcaactaataataggacggttgggattttagaaagtaaaatgtatattgaatctcagcagttaaacacttgctattcaattataaactcattggaatcaagaaattataatgtaattcctgtctttgctgatggaggatctgctgaacaattgaaggtcatggttgaatcctggacaagtgcgggagatgatatttcaggatttttatctaattcttctaattttgatgtttatattgatgcgattgtatcgatggtggcatatggtgttggtggggaaaacttcacaaaagcaacatctttttttgaagaagctggtgttcaggtatttagggcggttcactcggatcatgtttcaaatgaacagtgggaattaggttctactggtttaactacagaaaaaagtgataaatggtggcacattactattgctgaagcgcaaggaataattgatgccacattcattggaggtaattcaagttatatatcaaatttaaccggagctcaaattaccacttatattccgcatgaagggaacatagggttacttgctgacagaatcgattcttgggtggatttaaaatacaccttaaatgaggataaactgatatctataatttattataactatccaccgggaaaacaaaacatcggttccagttatttagatacaataaaaagcatttataatatactttatactttaaaagctgcaggatacactgttggaagtttgccagttgatgttagtgaacttgaatatctaatgcttacatgcggtataaatgtagctacatgggcaccgggagaacttgaaaaaatagctaatagatcttgcataactttacttccggtaagtgaatataactcctggtttaattcattagatgaaattgtaagaatacaagtttctaacggtactgttgcatatattggtgagttaactaaaagagccgttgaattagattataccaaaacaattggaagcacaattgacgactggtataatcaagttgtttccttacttccagatgaaaaatcagttgaagcaaaagaagttttaagtaatattgtcagggctttaaaagattatgctaatactcattcacaagactattatagattatatttaaaatattttgatgaatttaaggaattaaacattcaaggattaaatggatggggtgaaactccaggaaatgtcatggtagttaataaaaatggtacagattactttgtaattcccggattgacatttggaaatatattcgtggctccggaacctcaaagaggatgggagtctgatattaaaaatctttaccattgtactgctgttgctccaacacatcagtatttggctgcatattattatatgcaaactagaaatccaaatgccatgattttcactggaaggcatgcaacacatgaatggttgccaggcaaagaaattcttttatctgcaactgattatggatcagttgttgttggtgatgtacctcaattatatttttacattagtgatggcttaggtgaagctattcaagctaaacgaagaggatttgcagttattatctctcacttaacttctccaatgtcctatactcatttgtatggtaatttaacttttcttgctaatctgataaatgattatcaaaaagcagggagcagttcagaaaaaaataaaattggagaaaaaatacaagatttgataattagcaatgattattcaaccaatttaggactcaataagagtcaaataaaaagcatttctattgattcattaatagaaaaaattaatatatttttaaaatcaactcaggatactttacatccgttaggccttcatgcattaggagaatattggagtgaagaggatattgctagtacagtttctgcaatgctttctcatgattttgttttagagaataatcagggaacacttaatttatttacagaactttctaattattactattcaaaatcatatggtgatttaactccatttgaaagggaatttgtattgaataaatcttatgatatatgtaaagcattgatttattgggatgttaattctgtaagtaatgtattaattaatggcaatgttaaatttaacaattctaacttctatgcttgtttaaatttggctaaaagctacataaatcttattaatcaaagtatttcaaatgaactaaatgccatgcttgatggtttaaatggcagatatattcctacaggagaaggtggggaaattgttgtaaaaccaagtattttaccaacaggtacaaacattttccaagatcaatcatctgaactaccaacacaggatgcatggaattatgcaaaaattcttgcattattaactttagctgatttaaatgacactactgaaaaaattatcatggggatatggtgtgttgaaacagcaagggatgatggtgctttggtttcaactgttctttatttgttgggcatgaaacctgtttggacaaattcttcaagcgccggctttgatgatgaaggaaatcctactggaaaaaaagttggtgcaatgcctgaagtcattaaattaaatgatttaactcgtcctgagggttggaataaaaaaagaatagatgttaccataattactagcggattattcagagatttatactcttctcagtctgttttaatggataatgcatttagagtagcattggcaaggtcatatttaacattaattaataataaaactttaatgaatggaaaatatggcaaggaattaagacaggcattggactgtgtcatggagggtataaattattatagggcttctaatgaagctttaaaagataattatgttgctcagcattggattaaagattgcctatattatttgagtattggttataatgcatcttatgcaggggaatgtgcaattacccgtatattcgcaccacctaatggagattatggtgcaggaatatcaaaattggtgtcaatgtcatggacttggaacaacacagacgaattagctcagttttacttaggtcgaatgggaaatatgtattctaaaaattactggggagatacaaatccattagtatttctaaaagcattatctaactcagacacaataataacaagccgcaatacaaatcagtatggtgtaatggataatgatgacttctttgattattggggtggtttatcaatggctgttgaacatgtttcaggtaaatctccaaaaatgaatgttttaatgtatgctgataaggataatgcatatatttcttcgcttgaagaagtcatgtatcgtgaaattgcttcaaggtatgacaatcccgaatggattaaaggaatgatgaaagaaggatacagtggggctcgttatatgtccaataaatttgttagcaatctattgggttggcaagtgacaagaccggattcagtttcagatgatttatggaatagggtgtataatacctattataaagacaaatacaatctgggtgttaaggattggttaatgagtggaaataatgcctattcccttatttcaatgagtggaacaatgttgagttcaattcataagggatattggaatgctgatgatgcaacaataagagatattgcaaatacttgggcgcaggcaacagttaaaaatggtgttgcatgttgtgattgcagctgtggtaatgtggctatgatgcagtgggcagttcagtatgtaaatcctgatattttagcacaattattgccgaaattatatgatgcaactgaaaatccagtattcttaaacaatactcataatccaaatactaaacctgaaaacaataatgatcctcaagtagaaccttcaactccaaatcctactgatggttcttcttctagttcaactatttctaataatgcaacttccacaaattctaatcagcattcattaagcaatagtcaaaattcacaaggaaatgcggtttctgatgtgggagacagtagttccagtgattcaggtacttttagttctgaaggtgctgatgttaaaaaagcaattgaaattaatcctatcacccaacaatctgcaagtgaagttggtatgagtttacttgcagttttaggagtcatatgtttgatccttatagttggagtcggttattttagagataatggaaaagagaaaaaaggcagtaatttagatgagctttttaatgaaaaattataa

SEQ ID NO: 7024 - DNA, 708 bp, Methanobrevibacter gottschalkii
  source 1..708: mol_type = genomic DNA
atggatgtaataaatatattgtggcaattaggaattttgtctgctgtattgatatttggaattaaattaggattagctacaggattagctaatatgtcgaaaaagtatttggcattagtctcaataggttatggtggtggtgttttaatattaacagagatatcatcatttttcacagaacagattacaggtttaatttattcttataatttcgaattctttttaatcatggccattataatgattctagcgggaattttcactattagggaatataaggtctttgaaaaaaatactgctgcagctacttgtatggcagttgtagctccttgtccatgttgttttggatcaataattgtaagcattatgttagtagctcctgctgtaggtttgggtcttttaaatttaagtgtttatgttgctgctgcactggttttaactattgttttaacatactttgcatcaaactatcttattaaatttataaataaaccatatcccattgttttgggaaattttatgttatttttaggaatttacttcctgttgtcagcattatttttaccaaacatcacgtctatgatacaaaatcctatggatgcaattgaaatagcatctccggaatatctggttgctgtattggtattaatgattattatgatgtttttaggcggattttactttaagaataatagttatttggattaa

SEQ ID NO: 7025 - DNA, 645 bp, Methanobrevibacter gottschalkii
  source 1..645: mol_type = genomic DNA
atggttacaacaattcctggaagtgaaatattaacttctggtttaaatatgatttctcaaagtttacaagttcctgtaattatatttttagtaatttttgcattttttgcagttgttactttaggaagtcttattgcagagtatacatcacgtaaaaaagtctctcctgacctacttgagaaattaatttattcaatatccagagcagattctgttgaggagttgatgagtattattaaaaatgctggaatatatgagaatcaaaaagtaattttagttaaaatattgcgtgcagattcattacctaataaaacaagagaaacattagctaggaagttaattgaatttgaagaaactgaacttggaaaaacaattgaaaaaacagatattattactcgtattggtccaactttaggattgatgggaactttaattccaatgggtcctggacttgctgctttaggtgccggtgatgtaaatactctggctaatgccattattgttgcgtttgacacaacggttgtaggtattggtgctggggcggtgggatattttgtatctaaaattagacgcaggtggtatgaagaagatttatcaaattcagatgctttggctgatgcattacttgacaaattaaaccgctaa

SEQ ID NO: 7026 - DNA, 336 bp, Methanobrevibacter gottschalkii
  source 1..336: mol_type = genomic DNA
atggctagacgaaaatgtaaaaaaagatttagtgataatgaagaagatcccatgactggaacttcaaatcttgtagatgcaatgcttgttattgcagtaggatttttaatttttgttgtaataagttggaacatgcagagtatagtgttttcagacacatcgcatgatcaatctcaaagcgttcaggattctcatatgaatgttactgaggtaagtgaaggtcaagaattaaatgacactttggattctgttgaaagttcgggtcaaggttatatggaaatgggaaaggtgtataaagatccatcaacgggaaaattaataatggttgaaggataa

SEQ ID NO: 7027 - DNA, 2541 bp, Methanobrevibacter gottschalkii
  source 1..2541: mol_type = genomic DNA
atgatagttttatcaattagttctgtttctgctgatgatttacaaacaaaatatgctggtgaagtttcaggggatgttaatgtagttacggttaatccatggaccactagcggcagtttaacatatgatattccttcagaagctaaggatattaggagtgcagatgtttatgtaaatgtttatgggggcagtgctaagaatacttacggagcaaatgctaatgtaagtttaaaaactgcaaatggtgaaaatcaaatagctaatgaatcgttatggattgaagaaggaagtagtgatggaactatttatgctgtgaatgatcatatcaataaatgttattctgattatcagatgcattatgatattactaattctataaaagggcttaatggttcgtcaattacaattaaagtggatactttcaaaatggaaaataaatcgtttgatggtaaaattaaattaattgctttaattttagcatatgatgatggggacagtgatgtaattaattattgggtagatgcaacccaaaaatggacaaaaactaatgttacaacaatattcaatacagaaaaattatcaaacattaatggtgctaatttaatcaatgttgctctttcaagtggtgatggaagttttaaagttaatggtgaaataataggagatcctattgtccatgattctggtaattattatcagtataattcatgggatatttctgataaaatgaaaaaaggtcaaaatactgaattattatccatgaatgtggggtctggttcttatgcatctcttaaaaatgttttgtctgttttaaaagttaatcctattaaagcgaatgtttccctagcaactgagtatgctgatacttgctatgcaggtactaataatacaatttcaattaatgttatctccgataagaaagagaaatattcaatcgaattattagctgatggtaatgttgtaaatagtacggaaattgagttagatggtgaaaatcaaacaattttattcttaactgatcctactgttcgtgaagttgatgattcaactgttaatggggcagataatgttaaagtaaattatatggtaaatgtcagatttaatgatgttgttgtttcaagtgcaaataaaactgtgcctgttttatacaacggtaatcttggaaaagatttgtcttatccatcaagcggatttgcatcatttgaaaatatttcatttactggtgatattgtaattgatattaaaaatgaaagttcatataaatctggttctactggtacaattgaaattttcaatgttaacttaggtaaagattccactattgtaaaaggatttatttatgttccatacaactggtttaatggaaagaaatatgttgaaaatgaaaccatgtttaatgtaacattcaataatcagactatctgtccagctggattccatagggatcaaagtaacttaggaaattatggcaaatatggatatggggtagtggtttatgatgtaacaaattcaattaaaaatggtaataacacatttgtcttaaataaaattaacccaacaccaactatatatccaagtactttaatttacatgtacaacacaaccggtagtgaagtaattaaaaatatttacattattaatggtgcggatctactttcaaacacaagtaacaatgctggaagagtagttcaagcaaattcaaatattaatattaattctaaagatattcttgatgcaaaattatatgtatttgcttctggtgctcaaactaatgagggaaatataattataaataataatgtatttgaaaatgtttggaatggaactagtaaaactacagacttatttgctacagatataactgatattgtaaaagattcaaacgatattcgttttgttgctactggttctacaattttagctttacagcaatttattgtaaccactaaagatgctccaatcaaaactagtgtaaaaccaacaaaattatccactacttatgattcaggtaaatattttaatattaaagttttagataatcataaaaaatcagttaaaggtttaaaacttaaattaaaagttttcactggtaaaaggtatgcaaattattatgtaacaactggttcaaatggtgttgctagctttaaaaaagcttctaaattatctattggaactcataaggtggaaattacaacaaataataaaaattatgttgttaaaaaaactatttcttatattaaagtatataaagctaaaacaatcgttaaagcacctaaaataactgtaaaatttaaaaaatctaagtattttaaagtaaatgttaaaaacaaagcaactaaaaaagcggttaaaaatattgcagttaaactaaaagtcttcacaggtaaaaagtacaaaatctacaagattaaaaccaataaatacggtaccgcctatttaaaaactaaatacttgaaagttggtagccataaagttattgtatattctggtaattctaaatattcaattggtgcaaaaagttcaattaaagtaagatggtag

SEQ ID NO: 7028 - DNA, 741 bp, Methanobrevibacter gottschalkii
  source 1..741: mol_type = genomic DNA
atggcaaaaaatgcgataattactggcggatctagaggaattggtaaagcaatggcattaaaacttggtgaacttggatataatgtagcaatcaactacagaagtgactcatctaagcagttaacagaagatttaattgaagaaattaaatcagaatatggtgtggatgctattgctgttcaagcagatgtaagtaaatttgaggattgtaaaaaattggttgaagctgctgttgatgcattcggtgatgaaatcgatgcattagtaaacaatgcaggaattactaacaattctaacttcattgacttggaaccagaaaaatatggggctgtaatcaacacaaacctcgttagtatgatgcacatgtgtcatttatgtcttccttacatggttgaccgtgatactgcaattgtatgcactgcatctgtaggaggtttgactggtgtaattaaccaagcagattactgtgctgctaaaactggtgtaatcggtttatgtcgagcattagcattagaatttgcaccaagaaaagtaagggtaaattctattgctccgggtatgattatgactgatatgcttaggggagtaaatcaagacgaattaaatgcacttgctgcaacaattcctcttggacacatcggtgaagtagaagaaatagcaggggctttagaatacattttaaccgcaggatatttaactgggcaagttatttcccctaatggtggatttgtattgcaataa

SEQ ID NO: 7029 - DNA, 1806 bp, Methanobrevibacter gottschalkii
  source 1..1806: mol_type = genomic DNA
atgagtccaagaccaattaaaagaagacctcctgaaaaagctgttgataataaaaaagctattatgaatatattaagtattttaaaatgccacaaattcaaattagcattaacaatagtttgtgctgtgatctcaactgcatttacaataatagcccctctgattattggtaaagccacaacaacaatttttaatggaatcaatagcatttcaaaacacacaggcacaatggattttaacacattatttaatcttttaactattgttgtgatattgtacatcattagttcattgttttcatacttacagagcttctttttagttgaagtatctacaaaaataagttatgaattaagagaaagattaatggataaaattttaagtctgccaatggaaagtgttgatgaaaataaaagaggcgatatcctatcaagaattactaatgatgtcgattctctccagcacggaattacacagtcatttttacaattaactacagcagtaattacccttattggcgtatttgtcatgatgttaactattaacatctggatgactcttgcaacagtcatcctcatcccaattgcatttttagtaattagatctattactaaattctctcaaagttatttcttaaaacaattagtctttaaaggttcccttaatggtcagattgaagagacatttactggccatgatatcattcgtatattcaaccaagaagaaatctcaatgaataaatttgaaagtgacaatgaaaattggtttgatcaggaatggaaatcccaattttattccagcttaaatggacctttaatgaactttatttcaaactttacatatgttataatagctgttttaggcgccatatttgttcttcaaaaagcaatagctgttggagatattcttgcattttttcagtacacacaaagtttcacaagaccaattcagcagattacaagagttatgaatcaaatacaaactgcaatggcagcaagcgaacgtatatttgagtttttagattatgatgatgaggaaaatccatcagacaaacagttaactgaaataaaagaaggaattgcatttgaaaatgtgagttttagctacacacctaacgagaaaataatcaaaaatatgacatttgacattaaaaaaggtcagaaaatagctattgttggagaaactggagctggaaaaacaactattgttaaattacttatgagattttatgaaattgactcaggttcaataaaaatagacggtgttgacatcgaagaatatgacaaacattcacttagatcacacataggaatggttttacaagattcctggctattttcagatacaattgaaagcaatatacgttatggaaacttagatgtcagtgatcatgaaattattaaagcttcaaaacaggtttatgttgataactttgtaagaaagctctcagatggttataaaaccattttaaatgaagattcagataatatttcacatggtcaaaaacagttaatcacaatagccagaacaattctttcgtcaaaagaagtattaattttagatgaagcaacttcaagtgttgatacaagaacagaaaaattaattcaaaaagcaatggataaattaatggagaataaaaccagttttattattgcccacagattatcaacaattaaaaatgctgataaaattattgtaattgaaaatggcaggataatcgaaaagggcagtcacgaagaacttcttagattaaaaggatattactataatactttaaatacccaatctgaagacagcccaatataa

SEQ ID NO: 7030 - DNA, 1707 bp, Methanobrevibacter gottschalkii
  source 1..1707: mol_type = genomic DNA
atgaaaaaattaatagcacccctaaaaaacaaaatcggacaaatctttgcaatattcctgtttttagtggttcaagtttattgtgacttgacattaccacaatacacatcagatattgtggatataggtattcaaaatgcaaatttccagtttattattgatactggtatgatgatgcttttaatggttgcaatatctgctcttgcaactgtcggagtttcatatttttcaagcagagtttcctcaggttatgctaaagatttaagaaaaatagtttacagcaaagttttaaaattctcaaatcatgaactaaacaagatttcaagatcttctctgattacaagatcaaccaatgacattaaccagctccaaagtgtgcttgcaatgatttttacaacaatattatttgcacctctccttggagttggaagtatcataaaagcatttgagcttggaacaaatttatcttggatcatttttgtaacttttattggtgttgtaattcttttagttattgttattgtaagagtgcttccttactttaaggtaattcaggaaattatggataagatcaatagaacatcaagggaaattttaataggaatacctgttattaaagcatttgtaagacaggattacgaagaagagaaattcaggaaaatcaatgaagaattctatgatgtcaacatatatgtttttagaaatatgcttataatgcttccattaatgactcttcttatgaatttgatgattgttctgatcctatatttcggagcctatgatgcaatgagaggttctatcctaaccggagatattatagcattcattcagtattcaacccaagttgtaacatcatttctaatgattggtgcatttttcattattcttccaaggttacttgtttctggaaggcgtgtgaatgaagtattaactactgatttaacaataactgatggtgaacttacagacatttcagaaaatcctacaattgaatttaagaatgtttcatacaaatacccgaatagtgaaaaagaaactattaaagacattagtttttccttaaagcccagtaaaaccactgcaattattggtggaacaggtagtggaaaatcaacaatacttaatttaattccccgtcttcaagatccgagttctggtgaaatcttaatcgatggtaaaaatattaaactctttaaattaaaaggtttaagagataaaatcagttttactcctcaaaaggctattttatttcaaggggatattaaatcaaatatgttgactggaaaaaatgatgcaacagatgaagaaattgaaaatgcacttaagatggcccaagttgattttgtatccaatctcaaagaggaagtaagccagggagggtccaattattctggaggccaaaagcaacgtctatcaattgcaagggcgattattggaaaacatgacttttacttgtttgatgattgcttttcagcacttgatatgaatacggagagattaataaaaaacaatttaaagaatttaaaagattcatccattttaattgtatctcaaaggatttcaaccatcattgatgctgatgaaattcttgtaattgataatggggagattattgataggggaacacattctgaattagttggaagttgtgagatatataccgaaatcgttaatacccaaattgacagtatggaggcattatcatga

SEQ ID NO: 7031 - DNA, 645 bp, Methanobrevibacter gottschalkii
  source 1..645: mol_type = genomic DNA
atgaaaaaacttgcaatttttgattttgacggcaccatatttaattcaataactgatgtaataatctgctttaataaagcattatcaactaatgattttcctacattaacttatgatgaatatgttgaaattttaggtggaaacatagatgagcttgtttcatcatgtttaaaagataacaatactcctcaaaatatggaactcgttaaaaatacatataatactatttatggcaaatcaaataaggagaattctcttccttttgatggaatgcatgatgttttattaaaattacaagaaaaaggaatattgcttacaattaattcaaatagaaataatgattcaattagaacttttgttgataaatattattcagacattgattttcaagctattgaaggtcataatcctgtttatccatcaaaaccaagtccttttggaattaataaaatattgaatcaattaaatgtatcaaaaaaagaagcgttatacattggggattcttcaactgatattaaaacaactcaaaatgcagaagttgactgtataattgttaaatggggttatgggaatcaaaatgattatggaaatgaatatgtactgaatgtaattgaaaaaccatatgatatacttaattatttttaa

SEQ ID NO: 7032 - DNA, 351 bp, Methanobrevibacter gottschalkii
  source 1..351: mol_type = genomic DNA
atgttattcgtacaatatccaaaatgctcaacttgcaggaaagctaaaaactggttagatgaacacaatatagaatatgaatcaaaacacatcgtagaagataatcccactgcttctgaattacgtgaatggtggaaaatatctgatttgccacttaaaagatttttcaacacaagtggtatgaaataccgtgaattaaaattaaaagataaacttcctgaaatgtcagaagaggaacaattaaatcttttagctactgatgggatgcttgttaaaaggccgatagttgtaactgataattttgttttagttggttttaaagttaaagaatgggaagaaaaattattatga

SEQ ID NO: 7033 - DNA, 372 bp, Methanobrevibacter gottschalkii
  source 1..372: mol_type = genomic DNA
atgaatgcaaatgctcaattaatgaatttcccaatagataatgtaattcaattaattaggaaaaaatgggttgtacaaattataaatgatttgttctttggtaaaacccgtttccatgaatttaaagaaaacaaacctaaattatccaacagagttttaagcagttgccttaaagatatggaagataatggtttaattcaacgtattgtagataaatacgataaaaagaatgttagatattacctaacagaaaaaggccaatcgttaaataaaattatttatgaaatggcaatttttagtgtagattcagaaaactatactgataaaactaaaactgaactcaaaacagtttttaaagaaaaattattataa

SEQ ID NO: 7034 - DNA, 1278 bp, Methanobrevibacter gottschalkii
  source 1..1278: mol_type = genomic DNA
ttgttagatataaaattattcagagaaaatccagaaataattattgactctgaaaaaaagagatttagagacacaataaatgtcgaaaaagtaattgaatatgataatttatggagagaaggtgaaagaaaacttaattcccttagatctgagaaaaataaattatccaaatcatttaaaaaagcaaaagaagaaggcaattttgaagaagtaatagccaaatccaaacaggtagctagtgatattaaagaactaagtgctaaaaatgtggaatatcttaaacttagggatgattatagatataaagttggaaacctacttgatgaagatgttcctatttctgatactgaagatgataatgttgtagttagaacttacggtgagattccggaacatgatttcgaattattaaatcatgtagacttaattaaaaaaatcgatggtgcagatcttgaaactgcagcagatattgccggggctcgtttttactatttaaaaagagatattttacatttgaatttggcattaattcaatttgcattatcagaacttgaagctgaagggtatattccaatgcaaaccccattctttgtaaaaggtgaggttgcagcagagacatcagagcttggtgaatttgaagaaacattatacaaggtagaaaatgaagacatgtacttaattgcaactgctgagcaaaccttggcagctcttcacagaaatgaaataatatcacctgaagatttgccattaaggtactgcgccctttcaacttgctttagaaaagaagcgggatctcatggaaaagatactttaggaatatttagagttcaccagtttgaaaaaattgaacaattcatttactccactcctgaagattcaagaaatcagcatgatcatttaatggaagtaaccgaaggaatatatcaaaaattaggcattccatatcaagtaatagctatcgtatcatctgctttaaatgataatgccgctattaagtatgatttggaggcatggtttccgggttctaaagcatttagggaattagtgtcctgtacaaactgtaaagactaccaagcacgtaaaacaaaaacacgttatggaagagcaggttctggagatgctcaggttttacatacattaaacagtacagctattgctactgaaagaactatgtgctgtattctagaaaactatcagcaggctgatggcagtgttaaaattcctgaagtgttagtcccttacatgaatggaaagactgtcattgaagctaaatattag

SEQ ID NO: 7035 - DNA, 633 bp, Methanobrevibacter gottschalkii
  source 1..633: mol_type = genomic DNA
atgaaaacaatcattgttaatgcaagtccaagaaaaaaatggaacactgctgagataatgcaatccgctcaaaaaggagcagaatctgttggagctgaaactgaatattttaatttatatgatttagtatttacaggttgtcgaagttgtcttgcttgcaaactcaaagaaaaaactaaaggaaaatgttactggagagatgatttaacagaagtcattgaaaagattttagatgctgatgcactgcttattggttctccgatttactttggccaacctacaagtgaattcagggcattggttgaaagattaatattctgtataatgtcttatgatgatggatcaagctattttacaggcaatgtaaatgtgggtattttttacactatgaatgcccctttggatttttatgaacaagctatgaaagaaagtttatccagtactgagtttttattctcatttttaaacggagaaattgttgcttatcctgtttgtgatacaattcaggtaagtgattattctaaatttaatatggctggtttttcacaagaagctaaagaaaaacagtggattttacaatttccaaaagatttggaaaaagcttttgaaattggtgccaatttaagtaaataa

SEQ ID NO: 7036 - DNA, 876 bp, Methanobrevibacter gottschalkii
  source 1..876: mol_type = genomic DNA
atgtatacattttataaaaatgaatacatttatatatcatgtcattacaatattgtattgtatacaaaaatatattttgtaatacaagatggatgtgatattgtgacaaaccaaaaaagaactagaaaatttgcattcggaaacgaaagatttggaggatcatatactccaggtgaatttgaattcaatttcccggaagatatgacacgtgaagaatttgaaaaaatatttacctcaagaatgcaagctttacacaaaaaaggtaatgatttagcagaggagatgtttgatcataaatcaagaaaagaaaacttaaaacctctaagtattcgtgtaaaacagcacacaaaagaatttttcaaaagccagtctattttatctccaagagatgtgcttgaaatgtatgaagaatacaataatggcagtgaagcttttattaattcattaattgaggatcaaaaagaacttgaaaatgaattaactgaaattcaagaaaaactacataatgcaaagctattcagagataaactgtctgaaatgaaacctccaagcgagatttcaactgatgaagataatataattaaattacaaaataaatatcaaaatagtgaaattaaatctattggtaatgaaacttcggttggaaaagctgaaagcgatattataagggatattcaaatgtataatactcttgatgttcatatccggaataatcagtatttaattatcactgtttataccaatgctcaaccaattctatattatttcaaaaatgaatattgtgaagaagatattttaaatgttatttcacgcattgaagagtattgcgaaagcaatggcattgattttagtagaagtgaaaatgaggaaatttaa

SEQ ID NO: 7037 - DNA, 2235 bp, Methanobrevibacter gottschalkii
  source 1..2235: mol_type = genomic DNA
gtgagaaaattaagcaattcaacgaaagtattattattaatattggtaacgttcctttcactgaccgttgtttcagctcatgatgcaaatgcaacagagctgataagtgataattcaaacggaacgtgtattgtatcatcagctgctgttgctgaggataatcaaatattaggtgaagttgataaacctgatctggtggtaaatattacttcggataatattgatgattattttataagggggcgattaaaatccatttacgcatatgctacattatgcatatctgaagatattgatgatttgggcatattaacaataaaatcaaataatgttacaattaatgggaataatcacacattaaaaaatacggttttcagtattgaagcaaatggcgtaacattaaacaacatcattttaaatataactgaaaaatttgaagacaatgaaaactcagcaattttaatatggagagcaaataatgtgaatatttataatacaaatattaattatattcctccacaagatactaccgcatatggaatttattctgaaggaacaaaacgtagtttaaatagtaatttaaaaattattaacaacactattaactttgaaggaaacaacccatctgaaggtagggattatgctgtttgtctggaatactccccaaattgcatatttgaaaacaatactgttaatgccagactgccattaagaacaatagcattcgatttaacaacagcatatttatattcagaatttgcactggcaatggggataagcaactgcaataattcaacatttaaaggtaacattattaattgtgatgttaatgaaagacctgaatgcagctttccaacattggatgcaatattcatttgtgattcaaaagactgtgaattcatcggtaatcaattgacgttaactgatttcaaatcatataaaaatcaaccaaattacttgtatggtttagatatttatcgagctgataatctacttgttgaagggaataatattcatgttgaaacaagtggaggaacttttgctgcaggaactgcttatccaatacaattaacagggcctgcaagtggaataatcattaaatataatgaaatattttcaaaatgtaatggtccaaatattggtatatactcacaaaacttcaatggtgaaaattatattactatcctgaacaatcatataaatgttactggacttgcaggaaatcatagttgggcactggtagcgggaattgaagcacaagacgataatgatattataatgaataatattatagaaattcataatattcgcaaaaccaccaaagaggataacttatatggaatatcatattcacaagaaacaaaagggacacactcttataaagtagttaataatactgtaataagcgacggatactacttatctcatatgttagatgcagacaatacaacagtaactaataatacattagttcgtacatataaatatgcagataccaattatgatccattcaaacgtggggatgcaataggtaaagacactgatgaaatcaaaaataatgatttttcaggaaatcgtgttatcacaatatttgaatatgaaattgaacaacagggcgatgaaattgatgaaggggatgaattcaactatgaaccaccaactaatactggaaaccattccaatattattaatggaagtggaatttctccattaaaaccaggattccccggaggaaacccattaattcctggaagcaattctggaggaacaataaacaccggaggtaatggtaatgttggaggattcacaaatcctgatgttgcagatggtgataaggggtatattggtcttcctgacttaagtggagatgatggtaaaagtttatcccgtaaatttaatcagagagctaatgttaaaacagttaattcatttaataatcaaggagatgcaagtaactcttataacaatcttgtatcaactgaaaactcaacatctagtgaaagtcccagtgttaatggagtaaccgctagtggaactatttctaaatcagcatcttcagccggtgcagctggaagtagtggtgcagcacaggaaagtctaaaagcatatgaaataactaaaaatattgtagaaaatggtccttatgatatgataagattcataggattggctataatatgtgaacttctacttattgttggatacaaacgaaaagaaacaaaaaatttagattaa

SEQ ID NO: 7038 - DNA, 5568 bp, Methanobrevibacter gottschalkii
  source 1..5568: mol_type = genomic DNA
atggaggcaataataaaaatgaaaatcaaaaaatacatgttaataatatttattttattgacactggtgaatataacttgtatcgctgctatggataacgatacttttacaacaaatgttagtcagaatatttccaatattaatacagatgaacaaataaatatcctaacacaaaaaacagaaaatatcaatgaaatacaccaaacaacagaaaatgatcaattatcattctctatgcatccgccagacgataattattataataataaaaagggtgaaatttatcatacacaattaatattaacaatcgaaaatttcacaacattcagtactgcaaatactacaatgaatgtccatctagattgggacttatacatgtcaaaagattattatgatacatgtcagatacgaatatatgaaaacaacacaaaaatccatgcatttaacgtatccgaccaaaataatgctgaatatgaacacaatgcccatcaaacactagatgtaacatttccatatacaatcaaagatagaactgaattgaaagccgtgattttacaaattgaatcaaatacattaagttttgaagaaataaaaaaaattaacttaactaatttaaacaacaataatattatagtcaataatacttatttttcaaatgaaaactggacaaatcaaatcaaatacttaaaaaaagcaataaatgatgcgccaacaaatagtataatttacttaaacaatatggaaatactgaatgatgaggatataacgatcactatcgataagaatatcacaataatcgcaaacaacaccataataaatggattggatcatggaacaatatttacaataaactcccaagcaacactaaccttaataaacctaacattcaccaacatctccactaattacataatgcagaataatggtaacttaaaaattgtgaacaataatttcaacaacaatattggaagattaataagtaataatggtaatttaactatagaagacagtattattgaaaatacaacaaaatactatgcattattccttaacaatatcaaaacaacatccgaaaacggattaatatacaataaaaaaacactaaacattaaaaatactacttttaataatattaatttgaatccattaacaaacaataataaaaaattagattggaatgcaataatcgttaactatggtaaagccattgtaactgactcaaaatttacaaacatcaattatagaacaatatacaataatgcaatacttgaaataaaaaacacaataatggaaaacataacctcaacagacattttttctcatacaatacaatacacccggcaattaaataatactggaaaatatttttcatatatacgggcaacctcatctcttgaaggaggagcaatatacaacatcaaacactccacaataacaaacaccacatttcaaaaaatcacaggaaaaagtggtgcaatatacaataaaaaaacactaaacataacaaacaccacattccaatcaataaacaatggagcaatatacaacaacgaagatttaacaatatcaaactccaccttccaaacaataagcggagaagcaatatatactaaaaatgcaaatataaccaatagtagatttcaaacaatcagtggaaaagcattatacaatataggaacactaaacataaacaatatattaataaacaaatccacaggaatacataatgatggaatattaaccataaataatacgataataaataaatgtggaggcatatataataataaccaattaaatgtcaataatacactatttaatagatgtagtggggttggtgcagcagtatacaataataatattgcaaatattgaaaactgtgaaattatagaaaaccatggagatgctgataccaagtggagatatgtagagcagcctaatggtcaagtattttcatatattgttgaagtatattccggtgtaatttataattataaaaatgctaaaataaacattacaaaatcaattattaagaacaatgatatttcagaagaaagcaatggtaactgggatacatattatggaatcattaaaaatgatggggaaatgaaaataactggctgtattcttgatggtaataaaccaagagagtggattgctttttggggtggtgatggttcaataaacatttacaatactggaaagttaacatataaatacaattacctgctaaatacacaatattataccggaaatattcataaaccaagcagttttttatttaatactgggaatggtgcatgtgatgtcaattataatttttattgtttaaaaccatccagtatttttgcaaatgcaaattataattattattttgttccttattttggtgagtatattccgattaagcttaatgaaaccagaaatatcactttgtcattaggtctgaccaatggtgctgattatatgaccttcaatgattgggacaaattattaactccaggattaaacgcaaccattacaacaattgatgaaaacggtgaatacaaaaacataacaacacttctaaaagacaaatacacatttaatttcaactacacccatgttaaaggcgaatacataatatacagcaatatcttgaattttaagagtagtgctttggttgatgtgggaaaagaatttgcagaaatggaagtaaactacaataacataacctataaagagggcaacataacattccatattaaaattaagggaaatctcaccacacaaccaaccggaaacataactttaagatacaacaatgaaaaaatcatattgaacctaacagattccgaatgcagcttcaccattcctgaaatattaaaacctgacaattatactatgaggattgattatgatggcgatgatgaatattttaaaatactaaatcagtattttatttttgctgtgtataaaatacctaccaatattactgtagttgctcccgaagttaaatatggtcaaaccggtctgataacaatcaccatcacaccaggtgaggcgaaattaaaaggtaaactatacattaacggaatatacactaaaaatgctgatacacagggccataggattttgaggattaataggaatcctggtgtgtataatattagtgtggtttttgaaagtgatgagtattatatgggtggtgttgcaaacactacttttattgtaagcaaatggaaaaccaatttaaccttaaccggcaaggatattaatgctggtgaggatgcaattgtcaatattacaattgatcctggtgatgttcgaggtgatgcgatattgattattaatggtgtgaaccaaacaatatttataaacaatacagtaacacctattactattagtaatcttcagaacggaacatatcatgttagtgtttattatccgggtgataaaaaatatgctccatctaatgccagcactacttttactgtttcaatgaaaacaacaaaacttacagtaaatatcactaataatgatgatttaaccggcaatatccatgttaatactgattataatgattgtactggtgaagtgggagtgtatattaataatgataatgttttgattatgaatttgactaacgggtcttgtaatttccctgttaaattcaaaagaggcaacaattacatctacatacattatattggtgataaatattattcctatgcctcttggaacactacaagatttattgagggaaaagcaattatcaacacaaactacaaccatacaatcgatgagcaggaactaggttattacattataaaaatatttgatagtgacaataacccttatgaatatacaaatttcactgccttattccagaataaagaaatacatttaactactgatgagaatggtgttgcaaaactgcctatacaatgcagagccggaacctacaacataacagtcaaatacaaaaatacagttaaaaagagtactgttgtggtgaatgcaaccagaatggatattgatattaaggacattcttgcaggtgaaaatgaaacaatcacaatcagattaccttacaatgcaactggaaacattacatttaaagtagataatactgtaattagtaaaagattgagtaatggtcttgcgattgtcaatatttctgctttgactttaggagaacataaattaacagtattctatagtggcgacaataattatactgatcagaaaatagaaaaaatattcagcatcaaacattccctatcccaaatcattgcatcatcatccggtgtcacatatggtgaggatgttattgtcacttcaaaggttacatcaggcgcaagcggtagtgtgacatttgtccttaaccatgaaacaataactgtgaatttaactgatagtcaggcaaatgctgcatttactaatgttcctgcaggaaattatgttataactaccaggtataatggtgataagacatataaagggtctgtttgcgatgttaaaatcaatgttaaaaaagcagtacccaatataatggttaatacaagtcctttactgttaaatgaaaatatcaggattgatgctttgctaaacaatgatgccatgggtaatgtcaccttccatattcagggtcagtattcaccaagaaacagaacagtgaataatggtgtcagttcatggctaatcagtccattaagtaaaggttcatataatctgattgtaacatactgtggtgacagaaattatgaatccataacaacttccaaaatacttgtattgaatcagaatgagactgtcttgaatgttaatattggtgatgtaaatgcagatgatgatttaatggtatatgcaacactaaacagtgacaataagtataaaataacaggcaacattactcttgagattaacgataaatactataaggttgttgttagtgatggtgtgggattaagaaatcttggtgagtttaaagccggcagatacacttatactgcaacatatacaggttcagatttgttttcaatgtccaccattaaaggttcctttaatgtaagatgcaatagctataagataacaggaaataaaaatattgttcagtattatggcacatacaagtcttataaagtgcgcttattaaacaataatgtccctgttaaaaaagcaattattaccgttaaaataaataagaaaaacattaaagttaaaactgacaataaaggttatgcaacattaaaacttaaattaaaggccggtaagtatagcattactgcttcttacaaaaaagtcactgttaaaaataaggtaacagtgaaacctatcctgataacaaagaacatggtggttaagaagggtaaaacagtaacctatactgccaaactgctaaacaaatatggtaaaaaggttaaaaataaaaaggttatctttaaggttaaaggtaagaaatatattgttaaaactaataagaaggggattgccaaaattaaaattaaaaagctgaaagttggaaaatataaaatacagagcatctatgggaaagttaaaaacaccaacaccataaaaatcaaatag

SEQ ID NO: 7039 - DNA, 2589 bp, Methanobrevibacter gottschalkii
  source 1..2589: mol_type = genomic DNA
atgaaatacaaaaatattttatttttttcaatattcatcctgtttattgtaggaatcagttgtgtttctgcacaaaacatagatgaaattggtaattcatcatctgatgacacgattagtctagatgatgatataagtactatcaatattgttgataatgagatttcaactaatgttgatggagaagtgatttgtgatggtaaatcaactcgagatacatattcttgggctgattttaaatcagaagtcgaaaatgcgaatataaatacaatagaattaaataaaggaaatattgctccatcaagcgatagttccaatcagattagtataaaccatgacataaatattattggaggttatggttattatatcggtggtgacagttggagcagttcaacaaaatacaactatattccaattattacttctggatctaatctgaatgtaaaatttgaaaatgttacattccaatacttatctgacaatgtttttatgaaattgatgggtaacggaaattatacatttaaaaactgtgtatttagcaatattaatgcaactggatcacatcagtcagtaatctggttaaattatggacatgcattaattgaaaactgttcttttataaaatgtaactgtagtttcggtgcggtaactaattattattcctcctggggtactgctgttaacaatgctagaatgacagttagggattctacatttaaagataattatgctactactgaaccgggagcaattaataattgcggacaattagttgtttatgattcaacatttgaaaataatgaagcagtttggtgggcaggagcaatccatacacacagtaatgcaaatacaaccattattcgttctaaatttaaaaataattatgcaggatggaatggtggtgcattatacacatacagttatttaactgtcatcaactcaactttcacagccaatactgcaaaaaccaatactggtggaggtgctattggagcaagcagttatatgagcacaccaaaagttgttattaaaaattcagaatttaaatacaacactgcactaacaggtaatggtggagcaattgttataagttcaggaacattgaatgtggaaagttcagaattcacaaataatactgcacttgaattaaatggtggtgcaatttccagcagcagctgtactgcagcaatctctaactgtaaattcataaacaatactcttaataaaacagcaggaaaaggaggtgcagtttatggtactggaaaaggcagattaacagttgataaatgtgaatttattaacaatgctgctaaagacaataactctggccatgcacttgcatattattatactggaaatagcaatactgcagcatacttgacctataccaataatatattccgtggaaaggataatggtactgggtctgtttttgtagctaatgataaagtaaatattgttcaatacaataatagtattgatgatattactaattacattgaacctgaaaacaatacaaatggcactagcagtggaaatataacaatccctataggcactgatatactttcatctagttgggatgttatattgggtgacaatttaaatggtacctctgttattgcaggtaattatattctaattcctgcaagtcatgatttgtactgttacaattacatcacccaagatcttgtttggaatttcacaaccgaatttggttatttccatgagttattggtggatggaaatattgtttatgcacctgcatcatgggacgcattatatatctttaacttgacaaatggtgaatctttaacttattcaaacatttatcaaggatccagcctctataaaccagtaatttataataatactctttatgtaagtagtgaatacggttatggtattaattccaataattggatttccatgattaagcatgattctgattactactactatggcagtattttagagctaaataatgtatcttatggcactcctgcaatattgtcccaaccatatatacacggcaatactctttatgttaacaccatacaaggtttaattgcctataatttagttgatggcactagccataatgttagtggcactgtaggtaatcctattattgatgccaatggcaatatctgtattctatcaaacaatggtgctgctatttcattacttaattccaatttagaagttgttgcttcaaccacactagatggtacatgcaacaagttaattagtgatgctaatggtaatatttacactgttgataacaatggctatatctattatgctacatacaccagttcatcaataacctgcagtaaaactaaattcaacattaatcctgtttcatcagctatggcatgttatgatggtaaactttacataggagacaacaacggaatactatgggcatttaatactagtaaactagatgaacccgtacttaataatgctgtatatagggtttttgatgctggttctgcaattgtaggaaatattgctgttgataatgatggcaccatatatattggtacagataatgggcatttttatgccatagaatattag

SEQ ID NO: 7040 - DNA, 4578 bp, Methanobrevibacter gottschalkii
  source 1..4578: mol_type = genomic DNA
atgagattaaataaaagtgttttatttgtatttatgattatttttttattgagtttgaattttattgttgcaaaagatattaatgaaactaacttaaatgcagattcttttgaaatagattatgatgattcaatttctagttcatatgatacaaatttacaaaaattaaatcaaaatgatattgaaaaaactgatgaatcattagaaaaatcagataattcatcaaatagactattaaacgaagacaataataatgggttgttgggtgatggtgatggtttaaagcatctttatgttgcaccaaatgctactggtagtggtttagatgaaaatgaccctggagattttataacaatattaaacaatactgaagataatactgttatccatatgcttgaaggaacttacctactttcaaacattactccaatttatcaagatggttactatcactttatttcaattaaatcaaagaataatataagtattgttggagagaatccagataaagtaaaaataatttccaatttaacacctaaaaaaagaacttcgtttatatttagtttgcataatactaataattttaaatttgaaaatattacattcagtgctattaaaaaagatcccaaaaaagaaaagacgaagtcttatttccttttgaataagaataattatatttttgaaaattgtaaatttatagatgcctattccaaatttgctattatagaactggatgagggtactcatctaactattaataattgttattttacatcaacggatggacatgttggaagagaaatatctccaaggttattttgttcagtccttttaaataatactatttttaaaaattgttgcagatattctgattataaaataggtgttatgggtaattatagtatttttaattctcaatttctagaatatgatgataatccattattgtattttcaaccatattgtaatttgatttttgagaataattatgttgaccacccatacaattttgtttttttccaaccatctgatcattacgagggttcaaatagaatgttttgttcacatactactcttacttttttaaatggtgaggatagtgttaatgttaattgtggagatgttattaatcttaatgcttctttagtagatgatttaggtaatattcttagtctttataaattgaagttcaatctttttgaaaacgaccttacatatactaatggggtttatcaaaaagaagttactgttcctgatgtgcctggtgaatattacattgatgttagtgatgaaatgttcactaaatatctgggcaattgtacagtgaaagctcctatttttattgttaaagaagctcctgaattcctatttgatgataaaaacagcagcacttatggtgaggatgttattatcaatgtggattcactggatattccagatggaaagttaactttcagattcaacaatagtgaaataatcaaaaacatcacagactacagatgcagtattaatttgggagtattgcctgcaggtgaatacgcaattactgcttattatgcaggtgatgaagtttatggagctaaatcatacacaaaaacatttaatgtaactaaagcaaaatcaacaatcagcttaactaaaggccatgttgatgccattaaagataatggtgatgttggtttctacttcagcacaactgaaaatggcaatgaaaacaccataggtattattttaccggataatgcaactggtaaattaacatttaaattggacaccgatacttatagtattgacattaccaaaagaaaagtactgctcggcaatttggactatggtagttatattattgctgttaagtatgatggtgataataatttcaatgaaagtgaggagtgtacttttaccttagttaacagtaagccaagtgttgatttaaccttaaattacagtaatattaattacactaatccgtttaatgttaatgtaactttaaatcaggatgtggttaaagatacaatcatctttgaagttagagatttagaggacaatcttattaactcaactactggaattattagcaataaatctgctaatgctactttcacaggtctaaatgcaggtgaatacaatatcattgcaatttatgaaggtgatgaaacttattgtaattccattgcaagtcaaagatttaatgttaacaaaattgatttggaatactttacactaaaagctgacaaaacaatcagtattcacgataatattaaagtggaagctttaattccagtcaatgtaggtggcagcataactttcagaataaatggtcaggacatgactgttgagatttttaataatcgtgctgaggctattttcgataatccgggtttaggtaactatacagtttatgcgacgtttaatggtgatgataattataatcctcatgaggaaaacattaatatcactgtcattaaagccgatgctaatttaagtgtttctgcagaaaatgttgattggggagaagaattagttgttgttgttaaaaccgacactagattcacaggcaatcttagtgttaaaatagatggtgtggagaaaatagttgaaatcacagaaggtcaaggtaatgtttcattttctaatcttaaagcaggtaaatataatgttgctgttgaattcaatgagagcgaatttttcacttcatcacaaaaagacattaatgtaactgtcaataaaatagattcagcattaactctggataatgatgagatggtctttgattatggtggatctgcttcagttacatttggttatgatggtgcagttaatgttacagctgaagtagttaatcatcctgaggctgtaattaagattaatgaggattgtattgttgtttctgatttggatgctgggcaatataccttgaaagtcactactgttcctgatgaaaaccacactggtgtagataaagaatttgaagtgactgtcaataaaatagattcagcattaactctggataatgatgagatggtctttgattatggtggatctgcttcagttacatttgattatgatggtgcagttaatgttacagctgaagtagttaatcatcctgaggctgtaattaagattaatgaggattgtattgttgtttctgatttggatgctgggcaatataccttgaaagtcactactgttcctgatgaaaaccacaatagtgtggataaaacaatcagcattacagtaaataaggtaaatgcaaacatcaatattgaggatattgttttagactatggttctcatgacattacagtatttacaggtgaaggtattgaaagtgtcaatgcaaatatcttaaatcaaagttatgcaaatgtcattgtttcaggcaataatattagcatttacaatttaaatgtaggagaatatgttttacagttaattgttaatccagatgaaaaccacaatagtgtgagtaaaaatgttaaggtaactgttaataaaatagattctgttattgatattagaaatgaagtggtcttcacatacggtgatgctggttattgtgatgtttatagtgagggtgctgttgactttactgtaaaagtaatcaatcatccggaagcagttattaacatcaacaagaatggtattgtcaaggtttcagctttaaatgcaggaacatatattatggaagttaccactaatccggacactaatcataattcagttaccggtagagttaatgtcactgtaaataaggctgattctaaaatcattattccggatatcatatttgattatggtaattcaggtagtgtgaatattcttgtttacaatgcaactggaattggcaatgtcaatgttgttggtcatcctgaagccataacaaccattaatggcactaaaatcagtgttggtggtttgaatgctggatcatatattttaactgctactgcacttacaggtgacaattataatcctgtaaacgtcagtgccaatgttattgttaataaattaaccaccattattggtgttaaaaaggttaatggtgtttacggtagttccggtaagcttattgttactttaaaagacagtaatggtaatcttttaactggtaagttgttacgtgttaaagtaggcagtatttcaaagactttaactactaatcgccatggtcaagtctctgttaatgttgcatatttaattcctaaaagctataatgcaaaaatcagctttgctggtgataatgatttagtcgaatcatcaaatactgctaaagtggttatcaagaaagcaactcctaaattaacagccaaaactttaaaaacaaaagttaaaacaaaaaataaaaagcttaaaataactttaaaaaacaaaaaaggaaaagctcttaaaaatacaaaagttactttaaaacttaaaggcaaaacttataaagcaaaaaccaataaaaaaggaattgccacatttaaaataacaaaattaaataaaagaggaacatttaaaggaacagttaaatttgcaggaaacaaatacttcaaagccataaacaaaaaagtaaaagttatagttaaaaagtaa

SEQ ID NO: 7041 - DNA, 486 bp, Methanobrevibacter gottschalkii
  source 1..486: mol_type = genomic DNA
atggaacgtgaaaacttatcaggtatttttagtattgttctcggtttgatattcatattattcccaatgttttcatcaaatctaatttcaataattgttggtttaagtttactattctttggtctgtcagcggcattcatgggttttaccatgagaagaaatggaattccatattctttaatatcaataataattggaattgttgcagttattttaggatttggatttatattctatcttgatgctctttcatttttggttggattccaattatatattgtcggatttattatgattgtatttggaataaccggattaatctcaaaattaaatagaatatcttcttttacatccatacttgttttattaatgggtattgtatcaattgctcttgctatatttgctctcaaccaaccaatatacattgcaattattattggtatcgttttaattattgaaggagtatctttccttttaaatgattaa

SEQ ID NO: 7042 - DNA, 519 bp, Methanobrevibacter gottschalkii
  source 1..519: mol_type = genomic DNA
atgtctgattttgaagaaatcataaacacaagaagaagcgttcgccagtatcaggataaggatattgctgaggaattaatactaaaaatcttaaaagctggaatgcaggcacctggttctagactcggagcagaaccttgggaatttgttgtaattaaaaacagggaaattttatcgaaacttggtgaaattaagcctcgtgtaactaatgctccagttgccattgtacttgttgccaatattggaagggcattttataaaactgtttggcaacaggatatgggtgctgcagctgaaaacatgctgcttgaagcagtgaatcttggattgggtggtctttggaatggagttgcgcctgatgaagaaaaaatggctaaaatcgggaatataatcggaattgatgatattgctgatttaaaaccattttgcattatcacattaggatatcctgctgaaggctttgaaaataaattcatggataaatttgatgaaagtaggattcattatgaaaaatactga

SEQ ID NO: 7043 - DNA, 1176 bp, Methanobrevibacter gottschalkii
  source 1..1176: mol_type = genomic DNA
atgaaaaatactgactatgattttgaaagtgtcattgatagacataacactaattgtgtaaaatgggattattttgatgatgagttgcctatgtgggtagcagatatggattttaaagtagctccggccattgaaaatgctgttttaaaaagagcgatgcatccgatatatggttatacaattgtttcagatgaactattcgaatcatatattaactggtgggatagaagatatggatttaaaatgtatcgggaggacatgttatattctattggtgtaatgccgtccatatcttcaatgataaggtgcttaacagatattggagatgggattttgattcaatctccagtttatcatgtgttttatcatgtgattgaagagaataatcgtaaagttgtagaaaatgaattggtctatgaaaatgggagatataatattgattttgacgatttggataaaaaattatcaaaagtaaaaatgatgattgtttgcaatcctcacaatccaattggcaaaatttggtcaagagaagaattagctaaaatcggttatttatgcagtaaatatgatgttattttagtatctgatgagattcactgtgatctaacagatcctgatatcagatacaatccttttgaaatttcttcaggttatgaaaaagcagtaacttgtttatctccttcaaaatcatttaatattgccggttttaaaagttccattgttcacacaaaaaacactgaattgtttgagaaaatcagaacacagctgcatattgataactcggattcttgtaatgtatttgcagcaagtgctgtaattgccgcttataatgaatcagaagaatggttaaatcagcttaaagaagtgttattcgaaaataaacagattgttaaagaatatctggaaaaggaattgcctgttataaaattggttgactgtgatgcaacatatctattgtggcttgattgttcagcattaaatgctccctcaaaagttttatctgagtttttaagaacaaatcatggattgtttttatctgcaggtattgattttggtcaaaatggtgataacttcttaagaatgaatattgcctgtcctcaaatactgttaaaagatggtttggaaagattaaaagctggaataactgctttgagttatataaataatggattataa

SEQ ID NO: 7044 - DNA, 801 bp, Methanobrevibacter gottschalkii
  source 1..801: mol_type = genomic DNA
atgattgagaaatccatttatgaaaactaccaaatcgattttaacgaagagatgacaccagccgatgatgattatatttttatttttaatcatgaccgagaattgtacttaaataaagataaacaattagcgaatagtttagatgattttgatgttaatttttgtttatatatcggaaaatataacaataaaaaagcttttgtagcaaatgttaatacttcagattcattttatcaacttatggaagtttatgaattcaataaaagtctttatttgatgggtggaaaagctgttcttgtcaacgattggtatatatcacatcaatattgtggaagatgcggtactaaaactcaaatagatgaaaaagacatgatgttaaaatgtcctgagtgtggtcaaaaccattatcctcgcattgctcctgcaattattgtagctattagaaaaggtgaagaattgctaatggcaaatcacagttatcatgaaacaatacgatatgccctaatagccggttttgttgaacctggcgaatcaattgaagaagcggtcaaaagagaagtttcagaagaagttggaattgaaattaaaaatttagaatataaaagaagccagtcctggccatttccaaactccttgatggtgggatttactgcagaatatgaaaatggagatataaaagttgatggagatgaaattctaaaagcaaaatggtttaaaaaagatgaaataattagatatgattctgacatcagcatatccgattggttaattcaagattttattgattcagccaatccatga

SEQ ID NO: 7045 - DNA, 507 bp, Methanobrevibacter gottschalkii
  source 1..507: mol_type = genomic DNA
atggtatctaaaaatatggaaaaagcattaaatgctcaattaaacgctgaaatttactcaggatatttatatttatccatggcggcttattttgaagatgaagacttagcaggatttgctaactggatgagagtacaagcaaacgaagaattagggcacggaatgaaattctatgattatattattagaagaggatcttctgttactttaactgcaattgatgcacctcaaactgaatgggacagtccacttgcagcattcaaacatgttttggaacatgaacaaatggtaactggtcttatcaacgatttagtaaacatttccattgaagaaaaagatcatgcaacaaataacttcctgcaatggtttgttgaagaacaagttgaagaagaagaaaatgcaatggatttacttgcaaaagctaaattggctgatggagataatagattaatttacgaattaaataaggaattggctactcgtgtaccatctgaatctcaagactag

SEQ ID NO: 7046 - DNA, 648 bp, Methanobrevibacter gottschalkii
  source 1..648: mol_type = genomic DNA
atgaattatcccgatggtcccaccagtgaagctcaagttgattcaactgaatttgatgcagatttattgcatgaaaatgatttggggtcagtacacattcatggtcattttggcaatgttgaatctgaagttaaaatagcttatttgattgggatgcatcctcttgagagcaaatctcacagagcattatttgaaaagctgatctcaaaagaagatttgaaatattgttattatttgtataatattaatgtttcaaataaaaacagtgaatctgaaggaagaaatgaaggtcaacttttggctcaggaatctgttcaaaaagatattatttctaaaaattatgacttatttttagatattcactcaaatagggggcctgatggtcctggagattataaaataactaattttcttttcgctccaggttttgatgataaatccagtaaattcatgaatgaaatacttgatcaaattgatgaaattgtatattatgcacctaaattcagatcaagtcctagttatattactgagccaacagcagaagcaggaattccaactttagtttatgaatgttattcctcagaaccaatggaatatacattgtatttggctgaaaaattaatctctgttgttgatacattattttaa

SEQ ID NO: 7047 - DNA, 981 bp, Methanobrevibacter gottschalkii
  source 1..981: mol_type = genomic DNA
atgataattagagcaccttcaagaatacatatgtcccttattgatttaaatggatcatataggagagttgatggaggtattggattagcattagctgatccccaattcgttttagaagttaaacagattgaaaatggaatagaacttgaatttgcagataatgtaacagacgaggaagctatcgaagaatgtagggaaaaaatccctgatgcagccagaaaaactattgaacactttaatattgattccggttttaaatttattgttcatgaaacataccctccacactccggatttggaagcggaacccaaattgctatttcaacagcccatttaataactgaaactatggatattgaagtagaaagcagagtacttagcagtgttgttggaagaggaggaacctccggtattggaacatatacacatgatttgggtggatttatcttggatggcggacatagtaaggaagaaaaaccattatttttaccttcaggcgcatcccaagcaaaaccagctactttaattgcaagatatgattttccggaggaatggaatattttaattgcaattccggaaattgaaaagcatatggagggggatgatgaagtggatgttttccagacttattgtcctattccaaaggaagaagtggagcaagtgtctcatctgatcttaatgaatcttgttccgttcatgcttgaaaaggatattaaaaattttggctgggctgtaagtgaacttcaaaaagttggatttaataaactggagcattctcttgatgctagctatttgccaactatgcaggctattgaaaaagctggagcttatggtgtgggtatatcttcattcggaccggttttatatactttctttgatgaatcaaatgaggatatcgtagaaaaaacaaaagaaattattggtgaaaatggtactgtctttgtaactaaagcgcaaaaccatggtttcactattgaatag

SEQ ID NO: 7048 - DNA, 993 bp, Methanobrevibacter gottschalkii
  source 1..993: mol_type = genomic DNA
atggaaaataatagaacggtgtttattgattacttaaaagtaataggtcttttatgtattatcttagcccatatttcaacagatgaaagtatattgcagattagaaactttgatgttccattaatggtaataatttcaggatttcttgcagtaaattcttttaaaagaaatcttaaacaaaacagatcatttttaagatattactggaaaagaattagccgtttattgtttccaacatggacatttctaataatattttttattgtaatggcatttttaccaataaatggcatctatcattatgatgccgatttcatactcaacagtttcttattgcttgatggacttccatatgtttggatcataagaatatttcttatttgtacattcataacgcctgtaatctattatttcgacaagattgaaaatgactatattcaatttttaattttactattaatctatatattatacgaattatcaatattcttaaaaataaatgaaacaaacatcatttttgagtttatattagcttatgttatcccttatggaataatatatttgcttggaatgatttctacaaaaacaagtccaaaaatggatagaaatgtctcaataatctgtttaattgcatttattattcaggcggtcataatttatttgaatactggaatattccagccaacacagattatgaaatatccgccaacagtttattacataagttatgcgctgtttgtatctttcatgctattaagcatatttaaaagaattgatttgaagccaaacagagttatagagttttgttctaaatcttcattatggatctatttatggcacatattattcctgaccgttataccattaatttttggagaattaaattggattttaagttatatcattattgtagtatgtgcagttggagcaacatatattcaaaataagattcttgatttaaccaatgcagatataaaagtattaagaggataa

SEQ ID NO: 7049 - DNA, 432 bp, Methanobrevibacter gottschalkii
  source 1..432: mol_type = genomic DNA
atgaaaatcaaacaattatctatatttttacaaaatagaatgggcagcttatcaaaaccattagaagtgctttcaaaaaatggtgtgaacatcagagcaatgtgtatggcagatacttctgaattcggtattttaagacttgtagtggataatcctgaaatgggaaaagaagttttagaagaacacaatttccttgttaaaattacagaaataattggtgttgaaatgaatgatacaccagggggtcttacaagtgttttgaaagttattaaagataatggaattgatttagaatatctttatgcatttacacatgataaagaggggaaagctattttattactccatgctgatgatatagataagttaatttcttccctacaagataatgatatagttatcgtgccatcagatgaagtttacaacttatag

SEQ ID NO: 7050 - DNA, 1302 bp, Methanobrevibacter gottschalkii
  source 1..1302: mol_type = genomic DNA
atgttttggaatgaagagattgaaactatgtcaaggccagaccttgaagaattacaattaaagaaacttcaagcgactgtaaaaagagcatttaataagataccttattataataaaagatattcagaagttgaagtttatccagaagatatcgaaactttaaaagatattgaaaaacttccattcatcacaaaagatgatttaagagaaagctatccatttggactttttgcagtagatataaaagacataaaagaattacattcctcatctggaaccacaggaaaaccagtagtatcaggatatactgaaaaagacttggacacatgggcggaaacaacagcccgtggacttacaatgatgggtcttggtgaaaacgacattatccaaaatacccatggctacggaatgtttaccggtggttttggagttcattatggatctcacaaaatcggtgcggcaatcattccgatttcaaccggccagaccagaagacaaattgaaattatgagtgatttcggcactaccggattaatttttactccatcctacggaatacatatcggagaagttgctcttgatgatggaattgatccgaaaaaattaggaattaaagctattggatttggagctgaaatgtggactgaagaaatcagacaaagagtggaagagctatttggtgccaaagcatataatatttacggattaactgaacttatgggacctggtgttggtgtggaatgtgaagcgcaaaaaggactgcacattgcagaagatatctactatcctgaaatcatcgatccgaatacagaaaaagtgattggtggagacaaacctggtgaattagttttaactaaccttgaaagagaaggaatgcccatcataagattcagaacaaaagatttaaccacacttacttatgaaaaatgcagttgcggcagaactcatgcaagaatgagtagaattactggcagatccgatgatatgattaaagtaaaaggtgtagctattttcccatcccaaatcgaaaaagcattacttaaagttggtgatgtagagcctcattacatgattatagttacaagacccggaactttagatgaaattgaagttaaagtagaagcatcacaagatattttcttcgatggcgtgaaagaaatgatggcaatccagaacaaaattggcaaatcaattgaaaatgaaacaggcattcgtgtaaaagttacattggtagaaccaaaaacattaccaagattcgaaggaaaagcaaaaagagtaattgacgagagaaacttacactag

SEQ ID NO: 7051 - DNA, 711 bp, Methanobrevibacter gottschalkii
  source 1..711: mol_type = genomic DNA
atggatatgataagtgttttatggcaagttggaatctttgcttcagtccttgtttttggaataaaaatagggctggcatcaggtctggctaatttgccaaaaaaattatttgcagtaatttgcatgtcttatggtggtggagtgattcttatttcatatattgcttcatttttcgctgaacaattagttcaagcaatatacagttataatacaatattttatattattatggcttcaatcatgattattgcaggtttatttacaataagggaatggaaaatacatgataaaaatacatcaactgctacttctctagcgattattgcaccttgcccgtgctgttttggttcaattattgcaagtgttttaattgttgcaccaactataggtatcagttcacttaatctaagttggtatgcttcagcagcattagtcgctgttatggtagtaacttattttgcatccaatacaattattagatttactaataagccgtatcctattgttttaggtaatttcatgttattgctcggtgcatatttcttgctttcagctattgtaattccaaatattgcatcatcattaactaaaaatacaagcccgattactattgcttctcctcagaacatactcatggtaattttaacatttgttattttacttgttggaggcatggtcttaaataaaaaagggagaaacattttagattaa

SEQ ID NO: 7052 - DNA, 645 bp, Methanobrevibacter gottschalkii
  source 1..645: mol_type = genomic DNA
atggttttaaacattccaggtggagaatttttaactggttctcttgatgtaatctcacaaagcttaacaattcctgtacttgttattctacttgtaattgttattatttcaatcattacattaggaggaattatagcggaatatacttcaagaaaaaaagttccgataggaacaattagagatttgatttatgatattaatctttcagaatctattgatggattaaaaaatataatttcaaaagctaaaatcccaaattcacagaaaaaggttttaatcgaaattgcatcagctgaatccttaggtgtaaattcacgtgaagctttagctcgtaaactgtttgaattcgaagaagaaaagactatggaaacattaaagaaaactgatatcattactcgtattggaccgacattaggtttaatgggtactctaattccgatgggtcctggacttgcggcactcggtgcaggggatattaatactcttgctaattccttaactgttgcattcaacactactattgtaggtattggttcaggtgctttatgttatttcattggtaaaatcaggtcttcatggtatgatagatatttatcagatttggatgctttaattgattcagtattggattatatggataaatag

SEQ ID NO: 7053 - DNA, 324 bp, Methanobrevibacter gottschalkii
  source 1..324: mol_type = genomic DNA
atggtaagaaaaagtaataggcgcaggtcaaaaagagttgaagaagatccaatggcaggtacatctaaccttgtagatgcaatgcttgttattgctgttgggtttcttgtttttgttatcataagttggaatatgcaggctatgatagatccagatcaaagtatacaagaaaaaatgcaacaacaaaagacaaccgaagtggatcagggccaacagttaaatgaaactccggatacttcaaacagttctggtcaagggtatactgaaatgggtaaggtatacaaagatccagctacgggtaagctgattatggtggaaggttaa

SEQ ID NO: 7054 - DNA, 318 bp, Methanobrevibacter gottschalkii
  source 1..318: mol_type = genomic DNA
atggaattctgtcctgattgtggtgcaatgttaatgcctaaaaaaggtaaaattaaatgtacatgtgggtatgaaaagtctttaagtgatgatgatttggttgaacaatatcatatgaaaggggaaactaatcctgaaaccaaagtaatagtaacagatagtaataatgttgcattgccaacaacaaaaataacatgttataaatgtggtgggacaaaaggatattggtggacagtacaaacaagatcagcagatgaagcaccaactaattttatccgatgtgctaaatgtggcaacacttggagaagttctaattag

SEQ ID NO: 7055 - DNA, 816 bp, Methanobrevibacter gottschalkii
  source 1..816: mol_type = genomic DNA
atgaaaaatacaaaaaagattgttattgtagcaattattattgttattgttgcaggtattgcacttctttcaggtgttggaagttcagaaaatatagatattgtaggttctacatctgtgcaacctgtagctgagaaacttgtcgaaacttataaacaaacacaccctgatgctaatattaatgttcaaggaggaggttctagtgtaggaattaaaagtgcacaagatggtagtgcagatattggaaccagttccaaggagttaaaagaagatgaaaaacaaggattaactgaatataatattggtcaggatggtattgtaatagctgttaataatgaaaatactgtaaatgatttatcaaaagatcaattaaaagatatattctcaggaaaaatcaccaattggaatcaagttggaggtcaagatggtgaaatcaatattatcactcgtgaagagggttctggtactttagatgcatttgaaaatattgtaatgggcaaagatactaaaattagaagtgatgcagttgtgcaaagttctacagaagctgtgaaacaatctgtaaaacaagattcaaatgcaataggttttgtatcatttgctcacatgtcaaatgatgtaaaggcattatctattggtggtgtaagcccaagtactgatactattgcagatggatcatatgaattacaaagaccatttttattccttgttaaaggaactccatcaggtgatttaaaagaatttattgactgggtaaatagttctgaaggtcaaaaagttctaaatgaagaaaaaattattaaatcaacaaattag

SEQ ID NO: 7056 - DNA, 864 bp, Methanobrevibacter gottschalkii
  source 1..864: mol_type = genomic DNA
atgtcagaacagtttattgagaaaggtttattaataactgcaatgttctcaatttttatcatattgattattttaggatttattataattgaaggattacctgcttttcaagattatggtttcattcaatttttattcggacaaacttggtctcctaatgaagggcaatatggtctattttcaatgattataggatccatttgtgttactatatttgctttaattattgcagttccattatcaattttatgttctatatttatggcagaggttgcaaatgaaaatattaaaaattttttaaaacctgttattcaaactttatcaggaattccttcagtagtttatggattttttgggcttattgttcttgttccaatagtaagattctattttggaggtactggttttagtatttttacagcaggcattattttatctgttatgattttacccactattatttcagtgtcatttgactctttatgtgctgtaccaaatgaatataaggaagcatctcttggtttaggtgctacaaattggcaaactattaataaggtaatatttccagcatcattgccaggtattgtgactgcaattattttaggtatgggtagagcgattggagaaacattagctgtaattatggttgcaggtaatgtacctggaattcctaattcaatattttctccagtaagaactttaacttcaaatattgctttggaaatgagttatgcaacaggattacatcacaatgcattatttgccactgcaaccatattatttgtaattattttattgttactggtaattgctaattatattcaacgtaaatataaaatggatgttggaggtggcactttatga

SEQ ID NO: 7057 - DNA, 852 bp, Methanobrevibacter gottschalkii
  source 1..852: mol_type = genomic DNA
atgaaatttaattatatttctcctaagagatctcaaaaaataatgaatggaatatttatattttcaggagttcttacattatctattttaattattattttaggttacattttgattaatgctgttcctatattaagttttgattttatctttggtcaagttattgacgcaggtaaatctggtggaatttccccaatgattgtatccagtttatatgttacatttatttcaattttaatagctactcctttaggtgtaggtgcagctatttatgttacagaatattctaaaaatggattattaataagattaatccgttttggtgctgaaactttagcttcgattccttcaattgtatttggattatttggattgacattttttgtagtttttttaaatttaggatggtcaattctatcaggtgggcttgtacttgcaataatggcaattccaacaatttttcaagttacagaagtttctttatcatcagttccaagttcatataaagaaggaagttttggtctaggagccactaaatggcaaacaatttgtcatgttattttacctgcagctattccaggtattgttactggaattattttgggattaactcgttctatatctgaagcagcagctgttatgtatgcagtaggttctgccactacaataccaatatctatgtttgatccaggtaggccattaccattgcatttatatgttttagcaacagagggggtttctttgcctaatgcatatggaactgcagcagttttagttattattgtattaataattacattttttacaaattatattgtaaatagatatcaaaagaaaataatgggtaattaa

SEQ ID NO: 7058 - DNA, 753 bp, Methanobrevibacter gottschalkii
  source 1..753: mol_type = genomic DNA
atggatagaattatagttaaggatttgaatacctattttggtaattctcatattcttagaaatattaatgttacatttccagaaaataatgtaactgcattgattggaccttctggttgtggtaaatcaacttttttaaggtccattaataggatgaatgatttaatttccacatttcatcatgatggttatatttatattgataataaagatatttacgattctgatgtggatgttgttgaattaagaaaaaaagtagggatggttttccaaaaaccaaatccttttccaaaatcaatatttgaaaatgttgcttatggtttaagaattcatggttatgatgatgaagattttataaaagaaagagtaatcgagtctcttaaagcttctgctatttgggatgaagttaaagataaacttgatcaatctgcaatgggtttatctggaggtcaacaacaaagattatgtattgctagaactattgctaataatccagaagttattttaatggatgaaccttgttctgctttagatcctatttcaactctcaaaatcgaagatttaatgcatgaactcaaaaaagattattcaattattattgttacacataatatgcaacaagcttcaagagtttcagattatacttcatttttcttaaatggtgaaataattgaaagtggaaaaacagaacagatatttgttaatccaaaagaagaaaaaacagaagaatatattacaggaagattcggataa

SEQ ID NO: 7059 - DNA, 657 bp, Methanobrevibacter gottschalkii
  source 1..657: mol_type = genomic DNA
atggataaagaatacccaagtatttcatttaaaaatagatttaaaaaaattgaaagtgatatagaagagctaaatgatttagctattaaatctaacatggatgttgttaaattatttgaagaatttaatgaaaatttatattttgatattttgaatcgttctaatgaaatggatattaaaacaattgatttagaaagggaatgtattaaatttatggcaacagaacaacctgttgcgcatgatttaattttcatggaatctgtaattagagttataagccatattaagagaattggtcgtttatttttaaaaattgctcaatcaattaaaaatattaaagatgttgagattccagaattaataataaaaaaattatgttatatgggtgattatattgaagtcatgttgaaaaaatccatttttgcatttttaaataaggatacacaaaaagctaaagaattatctcatgatgatgatgaaattgatgaattgtatgagtttattttaaacgattctattgatatgattgaagatagaaagattttaattgagattatttcaattgcaaggcactttgaaagaattgcagataaaactgttaatattggttcaagaattttctttgtaatggattttaaaaggccagatatagaataa

SEQ ID NO: 7060 - DNA, 1299 bp, Methanobrevibacter gottschalkii
  source 1..1299: mol_type = genomic DNA
atgagtagaaatgcttatattaataaagatattccactttctaaaattcatgaagttaaagctgatttaaagcattatatagaagtttatgagaaaataacattcattgaagatatatatgctggtgaaacagtaaaatatgctatagaaaaacgtggaaaaacaattccaactggccatacatggttaaaatcttggaatgaggaaggatttgatggattactcagaaaagaaggatctggacgaaaaacaaaattaactgaaaatcagttcaaacaactaaaagaaaacatcataaaaaaacaattaacaagtgttcgtgaagtaaaacatgaaatattcgaagaatttagtgtaagttatagtgatagacaaattcgacgcattatgaaaaaattaggctttggatatggaaaaccttatgtcatacctgcagaagctccaaaaaatgcctcagaacagttaaaaaaaaacacagaaaaaatagatttaaaaaaagacattttaatattcactgatcaaacagcagttcaaaataaagacaatacaaacagaatatactacgaattaggaacaaaaaatagacagacaaaaataactacaagaataaaattaaatgcaaatggctatcaagcagtaaacggcaattcattaatactatttcaacaaaatacccatacatttgaggaaataaaatcattaatcaatcttagaattgttaattgcataaataaagagttaaaatcagaacttaaaaatattttgaccgatgatgaactagatgaaaataagatttacaataaattaaaagatgaaaatacattagaaacattaaaaaatgaatttaatgaattcatatcaaacagtaatagttctgaaaagcaatttttggtaaaaataaagaataaagcaaataaattaaaccctaaaaaacacacaaacatagaaaatattcaaaaagaaataatcattaaattactaaataaagacaatataatcaataatttacaaaatgaaagaaaacttgtagtggtattggataattactcagttcataaagctaatttagtgattcaagcatgtgaaatattaaatataaaattaattcatttacctccccattctccccacttaaatccaatagaacaagtctggaaatcaataaaaaagtatatggcatattatttatttgatacaataaaatttatggaagaattattcgaaaaagaattttatagaatcgtaaatagagattcctactataaaaattggatcagtaaattcatcatggttaactaa

SEQ ID NO: 7061 - DNA, 888 bp, Methanobrevibacter gottschalkii
  source 1..888: mol_type = genomic DNA
ttgacaagaagtaataaaacattagaagatattttggatgttattttttatgacaaaccatccactcaagaagagattgctgaaacattaggaataagccgcagatatgttacccaattacttaaaccattaattgaagaggatattgtaaaaagatcatatgtcattgatttaaataaatacgatgaaatttatggttcttcaaatccaatttttaattcaaaacagcattcagcttactttttaattgaaaatatgttaaaaaatatggcagaacatgttaaaaaggaagttcaaatgtcttttgatgctattttgaataatgatgaaaaaatggccgaagaagctttggaactggatttcaccacaaacaacatgtttgaaaaagttcgttcttctgttgaaacagttgttaatatagatcctcattcaaaactttctaaaattttactatttaacgaagcagcatataattatgaacgtattggagactattccggtcacattgctaaatttgtcataaatgaaaaaacccctgttgatgaagaactcttagacatattaaaaaaaatgcacaaatatgctcaaaaatctatttcatatgcaactgatgcatttgttagtgaaaaattagaattacgtggcgatttaatggatattgaagaaaaaatgcatgaaaagcaacatgatgctttaaatttagttgctagtcaaatggctgagaattcatttgaggatattgaaaaatataattattatatttatatttcaagagttgttaaatcatttgaacggatgggtgatattgcagttgaaataattgaattagctgcagaatttcataaagatataccaagaccaacaactcctcgctcatttagaaaatag

SEQ ID NO: 7062 - DNA, 1062 bp, Methanobrevibacter gottschalkii
  source 1..1062: mol_type = genomic DNA
atgaaaggtttagcaagaatagatcaagatgtaatggattgggttgaaaaagacaaaccaaaatgtgggccatatgatgcaattgtaagaccaattgctcttgcaccttgtacttctgatgtacatattgtttggggtaatgcatacatgagtgatgcacctaatcgtatccttgggcatgaatcaactggtgttgttgaagaagtgggggattttgtcactgatttcaaacctggagatcgtgttattgtcccagcaattactccaaattggaacagagttccttcacaaaaaggtttcggacaacactgtgatggaatgggtactggaatgacatttattacatttaaagatggaacatttgccgagtactttaatgtaaatcatgcagatggtaacttggcacacttacctgacaatgtttctcttgaccaggcggttatgatatcagacatgatgactaccggtttttatggtgcagaacttgctgaaattaaaccaggtgaaacagttgcggtatttggtattggtcctgtaggactcatgggtgtagccggtgcacatttcatgggggcatcaagaatccttgctgttggaagcaggcctgtatcagttaaagtagcaaaagaatatggtgcaactgaaattgttgactatcatgaaggtgatactgtagaacaaataatggatctgactgatggtgaaggtgtagataaagtagttgtagccggaggaaacgcaaatactgttggtgaagctttatcagttctgaaagttggaggtatccttggtaatgtaaaccattatgatggtgttgaatctatcccattacctgcacttgcatggggtgcgggacttgctgataaaacaatccgtggtggtgtgtgtcctggtggacgtgctagaatggagcagcttgttaaactagttgaatatggtcgtttcgattcaagtaaattaattactcacagatttactaacttcgatgatttatatgaagctatgattttaatgagggataaaccacgtgatttaattaaacctgctgttattttagaatag

SEQ ID NO: 7063 - DNA, 1557 bp, Methanobrevibacter gottschalkii
  source 1..1557: mol_type = genomic DNA
atgaagaatcttgaaaaaacattaaaatcagtgactgaaaatccaaaatatattttccgtttaacagttcaaggattaatggttggtatattcgctggtttgatggtatgtttatatcgatttttactttatggttcggaacatattttaagagattatttaaatattatacatggaaatatattatatattattttatttttcattgcattggctataatgggacttttagtcgattggttaatcaaatgggaagttgattcggctggaagtggaataccccaagtttatgctgaggtaaaagggcatatggaagctaactgggttaaaattcttttttctaaaatggtatcaggtgttttaacagctcttggtgggttgtctcttggtcctgaaggcccttcagttcaaattgggggtatggcaggaaagggtgttgcccgtttatttaaaggatccaaaacagatgaattaagattaatcttagttggttctgctgtaggtattacagccgcatttaatgcgccattggcaggagtattatttgttttagaagaaatcaatcatggatttgataaaacattagtatttattgcactggtatcggctattgtatctgattttatatcaaaagttatctttggtcaatccactgctttaacatttccaattcataatattccattaggaaattattggttacttcttgttttaggtgttttaatcggattattgggttatgtttataatattggtatgataaaatcaagtgatttcgtaaatcagcttaaaatcccgtcttggcttaaatttgtattggtttttatggtttctggtgttgtagcattgttaatacctgaaataagtgatggcggacactttatgatggacatgttggatgtggctatgccatcgctgggtgttttagtatttctgctagttttaaaatacttgttctctttgttctcattctcgtcaggtgcgcctggaggtatatttttaccgattttagtattgggagcatatattggtgcagtatttggggttgtaatcgtttctgtatttggattggaacatacattaatatataaatttgtggtcatttcaatggcaggatttttcgccgcaacagtaagatctccgattacaggtgttgttttaattgctgagatgtgtggttcaaccgaatcattaattgcaatgatcatcgtttctttaatagcctatgttgttcctacacttttgggtaatgaaccgatttatgaatcattatatgataggctgcttttaaagaaaaacagggaatttgttaaaaaaccttcaaagcatgttttatccgaatatttagttccacttgactgtaattatataaatttcaaagttaaagatattccatttccaaaaaatgctattgtagtttctgttatccgtaatggtaaatatgtaattccgacagaggattttaaaattaaatatagtgatcagattcatattttagctgatgttaatgattatccatttgttcgcgaggaaattgaagagttgtttggtggttag

SEQ ID NO: 7064 - DNA, 501 bp, Methanobrevibacter gottschalkii
  source 1..501: mol_type = genomic DNA
atgagtttaatttttaaaagaaaaagtgttcgtaaatttaaggatgaaaaagttagtgaggaggtaataactaatctattaaaagcaggtatgcaagcaccttcgtcatgcaattctcaaccctgggaattcattgttgtatcaaaaaaggaagataaattagccatttctcaaatgcatcaatttgcaaaaccggctgccaatgcatctcatttgataattactgtaggaaatcttaatgaagcaaaagtcattaggatgatcgaacaggacttaggggcttgtaatgaaaacattttacttcaggctactcatgagggtcttggtgctgtatggttaggtttccatccaatcgaagatagaacactaaaattaaaagaatatttgaatattccggatcattgtattccattttcagtaatttgtgttggatatcctgcccatgaaagtgaaataaaaattagatatgatgaatctaaagttcattttgataaatattaa

SEQ ID NO: 7065 - DNA, 714 bp, Methanobrevibacter gottschalkii
  source 1..714: mol_type = genomic DNA
atgtataaaaggatattttcaatattaattgtcatggtctttttgatgttttcagttagtgctgtttttgctgaatctgatgctgttcaagatacgggtggggagagtacttcacgaatcattaatgtaaaagttatctggaatgatgatggccaaacaaataatcgtcctgattcagttactgtaaggcttttaaataatgggagtgttgttgattcagtaatattaaatgaaagtaatttttggaatggtacttttaaaatacttgataatggaaattatgacgttgaagagacaggtgatctttcttcatattcgatttctttaactggcgatatggataatggttttgtaattacaaacactattaagcaagctccaaataacggcagtgatgatatgattgttgatgaaaattctacagataattcatcagatgatgttaatggtattattgatgattccaatcatactgttgatcaaaatgatgctaaagatgaaaatcaaacagaaaatatttcccaagcaaaaaatacaacttataataataatgataaagaaaaacaggtaataaaaaaagaaaataaatctgttaaaaagaataatacaaacataacggggattaaattaaaaaacacaggacttcctgttgtggttttagttgtagtgttatttattatagtcattactccaatttcacgttggaaaaaataa

SEQ ID NO: 7066 - DNA, 972 bp, Methanobrevibacter gottschalkii
  source 1..972: mol_type = genomic DNA
atggtaagtgtaaacattgaagcaaaaaaaaccgtagatgtaatgattgaaaaagcagatgcattaaacatcgctgtagaaaccttaaaaaatggtgctactgttttagattgtggtgtaaatgttgatggaagttttaaagcaggtgaactttatactaaagtttgtctcggcggacttgcagatgttggaatttctattccaggagatttgtctgaaaaattcgctcttccttcagtaaaaattaaaacagactcaccatccatctcaacattaggttctcaaaaagcaggatggtccgtatctgttggagatttctttgcacttggttctggtcctgcaagagcaattgcattaaagccagctgaaacttatgaggaaattgattatgttgatagtgaagctgatttagctattttaactttagaagctgatgtattgcctggtgaagaagttgctcaatatattgctgatgaatgcaaagttgatgttaaaaatgtatacttactcgtagctcctacttcatctctcgttggatctattcaaatatctggtagagtagttgaaaacggaacttacaaaatgttggaagctatcaaatttgatgtaaccaaagtaaaacatgcagcgggtattgcacctattgcaccaattgacccggatggacttaaggcgatgggcaaaactaacgacgcagtattgtttggtggaagaacttattactatgtggaatctgatgaaaacgatgatatttctgatgttgcagctaaattgccatcttctgctgctgacggatatggcaaaccattctttgatgtatttaaagaagctgaattcgatttctacaaaattgataagggaatgttcgctcctgctgaagttgtaatcaatgacttaactaccggtaaaatttacaaagaaggatttgttaatgtggagttgcttaaaaaatccttcggattagatgaataa

SEQ ID NO: 7067 - DNA, 846 bp, Methanobrevibacter gottschalkii
  source 1..846: mol_type = genomic DNA
atgaaggtgtttaatatggaaataatagatattattaaagaagcatttattttcccatcaaataatttagaaaaacttgcaatttatatagttttaacatttgtaatgggaatgttagttgttgggggaatattttctttcgtattcagtagtcagtctagtgctcttttaattgttggtttaatattatgtattgctgcaataattttagcattgataatatcaggttatcaacttaaaatcatgaaatctggtattgaccaggatgaagaggctcctgcatttgactggaagaatgatggaataaatggtattaaagtaatagttcttggtattgtatactttattattcctgccattattgttggaattgtagcattaattactaatgttccgggcaatttagtgcaaatcattcaggaatattctacaagtataaatgcaactgctgctgttaactctactgcatccgcaatgcctgctgtatcaagtgctagttgggcagcattaggaacttcattagctattaccgctattattgcatttgttttattcataatatttgcattcattcaaactatgggtcaggcaagattagcaaatacgggtagtcttggcaatggacttaatattgttgaagcagcaaaagacatttcaagaattggtgtaggtaaggtaattgctgttattcttttagtgtttatagttataatggttattcaaggaattttaggatatatttatggtcaaatcccacaattatcaattatttcaattataataactccttacttcgtattctttacacaaagggcatatgggttattatattctgatattgcataa

SEQ ID NO: 7068 - DNA, 546 bp, Methanobrevibacter gottschalkii
  source 1..546: mol_type = genomic DNA
atgtctgatttaaaaggtactaaaactgaagaaaatttaaaagcagcatttgctggtgagtctcaagcacatactaaatatcaatacttcgcagctaaagctaaagaagaaggttatgtccaaatccatgatattttcatggaaacttctaaaaatgaaagagaacatgctaaaatctggtttaaattattaaatgatgaagctattcctgatacaatagctaatctcaatgctgctgctgacggtgaaaacgaagaatggacttccatgtacaaagaattcgctgaaaccgctaaggaagaaggtttcccaatgattgcattcctatttgaaaaagtaggtgcaattgaaaaagaacatgaagcaagatacagaacattactcgataatgttgaaaaagaaactgtattcaacaaagctgaagatattgaatggaaatgtgaaaactgcggatttatattttcaggtcctaatgctcctgaaaaatgtccagtttgcggacttccaaaagcacactttgaagaaagagctactaacttcaaataa

SEQ ID NO: 7069 - DNA, 546 bp, Methanobrevibacter gottschalkii
  source 1..546: mol_type = genomic DNA
atggcagatttaaaaggcactaaaactgaagaaaatttaaaagcagcactcgctggtgaatctcaagcacgtgtaaaatatgaattttacgcatcccaagctaaaaaagacggttatgtggaaatcaaagagattttccaagaatcatctgataatgaaaaagaacatgcaaaaatatggtttaaacttttaaatggtggtaaagtacctgataccaaaattaaccttgcagatgcagctgctggtgaacatgaagaatggacttcaatgtacaaaggatttgctgcaactgcacgtgaagaaggtttagatgatattgcagacttatttgatgctgcagccgctactgaaaaagctcatgaagacaggtataatgctttatcagataagattaaagcaggtaaagtatttaaaaaggatgaagaaatcgcatggaaatgtaacaactgcggatacatccattatggaaaggaagctcctgaagtatgtccattatgtgatcacccacaagctcatttcagaaaacaagatactagttatatctaa

SEQ ID NO: 7070 - DNA, 1410 bp, Methanobrevibacter gottschalkii
  source 1..1410: mol_type = genomic DNA
atgattgaaaataatatatgtttattaacagatagctataaagtaacacatcattatttttaccctaaaggaacagaaaaaatctattcataccttgaaagcagattaggttctgaatttaataaaactattttttatggactccaatatattattaaaaaatatttagaaggttctgtcgtaaatcagcaaaaaattgaagaagctgataaacttatttccaatcacattggtgaagatatattcaataaggatggctggtattatattttagacaactatgatggttatcttccaattgaaataaaagcagtacctgaaggaacacctgttaatgttagtaatgtattgatgagcgtagaaaatactgataaaaaatcattctggttagttaattacttggaatctttattattgcaagtctggtatccttcgactgttgcaacattatctgcagaggtaagaaaattatcaaaattttaccttgaagttactggttcttcaaaagacaatttagatttcatgttgcatgatttcggatatcgcggagctagttcaacagaatcatcaatgttagctggttcagctcatttactcagtttttccggaactgacactattcctgctctattaattcctaaaaattattataatgattcaaatttatatggattttcagttcaagcaacggaacacagtgtaatgacttcattaggtcctaaaggtgaatttgatcaaattttgaatgtaattgataatgctaaaaatggaatattgtctatggttatagattcatatgattataaaaattttttaaccgaagctggaaaatcagatagccaattaaataaagctataaatgattttttagcagttgaaggaaataaagttgtatttagaccggatagtggtgaacctgtatcaacaacaattgactgtttgaatatcctgggaaaaggtttcggatcttatctaactgacaaaggttataaggtatttgattcaaatattggtcttttatggggtgatggtttagactatcataaaattagggatatattatttgcaatgaaatctaatggctgggcggctgaaaacattatctttggtatgggtggaggccttcacacctatgtaaatcgtgatactcagagaaatgcatttaaatgttcagcacaattacgtgatggcaagtggtttgatatttataaaaatccattggattccagtaaaaaatctaaaacaggtaggtttaaattaattaatgaaaataattcatttaaaacaatatcaattgatggatatggtgatgattgtctcagaactgtatttaaaaatggaaaattgctaattgaagatacatttgcagatataaaatcaaaaacgttaaattattcaaattttttgtaa

SEQ ID NO: 7071 - DNA, 3657 bp, Methanobrevibacter gottschalkii
  source 1..3657: mol_type = genomic DNA
ttgcacaaaattagaaaagctattatcatatgtttaatattattaattgtttttattccaactgcatatgctgcggataatcaaacaaatttaggtttaaacagtaatgatgtaatgttatctgattcatattattttgatgctaatgttgatgatgatttggggaatggatcattggattttccttataaacagttaaagagtaacagagttatagataattctacaatctatttaaatgatggaatatattatggatttaataaagaatttagtaatttaactgtaatcggtaaaaatagtgaaaaaactattataaaaaatattcaatttgatattaaaggttctttgataattcaaaatgtaactctgattaattctaaaataaccaataatgcaaatataacattggttaattcaatttttaaagattcttcatcattcattggaggagttttaaagtcaaacccaaatacttttgtaactataactaattgtacatttttaaataatcatgcaaataggtatgctggagttatttattcaaataattctaatttaaatatctgtaactcaagttttgttggaaattatgctaattattatggtggagctatttattgtgagaaaaattcaaagttaacaattataaatactgatttcacaaataatcatgcaaaaaatgatgctggaggagcaatatatggtatggattcagatattcttgccaattatttaagtatttcaaattcttcatccactttcggtggtgcaataactgcactcaatacaaatttgaatttaactaatttcaatgcttggaataataaagcaaaatatcgtggcggggttatttattcagtttatggttattatattgttatgaactccacatttgaaaataacacagcatctgatggaggtgcgttatttattgactcaccacattcagtgaatgtttcatcaaacaaattcattaaaaacaacgctttaaatattggtggagctgtttatataatttctaataaaaattatttcattcctgataatttatttttaaataactctgcaagttttaataatgatttttataaaactatgttgtctaatttaactattggaaataataattatgttttaattaattataatggatcccatataggtaatcttccaagcagttatgatttaagagaattaaatcagacaacttctgtaaaaaatcagggatctgggggtaattgttgggcatttgcagcaatagctagtttggaatcctgtattttaaaagctacaggaaatgcatataacctttctgaagaaaacatgaaaaatctaatgacattatactccaattatggatggaaagtttctcctaatgatgggggctatacttcaatgggcattggatatcttacttcctggttaggagctataaatgaaagtgatgattcatattatgagtcatctgcattatcaccagtacttgacagttttattcatgttcaaaatattctatttttaaaaagaaatagttatactgataatgatgaaataaaaagagctatcattgaacatggtgctgtttcaacaagtgtattttggaaagtagagaaatatgctaatggtgaaaattactataattatgaatatgcttcgggttctaatcatgcagtagttattgtcggatgggatgataattattctaaaaataattttattaaaaaggctccaggagatggagcatggataattaaaaacagttggggtactggtagtggtgatggcggatattattatgtttcttattatgatgcacgtttagcaccaataaatacttcatctgttacttacacatttgttttagcagattcgattaaatatgataaaaattatcaatatgatatcccaggaatgactgattatctattgaattcatcggatcgtgtctggtataaaaataagtttacagcgactgacgatgaatatttaaccgctgtttctacatacttccaaaaagaaacttcatgggatttgtcaatctatgtaaataataaactgatgttaactcaatcaggtaattctagtgcaagctactcaacaattgaattaaaccgattcataattcttaaaaaaggtgacatttttgaaattgaatttaaaataactgttgatggtgatgcaggggttccgatatcagaaatagcttctcttaataatctgttttatggtgaaaatatttcatatgttagttatgatgggaaaaaatggattgatttatttgatgtaagatggacatatcctggccatacatataatgattcgcaagtagcttgtattaaagcattcacggtattgaataaaattaactccactattgtcctaacaattacagatgagaataatccagttgaaataactgctaaagttttaaaccagtatggaaatcctattaaaacgggtaaagtcacttttaatattgaaggaaaagattacattgctaaaattaataatggatttgcaaaattgattcatatttttaatggaaatgaaaataaactaatcattgcttcttttagcggtgccggatttatcgaatctttctcagatataactttttgtccagagcaggtttcaattaaagcaagtgacatggtttcatattataataaaaattcttattccataactttgcttgacatatactcaaaaccggttgcagataaggaagttaaatttaaaatcaataatctggaatatgttgcaataactaatgaaaatggtattgccgcaattacatttaacttatatcctaatgtttatgatgttataattgggtttaattctatcaattttgataattataatgttactaaaaaaatcactatcaaatctacaatttccattccagaaaataccgtttatacctataattcaaaatatccaattaaattgttaaacaataatggaaatccattatccaattgtaaattcaaacttgttattaatggcataacaaattatgcacatactgattctaatggtgcttttaaatacaatattaatttaaaaccgggaaaacacactataacagttatcaatacaaaaacaggtgagaaatctacccaaaaaattaaagttgtctcaagaataactcaaaataaagatttttcaatgtattatggtgctggtagaaattataaagttaaagttgcagatgattatggaaaagttaagaaaaatcttaaaatatcttttagagtgaatggcaagacatattatagatatactaatgaaaaaggttatgcatatctaaaaatttctttaaaacctggaaaatacactataactgccaattataaaggatataaagtatccaataaaattcgtgttaaaccaacaatcataactaaaagtattgcagtcaaaaaaggaaaaacaggcaaattcacagccaaattattgaataacaaaggcaagattttaaaatataaaacaatcaatttcaaattcagaggcaaaacctacaaagttaaaaccaataaatatggaatagctactttaaagattgctaaaaaatataaaattaccagatattcaataattactagttatcgtagtgaaaaaataaagaataccattaaaattaaaagataa

SEQ ID NO: 7072 - DNA, 699 bp, Methanobrevibacter gottschalkii
  source 1..699: mol_type = genomic DNA
atgctaaccattaatcaatgttatttagattttgtggataaaatcttaaaacaaggaaaagaaacttataaagactctaatcatcatttaatagaaagtttagggaatttttatataattgatgatccgttagatttgaaattcagagctaaatatcaacattacactacaaaaatgatgttagatgacattaaatctggaaaatttgacatagaaggttgtcctattaaaagcgatgcactttatgaatatgtaaaatccgcagaaaatccggatgatcagggatttgtatacacttatccaaatcgtatctttgcacattttgatgttgatcagtttaacacaatgaaaaaaagaatattgacagcaaccggttcaaatcgtgcagtagccgttacaatagaccctgaacttgacgctgatagagaagatataccatgtctccaatttttacaatgtattgtccgtgacaatgaactaaccattcactgcatattcagaagtaatgatattttcggtgcattctactccaatatgtttttcattgcatatttaggccttaaaatgaaagaagaagtaaacaaagaaattgttggtgaaaagctgaacttcggtggagttcactaccattcaacctcaggccatatttacaatactgatttaaaggcagcccgtaaactgataaaaacaaataaataa

SEQ ID NO: 7073 - DNA, 573 bp, Methanobrevibacter gottschalkii
  source 1..573: mol_type = genomic DNA
atggaacttgaagaatatctggaatatgtaaatagcggaaaaagaatttatgccggctccacacaacatttatttatgcatgaatccttgaataatgcattgaaaattactcataaaatcaatagtgaatatcatactcctgaagaaattcaaaaattatttgctgaattaacaaataaacctataaataaaacattagggttaattcctcctttcaatactgatttcggtaaaaatatccatattggagaaaatgtttttataaattcaggatgcaaaatgcaggatcaaggtgggatattcattgatgatgaggttttaataggtcataatgtatgtcttttaacattaaatcatgcaaaagaacctgaaaacagagcagacatgtatccttcccccatacacattgaagataaagtttggattggttcaaatgtaactattcttccaggagtgactatcggtaaaggagccattgttgcagcaggagcagttgtaactaaaaatgttgaaccagaaactattgttggaggagttccggtaaaatttataaaaaatgttagtgatgattag

SEQ ID NO: 7074 - DNA, 573 bp, Methanobrevibacter gottschalkii
  source 1..573: mol_type = genomic DNA
atgacaaatgaaaattttgcaaaaaaaattaaagacataagagctagacagaacatgactattgaagatcttgctgagagaagtggggtaaaacttgaagttttaaaagctatggaatctggagaggttattccatcactcactccattaacaaaaatggcaagggcactaggtgtacgtttaggcacatttttagatgatactccggaacttggtccagtagttacaagaaacggaaaaactgaaaattctctttacttctcaggtagggaagatgtaactaatgcaactaatttagaattccactcattaggtgcaggtaaaattgatagaaacatagatcctttcataattgatattgaatttgaagaaggtgaaaaagaattatcttctcacgaaggtgaagaatttatttatgttttagaaggtgaaattgaagtaatttatggaaaagattcatttactattggaaaaggagataccatcttttatgattcagtagtgccacaccatcttcacgcaagtggcgaaaataaagcaaaaatactcgcagtattatacactccatattaa

SEQ ID NO: 7075 - DNA, 156 bp, Methanobrevibacter gottschalkii
  source 1..156: mol_type = genomic DNA
atgtttgagatagaattaaaacaacaaaaaattagcaatggtttaatcagatttttcacaagtattttggatttgcattctttgttgttgtgtttgcaagaatattttacaagtatgaataatgttgaaattaaaaaaatggaggttttccaatga

SEQ ID NO: 7076 - DNA, 1665 bp, Methanobrevibacter gottschalkii
  source 1..1665: mol_type = genomic DNA
atgagtgaattatttactgaactgccgttagggaagtttttcgaatcaatggttgaaaagcagcctgatcatgaatttatcatttatccggataggaacttaagatttacatataaagaatttgatgaaagagttgacaatttagcaaaaggaatgttagctattggaattgaaaaaggagatcatgttggcatatgggctaaaaatgtacctgaatggttaacttacatgtttgcaactgcaaaaattggtgcaacaattgttactgttaatactgcttatcagtctcatgaattggaatatgtgcttggccaatctgatatgagagcattagctatgactgatgcatttagggatattaactattttgatattataagtgagcttgtacctgaacttaaaacttgtgcaagaggtcatttggtatctgaaaaatttcctcacttaaaattcgtgttccatgtaggtcaggaaaaacatcgtggaatgtataatactaatgagttattattactgggcatgagttatgatggagaaaaatatcaggaaattaaagattcagtttcacaaaatgatgtaatcaatatgcagtatacatctggaactgaaggttttccgaaaggtgtaatgttaaccagccgtaatattgtaaacgatggttattacataggggaaaatatgaattatacatctaatgacaaattacttttacaagtgcctcttttccattgttttggaactgtacttggtgtaatggcggttattactcatggttccactatggttgtacttgaagagtatgatccgctgcttgccatatcctccattcaaaaagaaaaatgtacagctatttatggtgtacctacaatgtttattggtatgatgaaccatccaatgttcgatatgttcgacatgtcttcattacgtacaggtattatggcaggatcaacttgtcctgttgaaacaatgaaagatgcaatagaaaaaatgaacatgaaagaaattactagtgtatatggacttactgaagcggcaccgggtttcacacaaacaaatgctgccgattcatttgagaaaaaaatcaatactgtgggacgtaaatttccaaatattgaagtaaaaatagttgatcctgagactggtgaagaagtgggcgttggagaaacaggtgagataatgtgcagagggttcaatgttatgaaaggatattataacatgcctgaaaaaacagcagaaacaatagaacctgatggatggttacactccggagaccttgcaacagtagatgaagacggatattattcaattgtcggtcgtattaaagacatgattattaggggtggggaaaacatttacccgcgtgaaattgaagaatatttattcactaatgaatgtgtgcaagatgttcaagtggcagggattcctgatgaaaaatatggtgaaatcgttggggcatttattattaaagaggatggttttgatgatgttactgaagcagacattcgtgatttctgcattggatctattgcaagatataaagtgcctaaatatgtgttctttgttgatgaatttccactcaccaccagtggtaaaatacaaaaatataaattgggagatttaggtcttagattattagatgaaaggcgccagagaggagagttataa

SEQ ID NO: 7077 - DNA, 3609 bp, Methanobrevibacter gottschalkii
  source 1..3609: mol_type = genomic DNA
atgaggaaaaataattatttagtatttctattaatattttcattatttttaactatttcttcagtatctgcattaaacgtggatgataatgcgacaatagaagatactaatttgaattcaatggatgttaattttgatatttccaatggcgaattcaatagtattaatattgataaaacgttcgatacaaatatagatgctgatgcaggaaaagacacaaatattgaggaaaaaactattagtattactaattctaataattccattctttccactaaagagaataatgttaaaaataattttaaattaaattccggttcattaagagcaggtaatataatttatattagttctgatggtactggggatggtttgactagtaataatccaacaaactgggctaatggatacattaatgctcaatcaggcgatacaatttctttccttgatggaacttataatcttgtaaatgtaaatttaaataaagatttagttttaaaagcttttaatgaaggaaatgcaataataaatgcaaatagagctggtaatgtcttttctattaataataatagaaatataaccataaatggtttaacatttataaatgggaaatctactggaaatggtggagcaatttcatttaattcaggagccctaactgtaattaattgtagatttattaataatactgcaagttcttatggtggagcaatatatcttagagatggaaagttaaccatagtcaatacaactttcgtaaataattcagctgatgttggtggagcagcaatagcagacaccattagtattactcattctgatttcattaataatactgcagatggttctggtggagctataagagcttatgataatttaacaattgttgattctatttttactaataatacttctataaatggtcaaggtggagctttatatactccaaatgttgacataaataattcaatttttgttaataatacttcattaaatggtggaggggcaatatactccagcaatgaatatttaattaataattctgtattcgttaataactctgctattgatggtgatggtggagcagtttcatcatatcgtactggcaatataaacaattctaattttaccaataactctgctaaaaaaagtggtggagcagcatatgctagagagagtattgaaattgataattctagcttcaataaaaattatgctggtgctggtggagcagtacgtgctcaatcagaagttaatattactaattcaaattttaccaacaatgttgctaacaatgagggtggagcaatatattctaatggaaaaattgttgttaataatttaacttttatcaacaactctgctattgaaagtgatggtggagcaatattctctgtagaagatgttgaagtagataattccaattttataaataattatgcaggtgaacttggtggggcaataagtgcttataatgaacttactgttaataattctaatttcaccaacaataatgcaaaatattatggtggtggagtttatgctaatgtgttgaattctaatagagataattttgttaataatactgcagaatataatggtggaggagcttatgtattctctaatgctaatattaatgggtcaaattttgattcaaatactgcagtgaatggtggaggattattcagcactggaaattctagtgttaataattctaatttcattaataataatgcttatgatggatctgcaattattagtggaaatttacatttaaataataacaatttagaaaataacacatctagaggttatggaattgtatatgctgaaaatgcaactattgaaaataataaatttatagataatgatgcattagaagataaagaaatctatgtattaaatgaattaagtcaaagcaataatactttaagccctaatcaaatagaaaatattaatgctaatacagtaaaagtgaatactattaatggtactacttatttggttgatttagaagatgggttaaaaggatattgtttacaaagaacattaaatttccctgattatgtatatttattaaataatcttagtttagcacataaccaattaactggtgaagatgttagtgaatacttaaagattttaatttataaatattatttctcagataaaaaagacaatataacttacagtttatgggactttacagacagtgattttagaaatagtaataacaatttaactaaaaaagtaattgcattatataattctggattccgtgtacctgattctaatgctagtttaatattggataatggtactcaagtattatttgatttttatagtgctggaagttcaacaactcaaaatttattcctatttaatattacatatatgggaaacaattatgacatgaaagttgaaaaaattacattaaacaaatctgtaattaatggaaataaaacaaaattcataattagagtaacaaacattggtgatacaattctccatggtgttactgtatttgaaaaagagtatgatggtttagtttatgattcatatattgatgaaggaaataattggaattataacaatggtaaatggatttacaaaaaacaattaaacattaatgaatctgcagaatttactgttgtatttaaaacaataaaatccggtaatttcacaaatatcataatttcatcatccaatgaaactacaaataaaaccactaacaataccactactgtttacactcctaatctaactgttgagaagctttctttgaatagaactgtttatgttggtaatcagactgtctttactattgttgtccgtaataccggtgattgtgatttaggtgaggtttttgtcgttgaaaaagctccagaaggtcttgcttacagttcatttaaaggcaccgactggtcatacaacaatggcaaatttacttatggtaaaactttaaaggttggtgagtctgttagttttgagattgtattcgatgctgttagttctggtaattggactaatgttgttgttgcaggttcaaatttaacaggtaataaaactggtaataatactactaaggtttataatcctggtttgaaggttgaaaaaatcactttggatcctgttgtgtctgttggtgagattacatcttttgaaattatagtgactaatactggtgattgtaaacttggtgatgtttttgttcatgaagatagttatgaaggtttaaggttccatagtttcaggggtgatatgtggaaacagaaaggtgatactttctattatcagggtgttttaaatcctggtgagtcagcatcatttgtaattttatttactactttaaaacctggaaatttcacaaatattgttactgccggttccaatgttactaacaataccactactgaaaacaaaaccaaagtaatagaaaatcacactaacaataatactaatggtattaataaaacagttaataatgaaaccaaagaggttaatgttcataaggttgatacttcaagagcaactggtaatccgttactagcattactcatggttcttttaatgattagtgtgacttctgttagaaaattcaaaaaataa

SEQ ID NO: 7078 - DNA, 966 bp, Methanobrevibacter gottschalkii
  source 1..966: mol_type = genomic DNA
atgacttttttagataatatttcagataaaattaactatgaaactttgaacaatattataaaatttgaatttgatggtgtttcaactaattggatggatgaaaatgatccattcattgaaagaattcaaaaatctagtttgaataaagttttcttaaaagaacatattctaaaagaaattgaaattaaaaacattttggatgaaggtattgactttttaaattcacaaaaatatgttaatgcaatagaatcttttgatgaagtgctgttttatgatgaagggtatgcagaagctttaattaataaatcatatgctctttttggtcagaaacattttgttaaatctttaagatattataaacgtgccattaaagtgaataatgatttgaaagatgttgaatatcataaattgcttttaagttgttccaataaggaaagaagtaatttttcaaaattaaaattaaatatttattctggggatgaactatttgcaaaaggagaatataaaaaagcacttgaaagatatgatggtgctttagctaatccatctctatttaaagataaaatactttttaagttactcaataaaaaagctacaacattacttaaattaaacgattttgaaaatgcattggcatgttttaaagagtctttaaatgcaaagattagtgattatgcatattatggctgtggcgtatgccaatatgaattgaagttagatggtgcttctgaaagcctatctcatgcaaacaatgttaaaaaaaatcaattactggaaaaaggattaatttttaatgaaattggtttatatgaaaatgccttaagtactttcaatgaaatattcaataatcattttaaagttgatgaactttatatcaaatccttaaatggtaaaatgcatgcaatgaggagtttaaaaatggatatggatgaaattgaagatatttattcaatattgctaaactaa

SEQ ID NO: 7079 - DNA, 375 bp, Methanobrevibacter gottschalkii
  source 1..375: mol_type = genomic DNA
atgaaattttcaggattcatgaatgtttaccaattagatgacatgagttgggaatatcagtttggaggcaaatcacttaaagctcaaacattaaaagaattagaagttcttgttggtctttatggtttaaaatggggtgtactggataaaaatctggttgaaaagtctcttgaaatagataaaaacaatgtcactggttttttaaatgtttataaaaaagagggtttctggcactataggggaactgatttgaaatcccatagtcttgaagtgttaaagaaaaaagttttaagcgaaaacctcgattgggtagaaactgacagggaacttgcttataaaaattggaaactggatttaaggaaatttaaaaaataa

SEQ ID NO: 7080 - DNA, 843 bp, Methanobrevibacter gottschalkii
  source 1..843: mol_type = genomic DNA
atgagtgtttttgttccgggtcatgtaaccggtttttttaatattgaaaatcatgagtccaaattaaaaaatggatcttgtggagttggatttttactaacaaaaggtgttatgacaactgttattgaatcagataactttgaatttgaagttaatcttggtgatgacactattgtctgtgaagtcttaagaattttgaatttggataacagtaattttaaaattattcaggatattcagcttccaatcggggcaggatttggaacatctgctgcttcagctttaagtttaacactggctttaaatgattttcttaatctgggttattcaaaagaattatgcggtcaaattgcacatatggctgaagttaatttaggtgcgggtttaggtgatgtaatagctcaaacaggcagtggtttagttttaagaacaaaatccggtgcacctggtattggagaaatcaaatcattcaatcaggatgtttatattgcatacaaaacttttggaccaattgaaacatcagagattatcacggatgccaattataaaaagattatttcagaagtaggtttaaagtatctggaattatttgaagaaaaacctagtttggataattttttaatcttttcgaaaaaattttcctgtgagactggattaatgtctcctgaagtgaaaaaacagattgaatatttcgaatctattgatgatgtattaggcagttcaatggcaatgcttggaaatacagtatttgcattgtcatataatgaagatacatttaaaaaattaaacattgaagagttacatatagataaattaaataataatggtattgtttatgattaa

SEQ ID NO: 7081 - DNA, 534 bp, Methanobrevibacter gottschalkii
  source 1..534: mol_type = genomic DNA
atgattaaacttagctatgatataaagaattatagaaagcaaatcttagatttaactcaaaatggagatacgataatagaattgggttgtcatgtgggcaatacgacaaaaattctattggataattttagagattcaaagataatggcacttgataattctcctgaagcaacaataaaaatgaatgaaattttgtgtgataatttggaatttattaatgctgatgtacgtcttcatgaaacattgcttgaggtatttaaaagaattcaaaagtgtgatattttatccattgatttaggtggaggatatcatcccgatacggtttttaaagtattttatatttggtcctcaacatttaaaccaaaacatacattaattagaaataggggtattttagaattttttaattcggcggggagcagtgatgaggattatgaatcatgtgagggatttctcgattcttatcatgattcgggaattcccccacaaattaaagaatttgaattatggacaccgaatcttgggaaatattga

SEQ ID NO: 7082 - DNA, 792 bp, Methanobrevibacter gottschalkii
  source 1..792: mol_type = genomic DNA
atgataggtaaaaagattcgtttagaaagaatcataaatagaaatactggcagaactgttattgcaccaatggatcatggtgtatcaagcggtccaattccgggtataataaatatggatgagactgttgaagaaatcgctcagggaggagctgatgcaatattaatgcataaaggtattgtgcaacagggacaccgtggttatggtaaagatattggattaattgtacatttatctgcaagtacttctcttgcaccggatccaaatgataaagtaactgtaacaagtgttgaaaaagcaattcaacttggagctgatgcggtatctattcatgtcaatctcggaagtgaaacagaaagcttgatgttgcaggaattaggtcaagttgcagaaacttgtgattactggggtatgcctcttcttgcaatgatgtacccaagggggcaaaaagtggaaaatgaacatgatgtggaatttgtaaaacacgctgcacgtgtaggttcagaacttggagtggatattgtaaagaccaactacaccggagatcctgatacattcaaggaagttgttgaaggtgctattgtaccagtagttattgccggcggtccaaaagtagaaactgatgaagagttattgcagatggttagagattctcttgatgttggcggggcaggtgttgcattcggacgtaatttattccaagctgaaaatccgggtaagattacaagagcaatatctgaagttgttcaccatgatttggatgttgaagaagctttagaattcttaaaatag

SEQ ID NO: 7083 - DNA, 1131 bp, Methanobrevibacter gottschalkii
  source 1..1131: mol_type = genomic DNA
atgcaaaataaattcgcttggataagtactcctgatgaattatgggatgataagaaagagatgatcactactgcattagaatcaggtattgactatgttttggattttgatgatattgaagagattaggaaacttggcaatgtgaaaatcattgcaaatactgatgatgcagatatctatttggtaggtattaatggtgaaggagatggctttgttgaattaaatgatgatttcactgattcaattgatattgctaatgcaaaaaaagcaaaaagcgaaggaaaaactgtatgcgcctatataaaaataactgataaagcccatgagcaattagctgtaagattaggttcaattgttgattatattattttaattggtaccgactggacaattatcccacttgaaaatattattgccgatttacagaagttggatgtaaagattattgcagctgttcgtgatgtggatggtgctcgtgttgcccttgaaactttagagcatggaactgatggcataatatttgaagcaaatgacttcaataatattaaaaaaatcgcccaaaatgttattgaagcatcacaagtaaaatatgaattaaaactagctactgtaactaaagtaaaacccttaggttcaggcgatagggtatgtgttgatacaactgacatgatgaaacctggagaagggatgttaatcggttcctattcaaaatccatgtttttagtgcattcagaatcacttgaaagtgaatatgttgcttcaagaccattcagagtaaatgctggccctgttcaagcatatgtgatggttcctggaaataagacaagatacttatctgaacttgttgccggagatgaaatattaatcgttaataccgaaggtgaaactagaactgcatatgttggaagaagtaaaattgaaagaaggcctttattattgcttgaagcaaaatatgaaggtaaaactatcagaacactcctgcaaaatgcagaaaccattagaatagttgatgaaaataacaatccattgtcagtggctgatgttaaaccgggagataaagttaaagtttatatagaaactaatgcacgtcattttggaattgctattgatgagacaatcattgaacaatga

SEQ ID NO: 7084 - DNA, 558 bp, Methanobrevibacter gottschalkii
  source 1..558: mol_type = genomic DNA
atgtcacagctacgggcatttttagctatagatttggatgacgggttaaaaccaaaaattaataaaattattaaacagtttaaacaaattgatgcaaaaataaggtatgtagaattaaataatatgcatttaaccttaaaattctttggagaaattgacactgatggtttggaattgttggaaaataaaatagcagatgttgtatctgaattcaaaccttttaatataaaaattaaaggatgtggcgcatttccaaattatagtcatataaaagtgatttggattggaattgatgaagattcaattatcaaagaattgcatgataaccttgatggggaatttgttaaattaggtttcggtaaagataaaaacttttcaacacatctgactattggacgtatgaaatcagctaaaaataaagttcaagtcagatcaactatcggggaatttagtgatattgaaattggtgagatgacagtaaacagtattactttaaaaaaatctactctaactccttccggaccaatttatgaagatttaaaagtatttgaattgtga

SEQ ID NO: 7085 - DNA, 1356 bp, Methanobrevibacter gottschalkii
  source 1..1356: mol_type = genomic DNA
atggattatagtttaatattaaatgatataaaaccaacaactgatgaaacaaaagaaattaatgaagtttcatcaagaataattaattttttacaagttttgtgtgatgaaaataacataaatgctaaagttaatctagttggttctgtcgctaaaaacacggctcttaaaggcaaatccgacattgatatttttatagcatttccattagatactgataaattgtatttaaaggaaactggtcttgatttagctcataaatgttgcagggaatttaaaagcgttccagaacatcattttgcatcacacccttatgtaactgcagatattgaaggttatgaggtggatattgtcccatgctatgcaattgaagacggaagccagctaaaatctgcagtggatagaacaatattgcacactcgttttgttaaatctaatttggttgaaggacaggaagatgaagttttactattaaagcgtttcatggcaatgactggaacatatggttctgaatttaaagttggtggatttgcaggttatttgtgtgaattattaattattcattatggaacttttgaaaatacattaaaatcagctattaactggcaatatggccatgtcattgatttggaaaattatggaacttccagattattcaatgatcctttaattgttattgatccaactgatatgaatcgcaatgttggagctgcacttagaattaataaattatctgaatttattcaatctgctcgtaattatatattctcggataataaaaaaaactatttttatccaataaaacgaaatttaaacaaaaatgaattaattaaggagtttaatactagaaatagtgatattattgctattaaattcaatgttccgaatattcctattgatactcttcatccccagcttaaaaaaacaacggaagctcttgaacgtaagttaaatgatgaggaattcaatgtttttaaggcagattattggagtgatgaattgttttcttgtgtaattttacttgaaatggcatcatcaaacttaaatgatattaaagttaatgtaggacctaaaatattctttaataaagcatgtgaaaattttgttaaaaaatacggtcgtgaaaattgttatattcaagaggatttcttagttcacacacaaaaaagggattttaataatgctttaaaattaatcgaacatatttttacttctgaacacattggtcttattaaagttggtaaaaaccttaaaaagagcattattaacacttatgaattcattgatcttgatgaaatttctagtgaggagttcttggatgattttatccatccaggacaacatataattagatga

SEQ ID NO: 7086 - DNA, 552 bp, Methanobrevibacter gottschalkii
  source 1..552: mol_type = genomic DNA
atgtctgagattaaaaagttaactgcagatgttgatgtcggggaatattttgaaaagtatgttgattttgaaaaattttcaaaactttgcattgaagaacaggaagagttagggtataattggaactatcctccctttgattttgatgtagaagaattatggaaatcatataacaaacttaaaattattgcttttaaaattgatttttcaaaagaagaattggaccatacctttgaagagaaagaactggaatttgttttaaaaagatttgagcgtataaaaggcagattaatgaatgatgtttatatgcttgaaaatgaagattcaatgggattatatatgggcaaatgcaatctctgcatgagatgtacaagggaatttggaatgccttgtaaaatgccagttaaaatgaggtatgcatttgaaggattaggtgcagatgtggataaaactattgaggacttatttggatataagatactttatgctcataatggtaaactgcctgaatatttaatatttgttggtggattgctgtatgataaaaaatag

SEQ ID NO: 7087 - DNA, 687 bp, Methanobrevibacter gottschalkii
  source 1..687: mol_type = genomic DNA
atgattgtaagtgttataggtggaactggaccacaaggccttggaatcgcagaaagactagctattgctggattagaagtaattgttggttcaagaaaagaagaaaaagcattagacatagttgcaaaagctaaagaagaatttgctgactatgacttgaacatgactggtatggcaaatgaagatgctgcaaaagcaggcgatgtattgattatcaccgtcccattagctgctcaaaaaccgactcttgagggaatcaaagaattctgtaatgataagattgttatggatgcaactgtacctttagaaacagctattggtggaaaaccatttagattcgttgatttgatggaagggtctgctgctgaaaggacagcttctatattaaaaggaactggtgcaaaagtaatatgtgcattttgtaatatttcaaactcacatcttgcaaacattccagaggaaattgactgtgactgtttaattgcaggtgatgataaggaatctaaagaaattgcagctgaaattattgataaaatacctggagtcaaaacaattgactgtggcattttagaaaaagcacgtattatcgaaaaaatcactccattgttaataggattaaacattaaatacaaatcccattacggtggtttaagaattacaggaattcctgctcttgataaggaataa

SEQ ID NO: 7088 - DNA, 624 bp, Methanobrevibacter gottschalkii
  source 1..624: mol_type = genomic DNA
atgaaagaaatcaaattcaatttagatgaaaatccgtttattaattttctatcagcaagatactcaatgagtgctaaaataaacgttgaaaaattatggaagtggtgtcatgaaaacaataaatcattttttatcatgagtcttggctgtttaatgaatgctgtaaattcagttccagaacttaaaagaagaataattaatggaaaagctattgaacatgattatcttgatggcgtaagtccaataatggatgaaggaaataaaatttatagagaaatgagagtcaaaacaccacaggagtttaatgacattttaaaatggcatgattatataaaagattactcaaaaaatattttaagtggaaaagaagaaggatttactattgaaatggaaaaaagagatttggaaaatattgcaaacttttcatgcattccttgggttgactttgatatgattacaaactgtgttttatccggaaaccaaattcagccattaattacttggggaaaagttaatgaaaagtatgaaatgagcatatccattacggtaagccatatttttgttaatggacgtgaattaggatatttttatgaaaatgctcaaaaagagtttgataaattttag

SEQ ID NO: 7089 - DNA, 1332 bp, Methanobrevibacter gottschalkii
  source 1..1332: mol_type = genomic DNA
atgaaagttattattgtaggtggtggagctgggggtatatctacagcttcaaatattcgtaaacttgatgaaaatattgaaattacagtcatcacaagagataataaagtagcatattccccatgtgctattccttatgtattgtccggtacaatcgaatcttttgatgatattgtaatgagaactcctgaagattataaaaataaaaatattgatgttattattgaagcagaagttacagctgtggattctaataaaaaaacagttacctatcaaaaaaatggtaaagaaactgtcatggattatgataaattagttcttgcaactggcggtaatccttttatccctccaatgcagggtgttgatttggatggtgtattcagaattcgcaatattgatgatggtatgaaagttcaggaagctttaaaagatgctaaatgtgcaattgtcactggtgcaggcttaattggtattgaaattgcatttgcacttaaaaaaagaggtttaaatgttattttaagcgaaatgttacctcaaatagttccaaggtctcttgataaagatatgtctgatattctggtgaaatatcttgaaatggaaggaatccaagttgttttaggaaaacctattactaaattaattggtgatggaaaagttgaaaaggcatgctttggagatgaagatatctatgatgcagacatggttatcatggccactggtgttagagctgaattggatttagctgaaatggccggctgtgaaattggaagatgggcaattcttgtcaatgacagaatggaaacttcagtagaagatgtttatgctgttggagattgtgtggaatctaaagatttaattttaggttcaaatactatttctcaattaggcactactgcagttcgtgaatctaaaacattagctcgtactatttgtggtaaaaaatctaaatttaatccggttttaaactcaatggtttcaaaagttggggatctggaatttggtgcagttggatatactactagttttgcacaacaaaatagaatcatgcctgttgtacaaaaggtacaagcacttacaagagctcgttattatcctaatgctaaaccaatggatattaaagttatctgtgatgggaacggaactattattggttgtcaaatcatagcggaagaaagagtagctgaaagaattgacactatgactttagctattactgaaggtttaacatgttttgatttaagtaatatggaatttgcttatgcaccacctgtttcaatggttacagacccattaatacttgctgttgaagaagtaagtaaaaaattcagttaa

SEQ ID NO: 7090 - DNA, 981 bp, Methanobrevibacter gottschalkii
  source 1..981: mol_type = genomic DNA
atggcggcacatggacatggtcatcatggtcacggaggccaaatgacacctgaacagcaaaaacaaatgatagaacaagatttaagactggctaaaaatttaggccaaatcaaacataaaattgttgttatgagtgggaagggtggagtaggaaaatccactgttgcagcaaatattgctgaaactttacaaaaattaggttttaaaacaggtattttagatgcagatattcacggtccgaatattcctaaaatgttgggtgtggatttatatggtgaacaattcaatgaataccaattcaaggtatttaaagaaattactgaatctggaatggcagataaggacttcaaaaatgatgaagaaaaattagcattcattgaagctaaaaaagaagaatataaacattccatgtttccagtagtagctccaagtggtcttaaagtaatgtctatggcattcttgttggatggtattgacagacctattatttggagaggacctcaaaaaacaggtgctattaaacaattaatttcagatgctcattggggttcacttgattatttaatcattgataacccgccaggaactggagatgaaccattgaccgttttacagactattcctgatgcagatgcagttattatggtaactactcctaatgttgtatctcaagaggatgttttaaaatgtgtaaaaatggttgaaatgatgaatatcaaacaaattggtcttattgaaaacatggcttactatatttgcccacattgtgatgaaaaactttacatatttggtgaaggtaatggtgaagcatttgcagaagaaatggaaatcacttacttaggcgatttgccgattgaagaaaaagtttctgatgcaccaaataatgaaggggcaatttctgtaattgatcctaatgatgaagtttcaaaaagatttgttgaaattgttaaagatattcaaaaagagtttataaaagagtag

SEQ ID NO: 7091 - DNA, 396 bp, Methanobrevibacter gottschalkii
  source 1..396: mol_type = genomic DNA
atgaaattaaaagaaattaaacatcctgaattgaaaaatcatattaatatgatttatatgcatggtgaaaaccaaaataaaactgcaattaataaaacagaagaagaaattaaaggttatatcagaaataaagaatttataatatctattgaaaatggaaaacctgtgaggattccttatgcaaatgacggagagtatttagttccaatttatacagatgaaaaagagtacattatcgcaatggattatttttcactaaatgatatggctgaaaataaggaatatataattgaaaaattagattactttaaaaaattaaaaaaggatcctaatttcttaggatatattgtaaatattgcaagagtaagttatattattaaccctactcttttataa

SEQ ID NO: 7092 - DNA, 870 bp, Methanobrevibacter gottschalkii
  source 1..870: mol_type = genomic DNA
atgtttgcaaatcaaaaagttatttacttggctgggggatgcttttggggtgtcgaggcattcatttccagattaaaaggagttaatcaaactgaggttggatatgccaatggtagagatttagcaccaacatatgaaaaagtttgtagcggaaaaactgggcatgcagaaactgttaaagtaacatacaatcctaaaataattacattagaagaaattttagaaaattattacaaaataattgatccatttagtgaaaatcgccagggaaatgatattggaacccagtacagaacaggaatttactggcaggaaaatccgcaaaagaatattattttaaaatttataaaagataaacaaaaattagaatcaaatagaatatctattgaattatctccaattaactgtttttatgctgctgaggagtatcatcaaaaatatcttgagaaaaatcctcaaggatactgtcatgttgatttaaatctaataaacaatgaagaatttaaccacttaactaaagaggagtatgaaataacacagctatccatgacagaagcgccatttagtggcaaatatacaaacttttttgaagatggtgtatatgtagatgttgttagcggtgaagttttattttcttcacaggacaaattcgactcaggatgcggttggccatcattttcaaaaccgattaataaagaagcagttataaaaaatagagattattcccatggaaccacacgtatagaaattagaagcgctaaatctaactcccatttagggcacctattctatgatggtcccggaggaagtcccagatactgcataaattcatctgctttaagattcataccaaaagatgaaattgaataa

SEQ ID NO: 7093 - DNA, 195 bp, Methanobrevibacter gottschalkii
  source 1..195: mol_type = genomic DNA
atgttttatagtacaataatgaaaattgattcaattgatagattgagggatatcagagatgcattgctcgttgaacagggtattaatcctacccgtcaaggagagcaggctataaaagtcgttgttgaaagaattgacgaaattcaagctacattagataagtctgcaactaaaaatttaaacagaaatagataa

SEQ ID NO: 7094 - DNA, 276 bp, Methanobrevibacter gottschalkii
  source 1..276: mol_type = genomic DNA
gtgataagacgtgtaacaagtggcagacgtttacttagaaaaagaatgtataaatcaccacatgcccgtcataaaaatgccacatatcatcgggaaaataaaagccttgttaaaattcatcaaaataagtttaaagatatgaacggtcctaatataaaacctaaaagaaggcctaaacgtgaagttcttgatggatttaaaatgtcttatagatataaatattacaatagggatattgtagaagaaactgaagaatcagatgagaaatctgattag

SEQ ID NO: 7095 - DNA, 309 bp, Methanobrevibacter gottschalkii
  source 1..309: mol_type = genomic DNA
atgtgtagagataaaaaactattagaaaaaatagcatatgttcaaggatcagaacacaggaaaaatataatattatatatggaatataatttatatactccaaaagaattgggagatgctattggcgttcgcacaaatcatattagtaatctattatcacaattaaaaaaacagaatattgtttattgcgcaacaccgaatattcacaaaggaaaattatattccctaacagatgaagggaaacacatttttgaatatcttaaatcaaaagaagaagataaaataaatcgtataaacaacagcatttaa

SEQ ID NO: 7096 - DNA, 264 bp, Methanobrevibacter gottschalkii
  source 1..264: mol_type = genomic DNA
ttggataattcagttaagtatattttaaaatcgtcttatcgtgttcgtgttcttcaggcaatcggtcatgatgtaaaaacaccctcccaaattgcaaaagatagttccgtgttaaataatcatattagcagaacattaagacaattatacgaacatgatttaatagagttgattaatcctgaaatgcattgtggcagattgtatagacttactgaaaagggtctggttgttttgagtattattaataatgaatctgtccaataa

SEQ ID NO: 7097 - DNA, 4830 bp, Methanobrevibacter gottschalkii
  source 1..4830: mol_type = genomic DNA
atgaaattatttaacaataattttatatctgtattattaatattattcgttttagttcttgctgttaattcagttagtgctactgataataatattacggatataaataatgttaattctaatttatccaatgtattgaaaagttcttctagtttaaatgatggagatgctatttcatatgatttaatggataataaagatgttatttctcaaaaattttcttcaaatagtaatacaaatgataagtcaaatatgtctgatgtggttgattctattgaatctgttgcagaacctactagtttggatagtcctatactcaggtctgttgttcctagcggcattacatttgatggagttttccatgttggtactggacaacaatattcaaatatacaagacgcattagatcaatgtaggagaggcggatataattatcaaattattatacatgaaggtacatatactggatatggtaataaaaatttagttattgagcctactacttggtggaaccctaattttggttacttggatattagaactgcaaatgatggtgatgtggtaatattaaatgcagaaagatctccaagcattttaactattaattctagaaatgttcatattactggattgacatttatgaatgcttataattatggtagtggtggaacatctggtgctggtgttgctataaatattaggaaaggaactgtatctatagataattgttcttttattaataatgaagctagaaatctttggggaggtgcagtccatattgattcaagtataacaaatcgtatttctaatatagatattacaaactctttatttgttaataatagtgctgaggtaggtggagcattccgttctgaaagatattctagtaatattaatataattaatactacatttattaataatactgctactgaacatggtggtgtagcatgtttatttagtacagatgtgacatttgcaaattgtacttttataaataactctgctccttcatctggaggtattcattttcatgttggcggatcacatatcgataattgtacttttataaataatagtgcttatggtactggttcttctgaagaaggttatggtggagctattgcgttagtttatagtactagtgatggtgttattatttctaattctagtttttccaataactttgccggtaaatatggtggtgccattgatgtaaatggcagtggtagtaatgctaaaatattgaactgtaattttgaaaacaatactgccggttatggtggcgctatccgtgttcaaggttctaacactgttattgataataacagtttaattaataataaggctattaatactgatggtggtggaattcatgttgaaggtagtaatactcaaatttcaaatactatttttagaaataattctgctgctgctaatggaggtgctttagctattgttgctggtgataatacatttgtttccaattcagtcattgctaataacactgctgtgaatggtgcgggtgcttatattcaaggaagaagagtaactatatccgattctattgtcgctaacaatactgcagaccaaaatggtgcaggagtttatattgatggaagttatgctactataaaagactctactatttataataataatgctactgttaatggtggtggagcttatataaatggtagggatgctactatctccaatgttaactttgtgttaaacaatgctattcctgatgaagaagctttggatgatggtcttggtggagctatttttattgctggtagtaatagttatattgaggatagtaattttacttataatactgctcgtaatggttctgctatttatatagatccgacaagttctatagcaaataattatatttataactgtaatttcactgaaaatcaagcttggagttattggttacctattttctataatgatgtaactaaaactattgaatctaatttaactggtggaaataatatattaaatgctatttacaataatggaagtaacttacatattttcattgatggcgtaaatcctgttttgggatgggaaaactctcaaaatggtacaataatgtatcaagataaccgtgagtttaatcaaactattgtaactcttgtttgggataggcatggtaatttagtatttaatgaaactgcagttactgatttagcaggtaatgtttgttatgatattcctcaagatacacatttatggtttatagttagtatgactcatttagaggatacttattataaagaaattactaatattacgggtattaatattaatcctggtttgactattactgatgtaactatgtatgagggtaattcaactcctcaaacaatatatattgttttagctgatgatgatgctaatcctataccaaatgaaggtccaatcatgatttatgtcatggttaatggtaataagattcttcttggtagtggtaatactagtaagaatgcagtattgattcttaatgaaagtgctgtatttaaaacattaaatcccggcaattatactattattgcagaatgtacatatgcatattataatgaaactactcaatccatatctaataaaactgtatcaactgaaggtattttagaagttcttccatatatctggagtcttaataaaactatttctcatgttaatggtattccatatattgagggtatggttatccagataaatgataatgttacttttaatataactgtatttaatgaagttaatactacgttatatggattaaaattaattgatttaaatactgaaggattaagttatgtttctactttaccttccaattggaattatgaaggtaataatgtatggacattagataatctagttaattatggaaattcatcattatttgttacttttaaagtacttaaaactggtaatttaactaatattgttaattgtagttttcttgatggttttaaaaataaaagtgctaacattacttttgcagttaatttaactgctgatttgggtgttagtaaggttgttaatgtttctaatcctaattacggtgattttattaagtatactgtagttgtttctaatgctggtcctgatgatgctactggtgttgttgttaatgagactttgcctgtgggtttggtttatgttagtgatgatgctagtgttggtagttatgatcatgttgctggtttgtggactgttggtagtttggctaaaggtgatagtgctactttgattgttgttgtgcgtgttggtggtactggtaatattcagaattttgtgaatgttagtggtgctgagtatgataataatactggtaataataaggccaatgttactgttgctgttaatgctagtgctgatttgggtgttagtaaggttgttaatgtttctaatcctaattacggtgattttattaagtatactgtagttgtttctaatgctggtcctgatgatgctactggtgttgttgttaatgagactttgcctgtgggtttggtttatgttagtgatgatgctagtgttggtagttatgatcatgttgctggtttgtggactgttggtagtttggctaaaggtgatagtgctactttgattgttgttgtgcgtgttggtggtactggtaatattcagaattttgtgaatgttagtggtgctgagtatgataataatactggtaataataaggccaatgttactgttgctgttaatcagcttaaaacttatattatcgtttttaataatactgtttatcctggtgatgatgttactgttattgttactgttactactcaaaacggttcattatttaatggtaatgttaatgttgctttaaatgatactgcaaacactactaaagtggttactattgttgatggtactggtagttttaaggttacagttgataaaaatcttgttaatggctatgtaattggtattaatgctagttatgatggtaatgatacttatattggatctaaaggttttggttggattaaggttttaccagtcaaattccatgttgaaaaaactattgtaaaaggtaatgaatttttcattggtgatgagataatatttaatattactgtttataatgattgtaatggtactttatacaatttagttgttagtgatgttcttcctaatggtgttgtgcttattaatagtggttttgggctttggacttatgatggtggctcttcttggagttatggtgatttaagtgcaggcgctagtgctactttgattattaagtctagtgcagttaaagctggtagtttcactaatgatgctaaagctacagtaaatgatgttcttgataatagtagtttggttgatttcagtatttcaaaattaaatactagtatcagtgtatctaatgttacagggcatcctggtgatgtagttgttataactattaaagttagtactggagataatgttccgtttaatggtgatgttgatgttattttactcgatggtaaaaaaattattgttcatgtaactaatggtattgctaagtttaaatggactattcctaaaaatgctaagaataatactatatttagtattttcgtatcatttgctggtagttcaaaatactttggatctaataatactggatttatcaaagtaattgataataaacaaaacaaaactaatcatacagataacaatgattttactgataaatgtaataaagggattattaaaaatactggtaatccattattagttttattaatttcaattgttattttggttatatcattaaaacgtagaaaagactattaa

SEQ ID NO: 7098 - DNA, 270 bp, Methanobrevibacter gottschalkii
  source 1..270: mol_type = genomic DNA
atgaactttatttgccctacaataggtgaaggtcatgaaaaagattttcttgttactggaagtcttgatgattttaaaataattgtattttcaaacatggaagaatacaaaaagggttttgaatacttaaaattagctgattatataccttatgaagtttcaattgaattatttaaaaagcttgcaaataacgatgatgaattttccggcattattttagacatacattctaaaaataaaattattttaaaagaagaattattaaaataa

SEQ ID NO: 7099 - DNA, 444 bp, Methanobrevibacter gottschalkii
  source 1..444: mol_type = genomic DNA
atgaatattaaagattacgaagattaccaaaaaaataatgtgaaagcttcaaaaagccaattaaaggaatatattcaaatatatgcagatatggccaaaaaactcaagagcgaaaatgctcttgagcttgaagttatcaaaaaaaatattaaaaacacatttcctaacgagatttattttacattagtggatgagagtggaaaacctgttaaattaactttaactgaaaaaagcaaaaaatatattattccaatttttacagatattagagaatatgctattggaagtgcaaaaatatccaaattattcttagataaattagagatgaatgtcctcagtccagaagacatatctaaactagctgatgaagatgaatattttcaaggatttgtaattaatccacattcacagaactttaatatggatagaaatgcgagtttttag

SEQ ID NO: 7100 - DNA, 549 bp, Methanobrevibacter gottschalkii
  source 1..549: mol_type = genomic DNA
atgttcatttgttttaaaaaaaaaacttattttaatgattattacacatacggtgatataatgagcgaacttaaagaattagttaaaaaatttattgaaattgatgatgatttaaacgaaaagattgaagcggcattaagcgaatcagaagaacttgatgacacatttgaagaagagcacaaagaacaaatcgaacaattaggtaacatttatcatgatattgaacacattgttttcagcgaagaattcattattgtatctaatgctaaaagtgaacaaaaagaaattgttgcattaattataagtgaagaagatgaagaagtagaggaatttgttattcctgtttttactgatgaagaagaagcaaataaagctattgaacttttcaaagaacaatttgaagaaaatgaatttgtttgtgataaaaaaactggtaatgaaattgtttctgaatatgctgaagatgaagaattcattggacttgccattaatgcaccacaatgggattttgtaatcggtggtgaagatgttcacgaatgttgtgaataa

SEQ ID NO: 7101 - DNA, 1743 bp, Methanobrevibacter gottschalkii
  source 1..1743: mol_type = genomic DNA
atgaatattaataataatatgaagttgggtctaattgcagctatatctattatagctctttttgttttatctttatggatttcccaaacacctgctaatgatgataattctattcgttttggtattttaacattattgccgcctttagtagctattggtttggcgtttattactaaagaaacaatcttgtcattatttatgggtgtatttgtgggggaatttatgttgtgtgtaaatgatttaaatattgtttccacagcaattaatgcatttttacaaatgggttctcaaatcatctcatgtatggctgatccttggaatgcaggtattattcttcaatgtttacttattggaggtataattcaacttgtaacaaaaatgggtggagcaaaagctcttgcagatacatttgctaggagagcggatactccaagaaaagctcaattattcacttggtttttgggattatgtgtattctttgatgattacgcaaactctttgattgttggtcctattatgagaccagttatggacaaacttaaagtatctagggaaaaattagcattcattgtagatgcaactgcagctcctgttgcaggtattgctattatttctacttggattggtttggaaatcagtttaatcgctgctggatttgaatctgttggtgtaactaatgtcacaggtttcggtatatttttacaaactatcccatacaggttctacaacattttcattttacttttcatagttatttcatcaataactttatatgaatttgggccaatgaaaaaagcggaacaaactgcacgtaaaagaaaagaaaatgaagaaatcattgttccaaatgctcctggttttgatgaggttaaaccagttgaaggaattaaattatctatatggaatgcaattatacctattggtactttaattataggtgctcttattgcattctattggagtggatacaccactattttaggtggagaggatcaagctctcattgctataatgaaatcatctccattatcatttaatggtgtttttactgctttatcacaatctgatgcttccgttgctcttttccaagctgcacttcttgcttctattgtggctatagtgatggctgttggtgagagaatactcactattgaagatgcaatctctgaatggattggaggtatgaaaactattgttattactggtgtaatattgcttcttgcttggtctttaggtggagtaattggtgatgttggaactgctaattatttggtgggtgttcttaagaatacattgcctcaatttattgttcctgcattaatctttattttaggtgctttaatttcatttgcgacaggtactgcatatggtactatgagtattttaatgcctttggcaattccattggcttgggcagtaggtagtggtgacatgtcatttactattgtctgtactagtggtgtattgactggagctatctttggtgatcactgttctcctatttcagatacaacaattttatcatctatgggaactagttgtaatcatattgatcatgttcagacacaaatttattatgcaatattcgttgcatctgttgctatcttcatcggttacatcccagcaggtttaggaatcccttggttcatttcaattcctattggtgttgttgtaatgtatgttggacttaaaattttaggtcaaaaagtagattttgatgaagttgaggaatcatcctcatag

SEQ ID NO: 7102 - DNA, 711 bp, Methanobrevibacter gottschalkii
  source 1..711: mol_type = genomic DNA
atgaaattatcaaaatcaaaagttaatacatatttaaaatgtccgcttgagtttaaatttcaatatattgatgaagttgaagttccgcaaaacaaatatatggctcttggaagtgatgttcatttaatcgctgaaaaatttgctaaaaagtttggtgataacctagataatattgatattgataatgaacttttaaaaatagttcatgaagaggatatcggatatgatttaacaccgcatgttgataatctaagttctttttttgaagaagtgtttgttgaaaatgattttaaactctattcacaggaagaatatttacttgatgaagaaaatcgtttttctggaatctgtgatattattttagaagatgaaaatggtgaattagttgttattgattataagacttccaattcaagttctttttcaaaatatcgtcgtgaactttgttattataagttgcttgttgaaaatgtttgcagaaaaccggtttcacgtgtgggagttttctttactaaaaatggtcgtttaaggttacttgatatttgtgatgaagaaaataaacgtaaatatttaaattataaagaaatcgatgaagcaatcaaaacacttcatgaagtcagaaataacatcaataatgaaaagttcccagctaaaaaacaatttttatgcaaatattgcacttataaacatctttgtgatgcatatttttag

SEQ ID NO: 7103 - DNA, 507 bp, Methanobrevibacter gottschalkii
  source 1..507: mol_type = genomic DNA
atgaaaagattatacgccttacttattatattgattgttatttatattgggattaattcattcagtttgattttcaatgataatggaactaatgatgccaatgatgttaatgaaagtatgataactgtaggagcaagtagtttgcccgaaattgaaaactttacagacaatactttaaatgatacaactattagtttagttgattcaaataaaaatatgacaattctagtttcagaaattgataattcccaatcaattagtgatatcttcaataattttgtaagcagtaatgatattagttcaactcagactattgatcaaaatggtgtaacaacttatttggcatacagcagtggaagtgattcatataatgctgatattttctttaataaaaatggtcaaaattattgtattagtggagataatattttatcttcagatagtgattactttataaatcactgtaaaggtattatagatgcaattagtataaattcaactagttaa

SEQ ID NO: 7104 - DNA, 543 bp, Methanobrevibacter gottschalkii
  source 1..543: mol_type = genomic DNA
atgaaaattgtagcacttcaagcaagtcctcgtaaagatggaaattgtgatgtattaatggatgaaatgattagaggtattgaagagaatggtggaaaagtaactaaatattatttggaaaatcaggaaattgcaccatgtaaagcctgtttatactgtgctgaaaatccggaatgtgtacgtgcagacgatggaaacaaaatattggatgaaatgattgaagctgatggagtaatatttgcaactccagtttactatggtcaaatgtctgctcaaggtaaattaattattgatcgtttttacagtattggccaaaaccctaataaaagtttatctggtaaagcagcattgattttcactgaaaaccaaccagaacatacttatgatagttacattgagcttacaaaagcatctccatttgaatttatgggttatgatgtaattggacatgtggatgcaggtaatgcaggtccagcaggtattgttgccgaagaacaaaaagataaattaaaagaagcatacgagcttggtttaaaattttaa

SEQ ID NO: 7105 - DNA, 240 bp, Methanobrevibacter gottschalkii
  source 1..240: mol_type = genomic DNA
atgggattaagttcattttttaaaagagtaaaaaaagatgccaaaaacgaagaaattgttgaatgtcacattgacatcaatacggatgattgtgatggatgtgaaaaatgtggtattgcatgtccaaataatgtttttatgatggttgataatgtttctaaagtacgtgattctcaagtctgtaaaaattgcaaaatatgcatggcaatttgtcctaatgattgtataactgttaactaa

SEQ ID NO: 7106 - DNA, 297 bp, Methanobrevibacter gottschalkii
  source 1..297: mol_type = genomic DNA
atggattttttacttgttttagcaaaaattcaacctaaggaaggttgtcaagacagtatcttagaacttgcagaagaattaatttatgaatctttacttgaagaaggtaatattgattaccaattattgaaatccagtgaagatgattcattgacttttgttgaaaaatgggaaagtccggaatatcttaaaaaacacatggcttcaccgcactttttaaattttaatgcagactgtgaagaatttattgaaagcaatgatattcaacttattgaagctaataaaatagaaatataa

SEQ ID NO: 7107 - DNA, 693 bp, Methanobrevibacter gottschalkii
  source 1..693: mol_type = genomic DNA
atgatatattcaacagaaattgaaaatatgtgtcttgttcgcaaaggtgcaaatcatgaccctgctccaatccctgaagagggtaaatgggttaaagcaaaagaaataagtgatatttctggttttacacatggtattggttggtgtgcaccgcaacaaggttgttgtaaattaacattaaatgttaaagatggaattattgaagaagcattaattgaaactttaggatgttcaggaatgactcactcagcagctatggctggtgaaattttagttggaaaaactattcttgaagcattaaacactgatcttgtttgtgatgctattaacactgcaatgcgtgaattattcttacaaattgtttatgggagaactcaatctgcattttcagaaggaggtcttcaaattggcgctggacttgaagatttaggaaaaggtcacagaagccaagtcggaacaatttactcaacaaaagaaaaaggcccaagatatttggaattaactgaaggttatattactgaaatcgggcttgatggagataatgaaataataggttataaatatatcaatcttggagtcatgctggattttattaaagagggtattgacccattggaagctataaaaaaagctactggtcaatacggaagatttgatgatgcagttaaaaaaatagatcctaggagtgaataa

SEQ ID NO: 7108 - DNA, 1002 bp, Methanobrevibacter gottschalkii
  source 1..1002: mol_type = genomic DNA
atgagtctgtttgaaagttatgaaagaagaattaatcaaatcactccggttttagagaaatatgggattaaagaccttgaagaagcaaaacagatatgtcttgacaaaggttttaatccatatgatattgtaaaaaatgttcaaccgatttgttttgagaatgcatgttgggcatatactcttggagctgcaattgccattaaacaaggctgtgtgaaagcttctgatgctgcaaaggcaattggtgaaggtttacaggcattttgtattcctggaagtgttgcagatgaccgacaagtaggattgggtcatggtaatttagcatcaatgcttttgagtgatgaaagtgaatgtttcgcatttcttgcaggtcatgaaagttttgcagctgctgaaggagctattggtattgcaaactctgcaaatgaagtacgcaaaaaacctttaagagttattttgaacggtcttggaaaagatgctgcattaattatttctagaattaatggttttactcatgttgaaacagaatttgattatttcactggtgaagtaaaaatagttaaagaaaaagcatattccgatggtgaaagggcaaaagtaagatgttatggtgctgatgatgtgcgtgagggtgtagctattatgcatttggaaggagttgatgtatcgattacaggtaactcaaccaatccgacacgttttcaacatcccgtagccggaacatataaaaaagaatgcattttacagggtaaaaaatacttttctgttgcatctggtggaggaacaggtaggactttacacccagacaatatggcagcgggtcctgcttcatatggtatgactgatacacttggaaggatgcattctgatgctcagtttgcaggttcttcatcagttcccgctcatgtggaaatgatgggattaataggtatgggtaacaacccaatggttggtgcatctgttgcagttgcagtagctgttgaaaaagcaatgaaacaataa

SEQ ID NO: 7109 - DNA, 420 bp, Methanobrevibacter gottschalkii
  source 1..420: mol_type = genomic DNA
atgtccactttatggggtttaactgcaagaggaatttgccagttcaatgataaaattttacttttgaaaattagatctaattcggctcatgatgctgagaaatgggaaattcccggtggtaaagttaaaaaatgcgaattttttgatgatgcattaaaaagagaatatcttgaagaaactggtttggaaattgatgttcaggaactttataatgtagttcgaaatgattatactgcctgcaagacaaaagaagatgtcaaatcaattcaattaataatgaaagtatcatgtgataatgatgaagttaaaataagcggagaacatgatgattttggatggtttagctggaatgaaatagatgaaatgattgctggtgaattattaacacctgcagcaatcatggcctttagtaaggattaa

SEQ ID NO: 7110 - DNA, 798 bp, Methanobrevibacter gottschalkii
  source 1..798: mol_type = genomic DNA
atgcaaaaaattataaacgcacattgccatatttatccagaaaaaatagcatcaaaggcagttgttggaattaaagatttttatgatttagatatgtctttaaatggaaaagtaagtggtttaatagaagatggtaacaaagttggtgttactcattatttaatccattcagttgcaacaactccaaaacaagtaaaatccattaatgaatttattgctgaatctgtaaatactcatccagatatatttacaggatttggaactctacacccggatagtgaagatattcaaggtgattttgattatttaattgaacttggccttaaaggagttaaaatacatcctgattttcagcaatttgcgatgaatgaagaacgcgcatttaagattggagacgttgtgaataaaggtaatgtacctctgatggttcattgtggagatttcagatataattattccaatcctgatcaaataaaaccatttttggataaattccctaatataacatttattggtgctcattttgcaggttggagtgtatgggaagaagctactgaaaaattagctggaactccaaatttatatgttgatttaagttccagtttatatgatttaactcctgaaactgcagtaaatctaattcatgcatatggtgcggataaagtgttatggggaactgattatcctatgtgggaatctgtcagtgaaatggagtattttaataaacttgatttaactgaaaaagaaaaatctcaaattttatatgagaatgccgcaaaaatactaggtttgatttaa

SEQ ID NO: 7111 - DNA, 651 bp, Methanobrevibacter gottschalkii
  source 1..651: mol_type = genomic DNA
atgacaaataatgaattaaaactagagactaaatgttacgatgctaatgaatatggttatctatatggattaaacaaaaaaattccagatgaagaatttgaaaaagtaaaacccttttttaaagattttagaagaatggactttgtagaaggcaatgttcaagtaactggaagacctgaaggttatagatgtcttgaaaaagatgtaagtaaagtagaagaaatattgggaattaccaatactctggaaaaaagacaaaataaagtaaaagaagcatttgcagaccccgttaaaaaagcaaatcttattgatcaatcttatgaatggttaaaaatattatttgacaaaggtggaacaagacccgaacaagatttgagccggttagccgttcattcaacaaaaatttatgatccgaaagatagctttaaaagaggttgtgaaaaaggtgaaggagaattattcatttatacacctcatggaatgtggtatattataaacaattgtggtgaattttcagataaatctttaaataatgtacaaactccgcaaggtggtgcagtaggttatagattaatgtattatgatttaattgacagattaattagaatttacagtgaagagaatatatactcaggtaaacaattatattaa

SEQ ID NO: 7112 - DNA, 948 bp, Methanobrevibacter gottschalkii
  source 1..948: mol_type = genomic DNA
atggtaaaggtaagtatttttggatcaactggaacaataggtaaaaatgttgcatttacattagcaagaatggatacagttgatgaaattgttatggtttcaagacctaaaagtcttgataaagttaaaggggagacttatgatatgtatgatgcacttgctgcaagggatattgattgtaagctaatccccacatgcgattttaatgaaattagaggttctgaaattgtactcattgctgctggaattcatcgtcagcccggaatgaataggcttgaattagctattccaaatgcaaaaattgtaagatattattcaaaacaaattgctaaatatgcaccagattcaataatcctggttgctaccaaccctgttgatgttatgacaacaattgcacttgaagcatcaggatttaataaaatgaaagtaattggtgttggaaaccacttagattctcttagattgaaaaattatttctcaagaaaaattaatattaatagttctgaagttcacacaagggttgtaggcgaacatggaaatcatatggttccacttttaagttcaacatccattggaggtattcctttgaaatatttcgaatttgctaaattggatgttgatgctttagttgaacaacttaaaaatgctggaaatacaattatttctaaaaaaggagctactgaatatggtcctgcttttgcaatttcaaacttaatttcaaccatgataactgattctcataaagttctaacggttagtttttacttggaaggtgaagttgaaggtgttcgaaacgtttctttaggtgttccggctattacatctaaaaatggaatagaaatgattgttccaattcatatgaatgatgttgaaaaagaaagtttcatagaagctgctaatgtagttcgtgatacaacttacaaagttaaagagaatcttaatatttaa

SEQ ID NO: 7113 - DNA, 444 bp, Methanobrevibacter gottschalkii
  source 1..444: mol_type = genomic DNA
atgaagttagttgttcaaagagttactcatgccagtgttgaagttaataatgaagttgttggtgaaattggcaatgggttaatggtgttagttggttttggtgtgaatgatactaaaaatgaggctgattatctttctcgtaaacttgtaaaattaagaatttttcaagatgaaaatggtcgtatgaataaatctgtgaaagatattggaggtaaattactattaattcctcaatttactttatatgcttcaaataaaaagaatagaccttcttttcacaaagcattaactccagacattgcaactaaattatttgattattttgcatcaaaatgttctgaagaagttgatgtcgaaactggggaatttggagcatatatgaaagtagatttattgaataatggtcctgtaacaattctacttgaaaaagaagctgatgaataa

SEQ ID NO: 7114 - DNA, 1143 bp, Methanobrevibacter gottschalkii
  source 1..1143: mol_type = genomic DNA
atgacagaattttcattaaatgttgatgaaataaaagaaaatgttgaaacaactttaaaagaagaagaaaagaaattagaagattcaaatattaaaaatcaagctcaagacaatgcagttgcaatttttgacgctgatttaaataatccgcaagcaagggaaaagatattgaaaccattagataattttggtttaaatgagatgtctagatctgcagctcataatgaaatgttagctactagatttgttgatttaacaaaaggaggtaaagaatcggataatattggagaaaatctgatggaattaaatagggaaataaaagatttggatccaagtaaaataaattttgcaaaaaaaggtttactcggaaatttaatgaatcctgttagaaaatactttgctaaatatgaaaaagctgaaaatgctatttctgatattgttcagtcacttgacaaaagtagtaaagtccttcagaatgataatacaactcttttaaatgaagaaaattatttaagggaagttactaataaacttcttgcagatattgaacttgcaaaacaaatggatgcctctattgaagcacaaattcaaactgcagaaattgaagggattgatgaagaaaaaattaaatttgttcgtgaagagattttattccctcttagacaaagaatcatggatatgcaacaaatgattgttgtaaatcaacaaggaattgtatctcttaatgtaattagaagaaataataaggaattgattcgtggtgttaaacgtgcgcaaaatgtaactgtttcagctttaagaacaggtgtaatggttgctagtgctctttacgatcaaaaaattgtcatggataaaattaatatcattaattctacaactgaacacattatagaatctacttcacatatgcttaaagaacaaggaagtgaaatacaaaagcacagtgctgagactatgatttcacctgaagttctaaaagtttcattttccgaagcaattcaagctattgaagatgtaagcacatataaagaacaggcccttcctaaaatgaaagaaacaattgtgatgttcagtgacctagctactgaaggtcaaaaagttgttgaaaagattgaaacaactaatgaaaatttattaaaatag

SEQ ID NO: 7115 - DNA, 459 bp, Methanobrevibacter gottschalkii
  source 1..459: mol_type = genomic DNA
atgagacgaataaaacagcaacttacacaggaagaatgtattgaaatattaactaatgaacctcgtggagtattagcattattaggtgataatgaatatccttacacagttccaattagtcatgtatatgctgatggtaaaatttattttcatggggctcaagaaggacataaaaatgatgctgctaaaaaatatcctaaagtttcttattgtgtgattgataaaggagttaaaaagaaagaaaactggtggtacacatttaaaagtgttatagtttttggaaaaattaaaattttaacaaacaataatgaaaaaagggatagactaacatatcttggagataagtttttcccaacacatgaagaaacaattgatgaaattaataaattattggacaggacagaggtttatgaaatcaccattgagcatatgagtggtaaattagtaagggagaaataa

SEQ ID NO: 7116 - DNA, 660 bp, Methanobrevibacter gottschalkii
  source 1..660: mol_type = genomic DNA
atgattaacaatgattgggatttagctttaaatgatgaatttgaaaaagattactttttgaaaattaaagattttgtcagtgaagaatataactcaaaaacaatttatcctccttatgaggatatatttaattcatttaaattaactccattgagtaatacaaaagttgttattttaggccaggatccttatcatgaggaaggtcaagctcatggacttgcattttcaactccggagggcagaccaattcccagatccttaaaaaatatttttaaagaaattaataatgagtattcttatccaattccagagtcaggctgtttggaaaaatgggcaaagcagggtgtatttttattaaatactgttttaacagttgaaaagggcaatgcaaattctcacagtaattgcggttggcaaacttttacagataatgtaattagaatattgaataaccaaacaagacctattgtatttttgctttggggaaaacaggctgaaaagaaaaaagaattaataacaaatccaaaccatttagttctaattacatctcacccttctccattttcagcaagaagaggttttttaggatctaatcattttaaattagctaataaatttttaaaggaaaataatattgatgaaattaattggaaattgtaa

SEQ ID NO: 7117 - DNA, 567 bp, Methanobrevibacter gottschalkii
  source 1..567: mol_type = genomic DNA
atggaaattactgcagatgaaatgaaaaaaacaatacgaaaaatatatgaccgtctagataaagtatctcccgttgattttgactgtggaaaattgtgtggagaaatatgctgtgtctatgatgcagacgactaccataatgaagatttggccctatatcttctacccggtgaagaattaatgtatgaagatagtgatagttacaagttatattatatcgattcatctgaaattaaatatcctcattcttggaaaggtcaaatttatcttgttaaatgtattaaccctccaaaatgtgatcgcagtatccgaccaatacaatgcagaacatttccattaataccgcacttaaataaaaaaggggaatttcatttaatatttgatgaaagtgaatttccatacaaatgcccaattgtccagaaccatataaaattaaatgatgattttatacaagtgacttatgaaatctggtcaatattaatagctaatccattagtttatgatttagtagatatggattctagaatgagagacaatagaaaaacagattatgaaattataatttaa

SEQ ID NO: 7118 - DNA, 1386 bp, Methanobrevibacter gottschalkii
  source 1..1386: mol_type = genomic DNA
atgaaaattgaatttgaaacatatgtaatatttgtatcatttataacttcattttttgcagtgtttttatcaaatggtataataataggcgttccagcaatagcacaggattttgctatgaataacgttattcaaaattgggtgcctactatatttttccttgttgttgctgtatttacagttccggcagggcaaatttcaggaaaatttggtgttaaaaaatcactacttgcaggaattactgtattcctattaggttcaattggagcttgtcttgcattttcaactgaatcattcttaatatttagaatcattcaaggtgcaggagttgcatttttaaatgtatctgcaatggcaatggtagttcatgcagttaaacctcagaacagaggaaaagctttgggttttacagtgactggtgtttatcttgcaacatcactttcaccggttatttgtgggtttttagtacataacttgggttggagagcaatgttttactttgtaattccatttttagtattatgcataatattattaatattaaaaataccacaagaatggaagacatatcagcatgatacaattgataaagttggatcaataatatatgctattggaattttattattcatttacggattcactactttaattacaacaaatggtaaaatattaaccgttactggaattattttattagtgatatttggagcatatgaattaagacagaaatccccagtattcaatatgaatttatttaaaaataaaaagttcacatcatccaatattgcagcattatgcagttatcttgcaataatggtcgttacaacaattctaaattaccatttacagtatgtaaggggttgggatgcacaaatgtctggaatgatactgattatcacaccaatcattatggcaataatggctccgaacgccggaaaactatcagataaaatacatccgcaaaagctggcagcaactggaatggcaattgccaccattgcacttggaattttaacattcttaaatggggaaacaccaatttatttcgtaattatagctatgattctacaaggtattggtatggggcttttctcatctccaaatatgaatgcaataatgagctccgttccacctaaagatgccccaactgcatcagcttcacaagccacaatgagaacaatcggccaaaccatgagtttaggtcttttaactttagtatttgcttggataatgggtaatttagagttatctccacagtatacaaccatgattatacaagcttcccaaactatttgcggaatctgtacagcagcatgtatactggctattttcgcatcactcattggaatcaaatctagtgacaaatttaatacaggaagatga

SEQ ID NO: 7119 - DNA, 444 bp, Methanobrevibacter gottschalkii
  source 1..444: mol_type = genomic DNA
atggataaaagtccggatgtttttgataatgctccaataattggatggattcataatatatcaaaaaatcagttaaaatacctcaattcacaaatccaggaacttaatttaggtcgtgaagtacgttatataatgctgattcatgataatcctaactgttcacaagatgacttagtcaatatttatggtgaaagtaaagcaaatgttgctaaatcccttaaaaaacttgaaaacaacggatatatcactagaaatatgaatcctgaaaacagacgtaaatatatgttaaaaacaacaaaaaaagctgatgaattaattccaaaaataagaaaaatttcacttgattgggaaattaaggttggaattgatgaaaatgattatgaattaaaagaaaaaattagacagatagcaattaatggtatgaaacttattgacaataactaa

SEQ ID NO: 7120 - DNA, 300 bp, Methanobrevibacter gottschalkii
  source 1..300: mol_type = genomic DNA
atgaataaaattgaaatcgaattaaccgatgaacaattagaaaaagtaaaacaattggaagcacagaacattagtgttggacaagctattgacatgctttttgaagtaaaggagaaggcattatttgaaattgagaaaattgaaaaatcaggtttgatagataaagtttcaaatattaatgttaataataaaactgaaaacctggaagaaaattatggtgattctgaaaaaacttatgaaatggaagttcaagacatcaaacacagaattaaatggggtaaagacttctttaaattctaa

SEQ ID NO: 7121 - DNA, 687 bp, Methanobrevibacter gottschalkii
  source 1..687: mol_type = genomic DNA
ttgaatagaaagacaaaaataataattattgcaatttttttaattatagcaagcatattattcgttggaaatagatttttcataccgcattatgaaactattgcagacactgatataggtactgtagaagtggctacttatggaaatgcaaatgctacaaaatgcattgcattaattactggaattcatccaagggaaacactggctattaatccggaaattgatgcagcaaaacaatttgcaaatgatgatgttaaaataattcattataaagtcactgttacaaaaaatgcacaggactatagtaaaggacgtgcaaatggtgaaagtcttgttcataattatgtaaatccgaatgttactgcttctgatgctgatgctgttattattagtcattcacatattcctgaatatggtgaaggattttatgtagctactccagcaatggacaatgcatctgttaaaataggtgagaatataaatcaatcaagtgattttaattattatccggtcaccggtaatgaaacatacaaatcaacttctgctgtgcttgtttcaaaaccgattgctgaagcaggttatccaacatttgtatatgaagttccagaaaatgtcatggaatttattataactggcaaaacaaaggatttattccagttaattattgaaaatacttatgataattga

SEQ ID NO: 7122 - DNA, 1455 bp, Methanobrevibacter gottschalkii
  source 1..1455: mol_type = genomic DNA
atggattatgatgttatttatatcggaagtggaaatgcggcatggcaaggaggccgttttttaagaaaagcgggtcttaaaatattgattattgaagaaagtttatttggaggagcatgtgcaaacagaggttgtaactccaaagcattgcttgatgcaccatatgaaattaaagcattggcggataattttgaaggagttggaaaatctggtaattttgaagtaaattggccggatttaatgaaattcaaacaacaacgtatttctggaatgtctaaatttttagatggtaaatttaaagaatatgatttggatgttgcacatggaaaaggaatacttgtcgatgaacatacagttaaggtaggtgatgacacattcaccacagataaaattgtaatctgcacaggtttaaaacctgttattccagatattaagggaaaagagtatttgcatgatagtactgattttttggatattgcagaacttccaaagcatactattatcataggggcaggatttgtgggcatggaattcgcatcaataattgcggaagcaggtcttgaagcagatgtaattattcgaggaaatatggctttaaaatattttcaccaaccttatgttcaaaatgttattgaaattctaaaaaagaagaatattcgtttccatttcaaccaaactgtaaaagaaatcattaaagataataatgtcataattgatgatcctgaaagtaaagtttcaaatgttgaaaactcaatgaatagtgatgagctcctgagagatcctcaagcaaaaataaataacaaggcatatgaaaatgcttttactgttaatcttgatagtggatgcagtataactggagattatgttattgcagctatgggaagggaagctaatgtagaggatattggtcttgaaaatgtgggattaacatatactaaaaaaggaatcaaagtaaatggtcacttacagacagccgtttccaatatctatgcttcaggagatgttgcagatgtaggcattgctaaacttgtaactgttgcaatacatcactccaaatatctcgcaaaagagttattgggtaaggcagatgaaattacttatccagttatcccggcagttgcatatactattcctagaattgcaacagttggtgttccggcatatattgcagaggaaagtgatgattatgatgttcacactataagatatggtaattcctattcacttgaacttaaaaatgataggactgctgaggcaaaagtaattgttgataaagatttaaatattgtcggtgctgaaatatatgcggcagatgcagaaaatgtagcaaatatgtttacatttattattaataaaaaaataaccttaaaagatcttgatgagatgatttatgcattcccatcaagcagttccgtatgcttgtataaattacataatattcattataaattatag

SEQ ID NO: 7123 - DNA, 2955 bp, Methanobrevibacter gottschalkii
  source 1..2955: mol_type = genomic DNA
atgaataaaaaaatattaattttacttttaatagctattttaacattttccgtagctaccgttagtgcatcagataatacaactgatgactctgttattgattcatctaatcgagatgttgttagcgtagatgataataatgttgttagtgatgaatatgcggttaataaagtttctaatggggcgctggctgatgttaatggtgaagaaaatgtaaataatgatgttgatatggttatagatcctataaataatgtatctgtacttcaaggcgataatgttgatgtgaacattactgttaagaatataggggaaaataatgcttctaatgttacagttaattttgaattaccggatggattttcattaattgattctaataatgtatcagataatacttggcatataggcgatttgcagtcaagtaaatctactaacatcactgttaaattaaataatagtggaattaataatggtgattatgttattaacttaacactaagagctaatgaagggattgaagaaatttttaaacagaatgtaactgttaatgttataaaaaaacttattcaaacaaacttaactattgattttgataaagagtcatatgtatatggtgatgatgttggaattgatgttaagttacctgatgatgctactggtaatgtgactataaaaatcaatggcacagaaaataatgcaagtattaatgaggtattgattttatctaatttgactcctggcaattatgaagttaatgttacctatagtggggatgataaatataatggaagctctggtaaggctagattcacaatatccaaagccaacacaacagctgcaattgatattgtcagtattaaagttgatgatgagttaaatattactattaattatgattctgaaattaatggtaatgccactatttatgtggataatattaaaaatcaaacaattgaaattattgatggaaatggaaatgttactattaaaggattatccaaaggaatgtatgatattaaagtagcatttgatggaaatgattgttataattcatccgaaactaacaaaactattgaaatatctaaaaacacagtaaacatgttgatcaatgtaggagatattgtttatggtaatgatttggttattaacctcaaattacctgataacttaacttcaaatgtcactgtaagtttgggtgatattaatagaagtattaattgcagcggcaatgtaacatttaaagatatgaatgctggaaattatactgcaattgtaagttatggcggtgatgaaaattactttaatgaaacaaaatatgttgattttaaaatatataaagctagtacacaaactactgtcaatacatcagatattaatataggcggagtgttaaatgtcagtgttgatcctaaaattgatggaacagctactgtttatttaaatggaactaaatattcagatgatattgtaatagttaatggtagtggaaatgttgttatttcaaatttaatcgaaggaacttataatgttcttgctgtatttaatggaaatgataattataattcctcattaaccaataaatccattaaagtatcaagaaatgtttttaacattactgttaatgttactgatgtttgttatggtcaagatgtaataattaatattacattgcctggtgatgttaccaacacagtagatgttgtttttggttataactctcaaaatattaatcttgaaaatggtgttggaactgttaaatttagtgatttggatgtgggaaattataatgcaactgtgatatattatggtgatgctaaatacttaaaaagcactcaaatcattagtttcaatgttactaaagctaaaccaacagttgatgttaatatttcaggcaataagcttggtcaggatttagttataaatattgcattgcctagtgatgtaaaaaataatgttactgttggaatagacaatatctctcaagatgttaaagttacaaatggtgtgggtaaggcaatatttaaagatttaacaattggagagcatgttttgataattgattatagtggtgattctaactacttgaatactactgaaggaatttatttcaatgtatctaaagcaataccggtcattgatattgatgttaaaaacatatatgttaaaggtaaggaagttatagatatagctcttccagatgatgcaacaggttctgtaactatttttattaatggagttgaacaaaaaacagttaatgataacattagcagcattgttttaaccaaatctggtttggctgccggaacttataatgtgatggttagctatactggagattctaaatatgaatctgcaaatacaactgttcaatttaaagtttcaaagtacaaagctaaattgaccgcatcatcaaaaacttataatgttaaagtaaaaaccaaatattactacattactttaaaaaacaacaagaataaagtaatgaaaaagattaaagtctatttgaaagttaatggtgtaacatattccgctacaactaatagctatggtaaagcatctttcaaacttagtaaattaactaaaaaaggaacatatgatgctttaattacatataaaggcactagttactataataaattaactaaaaaagttactattgcggttaaagcaactccaaaattaactgcttattctgcaaaattgaaaaaatctgttaatgccaaaaaatatagtgtaactttgagaacagacaaatataaagcaatgaaatatacaaaagttactttaaaagttaatggtaaaatctatactttaaaaacaaatagtttaggtaaagcaacttttaaaattactaatttgaataaaaaagctaaattccttgcagttattagttattctggtagtaaatactattattctgcaactaaaaaagtgatattgacagtcaggtag

SEQ ID NO: 7124 - DNA, 483 bp, Methanobrevibacter gottschalkii
  source 1..483: mol_type = genomic DNA
atgtctcagttttcaattaggtttgcagaaaaagaagatgtttctttagttttgcaatttataacagaattggcagaatatgaaaaaatgttgaatgaagtaatagctagtgaagaattattgaatgaatggatttttgataaaaaagttgcagaagttatatttgcaatggaggatgataaagaaattggttttgcattatttttccataatttttcaacattcttaggtcgtggaggcatatatcttgaagatttatatgtaaaacctgaatatcgtggaaaaggatatggtaaaaatttaattaaaagattagcagaaattgctgttgataggggttgcggaagattagaatggtggtgtctggattggaatcgaacaagtattgagttttacttatctcttggagctgaaccaatggaagattggactgtatatagaattagcggagatacattagaagaattaggaaaaaaagaataa

SEQ ID NO: 7125 - DNA, 288 bp, Methanobrevibacter gottschalkii
  source 1..288: mol_type = genomic DNA
atgaactcaaataaaattaaaatcgaatttgaaaaagaagataacagcagtatagcatatgatggcaatcggcaaattggccaatgccactttgcaagactaaaacaaaattggataataaccttgactgatgtggaaaaagactaccagggacagggaatcggaaaaaaactcgtagaaaaagttattaacgaagcaagaaaagaaaaagtaaaaatcgttccatcatgctcatatgcaaaaaaattaatgtttgaaaatcctaaagagtgcaaagatgtgctctaa

SEQ ID NO: 7126 - DNA, 237 bp, Methanobrevibacter gottschalkii
  source 1..237: mol_type = genomic DNA
ttgtcaaaacaagaagaactagaacaaaaaggatacaaaacttattcaaatgatgaaattaatgttttttggaatcctaaattgtgtcaacatgcaactgaatgtataaggggaaataacaaagtattcgatgtatcaaggagaccttgggtagatgtttcacaagctcctgcaaaagaaatagctgaaattattgacagatgtccaacaggagcactgttatatgaactcaaataa

SEQ ID NO: 7127 - DNA, 1650 bp, Methanobrevibacter gottschalkii
  source 1..1650: mol_type = genomic DNA
atgaaagttattgctagtactagaaatgatgatctcaaaagattaaatgaaatttataaggttcttaaaaagaatgattttggttatttgattgaagaaaatactttttttaggaaatttccatttttaagaaactataaaatagaaaaagaagataatttttccgatgaatctgtccctttgagaattagaaaagtactggaagaattaggtccagcatatattaaattagggcaaatgttaagtacaaggcctgatttagttggtttggaaattgcagaagaacttcaacagttaagagataatactcctataactccttttgatgaaataaaagaagtcattgaagaagaattaggcaaacctatggaagatatttatagtgatattgaccaaaatcccttaggatctgcatctatcgggcaagtttttaaggcccaacttaaaagaaatggtgaagaagtagcaattaaagttcaaaaacctaattcccgtgaaattatagaatctgatattaaaataatgaaattccttgcaaaaaggattgataaatacatttcaagttctaaaacttttaatctacccacaatagttaatgaatttgaaagatctattcttaaagaaattaattatttagaagaagtaatgaatatgcaaaatctttcaaaaaacttcaaaaatgtgaattatattaaaattccaaatgtatatattgattattgcagtgaaaaaataatcactatggaattaataaaaggaattacagtcactgaattaattgaaggggactatcctcatattaataaaagattaattgctaattatggtcttaaatcctattttaaacaaattatgattgatggttatttccatgctgatccccaccccggaaatttaattgtaacacgggataataaattgtgttatattgacatgggtatgatggggattttaagtgaggattttaaagaaaatttagctgaatttatgttgcttttgataagtggaaatacagacaacattataaaacaattaatttatatgaatataatttccccatcacaaaatacaccggaattacgtgcggatattaatgacttattgaatttgtattatggtgcggaattaaagaatatggatggtgcaatggaagatttacttaatgctatggttaagaataatgttgttcttccaaacgaatttgtaatgattggtcgtggtattgctttgattgaagatacgggtaaaaagctcgatcctaattttaatgctgctactgaattgaagaaattatctagaaagattgtagttaataaatataaacctgaaagattggcaaaagtcagtttgaattatcttttacaattggaacatctagcaaaagacttaccggatacaataaatagcactatttcaaaattggaagaagggaatattgaagtaaaattaaagcatgaaggaatcggtcatttgattaatcaattatccatatctttaattttatcatctttaattattggttcatctcttgctcttatcactgacgttggtccggatttatttgattttccaatacttggattaatcggatttgtttttagcggagttcttggagcctatttagttttaataaatgtaattgaaagatga

SEQ ID NO: 7128 - DNA, 1338 bp, Methanobrevibacter gottschalkii
  source 1..1338: mol_type = genomic DNA
atgttaaatgaatttttcaaattatctgaaaacaacaccgacgttaagactgaagttattgcaggactcactacattccttgctatgtcctatattttaggagtaaaccctggaatgttagctgaaggaggaatgcctgcaactggagtatttttcgctactgctcttgcgtctggtattgcgtgtattatcatggggcttgtttctaaatatcctgttggattagctcctggtatgggtatgaatgcattatttacttatactattattttaggtatgggtaacacttgggaagctgctcttgctgcagtattcatttcaagtatcatatttttattaataactgtttctggacttagggaagctattcttaatgcaatcccgcacaatttaaaactagctattggtgcaggtattggttttttcttagcattcattggtttaaaaggtgctggaattatcgtagctgatccatcaacaatggttactttaggatcattgttctctgctcctgcacttttagcattaatcggtattgcagttactttaattttatatgttagaaaagtgcctgccgcagtatttataggtttagtaattactgctattttaggcattatatttactgctgcaggatttggtgttggagacatagctatgccttcagttccaactgaatttgtatctacaacaattgatacatctgtatttggtgcatttgcatctggatttagccagttattcacaaatatccctaatttaattttaatcttattctcattactttttgttacatttttcgatacaactggaactttaattcctttagcaaatcaatgcggtttcattgatgaagaaggcaatgctgatggaatagacaaagcattccttggtgatgcaattggtggtattattggtgctattttaggtacaagtacattaactgcatatgtagaaagtgcaactggtattggtcttggtggtagaaccggtttaactgctatagtcacaggcattctatttttaatttcaattatctttgccccaacagtattagctttatttacatcttctgtaactgctgctgcattagtgatagtgggtatcttaatgatgattcaattaaaagatgtggattgggatgatttagttgtcgttgcatctgtattcatgaccattatcatgatgcttttaacctactccatctcattaggtattgcattcggttttgtaacttacgcaattaccagtattgctgcaggtaaagcaaaagaactgaattggttagtttggataatggtacttgtatttatcatatacttattcttcggattatag

SEQ ID NO: 7129 - DNA, 2079 bp, Methanobrevibacter gottschalkii
  source 1..2079: mol_type = genomic DNA
atgttgaatatgtattatgatatgatgattaataaatatattaatcaaattgacacatccattgatgctttggagttaaagctaagagtctgggattttattaattctttagataaaactgatttgtctgaagaagaaattaaaaacattgtttctaacattgggaatttaggaactactttagaagaatccaattctcctaaatttgagtggtatttaaatacaatagttgataatgatttatgcgccaaatgtggagcttgtagtattgtatgtccaaatcatatagttgaatttgaagaaaaacctttcattgtaaaagaatgtttacgtaaaggaaatgggatgtgtcaagaagtatgtcctagagtaaatgcagggtcatatgaaattagaacacgtttaaattcttttgaagaatattattatggaaaatcagatataaaaggccaatcaggtggagttgtaactaaatttttagaatatctgttaaacgataaaaaaattgatggtgcagttgtgattggtggtagtcactggaaaccttcaagtatgctagttacaaactctcaagatttattaaatttacataaaattgacattgattcaacacctaaaagcagatactcaatttcttcacttaatgcaataatggaagccggagaaatgggttttgaaaaaattgctgttgtcggacttccatgtcaggtagcgggattgagaaatattcaatatcatcagttcaattcaaaacatgatgctgaacggggatggaatggtcggcctgctaaaattccaaaaattgaatatgttttaggactattttgcactgaaaaatttgaatactcaaaaattttggataaaatcaatactcttggaattaatgttgatgatatagttaaatttgatgttaaaggacctaattttttaatatccacagaaacagaagattatgaaattaaattaaatgagatggaaccatcccctggatgtttaatgtgccgtgattttgatgctgaacttgcagatattagttttggagaaaaaggttcacctaaaggattttcaacagttgttatcagaaccgaaaaaggaaaaatcataaaagactattttgatttcaacaatgatgtggatattgaagaaattgaatttatgaggaacttcaaagaaaaacgtttccaaaaagaaataaaacacagaaaagagagtggcaaagctaattcttattattatctctggagatttggtggtgttggaatgggtcaaaaaggcagagcttatctccgtttcagaactactattggaggatattatgatgctgatttattaatggaaatttcagctattgctaaaaaatatggtggaatcattaaactaacttcccgtgaggaaattgaaattcaaggaataaaattggatgatgttgaagatatagtttatgactgtaaagatttaccgttagttaacggaactgaaggaccattagtcagatctttaatgtcttgtccgggaaaagagagatgtctgcttggattaattaacactagtgaaattgcagaaaaaatagaagaaaaatatgcggaaaaacccgctaattataaatttaaaataggaattactggttgccctaacaaatgtttatctgtttctacaactgactttggtattcatggtgttaaaacacctcttactaatgacaattgtaacggctgtggaagatgtgaagatgtttgtaaaataaatgcaatagaaatcactggaaaaaatgctataacggattatgattcatgcatttcatgtggaaaatgtattcctgcatgccctaataatgctaaagacattaaatataaaggatattgtttatcaatcggtggaaaaggtggacgtgaaactattctaggtcatgaaatgtatgttgacagtgaagatgaaatttataaaaccttggatgcagtatttgaagtttataataaacatgctaaaaacccacaaagagaaagattagccagtacaataaaaagaatcggtcaattaaatttctttaatgaagttgaaaaagtaaaattatccaaataa

SEQ ID NO: 7130 - DNA, 1386 bp, Methanobrevibacter gottschalkii
  source 1..1386: mol_type = genomic DNA
atgatatataaatgtctaatttgcggtcatattcataatgaagaagcaacaggagtattattaaaagatttagataaatgtcccacttgtaaacaggatatatcaaattttgttgaatttgaaaattcagattcagattataaaattcaaaatgaaccaacagatttatcatatccaaaagaattcgctaaaagtgataaggatattcgacacatggatacaatacatcaaatagctatttctggtgaatcaataatatcttcaatgtatacagagttaccaatgcctaattgggatgatattctaattttgggatgtcagctaaatccccaacctattgaatcaaatattgatgttaacacaaccaccgttattggaaaaaatgctaaaatacccttagttattgaaagtccaatttatatcactcacatgtcatttggagcattatcaagagaaagtaaaattgcacttgctaaaggaagtgcaagtgttaaaactgcccaatgcagtggagaaggtggaattctacctgaagaaatggaaaatgcttataaatatatttttgagtatgttccaaataaatattccgtgaatgatgaaaatttaaaaaacagtgatgctattgaaataaaaataggacagtctaccaaaccaggtttaggtggacaattacaaggcgtgaaagtaactcctgaaattgccaaaattagaaataaaccagtaggtcaggatattcattcacctgctacaattccagaagttaactcaaaacatgacctgaaagaattggtttcatacttaagaaaaaaatcccgaggaaggccaattggattgaaatttgcagcggggcgaattgaagaggatttggagtatgcttgttatgctgaaccagattttataactattgatggtagaggaggatctacaggtgcaagtccaaaaatcattcgggattcaacatccgtacctacaatttatgctttgagtagggctagaaaataccttgatgaacatgataaagatatttcattaattatcaccggaggtttacgcgtttcatctgattttgctaaagctttagctatgggtgctgatgcaatagctattggaacaggagcattgattgcctcagcatgccaacagtataaaatttgccaaactggacattgcccagtaggtgttgctacacaagatatggaaaatcgtgaaagatttaaaatagaatctgctgcaaaaagagttgaaaactatttaaaagtttcaaatgaagagttaaaacaattttcaagaattactggacatgataatgtacatgatttaaacatgaatgatttatgcacaataaactccgaaatatctaattacacaaatattaaacatacataa

SEQ ID NO: 7131 - DNA, 3186 bp, Methanobrevibacter gottschalkii
  source 1..3186: mol_type = genomic DNA
atgttgataacattgttatgcttatttactgttagtgctaaagaaatatatgtgtcatctgatggttcagatgatttaaatggtacagatttaaataatccttgtagttttcataaggcaattaatatttctgaagatggtgattctattaaaatgaaggcaggtaattattccatatctgaggaagttgataaatctttaaatattagtgcatatagtgatgatgttgttaatataaagaataaattttcttatgtgtttaaggttaaaaacaacaatagcctagttttaaattctttaaattttaaaaattttaacacagctattgaatcatattcatatccaaatataatgattaaaaattgtttatttgaaaaaagtagctatatgtgtctaaatatgcggggaggcactactattataacagactcaatatttagaaataatactggtagtcaaggtagtgcaataaactttcaaaatacgttatataaaaatagatcttatttacatataaataacactatttttgattcaaaccatggtacaaacttaggaggagttatatacatttctctttcaaatatgtatctttataataatactttcattaacaataaagccggttatactggtggagtaatctttaatgatgtatctaaagtttatgataatcgttctagatatataaataatggtgcactttattctggtggtgctatttatattagaggtgataaagatttaggttcgtattatggagatcatgtggaatttataaataattctgccccatataaaaatggtgattctggaggttatgggacttctggaggagcttttactgcagtagatggtggagaaatagttttaaagaattctgttcttgaaggaaataaagcaatgtcaagagggggtgcaatttggtcagatcaaaaagttagtattataaatactcttatttcaaataattctgcttataatgaaaccggtctaactgtgggtggtggattatattgtcctcttttaaaagtaaatataatcaattctacattttcaaacaatcatgccaaagaatatcctgatatttttaatgatataacatttccttcagtggatattgttgaaaatattaataatactgatggtaaaaaaattagtattaaaaatttaactaaaccagtatcatattgcttgcaacctggaattctaaatattgcttcatctccaataattgaaactggcacaaataaattacttggttctggaggctatttcaatgggaagcctattggtgaattattgaaaatttttatagttcaaaattatcaaagagttcttgataagaaaattagtgaaaatacctttaaaagcatgttgggttttatatcaagtggctgttcatcactaccttctccatttaatgattcttattatttatcacatagattaattaaagaaactttagatgaatatgaaaaaggcgttagatatccagatgtaaatgcaacaggtccaattaattggttaacaaaaaaatatttaacattcgatttttatcaattctcaaatgaagatcatcaagatttgattgtgttcacattcaatgaatcaaacacaactcttaatccaccaattaatgtaactaaaaaatcaaacactacaaatcctgattttaatactgttgtatcttatgttataactgtaaaaaacactaataaaacatcaatggtttttgatgctttagttattgatactttaagtgaaggattagtttataatggtgcttcccataatggagtatataacaatacaactaatacagttacttggattctcaatattcctgctgatagtgaaattaacctttttgttaatgcaacagtggaaaaatttggcaagcttaacaatacagttaatgtttttaataaaactgcaaatgttactgttaatgttccaaatactgatgtaacaaaagctgtgaatgttacaagacctagtttcaatgatacgatttgttatactattacagtttttaatcgtaatcctaatgttgatttaatgaatcttgtagttagggatgttttagatgatggtttagttttcaatggagcttccagtggtggtgtttttgatcctatttctcgcactattatttggactataaacattactaaaggtggtcaagctgttatttatgttaatgtcactgttaataaatatggcatgttagttaacaaagtttttgttgataataaaactgccaattctactgtttatgttccaatagaacctcctgttaacccggatatgactgttgtgaaactttctttgaataggactgtttatgttggtaatcagactgtctttactattgttgtccgtaatactggtgattgtgatttaggtgaggtttttgttgttgaaaaagctccagaaggtcttgcttacagttcatttaaaggcactgactggtcatacagcaatggcaaatttacttatggtaaggttttaaaagtcaatgagtctgctggctttgagattgtattcgatgctgttagtcctggtaattggactaatgttgttgttgcaggttcaaatttaacagataataaaactggtaataatactactaaggtttataagccggatatggctgttgagaagctttctttgaataggactgtttatgttggtaatcagactgtatttactattgttgtccgtaatactggtgattgtgatttaggtgatgtctttgttgttgaaaaagctccaatgggacttgtttacaactcatttaaaggcaccgactggtcatacagcaatggcaaatttacttatggtaaggttttaaaagtcaatgagtctgctagctttgatatagtatttgatacaatcagtcctggtaattggactaatgttgttgttgcaggttccaatgtaaccgataacaaaacaggaaataatactactaaagtctataaacctcctgttaatccccctgttaaacctccagttaaccctccggttaatccacataaaatagaaaaaccagataatgaaaaagacaagattattaaaaaagattcttcaattaatataagaaaaacaggtaattcaatattcttaatgatgttatctgttattatttcaattccgttaataagaagaaatcaaaaataa

SEQ ID NO: 7132 - DNA, 1350 bp, Methanobrevibacter gottschalkii
  source 1..1350: mol_type = genomic DNA
atgaaaacaaaatatgatgtagttgtcattggatttggaaaagctggaaagacacttgcagcaaaacttggaaaaaacggtaaaaatgttgcattgattgaaaaagatgcaaatatgtatggtggaacctgcataaatgtaggttgcattccttcaaaacgactaataactgattctttgaatgctccgaaaggggagttttctttgaaatcagaatattacagaaatgcaattgatgagaaaaggaaattaacagcagcacttcgtaaagctaattatgacaaactagcacagtctggcgtagatattatagatggaattgcatcatttacaaatgaaaatcatatcagtgttcaaacaaatgatggcataaggagtattgaggcagaacagtttgtcatcaatacaggatctgctccagttattcctaaaatagatggattaactgaaagccagaatgtatatgtggcagaaactattatggatctggaagagttgccttcttcacttacagtcgttggtggagggtatattggacttgaatttgcttctatgtatgccaattttggaagcagagtaacaatcattcaacgcggaaacatatttctcccaaaagaagatgaagatatttccgaatccattcgtgaagtattggaagcaaagggagtacaaattataaccggagcaaagacaacaaagattcaggacggatcactttattatgatgcaaatggtgaatcccatgttttgaaaggagatgcaatactattagcaactggacgcatgccaaatacagatggacttggatgtgaaaatgcagggattgctcttacatccagaggtgctgttgtgactgatgagcatttaagaaccaccgcaaatcatatctgggctgcaggtgatgtctgtggaaatctcatgtttacctatatttcacttgatgatagtagaatcatattggatgacatgaatggaaacggtaagaggacaacagaaaataggggtgcattttcttattctgtatttattgacccgccattttcacgtgtagggatgagtgaaaaagaggctgaagatgcacaaattgaatatcatgtaactaaccttccagcaaactcaattccaaaagcaaaagttcttcgagaaactgaaggaatgcttaaggcaataattgcagaggatgggacaattttaggtgcagagctattttgcgcagaatctccagagataatcaatctgattaaattagcaatggatcaccagttaaaagcggagacaattggagatttcatattcacacatccaacaatttcagaaagtttaaatgatctcttttcaaatgcgaaatag

SEQ ID NO: 7133 - DNA, 246 bp, Methanobrevibacter gottschalkii
  source 1..246: mol_type = genomic DNA
atgcaattaattacaaaagacaataattacagaagaattaatgaactacttgaaaaaatattagacaaaacagtaaaacgaaaacatggaatatcccaagaacaaccaatattcatgggggatgacaaaccgataacatggacagaactaaaagaaagtgaaactggtacaacatggagtcaaggaaacattacattaacagcattatttaaatataatcaaggcggttttccaagattcatatga

SEQ ID NO: 7134 - DNA, 576 bp, Methanobrevibacter gottschalkii
  source 1..576: mol_type = genomic DNA
atgaataaaaaggttgtagttgcaattgtggttgttgttattgttgctattctggcaatattgatgttcattggatcctctaatgtgacattaatggcaggagatagttgtataacacttccttcggattatatgttagataataaagggattgcctataaaaatgatattggaatattttttatttcagtatcaggtaatagtccaaaagatcaaaaagaactatttgatgccatcaaatctaatggaaaatcatcaggatataaaaatgtcactaaagacaaagttaatggatttaaactttatgaatacgaagcaaatcctgataaacttaagaatgtatcatcggatagaaaaataagtggtagttatgaaacttggaaaacctatagtccgtatactccttatgaagatgtaagtgatatggatgtgactaaattcagatatatcgcttatgtaaatgaaaatacggatgatataagtgaattgtatatatttacaaataatacaaatgtcgatttatattctggagaaataacaaaaattattgatagtattgcagttgtagaggagtaa

SEQ ID NO: 7135 - DNA, 357 bp, Methanobrevibacter gottschalkii
  source 1..357: mol_type = genomic DNA
atgatgattataacaactatattaggaacacttgtagcattagaatttttttatataatgtatcttgaaacatttgctacaaattctgataggacatcaaaagtttttgatatggataaaagtgaattagaaagagaatcagtcaatactttatttaaaaatcagggagtttataatggtttattggcggttatgattttacttgctctttttgtatttgttagtaaaaccgctttatctgttttaatggcatatattatattagttgctatttatggagggattacaagtaatccgaaaattatttttatgcaaggcggtttggcaatcattacattaatctcttgtatcttttag

SEQ ID NO: 7136 - DNA, 222 bp, Methanobrevibacter gottschalkii
  source 1..222: mol_type = genomic DNA
atgtttaattcgaagtttttaatattaattcttggtgttttaattattggtttagcattatttggttatttcggtttgtcagataatgctcttgagtctgattctagtttaaatgaatcacatgatgatgtagtttatctctggatgttggatgataatgataatctgaagttgattccaacgactgaaacttattctgaagggtctggaagtaattcgtag

SEQ ID NO: 7137 - DNA, 1029 bp, Methanobrevibacter gottschalkii
  source 1..1029: mol_type = genomic DNA
ttgataaataagagattcattttagtttttgtaattatcatgattttacactgcagtgcggttagtgcatatgaaaattatgatgattttgtttttaataatattacaatagatgattcaggtcatgatgatactaagttaattgatgaaaaatcattttattattatgaagaggattctggttatctttctgataatattgttggtggaaagaatattaagaatactacaggagtagtgatggctgatgatgagtatagttgtggtgcagcatcttttgcaacagttttaaacaacttagggaataatattacattatatgaagctaaaatcgcaactaatactactttaaatggaacgacaatgaaaggaataattgatgcaactaaaaaatatgatttaatgggagttggtgttaaattagaaacagttcagcttaaagaaaattatattgtgaatatgaatattttgggtattactcattggtctgtagtgaaagaaattaatgaggagtttattattttagcagattctaatttgggtaattataaatttgatataatggaatttaatcaatattatactaatcaaacaatagttatacttaataaacaacaatataataatcatatttctattgtatcaaataatactaattatatttctaatattgatcaaaaatatatttcgggtaatggatatgcattttatgtatctaaatctatgtcatatattaatgcaaaccctaaaggttatgcatttaaatatacaattatagtaccaaaatggggaggaaaagtagttaaactatctacaaaaaaattaacaaaacatagaataacagtaaaagtgatatataagataaaagtttattctaaatcacattttaaaggaaaagtagagactattcatcagccagctatttttaatttagctcataaagcgggaacaaaattttctgtctcaagacctacatccttcccaatacaatcaataaaatatactgtttcatattctcacttcccataa

SEQ ID NO: 7138 - DNA, 1512 bp, Methanobrevibacter gottschalkii
  source 1..1512: mol_type = genomic DNA
atgattctagcagtagcatttcccgaatcctttagacaaataactaattcaatcagggattttctaggaatacacttcggatggttttatctgatggtggtattcttatgtgtagtaattagtgtcattgttatatttcatccaatgggtaaaatacgactaggggatccaaattcaaagcctgaatattcaacattttcatggatagcaatgttattctcggcaggtatgggaataggacttgtattttatggagcagccgagccattatcacattatgctgtaatggcaccggaaacaacagtatttacacagcaggcaatgcttgatgctttgaaatactcatttttccattatggtatttcagcatgggccgtttatggaatggtagcattggcaatagcctactttaaatacagaaaaaaggaagttcccaatatctcatcaacattaaagccaatattcggcaagtatactgaaggaaatataggatatgttgtggatgcacttacaatatttgcaacagtagtgggtgttgcaacatcactcggattgggtgcagttcaaataaacagtggattaaactatttattcggaataacacagtcaatcaatgtacagattataatcataatcatagcatcaatcctatttctaacatcagcagtatccggaataaataagggtgttagaatactgtcaaatacaaacattcttctggcaatacttcttatgctaatagcatttgtgattggaccatcacttgatatagcaaacttcttcatagaaagtataggcgcatacatgaatgactttatccggatgagttttagaacggcagcatcaggtacagtagctcagcagggatgggtacaaagctggacaatatactactgggcatggtggatttcatggtcaccttttgtaggagtatttattgcaaacatctcaaaaggaagaacaataagagaatttctaacatacattctactggttccatcaatattttcatttgtatggttttcaatatttggaacattggctatgaatgggacaacacctggaagtcccatcatcaagatgccaatatctaatatgctgtttggaatattcaaccaatatccactggcaataatattatccatattggcaattatactgataatcatatactttatcacatcagcagattcagctacagtagtactggcaatattatcggaaaacggaaacgaagagacatccaagaaaataaaagtaatatggggcataatactatcaagtacagcaacaatacttctaataaacggaggacttgacggattacagaacatactgataattactgcatttccattttcaataatactgatgcttatagtagtttcagtatttaaggaactggtatatgaaaaagatgaaatgagactgtttgtaaaggcagaacgacatccgacagtagacagaccattcaaatcatatgaaaatcaaaataaggaagatgaagagtaa

SEQ ID NO: 7139 - DNA, 402 bp, Methanobrevibacter gottschalkii
  source 1..402: mol_type = genomic DNA
atgaaaatatttttagattcttcttttttaattgcattaattaatgataatgattctttacataaaaaagcattagaatatgtaaaattaactgaagacaacgaatgttatattagcaatctaattattaatgaagttataacaattataggaaataaattaggattaactgtggcaatttcaagttatgatttattaacttctgtttttaacattgttaatgaatataaattagctgattttaattctaaggttatgttaatttatgaagtttataacactaaactaagtttcactgattcaagtattatacatataatggagaaagaaaaaataaataatttattatcgtttgataaagaatttaaaagagttgaagatattaatttaatcagtttgtaa

SEQ ID NO: 7140 - DNA, 237 bp, Methanobrevibacter gottschalkii
  source 1..237: mol_type = genomic DNA
atggttaatataggaactactaaaatatataaaaataatcaaataacaatcccctctaaaataagaaaagaattaaatatttctaaggaatctgttattatttggagtttaaatcctgataaaacaatcactttaaaagttgaaaataaaaagccatctgttaaagatttgataggtttaggaagttctaaagaagttactaatgctgttgacttaaaaaggagtttatatttatga

SEQ ID NO: 7141 - DNA, 333 bp, Methanobrevibacter gottschalkii
  source 1..333: mol_type = genomic DNA
atggcagaatacacaagcataagaataagaaaagaccttgcagaacaaatgcaaataataaaaaaacaaaacaactacaaaagcattaatgaattattagaaaaaacactagacaaaacagtaaacgaaaacatggaagtaatccaagaacaagcattattctatattggtgaaacaccaataacatggacagaactaaaacaaagcaccaatggtacaagatggaatcaaggaaatgaaacagtaactatattattcaaagataatcaaggcgctttcatcagatttgaatatgaaaatgaagtggaagtagaatactaccatttcatttaa

SEQ ID NO: 7142 - DNA, 1206 bp, Methanobrevibacter gottschalkii
  source 1..1206: mol_type = genomic DNA
atgatgaatattgaaactagagaatcattattccaaccaggacaaccagtaagtgcggatagattcaaaggaagagaagagattatcgaagaaatattaaaatattttccttcagtaaaatcaggtaaccctcatcatttcttcattactggaaaaagaggaatgggaaaaacatctttagctaatttcatatctgattttgctaataaaaattattctatgattactgcacatataatgaatgatggagtacactctatagatgaattaatagtgcaaataattgaagggatattaaattcaattaaatctgaaaaatggtctgaaaaaatatttggatttttagaagatcacattgaatcagttggtcttggtggaatgaatattaaattcaaaccatcaaatcaagaattaaaaaatattaaagataactttgcattttatttatctgatttagtaaataattttaaagataaagatggattgtttattgtcattgatgatattaatggattatctgaaactcctgattttgcaaattggtataaaagttttgttgatactttagcaacatcggtggataatgctccaatttgtataatgttaacaggataccctgaaaaatttataaaattacatgaacaaaatccttcagtaaatagaatatttcatgttcatgaattaaatagattggatgatgatgaaattaaaaatttttatacagatattttcttaatatatgatattaatgtagagggtatggctttggaagctatgactaaatattcttcgggtatgcctactatgatgcaagaaattggggatgcaactttttggtcagatactgatggattcattgatagggaagatgcatttaaaggcattattgaagcgggaaatcgtattggtttaaaatatttacaaccattattagatcaaaaaattagaagtgaaaattatttatctttatttaaaaaaataggtaatgaattagctgcttctccaaacagcacatttactaaaaaaacattttctgatgtattaaatgataatgaatcaaaagtatttaaagattttattagtagggctaagaaattaggtattattgaattagcaagttctaaaaagcaaggggaatatcaatttactaatcaattatatccaatgtacttcatgatacaaacattcaaagaagaagcattataa

SEQ ID NO: 7143 - DNA, 237 bp, Methanobrevibacter gottschalkii
  source 1..237: mol_type = genomic DNA
atgtctggaaccgatgagttattattaaaaattttttttcgtaattatgatgaggaagaacgtcgtaatggattaattgataacaagaatagtcagatgattgttttaactgggactatgttgactttacaagcaacattattttcagtggggttgttgaatgagtttgtttataataaaattataattaatcccgttaaattttggatttatgctgttttgaataattcaacctaa

SEQ ID NO: 7144 - DNA, 345 bp, Methanobrevibacter gottschalkii
  source 1..345: mol_type = genomic DNA
atggaaaaagtgtattgtactgagtgtggaaatgaattagaagggggctctaaattttgtccaaaatgtggcaataaggtagatgatgaaacttttagcatagaggtttctccatcaaaatcttacaaaagttatattattattggatatattttagctattttaggcattattttacctattttagcaatatttggtgcaatagtgggtttttatttaatttacagaaactatggtgatttacttagtggtaaatttaataaaactaatgtgaatgcattactaatccttattttctcaatctttgcaattgttttcatgtttaatgttggatttatacgttaa

SEQ ID NO: 7145 - DNA, 516 bp, Methanobrevibacter gottschalkii
  source 1..516: mol_type = genomic DNA
atgaaaattggcgattttgaaattggtttaaagacaattattttagtaatagttgctttaatcgttatttttgggataatctccttttttagtggtggtgattcagtaaatgtaactgatgttggcatgactgtaaattataattacaaaactaatgtggcttttacaattataccaactgatacaataactgaagttaataatgttcagctaaagaacattgaagttacttaccataatggtaaaacacaacatttagaagatgttacatttaactccaaaaatacttatgttaaagataatgaatatgggtttaaatttgattatacaatctctgatgattgtattgatggtttagatgaatatgattttggacatgcaacacaccatattaaaggagatattgtaataaacactgtcggtggaaatgaaaaagtggttggacatattgattatgatgtccctgcttcggctacagtatataaatactcttctggaagtggttcagtaatataa

SEQ ID NO: 7146 - DNA, 477 bp, Methanobrevibacter gottschalkii
  source 1..477: mol_type = genomic DNA
ttgagtaaaaagatttttgctatattgatcgttgtaatggcttttgtctctttagctagtgtttttgcagttgaaacaacaactcacgatttcgatggtttgtttaacatgagtgttccctctgatgaggaatttgtaactcttgactctaatatcacaggtgcttctgtatttggatataattttaattatggagacccaattggtgataatataatagtttattactttaatgaatccattgttgatgataatgatactaatataactgaatatgtaattaatattttagatgaaaattctacttttaaacatccttctgttgaagatggtttcactgtattatataatcagatggttcaacatgatggaggttatatgttaattgcatcaaatgataatgaaactgaagtagtaggtattgttggggataatttagatgatttaaaaacatatgctaattctatagaattttaa

SEQ ID NO: 7147 - DNA, 279 bp, Methanobrevibacter gottschalkii
  source 1..279: mol_type = genomic DNA
atgagtgaaaatgaatcagaaccaaatttttggtctttaattggatatataaaagtttctccagcacgtttaaattgcatcacttgtatcggcactgaatataaaatgccaaaagaaattgttgatgcaacaggaatgcgaataacacaaatatcaaatgcattacacgacctaaaagaaaagaaaatagtagtctgtttaaatgaggaaaatatcaaaggcagactataccaaaataccgaattaggattacagctattggaagaattaaaaaaataa

SEQ ID NO: 7148 - DNA, 552 bp, Methanobrevibacter gottschalkii
  source 1..552: mol_type = genomic DNA
atgcagagggaaatggacgaacagaaagagcaatatgaaaaaaagattcgtcatgtggaaagtgtcaattcagctttatcttctcaagtattggatattcaaaatcaattagataatcttgccaatgctaatgacttaaaaagaatacaggagtatatttctggacacgaattagttgaaaaatataatttggcttctactattattggatattataaggaagatgttaaaaaagaagattttactggtgttactgattattatattgaagatttaataacacaggcattcaatacaacatcagcatttcaatctacagcaattagagatgaatattatcgaactgatgataattggaagcgaatttattcagaaattgggctctatgaacatgattatattgaaagtaatgggtatgtattatctaaatcccaaagtaaaaagattactgatgaactggagagttattcaataaaattatgggaagataatgaaaaagtaaaaaaatctaaagtacaatcaataattgataatattgtacttagacattaa

SEQ ID NO: 7149 - DNA, 996 bp, Methanobrevibacter gottschalkii
  source 1..996: mol_type = genomic DNA
atgaaaataataatagatgggtataataaatcaatacataaaaaagataacatgattataatagaggaaaactcacaaactattgatgcaattaaggcaaacatgattaccgatataacaatcactggaaagggatatgtgacgtttgatgccttaaatttaatggcgcagaacaatatcaaattaatggccattaatccgagaggacagctaaactatattttagaatcaccagattggcgaaatgtaaagctaaaaaaacagcagtatatgctaagtgaaaatacactgggtcttgaattatcaaaagagctaattaaaagtaaaatgaaaaaccaaaaagcaacattaacaacactaaataaaaataaacaactaaaaagggtattcaatcacaggttaaaaattgatgaaatgatagctgaacttgaaaaaataaatttaaatggcgataatgaaaaaataaggatgaaaataatgggcttggaaggaaaggcatcaaatgaatactggagggcaataaaatatttcatacctggagaaataggatttgatggaagaaccaaaaaaccaacagaccttttaaattccatgctgaattacggttatgcaatccttgcaagtgaaataacaaaaaacatattgtatgccggtttagatccatattgcggattcctgcattatgacatggataaacgaacaagtttaacgtttgatttaatagagccatttagacaacaaattgttgataaaaccgtgataagtttaatcaataaaaaacaggttacgaataatgatttggataaaaggaacaatacaataaaactagaagcgagaaaactgattgcaaataaaattcttaaaaaactgttttccacaatcacatataatgatgaaactgtgacatattccgatctaattagaaaacagagcgaaaatctagtcagtgcattattgtatggtgaaaaattcattggattttatttaagatggtga

SEQ ID NO: 7150 - DNA, 270 bp, Methanobrevibacter gottschalkii
  source 1..270: mol_type = genomic DNA
atgcttgtaagttttgatataaaatttaaaacaaaccgggaaaagattgaaagagtttttgagtgcctgggtcttaggaaaattcaaaatgaattatatataggagagatggacaataaggaacaaaataatttggtggaaaaaatcaacgcaataatcaaagactatgacagtgttttaataatgccgatatgtcaaaattgctacttgaaaaaagaaacatgcggtcgtgaaataaagttccaaaatgatctatacagggtgtattaa

SEQ ID NO: 7151 - DNA, 1083 bp, Methanobrevibacter gottschalkii
  source 1..1083: mol_type = genomic DNA
atgattgaagttaatgagctaacggactacctagatgaatacttagaagaaaaacaagaggtaaaaaacttaactgaagaaacaatcaagaaacaaacatttaatatatctaaatttattgaatatcttgaaaatgagggaattgatgaattaaataacagtaatgttaaaaaacaattacgacattatcgtagatactgtttaaaacaacgtgggaataaaagaacaactgttaaaacatatatgatgaatatcttggaatttatcaattcagaagatgttcaggaggaaatacaacatgatcctattaaaatgaaggatattattgaagttaaagcagaagatcctgaaaccgctaaaaaaagaattgaaaaaatttccctaacatggccacaatctaattttttcctcgatacaatcaaacaaagtggtaatataagagattatgcaatttgcagaactttcattgattctggaatgaggttaaaagaattagttttgctaaacaaggatgatattcaagttccgatagatgataatggattttacattttaccagaggataccaatgagtttattgatgtttatctaagagcggaaaccactaaaggtgaattaaaagatcgtactacttttataacctatgatactcttgttagtttaaatgatatgatgatgaatcgtataacaaaacttagaaaaaatactcataatgtttatcgtcctgttgttcagagaaataaggctgctgaagaagtaaatcgtgaagaactgttcacaaatattaaaggtaatcgtattggtaaacgtggagttcaagatattattaaaaaacatgcacgtgaatgtgatgagagaattgagagtgaaggaattgattgtcctgtaaattacggcaaaaatgttagtgttcacattttaagacacacagctttatctcattatgctgagattttaacagttgccgaggttcaatcaatagctggacattctaattctcaaacaacagataaatatattcatattgatcgtgaacaaatgaaacaaaaattaaaagtcaattctatgagatttaataattaa

SEQ ID NO: 7152 - DNA, 258 bp, Methanobrevibacter gottschalkii
  source 1..258: mol_type = genomic DNA
atgtctaatattgtatatctatataattatgtattaatatatatttatgtattttataaggaaatacatttccgacatattaaatatttcactaacagaattcatagtaaagataatgattctatgaagttatttttcgataatatgtctaaatatcttattttttcattaatattgctttatttaaatgaattgaacttaataattataatttcatttgttttaactcatataaatgtatatgctttcaaaaattaa

SEQ ID NO: 7153 - DNA, 555 bp, Methanobrevibacter gottschalkii
  source 1..555: mol_type = genomic DNA
atgtcttttaatattatttctatttcattaattgccgttgctcttgcaatggatgcatttagtgtatctatgacaaaaggttttacacaaaaaaatctatcaaagtcacagattttatattacggtttattttttggtggttttcaagctttgatgcccgttttaggatacttctgcggtaatgctattgcatcaattgttgaaaccttagcatcaattattggttttatcttacttttaggcattggattaaatatgattcgtgaaagtttatcatcagatgatgaggagattactgatgtcttttcatttaaagaagtaacattacttgcaattgcaacaagtattgatgcatttgctgtgggaattgcaattgcacttttaaaagatccgattttaatctcatcaataattattggtgcagttgcattcatattcagtgtttctggaatatttattggtaaaaagattggtcattttgttggagataaatttcaaattcttggtggcgtaattctcatactaattggtattaaaattcttttaggattttaa

SEQ ID NO: 7154 - DNA, 342 bp, Methanobrevibacter gottschalkii
  source 1..342: mol_type = genomic DNA
atgaatgcaaaaagtatattttccatatttgttttctttgtgattcttatagcttgtactaatgttgctttcgcatcagaaaacattgatgattcaaaatttagtgaagaatctgatttggatgaagttgattctgatttggatgaagttgattctgatttggatgaagttgattctgatttggatgatttaaatgatgattctgatttggatgatttaaatgatgattctgatttggatgagtttgatgatgattctgatttggatgagtttgatgatgattctgatttggatgagtttgatgatgattctgatttggatgagtttgatgatgattctgat

SEQ ID NO: 7155 - DNA, 360 bp, Methanobrevibacter gottschalkii
  source 1..360: mol_type = genomic DNA
tatactccacatagaaacacaaaatttaaaaaagcatgcaaattattaaatattattttagttcatttacctccatattcaccacaattaaatccaatagaacaagtttggaaatcaataaaaagaatcacatacactacttttgtcgaaacaaaagaagaattaataaaattatttaaaaaagaatattataagataataaataataaatcattctttaataaatgggtatcgaaatacattcttaaaagtaaggtttttaactataaattaagaactatggggttgggactctctgagaaatatttcttggacattataatatctttagcgatgttaaaatgtcttatgaaaccataa

SEQ ID NO: 7156 - DNA, 195 bp, Methanobrevibacter gottschalkii
  source 1..195: mol_type = genomic DNA
atgattacaattaacccggaattaacaaaaatgcaaaaagaattcgagcagaatttaaaaaaaatggatttaaatctctctgacaatcaaattaaagaaaaattggctctgtccgatttggtactgatgtttagttttgttgatttttgcacatcgtttgatccatctgatgtcgttaagttttattctgattag

SEQ ID NO: 7157 - DNA, 180 bp, Methanobrevibacter gottschalkii
  source 1..180: mol_type = genomic DNA
atgaagcaaaaaacaaactctccagtattatttaatgctgaagagatatataaaactttcttttgtaatggcagatgtttgatagatcttgattttccaatgacttttctatattttttaaataatattgctcaagacgatgataaaatcattttaatcaacgttaatcaggaaaaataa

SEQ ID NO: 7158 - DNA, 2664 bp, Methanobrevibacter gottschalkii
  source 1..2664: mol_type = genomic DNA
atggctgttgtgatgccggcatataattccgctaaatatattcaaaaggcattagattcaattattgatcaatcactggatttcagggatattcaaatcattgttgttaatgatgcaagtaatgacagtactaaaagtgttgttgaagaatacatcaaggaatatcctaaaaacatcactttaatcaataatgatgaaaacaggggtccggcatattcaagaaacgttggacttcaaaatgtaaatgctgaatttgtgaacttccttgatagtgatgattgtatttcaagaaatgcatttgaaaaagcatatctgtttttaaaaaataatgaagaaattgacattgcttcaattccaatatattattttggtatcaaaaacaggcctcacaatttgaatttcaaattcagcaaaactcaggttataaacttagatgagcatcctgagtacatccagctttcaggtccttcaagcttttttagatttgaaaagttaaaacattacagattcaatgaaaatttaagggtttcagaagatcctcttttaatcaaccagatgcttattgacaatcctaacattggttttataaatggtgctaagtattactatcgtcaggatactcttcaaaattcattaattgcaacttcaacaagtcacaagtcttatttcacgtcacgtgttgataattatttcatcggtcttattaattatgcaattaataaaaagggatatgttcccagatttattcaacatattttgatgtatgatctgcaatggattgttgaaattcgttttattcatttgttgcttagccaaagcgaaattgatgagctttatgataaaatattctttattttaaagtatattgatagtgatgtgatttatcatcagttgtctcttccaattgaacttaaacatcatttggcattacttaaagatcatggtactgcctatagattaaataaggataattttcaggaagacttcaacttaaatactgtatatattgataattatgaatttttagacaaggataagatttatatttctggtgttttaactaactttttaagaagtactgatgtttatgcgattgcggatggcaaaatttacaatacaaataagcttaatttcacccaaagacgtaatttttctcttgattttgactatggttacaatcatagttttgatgtggttctaccagtaaaacctggaatgaaaatatcatttaaaactaatgcttctaatcttttgattgattataatcaaacttcaagactttctggaacttccagatatagattttctaaggattatttgtcaattgattgtagaaatcatattcaaattattgaaaaaacaatcacaaaaggagttaaattagaattatctgttttaaagcaaattttaaaagagaaaaaacaagggtggcgtacaggtattcttttaagaatattgtatttcatgttttatttttacttcaggaataaacacatatggatatttatggatttgccgaattcttcaggggataatggatatttcttatttaaaaaagcaattaaatcagataaacttaaaaatattaaaaagtattatgttttctcaaagtccaaaaatcttcatgaaacatttgccgaacaagaaaataaatatgttgcaagttcaaaatttatgaaagccagaaccttatctggctttataactccaaatgaagaatttgaaagattgaaaaaaataggtaatgtcctacaatacaaatcaatcaaacataggctgtatttattatttgccgattacattattgcttcccatccagataatggaatcatttatccattttggggaaattaccatcatttgtctggtcttgcacgatccaaaaccatatttctacagcatggtgttacaaaagatgatatctcctattggctcaatcggtatgataaaagaataggtttaattgtcactgtatctgatctggaaaaagaatcatttttaaatcctaaatatggatatgatgaaagttgcatccaggtacttggttttccaagattcgactttttaaaaaagggcgaggataagaaggaaattgttttaatgccttcttggagaagacaacattctcaactcagtgaagacgaatttattcaaacagattactttaaatctataaatgaattgatgaataacgaatatctgattaaattcttaaaatcaaaaggatacaggttaatattcaaacctcacagaaatgttttgaaattcattgattcatttgatatccctgatgaagcggaattgggcattgaaatgtcatacaatgagatatttaaccatgcgtcattgatgattacagattattcttctgttgcattcgattttgcttatcttaaaaagccattaatctattatcatcatgatgatgattatcactttaatctggatgattcttactttaaatacgatacaatgggttttggtcctgttgcaacacaaatcgatgagttaaaagatgaaatcataagactggttgaaaatgactgtcaaatggatgagaaatatattaaaagagttgatgatttctttaaatacactgataaaaataactctaaaagagttattgataagattttggaatttgatgaaatgttttattattag

SEQ ID NO: 7159 - DNA, 519 bp, Methanobrevibacter gottschalkii
  source 1..519: mol_type = genomic DNA
atgacattgatagacatcatgcttaaaagaagaagtacaagaacatttgcagatgagccagtcactaaagaggagcttgataaaatattgcaggcggcacttcttgctccaactagtatgaatagaaaaccgtgtaattttatggttgttgaaagaagtgaaactctaagacagcttgcaaattgcaaagaccatggtgcaaatctccttgaaaatgcagataaggcaattgttgttcttgcagatactatgattgccgacacatggtgtgaagattcatcggttgctttaacttatatgcatttaatggcaacggaattaggtcttggaagctgctgggttcaggttcatttaaggtctaaagacaaaattcctgcagaagaggttgtaagggaaatcctaaatgttgactctcattacaggattgtaggcatgctggctattggacgctctgacaatattccaaagccacactcattagatgaactggataagagcagaattcattttttagtataa

SEQ ID NO: 7160 - DNA, 396 bp, Methanobrevibacter gottschalkii
  source 1..396: mol_type = genomic DNA
atgtcggaaaagagtttaattgtaaatcatgatgctattgatgaggatttaacagagaaattcataaacatgcatgatggtcttccagttttgcttatgaatattttagatgattttgatgatggcatctggattagaagatatgagctatacctgaagtatcctgaattggaaaatctggatggaaaggaaatggaaatcacatccgaacttttaaaggaaggtaagataaaagaagccgaggattttcagataaattatgctcttgattttttagataagcatcctcagttcaaacagatgattgatggagttcatcggcagggcagcaaggatttggaaattcttttgaactcaattaaggaagctttcatcggagattttgactacttttaa

SEQ ID NO: 7161 - DNA, 291 bp, Methanobrevibacter gottschalkii
  source 1..291: mol_type = genomic DNA
atgcatgttaaagatgttttagacgatttggatattagggtcaaattacctcagcactggtattcaaccgatgtaagtaatgaatttgaagatgccgaacttgtcagaaatgacgaaataattaaaatcagggttgaaggtgaaaaaaatactaaagttatcatcattgatgttgatgacgggatgagtgttgtcagtctacttccggataaaaaagtcatcggagttaaatacctaaaaaacaaagatgacttcgaatacattggtaaaccatctgaattgtatttttaa

SEQ ID NO: 7162 - DNA, 549 bp, Methanobrevibacter gottschalkii
  source 1..549: mol_type = genomic DNA
atggttgataaaaaagcacctgcagaaggatggcctccaattagtggagattacattgttggagaccctgaaagtccagtagctgttacaactctcgcttcccatattgaagctgacttatctggagcagcaattgcaggaccatgtaaaactgaaaacttaggtattgaaaaagtcgtagcaaatgttatttcaaatccgaatattagattcttaattttggctggtgctgaagttcaaggtcacattactggtcaaagttttaaggcattgcatgaaaatggggcggatcctgacaaaaagaaaattgttggagcaacaggagctattcctttcgttgaaaatgttcctcttgaaggagttgaaagattccagcaacaattggaaattgttgatttgattgacaccgaggatattggaaatattcaatctaaaatcaacgaatgcattgaaaaggatcctggagctttagaggaagatcctattgttatggaagttgatgaagaaaaccaaaaattggttatcgttaatgatgatgctgaagattaa

SEQ ID NO: 7163 - DNA, 354 bp, Methanobrevibacter gottschalkii
  source 1..354: mol_type = genomic DNA
atgaataattgccaaagcagctccgtcaattggagtgaaaaagtcagaatcctggatgaaaaaattcgtcgtgaaatcggacttgaaggggaaagtgaagcaaaacatattctcatcaaggttcaaaccaaatccgccgaaaccatcgaaccagcgttcatagtaggagaggatgaaacattcctggatctatttgttttgtctccacaggaatccaatattatttccacagccgtcttgaaaaacaacatccaaagtatcggtgttattggaggaatgtctgctgaaaaaacggatgcatcggaaatccctgacaggccagcacttgatgatgcaagcacattgtaccaatag

SEQ ID NO: 7164 - DNA, 609 bp, Methanobrevibacter gottschalkii
  source 1..609: mol_type = genomic DNA
gtgaaacaaaaattaattgcaaaagcgcaagaattaagacaacacggttttacaaccggtgaaatcgctgacgaacttaatgtaagtatggacactgccagatggttgactcttcaaaaagcggaagaaaaaaccgaggtaccagtagactttgctattaattggaagagtattggtggaaattccacacgtttaagctatgtttcaggtgctttaagtgatatggcattatcccatggtgaagtagacactgttgtaggtattgcagtaagtggagtgccgtttgcaacagtgatggctgatttcattgaagacatgactggaattgacacatcaatagctattttccacccgaacaaacacagaaaaaatcaggactccagtgatgatgaaggtgcaataagcactaactttggaaccgttgaaggcaaaaaggttgttattgtagatgatgtcattactagtgggaaaacagtaagggaagtaattcatacagtaaaagacttaggtggggaaccaacttgcgtcaccgtacttattgataaagcagggctttctgaaattgaaggcattcctgtagaatctttaattaaaatcagtagattataa

SEQ ID NO: 7165 - DNA, 954 bp, Methanobrevibacter gottschalkii
  source 1..954: mol_type = genomic DNA
ttgagaactgtaaacgtaggagttattggtgtaggtgcaatgggtgaaaaccacgttcgtgtctatcacaaaatggaagaagcaaatttagtcgctgtaagtgatgtgagtgaaagagcacttaagaaaattgaaaaaaaatatggtgctacaggatatactgaatattctgaattacttgaaaatcccgaaatcgaagcagtaagcatatgtgttccaactacattccaccatgctgcagtaatggaagcaataaaacatggaaaacacatactggttgaaaaaccgattgcatttacattggaagaagcagaagaaatgattgcagctgctaaagaagccggagtgctgcttgcaacagggcatgttgaaagattcaatccagctgttagaaaagctaaggaacttattgatgatggagtaattggagatattgtaaccggatttgcaaaaagagtaggtccgctaccaccaagaattaaggatgttggtgtgtcaatcgatttagctatccatgacctggacattttgaattatttgtttgaagaggaaatcacacaggtttacggcactatgaacagcatattggatgactgtgactttgaagaccatgctgaaattatggttaatttcgataatgaatcaactggaattattgaagtaaactggttaaccccatacaaacgtagagaattggaacttacaggtaccgccggaatcatatctgtagattatatccagcagagtattgaggtttatggcaaatttgcccaggatatcgaaattaaacatgaagagcccttaaaaagtgaattaacttccttcttaaatgcagtagtgacaggaagcgaaccagaaattactggtgaagacggacttaaagctcttaaaatggttattgcagcaaacagatcctctaaagaacacaaaccaattagttttgatgaattataa

SEQ ID NO: 7166 - DNA, 870 bp, Methanobrevibacter gottschalkii
  source 1..870: mol_type = genomic DNA
atgattgttggaacacgcggaagtcagttagctttagctcaaactaaacaggtatgcgcctggttggaaaaaataactggtgaagctattgatttagaaattattaagacaaaaggagataaaattaccacttcacaattatacaatatggattcgaaaggtttgtttactaaagaattggatattgctcttttagaagaagaagtcgattttgctgttcacagttttaaagatttaccgactgaactaaatgaagatttggaaattgctgcagttcctaaacgtgaatctccaaatgaagtgcttatttcttcaaaaacctgggcggaacttggaccgggatccaaacttggaacaagcagccttagaagagaagcattttgcaatcattacgaaaaagaattcgaacttaaacctatcagaggaaatatagaaaccaggattgataaagcacttaatagtgatttggatgcaacaataatggctgaagcaggtcttaaaagattaaatcttacaaaatacattaaagaagtattcccaatagattatattacgccgcctgcaggccagggtgcacttgcaatcataactagaaaagactctgataaaaaagagattattcaaaagttaaatgatcatatttccatgcaagaagtgcttgcagagaagatggttttagaagagcttggtgtaggatgtcaatggcctattggagctattgctcgtgtgaataataaagaatttaaactttattcaatcttattaactaaacaaggagaaatccttaaaaaggaaacccagaaaggttctattaaagatgcggttgaacttggcagacgcattggagaacatttccaaaattatgtttaa

SEQ ID NO: 7167 - DNA, 1419 bp, Methanobrevibacter gottschalkii
  source 1..1419: mol_type = genomic DNA
atgaatcatcttgtcattgatttaacccacggaggagttaaaattgcaattagccttgcaaaaaaaggaaaaaatgtgcttgcatatgatatctacaacacgttaaatgacattgaagctaaaatgcttagtatttacaaaatagatttgatacagttaagtgatcttgcaagttttaagggagatatgaatattatctaccccatccatatgcctataagttttaaagacattgctaaacacaatcccgacctcaactacactttccaaacccaccatgaaattatttgcgaacttttagaggattggggaggtgattttccaaaagttgaagtgactggagttaaaggcaagacatccagcgtttttatgctcaaagagattttaattgatgagaatccgttgattttatcaagtcttggagctatgctttatgaagacagaaaaaaaatcatgctaaaacagaatatctcaatagctccggcaaatattaaagaaacaattgatcttgcatataaaatatccaatcccctctgtaaaatcgccggcggcattgctgaaagtgaaaacccacgcagatataactcggcaatttttgaatcatcattaggagttagcggtattggggatgttggcgtattattgaacattgctgaggattacccgattgcaaaaggtaaaagtagtgcaagtaaagctaaaagacaagtattcagatgcggaactgtagtttgtcaaaaagaagcatatgacacatactacaatgacataaagcatgataaagtcaacacgttttccctaagtgacgaaaattcaaatttatatctggatgatgttaaatacacaccagataagactaaaatggacatcatattcagccatgttgaaacaattaatggcaacataatttctggtgaaattagcatgaccgcttttgcacctggaaaacataacgtgagcaatgttttaggagctgtcttaactgcactaagtttggaaattccaaaagacaaaattataaacggaattgaaaattacaaaggaatccccggaagaacaaataaaaaacaaatcggaaatattactgtaattgaagaaatcaatcccggaatcaatactaaatcaattgaagagtcaataaacatgatatgtaatttaaatgactacctgatcgctgttggtggagactacggaataacttgtgaagaaattgatgaggagaaagtaagtgaacttctagacaatgtctcctgcaatattattttgacaggagatgttggaagttcgattcagaaaaaaatgtctaaaaaatgtcagttaattgaaaattacaatgatgtttacgatattgcattaaaaaacaataaaaatcttctttttatttatcggtcagattaccggaaattaaagcaaagatga

SEQ ID NO: 7168 - DNA, 1872 bp, Methanobrevibacter gottschalkii
  source 1..1872: mol_type = genomic DNA
atggatgcaaaagacaaacagattgcaaccgatttagcatatgaaattatccgtgaagtttcaagagtaattagaccctatgttggaaaacccgaatctggagagaaagtaaaaattggtgctgatggaactccaacatcattgattgacataattgcagaagataaaatgatcaatatcctaaaaaatgcacctgtattgtcatacatcgtcagtgaagaaatcggagaattaaaacttggccgtggcactaaaagaagcattaaacttactgatgaactcagacgtactgatttaaaagaagatgaaataccgaagttcatatttttagtcgatccaattgatgggaccaataatgcaattaaagaaattcctgcttttggaatttcaatagccgtctccagtgtcaatcaaggtcgtcttgcaactttaaatgatgttgaacttggttttataagtaatttcgccaatggtaatttttttgaagctgaaaaaggaaaaggatgttggctgaacaatgaagaagtccatcccagcaacatcataaacattagtgacatgacacttggaggatttacaaaaagcggcacatcacaagcttccaaattagtcgataatgctcgtcgtatgagagttttaggaagtgttgtattggaattgtcttatgttgccagcggaagatatgatgcatttttagaccttagaggaagcagaataattgatattgcagcatccaaattaattcttgaagaagcgggatgcatcattacaaacaaatacgggcagaaactaaacaatatactaagcatttatgaaaaaacaattattgtagctgccaataacataatactccataaacagatgattgatatcctaaatgacaatcagaccgactttattggaaaagtaggaatagtatccagaattgaccagacaagaccgattttatttgctgcaaaaattattgattatttactaacaaatggacgtgaagtaacaattgaagagggattagctcatagattaactgaactaaaagaaaaccccgaaatagataaaataatcaatgaagttaaagaaaaacatccggaaatggcggattcatttgaagatctcaatttaaatataaatttcaaacagttgggagaaaagatttttgactttgattgtgatatggcaataattctcggaggagacggaacactgctaagagcacagggaaaaatgaatcctgaaattccattattcggaataaatatgggaacagttggatttttaactgaaatagaaactccacatacatttgaagcgttgaattccattttaaaaggagattattataaagaaaaaagaagcaggcttgttgtttcacacgaaaacaaccaatacagtgtaatgaatgaagtagttgtaatgacaaacaaacctgcaaaaatgatgcattttgaaatacaagtggatggagaaataattgaagaagtaagagcagacggactgattatttcaacaccaagcggttcaacagcttacgcaatgtctgcaggaggaccgattgttgatcctaaagtagcgggtttcgttataataccaatttgcccatataaacttggagcaagaccattcgtagtatcggacagtagtgaaattacagtcaaattacttaaaaaaggtaaaactgcagtattcgttatcgacggtcaaatcaatgaagaggcggcatatgaagaagaaattaaatttaaaaaatccgacaaagacgcttacttcatccgtacttcaaccaaatacttctatgaaaaagttaaagataaattaagcgaaggtggaatcccaaaaatacaaggtgcaaataatgaatcatcttgtcattga

SEQ ID NO: 7169 - DNA, 462 bp, Methanobrevibacter gottschalkii
  source 1..462: mol_type = genomic DNA
atgaaaatagctattgtatctggaaaagatgaaggtccaagtaaattaaacgcatttgataatgccctaaccgatgctggaataggtgatgtgaacttaattaaagtatccagtatgcttgcaggcaatgcggaaattaataagttacctaaactcaaagcaggatctatggtgaactgtgttttatcagaagtgacatcagacaacccaggagatgaaataactgctgttattgcagtagctattggtgaagaattaggatgtgttgtagaaacaacaggaattaatgaagatccgaatgaacttattgaagaagcagaaatgatggtcaactatatgatggataaacgaggagtcaaaataaaaggggatttgatagttgaatcctccacagcaactgttcgtgaaatcgcatcagttgttgcatcagtcgtttatttaaaggatgaactaatagagtga

SEQ ID NO: 7170 - DNA, 354 bp, Methanobrevibacter gottschalkii
  source 1..354: mol_type = genomic DNA
atgattttaaataaatatttatcaatgattttatcggcatgttttttcatgctacttatgatgattgtatctgctgttacggttgtgttctttaatgggggttccatcccatatgtgggcattgtttttgttgtaattttttattttatggcacgcatgttctataattatttaagaaatgatgaactttacaaaaacaataaaaattacacaagcgatgcaccggatgaggaatatatgattaaaggtccaagagatgctaaaaaaatattcataatcttctgggtaataattgttctgattttggcagccgtctctttatggttatattcatttaatatgggttcggtctaa

SEQ ID NO: 7171 - DNA, 399 bp, Methanobrevibacter gottschalkii
  source 1..399: mol_type = genomic DNA
atgtcaacaaaagttgtagagattaaaacattaaaagttggaaagtacatcgttttaggtggagaagcttgtaagattatcagttacactacctcatctcctggtaaacacggagctgcaaaagcaagaattgaagcagtaggtgttttcgacaaccaaaaaagaagtttagtcaaaccagtggataacaaagtagatattcctatcatcgataaaagattagggcaagttatttctattcagggagctaatgttcaattaatggacatggaaaactatgatactcttgatttaccaatgcctgaagatttaaaagattccatcgttgaaggtattgaagtggagtacattgttgctttaggtaatatgaaaataatgagaataagaggatctaactag

SEQ ID NO: 7172 - DNA, 867 bp, Methanobrevibacter gottschalkii
  source 1..867: mol_type = genomic DNA
atgcttttaaatacatacgaaccatggaaattcgcattttccagtgaaaatgaaaatattaaagaaaattcattcgggataatcggagttccctttgacagcactacttcttatcactccggtgcacgttcgggaccaattgttgtaagggaagcatcatttggttttgaaaaatacaatactatttttaataaagaattaaacactgttttttatgattttggcgatgttaatgtagttcccggaaattgcagtaaaacttgccggataattgaagatacagtaaatgaattatcagacttgaaaattaaacctataataatcggcggagaacattcagcatcaatcggagctattaaggcactatctgaaaaatatgaaagattaacagtaatacacatggatgctcacagagaccttgcttttgatttcattggtgagaaatgttcacatgcaacagttatgagaagagctcatgaactgggagtcaatttagttcaaatcggaatcagatcatcttctaaagatgaagaggactttgtaaaatcaacctataatattcagacatttaaaaacaaggatgttcacaagcacatggatgcaattgaatattacttgacaaacattgatggacctatttatatttcagtagacatggatgtaattgatccggccatcgctcccagtgttggaaatccaactcccggaggattatttgtctctgaaatggaaacattacttaaaacattatcacataaaaatgtggtgggctttgatgtcgttgaaactgcaagtgataggctgggggataatactgcggtggttgcagctaaactgatttatgattttctaacattaatggattaa

SEQ ID NO: 7173 - DNA, 1221 bp, Methanobrevibacter gottschalkii
  source 1..1221: mol_type = genomic DNA
atgaataaaagaactattgagctttcaggccatattatcgattcattgactttaactaaaacaatgggcataatcatggacaaaggtggagaatttgacattcttgaaatagatgttggacgtaaaaaatcagatataagtcatgcaaaaattgaagtttcagcagattctcccgaattattggagtctattttagatgaattatctgtacttggtgctgcaattgatgaaattaaggaagtcaatctcgttgcatctgttaaagataaagttgctcctgaaggtttttattcatcatctaatcattcaactcatattttctatgatggggattggattcctgttgaagaaattgaaatggactgtttagtagttgttgatgaagatgaaaaacgtgcttttgtaaaaccaattgccgatgttaaggttggcgataaaatagtagttggtcttgatggggttaaagtaacaccacctcacagatcaagggacgaacaacaggtattcgagttcatgaacagtgaagtatcttctgaaaagcctttaatgaatttaattaagggtattgcaagtgaaatgaaagaaatcaaggctaaaggcggaaaaataggtattgtgggtggacctgctatcgtacacactggttccggcaaatatttggctgcacttgtaaaagaaggatacattgatgttataatggctggcaatgcacttgcaactcatgatattgagtcaaacttatttggtacttctttaggcattgaagttgaaacaggcaaaattgtggctcatggccatactcaccatatgagggcaattaacagaatcaatcgttccggttcgattaaaaatgcggttgaagatggaactttaactggaggaattatgtatgaatgcattaagaatgatgttccatatgttcttgcaggttccatccgtgatgacggaccgcttcctgatgtcataactgatactgcagaatcacaaaagctgatgaggcattatgcccaggaagttgacatggtgatcatgattgcaacaatgcttcactcaattgcaaccggcaacttactcccttcaagggtaaaaagtatttgtgtggatattaatccatccactgttactaagttatccgataggggaagtgcacaggttgttggtattgtaactgatattggaacattcctaccacttctctataacgctttgcatgaggaatag

SEQ ID NO: 7174 - DNA, 1716 bp, Methanobrevibacter gottschalkii
  source 1..1716: mol_type = genomic DNA
atggaatttacagcatacattcttgatgtattgactgattcggcatatcccgcaagaattaaaattgaagatggtatttttaaagagattactccaatttctgccgactgtgaaattgaattggatgtggaaggtttattgcttccgggttttattgattcacatattcatattgaaagttcaatgcttactccggcacaatttgctaaaattgcagtaatgcacggcactacatctgttgtatgtgatcctcatgaaatagctaatgtttgtggaattgagggtattgaattcatgattgaaaatgcaagtcaggttccatttaatttttatttttcagcaccgtcctgtgttcctgccacttcatttgaaacatctggtgctgttctggattctgaggatattgaatttctactgaaaaaagatgaagttgtcgcattaggggaaatgatgaatttccctggtgttattgatggtgatgtggaagttatagaaaaacttgaattggctagaaaatataaaaaaccgattgacggtcatgcaccactgctttcaggtaaagaattggataaataccttgagcaatatataattactgaccatgaatgcagcaatttctctgaagctattgaaaaaaagcagaaaggtatgaaaataatggttcgtgatggatcttctgctaaaaatatggaggctctatttgatttttcacaacgtattgaatacttgagaaatcaggatagctttggcataattccgtctgaagttctggagagaagaattcactcacctatttttgattttattgtaagtgatgacaaacaccctaatgatctgattaaaggtcatctgaataaatctgttaaaaaagcagcagagttgggtgtggacattatcaaagctattgaaatggtcacaataaatcccgcagcgcattatggtttggaagcaggttctattgtaaccggtgcaaaagcagattttgtcgtaatagataatttaatcgattttaacattctaaaaacatacgttgcaggcagatgtgtctttgatggtgaaaaggttttattcgatgctcctgaagttgatgcacgaaattcaatcaaaacaactaaaaagactgaagaggactttgaagtctattttgatggtgatgaatgtgaagttaatgttatagaatgttataatggtgaattattaacatccaaatctggtgcaaatttaaaagttataaatggagtagttaagcctgatatctatgatgatattctgaaaatatctgtagttgagagatatggcaaaaacaacatgaccaatgcttttattaaaggctttggtcttaaaaaaggagctattgcatcatcagttgctcatgactcccataatattattgttgttggatatgactcagcaatgatggctgaagctgtaaatacaatcattgaaaacaaagggggatttgcaatagcaagtgaagacttcagtgaatcactctctcttccgattgcaggacttatgagtaatgaagatgcattcgttgttgcaaataaattggaagtcttacataaaatgtctcaggcattaggatgtaaacttgactccccattcatgacaatggcattcatggcattacttgttattccatctcttaaaatatctgatttgggattatttgatggagattcgtttgaatttattgatgttattaaaaattag

SEQ ID NO: 7175 - DNA, 627 bp, Methanobrevibacter gottschalkii
  source 1..627: mol_type = genomic DNA
atgaaaacagatttggcgttaattggaatggaaaaaggaagacaatacgaaacaattattacaacaaaaaattgtgagaatatcaagaatgccgcaccaattggtgtaatttgtgcaggcagagataaaattttgaaccgtatttttaaaggaagtcaaactttagaaaatattatctctcaaagagagtttattgtaaatattactcataatccggagttatttactgtatcaaccattggaaaattacctcaagattatttcagcgaagacaattccctaaaatgtgcggatgcatattttaaatgtgaagtaattagcctaacagatgccataaaacaaagcgatcctattaaaaagaatggtgcagctgttgtcattaaatcaaaagtcacacaattgatgataaacaaacctactcaagccatgaacagaggatttggttatgtaattgaatcactggctgatttaagccgttttgatatggctggagaagataaaaaagaggaatatcttaaaaaattcagagaagcaaaccgtgtagtgacaaaagtggggtatagggaggatataaaagcaatgggtgaaataaaaaaagaattaataagaaaaggttataaaccctaa

SEQ ID NO: 7176 - DNA, 1011 bp, Methanobrevibacter gottschalkii
  source 1..1011: mol_type = genomic DNA
atgaactataaaatgtatgatgaaatgatggaacaaccagaatcgctcagtaaaacttttaaatctgagttatctaaaatggaagatgtttccaaattagtttctgatgctgataaagtatatttaattggttgtggtagttcaatttcaacttgttatagtgtacgtgatgcaattcgtatgtctagtactaatattaatattgaggtatttactggttatgaattttattacaataagaaattagttgaaaatgagaattctgttgcgatatttacctctcaatccggtgaaacagccgatacattggcatctcttagaagatgtaatgatttgggtattcatacagtatcaatttcaaacgaatctgaaagttccatgaccaaagaagctattacttcaattataactagatgtgaaactgaaactgcaattttaggtactaaaacttacattactcaattggcttgtctttatcagatattatttgccgttagtgattatgaaaataaaactgaattgttagcagagttacgtgacttgcctaaaactttagaaaaattattggaatcaactgaatatgaaaataaagctttagctcaggaatttaaagatgaggatatattatattgtttaggtagtggccctaactttggtcttgcatataaactggcaatgactatgcttatggaaggagcaattaaacatgcctgcccattgtatgctgctgaatttagacatggactaattgaacgtgctgaaaaggatgttccagctatatttttaaaatcaggtattgaatctgatgaagtaacagataaagctattgaattttctaaaaatttagaattaaaatatcttgtatatgatctggatagttatgcgggattggatagattactgtctccatttgtattggtaattccattagaatggtttgtatattatttggcacactttaatggtgaagaccctggtgcaacaaggcacatcggcaaagtcagatactaa

SEQ ID NO: 7177 - DNA, 582 bp, Methanobrevibacter gottschalkii
  source 1..582: mol_type = genomic DNA
atggtaaaatctgaaacaattgatgctgaattcagtgaaaaaaaagaaaaatttgatgaaaagaaagaagaaacaaaggaaagaatcaatgaaacaaaagaaaaatttgatgaaaaaaaagaaaaaggaaaaaacattgcagataatgtaatcaatgatttctacaaaagtattgatgaattcaaagacagtattaaaaacatgcaaaaaactgccgaccaaagatattcagaatacaaaaagtcaaccgttcagactattgacattgaccttgtagaaaccaaagagatgtatttcatcaaagcggcagttccaggggttacaaaagaagatgtttcaatagaagctggtgacaatgacctcactattgaaactacattcaaaccatacatcgaagagtttgatgaagaagaaggtgctgaagtaattgtttccgccatcaaatccggcagatgtgttaaaactgtaagattctccaacagtattgacattgaaaagattactgcaaaattcacaaacggaattgttaaaataaccattcctaaattaattataccaaaacataaagtaaatgtagaataa

SEQ ID NO: 7178 - DNA, 1164 bp, Methanobrevibacter gottschalkii
  source 1..1164: mol_type = genomic DNA
atgaaacataatccttttagaaaacggaccggaatattaccctcttatttcacaggtcgtgaaaacgaattaaatgaacttaatgaaatatactgctcaacaaaaagaggaattcccggccatttaatattatacggaccgaaaggcattggaaaaacatcattgttattgaaatttcaagatgaaatatccaattttgatgatgtatattccgttagaatacctttaatggaaggaaattttgatgatatctacacattaataatagaaaaatgttccgatgctttaaacattaacattggtcatttctgggaaaaaataaattcattaggcattaacataccgctgattggaggcatatcattttcacgtgaaattccaaaaaccagccctgctgttgcctttgaaaaaattttaaatgtaatttatgatgaactagattcagacaatcctgtgttaattctattgcttgatgatcttcaaagaattataggcgatgacgaaacaatgaaaatattgagcatattgcagaatgcacttgtagaattaaatttacaaggaaaaaatataatgtttgtagctacaggttctgaagacattttctacaaaatacaagacaaacttgactcagcagtacggatattcgaaccttatttaatcggacccctatcctatgatgaattatgtgaagcaattaatgttccaaacaaaaaacagaatgtaagttttgaagaagatgttttaaaggaaatatactacttatccaatggaatcccatattacatgcaaattttagcttacagttgctttgaagaaataaatgcagacaataaagtaaccatgactgaatttaaaaaagcatctgtacattccttaaatattctagctcaacgcgaatttaaagtattgtttagcaaatccactacagaagagcgaaaaatactatgtttgatggctgaaagtgacaaaacagttttatcatattcatatatcaaagataatgctaatctaaattcagaaccatcagcattattaaagaatttgatcaataaaaacatgataattaaaccatcaagaggaaaatacaaattaaaaaacaatcttttcaaattatacttgcaaaatctgaggataaatcaggatactggtttaatcaatgaataa

SEQ ID NO: 7179 - DNA, 1029 bp, Methanobrevibacter gottschalkii
  source 1..1029: mol_type = genomic DNA
atgatgattccaacaatacctacaccacaagaattacttgataaaggattcagcagaggtaaaaaacaagcagacttattaagaggtcaaaaaatacctaaacatctgaaaggtaaaagaattgaggaaagaagagtggtaacctcttgtcaagttattaaagataaattaaaatcaattttagatgcagttcctgaaattgaaagtttacatcccttttatcaggattatattgatattacagttggtgtggacgatatgaaacaggcattaggtgctcttaactgggcatatggtataataacccaacttgaaaaggaatatggttcaaaaattaggaaaaatccttctgaaagagcaactgctattcaaaaacaagcttatggaagaattgcatctgttgtaaacaaaatcaaaaaagacttagatttcctagactttgcaaaacagaatttaagaaatatgccaacaattgattttgatgccactacaattgttattgccggttttcctaatgtaggtaagtcaacattgctcagacagattacaggagcagatccccaagttgcaaattatccatttacaacaaaaggtatccagattgggcatactgaaagacactggaaaaatatccaaattattgatacaccgggacttcttgacaggcctgttttagaaatgaatgatattgaaatgaatgctattgttgcactagaacatttagctgatgcaatattatttatctttgatggatctgagacttgcggattccacctggacaatcaatacaatcttttaaaacagatagaaaaaatattttcagaaattccagtaatatatttatttaacaaaatggacttggttgaagatgcagaataccttaaagaatacattgatgatgaagaaaattcaatatttatatcagcaatcgaaggagaaggtatagataaaattaatgcgaaaattgatagaattaagaaaatagatcgcacccctgctgaagaagaagatgaagaaggatattactaa

SEQ ID NO: 7180 - DNA, 3516 bp, Methanobrevibacter gottschalkii
  source 1..3516: mol_type = genomic DNA
atgttaaaattagaatcaatagaatcaagcatatttgaggagctatcgaactcaataatttattttcaatatggtattaatataatttcgactggactaaatcgggaaggaaaacctataaaatgtcctatagatgcaattggaactataaaaaatgatgataaaactgagtttgtatttattgaagcaactacaacacaagttaatagtttaaaagataaatggttaagtaaatctgatgataaacctggtgacataattaaaacatataaaaaggcaaaagaattttttaatctaaataaaaattcttcttttaaactatttttaatgacaaatagagatttatctggggataaaggtttagatttaataacagaggttgaaaatgaaaattttgatattcctttaaaaattgaaattatggaacaagggtcaataaaacaattcttagattatgatagtgatggacaatatttgagaaaaaaatttctacaaattgatgttgaaaggttatctaaaccgttgttgcataaaatttgtgatgaaaacctgcaagcatatgaaaatttcattaacacaacgggatttaataatttaattgaaagagaggagctaccttcaattgaaaaacatatcagtaataataatttgtcttttttaattggagaatctggatatggcaaaagtgtaatttcttttcaaatactcaaaagacatattaataatggaggatatggtttgtggatatctgaagaatttttaaaaaattcttctaatttaaattatacattagatgaacttttacatcaatattgtccaaaattagaaaaaaatagtggatttaaagcattaaactttaattccaatgataattttttattgatttttgatgatttgaataggagtgaaaatcctaaaaaattaattgataaaatcattaattggtcgaaaaatattaaatcgggtaaagaaaatactgatgaaaattatcatgataaaatccggcttatttgtccaatttggcaaaaaaatatgaaaaattatggtagtaatctagataacgattcaaatataatcatagaaaaactaaaagatgaagatgggataaaaattttaaaaaacacagccaaagacaaaggcattgtcttgtctgatttagaagtaaaaaattatctaaaaaaattagataatgatccattttatattggtctttttatctcagaattaaataaattcaaaaattgggatgatttaatcaataatgcatttcaaattttcttaaatcgaaaatttgaagaattagatgaagaagaatttttacctcaagattatgaaagaattctattaaaattatctcaaaatatgttggaaaattatatattaaccccaaatctacttgaaattgattcatggtttgtcagtgacagagataaaaaaattttaagaatattaattaaagatagaaaaatatgttatttaaataataatcaaaacttatattttatacatgataggataaaattttattatttgattagcgcatgtacaaaaataattaatgataatcctcaatctgaaatattcaaggaacctttctatgcagagataattggtgcttcattgtataatattggtaaaaataaaaaatttatagaatttctagcaaacaataaccttttagctctttttgcatccataaaatatattgatgatgcaaatgaaaactatgaacaaattttaggaatattgactgaatggtcaaatgaaaaacatgaatcatatccaagctttcaagaagaagttgtcaaaactttatatacttatgattctgaattggttgtaactctattgggcaatattaattctctttttaccagtattccttgttttagaaatggatcaacaatacatggtataaaaaaagcactaaatatatttggatacaattatccattatttaagcagacaatagaacatgttaaaattcattataaatctaaaataattgaagatataaaaagaatattgtcgtctgataaactagatgatgatttattatgcggtacctttttattagcaggatatttaggatttgaagaattagaagaaatcataaaatcttcagttaagttatttgaaattaaagaagataatttatatattatcctttttgcagcatttaggtgcataaataatgatatggattttattaagaatcttttagaaaaatgggacatgtttggaaaaaaagatgatgaaattcgatttccatttattgaagaactaagattaacttttagagattaccctgtaactgataatgttttaaattacttaggctttaactttcaggaattttctaatataaaacattcaatatggtatatttgcagtgaattaaataaaccactatcatttaaaatgactttagattatctttccgataatgagtatttatttgatatacttccattttttagaagaattcagatatcttcagaatctagaatttttttagaaaactattataaaaaagaagatataaaaggtcattctaaaaaatatgcgtttagattatgggcaatgaattgtaatgaaaatgatcttccaaaattacaaaaaattgacaaagataacattcttttttctgagtctctaatcactagaattagattaggtgacttaacggcgttaaattcatttattaaaaatttcgatgaaaatgtggttttgaatgaaatccataatgtttggaatgatgaggcaaaattatttgttgaaaaatgttttaaagatatggaacttaatgaaaataaagaaattcaggatggatatgactatgtgcatttaatgcaatgtcttgcaaaaataccgttagaagatgcagaatattacataaaacaatattgggataaaattaaatattacagaatattcatacaattaaacttttatttatgcacaaatttaagcattggattaaataatgagttatttgttgaaattaaaccagatgaaacattgtttgaacattttacaataaatttcttatatatggaaggatatgataaattttcaacagagtctcattttaatgaaataatacaatatttggtttattttaaaaattctgatcttgatttaatatttagaaaagctgaagaattagggtattgtcgatggataagaaaagcatgtcgaaatttagataaaaatcaattttctaaatactgtaaaacagataaaaacatagtttctgatatggaattgtatgataattatagtttttggcaaataaattttgaaaataactgcttaaataaaaataggataaataatatattaagactatatttaaataataatcaaaatattgaatcatttattaatgttgcaaaatttattaaagaaaatggaaatcgtgatgatttaaaaatattatttgagtctaatattaaagaagataatatgctgtatgatgttgagtttagtgttaaatgcagaactttagattga

SEQ ID NO: 7181 - DNA, 1311 bp, Methanobrevibacter gottschalkii
  source 1..1311: mol_type = genomic DNA
atgattattatgggaattactgattatattaaaactagattattgaataatcgtgtggagcagtataacactaagcgcagctattgtggtgaagatgaaagacaacctagaactgatggaatcaacactggccttgacttgcctgatgcacttccgccagttattaataagacaataactaatgctcgttatgctgttaaacttgacggttacacttcaggtatcttgaaaaatagaattgataaagcaaatgttaatatggtgcttgttgataaggaaaataaattatctcaagagcagaagttgactttaattttgtgggcgagaaaaattgacatttctcaagtagctaaaaatattctgcaaggtggaatggttgatggggaaggtttaattaaacctgtacaacgttgggataaaagcattggcaaatacattaaaccggtatttttagaaataggcgcacacggttatggattgaaaaaagaatttaatgatgataatgaagtgcagctatatcttcatgaaatgcctaaggatattgttaatggatctccggaagagtttgataattatgttagtgtcgaagagggaacattaacggtcaagtacgaacctgaagaagttattaacttcatgtataatgagatatactgtgaagctcaaagcattatcctaaattgccttgatgatatataccacaagtgcaatttggaacgaaatcaagtggaacgtatcaacaaggataatattattgaagtaaagcctgcgatggatgcaaacggccaaccttacatcaccgaactttcaagcaccgctaaggaaaatctttatgctgattatggaactactgccggaagtaatgtagctattgtgcctccaggaattgaaagtaaaatccttggtggtaacaactaccagtctgactatacaagacaaacagaaatctttaggaataatatcttaaggacttttgtaactcctcagtctcaagcaggtaatgagaagtctaatcagaacgttgctgagtacattaacgattcagctattacaggattcattgttaatgtggccaacgaccagaaatgggtgttaaagtattgcaatcagctattgaacttgcagttggagttaatgggcatcagtgaaactttagatatatatttcagctattcaagagatgatgttttaagatacattatggaactttcttccgaaggtgatgaaatctataagaattatctcagtaactttgaagaagagcagcctgtcggtgaaaggattttaagtgaaaatggtgtggaggtataa

SEQ ID NO: 7182 - DNA, 1899 bp, Methanobrevibacter gottschalkii
  source 1..1899: mol_type = genomic DNA
atgaaagaaaaaatgggaatatatcaaagatataatttaggtcctcaacattatcacagttattttgagttcgatttcaagaataaaaaggcacaactcatatctcaagacattacagaagatttcagaaaagataatgctttaatttatactgatgattctaatttaaaaattgcaaattcccttttaattgcagaagaaaataaaatttttgatttgaatgaagatgattgtcaaaaactttattctgaatttgataaaattaaatattctcatgatgaagaaattcctggaatctggcaattgagtaacattacatttagtgaaaaaaatttttatgatgatgcacctgaaatatttaaaattcatgaaagcaattatcaatatgtcaataattatccaaaaaattggattccattaggcaatttaattattgatttattgggctttgatttgttaaatattaatttaaataatttaatcactccattatattataatataacttcagaaggggtttatgaaaaacaaacaaataataaactgaatttaaaaaaattaaattttaatattgtttcttttgaagaaccattcaatccttttaatttttctatcgattcagaagatagtgattttgaaaagattattgaactattggaagattatggcgtttataaatggtatgataaagattacgctgaaaatataattgaaagcgatgatttcaatgattttaaaggaaattcatggttcatcgaattaatatttgaaaatggtagagttttgaatttaagaggagataatgcttatccagacacttatattcatttgggaaacgaaattttaaactttaaagaggatttgttaagaattaatgaaatagataaagaacagcaaaatttcattaaatcctttggtgaaaataaattagctaaaaaaaggaatataatcaaaaaaattgaaatttctcaaactattcttttagatgatagaaaacattatgagttcactttagattgtgaaaattctgttattataccttatgataattatgatctttatgaacctcgtgaacacatttctagagacttatctaaaaagaattattctgtttcaaaattattctatgaaaatattgtcaaagaagaaatcaaattagatgaacaaaaattagataatttcttaaatgaaattaatgaattaaaattcattgatgagaagccacacatgtggttttatgataaaaattattatcagaatcttatcactattcacactcccatgggtgagaaatcatataatttaactaacaactatgagctttggaaaaaattaggtagtttatttgaagaattgctaggctttgatgtattaaatattaaaaactttaaaaatataataaatccatttgattatgatatttgtaatgatggtgtttatgataaagaaacgggggataaattatcattagaatatattgaatatgggcatgaggcagttttacattttggtataggttataatatctatgttgatttattaaaaggaaccacctccggtttaattgaaaaagatgatttaagtaatgatgaaattgaaaaaatagtatctcttcttgaaaagaaccgtgtgtatgaatgggtttttgatgaattttggaataaagccatatatcataaatggtgtggttttgatggatataattggtatttaagtttagtttttgaaggaaataaagttttaaatattggtgatgggaatgattatcccgatacttttgtcaacttggcagaagaggttatagagttcagtggtaaagatatacttaaattaaaaacagtatatgaagatgatattaaaatctataaaaaatatgctgaattacatttaaacggttaa

SEQ ID NO: 7183 - DNA, 954 bp, Methanobrevibacter gottschalkii
  source 1..954: mol_type = genomic DNA
atgcaatgttataattgtaacggtatttataatgattatttaagctattgtccatattgcggtattgagaaagtagaatttaatgtatgtagcaattgtgaagaaaaacttactaaagatattttagtttgtccaaaatgtggtggaaaaccaattgaagaaacaaacgaaatgaaatctgataggttgaatagagaaggtttgatgcatggtatgacaagtagtcccagtgattattttaatgaagctataaagtttaataaatataatattgatgcttgggtgaataaatcagaatttttgaatgatcgcacaatgcataaagctaaaaaatgttgtgatgcaggtttaaaaattaataaagataatatgaagttattattatctaaatcaaaagctcttaaaaaagatgaacgtaggagcgatgagaataatgcggagattatcttaaataatcttttaaaaagatgtaatcaagaacttcaagaaaatgaattaaatgaagagatttggattttgaaaggcgaagtattaaatgaacttgataaaaaagaagatgcaatcgaatgttattctaaagctcttgaaataaatcctaaaaatgaagaattatggatacgaaaagcattcttatgttatttaaataatgattattattgtgaaatagagtcttacaaaaaagctattgaattgaatccaacaaatgagaaatactatgaaaaaattggagatgtttatcatctttatattcatgataatgaaaaggcaattgaatattataataaatctttagaactaaatcctgataataaacagctatgggatacaaaagggcgtttagaaaaagaaattggaaaatatgaagaagcactaaaaagttttactgtagatgctgaattaaatcctatcatgatggagcattattatctaaagcagaagtattttgtgaattaa

SEQ ID NO: 7184 - DNA, 237 bp, Methanobrevibacter gottschalkii
  source 1..237: mol_type = genomic DNA
atgatgaggcatgaactttttgaagttggatcctatgattattctgacttggatgatagacttgacaaaccggtaatatggagcgaagatgatctaaagctaatagctgaaaactataggggaggaattccgttaacttcagagcatgacaatatctacgtaggcatcggaaacaatattgaatatgagaaaggaaagctattcattgaagttccggacgaactggatatggaatga

SEQ ID NO: 7185 - DNA, 663 bp, Methanobrevibacter gottschalkii
  source 1..663: mol_type = genomic DNA
atgagcttaatagatgtcggtgtaactaaaaaccctagaaaaattaccttattgaattctgaaataaccggaaatactggtgcaacaggaaatccaaatcccgcaccacaaggacaacctcagcctgcacctagcaaagatgctaatgtcgcaaccagcttgcttttagaaaagcttcaaggcaaggatgtagagattggaaagcttcaggatgaaataaataatctaaaagaagaatctaaaaaatatgatgaaattaaaaaagctattgaagaaaataaggaatttatagattctaaagatgatattctaaaagaattatctgaactgcgaaaagctgaaaatgaaaggaaaataaaagaatacgaagctaaatataacttcaactataatgaaaacgcccaagataaagagataattgataagctattatctggtgatgttgatatggaattaatggaaaagctggctgaaagaagaattaaaattgaagctagtaatgatggttcaacacctggtggtcgcaacccttcaaactccggtgatgtaggtgaaaccggtgaaaccggcagcactggaaatgaagatgcaccatcttttacaactcgtgaagaatataataagatattgaaagatatgggttttaatcgtaccagaatttag

SEQ ID NO: 7186 - DNA, 1959 bp, Methanobrevibacter gottschalkii
  source 1..1959: mol_type = genomic DNA
gtggtttcaaataatatttttatctcaccaattgagtttaaagattgggaaaattggaaaaacaaaataaataattcaaatgataatgaagagctatgccatattgcagaaacagatcgtgaatggtatattcgtgctttagctgttaataaaataaatgatgaatcaatattggcagatattgcaattaataattctaattcgtatatatgtaggttagcagttagtaaagttcaaaatgatgaattattaaaagagattgtagataaatctccaatatatgaagtttgggaggatgcattatctcagattgatgatgaatatatattaatggattttgcagaaaatggaagagatttccatattaaatggcatgcaattaaaaaaattaaaaatgaaaatttgctagttaattttgttaaaaaaagattaaaacatacacgaaaagattttatagacaaatccaaatcatttgatgaatcacgtgaatattcattatgtacgattgctgtagaaaacattcatgatgagtcattattaaaagaaattgtaataaatgattataatcaagctatgggcattgaagctctaaaaaatatacataatcaagaatttttaattgatgtggctttaaataattatgatgtgcattataagttatctgcgataagaaatattacaaatgatgatgttttaatagatattgcaaaaaatcaccctcaacgatttgttcgagaaaaagctatagaaaaaatatctaatcaagctattgcaacagatataatcgcaaatgatcatgaaattgaagtagataaattagatattcaacatattgatgatagtttattatttaatcttgttaaaaaagataataattggcttcgcaggacatattttgttaaagctattcaaaatacagattatttaaaagaagtagtatgtaatgatgtggatagtcatgtttgtaaagctgccgttgaaaaaattcatgatgagtcatttttaaaagatttagttaatcgtgattttagttcagaagcatttgcttgggatgtaataccggctgctttaaaaaatattcatgatgattcatttttaaaagatattgttaacaatactaaatacggccgttatgctttaaaaaatatcactgatgaatcttttttaatccaaattgcactaaattgtcgtgactctcattgtagaagtgaagcgttggaaaatatctatgatgaatcaattttaactcaaattgctttaactgatcctcagatgcatgttagaagaaaagcagtaagtaaaatctctaatgattttgcattaattaatatttccattatggatcctggttttcaagaatatgatagaccatattgtgtaatttatttggttcgccaagaggcagagtccagattaaaagtattacttgaaaatcctgatataaaaactaatactgaatatgttgatgttattcaaagaattagatatgaacttgatgagaaaagaaaaacatcaactcaaaaaggaattatacatataccttataatgaaatgaaagattttactcaaaataaaacaataataaaagagaaaaataaaaaaagaaagattacaaaaaacaaaagggatgaaaaatctaatctggaagtcgaaattaataaattacttgaaaattataaaaatgatgtattaattactattatatcatttaataataaaagtttatttaaaaagggttctatttttaatattgtaaaagaaccagataatccatatgatatggaggccattgctgttaaatctgataatataacaatagcatatgttgcaaatagtgttcgtactgttgtaaaaggtactatgagtgcaggtagaatttatgataaatttggtgaagattgtgaaattgaagttatttttgttagagatcaaattatagcaaaattaatctttgattag

SEQ ID NO: 7187 - DNA, 273 bp, Methanobrevibacter gottschalkii
  source 1..273: mol_type = genomic DNA
ttgattatccattttactagacaaaaccattatgttataaagataataggtaaattaagttattatattaatgattcacaggatgaaaaaggcattaaaattgaaaaattaaaaaataaaatgaggaattatggattgaatgatttagaatttgatgcattaatcaacaaattaattgatattggttatctcaataaatctaatgaatgcaatattagtttatgtgaggataattactattcattatatgatgttttaaccttgcacaaataa

SEQ ID NO: 7188 - DNA, 1017 bp, Methanobrevibacter gottschalkii
  source 1..1017: mol_type = genomic DNA
atgttaaacattattaacaaaaatcaggaaattaaagaggaatttttttatttggaaaggaaagctctgagattttataaaagaaaaaaatataaacaatcttttgaatattataaaaaggttttaaaagccagtaacgaatttaaaaataattccaatgaatcacatttcaaatggtatgatgaaatactatcaaactgtttgaaaaaatactctgacaattacgatgaattttttaaatgcatttattcaatgaatatagaaaattatgatgcatggtttgataaagcaaaattatatggcaataataataagcgcaatgaagcaatcatatactgttataaattattaaagattagaccagatgatttggatcttttagagttcacaggccataacttatgtttttcacatagatatgatgaatctttgaaaatttatgatattgcattaagtatagataaaaataacaaagatcttattcaagacaaatggtatgtatattatacttcagacagaatatacgatacattagaattctgtaaaaatttagaaaatactgatgatattacttccacagattatcaggcattaggttttagatttgaggaaaaagaagaatatgaaactgctttatggtgttataaaaaaggatttgaaattgaagaaactgatcataaagagttcgatactgactctgttgatgctattaaacgcatgctacttaaattatctattgatgactattcatacattaatgaattttatcttgaatggatttcaaaaatagaacataaatttgaaactacaaactgttcaaaatgtggtggaaaattaactccgataatttatgggctcgttgtaggtgatgaagtatttgaagaacaagaaaagggcaatattattgttggtggatgttccgttgatgaatctagtcctacacattattgtaaaaaatgcgatgaagaatttaactttagattcaatggattaaaaattgattatccattttactag

SEQ ID NO: 7189 - DNA, 1668 bp, Methanobrevibacter gottschalkii
  source 1..1668: mol_type = genomic DNA
atgacattgcagaaaaaattacaaatcaatattgtcatgagcaattacaaccagaggagcagtagctattcatccggccatgattatatcttcctggataatttagccagcagttcttactccaattatttcagaagtgatttgaaaaacctgaagatcaaaacttccaatggtactgaatgtcaggtagtatacattccatcttatggatcacaaggcgcagcaatacttgcaagggtttctgttggtcagatttcacaaaacacaaagctactcttggacgttcatgatacaggaacagcattcgcaagcactttatcaactggtaatgaagttttaatgtttgatgcaaataatgatacatactcacaatttttcatgaactactccggtttatcatcaaacaatgactcaacagatgggggccaatttttaagagctagatttgttcctaacctcgaaggaacttctccaactgatttgtttaccacatttgcttcaggccaaccattagccaacaatcgtgttgttgtagccagattcaaatatattaacggtaatgtttttgttaatgataatgcaacatatcacggttcaaccattggaggcatcatgatgcaaattgatggaactctctcacctgatgagtctaatgtaaaggctactgtcaactattggggtggggaaaaagattattgcatgttcactggtgctaagactttagtattggccagttcatttgatgcttacaatcagggaagtgatgaagagggaaactggaaacaatatcattttcataatcgtgttggaacaggaacatcgaatacatcagattatattgaagggttcagcagaaataatccaactaaaatttatcttgggtgttttaaaatgattattgattatgatgtaaattcaacaatcggacatggccgtggatatccaacaggccttgaacatacagagaaaatggatgtaatagcttgtcttttagatgagggcgaaagaacatatgttaatgatgaacatactgcttggatttgttccaatcaatgtgcagtcggcgatatggtaactttagatatgtcttcaacaatggaacatacaattgttagaaaagctcaagcaggagaattggctttcggttatcttttaggtaaagtccaggttaagacttcaggattaacattagttgctgtggccgtgttaggtgatgtctttagattaaaactcaaaaggccagtggctgaagacatattgccgaatacaagaatctatattgacagtgccggtgaatgcaatccggttgaaggccatgacttaaggctgttgtcaatcgttaatcttcaaaataatgaggatactgattacattagagtttatcgtcagatgtctgaggttgaaatgtatcgggaatctcagaactgtattgatcttggagattgcagttttgaacaggatgagataactcacgttgttaatatgatcgtgccttcagagtcaaacatcatggcccaggcaaattatgtaaaggatgcagacggtgtcacctattgtgagcttcctgatgtagctattgtcaataacgtccgtttcgtatgggaagacaacaaactctacatggaatgggaaggatgtgatgatggccaaaatgtatattttatataa

SEQ ID NO: 7190 - DNA, 192 bp, Methanobrevibacter gottschalkii
  source 1..192: mol_type = genomic DNA
atgaccataaggaaactggtaggaactctagaaaacaaaggcccgtacattgaccaatcaacaggccactggttttactggaacggcactagatatgttgatagtggctatccttacgctgtaaaactcattattgaatttaaaatcgaaaatggaatattatattactcaattacttgggaggcacaatga

SEQ ID NO: 7191 - DNA, 150 bp, Methanobrevibacter gottschalkii
  source 1..150: mol_type = genomic DNA
atgaaatacataaaatactttgaaacaatcgaagagtacgaatcctggatgaaagtagaagaaaatgctgaagaggtatatcaaagtgaagagaagattcttgttgatggagtaatcatcagccacacatacaaagaggaggaaatttaa

SEQ ID NO: 7192 - DNA, 252 bp, Methanobrevibacter gottschalkii
  source 1..252: mol_type = genomic DNA
atgatttacgaattcctggaagcaaacagaaaggacattgacattttaacttcatttcttgttacagctattccaattgtcatgctctattcagaagcattaggaattactgaaaatacaattccttactgcattctcatgataatcttaggaatagccagtcattacgcaagcaggataagaggcgaaggagatgttgaagacgccaaacaaaaagctaaaagagtattgggattccctgaagaaaaataa

SEQ ID NO: 7193 - DNA, 270 bp, Methanobrevibacter gottschalkii
  source 1..270: mol_type = genomic DNA
atgaacaaaataaaaaagaagatattcatatgcaactttaccaaaacaatttcaagtgccgttttaacagctgtagccatcaacatcataatgaccaatgcaacaaagtatgctttaattgaaggattattgccgtttacattagctattgttattgttggcctaatcgatttgtatgagtatagatgtgagcgtgaagacaagattaatttggatgaactggaagagcgaatagaaaaactggaaggtaatgtggatggagaaaggtaa

SEQ ID NO: 7194 - DNA, 357 bp, Methanobrevibacter gottschalkii
  source 1..357: mol_type = genomic DNA
atgtggatggagaaaggtaagattctaattgcagttccgacatttgaaaatataaaaccgcaatgcttcaaaagcatctatgggctgacaaatcctaaggattttaatctttatttcgattatgtgaaaggttatgattgtgcacgtgcaagaaacgaaatagcaaaacttgcaatcaaacatgactttgactatgtgctgatggtagattcagatgttagtgttcaaaaggatgctcttgttaagctattggaatgtgaaaccgacattgctttaggatggtatttcaagaagagaacaagaacagatgagtctgttatctttgattttggaaaagactatagtaatcaacgctga

SEQ ID NO: 7195 - DNA, 603 bp, Methanobrevibacter gottschalkii
  source 1..603: mol_type = genomic DNA
atgatgaaatttatgatcaccatcaccatcaataatatcgaaaacaaagaattaaaatcaaaattaaaaaaaataatcaataatgatgaattactcctagaaaacatattaaatacaataaataaagaaaagaactataataaattattattaacatttaaaaacttgtctgaaaaaaataatacaattaaaaaattatacgaaagacttgaaaaaaatccgctcagttttaaaacaaaaagtaaatcagttctcgaaaatcttcaaaaaggaatgttattagcatttttctcagataatgaactaaaacatgaattaatcctagaaaaaccaatagcagttattttagacaattacagcgtccaccatgcaatatttttcacagaattatgcaaaattttaaatatggatttaattcatttacctccatattccccaaaatacaatccaatagaacaagtatggagaacaatcaaagctaaaatttctagaaaatacatttcaagcattgcacaattaaaatacctatttaagaccgaatttaaaaaagtagttgataattcaagtttttggaaaaactgggaggaaaacttcctgcaatag

SEQ ID NO: 7196 - DNA, 489 bp, Methanobrevibacter gottschalkii
  source 1..489: mol_type = genomic DNA
atgtctaatcaaaaattaattaaggagtatttaggaattatttctgagatacaagctgaaataaagaagttagaaaatgatactagggttttaaataaattatatgttattctagacgttttacatgatgaaccaataccatatattgtggaaaagcatggaatcagtcaaggaacagtatataattggataagggaatggaatgaaggtggaatggaaggattaaaaagaaaaaaaggctccaaaggtcaatcaaaactaactgatgaacaattgatattattagatgaaataatacaagaagaaaatttgcaaactgcaagagaagtaaaagataaaattgaaaaagaatttgaagtaaaatacagtattagaagtatagaacggataatgaaaaaattaggatattcttacaccaaaccatataaaatttatgccaaaatgcccgctgatgccgaagaacagttaaaaaaaacactcgacatctag

SEQ ID NO: 7197 - DNA, 384 bp, Methanobrevibacter gottschalkii
  source 1..384: mol_type = genomic DNA
ttgtttaaaacaacatatgtatctaattttggtgaaatcaaccatatattgaattactgttatgaagaattagaatggggagagttaatcaaattatcaaatgagttattggatattgaaaaaaatcatcaaaataatcggagaagtgataatatacaatattcagtaatattaattgcaatagttactctttgttcccaattattgatttattattccaattttaaagatgtaatacttttcattggaggaattgcttttttatttttcttaagcttaattttcaaagaaaaaatttattatgtctggcaaatattaaagttagtgcctaaatttatttacaatttaatagttttattattaaaaagaataaaagatttataa

SEQ ID NO: 7198 - DNA, 993 bp, Methanobrevibacter gottschalkii
  source 1..993: mol_type = genomic DNA
atgattgaagggcattatactcaaaaattaacaaatggagaatgtccatatgagcttgtttattttgaagtagatttattaagaaatattattgataacccaaggtatgttatcagcaataattcttttaaatataatataagcatcacagaaaaatatgataatgatgaaacacttgatgagaaatttaaatttattttggataatgtgggtcttggatttgatgaaaacaatgaaagaatttttgcagtacttttaaaagaactgtctgaattacaccctgaaatgcaaaaaagattcagtgtttatgaagttaaaaagaaaagttatgttgatccatcatacataaaatctatgaatgatggagaatggcccgatccctctgtttttagtgcaatattatatcaaatagaacaacttaacaatttatgttcagataatgaaattaaattatttaaatccaattataagaaaaaacccccaattgaatttaatatattagtattatctactaaaaaagaatatgataattttattaaaatatttgacataatgctttcagataacatcaacaaaaaattctttgaagggaaattagatttaattgaatttactaataaagacggtacaaaaaagaaagataaaggaaccataactttatttaaagaatggttgggtgaaattggagtatctccagccaccatcaaaaaaacaataaagattattaataaagtaagaagtgaaagatctaaaccttcacataacattagagataatgaatttgatataaaatatcttcaaaagcaaaataaaattgtattagaagtttataatacatttagattactaattgatgaattatctagaataaatcaaattaaagtcaaacattcaaaatggtatgttgaaaatagaatagccatacaatcattagatgagattaaaaatgaagataatgagaattatcaattaaagatttgtcaatccaaatga

SEQ ID NO: 7199 - DNA, 570 bp, Methanobrevibacter gottschalkii
  source 1..570: mol_type = genomic DNA
atggatttaaattttatttcaattattttagatataattctaacaatcgttacgggattcatggcattcgcaacatataaaatggcacgttcaacaaatgaatctgttgaagaaatgaaaaaaacacgtgttgaggctaattctgctgaggtaataatgtattttaaagtagaaaataatagaatgtatttaattgttgaaaatataggaaatacagttgctaaagatatatctattgaagttgaacctgaattaaaagattcacataataaagattatgaacatttaaaggaaatttcattcttacctccaaattatcaaattaaagctttctttgatatgggatttaattacttaaaaaatgaagataatccagttaaatataaattcattataacatttacaaatatctataatactaaaataacaagagaatatatcagtgatttgagctatatcaaaagtgtttcttatttaacatcagaatccgattccatagaaatgtctttaactaaaattaaagatgaactaaaaaatacaaatgattacttaaaaaaacttaataactga

SEQ ID NO: 7200 - DNA, 165 bp, Methanobrevibacter gottschalkii
  source 1..165: mol_type = genomic DNA
atgaaaattaatgaagaaacaaaagttagaaaccaaggtgagatttcactcataacaacaatccctaaaacatatgttaaagctttgaatattaaatccggggacatattagaatggattctagatactgaaaaagaaacattagaattaaaaataattaaataa

SEQ ID NO: 7201 - DNA, 1002 bp, Methanobrevibacter gottschalkii
  source 1..1002: mol_type = genomic DNA
atgataaaagttatagaattatgtgccggtgcaggcgggttagcacttggatttgaaaaagcaggtttagaacatgaggtgcttgttgaaattgataaagattgtgtggcaacacttaataaaaatagacctgattggaatgtacttcatgcagatataaaagaagttgatttcacacagtaccatccagatatagttgtagcaggactgccttgtcaaccattttcttacgctggtaaaaaattaggatttgatgatacaagaggaacattattctttgattatgcaagatgcattaaagaaactaatccaaaaatgtgcataatagaaaatgtagaaggtttagtaaggcatgataaagggcgaacaatggaaacaatagtgaatgtattggaaaatgaattaggttatgatgttcaatataaagtcctaaatgcagttgactatggtgtagcacaaaaaagaaaaagaatgtttcttgtaggaactaaaaaaggaataatattcaattatcctaaaaaagttaaaggtaatcctgtgcttcgtgatgcccttaaagatgttccggaatcagaaggaactgaatactctgataagaaaaaagaagtacttgagttagttccacctggaggatgttgggttgatcttccagaagatgttcaaaaagaatatatgggtaaaagcttctattctggtggtggaaaacgaggtatggcaagaagaatctcatgggatgaaccatgtttaacattaaccacttcaccatgtcaaaaacaaacagaaagatgccatccagaagaagtaagaccattcacagtaagagagtatgcaagaatacaatcattccccgatgactgggaatttgaaggcggaataacttctaaatacaaacaaattggaaatgcagtaccagttaaagttgctgaagcagtaggaaaagaagttatcaaagcattaaatggcgaaaataaaagaaaagaaggtcaaacaactttattttag

SEQ ID NO: 7202 - DNA, 729 bp, Methanobrevibacter gottschalkii
  source 1..729: mol_type = genomic DNA
atgaataaatatgtaacttttgtttcagatgaaatatttctagaagaagtaaaaaaagttgtagatgcctatgcaacggatgaagatttatcaaaaacaccttgggaagttttaagcaatagtagagaaactattgaccaatttaaaacattatttgatatttattcaaatagattcagcttaagtgaatggattaattttgaaattccaagacaacatgataaaactgcaagtaatcgtgttggtgatttccaccagaatcttttaggtcgtgttgatggttgggtaaatcttggaagaggtcatccatccggaatggacttgaaaaaagaagatgatacaatatggattgaattaaaaaataaatacaatacaatgaattcaagttctttaagagatactcgattcaaatgtgaagaattagctgaaaaatatccaaatgctaaaatatattgggcgtatatagtttcacaaaattatgaatcatttgataaaacttgggtgtatagagacaataaagaaaatgttgtacatgaaataaatgataatattagaaatattgctggaaaagatgtttatacattagtcactggagatgaaactgcttttgaacaattatttgatgcacttccaaatgcaataaatgatattaaaaagagtaaacatattttaactccaaaagaccaagtagtatttgaaaagtacaaacaactaatatttaaagactaa

SEQ ID NO: 7203 - DNA, 495 bp, Methanobrevibacter gottschalkii
  source 1..495: mol_type = genomic DNA
atggcagattctataattttacttgaagagagaaaagaagtcacaaccttccttctggatgaaggtacaatcaccgcaactacagttacaactcctacaggtgaaactccaggttacgaatacgcaggaacaaaaataaaagtcgatgatgtagttacattatcagtcaattcagacatcggaaaaccaacagtcaagaaattcactggtgcggaaggagaaatcatcttaggcattgcagtaaacgatccggttacaatgaccggaggtaaaagaaaaacagctattctcgtattgggtcatttattcagattaaaattagcatctggaatttcaaacattgctgttaataacagaatagctttaaccagtacaggtgctatcaaatcagatgagggagaatatattgcaatgcatcctgtaactagctcagatgattacaaatacatcgaagtgttcagaccatatgacatcggaactacaggttcaacttaa

SEQ ID NO: 7204 - DNA, 939 bp, Methanobrevibacter gottschalkii
  source 1..939: mol_type = genomic DNA
atgattacaaaaggaaatgatacaaaagttcaaaatgaggtaatagctcaaaccattactgatgaaactgcaaaaagattgaagttagctagattgtttcctaaacaagaaatcaaagagaactcagattactacacatacttcagacagaacatcaatctcgatgaagctatcaaaaaaggtttgcttggagaagcaaaagacattgctcccggtgcatcattgcaagaattgaacatcagaaaacctgtaaccgacacaatcagtattgatactgttggtggagtcttgaatgtcaataaggatgttttcgactcagatatcgtttcatttgaggatttattaggcgatgtggctaccgttattgctaaccgtattgaatacaacatttacgatacattaataagctcaccgaacgttccacaatataacacaactcaaacagatgatacaatggatgctttcggtaactttgtcatcaaagcacaggaagcattcaaaggcaatgctggagctggagcagatttaacaataatggcagagtcttacaaaacattatcatacgttaaacagttggcttactcctcaaacaaattggttcagcctgtagaagacattaaggaatactatggtattgataacattgatcttttaggaactacacaggctgacggcggatctctaataggtgaaaaacagtacattggtttcgatttaagaaatgcaccattaactgtattgtattccaaatcttcaggaactacagttgcacctattacaagtgatgagaacattgcagatttctatcccatcattgaaatcatgcgtaaagacatttacgatgagttacctcaatatacaaaattattcatacaaagtaaagtcggaatattgctgaataaaccaggacttgccctgaaaggtacttgcaggccataa

SEQ ID NO: 7205 - DNA, 927 bp, Methanobrevibacter gottschalkii
  source 1..927: mol_type = genomic DNA
atgttaaccaaaggaaatgatgcaaaagtacaaaatgaagtgatggcacagattgtggccgatacttctgcaaagtggatgaaattcacaagattattgccaaagcaggaaattgaagagaactcacagtattacacttacatgtctcaaagagtcaatattgaggaagctattcagtcaggcgttcttggtgaagccaaagacattgctcctggcgctactttacaggaactgaacgtcagaaaaccaatcagtgaaactatcagtatcgacactatcggtggagttttaaacgtttccgctcaaatgcttgattccaatttaatctccgttaatgacatgctgcaggatgtgggaatccttataggcagaagcattgaaaaggcagccattgacatgattatgaattcatctaaagtagctacctacaacttcgaaagtggcgatgacactggtatgaccatcctcaaagctcaggagaaattcaaggaatcagcaggtagctatgccaacttaaacagcatggccgtaagctacaaatctttgacaaccctgaaatcagacatattctcaagcaacagacaggtcgaaccggtagaacttatcaaaagctattacggtgttgacaacatcgatatcttaggaacagcagtatgcgatggcggttccgagatgggtgacaagacctatatcggtatggactacatcaacccaggaatgaaattattatactccagaactaccggaactaccgttgctccgttaggacctgacggtgagatgtatgatttctatccattgattgaattcatgagaaaggacatcagggatgagctgccgatgtacaccaaactcttcatcctgtcaagcgttggagtattaatgaatgcacctaacagaatcatcaaaggtaatttcagagcatag

SEQ ID NO: 7206 - DNA, 417 bp, Methanobrevibacter gottschalkii
  source 1..417: mol_type = genomic DNA
atgaaactgatattagatactgaaaattcacatccaacaacaataacagtcaagggaaaagaaataacattgctgttgattgaatccagtatactgattgattcatcccagatagccaagatttttgacaaaaaggaaaagacagtagttactaaagtcctaaaatccaaactggagaaatacgaaacagaaaacgttaagctactcaagaattacgggttgatgcatcctgatgcagtcaagccaagaccattctatgacttaaggcagatgctggaaggaccagcttattactacttcaaaaaagaagatgaagttgatataatcaaagtaatcatcagggtagctatcggcaaacatcgtgagtggattcataatcggtgcattgataaatttagggttgggtgtgtccgataa

SEQ ID NO: 7207 - DNA, 1638 bp, Methanobrevibacter gottschalkii
  source 1..1638: mol_type = genomic DNA
atgttgggtataaaagaatttttaaagccttcagttttaggatactataaacgttgtgaagttactcaaatttctttttacaaagataatcatgaagaggaatctaatttattaactttatttatttttgatgaagaaaattttcaaggtaggaatgaaatttttttgactggcaagaagaataaaataaattctaagtataaattatgtattaaaagattttatttatctattgaagaaagtattgaacttttcaattgtttaaatcagggtgtttcaaaaacaagttcattaaagaaatatatttttaatgataatcctttaaaattattgcctcagcaattcatcacaacaaatgaagacattagatttaataagatacttaaaaataatttccatagtggttcttatatatttgagttttttgatgaagaaaaagattttgaattattatttggtttaaataaatcgggaaggttaaaaaagatttcaaagatgattggggaagttgttccaattgatttgttgtcttgtactgattgtttgggaaattatatttttcaattaccaataactattttaaatgttcacacaaataagaataagaatatacttggtattgatttttattggcataataatttaattaatgaagttaaacctaattgtttgattaatatatattcaaaagttgataataattatctatttgatatttttgaggaatataataaagaaaatcatcaaaaaattaacatattgccttctggaaaaaattatgttttaaaaatatggaataatgatttaaaaatattgctatatgaaatgaatagtaaatattttgaaaaattcagagtttcattgagtatgagtgagtgtgaaagaaaatttattgaggataatggagaatctgaagtaactatcatgtcaaaccctaaattaagtgatgatattagttatttaaattatagaaatgatgcaatgtataaaaagaatttaaaagaactggaagataatcttaaatttaacacatatatgcaaaatgagaacgcattagaagatataaaaacattaattaatgaatatggtaaaaatggtgtgaatataattgatccttatttggaaccgaatgatttaataagaacagtagtccatttgaaattctatgatgcgccaataaaagcaattacttctttaaaaaattcatttaatgaattattgataatgaaagaaatgttagagcaacttccaaatcaaaatatagttcaaaattttaaaaatgttttaaatgaaaaaatagaaaaagaaaaaaaatctaatcttgaatgtattgaagattataaaaaggagttggatgagaaaattattaattcatgtggattaaatttagtatttagggctcaatttgatagatatggtcaaccatttcatgatagatttttaatttttcctggagatgatgaaaaattacttgaacccatagtattttcattaggaacttcattaaatgcttttggtaaacatttccatatattgcaagaggtttcacatccgcaacatgtggctgatgtttttgataagttatgggggatattagaacaaaaagaggagtgtctgatttggaattcaaaggaataa

SEQ ID NO: 7208 - DNA, 1521 bp, Methanobrevibacter gottschalkii
  source 1..1521: mol_type = genomic DNA
atgggggatattagaacaaaaagaggagtgtctgatttggaattcaaaggaataattgataattttgatgaatttaatatgattttggttaatgaagaattaatattattatttgaaagtttgcatgacttttcctttgatgaattaatgtattttgaagacccattacattatgaaaatattggtgttcaaaaaatcatgtctcaaattgatgagattatatctgttttattttataatattgatattaaaacaactgatgatgtcataagtattgtaaaaagtgatattttattatttaaaagagctatggatcaaattgatttgaaatattttatttttttctcgtatctaaattcttatttgaatgttgatgttgattatttgataaatcattttaactatgaactaaatatgattaagatggaagaaaaaattaatgagttatttaatcaaattcaagtttttcctaaacctaatgataataacttatcaccacttttaaaaaatgttttatttaagtccttgaaaaaagatgacattatgcattcatcattaaagttattaaatattagtaaagatccattcattttttataattttaaaatttattgtccaaaattattaactagtatgctgatacttattaaaaaaataaattatgatttctttttaagaaatatgtttgatgtaaataatttaatcatggcagtacttttttgtaaagaattagatatatctgaaatattagagtgttattatgaaaacgatatttctaatattgatttattattcacatttttgaaaaaaagtatagattctaatgaattaatagatgataatattgtgtttattaaggatattctacttgatattttggagttaaatgaaaatttatttagaaaaattatcagattattcaaacataaaaagttatttaatagatcaattggtttattattgtctggaattaataaatgggaagttgaattaattgttaatgaatttgacttaaattttggagcaaataatcatctaattaatcttagggaaaatattttaataaacctcgataaaaaatcggataattttaaattagttttaaaattagtttataaaaattgggatttgaatttaaattctttgattgatgatgatgagaatggatgggatttattatgcagtgattttaattcatttattttagaatattataatcaattttatgatgatgatatgttggttgaagaaatgaaattgaattttaattttcttgaaaaaattaattcaacatggtcatctaattttacaaattataaaaataggatacatgtttattatacgaaattatatttgttaagttcaatttataaaaaaaggaatattaataatatagagatattgggatgctatgagaatttctttaaaaataagtatttaattgaagttttgttaagagataaagcgaaaaaatcgattattgattttaaaaaagattataatatgatgaaaattcagtaa

SEQ ID NO: 7209 - DNA, 1488 bp, Methanobrevibacter gottschalkii
  source 1..1488: mol_type = genomic DNA
atgtttaaagagggcattaatacaattataattgaaagttatgatgaactggcatgtattataaaaggaaaacatgaaaagaataaaatggaccttcgtgaagattttatattttggggattatcaaacatcgaatatgaattaattccttctgctttaagaagaaataagttaaatcaacttgaaattaatgaattaattgaatctgatcacatatttaaagtttcaattgatgaaaatgatgccaaaatgtttaatttagaatattctgaatcaataaatgatggtgaagttataattggagtagataaatatgggaatctgattcatgatgtgaaatctgattataaagttttagaatgtgatttgcaaagagaaagagaaaattatcttctattaaaattttttaattgtgcagataaatctggtttgaaagttaaatcagaaggatttttaagagagttgattcataattattcttcaaaacgattagaagagtattggttggattttgatattttagaaactatatccttggctcaacattatggtttgccgactaaagctctagattggtcttatgattataaagtttcattatattttgctgtaaaagatgtaattgaatctaatttgtcttctgatggagtattgtgggccttaaattataaattaattgaaaaccataattttaatgaggaatattatgttaatttacatattcataggccggaatataatacaaatcctaatttaaatgctcaaaaaggattatttacttttttagaaagatatgttggagattatgacaaaccattaaacaaaataatttctgatgaattaaataaaactcttgaccaaatgccgtgggataatctttatgaatctaaaattaggacaattccggatgatatatctaaaaatgatacgattttctataaatttattattcctaaagaaattaaacaaaatattttaaatgaattatatttggagggttattctgaagaatatttatttcccggatataaaggagtttgtgaatcagtaattaatagagtaaagttaaatgagatattaaaaaataatgatgaacatattaaaaagagcatattattgtccgtggactggaatttaaatgaaattataaataaaaatcaactttatgtatttgtaaacttggattttaaagaagaaattgataaaatctttatttaccataataatgatgttgtaggttattttagaggaaatgaaataattaaagattcactaaatgtgttatgggaacagtttggggaacattcaggtttatctgaagataaatttgatgagtgttttaaaggtaatgatgaatcatttgcaattagaattaatgatttaaatatttttaagcattcaattaaattgtgtgactttgaattggagaatgatttttgttttgttgaggataatgaagatttaaaatttttattgaattttaattaa

SEQ ID NO: 7210 - DNA, 819 bp, Methanobrevibacter gottschalkii
  source 1..819: mol_type = genomic DNA
atgtcagataataaaaataataatattagttggacaagtttttgccaagctatgaattccatagcatactggctactccaaaataaaaagaagtataagaaacgtgaccattaccaaatattaacgttaaaaggtagttgtagcgatatagaaaagaaagcgaagaaattaggaaacgataaactagtatcaatgtatacaatggctttaatcaaagataatacatctttagatttccttccaaactatgtaacattaaagaacggagaacaaattgataaagccgaatatgtagatatggccataaggacagaagcatatatcagagcaaataaaagacttccggctattgtatatagaatgtcaacacttccagattacaaagattccacaatgaagctatttatcaatgtattcaacttcaaaggaaatacaatcgatgaagcattagctattatatcaaagatgaaattatatagtaaatacttcgattcacaaaaaacagacaagaaaacaatcaatgatgctagtctgggtaaaggttcaaattgtgtagactggggacaagtatattatcgtatagcgaaatcattaggatatgatgtacaatttgtccatgtcaaatgccgtgtaagtggaactggccatataaaattaagattaaaacataaaaaacatactggaggaaactggattaaccgtgatcctgctgcagttgcggataccacttcaggaaatgttaaatcaatctggtgtgaagatggttacctcatagcatatgatccttcctggatattcacagatttatatagcagttaa

SEQ ID NO: 7211 - DNA, 789 bp, Methanobrevibacter gottschalkii
  source 1..789: mol_type = genomic DNA
atgggagcatttgaagattatagaaaacgaataagaaaagagattcctgactctacagaatatttcaattatttttttaataatgattatgacaatgctattaaagttgttaaaagagatatggacaaatacaatcaaaaatatggcatcgtcccattggaattagaaagaagattggaagacgcaaaaatgatgaaatatagtaatatttattataaaaataacgaaaaagctgaagaattagaaaaagaaggaaaaattgatgaagcaattgaagttttagaatcaaatattcttattcatacggacacaccattcacatattaccatctatcctcaatatatcaagatagaaatgaaattgacaatagtatcagagtattgaagcatggaattaaaaactgtaggaagatacctaataaatctcatgttaatagtcttaaacgagatttagaaaaagcaaaaaaaattaaaaaggaaacaaaatctcaaagattgccttctgcaaatgaagaacataaacaacgtgataaagaagcggatgacttattaaaacaaggaaaacaagatgaagctattaaattatatgaaataaatctaaatgaaaggacaattagtaataattcctattctaaactgtttaaaatatactttgattcagagaaatatgatgatgcccaacgagtttgtgaacaagctattgaaatttataaaccaataaatgcggcaaaagtaagtcaatatcgacaatacctatcaaaagtttacaataaaaaagaagatttgtaa

SEQ ID NO: 7212 - DNA, 198 bp, Methanobrevibacter gottschalkii
  source 1..198: mol_type = genomic DNA
atggccaatataaataatacatcatcctacatggatgaagacaaaaagcaaattatcaaagagtccaactatacctttagagatgctcttgaagtttcatcttatctcattgaagtaggcaagttcgaaagattctataaagaaatgcaaatccacgatcttcaaaaggaacttgacgaaatggatgacggagaataa

SEQ ID NO: 7213 - DNA, 249 bp, Methanobrevibacter gottschalkii
  source 1..249: mol_type = genomic DNA
atgttacttgaaaaaaccaacatcagcgcaagagtggatattacactcaaaaagattgtcgaagattcaaccttcacccacaaggacgcatatgaactgggagcaaaactgatagctatgggaaatgctgaagagacaattgtactaataaacaccaatcctgattttgaaagaatcatgaaacaaactgaatacagtttaatcgaagcaaggaaactggaacttgaaagagagttaagagttttatag

SEQ ID NO: 7214 - DNA, 813 bp, Methanobrevibacter gottschalkii
  source 1..813: mol_type = genomic DNA
atgggtcgaggaaattcagatatcatatattttttagaacagcatgaacaggaaataataaactgctgcaagaagggaatgagcaacaatgaagtcattgaactattaaaaacaaaatatggtcgtgatgtagcagatattacttatagaaaattcaaggcgggtttaaatctaacaaagagtgatttcctggaaacattgttggatgagataatggtcatgaagacatctggtgcaacagatgcaaatgtcaggcgatggctggaagaggaacatgaaatcgaagtgagcagatccacattctcaagattcaaaaagaaatatcacataacagataaagaaaaagacccaagggcaagagataaagattcattaacaaatagggcaatcactcaaggccaaattatagacaatgaagttcacacagacaatatcgacttagctattgatacaatacttcagcaacaggttactgatatcaaaacgggtcttgacaatcttgacaagattaccaaaaatgctgtgggtattgaaattgactttgcaaagctcgaccaggaagtaagatacaatgccaacgaaaaaagtctggcaagatacctgattgatttaacagaattaaaaataagatacttggaattatcagttaaagcatttgaagctaaaaacaggctgttcaaggatgaaatggataggctatttaaaaatagagttcttgaactggaagacaaaaagattgaaatctcacaaaaagacatcatgaatgaaatagaaatccttgcaaaacaaattgatgataacaatgtacaatga

SEQ ID NO: 7215 - DNA, 1419 bp, Methanobrevibacter gottschalkii
  source 1..1419: mol_type = genomic DNA
atgataacaatgtacaatgagaacaacgaattctatttggatgctagggataaagttattcttcagaaatgtgtgtatgagaatccatatattccattctctccatttccaaagcaggccgaaatgattttagctagagaaaaggaagtcctgattggtggtgctgcaggagattccaaatcaacaagtcttttgatgagggcattgttctatgttcaggatgacatgaatgaataccatgccctcatcctgagacgtacattatctgacttgaagcgtaaaggagctttaattcacaaggcaagtcaatggttaaatcgaaaggaaattcaaaataatgcaagtatcaaaccgaagtgggatggaaccgaacactcatggacatttcccaatggaaattcattaactttcggatatttacgtaacattaatgaccttgatacatatcagggttccgaataccagttcataggaattgatgagctgacacagttggagaggtttaaatatatctatatgaggtcaagagttcgtaagaccaaagacaataagcttccaacacaactgatggcatcaagcaatccgggtaagcgtggaaacaaatgggtgcgtgaaagattcatagaaaaaatagacactgacattcaggataaatcacaaataagattcatttcatccagctacttggacaacatctatctagacagaaacgactatgaagaatatcttatgggattagatagagtaacaagagagcaattaatgaacggtaactggtatgcctcagtcaaaggccagttatttgatgaatcagacttccacataatctctcaagatgaatgcctgaaaataccaatcgttagagtcatcagatactgggatcttgcaactacagaagtattgaacgatgacaaattgagaggaagtgatccggattatactgctggtgttttattagctaaagatctaaacggtaatatctacatttgggattcatatgaatttcagcttgagtcaagaaacttgatcaatgaaatactgaacactgcagcacgtgacaagtcagatgtacagtatattgaactcgatggaagcacaggtaaaaacttcggattattaatcatagatgagcttaacagaagaggattcactacaggtactggtaactcaagagaaaataaagttgaccgtgcaagaagagtttcagcagatattcagaagaacggaatatttctggttgggaaggatagaacagggtttacgaaaaaatgggccatggaatttctggaaaaaattactgcttatccaaatgaagccattcatgatgactgtgtggtggcatttactggaggatatgaaaaaatagttgcagaaaaacaatcacaaagagttaatgtggataaatggtattccacatga

SEQ ID NO: 7216 - DNA, 267 bp, Methanobrevibacter gottschalkii
  source 1..267: mol_type = genomic DNA
atgactgataggagcgcagaaatcagcaaaatcaacgatgaaaaccaagaagaagatgaggaactcttcaattcactggatgaaataatttcccaaaacatagatgaaatagatggtgttgtgatttcctttccagagaaaattaactcaaaaaatggcatcgcccatactgcaagagccttcatgtggatttgtgatttggccttaaaatctatccttgatgagaaatactcccaacctgtttggattttaatgaacaacttatga

SEQ ID NO: 7217 - DNA, 1779 bp, Methanobrevibacter gottschalkii
  source 1..1779: mol_type = genomic DNA
atgaaaaatgctcctaaaaattggtctcttgctgagcctagtgaagattatggtaatgattatttcgtgaaagtttttgataaagatactgatgaagccacaaaaatctcatttataatccaactaaaaggtactgaagattataaaaaagatgaaaaacatgtgaaattctcaattcgcacggattatttgaaatattactacagtaaagttgacatgcccgtgtttttagttgttgtagatacaattaatgaagaatattgttggttatttgttcagaaatacattaatgaagagttaaatgttgaaaaaccaaattggcattcgcaagaaactgttacattatatattccaattgaaaatgatttttcaaatcccaaaattatagaacaaacagcagagaaaggttctcaatattgtaacattctagtaaatggaacacccacacaggaacttatatggaaagtgaaaaatattattgacaatcctttagagaaatctaaggatttaaaaaagcaatattcagagatatttaatgctgagacaaaagttggatttgaatttattcataaccaaaataatcctcaaaatgcaaaaaaacacttccgatcagtttatgataaaacaaaagatgataatgattatgtattagcccatttaaactcaattattggattaacaccgtttcttgattgtcaaaataaaattgaagcagaaaaattatttgaatacattaaagaaggagaaacattatctaaaaaaaataacattaaatatctagaacattatttttatggtctcagattagagaaactttgttttattttacaaagtcaacttcgagatttgttagtaacccaaaaaatatctaatctaggaaaaacaatattatcctttgttgttgaccccgaaactactgaaggtataaaagaaatttttgaaatactccataaattatatgcagatttttgtaaaaatttgattgaaacactggatgataaagacttgtttatatttttagagttattgagaatgctgattggaatgcaactacatcatatagaagctgtttttacatcaactgatgataatacaaaaaaagcattatttaaccaaatggatcaattactttctatttttagagatttaattaattttacatccgaatttgatatttttaggtatgatttattatcatttgaaaccacatacttgtatttgattggagataaacagtataatgaaactgttgatgaatatattaattttgcaaaagaaaataagtcacaatatcacctcaaaagagcagaatcattaaaagaaaaattatccaaaccattgaataggcaaaaagacattagtgaaatgtcggatgaagaaattcatgatttatttaaaacattgatattaattattgaaaaaatcgatattgatgttgatgagactgatgaagcaatggttttaagatgtgcagttagagatcttaatccaaaaagagtactggacaattgcaaacaccttgagctacattatggtcatggtggacaatatgctaaatttttcggattggcttctgatggactcaaaacaatttattgtgaacatggaggaattattacaaataggaatttagataatacttatgaagaattttataataaatattgtaaagaatgtgaacataaaattaaacaggactttaaatggaatcctgacaaattatcttatgtaaaatcaaagaaatttaaagaaatattagataaaaatccattcatttaa

SEQ ID NO: 7218 - DNA, 348 bp, Methanobrevibacter gottschalkii
  source 1..348: mol_type = genomic DNA
atgacaaatattgaaattaatgcagaaaccaaaaataaactagaagcaatcgggaaaatattatctccatacctagatatcggttatgatgattttgatgaaattattggtattttaataaataatttcaataatcataaattaaaagcagagtatgatgagaaagaaaatataattaaaattggatatgaaaattcaaaaatatattcaatccctattttgatattcgagcttaaaaaaggttgctatgaaaaaattggtatttggatgcaaaaaaataactttattccagaaatcaacaccgatgttacggaatatatcaaaaaatgtgaggatacatttttataa

SEQ ID NO: 7219 - DNA, 657 bp, Methanobrevibacter gottschalkii
  source 1..657: mol_type = genomic DNA
atgaaaggatatgttggacctgaatttaaaaaagacgcatttaattgcccatactgcgaagtttatgctcatcaaaagtggagatatcgtttaatgatatttaattctaacggtgagcatcctgcagatcccatatatgaccaattaggagtcaggggttggtccacatcaaaatgcgaccattgcggcgaaatctcattttggcatgatgaacaattaatttatccaaaatcatcaatcgcaccattacctaatgatgatatgcctaatgatgttaaagaagattatattgaagcaagaaatattgtcaatgattcaccaagaggggcttgtgcacttttaagattagcattacagaaattaatgcctcacttaggagagtcgggaaaaaatttaaatgaagatattggaaatttagttaaaaaaggaatttccagtgaagttcaaaaagcattcgattcagttagagtcattggaaacaatgctgttcatcctggagaattagacttgaaagatgatgttcaaacagcaatttcattatttcgtttaatcaattacattgttgacaatcaaattagctcaaaaaaagaaattgatggaatatttgaaggtcttcctcaaataaatattgaagcaattaaaagaagagataaataa

SEQ ID NO: 7220 - DNA, 987 bp, Methanobrevibacter gottschalkii
  source 1..987: mol_type = genomic DNA
atggaatataaattaaaaaaatattttatacatgatgttttaactccttggatgcatttagaagatatctatcttaacgaaaatcatcctgctcatgaagatttaaaatatgatttagatgctataaaagaacaagaagttctaacatattacaaaaaacatgaagaacgaataaattttttgaatcggaaaataaaaaacaaaataatctattcaaaaatattactatttggagaattgcttgctaactcaatatttgaagatagattagaggcattgttaaaaaatgagccctatgatagaaaagagtttgaaaacttttatgataaagaaaatttaattaaagtggataaattttcaaaagtttatgattcgataattattaacggaaatagatatggattatgtttacctattaatgcttttaattcatcttattggatttcacaagaactgaataaacttaatttagatgatgttgatttaaaaattcgtgtcgatccctttttaaaaaatttttcattaatttgtcaaaaaagtactgtattttcaaagccattgaactggaataaaattcgagatttaaaaactgttgataaaggccaatttagaaattataaaactggggaattaactgaatatatgtggaaacctagaaaaaataatagagtagtatttacttgtgaagaattaccttcagaagatttaataaatttaagagggagtcgatatttccatgcaatttttgaaaaagatagtgggagatttatacattgcgatggatcaataaaaatttataataaaaattcatttaaaaaaagatgcaaatacacaattaataacaacgaaataaatgatattggaaaagaagtgaaaatctttcgtgtagataaaaatataccaaaagaaatgttcatgtcactaataaacagttatttttattggaattatgatttaatagattattttctgaaaaaaactatttaa

SEQ ID NO: 7221 - DNA, 417 bp, Methanobrevibacter gottschalkii
  source 1..417: mol_type = genomic DNA
atgtttagatgtggctgttatccaaatcatgaaatctgcaaaaacaaaaacacatgcgaattttggataccattaaatcaaaaactcaaacaattaaatcaacagatatcttatgagttgaaaatattagaaagtctaaatcaaagaaaaagagactacttcagaattctatctgaaattcaacagggaagatatactgaaatagtagctattgacggaagattaaaaagagtaccaaaaaagaatgcaagaggcgaatctatattaaaaccagatgatgtacaggtcggattgaattttaatgttatatctaaagagataactgacacagaaacaataattcatgaattaagaattagagaaaagaatatattaaaaatattaaaaaaacaatattggacaatagcttgtaaataa

SEQ ID NO: 7222 - DNA, 639 bp, Methanobrevibacter gottschalkii
  source 1..639: mol_type = genomic DNA
atggactctcccaaagattgtctgtttcatcatttgaagtatcttgcggactttgtggtgaatgaaattaacgaggatatagaattgttgagactgccttggcaggaactaagcaatcaactgattaaaagagcatatgcccaatgtgaacgtgaatgtcctgattggctgttgacatttgccgaatcagtaacccctgaagatctggacgatgaagaaatagaatatctgagaatgtttttcattgacgagattaacaagcacaacaaaagcattaaggtctattcggcagaagacggatatccgataaaatatcacgactatttcacagattctgttaaagactcaaatgacttctatgaacgtgtctttaacattatcaatgagcgcctagttccttatatggtgctgcatcatggccgtgatggtcttgactatgtctgctttacaagcggacttaaaaaggcattgaagaatgctaatgaagtgtgctatgatgtgaagggaattgctgaattgttaggttgggaatacaaatccgttaaaatacctaaatctacaaaagttatggttgttaggtttgataagtttttaacattcctatatcccaacttaagtgaaaaggaggtcaataaataa

SEQ ID NO: 7223 - DNA, 681 bp, Methanobrevibacter gottschalkii
  source 1..681: mol_type = genomic DNA
atgagtgaaggaagttcagccatacaaatcaaaaaagctatcggtaatgtctataaaccagattatgagtttacatactttaaaaacataatcagtgctttctatttgcagggtaccgacccagaagttgtagaaaaaattcttactgaattatacaaccaacttccttctcatgagaaaacattagatgaaatcatcaaactcttcgaagacatttatttgggtgatgaaaatccaaacagtgggataaaaggcattgaaagattcatttcagataaatatgataaaaagaccagcattttggtagggcgtgaattgaatagggcaatcataccatatgataccaataagatttacaaactccaaactggctccaacaaatatatcgttatggactacaggaacaatgaagtcactacacagacaatcgaatggaaaaaaggaaatgaagtggccgattacaccagagtactgttctgctatcccatgcggattacaatacatgacaatccgataagtgaagccggaataaccttcagcatcgaatggagaacaacagatggagggcatttccataccaaagatatgaacatcgttgaaattgaacattatctcattgaacacggttatgtcctatcacgttaccaatccaaagatgttgttcccggcttgattcaatag

SEQ ID NO: 7224 - DNA, 501 bp, Methanobrevibacter gottschalkii
  source 1..501: mol_type = genomic DNA
atgagctttgaaaacagcaaacaaacaatatttacaggtacacaattggattatgaagaaattgtagaaattccggaaggatatgaaaaagcagaattaaaagactttgaagatggaaccctaataagaggcagaccagaaatggcttcagtttcatcatttacctttgacgatgatggcgaagaaaaaacagtgaacagattcaaattatacatctttcaggatgcagacaaaatatatgttgaaatcaatgttaatcttaaaaatgatggagatatccacaaaaacgtcaggaaaggaagcgtattatttgattttttaaccagtattcttgaattggaaaatgcaggttcagttggcaaatccaatattctaagaaatgttgatctttccgaatatcgtgaattcgtaaacagattaagtgaaatgacaattcaagtcaaagaaagatcaggaacatacacattctacagtttcattgtgagggacgttcaggtatag

SEQ ID NO: 7225 - DNA, 549 bp, Methanobrevibacter gottschalkii
  source 1..549: mol_type = genomic DNA
atggtaaaagccgaattaatagaaaatccacaggaaacagaaatagtcaaagtcgataccgtccctgatgttgatgttgcaattgagcaatgggacgcatatcagagactatgcaaaggattattgaatgacaatgactatcaggaaataattgttaaggaaaaagatgaaaacggaaactacgttaaagtgaaaagacacttcaagaaaaagtcagcatggcagaaactctcccgtgcattcaatgtcgataccgaaatagtggaccgtgacattgaaagaacaaaaatgggaagagtcagagaagcatattactgcgttagagcatcacttccaaatggccgcagcgttgaatcagatgcattatgctcaaggtccgagaaaggaaaggacaaagtttcagaccataccataatgtcaactgcaaagacacgtgctacaaaccgtgcaatagctgaactcattggagcaggagaagtgtcagcagaagaaatgtcagctgaaaagattgcaggacaatcaaaatttctaaaagaggacaatagctag

SEQ ID NO: 7226 - DNA, 300 bp, Methanobrevibacter gottschalkii
  source 1..300: mol_type = genomic DNA
atggacagctatttgccagattgcggaatcgaacataatcagttcgaagacaactaccacggcatccttacccacagcggtgagatcaaagttgccaaaggtgatgttgaacaggaaatcctctacattgacgatgacggtatcgtattggtggacggcggcaaaaaggcataccagacactaatccataccaagctattggcactgattcaatatgcaaaagcgggagatatcggactcatcaagttcataagaggagaggctttcattgtcggattcaggaaaaaaaggagtgactga

SEQ ID NO: 7227 - DNA, 105 bp, Methanobrevibacter gottschalkii
  source 1..105: mol_type = genomic DNA
atgttagaacaagaagtaaacgggaaaacacatgtcttagtcccaaaagatatatgggacgatataatggcaatgttcaatgaacatttgaataaaggtgaatag

SEQ ID NO: 7228 - DNA, 159 bp, Methanobrevibacter gottschalkii
  source 1..159: mol_type = genomic DNA
atgtgtgaagtaataaaacctaggatgaatgaaataataattttcaataacttcagggcacttgaagaagtcattgcagaaattcaggaaactgaaaacatacgcaatgaaagggaattcttccagtcatacaaaatcaagataatgaaacttgattaa

SEQ ID NO: 7229 - DNA, 1038 bp, Methanobrevibacter gottschalkii
  source 1..1038: mol_type = genomic DNA
atgaagaagtattgtgaattcaatggtatgagccttcaggaactgcttgatgaagcggaaaaagaagaagcagacaatgtcaaatggaaacaccgccgtgttaaaacaaaattgcttaaatacagacaattccttttagacaactattctataaacacagtcagaatacatatgtctgccgtctcaaaattttacagattttatgacatcgaaatcaatcctctaccaagattgaacatgaaagctgtgaaaaaaccaacatcaatctattataaagatttgcctgataaggaaattataagggaagctttagcaatttccccacccgttatgaaagctataatattgttttcttgctcaagcggttgtgccagagctgaaacattgagtctgacaattcaggactatatcgatgccttatcagaatatctgccgaacaaaagaatggacatctatcagataatcgattatttgaatgacaatgacaatgtgatacctacctttaacctcaggagaattaaaacaaacaagtattacactacttactgcagtcctgaagctgttaaagccatcaatgcatatattctgacaaggactgacaatgtaactcccgaaagtcaattattcaaaatgtatgaatcttatttcattggatatttccaaagaatcaatgatgaacttggccttggtagagtaggacattacagcagattcagaagccatatgcttaggaaattccatgcttcagcattgtacaatgacggcatgagtttggataacgtgaatgatttgcagggaaaggccaaaaacaagaccgaccaggcttacttcatgatcaatcctgacgatttgaaatatgaatatatcaagcatctgcctgccattacaataaatactgatgttgaaaaactgtccatcaaatctccggaatatatgcagatggaaaaggaaaataatgaatataaacaaaaagttgaaagaatggaagctaatatagctaacatcatggaacgtctgggccaggaggaagcaaaatag

SEQ ID NO: 7230 - DNA, 558 bp, Methanobrevibacter gottschalkii
  source 1..558: mol_type = genomic DNA
atgattagtgataaagcaggacaatacttagttaaattagctggaaatgcgatcagacaatatttagaaactggtgaaaaaattaaaaaaagtgaagactacccaattgaattggatgaaaaattaggtgtctttgtaacattgaacaaaaacagtaatctgagaggttgtatcggatatgccgaaccaattatgagtgcaattgaagctacaatagatgtggctattgcagctgcagttaacgatccacgatttccccaagttagtttagatgaattagaaacacttgatttggaagtaaccgtgcttacaaaacctgaattaattccagtagcacattataaccagtactttgatgaaattgaaattggcagagatggtttaatcattcagaaaggttattcaagaggtttattgttacctcaagtagcaactgaaaatcgatttagtgtagaagactttttagaacacacctgcatgaaagcaggaattagtactgatagctggatggatgaaagctgtgatgtctataaattccagggacaaatatttaaatag

SEQ ID NO: 7231 - DNA, 1395 bp, Methanobrevibacter gottschalkii
  source 1..1395: mol_type = genomic DNA
atgattaatcttttgagtgataaaatggaagaatatattgatttattcgaaaaagttattgcaaaaacaagctcacaaattgactacattgacatcagagcaggaattggagacaacacttcaatattaatgaaagatggaaatgtagatgaaattaacaccggaatgagcttagcagcaagagtaagagtgttaaacaatggagcatggggttttgcatacacaacagatttatctaaaataaatgaaataacagatacagctatcagattttcaaactcattaaaaggagacgtcgaactaagtgaaacagacattattaaagataaaatatcagttgacgttaaaattccatttagtgatatttctattgaagaaaaaaaagacattatgaagcaagcaaatgacgctgcaattatcgataaagtcaacagcaccactgtaagttatggagacagtgaagtcaatgaattgttcatgagcagtgaaggtagtgaaatccaagtaaaaacaagtagagtaagaatggctttaaatgcatctgcaacaaatggtgaaataatccaatttggacatggtagtctcggaggagttaaaggatttgaagcaatatctgataaagacctggaagaatttggaagaactattggtcagaaagctgttagattactcgatgcaaaacctgcaccttctggaaactttccagtaatagcagatcctgaattaactggtgttttagtccatgaagcattaggacatgcagttgaaggggatttaatcttacaaaatgattctatccttaaagataaaatgggttgtcaaattgcatcagacattgtcaatatttttgatgatgcaagtctgaaagaaggatttggatattatccatatgatgttgaaggagtgaagacttcaccaaatcaattagttaaagatggaaaattggtttcacttttaaattcaagagaaacatcatctaaattaaatatgaaatcttcaggaaatgcaagatcattaattgcagaccagccaattgtaagaatgagcaatacatatctacagcctagagacaatagctttgaagaattgctggaagacattcaagacggaatttatcttaaaggttcaagaggaggtcaagtggataccggtaaaggcatcttccaatttaatgctgctgaaggttatttaattaaagatggtgaaattacaacacctttaagagatgtttcactatccggcaacatattagaaacattgaaaaacatagatgctgtcggaaatgactttaaattaagtgttggattctgtggaaaagatggtcagactgcacctgtaggtgatggtggaccccatacaagaattttaaatgcacttgttggaggaatgggataa

SEQ ID NO: 7232 - DNA, 1206 bp, Methanobrevibacter gottschalkii
  source 1..1206: mol_type = genomic DNA
atgattgttattgtaggaactggtgctggtggaggaatattggcccgtgaaattgcaaaagaaggtattgatgtaacaattttggaaaaaggaccatacatacattcaaaagatgcatttaattattatgatacgtattctggtgatgttgatttactcacaactacttgcattggcggttcaacaattgtatccatgtcgaacatggtaagggcacttgatgatgaattattggattatgatattgatttatctgatgcctatgaatatgttgaagatttgattaatgtacatcctattgatgattctcatattggaaaaggcactaaggcatttttagatgcaggtaatgaacttggccttcaaacaatgaaaatgccaaaagcaattagggaagaagaatgtattcaatgtggaaaatgcgcattcggttgtcctgttgatgctaaattttctggaaaagatttcatcgatgaagcagttgaatatggtgcagcactgatttgtgaagctgatgttcgtgaagtaacaagtaatgatggtgttgtatatggtgtaaaatatattaaagatggtaaagaagaaatcataaaggctgataaggttgtattgtctgctggtgcaattggttcaactttaattttaagaaaatccggaatttccaaagcgggccgtgaaatattctttgatccatttgtaagtgttggaggatacttaaaagatgttaacttcaatagtgaagtacaaatggcaggtcttataataggtaaaaattttgttctggcacctcattattcctcatttattccgggaaacattgatgatgattcagtaactgaaaatgatatccttagtataatggtaaaaacctctgatgaatgtaaaggctatgtaaccgacgatggtgatgttgttaaaatcaataccattcaggatataagatatctggctgaaggaactgcaactgcaggttttgttctagaacgtgctggtgttgatccaaacactattggttcaacggtgtataggggagcacatcctgggggaactgcaaaaattggtgaaatagtaaacagtaatttggaaacagaaattgacaatttatttgtctgtgatgcaagtgtattgccaatatctcccggtaaacctccaatattaacaatacttgcattatctaaaagattagcggactatttaaagaattag

SEQ ID NO: 7233 - DNA, 477 bp, Methanobrevibacter gottschalkii
  source 1..477: mol_type = genomic DNA
atggctaacaacaaatccgaattaaaaatcaaagctattgagaatggtactgttatcgaccatattacagccaataaaacattgcacatccttaaaatattaggtcttccggacaatgaaacaaaaaatatcactgtagctatgaatgtgtcttccaaagaacttggtagaaaagacattctaaaaattgaaaatagggaattgggccatgaagaacttaatcaagttgctttaattgccccggaagctacaattaatattattagggattttaaacctattaaaaaaaataagattgtactgcccaaaaagattacatcaatcattaagtgtacaaatccaaaatgcattactaactatgaaaatgaaccaataaccacaatttttaatgttgttactgaaaatcctcctgtagtcagatgtcactattgtgaaaaattaataaaaacagaagatatttataaacaatttgaataa

SEQ ID NO: 7234 - DNA, 495 bp, Methanobrevibacter gottschalkii
  source 1..495: mol_type = genomic DNA
atggctacactaataatttattattcgcaaagtgggaaaactgaattagtagctcatactttagcaaaaaatctaagagcaaatgtattaagaattcaagatttgaaaaatcgaaatggatttaaaaataaattcattgcatcaattagtgcatttagggaaagtaaaacagatattactcctgcaagagttgatttaaccgattatgatacaatcatctttggaacacctacatgggcaggaaatccaactcctgcaattttaacaataatagacaggtgtaatttaactggaaaagatgttattttatttgctactatggacggcagtcgtggagatacaaatatcgaaagacttgaagaaaaagtaaaaatgcgtggagcaagagtaattgaaagtttcaccattgcaactaaagataaagattctgaaaaattaattacagacactgaagcagttattgaaatgaaagatttaaaaatgtatacaaggtag

SEQ ID NO: 7235 - DNA, 1023 bp, Methanobrevibacter gottschalkii
  source 1..1023: mol_type = genomic DNA
atgaaaaatgtagcaatcgtaggagcaagcggatataccggaggagagcttttaagaatgcttagtgtgcatccggaagttgaagtgactgagattacatcaagaaaattggacggacagccggttcataaaacccatccccatatcagagatacaggattagtatttaaagacaagaaaccatctgatatagatgctgatgtaatctttactgcaactccccatggcgcatcaatgaaaattgttccagaacttttagaaactggcgctaaagtagttgatttaagtggagattacagatatcgcaatactgaagtttatgaaaaatggtacggaatgaaacatactgataaaaaaaataaaggtgcttttggacttcctgaattatacagagatgaaattgaaaaagctaatttggtatcaaatccaggatgcttcccaaccggtgcaattttatcatcatatcctcttgttaaaaatgatttggttgaaaaaattgtcattgattcaaaatctggagttagtggagctggtgtaaccccttccggaactacacattatccgaatattgcagacaatgtaaatccatataaaatttctgcacataggcacacatcagagattcagcaagaattacatggatttgatgatgttaaagtttcatttacccctcatttagtaccagtcaatagaggaattcaaactacaagtcacagtttcttaaaagaagaacatctggacattactcctgatgaaatcagatcattatatgaagaagaatacggagacgagtactttattaaacttatggatgaaggtgaaattccgcatttaagttcagttagaggatctaactttgtacatatcggagggtttgagattgatgaaactggtagaatcgtaatgttatcctgtattgataaccttgtgaaaggcgcatcaggtcaagctattcaaaatatgaatattgttcttggccttaaagaacaattagggttacaacatttaggtatttatccttga

SEQ ID NO: 7236 - DNA, 453 bp, Methanobrevibacter gottschalkii
  source 1..453: mol_type = genomic DNA
atgaaagtaatggcgaccggaacattcgatatactccatccaggacatgtattattcctcaaaaaggctaaggaattaggtggagaagatgctgttcttgcagttgtaatagctagagattcaactgttgaaaaaagaaaaagaacaccaataataccccaagaacaaagacttgagatgattaaaagtcttaaacctgttgatgaagcctatcttggacatgctggagacatgtttaaaatcgttgaagaaattaaacctgacattatcgcaataggttccgatcaagaccacaatgttgataaattacaagaatccctagacaaaagaggaattaatgctaaagctatgcgtgttgaggattatatgtttggagaacttgacagcacttgtaaaattattaaaagaatcaaacacacagattttaaagataaaactggagaattatactaa

SEQ ID NO: 7237 - DNA, 738 bp, Methanobrevibacter gottschalkii
  source 1..738: mol_type = genomic DNA
atgtcatttaaaaaagatgaaatgttaatcatgcctgcagttgacattaaaaatggaaaatgtgtacaacttgttcaaggcgaacctggaagtgaaatggtagaattagaaaatcctgaacttgttgcaaaacattgggaagatttaggagcccgtaatattcatgttattgacttagatggaacaattaatggtattgctagtttggacactattgaaaaaatcctaaatgaaatcagcattccaattcagcttggtggtggaattagaagcttggactatgctcgtcagttattaaaccttgatattgaaagattaataattggaacaatgggcattcaacacccagaaactattactgaattatctgatgagtatggatcagatagaataatgatttcacttgacagtaaagacaataaggtagttattaaaggatggcgggaaaaaattgataaaagtccggttgaactttcatctgaatttaaagaatatggagctggaagtatcttatttacaaatgttgatgttgaaggacttttaggcggattttacacagatcctgtagttgagcttaaagaatctgttgatattcctattgtttattcaggaggaattacaacaatagatgatattaaaaaattaaatgaaagcggtgtggacggcatagtaattggttctgcactttataaagataaaattgatttaactgaagctttaaaatatcaaaagaggtaa

SEQ ID NO: 7238 - DNA, 951 bp, Methanobrevibacter gottschalkii
  source 1..951: mol_type = genomic DNA
atgaatgagaaactctatgaattatttgatgttgtgttaaaatctgaattttcaataaaagagtatgatgataaaacgattattgagttgggtgaaaactcaaaatatggaaaaatggaaacttattcgttatttccgggtattattcttgcttatattgatgtgaatattgaaaacgtggaagatgttttcattgaagaaaaaatggagtctagattgcttgaaattaatcattgtgctaggggcagatatgcatatgctgtcggtgatgataaaataatttactttggacgtggagatttatgtgttagcatttatgatttaacgaaatcattatcggagtttccattaggttattatgaaggattggagattttcattgatgtggatatggctgatgaatacattaaagattatgttcctgattttgatttgattgaattttatgaaacattggagaaaaataatgggtttgtattgctgagagctaatgaaaaaattgatcatgtaattggtgagctgtatgatgttgatgagagaattaaacaatcttattataagttaaaatgtttggaattgttattatttttttcaattactaattttactaaaacagaatcgttttctctttctaaaaaacaggttaaaattattgaaagtgtgaaaaacgatttgactgagaatctggaaactaaaataaccattgatcagcttgcaaataaatatggcatgagtaaaaccactttaaaaaattgttttaaggaaatttatggaaaacctatatttaaatggagaaaggagtatagattggattatgcttgtcatctgattgaggaaggccattattctattagtgaaatttcaaaaattgttggttattcttctcattctaaatttagtcaggcttttagggagtatgttggctgtgcaccttcaaaatataaaaattaa

SEQ ID NO: 7239 - DNA, 1791 bp, Methanobrevibacter gottschalkii
  source 1..1791: mol_type = genomic DNA
atgtcaaataatcaaaataagaataaattcatacgattgcttaattattcgggaaattataaatatttaactattttaggtatgattttttcaggtttaagtgcaatttctcttttagtcccattcatatacatatggaatgtggtaaatgcacttttagttgtagctccagactttgctaaagcacagaatttggaaagttatgcggttggtgcgtttttctatgcatttttagggattgccttaaacttttgcggtttaatgtgcactcacttatctgcatttaaaaatgagaaaaacatgaaagatgctactatcaatcatctgttaaatttgcctttaggttatttctcaaaccacactagtggcggcttaagaaaagtaattgattttagtactgcaaaaactgaaggatttttagctcataatttatttgatctggtaggagcaatagtcacaccaattgtatttttaatattgttattcagttttgatttgttgcttggattaatatgtattattccaattatactatgtttcttattcatgtatccaatgttttctaaagattcacaaaacattatggcccagtatcaaagttacttggaaaaaatgaattctgaagcggttgaatatgtaaggggaattccagttacaaaagcattccaacaaactgtatattcatttagaaacttcattgatgcaattaaaaattacggaaaattcgctgcagattattctctatcaacacaacttccaatgactgcatttacagtatccatcaatggattttttgctttattaattcctgcaggcatattaattgcaggaactcttgttgatgttaaatttttagctaattttattttctatgtgattttcacaccgatatgtgctgtgatgatgaataagataatgacaatttcacaagattggatgcttgcaagttatgcattggatggtattgaagctattttaaatgaaaaaccattagcagaaccggcaaacccgcagaaacctaaaaatcattcaattaaatttgaaggagtatttttcgactatgaagaatcaaactctgaagaacatatattaaatgatattaatcttaaaataaacgaaaatgattctgttgcgttagttgggccatcaggtggaggaaaaacaactattgcatcattaattccaagattttgggatgtggatgaaggttcaattaaaattggtgaagttgatgtgagagatatatcaacaaaagacttaatggagaatatttcttttgtatttcagaatactaggttatttaaagattcaatttataataatgtagctattggcaaaaaaggcgcttcaagagaagaaattctaaatgcattaagtcttgctcaatgtgatgatattattgatgagttgccggatggaattgatacagtaattggaacagagggaacttatctttcaggaggtcaacaacaaagaatcgctcttgcaagggcaattttaaaagatgctccaattattattttagatgaagcaactgcattggcggatcccgaaaatgaatacatgattcaaaaagctatttcggaaattaccaaagataaaacggttataatgattgctcataggttatctacagttaaaaatgtggataagatttatgtggttgaaaacggaagagttgtggaagaaggtaatcacagtactttagttgaaaatgaaggtctttattctaaaatgtgggatgaattcaacagatctattcaatggaaagttaaaagtgaggtgatataa

SEQ ID NO: 7240 - DNA, 1746 bp, Methanobrevibacter gottschalkii
  source 1..1746: mol_type = genomic DNA
atgttatctgaattgtttattgaaagatttggattaacaaaagagggttctgataatttaattaaaggaattatttacactgcacttcaaaatatttcattcatgtttccagttggattatatgctgcactgttatatatctggattaatcctttaatgggtggggaaataatcagtcctgatttaggaatatttattttaggcattttgattatacttggaattatatttgcattttcatggaaacagtatcattttgtatataatacaacttatgttgaaagtacaaacagacgaataaatttaggtgaaaatttaagaaaattgcctctttcattttttgaaagaagggatttagctgatttaactgcaacaattatgaacgattgcactgatttggaacatgtgttctcacatgcaattcctcaattgcttggttcaatattatcattaattttagtgtccattggtcttctgatctttgactggagattagccgtagcacttttatgggtagttccagtatcatttataatactgtatatttcaaaaagaatgatttacagaggtagtaaaattgtaacaaatgatttgcttgaatgcggagattcaatgcaggaatgtatagattcaattcgtgatttaaaatcatataattatgaaaatgagtatttatctaaattaaatgatattaccagcaaaatagaaaaatcaagaattaaatcagaattaatgctttcaagtggagttattactggaaaagtaattttaaatcttggaatagtttctgtcatattattaggttcaaatctaatcatgaatggtcaggtaacaatttatacttttttaatattcctgatagcttctgcaactatttatgctccagttgaaaatggattaatgtttttgtctgaaatattgatgatggatattaaaattgaaagagcaaaggaaatagaaatgcttgttacagaagagggtcttaaagattattctcttgatggttatgatttggaatttagaaatgttaaatttaactatgataatttaaaagatgttttatctgatattgattttattgcaaaacaaggtgaagtgactgcacttgtcggaccttcaggaggaggtaaatcaacggtttcaaaactcgcagcaagattttgggatccggtttctggtgaagtttcaattggagggcaaaatctggcagaattggattcagaaaaactccttgaaaacttttcgattgtatttcaggatgtaattttatttaataatacaatcatggagaatattcgtgttggaaaaaaagatgcaagtgatgatgaagtgattaatgcagcaaaacttgcagaatgtgaggaattcgttcaaaaacttccgaatggatataatactattatcggtgaaaatggtgagttattatccggaggtcagagacaaagaatttctattgcaagagctttacttaaaaatgccaatattgtccttttagatgaagcaacttcatttttggatgttgaaaatgaatctaaaattcaaaaggctatttcaacattaattaaaaataaaacggtcattatcattgcacataggatgcgtacaatcgcaaatgcagataaaatcgttgtcttggatgatggtaggattgttgagcaaggttcaccagatgaattgcttgctcaaaatggattatttaaacatatggttgaattacaaaaattaagcggtaaatgggagatataa

SEQ ID NO: 7241 - DNA, 582 bp, Methanobrevibacter gottschalkii
  source 1..582: mol_type = genomic DNA
atgagtgaaatattaaatgtgaaagatttgattactgttggtattttttcagtgattatggtggtattgatattcctgtttggaatgttgggatatattccaatattgatgttggctcttccgattattgctgcattaatatgtggagttccatatatgctgtttttaacaagagtaacaaaatttggaatggtgacattgctgggtttagttttaggaattgtaatgtttttaagtggtcacacatgggtgcctattgtaatatttacgttatttgcatttgttgcagattgcatattaaaaatgggcgattattcatctgttaaaaattcaattattagttatagttgttttatagtaggtattatgggtaatatgctaccattttttgttttaagggattatttcattggatctatacgtaattcaatgggtaatgattatgtgaatgtgattgcaccatttttaaattatgaagtttttataattctagttattttaacatttatttttggtttaataagtgcatatcttggtaaaatagtattgaaaaaacactttgaaagagcgggaatagcttag

SEQ ID NO: 7242 - DNA, 723 bp, Methanobrevibacter gottschalkii
  source 1..723: mol_type = genomic DNA
gtggaattaaaactaaataataatcctggtttaaatgtggatcctagaacaaaaatcattcttctgattattataagtttcatggtttttaatgaggcaccgttatatgttagcggtattctagttttaattccatttttctgtttatttttttcagattataaaaaagtagccttaatttatattgcagtatattcaatggccatttatgttcaaatttatttgattccgacatctacaggtatcttatctataatcttgataacttttagttatacctcatctaggatgttgcctattttcatgatggggtattatacaatatcttcaacaaaagttagtgaatttataacttcaatggagaatattaatgttccaaaagagattattattcctctttctgtagttttcagatatgtgccatcagtttatgatgaaatcaaatcaataactaatgcaatgaaaatgagaggttttggtttaacagttaaatctttaaaatctcctttgaaaatgattgaattttatatgattcctattttaataagtgctgttaaaacaagtgatgaattatcagcagcgtctcttacaagagggcttagtaatcctagaaaaagaacgcatttacttgaagttaaattttctaaaatagattattttttaattatgattgcggttatcgggtttataatttttgcatattattttataggaggtcattaa

SEQ ID NO: 7243 - DNA, 1434 bp, Methanobrevibacter gottschalkii
  source 1..1434: mol_type = genomic DNA
ttgataaatattaataatgtttcattttcatataatgatgatattaatttggaaaatattaatttaaacattaaaaaaggtgaagttattttactttgtggcgaatctggctgcggaaaaacaacactgactcgttttttaaatggacttattccaaatttttttgatggaaatagaaagggttcagtatatatgaatggcaatctgattgatgagatgaagatatatgaaatatcggaatatataggatcggttttccaaaatcctaaaacacaatttttcaatgtggatacaacttctgaactggtttttggatgtgaaaatttagctattgataaagatgaaattgaaagaagattggaaatggttgtcaatgattttgatttggaacatttattaaataagaatattttcgaattgtccggtggtgaaaaacaaaaaatagcatgtgcatctgtttctgcggtttttccggatatattggttttggatgaaccatcttccaatttggattctcaatcaacttggtatctgggagaaataattaaaaaatggaaatcacaaggaaagacggttattatcgctgaacataaattattctttttagaaaatgttgttgataaagtaattttcataaaaaacggtagaattactaatatttggccaatttcagaatttaaaaatatttctcataaagattggggtttacggcaattgaatttagggaatttaactgcaaaatgtggtgaatattattccaatgctcaagaatttttagaatttaaaaattttaaatttaaatataaaaaaatccctgtgttggatatgggtaattttaaagtacctaaaaatgagataattgctattattggaaagaatggtgctggaaaatctacctttgcgaattgtttgtgcggtcttaaaagatcattcaacggtgaacttatttttaataataattctctaaaaagaaaagatagattgaaaaagagttatatggttatgcaggatgttaatcatcaattattcactgaaagtgttcttgatgaagtattgttgagtatggatgaagaagatattgattttgctgaatctattttgactaatttgaatttaattcatctaaaggatgctcatccaatggttttatctggcggtgagaaacaaagagttgctattgcttctgctattgcttctaaaaaggaaatattgattttcgatgaaccgacaagtggacttgacttaaataatatgatgaaagtaagtgaaaatttaaaatatcttcaaagcttagggatgacttcttttattataacccatgattttgagctaataatggaagcatgttcccatatcattcatctggaggatggaaaattaattggaaattataagattaacggagaaaaattaagtgagttttttttaaattaa

SEQ ID NO: 7244 - DNA, 705 bp, Methanobrevibacter gottschalkii
  source 1..705: mol_type = genomic DNA
atgagtacaattattgaatttaaaaatgtgtgtaaagaatataaatctggagatcacattttaaaagctatggataatgttaattttacaattggtgaaggggagtttgttgtaattcttgggccgtcaggtgcaggtaaatccacactattaaaccttttaggaggtcttgatagtgttacttcaggtcagattattgttaatgataatcatgttgaatcattcactgacaatcaattaactgaatacagggctaaaaatgttggttttatctttcaattttataatttgattccaaatttgactgctttggaaaatgtggaattaatgaaagatattgtggatgtaaaaatcaatggattggatgttttaaattcagttggcctagaagatcatgctaatcagtttcctgcacaattatccggtggggaacagcagagagtatctattgcaagagctgttgctaaacagcctacaatgcttttatgtgatgagcctactggtgcacttgactcaaaaactggtgttttgatcttaaatttacttcaggacatgagcaataacaagaatactactgtggttattgtaactcacaatgctattttggcggatgctgctgataaagtaattaggattaaaaacggtcaaatagaaagtattgctataaatgaaaatccgaataaggttactgatttggaatggtga

SEQ ID NO: 7245 - DNA, 2271 bp, Methanobrevibacter gottschalkii
  source 1..2271: mol_type = genomic DNA
atgcttgcaaagaagatgttaagagacatcaaaaagcataaaactcaatttttatctatttttttaatggcatttttaggagtatttgtgtttgctggtgttggcggggaatcagtcgggcttgaagtaaatgtaaataattactataatgatactaatttagctgatggttggatttattcacctaatttggatatgaattttattgatgatgtgaataatttaactccaacgactcaaagtgagagacaactggttttagattcgattgcggatttttcaaataatcctgagattaaactgcattttatcgagaacaatactatatctaaattttatttgatggatggtgaaccattgaatatcagtgatgaagatggggtgtggcttgataaaagttttgcagatgctaaaaatttgaaagtgggcgacaatattacttttgagtttaacggatttaaaatcaaaaaagaaattaagggaatcggatattcgccggaatatgtatatcatgcatcaacttcatcagtaatacctgattttaacaaaattggttttgcttacatgtcttataaagcatttcctacagataatattccatataacgttttaaatgtaaaatttaccggatctcctgaggaatataataatttattgtctgataaacttgatggggagtataattcatttgttgaacagtctgaacattcaagtgtttctcaattttcagaagaaattaatcagcataaaatgatgggggatatttttcctgttgtatttatattgattgcaatgctaatccttttaacaacaatgactagaattattgcacatcaacgaactcaaattggtattttaaaagcaagtggatttacaaataaatcaatcatgattcattatgtttcttacggtttctggttagttttgattggttctattttaggtttaattattgggcctgtgacattgcctcagctattttatccatcaatgagttcaacttacaaattaccttcatggaatcccgcatggagtatggattttgtttatgttgctgttgttatgattataatgtctcttttagtatcttattttgcagttagaagcatttcaaaggaaaatcctgcagatacaattaagccaaaaattcctaaaatttcatcatcaggtttagttgaaaaaataggattctggaaacatttatcttttaattctcgttggaattatcgtgatgctaaaagaaataaattcagggcattaatgacaataattggagtcattggttgtactgcacttctagtatcagcattcgggatgtatgatggaatgaatgatttaaaggaatgggaatttaatcagataaatcattatgattcaaaattagtcattgataatgacgcatccttatccgaaattgatgatgttgcccgtgatgttgatggggataaaataatggaatcagctattgaaattgaatcggattcggctaaaaagtcagggtctctgatagctttaaaccacacggatttgataacaccaacagattatgattggaataaaatggaaataggagatgatgaagtttctatttcacaaaaaatggctgacatgttggatatcagtgttggggatactgtaaaatggcatattattggttcggataaatggattaagacaaaaattgataagattcatgcagatccgacatcacagggaattgtaatgtcttctgataaactagaaaatcttgatttaaattacactcccacaagcattgttactgaacagcatgttgataagaattattctattattaaaacagttaactcaatgaaggatataacttctagctgggatgaattaacagaatcaatgtggctattaatttatatattgatattttttgcatcccttctggctattgttgtactttataatttaggtttgttatcgtttacagaaatcgaacgtgaaatagcaactcttaaggttttaggattcaaaacaggttcattaaggaaacttctgttaacacaaaacttatggtttacttttgcaggatttatattggggcttcctgttggttattatgtattaaagatgatgtgggattcttcaggagattcattttacatattgccttcaatatctcctatgaattttattctaactgcgacaataacatttactttatcgatactggtaaatctaatgttttcacgtaaaattaagaagttaaatatggttgaatccttaaaaagtggggaatag

SEQ ID NO: 7246 - DNA, 222 bp, Methanobrevibacter gottschalkii
  source 1..222: mol_type = genomic DNA
atggctaaaattactgcagactcaaaatatatggaacttttaaataaatatcctttacttaaaagagatttatctcaaaaaaactggaaattcgaatttctagtaactccaatgggaaaaatctcattatgggaagctaatcttgaagaagtaagtaaacatgctgaattgagtgttgatgagacagttactttatttcaagacttagttgattcatactaa

SEQ ID NO: 7247 - DNA, 2259 bp, Methanobrevibacter gottschalkii
  source 1..2259: mol_type = genomic DNA
atgtcgttatctaaaaagatgttaagggatataagaatcaatagaacccaatttattgcaatatttctcatggcatttttaggtatttttgcatattgcggaatctgtagtgaatattatggattggaacagacaagtgcggatttttataatgaaactaatctggctgatggttggatttataaaaccagttttgataatgcagatttggataaaataaataatctggcaatgcaaacagaaagacaacatgtaatttcatctgttggggaatttgataatgatcctgacattacactgcattttgttgaaaacaatacaatttctaaatttcatgttttccaaggaaaagattttgatattaatgatgagtccggtgtctggttggataagcgttttgctgattcaaaagagttaaatgtcggagacaatattacttttaaatttgatgggaaaactattgaaaaagagattaaaggtattggatattctcccgagtatgtttacgagtcatcggctacttcaattactccaaattttgaggatgttggtttcgcatatttgtcatataagtcatatccagataatgttgaatttaatcgtttactggttaaatataatcagtcagatgattcttttaaagaaaagcttgatgattcaattagctatttgtcatttacaaaacaggaagaccatgttagtgtggcacaatttagtgaggaaatggcgcaacataaaatgatgggggatgtttttccaattctttttattctgattacatttttaacacttttaacaacaatgacaagggttgtaacatatcaaaggactcaaattggaatcttaaaagcagttggttttaaagataggacaataattttacatttcatctcttatggatttttcccagttctgataggttctattttgggacttattgcaggaccgatggttattccaaagatgttttatccatcaatgactactcgttatactttaccttcatggaatcccggttttgatatgagttttgtttatgttgcagcagcacttgtgatctcttcagttattgttacgtatttgacttgcagacgtatttcaaaagaaaatcctgcaaataccatgaggccaaaggctccaaatgtatcctcaaatagcttttttgaaaaatctaaattatggaatcatttaagtttcaatttccgttggaactggagagatgcaagaagaaataaattcagggcattaatggcaattattggtgttatgggttgtgtttcattattaatcgcagcttttggtatgaatgacagtatggatgatttgaaaacttgggaatatgatgacattaatcattttgagtcaaaattagtgatttctaataatgcatctcaggaagaattgtattatgtaattaatggaactaatggcagttttataatgcagatgcctattgaaattaaatcgaacaatcatgaaaacacgggtgtacttttagtttcaaacaataccgacttgatatcttacacggatagtaataaaaatccaattgaaattaaggaaggggatatttcaatttcaacaaaattggctcaggattttaatttaagtattggtgataaaattaaatggcatattgttggaaatgatgactgggttaaatcagaaattggtcaaattcatgcagaacctatttcacaaggtttaataatgtctcccgatactttagaagatgaaggtttaaattttacaccaaccagtattctaacttcagaaaaattcggtgaaaatatcaattcaattaaatctgtatctactcttgaagacatggaggaaagttggagtgagatgacttcttctgttatgatgatggtttatgttataactgttgttgcatgtcttttagctattttagtcctttataatcttggaattttatcatttactgaaatggaaagggaagttgcaactttaaaggttcttggttttaaaacaaatttcttaagaagattgttgttgactcagaatctgatttttacagctattggttttattttaggaatccctctcggattctatttcatgacattgatgatggatgctgcaggggaatctttgtattatgttcctatgttgacttggggaaatataatgctgtctgctgtgataacattttcaatatcaattgcagttaatttaatgttttcagataaaattagagatttgaatatggttgaagctttaaaagatgtagaataa

SEQ ID NO: 7248 - DNA, 717 bp, Methanobrevibacter gottschalkii
  source 1..717: mol_type = genomic DNA
atgaaaagaagcaaaaaactaattattgccatccttcttgtaatccttttaggattggtagcgtttattgtaggtacattatttatgacacctgacttatctcatgaaactaagaatatattagtattagcatctgataaagaagaacagccaaacggtggagtagatatggcattcatgatccgtttagaaaacggttcacttaaaaactatacaccaatatatcctggtggaatgacacaccctacaaaatcagcacctggaggccttcaaggaccaatgatgcttcacgactgtctatggaatggactgggtgaaggtatgcaaaatgcaaaggaaattgtagaagttcgtacaggaatgcatgctgatgcagtagttgttgtttatgataaaggtattgacagcattattgattcaatcagaccacttaaaataaatggtactgaaacaaaccttagtgcaacagacatcattcgtcaaaacgatgcatataatggatatccaggaaatgaacatgttcaaggaacaatgtctagatccgatgcggtaatggtattggctaaagcacttgctaatacagctaaagatcctgttaaaaaaagtacaatggttcaaacagcactaaaagaatattccaatggaaatatcataatggaaccacaaggatcatttacaaaattacttgcaactaaaggatttgaaagcataacttaa

SEQ ID NO: 7249 - DNA, 378 bp, Methanobrevibacter gottschalkii
  source 1..378: mol_type = genomic DNA
atgactatggaaaataataatcttggaaataaggatgatttgtgtgaagtttttgattctcatgaagatgttgtaaatcgtgtaaaagaacgtatacctgatgaaagtgattttactgaactatctgaattctttaaaatatttggaaacccaacaagattaaaaattatttccctgcttagtattgaagatttatgtgtatgcgatatctgcgaagcgcttgatttaaatcaaaccacggtttcaaatcaattaagaatactgcgtgcgaataatattgtcaaataccaaaaagaaggtaaaatggcaagatattctctcacagaccttcacattgaaatgatttacaaagtaggtttggaacatatattagaataa

SEQ ID NO: 7250 - DNA, 2355 bp, Methanobrevibacter gottschalkii
  source 1..2355: mol_type = genomic DNA
atggtaaaaaatagatgttatgatgctgattgtgataaagataactgtcacaatccagaacattacaattatatctgttttgatccaaattgtgatgaaattaaatgtaatgattctgatcattatgataaacaattattaagagattatcaaaaaaatacagatttaagtgtttatgatcatggagaagagatagattatgatgaagatgttgatataagtctttgtggttgtcctgattgtgcagacgaccatgatcacgatcatgatcatcaccacgatcattctcatgaccatcatgaacatgatgaggatgattcatgttctgatgaaagttgtagttgccatgaccatgatgagcatgaccatcatgaccatgatgatgttgatataagtctttgtggttgtcctgattgtgcagatgatggccatgaacatggtcatggagatgaagaattgttggctgaaggaaaaccattaattgctaataggccaatacaaatcattgtttcaagcggcatattgtttgttttaggtcatgtttttgaatggttgtcatttagccctgcagttgttacaataatttatatgttaggtgctttaattgcaggttatgaaatagctgttttagcatacaactcattagttaaaagacatactgttggtccggcaatgcttatgtgtgttgcatgtgtagcttcatttattattgggcatcctgaagaaggtgctgcagtaacatttttatattacatagcggaatttttagaagattatgcggaacatcgtgctaaacgttctattaagtctttagttgaaattgctcctgaaactgcaagggtaaaattaaatgattctgaggagttaagaaatgttgatgatgttgatatcggtgagatcgttattgtaaaacctggagataaagttcctttggatggtgaagttgttttaggatcttcatcaattaaccaatcttccattactggtgaaagtgttccagttctaaaggaaactggtgatgaagtattttctggaactgttaatgaagatggttacttggaaattgcggtaactaaaaaggctaaggattctgttatttcaaaaattgtcactttggttaaaagatctcaactcaacaggtctgaaaccgaatcattagttgaaaaagttgctaaatattatactccaatcatgatggttgcagctatttgtgttgcattaattccatcgtttgtatttggtcaaaacttagttgattgggtttataaagcgctttcacttttagtaatttcatgtccatgtgcatttttaatctcaacaccggtaggtatggtatctgctattacctcagctactaaaaatggtgttttgattaaaggcagtacatatgttgaagagatgcgtgatgtaaaagcagtcatctttgataaaactggtactttaacagagggaaaattaattttaagtgatgttgaagttctggatgaaaacttctcaaaagaagatattatcaggattgcagcatctctggaaaatcaatcttcccacccaattgcacaggctattgtaaattatgcaacagtaaatggtattaaatttagtgaaattaatgactttaagaatgttccgggaaagggcattgtagctaatattggggaagaacaatactatgcggctaatgaatcattaatagaggatgggtcatttgaagtttcaagagatgaaattaatagatattcagctgaaggtaaaacaattgtatttattggaaactcaaagaatgttttagccattattacagtatctgataaaattagaccaaatgctcatgaggtaatttctgatttaaaagaacaaggtgtacagacaatcatgctcaccggtgataataaacttgccgcaaaaagtgtggcatctgaaatcggaatggattatgtgtattctaatctaatgcctgaagataaactaaacattctggatacaattagaaacaagtttggtgatgtggctatggttggggatggcattaatgatgctccggctctagcacgtgcaaatattggtattgcaatgggtgctgcaggttctgatgtggctattgaaacagcggatgttgcattaatgcaggatgatatttcaaaactcccatacctgttcactttaagccgtaaaacaatgggtattattaaacagaatattactgtggctattgcagttaaattgttatgcgtaatacttgcaatcttaggcatcattacattgatgatgtctgtaggttttggggatttaggactgacaatgcttgttatcttaaattcctttagaattggaatggtgaaagatccactattctaa

SEQ ID NO: 7251 - DNA, 1371 bp, Methanobrevibacter gottschalkii
  source 1..1371: mol_type = genomic DNA
atgttaagtaatgatttggtaaatggtgttgaactgatgcttcaaaaccctaaaaaagcattaattgaaatgtccataccattgattatttcattactcattactagtttttacaacttgattgatgctgcttgggtttctggtcttggtgctgatgcacttgcaggtgttggattttttacaccaattttcatgattttagttggctttggaaatggattaggttctggagctgcttttgcattatccaaatatctgggtggaaataataaacaaaaagcggataatgcagcgattcattcaataatcattgatctaattgcatcattgattataactcttgcattattagttctattaaatccgatattaaatgcgatgggtgcgggtcaaactattggttatgctactgattatggcatgattatcattttaggctctgcatttattatactttcaaatgcattgtatggcatttcaagaggagaaggggatactacccgtccaatgtatgctataattgcatcagctattttaaatatgattttggatccgatttttatttataatttaaatttaggtgttaagggagccgctattgcaacgattgtttcatcagtttttgtaattttaattttattatactggttttatattaagggagatacatatttaaaacctaatttaagtaattttgattttaaaaaagatatttcaatagatataattaaagttggagttcctgcaagcattcagcttttgaataatgctttttttgctgcagttttctcagcactcttaacatttgtcggttcaactgattcggttgcagtctattcgacaggttggaggatagttactattggaacaacaccgttaatagctattggaacggccttgattagtgtaattgcagcaaattatggtgcaaaaaactataaaaacattcaaattgttcataggtatgcaatgaaagtatcaattgcactggctattattgtggctattttaacaaatgtatttgcaggagatatttcctcagtatttgcttcttccggaagtagtgtaagaatagctgcagagcttacaggtttcctttcatggattgtaatttactatccaacaatggctgttggtgttgcttcaacttatgttttccagggtattggtaaagggattactgcaatgtttcagacaattataagggaaacaggtttcacaataacttttgcagtattgtttgctgtagttttaaattatggtgtatggggagcatggatgggtattgttttaggtgaaattgtctcaaataatcttactatgctttgggcggattatcttgttaaaaaattaatagatattagtggttaa

SEQ ID NO: 7252 - DNA, 615 bp, Methanobrevibacter gottschalkii
  source 1..615: mol_type = genomic DNA
atggaacttaaaggaagcaatatttcatttaaatatccttcaactaaaaaatacatattgaaagatatagacatatgcatcgacaacaccaaaatcaccgcattagtcggagacagcggaagcggaaaatcaacactatgcaaaatcctctcaggatacacaaataattttgagggtgcagtcacattagacggtaaagaactacctaaaaaagaattttgccctgtgcaattaattttccaacatccggaaaaagtaatgaaccctaaatggaaaatgaaccacattctagaagaatcatggatgccggacgataacctcttaaaagaatttggaattcaaaagacatggctgacaagatttccacaagaactgtctggaggagaactgcaaagattctccgtgttaagggcattaaacccaaaaacacaattcataatagccgatgaaatgaccacaatgctagacgcgataacacaagtacaaatcctaacatcagtcattgaaatcgttaaaaaaagaaacatgggaatgctaattgtaagtcacgacatgccattagtagaaacaatatgcgacgaaataatttacttaaaagatattaatggaatttaa

SEQ ID NO: 7253 - DNA, 960 bp, Methanobrevibacter gottschalkii
  source 1..960: mol_type = genomic DNA
atggagaaattattagatgtagaaaatgtatcaatttcatttattcaatatacgcaaggtttgaatcaaagagatctgaaagttattacagacctaactttagatgtatttgaaggagaaatactagccattctaggttcaagcggatctggaaaaagtttgctcgcacatgcgatattcggaattttaccagaaaatgcaaatttaaatgggacaataaaatacaaaggaaaagaattatcacaaaaagataaagaagaaatccgtggaaaagaaatagcacttattccacaatcagtaaacttcctagaccctttgatgaagatttcagatcaagcaattggtgaaactaaagatgatgctgagaaaaaggaaaagaaacagaaacaaagagaaatttttgaacattacaatctaggtcctgaagtagatgacatgtacccctttcaactttccggaggaatggcaagaagagtacttgtatcaacagcactactatccaatccaaaactagtagtagcagacgaaccaacaccaggattagatcaaaaaacagtcaaagaaacattaaatcatttcaagcatatgaaagaagatggagtaggagtattgctaattacacatgacattcatgcagcattagaagtagctgatagaatcggaatattctattcaggatacgtaatagaaattgcagaaaacaaagacttctcaggaaacggagaaaacctcctacacccctacacaaaagcactatacaaagcattacctgcaaacgggtttgaactgacagaaggacaccaaccattgcatggggaaatccctaaaggatgtccatattatgacagatgcgaaatgcgtatgggaatatgcaaagaagaaagaccggaactgacagaccttggaaacaaaaaagtcagatgttttaaatatgaaggaggtctaaaaaatggaacttaa

SEQ ID NO: 7254 - DNA, 855 bp, Methanobrevibacter gottschalkii
  source 1..855: mol_type = genomic DNA
atgaataattcaaataaaagcatttatagtccaatttcaaaaatgaatttaagaacaaagacattgttaacaattggtcttactgtatctttattaataattgttatgataacaagtttattaattaattctacagacataacaactaattttagtgcaatgaatttacctccttcatttgaacatttatttggtactgattggttaggtagagatatgtttatacgtactttgaaaggattaggattaagtgttcagattggtgccggagcatcaatattaagtagtttaattgcaattattttatcctttgtatgcagcattaataaaaaatttgattcatttgtcgcatggatagtggatttatttttatcaataccacatattttacttatcattttaatatcaatctcattaggtggtggagcatttggtgtaactgttggagtagcacttactcactggaccacactcacaagagtattaagagcagaaattaaacaaataaaaacatcagattatgttaaactatctgaacaattcggaaaatctaaattttggattgcaagaaagcatatattgcctttagtaattactcaaatcatagttggaaccatattaatatttccacatgcaattatgcacgaagctagtgtaacattcctcggtttcggattagcacctcatgaacctgcaattggtattatcctatctgaatcaatgaaatatcttgcaacaggtaactggtggttagcattattcccaggactcgctttattaatcttagtattattattcgatatcgctggagaaaacattaaaaagatacttgatcctacaagtgcaaatgaataa

SEQ ID NO: 7255 - DNA, 996 bp, Methanobrevibacter gottschalkii
  source 1..996: mol_type = genomic DNA
atgttaaaaaatgaaaagattttaaaatttttaggtaagaaaattattagatttataatattactcatatttgttataatattaagttttatactaattgacatgtcccctataaatcccgtaaaaacatatattagtgctcttggatcagtttcttctgaaaaaatagctattttagaggcatattggggggtgaatgaacccataacaacaaaagtaattagttggttaggaaaaatagtgcaaggcgattttggaacatcattaattttcagaatgcctgttattgatgttattaaagaaagatttattgcatctttagtattaatgttaacttcatggctattttcaggacttttaggattcatattaggaacaatagcaggatttaaaaaagataccattattgataaagcaataaaagtatattgttatattttacaatctgcaccaactttttggattgcattacttttcctcatgatatttagcgtatatcttggttggttcccaaccggattaggagtacccatcggaacattaagtgaaaatgtatctatttgggaatggttacacagattaattctccctatgattacattaagtgtcgttggaatagcctcaattactttatatacccgtgataaattaattgaagtgatgaatagtgattatttcttgtttgcaaaagcaagaggagaaagtggttggaatttaattaaaagacatggaataagaaatattctactcccagcaataacaatccaatttttaggattttcagaattatttggaggtgctgtacttgtagaacaaatatttacatatcctggaattggacaagcagcagtatccgctggattaaaaagtgatgtgcctcttcttttaggaattgtaatttttagtgcaatattcgtttattgtggaaatttaatagcagatatcctctataacttcgtagatccaagaattagagaaggtgaagaagatgaataa

SEQ ID NO: 7256 - DNA, 1629 bp, Methanobrevibacter gottschalkii
  source 1..1629: mol_type = genomic DNA
atggaacaaaaatacattataggaataatagtattaattttaattgcaattattggtggaactctttttatgagtggaggaaataccagtacaagagcagataatgaattagtagtttctgcttttgtacatggcagtgaaccagaaacaggttacgacccgatgtatggttggggagaccgtggagaaccattaattcaatcaactttgatgaaaatgaatagaaatatgacctatgacaatgatttagctacaagttggtcttctaataataactttactgaatatactgtaaatatcagagatggagttaaatttactgacaacacaacattagatgctgaagatgtagcattttcatataatcaagcaaaaagtactggaaatacaattgatttaagtagtttagataatgtaagtgcaattaataaaaccactattaaattcaagttaaataaaccagattcaacatttacagacaaactgttacatgtaggtatcgtaccttcagattcatatgacaataatacttatggaagtaacccaataggatctggaccattcaaacttgcacaatgggataaaggtcaacaagtaatctttgagaaaaatccaaactattatggaaaacaaccaaaatttgataaattgacaatatcattccaaaaaaatgaagcttcatttaatgcagctaaaaatcatgaattagatattgcagcagtaccattatcttacgcaaatgaaacaatagatggttaccactcatttttatccgaatcaaatgatgtgagaggcatttcattaccaatgaaaaacaatactggtgaaactaatgaagatggcatagcattaggaaataatgtgactgcagataaatcaatcaggttagcattaaactatggtattaacagagaagacatatgtaaaggtgcattaaacggtgccggcgtacctaactacgatggtatcgctcatttcttaccatggtacaataatgattccactatcaaagatgcagatattgacaaagctaaagatttcttgaagaaaggtggatggaaagatacagatggtgatggaatagtagaaaaagatggtaagaaagcatcatttaacctatactactcatcagatgcaccggaaagacaagcaattgcagtagcagtttcagaacaagcaaaagaatttggtattgaaataaatgcaacaggttctaattgggatgaaatagataaaatcaaatttagtgaaccagttgtatggggattcggttctactgatccttatgtaatgtacggagaatactatagtaatcaagcaggtattggatacaacaacccatcacttgtaaataacagtgctgtagattcacatattgataaagcaatgtctgaaccacgtgaacaatcatatgctgactggtctgcagtttcatgggatggtcaaacaggcatttcaccaaaaggtgatgcagcatggttatggataagcgaaatcaaatacacatactttgtagatgatagtttagatatttccaaagatacattcaaattacaacctcatggtggagacttattcggaaacatctacgattggactcgtatatctccaattaatgctacaaattaa

SEQ ID NO: 7257 - DNA, 1620 bp, Methanobrevibacter gottschalkii
  source 1..1620: mol_type = genomic DNA
atggaacaaaaatacattataggaataatcgcagttattttaattgcaattgttggtggagctatcctaatcggaggcccatctactgaacgagcagacaatgagcttatagtggcggcttacagtcatggtggagaaccagaagctggttttgatccaatacttggatggaactactactcagaacccttaatccagtccactttgttaaaaatgacaagaggaatggaatatgaaaatgatttagctaaaagctgggaagcaaatagtgattttacagaatatacagtaaaaatcagggacgatgttaaattcacagacaacactactttagatgcagaagatgtagcattcacatacaacgaagctaaaaaaagtggagcaagcttagatttaagtagtatggaaaatgcaactgcagtagacaaacaaactattaaatttgaattaaacagaccagattccactttcgtagataaatttgcatacattggtattgtgccatctgattcatacaacaatgaaacctatggtgcaaatccaataggatccggaccatttaaattcgtacaatgggacaaaggccaacaagtaatcttagagaaaaacccagattactatggaaaagagataaaattcgataaattaacaattttattcgaacaaaatgaagctgcattcaatgctgctaaaaataaagaagtagatatagctgcagtaccattgtcttatgcaaatgaaactgtagatggatacaatatgcacctcatggataccattgatgtaagaggactttcattaccagtacagaacaataccggtaaattaagcgaagatggaaatccaataggcaacaacattactgcagacaaatcaataagagaagctttaaattatggtgttaatagaaccgcaatatgtaaaggagcattaaatggtataggagtgccaaactacgatggtatcgctcatttattgccatgggcaaataatgaatctgcaattgatgatggtgatgttgataaagctaaagacatcttgaaaaaaggtggatggaaagatactgatggcgatggaatagtggaaaaagatggtaagaaagcatcaataaatgtatattactcatcaaatgcacctgaaagacaagctattgcagttactattgctgaagaagccaaagaatttggtattgaagttaatgcaactggttcaaactgggatgaaatggataaaattaaaaatactgacccagtcgtatggggattcggttcaactgacccgtcaacaatgtggtccgaatactacagtgaccaagcaactgtcggatataataatccagcacttattaacaatagtgctgtagataagcatattgataatgctatgaaatctgatcgtgaatcatcatatgcagaatggtctgctgtatcatgggatggtcaaactggtatttcacctaaaggtgatgcagcatggttatgggttggagaaattaaatacggatatttcgtagatgaaagtttagacatatccaacaataccgaacttatacaacctcacggaggagatatcttcggaaacatatatgattggtcacgcgtatcttcaattgaaaaataa

SEQ ID NO: 7258 - DNA, 615 bp, Methanobrevibacter gottschalkii
  source 1..615: mol_type = genomic DNA
atggaacttaaaggaaacaacgtttcatttaaatatccttcaactaaaaaatacatattaaaagatatagacatatgcatcgacaacaccaaaatcaccgcattagtcggagacagcggaagcggaaaatcaacactatgcaaaatattagcaggatatgtgcaaaacttcgaaggcgaagttacattaaataataacaagttgccgaaaaaagaattttgccctgtgcaattaattttccaacatcctgaaaaagtaatgaaccctaaatggaaaatgaaccgcattctagaagaatcatggatgccggacgataacctcttaaaagaatttggaattcaaaaaacatggctaacaagatttccacaagaactgtctggaggagaactgcaaagattctccgtgttaagggcattaaacccaaaaacacaattcataatagccgatgaaatgaccacaatgctagacgcgataacacaagtacaaatcctaacatcagtcattgaaatcgttaaaaaaagaaacatgggaatgctaattgtaagtcacgacatgccattagtagaaacaatatgcgacgaaataatttacttaaaagatattaatggaatttaa

SEQ ID NO: 7259 - DNA, 960 bp, Methanobrevibacter gottschalkii
  source 1..960: mol_type = genomic DNA
atggaaaaattattggacgtggagaatgtttcaatttcatttattcaatatacgcaaggtttgaatcaaagagatctgaaagttattacagacctaactttagatgtatttgaaggagaaatactagccattctaggttcaagcggatctggaaaaagtttgctcgcacatgcgatattcggaattttaccagaaaatgcaaatttgaatgggacaataaaatacaaaggaaaagaattatcacaaaaagataaagaagaaatccgtggaaaagaaatagcacttattccacaatcagtaaacttcctagatcccttaatgaaaatatcagatcaatccataggacagacagaaaatgaagaagaaaaaaaggaaaagaaacagaaacaaagagaaatttttgaacaatacaatctaggtcccgaagtagatgacatgtacccctttcaactttccggaggaatggcaagaagagtacttgtatcaacagcactactatccaatccaaaactagtagtagcagacgaaccaacaccaggattagatcaaaaaacagtaatggaaactcttaaccacttcaagcatatgaaagaagacggagtaggagtattgctaattacacatgacattcatgcagcattagaagtagctgatagaatcggaatattctattcaggatacgtaatagaaattgcagaaaacaaagacttctcaggaaacggagaaaacctcctacacccctacacaaaagcactatacaaagcattacctgcaaacgggtttgaactgacagaaggacaccaaccattgcatggggaaatccctaaaggatgtccatattatgacagatgcgaaatgcgtatgggaatatgcaaagaagaaagaccggaactgacagaccttggaaacaaaaaagtcagatgttttaaatatgaaggaggtctaaaaaatggaacttaa

SEQ ID NO: 7260 - DNA, 561 bp, Methanobrevibacter gottschalkii
  source 1..561: mol_type = genomic DNA
atggatgttataattaaagaattaggtaaaaattcaaaagaaattgctgaagttcaggaatttttatttaaaatgattaaattggaatttggttatgattatgttcctcaatggcatcaggatattattaatcttgaaaaatattatattgatccaaaaagaaataatttttttattgcgtatactaaaactggtgaaattatagctacaattggtattagggcatatgataaagattttccagaatttaggcatttgtactctatagataatacttcaagtatttggcgattatttgtcgatagaagatatagacgttgtggtttagcttctaaaatgtttggtatagtggaaaattttgctaatacattaggttatgataatatttatttacatactcataaaacattggatggtgcaattgaattctggacaaaaatgggttttgttgttgcattagattctaatgatgagttagaaacagttcatatggataaaaagattcaaggagtaaacattagtgataatattgttgattataaatatgcagtaaaattatga

SEQ ID NO: 7261 - DNA, 693 bp, Methanobrevibacter gottschalkii
  source 1..693: mol_type = genomic DNA
atgagcctatctcttaaattaaagcaatatctaacagaccaaggtgctgatgaagtaggttttgcagacataaccaattttactcccaaaaaaaatttaaataaaggagtggttttttacatcacatatcaaaaagaaaccctaaggcaaatgcaaaatgcacccaccaaagaatatcttaatgaactgataaatttaaatctcaaattagatgaattaggtatgaaatgtgaagagtttttaattgaaagaggatataatgcatatgcgcaaacaaaaaaacgccttggatatgattttggtgaatttaattcatttgaattacctcataaaactattgcaacacgtgcaggaattggatggattggaaaatcagcactattaattacagaaaaacatggttgtgctctaagattaagttctgttttaactgacgccccattaaatccgggaaaacccatacttaaatcaaaatgtggaaaatgtatggaatgtaaaactgcatgttttggaggagcaataagcggaaaaaaatggaactataaaattaatcgtacagatttttatgatgataaaaaatgtgaaaaatatgcattgaaaatatcaaaagagaatttaggaaaatccgatacagtatgtggaaaatgcatatatgcttgcccatacactcaaaaatatattaaaaaatcataa

SEQ ID NO: 7262 - DNA, 1617 bp, Methanobrevibacter gottschalkii
  source 1..1617: mol_type = genomic DNA
atggataaaaagataataattggcgcgattgtagtggtgttggttgttattattggtgcttttgcatttatgggcgggtctcatgacagtgatccaactcatttaactgtagctgcacacagtaatattaaagaacctgaggcggggtttaatccgcttactggttggggatgtggacaccaaaactataatccattagttcaaagttgtttatttaaaacggataaaaatggaagtattgttccagatcttgctactggttattcagtaagtggggatggtaaaacttggactgttaatgttagggatgatgttaaattttcagataactctacttttgatgcagaagatgtggcatttacatttaatacagcaaaacaaactgaatctgagttggatttaacaaatattgcaaatgttactgcagtaaataacacatgtgttaaatttaatttagttgaagctagatcaacctttatttatgatttgagatatcttggaattgtgccttctgattcatatgataattctacttatggagagaatcctattggtactggaccttatgtattggatcattgggataaaggtcaacaagctatatttaaaatcaatgataattattatggtgataaaccgtactttactcaaattaccttattattccctgaagaagctacatggttagaattagctaaatctggtgaaatagatgtagttcctgttgcaacttctgcattgaatcaaacagtagatggatatcaatttattgagaaatcagcaggcagagcacagggtgtatctttaccatatcttaatgatactggaattatgtataatggtactatgaaagttggtaacaatgtgactgcggataaatcaattagagaagctttaaatgttggtattaatcgtcaaactatgtgtgatgaaatttttgcaggacatgcttctcctgaatttactggtgttgatacaagaacttatgcaaatcctgatgctaaagtagctgatggggatgtatcaaaagcaaaacaaatcttgaaagatggtggctggactgatactgatggcgatggaattgtcgagaaaaatggtttgaaagcatcatttgacttatattatcctccagattatttggatagacaatcaatgtctactgtttttgccgaacaagcaaaagaattaggtattgaagttaaacttgtaggtgctgattgggatacaatttataaaaatctatatagttcagcagctttaatgcaacaaacttctccagatccatacaaatcaatttatcagcaatatcacagcaaagaaatggatggattctatatgaatcctaacttatataataattccgcttctgatagattaatggatgaagctatgcatactagtgatcttaaccaggctgattcattatggtctcaatctgcccttgttaatggtggaggttggggtcctgctggagacgctccatgggtatggattgctaattatgattataattacttcattaaagacggtattgatattggtaaacaaccagatggtttaggaaatgatgttttgattaatatatgtgattggtcaagaaccaattccacagcttaa

SEQ ID NO: 7263 - DNA, 990 bp, Methanobrevibacter gottschalkii
  source 1..990: mol_type = genomic DNA
ttgaataaaaatcaattattaaaattttttggttacaagttaatacgttttctaatattgatgattgcagtttcaatattcagttttgtattattagatttatcccctatagatcctgtaaatgcgtatttaaaacaagctgcagtatcagaagctcaaagacaaatacttcaggagtattttggtacaaatgtcccattaacaactaaaatatttcattggttaattgatttatttcaaggtaatttaggcacttctttaatatatcgtgctccagttgtcgacattattttagaaaaagcttctgcttctatcgtgctgatggcgatttcatggttattaagtggaatcatcggatttttgttaggggttgttgcaggtaaaaataagggatcctggattgataaagcagtaaaagtttattgttatgcaattcagtctgccccatccttttgggttggtatgcttattttaatggtatttgcagtttatttgggatggtttccaattggatttggtgttccaattggtgttagaagtacagatgtaacatttgcagagtgggcaacaagattggtacttcctactttgacattgagtttagttggtttagcaccaattgcaatgtatacacgtaatgaattaattcaagttttatcttctgattttgtattatttgctaaatctaggggagaaaaaggttggaatttagtaaaaaatcatggcataagaaatatattattgcctgcaataacattacaatttttatcatttagtgaattatttggtggtgccgttttagttgagcaagtattctcttatccgggtattggtcaaacagctgttgcagcaggtcttcaaaatgatgtgccattatttttgggtattgtactattcagtgctatatttgtattcgtaggcaatctactcgccgatctttcatactatttgattgatccaagaattaaggagaaggagttcaatgattaa

SEQ ID NO: 7264 - DNA, 852 bp, Methanobrevibacter gottschalkii
  source 1..852: mol_type = genomic DNA
atgattaaaaaagctgacgataaaaagcaatggtttttatatcctgcaaatcttagaacaaaaactattgtaattattattctttcggcattggttattctaagcatttttatttctggttattttataagagatattccaacaagttttattaatgcaaatcaaatgccttccttagaacatctctttggtaccgattggatgggtagggacatgtttcaaagaactattgcaggtctcggattaagtctgatggttggttttattgcatctattgttagtactgttatttctattattttaggattattttcaagttttaataaattcaccgatgaatttgttgccggaattattgatctgtttggttcaatacctcatattcttttaattattcttatttctatgatgtttggtggaggagtaattggagtagtgatgggtgtaggtttaactcactggacgccgcttgcaagagttttaagatctgaagttaaagaaatcaggacaaaagaatacatttccttagcagagaatttaggaaaatcaaaaatgtggatagcaataaaacatattttaccattagttatatctcagattattgttggtgttattctaatgtttcctcatgcaatcatgcatgaagctgcaattacattccttggttttggtttgcctccacatgagccagctattggtgtaattttatctgaatcaatgaattatttatcctctggatattggtggttagcattttatccgggtatgtcattattgattgttgtattactgtttgattttatcggagaaaatgttgaaaaattattaaatcctgaaactgctcaggaataa

SEQ ID NO: 7265 - DNA, 693 bp, Methanobrevibacter gottschalkii
  source 1..693: mol_type = genomic DNA
atggatttaactcaaaaattaaggaaatatttaattaaaaatggagctactgaagttggttttgcagatattattaattttactccaataacaggtttaaacaacggaatcgttttttacataacttatccaaaagaaactattagaaatatgaaaaatgcaccaactaaagaatataatgaagaatatgataaaattaattacaaattagatgaattaggcatgaaatgtgaagaattcctaattaaatatggttataatgcatatgcacaaacaagacaaagacttgggaatgactttggagaacacaattcatttaaattacctcataaaactattgcaacacgtgcaggaataggatggattggaaaatcagcacttttaattacaaaaaaatatggcagtgctttaagattatcttctgttttaactgacgccccaataaaaacaggactcccaacaattaaatctgaatgtggaaaatgtatggaatgtaaaaatgcatgttctggaggagcaataagtggaacagaatggaattataaactcaaccggaatgatttttatgatgataaaaaatgtgaaaaatatgcattaaaagtatcaaaagaaaatttaggagacgaaaagacaatatgtggaaaatgtatttatgcttgcacatttacccaaaaatatattaagaaagcatag

SEQ ID NO: 7266 - DNA, 867 bp, Methanobrevibacter gottschalkii
  source 1..867: mol_type = genomic DNA
atgaaaagaacagcactaaaaattggatatattggaactaattttcatggttttcaacgtcaacctgacctgcgaacagttgaagaagaattaatatatcatctacgtaaacttaattatattgatgatttgaaaaagtctagatttagaatagccggtagaactgatgctggtgttcatagtttaggtaatgtgattagttttcagtctgaaaaagatgttaggataaatgagattaataattctctacctgatgatattcaaatccttgctagtgcacctgtacgttatgcatttaagcctagatatgcacaaatgagacaatatagatatatgttatttcaagatttggatattgataaattaaaagaatgtgctgatatttttaaaggaactcatgactttactaattttacaaaaagattccaaaaaacaactacaagaactattgatgatattaaaatcaaaaaatttgatttggaagattatcacaaaaaaggattcccaaaccttcatgatacactatccccaatttttgttgatatttatggcgagtcattcttatggaatatggtaaggaaaatgatgagggtttttgtggatgtggctattggtaaaatggatttggatgaggttgaaagactactaaatcctgaagaaaatgaatcaagagctaatattaaggttatggaagcagaatatttaattttaatgaatattcaatatgatggaatcaaattcagatatgatgactatgcttgtgagagatttaaacgtgatttagttgattctttatcggatttacaaaaaagatatgcaatcagggagtctatgataaaaagtctacaggatttgcatgaatggtaa

SEQ ID NO: 7267 - DNA, 1323 bp, Methanobrevibacter gottschalkii
  source 1..1323: mol_type = genomic DNA
atgaaaatagctactattttgggaactcggcctgagattattaagatggctcctattattgatgagatttctaaaaggaatattgatcaaatcgttttgcatacaggccagcattatgatgaggagatgtctgatactttttttagggatttggatattaggactccggattataatattcaggtgggttccggaacacatgggaaacagacaggtttaatgatgaaaggtattgagaaggttcttcttgatgaaaagccggacatcgtcttggttcaaggggatacaaatgcggttttagcaggtgctcttgtcgcatctaaattgcatattgcaataggccatgttgaagccggactcagatcttttgatatgacaatgcctgaagaaataaaccgtagggctgctgatgtatgctcaacaatgtattttataccaacagccgaatccgctattaatcttttagctgaggggtattcgagaaaaaatttattcataactggaaatactgtggttgatgcttgttttagacatctgaaaattgctaaaaaaagaggaattaaagaaaaatctcttaaagaattaaatattgataaaatggacaatattttaactttaacaatgcatagggcagaaaatgtggatgttaaggaaagggttgtcggtatcattgaagcattaaaagaattagatgatgcggatattatttttccaattcatccaaggacaaaaaatacacttgaaaaatttggattatttgatgaattaaataatttggagcatgttcatatcataaaaccattgggttatcttgatttcttacttttaacttctgcttcaactttaattttaaccgattcaggcggtcttcaagaggaggcaataacattaagtgttccttctttaacattgagatataatactgaaagaccggaaacggtaactgcaggaggaaatattcttgtagggtcagatagggaagctattgtatctaatgcccgtaaaattcttgataataaaaattttgcagataaaatgaaaaatgctataaacccatatggtcaaggggattctgcaaaattaactgtagatgcaattgaagattatcatgctcgcggattattggatattgttgcacctgaggatataatgaattcatttaaaagaaaaatgaaaaacattcgtgaagatatttctgttaaagattttgaaagaaaagagaatgcacttgttcacatggtttttgatgggaaaaatatgcaatttcccactgatgagttgaatttaaatggtatggtgattaattatgacaaaagagaatga

SEQ ID NO: 7268 - DNA, 1089 bp, Methanobrevibacter gottschalkii
  source 1..1089: mol_type = genomic DNA
atgacaaaagagaatgaatctatattggtatttgaatacttcactgcttctggtgaaaaggataaatgcattatttctgaagctgaagcgttattattttcacttttagatgatttaaaagaattcaacgttgatttgattattaatgaatcttatggcagtgttgtaaaaaattatggtaatgtaaatccaatcttaattaatcaggatgtagtttcatggcttgaagagaatgcagatcaatttaataaagctatttttatctcagcagaaaacaataataatctctacaacattactaagattttagaagaaaatgatgtgaagatatacaattcttcagctgaagcttgcttaaagtcatctgataaatatgaaacttatgaagcattaccgaatacaattcctcaaccaagatcatttagatttaaaattgattctaaaggctattggaaaagagcaattgaaaatttacatgaaagatggcaagctgaagatccattaactcctcttaaattaataataaaaccattaatgggtgtggactgtgaggatattgtaatcatagagaaaatcgaagatttaactttggacttggataaaatttttacaccaggctctcgtgttcttgttcaggaatatattgaaggaagcgatattagtgttagcttaatctcagatggtaaaaatgcccttccaataagtttgaatgaacagtatgttgaattgaaagagaataaaggaatttatatgggtggaagattgccttttgagtctaaatttaaagatgaagcatttgatattgcaaccaaggcgattgaatctatagaggggatgaaaggttttgtcggtgttgacttaagaattaattcggatgaaaaggatatttattccctttatttacttgaaattaattcaagatttacaacgccttatgttggattaagcaaaatagctaattttaacataagtaaaacaataattgatctgattgatggaaatatcaatattggtgatttggacatttcgttagatggtgaaatcgaatttaaaaagtcaggaaattcattagaaattaggagaatataa

SEQ ID NO: 7269 - DNA, 1023 bp, Methanobrevibacter gottschalkii
  source 1..1023: mol_type = genomic DNA
atgaaggtggcaggatttgatattggtggtgcgaacactgatttagcagtcatcgactttgatggtgaggaaattaaaaatattgaagttgattttgcatatcttccaatgtggagtaataatgatgatttatcacgagttttaactgaattaatcgaaaatatttgtccagtttctgaaattgatgctgtaggcatttcaatgacggcagaacttgttgatgcatatgatactaaaaaagatggagttttggatgtagttaaaaaatgtgaaaaaacatttgattgtccgatagcatatgtggggattgatgggatgttgtcaaaagaagaaatcattaaaactccactaaaagcagcagctgctaattggattgcaactgctcaaattgcaacattgatttctgataactgtatttttattgacaccggcagtacaacaactgatattataccgattaaagatggagttgaatgtgcaattggaaaatccgactttgataggtctgctactggagaattagtatacacaggtaccttaagaactaatttaacaagttttttagataaaattgaattaaatggaaaagaatatcgtgtagctagtgaattatttgcacaaactgctgatgtgtatactgttttggacttgattactgaagaggattatgtttgtgatacttttgatggggaaggcaaatcaaaaattgaatgtgcaaaaagaatagctcgtgtagtatgtgctgatctggaaatgatgactatggatgagattgttggcatgtctaaattcattcaccaaaaacaagttgaacaaatcgctgatggtttgaaacaagtagttgaaactcaaaacttggatttgattgttacaaccggtcttggaaaagatattctggataaaaaagcggcagaactgttgggtttggaagtcaaatctatgggggatatattgactgatgaagagtgtgttgttgcaccagctattggaacttctgtaatgatgaataaatatttaaattaa

SEQ ID NO: 7270 - DNA, 567 bp, Methanobrevibacter gottschalkii
  source 1..567: mol_type = genomic DNA
atgactattaatattcaaatattacttattgcatgtgttacaacgctatatttcatacttccggcatacttttcaaacggtgcgggattattatttggtggaggaatgcctgttgattttgcaaaatctgataggtacggtattcgatggattggagatggagtaacctggagaggattattcgcaggaaccattattgggattataaccggtatcgtgcaaggatttattgctccgcatatacttccagcttatggacaatacataataactccaatagtaacaaacattaacagtgggatattaataggatttttacttggttttggagccctattaggtgatgcaatgggcagttttttaaaaagaagattaggtattggtcgtggaaaacctgctccattattggatcaattagatttcttaataattgcattaattctagtttcattagttgtaaaaatagatttattatttattgcaatatcaatcatattaacattagttatacatttaatagcaaatacctgtgcatatctacttggtataaaagacgtttggtactaa

SEQ ID NO: 7271 - DNA, 1509 bp, Methanobrevibacter gottschalkii
  source 1..1509: mol_type = genomic DNA
ttgaaaattaaaagtacaaaaagtttatgccctgagtgtggtaaaccaattgatgcagaagtttatgatgaagatggtaaagttttcattaaaaaaacttgtgatgagcatggtgagtttattaacacttattggggtgatgatgaattgtataatagggctaataactatcttccatcaataacttctattgaaaatccatgcattgaggatactgctagttgccctagtaattgtggtttatgttcaaaacacgaaacatcaactgttttaggtttaatcgatgtaacaaatagatgtaatttaagatgccctgtttgttttgctaatgcggctgctgcaggatatgtatatgagcctacacaagatgaaattaggcaaatgcttaagaacctaaggaatctaaaaccaaatccaactcctgctatacaatatgccggtggagaaccaacggttagaaaagacattgttgaacttattgcaatggccaaagaagaaggttttactcatgttcaaatagctactaatggaataaggctggctaaaagggaaaacttggctaaagatttaaaagcggctgggttaaacacagtttacttggcatttgatggggtaactccagaaccttatattaataatcggggtaaagatttacttccatttaaattagaggcaattgaaaattgtagaaaagcaggtttaggtgttgtactggttcctacattaattaaaggaattaatgatcatcaaattggtgaaataattaaatttgcatttgataataatgatattatttatggagttaatttccagcctgtttcattctctggaagaactcctgctgatcaagttgaagctcaaagaattacaattcccgactttgttaaaatcattgaagaacagactgaaggtcaagttaaaaccactgatttctatccgccatctgctgttgaaccagttgcaagattcatctctgcacttgatggtgaagaaagaccaccagttacattaaactgccaccagcactgtggtgtaggtacttatgtgtttagagaaaagactgaagggtctggaagagataaattaattccaattacaaattttattgatgttgaaggattatttgaaaaattagatgaatatgcagataaacttattgaaggtaagtttggtgctcgcaagaaagttatagctagtgttactaaaaaccttccaaaattaatacatcctagtaaaactccggattacttagatattaagaagattttatttgatgtatttgctaaaaggtcttacagtgcattaggggatttttctaaagacgcaatgcttatttcatgtatgcatttcatggatccatttaactttgatgaagacagggttaaaaaatgtgttatccattatgcaactccggatggtagaattattccattctgtaccatgaattcaatatatcgtcaaagtgttgagcaaaattttgcaaaacctttaaaacaaaaaaaagaataa

SEQ ID NO: 7272 - DNA, 486 bp, Methanobrevibacter gottschalkii
  source 1..486: mol_type = genomic DNA
atggatattattaaaggaaaaacatggacttttggggagaatattgatactgatgttattatccccggaagatatttaagaacattcaatccacaagatttagctgatcatgtcctagaaggtgaaaggccggattttacacagaatgtccaaaaaggagatattattgttgctgatgaaaactttggctgtggttcatcaagagaacaagcaccagtagctattaaaacagcaggtgttagtgcaatcgttgcaaaatcatttgcaagaattttttatagaaatgcaattaatattgggctgccagttattgttagtgatattgaagctgaagatggggatgtaataagtattgatctgtctgaaggcaaattggttaatgaaactactggtgatagcaaaaattttgaaccgttcaaagagttcatgttaaatatattggaagatggtggtttagttaatcattatcttaatgaatctgattaa

SEQ ID NO: 7273 - DNA, 630 bp, Methanobrevibacter gottschalkii
  source 1..630: mol_type = genomic DNA
atggaatgtccaatttgtggttctgataatgttgaaattttaaacgcaaaacaaaaatcatctaaaaaaaagcttatggaggaatatttattaaaatgtgaagactgtggtcatgtttttaaagatattttctctgcaaaaaaacctaaaccttataggttaattatttctgcacatgataagtctcataaaaccactattgatttatcaccaagcgatgaacttaaaagtggtgatgtcctactttctgatttaggtcaagttgaagtgaccagtattgaagttggggataaaagagtaaataaagcaaaaattgaagatattaatactatatgggcagcatctactgaaattccggcacgtataggtttttcagtagatttgcacggcgaagttgattcttacaaattagatttggaaagggattttgaaatagcccctggtgatattgttaaaatagacaaacacattgtaaaagttcatgttattaaaactaaagatagaaaattaacttctggatttgcaaaagcggaagttataaaaagagtttattcaaaaccagttaaatttaataattttgattatgatttgactaaggacatatttaagaaaactaaaaaatcttcctag

SEQ ID NO: 7274 - DNA, 1278 bp, Methanobrevibacter gottschalkii
  source 1..1278: mol_type = genomic DNA
atgaaagtatatattgaatcttacggttgcacatttaataaagctgatggacagattatagcaggtaatctacaagaaaatgatattgatattgtagggtctatggaagaagcagatgttattattgtaaatacatgttatgttaagttacctactgaaaataaagttacttatagaattcaaaagcttcaaaacgattttccagataaaaaaatcatcgttggtggatgcatggtcgaaatcgaccctgaaaaattggataaagttgctcctaatgcttcatggattggacctcatcagttaaataaatctgcagaggttgttaaatccacatattgtggtgaagtcgttcgtgagtccggattttcaaaggagtctaaagttgatgttcctaaagtcatggatgatagtctgattcatattatccaaatatgtgaaggttgtttgggtgcatgcacattctgttgcacacgttttgctcgtggaccattgaatagctatcctattgaagatattaaggaagaagcaagaaaagctattgaacagggtgcctgtgaaattcagcttaccgcacaagatactgcagcgttcggtaaagatagtggtgaaaaactatctgatttaatcaaagaagtggctaatttagatggggattttcgtattcgtgttggaatgatgcatcctaaaaatattttaaatgatgttgatgaaatcatcgatgcgatgaaacatccgaaggtatataatttcatccatttgcctattcaaagtggaagtgataaagttttatcagacatgaggagagggcatagtgttaatcaatatcttgatattgtctcaaaatttaaaagtgaaattcctagtttaactttggctgttgatattattgtgggttatccaactgaaagtgaggaggattttaatttaactgttgaattacttgaaaaaataaaaccaagtttaattcatttatcaaaatatcaacacagaaaaggtgcagtttcttcttcacttcctgaaattcctcatgaaactatgaagagaagatcaaaatttttatctgagattaaatcaaaaataactgaagaagaaaataaagaattagttaattccaatcagaaagtcttagtcattgaaaaaggttctaaaggaggatttattgcaaaaactaattcttatattcctgtaattgttgataatgttagcttaggaacttttgttgacgtaaaaataactgatgcaactgctacttatcttaaaagtgaattattgggataa

SEQ ID NO: 7275 - DNA, 201 bp, Methanobrevibacter gottschalkii
  source 1..201: mol_type = genomic DNA
atgagtgaattaccaatcgcaccagtcggtcgtatcttaaaaaatgctggcgcacaaagaattagtgatgatgcaaaaattgcattagctgaagcattagaagaaaaaggtgacgaaatcgcacaaaaagctgttaatttcgcacgccacgctggtagaaaaactgtaaaagctgaagatatcaaattagcaatcaaatag

SEQ ID NO: 7276 - DNA, 723 bp, Methanobrevibacter gottschalkii
  source 1..723: mol_type = genomic DNA
atgacatacaatataaaaaattcaaaagagttagcaggtttaattaattacactaatttaaataatataattactgaaagtgaaatggttgaattcctcgaaaaagcaaaagaaactaactttaattcagttgttgtttctcctacttatgtcaaattagcaaaagaaacattaaaagacactaatataaaagttggaagtgttattggatttccattaggtttcgaagatactgaaagtaaagtagaggctgccaaatcattacttgacaaaggtgttgatgaatttgaagtagttcttaatttaagttacctaaaagatgaaaaatacgaattacttgaaaatgaaatcaaacaaataaaagaagcaattggagataaagttttaaaagtaattattgaaacaaaagcgttagaagactatcaaaaagctaatgctgcgaaattggctgaaaaaagtggtgcagattatgtaaaaacttccacaggttttgtatcaccaagccatatttttgaaaatgttaatgacattaatattatccaaaaacatgcaccgacaattaaaattgaaatttatggtggaattaacaattataaattcgctaaccagatattaactggaggagcagatgtaattggtagtgaccaaggttatgaaattgttaaaagatataaagatttacgagaaaacacacaagtaaaaccaaaacctatcacattatag

SEQ ID NO: 7277 - DNA, 1674 bp, Methanobrevibacter gottschalkii
  source 1..1674: mol_type = genomic DNA
atggaaaaagcatgtcgaattataattaacgatattcttaacggtgaaatatctacacgacgtgatcttgaagttgcaaaaagacaactttgccgtgacttaaatttatctagatttatgagtaacgcagacatattagaatttgccaaaccggaagaaaaagaacttgtttctggaatattaaagaaaaaaccaactagaaccatgtccggtgttgcagttgttgctgtaatgtgccatccacacaaatgtcctcatggaagatgtttttattgtccggaaagtgacatagcgcctccaagttatactggtgaagaaccagcggcacttagagggagaatgtatgaattccacccatacatacaatgttttaatagattaaaacaacttaaaaaaattggacatcctattgataaagttgaactaatcattatgggcgggacatttccttcaagagacttatgttatcaagaatggtttgtatcacagtgcttgaaagcaatgaccgattttggtttaatacttgaaaataaaccaacaaattatgaatataatttagatttcaatgaaataagatcttttgaaaaaggtattttaaagacatatcctccgaatgattatgttttaataagtgatgttcaaaaagctaatgaaaactcaaaagtaagatgtgtgggaatgacattcgaaacacgtccagactattgtaaaaaagatcatattaatagaatgcttgatttcggagtaacaagagttgaacttggtgttcaaacattatctgatgacatatactccaaaataaaaagagggcataaaatagctgatgttattgaatcaaatcagcttttaagagattcggcaattaaagttgcaatgcatatgatgcccggtttattttcagatgaaaaacaagatttaaaaatgtttaaacaattattccatgatgataattttaaacctgacatgttaaagatttatccctgtcttgttaccaaaggaagtgaattatatgacttgtgggcggaaggcaaatatgcaccatataccgatgaggaagctgttgaattaattgtcaaaattaaaaaaattcttcccaaatgggttagaacaatgagaatacaacgtgatattccatcaacattaattgaagctggagttaaaaaatcaaatttaggagagcttgtttataatagattagatgaagagcacatcaactgtcaatgcatacgttgccgtgaaattggccataaaaaaacatcaaaacaatatagtttagacgaatttgagttatttaatgaaagttacaaggcatgtggaggagttgaaaacttcttatccatagaagatattaatgaagaaagtgttgccggatttttaagattgcgtttcccatcaaaagatcatttcagagatgaaattagtgataaaaccgcacttgtaagagaattacatgtttatggaaatatgattaaaataggaaacagaaacccccatataggccaacatacgggatttggagaacggcttctaaaagaagctgaaaatttagctattgataatggtaaagaagaagttgctataataagcggaattggaaccagaaattattatcgtaaattcggttatgaaaaagttggaccatacatggtaaaaaaattatataaaaacatttaa

SEQ ID NO: 7278 - DNA, 276 bp, Methanobrevibacter gottschalkii
  source 1..276: mol_type = genomic DNA
atgcaaattaaagaatttttaggatctgttgttttggataaaaatgcatatgaagtaggtaaagtaagtaatgttgaatttgatgcagcaactggaaaaattaatgagattactttaactttacaaaaaaatatcttttctaaagacgaacttgtaattagttttgacgatattgctactattggtgcttatgttatcctaaacaaagaaattccgaaagatgctgaatttgaagaagctgaagctgttgaagttgaaatcgaagaagataagtaa

SEQ ID NO: 7279 - DNA, 297 bp, Methanobrevibacter gottschalkii
  source 1..297: mol_type = genomic DNA
atggtttttgatgcaagagatattgaaattcctttaaattctcatgtcagatatgttgatactggtactatgggtgaagttgttgatgaaagaataactgatggtattggatgggttaaattaggtaaaactggtttatggtataaatcaagtcatgttgaattgttagcggaaaaggatatcaaaaaaagttcttggggtgctggtaaggatcttgatgttgaagatttaaaagagaaagctattagctttgaagaacttgaattatctagtgatgctggtaatggtggaggttaa

SEQ ID NO: 7280 - DNA, 2070 bp, Methanobrevibacter gottschalkii
  source 1..2070: mol_type = genomic DNA
atggaaaacctagatactgatattaaaaaaataatcaatagcgcatatccctacattaaagattttaatcctgctcaaaaagcagtgattgagtccggatatttagaagataactccaattacataatttcaatacctactgcaagtggaaaaactgttttaggagttttacctgctttaaaaaccatattgaatggtggaaaagccgtttatgcagcaccgctcctttcaattcaaaacgaaaaagttaaagaattcaaagcatttgaggaatatggcatcaatgtaggaaaacatccatcaagcgcagatttatcagttatggtttttgagtcatttgacgcacttacaagattttcctggaatgtattgagagaagtagatacattaattattgacgagttccatatgattggagagtattcaagaggcccaacacttgaagctgcaattacaagagctaagattataaacccaaatattaaaattatcgctctttcagctactttacgaaatattgaagaaatagaaggttggcttgacggaacgtgtgtggagcatgattatagaccagtgccattacataaagaagtattagatgcggaaatgtttaatacaaagaataaaaatgatgtgattgttaaaattgttgaaaaagcaatgaaagatagctcccaagcattagcttttgtttctacaagaagatttacagaaagtttagcgacatatgttgctaaaaaaattaataaaaaaatcgataaaaagcaacgagaaaaatttaaagaagttgctgagaaactattggacgttccaaagaaaaaaggatcgcttccaacaagcacttgtttaaaattagctgaatctgtagaattaggtgttgcatttcaccatgcaggtcttttcaatgaacaaaaagagatcattgaagatgaatttagaaatggaaatatcttaatgattacagcaacaccaagtttaatgtatggagttaatttgccatcaaaaactgttgtaattagagaccatacacgttggacaagtaatggaccgcaaccaatacctgtttttgattatgaacaaatgtccggaagagcaggtagaccacaatacgatgatgtaggttattcttaccttattgcaaaaacaatggatgaagctcaaaatttagaagagtattatgttgaaggagaaattgaaaaaacaaactcaaaattagtggataataaagatgcaatttataaacagattattgcccaaattgcttcttcactttcaaaaaatttagatgaacttgtagatttctttggaaaaacactttatggttatcaaatgaataataatccatcaatgtcttcttttgcagaatacactataaaatatgaacttgaaactgcattagaattcttacttcaaaatggaattattagagccacacctgaagggcttaaaactactgattttggttatttaattgctaaatccaattatgcagtagaaacagccgttaaaattaaagaatatatatcaaacatgaatgaaattaatgttgaagaatttatctatgcattatctgaaacaccagatttgccattaatttcatttaaaggaagaaaatcaaaagatcctgttagagacagattatctgaatgcggattatttgcaatggatattggtgtttctgaagcaacaacagtttcattaattgaatggattgatgaaagaaatgaatatgaaatagaaaataaatataatgtttattcggcatcaaccaggagatctgcttatgaagcatcccgtcttgtgaaatttgcaaaagatacttctgaaatcttaggagactattctaatttaaaagaatatgatatcctatctgctagattatactatggagttaaaacagacattattccattagtcattggagttaaaagacttggaagaaaaagagctagaaatcttgtaaaattgtttggaaacaatttaagtaacatttctgaaaatgaattacaaaaagttgaaggaattggtcctaaactagctgaaaaaataagattatttgtaaaaaattaa

SEQ ID NO: 7281 - DNA, 264 bp, Methanobrevibacter gottschalkii
  source 1..264: mol_type = genomic DNA
atggcaattaaagtagaagtattttcaactagtacatgtccccactgtcctgcagcaattgatgctgctatgaaagcaaaagataaattaggtaatgcaattgatgtagaatctgttaaaattgatggaaatatggataacagacaaagagctatggattatcaaataatggctgtacctactattgtaatcgacggtgaagttgctttcgtcggcgcacctgctgaatctgaacttattgaaaaattagaatctatgttatag

SEQ ID NO: 7282 - DNA, 1077 bp, Methanobrevibacter gottschalkii
  source 1..1077: mol_type = genomic DNA
atgacaaatgataattatacttgtgtaacaactggtacagtagcaactgcatgttctcttgcagcattagatgcgattttaaatactcctgatattgcttgtgtcaaagttgaaactcccaaaaaagtattgaatattatcattgatgaatgcaaatgcatttctaataataaagcttatgcgattgctcataaaaatccatataatgatcctgatgttacagtaaatttggatattatttctacagttgaattattggataaaaatgatgaagaatctaatgttattattactggaggggaaggtgttggagtaattacaaaaccgggtcttcagattcctgttggagagtatgccataaatccagttccccgtcgtatgattattaaaaatttgtctagtaaaatccctaaggggaaagtagctaaagtaactatttcaattcctgaaggtagaaaaatagcgaaaaaaactatgaatccaaaattaggtattgttaatggaatttcagttcttggaactactgggattgcaagatcaatgtcgagtgaagcttataaaaattcaattgttacacaaattgatgttgcaattgcttctgatattgatgatttaatttttgttccgggcaatattggtgaaaaattggcattgaaacaattagatgttaaaaaagaacagattattcaaactggtaattttgttggtttcatgtttgatgaagcggctaaaagaggaattgctaagtttactttctttggtcatattggtaaattaattaaagtcgctgggggcatttttgatactaaacatgctattgctgatggcaggcgtgaaataatggttactcatgctgcattatgtggtgtcgataaaattaatcttcaaaaattatttgattcaaaaacaactgatgaaatgatgtctattctggatggacttggagtttcagttgaagtttcaaatagtattgcatctgcaattcatgacaggtgtatgcaacgtttcgatttagatttaaatgttatattagttgacatggaaggtaattatttaaacaacaatttcattatataa

SEQ ID NO: 7283 - DNA, 1083 bp, Methanobrevibacter gottschalkii
  source 1..1083: mol_type = genomic DNA
atgaaaatagctatggtaggccagtttccgcctcatgttggaggcgttggtgttcatattcatactttatcaaaaaaattagttgatgaaggtcatgaagtttatgtgattacttatcctcacagaaatattgaagatattgatggaattcatgtcattggaactaaaggacttaatcttccgggtgttagaggtttaatgtttaaaatgaatgctaaaaaagctttagaagatcttttagaaaaagaagatattgatattattcatggacattatttattccctgcaggagcagcggctgttgaagttggaagagaacataatattaaaacatatgtaactgcacatggttctgacatgtttgaattatacaaaaaacagccatttatgagatctccgattaaaaaagttttaagagatgctgatggtgtttttgcagtaagtaatgctttaagacatgaaataatcgcaacaggtgttactggaattgctaataaaacaaaattatcttggaattctgttgatattaataaattttcatcaaagacaaatgatttatttaaaaaagaaaataaacttgaagataagccaatagttctttttgttggaaatttaattaaaagaaaaaatgttgattcactattggatgctaaaaaagtatctcaaagtgaatattatttggtaattgttggtgacggacctcaatttaaaaaattaaacaagaaagttgaagaagaaaatattcatgatgtgattttcaccggttctagaaatgatgttgaaaatattattccaagttgtgatgtactaattttaccgtcattttctgaaagttttggtttagttttaattgaagctttagcatgtggaaaacctgttattggaagtgatgttggaggcataactgaaattatcaatgatgatgtcggattgcttgtaaatccaaataaaatttcatctatagccaaagcaattgatacgattattcaagatgatgatttaagattggtgttttctcttaatgcacgtaatcgtgcatttgatttttcggaagttaccatcccctatgatgaggttaattga

SEQ ID NO: 7284 - DNA, 867 bp, Methanobrevibacter gottschalkii
  source 1..867: mol_type = genomic DNA
atgaagactattgttagatctccgggttcagcaacaataattaatgctattgcaacaggatttggttctgcatttggtattgatctggatataaaatgtattgctaaaacaacggataaaggaataacttgtctcaatgatgttggtgcagatattgggtttatggaactttgtgttcagagagtgtttaaccattataatattgatacttcagaatttggtattgatttaaaaacagaatctaatttaccaatggcatcaggattatcgagtagcagtgcttcatctaatgctattgttaaagctgtttcttcagttatttctgaggagtttaatttaaaacctcttgatgatttggaattaattaatatggcaattgacgcatcacttgaagcaggagttactataacaggttcctttgatgatgctactgcatcttattttggtggtgttgtagtaactaataataagaatagggagtttattattagggaaaaaatggaagagtatccggttttggtctatatgccgaattattattcaaaatctggagattcaaattcggacaggatgaaattattagcaccattagtggaaactgcttttgagtttgcatgtaataaagattattttaaagcactgaatctaaatggattgttatattctgcagctttaggatttaattcatcaatagctattgatgcattggaatcaggagcaatagcttcgggtttatctggaacaggatcatcttttgtagcagtttcaaatgaagatacaatcgatgatattatatactcttgggagaaatatgaaggtacggtaatagaaacaaaaattgataacgtaggttgtaagatattatga

SEQ ID NO: 7285 - DNA, 1272 bp, Methanobrevibacter gottschalkii
  source 1..1272: mol_type = genomic DNA
atgaaaaaaatatattcgatgcttttactgattgttatgctgtgcagcttatcaatagtttcagcctctgagaatctatctacttcagataatcctgttgtagtggataatgtggatatgtcatctaaaaatattggaagtattcctgatgttacatctgcatcaaatgatgttgtagtttcagaaaattcttcggttgaatggaaatcttatgaaaatgagaaggatgataatgtatcagataatcaatctaattcatcaagtaactcaacttcaaatggtagttataaagaggagtctgttgtaagtaatgttgtaacaaagaatgtttcatccagttatgggactgttgtgaactataatattaaagttcttgatcagtttaaaaaaccaatggttggtaagaccgtttcagttaccattggtaaaaagactgttgagaaaataactgatagcgatggaatggttacattcacactcaattgtcaagcgggtaaatatgtaatcaaatataaagttgataatataaacggttctaattcatatattgttaagaataagatttcattaactgtcttaaattggaatcttaaaggtgatgtttctaaaattaatttaattaaaaagaacatgcctaataatacttgggttaaaaaagctgttgcagcaactaaaaaaggtattcctttattaaaatttaagggtggaaaaggaaagattgttttcatgactgctggtgttcatgggaatgaattatcctcccaagttgcagcaatgaaaatgattaaatatttgtctgataatccaattagtggaactgtttatataatgccgtttgtgaatgttaaagcaattgctaaaaaagtcagatatacagataaagattataatcgtatagcttctagttctggaactataccaaataaaattgttaaattggttgtaaaatataaatgtaattcttatggggatttccacactacaaaacctggtggagctcctgggaaagatattgtaatgggatctaagagtttaaaatcaaaaagtgcagaccttactaactatattgctaaaaaatgtaaagttaataagagaatatatagtcatattggccaagaatatcctggagcattgtttgaaaatgttaataagaaagggattacttcagttatctgtgaagttgcacttccacataatactgtaacaacaaaaacagtcaaaacatcttttaacatgatgaaatatctattaaaatataattcagttatatga

SEQ ID NO: 7286 - DNA, 351 bp, Methanobrevibacter gottschalkii
  source 1..351: mol_type = genomic DNA
gtgatttttttgaatagaagttatgagataaaatcttttaaaaataaaaaagaagctgaagaacttctaaagaaatcaagaaaatctattgatgaaattgataatcaattatttgatttaatttctcagagaaccgctcttgccaaggatatagctagttctaaagaatatctggaaataccaatttttgataaatctagagaaaaagttattcatgataaaattaggcgattgtctgaagaaaaaggtcttgatgttgatattattaatcaaatagtggatatgttgactattttaaataaaaatgcacaaaaagaaattttaaggaggaatgttgatgggaaatattag

SEQ ID NO: 7287 - DNA, 198 bp, Methanobrevibacter gottschalkii
  source 1..198: mol_type = genomic DNA
atgggaaatattagaacttcatttgttaaacgtttagcaaaggaacttattgaaactcataaaggtgttttcactactgattttgaacaaaacaaaaaattagtacaagaatactccactgtaagtactaaacatttaagaaataaaattgcaggatatgtaactaggcttataaggttagaacaaactagagaataa

SEQ ID NO: 7288 - DNA, 1221 bp, Methanobrevibacter gottschalkii
  source 1..1221: mol_type = genomic DNA
atggatttgatagtagtaaaattcggaggaacttctgtgggtgatggttccaggattaaaaaagcggcgcagtccgtagtaaatgagtatatgaaaggcagtcaggtagtagttgtagtttcagctgtcaacaagactactgatgaactcattggattatctaatgatgctattggcactggtttaactgacaagcaaaaggcggaaattatggctatgggtgaattgactagtgctagattattctcagcaactattgaatctttaggtgtaaaatctgagtttattgatccttataataaattatggccaattataacagattctaattctttagaagctaaaatagatttaaatacttctaataagaaaactgaagggattaaacaacttgttaatcaaggggttattcctgttatctgcggatttttgggaaaagggcccagtggtgaaatcacaactttgggaaggggtggaagtgatataaccgcatttttaatggggcattgtttggatgcaaatgaagttgttattgttactgatgtagatggtgtaatgtcaactgatcctaataaaattgaagatgcagaattgttggatacaatttctgttgaagaattgagggatttagctactcatggtgcgcaagttttacatccgcatgcattaaaatacaaagatccattaataagtgcaaaaattattaatttcgctaatgaggatttaagttctaagggtactcgtattgtagggccttttgaaggcgaaatgttaaaatgtgttacactttataaagatcctatttcactcatagctattgttggagaagccatgcttaaaaaagttggtttaatggctaaattaactacagctcttgctgatgatggtattaatatttttggtatgtctgcaggtcaaaattcaattacagtatttgtaaacaaagttgattcaaataaagcatatcttttgttacatcaattagtaatcgatactgatgttttaagttctttatctcttggaagagatactgcaatgataacttttgttagtccggatattattgaaactccaggtattatatcagatattacagaaccacttagaaaaaataacattaatattttagaaattacttcctcacaaactgctgtcgtactgtttgttgattgggaagatggtgaaaaagcacataaattaattacagaggttttagaatga

SEQ ID NO: 7289 - DNA, 894 bp, Methanobrevibacter gottschalkii
  source 1..894: mol_type = genomic DNA
atgaattttgaaggaacatatgttgctatggtcactccatttacaaaagatggaacttttgatgaagaaggtttcaggtcaaatataaattatttaattgatcaaggtgtaaatggtttagttggtgcaggaactactggtgaatcagctactatgactcatgaagaacatcataaagtcattgaagttttagtagatgaagttgatggtaaggttgatacaatagccggaactggcagtaactctacatcagaggcattgtctctcactaaatttgcttgtgatgctggtgttgatgcagctttattaatcactccatactacaataaaccacaacagcatgctttagtaaaacattatggcactattgcagaagcttgtgatcttccaattattgcttataatgtgccatcacgtactggatgtgatattgaagtcgagactgctgttgaattggctaaaattgatggtgtggatgctattaaagaagctagtggtagtgttgacaaagtgtctgatatttatagggcacttgctaatgaagatttggaatctgagtttaatattctctccggtgaagattccttaactttgcctattatgtctgttggaggcactggagtaattagtgcatctgcaaatattgatgcaaaaagaatggttttgatggttgatagtattttgaatgatgattatacaagagcattggaacttcattatgaaatgttggaattaataagggctatttttgttgaaagtaatcctgtacctgttaaaactgcaatgaatttaatgggacttccttcaggtcctttaagagaaccattatgtgaaatgaaagatgaaaacttagaaattcttaaaatagcattaaaaaattctaatttaatttaa

SEQ ID NO: 7290 - DNA, 822 bp, Methanobrevibacter gottschalkii
  source 1..822: mol_type = genomic DNA
atgattaaagtagcagtaactggagctgctggaagaatgggctccggtattattaaaaagattacggaacaagatgatatggaagtagttgcagctattgaaatgccaaatactcctcttgcaggtaaagatgcaggtcttcaagcaggtattggggaaattggtgttggaattgttggttctgaaagactagaagaaacattaaaatcatctggtgcggaagtattagttgattttactattgctcctgcagctgtggaaactattaaaacagctacttcatgtggagttaatgtagttgttggcactactggttttacagatgatcaaatggctttgaatattaaaaatgttgaagataacaaagttggggctgttatttcatcaaatatggctattggtgttaatgtatttttcaacacattaaaaaaattagctccacttttatatgattttgacattgaaattattgaagctcatcacaatcagaaaaaagatgcaccatctggaactgctatgactgcatttgaagtaataactgatgcattaaatagaaatcctgaagaagttggagtatttggaagaaaaggtttagttggaaaaagaactcctgaagaaattggtgttcatgccatccgtggtggggatattgttggagaccacactgtaatgtttgttggtgaaggtgaaagatttgaagttaaacatcaggctcatactagggaagtatttattgcgggtgtaatcagagctgtaagatatgtgcctactgcacaaaaaggtgttgtaagtagtatgaatgatgttttaggtttagaatag

SEQ ID NO: 7291 - DNA, 1050 bp, Methanobrevibacter gottschalkii
  source 1..1050: mol_type = genomic DNA
atggtaaaagtaggggtacttggtgcaactggaatggttggtcaaagatttatccaattacttgaaaatcacccagattttgaggtcactgcattagcagcatcttcccgttcggcaggtaaaagatatgaggatgctactacttggtatttggatagtgaaatgccaaattctgtaaaagatattattgtctgtgaaactaatcttgaagatatggataatgatatagatattatattttcatctcttcctactgaatttgcatcaaaagttgaaaaaaaattcgctaaagattatgttgttgcaagcaatgctagtgcacatagaatgaaaaaaaatattccattagtaattccggaggttaatcctgaatatttggacatgattgatgctcagcaaaaggaaaataattgggatggttttattgtaactaatccgaattgttctactattgcattaactttaacattaaaacctattgtggataattttaatgtaaattctattagggtatcaaccatgcaagcagtatctggtgcaggttataatggagttccgtcaatggctattgttgataatcttgttccttacattggtaatgaagaagaaaaaatggaaagtgaaactctacatctgttaggttcttatgatggaaatgttgtaactaatgcggatttcaggttgagtgcatcttgtcatagagtgcctgttattgatggtcatactgaagcagtatttgttgagttggatgatgagtttgatattggtgatgttaaaaataaaatggcaaactttaaagcattgccgcaaaaattaaatctgttctcagctcctgaaaatcctgtcattgtcaaagaagaaaatgacagaccacaacctcgcatggatagaaatgcaggtaatggtatggctgttactgtgggtaggatgagaaaagataaaatattcgaaaatagctttaaatatgttcttgttgggcataatactattcgtggtgctgctggagcatctattttaaatgctgaattgattaatgataaaatactataa

SEQ ID NO: 7292 - DNA, 1158 bp, Methanobrevibacter gottschalkii
  source 1..1158: mol_type = genomic DNA
atggaattaggaatggatgttgaaaaagatactttacaatctttaattcgatcttgcttattagagcttaataaattaaaatatgatttaactgagcttgaagtggaaagggctaatgataacactccacaaaggattaaggagctagagaaagatattgttgataaagaaaaagaagtatctgtcattaaatttaaagcagaagatgaaattaatcttttgaaaaaacagctcggtgaaaaagatattttaattaaaaatcaagaagatagaatttatgaattggattatgtcaacaattctcttgatgaaattaaagaatattttgctgaacagttaagggactacaagaaaaaagaattggctgatgtaaatgaaagattaactgattcttttaaaagtattgctgagaaggaagctactattaacactctttcaagaactattgatgattataagattaaggttattaagcttgaaaataatgttgaatctcaggctcaaattttagaacttgaaaaacaattagaacttaaagagaatgaaattcgtataaaagatagtgaaattaataaaatggatggtgagttggataatttaaaacaacagaccattcctaaagatgaatatgttaatcttcaatctaaattcaaatctgaaattactgcaatggatgctgaaataactaatttaaaacaagaaactatccctaaaaaagattatgagcatcttcaatctaaatttgattcagaaattaaaaatttagataatcagattaatagcttaaaagaaaacactattcctaaagatgaatatgtttctcttcaaacaagatttgaaaatgaattatctgctcgtaatagtgaattagaatacttaaaagaaagatctattcctaaagaagattatttaactcttaaaactcaattacaaaatgaaataagttctagggagaatgagcttagatttttaaaagagcagactgtccctcgtgaagattatctcaagcttcaaaatgagttaacaaaaaaagatggtaaaattaaaagattggaagaaattaatgcattcttcaacgaacttcaagaagagcaagaggcttatgaaactcaagaaacaactcctcctttcagattagagaagaaacaaggtagataa

SEQ ID NO: 7293 - DNA, 1611 bp, Methanobrevibacter gottschalkii
  source 1..1611: mol_type = genomic DNA
atggcacaaggacaaccaatctttattttacctgaaggtactaataggtctgtcggcagagatgcacaaagaaataatattttagctggtaaagtattagctgaaaccgtaagaactacattaggtccaaaaggaatggacaaaatgttagttgacggacttggtgatattgttgtaaccaatgatggtgttacaatattaaaagaaatggatattgaacatcctgcagcaaaaatgctcgttgaagtagcaaaaactcaagaagatgaagttggagatggaactacaacagcagtaatcattgctggcgaattattaaaaaaatctgaaaatttactcgattctgacattcacccaactatcattgctatgggatacagaaaagctgcagaaaaagcacaagaagttttagatgaaattgcaattgatgatgttgattctgaaactttagttaaagtggctatgaccgcaatgactggtaaaggaaccgaagcagcacgtgaaccattagcaaaattaatcgttgatgctgtagaagctgttgctgaagatggtgaagttgatattgataacatcaaaatcgagaaaaaagatggtgctgttgttgaagaatctactttagttgaaggggtaattgtagacaaagaaagagtacatcctggtatgccttctgaaattaaagatgctaaaatcgcattagttaatgctcctttggaagtaaaagaaacagaagttgatgctgaaatcagaattactgatcctgctcaaatgcaagctttcattgaacaagaagaaaaaatggttaaagacatggttgatcaaattgttgctgctggtgcaaatgtattattcgcacaaaaaggtattgatgatttagcacaacattatttatctaaagctggtgttttagctgtaagaagggttaaaaaatctgacattcaaaaattatctagggcaactggtgctaatgtcattactaatttagatgatttaactgcagaagatttaggtcaagcaggcattgttgaagaaagaaaagtatctggtgaagaaatgatctttgtagaagaatgtagcggagctaaatctgtaactttattcgtaagaggaagtactaaacacattgttgatgaaattgtaagagcaattgaagacgcaattggtgtagtggctgctactgtagaagatgataaagttgttgctggtggaggagctccggaaattgcaatggctaaaaaactcaaagattatgcagaatctatctctggaagagaacaattagctgttaatgcatttgcagaagctttagaagtagtaccaaaaaccttggctgaaaatgcaggtttggacagtattgattctttagtagatttaagagcagctcaagaaacttcccactacatgggattggatgttttcactggtgaagtagcagatatgaaagaagctggtgtaattgaacctaaacgtgtcaaaaaacaagctattcaatctgcatccgaagcagctgaaatgattttaagaatcgatgatgtaattgcatctactaaaggtccagaagatgcaggtatggatccttccgcaatgggcggaatgcctccaatgatgtaa

SEQ ID NO: 7294 - DNA, 219 bp, Methanobrevibacter gottschalkii
  source 1..219: mol_type = genomic DNA
atggaaaatttaagttttgaagaaagtttagaaaaattggagagaattgttaacaatttagaaaatgggaatgtgccattagataatgcaattgatgaattcaacaatgcaatgaaattagttaaaatttgtaatgaaaaattaaatgcagccgaagaatcaattgctaaaattgttaaagaaaatggagaacttgtagaatttaatcccaccgaataa

SEQ ID NO: 7295 - DNA, 1257 bp, Methanobrevibacter gottschalkii
  source 1..1257: mol_type = genomic DNA
atggaaaaagaaactataacagtatctcaaattaattcatatatcaatagaaaattgaaaactgatcctaatttgaaaaatattcttattaaaggtgaaatttctaattataaatcttcttttagcggacatagttattttacattaaaagatgaaaaatctcaaatagatgcagttatgtttaaaggcaataaagatagatttcttaaatttgaaccagaaaatggtatgaaagtaattgtaaagggtaaaattgaagtttatgaaaaaacaggaaaatatcagttatatgctacaaaaattactgaagatggaataggaaatctacatcttgcttatgagcaattaaaaaagaagcttgataaagaaggattatttgataatgcacataaaaaagaaataccaaaatatcctaaaattatcggtgttgtcacagcacaaagtggtgcggcaatcagagatatcattacaacaataaaaaaaagatatccagtttctaacattttagtattttcaactttagttcaaggagaccaagcagcacaacaaattgtaaaacaaattaaatatgcacaagagtttaatatagatacattaattgttggtagaggtggaggtagtattgaagatttatggccatttaatgaagagattgttgcacatgctatttataattgtaaaattccaataatcagtgcagtaggccatgaaattgattatacaatatctgattttgtagcagataaaagagcacctacaccaactggagctgcagtacttgcagtaccagatataaatgaagttaaaaataacttaaataatctctcaaacagagcgaataaaaatattacaaatagaattaaacaaaataaaactaaattaacacatatttctgaaaaacagattttaaaaaatccagaatccatctatgaaatcaaaggaatgggtttagataatattgtcaataaactacattttatatcaaaaaacataattaacagcaacaaaacaaaactattcaaactagaaaattctattgttttaaaaaatccaattgaaataacaaaatctaaaagagatgcatgcttaagaaatattgaaaaattagaaattctaaatcctcttttaacattgaaaagaggttataccctagcaaaaactaatgataaagtggtttcatctgcaaaagatgttaaaaccggagaccaacttgatattgaatttgatgatggaattgtaaatacaaaggtgatataa

SEQ ID NO: 7296 - DNA, 231 bp, Methanobrevibacter gottschalkii
  source 1..231: mol_type = genomic DNA
atgagaattaaagaggaattatttggcaaagaagttctcgatgcagaaatccaaattgttggaaaagttaatgatgtgatttttgataaagatacttttgaaatcacagatttagtaattaaaaaaacaggattatcagaacaaattaaagctagtgaaaatattgtcccaatagaattagtaaaagttattggtgataagattttacttaaaggtgaagatgatatttaa

SEQ ID NO: 7297 - DNA, 528 bp, Methanobrevibacter gottschalkii
  source 1..528: mol_type = genomic DNA
atggtttctagggaatatttaattaatttattaaaagacaataatgtatttcttgaaggtgattttacattatcttctggacagaaaagtaattattatattaatatgaaaaaagctattacggagcctgaaattctttcaactatttcaaaattaattacttctaaaattgatttggatgatattgataaagttgcaggtcctgcattaggtgcagttccaatagctactgctgtttcattggaatcaaaaattccgttattaatgattcgtaaagaaaagaaaggttatggtacttctaaattaattgaaggtgaattaaacgaaggtgataatgttattgttgttgaagatgtttcaactactggaggatcacttttaaaagctattaaagctattaatgataatggtggtaatgtaataagggcatttgttgtagttgaccgccaagaaggtgctattgaaaaatttgaaaaagagggtattaaattagaacctttaataaatgttaatgaattttttgattaa

SEQ ID NO: 7298 - DNA, 507 bp, Methanobrevibacter gottschalkii
  source 1..507: mol_type = genomic DNA
atgaaaagtaaaacaacaattgaacatcaaaaaatgtcatccaatgacattacttgtggtgtaatcactctaagtgatagtaggaaatcaaaaaaagtagatttatctggccaatatatggcagaagaaattgaagctagatacactttaaaatctagaagtttaattccagatgagaaagaagatttgattaatactattgaaaccatgattgatgatgatattgatgttattttaacaactggtggaacaggtcttgattctcgtgatatcacagttgaaacagtggaatcacttttcgagaaaaaacttgatggttttggagaaatgtttagagcaaaatcttatgatgaaattggtgctgcagcattactttcaagagcaacagcaggaatttacaaaaaaacagttatattttccatgccaggctctcctaatgcagttaagactgcatttaacataatcattgatgaaattcctcattttgtccatcatgttaaaaaatga

SEQ ID NO: 7299 - DNA, 339 bp, Methanobrevibacter gottschalkii
  source 1..339: mol_type = genomic DNA
atgttcaataccgagttaatttcaaaaatgggtaaaatcaaagataaaaaactttcgaatttattaattggaagaaaaggtggtgcaactacaattaaaataaccgatcaaatattgcaccaacctagcaatgcaaatcaattatcgaaaagactgcacttagattataaaacaataacatatcacttaaacatcatgattgaccacaaatatgtggaaaaagaaaaaattactaatagctacatatattaccctagcaaaaaattatataattgcatagaagaatatagtctaataaggaattttcttaaaattgaatatgaaaggtataaaaaatga

SEQ ID NO: 7300 - DNA, 801 bp, Methanobrevibacter gottschalkii
  source 1..801: mol_type = genomic DNA
atgaccaatattcaaaccaagaaagaattaaatgaagaatataaaaatgtaaaatacattttaacctcaagtatgagaactaaattactcttagcgctttatgaacattcaaagaaattagaagaaataagaaaagatctgaaaaaaccttcagcaacaatattgcatgggcttaaagagttggaaaataagaatttaattcggaaaattcaaaaacactatgaattaacttcaaatggatatattctaacaacaaatatgataaagttaattgaaaattggtattctataaataaaagcaaacaattttggaataagcatgatttatcagacatcccaaaagaaatgttaaaagacatttatttattaaaaaatgttgaatatgagacctcaacaacaagcgacctatcaaatgcattcaataaatatatcaaattacttttaaaatcaacagaattaaaaataattctaccaatatactctgaaaatcattttaagcacatgatagattttttaaataaacatgaacaagcaaaattggagttaatagtcaatgaaaagattctaaattcaatcaaacaaaacaagaacttagaaagaaaattattagagaatgaaaaggtgatagttaaatgcatcgaacaagatttaaagttatttttaacctgttcagataatttcatgtcattaacattgttcttaaacgatggccattatgatgattctcaaattttaatcgggaaagacaaaaatgcaataaaatgggctttaaatttaattcaatgcttttcacataactaa

SEQ ID NO: 7301 - DNA, 792 bp, Methanobrevibacter gottschalkii
  source 1..792: mol_type = genomic DNA
atggatattcacaatgaaattaacaacaatatcaaatttcttgcaaaatcagaaattcgactgaaaattttaagtgagttgcaaaatagccctaatagtgtccatggactcgttaaaaaaactaaaataacatatagttctgtatcaagcaacatcaacaaattagagcagaataactacattaaaaaaataaagtcaaaatattatctaaacccgatgacaaaaatatattttcaaacattaatggattttaaaaacagtgtagaaataataactagttatagtgaattttgggacaaacacaatttaaatcaaataaatattgactcattaaaaaatattacagatttgaaagattcaaaattaattgaaacaacaccacttgatatttataaacctcacaacaccataaaaagtcaaataagtaactcaaaatcacttaaagcaatatttccatacttacatccagaatatcctcaattaattgaaaatatattaaaagataatggacaagttgaactaataatcccaaaaagtatttccaatgcaattacatcaaagattgatttaaaaaccagaaaaactgcaatcaaagagaaaaaattaacaatttatccaattgaaaataatttaaaaatatatttaaccatttgcgataaatcaatgagttttggactatttaaaaatgatgaaagtttcgatcagaacagaatattaatttcggatagtgaaaaatcacaagcgtgggcagacaatttatttaaaaatatcaagtatgatgtgataaaatga

SEQ ID NO: 7302 - DNA, 507 bp, Methanobrevibacter gottschalkii
  source 1..507: mol_type = genomic DNA
atggaaatttgttatatattagatgcctccgcttttattaatggatttaaattagattctaacaataatttcacggttcccgaaatcactgctgaaattaaagattttgaatctagattaatgtttgacatggctattgatgagtgtaaattaactatacaagatgtgccaaataaatatacaaattgtgtcaataagattatatctgaatcaggtgatattttaaggttgtcatttcctgacaaaaaattaatagcattggcgtatatgttttcaaaggaaggtaggaatgtaaaagtcattagtgatgattatactattcaaaatactttaaaaattatgggtattccttattcgggaattataactgagggaatcaaaggaatttacaattggaaaaaagtttgtgaaggatgtaaaaaggaatatgatgatgattatccttttgatgattgtgaaatttgtggatcgaaaatatataaaaaaaggattaaggtgagcaaatga

SEQ ID NO: 7303 - DNA, 1116 bp, Methanobrevibacter gottschalkii
  source 1..1116: mol_type = genomic DNA
atgagaattggtattgttgttcatggtccaaatattattgattcaggttatgctttaaaacttattgatctacttaaaaattatggtaatatttcagtaagacttgggggaacaatgggtcgcacagcggttattgatgctagtttggaaaatataattgatataactcgtaaattagtgcccagtgattctttaaagattttctctgatgagggtgttgatttgatttttttacttaactatggtaaatccaatgttactggacaagttttcggatataaggtgtataaccattatgctgataaagtaactgaaaataatgttccagttattcaaattgaacgacctggtgaagaagatggtagcattattccatggaataatgatttggatattgttcatgatttatctaaaaaattaaacttggctattgtatatccaaatgaagtctatgaaaatcatattaaacaggataatgctaatgttaatcaaagaattgttcatggtgtaagtcctgatgaaaatatcatggttaatagtgttgtcattggtaaaactaactcggataaacttacattaatagctcgtgataatcatatcgttgatattattggaggggagttaaaacagcatggtcttgaaaaattaggtgaagtggatttggattctgcaattgtaaaaaccggtcttttaagacatgcaaaagttacaccaagagttatttcaactaataaatctaatgattataagattacttttttagatcatgctggtgaggatgtatataaatttagagattcttctttggtaattactgttggggatgatacaactttaatttcttcggatattctgtataggtttgatatacctgtaatcggaataactgatggagatttagataaagttgtggaagatggatttaaggttaaaaattccattatcttcgaagttgaaaggggttttgatgatgttgtgggaagagatattaaaaggataatgtttgatggcgcacaggaatcatttaattatttaaacattgaggaagttcgagataaaatcattgaaattataaataatattaattgtaaatacaaaataagttatattgaataa

SEQ ID NO: 7304 - DNA, 975 bp, Methanobrevibacter gottschalkii
  source 1..975: mol_type = genomic DNA
ttgaattttaaaaatcttgttaaagaaattcaagagtttaaaggagtgtctcgtaaaagttctattaataatgtaatttctcttttagaggagtcatataatgtttcaggtgatgttgtaattgaaattggtgatgatgcttcagctattgacattggaaataatcaagtaatgcttattgctgctgacggtatttggggagatattatgaatgtaaatccctattgggctggatattgttctgttttagtaaatgtaaatgatattgcagcaatgggtggaaaaccgttggctatggttaatataatgtctataagcaatgatgaaatttatgaagatttattgaaaggaatcaaagacggttgtttgaaatttggtgttccaatggttggtggtcatttgcatcctgatggtgaagttgactctttgggagtagctattgtaggaatagctcaaaaagataagattataacaagttttggagcagaagttggggataaagtaattgtagcaattgatcttgatggaaaacctcatgaaatgtttaatttaaattgggatacaacttatgataaggactcacaacttgtaagggatcagattactgctgttcaatacttagccgaacatgattatattaaatctggaaaagatatttccaatcctggaattttgggaacattggaaatgctattggaaacatctaaaaaaggagctattgtcaatttagaagatattccgagaaatgaaactcttggttgggcagattggctcagatcatatccaggttccggatttgtttttacagcagatgaggataaatgcgaatatattagagagtatcttgcaaaatattcgattgaagcagctgttgttggtgaaataaccgattctaatagtctttatttgaattatgcagatgaacaagctgaaattttcaatcaagataaaaatccagtttttatttttagataa

SEQ ID NO: 7305 - DNA, 741 bp, Methanobrevibacter gottschalkii
  source 1..741: mol_type = genomic DNA
atggcaattactaaaaaacatgttttttcattactaataattttaataattgcacttggaactatttctatatctagtgcttatgtgggaaccggtttttcacatgatattcccacatcaaaatatcatgatttatcagcttcagatattctgaataaatataacacgacaaattgtcatgtagaagaaaatggtgtctgcacaaaagttgttgatggagacaccatctatttagataacggtaagaaaatacgttttgttggagtaaacacccctgaaagaggagttgaaggttacattacttcaaaaaattttgttcaaaaattatgcttaaataaaaaagtaggtcttgatatcgatgattcaaaatttactgacagatatggaagaacattagcagttgttattgttgatggaaaaaatgttaatgaaatgctattaaaggaaggtcttgcagaaataatgtacatgcctcctagtgaattcaatccatttgagtggggaaccaccaatacacatgtagatacaacacacagttcatcttcaacaacacatacaagtacagaatccacaagctcttcagattctgcaaaatatattggcaatgcaaacactggaaaattccacactgctggttgtagtagtgttaatcatatgtccgagcacaataaagtatttttttcaagcagaactgatgcaataaatcaaggatatacaccatgtgaaatatgtaatccttaa

SEQ ID NO: 7306 - DNA, 1548 bp, Methanobrevibacter gottschalkii
  source 1..1548: mol_type = genomic DNA
atgttaattaaaattaatggagaagaaatggatgtggcagaagcttccacaattcaggatgtaattgaggaaactaatgctccatatactcctggtagtattgtttgtttaattaagggtaaaaaagaacttgaaaaaaatattagtaaatataaaattagaactaataaaggctctattgttatccaattagacgaatctgatgaagccaaaccacttgtggatatttggaaaaatcagtatgatgaatttgttgatttaaacatcagatggtctactacaactgaggtggctattggtccaattgtaactgatttggaaccaacttcagaagaatacaaatattacgaaggagatgttgttttaagtttatctagttttagtaatgagtctactcatttaatattgcttaaagataataccactaatgtctatagtgtacctccatttaataagggtatttttgctcgcgttattggtggtaagaaaactttagataacttaactgatgacgattcagtaagtagtattgaaccaattattgagagaagcacaacaaaggatattgtatcagtatctgatttaactactgttttagaagaaggcaatgaattgtatacttacatgtcttttgatattgatgaagaatccccagtttgtgtggaacatttatttgcacttataaaagatggcaaaatgaaggtttcatatgaaagtgaatcatttttaggtttttatgaactagccagtcttgaaaagcctaaagagcatgttacaaaaagaaatagaggaacaatcactgttagaagtgatggtgtaggtgttggaaaacttttcatctatcgtgaaaatagagtgttatctccaaatcacactactgttggaaatgtagtgaagggtatggaacttattgatgctgcaaaagaaaatgaatttattacagttaaagctgaacaaggtaggttaatgttgttaaataaaactcaagctgaggctactgaaatgctttctgctgcaggtgttgaacatatgatagatggacttgttgatgataatgctattattgttgagcaaactcctcaacatacaattgatatcctaaaagagggtaaagttattactaaagctattaataaagatgatttatgcacaattaagtttaccgataatgctccaagatctgtaaggtactttaaattactgtctggtcttttggaaaatcctgtaggtcaaattaaaattcactttgcagtaccgggaatgcatattgtcatttttgaaggggataaaaaagcagctaaaggtttagtccctgaaaataatcctgttgataaagttataaggggtcaaataggaattactaatatggcttcaaaaagtgctggtttgattggtattagatttgaagataattctgattttggaccgactgctgaaacttttgatgcgacaaatataattggagatattacttctgattatgattatcttgaaaatttaaaagaaggagttgtggtgtatgttgccgaatctaacaatgagtcctaa

SEQ ID NO: 7307 - DNA, 474 bp, Methanobrevibacter gottschalkii
  source 1..474: mol_type = genomic DNA
atgttgccgaatctaacaatgagtcctaatttgggtacagaagattgggatcctgatgtaattactcgtatgatttttattggacctggagcacatgtaagtgaacagcaagttgttaatgagtttcatatgcttggtttgccacttactattaaaaatacttgttatggatctatgattagtggaaaaagtgaagatgtttataaagctattaaagagattagaaaacttgaccctagccacatttttacaaaagaaagaggatttgcaccaggtgatcctagaaggtgtagaggtcatagatttggtccaagagaaggtttccaccagatggaaaaagagtataagatacttggttttgtttcagaggctctggaaaaccctaaagaagttgaaattgaagagaaaaaaccaattgatgttgacgaatttaaaaaaatcatgaacaaatgtttagataaaaagaataggtga

SEQ ID NO: 7308 - DNA, 456 bp, Methanobrevibacter gottschalkii
  source 1..456: mol_type = genomic DNA
atggttaaaatcgctttatatcctccaaattcattaattttagcagatttattagaaaggaaaggtcatgttcctttagttcttcaaaaacaaattagacaaaaaattaaggatccggagattgattctccaccaatgaatattactgaagaagatcctctcaacggacttaaatatgctgcaatcgaagttccttcaggagtacgtggaagaatgtctcttattggtcctcttatagatgaagcagaagcggctattatagttgatggtgctccatatggttttggttgtattggatgtgcaagaacaaatgaattatcaatatttttacttaggaacaaaggtattccagttttagaattaaaatatcctgataatcaagatgaaacttatgttatggtgaatgcaattaatgaatttgtagattcacttgaagaaactattggggaggaataa

SEQ ID NO: 7309 - DNA, 1242 bp, Methanobrevibacter gottschalkii
  source 1..1242: mol_type = genomic DNA
atggtaaaaattgctttagtttcatgtgggacagaatatagtgggattcaaaaagaaattgaaaaggcagcaaataaatttggtgctgaaattattcttcctgaaattgatttagattacattgatgaatcttatgtaaaattcggattttcagctcaaagctcaagtttaaaattgatgattgcaagagcaatggctattgtggaaggtagatgcaggcctgatgccgtatttattgcaacttgttttagatgtgcagaagcagcactagtaagaaatgaagtaagaagattcatacaaaataatacacgtattccagttgttacttattcatttactgaaagaacaaaggcagatgaattatttattcgtatggaagcattggctactactgtaactcgtagaaatattcttgctcgtgaaaaacaagaaggtcttactcttggtttagactcaggttcaacaacaacaaaagcagttctcatggaaaacaataatgttattgggactggttggacatctactaaagatatcattgaatctgcaaatattgcagctgctgaggcatttgaaggtactggttatacctgggatgatattgatggtattggaactaccggttatggtagatttacaatgggtgaaaaatttggtgctgaacttgtccaagaagaattgtctgttaatgcaaaaggtgcagtatatttagcagattgtcaaaaaggagaggctacagtattagatattggtggtatggataacaaagtaatcactgtaaacaatggtattcctgataactttactatgggaggcatttgtgcaggtgcatctggaagatttttagatatgacttcccgtagattagatgtagatattactgagttaggtcctcttgctgtacaaggtgattggagaaatgctatgttaaattcatattgtattgtatttggtattcaggatcttgttactacattagctgctggtggttctaaagctgatgtggcggcagcagcatgtcattccgtatccgaacaggtttatgaacaacaactccaggaaattgatattcgcgaacctttgatacaagttggtggaacaagtttaatttctggtcttgttgaagcagtaagtgaaactttaggtggaatcgatgttattgtacctgaatattctcaacatattggtgctgtaggctgtgcacttttagtatccggtatgggacacagacaagatgataaataa

SEQ ID NO: 7310 - DNA, 561 bp, Methanobrevibacter gottschalkii
  source 1..561: mol_type = genomic DNA
atgctagttgaatgttatgatgagagaggtgcagaggtttatgaaatcatcattaaacagatttttcaagatctggttctaggttcttctgttgatgatttgaaagcttatgtgaatccagatgaccctgtatttgttttggctattaaaatgagaaaaacttctaatgttattaagtttgaagatgttgctaatttaatgtataataaacaaaacgatgttacaacaattttgattgataatgagaattatcttcccaatattcttaaagaattatggaaaagattttcaagagatgaaatctatcaaccaaatagatatcagcttgaaattaaaggggatttcactgagttaggatctattgttgtagatgatcctcattctaatttacgaagacgtatttatgatgcagtattccggatattgcctgaaggatttaaaatcattaaagatttgtctactgaagatattgtgactgttgtagctactgatgagttaattaaagatgcatggattgaaaaagctctggaatttattgatgagttgaacaaaggtatttag

SEQ ID NO: 7311 - DNA, 867 bp, Methanobrevibacter gottschalkii
  source 1..867: mol_type = genomic DNA
atgaatgaacacaaaggttcaagatttgcacatattacaagagcacatccatgttttaatgaaaaaatgcatgataaagtcggaagagcacatgtgccagttgcaccaaaatgcaatatcttttgtaatttctgtacaagagatattaacaacgaagaagacagacctggtgtaacaagttgtattatgcagcctgatgatgcaatcaatcatattaatgatgttactgcagatggtccaatttcagttgtaggggtagcggggcctggagattcactagctaatgatgaaacatttgaattctttgaaaaattagctactgaacaacctgatttaattaaatgtatgagtacaaatgggcttttacttccaaaatatgcagatagacttgcagaacttggagtgaattccgtcactgttacaataaatgcgattgatccggatattgctgtagacatttattcatttattaaatacgaaggaaaagtctacaaaggttatgaagcagtggaaattttaattaaaaatcaattagaaggtgttgaaaaagcagcagctaatggtttagtagttaaagttaattctgttttaattcccggagtaaatgatgaacatattgttgaaattgctcgtgaagttgaaaaacgtggtgcagctttaatgaatattttgcctttgattccgttaggaaaaatgaaacatttgcaaaggcctgactgttctatgatggaaaaagtcagagaagaagttgaagaaattatacctgtgtttagagcatgtactcaatgtagagcggatgcttatggaattccaggtaaaaaaagcgaagaccatcatttaggaatgactccacaaagtcattactaa

SEQ ID NO: 7312 - DNA, 921 bp, Methanobrevibacter gottschalkii
  source 1..921: mol_type = genomic DNA
atggttaaaacttatgtttttggacataaaagtccggatagtgattcaatcacttcaagtttagtaatgactaacttagaaaaggaattaggtaatacagaagttcaagcttataggttaggaaatatcaataaagaaacagaatttattttaaattatttagatattgatgcacctgagcttttagaaaatattgaagatgatgctaatgttattttagtagatcataattctccttccgaatctgttgagaatttagaaaatgcaaacattttaaaagttgttgaccaccataaattagctttaaaaacttcatatcctttgttcttaagatttgaaccagttggatgtactgaaactattttatgtaaattgtatgaagagaacaatgttgaaattacaaaggaaatggctacattaatgctttcggctattatttctgatactttacttttaaaatctccaaccactactgaagatgataaaaaagctgttacaaaactttctaaaattgctgaaattgatgtagaagaatatggtttaaaaatgcttaaagccggaactgatttgagcagtttttcaattgaggagattttagcattagatgcaaaacaaattgattttaaaaatgtaaagtctattgttaatcaagtaaatactgctagtattcctgatgttttagaaatgaaggatgaattagaagaaggtatgaataaaattattgaaaaagaaaacttagatttgttcatgcttttaataactgacattgtaaatagtaattcacaagttattgcacttggaaaaaatgctgatcttgttgaaaaatcatatgacattaaacttgaagacaacatggttttacttgaaggtgttgtttcacgtaaaaaacaagttgttccaataatgactgaaaacgcataa

SEQ ID NO: 7313 - DNA, 930 bp, Methanobrevibacter gottschalkii
  source 1..930: mol_type = genomic DNA
atgaaaacacttgaatgggaagataataaactaaaacttattgatcaaacaaagcttcctgatgaattaacttatgtttattgcgaaaattatcaggatgttattatagcaattaaagacatgatcgttcgtggagctccagctattggggtttcagctgcttttggaatggcacttgcagatattgaaggtgttgacttaaataaagctgctttagaaattaaaactgcaagaccaactgctgtaaacctattttgggctgtggatagagttttaaatagtgatgatgcattaaccgaagcattaagaatgtatgaagaagacatggcaacaaatagggctattggaaaatttggttctgagattattgatgatggggatactgttttaactcattgtaatgctggtgctcttgcatgtgttgattatggaacagcacttggagtatttagagcggcacatgagcagggaaaaaacattaatgtaatctgtgatgaaactcgtcctcgtggacaaggtgcaagcttaagtgtatgggaaatgcaacaagagaatattcctgttaaattaattccggatgttgcttcaggatttttaatgtcacagggaaaaatagataaagtggtcattggtgcagataggattgctcgcggaggtgttgtaaataaagttggatcatttatggttgctcttgctgctaaacaccatgatattccattttatgtagctgctccatattctacttttgataatgatatttctatctttgatactgttattgaggaaagggatggtgatgaggttagatattatggtggtgcaagaatttgtccaaaaaatactgaagtaattaatcccgcatttgatattactccaaaagaattaatcacgggcattatcactgaaaaaggaattattgatccgatttaa

SEQ ID NO: 7314 - DNA, 447 bp, Methanobrevibacter gottschalkii
  source 1..447: mol_type = genomic DNA
atgaataaaaaaattgtaatattggttattgttgtaattattgctgttttactattatttttagtttatgctaataatgattcttcaagtaattcaaataggactattttaaatgtgtcttctgaaggtccaattgagctttctaaaataactgatgatattaaaaacaattcctattatgagggatatgatgttgaaactttaagatggatggaatcattaggggataagtatgttttcaaatcaaatgatgaaattgtaattatggataagtgggatgcagacaaaattccttccgcttatgtttgtgatgcttatttccgggagatattttcatgcaatgttttggagaatcgtacattaggtgatggaaatcattttaaggatgttctatttattaagaatgttgaattcattgatgaggaagtgcattatattcaaatttaa

SEQ ID NO: 7315 - DNA, 999 bp, Methanobrevibacter gottschalkii
  source 1..999: mol_type = genomic DNA
atgaaatgtgtaaaagttccattaagacaattaaatgatactcgtataaaattaatggaaaatggtttaatgaatatggaatataaaataaaaactgatgataaatggggatatattccagtaaatgaatatgttaacgattatgaaattgttgatgttgaactagaagcaatgaaaaaatttccacataattttgctgaattactcaaagatgagttaagctctgaagaaattgaaaatttaaggacatcatttgacacaattggagatattgtaattctagaaatccctgaaaacttacaagataaaaaacagataattggagatgccgcacttgagtttacaaaaagaagatcaatttacatgaaaaaaagtgcagttaaaggaacaacacgtgttcgtgacttagaatttttatcaggagtggatgatacagttacaattcacaaagaacatagtgctagattaaaattagatgttcgtgaagtttatttctcaccaagacttgcaacggagagaaaacgagtgatggaaagtgttgaagatggtgagaaaatcctagatatgttttgtggaattggaccatttccaatagtaatagcacacaataaaaatgttgatattgttgctgttgacattaataaatctgcaatcaaatatttggatgagaacattaagttaaataaattgaaaggtaatgtaaaaacttattgtggtgatataagacaagttagtgatgattttaacttaaaatttgatagaataattatgaacttgcctggccttgcttatactttccttgatgttgcagttgatttaattgaagatggtggaataattaattattatgagttttccgattcatatgaccggggcgtgaaacgtttaactgatgcctgcagtgcagttggaaaaaaagttgatataattaattgccgtaaagttaaatccacatcccctggagaatggcacatatctattgatggaaaaattaactaa

SEQ ID NO: 7316 - DNA, 792 bp, Methanobrevibacter gottschalkii
  source 1..792: mol_type = genomic DNA
atgttttatttagtgggtttaggattattcgatgaaaaggatatttctttaaaaggattggaatgtttgagaaatgttgataaaatttatgctgaatttttcacttcaagactgtttggttcaaattttaacgctattgaagagttagttggtcaaaaaattgaaattttagttaggggagaagttgaagaggaaagtaaattcattgaagaggctaaaacacaagatgttgctttgattatgggtggcgatcctttaattgcaactactcacagtgattttttagttcaatgctctaaaaaaggtattgattatgaggttattcacggttcatctattttatcttctgcaccagccatatcaggtcttcaaggatataaatttggtaaagtaacaacaattccttttccagattataatttttatccaaaatctccttatgaagctattgaggaaaatttaaaaatggacttgcatactttggttttacttgacattcaagctcataaagaccgttatatgactgttaatcaaggtttggaatatttgatgaatattcatgatacgttggatagggatggtttgattaatgaaaatactttagctgttggtattgcacgtgtcggctcaaaagatgtttgtgttaaagcaggaaccataaatgaattaattgatttcgactttgggggtcctcttcattgtattgtaattccttcaaaacttcacattgtcgaagcagaatatcttgttgaaattgcaggagcaaattctaaacttttagatattgtttaa

SEQ ID NO: 7317 - DNA, 516 bp, Methanobrevibacter gottschalkii
  source 1..516: mol_type = genomic DNA
atgtgcagtatttacaatatttataattgtttatataaactatatttgatgaaatttgaaaaaacaatgggcttttatgattcaaataggatgggagatattctatttatattccacaaaaatcataaaaaatatctgaatgatgagctttctaaatataatatgagtttgatacatgctctttgcattataatgattcatgaaagtgatgaactaaatcaaaaagatttatctgatggtttgcatttaacaaaaagtgcaattacaaaagcggttaaaaaattagaggatgagggttggattttacgtgaaagatctattgaagataaacgtcattttattttaaaattaacggacaaaggcaacgattttattccaattatgaatgatataaataaaaaatgggagtctgaaatggggttatatgagttagatccaaattttatgcaaatatttaatgaattaactcatcgggctattaatttaaatttaaaaaaagaaatgaaaaaggattaa

SEQ ID NO: 7318 - DNA, 936 bp, Methanobrevibacter gottschalkii
  source 1..936: mol_type = genomic DNA
atgagtataaaaaaagtcgttgtcgcaggcggaggagtactcggtagtcaaattgcacttcaaacagcatattgcggatttgatgtgacaatttggcttagaagtgaaggatcaattgaaagagctcaaccaaaacttgaaagatttaaaaacatctatgttgacactcttgagaaaatgaaaacagatgcaagtgcatactgcagaggtttatctaaaaaagcagatttaagttctgaagaattagatgctttaaaagaacaagcgcaaaatgcatatgatagtttaaaattaacaacaagttatgaagaagcagcaaaagatgcggatttaattattgaagctatctctgaaaatccagaacaaaaaattgcattttaccaagaattagcaaaacatatggaagataaaacaatacttgtaacaaattcttcaacattgctcccatcaatgtttgctgaatatactggaagacctgaaaaatatctttcattgcactttgcaaacacaatttgggcaaataatactgctgaagtaatgggacatcctggaaccgagcaaaaatactatgatgaagttgttaaatttgctgaagatattaacatgattcctttaaaacttaaaaaagaacaaccaggttatatcttaaactcacttttagttccattcctaaacgcaggacaagcattacttgcaaatgatgtagcagatcatgagacaattgataaaacttggattctagcaacaggttctcctgcaggaccattccacattttagatattgtaggacttgaaacagcatataatattgttattatgaatcctgaatcaaaagatcctgaaactacccctggaaaaattgctaaaatgcttaaagaaaaaattgatgcaggtgaaactggtattaatgctggaaaaggattttatgaatattaa

SEQ ID NO: 7319 - DNA, 525 bp, Methanobrevibacter gottschalkii
  source 1..525: mol_type = genomic DNA
atggtaaggcctagaagaatgagaagagttgttgaatgtcataagtataatttaaatgaaaatcgaaaaccaattgagttgtctgtagatgaattcgaagctattaggtttaaagattatcgcaacattaaacaaattgatgctgctgaatttatgggcatttcacaatccacttttcataggattttaaattctgcaaggcataaattagctatctcattgatcgaaggtaggagaattgttgtagttagaggtgatactatgattgatcaaaataaatatttgtgtaatgactgtggatttcaatggtcaaatcctgaaaagacttatgaaaaatgtccagattgtggttcaaagaatatccaaagattgaatagagataagttaaggggcagttcaccagataaatgtagatgtcctgaatgtggttatgaagaaccaaaagttaaaggtgttccgtgtagaactaaaatatgtcctgaatgtggttcttcattacagggaagaggaatgtgtagaatataa

SEQ ID NO: 7320 - DNA, 285 bp, Methanobrevibacter gottschalkii
  source 1..285: mol_type = genomic DNA
atgaatgataatttaaaatacaactgtaatgaatgtggatttacatggattaccttaaatggtcaacattccatatgtcctaaatgtcacagtgaaaaaattgaatatttgggtgaagttgaagatttagatataaattctattttagaacacaacaaaagaagagggggatgttgtgggtccgctcgtggaaaaggaccactaacatgtggaaaaccttaccctgatcatcatgatccaaatattccacatgatccatctagatgttgcggtcataatgaataa

SEQ ID NO: 7321 - DNA, 231 bp, Methanobrevibacter gottschalkii
  source 1..231: mol_type = genomic DNA
atgaatcatgtaaaaactgtaaagaacgaaacaaatgttgctcagcctcacaaacacacagaaccatcacagaatacggatcataaaatgcaaaaagcaatgaaccaaaaaatggaaaaaaacaggaatataaaagacgaatatactaaaagatcaagcgttgaagaacccattttggaaaatattaaaagaacaattccaaatagaaaaagaagtagtcatcggaaatga

SEQ ID NO: 7322 - DNA, 918 bp, Methanobrevibacter gottschalkii
  source 1..918: mol_type = genomic DNA
atggataatgaggaattaagaactgttagagtttatactaaaaaatatactagtaaagataaagagggaaatattgttgaaaaagaatctcaacaaaaacaagtaagtcttaaaaaagaagatccttttgaagataatgatttggtaaaagtattggcaaaaagggaatatgaatcattacttgataatcaattttctgattcaaaacttgatgaattttataataggcttgaagcaaaagatgctgaaattgaaaaattaaacagtcagattcaaactcttaaaggatcattttttgatgatgttaattctcttaaagaacagctcacttataaagatgaacttttaaacgcaaaagatgaaattcataaattaaataagaaaattactaaaattgatgatgaaagagtagctatttttaaagaattggattataaaaataaaatgattttagcttataatgtcgagttaaataaatctattttaaatgctataaatgttgttattgatgaggcaagagataacattaacagaagaaacgctcaacttgttgaagacttggaaaaatctattgaaaaatccaaacatgatgtaaatgaaaagaataaagctatagcatatgaaataaaaagcactgttgaggatatgaatgaacaaattagaaataccagcacccttaaaatgatattgaacaaaaaaagaattaatttaagagtgcctaccgatgatttgcttaaaccatttgactttgactttgatgtggaacaattgctttccggacaagctttagaacttgacgctgctgaaattttaaaagaagtaatgccgaagctcccagaaccattttctaaatatattgatactattgaagaagaacctgaaactattgaagtttcatcaacaaaacaaggggaataa

SEQ ID NO: 7323 - DNA, 417 bp, Methanobrevibacter gottschalkii
  source 1..417: mol_type = genomic DNA
atgagaacatttaatgctggaaaaattacttttgaatatcctgataattgggaggttgaaaaagccgatatcttatctaatccagattgtattgcaacattgtctaaagggcaggataatttattcaatgcagtttcatttccaactgctacaaatcttgatgattataaaattttcatggaagatgtaatttctgatgatggaggggttattttatcttctgattttgttcagatcgcagataaaaatgctattaaagttcatgccaatatggacactcctgaaatcaactttgacattcatacttatgtttttatagaaaatagggaaatttatatttttgaactaaggacattagatgtttcaggcgaatcagagcgcgaattcaagaatatgatttcatcattaaggttttag

SEQ ID NO: 7324 - DNA, 744 bp, Methanobrevibacter gottschalkii
  source 1..744: mol_type = genomic DNA
atgataaaaaaattcgaaattaaatcacatgatggacctggaagaattggaaaagttgatggtgaacttacacccagaatattttttaaagaggaattaaaaatagctccaaaccaaggttctgcacacaatatcgatcgtgaaattgccgaatttaatgtaaaagaaacattaaaactcgctaaagaaaatgctgaaacctgtaacattgccgtgattcaaggttcaaaatacattgatttaagaattgaatgcctaaaaaaattagaagaaatcggatacaatggatttataatagctaatggtgatgcattactaactaattcaagagaacttgttgatattattatatcccttaaaaaagaagctaaaaaaacaagttatttcatatttccattcgcagaattatctttcatgccacttttaacatatatggggattgatggatttttagccgattctgcaaattattacagctacatgaatgttctgcaaactccaactaaatcatatgacttaaataattatcctatttatgaaaatatttcacaaaaagacttagaaaaaaagaatcttgaaaacatgaaatttgtaataaaagaaattcatgtacacatgaaaaacaaatctttaagaaatcttgtagaagaacgctcaggcaccactccacaaaatatctcaactttaaaaatacttgataaaaatcatatgaattatttgctagagtatacgcaaatattctaa

SEQ ID NO: 7325 - DNA, 951 bp, Methanobrevibacter gottschalkii
  source 1..951: mol_type = genomic DNA
atgattgtccgaggtgtgtttttaatgtctataataaatcgtcttaaatccttatttaaaggagacatagataaagaagaaactgacatcaataatgatgtatcaaacacatctgatgatgtcgaagttacatcttcaaaaatggaagaatctatcagtcctgaaatggaagatagtaaaaaagatttaactttcaaaaaagacatcgaaatcgtagaagattcatctgaaattgcggaagaagttgaagctttcgaaaaaacaattcctgaagaacaagaaattgttgctgaagaagctaaaactattgaagatgaagaaaaaacaactgatgaagatgttgttgaggaagttgaagaaaattcaaatgataaagataaaaagagagatactatgactttattaactgataaagaattattaaacgatactaatcgtgatccagattttactgctgagttcattgatgctggaattgaaactgtaaaacactgtttccaatgtggtacctgtagtggtagttgcccatctggaagaagaactccttataaagtaagacaaattgtcagaaaatgtttattaggtttaaaagaagaagttattgctgatgatgctttatggatgtgtactacttgttacacttgtcaagaaagatgtctcagaagtgttaaaattgttgaaatcatcaaaaaagcacgtaacatcgctgctcatgcaggatacatggctaaatctcacaaaatgactggtgtatatgtattaaatactggtcatgcagtacctattaatgataaaataaaagctttaagagttaaaattggtcttccagaagtaccaccaacaactcacacttatcctgaagcattagaagaagtaaagaaattatgtaaaattaccgcctttgatgaattaattggttatgatgaagcaaccggcggattaaaagaatag

SEQ ID NO: 7326 - DNA, 888 bp, Methanobrevibacter gottschalkii
  source 1..888: mol_type = genomic DNA
atggaaattgcatacttcttaggttgtattatgaacaaccgttatcctggtgttgaaaaagctaccagaaaattatttgaagcattagatattgaattaaaagatatggaaggagcttcttgttgtcctgctcctggtgtattcggttcttttgatgaagaaacttgggctactgtcgcagcacgtaacttaactcttgctgaagatatgggtgtagacatagtgacagaatgtaatggatgttttggttcattatttgaatgtaatcatattttaaaagaagatgaagataaaaaagctaaaattaatgctaacttagctgaaattggaagagaatacaaaggaactactaatgtaaaacacatcgctcaagttttaagagatgatgttggttttgaaaaattagcttcccttattgaaaaacctttagacttaaatgttgctgttcactatggatgccacttcttaaaacctactgaaactattggtattgaagatcaagctgaaaacccatctattttagatgatcttgtagaaattactggtgctaaatctgttgactacaaagataaaatgatgtgctgtggtgcaggtgggggtttaagatccagagatttagatgttactgctagttacactaaagaaaaacttgaacacatgtctgaagctggtgtagatgcaattgttaatgtatgtccattctgtcacatgcaatttgaccaaggtcaagttgaagttaatgaaagatacggaactgattttgcaattcctgtattccacttagctcaattatatggattagctattggattaccagttgaagatttaacatttgatgctcaaaaaattgatgcaacttctgctgtcaaaaaagcattaggtgaatag

SEQ ID NO: 7327 - DNA, 267 bp, Methanobrevibacter gottschalkii
  source 1..267: mol_type = genomic DNA
atgtttgtagcaacattagatggaatattcaaatattctgaccttccagaagaatacgaaccttatgttcaatttaaagcaactatagataaaagagaacttaaacctactgatgaaatggctattttaaacattgcaggtacttctactcatcatgttttattcttagatgcttattcaagtattgcagaaatcgaagctgaattaaaagaagcagatgcaaaaattaatcacactactttaaaaattataggtggccatttatga

SEQ ID NO: 7328 - DNA, 528 bp, Methanobrevibacter gottschalkii
  source 1..528: mol_type = genomic DNA
atgagtttaccatctgagcaaaactggttagttcttcaaaatctcataatagatttgacaaaaaaggggtatgaaatacctaatggaattaaccctgagatgggattaatcaggtcttcaattagttcatataaaagagatccttcccatcctgaattgatcaatggtttagctaaagcagaaatggctttgaataatatccaaggaactcttttaactattgctgaagaagaaggtgaaaattatgttgattattggcttgatttattaaaacaagtcatgaaaggtgaagaattgtttgaatttgccaaatctaggtcaaaattcttagttaatactccaccgggtttaactactggcaaaattaacttaaaagttcctttagctgaagaaagagttcaagaaattgcagaatggaatggtttaatcatcgaatttgaggatgatatgactgttcaattacatggtgaccaggaagacctcaaaactggtttaaaagagatgggatctttctttttagatgattag

SEQ ID NO: 7329 - DNA, 690 bp, Methanobrevibacter gottschalkii
  source 1..690: mol_type = genomic DNA
atgacaaaaattttagcaataagtgacattcatggtgaagaaaatgaaaatttatacacttatttaggcaataatgatattgatttagttttaattcttggggatattactgacttcgggcctttggattttgtagagacatttattaataaactttatgaatatgatgttgatgtaattgctattccaggtaattgtgatccacaggggatatgcaatgctattaatgatgtagcattctgtcttcacaataatattgttgcttatggggatgcaattttatttggttacggcggttctaatccaactccatttaacactcctggcgaaacagatgatgatcatatttataaatcagtttatgatttattggcaaattatgattatgtatacaataccgaagttcctaaagtaaaaattttagccactcatgctccaccattcaatactgatgctgacagagtttccaatggcgaacatgtaggcagttctggaattcaaaaatctattcatgaatttgaacctgaaattaatgtttgtgggcatatacatgaagctaaatctcttagtaaaattggaacaactactgatgtagcaaatcctggtatgcttaaagataatggtgctgtcttaattgatattaaagatggttcaaactatgacataagcattgtttctttagatgaataa

SEQ ID NO: 7330 - DNA, 903 bp, Methanobrevibacter gottschalkii
  source 1..903: mol_type = genomic DNA
atgatttgggttactagtaatgttgatggtgaagaatacaaagaaccattttccaagggaattatgtctcgttcactcaatatttcttatattggatctaaaagagcatatgaattagctagtgaaattgaagaggaattgattaaaaaggatatgtctgttatttctcgtgatgaattagcagatattgtattaaatcatctgattacggtagatccaaaaattgcagaaaaatataaaagtctaagattacttaggaactctaaaaaaccattgattattcttattggaggttcctctggtgtaggtacttcttcaatggcatttgaattggctaatagattaaggttaaaaaatattataagtacagacatgattcgtgaagtaatgcgtaaaattgtttcaaaagatttgagtcccgtaattcataagtctagttatgatgcttatgaaagtataagaacaccatctcttaaaatggataagattgttgaaggttttattactcatgctgatgttgttaatgtgggaattgaagcaatcatcgaaaggtctattaaagaaggcattagtattattattgaaggagtccatgtcgttccaggtttcatcagtaaagatttaatggaaaataataatattatcatgtttacattaatgattgatgatgaagagttacataagcaacgtttttatttaagatgtagtcaaccttgggtaaaaagatctcttgagaattatatggaaaactttgaatcaattagaaagactcaagatttttttgttgaacaagcaaagatttatgattctcacataatcaataatattgagattaatgaaacaattaatcaaatggtaagtgctatcttggaaaaatttgtaggtgttaatgatgttagataa

SEQ ID NO: 7331 - DNA, 387 bp, Methanobrevibacter gottschalkii
  source 1..387: mol_type = genomic DNA
atgttagataagaaagttaaggaaataatgacatctgatgtactaactactacttcagatgttgatgttgtatttgcatttgaaaaattaatggaaaataaaattagttctcttccagttgttgaagatgatgaattaattggaattattactgcaactgatgttggtcataatttaattttagataaatatgaattaggtactagtgttaaagaaataatgataactcctgttgttactgtttctccagatagtactatcgaagaagctgtttgcataatgaaagataatgtttcttcaggtatattaaatcaacttccagttgttgaaaatggaaaattagtaggtattatttctgatggagatattatccaagaaatattctaa

SEQ ID NO: 7332 - DNA, 909 bp, Methanobrevibacter gottschalkii
  source 1..909: mol_type = genomic DNA
atggatgaattaagaaataaaggtggtaaaaaagctgtaactgttgcaataattgcaaatacatttttaaccgtttttaacattattgtaggaatgctgtctggaagttatgcattaatctcagaaggagggcatactttatcagatattacaacaacaataattgcatatattggatttaaaattggtcagaagccagcagataaagaacatccactaggacatggacgtgctgaggcaataagtggattaataatcatgttatttttaacaatggtcgcttatgaaattatgagtggagctattgaaaaattatttaatccatcaacaatcaccacaccagacatttatgctgcagtaatggctattttcggaatatttatcaattacataataagtgagtatattattagattaggtaaacagattaatagcccagcaatcgtggctgatggaaaacatcaaaaaacagatattttttcatcaattgcaatattaattggagtacttgtatcaaacataggttatcctatattagatccaattattggtttgattattggatttttaattttaaaaacagcatatggcattggtaaagagaatcttgacaatattatgggtaaaattccatctgaaaaatttgttaatgaaataagaaaaatagcaaatgaaagtagcgattatgcaaacaatgcacataatataaaagtagattatttaggttcatatgctgcagtaacattacatattgaaatcgatggaaatatgacattaaatgagtcacataaaattgtacatattgtccagaataatattattgaaagaatacctgatgtaaaatatgtgaatgtccatgcatgtccaaaaggattggattataatcataatcaagaaatagataaataa

SEQ ID NO: 7333 - DNA, 1122 bp, Methanobrevibacter gottschalkii
  source 1..1122: mol_type = genomic DNA
atgataaatcctgcaagtagaacaaaatcaattgaattgtcattaataagaaaaatgtttgaagtgacaaacccaaatgcaataaatttaggaatcggcgaacctgattttgatgttcctgaaaacatcaaaaatgctatgaaaagatcaattgatgaaaatgatactcattatactcccaataaaggatatattgaactaagagaagaaatttctaaaaaatttaaaaaagaaaatgacataaacacaaatcctgatgatattattgttactgtaggagctagtgaaggattatatatgtgtacacaggcattcgttgaaaaaggagatgaagtattgcttccaaatccaagttttctttcttatgaatcatgcataaagctagctgatgggaatatagtgccagttgattgtaaaatggaaaatgagtttaaattaaaagcagaagatgttcaagaaaaaataagcaataaaacaaaagcaataattttaaattcaccatctaatccaacaggtgctgtgatggagaaagaagatataaaagctattgcagatttatccatagatgaaaattttttaataatttctgatgagatatatgagaaaattatttatggaaaaaaaaattattcccctgcaaaatacagtgataatgtaattactttaaatggattttcaaaaacatatgcaatgacaggacttagaatcggttatttagctactactaacgaaaattacacagaacaattacttaaaatacaccaatataacattgcttgtgccaatacaactgcacaaagaggagcatatgaagcattgaccggaccacaagatgaagttgaaaaaatggtttttgaattccaaaaaagacgtgatttaattatccgtcgtttaaatgaaatggaatatgaaacagtaaatgcagaaggtgcattttatgtatttccaaaaattgaagatgaagacttcgtaatgaaagctgctgatgccggagtaattacagttccaggaattgcgttcggaacaaatggcaaaaatcatgtacgtatgtcttatgcaaattcatatgaaaatattgaaaaagcaatgaatattttagaagagcgtgtagttaatggatga

SEQ ID NO: 7334 - DNA, 1551 bp, Methanobrevibacter gottschalkii
  source 1..1551: mol_type = genomic DNA
atgttatatgaaaaaaatatatttcaaaaaaatatcaaaaatatgaatattcacatgggattggcctatccaaatatttataggactgcaatgtcttcattaggatataatattttatacaataagattaatgaacgtgaaaatacttggtgtgagagaataatctttcccaatactaattcaatagaatcaaacacacccagcaaatattttaatattataagctttactgtccaatttgaagaagattattttaatgtattaaaaatgctcaaagatgcagaaatacctctaaaaagagaagatagaagtgaaagtgatcctttgattattgcaggaggtccatgtgtaactgcaaaccctatgccattatacgattatattgatatttttgtaattggagaaggtgaatttgttattgatgaaattttaaatacatataaaaaacatggaaaaaatttagaaaaatatcttgggttgcttggagtttacattccaaagtacaacaacagaacaaaaataaacatcataccaaacatggataacacttaccacattacagaacatattgtgagtaaaagtgatgatgaaaattatcagaccattttcaataataccataatgttaaatgtttcaagaggatgcacaagaggttgcagattttgcatgtcaggatatttatacagacccatgagagaaaccaaatataaaaagctaattgacattgcaattaaaaatcgtgaaaatactggattaaataaaattacattaataggggctgcagtttcagattatagtgatttaaaaaatttaattgatggtttagaaaaagagggctttcagatttcaacaccttccctaagaattgaatcaataacaaaagaaactttagaatcattaaagagaagtggattaaaaactattacgcttgcactggaatcaactgaaaaattgcgaaaagtaattaataaggaaatactggaagaaaagatttttacagtaataaaaaatgctattgaacttgattttaaaattaaactatattttttaattggaatacctggtgaaactatggaagacattgaagaactttgccaatatatgaaaaaaattgcaaatatgcacaaaagtatcaaaaatgtaaaatttagtgtaaatccacttattccaaaaccacacacaccattacaatgggaaccttatgatttcaaggatattaaaaagaaaactagatatattaataaagaaatgagaaaatataatgtaaagtgtgaaagtcctaaaaaaggattaatccaatatatactgtcttgtggaaatagaagcattggtgcaattattgaaaaaactttaacaaaaaatcctacattaaaagaatggaaagaattactaccaaaatatgatattgatgatgtattgccttgggacaatattgatgtaggtgtaaataagagatttttaaaaatagagaacaaaagattgagaagtctaaaacaaaccccctggtgtgaaacaaacccctgctataattgcggatcttgtgaaaaataa

SEQ ID NO: 7335 - DNA, 2877 bp, Methanobrevibacter gottschalkii
  source 1..2877: mol_type = genomic DNA
atgttcttcttagttttgggggtagttggtgcaacagaatttaataatgcttcaaatacagaagattcaaatttaatgactgataatgttgattcattgtctgttgaaaataaattagaagtttctaacgaggattctatctcagaggctaatttagttaattctcatgatgataatttgaacaattattctgatagtgatgttttaagtaactatgaggatgattatggaaatgttcaagcttctaattatgctgaaataggtaatactaattctgttcgtagtgatgttttatctgtttctaatgatgataatttagctgctagttctaaagtatctgcaaaggttgatgtagttgatacacattattccaaatccgctacatatttcaaagttactttgaaagatactaaaggtaattctatcagcaatcaaaaaatttcttttaaagttaatggagtgacttacactgctactactgataaaaatggtattgcatcagttaaaactgcagctttgtctgtaggaacatatactgttgcaattaaatacgctggtagttccaaatatgcagctgtagctctttcaaagaaagttaaagtattgtcatctgttagtggaagtgatattactaaatattatggacctgttgtccagtattcagtaaaattctggaaaaattataatgcattagcaaatactaaagtatcatttaaagttaatgggataacttatactaaaaccactgataaaaatggagtcgctaaattaccagttaatttggctcctggaaaatatgttattactacaattaatccatattctggtgaaaaattgtctaataaatgtatttcattaagagatggtacaactttaacccatggttcaactaatacatatattactcctaataaaaaacattcatttactgtaactttaaaatctaaacacggtattttaattaaaaacaaaaatgtagtatttaaatataataataaaaaagtaactgttaagactaattcgaatgggaaagctactttgtctattcctgctctttctaaaggtacttattatattagttattcatattcaggagacaaatattattcaggttcatctggatctggaaaattgtatgtaaaaaatccaactactaaaattacatcttcaaaattgaagatgcaatataaggatggatctaaatttgcggttaagttaacaaaaaatggtaaagttttagctaataaaaaagtgaaattaacatttaatggaaaaacttatactgaaaaaactaattcaaagggtattgcttatttaactgtccctacagtaaaaccagctacttacaatattaaatatcagtatttaactccaagttattttaattattgttatggctcaaataaaattgttgtttctaaacaaactgctaaagtatcagcaggggatttagtgatgaactataaagatggttctgtttataaagttgttgtaaaaaataaatttggaaaccctcttaaaaatattaaagtcaaatttacaattaacggaaaaacttatactaaaactactgattcaaatggagtggctaagcagtctattggtttaaatattggttattattctgttaaaacagtactttctaataattattatgcacatggcgctatatataaacatatttcagttaaaggaactaaatttgtaggcggaaatattcatgtagcagtaggtaaaactgcatattattcagtaaaattattggattataagaataatccgattaaaagtacagaagttacttttattttggatggtaaaaaatacacagctacaactagttcaaaaggtgttgctaaagtaaatttaggtgttttatctgcaggtactcataatgttaaatattcacaaggagagtattcaggttcatctaacatatatgttgctgataaagtgactattaagcaaattattgctgcatctggaaatgtgcaaaagtatattcaaaaaaatcatagattaccttccacagttaatattgggggtgttacttattcaactaatcaatatttatatttagtttcaaaagctattgtaaatttaaaatctaatgttaaatctgcaatttatgttaaaaatgtcgatggtccaagtaatccttcatcaacatatgctgcaggtaatttatatgattatctttcagttgcaaatagtgttgtgaaaaattctgattcaaaaggtagtgtacctaatactgttagttctaaagttggaactattggttataaaagtttagtttatgcgtttgctcgtgttgttgcattttatggtgatgatgatagattgccatcatttgttgaaataaaatcactaagtggtactagttcagatagtaatattaactctaaaaatactatttcaaacttaaaagcatatttggcagcatcaactaattgccaggttaataatgctaaaattaaacaattagttggcaaattaactaatgggttgaagagtgaaaaatctaaagcaactgcaatttataattatgtgagagatacaatttcatatagtttctattatgatactaaacacggtgctgttggaacattgaatgctaaatctggaaattgtgttgatcattcccatttgcttgctgctatgtttagaactgcaggtcttgcaactagatatgtgcatgggtcatgtacattttctagtggaagtacatatgggcatgtttggactcaagtattgattgataatacttggactgttgctgatgcaacaagttctagaaactcgttaggaaaaatagctaattggaatactaagtcttataggcttaatggatactattccagtcttccattctaa

SEQ ID NO: 7336 - DNA, 459 bp, Methanobrevibacter gottschalkii
  source 1..459: mol_type = genomic DNA
atgaattctaagaaatatagtaaagtggctgttggtggaactttcgataaatttcatgatgggcacaaaaaattattaacaactgcttttgaattgggtaaccaaattgaaattggtgttacctctgatgcttttggagggttaaaaggagatattgacccttgtaaagagagaatgagcaatcttaaggcttttttttcagataaatcagattttgttgtaattcctttaaatgatccgtatggaactacaatatatgatgaggattttgatgctatagttgttagtgaagagactgagcctactgcagttgaaattaatgagattagaatttctaaaggtatgaaacctcttgatattgtcgtagtaagttttgtgctagcttatgatggaaatcccatatcttcaacacgaattagacgtggtgagattaatcaaaagggaaatgttgttgaataa

SEQ ID NO: 7337 - DNA, 192 bp, Methanobrevibacter gottschalkii
  source 1..192: mol_type = genomic DNA
atggcagtaaaaattgattctgatttatgtggacatattaaagattgtccagtacaaggattatgtattaaactttgtgagcaaggtgcaatcatagaaaaagatggtgatgtatctattatacctgaaaattgtgatgattgtgatctttgtattcaaaactgtccaaatcaagctatatctaaagtatga

SEQ ID NO: 7338 - DNA, 1011 bp, Methanobrevibacter gottschalkii
  source 1..1011: mol_type = genomic DNA
atgtttaatatagaaagaaatggtgaagagcaccgtaatttatcatataatgatataaattgtgttggttgtggtatttgtacggatatttgtccgacttcttctttaagattaggacccatagttccagtagctcgtggattaattgaaatggatttagtttctattaaagaagattcatgtgtgttctgtggattatgttctattgcttgtccgtttgatgctttatccatgtctgttgatggggaatatattaaaaacattgagtcttatcctatttggaataaagaatctgttgttgatgatggagaatgtatgtattgtagtaaatgttataatatatgtcctagtgatgcaataatttttgagaggaatcttccaaatcctgctgatttagttaggggggaaattgaaataaatgaggaagattgcatatattgctctttttgtgcagatatgtgtcctgctgaagcaattacaattaaaaatattcccatatcttctgttgataaattaaataattttattgatgttgattcttctaaatgtattttctgtggtgtttgtaaaaaggtttgtcctgaaaatgctattaagcaaatctgttctacatgcatgttaaatgaagaaattgaagttccggaaattactggaaatgtaatgattttagaagatttatgtgtatattgctcatggtgttctgaagtttgtcctgttgatgcaattgatataactaaaccatttgatggtactttggaattagttgaaagtgaagaaaaaatctgtaagggtgattcttgtcatgcttgtcaagatgtttgcccatgcaatgcagtttcaattgttgatggaaaatctgtaactgatttatctttctgtaatttatgtggtgcttgtgtgaaagcatgtccacaagatattagaattttaacaagaactgatttgaatttagaaaatatcaattctgaatcttggaatgatattttaacttcaattctagttggaaaatag

SEQ ID NO: 7339 - DNA, 183 bp, Methanobrevibacter gottschalkii
  source 1..183: mol_type = genomic DNA
atgtttagaaaaagaattgacagcaaaggccaagggagtgctgagttaattttaatcattggtggtttaattgttgttgtactcctaatagcaagttatatatcaaatataactgaaaaaacacagacaaatattcaaaatttgttaaaaacagaaagagatttcttaataaataaaatataa

SEQ ID NO: 7340 - DNA, 207 bp, Methanobrevibacter gottschalkii
  source 1..207: mol_type = genomic DNA
atgaaaaatatgaaaaaactcatcaaagaaaattctggacaaggtgctgccgaatatatattgctctttggaggtgtgcttgtaatcgcactacttgcattaacaatatacagatcatatatggaaacaagtgatgtcagtttaaaagctaaagatgacataattgatgtaagaaataccatacttgacaacagaacccatgtttag

SEQ ID NO: 7341 - DNA, 1149 bp, Methanobrevibacter gottschalkii
  source 1..1149: mol_type = genomic DNA
gtgggaaatacaataaaattagtttcaggttttattttatttgtaattggtgttctcatagcttatgaggcaagtgtgtataatttattagatatcttattaataattggtttaatcattgcaattgtaggaataattatgatgattagtcattttgtggaatctaatgcggataggacaacaaataaaattaaagagtttttagagtctaaagaaagtaattcaagttttgaaagaaaaaattttactggtgaagaacctttaaaaatccgtcatgattataatgattttgacgatgcagaatatgatgacttaggcattgaagattataatgattcaactcctagtgagtattatggagattcttttgaagataatcctaatagagtattaagaactgttccaaggcaagaaaaagaattaaatttagataaccagctagttttcactcctaattatggaaggcctttgaaagttactagaactcctaaaaaacgtcaatcagattattttgaaaaagaaatgcctccgtttgttgtggaaactgataaatctgatgaaattaaacgtgctttagaagaaccaactcctgttgaaaaagctgttaataatcatacattggctcctgaagtgaaacagcctagagatattaaaattgatattaatgaccctgagagtttacctgttccaaaatcactcagtagccatatactttgtaatgattctgttattacttcacaagaagcttttgaccaattagcaatttatgttaataaagaaatcatgttggaaattccttctttaaatgaattatcagatagattcttatctcatgttcctacaagttattcaagagtaattattgatgaatttgatacatcagacatgtcttatatgtttttaatttcatctcttttaaaacaaggtgttcatattaagactgtccctaaagttcatacagttaatttaatcactgatgattctcatgcaatgattatatctgaaggtcagaatgatatggaatatggtgcgatatatgatgacaggaagtctatttcaaacattcgtgctagtttcgaaaaaacttggaatattgcatctaacttagatgagaatattattatgggttctgttgggggatctgcttaa

SEQ ID NO: 7342 - DNA, 720 bp, Methanobrevibacter gottschalkii
  source 1..720: mol_type = genomic DNA
atggaaataagatggttgggtcattcggcatttgaaataatcagtgatgataatgttagaatattaatagatccgtttattagtaataatcctacttgccaagtccctgtagaggaattaaatccagatattattttgcttactcatggacattctgatcattttggtgatgctttagaaatatccaatagtactaatgctcctattgcatgtattcacgaaatttcactctttttagctaaacaaggaattaggaatattagtgttaatattggtggttcttttgtatataggaacattaaatttacaatgctcgaagctaaacattcttctgatattgacatggttgaagaaatcgctcctggtggaactgctgcaagctttttaataacctttgaagatggaactaaaatatatcattgtggtgatacaggactatttggtgatatgaagaatattattggtgcaatatataaacctgatgtggtaatgataccaataggggataaatttactatgggtccttttgaagctgctttagcttccatgtggatgaatccgaaagttgttattccaatgcattataatacatttccaccaatagaacaagaccctgcaatttttgctaattttgtaagtcagtttaacccgaatattgatattgtggttatgaatcctgatgaatattttgaatataatcctgaagattatcaggattaa

SEQ ID NO: 7343 - DNA, 2007 bp, Methanobrevibacter gottschalkii
  source 1..2007: mol_type = genomic DNA
atgaaatccatgtccaatgtagacatttatacaataagtgatgaactaaataatttattaagtggtgccagagtagataaatcattccaacctgcaaatgatattgtagtaatcagattccatgttcctggaactggcagaattgatttagtaatgcaatgtggttctagaatacacaccagccaatatcctcttgaaaatcccaccattcccccatcatttcccatgcttttaagaaaaagaattaaaggagctcatgttgaaagtattaaacagcatgaatttgatcgtgtaattgaaattaaagttaaaaaagataaatattacacaataattgttgaattatttgataaaggaaatataatccttttagatgatgaaaacaatattattcaacctttaaaaagaaaacagttaagtgcaagagacattagttctaaaagagaatacaaatttcctgaaaaacgaggaataaaccctatcacaattactgaagaagaattaaaaaaattattcaaaaatgcagaaagtgatgttgtaagaactcttgcaatgaatgggcttggaagcttatatgctgaagaaattattcaaagagccaatggaatcattgaaattgataaaaacacacttacatcacaattaacagatactcaaactgcagaaatctataaatgccttaaagagttatttgataatcttaaaaaaggagcaattaaaccacaaattgtaaaaaaagattcaaaagaagatgttattccattagatcttgttaaatatgctgattttgaaaaaactttttataaagattttaatgaggcctgtgatgaattttattctaaaaaagtaaacagcaccataaaaaatgtaaaagaagcagcatggaataaaaaagtaaataagtttgaaaaaagattaaaattacaacaagaaacccttgataattttacaagaactatagaagaaagtcaacataaaggagaggttatttattctaattattccaccattgaaaatataataaatgttataaacactgcttggagtaatgactattcttttaaagaaattggcaaaatactaaaaaaagctaagaaggagggaatgcctgaagctcagatttatgaatccattgataaaatgggtattttaacactgaatattgatgatactgcattgaatataaatcctaaatcaacaatacctgaaaatgctgaaatatattatgaaaaagctaaaaaagcaaaaagaaaaacaaaaggtgcaataatagctattgaaaatactaaaaaacaacttgatgacattaaatccaaaaaggacatagcgatggaacaggtagaattacctaaaaaaagaattaaaaaagatttaaaatggtatgaaaagttaagatggttcattagctcagataacatattagttatcggtggacgtgatgctaacagcaatgaaatggttgttaagaagtatctagaaccaaatgatatttatttacatgcagatatacatggtgcaagttcaactgcaataaagttaaacggtaatgaattaaatgacaatatcatcaaagaatcaggggaatttgccgcagcattttcatctgcttggtcaatgggattcacaacccaagatgtattctgggttcatccagatcaagttacaaaaacacctgaagcaggtgaatttttatctaaaggatcttttgtaatacggggacatcgtaattatataagaagtgcaagggtaaaattagctattggaattgttgattatgaaggtaaaagaataatggcgggaccagttgaagcacttgaagcccattgtgataattatgttgtattaaaaccgggatttgcaaaaaaagaagcgatcgctaaaaaaataataaataagattaatgaagatgatttattaacacttgatgatattataagagtattaccatcaggaaaatgcgatatcgatgaagagtatcatctaagaaaaaaatatgaaaaaaattaa

SEQ ID NO: 7344 - DNA, 273 bp, Methanobrevibacter gottschalkii
  source 1..273: mol_type = genomic DNA
atggacataactgttaaagtcacaagtattcatattgttgcaggtataattgctgctctcatttccactggtttaacattaggctggtttggatttaaaaatgatatttttgcattttttattgctgtaattatattgtatttcgttggtcaagcttgtcaaaaaatagctggtgatgaaatttccggattttcccaatggttatgggatggaattgcaccattctattttacatgggttatagcatacactattttcgccatctacctataa

SEQ ID NO: 7345 - DNA, 1821 bp, Methanobrevibacter gottschalkii
  source 1..1821: mol_type = genomic DNA
atgtcaagtatgagtagtgttgcaggattatcaaaatatattaaaaccttgccaaaaaccaaattctcaataataggaatgctaattattagttttttaattggaagcatctattatttaatagatttgaatccgactatgggcattttagaagattttattgcaggagggttgtttggtttaatcgtatttggaatttcttccataatgagtggtgcattgaatcagcagacaattagtgttgttcatggaatcaatttaaaaattaaacactcaatgtttttatctgttctttcaatgacaatacttggaataatcataattatcggatgtataatttcccaaatactaaaaatagatttatttttaaactcaatgctattcggttgtgttttaatttatggattcggcacattagttttctgggccacatcaaaagttagatttgtaactgctgcaattactggtttaattcagccattactcatattagcaatgtatacattaattacatttttattcattgacacaagttttattggacctgcaattttacaaataactttaaaagcaatagttgctgcaataatatttgttatggcaatatatgcattcattaaagttattgcatccccatttaagaagaacttaggtattggtgttttggatttattaagtttatttattgcccatatgaatgaaggatcaaattcccttgaaggattatttgaaaatatgagtgaagctattgatacaatcgtcacatttgttagttttaaaactgaaaatggaataaaagcattatttatatctccttctgttcaccctgggcctttaggggatcttgggggatcaaatatgccaacgttattggctaataaatttgaccatttcactatggttgctcatggaccatcaacacatgattttaacccaattgcagtatcagagattgataaaattgaagagtctgtaagaaacggattgaaaactgtagaatattcatcaaatgcaagtagatttataaggtataatgttgaaaaagcaaatatcggtgttcaattatttaataagggtatggttattttatcaacttttgctccggatgcagttgatgatattgaatttggtgttggattgactatgatggctcaaagcagaagccgttgcaatgttgaagattcaataattgtagattgccataactccttcactcctgaaagtggagaaatcttgcctggaaattcagaagtattccagttaattgatgttattgacacaattaatcctaaacagggaagatatgatgtaaaagtaggctgctatgaagataaccttgaatccttagataaacatgatggtgtcggagacagtggtataaaaacaatgattgttgaagtcggcaatcaaagaaccgcatatgtacttttcgatgcaaacaatatggaaattggatttagacaagaaattattgatgcagtaagtgatttggaaatagatgaaattgaagtaatgacaactgacacacatactgttaatacactttctagaggatacaatcctattggaattgcaaaaagacctgaaattatagaatatgtcagaattagtatcgaagaggcaataaaagatttagaaaaagtagaagttggaactggaactgaaaaaatagaaaatcttaacactttcggcccaaaaaattcaactgaattaatttcaacaattagttcagtagttgcagtgagtaaaattatagctccagttttattgattacagcattactaattgcatttatatggatattctttggtggtttatag

SEQ ID NO: 7346 - DNA, 522 bp, Methanobrevibacter gottschalkii
  source 1..522: mol_type = genomic DNA
atggaaagaaaattaaatgtaccaattaaagatgaaaatttaaatgaattgaaagctggagatgtagtttatttaacaggtaacattttaactgcaagagatcaagctcacaaaagaattattgaacaaggtgctccatttgatatttcaggtgcagcattgttccatgcaggacctattgtcacaaaagaagatgaaaactataaaatggtcgctattggtccaactacttctatgagaatgaatccatatcaaagtgatgttttagatatgggggctaaaattataattggtaaaggtggaatggatgatactgtaagagaagcattagttagaaataatgcaatttatgtagtggcaactggaggttgtgctgcattatatgtagatgcagtggaaaaaattgaaggtgttgactggttggacttaggaatgcctgaagctatttggaatttaaaagttaaaaatttcggtcctcttatagtggctatggatagtgaaggtaacagtttatatgattaa

SEQ ID NO: 7347 - DNA, 330 bp, Methanobrevibacter gottschalkii
  source 1..330: mol_type = genomic DNA
atggctgatattaatgaactcgcagaaaaaaaattgaaatcaagaatgacaaaaattagaaagtgtaacagagaacccgaagaaaaagcaaaattttcagaaaaattaggtgtttcttttgatgtagaattccataataaaaatcctgataaacttgcagatggtataactttcattacaacacctgaaggtaggattttattagcagaatattactatgaaattcctgaaactcaggagtatacttctttacctattgatgagaaaaaattaaaatcaatattggaattctttgatgaatataaattagaatttgatgactctgattag

SEQ ID NO: 7348 - DNA, 1155 bp, Methanobrevibacter gottschalkii
  source 1..1155: mol_type = genomic DNA
atgatagttaataactctttagatgaagttaaaaaaagagataatgctcttacaatcatcaaaaatcttgttgaaactaaaggcaggtcttctttatttgatttaacaggtctggcaggtggatttatcgcatcttcttctgaaattagtcttttagaaacatatgttggtccggctatttttgaagatgctattcaagaagttggaaaggaacatatgggtggtgaaaaagtccttgcagtaaataggacttcttcaggcatacttgctacaatattatctcttgttagtaaagattctaatgtagtgcattatcttgctgaattacctgctcatccatctattccaagaagctgtaacttggttggtgctaattactttgaaactgatgtttttgaagagttttcaataccgaataatacttcattagttgtcatcaccggttccactatggatcataaggtaattgatgaagaggagtttaaacaaattattgaaatggcacatgcaaaagatattcctgtcatggttgatgatgcatctggtgcaagacttagaacagttgtatttaatcaagctaaagcttgtgatttgggtgcggatattgcaatcacaagcactgataaattgatgcctggtccaagaggaggattgatgtccggtcgtgcagaattaattgatgaaattaaaattaaagttaatcaattcggtcttgaagctcaaccacctgcagttcttgcaatggtgaatggtattaaaaatttcaaagaagaaaatttaattaaaagtttcaaaagaaaagatgaattatataaattattatctttaaaatttagcaattttaaaaaatcacctacaggggtcatgatttatcctgaaggattaagtagtgaaattaatgttccacataagttatctgatgatgatttggcatatgtattctcgtttattctattaagagattatggaataatcacaattccaccagtttcaatgcccggcgcatcagccacaataagatttgaattatcatcaagtgatgcagttaatttagatttaaacagtctaggtaaaaaaatagtatctgcatttgaaaaattacaagatataattacaaatgaagaaaaatgtagggagattgtatttaattcttga

SEQ ID NO: 7349 - DNA, 918 bp, Methanobrevibacter gottschalkii
  source 1..918: mol_type = genomic DNA
atgaaagaagaaataatgaacttattaaaaaaagagggtaaactttctactgaaactattgatgaaataaaacaagttgacatcaatgacttcaaaaatctagttgaagaaattggaaaacaaaaaacagaacatattattgctgatgaaatttcaaaaaatctgaatacaaaatacattggaaaaaatttatatgtattcaacgaagttaaatcaacaaatactatagccaaattcctgtcaaccaataatattgcagacggtagtgttatcatctctgaaaaacaaacagctgcaagaggcagatctggaaaatcatggaaatcaccattaggtggagtatggttatccattgttttaaatcctcatgtagatcactctaaacttcctttaataacattggctacaggtgttgcagttgcaaaaactcttgaaaaagttggaattaaaaatcctgagatcaaatggccaaatgacatcctgattaatggtaaaaaaatttgcggcatattaaccgaagctgtggcaaaattcaacacaattgaaaatgtaattatcggagtgggtattgatgcaaatgtggatattgaaaaattcccagaagaattaaaaaatggcagcaccacccttgaaatagaacttggaagaaaagaaaatgaaaatcttttaattaaacttttcttagaagaattcgaaaaaattagtgaactttttgatcatgaaggatatgaagaaatcttaaaagaatggagaaaacgttcatactcaattggaaaaattgtagaagtcagagaaccattcaataaatattatgatggctatgtgttaggcattagtagagaaggggcgcttgttgttgaaaaaattgatgggacattagaaaaagtaatttctggagaatgtataatcaagaattaa

SEQ ID NO: 7350 - DNA, 1494 bp, Methanobrevibacter gottschalkii
  source 1..1494: mol_type = genomic DNA
atgtttgaaaaagtattaattgcaaatagaggagaaattgcaataagagttatgcgtgcttgtcgtgaacttgatattaaaagtgtatccatatactccgatgccgataaaacttctctttatacaaattatgcagatgaaagctacccattaggaaatccttcacctgcgaaatcttacttaaatattgaaaaaattattaatattgcacttgaatccggtgcagatgcaattcacccaggatacggatttttagctgaaaattcaaaattcggtgaagaatgtaaaaagaatggaattaaactcatcggaccaagtggagatgtaattaataaaatgggagataaaattacttccaaagcacttatgaaaaaagcaggcgttcctgtaattgaaggtacaccagaaggtattacagatattgaagaagctaaagatatagctcgtcaaattggatatcctgtaattgtaaaagcttctgcaggtggtggaggtattggtatgcgtgcagtttatgaggaagatgaacttgtacgtgcaattgaatctacacaatctgttgcatcaactaacttcggtgattcaacagtatttattgaaaaatatcttgaaaagccacgccacattgaattccaactcttggcagatgaacatggaaatgtaatccacgttggcgatcgtgaatgttctattcaaagaagacatcagaaacttttagaagaagctccatcccctattatgactgaagaattaagagatgaaatgggcggaagtgcagttaaagctgccgaatatataggttatactagtgcaggtacagttgaatttttatatgataatggacaatattacttccttgaaatgaatacacgtattcaagtagaacaccctattactgaacttgttactaacactgatttaataaagcaacaaattttaatagccaatggtgatgaattaagctatgaacaaaaagatattaaaataacaggacatgcaattgaatgtcgtattaatgctgaagatcctcttaatgactttgcaccaaatcccggtaaaattacaggttacagatctcccggaggaccaggtgtacgtttagacagtggagtatacatgaattatacaattccaacattttatgattcaatgatttcaaaattaattgcctatggaagagacaggaatgatgcaattaatagaatgaaaagagcattaagtgaatatatcattttaggcgttaaaactacaatcccattccataaagctattttaagaaatcctaactttatttcaggtgacctgaatactcactttattgatacttataaaaaaggtattgaaaaagaaatggaaaatgttattgcagaagatcatgaatatgttaacagattaaaatcaacatttatgcctggaaaaaaaatagccgcaatatctgcagctgtaggatcttatcagaatatggcaagaagccacaatatgcaaaaaaaataa

SEQ ID NO: 7351 - DNA, 828 bp, Methanobrevibacter gottschalkii
  source 1..828: mol_type = genomic DNA
atgtataaagatgagctatctatatttattccgaactcatttctttcggagtctaaagatcttaaaatccgtacttataaggtaggtattttgggcagagctttagctatttttcaagcggataatgttattatttataatgatgataatgttaaaaatgaagatggagaaatggatggagaatttattgctgaaattttgaattatatgaatactcctcaatatttgaggaaaaaagcatttcctataagatctgaattaaagcatgttggtattctcccacctctcagaactcctcatcatcctattaatagtcaaccagacgtgggtgattatagacaaggttttactgttaagagaaataagaaaggaacttatgtggatataggtatggataaacttgcattctgtaaagagcaactttctgttaaaagaatttttgactttaagattactaaaattgctaagaaagaagtaatagtcacacctgataaaccagatgacgtttactggggatataatgttatatcttctactaagagtcttaaaaatagcttaaaattaattaaacctgatcttgttgttgaaactacaagatatggggattatattaattctatttttgatgaattaaaatcaaaactcaatgaatctaaaagtattgctattttatttggtggcccatattcttcaattcaagaggatgtttctaatccaaattgggatttgtttaaattaaatactattcctggacaaggaactgaaactgttagaagtgaagaggctgttgtcgctacactttctttattcaattgtatgagattttaa

SEQ ID NO: 7352 - DNA, 1011 bp, Methanobrevibacter gottschalkii
  source 1..1011: mol_type = genomic DNA
atggtaagacatcaccagccaagaaaagggtctgttgcttttagtccaaggaaaagagcagctaaagaaacccctagagtaaaatcttggcctcaaattgatgaaccaaaattactcggcctcgcaggttataaagtcggtatgactcatgttttaatgactgattccgataaaaactctccaactaatggtatggaagttttcactccagtaactgtattggaagtacctccggtcgtagtaatgggaattagagcttatgaaaaaacttctcgtggattgaaagtaatcaccgaagttcttgcagacaatttagataaagaactttcaaggaaaatctctcttcctaaagaatacaataaatctgaagctattgcaaaaatacaaggtgcattagaaaacacagaagaaattagggtattagtacatacaaatccaaaagtaactagcgtacctaagaaaaaaccagatatatttgaatgtggtattggaggatccaatcctgaagaaaaattgaatactgcattagaattattaggtaatgaagtaaaagctagtgaaatcttcaatgaaggagaatttgttgatgctatcgcaactactaaaggaaaaggattccaaggtgtagttaaaagatggggaattagaattcaatatggtaaagctgtaagagcaggtaaaggtagacacgtaggttctatcgggccttggactcctagaagaaccatgtggactgtagctcaagcaggtcaaatgggataccataaaagaactgaattcaacaaaaggattttaaaaattgcatcagcagatgaagttgatcaaatcaatcctgatgggggatttataaaatatggacttgttaaaaatgattatgttttagttaaaggatcccttccaggaccttctaaaagattagtaattttaagacaacctattagacctaataataaagctgaggatatccctcaaattaattatattagtactaaatctaaacaaggggcataa

SEQ ID NO: 7353 - DNA, 765 bp, Methanobrevibacter gottschalkii
  source 1..765: mol_type = genomic DNA
atgaaagttaatgtttattctattaatggggaagttaaagaagaaattgaacttccagctatttttgatgaagtatacagaccagatttaatcaaaagagctgtactttctgcacaatctgcaagagtacaaccatggggtaacgatccaatggcaggtaaaagaacttctgctaaaggttggggttcaggtagaggaaccgctagagtgcctaggattaaaaatggttctaaagcagcatttgtaccaatggcagttggtggtagaaaagcacaccctactagagctgagaaaaatcatcatgaaaaaatcaacataaaagaaagaagatttgcaataagatctgctgttgcagcaactactaataaagaaattgttgaaaacagaggtcacaaagttgcagatttagaacaagttcctatcattgttgaagatgaaattgaagctgttaaaactgctaaacaaactcgtgaaattttccaaaacttaggtgtttacgacgatatactacgtgctaaagaaggaaaaagaatcagagcaggtagaggtaaaaccagaggaagaaaatacaaaaaagtaaaaggacctcttgtagttgttggtgaaaataaaggtatccatttaggtgcaagaaaccatgcaggtgtagatgttgtggttgctgaaaacttaaatgctgaattattagcaccaggtacccatgcaggaagacttactatttacactaaatcagcagttgaaaaattgggaggtttattccaataa

SEQ ID NO: 7354 - DNA, 261 bp, Methanobrevibacter gottschalkii
  source 1..261: mol_type = genomic DNA
atgaatgcatactcaattattattaaacctcatgttactgaaaaaaccatgaacttaattgatcaaaataatgtgattacttttgtggtaaatcgtgaatctaataaaagtcaaatcaaaagagcttttgaagaattatacgaagaaaaagtagctaaagttaatactcatattactactaaaggtgtaaaagtagcatacatcaaacttgttgaagaagaaatggcagaagaactcgctgtcagaataggtgtattctaa

SEQ ID NO: 7355 - DNA, 726 bp, Methanobrevibacter gottschalkii
  source 1..726: mol_type = genomic DNA
atgggaaaacgattaatacatcaaagaagaggaagaggaactcctgctcaccgtgttgcttctcatcgtttcaaagataaaattagatacagatcttacgatgcattagaaaaagaaggcagtatcaaaggtaaagttattgatatattacatgatcctgcaagaaccgctcctattgctgaagtaaaattcgaaaatggtgaaaagaaatatatcctagcacctgaaagcatccaaattaatgatgaaattgaatgcggtatttccgctcctattaaatttggtaacacattaccacttgctgaaattcctgaaggtactccaatttatgatattgaaaacacacctggtgatggcggacgttttgtaagatcttctggaacttatgcttctgtagttactcatgatgcaaatcaagctgttgttgaattaccatctggagaattaaaatacttaaatcctaattgccgtgcaagtattggtgtagttgctggtggaggtagaaaagataaaccattccttaaagctggtaaaagatggcatgcttataaagctaaaggtaagaaattcatgactgttagaggagtagcaatgaatgctgtagatcaccctcatgggggaggtaacagacaacatcctggtcgtccaactactgtttcaagacatgcaccgccaggaagaaaagttggttcaattgcagctaagagaacaggtttaaaaagatag

SEQ ID NO: 7356 - DNA, 411 bp, Methanobrevibacter gottschalkii
  source 1..411: mol_type = genomic DNA
ttggcaagaaaaatatttaaatataaaggttatactcttgaagaacttcaacaaatgtctttagaggaagtaatggaattattccctgcaagacaaagaagatctttaaaaagaggattcttaccaagacaacaaattgttttggataaaatgagaaaattaaataaagaaggaactaaagatggtcgtcctgttgttattaggacccactgtagagacatgattgttatacctgagatggttggaaccacttttggtatttatgatggtcaaaattttgttgaagttactattgcgccagaaatgattggtcattactttggtgaatacgcaccaacaagaaaaagagttcaacacggagacccaggtatgggtgctactagatcatccatgtttgtaccacttaaataa

SEQ ID NO: 7357 - DNA, 465 bp, Methanobrevibacter gottschalkii
  source 1..465: mol_type = genomic DNA
atggctaacaaatatgcttataatgaagaagttgatgaagcaaaaactgcacgtgctatggcaaaatctcttaagatttctccaaaacacagtgttgagatttgcagtgcaatcagaggaatggatgtaggtaaagctaaagattacttagaagatgttattgaaatgaaaaaagcagttcctttcaaaagacacaacaaaaaagttggtcacagaaaaggactcaaaggatgggcttctggtagataccctgtaaaagctgctgaacaaatattgaaagttttagaaaatgcagaagctaatgcagagtacaaaggtatggatactgaaaaattattcattgaacatatctcaagtcataaaggtgttgtaattccaggatatatcccaagagcattcggtagaatgactccattcaatacacctactactcatattcaaattgtattacaggaggctaactaa

SEQ ID NO: 7358 - DNA, 756 bp, Methanobrevibacter gottschalkii
  source 1..756: mol_type = genomic DNA
atgatagaaaaagattttgtcacagagggccttaaaagaactagaattgatgaatacttagaaaaagaactagaaagagctggatacggtggtatggatgttcaaattactcctttaggaaccatggttgttgtttatgcagaaagacctggtatggttattggtagagggggtaaaaatgtaagagctattaccaacactcttaaaactgattttggtttagataatcctcaaattgaagttaaagaagttgaagttcctgaacttaatcctaaaatcatggcttacaaaatatctaatatgttacaaaggggaatgcacttcagaagagttgcttactcaaccattcgtagaattatgggtgcaggagctcaaggtgttgaagtaaccatttctggtaaaattagaggttcaagatctgctgtagctaaattcgttgaaggatacattaaaaaatgtggtgaaccttcaatcagattagttgaagaaggttttgctactgctcaattaaaacctggtgttttaggtatttatgtaagaattatgcctccagaaactgtattacctgattctgttgaaattcttcctcctaaaataatcatcgaagaagatggtgaagttactgaagaagaaattgatattgaaactgaagaagtcatcgaagaagatatcattgaagaagtcgaagacctcgatgaattagaagaagttgttgaagaagaatctactgaagaagtagaggaagacgatagttaa

SEQ ID NO: 7359 - DNA, 207 bp, Methanobrevibacter gottschalkii
  source 1..207: mol_type = genomic DNA
atggcgattttaagaagtaaagaaatttgggacatggaagttgatgagattcaagataaattagttgaactcagagctgaattatccaaaaacatttctaaaagtgcagctgccgggattaatgaaaatcctgggaaaattagagaattaaaaagaactattgctcgtgttcttacaataatgaacgaaaaacaaaaggagaattaa

SEQ ID NO: 7360 - DNA, 339 bp, Methanobrevibacter gottschalkii
  source 1..339: mol_type = genomic DNA
atgtcaaaaatttgtgatgtatgtgggcttcctgaagaactttgtgtttgtgaagaaattgcacgtgaagttcaatctttgaaagtttttactgtaaggagaagatttggaaaactcatgactattatcgaaggtatagatgaacacgatatcgacataagagaactcacaaaaacccttaaagcaaaatgtgcttgtgggggaactgctaaaaatggtcaaatagaactccaaggagatcataaagttaaggtcaaaaaagttttatctgacatgggtttctcatctgatactattgagattcgtgaatctaagaaaaataataagaaaaggagataa

SEQ ID NO: 7361 - DNA, 279 bp, Methanobrevibacter gottschalkii
  source 1..279: mol_type = genomic DNA
atgattacttcaaataatttggttcatcatgaattcattggattaagaattcatgccatgaatccgaagaatccttctcttaatttaaaaggaacagttattgatgagacaaaaaataccataattattgaagaagaagataacaatgaaaaaatgattcctaaaaatggaacttttttcgtgtttgaacttccgaatggggaaaaaattaaaattgatggtaatattttgtctattcgtcctgaagatagaataaaaaaaagatttaaaaaaatataa

SEQ ID NO: 7362 - DNA, 318 bp, Methanobrevibacter gottschalkii
  source 1..318: mol_type = genomic DNA
atggttgggcttaacgttcaagaaccagaaactacatgtaatgaccctaactgccctttccatggaactttatctgtaagaggtcaagttcttgaaggaattgttgtaagtaacaaagcagaaagaactattactgttgaacgtagttactataaattcattaaaaaatacgaaagatatgaaaaaaggaaatctaaaatcaatgttcacaaaccagattgcttgaatgtgaatgttggtgattctgtaaaaattgcagaatgtagaccattaagtaaaactaaacattttgttttagttgaagttaaaggagagtaa

SEQ ID NO: 7363 - DNA, 399 bp, Methanobrevibacter gottschalkii
  source 1..399: mol_type = genomic DNA
atgaaaccattaacctcaagtgtaactaaagcattaccaattggagcaaccctccagtgtgttgataatactggtgctcgtgaaatcgaaattatttctgtaaaaggatttaaaggagtaagaagaagactcgatgttgctggtgttggagacttagttgttgcttctgttaaaaaaggaactgctgatatgagaagagaagttgtcaatgcagttgtagttagacaaaaaaaggaatataggcgtgctgatggtcttcgtgttaaatttgaagataatgctgctgttattattactccagagggtattttaaaaggatctgaaattagaggtcctgttgcaaaagaagcagctgacagatggcctagtgtaggtagtgctgctaatattttagtatag

SEQ ID NO: 7364 - DNA, 351 bp, Methanobrevibacter gottschalkii
  source 1..351: mol_type = genomic DNA
atgtcaattcaaccaagaaaacaaagaaaagctcgttatactgctcctgctcatgcacgtggtaaatatttaagtgcttctgtaagtaaagatttaagggaaaaagttggtaaaagatctttaccggttataacaggagacaaagttagagttgtccgtggagactttaaaggacatgaaggagaagttctcactgtagattatacttcttataaagttactatcgaagaagttactttatctaaacctgatggaactgtcactttccttccagtcgatccatctaacttagtaattattgatgcaaatttaaaagacgatagaagaattaaaaataaaggagataattaa

SEQ ID NO: 7365 - DNA, 729 bp, Methanobrevibacter gottschalkii
  source 1..729: mol_type = genomic DNA
atggctaaaatgggatctagaaaacatcttaaaagatacaaagcaccaaaatcttggcctattcatcctaaagaagatacttggactgtaaaaccttccgcaggttctcattccattaatgattctattccattaactttagttattagagatgttttaaaattagctgataatgcaagagaagcaaaaagaattatcaactccggtaacatttttataaatggaatcattgttaaagattataaattcccagtaggatttatggatgttcttgacattccaaaaactgaagaatcttatagagttcttttagatagaaaaggaagattacaattaaaattaattgaagatgcaagtgctaaattatctaaaattgttaacaaaaccactattaaaggtggaaaaactcaattaaaccttcatgatggtaaaaatgttatcattgatgaagatgcttactctgttggggatgttatttgtttaaaagtacctgaacaagaaattgttgaagcatatcctttacaagaaggagctactatccttgttactggtggtaaacacaccggtgaattaggtactgtatctgaaattattgaaaacaaatccactaatccaaatactattatcattgaaaatagtgctaaagatgaattcttaactttaaaagaatatgcatttgtagttggtaatgatgcaccagtaattgatttattggaggttaataaatga

SEQ ID NO: 7366 - DNA, 513 bp, Methanobrevibacter gottschalkii
  source 1..513: mol_type = genomic DNA
atgaacccaatgaatgaagtacgtattgaaaaagctactgtaagtatcggtgttggtgaagcaggtgaaaaattatctcgtgctattactcttttagaaaatatgttcgatcaaactcctgttaaaactttttccaaagttactaacccagaatggggaattaggaaaaaacaacctatcgcatgtaaattaactttacgtggagaaaaagcagataaagctattgatatggtattggaaggtattagtagaaatattaaacctactcaatttgatgcacaaggaaacctttcttttggtattaaagaacatattgatattccaggtatgagatataatccagatattggtattttcggtatgaatgtttctgttacttttgaaaaaccaggttacagaatttctagaagaaaaatccaacaaaagaaagttcctcaaaaacataggatttctaaagaagaaactatgaaatttatggaagaaaactttaaagttaattacgtaactgaataa

SEQ ID NO: 7367 - DNA, 144 bp, Methanobrevibacter gottschalkii
  source 1..144: mol_type = genomic DNA
ttgccaagaaaatacggaaaagctgctaaaaaatgtagtcgttgtggagaccactctgctatgattagtagatatggattaaacttatgcagacaatgttttagggaaattgctcctaaaattggatttaaaaaatataattag

SEQ ID NO: 7368 - DNA, 393 bp, Methanobrevibacter gottschalkii
  source 1..393: mol_type = genomic DNA
atgagtcttatggatcctcttgctgatgctttaactaatattagaaataacgaattacaagtaaatggttcttgtgttatttctccagcttcaaaattaattggacaagttttaagcacaatgcaaaaagagaattatattggtaattttgaatatgttgatgacaatagggcaggtaaattcactgttgaattaataggtaacattaacaaatgtggtgttatcaaacctcgtcatgctgttaagaaagatgaatttgaaaaatttgaaaaaagatatttgccagcaaaaaactttggtattttaatcgtcactactcctcaaggaattatgactcacaatgaggctaaagaaagaggaattggtggacgtttgttggcttacatgtattag

SEQ ID NO: 7369 - DNA, 537 bp, Methanobrevibacter gottschalkii
  source 1..537: mol_type = genomic DNA
atggtagtagctgcagctataagggaagaaattgcaatccctgaaggcgttgaagttataattgaaaacaatgaggtttctgtaaaaggacctaatggagaagactccagaaaatttacttatcctaatgtaaatattaaagaagaagaaaatgttgttattttagaaactgtatttcctaaaaagaaagataaagcaatgattggaaccacaagggcacacattaacaatatgattgtcggagtaactgatggttttacttaccacatgaaaatcgtatttgctcactttccaatgactgtaaaagttcaaaaagatactgtagtaattgacaacttcctcggggaaagacacccaagaactgctaaaattgttggttctgctaaagtagcagttaaaggtgatgaggtaacaattaccggtattaataaggaacatgttggtcaaactatggctaatttagaacaagcaactaaaattaaaggaagagatcctagagtattccaagacggaatatatttaattagcagggaataa

SEQ ID NO: 7370 - DNA, 330 bp, Methanobrevibacter gottschalkii
  source 1..330: mol_type = genomic DNA
atggctaataaaagatttaaaagacaagaatatgctcgttataaaaaacttggaatcaaatggagacgccctagaggtaaaaccagtaaaatgagaagatatgaagctggtaaacctgacatgccggcaattggttacagaacccctagagctattagggatttacacccttcaggattcaaagatgttcttgttcataatatgcaagaattagaagacttagatccagctactgaagctgctagaataagtgcttctatcgggaaaagaaaaaaagatttaatgcttgcaaaagcattagaacttggtattaaagttttaaataaataa

SEQ ID NO: 7371 - DNA, 456 bp, Methanobrevibacter gottschalkii
  source 1..456: mol_type = genomic DNA
atgaatcttacaactcaaaaaagattagctgctagtatcctcaaagtaggacttaatcgtgtttggattgatccagaaagattagaagaagtatctatggcgattactagagaaggagtaaagcagttaattaatgatggagctattaaagcaaaacctcaaaaaggtattagtagctacagatctaagaaaattaaagaacaaaaagcaaaaggaaaaagaaaaggtagaggtagtattaaaggagctaaaaaagcacgtactcctaagaaaaaagcttggatgactactatcagagctttaagaaaagatcttaaagaaatgcgtgaagatgaagtaattgatgttactacctaccgtaaattatataaaatggctaagggtggcgcattcagaagtaaatcttacatgagaaactatgcccgtgaccatgatttaattaaaggagatgagtaa

SEQ ID NO: 7372 - DNA, 582 bp, Methanobrevibacter gottschalkii
  source 1..582: mol_type = genomic DNA
atggcacatggaactaattataaagtagctttcagaagaagaagagaaggtaaaactgattatgcagcaagaatgaaattagtcagttatgacaaacctcgtttagttgttagagtttctaactctcatgctactgttcaggttattaattatgctcctgaaggagatttaactgtagcttcagctgtaagtaaacaattagcaaaatatggttatttaggacatactggtaaccttacttcattttacttaactgcttatctttgtgctaaaagagcattagctaaaggtgttgaaagtgcaattttagatattggtttaaaatctccaattaaaggatctaaagtctttgcagctcttaaaggtgctgttgatgcaggtttagaaattcctcacggtgatttcattttcccagaagatgatcgtattaatggaggacatattgctgcatatgctgaatctttagatgctgaagaagttgctaaaaaattctcaaagtattttgaaagaggtctcaatcctaaagatttacctgcaaactttgaagaaactattaaaaatattgatgaggcaggggaataa

SEQ ID NO: 7373 - DNA, 642 bp, Methanobrevibacter gottschalkii
  source 1..642: mol_type = genomic DNA
atgagttttaatattgatgaatgggaacctaaaactaaattgggtagattagttaaagatggaaccattactgatatcgatgaaatctttgaaaaaggtcttccgattatggaattagaaatagttgatgctttaattccagatttagaagaagaagtaatggatgttaacttagttcaaaggatgcataaatctggtagaaaagttaatttcagagtaattgttgctgtaggtaataaaaatggttatgtgggattaggccaaggcaaagctaaagaggttggtcctgctattagaaaagctgtagacaatgctaaatacaatcttattaaagtaagaagaggttgtggagattggggttgtgtatgtggaagagaacatactgtaccatttaaagtacaaggtaaaaccagtagtgtaagtgtaaacttaatccctgcacctgcaggagtaggtttagtaattggtgatgttggtaaaactattttaaaactcgccggtattcatgatgtatggtcccaatcatttggacaaactcaaactactgtaaacttcgctaatgcagtgtttgctgctttaaaagaattaagtaatgtaaaagcaagtcaagaagacctcaaaaaaatgggcgttaactactaa

SEQ ID NO: 7374 - DNA, 459 bp, Methanobrevibacter gottschalkii
  source 1..459: mol_type = genomic DNA
atgtttttagttattagagttagaggaactactggtgttattaaaaatattgcaaacaccttagacatgttaagacttaacagaatcagccatgcagtactcgttgaagaaaatcctagttttgaaggtatgcttcaaaaagctaaggattacatcacttggggtgaaattgatgcagaaactttatctgcactcattgctaaaagaggaagactcccaggtaatgtaaaagtcactgacgaatacgttgcagaaaatactgattacaaagatattgctgatttagctcaagctttaattgagtctaaagttaaattagctgatgttggaattaaacctgtattccgtttacaccctcctagaaaaggatataaagatattcgtttatctgtacaagaaggtggatccttaggttacaggggagaaaacattaaggaactagcaaagaaaatgctttaa

SEQ ID NO: 7375 - DNA, 438 bp, Methanobrevibacter gottschalkii
  source 1..438: mol_type = genomic DNA
atgattagaacaaaacgtaaaattaacaaacaaagaggttctagatccaacggtggaggctgtactaaaaaacgtagaggtgcaggtaacaaaggtggaaaaggaaaagcaggtatgggcaaacaacattggacctggactgtaatccatgatcctaaccactttggtaaacatggttttaaaagacctcaaaaaatgattaataaagtcaatgctgttaatttaaattatttggaagaacaagctgataaattacttgcaaatggtaaagcatctcaagatggtgacgctattgtaattgatgtaacagaattaggttacgacaaagttttaggtaaaggtaaaattactaaaactttcaaaatttcagctcctcaattttcagcatctgctgttgaaaaaattgaagaattaggaggagaagctatagaattatag

SEQ ID NO: 7376 - DNA, 1362 bp, Methanobrevibacter gottschalkii
  source 1..1362: mol_type = genomic DNA
atgtcatcactagaatttttagagccagtctttaaaattgttccagaagtaaaatctcctgttcatagagaagattttaatgaaaaacttaaatggactgctcttgttttagttttatattttatattaactcaaattccattatatgggttagctcctggagctattgattcatttgctcagttaagagcagttatggcaggaagtttcggttccatccttacattaggtattggtccgattgttactgcatctattgttttacaattattagttggttcaaatcttttggatttggatttatcttctcataaggataaatctcatttccaagctactcaaaaaattctttctatagtttttacattttttgaagcaagtgttttagtattaactggtaatttagtaccaattgatggttcttacactttaatattgatcatccaacttgttgtcggggcattagtaattatttatctggatgaagtggtttcaaaatggggattcggtagtggtattggtttattcattgctgctggtgtatgtcaagccattattgtaggtactttcagtatcttgaatggttcagatggattattagcaggtattattcctaaatttatccaacttgctaccggcggtacttttgacttctcaattttagttccattaatagcaactattattgtatttgtagttgttttatacggtgaggctatgaaagtagaaattcctatatctcatggtcaagttaaaggtcatggtagaattaggggatctgttggtaaatatccattaaaatttgtttactcaagtaatatgccagtaattttaactagtgcattgcttgtaaacgttactttatttgcaaatgttttccaaaaaattggtgttccaattctaggacatcttcaaaatggtaaagctgttgatggtattgcctggttattgtccacacctaacttaaccatgtttattacagaaccgattcatgttcttgtatatgcattatttttcattgcttgttgtatattattctcatatttatgggttgaaatcagtggattaaatgctaaaaagatttctgagcagcttcataaatccggtattcaaataccagggtttagaagtagtaaacgtcaattatataaaattttgaaaaaatatattcctgcacttaccattataagtggtgtttatgtaggtctcattgctttccttgcagatttaactggtgctttaggtggaggtactggtgtattgcttactgtaggtattcttcataaactttatgaagaaatggctcaagaacagcttatgtctgcaaatcctgttcttaggaaagttttaggaggagattaa

SEQ ID NO: 7377 - DNA, 576 bp, Methanobrevibacter gottschalkii
  source 1..576: mol_type = genomic DNA
atgcgggggattaaattgaaattagtagtattaactggtattccaggttctggaagtacaactttacttaataaagctttagaacaagttgattatgttcatttaaattatggggacataatgactgaaattgcaattaatgaaaatattgctgataatagagattctttaagaaaattaccagctgaaacacaaaaaaaaattcaagctaaagcagcaaaagagattaaacaaagatctgaaaatgataacgttattgtagatactcattgtactattaacacacctgccggatttttaccggggcttccaaattgggttttagaacaattacaaccggatctttttattttaattgaagctaatgctgatgaaatcatttacagaagattaaatgatgatactcgtcaaagagatgttcaaaaagctaaagaaattcagttacatcaagaaatgaacagagcaacttctatggcttatgcaactttaacaggtgctactgttaaaatcgtcgaaaaccatgataatcatttagattcttctgtttcaaaattagtggatgttttaaatttataa

SEQ ID NO: 7378 - DNA, 579 bp, Methanobrevibacter gottschalkii
  source 1..579: mol_type = genomic DNA
atgtttgatattatgggaatgatctatggtgttttgaatactattttcgatccgattcttgctatggatccgaatccaagtaatccggcattaactgtattgattattgcatttattgtatctttaattacaactattgctaataaatatttggttgatcaagatgcattaaatgaaaaacaagcaaaaatgaaagagttcaataaagaacttagggatgctcagaaaagaggtgatggtaaaaaaattgctgaacttcaagctagacaaactgaaatgatgaaagaaaatactgcgatgatgtcagaacaatttaaaccaatgattgttacttttgttccgattattttaatatttttctggatgagagcatctgcaattcatgatttggtaattatattgcctactactgtatattgggttactttaactcctctttggcatgtaattggcagtatgttctatggtggtcaagctactattccatatgggattggttggttattatggtatatgatttgcactttcggtatgagtcaaattttaagaaaattcctaggattcaaacaagggttctaa

SEQ ID NO: 7379 - DNA, 267 bp, Methanobrevibacter gottschalkii
  source 1..267: mol_type = genomic DNA
atgcctgctaataggtttagatcaagatcatataaaagagttcataaaaaaactcctggtggagtaaatgttttaagatataaaaagaaaaaaccatctaagcatgtttgtgctgaatgtggtgcagtattacatggtgttcctcgtggacgcccatatgaaattagaaaattatcaaaaacagctagaagacctagtcgtccatatggtgggtacttatgctcagcttgtacccgtaaacatttcaaaaaagaggctagaaaataa

SEQ ID NO: 7380 - DNA, 522 bp, Methanobrevibacter gottschalkii
  source 1..522: mol_type = genomic DNA
atgattattacaatcggcggattagctggaactggaactactacacttgctgaagttttaagtgaaaaattaaatgttccttatatttctgcaggttttatctttagggaaatggctgctgaaagagggatgagtgttttagaattcagtgaatttgctgaaggtaatgctgaaattgataaggaaattgacaagcgtcaagctgaaaaagctaaatcttcagataatttaatacttgaaggaagattatctgcattttttgttgaaaatgctgatttgaagatttgtttaatgactccatttgaggttagatctaaaagaatagctcaaagggaaggtaaatctgtagatgtggctaaaaacgaaattatcattcgtgaagaaagtgaatctttaagatacaaagaaattcataatattgatattcgtaatatggaaatttatgatttaattataaatactgatagctttaatccagaaagcatatcagaaatcattacaacaacattaaaggtgatataa

SEQ ID NO: 7381 - DNA, 222 bp, Methanobrevibacter gottschalkii
  source 1..222: mol_type = genomic DNA
atggcatcaattgaagtaggtagagtatgtgttaaaactgctggtagagaagcaggcaaaaaatgtgcgattgttgaaattattgatgaaaattttgtagaagtaattggtgaagctgtaaaaaacagaagatgtaatgtagctcacttagaaccaactgcagattctatcgatgtttctggtgatgcagaatctatcaaggcagccttagctgacttataa

SEQ ID NO: 7382 - DNA, 966 bp, Methanobrevibacter gottschalkii
  source 1..966: mol_type = genomic DNA
atgaagttcaatagaatggtcaaatctaaaagtttcacttctccggatttcgggtgtaaaccagaggaaagagagatttccgaatatatttctaaaggtgtaatcaatttagataagccatccggtccaacttcgcatgaaattgattcttgggttaaaagaattttatctttagaaaaatcaggtcatggtggaacattagatcctaaggtgactggaattttaccagttgggttaaatgatgcgacaagagcaatacaattgttattgactgctccaaaggaatatgtttgtttgttaacattgcatcaagatgttcccgaagaaagaatccgtgaagtttttgctgaattcacaggtaaaatttatcaacttcctccggttaaatccgctgttaaacgtgaattaagaacacgtaatatttactatgcaactatctatgaaatagatgggcgtgatgttttattcagaataggttgtgaggcaggaacttatgttagaacttactgccataatatcggtgaagcgttaggtgttggagcacacatggcggaacttagaagaacccaagtcggttcatttaatgaaaaaaacaatttggtaaccttgcaagatgtaactgatgcatatcatttttatattgaagatggtgatgaatcgtttttacgtcaagcaatcatgccgatggagatggctgctgattatttgccgaaagtcattgttaaagattctgctgttgatgcaatttgccatggtgcagatttagcttgtggtggtattgcagaacttacagataatatccaaaagaatgatattgtagcaattttaacacttaaaggtgagttagttggtgctggttcttcattattaacttcaggtgaaattttagaatctgattcaggttttgctgttaatgtttctaaagtattaatgaaacccggtacttatccgagattctggaaataa

SEQ ID NO: 7383 - DNA, 1767 bp, Methanobrevibacter gottschalkii
  source 1..1767: mol_type = genomic DNA
atgaatgttaaaaacacatttgttataatcttactttttttaatattattttcaacagttacatttgtatctgcagatgatgatagaagctattcaatagatcaagtgataacagatttaacagttaaaaataatggactactacatgtagaagaacagtatgattattcatttgatggagcttttaatggagtttatagggacatacctctaaaatccggagaaagcattgagaatattaaaattcatgttgatggtgcatatgccacatatgaagaaagtgatgatgatggatataaacatgtaaaaatttatttatattccgatgcagcccatactaaaggtataaaagattgtaatgtaaaagtctacattagctacgatttgattggtgcagtaactatttttaatgatgttagtggacttcaatacaaactttggggtgaagaatgggatgttggagctaacaatttaaaagcaacagtacatttacctggaaataatggaaatgaatattatttaaccccctccgagtacaatgatacttcatccttaaaaggaaacacaataactgcagaaagttcatacattccgaaaggcgaatattatgagttacttgttttaatgccagttgatgattttaataaatccccaaatgcaaaacatgtaaatcaaaatggtcatgacatgattatgaaaaacttaaaaaacaccattaacgaacgtgacttttggaatacaacttatttagttttaggattattaactcttataagccccataagtgctataatagtatacttgaaatatggtagagaaccagaagttaattatgatggaatttacgaaagagatttgcccacaaatgatcctccggaaatagttaatgcactgattgaaaataaaataagcattggacatccgaatattaaaggatttgaagcttcaataatgaatcttattgatagaaaattcattacattatcctcacaagaaaatattgaaagcaataccaaagacttaatgttaacattgaataacaaggcaggattgagtgcaagtgaacaaattgtatttgacactcttaaccacttttcaacaaataatattttaaatctttcaacacttaatggacaattatcttcagaaacaaatggtaaatggtttatggaaaaaattagagaatgggaatcatcagttgaaaatgatatggatgtatcaagattttttgatgacagaggttcttcaataatgaatgtaatcggattattaggaatacctttcgctatagcattaattgttcttggatttataacaaatctaaataacggattatatagtatagctggaggaatatttttaataatattttcaatagtaatcaccatgtcagatgatgatatctttggaagatggacagaagaaggtagagtatactatctcaaatggaaaaatttgaagaattttttagaagacaacagtttaattaaagaacatcctccagaatcaataattatttggaagaagtacctaatttatggtgctgctctcggagtagcagacaaagtttacgaatcaatgaaactgcaagtgccaaacatttcagattatgataatgatggattattcatgtatcattattacgggggatatggaatgatgaatatggcattttcaactggtgaaatttcagcaaacccatctgactctagtggattcggtggatctggaggaggatctggaggaggaggtggaggagcgttttag

SEQ ID NO: 7384 - DNA, 558 bp, Methanobrevibacter gottschalkii
  source 1..558: mol_type = genomic DNA
atggattttatactaactatagtaattataatagtagtcttatttattatagttacattaatacatatgtacaataatcttgttggacttagaaatcgtgttaagaacagttatgcacaaattgatgttcagcttaaaagaagaaatgatttaataccgaatcttgttgaaacagtaaaaggttatgcttctcatgagaaaggagttcttgaagaagtaacaaaagccagaaatagtgttatgaatgcttcatccattaaagaaacaagtgttgcagataaccaattgactggtgcattaaaatcacttttcgctgttgctgaaaattaccctgacttaaaagctaatagtaatttccaacaattacaaaacgagttaagtgaaactgaagataaaattgcttattcaagacagttctataatgatgttgttttaaaatataataatgcatgccaacagtttccaagcagcatacttgcaagaatatttggttataaaatagaagactattttgaagctccggaagcagaaaggacagttcctaaagtagaattttaa

SEQ ID NO: 7385 - DNA, 450 bp, Methanobrevibacter gottschalkii
  source 1..450: mol_type = genomic DNA
atggaagacgattttaagcatttagtgcgtatttcaagaaaggacgtaaatggtaataaaaccattgaacaagctttaactgaaattaaaggtgtaggaatctctttatctaaaactatgtgccgtactttggacttagatttagatgctaaaattggatacatcgctgatgaagatgttttaagaattgaagaaattttagaaaaccctcaaaaatttgacattcctagatggatgttgaaccgtagggaagactatgaaactggtgatgacattcacttaattgaatctgatcttgatatgactttaagagatgatttaaatagaatgaaaaagaccagaagttacaaaggtagaagacatgaagttggtttacctgttagaggtcaaagaaccaagtctactttcagaaaaagttcttcagttggtgtaaaacgttcacgtggatag

SEQ ID NO: 7386 - DNA, 540 bp, Methanobrevibacter gottschalkii
  source 1..540: mol_type = genomic DNA
atgggacaacctagaaaatcaaggaaaaagtataatacaccaccacatccttggaatgcggaaagaattaaaaatgaaaataaattaatgactaaatacggcttaaaaaataaaaaagaaatttggaaagccgatactttagtcagaagatacagtagggaagcaagatatttgcttggtttttccactgatcagatgcaagaagaaaaattagaattattaggacacttagctagaactggtattttgcctgaaggtgctgctcttgaagaaatcttagatttaaatgtagaagatatcttaagaagaagattacaaactattgtatacaataaaggtttagctcgtactcctaaagaagcaagaatgtttgttgtacatggacacatagctttaaatggtaaaaaaatcaactcaccaagttatgttgttttaaaaggtcaagaagatgatattggattctaccgttcttcacctgtagctaaacaaattgaagagtacaacaatagtaaatctgataaagttaatactgaggaatag

SEQ ID NO: 7387 - DNA, 393 bp, Methanobrevibacter gottschalkii
  source 1..393: mol_type = genomic DNA
atggcaaaagatgaaaaatggggtatagctaatatttactcatcattcaataacactattattactgtaacagacattactggtgctgaaactatttcccaatggtctggtggaaaagttgtacgtgcagacagacaacaagcttcaccttttgcggctatggctgctgcaactagaattgcggatgatgcaaaagaaaaaggattcgttggtttacatattaaagtaagagctcctggtggaaatggacctagaagtccaggtcctggtgcacaagctactattcgtgctttagcaagagccggaattaaaataggaaaaatagaagatattactccaattcctcacgatggtactggaagacctggtggtaaaagaggaagaagagtttag

SEQ ID NO: 7388 - DNA, 819 bp, Methanobrevibacter gottschalkii
  source 1..819: mol_type = genomic DNA
atggaagggtttaatatggagatagaagttaaaagtcaaaaggatgatgaaatagtattcattgttcgtgatgcagaagtaccttttgttaatgcaattagaagatgtgctatggttaatgtaccaaaaatagctatcgaagatgtaaatattattagaaatgattctgctatgtttaatgaggtgcttgctcatagacttggtttaactcctttagtttctgatcttgatgctcttgaagggttatctttaccggaagatgatgattgggaagagtatactaatggaatcatgttcactttaaaggaagaaggacctaaagtagtttattcaaaggatttaatatcttcagactcaaaaattaaaccagtatacgataccattcctttagtaaaacttaaagacaatgaaaaactcaatatagaatctgttgcaaaagttggatatggaaaggatcatgcaaaatggatgccaaccactgtctgtgcttataaacaatatcctgaaatcacttttaatgatgatttagaaattgattatgattgtgcatctgcatgtcctagaggtgttttaaaatctgataagagatctaaaaagattaaaattttagacattgaaaactgttctatgtgtaaaagttgtgtaagagcttcaactaatggctacattaatgtagggtatcgtgaaaatgatttcatatttagaatagaaactgatggatcaatgcctcctaaagaagttttattaaaagcttgtgaagtattaggtgaaaaagcagataagtttatcagatttagtgaagaaggaggaagtaaataa

SEQ ID NO: 7389 - DNA, 366 bp, Methanobrevibacter gottschalkii
  source 1..366: mol_type = genomic DNA
atggctaaaaagattataaaaactaatcctaaccttattgaacttattaataaactttatgaacaatcaagaaatgaaaatgcagctatttggaaagatgttgcaaaaagacttgaaaggtctaatagaagaaccgctgaagtaaatttgtctgatattgcaagacatgctgaagctggtgaaactattttagtaccgggtaaagttttatcaaatggtaatttaacagaaaaagtagatgttgtagcattaaaattctcagctaaagcgcaagaaaaaattgaaagtgctggtggagaatgcattgcaattgatgaaataatcgaatctaatcctaaaggatcaaacattaggattatggaatag

SEQ ID NO: 7390 - DNA, 423 bp, Methanobrevibacter gottschalkii
  source 1..423: mol_type = genomic DNA
atgattattgacggagaaggatgcgttttaggaagattagctagtgtaactagtaaaaatcttttagaaggcgaagaagtaattattattaatgctgaaaaaattatgttaactggtaataaggattgggcttatgctaaatacaaacaaagagttgacagggcaagtatttctaaccctcgtgatttaggtcctaaatatcctagaagaccggacgatatatttagaagaactgtaagaggtatgttgcctttcaaaaaatctaaaggtaaaactgcattcaaaggattaaaagcgtttgttggcgtacctgctgaatatgctgatgtagaactcactgcagttcctgaagcagaatataaaaatattaaaaaaggtatcgaattaggagaaatctccaaacttttaggagctaccttttag

SEQ ID NO: 7391 - DNA, 402 bp, Methanobrevibacter gottschalkii
  source 1..402: mol_type = genomic DNA
atggttaaagttattcatactagcggaaaacgtaaaacagctatcgcaagaggtactgttcgtgaaggaactggtaaagttagaattaatagaattcctttagaactttattctccagagcttgctaacttaaaattacaagaaccattaaccttagctggtgatttagctaatgaagtggatattaatatccatgttattggtggaggagtaatgggtcaagctgaagctgcacgtatggttattgcaaaagggcttgttcaatggtcacaagatatggatttaaaagaaaaattcactcaatatgacaggactatgttagttggtgacccaagacgttctgaacctaaaaaatatggtggtcctggtgcaagagctcgtaaacaaaaaagttacagataa

SEQ ID NO: 7392 - DNA, 171 bp, Methanobrevibacter gottschalkii
  source 1..171: mol_type = genomic DNA
atgattcctattagatgtttaagttgtggaaaaccagtatcagcagtttttgatgaatataataaaagagttgctgctggagaaaaatctaaagatgttttagatgacttaggtttaactagatattgttgtagaagaatgctaatttctcatgtgcaaacatgggaataa

SEQ ID NO: 7393 - DNA, 183 bp, Methanobrevibacter gottschalkii
  source 1..183: mol_type = genomic DNA
atggatgttgaaaaaaaattaacaaggtttgaaagagctagacttctcggagctagagcaattcaaatatcaatgggtgctaaacctttagttgaaattaaagattctttggatcctattgatatagcttacgaagaacttaaagctggagttttaccattagatgttattagatatgaataa

SEQ ID NO: 7394 - DNA, 1245 bp, Methanobrevibacter gottschalkii
  source 1..1245: mol_type = genomic DNA
ttggttagtataatagaagacgtccaagttcgaaagattttggatagcagaggaaaccctactatagaagtggatgtaattacttggaatagtaagggtagagctgctgcacctagcggagcgagtactggctcatatgaagtagtaccatatcctaaaggtgggattgatgaagttgttagtgaaatggaagatttaattgcttctgaacttattggaatggatgctgaagatttagtaactattgatgaagtattaaaagaagttgatggaactgataatttatctgctattggtggtaatactactgttgctatttcaatggcagtggctaaagctgcagctgcatcttataatatgccattatataaatacattggtggaaatttagtaaatgaattacctttccctttaggaaacatgatgaatggtggagcacatgcgggtattaatgcaccggatattcaggaatttttagttgttcctgttggagctactaatatttctgatgcagtttttgcaaatgcttctgttcataaaagattaaaggagttaattcaatctaaagattcaaactttactggcggtaaaggtgatgaaggtggatgggtgcctaacatttcaaatgatgctgctttagaaattcaagctcgtgcttgtgaagaagtaggggatgaattaggtattgaaattagaccttcacttgatattgctgcatccgaattatggaatgcagctgagcaaaaatatatttatgctcaagatggtattaaaagagataccggagatcaaattgatttcgtaaaagatattattgatacttacaatatgttttatgtggaagatccatttgatgaatctgactttggaggattttctcaattgactgcgaaagttggagataaatgccttatctgtggtgatgatttatttgtgacaaataaagaattattggctaaaggtattgaaatgaaagctgcaaatgctatcattattaaaccaaatcaaattggttccttatctgaaacttatgctactgttaaattagctaaagagaataatattgtccctgttgtatcacataggtctggtgaaactactgatgaaactatcgctcatttggcggttggtttttcatcgccattgattaaaaccggagctattggtggggaaagaatagctaaattaaatgaactaattcgtattgaagaggaacttccaaatccaactatgaacaaattttaa

SEQ ID NO: 7395 - DNA, 195 bp, Methanobrevibacter gottschalkii
  source 1..195: mol_type = genomic DNA
atggctaaagtaactattgattatgataaatgtgatggtgcagactgtgcagaatgttctgacgtctgtcctatggaagtattagttcttaaaggagacaaaattgaaattgttgatccttcagaatgtagttattgtgaagtatgtatggatgtatgtccaaatgattgtattaaaattgaagatgatttttaa

SEQ ID NO: 7396 - DNA, 603 bp, Methanobrevibacter gottschalkii
  source 1..603: mol_type = genomic DNA
atggcaaatgatgaacttttaatagatttagataattacttagcagctggtttacatattggtactcaacaaaaaaccagtgatatggaaaaatatatattcagagtaagatctgatggtttatatgtattggatattcaaaaaactgatgaaagaatcagacaaattgcaaaacttttagcaaaatatgacccagaagatattttagtagttgctaccagacaatatggtcaagctcctgttaagaaattcggtgaaatcaccggtgcaaaaactattcctggcagattcattccaggtactttaactaatccaaattatgctaaatttattgaaccaaaagttattgttgtaactgacccaagatctgatgcacaagcagttttagaatccaaacaaaatggaattcttgttgttgcattatgtgatactgaaaatttacttagtttcgttgatattgcagtacctgttaacaacaaaggtagaaaagctattgctttagtttactggttacttgcaagacaaattttaagagaaagaggagacattcctgaagacggtgacttagatattgattccactgactttgaacttaaattttaa

SEQ ID NO: 7397 - DNA, 849 bp, Methanobrevibacter gottschalkii
  source 1..849: mol_type = genomic DNA
atgttaagacaacctgctgtagccggatcattttatccaaatgatgctgaaaatctaaaaaaaatcattgagagttgttttttagataaatcgggtgttggtttcatacctgaattaaataagtttaatggtaaagattatcctatcaatgttatggttccacatgcaggttatcaatattctggtgcaatagcttctcatagctattgtgacatcgttagaaatggttttcctgaagtttttattattataagtccaaatcacactggattaggtagtgaaatttctgtttttaatgaaggtgaatggataacacctttaggggatgtagaagttgataatgaatttgcaaatgagataatttctatttctgatattgcaagttcagattttcatgcccatgtccatgaacacagtattgaagttcaactacctttccttcaatatttttcttctgattttaaaattgttccaattactatgggaacacaaacatttgcaacttcaaatgatttggctaatgccatttttgaagctggaaataagttaagtaaatcttattgtgttattgcaagcactgacttatctcactttaacaatcaagagaaagcaaataaagttgatggctttgttttagaagatattgaagagatgaatgaattcaaattgtttgaagaagttgttcaatataatattactatgtgtggttatggtcctgtaatgaccaatatttcactttctaaaagatgtgggaaaaattcttgtgaaatattagcatatcaaactagtggggatgtcactggtgattttagctctgttgtgggatatgcttcaggagtttttaaataa

SEQ ID NO: 7398 - DNA, 963 bp, Methanobrevibacter gottschalkii
  source 1..963: mol_type = genomic DNA
atgattgcaaaagcttctgctccggcaaaaactatattgtttggtgaacattcagttgtttacgatgaacctgcaattgcaggagcggttaataaaagggcttatattacaattaaagagtccaaatctgataaatctatttttagagctccagatataggttttgaagctgaattactttcaaaacagaaaaaatacattttaacaaagggaaaacctggtattattagatatattttagaatctctttacagagcacatgaccactctccaatcgacataacattatcatcaaatgtccctattggttctgggcttggttcatcagcagcagttactgtagctacacttgctgcattatataggtatcataatattcggtttaataagaaatctttagcacatgatgcccacatggtagaacaagctgttcagggggtagccagtcctcttgacacattggtttctacttatgggggtcttgtatatttgtctaggaataaaaaagttgaacattttaaagtaaactttaatgctccattggttgtaggttttaccactaaacatggaaatactggaaaaatggttaaagatgttaaaaatttaaaaaatagaaatccaaaaattatcaatcctgtgattactgcaatgggtaatttaactaattatgctaaacaagctattttgaaaaaagattataataaagttggagaattaatgaatatcaatcatggatttttggatgttattggtgtaaatacattagaattatctcgtatggtatataatgcaagagaagctggagctatcggttctaaaactaccggcgccggtggcggaggaagtattattgcactttgtccgggaaaagttgatgaagttgcaaatgctattgctcgtgatgatagtattttaaaagttagatttactagaagaggtgtctcttcaagggtttataagtga

SEQ ID NO: 7399 - DNA, 801 bp, Methanobrevibacter gottschalkii
  source 1..801: mol_type = genomic DNA
atgattattttaaaaattggtggaagtagtttaactaataaagattcctctaaaagtgaagttaattctgatagtcttaaaagaattgctttagaaattaaatcttctttagataattctgcaaaagaattaattgttgttcatggtgcgggatcatttggacatccacctgctaaaaaatataaaatcggcgaggtatttgataaatcagaatatcctcaaaaaagaattggattttgtgaaactcagaatgctgttaaaaaattaaatatgtatgtatgtgaagcattcattgaacaaggtttacctgttgttgcaattcctgcttcaagtttcatgacagctactaataaaagaataactcatggggatttagattcttttaataaatatttggaaaaaggttttattcctgtaatttatggtgatgttgttctagatgatgaattggaattttgtgttatttctggtgatcaattaattcaataccttgcaatgaatttaaatcctaatcaggtaattctcggaacagatgttgatggagtttataataaaaacccaaaaactcatgatgatgctatattttttgataaattatcttcacttgaagagttagatgcatttgaaggaactacaaatgtagatgtcactggtggaatgattgggaaaattaaagaattattatatttagcagatttgggaattgaatctaaaataataaatgcggaagttgaagacaatatttttaaagtattggaaaacgaagatgtaaaaggaactgtgatttcaagggggaagtaa

SEQ ID NO: 7400 - DNA, 1047 bp, Methanobrevibacter gottschalkii
  source 1..1047: mol_type = genomic DNA
atgatttcagatagaaaattagagcatttattaatttgtgaaaattatgatgtttcatttaaaaataaaactaatggttttgaagatattgaattgatccataatgttttacctgaaattgacaaacaggaaattgatttgtccacttctacttttggtaaaaaattagattcacctctttttattacagccattactggaggacatcctgctgcaaaagaaatcaataaacaattagctattgctgctgaaaataataatattgcattaggtgttggatctcaaagagcagcatgtgaacatccggaacttgaggatacttatactgttgttcgtgaaaatgctcctaattgtttacttgttgggaatataggtgcacctcaattaaatttagctgaaaaagcagttgaaatattggatgcagatattctagcaattcatttaaatcctcttcaagaatcaatacagcctgaaggtgatttggatgcaaggggatatcttgatttaatcagtcaaattacaaattcagtcaacattccaattattgcaaaagaaactggctgcggtatatcagcagaatctgcagaagcactagtcgaggcaggtgttgattttattgatattgaaggtgctggtggaactagctgggcggctgttgaaacataccgggctgaagatagatatttaggagaaatattttgggattggggaattccaactgcggttagtacagttgaagttactaatgctattgatgttccagtaatttcatctggaggaattcgcagtggtcttgaagcggccaaagcaattgctcttggagcagatgctgttggtatggctttacctttcttaaaaaattctacctcacaggaacaattaaacaaatttatttcaagattcaatgagtcattaagaattgcaatgtttctagtgggagctagtaatattgatgaattaaaagaatctaagttagttattcgtggaaaaacaagggagtggcttaatgaaagaggtattaacacaaaaaattattcaaggagataa

SEQ ID NO: 7401 - DNA, 1344 bp, Methanobrevibacter gottschalkii
  source 1..1344: mol_type = genomic DNA
atgagcgttgaagtaatcgctattggaggataccaagaagttgggaagaacatgactgctgtcaaagttggtgaagatgtcatcatttttgatatgggtatccatttggacagaattagtatgcatgaagatacagatatcgatagaatgcatagtttagatttaatcgaaagaggagttattcctgatgatacattaatgaaagatgtagatggaaaagtcaaaggaataatcttttcacatggtcatttagaccacattggtgctgttgctaaattagcacatagatatgatgcaccattaattggaactccgtatactgctgctttaattgaaaaacaaattaaaggtgaacgcaaattcaaagtaaataatccaattagacctttaaatgcaggtagtaaattaaaactttcaaaagatattactttagaatttgtccaatcaactcatagtattccacaagcagtatttccggttttacacactccggaaggaattattgtttatgctttagattttaaatttgacaatcatcaaaaagtatctcctcctcctgattataagagattaagagaattaggtagggaaggagtacttgctttaatagtggaaacaactaattctactaattataatgaagttaaaactcattccgagcgtattgctcgaaatatattggaagatgtaatgagaggacctcttcaagagaaaactggtatgatagtcactacattttcatctcatgttgaacgtgtacaagctattgcagatattgctaaaaaaagtcacagagaaatatttttcctaggaagatcaatggaaaggttctgtggtattgcacaaaagttaggtattttaaaattacctaagaatgctagtatttatggatctcctaaagcaataaatagagctttattgagggccgatgaggatagggctaattatttgcttgtaactacaggtcaccaaggtgaacctgatgcattacttccaagaatagctaatggtagaacaccattcaatattaaaaaaggagataatgtaattatttcagcacctattattccaaatccaactaatgctgcaaataggcatatcatggaaagaagattaaaattaaaaggtgcaagaatttatcctaatgctcatgtttctgggcatgctggaagagaagatcacagagaatttttacgcatgttaaaacctcagcatatcataccagcacatggagacttaacaatgctttcagcttatgcagaacttgcagaagaagaaggatatagaattggatatgatattcacatcttgagaaatgctcaagcacaagtttttaaaagttaa

SEQ ID NO: 7402 - DNA, 981 bp, Methanobrevibacter gottschalkii
  source 1..981: mol_type = genomic DNA
atgagtgatgtaaaaaaaatacttggaaattattccactgatattacaagaacaattgaagaagaattatcagcaattactcctaataatcttgcagaagcatcagtttaccttacaagagctggtggtaaaatgcttaggcctgctttaacattaattgctgctgaggctgttggtggtaatcgtgaatctgcattaaaatctgcagccgcaattgaattgatccatacattttcacttattcatgatgatattatggatcaggatgatatgaggagaggaatgccttctgttcataaagtttggggtgatgatgtagcaattcttgcaggagatacattattttcaaaagcttttgaaattatcattggaaataaaggaactacctctgatcagaataacaaatctttagctactgttgctgatgcttgtgtaaaaatttgtgaaggtcaggcattagatatgggctttgaagaaagatttgatgtaacagaagatgaatacatggaaatgattttcaaaaaaactggtgcattaattgcagcggctactaaagttggagctattatgggtggggcatcagaaggagtcattgatgctatgtatgaatatggtcgtttgattggtcttgctttccagattcaggatgattatcttgatttagtatctgatgaagaaacattaggcaaaccaattggttctgatattggtaaaggtaaaatgaccgttattgcaattaaaggtttggctagtgatgatactggcagattgcttgaaatcttaaaagatgatgaaaactcaaatgaagatataactgaagcaatcgatattttaacaaaatgcggcgctattgaatatgctcgtaatttggcattagaatctattaagcaagcaaaagaagtacttgaaatattagatgattcttcatctaaacaaatgcttgtagatattgcagattttgtacttgagagaagtgcataa

SEQ ID NO: 7403 - DNA, 1014 bp, Methanobrevibacter gottschalkii
  source 1..1014: mol_type = genomic DNA
atgttggagattaagcatacattatgcccttcctgtagtgttggttgtgggattaatgtagttttaaaagaggggaatgttgtcgggacttttccctataaaagacatccggttaattctggaaaaaattgtttaaatgggagaaattcaattgaatgttatttaaacaaatttgaagatattaatgtggatgatgttgttgcagatgttttaaaagagttgaaatctgctgatgcatctagtgttactgttgtttgttcaggtaataatgatgttgaggaaattaaggctattaaagaatttgcagaatctaataattttaatttggcattttatgctgataatttaaaaaattttgatgatgttgcaacatatgatgatgttgctgatgcaagcaaaatatttgttattggtgatcttttgtttgaaaatcctttgattggtaggaggattgttcatgcaaagcagaatggtgctaaaatttatgcattggggaagactgaaaaatctgttacattcaatattgcagatgaaactttcaacacttctgtagttgattttttggatgctaatgattctaatattgatgaatcctctgtaattgtatttaattatgttgattcagccgaggatttagataaaattgaatctattggatgtaaatcttttcctgttttcagcaaatccaattctaaaggtgcattggatattgttgaagttaaatctttagatgaaatgatggaattgctggaaaatactaaagttttattggtattcaatgatgatattgctgatgaaatagattttgattttactaaaatctctaaaattataagtttcgctccatgtgaaaataacacaacaaaaatctcagatattgttgtacctattaaaacatggcttgaaaaagacggatcatttgtaaatgcaatgggtgatactcaaactttcaccactgtcatagattcagatgtattaagtgaaatcgaagtaattgaaaaactaaatagttaa

SEQ ID NO: 7404 - DNA, 1143 bp, Methanobrevibacter gottschalkii
  source 1..1143: mol_type = genomic DNA
atgagttatgttttagcaaaatctaaagatgatgatattcttagtgcaggtgaatgtggcggagcggtaactagtattcttaaatatttgcttgatgaaaaacttgttgatggtgttttgacattaaggccatttgatgatatttatgacgctatgccagtatatgtgactgattctgatgatttgataagtactgcggggtcttatcactgtgctcctacaatgattggggatattattgaaagattcattgatgatgatactaaaattgcagtcactgttaaaccttgtgacatgagggctatgaaagagcttataaaaaggcacagaattaatgatgataatgtttatttcattggtttgaattgtggtggaactgtttctcctgttagtggtagaaaaatgattgatttattctatgaagcagatcctaatgatgttgtaagtgaagagatagataaaggtaaattcattatcgagcttgcagatggtggggaagaagcagtaaaaattcatgatcttgaagcagaaggatatgggcgccgtaacaattgtcaaagatgtgatgtaaaaattccaagaatggcggatattgcttgtggaaactggggtgctgaagatggctggacattcattgaaatcaatgatgaaaaaggtcaaaagttagttgatggtgctaaaaaagtgggcattcttgaaactaaaactcctaatgatgcggcggtggaaggaagaagcaaagttgaaaacatcatgattaaaatggcaaaaaagaaccaagatgcaacttacccattggttagtgaaagggatgaatggagccgctgcatcggttgctatgcttgccgtgatatttgccctgtctgctggtgttttgaaaactgcgaattaaacaaatcttacttcaaggatgaggcaaacgcattttcaagtcctattgcttttcagggtgtaagactgtctcatatgagtttcagttgttgtgattgcggtcaatgtgaagatgtatgtccaatggatattcctgtttcactaatttttgacaaattacagaaaaaatactatggaagaactggttatgtagctggagtttcagaggatatcaaacctcctttatacagtccagaaaaaacagaattataa

SEQ ID NO: 7405 - DNA, 402 bp, Methanobrevibacter gottschalkii
  source 1..402: mol_type = genomic DNA
atgtctgaagatttaaaaattgtaggtttattgtgtaattggtgttgttatggtggtgcggatactgcaggaactgcacgtatgcaatatccatcaaatattagaattattcgtgtaatgtgttctgggagaattaatccgtcaatggtctttaaagcatttcaggaaggtgctgacggcgtatttgtaggcgggtgtcatattggtgactgccactatgatgcaggtaactacaaatggtctagaagatctaagattgttgaagatattcttgaggaatttggtattgaaaaggaaagattccgtcatgaatggatttcagcatctgaaggtgaaaaattccaaacaacaatggaagaattccacaaaacattaaccaaattaggaccattagaattataa

SEQ ID NO: 7406 - DNA, 366 bp, Methanobrevibacter gottschalkii
  source 1..366: mol_type = genomic DNA
atggaaatttatatgcaaaaaattggattgattagacaaagtttgaaccctaaaaattcaagtttggatttggatattgattggaatattgagtatgttcatagaaatcaaaatgaaataaattttgacatcaatttaagatcaattgaaaactttaatttaaactttaaaattgaaggggttattgtattagatttatttgaaatttttattcaagaagatgtttctcaaataatttttcatcgtgcatgtaatgttcttatggatatgatatctttaacccgtcaatcaagtcatattttatcaaatgaagataaatatccggatataggcagtgaacatattccaaaaactctctataactaa

SEQ ID NO: 7407 - DNA, 1017 bp, Methanobrevibacter gottschalkii
  source 1..1017: mol_type = genomic DNA
atgttggagattaagcatacattatgcccttcctgtagtgttggttgtgggattaatgtagttttaaaagatggagatattgtcgggacttttccctataaaagacatccggttaattctggaaaaaattgtttaaatgggagaaattcaattgaatgttatttaaacaaatttgaagatattaatgtggatgatgttgttgcagatgttttaaaagagttgaaatctgctgatgcatctagtgttactgttgtttgttcaggtaataatgatgttgaggaaattaaggctattaaagaatttgcagaatctaataattttaatttggcattttatgctgataatttaaaaaattttgatgatgttgcaacatatgatgatgttgccggtgcaagcaaaatatttgttattggtgatcttttgtttgaaaatcctttgattggtaggaggattgttcatgcaaagcagaatggtgctaaaatttatgcattggggaagagtgaaaaatctgttacattcaatattgcagatgaaactttcaacacttctgttgaggaatttttagataaaaatgcaaatgagtttgatgattcctcagtaattgtatttaattatgttgattcagttgatgatttagataaaattaatgaacttaattgcaaaaaattacctgttttcagcaaatccaattctaaaggtacattggatattgttgaagttaaatctttagatgaaatgatggaattgctggaaaatactaaagttttattggtattcaatgatgatattgctgatgaaatagattttgattttactaaaatctctaaaattataagtttcgctccatgtgaaaataacacaacaaaaatctcagatattattgtgcctattaaaacatggcttgaaaaagacggatcatttgtaaatgcaatgggtacttgtcaggagtttactgctgttgtggaatcagatgtattaagtgaaatcgaagtaattgaaaaattaaatggaaactag

SEQ ID NO: 7408 - DNA, 1143 bp, Methanobrevibacter gottschalkii
  source 1..1143: mol_type = genomic DNA
atgagttatgttttagcaaaatctaaagatgatgatattcttagtgcaggtgaatgtggcggagcgataactagtattcttaaatatttgcttgatgaaaaacttgttgatggaattttcgcattaaggccatttgatgatatttatgacgctatgccagtatttataacagattctgaagatttgataagtactgcggggtcttatcactgtgctcctacaatgattggggatattattgaaagattcattgatgatgatactaaaattgcagtcactgttaaaccttgtgacatgagagcaatgcatgaacttgtaattaggcacagaattaatgatgataatgtttatttcattggtttgaattgtggtggaactgtttctcctgttagtggtagaaaaatgattgatttattctatgaagcagatcctaatgatgttgtaagtgaagagatagataaaggtaaattcattatcgagcttgcagatggtggggaagaagcagtaaaaattcatgatcttgaagcagaaggatatgggcgccgaaataattgtcaaagatgtgatgtaaaaattccaagaatggcggatattgcttgtggaaactggggtgctgaagatggctggacattcattgaaatcaacagtgaaaaaggtcaaaagttagttgatggtgctaaaaaagtgggcattcttgaaactaaaactcctaatgatgcggcggtggaaggaagaagcaaagttgaaaacatcatgattaaaatggcaaaaaagaaccaagatgcaacttacccattggttagtgaaatggatgaatggagccgctgcatcggttgctatgcttgccgtgatatttgccctgtctgctggtgtttcgaaaactgcgaattaaacaaatcttacttcaaagatggaacaaatatgcctccgagtcctattgcttttcagggtgtaagactgtctcatatgagtttcagttgttgtgattgcggtcaatgtgaagatgtatgtccaatggatattcctgtttcactaatttttgacaaattacagaaaaaatactatgaacggactggttatgtagctggagtttcagaggatatcaaacctcctttatacagtccagaaaaaacagaattataa

SEQ ID NO: 7409 - DNA, 405 bp, Methanobrevibacter gottschalkii
  source 1..405: mol_type = genomic DNA
atgtctgaagatttaaaaattgtaggtttattgtgtaattggtgttgttatggtggtgcggatactgcaggaactgcacgtatgcaatatcctccgaatattagaattattcgtgtaatgtgttctggaaggattaatccgtcaatggtctttaaagcatttcaggaaggtgctgacggcgtatttgtaggcgggtgtcatattggtgactgccactatgatgcaggtaactacaaatggtctagaagatctaagattgttgaagatattcttgaggagttcggtattgaaaaggaaagattccgtcatgaatggatttcagcatctgaaggtgaaaaattccaaacaacaatggaagaattccacaaaacattaaccaaattaggaccattagaattaaaataa

SEQ ID NO: 7410 - DNA, 1656 bp, Methanobrevibacter gottschalkii
  source 1..1656: mol_type = genomic DNA
atgggtttggagaataaaaaatttttaagcgcactgaataaaaaatttaaaggcgaagatcaggaaaatgaccacaccagtttctattgctttgacggatggaaacaatctgctaggaaaagagaatttaatgaagctgctgaaaaattggctaaagaaagaaacattcctttttataatcctgatattggtgtacctttaggtcaaagacaattaatggcatataaaatttcaggaaccgaagattatgtcgaaggtgatgatttacacttttgtaacaactctgcaatccaacaattagttgatgatattaaaagaacaattattgttggaatggatactgcacattcagtacttcaagaaagattaggtgtagaagtaactcccgaaacaataaacgaatatatggaaaacattaaccatgcacttcccggtggtgccgtagtacaagaacatatggtggaagtacatccgggtcttgtagatgattgttatgcaaaaatatttactggaaatgatgatttagctgatgaattagataaaagactattaattgacattaacaaggagtttccagaagaacaagctgagatgcttaaaagctatgttggaaataaaacttatcaagtaagtagagttccaacacttgtagtaagagcttgtgatggaggtacagtttccagatggtcagcaatgcaaattggtatgagttttattaatgcatacaaattatgtgcaggagaagcagcaattgcagatttctcatatgctgcaaaacatgcagatgttattggaatgggtgcatttttaccatcaagacgtgcaagaggacctaacgaacctggtggtgtagcattcggtacattagcagatatggttcaaacatccagaatatcagatgacccctgtgaagtttccctagaagttattgcagcagctgcagcattatacgaccaagtgtggttaggatcatacatgtcaggtggtgtaggatttacccaatatgcaagtgcagcatatactgatgatattttagacgatttcctttattatggtaaagattatgttgaaaagaaatatggaatgtgtcaagctgatttaagtatggacactgttcgtgacatatcaactgaagtcactctttacggattagaacaatatgaaacaccaaccctcttagaaactcattttggaggttctcaaagagcttcggtagtgtctgcagcagcaggatgttcaactgcatttgctactggaaattccaatgcaggtgtgaatggttggtatttaagtatgattttacacaaagaaacacattctagacttggattttatggttatgatttacaagaccaagcgggtgcatcaaattctttatcaattagaagtgatgaaggtttaatccacgagttaagaggtccaaactacccgaactatgcaatgaatgttggccatcagccagaatatgctggtattgcacaggctcctcatgcagcaagaagagatgcattctgtacaaatccattaattaagattgcatttgcagatcatcatcttacttttgattttagacatccaagaaaagaaattgcaaaaggcgcattaagagaatttatgcctgcaggagaaagagaaataattatcccatcaagataa

SEQ ID NO: 7411 - DNA, 795 bp, Methanobrevibacter gottschalkii
  source 1..795: mol_type = genomic DNA
atggaatataaagcacaatattgtcctggtgaaacaataattgctgaaaatagaagaaagcatatgaatccagaacatgaattcaaaaaaattagatccgtttctgatgaaggacttgtaaaaattttaggccacagaaaccctggtgaaagttataaaactgtacatcccccattggctgaaatggaagatgatggcgatattattaaaagtatcatagaacctactcctggagctgctgaaggaattagagtaagatacatccaatttgcagattcaatgtataatgctccagcacaaccatacgatcgagcaagaacatatatgtggagatataggggagtagacacaggaacattatctggaagacaagttattgaaataagagagcaagatttagaaaaaatatctaaagaattagttgaaacagatatttttgaccctgcaagatgtggtatgagaggagctactgtgcatggacactctttaagacttgatgaaaacggtttaatgtttgatggtcttcaaagatatatttttaatgaagaagatggtcatgtttactacataaaagaccaggtcggacgtcaattagatgaagctatagatgtaggtgttccattagatgaagaatatctaaaagaaattaccacaatatatagagaagacaatattggtatgagacaagataaagaagcgcttgaagttatagaaaatatacatactgcacgtacagaaggaggatatggtatgggagtattttttaaagacttgaaaaagaagttaggtgaatga

SEQ ID NO: 7412 - DNA, 495 bp, Methanobrevibacter gottschalkii
  source 1..495: mol_type = genomic DNA
atggatgaatcagaacaaattaatgttatagatgttaaaattactccatacagatttttaaaacctaaaacaaccgaaaagattttaaatgagatttataaattaaaaggtcaacaaagagtcttaatacatggtccttctattccaaaaaaggttttttacggaccgggtaaaggacatgttgtaaatcacactgatagaaaggaaataaatgttaaaggatgtgatgttgagttacgagtgatggttggggaaataattgttactgtagacatgtcagaattaaaagaatttatgaataatctaaaagacattttagaaacacacatgccatgcgattattatatattaatcggagtatttacacggacaaaaacaacgatttcagattatttaaaatatggaaacaatttcgaaaattctattgacagacgttacattggtttagtagattcacattcaaaaacttctgaaacagtcaaagttattaaataa

SEQ ID NO: 7413 - DNA, 1332 bp, Methanobrevibacter gottschalkii
  source 1..1332: mol_type = genomic DNA
atgaaaatatatgatgacaatttagatttatatggtccagatgggaaaattattgaagaatcagtaccccttgaatctattagtccccttaaaaattctgctatacaacagatgatatatgatattaaaagatcagccgctgttaatttagtaggaattgaaaaaggtttaaaatcaggtgcaatgggtggaaaatccacttatattccaggccgtgaattagatttacctattgttaaaaatgcagaattaattgcaacaaaaattaaaaaaatactacaggttaatgaagatgatgacaccacagtcaatctcattaatggtggacaacagttattagttcaactcccatttgaaagattaaatgtagccgcagattacagtgtatctactttacaaacaagtgcagcaaccattcaatcaatcattgacagctttgaaattaatatgtttgatgcatcaaccattaaaactgcagtaatgggagcatacccaagaacagttgacctttcagggtcaaatattagtgcattacttggaccacccgttcttttagaaggattgggatatggtttaagaaacattatggcaaatcacgtagtggctattacaaataaacaaactttaaatgctgctgcattatcttcaattatggagcaaactgcaatgtttgaaacaggtgatgctacaggagcttttgaaagaatgcatttattgactttagcttatcaaggattaaatgcaaataaccttgtatttgatatagttaaagaaaatggtaaaggaacagtaggtacagttatccaaacattagttggaagagcaattgaagataaaatcattaaagtagctaaaaaaatgccctcaggatataatatgtatgaacctattgattgggcattatggaatgcatatgctgctgcaggtttacttgcagcagtaattattaatgtaggggctgcaagagccgcacaggcagtagcatcaacagtattatactataatgacatgttagaatatgaaactggacttccaggagtggattatggtagaacagaaggtgttggtgtaggattcagtttcttctcacattcaatttatggtggtggaggacccggaactttccatggaaaccatgtggtaacaagacatgcaaaaggaactgcaatcccatgtgcatcagcagcaatgtgtttagatgcaggtactcaaatgttttcagttcaaaggacatcagcattaatcggaactgtttatggcaccatagacaatcttagaaatccaatccccaatgtagcaaaaattgcaggagaaattaaagataaactttga

SEQ ID NO: 7414 - DNA, 822 bp, Methanobrevibacter gottschalkii
  source 1..822: mol_type = genomic DNA
atgagttgttataaatattggggtaaactcgaagaaattgctaataagttatcctcatatggtgatttagataaatatggtgattctgcattagatgatgtggatattaacgaaattattgaaattttagatgatgttgaaattattgctcatgataaaacaatagattttgattctgcaaagcatattcttgatgatgaaaaaatgaataaggcgttgaaattaattagaaaattctatgtttatgttggtgcaagactcgaaaccgaaaaggcaattgaaatgttagaatcggatgatcttgatacaaatctagaatcatttgaattttatgaccgttatgttggattgttaaataatgaaagtcaattagctaaattcaatgaaaataaaacattcgtgtttttaggctccggtccacttccaattactttaatgatgtttaatgaattgtttggatgtaaatgtattggaattgaacagcaagaagatgttgctgaactttcaagaaaacttttaaagaaattaggtcttgaaaatgaaattgaaattatagttggggacgaaaccactattgaatcattggaatatgatattttaatggttgctgctttagcagaaccaaaagaaagggtattctcaaatatctggcaatatgttgatgagaaaactcctgtaatatataggacttatactggaatgagagcaattttatactccccagttttggataaggatacaagaggattccataaagaggtaatgatcctaccaacaggaaatacaaataacacttctgttttaattagaaaaatagtttga

SEQ ID NO: 7415 - DNA, 786 bp, Methanobrevibacter gottschalkii
  source 1..786: mol_type = genomic DNA
atgaaaggaattttgggcgcaatttgtggagatatcattggatcaactcgtgagtttaatccaattaaaacaaaagattttaaacttttcaaacgtaaatctacattcactgatgatactgtaatgacattagctattgcaaactggttaattgaagatacagcctctgaaagtatattgattaaacagttacaatattggggaaataaatatcctgattcaggttatggcggaagatttagaaattggttaaaagaaattgatccgaaaccttacgggagttgggctaatggatctgcaatgagagtttctccctgtccctgggttgcaaattccttacaggaatctcaaaaattagctaaattgtcagctattgtaactcataatcatcctgagggaataaaaggggcacttgcaacttcagatgcaatttatcttgcaaaaactggtgctggtaaagagaagataaaacatcatattgaatctcattacagttatgatttatctcgtagtgtagatgaaataaggactaattattcttttgatgtttcatgtgctggaagtgttccagaatctataatctgctttttagaaggagtttcatttgaagatacaattagaaatgcagtttcacttggtggtgatgcagatacacaagcagctattgctggaagcattgcatctgcatattgggatattccaaaaaatatttcgtataagtcaattaaccgtttgaattatgatttgctaaatgttttagttaattttgaagaaaagttcatgtag

SEQ ID NO: 7416 - DNA, 783 bp, Methanobrevibacter gottschalkii
  source 1..783: mol_type = genomic DNA
atggatgaaaatatagctatacttaaaggaattggtcttactatgtatgaagctcaagcatatgtaacactcgtttcattaatctcatcaaatgcaacagaaatatctgaaaaatcagggattcctcgaagtaaaatatatgatgtactcaaaggactaatccaaaaaaattacattgatgttgaagatggaagacctttaacttacaatgttaaatccccagttgaagtattaagtcttgaaaaaaacagattgactacagaactggatgatacaataactagactaacaaatgtatatgaaaatggaatgagtcaggttcaagcccctatttggaggatttatggtgttgataaaatcataaatcaagaattagaaatcattactcgcgctaaacattcaattaacatgagaatcggatttttatttgaagaagaaggagaagcattagttaaaatactcaaaaaaagaaaaaacttaaatatcaatatacttgcttcaccaacttgctgtattaacaataaaacattcaacattatcaaattttttaaagacaatgacatgccagttcacaaagcagacattccatttgttaaagtattaatttctgattcaaaagaaatgatgcatacatatactaaatttagtgaagacaaaagaactgttcttccagaaaccgcaattggaatttggaacaaatatgaagatattgcaagaaattatgatgagcgattcatgaaccaattacataaaatacaaaataaaaagaaaaaaactacatga

SEQ ID NO: 7417 - DNA, 1308 bp, Methanobrevibacter gottschalkii
  source 1..1308: mol_type = genomic DNA
atggcagatggcttagatatgttttgttatcaatgttctcagactgctcatggtactggctgtactataagtggtgtttgtggtaaaaaaccaaccgtagcaagattacaagataatttaatctttactatgaaaggaattagtgcatacaactacaatgcaaatgttttaggaaaatacaatcctgaaattgatgcatttttaactaaaggtttgtatactactttaactaatgttaatttcgatgctgaggatttagttgctcttgcattggaagcaggtaaaatcagtgtggatgtaatgagattgcttaaagatgcacacatcgaagcatatggtgaaccacaacctgtggaagtaaaagtaggtgcacaagaaggacctgcaattattgtaactggtcacgacttaaaagcattggaagaattattaaaacaagttgaaggtactgatgttaaagtttacactcattccgaaatgttacctgctcatggataccctggacttaacaaatacgaaaatttagtaggtcaattaggtggagcatggcacgatcaaagaacaatcttcaaaaaatacaatgcagctattgttggaaccagtaactgtgtattaccggcacttgatgcatataaagaaagaatgttcaccatggatgtagctaaacttgaaggagtaaaaactattgaaaattatgatttctctgaagtaattgaatgtgcaaaatctttaggatcattagaacctgaagaattaaccactcttactacaggttggagtgcaggtgctattgttgaacatgctgatgcaatcaaaaaattagttgaagaaggtaaaataagaagattcttcgttgtcggtggatgtgacaaagcatcaaaacacaacaactactatagggaatttgtacaaaacttaccgcaagatactgttatcttaacattagcatgcggaaaatacaaatttaatgacttagatttaggtgatattgaaggaatcccaagattattagatttaggtcaatgtaatgacaccattgttgcagttgatgtggcattagctttatgtgaattatttgatatggaattaaatgaattaccattaactattgttctcagttggatggaacaaaaagcagcggcagtactatgggctttactctatcttggaaaaactgacatgtggcttggacctattcttcctgcatggtgtaatgaagacattttaaatgtcttagttgaaaattacaatttgactccaacttctggtaatgcattagtagatatcaaaaaaattatgggggaatag

SEQ ID NO: 7418 - DNA, 330 bp, Methanobrevibacter gottschalkii
  source 1..330: mol_type = genomic DNA
gtgaatgaggatattaaagctaagtctttaaatatccaatttttattggactatcaaaaagatagtgttgtcagtcgtgaaataatcaaaaaagagttaggtacagtcacattctttgcttttgatcaaggtcaaggattgtctgaacactcagctccttttgatgcaatggttcaaattattgatggtgaagctgaaatcacaatttctggtaaaaaaaatactgtttgtgcaggtgaaataattatcatgccagcaaatgaaccgcatgcacttcaagctgaaaattgcccatttaaaatgattttaaccatgattaaatcagattaa

SEQ ID NO: 7419 - DNA, 813 bp, Methanobrevibacter gottschalkii
  source 1..813: mol_type = genomic DNA
atgaaacaatgtattgacaacccaaatgatgtagattgggtgaatttttgggctgaacgcttaaaaaataaaaaaaataaagattgggataaagcagcgcctggtttttataaaagaaccagaaaagatgactatcaagatgcattatttgaaaaattaatacttgatgaaaatgatactgttttagatgtcggttgtggtgaaggttcagtcactatcccaatagctgaaaaagtaagaaaagtaataggaattgattcttctcctaaaatgcttgaatatctcaaaaaaagagctattgaaaataatataaataatattgaaacaattctaaaaccaattgaagacataacttatgatgaaattggaaatgtagatgtagtaatttgctcaagatcactaaacggtattgttcccattgataaaacattatctgaactaaataaaattgcaaacaagtatgttttcataactatttttggacctgaaaataagaaaatcgaaaaagattttgaaaaagaaatagggattaaaactgaagatttcccagattacaactttttctttaacatattatttaatttaggaatttatgcaaatattgaaagatttgacttaagcaattatcgtgaatatgatagtatcaaagaagcaatggacaatggtaaatttagacttgatttatacaatgataaagaaaaagagcttcttgaaaaatatttagaaagaattcttacttacaatagaaaaagtaaaaaatattataatgttaaagacaaagctgattggattttgatttggtggagaaaataa

SEQ ID NO: 7420 - DNA, 1020 bp, Methanobrevibacter gottschalkii
  source 1..1020: mol_type = genomic DNA
atggttattaaaatgaggcttggaaaaactaattttaaagtaaataaaaatggatttggagcccttccaatccaaagaagaaatgaaaaagattcaattgaaatacttaaaaaagcatatgataatggaattaacttttatgattcagctcgtttttacacagacagcgaagggaaactcggaaaagcatttgaagatattcgtgaaaacatttacatcgcaacaaaaactggaacagaaactcctgaagaattttggaatgatttggaaacctcccttaaagaattaaaaactgattatgttgatttataccagtttcataacatttcattttgtccaaaagaagatgatgaattatataaagcaatgcttgaggctaaagaagaaggaacagtgaaacacattggaattacaacccataaaataacacatgcacatgaagcactagatagcggactttatgaaacattacaatacccattttcatacttaagtggtgaagaagagttaaaccttgttgaaaaatgtaggcaattagatgttggttttattgctatgaaaggaatgggcgggggattaattaaaaattcccaagccagttttgcatatatgaatcaatttgataatgtcttaccaatatgggggattcaagaattagaagagcttgatgaatttctatcttatgatgccaatactattttaaccgctgatttaaaagaatatattgaaaaagataaggaagaacttggagtgaacttctgtagaggttgtggatactgtatgccttgtccagaagaaattaatattagtttatgttcaaggatgtctttatggcttagacgttttccgacagaacccagtttagatgaaaaaactcaaaaaattatggaaaaaacaaaagactgcactgaatgctattcatgtgttgataaatgcccatatgaacttgacatacctgaacttttaaaatcaaactatgaagattatcaaaatgttttaagtgggaaaacaaaggtgtga

SEQ ID NO: 7421 - DNA, 1005 bp, Methanobrevibacter gottschalkii
  source 1..1005: mol_type = genomic DNA
atgaatactgacattaacaaagcacaaaaatacatcgatgatgaaaattacaaagatgctattattctagctcgcaaaaaacattcaaaagatgatgttgaaacttatttatccattttagatttattaattgaagcggattacataatagctattgaagaaaaaggaatgtattatcaatattatgataaaacacatgacaatggagattatggtgaaaaatactttgatgaatatctcaaaaaacaaccaaaatccattaatgccctgtgtgacaaagcgatgtccagatttaataaaggacaaattgacgaatctttaaaatatatggatacggcatataaaaattataaaaattattctaaaattgaaaaaccacgtatttctaaaaaagaacttttaattgcaaaaattgaactcctaatgcaagcaaaaagatatgatgatgcattaaaatatcttaataattatgaaaatcaatttggcggcaatcaaaagtcagatttatacaaaggtcaaatgcttcaaaagaacggtaaaaataaagaagcacttgtatatttaaacaagtcattgcttgaagaagatacattagttggatttaatgcaaaaggtgatgcattattcgaccttggaagatatgaagatgcattaaaagaatacaaaaactgcctaaattatgaaagtaaaatagaaggtgatttagaattaattactaattttaattacaaatctgcattttgttgtgtcaatcttggagatgatggtgaagctataaaatatttaaataaaactattaacatgttaaatgaacatggaagacttccaagaaatattgaagcaatatatcagaaatgttcctttgaaaaggaaagaattatgaaaaaaggaaatgtaacagatgaagaattcagaaaaagtaaattcttctcaactaaaacatctttaatcatattgttcattatttttatattttttatcatattaaaattaaatggttattaa

SEQ ID NO: 7422 - DNA, 1671 bp, Methanobrevibacter gottschalkii
  source 1..1671: mol_type = genomic DNA
atgaatgatttagaaaaaattgtttttaaacatgctttattaaatgcggctaaacataaaggaagtgcaaatcccggtgctgtaatgggttcaatcatgtcaaatgaagtagaacttagaagtaaagcaaaagaaattggttcactggcgggtaaaattgtagcaaaggtaaatgctttatcaccagaagaacaagctagtgaaatggaaaagtttggtgttgaagttcaggataaaaaaccaaaaaccaaggattcgggacttcaagaacttccgggaactcatgaaaatatagtattacgttttgctccaaatccaagcggacctttacacatcggacactcaagagcagccgttcctaatgcagaatatgttaaaagacatgatggcaaattaattttgagaattgaagatactgatccgaaaagagtatttgaacctgcttatgaaatgattcctgaagatttagcatggttgggaatagaaccaaatgaaatcgtttaccaatctgatagatttgaaatttattatgattatgctcgccaattaatcgaaaaaggtgctgcttatatgtgtacttgtgatggtgaaacattcaaagaacttaaggataattgtaaaccttgtctatgtagagataacagcgtagaagaaaatcttgcattatgggaaaaatttgatactatggaatctggagaagcagtacttagaataaaaacagatattaatcacaaaaacccggctattcgtgattgggtcgcaatgagattggttgatgaagaacatcctcgtgtaggtactaaatataggatttatccaatgatgaatttctctgtttctgttgatgatcatttaatgggtatgacacatgttctaaggggtaaggaccacttagcaaacagtgaaaaacaaaaatacttatataatcatatgggatgggatttaccagaatttatccattatggaagacttaaaatggaagacatagctctcagtacttcaaaggcgatggcgggaattgaagatggcacatacagcggatgggatgatccgaggctgggaacattaagagctattgcaagaaggggaattgatccaagaacaatttataacttaatcactgaaattggtgttaaaatggccgattctgcaattagctggaaaaaaatttatggattgaatcgtaattttgtagaacccatcgcaaacagatatttcttctgtgaagatcctgttgagattaaaattgatggttataatgatggcgaagtctcaatcgaaagaccgttgcatgcagaccacatagacagggggaataggattttgtcctttgacggtagtgcttatttagcaaaagaagatattgctgacggtatttttagattaatggatgcagttaatgttgaaattgatgggaataaaataatttatcattcaacatcttttgaagatgcgaaaaaagtaaaagctaagattattcaatgggttccaactaaagataatgtaaatgttaaaatagttatggatgatgcatcagctaaaactggagttggtgaggatacacttcgtgatttggaagttggagatattgttcaatttgagagagtgggttttgctcgtttagatgaaatcaaagatgataaattagtattttattatgcacataagtag

SEQ ID NO: 7423 - DNA, 483 bp, Methanobrevibacter gottschalkii
  source 1..483: mol_type = genomic DNA
atgcacataagtagtgataaaatgactatgtttagtaatggttattcaactcttcgaatgccggaggattttgaaccagttaatgccaaagacgagttcaatgatttgtatttagtaaatactaaaattccaatgtctattaaattttcaacaacacctacattagttgggcttccttctataaaagaggatattgaaaagaatattaatgataatcccagaattaatgtaatattgtctgattttatcccaataaatgaggatatttattatttgattgtttcctctttttccgatggtgaaaaagagattagacgtaatgaattcttatatgttgaagataataatttatatatcttcgaattcacttatccttatgcagatagggaacttgatgatttttacctgaatatcatccgttcttttaagattagtgttccaaaatatattgttgaagatggaaattataaattgaatgaataa

SEQ ID NO: 7424 - DNA, 1476 bp, Methanobrevibacter gottschalkii
  source 1..1476: mol_type = genomic DNA
atgaatggaataaccatattaatttggataactattgtaataattggtgtaattgcctgcatattagttaaattacactacaaaggtaatgaactcgaacaagatgaaggatcaataattccaagcacagataaattaaatggaatattatcacaaggaaaagaaaaaattaattcaaaaaaccttactaatagtttatcttcaaaaacaacccgaacccaaaattctcaaaataccaaatcactatacggaaacaaacaacatacctcacaagactatgatgtttatattgtccccgaagttaataataaaaaaacttatgaatatgagtctgaaaaccaagttctcattgattatggagataaagttaaaaaatttcaagaaccaattaaacaaagccagatggatattatgaatcaaaataaagatgataaaacagaattaaaagatttattcacaattgatgaattaattaaagaatctaaaagaaaagataacgaaagagaaaaagagcaaccaaaagttgaagatagtgaattaactgaacttaaagaaagtattgctaagaaacaagaaaatactatcgaaaaatcttctagtgaagaagatattggtgaatttgaaacaattgaaagtttattaaatgaagaagaacttaatgaggatgaaacatctgaagaaattgaaacatcaacaacatcacaaaaaactattgaagaagcaatttcctctgcttctcaagaaaaaaaagaagaaattgaaaacctttctgaaaacgaaaacataactgatgtattattacatgcagatgatgatcaaatggatattcctaatgaagagattaaagaaccaactctaaaaactccaacaaaagtcgatgaatcaaacgattctgaatttaattcccctcttaaagaagacaatgaagaaactatggatttagattatagaaaagatctggataaatttacacaaaaaattaaaggatccaaactcttcaaagatgttaaagaaaaacttactgctgaaccagaagaatacattgaagaaggaattcccaaagatgaaacttatattagaaatgtgaaagaatatgatgactttgagcctattataaacgagacacatgccgattatgtagatcctattggagatattgaacctgcatttgaagataatcagtcattaaaattagaaaataaacctaaagcttttgaagtgattaaggattcttcaaaacctgaagttacacaacaaaaaatcccaactattaaaagtaaaccttcaagaaacaacataaaaataaaattaaataataatgaagtagtacttaaaaaaggagacgaaatcatattcaatcatttaggtgaaacttattccagccaagtttatgctattaatggtgatgatatctccgttaaatacagacgtcaaaatatcataattaaaccagctgatgttaaaaagatatattaa

SEQ ID NO: 7425 - DNA, 1230 bp, Methanobrevibacter gottschalkii
  source 1..1230: mol_type = genomic DNA
atggttgttaaaattaatgaaaattatcttaaattaaaaagcagttatctctttgttgaagtagctagaagggaagcggaattcgtaaaaaataatcctgatgttgatgtcattaaaatgggtattggggatgttacaaaaccattagtgccatctgttgttaaagcattcaaagatgctgttgatgaaatgggaagtgcagatacttttatgggatacggaccggaacaaggttatgaatttttagcagaagctattgtgaaagattatgaaaaatatggaataactcttgatacatcagaaattttcattagtgatggtgctaaatgtgacactggcaatattcaggaaattttcggaattgataataaaattgcagtaactgatccagtctacactgtttatgttgatacaaatgttatggcaggaagaactggtgaaatgaatgatggtatgtatgaaggtttaacttacctcaaatgcaatgctgaaaacggatttgttccagaattgccttcagaacctgttgatattatctatttatgttatccaaataatccaactggtactacattaactaaagatcaattaaaagtgtttgtagattatgcaagagaaaacaaagctattattttatttgatgctgcttatgaagcatttatcaatgaagaaaatgttcctcattctatctatgaaattgaaggtgcagaggaagtagctattgaatttaaaagtttttcaaaaactgcaggatttactggaactcgttgtgcatttacagttgttcctaaacaattgactgcatatgatagtgaaggcaatgaagtagaagttaacccattatggaataggagacaaactaccaaatttaatggtgtttcatatccggtgcaaaaagcagcacaagcaacttattccattgaaggtcaaaaagaaattcaagaagtcattgattattacatggaaaatgcaaaggttatttgtgaaagcttatctaatttgggattggaagtttatggtggaattaattcaccttatatctgggttaaagctccaaataatatggattcatggactttctttgatttgttattaaatgaagcaaatgtgattggaactcctggttctggattcggtccaagcggtgaaggttatttgaggcttactgcatttaatacattagaaaatactaaagaagcaatggataggatttctaaattagaattttag

SEQ ID NO: 7426 - DNA, 693 bp, Methanobrevibacter gottschalkii
  source 1..693: mol_type = genomic DNA
ttgaaaaaaatagaaaaaccggtagaaattgaagatggggattcatttaaagtaatcttatcaaaatatggtgcactggcacttgataaacaagaaaatttagctgaattaattggtgaaacaattggtgatttggatattgaaaatgaggttatttcttttgatgatattaagatgccaattcacgttttgggtttttactcacaagacttaaatcaatggtcttgggcatgggattgtgaagaaatattcggcaataatttaattgcatctgcagtggaaattaaaaaacttggagataaatttgatgttcctgaattcaattcctcattaattaaaacagatttcaatttttgccatactattgcaatgactgcaactactattcttggatttgatggttattatgctgtttctgaagatggtctggatatttttgttgctatcgaatctgatctggttaaagagaacaatgatgttaaaaagttcagagatactttttatactttccaaaagaatttcaatatatttccaaaaattgcttttgaatcttacactaaacttaaaggatatggttttaaaccgcaagatggtttttatttggctaaaataggtgaatctcgtgttatggcggggtttactgaaagaggaaatgtaacacggattttaatgtttggtgaagatgaacagtga

SEQ ID NO: 7427 - DNA, 612 bp, Methanobrevibacter gottschalkii
  source 1..612: mol_type = genomic DNA
atgaacagtgatattatgaatcaggatttagttgatgaattagaatatatggaagagttactcactaaatccggattttttgatagtgaagagatattggaaatattggaagatcagttcattgatgaggatattgatatttctcaatattctgtttcttcaaatgatttttctaatgaaaatttctcaaaattggaaaatgcctttacaaatttagctagtgaaaaaattgtagctattcataattgtggctatgatattagtgaaggagtaaatgatgcatttgaattatatgttcatttgcataataataaattctcagttgaaggtttcagtttttatacttttgaagatattgaagaatctatttgtgaatgcaaattaaagataactttcggtgattttgaaaataatgaagaaatggcattaaaaatcggtaaaatagttttcaaatatctaaaagaagaaaatttcaatattgcttgggatggaacaattaataatcaaattgaaatttatccgtttaaatgggataaatcttatgattctgaaaaagaatatgaaattgaaggagcatatgaagtttttattaaaaatcaggtgttaaaatga

SEQ ID NO: 7428 - DNA, 585 bp, Methanobrevibacter gottschalkii
  source 1..585: mol_type = genomic DNA
atgaatactagatctttaaaattaattcgcgaggttatgattaattcaggtaagtggtcttcaattgaaatatcacaggattcaatttacctgcaatttagagatgttgaacttggaactccaaaaatcgatgaagatttttctctggttgttaggtttgctgatgattcatttttcacagtattctataataatatttgggatattgattttttatcaaaatatgattttaaaaatcagttattaagtgaggaagtatcattcaatattaaagatattaaattcattgattttgaatatttaaatacatttttcactaattataaaaaagagaaatcagtttctgttgttgaggattttaatattcacaatattcgcaatgattttttcatgttgcttgaaactgatgaaatagctattgttgttggtggaaaccaaatggatttcttttcaccttttgaaagattagatgatgcatcgcttcgtgaactttcaaatgattggatgctttattttttaagatatcatcaaaaaagaaatatagttagagatccgatgtgtgaaaaccacccattgaaattataa

SEQ ID NO: 7429 - DNA, 1023 bp, Methanobrevibacter gottschalkii
  source 1..1023: mol_type = genomic DNA
atgacttgtaatattttagttggtggagcatggggtgacgaaggtaaaggaaaatgtattacttatctttgtgacaacgataaaccagatattattgctcgtgcaggagttgggccaaatgcagggcattctgttgaatttaacggagaaaaatatggtttaagattaactccatctggtttcgtccatactggtgctaaactcatgattggagcgggagttctagtaaatccggatgttttatttaaagaatttgaagatttaaagaaatataatgtaaaagagagaatgtgtattgattctagatgtgctattattaatgaagagcacatgactagggataaaggttcagaacatttagctaaaaaaatagggagtactggatctggttgtggaccagcaaattccgacagagtattaagaactattgaattggctcgtgatattccagaacttgaagattacatcactgatgtttcattagaatgtaatgaagctattgatgaaggtaaagatgtatttattgaaggatctcaaggttttgcattatctctttattatggaagttatccatatgtgaccagtaaagacactactgcatctacattcgctgcagatgtaggtgttggaccaactaaagtagatgaagtcattaatgtattcaaatcttatatttctcgtgtcggtgaaggaccattcccaactgaaatgacacaaaaggaagctgaaagtcatggatgggaggaatacggtgttgtaactggacgtcgtagaaggattggatattttgatatggatcttgcaaaagaatcttgcaggattaatggtgcaactcaaattgctctgacttgtgttgataaattatatcccgattgtgcaagaactcaagattatgatgagttatctgcagaaactaaagctttcattgatgatatccagtctgcaactggtgtaccagtaactatcatttcaactgggccggatttgaaagatacaatagatttaagaaaagagttattatag

SEQ ID NO: 7430 - DNA, 495 bp, Methanobrevibacter gottschalkii
  source 1..495: mol_type = genomic DNA
atgtatattcgaaaagcaacacttgatgatttgagtaaaatcatgagcatttataaaattgcacaggatttcatgattgaatcgggaaatccaaaccaatggggacataataatccttcagaagaaaaagtaaaagaggatatagataaaaaaaatagctatctagtctgtaatggagaagacattcatggtgtttttgtaatttttaaaggtattgaaccaacttataaacatattgagaatggtagatggcttaatgaagatgaatatatcacaatacacagaattgcaagtgatggaacacaaaaaggtatttttaagtttttaatagattattgtaaaagtaaatccgaaaatattagaatagatacgcatcacgacaataaaataatgcaaaagttaatagagagaaatggatttcaaaaatgtggaagaatttatgtaacagatggatctccaagaattgcatatcagtggatgaatccattacattaa

SEQ ID NO: 7431 - DNA, 603 bp, Methanobrevibacter gottschalkii
  source 1..603: mol_type = genomic DNA
atgactgatcaatatatgaaaccgcatggtgaagaaggacttcagacaattaaaaatatgaatgaaaaccacaaaaacatctctgaatttgcatttaaatgtgcaattattggagataatgataaaatattagatgccggatgtggtggtggagttaacattgaaaaattcctcaaaataacaaaaaataatgttgacggacttgattattcagaaattgcagtaaccgaatcaataaaaagaaatcagaaagctattgatgatggaagatgtagaattattcaagcagatgtgagcaatatgccatttaaagatgaatgctatgactttataagtgcatttgaaaccatatatttctggccgaatcttgaagaaacctttaaagaagtttcaagaataataaaaccgaatgggcaattcatgatagctcaagaaactgacggcaataatccgaatgatgaaacttgggtaaatactgttgaaggaatgagaatttatactgctccagaattagaaaagtacttacttaatgctggatttagaagtgtggaagtatttaaaaaagaagatgaatacattttagtagttatcgggaaaaaataa

SEQ ID NO: 7432 - DNA, 939 bp, Methanobrevibacter gottschalkii
  source 1..939: mol_type = genomic DNA
atggataaaaagattattgcaattattgttgcattcatagctattgttgctattggaggatatttcctactgggtggtggtagtgataatgtaactatagggtacttgccatctgaccatgatgcggctctttttgttgctgatgcacaagggcaatatgctaaaaatggaattaacactaaacttgttcaatttaacaatggcggggatttgatgactgctatggctagtggggaagttgatgttggttatgttggaatcactccagttttatcttcaattgaaaaaggagttcctgtaaaagttatttcagcagctcaaactgagggttccggaattgttgttgctaaaaactctggaattaattctgtatttgatttggagggtaaaaaaatagctacaccaggtgaagcatctattcaacacatgttgcttcaatattacttaaaacaaaatggtattgatattaaagatgttaaagtatctgcaatgaaagttccttcaatgaatgatgctttaaaaacaaataatatagatggtatgattacttttgagccatatgtatcaattgctgagaaaaacggtgcaaaagttttagttgattcctctgaaatactgccgaatcatccatgttgtgttgttgtggcttctgataaattccttgatgaacatcctaatgaaactcaaaagattttagatattcacaaaaatgcaactgattatataaataataacactgatgaagctgcagaattacttcctagtgatattgttagtgatgtggatgttgaaaaacaagcacttgcaggatttccattcatttctggtttaaatgatacttataaacagaatgtaatggaatttatgaatttggaagttgaattgggcgttttaaagaaaccactatctgaagataaaatattttggaacggtagttaa

SEQ ID NO: 7433 - DNA, 1407 bp, Methanobrevibacter gottschalkii
  source 1..1407: mol_type = genomic DNA
atggaattaataaatttaagtaaaatatcaagtgaagaaattcttgcaggttcctttggtatagaatgggaaagtttaagagtcaaatctaatggggaattagcattaactcctcacccttctgtttttggggataaattaaaaaatcctgttgtaacaactgatttttcagaaagtcaagttgaaataataactcctgcttttgatactgttgatgaggcttttgacactttttcggcattatctgatgtggttaattcatctcttccagagggtgagtatttatggttccagtcccttccatgtattttaccatctccaaatcaaattccaattgcacaatattcacaggaaggtgaagaatcccaaaaataccgggaaaaccttgcatcaaagtatggcgttaaaaaacaattgatttcaggtgttcattttaacttttcatttgatgatggattcattgagaaattacgtaaaattacaaaatctgatttgtcatttagacaatttagggatgaaatttacttaaaaataactagaaattatcttagatattgttggttgataatttatttaactggttgttctattggtgcacatgagtcattttcatctgaatgtattaatttaatggatatgcaagatggatttggaggttattactctacaaaaggaccatcatttagaaatgcgtcatccggatataagaatttaaaaaagttatatccaagttataatagtatttctgagtttactcgtgatgtaactaattttattgataatggtgatttatcagaagctaaagaattatacacacaaataagattaaaacctaaaaatccttctgatgtcttaaattctcttaacgaaactggaattgaatatattgaaattagaactttggatattaatccattttataaatgtgggcttgtaaaacatgatatgaaatttttacatttgttcttaatttatatgtttgttaaaaatgagtctgattatcctgattggcaaagggaagctaatattaatgaggaaagagtagctgaaagagcatttgatgaatctatgagactattaaaagatggcaatgaagtcactcttaaagaatgggcatatgatttaattaatgagatgtatggtatgtgtgatgtttttgatattaatgagtataatacattaaaattaatgcatgatcgtgttttaaatccagaactaactccgggtaaaaagttattgaaactaattaaaagagacggtttcattaatgcacatatgttttccgctattactcataaacaaactagtaagaatttaattaaaaatgttgataaagaggaatacggcagacttaaaaaatatttgaatatagctctttacaggaaaaaatctgataagaatagttaa

SEQ ID NO: 7434 - DNA, 1047 bp, Methanobrevibacter gottschalkii
  source 1..1047: mol_type = genomic DNA
ttgaggcaatatatttataacaatgttcctaatattaaatattataatgaatttaaattgattgatggtgaaaaaatgaataaaaaaattacatttgttttagtgtttgcacttgctgcatgtttagctatgggttcagctagtgctggtcttttcgactttttaggtgggggagatgacactgtaaagataggttacttaccttctgatcacgatgcagcattatttgttgctgatgctaaaggtatgtataaagataataacattacaacagaacttgttcaattcaacaatggtggggatttgatgactgctatggctagtggggaagttgatgttggttatgttggaattactccagttttgtcttcaattgaaaaaaatgtccctgtaaaagttatttcttctgctcaaactgaaggttcaggtattgttgtaactgatgattctggaataaaatctcctgctgatttaaaaggaaaaactattgcaactcctggtgaagcttctattcaacatgctttacttgtttactacttaaatcaaagcgacttaactgttgatgatttaaatgtttctgcaatgaaagttccttctatgaatgatgctttaaaaaccggtcaaattgatggtattgttactttccaaccttatgtgtccattgctgcaaatcaaagtaatgctcacatattagaaaattcatctgaaatattgccaaaccatccatgttgtgttgttgtagcttctgatgattttatcaaaaaccatgaagatcaggcaaaaactattgtaaaaatccatgaaaatgcaactaaattcatcaatgataatgttaaagcaggcaacgcagataaaattgtaaaactcttacctgaagatattgtatctgatgcaaatttggaagctgattctttagctagtttcccatttatttctggtattgataatgatttcaaagcagatgtggatgaattccaagcactggaagtaagtattggtcttttaaataataccattcctcaggataaaatatactgggaagcatag

SEQ ID NO: 7435 - DNA, 627 bp, Methanobrevibacter gottschalkii
  source 1..627: mol_type = genomic DNA
atgaaatttgatttatccgaaatcggaattaaatcaggcttgcaatatgaatgcattaccacaactgttaacaaagaaggtgtgaaaaatgcaggtgcatttgcatttgaatatttgggtgatgataaagtaaaatgccacatctttgaaggatcaaaaactttaaaaaatatcctagatactaatgaatatgtagttaacataacacaaaatccactagttttcacatatgctacattagattgtttaggcgatgaatattatactgatgatgaatcaatagccatcattaaaaacactccagcttacattattgttgatgttgaaaatgttgaaattaaaacacctgaaaattttccaattaaaggagatagcaatatctattttatatatggaaaaatcagaaaattagttgtaaatgatgaaagagcagcagcattcaatagaggaatgtctgcattaattgaatcattagttaacttttcaagatacaaaatagtagatgaagaaaaaagaaaagaatatatggacaaactaattgaaaatcagagagttataaataaagtttcagatgaaaaaactaaaaaggcaatttccgatttaaaatctgaatacgaaaaatactaa

SEQ ID NO: 7436 - DNA, 375 bp, Methanobrevibacter gottschalkii
  source 1..375: mol_type = genomic DNA
atggatggtgaaattgatttagaattatatacaatttcaattattcgattaaattccatttttcaaaaaattgaagataaaaaaatagtaactgatataatttctgatataaatgattgttttaatgatttaaaccagatatatgaagatatattgaacgaattatcaaaagaagaaattaatattaatgaatatgacccattttttgaaaatggaatggtgatgtttccagaatataccaaaagtattgatgaaactataggaaaaatagatgatgaaaaccttaaagttgcattgaatagtttatcagacctttttgtgaaattaattaaagtgggtaatgaatactttgaaaaaagaggtgcattcaaatga

SEQ ID NO: 7437 - DNA, 2097 bp, Methanobrevibacter gottschalkii
  source 1..2097: mol_type = genomic DNA
atggtagatctcaataaaatgtttaaacctgaatctgtggcagttattggagcttcaaatactccaggcaaagttggatatattattgttgataatcttattaatgacggctttaaaggtgaaatatatccaatcaacccgaaaggtggagagattttaggtaaaaaagcatatgcgaatatagaagacgttcctggaaaagtagaccttgcaataattactatcccatcagtatttgtaaatgcagtagttaaagaatgtggtgaagctggtgtggaacatatggtagttattactgctggttttaaagaagtaggcgatgaaggtgctaaattagaagcagaattaacagcaattggcaaagaatatggaataaacataatcggaccaaacagtttaggaattactgattcccacactccaatgaacggatcattttcacaaatgatgccaccaactggaaatatggcattcatctcacaaagtggagctatgatggtagctatcattgactggagtgtaacctccggaattggattcagtaaagttatcagtctaggtaacaaagctggagtaaatgaaattgaactattacaatacttagcagatgatgatgaaactaaagttatcatttgttacttagaatctatttctgagaatgaagacttcgttagaacaatgagagaaactgcacgtaaaaaaccaattatcatacttaaatccggttcaagttcagcaggagcagcagctgcatcttcccacacaggagcacttgcaggcagtgaccttgcatttgatactgcattccgccaatccggaattatccgtgtggacactatggcggaattattcgatttaggtttagcattctcaaaagcaccactcccaagaggagaccatgtagctatcattacaaatgctggtggaggaggagtagttactgtagatgcaatggaaaaagcaggactaaaactcgttcagtttgatgaagaaacaactgaaagattaaaaaaatgtgttacagaagaaggtagtgctaaaaatcctattgatgtattaggagatgcgccagtaagcagatacaaagaatccttggagattgtattgagtcaggatgaagttgacagtttgattgttatggtttgtcctacagcatctgcagacccagatggaattgcaaatgcaatcttagaagaaagaaaagaatttgataaaccaattattgtagtgaacatgggcggtccatcattcgaaaaagcaaacgatgctttaagagaaaatggtgttccaacatatgtattccctgaaactgcagtaacagcactcaaagcaatgacagattatgcaaaactcgaagataaatcatatgatgatgttgttgaaaacatagatgatgttgacaaagatgctgtaaaagccatttttgaaaaagttaaagcagatggaagagacactttgcttggtagtgaagcatatgcagttgctgaagcatatggaatttcagcagcaccaataaaactatctacaaatgctgaagaagcggcttcccttgcagaagaaatggaattcccagttgtacttaaaattgcatccgataaaatattacataaatcagatattggtggtgtaaaagtaggaatcagcagtgctgaagaagccaaatcaacttatgatgagattatcgcaaatgcaaaagcagcacacccagacattatccctgacggcgtagaagtacaaaaaatgatggattctggtgaagaagttattgttggtatgatccgtgatgaacaatttggaccgatgattgcatttggtatgggtggaatctatgttaaccttattgaagatgtttcattcaacctcgcaaaaggtatgagttcacaagaaattgatgaacaaatcaacaccaccaaagtatctcaattgcttgcaggatacagaggagaagcagcttgtgatgttgaagaagttaaggaagcaattaaaagagtagctagattaactttagacttcccagaaatatccgagttagatattaacccgatcttcgtttatgaagaaggttcaagtgcacttgatattaaaattaaattataa

SEQ ID NO: 7438 - DNA, 921 bp, Methanobrevibacter gottschalkii
  source 1..921: mol_type = genomic DNA
atgagcttaattattgcttacataggtaaaaaaggatgtgtaatggctgctgataaaagaagaataggatattttggtgataaaaagaatttagatttattagaagaagaattgtatgaaggatctattggaaatgatgaagaatttttagctagggcatcagaacttggaatttcaattaaaattactgatgatgcaaataagttaaaaacagttggaaattgtattcgtggtgaagtaagtacaaaaggaacactggaaactaaaagaagaaggatttatggtacaactaatggttatcaaatcattgaattattgggttcggatacaaaatcacgtaatgcaggtgaaaacggaattgttatttttggtaataatttcgcaaaacaacttgctcacaatttaatttcaaaaaaattaaaaggttctaaaagtttaaggtatatgggagaagtatttgaagacattttaaaagaagtttcttctaaaactcccactgttggaaaaaacattgatgttttaatgcaacaaccggatttcaataaaacagaagcacaaaaacatttaaacttgacaattgatcacgatattaaagtattgactaaattcagacaagaattaacagaacagattgtccaacagtctattgaaattgaaatggcaaataaaattatcaataaaggtagtgtaggtcatgttgtaaatgttgatggaaacatgttattcatccaattaaatgataaaacacaagcaatggatggtaactggaagcaattagcagcaccgggtcagaatgtgttaatgtttagtgaaagcagtaatgtggaaattggggatgaagttgttattgaaaatgaagagttatgtctaaaaaaagataaatcttctcttaaatgtgatataattttatgttctttataa

SEQ ID NO: 7439 - DNA, 924 bp, Methanobrevibacter gottschalkii
  source 1..924: mol_type = genomic DNA
atgaaaattacatttttaggaagtggtgggggaagattctcctctatttctcagcgaagaatgactggcggttttagaattgataatcttggcggtaagaattatcatatagatcctggtccgggggcacttgtcagaacatatcaatttgggtttgatcctcgcaatctaagtggaatttttgtttcccatgcacatactgatcattataatgatgctgaaattttaattgaagcaatgaccaagggtatgactaaaaataatgggactattcttggaagtgttagtgttttagatggttataaaaaatggggtccatgtatttcaaaataccatcagtcaaaatcaagaactgtcatattggaaccgggtgagactaacgaatttgattcaattaaagtaaaaggtactaaaactcagcatggtgatcctgtaggttccggatttcaaatagattataatggatttaaaatatcttatacttccgataccggctattttgatggattagcaaaagatcacgagggtgcagacattttaatagctagtgtattaaggcctggagaaaaatcaatacctggacatatgtgttcacgtaatttcattgatttaatcgaagaagtaaaaccgaaagttgctgtaatgactcatttgggtcttaaaatgatatccaataatcctgttgttgaggccaaaaaaatttccaaaaaaacgggtgttaaaacaatagctgcatttgatgggttatcatttaatataaactataataatccaagaaaatttaggttaatttcacttaaagatgttgaatcttcaatgcatagcactagtcattcattatttaatagtggtaggagaaactcatatcaaacttcttttagaaataaagagtttgatgagttgtccatagtaaaaagaaactaa

SEQ ID NO: 7440 - DNA, 1101 bp, Methanobrevibacter gottschalkii
  source 1..1101: mol_type = genomic DNA
atgtcaaattcaatcggagaaaaatttaaaataaccagtttcggatcaagtcatggctttggtgttggagcaattgttgacggatgtcctgcaaatcttaaattaacaacagaagacatacaaaaagaactcaataaacggaaacccggaacaagcagtgtgaccacccctagaaaagaaaatgatgaagttcaaattctttctggaatatttgaaggaaaaacagatggcacaccaattacaggcattatctttaataaaaatcaacattcaaaagattattcaatgtttaaaaatactccacgaccatcacacggtgattacagttggatggtgaaatacggaaactatgattacaatggaggaggtagaggtagtggaagagttactattggacatgttattggtggagcaatagctaaaaaactcttaaaaacacaaaaaattgaaattatatcccatgtcgtccaaattggagatattaaagcaaaacctcaagattacagcacaatcaaaaaaaatattgaaaaaaatccaattaggtgtggagatttaaaagcttccaaagaaatggaagaatttattttatctaaaaaacaagaaggtgattctgttggagggattgtagaaacaatagcaattggagttccacaggggttaggagaacctgtctttgaaagattagatggtgatcttgcaagaatattgatgaacattggatcagtgaaaggagttgaaatcggccttggatttgatgtagcaactcatactggatctgagataaatgacgaatatcaaattacaaataataaaataacaacaaagacaaacaattcgggtggaattattgggggaatgagtaatggaatgccaatcacctcaagaattgcagttaaacctacaccctccatttccaaatgccaaaattcaattaatttagaaaaaatggaaaatgaaaaaatagaaattaaaggacgtcatgacccatgtatctgtcctagagtaacagtagtggccgaatcaagtactgcgattgttcttgcagaccatatgattcgctcaggattcatccatcctactaatttggataaaagtatttag

SEQ ID NO: 7441 - DNA, 2628 bp, Methanobrevibacter gottschalkii
  source 1..2628: mol_type = genomic DNA
atgaaacggcatggactttttattttaatattgttaattgtagtattggctataatgaatagtgcatctgctgaaaattcgtcagctgatttgatttcagatactcaatatgagaatagtgttgatattgatgttgctgatgataatttaaagtcttatcaaagtgtatcttctgatttggaagataataatgaggtatataatcttaaattaaatgataattctcaagtggataatacatttttaaaagataatgcttctgtatctgattcaaagatatataaattaggttatgatgttacacatgttgcagataaattgcttaatttctcatctgctgatgacatattggtaattacaactgcaggtatggcttggattgataataaaactactgaaagtgcattaggcgggatagtcgatgcttcaaataattatgtaagttatggaaaaggcaatatattgacattatcttccacaaggaacgatcctactaatattgcattttttattaaaaaagacaattcattaaccatggcattttataaaaatggatctttaactccaattttccatggaaatgcaggtccaacattaagtgctggtgaatggaaaaaactacaaaaagcattaggtgatgaagatgcctattcatacattagtatagctaatgcatggtcagccggaatgcctaatgatgtgttaactcaagctacttatcatggacatgtttgcactggtcttataagtggtcaggctatgattcaaacattattaacttattatccaccaaaagatgaatttggattgcccttagagcatacagcatattatgtacttggagttccgggcggatctgaggatgatgcatttacatggtcattagacattactccaggaaaaagggcgtacataggtattgataccatggtaaataaagccatgactggatttatccgatggaatacaacttcaaatactggaattattattataatgagttataatgaaactgcaataaaagaaagctttaaaaaagtttctggtttaaatcctgatgcaagtgcaactaatgacttgaaataccaaaattggcttattagtaccttacatacaaacccaacatcacttgtcacaatactttatgaatttaaaggattaactaaagataatcttgaatatttgatgggattggaaattggtaagggtaatgtggttaaaagtgctcatggtttggatatgaattatattcttggattaaacttaactaaagcaaatcgtgaagctaatgttaatattgctgaaataaaattaagcgatgctaaattaaaacagataggtattgatgcttgtaacaatgcaattgaatattttagttcacaaggaattaccattagcaaagatttaaataatttatatgttttaacttctgcgggatatgttagaattaatggtactcctacttcaatggtatttgatggtatttacgaagtattaggttcagcactatacaaaaaaacattattcccagttcatacgcctatatggaaagatttagtgtttgatttttattgggtagatccaaataatgttacaaatgattcttcatttagtttgaagtatgatgttgctaaagatgaattaattgttataggcaacaccactagaaatgcaaattacattcttcaaaatgctataaaatatgaccctccatatgatgtattaattggatggttattccacaatcacgtatgtggtggaagtgcaccaggttatttaattgctgattatatatatgaaaacttccccactaatgaaaatgaatcatatatctacttaacaactaatgcgaattgtaaggatgatgtgatttcaagagttttaggtgtatcaccaggtatggggacatattataatttaagatatgataataataaaacaaactcaacaaatgtaggtattgcaattaaatggaatagcaaaaccaaaactggagaattaattattattaatcttgataattggggttcaggagcaatattcaaaaaaggatccaatatgtatgaggaatatattaaactatataaaaaagattattcctctccaaatttaatttcaagaccgcaaatttcaataacagcaagaaaagaaattaatgaagaaatgctgaacaaaattattggaggagcaacggatactaaagaaggaaattctattgcatatattatgaatcttccagacaaacttccaattaataatggagaaaacaacaacaaaaaagacaataaaaaaacaaaaataactggaaacaaaaagaaaacggatggaaagcatataaataatagcagttcatcttcaaattctattgattctaatagtcctacaactggaacttatggaaaatccaatgcaggtttatccgtcggaatttcaaaaaatattataaatgcaaatagtaattctgaaagttcagatgaaagttctggtgatggaaaaacttatgaaataagtaaaaaaagtcctaataaaaaaattaattcaaacaatgccatttttgcaattttagcagttcttgttttaggcggtattgttggatatggttacattagaaaaaatagaggtaaataa

SEQ ID NO: 7442 - DNA, 480 bp, Methanobrevibacter gottschalkii
  source 1..480: mol_type = genomic DNA
gtgatttcaacggttttatcggtatcttatgctcatccgggacatggtcactatgtagatgagattacatctgaagatgttggccatagtaaccacccttcaagtgattcacatgatagttccggtaaagaattatcatcaaaaagttcatcaaatagcagaattgcttcttctcatagtaattcgaaatcaaataaggtttcaagttcggatacctccaattcagatttatcaaataaacacacttcatcacaaagcattaaaagttcaaaaggtgatgtggaacctataaattctcaaaatgaggaaatgccaaataatactcaagttaaaaatacaagcaatattactaatcatacaataactgaagaagcggaaaatacaaacttgctgactcagtcaaacatattattattcattttagtggctattgttgggttttgtatagttgttctatttgataaatttaaaaatcgatga

SEQ ID NO: 7443 - DNA, 1005 bp, Methanobrevibacter gottschalkii
  source 1..1005: mol_type = genomic DNA
atggaatttccaactacaagattgagaagacttagaaaaaatgctaaaattagagatattgttcgtgaaactaaacttctaaaagaagatttaatttatccaatttattttaaagaagaccttcagggattggaaaaagaagaaatttcatcacttcctggtgaattcagatactctttagatagtggtgttgaatttgcaaaagaacttgagtcaaaaggattaaaatcaattattgtatttggaataccgaaagaagaaactaaagatgaaattgcttctccagattattcagcaacaggtattgttcaaaaagcgattagaagacttaaaaacgaaacaaatcttgttataattagtgatgtgtgtttatgccaatatacatctcatggtcattgtggattgattaaagaaaatgaggacactgatgatggaattgaaattttaaacgatgaatcattaccttacattgcaaaagtggcattgtctcatgctgaggcaggtgcagatattgttgcaccatctgacatgatggatgggagaataaaatctattcgtgaaactttagatgaaaatggatattataatgtaatgataatggcttattctgcaaaatatgcatcagctttttatgaaccatttagagttgcagcttgctcatccccacatttgggagataggaaatcttatcaaatggatccgggcaatgcagttgaagcaattcgtgaatgtgagcttgatgtagttgaaggttgtgactttttaatggtaaaaccggcactcccatacttggatgtagttcggatggttcgtgatgagttcatgttacctttagttgcatataatgtaagcggagaatatgcaatgattatggcagctattgagaaaggatttttaacagaaagagcgattaccgaatcgttgctctcaattaaaagagctggtgcagatttgataatcactaacttcgcaccttatttgcttttaaatgatgtgatagaatga

SEQ ID NO: 7444 - DNA, 882 bp, Methanobrevibacter gottschalkii
  source 1..882: mol_type = genomic DNA
atgaatgcatctgaaatcgcaaaaattgctcagattgcatcagcacttgaagtaagcggatatccaaaacctggaaatgttcacagaattcgtgattatgatgatatggagtttgaggactttgtaatcagtggaattgtaattggagacactattcgtgaagcatgtgatgatgttgatgttaaaaatcctaagttgggtaaatacatcttacaagcagtatctgaaactgataaatggattaaaaataacacaaatcttggtattgtcatgatgattattccaattgcagttgcggcagctattagtaattcatttgatgaaattcgtgataatataaaagtattaatgaaaaatacttcagttgatgatgcatgtgatctttatgatgcaattaatattgcagatgcaggggggatgggtgaccaagatgaatatgatgtggctagtgataatgctaaaaagggacttaaagaaaataaacagacaatgtatgatgttttaaaaatctcagctccctgggacatgttagctcgtgaaatgacatcggatatgcccgctgtttttgaaattggttatcctacttatcatgaattgtctaaaaagaaatctaaaaatgaaacttgcattttaacattcttaacattgctctctcaagttcctgatactttaatctcaagaaaatatggttctgatgaagctttaaagatttctatgatgactagggatttgcttaatcttaaaaatgaatctgattttaaagataagcttaaagaattcgatgatttcttatttaaaaataaatataatccgggaacaactgccgatttaactgcagcctctatttttgtaagctatttgaaagataattttatgatttag

SEQ ID NO: 7445 - DNA, 324 bp, Methanobrevibacter gottschalkii
  source 1..324: mol_type = genomic DNA
atggaaattgaatataataaacatgcaacatatcctcctttaattgaggatttagtaaatgaattgttaaaagatgattttgtgcattttaaaattttatgtgcaaatgaagtgcatcattttaataaatctgataattctatcattaaatttgaaactacatatgtaaaagaaacttgtgaaaacggtgatatgttatatattgcatatcctgatattttcagagttaaactgtacagggatgcaactcaatacattaaagataaagaaaaaattgatgcatttaatgatgtcgactggactggaaatagaattatattctag

SEQ ID NO: 7446 - DNA, 1545 bp, Methanobrevibacter gottschalkii
  source 1..1545: mol_type = genomic DNA
atgagtgaggatattaaaaaaaccattaatgaattacatatttacgaaaaaaaacttttaaaagaattggaagcaagtgcaaatgcaaatcccgaaaaaatagctgaaaaaactggcatggatattaaagcagttatgagtgcagccggatctcttgcttcaaaagatattattgaagtagataaagaagttgaagaggtaatttctttatctgatgtgggtttggaatttgttcaggataaacttccagaacgtaaaattcttgatgttttaattgaaaaaaaagaaatacatatgaaagatttgactgatatttctggccttgataaaaaagaatctaatattgctattggttggttacgccgtaaaaactgggctcaaattgataaaggtgttgttaaattaactgatgatggtattgcatttaaagataaactaggtgatgatgaagaattactgaatattttatctgagactaaaaacattataaaagaaaatttgtccggcgatttaattgacggatttaataaattaaatgaaagaaaaaatatcttaaacattaaaaaaaatacctcacattcttttaaacttttagataaaggtgaagcaatactcaaacagggattcactattcaaaaacaagctacccaattaacacaccaacaattaaaagatggggaatggaaaaacttacagtatcgtccttatgatattaatgctgaagcacctattgtttttgctggtaaaaaacatcctttaagggttattattgatgaaatcagagaaatcttcttaaacatgggattttctgaagataatggacaatatgtagaatcagctttttggaactttgattctcttttccaaccacaagatcatgcggctcgtgaaatgcaggatacattttacttaaaaaaccctttaacttgtgatttgccagatatggatttggtaaaacgcactgctgaaactcatgaaactggtgccggcacaggttctgttggctggcagtatgattggagtgaagatattgcacgtcaaagtgttttaagaactcatacaacaggaatttctacaaaacatttatttgaacatgagcctccaatcaaaatgttttctgtggggagagtgtttagaagggaaacttttgattataaacacttacctgagtttcaccaagttgaaggacttgtatgtgatgaaggaattagcttccaaaatcttcttggaactttaaaagaattttataagaaattaggttttgaagtaagattcagaccggcttatttcccttacacttatttatctactgaaaccgaaatttatttggaagaaaaagaaagttggattgaacttggaggggcggggatgtttaggccagaagtgctaaaacctttaggaatcaatcaaccagctttagctttcggtttaggtattgaaaggcttgcaatgattagatatgatgtggaagacattcgtatgctttataagagtgatattaaatggcttcgtgaattacctattgataggggagtcgaattataa

SEQ ID NO: 7447 - DNA, 774 bp, Methanobrevibacter gottschalkii
  source 1..774: mol_type = genomic DNA
atgtctataaagctagtttcttggaatgttaatggaattagggcactctcaaaaaaagaagaattttgggaatggtttgataatactgatgcagatattattaattttcaagaagtaaggtctacaaaagaacaaattccagaaaaattagcagatgttgaaggatttcataaatcatttaatgaagccgaaaagaaagggtacagtggtgttggaacttattctaagattgaacctgttgatgttgttaaaggtttaggtattgaagaacttgacggtgaaggaagggttttaagaatcgagtatcctaactttattttatataatatttatttcccaaacagcggcacgggagctaaaagactggattttaaagttgagttctgtaatgcattattaaaacagattgttgatctgaaaaataaaggtaaaaatgttgttgttactggagattataacattgctcacaatccaatagatgtttataaccctaaaaattgcgaaggaaaatcaggatatttgcctgaagaacgttcatggttggatgaacttgaaaacgcaggttttgttgatacattcaggatgtttgatgaaggggaaaataactttacctggtggagttatagaactcgtgctcgtgagagaaatgctggttggagacttgattatttttatgtaaatgaagaaataaaaggcaatgtaaaatcggctaaaattttaaatgaggtttttggttcagaccattgtcctgtgactttagagcttgatttctaa

SEQ ID NO: 7448 - DNA, 696 bp, Methanobrevibacter gottschalkii
  source 1..696: mol_type = genomic DNA
atgattaacaatgacaacgatcgtgtagttttttttgatatagatggtacattacttgatacatcaaattttgctgaaaccgctagaaaagcagccattggattaatggtagataatggcttgcctttagataaagatgaagcatacggtgttttaaaaacaattatccgtgaaaaaggatctaattacaataaacattttaacatattaacacaagttgtcttaggccatgaggatccaatgcttgtagcacttggaatggttacctaccacaatgttaaaatggcacttttaagaccttttgcagaaacaatcgacaccttaatttatcttaaaagtagaggataccgtctagctgttatttcaaacggcattaccattaaacaatgggaaaaacttgttaggcttaatgtctattcatttttcgatgcagtaattacctctgaagaagtgggtaaagaaaagcccgacaacttaatttatgatgttgcacttagaaaaatgagaggaaatcctgaaaaatctgttatgataggtaataaattaaaagaagatggattaggtgcagttaatgcaggaatgagtgcaattcttgtaaattctgatgtaaccgaagaagacagagaatttatcaagaaaaataaattagacattaaaattattgaaaatattggtgatgtggatacaatattataa

SEQ ID NO: 7449 - DNA, 684 bp, Methanobrevibacter gottschalkii
  source 1..684: mol_type = genomic DNA
ttggtcagtgagacaaaagaacaattagaacttgaagcagaaatcaaagagcaagctcaaatatttctaaaatatcttaattcaactcttccagagagtatggaacttgaatacgaaggattttacagaagaggatttttcgtaagtaaaaaaagatatgctgtaatcgaagatggggagattatagcaaaaggattagaattagttagaagagactgggcacctattgttaaaaaaacacaagaagcagttttaatggctattttaaaagaaggtgatgctgataaagcaatcaatgaagttaaaaaagtcttaaaaaatattaaaaaaggcaatgtggataaaaaagaaatgataattcacacacaaatcactaaacctcttgaccaatacaaacaagttggacctcatgtaatagctgcaagaaaaattgaagaacatgggattaaagtctcccgtggaactattatacagtatataattgttaaaggaaaaggttctatcagtcagcgtgcagtaccttacgaatacagtgagggttatacatatgataaaaattattatatcaacaatcagctaattccagctattgagagaatcatgtattcattcggatatacaaaaagagacttagaagacatggcaaaaggggaagtccagcaaagtttagatgcattcttctaa

SEQ ID NO: 7450 - DNA, 345 bp, Methanobrevibacter gottschalkii
  source 1..345: mol_type = genomic DNA
atgaaaaaaagattgatttcaagctatgatgagataaatgatatatttgttggaaaagttgatggtgaaaatggtttttatgcggactttgatatttcggatgggatatttcttggaattaacaaagataactgtccaaattcaatatatgtaagtgatgcatctcgtgtactgaatgtttcaaaacaaactttagaaaattcagatgttaaaataacagttagttgtgattcaacatgtttgtatttttcaatgtttattggaaacttacatatctgttcatataggtgtaaaaacatatttaaaattccattcattgactttgaaatggatagtaactattaa

SEQ ID NO: 7451 - DNA, 276 bp, Methanobrevibacter gottschalkii
  source 1..276: mol_type = genomic DNA
gtggataatccaaaaataaatgttaactcggaagatgaaatagtaattgtcgttcctaaagatgttgatgaagacgagttagtgattgatttagatgaattaggtattgatattgagcaattgggtgatgaagttaatattgtaattcaagttgaaggcgatgatgagttggaaagcgatttcatcactgatgaggattttatattggaaccaaatgaatggtattttgatgatgatccttatggtattgtatattatgaatttccagaagaatga

SEQ ID NO: 7452 - DNA, 231 bp, Methanobrevibacter gottschalkii
  source 1..231: mol_type = genomic DNA
atggataaagaaattccttattatgttttagatgaaaatggtcaaataggttcaatcaatgaaccttacattgatgatggtgatttaaaagaattattgttatcaattttgggggatgacattcctcaagaagagattcaaaagattttagatgcttcggccgatgaaaaattaactgaagatgaatttgataagttggtcgatgaatttattttaaaaaataagaagtaa

SEQ ID NO: 7453 - DNA, 375 bp, Methanobrevibacter gottschalkii
  source 1..375: mol_type = genomic DNA
atggcaatttctcaaggaaaatcaacaaggagtccttccggtgcaagaaatgttgcaaaccgtggaaaaagaaaatccgaattaggaagagacccagcagaaactaggttagatgcaaaaagattaagaaaaattagaactcgtggcggaaacgaaaaactcagattggctactggtaatagaatcaatgttactgatgcagatggtaaaaccaaggttttagatattctcaacgtagtagaaaacactgcaaaccctaactatgtaagaagaaacatcattaccaaaggtgcaattgtagaaactgctgaaggtaaggctaaagtaacatcaagacctggtcaggatggtgttattaacggaattttaatttaa

SEQ ID NO: 7454 - DNA, 1380 bp, Methanobrevibacter gottschalkii
  source 1..1380: mol_type = genomic DNA
atgaaactaaaaaaatcagattatattataataatatcttttatagcttcatttattgcagcattcatctcagcagcacctgcagttgcacttccccaactagcaaatgaatttaatttaaataatattatgcaaaattgggttgtgaatatatttttatttactgttgcaataactgccgtacctcttggaaaattctctggaaaaaatggaataaaaaaaacattaaaccttggattaattttgtttttaattggaacaataattactacatttgcaaattcttatataactttattaatttttagagcaatacaagcaattggtacagcaatgatttataatacacaaacaagtattgttgtattagctgtagaagaaaaaaataggggaaaagcattaggaataataatatctggcgtatacattggacttgcgattgcaccatttattagtggaatattaacttataattttggttggagaactatattttactttacaataccatttacattacttgcattattcttatcattatataaagtcaaagatgaatggaatatgtatgaagatgagagttatgataaatttggatctatattatatatgattggaatattcttctttatttatggatttacaatattaaatcaaacaaaaggtgtgatattcacagtaattggtatagttttattaattggatttgcagtaattgatttaaaaattaaaaatccaatattcgaccttaaattatttaaaaataaaagattttcatcttcaaatattgcatcattaataagttatattgcaacatttgtagtaacatatatacttaattaccatttccagtatattttaagtttaaattcacaaacaacaggcatattactggtagttacgccggttataatggcaataatatcgccattttcaggaaaattttcagataagattgattcacaaaaattagcagcaattggaatgggctttgtaactattgcagtatttatattaatatttttagattattcaacaccattatgggtaataattattgctatggcattacaaggtttgggttatggaatattttcatcaccaaatacaaacatgataatgagttcagttccgcaggaggaaacaccaagcgcatcagtatctattactgtaatgagagtaataggtcaaactatgagtcttgcaatgttgactataatattttcagtaataatgggtaatgtaccaataattccagaatactttagtttattaacaaaaagttctcaaacagcatgtataatatccacattattatgttttattgcagttatagcttcacttgtaggaattggtggaaaaaacgatttaactaattga

SEQ ID NO: 7455 - DNA, 1023 bp, Methanobrevibacter gottschalkii
  source 1..1023: mol_type = genomic DNA
atgtcagaagataagattagtatgaatcatggtgctggcggagaagtaatggctaatttaattgctagcacaattttagataatatcactaaaaaaagtgttaatggaggtattagtttagatgcattggatgatggtgcatcaatacctattggagaggattatgaacttgttttaacaactgacggtcacactattgatccattattcttcccaggaggagatattggtaggatttcagctgctggaacaataaatgatgtttcagtaatgggtgctcgtccattagcgatttcaaatgcaataattatgcaagagggatttccaattgaagatttggataggattatcaaatcattaaatgaagcttgtgaggaagtggatgttgctgtgattactggagatacaaaagtaatgcctcaggacaaacttgagggtattgtaatggttacaaccggtcttggaatagctaaaaaaggtgaagttgttcgtgattcaactttggaagtcggagacaagataattgtcaccggtagtctgggtgatcatggaatgagtttaatgtcttttagagaaggtttcggatttgaaactgatttaaaatctgatgttgctccaatgtggaatattattaaaaaagctttggagattggaggagttactgctatgaaagatccaacacgtggaggatttgcaaatgctattaatgaaatggcatcaaaatctggtgtaggggttgttcttgaacaagaagcgattccaatcaaagaagaagttcatgctgtatctgaaatgttaggtattgatccgtttgaagtagcaaatgaaggaaaagttgtcatgggtgttaaagccgataaggcagaagcaatccttgaagctattaaaaatgaaaaatacggtgagaatgcagctataattggtgaagtagttgaaggagactatgttgtagttaacactcctattggtggtgaaaggatacttgaagcacctattgcggatccggttcctagagtttgttaa

SEQ ID NO: 7456 - DNA, 396 bp, Methanobrevibacter gottschalkii
  source 1..396: mol_type = genomic DNA
atggtaagtatattttcaagaagaattattgcatattttgttgatttctttgtagtttcagctttcatgtggattgtatcttatttgttatcattagtaattggcactaataatcctatatatcattattttatatatttagttccaattttaataatgatttactttgttttatgtgaaaaaattgtcggggcttctgttggaaaatctttattgtacttgcaagtaagatcccaaaatggtgcacatatttcttggtctcaagctattgtacgcaatttaactaaaatttattggattccaataatttttgactggggtattggtaaagtattaaaaaaggacaggttatttaatagcattacaaaaactgttgttattgatgagcttaattaa

SEQ ID NO: 7457 - DNA, 450 bp, Methanobrevibacter gottschalkii
  source 1..450: mol_type = genomic DNA
atgaataaaaaatccatttcagtaattttactaattattttttcaataacaataatattcactactgcaaatatattaattaatgacaatactccactagaaaatcaagcgggaaccttaaaaatcaacaataaaaccatacactatgaaaaatccggaaaatgtttagaagtaattgatggaaatacaataaaagtttatggcatcggtaaagttcagcttacacaagttggaagtccaagtagtgaagctaaagactttgttgaaaataattgccttggaaaaacagtatatctggatattgatgataaaaaagtagaagatgaatatggtcgtgcattagctattgtttatacagacactgttgatgtcaataaagaattaattaacaataacttatctgaaatatcttactttacaccaagtgaatttaaaaaaggagatatttaa

SEQ ID NO: 7458 - DNA, 687 bp, Methanobrevibacter gottschalkii
  source 1..687: mol_type = genomic DNA
atggaacaaaaaaacattacacaatactcaattaattatgaaactaaacagcatccttcagtgaaaggtcttcagataattgaaggaaaaaacaatttccccattagttggttaaataaacaaggatattgcgaataccaactatatctggaacatgtaaaaaatataaaatcaccaacaacacctgaaatgacccatggaagtgaaattcacaagcaacttgaggatatattcaaacaagaatctgcacaagtcagctttgaagaagtgattgaatcatctaaaagtgaagcctcaatgtctagagaatgctttgtcatatctcccaaatatggaatcagaggacatattgatgaaatatggatgaaaccagaggaaattgtaataattgacgataaacctggaagaacaccttataaatctacaatgaatcaagtaagagcatattgccttgcatttaaagacatgtctggagatgatagaaaaattaaaggagcgcttcgtgaaagaggtactgaaaatctcttctggattgaaccattcacagaagatgttgaaaaagaaattaaattcacaattgatagaatacatggattatttaatggatccaaaccattcatgccaactaaaaatcctaaaaaatgtcattcatgcagatttaaacatgactgcgaacatgcacaatag

SEQ ID NO: 7459 - DNA, 861 bp, Methanobrevibacter gottschalkii
  source 1..861: mol_type = genomic DNA
atgcactatattaattcaaaaacaatactgtcaccaaaaaacggaatgaacctatatcgcggttgtactcatggttgcatatactgtgattctagaagtgacatatataatatgaatcatagatttgaggatgttgaagttaaaaagaatgctttagtgttacttaaaaatgaacttcttaaaagaccgcaatctatgattggaactggagcaatgactgatccatatatcccacttgaaaaacacttggaatatcttagaaaatctctgaatctaatttatagatatggttttggatttacatgcattacaaaatccgatttgattttaagagatttggatttacttaaaaaaatcaatgaaaaaacaaaagttgttgttcaaatgactttaactacctctgatgatgatttgtgcagaatattggagcctcatgtatgtaatacaacaagaagggttgaagttttaaagatacttcagaaacatggtattccaacagttgtttggttaactccaattttaccttatattaatgataatattgagaatattgaatccattttgaattattgtattgatgcgggtgttaaaggagtaatctgttttgaaatggggatgacattaagagagggggacagggagtactattataaaaaattagatgaatatttcccgggtcttaaagataaatatattgaagaatttggaaatagttactcaattccaagtccaaataataaacaattaatgtctatttttaatgaaaaaacagataaacatgatattttaaacaaacctgatgaagtatttgactatatttcttattttcctcaaaaatcagttcaatctagattaatctaa

SEQ ID NO: 7460 - DNA, 1284 bp, Methanobrevibacter gottschalkii
  source 1..1284: mol_type = genomic DNA
atgaattttaatgaattaaatatttctgataatattaaaaacggactaaaaggaatgggttttacaaaagcaactcccatccaagaacaatcaattcctgtaactttaaaaggaaaagatgtaatgggtcaggcacaaacaggttccggtaaaactgttgcatttgcaattccaattattgaaaagattttcattgatgataaatctcctcaagctattgtattatgtccaacaagagaactatgtatgcaggtagcagatgaaatttcgaaagtagcatcaaacattaaaaaacttaaaattttatctgtatatggtggccaaccaattggaagacagacaagagtccttaaaaaaggggttcatattgttgtcggaactcctgggcgagtaattgatcatattaataggggcaatcttgatttaaacggcattgaaagtgttgttttagatgaagctgatgaaatgctgaatatgggttttagagatgatatggaatttatattaaaaaacactcctaaaactagacaaacattactgttctcagccacaatgcctgatgaaattaaaaaaatagctagaaaataccaaagaaatcccaaatttattaaggttaaagcaaacaagaagaactctccaaaaataactcaatattcttttaaatgtaatgcgaaatataaattcgatgacatgacaaggttacttgatgtatttgatgttgaacttgctttaatattctgtaacactaaaaaaggtgttaattatgttgcaaaacacttaaaaaaaagaggatactctgttgacggtcttcatggggacatgactcaaaaaatgagagataaagtgatgaacaagtttagaaatgataatattgacattttggttgcaactgacgtggcagcacgaggactggatgttgataatttggatgttataattaattatgatgttcctcaaaaccctgaaaattatatccacagaattggaagaactgcaagagcaggtaaacttggttatgcttttactttagtatgcagggatgaaactaggagatttgcagctattaaaaaagctaataacactaaaattacagaaaaacagattccttcttataaggaagttgaaactattaaaaataaactgattttggataaagttataaactgtatagaacgtggagaattggaagacagttatattaattcaattaaagacagtatgaataaaaaaataaacgcacagcaattagctgcgggtttattgaagatggtaagagaaaattaa

SEQ ID NO: 7461 - DNA, 807 bp, Methanobrevibacter gottschalkii
  source 1..807: mol_type = genomic DNA
atgatgaaagcatttaaaaaaagaggtgcattaactcattttcagattttaagtgaaatctcaaaacaggaccctcacctcaaacaaaaagatttggctaataaattaggaattacaatacaagcagtttccgaaaacataaaaacattaattgaacaaggatacatcagttctaaagacggcagatcaccatataaaataactcaaaaaggtattgaaaaagttaaaaaagatgcaattagtcttagaaaatattcagatgcagttttagagactatgaaccattataaaactatttggccagctattgcaagagaagatctccaaaaagatgatatagtgggtttatttatggatgatggagtattatatgcccataaaaaagaagaaaatgcaacaggcattgttatggataatactaaagaaggaatggatgtggcattatcaaaccttacaggaactattgatgtaagtaatggtgaggtaactataattaatgttccaaccataaaagatggcggatccaaagcttctgatttagaattaattaaaaaagtttatgagaacggaacaaacagtggtgagccaatcgataaaattgcatgtgcaggtactgtttcacgcgccattatcaataaattagaattaccactagatattgaatatgctgctccaaatgcaactgcaaatgctgcacgtaaaggtttgaatgttcttgcaatctgtgttggtgatatgagtaaagcatttactcgtgagctcgaatctgaaaaaataaaatataatgttattgatggtaaaaaataa

SEQ ID NO: 7462 - DNA, 1407 bp, Methanobrevibacter gottschalkii
  source 1..1407: mol_type = genomic DNA
atgcaaataccacaattaatgcacgagcaatacaggcaagcaaaagaacttatcgaaaatgcggaagacattaaagtttattcccatatcgattgtgacggtatctgttcaggtgcaatcttatcaaccatactagataggcaaaataaggaatatgaaatagaatttgtgaatttagacgtgttggatgacattgaacttacccatgaacttacaatattttcagatttgggttcagggcaaaaaattgatgcaaaagctcaaaaaaatcagaaaatactcattttagaccaccaccctcctttaagggatttggactataaaaataacaaggattatacttatttagaaattaatcccaaccatcacggtatcgatggatcatactatgtttgtggtggaggattatgttattttcttgcaaaaagattcggatatgatgatttaagctggattggtgttttatctgcaattggagatatgcaaaatacaaaaacaggtcattttgaaggtttgaataaaatcatacaacaggatgcaattgatggaggataccttgaaataataaaaagcgacatcaacatttacggaaggaacacccgcccattatttgttgcactttcttattttagtgatgttaaacttccaatcaccaataataccaatgaaaccatggctattttagaggagttaggtattgatgaaaaacataacagaaaaactttaaatgagttaacaatggaggaaaaaggtaaacttttccaacgtctcatgtccatgcttacacaggccgttccaccgaaatatattcaatatttacctcaattaatcttaggggactcatatactttcttaaaagaggatgaacatagctttttaagagatggttctgaattttcaacagcaatgaatgcgtgtggaagaaatcatgaagagcagatagctatggaagttttgaaaggggacagatttgttgcacttgatgaacttgaagttgtaagtaaaattcatagaacaaaccttgctaaagggattagtagtgttgcagaaaatgatgaaacaaatatcatagaactcgaaaatttacaatactttgatggaaccggaattgctcctgaaattgttggaacaataacaggaatgattttaggatactgtaattggaaaaaaccaattattggttttacacaaacagatagtgacggtcttaaagtatctcttagatgttccagattactttcatatgatggaattcactttggaaatatcatacgagaagttgcaagtgatgttggaggatctggtggaggtcacgcaatggcttgtggagcttacatcccaattgataaaaaatatgaatttttagaagagtttaataatagattagatggaaaattaacaaaataa

SEQ ID NO: 7463 - DNA, 270 bp, Methanobrevibacter gottschalkii
  source 1..270: mol_type = genomic DNA
atgattactgtttggccacaatatttaaataaaaaattatccctcaatgaaggccgtaagatttcaaaagaggattgtgtaaaagatccgactataaatgacatagaaagggcattgaagagactgggacttaattatgaacttgaaaaagataaatcataccctggaaaatggtatgaaaaatccggaagagcactcgttgaatgggataaaagcaaattagaattaataaaagaaattagcttaaagattaaagaaattagaaactga

SEQ ID NO: 7464 - DNA, 1095 bp, Methanobrevibacter gottschalkii
  source 1..1095: mol_type = genomic DNA
atggccgattataaatatgtgattgtaggtgctggactttctggtttaacaattgctgagagaattgcaaatgaattaaatgaaaaagtattgataattgaaaaacgtgaccacatcggaggtaatgtttatgatttctacaaagacggcatactaattcagaaatatggacctcacatttatcatacaaattataaaaaagttcacgattacttatctaaatttactgaatggacagattatgtgcacaaagttttaagttatgttgatgataagctcgtaccaatgcccatttgtatagatacattaaataaattatatgatttagatttagatgaaaattcaatgaaagaatggattgaggaacacaaagaagacattgacgagataaaatcctctgaagatgttgtgctgaaaaatgctggtcgtgatatttacaataaattatttaaaaattatacagaaaaacaatgggggacatcagcagctaatttaagtccagcagtcatttcaagaattccattcagatttaatcatgatgacagatactttagtgacacttatcaaggaatgcctaaagaaggatttactaaaatgtgtgaaaacatggcaaaatcagacaatattcatattggccttaattccgactataaagattatattggtaaaattaattatgaaaaattagtctacacaggtccaatcgattacttttacgattacaaatatggggaattgttatacagatgcttaaattttgtatatgaagttttagatgaagattcatatcaggaagcaggtgttgtaaactatccaaatgacccgtattttacaaggataactgaatttaaaaaattaactcaacaaaaagttggtggaaaaactgctattatgagagaatatcccggattcaatggagaaaaatgttatccctaccctactcaggaatatctggataaattcaaattatacgaatcagaaatggaaaaagaagaaaatgtaatctttgcaggtagacttgcaaaatacaaatattacaatatggatttagttgttaaagatgcattagaaatttttgaaaatgaaattaaatag

SEQ ID NO: 7465 - DNA, 1104 bp, Methanobrevibacter gottschalkii
  source 1..1104: mol_type = genomic DNA
atgaatgataaaataagcattattttaccaatttttaatgttggtgaccatctcagaggaggaattgactcacttattaatcaaacaataggaaatgaaaatttggaaataataatggtcaatgattgttcaaccgatggatccgataaaatcatagatgaatatgcggaaaaatacgactgttgtattgcaatccatcatgaaaaaaacagtggtgcggcatacacaccacgtaacaccggcattgatgcttgtaccggggattatataatgtttttagatccggatgaccgatacacaccagatgcatgtgaaacattataccatgcagctaaaaaaaataatgcagatgttgcttttggtcgttttagaagaatatttgaatatggcggtaaagttcaaaaatcgttctcgccctacattgacactctagaaaatagctatccaaatgaaacttttgatactgcaaactttttagatgttccagatttcatttgggataattttgttgaaagatttctttatggcaaaaccttagaagtaacttatccaagggatgttccaattgacactatccatgttgagaatatcgagcaggaaccagatttattaaaaatggctcctgctgtctggagtaaaatctataaaagagagttgattacggataataacttacgattccagccatttgtttcaggtgatgatatggcattttcactcgaagcactattaaaagcaaagggaattgtgtttttaaacaatttcatgtgttataattactacatcagggatttgcctaatgataaatccattaccaatactgttaatgttagacttttatatgaattaatggaatcatacatttactgcagacaatgtactgaaggattttctaaagaagttcaaactgtctccataaatccacatttacttcattggactaattcttggaaaagctctccatttaccaaagaagaaaataaattgttacttagtgaagtaaataaacttaaaagcattcataatacagatttaaaaactaaaattttattaagctcaatttcaaccgcaattgaatctaaaattcaaattcaaaaggagtga

SEQ ID NO: 7466 - DNA, 771 bp, Methanobrevibacter gottschalkii
  source 1..771: mol_type = genomic DNA
atgtcgaaacccgttgttgcaataacaagacctgaagatagagcaaaaaaggcttgtgatattgtagaaaaattaggtggagaaccttttttagcaccaacacttgatttggaacctgtaaacagcaaatctttaaaagatttaattaaaagaaaggatgaacttgactggattatttttacatcccctacaaccatcgtttcactgaataaattttaccctgattttttaggaagtttaaattgtaaattagctgttattggaaataaaactggaaaacttgctgaagaaaacggacttaaagttgatttaattcctgaagattttacagcagaaggtttgattgaagagtttaaagaaaggaaaataacaaaccaaattattggaattcctagaactttatctgcaagaccagtcttaccagaagagttagaaaaaatgggaaatactgtgattctagcagaagcatataaatctttatttccaatggataaaaaagcggtaaaagaattaatttctaaaattgaaaacaaagaaattgatgcaattacatttacaagtccattaactgttgaaaacttctttaagataatagagaataaagaaaaaattgctaaactgctatctgacaacatacttaccgtttgtattggacctattactgcaaaagttttaaaaaaatataatattacttacattcaccctgatacttacacagttccagatatgatggaattgttatttaaaaaatggagagagcaaaatgaatga

SEQ ID NO: 7467 - DNA, 306 bp, Methanobrevibacter gottschalkii
  source 1..306: mol_type = genomic DNA
atgcatgataggattgagattgctcgtgagttcgcaaatgcaattaaatcagataaaatcattaaaattattttatttggttctgttgctcgcgaagacgatattgaagactctgatattgatattctgattatatctaatgaatgggagcaaattgattcattaataactgatgaagtcttcaaagttgtcctagacacacaagaacttatctctccacatatattgtctgaaaaacaatttgaggaaactaaaaatttcaatttcttaactaatgttttaaaggatggtgttgaaattggatga

SEQ ID NO: 7468 - DNA, 363 bp, Methanobrevibacter gottschalkii
  source 1..363: mol_type = genomic DNA
atggtgttgaaattggatgaatgtgaagcattcatcaaaaaagcaaaaagtaaattaacctccagtagagcattatacgaaatagggcaatatggggattctgttggaagatcatattatgcaatgtttctatcagcaaaagcattacttgttagagatggttatgatgtaagttcacataaatccttaattggtatttttggtagggattatgttaaaaagggagattttgacagtaatattgccaaatatctttcaggtacgcaatccttaagggataatgctgattatgatgctattgatgcaatttcaaaagaaattgcacatggtagaatcaaacaagctgaaagattcatagcctaa

SEQ ID NO: 7469 - DNA, 468 bp, Methanobrevibacter gottschalkii
  source 1..468: mol_type = genomic DNA
atgactaatgttttaattgcatatttctcagccagtggtgttaccaaaaatcttgctgaaaaaatagccaatgataatgattatgatatatttgaaattgttccagaagaaatctatactcctgaagaccttgactggaccaacaaacagtcaagatcaactattgaaatgaatgataaatcattcagacctccaatttctgaatcatgtgatgtaggtgaatatgagactgttgtaattggttttccggtatggtggtatactgcacctacaataattaacacattcatcgaaagtgttgatttaactggtaaaaaaattaaaatattttgcacttccggtggatctggggttgacaagtgtgtaaatgatttaaaagccacctatcctgaacttaattttacaaaaggtattcgattcactggtaatgtttcaaatgcaaaagaatggattgaacaggatttgtga

SEQ ID NO: 7470 - DNA, 969 bp, Methanobrevibacter gottschalkii
  source 1..969: mol_type = genomic DNA
atgttttcaaatataggtgttgttggtgcaggtgctatggggactgcaatttctcaaaccatctgtgataatactcaaaaagtttcactgtatgctagaagggaagaattagttgattcaataaatacaactcgttttaataaagattattttccaaatattcgtttaaaagataatataatagctactaatgatttaaatgatttgaaagatgcagaaataatctttttaacattgccttcttctacaataagggaagtttgttctcaattgaaatatattatttctcaagattgtgttttagtaaacactgctaaaggtcttgaaaagggttctcaaaaaaggatgagtgaagttatcatggaagaaactggtaggccagcttgtgtattatcaggaccaaatattgctgttgaaatggttgaaagaacattttcttcagcatctattgcatgtgaaaataaacagtaccttgaaaaagttgaaaaagcactatcaacttttagattcaaagtttcggccagttgtgatgttattggtgttgaatattgtggtgtaattaaaaatattattgcaatatcccagggaatctgtgaagggatgaaaataaatgacaatgcacgtttttctgtatttacaaagacttataatgaaactaaagatatgatagaaaaatttggtggtaataggaacactgttgatgattattgtggttttggggatattattactgcttctactttaaatgtaagtaggaaccatacattgggtgttttatatggtcaaagaattgtaattgatgagaaagcatcaggtgttctttttgaaggaaaaaatacaattgtaataatgaaaaaattatgtaaaaaacataatattgattgtgcaacagttgattttacttatgatgtaattatcaatagaattaatcctaaaaaagcatttgaaatattttgggataaattatag

SEQ ID NO: 7471 - DNA, 696 bp, Methanobrevibacter gottschalkii
  source 1..696: mol_type = genomic DNA
atgatttgtgcagcaatacttgctggtggtatagggagtagattaaaacaaggaaaacctaaacagtttgttaacattaataataagccaattttggttcattctgttgaaatatttttaagtgttgatgaattagataaaattattgtatcctctccaaaagaatgtgttgataaaacaaatgatttaatggatgaatatttccctaaaaatgataaaataattgttattgaaggtggagaaactcgtaatggcactatattaaattcaattcaatatatgaaaggtcaaaattgcgaaaaagattctattttagtaactcatgatgcatcaagaatatttgtgtctaaaaaattaattaaagatagtattaaatacgcaattgaagttggtgcagctagtgctgcaatacctgcaacagatgttatatttgaaacagaaatagatgggaagcttactggtgttccattaaggaaatatttatgtcatgcacaaactccacagtcatttaacattgataaatttttagatatttatgaagatttatcagaagaggaaatatctaaattagatgaagctatggtgcttttccatttaaggaatgccgatgtaaaattattccccggcgatcaaaataattttaaaataactcgtccttttgatattaaattagctgaatctatttttaaaaattaa

SEQ ID NO: 7472 - DNA, 1068 bp, Methanobrevibacter gottschalkii
  source 1..1068: mol_type = genomic DNA
atggacaattttaagtgtggaagtatggattttaagattagtgttattgcaccggtttataatgctgttgattctttagaaatagcaataaattctatcatcaatcaaacaattggttttaagaatattgaattaattttagttgatgataaatctaatgatggatctcaagacattattaaaaaatatgctgataaatatgaaaatgttattggaatatttctaaaggaaaattcaggacttccaggaaaaccaagatcacttggaattaaatatgcatcagcaccttacttaatgtttttagatgctgatgatgaatatctgcctaatgcttttgaactgctttataataccattgttaatgaaaaatctgattttgtaatgggttctcatttctggaatatgaatggggagagaatgaaaattaatattttacatgattgtaatgataaatcagatgtaattaatattaatccttttttaaatcaaagaaattttattttacttagttataatcatgttgcaccatggggtaaaatttttaacaaagagttaatattaaaaaataatatttcttttccagaagatacattggctgaagatacttatttttattttaaaactctaattaactcaaaaaaagttacattattgcctaatgattcattatatatgtataatgtatttgaaaataaagattctgtaattcatactcataacctatctaaatttaactattttttaaaaggttttgctaatgtgatggagttaattaaggatattccattttctaaagagcggattttaattagtaatatgggaagtttgttattaatattttcgaatttatctatgaaagaaaaaaaagaagctgtcccgaaaatttattattttgaaaaatcattagatgaagaagttgttcttaaaagaaaggaactcatattattaaataaattgattttaaaaaaacatttttatttagcaattattatttctgatatttactctattctgtataataatgaaaaaattaaaaatttgtatagaaaatggggtcataaggaatag

SEQ ID NO: 7473 - DNA, 999 bp, Methanobrevibacter gottschalkii
  source 1..999: mol_type = genomic DNA
atgaaaaccaaaaaagagagaatattttattacgattttttaagagcatttgcaattattgcagttattatttgccatgtggactatttttttggcccactaacaagtacaacacaaataattgttcaaatgacttttcatgatattggaagaattggtgtgccaatatttttaatgataagcggagcgcttctattaaatcgcgaatatcctgatttaagtcaatttttaaagaaaagatttgtaaggattatttacccatttatcttttggataatacttattttagctcaaatatattattatgggggcaatccaacatatctctggaaagtatttattggtgaaccctcaattacttggtatttttgggttttaattggaatttatttatttctaccaatactcaattcatttgtaaaagaatatggtgaaaaaggtttaaaatattttttagctatatggtttagcattataattttacaaacatttaatgtttatccattgtggactaaccttgatttaagctattttgctggttatgttggttatccagttttaggttactacttagaaaataaagaatttaaactaaataatgaaaaaatttgtattctaggagttatcactcttttaatttcattaagttgttttgtatacttaaattacataaatagtactgctatccattctatttatcagaatatcccaattgtatttatgggattaggtttattcatatctattaagtatgcagataaattaaacaaatttaaagcgataaaagataacttcattggcaaaagcattatttctttaagtatatgtagttatggaatgtacttttcacatgtaattgtaactaaatttttatcttattacaatccccattccaatctaatgtttccattaatgttcataatgataatttttttatcttggttaatgccttatattttaagcaaaattccttatgtaagaacatttagtggaatatga

SEQ ID NO: 7474 - DNA, 1083 bp, Methanobrevibacter gottschalkii
  source 1..1083: mol_type = genomic DNA
atgaatttaactgaactttattataaattacctaaaaaaattcgttattctgagagatttatattgttttgtatcaaattagctaaaccattccacaagaaaaaaacacatgaaaaggagattaattatacattaaattatttattcaagtcatctgatgttaaaattgaaggtactttaaggaatattcaattattgtatgctgaattattaagattcattgataatatatgtaaaaaatacaatttagattattgtttagcttatggaactttattgggtgctattcgtcatgatggttttattccatgggatgatgattgtgatatcatcatgattagaaatgattataataaattaatcgaggtattgccttccgaaatcaataaacacaaatttttaaaagaaaatattggtttaacaaaattagtcggttttagagaaaattattttaataatgttaaaactctttatgatgaagaattggggcatgatgtttattttcacgattataataaagcacctaaacaatttgatagtaagtataatgaaaagttaccgaatttatgtaaatcattatttttacagataggttggctaaaaccgatggttaggttagatatatttccatatgactatattgaagaaaaatccctaaatcattatgataaacattatcgtccggctaaagtgtcatttagaaatttctttgcagatgatgatttttcttatgaaaaagaatttaataagcattttgataaattaggcttaactcttgagaaaactaaatatgttggtgaaggtatagatggatctgatgaatatgtaggatcttatgattcaagcatgtttttcccagtaaaaacacataaatttgaaggatatgatcttaaatgcccaaataaatctgaagagttgcttaaaagatggtatggtgaaagttatatgagtatcccacaagctattgtaatgcacggatactcagagtataattctcgtttctttgattcaattgaagatatgaatgaatcatttaaacttgctataaatgaacttaaaaagattaatgacgaattcgagtag

SEQ ID NO: 7475 - DNA, 834 bp, Methanobrevibacter gottschalkii
  source 1..834: mol_type = genomic DNA
atgttcaggacaaaacgatacgatgatgagactctaaaacatttacaaaaagtccaaatgtgtattttaaagtatttcattaaactctgtgaagaaaatgatttaacttatttcatatatggcggaagcctacttggaaccataagacataaagggttcatcccatgggatgatgatattgacgtgataatgtttagagaagaatttgaaaaattaaataaaattatagagaaggatattgatgataaatacagatttatcaatgttttaaatgaagaaacataccattacacatggggcaggttaatgctaaaaaatactgtaataaatgaatggtgggcagatcaagttgattacactcaaaatatttttattgatgtattcattttagataatattccaaataatagcttcaaaagatttattcataaatgggttagtttttcacttaatcagttaaccatgtatgcattcattaaatatgacaatcagtcaaaattaaaaaaaatattacaacaaacaatacattatttaataaaaataatccctatttcagcatatggaattaaaaaaagatgtgtgaattcttatcgcaaataccaaaatgatgactgtgatgacatatgtgatttcccggcaatatgccaaatgccaatttatcataaaactgattggttacctccaaaaaaagcacaatttgaagatattgaagtaaatataccgaataattatgataaagttcttaccagaacatacggaaattatatggcattacccccagaagaatccaaatggagtccagcacctgacgagattgattttggcgaatattaa

SEQ ID NO: 7476 - DNA, 1308 bp, Methanobrevibacter gottschalkii
  source 1..1308: mol_type = genomic DNA
atgaaatctgataatccaattgtatatacttgtttctgtaccgatattattcatgatgggcatctaaatttaattaatgaagcaaaaaaatatggagatgttgttgtcggagttctttgcgactctgaaatggtcaaatataatagatttcccttaaaaacaactgaagaacgtattgaattagttaaagagattccggatataaaagatgtaattgttcaaaataaaattatgtatgatgatgtggtttctgaactcaaaccggattatattattcatggagataactggtctgaagaatctatgaaggttataaggagaaatattatttctgttcttgataagtatggggggaaattaatcgaagttccatatactttcaatgaaaaaatacaaaaagttgataggcaaatgagagaaaagttagcaatgcctgaactcagaagagccagattaagaaaattattaaacatgattcctgttgtaaaaacaattgaagtgcacagtggattaacaggtttaatagctgaaaaaactgttgttgctgacgatgaacacattgaccaatttgatgcaatgtggatttcaagcttatgtgacagtacagaaaaaggtaaacccgatattgaattagtggatatgacttcaagatttagaacaattaatgacattatggaagtcactacaaaaccaatcatatttgatggggatacagggggaatagcagaacattttgtttatactgtaagatctcttgaaagaatgggtgtttcagcagtgattattgaagataaaattggattaaagaaaaattcgttgtttggaaatgaagttaaacagacacaagatgaaattgatcatttctgtgaaaaaatttctgcaggtaaaaatgctcagttatctgaggatttcatgattatagcaagaattgaaagtcttattttagaacaaggtatggatgatgcacttaaaagggcatttgcatttcgtgatgctggtgcagatggcatcatgattcacagcagaagaaaagaaccagacgaaatcttagaattttgcgacaagtttagagcagaagataaagaaaccccaattgtagtggttccatcttcatataatacaattactgaagatgaattaaaagcgcatggagttaatattgtaatttatgcaaatcagttattaagagcagcgtttccatcaatgcaaaatgctgcaaaaagtattttaaaacatcatagggctcatgaaatagatgaaaagttattgtctattaaaaaaattattactttaatagatgaattgtaa

SEQ ID NO: 7477 - DNA, 732 bp, Methanobrevibacter gottschalkii
  source 1..732: mol_type = genomic DNA
atgtcaagatatgcaattttatcggatattcatggaaatctatttgctctaaaagaagtttttaaggatttaagtacacaaaaaaccgattatataattcttttaggggacttaattgattatgggatgcagtctaatgaagttgttgagttcatccgtgataatttatcttcaaaaataatctgtaatatctggggaaatcatgaaatggctattttgacaaaagattttaaacatttttcaagctcaagaggtgttgaatcagcaaaatttactgattctattttaactaacgattctaggagctatttaaacaatgaattggttaaagagggtaaattagattttgaaatatgtgaaaaacaagttttagcagttcatggatctttaacggattattattggaaagctatttttccagataatttaaatggaaattatattgattatgacattgttttatcaggccattcccattatcctcatgtttttcaaaagttttatgaagttgatgatccggacatgagaaataagaaatccgtattgtttattaatccgggatctgttggccagcctagaaatcataatcctaatgctcaatatgcaattttagacactgatttaatgaatatcgaattaaaatcagttaaataccctaaatatgatgctatggatttatatgatggtaatattgatgatttttatagaaaaagattaaaaaatggaatttaa

SEQ ID NO: 7478 - DNA, 1005 bp, Methanobrevibacter gottschalkii
  source 1..1005: mol_type = genomic DNA
atgaatatattatatattattagtggtgttactggaatgactggtaacgagttagttcgccagttgttaaatcagaatgaagatgaagtgaaaatcatcggcttcgataatttttatgcatcttcaattgatactgtaagcgattgtattaatgacggtcgttttgatttttatgaatatgacttaaacagtaatgatgatatggataaaattgaagcactggttttaagtattaaagatgatttcgatgaattagtatatattaactgtgcagctgttgttcataccgaacacttctataaagtttatgaaacttatcaaactaatgttgctagtatgaatgacttcttacaacaggctattcgtgtgggtgctgaaaaatacattaattgttccacatcagaagtttattccatgaattcatggaatgaagagggtggggttaaagaatctgatttcatcactatggctgatgcagaacacagtcaaagaactagttatgcaactggtaaattgttaacagagttttttatgaaagattctgtagataatggcaaaatcaagggatgttctattcgctttgccaatgtttacagtaaagatgaaaagtatccaaaacatattattccacatattattgatagctttaaaaacaagggtgaagttgttttacttgaaaattctaaaaagaattgcagaactttcttaaataattatgatagttgtagtgcagtaattgaattagctaaaactgattctgcacttgatggtacaatttataatgttgcaacagatgaagaaatttcaattattgatttggcaatattaattgctaaaaaaatgggaattgataaacctgttattaaatttgaaggttaccgtgaatctgatcctgaaagaagactattgtccactgaaaaaattataaccagaactaactggaaaccaattattgacttggataaaggattggatgaatgtattgagaactacactaaaaattag

SEQ ID NO: 7479 - DNA, 771 bp, Methanobrevibacter gottschalkii
  source 1..771: mol_type = genomic DNA
ttgaaaatttccattattactgttgctggtgtttccagcaggttcaataaagatatttctgaagaagaaaagatgttaaaatgcatatattatgaagaaaatcctaaagacactttaatttataaaatgattaataaattatcatattgtgataaaatagttgttgttggaggatacaaatactctgatttaactgaatatgtcaataaagaaattcctatagagttacaggaaaaaatcatgcttgttgaaaacgaccgttatgctgatctaagctcaggttacagtttatacttaggaatcaaagaatctttaaataattttgatggtattgaggaattactttttgtagaaggtgatttggacattgattcagaatcattaacaaaggtaatcgattctgataaaaatgttttaacattcaatagagaaccaattttttcaaataaatctgttgttttatatcaaaatgaaaatgatgaataccattacttatttaacagtaatcatggaatgttaatcttaaatgaaccatttaaagctatttttaattcaggtcaaacttggaaatttagagatattgaattacttaaaatagctaatgattatttttatgaaaattgtatagatgatactaatttgggcattatccaaaaatattttgattcagttgaaaataaagatactattgagattatcggattggaacattgggttaattgtaatactcgtgctgattatcaatatataaaagaatactgggggaaataa

SEQ ID NO: 7480 - DNA, 1182 bp, Methanobrevibacter gottschalkii
  source 1..1182: mol_type = genomic DNA
atgaaaaatttagatgaaaggttaaaaatagtagaaaaacatgtaaaagatgatgaaattacaataatgattattggtttaggtagtgttggaacatatttgcttgactttttagtaagtaaaaatgatgctgcgataaaattagtagttgttggaagaaatcaggaaaaaatgcaatctgatgttaatattgtccgtgttgcaggtcttattcgtgaagttaacaaatctcaaattgtagttgaagcaggtgttgacttaaacgatattgattcaattcaaaaagcaatcagtaaacataatcctgattttattgttaattcaagcagagcatatcctggtcttaaatatggaagtatatcttggagtaatgtaagggcttacggtatttggactcctttgtcaattaaatttactaaaaatattatggaagcatgtgaaaatgttgacactgatgcagttgtcattaacacttcatactctgatgcagttattccatggcttaaaagtgctgaaaaagcatatcctgactttggaagtggaaatttaaatcacttaattcctagaatgaaatttgcagtagcaaatattttaggggtggatgatttctggaatgttgactttaattttgcagcagctcatttccatgatgtatgtattagtaaagaaggacaaaccgaaggtgtggacttgcctctcaagatatactacaaaggcgatgaacaagacattcctcatgatgaaatttataatgcatgttcaattagtatgcccgttgatcaaaaaaggaatatgatgaatgcttctagtaattatcgtattatttcagcaataattgatgcaatacgcaccggtgagaatcaaaaaatattttctccaggagcgtttggtcatattggaggatatcctgtaattattggttataaagagggtaaaatttctgcttggattgatgaatctgtatttacatttgatgaaatggataaagcaaatcgtaaatcccttgctttagatggtgtggaagatattcttgatgcaaccttaatctacactgatgatttaattaaaaaagttgaaaaagcatttggtgaagatttaccgaaaaaagtaaaatatgatgaaattgaaaaaaccgctgaatttctcattgaaaagataatcactccacaattaaataaatag

SEQ ID NO: 7481 - DNA, 1119 bp, Methanobrevibacter gottschalkii
  source 1..1119: mol_type = genomic DNA
atgaaagttgaagattttgttgatgttttggattgtgaattttatactggtgttccggattcacaattaaaagcattatgtaattatttgataaatgaatatggcattgatgaaaagcatcatttaatcgcagctaatgaaggtaattgcaccgctcttgctgcaggttatcatttagcaactggaaaagttccagtcgtttatatgcaaaatagtggtgaaggaaatattatcaatcctgttgcatcacttttaaatgatcaagtttatgcaattccagctatttttgtcatcggatggaggggacaacctggaattcatgatgaacctcaacatatttatcaaggaaaaattacttgtgatttgcttgatttaatggatattgagaactttacagtcagtccggaaacttctgttgatgaactgaatgatgtaatgattaaatttaataatgttttaaaatcaggtaaaagtgttgcatttgttattcttaaaaatgctttaacttatgatgggaaaactatttatgaaaatgataatgaactaattcgtgaagaaattatagaacacattgttaatgtatctgatagtgatccaattgtatcaacaacgggtaaagcaagccgtgagctatttgaaataagggaatctaaaaatcaagctcataaacatgattttttaacagttggttcaatggggcattcttcttctattgctctagggattgcaataaataagccggataaacgtgtttggtgtattgacggtgatggagctttattaatgcatatgggatcaatgccggttgttggaaatgttaatcctgataatttaattcatattgtaataaataatggtgctcatgaaaccgttggtggaatgccaactgcagcggcaggtactgatttagttgctattgcaaaagcttgtggttattcttatgcagtttctgtggataatattgatgatttggatgaagaacttattaaagtaaaaaatatgggtaatttatgctttattgaagtattatcttcaattggttcacgtgctgatcttggaaggccgactacaacagcattagaaaacaaaaaaagctttatgaactttttaaatcaatga

SEQ ID NO: 7482 - DNA, 843 bp, Methanobrevibacter gottschalkii
  source 1..843: mol_type = genomic DNA
ttgaaatataatgaatatgatgataaaacattaaaacatctgcaaagtttggaattaatgattttaaaggatttcattaaaatttgtgaggaaaataatcttacatattacatgtatgctggttcccttttaggaaccattaggcataacgggtttattccttgggatgatgatctggatgtaatcatgtttcgtgatgattttgaaaaattcaaaaaaatttttatttcatctcaaagtgataagtatgaattattgtccaatgaaactgaaaaagattattttcatttgctttcaaaattaatgcttaaaaatactaaatttgaggaagactgggttaatcaggttgattttcatattggaataaatatggatatttttgttttagatgatttggctaatggcaaattcaaaaggaattatcaacttaaaaaatcatttttatataataaactgctgattatgtctaaaataaaattaaatgatttgcctttttctacaaaagtaataactcatgcatgttaccatattttaaatttatttggaattaaaccatcaaaaataaataaaagatgtttaaattttttaaataaatataaaaatcctgatgccgaatttgtatttgatatatctgctaatgcagatgaataccctcaaatatttcgtagggatgattttaaatctataataaaagttaaatttgaagatattgaagttaatgtgcctgttaactatgatcatattttaaaaagtttgtatggggattatatgagtttacctccaaaagaggacagatataatcatattacagaaaccttggattttggtccatatgaactataa

SEQ ID NO: 7483 - DNA, 1488 bp, Methanobrevibacter gottschalkii
  source 1..1488: mol_type = genomic DNA
atgtcagataaaaacgaatggggcagcaacatgtcattcatccttgcaatgataggttctgctgttggacttggaaacatttggagatatccttacgtactttattctaacggtgggggtgcattttacatcccttatattgtagcaattctcttaatgggaattcctttcttgatcttggaatatggtgttggatataattataaatcttcatttgcaaaagcaatcagaaagattaatgccaaatgggagtatttaggctggtttttaccagttgctgtatttatgattatgatttattactctgctattttaggctgggatggaatctacatggttttgagtttctttaaaggttggggagcagatccgaacacttactttgcaactactctcttacaatctagtgattccatgaatggattattcactttcattccggttattgctattgcaatgcttgcaggctgggtaattatttggtttatttcacataaagaccttgaatctggtttaggtaaggtatcaaaaatattggtgccgttattgttcttaatcatggttgttattgtagtattttcacttacattgcctggatcttcaattggtcttgctgagctatttaatccggactggtcacttttaactcactttgaaatatggatggctgcattcggacagattgtattttcattaagtttgggcatgtctattgcatttacatatgcaagttatacaaaagacggttccgatttaattacaaatacaatttctattgcacttgcaaattccatatttgaaaattttgcagcattaggagtattttcaattttaggttatatgtccctgcaatccggaactgcagttgcagaccttgtaactcaaggtactggtcttgtatttatagcatatccaactgtatttaatgtattgggtgattgggcattagtacttggaccgttattctttttaacagtttatcttgccggtcttacaagtattttatctacaattgaaccattgtctttttcaattcaaaacaaattcggtctaacaagatccaggacaatgacaatattgtgtgttgttggtgctgttgtatcgatgctttatgcaactgcttacggcggatccttacttggatatgtggatacatttattaaccagatagcattattaatcggggttgtagctgaatgtattgtatttgcttggatatttgaagctgaaaaattaattgatttcttaaatgcgagaagtaaaacaattaaacttggtaaatggtggttgggtattgttaaatacatattacctatttttgtaactgttatttggattggtggtatggttgatgtagtcaacaatggtacaatggatcaattaatatttacaataatttcagccgctgttttattaattgctactttgatctttactgttcttcctgctaaaactcctgaatgggataatgctgaagacagagtatag

SEQ ID NO: 7484 - DNA, 369 bp, Methanobrevibacter gottschalkii
  source 1..369: mol_type = genomic DNA
atgaaaaactatgttataatcttgattggtgtaattatcgcattggtgattgttggtggtgctattgcatacacttctatgcatgatgacactagtgataacaacaataccactataaaatcttgcatcccgaatataacaaatgcaacaaatgatgctccaaatgcaacaggtgatgataaaaataccacttcatccgaaccttatgttgtaagtgaagttgttaaatttaatgcacagcaaggtgaaggatattaccgtgaagtaacatatagtgatggtaatttccgtcaatatgatgttgatactggtaaattaataggttcttcatatgattcggatcaagataaactcccaagcatggaatga

SEQ ID NO: 7485 - DNA, 285 bp, Methanobrevibacter gottschalkii
  source 1..285: mol_type = genomic DNA
atgatttttagtgaattattaaaacatttcaatatcaaagaggagtttccaccttatcttcttgatcaatcctttaatgaagttttccttgatggagagttgtttagaattgataaaaactataaaatagtagttaaaacacgtcaggatgttgttcataaaatgtttataaaaccggatgatatgtatcctgtaattatattgtcaaagcttccaaatggccttttaaatggtatgaaatttgggcatgctaaagatgatgtaatttatattaataaattataa

SEQ ID NO: 7486 - DNA, 729 bp, Methanobrevibacter gottschalkii
  source 1..729: mol_type = genomic DNA
atgaacaaaaaagagttaattaatagcggtaaagtaaaaagtgtattcaacacagataatgatgatgaagtaatcattgagtttagggatgacatgactgctggtgacggtgcaagaaaagaaataatggcaaataaaggagcttataatgctgtgatatcttctaaaatatttagagtattggaggaaaatggtgttgcaactcaatttattgaccttcctgaaccaaatgtcatggttgcaaaaaaacttgaaatgattcctattgaagttattgtaagaaacattgcaactggcagtttagtgcgtaaatatccaattgaagatggcactaaattaaatccaccaattgttcaaatggatttcaaagatgatgaatatcatgatcctatgctcaatgattcaattatcaaagcattaggaatagctactcaagaagaaatagatattttaactgaaaaagcattgagaatcaatgaaattttaactaaattctttgctgattcaggaattattttagttgactataaagtcgaattcggtaaggataaagatggaaacattcttttaggtgatgagatatctcctgatggatgcagattatgggatagtgaaacattggacatgttagataaagaattatttagaaaaggaaaagatgatgaagttatgactgcttatatggaagtttataatagaatcatgccggaagacgaaaaggtgatttaa

SEQ ID NO: 7487 - DNA, 267 bp, Methanobrevibacter gottschalkii
  source 1..267: mol_type = genomic DNA
atgttatttgatattgaagttaaaatctcacttaaaaggggaatgctgaacccagaagctactacaattgaaagatctctagatttacttggttataaagttaaaaatgtaaaaactgatgaaatcattaaattccaaatggaaggtgaagatagggaagtaatcagatcaaatgtaactgatatgtgtgaaagattactttgtaatcctgtaattcatgattataagattaatgttattccacaaaacatggcttgcggtaaataa

SEQ ID NO: 7488 - DNA, 645 bp, Methanobrevibacter gottschalkii
  source 1..645: mol_type = genomic DNA
atgaaaattggagtaattagatttccaggaaccaattgtgaccgggatgttgcaaaagcctgcgagcttgcaggtcttgaaccggaatatgtttggtggagtgaagaaaaactgactgactttgatggtattgtaattcctggcggattttcttatggggatttcttaagagccggtgcaatggcttccattacaccagtaatcgatggaataaaagaattagtaaaagaagaaaaaccagttcttggaatttgtaatggtgctcaaattttaggcgaaatcggtctcattcctggaatttttattacaaacgaaaaccctaaattcaattgtgaatggtctaaattaaaagttgcaactaacagaactccatttacaaaagcatttaaaaaagaccaaattattgaccttccgattgcacatgcagaaggaagattttacacaaaagatgttgatttactaaaagatcaggatcagattgttttgcaatttgaaggtaaaaaccctaatggttctattgaagcaattacaagtgtatgtgatgaatcaggtttggttgttgctatgatgccgcatcctgaaagagcttgcgaatcaatattcggttctgatgatggtctaaacttctttaaaggatttttataa

SEQ ID NO: 7489 - DNA, 720 bp, Methanobrevibacter gottschalkii
  source 1..720: mol_type = genomic DNA
atggtagtttatttaattggtgcgggacctggagatgctgatttaataactcttaaagcggtcaaagctttaaataaagcagatgttgttttatatgattatttggctaatgaagaaatattagctcatgctccggaaacttcacagagaatttatgtgggtaaaaaagcaggtgagcattacaaaactcaggatgaaataaatgatttaattataaagcaggctcggaataatgaaaatgtagttagacttaaaggaggagatccttttgtctttggtcgtggaggagaagaaatattggctttaatggaacatgatatcaaatttgaagttattccaggtgtaacttcagctattggagcaccaacttctcttggactgccagtaactcataggggtgttgcaacatcactcacgattgtaactggtcatgaagatcctacaaaaccggaaagtcaagttcattgggattatactgcagacactttaattattttaatgggtattggtaatattcgtgaaaacacagctgaaatcatgaaatatcgttcagccgatactccagtttgtgcaattgaaagcgggacattggctaatcagaatttagtattcggtactttaggcgatatttcaaataaaaaaataaatactccggctattttggtaattggtgatgttgtaagcatgtataaggatatctataattatcagggtgattag

SEQ ID NO: 7490 - DNA, 1788 bp, Methanobrevibacter gottschalkii
  source 1..1788: mol_type = genomic DNA
atgtgtggaattgttggttgtattttaaaaaatgatgatgatgtagctccaattctttttgattgtatttctaaattggaatacaggggatatgattcaataggtcttgccacttacagtgaagataagattcacattaaaaaagacaaaggtaaaatcaaggaagttgataataaattaaacctatctgatatgcctggaaattatggtattgctcatgtgagatgggcaacacatggcgatccttccaaattaaattcacatcctcatgttgatgaaagaagagatgtggctgttgttcataatggtattattgaaaattacttggaaattaaagaaaagttaataagtgaaggtcatgtattcaaatctgatactgatactgaagttattcctcatttaattgagaaattcacaaatgaaggttttgaccttgaacatgcagttaggaaaactgttgatattatacatgggacttatgcaattgcagcaatatctattaatgaacctgataaaattgttgcaacccgtaaggattctccattaattgttggaatcgggggggaaggatattaccttgcatccgactctccagctattttaaaatatgctcgcgacattatttatcctgaacagggggaaatagtcattcttgataaaaatggtgtcgttgttcatgatgaatttgataatccagtcagcaaagaaattgaaacaattaactggacacctgaaatggctgaaaaagagggttataatcacttcatgattaaggaaatcaatgaacaagcaacttcggttagaaatactttaactcaaagggaacatattcaggaaattattgatgatattgatgagggcattcaaagaatatgctttgtagcatgcggaacatcatatcatgcatcgttaactggaaaatatttaatagaatctcttgcaggcattccaacagatgttattctggcttccgagtttaaatattccgccaatacattaaatgataaaactttagttatatttatttcacagtccggtgaaactgctgattcacttaaggccctggatgtggcaaatgaaacttcaaaaactttaggtattgttaatgtagcaggttcttcaattacaagaagggcggaatatgtaattcaaactcaggcaggtccggaaattggagttgcagcgacaaaaacttatgtggcccaacttacttcaatttatttatttgctgcactgcttgccaaaaatacagaattgcttgaagaacttgaaaaagttccggatttcattgatgaggctcttgaagatattgattttatcaaagaaatttcaaaaagatataattatgctcgtgacttcttctacttgggaagaggttattcatatcccactgctcttgaaggagctttgaaacttaaggagattacttatattcatggtgaaggctatgctgcgggggaacttaaacatggtcctttagccttgattgatgaaggcattcctgttgttgttattgcgccaccgggagattctcacaggaaaacaatgagtaacttagaagaagttaaatccagaggagctaatgtactggctattggttcggctgatgatgatgcactaaaaactaaagcagatgatattattacaattaatccggaagtaaatgagataatcgcacctttagtttatgttgttcctcttcagctgattgcatattatattactcttgaaaaagggcatgaccctgataaacctaaaaatctagcaaaatgtgtgactgttgaataa

SEQ ID NO: 7491 - DNA, 1896 bp, Methanobrevibacter gottschalkii
  source 1..1896: mol_type = genomic DNA
atgtttaataagaaaattagtttaattttattaacattagtttttatgttatcaatttctgcagctgttgcaactgatacaaattctactgatgatgtaatttctagtgatgaggaggctgaacctccatcggttgtatctcaggacatatctataaatgaaggaaatgattcaaaccctcaggaaaattatactttgaagggcagcgatgtaagtatgtattataactcaggatctggttatgaagcatcattatctgatggaaatgattctgtggaaaatgcaactattaatttaaacattaatggtgtagattataataaaagcactgatgcatcaggtaaagtttttttaatcataaatttaaaaccgggcgattatgtaatcacagctagctacggtaatttaactacagaaaataagattaatgtattgccggttataactggaaatgatgtttcaacaacttataaacattcagtaccatattcagctacatttttaaaaagtgatggtagcccattatccaatacctatgtcaaatttaaattaaatggcaaaacatattccaagaaaacaaattctaaaggaatagctaaattatatgtcggttcaaaaatcggaacttataatatttatgcaatgcatcctaatggatacagcatttcaaataaaataactgtaaaaaattcaatcatatcaagcaatctgaaaaaacattataggagctcaaaaacttttaaagcaacattttatggtaaaaatggtaaattattaactggtaaaaccattaaattctacactaaaggatcttatttctataaaaaaactaattccaaaggtgtggcttatattaaagtaatttcaaaacctggaacctataagattacttcaattaacacaaataccggtgagaagaaatccaatacaattactgtgttatcaacactggaagcgaaatcaatgacagttttcaccggcaccacttcaaaatttaaagtgaaactttataaaggtgaaaacattgctaaaaacactaaaatgacagtttatgttgacggtgttaaaaaaagagtaactacaaactcaaatggtgttgcaaccgttaagttcaaattagataaagggatttataacatcaaatcggtagatccttttacaggctatgttttaaataaaaaagtaactgtaaaactggcttctatcagtgctattaatgtcaatgcaattgaaggcaaggaagggttattccctgccaagcttttacagcagaatggtaaggtagctagtggtacttatatggagatgactattgatggtgtaaaacataaagtcaaaactgattcaagaggtattgcaggttataagttcacatttaaggatgctggtgtgcatactgtagtttgtaaagatttatctacaggctataaggtaaccaaaaagattaatgttgtaaaaaagggtgaaggtaaatcttatgatcagtttggtgtttcagaagatggcaaaacaatgcttgtgattggcaggccatctgcttctggtgaaacagctaagtatggttatacatattataaaactgaagtggatagaacctgtccgatctgcgggagcaatgaactttactggagcatcttttgggcttccggtaatactgatggcggaactttcccagaaacacctagccgtccggcccattatgatgagggcaatttagatggcatcattatttgcatgcattacactggagatgatgagtattgtgatgccgactggtctgttttcgggcataatcatgatggtagcggtagggatttaaagcttgtatcaaaaccagtcagatcatcagaaatagaagcatatctgcttaaaagcggatattatgttaaagtataa

SEQ ID NO: 7492 - DNA, 1227 bp, Methanobrevibacter gottschalkii
  source 1..1227: mol_type = genomic DNA
atgagttatgaaaatagtgctaggataattaatgatgatatttttgatttagtgaatgaatgtttcggtcaggaaaaaactagtcaaaataatgaaagcagacttaatttttttgatacttacaagaattactttgttttaaccgatgatggatcttattctattaattcaaaagaaataaatcataaagttgaaacattacatacatctacaggtgcaataagtgagtcattcgagaaatttataaaaccgatgaaatttgattacacaaaagatattgcaattttagacatttgtgcaggattaggctacaattcatcagcagccattgctgattttattaaaaatagctttgattcaaatttaaaagtagacatggttgaaatttcaaaagcaacatttgcctgtggtcttttagttccatccccaataccggaacatgacattacaaaaaaagctattgaagacgaattaatcagattagattatgcaactttaagtttagaagaatgtgaaattccggaaaatattgatattaatgtgtttgttgaagatgcaaggcagactgttcagaatcttgaggacaatacatatgatgcgatattcctagatccgttcagtcagaatatgactccagaactattttcacttgagtttttcaaagaatttaaaagaataataaaagacaatggcattgttgcaacatatacctcatcagcaccagtaagagctgcttttattgaagctggcttctatatcggtcttggtccgatttttggaagaaaacaggggggaacacttgcaagcccgaatcctgaaatgcttgattattcacttcccaaaaatgatgaaataagaattgcactttcagatgttggaataccatttagagatccggatttgaataaatccagtgactttattttaagtgaaagatctgaagaaaggcacaatgcacgtcataatactaaaatttcatctgccgttaaaacaccaatatttctgggggatgcaatggaaaatgatgaaaaattaaaaagacgtgttgaaagaaaccttattaaaatgaatattccgtcaacaacctcccccgaagcattctacatcattgaatgtgaaaaaaaatactcagaaaagcaagacagagaaaacaattcaacagccagaatattggatatgaaaaaaagattagaaaaagttaaagatggagattatactttaacataa

SEQ ID NO: 7493 - DNA, 1977 bp, Methanobrevibacter gottschalkii
  source 1..1977: mol_type = genomic DNA
atgtttgaaattaaagcaaaagataatatgggtcgtgttggagttttaaaaactaaacacggtaatgtaaagactcctgcattaatgccggttattcatcctagaaaacaggcaattgatgttgggaaatatggtgctgatatcgttattactaacgcttatctgatctacaaagatgaagaattgaaacaaaaggcaattgatgaaggactgcataaattaattaactttgatggtccaataatgactgattcgggatcatttcagttatctgtttatggtgatgtggaaataacaaacagggaagtgattgaatttcaggaatcaattaaaaccgatattggaacaagccttgatattccaacagctccttttgttgacagggaaaaggcggaaagtgatttaaaaatcacattagaacgtgcaaaggaagcagttgaatttaaaaaagaaaataatattgaaatgttattgaattctgttgttcagggatccacttatcttgatttaaggcaagactgtgcccgccaactctcaaaactcgatgctgatttatatcctattggtgcggtagttcctttaatggaatcttaccattacaaagatttggtggatgttgtaatgaattccatgaaagaattgtccgacagtgttccccgtcacttgatgggtgcgggacatcctatgatttttgcattatgtgcagcaatgggatgcgatttattcgattcggcagcttacatcttgtatgcagaagatgatagattcttaacaactagaggaacttacaagcttgagaacttacatgaaatgccatgctcatgtgaagtctgcactaaatacactccagatgacctgagggcaatgcctaaaaaacaaagaagagatttaattgctcagcacaatttgcatgtttcttttgcagaattaagacgtatcagacaagctatttatgaaggcagtttaatggaacttgtagaggaacgctgtcgtgctcaccccgcacttctggatgcagtaagacaacttggaatgtatgcctgtgatctggaaaaatatgatccgagaagcaaaaaatccgcatttttctacacaggacctgaatcattgggaagatctgaagtattaaggcacattcaaaaactaatggcaatgcctaaaaagagggatttaattttacttcccccatcaagaaagccatattctaaattcatttcaggtaaactcggtgacttttacagatacggcgaagaacatgatattgatttggataatgctgactttatggttgttgatgttccattcggtttgatacctcttgaagttgatgaggtttatccgttaagtcaaaattcaactccaaaaatacgtgatgtagatgcagttgagtttttacaggaatttgttgatgaattctctggatattatgaacaggtattaatacattcaagagttcttaaggatttagaaatagaaggggaaaataatcttgttgatgcagaaatcagatacgcaaaagatgatgttaaaaaaataaaggctattgcagactatcagtttggtgtgggtgcgggtgaagcattatttgatggcaacattaacattgagaaaagtaaaaaaacaggtaaaataagacacatttatgatggtaaaacattaattgtcaatatgagggcatctgattcctttttggttttatcaaaagaaggtgcaagaagacttcatgctgcaatgccgtctttaagtaacagggttgttgtaaataaagattcagaaccatttgcacttgatggcaaaagcgtattctgtaaattcgtcgttgactgtgatgataatatacggtctaatgatgaagttttgattgtaaatgaagaagatgaattgcttgcttatggtaaagcattgcttggagcctgtgaaattaaggaattaaaaactggtcaagctattaaaacacgtaaaggtatgaaaaagtga

SEQ ID NO: 7494 - DNA, 669 bp, Methanobrevibacter gottschalkii
  source 1..669: mol_type = genomic DNA
atggttgataatgataaagtaaatactggtcacaatattgaagataaagaacttattaaaaatgcaagaaaacctgttggtgagctgggacatcagatattggacaggatgaataaatctcacgaatccatggcgcagtggggagtaagtcactttgaagtaaaagaggatagtaaaatattggatatcggctgtggcggcggaaagaacattgaaagatttgcaaaacaaatttctcaaaacggaagagttgtaggtattgattactctgaagtaagtgttgaaaaatccgctaaattaaaccaaaaattcatagatgggggaattgttaatgttcttcagggatctgtttctgacatgccgtttcacgatgaaacttttgatattgtaactggttttgaaaccatttatttctggcctgattttataaatgacttaaaagaagtgaacagggttcttaaaaatgatggtattgtatttttctgtaatgaagcagtatatagggaaggtgaaatggaaaaatacgatgatttggttgaacttttggacatgaaaatctattcggaagaagttttaagaaattcattggaaaaaactggttttaaagactttaaagcttatttaaatgatgaaaacgattggatttgtgtgactgctagaaaaatttaa

SEQ ID NO: 7495 - DNA, 1428 bp, Methanobrevibacter gottschalkii
  source 1..1428: mol_type = genomic DNA
atggctaatcaggtaaaaacaatatttgcaaacatgagtttcatgctagtctcacagattattgctagtgtctgtgcttttgtttggacaattgttactgcttggtatttgggtccgtctgattacggagtatttggtgcagcagtatcttttgcagcactttttggtattgtaattgattttggactctcgacttatgttgtaagggcaatttctacggattttgctaatgaacataaatatctggataatgcaatttctcttaaactgtttttatccgtattttatgtaattgcagtatacttatcggtattggtcatgggttggcagcctaaattggtgttagcttgcgtattccttgcttttgaaaatgttataaaatcttatcatgctattttatttacttcattccaagcacatgagaaaatgaaatatcaggccgttaccaatactgtcatcaatgtattcacactgatatttatattgttggttgcatgtactgattatgcattagttggaattttaatggcatatattgttgcaaatgcattgggtttgttttatgaagtttatgcacttagaaaacacattattaaaccgaaattgtcgtttgattttagtttttacaaggcattattaaaagcaggacttccttttgctctaaccggtcttttttatacagtttattattcaatagatcttgtcatgattacacagttttcaactacttatgcaacaggactttataattcagcatataagttaataacagttttaaccttattctatacaatctatacctctgttattttcccggtaatgagtaaattgttcacagatgagaaggatttattgaatttaagttttgtaaagtcaattaaatatctgatgctggtcactattcctattgcagtatttacttcattttactcatatcagattattgcaatttatggggcggaatatattgaagccggtggtgttttacagatactgatttggacagtatgcttcttgtttgttaatggtgcgtgttcattggtattgaatgcatcacaccaggaatattcagttacaaagatttatacaatcgccgcattatttaatgttgttttaaatttagcattgattccgaagtattccgtttacggcgcttcggttgcaacagttttaagtgaaattttaattttggtcttggaactgtacatgcttggaaaaatcaaccagcttccggacaggcacttaattcatgatattttaaggattattttcgcatctttggtcatgggcactgttttatatgttcttgatttaaacatatgggctgctattgcggtatctgtggtggtctattttgcagttattgtgctgattaaaactgttgatagtgaagataaactgataattaggcagattatcaacagataa

SEQ ID NO: 7496 - DNA, 1038 bp, Methanobrevibacter gottschalkii
  source 1..1038: mol_type = genomic DNA
atggtaggaattgtaggatatggggcatatgttccctcatatagaattaaagtagaagaaattgctaaagtttggggagatgaccctgtagctttatcaagaggattaatcgttaatgaaaaatccgtaccttcttctgatgaagatactgcaacaattgcagttactgctgctagatacgctctagcaagagctcagattgatccaaaaaatattggtgcggtttatgtcggttccgaatcacatccttatgcagtaaaaccaactgcttcaattgttgctgaagcagtttgtgcaactccaaaattaactgctgcggatctggaatttgcttgtaaagcaggaactgctggcattcaaatgtctatgggacttgttcaatctgatatggttgattatgctttagctattggtgctgatacatctcaaggagcaccaggtgatgctttagaatacactgcatctgctggcggggccgcatatattattggtaatgataatactgttgccgatattgaacacacttgcagctatacaactgatactcctgatttttacagaagggagggtgagccttacccatctcatggtggacgttttacaggagagccggcttactttaaacatgttttaagcgctgccgaaatgttattcgatgaaaccaataccgctgctgaagactatgattatgcttgtttccaccagcctaatggtaagttttacttaagggcaggtaaaaaattaggattcacttctgaacagattgaaagaggattactcactcctaatattggaaacacttattccggtgccgtacctttagcgttgtctaatattttagatgttgcagaacctggagataaaatatttgttatttcatatggatccggtgctggaagtgatggttttgcaataactgtcaaagatgaaattgaagagagaagagaattggctccgaaaacagaagatatcatcagtaaaaaaacctatgttgattatgctgtatatgctaaattcaaaggtaaaattaaaatgtaa

SEQ ID NO: 7497 - DNA, 1158 bp, Methanobrevibacter gottschalkii
  source 1..1158: mol_type = genomic DNA
atgagagatgttgctattgtaggagtttcacaaacaaaattcggtgaattatgggattcatcatttagagatttaattgctgaagcaggtgtaaaagctttagtggatgctgaaattgatggtgcagacattgaagcaatgtttgtcggaaatatgtcatctggactttttgtagagcaagaacacattgctgctcttatatctgatcatgttggtcttaatccaattccaaccacaagagttgaagctgcttgtgcatccggcggtttggctttaagacagggaatcatggctgttgcctcaggattccatgatgtggtaatttctgcaggtgtggaaaaaatgaccgatgtcgttgatgctactccggctattgctactgcatctgataaagaatgggaagcacagcagggagctactttcccatcattatatgcaatgattgctaaaaggcacatgtatgaatacggtactacccgtgaacagttggcgcagttttctgtagtaaatcataaaaatgcatctaaaaacccgaatgcacaattcccgtttgaaattactgtagataaagttttaaatgcaaccatggtagcggacccattgactttatttgactgttcccctgtatctgacggggcggcagctgttgttatggtgcctgcggaagatgctaagaaatatactgatactccaatttatgtaaaagcttctgcacaggcttctggaactttaacattacatgacagaaaagatttaactaccattgaatctacaaaagtcgcatccagaaaagcttacgaaatggctggagttacacaaaaggatattgacttgactgaagttcatgactgtttctcaatcaatggacttttagctgtagaagacttaggatttgctgaaaaaggtaaaggtggaatagctattgaagaaggtcaaactgaaattgatggtgatttcccaatcaacacatccggcggtcttaaagcacgtggacacccattaggtgcaaccggtattgctcaggctgccgaagtagtatggcaacttagaggagaggccggtgcacgtcaagtggatggtgctgaaattggtatgactcacaacattggaggtaccggaggtactgcagctgtacacattttcggaagagatttataa

SEQ ID NO: 7498 - DNA, 924 bp, Methanobrevibacter gottschalkii
  source 1..924: mol_type = genomic DNA
atgataattaacacaggttccagaactgacattcccgcttttttcagtaaatggcttttaaacagaattgatgaaggttcagtctgcaccagaaacccatacaatgatgatatttataaatatccgttggattcaaaaataattgactgcttgtgtttttgtactaagaatccaaaaccgatgattgctagtttggataagctggatgatttcagacaatactggtttgtaacaataactccttatggaaaagatatggaacccaatgttccaggttataaaaacgtaatgaaatcattcaaaaagttgtctgaacatttgggaatcggcaaagtatcctggagatatgaccccattttcatatctgaaaaatataatctggatttccatattgaaatgtttgataaaatggcatctgaacttggggattatacgaatgattgtacaatcagtttcattgatttgtatcaaaaggtcttgagaaactttcccaattcaaaggaagttactcaggatgaacaattaattataggcagggaattttcaaaaacagctaatgaacacaatattaaaatgaaaacatgtgttgaaggaactttgcttgaccagttcggctttgattcaagaggatgcatgactcaggaagtaatcgaaaaagctattggtaaaaatttaaaaatccctaaaggaaaatatagaatccgtgaatgcgactgtatatttggaagggatatcggagcatataatacctgcctgcatggatgcaagtattgctatgcaaacaccaacatgaagctggttaaaaagaatcaaaaactgcataattcaaattcaccattattgatcggggatgttaaagagggtgatgttgtaaaagaggttagggaacctagctatattgatacacaacaaagattcatttga

SEQ ID NO: 7499 - DNA, 1203 bp, Methanobrevibacter gottschalkii
  source 1..1203: mol_type = genomic DNA
atgatcatccaaagaaaagattatattgataaaattaatccttttgtaaataaacatattattaaagttttaataggagcaagacgttccggcaagtcaaccatattaaaacaaattattgattcattaataaaacaaggaaccccaaaggagaatattgtttggatgaactttgaattaagtgattattttgaaatggataatattaaaaagcttgaagagttcatatctaataaaactgaaaatattgatggtaaaatttatctattttttgatgagatacagattgttccccaatgggaaaaattaatcaattcttactttgcaaaagaaaattatgacatatatattaccggatcaaactcaaaattattgtccggcgagtttgctacatatttatccggccgctatgtggaattaaacatatatccattttcttttagggaatatcttgagtactatgaaattacttctgatttcaaatctcatttttacagatatttggaagatgggggtatgccttcaacatttgactacaggggtgatgataaaagattaattctgattgatttatacaattctattgtccttaaagatataattcaaagaaataatgttaaaaatgttgacttgttggatagaattatgagatttgtaatgtataacattagccagcccttttccgcaaataaaattcataaaagactaaagcaagatatggtaaacttatctgtaaatacaatttacaattatctgaaattctttgaaaatgcatgcctgatttatcaggtaaagcgcgaagatttacagggtaaaagaatattaaaacatgatgaaaaatattatatatgtgatttgggttttagacaggcaataataggaaacaatcaaagggatatcactcgtgcaatcgaaaatattgtttatttggaacttttaagaagaggatatgaaatcaccatcggtaaagttgataacttggaagtagattttgtatgcaaaaaacaaaataaactcatttatattcaagtttcttatttattggcaagtgaagaaactattgaaagggaatttaaaccgttaaataatatttcagataattatccgaaatacgtaataaccatggatgatgcggacatgtctcatgatggaatcattcatttgaatttaattgattttttaagggataatgaagtgatttaa

SEQ ID NO: 7500 - DNA, 1191 bp, Methanobrevibacter gottschalkii
  source 1..1191: mol_type = genomic DNA
atggatgaaattgcaagcataacagatacaaatttaaccgaaacacaatttttcaatcgaagagatgaaatcaacatattatcaaatttattgatcagcactgaattcaactccgcacccacaatactattaacaggaattagaggagttggaaaaacagccctcatcaaaaaaatcagaaataaatttgaaagggaatatttagttgtagatatcgatttatccagaagcagtgcatatcaacagaaaaatctcacaagggcaagcatgataaaaataatctacgactcaatcatcagatcatccaaagaattcggcttaaaaacaatcagcaatcaaatagaaaaatattttaaaacaaaaaatttcaaaatagataaactcttatcatacgaacacatccccatcccaatctttgaaagtgaagacaattatgagagattggcggaatttgtaatggaactgcctcagaaaatttatgaagacaataatgataagataaaaggagttttcatattcattgatgaaatccaattaatcaaagatttgggagatgaattgaatggatttttatggtatatgcgcagtttcattcaaacacaaaagaatgttgcatacatcttttgcggaagcatgagcctgaaagacagtttaataaatgacttaaatggaaataaaggggcatttggagggaggatgctgacaattgaagttcaaccattttcaaaaaagaccactgaaaactatatcaaatcaatgagaagaaacatccaactagaccatggaggatttgaaagattttacaaatgcacacgtggaattccttattacatcaacatatttgcaaaatatcttccagaaaacctaacattaagtgaaaataacataagcgaattattcaaggattcaattgattatcttgcaatccatttcgtatacatgtggtccaaattaacattccaggaacagaaaatcataatttcactacttgaaaatccaaaaaagagaatagaagtggcaaattccctcaaagtaactagcggatcactaaacagacccttaaatcgccttctggactatgatttaattgaatatgcaaatgacaaatatcaaattacagacccgatatttggatattggcttaagaacagttatgaaaaaaatggaatatacccatttagaagcatttaa

SEQ ID NO: 7501 - DNA, 918 bp, Methanobrevibacter gottschalkii
  source 1..918: mol_type = genomic DNA
atgccaatatataatattgatggagaaacattaactccaattaaacaggtaaaatttaaaaacgaaagggaattacagattttaaccgaaaaaaaccttgaagaactattcggtttaaaatttattgcaactgaatttcaggttgacaatttaagaatagatacattagcattcaatgaagaaactaattcttttgtaattattgaatataagaatgtaaaaaattatagtgttatcgaccaaggatatagctatttatccctattgcttaataacaaagcagaatttgttttaaagtataatcttgtttgtaatgctgcattatctaaagatgagtttgatttttcacaaaccaatgtaatgtttatctctccaagctatactacttatcaattaaggtctgttgaattttctgatatagcttttgaattatggaaagtagttaaatattctaatggtactgttttatttgataaagttaataatactgatactcaagcttcaataaaacaaattaccaaagaaaacactagtaaagataaggtcaataaggaaattaaaaaatacacggaagaagatactttaatgaacaaatccgatgacattaaatctttgtatgataatttaaaggaattaattttatccaattatgatgatattgaaattaaccattggaaatattatgttgcaattaaagtgaataataaaatggttgctactgtaagtgttttatcaaaatctttgaaaacatggattaatttaaaagaaactgaattaagagattccgaaggcaaagttagaaatgtgtctaatattggacatcatggtgtaggtgattatgagtatgtaatctcttcagaagatgatttatattatttcaataagttatttaaacaatcttacgatgaaaaaatttaa

SEQ ID NO: 7502 - DNA, 696 bp, Methanobrevibacter gottschalkii
  source 1..696: mol_type = genomic DNA
atgaaaattgttacttggaatgccaacggtaaattcagtgaaaagtttccagctattctggaaaaagatgctgatatttatgtaattcaggaatgtgaaaatcctgaaataattaatttaaaagaatatagtgaattttcttccaattattattgggttggtgaaaaccaatattatggtcttggaatatttgctaaagataatgtaaaattagaattggtagatttggatgataagggactcagatatttcataccatttactgttaatgatgattttaatcttttaggtgtttggaccaatcctgatatggatggcactaaaacaatttattatcctaaagaaataaccaaatattacgaagaacacaaggattcaggattcttcaatgaagacatgattatctgtggagattttaattgtgatgtaagattaaaaggcactcatgccaagaatgtttatgaagtaattgaaaaattgtctgaatgtggtcttgtagacatatatcaccatttaactggtgaaaatgaaggtgaggaaactacgccaactttttacatgtataggcacttggataaaccttatcacttggatcatatattttcgtcatcagataaagttaaagctttggaaattggtgatgcagacaaatggctacagttaagtgatcatgtaccgttaatctttaaaatttaa

SEQ ID NO: 7503 - DNA, 1452 bp, Methanobrevibacter gottschalkii
  source 1..1452: mol_type = genomic DNA
atgtttgaaaaggaagaattaatcacaaatttcattaaggaagaactgactgatgttcccaatatcttgaacaaagagttatctaaaaacaatgaaaaattcaactccagagaggaactggatgagataaaaggatacatggacacttttttaaatgaagatacatcaaataagattatagttttgccgggcctcaggggcgttggcaaaacaacgctggttctgcaggcatatgaatatctcctaaaagaaagggacattcctcccagtaatgtattatacatttcctttgacgatttaaatgatctggttgaatgcagtataaggcagatggttgaaatatacctgaaaaacatatttcatgcaaacataaggaatttggatgaaaaggttttcatattcgtcgacgaatcacaaaccgataaaaattgggctttatccggtaaggtcatatatgacaaatcttataacattttcatgatatttaccggttcatctgctcttcatctggaacgcagcgatgagcttgcaagaaggatgcgcaaaaaatccgtaactccactaaactacacacagcatctgaaattaaagtatggcattgatgtgggaagtctatcagatgatttaagagaactggtattcactggaaatattgacaatgcggcagcctctgaatttgaggcaaataacttattgaccaattgtttggattattcttcaacagattgggacgagtattataaattcggcggttttccaatattatttgacaaaaagtcccatagggaaatctgtgaggacttggttgaaatcacagaaagggtcattacaaaagacatgccgcagataaaagagatttcctctgaaaatcaatccaatgcaaaacgtatattgagatatctcgccctccaacagccgggtgagttaacacaggcgaatctggcaaattatctgaaaacatcaaccgcaaatgtaaacaaaatattggatttgcttgaaaaaactcatctgattttccattgcgaaccatatggaggttcagccaaaagggttaaaaaatcatggaaatattattttgcagcacccagcatcagacacgccctgtcagctaaaataggaaacccattattgggaactgatgattatgaaggtctgcttctggaaaatcttgtagcgtcaaatttgtttaacttatccaataggcaattcacaaatttcacagtttattatgatgcagacaaaaaaagaaatgttgattttctgattcataaggattcagaaaacatcatcccaattgaggtgggacgtggaaagaaaaagaaactgcagatcaaacatgccattaacagatatgattgtgaatatggcatagtggttgcaaataactattcttctctaaaaaaagatgatgatgtaatttatatatctccaaaaacattttcatttttatag

SEQ ID NO: 7504 - DNA, 1440 bp, Methanobrevibacter gottschalkii
  source 1..1440: mol_type = genomic DNA
atggaagacgtaatctataactatcttataaaacagttatctgaagtacctatgattctaaacaggagattatcatataaaaacatcaagttcaataacaaaaacgaatttgataagctcagattaatgattgacagttttttagatggggaatctgaagaaagatactttgtacttccgggaattcgtggggttggaaaaacaacaatattataccaatgctatgagtacctgttaaaggaaaaaaacttcaattcaagtgatctgttatacatttcatgtgaaacaactaatttcgcaggggaaacagatatcaaaaaaataatagaaatttatttagatgaaattcacaatacgtcccccgcacttttggataggcctgttttcattttcatagatgaagcgcactttgacatgaattgggcaatgaacggaaaaaccctttatgatgaatccccatatattttcctgatattggcaggttcatcatcacttcatctaaattataattctgatgctgccagaaggctcaatatactgccggtcatgccattaaactattcccagcacttaagcttaaagtacaactaccaaacagatatcggaaatgacttaatcgatttgatattcacaggaaacattgaagcagcacaggaaaaggaactaaaaatccaaaaggacttaataagcttaaatagttatccattaaatgactggaacatttatttaaactatggcggatttccagcaacattcaacatcaaattcgaggacataattgtatctaaactatggacaataatatccaaagtaataactgtcgacatggcgaatgtattcaatttaaacaagaacaatcaaaacctggcttataaaacattggtgtatctggcatcacaaaaaccgggagaaatatcacatgacaaactgtcaaactacttggattgcggcaaaacaacaataaacaatattatcaacacattggaaaagacacaattgatatttcacagtgaagcttatggtggagcttccaaaaaagttaaaaaaccatggaaatataatcttgcaacaccaagtatcagaaactgcataaacataaaattcggaaacagcgcaggatcaaaaagtgaatatgaaggaatattactggaaaaccaaattgcatctaatctatttaacctaaacaacaataacacatcattcgacttcaatgtttattatgattcgcaaaagggaggcgtagactttatcgttaaaaaattattcggcaatgcaataccgatagaatcagggataggcagcaaaacaagaagacaaataaaaaaagcaatgaataaatatgatgcagattatggaattgtggtttcaaataaaacagatttcatagaaaaagaagatgatgtgatattcatacctccaaaaacattcacatttttataa

SEQ ID NO: 7505 - DNA, 456 bp, Methanobrevibacter gottschalkii
  source 1..456: mol_type = genomic DNA
atgagcaaactgttaatcgattcatcattcatcattgcattgtttaggaaaaatgatgggcttcaccaaaaggccattgaaaacaaggacatgcttaataatgactgctacatcacagacggaatattggctgaagtaatgacaattattgggcagaaaacaaaagacattgggttggttagaacagtttacaattatctaaaggacaatttcaccatcattcatgaaagtgaaatcagcatgtacaatgacaatgtattatccgtttttgaaaaatacaatcaaaatagctttaaggtaagttttatagattgctcacaagtcataatatataatcattataatttggattatgtaatcagtttagataacggatttggactttttgaagaaatagaattaaaaaatctaagtgaacagaagcgtactatacaattcattaaatataacatttaa

SEQ ID NO: 7506 - DNA, 243 bp, Methanobrevibacter gottschalkii
  source 1..243: mol_type = genomic DNA
atggataatatactagctacaacaacattatataaaaactatcaactggccatacccaaggtcattcgcagtcaatttaaagaactgaacagtaaagacacagttattgactggttcatcaatgaagaaaatgaaatcataataaaaccaagaaaaaaagtaagtttagaagatgtaatcggaatcattgaagatgatgatccaagaaatgcagttgaactaaaaaggagtctatacaaatga

SEQ ID NO: 7507 - DNA, 120 bp, Methanobrevibacter gottschalkii
  source 1..120: mol_type = genomic DNA
atgaagctggtcaaaaggaaccagaagttgcatagtcctgatttgccattgctgattggtgatgttgtaaaagaggttagtgaacccgctatattgacacacaacaaaagattattttaa

SEQ ID NO: 7508 - DNA, 1239 bp, Methanobrevibacter gottschalkii
  source 1..1239: mol_type = genomic DNA
atggtaaaaagagaattatatctagaaaaaatttacaattttatgggcaaaaatttaataaaaataataacgggcatgagacgttgcggcaaatcctatttattcaaattaattatccatgaacttaaaaaaagaggaaccaaagatgaagatatactactaatagatttagagttacccacatacaatcacataaaaacacgagaacaactagatgaaattgtagttccgttcatagaatcccatgaaaacaaagtttatttattctttgatgaaatacaaaatgttaaagaatgggaagtaagtatcaacagctactacaaactagaaaacaccgacatatacattacaggatccaactcaaaattaatgtctgcagaatttgcaacattattaactggaagatacgtaaatatagaactatatccattttcatttaatgaatttttagattataaacaagaattaaatcaccccccttcaataacaaatgaactaaatagtgatttggaaaactttttcgaagaataccaaaaatatggcggaatacctctcaccatatcctcccaacatgacaaagagctagtgttaaatggaatatactcttccataatcctaaatgacatagtagaaagatatgaaattagaaatgttggattgttcaatagaattgtaaaatatataattgaaaacacaggaaatttaatatcagcaaatgcagtatacaaatacttaaaacatgaaaaacttagaattacaaaaccaactatctacaattacttagaatatcttgaaaatgcatacctaattgcaaaagcctcaaaagaagatattgctggaaaaaaagaaattataggctctgaaaaatattatttactcgacactggattttataaatcacaacttgaggaaaagcaaagaaatatagaccacatattagaaaacataatattcatcgaattaaagcgacatggatataaaataacaataggaaaagtaaatgactatgaaatagacttcatatgtaaaaaaaataaccaaaaaatctacatacaagttacatatctactggaaaatgatgaaacaattgaaagggagtttaggccattattaatgattaaagataattatccaaaatatgtattatcaatggatagaactgtccaacctcaaaatggcataaaacacatgaatataattgattttttgaaaaactttaaccatgatgaaatattttaa

SEQ ID NO: 7509 - DNA, 1188 bp, Methanobrevibacter gottschalkii
  source 1..1188: mol_type = genomic DNA
atgagtattgttccattgcatattccaattaatgaaatcgacagatatttctataaccggactgaagatattaaaaaaattgagtattatctaaattcattggaaatcggaatatctcaatcattattaataaggggagttagaggtgttggaaaaacttttttacttcaaaaattaaaacaggactcaaaaaagaattttctggtttcatacattgatatttcaagaattgtgggcattgatgatacgcagttaactgcacaatcagttttattggaattattggacgaaatgaacaatacaatctatgataagatacatgacggtaaaaaagtaacttttcttttgaaaaaattaattgacaaattaaaaattaaagatttcagcttttcaaaaggcattcatatggctgaaataccaataccagcaaccgaagacaattacaaaaaaatcagtaaatttgtaatggaatatcctcaaaatgttgttgaaagtattgatggcattaatggattcataattataattgatgaattccagatgcttaaaaagttaaaaaatccagaatcctttttttggttaatgaggagttatagtcaattccaatcaaatgtcagttatgtgatgagcggatcaatctcacaaacatcagatgcaattgaaatgttgaatggagcaactggagcatttggtggaaggatgatgcaaataaatatagatcctttcacaaagcatgaaaccaaatcttatttcaatgacagatttccagaaataaaattcactgacgatggttttaatcgtttttatgagtatacaaaaggaattccaatgtatataaatagcttttacaatgcattatcatcccatgaaacatatgatgaaaaatcaatagattatattttcctcaataacatggaccaaattcttgtaatgtggattaggatatggggtactttaaacaaatatgaaaaaaagataatatgcgccatgttaaacaaagagaatatttcctggtctaaactggaaaggagtttagacatgtctccagctactttaaccaagtatattaaaactctacaggataagggaatcataaaatatcatgatggaaattataattttgaagatttaatgttaaaaacatggctgaataatgaaaaagagaggactggtgtttatcctcaatag

SEQ ID NO: 7510 - DNA, 1530 bp, Methanobrevibacter gottschalkii
  source 1..1530: mol_type = genomic DNA
atgacaaactgtatcatggttcaaggaacctcatcaaatgctggaaaaagtatgcttgtagctgcattatgtagaatatataaaaacagaggatacaaagtagctcctttcaaatcacagaacatgtctttaaactcatacaccaccaaagaaaatggtgaaattggaatagcacagatgctacaggcagaagcagcgatggttgaaccgagcatacatatgaatcccgttttactcaaaccaaaaggagatttcacatcaaatgtgattattcagggaaaatccatcggggatatggatttctatgactaccagcataaataccatgataccgcattagaagctataaaagaaagcttcaatattctaaaagaggagtatgatgtgattattattgaaggagcaggttctcctgctgaaatcaatatgcgtgatcaggatattgcaaatatggaaattgcacatcttgcagacgcaaatgttattttaatagcagatatcgaaatgggcggtgtttttgcagcaattgcaggaacttacgtattgcttgatgattatgacaggtcaagattaaaagcaactgtcataaacaaatttagaggcaatctggatattttaaaaccagggcttgacagaattgaagaaattaccggcgaacccgttttaggagttctcccatatgatgaaactttaaaattgcctgaagaagattccgcctcactaaccacacatagctttgcagaagataaggacattacaattggcgtcattagacttccaaaaatagccaatttcacagatattgacccgtttgaatatgaagatgatgttgcacttaaaatgattgacatcaacgacaatataagtgatgttgatgctatcataattcccggaacacgcaactcaacagaagacatgtttgaacttcgcaaaagcggtcttgcagatcaaataattaaaaaagcagatgaaataccaataatcggaatatgcggaggcctgcaaattcttggaaatgtcatttatgatgatgaaaaaagggaatcaaaacacggaacagtaaatggtcttggccttttagatattgaatctgaattttcaagagcagacaaaatcgtaacccaatcagaagccacaataccggataatctcgatggtattgctggtgcaatatttaaaaacattgcaggtgaaagcattacaggctatgagattcacgaaggtaccagtgaactattaagctctaaagcattattaaatgttaaaaaaggacagggaaacaatgatgagggaatgattgatggggcatgcaatggaaacatctttgcaacttattttcatggaatattccacaattacaacttcagaagagaatttttaaactacatacgtactaaaaaaggccttgaagccagatatggtgaagacccatatgaaactcaaaaagattattccctaaacagattagccgaaattgttgaagaaaatttggatatggatattatcgatgacctgttattttccaaataa

SEQ ID NO: 7511 - DNA, 1980 bp, Methanobrevibacter gottschalkii
  source 1..1980: mol_type = genomic DNA
atgaaatttgaagaagtagaaataactgaagattctcctcaagaattagttgctgagccggtagtggaaaaagaagatcatggcgaagaaactaaaccaatgttagattatgacaatattaaaagttcacaggatattgaagttccacctctattaattgaccaggttatagggcatgaagattccatagaaacaattaagaaggcagcaaaacaaagaaggaatgttttactaattggtgatccgggtgtgggaaaatcaatgcttgctaaaggaatggcgcaaattttacctcacgaaactttaaaagatgtattggtatacccgaacatggaagataataaccacccgttaataaggacagtgcctgcaggtgaaggtaaaaaaattgtaaaagctactaaggggtctgctaaaagccatgaagaaaagaaaactattattacaatgtttgcaattggaggtattctggtaattggatttatgtatggaagattacttgaatctattattgcagcagctttaattttacttatttcaattcagattaaaccaaaaaacagtaatatgtctccaaaattattggttaataatcaggattcaagatttgcaccattcatggatgcaaccggttctcatgctggtgctctcttgggggatgtacgtcatgacccataccagtccggaggacttggaactcctgcacatgaacgtgtggaagcaggtatgattcacaaagctaatcgtggagttttatacattgatgaaattggtacaatgtctatgaaaacccaacaggagttattgtctgcaatgcaggaaaaacaatatgcaatcacaggtcaaagtgaaaactcaagcggggcaatggtaagatcacaggcagtaccatgtgactttgtgcttgtagcatccggtaaccttcaagttttagaaggaatgcacattgcaatgaggtctagaatcagaggatatggttatgaagttttcatgaaggattacatggaagacactactgaaaacagagaaaaactggtccagttcgtagctcaggaagttaaaaacgatggaagaatccctcattttgcaactgatgcattggatgaaataatcatggaagcaaaaagaagatccggaaaacagaatgctttaactttaagattaagggacctcggtggacttgtaaggtctgcaggggatgtggctatagaaaaaggagcaaatcttgtaactgctgagcatgtatttgaagctaaaaaatatgcaagaacattggaacagcaaatagctgataggtctattttacagagaaaagactacagtatggtttctgctcaaggtggaagagttggtcttattaatggccttgcagttattggtgacaggagcggaattgtatctcctattgcagcagaagcagctccgactcaatctaaaactggcggtaaaatcattgccactggtaaattaggtgagattgctaatgaatctgttcagaatgtaagtgcattaattaaaaaatacactaataaggacatttcaaattatgacattcatgttcagtttatccaaacttatgatggtgtggaaggggattctgccagtgtaagtattgcaacagctgttatttcagctattgaagaaattccaattgatcagactgttgcattaaccggttcacttaatgttcgtggtgatgtaatgcctattggtggagcaactgctaaaatcgaagcagctgctgaagctggaatgaaaaaagtgttaattcctaaatctaacttgaaagatgtcatgattgagaaaaaatatgaggatatgattgaaatcattccaactgaaacattaagtgatgttttagaaaacattctaattagtggttcttctaaagataagttaattgcaaaaatgaagaacttgagttctaaagttgcagataaggttccacaaacaggtttaaacaatccaactataaattaa

SEQ ID NO: 7512 - DNA, 483 bp, Methanobrevibacter gottschalkii
  source 1..483: mol_type = genomic DNA
atgaatatttatgaaactattaaaaatattagagcatcctgcgataattatgtggatccaaacctgctggcattcattattgatgatgataaccatatgggagacaacaatatcctagaaattaaaggttatgatatcagagataatgacgcctatgaagaaagacttttcaaaattcataaaaacgaaaatattttcctaccatgtggaatgattacttttataccagttttaaatgaatgtgacatattttccactaaagactatagcttaaaactttcaccggaagaatttgacaaatactgtgaacaagaagaaaagttatttggaattttgataaaaaaagattccactgattataaaatcggacaaacagatgtctgcaactgcagtattactgcatcatttaaagaatttaaaaaagcagacgggaaattttataaaaaaattgaagaaataatagaaagtaaaattatcgattaa

SEQ ID NO: 7513 - DNA, 906 bp, Methanobrevibacter gottschalkii
  source 1..906: mol_type = genomic DNA
atgaaagtcaaagatgggattatcggtttggtagtaggggatgcattaggtgttcctgttgagttttacagaagagaagaccttgaaaagaatcccgtgacaggaatgaaaagttatggaacatacaataaacctgcaggaacctggtctgatgatacttcactgacaatagctacaatggccagcattataaacaaaaaatgcattgattattcagatatcatggaagagtttattgaatggcggaagaataataaatactcccaagaggaaacctttgacataggcattacaacacgtaatgcattggacagctacactccaggaatcaatccgctttgtggaatgggaggtgagggagacaatggaaatggttctttgatgagaattcttcctctggcttttattggcaatatcgattatgaaacaattgaaaacatttcatctttaacccatagacatgaaagatcaagaattgcttgcgtattatatgttgaaattgccagatcaatgattagtaactccaacttaactattaacgaacatgttaaaaatgcaagtgctaaaatcattgaatattacaaagattcagaagaactcagtaattttaaaagaatctttgatgatgattactcgaaaggagtttcaggtaaaggttatgttatctccacatttgaagcggttatttattgcctggaaaatacaaataattataaagatgcagttttaaaagcagttaatttaggtgatgataccgatactgtagcagctatttgcggtggacttgcaggcatttactatggttttgatgaaattcctatagagtggattagtgaaattcgtcagattgaaacaattattgatttatgtgaaaaatacgaggtagcatgtgatgaatatttatga

SEQ ID NO: 7514 - DNA, 510 bp, Methanobrevibacter gottschalkii
  source 1..510: mol_type = genomic DNA
atgatttttaaaactgcaaatctcactttaaggccatggcaaatttcagatgcggaatgtttatatcattttgctaaaaacccgaatatcggtccgattgctggctggccaccacatgaaagtgttgaagatagtttaaatattattcaaactgtattttcaaaaaaagaaacttatgctgttgttatagataatgttccaattggctgtgttggattattgtttcatccagactgtaatcattattggggggataattctgctgaacttggatattggattgctgaagagtattggggaaatggatatgctgttgaaggatcggaagttttaattaaaagagcatttgaggattttaacataaatcaaatttatgcaacttacaggtgtgaaaatacccggtcaaaaagagttttggaaaaattaaattttaaatattttgataatttaacaaatgtcaattatttgggcgatcaatttagtgaaattgctatggtgcttaaaaaataa

SEQ ID NO: 7515 - DNA, 369 bp, Methanobrevibacter gottschalkii
  source 1..369: mol_type = genomic DNA
atgacaagattatgtaaaaattgcggatttgaaaatcaggatgattatgatttctgtgctaaatgcggtactccattggttgaaggtctaaaacctaatcaatttagggtttatagaacacaagatcttgaaattaataaaaaggcattaattgcagcttatattgctactatatttttatcatggagtggtttttttattgggttgatttcaaaaaatactgtttttgcaacatttactttctttggatttttcatgccatttttcttagtgcaatcaaaacacccggcacttaagaaacatggtctgattatgatggctatttcttttgtaggggttgcactttcattttatgtaatgatgcattaa

SEQ ID NO: 7516 - DNA, 513 bp, Methanobrevibacter gottschalkii
  source 1..513: mol_type = genomic DNA
atgaaaaaattaaatgtcgcacttatagcattggtattaatagttgttgcatttttagcatcaactattgtaagcccggttctaatagttgctgaagatgcatctgaagacaatggtattgatatggctgcgactattggtttaactggttttaactggatttatcccggtaattctgttaacgctcaaggtcaaacattacataatgtttatgcagactatcctgataatccatatggtgctgcccgtgacataatgagttatacataccatgtcaccccacatatcataattagtattaacaatgatgcagctgcagccatattcggagaaaacatcatagatgatattcgtgcaaatgatggttataacggatatgcaggtaatgataaagtttcaggaagtatggatagaggagacgctgttggaactgcaatggcagaaaatggaattaatataattgaaattccaatacaatttttaatagggaacattagcccccactttgtctaa

SEQ ID NO: 7517 - DNA, 918 bp, Methanobrevibacter gottschalkii
  source 1..918: mol_type = genomic DNA
atgattataggtggttcatcatcacaggatttagcagctagtgtagcacgcgaacttggagaagaattatgttatgtcgaaactaggaagtttccggatggagaaagatatttgaagattaatggtcatgttgaagatgaagcagtaactgtcatccaatcaactggatatcctcaggatgagaatttaatggaattgttattcataatagctaatcttaaggatttaggtgctaaaaaagtgaaagttgtagttccgtatatgggatatgcaagacaggaaaagcgtttcaatcccggagaaacaatttctgctaaaattgtttgtgatttgattcagacagtaggtgctgatgaatttataacatttaatattcatgaagcatgcgttttagatttttttgatattcctgcaagaaatttatctgcaatgccggctattgccgaatatctggataaaaaattctttaaaaaagaagaacttaaaccattaattgttgcccctgataaaggtgcatatggatttgcacaagaaatatctgaaattattggttgtgactgtacttatttaactaaagttcgtttaggacctgataaagttgaaactaaaattgtagatgtaagatgtgatagtgaaagtgagaacacggttaacattgattctgtaaaaggcatgcatgcgattattgttgatgatattattgctactgggggaacaattgttaatgcagttaatattttaaaacagtatggcgcttctgctgttgatgtatgctgtgttcatccaattttaacaaataatggtgtaactagaatctattctgctggtgcaagtaaaattatcggaactaatacattatcttctgacacttcacgtgtatctattgctaaaagtatagcacaggcattgagggaataa

SEQ ID NO: 7518 - DNA, 291 bp, Methanobrevibacter gottschalkii
  source 1..291: mol_type = genomic DNA
atggataaagaaacaataaaaaaagaattagctgataaatctaatgaacttttagctaaatatggggagcaggatttggtagaggatatatcagtaatgaatatggctactaaaactgtgtttttgggatctcttagagtttataattatgataatgcaggcaaaatcaaaaatgatttggaaaaaaagattaaaaactatggggaaattgcaatcagggatgaaaaaatagttccttgttgtgctccaagttacattcatgtcagtttcaatgtttcaattaataaatag

SEQ ID NO: 7519 - DNA, 1965 bp, Methanobrevibacter gottschalkii
  source 1..1965: mol_type = genomic DNA
atgaaagaattcaagttaaattcaccttataaaccattaggtgatcaaccaaaggccattaactcattagctgaaggtataaaaaaaggcataaaggaacaaacgcttttgggtgtaactggttcgggtaagacttttacaatggcaaatgtcattgaaaaggttcaaaaacccactcttgttatttcccataacaaaactttggctgcacagttatatgaggaatttaaagaatttttcccagataatgcagttgaatattttgttagttattatgattattatcagcctgaagcatatgtgccaagaacagatactttcattgataaagaagcatctattaatgatgatattgatataatgaggcattcagcaacacaatcattattatcaagggatgatgttatcgttgttagcagtgttagttgtatttatggtattggttcgcctgaagattatggtgaatttgcttttggaatatccgttggagatatttatgataggtcagaaatcctggctcgtttagttttcatgcaatatgaacgcaatgatattgaatttgcccgtggtcaatttagagttaggggagatgttattgaaataaatcctgttcatggaacaccgccaatacgaattgaactattcggtgatgaaatagatgcaattagtattattgataaagttacaggaaaaaaacaggaatcgcttaaaagatacatgattttccctgcaaagcatttcgttgttggccaagataagatggatgaggcactttcaaaaattacaagtgaattggatgagagattatctgaacttaatgcaatgggtaagttgttggaagcccaaaggttagaacagagaacccgttttgatatagaaatgcttaaagaaatgggatactgtcctggaattgaaaactattccatgcacttgtccggacgtcattggggagataaaccttactctcttttaaaatacttcccggatgattttttaacaattattgatgagtctcacgttactgtacctcagattagaggaatgtataatggggaccgtgcacgtaaggaaacattagttgattatggtttcagattgccgtctgctaaagaaaatcgtcctttaagattcgatgaatttgaatcatccgttaatcaagtaatctatgtatctgcaacacctgcagcatatgaactttcaaaatcaagaaatgttgttgaacagattataaggccaaccggactcgttgatcctgaagttataattagaccggtttcaggtcaggttgaagatttgcttaaagaagttaaagcaactgctgagaaaaatgaaagaattttagttacaactttaactaaaaggatggcggaggatttgactgattattatgcacgtataggtattaaagtaagatacatgcattctgaaattgacacattggagagaattgaaattgtagatgatttaagacgtggcaaattcgatgtattggtgggtgtaaatctcttaagggaaggtttagacctgccggaggtatctcttgtagctattttggatgcagataaggaagggtttttaagaaatgaaacttcattaatccaaactatcggccgtgcagcaagaaatgttaacggtcgtgtgataatgtatgctgatgaaatgactgattctgttagaaatgcatatgatataacacttaaaaggcgtaaactacaaatgaaatacaatgaagttcatggaattactccaacatcaactcaaaggacattaaaagaaaaattggctgaggaagatgaacggtataaaattgctggagctaatattgaaaaaatgcctaaagatgagcttagattactcattaaggatatagaaaaagatatgaaagatgcggctgcaagacttgactttgaacgggctgctgatttgagaaacaaactttatgctttaaaaggtatggataagtaa

SEQ ID NO: 7520 - DNA, 2889 bp, Methanobrevibacter gottschalkii
  source 1..2889: mol_type = genomic DNA
atgactgaagattctaaaaaacagattatcatccgaggtgcacgtgagcacaatttacaggacattgatgtttgcgtcccccgtgatgaattcattgtaattacaggtttaagcggatcaggtaagtcttcattagctttcgatacaatttatgctgaaggacagcgtagatatgttgaatctttatcagcttatgcaagacagttcttaggtcaaatgaaaaaacctgaaatggaatccattgaaggattatctccggctatttcaattgatcaaaagactacaagagaaaacccaagatctactgtgggtacaattactgaaatttatgactacttgagattattatttgcaagggttggaattcctcattgtcctaattgtggaaaagaaatatcacaacaaactcttggacaaataggtgattcaatcatcgaggaaggggaaggtcttaaaatccaaatcctagcacctattgtaagagataaaaaaggtcagcacaaagatgtctttgaagatttaagaaacaaaggttttgtaagagtacgtgttgatggtgagataagagaattggaagaagatattggccttgcaaaaacatacagacacagtattgatgttgtggttgatagacttaaaaccagacgggatgttgattttaaaaggagattggttgattctcttgaaactgcatcagaattttctgaaggtttaattaccgtattattcaccaaggatgatgaggattatgagaaaaaatactcagaacattttgcatgtgttgattgcggaataaactttgaagaattaactccaaggatgttttcatttaacgctcctcagggagcttgtccagaatgtaatggtattggttctaagatggagattgatccggatttaattgttccggataaaacactaacattaagtgaaggagctattgcgccgtggtcaaaatcttcaacaaaagaaaattattattaccaaatgcttgaggcagtatccgagtattttaatttcagtatggacattccatttaatgaattggataaagaatatcaaaatacaattctttatggttgtaatgataaaatcccgttcacttttaaaagaagaaataaatcttacatggttaaccgtaaatttgaaggtgttattccaagaatggaaaggttatatgtggaaactaaatccaactattcaagaaaatacctctcaaagttcatgtctgatagaaaatgtcatgtttgtggaggtaaacgactcagaccagaagtattggcagttactgttggcggaaaatcaattattgatgtttgtgatatggcaattaaagattcatatcaattcttccaggatttaaaattaactgaaagagagaatttcattgcaaaagaagttttaaaagaaattaaagaacgtttaagctttttagttgaagttggacttgattatttgtccatgtcaagatcttccggtactttatctggtggagaagctcaaaggattagattggccactcagattggttctggtctggtgggagtactctacattttagatgaaccaagtattgggcttcaccaaagagacaatataaaacttattgatgctcttaaaagacttaaggatttgggaaatactcttgtggtagtggaacatgatgaagaaacaattttgtctgctgattatgttgtagatatcggtccgggtgctggtgagcacggtggtaaggttgtggctcagggaacaccgctggacattatgaataatccagattccattactggtcagtacatatcacgggttaaaaaaatagaaattcctaaacagagaagacctggaaatggtaatttcataagaattgttggtgctgctcaaaataaccttaaagatattgatgtggatatcccattaggtaaatttacttgtgtaacaggggttagtgggtctggtaaaagtagtttaattaatgaaatattatacaaaggggttcaaggtaaattagctaagaaatttactttcgccggtaaatataaggaaattgaaggattggaaaatattgataaagttattgcaatagatcaaaaaccaattggaagaactccacgttcaaatcctgcaacttatactggagtgtttactgatattcgtgagttatttgcaaacactccagaatctaaagctagaggttacaaacctggaagattttcttttaatgtaaaagggggaagatgtgaagcatgttctggtgatggtattgttcaaattgaaatgcactttttagcagatgtttatgtgccatgtgaagtttgtggtggtaaaagatacaatgaagaaactttggatattaggtataaaggtaaaaatatctatgaagttttggaaatgactgttgaagaagcactagagttctttgagaatattccaaagattactaaaaaacttcagactttatatgatgttggattaggttatatgaagattggtcagcctgcaacaacattgtctggtggtgaggctcagagaattaaattagctaaagagttatctagaacaagcaccggcaaaactttatatattttagatgaacctactactggtcttcatttcgccgatattgaaaggttgcttgatgttttagcaagattgactgatgcgggcaattcagttgttgttattgaacacaatttggatgttattaaaacagctgatcatattattgatttaggtcctgaaggaggtgacggtggtggtcaggtgattgctactggaacacctgaagacattgctaaagctggaacttatactggtgaattcttggaaaaaatgcttaatgagaatattactccttatgcaaaagaattagtagaggatattggtaaataa

SEQ ID NO: 7521 - DNA, 1209 bp, Methanobrevibacter gottschalkii
  source 1..1209: mol_type = genomic DNA
atggttttaagtacaggaaatactgcatggatgcttattgcaacgattatggttttattaatgagtgttccaggtattgcatttttttatggtggtttatcaaaaagaaaaaacgtattaaactcaatgtttctatctttaatagcatttgcaattgttagtattctttgggttatgtatggttatcaatttgcatttgcagatttaagttttgcgggtttaataggaattccaaaaacattattcatggaaggaattggtgtaggttctctgacaggaactattccaacatttgtctttgccggatttcagctaacatttgcaggattaactgctgcagttgtatcaggagcaattgttggaagaatgaaaacaaaagcatgggtaatatttatcatattatgggcaacatttgtttatattccaatttgccactggatttggggtggaggatggttaatgaacattggagccattgattttgcaggtggtgttgcagttgaagttaactctggtttttcagctcttgctctagctttaatacttggaaaaagaaaggatacatcattgcttccacataacttaggatactcaattctaggtgcaggattcctatggtttggatggatgggattcaatggaggatctgctcttgcagctaatggtcttgcaggttctgcaattcttgtttcaaatactgctgcagctgttgcaatgattgtttggttgcttttagatgtgctcaatgatggaaaaccgacagttttaggtgcaattactggtgcagttgcaggacttgttgcagtcactcctgctgcgggttttgtttcactttctggcgggataataattggtttaggcgcatcgttgatttcatattatgcagttttttatattaaaagcaaatttggttatgatgatgcattggatgtatttggtgttcacggactttctggtgtttggggattaattgcaactggtttattcgcagcaccatcaataaatggtgtggcaggtctattttatggaaatcctgaacagttgattattcaattaatagcagttgttgcagctatttcatattcatttaccgtaagttatttcattggaaaagtgttagatattttaattggattaagggtagatgataaagaagaaataatgggtcttgattctgcattacatgaagaatcaggatatagaatttaa

SEQ ID NO: 7522 - DNA, 339 bp, Methanobrevibacter gottschalkii
  source 1..339: mol_type = genomic DNA
atgaaaaggattattgcagtaatacgtgaagaaatgtttgaccctgttaaattagcgcttttggctgccggatgtgaagggatgaatgtttcaacagttaaaggtcggggaagacagactggtattaaagaatcttacaggggttctagctattgtattgatctgattccaaaaacaagagtcgaattaattgttaacgaagaggatttggataggattattaatattattctggaaaatgctcgaactggggatattggtgatggaaaaatattcgtttctgatgttgaagaagtaattaggattagaactggtgaaagaggttctgatgcagtttaa

SEQ ID NO: 7523 - DNA, 1500 bp, Methanobrevibacter gottschalkii
  source 1..1500: mol_type = genomic DNA
atgaaagaattatatgaaaaaatgattgacgaagcaatggctgctcaaaaggctgatgtttctgttgtatcaaaaaataggtataatgactttaaaatagttgatgcaaaaccatatgctgatgctgtttcaaacatgaaagcacttgacaaccaagcagaatctgtgattaacttgcataaagaatctgttaaaaaccattatgaaattttgtcttccatcacaaagactttgaaatgtgaagatgatccgttcattgaacatttccaaactcctccggtatttgaaatattatgtgacgaagatggtgactttgcagatagtgtggacaaatttgttcaagcaattgctgatgcggaagcattaattgctaaagaatccatcaggagatatggcggattttatggacctacatgtgtagttgactttgctttaatgccgggaagtacaagtaatgttgtaaaccaaatattaaaaacagtagatattccagttcaccacaaacaggcaattttatctgcaaaatcatggggtatgaacacttcttatggtattggagatgcatttgctcatgcaattgaagatggtttaactgctgcacaggctactgaaaaagaaattgaaacattacaaatgatttacaaaactcctattgaaggacaaggtactttaatggataatgcaaatcattcttcatttgatgtaagagatcacatgaataagtataaaaaggcaatgaccaaatctgttaaagctgcaatggatgatggtgtacactatggtaacattgtaactgttccagcatactgtgttggggacattggacaccacattggtcagtctacttacaatatgtgtaaagatgatgtgataatggctattatagaagctactacaggtgttattgaaaactcattaagaaacaacatcgataaatttaaaactccatttgatgtattaaaactttcaactggtgctccggcatgtgcaactgaattcttattggaacttgatggattcacagctccaatgattgttgacttgttaaataaaagattccataactatgtacaacaatatcctacaagaggtgcagctgctgagctgcacaattgtgatttcatggacatgatttacagaggattcaatgcaatgagcaatgcaagaaaaatgagatcctctgcaggatttgaaattatccctagaattaaaggtatggaaattgatttcacacctatcttagaaaatgaagtgttaatgaacccgcaaagatacacatatccggcatgtgctatttctgtaaggttctcatctcttatgagattggcagattacccatgtcttttaacttcagaacctattacagcaacaatgatgacaaatattatagcacttgacaaaaaaactcccggttctccagtaagaggatgtaaacaatgtgcttctgcatgtttagcggataacactcatgaatactgtcaatggagagaagctgtatag

SEQ ID NO: 7524 - DNA, 774 bp, Methanobrevibacter gottschalkii
  source 1..774: mol_type = genomic DNA
atgccttgtaatataagaaaaaaattttttgcagaactattgggaacctttttccttgtattttttggtacaggatcagcagttgtaacccttttagtatctcaaagtatcaatcctgctaatgtaggcattggtgttttgggaggtcttggtgactggattgcaattgctttagcctttggtttaactgtaatgattggaatatatgcatttggtaggatatctggtgcacattttaatccagctgtaactataggattgcttgtaactaaaaacattcctttagttgatagtatttattatattgttgcacaattaattggcgcatgtcttggaagccttgcattattcctgtgtcttggggctcaggctgttacaatcggaggattgggtgcaacagctccgggtcttggtattggatatatgcaagctatgtttgctgaatttataggaacatttttcttaatgatggttataatgggtgttgcagttgataaaaaggcagaacctggttttgcaggagtatcgattggtatgactgtaactgctgtaatcgtagttttaggttcattcactggtgcttcaatcaaccctgcacgtacattcggaccgtacttgatggacatgattcttggaggtcaaaacctttggggattcttcccaatatacttagttggacctatacttggtgcaatttgtgcggcatttgcatatgcatatcttgctaaaaatagtggagtttgtgaactcccgcaaccatttaaagacgaataa

SEQ ID NO: 7525 - DNA, 1782 bp, Methanobrevibacter gottschalkii
  source 1..1782: mol_type = genomic DNA
atgaataaagagattattgcagcagttatggcttctacaatagatatggataatatgtctagtgatagacttgaagcattaactaaaggacatggtatgttaaatattgcagcaatttgttctgctaatgtaattgctgaggaagttttaaggggagttaatcttcagttaactgatgaaaatattggagaacttccaattgatgatcttttaagaaaatccatcgaagcagctgaaaatgctggtgcggatgcagcaaatgctgctttattaagtgcaactttatgttattttgcaggttcaaatgcacaagctggtgttccggcaggtaacagaaaattaggtgcaatggcacgtatgattgcaggtgtggacagatgcggagtattagctattccaacaccaaaagcaaataacagaatttcaggatatgctgcagttaaagcagtttatgatgaggtgtttaataatagtttaactccaattgatggcagtatcttgcccttgggtgtgggtggaggtccattatatggacacaatgcattaggtgaagatattgggttttcacaattagcaattaatggtgctaaagcaggtactaaggggatgttgcaagcatttgctaatgtgggaatgcctccaagcccgattattgcagcaattttaggtgttgcagcaattttagaaattgttcatccagattcagaagttgctgaagaatatggtgaattttttgtagcaaacagtgcatatgttgcaggtttaggagcatgtgaagtggcaggacttcctgaaaaattacatattagggggactggcgaagaatatgatactgcaaatttagtaggggatttaggagtcattatgaaagatattggaggaccttccgtagttggtatgattgcatttgaagaaatgctttcggcttttgaagaatctttggacattggtgcaggattttcaggtggacctttacaaccacctttaggacatatgactgctgatgcgattttagcacttaaagttttactttcaacaaatggagatattgatcaagctgcagaaaaaatcaaagaaattaaaactaatttctggttagaacctgaaatagcaaaaatagctacaaacaccattgcacgtaaatcagaacaagtaagaagaggaccagttacacgtgcaatgattttagcaactgaaggtgcattaactaaagaaactttaaggattgcagaatttacacaagaaaaaatcactgaaggaatggatttaagtgatattacaaaagcactagatgatgaaaaacttaataatgtttgtaaggcggcatctagtttatttagtggaatgatggataaggacattaaaatcatgattactaaatatgctggaagatcacgtaggaaagaaaatccatttttagataattatgctggttttgatactaatgtcgatgttgaaatagaaattgaaggtgaaaaaatagttatggaaaaattagccaatgaaataattcctgatgcggttgttaataaaaaacaagatgtattggaagttttacctcttgcatcagttcctgttacagaattacaactttgcggacacactatcgttaatgtaattgttcctgctgccgttgcaggtgcaatgggtgttgatgaaagtgaagtcattgctaaaaaagcaacaaaaggtgcttatataacttcatctattcctggtggaattgaaagggcaagagatgtggctaaaagagctgcaaatataatgaaagatttaaattaa

SEQ ID NO: 7526 - DNA, 849 bp, Methanobrevibacter gottschalkii
  source 1..849: mol_type = genomic DNA
gtgtttttaatatttgttcgtggagtattgatgggttctgctgatattgtccctggtgtttctggtggaacaattgcattgattactggaatttatggtcatttggtagaagcaattagcaatattcgtttcggttttttaaaacccttgtttaagggtgattttgatggttttgtaaatagtattcttgatgaaatcgattttaaattccttatacctttaatattaggtatcggtgttgcatttttaactcttgcaaaagttgttacttattgtatggatgtatatactgcatttacttatgcattctttttaggtttaattatagcttcagctgttattttattcaaaaaactcaatcatattaactttaaaaacatattattcgctttaataggttgtattttgacatttatatttgtaagcttaaacccgattgccaccaatcattccttacttgtattatttatttcaggaatgatagctatttgtgcaatgattttaccgggtatttcaggttcattcttattattgcttcttggacagtacaaatacatgttaaatgcccttcataattttcatctttcagaaattattgtttttgtagttggtgcacttattggaattcttggattttcaaaaatcttaaattatttacttaaaaaccatgaagagataacaatggcttttcttattggtgtaatgattggatctctaagagttccatgtgtagaaattgcaaactcaattagtataaacattgctagtttattcccatgcttaattgttgccgtgattggttttgcaataattattgtcttggaaactagatttgattatattgattaa

SEQ ID NO: 7527 - DNA, 2577 bp, Methanobrevibacter gottschalkii
  source 1..2577: mol_type = genomic DNA
atgattaaaaaacagtggagattatatccgattggttcaccaaaaggtgctttgaaccgtaaaagagaacctgatttcgttggtaatataaaattttcaagaaatggggatgttctatcaatttcaagatttgttgccgattataatttcaatgataactccacattaaatgaaaagttaatgcctccgggggaagtaattaagcttctacgctcacaagctgtttttcttgcaactcctgatgatgatgtggagaagtttttaagatcccttaatatcaaagttagaaaaactcaagtctgtgacttttgtgcctatgagggtgatattacaattgtcaactcttcctattcatataagtaccacaatcaattaatatgtaggaattgtgcatttgatacgataaaacaagaaatcaaacttcaaggtttcgataaaaagatttttagaaatttaaaatctactcttgaaaaaacaggaaatctggaaaaaacattatcagttcttgatcctcactttgatcctttagggaatactaatttaacattatttgataaaacaaaaaaatcaaagcatatcatacctccagttgatatgaaaaggcttaaaattcctaaaaactttaaaaaagttcttttggaatctggaaataccaaattgctgcctgttcaatatttggctattaaggaaggtcttcttaagggtgaggatttgcttgttgtaagtgcaacaggttctggcaagactttagttggtgaactttcaggcattacaaaagcacttaaaggtaaaaaattcatctttctcactcctttagttgctcttgctaatcaaaaatatagggattttaaaaagaaatactctaaactaggccttaaagtatccattaaagttggaagaaatagagttaaggctaaaggagaacttaaccttccagattcagatgtatcatcctcagatattgttgttgctacatatgaaggaattgattatttgctcagaaatggtaattcgcaggcattatctaatttgggtgttgttttaatagatgaaattcacatgattgatgatgaagataggggaactcgtttgaatggtttaattaaacgtttaaaaaacttatatcctaaaactcagattatcggattatctgctactgttaaaaaccccgaatttttagcatctgaatttaatatgaaattagttcaatactctcaaaggccagttccattggaacgacatttggtttatacaagaaacgaatctcaaaaaagacatttgatgagaaagcttgttcaaaaagagcataatactaaatctaagaaagggtatagtggacaaactattatatttacaaattcaagacgtaaaacccaccaaattgccaattatttaaataacaaaagagttaatgctcaagcataccatgcaggattgtcttattataaaaaagagataattgaaaaagattttgataagggtaaaatatcttgtgttgtaacaacggccgctcttgcagcaggtgttgattttccagcatcacaagtaatatttgattcacttgtaatgggaaataaatggattaacccaaatgagttctcacaaatgttagggcgtgctggaagaccatcttatcatgatagaggtgttgtttatttgatgcccgaagtaggtaatgattttgccggtgaatctgaagaagcaaaagcgttagaccttttagaaagcaatagtgaagatgtatatatagaatatgatgaagaatcctcttatgaacaaattctcgctgacatttcatccaattcaattaaatctagaaatgaattgaatgatttctatgaaaatattgatgttccaatttcacttaaaacagcaactgatgaaatggaagatttaggattaattagatatgcctcaagcaataaatttgaaattaccaaatatggaagagcaacttcagtgtcatttttatcagtcgatgaagcagaatttattaaaaacacattaaataataaagaatacttaaatagatatgttgctcattctccaatgtataagaaaaagaaaaaatatgataaactaaaagtattggttttagctatggcattggatttggaaatgtttgaaaatgcatatttatctagtgtcattcacaatcaaattgcaaatgcccttaaaattaaattttcaacaagattattcgcagaatctactttggatattatatctagtggggaagctattgaaaaagttgataaaaagttccaagatgcattgattgctcttcaaagtgatttcatgcaatgcaaatgtcaggataggccattttgcacatgtatgcagaaaggaatttctgaagttattattcatgaaaggcttaagggaaaagatccccaagatatctcaaataagttatttagaaaatatcagattcaagtatatcctggagatatattttcatggttagataattttgttaagaatttggatgcaattaaaagaattgccaagtcatttaatagaagtaatgtagttaaaaagactagttatttaatcaagaaaattgaaaatgggtga

SEQ ID NO: 7528 - DNA, 420 bp, Methanobrevibacter gottschalkii
  source 1..420: mol_type = genomic DNA
atgaaaggatgttattgtttaataattaatgttgattctaaaaaaacaatcaaaatcggcaaattgggaaaaatccagtttgaaaaaggatattatatttatgtaggttctgccatgaattcactaatggcaagaattaaaagacatttaagtgacgaaaaaaaacttcattggcacattgattacttattaaaaaatgcagagataactgatgtaatatataacagttcaacaaaaaaagtagaatgtgaattatccgagtttattggaagtaaaaccactggaattacagattttggatgcacagattgtgattgcaaaagtcatttatattactttaaaaataggaataaagctattcattgtgttttaaatgcttatgactcaatagatattccatgtgaattttttaaagaatga

SEQ ID NO: 7529 - DNA, 414 bp, Methanobrevibacter gottschalkii
  source 1..414: mol_type = genomic DNA
atgatttttaaacttcaaactaagggacataaaaatgtcacttcacttcataaatctacttttgaaataaccgaggatgttgaaattggactggctgcggattgtattattggaacaagtatggacaaatccatgtctgattttccagaagaatttaaagataagatagctaattcaaatacaaaaataacagttattttagatacggagaatggacatgatgaaattgttggttttggtcatgaaaatttgacattaactcatccaacagatatggtatcaagaactagcgattatacttgttcccgtacattaatgattaaagcaaataaagctgcaagagatcttgatgataatctgattgaagatttaaaaaatgaaaaaatcatggatgttactataaaattagagtaa

SEQ ID NO: 7530 - DNA, 852 bp, Methanobrevibacter gottschalkii
  source 1..852: mol_type = genomic DNA
atgaaagctgtaattccggcagcaggttttggaactagatttttgcctgctactaaagcacaacctaaagagatgttgcctgtttttgataaacctactattcagtatgttattgaagaagcagtagcttcaggtattgatgatattttaattgttactggtagaaataaaagatctattgaagatcattttgataaatcatttgaacttgaacaaactttacagagtgctggtaaagatgatcgtttaaagcaagttcgtgctattactgatttggctgatatttgttatgtgaggcagaaggagcagaagggtttgggtgatgctatttattgtgctaaaaagcatgttggtgatgaggcttttgctgtaatgcttggggattctattactaaagggccaactccatgtactaaacagttgattgatgtttataggaagtatggtgcgtctgcaatttctcttgaagctgttccaagagaaaaggtggaaagatatggtattattaagggggaggaagttgaaaagggtatttataatatttctaaacttgttgaaaaaccgttagctcatcaggcaccatctaatttggctattatggggcgttatgtattaacacctgatatttttgatagaattgatgaaactgaacctggtgttggtggtgaaatccaactgacagatgctcttcaaaaattagatgcaatttatggggttatttttgatggaaaaacttatgatattggtaatcgtttagaatggttaaaaacatcaatagaatttgctctagatgattctgaatctaaagacattttaatcgaatatatgaaagaaatgattgatggagtttaa

SEQ ID NO: 7531 - DNA, 1266 bp, Methanobrevibacter gottschalkii
  source 1..1266: mol_type = genomic DNA
atgcagtatagattaatcaaaaaaacaggggatgaaatttcatcaattggttttggtgctatgcgtttgccattgaagaatggtaaaattgatagaactgaagcccgtaaacttatttttcatgcaatagataatggaatcaatttcattgacactgcttatttgtatggtgatagcgaaacgtttttaggggaaattttaactgaggatatacgatccaaggttaaaatatgcactaaattacctgctatcaatgttaaaaaatatgaggacatggaatcctttttaaatgaacagttaaggagacttaatattgattgtattgattattatttaattcatggggtggatttaaaaaatatgaatcgcttgctaaaacgtgatttgattaaattcattgaaaaagcaaaatctgatggtaaaataaaatacattggattttcataccatggtcctaaagaagaatttcaaactgtagtggactgttatgactgggatgttgtaatggttcaatataattactttgatgaaaatgtccaagctagtatagaaggaatagaatatgcggcttcaaaaaacatgggtatttttgttatggaaccattaaaaggtggaattcttgcaggtaatatgcctaaagaagcagagaaagtttttagaaaatctaatccggataaaactaatgctgcatgggcattggaatgggttttaaataatcgtaatgttacatgtgttttatcaggtatggatagttttgagcagcttgatgaaaatttagctgttgcaaatagaactacaccaatgtcgatgacttttgaagatttggaaactgttgaacttgttaaaagagtaatgagaaattccttaaagattaattgttctacttgtggatattgcatgccttgtccacagggtgtaaatattccggaatgtatgaaaatatataatgagaaatatttatttaaccataaaggaattgctaatctgtataatgatgtctacttatttaatccaaaaggtcttattaatcagtctttcattgattattaccaatatgtaggtggaattatgggaaattctggaaatgcaggtaaatgtaatgcttgtggaaaatgtttgaggaaatgccctcagaaattggatattattgcagaattggagaaggttaagaaagaatttgaatttcctggtgtcaaatatatgttgttatttgttaaacatgttggtttcccactttataaatttataaataaattattaaactaa

SEQ ID NO: 7532 - DNA, 210 bp, Methanobrevibacter gottschalkii
  source 1..210: mol_type = genomic DNA
atgaaactcgaagaattattagcaccatgtccaaaatgtggttcaaaagacaaaatagctcacagaaaaatgttggataatcatagagctcacgcagaaatggatactgtaaaatgtgaagaatgcggttatattttcttcgttaatgaaaacatggaagaagatgagaaaaaacaattactgaatgaattaaacaaaatatacggttaa

SEQ ID NO: 7533 - DNA, 1113 bp, Methanobrevibacter gottschalkii
  source 1..1113: mol_type = genomic DNA
atgattattcccactctcaattgtccatcaaaatgcaaatattgttggggttctgaaaataaaaaagaaatgatggatattggaattatagatcagattataacttggttaagtgatttcagagatgataaagttcattttacattccatggtggtgaaccgcttcttgcaggctatgatttttacaagaccgctttagaaaaattgtctctattgcctaatttagatggattttctcttcaaagcaatatttggcttttaactgatgaacttattgatttatttgttgagtacaatgttgttgtaagtacaagtattgacggaccaaaagaaatcaatgattatcaaagaggggagggttactttgataaaacaatggccagatatgaagctgctaaaaataaaggattattaattaactttgttttaacagtgactgattattcaaaggatttctctgatgaattgtatgatttctttaaaaatgaaaagatgaatttaaaaatccatgcagctcttccatcacttcgtggagacaatgcagattcctgggcccttgaacaagaagagcatggtaaattattggttgaatggttggataaatacctttatgacctggacaaattctcaataatggatttagatcatatctctaaaagttcacttagaagaaggggaactctgtgtacctttgcagattgtataggaactacatttgcggttggttttgatggttctatttatccatgttatagatttgtgggaatgccggattacattttaggtaatgtcggtgacaatccaagtttcgatgacttaaagacatctgatgcatgggtgaaacttcaagaattcagagattatgttgatgaaaactgtaagaaatgtaagcatgttaaatattgtgaaggaggatgtccttacaatgctattgttgcatatcagacacctaaagcagttgacccgcagtgtagagcatataaaatgatatttgatgaagtttcaaaaagaatgaacaaagagtttgctcgttctgcttttggtttaggtggttctgagcctaaaggtgaaggtgaagcttttagcataatggatttggctatgaagcattaa

SEQ ID NO: 7534 - DNA, 2049 bp, Methanobrevibacter gottschalkii
  source 1..2049: mol_type = genomic DNA
atgatagatgaaataactgatttcctatttggattaaaaatgaccattgtttcaggtatatttttattaattgcagttattttcatgatttttggagttaatactccaatttatttaaaccctgcatggggaacagtaataataagcggtattccaatgttgacattagcaatgtcaagattaatccgtgaaaaatggatttcttctgcacttttaattgcaattgctatggttgcctcacttttgattggtgaagtttttgcagcaggtgaagttgcatggattatggcattaggtgctattttggaagactggacagtggaaagagctaagaaaggattaaaaaatcttattaatctaactccacgaacaggtaggagaataattaatggtaatgaagagatgatatttgtcaatgaaattaaaattggggatattttaagaattcttccaggtgaaagtgtacctgttgatggtgaaattgtaaggggtacatcttcgcttgatcagtcaattatgactggtgaatctcttcctattgataaagaagtaggtgatgaggtattttgcggaaccatgaatatgtatggcgcaattgacattaaagcaactagtttggatgaaaattcatcacttcaaaaattaattgatcttgtaaaagcagctgatgaaaaacaagctccaacacaaaggattgctgataaatgggcaacttggcttgttcctgttgcattaataattgctgttgtatcttggattgtaacgggtaatattgaacgtggagtaacagttttggtagtattctgcccatgtgcattaatacttgcaacaccaactgcaataatggctgctattggtcaggcaacaaaatatggggtacttattaaatctggtgaagcacttgaaacccttggtggtctaaatactttagtattcgataaaactggcacattaacttatggtaacttagaagtttctgatgttatctccttaaatgagcatttaactgatgaagatttgctaaaaatcactgcttcatgtgaaaaattaagcgaacatccattggccaaggctattgtaaataatgcaaatgaagttaaaattcaaattgaagaaccagaagaatttaaaatgtatcccggtaagggagttacatgtataaattcctatggtagagtatatgtaggaaactccaaatttctatccgaaaacaatattcatataaatattgatagtcaattagacaaattaaaacatgaaggaaaagcctcaattataattgcattaaatggtgaagtcattggattaatcggattatctgatgttgttcgtgaagattccaaaagcatgattgataaattacatgatttaggtaatgagactatattgctaacaggggataacacagaaactgctaattactttgctgcaaaagtgggaattagcagagtttatggaaatttactgccgcatgaaaagcttgatcggattgaaaaactcaaaaatgatggtaaaaatgtctgcatgattggagatggcgtaaatgatgcacccgctttaaaaacttctgatgtgggtgttgcaatgggttcagttggaagtgatgtagctatcgaagcagccgatattgctcttttaggcgatgatattggtaaaattccctatcttaaaaaactgtctaattctacattatttacaattaaagcaaacattgcaatttccatgacaattaatgcagtagctattgtctgttctgtacttggtttattaaatcctgtaaccggtgctattgttcacaatgccggatcttgtcttgtagttttaaatgcagcattattatatgacaggcactttgatgattcagttaaaataatggatactgaaagtgttgaacattctcattatcatttccacaatgatggtgaacacacacattctcatgaccatgttcatataattaatgaaataagaacagataatggaattaaacatattcatgctcacaaacatgcttttagaaggcaaatttgcaaaacttatcacagttag

SEQ ID NO: 7535 - DNA, 903 bp, Methanobrevibacter gottschalkii
  source 1..903: mol_type = genomic DNA
atgttaacatctgttcaaaaggaaattttacaaaccttaataaatttatatcaatcatctaatggtaagtctattaagggagaggatattgctgaggttatgggaaggaatcccggaacaattcgtaatcagatgcaatcattaagaagcttaggtttagttaagggtgtaccaggtcctagaggaggatataagccaactattgaagcttaccactctttaaacataactgtttcagataaagattccaaagtgcctatttttaaaaacggcaatagggttgaggatatttctgttgcaaaaattgaatttactagtgttccacaaccgagtgaatgtgaagctgctattaaagttttaggaagtattaaagacttaactttaggcgatactataagtattggaccgactcctgtcaacaacttaggaattcttggaactatagttggccgtgatgatatggacaatatacttttacttgatacgaagactattagaagtattcctaaacaatcagttggtgaaattgcaagtcgtgatgtcatatcctttaaaatgaattgcactataaaagatgccgcaaaaagattagctgaaaatgagattgatggtgcaccggtaatgaaggatggaaaagtagttggtgtattcacagtgtctgatcttgttcacgcgattgctgaagataaagataattgtactgttggtgaattgatgtctacaaatcttataattgttaatgaggatttgaaaatagctaatgcaatcgaagtgatgcttaaaaaatcaatttccagattaattgttgcagataacaatcaagatttactaggtattgttacaagaacagatttgattaatataattgccaatttagatcaattcccaataattacaaactaa

SEQ ID NO: 7536 - DNA, 924 bp, Methanobrevibacter gottschalkii
  source 1..924: mol_type = genomic DNA
atgaaggttaaccaaattaatgtagaaagtaatatgaatgtgtctgatttaatagataattttgatgcatccggtgttttgggtgctggtagagtagctcgtgcacgtaatattttagttgacatgatacaagataaagacatgaatgtgtttatgagtcttggaggtcccttaatacctggaggtatgagaaatgttgtatctaaaatgattaaagaagggcatgttaatttaattgtttcaagtggagctaatttaacacatgatcttgtagaggcatttggtggagctcattatcgccatgaaggaaaagatgatgaagaattaaatgaagaagggataggtcgtattgctgatattaatgttggttcagatgattttactatttttgagacagaaataactaaaatatttgaaaaaatagcttctaaaaggaaagttatttcaattcaagaattattatatgaaattggtcttctagttgaagatgaaaactcatttattgcaaatgctgcaaaaaataatgttccaatttttgctcctggaataattgattcaatgattggattgcagctttggattttttcccaggaccatgactttacaataagtgctgcaggagatatgccttatctatctgatattgtattcggttcggagaaagttggtgcaatccttttaggtggtggccttactaaacattatactttagcatctaatgtaattactggaggacttgattcagctattcaaattacaatggataggcctgaagcaggtagtttaggtggagcgccattagaagaagcaaaatcatgggcaaaagcaaaatgcggatctaatttagctagtgtggttggggatgttacggttattttcccattaatttatgcatctgcattagataaaatcaatagtgattag

SEQ ID NO: 7537 - DNA, 480 bp, Methanobrevibacter gottschalkii
  source 1..480: mol_type = genomic DNA
atgaaatattcggatgatttatttgatgacaagaaggatttaaaatttgcaagtgttttcggtgttttatgtgctattgcatctgctggtgctacaatttatagtacagaagcagcatatatttttattgcaatcctgttaggcaatttaatagctctaaaagtagatggcattcatcatattataacattgcttttgtttgttttattatgtctcgtattcgggattcctgagttaagttatgtcattttattaatctgtattttagcagctcttggtgatgaagtaggtcatgaattaatctcaaaagttactgataataagtttttaaatctatttttcgaatataggtttgtaatgaaagttgtgattttacttttggctattggtggtgtatttagtatttggatattcctatgctttttatcctttgaaatagcttatgaatttgcaggaattatttttgaaagatttaattaa

SEQ ID NO: 7538 - DNA, 246 bp, Methanobrevibacter gottschalkii
  source 1..246: mol_type = genomic DNA
atggcaaacgaagtaaccaaattagtaatggaaacaatcttaggattaattactactgcatttgcatttgtagcaggtttagcatggaatgatgcaatccaaaaattaattgcaacaatcattggtactggagatgcacttcctagtttatttatctatgcaatcatcgtgactattgttgcagttgttgttacagtacttcttgcaagagtagcaggtaaaatgggcatagaacttggtgaataa

SEQ ID NO: 7539 - DNA, 648 bp, Methanobrevibacter gottschalkii
  source 1..648: mol_type = genomic DNA
atgaatataaaaaataacttaatcttagcccttgatgtaatgaacgaaagtgatgctattgaaatttgtgattcaattaaagaatacattgatacaataaaaattggttatccattagcattggcagaaggtcttgaaattattaataaattaaaaaataagtttggatttaaagtgatatgtgacttcaaagtagcagacatagacgcaacaaactctaaaatatgtgatgaaacttttaaagcaggagccgatgcaataatctgccatggctttgttggagaagacagtgttcaagcatgtctgaatatggcaaacaaacatggaaaagaattatttttacttactgaaatgtctcatcccggtgctaaaatgtttttacaaaaaaatgcagatgcgatagctcaaatgggagtggatatgggaatcaccaactatgttgcaccagcaactagattagatcgtttatcagaaatcagaaatattgttggaaatgaatcatacattatttcaccgggagttggaaaacaaggaggagacggtaaaaaaacacttgaatactccaatgcaatcattgttggaagaagcatttatgaatcagaaaagccaaaaactgcatgcaaaaatttaattgaatctttaaaataa

SEQ ID NO: 7540 - DNA, 666 bp, Methanobrevibacter gottschalkii
  source 1..666: mol_type = genomic DNA
atgcatattatggaaggatatttaccattaacatggtgtattgtgtggtttgtcatatcattcatcattgttgcatttggtatttatcaaattaaaaaaattgttgatgaaacccctgaatctaaagctttacttgctgtaagcggtgcattcatgttcatcttgtcatctttgaaattaccttctgttactggaagttgttctcacccttgtggtaatggattgggcgcagcattatttggtcctgcagtaactgcagtattagcaactattgttcttttattccaagcaattttacttgctcatggtggtttaactacattgggtgcaaacatattttcaatgggtattgtcggaccattcgtcgcatggattgcatacaaaggtttgactaaagctaatatctcttctaccattgcaatattttttgcagcatttttaggagatttattaacctacgtagctacttcattccaattagcatttgctttcccagctcctactttcagtgcagctttaggaaaattcttagttatttttgcagtaactcaagtaccattagctattggtgaagctatattgactgtaattatttgggatagattaaaagcttacaaaccaaaattgttgaacaaacttggtgcattagctcctaatgaagcatag

SEQ ID NO: 7541 - DNA, 288 bp, Methanobrevibacter gottschalkii
  source 1..288: mol_type = genomic DNA
atgaaaacatctacattaattattttagcagttgtttgtattatattatttgtagcaccattggcaatgtataatggtcatggggaagatgatggatactttggtggtgcagatgatgctgcaggcgaagctattgaggaatcaggttttgaaccttggttttcatcaatttgggaaccacctagtggtgaaatagaaagtttattatttgctcttcaagcagctataggtgcaatcattattggatatgcatttggttactggagaggtaaaggtaaagaagaataa

SEQ ID NO: 7542 - DNA, 690 bp, Methanobrevibacter gottschalkii
  source 1..690: mol_type = genomic DNA
atgaaatttgacatggattatattgcgcataacaatgctttaacagaaacaaatccttattttaagttgtttttaacaataatacttttaattgttacattagcatttgataatttatattttgatgtaacagtttttgttataatgtctattgtcatattaaccattgctaaaattaattacaaatcatatttgaaatttctatcaattccaatggcttttcttgttataacatgtatatttttaatattcttctttggaaaaggagatgttatatatgaaacaggaatattgggtattgtagttactaccgattcgtggcactatggtgtttacacatttatgagggtgttgggttgtttaccctgtttaggatttttagctctaacaacaccaattgcaaagattttaaattgtttaaggactttgaaagttccaaaaattttaattgaaattgcacttttaatgtataattcaattttcatatttttaaatgaaatcgatacaatgcaaaaagcacaagagactagacttggttatcattcctattggtcttcatttagttctttgggggctcttgtaagtataatatttttaagatctcttgataaaagtgaaacattacagtactctttagactcaagaggttattctggtgaacttccggtttacgaaccaaaaaagagatga

SEQ ID NO: 7543 - DNA, 843 bp, Methanobrevibacter gottschalkii
  source 1..843: mol_type = genomic DNA
atgattaacatgttagaagtaaaaaatattaaatattcttataattcaaattatcaagcacttaaaggagtaagcttaaaagttgataaaggtgaaatggtagctcttttaggtaaaaatggtgcaggtaaatctactttatttcttcatttaaatggaatttacaggccggatgaaggaaaagttttcattgatggtgaagaattaaaatatgataaaaaatctctgcttaagtttagacaaaaggtcggaattgtatttcaaaatcctgatgatcagatatttgcaccaacagtcgaggaagatgttgcattcggtcctctgaatttaggattgccaatggaagaagttcaagacagagttgaagaagcattagttcgtgttggaatgtcaggttatgaaaaaacagctcctcatcatttaagtggcggacaaaagaaaagagtagctattgcaggtattcttgcaatgaaacctgagataatggttttggatgaaccaactgcaggtcttgatccacagggagttgtagatttatctaaattattgagagaacttaacgatgaaggaattacaattataatttcaacacatgatgttgagttagttccgaattatgctcaaagagtatttgttttagttgatggtttattgattgcagaaggcactcctaaagagatttttgcaaaaccagaaattttggaaaaagcaaacttgaaagttccaattgttacagaattatttcaaaaacttgaagatgaaggttttgacatggaagggaattatcctctaacaattgatgaagctaaggataagtttttaaaattattgcacgaaaactaa

SEQ ID NO: 7544 - DNA, 459 bp, Methanobrevibacter gottschalkii
  source 1..459: mol_type = genomic DNA
atgagaattggaatttgtgatacaacttttgctcgttttgatatggctggagcagctatagatgagcttaaaaagaatgcttatgatttaaagataattcgtcaaacagttccaggggtaaaagacttgcctgtaactgctaaaattctcattgaagaagaaaactgtgatattgtaatggcgcttggaatgcccggaccaatgaaaaaggataaaatgtgtgctcatgaagcatcaacaggtcttattaatgcacaactgatgacaaataaacatattttggaagtatttgtacatgaagatgaagaagataatcctgttgaacttgctaaacttgcagaaaacagggcacgtgaacatgcacaaaatttaattaaaatgatgtatcacagaaaagcaatgagaaaagaagctggaatgggaatgcgtgaaggaaaagaaaatgcaggaccattataa

SEQ ID NO: 7545 - DNA, 708 bp, Methanobrevibacter gottschalkii
  source 1..708: mol_type = genomic DNA
atgggatttgaagtcacagaggaagataaaaaagctacatatgttattcttccagcatataatgaagctacaagaatccagcctgtaattgaagaaattgcggaaaaaggatataacatgattattgttaatgacggttcttcagataatactttggatgttataaaggaatctcaaaataagtatcctgataagatttttatttactctcatatgattaatcgtggtgttggagtagctatgcaaacaggctttgatgctgttttaagatataatccaagatatattgttaatatggattctgatggtcagcatgatgctgatgatttggaaaatgtattggaacccttaataatgggcagggctcaggcagtaataggggtcagacctttaaaagacatgcctttaactaggaatattgctaatgcaataatgaatcttctcacaaaagtattttataaagttgatgtaagtgattcacagactggttttagggctattacaattgatgctttgagaaaaataaatattaatgctagaggatatcttatctcttctgaatttatacgtgaagtcaatgataataaaattccatttgaagaagtcgagataagaacaatttacactcctgaaactcgagcgaaaggaacaaatgtggctgttgcatttaaaatattaattcaaatgattaaacacaggttgaggtga

SEQ ID NO: 7546 - DNA, 348 bp, Methanobrevibacter gottschalkii
  source 1..348: mol_type = genomic DNA
atgttattttattcaattttatttccaataatatctttaattgctattatttggcttttatggagatatctgaatgaaaaagattctttaattacggttattttatgggctgttttcttgattattgttagtgtatttgcaattttccctcatgcaagtactacatttgctaaattgtttggtataactcggggattggattttataatcataattgtatttgcagtgttggtatatacaatttttaaattatattataaaatcgataaattagaagataacataaataaaatagttaaagaagtagctttgagcaatgaaatatcccttaaagataaagaggattaa

SEQ ID NO: 7547 - DNA, 672 bp, Methanobrevibacter gottschalkii
  source 1..672: mol_type = genomic DNA
atgttgtattttagaggatgtacagcacgggaaaaattaaataatattcaatctgcaactgaaaagttattaaaactggcggatgttgattatcatattttagatgatgaaaaatgttgcgggtctgttttacttagaacaggttttttaaaagaagctgaagatcaaattaaaaaaaatactgaaattcttaaaggagaaaccattattacttcatgtgctggatgttataaaacattaacagaagattatgatggtttggatgtaatccatatctcccaattacttgatgagctaattaaagaaggtaaactcaagttatctaaaatggatttggatgtcactttccatgattcctgtcatttaggacgccattgtgctgtttttgaggaacctagagatgtgattacatctgttgctgatattgttgagatgaaaaatattcgtgaaaatagtttgtgttgtggtgctggcggtggtgtaaaatctgcttatcctgaaattgcagatcaaatggcaaaatcaagaatagaacaagcaaaagaaacaggttgcaaaacgttggtaacttcatgtcctttctgtaagcttaatttggaaaacggtgatttggaagtacttgatctaactgaatttttagttaaatatggtggtttaaatgaaagacagtga

SEQ ID NO: 7548 - DNA, 1203 bp, Methanobrevibacter gottschalkii
  source 1..1203: mol_type = genomic DNA
atgaaagacagtgaacttgaaacaatgagaaattcatttaatacagttaagaatagatcaaattcacttattgaatcaccatctgctaaaagactgatttcaagaggtcgtgaaatcaaaaaatattcaattgaaaataatgatgaattacttaatcaggtttgtgaatcatttaaacgtaatgatgttgattttaaaattgctgaaacggcagaagatgctctaagtattatagatgatttgctctgtgaatatgattgcaataccattgcaaaagctaaatctaatactttaggtgaaatcaatcttaaaagacatttagccaatgaaaatattgatgttgttgaaacagatcttggagatagaattttacagcttaaaaaaattgataataaaccagttcatccaactggacctgcttcacatttgaatgttgataatatcactgatattgttaatgaatcattggatgtcaatgttaatccggttccaagagaaatcatggaagctgtaaggtatgatgtgcttaagcgtttggaaaatgcaaatgtaggtataagtggagctaacgcaatagcatctgaagagggatctattgtgatggtgcataatgaaggtaatatttcgcttgtttcactaaaggatttgcatataattgtggctggaattgataaaatagtgcctacattggaagatgcaatttcaattgtaaagcttgaaactatatttgctactggaaactatgtaacatcatatatgaatgtaatttcaggaccatcaaaaacagcagatattgaaaaaaaacttttaaaaaatatgtatggtgctgaaagagtagttgttattttacttgataatggaagaagtgatgcaacacaggaatgtctttattgtattggttgtggtaattgtgttgttcactgtccagtttataatgctgttggaaatgaattcggatttaataattatttaggtggtcgtggagttgcaatgtcaaagttcattgaagatgatgagacatgttataactcaggattatatatgtgcactttatgcggattatgcactttaaattgtcctgttgatattccaactaatgaaattattgaaaatatgagaaaattatctgctgatgccggtttctatccgaaagctcatggaattattaaagataatgtttctagtaaagattcaccctattaa

SEQ ID NO: 7549 - DNA, 714 bp, Methanobrevibacter gottschalkii
  source 1..714: mol_type = genomic DNA
atgcttctattaattagtcctataaatcgtgaagaagctcttgaatcaattgaaggtggagcagacattgttgatgtaaaaaatcctaaagaaggttctttaggtgctaattttccttgggtaattaaggaaattagagaattaactcctgaagataagcttgtaagtgctactttaggtgatgtaccttacaaaccaggtacagtttctcttgcagcaatgggcgctcatgtttctggagcagattatattaaagtcggattatatggaacaaaaaaccatgatgaagctgttgaagtcatggaaaatgttgttaaaactgtaaaagaaataagtgaagaaactattattgtagcagcaggatatgcagatgctcaccgtgtaggtgctgttgagcctatggaaattccaaaaatcgcaaaagatgcaggttgcgaccttgcaatgttggatactgctgttaaagacggtcatactttatttgattatttggatttaaatcaattaaaggaatttgttgatgaagctcacggatatggtttgttaactgcacttgcaggttctgttaaaaaggatcaattaaaaccattacatgatattggttgtgatgttgttggtattagaggagctgcttgtgttggtggtgatagaaacactggtaaaatacaccatactgcagttgctgagcttaaagaattatgtgattcattttaa

SEQ ID NO: 7550 - DNA, 1485 bp, Methanobrevibacter gottschalkii
  source 1..1485: mol_type = genomic DNA
atgtcattttccaaaaaagttcaagaagcaagaatgtcttacacttttgatgattttcttttaactcctaatgcaagttatgttgaaccaaaagacattgatactagaatcgaattaggaaaaggaattagattgaatattccagttttaagtgctgctatggatactgtaactgaagcagatcttgcaattgctatggcacaagaaggtggagtaggtgtaattcacagaaatatcactcaagaaagacaagttgaagaagttaaaaaagttaaaaatgctgaagatttgacaattcgtgatgttataactatcactccggattccactattgcagatgttcaaactaaaatgcaagatgaattgataagtggtcttccagttgttgaaggtgataaaattattggtattatctctaaaagggatattaggccagttttaaaatcagaacctgataaaactgtaaaagatatcatgacttcggatgttgtaactgttgaagagggagtttcagctgaagaagcattaaatatcgcttatgagaataaagtggaaagacttcctgttgttcgtgatggcaaattagttggaattctcactattaaggatattttaaatcaagcacagtatcctaatgccgctcgtgataaaaatggtaactatttagttgctgcagcttgtggaccatttgatttagacagagcaatggcacttgatcaagcaggtgcagatataatttctattgattgtgctcatgctcacaatatgaatgtagttaaattcactgagactattaaggataacattgatgccgagttatgtgttggtaatattgctactgctgaagctgctgaagacttgatatccatgggtgtagatgcacttaaagttggtattggtcctggttcaatgtgcactactcgtattgtggctggtgttggtgtaccgcaattgactgctatttctgatgttgctgatgcagttgaagatactggtgttcctgttattgctgatggtggtattagatattctggtgatgttgctaaagctattggtgctggtgcagatgcagtaatgcttggtaatttacttgcagcttctcttgaagctcctggagatattgttgttatgaatggaaaacaatacaagaaataccgtggcatgggatcaatgggtgcaatgaccagtgaatatgacggtggagcagacagatatttccaaggtcaaaaaagtaaaatgaaccacactaaatatgttcctgaaggaattgaaggtgctgtaccttataaaggaactgttgcagaaatattattccaattagtaggaggattaaaatcctctatgggatactgtggtgctaaagatattgctgctatgcaggaaaaagctaattttgttagaatcactagtagcggtattaaagaatcccaccctcatgatttgttaatcactaacgagagtcctaattatccaactcttgactag

SEQ ID NO: 7551 - DNA, 270 bp, Methanobrevibacter gottschalkii
  source 1..270: mol_type = genomic DNA
atggcaagaactaaaaaagttggtattacaggaaggttcggtgcaagatacggaagaaaagctaaaagatctgtaaagattattgaagaaaacatgaaaaaaaatcatgtttgccctaaatgtgctagaccttatgttaaaagacaagctgctggaatttggaaatgcagaaaatgtggcgcagtatttactggaggagcttacattccacaaactcctatggcaaaatctgcaacacgtaatattagggatattaaagtggaggaataa

SEQ ID NO: 7552 - DNA, 132 bp, Methanobrevibacter gottschalkii
  source 1..132: mol_type = genomic DNA
ttgtataggtgtccaagttgtggagcagaagtagaccacaaaagttacatggaaaataaatgtcctaaatgcagatataggattttatttaaaaatgtgcctgaaactactagaataatcaaagcaagataa

SEQ ID NO: 7553 - DNA, 486 bp, Methanobrevibacter gottschalkii
  source 1..486: mol_type = genomic DNA
atgttaatttcaacttctagaaagccttctcaaaaaactagaaagttttgcaagaacttagctcatgctacaggttcaatttctgttaacagaggtaaaatgaatatgcgcgagttattaatcaaagcattagaagttgaagaatataatctggctattgtaaatgagattaaaggtaatcccagcagaatttcattttactctaacaaaggtaagttattattaacactgattatcggagcatctgaagaaaaagaaaaaatgaacattgctccttctcaattaaaaatagtttctgaagtaaaagaactcaatattttaagtgaaatcttagatatggatttagtagataatgctgaaagtaattatatattaatatccgaagatgaggattcattagctaatattaatttcatcaataaattcggtgacatgaataactttaaaattaatgttaaaaagattttagaggtttcaaatgattga

SEQ ID NO: 7554 - DNA, 267 bp, Methanobrevibacter gottschalkii
  source 1..267: mol_type = genomic DNA
atgattgatgaaagtcctcttgagagggttaggagcaatatagttattgaatttgaagataatgcccaagctaagattatttatgattctattattttagaatttagtactgctccggattttagatcatctatgactattgatttggatgagtctaatatcataattaacatcgatgcagaagattccacatcatttagagcttctgttaattcggctattaaatggattaaattagctttagaaataaatgatttaacaaattaa

SEQ ID NO: 7555 - DNA, 348 bp, Methanobrevibacter gottschalkii
  source 1..348: mol_type = genomic DNA
atggagattcctgaaaatattcaacaacaattaaatcagtttcaacaattacaacagcaagctcaggctataagcatgcaagttcaaaatgttgaaattcaaattcaagaaactgaaaaagctttagaagaacttaaaaaaactgatgaatcaactgaagtattcaaacaagctggtactttacttattaaagttgaatatgcagatgcattatctgacatggaagataaattagaaactttaggtttaagaaaacaaaccatgtcacgtcaagaagaaagagttatgaaaaaacttgaggaaatgcaagcatctattcaatcagttatgcaaggtatgggccaatag

SEQ ID NO: 7556 - DNA, 285 bp, Methanobrevibacter gottschalkii
  source 1..285: mol_type = genomic DNA
atgtcaaaattaaaaacattatcacaagatgatttatcctctatttctgataagtttggtgaaattcttgaaaaagaaatttcaaaatcaatttcaatgaaagaattggaagatttagacttagatattattcttaactatgaaaacgaacagttagatgttgatgttaatgtgggagttttgtttgatgaactttctgaaattactcaagatcaggttatgcagtctattgatgaagcttatttaaagttcgattcatatattgatgataatttcagaatgtaa

SEQ ID NO: 7557 - DNA, 690 bp, Methanobrevibacter gottschalkii
  source 1..690: mol_type = genomic DNA
atgattaaaaaaattccagttatagatttaaaacaacatcaggcagtaagtggtaaatctggaatgagagataagtatcaacctttaaaaacagtttttgccaaatctgccaatcctgttgaaattgctcaaggattaaaattaaatggggctactgaaatgtatattgctgatttggatttaattgaatctgtggggcataatatcaatgatattaaaatggttaatacaattttacctgtaatctttgatggaggagttaaaaattgtgaaggatttgaatttttccttaattatgcttataagattattattccgaccgaaacacttgaaagtattgatgagatgagaaaaatatttgaaaaatatcctaaagagaggattgtaattagtgtggatgttaaaaatggtgaactacttgcaaaacatttaaatttaaatttatctgaatttaaagagattttaaaagagcttgatccaaatgatattattattttagatatttccagtgttggcactgaaaggggatataataaaaagttgcttgaggaatttggagatttaaaagaaaaattaattattggtggcgggttaaataaagattctttagttgaattggagtcattaggtataaaaaaagtattaataggaactagtctacattccggtgaggttaaactcttagactag

SEQ ID NO: 7558 - DNA, 180 bp, Methanobrevibacter gottschalkii
  source 1..180: mol_type = genomic DNA
atggcgatagttggaacaacaatattttctcatattcttccagtaatttgtggattttttggaattgtaatgattatttctggatctttggaaaaaagcaatagtaaattaggattaggtattgttttatttattatagcttgcatattcccgtacttaattttaagtgttctagtctaa

SEQ ID NO: 7559 - DNA, 849 bp, Methanobrevibacter gottschalkii
  source 1..849: mol_type = genomic DNA
atgagaattgacacacatcatcatcacaaaaaagcaggtgaaaatctagcatttgtttttttcatgaatttgacgttcaatataattgttattgcaggtggtcttgcaacaaatagtatggcaattcttgctgattgtattcatgatatgtccgatactatttcaattgcttttgcatggtttttagaacatgttgctcagaaagattcaactgataaatattcttatggttaccaaagattttcaattcttggtgcggtaataatttctatttttgttattattatggctttattgattcttcaagaggctattcctagattattcgctcctgaaagtgttgatgcaaatggaatgcttttaatggcaattgttggattggtatttaaatcaatttcagtttatcgtttacatggtggtgaaacattcaatgaaaaagcaattttattacatcaacttggggatgtccttgaatggattactattttaatattaagtttagttttgatgttctgggatggcgcaccttatttggatcctttcgtatcaatcggtattgcattatggttaatatttaatcttggaatgaatttatataaatctgttgaggttttacttcaaaaaactccaaaccattttgatgttaaagagtttaaagtaaatgttttaaatattgaaggcattaaatcatttgatgattttcatgtttggtcacttgatgggattgattctgtgttgacattaaaagtttctattgatgattggaacaatcaggaaaaaattaaaaatgatatttataatattgcatctaaatatcatattgttgatattactattgaatttgattaa

SEQ ID NO: 7560 - DNA, 885 bp, Methanobrevibacter gottschalkii
  source 1..885: mol_type = genomic DNA
atggtggaaaaaggaactgatgtattaaaagaaggcttcgctaaaatgacaaaaggcggagttattatggatgtagtaaacgctgaacaggcatcaattgcagaagatgcaggtgctgtagcagttatggctcttgaaaaagtgcctgctgatattcgtgctgctggtggggttgctagaatggcagatccgacaatcgtggaagaggtagttgatgctgtgtctattccggttatggcaaaagctagaattggtcatattgcagaagcacaaattttggaaactcttggtgtggacatgattgatgaaagtgaagtactcactcctgctgatgaagaatatcatattaacaaaaaagaattcactattcctttcgtatgtggtgcacgtaacttaggtgaagcgttaagaagaatcgatgaaggtgcagctatgattcgtaccaagggtgaacctggtactggaaatattgtagaagctgtacgccatatgagaatggtaatgggtgaaatcagaaccgttcaaggaatggaggaagaagagatttggaagtatgcaagaaaaattgaagcacctattgatcttgttaaaaaaactgcagaacttggaaaattacctgttgtaaactttgcagctggcggtattgcaactcctgcagatgcatctttaatgatgcaattaggttcagatggtatctttgtaggttccggaatcttcaaatcaaacaatccagaagcattcgcaaaagctattgtagaggcaactgcaaactatgataagcctgaagtgttggctgaggtatccaaagggttaggtcaggctatgaaaggtattgaaatgtcaactttaactgaagctgacagaatgcaggatagaggaatttaa

SEQ ID NO: 7561 - DNA, 813 bp, Methanobrevibacter gottschalkii
  source 1..813: mol_type = genomic DNA
atgactctcgttattattggtcctgtaacccaggatttggttgttattggtgagaaaagcactcataaaatcggtggagccacttattttcaatcttttgtttttgaaaaattttacaatgattatttggctattgtaaactgttctgatgaaaaaatagctaatgaatttccttcaaaggataaagttaaagttattttaaaagaatttactcatttttttataaacaattatccagatgtcaataacaaagattacagggagcaattaagtaattttgttcaaatacctatatttaaaagtgatttggagaaaatcttacctaaaaagattgatgggtttgttattaacccccttaataggcatgattttccaattgaaacaattgattatttaaaaagtttcaatgttccaattttcatatcaattcagggatttttacgaattcctgatgttgaagtaaatggaaaatatgctattaaattaggtacttttgataaattaagtgatattttagaaggtgtctcttcaatatttttagatgaaggtgaagcaaacataaccggaattgactttgatgtagatgaagtagttataactgatggaagtaatggatctagaataatttcagacaatcatgaaactaaaattaatgctgttaaatgtgaaaatattgcagatgcaacaggttgtggtgatacttatatggccgcatatatttctaaaagactaaatgattattctattagatcttctggcgaatttgcttctgatatttccagtaaaaagttaacaaaattcggacattattaa

SEQ ID NO: 7562 - DNA, 585 bp, Methanobrevibacter gottschalkii
  source 1..585: mol_type = genomic DNA
atggtaaaaattggaatactgaatttacagggtgctgtaagtgaacattataatataacacgaaaagcagttaaaaatatgggtgttgatgtggaagttgaatctgtacgttatgccgaagatgttgaaacatgtgatggtttaattatttcgggtggggaaagcactgtcattggaaaactaataaaacaaagaggaattgataaagttattaaagagaataatattgcagtttttggaacttgtgcgggtatggtattgcttagtaaaaaaacagattttaatcaaccgttaattggattaatggatattgcagttaaaagaaatacatatggcagacaaaaagattcttttgaatgtccaatagatatttttggtaaaaaatatttgggagtatttattagggctccagcacttgacagttataatcattcaaaggaagatattaaagttttatctgttttagatgatgaaatcattgctattcaacaaggaccgcatattgctatttcatttcatccggaacttactgaagacaccttaattcatgagcactttattgatggagttataaataggtcttaa

SEQ ID NO: 7563 - DNA, 7176 bp, Methanobrevibacter gottschalkii
  source 1..7176: mol_type = genomic DNA
atgttaaataaatcatctaatataatcgagaaggaatttaaaaatttacgtaaggaattattggatttaactttaagaaatcaacttcttaactttaaatcaagagctaaaaccattactatagtaaatcaaactcctgtaaatctttttcaaacattagttttacaagataataaaatgtattttgtagctaataaaaaagataaaaaggaagacaaatcatcagtatgggatcatattccatttgatttttcaaagttttcagaaggggataagaaattagctactgagttaactcccaaagagcttcaaaagagattgtattatattaataaccaagctaaaacaatgcttcaggaacaaggttataatattttatacttggctatcggttttttagaatggactgacaaatcaaaaccaaaacaaagaaataatgccccattagtgttaattccagttgcaatggaaagaaaaaaggttggtgaatcattcaatcttgaatggacaggagaagacattcagactaatatttcactcaaagctaaattattggaggcaggtattgattttcctgattttgaatttaaaagatatggtgaagttattgaccattatattgcaagtgttcgtcgttcagttagtaaaatggacggatggacagttaacaataatgtagctttaggtttctttagttttacaaaatttgtaatgtacaatgatttaaatccagaagcttgggaagataatgtggatttgactaaaaatgaattaatccaagctatttttaaccctgctaaaaatgaccatgaatcatttagagaagaagatatagattcaagattggaatatcagaatatgtatcaagttttagatgcagattcatctcaaattgcagctattcaggacgtgaaagctggacgtaatcttgttgtggaaggtcctcccggaactggtaaatcacaaaccattgtaaatttaatcgccgaattacttgctgaaggtaaatccgttttatttgtatcagaaaaaatggcggctcttgacgttgtaaaagataggttaacaggggtggggcttggtaaatttgttcttgaattgcattcacataaaacaagaaggaaaaaattccttaaagaattgcagaaagctactaatgtacaatctcaagaaccattaaacattgatcaaactattcgtaaattggagactttacgtcgtcagcttgatgattattctcaaattatacataaaccagtttttgctgttaatttatcagcatttcaattatatggtatgaaagaatctgccgatgatcattttgcaaccaaaaacgcattaatgccattggttagatttgataatcctgaatccattactttaaaagatttggatgatatgaaaatagctttagaaaatcttgctgaattatatcaaacaatttctaaggaaaatccttggagtaaatgctctccaaaaagcttgcttcctgctgatttaagagaaattgaaatgttaattggagattcattgtatgctcttgataatttcctagttgaacgtggcagagtctatgatatttatgggattaaaaaaccagatactttaaatgaattccaaaactccctttcagcttttgaaataattaaatctcaaaatgcagaattaatagatggaaatatattgaaatcaggagcatggaataacaacaatgatgatgcatttaaattaattcaagagctccaaagatatcaaaaatatgctgaaaccttaactaaatttaatcaaagtattttccaagccgacattgatggattagtctatgagttaagaaacatttctaataagaaattcagattcttcaataacaagcaacacattgaacttgttgagagatattattcaataccggtttctggaagtgttgatgatattataagagagttacaagaagcaaaaacaataatcaatattagaaaaagtcttgaagctaataatgcattaggtcaaaaatactttggaggttactggcatttaaatgcaaatatagatgatttaaatgctattgcaaaatggatgcatgaatttactgcacttgtacatgaaggaacattttctgagaatactattgaattaatgagtaaagatttatttgatattaagcctgaaagagacctttcagattatattgatgctggagaggaatttgttcatgtattatcaagacttaaagataaattaaatccaagaagtaaattaatatttaaaagagaaactggggatgttccatttgaatcatggaaggaacagttgtataattggagagggcaactatcaagccttcacttatggtctcaatatttaaatactaaaaattcacttaaatcttcaaatgctaaaatgtttgtagattcaattgagaaaagaaacattaaaaaagaggatattgaagcacttgttgacggaaatttcgctgattcacttttgaatatattgtttgtggaaaatcaggaacttgcaacatttgtcggcgaacttcatgaaaataggattcgtgaattcaaagatttggataagcaaattttagtattgaatcgtaaaaggatttatcaaaaattaaacagcaatattccaaaaatttttggaggaactgaaaatccacaagctaaaatattggccggtgaattcacaagaaaaagtggacatatgccagttagaaaactcttagaaaagactggtggaatgataaaacaaattaaaccttgttttatgatgtctccattatcaattgcacaatatttggatccaacgaatgaagaattgcagtttgatgttgttatttttgatgaagcaagccaagtgaaacctgaagatgcattaggtgcatttatgagaggaaaaacagcagttgtcatgggtgatactcaacagttacctccaacttcatttttcgatcaaatgtctgatgcagaaagtgatgaggaagaagctacttcattagacatggaaagtatcttgcatttgtgtaaattgtcattcccagttaaaatgcttaaatggcactatcgtagtcgtcatgaatcattaattacagtttcaaatagggaattttatgataatgatttattagtttatccttcaccttctcataatgatcctgagcttggtttgaagtttcactacaatccaaataccgcgtatcatagaggttcctcttctgcaaaccctctggaagctcaggatgttgtagaagaaatattcaatcattttgaaaaatatggtgatacaaaaagtttaggtgttggaacattttctgttgctcaaaaaaatgcaattcttgaagctttggaagtaaaacgtaaagaaaggcctgaattcgaacctttattttcggataataaagatgaaagattctttgttaaaaaccttgaaacaatccaaggtgatgaaagagatgttatattaatcagtgtgggttatggttatgatcaagatagaaaaatgtctcttaacttcggtcctttaaaccagaacggtggtgaaagaaggcttaatgtattaattacacgtgcaagagaaaaatgtgttgtattttcaaactttaaagcttatgacatgaaattaacagcgaatccaccatatggtgtaaaatctctaaaagaatttttagaatatgctgaaaacttaacattaggcactgataatcaagattcttatacaagagaaccatttgaagatgcaatagctagttttctggaagaaaacggttatacagttgatagacagattggttgtgcaggatttagggtagatcttgctattgttgatgatgagaatccggggaaatatattttaggaattacaactgatggtaaaatgtattcttcaagtaaagtagcacgggaccgggatagactacgtgagcaggtcttaagcggacttggctggaaactttaccatttatggtcaactgactggtatagaaacagggatttaggacgtaaaaaattattggattttgttcaaaaatcaattcgccaaactcgcgaagaagaaaaacgtaaatcagaagaagagaaaaaattagctgaaaaaagaagattagaagctgaaaaaaaagctgaagagttacgtattgcacgtgaaaaagaagaagcagaaagaaaggctaaagaagaacaagaaactaataatgaaataaacattggagatattggtccagcagactttgttgaagttgaaaaagttgatgatggggatttcttagaaaaacctattgatgttagttcaattaatccttctgaattctttgaagaggaaccctcaaggaattcaataaatgaagataaaacaacaaaagagactccttctgagtttgtcagtattgaacatccggataaagatgttgattttaaaaataattcttctgaagttgctaatcaatattcttctgatgatgaatcatttgaggtaaggaataacgattttaaagatattgaatctgaacatcctaaatcagatgaagatgatgatgaagtcaaaattgaatctcttgatgatttaaatgctgatgaatataatgaagaaaatgaatcatatgaagaaattcataaagaaaatacttctaaagtcatggaaaatgatgaagattattctgatgaatcggatagtatttctaaaaagctttctgataaattcaaatcaattttaaaatctgatgggcaagaacaagaagaaaatactcattcattcttttcatcttctaaatttgcaaaggatttaggtaaaaattcagatttaaatgatgaaaaatcttttgaagtaaatgatgaatttgattcaaaaatcaatgaatatactgataatgaaattcttgaagaaaatccagttgatctggattcaaaagaagatacatctgtaaatgaagaggatacttcagatttcaaaacaccaaaatttagtaataaaattgatttagaatctgatgatttcattgttgttgatcatgaagataatgaagtttcgaagtcttcttctgaaaatattgaaaatgatgatttcattgttgttgatcatgataatgatgaagtttcgaagtcttcttctgaaaatattgaaaatgatgatttcattgttgttgattatgaagataatgaaattgatgaaaatcaaaaatattcttctgttggatctgatttagatgatgaagttataatggattataatgaagttcctaaaaataaatcttatagtgataaaactgaagatatttccaatgaaactactgatgataaagttgatttagatcctgaagaggattatatttatgttgaccatagtcatgacgatgaacgtgtattggatgaagatgatgtggaaaaattcagtttcaaatctgatgaaatttccgaagaaccggaatttgaagttgataaaaaaccacaaggtcaaaaacaatatcatagaaaagggagtacttttgtaaaatcaattatttctgatgttgtcatgggagaatcacatcttgaacaagaagaagttgaaacagttaaaggggaaataattgaagaagatgaggattatgactataaagatgctccaagtgatgattctgttgttgaagcggaaattgtctatgatgatgaagagttgaatattctcaatgacaatcttcctgatgatgcccttgaaaaaccaactcctaaacatgtttatgacgatgaagagttgaatattttcaatgacaatcttcctgatgatactcttgaaaaaccagctcctaaaagaaatcatgatattgaaaatgatgatcttgataagccaactccaaaaatggattatactgaaggcgatgaattaaatatatttaccgatgatttaccagatttaaataaagaagaaattaacagaaatgcaactgatattgtaactaaggcaatggaagaattccttgaggacgtatttgaaaatgatgatgacattgagaaaattgaattagaaaatgaaattaaagaagacattcctcaagataatgaaatggttattgaagataagggaataacagaacacaatatagaggaaacttcaaacgatattggtgatggcgttacttattatcaaggttctaatgatgtaagaagtaaacttagaaaaaacaatttctactatgaagaagaaaaaccaaaatctgttagagaatccattaaaggaattaaaaaagacatggaatatataaataaatcgttaaaggaaattgaaaatcctactaaaattgattatgtttctgttgttgatagaactgaagaatatgatccaatggattatttaaatattccaagtgatgatgattctgataaaatcattgaaaaagaagaagaattaacatttgctgaaaaagaagagttaagaattgaaaaagaaatgatgatggatgatcttaaaaaagaaataaaagaagaaaaagatgtcattgttccagttcatgaacaggataggcgagaagagcttaaagatcaagcattggaaaatattatcttaagcgccaatgaagattataaggaaatagaacgtgaaagacgtagaaaagataatcagtttaaatcatttgatgataataaacttccgggaaaaagaaaaatggaagatgaaattgttgattatgtccatattgaggatattggattacattcctcagatgagttatacagacaatcaatagataaaattgctaaatctatcaatgatatcgtagacattgaaggtccaattcatgttagtgaagttacaaaaagagttaaagagtcatgtaatattaaaagagcgggagctaacttgaaaaaacgtgttaatgaaggaatcagtgaagctgaaaaattaggatatattattagaattggaaattttttatatgattcttcaaacaataatattgtcattaggaaaagaaataaaccaaatattgagctgatttcagatgaagaaatagctaaaagtattgagacagtattgcttcacaagcaaaatgttacaacaaaacaaattgcaaaggaagcatcacgtaattttggtttcaaatcaacttctaaaaagacagctacaagaattaatagcattttggatttaatgattgctaataataaagttaaactggataaagatattgttgaacttaaatag

SEQ ID NO: 7564 - DNA, 1752 bp, Methanobrevibacter gottschalkii
  source 1..1752: mol_type = genomic DNA
atgtcaaccaaagttaaatctcctgataatttgccaaataaacctggtgtctatattatgagagacaatacagacactataatttatataggcaaagcaaaaaatcttataaaaagagtcaaatcttattttagagaaaaacttgataggccaaaaactcaagttttaatgagtcattttgatagtttagagtatattgtaactaattctgaaaaagaagctttgatattggaagctaatttaattaaaaagcatcgcccaagatataatgtccaactaaaagacgataaaagatatccttatgttaaaattactgatgaggaattcccacgtttggtcattacaagaaatgtaacaaaaaatggggtgtattttggtccgtttactgatgtgggttcagttaaacagactgttaaatttttaaaatcattattcaaaataagaacctgccgtaatatgaatgggccttgcttaaactcacagattgatttatgttatgccccctgtgatggaagaatttctaaaaaagaatattctgaaattataaataaaattgatttgtttttccaaggaaaatactcaactattgttaaaaatcttaaaaaagagatggcggatgccgctggtaaggaagagtttgaaaaggcagctgtgataagggatcaaatttcatctattgaggagataatggaaaagcaatttgttgatttggttgatgatgatttggatcaggatgtaatagctatggctatgggtaaaaatgaggttgtagttattataatgccgattagaaatggaaaaattgttggccgtgatgactttttaatgagtggctctaagtatgattcaccttcagaagttatgttttcatttatacagcagtattatggttataacagacatattccaaagcaaattcttttagatgaggatattaatgataaaaaattgcttgaagattggttaagtgatttgaggggtaataaagttagaattaaaattcctcaaaagggtgttaaattaaggcttgtaaaaatggctaagaaaaatgctgagattattaaacatcaaaagaaaaaaatggaaaattcattaatagaacttaaaaaataccttaagcttgaaagaatacctcatgtaattgaaggatatgatattagtaatatttcaggtaagtttgcagttggttcaaaagtatcatttaaagatgcaaaacctaataaaaaaatgtataaacattttaagatggaaactcctggtccgaacgattttgcaatgatggaagaattattgacccgtagattaaaactgattgattcagaccctgaacctgacttaattgtgattgatgggggtaaaggacagcttggtatggcttgtggtgtattggagaaattaaatcttactcatatacctatcattgggcttgcaaaggaatttgaagagatatatattccaaattcaaaacgtcctattattattcctaaaaataacagggcactacatttgcttcagcaagttcgtgatgaatctcaccgttttgcgataacatatcatagaaaactccgcagcaatgatattcaagcctcttctcttgatgatatcgttggaattggcaaaaagagaaaaattaatcttttaagagaattcggtagtgttgataacattaaagaggcgtcaattgaggaattagctaaaatagacggcatgaatttaaaaacggctaaaaatgtttataattattatcactaa

SEQ ID NO: 7565 - DNA, 540 bp, Methanobrevibacter gottschalkii
  source 1..540: mol_type = genomic DNA
atggtgaaatgtccacgttgtggttatgagaattcatccacagcagtatattgtgataattgtgcatatcttctgactgattctgaaggaaacagaattgataattctcctagagttagtagttggaatataagttttgcaaaaaaaattgttatcgtattgggaataattgttattgcaatgttactattctcatttatttataataatactcaaccttctcatgaagattctttaaatttaataacggataatggtactgttcataaaactgcttcttacccatataaagctgtaattgaatatgaaggtagttggggtgctaaaatgggtgatccaaattatctagtaagtgaagatggttatggcactaaatcatttgtactcgattgcgctgcttgggatagagtatctatttctgcacaaaaatatgattatggtgaaggggagttgcatgttaaattattaagaaatggcgaagttgtagctgaaaattcaactacaaatgttactggtgctgttgtagttaattataattag

SEQ ID NO: 7566 - DNA, 306 bp, Methanobrevibacter gottschalkii
  source 1..306: mol_type = genomic DNA
gtgattaaagtggctagtgaagacaagattcaagaatatcaaaacattttagaagaagaaaaacttatgattgaaactcattttgtgaatatagaaaggattttaaaggaacctgaaaaaattgaaaaagacaaaatatttgcactaatgaacagctacaatacactaaatattcaatatgagcaattatgtagtgatcttattgaattcatcaaaatattcaaaggcagtgatcaggaaattagactatataaaactgatgaattaattaatttattagaatcaaaaattaatcaaatggactaa

SEQ ID NO: 7567 - DNA, 1704 bp, Methanobrevibacter gottschalkii
  source 1..1704: mol_type = genomic DNA
atgataaaagttgaaaatgtaagtaaggattatgaattagccgatggaactaaaatcaccgcacttaaaaatgttagttttgaagttaaagaaggtgaaattttaggtatcatgggtaaaagtggttcaggcaagactactttattaagagcacttaggggtgttgaacatatagacaatggaattattgaagtaggtaaagcaaaagttacttctgaatcatctcaattttattataataatcttaaaaaagaaactgcaatacatcttcagagatcttttggtatatggccggacactgttcgtgaaaatgttttaagaaaattatatgcaagaagatattttgacgaaggggatactaattttgaaattgcagaaagcgaattcggaaaagaagctgatgaacttttagaacttgtttccttaaccgataagcaagaccattatgcatctgtattaagtggcggtgaaaaacaaagacttattatggcaagacaacttgccaaacaacctaaagctttacttcttgatgaacctgcaactatggcatgccctaaaacaaaacaggaaatattggatgcggttaaaaaaatcaacaaagaattaaatataactgttgttgtcgtatctcatttaccggatgttcaaaaatatttagccgatagggttattttacttgaaaatggcgaaattgcagaggaaggttctgcaaatgaaatttgtgataaattcatggatgaaatggatgatattgttgatatagacaatattgcaactgatgaggatgttattcaagtaaatgatatatataaaagatttttcttgttaaccggtggggaagttttacaaattgaagatgtgaattttactgttcaaaaagaaaacattctaagtattattggtccaagcggtgctggtaaaaccgttcttttaagaatgcttgggggattggaggatcctgatgagggagaagtcttatataatgttgatgatgaatggagtgacattgatattcccggcatgggccgtatgaaaattagatctaaattaggttttatgcaccaagaatttgcattaaatcattattcaacagttttaaatcagttagctactagattaggttataaaaatcagaatattgttaaggaagctcaacagagagctaggaaaattggccttagtgaagaattattagattcgttttatttactcactgatctgcctgaaatagaagcaagagacagattgaaaaaagttggtcttgattcagatattttagatgatttattcccaagatttcctgaaactgcaacaaaagaagctgttgcagacatatttgaaagtcttgatttggatatgagtattttacacagaaaatcttatgaattatccggcggtcagaaagttcgtgtaatgcttgcattaattttagtttccagacctaaattcctacttttagatgaaccgtttggagatttggatccggttaccttaagagatgttacaaatgctcttaaaaaaatatcaaaagattatggaattacaattgtaatgatttctcacaatactgactttattaaagaattaagtaatagagctgtatttatggatgacggaaaaattattgatgatagtgaggatattgataaaattgttgataatttcattgatttctgtcatgcagactatttaaaaggtgaataa

SEQ ID NO: 7568 - DNA, 426 bp, Methanobrevibacter gottschalkii
  source 1..426: mol_type = genomic DNA
atgttcgatattattgcagtcccggtagatggttctgattatggatataaagcagctgatgtcgctattgaaatagctcaaaaattcaactctaaaattgccgctgtgcatgttcttgaggaattttcttttagcagctatgattctgaagaagatgaaggtaattcaattttatcaaaaattactaaaaaagctaatgatgtcggagttgaagttacggaacatttacttacagctgatcctttaagagacatgaaattcatagttgatcaaacacgcgccgatttagttgttattcatgcccatggttcaaacaataatagattcgtatcttttgaagaaaataatgtttccgatactcaaataggttcagtttcagaaagactcctaagaacttctgaagttccggtattattaatcagataa

SEQ ID NO: 7569 - DNA, 168 bp, Methanobrevibacter gottschalkii
  source 1..168: mol_type = genomic DNA
atgatagttaaagattggtgctcattttgcggtgagtgcgctggggtttgcccaagaaatttaattcaagtaagagaatattcattagtatttaatgatgatgattgtaaagattgtaatacatgcattaaagcatgtccaatagatgcattagaaaaagaggactga

SEQ ID NO: 7570 - DNA, 1179 bp, Methanobrevibacter gottschalkii
  source 1..1179: mol_type = genomic DNA
atgattgaaactgacgtaattgtagtaggttctggacctgcaggatcaagtgcggcaaaacatgctgcattagggggagcaaaagttattttaatggataaaaaatctgaaattggttcaccaaaaagatgtgctgaaggtgtttcaattcagggacttgaaaaattaggtattgaaccttctcctcgttgggttactcaggaaatccaaggtgtaagaatccaaactcctgatggaactgacacatggttaacaaaagatgaagtgaaattaccggaagccggttatattctggagaggaaagtatttgataagcacatggctatggatgctgcaagagcaggtgctgaaatcagaatcaaaactttggtaaccggaattgaaaaaattgaaaatggttatttggtatttactgagtccatgggcaaagaagaagttttcaaatgtaaagtattgattgcagctgatggtcctgaagggcacattgcaagatgggcaggtttaagaccggctgcaaaagctaaagaaatggaatccggtgtacaatatgaaatgtgtaatgttgaatttgaaaaaccaggagtaattgaattctacttaggttcatgtgcacccggcggttatgtatggattttccctaaaggggatgacattgcaaatgtgggcttagcaattttacctcataaagctgaaaaaaccgctattgagtatttagatgactttgttgcaaagtccccttacttaaaaaatgctcaagccgttgaaataaatgttggtggagatcctgttggtggaatgactaaaaaactctatgatgataatattctcgtctgtggagatgcagccggacaagtaaatccattaaccggtggaggaatcattagtggtatgaccggtggaatgtgtgctggtcaagttgctgctcaggctattaaagaggattgttctaaaaaattcttaaaacaatatgatgaaatggcgcatgctgaattggaccatgaaatcaaaagatataaaaaagtgcaagagtacttgctcactttatctgatgaagagttaaatgaaattgcccatgcatttgaaggagaaacttttgaaaaaatttctacaactgaaatagttaaaaaactaatcaaattatctccaaaagcattacttaaattaggtaaatttatttag

SEQ ID NO: 7571 - DNA, 969 bp, Methanobrevibacter gottschalkii
  source 1..969: mol_type = genomic DNA
atgattcttattactggtggagcaggatatattggttcccatacaaataaagcattacacaatgcaggttacgatactgttgttgttgataatttatgcaaaggctatgaaaactttgttaaatggggaaattttgaaaattatgactttggaagtaaaactctcagggaggttttcgaaaaatacgatatagatggtgttattcacttcgctgcattttcatcagtagcggaatcagttgagatgcctcaaaaatattttaaaaacaattataaaaatactttaaatcttttacaaataatgagggaatttggagtgaataagtttattttatcatccactgctgcagtatatggaaatcctgataaagttccaatcactgaagatcaggatttaaaaccaattaatccttatggacactccaaatttatcacagagaaagctcttgaaagagaagctgaaaaaaatgattttaattttgtatctttaagatactttaatgcagcaggagcagattttgattgtgaagttggagaatttcatgatcctgaaactcacttaattccattagtactggatgcggctatcggaaaacgtgaaagtatttctatttttggtgatgattataatacggctgatggaacctgtgttcgtgattatatccatgtaaatgatttagccgatgcacatattagggcatatgaatatttatgtgataaaaatgaatccaatattttcaatcttggaaatggtcaaggatattctgttcgtgaagtaattgacatgtgtaagaaggtcactggccgtgattttgaagttaaaattgatgaacgccgtgaaggtgatcctgatatattaatagctgattcagcaaaaattaaggaaaaattaggctggactccaaaatacaatttagagcaaattgtagagtctgcttggaaatggcataaaaaaattaatgtaatttag

SEQ ID NO: 7572 - DNA, 894 bp, Methanobrevibacter gottschalkii
  source 1..894: mol_type = genomic DNA
atggaaaatgaaagtcatgaatcaaaaatagatgttcgtataatagtatccggtttggatattgcacagcttgtttcaaaggcggttaacaatattcacttggaaaatgattataatatcgttgtttcatcaataattcctactgtagaattaagcatagtaaaaaaagtggctagtggtgccgatattcttttaattggtggatatggtagtgatgaaacttataatattcttttcaatgaactgaaaactgattttaatcacattggattatttgattataataatattattgttgaagatgaatctattgactttaaactagctgaaaaggagattcttaattcaataataaaatcaacattgtcttattctttaaatttaattaatgttcatacattagaaaacaagctaatgaaagtgactcataactataataatttacttgatgattataatcaggttctcaaagaaaacgaagttttatctcaggagaataatgaactaatggaagatattaaagagttaaaatcggactttaatgcatttaaattgagatatgaagatatttattcaaaagaaattcttgaaatattcagtttagatgatctgtggcaagaaacatttagacaagatttattggatggtgatagaattgttattgccactgataaatttaaacccgatgatatccttgttggtcagggtttcattgcttcacaatcaaaagaaaaagcaatcgaatggttgaaaatcattagaactgcattgatatttgtcgatgataatgcaggggatttgaaaaaggaatcaggtattggagaagaagaaaatatcccagaagacaaagatgattatgatatgtccaatacttttgaaaacttttgggattga

SEQ ID NO: 7573 - DNA, 1422 bp, Methanobrevibacter gottschalkii
  source 1..1422: mol_type = genomic DNA
atgcaaggagagatagaagataagtgtggtattgttggaattcattgtcctgatgaatctaaaaatgttgcatcttttgtttattattgtttgtatgctttacagcacagaggtcaggaatcagcaggaattgctacttttaatccggaaaaagggttgaattattattgcggtatggggttaataactgatgtttttaaagattatgaaatccagaatctcaagggaaacatggctattgggcatgtaagatactccacaaccggtcaatccagacttgaaaattcacagccttttgtaactgattttgatgatggatttattgctatggctcataatggagatatagtaaactccgcagagttgagaaatgaattggtcaaagaaggttatgagtttaaatctgatactgattccgaagttatttgttatatgcttaaaagggaacattatgacaataataaaaatataattgattcaatagaatctgtttctaaaaaacttgtgggatcttatgcattaactattttagtaaatggtgacttatatggtgtacgtgatcctatgggaatcaaaccacttgcagttgcaaaaagaggagatgaatttatcctcgcatctgaaactgttgcatttgatgtaatcaatgcagaatatattagggatattgaacctggtgaagtggtattttttgaaaatgatgaaatcaactctcatatgttggaaattgcaggggattgtaaaatttctcattgcatgttcgaatatgtatactttgcaaggccggacagtacaattgatggtattaatgtttatgagactagaatgaatatcggtcgccaattgcatgagctgtatcctattgatgctgatgttgtaattccggtgcctgattcatctattcctgcggctatcggatattcaagagcttccggaataccatatggtgaaggtttaatcaaaaacaggtatgtcggaaggacatttatcatgcccactcaggaggagcgtgagctggcggttagacttaaattaaatcctatcaaagatgctattaaaggcaaaagaattattctaattgatgacagtattgtaaggggaactacttccaaaaaattattggatcttgtaaaagaagcagaaccggctgaaattcactttttagtaggttgtccgcctgttatttctccctgtttttatggtgtagctatggcaaccaaaaaggaattaattgcagctaattattctatagaagaaatccaagaccaacttgaaattgatacattgggttatatcaccattgaatctttaattgaagctattggaatgtctaaagatgatttatgtttaggttgcattaatgaagagtatcctactgaaatacccgaaggtcttgaagccgaaacttactataagccttag

SEQ ID NO: 7574 - DNA, 1248 bp, Methanobrevibacter gottschalkii
  source 1..1248: mol_type = genomic DNA
atggttgaattattagctccagcgggaaattttatttcacttcgtgctgttttagaaaatggtgctgatgcagtttactttggccttgatgattataatatgagagccaatgctaaaaatttctcattaaatgatttaaaagaagtgtcaaaaatagctaatgagtatggagctaaaacttatttatgtacaaatactattttaaatgaaagattggcttgttcgttagataataaattaggggatattgcatctagtgaaattgacgggcttattctatcagacattgggttaattgaaaatactgtatccaatggtcttgaagctcacattagcgtacagcagaatgttactaattcatatatgttaaaaacacttaaaaagttaggtgctaaaagagcaattctttctcgggaactttctttaagggaaatcatggatttggctaaaaaatcaccaattgaaacggaaatttttgttcatggtgctatctgcatggcaatttccggacgatgttttttaagttacggtctttatggtaggagtgccaattgcggggattgcctgcagccttgccgtaaaaactggacactgacttatgaagagggggatgataatgttataaacttctcggatgcggaagaggaatcatttattattacctcaagtgatgatggaagttacagaactaactttttttcacctaaagatttatgtatgattgaatacattccggaacttatgaaaagcggtgttgcttcatttaaacttgaaggaagggcacgtagtccagattatggtgcaatggttactggagtttacaggcaagctattgatagttatattgctgatccattaaactataaggttaaggaggaatggatggaagagcttgaaaatgtgtttaatcgtggatttgacactaatttttactttaatactccatttgaaatcagtgaagataatcagtcaaaatatattaagaaagacattggtcaagttgtaaactattataataaagttaaagcagcagagcttagaatttgggatgatttgaaaacaggtgataaaattatcatccagggcaaaactactggttcgattactcatacaatcgattctatgcagattgatggcaagtctgtttcgagtgttaaaaaaggttctaatgtagcaattgctattccgacaaaagtcagggaaaatgactttgtttataaattagttgagaggaatgttgatgattaa

SEQ ID NO: 7575 - DNA, 795 bp, Methanobrevibacter gottschalkii
  source 1..795: mol_type = genomic DNA
atgattaaaaaaatagctatttatggaaaaggtggaattggaaaaagtactactgtagccaatttatctgccgtatggggtagtgataatctgaagtgtattgttattggttgtgacccgaaagcagacacaacacgtacattacatggctcaagaattccaactgttgttcaaactctgaaagataatagaaaacctgaaagggaggatcttgttttcagaggttttaaggatattttatgtgttgaaagcggaggtccggaacctggtgtgggatgtgccggtcgtggtgttattgttgctatgaaacgccttgaaaacttaggtgtttttgatgaagaattggatgttgtcgtatatgacgtattgggtgatgttgtctgcggtggtttttcagtgcctcttcgtgaaaaatatgctgatgaggttttaatcgtgacttctggtgagtatatggcattatatgctgcaaacaatattgtgaaaggggttaaaaaacttaaaggtaatttaagtggtatagtctgcaactgcagaaatgttgaaaatgaagagcagattgtcaatgactttgctcaaaggataggcacacatgttattggcactattcatagaagtaatttaattcaggatgctgaattagatgcaaaaacagttgtggaaaaatatcctgaaagttctgaagcacaagaatacagagaccttgcttcaagtataatgtctaatgagaaaatatcaactccggaaccgatggatgatgaagaattcgaatcattcttcaaatcatacttatag

SEQ ID NO: 7576 - DNA, 480 bp, Methanobrevibacter gottschalkii
  source 1..480: mol_type = genomic DNA
atgtactactctactaattataattccccgattggcgaaatgttatttgtaagcgacggtgaagctgtttgcggaatctggttttgcaatcagaaatactttaaaaataacattgacaagactgtaagaaaagatgatttagttatttttataaaacttaaaaaatggtttgacgattatttcaacggtttaaatcccaaaattgattttaaactgaaacctcaaggcagtgagttcagacaaaaggtctggaaaatattatgtgaaataccatatggtgaaacattaacttatggggatattgcatcaatgatatctccaaacatgtcagctcaggcggttggtggtgctgttggacataatccaattactattctgataccctgccatcgggtattaggtgcaaacggtaaattaacaggttacgctggtggtttggatagaaaaataaaattactgaagttagaaaaaatcttataa

SEQ ID NO: 7577 - DNA, 540 bp, Methanobrevibacter gottschalkii
  source 1..540: mol_type = genomic DNA
atgaatttaccattaaatattgttataggtaatgcaatatccttaattgcaggtatttttattctgttcagtatgtgggttaatgatgaaaaggaagtctataaacatcagttttcaaatgcctttattttaactatctcatcagcattctttttttcctggactggtgttgtaactatggcaatagccgcatcaagaaatgcaatggtttataaggatagattaacttttaattggacaatatttttcattatagtttcattaacagtcggctgtttagtaaatacaatgggtattgttggattattgccaattattgcattagttcaaattacattatccaattactatttaaaatcaatcaaagcaattaaaataagtttcattgtaaatagtataatttatataatttatttctttgcaatatgggatttttcatctgtagctattgaaagtgttactgtagctgtggggatgatttcattattgagattaattaatctaaataaaccaattttttgcaacaatgaagtatcataa

SEQ ID NO: 7578 - DNA, 804 bp, Methanobrevibacter gottschalkii
  source 1..804: mol_type = genomic DNA
atgcaaagtaacatatcagaagaactggaaatgaaatttccaccaattgttttaatcaaaagcaacaccaaaccaaaagatgtaaaagaacctaaaccgggcaaagggggatgtgtaatgagttttgttgcacaaacaatagctaaacgtataactacctgttttggtcgtgaacacattagctgtggtggaatttctgtaggttttggttggggagacggatttagggatgaaaatgcaatggattttcaagcatcatttttatcctgcggtgttgattcagcaccaaataaggagaaatatttggaaaagttaagtcatatgtctaaaccaacccgtgaaatgtttgaacatggcgagagaatttattcagattttaaaactgcaaaagaaaatataaaatcccgacctgtttatgatagtgaagattacgtgatttttaaaggattggagaatttgaattatggtgaaattccagattctgtaatatttactgttaatccaattgaattaactgcattaattcaaataaatacctcattcagacttaaagacacttatattttaacacctcaagcatcaggatgccaagccattggatgttttacttttagagaagatgaaagtgatgacccaaaacctgttttaagtccaattgattttgccggacgtagtaaaatgaaacatttcatcccaaataactatttaattgtttcaatgccttggaaattatttttaaaattagaagaagtaagtgaaaaaagtgttctccaaactggaatgtggaaaaagtttattgattaa

SEQ ID NO: 7579 - DNA, 426 bp, Methanobrevibacter gottschalkii
  source 1..426: mol_type = genomic DNA
atgtttaattcagatgaaaacaatacaatcaaagttgttgttgattatgtaaaggaatgctctgaatatgatttatcagaagaattatataataaaatagagctaatgccaaaaattgaagaaaaaattggcataacctacgaagcactttcaataagagttctttatttggaatttcttaagaactattcaatttatgtctatggtgatattgttgaaaataataaagaaacattaaataaattaggcccatatcgaaaaatagagactaatgttaatttatatgatgaaaatggaagaattattgaaaccgcacaacatgaatttgcagttaaggattttttaggaatgcatacatttaaagtaagttttaataatattaaatcaattgataaaattgataaaattagaatatttccaacatga

SEQ ID NO: 7580 - DNA, 543 bp, Methanobrevibacter gottschalkii
  source 1..543: mol_type = genomic DNA
atgggtgatattatgataacttttgaggttgattcacaacttaatgagaactgcggtattgttcttagaaatttaagttttaacagtgaaataagtaatagtgaagaatataaatgcaatgtatatggagaatttagtctaaaaaatcatgaagattatgataatttggaattgaaatctattttttatgatgatgaaagcaatattattaatattgaacgagactatattaatttagatgggtttttgggaagtggaacttttgatttttgggtatatttaaataaggacaaattaataaaaacacataaaattaaaattattccatcaaaattacgtaggaaaatattgaagagaagtgtatgcaataataaaatatcaattgaatctgaaaacttatccattaatataaatcttaaaaaggattattctgaagttgaaaaaagagataggaaaaaagaattaatcaaagatattgatgaaactattgatgcattgtcaaaaagtgatgagattattaatttgataaattactatgattaa

SEQ ID NO: 7581 - DNA, 183 bp, Methanobrevibacter gottschalkii
  source 1..183: mol_type = genomic DNA
atggaaaaatattatgaatccataatgaaaaatcttgaaatttatagaaatattgcaaattttgtttcaaactttaatatttatggaacttcagaaggaaaatatttgattatattatggcaaaaaacggttggattgaaaaccgaaaaaagtcataacaaattggcagttccaaaactataa

SEQ ID NO: 7582 - DNA, 858 bp, Methanobrevibacter gottschalkii
  source 1..858: mol_type = genomic DNA
atgcgtaagatttcaatactcgtattactgttaatcctcgttggtatgctaattccaaccggatttgcaacagattcaaatgtcgtaataacctatggggagactacctattcaaattcaaattacaaatcttttgttgacaatttttttgttaaccaggcaaatgttgatataaacaatgtaggtgttaaaacaatcactgctgatcaggtgaatcaagtatcaagcggaatcactggtaaatcatataattcaaatcaaatactgtcttcagcacttgttgatttaaatgataatggaaatttaaaggtaagtgttgataaatccaaaattactacaattaccggtgatatgtacatttcagctttaaaatctgctggaattacaagtgggcatgtgtatgtgacaagtcctgttcaggcaactggtgaatctgctcttgcaggaattatgaattcttatgaggaagtaactgatgttcaaattccagactctgtaaaagaagcagcaaatgatgaaatttacacccaagctgaaattgtaaataattcaggtgtaaatgctgatgatttatccaatctggtaaatcaggtaaaagatgaagtatcaggcggcaatgttactaaccatgatgaaattgtaaatattattaacagtcatgttgaaaacaataacattaacattacaaataatgatattgaaaacttagcagattcaattgaacaagtacagaacgtacaaggtgatgtaaactactacaaaactcaggtaaacgaatttctagacgataactccacaggaggtttttcattagatggtttatttgactggattaaatcctttactgatgggatttaa

SEQ ID NO: 7583 - DNA, 609 bp, Methanobrevibacter gottschalkii
  source 1..609: mol_type = genomic DNA
atggttgttaaacattgcccaaaatgtggaaatgatattgatgatgaggatattgaattttgcactgaatgcggtcataaattatcaaataaaattataaaaaatagttctaaaggttttttcgacaatttaaatgaaaaaacaagtttttcagttatcatattctcgtttattatttttggcgtatttttattcattggttcagtagtatggtcatctttcatggctaacggttcaattgatcttgttacatatcttttattagttattgtattttcagtattcttcggtggcatatttgttggatacttcggatgtatggatgaatcttatattattccgaatttctcaatatatttgggaagtattttttcagttgttctatgtggaattggattaatatttacatttctaatgggagtaatttcaattttaagttctattgctccatttggctcatcaaactcaatatctcaaacttcaacttcaagttacgctcagtctgttgatttgagttttatttttaaattagtattatttattcttttaattcctgtggcatcttatattggtgtatatttaggatactttttaaagaagaatatttaa

SEQ ID NO: 7584 - DNA, 456 bp, Methanobrevibacter gottschalkii
  source 1..456: mol_type = genomic DNA
atgaaagttagaaaaattttagtcatgttactaattttagtaactttaggttttacattaaatgcagtagtagcaagcagtccagatcctatcaaattaggagacatcaaaaatgatgacttggtaattacagaagtcggtcagaataaactgaattttgaatattccgttgaagtagacatttctgatttatctagtgaggataaaaaattatttgaaaaagcattaaataataacaatacctcatttattcttaatttaacatcttcaacaccaacgaaaattgcaataactatgcatagtttacctaaaaaagctgaaattataggcaatacattatatattaaaaataacaatatgtttcgcttaattaatggtatacaactagataatttaaagatatctgcagtatctttcaatacaactagtggccaattatttattgctagaaaataa

SEQ ID NO: 7585 - DNA, 957 bp, Methanobrevibacter gottschalkii
  source 1..957: mol_type = genomic DNA
atgaatcttggaaagttggttggaaatactccaatgataaaaattaactatgaatatggcggaaaatcagggagcatatattctaaactcgaattctacaattactccggaagtataaaagatagaattgcattatatattattgaaacagaaagaaaaaatggcaacttgaaagaaggacaagctgttgtggaagttacaagtggaaacactggtattgcatttagcgctatcggtgctcttttcggtcatgaagttcatattttcatgccggattgggtgtctcttgagagaagaaaacttatccggatgtatggcgctcatgttcatttagtatccaaagaggaaggtggatttaaaagagctcttgagcttgcagaggaatttgctataaaacatgacgcatatatgccactccaatttgataataaattaaatatagaagctcaatacatcaccggtcaggaaattattgatgagattccggatatagatgcttttgttagtggtattggaactggaggaacccttatgggaataggcaaaaagttaaaagaaaacaatcctgattttaaattatatgcactggaaccaagcacactttctattcttaaaatgggaatggaagaaggaactcatatgattgaaggaattggtgatgattttattccgggaattgttgataagaatctgattgatgatattgtactaattgatgatttggatgcaattaacatgtctaaaagaattgctaaagaatttggtttaggcatcggcatctctagtggtgcaaatttcttggctggtgttttaattaatactagtgatattaaaatagctactgtctttgcagatgacaataaaaagtacattaccactaaactgtccgaggaaattgatgatgatcccaatctgatttccaataaaattaaactgattaattttgaagtaatttaa

SEQ ID NO: 7586 - DNA, 885 bp, Methanobrevibacter gottschalkii
  source 1..885: mol_type = genomic DNA
atggttcagtattgtagaaaatgcggaaaagaattagaagatgatgctgaattctgtgatggatgtggttttaatcttaataatcatcctacagaagataagcaagaattgaataaaaaaattaaacaaacatctcaaaaagataaaaatgattttataaccaaattacccctatctttagcaataatcagcataattgtagttattgctgaaggattaggaacccctatgattatgggttgggacaatattatgcttgcaattgctataggaattattgggggaataattggaataattttaatggaaaaaatagatgaacctctaatagcttctgttgaatttattgcaactggagctctagtttactcatttattggtcgttttggtgacatatcccttataatatttattataaccgcaattttaacattatactttaaaggtcatagtgctaataataaaaaactatggacaatcccaattttaactatagttttattatttgtattattaatagctagtggagcattatatcagataaatgctgaaaattcagtaattgtaggtaatttaagccaaaatataacaaatgatggttatggatactataatggttatgtaactggagacattaaagtagattctagttttgattatttatgtgttaatgttaacttccttgacaacaacggaaaagtaattgattcaactataggttggaatgatttgaatcctcagagtggaaaaacatataaaatttctgcttggtatttcgaacaacaagcaccagaaaaagcagaaataagtgttgttgattctgcagattcaacaacaccattatatacagagaatataacaatttcaacatcaagtggagtttag

SEQ ID NO: 7587 - DNA, 2724 bp, Methanobrevibacter gottschalkii
  source 1..2724: mol_type = genomic DNA
atgtcaactcaaagtgaagcagttttagaaaataatttaataaaaagattatctgaaaatggatatgaatttgttaaaattagaaatgaaaatgatttattagctaattttagagttcagttagataaactaaataaatgtaaattaactgatgaagaatttaataaagttttattatttttagatgaaggttcgattttcgataaagcaaaaaaattaagagatcattattatattgatagaaaagacaatccattttatattaaatttttaaatcaaaaagattggtgtaaaaatatttttcaagtatcaaatcaaataactatggaaagtaaacataaaaatagatatgatgtaactttattaattaatggttttccattagttcaaatagaacttaagagaagaggtatgcctttaaaagaagcgtttgaccaaatcactaggtatacattacattcatataaaggtcttttcaattatattcaaatatttgttgtaagtaatggaattaatacaaaatattttgctaatggattaaaaaacgaccttcaatttgagtttacattttattggaaagatgaaaaaaataataacatcctttcattagatgattttgctaatacatttttagaaaaatgtaatcttgcaaaaatgatttcaaaatatatggttctaaatgaatcttcaaaaagattaatgattttaagagcttatcaaaaatatgctgttgaagctgtaattcatcaagctttagatattaaacaaaatggttatgtttggcatacaactggtagtggaaaaacacttacttcatataaagtaagtcaattgcttgcagaagatgaatcaatatataaagtcattttcgttgttgatagacgtgatttagatattcaaacgaataaagaattcaatagtttctgtgatggttgtgttaatacaacaaaacatactggtgctttaatcaaaaacttaacaacggaaggtaaaggtaaattagtaactaccactattcaaaaattatcaaaagcagttaaaacagcgggtgataaagttaaacttcagaaaattaaagataaaaaaattatcttaatttttgatgaatgtcatagaagtcaatttggtgaaatgcataatgtaattacagaatttttctcaaattcattatcatttggttttacaggaactccaatttttgctaaaaattctgatggaacaagaacaacaaaagatatttttggtaaaaaacttcacgaatatgtgattaaagatgctattgcagataataatgttttaggtttttctgttgattatgtaggtggtgctaaatcacatactgatattgataaagaagttaaaaaaattaacactaaggagtatttggaatcagataaccgtttaaatcaaattgtagattatattattgaaagttatgatagtaaaactagaaatagagaatttaatgcaatgtttacagtttctcgcggtggagtgatacataattattatgagttatttaaaaagaaaaagcatgatttaaaaatagttacaatattcacatttaaagctaatgaagatttaagtgaaaatgagcactcacaagatttattggacaaatatatcttagattataataaaatgtttgaaactaattttacaagtgatgattttaaacagtatcatgcagatgtttctaaaagaatgaaaaatagggaaatagatttgttattagttgttgacatgtttttaacaggatttgatagtaaattattaaatactctgtatgtagataaaaatttacaatatcatggtttacttcaagcattttctagaaccaatcgtattgttaataaaagaaaatcacagggaaatattgtttgttttactaatttgaaagataatgttgatgaagctattgcattattctctgatcctaacgcaattgaagatattattctacctccttatgaaacatttgttaaatggtttaatgaagatcttaaaagattatttaaacttgttaaaactgctacagaagcattggatcttcaaagtgaaaatgataagaaaaaatttgtattaatttttagagatttaattagaaataaaaacaaattagatattttcacagaatttaattgggatgatgttaaaattgatgaacaggagttcaatgattttaaaagtgcttatttagatatttatgatgaatttaaaaaggataatgaggatggtgaatctgttttaggagatattgattttgaacttgaacttcttaggaatgatcaaattaatgtggattatatattgaatttattagctgatttagataagaatagtactagtttcaagcatgataaacaacgtattattagcctcatgaaagaacacgagaatttacgtagcaaaattgatttaattgagaaattcataaatgaaaaattaggcaatattgatagtaaagttacaaatattaatgaagaatttgataagtttatgaaacatgaaagaaaacaagcaatgtgcgaaattgttgatgaagaaaatttaaatgaagatgtggctcgtcaaatttttgaatattttgaattttctggtaaaattgatgaagagttaattaaacaatcattggttgaaaaattgaaatttaaagagcgtaaagctaaggttaatacaattaaatttaaaatatttgaattatttgaaaaatttgattattaa

SEQ ID NO: 7588 - DNA, 555 bp, Methanobrevibacter gottschalkii
  source 1..555: mol_type = genomic DNA
atgatagtaaaaaaattagaagatattgcagaagtattttcaggagtacaaatatctagattcattgatttaaatgagaataaatttccagttattaaaaataaatttgttgaagatgaaattttagattatcattatgaaaatatttctaaaaatataaataaaaaatattattcaaaaaaaggagatattataatttctctttcacaacctaatacagttagtttattacaaaaagaaggatttattattccaatgtattttgcaattattcgattaaatgagggatatgattcttcatttatatatcatttaatgaatagtgatttgttccataataaattacatgttcttcttgaaggtggtactttaagagttattaaagttgctgatttaaaaaaaatgaaaattaatattccaaattttgaaaaacaaaatgattatggtaaatttttagatttaattgataaaaaatgtaaattgttaaattataaaaaaagttgcaatgaaaaaattaaagaatatttaattcaaacacaattaaaaggtgaataa

SEQ ID NO: 7589 - DNA, 1545 bp, Methanobrevibacter gottschalkii
  source 1..1545: mol_type = genomic DNA
atgtcagattatcaaaataatttagaaagtaaactttgggcaattgccgatgaattaagaggaaatatggatgcaaatgaattcaaaaattatattcttggatttattttctatagatatttgtctgaaaaattagaattacacatgaatgaagaattaaaagaagatgaattatctttcactgaagcttgggatgatgaagaatataaagatgatttaatggatgaaggaatttcttctttaggctacttcttagaaccacaatatctttttagtacagttattgaaaaagcaaaagttaatgattttattttagaagatttaattaaatcattaaattatattagtaattcttctattggtactgatagtcaagatgattttagtaatctttttgaagatgtagatttgaattcttcaaaacttggaaaatctgatgatgataaaaataaattaatttcaaaaattttattaaatcttaatgatattgattttaaattaggagatgatgaatcagatatattaggtgatgcatatgaatatttaataagtcaatttgcatcaagtgcaggtaaaaaagcaggagagttttatactcctcaagaagtttcaaaaatacttgctaaaatagtcacacttggtaaaaagaaacttagaaatgtttatgatcctacttgtggttcaggttcgttacttttgagagttgctaaagaagttgaagttggtgatttctgtggtcaggaattaaatcaaaccacttataacttagctagaatgaatatgattcttcatggtgttaaatatgttgattttgatattaagcaaggagattcattaaaatatcctcaacatattgatatgaattttgatgcaatagtagcgaatccaccattttctgcaaaatggtcaggtgacaaatcatttttagatgatgaaagattttctgcatatggtaaacttgcacctaaatcaaaggccgattatgcatttgtacaacacatgatttatcatttagaagaaaatggaacaatggcgattgttttacctcatggagtattatttagaggtgctgcagaaggaacaatacgtaaatatttaattgatgagaaaaattatttagatgctgtaataggtcttccagctaatatattttatggaacaagtatacccactgtaattttagtatttaaaaaatgtcgtgaagaagatcaagaggtattattcattgatgcaagtaatgactttgaaaaagtcaaaaatcaaaataaactcagatcagaagatattgaaaaaattgtaaatacttatgcaaatcgtgaagaaattgataaatattctcataaagcaacaattgatgaaatccgtgaaaatgatttcaatttaaatattcctcgttatgttgatacttttgaagaagaagaaccaatagacttaaatgaagtagtatctgaacttaaaatgattaatgaagaaatgaaaaaagtagatgctgaaattaagaaatattgtgatgaattgggcatcgaagcaccaatttttgattga

SEQ ID NO: 7590 - DNA, 1125 bp, Methanobrevibacter gottschalkii
  source 1..1125: mol_type = genomic DNA
atgagtgaagaaagattggttcccaaactacgatttagtggattttctgatgtatgggaatcttataaaattggtgatataagtaaaacttattctggaggaactccttctacatcaaaaagagaatattatgaaggagatattccatttattaaatctggcgagatttgtaaggataaaacggaacattatattaatgaaattgcaataaataattcatctgctaaaaaaattaaaaaaggggatttattgttagctttatatggtgctacaagtggtgaagttgcaatttcaaaaattgatggtgctattaatcaagctgtcttaaaaatagataataatatggataattatttccaatacaattattttttaaaatataaagataaaattgttcataaatacattcagggaggtcaaggaaacctttcagcaaacattattaaaaaattggaatttaaatttccaaaattagatgaacaaaagagaataagtcaatttttattattaatggacaaaaaaattgatttattagaaaacaaacttcaatattatcaagatttcaagaaatatttaatgcaacggatattcacacaaaacttaagatttgattttgataatgttaaattaaaaaatatttctaaaattaataaaggtaaacaattaaataaagatgacatggttgaaactggcatatttcatgttttaaatggtggaaaagaaccatcaggttacacaaatgcatggaatactcctgaaaacacaattacaataagtgagggtggaaattcgtgtggttatgtgaatttcaatacagaaaaattttggagtggggggcactgttattatttagataatttagctgaaaaagttgatggatattatctttatagttatttaaaatttatcgaaccaaaaataatgagattaagagttggatcaggattaccaaacattcaaaaaggagatattgagaatattaaagtaaaaatagctcttccaactgaacaacaaagaataagtaatttattgtattcaacagatgaaaagataattaatattgcaaatcaaaaagataattttgaacttttcaaaaaaggtttactccaacaaatgtttgtttag

SEQ ID NO: 7591 - DNA, 1161 bp, Methanobrevibacter gottschalkii
  source 1..1161: mol_type = genomic DNA
atggagtttacagataattggcaaacttataaattaggagatatattgacattttattccacaaattcattttcaagagaaaaattgaactatgaatttggaaatgttaaaaacatacattatggggatattcacacaaaatatccaactattgtttcattacagaataataaagatgttcctttcattaatgaagatatagatttgtctaagtttaatgaagaccaatatttacaagatggtgatttaatcattgttgacgcatcagaagattatgatgatattggaaaagctattgaagttatgaatgtcaatgatgaaaaatttttagcaggattgcataccattttagctcgtgatgaaaagaatataactgttaatggatttaaagcagatcttttttcaactaatactctcaaaacaaaaattaaagtaattgcaaatggaatatctgtattaggaatcagtaagaaaaatatttcaaaattagaagttaaaatcccttctaaaagagaacaacaagaaattgttagttttattaatactatagatagaaaaatagaactattagaagaaaaacatcagtattatcaagattttaagaagtatttgatgcaacagatattcacacaaaacttaagatttgattttgataaagaatgggaaaatattagattgaaagattttttaaaatcttcttcatcaagtttatctttgaatgatttagaagaaaatcatggagaatatggtttatatggtgctacaggaattgttaaattaatcaatttctatgaaaaaacagaaccttatttatccattgttaaagatggtgcaggagttggaagaatttttttatgcgaaccaaatacttccattgttggaacaatgcaatatcttactcctaaagaaggagtggatttagaattttcatattatcttttaaataccattgaatttagaaaatatgttgttggaagtacaatccctcacatatattttaaagattattctaaagagaaactattggttcctcaaattgaagaacaacaagaaattgcaagtattttatcaaatattgataataaactcaatttgatacaagacagaattaatcatatgggacaattcaagaaagggctgctccaacaaatgtttgtttaa

SEQ ID NO: 7592 - DNA, 996 bp, Methanobrevibacter gottschalkii
  source 1..996: mol_type = genomic DNA
atgaaaactagaataattaacaaaattaaatcaaaaatgaaattatatttggatgaaaatcaattagtcatattggatgaaactttaagaaatattcttaaagattatgatttggttgaaactgaaagtgaatttactataaaagaatctaaggaaaattctattttattaatgaattttttagcatctaaacatgttgaaggttgttctgaaaggaccattacttattatcacacaactattgcaaaaatgctagagtctattagtaaaaaaattgaattcatttcaactgatgatttaaggaaatacttggctgattatagaaaagtaaatggagcatctaaaacaacagtggataatattagaagagtcctttcaagtttttttagttggcttgaagatgaagattatattttaaaaaatcctgttcgtcgaattcacaaaatcaaaactaaaaaagttgttaaagaggttttgagtgatgagcattttgaagttttaagggataattgtgataatattagggatcttgcaatgattgaacttttagcttcaactggtatacgtgtaggtgaactggttaatcttaatattgatgatgttttatttaatgaacgagaatgtgttgtattaggtaagggtgattctgaaaggattgtttactttgatgcaaaaacaaaaattcacttactaaaatatttggagtcaagaaaagataataatcctgctctttttgtgtcatttaaaaaaccatttaaacggctgggaattaacggtgttgagcggagaataagggaacttggtaatggggctaatattaaaaaagtacatccccataaatttagaagaactatggcaacaaatgcaatagataaaggaatgccgattgaacaagttcaaaaacttctaggtcatgtgcaaattgatacaacaatgcagtatgcaatggttaatcagaacaatgttaaaatagcccataggaaatttattggataa

SEQ ID NO: 7593 - DNA, 1671 bp, Methanobrevibacter gottschalkii
  source 1..1671: mol_type = genomic DNA
atggatgctggaaaattacaattattatattttttaagtcaaaatcaacagttatcaattccaatttatcaaagaaaatatagttggagtgaaaaagaatgtagtcaacttttagaggatattttgcgagttggtgaaagtgatgaacaaaaccattttatcggatctattgtttatatgaatcaaaaaggccacattgcaagtcctattaatagtttgatgattattgatggtcagcaaagagcaactacaattacattattaatttcagctattgttgaatttttatttaaaaatccaaatgataatgtaatgtctcctgaaaattttattagttattaccttttaaatgatagagaaaaaggagaaactagatataaacttattttgactcaagatgataaaagaactttaattaaaataattgattatcttgaaactagtgatgaaattccatttgatagcaatgattctattagaattaaagagaactttgaatttttcaaaaagaagattaatacggacaacatagaaattcttttcaatgggttaaataaattattaattatttttgttgcattggaacataatattgataatcctcaattgatttttgaaagtttaaactctactggtttagaattatctcaggtggatttaattagaaattatattctaatgggtttggttccggaagaacaagaaaaattatataatgatttttggcatgaaatagaaactttatttgagaaaaatgaggggaattttgataaattcattagagattatctgacagttaaaacggataaagttcctgtatttagaaatatttattctgattttaaaaaatattcagcacaaattgatgttaaagaattagttaaagatatccacaaatatgctttctatttcaattcaattgcttttggtgctgaggagaatccgaaactgaaagaatcccttgacagtttaaatagtttgggttatgatgtaactgatccatttatgcttcatttatatagggattacaaagaaaataaattgtccactgatgatttctgtgaaattattaaatatactgaaagttatttgcttagaagattgatttgttctattccaacaccatctttaaataaaacatttgctggaatgtatgttcaaattgacaatacaagtcatttaagttcatataaagcgattttacgttcaaaagaaaattatcaaagaatgccgagcaatagggaattcgtagccaattttagacaaagggatatttacaatttaagatcaaaaaatagggattatatattcgataaatttgaaaattggggctcaaaagaaaaaactaatattcaaaattacactattgaacatatcatgcctcaaaatccaaatctttcacaagattggaagctagaacttggagaacaatgggcagatattcaaaagacttatttgcatacaattgggaacttaacattaacagggtataattcggagttaagtgataggtcattcaatgaaaaaagagatatggctggaggttttaaagatagtgctattagattaaatatttatttgcaggatttaaataattggaatgaaaatgaaattaaattaaggacaaacagatttgtagaaaaagctaaaacaatttggccatatccgtaa

SEQ ID NO: 7594 - DNA, 825 bp, Methanobrevibacter gottschalkii
  source 1..825: mol_type = genomic DNA
atggttcgattttcacaaactcttgatgataaacaatcaaagaatagagaaaaatcttataggcaagttatggagaatccttatcatgcatctgagaataggcaatcctatagtgctcaaaatgaggatagattttatagccaaccgtctgttcagagatccaattatcatgaggataattttcactcacaaaaagatgaggtcatatatgaaatgtctgttattgaaaaggaatctgtcaaaccagattattcaaaaccagaattaaagttccctgccgatcaaaacattcagtttggtgttgaatatgcaccaaattcaaaacctcctgttattggtagaaattacacaataagatcaaattccattatttacaatgatgttgtaattggtgataatttcagaacaggtcataatgttgttattcgtgaaaacaccaatattggggatgatgttttaattggaaccaatactgttattgaaggggatgttattattggaaatgatgttagtattcaatctaatgtatatattccaactaattctgtaattgaagataatgtatttatcggaccttgtgcttgttttacaaacgataaatatcctgttagaattaactatgaacttcaaggacctaaagttaggcgtggtgcgtctattggaggcaatactacctttttatcaaatgttgaagtaggtgaaggttctattgttgctgctggagctatcgtaatacattctgttccaccattctatttggctattggaacacctgcccgtattaaaccacttccggatcacttgaaagttccaaataaattttag

SEQ ID NO: 7595 - DNA, 162 bp, Methanobrevibacter gottschalkii
  source 1..162: mol_type = genomic DNA
atggctaaatataaatgtaagatttgcggttatatttttgatgaagataatattgaagagggattaaatattcctgaaggaactaaatttgaagatttaccttcttcatttaaatgtccaaaatgtgggatgccaaaatcaatgtttatgaaaatggattaa

SEQ ID NO: 7596 - DNA, 120 bp, Methanobrevibacter gottschalkii
  source 1..120: mol_type = genomic DNA
atggcaaaatttaaatgtaaaatttgcggatacgtaactgaagaattcgaagaactcccagaagactttaaatgtcctatgtgcggcgcaactgcagacatgtttgaaaaaatagaatag

SEQ ID NO: 7597 - DNA, 111 bp, Methanobrevibacter gottschalkii
  source 1..111: mol_type = genomic DNA
atggcttttatatgtaaagtatgtaatttcgttttagaagaagatgaattacctgaagattacatatgtcctgtttgtggcgtaggtgcagaacattttgaagaacaataa

SEQ ID NO: 7598 - DNA, 600 bp, Methanobrevibacter gottschalkii
  source 1..600: mol_type = genomic DNA
atgaaaactattaaaaatgcaattcaaagcgaaatcaatgttaaaaaatcccaatttatctgttcactagttccaactgaaacaaaggcagaatcaaaagccgtaattcagaaatttagggaacagtacagtgatgcaacacataattgcactgcatatattgtaagtgatggagaaggctttgatgatgatggagaacctggaggaactgcaggaaaacctatgatcaacgttttaagaaaaaatgaacttcacaacgtaactgcaattgttacaagatactttggtggaattaaacttggtgccggaggccttgtaagagcatactccaaatccgttatggaagctgttggtgaagctgaaatacttgaaattgaagaatatgatgtttataaacttatttttgaatattcaaatatcaggatagtagacagtgaagttagaaataataatttagaagtaatcaataaagaatacagtgataaagtcagttatgatattgtatcaaaggacggtagagatattttaaaaatatttgaaaaatactcaggaaaaataaatactggatttaaaaataaacagtttctagaaaataaataa

SEQ ID NO: 7599 - DNA, 420 bp, Methanobrevibacter gottschalkii
  source 1..420: mol_type = genomic DNA
gtgatattcttgccgggcagtaaatctgctacatttctagtaatttttatagtggctattgtagctttctgtattgcatgtgtttgtgcatctatgacaggacaaatatcaatcttgccaaatgataatgaatcagagagtatattggataatctttctgctattacaaatgatactggtaacagcggacaaagttacggttctaaagattatagttcatcaagttcaagtagttcttctaatgatgattcccaagtggagactacaactgaccattcaggtgataatcaaggggactcccagaaggattcagatgatcatgaccatgagaattctaatcaaaataataaagataaagatactaaaactgattctgggcatgcaggtcaaggctcaggagatgctaatgattttgattaa

SEQ ID NO: 7600 - DNA, 693 bp, Methanobrevibacter gottschalkii
  source 1..693: mol_type = genomic DNA
atggctgaattaagatacagagcaggaaacataagaaatcccgaagttcacaaaattggaatcatagcacttggttcacacttagaaaaccacggtccggcacttccaattgatactgatgcaaaaattggagcgcacattgcattccagtcttctcttcaaacaggagctaaatttttaggaataatatttccagcttatgaattagatacaattgaccatggtgtgcacgtttctcttgaaacattgaaagaaaatgttattagaacacttaatgatgctaaaaaattcttagatattgaaaaagtagtaattgttaattcccatggtggaaatattcctttaatgagtgagttatgggatattgaagataaaacagatatgattgtcgtattcaacaataaagtaatctcctccgaaggcccccatggaggaagtggtgagttgtcaatggcaaaggttttaggtattgttaatgaaaacgaattagacaatcaaacaaatgttaatgaatatgaggaagttggtttatacggttttaaacaagcacgtcgtgatgacccgaacattgaagaaggtgcacgcgatgttgaagaaaatggtgtttatatagatgaagaatacggagaaagactattcactttagctattagctccgtactctttgatgttgaaaagttactggatttctag

SEQ ID NO: 7601 - DNA, 483 bp, Methanobrevibacter gottschalkii
  source 1..483: mol_type = genomic DNA
atggttgtaaaagttaaaaaaagaaatttcttgaaaaaaaagaaaattaaagaaataaaagcagaattaggtgaatatggaaacttacttcagggaaagaaaaatgtagaaatacttgaagcagaacctaattcatttatcttagtagatggtgaaccatatattatattgattgatgaaagaccatttccaacacttaaagcagctcttgataatgaaattgatgctaaaactgtaactgtagacatgggtgcaattagatttgtagccaatggtgcagacattatgagtcctggaattgtagctgcttcagaaggtgtgaaagaaggagatgtagttttaattattgatgaaacacatggaaaaccattagctattggagtaagtttactttctggtgaagaaatggtcagaaatgattcaggaaaagcagttgaaaccaaacactatgttggtgacgatatttggaattttgaattataa

SEQ ID NO: 7602 - DNA, 498 bp, Methanobrevibacter gottschalkii
  source 1..498: mol_type = genomic DNA
atgaatttcaaccgtgaaaaatatattgatttaataatgtacattctcttaaaatgttattcaaaacccaatttaggaaaaaccgtactctgcggcattttatattttattgatctcaattattatgaagtatatggaaaatttctcacatgtgaaacgtatatcaaatccaaaaaaggaatagaaccaaaacatttcaaggaagttacagaagaattaatagctacagataaactgtttttaagaagggaagcatattacaacagaattatacacagatactacttaacgataatcccccagtttaaatttagcaaaaaggaacttgagataattgatgcatcgataaaaagattaaaggataataatgcaagttcaataaccagatatgcaataaaagatcctccattgcatattgctaatttcggagaggatatagattacaaatatgttttttcaagaaacagtgcctattctgcaattaaaaactttttataa

SEQ ID NO: 7603 - DNA, 231 bp, Methanobrevibacter gottschalkii
  source 1..231: mol_type = genomic DNA
atgagcggacaaaatgttcaaagaccacttgacgcattaggaaaatctgtggatgctcctgttttaataaaactcaaaggagatcgtgaatttagaggtatacttaagagctttgatttacacatgaatttagttcttaatgatgcagaagagttacaagacggggaagttactaggagactcggtgttgtgcttattagaggagacaatattgtttatatttcaccataa

SEQ ID NO: 7604 - DNA, 189 bp, Methanobrevibacter gottschalkii
  source 1..189: mol_type = genomic DNA
atgtcaaagggaactccatcaatgggtaagaagaataagaaaacccatattagatgtagaagatgtggtagaaacacttaccatatacgtaaaaaagtttgtgcttcttgtggattcggtaaatctaaaaaacttagaagatacagttggcaaaacaaaaaacctactactagacaaagattggtataa

SEQ ID NO: 7605 - DNA, 1392 bp, Methanobrevibacter gottschalkii
  source 1..1392: mol_type = genomic DNA
atgaaatatgataaaagtctaatagtactttttataatacaaatttgcgaaggatttagtttttatgggcttggagctatattaactttattcatgactcaatttttaaatttaagcctttcatttgcatttttagtttatggtacctattttggattagtttatattgcaacattatttggaggatatttgtctgataaatatataagaagcagatgtcttataaatgcgggaataatcctgatgggtttaggttttattgtcctgagttattttgcatcatgggctaatccccttgtgcagacacattcttatttctattttaatactcccgaaatcatgctgataattagtttaatgtctataattttgggtgaaggactattgagagtaaatatctcctcaactgtaaaacaggtatatgaagataatgaaaagaaagttgaatctgcatttacattattgataatggcattaaatattggagctgttagttctgcaataatacttggattaacaattggtgaaggaaatttaagtttatataagtatggattcttaatacttgcagttagcttattcattggaataataatttataatctatttagaaataaatatttggtaaattcaaaaggagagatagttggaattaagccttcaataaaattggaatctgtaatggacaatgcggaggaaaaattgaccaaacaagaaagaaatcatgtgaaagctattataattatactttccatatctttaatattcttcatcggttttgaagtaatcgattcatcattaatgttttttgcaaaagattatgttgcaaatacaattccatttgtcccatttaggataagtcctgaaataatcaaatttatagaaccctttggtgtaattatattctcaccatttatactaacatactttaatctaaaagacggtgatgaaaatgaatctttaatatttagaataatgcttggaattattgtattgcttgtaacttatgcagtatttttcataccttgcatgatggtcgataataatatgactgatgtctcaataattttcattataatcatggagctaatcagatcaacttctgaaatattaatacttcctataggtttgagtattgtatcaaaattatctccagcaaaatacttatctcgattactcggattattctattgttctttggcaggagcatatgtggtgtccggatatatggcaggattctatcctaatgctgaaagtatggcacataagttatttggtttaatacaaatcaatgattttaaaatctttgcttcagtatttatagtgatgtatttgacattgtttacagctacttatatttctcgaaataaaattagggatttaatggaataa

SEQ ID NO: 7606 - DNA, 999 bp, Methanobrevibacter gottschalkii
  source 1..999: mol_type = genomic DNA
atgaataaccctaacataatactaaagatgatttttatgaaaaaaatgaaaggagtactgcttgaagcaagtgcaattgacaaaggagacatatcatgggaagaactttccgaacatgtcgatttaacaatttatgaaaatacaactgaaagaaataagttcgaacatatcggtgatgcagaagtcatatttgataataaagttataatagatgaagaagtattcagaaaatgtccaaatatcaaatatgttggagtttgtgctacaggatataatgttgttgacatgactgctgcaagaaaaagaaacataaccgttacgaatgtacctgcttacagtacagacagtgttgttcaacttacatgggcgcttattttagagcagacctgtaatcttgaactccataatcaaagtgtgaaaaatggtgactggataaattcagaaatattctgctactggctcaaaccaataagcgagctttcaggtaaaacattaggaattatcggttatggaaacattggtaagaaagttgcaacaatagctaaaagctttggaatgaatataattgtaaacacagatcatcctgaaaaatatagtgaggaaaacattaattttgtagataaagatgaaatttttgctaaatcagacattattacacttcattgcccattaacagaagatacaaaagacattattcgaaaagaaaatattgacaaaatgaaaaatggcgttagaattgttaatgtttcaagaggagggcttgtaagagaaaatgatttagctgatgcattaaatagtggaaaagtattgtctgctggtgttgatgttgttgtaaccgaaccaatgagtgaagataatcctttacttgatgccgaaaacataataataacaccgcacatcggatgggcaagcattgatgcacgaaaaagacttgttgatgaaattataaaaaattataaggcattcatcaataatgaaaaaagaaatgtggttaattaa

SEQ ID NO: 7607 - DNA, 915 bp, Methanobrevibacter gottschalkii
  source 1..915: mol_type = genomic DNA
atgagtaaagaaaatattgaaaaaaatgaaattaataattcgaatgctccaattctttataaaagacacgaagattacatccctcgtgtagctgcaatacacgatctctgcggatatgggaaatgttcacttggcgtagctattccagtactttcagcagccggttgtgatgtttgcccagttccgacaggattattttcaaatcataccggatatcctacatggtatatgcatgacaccacagaaatccttaacgattatttgaatacctggaaagaaatcgacatagacatagatgctgtttattccgggtttttaggatctgatgaacaagttgaagtgatcaaaagtgtttatgaaacataccctcatgctctaaaagttgtagatcctgttatggctgaccatggacaagtatatcctacttatgatgatgatttatgtcaagcaatggcaagtcttgcatgtgaagctgatattcttactccaaatcttaccgaagctgctattattttaggtgaaccaattggtgaaaaatggagaggggcaaatattgatgatgaggaagcgcaccgtattctaaacgcacttctagaccatggagccaaatatgttgtattaaaaggtatacaacgtgaagatggaatcattcgcaacttcgttggtggtaaggacatggatatctctgaagcatccaatgaatttttaccttacatgttacatggaactggtgatttatatgcaagttcccttttagcagcagttatggttggtaaagacctttttgagtctgttgaatttgcaggaaatattactcacgatgcaatgattgtttcatcaaaacaacctaacttccaagatcgtggagtgaacttcgaatcacttctcggtcaagtgacagacttatttatctaa

SEQ ID NO: 7608 - DNA, 840 bp, Methanobrevibacter gottschalkii
  source 1..840: mol_type = genomic DNA
atgatgagaaaagtaactcataaaaccaaaggacaaaaagcaattgacggagcaggagtgcatctggtacgtgtattaggcaacactacaaccgatgttcatgatccatttttaatgttggatgcttttgatagtacaaatcctgatgattatactgcaggttttccaatgcaccctcacagaggcattgaaacaataacttttgtcagcaaaggacaaatgcttcatcaagatcatttgggaactgaagcacttgttggagatggtgaagctcaatggttaactgcgggttctggtgctgaacatgcagaatttcccggtggagaacgcatgcttggaacacagttatggttaaatcttccagcaaaagataaaatcactgctcctccagcatatcacagtataactacagatgaaattaaggaattctctttagatggtggatttttaagattgatggctggtgaatataatggtgaggaaggttggcaaggcaaatacttaccagttgatttctatgatattcatctagaaccaaacactaaagtggaaattccagttaaagaaggacggtccgcttttgtatttacattactcggtgatgtagttataagtggtgatgttgttttagaaaaaacagctgcaaagttaagtgatggtgaccatgtaatattcgaaactaaagataacagtgctgaaatattattatacagttctaaaagattggatgaaccagtagcttgggcaggaccaattgtcatgaatacaagagaagaattgaatcaggcttttgaagatttggcaaacggtacttttataaaaaaacaagctgaatattag

SEQ ID NO: 7609 - DNA, 408 bp, Methanobrevibacter gottschalkii
  source 1..408: mol_type = genomic DNA
atggtagaattaaaagatatagctcaagaaaatgaagtggatttagaaaactgtgttgtttttgtaagaggtgaagatgatattttagctgttgatgtttctaatgcaaagattaggcaaagaagtgacgatactatgggttttactttttcaattacaccggaacaaactttaaaatttgaagaatattttaataaatttgcaaatggtgaaaaattttactttgatatttcacaaactggatataggcctgcttattataggggtctgtctcagattaataaagaagtcagtgaagagtatgacacaaagttcaatgtaactttatttgcacaaaaagctattgtagagcctgatgattcatattttgcaccaacttgtgcttgttgccaattctgtcatttataa

SEQ ID NO: 7610 - DNA, 453 bp, Methanobrevibacter gottschalkii
  source 1..453: mol_type = genomic DNA
atgattcatattttgcaccaacttgtgcttgttgccaattctgtcatttataagggtgatataatgtttgattccccattttccaactacattgtattaactcgtaataaaacaaatgaatctataaaactagatcaaagaagagttaaactcagagaaaataagaatggtttaatggctttaagttatattggacctttatttgaaatcatggatttggaagacttttttgatgatatgatttcttctgaaaaattaagtatggatatcagtgaaacaggggaatttcgtgtaagttttagaggaataatagatgggaagggaaaaaatttccctcaaaacttagaccataagattattcttctacaagaacctacttgcttggatgaaagagtcaatattcaagaaactggtttttcaaaatttaaattgaaaaatgaagtttctgaataa

SEQ ID NO: 7611 - DNA, 405 bp, Methanobrevibacter gottschalkii
  source 1..405: mol_type = genomic DNA
atgctctctcaatttatttatatgttcataaaaaccaaattaaaaataaaaactaggattttggtaaatatgattataaactggcaagaagaaataacaagaattgatcccgaaatgaaatttagagcagagggcggatggttaaaaactattgaaaaactagataaaagtgttaaaaacggatattctcttgtaggtgactttgttaaagcaggagactttgaagaaaattatgatgaaggaatatatcttgattgcaataaagaaaaaacaggaagaaaaacccaacaggattatagattattccgtttcagagatggtaaagtaagattacttgatatggtaattgatggtgaaaatgggtgggcagttgacttatgggatgctgtggaagatgaactataa

SEQ ID NO: 7612 - DNA, 672 bp, Methanobrevibacter gottschalkii
  source 1..672: mol_type = genomic DNA
atgaatttatatgaaaagtttggtattaaaacggataataaagttttatatgatactgcatttacacatggttcatattctactaaacatgatttaaaatataattatgaacgtttggaatttttaggggattctgttttaagtgtaattgtttctgagtatttgtatgaaaaatatcctcattatgaagaaggtaaattaacaaaattacgagcaaattatgtttgtcaattcgcattaatttattattctcatgaattgggtcttgataaatatctaaaagtcgctgctaaagaatcaaacttaactaaaaatgaaatattgtctataactgcagatatcttcgaatcatttttaggagcaatgtttttagatcaaggttggtattttgtaaaaagatttgtatctaattcaatattcaaattcattgatgcaaatgttatattctttgcagattataaatctgctatgaaagaatatggggatgctaaagacttggaggtttcatataaaattttaaaagaatgtggtgtacctcataacaaaacattcatcacagcaatattaattgatggtgaagagatgggtgttggaaaaggtaagaataaaaaagaagcagaacaagcagctgcaaaagtagctattgaaaaattaaatattaaagtgttttaa

SEQ ID NO: 7613 - DNA, 1467 bp, Methanobrevibacter gottschalkii
  source 1..1467: mol_type = genomic DNA
atgaataaagagtctgttggaattgttgaaacggaatatcatgatatatccaatcctattatattagatagtggagaaactcttgacgaagtcactgttgcttatgaaacttatggtgaacttaataaagagaagtctaatgctattttaatttgtcatgcattaacaggtgatgctcatgctgcaggctggcatgaaggggataaaaaacctggctggtgggaaatggtgattggtccgggtaaagcattggatagtgaaaaatatttcataatttgttctaatgtattgggaggatgtaaaggaacaactggtccaagttctattagtcctaaaactggtaaagaatatggcgttgattttccagtaattacaattaatgatatggttaaagttcaaaaagaattaatagactcttttggtattagtcaattagctgcagttattggcggatctatgggggggatgcaagttcttgaatggatggtatcttatcctagaatgatgaaaaaagcaattgcaatagcaactgccggcagatcttcgcctcaacagattgcattcaatactgtaggccgtcaggctatattttcagattctaagtggaataatggaaattattatgatacttgtgagattccaagtaatggtttgtcactcgcacgtatgattgctcacattacttatttaagtgatgaatcaatggatattaaatttgggcgtggtcttcaagataaggatgaaattagctatgacttttctgtagatttccaagttgaaagttacctgaaacatcaaggggaaacatttgtaaaacgttttgatgctaatagttatctatttattacaaaagctgttgatctgttcgatctttcagctaatgattcattaattgacggatttaaaaatgttgaagcaaaaattaaaattatttcagttgatacggattggttatatccaacagagcagagtatggaacttgtaactgctcttaatgctaatgatgttgatgtttcattttcagaaataaaatctaactatggtcatgacgcatttttacttgagagaggtcagcttaattatattttctctaatttcttgtcagaaaatgtggttgatgatttaatgatagaggatatagctacaattagggaaaatgccgatattgttgaagcggctaaattaatgctagataaacatttaactcatattcctgttgttactgatgattgtaaacttattggaattgttacaagttgggatttgtccaaatctattgctacaaattccaatcatttaaaagatatcatgacaaaaaaagttaaatattgtcatgcaaatgattcaatagaggaaatcgcacgtaaaatgcgtaaatttgatatttcatgtcttccggtagttgatgaagagatgaaggttttaggtcttattactacagatcagattagtaatttacttagttaa

SEQ ID NO: 7614 - DNA, 624 bp, Methanobrevibacter gottschalkii
  source 1..624: mol_type = genomic DNA
atgggtattgggtatgctgctattgcaattaaagcaggcatgactccattacagacaatttctatgtctgttcttgtttatgcaggtgctggccagttcattgctgcatcaatgatattgagcagtgcaagtgtattggcaatcgtattaactaattttgtagttaatttaagatattttgtaatgtcgacctgtgttttaaatcaaattgaagactccaacttacctttaaatgtcttggcagctcatactactgttgatgaatcatttgcagtgttttcattgagtgaagattcaagtatttgggtctatttgggaattgcagtaactgcatggttaagttggattttaggagctgcaattggtgttgtagtattggatcttcttccggtaatagttacaaacagttttaacatttcactttatgcattgtttgtagcaattttaactcctgctattaaagaaaacaaacagattgcaattttggttgcaataacagctgttttaaatattattttaagtcaattcttaggaaactggtcgttaattgtatcaacccttgttggtgcagcaattggaatgtatattgttgatgatgaatatttgctttcaggtgatgcttaa

SEQ ID NO: 7615 - DNA, 315 bp, Methanobrevibacter gottschalkii
  source 1..315: mol_type = genomic DNA
atggattatatgatgttggttattgtaggttgtactcttgtaacatttattccaagattaattccagctttatttattgataagcttaatttctcaccaaaatttgagaaatttttagatttaattccatatactgctcttgcagcattaatatgtcctggagtattgacagtagataaccaattgtggtatattggattgattggagctgttgtagcagcatgtctggcttggaaaaaagcaccgatgggagcaattgttattataacagtagttgttttaatagcagtttattcaattgttccatttttttaa

SEQ ID NO: 7616 - DNA, 237 bp, Methanobrevibacter gottschalkii
  source 1..237: mol_type = genomic DNA
atgagaaccatgattaaatatttaagacaagagctcaagatgagtcaaaaagaacttgggaataaagttggagttacaagacagacaataaatgctctagagaacggcagatataatccatctttatttttagcttatgatataactcaagtttttaataaaatgttatttaaaggggacaaagaacaatactttgtcatggaggatattttcatttttgatgaggattattattag

SEQ ID NO: 7617 - DNA, 732 bp, Methanobrevibacter gottschalkii
  source 1..732: mol_type = genomic DNA
atgattttagatatatataaagatgcatttgaatattctgctaaagattggaagacattattgatattgggtgttatctgtttattcagttttttattaatcccagtatttttacttgcaggatataattatagggtggttggtacggcagtgcgtggaattatcaatggaaaagatccattgcctgagtttgatgatcttattggaatgtttattgatggaataaaagttgtaattgttcaaattgtttatttaattgtacctgcagttacatttatcgtatttgttctcattgctaatcatttatccggtgttttagcatctgctgtagtacttctgggatgtttagttacattaattcttggaattattgcatgtttaatgattcagatgggaatatgtcacatggcatataatgatggggcgtttacaaaagcatttgctgctgaggaaataaaagcagtaattaatgaaatcggattatttaaatgtcttttgacttatgttggaataataattatatgtgtagttttcggagttgttgttacagggatagttggaataatatttacaatattcggtctttcaggagctatgttaggtgttgatgcaggtggaatccttgttttaggtacattagttaattcactgattacaacatttgttgtaggaccatatttaagtatcttcactggaagatccattggattattatatactatgcaaatatag

SEQ ID NO: 7618 - DNA, 825 bp, Methanobrevibacter gottschalkii
  source 1..825: mol_type = genomic DNA
atgacaagtataacagattgtgttgttgaagggttaaaatatcctttcaatgatttaaaaaaagtattaagctttggtgtattgtttgcattgattaatttaatatcattggatattactactaaatttattgatgcagtaataaaatattctaaattatatccttctgcaagtaatgtgttccatttatcacaattgcctgccaatgatatttatatgataattgctttgctgattattagttttataattgtattgtttataaatggatatgaatggaatattgttagattttcaattgataaaaaggaggatcttccggaatttagtaatgtattaaaaatgtttgtcaacggagtaaaatatttccttgtcaatgttgcatacaatattattccgattgtacttttaataattggattagcattatttaatgaatcatacagtccaattattatattgatttcagtattattgttcttaattgcttattttatcttaattatggcattaaataatatggttgcacatgatagtattaaaaaagcatttgatttaagggaaataactaagaacatttcaaatctcggatggggaaaatatataggaattatagtatttactttaattgtatatcttgttataatggttgctgtaggagttatcttattttttataacagtattcatcatatcagcaattactgatcagtccatgattatatcaatttttttagcaataattgagggattattcatacttccttatgttgaaatattcttcagcagagtatttggatccatttatagagaatcaattaaatga

SEQ ID NO: 7619 - DNA, 633 bp, Methanobrevibacter gottschalkii
  source 1..633: mol_type = genomic DNA
atggatgtttttcaacatcctatttttttattaggtgaacttatgaatattaatgttgaattattttatcttttcaatcatgcatttcaaaatccattttttgattatataatgccggttttcactcacttcggaggatttaaatttttaatattggtattgatagctattgtgttatatgctcatttaagaaataagagaacacttagaaaaatcatttttttaacattaatcgctttgttattttcagatggtattgcttttgtcttaaaacatttaattcatgaaccaagaccttttttaagtttagataatgtacatttattaattgctgaagatgatcctctttcatttccttcaggccatactacttccacaattgcaatagtcacatttcttgtatttaatatgaaagaattagctaaaaaacattataaaatcataaatgtttgtttaataatttttgcaatattaattccattttcaagaatgtatattggagttcattatcccggtgatgtgttagctggtgcagcaattggaattgttggtgcagtaattgttaatcactttaaatgtgaaattttaaatagaattgatatattaaataaaattaaggagtctatatcatga

SEQ ID NO: 7620 - DNA, 276 bp, Methanobrevibacter gottschalkii
  source 1..276: mol_type = genomic DNA
atgaataattttgaaaatcagaaattttgccaatcctgtgcaatgcctcttgaaagtagtgatttttttggaactaatgcagatggaagtaaaaatgaagactattgtatttactgttttaaagacggtgaattcacatcagacatgtcaatggatgaaatgatgaacttctgtattgataaaatgactgaagtccatccagacattgataaacaacaagcgactgcaatgatgggtgaaatatttcctaaattaaaaagatgggcggatgattaa

SEQ ID NO: 7621 - DNA, 1446 bp, Methanobrevibacter gottschalkii
  source 1..1446: mol_type = genomic DNA
atgtgttcaatagttggattgcaaggtaatgttaaagcagaagatattcttaaaatgttaaaggtctctaaaagtaggggtcctgattcatcaggcatttatctggataagctttataaaaatattaatctagatgaatttgaagatgataatacatatccaattgcttttggccataatttactttctatttatgatttgaataatagaatatcaaaattacaaccagtaactgatgataatcttgttttattgttcaatggtgagatttataattttaaaacaattacaaacttactttctaaagttggcgttgaaaaagaaattttgtctgatgcagaagctttactttatttaattgatttttacaataaaggagatttagttaaagctattcaaaatactaccagattattcgatggggactatgcatttgccgtatttgatggtgaaaacttggctcttgtacgtgatcctctaggagttaaaccattattttatggtgaaaatgacaaattaaaaggattcgcatcatcaaaacaatcattaaaagaagtaggaatcactgatattaatacattaaaaccagaacatatactttttaatggtcaggatatatctccagctcaagcagttcacgaaaaagtatttgagggggatgtagctaaaatagagaaaatgttaagattaagtgttcttaaaagagttgaagatataaatgagattggtgtaatcttttcaggtggtcttgacagttcttatttggcattattattaaaagaaatatctgaaaatgttcctttaaaaatcaaactttatgctgttggggtaaaaggttcgaaggatgttgaagcagcagtatatgcttctaaattcttaaatttggatttggaaatctgtgaagtaacagaaaaactaattcttgaagcactgccaagtgtagttaaagctatcggtgacgataatctaatgaaagttggtgttggacttacaacttactttgcaacaaaaatggttgcctgtgatggtgtaaaagttgctgtttcaggtcaaggagctgatgagctatttggagggtataaaagatacttgcagagttttgttgatggaaccttaaactacgatttaagggaagatatgtcaaatatgtatcatgtaaatcttgaaagggatgatgcgtgttccatgcttaacggtgttgaattaagattaccgtttttagataaaactcttgttgaattagtattgaatattcctgacaataaaaagattgtttcaatgcatgacgatatgagaaaaagtatcttaagaaaattagcttttgaaggaggccttgattatgaaattgcatacagacctaaaaaagctgcccaatatggaactggcattgacaaaatattaagaaaaaagataataaaagatatggatatttctcaatttttataa

SEQ ID NO: 7622 - DNA, 216 bp, Methanobrevibacter gottschalkii
  source 1..216: mol_type = genomic DNA
atgacaatcgaaaaagatgcagaagatattatagaaaaattctcaaaaattttagaagatattccagattcagatgaaacctggtatattacagataatttaaatttaacacgtgatgataaatctcaagaaaaaaatcctgagaaaattttaagaaatgctagaattgataaagaaggaaatttaattgttaaaaaagcagattggactaattaa

SEQ ID NO: 7623 - DNA, 486 bp, Methanobrevibacter gottschalkii
  source 1..486: mol_type = genomic DNA
atgaggataaatttagttctcgaacttttagatgctccggggcaattagttaaagcattagaacctattagtacttatggtgctaatcttgtaactattatccataaaagggactataaaaatgataatggtatggttccagttcaacttacgattgaaggagaacgtaatgatcttaaaaatgttgtagataagtatgaagagttaggattcactattattgaaatggatggtgttgttaaaaaagaaaaaattactacaattctttttggtcatattgttgatcaagatttaagggatactatggataaaattaatcaaattgatggtgttattattgttgcatttgatattaaactaaatggtgaagaaaaatccacagccttaattaatatcgaagccgatgttggtttaaaacaaaatgtttttgatagaattgcagaaatagcagaagagaaagagttacttgtgattaatgaggtttaa

SEQ ID NO: 7624 - DNA, 1020 bp, Methanobrevibacter gottschalkii
  source 1..1020: mol_type = genomic DNA
atggatgaatgtaaagtcattatcatgggatttggttcagtaggtcaaggtgtggctaaggcaatttccatgaaaaaagatttaattaaagataaaactggagtggacataaaagttgttgctgcagctgattcatcttcatctgcaatctcacaagaaggattagatgaagaattacttgtaaaaacaaaaaaggaagaaggtaaattatcagcatatcctgaatttgggtctgataagaatggtgcagatattttagacgctgttgaatacgattgtcttatcgaagcaactcctactaatatcgtggatgcagaacctgcactttcactaacattcaaagcatttgaacagggaaaagatgtagtaacatcaaataaaggacatttggctcttaaatttagggaagttgttgaagcagctgaaaaagcgggtgtagagtttaaatatgaagctactgttggcgggtcaatgccgattattaattttacaaaagaaacattggcatcatgtgaaattaaatcaattaaaggtattttgaatggtactaccaattatatattatcaagaatgacctccgaaggttcagaatatgaagttattcttaaagagtctcaagaattaggaatagctgaaacagacccaacacaagatgttgaaggtattgatgctgcatgcaaaactgtaattcttgctaattctcttttaggaattgatgcaacttacagtgatgttaaagtcgaaggtatttcaaaaattaactcacaagctattgaacttgcaaaaaaagacgattatttaattaagttaatagctgaagtatctcctgataatttacaggtatccccacgtttagttaaaagaggaagttcctatgatgtaagtggaactttgaacatggctacaattaaaactgatttagctaatgaagtatctgtaattggacttggagcaggatcacttgaaactgcttctgcaatgttgactgatttaattagtattttaaaaaataaaatctaa

SEQ ID NO: 7625 - DNA, 1212 bp, Methanobrevibacter gottschalkii
  source 1..1212: mol_type = genomic DNA
atgaaatacgtaatttttattccagacggttctagtgatcttccactagatgaaattaatggtcaaactcccttaaaagtagctaacactccaaacattgataaattagctaaagcgggttatggcggattaaccaataatgttcctgaaggttatactccaggttcagatgtagctaacatgagcatcttcggatacaatcctgcagattattatactggtagggggcctcttgaagcaggcagtgttggaattgaaaccactccatgtgatgtgatatttagatgcaacactatttttgaaaaaaatggtaaaatggaagattttaatgcaggccatatcacaacagaagaagcagatgtattgatgaaaggattaaacagatatttcaatgataaatatcctggatttaaaggtaaattttacactggaattagttacagacatttgtttgtatattcctgtgataatgttgaagatgccgaaattttagcaaacttaaaaacaatgcctcctcatgatatttcaggtgaaaatctagttgataatttatttggagactgtgaacttgctcgtgaaatccaaaacatcatgtttgaatccaaagaattcttaaaaacacaggaaattaatcaaaaaagagagattccagcaaatatggtatggttgtggggtcagggtgtaactccaaaactacttaactttaaagaaaaatatggtcttgatgcggctgtaattactggtgtggacttacttaaaggcattggagtatttgcaggaatggaaattattgatgttcctggagctactggatttttcgatactgattatgaggcaaagggaaaatatggaattgaagctttaaaaagaaatgatgtgttatttattcatatagaagcacctgatgaagcaggtcatgctcagttacttgatgaaaaagtaaaggcgattgaacaaattgataaatttattgtcggacctatcttggatagtttagagggtcaagattacagagcagcaattttaccggatcatccaactcctattgatattggaacacatactcgtgatgatgttccgattattatgtacgcatcagatatggagggggatgattgtgttgcatttgatgaggtatctgttttaaatggaagtataactaaaaaagaaggttacaaattaatgcaaagattgattgatggagatttttaa

SEQ ID NO: 7626 - DNA, 636 bp, Methanobrevibacter gottschalkii
  source 1..636: mol_type = genomic DNA
atgaaagtattactagtaaacgggagcccaaacagaaaaggctgcacatacacagcattatcagaagttgcaaatgtcttaaatgaacatgatattgaaactgagattttttggattaaaacaaaaccaataacaggttgtactgcatgtggaacttgtgcaactattggaaaatgtacttatgatgcggatagtgttaatgaatttgttgaaaaagcatatgaagctgatgcgtttgtcttcggttcaccagtttattatgcaagtgcaaatggatcaatggtttcatttttggacagagcattctactctaattctcatggaaaaggggcggaagcatttaaacacaaacccggtgcagttatatgttctgcaagaaggggtggaacaactgcaacttatgatcaactgattaaatatttaggaatttcccaaatgcctattatctcctcattctattggaatatggttcatgggaacactcctgaagaagtacttcaggatgaagaaggattggggactatgagacaattggcacataatatggcatttttcttgcagtgtcttgaagcaggtgctgaaaaaggtctaaaagtaactgaagaaccaaaacctcgaacaaattttataagataa

SEQ ID NO: 7627 - DNA, 1356 bp, Methanobrevibacter gottschalkii
  source 1..1356: mol_type = genomic DNA
atgaacatatttaaaactcctgaaggttacatatattcaaataaagcattgcttgctttattcattcctcttttaatagaatatgcattggaattttttgtaggatttgcagattctataatggttgcatcattaggtgaagctgcaatttcaggagtttctttagttgattttttaattcaacttcttattttttctttttcagctcttgcaactggtggagctgttgttgccggacaatacttgggtaataagcaaatagataaagctcaggattctgctactcaattagtttggttttcaacaatcttatcagtcatattaatgattattgttattattttaaggcagtatttaatcgggattttatttggtcaaattgaagttgatgtttggcaaaatgccgataaatatttatatattgttgcattatctattccttttttagctatttacaatgcaggtgcatcaatttttagaacaactaacaatgcatccctgccaatgaaaatactattcatttgtgatatattaaatattgtaggtaatgcgatttgtatttattatttaggatgggatgttcatggtgttgcaatacctacggtaatatcaagactgttatccgcaattctaatattgcactttgttgttaatgaagattataaactgcacattaaaagaacattaattcataaatttgactttaaaatacttagaaaggtcttgcaggttggtattccttatggtattgaaaatgggttatttcagcttggaagagtgttggttttaagtattgtttcaacatttggaacaatggcaatagctgcaaactcagtaggttatgcagtcgggatattttcagtattacctggttttgcaattaatttaggtttaacagctataatttcaagatgcgttggagctaatgattatgaacaggtccgatattataataaaaagtgtttaattattgtatttgtctcacatattgtaatcaatttaattatttttgcagcattaccgctaattttgaatatttataatttatcagctaagactgcagccatgacaagtgaaatgattatttggcatggcatattcggtattataatttggccactttctttcacattgcctgctacatttagaggtgctggcgattcaaaatcagtgatgtatattagtttaattgtaatgtttacctgtagaattgctctttcatatgtaattgcggattttatgggtgttggtgtattcgggacatggattgcaatgtttattgattggtatgtgagggcagcaatttatatttacaggtacttttcaaataaatggacagaatacagggtgatttaa

SEQ ID NO: 7628 - DNA, 408 bp, Methanobrevibacter gottschalkii
  source 1..408: mol_type = genomic DNA
atggatggaattgtatataaaaatacacataattttagtaaaagagaactcgaagagttatttttatctctggaatggtcagcaggtcattttccagataaactgataattgcaatgaaaaacttcaaaacagtcttttcagcatgggatggtgaagaccttgttggtttggcatgtgctatggatgacggtataatgaatgcatatgttcattatttgcttgtaaaaccggaatatcagttaaaaggaattggaaaagaattgctgaatagaattacaactcattataaagattacatgcgtatagttgtagttgcatatagtgatgaaattaagttttatgaatattgcggatttgaaaaagcagatgatgcaagtccaatgtttataactaaactatgggcttag

SEQ ID NO: 7629 - DNA, 774 bp, Methanobrevibacter gottschalkii
  source 1..774: mol_type = genomic DNA
atggtattattcagaggagatatcaagtgtaaaagcttgcaaagacgtacatcaattagtgtgatattgcctgctgataatattcacttcttaagtgatacagaagagatagttcctcaaccctataaaacattatatctgctccatggactgtatggtagtgatgatatatttcttgcaaatacttctattcaaaaatttgcagaagatcatggaatagctattgtaattccatgtggggaaaatagtttttatttggataataaaaaagctcatgcatattatggtgaatatgttggtcaggaacttttagatattacaagaaatattttcccattatctgataatagggaagatacatttattgcaggtttttcaatggggggttatggggctattagaaatggtcttaagtactcaaaaaacttctcaaaaattggtatgatttcagcagcattaataactgatgaaattgttgattatacagatgatgataatgtgttatggtcaaattcattttataaatcatgttttggtgatttggataaaattaaaaattcggataaagatcccaaatatttaattgaaaatactgccgatattccagatattttcatggcatgtggtgttgatgactttttatatgataaaaatgttgaattttatgagtttttagagtcaaaagatattaatgctgaatttatgcagtctccgggtgaacacacttgggatttttgcgataggtatgttaaagaatttattaaaaggttataa

SEQ ID NO: 7630 - DNA, 444 bp, Methanobrevibacter gottschalkii
  source 1..444: mol_type = genomic DNA
atgaaatgtcctgaatgtggtaatgaactggatgaggataattactgtagtgaatgtatggaatttatagataatcccattggaggcaggctttgtccatattgtggtgaggaattggatgaagataattattgtaatagttgcatgcagtattattatgaagaagaaaatacacaagaacttgaagaaatagattatgattctatggtaaataatggtgattcaatttgtttaaactgtactttttggtctgtaagtccttatgggtcggctcatggaatgatttgtagaaaaggtcagatatctgatggtcctggagattcatgcgggttatttgtccaagaatataattttgcaaactatggtgatgcaggtcaatatcaatttaatgaaacaaatcgtgcaatttcaaataaattatatcattggaaaaatagcgggtaa

SEQ ID NO: 7631 - DNA, 1617 bp, Methanobrevibacter gottschalkii
  source 1..1617: mol_type = genomic DNA
atggagaggatttttctgacaaagtatattattataactggtggggtagttagttccataggtaagggtattacatccgcatctatgggaaggattttaagatcttatggtttaaacgtttcagctattaaaatagatccgtatttaaactgggattctggaacactcaacccatatcagcatggtgaagtatttgtaactagtgatggtatggaaactgatttggatctcggtcactacgaaagatttttggatgttgaacttaaaggattagctaatattactactggtaaagtttacgaatcagtcattgctaaagaaagagaaggtggatatttaggtgaatgtgtacaagttattccacatattactaatcgtattaaagaaatgattagggaaaactctgaaagcgctgattatgatgttgttttagttgaactcggtggtactgtcggagatattgagagccaacctttccttgaagcattaagacaactcagaaatgaggaaggtcgtgaaaatgttatgtttgtccatgttacatttattccctacctggatgcagctggagaattcaaaacaaaaccaactcagcactctacaaaagaattaagaagtgttggaattaaccctgatgttattgtatgcaggtcacaaaaaccaattgatgatggtttaagaggaaaaatcgctcatttctgtgatgttgactttgaagctgttgtaaatactcctgatgctgatacaatttatgaagttcctttagtcttggaagaacacagcattggtgaattaatcgttaaaagaataggattaaatattaaacctgattcttctaaattaaatgaatggagggaagtggttaaatctttaaaaattaaagaacctaaagttaatattggtattataggtaaatatgtggagcttgaagattcatatattagtatcagagaatcactactccatgcagcggcaagcattggtgttaaagctaatattatatatttaagctctgatgttgaagaattggatcaggatgccatgtctgaactggatggtattctaattcctggaggattcggtgaacgtggttttgaaggtaaattggatgcaattgaatatgcaattgaaaataatgtgcctttgtttggaatttgccttggaatgcaatctatggtgactcaatttgcaaggagaaatggtttttctggtgcaaatagttccgaatttgatgatgacttaaaattcccagttattgatatgatggaagagcaaaagaaaatcaaaaacatgggcggaacaatgcgtttaggatcttatggttgtaaaataattgaaggtaccaaaacttatgaagcttatggtgaaagtgatatcgaggaacgtcacagacacaggtatgaatttaataatgattatagggatggtttacaagaaaaaggtttaattatttctggaacaagtcctgatgactttttagttgaaattattgagttgccaaatcatccatgggctgttggttgccaattccatccggaatttaaatcaagaccaaataggcctcatccattatttaaagcatttttagaagctattcatgattattctaaaaattaa

SEQ ID NO: 7632 - DNA, 867 bp, Methanobrevibacter gottschalkii
  source 1..867: mol_type = genomic DNA
atgattattactactatattcctgattcaaattattataacagttttattttcaataatggctgcaatttatgatataaaaagtaatattgttccaaacaaattaaattattctttgatattttttggcttattttcaaatttaattttatcaataatttcaaataatattaaatatattttagcttcttttatttcaatgtttattacatatgctgtaacttatatgttatggaaattaaatatttggggaggaggagatgtaaagttatttacagcaattgcaacagtaataccatctggtcttaatatcaactttttgaatatttttccacaattgtccgtatatccattttcatttagtgttgtaattaatagtattttagtatcatttccatttttggtaatctttgtcactcatttaatatttaaaaataaagtgtttatgggcaatattgattttctagtcaatatctttaacattgaaagtctgaaatatataaaaaattcaactttaaacaaattaattcctattaaggatttaaaggaaggaatgatagtcaatgattattattttaataatgagcacattattgaacttttaagtgagatgggaggtaatttggagatttataaatcaaaccgcaatgatttcaaatattattttaaatcacaaagtgcaggcggaataacaaatgaggaagtatggcagcttaaaattatgaattcacaagatataatttccgataatatatcaattaaattatcatttccatttgctccagcaatatttttaggattggtaatagctatagtgtatggggatatgatgatgttgatcattaaaaacatattcttggtgatatga

SEQ ID NO: 7633 - DNA, 429 bp, Methanobrevibacter gottschalkii
  source 1..429: mol_type = genomic DNA
atggttaaagaaagtggtgctcagatttcattagagtatatgttaattttttcaatatcactggttattttaattgtttttacattacctctagctgaaaattcaattagaaatactcttgatgtttccgattctttaaatgtgaaatcagatttatcaaaaatagctaatgcaattaagcaagtttatggtgaaggtcaaggatcaagacaaacaattaaaattgaaagtaacaagaaacttaaaattaatatagcaaacagtcatgtttcaacaagttttaaacttaaaagtaattccaaaaaggatataaaagagcatgtaatgtcaaatattgggaaaacaaccatctcattaaataaaggtgaaaatgtgataattgtggaatggcctgttaattctaaaaatatgttaatttatacagtataa

SEQ ID NO: 7634 - DNA, 804 bp, Methanobrevibacter gottschalkii
  source 1..804: mol_type = genomic DNA
atggatataataactacaattatttacctcgttttgtttatagtcatgatggtatttgtattttctattggaatgttaagacaatacatgcctaaacgcgaggtaatattagtaatccttgtagcttttttaattggttcaattggaggggcatttttccttgatccgatttatgatgaattaccaaatgttgcaagtgttattgaaaagaatatgccaaataatgaagaaacattatatttggatttatcatcttcaattaatattgatgatttgaaaaataatttatctgcaactgatggatttatatcatttgatgaaaaatcggttaatattccaatgtggacatttaatgagagagaacataattactttgatgaaatagttggaaatattgattcgaattataaagcttataatataagtacatctgagattcaaataactcttgctgataattatacttctgctcaagctttaaaatctttttcagattggtataaattggtttatggtgaaactatttcttatgcgcaagttcatgcagtattggttgttgattcatcatctcttgatacgtttgagcatattttacttcaaaaaggtattgttgcttcaaaaatagaagggccgattcaggacacagtaaacaatacaaattcatcaatgttaactaacatagaatttacattggtctgtggtggtattggtgttgttgtagcatttatgggtatatatgttgattctgttgttccagcatataggaaatttagaaaattcttaagggaaaaacgcagacggtaa

SEQ ID NO: 7635 - DNA, 690 bp, Methanobrevibacter gottschalkii
  source 1..690: mol_type = genomic DNA
atgaatgttgcagttttattttcaggtggaaaagatagtacgatggcattatataatgctttagattcgaaagaagatgttaaatatcttctttctatgaaatccaggaatgatgaatcatatatgtttcatgttcctaatatccatttaactgatttgttgtcacaagctttcgatattccaataatgtctgttgaaactgatgggattaaagaagatgaacttaaagatttaaagcaggcattcgaaaatctcaaagatttaggtgttgaagctatatatactggtgcactctattcacaatatcaaaaatcaagaattgaacagttatgtgatgaagttggacttgttgctatttctccttattggcatgtcgatgaattggagtatatgagaaaaatagtgtctttaggctttaaaattataataagtggagttgcagcttggggtttagatgaatcatggcttggaagaataatcgatgatgaaaccattgatgaattaatggaaattcatgaaaaatatcatgttgatttagcttttgagggtggtgaagctgaaacattagctattgatggtcctatttttaaaaaaagaattaaaatcttaaaatataaaaaagaatggcataatgacagtggtgtttacattattgaagatgcagttttagaggaaaaaatgaatttataa

SEQ ID NO: 7636 - DNA, 540 bp, Methanobrevibacter gottschalkii
  source 1..540: mol_type = genomic DNA
atgcaagtaatgggaatatcaggcctaccaggatctggaaaaagtttagtttctaaaattgcaattgaaagaggagcaaaaattgtaagtatgggagatatcatacgtgaagaatctaaaaaaagaggagaaagcactaaagaaactgcccaaaatttaagagcagaatttggacagtacattgtttctgaactaactattaaaaaaattaaaaaacttcaagaagaaggatttgaaagtaaaattattgttgaaggtattagaagtcctcatgaagttaacatgtttaaaaaaaactttgaaaattttattattttatcaatttttgcaaatccgactttaagatttgaaagattaaaaaatagaatgagagaagacgattccactgattatgttgaatttaaagcaagagaccaaatggaattagattttggaattggtgatgtaatctcactttctgataaaataatcattaatgaaacagatttggaaagctatacaaacagcataaataaatttttagatgaaattgaattataa

SEQ ID NO: 7637 - DNA, 738 bp, Methanobrevibacter gottschalkii
  source 1..738: mol_type = genomic DNA
atgatacccaaatcacaccctcgatacgaatcattacttttaagagataaaatggttaaagcttccaaagagggttatttagcggattcagctttaattgcacatggtagaggcgaagcttttgattatctgattggtgagaaaacaacatatcctgcaaaaagagcaatgtatgttgctgttgcagcactgcttttatcaaacaaccctgtgatttcagttaatggaaatgcaaccgcattagctattgatgaaataattgaatttgccaatgccattaatgctaaaattgaaattaatttattctacaaaaccaacgaaagagttaaaataattaccaaattatatgaagatcacggttacagaaacatacttggtggtcttgatgatgatattgaatacatcaatgatatagaaaataatagggctagtgcaagtaaaaatggaatttacacagcagatacaatattaattcctcttgaagatggagatagagcagaaatattgaaaaaaagtggtaaaaatattctaacaattgatttgaacccactttctagaacatccaaaatgtctgatgtatcaattatggacaatattgttcgtgcaataccttttatgacacaaatagctaatgatttgaaaactcaggataaaaaaatactagttgaacttgttaatgaatttgacaatgaagaaaatctaaaagaatctttagaacaaattaaagtaaaagagtga

SEQ ID NO: 7638 - DNA, 384 bp, Methanobrevibacter gottschalkii
  source 1..384: mol_type = genomic DNA
atgaaaatcaaattagcaataatatttggagtactaatatggattttaacttttgtgctttcagccacattcaacccaatttttacaacaaatgttcgtaatgtcaacatagtggtgcctattattacaataattgtaactggattttttggaatactatatatcagagctattgatactaatgaaattgttgaaggctttttggttggaataatctttgttataatagatattattttagattatatatttatcatatcccttcaaaagaatttatacatcattggaaattatacattgcatgttttttcaatgattacaattactttattaattacaacatttttaggatatttagctcaaatgactattgatttaaaataa

SEQ ID NO: 7639 - DNA, 1035 bp, Methanobrevibacter gottschalkii
  source 1..1035: mol_type = genomic DNA
atgaatgcttatattgaacatgaaaaatatttgaaaaatacattgcttggattaaataattcatcagattccaaacaaaaagaaaagagtttgtctagtcattattttaaagatttaaaagaaaaattgttaatacaatatgagaataaatcattaaaagatgtaatggactgcaatatatgtaacacatcttttggggatgcattgaaaataactacaaaagaaaaaattgattttaatatttatgataataattttaaaaatcaaattaatcacaatctcaaattacttccgaaaattggccttaaaactgaagaaaatcttaaaaataagggatacatgacaattgaatctcttaaaaatcatgacaaatattgcgataccgcatcaaaatttctaaataaaattgatgacatgtcttttcatgaaataatggatttattggataacaataggtattctaaaaagtgtagggataatttacttaaatgtataagtttaactgatgttgaaaacttcaaattcatggatattgaaactaaaggactttcaaatgttccaataattttaataggtgttgctgaaatcaaaaaatgtaaaatcatatcttcacaatatttcttaagggattacactgaagaacagaatattattgaagcatatttgaatcatttggatgaagattctattcatgtaacattcaatggaaaaagtttcgatgttccatttatacggaatagatgtatttacaatagaattaaccataatctggagttgcctcatttggatttaatgtattttgcaaagaatttatggaaaggttcacttccaaatttcaaacttcaaactattgaagaggaaatttttggaataactcgttatagggatgttcccggccaatatattccaggatattatgacacttatttatccaagaaaaatatagggccagttgtaccaataatccaacacaactgtcaagatattatttcgcttgcaagttttcttgagaaaatgtatgaggatgtaaattag

SEQ ID NO: 7640 - DNA, 1503 bp, Methanobrevibacter gottschalkii
  source 1..1503: mol_type = genomic DNA
atgggtttatttgatagatttaaaaaaagcgataaaaaagaaaagaaattaattccagataatccggagattgaagatgaagagctacgtttaaaagaaatagctattaatcataaagataggcttgaaagggcgcaagcagcagataaaatttcaaatgaatttcttgcactggacatggctaagaccgtgaaagatagggctattagattaattgctgcaaataaattaaaagatgaagatttattaatggatgctgctttaaactcacagtttttcgatgtaagaagctttgcatgggaaagacttggggagaacaataaatccatagctgaaattgtaataaatactaagaaaaattctcatgtagatgaaatatttaataaaattgttgatgaagaaactcttaaatggattgcaattgaagcagttgataaaagatatagaacacgtgctctaaataaaattgatgatgccgggatattatatgatttagtttttaaatcaaatgacagttctattaaaaaagcagctattttaaaagattcttttgtaagtgaggatattcttaaaaaagtcgccattgaagataaggatgaaggagtaaaaaaaatcgctattggtaaaattaaaaatgaggattcacttgtattaatagctcaaaatgaagataatgcgaaggttagatcattcatttttgataaaattaacaatccggaaaatttaaagcatattattttagattctaaaaaggcagatgtcaaaacagaattaattaacaagataactgactctgaccttttagccaaaatcgcacttgaagataatgataatattgttagaagtgaagctgttaaaaaaataactgacgaagagatattaattaaaataatcagcacggaaaaagatagatttgttcgccagattgctgtaaaaaatataaacaatcctaaagaattaattaaaatagctttaaatgatgatgatcagtttgtaagaaatcatgcaatttcaaattctgctctggccgatgaaaaagattttaaatatttggccattaattcaatacatgaagatgtggcatcggaagcattaaatcatattaatgatgaaaatgatttcattgatatattaaaaaatgctaaactcacatcaattagaaaaaatacactagataacatcagtgatttagaaacattaattagaattattctttcaaacgaggatgaagaattttctcttaaagctttagataaaatcaaagtggaaaaatgcctgattaaaatatatgaacagaatatttcagaaaatatctcaatcagagctatttcattaataagaaatcaaaaatatttgggtgaagtagctagaaacgattcttcttggaaagttcgtgaagcggctactaaaaaagtggtaagtagaaaagttttaaaagaaatctcaaataatgatgaaaatgagtatgtgagaaatattgctaaaaagaaattgaaattataa

SEQ ID NO: 7641 - DNA, 759 bp, Methanobrevibacter gottschalkii
  source 1..759: mol_type = genomic DNA
atgaaaaaaataactagaatattttttagcccatctgggactactaaaaaaatagtagataaaatagctactaacttcaaatacgaaaaagagatttgtgatttattacattttaatgacactaaagaatttacagacagtgatattgttattgttggaatgcctgttttttctggaagaatcccaaaaaccgctcgcaatagactattgaaattaacaggaaataacacaaaagcaattgctgttgcaaactatggaaatgctaaagtaggcgatgcattaattgaattagtagatattcttaaagaaaataactttgatgttatcgcagcaatttccaccgttagccaccactccatttttaatggtgttgccgttggaagaccagatactgcagatatggaaaaaatcaatgaatttggacaaaaatgtgtagaaaaattggaatctggtgaatccctcaactcagaagttcctggaaacagaccatatgccgattacaaacaattgccttttatcgtaagctgtgatcagaataaatgcatattctgttatgattgtgttactttctgtcctgaaaatgcaatacctgatgaggatcctgccgatgttgaccttgacatatgttcaagatgcactgcatgcatccatatatgtcaagaagatgctagaagttttaccggagaagcatttgaaactaaaaaacctgtttttgaaagtgaaaatagtgaaagaaaagaagttgaactttatttataa

SEQ ID NO: 7642 - DNA, 1032 bp, Methanobrevibacter gottschalkii
  source 1..1032: mol_type = genomic DNA
atgatggaattaatgagagagctatctttaacaccaggcgtttctggttccgaagaaaaaatagctgaaattattacacgtgaattaaaagatgtagctgataaaattgaaactgacagtatgggaaacattattgcaaccaaaaaaggtgaaaaaaaggctcctactgtaatgctagcatctcacatggatgagattggtttaatggtaaggtacattgatgatgatggttttattaaattctcaaacattggtggaattaatgatcagatgttaatgaaccagactgtaactgttcattcttccgttggagaaccgattgtaggagtcattggttcaaaaccacctcacgtaacaactgctgaagaaaaaaacaaagttgttaaatctaccgacatgtttattgatattggtgcaaaagacaaagaagaagcagagaaaatggttagaattggagacaaaatgacattcaattctttatttgctgaatatccaaataatttaatcatgggtaaagcattagacaatcgtgtaggttgctatgtaatgatggaagttttaaaaagagtagatactagagctactgtttatggtgtaggtaccgttcaggaagaagtaggtcttaagggagctaaaacttccgcatttagattaaaccctgatcttgctattgcacttgatgtaacattatctggtgatcatcctggaattaaaccggaggaggcgcctgtagtgatgggtaaaggtccggctattatattggcggatgcaagtggaaggggtattttgactcaacagtctgtaaaagatttgctcattaatgctggagatgaaaatgaaattccatatcagttagaagtaagtgatggcggcactactgatggaactgcaatacacttaactcgtgaaggaattccaacaggtgttttatctgttcctactcgttatatacacactccggtaagtgtatgtagtatggatgatgttgaagcaactattcaattaattacagaagccataaataatttataa

SEQ ID NO: 7643 - DNA, 486 bp, Methanobrevibacter gottschalkii
  source 1..486: mol_type = genomic DNA
atgaatatcgaattagaatcaattggtacaatacatactgaatttaaagaaattgaaggtatgccaattcagcctacaggagcaaaaggaattaaaggaaccattgaaattaaagataaatttgttgatggactaaaagatttaaaagatttttcacacattcatttaatttatttacttcacaaagttgaaggatacaaacttgaagtaaaaccgtttatggatacaaaaactcatggtgtttttgcaacaagatctccaaaaaggccaaatcgtattggaatgagtgttgttaaagtaaataaagttgaaggaaacaaagtacatgttgaaaatgtagatattcttaatggaactccacttttagatattaaaccatatgttccacaattatacgaagatacaattgatgaactaaaaataggatggtttgaatcaaaacaccaaaaagcaaaatcgcaaaaatcagatgacagatttaaataa

SEQ ID NO: 7644 - DNA, 207 bp, Methanobrevibacter gottschalkii
  source 1..207: mol_type = genomic DNA
atgcaacttagtgcaagaaatcaattaaatggaaaagtaactggcgtggagaaaggtgctgtaatggctaacatcaaaatagaagtaagtgaacctagcactattactgcgattattaccaaagaatctgcagaaaaattaggtttagctgaaggtgatgatgtaactgccatcatcaaatctactgaagttataattggaaaataa

SEQ ID NO: 7645 - DNA, 438 bp, Methanobrevibacter gottschalkii
  source 1..438: mol_type = genomic DNA
atggtcgtaagagtcattgaatcaaaagaagataaaattactacagctgatctaatcgatgaattgaaaaaaaattcaaaagttgattactgcggagctatttttagttttgaaggttttgtaagaggaaaagaagaaaatatgaacttacaaaagttaattttaactacccctgataaagaaaaaacaaagtccgaaattgaaaaaatcgttgaaaatgccaaaatcaaatacaatgttgctgaaatctcagtagtacactacattggtgaattttacactggcgatttattattcttagttgctgttttaggttatcatagagatgaaagttataaagctttaaaagaagtaatagaaaccgtgaaattcgatgttgattttaaaaaagaagaaatttctgatgaaggaacaaaagtcattctagctggaggataa

SEQ ID NO: 7646 - DNA, 534 bp, Methanobrevibacter gottschalkii
  source 1..534: mol_type = genomic DNA
atgaataaagttcgtggaatttttattggaagaatgcaacctgttcataatggacatatgcagattattgataaaattttagaagaagtggatgaaatcataataggcataggcagtgctcaattaagccatagcttaaaaaatccattcaccgctggtgaacgtgttgttatgcttaatcaggcattagctgaaagaggtgttgatccgtcaagatactacataatacctatgcaagacattaattttaatgctctttgggtttcacatgttaaaatgttaactccaccattttcaattatttattctggaaatcaattagttaaacaattattttctgaagaaggctttgaagtcagacaacctcccctctatgatagactacgtttatctggaacagaagtgagaactagaatgattgaaggcggtaattgggaggaattagtacctaatgctactattaatcttatcaacgaaattaatggtgatgaaagaataaaaaatttatctataagagaaattagtgaaatataa

SEQ ID NO: 7647 - DNA, 711 bp, Methanobrevibacter gottschalkii
  source 1..711: mol_type = genomic DNA
atgaataaaaaaatgcaataccaaatattacttattgttctaatagctattgtaatatttaatttatcaattatcgttagttccatgatgaacactccagataatgtttataatattacaaatgtagggcacaatgctaatggtactgtttataaaattgaagccggtaatatgtcctctaatgaaaccgttggacttattttaggagtccatccaagagaacatgaaattcacgaagcggtgaataatacaatttataatattacttccgaaaatggaactaataatcttactaaaaaatatgtaatatattatattaaaacaaaagataatttaacttcccgtgaagatacaaggcctgctggtgaagaattagctaacaaattcattgttccaaatattgttaaggataagccatttattgtattggatgttcatgaaataaacccagattatgaatattcaaattttatatttagtttatccaacagaaccaacacagttgactcctatatttcacatattgctaatgatgttaatttagtggattatcaatttagtgaaggaacaagccctgaaaaagttacaaaaccgattgcaagtaaaggagttactacattacttatggaaacttcaattactgatgcattaatggaaaaacaaaaaactgcagacaatttaattaaaagtttagatagtttagaaccgtaa

SEQ ID NO: 7648 - DNA, 675 bp, Methanobrevibacter gottschalkii
  source 1..675: mol_type = genomic DNA
atggaaaataaaaatatgattattatttttgcggcagttgctgtggtaattattgcaatcgccggcattttatttgctactggattcattggcggtaatgatgtcgaaactactccatttaaaatgagttttatggaaggtagttttataggtaatgtaagtcttgaaaatgataaagagaaattcatgcattcttatgaggataaagaaaataaaataacttataatatttccactgtggacaactcttcagtattaatggaaatatatcaaattcaaggtttgggtaatcctgaagtaagatcattcaatggcaatgaatggaatatttactttacacaggcagttccaaataataattcaagcactaattcttctaatggggatgatgcaatgaatattattattggagaatcacaaggtaaaaaacaaggttatttgatttatatgattattgatggcaaatctaaaatcaatgccaccggtaaaatgtatggcgaagcatatactaattattttgaacctttacttgaaagtttaactttgaaagaaagtaagaatgttccacatatttatgatgaatttggacttacaaaagaacagtttgattatcagattgatttgatacgtcagtataaatctggaaatacttctgcacttcagggagctcaatag

SEQ ID NO: 7649 - DNA, 531 bp, Methanobrevibacter gottschalkii
  source 1..531: mol_type = genomic DNA
atgagaattacagtttttcacgcaaatgaatgtgatagaaagaaatgcacttccataaaaatggaaaaaatgggtaaatgtagattggtttatgatataaataaaattcctggtggtgcagtagttctaaatccatatgcggagaaagctgtatcttatgaagattataaatatgtacagagaaggggtgttgttggtttggattgttcttggaatgaagtatcccaatctaaaaaattcttttccttgtcaaaatatcacaggtcacttccttttttaatagcaacaaaccctgtaaattatggaaagccatgtatcttatctacagttgaagctattgctgcaacactttatattacacgtttcaaagatgaggcatatgatatgatggatggttttaaatggggtcatacatttttagagctaaatcaggatttgcttgaggcgtatagtgaagtagacactagtgctgaagttgttcgtcttcaaaatgaatttttagaaaattctaaaaaggaagtaaatgattga

SEQ ID NO: 7650 - DNA, 147 bp, Methanobrevibacter gottschalkii
  source 1..147: mol_type = genomic DNA
atggcaagattcgaagaagcagaaaacagaatgttcaatgtaaaaatctgtttaaaatgtaacgctcgtaaccctgctggtgctacaacttgtagaaaatgtggttacaaaggtttaagatacaaagctaaagaaccaagaggatag

SEQ ID NO: 7651 - DNA, 753 bp, Methanobrevibacter gottschalkii
  source 1..753: mol_type = genomic DNA
atgaaagatgttgaaaattatattcgagatatattgaaaagtaggaagatacactttactttaattgaccctgatgaacagacaccagaagaagctttggaaatagccactcaagctattgaaggtggaactgatggtattatgattggaggatctactgttaatggtgatgatgtaaacaatacttgcaaaatattatctgaaaatattgccgttccgattattatttttccgggcaatactagtagtgtaagtgaatatgctgatgctattttttacatgagttatgtaaactcaagagatccatattggattaatggtgctcaagcattagctgccccggcagttaaagcatctggaatggaaatattatcaatgcattacatggttgtttctcctggaggaactgttggctgggttggagatgcaaatttagtacctagaaacaaacctaaaattcctgcagcttatgcaatgtctgcagaattatttgggattaagtttttttatcttgaagcaggttctggtgcagaagaaccagttccaccaaaaatggttggttatgctaaaatggcaggtccaaaaaatattcttgtcgttggcggaggaatccgtgatggcaaagcagcttatatggctgcaaaagccggtggggatgttattgtaacaggtactgttgttgaagaagtagatgatgtgaaaactaaaattcaagaaataaccggagctattttaaaagcttcaatggagtag

SEQ ID NO: 7652 - DNA, 1074 bp, Methanobrevibacter gottschalkii
  source 1..1074: mol_type = genomic DNA
atgttaaattcattatacgaaaaagccatagctaaaagaggatttattcatgatattgattcacaaactgatgttgaatctcaattggagtataaatggtttaatagagatattctagaaattgataatggtttttctattgctgcaggagatggaagtttcaacaaaaagaaatttctaacaactaatttttgtgcagtaggcgctgaatctataatttatgatggtaaaattaagaagatagatgattcagatatttttgatattccgcatgtctcttttttagatgaattgctcagtaattatatggctatttatgaacttaaatgtgcacttagaaccattaaagaatataatgttgattattatatgattgatggatctattttaggagatttacaaaacccatttccaagaggtgctaaattaccctccaaacttaaaaataatttagatgatattctacttaaagaatttgagagaagattaaacataaaaaaatatggattaatatttccagaaattagggattcactaaatcttgttgaatttccaaaaaatgaaaattcaaataaaattgaagaatataatcttcaccttgcttctattgaaaaaataattctattaaaagaaattttacaatttagaaaaaaaatcatttcaatttcaaaaacttcatctgataatgatttatttcattggaatattccagatattgcattcttagataaatttacagaaaagcagggaatttcattaattaaacataaaacagtatataaaaaaacagcatttccatactttaatgatttttttaagagtataacatttacaatcttttatattcgtttacaagataataaaaatgtattgaaagttgaattgccttataaggcatcaaaagaggacgtatttgaattaattaaaaagattaatgcattaacagttcaaggttatccatatttacttaataaagcacataatgatgttgtaattacagataagaatattaaggaattattaaaaatagctaaaatttatgaaacaactaatagggaagtgatgtcatggtag

SEQ ID NO: 7653 - DNA, 1488 bp, Methanobrevibacter gottschalkii
  source 1..1488: mol_type = genomic DNA
atggtagttggaatttgtattggtgaaacttcacttacagaggtaaccttcatttcagataaaatgccaaaagttggcgaatatgttacaattgaatatgatggaaagaaagttttaggaatgattgaaaatttaataaggggaaatgattctttaaatgttgatattaatgatttcaatgcaatacaaaagatttcaagaattggtgctgaagataattatattaagggtagggtaaaaattctcggtgatgttaatgataatttaaaattaccaagaacacctgtacttccaggaacagaaattcatctagctgatggagaaattttagataaaatattcaatgtaaagaatcccattaagttgggctgtcttgtaaatcaaagtgatgttgatgtaaatgttgaagcaaatccaattttatcaagacatttagctattcttgcaatgaccggtgcaggcaaatcaaatactgtagctgttttaatagatcaattattaggttataatgttcctattttcgtttttgatatgcatggcgaatataaagatgcggaatttcccaatggcaatgttaatgtaataatgcctaaaatcaatcctcattatatgaatttctatgaaatcaaaaaattggtaaatattggtgcaaatagttttattcaggaaagacactttagaagagcattcaaacaagctgaaaagaatatttcagatggtatagcacagactaataatttcctacaaataatgtatgatattttagataaagattcacatgttgaaggatcagataaacaaattgttgatgtaatgaataaaattgatgatgcaatggagagatactccaatttattcgataaaaacattggaaatattttatctaatgtcaaaagagggtatgttaatgttttggatttaagtcaagttgatgagtcagttgcaagtgttttagtaagtcacatattaagaaacgcacttaaaagaagtaaagatgcggcacatactggtgataaaaaagatttaattgataattcagtattctttattttagaagaagcacatattttagctccgaataagagagaatccgattctaaaagatggattcaaagagttgcaagagaaggtcgtaaattcggtttaggtttatgtttggtaagtcaatccccaaaaacagttgatcatgatgcattatctcagatgaacaacatgattattttaaggcttgttgaacctgaagatcaaaggcatgttcaatcagctagtgaaagcttatcacaagatttgattaatcagcttccatcattaaacgttggggaagctattgttttaggtttgatgagtaaaataccaacacttgttaaaattgacatgtttaaaggtcgtcgtcatggtgatgatatggatttaatctcttatttcaaagagttaggtgaggattcagattataatgatgaaacagtagatatggggtatgattactaa

SEQ ID NO: 7654 - DNA, 1242 bp, Methanobrevibacter gottschalkii
  source 1..1242: mol_type = genomic DNA
atgaaatttgcacatttagcagatactcatttaggttatcgtcaatttggtttaattgaacgtgaaaaagacttttatgaagtatttgaaaaggttatagataaaataattgaagaaaaagtggattttgtaattcatagtggggatttatttgaaactgcaagaccgtctcccaatgcacttttagttttccaaaaaggtttattaaaattaaaaggtgcaggaattcctatgtatgcaattgcaggaaatcatgattctgtaatgcgtcaaggagctatccctccgcaagtaatatttaaaaaactgggtttaaaagtaattagtccaattaacactgattatatgcatggagatatttttattgcaggtttgccttactatccatcatcacagagtaaaactctaaaatctaaattagcagaattatctaaaaaggcagccaatcatgaaaaatctattctagtattgcatcaaggcattgacaaatatctaggatatcaatatgaattagaaataggagatattccagataattttacttattatgcttttggtcatattcataagtatattaatgaatcatttggtaatggaagattagtttatcccggatctgttgaaatttggaaaactgatgaagttgaagattataaaaagaacgggaaaggtttcgttgttgttgatcttgagggtccaaaaccaattgttaaaagggtcaaaatcgatgttcctcgtgaatttattaaaagatcacttgattatgaaaacttagaaagtggtattgcaggtattaaagaaacaattaaggactttgataaacagcctattttgaatttaacaattaaagatgttgaatctgatacaagtggtgtttatgatattattaatgaagatttaggtgatttgtctttaatgattagaccaaaatttaatattaaaggtgaagagcttattgatgaagataatattaaaaagaatggtttgggcgctaaagaaatattggtggaacaattaaagaaatataatgatgataatgtaactcagttagctattgacttatatgaatatttatcaaaagataagattgaagagtcaaaagatttaattgaacagttctataatgacttttataattcaactaaggatgaagttgaattacaaacagaagaaattgaacctgaaaccgcccaggtgaagtcagaagatgttcaagcaacatttaatgaggttttaaaatga

SEQ ID NO: 7655 - DNA, 2748 bp, Methanobrevibacter gottschalkii
  source 1..2748: mol_type = genomic DNA
atgattttcacaaaattacgattaagaaatttcaaatctcatgaggatacaattattagatttgaaaaaggcattagtgttattgtaggtgaaaatggtgcgggaaaatcaacaattctggaaggcattagtttttctttattcaaacagcacactgctaaaaaaattgatgacctggttagaaataatgcacaatcaatgtttgttgaattaaaattcatttctaatggaaaaaaatacaagattgttcgtgagaaaaaatcaaacttaaaatcagtattatataagaaaacatctttagatggtgaatatgttcacgtttgcagtggggataaagaagtagcaaatgaaatatatcaaattttagatatagattctgacttattcttaaatgcaatttatattagacaaggtgaaatagctgaattggttgataaaactcccgctgagaaaaaacagttgattgctaaattattgggtattgattcattagaaaaatcttggaaacacttattgcccttcattaatgattatgaaaatcaactttctgaacttaaaggtaaactttacaattcaaaggaattagcagacgatttgactaggaaaagagaggagttaaattcattaaaacaaagaggatatgaacttgaggaaaatattgaagaagtcagcgtattacttaaagagatttctgaaagtaaaagggacatggaaagagaaaaggaaatctatgaaactcaggttaataatcttgaaaatgaagaaaaaacattatctaaattggaacaggataaacatgtaattcaaaataatttagataatattagagaagctgaagaacaaatttcaagattggagaaatatgtttcaaaattagatgtttatcttgattttgaaaaatctgttttaagtatacaaaatttaaaacagaaagaacaagaaattgaggataaaattaaatctattgctcaacaaaaacaacttgttgcagacaataaagagaattataataaatttttagcttcagatgaggaaattaataaatataataatcaaaaagttaatttcgaaaaagaattagctaccatggctaaactggataaagataaaaaagatcttttaaaagaagttcaaaatgaacgtaatgaagttaaccaattttttgcaagagctaaagataagttagatgattatggattggaccaggatagattggctaaaataaatgatattaatagtattgaagatgccacaaacaatttctttgatgagatatctggaaaaattaaaagtttatctgatgatattattgctaagaatgaagaaatcgttgtatttaagcaaaacattaaatcaagccaaaaacctttaaaagatttgaaagatgtggacagtaaatgtcctgtttgtcaagcggatattgatgataataaaaaatctgaattaatcaaacagtacaatgctgaaatcgaagaaaacactaaattaatctcagaatatgaagaaagtgttcgtttactcactaagaataaagcaagttttgaagataaatctgataaattatcagaattatccaaacaaattattgaatataaacataaattctctcatttggaaaatcaattagttaaattaaacaagcttgatgatgaacttgtatctaaggactttattagtggtaaattaggtgaattaattcttattattgcaaataaaaaagaaaatcgtgaatcttataaagaattttatgatgcatataatcaggcaaaaggtgcattagaggttttaggtagtgaaatagacgcacaatataaattaaaacaagttaaaaatgaaattgataatcatgtaactaatattaaacttgcaattgaacaagatcctcatttaagtagagatataactgctgctgaacttcaagatcgtattactgatttaaaacataaaaatgaggaatacaatcaacttaaaggctttattcaaaataaaaaatcgtatttaacacaacttgattcagttaaagaggacattggaatgtctattaatcagatagatattcttaaaaataaaatcaaagcttctgtttatgatactgaaaaatacgaacaaattatttatcattctgatatatatgaaagaagatttaataagtttaacaacgaactttcaggcattaaaggacaagcacgcgaaacaattactcaagttaaagatttgactggtaaattagaatctgttaaagtattccaaaaacagtatgatgacatttcagattatattaatttactaaatcattttagaagcttatatagtaaaaatggcattcaaaaagatttaagaaatatttcaaggccattgattcaaaagtatactaaagacttctttaatgaatttaactttaattattctgatctgactcttgatgatgaatatgatgtgactgtttatggtcctgaaggggaatcttcaatgagtatggttagtggtggtgaaaaaatagctatagcattagctttaagacttggtattacacaagcaatggctaatggggaattggatactattttacttgatgagcctacaattcatttagattcatcaagaagacacgagttaatcaatttattaaaagaaatgtctgtactgcctcaaatgataattgtgactcatgaacctcaacttgagaatgctgcagataatttaattaaagtagaaaaagtgaacggtgtttcaaaagtaataatgtaa

SEQ ID NO: 7656 - DNA, 396 bp, Methanobrevibacter gottschalkii
  source 1..396: mol_type = genomic DNA
atgtttgaagatgaaagagacaataaaatttacaatttaataataacaaatggatttgacacaaacaaagaatataatcagtttacagaaaaattatactcaaagacagattttttatggaaagaatccatgtctggagcatattccactgccggtgaagaattttatcaaaaagtagataggattgttttattggccggcctttataatgataataaagaactttttgaagatttattaattgtaagcgaaaaatatgaaatacctattgttttagttagaccattaggtgtagaagaagtcccaattaaattagaagaaaaagcagcaaccattgttggctggaatgcgaactgcataattgatgcaattaaagatgcagctgaaactatgtaa

SEQ ID NO: 7657 - DNA, 1281 bp, Methanobrevibacter gottschalkii
  source 1..1281: mol_type = genomic DNA
atgaaagcagcagtaattggattaggcgtagaaggaaaaaaagcagtaaactctcttttaaatcatggatgggaagtttatgccactgatttgaatattaatgttgatttatctggtttaaatctaccaaatttgtcacttgatgtaattgatgaaactcaaacagtttcaattgttggagatggcataactcttgatttaggttttacaaatccttatgacattgatcagtgcgatgcagtagcaattagccctagcatgtttggaggagaatttgcaacaaaattattaaaaaattcaaatttactaagtgatgttgtagacaaacataaagatatttttactatcggaattacagggactaatggcaaaacaaccactgtacatatgttaaaagaaatcttggaaaatgctggtaaaaatgttttagttggaggaaatgggggtggaggattttcaggttattatgacttaattcttgaagctaatgaaggggaatatgatatattgcttgtagaggtatgtgatatgactcttgatttctgcaaatattgttttgattttgacatgattggtcttactaatattggtaatgatcatatgaatgttcataaaaccattgccaactataaaaattctcttgttagattttttgagggaaaaacagtattcactgcatttaatcaagattttaacactgattttaaagaatctagcgataaaaacattccttattttgaatatcaggatgaattaaaattatttggcaaatttaatttacttaatgcaggtcttgcaacagccatagcaagggaattgaaaatacctaaagatgttattaaatcaacactttctgaatttaatgctgttgaaggcagattagatgtttacaaaattaataatgtttctgtttatgttggaaaaactgataattccgatgcattaacttcaattttatctgaaaaagatttttatgctatatttataggcacgccccgccataatgaaatccacagattggatattttagatgctgctgttaggtataatccggaagttattgtattattccctggattggatgatactctggacatggcggtttatagattaaattccctcggttatatggggaatatcattacggtaaattctcttgatgaaattatcgaattagttgctgagtattcacatgaggatgctatattaatagggggcaatggtcaagatactcttattaatattcaagaaagaattaagttaatttctgaaaatttatag

SEQ ID NO: 7658 - DNA, 1188 bp, Methanobrevibacter gottschalkii
  source 1..1188: mol_type = genomic DNA
atgagtagcggttggagaagaatatcaattacaatatgtttggcattaattgttttaagtatattatttgttgcatttagtgcagcaactaacgcgccttataccgctcaatccgttgcagatgagtataatcttcctataggacaatccatgtttgaaaaccaatctattttaggtcaacaagattcaatttctgtaccattgatatcaaatgttggattcttacaacatcaaattactgcattagatattcaaggattattaatgactttgactactggtatggttccatttgatttttcaactgtatctagtgaaggtatagactcatatggggatgtggttaatgtagaaggcccaggatttttaacatttgaaggagataaattggctgtaaaatcaccaaataactatgtatgggggtacagtactccatataaatggttagttaaaactgatactggtgtggatgttgttgaaaatggaactgttgttaaatctgttccagaaaatgaaattaagaatttagattatcataatgattattataatagttctactattagaagttggtataactatgatgctcataatgggtctacatttactttagaaaaaggaatgaaaggattttctgatggcaggaataatattagtgctgctgatgtgccagtaatatttggtcatgatgttgttgattatgcatctgaatatcctactggttctcctattctgttatactctggaaattacactgaagaagatggtgaagcttatggaacttctttaggatcacatgcagaatatggtgattcaattagggaagtaaatgcaagacaatttgttgatgcctggaatggaactgtaattccacctaattcaacttcaagtggtaaagattatgtgtactttgaatcagctgttgatccaactgctcctggaggaagtgcagcgcatggtgtatgtccgcctgctagggctttaagagcagcagtcactgctgaaggtttcggtttacctgttggtatgacttgggacgaagatgcagttttatttgggtataatcctgcacaggatattacagttacaaataatcatgattatccagtattgattaaaatgtggactgaaggtgaaggtactggaatgggtatttactgtcaaattgtaagatatattccgaaataa

SEQ ID NO: 7659 - DNA, 654 bp, Methanobrevibacter gottschalkii
  source 1..654: mol_type = genomic DNA
atgtcaatctcaactattattacagcggctggaaaaaattccagaatgagaaatgatcagatttctcgcaatattgaattaacaaataaacttattcttccatttaaaaataaaacagttatagagacaactattgataatgcattatctgcagatatagatgaatgtattgtggtacttggtcattatgctaatgaaattctagaatctatttttgataattataaagattcagttaaatttgtaattaataatcctgttgatgtaggtttgtcagtatcactttacaatggtttatcaaatatttcttctgattttgcattgtgtataacagcagaccaaccaactgtgtcaactgaaacttttaatcgtatgattgaagcaagtcagaactccaaaaatccaaataggacaatttctattttgagaagaagaaaaattggattactggatagtgctgaaggattaggcatgccatttgtagctcatcgtttaaatttaatgaattatttggaaaatgaagatgataatataaatccaattttaagaaaaattttcaatgatggttatacattttatggaataaaagaaaaaaataaaaaagaattattaaatattaattattatgatgattatctggctcttttagattga

SEQ ID NO: 7660 - DNA, 675 bp, Methanobrevibacter gottschalkii
  source 1..675: mol_type = genomic DNA
atgactaatttggaaaaaaacaaaaaatattgcgaagtgattgaaagtaaaattaaacttgatgcaaaacctgttgcaatgaagttgattaaaactgaagatgacttaccagaaggcattgacttaattgatgaaaaaattagacattgcgaaatggttagaaaagcttcacttggaaacactttttactccacaattgatcaacagttatgtttaggtggagcaggtgcaattggacttagagatatgcctgaaaaattagcaaacggtgaaaaatatttctcattaggcagattccaagatttagaaaccgctaaaaaattaacttcaaaactttctattgttaaagatatccattggggaatgatatatgcaccgttggatgaagcagactttgaagcagatgttattcaaattataaccgaacctgttggtggaatgaaacttgcccaaagtattgtttataaaactggtgaaaaaattaatccttcatttgcaggtattcaatcattatgtggagatgcatttgcagacccatatatcacaaatggtgttaatttcactttaggttgcgatggttcaagaaaagcagccgatattaaagataatgaaatgactgttggtatcagtaaagctaaaatcgaagaagttatttctggtcttgaatcaatctaa

SEQ ID NO: 7661 - DNA, 1236 bp, Methanobrevibacter gottschalkii
  source 1..1236: mol_type = genomic DNA
ttgaaattgccatcaagatcaaaatcatatatgattccagaatacagtgtaactggagatttattatcatacttaacttgtaatttacaatacagataccaaaataaaggaacactaccaccatcaaaacctgttcaaagatggtttggggaatttattcatggagttatcgaagaagcatacatacaatgggaacaaaacaatatgcattttccttgggactggaaaaaggatattagaccaattgaggatttaattgatttgagattacaggttagaggcctttacccatttgatgaggatttatttttcagtattcataatcaatcagatgaagaattaacaattgatgatttaaatgaacatgaccataagaaattagcaagtgctagagctgaaaaagcaataaatatttggggaaaagatttattcccattaattgacgcatctgaacacttaataaaaggcatacgtgatatgcccaactatgatgaaaacactagtagatcaaattactatggaattaatggtgtggtggatgtttcatcatctgttaaaatcaataaaacattagaacaaagtaattttgataattataataatagaattatagaatacttaaagaaagatgagaatttccagaaaagaattgctaaatttgacaaagatgacgagtatgaaatacttattgattataaaggaatgaaaagaccccctgaaaaagttaacaatcctaaagttgaaaataaatgggaaactcatgaacaacagatattaacttattcatggcttagatcagaacagaaatcatctaaaccaataatagctggaattattttttacttaaatgaattagttccttcaaaagaggacttgattttaattaaagatgaattaaacaatggattaactgatattggatatgaatatgataaagacattgagttaattaatagctggcaagaagatgataaagctcctgaattaagtgataacttcaaaattgacagatccattagaattataaatgttgatgaatatgaaagagaaaaagcacttttaaaatttgatagtgttgtttcaaatattgaagaatcattaattaaagagatgaaaggatgtaaaattcaagatgcatggaaaggagattcggatgaaagaacctgcagtgcttgtgattttaagactttctgtaaaaataacagtgttaaaacaaaagactttaaaattccttaa

SEQ ID NO: 7662 - DNA, 2439 bp, Methanobrevibacter gottschalkii
  source 1..2439: mol_type = genomic DNA
atgatttcatatgaagaatttgaagacatggttgttaatatacttaaaagagatatttcttcaaataaagaacagaaaaatgcaattttagctccttgcaataaatcattatttcttgttgcaggaccaggttctggaaaaacaactgtaatggtgctgaaaatattaaaatacatttttgtagatgatattgaaccaaatgaaataatagctacaacatttacaagaaaagcagctgatgaattgtattcaagaatattaggttggggagatatgattaaaaatcatcttctaaacacaattcacgatttcaacaatattacaaagattacaagaattgattttaatcaaataaaaataggtacaacagacagcattgcggaagaattgcttagagaatataaaaaacccggtgaaaatcaagcaatagttattgaagggtttgtagctaactccgcaatgataaaaatcattattgaagatgaaaaatatctcaataaaaatctagtagaatatcttaaagaagtgagcggtaaagaaaaaatcgaagaaccatctaaactaagtgaaattctaattgaaataaaaaatagaatctattacgatcaggtcgatttcaatgaattatacaataaaacccaaaaagatagtggagcacgcattgcccttgactgtataaaaaaatatgaagataaacttcaaaatagaaatacaattgattttgctatgcttgaatcagaatttcttaaaaaattaaaaaacaatgaattagaaacatttttaaatgaaactaaaattgttctaatcgacgaatatcaggacacaaatttacttcaagaagatatttactttacaattgcccgctccgctattgcaaataatggcaatataactgtagtaggtgatgatgatcagtcactttatagatttagaggagccaccgttgatttattcacaacttaccaagaacgcattaatgaaaaactaggtattgaagttgaagaaataaatttaaggacaaattatcgttcaacagaaaatataatagaacattgcaatcaatttgctgaattggatagtgaatatcagaatgcaagagttgaaaataagcctaaaatcattgctccagatttcgataatgataaaatgccaattttaggaatgtttagaaacaacccagaaatgcttgcaaaagatttatcaaagttaatcaatcaacttgtaaacaaaggtgaagctgaaattaaagtactgcaggttttaaataaggaatattatgaaaaagtaaatggtgtaattgacatagcaagattacagcaaattaaagcggaaaatgtaaaagcaggaaaagaaattgaaaaaataactcttaagttagatagtgattacggttcagcatcagacattgcaattttatcatattcacctaaagaaacatattacggcaaccgttcattcttacattatcttagaaaaaatcttaaaaaattaagacaaccgattgaagtatttaaccccagaggaattgagcttcaagatattgatattgttggtattttttgtggtttaatgcttgaatgtattgatcctgatagtactgtgcaaaaatctgataagacaatacctaaattagcaacacacaacatgagacgttggagaataaaggctaaagattttattaagttaaatcctgaacctcatgaaccaataacattatcccaatttgttacatattggcaacttagaagaccaagagggcatgaagaatggcccaaaactgcaagtttgatggaacttgcatacaaaataacgacttggattgaagaattacaagaagacgtggaaggtattgtatatctagaagcaattacacaatccattacacaaacaggattttttaatgattatcattcaaatatttcttttagaacccaaaaacaagaaagagaatctattcttgaagctatctggaatattttcattcctttatctactggaggaatacagattgatgaatcattacttgaaacattacctgacaatagaattaatgtattgtccatccatcagtcaaaaggattagaatttccattagttattgtagatgtgggttctagatttaagcaaaatgacataaggactcagaaattaagattcccaaaatcaattaaagaagaaacaacacttgaggatagaataagacgatacagcaagattggacaaagtaaaagaggagaaaaagacaaatcatttgatgatttaacaagactttactttgttgcattttcaagagctgaaaaagtattattgctaattggcctaaaccctgctattgaaggatataacaaaaagaataatcattttaatatcccaaatgttgctcttggatggagtagagatgaaaaatatattggatttaatgaaatttatttaatttag

SEQ ID NO: 7663 - DNA, 2871 bp, Methanobrevibacter gottschalkii
  source 1..2871: mol_type = genomic DNA
atgtctgaagtaaacaatatagatatgttcaaaaatgatgtgaggtatagggaaaacattgcccatattgaaacaataccggctaaaaaggctagttttaaaaaagttgataatttaaatgaaaatattgtcaattacttatattcaaaagatgtgaaattatacaaacatcaggcagagacatatgaagctattaaaaatggtgaaaatgtaattattacaacaccgacagcatctggaaaaactttagcttttaatctacccataatggaaactatgattgaagatgataatgctacagctctttatatttatcctgcaaaagcattatctaatgatcagttacatgttctagaaaatcttgaaaaggaattggatataactatcaatccgagaacttacgatggagacactccaagaaatgaaaaaagaggaattcgtgaaaaatcaaggattgttctaacaaatccatatcaattacatttaattttatcctggcatcatcaatggacaagattttataaaaatctcagatatattgtaattgatgaatcacattattataaaggagtatttggttctaatgtttcatttttaattaaaaggttaaaaagaatagctaacttttatggttcttatcctcaatttattttatcatctgcaactcttgctaatccattggaattagctaatagattgactgggcaggattttgtattggttgataatgatacatctcccagtggcgagaaagacttcattttatataatccttttcaaaactatgttagaaataaggtttatgctcaaaatgcaccttctgtgcatatggaaactgaaaatattttcatgtatctgatgttaaaaaatatccaaacattgtgctttacagtttcaaggaaaaccacagaattaattgcaatgtgggctaaaaaagatatgactcaagtaaaaggaaaactggcccatagaattgcagcatatagggcaggatatcaacctcaggagaggcgtgaaattgaagaaggtcttaaaagtggaaaatatcttggagttacatgcacaaatgctttagaacttggaatcaatattggttctcttgatgcagtcattatttctggttatcctggaactatgatttctacttggcaacaatctggaagggcaggtagaagtaatcaaaaatcaatcgcgatattaatagcatttgaaaatcagttggaccagtatttcatgaataatccaaagtttttctttgacaaacctcatgaaaatgctattattgacttgacaaatccaatattgcaggaagcccatttactgtgtgctgcaaaggaattgcctcttaaacgtggtgaagcagaaaaatactttgacatatctcaggatgttatagatgagcttgtctctaaaaaggatttatatgaaaatcatcgtggagactttatgtatccttatgatgacaatcctgcaatggatcattctttagatcagatttcatcagaagaatttaaagtaatggttaatggaaggcttttagagactatggaacgttcccaagtttatagggaagctcatgaaggagctattctgattaataagggagatacttacgtagttaatagtgttaatctaaaaaaaggttatgtgaatgtgtcaaaagaagttgtagattatcatacaatggttttaaataaaactgagaccaatattaaaaagaaattatcaaaaacaaaatatggtgatttgacaattcatttcggtgaacttactgtaagtgaagattattttaaatataaaaaaatgcacttttcaaaacctattggaacatttttacttgatttgcctcctttaacatttaatacaaaaggattatggtttacaattccaaaagaagttaaagatgctgtggaagacatgtttccaaatgatgaagaagtttttgctggcggtcttcatggtgcagaacatgctttaattggtctatttccacttcatacaatgtgtgatagatttgatattggtggactttcaacaaattatcatgaagacacccaagaggctacaatttttatctatgatggttatgaaggcggaattggaattaccgaaaaagcagtagatgtttttgttgaccttttaaattccacaattgatttattaaacaattgcaaatgtaagaaaggttgtcctgcatgcatttattctccaaaatgtggaaatgataataagccactccataaaggtgcaactaaatatatacttgaatacatgaaaaaattaatttctgatgaggttgatggtcaaaaagaggatattattgatgttcagtccactgttgatgattcaaaggaatttgaagaagcttatcaattatatgaaaatggggattattctgcttcaaaagatattttaaataatatcttagcaaatgataaaaaacatgtaagatcattggctttaatggctcaaatattatatgatcaagatcaaaaagatattgcattactatttactaaaaaagcgctggcaattgacaggtcaaatgaaatggctaacaatttggaagtgttattgaccaataaatctaaaactaaagaaaatcattctgatttatcttcacttgatgatgttgatacattgtttgaggaagcatatgacatgtacagtcaaggtgatttggatgcttctttgaacattttagaaaaattacttgattttgacagtaaaaatgcagaaacgttggccttaatgggattaatacattatcattcaggttttttccctaaagctgttgaatattatagaaaagcaacaaaaataaataaaaatggcgaaatggttaaagaattaaaaatacgggtgtcttaa

SEQ ID NO: 7664 - DNA, 1140 bp, Methanobrevibacter gottschalkii
  source 1..1140: mol_type = genomic DNA
atgaattttaaatctaaatttggttttggatgtatgagacttccaacaaccgatgaaaacgatccatcatcaatcgaccaggatttatttaataaaatggttgatatttacatggaaaaaggatataactacttcgatacatcttacgcttatcataatggtaaaagcgaagtagctatcagaaaagcactagtcgaaagatatccccgtgaaacattcaagatttgcgataaaatgcctacttgggcattaactaacagtgaagacaacgaaaaatttgttaatgaaatgcttgaaagacttggaattgattattttgatgtatttttcatacacaatatcaacggaccatggcttaaaaatgcaaaaaatgcagatacctttgaatatgttaaaaaaatgaaagaaaatggcattgcacgtgaaattggatttagttttcacgacaaatcagatttattaaaagaggtccttgatgaatatggagatatctttgatattgttcaattagaactcaattaccttgattgggaagatccggccattgaagctcataaatgttatgatttatgtgtagaacatgggcttgacgtttatgtaatggaacctctaaaaggtggggttattgtaaatccaaacgatgaaattaaaaatgattttaaagagttcaatccaaataaatcaatagccagttttgcaataagattctgcgcatcacttgaacatgttaaaatggtattaagtggcatgagcaaaatggaagatttacttgataattgcgatacctatgagaatttcaaaccgttgaatagagaagaaaacgaatttttagaaaaaatggctcagaaactttcagacaatcttgcagtatcatgcagcgaatgcggatattgtgttgatgcatgtccagaaatgatccctattccggaatatttcaatctatacaatacaagtaagaaccaaccggaatccaatatttacagattatatttcgataaattaggggatgaaaaagttcctgcagatgaatgcacatattgtggaacttgtcttgattattgtactcaaaaaatagacattccagaagaattggaaaaagtagtggaacatttccaagagggattctcaccttatgaataa

SEQ ID NO: 7665 - DNA, 378 bp, Methanobrevibacter gottschalkii
  source 1..378: mol_type = genomic DNA
atgcatgaattatctatggctcaaggtattataaatgcagtgttagatactgcaaaagaaaataatgctactgaagttaacaaagttacaattgaagttgggagattagctatgattaatccggaacaactgcaatttatcttaggtgttttaattgaaaacaccataatggaggatgcagaaattaattttgaggaagttcccgttgaaatgaaatgttttgattgtgatttccacggtaatgctgtacttgatgatagtgatcactatgcaccacttgttaaatgtcctaaatgcaatagtcttaaaattgatatattgaatggaaaagatatcattgttaaaaatattgttattgaaaaacctgatgatgcttaa

SEQ ID NO: 7666 - DNA, 651 bp, Methanobrevibacter gottschalkii
  source 1..651: mol_type = genomic DNA
atgcaccaagttgctgatgtagaagttgcaaaaaatattatggatgctaataaaagattagctgataaaaacttaaaaaatttagaagataaaaacatattctgtgttgattttgtcggagcaattggttctggtaaaacaactcttgtggaagatattattgataatactgattataagattggcgttcttgcaggagatgttatctcaaaatttgatgcaggacgtatagaaaaacacaatgtacctgtagttggattaaacactggtaaagaatgtcatttggatgcacatttggtaggtcacggacttgcagatttgccgttagatgatttggatatggttattattgaaaatgtgggtaatttgatttgtcctgttgactttgaattaggttcccatttaagaattgttgttgttagtgttactgaaggtgacgatactgtagaaaaacatccaattattttccaaacttcagatgttgttgttatcaataaaattgatttagcggatgcagttggtgctgatgctgataaaatggttgctgatgctcaaaaattgaatcctaaaattaaaataatcaaatctagcttaaaagaaggtaaaggattagacgaaatcatttcaactattgaagaagctatgaactaa

SEQ ID NO: 7667 - DNA, 1032 bp, Methanobrevibacter gottschalkii
  source 1..1032: mol_type = genomic DNA
atgaaagtatggatagatatttcaaatgcacctcatgttaggttttttaagaatgttattaagtatctagaagctgaaggtgaggatgtaatcgttacagcaaggcaatttggtgatatccataaattaatggaaatgtatgatattgatttcatttctgttggtaaacatggtgtaagcttatatgataagcttaaagaaagcacttcaagagtttataatcttgttgatgtgattcatgatgaaaatgtggatgttgcacttagcaagcattcaattgaacttccaagaatcagttttggtttaggaattccaagtttatatgtgcttgataatgaacatgctttagctgctaataaattaactcttcctttgtgtgatagaattattacaccaaaaattattgacatgtggaaattaatgaaatttggtgcggatccaaacaccattatttcttatgacggaacttctgaactaatgcattttaaagattttaagtataatgataatatattcgatgatttaaatctaaatttaactcatcctaaaactattttgatgaggccagaaccttcccttgcatcctatttggatgctgattgtagaaaatcagttttatctccaatagttgatgaactgaaaaatgtagcaaatattttaattcttccaagatttaaagaacaagctgaaatttttgaaggaattgaaggggtttctattttaaaacctcctgtcgacacttcaaatatcattaaaaaatgtgatttggttattggtgctggaggtacaatgaatagggaagctgcaatattgcaaactccggttatttcctgttatcccggtaaaacattatctgttgaccaatattacattaataaaggtttaatgtatagatctcaggatactgatgaagttatccataaagctttggaatttatcgttaatcctcatgaaaggattgatgttaaaactgatgatttattccaaattattatagataacttatatgatttagctaaaaatggtaaatag

SEQ ID NO: 7668 - DNA, 1083 bp, Methanobrevibacter gottschalkii
  source 1..1083: mol_type = genomic DNA
atgttgttgattgctcaaaaccatttacaattaattttagaagttggattaatgttgtttgtaacattagtcttttgtcttaacttgattccattgtcacttagtattgtaaccttcttatcattattcataatgggaggattaacacttctttttggtgcggatattgcacttcttgtgttattttcaagtcaagcggaatttactcacccatttggaccaattgcattacttggtgctgtaactgcacttgcttcgttaaaagtaatgtcggaatctggtgttgatattagaccacttagaagatttgtaattttattcttagctggaattacagtattcggtggattaatgcacagatctttcttaattttatggttacttggtttattcttaggatacttaatgatttccaaatctttcagagaaaaatctgtatttacattaaagagaatcatgatgtttttcggtgcagctggagcaggttttatttttttagaagttcttgctcgtgtatctggcatgacaattttctctccacttttaagattaggtagaattgaacaatactctttatcaagtattaaaatggtattaaacaacattcaattaatagggcataatgcaaatgcttcttattggggagcagatggaacagcatttgctgaaggatatattactttgccaatgcaattaattttattttttggattgcctttcccactattctttggtgtgcttgtaaaccaaaaagatacaattgattatatgcttccaggtatatttggatggggattcgactttggaatattgggtctcattggtctgatgatatttgtacttggaacaatcatcattggatttaaagtattaaatatgtacagagaaaaaagagagaaaaataataaaaaatacttgggaagggaagtattattaacaggtgcattagcagcattctgtgcacaatcattaattggattatttatatttaacagatccatcaatggtatggcattgttaacattcttatttgtaggtgcattaattttagctaatgtagtctcgttaaaatcaagatcataa

SEQ ID NO: 7669 - DNA, 459 bp, Methanobrevibacter gottschalkii
  source 1..459: mol_type = genomic DNA
atgaaagctttaatattgcttggatgtccagaaactcctgcacaaaccccaatggcagtttatgtatttaataagttaactaaaatgggttatgatactacaattgcagctaatcctgcagcatccaaattagtaaaaatatctgaccctgaaggattatataatcttaatttaattgatttggaaagaacattaggtgaaattaacgaaggagattatgatttacttgttggatttgtacataaagatgcggcagcttccttttttgtaacatttgatcaaattttaaataccaaatccattgcgttagtattttcaagagatgctgatgaagtggcagaatttgttaatatgattgaagaaagtggaagcaaggctttaatttctgctgttcgagcattccataatccttcaccgattaaagttaaatttgataaagctattaaggagtttgaataa

SEQ ID NO: 7670 - DNA, 315 bp, Methanobrevibacter gottschalkii
  source 1..315: mol_type = genomic DNA
atgtcattctgtttagatacttaccttcaacaatctgatgattatgaaattcatgcttcaaaagctggttttaaagattgtgccatgattatcagattcaaagctgatgatttagtgtatgttaagccgggagatgaagttttaggtgttagagtaattggtattcctccaattccaattggatttgaccataataaaggaactgtattcattccatataccaaaccttgtcatggaacttctgttgtcgaacttccgataaatgaagaagaaattgaaaaaatcagaaaacttgatactggtaataaaaaatga

SEQ ID NO: 7671 - DNA, 945 bp, Methanobrevibacter gottschalkii
  source 1..945: mol_type = genomic DNA
atgaaatcaactgttgtaggcagttttccagctaaggaaagctccccatctaattttaaagataaaatattaaatactttaggattatatgatccttttagagaggcaatcagaagtagtgtaattgctcagcttgatgctggagtagatataatttccgacggtcaagttaggggagatatggtttctatttttacaaaatatattccaggaatgaaaattgaggatggaaatacagtaatcgtttctaaaataagaaatccaattaaggaaatctctattaaagatatgcaatatgcaaaaaaggtcatgaaagagtattataatggcaacattccggatggtaaaggaattaaaggaattattaccggaccaaatactatagtccactcttcaagaattgaatctttttataaaaacaaagaagatgcaatcattgatttagcacatagtctaaaatttgaagtagattcaatagctaaaaaagtagaacctgtttatattcagatagatgaaccatttttatccactggaatggtggatatgaatacagctcgtgaagctattgatataattcatgatggtttggatatacctttgggaatgcatgtatgcggtattttatctaatgcattcaaagaccttgcaaaatttaacattgatattttagatatggaattcgcaggaaataacataaatcttggggttttagagaaaaatgcatcattgcttactaataaaaaagtgggatttggatgtattgattcatcggtgcatactgttgatgatattggtgacattgacatgttagtaagtagagctattgaaattgttgggaaggacaatttgcttttagatccggattgcggtcttagaaggtcaccaaaagatgttgcttttgaaaaattaaagttgatgaatgaaattaaagataaatatgcatag

SEQ ID NO: 7672 - DNA, 432 bp, Methanobrevibacter gottschalkii
  source 1..432: mol_type = genomic DNA
atgtatttcggattttcatttatcggattactatttttaataatgttgtttattccaaatgtgttgtggaataaatttcaaccaacggattatgaaaagtactctaaaagagaaaatatcattctattggcttttgaacgtgttggacaagtattggtatgcatattttctttattttgcggtgttaattttaatttgtctatttgtgttgcaattccttttattatattgatattatatgaattttattggattaaatattttaaaagcaataagacaatgggagatatgtatagtgactttttaaaaattccactccccggtgctacattgcctgttttggcatttgtctttttagggatttgttcagataatatacttttaatattttccactataatttgggaactggtcatattggtattcatttag

SEQ ID NO: 7673 - DNA, 732 bp, Methanobrevibacter gottschalkii
  source 1..732: mol_type = genomic DNA
atgaaatttttagttattaatggatctcctagaaaacagaatacttataatgttattaaacaagcaaaagttaatttaaatggtgattttgaagaaataaatttaattaaggaaaatatccccatgtgtaacggatgttttaagtgtattcttgaaagtgagacagaatgccctcattatgataaaatcgatccaataatcgagaagttgcacgaatgtgatggtttaattattggttcgccagtctatgcgatgaatgttacaggacttttgaaaaacttctttgatcatactgcttatttgtatcataggcctgaattttttactaaaaaagcattggttgttgttacaactgctggtgcaggtcataaaaaagtagctaagtacattgatgaaacattaaggcattggggagtaaataaagtttataaaatatcatttgcttgtggtgggaatgattcattggataatgataaagttaataaagtgtctcaaaaatttgcatttgatttaatatcgaacaaattacattctcctaagtttacagatattatattttataatgtatggagagctatggcattatcaaaagatcctataaaggcagataaggaatattggtttaatactggtttagttaatcatgatttttcaccggaagtcaaattgaatattccaaaaattgtatttgcaaaaattgtatttaatgttttaaaaaaagcaattaaataa

SEQ ID NO: 7674 - DNA, 1029 bp, Methanobrevibacter gottschalkii
  source 1..1029: mol_type = genomic DNA
atggttttaagggaaaacagaattttttatttagatgaattaagagctattgcaattttatgcgtaatatttgctcatacaattcaaaattttcccactaatatggattatttaacatctcccactcttctttcttatcttacagttgctagaatgggtgttattctttttttcatgattagtggggcattgctgattggcagggaatataatttatctgattttttaaaaagaagatttgccagagtattaattccaacaattttttggcagattattggatatttatcagttctaatttttataggttttacttatgataatttagttcaagcaagtgttcaagttggttttccatggtttgtatgtgcaattttagggatttattttgttattcccatatttaattcctttattaaagaatatgggattaaaggtgcagaatatttcttgattatatgggtatttttagttatattaacaaatatgcagctaaatgaaacttattatattgatttcatattcaacaatgtaggaatatatattggatatgcagttttaggttattatttagcaaataaagagtttaatatatactcttttcctatggttgtaatatgcagtgttctttttattatttctcttgctttaaatagttattatgcatttaattttagtcatgtattttacatagagtcctattcaattattgttcaatgtgctttgttatttttgattttaaggtatatgagtaaattagctaaatttagaccaaagtttgttttatcaaaactacattcatttgttcaaaattcatttattggtagctttatttactatttaagtatttttagttttacgatttacttaatgcacggttttattgtaaatgcaattattaaatacatgccagttactcaatttagtatgattccagcaatatttctattaatagctgtaatttctattgttattgctgcagttttgtctaaaatgcctattatcagcaagttgtgcggtatttattga

SEQ ID NO: 7675 - DNA, 753 bp, Methanobrevibacter gottschalkii
  source 1..753: mol_type = genomic DNA
atgaaaggaaaagttatattcattggtgcgggtcctggagatcctgaattaataactgttaaaggaaggaatgtcatagaaaaagctgatgtaattatttatgcaggttcacttgtaaatcctgatgttttatctcctgctcgtgaagactgtgagattcataatagtgcctatttaaatttagatgaaacagatgcaatcattacaaaagcagttgatgaaggaaaactagtcgctcgtgttcatacaggcgatccatcaatttatggagcaattgctgaacagatccgtgaacttaaaaaacatgatatcgaatatgaaattattcctggagtaagttcattatttggtactgcaagtgtactcgaagcagaattaaccttaccggaaatttcacaaagtgtaattattacccgtccagaaggtaggactccaaaaccagatggtgaaagtttagcaagtttttccaaacatcatgcaacaatgtgcatttttttaggtattggtatgattgataaagtggttgatgaattacttgtaggttatgaaaaaactacacctattgctgttgttaaaaaagcaacttggccagaccaacaaataatcaaaggaaccctcgaggatattgcacaaaaagtaaaagatgccaatataacaaagactgcaatgattatagttggagatgttttagaccctggagattttaatgcatctaagctatatgacaaaaactttaaacatgaatatagataa

SEQ ID NO: 7676 - DNA, 396 bp, Methanobrevibacter gottschalkii
  source 1..396: mol_type = genomic DNA
atgaatgatagaggttttgtttcagttgaatacatttttacattatttatactctttacaattggatgtggtttattgttttattcctcatcacttattaactcaagtattaatattgaagattctgtatctcatagaatcattttaaatgatgtttcttgtgtaattagccaagttaattcaaatggtgttggttattcaaaatacattaaactgccatcggataaaggttattttgaaattactgttgataaatccaaactgacaatagaatatgataataagaaaggtgaaactatgcttcctcttttgaatatggattctaaatataaattaatcagcgggagaggatattatatttcaaaatctgatgatggaaaaattgtgataacatga

SEQ ID NO: 7677 - DNA, 498 bp, Methanobrevibacter gottschalkii
  source 1..498: mol_type = genomic DNA
atgacaggtgacaatggacagatttcagcagagttattatttctgtttggaacactaataatcgttttaatgatttctattgtgtttatttcagatgaaaatgaactaaatattgcaatggcagcagcacacagcggtgttatagaagggcttgctacatcatcaagcggaatttatcctgcagatgcttacagtgattattcaaattctaaaatgaatgtattggaaccatattctgttgagatagttaatatttcatatactgagcttggaggagataataattatgataaaaaacaaatccagtttaaagtttatgcaaaaacatctgacagattcaataataaagaattaacttcaattggggataggataaattataacttaagaaaatccattgcagttagttttaattcaataaatgccaccaataaactttataatccagttttttcacctcattatgtttacacgaccgctaatgttaaatgggtataa

SEQ ID NO: 7678 - DNA, 396 bp, Methanobrevibacter gottschalkii
  source 1..396: mol_type = genomic DNA
atgggtataaatacatatattgatttcatgtatagtgaagatgaaaaaaagcagttgatggaagatttaaaagaaatggaaacttttaaagtggatactggggatgaaggtaaaatattgcagaacgatttggaggaatatttcatcaatggaaatggggatagggaagatttaactttcagaattgaattatacttctatgcttttaaaatattctgtagaaaaccagttgttattgatagaaaccaattcacaatatttttcaatgattcattgcttgattggaatttaataaaactgattatggatgatttatcagactttgaacttgaaattgaagcagttaaagaagaaagagatgtgcttattaatttaaatttcacacttcattactaa

SEQ ID NO: 7679 - DNA, 762 bp, Methanobrevibacter gottschalkii
  source 1..762: mol_type = genomic DNA
atgattgatacacattgccatattgattttgaagattttgatgatgatagggatgaagttatcaaaagagccaaagataaattagataatgtaattgtttcagggtacagtaatgacagcaatatggacgttttgaaactttcaaaagattatgaaggttttatttatccaactttcggttttcaccctgtaagttcacaaaatgcaactgatgatgaaataaaaactgctcatgaaaacattgttgaacatttagatgacattgtagccattggtgaagttggaatggactacttttatgtaaccgataactcattacgcaaaagacagcagaaaatattcaccggttttttagaattagctaatgaatacaaaaaaccaattgtaatgcatgtaagggattgtgaaaaaaaagctgttaatatcatctatgaatatgaagatattccttattttgtttttcattgctatggtggtagcttaaaaactgcaaaaagaataatgaatatggacaatgcatatatgagcttttctactatgctctgctattctaaacagcaccaggatttgattgaaaaaatagacttggactatattttaactgaaacggacagtccttatttggcaatgacaaaagaagagagaaatgaacctgcaaatgttgtaaatgcagtttataaaatagctgaaattaagaatatggatatcggcacagttgatgaaattaccacaagcaacgcttgtaatattttcaaaatttag

SEQ ID NO: 7680 - DNA, 765 bp, Methanobrevibacter gottschalkii
  source 1..765: mol_type = genomic DNA
atggcagaaaatatactttacagattatatgaatggtacatctcaaggaatttagttcctgaaaaaatgccaaaacatgttgcttttattatggacggcaacagaagatactcaaaattacaaggaaacattgatgttgttaaaggacatgaaatgggtgtgaatattttagaaaaagtaatggattggagtattgaacttggaatagagattattactgcttatgctttctcaacagaaaatttcaatagatcaaaacatgaaatagatggattaatgaacttatttgtcattaacttcaaaagattagtggacaatccgaaaatacataaatatgaagtaaaagttaaagtagtaggcagaactgaattacttccggataatgtgaaagaagcaataaaagaagcagaagatgcaacagcacaatataataaaagattcctcaacttagctattggatacgatggacgtttagaaattattgattcgtttaaaaagattattaaagatgtgcaagatggaaaaatatctattgatgatgtggatgaagaacttgtaagtaaaaatctttatacagcaggacttgatgatcctaatctaatcattagaaccagcggggaggaacgtttaagtggatttttactttggcaatcttcatactcagaattatatttctgtgaaactttatggccggaacttagaaaagttgattttataagggcaatcagatcatatcaggcaagagaaagaaggtttggtgcataa

SEQ ID NO: 7681 - DNA, 717 bp, Methanobrevibacter gottschalkii
  source 1..717: mol_type = genomic DNA
atgaaaacaatagctattggtgttggaaaaaatgaaaatataatacaagcttgtcatatttttaaagaaaaacacccaaaaacggatttaaaactaatatatcgtgatgaagacttagtgcgtgcagttttagataataaaatacatggtgtggttcgcgggtcacttccagcttctaatattatgagggaattaaaggaaatctacccagagattacccgagcaacttatgttaatggagacgaatatgaatttctattaacacctgttggaatcgatgaaggcaacagtgtagaagataaattaaatattgtcaaaaactgcattgctttttataaaagacttggaaaaactccaaaaatagcagttcttgcagaaggaagaaaagatgattttggaagaggcgaagaagtgtcaaaatctattacagacagcgagaaactaacaaaacttatccaagaaactactggagaagaagttaaaaactattatattctagttgaaaaagcaattaaagatgattgcaatattattgttgccccaaacggaagagtgggaaatatcatatttaggacattagttttacttaattcctggccaagttatggtgcaataacctttggaatggataaaatatacattgatacaagcagagatcaaagtattgaagggtatgttcgtagtttaatattagcaaatactctagataacttttaa

SEQ ID NO: 7682 - DNA, 1380 bp, Methanobrevibacter gottschalkii
  source 1..1380: mol_type = genomic DNA
atgaaagctattaacaagatgctatgtttggttgatggtgaacactacttacctgttacacaacaagcaatagatactttaaacaacttggagcatattgatgttgctggtgctgtttttattggaggaactgaaaagcttagagatgattcggaagaaacatactcacaaaaactaggagttccagttcaatttgcagaagataaagatattccatatgatattatcgtcagtatgattagacaatataatattgatacagtcatggatttaagtgatgaaccaatattggattatcctaaacggtttaaaatagcttgtagtgtacttaatgaaggaataagttatgaaggtccggattttaaatttgaacctgtatcacaatatgacattatgaaaaaaccatcaattacaattctcggaactggcaaacgtattggcaaaactgcagtatccggatttgtatctagattaattgacaaaaataattatgaaccttgtgtaatagctatgggtagaggcggacctagcgaacctgaaatagtccatggtgaagaattagaaataacctcaaaatttctcctagaacaatctgaaaaaggaattcatgcagcaagtgatcattgggaagatgctttaatgagtaggatattaaccataggttgtagacgttgcggcggtggaatggctggcgaagtatttttgaccaatatgaaaaagggagcaaagttagccaatgaagttgattcaaaattagcaatttttgaaggtagcggagctgcaataccccctatcaaaactgataaaaaaatcacacttgttggtgcaaatcaaccaattgaaacagtaacaggttactttggaccttacaggatttcacttggagatttaattatcttaacaatgtgtgaagaacctatggcatcaaaggataaaatagctaaaattgaagaattcatacaagaaattaatccagatgctccaattatttcaacagtatttaggcctaaaccattagaggacatttctggtaaaaatgttttatttgcaactaccgcacctgaaggtgttaaagacaaactagttcagtatttagagaaaaattacaaatgcaaaatcattggtacaacatcccatttatctaataggccgcttttacgtgaagatatgaaaaaatatatggataatgccgatgtgatgctcagtgaacttaaagctgccgcagttgatgttgcaacaaaagatgcaataaatgctggtcttgatgtcgtttactgtgacaatattccaattccaattaatgatacatatccagatttatcaaaaacaatcattaatttagtaaatagcgcaattgacaattttgataatcaaatataa

SEQ ID NO: 7683 - DNA, 717 bp, Methanobrevibacter gottschalkii
  source 1..717: mol_type = genomic DNA
atggatatttctgaaattaatttagatgaaacgcatatcagattaacaactgatcttagttgtcatgatttaaaaagatacatattttctattagaagggatttaaaaaattatatttttaaaaatcaggaatttgcattgtcattagaaccgattaaatctgaagataatcttccattaattgtaaaaacaatgattgatgcatccaatattgctgatgttggtccaatggcttgtgttgcaggtgcaatatctcaattgtcgcttaattatttaattgaacaggattctaaatattccattgtggaaaatggtggagatattgcccttataaatgattcatcattattgtgcggaatttattccaataatcaagttctgggaaatgatattgcttttaaaattaaacctagaaaaaaacctttagggatttgcacttcatcaggaaaaattgggcactccataagttttggcaaatcagacagtgttactgttatttcaaaatcatctgccatctcagatggaattgcaacccgagttgctaatgaagttaatggtagtaatagtgaagaaaaagtttcaaagggtttggaatgcggggaggattatagtgaattttttgacggtctattaataatttcagaaaataatgtgggaactgttggcagattaccaaaaattattgagactaaagagtttgatgtaaaaattgtttaa

SEQ ID NO: 7684 - DNA, 288 bp, Methanobrevibacter gottschalkii
  source 1..288: mol_type = genomic DNA
atgtataaagatgaaatgatacaattacaccaatttttagtatatgttttaaaatatttagcagaagatgaccaaattacaaatgattgtagtgaatatatatccctaaaaataagccctcatcatattcataaaactaaagcagaacataaacatgctatttttgtcctttgtaaaattattgcgcaagttgttgcagataaagagaataattcaattccagacaatgttcgcaactcacttggagatttagtaactaggtctcaagttgaacttagtgcaaaataa

SEQ ID NO: 7685 - DNA, 771 bp, Methanobrevibacter gottschalkii
  source 1..771: mol_type = genomic DNA
ttgaaatcttttgaatttttatcaataaaaagggaaaaaaagcctagaacatccggtttaacaatggttttagataagggattaggtcttgaaactgcaagcagcttaatggatatttcaggtgaatacgtagactatttaaagtttggatggggaacatccattgttcatgaacaggacatcattaaatctaaagttgaaatgtataaatctcataatattactccctatactggaggaacactttttgaacttgcttatacaaaagataaacttgaagaattctttgatgaagcacataatttaggttttccagctattgaagtatcagatggatcaacagatatccctcatgaaaacaaattggaatgcattgaaaaagcaaaagaatcaggttttgaagtgttatctgaaattggtaaaaaaaatccaattttagataaggaattgtctattgacgagagaatttctaatatggctgatgaacttaatgcaggttcctcattaataattgtagaagctcgcgagggcggaaagaatattggaatatttgatagtaaaggaaatgctaaagaagatgaaattgatacaatcctaaacagcatcaaaggagaaaaaatcctttgggaagcaccaaataaaaatcagcaagtgtttttcattttaaaacttggaaatactgttaatttaggaaatatttctagtgatgaaatcacatctcttgaaacactaagaagaggtttaagaggagataccttcggaaaattataa

SEQ ID NO: 7686 - DNA, 1254 bp, Methanobrevibacter gottschalkii
  source 1..1254: mol_type = genomic DNA
ttgaagaataatagaacaattggtgaaattaacgaaaaaatcaccaatggcgaagcgaatatttacactgcagaagaatttaaaaaactcataaaaaatgatgaaacaccaagttttaatgaagttgatgtcgttacatgcggaacatgtggtgtaatgagtgggacagcagctattttaaattttgtagtatctgaaccgggtaaatttataagagcaaatgaagtttatttaaacggagttccagcatatgcaggcccgtgtccaaatgagtggttaggttctgttgatgtaattattcatggaactgcacattccattcataatgaaaattatggtggaggattcttatttaaagacatacttgaaggaaaagaaattgatgtaagggttgaaagtgcagatggcaaaacaatcaataatacaataactaaagaggatattataagagcgcaaattattggaactcgtatggcatttaaaaattacactgcttttacaaacccaaataaagaagatatttcatcaatatttgctgcaaaacctcttggaggaaacttgagtggattaaccttctcaggatgcggtgatttgaatccgcttcagaatgatgttcctcaaaacgttataaaagagggaactaaaattcttataaatggaacacaaggttatgtacttggtaatggaacaagatcaagtgctgaaaaaccaaatttaatgttgactgcagatttgatgcaaatggattcatattatattggcggttttaaaacaggccagggcggggaagtttatgatacagtagccattccaataccagtattaaatgaagaaatttataataatttactaataactgatgataaaattagcattactgtatccgatatcaaaggacgtcatctgccgctaactgaaaccaattatgctaaactttggggtgaatatagtttaagaccacaatacgacagggctaattgttataaatgtgattcatgcactgtggaagaggtctgtccaacaaatgcatttgcaaatgaaagattggatctcacacattgttttggatgtggaatgtgtgctaattattgtcgccatgatgcatttgatatgaatatgggaagtgtagatttaacaattgataatgaagatgtaaatattccaattatctgcagacaatctgataggttaaggggaaataaattatccttaaagttaaaaaaattgattcaaaatcaggaatttaaattatag

SEQ ID NO: 7687 - DNA, 609 bp, Methanobrevibacter gottschalkii
  source 1..609: mol_type = genomic DNA
atgcaaaaaattacggattcaccgattgattttgctgaagagattattgaagatgtaaaaaactctaaagaagaaggtgttttaaaatgtgttcaatgtggaatgtgtacttcaacatgtcctgcagcattacattctgattataatcctcgtgatattattgaaagagtattggatggtgatgtatcaattattgaagatgattgtatctggaattgtttttattgttatacatgtcatagtgtatgtcctgttggaaatagtgtatgtgaagtaaatcaaattttaaagcagtttgcaattaaaaacgaaattggacatgataaactttatgaatacatgggttttgcagattcttattttactgcagctattggagcaattcctgaaatatttttcaaagatattgatcgtgatgtgccgggatggtgggattttagattacatttagatgaaattagaaaagaattagatttaaatcctcctttaatgccgtcaaaagaagttattgatgaagtaagtaaaattttgaccattaccggttttaaagataaaattgaaacaataaggtcaacacaggaggataaaaatgaaagtaattccagatag

SEQ ID NO: 7688 - DNA, 942 bp, Methanobrevibacter gottschalkii
  source 1..942: mol_type = genomic DNA
atgaaagtaattccagatagtgatattcttttatttagaagctgtcttgttagtgttgaatatccaggtattgaatcatcaacaaagtttgtttttgataaattgggaattgattatgcaatttcagaaaatcaaacctgttgtactgggcttggtcattattctgatgtgtttgatcagattgatacaacagctattggagcacgtaattttaaaatagcaggtaatttaggtcgtaaaaatttagttatgatgtgtgcaacatgttatgcaattaataaaaaatcagtaaaattactcaacaaaaaagatgatttgagaaatcatattaacaagctatttgatgataatgacttgtctcacttaaaatatgaaaaagatgatttaaatccaacagaaaatatttttcatgttgtggatattttgtatggtaaaaaagatgaaattaaagataatattaaatatgatttaagtgattatgcaatagcaacacaccatggatgtcattactgtaaagtacactatgaggatactattggtggtgtgagggatcctaatattcttgatgaattgattgaagcatgtggttgtaatactattggttggtatgattacaaacgtgcaacatgtgggactggatttaggcagaggtattctaatcctgatttgtcatttacagcaactgctgacaaaatgaattcaatagatgatgaaaatgttgatattttagttcatctatgtccgaattgccatattcaatttgataggtatcaacatttaatcggagaacgtgaaggcagaaaattcagagcaatacatctaaatatagctcagtttattgcattggctatgggaggagattttgataaggtaataggtgttaaagctcacacagtaccgatagattcagtaattaaagagttaaaggaggtcaacaaatga

SEQ ID NO: 7689 - DNA, 2310 bp, Methanobrevibacter gottschalkii
  source 1..2310: mol_type = genomic DNA
atgagggataatttgaaaattggtgtgtttttatgtgaatgtgggggaaatattgcagatactattgatttagatgaagtaagggatgcattggatgtagaattcatcggacagtttgaaaatttatgttcacttaatggacgtaaaataattcgtgatgcaatttttgaccatgatcttgatcgtgttgtagttgcagcatgttcgccgataagccatgaaaaaacttttcaggattatatcaaaccattaaatccctatttgatggatatggcaaatataagagaacagtgttcttgggtacattcggataatgaaaaagcaactcacaaagctattactttaataaatgcttctattgagaaagttaaacaatctgatgcagtagatccgatttattgccaaactcctgatgaagttgctgttatcggtggtggaatagctggaatgaatgcaacgttatctcttgccaagcagggaacaaaagttaccttaattgaacaatccccttcgattggagggcatatggctaaaattggtaaggtattttcacctgttaaaattgcagaagaatgtggtatgtgtcttttaaatccgattttaaatgaacttgtttggaatgaaaatattgaagttttgacaaatactaaggttattgaagctgaaagacgtgctggaacttataatctaatactggagagatctccaagatatgttgatactgaaaaatgtattgcttgtggtaattgtgcggaagtgtgtgaagttgaagttccaaatgattggaatgataatttatctttaagaaaagcaatttacaggccttttggacaatcctatcctgaagcttatgtaattgacatggaaaactgttctaaatgtggagattgttttagagagtgcactatgaaagctattagacttaaaggaaaacctgaaaggattccgcttcaagtaggttctgttattgtagcaacaggccataagttatttgacatggaaaaaagaccggaatatggatacacccgttatgatgatgtaataacacaatctgaattaggtcgtattactggtgttaacggaccaaccaaaggtaaactcttaaaatctaatggtgaagttccaaaacgtgttgttatgattcaatgtgttggttcaagagatgaaaaaccagaaggacatagatattgttctaaaatctgctgtacaatagcactaaaaaatgccaatatcattaagcataaatatccggatactgatgttttaatttgttatactgatgttagaactcctggaatgtttgaaaaatattataagcacactcaggaaaatgaagttaggtttattagaggacgtcctggtgaagtagttaaaaaaggagataacttcattgtaagaacagaagatacaattaaaggtgaatttgtagaaattgaagctgatatggtagttttatcaactgcaatggaaccatctgagggcacaatagaaattgctgaaattttaaatgttggtactactgaggatggatttattaaagaatcacaccctaaaatcaaaccggtagcgactgatgttcaaggaatatttgtatgtggaaccgcacaagatccgaaagatatcactgattcaattatgcaggcaactgcagcagcatcaaaagtaaatgaatacaattatggtggagtggaaattgaaccgttcattgcagaaattgacactgaaaaatgtatagtctgtggtgactgtatagagagatgtaaatataagtctatgagcatacaaaatgatgagatttatatcgatccgatgagttgcactggttgcggaaagtgccttgttggatgtaatcaaagagcaattacagttaatggtaacattgatgagaaaatcatgtccacaataaaaggagtattgtctaaaaaacaagagggtcaacgtacaatattggtatttttagataacattggttatactgctgctgataatattggtgtaaatagattgtcttaccctgaatctatccatattattaaagtgatttcagtaaatcgtgtaaggccaagacatattcaatatgctcttgaaaatggtgctgatggtgtatttattggcgaattccctggagatttaatgtatgatgaagtggaacgtaaaatccaaagggtaaaagatagaatttatgaaatgggtgaaaatccggaaagagtaacattttcgaaggtatatattccatacttctcaggattagctcgcaaattcgttgatttcgataaaaaaattgaagaattagatgaagctgaattatga

SEQ ID NO: 7690 - DNA, 570 bp, Methanobrevibacter gottschalkii
  source 1..570: mol_type = genomic DNA
gtgtattacttgaaattaagtattggtgataatatggcaagaagagaagctattgaaaacataattaactgtattgacgatgaattagtcgtttgcaatattggatttccatcaagagaattatatgatatcaaagataggaaagaaaacttttatatgattggatcaatgggacttgcatcttcaattggacttggtcttgcattagcacagcctaacaggaacattgttgtaattgatggggatggagcacttttaatgaatatgggatcacttgtaaccatatttgcaaataatccgaaaaacttaacttggattgtaatagataatggtgcatacggatcaactggtaatcaagatacttatgctcaaaaacttgatttagtggatgttgcaagaggagttggatttaaaaatagttatgattttgaagatattaatctaaaggaatttataaaaagtgatgatgcaagttttattgtatatcacacagaacccggaaactcaaaagctccaattattgatttaagtccagtagaaattaaaaatagattcatggatattgtttaa

SEQ ID NO: 7691 - DNA, 492 bp, Methanobrevibacter gottschalkii
  source 1..492: mol_type = genomic DNA
atggatagtagtgaagctatatttgatggacttaaagatgcaggaattaactttattgttagtgttccatgtgttaacttatcaaaattattaaatatgattgataaagatccggatattattcatattccagttactcgtgaagaagaaggaataggaatatgtgccggagcatatctcggaggtaaaaaagcagcaattttaatgcagaattcagggcttggaaattcaattaatgcattaaaatccctaacagaactatatgaatttcctttacttatggtaatgagccatagaggtactgaaggagaaaatatttgtggacaggtcccaatgggtgagtcaacaccattaatattggaagcaatgaattataaattcttcaagccaggaactcctgaaggagcatatgaagatgtaaaagaagcttgggaattatcagttgaagaaggaaaacctgtaagtgtattacttgaaattaagtattggtga

SEQ ID NO: 7692 - DNA, 1119 bp, Methanobrevibacter gottschalkii
  source 1..1119: mol_type = genomic DNA
atgtttgatagactaccaatttcttctaaaacagagaagattttaactaaatctttagatgaacaaataactgttggggaagcaaattacttaatgaatattaaaggtgctgatttatacccattacttgcaactgctgactatttaaggcaaaaaatcgttggagataatgtaacattcattaataattgtaatattaactttacaaacatttgtacagttagatgtggattttgtgcatttggaaaagatgcagataatcctgatgcgtatattctggatgatgaagcaatccttaaaaaagctcaaagcgctattaaaaaaggcgcccatgaattctgtgtaatgggaggggtacttcctgatgctgatattgaatattatgaacatttaatgcacttattaaaagacgaatatccgaatgtaatgattcatggattttcaccaactatgattgctgatgcatgtaaagtatccggaatcagtattgctgaaggttgtgaaagattaaaggatgctggtcttgatacattaccaggaactgccgctgaaattttaacagatcgttcaagagcattgatatgtcctgaaaaagtaagtgttgatgagtggataaatattattaaaacagcccatgaagttggaattccaggttctgcaactattatgtatgggcatgttgaaactttagaagaaagagtggaacatattgatattattagaaggatacaagaagaaacccatggatttacggaatttattccaatgactttcatgcatgaatattctccaatctttttagaaggtcagtcaaaccttggagctagtggaacacaggatttaaagttatatgctgtttcaagattaatgcttagggatttaattccgaatattcaagtatcttgggtgaaaatgggttatagatttgctcaagtagctttaactgcaggaactaatgatttaggtggtactttaggtggagatgaattatctgaagcttctggcgcaccagatggagttgaagcatctattgatacattaagtaggatggttaaagatttaggtagaaatccaattgaaagaaactctaaatatagcgagttttatccaattgaataa

SEQ ID NO: 7693 - DNA, 585 bp, Methanobrevibacter gottschalkii
  source 1..585: mol_type = genomic DNA
atgaagaagtttattgtcattgacggattagatggatctggtaaagatacgcaagtgaaattaatagccgaaatgtatgaaaaacaaggacgtaatgttgttattaggtcacatccatgttttgacaataggtatggtagaaaatcaaaagaagcactattaaaaacaggtaaaattaatcatttgcttgcaactgtttattttgggcttgatgcaatcagatctgttgttaaatacacacatgatgataatgttgatgtattaatattctccagatacattttagcagtgatgtatcttccaaacggaataaatactattgtttataaaattgtggcatttattcttccaacatcagattgtatgttctttttagatgtaagtccagaagaatctcttagaagaattggttctcgaaatgaaaacactgaaatgtttgagaatattgaatgtctgagaaaaaaccgtctaaaatcacaaaaatttacatataactggaatgtaattccaggcgatgattcggctgaggtaatttctgaaaaaataaaaatgaaatgcattgaaacagacaagttacttaattaa

SEQ ID NO: 7694 - DNA, 258 bp, Methanobrevibacter gottschalkii
  source 1..258: mol_type = genomic DNA
atggataaggttttaagagatatattaagaaataatcagtattttgaagaaataaatcctgacagatatgttcctgaatttttaggattaattgtgaatggtgttgttgtatatcacgttaactggattgacataattgaaaatgagatagtattcatgcataaagatattcaaactcatccaattgtttcacttgttctagaaaatcttaattcattaatgattataacaaatgaaggaataaaggaagtattataa

SEQ ID NO: 7695 - DNA, 978 bp, Methanobrevibacter gottschalkii
  source 1..978: mol_type = genomic DNA
atgttttctaaagctacacttaaagaaagaagacaatattatcgtgaagaatggtcagtaaaagacttgccagaattcattgctactgatttaaaaaaaagggaattcggttttgaccataatgggagaggacctaatgatagatacaaagtatttagaggacccgaatctttaggaaaatttttaaaattcaaatccccatttgcagcatatatttcagtagcattttataataatcctagaagaagggaggactggttgaaagcagaatatatttttgatgtagatgcaaaagacattccaattaggacttgccaatgcaatggagtttgtgaggtttgtcttggtgaagctttagaaattgttaactcattaattgacacattacagtcagatttaggattaaaaaatattcatttaatttattcaggaagaggatatcatattagaattttagatgaagaaatgatgagtgctaatagcgaactcagatctgaagttttaaaatatgctgcaggagcagaagttccgaaatctcaatttattaatcctgaaatttcaaataaaagttttaactttgagcattttacaatccctgttggatactctaaaatattcactgataaagtgaaatttaatattcagcatttagttggaaatgagaaaattgatggcattaatccaaaattgatgaaagatatcctgtcatcaagacatcacttagataatgataattggggttattttaaaagagatattggccctagaagatataaaaatcttgttgctgctatggctcgtgttaatctatcaactattgatgcaaaagtttcaattgatttaaaaagaattttaagactcccatcatcacttcactcaaaagtaagtatgaaatgtatggaagttaaaaacagagaaaattttgatcctctagacaaggcagtccctaaatttgtttatgaaagaaaaggtgtataa

SEQ ID NO: 7696 - DNA, 516 bp, Methanobrevibacter gottschalkii
  source 1..516: mol_type = genomic DNA
atggaagaagtagttaaagtaattgggattgaacatttaaaagttatattatctagccttacacctgaagatattgtaaaacccgcttatgaaaattggcaaacaggtatgaaaacaggttatactagactaaacttagaaactggtgagatttatgggataggggttgaattaaataatcttccacttccaaataatattttcattgatttgtttaaaatagattcatatgatgatccaattgatgaagaggaatttttctcttcttcggaatataatgaattcttagagtttagcagcagtgaacctagtgaatatattccggatattatcacagagttttgtgagctaaaaggtattgatgagatgaaacgtaaaataggccttttagcatataattttgaaaaaaatgaaagatctaattataatatgtgggaatcatccattttaaataagtattatgatgcaatttatgaagaccataatccattcatgttttcacaaaacagtttgtag

SEQ ID NO: 7697 - DNA, 1326 bp, Methanobrevibacter gottschalkii
  source 1..1326: mol_type = genomic DNA
atgactgaagtttcttatattaacccattatcaaacgaaggaagaggaatcattcgaaattatggtgatttaaatcagatttttaaagaggatgattccttaattgaaatttgtactcatactgcaaatcagaaactttcagatgattatattccaaaatcataccatgatctggctcttaagcgtatccaatgggcaatagaaaaaaagaataacaaaaacttcactcaagcggaattcgaatttttaacaaatgatgagttatacttacaagatgtagtaactttccatatattatgtcaggcaattgctgttcagtttaacacaggttcacgtgaaacaagattatttgtccaatcacaaggaacactcatcctagaacgtctcgctaaaataccaccaatgtcaagagctgaaattattgatgatgtacttgatgaagttaaaattgatggcagcattaaatggaaatcacttaaagatattgttgcaagcaaaaggctaaaattaactgatttattaatagatcgtggagatattgttcttcagcaagacgattttttaaatagatttgccgatagattccatgacagaagtccggatagaatgtatagcatattgattggagatagtgttaaagaacaaatattatcaagattagtcatgcaaaaaaccgaagaatacattaaaagaattaaagagatgtcttctagaattgaaattcatcctgcaattattaaaattggagaggagttaaaagaattcattcccgatgaaactggaaaatataatcaatattatgcaggcaatggaggaatctatggtagtgttcaagctggaaaattaaatccagatgcttttccaccttgtattcaagaaacagttaatggagtatcttcaggtggtcgtaatgatgctattgtattattattaacatcatttgcatcctatgctagattgtatccaagaatttttgcatcagaggaaaatgttaaagtttcagatatggatcctgatttaacaattacagaaaatgagattttacctttaatttttgatgcagcagataactgtacaccaccattattcgaagatcaaccacaagaaaaaataaatattatatcaaaattaggttttggaatgcatgatagactagacattaatcatgaaggggaaactaaatggtacactccaatgagttgcgagaaaataaaaatacatctgcctaatctatgtcatccagacaagtcctgtaaaggtattaataaccctttgtcatgttatggacgtaaaaaattccagcttgataatgcacagaaagaataa

SEQ ID NO: 7698 - DNA, 804 bp, Methanobrevibacter gottschalkii
  source 1..804: mol_type = genomic DNA
atgtttaatgagcatgttataaaaattaaggaggtttttagaataccaaaagttttgattagtggaaggggaggttgtggaaaaagcactatcgtttcacttcttgctcgaaaactaaagaataatggaaatagaattttagttgtcgattgtgatgagtctaattttggcttaaataaaattttaggtatagaaaaaccaaaaaaaacattaatgaataatcttggaggtaaattagctgtcagggataaattgcttgaaattgttcagaaagatgaaaatcatcttaatatttttgatgtaatgtcattagatgatttatctaacgattatgttacttgggatgataatttaggatttcttgagattggtaaaattgaacattcaatggaaggttgtgcatgtccaatgggggctttatcacgagattttttaaatcatctcacaatcaatgaaaatgaatggattttagttgatactgaagccggaattgaacattttggaaggggtgttttggaaggagcagattttataattgctattgttgatccttctgaagatgcaatattgctggcaaataaagcatataaattatctttcgaaaataataaaaatttcggtgttattctaaacaaaattgatgataatctagaagaaatattaaaaagtaaattagattccaatattgctattttaggaatcattaattattcttcagatatagctatgttaaatcttcaaggaaattcagtagaatctgtttctatcggtgtattggatgacattataacatgcattaattaa

SEQ ID NO: 7699 - DNA, 630 bp, Methanobrevibacter gottschalkii
  source 1..630: mol_type = genomic DNA
atgaaattaaaaaattttaaaagagaaaacatgattcctcttcctgtgactttaatatctacagcaaataaagaaggaattagaaatattgctccttattcatgtgtagtgactatattgagaccaacaaatcttgtttgcatagcttctgcaatgatgagggatacatatgtaaatattgaagaaaccggtgaatttgttattaacatgatatctgcagatatggtggatgcagttataccaacttcatctcatgtgtcttttgaggtggatgagtatgaactggcaggtttggaagctactgaatcaaaaaaagtaagtgcaccaggtattaaaggagcttattcgcaaatggagtgtaaactaacaaaaatttataaagacaaagatccaattggaattccatatttgctaataataggggaagtagttcatcttgaagttgatgacgattgcttggatgaggaatatggtgttttggatttaaataaagtgaaaccgttaatgatgctggaatctgataaaggaatgcatttctgtacaattgaagatcttaataaattcgaaacttttggagcgatgttttcagatggaaaagatcctttggaatggatgtatgaaggagattaa

SEQ ID NO: 7700 - DNA, 546 bp, Methanobrevibacter gottschalkii
  source 1..546: mol_type = genomic DNA
atgaaaattgaaagtataactgattttgaaaatttagatagtcctcgtgttcaaagaatacccggattttatggtgaaaaacttatagatggtgttgttattagaaaacttccaatgtttagtgatgaaagaggatttttatgtgaatttatcagattaaatgatgaagaactaaaagctagcaatataaaacaaatgattgcttcatattcttatccaggcatgataaaaggatggcaccttcattctaaacaagaagaccatttattttgtgtaaaaggaatggttaaagttgttctttacgactttaggaaagattctcaaacttatggtatgataaatgaaattttcatgggagataaatctcctataattgtatatattccaccggggatatttcatggaacaaaaaatattggaattgatatgtcgatagttattggtatgccttctttgttttatgatattgatgatgtagatgaaagaagagttaatccaatcgataatgatattatcccctatgagtgggattgtaaaatggaataa

SEQ ID NO: 7701 - DNA, 2727 bp, Methanobrevibacter gottschalkii
  source 1..2727: mol_type = genomic DNA
atgaataaaaaactgttgattataagtgttttagtaatatttatattcattaatgcggtatcagctgaaaattcgacagatattaatttagaactcaatcataacaatgatgaatgcattaaggaaatatctgatgaaagttcaacagatattgatttaaaaatcaattacgaatatggggatgaaatcaatccggaaatttccatatctcattgcaataataatatgaactatacaaaaaatataattcattcaaacaattacagaattaccatgaataaattgaatgacggagcagaatgttctgtttcagtttcagctctagggtacataactcagattcaaaatataaccataaattcccaatcaaacaaaactactatttttaatctaaaagctacggatatttacaaaatgggatatgatatgacaaaatctgcagatagattacttaatttttcatctgctgatgatgttctggttattaccactgctggaatgacaaggattaatgatattactacagaaaatgcattggatggaatttataatgctgctgatggccatataacttatggaaaaggtaatcttttaacattacatgccataagaacagatccaactaattttgcattttttattaaaaaaggaaacaggttgacaatggcattctatcaaaatgcttctacaactccagtatatactggaattggaggtgttggattaactacaaatcaatggaaaaaattaaaaggattaataggtgctgatgatgcttatacttatgtaagtattgctaatgcatggaatgctgggttatattcagatattctgactttagcttcgtatcatggacatgtatgtactggtttaattagtggtcaggctatggttactactttaattaaatattatccgccacgtggtgaaactggcgcccagcctcttgaaaatactgcttattatgtgttgggagttccgggtggttctgatgacgatgcatttacatggacacttgatattactcagggcaaaatgtcatacattgggtttgacactatggaaaataaaaatatgaatggtttcattagatggaattcctcatcaaatactggacttttaattataatgtcttatgatgaagcaaaaataaaaaatacatttaaaagtttatatccaaatattaatccagacaatagtgttactgaagatttaatatatcaaaattggttgatttcaactttgatgagtaatcctgaatcattagtcacaattgaagcagcttataaagatcttacattggaacaaaaaaatcagttaataggaaatcaattatggagtgcgtcgaatattactgctcggggattggatttggattacattaacagtttaaatttgccagatgctgaaatggaaactggaatctttaataatgtacatttatctgattcacagttaaaacaaattggtgttgatgcttctttaaaagctgtagattactttaaaaatatcaatgttactatagaaaaagacatgtctaacttttatgttttgactggtgcgggatttgtacgtattaatgatactgcaacatctatggtatttgatggtattgaagatatttttggtgctagattaagtagaggtaatctattaccagttcatactgcattgtggaaagatttgataattgaattttattggttgaatacttctgatatttataattcagttacttatagtctaaaatataattcaacaactggtcaattatatgaatgttcacagcaatataatattcaggatcgtagtttaaggtatgaccctccttatgatgctttaatgggctggttattccataatcatgtttgtactggtagttctcccggcgtattgttggcggataaaatatttgatgatttgcctttaggtgaaaatgaaagttatgttttggtttcaacttatacttattgtaaggatgatatgttatccagattgcttggcgtgtctccgggtatgggtaattattataacctggcttattccaatagtgatgtaaatgcaggagcattatggactgctgattctgatataattatcagatggaattcagagactaataccggaactgctacaattattaagtttggttatccgatctttaaagatggtgctgatgaatatgcggaatggatgagatttgtaaaaggcgattattcttctgaaaatattgtctctttaccaactttaagttttgaagttactaaaccaattaccagagatgattataataagattatttccggcaaatccgatgatgaaggaattaatgtattaagttatattagagctctgccagataaaattcctgctgttctaattgataacaatggaatttctaatggaaatgatggtaattccattaataaatatccaaaaaaatctaataacaatagtgcaaacaccaatagtattttttcatcttcaaataattataattccccgagcaagggattaaatcctaatgttggggtttcttcctattctctttcaggcgatagtgatgttgaagataaaggtgaagcaagtagtaatggaaaatcctatgaagtatccaagactcctgcaactaaatccattgattctaatagtttaatttacgcattagttggtgttttggctattggtattttaatcggtttaggttttatgaaacgtagaaaataa

SEQ ID NO: 7702 - DNA, 1989 bp, Methanobrevibacter gottschalkii
  source 1..1989: mol_type = genomic DNA
atgtcaaaaatatttatttcatgtgcacttccttatgcaaatgggccatgtcatttaggtcacatccgttcgacatatctgcctgcagatatctatgcaagatataatcgtatggctggaaatgatgtgctgatggtttgcgctactgatgaacatggaacacctattgctgttaaagcagataaggaaaataaaaaaccaattgaaatttctaaaagatatcatgatatgattgttcgtgatgttgaatcaatgaacatatctttggataatttttcaagaactactgatgaaaaacattatgaaattgctcaaaatttctttaaagaattatatgaaaaaggattaatttacagacaggatttagagcagctgtactgtccaaattgtaaaaaattcctcccggacagatatgttgaagggttatgccctgtttgtggagcagaagctcgtggagatcattgtgaaaaatgcggtagggctctagatccaacagaacttgatgaaccgcattgcattacctgtggaactactcctgttattaaagatacttatcaatatgcattcaaattgtccgaatttgaagatgaacttaaagaatatattgataataatgaaaaccttccttctaatgttaagaactatgcatcaaactggttaaaagaaggattgaaagattggattttaacaagagatatggattggggtattccagtaccgttggatgaagcaaaaggcaaagtgttatatgtatggattgaagcattcttgggttatatttcttctgcatcacaatggtcagctcagtctggcaaaaaatgggaagaatactggaatgactttgtagttcatttcattggaaaagatattatttatcatcattcaattttctggccaggattattgaaggctgcaggatgtaaattacctgatatgatttatgcaggcgaatttttatctcttgaaggagaaaaaatgtctacaagtaaaaattgggttatttggattgatgattttgtaaaagaatatgatcctgatattcttaggtactttttaacaattaatgctccattaaataaagattcagacttttcatgggatgacttccaaaaaagaaacaatgatgaacttgctgatgtgattggaaacttcttacatagaacattcacattcacacgtaaattctttgataataaaattccggaatatgcaaatccatctcgggaagatgaggaattcagaaaatctattgaaagcttaccgaaagttgctggtgaatttatagctaactttgaatttagggaaggtttacttgaaatatttaaagtagctaagaaaggaaataaatatttcaatgatcaggaaccctggaaagctgtaaaagaagacatgcaaaaagcagctaactgtttatacttatctaaccagttagctaaaacattagcttacaccttaaaaccttatctgccaactaaagctgatgcaatagctaaaatattaaatattgatgagttatctaactgggcagatgcagcagtattcctcccgtcaggatatgaaatcaataaagcaaaacctctatttaaaaagattgaagatgaagaaatagaagctcaaaaagaaaaattacaaaaaaacttaaaaaacaatgaggatgagaatatgagtgacttaattactattgatcaatttgatgaagttataattaaaattggacagatcaaagaagcagaaaaaattgaaaaatctgacaaattattaaaattacaagttgaaatcggtgaagacaaacccagacaaattgttgcaggtcttgcaaaattctattctccagaagaattaatcagcagaaaagtatgtgttgttgcaaacttacagtctgcaaaattattcggaacattatctgaaggtatgattcttgctactggagaatctggtgcattattaactccagatgtaaaagcggaagttggggaaagaattcaataa

SEQ ID NO: 7703 - DNA, 1578 bp, Methanobrevibacter gottschalkii
  source 1..1578: mol_type = genomic DNA
atgcctgaatctgtcctagtaaacaaagccgaaaactacttaaaagcaatagcaaatgatgctattagtcttgataatatcgaagatttcgagtatttcaaagacctgtactttaaactagatgacagattaaactttttacaagaattaaaagaggatatggatgcacaaggttacactacaccttttacatccctaaataaatatggatcaaaagcagtagctgatattgatgttgaagaaatgggtgaaaacagccgacacaacaaaatatttagaatgaaagccaatgctaagaaaaacattctggatagagttaaatcagctattgattcacataaaattgcaattggtaacttggaacaatttggatatgtgaaatgtgattcatgctataaaaaatattctatgagcgaatataagcaaatagaaggtaaatgcagttgtggatgcactattttttcatttaaaatccgaaaagatgcaacccatagaatagaaataattccctacttgccattgtctggcaattatatggttttgcgaaaccagcttaatacatttggtcgtgaatctcttaaacaagttttaaacatacttaaacaggaacgtagaggtgttgttaaaacaatagctctcgttatacgttttagagataaaaacaatcgtttagttagaaaaaacatcactttagattctgaatatattaataactatgaagaagaagtgagaagaatatatggtaaacgtgtaagaattgaagcattaagatttcatagaacaaaacctgccattatcgatgataaacatgccagaactgccctggctattggttatgtcagatatagcgagcaaataatcgatgatattaaggatgaaatattaaaaagaaaactatctgattttaaaagaattaatacttatgatgaaatctttgctgaatatgaaaataaaactcccaacttcattgacaaatatgatttggaagcaattgataaatggagaaaatctcagattaaagagaatttcaaacatttgggtttttatgataaatatgggaatataaataggtctcttagccgtgatttaaagaaaagggaaaatatttataaaaacattcttagaaacatagcatctgcattgattatttgggatatcttcaggtattatattacaacatcaaataattcacgtaaaattgacatcagcccatttccctatatcagagtggaacttgaccgtgaacaaagaaaagtattccaaacaacccacaaaaaagtaatcgaaactttaaatacctatacgaatattaaaattattcctgtttgtgaaatggatttgttgttgcatgataaatttaaatttgaaaagcaaatcaaaaattccaatattaaattcaatcatgttgcattgggggctgctttaattcatgagaattcagacattgaacttgaagacattagtaatgcgttaaatattaatgaatctaaaattaaaaaagaaattaaaaatattgaaaatattaaaaatccaaaaagtgacaagtcaaagaaattcttagatttaattaaaaaatag

SEQ ID NO: 7704 - DNA, 465 bp, Methanobrevibacter gottschalkii
  source 1..465: mol_type = genomic DNA
atggatgaagatgtaaaaacagttcatataacaaaagccttaagttctgcagttattgtgaatctgattgaaaattatcccaatcttgaagtaattacttgttctcctagtgtgtatgatagaacttcaagcaaatatattgacgcactttcccagcttgatattgaagttaaaaaaaaatataattggggagctaaaagccaaactaatggtgctgagtttgaagttttagaattatcagataacggtttaaaaccaaaagaaatagctcaaaaattagatttaaaacttaatcgcgtatattatcttttaaaaaaaagtaatgcaaaatatgacaatagaaaaaggaaacatgatcatgaagagattaaagaacttaaaaatgagggattatctgcaaaagaaatttcccaaaaattaaatattccattaaggagtgtttattatattctaaataaaaaataa

SEQ ID NO: 7705 - DNA, 1014 bp, Methanobrevibacter gottschalkii
  source 1..1014: mol_type = genomic DNA
atgatgattttaccacaaattcctttgtatggaatagccataatctgtggattactatctttttttgtaagcagattaactatgccgaggattataagaaaacttgaagcggctgatattgttgggaaagatattcataaatcctggaaacccgttgttgctgagatgggtggattcggtattctttttggatttattataggaatattttccggaatatatatgcatgacattcttacatttaatttagttgttgttcttgtagtaatattgcttgttggaataattggtattgtggatgatttacttgccttatcttcaaaggaaaagttctttttacttttccttgcaggtcttcctttaatctgggtggcacctcccaatgtaggattattatatctgattacaattcctattgcattatctgtcggatctaatctaacaaacatgcttgcaggtttaaatggaattgaatccggtctgggcattatttcaatggcatcacttacaatagcctgtattattttaggcaaatatgatgtaacaattatttccatgagtatgcttggtgcattaattgcatttttatattataacagatatcccgctaaaattttccctggagacaccggtacattaattatcggtgctgcaattgtttgcattgcattcattggccgtgtgaaattaattgcatttattgtattaatgcccaatattattgatgcagctttaaaattctattctgcaggttttatgaatcgtcagcagcaaaaaccaacacaattaaacgatgaaggtaaattggtaaggcctgatgttggttttaaatcattgatcagattaattttaagaaaaccgattgcagaaaaagatgccgttagattaatctgggctattggctttgtatttggcatattgggtattgctgtggctctaacaatgccgggggtacttgaaagcaaaacattaatgaacttcttacaaatcaaggaaatgttgtatcatatttag

SEQ ID NO: 7706 - DNA, 669 bp, Methanobrevibacter gottschalkii
  source 1..669: mol_type = genomic DNA
atgatgccctatgtaattttaagtgcagctatgacattggatggtaaaatcgcaacaaaaaccggaagctcaaatatttcaggaaaaaaagatcttttaagagttcatgagcttagaaaagaatgtgatgcgattatggttggaatcggaactgtaattgctgatgatccgagattgactgttcacaaagttgatgcaaaaccggatgataatcctgtacgtgtggttgttgatagtaaatttagaacccctgctgatgctagaattacaaattctgatgctgaaacaattattgcctgtgcaagagaatataaagatgaattgattgcatctgataaatacgaaacatttaaaaaaagaggagttaaatttttctactccggaagtaaaagagtggatttaaagtcattgatgagttaccttcatgaagaggggattgataagctaatgcttgaaggcggttctactttaaacttttccatgataaaagcaggccttattgatgagataagaatttgtgttgccccaatgatagttggtggctgtgattctaaaacattttttgatggtgaaggttttgatctgatgggtgaagcagttaagcttgagttaactgactcatatcaattagataaggatctgattctaacttataaagttttaaaataa

SEQ ID NO: 7707 - DNA, 465 bp, Methanobrevibacter gottschalkii
  source 1..465: mol_type = genomic DNA
atgaaggcatctgaacttttagaggctataaaggaaaatattaggtattatcccattgaatatttgaaaaataaagtagccgatgataggtacaaagatcctttaactaaaaagcttgctgaatataactcaaatgcatatgatgatatatatgagacagtcataatagatgattttgatataaatgataaggtagttaaaaaaataagggaagacattgcattttattttgataagtatggcggaggtgaagatgaacataagatatttgctgagaacatttcactctacctggcactaatagctaaaaagccacttcatccctatggtgaaaataaaaaagatgaagtctactattcaaatggctcttactactgcagaggccgcataaaatatattcatgatgaaaaatcattgtgcagatactgtgtctgcaaaaatgtcggattcatggatttattttaa

SEQ ID NO: 7708 - DNA, 666 bp, Methanobrevibacter gottschalkii
  source 1..666: mol_type = genomic DNA
ttgaacaaaagaatcgatttacatatgcacagcttatttagtgatggggaattattaccttccgaacttgcaagaagagctttgaaattaaaccatgaagcaatagctattactgaccatgttgactggtcaaatgttgaagcaataccaacaatccaggatgcaattgacgacattaatgctaactgggacataactgttgtacttggagctgaagtaacacatgcaccagtagaatccattgacggaatagctgaaagggcaaaagagttaggagccgaaattgttgttgtccatggcgaaacattaaatgaacctgtaactcccggaacaaaccgtgccgctgttgaatcaaaacatgttgatattttaggacatcccggattaatcactaaaaaggaagcggaaattgcccttaaaaatgatatttatcttgaaatttcagctcgtaaaggacactgcctcggaaatggtcatgtagcaaacattgcctgtgaagttggaaataaactgcttgttgataccgatacccatgcacctgatgacatcattacctttgaaaaatcatatgaaattgcattaggtgcaggtttaaaccatgacgatgcaatgaaagccattgttgacaatccccgcagattacttaaaagtaaaggaatattatga

SEQ ID NO: 7709 - DNA, 1224 bp, Methanobrevibacter gottschalkii
  source 1..1224: mol_type = genomic DNA
atgaaagcaaaagcatttaaaatagctgacggtgtttactgggttggtgtaatccattggaatagtagaactttccatggttatggaattcccggtaccacttacaatgcatatttggtatttggtgaggaaaaaaatgtattgattgataatgtttacaggggattattcgatcagtttgatgcaagagtaaaagacgcattcgaacaagaaggaaaagaattcaaaatcgatgtattcgttcaaaatcattcagaaatggatcattcaacatttttaagagatacaatcgctaaatataatccagatgcggaaatttatgcatcacaaaattgtattaacttcttggaagctcaatatcataacttctctgatttagaactcaatgctgtaaatactggtgacgagttagatattggtggtagaactctaaaattcatatctgcaccaatgcttcactggcctgacagtatgtttacttttttagctgaagatggaatattattctcaaatgatgcattcggccagcatttatgtcattcaaaaagatttgacagggattatccgttggaatatgttttaggggaagcacaaaaatactatgctaatcttgtaactttaggctctccaatgttcagaatgaaattgcaagagttaactgacaatggtattttagatgaaattaaaatgattgctccatgccatggtcagatctggactaatccggcaccgattgtggaaaaatactctgaatgggcatccggtgtatgtaaagataagattactgttatatatgataccatgcatcactcaactgagaaattagcattccaaattgctgaaggtattatgagtgaaggtgtcgaagtcaaaatgtactttatgcaagaagatggtcctgatgatgtaattacagacattttagactctaaagctattgcaatcggcgctcctacaatgatgaacaaaccattcccgagaatcggaaacatgatgtactggttagattgtgttaacttcaaaggaactggtagtgaaaaaaatgcattgatcttctcatctaaaggatggggtggaggagctgtagataaacttcaaaaagatttggaaagtgcaggatttaatgtaactgacacaatggatattttatttgtacctgatgaagatatgcttgctgaagcattcgaaaaaggtgcagaacttgctcgctctattaaagaataa

SEQ ID NO: 7710 - DNA, 507 bp, Methanobrevibacter gottschalkii
  source 1..507: mol_type = genomic DNA
atgtccgatttaattatttatttttcaagagatggtgaaaattacttcagtggagaaattaaaagcattgaaaaaggaaacaccgaagtaattgccgagtatattcaagagtttactggtgctgatatatttaaagtaattccaaaaaaggattatcctagcgattacatgaaatgcattgacattgctaaaaaggaattgaaagcaaatgcaagacctgaaattaaagaagaattgagtgacatttcagattatgatattatatacattggatttccgaactggtggggaacgcttccaatgcctatgtggacccagttagaaaagctagattttacaggaaaagtcataaaaccatttgttacccatgaaggatcaagattcggtaaaagcggtaaggatttgaagagactatgcaaagatgccataatcaaaaaaggtttatcaataagcggcagtgatgtttatgatttagcagatattgtaaaaatctggctagaggaataa

SEQ ID NO: 7711 - DNA, 4047 bp, Methanobrevibacter gottschalkii
  source 1..4047: mol_type = genomic DNA
atgaagattaaaagtatatataaaatattgatattttcaatagttttacttatttcattgtctgcagttgcagccgaagagagtatggataataccacatcaaatgatgatgttctaacttcagattcacatgatgatgttttaactctgaattcaaatgatgatattttgacttctagtgaaaaaacatggtatgttggaaaaaatacgactgttggaggtagcggaacacaagaagacccatttaataatattgaattggctttaaatcattcatcaagtaatgatacaatatatattaatccgggtgtttatgatggtccgcataatactaatttaaaaattgatattgataatctaactattaaagcaaaaccaaattccgtattattaaatgcaaatattaataatacaagagtttttgaggttactggtaatgatgtttcaatttcaggtttaaacttctccaatgtgtatatggaatatggtggtgttattaaatgggatggtaatggaggatcattaactgattccactattaaaaattccaagtcccgtgttggttctattcgttgggaaggcaataatgcaataattaataacataactattctcaattctacttccgaaaatggtatacttgtcatatcaggtacttcttccaatataacaaattccactattagagatactaaaggttattatggtgcagttatgtttggtggtaaattcaatataattgataactgtacttttataaacaacactgcatggatgaatggtggtggagtttatgattggggtgcaaataacactgtaagtaattctttatttatagctaacaatggaactcgtggtggagcaattctgacttatgaaaatcagccaaataggatgaacataatcaacaatacttttattaacaatattggtggacaagcaggtgcaattgtagtaagaagagcaggtgcaaacattgataactgtacttttatcaataattcagccggatctgctggagctgttttaatattgtctgaagcaaatatcaccaattccatttttgagaataacagtgcttcaactgttggtggtgctgtatatattacaggtgatggttccactattgataattcaatatttattaacaatactgcaaataacgatggtggtgcaatttactggagtggtgaaaacggtactgttaccaatacaattttcattaataacacagtaaataatgggactggtgaagcaattggttatattaataatgttactttaaataatgttactttggtaaataataatattgaacaagtaattgttaacgaatcaacaccaacatttgaatatgtgtttaaacttactgaaggatacagtaatgttaaattaactgataattatactgcattttgtactgaaaagactaaatggtcctcaagtcctagaactccattaatacctcataatgatttatccatattaaaaaatcatataactggtgaatcagtagcggagtatttgaaaatactgatatacaaatatctgaaagatccagacagaataagaaatttacaacaaaaaatctggatattcactgatgacaattatattgatagtactgattctataatcaaagaggttatttctgattataattctggtttccgtattcctaatcagggattttctgaaattataaatgatacaaccgtacttagaattgattttaaatcatataatattactaaacaaatccaaaacatgataggatttaaaagtagtattgaaaatattacttataatatgagtgttgttaaaaatacattaactccagctgttattttaggtaatcaaacaacttttgaaatcaaagttactaatactggtagttactatttgactaatgttagtgttattgaagatggctatgatggtttaatctacaacagtttttcagatcctagcggaaaatggatattttcaagaaatagtgatggaaaaccaatgtggacatataatggtactctttatgttggtatttcatatagttttaatgtaacattcaatactacaaaaactggtaatttcactaattttgtagttgtcacatctaatgaaactgacaataaaaccactaacaatactactaaggtttataagccggatatgactgttgagaagctttctttgaataggactgtttatgttggtaatcagactgtctttactattgttgtccgtaatactggtgattgtgatttaggtgatgtctttgttgttgaaaaagctccagaaggacttgtttacaactcatttaaaggcaccgactggtcatacaacaatggcaaatttacttatggtaaagttttaaaagtcaatgagtctgttagttttgagattgtattcgatgctgttagtcctggtaattggactaatgttgttgttgcaggttccaatgaaactgataacaaaacaggtaataatactactaaagtttataagccggacatgactgttgagaagctttctttgaataggactgtttatgttggtaatcagactgtctttactattgttgttcgcaatactggtgattgtgatttaggtgaggttttcgttgttgaaaaagctccggaaggacttgtttacaactcatttaaaggcacagactggtcatatgatggcaataaattcatgtatggtaaaaccttaaaggttggtgagtctgctagctttgatatagtatttgatacaattagtcctggtaattggactaatgttgttgttgcaggttccaatgtaaccgataacaaaacaggtaataatactactaaagtttataagccggatatgactgttgagaagctttctttgaataggactgtttatgttggtaatcagactgtctttactattgttgtccgtaatactggtgattgtgatttaggtgaggttttcattgttgaaaaagctccagaaggacttgtttacaactcatttaaaggcacagactggtcatatgatggcaataaattcacatatgctaaggttttaaaagtcaatgagtctgttagttttgagattgtattcgatgctgttagtcctggtaattggactaatgttgttgttgcaggttccaatgaaactgataacaaaacaggtaataatactactaaagtttataagccggatatgactgttgagaagctttctttgaataggactgtttatgttggtaatcagactgtctttactattgttgttcgcaatactggtgattgtgatttaggtgaggttttcattgttgaaaaagctccagaaggacttgtttacaactcatttaaaggcacagactggtcatatgatggcaataaattcacatatgctaaggttttaaaagtcaatgagtctgttagttttgagattgtattcgatgctgttagtcctggtaattggactaatgttgttgttgcaggttcaaatttaacaggtaataagactggtaataatactactaaggtttataatcctggtttgaaggttgaaaaaatcactttggatcctgttgtgtctgttggtgagattacatcttttgagattgttgtccgtaatactggtgattgtaaacttggtgatgtttttgttcatgaagatagttatgaaggtttaaggttccatagtttcaggggtgatatgtggaaacagaaaggtgatactttctattatcagggtgttttaaatcctggtgagtcagtgtcatttgtaattttatttactactttaaaacctggaaatttcactaatattgttactgctggttccaatgttactaacaatactactactgaaaacaaaaccaaagtaatagaaaatcacactaacaacaatactaatggtactaataaaacagttaataatgaaaccaaagaggttaatgttcataaggttgatacttcaagagcaactggtaatccgttactcgcattactcatggttcttttaatgattagtgtgacttctgttagaaaattcaaaaaataa

SEQ ID NO: 7712 - DNA, 789 bp, Methanobrevibacter gottschalkii
  source 1..789: mol_type = genomic DNA
atggataataggaaagtgattataattgcactaatagcagttattgttgttttaggaggtttaattgcatattcactttttactcaaaaccaagtccaatatcagacaatagctgttagcaatgcaacaacaatggaagtgccggtctctaaaaattcaacatttttcaatgacgcactaggaatcaaatactatcaggatgacaaaagcggcgttcaggtgattagctggaacggccaggaacaagcatcagctaaaggagcagtcaatattgcctctcaatttgaaaaacaaaaggcaggaacaacacagtcaattgaaaacggagtgccagtttatgaaaataaaaaattgcgttgctttataattgaagttaaaaatgcaacaacaaatgacaacattataatcgttgcaaaagataagaacgtggctttgcacatgcttaaaagcatcaaattcggcgtaagcaacattacaaatgcagctcaagtcgaaccttatgctgaatctggtggaaaccatttaaatgacaataatgacactgtctttgtcttttatccatggtatgtatatgatgaaggtgattatgatgcatatgatgactattcttcaagggattcagaatatgcagatgacagttattatgactattcttcaagtgattcagaatatgcagatgacagttattatgactattcttcaagtgattcagaatatgcagatgacagttatgatgaggaatatgacgagtcagatgaagattatgaaagttcagaggactttaattaa

SEQ ID NO: 7713 - DNA, 315 bp, Methanobrevibacter gottschalkii
  source 1..315: mol_type = genomic DNA
atggatgaattaaaatctgaaattattaaatttcaaaaagaaagggattggaaaaagtttcacacacctgaaaacttggcaaaatcaatatcaatcgaagcagctgaacttctagaacatttccaatggggcaaagattacagcataaatgaggttgccgatgaacttgcagatgtattgaattattgtattttaatggctgatgcacttgatttagatattaaagaaattgttttaaataaaatgaaaaagaatgctgttaaatatcctgttgataaagcccgaggcaatgcagcaaagtatacggagttatag

SEQ ID NO: 7714 - DNA, 1869 bp, Methanobrevibacter gottschalkii
  source 1..1869: mol_type = genomic DNA
atgattgtttatgaagcaaccaaagcagaattcattgactctgtattttccggttcgattacagatgaaatttatgaaatttatcaacagaaaataggaaaatctggaaaatcacagatcatgtcctgggaaaactcaatgcaatatatgtacagggtgttagaagatccggaaattcctgatgattcaggtgttgctatcgagtttacaattccaacaacatcaaaaagaattgatttcatattaacaggtcttaatcagtttcatgaggattctgttgttattattgaacttaagcagtggatggaagctcagaaagttgaaggcaaggatggtgttgtaaaaaccattcttggaggaggacttcgagaaacaactcacccatcttatcaggtttggtcatatgcatcattaattaagaactttaatcaaacagttgatgaagatgaaattggactttatccatgtgcatatctgcataactatgattttacagatgctgatgatcttagcgatgaaatttataaaccatactatgataaagctccattatatggaaaaagagatgcgttaaaacttagaaatttcattaaaaaatacataaggcatggagataattcagatattctgtatcgcattgataatggaaaaatcaggccttccaggaaacttcaggattcactttcaagcatgcttgaaggcaacaaggaatttgtcatgattgatgaacagaaaatagcatatgaaatggctattaaaatggctcgtgaatcatatttagatgataaaaaacgagttttaatcattgaaggaggaccggggactggtaaatcggtagtggctattaatttgctagttgatattattgccgatgatatgctatctttatacgttacaaaaaactccgctccaagaaatgtattttttgaaaagttgcgaggagacaaatactctttaagctatttaaaaaatttatttaaaggttccggatcctttacaaaatctaaatcaaatgaattcgatgcaattattgttgatgaggcacacagactgaatgaaaagtcaggactatttggcaatttaggtgaaaaccaggtaaaagaaataatgaatgcatctaaattttcagcattttttatagataaacatcaaaagatttcattaaaagattatggcagtgttgaagctataaggaaatttgcccaagaatttgatgctgaagttgagcaaattaaattaacttcccaatttagatgcaatgggtcagatggatacttatcatggcttaataatgtcttggagattgaagaaactgcaaattttgatggatttgactttgactatgattttagagttgtagattctcccaatgaactgaaaaatctgatttttgaaaaaaacaaagaaaacaataatgcacgcctgcttgcaggatactgctggaactggataaaagaaggaaaaaacaattcagatgtacatgatattgaaattgatgacttttcaatgagctggaacttgggaaactcagatacatgggcaattgatgataattcagtaaatgaagtgggatgtatccacacatcacaaggtcttgaatttgattatgttggtgtaatcattggaaatgatatgagattcgatggtgaacacatcataactgattttaatcaacgtgcaaagacagataaatctttatttggaataaaaaagaaacataaagaaaatccagatgaagccttaaaagttgcagatgaaataattaaaaatacttatcgcacactgatgacacgtggaatgaaaggatgttatatttactgtgaggatatgctgcttcaagcttattttaaagaaagatttggtaattaa

SEQ ID NO: 7715 - DNA, 1209 bp, Methanobrevibacter gottschalkii
  source 1..1209: mol_type = genomic DNA
atgattaaaaggaaattgtacttaaaccaaattgaaaggttaatggataaagaacctatcaaaattataactggagttagaagaagtggtaaaacatatttattaaaaagcattcaagaagaactaaaaaacaggggaataaacgaagagaacatattcataatttcatttgaatccatgaaatacaacaaaatagaaaacttcagagagcttgatgaatgcatcatcaacctgaccagaaatacaaaaggcaaaatctacttattatttgacgaaatacaaaatgtaaaaaactgggaaaaaagcataaatgcatgcagagtagacctcgactgcgacatatacatcacaggatccaactcagaactgctatccggtgaaatggcaacactgatatctggaagatactatcaaataaatatttacccattttcattttcagaattcatacaatacaaaaaggaaatagaaaaaacagatattgatgacttggaagaactatttaaagagtatgtggaatatggtggaatgcctccaatacaacaggtagcaacagaagacaagtattcctatctgggagacatatacaatacaatacttctaaaagacattattgcacggcacaacatcagaaacacagacatgttaaaccgtatacttgactatgtaataatgaaccttggaaaaaacttctcagcaaccaatattgtcaaatacatgaaatacgagagaagaaagatatcaaaagatactatactcgattacatactatactccaaaaatgcatgcttcatacatcaagcaccaagggaggacataaaaggaaagaaagtactgaagcacaatgagaaatatttcctggtcgatcacggattctaccaagcaaaatacggcgaaattgaaaatatgggttccatccttgaaaacatagtctacatagaactacttagaagaggatacgatgtaaaagtgggaataatcaataaaaaagaaatagatttcgtctgcactaaagataaaaaaagaatatatattcaggtaacatataaattggaaaatgatgaaacaattgaaagggaattttcagggcttgtaaaaatcaacgacaactttgacaaatacgttttaagcatggataaactagatttctccggaagcggattaaagcacagaaacatcatagactttttaacatcagactatatttaa

SEQ ID NO: 7716 - DNA, 2946 bp, Methanobrevibacter gottschalkii
  source 1..2946: mol_type = genomic DNA
atggagttcaatgaaaaccaaaaaagagtaattgcacatgaaaaaggtcctcttcttgttgaggcgggtccgggttctggaaaaactactgttattgttgaaagaattaaatatctacttaacaatttaaacattgcccctgagtctattttggtcattacttttacaagaaaggccactgaaaatctgagaaatagattgaacgactatatttcaaaagatgatttgtccaaaatgcatatttccactattcattccttttgtcttgaatatttaaagtcaaaagaggggtttttaaagcttttagatgatgataattcagaaaaaaaggagttatttattcaaaaacataaaagagcattgggatttgttggttctgcaactttatttgattatcaaattccagctattatcgataaatttggtgaatacacttcatttaatgtgaatacagataaattaatcaattatattaaagagacaaaaccaatttctaaggattatttggatttcattgaatctgaaatctatttttctaaaaagagaattgaagataatgactttaaggatgattggtataatgcaagatatctgcaaactccaaaggcatatcttaaataccttgaagttttagataacaacagttatgttgattatgatactttgcagcttaaaactctaaaacacttaacaagagatccgaaaacacaattcaatgctgttttgattgatgagtttcaagacactgaccctttgcaaattagaatttttgagattctcttaaagcaaagcgattattttacagctgtgggggatgttgatcaacatatttacgcttttagaagttcatttagagattattttaaagacatgaaagaaagatttgatgctgagattataagtttggatgtaaactacaggtcaaccgccaatatagttcgtgttactgattcatttatcaagcatcagagaagtgattacacccaaaaacatctggtcagtaataatgacaattatgataatgatacgttcttaattgaaagtgaagattcacaagatgaagctagtaaaattttcaacatcatcgcagagttaaaaagactaaataagatagaggattatggtgaagttgcggttttatatagaaaacataatacaaggactattgctaatttaattgaacttttagatgagaacaatattgaatttgtaattcgtgggcaaaatgatttggcagatcaaaacgaaatcagatccatccttttgttgttgtggtatcttactagaaacatggatgaaggccatgttttatctggtgatgaattagatgaattgaacctaaaagcattttgtggagagtactttgaacctacattctggtcacttgaagatgaaactaaaacataccttacaactcttcaagatttattctatgagaatatactaaaagttgaaaatgaaattagatctcttcaaggaaaacgtccagtcaaatcatataaacgtgtaagggttaatgaaagctatgaaaacttaattaggatatttaataaggtaactccaccggttattgacttaagacatgttcacgaggcagatagggaattcttcaataatcttaataatttaagaaaaagaattttaaataatgaattaacaatattggatgtttattatgaattgatatcccttaatttcaataaattaagtcaggataaagttagaaatctttccatgttaactcgaactatttataattatgagtcttttatctcacagactgatgttaagggcctattttactttttaaataggataatcaaaaattatggttcaaattattcatcacaaaatggtgttcagctaatgactgttcatgcagcaaaaggattggagtttccagtagcaattgttgcatcacttgaaaaagacaagtttccaatgaaaataaaagatcctaaaagagaaaaaagaacaatatttatgaaagacactttctacactccaaatgagtttttaaaatataaagaagtgacacttgatgaggaaaatgaactagacagacaagaagaagagcgaatcatttatgttgcaatgacacgggctgcagatttattaatattatcttgtgttggaaaaactcctgatgtgataaataacatcaaaaattatctaaaaaaacctaatttaaataatgtgataatcaataggcattttacaaataatgatacagaaaaactcaaattaaactattcaagtttttcaacatataatttatgcccatatatgtatgatttagtttataattatggttttaaagtttcaagtgaaaaagtaacaaattttggaacagtattccacgaagtaatggagacagtaaacttaaaacttaaagatggtgaaaaaatatcaaaagaagaactgattttgattactcaagatatttataagtcaatgtttgatattaaagagacagaagatgaatttaacatgctgatagattccattttaaattattataacacatattcacttaatcaagaagtagtggaatgtgaacttccttttgagttagaacatgaaaattatattttaaatggtgaaattgatttaatatataaaattaaagattctgaaattgcaattttggattataaaaatgcagagcatgatgataataaaatagcccactatgaaaaacagttgtatatttatgcttcagctttaaaagaaatgactgaatttgataaatatgaaatcaaaaaaggaataacacattttgttaaaacggattaccgtcatgaagttgatataacagatgaaaagatcaataagcagttatataaattaaatgaagtagctttaaaaatacaaaataacgagtatcctaaaagagaaagcggattctgtaatgtttgtaagtttcaggttatttgtcaaaattaa

SEQ ID NO: 7717 - DNA, 507 bp, Methanobrevibacter gottschalkii
  source 1..507: mol_type = genomic DNA
atgaataccacaaaaaaccaatccattgtatatgatgaaaaaacaatatttaaagttaaagaaatgatagtggcaggattaaataaacttaaactgtttaaatgcaaaaaatcagggaatttagacttttacaatgatttaaaagaaacgtttactgaaattgcattaaatctaaaagaactgaaattgtggaatgaattagattattttctttcaatttcactttatattgaatatattgtctataaaaattccattgactcctcttttgggcactgctcttttgcaattgagttgttaaatttttacattaatctaattaaaactagttctgattattatctaaatttaaccgaaatgtccataaaagattttggaatatatcaaaatgaaacaaaaactagatacaggcaatataggcgcaaatttcatactgatgtttatgtgttaagtggaaatttcactgaagatcaaatgtatgaaattcatgcaagtttaagggagtga

SEQ ID NO: 7718 - DNA, 666 bp, Methanobrevibacter gottschalkii
  source 1..666: mol_type = genomic DNA
gtgtatttcttggatacaaatgtgcctattggatatacaattatccatgatagatggcatgaaaactcaaaaaatttcattgacaataataaaaattctatcttctggtctaattttgttaaaagtgagtattataataaattagataatatacttgattatattgtaaaatttttaaaatcaattgtctgtattttaaaagttaatgaaatggatttttatagttataatagttttgaagagcatatattgaacgaaactagattttgcaaactagattattttaaaaaacaaaagattttggaaaatttttggaatgaatatgactttattgttggtatttccactaagctatatgattgtttttataattatgcttttgattttgtaaataattataataatagagatttaagattaaatgaaatcatgagattgcatgactgtggtttagataactatttaaaatactatgattatgctttaaaattatataaaaatggaattcaccctcctgattgtaaaattatcattgatgcacatgactgtggtttaactcatgatgatttaaaattcatttcaaatgataataaattaattgatgctttatctaaaatagatacttctaatttaagaattattgagtttggattatgtaattcatga

SEQ ID NO: 7719 - DNA, 1008 bp, Methanobrevibacter gottschalkii
  source 1..1008: mol_type = genomic DNA
atgtcagtaaaggaattattaaaggaatgtggttttttatatttcaaggaagactataaaaatttacttataaaatgtgaagaagtgttaaaaatagatgaaaaaaatcccattgccttaaactataaagcaattgctttttactactttgatatggatgatatagctttaaaaatactaaatgatactcaaaaactatatcctaaaaactactacacactaagcattaaatcattagtatatattgcattaaaagaatacagaaaagctcttgattgttgtaatgaaggtttaaaaattaaaaatttcgatttgcttgaaataaataaaattaaagcattaatttatctagataaaattgatgatgcatacaatttctataatactattgaatgtcctaactttaaattcgaagaaatattgatagaatgtgaaaagtacagtgaagctttaaattcttacaatagcaagttaaaagaaaattcacaagatttggagttaattgataatgtcaaaacattaatggtgaaatatgacctaaatgtcaagccaaactgggatgaagagttttatatttcatggatatatcacatcaaacataatgacaacaaaaattgtcctaaatgtggatctaaattaattccaattgtttatggttatccacttgaagaggcattaaaacaagaaaaaaacggtgaaataatacttggaggatgttgcatcaatgatgaaatgggtaacctccattgtccaaattgtaaaaatgatttttacatagatgcactgcatattgatgcaaaaggcccattatatgattatattgtcttaaaaatcaataatctggatgaattgttattcgatgagatatgctgttccatttacaaaataagagaggatattgaatactttgatgatgatgagtttaaagcgttcataaatcatttaatatcgattggctacctatatgagcctgttaaaggttatattaagctggttgatattcattaa

SEQ ID NO: 7720 - DNA, 1893 bp, Methanobrevibacter gottschalkii
  source 1..1893: mol_type = genomic DNA
atggactggcaatatagtgattactcaaaaattaaccctaatgcaaaaaagcattttccctttgacaatcctcgtgataatcaattagaaactgtttctgagattgctgatgctattaatcatggttataaatatattgtacttgaagccggaactggtacgggcaaatcagcaattgcagctacactatccaatatgtcagactcatcatacattttaaccatcaccaaacaactccaggaccagtatttaagagattttaaagatttcaaagtagttaaaggaagatcaaacttcagatgtcaaaattatattaataaatcttgcagtgaaggcaaatgccttactgaaggttttgaatgcagattctctttgaaaaatagggaaaatgaaattaggaaggacaatacctgcccgtattattatcagaaatatttggctttacatgcaaaaactgttgtttctaattattattacatgtttttggagcttaattatgttaaggactttcaaaaaagggatttattaatttttgatgaagcccataacttagagtcgactttaatggatgagttaaccctagaattttctaaaagtgatcttgaagaataccttgattataatttaagatgtgaaaagattgaagaattaaacagtaataattatttaaattggattgaatttatcaatgagattaaggaaggttacttggaggagctgaataaacttgaaagattagacaaattggaacttgctgagaaaatagctttcatcaaacatcaaattaacgattgcagccgttttattgaacatttaactcatgatccgaaaatttggatttttgattgggatgatgattatcaaacagcccaatttaaacctctaaaagttgataattatgctaaaaatacattgtttgattatgctgatgtttgtatattcatgagtgcaacaatccttgactggaaattgttttctaaatggttaggaataccggaagatgaaatatatgcaataagacataaaagtccattcgatattaataataatccaataactgcatatgatgaatataatttatcaaggaaattcattaaagttaatgcgcaaaaaagcattggttcaataaatgagatcttagataaacataaaaatgaaaaaggaataattcatacagtaagcggaaaatgcagagattttttaattgacaatattgccgatgaaagattgattgctcatgacagacataacagatcagaaatgcttgaggaattcatctcctcagatgaaccgttagttttgatttcaccatctatgagtgaaggtgttgatcttccgggggatttatgtcgttttcaagtaatatacaagttaccatttccagactggggtgataagcagataaatcaaagagcaggtattgatagggaatggtatgattatagaacatgcctcaaccttgttcaaacacacgggcggggtgtgagatacgatggggattactgccatacttacgttattgacagccgttttagatcatatatccgagaagcgtttccatctaaatttttaccggatacatttaaagagtcaattgaaggcagggagtttgatttaaaagaaaagaaaaggttaatggaaattggtgattttcatattgaaaataatgattatgaatctgcaattatattctttaaggagttgttgaataatgaattattcaaaaatgatatatatccctaccttaaattatcaaatctttatcatgaaactgggttgtttgaatgcgaggttcaagttatcatgcgatttttaagttctggtgctgaatataatcactttgaaaaacgactaaaggagcttgcagatatgggttattttgattttaattaa

SEQ ID NO: 7721 - DNA, 1452 bp, Methanobrevibacter gottschalkii
  source 1..1452: mol_type = genomic DNA
atgttggagtggaatatttgtaaaaattgtggtgcaattctggataattctcaaaatacttgcctgaattgccaaggggatgttgaaaaagtaaacattgattatttaaaaaaatatttggataatttaaactttgttgttaaaacgctgaacatcttcaccccatattgtacgttaacaaaagatatgggcaatattgctttggaaagtctgataatggatgatttatttaagtatttctcatatcttggccttggagataacgaaattactgacaatgaggttgaatttatcaattcacttctcgataccaatttttcaaaagaagacattcaaaccctaacagatgccgaacttgacaaatcacttccagcatcatttaaatgcctgcaggaaatagacgaatatggtcaaaactttgatatgtatcagttaaactcctgcagcgaattattcaactgttttaaattattcggaaaattttttatcactgctgacaatgaacttgatggcgatgtcctgaagatatattcacaatacatcaattatctggaaagttctcttaaaagtaaaaacactgctctaaaaccgattgatcatctgaattataaaccatcaaaaaaggaagaaacacattcacttgatgaatatttaaatgaattaaataaacttgtcggtcttgaaaaagtcaaaaaagacgttaattcacttattaatcttgtacagattagaaaactaagagaaaaaagaggcataaagcagcctccaatgagccttcatttagttttctcaggcaatcccggaactggcaaaactacagttgcaagattgctatcgaaaatttatcatgaaattgggttgttatcagaagggcatttaattgaaactgacagatcgggtcttgttggcggttatgttggtcaaactgcaatcaagacccaggaagtaatacaatctgccctcggtggaatattgtttattgatgaagcatattcactgacatccaaaagtgaaaatgactatggtctggaagctgttgacacattacttaaggcaatggaggatcatcgggacaatctgattgttattgttgccggttatcctgcattaatggaaaaatttttatactcaaatccaggtttggagtcaaggtttaataagttcatatactttgaagattataatgaggaggaattatataatatattctggttaatgtgtgaggagtcaaatctcacattggatgaggcgggagataattatataaaagaatatttcaaaagaatatatgacaacaggtcaaataattttgctaatggaagagctgttaggaatctgtttgaagaagtaataactaatcaggcaaaccgtttagctccaaaaaaagaaataagtgatgtggaattgaatacattaacataccaggattttttagttgatgaaaatgagtga

SEQ ID NO: 7722 - DNA, 1059 bp, Methanobrevibacter gottschalkii
  source 1..1059: mol_type = genomic DNA
atgagtgagaaaatctgtagtaactgtggaaataaagtggatggcagtgcaaacttctgtccaaagtgcaaatcacaatcatttagaaatattaatgaggttgcaaaacctaaaagtggtgttgttcataagttattttataaatatcagggaggttactttgcagtatccaagtcaaagatagctgcaatcactacatttattttatttgcttcattaggctttgaatccccaaacctaatcatatcctcagtgataattgcatttttggtttatattataggatttgctataagaaggatcaatattattaaccaaaattcaaaaatgttttttaggaataataatttaggtttaatcaccgatctgatgcatctgtttgctttttggcaggacagggaaaccggtaaatttgcattgtcaaaaacaaaactaatttccattttaatattttttgtttttgcaacatccggactttcactgcctaatgctacacctattttagcagcagtatttggtttgatatttgccctgcctgtatttgtagtcggatatggaattcacagacttacaacttcaagacctgttaaaaagatagtcaaacaagctgaaccagataccggaaaaaaacatgatgatgccagcaatgcaaaaaaagacattcatatacatgaatttgacaagtatagggcaaaattaaatgaattaaaagtaaggtatgagattaaggaaaaaaatgcccgtaatctgattgcaaaacgttttactccgccccaattgacttatgataagtttattgcatctgttgacaagtccactatgatgtttaacagtcatgctgaggtaatttcaaatattcttgatttggcttcccaggacagcaagaagattgatgatgaactcaatgaccgattcgatattctggaagctcttgttgagaaaattgatgagttgattgatgagctagtattaagcttaaacgatgatgaaaaagagggaaatccctcaaatctattaaatgacttagatgatttaattgattctgtaaaaaattactga

SEQ ID NO: 7723 - DNA, 519 bp, Methanobrevibacter gottschalkii
  source 1..519: mol_type = genomic DNA
atgaatggtgctggtgctattgactctgctaattggactagtgctgatgtaggttatgaaacatttaaaatacctccccaatatgaaaatccatacagcagtgactttgacatgtatgaatttgatgaagacattgatgtttttacaatcagatatgtaaatccgaatctgatggatttatatggtcattttctaaatgaataccatggaaaaaaggttaatgttgcaggccatgatgctgtacacttcacatattatgataggcatgacaagaccaacaattcagtattatggttttcagcaggtgaggaattctattatatcaattggattggcagcaatattacaccggcaattaaggaagttgttaaaagttccttaaaatcaaactacactcataaggagttttacagtatattaaatgataatataaaaattacaatactgtcaattccattgaatctcaaaggtttgattatcctactgagttctactcatacaacttcagaaatggtttaa

SEQ ID NO: 7724 - DNA, 891 bp, Methanobrevibacter gottschalkii
  source 1..891: mol_type = genomic DNA
atgactaatcacaaacacctgcgcactgttattgaagatatatattcgaatggaaataagctaactgaagaactcactgcccgcctaatacatgaattcagatactccaatttgtatattccctctaaaaaagaggacaataagctgaattttattatttatgaggatgatgattccaaacttactccattatttactgatttggatgaatttagaaaattctataaggatgaggatgttcgggcattgcaaaatccatttgaattgtatcagaatgtcttaaagacaacggatattgaaggttacatcttaaatcctgcttctgaaaagtatttgtttaaaaaagaatttattttagctattaacaatattccaaagactgatttttacactaccaatccctactcggaagaggaattattaaatatgaaaaggtcagttgataataaaaatttggaaagatttattgaaaatagagcaaatattggggattttgagggtttatttgaacagatggcaaattcacagttatttgctttaatgttgtctgatttaaaacttaataaggagatgatttcacttaaaaaaagtggtcctgttgcggcaatgtatactgataatgtaggtggcatctatgcaactttatttacatctgagagaaaaatggatgcagtaaagacaaaaaaatacaaatattcccaattagttaatcttgcaacacttgttaattttatcctgactgaggatatggacggccttattgtaaatccggaaagtgacaatgtgttagttccaagaaccactcttcttagatactctcttggttttgagatgtatgcaaatgatgaaagactatcagaatcaatgttttatctctttaggattgaatga

SEQ ID NO: 7725 - DNA, 606 bp, Methanobrevibacter gottschalkii
  source 1..606: mol_type = genomic DNA
atgtccgaattatcacaattaattcaaatcaataaaaatattgaaaaacagaatgaggaaataattcgtcttttaaaagtaattgcttgcgaaaaacaagaaggagaaaattcagataaatcagttattgatttaggcgagctgtatttggaagatgatgcaagttttgaagcagagccaaaagaaggggaaattgaaaacctttggagagttggatctcttctggataattcaattgatgttggtgaagtctattttattgaaggtactgacatcttcaggttatcagttaaaaataatgaaacaagcattgataatttaacaggtgatggtcaggcaaatatatttgcattagaagaaacaattgcaaatgaatccgtcaaaaacaataaaagtttagaagacagtacagtaatactgagcagcgaacattcacaaaatttacctgaaactttaaagatttgtgtagaacaaggtgctaaaaaagtatatatgcatttatttgcatcatcccaattagtaggagcaccacaatcattaatggaactgattaaatttgatttttataaaaataatgaacatttagttgaaaaattgtttaaatag

SEQ ID NO: 7726 - DNA, 306 bp, Methanobrevibacter gottschalkii
  source 1..306: mol_type = genomic DNA
atgtctaaattttgtccgaaatgcggtgaagagttagtagatgatgcgaaattctgtaaaaactgtggtgaaactataaaaacagaacaggaaacacaaaacaatgaagttcaaaatgttgaaaatgaccataaaatagctttaattttaggatatgtctgtgctattttaattccattatttggattaatatttggtatttatttagtgacccgtaaagactcctccaaagctaattatcatgggaaaatcatcattggaatagctattgtaatatggatcatttcatttttattgatgatgtga

SEQ ID NO: 7727 - DNA, 267 bp, Methanobrevibacter gottschalkii
  source 1..267: mol_type = genomic DNA
atgagagaaatatccatagattctgattttgacgtaggtgaaattacatctaaaatcaataaattaatgtcagaatggcctattcagcttttagatatcattggacctaattggattgtgtttggctatgacatgaaagttaaattcgttttaatattcgatgctgactttaatgatttggaaacccaaataaaattagaagatttaagattaaatgttatccatcatattgaaagtttaaaaggactgcatatagggataacctga

SEQ ID NO: 7728 - DNA, 339 bp, Methanobrevibacter gottschalkii
  source 1..339: mol_type = genomic DNA
atgaaaaataaaaatatattgctcattgcaatagcagttcttgttgttgcattaatagcagtgggagcttacacaatgtttaatggcaatactcatttaaacgttacagacaacaccactggaatagacaatagcaccggcattgataataatacgactgttgtcggagataattctccacttgagaatttaaccaacaataatacaacatataaagtatacaatccccagtctgattcatatgtaccggttattggtgaaaaattcgatgaagaagtaaacagatggtatacttacgatgatcagggtgtcagatactacaatacaagaattaattaa

SEQ ID NO: 7729 - DNA, 1092 bp, Methanobrevibacter gottschalkii
  source 1..1092: mol_type = genomic DNA
atgactagacaagaaaaaatcattaaaacaagtgtgatagggattgttgttaacctgatccttgttgcatttaaagcaacaattggaatgcttgttaattcaattgccattacattggatgctgttaataatttaactgatgcgttatcttccattattacgattattgggacaaagcttgcaggtaaagcgccggataagaatcatccttatggatatggtcgtgttgaatattttgcttcggtaatcattgcagctattgtgctttgggcgggtattactgcatttatggaatcatggcctaaaatacttaatccggatgcaacttcatatactgctgtttcacttgtcataattgctgttgccgttttagttaagtttgctcttggaaaatatgttaagaatgtaggtgaggatattaattcacaggctcttgttgcatctggaagcgatgcatttttcgatgcagtgctgtctctttcaacattaatagctgctgtcatttcagtatttttccatgtttctcttgaaggaattctgggagtggtcatttctatcgtgattatcaaggcaagtgttgacatgcttagagaaacaattgacagcatgattggttcaagagttgactcagagctttcccgtaaactgaaagagtatatctgtgaaattcccgaagtgtatggggcatatgatttgagtttacataattatggtcctgaagatatgcgcgggtctgtgcatattgaagtggatgacgatctgacagcttttgatatacacagcttaactagaaatattgtatataaggtatatgacgagttctcaatagttttaactattggaatttatgcaagaaacaatgattataaggatgtccgtgaagatttatataatatagcttcaaaatatgaggaaatcattgaaattcacggttttattgtaaataaagatgaggactatgcaacatttgacattatcgttgattttgatgctgaccgtgagaaggtaaaagaaaggatttacagtgaaatcaaatccaaacatcccgaacttgactattatattattgatgactatgacatatcagattaa

SEQ ID NO: 7730 - DNA, 540 bp, Methanobrevibacter gottschalkii
  source 1..540: mol_type = genomic DNA
atgtcaatatatgattttgaagttaaagatggtgaaggcaatactatttcactctcacaatataaagataaagtacttttaattgtaaactcagcaacagaatgtggatttacaccacaatatacacagttaaatgaaatttattcagaattcaatgaagatggttttgaaattctagatttcccatgcaatcaatttggaggacaggcaccaggaacaacagaagaaatcacagaagtctgccgttcaaaatggttagtcccatatgctatctttgataaaattgaagtgaacggggaaaatgaatcaccattatatacatatcttaaaaaagaacagccatttaaagatattactggtgaaggctcagaagaattcaaaaagattttagaatcaattaatccaaattatatggataatgatgatattaaatggaatttcactaagtttctggtagatagaaaaggcaatgcaattcaaagatttgaaccaactgaagatttaaatgatgtaaaggaagctattaaagctcttttataa

SEQ ID NO: 7731 - DNA, 2688 bp, Methanobrevibacter gottschalkii
  source 1..2688: mol_type = genomic DNA
ttggaatcagataatgtaagtaagaatatttctacttcattaaataaaacacaaaataaaacattaattaataatgaaacatacaaaaaaacaacattagaattttcccctattataactgaatatacttcaggaaacataatttatacagttaaagcttattcattattgaattataatggaatgaaatataaagatcctaaatacaattcccttattaagataaaactatatacaggtaattcttttaaaagttattcatcacatatagacaataatggcattgcttctatcaaagtacctgatttatctattggctatcataaggttgagatttttattgataatgtgcaaggagcaacatcatacataaaagtaattaaatctactactaaagtatatgctccaactacaattataaaatttaagaaaaatatgaattataaaattaaagtcgtagatagtcataataatcctgtaaaaaatattatacttaaagttaaagtttatactgatagcaaatataatatttatagcattaaaacaaattctaaagggttagcaacacttaaaattaataaattatctttaaagactcataaaattgttattacaactaataataaaaattataaaattaataaaaattcaaaaattttaattaaaaaaacaattcctaaaaaaattgaaacattaacagtatcctctccaaataaaacaatacaaagaggtacttctttcacgattaaacttacagatgattataatgatattgtgaaaaaagtttcaattaaagtcaatatatacacaggtaaaaaatttaaaacttttaaaattacaacaaataataacggtgtggcaaaacttaaaacagataaactctcattaggaactcataacttaaaaattgcatccaataataaaaattacaaatttcataaaacttttaaaataacactcgttaaaacaattattcatgatgatattaaaactttagtgttaaaaaatattacttactaccaaacaaaagatggaaaattcaatgctaaattaggttggtattctaaagttggaagttcatatcaaattttaagaaaaacaaatgaaaattataacataatttctacagtcaaatcaaattcatcatttacaacattctatgataaaattgatggaaatgcttcatacacatattctgttagagagattattgtgaaaaataatgatattatattagggccatatgataaagaaggtttaaaattattgaagagtcctaatattactgctgattttcagaatttaaaagctgaaattacttggaataaagttgaaggtgcaacaaagtatattatatttagaaaaattggtcgtgatgctaattttaaagctattggtattgttaatagcaatgtattaaattacactgatttttattataaaaccccaaaacaattaagaagtattcttaatagtaatacttttgtagatccaagttttaataacttgttttatacagtacgtgcatgtactgtcaaaaatacatctggaatcaatcaaataagttatggatcctatttaattgatggagatttccatttagaagcaccaagtattatttcccttaaagataatgaaattaaatggggtaaagttccaaatgctgatggttatttaattcttaaaaagaatagtgatgatgatgaatggaccattattaatcaagttgcacaaaatgaatccaatactattacattgaagttaaataatattgaaaatagttcttattattctgttaaagcatttgctaaaaaaaatggtgaaatcatttacagtaaatttgattctggatttagtctaaaaaattactcaaaagataattctaaatataaaattttatattttggagatagtattacatatggttcaccttacaaatcaaattcaaacaaacacattttttctattccctatagagtaggagaattacttggatgtgtttactataatccttctattccaggttccacttatcatgatttagggcaaaaagatggaaagaatattgaaaatacaaaatattatagatatcgtatttgtagagaggttgttgaccaaatatctattggtgaacttcctggaaattggaaagaacttgataatttaaaaaatagtgaaggtataacaaatacatatattgatgactataatattgttgtattagccgcaggaaccaatgattatcttgataattccatattaggctctataaattctgttgatacacatacattcaatggtgcacttaatcatattcttaataaaatagaaactgcgagcaaaacacgtgttgaaagaggtgaatcccctattaaagtaatatttgtagatttatgttattcagatcgtgcatatgataaaacaataaaagaaaatagagatgtaaccaaaaataaaattggtttaacattgaatgattatcaaaatgcattaaataaacagtacaataaatggaaaaataataactttttaacattatataattttaaaacaagagattataatattgttaatcaagaaaactgtccatatactacatcagataatttacatttttcaaaattcacttatggccaatatggtaatgcatttgcaagttttcttaaagaaaatattttttataattag

SEQ ID NO: 7732 - DNA, 1317 bp, Methanobrevibacter gottschalkii
  source 1..1317: mol_type = genomic DNA
atgaagaaaattattacatatggaacatttgatttattccataaaggacattataacatattaaaaagagctaagatgtacggtgattacttaattgtaggagtcactggagaaaattatgatataggtcgtggaaaattaaatgttaatgattctcttgcaacaagaattgaaaatgttcaaaaaactggttttgcagatgaaataattgttgaagaatatcttggacaaaaaattggcgatataataaaatatgatattgattcttttgtaattggtgatgattggaaaggaaaatttgatcatttatctaaatattgtaatatgatttatcttgagcgaactaaaggtatctcaagtacacaaatccgtgaagaaacatttaatcaatatactataggtattgtttgtgattttgttgacgataatcaaattatcaatgaagcaaaattggttaatggatttgaagtaaaaaatattttttgtgaagatgaagaaattaaaaataaatttcaagagaaatatcatttagaaaattcatgtgaagaattttcagaattgttagaattatccgatattatttatgttcgttgcaatatctccaaaagattcaattatattcaaaaagctttaaatgcaggtaaacatgtgatatatgacccacctgcaacatttaattataatgaattagatgaactaatacacttagcagaacaaaaaaatgtaattttaatggaaaatattaaaatggtgcatatttatgtatttaatcaattgttatggatgacacaaggtggactaattggagatatattaagttttaactgttcaatttctaaaattgatataaatcgtcctaatttattttatgatttaagtgtttatacattattacctatgttaaaaatcatgggtcaagattatgaaaagtatgatttcattgtaaaaaaagatggagaagatattgaatttgcatcaatgaattttgtttattctaatggaagatcaattattaatgttggaaataaaattcgtgttgataatcaattagagattatcgggactgaaggaactattaggatgaaaggcgaatggtggagaagtaggaactttgaaattcattatccagagtcacaggaaatacagttatataatacaaattttgaaggaaatggatttaaatatctattacgtgagttatccagaatgttagataataatcgtattgatactagaagtatttttaaagatgaatctttaaaaattgttaaaattttagaacaagttaaaaaaattgagaacaataatggagattga

SEQ ID NO: 7733 - DNA, 1068 bp, Methanobrevibacter gottschalkii
  source 1..1068: mol_type = genomic DNA
atgaaacatttatttactattggaccagttgaaatgtatccggaaacattaaaaattggtggaaaacaagtaccttattttagaaatgatgaattttctaatatcatattatctattaataaaggattaaaaaaattattatttaataaaaatggtgaaataatcttactaacatcttcaggaacaggtgctatggaagcaacaattatgaactgctttacaaaagaagataatttaataattattaatggaggttcatttggtcatcgttttactcaaatatgtgatgtacatgggattccatatgaatctgttaatattatttttggtgaaacattaactagagaaatgattgaagataaattaaataatggtaaatttactggtttgcttgtaaatttagatgaaacatcaaatggtcaattatatgatataaaaatgttatctgatgtttgtaaaaaaaataatttagtttttgttgttgatgccattagtgcttttttagccgatgaagtaaatatggataaatattctattgatgctgttattttaagttctcaaaaagctttatcattagctccaggtttatcaatagtagctttaagtgaaaaaatgttaaaaagagtagaagttattgattcagaatccatctattttgattttaaagattatttaaaaaatgctgaacgtggacaaacaccttttactccagctgtacgagttattattgagcttgaagatatgattaaacgcttagaaaaaaaaggcatatataacattataaaacatacaaatgatattgcttcttactttagaaaaagagttaatgaaattggacttgaatatccttcatatccactgtctaatgcagttacacctataattttcccaaaaaataatgctgacttagtatataaaagattaattgaagattatggatttgttgttaatccaagtggtggtaactttgctaaatcaatgtttcgtgtttcacatgttggaaaccaatctattgaagattgtgaagaattaattttagcaatatctgaaataatcaaaaaattataa

SEQ ID NO: 7734 - DNA, 1659 bp, Methanobrevibacter gottschalkii
  source 1..1659: mol_type = genomic DNA
ttgagtaatatgaactccatacagaaaaatttatttcaattacttgttgaatttgatgaaatttgtaaaaagtatgatatcaaatatcttttagcagctggtgcttcattaggtgcagttagaaatcatagatttatgccatgggatgatgatattgatttatatattacaagggagaattggaataaattaagacatattttagaaacagaaaaagatgttcttcctaatggccgttcttttgtttataaagaaaatactccatattattccaatccacttccaagatatatcaatgataccacaacaacaatgtacagaaaccaagcattagctggaaaagcatgtggacaacatttagaaatatttatttttgatcctattcctcgtggcgagaaagaaaaacaaaaataccttgatttattacatgtttatacagaattactttcaccttattttatagtaaataaacatgctacttatgaagattgggaaaaacattacaagctctataaaaagtattgtgatagaatagataaagaaggtgaagaaaaagtattgaacgaacttgaaaatacattgcagcaatactcaattgaagattgtgatgaatattgtatgtgttggggaacaaaagattatatttatgataaagaacttttccaggaaggacaaatgggactgtttgaaggtaaagaatttccgattggtaaacatccagaaggtattcttagaattgcttatggtgatagttggatgtatattcctgaaattgatgaacaaattgttcatggtggaataaaatatgataatatctctttcaaagaatatactgataaatatcttcataaaataaatcgtgattctgcatttgaaaaatttaagattaataaacgaaataatgtagatttatataatgttcgtgaaaaagtacgaatgttaattgcaaaagaaaaagtccaagttggatgcatgcatttcaaaaataatttaaaagaaaatgaagagttattgcgttcattattagaaaatggagattatttagaattatctgaacgatttgaggaatattcaattttgcaatcaatgaatgaagtgcaaaaatttaaaatttttgttccaattacagataaaaatcttgcaacatttttattaaatttattgaaacaaggaaaatattatcaaataaataaatatttaaatattcgtaaattaaatgaatctccacttactaaagagttaataactattgaaaatgaagttgaattttgtaggaaattatcaatagctcgatatgataataaagatgaagaattagttcaaagtatcattgataaatatgacggcatattctcagatttattagatatttatagagcaaaattatggattaaagaaattaatgcaaaatctagtaaagattataaagatattaataatttatgtaatgaaatattaaaaaaatatccatttgatggagagacaatggctatacaagcaaaagctaaatctgaattaggccaggaaaatgaatcattagaactttataaaaaatctattttaaatactagaaatggattaatatggcaaaaagttgaagacgaaagtggaattagccgtatggaaatggaacgtgaattaattgaggaggaaaattaa

SEQ ID NO: 7735 - DNA, 1203 bp, Methanobrevibacter gottschalkii
  source 1..1203: mol_type = genomic DNA
atgaaatcaaaacaagatattcaattagaattacttcaagaaattgatgatatatgttctaaaaatgatttaaaatatatatttgtcggaaaaaatgcttttaatgcttatgttaatcatacaataaaaaataataatgctcacgtttcagttgctatgacattaggggatattaatcgtttttgcaatattattgaaaaacaaaataatcctaatcgttatgttgaaagtatgtttaccaatccaaaatatattccattgtatatatcttatggtaatgaaaatacaactgattaccatatgattatcttaaataataatctccatcatggaatcaatattcgtatttatccaatcatcaaatccgttacattagatgatgaaaaaattaagataatggattctaaaatatataaagaatataaatttcgtaaatttttaaataagaagattataaacaaaaaattcttgcctataaaaataggtatctcattattaaataatatctacaatatttctggttttagaaaaaaatatcctgataaaatttttaataaaatatacattgataattgggatgatattcaaaactattccaaagtaagaattggaaaaaaaataattaattcagaatattttaaagaacttacaagatacaaagtggacaatatagaattaaattatcctaaagatacagataactattttaaacaaatttacggtagaaatatagaaaatgtaaatgttgtgcttaaaccagaaagaaaaaatgcaattgttgatactgaaataggttacaaaaagattattaatgaaacaaaagatttattagatgaaattcggtctactcatgaagaattggtttgggggagatttaaagttcgcagagaaaaaaaatgtgttgatgatgtttggaaattagttaaaatgactaattctcaaattaaatatattgacttttttgaagaaaatatcgattatttattaagtttggatttaaatgataaatctcaatttgaagaaatggaaattattttaaatccaattattaaaaaattacaaaagtatgctaataaaggtatgaccttttctattgatgaaaaaactgattcattaattagaaaatttttattattaaaaaacaatgaaaaattaattaataaaatagacgaaattaacaaacttaaatatttcgttgaataa

SEQ ID NO: 7736 - DNA, 792 bp, Methanobrevibacter gottschalkii
  source 1..792: mol_type = genomic DNA
atgataatcgaatgtacaaatgacaatattaaaactgtatttaattatattggggaagattatggaaaatgtttatatattttcatcgatttaaaaaaatatggtttggatgatgataattttaatgtttggattcagtataataatgataaaatttgtgccataattagtgaatactataatggaatccagatttatagtaaatttgaagatctcataattgaagaaatcgtcaaatttattaaacaaaaagatgttaaaacattattttcaattaaaccaattattaataaaattaatgaatttttacccaattataaacaagaaactggaatagttggtgagttaaaaaaattgatttttgaaccaaatgtccatgcatattcagcaccaatatctgaattagaagaaattgtcaaattagtttcagaagatgaaaatattggaaaaccctatggatatgattcattattttcacagtattatgaaagaaaaaccagtaattttggtcgtaattttgttttacgtgataaaattaataatgaaattatctgtcatgctggtacctatgctgaacttccagaatttgcagtgataggtggtgtgattacttcaaaacaataccgaggaaaaggattttctaaaggaacattatctgctctttgtcatcaattaaaatctgaaaataaacgtgttttttcatactattacattccatctgcaacaaaaatgcacacttctgttggatttaaaaaaatagaagaatggtctaaattatcaaaaattgattaa

SEQ ID NO: 7737 - DNA, 426 bp, Methanobrevibacter gottschalkii
  source 1..426: mol_type = genomic DNA
atgtataaaaaaattctattgccaactgacggatcagggtatgcagatcaggaaattgacagagtaaccagattaataaatgaagatggtgaaataataattttatctgttgctcccaaattatcaaccagcgcttttcaaagaagaaaagacattgaacaacttaataagacattttttgaagaagcggaagatgttgttgaaaaaatgaaaaataagtttcctgaaaattacaatattaaaaccattacaaaatatggttttccagctgaaacaattaccaatactgctaaagaagaaggtgctgagttaattgtaatttctgcttcaggaaaaagtggaattcatcaatttgtaatcggaagtgtagctgaaaaagttcttaaactttcagaaattgatgtattattagttcacaacaaataa

SEQ ID NO: 7738 - DNA, 387 bp, Methanobrevibacter gottschalkii
  source 1..387: mol_type = genomic DNA
atggatttaaaaaagattgcaattgtagttagcatacttcttataatagctattggatcttttgcatacatctctttaaacacacaagaaacaaaagttgacataattactcaaaacactatacacaatggagacattattacagttcaacttaaagatttatatagaaacggaattccaaatcaggctattgatttgaaaattttagatgactccggatgggctcataactataatgcaactacagatgaacttggaatcggtcaaatacaaatactaggccttgaaaatggaaattatactgctcatgcaaaattcaatggaactttatttttaaaagaatctgcaaatcatgtttcattcgaagtgacagacggatatttctga

SEQ ID NO: 7739 - DNA, 2610 bp, Methanobrevibacter gottschalkii
  source 1..2610: mol_type = genomic DNA
atgaatattataaacagtactagtgatttagattatgattttacaattgtattatataatatcgagaattgtattgaagattcaattaaatccgtaataaatcaaaaatatgattttaaaaaagttgaaataatttttatcaatgacggatccgataaaaatcataaaatagctttaaactatcagaaaaaatatcccaaaaactttttcatagtagaaaatgatgaaaaagatatggctgaatcactaaatttaggtctgaatcattcaaaaggagaatatattaattttttaaatagtggagacatattatccaatgatacattaagtgaagtaaattcattttttagtaaagttacttcatcagatgttgttggcattcgtgtagatgaaggtagggaaaaattttcaattgactatagctttataaaatcaaatcagattattgatatatcccaatatcctgaagttattaattctattttaagttcattttttattaaaaaagagagcgttaatgttaattttgatataaatccatatgaaaaatctgatttattatttattgatgaactactaattaattccaaaataggatttgttatacaaccaaaagttcaaaaatcaagttccaattatttaattaaaaataaaagtacattaaatcaatttaaacactattatgattccatttacactttctgtaatgaacagctaggctatattccgaattacatccaatataaaatagctattgaacttgcaagcattgttgaaattgaagacattgacgatatcttaattgacaatatgactgctagtgatgcatacagttacataaataaagttctgaatcatatcagtttaagcaatattaaaggaaatatttttattaatcagcatacacaaaatttcttattatatctgaaaaataaggattttcatattgatgtggatggaaatgaagttatattttactgcggcagttatgttttaaatgtattgacaagacagaacctttggttggatattattgaaatcaaggaagattacattaatttttccggaagtattaccagttactgtgaatatgatcatatcagtattgaagctataaaagaagcaaatggtgaaactgaaatcattcccgttaaatttattgactacagtacaactgaacgtaaagttaaaaagtttttatccgttccatgggtatatagctataattttgatgcccatattcaaatttctgactgtgaaaattgtaaaatatcatttagatatacttactccgagaaagaaactggaattactgtaatgccaaatattaaatttagaaaatttgctagtttatctaaatttagccattattttattaaagattctagaattgtattatttacacaaaattcatttttagtaatgccttattcattaaagaaagtttttaaatttgagtttagttcaattaaaaaaatacttcaaagtacagcgaaaaataaaattaaaactattggttataaagcaatatatttagcgctatttcattatatgaaaaataagaaaatttggctcatgggagatagaaaagagtttgcagatgataatgcagagtatttattcaaatattgcataaaacagaaggatgatgttaataagtattttgttgtaaataaaaactcgccggattataaacgattaaatagagaatgtgggaatattgttgctttcggatccctaaaacataagttattattcacattttcagataagttaatctcatcacaagtaaataagtttattttaaatccctttttaagaagtaatcagtttctatataatggtgtgctattgcatgatgagtgtttcatccagcatggaattatcttacatgatttatcaagctggattagaaaatatatttataatttatcattatttgttacaagcgctgaagcagagtgggagtcaattgcaaatactaactataattttgatactgaacgaatacaacttttaggtcttccaagatacgataatttagttaataatgctgataaacaaatattatttgttcccacatggagacgtgatctggatgatccccaattactcgttaattccgagtattttaataatatcaatagcattttaaataatgaaaaattaattaaactagcacgtgattacggatattctttagtttttagaccacatccagaattatggagatatctggatttatttgatatttcagatgaatttagaatttctaatgaatcatattcaacattgttaagtgaatcatcagtcatgattacagattattcatcaattgcttttgattttgcatatttaaaaaaaccgctgatttactatcagactcaggactttgaaaatttccattatgaaaagggatatttcgattatgaaacaatgggatttggtgaaattataaaaacacaagaagagttgattaataagattgaattctatatgaaaaatggttctgttcttgaagacaagtacaagcaaagatcagctaagtttttcagattccatgatagaaataactctaaaagaatatatgactggttaattaagcattaa

SEQ ID NO: 7740 - DNA, 2604 bp, Methanobrevibacter gottschalkii
  source 1..2604: mol_type = genomic DNA
atggcggataatttcaagttttcaattattgtttcaaacctatcgggatataaagattctattgattcaattatttcacaagaattggatttcaggcaaaatgttcaattgataattattaaagatagtaatatacttacatcagacattgatgaatatataactgaatatccaaacaacattttagttttggaaaataaggataatttaaattcaaggaattttgcacttagacatgctagtggtgaatttattaattttatgaaagcaggagatacctttgataaatcttgcttaaaaacagttaatgatttatttaacagcaatacggatattaatttagtttccatagctttatttgatccgatttataaaaacattatatacaaaacaccattatccgaaaatcgattaattgatatcaataaagtaaataacaaagaattcaattattattttcacctgccgatttatgcttcttttattcgtggaactgactattattttgaagataaaaatattgatgaaaacggaatcagcgtaacttctaaaatattaatcgacgatgataaatttggatttgttaaggatattttctgttatcataatcctgaaagtgagtttagtgaaaatataaactatagaaatgtaatgggaaaattaaaactattgaataatataatgcaatatgctgatgataatttgaataaaaatcctgagtttttacagcacattgttgcaaaagagctggaatatattgttagaattgaggatttaagtcaaatcagtactgatttgaataaattaaatgagttttggaatttgatggatgcagtcttaaagaatgtttctaaaaaagctataaaatcaaacaacttcttggacaattttgtaatttcatttttattatttattaaaaataaatcatttgctattgattgtagtcagcataaagtgttttttaaaactgaaaattattcaatgcttaatttgcataaccagaaattgcattttgatgttattgagataaaaaaaggaattttaaatttatccggttatctgaaaagcatttgttattccgacaatatttctgttgaagcacttttaaaagatgaaaatggtgatgtaaaatattataaaggtaaattcgtggaatatccaacaaccaatcgtaaaactgttacttttttatcccatccatggatatttagttacaattttgactttaaaattcctataaacgaaaaaaaaatagaaaaaatttcatttagaacagtatatcacgaaaattcagaatatgtaatttggaataataagatttctccaaggaaatattcaaacttatctaaattctcgcattattcagttaaagagaacatgttggttttacttaaagacaactcattttattccatgccattaaatgcaaaaagcaaatacaaatttgacctaagagccatttttcaaatacttaaagagaggccgcaatattatagaggaggcatattttacaggactttgataatgcttttatatccattttggaaaaacaggaaaatctggatgtttatggataggcaggactttgcagatgataatggggaacatttatttaaatatgctctaaaccaaaaagatgatgtggataagtattatgtcttagataaaaatgcttctgactttaaaagattgtccaaaagctttaagaatgtcattgcatttggatcatttaaacataagctgctatttttattttcccaaaagattatcacatctcaacctgctgtttcattatataatccattttttagtaaaaatattacaatgtttgcaggtttttatccgaatgtttacttcctgcagcatggggttacaaaagataatgtgtcctcttggctgcataaatttaatagaaatttatcattaatctcaacaacctcagatttagaaaagaaatcatttttagatgtcggttataattatgatgaagatattattcaaaccttaggtttcacacgttatgataatttaaatggtgagaatgcgaaaaaacagattgttataatgccaacttggagaaattacattaaaaatgaagaggatttgaaaaattcagaatattttaaaagatggaattcattaatcaacaataatgaatttatagaatatgctggaaaaaaaggttatgagattatattcaaacctcacccaaacctatacaaatttattgatttgtttgataagaataatcatgttattatagattatgttaaaaagtatcaggaaatattcaatgaatcagcattgttaattacagattattcctccattttctttgattttgcatatattaaaaaacccttgatattttaccaatatgcaaatgattatcattttgattctgaaaatggttatttcaattatgagtccatgggttttggtgaagtaattaaaaatgaggatgatattgttaataaaattaaatattatttggataatgattgtgttatggaagatttatacaggaaacgggtggatgatttcttcaaatacacagatagaaataattgtatgagaacttatgagtggatttataaaaattag

SEQ ID NO: 7741 - DNA, 1071 bp, Methanobrevibacter gottschalkii
  source 1..1071: mol_type = genomic DNA
atgtataaagtggttaatggtagaaaaagaattttttatttagactttatcagagcattggctattattttagttgttttggctcatgttacaagagcattttttcaaaattcccctgccggcagctttaatatgtgctttgtttcgcagtttattgattttggtgttattggtgttccattatttctgatgataagtggtgcattacttttaaataaggattatgaacttggagatttcttaaaacgaagatattctagagttctggttccattcttattttgggcgatgatatttccgattagcaaaattctatttgaaggtcaggttgcaactgttgctaattttataaaaatgtactttgattctaacttttggtttgtttggatgattttaggtgtttatctgttcattccgattataaattcgtttattaaagaatatgatatgagaggtgtagaatactttttattgatctggggaggagtgatgtttttaaacacaatcgggcagtatccttttcatcaacttgaattaagctattttgcaggatatttaggttattttgtactgggttactatttagccaataagaaattcagattgtccgattcaaagttattagtgatttcattgctgatatttctaacattcacattcattaacattgattatacaattacaatgtgcatcttaaaaaataagttactctattataaatatgaaactattgttactgtagtgcagtctgcaggattattcatgtttataagatattttgcattggttagtagcaataaacctgaatcgattaaaaacagaatttatttattctttaaagattcattcatgtttaaaataatattttcaattagcactttcagctacggtatttatttagcccattataatccgttgtttttccttaaatatgaatataaaatattattcacatttaatccgattatatggttaccaataatgatgattgcaataataggtagttcatggtttattttatggatttttgataagatacctggtttaagaaatataaatggtgcacattaa

SEQ ID NO: 7742 - DNA, 819 bp, Methanobrevibacter gottschalkii
  source 1..819: mol_type = genomic DNA
atgaataaaaagataggttttattttagctttagtagttatatctttaatgatgtgttctactgtaagcgcaggtttatttgattttatgggaggaagtgattcatcaaatgatgataatactttcgttgttggttttgatgcagaattcccaccatatggatacaaagacgatagtggaaactacactggtttcgacttagatttagcaaaagaagtttgtgaaagaaacaactggacattcaaagcccagccaattgactgggatgctaaagatgtagaattagattctggttctattgactgcatctggaatggatttactatggatggaagagaagacaactacacttggtctaacccttactttgacaacaaacaaataattgttgttaaatccaactccggaatcaacactccggctgatttgaaaggtaaaatagttgaaacacaaaaagattcctcagctttagctgctcttcaaggagataacaaaactttagctgatacttttggaactttaactgaagttgctgattacaatactgcattcatggatttagaatccggtgcttgtgatgcaattgctatggatattggtgttgcagaatacgatattaaaaataaaaacgctactagtgattaccaaatcctaaaagaatccattaccagtgaaaaatatggtattggattcaaacaaggaaacactgatttaaaagacaaagtacaatctaccttagacgatatgtttaaagatggtactgttgctaaaatcgcacaaaagtatggtatctctgaagatgctttaatccaaccataa

SEQ ID NO: 7743 - DNA, 651 bp, Methanobrevibacter gottschalkii
  source 1..651: mol_type = genomic DNA
atgatattaagtaacgtgattggacaattgctcggaggtatggttacttcggttgaaatatttttacttacattattattctctcttcctctcggtttagttgtagccggaggaagaatgagtaaatttgcaccattaagatggctaatgaagatttatatttcaataatgagaggtacaccattaatgttacaattaattattgtatttttcgcaccgtattatgtgtttggtatgagtctatctgcagattatagatttatagcagtcattattgcatttacaattaactatgctgcgtattttgctgaaatctatagaggtggaattgaagctattccaaaaggacaatacgaagcggctcaggtattaggatataataaatttgaaacatttttcataatcgtattaccacaagtatttaaaatagttcttccttcaataactaatgaggtaattactcttgtaaaggatacttccctctcatttgttattgcaattccagaaatgtttactgttgcaaaacagattgcagctgcagatgcatcaattgctgcattactcgttgccggtatattctactatgtatttaatgtaatagttgcatttgtaatggaacacttagaaaatagattagattattatgactag

SEQ ID NO: 7744 - DNA, 684 bp, Methanobrevibacter gottschalkii
  source 1..684: mol_type = genomic DNA
atgagtttacttgaaataaaaaaccttaaaaaaagctttggagataatgttgttttaaaggatatttcccttaatgtagacaaaggtgaggtattgtccattattggtccatccggatcaggtaaatcaacattgcttagatgcattaccgatcttgaacaggaagacagtggaattatcaattttgatggcgcattcggattggttttccaagattttaatttatttccacatcattcagttattaaaaatattacgaatgctcctctaagagttcaaaaaagggataggactgaagttttcaatcatgcacgtcatttgcttaaaaaaatgggtcttgaagataaggaagatgcatatccttgtgaattatccggcggtcagcagcaaagagtatcaattgcaagagcacttgcaatgaatccggatatcttattttttgatgaaccaacttccgcacttgatcctgagttgactggagaaattttagctgtaataaaacagttagctgcagataatatgacaatggtcattgttactcatgagatgaattttgcccgtaaagtctctgattcaattattttcatggaaaatggagtaatcgttgaagaaggttcacctgaagaagtattcacatccaataataaaagaatgcaagaattccttggaaaatttaatgattaa

SEQ ID NO: 7745 - DNA, 1512 bp, Methanobrevibacter gottschalkii
  source 1..1512: mol_type = genomic DNA
atggaaaataatgatgtggactatcttgttatttcttactattttcctccacgtttagaaaccagtggtttagtagttgcaagaaaaattatggaaaaaaatcttaatgttgatgttattcaaagtgcttatgatgaatcttctgattttaatgaaataataaataaacatatcaataacagatttccaatagacattaaaactaaaccggattatattccatttatttttaaatatattgatttaggactaaaagccattaaaaaaaactataaaaaagtttatagcagatcttatatttattcaaaccattttttagctttggaatataaatttaaaaatccgaatgctgaatggacagcggaattctcagacccattacttttaaatctctacaccggtgcgattaaaaattatccaagagctattcttgataattcggattatataaataagcttaatgagaaaatagaaaagttcaatgaagtcagtgatactgattttaaagctttggacaatccaaacaatacattttttatggctgaatatctgacattcatatttgctgataaaatcatatttacaaacgaaaatcaaagagaagtaatgttatcagtttatgataatgagttaagagaatttgtaatgaataaatcaaagttagaagctcacccaactattgataaaaaattttataattttaaagattgtgaaatcagattagacaataacaatatcaatatagcttattttggtacttattattacattagacattttgaatcactgttttatgcatttgaagcacttaatcacaaatataaagataaaattaaactttactttttcacgtcacgtgctgaattactaaaagtcgcaacaggcagtttaaaaatttcaaataatattatcattgaaaaaccattaaaatactttgaatttctaaatgcaactacaaaattcgacattttacttataaatgatacaattaccaaaggtcattttaaagtgaatccatatttaccttcaaaatattctgattacatcggttcgggatcagatatttggggaatatgtgaagaagacagcatattgtctaaaaaagaattaatgtataaatcttcaatgactgattatcagagttcatgtgacgttttaattgatattctaaatgattatggatatgaagatcaggattactattttgaagataatatatatgaaaaaagaataaatgaacttaactggagatttggttttgaatttgacgagcgaaaaaaatacctttcccgatataacaatttaaaagaaaaaaacatgaccttaaatggtgaactgcaaactttaatgaataaaaacaagaaacttaaagctgaaaatgatgttttaagaaagaaaaataagaatctcaaaaaagaaaatgaaacacttgaatccaaatacaacgaaattgttaattcaaatagctggaaaataacagaacctttaagaaaacttaaaaacagtaaatag

SEQ ID NO: 7746 - DNA, 723 bp, Methanobrevibacter gottschalkii
  source 1..723: mol_type = genomic DNA
atggtaaaggtttcagtaatattaactgcattcaatgaagagaaatatattgggaaagctattgacagcatattaaaacagaccttaactgattttgaattaattatcgttaatgatgggtcaacagacaatacgctaaacattatcaacagctttgaagatgaacgaattaaattaatcagtcacgacaacataggacctggagcaagtagaaataaagcactgaatattgcaaagggagaatatataatgtatcttgatggtgatgattggtatcgagtcgacggcttggaaatagcttacagtgaagcaaaagataaagatactgactttacattctatcaaatgatcaattatgatgaaaaaactggaaaaacatatgaaaatgattggtttaacttaaatatctttgatgaatcatttgaaaatactgttttcaacattaatgattttaaaggttcaatttttgacttgtctgttggtgtttgtcaaaaaatatataatacatcattcctaaaacgtattgatgctaaatttccagaaggaatcttatttgaggatatgccctttttttattatgtattattaaaagcagacaaaatttccattattaaacagcagttatactacagaagaaaacatgatggatccatcacacatgtagttgatgagaaattcttagatactgttcctgcaggccaggaactaattttccattattaa

SEQ ID NO: 7747 - DNA, 273 bp, Methanobrevibacter gottschalkii
  source 1..273: mol_type = genomic DNA
atggaaaatggatggtatgatacatacaaatttgacttacttgcctataaaattaatggacctcgttttgctttaagagacattgaagaaaattataagattccgctttacatgttaattaaaaaagactaccattcaattaaacaaagcaaatattatcaggactatttggacaatcttggtccggtaaagaaaaaattctttttagacataataaaatcaaaaaattataatgactatttggcacttaactcagacaaagacaattattaa

SEQ ID NO: 7748 - DNA, 972 bp, Methanobrevibacter gottschalkii
  source 1..972: mol_type = genomic DNA
atgaatataacagtcggtgttattggagcaggtgccctcggtactgcaatatcccaaaatattagtggaaatgtagctgagataatattacttttaagaaataaagaactttgcgatgaaattaataattgcagatacaattctcagtattatccaaattataagttaaaggataatattaaagctactttggaaacaggtgatttatcaaattgtgatattatttttttagcaattccctcttctgcttttagaaaaacattaaaagatttacaggatattgtaaaaaaagatgttattattgtcactacagctaaaggaattgaatatccatcattaaaaacaatgggtaatttaattgaagaatattttgatgaaaattatgttgcactgtcaggccctaattttgcatctgaaataatgttaaatctgccaacagtaacaaatattgcttctaaaagttatgaaaactcagttaaggtaaaaaaagtgttatcaactaagcaatttaaagtgaaaattattgaggatatttatggaatcgaactttgcggaatattaaaaaatattaatgcaatagccaatggtatttgcgaaggtatcaatattaatgaaaatgcaagatttgctgttttaactaaaggttttaacgatacaatcaccatcataaaagcaatcggaggtaaatctgaaacggttcatgaatattgcggatttggagatttgatattgacttcaacttcacgtgaaagcagaaatcataccctgggaatattatacggtcaaagattgatcatcaatgagaatgctaacggagttgtatttgaaggaaaaaattcgattaaagccatcagagatatctgtttaaaaaataatatccatagtgatattgtaaactttgtatatgatgtaatgattagaaaagtaacacctacaatagcgttcaacaatttatgggaaaacatggaataa

SEQ ID NO: 7749 - DNA, 768 bp, Methanobrevibacter gottschalkii
  source 1..768: mol_type = genomic DNA
atgatgattggtgtaattttatcagccggaatgggaacaagattaagaccattaacagacgaaattccaaaaccgttactggaaatcaacaatacaactttgcttgagagaatgattagaaactgtataaatgcaggaatccgtgaatttatattaattgtcggatatgaaaaagaaaaagtttttgaaattgctccgaaacttgaggaaaaattagacatatccatcagaataattgaaaatatggaatatgatgcaactaacacttctgtgtcagcttatcttgcaagttcttacattgaaaaagagaatttagatgattttatactaattaacggagataatgtggtagatcctgaaattatcacaagaattgcaaaaacagacaatactagtttaattgtagataactttaaagacttgaatggagaatcatttaaattgattttaaaggatgtaaaaaaagcagataacagcattgcaaatggtattatatctgaaatcggaaaagaaattgatataccctcatcaactggtgaatttattggtgtttcaaaagttattaaagaggatgtaagtcgttttaatgaaattttaatcagattaattgatgaagacaggcaaaattattatgattttgcatataaacctctctcaagagatagaaaaattgattttgtgttaacaaatggtcttaaatggactgaaattgatgattataatgactggaaaaccgcaaatggattaattaaagaatttgagaactaa

SEQ ID NO: 7750 - DNA, 1698 bp, Methanobrevibacter gottschalkii
  source 1..1698: mol_type = genomic DNA
atggctttaataggaaaaattaataacttaaaagaatgcttggataacaccaaaatttatgacagttattacagtgccgaaattgatgaaagcattatttatctggagtcaagaaacggcatggattttactggaaatatttttagaataactgaagagttatccacaggcaaatatggtaattttaagatatatgtttatgcagcaaaaagtattaaagctaaaattgagttatttaaacggaattataatttaaaaataactaaaatcataactgatgaagatgaagcaactaaaatcttacataaagctaaatatatcttcacagattcaggcattagatataaatatgttaaaaaaccggggcaaattttcgtcaatacctggcacggcactccattaaaattaatgggattcgacaacccatcagaaaaacataatgttggaatcatacagagatcttttcttttcagtgattatattttatttccaaatgaatatatgttagatagaatgtctcatgcgtatatgattgataaagtttatggagggacatttttattagagggatatcctagaaatagtgtttttttaaaggataactccaattataaggaaaaattaaatttaaaagataaagaagtttttgtatatatgcctacatttaaaggaattgtgaataatagaaaagatgaaaaacagaaaaatgatgtcaataagtttttgaataaattaaattcaaaattaaatgacaatcagatattgtttgttaaatttcatccgtacaatcagtccaaaatcgatttttctaaatttaatcatattaaagagtatccaaaaaactttgaaaattatgatatattaaatgctgctgatgttctcattactgattattctagtgtattttttgattttgcaagtactagaagaaaaattattatttttaactatgatcaggatgaatatctcaaagataggggattatattttcctcttgaagatttaccattccctaaagtccagaatattaatgatctggtatgtgagttaaattctccgaaaaattatgacgatacaaagtttaccgaggaatactgcaaatatgattcaaccaatagtgcagaacatatatgtgaaactgtaattaatggtaaaatcgaatgcgattacaagataatcagtaatgcaaataagaatatattaatttatctgggatctatggagaataatcaggcaaaaagtcagcttattcaaatccttgaaaatacggatgataatatcaatattttcctgtcatttaaaccttggaataaaaatattaaagaaaaccatttaaatttattaaaggatattccaaatactattgaatttttaccgttaagttataatttaaccccaacattcaaagaaaaagtggaattgaacagatttataaaaaaaggcactgatttgaatttggaactaacagaaatgtttaataggaattataaaagacaatacggtgattttaaattcgatttaataattgattttataagtaatgatccggaacagtcattaacatatgcatgttctaattcaaaaaatgcgattatcataaatgaagaaacacaaccgaaagtttacaatcaatttaataaaatttacagattatccgagttcaatataaaaaatatatgtgatgaaataatcagataa

SEQ ID NO: 7751 - DNA, 855 bp, Methanobrevibacter gottschalkii
  source 1..855: mol_type = genomic DNA
atgaacagactaaaagcagctaaaacaatatcggcaatcacaaatcccccaatcatatgcattccattatttcttataatatgtataattctatcaaatggaaatttcaatagcttcatagttttggagtcaatttcactggttttcacatcaattctaccaatgattattattgtttattgggctaaaagacttgatactgatagagatatttcaaatcgcaaagaccgcttcactcccctaattgttggaataatatcatatttcatcggttttctggtctccttaatattggggactaatgattttctaacagctcttcttttatgctactcaataaatacaggagtggtactgctgataactgtaaaatggaaaataagtgtccatacaactggactttcaggtcccgttggtgcattaattctacttttaggaccaactggtgcattatttgggataatttatccaattttgatatggtcaagagtgacacttgaaaaacatacatcggcacaggctattgcaggtggagttcagggattctttttaacagttctagagatgtatatgttcatttcattgttcaacttcaatgttggcaatttagtgcccttgactgattgcatatggtatattttggctataatatctgcaccagtgattttaggcatactctcatatgctcatatgaataaaatagtttttagtgcagcggtgataattggatttacagtctttttagaatatgcgccattaagtgcatctgtaatatatattcttgtctgtttaactagctgtctgattagcttatatgctggtgaggattatgagtggtctgatgttttaatttaa

SEQ ID NO: 7752 - DNA, 579 bp, Methanobrevibacter gottschalkii
  source 1..579: mol_type = genomic DNA
atgaaagttaatttaaaaccccatgcaatgatgtatccttcacctgctgttgttgcaagtgcttatgataatgatggaaaagttgacgcctgcactcttgcttttgcagcaatgtgttcccacaggcctcctgccgtaatgatagcaatcaattccactttaaagagaaaaacattagcaagtatcctaaagacaaaggagttttgtttaggttttccaagtattgaacatgtcagggaagttgattatttaggaattgaatccggatataatctagataaaatagacaagatccgttttacagctaaaaagggagagtttgtcaatgcacctataattaatgagtttaaagtatctattgaatgtagggtaatggacattaaagaagttggaagccatactcaaataacaggtgaaattttaaatattcaggctgaggaaagcgtattggacgataggaataaagttgttttaggcctgttaaatcctatagcttatgatgacataagccattcatattttaaaatgggtggaaaaatagctgatgggtttaaggttggtttaaagtttagggaatga

SEQ ID NO: 7753 - DNA, 450 bp, Methanobrevibacter gottschalkii
  source 1..450: mol_type = genomic DNA
atgaaatcattagtgacatattattcaagatcagatataacaaaaaaattagccgaagacattgctaaccaattaaactgtgacattgaagaaatcaaacctaaagtagattatcatggaaaattaggttatgcacgtggaattaaagatggtagagcaggtaaaattgtggaattggaatcattaaaatacaatccgcaggattatgatgtagtatatgttggagggccagtatgggccgctaaagctgcaaatcctgtgatttcatatttaaaagaaaatgaaggcaaatttaataatgttaaattcttcataacagccggaagcaaaggctttgaatccagcttggaacaaatggaaaacacctcaatgaaaccacttaaaactttacagttgagagctaaagaagttaaaaacgaagattatgatttaacatcctttttagaataa

SEQ ID NO: 7754 - DNA, 471 bp, Methanobrevibacter gottschalkii
  source 1..471: mol_type = genomic DNA
atgattaatgaagaatttagactcattgatgcttcagaacttccgatcagtaaactgataacgatcattgcaaaatgccagtcattttacttgaacaatatgttaaatgaatcgggcattaattcaacacaactgcacattctctttgaaatatcccatcagaacaacattaatcaggaaaaaatagctgctagatgcagcatcaacaaaggtgctgttgcaagatccattaaaaagttggaggatatgggattagtcataagggaaatcgatgaaaacaataggcggcaaaataaagtttccctaacacaaaaaggagaggagctattgaacaaaagtattaaaatcctcaatgatctggaacaggaagtatttgatgatgaaacaataaataaagaagaattgcagaatgttttaaaggaaattacaataaagattatggaaataactgaaagggaggtaaaaaattga

SEQ ID NO: 7755 - DNA, 1386 bp, Methanobrevibacter gottschalkii
  source 1..1386: mol_type = genomic DNA
ttgagcaaaaatgataatatcaaaataataactggtgatcctaaaaaagctattgttaaattagccatccctatgatgatttcaatgttactcatcatgatgtataatattgcagatagtatctgggtagcgggactcggtgcagatgctcttgctgcaatcggatttattacaccgctgtttatggttttagttggacttggaaacggtataggtgccggggcaaattctttaattgcaagaaacattggtgctaaaaattacaaacaagcaaacaactccggattacatgccatcttattgtctgtaattgtatcagtaatatttaccattttaattgaaggatttatggtgcctatattgcagtttatgggagccggagatacaatccaatatgcaatggactacagttatatcatattcggattcctgttcatatttgtatactcaggagttgcatctgccatatttagatcagaaggagacatgaaacgttcaacaattgcgattgcaatcactgccgttttaaatattattttggatccgatattcatttacatattaaaccttggaattgcaggtgccgcctgggcaacagtaatatctgcaacaatgtcctgtgttattatgagttattggatatggggtaaaaaagacttataccttgatttgtcccttaagaactttgattatcaaacaagtttaatggtggataccctgcaggttgccataccttcaacattagaaaatatagtattttccgcccttgcaatcattattaacagcatgctagttcttgcagcaggaaccaccgcagtagcagtatataccgcatcaatgagaattgtgcaattagcgatgattcccctaatcggtcttggaacagcggttcttacagttgcaggtgttgcatatggtgcacataactacaagaatttaaaaaccgcacattcctactcaataaaagttggttttttaatctcaatcatacttggagcaatcatgtttgtattttcaagcccaattgcaacaatattttcatatactgcagccagtgcaagcctgtcacctcaaatcgcaactgcaatatctgtattaagcctctttgtccttgcaattcctcatggaataatgtcttccatgatgtttcagggagttggaaagggaacatattccctattgatcacacttcttagatctttaatcttagaaacagtctttgcatatctattctgtttcacttttggatggggattaactggaatttatgcaggtgttgtatttggttgttttgttggaggaacaatcggatatgtctgggcaaaattattcatcagaagattcaaacagattgctattagaaaatatgctccgcaagaaaactag

SEQ ID NO: 7756 - DNA, 441 bp, Methanobrevibacter gottschalkii
  source 1..441: mol_type = genomic DNA
atggaatttattttaaataataaaaaatattcaatattaaaccatgagctatttatcaattatttaatggttgacaactattttagaaatcattattccaaatatgattatgaaattagatttgattttataacacccctattaaataaagaaaaaattaaatttgaagacatattggctggtacaaaaaatttagaagaattgattgaaagggaagagattaatttcatccccccaggtcttaaaataaatcagcatactaatggaaactttaagatcacctatcaggatttggattttaacaacatcaccgtaggtgaagctattccttttttaattgcattaaattctcttttaacttacaaaccaattgttacactgtcacagattgaagaagaacttgagaatttcattgaaaaattcaggtcatacaataaataa

SEQ ID NO: 7757 - DNA, 651 bp, Methanobrevibacter gottschalkii
  source 1..651: mol_type = genomic DNA
atgtactgtccgaattgtaatagtgaaaataatgattctgcaaaattctgcaagaaatgtggaacaccgttaaagaaagaggttagtcataaaaaaataattaattccattaatgatgaaaaatcaagtaaagatgatattaccaagtacataatcattgcattaattataattgcaattgcccttgctggagcatttgcttatatcggatttggaaatcataatgatgatgggcaaacacaagttcaaaataatgcatcatccagtcccaatcccgttcagtcaacacaatcaagccagcctcagcaatcaagttcagcacaaagtgctgctatggatatacttggaggtagtttttcaactggcagcagcttgtctgcaaaaacatatgccagcatctatgttggttcacaacattccggtgaaaaagtaataatacaaattaaatattcaagagacggatctagtttaaataatgggaatatggttccaaaaacagttgactcatcaggatacattaatgtaaaaagtgctgattcattcaaatattatcctgattttgctgaaatcaacttatttgacactaataaaaaccttttagatacacaaagtgtttcattaagtccagatagtagtactcaaacattctag

SEQ ID NO: 7758 - DNA, 480 bp, Methanobrevibacter gottschalkii
  source 1..480: mol_type = genomic DNA
gattctgatttggatgatttaaatgatgattctgatttggatgagtttgatgatgattctgatttggatgagtttgatgatgattctgatttggaagatgtggatgattctgattttgaggattatgatatggaaaattatgattttaaacataatctacttaatttaaatataacatataaagcctgtagttccagattaggcgctacttctaatctaaataatcattcagtcaatgaaacaaaaaaagattcaaatcccaatactgaatcaattgaacacgctaaaaaggcaaaatctgttttgaaaagtataaatttacctagtgaaaatcaaagcaattatgataagaacattagtgggaataataatgaaaaatcaaataatgaggaaaacaaacaaggaaacaattatttaactatcatatcaattattttggttttgatattagtaattattgcatgtaaaaagttatattaa

SEQ ID NO: 7759 - DNA, 498 bp, Methanobrevibacter gottschalkii
  source 1..498: mol_type = genomic DNA
atgtctggaattcctaaaaaagaaataaaaaaacacattcctgttaaagatttggataaaagaattaaaaagttagaaaaagatgtaaaagtattaaataggcttcattttataaaagcatgttattctggaatgagtattaaagaagcagctgaattaaatggaatatcttattcaaatgcatatgtttggtttaatagatggaacgaagaaggtcctgagggcataattccaaaatacgctggaggacgtccatcatatctgacttcagatgaaaaaatagaattagaaaaattactccaacaagaagaagttataacaacagaaatcgttcataaaattattaaagataatttcggtgttgattatagtcataaacaagtaagaatcattgttaaaagtttgggttattcatattcaaaaccatatccaataaatattgaaactgattctcaaaaagttgaaatctttaaaaaaaactctcacaattcaatttaa

SEQ ID NO: 7760 - DNA, 165 bp, Methanobrevibacter gottschalkii
  source 1..165: mol_type = genomic DNA
gtgattattggggaagggcatattttctcagataatgatttcaaagaggatttgttaaatgttggttttaaaattgtaaaatttaataggggtgaagcaacatatgatttcgcatttatcaaatctgattatttcaattattggccattacttaaaagagaataa

SEQ ID NO: 7761 - DNA, 1380 bp, Methanobrevibacter gottschalkii
  source 1..1380: mol_type = genomic DNA
gtgcagattattgataaaatcaaactaaagttattaaattcaagtaattcttataatttttataaaaataattatttagctcaaaatattcaattaaaattacttaatgaggaattggaggataagaattctgaaattaataaatttaatgagattgtgttagaacaaggtaataatttaaaattacttaatgaggaattggaggataagaattctgaaattaataaatttaatgagattgtgttaggacaaggtaataatttaaaattacttaatgaggaattggaggataagaattctgaaattaatagagttaattatagaattgataaaatgttatcatttgacttgctttttaaagaaaatttaacaatgtttaatactcatattaaagagatttttgataatcaacgagattttgcatcgaatttaaatgaatactatgaaaaattaagttataggagcaatgaagttaatgaatcattaattaagtttgaaacaatgttatctaaaagtaataggggaatggatgagaagtctgatgttattcttgattttattaaaaatgagaatattagaataaacaatcatgttgaaatgttatttaatcatcatgtgaaagaattcaataaatttaacaaaaatataaagaactctatggattttattgaaaataattataagaactgtagaaaatatttttttaagggtaatgaatcacttttagagccttatttggatacggatttcatgttcaacttttgttattttaataatatagaattactttcttattctcctaaagagaatttgatattgctaaaaaataaagatgggattgttattgggacaaataatcacctttggacaattatggaaatttatggtttaaatgaatatatgattccaattttattttattttgatgattttgttgtgtttgatattggtatgaatagagcatatgctagtttgagttttgcaaatatgcaaaattgttcttcagtttttggatttgaaattgatgaatttgtatattctaaagcaatagataatatttctttaaatccaaatttagctaataaaataacaacttataattttggactttcggatgaagatggcattgttgaattatattgttatgaaggtttcgatggtcttaatacgatgatgtatgattttttagaggctaatccttcattaaatttatataaagataaacttgatgtgaaaaaagttcatgtgaaaaaagctagtgaggtaatattagacattatttcaaaaaataatattacatctaatattgtactaaaaattgatactgaaggtgcagaatataagattgtctatgatttaattaaaatccgatttaattaa

SEQ ID NO: 7762 - DNA, 1395 bp, Methanobrevibacter gottschalkii
  source 1..1395: mol_type = genomic DNA
gtggttcctattaaagagtttacacaacctaaaatttcaataatattaaatttaaatgatgtaacagaaaaatattttgaaaaatgttttgattcaatatgtaatcaagaattagattatgttgaaatcatttgtgttgaaaatgaaaactataaatttgataaatttcaaaaatatttattagaatatgagtttattaaaattttcgatgaatattatcttcaaaataattttaatttaataataaattctgattacattttatttttaaacgcaaaagattggttattatttgttggtttgaaacatgcatataatttggccattgaaaatgatatggatattttgattaattcttataatatatttcatgaattttctggtgaaattgaagatccttaccaagaagaatatgctcaattaaataatttaaatagtttttctggtaatgattttaaaaacattttatttaacatgccgaaatattctttcaatctttataaaactgactttattaaaaaattgaatttaaaaatcccattagacttaactagtcagatctctttttttattaactcatcaatgatgacttcacgcattgggtataataataaaccattattatataatagacttaatgaggaaaatgataatttaaattattataatttgatttgtaatgattttaattttggaatttgtgaaaataatttagaaattaatatggattctattattgatacttattttaatatattatattttttagaaaaagagggaatttacaattgtaataaatattatttgtggaattatatttttagagtatttagacgcatatatttacaaaattttaaaaataatattgttatttttaagaatattcatgatttttgtacaaatgttttttctaagtatcataatgatttagttttaaatttaaaaatagaaaacttaactttttataggtctattttaaaatcaaattccatttatgaattagaattattatatgaaaataataggttagttttacaaaatgaaggaaaagataagattattaatgaaaaaaataatttaatatctaatttaaataatgatttggctaattcttcaaaaaaattggatgttgaaattaaaaagtatttaaatatattggatgataaagataatcgaattaatattttagaagagaaatattcttatcaggttcatgaaaataatctattaattgcgaaacttagtgaagttgaaacatctcgttcatggagattaactaaaatttttagaaaaatagggatgtttaaatcaataatcgttttagttactgttgggtttataatttttttagtaatgtatatattaattattatgttgatgttaattattaaatag

SEQ ID NO: 7763 - DNA, 2571 bp, Methanobrevibacter gottschalkii
  source 1..2571: mol_type = genomic DNA
atgggatttaaggtcagtattataataccagtatttaatgttgaattttatattgagtcctgtatattatcattacaaaatcaaactattggttttgaaaatttagaaattatttttattgatgattgttctacggataatacttcaataatcatagaatactatgcaaaaaaatataaaaatattagggcaatttattgtaatgaaaatagtggagttgcaggtaaaccccgtaatattggtatggttaatgccacatcagattatataatgtttattgatcctgatgatactttttctaaagatgcatgtgaagttttatatgataaaatctctaaatcgaaggtggatgttgttagtgggttacattccaaaaaaattcatggtgatactgatattatttttccaggtttgttaataagtactttcacaaatcccaatgatagttggcaaattaggaaaaaacaattggctgaatacttaaaagattttgatgagctttattttgaatctttggatgaaatgccttatttattaggtaattttgccataatgagcaaaatttatcgtaaaagttttttattttctaataatattaattttcctgaagaaatacccggtgaagattcagtatttttattaaatgtatttctaaatgctaaaggaattatttttattaataaaataatcttttcttattatacttcacgtgatgatgaggataatgcatcgttaacacatcaaagtgatttgtcaagaaatttaggtagattaaaagcatataaaatgatgttaaaattatcaaaagatcatgataaattagatgagtttgttaattatcttctttgtggtaagatgaattatttcttaaatcaatatgttaataataaaaatttatctaaaaaggagattagtataattattaatgaaagttatgatttatttactttgattaataattctaattgtaaatttgattctgattataaaaaattagttgaacttattattgataaaaatgtggatgagctttataaatactcagaaaatgatgtttttcatattgtgacaaataatcatgaaactaaatatattaaagatataaaagtagcagttataatggatccctttacttacacttcatatagcaatgagtttgaagatattataattgaaccatcatcttggttagaaacttttgaaaatgaaaaacctgatttatttttttgtgaatccgcatattctggagttaacaaaaaaagtgtgataaatggggttgcaattgaagataatattactccttggcagggaaaaattgggttaaatttaattagtggcaatgataataggaaaattctctttgatatattaaattattgtaataatcataatattcctacaatattttggaataaagaagatcctacatctttcgatataaaacaatataattttattgatacttcattacattttgattatatttttacaactgatgaagaaactattcctcgatataatgcaagaggacatgataatgtttatcctttattgtttgcatcacaaattaaattgttcaatcctatagagtataaaaaacgtactaacgatattatttttgcaggtagttggtataatcaatttagtgaaagaagtaacgttatgagagaattttttaataaaataattaatagtgattataatttgaaaatatatgatcgtgcttcagagattaattctattaataggaagtttcctaaggaatattctcgatatgttttccccaaagtacattttgataaaatgcctagtgtatacaaagagagcaagatatccttaaatattaacactgtaacaaattcttacacaatgtttgctagaagagtgtttgaattaatgtcatctaatacattggtgttatctaattattctaaaggtatttttgatttatttaaagataatgttatttatttagataaactcagttctttaaatttagataaaattgatattgaaaatatttgtgaaaataatttatatgatgttcttgaaaatcatacttattataataggtttaaatatattttaaatattatcggatttaaatttaaagaagaaaataataatcttattataatttatggtttaaataataaaaatgaactggaaattattttaaatgactttgaatctattaagtatgttaataaaacttgcttaatctatgtaaaagataataatttattgaatagtttaaatgaaaggtttattgaagatgttaaatttattggtataaaagaattaatcatgatttcagaagaatttaatcagagttatttttttattattagggatttatttcatccacttgaaaaagattttattagaagggcttttttgcattataattatcttgataagaacattggtgtcaaacagggaaatcctaaatataatttagctaaaactatagaatataaaaatattttatttaatattgaactgttagataaagtattagaaggtttattaaaatatcgattaaataaattaacaattcttaatatctaa

SEQ ID NO: 7764 - DNA, 1236 bp, Methanobrevibacter gottschalkii
  source 1..1236: mol_type = genomic DNA
atgaagatatgtattttgggtcaaggatacattgggcttccaactgcagcactatttagtcttaatcattgtgaagttattggagtggatatctttgaagatatgataaataatttgaataaaggtattattcatatagaagaaccaggaatttcgaaaattattaaaaaagcgattgaatcaaatgtttatagagctagtttaatccctgaaaaagctgatgcatttataattactgtaccaacaccgtatattgttgaaaattatagttgtgatttaagttatgttacaactgcatgtaaatcaattttaccttatattgaaaaaggtaatactgttatcattgaatctactattgctcctatgtctactgatgatgtgattaaacctatatttgaaaatgctggttttattattggtgaggatttattccttgcacattgtcctgaaagagtaatccctggcaaaattattgatgaattaattcataatgatagaatcattgggggagtaacaccaaaatgtgcagtaaaagctagtgaagtttatgatcagtttgttgaaggagagctaatacttactgaggcaaaaaccgcagaattatctaaatgtatggaaaatacatttagggatgttaatattgcacttgcaaatgaacttactaaaatttgtactgaaattggtgttaatgtattagatgttattgaaatggctaataaacatccaagggttaatttacattcacctggtccaggtgttggagggcattgccttgcaattgatccttactttatttatgctaaagcacctaaaactgcccatattattaaattagcacgtgatacaaacaaatccatgccagattttgtatgtgaaaatgttgaaaaaattatttcgaaaggtaaaattgcaattttgggtgtttcttataaaggtaatattggggatgatagggaaagcccatcatatgaaataatcgctaagttatgttcaaagtatgaaatttctatacatgatcctcacattgataatcctaattttgtaagtttaggtactgcagttaatggtgcggatttaattttagtattatgtgatcataatgaatttaaaaacatggattatgatttaattaaagataaaatggaaaaagcaataatttttgatactaaaaatataataaaagaagttccagatgatatcaagttatttaactatggaaatttatactctatttaa

SEQ ID NO: 7765 - DNA, 438 bp, Methanobrevibacter gottschalkii
  source 1..438: mol_type = genomic DNA
atggataaaaaatggatagtattaacgatatttttggtaatttttggctttttaatattaaatggattaaataatagtatacatgttggagattcctatttttctctacctgaaggatatgtggaaggaaatattgttaaatataatgatgtgaatataactaatggaactacttcattaagaattatagaatacaatgataacaatattcaagagcatattgataaatatgtgaactatagcactaatcataattattctacaaaaattaataattttaatgttgatggtatgaatgtatataaatctgaaattatacaaaataataaaacattccattattggtttattaaaaaagataaagtttatgaaattgtaacatgggatggaaatagttacactgataatactgtatttaatttaattaaatcaaattaa

SEQ ID NO: 7766 - DNA, 867 bp, Methanobrevibacter gottschalkii
  source 1..867: mol_type = genomic DNA
atgaaaaatttaattaaaattaatgttgattttgaggaattagataattataaatttataatggatgaacctttttctttagaagttaattataatcatgttaaatataattttattataaaattttcaagtaataataataatttaatttgttgtgctcctggtgcacaagataggaacaaaagaacaagtcaaggggaattaattaaacctccgtattttgacagatggtcatggtttaaatattttgaggaatcattcattgctttttcagatcctattttttattatgataaagaaataacattaggttggtgtgtaggtgataaaaatcagtggtatgctgaaaatatatccttaattattcaaaaattagctaaaaatcaggaaataattaatgagaatattctattttttgcaagttcaggaggtggatttgtatctataatattagctactttaataaaaggttcaaaatgtgtagttaataactctcaattttctatatttaatttttatgaaacacacataaatagactttttaaatttttagaaaattcatttagactaaataaatctgaaataactgataaaatagattataggttagatttaataaaattattcaaaaaagaaaattatatgccttctattacatattatgttaatgcatgttcaaagtatgatattaaatatcatgcaatgccatttatagaaaatgtcatgtttattcctcaatttaaagataatttaaatgtacattattatcatgagtataaagactttcctcataatccaatgagtactgataaaattttagttattctcaaaaattttattaaaataaatttatataataatttttag

SEQ ID NO: 7767 - DNA, 534 bp, Methanobrevibacter gottschalkii
  source 1..534: mol_type = genomic DNA
atgcctacttggagattacaattggaaagtgaagatcttttcttaaattctaaatattatgaaactttgaataattttttaaataataaagaattattggagttattaaataaaaatgactataaattagtattcaaacctcatgccgaattaatggaatatcttgatttattaaatgttgataatgatgtttatatatctattaatgaatcttatcaagatttgtttaatgaatctgcaatacttatcacagattattcatcagtattttttgattttgcttatttaaaaaagccagttatttattaccaagataataatgattatcattatgatgagggttattttgattatgaaacaatgggatttggtgaagtaatttctgatgaaaatctgttgattgaaaaaattaagttttatttagaaaataattgccaaatggaatataaatataaatgtaatgttgaaaatttttttaaatttaatgataaaaagaattgtgaaagagtttataattggattttaaataattga

SEQ ID NO: 7768 - DNA, 1926 bp, Methanobrevibacter gottschalkii
  source 1..1926: mol_type = genomic DNA
atgaaatataattttaaattttctataattattgcagtttataatgcggaaaaatacttaaatgaagctattgattcaattattgatcaatcttttgattttgaaaaaaatactcagttaattcttgttgatgatggtagttcagataattcattagaaattgctttgcagtatcaaaaagactttccagataatattttagtattgtctaaagagaatggtggccaagctagtgcacgtaatttaggattaaaatatgccactgggaaatatgtgaattttttagatagtgatgattatttatctaataatactttagaagaagtttataatttttttgaaaatcattttgatgaaattgatatacttgcaatacctatgattttatttgaaagagttaataagcctcatagattaaattataaatttaatgaaaataaaataattgatttaattgaagatccaaataatcctttgttgtcttcatcttcttcatttattaaatctgatgcaatcagagattataaatttgacattaaccttgttaatttagaagatgctttagtaattaataaaatattgttagataaaaagaagtatgctattttaaatacatgtaaatattattataggcagaggaatttaagaaattctacagttgacacaataaattctaaaaaagagtattttacagatagattaaaaagtttttattgcaatataatagattactgtttatctaaagaaggcaacattcctaaatttatccaatatttaatggcttatgatttacaatggttattgaaattacctaatttagatgttttggaaactgaaattgaagttcaagaattttgggattgtttatattatgttttaggttttataagtactaatgttgtctatggaaataaaaatattcttaatgatgttaaaccattctttctgtatttgcttggtgaagaaaaatatatctctttagatgatgatggttctgtgttattgaatgtgggcacacataatgttgataaattaagtagacataaaatttggttagatataattgatataaaaaaggatatattaaatatttctgggatttttttaactaattttccaaatcagaatatttcgataaaagttattaaagaaagtgaaaagcatgataaagaatatttttgccaatataaaaaatataattcttttgaacgtaaaaataggacatttttaggatttgattggatatttccatataattttgatgtaaaaattccattagttaaaaatgaaagttctaagttaagatttgttgtaaattatcaggatgatgaacatttattttcttttgaatccagtctgggtttaaattatggtgtaagactgtctgattttagtgcatgtattagtaaaaaacattatattgttctttttaaatattctaaactttttattttaccttataaatattcttcaatgttacgttatgagtttagtaatattaaaaaaactattaaggataaaccaaatttctttttaagttctatttttataagattagcatattacattttatatcctttattttctaataagaaaatttggattttttctgatcgtccagattttgcagatgataatgcaaaacatctttttaaatatgcaattaatcaagatgatgatgttaaaaaattttttgtattaaataaggatagtaattcatttaatgatatgaaaaatgagaataagaatgtaatatctttttctagcttaaaacatagatttttatatttgtatgctgaaaaaattatttcatcttatgttaatgaagattttataaatcctttttttaactataataaagatttatttgatggtttaattacttcgcaaagagttttttttacagcatggagtaaccaaagataa

SEQ ID NO: 7769 - DNA, 807 bp, Methanobrevibacter gottschalkii
  source 1..807: mol_type = genomic DNA
gtggaattagttaaaaaattggatgatgttaaaaatttaactaataacaaattgattggtgctccagatttgattaattctgaaattcagtttcatgggagaaataatattttagtatgtgagggcactattaatctggtaaattctaatattgtttttcaaggaaataattcaataatttatctttcctatacaaaacatgattataaattgatggtatttgttcgcagtgattctactatttttttaggaaaaaataatgaaattggttctaaatttaatattaatattcaagaacatcaaaatttaattattggtgatgattgtattataggtaatgatgtaactattagaacttgtgatacacgtgcaatttatgattttaatactaagaaaagaattaatttttcagaaagtattttcataggcgaccatgtctggatagatcatttttcgtatatctctcggggtgttcatgtgggttcaggagccattgttgctgttcatagttttttatcaccatattgtaaggttcattcaaataattatgttatgggtaatccaattaaggtgtttaatgacaatgttttctttacaaaagagttcacaggtagttataatgttgaggatacaatgaatttttcatcatataaaagtgatattttccattatgattttgtgcttaatgaaaccttggcaatggacaatatagataaaattctaaaagatttaactgtagatgaaaggttagattttctcgaaaaactgtttattaaaaacaaacgtaaaaatagattttattattag

SEQ ID NO: 7770 - DNA, 1068 bp, Methanobrevibacter gottschalkii
  source 1..1068: mol_type = genomic DNA
atgggtgtaaatatggttagtgaatttacagtatttggttcatgtacttgcagagatatctttaatagtacgattaataaaaactataaagattatttccatataaatccctcaggaattagagtatcatacattagtttaatgcatccaccagttgactacacagaagaatcattgataatacatcctgaaacaaaaaaaaacattaacttcagcaattggattaaacaagatttagataaaagttttttaaatgaacttaaaaaaaataaatcagaatatcttattatagatacttattacgatgttaatttcggcattattgaatttgaaaataaaaattatattacaaacaatttacatattgataaaactgaattctataaaaacctaaattataaaaaagtaatgacaattcaatctaataaaaatgaatatttaaaattatggaaggaaaattgtaatctattttttaattttttagaaaaatattgtcctgatactaaaatcatattaaatcccaccagacatgttactaatttaatcagagcagatggaacaatatctgaaatgggcatatataaaaagataagtgaaaaatataacccatatagagatttattagacagtcatattattgaaaatttcaatgttgatgtattatattttgatgaaaacactcttgcatccgaaaatagtatttggggtgcttcatcattacattataatacctcatattttatggatgttacaaaacaattgaatgaatttataaaaagaaacaaaatattagataatgcaaatgaaaaaagattaaataatttatttaaaaaacaaaacagaaatttgttaacatttaaaatccaattaaataacaatgagaaaattaacaaaatagtgcataaattcaaacaaaacaatacctataaaaaccttctgaaaaataataatgaaataacaaataatatcacagaattaaaagacatattaacttcgaatgaatatgcatttttaaattctataaataacagtaaattatcacaaatcaaacaattaaaattgaaataa

SEQ ID NO: 7771 - DNA, 771 bp, Methanobrevibacter gottschalkii
  source 1..771: mol_type = genomic DNA
atgagtttaatcaaagaaaatgaaatttttttatttgaagagattgttaaaaaaaattttgcttcaaaatataaaggttcagtattaggaatattatggagtgtattaaaaccattactcatcatgattttgttaacaataatcttttctactctatttggaggcagtattaagaattatcctgtttattttttgtctgcaaaatgtatttttgatttttttactgctggaactaatagtgctatgaatgcgatcaaaggaaataagaatatattgaaaagaactgctgctcctaaacatgcttttgtattaggaagcattatcgcagagtttatcaactttttaatcacattagttattttagtggcagtcatgattgtaacaaaagcaccatttaatattaatacaatccctttcacaatattgccgattatatcattattaatgatgattacaggcattggatttatattatccatattatgtgtttattatacagatatacaacatttatggagtgttgtaacattaatggccatgtatgcatctgcaatattttatccaatggatattattccagaaccctaccatcaatatatgattttaaatcctattttttggattattgatcaatttagacatatgacactatggcaaagtatgccatctacattaaatttaataaattcattagttttatcaacaataatattagtgattggaataattgtatatatagtgtacgaaaaaaaggttgcaatgagattctag

SEQ ID NO: 7772 - DNA, 1110 bp, Methanobrevibacter gottschalkii
  source 1..1110: mol_type = genomic DNA
atgaataaaagagataaaataaaaacaaatctaattaaaaaatataatatttccccagaagaatctgaaattctattaactaaaattgagaaacgaattgcaaaagaaaatgctcgaaaaagagaaatactctctaaaaacatgttcaatgaatctaaagaagaatttaatcaacctgaacataaaataaggaatattaattcagaaacgaataaatataatgactttgaaactataactcaaaacatttcatcaaaagaaagtgaaaagttaaaaaaagaagaaaataataatgttgatacaatcctatcaaatattattcccaattatgatcaagagatttcaattgaattaaataatgtcgatttaatctttgaagttgaaacagataaaattgacaatataaaagaaaatataataagaactttgaaaagaaacaagtctaaaaaaactaaatttcaagcattaaacaatatttccttcaaaatcaacaaaggagaaaaagtaggaattattggatacaatggagcgggaaaatctactttattaaatgttattactggaatttaccctataaataatggtactgtaactacacatggaaagatatcaccattactttcattgggagctggttttgaccataattattctggaagaaaaaatatttatttaaatggagcagtattaggttacagtaaaaaatttttagaagaaaaagaagaagaaataattgagttttcagaattaggagaatttattgatttccctattaaaaattattcatcaggtatgctcgccaaactaggtttctctatagcaacaattgttgaaccagatattctaataatcgatgaaattttaggagttggagatgttaatttccaaagaaaaagttctgataaaattaaatcattaatggatggtggtactactgtacttttagtatctcactccatacctcaaatcagagaaatatgtgacaaagctatttggatagacaaaggaaaagtacgagaaataggtgaagtaaataaagtctgtgatcattatcttaaagatgctgaaaaagccagtaataaacaattagcaaatattaaatttagataa

SEQ ID NO: 7773 - DNA, 1194 bp, Methanobrevibacter gottschalkii
  source 1..1194: mol_type = genomic DNA
atggatttgatagtagcaaagtttggtggcacttctgttggaaacggtaaaagaattagaaaagccgccgaatcagtggcaagggaatataaaaaaggcagcgaaattgttgttgtagtatcggcagttaataaaaccactgatgatttaataaacattacaaacgatgcgattacatgtaatcttacagaaaaacaacatgctgaaattgttggtatgggtgagagaactagtgttagactattttcagctactcttgaatctttaggcatcaaatccttattcatcgatccgtattctgaattatggcccattattactgattccaattatatggaagccaggattgatcttgataaaaccaaagagaaagttaacaatctcaaaagtttgcttgatcagggaatcgttccggttgtctgtggatttttaggcaaatgcaaaaatcaggttaccactttaggccgtgggggaagtgacatcaccgcatttttaattggtgaatgtttgaatgcaactgaagtgattattgtaactgatgtagacggagtcctatcaactgatcctcaaaagattagtgaggccgaacttttagaaagcattactgttgatgagatgaaaacacttgcaacccatggtgcccaggttctacatcctcatgcacttgattataaacaccccaaaattgatgctaaaatcatcaattacaacaaagaggatctgaaagcggaaggaacttatattaccggtcctaaggattataagcctattgacttatatgagaatcctgttgcgtcaataactattgtcggtaaaagcttgttgaacaaagtgggaattgtatctgcactttcaaatattcttttagaaaatggaatcaatctttttaagatgaatcctcatcacaattcaataactgtttttattgacagtgaagatgcggataaagcttatgagttataccatgatcatgttgttaaaagtgaagatttaagttccatttcacgtgacaaggacactgcaatgtttagtattacatctcccgagattagtgagattacattagctaatcttttaactgaaaatgacattgatgctgttttaatcaattatacgaaaactgaaattttattatttgttgaatgggagtttaagtatgaagtttccaaattgctcaacacttataaaaattaa

SEQ ID NO: 7774 - DNA, 783 bp, Methanobrevibacter gottschalkii
  source 1..783: mol_type = genomic DNA
atggaaaacatgataaattcactaaaaaagttaggattaaaccgttacgaagcactagcttatataggacttaacaaaataaaaaccggacaggccgatgaaatttcagaagtttcaaaattaccacgctcaagaatatatgatgttttaaaagaattgaatagaaagggatttgttgaaattgaaggtggaaaaccattaaaatataaaataatccctccgagcaagatatttaaagaagaaaaaaataaattgattgaggaacttgaaaatactgaaaaaaagttggaaaagttatacaatgatgaattagatgaaatccaagctccaatatggttaattcattccagtgaaaatattattgaaaaagaagtaggcattatcagaaaagctagaaagacaatcacatgcagcatcggctttttacttgaaggtgaaggaaaagctatgattaaagcatttaatgaaattccaagaaacgttgaaatcaaaattcttgctaatcagttctgttatgtgaataatcacaaaatagacatcatcaaaatatttaaagacacaaaattagacaatctggaaattatcccctcagatttgccaatgatgaaattattaattgttgatgaaaaagagctcattagaacatttacacgttttacaggtgaaaataatgagatattgccccaaacagcaattggagttcacaatacatacgaagacatttgcaaaaatttcagcagacacattctaaaagagtttgataaaaacagacaagagaattaa

SEQ ID NO: 7775 - DNA, 420 bp, Methanobrevibacter gottschalkii
  source 1..420: mol_type = genomic DNA
atggctaatttcaattcactaaaggaagcacgtgaatttttttacaaggataagtttgcaataaatacaggagttacattagatgaattaacagaagacaaagctatttgttctttaatgttaaatgatgagcatagaaatgcttatggtggggtaatgggaggcgtaatatttacattggccgattttgcttttgcagtattgtctaatcagatccatcagttaactgttgctcagcaggtaagtattaattatttgtccgctccaaagggggacatgctgatagccgaggcagcttgccgtaaaagtggcagaacatcatccattgttattgtagatatttcggatgatttgggttgtgatgttgctcagtttgtaggtaccgggtttaaactgaaaaatagcaaaataagagattaa

SEQ ID NO: 7776 - DNA, 477 bp, Methanobrevibacter gottschalkii
  source 1..477: mol_type = genomic DNA
atgtccgagttaacatttaaaatagccgaaagaaaagattcccgattaatcttagaatatattaaaaaacttgcagattatgaaaaaagatcagatgaggtcattgcaactgaaaaatcaattgaaaaatggatattcgatgaaaaacaagcagaagtcctatttgctcttgaagataggcatatagtcggatttgcactttatttcttaagcttttcaacatatattggaaatgtgaatatgcatttagaagatttattcattgaccccgaatatcggagaagaggatacggtaaagcattgcttaaagagcttggaaaaatagtaatagatagggattacggcaggtttgaatggacttgcctttcatggaaccggccgagcattgatttttacctctcaattggtgcagaacagaaagattgggatgtattccattttacaggagatgcgctaaaagactttgtaaaagaatga

SEQ ID NO: 7777 - DNA, 735 bp, Methanobrevibacter gottschalkii
  source 1..735: mol_type = genomic DNA
ttgtatttactttcaaatattgatgcagttgactggagtattgatgacgggtatgatgctgtggatgtatgtcctttttgtgaaatgcccgttccggattatgtcaggtcatgtgttgtgtgtggtttaagtataagggatattgattttgaagagaattctattaataaatacactgatttcagggaaagttttgataaattgtttgatgatatggactctaaattgggtaatatgatttttattaaggatgatgatgagttatttgaatttaaaacattttataacagtttcatgttgaattatgattatcatgagtttttagaattttacaatcgggcggataaaaatcttgaaatgcagcaaatagcagaattgttcattaatgataaattaaataaatccttaggcactgaaagtgaatttgatgattatgctaagtatttgatatattattgcaattattatattgctaatgatgacttggatgatgcttttatatattatgcacaaatgctcctgttaatgtccaattattctggagacaacaacggtgaattattgattagtgtttatctgtttgattcattttcatgttataactgtttatatggttcccaacattcatttgacatttccaaattatttgatgaagcaataaatacttttagaatagaggaatataataaaaatcataaatttattttagagaaattagaagccatgtttggttga

SEQ ID NO: 7778 - DNA, 450 bp, Methanobrevibacter gottschalkii
  source 1..450: mol_type = genomic DNA
ttgaaaaatgattatgcaatcaagttaacgtctaattttattttaagctatttgaagtttatagtagatactgatgagatttataaaaatccgaaaatcaaaaaattttataaaaaatcagagcataccatcccctataaggctaatttatttgatatggatctgtgtggcgtaatgtttagagatcctgcaggtaatttcattaaatacactgatttttttgcagtaactatacctagaaagtacgatctgaaaaaatataaatgccgtaaaaaactaaaaaaagtgaccgaatcatatcttgacgataaatattctgtctggacagatagtgttgatataatcaacgaattcgttgacctgaaagatagggaatttgatgaaatgttaaatattgaaaatatgattgggatgaggaggagttatgccaggactttattgatagtttag

SEQ ID NO: 7779 - DNA, 336 bp, Methanobrevibacter gottschalkii
  source 1..336: mol_type = genomic DNA
atggatgaaggattgtttcaagataaaaatcttaaagataagttattcaacgaatatcctcatattcttaaagctatcgagaaggaaggttatattttagattacttgtcttttgatgtatttaccgaaattcgttttgaagacgatgttgttggttttatttcattttcgagatttgacattgttgagaattattttgctattgatgaagcatatataatacctgaatatcggggaaataatctactttttgaacatttaaataatctgtttcttttggacaatttcagatattttccaagaaaaccaacaaaagcttttatcaatgtttgttga

SEQ ID NO: 7780 - DNA, 1335 bp, Methanobrevibacter gottschalkii
  source 1..1335: mol_type = genomic DNA
ttgtcatacgtagatgaagtaattgaaactattattgaacaaaaccctggcgaagcagaattccaccaagctttacgcgaagtaatggaatctattagggtcgtagttgaagaaaacgaagaagaatacaaaaaaaatgcacttcttgaaagattagcaaatcctgaaagacaaatcaaattccgtgttccttgggtagatgacaacggtcaggtacaggtaaacacaggataccgtgtacagttcaacagtgcaatcggaccttacaaaggaggattacgtttccactcttcggtaaacataggtattattaaattcttagggtttgaacaaatcttcaaaaactctttaaccggtcttcctattggtggaggaaaaggaggatctaactttgatcctaaaggaaaatctgacagggaagtcatggcattttgtcaaagtttcatgactgaattatacagacacattggcgctgatactgatgtgcctgctggagatattggtgtaggcgctcgtgaagttggtttcctattcggccaatacaaaagactctctaacttatatgaaggagtattgactggtaaaggattaaccttcggaggatccctcacaagaaccgaagctaccggttacggattattatacttcactaacgcaatgttaaaagcaaatgatattgacattgctggtaaaaccatcgcagtatctggagctggaaatgtagcaatttatgctattgaaaaagctcaacaattaggcggtaaaccagtaacctgttctgattcaactggttggatttacgattctgaaggaatcgatgtggaattactcaaagaaataaaagaagtaaaacgtgaaagattaactgcatatgcgaaagcaagagaaagtgcagaataccacgaaggtaaaggtgtatggactgtaaaatgtgacattgcattgccatgcgctacccaaaacgaattgcaattggaagatgctaaatcattagtggaaaatggggtacttgcagttgctgaaggggcaaacatgccgaccactattgaagctaccgaatacttgcaagaaaatgatgtattattcgcaccgggaaaagcatccaacgctggtggagtagctacttccgctttagaaatggctcaaaactcccaaagattatcctggacctttgaagaagttgatgcaaaactccaaaatattatggaaaacatctttgcaaatgctgcagctgctgctgaagaatatggtttagataaaaactatgttgcaggagcaaacattgcaggattcaaaaaagtagttgaagcaatgaacgcacaaggaatcgtatag

SEQ ID NO: 7781 - DNA, 252 bp, Methanobrevibacter gottschalkii
  source 1..252: mol_type = genomic DNA
atgagtgtggaaaaattaactaaatcccaatataatgatttgaaaaatagctatcttacaaaaaacagaacaatgcattcactatatgctgaaatcaataaagaaaacaaagtcgacaaacatttatttttcaaattaataaataaaatcagacaagaggaaggattaaatgatttttatacaatgaaaaaagaaaaaaagagaaataacattatagaaaatttggacaaatctccaaaatactataactaa

SEQ ID NO: 7782 - DNA, 1245 bp, Methanobrevibacter gottschalkii
  source 1..1245: mol_type = genomic DNA
atggctgaagtatcatcaaaagagttatatgaatttaaaaaaactttaaaagaactatctggaaaaagaggtagaggtacagagcttgtttccgtttacattccacatgataagcaattaagtgatgttggtaagcacatgagagatgaactcggacaaagtgctaacattaagagtaaacaaacaagaaaaaatgtacaatccgcaatcgaagtaattttacaaagtatacgcttatataaacaacctccagaaaatggtctggttttgtttgtgggcatgattcctaaaggaggtccgggcactgaaaaaatggaaaaatatattttagaacctcctgaaccaatcactacttactggtataaatgcaataatgaatttttcattgaacctttggaagaaatcattgaagagagagacacctatggtcttgcagtagttgacagaaaagaagctactgtcgctactttaaagggtaaaaaggtcaatattctaactcacctgacaagtggtgttccaggtaagcacaaagcaggagggcaatcacaaagaaggtttgaccgtgtaattgaccttgcggctcacgagttcaaaaaacgtattggggaacatatgaatgatgacttcttggagcttaaagatgatttgaaaggaatcatcgttggcggaccaggtttcaccaaagaggaatttatccagggggactatcttcaatatgagcttaaggataaaataatagcaactgttgatacatcatacactggagaaccgggtattcgtgaagtcattgataaatctgcagatattttggataatttggatgttatgcatgagaaaaaacaggttcaaagattcctgaaagaattaactaaagataaaggtttatgttcttatggtgaaaatcaggttagaaataatttgattatgggtgctgttgacactctgctgttatcagaagatttgtcaagtatgcgtaaaacatttgaatgtaccaattgcggaactcaaattgaagtcactgttaaaactcaggctgaagcggataaattcaatgaaagatgtcctaattgtaacgatacttttaaagaagtggcttcaaaagatttgactgatgaatttgttgaaaaagcagaagagatgaatacaaatgttgaattcatttccactgaaactgaagagggcatgcagcttttcagagcattcggtggtattgctgctattttaaggtattatgtagaatattag

SEQ ID NO: 7783 - DNA, 1068 bp, Methanobrevibacter gottschalkii
  source 1..1068: mol_type = genomic DNA
ttgaaagcggcaaaaaacataaaaataattaaaagaaataaaaatgtaatgaaatggaaaattggtaatgtcaaaatatcaaatcagatagtcttagcacccatggcagggatatgtgactatgcattcagaagcataatcaaatccatgggttgcggtttgattgaaacagaaatggtttcagataaagctataatgtataacaattttaaaacacaagaaatgctatttatgaaagacgaagaaaggcctatctcacagcagattttcggttgcggcactgactcttttaaaattgcttccaaatacatctatgaaaatatgaaacctgacattatcgacattaatatgggatgtcccgttaaaaaagtagccattaaatcaaaagctggaagtgcgcttttaaagaatcctgaaaaagcaagaagcattgtggaaaccgttgttgatagtgttccaataccggtcactgttaaaattaggagcgggtgggataaaagtagcattaatgcagttgaaatggcgcaaataatcgaagaggcgggggcttcagcaattactgtccatccccgtacaagacatcaaaggtacgacattcctgcagactggtcaataatcaaggatgttaaaaaccatgtatccataccagttatcggaaacggagatattaaatcatgttatgatgctaaaagaatgcttgatgaaactggctgtgatgcaataatgatcggcagagcaacgcttggaaatccctggcttgtaaaacaatgcattgactacatagattatggcatggaacctgaaaaaatttcagttgaagaaaaaataaatatggccaaaaggcatgctgatataattgagaaaactcaagcggaaaaattagcaatttccagaatgagaacacagactgcatactacatgaaaggaatgtataacactgcagatatcaaaccaaaattgtttaaaatgaattcaaaagaggaaatattcagtcttttagatgagtatttggcttcacataagcagcatcttagagaatttgtcaaacaaaaccaaatcctctcctga

SEQ ID NO: 7784 - DNA, 969 bp, Methanobrevibacter gottschalkii
  source 1..969: mol_type = genomic DNA
atgattgaaaaaatagagattacgcaaagatttaatttcaaacgtcttaatcgccattatgaatgtttcacaattgatttttcaaataattcggcatactataaaatctctgagaggggcagcggtgataagtttttaagtgaaagtgatctttgtgacgattcctggattgaaatcttgagcgggctgcgtcgtaacatgacaagtgaaatctgccatttcaatcttaaacaagctgataaattcttgaatgattttaataagctaaatctttttaaagatttcaggtctgaaaatttttcttattttgaaaaaatagagttgatttattcatgcaatattattatctattcaactgataactatgaggaatatgcttttaagaataactttccgataaattggattaagtttggtgaaatcttaaaagaactattaaattttgatgtcctccatcttgattatcaaaaacagatggtcaccccattattctatgacgtatgtttggatggtgtttattatgatggggagctattgaaacttaaagctattgaatttggacattacaggacttatccctatgatattccaaaaccaagattaatcatcgattttaataaaaagaggattgacggttatattgataaaaatttgtcttctggcgatgagaatgcaattttaagtttacttgaaaagtatcatgtttataactggatttttgatgaatatcacaacaaatctaatactcgggatcctgatgatttggaaggatatgactggtatctggaaatggtttttgaagaggggattatttggcatttgtttggatataatgactatccggatacatatgtctgtttagctcgtgaggttgaaaaactcactggtatggatcttttggaaataaacacaatttcaggagaggatttggttttgtttgacaaattctctaagatgctgcttatgtga

SEQ ID NO: 7785 - DNA, 519 bp, Methanobrevibacter gottschalkii
  source 1..519: mol_type = genomic DNA
atggtttttagaagatgcccgcaatgtggttcgacaagtgatgatcaatatggtttttgtataaaatgtgggtgggaatttgcaaaaatagacgccacaaagaatttatgtcctttatgcggacatgaaaatccgaatgaagcagatttctgtgttaaatgtggtgcgccactcgtttttaagaatcatccgaatgaagagcaaaggaatataaccccaatagtaataaacaaagaagttgctggaacacctattcaaaaaaacagcggcggatggattaaatggattataatactgggatatatcttttcaattttaggcggtcttttaggattgatcattgcagtttatttagttacaagaaaagaagcgactgttagaaaacatggaatcatacaacttgcaatatttgcattctatatcgtattaattgccgcattatatgcaaccggaatgattcctgcagatgcaattaccaactatcaacaattaattgctggaaatatgacccttccttaa

SEQ ID NO: 7786 - DNA, 456 bp, Methanobrevibacter gottschalkii
  source 1..456: mol_type = genomic DNA
atgattatacgaaaattcaatccaaatgatttaaaaagagtttttgaaatagaaaacatgtcttttgaccagtcttacggaataaaaatgtttcagcagttatatgaaatgggtattggatttttagttgcagaacatgaaggtcatgtgattggttatgtgatgttttggattaaatacgaatttaatggacatatcatatcaatagctgttgatgaaaattacaggcgtttaggtgctggaactaaacttttagttaaagctatttctattttgtccatgcttaatattgataatatttacttggaagtaaatgaacataatgatggagctattgaattttataggagatttaattttcagatagatagaactgttccgaattattatgcaagtggtgatggtgcagttattatgtatctgccgttaaggaagggtcatatttccagcaattaa

SEQ ID NO: 7787 - DNA, 390 bp, Methanobrevibacter gottschalkii
  source 1..390: mol_type = genomic DNA
atgtggcaagattttggagattacattttaagcgaagccggagatgatccggttaaaattgcagagattggtgttggaaaattcgacaaaatatcagaaatattatccgaaaagaagaacataaccgttcttaaaacagatattcacccaaaagattcaacagtgataaaagacgacgttacaaatcccaatcttgaattatacaaagatgttgatattatctactcaatcagaccgccaagtgaacttcagcctcatctaattaatcttgctgaaaagataaactcccagttaataataaaacctttgacaaatgaagatttaaatactggcagagttaaaatgaaactaaaaaactataagaaagctagtttttatatattgaggtaa

SEQ ID NO: 7788 - DNA, 2430 bp, Methanobrevibacter gottschalkii
  source 1..2430: mol_type = genomic DNA
atggaaaaacttctaaaaaaatataatacaacacctgatggattaagcgaaagtgaagttcttaaaaggcatgaaagatacggtttaaacgagcttgatgaaaaaaaaccaacaccaccaataatattatttttatcccagtttgcagatattttaatagctcttttaattattgcagccattgcatcttttgcaattggtgatacaatagatgcaggagtgattttacttgcagtgcttttaaatgtaataatcggattcattcaggaatatcggtcaataagagcagtcaatagccttaaagatttaatggtcaaaaaagccattgttaaaaggaataatgaagtccttgaagttgatgctagattcttgaccattggtgatattgtaattcttgaagaaggaaataaatcacctgccgatttaatactaattgaaagcaatgatataaactgtgatgaatcattcctaacaggagaatctgaagcggttataaaagaagaaaaagatgctgtttttatggattccaatattatttcaggccatgggcttggaattgttacagatatcggaatggatacggaaatcgggaaaatcgcagaaattgttcatgaagaagatgagaagacaccgcttgcagtgaaagttggaaaacttggaaaaatcttatcagcaattgcgattttggtttgtacagttatttttattttagaattaatccagggagcaggtattgtggaaacgtttatgactgctgtttcactagcagttgcagcaattcctgaaggtcttcctgcagttttaacattaacacttgcacttggaatgtctgagatggcatcatcagatgctcttgttaaaagattattatctgttgaaacattaggttcatgtaccatcatctgcagtgacaagacaggaacattaactgataataaaatgagtgttgttgagagttatttattaaacaaagacaaattattgttaatttcaaaattatgcaacaatgcgataattaaagataatgcccttatcggaaatcagactgacggagctattttaagatttgcacaaaattatgaaacttcccttgagcgcattgatgaaatccctcttgacagcaaccgtaaaatgatgaccacaatacataggttagacagtgaaaataaaattgttttatcaaaaggtgcaccagaaataattctaaataactgcaaatatatagataacaacggaagtatagaaatacttgatgaagaaataaaggaaactgtagttaaaagaattgatgaaatgagtgatgaagcattaagagtaatcggatttgcatacaaaatcaatgatgatgaacgacctgaagaaaatctcatttttacaggactgcttggattaattgatcccccaaagaaaaatgccaaaaaagcagtgaaggaatgcattaatgctggaattaaagtaagaatgattaccggagaccatgaaaaaacggcaagtgcaatagcaaagcagcttggaatattaactgacggccgtgtaattacaggcaaagaattagaaaaaatcagtgatgaggaatatctggccattgcagatgatattcaggtttatgcaagggtaaaacctgctcaaaaaatgagaatagttgaagctttaaaagatttaggaaacatagttgcaatgacaggagacggaattaacgatgcacctgctcttaaaaaagcatcaataggtattgcaatgggcgatggtactgatgtttctaaagagtcatcggacatgattttacaggacaatgatttttcaacaattgtaaaagcaataaaagaagggcgtaaaatttacgacaacattaaaagattcgtcaaattccaagtatcaacaaatgtgggtgctattctaacaatagtcggaacaagcctactcaatttacctctgccattcaatcctgcacaattattgtggttgaatatagttatggacggcccgccggcacaaacattaggtatggaaggtgctgaaaaagatacaatggcaagacctcctgaaaccggagacatcttaaccaaaaaaacattaactgaaatatttctattaggattagtgatggctaccggaacaattctagtatttagctgggagatatatagtggtgcaccaactgaaaaagcaatgagtgttgcatttacattatttgtagtttaccaattatttaatgcatttaacggaagatcaaactcgactaaatcaagcaaatatttatatattggacttgcattgtcattcatgctccaattgctaataatatacataccgcagctacaaataatatttagaacaactgcaatcggcattgcagaatggacaatcataattattgttgcatcaacaataatagctgctcagaaaataatgaataaagtgataaaatga

SEQ ID NO: 7789 - DNA, 786 bp, Methanobrevibacter gottschalkii
  source 1..786: mol_type = genomic DNA
atgaagattttcctattaggcggtacaaaagactcaataaatattatcaaatttataaaaaagaattatgatgcatatattctaacaaccacaacaacagaatatggcgctaaacttgcaaaggaaggcggaagcgatgatacaatagcccgaccgcttccaaaagaagaaataattgatatgataataagtaaaaattatgatattttaattgatgcaacccacccttttgcagagcacataacacagactagcgcaagcattgaaaatgaattgaaaataccatatttacgctttgaaagacctatcaccaaccttgaaaacattgacacatcaaatgtgtattatgtaaattcattcattgaagcgggaaaattaatagctagtgaattcagtaaaggaaatgtactgcattttgcaggtgctaacaccatggaagacatcctaaaaaatatcccaacagacaggttttatccaagaattttgaaagtggaaaaatctgttgaaaaatgtaatgaactaaatataaaccccaaccatattattccaatgaccggtgctgcaagcacaaaagaaaatatcgaactgattgaaaaatacaatgccagtgtaataattactaaagaaagtggtgaaataggaggagttattgataaaatagaagcagccaatgcgaaaaacattgcagtggttatgattcgaagaccacagataaaagaaataaataaaaaaaatattgtatccaatttagatgaattagatgttgaattaaaaaactttttttaa

SEQ ID NO: 7790 - DNA, 309 bp, Methanobrevibacter gottschalkii
  source 1..309: mol_type = genomic DNA
atgaatcaagcaagaattaagcttacaggaacagatccggaaaaattagcatatgtttgcgatcaactcaaaaaaattgctgaaagaactggtgtcgacttatctggtcctattccattacctactaaaaaattagtagtgcctacaagaaaatctccagatggagaaggtaaagcttcttgggaaaaatgggaactcaggatccataaacgtttaatcggtattggagctgatgaacgtgctatgagacaagtcatgaaaattaatgttcctgataatgtaagtatcgaaattgaacttaaaggatag

SEQ ID NO: 7791 - DNA, 1242 bp, Methanobrevibacter gottschalkii
  source 1..1242: mol_type = genomic DNA
atggcaaaagaaaaagaacatcttaacttagcatttattggacacgttgaccacggaaaatccactttagttggacatttattattgaaagctggtgcaatcgcagaacaacaattagatgacggtgaaaacaaattcagatttgttatggacaaattaggagaagaaagggaaagaggagtaactattgatttagctcaccaaaaattctccaccaaaaaatacgactatactgttgtagattgtcctggacacagagacttcgttaaaaacatgattaccggtgcttcccaagcagacgctggtgttttagtagttgcagctgacgacggtgtaatgcctcaaactaaagaacacgttttcttatccagaactttaggtattggtcaattaatcgttgcaatcaacaaaatcgatgttgttgactactctgaagacaaatacaatgaattaaaagaagaagttgctaacttaatcaaaaccgtaggattcaacccagcagacgtacctttcatcccattatctgcatttgaaggggacaacattaaagaagcaagtgaaaacactccttggtataaaggcgactctttaatggatgctttagacaaattaactccacctgaaaaacctaccgacttacctttaagaattcctattcaagacgtttactccattactggtgtaggaactgtacctgtgggaagagttgaaaccggtatcatgaaaaaaggtgaaaatgttatttttgaacctgctggagcttctggagaagttaaatctattgaaatgcaccacgaagtatttgatgtagctgaacctggtgacaacatcggattcaacgtaagaggtgtaggtaaaaacgatatcagaagaggagacgtagctggacacactgacaatgctcctactgttgctaaagaattcgatgcacaagttgttgttttacaacaccctggtgtaatcaccgttggatacactcctgtattccactgccacacttctcaagtagcatgtactttcttggaattatctaaaaaattaaaccctgctactggtgctgttgatgaagaaaatcctgatttcttaaaaactggtaatgcggcaattgttaaaattaaacctaccaaaccaatgtgtctcgaaaacgcaaaagaaatccctcaaatgggtagatttgctatcagagatatgggtcaaactgttgcagctggtttatgtcttaatgttaccccagcgaaataa

SEQ ID NO: 7792 - DNA, 2184 bp, Methanobrevibacter gottschalkii
  source 1..2184: mol_type = genomic DNA
atgattgcgaaaatcaaagaattaatgtataaacctgatcaaatcagaaacattggtatctgcgctcacattgatcatggtaaaaccactttatctgataacttgcttgcaggtgcaggaatgatttccgaggaacttgccggtgatcaaagattcttagattttgatgaacaggaacaagcacgtggtattactattgatgcagctaacgtatccatggtacacgattacaaagatgatgaatatttaatcaacttaattgatacacctggtcacgttgactttggtggggatgttacccgtgctatgagggctgtagatggagcagtagttgtagtttgtgctgtagaaggtattatgcctcaaactgaaactgtattcagacaagcattaaaagaaaacgtaaaaccagttttattcattaacaaagttgacagattaatcaacgagttaaaattagaacctgaagagttacaaaaaaggttcatcaatatctacatggaagctaataaattaatcaaaaacatggctcctgaagataaaaaagatgattggtcattagatttcactgatggtagtgtagcatttggttctgcatatcacaactgggctattaacgtaccaactatgcaagaaactggagttaactttaatgatattatccaatattgtaatgaggataagcaaaaagagttagcacaaaaagtacctttatctgatgtgttgttaggtatggtagttgaacacttgccttcccctaaagaagcacaagtttacagagtacctaacatatgggatggagacattgaatctcctgctggagaatgtatggtcaccacttcccctgatggacctttagcagtaatggttaccaatgtatctgttgataaacacgctggtgaaattgcaactggtagggtttacggaggcgctattgaaaaaggtactgaagtatatctcgttggttctcatggtaaatccagagttcaacaagtaggtgtctactttggacctgaaagagttaacactgataaagttcctgcaggtaacattgtatatgttgctggtgcaaaaggtgctattgctggtgaaactttatgtgatcccgaacataaaattgttgaatttgaaggattggaacacatatccgaacctgtagttactgttgctgtggaagctaagaatactaaggatttaccaaaattaattgaagtattaagacaagtaggtaaagaagaccctaccgttaaaatagatattaacgaagaaacaggtgaacacttagtatcaggtatgggagaacttcacttggaagttatcggttacagaattggagaaaaaggtgtggatattactacttctgaacctattgttgtatacagagaaactgtaagacagttatctccacaagttgaaggtaaatctcctaacaaacacaacagattctacatcactgttgaacctattgaacctgaactttatactgctattcaggatggtgacattaaagagggtaaagttaaaggtaaagaaggagctaatgacttcatggaacacggtttggaaaaagaagaggctagaagagtatgggctgttcataacagaagtatcttccttaacatgactcgtggtatccaatacttagatgaagttaaagaactcttgattgaaggatttgaatctgcattggaaaatggtcctttaggtaatgaaattgctatgggattaaaattcaaactccatgatgcaaaacttcacgaagatgcagttcacagaggacctgctcaagtattgcctgctatcagaaatgcaatcttaggttctatgatgcttgctgaaccagcattactcgaaccaatgcaaaaagtagttattgacactcctaatgattacatgggttcatgtactcgtgaaatccaaaatagaagaggtcaaattgtaaacatgggtcaggaaactggagatatggcaagaattgaatctaaagttcctgtagctgaaatgtttggtttcgctggtgatatcagatccgctgctgaaggaagatgtttatggtctactgaaattgccggatttgaaccacttccacgtgagatgcaaaatcagatcgtaaaagaaatcagacaaagaaaaggattatctgcagaaccattccctgcaagccactacttaggagatttataa

SEQ ID NO: 7793 - DNA, 561 bp, Methanobrevibacter gottschalkii
  source 1..561: mol_type = genomic DNA
atgagtaaattattcgataaatgggatctcaatgaagtaaaagttgaggacttaggtttggtaaaatatatctgcttagatgaaactttagttccacatacttctggtagacatgtaaaaagacaatttgcaaaatctaaagtatcaattgttgaaagattaatgaacaaaatcatgagaacccatctcaactctggtaagaaaaataaagcttacaacattgttaaagaatctttagaaattattaataaaagaactaaacagaatcctgttcaaattttagttaaagcagttgaaaatactgcacctcgtgaagagactacccgtattaaatacggtggtattggataccaagttgctgtagatatctctccacaaagaagagttgacctttcattaggtttcttaactagaggtactttacaatcttcattcaaaaacaggaaatctgttgctgaatgtttagctgatgaattaattcttgcatctgaagaagattcaagaagcttcgctttaagaaaagctgaagagaaagaaagagttgctaaagcagcacactaa

SEQ ID NO: 7794 - DNA, 426 bp, Methanobrevibacter gottschalkii
  source 1..426: mol_type = genomic DNA
atgccaggactttttgctgcaaaaaaacttaaaaaaaatagacaaaattttaagtggaaagatgtagattacaaaagaagagctttaagattagatgttaaagcagatcctcttgaaggagctcctcaggctagaggtattgtaatcgaaaaggtagggatagaagcaaaacaacctaactctgctattcgtaaatgtgtacgtgttcaattgattaaaaacggtaaacaattaactgctttcgcaccaggtgacggagctattggatttattgatgaacacgatgaagtgatgattgaaggaattggtggaccgtctggaagatccatgggggatattcctggggttcgttggaaagtttccaaagttaataacgtagctttatcagaaatggtaagtggaaaaatagaaaaacctgtaagataa

SEQ ID NO: 7795 - DNA, 432 bp, Methanobrevibacter gottschalkii
  source 1..432: mol_type = genomic DNA
gtgtctattaaacttagtgcaaatgaaattagattcatagctcttttcgaaagtatgactggagcaatggttaaagattgcattatcgatgatgaacatggaaaagtcactttcattgttaagaaaggtgatatggggcttgctattggtaaaggtggaagttctgtttctaaagttcaaagagcagtagataaaagtgttgaaatcattgaattagatgatgatccaataatttttatcaaaaatgttttatcccctgcaaagttacagtctgttaaaataagtcaaaaacagtcaggtgaaaaaatagctattgtcacagcagacaataccaacaaacgtattgctatcggtaaaaatggaattaatattgaaagagctaaattattagctaatagacaacataatattgataatattattttaaaatag

SEQ ID NO: 7796 - DNA, 297 bp, Methanobrevibacter gottschalkii
  source 1..297: mol_type = genomic DNA
atggacgtagatagaggaatcagagtagctgtcgatactggtgatgtaactttaggctctgaaaaatcaattcaatctttaaaattaggaaaaggtcaactcgttgttgttgctgctaacgctcctaaagaacttattgaagatgttgaatattatgcaaatctttccgaaattccatttgttgtatatgatggaactagtgtagatttagggtctgtttgtggtaaacctttcacagttgctacattaatcgttaacgatccaggagattctacaatattagatgatttgaggtag

SEQ ID NO: 7797 - DNA, 1179 bp, Methanobrevibacter gottschalkii
  source 1..1179: mol_type = genomic DNA
atggatgaaattataactaaaattaggggcatgattactgagatcaacgaaactgaaaatcttggtattgattttgcagatagttatatcaaagatttagctgaacattatatcagtaaaaatttaactgatgatgaattacgcaaactcataattaaacttaaacaggcctatgaccgagctcatgttgaagctggagaggctgttggaacagtagctgcacaatctgtaggtgaaccgggtactcagatgactatgcgtacttttcactatgcaggggtaactgagttaaacgtaacattaggtcttccaaggcttattgaaattgtagatgctagagaaaaaatcaaaactccaactatggatatttatttcactgaagataaacgggatgatgaagaatttgttagaactttagctaataaaattggtaaaagcactattaacgatattctttcagatttcaatttaaattatggaaccatggaagttgaagctgttttggataataagaaaattgaagaaaaaagactcaacagggaagagattgatgcaaaaatcttaaaaacatttaaaaaagctacaattaatggggataatattgttttatccagcaacaagacagattctgatttcattattagagaacttcgtcttttagcagataaattccgtgatttgcaaattagtggtattaaaaatattggaagagtcattattcgtcgtgatgaagaatggattattcacactgaaggatccaatcttaaagaagttctcactatggatggtattgaccaagtaagaactaccactaacaatattcatgaaattggtcaaattttgggtattgaagcagctcgcaggtcaattattaacgaagctcaaaaaaccctttcagaacaaggtcttagtgttgatgtaagacacattatgctggttgcagatattatgacttccgaaggtgttgttaaatctattggaagacatggtattagtggtgaaaaatcaagtgttttggctcgtgcagcttttgaagaaactggtaaacatttactacatgcaagtattcgtggtgaagtggatgatttaacaggtatcatcgaaaatattattattggacaaccaatacctcttggtaccggttctgtcggtgtcaaaatggattataaaaaagaatag

SEQ ID NO: 7798 - DNA, 3006 bp, Methanobrevibacter gottschalkii
  source 1..3006: mol_type = genomic DNA
atgaaagcatttattaaaaaaattcagagaattaattttggtttaatgtctcctgaagatattcgtaagatgtctgttgtcactgtcgagtatcccgatacttatggtgatgacggttttcctattgataaaggtttaatggatcctcatttaggtattattgatcctagtcttgtttgtaggacttgtgggtctaaagggggagtttgtcaaggacactttggtagtattgaattagctaggccagttattcatgttggttttggggatgttattcataaaattttacgttctacctgtaatgagtgtggccgtactcttttaactgatgaagagattgaagagtatactcagaaaatcttagaactcaaagctcaaaatgagagcattagcagtattctcaaagagatttatgatgctgctaaaaaggatggggaagaatgtcctcattgcggtactatccaggataaaattgttttagataaacctgtttctattgttcaacgcattgatccacttttcgaatttaaaaaagtattttatgaaactgcatcttctgattctattactattgaagagattgggccaatggctagggaaattgttgaaaacaaagaagaactcttccagaataaattgttgattaacagtaatcttttagaaaggttatgtgaaagattgcatgatgttgattacattattaatattttagatttggaagatgaagatggttcttatgaagtgaataatactcgtctgaataatattttcaaaacagctatcagtgataataatttaactgaggattataagttaactgcttctgaagttcgtgaaagacttgaaagaatttctgatgaagattcttttgttttaggtgttaatcctgaggttgcaagacctgaatggttagttttaactgttcttcctgttcctccggtaactgtaagaccatctattatcctggatactggtgagagatctgaggatgatttaactcataaacttgttgatattttacgtattaatcagcgtttacttgagaatatggaggcaggtgctccacaattaatcgttgaagatttatgggaattattacagtaccatgtaaccacttactttgataatgaagctagcggagttccacctgcaaggcacagatcaggcaggccacttaaaacattaacccaaaggttaaaaggtaaagaaggaagattcagatccaatctttccggtaaaagggttaatttctctgcccgtactgtaatctcaccggatcctaatatcagtattaatgaagttggtgttcctgaaatgattgcaaaagaagtaactgtgcctgttcatgtaaacgaatggaacatggatgaaatgagaacatacattgaaaatggtccggatgtacatcctggtgcaaactatgtaatcaatggagataggaaaagaagggttactgatgaaactaaggagtacattcttgaaacattagaacctggtgtcatcattgaaaggcacttaaaagatggggatatggttttattcaatcgtcagccttctcttcacagaatgagtatgatggcgcatgaagtaagagttttaccttacaaaactttcagattaaacttatgcgtatgtcctccatacaatgcggatttcgatggggacgaaatgaacatgcatgtattccaaactgatgagtcccgtgctgaagcaaaatcattaatgcgtgtacaagaacatattttgtctccaaggtttggaggaccaattattggagctattcacgaccatatttccggtgcatatcttttaactcgtgatggggttgaattcagtgaagagcaagctttacaaattatcagaaagtctcaccttaaaattcctgagttcaaatcaaatcagtggattttaaaatatgattctaatggaaatgaagattcattcatctacaaagaaaaaggtgaaaaatggactggtaaagaattgttctctttattattgcctaacgatttaaacttatcttacagtgctgaaatttccaaatgtcctgttgtttaccctcctgaagatgcggaagttgtcattaaaaacggtattctcatacaaggagtaatagatgaaagtgcatacggatcattctcaggtaaaatattagataaaattgttaaagaatatggtcctggaagagctaaagaattcttagatagatccactgaccttgctatctgtggaatcatgaaaactggaattaccacttccttaaacgatgaagaaattcctgaagaagctcaagaccgtattaatgagcatttacaaaataagatggatgaagtagataagcttgttgaggcttatgaagaaggttaccttgaagctctgcctggtagaagtcttgaagaaacattagagatgaaaatcatgcaagttcttggggaagctagggatatgtctggtcagatcgcagaacattatcttaacatgggtaaacaatatcctgatgatccttatgaccatgtaatggctgttgaaaatcactctgttgtaatggcacgtactggtgcaagagcatcaatgctgaaccttactcagattactgcttgtgtaggacaacaagcagttaggggtggacgtattgaaagaggatacattaacagaactttacctcacttcaaaaaaggtgagttaggggcaaaggcaaaaggatttgttcactcaagttataaatccggacttgatccaatcgaattcttcttccatgcaatgggtggaagagaaggtcttgtagatacagcaatccgtaccgctcagtctggttacatgcaaagaaggcttgttaatgcactacaggatttacaagttaagtctactggacttgttactgataaccaaggaaatgttattcagaccatgttcggtgaagatggtgtggatccggcgaaatctgactttggtaagccggcaaacttggataaacttattgatgaaattaggatggaaggtaaatag

SEQ ID NO: 7799 - DNA, 2226 bp, Methanobrevibacter gottschalkii
  source 1..2226: mol_type = genomic DNA
atgttgtctgaagattataaaaaacccgaaactgatgaaaaaaaggcgttttattattttggttttgaaagattagctccttttaatgaagttgatgtaattattacccaattaaaagaaaaattgggggatgatgaagaagcactggaaaaaattaataaacatgttgaattcattgaatcatattttgacagtgatgaattgaaagctgatgatagtttaaacgttccatttaaaaaagataaacgtagagctaaatgggaatcatataagaaagacttccctgaaatagatttaactgaggaagtagacactgaagattcaattgaacctgcagaagaagaaactgttgaagaagctattgtaagtgacgatgagatagaaactgttggggaacagcctaacgtatttaataaaaaacatcctcaaactaaaatctatattaatggagaacttttaggttattgtgatgatccaattaatttcactcaggaaatgagggaaaaaaggagaaatggggaaatatctcatgaaatgaatattacttattatgctgataatcaggagatatatatcttcaatgatcctggaagagcaagaaggcctctaatcatagttaaagatggtgttcctctgttaaaagaagagcatataaataaaattgctaacggtaaattaaactgggataatttaattaatgatggtcttattgagtatttggatgctgaagaagaagaaaatgcatatatcgcaatgaatttagctgatttaagtgaagatcatactcatttagaaatcgatccggctacaatgttaggtatttgcgccggtattattccattctctgatcacaattcatctccaaggaacacaatggaagcaggtatgacaaaacaagctttaggattatatgtgtcaaattatgcattacgtactgatactagagctcacttattacatcatcctcaaactcctattgttaaaacacgtattattgattcaaccaattatgatttaagaccgtccggtcaaaactttgttgttgcattaatgtcttatgaaggatataatatggaagatgcaatggttatcaacaaggcggctttagaaagaggtcttgcaagatcttcattcttcagagcatatgacacatcagaaaagaaatatgctggtggtcaggtagataaatttgaagtgcctgataaaaacattaaaggttacagatctgaggaagcttacagaaacttagataatgacggtgttgtaaatcccgaatcctacgtaaaatctggggatgtattgattggtaaaacttcacctccaagatttttagaagaaaacttcggcagtgttgcggatagaagaagagaaacttctgttactgtaagacatggtgaaaaaggtattgttgatgcagttcttttatctgaaactgttgaaggttctaaactggctaaaattagagtaagggatacaagacaaccggaatttggtgataaattcgcatcaagacacggtcagaaaggggttattggtttaatattatctccggaagatgtgccgttcactgaatttggtgttgttccagatttaatagttaatcctcacgcgattccatccaggatgtctattggacaagtacttgagatggttgcaggtaaagctggatgtcttgaaggtgaaagggttgatgcaactccgttcaatcaaactcttgaagatgaaattcagcaattgcttgttgataacggatttgagtctgcaggatgtgaatctttatacagcggagtaactggtgaaagattggatgcggaaatttttgttggtgttgcatattaccaaaaactacaccatatgaccactgataaagtttatgctcgttctagaggtcctgtccaagttttaacacgtcaacctacagaaggtagagctcgtgaaggtggtttaagatttggagaaatggaaagggattgtcttattgcacatggtgccgcattaactttaaaagaaagattgcttgatgaatctgacaaatatgaagctgttgtctgtgaaaactgtggtatgttagctgtagaggatacaagcaaacataaaaaatactgcccgatctgtggagatgtggaaacatatcctgttgagatttcatacgcattcaaattattattagatgaacttaaaagtttatgtattttccctaaactggttttaggagacaaagcataa

SEQ ID NO: 7800 - DNA, 1551 bp, Methanobrevibacter gottschalkii
  source 1..1551: mol_type = genomic DNA
atgacagtgaataattggaaattagttgatgcatttttcgataaatatgatttagtcgaccatcatataaaatcctacaatgattttgtaaataataggattcagaatattattgatattactgaccctatttctttagatgatggtaaatacactttaaaaactggtaaaatacgcattgaaaaaccatctaataaagaagcggatggttctagaagcattattgacccaactgaagctagacttaggaatttaaactattctgcagatatgtatcttgaaatggcattaaatgaagaaggcgaagacaatccattggaggaagtatatattggtgaattaccggttatgcttaaatctgacatttgtcatcttaatggtctaagtgatgaagaattaattgcaaaacacgaagaccctcaagatttaggaggatatttcattgtaaatggttctgaaagagctgttgttactatggaagagattgcaccgaataagattattcttgaacgtataggtgaagttgaagaaaggcatgccaaagctgtcgtaacttcaatcaaaagtgggttcagagctagaattactttagaatataaaaaaccacgtaaaaataaagcatttttaagaatatctttcccatatcttcctggggaaattccattagtcgtgttattaagagctcttggtttatccactgatcaggaaatcattactgctatttctgatgataataacttccagatgatgattgcggatgatattcaggtttctgcagaagaattggataaattcatagatcaaaatgtcattaaaaatggtgacaaggatgaagtaaagcagcatttacaagatgctgctattaagtacattggtaatagggtagctaaaaacatgcctaaagattatcgttataaacgtgctaaggatgttattaaccgttatttattacctcacatgggtattgaagaagaaagatgttatgataaagcaatttatcttgcggaaatgactgaaatgttattggaggttattgaagaaaaaagagaacctcacgataaggaccactacactaacaaaagacttagagtatccggtgacttaatggaagatttatttagagttgcttttactaatttgacaagagacatgagttatcagcttgaaagaagtctttctcgtggtaaagagctttcaattaagcaggcagtgcgtagcgatgtcttaactgaaaacatcaagcatgcaattgctaccggaaactgggttggtggaagagcaggtgtaagtcagcttttagatagaacaagttatatgggaactctttctcacttaagacgtgttgtatctcctttaactagaagtcaacctcattttgaagcaagagatttgcatccgactcaatttggtaaaatatgtccaaatgaaaccccagagggacctaactgtggtttggtaaagaatttagctttactgtgtaatatttcagaaggttctgatgaacaagagattattgatgttattggacagatggatgttgaattgatttaa

SEQ ID NO: 7801 - DNA, 240 bp, Methanobrevibacter gottschalkii
  source 1..240: mol_type = genomic DNA
ttgaaaagtgaatttgatattcaaaagcatatgctggtaccaaagcatgaaatcatgactgatgaagaaatttcaaacgaatttagtaatttggattatagttttaagaatcttcctaaaattaaagttgatgatcctgttgcagaatctattggtgcaaaaccaggtgatgttttaagaataactcgtgaaagtcaaactgctggtgtttttgttacttatagaatcgttgaagaataa

SEQ ID NO: 7802 - DNA, 867 bp, Methanobrevibacter gottschalkii
  source 1..867: mol_type = genomic DNA
atgacaaataataaaattgaaatcttagataaaattgaagaaaatttaattaaaattagagaaaaaaacgcattgacccattgcattacaaattcagtgacaataaatgactgtgcgaatgctgttcttgcaataggtggatcaccattcatggctgaagatgcagaagaacttgaagaagttgtagcaatagctgatgtattagtaataaatatcgggaaattaagtaaaaaccaaattaaagctatggaaattagttgtaaaaaagctgatgaaacaaacactccaattatattagatccggtaggcgtaggagtaaccgaacttagaaacaaaataaccatgaatttaattgataaccacaacattactgcaatcagaggaaacataagtgaggtcaaatccattgcaaaattatctggagttctggatgagagcaacactgcaaaaggtgttgatgttaatgtagatgacattataactaaacaaaacttaaaaacaaatggagaattaatatcaactttagcttcaaaattaaatacagtaatattagccagtggccctatcgatattttaactgatggaaaaacaacaatagccattgacaatggagatgatatgatgccgttgataactggtagcggttgcatgttatcatcagttgtaggaagttgtattggtggttcaaatccattagaaggaagtcttattgcaattttagcaatgaacattgctggtgaaaaagcaagagcaaaagtggatgaaaaagatgaaggtaccggttcatttagaacttacttaattgactatttatacaaaaccaatagtgaaagcctaattaacgaatcaaacattatgatattatga

SEQ ID NO: 7803 - DNA, 621 bp, Methanobrevibacter gottschalkii
  source 1..621: mol_type = genomic DNA
atgaaaaatatagatttatccctttaccttgtaactgacaaaagtgaagatatcgaaaaattcttaaaaacaattgaagaatccataaaaggcggagtcagtatagttcaaatcagagaaaaaactgctgaaactttagacttttataatttggctttgaaagttaaaaaaattacaacaaaatacaatgtgccattaataattaatgatagaattgatgtagcgttggctattgatgctgacggagttcatgtcggtcaaagtgacatgccttgtgatgttacaagaaaattaattggaaaagataaaatattaggtgtttcagcatctacaatatccgaagcgaaaaaagcacaggaagatggtgcggactacataggaactggtgctgtatttccaactgcaaccaaagatgatgcaccttcaattacaaagcaagatctaaaaaaaattgttgatgcaattgatattccagtagttgcaattggtggaattaatcatgaaaatgcatctgaattaatcgaaaccggaatttccggattatccgtagtgagtgcaataatgaatgctgaaaatcctaaaaaggcatccgaagagttattaaatgttttcaatgcctaa

SEQ ID NO: 7804 - DNA, 777 bp, Methanobrevibacter gottschalkii
  source 1..777: mol_type = genomic DNA
atgaataaacaaaggagaatgcctgttatttttgtaggtcatggggcaccgactaatgcaattggtgacaatatctacattcctgaatggaaaaaagtaggggaatacttgggtaaacctaatgtaataatagcggtttctgctcattggtatagtgaaaaattatatgttagaactgctaagaaaaataagcaaattcatgacatgtatggatttccagatgagttgtatcaggtaaaatatgaacctaaggggtctccgagacatgctgaaaaagtattggaattattggatattgcagaggaaaataatgattggggaattgaccatggggtctggtcagttttatcaaatatgtatccagaagctgatgttccggtagttatggtgagtgttaatggaaatttaactcctgttgaacaatttgaaattggtagaaaattagaaccattaaggcatgaaggagcattagttttaggaagtggaaatattgttcataatttgggaatggttgactggagaatgaatggcggatataaatgggcttatgcatttgataatgatgttaaaaaggctgttttaaatggcgattttgaaagaattgttaattttagaaatataaaattcaatgaaattgcaataccggctcctgatcatttttatccttttttaaatgtcttgggagctgcatcaaaagaggataatgtaaaaatattcaatgatgtctgtgaactgggttcaatatctatgacatcttacatattcgaagatatttaa

SEQ ID NO: 7805 - DNA, 291 bp, Methanobrevibacter gottschalkii
  source 1..291: mol_type = genomic DNA
atgttattatatattaattttttgactcaagttcattttcaatttaacaataatataaatgttcaagctgatattcaagaaggtaaatcagaaagtaaattggaagatggagatttaacttggatattcactgatgaaaatactaagcaggttgagttaaactccaagagtttaattttagcttatcgtaaaggagattatgaaggttttaaagaatttttaaatgatgtttctttaatattggctgccttaagatggtgcacgccatttaatttaacatttttaggataa

SEQ ID NO: 7806 - DNA, 276 bp, Methanobrevibacter gottschalkii
  source 1..276: mol_type = genomic DNA
ttgttaaaggacgattatcaattaacattccaatatggatttttcaatcctgaatatcctagtgctaatgctaaaaaagattttatattagattatgattgtaaattaataaaggttgattcagctaattcgcaatttgaagttgaagaagaattgaaaaagatgaataaaattatttatgataaatcaatattaaaatcaaatttgatgaggattttaaaaaaacttttaagaaaatcgataattcttataatattaaagttaaaagcagattaa

SEQ ID NO: 7807 - DNA, 1215 bp, Methanobrevibacter gottschalkii
  source 1..1215: mol_type = genomic DNA
atggcgaaatttaatacaattgatgattttgatgttgaaaataaaactgttcttgtaagagttgatattaactcacctgtggatccgggttctggaattattttggatgatactagattgaaattacattctaaaactattaaagagttgtctaaaaaaggtgctaaagtagtacttcttgcacaccaaagccgtccgggcaaaaaagatttcacaactttatctcagcatgccgatgctttatcagatattttaaatttaagagtaaaatatgttgattcattattttcaaatgttgcaaaggaagctattcgtgatttaaaacctcatgaaattcttttacttgaaaatgcacgtttcttttctgaagaatccctttcaagaactccagtggaacagtcaaaaacattgcttgtgagacatttatctccattgattgattattttgtaaatgatgcatttgcagcggctcatagatcacaagcttctttagttggatttactgttaatactccttcagctgcaggtcgtgtaatggaaaaagaattgactgtgattcaagatgcactggataatgtgcagcatccctgtgtttttctgctgggtggaatgaaacctgacgattcaattgatgttatggaaaatgtattgaataatgggacagcagatgctattctaacaactggtattgttggaaatattgtattatgggcgtctggagtagatattggtcaggtgaataaagatttcattactaataggggatatgaagacatggttgaaaaatccagggttctaattgaaaaatttggagataaagtaaaatatcctattgatgttgcttgtgaaattgatggggaaagagttgacattgatattggagaaattccggatgaatctatttttgacattggtgtaaaaacaattgcattttatgcaaaagaaattagggatgctaaaacaatattcgctaatggtcctgcaggtgtatttgaagatcctaaatttgcaatgggaactgaagatttaattaatgcaattgcaaactctgatggtttttcaattattggtggaggacatattgctgcagctactgctggacttggttgtgaagatcaaatgagccatgtaagcagtggtggtggagcttgcattagtatgctagctggtaaaaaactagcggttgtggaagctttgaaaaacaacaaaaaataa

SEQ ID NO: 7808 - DNA, 669 bp, Methanobrevibacter gottschalkii
  source 1..669: mol_type = genomic DNA
atggatacaccaattgtaatattaaattataaaacttatttggaatcaagtggtataaaagctttagaacttgcaaacgatttggaaagtgctgctagtgagtctggaattactatggtagcagttcctcaagctgctgatatttatagagtaagtcaagaaacttcactccctatttttgctcaacacgttgattcaatttctcctggcggacacaccggttctaatttgattaacacattaattgatgcaggaattagtggaactttaattaatcattctgaaaataggatgaaattggctgacattgcagaagttataaaatcatgtagggattatgaaatagaatcctgtgtatgcactaataacattgaaacttcaaaagctgttgcagctctcaatccagttgctgttgctgttgaacctccggaacttattggaactggaattccagtatctcaggcccaacctgaaattgttgaagacactgtaaaagaggttaaatcaattaataaaaaaattaaagttttatgtggtgcaggaatcacaactggcgatgatatgaaatcggccatggatttaggtgcggatggtgttttacttgcatcaggcatcattaaagcagaaagtccaaaagatgctttgcttgatttggtaagtaaattatag

SEQ ID NO: 7809 - DNA, 879 bp, Methanobrevibacter gottschalkii
  source 1..879: mol_type = genomic DNA
atggtaaaaaaaactcaaactgcatctttcggatcagttttaagacaatcccataattcaagaaaattttacaattcaaaattgtatgaaaatcttaaaattcccgaaaatattgattttaaggaatttaaaattaaaaaagaagatttaaataaactttattgtaaatctagtgaaaatatggatgaaattccagataatagcattcacttaatgattacatctcctccttacaatgttggaaaagaatatgatgatgatttaactttagatgaatatttggaactattgacttctgtttttgctcaaacttacaaaaaattagtgagtgggggtagggcatgtattaatatagcaaacattggaagaaaaccatacattccacttcatgcaatggttattgaaataatgttaaatctgggatttctgatgcgtggagaaatcatatgggataaatctgcaagtgctggtggatcatgtgcatggggaagttggatgtctgcttcaaatcctgttcttagagattttcatgagtatattttaattttttcaaaggaatcttattctaaaaacaaatctcaagaaaagaaagacaccattagccatgacgaattcattcagtggacaaaaagtatttggacatttccagcagtaaatgcaaaaaaaattggacatcctgcaccgtttccaactgaattgccacatagacttataaatctttatagttatgaaggggatgttgttctagatcctttctgcggtagtggaacgacttgcattgccgctactaaaaataaaagaaattatattgggtatgatattgaagaaaagtatattcaattgtccaaaagcagactttctaatcaaaaatttatttaa

SEQ ID NO: 7810 - DNA, 933 bp, Methanobrevibacter gottschalkii
  source 1..933: mol_type = genomic DNA
atgaacaatattgtaatatattttttaaaactatttatatgtttaataattatagttgttattatgagattatggagtaaaaatcaggaaaaaatattttttattaattcaagaaaagttgcatttccatctcagttattctataaaacagatgatggcaggtatttggcatattggccgaaagattataggggcagaaaatcaacattacagtcaagaaattcattgattggcaaattcacagaagaatgggtttgcaagctatttggaagactgatcgttgatgatgatttgtatttagttaaacaagcaataattccttcactaggtattacatcccgttctccagtagacttggttatttcaactgctaatagaaaaattttaaaggcaagtgaggtaaaagttatttttgaggttaagatgtctattgtctggaattggcaatatttcgatgattccaataatgttgtggaaatcggagattttagaactcatcagggaaagcccagtttcacacgttcagactctattttaaaagctattggtaaatgtattggtattagagtttcaagcttcgaatcatcaaagattccaatcgttgttataggtaatgctccattatctaatggtttctgtaaaaaagcagatcacttaaaaagagttggtgtaattcaaggtttttggtctttaaatccgtttcctctaaaccatggaaatactcgaaaaacaacaccttatggaggttatatcagatttaataatacttctgaattaaaaagaaatcttgataatttattctctcaggatttaaactttttttcaggaatggaaaatcctaagacattaggtaaatacattgaaattgctaataatgaaaataattatgaagataaaggtttaaaatttttgaagttaataagaaggtattga

SEQ ID NO: 7811 - DNA, 918 bp, Methanobrevibacter gottschalkii
  source 1..918: mol_type = genomic DNA
atgtcatttaatgaaaaccaaattcaaaaattagaaaaaagcggatatagatttgtaggtaaacatagacatgctgccgttaaaacttgccattggacccgtcagagtattgttgagaaaggagtttgctataaagaaaaattttatggaatacaatcacacagatgtcttcaaatgtctcctgcagttccaaattgccaacaagaatgtgaattttgttggagagatttgactcatactcaaaccgaatgggaagacaatgagtacgatgatcccaaaacaatcgttgatgaagctattgaagcacagaataatttattatgtggttattacggaaatgacaaagcaaataaaaagaaattagaagaacttaaaaagccaaccaatgctgcaatctcccttgcaggagaaccaactctttatccgaaaattgatgaattgataggtgaatttaatcatagagattttacaacatttgtagttagtaatggtcaatgtgttgacagattaagaaatctggaaaatgatccatatcaattatacctttccttagatgcacctaacgagaaaatatttaatgaaatatgtaggccaagaataaatgatgcttggaataatttaaatgaatcacttgaaacattatccagttttaactcccgtacatgtataaggaatacatgcgttaaaggaagaaacatggaacaaccagaaaaatatgccgaactaataaaaaaagcagatcctgattatgtagaagtaaaagcatatatgtgtgttggttcatcacgtgaccgattaacccttgataatatgccaacatttgatgaagttaaatcatttgcaaaaagaataggtgatgaatgcggtaaagaattagtaaatgaatctgaaattagccgtgttgttttactagaataa

SEQ ID NO: 7812 - DNA, 1119 bp, Methanobrevibacter gottschalkii
  source 1..1119: mol_type = genomic DNA
atgaaattttttgaaaatgtggcaaaacaaatttttaataaggaaggcattccaattttggaagggcatgttgcttattctccagaggaagccatgtccatatcatcggagatgggtgttccagttgttattaaagcacaagttttaactggtggaagaggtaaagttggtggagttaaatttgccaataatcctggtgaagcattaaaagtagctgatgagattttaggaatgcaaattaaaggtgaaacagtaaaacatttattaattgaggaaaaagctgaaattcttaatgagttttttgttactgtgtctatagatagaggtgctagaagaccagttattatagcaagtaaagaagggggtgttgaaattgaaaatttagctaaaacaaaccctgaaaaacttattaaatattatccaaatcctttaatcgaatttttaccttatgaagcacgtgaaatcgcacgtaaaatgggtgtttcttctgatttgatttctccattaggttctataatctggaagttgtacaatgtatttacaaaatatgattgtgatactgctgaaattaacccattaatcacaactcctaacggattaatagctgcggatgctaaaatggttgttgaaaatgattcattattcagacatcaaaatttagttaaaagattacattataaaaggaaagctgttgattttgttaagttaaatggtaatattgcagttattggtaatggtgcaggtttaactttaactgctatggacatgataaaacttaatggtggtgaaccagcaactttcttagatattggtggtggagcttcagaacaagtcattaaccaagctttaaacattgtattgaactatgaaccagttaaggtaatatttttaaatgttttaggaggtattactaaagcagatgatgttgctcgtggtgtgattaaagctttaaaacaatctgaacgtcatgttcctattgtaatcagattaaccggcacaaacgaagaagaaggtcaaaaacttttagaggaagctgggattccctatgaaacttcaatggaaaaagcagctaaaaaagcagttgatctttgtaatgagttaaaacaggaaatgaaatag

SEQ ID NO: 7813 - DNA, 549 bp, Methanobrevibacter gottschalkii
  source 1..549: mol_type = genomic DNA
atgagaactgaaattagaatttgtggttttggaggtcaaggaattattcttgcaggtattattttaggtaaatctgcatgtctttttgatggtaaagaagctgttcaaactcaatcttatggtccggaagctcgtggaggagcttctaaatgtgaagttgtaattagtgatactgaagttgactatcctaaagttcaaagtccagatattttagttgcaatgtctaacgaagctttaattaaatatattgtggatttaaaagataatggaactttaattgttgatcctggaacaactgatattgaagatgttagggactatattgaagaacataatattaaagtttatgaagctcctgctactaaaacagctactgatgacataggacttaaaatagtggcaaatattgttatggttggatctattacaaaaattactggagtcatatccaaagaagcagctattaaagcaattgaagttagtgttcctaaaggaactgaaaagaaaaatatcagtgcttttgaagcgggatatgctttagtggaatag

SEQ ID NO: 7814 - DNA, 864 bp, Methanobrevibacter gottschalkii
  source 1..864: mol_type = genomic DNA
atgaatgaaggaaaacaaaatagatttctcccttacttaagagatgacagattacctcatattttctgtccaggttgtgggaatggagcaattattaatgcattcttagcagctatggaaaaagcagaaatggattttgataatatagctatggtttctggaattggatgttcttcaagaattccgggatacttaaaatgtgattctctacacactactcatggaagagcattaagttttgcaaccggtctgaaaacagctaataaaaatttggatgttgttgtatttactggtgatggtgatgctgcttctattggtggtaatcatttaattcatgcagcaagaagaaatattaatttaactgtaatttgcatcaataataatatttatggtatgactggtggtcagataagccctacatctcctaaaggtagttttggaactactgcaccatatgggaatctagattctccatttaaattagcagaactcgttgcagctgcaggcgcaacatattctgcaagatggactactgttcaaattgagaatttagtaacttccattaaagatggattaaaaaatcccggattttcatttattgaagttgcaactcaatgtccaacctatttcggtcgtaaaaataaacttaaaactcctactgccatggcagctgtcatgaaagctaatactgtattcaaatctgctgcagacaggatgagaccaaaagaattagaaggaaagattgtcgtcggggaattcgctaattctcaaagaagtgaattcactgaaaatattgaaaagttaagtgtagaaaaatcaggtaataaaactagtatcaattctgcatatgaaacagagttatag

SEQ ID NO: 7815 - DNA, 1176 bp, Methanobrevibacter gottschalkii
  source 1..1176: mol_type = genomic DNA
atggcaataatattaactttaatcctagattcacaaaaggaaaaagtgggtgttaaaatggctgaagaattttttattcaaggaaatgaagcatgtgctaaaggagcattagctgcaggttgtagattctttgcagggtatccaattactccatctacagaaattgcagaaactttatctcgtgatttgcctaaagtgggggggtcatttgttcaaatggaagatgaaattgcctctgcaggagcgattatcggcgcttcttggggtggagctaaagcaatgactgctacttcaggtccaggtatttcattaatgcaagagaatataggctatgcattcatgactgaaacacctattgtattcgttaatgttcaaagaggttctccatccactgctcaaccaaccatggcagcacaggctgatatgatgcaggcacgttggggttcacatggggattatgaacctattgcattatctccttcaagtgttcaagaattctttgattttacaatcaaagcttttaatttagctgaagaatacagagttcctgtatttgtcatggcagatgaaatcattggacacatgagagaaaaaattactgttccggagaatattgaaatcgtggctagaaaaagaccagaaaaaactgatgattatttgccattcgaaaatattgaaaatggaaccacacctatgcctgcatttggggacggattcaatgtgcatgtgactggacttactcatgatgaacgaggatatcctgatacaaacactcctgaaactcatgaaaaactcattaagaggatttgtaataaagttttaatgaatagggataaaatttgttctgtaagaagtgaaaactgtgaagatgcagatattgtcattgtttcatatggtgctcctgttagatctgttgtagaggcagttaataaaacagataaaaaagtaggttatattaaaatagatactccatggcctttccctgatgaacaaattaaagaattaactgcaactgcaagtgatgttctagttgtggaaatgaatttaggtcaaatgtattatgaagtggatcgtgttgttaaagataaaaatgttcatttgcttggtaaaatagggggagcattaccaactcctgatgaaatattagacgaaattaataaaataggaggaaactaa

SEQ ID NO: 7816 - DNA, 273 bp, Methanobrevibacter gottschalkii
  source 1..273: mol_type = genomic DNA
ttgattattattgatgaaaacttatgtaaaggatgtcatctctgcttattcatgtgtcatgaaaatgtatatgcaatatcctctgaagttaataaaaaaggagtacaattgcctttcgttaaatttgaggaaagatgcattaaatgcggcacctgtgaaattgcatgtccggaccaagcaataacagtagatttgcctgaaaattggtggatgaaagatggcaataatattaactttaatcctagattcacaaaaggaaaaagtgggtgttaa

SEQ ID NO: 7817 - DNA, 492 bp, Methanobrevibacter gottschalkii
  source 1..492: mol_type = genomic DNA
atgaaagacttaaatacaccaattaccgatgaagatttattaaacctcaatataggagatcaaatcactatttctggaacaatatatactggccgtgatgcagcccttccacaattagttgagttaattaaagaaaaaaaagtgccatttgatttaaatggaagtgttataatgcatactgcatttagtaatgcaggaattgcgccaacaactagcagcaaagtggaaatcgaatcgacaatcccctatttaagtgaaaatggcattaaaattcatattggaaaaggaatgttaagcgatgaaacaattaaagaactagataaaaataattccatttttgtaataacaccccctgttgcagcattacttacaagcaaagtcttagataaaaaatgtgtcttatttgaaagtgaaggaatggaagctatgttcaaattaaaagtggaaagaattccgggaattgtagctattcataatggtttaagaatttaa

SEQ ID NO: 7818 - DNA, 735 bp, Methanobrevibacter gottschalkii
  source 1..735: mol_type = genomic DNA
atggctgtagacaacggagattttgtaagagtaaattttacaggtaaagttaaagaaactgatgaagtatttgatactacttatgatgaaattgcacaagaagctggactttttgatgaaaacaaaacttataaaccaattcctattgttgtaggtggaaaccacttattgcccgctattgaagaagcaatcattggattagaagaaggagaaacaaaacacattgaagtagattctgacaatgcatttggtcctagagatcctaaaatggttcaattagtgcctatgaaagagttcaaaaaacaaggcatgactcctttcccaggtatgaggattcaatctgaaggttcaaatggaaaaatcttaaccgtaaatggtggaagggtaaaagttgattttaaccatgaattggcaggaaaagatttagtttatgatgttgaagtaactgaaatcattgctgatgaagaagacaaaatcaaaagtatgattgaattacattatgctaatcctaatgtggatattgacaaaactgaaatcgacattgttgatggtgttgcaaacattaaattagatgaaatggctaaattcgatcaaaaatcttacatggatgttactttcgcaagattcagaatagctaaagatatctgggataatgttgaaggtatcaccaaagttaatttcgttgatgaattcgagaaaaaagaagaatctgacgacgaagttgaagaagaataa

SEQ ID NO: 7819 - DNA, 1095 bp, Methanobrevibacter gottschalkii
  source 1..1095: mol_type = genomic DNA
atgaaaagacgaggagtagctaatttaccacttcatggaggacatcccccaaaatggttattcacaagaatggtggatttatcaggagctctagcttcagttattattgaagaatatagtttaaatgagtttttaaataggatttccaacccatattggtttcaggcattctcatgtgttttaggttttgactggcactcttcaggaacaacaactacaacattgggagctctaaaagcatcacttagtcctgaagaacatggaatctatttgagtggtggcaaaggtgcaaaatctagaaaaacaccgcaaggaattgaacatgccggagaaatctttaatttaaaaacagaaactactgaaaaattagttgaaactagtaaactgtctgccaagattgacaattcatgcattcaagatggctacacattataccagcatgatttctttattactgaaaaaggagattgggctgttgttcaacaaggactaaacacctatactaaatatgctagacgttatcattggttaggttctgaagttgaagaattattaaatgacccccatagtggaatttcatgtgataagaaaacaccagatacactaaacatgtcttcaaaagacagtgcaaatgctcaaaaagtaagtgttgatttaataaatgacaatcctaatcatttaagacaatattttaaaagaaaaaatagtcaaatgcttttagacgattttacaatgccttcacatcatcctattcttgatatggatatttcagataaagagtttgaagttttaacaagagcttatgaaatacaacctgaaaattacgaagaattaatattacttcagggaatgggacctaaaaaaataagagcattagctctaatatcagatttggtttatggtgaacctgcaagctggaaagatcccgtaaaatacagttttacacatggcggaaaagatggttttccatatcccgttgatagagatgtttatgataactctattcaaacaataagagatgcgcttgaccaagcacatataaaaaaagatgaaaaattaaaggcaattaaaagattggatgactttatcctctaa

SEQ ID NO: 7820 - DNA, 540 bp, Methanobrevibacter gottschalkii
  source 1..540: mol_type = genomic DNA
atgaatgttaatgttttaagattagatcatagattaaaaagggatacccgtattactactcatgtttgtttgactgctcgtgcatttggagcaagtaaaatttacctttctggtgaaagagatgctaaattaatggaaaatgtaagggatactgcttcaagatttggtggaaattttgagatagaatacagtgaaagttacatgggtgtaattaaaaaatggaaatctgatgggggtaaagttgtccatttgactatgtatggatcacaggctcatgaaattgctcctgaagtacgagaagatggttctgatattttgattgtggttgggggctctaaagttcctggaagtgtttataaggctgctgactggaatgtgtctgttacaactcaacctcactctgaagtatcttcacttgcagtatttcaacatttgttaatgaatggtaaggaatttgatttaaagttcgaaaatcctgtattggaagttattccaactgctcatgggaagaatgttaatattcacaatgaaaatcgttag

SEQ ID NO: 7821 - DNA, 783 bp, Methanobrevibacter gottschalkii
  source 1..783: mol_type = genomic DNA
atggaagacgatagctattttgaaaatgaagaattttccccaataaaatcacttttagggcttttaactttttcgacaattttaccaatcaatgtttacacctcaattgagtacatgactaaattaacttggtgttggccattcttgcatgttttagtaggtattttagctgctgtttgtggatatgtatcttttgaagtcctacatttaaatgcgttattcaccgcagttattgtttatgcgtttttaatgttaatcacgggttataatcatttggatggtgtaatggacatggctgatggtgtgatggttcatggtgatcctgaacgtaaaatcagtgtaatgaaagattcttctgtaggtgcaggtggtgttgcaactttatttttagttgcaagtcttactattgcaggattatataatattttagattattattttatacttgggattatagtttgtgaaatggccgctaaaacttctttaataactaccgcacttttatcaaagcctttaattccgggaattggaagttattttattaaagaaactacaattgttaattatttagtttcaacaattcttgtaatttgtattgcgtttttattaggtaatctaattggtgttgttggtgttttaggagctattgttgggggtattattatagcaactatttcaaaacgtaatttcattttagctaacggcgatgtccttggaatgagtaatgaaactggacgtttatttgcattactgtttatggcaattgctttatatttcatttaa

SEQ ID NO: 7822 - DNA, 2115 bp, Methanobrevibacter gottschalkii
  source 1..2115: mol_type = genomic DNA
atgacgacagaatttattattagaatggatgatatgcctaaaattatacataatgatttatcagattctttggatgttgagtctattttgaaaaaggattataaatatatttatgaggctattcaaaatgaaggattcataatagaaaataattcaggagatctttttaaagagatattgtttgatagtaaagttgttggatttgctttttatgaattaaatgcattgactagttttgttttaaatgaggtttatatcttacctgaatttaggggtaattctttatttttattagaaattaatgtactcctttcagcaggcaatacattgagtattttacagccaacaaagaatcttgtagagattttaattcattatggatttgcatctaaattaagtgaaaatattgtagccagtgccattggctttgattttaaaagtgaaaatattttgtctaattccagtgaggaatttgataatgatgatcaaatattgtcttccaatatatatgatttggatattcgttcctgtctatttcttaaggatatctcaactcctggtaaaaatattatttattatcatgaagagcttaaaaatgattttaaagaatatggggaacgtaaatccttaaataagaattattttaatgaaatcaaagatttatttttacaaaattctgatgaatttactcaaatactgtttgatttaaaagaagaattgccaaaatctcaattgggatttgatgtagtcataggaaatgatgatggattttcagagtatatgcaggacattattgatgatggcattatttcagaagataaagcaaaaaaaattaataatatattaaaagaagaatatgaacgaggtgaagttactgatgatggaattataacccgtttaaacttttttattaatgatttggattcgcaaatcgatccattcaatatatttgaaatcggtgctaatttatgtccatattgttgtaactttataaatttaacagatgaatcatgtccaatctgtggttataatctattttatgaaaatgattttgattttgaagatgatgataattttgaagatggaatatttatcaataaagacaatgtgttatctgttatgtccggattatatgaaagatttggcagaaaatataaacttgaagatattaattatggaaaacaatatcctacaagttatgatttagatcaatatagaattttaaaatttattgatgaatatcataatctggaagtggcattttattttttaaataatttaaaattgcctcaagagatattcaatgatttattatttgaagaggaatatgttacttatgaaattactgaagaaacatggtctgattttgctaattatagtttaacagtaaatgatttgaaagatattttaagagataatgggctaagggtttcaggaagaaaacaagaactcatcgatagaattggtaaaagtgatatttctgttagtgaatttagctccgataaattatttttaaccagaaaaggtaaagattatttaaatgagtattcttggattggcctatacaatgaatttttaaaaaattttgattttgatgatttttacagattttatgagtctaacgatggaaatttcaatgaaattgtttccaaatatcttgatgaacatataaaaatagctaaaaataataaagattttgattatttaataaattgtttttcatctaaagcaatattttcaggattagataaaaatccaaatgatgcattaaaatgggaaatgagaaggttctgtttaacaattaatccgatctactcacggggggtttatcatgatttttatttacatttgaattctgaaaatataaataatctaagatcattgaaagacgaattttcaagtgaagagatgttggattcatttgaagaatcttgggattattttgaatttaataagtccattgtttcaaaaaaagatgctaaaattatttttgaaagattactgattaataatgaggatttgaaattaattaacatggagcttaaggacaggtactctggaagagatgctattgataatactttttcagccgatttaaatgattattttaaataa

SEQ ID NO: 7823 - DNA, 1083 bp, Methanobrevibacter gottschalkii
  source 1..1083: mol_type = genomic DNA
atggagttaaatatcactaaaaaggattatggaatttgtataaataatccgaatcatttcttagcattaagtgattttacagtaagtgatgggattgatattgtagaaaatgtcaatgttgtaaaagcaaaagatgagtttaaagccactgcaaaaaaagctgaggcatttaatcaatccaaaggttcttatattgctcaggcttcagattctattgattattttcaaaataattatgatgatttaactatttttacattcatggcaaatgatgttgttattgaagatttcactgaatatttaaaagtagcaaattctccaaaaggtttttttgatgcaagaattaatttaagtcatataatttacattgatagtgtagtttctccaaaagatttgcttaaaatatttaaaatagtgactaatactaaagcaaaggtactggctaatatgtgtttaccggcacatattcaaaatataatcaatacaaatgactttttagcagttttatccaacattaatgtatctgaaagtcaagatttagatattaataatgcagaatatgaagaaatagattgggatgatttaaaaataaaaatggaagatgcagttgaaataagtttggaagatgcatttagttatcttgaattaacatttggaattcttgattatttggtatctgaaggaattttaattggagatttagtggatactggtatggaacttgcaaatggggtgaagataactcaggaacttagagataaaatggaaacacaaattcttaaatcactgactgatattaatgttgtttcactaattattgctggaatgaggatggaacaggatttaactggaaatcacataagggaatttgatgtacatgatgattcagattacttgtatactgatgaagtattgggtcttgctatttcaaatcagattgcaggaacaaaagcaacttttaattttaagagatatcatgaagcaaaacctggaattattgcaggattgcctcccatactcgatgatatttttgcaggtctgattgcgggatgcatgtctaaaatatttgaggaattgttatga

SEQ ID NO: 7824 - DNA, 1170 bp, Methanobrevibacter gottschalkii
  source 1..1170: mol_type = genomic DNA
atggcaattattattgatcctcaagtaagcggaattgcaggaaacatgttaataggagcgtttgtggatttaggtgcagatgcaaacaaactaaaagaagttatggaaaaatccgcagaatgttttggaaaagttgaagttacatttaaaaaaataaataaaaaaggaatttcatctacatattgtcatgttgaaatgcttgaacataaacattccatttgttatccgaagtttattgaaaaaattaaaaaattagacttagataaaaaagttaaagaaacctcaatcaaagtatttgaaagaatagctattgcagaaagtaaaattcatggaaaaactttagatagtgtccattttcatgaagtaggtgcaagtgatgcagtagccgatgttataggatccatttatgcatattatagtttaaatttagataatcaaaaaataatcggcctcccaatagctgttggagggggaagagttgaaactgcacatggaattataccagttccagcacctgcagtagtggaggtcttaaaaaatgcaaaaatgattggtggaccagttgacagtgaacttgcaacaccaacaggagctgcagtttatatggagatttgtgatgaaataaaagaattcataccattaattaaagctaaaaaaacaggttatggagctggaaagaaagattttgaccaccctaatgttttaagaatcattgaaagttcagatattgctgaaagtgataaaattgatgttattgaaacaaatatggatcatttgaccggtgaagaaattggatacttatttgataaactcctagacattggtgcaagagatgtttcagttactccaataataatgaaaaagaacagacccggcaatttacttaaagtgatttctagaaaagaaaatagggaaaaagttattgaagcaatatttaaagaaactggaagtttaggtatccgaatagctccaaatatgcacagaggaatttcaaaaagagaatttagcaaacaaatattcaacataaatgataaagattatgaagtgacatttaaaataggttatttaaacggtgaaataatctctaaacggccagaatatgaagacctgaaaaagatagctcaggatagcggattaccgcttaaaaaaataagtgagatgattagatga

SEQ ID NO: 7825 - DNA, 678 bp, Methanobrevibacter gottschalkii
  source 1..678: mol_type = genomic DNA
atgaaaaaggctatttcaattttttccgggggccttgactgtactgttgcaacaagcgtttttagtaaaagccataaaattcatgcaataacttttaattatggtcaaaaagcattcaaaagagaattaaaagcatcaaaagaaatttgcaagaagatggattggactcatgaagtaattgacctcccatggctagcaaatatcagtaattctagcctgaataccaatgaaaaaatcccagaactttctgctgaagatttagataacttaaaaataagtcaagaaagtgccagtagtgtttgggttccagcaagaaacactgtttttacatcaattgcattgtcttatgctgaaagtattggtgcaagttcaataattgttggttggaatggtgaagagggagcaacatttccagataactcaaaaggatatatgaaaaaatttaatgaactgatcaaagaaggttcacctgaaaatattagaattgaagcaccattaattgatttagataaagaagaaattgttaaattaggagttgaatatgatgctccaatggaattaagttattcttgctacaaaggcaagaaaaagcaatgcggtatttgcgaaagttgcatgagacggaaacgagcattcaaaaatttaggtataaaagataaaagtgaatatgaaaattaa

SEQ ID NO: 7826 - DNA, 999 bp, Methanobrevibacter gottschalkii
  source 1..999: mol_type = genomic DNA
atggcaaaagaggatagaagtgaaataaatccattcactggtagaaaacattatgataaaattaatgatgataaattcctcaaggaatcatacaaggaatattattcaatgattgatcaagtacaactcttggataatactcaaaatggtcaaattgtcattaatgttgctttaaatttaatcaatgcagtcaacagttatttgtctgaaattggtaggcttgattatgttgaagattactatgattgggatgttcatttggttggagataatgctgtaaatgctttttgcatgcctgggggtaaaattgtaatgttttcaggtattctttcagttgcaaatactgaagaaaaaattgcttttattctgggtcatgaaatggctcatgcacttcttgatcatgctagaaccagaatcagtgctcaaaatactcaaaatgcaataacttctgcagcatggattggtagtattgcaatggatttttttggtttaggtgaacttggcagtctaacaagagcagccactaatgttgcaagcattgggtctcagtttctcttaatgaattcttggggaagggaccaggaacttgaagctgacagattgggcatgatgattattcattgggcaggttatgatgtctctcgcattcctgcattttggagggatatgtcaatgcaaaattctaatgaacatgatttcttttcaacacatcctgcagattcaaaaagaatagctactatgcagcaattgattgtagaaatagcaaacgataatgatttttattcaaaaccagtaattggtgatgttaatcaaactaatgttaaatctgtttcttctgaggggggtttttgttcaaattgcggaaatcctgttgatattgatgctaaattttgcacatcttctggaaccaagcttgatgttggattaagatgtccaaattgcggatcagcagttggaaataatgatgtattttgtattaattgcggatttaaactttga

SEQ ID NO: 7827 - DNA, 999 bp, Methanobrevibacter gottschalkii
  source 1..999: mol_type = genomic DNA
atgaaagatattttcgataatgttcaatttggagatttaaaacttaacagtcgtatagttagaacaggtacttgggaaactgaaacttccgaaggaggatttttaacacctgatatttatgatagatatgaaaagattgcaagtagtggtacagggttaattgtctctgaaatgttcgcacttgaccataaagatagattttacccttattcaaccaatatgaactacagggggttcattaaggattatcaaatggtcactgatattgctcataaatatgatgttccaatttttggtcaacttgcattcttttattatgatgacggtgaaaatcaaaaggtagaagctaatgatattgctcaagagggcattaggaaattgcaggctgaagtaattatggcagctaaaaaattctcatttgcaggatttgatggaatccaaattaacatggggaataatttttatctttcaagatttatgaacccttatttcaatcaaagagatgataaatatggtgggaatactgaaaatcgtgtcagaatttctgctgaaataattaaagttattaaaaagaccatggatatccatgttagttgtaggattaatccgtgggatgcaagaaaagatggaatgactgccgatgaaagtattgcaattgcaaaagaacttgaaaaagcaggtgctgatagtattcaacttactgcacgtacaatttcacaaatttatgataaaggtgaaaaacatccttttttagtttatgttgaaaaattaattgatgcagttgatattcctgttgttttagggggatctcttagagatatgaaaacaataaatgatgttttaaatagttcgactgttgagtatatttcaatgtccaaaccctttgttgctcaagcagactttttagcagactggaaagctaatggtgagggagtatcagtttgtcaaagttgtaacaattgctattctaaaaaaactagtacttgttttaaattttaa

SEQ ID NO: 7828 - DNA, 216 bp, Methanobrevibacter gottschalkii
  source 1..216: mol_type = genomic DNA
atggtgaatccaattattgcagcaattatctcctttttcttaccaggtattggtcagataatacaaggtgcagatgttaaaaaaggaataataatgtttgttattgctatcattttaggttggttattagtaaacttccttggtagtttaggaaacattatatattgtatttatgcactttatgcagcatacgatgcatataaaatagaagcataa

SEQ ID NO: 7829 - DNA, 1716 bp, Methanobrevibacter gottschalkii
  source 1..1716: mol_type = genomic DNA
atgatggcaaaagtaagatttacagaaacagcacttcgtgatgctcaccaatctctgcttgcaactagaatgagaaccagagacatgattcctgttgctaaagaaatggataaagtaggttatttttcagtagaagcttggggtggggctacttttgatacttgtattagatatttaaatgaagatccatgggaaagattgagacaactaaaatctgaatttaagaaaactcctattcaaatgctgttaagagggcaaaatttagtgggttataagcattatcctgatgatattgtaacaaaatttgtagaaaaatcctacgaaaatggtgtagatatttttagagtatttgatgctttaaacgatgttagaaacatggaaaaagcgataactgttgctaaagatcaaggtgcgcatgtacagggtacaattagttatactataagtccagttcacactatagatggttttgtagatttggctaaacatcttgaagctcttgattgtgattctgttgcagttaaagatatggctggtttgataactcctgcagctgcttatgaattggtatcaaagttaaaagaagaaactgatttgcttgttgatttgcattgtcattgtactagtggtatgactccaattagttattatgcagcatgccaagcgggtgttgatattttagacactgccatttcacctctcgcatggggaacaagtcaaccaccaacagaaagtatggttgcagctttacaaggaaccgaatttgatactgggcttgatttaaaattattggcttctattaaagaatactttgaagacattaaagaaaaatatttaggaattttagatcctatctctacaagtattgatgctgatgtattattatatcaaattccgggaggaatgctttcaaatcttatttcccaacttaaagaacaaaatgcacttgacaggtataatgatgtattggatgaaatgcctcgtgttagaaaagatatgggatatcctcctcttgtaactccaacaagtcaaattgttggtattcaatctgtaatgaatgttttaggtggggaaagatacaaaacagtatctaatgaagttaaagattacatgaaaggaatgtacggtaaaccaccagcacctgttgatgaaaaattatctaaaaagattttaggggatgaagagattatttcatgcagacctgctgatttacttgagccggaatttgataaaatcaaagcagacggtaaagaaaaaggatttgttaaatccgatgaagatgcattaacttatgcattatatccaccaatagctccgaaattccttaaaggagagactgtagaagaagaacttaaagcacctcatgcattcagtgaagatgaggctattggaattccaacccaatataatgttgaagttgatggagatatgtatgaagtcaaaatcatgcctacaggatttatggaaattgaagaggcagataatggtaatttccatccggttgaaggaggagttacttcatcaatgaatggtatggtaattaaacttaaagttaatgttggggataaggtaacaaaaggatccaccatatgtgttattgaagctatgaagatggagaacgacattcaatctgaagttgatggtgttgtggaagaaatctttgtagaacctggtgatgcagttaatgccggtgacactttaatggtaatcaaatag

SEQ ID NO: 7830 - DNA, 1095 bp, Methanobrevibacter gottschalkii
  source 1..1095: mol_type = genomic DNA
ttgaataaaattaaaatagcaattgttggaataggaaactgtgctagttctcttattcaaggaatacattattatgatggtaagaaccctgaagatgcaatagggcttatgcattgggatattggaggatatgaacctagtgatattgaagttgttgcagcttttgatgtggatgcaagaaaagttggaaaaactattgatgaagctattttcgcaaaaccaaactgcacaactgtttttcaagaagatattcctaaatatgatgctaaagtaagtatgggtcatgttttagatggtgttgcagaacacatgtctaactatgatgatgaatacacatttgttgtaagtgatgaagatcctgttgatgttgttgaagttttaaaagaaagtggagcagaaattttagttaattacttgcctgtgggttcagaaaaagcagcaagatattatgctcaatgtgctcttgatgcaggtgttgcatatgtaaattgtatgccggtatttattgtaagtgatgatgaatgggatgttaaatttaaagcaaaaggaattcctattgtaggtgatgatattaaagctcaaatcggtgccactatcactcatagaacactagctagtttatttatggataggggtgtaaaattagataaaacctatcaaatcaacactggtggtaacactgactttttaaacatgcttaatcgtgaaagattggactctaaaaaagaatctaaaactgaagcagttcaatcagttttaaaagaaagaatggatgatagggatattcatattggtcctagtgattatgttccatggcaaaatgataataaattatgtttccttagaatggaaggtcgtacatttggggatgttccaatgaacattgaacttagattaagtgtagaggattctccaaactctgcaggatgtgtaattgatgctgttagatgttgtaaaattggtttagaaaggggtattggtggacaattaacttctatttcttcttacactatgaaacatcctccaattcaatacactgatgatgaagcatttgaaaatgttgaaaaattcatttctggtgatttggaaagataa

SEQ ID NO: 7831 - DNA, 846 bp, Methanobrevibacter gottschalkii
  source 1..846: mol_type = genomic DNA
atgaatccatatatagaaattttgagacccggaaatgcattaatgggtgcaatatccataattttggttgcacttattgataaaacaatttcaattccagtaattcttgcaatgattgctgtattttttgaaacatcagcaggaaatgtgattaatgattattttgattataaaattgatttaatcaataaacctgaacgaccaataccttctggaagaatttcactaaagaatgggagaaactacggttattcattatttgcagctggaaccgtatgtggttttttaattagctatattacaaataattggataccatttggaattgtattatttgcagacatcatcctttatttatatgcatatacattaaaaacaacacctttaattggtaatttaactgttggtttcatgactggtttcggatttgtatttggaggattttccatcaataatccaaatattataataacttcgttatttttaggattttttgcatttgtaatgacaacagcacgggaaattgtaaaagacattgaagatattgaaggagataaaacagatggtgcaaaaactttacctattctgattggtgagaaaaaaccagcaatacttgcagctattttaataataattgacagtgcattgtgtcctttattgtattattaccatatttttggaatattatatctagtagtgatagcatttgcagtcatgctgttcatttactccgcaatattaatattaaaatcacaaaaaagagagattgcagcaaaagtttctaaaaatttaaaaattggaatgctaatagctttcgtagcatttatattcggatctttaatataa

SEQ ID NO: 7832 - DNA, 1578 bp, Methanobrevibacter gottschalkii
  source 1..1578: mol_type = genomic DNA
atgtttaaagagtttaacataaacagaaaggacaaatattatttaatagctattttaatattcagtgcaattctagtcggatattatattaattttaataatgcaataggcatttcatgttcagatgtttatatttatcttataaattctctttattatactggagaaaaagtaaatataacaaattttatccatatatctccggttgtctgttttttgacttctcttttttttagagtgggttttgttgataaattggctatttatgttgttactggtttttttgcgattatcggcaatattggtttttacttactgttaaaaaaattttttaacgaagaattgagcttgaccggtacaatactgtactcctcattttcactttatttaatttggcttgcaaacggaacattagacattcctgcaacaggagtgataatctggatagcattatttacaatgattgcagttcgagaaaacccaaaatactaccaatacctaatcccattaatggtaatcggactttatacaagatacacagtaatattaacccttccagcatttttcttattctatgttctcgaaaacggattcaaaataaaaccagaagactggaaatacataaaaagaggaatcatcatcgcaacaatcatagcaataacagtattcctaatagtttttactatgggaaatggcagatttgatgcagctagtcaaatggcgaatggtgtaaaaggaacaaatggagaactcacagatcctgcatacaatccagattcaagttattattttatgaattatataaattacatatcaaattcacatactgtatttgaaataaaccctacattatactcccctacaattttagcatatgcaatatatgcattgctgtttattggggcagggttctggttatatgaccataaaaaagtaaattttagaaaaacagatgcaatttcaattataataatcctaatgggaattataagttttacaagagttacctcagtgattacatccatattaatttatattggaatttatttacttgccagagatagagaatataatgatggagtattcatgttaggctggattttagcaaatgcaattttccttagtttcaacatagttaaagttaacagatacataattcccacatttccaccatttatattctttgtattaacggcaatagaaactattcatgcgcatgtcaaaattaataaaaacatgatacccctagcattaatagtattatttgttattcaggcttttgcattcacagcaacagttgaaccaacagacaaatacatgagtcccgaagaaatttcaaattacataatcgacagcaatccggactatgaaaatatgaccattggagtttacaacataagaccatacagctggtgggttggatcaaataccataggaatcccttcaagccatcaaagtgaaatagagcaaagcaatataagttattacatcgtgaataagcctatggacaatttaacaaattttactgaaataaaaaatattaatgaattatatttatataaaaataataatttttaa

SEQ ID NO: 7833 - DNA, 1575 bp, Methanobrevibacter gottschalkii
  source 1..1575: mol_type = genomic DNA
atgttcaacgaattcaacataaataaaaaagataaaatttacttaatagctattttaatattcagtgcaattctagtcggatattatattaattttaataatgcaataggtatttcatgttcagatgtttatgtatatctcttaaatgcactttattataccggaacaaatgtacactcaattgacaacattttcttgtctccggttgtctgttttttgacttctcttttttttagagcgggttttgttgataaattggctatttatgttgttactggtttttttgcgattatcggcaatattggtttttacttactgttaaaaaaattttttaacgaagaattgagcttgaccggtacaatactgtactcctcattttcactttatttaatttggcttgcaaacggaacattagacattcctgcaacaggagtgataatctggatagcattatttacaatgattgcagttcgagaaaacccaaaatactaccaatacctaatcccattaatggtaatcggactttatacaagatacacagtaatattaacccttccagcatttttcttattctatgttctcgaaaacggattcaaaataaaaccagaagactggaaatacataaaaagaggaatcatcatcgcaacaatcatagcaataacagtattcctaagagtatatgggatgggtaacgggcaattcgaagcaggcagtcaaatcgcaaatggtgtgaaaggaacaaatggagaactcacagatcccgcatacaatccagatataagttattatttgacaaacttccccaactttatatcaaactcacatacaatatttgaatcaaatcctgtcttagaataccctaccccattatcatttgcagtattcgcattattatttataggaatcggattttggttatatgacaataaattaaaagctgaaaaaagagatgtgattcctgttatactaattttaattggcattataagttttacaagagttacctccgtagctacaaccttattaattctaattgctttttatttaattggtaaaaatagtgaacataaaaatgaattatttatgttaatatggatactggcaaatgcaatattttttagctatcacattattaaagttaaccgatacattcttccaatagttccaccattcatatttttcatattgctcgcaataaacaccattcctgaacatatcaacattaataaaaatgtaattccgattgtcctaatcgcattattcgcaattcaagcttttgcattcacagcaacagttgaaccaacaaacaaatatcttgcaacagaagagatatcaaattatataattgacagtaatccggactatgaaaatatgaccattggagtttacaacataagaccatacagctggtggattggtccaaatacgataattcttcatgcagatgcccctggagaaatagaccaaagtaatgttagctactacatctcacaaagcagaatagataacctaaaaaattttactgaagtaaaaaatagtggtggtttacatttatatgaaaacaataatttttaa

SEQ ID NO: 7834 - DNA, 1545 bp, Methanobrevibacter gottschalkii
  source 1..1545: mol_type = genomic DNA
atgaaagttgtatgctgtaagaactgtggtgcaaaataccaactcgatgatgatgatgacatatcaacattcgagtgttcttcatgtgcaggtgacttagaatacttagaaaactattctaatggaaaagaatctaatcaatcattcgttagttcaacaaaatataatgattcatacattgtacaatgtcaagaatgtggactgaaatacaaaattaaaagtagtgacagcatacttgattatgaatgcgacagttgtggtggatctttaagatatttagatgatgagatgaataaagaattagattcataccttgaagagagacatgcagagcttcaaaacattagaaaagaatcaaaacctaaagaaccaacatctgaagaaataaacacagaagataacactccctcaataaaatcgattactgataaacttgaaaatttcttttcagaagagcatatgttgcaaatagcagatattgagaaaaaagaagaggaagaaatacaagaacaggtaatctcaaaaacagcaagaactaccataccacaatccgttttatcaagatttggaaaagagtttgcaactcccaaaactgaagattatgacatcctaaaaaatttccttaaaacagaatttttcaaaggaatggatgaatactatccaaaagataataaactaaaatcaaacaaaagttttcttgataaaattagcttaaaagaacctgataacggtgaatcaaaacctgtcaaaagttcaattataaataataactcaaaatttaaccttgaaaattttaatgttgaaaacatagaaagtaacaatacaatcataataataggtgtagttatttttattttaagcataattgaagttttaactataaatagtggtataggaattattgcgttatttattggagtaattattttatgttatggaatttataaaactagagatgtaaaacaagatgaagaaagaacaagaataatcagagaacacttgttaagtcttccagaagagttttatgtattctacaatgttaaaatcccaacttccacttcaggcattaatcatgttgttgtaggtccaactggaatttatgcattactttcacaaaaatataatccaaaacttagattggaatcagaaaacgaaaatctaaatttaattggaagcagtgaatctgaagaaaataaacttgaagaattttcaagttatgggaatatgagaaaatttagatacactacaaaacaagcaaaattttcacaagataacaaagttaaacagaaagcattgagtttaggtgaagatttaataaacttcctcaatgaaaataacattaaaaattgctttgttgaaccattagttggattcataaacaatgaggtcgttgttataaatatgcctttaactgatgaagatttatttattgaagaattattaaataaaatccaaaatactaccattaaattagattctgaaacaatcgacaaatgtgctgttttaattaacaaatattctgcagactgttcctcagaattttaa

SEQ ID NO: 7835 - DNA, 1002 bp, Methanobrevibacter gottschalkii
  source 1..1002: mol_type = genomic DNA
atgaaactatttaataaatatccttttttaattggtgaaattagttttaattactatgatctggctaaaaaagaggagttatcttattttcgagttgcaaaacttttaattgaaaaatgtagtgaatgtggaattaatggagttaatttccatgttggagattctgaatatttgcattgtaaatatgaagaagattcaaatcaaactgatcaattaagttttgatgagtataaagagctggcggagtattgtaagaaattaggtttggtttttattataactcctgcaaatattgaaattgtggataagttaaatgatgtagttgatgtttataaaatctcttcttctgatttaactaatcttccacttattgattatatttcaaataaacacaaacctatattattgtcaactgcagcttctaatttaagggagattaaatctgctgttaaatgtatagaagataattctaattttaaaattattataatgcattctgttttatcatatcctacaaaactagaagatgctaatcttttaatgataaaagatctttcagaacaattcaaggattatgatgttggttactcggattatacagtttctgataattttatgtttatcttaacaactgcataccagtatggtgctgttgtgctggaaaaatatttcacattggataagtcatttgaaggacacgaattcgctatggatgaagaagatgcacgtattgttagattaagtgctaatgtattgtctaagattaatggttataaaaataaacaacctttaatttgtgagtctttttcaaaaaggaatgttagaaaatctattgttgcaaaaagggatattaaatctggtgaaataattgataattcaaatattgattttaaaaggccgggagtgggtatttctccatcaaaagtagatgatattattggtaaaaatgctaatagggatatttctaaaggttctttaatagaatatgatatgttatcataa

SEQ ID NO: 7836 - DNA, 1665 bp, Methanobrevibacter gottschalkii
  source 1..1665: mol_type = genomic DNA
atgttcaataataataaaattttagtagttattccagctaaaggggtttcaaaagggattcctcgcaaatatgttcgtttattgaataataaaccgttgatttattatgcaataaacattgctaaatcatctcaatatgttgatgatgttgttgtaactactgatgattctgaaattgcatcaatttctgaaaaatttggtgtaagtgttattagacgttcaaaagaattatccggagaggatattcctttggatgctgttgtgtttaatgctatggttcaaaaagaaaaatctgcatttgatgaatatgatattgtaattacaatgttgcctacatcccctttacttaaaacacagactttagataatgctattgaaaattttgatgatttttctcttgaaagtgtaatttctgttgtagaagataaacagttgttttggggttatgatgatgataataaaatatattttcccaagtatattgaaagatgtaatagaaaagatttacccagttcttttagagaaactggtgcaatcatagctactcgtagaggttttatcaacgaaatttcttgtattggggaaaatattgatgttattgaattatctgatgaggaagccattacagttgatgattttaaagactggtggattgttgaaacaattcttcagaggaaaagaataggaattgttgtaaacgccaataatgaaataggaactagaagaattgacaattgtttagcatttgcatcaaaacttgtttctcatgaatttctatttattttagatgaaaaacataaattaggacaaaatttagttgaaaaatttggctttaattttaaaatttataatggtcatgatgcaatttataatatattggaggaatttgcccctcagatcataattaatgatgtatcagacactacggaggagtatatgtctgatttaaaagaaagagggtattttgttgctaattttgatgatttaggtgttgggtcaaatttggctgatgttgtatttgattcattatatgagcatgatttgagtgatacaaatgtttatactggtcaaaaattccatattcttaaagatgaattttatttccagcctcataaagtaattactcaggatgtagataatattttgattatggttgatggcaatgatcctaaacatttgtctgaaaagtttttagaagcaattttatccactacatatgaaatgaaaataaatattatagtaggtaggggatatgagaatattgaacagtttatatctaactatgaatccaatcctttagttcaaatttatcaaaatgttccaaatgtcagcgattttatgtttaaagcagatatattagttacttctgcaagtaaaatcatgtatgatgcttgcgcattaggtgttcctacaatttgtgtttatcaaaatgatttagaaacttctcatgtttttgcaaatagtgctaatggaattttaaatcttggtgatgttgaatcattaacaaaacaggaatttgttaatcaattcttggaattagttaataatcatgatcttaggttgaacatgcataataaaatgaaatctattgatttgcaacatggttatgaaaatatttgtgctgttgtaacagaagagtataggaagtttgcaatgaataaatga

SEQ ID NO: 7837 - DNA, 1050 bp, Methanobrevibacter gottschalkii
  source 1..1050: mol_type = genomic DNA
atgaatatgaaaagtatgtcagataaattattaaaaaaaataaatgaattatccacacctgttaaaataatgcacgtttgtggttcccatgaacatacaataatggagaatggaattagaagtttacttccagatgaaatagaaatcattgcaggacccggatgtcctgtttgtgtagttccctctcgtgaaattgatgaagctttagaattaattgatagaggagttacaattacaaccttcggagatatgttaagagttccgggttctgaaagatcacttgcagatgcgaaagctgaaggaggagatgttagagtagtttatggaataaatagagctattgaaatatctgaaaaagaagataatgatgttgcattcatatctgcaggttttgaaacaactgcaccaaccactgctgccgaactattagcaacacctcctgaaaatttctcagtactatcatgtcacagattaataccaccagctattgattttttaattaattctggagagacaagtctaaatgcattaattgaacctgggcatgtttgtacaattattggaactagaccgtttgaatatttctcaaaagagtttggaattcctcaagctgtagcgggttttaatccattagacatattaatgtctgtatatatgattttaagacaaattcataatgaaacaccaaaaatagaaaatgaatacacaagagcagttagagaagaaggaaatacgattgcgcaagaaaaaatgaatcaggtatttgaagtgacctccagggaatggagaggatttccaaaaataccaaattccatcttagaaattaaagatgaattcagtgaatataatgctcgtgaaaaatacgatattgaagttaaagatgttaatgaagcacctaaaggatgtatttgcggacctattttaagaggacttgcaagaccagaagactgtaagctatttagaaaaacatgcaatccattacatccaatcggagcttgtatggtaagtaaagaaggaacatgcaacatcgcccacagatactcaagatga

SEQ ID NO: 7838 - DNA, 705 bp, Methanobrevibacter gottschalkii
  source 1..705: mol_type = genomic DNA
atgacaattgaagcaattgcagttgatattgatggaactataactgatgaaaaaagacaaatctgtatttctgctattgaagcattaagaaaagcagaatcaaaaggaataccaaccattattgtaacaggcaatgttgttaactatgcttatgctacagaagtccttattgggtgtagcggcggacttgtagcagaaaatggtggtgttgtctttaaagaaggtgaaaacaataatgctgttgaaacattagttgaaagagctttcgtgacatctgctgaagagcacttaaaagataaattaggcgacaaatttgataaacatgcatcccacgacaatatgtacagattaaccgaaactgtattctataaaacattagatataaaagaattagaagatgcattaaaagattttaaatacttagacgaacttgaaatttatgatagtggttttgcactacacattaccgacaaacgtgtgaataaaggaacttcactaaaatatttatgtgaaagaaatggaataaatatggaaaatgttatggctattggagatagtcaaaatgatgaagatttcttaaaacaagcaggatacaaaatagctgtggcaaatgctgaagacaaattaaaagatattagtacatacacttgtgagaatatgttcggcgatggtgtagcagaagctattgaaaaatttgtattatag

SEQ ID NO: 7839 - DNA, 1314 bp, Methanobrevibacter gottschalkii
  source 1..1314: mol_type = genomic DNA
atgatatacgaaatagcacaagaagcaaaaaaagcaatagaaaataattgtgatgcctatgaaatatacattgatgaatcaaaatccatccaacttgactcccgaaaagaggaattaaattttgcaaaagaagaaattgaccgtggagtaggcattagagtaattaaagacaataaaataggttttgcattcacttcaaacatggataaaattgctgaaacagcaaaacattcaattgaaaacactaaattaaataaaactgatgaaaattatgcatttgctgaagtcgaagaaatcccaagtgttaaaaaagtatatgataaaaaatttaatgaattagatcttgatgaatccattgaatttttaaaaaacacaatagatacaacaattgaccaaggatgtgacataactggttctggattttcagcaagtgaaggaaaatcccttattttaaactcgaatggggtttccattgaagatgaaggtaccggatttagtattggattatctgtaaatatacaaaaagatggaaaaattgcaacagcgtataactcacaatcttcaagattctttgatttggatggtgaaaaattagctatcgaagtgtgcaatcttgctaaaagttctcttgatacaaaaccaattgaaacaaataattatgatgttgttcttgattattatgctgcaaccggtcttctgcaaacatttatgaatgcattcaatggtgaaaatgttatgagaggaagatctatcttaaaagataaaataaatttccaaatagctaatcctaatttaagcataattgacaatcctcttttagaaaaaggaatgtatacttcaaaatgtgatggggaaggcattgtaagtcaaaaaactgatttgataaaagatggaattctaaattcatttatttatgatatttatactgcaaacaaatcaggcgttaaaacaacatctaatggtcttagagggtcttatttaacaacacctatgatttcccccacaaaccttgagtttaaatttagtgatatgaaagatttatcagaaattaaaaatggtgttttaacaactagtgttttaggagcccatactgcaaatccaatttcaggagatttttcagttgaagcaagtaatgcatttaaaatagaaaatggtgaattaagcgagcctattaataaagcaatgatttcaggaaatatatttgaaattatggaaaaagtagaaggattgcaatccgaaataaaacaatatggcccatttattattcctaaattattagttcacgatttaagagttgttggacaaaatcaataa

SEQ ID NO: 7840 - DNA, 252 bp, Methanobrevibacter gottschalkii
  source 1..252: mol_type = genomic DNA
atgcctaaaaatgaagagtttgatctggataaagaaattgaaagaatttctcgcaaaactaatattaatatgagaaattcagaattttcttttgaaaatcaaataagaaaattagataaagaaattgataagattatggaagataaattaaaagaatttgatgataacaaaaagttaacttcagattatttttctattgattataatgaatctacaataagcagatatagggaaaaattaaaaaagatttaa

SEQ ID NO: 7841 - DNA, 462 bp, Methanobrevibacter gottschalkii
  source 1..462: mol_type = genomic DNA
atggaaagtgaagttaaagtaattccagaacaaaaattagctgttattaattgtaaaactccaattactgatttagaaattttcctttcaatgttaatgggttgggttgatgctgaagagatcgaaactgctggtgaaccattcattgtttatttctcaccaagacatcaagtcaataagggggatgcagtatttgatgtaagcattccaattaaagaagatgctaatgaaacagatagaattcgtgttgttgacatgatttcaaacaaagttttatccggtattcattatggctctgcagatagtataatggaaacttatgaaaaattagttgatattgctcaggaaaatcactatgatattatcggatcacctaaagaagttttaataaaaaatgttcataattgtgatgatgaaaaagaatacataactgagattcaattgcctattattgaaatgtag

SEQ ID NO: 7842 - DNA, 1224 bp, Methanobrevibacter gottschalkii
  source 1..1224: mol_type = genomic DNA
atgggtaccgaatttttaaaaattaaagaatgtgatgaagctactgaaattattcaaaaattatttgatgaaaaattaaatcaacaaagtgaagaaattcttgttacagaatcatacggaagaattttatttgaggatgtttattcaaaaatggattttccaccctttgataaagctttaaaagatggatttgcaatacttgctgaagatagttttggagcatctgaagaatctcctaaaacattggatgtaattgattttttagaggcaggtgcaactactgataaaaaggttgaaaaaggaaaatgtattgagattagtactggtgcagcaatgccggaaggtgcagagtctgttgtaatggtggagtatgctgaaaaatcagatggtaaagttaatttattaactactgctactcctacacaggatgttgctcgtaaaggatctgatattgaggaaggtaaattaattcttaaaaaaggagatttcttaaatcccggtaaaattggagtattgctttcacaaggttttgaaactattgaggtgtataaaaaacctattttgggagtgatatcttctggaaatgaaatttctcttcaaggagaaggattaacctacggtaaaatatatgatgttaacggaggcatgattaaaaacgccgctatttcttgtggtgcagacgctcattttttaggcattatgagggataattatgatgaagttaaacataaaataactgatgctttaaaagaagcggacattataatttgttctggtggaacttctgcaggtcttggagatgttttaaacagcgttttagaagaattgggtgaagtttatattcatggtatttcagttcaaccaggtaaaccaactatcattggagtaattgaagataaattggtcattggtcttccgggaaatcctgtttctgctttaatgatatttaatgcatttattgcagaaccgttaactaaattggctggtattgataaggattttgaacttgacactgttaaaggcaaaatgactagaagaattcattctcctgttggaagaatgcaatatcaacttgttaaagtagatggaaaggatatccatccaatatttaaagattcaggtgcaatattttcactttcaactgctgatggttatgtaaaagttccaaaatctgttgaacttttagatgaaggtgaagaagtagaagtttatttatttaattaa

SEQ ID NO: 7843 - DNA, 306 bp, Methanobrevibacter gottschalkii
  source 1..306: mol_type = genomic DNA
ttgtctaaacctaatcaaaatcaacaacaagaatatagaagagtgagaactcctaaaaaaggtgaaattcctggagtagttgaacaaattatgggacacggaaaattaaaagttcgttgtgctgatggaaatatgagaatgactagaatccctggaaaaatgaaaaaacgtatttggattcgtgaaggagacgtgatccttgtaaagccatgggatttccaatctgatgaaaaagctgatgtaatttggagatacaccaaaaccgaatcaaattggcttgaaagaaaaggctacttaaaaatgtag

SEQ ID NO: 7844 - DNA, 771 bp, Methanobrevibacter gottschalkii
  source 1..771: mol_type = genomic DNA
atggattcgaaaatagctaaagcagatgcaaaacatgaaaaattacattcccagaaaagaaagaaagatagttctgataggaaagtggggaatgaaattttcgataaaataacattagaaacactatataaattagctaaccaaggacatatcgatattttaaatggtgctattagcaccggtaaagaagccaatgtacttacaggcattactgatgatggaaaatttatagcagtcaaagtttatagaattgctacatctgattttaaaaaaatggattattaccttaaaggagatcctagatttaatcttaaaaccaaaaataagagaaaaattatttattcatgggttacaaaagaatttaaaaatttaacccgccttgaatctgcaggagttaaagtacctcacccaattacaagtgcaaataatgtattattaattgaatttattggagatgaaaatggaaatcctgcacaacctgttaagaatcaaccacctaaaaattctgaagaatttttcaagaagttacttataaatctaaaattatttgtaaatgaagcaaaattagtgcatggcgatttgtcaaattataatatattaaataaagatgaagagcctgtaattattgatgtttcacaatctgttgttttagataatccgatttcaagagaacttcttgaaagagacattaacacacttgttcgtgaatatactaaacttggtgttaaaactagttttgaagaaatttgggaatatgtgaatccccggtaa

SEQ ID NO: 7845 - DNA, 249 bp, Methanobrevibacter gottschalkii
  source 1..249: mol_type = genomic DNA
atggaaacaccaccgtgtaaaagcaaaattaacagaataccgaaaccaccttctgcaaaaatatgcgttaaacacagtcaaaaaaaaaaacacatgactggcatgactaaattttacagatcctatgactttgaaatacagaaattgcctatgataaatgaaaatacaatgcaaaaaccacagcagatttattttaaggacttgccggacaaggaaattataaaagaggatgtaattttatttttttaa

SEQ ID NO: 7846 - DNA, 1317 bp, Methanobrevibacter gottschalkii
  source 1..1317: mol_type = genomic DNA
atgggtgaaaaatataaaaaagtgattaatatgaaaaaatatttaccaagatatactgaccaggaactgaaagaatctctagaatacatgggtgctgttctaataactggtccgaagtggtgtggtaagactacaacagcaaaacagcaatgcaaaagcctaaaagaactacaacatcccgttcatggaaaatcttacttaaaacttgcagataccaatcccatagaacttctgaaaggtgaaaagccaatgctgattgacgaatggcagatggcaccagaactgtggggtactgttagatatttggtagatgaatcagatgaagacggactgtatattttaacaggatcgacaatagttgatgaaagtaaaattgtgcactcgggagcaggcagaataaaaaggatagtgatgcgcccaatgagtctgtatgaaagtggtgaatccacaggtgaaatctcattaatcgatttgtttgataatgatgatttaaacattgatggtgtaacttcaaacttaacaatacctgatttgatatttgccgcatgcagagggggatggccagaatcactaaacaaaaaaaccaaaaaacagcaattggcaattgtatcaaattatatcgatataatatgcaatagtgatgtttcagaagtggatggggttaaacgcagtcctcaaagagtaaaaactattctaaaatcctacgctagaaacatatctacacttgcaactaaaaaaacattaatgaaagatataaaaacagaatatgctgatatttcattgcctacattcaattcctatattgatgctcttgaaaggttatatgtaatccaaaacattcctgcatggtcaccaaacatcagatccgcaaacaccatcagaaaatcctacaaaaaagaattcattgacccatcaatagcagtggcaagtcttaacctaacacctgaaaaattattgaaagatttcgaaacattcggattcatatttgaaaatctatgcatacgtgacctgcttgtttactcaagttcagtcaatggtaaagtattatattacaatgacgacagcgggcttgaagcggattgtgtcatatatctaaatgatggcagatatgcattgatagaatttaaattgggcaaccgagaaatcgataatggagcaggaaatttacttaaactaaaagatttgattaaaaaaagtgttgaaaacaaaaagattgatttagaagagccaagttttctagcggtgattactggtggtgaactggcttatacaagagctgatggagtgaaagttattccaataggatgtttgcgataa

SEQ ID NO: 7847 - DNA, 939 bp, Methanobrevibacter gottschalkii
  source 1..939: mol_type = genomic DNA
atgtttaaatttgataaagaacaagaagtttttgacttcgctggagtcaaaatgggtggacaacctggagaataccctactgtattagcaggaactattttctacggtggacacaacattcttaatgatgaattaaccggtgacttcgacaaagataaagctgaaacattagttaacgatatggcatccatttctgatgtaactggaaacccatacatcgtacaagttttcggacaaactgttgaagcacttccaaaatacatcgaatacattggtgaaatttgtgatgctcctttccttatagattccacttccggagatgcaagagttgctggtgcacagtacgctgacgaagttggattaaccgaaagggcaatttataactcaattaacatggcagcagacaaatctgaattagatgctctcgcttcaactgacatttctgcatccattatcttaggattcaacccaatgaatgctaccgttgaaggtaaaatgaacatgtgggaaaatggagacgatggtgcttacgaaaaaggtttgcttgaagtagcagcagattgtggtattgacaaatttatgatggatactgctgtaactcctttaggacaaggtgcaggtattgctgctagaacttcctttgcagaaaaagctaaatggggatatccggttggatctggtattcacaacgttccttctgcatgggactggttaagagactacaaaaaagaaggtaataaaactgcattcacagtttgtgatattggtgcaaacattgtgcaagtaatgtgtggaggagacttcgttctctttggacctattgaaaacgcaaaaattgcattccctgcagtagcacaaactgatatgttcatttccgaagctgcaaagcctttaggaactgaacctgtagattaccatccaatgaacaaattattataa

SEQ ID NO: 7848 - DNA, 621 bp, Methanobrevibacter gottschalkii
  source 1..621: mol_type = genomic DNA
atgccggaaacagattatttaaaaataccacaaaatagaataggggcattaattggaagcaatggaggagttaaaaaatccatcgaaaaagcgactggaactattttagacatagatagtgatgagggcactgtttacatcacccctggtgaaaatatggaggatccattaggagtatggaatgcgaatcatattgtaaaagcagtagctcgtggatttaatcccgaagttgcattaaaattagtaagtgacgattattatttagaagtaattagcttgccattatacatcggaaaatccaaaaaagcccttgcaagacataaaggtagaatcatcggaaaagacgggaaaacacgtgaaataatcatggaaatggctgaagtgaatatggcaatctatggtaaaactgtttcattaattggggaaatggacaatataatggttgctaaagaagctattgaaatgattttaaaaggttctagacacaaatcagtttatggattcttagaacacaaaaaagaagatttaaaaatgaaagaattcaaagatcttgtcggaattgaagatgataaaatagaattcaaggatggaatcgaatttgatgaaaaaacattgcagtaa

SEQ ID NO: 7849 - DNA, 1704 bp, Methanobrevibacter gottschalkii
  source 1..1704: mol_type = genomic DNA
ttgcaagagcaagatgttggaaccgattggagaaatgattttaaaaacttgactccatctgagttctttaggaaaaacaagcaaatgttaggatttactggtaagattcgttcattaaccattgtattccacgaattgattacaaacagtttcgatgcagctgaagaagcaggaattttaccggaaatcgatattgaattaaaaagagttgaaaaagaacattatatactcaaactcaaagataatggtccgggcattcctgaagattatgtaatgagagtgtattgtagtatgtttgcaggatctaaattcagaaacatacaatctagagggcagcaaggattaggttgtagtggttgtgtgttactttcacaaatgaccacaggtaagcctgctcgtgtaatttcatgttataaagaaaatggagacatcaaaggagtgaaaatgaaattccaaatggatgtaaaaaacaaccgtggaattttaatggaaagagaagattatcctgcagaaagcacaggagtatgtatcgaattacaatttaaagaagtttcatattctcttgcagaacaaggtgcatttgaatacatcagaagaaccatgattggaaacccacatgctaaaattacattcagagatccatctggacacaaatacatattcaaaagagcggcagacattgttccaatccttccaaaagaagtattacctcatccaaagggtgtaagcgctgacgacttaatgacaatggcacaaaatacagacagtagaagatataaaagcatgttaacatcatcattatcaagaatgtccaataaaagagtggatgaaatttctgaacttactggaatcgacatgaacaaacgtccaaaagaccttacattccctgaagcagaaactattgtacattgctttaagaaaatgaaattcatggcacctccaacagatggacttatacctattggatctgaacaaatcgaaaaaggtatgaaacaaattcttaaacctgaatttgtaacaacaattaccagaaaacctgtaacatatcaaggcggtgtttcattcattattgaagcaggacttgcatatggcggagactctggaagagtcgtaaaagaacaaagaaaatctgaaattatgagatttgcaaacagagttccattgacttttgatgcaggaagctgtgctattactgaagctcttaaaagtattgattggaaacgttacggccttaaagacttagataatactccattgaccttgtttgtaaatatcatttcaacacaagtaccgtatctttcaactggtaaacaaagtgtatctccagaacctgaaatcgttcacgaaatcagacaatccactatgaaactagcccgtaaacttcaaaaacaccttagagctaaaaaagcagctaaagaaaaagagaaacgttcaaaagtattcgaggattatatgcctgtgattattgaagaagctgcaaaacttggagaaaccggagttccagaatatcaggaagttttagcaaaagttactaaaagggctcttgccgaattacttggtgaaaaagttgaagaagaagaggaagaagaagaacttgacgcaatcatcatggaagaagttgatgaaagaggatatgctgttgatggaaacagtacactagatagcttcgaagaagatgatgttgatgacgaatttgaagattga

SEQ ID NO: 7850 - DNA, 1095 bp, Methanobrevibacter gottschalkii
  source 1..1095: mol_type = genomic DNA
atgactgaaataaaagaaaatcaaaaagcccatagagagaaaaggaaagaatacacctacaataaattaaaaggattaggtcaagaaatcattgaagatattgaaaaacaaaaagttccttcagttaaagttccttctagaggtactggaaacattgtttatgataatgctaaaagatactatgtgttaggggacagatacggaagaagatcattaggtaatgtaaagcagattagaaaactaggtcagatggtttatgttgctaatttctgtaaagatttagttgctcgtgaaaaaacagctacaatcagggaaatgtattatgtttcagaaggttggggaataagttttaaaacacagcaagaatccaacattgttggagaggatttggaagtaacacttggaaccacacgtgaagatttaggtttaatgcccgaagaagatggtgcatcagtatatggagacattacactattagatgatggcgttgaaattaatgctgcaaaagctggaaaatccggttatacaatttcaccaactattgaccaagtagaattcttagactgtggtgttgaaagagttattgcagtagaaaccatgggaatgttccacaggatggttcaggaaaatgctaacaaaagattcaacactttaattgttggacttaaaggacaagctgcacgtgctacaagaagattcattaaaagagttaatgaagaaattggattgcctgtttacatctgtaacgacggagacccttggggattccacattgcacaagtaattatttccggaagtgcaaaattagctcatgttaaccatgacttagcaactcctgacgctaaatttatgggagtaaccgcatccgacatcatcaattatgatttacctactgataaactcaaagatgttgatgtaatgagactcaaagagctttctaaagaccctagatataaaagcgatttctggcaaactgaaatcaaaaaaatgcttaaaattggtaaaaaagcagaacagcaatccttctccaaatatggtcttgagtatgtagtggatacatacttcccgcaaaaacttgaagaattggaaaattaa

SEQ ID NO: 7851 - DNA, 273 bp, Methanobrevibacter gottschalkii
  source 1..273: mol_type = genomic DNA
atgaaacaatgcatggatacagaaaatttacacagaagacttaaaaaaatcatagggcagttaaatgcaattgatcgtatgattgaagaagatattccctgtgaacaaatattaatgcaggtgaatgcatcaaaatcagcactacataaagttggacacattatcgttgaaggacatttagaacattgtgttaaacaagctatggaagaagatgatgtagatgaagctttagtggacatttcatcaattttagaatattactctagactttaa

SEQ ID NO: 7852 - DNA, 1869 bp, Methanobrevibacter gottschalkii
  source 1..1869: mol_type = genomic DNA
atgaatctaaaatttaaaaatgaagaaaaacttgaaatcatatttataatagtatcatcaatcagtttagttttaggatttttattatctattgactatctttcttggatttcaataataatatgtgggattccaatattcaaggaatgtattgaaggattaatcacagaatttgatattaaagcggatttactcgtgtcaatagcaatcattgcatccattattatcggtgaaatatttgctgcaggggaaattgcaacaataatggcaattggaggatttttagaagaatataccgtagcaaaagcacaaaatcaaatcaaagaactcgctaaaatgactcccaaaacagcaacaagaataaaaaatggaacagaagaaaaggtacctattgaagaagttaaaattggagatattttaaaaatacttcccggtgaaagcataccaaatgatggaattataatcaatggagaaacatcaattaatcaagctactcttacaggagaatcaataccggtagataaaacaagaaatgacgaagtatatagtggaactattaacctttacggatcatttacaatgaaaacaacaaaaataagtgaagatagttcccttcaaaaattaattaaacttgttgaatcatcaaaaccagaaaatgccaatattgttagagcagctgataaatgggcaacaatgattgttgtaatagcatttacagccgcaatattaacatatttatttacatttgaaataacaagatcagttacaatactcgtagtattctgtccttgtgcattagttcttgcaactccaacagcactaatggcagcagtaagtaatttaactaaatatggaatcctagtaaaaaatggagaatctttagaagaattagcccatattgatgaagtaatttttgataaaaccggaacattaacttacggcaatccaactgtaataagagttatctccgaaaatccacaagaaatgatgtatcttgcagcatcacttgaatctaaatctgaacatcctctagcaaaagctattgttaaatattataataacaacgatttagcagctgttaatgaattcaaaatacatataggtaaaggaattactggatatataaatggagtgcaaataatagctggaaataaaaaattcttagaatctaaaaatatacctctaggttccaatgaaaatagcagtaatggagaaatagaaatttttgttgcaaaaggaaataaaataataggaaaaatattccttgcagataccatacgcagtaatgctaaagcaacaattaaaaatctaaaaaaattaagaattaaaacaacattgcttacaggagataatgaaaatactgcaaaatcaattgcaaatcaagttagaatacataatattaaatttaattgcttacctgaagataaaatccaatacattaaagacgagcaaataagaaaccatagagttgcaatgattggagatgggataaatgatgctccatcactaagaaaatccaatgttggaatatcaatgggaaatattggaagcgatctttcgattgaatcatcaaatatcactttaatcaaagacaacatagaaaatattcctcatttaattgaggtatcgaaaaaaacaataaaaacgatcaacataagcatcggatttgcattaacactgaatataattgcaatggcactagctattttaggaatattgaatccaattgaaggagcattaatacacaacatcggatcagtgattgtaattatttactcttcaatattggttaactacaaaagttcaaaaatagattatagaacccaacagttcgatgtaaacaaagctttaaatataacaatgttctaa

SEQ ID NO: 7853 - DNA, 204 bp, Methanobrevibacter gottschalkii
  source 1..204: mol_type = genomic DNA
atggctgaaaaagaaattaaagtagtgggtatgcactgttcttcctgtgtaaatgctgttgaattatgtttaaaagatgttgatggaattgatgatgctaaagcagaccttgattctggaattacaaccttaacattatctggcaatgtaagtgatgaagacattaatgaagctgtaaaagaagcaggatttgaagttgaataa

SEQ ID NO: 7854 - DNA, 1017 bp, Methanobrevibacter gottschalkii
  source 1..1017: mol_type = genomic DNA
atgaaaactgttgcaattaatggttatggaaccatcggtaaaagagtggctgatgcggtagctgctcaagatgacatgaaagttattggtgtaagtaaaactagaccaaactatgaagcaagaactgcagttgaagaaaaaggctatcctttatacattggaattccagaaagagaacaaatgtttaaagatgctgaaattgaaatatccggtactgttgaagatatgattcaggaagcagatatagtcgttgactgtactcccggaactatcggaccacagaatcttgaaatgtataaaaaggcaggagttaaagcgatttatcaaggaggagaagaccatgatttaactggtctttcatttaatgccatgtctaattatgatgaatcatatggtgcagattacacaagagtcgtatcctgtaacactactggattaacccgtacattatctacaattgatccaattgcaaatattaaaaaagttagagcagtaatggtaagaagaggatctgacccatctgagattaaaaaaggcccgatcaatgcaattgtaccaaatcctccaaaagtaccttctcaccacggccccgatgtaaaaactgttatgaaagatattgatgtgacaacaatggcattactcgtgcctaccacattaatgcaccagcacaacatcatggtggaaattaataacgaagtggaaactgaagacattgttgaatcattagaaaaacgttctagagtaatggttgtttctgcagaagatggtttaggatctactgcagaactaatggaatacgctaaagaacttggaagaaacagaaatgatttatatgaaatcccagtttggagagaatcaataaatgttgtaggaaatgaattattctatatgcaagcagttcatcaagaatctgatgttgttccagaaaatattgatgctattcgtgcacttttagaaatggaaagtgacaacgaaaaatccattgcaaaaactaacaaagctatgggaatattataa

SEQ ID NO: 7855 - DNA, 834 bp, Methanobrevibacter gottschalkii
  source 1..834: mol_type = genomic DNA
atgaaacaaaaagtgatttttggacctgcaggaagccccgttgattataaaggtgcagcatataaagctccaaaatatatttcagaagaaggtcttgactcttatgaataccaatcaccttatggagtaagaattggagaatcatctgcaagtacattaaaagaagaatctgaaaaacatgatgttttaatttcaatgcatgccccatattatattaatctatgtgcaaaagaagaatcaaaacttgataaaagcattgaccatttaatagctgccgcacgtgcaggtgaatggatgggcgcctatagattagtattccaccctggcgcttatttaaatagaaaacctgaaaaagcaatggaaatatcacgaaataccatcaatagattatttgaagaacttgaatctgaaggaattgaagagtttacatttgcaccagaaacaacaggtaaaagaacacaacttggaaatataagggaagttgttgaattatgtgctagctttgaccattttgaaccaacaatcgattttgcacatattcatgcaagaggcagaggttttttgaacaaaaaagaagattataattgtattttttcaacaattgaaaaccaattaaatattgatatcctacattgtcattttacaaccattgaatacggcaaaggtggggagataaaacatcatacattagatgaaaatgattacgggccaaacatagacgatttactctccaatttaattgataatggctggaatgcaaatatcatatgtgaaactccacttagagatattgattcacttaaaatgaaaaaaaaatatgaagaaatgatttaa

SEQ ID NO: 7856 - DNA, 510 bp, Methanobrevibacter gottschalkii
  source 1..510: mol_type = genomic DNA
atgactattaacgataatcataatcatttttgtatttattgtggggctaaactagatttcggtcaacacttttgcactaaatgtggaaaagaagttgttcatgctgaaccaacttatgagattgtttccagatattatgacttattatatgatattgagcaggaatatgatgctaaacaagaaagggcaaaggaattagtcaataaactcttcgatcctgcccacatgtcttataataaatttttatcttccatcaataaatctaatgggttatttaataatcaattggatgttgcaaaaaggatgattgaagtatatgatggaactaaagattttattgagcatgaaattgacaataaaatcagaacattacaaacatttgttgataagatgaatgatttaattgatgaaatggttattcatttaagttctaataagcaagatacaggggatataaataatctttttgaggatatggatgatttaatagattctgtaaaagattattaa

SEQ ID NO: 7857 - DNA, 1068 bp, Methanobrevibacter gottschalkii
  source 1..1068: mol_type = genomic DNA
atgagttttagaactagaagaatattaatcatgactcctttttatatgatatttcagttctttttactaaaatatttattattgctgtttggtgggcttgatgatggctatctaattattattgcaataatcgttgggttattgcattgtatgccaatgttttttgaatctaaaaaatcaactgttgcagggcgatttctgacaacaattggaggtgtatggatgtggatgtcgctaatgtttttatttgatctcatgtttatttatttaattaagatgtttgtaatattgccttttgagataatagttgatttggttttgattgtgccgtttttaggtatttataatttttataaatctcataaattagttattaatgagaaaatattggaattaaataatttatcaagagatattaatattgttcatttatctgatgttcattttggatctgtacgtcataaaaaaattatcaatttattggtcaataagttaaaagaacttgaagatacatgtgagttagctattatttctggtgatttagcagatggttcttctgctgttggaactgatgatttcttggcatttaaagatgttgatatgccaataattttcactcctggaaatcatgatttctatccaggtattgataatgttataaatgcttgtaaaaacgctggaattattgttttagataatgaaaaaaaggaatttggtgatttaagtatttttggtttaacatttagttttgaagataggtgtgttccaaaaattgatgaaagttggataaatccgaatttaatcaatattataaattatcatgttccttattattgggatgaattttctaagttaggatttgatattcaactttcaggccatacacatggcggacaattttatccagctatttggtttgcaaatatattattcaaatataataagggattatttaaaaataatttaggaaaatatttgcatgttacaactggtgtaggttcaatggatactccaatgagatggggaactgattcagaaattgttattttaaaattgaaaaaagcatag

SEQ ID NO: 7858 - DNA, 1125 bp, Methanobrevibacter gottschalkii
  source 1..1125: mol_type = genomic DNA
ttgaaaaatgataacaaaaaagcagaaattaagacaactaatcaaaaacaaaaattgaaaaaagctgaaagtaaagaatgtgctgaatgtgtcattttaaaacctgttggatatccatttgaatttaatttaatggatgaacatattgaaattaccaacaaaaagctatttgaagaatatgctcgtgaacaatggttaggattagttgtaaaagaaaactcacatttatttgatcaaaagataattcctgattatggttttgaagtcataaaagcaaagcctaataactcaataatctctgaaacaactagaatccaactaattaccagcgatttagaaaataaaaatgacaaacttacatttaaatcaaacatatctatttcggatattgttggacaaacaaatgctaaaaataaagttaaagttataatgaaatatttagaacatcctggaaaatttggaccctgggcacctaaaaacatactgttttacggacttccaggtaccggtaaaaccatgctcgttaaagctcttgctaacgaacttgaagttcctttgtatttaattaaagcaacatcattaattggagatcatgttggtgatggtgcatctaaaatccatgatttattcaaaaaagctagtgaaaattcaccatccataatttttatagatgaaatggatgcagttgctcttcatagatcatttcaatccttaagaggagatgtttcagaaattgtaaactcttttttaactgaaatggatggaataagtgaaaacgaacatgtaataaccattggtgccactaatagccctaatagtttagattatgctattagaagtagatttgaagaagaaattgaatttaaattacctgacgatgaagaaagattaacaattctgaaaaataacttaaaaagcatgccattagattatgaacttgatttggaaaaaattgttaaacttactaaaggattatctggaagagacataaaagaaaaaatattaaaaacagctcttcataatgcaatcgctaatgattccgactcaatcacaatgaaaaatattgattactcaattgaatctagtaaaattaaaaataaagatattaaaggaatgtttgagtaa

SEQ ID NO: 7859 - DNA, 1191 bp, Methanobrevibacter gottschalkii
  source 1..1191: mol_type = genomic DNA
ttgatactaaatttaagagttgatcataagattgcggatattcagtcaatggaggttattgcaaaagacattgatgatttatttgcagagttacaagaaaaatattctattggggaatatatagaaatcagtacatgtaataggaaagaatattatattcataataacaatattcctgaagatgatgagttattgtcacatgaaaatgtgagtattgtaattgattatggtcaatcagctgttatgcatttattacgtttgacttctggtctggaatctatgattattggtgaggatcagattttaggtcaggtgaaggatgcaaaaaacaatgctattaaaaatcaccactgcggtaaagttttagacacaatatttacaaaagctattcatgttggtcaagttgttagaaataaaactagaattaataaaggttctgtttctattggatcagcagcaattgatttggctgaaaaacatataggttctttagtggacaaatcagttttggtaattggggcaggaaaaatgggtaaactggttgctaaagctcttgctgaaaaagatttaaaagctatttttgttgcaaataggacttattatgttgcggttaatcttgctgaagatttgggtggggaagctattttattcaatgatttggaaaaatatttaactactgctgatttggttattagtgcaacaagtgctccacatccagtaattactaaagatcgtcttttaaaatgcggtaggaattatgaaacattaatgatggttgatatcgctaatcctcgcgatatatctgaagatgtttgtgaattaggtgtcaaatcatttaacattgatgatttaagagaaattgctgaaatcaatactaatcttagaaggaaggaatttgttgaagcggaatctatcatcaatgaagaattcattttacttaaagaatcctttaagataatggaatttgataaattacttggtaatttaagggcatctatggaggatataagacaacgtgaaactcaaaaagctaatgttaagttagctgtagatggtagtgtaaaaatattggataatttaacaaattctattgttaataaaatattttatgatatttccaaaaaagttaaaaaagctgctaaagatgaaaatgaggatatacttgcagcttgtgaatatatttttaattaa

SEQ ID NO: 7860 - DNA, 621 bp, Methanobrevibacter gottschalkii
  source 1..621: mol_type = genomic DNA
atggactggacatctctttacttaaaaacatttgattttaatgtttttattttaggtactggcgaagttgcaactaggcgagcaaataaatttttagatcatggggctaatgttaaattagttggagatagtttacctaaggaattgaaatataaaggagctagtttatgctctgttagtgatgttgatgatttaattgattggtctgatttggttgttatagctagtggtgatagggagttatctgattatgttagtggaattgctaaaaataaacttattaatcgtgcagattttccacaagaagggaatgtaattgttccaacaagttttaatattggtgaaattgagatttctatttttacaggaggtaaaagtccattaatggctcgccaacttagaaagaagatacaatcaataatcactgaagaagatattttggaaatcgaacttcaggattatgctcgcaaaaacttaaagaaacttgttgaaaatcaaaaagatagaaaaaagtatctttatgaaatttttgaagatgaaaaagttaatgttttgattaaaaatagaaagattgatgaagctaaattgtatattgataatttaataaggggattaatttga

SEQ ID NO: 7861 - DNA, 483 bp, Methanobrevibacter gottschalkii
  source 1..483: mol_type = genomic DNA
atgacttgggaagatgcaccatctcatatttgtaggggaggagacattagggggcttgctttttgttgtcctccagttaaaccatgcccaattttaaatgcattgcaggaagttaatttaactcctaaggaatatattgaaattaaaactcaatttgctaaagaaaccaggttaggtgagggagcaggaacttgtttcggatcacttgtatggtgttgcaaaccatccaaaccctgcccattaagagacatgactttaaaaaatatgggaatgagtcatgatgaatatttggacttaaaaaaagaattatctgaacggttggtaggtgttaaaaaaccagatcctgatgaaaaagccgaagcattggctgaaacatttaatgttacaaaacttgaagctatgaatattttaaatgaatgtaatgatgatttaagggcggctgtaaaagttttacatgcaagatctcttgagaattctgattaa

SEQ ID NO: 7862 - DNA, 687 bp, Methanobrevibacter gottschalkii
  source 1..687: mol_type = genomic DNA
atgaaagaaaaattaatagtcgaagacataaccatcacattagagagaaaaaatattaaaaatatgtatcttcgagtcctacctccaaaaggtgatgtaaaactatctgtcccattatttttaccaaataatgaagtaattatgtttatcaaatctcgaaaaaattggattttaaaaaaacaagaatttattttaaataataatattcaacctcctttaaaatttattagtggtgaaaaacatcaattatggggcagagaatacacactacaattaattaaaaatgacaacatagaacatgttctaattgatgaagacaccagtattatgtacttgccactacctaaaaaaagtacaataaaggcaagagaggaaatattaattgatttttatagaaaagaacttcagaatgcaatacctcaagtgttagaaaaatgtagtctcattgttggacaaaaaccatccgaagttaaagttaggaaaatgaaaaattggggaaattgtagacaagatagaagaataaccttaaatttaaatttagcaaaaaaagacccaaaatgcctagaatatgtaatgatacatgaattatgtcatttaatagaattcaatcacggtgaaaaatttaaaaaattaatagacaaattctgtccggactggaaaaaaataaaaaaagaattgaatgaataa

SEQ ID NO: 7863 - DNA, 1602 bp, Methanobrevibacter gottschalkii
  source 1..1602: mol_type = genomic DNA
atggattttataacacttaaaaatattactaaaacttttgatggtgttgatgttcttaaaaatataaatttgaaaattaatgaaggggaaaccttaggtattttaggtcgtagtggaagtggaaagtctgttttaattaatatgcttagaggtacatcagactataaacctgatgcaggtcaaatattagttaatgtagcagtttgtcctgattgtttagcagtagattcaccatctcatgttggtgaaaaatgtagttgtggagctactttagaagcgaaagaagtagatttctttaattctgagagaaaattatttgcaagtattaaaagaagaatttccatcatgttacaacgtaactttgcattatatgatgaagaaactgtaattgaaaatgtaatgagggcaatgcccgagggcaaagattatgatgagaaaatctacgaagcattggaattattagaaatggttcaaatgaatcataggattactcatatcgctcgtgatttaagtggaggggaaaaacaaagagtcgtacttgcaaggcaattagctaagtctccaatgatgtttttagctgatgaacctacaggaactttagatcctcaaactgcaattaaacttcataataccttgaaagaaggcgttaaagataaaggaatcaccatgttaatcacttctcattggccagaagtaatgattgaattagcagatagtgtaatctggttggaagagggtcaaatcaaagaggaaggcgaaccggagaaagtggtaaatgaatttgtagctacaatccctattcctgaaaaaccagaaattcctgaatttggagaaccagaagttgttcttgaagatgttaagaagcattattactctattgaacgtggggttgttaaagcagtagatggtgtgagtttaaatatcaataaagaagaaatttttggtattgtgggcttaagtggttctggaaaaaccactacaactagaatgttaatgggattaactgaaccaagcagtggtaatattcaaattaaacttggtgatgaatggattgacatgactaaagttggacctcttaaccgtggtcgtatcatgccttatattggtttattacatcaagaatattctttatatcctcataggactgttcttggtaacttgaccgatgcaatcagtttaaatttacctgcagaatttggtaaaatcaaagctattcatgcattgactactgtaggttttgcagatgatgtcgctgcaagcattcttgataaatatcctgatcaattgagtgtaggtgaaaagcatagggttgctttagctcaggttttaattaaagaacctaatttaattgttttagatgaaccgacaggtactatggatccaattactcgtgtcattgtatcagattcaattctaaaagcacgtactgaattagaacaaacattcattatcatttctcacgatatggattttgttttagatgtctgtgatagggctgctttaatgagaggaggtaaacttttggatattggtactcctgaagaaatagttgataaattgactgctgatgaaaaagaggatatgcttaaagaaaatagataa

SEQ ID NO: 7864 - DNA, 732 bp, Methanobrevibacter gottschalkii
  source 1..732: mol_type = genomic DNA
atgcttaaggtagttgctccaatggcaggtataactaatgctgcttttttaaataaagttattccttatggatttaatgtagctactttgggaggatacagtttagattccccaactattgaagcaagtaaaaaaattattcagcgaggaaggaaagaatttgattttcctttggatgtgatttttaatcatattgaaaatgaagtggatttaattaaaaaatatcataagaatgtaaaagtttcggcgaatgtacgtgcatcaaatcctcaaccgataattcatgttggaaatattaaaaagttggatattgtagaaattaattgtcattgtcgtcaaaaagaaattttagatgttggttgtggacaggaaatgttaaaacgggatgatttaaaaaaattcatctctcaaattgttgataatgttgatagtgaagtttctgttaaaattagggctaatgttgacggtattgatacattagaaatagctaatattattgcagatgccggagcagattatttgcatgttgatgcaatgaaaaaaggtgtttttgaagccgattgggaacttttacgaagtatttgtaatgatgttgatattaatgtcattggaaataattctgtaaattctgagattaatgttagaaaaatgattggcactggtgttgatggtttttcaatagctcgttcagttatttctggaaatttggaatttgatatctctgatttttaa

SEQ ID NO: 7865 - DNA, 780 bp, Methanobrevibacter gottschalkii
  source 1..780: mol_type = genomic DNA
atggaaagaggttattcaatgatacaaatgacattaatacaaattgataattacggtccttggactgttactccaagaccaagaactgaatctgacttacaaattcttcaagcaagattattcgctgatttaaatagttattttggatctaaaaaaggtttagttttctttactcgatttgataacttacttgcaatttcaaatggtatagatgaagaagaccatttaagaattcaaagatctattagaaataaatatcctattactgtaagtatgggtgtgggtgctgctgaaactccacatgaagctcaaaaattagctactattgctcttcagaaagcaggtagtgctcaatctggagaaagaaaagaaattttggctattgatagtttagttgatgaggaaaatagctttgttcaggcagcgcatattgatattaacagtgtcacagaaactttcactgatattgaatctgcttttgatacaagttttagtgttaataaggctcaacattacttaatgactaaattgattaaaaagggatcattgctattctttattggtggggacaattttatggctccatgtaatggattatctgaaaaagagattgaaaatttaatgattgaaattgatgaagagattggtattaaacttaaagccggtattggaagagctaaaaatgctgaagatgctgcatatatggcagatattggattagaagaaattcgtgcacacaataatggaatgtggacttgggttgttgaaaaagaagattga

SEQ ID NO: 7866 - DNA, 906 bp, Methanobrevibacter gottschalkii
  source 1..906: mol_type = genomic DNA
atgattactgttttatctggtggaacaggtactccaaaattattacaaggattaaaagaagttgttgaccctaaagatttgacaattattgttaacacactagaaaatgattatttttctggtgtttatgtctctgcagatattgatactgtattatatactatggcagatataattaatgatgaattttggtatggtgttaaaaatgacacttttatcactcataatcgtcttgaagaacttggatgttctgaactgcttagaattggggacattgatcgtgcaactaaaatacaaaagactcaattgatggaaaaatatggtcttggcaaggcatgtgaaattcaggcaaaaaatatgaatattcaatcaaaaattattccaatgagtgaagaggattctgatattaagattattactgatattggagaattggaattccatgattttttaattaaacatcaatctgaacctgaagtgtcggatcttaaattttctaaagtttctccaactgaaggagtcattgaggcgattgaaaattcggaagcagtaattattggtccgtcaaatccaattacttcaatttcaccaatattgtctttagatggtgtttgtgatgctttaaaagatacttacgttgtagctgtatctccaattgttggttcagactctgtttctggacctgcaaataaattcatgaaggcattaaatattgatgtttcatcttatggtgttgcatcaatatatgaagattttttagatacaattgtaattgatgtacaagataatgataaaaaagatgaaataaatcaaatagttaataaggtgataattacaaatacaattatgaataatttagatgctaaaaaaaatttggctgaaattattattgatagtattccttaa

SEQ ID NO: 7867 - DNA, 765 bp, Methanobrevibacter gottschalkii
  source 1..765: mol_type = genomic DNA
atgagtattgaattatttggtttagagaatattcctattattgacggcaatagtgatatttcaaaaattattaaagaagctattgaaaaacagggctgtaatctttgtcatggagacattatattaattgcagagactttaatttcaaaagctgaagagaattttataaaattagatgaattaactccatcaactcaagctattgaattggctaagaaagctaaaaaagatccaaaattagttgaatctataattcaacaatctaatgaaattgttgctgtcggtccaaagttcatcataactgagactgttcatggttttgtttgtgctaatgcaggtattgatgaatcaaatgtaggtgatggtttagttactctaatgcctaatgatgctgatatttctgctttaaatattcgtaaatatttggaaaatgaatttgatgaagaaattgcagttattataactgatactcaaggaagagcatttaggtttggtgctgttggtactgcaattggatgttctggtatttcgccgatatggaaaagagttggtgaaaaagatttgtatggtagggaattggaaactactgaaattgcaacatgtgatgaattggcttcagcagcatctcttataatgggtcaagctgatgaaggtcttccagttgttgttattcgcggttttgatggttttgataaattaagagatgttgattcaaatatcaaatcagtacttatgccaaaagaatttgatgtatttagaaactaa

SEQ ID NO: 7868 - DNA, 627 bp, Methanobrevibacter gottschalkii
  source 1..627: mol_type = genomic DNA
atgtatacaggtagaattttatcaactggaatgaactgtgaaggtaaaccttttatagcatatagggtatcaagcagatcatttccaaataggcaatgtcttaaatttgaaaatcgtgcagctattgttccaaaagaaggatttgaaaaagatatttttgaaaatccttatattacatacaattgtattcgtattgtagatgatgttgcaattgtatctaatggatctcaaactgatgttatatcagataaaatttctttgggaatgaatttgagagatgcaatggcatattcattacttactatggattatgaaaaagatagttataatactccaagaattgcagcagtcgttacagccagtactgatgaagatggatacggatgttatattgggatagttaatgataataaaattttagttgaacaagttccacatggtaaagcagcattcatttcaacatatggcagtcaagttccagatacagttgatttcgatgcaaaaactgctaatgaatgtgccaaatttatttttgatgaaggtgcttttgcagattacgaaaaaccggtaacttcttctgctgcgatttttgatggggaatgggcaattgatgtctataatccataa

SEQ ID NO: 7869 - DNA, 411 bp, Methanobrevibacter gottschalkii
  source 1..411: mol_type = genomic DNA
atggcaattgatgttggaaagcataaaaagaaaatttcggacagcaaaccaagtatcaatttagttccgtttattgatattttattcacaataatgatttttttagtagtaacaagtaatttttcagctgatgttcaaacggatgattcggatgttacagatggtggaagtggaaaacctaatgttacttctgtttcaggtgattctgaatactatgtaatgcctgtagctaatttacataaagttacagttaatggtgttgataagtcagacacgattctgaatagtgctgttggtgttcaagcaaatgtaattgataatggtaaaattacaattaaacctggcgaaattgatattacaactcctgatggagtttcaccggataaagctgttcagcgtccacaactttaa

SEQ ID NO: 7870 - DNA, 840 bp, Methanobrevibacter gottschalkii
  source 1..840: mol_type = genomic DNA
atgattattgagagtattatgccatttgttgatgggatagtggatatttttactcaagggggatttattacatatataattcttttcattgggatttatggtcttattattggattaagaaagatagcatatcttagaaaaattagtaaagtggacacaactgaaatatttggggttgtaactgcatctatggaaagaggaggggctgtagaggctttaaaacagataaatggttttaaaaatcctatttctagaattatttctgaaactttaaaaattggttataaaaataagactgaagttgaagaaagtatggagcaaatattcattgttgaagttggaaaaatgactaaaggattaagtactattaaaacacttacggaactagcaccatttttaggattaatcggtactgttatcggtatttggttgacttttaaatcattaggtgtccatccggattctgctgcaatggcagaaggtatttatgttgcattgactacaacaatcatgggtcttttagttgcaattgttttattgcctattcatacttatatccaaggtcttattgaagtggaaatggataaaattgaactggctacgaaaatgaccaattggggttatgctgtagttaaagttagagttgattcaaatgttgaatgtgcacttgaagcattacaggaagcggaaggtgttgttaatacaagattgatttctgatccatacgccaatatcaaggtttcttttaaaccaagcatgttggataaaagtatttctaatattatattggaaaaatgtaatgttaatgctgaaattactgaaagtaaactaaaacaatag

SEQ ID NO: 7871 - DNA, 615 bp, Methanobrevibacter gottschalkii
  source 1..615: mol_type = genomic DNA
atggatattttaggaattgatgaagcgggtagagggtctgttttaggtccaatggttattgcaggagttattgttcctgaaaaaatggataaagttcttgaaagaatgggtgttaaagattctaaaagacttactcctaacagacgtactattctatctagaaaattaagaaagatgtttgaatatgaaattgtagtaatttctgctcgtgaaattgatgaattaagggcgaatggtattaatcttaatgaaattgaaaaaaatgctatggaaagcattattttaaaattaaaacctgaaaaaactattgttgatgcagtagatgttaaagctgaacgtttccaagagaatttgtgcaatgacacatgttgcaatgttgttgccgaacataaagctgatgataagtatattgaagttagtgcagcatctattattgctaaagctgaaagggatgcccatattaatgagattaatatggattatgttaattttggaggtattggttcaggttatccttcagatccaactacaaaaaaatttttaactaattatacttatgatgaaatgcctgattttgttagaaaatcatgggctactgttgcaaaaatgaagtaa

SEQ ID NO: 7872 - DNA, 1074 bp, Methanobrevibacter gottschalkii
  source 1..1074: mol_type = genomic DNA
atgaacatttttggaaaagaagaagaagaaccacagattaatgataccaaagtgattagcaatagtttaggaattgatttaggaacattaaacactgtaattgcaaaaccttcaggtgataaatttgacttatatcagataccatctgttgttgctgttaaaaaagatgacccttcagaagttttggctgttggggaggaagctaaaaaaatgctaggaagaactcctgaagatattctcgctgtaagacctttgaaaaaaggagtaattgagaatgttgttcaagctcaggcattattaattaaagcaatgcaaattggtattaatgaaggggaaagtgttggaagaattgttattggtattcctggagatgcttctgaagtagaaaaaaatgctgctgaagaaataggtaggaaagctggggctcaaaatattctagttattagtgaaggattagctgctgctattggtgcaggattacctattgctgaaccaaatggaactatggttgttgatattggtgcaggatcaactgatattgttatcatttctcttggtggtattaatgatattgaaactgttagatgtggtggagatgacattgataacaaaattgttgaacttgtagctgaaaaatatgatgtagctattggtattcatgatgcggaatctgctaaaattgaagtaggtatggttcactgttctgagcaattagaaaatctcagtgttgaaattattggtaaatctttagaaactaataggcctaaaaaagtcatcattgattctatgcttgttgcagaggcagttgaaccttatatgcaacaaataattagtggattaaatattgtcttggaaagattatcccctgagttgatgatgggggtttacaataattctgttgcggttggtggaacttcaagacttcgtggtatgaaggaaagaatttttgatgaaatatctattccaatagaagtttctgatgatcctatgactgttgtagcaaaaggtactgcaattgttgctgctgaacctcttgcattagaacctgaagtacgtcttagagctatgaaataa

SEQ ID NO: 7873 - DNA, 645 bp, Methanobrevibacter gottschalkii
  source 1..645: mol_type = genomic DNA
atgatagaagataatatacgtgttcttagacaagcagcaaaagtttcttccaatagtggctatgaaattgaaaaaaattggtgcgttattgcaggaaatgctgaaataattgataaaatagcttataaagctattgcatctaatcatcgtgttaaaataatatttagggaacatgtaatgttaaatgatggtaaattggataaaaaatttgattttatcatgctttatggcaattctattgttattgatgaatttaaaaaacttgcagatcaatatggtggagcttatgtgaggatattgcataagtatttgattgaagagccgaatctaatggtatttgttgctccggataatgttattaagaaaacggtttctgtaattgaaaaatcaaaaatatcctttgcaattttacaagattcacagactactgcatttattgatgttgacttaagtaatgaagttaaattacccaattttattaaatctgcattgaaaccattttataatgcgaatgaagttgttttatcaacaattttaatttccgtcgataaaaaagaagaaattaaaaaagttcaaagtatagctacatctaacagaattttcgtcattgactttaaagatattgtaacggaggattattcatga

SEQ ID NO: 7874 - DNA, 696 bp, Methanobrevibacter gottschalkii
  source 1..696: mol_type = genomic DNA
atgaaaattgaaaacacaaatatgaaaaggtttattgcattatcagatatcatatctttactaaatatgacatctggatttttatccataatcttttcatttaatcatgaattcaatatagctgcaatccttcttattattgcaatcatgttcgactcagcagatggttgggtagcgcgtaaaataaataggcaagacgaattaggttttgggaaaaatattgattcattatctgatatcgtctcatttggagttgcaccagcaatatttctttacagttgcattaacaccaccccgggcatttttcaaataatagtaacaattgtttgcttattaattgttgtttgtggagttttaagattaacaagatataatgtaattgcaggcaaaataaacactaatgattttattggatttccaattccaggaatgtcattaatgataggttcattttatctaagtggaatattcaatccccatattgcaattttattgagtataatagtttcattacttatgataagtaatataaaatatcctaaattcgataacatggcattaattggaatatcctgcatattaataataatattaattcttccaattgacatgattttatttaatataaatattcccgcaatactattactattcttctgcttatactacctaataatcaatttaattaaaaaatga

SEQ ID NO: 7875 - DNA, 1170 bp, Methanobrevibacter gottschalkii
  source 1..1170: mol_type = genomic DNA
atgaatgataaaaaaccaagagatccattatatccaaaaggttttgaagagacaagaaaattaaaaaatcaactaacaaaagaatactcaaaaccaaataaaaaagaagatgaactaacaccacttaaaaaactaaatcataaacttggagtttatttaagcccaaattctgttgaaatatcaaatgatgaaaaaaagaagaaaataggcataataataactacattaatattaattacattaatttcatcagcatattatttcttaatctatgaacccgctcaagaagaattaacccttgcaaaaacaacaaaactaaatgaattacatgaaatatataatggaccattaacaacctcccagaattccattttattagaaaaccaaattaatgatggaaaaactcccgaagaaattgagcgaataaacatattaacaccagcaacaaaagactggcaatcatttcacaaaaaatcgatttacacaaataaagataaatataatcgaactatggcaatatattcaaatgaaagtaaaaacataattctttcaacaacaaaagccataaaaattgtaaatgagaataatgcagaagttttatcaaaaattaaatttgaagaaccaaatacagtatcagttcccattttaatctcaagacttcaggcaggagcaggccttgtaaatgttggaagcgtggtggacatttacacaaacaacaataatacaaatgaaaattatactccaaataatacaagtccaaatataagtggatgtacagttttagccataatgagatatgaagacaatggagaaattgattccaaatattctaaatcaaatacaataataaagggaaaccataccaatccaaaagaaaatacgaaagaattttcctcagatgttcttgaattaataaaaggatcgataattaatggttatgatgaagaaaaaaccattgaaatacttaaaaattatggaataaaactatcaaattacgaaagacaaataaatttaggtgatttaaatgcacagtatatgcttttaattgaaacaccacaagataaagtggaatatgtaataaataatatggaaaatatcatattaacaatccccacaacaaaagctcctaattggatggtaaatgaaataagttcaacataccaagattaa

SEQ ID NO: 7876 - DNA, 720 bp, Methanobrevibacter gottschalkii
  source 1..720: mol_type = genomic DNA
atgaataaaccaactatttcaactatagtcattattatttgtatattaataattggattatatgcaatgggagaagtgaactacttttcatctaaaatagctgtggaaagaaacatagattcaccaactattctgatacctagcattggagtgaatgaaaaaatcaataatgtatcattaaatcaaggagtattaagtgatcctggagaaaacatccccactaaagattatgtagcattatatgggcatagaactcttcaaggttcaccatttttcagattaaatgaactttcaattggagattcaatactattagaatggccaggagttggagaattaaattacacaataacaaatacaacaattgtgcctggaactgctgatgtacctataggtggaaacgattcattgttcctaataacatgtgatccaattgggtctactgcaaatagaataataattgaaggaacattagaaaaacaaaatcctattaataatgaaattattaaagaaaatccacaagaatcaaatgcaataataataacagctatattctttatagttggatgtatattcagctatttctatccaaaagacaatagaatatatatcttagcagttattttaataatttcggcattattattctattcctgcataaatccaatcccttctgaaataatttacgaaaaaataatatttttaaatggaggattataa

SEQ ID NO: 7877 - DNA, 375 bp, Methanobrevibacter gottschalkii
  source 1..375: mol_type = genomic DNA
atggatgttgataaaaaatatttctcaaacataacaacaagagaacgagcaatttttgaaggtgcaattagtatgggtgcactattccatcaatttgtaggaaccccagtgaataaatataccaaaaatggcttagagaaaagtatggaggattctttaagattacaaccagcaatcgaagatgttaatgttaaaatcagatttgataaacttaaagaatcaatgactgaatttgattatacttctcttaacggtgatatgttagatgttaaaatatatgcaaaagtagataatgttaaagctataattaggatagaattcattgaagaactcaattatcctttaatgtatgtagaaaacataacagaagattaa

SEQ ID NO: 7878 - DNA, 1158 bp, Methanobrevibacter gottschalkii
  source 1..1158: mol_type = genomic DNA
atggatgaaaaatcaatagataaagatgttattttaaaagaattggatgaactccacaatttggatcataattatgcagatggtaggattttaggatctatgtgtactgaagcacatccttttgcaaaagaaatttattataagtttttagatacaaatttgggtgatccgggtctttttaaaggtacaaaattaatagaaaataaagttatagaatctatgggtgaaattttatctattgaaaaaccgtatggtcatgttgtaactggaggtactgaagctaatcttatggcaatacgtgctgctagaaatcatgcaaggaaatataaaggaattgtggatggggagataatcatccctgaatctgctcatttttcatttaaaaaagctgctgatatgttaaatttaaagattgttgaagcagatcttgatgataattataaaattaatgttggatcagttaaacgtttaatttctgataaaacagttgctattgttgctattgcaggcactactgaattaggtttaattgatccaattgaagaaatctcaaaaattgcttatgaaaataatatatattttcatgttgatgcagcttttggaggattttctattccatttttaagagatatgggttatgatttacctgtttttgatttttcattagatggggtttgttctataactattgatcctcataagatgggtttggcaccgattcctgcaggtggtattctttttagaaaagaagaatacttggatgttatggctgtggattctccttatttgactgttaaaactcagtcaacaattgttggaacacgttccggtgctgcttctgcagctacttatgcagttatgaaatattttggaaaaaagggatactctaaattaattaaagaattgatggacaatactcaattcttaaaagaaaatcttgaaaaaattggttatgagattgtttgtgaaccagaattgaatctcattgcttttaatcaccctaatatggaaactaatgaatttgcagaaaaattagaaggatttggttggaaagtttctgttgctaagtgccctgtagctattagggttgtattaatgaatcatattaaattaaatcatttaaaagaattggtggaagatttaaaagaaatattttaa

SEQ ID NO: 7879 - DNA, 2277 bp, Methanobrevibacter gottschalkii
  source 1..2277: mol_type = genomic DNA
atgtatgttaaaaaatttgaggatttaaataaatccgatattccaattgctggaggaaaaggagctaatttgggtgaattaactcaagcaggcattccagtacctccgggttttgttgtaactgcacaaacttatgaaaaattcatggtggaaacaggaattaatgatcaagttttaagtattcttgatgaaattgatatcaatgatactaaggctcttcaagcagctgctgaagaaattaaagctattattaatgaagttcctattccagaagatatgattttaattattactgaagcttacaatcagctttgtcaaagatgtggcgaagaggatgttgaagtagctattagatcttctgctactgcagaagatttaccggaagcttcatttgcaggtcaacaagacacttatttatatgtttctggcactgattcagtattagaatatgtgagaaaatgttgggcttcattatttgaagcaagagctatattttatagggaagagaataactttgaacattcaaaagttttaattgctgtcgttgttcagaaaatggcaaatgctgacaaagcaggtgtaatgtttactgtaaatccctctactggtgaagacatcgctttaattgaaggatcttggggtcttggagaatctgttgtatctggtgatgtgactcctgataattatcaagttgctaaaaaagataatgatattatcaatgttactgtaagtgacaaaaaagtcatgtatgttaatgatgaaaacgaaacaagtgtgaaagttgatgttccagaagacatgagaaatgaaagagtattgtctgatgaggaactcattgaattaacagaaatgggtaaacgagttcaggctcattacggtgagccaatggatactgaatgggcatttgaaaaaggagaattattcttattacaagcaaggccgatcactacattaggggatgttactggagaaagtgttgaaacttcttctgatactggtgaagttttagtaagaggtcttggtgcaagtccgggtatggcttctggtaatgttaaaattattttggacattgatgaattagataaaattaaagatggggacataatggttactacgatgactactccagacatggttccagctatgaaaagatcaagtggaattgtaactgatgaaggtggagtaacatgccatgcatctattatttcccgtgaacttggaattccttgtgttgtaggtactggtgatgctacaactattttaaaagaaaatactggtgtaactattgacggtaaaaaaggattagtatttgatggaatttcagaaattaaagaagaagcagtacaggtaaaagttagtgctgaagcagctccagttataactgtcactgaagtaaaagctaatgtgagtatgcctgaagcagcagcaaaagcagctgcaactggtgcagatggtgttggattgcttagaactgaacacttaatgttgactgctggtattcaccctggaaaattcatcgctgatgggagggaagatgaattgattgatactattgctgagaatgttatgatagtggcagatgaattctatccaaaacctgtatggtatagaacattagatgcacctactgatgaatttatcacattggaaggtggagaaaatgaacctgaagaacacaatccaatgctcggttggagaggaatcagaagagaattggatcagcctgaaattcttaaatgtgaattcaaggctattaaaaaattacatgaaaaaggatacactaacattggaatcatgattccattatcacagagtcctgaagaacttaaacaagctaaatcactttgttctgaaattggtttagaacctcataaagatgttgattttggtatgatggttgaaattccagctgcagcattaactattgaagattatattgatgtaggaattgactttgtaagtttaggaaccaatgatttaactcaatatactcttgctgttgacaggaacaatgaatatgttgcaaagcattattctgaagaacatcctgcagtaatgaaattgattgagatgacaatcaaaaaatgtgttgaagcaggtgttaaatgcagtatttgtggccaagcgggtagtgtaccgcgtattgttgaaaaacttgttgaatttggtatcacaagtgtatcttcaaatactgatgcaatagctgaagtcagaaaaactgttgctagggcggaacaaaaaattattcttgatgctgcccgtaaacgtttagaataa

SEQ ID NO: 7880 - DNA, 483 bp, Methanobrevibacter gottschalkii
  source 1..483: mol_type = genomic DNA
atggttcgtgcttatacaagaagagattatattagaaaaaccccaaattcaagaattgtacaatatgatatgggtaatttaaaagacgaattcccagtatctgtaagtttagttgttaaaaaaccagcccatattagacacaactctttagaagctgcaaggattgcttctaacagattaatgcaaagggctgcaggtaggttgggctaccacttaaaattaagagtttatcctcaccaaatcgtaagggaaaacccaatggcaactggtgcaggtgcggatagggtacaaagcggtatgagaaatgctttcggtaaacctatcagtgttgaagctattgttaaaaaaggtcaaagaattgttactattgattgtaatgagaaaaactttgaacaagctaaagttgcattaaaaagagcaggcatgaaattgccagttccatgcagaatcgttgttgataaaggtgcagatttagttaaatag

SEQ ID NO: 7881 - DNA, 228 bp, Methanobrevibacter gottschalkii
  source 1..228: mol_type = genomic DNA
atgaatgttaaaggaaaaatatacttagattacaataataaagaatctgcagaattaatatttaattcattggaaatagataataaaaattatttaaaatcaaaattaaaagaagataaaataatttatgagattaatagtgaaacattaggtagctttttagcaacagcagatgatttaattgcatctgagattgttattgaaaaaatattagatgcaacacaataa

SEQ ID NO: 7882 - DNA, 1137 bp, Methanobrevibacter gottschalkii
  source 1..1137: mol_type = genomic DNA
atggaatgttattatcatcctgaaaaagaaagtacagctaattgtgcaatatgtggaaaatctgtttgtggagaatgtagtttagaaattgcaggtaaagtttactgtaaagaatgtttagagaaaattgtaggtcttggaattcaaaataatattccggaagaaaataaatctgatgaacaaaacccaatcgtaacagaatcacctgaagttaatgctcaaagtgtagatgataatatataccaaccacaagaggaaacagattttgagataccatatactcctcaagaggaagttccttcaaaggaatttaaaggaataagtgatgattcaccatacaatataaaagaaaatatcgaatatactggaggacttgaatcatcttacacaatagattccgatatttatcaaaaacctcaagtagaacaacaaccacaagttgctcaaaatgaattagacataaaacaaccaacattgaattcaatgaacaaggatgattttatatatcctgatcatgattatgaaccaccaacaactagtgccagacaagaattagaagataaatatgaaaaatatcttgatgatttgtacttcgatgaaaatgaagttccattaggcgaacaattagcaaaagatgaagcccaatacggatcattaactagaaaagaatatgcttctaaacctaaaaacattgttgaaccacaaataccaactcaaaaagatgaaccaataatagaaacccccgaagaaatggaagcaagaattagagctgaaattttaaaagaacaaggattaatgacagatacacaaagcattgattcaactcttaaagaagaattagaatccagtaaaggtaaaaaactctttggtttaagaaggaacaaaaataatgaagaggaattaataactgcaagtgaagataaaaacatccataatttaaattataaagacgaaaaagaaccaatgggtgttgtcgacatattattaacaataattttagttattgtaatattaattgtaatatactacatcgtttacttattcttattaagttcaacttatccaacatttatggatgcagtatttgcgattagaaatccgcaaaatgtaattaatagtattttaacacaattataa

SEQ ID NO: 7883 - DNA, 1083 bp, Methanobrevibacter gottschalkii
  source 1..1083: mol_type = genomic DNA
atgtcccaagttttagatattctcaaaagagataaggaattatttttcagtgatgttgagatggaatgtaataattcagatacttcttcagatatgaatttgatagcagatttcactgaatataatcctttacataatggtcattttcattgtatgaaaactgcaaaacatatgtttcctgattcattatttgttgctattgtacctggactatttgaaagaagtggtagaggtattccatatatattaccaagagaaattagggcagagatcgcaatttcagttggagcggatattgttgttgaaggtccaccaatgggtattatggggtctggtcagtattcattatgtctttgtaagatgtttaaatcattaaacacagattatattccaagaggatacaaaccaaaagaaggttttgatgaaattttaaaaaggataaatttaggacatcatatagctccaaaaccttataaaattgtagacaaaacggctcatgagactattttaaatgataaacttgaagaggataattatgttataacatcattttcaaattctttaagtaaaataggatttgattatacaaataaatttatttttgttaaaagaattgaaggtgtaagcggaactttaattcgtgaaagtattcaaaaagataattttgataatgttttaaatatgatgccttcagaaactattgaagttttaaaaagagaaatcaaaaataattcaataatttatggaattcgtgatgttgaatcaatcttggatactgccaatacatttaattttgaagaattatctgcattaaacttatttaatgaaaaactggctaaaaatattgttaataataaaccttatgagaatttggatgaattggaaaaagtgattttacatggattttcatctcattttcaccaaagagttttaagtattttagaaaatcccattcctaaaaaaattatttctaaatatattgaaaaatatccatcaaatattagggttttaggttatagaaataaagaaattctggaaaaattcataaaaaaagtaaataatgaaaatatttcattattataa

SEQ ID NO: 7884 - DNA, 1257 bp, Methanobrevibacter gottschalkii
  source 1..1257: mol_type = genomic DNA
atggatttagtaattaaaaattgtaaactagttaataaaattggagagtattcaattaaagtagaaaatggtaaaataacaaaaatatcaaaaacaccactaaaagcagataaagtaattgatattaaaagcaactatataatgcctggttttattgacccccatatccattttagagatcccggattaactcaaaaagaagactttaaaacaggaagcaaaagtgctgcaaatggaggatttacaactgtgattgatatgccaaacaccatccctaaaacaaacacctatgaagcacttaaagaaaaaattgaaattgcaaaaaagaaatccgttgttaattttgagcttcaagcaggacctaataatcttgaagaaatgaaaaagatgataaaattgaatcctatttctttcaagatatttatggatttagaaaacgatgaaagtttagaagagatatttaaaaatttatcaatattaaaagaaaatacaaaatataatggtcttgttgcagtacattgtgaaaaaaaatccattgttgaaaatgaaactgcaaaattaaaagaaaagaaagaaaatattcctattgattatacttatgctagacctacaacaagtgaagacgcatctgtaatacaatctattgaacttgcaaaaaaaaatgatttaaaattacacatatgccatttaagttcagctaaatcattgcatatagcaaaaaatgcaagtaaaaatatggatgtaacatgggaattcacaccacatcatttattattagataacaccgcctacaatacatatggaacattcataaaaacaaatcctccattaagaccaaaaaatgaaagcgtaaggatagaggatttagatgaaacttcaataataggaactgatcatgcaccacataaaatcgaagataaaacaaaaggagtttggaattcatcaccaggaataccaaatttagaaactgttgtaccattaatattaactgaagtaaataaaggaaatattaagttagatataattccaaaaatattttctaaaaatgctgcaatggcctatggacttaaaaataaaggggaaatagctattggaaaagatgctgattttacagtaattgatttgagacaagaaggtaaattcaatatagatgaattcaaaacaaaagcaacatattctccatttgacggttggaattatattggaaaaccagtaatgacaatagtaaacggaaacccagtaatggataaattataa

SEQ ID NO: 7885 - DNA, 1236 bp, Methanobrevibacter gottschalkii
  source 1..1236: mol_type = genomic DNA
atgattgtatttaatgatgatggctgtattaaatgtggggcatgtcaaggtacttgccctacttcagctattgaagtaacacctaatgctattgtacattgtgacacttgtggtgaagaaccaaaatgtgctgatgtttgtcctaatggtgcattaaaagtagaagaatatgaaattgctgaaggtatttcccaagcaagattagtgtttaactctattttatgtgaccaatgtggtaaatgtgaagaagtttgtccacaagaaactattaaagtcactggtacaaaattaaaagaagttgaaggtttctgtgtaatgtgccaaaaatgtgttgacatttgtccagttgatgtaattggtgttcctggtgttaaagaacctgcagaatatgacttagatctcaaaggaaaaggtccagtatacattaaagattgtgttggatgtggaacctgtgttgatccatgtcctgtaggagctatcactcttgatgaagtaggaagtccagttactgtaaatgatgattgtattagatgtggattatgttcccaaacttgtccatggaatgcaatattcattgctgagaaaaaacctatcaaacgtacaaaagaaattaaatcatttactttcgattcagctaaatgtattggatgtaatacttgtgtagaagcatgtcctggtgatttcattgctgctaacagttctagtttaactgttgctattcctagtgtatgtgcagcatgtagtttatgtgtaaacctttgtcctgttaatgcattagaaattgatgttgaatggggtgaaggttcacctgtggatgcggaaggtattggaagagatgtagaaaaatgtgactttattggagcatgtgctaacaaatgtcctactgaagctattcgtgtagttaccaaaactggtatgtcctgtccagctttagtagaaactgatgctgaaccatctttcactagttgtattagatgtggagcttgtgcttctgtatgttctaatgatgcattaaaagttgaacaatacgaagtaaccattaatggtgaagctgttgctagggatagaattgcattcaacccatctaaatgtaatcaatgtggtgactgtatcgaagcatgtccttatgatatgattcacaaaacagaaaatcctaaattaccaattgcaggattctgtactttatgtggtcaatgtcttgaagcatgtcctgaagatgcattatgctacaaatag

SEQ ID NO: 7886 - DNA, 1428 bp, Methanobrevibacter gottschalkii
  source 1..1428: mol_type = genomic DNA
atggttaaacttactatggaacctgttactcgtatcgaaggacacgctaaaattaccgtgcatcttgatgatgctggaaacgttgaagaaacaagattacatgttatggaattcagaggattcgaaaaattcttacaaggtcgtcctgtagaagaattagcaagaatcgtaccaagaatctgtggtatttgtgatgtacaacaccacttagcagcagctaaagcagttgaccaaatttttggatttgatgattatgacattttacctgctgcatacagaatgagagaaattatgaactggggttcatacatgcactcccatgctcttcatttctacttcttagctgcaccagatttaattattcctaacggaaccagaaaaactagaaatgttttccaagttattaaagacatgcctgaagttgcacttcaagctattaatatcagaagaaacggtttagaaatggttagaaaaataggtggtcgtccaattcaccctacttcttctactcctggtggtatttctaccgaattagatgatgaaactcaaaaagatttactcaacagagctaaacaaaatgttgaattagcacaagctactttagatttagctattcctgtatttgaagaaaatattgacttaatttcttcattaggtaattttggagatactagacactgtggtcttgtaaaacctgatggaacttgggatgtatacaatggtaatgtaaaaatcaaagataaagatggaagtgatctcttagaatacagaaatgaagagtacactgacattgttgctgagcatgtaaaaccttactcctggttaaaattcccatacattaaagaattaggttatccagaaggtatttacagagttgcaccattatcaagaattaatgtttgtgatgacatgcctaaagaagcacctcttgcaagagatgctcttaaagacttccgttcagctttcggatatgcacaagcaccattattattcaactatgctagactcattgaattattagcatctgctgaatgtgctgctgctgcattagaggaagatttatctggtcaaaaattcccagaagaattagaaagaactgaaggtaaaggtgtaggtattgtagaagctcctcgtggtactttaatccaccattacgaatctgatgaaaatggattaaccactaaagctaacattgttgttgctacaatccaaaacaaccctgctatggaaatgggtattcaccaagttgctaaagattacatcaaacctggtgttgaagtagatgacaaaatcttcaacttgatggaaatggttatcagagcttacgacccatgtttatcttgtgctactcactcaatggatagtcaaatgagattagctgaagtagatattgtagacagtgaaggaaacctcattaaaaaattctaa

SEQ ID NO: 7887 - DNA, 927 bp, Methanobrevibacter gottschalkii
  source 1..927: mol_type = genomic DNA
atggcagataaagtaaaaataggaactatgtggtttggcggatgttccggttgccacttatccattgcagatttccacgaatctttaattgatgttatggaattcgctgacttcgaattctctcctgtactcatggatactaaatatgatgaagtaccagaattggacattattattgtcgaaggtggaatcagaaatgatgaaaacagagaattatcagaaatgttaaatgaaaaatcaaacatggttattgcttatggaacttgttcttgctacggtggtattccaggtcttggaaacttatggactgttgaagaattagaagaagaagcatacattaattctgtatctactgtaaaccctgaaggaattattcctcatgaagatgtacctcatctcgaaagcagagtaagacctattggtgaaactatggatattgatttaatgattccaggttgtccacctcgttcagatgttgtagctgaagctattctaacattattaaaaggggaaacaattgaactaccatctactaacctttgtgaagtatgtcctagagaaaaaccacctgctggtttagctatggacttcattaaaagacaatttgaattaggtgctcctgaacctgatttatgtttaattagtcaaggattagtatgtatgggtcctgcaacagtatctttatgtggagcagaatgtcctgcaattggtatccaatgtagaggatgttatggtcctactgcaaaagtattggatcaaggagcaaaaatgatcagtgcaattgcatctgattatggtgtacaagaagataaaactgttgatcctgaaactgttgctgaccaattagatgatattgtaggtactttctacacttatacattacctgcagcattagttccaatgaaaatgcagaaaggaggagaataa

SEQ ID NO: 7888 - DNA, 426 bp, Methanobrevibacter gottschalkii
  source 1..426: mol_type = genomic DNA
atggctgatgatgtaaaaattgtaatgttttgttgcaactggtgttcctatggaggagcagacacagcaggtactgcacgtatgcaatacccaccgaatatcagagttattcgtgtaatgtgttctggaagaattgacccacaatttattttaaaagcatttaaagaaggtgctgatggtgtatttgtagctggatgtcacatgggtgactgccactatgatgctggtaactataaattagatcgtagaatgagattagtttataaattagtcgaagatatgggaattggaaaagaaagacttcaccacgattggatttccgcatctgaaggtgaaaaattctctgaagctgttaaaatgatggttagcagaatcaaaggattaggtccagctccattgaaaaaacaattaaatgctgaaggataa

SEQ ID NO: 7889 - DNA, 1236 bp, Methanobrevibacter gottschalkii
  source 1..1236: mol_type = genomic DNA
gtgcgcaatgtttatgaagatgctgaaagggcaaaagataaaaaagcagcaattggtgctgatatcactattgaaaattttactgatgaaacaatcaatgcaattgatatgattgatgatttagatgatttaagtaaacagactaaaaaagatttattaaaagttggtgttgacactaatgaagaaaatagggcgggttcatttttacaagttgatcaaagtaatatttttaccaacaattccatttcagattcaattgaagtaatgaatatgggtatagcattggaaaaatattcctggttagaagattatatgtggaatgttgttaagccagatgctgataaatacactgctaaaactgcattaagagaaaaagaagaaggtgttacaagcggttattttgttagatctcttccaagcactaaagaagtaatgcctgttcaagcttgcatgtttattagtgatgcagatattatgcaaactgctcataatgtaataattgccgaagaaaactctgaattacatttaatcaccggttgtgctactggtgatgacatttcatctgcaatgcatgttggtgtttctgaaatgtatttaaaaccaggttcaaaaattacttttacaatggttcacaattgggcagaagaagtagaagtacgtccaagaactggtattaaattagaggataattcaacttacattaataattatattttaacaagtcctgttagcactattcaatctttccctactgcatactgtgatggtaaaaattctcgtgctattttccaaagtattcaaggtggtaaaaaagattccatcattgatgtaggatctagagcattattaaatgctgaaggtgctaaagcagaagttatttcaagagcagttgctcaagatgaatctaaaatatatgctagaggacatttagcaggtattgttcctaatgttaaaggacacttagaatgtcatggtttagttttatcagatgacagttttatttatgcagttcctgaacttgaagctagttccaccaatttggaaatgtctcatgaagctgctgtgggtaaaatttctgaagatgaaattaattatttaacatctcgtggaatacctgaagaggaagccgaatccatgattgttagaggatttttaaacatggacatcactggccttcctgatgaattagcacaacaaactcaaaacatgattgacatgagtcttgatggaatgtaa

SEQ ID NO: 7890 - DNA, 756 bp, Methanobrevibacter gottschalkii
  source 1..756: mol_type = genomic DNA
atgttacttgaaatagaaaatttggctgttgaagtagccggaaaaagagttttaaaaggtgttaacctttcaattgctgaaggcgaaactcatgttcttttaggaccgaatggtgctggtaaaagtacattattcttaactattttaggttttccacaatatgatgttgtagaaggatctattaaatttaaaggtcaagatataactaacttaactactgctgaaagagttcaattaggcattggtgtgagttttcaaactcctcctgcaattaggggaatttctgttggagatttattaaagattatatctaatcaagatgttagagaagaattaaacccaagaatgaaagaattagctaatcagcttaaatttagtgatgaatttttagatcgtgatgttaatttaggattttcaggcggtgaagtaaaacgttctgaaatattacaattacttgctcaaatgcctgatttcaccatgtttgatgaacctgattctggtgtggatattgaaaatgtagagttattagcttctgaaattggaactttattagataaggataaaccacaacgtattagacaaagaagtggtcttttaattactcatttaggttatattttaaactttgttagtgcagataaagcgcatgttttaattgatggagtaatttcctgttctggaaaccctaatgaaattctcgaagatattagaaaaagcggttttaacggatgtgttgagtgtgcgcaatgtttatga

SEQ ID NO: 7891 - DNA, 267 bp, Methanobrevibacter gottschalkii
  source 1..267: mol_type = genomic DNA
atggaaaataaacaaattcctagaagagaagagaaattatggagcgaaattaaaaactatcaagtagctaccaacaatgcacgtattcttggtgttcttgatgaattaattattaatgaaaaaactggtaaaatcgtggatattgctattagagttgaaagtgatcgtaatattcatgttaaaggtgctaaaagaaacggtgatttgttattagttcctttcgctaaagttgaaaaagttggcgaatttatcattgtaactgaataa

SEQ ID NO: 7892 - DNA, 609 bp, Methanobrevibacter gottschalkii
  source 1..609: mol_type = genomic DNA
atgatttatgcaattttgatggctggaggtaaaggaactagacttgagactccatgtgaaaagccactttttagattacatgataagcctttaataaaatatgtgcttgataatttaaaggaatccaaattaattgataagattgtcatagctgttagtccccattcttgtgaaactactaaatatttaaaatcattaaatgacgattttgaaattttagatacttcaggtaaagattatctggttgatttatcatatattttagattactttgagcaaagatctaaagaagatattttactttttattaatgcagatttaccatttatttctgctgaaacagtggatattgttttggagtattatttaaaatcagataaagatgcactttctgttttggtgccagtagaaatttttaatgatttggggttggattattcttatgaatttgatggtaatgttccctcaggattaaatgttttgaaaagtatgaatataattcaggatgaaaatcaaattgttattccaaaagtggaattggcattaaatattaatactcttttggatagtaaagttgcagaagaattatacaaagaatattatatttaa

SEQ ID NO: 7893 - DNA, 1470 bp, Methanobrevibacter gottschalkii
  source 1..1470: mol_type = genomic DNA
atgtcttttttaagtaaaatttttaacaaaggtcctaaacctgttattgctaaatcccgagaaggcaatttagctacattaactgctcaaaaagcaggtcctgcaagtccaggtgttgttaaaaaacctgacactttttatgtaactgcttctgttgaattgggtaacactaccactaagtgtattgtcatggcaacaaatttgaacactagtgagtcttatttacttaataaaactgttaaaatgacaagggatattagacaacctaaacctggtgaaaaagtatttggtaaaactgtttggggtattgaactttccaaagaagctgtaacagagttggttaaagatactgtattggaatctttaagaaaatgcaatgttgataaagataaggatttggattttgttgtaagatcaactggagtaacagctggttttgcaactgctgaggaagctggtcaacttattattgcacttgcagacggatgtcttgaagcagacattcctccgcgtaaaatgtcccctgctatgagtatttctcaacttcctgaaagattacaaaagcattcccttttagagaatatcatgtttgatggggcagttgtaagtgtagttcctcctgaaggaaaagaaactgttgcaaatgagatggagggagaacttgttactgcaggtattaagttaggtgctaaatggactgatgtggattataggaatccttgtgtttcccttgatttcggttctacgttagcaggtcgtattgtaaatgatcatgaaccatatgctaatactatcggaaactttttaggtttagcaggggttgttagtgattcattagctaagggctctggtttaattgataaaaaaaatggtgctgcacttgatttatattctgataaagcaatgaaaaaagctaatcataaaaaagcccaagtcaatgccttagaagcacataaattaattaatatccgtaaagttccaatggatgttgaacggttcggaactgttccattaaatcctgaagctgctgaaaaagcaggaactactttaataggttgtgatgttggttttaatggtgataagttagatgaattaatggaattgggtgcgcaattctatgattctgatggtcttccaacattactatctactttggattatgtaagtactaatattgttacaagattattggatgttgcatttgaagaagatgtaattgttccaggttcttctttaggaattacaggaagggcagggattactggtcgcaaacctcagcttattttggaatctgtccaagataaatttgagaatgttgtatttgttgaagatggtcttgctttgggttctgcaattatggctcgttgtatgaattctatgggcactccaaaagttcctattggtggaaaacagggtggtagatgtattcttaaagaccgtatgaaaatgaatggtggcaaattcgcttaa

SEQ ID NO: 7894 - DNA, 933 bp, Methanobrevibacter gottschalkii
  source 1..933: mol_type = genomic DNA
atgtttagatttgataaagaacaactcgtagttgatgttgctggtatgaaaatggggggtcaacctggtgaataccctactgtgttagcaggaactatcttctatggtggacacaatattattagtgatgaaaaagctggggtcttcgataaagatgcagctgaagaaagaattaaaacaatggaagaaatgtctgatgtaactggaaacccttgtgttgtacaaactttcggtgctactgcagaagctatggtaaaatacttagaatttgtaggagacgtctgtgacaaacctttccttatagactcaactgcagctgcagcgaaaattgcaggtgtagaatacgtacaagaagtcggattaactgaaagagctgtttacaactctttaagtatggctgctgaacctgcagaaattgaagcagttaaaaactctgacatcgatgcatccattctcttaggtttcaacccaatgaatcctggtgttgcaggtaaaattgaaatctgggaaactggtggagatgttatcgacaaaggtattctcgaaatggctgaagaatgtggaattactaaaccattcatggatgtagcagtaactcctttaggtcaaggtgctggacctgctgtaagaacttctttcgcagttaaatccaaatggggttacccagtaggatcaggtatccataacgttccatctgcatgggattggttaagaggatacaaaaaagaacacaaagaagcatggcctgtttgtgatatcggttctaacatcgttcaacaaatggctggtggagacttcgtactcttcggacctatcgaaaatgcaagacttgcattccctgcttgtggtatggcagatattatgattgcagaagctgctaaagatattggtactgaaccagtggaagaccacccaattaacaaattattataa

SEQ ID NO: 7895 - DNA, 240 bp, Methanobrevibacter gottschalkii
  source 1..240: mol_type = genomic DNA
atgagtgaagaaaattcaatacctcaagtaatggtttcctcagatgaatttaacgatgttgtagctaaattagatgcagcagaagaaaaagttgatttcactgttggagaatattatcaacgtttaggccaacaaactggtagagatgttggtatattatatggtattatacttggattaatgattttaattgtagctattaaattcggtgtagcttcaatgttatctaccttattatag

SEQ ID NO: 7896 - DNA, 207 bp, Methanobrevibacter gottschalkii
  source 1..207: mol_type = genomic DNA
atggtacaaatttctaataaaccaaatataggtggaatgaaaactgcagcagatgatgctgaatacagttcaaaactccttgcaagagaaggtaaattattcgctggtttactcgcaaccagatttaaaggatttgctattggtatttgtattgcaactcttttaatcgtaattattcctttcattgcaaaagcagcaggattatag

SEQ ID NO: 7897 - DNA, 717 bp, Methanobrevibacter gottschalkii
  source 1..717: mol_type = genomic DNA
atggctgataaaaaagctcctgcagatggctggccggttattagtggggattacatagtaggtgatcctgaaagccctgttgcagtaacaactttagcttctcatattgaagctgaactttctggagcagctattgcaggtccatgtaaaacagaaaacttaggaattgaaaaagttgttgcaaatattatttctaaccctaatattcgtttcttaatattagctggtgctgaagtacaaggtcacatcactggtcaaagttttaaagctttacacgaaaatggtgctgatcctgacaaaaagaaaattgttggagcaactggagctattcctttcgtagaaaatgttccacttgaaggtgttgaaagattccaacaacaattagaaattgttgatttaatcgacactgaagatataggagcaattcaatcaaaaattaatgaatgtgtagaaaaagatccaggtgcttttgaagaagaagctatggttatttctgtagaaggcgacgacgctgatgaagaagaaggagaagcaattagggttgtttctgctgaaactggtctcatcgaagcaagaattagggatattaacactaaaatcgatatggtcggtgctgttcaaagaaatatggctggtaattatgctggtaaagttcaaggtataatgatcggattagctttcactttaatcattggagttttattcttgttattctaa

SEQ ID NO: 7898 - DNA, 330 bp, Methanobrevibacter gottschalkii
  source 1..330: mol_type = genomic DNA
atggctcaaatgttacctatggtacaagttgtacctgaaatgaatttcgcatatgaccctgtctctggggttatcggatcatctttaggttcaggagttgttctcctatctatggatgaagtaaacgaacaagtagcaaaagtagaattggctgctgatgaattaatggcttctttagacccatacacaagtcctgttggatcttatcctggaagggaaggttcctatgttactgcaggattattaactaacattgtatatggtttcttattagcatcattcattatatttgctgcattaccaatcttacaagcaatgggggttttatag

SEQ ID NO: 7899 - DNA, 816 bp, Methanobrevibacter gottschalkii
  source 1..816: mol_type = genomic DNA
atgtctgctggtggaagtgcagatggtgcagctgcaggtgcagttgactcaatgcatttattagttttaggtatagttggtggattactcggtatttacttaactgctttcttaggagaaactatcggatcattattcgcaggtcttggtgctgtatgtgctattgtctggggtgctgatgctatccgtagagtagcaagttacggtttaggtactggtgtaccatctattggatatatgtctttatctgttggtgttatttctgcttttgcaggtatcagtttagctgctatcttaaaaatgccaatggtaggacctatcgcagctttattagttgctgtaattattggtgcggttattgctcttgttgcaactaaaattgtaggtatgaaaatccctattatgcttcaatgtaccatcgaaatcgctggtgctgctgcattatctatcttaggattctctgctgcaattgctggtagtttcgatatggctgcagtttatgaaaatgttgttgcaactggatttattgctgtattatttattttatgtactatggctatccaacacccattcaatgcatgtttaggacctaacgaagatcaattaagaacactcaaatgtgcagcatctactgcatttttatccatgactattgttggtctcatgtccatcactactggtggattaggttggtttattgtattcatcgttggtttaattggttggattatctcattcaaagcatttgttgttgcttctatgaatgatgctgcatcaaccaaatgggctggattatggcctaaagttgagaactag

SEQ ID NO: 7900 - DNA, 702 bp, Methanobrevibacter gottschalkii
  source 1..702: mol_type = genomic DNA
atggatccaattagtttaattttattcatcgcaataggcggtattatgattggtgcaggtgtgcactttattcctgtaggaggagctcctgcagctatggctacagctactggtgtaggtactggtactgctatgttagctgctggtgctggtttaacaggtcttattactgctgcaactatgacaggtgaaccattttatataatcggtatcggtggtgcaataggtgctatgattatgatgggtattactatgctcattgctaacataatttatatatttggtgtaggtattgttcctgcagcatctaaggtacctgttgactggattacaaaacgtaaccaagaagcttacaaaactcctggtactgaaggtcacggtgtaccagttacttcctttgtaagtggtcttatcggaggtcttcttggtggttttggtggtggattagtatactatggtattgacactgctattaaccaaagtagttttgtatctgaccctgctgtaagtattggtttagctgctattattggtgtaggtgtattctttattaactctgtaattgcttcttacaatatcggaggtactattgaaggtatgcacgatccaaaattcaaaagaattggaactggagctattgcatgtgcaattgcatctattgttgtagcaatcttttgtattattttaactggaggtatctaa

SEQ ID NO: 7901 - DNA, 879 bp, Methanobrevibacter gottschalkii
  source 1..879: mol_type = genomic DNA
atggaccctgtaacattaggtgttgttgcattaatgggtgcagttgctactatcggaggggctgctgaggatttggaatctgatattggttctcaaagtaaccctaactctcaagttcaacttgctccacaaatgggacatttacaccgtatgataaacaaggcggcttctggtgaaccagtcgcttatggtgtttggtgtggtgttgctggtgctattgcatatattgtaatgtctttaggtatgttacctatcgttgctatcgcaatgggtgcttgtgtcgctgcttttgttcacgctatttatactgttacatcccacatgggaaggattgttggacaatctcaatttgaacaaccattgtttatggatgtattaactcaatctttaggacctatcgttggtcacggatttataactagtttttgtattgttggaatttcatacttaatgactattccaattaatggtactgcattacatgtattcccattaccactcttagcaatgctttggggtattgctcttggtgctatcggttcttctactggggatgttcactatggtgcagaaagtgaatatcaaaaattcgaatttggtggaggtactcctgtagctattcaaggagatattgttactaaagctcctatgggtgctaaaaactctatggatgtagtaaacttctgtgctaaattcggtggaccattaactggtttctgtttcggtctcgttgtattctttagtttctggaatacagtagtatttggagtatatggtggtattattgtaggtattatcattgttatcctattagttattatggataattatttagaagtatttgcaagaaaccaatatggaccatatgaggaagaataa

SEQ ID NO: 7902 - DNA, 1668 bp, Methanobrevibacter gottschalkii
  source 1..1668: mol_type = genomic DNA
atggtaattaatatggctgataaaaaattcttaaatgcaatgaaacaaaaattcagtgaagatccaactgaaaagtcaacccaattttataacatgggtggttggactcaatctgaaagaaaaactgcatttgtaaacgaaggtaaagaaattgctgagaaaagaggaattccaatgtataacccagacattggtactcctttaggtcaaagagctttaatgtcttaccaattatccactactgatactttcgttgaaggtgatgatttacacttcatcaacaacgcagctatccaacaagcttgggatgacattagaagaacagtaattgtaggtttaaacactgctcacaatgttcttgaaaaaagattaggtattgaagtaactcctgaaacaattaccaattacttggaaactgtaaaccacgctatgcctggtgcagcagtagttcaagaacacatggtagaaactgacccattacttgtagctgattcttacgtaaaagttttcactggtgacgatgaattagctgatgaaattgattctgcatttgtattagacattaataaagaattcaatgaagaacaagctgaagctttaaaagctgaagtaggtagtgcggtatggcaagctgtaagaatcccttccattgtaggaagagtttgtgacggaggtacaacctccagatggtctgctatgcaaattggtatgtctatgatttctgcatacaaccaatgtgctggtgaaggagctactggtgacttcgcatatgcatctaaacacgcagaagttgttcaaatgggtacttacttacctgtaagaagagcaagagcagcaaacgaacttggtggagttccattcggattcatggcagatatctgtcaaggttctagagtttacgctgatgaccctgtaagacaaaccttagaagtagtagctttaggtgctgctttatacgaccaaatttggttaggttcttacatgtctggtggtgtaggattcactcaatatgctaccgctgcatacacagataatgtattagatgacttcacctactatggtaaagattatgtcgaagacaaatatggtgatttatgtgctgcacctaataacatggacactgttcttgatgtaggttctgaagtagcattctatgcattagatcaatacgaagaatacccagctttacttgaaactcacttcggtggatctcaaagagcttcagttatttctgcagctgctggttgttccactgcattcgctactggtaatgcacaaactggtttaagcggatggtacttatccatgtacttacacaaagaacaacattccagattaggtttctacggtttcgatttacaagatcaatgtggtgctgctaacgtattctccatcagaaatgatgaaggtttaccactcgaaatgagaggaccaaactaccctaactacgctatgaacgtaggtcaccaaggtgaatacgcaggtattgcacaagctcctcacgcagctcgtggagacgcttttgctttcaacccattaatcaaaatcgcatttgctgataaaaacttatcattcgacttcagtaaagtacgtgcagaattcgctaaaggtgctttaagagaattcgaaccagctggtgaaagaactgttattaccccagcaaaatag

SEQ ID NO: 7903 - DNA, 759 bp, Methanobrevibacter gottschalkii
  source 1..759: mol_type = genomic DNA
atggtacaattttatccaggtacttctcaggttgctcaaaacagaagaaacttctgtaatccagaacatgaattagaaaagttaagagaaatctctgatgaagacgtagtaaaaatattaggtcacagagctccaggtgaagaatataaatctgttcacccaccattagatgaaatggatgagcctgacgacattgtaagagaattagtaacccctattgatggtgcaaaagcaggagacagaattagatatattcaattcgtagattccatgtacttcgctccagctcaaccttacttaagagctagatcttacttaaacagatacaggggaattgataccggtactttatccggaagacaagtaatcgaagcaagagaaagagatattgaaaaattatccaaaatcctcttagaaaccgaatacttcgataccgcaagaaccggtattagaggtgcaggtgtacacggtcactctttaagattagatgaaaacggtttaatgtttgatatgctcagaagacaagtattcaacaaagaaaccggtaacgttgaaatggttaaagaccaaattggtaaagaattagatgaacctgttgtattaggtgaaccattagacgaagaaactttaaaagcaaaaaccactatttacagagtagatggtgaagcatacagagaggatgtagaagctgttgaagtatgtcaaagaatacatgtttccagatcctttggtgcatatgatccaaacgcaggatggtaa

SEQ ID NO: 7904 - DNA, 600 bp, Methanobrevibacter gottschalkii
  source 1..600: mol_type = genomic DNA
atgataggacgctgtactcacgtagtagattgtagggaaacaagtggtatgggaaaaggtggaagccttgctcaaagaggaactttcgctgaatgtggcactgatgtatgtgcagtagctatgtcccctggacgtagacacattactaaaccagtttgtgagattactttcgggttacgtgaatcaaatgttttaactagtaccgttgttttaaatgcaggtgctggtgttcctcatgatgctcctgctagtggaggaacattatttggaattacagaaaaggagattgaccaattaaataattttaaattgcttgttattcacttaggtggagttgcaaatcatattatttataaagcaagattaatcttaaggaatgtcaataaaccttgtgtgattatttgcgaatcaccagttgactgtgaagattttgctaaaattggagtaaaaacttcaaaagtcatgccagcagatgaagatattaaaactcaaggaactattaaagatatcgtaacaggagttattcgtggtgaaacaatttcacaagaaaaattagatgaaattattagaaaagttaaattagcattaggagatgcataa

SEQ ID NO: 7905 - DNA, 456 bp, Methanobrevibacter gottschalkii
  source 1..456: mol_type = genomic DNA
atggatattgaaatatttcctcatagaattcttggaagtgacacaactgaattattattaaatgaattagaatctattgatgatgttcaaagaactgtcattcatggtccaagatttccaaaaggcgaagctactttgcctgataaatataaagaacgtagagtcattaatattaatggtgaagatgtagttttacaagttaaaactgctagaattttcattgaattaactatggaatctacaatcaaggaaattgaagaagtctgtaaaaagcatattccgtttggttttgatattaatcaagatagagcgaattatattagaaaacataaaactgttactgatagaatcaaatatggttctgcagatttacctgatgatttagtaggtatgactgatcaatattcagattttgaaagccatgtgaatattatcaaaagagataacttagattaa

SEQ ID NO: 7906 - DNA, 1332 bp, Methanobrevibacter gottschalkii
  source 1..1332: mol_type = genomic DNA
atggcaaagtttgatgataaagtcgatttatacgacgatagaggatccttaattgcatctgacgtaccaatcgaagctattagtcctttaagaaacccagcaattcaaagcatcgttaaaggtgtaaaaagaactgttgcagtaaacttagaaggagtagaaaaatccgttaaaaccggatctgttggtggagacaaatctaaaattttaggaagagaattagatttagacattgtttctaatgcagaagcaatttctgaaaaaattaaaggaactatccaagtttctgaagatgacgatactaaagtagaacctatttctggtggtaaaaggttattagtacaagtaccatctcaaagaattgatgtttctgctgagtactctgtagctcctttagctactgctactgctttagtacaagctatcattgatgtttgtgacgtagatatttacgatgcaaacttcgtaaaagctgctgtattaggtagatacccacaatctgttgaatacaaaggatctaacattgcaaccatgttagatattccacaaaaactcgaaggaccaggttacgcattaagaggagtaaaagcaaacgatttcgctgctgctactttgaaaaatactttccaagctactgctttagcatctattttcgaacaaactgctatgtttgaaatgggtgatgcaattggtacttacgaaagattacacttattaggtttagcttaccaaggtttaaacgctgataatatggttatggacttagtaaaagacaatgcggctgaaggtactgttggttctattgtacaagctaccattgctcgtgcagaagctgacggggtaattgctccacaaaaagacttaaccgacttctctatctacaacactgatgatgcagctaaatggaacgcatatgctgctgctggtgctgtagctgcaactatggttaacattggtgctgctcgtgctgctcaaggtgtaccatctactttattatacttcaacgataacattgaattcgctactggtttaccaagtattgactatggtagagcagaaggtgtagctgtaggattctcattcttcagtcactccatctacggtggtggaggtcctggtttattcaacggtaaccacgttgtaactagacacagtaaaggattctgtataccttgtgtagctgctgctatgtccttagatgcaggaacacaactcttttcaccagaagcaacttctggtttaattaaagaagtatacagtcaaattgatgaattcagagaacctattaatgctgttgcaattgcagctgaagaaattaaaggtgacatctaa

SEQ ID NO: 7907 - DNA, 1245 bp, Methanobrevibacter gottschalkii
  source 1..1245: mol_type = genomic DNA
atgcaaattgtagcagatgttgggggaatacctggtaaggattgtaatggtttttgtaaatactgttactttagaaaagtaaaaaaagtcaaaagctttgggtgtgcatattgtccacctaataaaataggttgtgaaaggtgcagcaaaggagttagtgaaacacaaagcgaatttaaatcaccattacaagttatgaatgaagtgcgaaattcgttaatgatgaatatgcatggaggcaaagtaactgcaaatataagtggtggtggagatattagttgttatccccaccttgaaacattaacctcaaatttaaatcaaatatcaatcccatctgttttaagttatacttgtggaaagggtataacaaatagtgaaattgcttcaaaattaataaataatggagttgaagaagtttcatttactattttctcatcagaccctaaacttagaaaagaatgggttaaagatcagcaccctgaagaagctcttaaagcatgcaagatcttttgtgaaaatattaaattaactggtgctgccgtaataatcccaggtgttaatgatggcgaaatattacgtcaaacatgcaatatattagaagaatggggtgcaaaaggaatgcttttaatgagatttgcaaatacattcaacgaaggattaattcttggaaatgaaccaattcttaaaggaattgaatcgcaacctgttgaagactttgcagagcttgttagacaaattaatagcgaatatagttttagagtgagtggaaccccattgtgtgaccctgaaaccggtgggccatttgcaatagccaaagatgaaaatgaaatattcttacaatttatcaaaccaattacaggtgaagcaactataattacatcaaaaattgccgcaccatttatttccaaaatattcaataaactagaagtggatagtgttaatgtagtggcagttgaaaaagaaatagcttgtttgattacaaaagaagacctggaaaaacttgatttgaatgaaataaaagatgttgcaatcattcctggaagatcttttgttcatcaacttgatgcagaaagaatcttaagtgctgatggtattgaaagacttgttggtcgtggcccagacacattaagtgttgatggggaattaagtattgatatgactgatgaaaatgtcatagaaacagaactagaacaatttaacgatttagcagatgccattaatttctttggaatgagaagaatttga

SEQ ID NO: 7908 - DNA, 924 bp, Methanobrevibacter gottschalkii
  source 1..924: mol_type = genomic DNA
atgtatgaaacattaacatttactggtggagttcacaaaagcgaagaatttaaagaattaattgaagatttaggaggatttattcttcaggaaaatattcaacaaatggaattagttttaaacatggctgttcctttagaagatgtggataaagttgaagaaaaagctaatgaacttttagcaaaaatttcaatcgctccaatggcaggttctgaaatagcaattgtttcaccaacacttgcaagacaccatttacctcatgctgcatgtgacatttcagaatatttgcgtgaatttggtgcaaaggataacatgttaggccttgcaagaggtgatggtaaaggtacttctggaatcaccgaagaagaaaaagatttaattaatgaacatgatattgctattttttcgttaggcagttttgaaaattgtattaaagaaaaagcattcttatatgatgatattgatataccggtgattgtaactggcgctccggatattcctgtcgaagagcttcccggtgcagatgcatatgtgggtggtttaggtagaattcctagaagattgagaagaggaccggatgttcgtgcattggataaattagtcgaaacatgtgaaaaaattttaaatgataaaaaacgtgaaatggctcttgatccaccattagttccatctattgttgtaaaaaatgcaattgaaaatcaggttagagaaattaaagatgttttctctccagctccagtaacttcacaattagatggtgttcgtgtaaaattgaattatgatgattatgcagatgtaataagtaatgttattattgatgataaaaaattatctgaacttgctgagataaaaaaatcattcatgtatgattatattttagtaaaaattaatagtgaaagttctcttgttgagaattctaactaa

SEQ ID NO: 7909 - DNA, 519 bp, Methanobrevibacter gottschalkii
  source 1..519: mol_type = genomic DNA
atgaaaatagttacaacacctatgtgtgaggaaattgttaaattagcaggtatttctgattattctataaataaaaatcctgatgatgaaaaaggggatttggctatcttattatcagaaagtaatgttaaaatggatagtttaactattaaaatcaatactccttcacaagtttttgaaagtatcaaaaaagtttctaaaatcactaaaaatgaactatctgatgaagaggtgctggtcttttttgaagattatagattatgtaaaaaatacttaacttctaattttaaaagagatatcaatgttaaagtctattccaattttttaaaggatatccttttagatatgggatttaatattgtattcactgattttaaatatgtagtttatccggattatttaaaagataaagttgttgaaagtgaaaatttagttgaaattcagtctcatgataatatttctaaaaatccttttgagaaaattgagattagatattccatattagaaaatttaatataa

SEQ ID NO: 7910 - DNA, 684 bp, Methanobrevibacter gottschalkii
  source 1..684: mol_type = genomic DNA
atgaaagttacattaagttttgaaaaaagtgaaagttcagatgtctcaataatggttgatgcactaagagctagttctacaataacattagctttaaataacttcgagaaagtgattccatgttttacaccagaagaagcatttaaactaaaagaaaaacttggtgggattgttgcaggtgaacgtgatggtaaaaaaatcaatggatttgaccttggaaattcaccagccgatataaaagattatactagtgatcacctcattttaacaacaagcaacggtactagaatacttgaaaacatgaaatctactgttcttataggatcaattataaatgcttgtgaagtagctaataaaagtattgaaatcgcaaataaccacattgatgttgtgatggcaggagttaaaggagaatttgcaatagaagactttttagcagcaggtgaaatattatactggattttacaggaattaccagattgtaatttaagtgaatatgcaaaagcggcagtattggcaagtagaaattatgaatccttaaaagaatcattttttaattctaggtctggtaaacgattaatcgaactgggctatgaaagtgatgtggaactttgcagtttgaaaaatatctccaacaatgtcgccatatatgaaaatcaagagttaacattattaaaagattaa

SEQ ID NO: 7911 - DNA, 1173 bp, Methanobrevibacter gottschalkii
  source 1..1173: mol_type = genomic DNA
atgaaaagagaattattaacaataattggtactgctcatgtatctgaagaaagtgttaatgaagtaaaggatgcaatttatgaacaacacccagatattgttgctatcgaactggataggggaagatatgcaaaaataagaaataaaatgcatggtatcgaagaagatgacaatatttctgttactagaataattaaagaaaataaagttggattatttttagtaagtactcttcttggatatttccaatcaaaaattggagcagaagtcgatgtagacccaggttccgaaatgattggtgctattgaagcaagcaaagatttaggtattccaattgctcttattgatcgtgaaataaataccaccttgcaaagagcattgaataagatgggatttatggaaaaagctaaatttgcatatgggctaatcgcttcaatattaggttttgataatgacgaagaggaaatagatattgaagagctaaaaaactccgaaaatattgatgacatgatggaaatgtttaaagatgaagcccctagtgtttatgaagttcttgtacacgaaagagatgcataccttgcagggaaaataatgcaaataccttatgataaagttattgcagtcgttggagcaggacataaacctggaattgaaaaatacttggataacccagaaacattgcctgatttaaaggaactagaaatcataaatgataaaaaaggaatcccttggcttaaaatatttctggcattgatacctatattatttgttgtgatattttttctggcatattttaatgggataaatattactggaaatatttatgaatttatagtcattagtgtaataatgggttttattggatcaattctttcaggttccaaaatacaatcagcaattgttggtggtatcgtggcgccattaactattatccacccattacttgccgcaggatggttttcagggctaactgaagcaaaatacagaaaagtaaaacaaagtgatattaaaaatctagttaaaattgaagggtttaaagatttatggaacaataatatatttagaatattgcttgtagttattggaacaaatttgggagttagtatagctacattagtaattttaccatcaaaagttttcattccattattcatgaaaatatttggtggatga

SEQ ID NO: 7912 - DNA, 213 bp, Methanobrevibacter gottschalkii
  source 1..213: mol_type = genomic DNA
atgtattttatatttcgttgtgactgtggacgtgcactttatgcaaaagaaggagtagcaacacgcaaatgtgtttgtggtaaaactataaaagtaaaatccagacgcatatttcaaaaagtagctacaagagaagaagcatcacttgccgttcaagaaatgcaagataaaatatatggaaacactggatttatgaaagccagtgatttataa

SEQ ID NO: 7913 - DNA, 1320 bp, Methanobrevibacter gottschalkii
  source 1..1320: mol_type = genomic DNA
atgattggaacgacactcaaaatagttataattataatactaattattcttactggatatttatcaatggccgaacttgctgttgtatctataagaaaagcaaaaatgcaaaaatacttagaagatggaaataaaaatgcacaaattgtttttgatttattagaagatccaaatgaatttttatccacagttcaaattggaatttcacttattggtgttttaactggtgcatttggtggaataacacttgcagaacctttagctaaaataatctatttcataccatatagtgacatgattagtgtggtgttggttgttcttgtaactacatacttaacattagtaataggggaaattgtacctaaagtcattgctctaaacgaccctgaaaaagtttctcttaaagttgctaaaagcatggtaattctttctaaaatttcaaaacccgctagttttgttcttgcaaagtcaagtagttttcttctatgggtattgagaatcgaaaacaaaaatgatgaaatagttaccgaagaagaaatagaattaatgattaaagaaggaagggaagacggaactattgaaaaagaagaagaagacattataaaaagagttttcaaacttgacgataaaaaagttgaaagcataatgactccacgtaatgagattatttggattaaccttgaagatagtagggacatcaacaaaataaaaattgttgaaagtaaaagatctatttttccaatagcaaaaggagaattagatgattttattggagttgtgcaagcaaaagacattctttcagtgatgtttagtgaagaagaatttgatatcaatactataataaaagaacctttggttgtatccgaacacctagaaaccttagaattattaaaagaattcaaagaaaaccaaggatatgtacatatgtctcttgtaatcgatgaattcggaagtgttgaaggtttaataacattaaacgatttgcttgaaggtattgtaggagatattcctggaattgatgaagaagatgaacctgaagcaattaaaagagaagatggaacttggttaattgatggaagataccctattgataaatttaaaaaactatttaaatttgaagatccattacctgatgaagaggaagacaattatactactcttgcaggatttatcctcagcatcagtggaacaatccctgatgaagaagataaatatgaatgtggaagattcatatttgaaattattgatattgatggccaccaaattgataaagttcttgtaactgatttaggaccacaagaagatattgaagaggaataa

SEQ ID NO: 7914 - DNA, 945 bp, Methanobrevibacter gottschalkii
  source 1..945: mol_type = genomic DNA
atggatagcggaataattattcaagttgtattattaattgtagggtttgtatttttaattaaaggatcggatatttttgttgatggttcaagcagcattgcatcacttctaaaagtaccgacaataattgttggtttaactattgtggcatttggaacaagtgctcccgaagcagccgtttcaataatatcttcaattaatggaaataatgcaatggcagttagcaatatcattggaagtaacatattcaatatattaatcatcataggtgttggtacattacttggcgatttattaatggaaaaaaatgttttaaacagagatttgcctatcctaataggagttacattgctattaactgcatttatcattattggatggaacatatccactattgaaggaataattttacttgcaattattgttgtttatgtattttcacttattcattcttcaaaaaaagatagtcatgcacatgatgtagataaaccaaaattaagcactaaaaagagcatatcctttatcattatcggactggtgggaattattcttggtggagatttagttgtaaaaagtgcttcaactattgcaatctcctttggaatgagtgaaacattagtaggattgaccattgtagcaatcggtacatcattacctgaacttgtaacttcacttactgctttaaaaaaaggagaaaatcaattagttataggtaatgtaattggatcaaatattttcaacatgttatttgttttaggtgcaagtagtgcaataagtgaaataccactcgattcaagtttacttgttgatgtcatgtttatgatatttattacattattatgtttcatatttggtaaaacacaagaaaaatatgacaaaaaagaaggtattatattcatagcattatttattgcatatatggctttcgcaatcctgagaaattaa

SEQ ID NO: 7915 - DNA, 876 bp, Methanobrevibacter gottschalkii
  source 1..876: mol_type = genomic DNA
atgtctaaattaaacaaagatgaatttaatgattatatttttacaaggattaatacattaattcatgactatgaattgattagggaaggggaattaattgctgttgcattgtccggtggtaaggatagtgtattaactttacatgcactaaaaaattatcaaaatcaattggattttgatttagtagctattagtgtggatgaaggaattgaaggttacaggcaacatggcattgattctgctgttagtaatgctaatgagttgggcattgaattaattcaaaaatcatttaaagaggaagagggattcgcattagatgatatctatcaagactttaaaagtgcatgcattccatgtggcgtttttagaagaaatattttaaataaaactgcatatgagataggtgcagttaaaatagctactgggcacaatttagatgatgaaatacaatcttttttaatgagttttgcacgaggggatacaattaaattctcaaaatttgggcctgaacttgatgttatacatccaaaattggttccgagaataaaaccattatggaacacacctgaaaaagaagttggaatgtgggctataattaatgatattaatatacatttagatgaatgtccgtattctcatttgtctctaagagctaaaattaaagaatttttaaatgttagtgaagataaatatcctggtgttaaaaataatgtgatggaatctttccaaaagatattaacttttgaaaatgatatatctgcaaaccttaatgaatgtgaattatgtggtgagccaacttcatctaatatttgcaaggcttgcgaactaaaagaattaatttctcaggattgcgaaagccatatatgcaataaataa

SEQ ID NO: 7916 - DNA, 306 bp, Methanobrevibacter gottschalkii
  source 1..306: mol_type = genomic DNA
atgataacatgtgattttgcaatattgcctgtcggaaccgaaactactgaatgtaaagagtatgtgactgcagcagtccaatctataaaagattctggacttagctaccaattaaccggaatgggaacacaaattgaagcagatgatttagaagaactttacactgcaatagctaaagcacaggaagcaattttcaaacttggaattggtagagtgtatacagttataaaagtagatgatagaagagaccttgaaaatagaactttagatgctaaagtaagtacagtagaggaaatgttaaaataa

SEQ ID NO: 7917 - DNA, 1107 bp, Methanobrevibacter gottschalkii
  source 1..1107: mol_type = genomic DNA
atggtgtcaaacattaaagttcctattgcaaaaccaataattggagaagaagaaatagaaaatgtggttgaagttttaaaatctggaatgattgctcaaggaccaagagttgctgaatttgagcaaaaatttgctgattgggttggagctaagtatggtattgctgttaactccggaactgctgcattgcatgttgcattgctctcttgtggtattggtgaaggggatgaagtaattacaactccatttacatttattgcaaccggaaattcaattttatacactggtgcaaaaccggtttttgcagacattgacttaaaaacatatactatgaatcctgagtctattgaagcattaataactgaacatacaaaggctattttaccagttcagttatatggacaatctgcaaatatggataaaatcaatgatattgcagaaaaacatggtttaatggtcattgaggatgccgcacaagctcatggtgcaacctgtaatggtaggaaggtgggcagtttaggggatatgtcatgttttagtttttaccctactaaaaatatgacaacttctgaaggtggaataataacaactgatgatgaagaattggctgaaaatgctaaaatattcagagctcatggtgcaagcgtaagatatcatcacgatgaagtaggttataacttcagaatgactgatatttccgcagctattggtcttgctcaattagataaaattgatggatttaatgataaaagaattaaaaatgcagcatatctaaatgaaggtttaaaagatgttgatggaattatcactccgtattgtgcatatgactcaaaacatgtatatcatcaatacactatcagagttgaaggaaatagggatgattgggtagatattattaatgaatgtggtgttggaactggaatccattatccaattccattatataatcaaccaatttataaatcattaggaatcactggcaattgtccaagagcagaacttgctgcaaatagtgttatttctcttccagttcatccatctttaacaaaagaagatttagatttagttattgaagctgttaaaatggcttcagaaaaattagcttaa

SEQ ID NO: 7918 - DNA, 1167 bp, Methanobrevibacter gottschalkii
  source 1..1167: mol_type = genomic DNA
atggaagaatataaaatcaaaactattgaagaaggattaacaaaaattgaatttccagaatttgataaggtatcttctgatgctccagttttttacaatccccatatggaattaaatagggatttatcaatacttgcaatacaagtattccaaaaagaacaaaaaagagaaataaatatttgtgatttatttggaggaagtggaatacgaggcatccgttataagaatgaaattgacggagtaggtgaaatttccattaatgatataagtgagacagcaaatcattacgaaaaacacaacataaaattaaacaatttagaagatattgaagtataccaacatgatgcaagtatgtttttaagaatgaaacgtggagaatttgatgtaattgatattgatccgtttggaacaccatccccatttcttgattcatccggttattgtgctaaaagaaattccctattatgtgttacagcaacagatacatctgccctatgtggaacctataaagaaccgtgtatacgtaaatataatgcaaaaccctacaaaagtgaatactgtcatgaaacaggaattagaatattagcaggttttgttgcactaactctttcaaaatatgcaaaatgcattgatgtaaaaatgtctcatagtactgaacattacatgagattataccttgaaattaaaaaaggttcaaaaagaacagatgaaacattgaacaatattggttatattagccattgtaaaaattgtcttcacagacaaacaagtaatggcctagctagttctattgatgcaatttgtccagtttgtggtgaaaaactaattcatgcaggccctttatggttaggccctatccaaaatggagaatttattcaaaaaatgattgaagaaactgaaaataaaaaaatcaatagtgaaaaagaagctttgaaattattaaataaatgtcatgatgaagctaatgctccggcaacattctttgatattcacctcatctgcaaaacattaaagattagtgctccaaagttcgacttgattttagatgaacttaaaaaagaaggatttatagcagtgaaaacccattttaaaccattaggtatgaaaacagatgcatctattgagaatattaaaaacattcttatccaattacaaagtaaaatttaa

SEQ ID NO: 7919 - DNA, 477 bp, Methanobrevibacter gottschalkii
  source 1..477: mol_type = genomic DNA
atggtaaaaacaaaggataatgttatcaagttagatgatactgatatcaaaattttaaaaataatcaatgaggatgtgagaacttcatatagacaaatttcacgtagcttagatgtatcagtaggaacagttcataaccgtattgataaaatggtaaaatctggagttattaaaaaattctcaccagttattgatcatgaaaaattaggtttcgttttaaccaccattatcggagtaagagtaaaaggtggaaaactcaaaaattgggaagaaaaaaccttttttaacaaaaatgtagttggaatctatgacgttactggagaatacgatgcattcttaattgcaaaattcagaaacacaaacgaattaaacggatttattaaagaattgctaaaagatccgatcatagaaagaacttatacacaaactgttttagatgttattaaagaagatatgggatcttcaaacattttataa

SEQ ID NO: 7920 - DNA, 939 bp, Methanobrevibacter gottschalkii
  source 1..939: mol_type = genomic DNA
ttggcagtatgcttacccgatactcaagacgatgctccaagtatacctataaaattaactagagtaggtgttacaggagttaaaaaattattacaattagatagaacaaataaaagaccaataattttattacctacatttgatgcatttgtagacttgccaaatgatcaaaaaggagtacacatgtctagaaacccggaagctattagtgaagtacttgaaagtgttgctaaagatccaactgtagacattgaatcattatgtgcaaaaattgttgaaaaaatgatgaccaaacatgaatatgcaaaacgtgttgaaatttcaatgacaacagactacatgtttatgaaagagtcacctgttaccaaaaataaaactcaggaaatgagtaaattaatagcaaaagctattggatttagagatgaaaagggaaacattaaaatcagaaaaagcgttggtgcagaagttattggaatgactgtttgtccatgtgcacaagaatctgtaagagaatctgataaaaataaattattagaattcttagatgaagagactacacaaaaagttttagatactgttacttttgcttcacataaccaaagaggcattggaacattattaattgaagttccagaagataaaaaagttaaagcggaagaccttatagacattatcgaaagttcaatgagttcgcctgtttgtgaattactcaaaagacctgatgaaaatgcaactgttatgaatgcacatagaaaacctgtttttgttgaagattgtgttagaaatatgatggaaaaaattgctaataaatatgctaatttgccagatgacacattaatcacagcacgtcaggaaaatcaagaaagtatccatagacataatgcatatgctgaaaaagtaactacaatgggcgaattaaaatctgaactagatatctaa

SEQ ID NO: 7921 - DNA, 441 bp, Methanobrevibacter gottschalkii
  source 1..441: mol_type = genomic DNA
atgaaaaaaagttatgaaattgcaggacaagtaatgggattttttgaatcatttaaaggttcaagacctgcaattaacaatgatagaatactcattgttagaggaagatcaaggaaaatcattccaataaatgaatttgactccaaacttagtgaaatcggagaaattcttggagggaccgaattaaatgcaagctctgaaaagatttctgaaatattgcagtatggagacaaaaacatccaaaaaagtgaaggaaatactacctctattgatgaacatggatttaccagaatgaaagatgaacttgaatcaatggggcttgtagttgcatataaagtgtttgaactcttaggctttgatgtggtaattgccatatgggaagatagaaacgaactacctccattatatgtggaagtgactgtttcagaacatgaagattaa

SEQ ID NO: 7922 - DNA, 1113 bp, Methanobrevibacter gottschalkii
  source 1..1113: mol_type = genomic DNA
atgaagattaaaatgcaaaataaattaaacaaagaagatattctccatattttaaatgcaacagataatgaaataatcaattatatgttaaaaactgttcaatatagggagaatcaccttattacttattctaaaaatgtattcataccattaactgaaatttgcagaaatgactgtggatactgtaattttaaaaaaaaatctgacgatcctgaagctataattcttaaaacaaaacaggaagttttggaaagtttgaaagaagctgagaaatatggttgtaaagaagctctttttacttttggtgaagatgctgataaagaagaagttgttaaactcaaattagccgagtatggctatgaaaaaatgatagactacatcatagacatatgtcaaatgactttagatgaaacaagtctactgccacatacaaatggtggaaactttagttttgatgatttgaaaagattaaaagaagtcaatgcatctctaggattaatgcttgagaacacatcaaatagattaatggaattgcctgcacataataaaagtcctggaaaaaatccgaaattaagacttgaaaccatatcaaatgctggaaaacttaaaattccatatactacgggaatattaattggaattggagaaacaaaagaagaaattgccgaatcgttaattgcaattagagatttgtatgacaaatatggacatattcaagaagtaattatccaaaatttcacaccaatacctggaattgaaatggaaaattggccagaaccaagttttttagatatgattaagactgtaattgcaggaactcttttatttggagatactgatgtaagtattcaagttccccctaacttaaacaatgaaactgcacaaatattcttattatgtggtgctgatgattggggtggagtttcaccagtaagtcgggattatgtgaatatcacatctccatggccagggattaatgaacttaaaaaattaacaattgatgcaggttttaaattaactgaaagattatgtatttatgaaaaatacattaatagcgaatggttaaatgataatttattaaaaaaagcatctaatttatcaaagcatcaataa

SEQ ID NO: 7923 - DNA, 729 bp, Methanobrevibacter gottschalkii
  source 1..729: mol_type = genomic DNA
atgaaatataaaaaaattggtgatattttaattttagataataaatactcagataataattttgatgaattatctaggaagcataatgtaaaaactataatgaaaattgaccatattcaaggaactaaaagagaaccaatttataaaattctttatggggaagaaactgaaacaatacacagggaaaatggttgtttatttaaattagatttaagtaaagtaatgtggtctaaaggtaataataatgaaagattaagaattgctaagttagttgatgatgatgaaaccgtacttgacatgtttgcaggtattggctatttctccattcccattggtgttcactcaaatccaaaaaaaattattccaattgaaataaatccaaattcttatcattttttatgtgaaaatattagattaaataaattaactaatgtaactcctattttaggagattgtatgatgaaaactcctaaatttaaggcggataggattttaatgggatatgtaaaaacaactcatcattatttaaaaatagctattgatagtctaaataaaggaggaattcttcattatcatgaaacagttccagaaaaattaataaatacccggcccatagaaagaattaaagctcaagccggaaatagggatgttgaattattaaaaataaataaaataaaaagatatgctcctggagtagagcatgttgttattgatgctttgataaattag

SEQ ID NO: 7924 - DNA, 615 bp, Methanobrevibacter gottschalkii
  source 1..615: mol_type = genomic DNA
atgaaagataaaatcgtagaaggtacaacaaccgtcggaattacttgtaaagatgggattgtattcgcaactgaaagaagagcaactatgggaaatttagtagctcacaaagtagcagaaaaaatatttaaaattgatgatcacattgcaacaaccattgcaggttctgttggagatgcgcaaagtttaatgaaagtaattggtgcagaaacctcattatatcaaatgagaaacaatgatgagattagtgttaaagccgcagcatcattaactgcaaacattttacgttcaggaccaatgtatgttcaaatattacttggaggtatggatgaagatgaaccatccatttattcattagatcctgctggcggtatgattaaagataattacatttcaactggatcaggatccatcgtggcttacggtgttcttgaagacagatttagagatgatttatcagttgatgaaggacttgaattagctataagagctatcagagctgctgccgaacgtgacacttattctggaaacggatttttagtcgctaaagtagataaagacggctttgaaatgttagataatgaaaaagtaaaagagattttggataaaatataa

SEQ ID NO: 7925 - DNA, 1914 bp, Methanobrevibacter gottschalkii
  source 1..1914: mol_type = genomic DNA
atggcttcagatattttagaagatattaaaaaagagattttgcaaaaactacctaataagattcaggtttcaaaagtagaattcgaaggacctgaagtagtagtttataccaaaaatccagaaataataacagaaaatggtgacttaataagatcacttgcaaaagaacttagaaaaagaataattatcagatcagataaaagcgcattacttgataatgaatcaacaataaataaaattcatgaaattgttccagacggagctgaaattactgatatttattttgatactgtaactggagaagtagttattactgctaaaaaaccaggcctcgttattggaaaatatggtgtcacttctagaaatattgttaaaaataccggatgggctcctaaaatattaagaaccccaccaataagttcagacattattggaaaaattagaactattcaaaaaaatagtagtaaagacagaaaaaaattattacaacgtcttggacgtcaaattcaccaaggaagcaaatacccaaatgactgggcacgagttacttcaatgggcggatttaaagaagttggacgttcatccatgctcttacaaacaccaaacagtcgtgttctattagattgtggagtaaacgttgctgcatcagataataaaaatgcattcccttatttgaatgcgccagaattttcaattgaagaattagatgcagtcatcatatctcatgctcacttagaccattgcggatttgtaccttacttattccattacggatatgatggaccagtgtactgtacaaccccaactagagatttaaccactcttttacaatttgatcatctggatattgctcacagagaaggtaaccctttaccatttacatcaaagcatgtaaaacaagcaattaaaaatacaataacattagattatggtgaagtgactgacatctcaccagacataagattaacattgcataatgcaggacatatcttaggttcagcaatctcccatatgcacattggagacggagctcataatttagtatatactggagattttaaatacgaaccatccagattacttgaacctgcaaccatacgtttcccacgtgctgaaacagtaattatggaaagcacatatggtggaaaagaagatattcaaccttccagaaataatgctgaaaaagaaatgatgaaaacaatctataaaactcttaaacgtggtggaaaagtattagttccagtatttgccgtaggaagagcacaggaacttatggtagttttagaagaatacatgagacatggattaatcgaagaagtgccgatttacattgacggaatgatttgggaagcaacagcaattcacacagcaagaccagaatacttaagtaaagacttaagagaccaaattttccatatgggcagaaatccatttgtttcagacatgtttaataaagttcaaaaccatgaccaaagaaaagaaattgttgaaagtcaagaccccgcaattatcttatccacatcaggtatgttaactggaggtaattcagtagaatacttcaaatggttatgtgaagatgaaagaaacactttaatctttgtaggatatcagtccgaaggttcaatgggtaggagagttcaaaaaggttggaaagaaattccacttgaagatgatgatgggaaaactagaattttcaatgttgaaatggaaattaaaacaattaacggattcagtggtcattctaacagaagacaattaatggaatacgttaaaagacttaatccaagacctgaaaaggttatcacttgtcatggagatccatataaaactgtggatcttgcatcttcaatacatagaagttacaagattgagacaaaaactccaattaacttagattgtgtaagaatacattaa

SEQ ID NO: 7926 - DNA, 1020 bp, Methanobrevibacter gottschalkii
  source 1..1020: mol_type = genomic DNA
atggttacatattcagaatcaggtgttgatattgatttagaagcaattactgtttcaaaattagcagataaactcaaatcaacattagaatgtagagatattattacagacagtggtcattatgcagctttagtaaaattaggagataaagctattgcaatgagtactgatggtgttggaagtaaaattttaatcgcagaaatgatgaacaaatatgataccgtaggtattgattgtattgctatggttgttaatgacattttatgtgttggggcagaaccaatagctttagtagattatcttgctgttgaaaaaccagatcctgaaagagcagcagaaattgctgaaggtcttgttaaaggtgctaatgaatcaaaaattgcaattattggtggagaaacagcatctcttccaggaatcattaaagactttgatttggcaggaactggtattggatttgtagacattgataaaattattactggtgaaagtatacagccaggaaatgttttaattggtatcaacagtaatggtattcattctaacggatacagtttagctagaaatgcaatttttgataaagggggattttctgttgatgacaaaatgcctaatggtgaaacaaccattggtgaagaattaattaggccgactgaattatatgtaaaacctattgttgctctattcaaaaaagaatacaatattaatggtcttgctcatattactggagggggtttcactaaccttagacgtttgaaaaaaggtgtaggatatgagatcaacagccttccagaagttccagaaatattcaaacttatttacgaacaaggagtagacatcaaagagatgtataaagttttcaacatgggtgtcggttttgttgttatctgtgatgaagaagaagcgggaaaaattatgagtactttagatgaatattgtaactgtcaaatcattggtaaagtgactgatgatgaaacaatcaaagttaaatcatttgaaggcagtgaacttgaatactaa

SEQ ID NO: 7927 - DNA, 1032 bp, Methanobrevibacter gottschalkii
  source 1..1032: mol_type = genomic DNA
atgatgaaaataatgatggataatgagacagctcttgtaaaagaaatattaaaggaattaggagctagtaaagaagatcaggaattagttgcagaagctacagttgatgcagatttaaaaggattcacatcacacggactcggcagattcccacaataccttattagtattaaagccggaacaattaacctagatgaaaatattacaatcgaaaaagaaactcctgcaatggcattgattaacggtaacagcggatttggacaagcagtatcctacaaagccatgcaaatcgcaattaaaaaagcaaaagaaatgggtattgcatgtgttggtgtccacaatactaaccactttggagttactggattttacagtgacttggctttaagagaaaactgtattggacttgtaatcgcaaacactgatccggctattgctcctataggaggtaaagtaccattaataggaactaaccctattgctttaggtattccatctgacagttacattactgtagatatggcaacatcagttactgcacgtggaaaaatacttgaatccaaaagaaaaggattggatttgccagatggatgggcattagatgcaaatggaaatccaactaatgaccccgaagaagcattgaaaggatcaattttaccattcggtggatttaaaggatatgcattatccttattgattgaaatattaaccggaccattagtacaggcaggatatggtcatgaagtaactggtaccgcatcacctgataaaaattgtacaaaaggagacttatatattgtaatcgatccttccaaatttggtgactttgatgagtttaaagcaaacaccgaagactttatatctcaagtaagatctactggtgaaaatatcccagtgcccggtgatttagaagttaaaagagtcaaagaagccgaaactaatggaatatccattgatgaaaaattatacgaacaattaaaaagaatttgtgacgatttgaatatcgatttagattcttacctagaagaatag

SEQ ID NO: 7928 - DNA, 2370 bp, Methanobrevibacter gottschalkii
  source 1..2370: mol_type = genomic DNA
atgtacaaatgtataagtgcatataaaattaaaattattaatattaaaaatatgactaattttacgaaaaatgattcatttaaggaggaaaataaagttatgaaacttaaagactcttatatcttattaatagcaatggcaatattcctattaatgagtataggatctgtttgtgctagtgaaatatctgcagatgataccataggactagctgatgacggatctgatgtggttatggatgacaaaccaattgaaccgtccaatccaacaacaccacataaagtggatacaatgattgtttctagcgatactgtatcaataaatgaaaaagaaaaaataaaatcaattgatttaactgtaaacgataccaataaatctaaagtcattgctggaattacagttaaaaatttaacagttaaagaaggaacaaaaacaataaaatttgattataataattcgaaagtcattattaaagacgcattagttcttggtaaacatgatttacttgttagctatttaggtaatgaaaattacactaattcttcaaaaaacattgttttaacaatttttggaaattatacaatccaagcaccaacttcagttgatgtaaacagtaccaaaattgttgaagtgcctatcaatgttacaaatggtatcgatccaaaagaacttgtaaaagatgattttaatgttacattaacatataaagatggaaatatcactaaagcaattaatataactgattttagaattataaataatacaataatattcaattatccattatcaaggaatattactacctcaacaataacccttgtttatactgctaatgaaactgttaaatcaaaaaatgttacaataaacagaatttacaatgttaaaattgaagggattaatactaaaaatcaatacaaaaatggtaattttacatttagattaaccgatattgataatgcaactgaaaatttaactggttttaaattaaacttacttattggtaaaaatgttataaaccagattacaggaactgctgacaaaaatggtattgtaaactttaaaacaagcaagatattcggatatgatttcaataacaatacaattgtaattaaatacttaaatgttggcaataacactgttgaattgaaaagtggcgacaatgtgaaattaacaacaaataaagttaatttaactattgaaaaagcaaaaatcaacattactattgataaatacaacgaacaatatggaagtaacaaaaatttaaccattactgttataaatgcagataatggggaacctgtgccaggaatcattctacatttaaacatgcctcaaaccgccggcaaaaactattacattcagactgacacaaatggaataggcataatatctgttaaaggattaattcctggaaagtacaatttaactgtaagcaacaatgacactgtaaatattataaataataaggcaagcagtaaaattattattacaccaaaaccagttacaataaagattacatctggtttaactattaattataacactggaaatactgcagccatcaaagttactgataaaaaaggtaaaggagtgtctggagcatatgttcttgtccaattatatactggttcaaaatcagcaaattatcttttccaaactgacaaatatggaaatattaaatttaaagcaccgctttcagttgggaaacataaaattgttgtgagtggtgcagtaggatacagttcaagcaaagttaccaaatatattaaagttaaaaaagctactgcaaaaatcagtgcgccaaaagtaaccgcatactacaaacaaggaaaatactttacaataaagttaattaacactaaaaaaagcaatgcaccgatttatgctgcaaaagttgacatccgagtatacatttcaaattacaaatactacaaatttaatggaaaaaccggagtggacggtaaattaaaattatcaattgatttaaaaccgaaaacttataaagttgaagttagaggtgcagattccaaaaattatgctgcttcaaaagtagtatccaaaatagtagttgttaaagctccaactaaattatatcctgcaaaattaactgctaaaaaaggaacaaataaatactttaaagttactgtaaaaaacacaaaaaccaaaaaagttattcctggcgttaaagtaaagatcaaagtttatactggtaaaaaattcaaaacttatactgtaaaaactaattcaaaaggaattgcacaatttaatgtaaaatcattgagtgttggaaaacataaagctattgtaagttctgcaaacaaatattgcattgctaaatcagctaaaaactacataaaaataactaaataa

SEQ ID NO: 7929 - DNA, 1797 bp, Methanobrevibacter gottschalkii
  source 1..1797: mol_type = genomic DNA
atgcagagaaatgttgttattttagatattgattatgtcacctatgaaaataagccagttattaggttattttcaaaagatggtgataaaaacattatattacttgatgatacctttgaaccatatttatatgttatggctgatgatttagataagtgcattgatgaaattcaaaataattttgatgttgtttgcattgaaaaagtaaataaaaaagacttccaaattgaaaaggaatttttaaaagttacatttaatcatcctcaagaacttgcaaaaaacagggatgctttaagagatttggaaagtgtggtccagattagagaattcgatattccattttatagaagatatttaatggatcgggatgttattcccatgactgaagtagttgcaattggtgataaaattgattcatttcttgatttagattcaaataaacaggacattgaaattattaaacttacagatgaattaaaacgttcccccgattatccgcgagagtttcgtattttgagctttgacttggaagttagaaatcctcatggaatgccaaactctgaaattgatgaaatcataatgattggtgtttcaagtaactttgggattaatcaagttatttcaactaaaacaaattctgattgccgtgatgattttgtaaatcaaatgaactctgaaaaagaaatgattgaagaatttgtcaaaatcattaaagaaaataatattgatattattgtgggatataattcagacaactttgatttcccatatcttaaagacagggctaaaatattgggaattgatttagatattggaatggacggatcagatattagatttattagaagaggatatgctaatgcggcatcttttaaaggtttaattcatgttgatttatatttggtcatgagaagatacatgactcttgagagatatactcttgaaagagtttattatgaattatttggtgaggaaaaaattgatgttccgggggataggatttgggagttctgggataatggaggtgaagaattagataatctgtttgattattctcttgatgatgttgtatcaacattaaaaattgccgaacaaaccttgccccttaatttagagctcactcgtattattggtcagcctttgtttgatgtttctcgtatggcaacgggtcaacaagcagaatggttcttagtaaaacaagcttattttgataatgaggtagttccaaataaacagggagctaattttgcaaatagggcggcggctgaagataatgaagggggttatgtaagggaacctgagaaagggttacatgaaaatcttgttcaatttgattttagaagcctatatccaagtattattatctcaaagaacatatctccagatgtaatgtatttgggggatgtggataatgaagaagattataatatatctcctgagcatggtctcaaatttaaaaaagaaccacaaggttttattccttcagtcattgataaaatattgcaggaacgttttagaatcaaacgtgaaatgaaagcatctgatgatgataccgagaaaaaagcattaaatgtacaacaacaagctattaaaagattagcaaatactatgtatggtatttatggttttccaagatttaggtggtattcattcgagtgtgcaaaagccattacttcttggggaagacaatacattaaatcatcaataaaaaaagctgaagaatatggtttttatgcaatatatgctgatactgatggtttttatgctaaatataaaaaaaaggataagagaaattaa

SEQ ID NO: 7930 - DNA, 1023 bp, Methanobrevibacter gottschalkii
  source 1..1023: mol_type = genomic DNA
atgggaattgaaattgagaaatatttaaattttccagttcttttaatttgttttttattaataacctcattaatattcatatttcctgctttaaaaatgattgttttgggagctattttggcttatttagttagaccagtagcttttaagattcaatcaaaattaaaattttcttctgtttctatattgattgcaatggttattgttttgattccattaattgctcttgtagggtatatttcatatgaactttcttcagttgcatcaactatgcttgcatctagttctactgcagatattaatgaatctattttaaaattaataacctatttgcatattgatgttaatccaaatgagatttctcaatctattatttcttcatttgaaacaattgcaagctatgttatgaattatggtgtaagttttttaggtaaatttgctaatcttactttggatttatttattttggtttgttcggtattttattttgttagggatggagataattgtttaaattttattaaaagttttgttccagagggttctgttgaattttttgataaaactgttgataatataaaagatgtgttgaaaagcatattttatggtcactttttaactgcagtaataattggaatcttcggatgcattggctattctattttgggttatccatttggaatatttctaggtgttttaactggtattttacaattaattccaatattcggaccatggccaatctattggactttgtttttcattgatgcgttaagtggaaattatccaagggcaataatggtcttattattcggttttttcttaagtactattgatatgtatataagaccagctctttcaagccattatgcagatattcatcctttaattttacttgtagggttcttagcaggacctttagtatatgggattgttggttttattgtgggacctttaattttaggaataacatatacagttttggatagttatagaaaagaatatcttatgagggtggaataa

SEQ ID NO: 7931 - DNA, 801 bp, Methanobrevibacter gottschalkii
  source 1..801: mol_type = genomic DNA
atgattaatgaaccaaaaattgttgaaataactgatattattgatgaaactcctacaattaaaactttcaaatttgattggaatatgaaatcattaggaaaaccgaatcctggggaatttgtaatgatttggaactttaaaaatgaaaaaccaatgtctattgctcagattaatgataatgaattggcaattactgttaaaaatattggtgaatttacctctcaattacatgatttaaaaattgggaatcaaattggtgttagaggtagttatggtaatggatttaataattcatttgaaggcaaaaaaatcttagcaattggtggaggagttggaatggctcctattaatgcaattgtttctgacttaatcaaaaaaggaaataaaattgatgttgttgcagcagcagtcactaaaaatgaattattatatgctacttcacttgaagaattgggtgctaatgttcatcattgtactgatgatggcagtttcggatttaaaggttttgcaacagattgtactcgtaatttacttcaagattcaacttatgattatgcatttgtttgcggacctgaaataatgatgaaaggaatatttgatattcttgaagaagcaggaatatctgcacaatattctcttgaaagatacatgaaatgtgcaatcggcatatgcggtcaatgttgtgtggatagtgaaggttggagaatatgtgttgaggggcccgtttttgaaaatgataagataaataaaatcactgaatttggaaaatacagaagagatgcatctggtgttaaatattaa

SEQ ID NO: 7932 - DNA, 912 bp, Methanobrevibacter gottschalkii
  source 1..912: mol_type = genomic DNA
atgttaaaaactaatatttgtggagttgaatttagaaatcctttgatgttggctgcaggaatcatgggaagtaatgcctcatcaatgaactggattttaaaatcaggtgctggtggggttgtttcaaaatcattttctttaaattctcatccgggatatgttaatccaacaactgttgcagttgaagggggcattattaatgcaatcggactttcaaatccgggggttgctaattttaaagaggaattggaaaaaattgaaaggaaaaatagtgttgttattgcttcaatttatggggcaacacctgatgaattttcatcattggtttgtgaggttcaagaattagttgacatgattgaattgaatatttcttgtcctcatgcaatggatggttatggtgcttctattggacaggattgtaatttaagtcatacaattgtttcagcagcaaaagatgcttctgatgtgccgattattgctaagttaacacctaatgtaactgatattactgaaattgcaaaaacctgtgaagatgcaggtgctgactgtttatctttaatcaatacattaggtccgggaatgaagatcaatattgatgttgctcgtccagttttatctaataaatttggaggtatgagtggtcgttcaattaagccaatagctattagtaatgtttattccgtttatgaatcagttgatattccgttaattggtgttggcggaatttataattgggaagatgttgtggaatttatttatgcgggtgcaagagcagttcaaataggtactgctataatggatgaaggtgttgaagtatttgaccatattaatgaaggtttggaaagattcatgactgaaaaaggattttcatctattgatgatatggttggacttgcacatagggagttgtaa

SEQ ID NO: 7933 - DNA, 615 bp, Methanobrevibacter gottschalkii
  source 1..615: mol_type = genomic DNA
atggtatacgaagatttaatttatttaaagataatagaattagtatattgttgttgtctttttggatttgagattatgtcagatggaagttataaagatttaaaatatgaattggaacttaaaaatgccgaaattgatgagctcaatattgagttggaaaataaaaaagaagaaattaataaactgaggttatatgcaactaaattaaaatatgaaaagaaaaatttggaggataaacttgatacaaagatagattatgataaagccacaatgagtgaattggatgatttatctgataaaattaaagaaaaagaagtaatcattgaggataaacaggatcaagttaggtatctcagatctttaattgatgattataaaattcaagtaagtaacaatactgaaaatcttgaaattcaacttagaaagatatctaaaacatatggtgagttattaaaacaaaaggattccattatcgaaaaacaagatgaacaaatttcaaatttacttaaatccaaagaagaaataattaaatctaataaaaccaatataattggtttaaaattacaaaatgaaaaatatcaagaaataattgataaattaacaaaaactaattaa

SEQ ID NO: 7934 - DNA, 1152 bp, Methanobrevibacter gottschalkii
  source 1..1152: mol_type = genomic DNA
atggaatgttatataacttactcagttaaaggatttttagcatttaatagtgaaaatgaattaatatccgaaaaattatttccagaagataaaataattgacagattagctgaaattgatgacaaaaaaatagttgaagaagaattagaaataattgaagaagtttcaagtgattatgatgaaattatcattgagtcaaacaaaagacgttctgattatgataatgaaaaaataattgtaaaaacaccaaatcaaggtggggaatatttaagaaacaattatgaaaaatttaaattagattcagaggaaataacttcaatttatagaaatttagcaatttataaaatcaaaaaagaatcagcttcagaagataaacatctaatccaagctattaattccattgatgaaattgatgaaagcatttctaaactaattgaaagaattagagaatggtatgctctttatttcccagaaatggatgtcattcataataatgagacatacataaaattaatatcacaaaataagacaaaagaaaagattattgaagcaaagcctgatgcgtttccaaatgatattattgaccttgaagaggatataaatcctttagatttagaaattatgaataattatgctaattctatttatgaactccaaaaatcaagaaaaaatattgaagattatattgataaaaaaatggaatcaattgcacctaatttaaaacttttagttggatcatcccttggtgcaaagctaatttcacatgccggaggcattaaaagacttgcagtttatccatcaagtactgttcaaataatgggtgctgaaaaagcattatttagacatttgaaaagtggagacagacctcccaaatatggattaatttatcaacacccacaagtaagaggtgcaaaatggtggaatcgtgggaaaattgcaagaatgcttgctggaatgatctcattagctgttagaagagacgtgtttacgaaaacttttgatgaaaatgttgctgatgaattaacatcaaaaattgaagaaatagaaaaaaataacccatttccaacaaaaacaacaaaaagaagaaatgaagaacgctccaaatctaaaaaaagtaagaaaaaagggaagaaaaggaaaaaaaggagataa

SEQ ID NO: 7935 - DNA, 642 bp, Methanobrevibacter gottschalkii
  source 1..642: mol_type = genomic DNA
atgaatgtatattttaaagatggaaatgtagcaactaagaatttaaatcctggaacttcagtttatggggaagaattaattcaagaagatgttgaatatagaatatggaatcctagacgttcaaaattatcagcagcactattaaatggactggagaatttaaagcttgaagatacttcaaaagtattatatctgggtgcttcaactggaacaacagtttcacacatttcagatgtcttaattaacggaagaatatatgccgttgaattttcaccaacaacagctaaaaaattagttcaactttcacgtaagagatttaatattgctccgattttaggagatgcaacaaaacctaaagaataccttaacattgtcgaaaaggtagacttagtatactgtgatgttgctcaaccaacacaaagtgaattgtttatgaaaaatatcaacatgttcgcaaaagataatgcacagggacttataacaattaaagctagaagtattgatgtagtacaaaaaccaaaaaagattttcaaggaacaagagaagaaattgaaagaaaaaggttttaaaattattgaaaaagtgaaactggaaccttacgaaaaagaccatattgcattattagtagagaaaaatttttaa

SEQ ID NO: 7936 - DNA, 549 bp, Methanobrevibacter gottschalkii
  source 1..549: mol_type = genomic DNA
atgaaaaataatgttttaaaaagaagtctaataatcatttcatttatatttttaattatttgcgcattttcatgtgttaatgctcaggaagataactcagatatcactatgatgactttatctaaaggaggtattgttattcattacccttctaattggggttattctcagtccgattctaattattcaataatgtcaatatctaaactggattcagttgattccgctggtgtaggtcaagttaatattaattttgagaaaaaagctattgaaggagatttttatacttatttgaataacacctataggtcaatgcaaagagattcttctttcaatttaacctcttcaggtgaagtcatggtaagtaatattcatgcatatgaatatatgtattcttctaatcaaaatggcactgtaaaagagcacaaggctgtttggtttgaaaaaggtggacaggcttatgttatgttgtatagcgcaccggtaaatgattttgaagataacttatatgtatttgattatatactatctgatattcaaattacataa

SEQ ID NO: 7937 - DNA, 726 bp, Methanobrevibacter gottschalkii
  source 1..726: mol_type = genomic DNA
atgccaaatgatagagataaacttctaaaaattatggatagtttggaagttgattaccgttctggaaagatttctccagagaaatatagttattttcgttctaaatatgaagataaattaaattctattgatgcaaaagaagctactcaaagaattagatctatgcagggtaaatcaaatcaaactacttcaattaaaagaagtagaaaacctaccaaaaataaaaaagaaaaagaacaggatttagttcaaaaatatattatcaaccctaaaaagggtgatgctaagtataacaaaaaagaaaaaaaatcaatgagtagtggaacatttaaattagtgttgttattggtgttggttgtagctttcactgttggtgtaggttatggtgtctttaatttagatttcaacaatatttctgaaacatctaccgtagctatggttcatgatactgcattccctgatattactgaagatattaaaaatactacaaaaactacttcttcatctaatactaattattcatctactagttataatgtaaaaactactgaagattcttcaagtgattctgattactctgatgggggtagaaattctggttcaagtgattctacttattcaggtagtgattcgggttccggatcttcaggtagtgattctggatcaggtagtgggtcatcaagtaatagtggtggttccgaatctaatggaagaagtgatgaataa

SEQ ID NO: 7938 - DNA, 801 bp, Methanobrevibacter gottschalkii
  source 1..801: mol_type = genomic DNA
atgcaaattaagaatttgatgtctgaaaatttaatcacaatagacaaagatcaaaatctttctgatgcattaaaattattacgcaaacacaatatctctcgtttgcctgtaacaaataataaagaacttgttggtattgtttctgaaagggatatcgctaacaagcttggatcttcaaaatctgaaggcatgcctgcatcaaggtttcatatttcatctgtaatggttaaagatgtaatcacagttttagaaaccatgcaattaggtgatgtagcggaattaatgttggagaatggtattggatcagtccctgtcgtatctggtgagggtatgataggaattgtttctaaagcagattttgtaactcttgctgttggaattgcatttgataagataactgtaaaagaaataatgactggtgatgtagttgcagtttccccaactgataggctaattcatgcaagaagattaatgattgatgcccatattggaagggtgcctgttattgaagaagatgaacttaaaggaataatcacatctaaagatttgatgagggcattcattgactttagaaaaaatgttcctgaaaaacatcaaaaatctcaaattaaagaagttcttgttgaagatatcatgtcttcaaatccatcttctgtatctaaaaaaatgtcaatcagtgatgtttctaaaatcatgattgaaacaggattcaatggtttgcctgttgttgaagacggtaaggtcattggtattataacacaaacagatatattaagattaattgcaaaattagaatcttaa

SEQ ID NO: 7939 - DNA, 936 bp, Methanobrevibacter gottschalkii
  source 1..936: mol_type = genomic DNA
atgaaagataaaacatccattaatagaaaatcaaatactggtgcagttgaacatgtgactaaagttcacgatagggaaggggacataatggctcttgcaactaaagaagttatttctattcctccaactaaatctattaaagatactgctaaagtaatgatggaacatgaatttagaagattaccaattaccgatcctggttctggtaaattgttaggtattgtaacagtaatggatatattagatttctttggtggaggaaaaaaattcaacattattgagaaaaaatatgaagataactttttagcagcaattaatgaacctgttaaagaaattatgactcgtgatttaattacattatctacaaaagtttcaattggtgatactctcaaaacaatgctggacaatcaattaggggctattcctcttgttgatgcggatggaaaacttgcaggaattgtaactgaaagagatattgcattatctttagcaggcatggcaggtaaagaaactgtgcatgaatatatgagtcctaaagtattcaccactacccctggaacaccattagaaagtgcatgtaaaataatggttaggaatggattaagaagaattccaattgttggtggagaagcagacatttctaaagcaaataaaaaattattaggtattttaacatcaactgatgttattaggttcttaaatgcaaaagagttgttcgataatttaaattcaaatttagcttctgatgttttaaaaattactgtatcagaaattatggttaaagacccaattacagtagaacaaacaatgactattggtgaattatgccaattattcgctgaaaaaaatataggtggcgtaccaattattaaagatgatgaaatagttggtattattactgaaagagatgttttaaactcagttagaagagcataa

SEQ ID NO: 7940 - DNA, 699 bp, Methanobrevibacter gottschalkii
  source 1..699: mol_type = genomic DNA
atgaaagctccagttattgaaatcttttcaagttttcaaggcgaaggtcttttaattggtgaaaggcaaatttttgtcagattcgctggatgtaatcttaattgtaagtactgtgatactgaagatagcaaatctgaaaaatcaggaaaattaatgacggttgatgaagtctgcagagaaattaataaaattttaactcctgattgtaacactatttcattcacaggtggtgaaccgagtttatatcctgagtttatttcagaggttagcaaaaattttaatttaaatataatgcttgaaactaatggtacattaccagataatattaataaaattgaacaattagatgttgtttctttagatattaagttgcctgaacattttaatggcaattttaatgaggatattttattaaatgagattaaatcagtaaatttattaagggagaagtccataagtgtatattgtaaagtggtcatattgccttcaacaaaaatagaatcatttaaagaggtaattgaaaaattatcaaaaaatatttcaaacaaaagtaaccttaaaataattatccagccttctagtcctttgaaagattggaaagatattaattttagattatttgaatattctgaagttgttggacaatattttgatgtttccaccattcctcaaatccataaaattttggatattgaatga

SEQ ID NO: 7941 - DNA, 516 bp, Methanobrevibacter gottschalkii
  source 1..516: mol_type = genomic DNA
atgaaaattttagttaatggaattcaatcaaatttaaggttctcatctgctcatgtaattcctggccatgaatcttgcggatttattcatggtcattcttactttgtagatgttgaaattgaaggtgaaagaacaggaaaattcgaatttgttgttgattttaaagatgtaaaaggatttacaaaagaattttgcaatgaacttgatcacagattattgattcctgttttcaatgaattaattgaattcaaagattttgataaaaaaactgattcaattgatggattaaaggaaaataaaacaattcaatttaaaattgacggtaaaggatattcaattccttctgtggattgtgtattgttgcctcttccgtatacttctgctgaagaattgtcaaaatattttgctgaaggtttggcagaaaaattatctgagtcttatgataacttaaaatatgttgcagtttgtgttaatgaaggtattggtcaaggtgcagaatataggaaagagttataa

SEQ ID NO: 7942 - DNA, 597 bp, Methanobrevibacter gottschalkii
  source 1..597: mol_type = genomic DNA
atgtctattattcataaacatattgatgaaatatttgaatatgatggaagccaaatcaatccatcttgggcttttcaggaatttggagtttatggttcttcgattataacttggattggtccggttaatatcactcccgataacttaaaagattttgctgatgttggacttgagataaaatctaactatatggttaattttatttgtgaattctttgatcaacaacctccaaatatgaggattgcttatttaagacaaagacttattgtaatgatttttagagaaatccttactgagtatggaattaaaactaaaagggaaggtgatgatatttttgtggatgatgggaaattatctatttcaatagctagtatttcattaagctctgcaaaaatacactttgcacttaacttggaagataagggaactccggatgatgttgaaacaattgggttatttgatattaaagatgaaaatggaactcaaatatttaataaagataatttgtcagatttaatcaatgaaactgcatccagattcattgatgagttacaaacaattgaaaatgatataagtaaaacaaaggtgttaggatga

SEQ ID NO: 7943 - DNA, 1074 bp, Methanobrevibacter gottschalkii
  source 1..1074: mol_type = genomic DNA
atggaacaagtaagaacaagagactttatttacacaagtgacgatttatattttgcatcaacaaattatatacatccagaagacagagtgatttcatttttaagatacattccagatccagaaggagatagggaaaaagatggtaaaaaatacagaaaagtgggatctgcagaagcttatgaatacttaagagaaaatcatcctgattatttatatttctgtgatgttacaaatgttgaaatgatgggagttccattagataaagttaaaagaataataaaacctgaaaaaagacttttaggtcttaaagatacttttgacaatggaggggaagttaaaaatccagaacttattgcaaaattaatggatgttgctgactttttccatttcatggcaaatattccttatgatcacttaggaatctcaggttccattttaccgggacttcaaaaaagtgatgtttctgatttggattttgtcgtatatggtcttgacaaccatagaagggcaatttctgcttttaaaaaacatagaggaaaagaagtatatatcaaagaagttgacaaacacatcacggttgaaggcattacaaatgattattgggattttgtatacaataaaagaatgagtgatgaaagtttaactaaagaagaattcagatggtatgaaaatagaaaagcaaataggggaacaataaatggaactttatttgatattctagctactagagactatgatgaaattgaaggaacttggggagacactgtttatgaacctcaaggcattgctcaaattgaatgtgatatcgtaagttctcttggtgcattcgataacccttcatcttacactattgaaaatttaaaaatattggagggtgttgaagcacctatcaaagaaattgtttcatttacacacacttatgcaggtgaagtaattgatggagaacatataatagcaaaaggaaaagtagaaaaggtaactatccaaggaaaagaagattattacagaatagttgttggaaccacacgtgaatcaattgatgaatatttaaagcttaaagaaagtcctgcttaa

SEQ ID NO: 7944 - DNA, 1479 bp, Methanobrevibacter gottschalkii
  source 1..1479: mol_type = genomic DNA
atgagtgagaaaagaatagaatggaatagtaattttgcattcatgatggctatgatcggttcagctgtcggacttggaaatatttggcgtttcccaaatgttttatattccaacggtggaggatctttcatgatcccttacatcgtttcattattcttattaggaatatcatttgttctagtagaatatgcagttggatttagatttaaaaaatcaattggaagaatactattctcaattagtaaaaaattagaaccaatagcatggtttattgtattaatcgtatttttaatcacaacatactatgtttgtgttgttggatgggatttaatttatgttgttttaagtttcacaaaagcatggggtgcaaacccagatacattctttgcaagcaacgtattgcaagcaacagattcaatatctggaatattccaaattgtaccaattgtgcttgcatcagtatttgctatttggtttatgatatggtttattgttaaaagagacttgaatgatggaattggaaacgtaagtaaaattttattaccaacactttgtttaatggtagtgataattgttgtattttcattaaccttaccaggagcatcaattggatacacacagatatttacccctgattggaatgcactaactaacttaaatgtatggttagcagcatttggacaaattgtattctcccttagtttaggtatggcaattgcaatgacctatgcaagttacttgccggaaaaatcaaggttaattgacagtgcagtaacagttgcattctcaaattccgctttcgaagtatttaactcaattggaatattctccattttaggattcatggccttatctacaaaaattccatttgatcaactagtaactgaaggaacaggacttgcatttgtagtattcccacaagtattcaacactatgggaccaatgggatcaattattggaccattattcttcatatgcatattatttgcaggaattacatcagctatagctcttcttgaagtagtcacatatgcaatttctgaaaaatttaatattgaacgaaaaagaacagttacagtgatttgtattgtaggatttttaatctcaaccatgtttgcaaccggaattggaagtacaatacttggagcattcgatgcattcttaaacaactttgcattattactcggaatccttattgaatgcataatcttcggttggatttacgactttaacaagttaatagaaacattaaacaaagattcaagaatcaaagtaggtaaaacttggaaagcagtaattaaatacattttaccaatttgtattgctgttttatggatacaaggagtttactccacaattacaagctcagataatttaagtttaacaattatgggaatactaactgtaatattaattgtattgccaatcgttttcgccaaattacctgcaaaaaatgaagattactacaaagtagactaa

SEQ ID NO: 7945 - DNA, 744 bp, Methanobrevibacter gottschalkii
  source 1..744: mol_type = genomic DNA
atgggaaaactagatggtaaagtagcaattgttaccggttcaacctcaggtatgggtcgtgattccgcaaaactctttgctgaagaaggtgcaaaagttgttgtaactggaagaaacgaagaaagagctaaagctgttgttgatgatattaaatcagagggaaatgaagcaatttatgttattgctgacatggccaatgttgatgatatcaaaaaagttttcgatactactatggaagaatatggtactgttgatattttattcaacaatgcaggtttattaagtgtcactcctcttttagaaatgactaaagaagaatgggataaagtatttgatgtagatgtttatgctgcattatatttaactcaattagtagctcctgtaatgaaagaaaaaggaaaaggtactattattaacacttgttcagtcgcatcttatgctgctcactttggttttgtgggttacattagctctaaacatgctattgcaggtcttacaaaatcaatggcatttgaacttggtccagaaataagatgtaatggtatcgcaccgggtgctatccacactgcaatggttgatagtattggtggagttgaagcattacaaatgatggttgacggtgcaccaatgaaacgcgtaggtcaaggagaagatattgcagcacttgcattgttccttgcttctgatgagtctgaatttgttgatggtcaaatcatcagatgtgatggtggatttgagtgttaa

SEQ ID NO: 7946 - DNA, 795 bp, Methanobrevibacter gottschalkii
  source 1..795: mol_type = genomic DNA
atgataaatttatcttcaataaaaatgcacatgtattgtccaatgagtttatatctaaaaacacatgttgatattgatgaaaatgacatgtacaattgttatttggaaattaaaaacttaaaaatagatattcaagatttaatgcaaaaaaatattcgtaaaatcaaaagaacaatgagtttagaagaaattgaaaaaatattatctcaaaatatttatgaatacatagaaaacacaactaaatcaatgaaatcttcaaatattgaaatcacttcagaacagattagcgagataaatgatgaaacatacttcaacataaaaatattaagcattaaatcaaaaaaagcaatgacaatattaaataaagatggatttggcattacagaaatgtttttcccaaattgcctttattcatatttaattaaagatacacaacttgaattaatcggaatatgtgataaaatagagataattgacggtcgatattatccaataagcattaaaagctcaaatccaccaataaaaggagtttgggatcaggatgcaatagaacttgttgctaatgcaatacttcttgaagaagaatttgatacagaaatatttgtaggatttgtcgattataaaaaaattggtgacagacgacctgtaataatggatgtgaatcttagaaaatcattatttagtgtgataagggaagttaaagaaataattgagaataaaaaacttccaaacattaaaagaaattctaaaaaatgtagaaactgtgaatatgaaaatatttgtatgaaaaaataa

SEQ ID NO: 7947 - DNA, 660 bp, Methanobrevibacter gottschalkii
  source 1..660: mol_type = genomic DNA
atgaatgattatacattaacgattaaatctgatgagaaaaaaggtgtattatatgatattactgatgttatcactgcatatggtgctaatattagttatgttcatctttttgttgaaaaaaataacatgggttccattaatcttgaacttgaacatgttgaaaatattgaagatttaataaaggatttagaaaaaatcaaagaaattaaatccgttgaattgcatggttctcagttagatatttatggtaaacgtataattattattggtggtggtgcacaagtatctcaagtagctatgggtgcaatcacggaggcagataggcataatatacgtggtgaacgtattagtattgatactattccattagttggtgaaaaatcattagctgaagctattgaggctatttcaagacttcctcgtgttagtgctttagttttagcaggttcgcttatgggtggtgaaattactcgtgcggttaaaaaagttaaagaagagagtaatttaattgtaatttcacttaatatgcctggtagtgttactgattatgctgatttaattatcactgatccaattcaggctggtgttttggcggtaatgtctattgcagatactgcagtatttaatattaaacgtttagatggcaatattcgtttttaa

SEQ ID NO: 7948 - DNA, 264 bp, Methanobrevibacter gottschalkii
  source 1..264: mol_type = genomic DNA
atgaaatttgttatgaggccgtatcacataataagtcttggaggatacattgttgaatgggatttcccttatagaaatcttattgttgttaataaaacctctgaaccaattaaaattgaaattcctgtttttaatgaagaatggattcaagaacatagggatttaggactggatatcattccagttaataaatatgataattatttgagtatgtggaaaaaagcacatgctgaattagataagataaggccaaaaaatgaatga

SEQ ID NO: 7949 - DNA, 999 bp, Methanobrevibacter gottschalkii
  source 1..999: mol_type = genomic DNA
atgtattcaaatatacttacaaactcaatagttgcagtaattcttacagttattgtttgttttgtaatttcgacattgcttccaggcattgaaagaaaatatgttcatgcaagaatccaacaaagagtgggaccattggtatttgctccgggtattatggctccattaaaattcttatttaaggaaaatgttgaagtttcatctcctgttccaaagttatataaaatcttgccgattttatgtttcattgtgattttatgtgtattcattgcattaactcctcaagcttacaaaattccagcactttcaagtttagtggccattgttggttttttaaaagtagaagaaatatgctatgttttaatgggagcattatctaaatctgtaatgtcagttagaatgccgtttccggatcgtataaaaggagcagcacatattaaagctccattgtcatttattgaagatataagtgcaaaaagatctttaagaatgattacttatggatcgttcccattgtatttagcattgtttgctccggtaactgctgctagaagtattttcttaaaggatatagttgcatttcaacaagttcatgggccatttttatttactgtagctggtggaatcgcagctattgtattttttataggatatatgataattttgaatgaatatccattttcaattattaaagctaaatcggatgttattgaaggaccatatatggaatatgctgctaaatacaggtctattgtctttataacaagaggatttttcatgtttgtattgggttctgtattttccgtattgttcattggagttccaccaagtatattttcattaggaattcttgttaatattgctgttgctttaatatttgtatttatgatgggtattttctcagcatttgcaccagtatttacaaacaaacagttattgccaacaattttgggaacaactctgcttggtatattggctattgcacttgggttattatag

SEQ ID NO: 7950 - DNA, 1131 bp, Methanobrevibacter gottschalkii
  source 1..1131: mol_type = genomic DNA
atggatgaaaaattaccaacaaataatataattgaaacagaaattccaatgggtacagttcaccctgctgcattggaaccatataaagtaaggttttttgttgaagatgagataattcaagaagccgaaattacaattggtgttaatcataggggaatagaaagaattatggaaggccttcctgttcagaaggcaaattcactcactgaaaaaatttgtggaatttgttctaattcacatatatggaattcatgcagaactgcagaaataggtttagacattgaaattccagagagagctacttatattcgtgtaattatgggggaacttgaaagattacattcacactttttgtatttggctcatggttgtgaggtactagctcatgaaacattttcaatgagagtgttttatttaagagaaattgtcatggaattacttgcaatgattggaggaaacagagttcaatatggttgttctgttttaggaggagtaagacctagatgtgaattagatgctaacaaaatacaaaggcttaaagatgatatggataaactagaagggggtctttcagattttgctgatagatttgttgcagatcctattgtgttatcaagaattacgggtgtgggagtattaccacaaaaacaagctattaaattagctgtaaccggaccatctcttagagctacaggcatcgcaagagatttaaggactactatgtttgaatatgataattttgattataatattgtaacacaacaagatggtgatgtaaaatctaatttattaatgagggttttagaatcttttgaatcaattaagattataagacaggctattgcaaatattcctgatggtaaattagttaacaatgattgggatatggttgatactgaggatattgctgaaagttatattgaagttccaagaggaacattgtatcattcttatgcattggaaacaggtagaataagacattgtattatcagaaccccatcaatggcaaacattggtgcaatgcaatatgcctgcattggaaaccatcttacagatggtcaattatgtattgtgcaatgtgacccatgtttcacttgtactgatagggcaattgaagtaattaggagatag

SEQ ID NO: 7951 - DNA, 447 bp, Methanobrevibacter gottschalkii
  source 1..447: mol_type = genomic DNA
atgggaatcaaatcattttcaagagcaagggcaatacatgtcatgttggtttatactggtggatgtaatggatgcgatattgaaattgttaattcaatattatcaccaagatttgatgctgaacaatataatgtgtttttaacttggaatcctcgtgaagctgatgttttagttgtgactgggcctgtcacacatttaaataggaaaccattggaggcaatttatgatgctattcctaatccaaaattagttgtagctgcaggaagttgtgctttaatgggtggtgtttataagaattgccatggagatattccttctgaagaaattgaaggtcctgttgataaaattatacctgttgatgcaaaagttccaggttgtgctgtaaggccacaagatgttttagctggtgttgtgtcacttttacctacattattggatgcggattag

SEQ ID NO: 7952 - DNA, 492 bp, Methanobrevibacter gottschalkii
  source 1..492: mol_type = genomic DNA
atgagaaatttaattaaaatagctttagaaggagcatttactaactttaaaagaatcttttttgcagctgatagagttacagatatggatatgaaaaagcaaattgcaactctttcagtagaagtagatgatagagttgatgaaagtgcatgtattggatgttctggttgtgctaatgtatgtccaactaatgcgattgtaatgaaaccattagcccatccagttaaattgactgagggttgggttaaagatcaagtacctgaaattatccttgaaaaatgtgttgtatgttattattgtcatgatttttgtccaatattttcactttatggacaaaaaggcgctattcatccatcttgtgttggtgatcaggaagtcgatgtttcagaattccttgaacagccatttaaaatatccgatgataaacttaaaattattgcacagtatctgtcagataaaacagtattaaaaaataaagaggatggtgattaa

SEQ ID NO: 7953 - DNA, 1407 bp, Methanobrevibacter gottschalkii
  source 1..1407: mol_type = genomic DNA
atgtttttaacaactagtacatgtgaaggaaaaagagaatgtattaatcagtgtcctacaaaagctattaaatttataaatgggagggcatttagttgccttacttgtggaatatgttataaaaactgtccaaatgatgcaatattccaaaatagctatggggggtatgttgtagacagggctaaatgtaatggctgcggaatgtgtatgtacaattgtcctacaaacaatattactattgaagatggaattgtatatggtatttgttcccgttgtggagtttgtcatgaagtttgttcaaatcgtgttgatgggtatgaacttgaaaaagataaacaattaaatttaattagatcattacaaattctcaatcctccattaaatgacgttccatacaaaaaagaaagcgaaactaaggtagtcacaagaaattacttcggaactgatgtggagaattgtattttatgtggaagatgtcaggagtattgtcctactggagctattcatgttaaaatagattgggatgaaggaatttgtagtggatgcaggttatgtgaagatgtttgtcctaatgattcaatgaataaacatcaaattgttaataaaaaatcttgtactctctgccttaattgtatgaaggcttgtcctcataatgcaatttctgttgaggattcatcaattgttgtcaataaattgaaccaaaaacctaatggttcgattatttcatgtttaaattgcggattatgtgctgatttatgtgaaaatgaatctcataaaaaggttgatggtaaattaaggtatgatccaacattggatatggagaatgtgaatcatgatgtggctattagtcattgtcctgttcacaccttaactgaagatgatgaaatgttcatttatgatgaatttaatgatgaggagttacctatattgtccggattctgtgtatcttgtggaaattgtgttcaggtgtgtaatgaatatggtgcacgtcaatctatgacccagtcatgggatgggaaagtttcagaggattgtatatcttgtggaatttgtgctgaagtatgtcaggaagaagcaatcacacttcacaggggaagtatttctgttgatttggacaagtgtatattatgtgaaaattgtgctgtgcattgtccagttgatgtgattcctaaatctacaatgtataaaaatgaaatcaaagatggattcaatttcattgaacaaaaattatgcatgcattgtggtttatgttataaaacctgttcatatgatgcaattgaaaaaattaatgatgaatttgttgttaatgaagaaaattgtacatactgtggtgcatgtaaaaatgcatgtcctgcaagagcatttttatttgaaagaaattttaaagattcactagagggtatttaa

SEQ ID NO: 7954 - DNA, 252 bp, Methanobrevibacter gottschalkii
  source 1..252: mol_type = genomic DNA
atgatgttaagtttaggaccaatcatattcggaataatattgggtgtaattattggatcccaaatcaaacttaaatgttgcgattcaaattttacttggacatcatttgtaataatcattattgcaggaatcattattgcatggcaatctggcaattatccgttttatacagatttaccaatttcaactgcatttgtatctgcattaataggaatttttgtaggcaaactactatttgcaaggagtaaataa

SEQ ID NO: 7955 - DNA, 477 bp, Methanobrevibacter gottschalkii
  source 1..477: mol_type = genomic DNA
atgagtcaaagtagtattattttaaaattagtttctttaccaatttcaatgatattgatttgtttaggtattatgactattcttggcggtcatattactcctgggggaggtttccaaggtggtgctatgatagcaggcggtgttatattatctgtccttgtgtatggattagataattctccgttggaattctcacatttatacattgaagttcttgaatctatcggggcattaggatttattattttaggattaattggattgtttgtaagtggatttttcttatacaatgtgggtaccgatttattgaatgtggtgccgcctacaattcaaaacgtattacattatcccgatgttactaatgcaggtattattccatacctcaatatatttgttggattaaaagtatttgtaggattatctgcaattgttatcgcatttgcaggatttaaaaaaattacagaggagagtaaatga

SEQ ID NO: 7956 - DNA, 282 bp, Methanobrevibacter gottschalkii
  source 1..282: mol_type = genomic DNA
ttgtctagtcacacaactgttcgtaatttaatcgcatcagtaatggcagcaatattttcagttactttacttgatgctgtatttcatttaagtagcatgattaatgcaggtgtaagtaatatttacaatgttttaggaactaaaatagctccaaatatggtcactgttgttatttttgatttcagagcttatgataccttgggtgaatcaattattttattaactgctggtttagttgttttacttatatttggtagaggattattgggggacaaacaatga

SEQ ID NO: 7957 - DNA, 336 bp, Methanobrevibacter gottschalkii
  source 1..336: mol_type = genomic DNA
atgagcttatatgacaaaatatttgatgttgtgaaacaattcagaaaattgttttcaccggggcctgtaactaatgcagatgtttctggtagtattacggcggaaatatttttaatcgtttcattagttctagcaactatattattgaggcatattagtgttttacttgcaggattagttattttatttgttgctgttgttttaattataaatattccacttattcctaagtttaaaattgaacaagaagattctctagataaaatgttattttatgcaattgtaacacttgcaattataggcgtagtcatgtattggggtggtaatcttgtctag

SEQ ID NO: 7958 - DNA, 1455 bp, Methanobrevibacter gottschalkii
  source 1..1455: mol_type = genomic DNA
atgaatgaattaattccacttatggttattgttccattaatggcagcattaattattagtgccttttcaaaattcaataaagcaactaagatttttgcatttgtcattgcgatttgccttccattaattccattattgtcaaattatggcctccattactttggaggatatgaaccaattttggataatgtgacaaatgttgtgtatcatcctgcaattacatattcattcacattcttccaacagatattcattgcaatgattggtcttttaacatttttagttgtatttgtctatttaactaaatataaagagatttctggaccttatttattcttgttgttcttaggtactgcagcggttactgcaatgattttaactgatgacatatttcacatgtttgtatttttcgaaatcttggcacttgcacaagttggtatagttgcagcatcatcaattgattacagttatgaaatggctttaaagtatatgattttgggatcaattggaagtccgataatgcttttaggaattggattcttacttgcattaacgggtagtgtaaatataactgatattgttactgcagttcataatggtttagttaatgccaaatctccagtatttttattatcactcggattaatcttctttggttggttatacgcatctggtttaccaccattccatactataaaatctggaatttattcaaaagcagaacctcatggagcagctttacttcaatcatttactgttatttccatgatttcaatcgtattgatcatgtacagaatctattctgtattgccaatattcgaagttctcatagtatttttctctatcttagctatggtattgggtgtttcactcgcattaactcaaacagacttcagaagaatgattggatttttagctgttggtgaattaggtttcattggtttaggtattggtcttggaactaattttgcaattactgcaggacttttccaagcattaaatgaaatcataattactgcattattatttattggatttggtgcaatagttgaagcaacaaatgaagttgatacacgtaaacttgggggtcttttagcttaccatccaaaagtaagtatcatgcttttaattggtggtttggcaatggcaggagttccaccattaagtggttttcaatctaaattaatgcttgttcaagcttctttaagttgcggattccctgaattatctatattggccattatggtaagcatagctacatttgtagtgttcgtaaaaacattctatacaatgtttttaaaaccaaaaccagttgaattggatgttgaaaataaagaggttcctcgtgctatggtatttgtaatgggaatattattaattataatcgtgctcttaggtttattcccaaatcttattatacatggaatttctagctttgtaggaggaatattatga

SEQ ID NO: 7959 - DNA, 387 bp, Methanobrevibacter gottschalkii
  source 1..387: mol_type = genomic DNA
atggcacaaactcaacttgcgatattgttgacttcagttgcattggtcattgtcggactttattctgcaatttttattgataatatcataaaaaaaataattggtattagtttcattgaagaaggggctaatttattcattgttgctattggttataaagcaggtggtgttgtacctattataatgccgggtatggacacatcatggtttgcttcaaatgcggcatatccattaccttttggtttagtacttactagtattgtaattggtgcaagtacattagctgtaatgcttgctttagtaatggttctttacaaaaggtatggtactttaagcactagtgtaatgttagcagatacatcaaaacaggaggaatatgatgaatga

SEQ ID NO: 7960 - DNA, 234 bp, Methanobrevibacter gottschalkii
  source 1..234: mol_type = genomic DNA
atgattgaattcatattatgtttaataacagttttaagtgctattcttgctctcatccaaaaagatttattaaaagcagcaattttaacaggattttcaggaggagctcttgcagttcttttccaaatattattggcacctgatgttgctttaactcaagctattgtgggtgctgcaattgtaccggtatttattgctttagctgttaagaaaactcagagggtggataactaa

SEQ ID NO: 7961 - DNA, 423 bp, Methanobrevibacter gottschalkii
  source 1..423: mol_type = genomic DNA
atgatggagtatattcaatcagctcttctcatcatatctgctattttaaccataatttctgcaataggccttattagtttggataagaatacaaaggatgttgtttatgcaagaattcatattgtaggtgttttcgatattgcttgtgttattgcaatgattgcaataggtcagtatttacttgctggaatttactttattctagcaccttttatagcacatgcaatcgctaatgcttattggaaaaaagaagatagagagaataatttagatttacaaaatattggagaagatgtaggtgaagatcatccatttttacatcctaaagaaaaaattcaagctttagaatgtgaggattcagaaaaatttaaggtggacgaaaggttttcagtaactacattggaaattgaagaggatgagtaa

SEQ ID NO: 7962 - DNA, 267 bp, Methanobrevibacter gottschalkii
  source 1..267: mol_type = genomic DNA
atggatatattatttgtttcaaattatattgtggttattgcattgatgataatgatgttggctgcattaagggcaagtgcatatgaatccacatctatggggcttttaggaagttcaattgtggtaaacgcatttgcagttgcattattaatcatcggtggattatacaaccttgaattctttagagatatatcattagctttaatattctttggttttgtgggcactgttgctttcgctgtagttttaggaggtgatgatgaatga

SEQ ID NO: 7963 - DNA, 315 bp, Methanobrevibacter gottschalkii
  source 1..315: mol_type = genomic DNA
atgtttttgactagaattggttatggaattatttatttcttggaccttatttatgaaatccttaaatcaacatttgatgttgcatttaatggaattatgagaagaaatattaatcctgttgtctttgacattgaaacggttttggagagacctgtttcacagacaatattggcaaatagtatttctttaactcctggtactttgtctgttgatttagacagtgaaaataacattatcaaagtagctactatttctccacgaaaaaaagaggatgttattccttttgagcagtatataaagaaaatgttagagtaa

SEQ ID NO: 7964 - DNA, 966 bp, Methanobrevibacter gottschalkii
  source 1..966: mol_type = genomic DNA
atgaatttagttgaaaaattagaaccgataataatcttttctgcagtattaattggaattcttgcaagtaatataaatatagctcagcataccaattatttaataaatatattcttatgtttaatgatatacggattattcttagaggttaatcttaatgaattaaaaaatagttttaggaatattaaattcacattaaccagcctaataattaacttcatatggactccattattcggatattggattggttcaatatttctaaatggaaatctagacattttaattggattttttatgttaattataactccatgtactgattggtatttagtatttacaaagcttgcaaaaggagatttgaatttaaatttatcaatactgccattaaacttaattttacaaataatattactcccaatttatctaataatcttcttttcaagtaaaaattcaatagactacacacaaatcatttattcaattttaataataatcataataccatttattacagcacaaattacaaaatttgttttgataacatcattaaaagaaagagcgataaatataatctccgatttagaaatttggtttttatcacttgcagttttttgcatattttcaagtcaaggaaaacaattatttgaaaatctaaacttcttaattacaatattcctgccattaatcatattttttattgtaaattctctggtggacttattaatatctaaaaaaataaacttcacatatcccgaatatgttagtttaacaatgacaacattagcacgaaattcaccattagcgttagctattgcaataatttcattccaaaatcatgaattagtatccattgcacttgtaattgggcctttgatagaattacctattttatatattatctctaaattctgtttatggatcaaaaacaccaaattattttcatttcatgattatactatctaa

SEQ ID NO: 7965 - DNA, 705 bp, Methanobrevibacter gottschalkii
  source 1..705: mol_type = genomic DNA
ttgtcgtcttataaggggcattctatatttgcatttttacttgcgtgcatgttttttcacaatcctctgttaatttctttgacattaataggtgcaaatattccagattttgatcataaattcaaaaaggataatgtatataagatgattatcttggggttaataatttttatatcactttatattcttaaattaccttattatattggtctgattattgtatttttaggtataacattttatttctctgaacatcgtagttttacacattcactttttggagtattgacattaactgctgctgttagtttaatattgatttgggcattacaattaataacaatagttactacattaaataatcattatctgattttagcaatattgatttctttattgagctttttattcttaaataaaaaattattgatggtttttttaccaatatttttcatttctttgtttgtaattaaaacaggagatattgcatatactgaaatagttttaagtttattgttaggcatattttcacatattgttcttgattcatttactccatcgggaattaaactttttgctccattgtcttcaaaaaaagtttataaaaattttggactaacagtaatttttattttggcaattttatctatattttatcatgcatcatctttatttaaattgtttgaaatgtatattaaatattag

SEQ ID NO: 7966 - DNA, 741 bp, Methanobrevibacter gottschalkii
  source 1..741: mol_type = genomic DNA
atgcatttaaaaaagataggtcaatttgaaaatttaaaaatgggttatatctcagatttttccggtggttatatttcaagaaataaagatattttaaatcatttggaattatcgtctcttaatcagtttattttagaaaaatctgtttatggtactccaatttttaaattaggtaatggtggaaagaaaatactggttctatctggaatccatgggaatgaattacctcctcaaattgctaatgtatatttgataaatgaattgttaaataaaaaattaactaatactgtttatttaatcccttttgcagctccaaaatcttccatgaataatgaaagaacttttaatgaacttgatttaaatagagcatctcacattaaaaattcagtaagtaatttaatcatgcaggctattgaacaattaggcattgtcgctgttggtgattttcattcaacttcttttaattcaaatcctggttgcgagtctattttttcatctaaatctccttctcctgaaagttttttaatggcaaattatatttcaaggaatgttggttctgaattgatttcttttgattttgcaggttctatgtataaaggagctattgaagatgtttgtaatttaaatggaattccatctgttacttgtgaagttttatctccatttggcaatgttggtaggggtactgttgagacatcttttaatcaaatgataagttttttatcttattttggaatttaa

SEQ ID NO: 7967 - DNA, 1923 bp, Methanobrevibacter gottschalkii
  source 1..1923: mol_type = genomic DNA
ttgaagaaatatattaagagattaatcagacttgttaactatgaaagagatgctgaaatagacttaatgacacatgaaataagtacaatgtctggtaaaaaacgagaagaattaggaagggcaataaataaagttaaaggaaaaattataggcaaagaattaggtttacaaatcgttcaattcggaagatctgagagaattgaaactgaaatatctgtgggagacatggttttgattagtaccgataatccccttaaaagcgatttaactggaactgttaccgaaaagggagccagatttataaaaattgcatttgataaaaaaatccccaaatgggcgatgaaaaagaaagttcgtatagatttatatgctaatgatgttacttttaaaagaatggaagataatttaagacatttaaatttaaggggaaaagatgcgctagaatatattttaactgaaagagatccaagaaaaaataaacaaattccttatattgattatattgataaatctcttaatgattcacaaaaacaagctattaaaaatgctctgtcttgtgaaaatttctttttaatacacggaccctttggaactggaaaaacaagaactctagttgaattaatatcacaggaaacaagacaaaaacacaaagtattagctacagccgaaagtaatgctgcagtagacaatatcttagaaagattaatgaataataaacaattaaatctaacaagacttggacatccgcaaagagtatcagaacataatattactcaaactttagcatacaaagttgagaaacatgaattaaataaaaaaattaaaaaaattcacagaaaaattgagaaattaatagaaaccagaaatacccatacaagaccaacaccccaattccgtagaggctatggagactatgacatattacataatgcttcaaaaggaaaaggcggtcgtggaattagtcctgaaaaaatgaaatctatggccagttggattgaatgcaatcaagaaattaatgaatcatatgacgatataaagagagtagagaataaaatgattcgcgatattatcgaatgcagcgatgttattctatcaacaaactcatcagctgctcttgattcaatagctaaaactaaatttgatgttgcaattattgatgaatcatctcaagccacaatacctagtatattaatcccaatagctaaagctaagagattcatactcgcaggagaccataaacaactccctccaacaattataagtgctaaatctagagatttagaaaaaacattgtttgaagagttaattaaactttatccatacaaatctcaactattaaatgtccaatatagaatgaacaaagcacttatgaaattcccaaacaaagaattttacaataatggattgaaaagtgatccaagtgttgaggaaataaaaatagatgacctactcgaccataatcatcatgaagaagccttgcttttcatcaatacatcaaatgtatataataataaagaaaaacgtttaaaagattcaaaatcaataataaatccagtagaatccgaaattacaattaatattgttaaaaattacttagaatctggaattgataacgaagatatcgggataattagtccatatgccgaccaggttaaagtaatacaggataatactccagttgaagtaaaaactgttgatggatttcagggaagagaaaaagaaatcattatcatatcaaccgttagaagcaataataatggaaatataggatttttaaaagatttaagacgattaaatgttgcaataacacgagcaaagagaaaattaataatagttggaaacaaagaaactttaaaaaatagtcccacatataaaagacttattgaatttattgaaaatgaaaatttactaattgatttatag

SEQ ID NO: 7968 - DNA, 1179 bp, Methanobrevibacter gottschalkii
  source 1..1179: mol_type = genomic DNA
atgactgaaaaagtagttttagcattcagtggaggattagatacctctgtttgtgttaaattattagaagaaaaatacgatgtggaagtaataactgcatgcgtagatgttggacaaggtgaagaagaaatggaaagagcaaaaaccatggcttctaaaattggtggactaaaacactacaacattgatgcaaaagatgaatttgcaaatgaatacatcgcacgtgcaattaaagcaaatgcagaatatgaaggatatccattaagtactgcacttgcaagaccacttatcgctcaaaaaattatcgatgtagctgaaaaagaaggtgcaactgcaattgcacacggctgtactggaaaaggaaacgatcaattcagatttgaagcagttatccttgcaatgtctgatttagatattattgctccaatcagagaattaaacttaacaagaactgaagaacaagaatatgctgcatctaaaggaattgaattaagctccgataaactttacagtattgatgaaaacatttggggaagatctattgaaggagatattttagaagacccatcaaatgaacctcctgaagaaatctatgcatggaccaaatcttggaaagattcaaatgatgaacctgaaaaagtaacaattgagtttgaagaaggtgttccagtagcaattaatggagaaatgatgcctttaatagaccttattagaaaagcaaatgaaattgctggaaacaatagtgttggaagagtggatactattgaaaacagaatgattggtcttaaaagtagagaaaactatgaagttcccggtgctaaattattaattgcagcccatcaagctttagaagaactagttttaactacagatgaattaaggtttgccgaatatatgtctacactttatgctgacttagtctacagagcattatggcaagaaccattaagagaagatttagatcaagcatttgataaaatgcaagaaagagtaagtggagaagttgtaatgaaactcttcaaaggttccatccaacctttagtaagaaaatcccctttcagcctacatagtattgaacaaattacttttgaagacaaagaaactgaccaaagagaagttgaaggtatgattaaataccatggtcttcaagcagcaaattatcagaaattaaacagatag

SEQ ID NO: 7969 - DNA, 726 bp, Methanobrevibacter gottschalkii
  source 1..726: mol_type = genomic DNA
atgtccaaacttaaccaattacaagaaattattgattcatctgacaatatagtatttttcggaggggcaggcgtttcaacagaaagcggaattccagatttcagatctgaaaacggaatatttgaaagtttaaataaatatggcaaaacacccgaaaatattgtttcacatagctattacatagaccatactgccgaatttttcaaatattataaagacaatcttgtttttaaagatgctaaacctaatcctgcacatattgcactagctaaattagaagaaattggaaaattaaaagctgtagtgacacaaaacatcgatggacttcatcaaaaagcaggaagtaaaactgttttagaacttcatggaagtattcacagaaattattgtcaaatatgcggaaaacaatatgaattaaattccgttttagaaagtgatggaataccaaaatgtgaatgtggaggaactataaaaccggatgttgttttatacgaagaacctctaaacagtgcagttttaaatttttcaatagattacatctcaaatgcagatacattaatcgttggaggtacttctcttgttgtttatcctgcagcaagccttataaattattttaatggaaaaaatcttgttttaattaataaaagtgaaacacaatatgataatcttgcatcacttgtcattaacgatgccatcggtgaaactttttcccagatcaaaatctaa

SEQ ID NO: 7970 - DNA, 717 bp, Methanobrevibacter gottschalkii
  source 1..717: mol_type = genomic DNA
atggattatgttaagggaatttttaaaaatcgtcctaataggttcatagccgaggttgaagttgggggtaatttggaaatagctcatgtgccaaatactggtaggtgtaaggagcttttagttgatgatgctgttgtttggcttaaagttgctgataatccaaaaagaaaaactagattttcacttcattttgtagaaaacaaaaatgtgttagtatcactttactctcaacaagcgaatacaattgtgtatgatgcagttattgagggtaaaataaaagaacttaatggttactctatttatcaaagagaaaaaactattgataattcaagaattgatatatatcttgaaaatgaaaccgaagaatgttatgttgaagtaaaaggagtaacattaattgttgatggggaagctagatttcctgatgcaccaactgagagaggttcaaaacacttaaaagagttaataaaacttaaaaaagaagggaatcgttgtgttgtattctttttaattcaacatcctgttggaaaattttttagaccaaattgggaaaatgatcctaaattttcacaaactctaaatgaagcatatgaaaagggtgttgaaattcttgtttatagatgtgataatcagttagatggtataaatttaattccagaagctttagattttgatctgggaaaaagtttcaccgatggcatcgttaatgacaagtga

SEQ ID NO: 7971 - DNA, 1527 bp, Methanobrevibacter gottschalkii
  source 1..1527: mol_type = genomic DNA
atgatggttacggattataattgtgaatatttaggattgtctagattatgtttgatggaatctgcagggaagtctctagcagaagaagttggtaaaattgcagtatacacatttgcaaagcctataaaagttgttattttcactggttctggtggaaatggtggagatggttttgtagcagcaagatacttactaaataggggttatgatgttgatatttacatgttaaaagataacattcgctctgaagatgcaaaaactaatcttgaaatcttaaagaatatgaagccacgtttgtctcgtttgaatatttttaatttaaaaacattggatgatattaataattgtgaagttgttagtgatgaaactagtgatttcataatagttgattgtcttttgggaactggaattgatgggaatttacaaactaatattaaaagagccattgaagtaattaatgaatctaatgggcttaaaataagtgttgatgttccttccggaatgaatccattaacaggtgtggtggatgatttggcggttattccagattatactattagttttcataaaatcaaaacaggagttaggaatgctgatgaagaagcggttggcggtataataactgcagacattggaattccatttgaagcggaatattttgttaattatggggattttttaagacttaaaaatagggattctgattcacataaaggaaataatggtcgtttacttattgtaggaggatctgctaattattctggtgctcctgcaattgcaggaatggctgcaattggtgcaggcgcagatttggttcatgttgcagcacctgaaaaagctgctgaagctataaaggcgacatctcctgatttaatagttaactctcttgaaggggatgaattatctctggaacatggtgaagagataatcagattatctgaaaatgttgatgcaattttaattggtcctggagcaggaatatctgatagtacttctaaattatttaatctgcttgtagcaaaaattaaaaagccaattgttttggatgctgatgcattaaaacaagttgaactgtctttaattaggaatcgtgaagatattattttaactccacatatttttgagtttaaatcatttttcaaggttaaaaatgatttgaaattagatattgattcatatgattttaaaaaagttgatgagaatatcactgaaatccaatttatcactaaccaaattaaaggaacagtcattgttaaaggaaaatatgatttaattttatctgaaaataattttaaaattaataaaagtggaaattctggaatgactgttggaggtactggtgatgcactctctggtattgtggttagtttatctgctcagggtttaaatgcttttgatgccgcttcgttagctgtttttattaatggtcttgcaggtgacagggcatttgatgagaaaggaaatgggttttcagccactgatttagtgtcttttgttggtaatgtgattaaagatggattatgttaa

SEQ ID NO: 7972 - DNA, 1134 bp, Methanobrevibacter gottschalkii
  source 1..1134: mol_type = genomic DNA
atgagaaaaataacaataagacttttaaccagattacccacaaaatatgtgacaatcggactactattaattatcgcattatttgtttatggaatattaggttcatattttataatgcacctgaatattattgattctatttattattctattattaccatggcaactgtaggttatggagattatacaccacatacaggaattcagaagatttttgcaacaacattagctctttcaggtgttgcattactcgcttatgtatttaatatcatgttaacaagtttccaggaaaaaatgagcacatattcaaaaggagcaagaaaaatgaaaacaatcgaggatatggatgattattatattatttgtggatttggcagagttggaaaagtagtatttgatgaattaaataaaagaaaacagaacattattgtaattgaaaaaaaagaagaaatttgtaataatatcgaagagagtagttctgtagttagtattcataaagatgcaagtgaagacaatttaatatcaaaattagctggtgaaagatgcaatagtgtgattgtaagtactggagatgatgtaaacaacttatttattgtattaacaatccgtgaaacaaaccctgatgcttggattgtaacaagagccagtaaagttgaaaacattcctcgtcttaaaaaagcaggtgcagataaagttgtatcccctgaaataagcggaggacaagatatgtttttcgaatctacaaacccttatcttttaagaataacagtaaaacacactgtagaccaaatatatgatgaatttaaagttattaacaaatatgattgcagtttagaaaccattgattaccacattccaggagttgaaaccccactcacccgtgaaatatatgtaactagacttgcagatggcaaaaaatattataactacctacaaacacatgatgatcaaagacaagcattagacacattatacagaactacaaataatatacattcacatttaatcctaggtcaagataaagagtctttcgagaatttaataaaagatttaaaagaaatagaagaaattattggaattaacttaactaatgaagaaatagctaaaataactagaaaagaagattctaattaa

SEQ ID NO: 7973 - DNA, 891 bp, Methanobrevibacter gottschalkii
  source 1..891: mol_type = genomic DNA
atggaaattaatggtgtagaaattaaagatacatatgcagaaggtttcggaattaaagtaactagaattttagttactgcagcaactgaagaattggcaaaaatcgcagcaactgaagcaacaggttatggaacttctgttattggatgtcctgcagaagctggtattgattgctttgtaccggcagaaaatactcctgatggaagaccgggttatgttattatgatctgtcaaggtggtaaaaaagcacttgatcatgaattaatggaaagagttggaatgtgtattttaacagctcctactgcagctgcattcaactgtcttgaatcagaaactaccttaaaaaccggtaacaaattaaagttcttcggtgacggttttgaaaaagaatgtgaaattgatggaagaaaaattcactctattccaattatgtctggggatttcttagtagaatctgaatttggttataaggatggtgtggcaggtggaaacttcttcattttagcaaaagatcaaatgactggagtagaagcagcacaagctgctgttgaagctatttctaaagttgaaggtgtaattactccattccctggtggtatggttgcttctggttctaaagtaggatccaacaaatactcaaaattcttaaatgcgtccactaatgaaaaaatgtgtgtaacattaaaaggtgaagtggattctgatatcagggatgatgctgatggtgtatttgaaattgttattgatggtgtagatgaagaatctgtcaaagcagctatgaaagcgggtattgaagcagcttgtgaagttgatggtgtacttgaaattagtgcaggtaactttgacggtaaattaggtgcctacatcatgaacttacaagaattattctag

SEQ ID NO: 7974 - DNA, 1062 bp, Methanobrevibacter gottschalkii
  source 1..1062: mol_type = genomic DNA
atggataaaaaatcagtattttttcttggaataagtgtctttatattaatcataatgttgtggttggttgggatagaagatattattgatgctcttaatgtagctaaattagaattaatagcgttagctattggtgtacaaatatttacatatgctttgtacacattacgttggcaaatacttaataatctagcagatattaataccagttttaaaaaattacttccgatgattttggtaggtcttgccgtaaataatataactccatctggacgtggtgggggagagcctgttagagcatatattttatctaaagaagaagattatccgatgagggagacatttgctactgttgttgctgatagagctttagatacttttccatttgttgtgctgacagttataacaattattggtatgactttttattttaattttgatttatggttacttattgtaatgatttcagctgtaatatgtattgttgcttttttactgatgattatatacatgtctattaaccctaattttggtaaacgtgtagatggatggataattaagttagttagaaggttttataagaagaattctgaggaattggaaaataaaattcatgctgtaattttagatttccaaagtacaatgaaaattgttatttcaagtaaaaaagtcacatattatgcattgccattatcatttatcatctggatttttgaaattttaagggtttatattgtatttttagcttttggagcggatattagtcctattgttattggggaagtatttattattgcttcactggttggtatgataccacttcttccgggtggactgggtgctgttgatggaattatggttgtattttattctgttgcaggaatatctgcttcaataagtgctgctgcaactgttattgagagattaatttcattttggatggccactattttaggaatgattattttacctcattatggatcttcaattttggataaaatttcattcggttcatcaaatgatgaaattgaagaagctcttgaaaatgaaattgataattaa

SEQ ID NO: 7975 - DNA, 1434 bp, Methanobrevibacter gottschalkii
  source 1..1434: mol_type = genomic DNA
atgagatatataacaaaaactgacttattggttattggattaaattccggatatttattaataggaattggaataatgtgtttaattccattaatatttgatttaatatattttgaatttgatttaattagctttattctgcctggagcaatatcaatatgtcttggattctttttaacaaaatatctcgatgaatattcaaataaaaatgttcgacttaaacatggtatgattatttcatctcttggatggatatgggcagctcttattggcggattagtttttatgcttgcaaccaatatgcccccaattgatgctatctttgaaagcatgtctgctctaacagggactggagtgacaatgtatacaaatttagaaatattacctcatagcatactcttttttagagcttttgaacaatggattggaggtttaggagttgtagtcatggtaattagtgttttagcaaaaccgggtactgcaacctcaacgttatatcattcagaagcacatgatgagcgtataaaaccaagtactaaagcaacccttgaaaaaacaatagaaatttatataatttatactgttgtaggaattgtattatatgcaatagctggaatgccactttttgattccctatgcaatacattttgcataatttcaactggaggtatgaatgttaaaaatgcaaacatgggctattaccataacgacttaatttatttcatatccattgttttaatgatacttggtgctacaagttttttagtacattataaagttataaaaacaaaaggaaaatcattgttggaagatttgcaatttaaaataattatctgtgtgattgcaattgtaacattgatgctttattatgtatcaaatattgtcccgatggaattattattcacagttgtatcagcaattacaacaacaggggccagcatctcctcatctttaacaatggcgagttggccatcttttgtaataatctgtttaatctgtttaatgttatctggaggttctaatggatctactgtaggagctattaaacttatcagattaataacatttttcaagggaatctacagaaatatacgtgaaatcttatcaccgagtggtagagttgttcccataaaattacaaggcagaccattacctgaaaatgcatcagaacaatctggaaattatatcacattatatctaatgtttataatgtttacatgggcattattctgtttcttcggccatgacccatttgacagtttatttgcaactgtatcacttcaaggcaacaatggtttagacctggggattattaccaatcaaatacatcctgtcttaaaaatagtaagtatgctcaatatgtggattggaagattagaaatatacccagttttaatcacattaagaactgtttttgaaattttcaaaagataa

SEQ ID NO: 7976 - DNA, 660 bp, Methanobrevibacter gottschalkii
  source 1..660: mol_type = genomic DNA
atggattatgtagtaattatgggaggaggtcgtgtagggcttgctcttgcaaacttattaattaatgaaggatatgacattacattaattgaaagtgatacaaagttatgtgatgaagttgcatcagaactcgatgcattagttatttgtggaaatggaactaattctaaaatacttgaagaagtgaacattgaagatgcaaaatatttcattgcaacaactggaaatgatgaagcaaacttactttcatgcatacttgttagaaaatataatgttgaacatattattgcacgcgtaagtaatccggatcacgaagaagcgtttaaagaagttggaatcgaacaagtaataagtccagaaagagctgctgcatcatatctgcaaaaaattgttacaagacctaacacagcggaattaatgacaatagggcaaggagatggagaaattttagatatgaccataaccaataacaaaattgttggtaaaaaatttaaagatgtttcaccaacaaaagattttatgattatagctacttatcaaaatggaacactaatcatcccccaacctgacaacattattagccgtggagaaaaggtttctgttcttgttaaaagaggatcatttagtaaagtatccaaaaaattagaaaataaatcataa

SEQ ID NO: 7977 - DNA, 612 bp, Methanobrevibacter gottschalkii
  source 1..612: mol_type = genomic DNA
atgtcaaaaattgtttttattttaggatataattatgattcaaattgttatttaatcgatgataaaattttagttgatactggcgcgggtgaaaacagagattatctattttctaaactgcgtgaaaatggtgttgaaccggatgatattgagttagtagttaatactcattgtcattttgatcatattggaggtaattatctttttccaaatgctaaaattgctgttcataaattggatgcaactccaattagaaatgaggatacattaggcactgccggcactgcttttggttttgataatataaataattcccgtgttgatattgaattagaagaaggggataaaatagcagattttgaagtaattcatactccaggacacacaagtggaggaatttctctttgggatggtgaaaacctaatttgtggagataccatttttgctggtggaggtgttggtcgaatggatattggaggaaattatgatgatatgaaaaatagtgttgaaaaattaatggcgttaaatgtcaaaagaatttttccaggtcatggaccaatcgttgaaaataatggaaaagaacacattaaattatcatattcatatttatga

SEQ ID NO: 7978 - DNA, 411 bp, Methanobrevibacter gottschalkii
  source 1..411: mol_type = genomic DNA
atggctaaaaaaggatcggctgaagaaagagagttagtacataaactttgggaaaggaattttgcagctatgagggctccagcatctggaggggctactaaaaagtccttacctgatgttgttgctggaaatggtaaattatatttagctattgaagttaaaacaactacaaaagataaaatatatattgattctattcaaattgaggagttatgcgaattctcaaatatttttggagctaaaccgtatatcggtgttagatttaaatatactaaatggttatttttagagcctgataatactccccgtactaaaaaaggcaattatcgtgttgaaaaagattatgcacttgaaaaaggtttggaaattgatgaaataactggtattgatagacaaatgaaatttgaataa

SEQ ID NO: 7979 - DNA, 981 bp, Methanobrevibacter gottschalkii
  source 1..981: mol_type = genomic DNA
atggattctaacatatttgatttaataaaaaaagctaatgaagtcacattaaacaaacatggcgatttaattacattagagcgagcagtatttttatcttggtggtgcgataaaggagattgtgccttttgttatatgtccacacaaaaagataaaattagagatccgaccaaagcgagacgaaacattaataacatctatgctgaagctgaaatgtgtaaacgtcttgattggaacattgaatttttatctggaggatacgaatcttatacaacacaagaaataaaagaaatagccacaacaataaaagatataactggagatggtgtatggttaaatactggaataacagatgaattagaagaatatggttctgaaataaaaggaataaccggcgctgttgaagtagcaaatccaaaaatccatgaaaaggtatgcccttcaaaaaaattaagtgatataagtaatatgttagataccgcaaacgatttaggatttaaaaaagcaatcacaattatattgggacttggtgaaacactatctgatgtggactacataataaattatattcaagcccacaaaatcgatagagtaatcttttattcattaaatccccacaaagaaacaatatatgcaaattcttcacagcccgcttctctttattatgcgcaaatagtagctcaagttagattagcattcccagatattgaaataatctgtggaacttggattgataatcttgcaaatataggcatattaatattaagtggagcaaatggaattacaaaattcccactattcaaaatgtttggaacaaaatatggaaaaagggttgaagaagaagtaaaatggaccggtagaaaattaaagggaacatttacagataaaaatcagttaggtcctaaaaaaagtgaaatttcaccagaattagataaatttattaaaagatatgtgaaagaatctcttaaaaataaatattaa

SEQ ID NO: 7980 - DNA, 1353 bp, Methanobrevibacter gottschalkii
  source 1..1353: mol_type = genomic DNA
atgatgtgtggacttgaaatccacgtacagctagaaactgaatcaaaattattctgtgattgtcctacaaattatcaggatgctccagcaaatacaaatatctgtccagtttgtcttaaccaacccggagcaaaaccacatcccaccaataaaaaagcattagaaaatgctttaatgattgctttgatgcttaactgtgaaattgatcaagatgtaatctattttatgagaaaacattacgattacccagatttatcttctggatatcagagaacttctgtcccaattggaattaaaggtgaattaaacggaattagaattagggaaattcacgcagaagaagacccgggtcaatacaaaccggatagaggtattgttaacttcaaccgttcaggaattccactggttgaaattgttacagaaccggatataaaatctcctgaagaagcaagaaacttcttaaaagaattaattcgtgttttacaatacagtggaggggctcgtggagaaggaaccatgagagcagatgtaaatatttctatcaatggtggaaacagagtagaaatgaaaaacgttaactccattaaaggagcttacaaagcattgaaatttgaacttgtaagacaaaaaaaccttatgaaaagaggagtggaagttaaacaggaaactcgtgcttatttagaatcccaaatgattactgtgggaatgaggatgaaagaagatgcagatgattacagattcatcacagaccctgatttaccaccaatgcaaatttctgatgaaacaattcaaagaattttagatacaatgcctgaagcaccccacaacaaagtaaagcgatttgttgaagattatggtattgatgcggaatctgcaaaagttttaacttcagaacttgatttggctattgcatacgaagaagttgtaaaagaaattgaaccaatatttgcatccaaatggatgagagatgaacttaaaagagttttatcttataataaattagattttgcagatagtggaattagtgttgcaaatttaattgaattcttaaatatgattcaaacaaaagaaattacacaaaaagcagctaaaaaaatcattgaacaaatgccaaataatgaaaaaacacctaaggcaattgctgaagaattaggattactaggtgttgtaaaagatgacgaagtgcttgcagctgtaaaacaggcaatcgaagaaaatccaaaagctgttgaagattacctggctggtcaaaaagcttcaattaattttttaatgggacaagtaatgaaattaacacgtggaaaagctgatcctggagaaactgttaaattattaagagagaatatagaatag

SEQ ID NO: 7981 - DNA, 807 bp, Methanobrevibacter gottschalkii
  source 1..807: mol_type = genomic DNA
atggtggaaaaaaaatcttttgttaaagattatatgacaaaaaatgttatctgcgtttccccaaatactcctactgaagaaattattgaattaatgagaacaagtcggcacaacagttatcctgttgttgtaaatgatagacttgttggaatggtaactgcatttgatgttgtatctaaaaaatggtcagacacggttgaagggttgatgagcactaaattagttgttgctaaccctgaattatccataaatgatgcatctagagtaatgtttagaagaggaatctccagaatgcctgttgttgatgaaaatagaaaaattgttggaattataacaaatacggatatggttagatcacatatcgaaaggtcaacaccaaataaagttgaatatttcaaaaaaactctagaacaattatacgatatcaaagctacattaagacacatgcctgttgaaactaataaattacgcccaacacaagatagagtctatgcggatgagcttgaaggaagaacttatgaattaaaaagaggattagcagaacctgcaattgttgtaaaaactggaaatagatggattctggttgatgggcatcacagagctgtagcttcatcacagcaaggttatgaaacagttgattcatatgttattgatttaggacaagacataaaattaggtatggagaaaactgcagataaagcgggaattaaaacattttcagatattgaaattattgatgatgataaacatcctctgatagcacttacagaaagccttcaagatcaagaacgtaaaagtgatgattaa

SEQ ID NO: 7982 - DNA, 288 bp, Methanobrevibacter gottschalkii
  source 1..288: mol_type = genomic DNA
atgaatgataaaattataagagaagtatatgaagttttagaatcacgccgtgacaatcctattgattcatacacctcaaaaatcatgcaaaatagtgataaaaaagcagaagacaaaatacttgaaaaaattgccgaagaagcaggagaagtattaatagcttctaagaatgatgaaaatttagtttatgaatccgttgatttgattttccatacattattgcttcttgcatacaaaggcatagaccttgatgatgtgtttgatgaatttgcaagaagaagaaaataa

SEQ ID NO: 7983 - DNA, 768 bp, Methanobrevibacter gottschalkii
  source 1..768: mol_type = genomic DNA
atgtttgacacattcacagaaaagaaatttttattaaaagaattggttaaaaaagatttgacttcaaaatataaagattctgtactaggaatactttggagttttttcaatccccttttaataatgttagtatttacagcaattttttcaatgctattcggacgtcaaattgagaattatccagtttatttcttatccggaagaattatttttgatttttataacagtgggacaaaaggtgctatgaaatcaataaaaagaaatgcaaacttattaaaaaagatttatgttcccaaatacatgttttcagtaagtacaatttgctatgaatttgttaactttttaatttcatttgtgatattattcattgtaatgatacttacaggagctacattccattggactatagttttatcaatcattccaatgtttttcttagtttgcttaatattcggagttgggttaattttagctgtatgtaacacttattttagtgatatcggacacttatacaatgtattcactctcgtattaatgtatgcatccgcattattctatcctatggagatagttccagcaatagtgcaaagaatatttacattaaatccagtttattcagcaatttcttgtttcagagagtgtattagctatggaatttttccgaatacttctactttagcttatctagccatattttcatttacaacattaggaattggattatatctcttcaaaatttatgaaaagaaattagtattagaaatatag

SEQ ID NO: 7984 - DNA, 1425 bp, Methanobrevibacter gottschalkii
  source 1..1425: mol_type = genomic DNA
atgaatttaattaataaaataaggaatttatttaatgataatactaaacaagaaaaaaacaaacatattcctcttgatgctaaatttcagagcagtagatttaagaatatcaaaatccatgcaccggattatgtaatgagtactgaaaacagataccatatgcaaatattggataattctaacaaccctattaaaaatgaagcaataactttggttattaatggaaaatgttatgaaaaaataaccaataaagacggatatgcatcagccaaaatttcacccaataaaaagaaaaaggaaatgaaaatatattatctatcaaatgaagagtattgtccttgcataattgccaaattgatacacccagataacataaatcctgaagaaaataatgaaaacccaaaattatatgctccagatatgagcatctattcaaaagatgaaccagaatacaatgctagattgcttgatagtgaagataatccaatgattggtgaaacactaatattcaattttaataaccagacatatgaaaaaataactgatgaagaaggatttgctagcatagatttaaaattagatgaaggaacatattcaattgaaacaatatttaaaggtgaaaaagactcaaatcctattactaaaacatcaacaataaatgttaaaaccagaaatatcgatcggaaaataatgatcgaagtcaaacatcttgcaatggaatttaaaatttcaaaagacaagatagatacattaaaagaatatgttattcgaactattaaaagaaccaaaaaagaacatgagaaaattagaatattagatgacatttcctttaacatttaccaaggagaaagagtgggcatattaggatttaatggtgctggaaaaagtactcttttaagaataatagcaggaatatatgaacctactgaaggagaagtaataatcaatgggagaattgcaccattacttgaattaagtgcaggatttgataagaattatactggaaagaataatatctttttgaatggtgctcttttaagcatggaagaagacttcatcaaagagaaatatgatgaaatagttgaattttctgaacttggagaacatattaattatccagttaagaattattcaaaaggtatgagggcgaaattaggtttttcaattgctactcttgtaaatccggaaattttaattattgatgagattttagctgttggagacattaaattcagaaaaaaaagttctgaaaaaattaaatcaatgatgaaagaaggtgttacagtacttcttgtatcccattctataagtcaaataagaaacatttgcgatagatgcatttggattgaaaatggccatgtttacatggaaggtccagctaaaaaggtttgtgatgcatatgttaaaagtgctaagaagaagtag

SEQ ID NO: 7985 - DNA, 501 bp, Methanobrevibacter gottschalkii
  source 1..501: mol_type = genomic DNA
atgatattaatatttttaattatagggtgctgttgcctattttatgttgttgaaacatcaaccactgttgggaatgcgattactgtagtaaataaaactgttgtcacattaccaaacgaattctcaattgaaagtagagaaactggctatggaacattaattaataaaaatacaaaggaaaaaattaccattaaagatttaggtaaaggaaatttagcattaactaagtttaaaaatgcattaacagatttaactaaaaatcccgatatcgatcatgttaaaaattcaacatcaaacattaataatatcactgcatataaaattgattatcaggatattacaaaagagaataattcggatttgagtaatgtttatgtatttacttgcaatcacacattcttaattaaattagaaaattataataataacgttaagtcagataatgatttggattatgtaattacacatatgacccctgactttaaacaatctcaagattaa

SEQ ID NO: 7986 - DNA, 2544 bp, Methanobrevibacter gottschalkii
  source 1..2544: mol_type = genomic DNA
gtgataaaattggatgaaattgaattttcagttataataccaactcataattcagaattgggaataaaaaaatcaatcaaatccatacttaatcaaacactaaactttgagaataatattgaaataattattgtggacaacaatagtgaagataaaactcaagacatttgctacgattatatttccaaatacccgaagaacatatcttatatccaattagacacagttaatctgcataaatcaaaaaatacagcaatgaaacatgcttatgggaaattcattacatttttaaaacctcatgactatttatcaaaagattcattatcacatcttttaaaatttatcaacactcatgaaaacattgatttagcaatacttccgattttttattataaaaataacagaaaagaacgttacataaattataaaattaaaaacaataaaaaaatcaatttaatagaacaaccacaatattcccaattaattggtttatccacattctttaaaaaagagtctattaaaaacattgagtttttagatactactaatgaaaatattacttttttcagcgaaatgttgataaataatccttatttaggtatttgcagcaaaggagcatattttgcaaagaatattgaagaaagaatttatccttcagacactaccatttattcaacaaaagaatatgaaaaatttatcaaatataattttaataatctgaaaaataaatgtttcaacaaattttctaaaatacccgaattcatacaatttagctttataaatcatttaagatggttattatctataaaaaaaacagaagaaaagattgatttgaaaagtttaattgatactatatcatatataaacaatgatattcttttagaaaacagattacttaaacaggaactaacgattaccacttttttattaaaatacaacaatgacttaagcaatgatttaatggaaaaattagatttgaatacactttttattgacatatatgatattatcgacaataagatccacattttagcaaatatcaaaaatatcacaacaggagatattaatatattagtcaataacaaaaagattaaatttaaaaaattaacatttcctcacaaatatgctcctagtttaggttataatctattacaagattattcaatagaatgtattattccaattaaaacaaatgaaaaattcaaacttgaatttaaacaaaaagacaaattgttacatattgatttttcaagaccttgtaatttctcaaaaagtgtcggttatgcaaaaactaaacattacttaagtattttaaaagatgaccacatatctattgagaaaaaaacaacattaaaatggataaaacaagaattaaaaagtttaaagactatgtttaaaaatcatgaaactggatttataaaagcagttccctttagagtagcttatatgataagttatccatttttaagaaataaaaaaatatggttttttatggatcgccccgatgaagcagatgataatggattagcattatttaaatatgctgtcaaacaagaggatgatatatctaaatactttattttaagctcaaaaaataatgatttcaataatataaaaaagatagggaaagttattaactataaatccctcaaacatagatttttaggaatgtttgttgaaaatattatcacatcacatcctgacaatggaattatttatccattttggggaggttatccattttttgcaggccttttaagatcaagcactatgtttttacaacatggtgttgcaaaggacgatatttcctattgggcgaataaagcaaacatgaatttatctttatttttaacatcgactattcaagagtatgagtcaatattagaaaaccattataactatgatgattatgttgttcaattgctggggttgcccagatttgataatcttaaaaatcaagaagaaaaaagacaaatccttattatgccttcttggagacgggatttgaattataaatcaaaagagtatattaaaaagaatggatttttcaaaaaattcaattcattaataaataataaaagattaatagaaacggcacgtgaaaataactatgagataatctttaaaccacatcccaatgtttataaattcattgatttgtttgataaaaataattatattgaaattgattatggtaaaacaaaatatcaagaattattcaatagcggatctttagtaattacagattactcgtctgtagcctttgattttgcatatctctacaaaccagtcctatactaccactatgataatgattatcattttaatttagaagaaggatattttaattatgaaactatgggatttggagaagttgttaaaaaagaagatgaattggttgatttggtcattgaatatattaaaaatgattgtaaaatcaaagaaaaatattccaatagaattaaaaatactttcaaatttaatgataaaaaaaattgtaaaagaacatatgatagaattaaagagattacattaaaggattaa

SEQ ID NO: 7987 - DNA, 570 bp, Methanobrevibacter gottschalkii
  source 1..570: mol_type = genomic DNA
gtgattaacttgagatacgtaaattttaatcctcacattcatgatacttataaagtcgccgaattggtttatgatgttgattttagaacttttgatttgttatttaaaactccaaaagaagctatttcaacaattgagaacgatttaaggaaacatggacctgaaaatacttttaaagtaattttaaatgatgaaatgcaaataattggtgttttaataatgtatatttctgaaaaatcatttgatttaaggttaaaatcattaagattaatcctcgttgacatattggattattttgtattgtgtgatgttaaaaaagatgatctgtatcttgcagaacttgcaattgatgaatcattaagaggccagggattaggccgtaaagttgtacttgatgttattgattatgctcgctctaaaaatttaaatcgtgtaattatcgatgctgattttagaaatgttggagctcgaaaactttatgaaagaattggttttactatttttaataaaaaaagagttaaaattggaaattttgaaagaggaatgtataatatggaattaatcctttaa

SEQ ID NO: 7988 - DNA, 762 bp, Methanobrevibacter gottschalkii
  source 1..762: mol_type = genomic DNA
atgaaagatattcttgaaagattggttgatggcgaaattaatattgatgaagctgaaagattgattaatgcggataatattttagaatttaatgaagttgctaaatttgattctaaaagaaagaatagggctggttttccagaggctgtctttgcacaaagtaaagaatatgaagatttacttttaataataaaaaaatacatgcaatctaataatgataatttgattgttacaagattatctaaagaaagatatgaaaatattctaaatgatttgggtgaaaactcatttgtttttgaatataatagaagggctcaaattttaattataagaaaagagattgtagaaaaaccagccattgcaaaagttggcattatgactgctggaacttcagatgtcaatattgctgaagaggctcgtgtgattgtagaagaaggtggttgtgaagctatcacttcatatgatgttggtgtggccggaattcataggctatttcctcaaattgctcggatggttgaagaaaatgttcgtgcaattattgtttgtgccggaatggaaggaactcttccttctgttgttgcaggtttggtggatgttccggtcattgctgttcctacttctgtaggttacggtgttggtgaaggtggaagagttgctcttgatgcaatgcttcaatcatgcgctcctggaattgcagttgtaaatattgataatggttttggtgctggtgtatttgcacttactattgtaaatagtgattaa

SEQ ID NO: 7989 - DNA, 2241 bp, Methanobrevibacter gottschalkii
  source 1..2241: mol_type = genomic DNA
atgaaagctttaaagattttaacacaaggaatagtgcaaggcgtaggattcaggccatatgtttatagactagcagttgacctgaatcttaaaggatatgttagaaaccttggaaatgtagttgaaatcattattgaaggtcagaatactgaattatttgttgacagactcccaaaagaattaccgccaatagcaaaaattaattcaatgaacgtagaggaaattgagaaaacaaattatactgattttaaaataatcgaaagtggaaattcatattctggaattagcgtagttccaccagacattgcaatatgcgataaatgtcttgaagaaatacgcaatcctactgatagacgttataaatatgcatttaatgcatgtactgattgtggtccaagatttacagtgattgaaagtgttccctatgacaggataagaacttcaatggatgaatttccattatgtgacgattgttcagtagaatacgaagaaccattaaacagacgttaccatggtgaagcaatatgctgtagtgaatgtggaccccaaatggaaatatatgaaggtaaacataaaataaatacagataatccaataaaagtaggtgcaaataaattaaaagatggtaaaatattagccattaaaggaattggtggaacacaccttgttgttgatgcttataataataaagcaattaaagaattaagaaaacgtcttaatcgtccaaatcaagctttcgcagtaatgtgtaaagatttagaaagccttcaaaattatgcagaattaagcaagaaagaaattgatacaatatcatcaaataaaagacccattgttattttaaagaaaaaaaacaattatcctttccctgaaagtttatcccctagacttcacaatattggtgtgatgcttccttactctccaatgcattatttactatttgacgaaggggatattgacacatatgttatgacttctgcaaacattcctggagaacctatgatgattgaaaatgaagatatcatcaatggaattaatgattactcattaatccataatcgccgaatactaaaccgatgcgatgattcggtgattcgatttagaaacaatgaattgtcatttattagaagatcacgcggatacacaccagaaccctatacaataaattacgaagtgaacgatttgaatatacttgcattaggtccagaacttgatgttacattctcaattgcaaaagacaatattgcatatccctcccaacacattggaaatacaaataaaccaaaaacattagcatttttaagagaagctattgaaaatatgcagagaattacaaaaataaacgaatatgatataatcgcttgtgatatgcatcctcattttttcacaacaaagcttgcttatgaacttgctgaaaaatatgatgctgaagttcagccaatccaacaccaccatgcgcattctgtcgctctttcaaacgataatgcaattgacgaaatgattgtgattgctgctgatggagtaggttatggaagtgacggaactagttggggtggtgaaattctctacaccgatataaaaaatttcgaaagactaggacacttacaaacccagctaatgccgggtggtgatattgctacaaaatatcctgccagaatgcttgcaagtatattgaatgatgaaaatttaattaaaaattattcagattacttcaaatatggagaaatagaaataaagaacattttcaaacagatggatgcgggaataaatgttggtaaaacaacaagtaccggaagagttcttgattcaatggctgttgctcttgaaatatgtaatgaacgcacctacgaaggagaatgttcaatgaagcttgaatcagcagcatactattcaaataagaatatagaaatcccattgaacattgaaaataatattttaaatacaagtgaaatattaaaagaagttgtaaaattatatcaggatggtgaaaagaaagcagatgttgctgctgctggtcaaaatgctatcgcacgtggtttaagccaacttgcaataaatgctgcaagtaaaaaaagtattcaggaaattggtgctacgggaggagtattttacaatgaagctattacaaacacagttaaaaattacgtagaaaataatggattcaattttattcagcataaaaatacttgtgctggagatggatctgtatcattaggccaagccataattgctaaaaaagtataa

SEQ ID NO: 7990 - DNA, 576 bp, Methanobrevibacter gottschalkii
  source 1..576: mol_type = genomic DNA
atgattagaaatgatgacattgataatattaaaaaaaatcgtaaaaatgtcaattcttctaatggccacatagaaattagaggaaactataatgaccaattaggagggattgataaagaggacatccttgatgtaatgggttgtaagactagaagagatattataaatcttttaagggaagagcctatgtttgttagtgaaatatcaaatgaactggatattggtcaaaaagcaattatagctcatttacgtgcaatggaggatataggtatattgaattcttcttataaaaagattttaagaggacgcccacgtaaatattatgatttacaaaatgaagttaatattcatattactattaataggaatacttttgatgttaacttgtctgaggatatgctcaatacattacaacttccatcaggtgacgaatggtctagattattggatattgaaaaaagaatagatgatggacaactggaggctattgatgagttgaaaaatcaaataagattatatggcaatcttaaagaaagagcagaatatattcttgaaagaactttaaaaaatagatga

SEQ ID NO: 7991 - DNA, 552 bp, Methanobrevibacter gottschalkii
  source 1..552: mol_type = genomic DNA
atgactgacgaaaataaaagcgaaactgaagctgaaactcaagactttcaagaaaaatatgatgaacttcttgaaaaattagctcttaaggaagaagagctgaaagaagtcaaagaaaatcttgaaaagcaagaagcagaaactcaagagtacatttcactttcacaaagacttcaagcagatttcgaaaatttcaaaaaaattactgataaaagaaacaaagagtttattaaattcgcaaatgaagatattataaaagattttcttgattgctacgaagatttcggtagagctttagaaattaagaataatgatgacttaaaagaaggtgtagaactcatatataataaattcaaagatattttaacaaaagaaggaattaaggaaattcctacaaaaggagaaaaatttgacttgaacaaacatgaagcaatgatggttcaagaatctgaagatgttgaaaacgattatattatagaagagttaatgaaaggctacatgtacaaagataaagtccttaaatactcaaaagttattgtttgtaaaaaataa

SEQ ID NO: 7992 - DNA, 1872 bp, Methanobrevibacter gottschalkii
  source 1..1872: mol_type = genomic DNA
atgtctgatactaaaaaagaaaaaattattggaattgatttaggaacaagtaactctgctgcatctgtgcttgtagggggtaaaccaactacaatcccatctgcagaaggagcaagtcaatatggtaaatctttcccaagttatgttgcatttactccagaaggtcaaatgttagtaggtgaaccggcaagaagacaagctgtaaccaacccagaaaatactattagtgcaattaaaagaagtatgggtactgatcacaaagttacagtaaatggaaaacaatactcccctcaagaaatctctgcattcatcttacaaaaaattaaaaaagatgcagaaaccttcctaggagaacctatcgaaaaagctgtaattactgtacctgcttactttgatgataaccaaaggaccgcaactaaagatgcaggaacaattgcaggacttgatgttgtaagactcgtaaacgaaccaacagctgcaagtctcgcatatggtcttgataaatcagaagatgatgacatgaacattatggtttacgatttaggtggaggtaccttagatgtaaccattatggaattcggtggaggagtatttgaagtaaaatcaaccagtggggatacccaacttggtggtactgatatggataatgtattaatcaaatacttagccagtgaattcaaaacccaagaaggtattgatttaatggataacgatcaagcagtgcaaagattaagagaagctgctgaaaaagcaaaaatagaattatccaccactacaactacccaagtcaatttgccattcattgcaatggggtctgatggaacacctaaaaacttaattattgatcttacaagagcaaaattagaagaattggtcgacagtattgtagaaaaatctggtaaacctatgcaacaagcattagatgatgctaaaatgaataaatctgagattgataagattattttagttggtggacctaccagaatgccaattgtacagaaattcgttgaaaaattcataggtaaaccagttgaacgtggtatcgatccgatggaatgtgtatccatgggtgctgctatccaaggaggagtattggctggtgaaattaaagacatcgttcttttagatgtaactccattatctttaggtattgaaaccttgggtggagtgtcaactactttaattgaaagaaacacaactattcctactaaaaaaagtcaagtattctccacagctgcagataaccaaccatctgtagacattaatgtattgcaaggagaaagaaaaatggcggcggacaacacttcacttggacgtttccaacttgtaggtattccacctgcaccaagaggtgttccgcaaattgaagtaacttttgatattgatgcaaacggtattattaatgtaactgctaaagacaaaggaactggtaaagaacaagcaatcactattacttcctcaaccaaattatctgatgaagaaatcgaacaaaaaatcaaagaagcagaaatgaatgctgaagctgatgctaaaagacaagaagaaatcgaaatcagaaacaatgcagactcattaatctacacttcagaaaaaactttagatgacctcaaagatcaagtatctgaagatgaaaaaacaaaagtcgaagaccttgttaaagaattaagagaacttatagccggcgatgacgttgatgccattaaagcaaaatctgatgaactatctaatgtagttcaagagattggtgcaaaaatctaccaacaagcacaagctgaagcacaagcacaacaacaagcaggtgctgaccctaatgctggtgctcaagacaaagatgatgacacaattgatgcagactatgaagtaaaagactag

SEQ ID NO: 7993 - DNA, 1146 bp, Methanobrevibacter gottschalkii
  source 1..1146: mol_type = genomic DNA
atggcagacaagcgtgattattatgaagttcttggagtagataaatctgctgatgaaaagacaattaaaaaagcttatcgtaaattagctagaaaataccatccggatgtttgtgacgagccggatgctgaagataagttcaaagaagtaagtgaagcttacgctgtcttgtccgatgatgataaacgccaaagatacgatcaatttggtcatgcaggaatggatggatttagtgctgaagatttctatcaaaatgtaaactttgaagatatattccaaggatttgatataggaaatatctttgatatgttcggttttggtggaggagcacgttctagaggtggaagaactggtcctcaaagaggttcagatatttacacagaaataccaattactttagaagaagcattcaacggatgcgaaaaagaaataaaaattactagaagtgaattatgtcctacctgtaaaggatctaaatcaaaaccgggttctaatccagaaacatgtaaaacatgtggaggaacaggacaaattaaagaagtcagtaacactttccttggacagatggttaatgtaagaccatgcagagagtgtggaggtacgggtaagattattacagatccttgtgatgaatgtcacggaagaggtagtgtgagaaaaactaaaacaattaaaatcgaaattccagaaggtgttgacgaaggaaaccacttaagagtttcacgcgaaggaaactgtggtgataaagaaggtcttgaaggagatttaattgttacagtacatgttaaaaaacataaaaaattcaaacgtgaaggagatcacttatacttggaacagcaaatcagcttccctcaagcagcacttggtgatgtgctcagcatccctactattgaagggaaagaaattgaattcaaagtcactccaggtacacaaagcgaaactgtttacaaattaagaggacaaggtatgaactctgttagacataacagcagaggaaatctttatgtgaatgttacagttgttgttcctaaaaaattaagttcaaaacaaaaagaattgcttaaagaattcgccgaggtcagcggagatgaaattaagcatgttgaaaaaggactctttgatagagttaaagatgcaatgaagtaa

SEQ ID NO: 7994 - DNA, 3489 bp, Methanobrevibacter gottschalkii
  source 1..3489: mol_type = genomic DNA
gtggttttattatctactggtgttgcttttgctatttctgaaaatgatgttgctgtaagtaatgatgtgggtattgttaatgagactgttctagaagtaagttctgatgattcggatttatcagaagctgatgttttagaaacacaaactaatgttgtaactaaagatactttccataattattttggaaatgatggtacattattagataatgtttctagtgatgagttaatatttaaaggagattttactggaatcgatgtcagttatatgacaattggtaaatctgttaagttatctggtggtaatactactcttaataatgttactttcattattggtgcagataatgtggtgattgatgggtttgttcttgatcattctgatgtttatttatttgatatagaaaatgtaaatggtgtaactttatctaataatataattaatttcaaaacacttgaagggacagagggttatgctatttttgccaatactgtaaatgattttaaaattatcaataatactataaattatgttggtaatactaaaggtacgatggttaataatgctattcgtgtaactggtgatgaagattctgcaattgcttcaaaaaagattattgttgaaggtaatgtaattaatataaaaatcccttctgtggatgtgggttatgatcctgttacttgggaatcaaaagttttttctgaaggtattgttttctattattgtgaggatgtaaaatttatagataatcgtgttgatttaaaatataataattttagtggtggtttcgatactatttatgcattaagtgtaagaggaaatccttataactttgagaatacaattgtttcttctgacattgaaattattaataatacaataaatgctaatggacataattatatttacactattttcctgtctgctaatgattttaaactttttaataatgtaattaattcaacagctgatttttattatgctaatggtattaatattgatggtcctgcatctgaaggtattgtaagtaataatttgataagtgttgaatcaccatatgatgtttatggtatttattcttaccaaatgaatggtcccattgaatatatttcatatgtaaataatacaattataggtaaatcttatgttggttgcggtatggaaattgttgaatgcaatccatacattgcagataacctcataatcatgaatggtaattatacttttggtgttgttgcaagtattagggataatggtactatttctaataattcaatatcttctttaggaaataataatggtactgatggtactggtgatcctttattgcctttaaattcattaggtattagtgtaaagggtagtgtattaattgaaaaaaataaaattaactctgggggtattggtttaaaccttgtcgaaaaaggcaatattactattaatgataataatattaatgttaatacgactggtggtgttgaaagttatgcaatttactctgataaattaagtaacttagttatttctaataataatatcttatttactggaaataccaatggaactatggttaataatgctattcgtgtaaatggtgatgaaaataaaaaaataattgctaaaaacattattgttgacaataataatatcaatattaatattccttctattgatgtgagttataatcctgtaacttatgaggcaactgtttattctgaaggtattgttttctattattgtgaggatgtaaaatttatagataatcgtgttgatttaaaatataataattttagtggcagtttcgatactatttatgttgttagtgtaagaagtaatccttataattatgtttttgatgaagaagacaatataatttattcaattgtcagttctgatattttaatttctaataacacggtcaatgctctgggtaataattatacttatggtatttatatttctgcggagaattttactgttggtgataattttgtaaatatttcttctgatggtaaatatgctaatggtgttaatgttgatgcattgtcaagtaatggtgttataaaaaataataatgttattgtgaatgctgatattattgtttatggtgtttattctgcaaattttatgggtcctattgaaaatattacttatgataataatacaattagagtaaatgcttatgctgcttgtgctatggaattaatggagccaaatccttatgtttttgataacacaataattgctgctggtaattatacttttggtgttgttgcaagtattagggataatggtactatttctaataattcaatatcttctttaggaaataataatggtactaatggtactggagattcaattttacctttaaattctttagctatcagcactaaaggtgatgtgataattaaagataatgagattgttacatcagggattggtgttaaaacattaaaaggaaatgttgatattctaggtaatgacattagaactactggtaatcacactattgaggctataaattctaatttaactgtaaaaaataattatttggtatctaaaaaagccgtaggtactgattccattgtttcagataaggaagttatatctgctaataatactcctgcattaaaaactattatatctgcaccaaatatatttactgaatatattaaaggtgctgtattcccagttgctgcattagatgaaaatggagatccaatttcagatattgttctctttttaacaatggacggtattgtttataatgtaactactgatgcaaacggctatgcagcatttttacttaatcctgattcaggtattcataatgttgtggtctcatttaatggtaatgaggtatatggtcctaaatcagtaaatagtattatttctgttgatgcatctgcaagtaaaatcgttgcaaaaacatctacaactgtttatttaacttcagttaaatctggttcatactttaatatagctgtaaaggatgtgaacggtaaaggtttagcaaataaaaaagtttctatttacttcaatggtaagactaagagttacacaacaaattcattaggagtaatcaaattcaaactttctgctaataaaataggtaattaccaattaaaaatgaaatttgctggggataagaactatactgcatctactgcaattgcaaaaatcaaagtcattaaacaagcaactaaattaactgttgctaaaaagacttttaaagctaaaactaaagttaaaaagtacactattactttaaaagacaataaaggtaaggcaattaaaaaagccaaagttactattaaagttaaaggtaaagtatacaaagcagttaccaattctaaaggtaaagctacttttaaaattaccaaattagctaaaaaaggtacttataaagcttatgttaaatttgcaggtaataaatattataaagtatcttcaaaatctgttaaaatttcagttaaacgatag

SEQ ID NO: 7995 - DNA, 4065 bp, Methanobrevibacter gottschalkii
  source 1..4065: mol_type = genomic DNA
atggttaaaaaatttaatatttcattattattattcctcatttttatatcaatggctactgtttgtgctagtgataatatggaggatactttaaataataatggttctattctgagtaatccatcggatgaaagtattttgctttctaatgatgatgttctagctgaatttacaacacatgaaataaatgtagaaaagtattctatttattttaataataatggtgatctaatttcttctaaggttaaatctggggacacacttaattttactggagattggaatgaagttagttctaaaacttttaattttaataaaactttaaatattgtttattctggatcaaaaccaatgaaaaacggtgttttcacattttataatggtgcaacaggaagttccattattggcttgaatattgctaatactgaggattataattatggaattttcttaaatggtgcaagtaactgcattgtaaaagattgttttattaacaatacaggaatgtcctcttatgcaatttgcatagccaataatgcaaattacaataatgtatcaaataattttttctgtgattatggtatgaattatgggggtcaaggaactagatcaacaccacctgtacttctttctggtgctcatcataactatattgcaaacaatcatattgaatgtgatgatgcaaacgggatatatttgtcttactatgatgggggtcctttgcatggtggtgtttctaattataatttaatttacaacaacactgtaaaatataatgttttgccaacttcatggggttatggtattcagataatgggtggatacaataaaatttattccaataggataattggtgcattcagaggcatttcaacttcaaatggtgcatttaatgagatatttaataataggattattaatattactggtgcggattttaatcatcctgttgttgaagttggaggggagtatggaattgttggttcagcaaatgcgataataataaacaattctattgaaaatgcaagaatacttccaggttctggtgcgatttatgctattgataatgcaattattgaaaataatactattgatgttgtgtcatcaggatatggtattcaggcaagtggaagtaatatttctatcaaaaacaatagtataattactgaatctggtgctggtgtcttttggaaaggcgaatattttgatttggttgtagttggtaataatattacaagtggaaatggtgttggtgttttagttaaaaaagaaagtgttaaaaaaatgccagggaatataactattgttgataactatatttctactggaaataagtatgcaattgatgcaattgaggttaatgcagatactagttatgttattgaaaataatactattcctaagggtaaaggtattgttgcaactcctgaagggtcatatgatccatcaaaaccacgttatatctttaagggaacaacttatagtattactcctgaaaattatgatgattattttgatgtgggaggtactttaaattcagttgttaaaaatggagatattttatatttcgatggtaattttgagaataagggtgtaatatatattaattctgcagtcaaaattactggtaaaaatccgaatttttataatgctacttttaggatatctgaaggtgtctggattgaaaatttaacaattaaaaataaagattctgaaagaataaatgcatggggaatccttgtatataatactggtggagcgataatttctaattgcaatattgaagtaacagatccaaacgcagcatatgcaatttatgttgtagaatcaagcgatattgatgttttgaataataaccttacatctaatggtaattatttaacttatacattacttgctataagtgtctatgattgtaattttatcaataatagtattcataccattggaactggtattgagcatgtatttgaaaatagtcattgtgttgatggcaattctaattgtatagatggttctacttgtgttggtggagatactgtttgtacaagtgggaatactataactggaaatcatgttttaaatgaggtttataggacttatggtattttgatggcttattcttctggttgcaatatttctggaaataaagtaaatgcaacttctaagcttaataaaacatctaatacatttaattcaagttggggaaataattatcataataatatatctacaaattctattgttggtatagatttatattttaatagtcataataataccttttcaaataataatatttatgtaaagtctaatgataattatatttatggtatgggtgtattaggttctaatactgggcatgatgctcctgaaggaaaagatgcatctaataatcaatttattaacaataatattgttttggaaggagattattttgttcaaggtttagttattggccatgaatcaaaaaacacaactctcatttcaaatactgttaatgctaaatctaataatttttcatatggtattaatttagaagggtctcaaaaatcaattattaaagataataatctaaaattaacttcagatattgtttatggacttgaagtttttaggtcgaatggtaattttattaaagggaataatcttgatataaaagctaagcaggcatatgctattgcactttcaaatgctgagaataatattatccttaataatattgtaatgaataatgttactggtgaggaaataacttataatgtgtgtgattcattaggtgttggggttgctggaatctgtcttaaatttaattcttctagtaataatatatctggcaataatataacttctaaaaaaggttatgcaattgttattgataaattagcaattaaaaataatttattttacaattatttaaattctgaaatgggtattggtgataaagctattaataacacaaataataattttgttaaaggtaattacatctatattttaaatggattaattccggaagtaacgattaattatttgggtactgcagatattgttttgaatgttggtgttgatggggtattggttaaattttatatttgtggggaagaaattggtaatgcaacttcttcaaatggtgtagcaaaattaagatataaatttgatgatagttatactcctgcgggttattcgattaaagctattgcatctaaaaaggattacttaactaaagagttcatttcttatttaactattgaaaaaggtcttcttaatattaattataatgatgtaactgcaattccaacatctaagggaaaatttgtagttgttgtagaagatatttttggaaattctgtatctggaattactgttaaattttatagacttcaaggaagggatgttttcataggtaaagtaaaaactgataaaaatggtgtagctactcttgttgctgaagtaccttcacttggtaattataaattacgtgcagatgttgttgaaaatgacaattttaagtcaaacagtggtaaagctaatttgattgtggcttataaaccttcaatttatcaatataaaactaaagctgtttattatggtaatactataaaatatacggttcgtgttaagggtattgatggtaaatatgttgctgggggtaaaattgtaactattaaagttaacggaaaaacctacagggttaaaactgataaatatggtaaggcatataaatccattaaattaaaagcaggttcttataaagtaactgctcaatatggggttactaaagtttcaagtaaaattaaatttaagccaattttaatagctaaaaacattgttaaaaagaaatctaaaaaaattaagttctcggttaagttagttaataagcatggtaaaatattaaaatacaaaaaaattatttttaagattaaaaataaaaaatatagtgcaaaaacaaacagtcatggtgttgctatattatctattaaaaacttaaaaataggtaaaaatactattacatcattttatggtggttgcacaatatcaaatacaataactattaggagataa

SEQ ID NO: 7996 - DNA, 4815 bp, Methanobrevibacter gottschalkii
  source 1..4815: mol_type = genomic DNA
atgtatattgatgtaaagggggtgaaaataacgaaaagattagataataagttgttatttacattatttgcagttatgtttatattgttttcattaaactgcgtttttgcacagaataacactacagtaactgatgttttatccactgttgaagatgatgttggtattcaacaaatacagagttttcaagtagatgaacctctattggctgcgactaataataatattcagattaatgttaaacatcattataatgaaacggctaatacatgggatgaggatggttataatttagctaatgcaacagttaaattatatggtgctaatgataaattaatttcaacacataagacagattcaaaaggttcagttttaattaaaaatttaaaatcaaccaaatattatgttgaagttagttatgcagattatgaaccaaaaaaatctaaagtattggattttactaaaaaatccggaactttaaaaggatcatttgactttattcctgatattctattatttgtagattataaatcccataatgaaaagttaaatgttttaatgaatatgtctaagagagtggctttcattagcactgggcaagattatgatgtgtctcgtgaatggttagttgggtatgcacgtttcattcatattgatatgttttccgaaggagcatatgccatattcactgctgaaaaattaaaaaaattgcttgctatctctccagctaatgcaaattataatgttgcatatacattcggtgtttatagtaattcaattttaaacgctactggtttacacattgttggtgcaaactcgaagaataatactttcaatactattgaaaacacttatattggttcttatttccaagccaaagacattaacttatcagatgttttgtatcataatatggaaaactatttgaaatatgtgtattatttaattaatccgtcaaaatatgaaaatcccacacttaatgattctaatgctcctcaaatgggtccagaatgtggattttatcatccagatttaggtattttcaccatatatcctgaaggtagtttaataaataattggattaaaactaatcctggatatggtgttgatggaattggtagtttaaattggatgatacaggattatccaaagtggtttgtagatctattggatcctactactttatttgaacagtttgaaaatcaatttattgatagatttaatcctaataagaaattcatagctattgtttcttactattgtggtggggaagttgttgattctttaattagaggttatgaagaaattggaaggcctgcattcaatgtttttaaattttctacagatccttcaatgtcttcaatattaaataaaattaataatgtctcaaaaataggaatttcttctattacttcattatatagttggtctttaagttatgctaatggttctgctgaaaaagatttatctgatattgatgttgaaatccttaaaggtgtaaatgaaatttcaaaatacagttatgaaagtgaacttggacctcaagttgagtggacttactctgtgacttatccgagttttgaaggggtgtttagtcctgttattttatcgtatctagatgaggataaggttcatgtaattcaatcaggtgttgataagatggttcagctcagtagtaggtgggctgatttgaaagatttaaataactctgaaaaaacaatagctattgttctttataattatcctcctggtaaagccgaaattggcgcatcttatttggatgtaatgcaaagtacttatgatttacttattaaattgtatgaaaatggttatgctattggggatattaggaaaatgatgaatattacagaattcactaatttattaattgatagtggtaacaaaggatcctgggctgggggtttgttaaaaaaatatgttgaaaagaattgggatgaattagttaaacataaccaattaatctcaatggatgagttcattgatttaacttcagatcttccagatgagttatatgaggaaatggttactcaatggggtgctggtttaggtaaatcaatggtttatacagctagtgatggtaaacagtatttggttattcctggtgtttggtttggcaatatttttattacttatcaaccaagcagaggttgggaagaagcagatattggtgaagttattcaaaattaccatgatttgaaattacctcctcatcagcaatatgttgcattttatgagtggatggataaagtaacaaaggctaatgcaattgttagtatgggaacacacggaacattagaatggttacctggtaaaaatatcggtgttggttctggagattggtcctatgaattaacaagaattccaacaatatatccatatattgtatctaatcctggtgaagctatggttgcaagggatagaggtttagcaatgcttattactcacatgactcctgctatagtatcatctgagttatatggtaattattcgattttaaataattatattaatagttataataatcagattaaactcaatgttacttctaatgctaatatatataaagaaaaaattcttaaattagctcctaatttaggtttcagaaagatgtctaaaggtgagtcttttaatcactggcttgaggaattgcacctttatcttgaaagtatgggtgatgacctaatgacttatggattacataatttgggtaaagttttaacaggtaatgaactatctgaagaagttgttacaatcgtaacttctcaaactaagatttataatcaaataatggaatttttatatcctaatttaaaaggcaaagatttttataaagatattcaaggagatgtaaaataccttaatgaacgtcatactattcaggcattcttaagaaactatgttgatggcttagttaacggatcttctgttttggatttggttaataagttaggtgtaaataaagatagttcattattctcatcaatgaaatatgctcaagatgtaattataaatatccaaaataacaatgaatggaatgcaattctcactgcattatctggtggatatgttaaagcaggtttatttgcggatcctgcatatggtgattcaattccaacaggatatgatggatatgcatccgatcctactagaatgccatctgaagcagcatatgaatctgcagtcaatatagtgaatttattgcttgcggattattatgaaaaacatggtaaatggcctgaaatgactgcattaatcttatggggtacagaaatatcaagaactgaaggaattggtgttgcagaatttttatacttcttaggatgtaaaccgaaatgggcagaaaatggtaaagtaattggcgttgaactacttcctttaaaggacttaaaagttaaattacacaatggttctgttgttaacagacctaggattgatgtatatgcaagtttagttacaagtaataaagattggattacttggatggtaactgccactaggttagcggcaaatgctggtgaaagtgaaaatgataattatgttataaaacattataatgaatatcctactcttgatagattatttggtcttccgggcaatattcttgagggtactggtatgagtactcttattccaaatactgctaattggaatatttccacagttaatgtggaaggtatgaatgtttatttggatactgtttcattttcatggactattgatgagaagggtaatatcaatatcactaaacaaaaagatacttacaaatatctccttacaaaaacagagttaataacacaaaacctagatagtacttggagaattttagattctgatgattactatgattggtttgggggattatataatgctgcttcaattttaaggcaaaaagcaggtttaagcagacctgatacttcatttgttgatatccgtgataagaataaatatgttactagaacttatgaggaagagatggagtttgaaatcagaaccactcttttgaatccaaaatatcttaaacctcttaaaggaactgctgcaggtatgaactggattgcttcaagaatgcagaatacattcggtattttgactattagtggtaataagttgaataaggaattaggtaatcaaatgtccaatacccttttagacttagctagtggtgttagagatgcaagtacttcttacggtattcaatctgctattgcgcacatgatttacttagcaactcaaggtacttgggatgcagatagtgaaacccttcagaaactcgctgatgaatatatgagacaagttttaaaatatggtgttgcatgttgtcaccacacttgtaaaaacttggattttaataacaaggtcattcaagtaagttcattaactcctgctcaaaaagcagaatttgcaaaaatattggcacaagctactaatactgatcctttgtatgaggtggaaaaagattccgctaataatgataataatgcacaaggaattgttaatggaactactaaagataaacaatcagattcagaatctggggataaaacatcttttggaggagattcctctcaagcaggtgatgcaaaatctgcttcacaatctcaagattctagtgattcatcaggtgattcaggtgctgatgcatatgagttgtcccaacaatccgcttctaaatctactagtggcgctgaatctagcatgccaatatttgttataattgctattattattttaattgtaattttcttagttggatatgttagaaatcaaaaagatgaagatttcgatgattattaa

SEQ ID NO: 7997 - DNA, 843 bp, Methanobrevibacter gottschalkii
  source 1..843: mol_type = genomic DNA
atgcataaaaatagcatcatcataattattttatcaataacaattataggaatgcttattccagcgggtttttcagcaaatgattaccaaattgttataacatacggtgaaactacaaaaaacaatgctgaatataagaacactgttgattcattctttgaaaatcaagcacatatggatttaaaaggagtaaattccaaaataatcactgccaatgaagtgaataaaatttcaagtacaataactggaaaaagttataattcaaatcagattttctcatcagcactagttgatttaggagataatgataaccttaaagttagcgtagacaaatcaaaaattaccacaataactggagatatgtatctctccgcattaaaatcagcaggaattacaaatggccatgtatatataacaagtcccgttactgcgactggtgaatctgctttagcgggaattatgaattcatatgaagtagctactgatgttgaaattcccgcaccggttaaagaagctgcaaacaaagagatttatacacaagcggaaattgtaaaagagtcaaatgttagtgccgatgacttatcaaacttggttgatgatgtaaaagaaaccgttaaagaagaaaacattacagattaccagacaatagtaaatataatcaataacactaccattaattacaatatcaatttaacatacaatgatattgaaaaccttgctgaaagtattgaacaaatacaaaatgttcagggagatattaacagttaccagacagaagtaaatgatgtgctaaatactaccgatacatcaaatactggatttttagacgggctattcaactaa

SEQ ID NO: 7998 - DNA, 324 bp, Methanobrevibacter gottschalkii
  source 1..324: mol_type = genomic DNA
atggaacatattacgtatgatgatgttgttgagtataatcatttatttactctagtgccttcttttgtattggaaaaaatggccaaaaagaattccaatttagttgataagtttgaatcagcaattcagtcccatataaatgatttaactgttgaacaaagaatcaaattaaatattatccttgatagtgatgtttcagaattgcaagatttaatgtataatgcatatatgaggacaaataaaaaacaatatcagatattggctaatcctaagtataaacagttcattgagttaaatttaggggaattgcggaaaataatataa

SEQ ID NO: 7999 - DNA, 531 bp, Methanobrevibacter gottschalkii
  source 1..531: mol_type = genomic DNA
atggatgctattgaagcagttgcaatcttaattttagttgttgctatttttattttagtttattattatttgctaaatagtccatcttctatggataaattaaaaaacattgtacctgaaagtgcagatgcgcacatggacgaagttttaggtaaaaataatgttgattcaagttatgatttatctaaagaagatgttttaggtgataaagaggaatctgaatcaatgggtaaaagaataaaagttaaattaagtgatattgatggttctactattaacactagcgcattttcccataaacttgatgcatttttagatcaaaaaagtgatcaattaattaaagactggtctttagccactacaaacgatttggataatcttcaagctaaatttgatgaaactactaataatgtagatactttagaaaaaaatttcaatgagtttaaacaatcatctgaagaattccaaaaaatcactggggaaagattggatgatttggataaaagaatagaatctttagaaaataaataa

SEQ ID NO: 8000 - DNA, 411 bp, Methanobrevibacter gottschalkii
  source 1..411: mol_type = genomic DNA
atggaagctattcctacaatacctgatcaaattttttatttgataattctggtaattgttgctattgtattgatagttattgtttttcaatggaaaaaagttgcacaatcaaaaaattcaattttaattcttgaaaaagaaattgaacttaaaaaaatgtctatggtggaaaaagacattgaatctaaaaggttaatggacaatccaattccattacctcaagagcaacaggacagtctttcagctattaggcaatctacaactgaagtgagaagtaatgttggttatcttcactctgagattaatgaaagattagccagactcgaagctgaaaccgaacaaagaaagttagaaaaaatgcttaaagaaattgaagcaaaagagaaaaaacttagtaaaatgaataaatag

SEQ ID NO: 8001 - DNA, 918 bp, Methanobrevibacter gottschalkii
  source 1..918: mol_type = genomic DNA
atgatggaatcttatataaaagctggaaaaattgtttcaaaaatacgtagtgaagcttcaaaaatgattgtagatggagcattagttatagaccttgtaaactacgtggaaagtgaaatattaaaaactggtgctgaaattgcattcccatgtaatgtatcaataaatgaaattgcagctcattatacttcccctattagagatgaaactgcatttaaagcaggtgacatggtgaaattagatttaggtgcaatggtagatggatgtattgcagattcagcagttacaatcatagctaatgggaatattgatgaaaattacagtcaagatgaaattaatctacatgaggaaatccaagaagcatctgcagcaggtcttgaagctgcaatcgctacagcaagagcaggaattgaagtttcgaaaataggtgctgcagtccatgaagcaattgcggaataccatttaaatccgatattcaatttaactggacatagcttagaacagtacaatttacatgcaggcatttccattccaaattatgacaaccacgacaattatattttagaggaaggtcaagccattgcaattgaaccttttgcaaccaatggagaaggtattgtaaatgatgcgccagggcattatatattttcatacatggcaaataaaccattcagaatgaaaagcactcaaaaagttttaaaatatattcaacacaaccacagagatgttccattttctggaagatggataaccaatgaatttggagaaagaaaaggatcaatcgctttaaagcaactatcagaatccatggcaatttatccatatgcccctcttcgtgaaaaagagaattgttttgtaagtcaaaaagagcatacagtaattattgaaaaagaaggttgtactgttacaactatatag

SEQ ID NO: 8002 - DNA, 852 bp, Methanobrevibacter gottschalkii
  source 1..852: mol_type = genomic DNA
atgccattaggtaattataaagaagcaatctcagcaagagctactgagaaaaaaatcctagatgtatcacaagatggaggaattgtatctgcattgctttgttatgcacttgatgaaggaaaaattgaaggtgctgttgtagctggaactcctgatgatgattggagacctgttcctactgttgtaacttcatctgatgaagtaattgcaaatgctggaactaaatattcaatgtctcctactttagctgtattaaaagaagcaactcgtcaatacggtcttgaaaaaattggagttgtagcaacaccatgtcaaatccaagggttaagaaaagcacaagcttatccattcacaagatttgtcgttaataaaattaatttaatcattggtatttattgtatggaaaacttccctatggcttctcttgacacttttgctactgcaaaattaggatttgataagttaactgatgctactaaaatggacattggtaaaggaaaattctggttaacaaaagatggagaagattctggtttaaaacttaaagaaactcatggttatgaacaatcaggatgtaacatttgtactgattatgttgctgaatgggctgacatatctactggttctgtaggatctccagatggatggtctaccgttttaactagaaccgatgatggtaatagtatatttaaagaagcagtttctgctggtttaattgaaacaaaacctgttgacgatggaaaattcggtcttcctttacttgaaaaattagctaaaggtaaaaaagacaaaaacggtgcagaatttgaaagaagagcaaaaatgggagttagagttcctactatatattaa

SEQ ID NO: 8003 - DNA, 843 bp, Methanobrevibacter gottschalkii
  source 1..843: mol_type = genomic DNA
atgtttgataaattaaaaaaagcttttggcggttcagctgaacctgctccaaaagtagatgaaaaagttgaagaggttgctcctgtagaaacaaaagcacctgcagaagaacctaaagcagcttcatcaaaaccacgtattggttacatacacttaagtggttgtactggagatgcaatgtctttaaccgaaaattatgatatcttatccactgttttgactgatatggttgatattgtatatggacaaactttagttgataaatggattcacggaacttatgctgaagaaatgcctgaaatggacttatgtttaattgaaggttctgtatgtttacaagatgaacatagtgtacatgaacttttagaagcaaggaaaaaagctggtttaattgcagcattcgggtcttgtgctattactggttgtttcactacttattcacgtggaggacaacaagctcaacctagccatgaatctttcttaccaattggttctttagttaaagtggatgtagcacttcctggttgtcctgttgcacctgaaatgattgcaaaaactatagttgcattatgtgaaggcgacttagactatttaaaacctgcaatggattgggctgcatgtgataaaggatgtggttgtgacgtattaaccaatgtagttcgccaaggattatgtactggttgtggaacttgtgctcttgcttgtccaactagagcaatgggcttctcagaaggtagacctagctgtgataaagacagatgtattaaatgtggatcttgttatatgatgtgtccaaggtcatggttgcctgaaggaagaattaaaaaggaaacaggactttag

SEQ ID NO: 8004 - DNA, 570 bp, Methanobrevibacter gottschalkii
  source 1..570: mol_type = genomic DNA
atgccttatgattcggatataatcgttattggatgtggaaatatattatttaaagatgatggctacggtccaatagttattaatcttttacaaaaatattttaatgataaaaatgattattatgatccggcggttacttcgtatgttgaagatgaatttgataagaatgttttaaatcaaatcaaagaaaaatttgaaggtgtaactttaccagatagtgtgcagtttattgatggaggaactgcagcaccaatgaacttctttccgttatacaaagagtatgactggaaaaaattgattgttattgatgtagttgaatcaaatgccgaacctggaactgtgggcatatttgatcctaatgctatgcaagtaggaaaatatgataatcctcatggtatgactgttgaagagccacttcaaaagatttctgaaaaatgtgaagttgtaattgttggttgtaaacctgcttctatcccaatacctgacatcgatgtgggtttgtctgaatctgtagaaaaggcaattcctgaagctattgatattattttaaaagaaatcggggtaaaataa

SEQ ID NO: 8005 - DNA, 1215 bp, Methanobrevibacter gottschalkii
  source 1..1215: mol_type = genomic DNA
ttgaaagatagagtagttatatctcctacaactcgtcaagaaggccatgccgaattagtcatggaagttgatgatgaggggatagttacaaaaggtatgtatttaagtataactccggttaggggtttagaaaagatggttcttgacaaagctcctgaatctgctgttgttttatgtcaaagaatttgtggtgtttgtccaattccacatactttggcttctgcagaagcaatggatatggctttaggaatcgaaattcctaaaaatgctaaattgttaagaaaagctactttagcagcacacaacattaacagtgcagctattcaccagtttttaattgcaactgattttgtacctgaaaatttattcgctacagctgttgacagtgtaagtgaagtaagaaaaacagtacaatatgttgtagacatgattgctggtgaaggtatccacccatctgatgtaagagttggtggaatggctagaaacattactccattcactaaagaaagattaatcgaaagaatgactgcactcagaccaaaactcgaagaacacattgaactaatcaaaaactgtgttgttgaaaaaggtttacctgatgatttaggtgtaataaacagaccattaatggcaactgatgcaacttatggaaccaacgatttcgatatggacgttttctcagaagttttacctgaagcttggtatgatgaccctgaaattggtaaaaaggcttgttctgtaattccattaattaatggtgaaaatgttgaaactggtcctagagcaagaatggaaaaatttgctggatttaaaggtaaaggtgtaaatgcacaacatgtggctcgtgcagatgaaatgttaaaaaactacgatgcatgtatggaagctttggatgcaattgatcctgctgctcctgcaaaagtaagttatgataaaagaggaactggagaacttggttttggtgtaattgaaggtcctaggggaaccaatgtacatatggctaaggttgtcgaaggaaaaactaaattctactctgctattgtaccaactacttggaacattcctacaatgggaccagctactgaaggattccatcacgagtatggaccacatgttatcagagcatatgatccttgtttatcatgtgctactcacgtaatggttgttgacgatgaagataaatccattctcaagaatgaaatggtgagaatataa

SEQ ID NO: 8006 - DNA, 528 bp, Methanobrevibacter gottschalkii
  source 1..528: mol_type = genomic DNA
ttggataaagcaaacataattatttcaatcattatcgttttatgtgttgcagcagcagttgcggcatatggtattacaaatagcgataatccaatcttttctgacttatccagtatgtcagcaaatgataatgatgctggaaatggaataggaaataatacagttacaggaaatggaagtggaaatacaatagcaaccacatccggttcaggaagtggatccagcagtagttcaagctccggaagcggatcaggttcaggatctggaagtggatccagcagtagttcaagctccggaagcggatcaggttcgggatctggaggaggatccaatagtaactcaagaacacatttatcatattcagaagcaaaaagtattgcaaatgatgctattgaagaagctggatgttatgcaggaagtggatcatattctggaggatactggtactttactgtatatgatgcaaatggtaataatgtagacaccataagtgttaatgacaacactggtgctaccggaagaggataa

SEQ ID NO: 8007 - DNA, 1179 bp, Methanobrevibacter gottschalkii
  source 1..1179: mol_type = genomic DNA
atgttagtaaatgctgattttcatgttcatagttgtttttcaatggcatcatcaaaagacatgttaataaagaacatggctgctaaatctaagttaaaaggtttaaatcttttaggaactggtgatgcgtttcatcctaattggttagatatgattgaggaaagtacagtatattgtggggatggaatttataatagtgatgatatgaattttgttttaacaacagaagttgaaggaagaaatagaattcatcatttaattattattccaaatattgatattgctcgtgaactgtcatataagcttccatctaaaaataaaaaaatcgatggtagaccaaaaaccaatttatctggaattgaactgttagagttggttcgggattatgattgtttgattggtcctgcccatgcatttactccgtggactggaatgtataaatcgtatgatagtatttatgattgttatgaaaaaagagtggattttgtagaattaggtttatctgccgatacgttcatggcggatagaatttcagaacttaaagattttccttttctcactaattcggatgcacattctccatggcctcatagattgggcagggaatttaatcaaatagagcttaaagatatttctttttcttcaataaaaaatgcatttaaacataacaagattaaagctaattatggtttggtgccgaacttaggaaaatatcacatgactgcatgtactaaatgttataatttgattgatcctatgattgctcatgaaaataaaatgaaatgtagctgtggcggaaccattaaaaaaggagttgactttagaatttctgaaattgctgactatgataaacctaaacacccggcgttcagaccaaaatatgttcatttgatgcctttggcagaaataatctcttctgtttatgagaaaggcgtcactacaaaaacagttcaaggtaaatggcagaagctgattgataattttggcacagaaattgatgttttaattaatgtcagcttggatgatatagaaaaaattgatttaaatattgctccagctattaatgcatttagaaatggtgaaataaatgttattcctggtggtgggggtaaatatggtcagatttcttttgataaaataaaaaaacaagataaaattgttactttagataatttttaa

SEQ ID NO: 8008 - DNA, 771 bp, Methanobrevibacter gottschalkii
  source 1..771: mol_type = genomic DNA
gtgaacactgctgaaataaatattttaaaagaaatcgaacttgaaaatcctattttcattgaagcattgccgggtcttggacatgttggtaaattggctgcagatcatatgattgatgaattgaatgcaaccaaatttgctgaaatttattccccagcttttccacctcaagttcttattaaagaggatgggattataggtaatatgcttaatgagttatattatttaaaagatgttggtgaagacaatttggatttaatcgttcttgttggtaacactcaagctttatctcctgaaggacaatatttggtctgtaaagatattttagattttgttaaaggttatggaataactagaatgttcactatgggtggaatggctatacctcagcctgttgaaaatcctaaagtttatggtgcggctagtgatgaagctactattgaattattaaaagaagccggaattgaaatcagatctaatgatgggggtattgttggcgcttctggtttatttttaggtttaggaattcgtcagggaattcagggggcttgtcttatgggtgaaactccaggatatttcattgatgccgaatctgctgaagctattttgaaaaaattatcattattacttaattttgaaatcaatactgataaattagatgaaagagctgaagaaaccagacaaatgattgctaaagctcaacaaatggaacaagatttgattaataaggctaatactggaaatgccgatgatttaagatatattggataa

SEQ ID NO: 8009 - DNA, 162 bp, Methanobrevibacter gottschalkii
  source 1..162: mol_type = genomic DNA
atgaaaatgaataaatgtcctgaatgtggaatttatactttaaaagattcctgccctaaatgcggcgggaaacttaaagttatttatcctcctaaattttctgttgaggataaatatggaaaatatcgtcgtattttgaaaaaagaatcaatgaaggagtaa

SEQ ID NO: 8010 - DNA, 801 bp, Methanobrevibacter gottschalkii
  source 1..801: mol_type = genomic DNA
atggtaagaaaaagtcaagaatggcctgatgaaggggaacttattgttggtactgtttataaagttcttaattatggggcttttgctaaattagaagaatatcagggcaaagaagcttttattcatatttctgaagtgtcttctggttgggttaaaaacatcagagatcatgtaagggaaaatcaaaaaattgtttgtcgtgttctcagagtcaatcctaaaaaggggcatgttgatgcttctttaaaaagaattcgtgaagaccaaagaactaaaaaaatccaacattggaaaatagagcaaaaagctgaaaaattcttagaattatctgcaaaatcattggataaaagtttggatgatgcttatgatgaagtaggttatgaactcatggatatctttggagatgtttatggtgcttttgaaactgcttctgaagaaggtgcgggttcacttactgaagaaggaattccgcaagattgggctgatgctattactgaagtagcgcagagaaatatcactcctcctgaagttcacattagtggttatgtcgatattgaaactttcgtacctaatggtgttgaaattatcattgatgcacttaaagctgctgaagataatggtgatgaagaggaagaaattaaagtccaatgtgttggtgcaccaagatacaggattactgtaaaatctactgattacatattggctgaaaaagctcttaaagccgcagctgatagatgtattgcagttattgaagaatctgaaggtaacggttcttttctaagagagttagataataattag

SEQ ID NO: 8011 - DNA, 180 bp, Methanobrevibacter gottschalkii
  source 1..180: mol_type = genomic DNA
atggttagtaaaggtagaggaaactttttaaaagttaaatgtttggattgtgacaatgaacaagtaatatttgatcgtgcagcatctgatgttaaatgtattatttgtggtaaaactcttgtcaaatctcgcggtgctaaagctaaaatcactgcacatattgaaaaagttttaaactag

SEQ ID NO: 8012 - DNA, 279 bp, Methanobrevibacter gottschalkii
  source 1..279: mol_type = genomic DNA
atgaaaataccaaaagaaaaaagaacttactgtccgcactgtaaaaaacacacaatgcatgaagttcacactgctaaaaaaagaaaagctagtgaattaacttggggacaaagacaattcagacgtgtaactgctggttacagaggttatccaagacctttacctgctggaaataaacctgttaaaaaattagatttaagactcaaatgtaaagaatgcggtaaatctcatattaaacaatctttcagaacaggaaaacctgaatttgtagctaaatag

SEQ ID NO: 8013 - DNA, 876 bp, Methanobrevibacter gottschalkii
  source 1..876: mol_type = genomic DNA
gtggatcaattttatcaagaattgcgtaaaattcaaaaaaaagagcgtaataatggtactttagctcgtgtagatgaaaatttttatgcaagtattcatgaatatttggatgagttaaggcaagaagcaatcagagatccattttctaatattcatggaatgcttaaagaagctcaaattattgcaactgagatttgtgaaagaagagaacataaaataactgatgctgcagttgtaaatatccatagatcttatcggctgttcactggaaaacctaaatttgatttagttgatactactcctcttaatttaactcctgaagaggaaaaattttatttttctttattggataccttaaaaaatcataggggaaatatttctttagaaaaattatccgatgatgatgaatttgttaaacctaaagaaactcaaactaacacattggtgccaaaacatgatgaaattaagcctaaagttagtaatttaacacatgataatgaatctgaagatgaagttttaaatcgtttagatgagattagtagggcaaaaccactaaaaaaagaaccgttagaacctaaaatcgaatctaaaacaatgtccattccaaaaactcaggctggaaatattcctgagaaaagtattgagataaatcctaatgcttttgataaacaagatgaattttatgatttggagtctaaaaagttagctagggatacagaacttgttactatgttggtttttgatgagattaatccgattgtgggtgttgatgaaaaagtctatggtccattcagacctcaagacttggtgactttgcctttgataaatgcaaaagtatttttcaaaaatagaaaaggtcgtcaaattaaaatttaa

SEQ ID NO: 8014 - DNA, 735 bp, Methanobrevibacter gottschalkii
  source 1..735: mol_type = genomic DNA
atgtttaaagcagaattaagtgattctagtatactaaaaaccagttttgatgctatttcatctattgttgatgaagtacaaattcaaactgatagtgaaggcatgagattagatgccttagatcgtagtcacataactttcgtacatttggagcttaaatcaagtttatttgatgaatatgtttgtgatgttcctgaaaaaattaatattgatactgatgaattcatgagaattcttaaaagagctaaatcacaagacagagtattgatgtctttagatgaaggtaatttcattatcacttttgaaggcgatgctacaagaactttcaaaattagattaattgatatggaatatgataatcctgttccgcctcaaattgatcacccaacaaaatttaaagtacgcttttcaattttaaaggattgtattaatgatattgatattttttcagataaaatagctttacaagttgatgaagattactttatggcatctgctgatggtgaatttggtgatgcaagtattaaatatcttcacggcgaaaatattcaagaacatgcaaaatctttattctcattagataagattagagaaatgctcaaagcagataaattttcagaggaagctgaaattagtttaggcaatgacatgccattaagtttaactcttaatatggttactggtgatggtaaacttagtttcttgcttgctcctagattagaaacagatgattaa

SEQ ID NO: 8015 - DNA, 774 bp, Methanobrevibacter gottschalkii
  source 1..774: mol_type = genomic DNA
atgagtaaaatagctgatgcatttaaaaatggaactgcattcattggttttttaactgcaggggacccgacaattgataaaactgttgaatatattctggcaatggaagaagcaggttgtgatttgatagaaattggaattccattttctgatccaatggctgaaggtgttgtaattcaagatgcaaatgtacgtgccttaaagcataatacaacagcagatgatgtatttggtattgtaaagagagtccgtgagaaaactgacattcctttagtatttttaacttatattaatcctgttttcttttatgggtatgaagagttttttaagaaatgtggagaattaggagtcgatggcatcatatctccagacttgccttatgaggaaaaaggtgagattaaagatattgctcttgaaaatggtgtagatgttatttcattaattgctcccacttcaagtgaaagaattaagatgattgcgggtgatgctactggatttatttatgtggtgtcttcattaggggttactggaatgcgtagtgaaatcaaaacagacttaaattctatattgaaagatattcgtgaagtaactgatttaccattagcagttggttttggtattaacacgcctaaacaagctgaagatatttctaaaattgctgatggtgttatagtgggaagtgcgattgtaaaaataattgaagaacatggagaaaatgctacaaaatatttaaaagaatatgtttcttgcatgaaaaaggcctgcaataaataa

SEQ ID NO: 8016 - DNA, 1185 bp, Methanobrevibacter gottschalkii
  source 1..1185: mol_type = genomic DNA
ttgagtaaaggaagatatggagaatatggtgggcagtacatatctgaaacattaatgaatgaattgatttatttggaggaacaatacaaccattacatgagtgatcctggttttgtagaagagcttgacatgttattaaaagagtatgcaggacgtccttctttattatattatgctgaaagaatgacaaaagatcttggtggggctaaaatttatttaaaacgtgaagatttaaaccacacaggagctcataaaattaataatgttttaggtcaggttctgcttgctaaaaaaatgggaaaaacaagagttattgctgaaactggtgctggtcaacatggtgtggctactgcaactgctgctgcacttttggatatggaatgtgaagtatttatgggtgaactggatactaaacgacaagctttaaatgtttataggatggaacttttaggggcaaaagttcattcagtaaaatccggaactaaaactttaaaagatgcagtaaatgatgcatttagagattggattgctcgtgttcatgataccaattatgtaattggttcaacaatgggtccccatccatttccaatgatagttcgtgattttcaagcagtaattagtgctgaagcacgtgaacaatttttagaaaaagaaggaaggctccctgctgctgttgttgcatgtgttggtggtggaagtaatgctatgggtgctttttataattttattgatgacgatgaagttaagctaataggatgtgaagctggtggaaaaggtattgatacaccttacaatgcagcagcattaaccaaaggtaaaattgggattttccatgggatgaaatcaatatttaatcaaagtaattatggtcagattgcgccagtacattcggtttctgcagggcttgattatccgggtgttggtccggagcatgcttatttaagggatattggtagggcagaatatgttcctgtaactgatgaagaagcagttaccgcatttgaatatttatcaaaaatggaaggtattattcctgctattgaaagtgcacatgccgttgcccatgtcatgaaaatagcaccattaatggacaaagaagatattataatgatttgtctttcaggaagaggggacaaggatgtcagatcaattgcggaatataggggagttgaattaaatgagtaa

SEQ ID NO: 8017 - DNA, 600 bp, Methanobrevibacter gottschalkii
  source 1..600: mol_type = genomic DNA
atggttaaaatcaaaatttgtggaattaaaagattagaagatattgaaattgtaaataagtataatcccgattatattggatttgtttttgcagattcaaaaagaaagatttcgcatgatttggctaaaagattaaaagataatttgaattcaaatatcctttctgttggtgtttttgtcaattcatcaaaagatgaaatactgggtttatttaatgagggcataattgaaattgcacaacttcatggtaatgaaagtgaagaatatataattgatataaaagaaaggactaattatgaactaaaaattataaatgctattgaaatgtcgcaggatattgatttattgaaatatgataaatctttagcagattatttattgctggacagtggtaaaggaagtggaaaaacttttgactggcaattgataagaaatgatttaaaaaagaacttttttttagctggtggattaaatatccaaaatgttcgtgaagctattcatgaatgtaatccgtatgcaatagatttaagttctggtcttgaaactgatggatttaaagatgaaatgaagattaaggaaattatggaggttataaattga

SEQ ID NO: 8018 - DNA, 777 bp, Methanobrevibacter gottschalkii
  source 1..777: mol_type = genomic DNA
atgttatgtgaaattgtcgaaaaaactaaagaaagggttgaacaagctaaaaaatcaattcctcttgatgaaattaaaaaagaagtttcttcaatggaaatgacagatgagtttccttttaaaaaagcattaatggaggatggaatttcaattattgctgaagttaaaaaagcatctccttctaaaggtttaattgctgagaattttgatcatgtgaatattgcaaaagattatgaacaggctggcgcttctgcaatttcagtcttaacagaacctttctttttcatgggatctaatgagtatttaagtgaaatttctgaaaatgtttccattccaattttaagaaaggattttgttgttgatgaatatatgatttgggaagctaaattgctaggtgcttctgccatattattaatagtttctatacttgatgttgttcaattaaagaaatatttgaatttggcacatgatttggggctttcggtcattgttgaaacacatgatgctgacgaaattagaatggcaatgattgttggggcggaaattattggtgtcaataatagaaatttaaaagatttcactgtaaatattgaaaatagtattaatctacgtagatgtgtaagtggcgatgttatatttgtttcagaaagcggtattaaaacaaaagatgatgtcactaaattaaaagaaaatgatgttgatgctgttttaattggcgaaactttaatgaaaagtaatgataaaaggtccatgatttcggagttaaaaaatggttaa

SEQ ID NO: 8019 - DNA, 1008 bp, Methanobrevibacter gottschalkii
  source 1..1008: mol_type = genomic DNA
atgattaaagaagctattttaaaagtatacaaaaatcaagatttaactcatgatgaggcatttcaaactatggatgaaattatgagtggtgaagcaagtgaagttcagatgagtgcttatttaactgccatgtctatgaaaggagagactataactgaaattactgcttctgctgaagctatgagggctcattgtgtaaggttattaaatgacagggaagttttagaaattgttggaaccggtggggatggttcaaatacattcaatatttctactacttcttcaattgttatatctgcagcgggggttcctgttgcaaaacatgggaacagatccgcttcaagcaaatgtggtgcagcggatgttttggaacagttaggtgtaaacatttatattgaacctgaaaaaagtataaaatgtttagaaaaaataaatctatgtttcttgtttgctcaaaattatcatttatcaatgaaatatgtggctaatgttcgtaaagaactttcaattaggacaatatttaatatcttaggtcctttgactaatcctgctggggctacaatgcaggtattgggggtttatgaaaaagaacttgccgaacctttaattgatgtattaaaaaatttaggagtttcatcggctgtgtctgtttatggaatggatggaatggatgagatttcagctagtgataaaacttttgtgtgtgaacttaaagatggcaaaacaatgtcttatgaaatttcaccagaattatttggcatggaattagcatcaaaagatgatcttgttggtggaaatgctcgtgaaaatgcagaaattacattatctatcttaaaaggtgaaaaaggaccaagaagaaatgcagttttattaaattctgctgcaggtttatatgttgcaggtaaagttgaatccttaagagatggtgttgaccttgcagctgaggtaattgattctggaaaagcattaaaacaacttgaaaactttattgaatttacaaacagctga

SEQ ID NO: 8020 - DNA, 585 bp, Methanobrevibacter gottschalkii
  source 1..585: mol_type = genomic DNA
atgattcttttaatagataattacgatagtttttcatacaatttataccaactaattggagaagtcatgaaggatattcaggtttatagaaatgacaaaataacagtcgaagagataaaagatttagctccggaggcaattgttttatctccgggtcccggaaaacctgaaaatgcaggaatctgtattgatgtagttaaagaatttcatgataaaatacctattgttggtgtttgcttaggtcatcaagcaatctgtgcagcttttggaggtaatatttctcatgctaaacgattgatgcatggcaaatcttcaaaaatctctctccattatgatttcatatttaaaggattgccaagtgagataagtgtcggaagatatcattctttaagtctaattgaagacacgcttccagattgcttagaaattatttcaaaggctaaagatgatggtgaaatcatggcagttaaacataaggaatttaatgtttacggacttcaatttcacccggaatcaatactaactccagacggtttgactattatagaaaattttgcagaaaaagttgaaagagggatattatga

SEQ ID NO: 8021 - DNA, 1524 bp, Methanobrevibacter gottschalkii
  source 1..1524: mol_type = genomic DNA
atgatgatgaaaatattaagtgatactatgttttccccaagtttagaagaagtaatagaaataggaaaaaacgaagaatataaaaggattccaatatcttatgaactattttcagatattgccactcctattgaagttttaagaattctgaaaggtataagtaatcatacttacatgttagaaagcgttgaagattcaaaaaaatggggaagatacagttttttaggttttgatccactactggaagtcacttgtcatgacaatatggttcatatcagaggggataaggagttcaatgaattaactgatgaggaaacaataattgaaactaatgttccaagtgatgtgattaaagatttagttagtaaaaataaatctccaaaacttgagtacttgccaccatttactggaggttttgtcggatattttgcatatgactatattaaatatagtgagccttctcttaatttagatgccgagaatcaagatcaattcaaagacattgatctgatgttatttgataaggttattgcatttgataacttcaaacaaaagattattattataatcaacatgaaaactgatgatttagaatgtaattataaaaaagcatgtgagaatctaaaaaatatagcaaatttgatcagaactggtaaaaaagcagaaatacaaccacttaatttaaaatcagaatttacaccagttttttcacgtgaaaaatattgtgaaatggtcaaaaaagctaaggaatatatttatgagggggatatatttcaagttgttctctcaaatagaattgaagcagatatttctggaagcttgtttgatacatacagggttttaagaacaactaatccctctccttacatgttttatttttcaagtaatgatattgaaatagctggcgcttcacctgaaacattagttaaattaactgataatcaattatacacatttccgcttgccggaacaaggcctcgtggaaaaactgaagaagaagacttgatgttcgaaaaagaattacttgcagatgaaaaggaactggctgaacataatatgttagttgatttaggtcgtaatgatattggaaaaatatctgaaatcggctctgtaagtgttgataaatatttatctgttgagaaattttcacatgtgatgcatatcggatcaacggttagcggaacattaagaagcgatttggattcactttcagctattgattcgattctccctgcaggaactttatctggtgctccaaaattaagggcttgtgagataattaatgagcttgaaaataataagagaggaatatatggtggagctataggatatgtggatttaagtggaaatattgatacttgcatatcaattaggattgcatttgctcgtaataataaagttttcatccgttcaggtgcaggaattgttgcagatagcgttccagataatgaatttgatgaatgtttaaataaagcggccgctgtaattaatgctttgaaaattgctgatggaggtattttatga

SEQ ID NO: 8022 - DNA, 402 bp, Methanobrevibacter gottschalkii
  source 1..402: mol_type = genomic DNA
atggatttaagaaaaataggcattctattaatatttgttggaatttttgttacaattttttttataaatgatgataaactttttgttcctgcattgactgtgactgttttaggattttttgtaactgttgtaggttttgtcattgaaattagaaaacaaaaaattaaaaacgacagattggaaaaagatatagaatctattcttcaaccattgattactgaatattcaaatcttaacaaacagtatcgtatggattttcaaggggatgaatacactcaaaaaaggattcagttaaatcgtgatttggaaaaggaaatcacagataagattccatatttggaaagtagggaaattaaaaaaattgtaattcagtttagtcaagaacaggacaaaatgaattaa

SEQ ID NO: 8023 - DNA, 777 bp, Methanobrevibacter gottschalkii
  source 1..777: mol_type = genomic DNA
atgtcttcacttaacgaaaaacttaaattagttaccttaaagggtttattgatttttatttttttcatatttcttattaatgtgttgctgggttcattaaaccttattcaaattaataatgcttggatttatatttttgttattttttattttatttttaaacttagagagggattttcaagttttaagcatgattttttaaaagttttcacatttgaatcgttaaaaattatttcagcaatcgtaattttaaatgtttttatttcttatgggctgctttatttgtcagactttattttaaatgtttttcccaatttaaattcaattgttatgtcttctgaatatattaacaattctttatttgttttttacggggttataacaacagtttttatttcacctatttcagaagagttaatttttagaggagttttgttaaatagactaaatttaattattccattggatttttcaattgtaattacatctattttgtttgcatcgctacatagttttggaagcattactgcagcatttatttttgctgtttgtatggctgttttatatttaagaacagataatattttagttccaatttttgcacactttttaaataatttaattgctgaaattattgttattgctgatgtgggtaatatgttatttacaaataatgttgttatgctgataatgtcagttttagcaatcatttcaacttttttaatcttaattctgattaaaaagcaatggaatatattaaatattaataaattatag

SEQ ID NO: 8024 - DNA, 204 bp, Methanobrevibacter gottschalkii
  source 1..204: mol_type = genomic DNA
ttggaaacaagaatacgaaagtttcgccaagaaaagggcatgactcagcaacatcttgctgaattggttggtgtgactcgtcagacaataaatgctttagaaaatgctcgctataatccttccttattattatcctatcatattactaagatattggggaaagctgctattgaagatgtttttatattcaatgaagatgattga

SEQ ID NO: 8025 - DNA, 1350 bp, Methanobrevibacter gottschalkii
  source 1..1350: mol_type = genomic DNA
atggctatacatcctattgaattcagatatgggactcctgaaatgaaaaatatttgggaagaagaaaataaattacaaagaatgttagatgttgaatccgcattagctcaagctgaaggtaaacttggaattatccctcaagaagtggctgatgaaatttcatcaaaagctaacacaaaatatgttaaattaacaagaatgaaagaaattgaagctgcaactaatcatgatattgcagcattatcaaaatcaattacagaagtttgtgaaaatggcgcaggagaatatgtgcactttggagcaacatccaatgatattgttgacagttcaaattcattattaattaaagattcaattaatgtattaaaagaaaaattagaaaaattaactaaaatcatgctagacttagcaagtgaaaacaaaatgaaagtatgtattggacgaactcacggacaacatgctcttccaacaacttacggaatgaaatttgctctatgggcagatgaactccacaggcaatatgacagattagaacatgccgaatcaaatgtatgtgttggaatgatggatggtgcagtaggtacaactgcagcattaggagaacaaggttgggaaatccataaaactgttgcagaaattttaggtttgcctgcagcaacaattacgaatcaggttgtccaaagagacaatcatgttgaattcattagtgtattagctaatattgcaagtactttagataaaattggacttgaaattagaagtttacaaagaactgaaattatggaattaggcgagtacttcgatcctgaaaaacaagtaggaagtagcactatgcctcacaaaatgaatccaattacggctgaaagaatctgcggcgttgcaagaatcgttaaatcatatgtaaatgcggcattagacaacaatccactttggcacgaaagagatctgacaaattcatcttgtgaaagaataatgtttccagaaagttgtattttaactgattacattttaaacttaacaattaaattaatgagcaatctcgtattctacgatgaaaatatcgaaagaaacttaaatttcacccatggtttggttatggctgaaagattaatggcagaacttactcgtgcaggaatgggaaaacaaactgcttacggaattgtaagaaaaaatgctattaaagccaataaagaaaaattattacttggagagttaattttagaagatgaagaagttaaaaaataccttactaaagaagatgttgataaaataatggatcctcatacatataccggatctataccaaccattattgatgaattacttgaaaaatcaaaagagtggttttaa

SEQ ID NO: 8026 - DNA, 2493 bp, Methanobrevibacter gottschalkii
  source 1..2493: mol_type = genomic DNA
atggcttatctcaaaagaatggatttgccaattgaaggaatgcattgcgcttcttgtgtattaagtgttaataaaactttcggaaaaattgaaggtgtagaagaagttgatgctgatttagcggcaaataggttacatattacaataaatcctaaaaaaatttcttatgaagaaatggaaagattagttaaaaatttaggttttgaacttcactctgatgaaatgactttaagaattcagggtatgcattgcgcatcgtgtactatgaatgtcgaaaattttttaattagagtagatggtatttttgatgttaaagctgatttaacatctcagactgcaaaaataagatatgattcatctaaactggatatgaatgaggttgaaaaagtaattgaatccttaggttttgaacttttaggtattgagggtcaaactgaaattgatgaggaagcaatttatcaacaggatctaaaagataaactcactagaattatcgtaggcgtagtatttactgctattttgatgattttaatgtttagtggatgggatccattaatggggcctattgctagtttaaatcaagtcactggtcttcatatttctgcaatgggattactgtcattaattgtaagtatcggaccatttatttacatttcattaccaattttaaaagcaggatggaatggattaagccataaaaacttgaacatggatgtaatgtattcaatgggtattatggttgcttacgtttcaagtatttttggaacatttggtatagtattggatcacactttcatgttttatgattctgcggttatgcttcctgcatttttaatgattggaagatacttggaagcaagggctaaaaaaagaacttctgattcaattcgtgaattgattgggcttcaacctacagttgcaatttcaattgaagtcgatgaaaacggagaaattacatctcaaaaggaagtgtctattgcagatattgtattaaatgatttattgcttgtaaaacctggtgaaaagattcctgttgatggtgatgttgttggcggagaatcttgtgtggatgaatcaatgattaatggtgaaccaattcctaaagtaaaaaaagatggtgaagaggtgtttgcaggcactattaatcaggatggagtattatatattaaagctaaaaaaattggaaaagaaacggtactttcgaacattatccgtttggttgaaaaagcacaatcttcaagacctccagttcaaaaattcgcaaatactattgtatcatactttattccagttattttaacaatagctattgttgtattcttaatctggtactttgtacttggagaaacattgctattctcacttacctgcttaatttccattttagttgtggcatgtccatgtgcattaggtcttgcaactccaactgcagttactgtaggtgttggaagggctgctgaattcggaatcttaattaaaaatggtgatacattagaaaatgcaggacagcttgatgtagcagcatttgataaaactggaactataactgaaggaaaacctgaagtggatgatattattgcatatgctacttctgaagaagatttaattaaacttgtagcaagtgttgagcaaaattcaacccatccaattgcaaaagctattgttaataaagcaaaagagttgaatattgaattagatcagactactagttttgaaaatgtcactggtaaaggtttaaaagctgaaatcaattctaaagaaattcttgcaggtaatttagctttaatggaatcagaaaatgttgaagtttcttcaaaacttgctgataaatattatgaacttgagaaattatctaaaacaattattttccttgctgaagataaaactgttaaaggtattttaagtctatcagataagatcaaagaaaattctagaagaaccattgaagaattgcataaaatgggtgttcaaacatatatgctaactggagataacgaatctactgcattaaatgtggctcgtgaagttggtattgataatgtaaaagcgagtgttcttcctgaaaataaattggagattgttaaagatgctcaatcaaatcacactaagaaagttttatttgttggagatggaattaacgatgctcctgcacttacacaagcagatattggtgtagctatgggtaatggtactgatattgcaatggaaagtggagatgttgttgttatggaaggtgatttggaaaatgttgttgcagctattcaattctctaaaaaagtaatgcgcagaattaaagaaaatatattctgggcatttgcatataattcaattttaatccctattgcagcaggaattttatatcctgcatttggcataacatttgaacctgcattggcaggtcttgcaatggcaatgagttctgtaacagtcatatctctttcattaatgcttaaaagatatgttccagaaataaaaagaaaaagtaatatttaa

SEQ ID NO: 8027 - DNA, 792 bp, Methanobrevibacter gottschalkii
  source 1..792: mol_type = genomic DNA
atgaaattaattattgatactgaattatgtactgcctgtaaattatgctctcaagtatgtattcgtgataatatctatgtagatgattttgcagttgaaatgggtgataattgttttgagtgtggacattgtatggcagtatgtaaagttggtgcagtaactttaaaaagtttcataggtcatgaagatagaatccaagagtataattctcatgaaattcctgttaaatatgatgatctgcttcaacttttaaaacaaagaagatctattcgttggtttaaaaataaaaaagtggataaaaaaacttttgaaaaattatttgaaggggcatattattcaccatcagctcaaaacgaacaagatgttgaatttgttgttttagatgaaaaactcgatgaatttatggatgtcgtttatgatattattaaagttgatgaagataaatttttcagaattaaagaattcggcgattatttaaaagataattccaaaaagaaattccacccattgttatgggaaggaaaacaactcattttaacattttcaacagataaaaataatgcagttattgcaaatactcgtctagaattacttgcttattctttaggtcttggaggattttattctctttttattcttaaagctgatgaaattaatcatgataaattaatggaattttttccagatattgataaaaataaacatatgtattctacttttataattggatatcctaaaaaaagattcagaagaacaattcctcacagggatatcactgcaacctattactaa

SEQ ID NO: 8028 - DNA, 1215 bp, Methanobrevibacter gottschalkii
  source 1..1215: mol_type = genomic DNA
atgcaaactctaattgaaaatgtaaatattgttaatcctggtgatgatataaaaactcatcagaatatcttaattgaagatgctctgattaaggaaatctctcaggataagctatccactaaagataatgttaaaattattgatggtgaggataattatttacttccgggctttattgattgtcatactcatatttttgcaaaagggtttcataaagaagaaaacatgactaatcctttaggaattcatttttataatgcagttcctcattctttgcaaactattgatgcgggtgttacaacaattagagattgcggatctgctgatttaagttttaaattagctcaacaaagaaaattatttactgctcctaaaattcatttatctgttactcctcttgtcattactggaggacattttgatttacttttaccttctggttgggatatggagataatgtatcctgggtttccaaaaggaaggtgtgacggtgttgaagaagttttaaaaaagactcgtgaagtaaaaagagcaggtgctgattttattaaagtaatgtgtagtgggggagttttaacaactaacaattcaccagaattcgcacaatttaacaagaaagaattgaaaacaatcgcatgtgaagctaatgcaaataatatgagtgtttctgctcattgtcatagtttaaaaggaatgaataattgtattgatgttggattttcatcaattgaacatggaacattcattgataggaaaactgcttgtcgaatggctgaaaatgatgttagtttagtcccaacacttttagttcatcaatttttatataaaaacggttttccggcatgggataattatgctcgtgaaaaaacagcaaaattaaaagaaatagttaaagtccacaaggaaaatattgctgctgcttatgaagaaggggttaatattttaatgggaactgatagtggggttattcctcatggtcataatttagaagaattaattcatttaactgatattggaatgagtgaatcagaagcaattgccagcggaactgtgaatgcagctaaatttttaggcaatgatgacttaggcaaagttaggaaaaattgtattgcggatttggttctggtcaattctaatccttttgatgatatttctattttaagcgataatgataatatattaactgtcatacaagatggaattgtggttaaatga

SEQ ID NO: 8029 - DNA, 390 bp, Methanobrevibacter gottschalkii
  source 1..390: mol_type = genomic DNA
atgattacatgtagaaatattgcaaaaggaaaaggaaaaggtgaattaatagtctcatctgaaccaattagttttcttggtggtgttgatcctgaaactggtattgtaattgatcctactcatgaattaaaaggagaatgcattaaagataaagttttatttattcctggtggaaagggttctactgttggttcttatgttattttccaaatgatgaaaaataatactgctccaaatgccataatctgtcttaatgcagaaccaattattgcaacaggagctatcatgtccgatattccaatggttgactcaccagctcaaactaaagacttaacaaatgggactttagttgaagttgatggggataatggaacaattgaaattttataa

SEQ ID NO: 8030 - DNA, 1266 bp, Methanobrevibacter gottschalkii
  source 1..1266: mol_type = genomic DNA
gtgattattatgttaaatgctaatacttatgttacagctcaagaaggtattgggggaacaattagaaaccaatatgaagatttttacgtagaagaaattcctgaaattattcccgatggtgaagggcccaatgtttatgtatggattgaaaaattaggaagaactacattggatgttgttttagatattgctcgtgatttgcatatctcaagaaaaagaatgggctttgcaggaatgaaagataaaaaagctatcactcgtcaatggatttgcattgcaaatatggattctgaagaacagtttaagcaagtcgaagctttagatatttacaaaactgattttttaaaaaccgttcgtggtcgtaaaaaacttagaatgggtcaacttcgaggaaacaaattcagaattctagttaaagatttgaaggatattgaaaaaagtgctgatgttgcaaacgaagttttagatgaacttcagcatactggtgttccaaattactttggttggcaaagattcgggaaaccaagaacaattactcatttagttggggaagcattggttgaaaatgaccttgaaaaagctgttggagtttatattggtaatcctcaagaggatgaatctgagaaaaaccaaaaagcaagacaagcatatgatgatggaaatcttgaagaggcatttaatttaatgggtaaggggatgcgttatgaaaaaatgatgctaaaagaattagtcaaggcatctaaaaaaggagaattaactgataaagattatatgaatgcattgcatgcacttccaaaaccacttcaaagaatgtttgtccatgcttaccaatcttatttatttaatgaagctgtaagtaaaagagtagagatgggaattaacaaatatattgaaggagatattataattgacacagaagaacatattgttcgagataaaactcctgaagaatttcaagaattaattgataatttccaagcaagtccaacttgtcccttgtatggtacaaaggttccttttgcagaagatgctgttggaaaaatggaagaagatattttaacaaattataatattacaaaagccaattttgaagttccaaaaatgccacgcttaggaagtcatggtcttagaagatcaatgagattcaaagtatgggatgcttcagctactgcaactgatgagggggttttatgtgaattctcaattgataaaggctcttatgctactgctgttttaagagaaataatgaaaaaagatgttatttaa

SEQ ID NO: 8031 - DNA, 438 bp, Methanobrevibacter gottschalkii
  source 1..438: mol_type = genomic DNA
atgttagatgaaaaaggatatttttatatcattgatgctattcttgctgtaattcttgtttcaatagtatttttagttgtaaatactgcaatttccattccaagtccagattattcttatgattcatgtgaattcagaactgctcaagatgtcatggaaattctaagcggaaaagtgaattttacagataggacatttattggtgagatatctaaaatcttaaaagataataaaaattcaaaagaatctattaatttagtttcaaaaatttgtaaaaataaatttaaaagtttaaatcttacaaattatagatttactgagaataaaattttaaaagaaaaaatattggactcatcaggtgattattcaaaaagtaatatggtttcagttgctacacgtaattatgatgactattcttatactttatctgtatggtaa

SEQ ID NO: 8032 - DNA, 1365 bp, Methanobrevibacter gottschalkii
  source 1..1365: mol_type = genomic DNA
atggatattgaaggatttgtaagagcaagaattgatgattatgattataatgatttaacagagcttttagctgtaagaatcagggaatataaaaaaatttctgaaaaaaactctgttgaaatggcaaaagcggtaattgatgaagtttcaacaactcttaaattacaagagtgtggtgatgaatttttaaaagaaatagctaatgttaacaaagccgatgttttaatgggtgaaatgggagtaggttctcgcggagctggggatttctttgttcacagaaaaattgcagaaattgtcgcatcaacaaatacagcatcacttataaatccgtccgaacaagatgatggtggtgttgttaaagcaaaagcaaacaatgatgatgtttatattacaactgcagtagatggaattcattcacgtttaagcgaatatccatttttaggtggttttcatgtaaccagagcaacccttagggatgtttgtgtaatgggtgctgatcccgttgcaattttaagtgatgttcatttggcagatgatggtgatgttgctaaaatatttgactttactgctggtgttgctgctgtatctgaacttgttgatgttccaattgtagctggaagtacattgcgtgttggtggagacatggttttgggtgataggtttgtttctgctgttggaagtgttggtgtttcaaatcatcctccaacagcaagaaaaggagcaactgacggtgatgtaattcttttaacagaaggctcaggtggaggaacaataacaacaacagctttatataatggtttctttgatgttgtgtgggatacaatgaatgtaaactttgttcaagcatcccatgcattatttgaagcagatcttgtaaaagacattcatgcaatgactgatgtaacaaatggtggtcttaggggagatgctcatgaaatatctaatacaactggtgttggtttagaattttatgaaaaagaaatcagacaaatggttgctccaaatgtattaaacatgcttgaaacattaaatattgacccattgggagtttcaactgattcactaatgttgattgcacctcctgaaatcgttggagatattaaaaaagtggttggaaaatatgatgtttcaatatctgaaatcggtgaagttaatacttctggagaaccaatattaattaaagaagactcttctgaagaaaaacttgttccgttattcagagaagctgcttataccaaaattaaaaaattagttggtgaaacaactcctgaggactttgaagaaatgaaagaaaaagttcaaagagcttctgatgcagctattgctaaaaaagaaaaagtgatcaatcacattcgtgcaaattaa

SEQ ID NO: 8033 - DNA, 597 bp, Methanobrevibacter gottschalkii
  source 1..597: mol_type = genomic DNA
atgattacgattattgattataaaagtggaaatttaaaaagtatttcaaacggatttaaaaaaataggtgcagaatacaaaattagtgatgataaagaggtaattgctaatagtgattatcttgttttgccaggtgtgggtgcgtttggaagtgcaatggaaaatttaaaaccatttagagatgtaattcatgaacatgtttcagaagataaaccatttttaggaatttgtcttggccaacaggttttaatgagttcaagtgaagaagcagatggtgttaaaggattggacttatttaaaggacatgttgaactgttatcaggggatgttaaaatacctcatatgggctggaataaattaaaaatatgtaataattcacctattttagaaggaatagatggggaatttttctattttgttcattcatatcatgttgtccctgatgatgaaagcattattgcaggagtttgtgaatatggtgggaaaattgtagctagcttaagccaaaataatttattttcaacacaatttcaccctgaaaaaagcggtatagcaggacttaagattttaaagaattttactaatttggagttataa

SEQ ID NO: 8034 - DNA, 1074 bp, Methanobrevibacter gottschalkii
  source 1..1074: mol_type = genomic DNA
atgcatccaagaccaagtccaattgcagcgtctctttatactttaagagacatgaatgttgatgttattgttatgcacgggccaaatggttgttgttttagaactggaaggttattagaaagtgatggagtaagagtcttaacaactgcaatggccgaaaacgattttattttaggagctggtgaaaagttagaagaaactttaaaaaaagcttatgacatgtttaaaccagaattgatgggtgttgtaggtacttgtgcaagtatgattattggtgaagatttaaaagaagctattgctaatgctgatttgccgtgcactgtaatacctgttgagtctcatgggggatctggtgaaggtgacaatactgttggtgctattatggttttagaagcagcagtagaatgtggtgttatacctcaaggtgaagcggatagacaaattgaaatgcttgaaaaagcaactgaagttgaaaaaacccgtggaatggcacaaggaaaatacattaaacctaactttggtgattcaaaggaaaatgttgctaaacttgtagttcgcgctattaaagatggcaaaaaagtagcttttgttcataatgctaaaaaagaaactgcatatctgtttgcagatattattaattttgactataaagatattagaagagataataaacctatcattgtagcaaatcttgatggcagcactggtcttgaaagaattagatgtcatgcaaaaaatatcaaagaagaattgccgatggaaattgattttattacaggggggcttgatgaatatcctatcactgctgatgttgcagctgaatacttaaaaaatatggatttggatttaattgttgtatttggtgttccacatgctttcccaattgaagactttgatgtggagtctgttgcaataacagatgggcctcgtttagttgaacctttaagggatttaggttacaatcatgttgttgctgaattggatgctcattcaaaaactcttggaactgatgaaattgtattttcagactttggcggtatgattagatcagctattggatggttagatgaatga

SEQ ID NO: 8035 - DNA, 402 bp, Methanobrevibacter gottschalkii
  source 1..402: mol_type = genomic DNA
atgatgaaactagataaaaaaattttagaagaaaaaattagagagtatagggattttaaaagttgttccgaatcaacattaatggggctttgtgaagctgcagaatatcctatgagtaaagcagaaatgtgtaaaatagcatgcggatttgcaggaggaataggtggaacatttgatgaagggacatgcggtgctgtaactggtgctttaatagcgaatggattagtattagataatcctgttaaaatcaaagaaaatgcaaaagagatttttaattcttttaaagaaaaatatggaaccgtttgttgtggtaaaataaccaacaatggaaaagataaatccccatgtgtcgactgctgtgtatttattgcaaataaagttgctgatttatgggatgaatag

SEQ ID NO: 8036 - DNA, 486 bp, Methanobrevibacter gottschalkii
  source 1..486: mol_type = genomic DNA
atggatgaaaaacatttgccgctatttggtgtaggtccttatttaatgggattaataattataataacctttttatcaattgcagcctcaatttacaaaattataccagtatataatataaataaactaaatatcttccttattacattgggaataatttcaatcatttttgctatagtattatggttattggcaatacttaattcaaaattaatgaagaatattaaaaataataatctagtaacaactggagtttattcttttgtatctcatccaatatacgcctgttttcttttcatatcaattggattaattttaatttcacaaaatatattattattctttttaccatttctattctgggcttttttaacaattagtctaataaaaacagaagaaaaatggttatttgaaagatatggggatgaatacataaaatattcaaagaaagttaatcgattcattccatttaaaaaaatattttaa

SEQ ID NO: 8037 - DNA, 906 bp, Methanobrevibacter gottschalkii
  source 1..906: mol_type = genomic DNA
atgatagaaacaataataataattgtcatatttttagtttacattgctatgaaatatgttaaaattttaaggccatatgaaaaaggggttgttgaaagacttggaaaatataatagaactgtttcaagtgggatagttgtattaattccatttttagaaaatttagaaagggtggatttaagagaacaggttgtagatgttccgcctcaggaagtaattacaaaagacaatactgtggttgttgttgattgtgtaattttttatgaagttgtagacccatttaatgcaacatataatgtagttaacttttatcaagcaattacaaaacttgcacaaacaaatttaagaaatataattggggatctggaacttgatcaaacattaacttctcgtgaaatgattaatgcagaattacgtgaagtattggatgaagctacagataaatggggtagtaaagtagttcgtgttgaaatacaaaaaattgaacctccgaaggatatagtggaggcaatgagtaaacaaatgaaagctgaaagaatgaaaagagcatcaattcttgaagctgaaggttataaacaatcagaaattaaaaaatctgaaggggataaacaagcagcaattttagaagcagaaggtaaagctgaatctattaaaaaaatggcggaagcaaaaaagcaagctttaattttagaagcagaaggtgaatcaatggcaattgaaaaggtatatgctgcaattcacgaaggaaatcctgatgatggtcttatagctattaaatacttggaatcactggaaaaaatagctgatggaaaagcatctaaaatatttttaccgtttgaatcaagcggtgttttaagttcagttgcaggtatagctgagctgtttaaagaggataaaaaagaataa

SEQ ID NO: 8038 - DNA, 408 bp, Methanobrevibacter gottschalkii
  source 1..408: mol_type = genomic DNA
atggaaatttttatttggataatattggctatcctgttcttcttattggaaatacttacaggtagttttattttagtgtggtttggtataagttcaatagttgcagctgtattaaattattttaaatttgatttctacacacaatttggagcttttatagtaatatcaataattttattggtgtttactaaaaaatttgcaattaaagtcacacctgaaattaataaaaagactactgcagaaaggctgattggaagaaatgctaaagttgttcgaaaaattgatgataagaacattattgtaaaagtatgtggtgaagaatggtccgcttatgcaaaaaataatgttgacattggggacacggttaaagtatgtggaatagaaagtattaaattaatagttgagtaa

SEQ ID NO: 8039 - DNA, 216 bp, Methanobrevibacter gottschalkii
  source 1..216: mol_type = genomic DNA
ttgggtattattattaaatctttaaaatacttcatttatttacaaattgaggcatttaatcatgagtttttcagatggccgaaaagaatggagtactggaaaaaagcattatcaattatcatattcttttgtattggattaatattaatggatatgatagcttgtggagatttaccagataaaaatactgcttcttcatttatgttttatatttag

SEQ ID NO: 8040 - DNA, 315 bp, Methanobrevibacter gottschalkii
  source 1..315: mol_type = genomic DNA
atgaaaaaagtaaaaattactgtcatgagaaaagttaggcatgatgatttaattgaagaatatgaaaaccctttggagcatgaatgtagtgttgaagaaggtcaggttttcattgcaaatggctgggcaagacctgatgatttctgtgatagtgcttgggaaagtctttctccttttgtaatggctttagctaatggtgctagtgatttttatgatgggtggatgaaaaacaaaaaatctgcaatgatttcctgtaatgatggttttaggccagttagttttcttttggaaacactcgatgaagatgcagattaa

SEQ ID NO: 8041 - DNA, 1191 bp, Methanobrevibacter gottschalkii
  source 1..1191: mol_type = genomic DNA
atgcttcaaattgcagtttgtggaaaaccaaatgtggggaaatcctctttttttaattcagcaacagcatctactgtagaaatggcaaattacccatttacaacaattgatgcaaataaagctgttgctcatgtaattaaggattgtccatgtaaggagttggaagttacatgtaatcctcataattcaatttgtattgatggaaaaagattgcttccaattgaattgatagatgttgcaggtttagttcctggagcacatgaaggaaaaggattaggtaacaagtttttagatgatttaatgcaagctaaagtttttattcatgtcattgatgcttcaggttcaactgatattgagggaaatcctgtcgatcctggaagtcatgacccattagaagacattcaatttttagaagaagaaatagtaatgtggatgtacggaattttatcaagaaattgggtaagacttataagaaaagttggtgctgaacatttggatatttcaaaagtattgtttgatcaattgtccggtactggaataactatcgaggacattattgaagctaaaaggaatattgaaccagattataataaatgggaagaaaaggatttaatagaattaacaagaaatatcttaaggattgccaaaccaatgatgattattgcaaataaagcagatcttccaacttctgcagctaatattgaaagaattaaagaaaaatatccatatgtaattccaacttcagcggaatctgaaattgcacttgtaagagcagcagaagcaggtttaatttcatatatttcaggggatgatcattttgagattttacaagctgataagttaaatccaaatcaacttaaagcattggaatatattcaaactaatattttagacaaatatggcagtactggtgttcagaaggctttaaattatggaattttcgaattactggataggattgttgtctacccggttcaggatgaacacaaatatacagatcaaaaaggtaatgttttaccagatggatttttagttccaaatggtgcaactcctcgtgaattggcctacattgtacacacggatattggtgataaattcatgcatgctgttgatgcaagaagaaacatgcgtgtagctagcgattatgagttaaaggatggggacattattagtattgtaacaagaggttaa

SEQ ID NO: 8042 - DNA, 870 bp, Methanobrevibacter gottschalkii
  source 1..870: mol_type = genomic DNA
atgaaaaactatgatactgatcgtcctccagcaatgaagattcgacagggaattcaagatgcaatgacttattcacttccagacaagaagtttgaacccagtgaaattgatttggttgaagtagatattaaattaaataatcttggatggaactttcataattttaagatattaaatctaacagacattcatttaggtcaatggattaatccggaatacttagatgaacttatagattatgtcaatattttaaatgtcgatttaattaccttaactggagattatttttcatacataacagaaggttatgaaaaatccctaactgactcttttaaaaaattaaaatcaagatatggaaaatttggagttttaggaaatcatgatcactggatggatgcatcaaaaattagagacatatttaaatcatcaaagatcatagatttaagcaataaagtttatactcttgaaaaagaaggtgaatttttaaatatttgtggtgttgacagctgcactgtttgtgcagataatttagatgaagttttagttaaaattagagaagatactccaagtattttacttgcccatgagccagattttgcagaagaatcatctaaaacaaacaaatttgatttgcaaatttcaggacattcacatggcggacaattcataatcccaaaattcgaaacaacaccatttagaggtccgaactcaaaaaaataccccgttggcctttataaagttagaaatatgatacagtatacaagtaaaggacttggaacaaattcattcagaatgcgaattaattgtaaacctgaaattacaataattacccttaaaacaaatagaaaacaaaaaatcgatgtaaaatga

SEQ ID NO: 8043 - DNA, 2121 bp, Methanobrevibacter gottschalkii
  source 1..2121: mol_type = genomic DNA
atgaatactcataatatcataacttcaacaaaaaatataattaatttaattttacttgttttacttaatatactagttataatattaatgtcagatttatatggagatttttccataggaccgtggtataatgcatttttcatagtcctttcaataaccatagccaatacattactatggccaatttttaaaagattttttatgaagttcatgatacaaactttaggcattggtacaatatttattaatgcattaatcttttatattgcttgttactttattccgaatgttgatgttggtttttatgcatctattaaagttccgtttttcatgtcaattgccacaacagttgttacaaacatgacaaacactaattattacaatagacatcttaaaaatattgtaaaatacgcccttaataaaaaaatagattcaaaaagctatccgggaattataatgcttgaaattgatggattatcaataaatattctaaaaaaagcaattgacaataatataatgccaacaattaaagaatggattgattcaagtactcataatctaaaagaatgggaaacagatttatcttctcaaaccggagcaagccaggcgggaatattgcatggaaataatgaaaatattgtagcttatagatgggttgaaaaagaaaatgacaataagataattgtttctggaaaattaagccatgctccactaatagaaaaaagaataagtaatggggaaggattgcttgttgatggaataagcgttagcaatatgttttcaggagatagtaaaagtgcaccattaacttcttcaaaattagggacactaactagaattaaccataaaacattaaatacagtatttttagacacttacaactaccaaagaatatttacattatttttatgggacattttagttgaattaaaatcacaaattaaacatttaataaaaaatatccaaccaagacttagaagaacagttgtttatgctgctgtgagagctggtgctaatgtagtgcttagagaagttacaacagatattctgacaagtgaaatattaaaaggagaaattgatactgcatatgcaacatttatggggtatgatgaagtagcccatcactctggaacacaagatgaagatgtgtggccagtattaaaacaaattgatactcaaattcaaaggttaacaaatgcaattgatatgagcaacaggggctacaaacttgttattttatcagaccatggccaaagtaatggggcaacatttaaacaaaaatatggaataacactcggaaattatgttagaagatttcttccagatgatttaaaagtttatagaaatgaatttaatattgatcactttagagatgcagttttttctgaaaatataaaattaaaaattgtcaaagaaaaaataggtgattttcgtgacgatatatttgatgaaaatacatattttcaaaatattagagatgaacttgaaaataaaaaacctgcaattatttttgataatgaacaataccaaaatttaagaaaaaaatattcaaatagtttagaatacattaaaggccatgaaagtattgaacagagcactaaaaaagcaaaagattctgaattgattgttttaggttctggaaacctaggattaatatatttaacagaatggaaacaacgcttaacctatgaagaaatagttatgttatttcctgaattgatacccggccttgtaaaacatccaggaattggattcattttagttcattcaataaccaatggaggcatggtgattggagaagatggaatatactatttagatacagataaaataattggtgaaaaccccttaattaattatggaaaaaatgctgcaagacatttaaaacgacaaaacacatttaacaatatgcccgacataatggtcaatggtttttatgatgaaaaatatgatgaagtaaatgcatttgaagagttaattggaagtcatggaggtcttggaggagatcaaacaaaacctttcattttatatccttctgaatgggaagatcctggtaaattaattggagcttcctcaatttacgaattcttaaaaaaagaaattaatgaattaaaatcttga

SEQ ID NO: 8044 - DNA, 852 bp, Methanobrevibacter gottschalkii
  source 1..852: mol_type = genomic DNA
atggataatttcaaacaaagattaaataaatccaaagaagctattgataatgcagattatattattattggtgcaggagctggattttcagcagctgctggaatattatattctggaaaaagatttgaagataatttcaaggatttcattgaaaaatatgatatgaaggacatgtattcagcagggttttatccatttaaaactcaagaggaaaaatgggcttattggtgtcgtcatgtttatgtaaatagatattctgttggaaaaacagagttatataaaaaattatttaatttagttaaagataaagactattttgtattaacaacaaatgttgaacatcaattttggattaatgactttgaggataaaagaatattcgcaactcaaggggattatggttcaatgcaatgtgaaaaaggatgccatgataaattatattcaaacgaggattttgtttatgaatctttaggaaaaatagaaggttgcagaattccgtctaatctggttcctaagtgtccggtttgtggagggaatatggatcttaacctaagaaaagaccaattcttcattgaagataaaaaatggcatgaaatggccagtaattatcagaattttttatccagaattgatgaagataaaaacattgtacttttagaattgggagttggatttaacactccaacaattattagatatccatttgaacaaatgacatataataataaaaatatgactctaattagattaaatagggattatccagatgcaattgatcaaaataaagatagaacaataagttttgatgaagagatttatgaaatatttgattattggctttcaagattttaa

SEQ ID NO: 8045 - DNA, 642 bp, Methanobrevibacter gottschalkii
  source 1..642: mol_type = genomic DNA
atgcaaactggaaaaatttttattattgggattggtcctggtgcttccgaatatttaactaaaaaagcaattgatactgtaaaaacaagtgattataccattggaagtacaagagcaattgagttatttgatgatgttcaaaataaaattgcatttaatgtaaaagaacttttagagaaattaaatgaaggtgttcaacttgcatgtaatggaaataccgtatcaatattatcaacaggagatcctggtttttcaggtgttttaaatacagttttaagaatttcaaaagaaaaagaattcccaaatgaaaatattgaagttattccaggaattagttccctgcagcttgcagctgcaaaatgccatatccaatgggacaatgctaatgtaatgacatttcacggtagagaaaatatagaggacatcttacctgtcattaacaatggaaagacaacaatagcccttccttcaagaaaagtaaaagatatggcccagtttttacttgaccatggtgttgaagaaaataggaaagttgtggtatgtgagagattaagttatcctgatgaaaacattgttgaggctacattaaaagatattgcacaaagtgaatttacctatatgtgtattatgattatttattaa

SEQ ID NO: 8046 - DNA, 2811 bp, Methanobrevibacter gottschalkii
  source 1..2811: mol_type = genomic DNA
atgaatgcgaaactaaacaccacatgtttcattttattatttatttttttaattaccgcagtatcagcggcggataataaaaatgaaacattattaactcaaaaagaaacagattcaagtcaaaaattatgtaagtcaagtgttagtaaggaaacttctaaaaaagaaaaagtcactcttaaagcacctaatttaaaaatgtattataaggatggaagtaaattcaaagcaacagtgaaaaataaaaataaaaaagcaataacaaaagcaaaagtggattttactgttaatggcaaagtttataacaaaaaaactgacagtaaaggtgatgcttaccttacaattagcagtttaaaaagtggaaattatccaattaaaataagatttgctggaacaactaaatacactgcaatatcaaaaaagagcacaattacagttaaaagtacaataaaaagtaatgattttaagaaatactataaaaatacatcgccctacacttctaaattttataatcaaaaaggaaatatattaaaaaataaagccgttaaattcaagttaaataagaaacattacactgttaaaacagacaaaaagggtgttggaaaattaccgattaatttaaaacctggaacatacgccatatccattataaatccaaagacatctgaaactgtaaataaaaaaataactataaaaagtttaattaaaactaaagatttaagcattaatgggcaaaatgatggtaaatttaatgtaaaagtatttaataataaaggcgaagtttatccaaatcaaaaagttacatttaagattaacggaaaaacatattcaaaaaaaactaataaaaatggcattgcaacattagacatcaatttagatgttgggaaacactcaataacaaccgaatatatgggtcttaaaaatactaataaaatcaacataaataaaatagtgaaatcaaccaattatatccatacaacattaattccaaattatgttaatgttacagcaaaatatgtggttaataactctgtttactgtcttaaatctggaatcaacggcatcataaaaatgccaaaaaatgaaatatttaaaattcaagttgggggaaaaatttacacatttacaacaacttcaattaacggaataaattccataactcttagatacaataataattatctagtgccctttgatgggagtggagtaaaaagttatacaaaccgaaacaagttaacctcagatggaataattattagcaaagtaaatgattacacacaaattgactatcagagtaaaacaaaagataatacagctttatttggattttatgcaagtaaaggattagataaaagtgaaacattaacatatgtggaaaatgataaaataactgcaaaaattaacttcaacacattgagttttgatgaattcagcttacgatacagtttatctgcattgcatggaaaaacaatttataatttcaattatggaaattacaatgacacaattagatttgcaaacaccaacactcccgtaacatttagttattttggaaattcaatagtaggatatgcctcacaagaaaccattataactaaatttaaagttgatgaaattaaagaagtagaaaaagaagagaatataagttacggccttaataaaaaatatagaactgcaatgggatttgaagttctgcaatcatatactctgattaatgaaaaaataaatcaaaaaactttagagaattgggttttaaaaaatccggactatttaagtagatttggagtaatgaatatttatggaatgcatttagcatctcttgaagtagcttggattgcagatataatagcagataagagctccaaagaattaaatgtgaattggaaaagaaacaataccctaacaatattaggtggaataaacttagaagacacttatttaaatatactaaatgcagacatgggtatgaaagtaacaggcaaatttgacaatgcattcctattcaaattattaaattcaatgaatttaccaaatattgaggaatatgcattattgaaagttgcatatagatacttggataaaagttcaaactcattagataatgtatttttatccattctaaaaaacaactttagtattgcacaattagatgacatgatttacatattttcagaagcaaattcaaaatctgcaattatattaaatacaagcagcggagtttcaagtgtagttctagctcaaaactccgtttataaaggatcatcacttaaaaccacacatgactgttgcggtgttggaattataccaaaagacataataaaaggaattaaagaaacatttaacattattaataatggattatcaaacatataccccaataagacacatccaattagtaaattattttatatggctgcaaatttacttgccaaaccattaaatggggttggatcattaggtatgaatttaattacaacaatggcacttatacaaagtggaggaacaacatatagaaacgaaatggttgaaaaaagtgattggcatgaagttatggataaaattacttttacaagaccaggatatttacaatcaaaaaaaatttacaatattccgaatgaaaaaggaggatgtgattttattgaagtaaaaatcagagatgatatgacattagatcgcaataatgcaatctatataagtgatgggaaaacaagaaaattaagtaaaacagagacttacaaatatttcattgatgactactggacaccatttagtatgcctcaaaaatattgggataaaagttggaacaggtga

SEQ ID NO: 8047 - DNA, 330 bp, Methanobrevibacter gottschalkii
  source 1..330: mol_type = genomic DNA
gtgataaaaattaaaaaagaaagtaaatttacagtatcaataattataatattatgtgcattaatagctataacccttgtttatccaaaatatagtgctatatgggatgtggcatttctcattagtattttttacacaagtacacaaacaattcttgacacaagtaaaaaatctaaaagaaaattaaatattaacattgtgattataataatattcgcaacaataattgcattttatgaaatgtctattggaaatccattaattttttcaacggcattattaatacttgcaaatttgcttgatagcactttgaataaaaaaagtaattga

SEQ ID NO: 8048 - DNA, 1011 bp, Methanobrevibacter gottschalkii
  source 1..1011: mol_type = genomic DNA
ttgtcatttaaagattattttaaatttgataaagacaaaaccacatttatttttgttggtggtaaaggtggagtcggaaaaacttctgtttcttctgctactgcattatggttagctgaacaaggtaaaaaaacattgattgtatcaactgaccctgctcattcgttagcggactcattggaagtaccaattggaagttatcctcgtgaaattaaaactaatttgtttgctgttgaaattgatccggatgtagcaatggctcaaaaacaagcacaattggaagcccaaaaagcagcaaatcctgatgatggtgggttattgggtatggactttttgtctgaccaattggatatggcatctgcatcacccggcgctgatgaagcggctgcatttgaaatgtttatgggtgtaatgaattctgatgaatttgacgttgttgtatttgatactgcaccaacaggacacactttaagattattatctttccctgaagtaatggattcttgggtaggtaaaatgatgatgcttaaagcaaaattgggtggagtaactaactcattaaagaaaattatgccatttatggatgctgttgatgatcctcaaacttctgaagatttaaaaagaaccaaagaacaaattgacatggcaaaagaagttttatctgatcctgatagaaccactttcaaaatggttgtaattccagaggaaatgtctatttatgaatctgaaagggctttagaagctcttggtaaatatgatattactgttgatagtgttattgtaaatcaagtaatgcctgatatttgtgactgtgatttctgtcattctagacataaattacagcaaaaacgtttggctttaattgaccaaaaattcccaaatcaacacattgctgaagtgccattattcaaagatgaagttaaaggtcaggataaattgttaaagttagctcatattttatatgatgatgaagacaacgatgaagttgtccaggatgctattcagctttaa

SEQ ID NO: 8049 - DNA, 810 bp, Methanobrevibacter gottschalkii
  source 1..810: mol_type = genomic DNA
atgataaaggttggtgagaacattagtgaaattccaaaactaaactgtgaaaaaacaaaatgcaacattgttgacttcattaaatcaaaagtatctgaatctaaatctaaaggtattgtaattggtttgagtggaggaattgattcaacacttgcagcatatcttgcatgcgaagctgttggaaaagaaaatgtatttggagtaagtatgccatccactaccacaccaactgaagataaaattcatgctattgaaatagctcaagaattaggaattaaatataaagaaatagctattgacagtgttttaaatgaatatttatctgtaactcaattagacaattataatttagccataggtaatttaaaagctagaattagaatgtctatcatttattattatgctaaccataacaactacatcgtttgtggaactggtaatagaagcgaaatattaattggatactttacaaaacatggggatggtgcatgtgatattgaaccgattggaaacctgtataaaaccgatgtatttaaattaagtgaatttttaaatattccaaaggaaatcatcgaaaaacctccacgtgcaggattatgggataatcaaactgacgaggacgaaattggaatgagttatgatttacttgatcagattctttatttatctactgaaaaatatatgaaaaataatgaaatagctaatagattaaatatttcagcagaggaagttgacatgattattaataaaataatcaggagcaaacacaaaagtaaagttcctgaaagccctgcaaaaacaatattataa

SEQ ID NO: 8050 - DNA, 2856 bp, Methanobrevibacter gottschalkii
  source 1..2856: mol_type = genomic DNA
gtgagcgaaaatattgaaaagaaatggcagaaaaaatgggcagatgcaaaattatttgaatcaaacccagatgaacgagaaaaattataccttactgttgcttttccataccctagtggagcgatgcatataggtcacggacgtacttacacagtgcccgatgtttatgcaagattcaaaagaatggaaggatataatgtattatttccaatggcatggcatgtgactggtgcaccagttatcggaatagcggacagaattaaaagaaaagacaaatggacacttgatttataccacaatgttcatggagttcctaaagaaactttaccaaaattagaagaccctgaatacattgtaaaatacttttcaactgaataccatgaagtaatggaagaaatgggttattctattgattggagaagagaatttagaacaattgatccaacatacaggaaattcatcgaatggcaaattacccaattacacgaaaaaggtctagttgcaaaaggcgaacatccagtgaaatactgtcctaactgtgacaacccagttggagaccatgatttgcttgaaggagaaggagttggagttaatgaattaacattgcttaaattccctataggagataaaattcttgtaactgcaactttaagacctgaaactattgttggagcaaccaatatttggttaaacccggatgttgaatatgtcttagtcaatgctaacggtgaacgctgggtcattacaaaagaagctcactacaacttaaaaaatcaaattaaaaacttagatataatatctgaaattaatcctaacgatttaattggacaaatggctaaaaatccgtttactggggaagaattaccagttttcccagcaagttttgtaagtgaatcctacggaagtggagttgttttctctgaacctgcagatgcaccagcagattacattgcacttcaagacttaaaaaacaatgccgaattaatatctaagtacaatttagaaggcattattgaaaatgttcatccaattccagtatgtacgcttaaaggatatggagaaattccagcagcagacatcattgaaagacttggaattactgaccaaaacgatgaaaaattacatgaagccactaatgaattatacaaagcccagcacagcaaaggtaaaattattgattccatccctgatttcggtggtatgaaagttcgttttgctcgtgaagagttaaaagaaaaattaatcaatgacaacatggctacaatcatgtacgactttgctgaaagaccagtagtctgcagatgcggcaacaattgtgttgttaagattatggacgaccaatggttcatgaaatatggtaatgaagaatggactgaaaaaaccttagaagttcttgatggagaaaccataatcccaaaagaaattaaaaataattttgaatattatctcaactggttagatgattgggcttgttcaagaaaagtaggacttggaaccagacttccttgggacaatcagtggttaattgaacctttaaccgattcaacaatctacatgtcatattatactattgcaaaatacctaaaagacatgaaccctgatgatttaaaccttgctttctttgacaaagttcttttaaacaaagactccggggaaattacagtgccggcggaaaaagttaaagaaattcaagacgaattcaactactggtatcctcttgactggagattatccgcaaaagaccttgttggtaaccacttaagcttcttaatgttccaccacagtgcaatttatcctaaagataaatggccaagaggaactgtagtcttcggtatgggtcttctagaaggaaataaaatgtcttcatcaaaaggaaatgttatattacttaaagatgcaatcaaagactactccgctgatgttgtaaggctcttcctgatggcatctgctgaaccatggcaagattttgactggagagaaaaggaagttctcggaactaaaagaagacttgaatggtttagagaatttgcagcaagagttgaagaaatcaaaggttccccattagatttaagtaacattgaagaagttgaattaaaaagaactattgatttatggataatcagtcagcttaatcagcatattaaaaatgcaactgaagctttagaagtcttccaaacaagacaagcactgcaagattctttattcttacttaaaaaagatgtagatcattacttatacagagtaaaacacataattgatgcacaagattctgcagtaatctatgttttatccactgttcttgaagcatggattagactccttgctccattcactcctcacacttcagaagaattatggtcaacctatggcggagctggatttgcaagtgaagcagcatggccagaatacaatgaagagcttgtaagtgctgaaattgaaaaatcagaagatttagtggaaaacatcattaaagatattgcccacatcaaacagatggttggagaagatgttgaaaaagtccacatttatcttgcacctgactggaaatgggacttatacaaaatagctgacgaagtgggaaaaccagacatcggacagattatgggaagagccattggatctaaaattcatgatgataaaaaagaaattgcaatggtagctaaaaaaatcggtaaagagataactaaaacaagatatatcggcaaaatcaacgaagcagaaatcttatctgatgctcttgactacatcaaagaagaatgtggaaatgaagttatcatccatactgatgactcatacgatccacaaaataaggctaaaaatgcaatgccatataaacctgcaatatttatggaataa

SEQ ID NO: 8051 - DNA, 732 bp, Methanobrevibacter gottschalkii
  source 1..732: mol_type = genomic DNA
atgaaaatgattttagatgaacgtggtaagaagtatgttttaaaatctggagaagatttccaaagtgatttgggaattgtatctgctgatgtattaaatgatgcagatattggtgaagaggttaaaagtcacttaaaccacacatttaaaattataaaaccgaatatcaatgatttcattgatattatggatagaagatgttcaattctccttaaaaaagatattggattggtattggctcatactggtttgggatcaggctcacgtgtagtcgatgctggaacaggtgcaggagctattgcactaaacttcggaaatgttgttggatctgaaggtgatgtctttacctatgaaattagggaggactttgctgaagttgcccggaaaaacattgaaaaatttggaattactaatgttcatgttaaaaataagaatattaaagatgggattgatgaagataaaattgatttggtctttttagatttgccaaaacctttcgaggtatttgaagaagtaatggaatgtttgaatgttggcgggtggttaacagtttatgccccttacattgatcaagcagaaatttcttatcgcattgcaaaaaaattaggattttatgatattgagatttttgaaattttagaacgtggtcttgaagttaggcctcagggtgtcagaccaaaaacacgaatggttggtcacagcggatatatggtatttgcacgaaaattatag

SEQ ID NO: 8052 - DNA, 957 bp, Methanobrevibacter gottschalkii
  source 1..957: mol_type = genomic DNA
atgaaaaatacatggaaacttaagttaagaatgattcttacatcagttgtaatgtttactattgtatatttccttatcatgcttgtagggttgtaccttggtgtgagcagctggaaattatactttggagcaagcttagtaatcgtatttttacaatattggtttggaccatcattggtaaaacgttcaatgaatgtaaggcccttatcagaagctgaagcacctcatattcatcagatggttcaggaattagcagacgcagctggaattccaaaaccagaaattggtttatctgaaattaatattccaaatgcatttgcatatggcagatcaagcagaagtggacacattgcaattacccgtccaattttgggattacttgaccgtgatgaactgaaagccgttattggtcatgaaatggggcatattaaacataatgatatgattgttactgctgctgttagtgttattccaatgatttgttattatattgcattatctttcatgttttcaggagataatgacaatggtggcggaattataatcggaattcttggatatgtgttctatttgattggtcaattgctggtgctctttatttcaagaactcgtgaatactatgctgatgaagcaagtgttgattttggaaaccgtcctgcagcattggtgtctgcactttataaattatcttatggtgcagctagttgtgataagcagacaatttctgaagtaaatacaaacagggcattctttataaatgatgtaaacaatgcaaggcatgatgtttctgatttccaacaaattgactttgatggtgatggaaaaatatctaatgatgagttaagaagacttgcaaattccgatgttaaagtttcaaggaaaaatgggctcatggaattattatccacccatcctgattcattaaaaagagttaaaagattagcggagttagaataa

SEQ ID NO: 8053 - DNA, 948 bp, Methanobrevibacter gottschalkii
  source 1..948: mol_type = genomic DNA
atgagcggaccatgggtagaaaaatatagaccacaaaaattagaagacattgtaggacaaaaacagattgttgcaagattacaaaaatatgtaggcgaagaaagtatgcctaacttaatgtttacaggtcctgcaggtgttggtaaaacaaccacagccttagcattagtaaaatccattttaggagaatactggagacaaaactttttagaattaaatgcatctgatgcaagaggaattgaaactgtaagaaataatattaaaaatttctgtagattgaaacctgttggtgctccatttagaataatatttttagatgaagtggacaacatgacaaaagatgctcagcatgcccttcgtcgtgaaatggaaatgtatactaaaaccgcttcatttatactttcatgtaattactcatcaaaaatcattgatccgattcaatcaagatgtgcaatattcagatttgctccaattaaaggagaagaaattaaagaacgtttaaaatatatttgtgaaagtgaaggattccaagctgatgatgaaggtcttgaatcaattgtttattttgctgaaggagatatgagaaaagcagtaaatgtccttcaagccgcaacatccgaaggagaaacagtcacagaagattcagtttacgaagttgtttcaaaagctaaaccacaagacattgaaaatatgataaataaagcattaatgggtgactttatgggtgctcgcacacttcttagagaaactatagtacttcagggaacaagcggagaagatatggttactcaaatttaccaagatgtttctaaaagagttcttgaaggaaaaatggatgcgtcaatctacatggatttaattgaatctatcgctgaatgtgatttcagaataagggaaggagcaaatccaagaattcaactcgaagctttgttaacccaattcttataa

SEQ ID NO: 8054 - DNA, 1446 bp, Methanobrevibacter gottschalkii
  source 1..1446: mol_type = genomic DNA
atgttatggactgataaataccgaccacaagaattaagtgcagtggtaggtaataaaaaagagattaaaataattacagattgggttaatgcatggaaatcaaataacccccaaataccactacttttagttggtccgccaggcattggaaaaacaaccctatctcaaattatagcaaaacaattctcagaacatattgagcttaacgctagtgataaacgttcacaagagattatcaaaagtacaattggagagtcatcatcttccagatccctttttggagacgaatacaaattaataatccttgatgaagtagacggcattcacggaactaacgaccgtggaggagttaaagctattggagatataattaaaagttcaaaacatccaatgattttaatagctaacgatttttactcaaaaagattgcaatctataaaaccaaaatgccaagtaattaagatgaaaaagtcaagatggaattccatcacaaaacttttaagagaaattgctcaagcagaaaacgtggatgcaaatcctgcagcattaaaagagattgccttaaaatcacaaggagatgtaagatcagcaatcaacacattgcaagcattatccagtaaagattctacacttgaagtccaagatgtagaaaacatgaaaaccaaggatacccgttcagacatatttaatgcaattacaggtgttttaaaaagtaaaacaccagcacacgttaaagaagcgatgtggattgaagaagatccaacacttgtcatggaatatattgctgaaaacattccaagagaatacaagaaaaaagatgaaatcaaaaaagcttatgactacatttcaaaagcagacattttctttggaagaacacaacgcagcagaaattacggctattggaaatatgcaagcgactttatgggaattggagtaagtaactccaaacatgaaacatataaaaaattcacaaaaatacaaactccaaccatattcacattaatgagccgtaataggggcaaaagaaatcttagagatgaaattgctgaaaaaatgtctgtaaaattacacgtttcacattcaatagctatttcaatgttcccatatcttgagataatgtttaaaaacgatgaacttgcttgggagatttctgattatttggaacttgaagataatgaaatcaaaagatttagatctaaaaaaattcctaagaaagttattaataaaatggaaaaacagaaagctcaaatgagagttgaagaacgtgacaggcgtgctgaagaacttaaaaaccaaatgataacagctgcagttgaaattgaagattcatatgaaatttcaaaacctgatgaaactaaagctgaagatacagttaaaaaagaacccccaaaagagaaaaaggaaaaaaagaaaactgacaaacaggtttcattgttcagtttctaa

SEQ ID NO: 8055 - DNA, 690 bp, Methanobrevibacter gottschalkii
  source 1..690: mol_type = genomic DNA
atggatttaatgtttgatgtttcaggattggcaggtgaaaaagaagagttttcaacttcaaaaaaagatgtgttgaaatttctgaaaataattggagtagacagtcgttttgtatcttacacaccagataaaatttacattaataatttaagattttcaaagttttcaagaaaaagacaagctacctttaataagcaatatcctgaaattgaagttgtaagaagctcattattccaaaagatatgttctaagtcatcaaaacacttggctttggaaattaaaccaaattcacttgtcttaatgcctaaagataatttcatagttgagctaatcatggagccttatacacgtaagtacggtgctaggctagtttatgagggggattatgatttgatggttaatccattgattttagatgatcaagtaaatgatatatttgaaggtattttcaatggggaaggtttaaattttaatattaattctaatgagatttatccgttaattaatgtacctttaaactggattaattcctttttagaaatggatggtcaaaaatcaattgaaaataaaaataaaaacaggttagctgcctcattcagtgaatttttggaagatgtagctccgcaatataaagaaaatgttgttaaagcagctaaatatattgaaaaaaaattagaaactgaacaatga

SEQ ID NO: 8056 - DNA, 852 bp, Methanobrevibacter gottschalkii
  source 1..852: mol_type = genomic DNA
atgaaaattaaaggtagtacaaatattgtaggattaattggccatcctgttgaacacagtttctctccacctatgcacaatgctgcatttgataaattaaatatggattatgcatatgttgcttttgatgttgattctaataatctaaaatcagcaattgatggtgctaaatcattaaatattaaagggtttaatgttacaattcctcataaaattggaataatgcaatttttagatgaaattgatgaggttgctagtttaataggtgcagttaatacaattgactttaaaaatttaaaaggatataatactgatggaatcggtgctgtaagggcaattgaagaagttactaatattaaaaataaaaatgttgtagttgctggtgcaggcggtgcatcaagagccatttcattttatcttgctaggtatggtgcagacactataactctactaaataggaatgttgacagggcaatgaatcttgcagaagatattttggattccggattaattactgaaattaaatcagattccatctctgaaatcaacagctatttgtctgatgcagatattctagttgatacaacgcctaggggaatgcaccctcacacagatgatgagcctattgctcgagcggaaaatatgcaagaagatttagttgtatttgatgcagtttataatcctaatgaaactgttttaataaaagaagcaattaaagcaggtgcaaaaccagtttatggaattaaaatgttactttatcagggagcagaaagctttaaaatatggactggaagaaaagcaccaattgatgtaatggaaaaggctttaggggaaacacttaatttagagtga

SEQ ID NO: 8057 - DNA, 1296 bp, Methanobrevibacter gottschalkii
  source 1..1296: mol_type = genomic DNA
atggaatttacaagaccgagaggtacaagagattttttatttgaagaaatgagagaaagaaaacaagcagaaagtaccttaagaacagtatttgaaagttacggttatcaagagattcaaacaccattatttgaagaattgaaattattcacaaccaaatctggagaagaaattgtaaatcaattatacaattttaaagataaatctgatagagaattgactttaagacctgaaataacagcaccagttgctagattatatttgaatgaacttgaaaaaacatcgactaaaccaattaaactctattattatggaagctgttttagatatgaaagacctcagaaaggaagattcaggcaattttggcaatttggttgtgaattaataggtgctaaaacacctcaaggtgaagcagaagttattgcactttgttgtgatgcaattaaatcccttggaattacaacagctgatgtcaatcttaaccaccttggaattataagaggattattcaaacattttgacatttcagttgaaactcaaagggaaattatggtagttattgataagggagataaagatttgcttattgaatcattaagtggagacgaacctgtaatcaataatgaagaattaaaccagattttattaaaactgattgatcttgtaggagataaatcaattattcctgaagttgaagaattaatatccccttatgaagaatcgaaagcagcattagaagaatttaaagaattaatttcacttttagatgcttttaaagttgaaaattatacattaaatctaggtgttgcaagaggtcttgattattataccggaatcgtgtttgagatttatgttccagaacttggtgcccaaaaacaaatatgcggtggaggatcatacagcctcgttaaactttttggaggccaggaagtagaatccactggttttgctctaggttttgacagattaatgaatgcaattgaggaacttgcagataaagaggaattgccttcccacttagatgtttatgtagctcctatttctaacgatgttagactaaaagcatttgaaataacccaaattttaagaaaaaatggatttaaggcagatgtcgatttaaacggtaaaaaattcaagaaattaatgaattacgctgataaaatcaaagttgaaaaaatgattattatcggtgctaatgaccttaaatcagataaagtcactattaaaaatatgattaatggcgaacaagaattagttggtattaataatattgtagattatcttaaagaggaatag

SEQ ID NO: 8058 - DNA, 408 bp, Methanobrevibacter gottschalkii
  source 1..408: mol_type = genomic DNA
atgaaagtcaacttcaggcatgaaattaacggagttaaagtaattactgctattgcacaagacgcaaaaacaaatcaaatattaatgcttgcaaatatgaacaaagaagcactaatcaaaactattaaaacaggcaaagctcattattggagtacttcaagaaacaaattatggcttaaaggtgaaagttcaggccacatccaagaagttgaagaaatccttgttgattgtgatatggatgcaattatactaaaaatcaaccaaacaggcgctgcttgccatgaaggatatctttcatgtttttatagaaaaataaacacaaaaaatgaagttgatattgacgatttaaaagatgaagatttagaagttattttagaaagacttgtaaacccagaagacgtgtattaa

SEQ ID NO: 8059 - DNA, 1845 bp, Methanobrevibacter gottschalkii
  source 1..1845: mol_type = genomic DNA
atgaaatgtataataccagacacaagtgctgttattataggtgcaataactgaattaattgaaaaggagaatattgattatcctgaaattattgtacctgaagcagttgtttgtgaacttgaacaccaagccaatgctaacagatcagaaggtcaaaaaggattaaaagaattgcaaaaattacaagaactccaatacgatggagagctatccattagctttaaaggaagaagaccaaccaatcatgatatcaaatatgctaaaagtggtgaaattgatagcataataagagatttagcaagaagcgaaatgggaactcttcttacaaatgacaaagtacaggctgaaactgctaaagctcaaggaattcctgtttattattttgaacaggaatacaaagaaactccactttcaattgaaaaattttttgatgatgagaccatgtccattcatttaaaagaaaatgttgttccaatggctaaaaaaggaactccaggacatgttgattttaaaatattaaacgaaaaacgttatacttacaaagaactcaaaaaaattgttgatgaaattcttgataaagcaaaaagtgatcctaagacttatcttgaaagtgaaaaagagggttcttttgttgttcaatcaagagaatataggatttcaatagcttatcctccattttcagaggctttagaaattacagccgtaagacctgttgttagtataagtttaaatgaatacaacctatctgaaaaattattagataggattagaactagcgctgaaggaatattaatctctggttcacccggagcaggaaaatctacatttgtacaggctattgcaaaatattattcttcaaaattaaataaagttgtaaaaacaatggaatctccaagagatttgcaacttccagatgaaattacgcaatacagcccattagaagggagtatggaaaatactgcagatgttttattacttgtaagaccggattatactatttatgacgaacttagaaaaaatagtgactttaatatctttgcagatatgagattggccggcgttggaatgattggagtagtgcatgcaactcggccaatagatgcaatccaaagaatagcttcaagagttgaacttggagtaatcccctccattgttgatacaagtatttatattgaagacgggaaagttactcatgtttatgaaacaaaaatgactgtaaaagttcccaccggaatgaaagaagcagatcttgcaagacccgtaattgaagtaagagactttgaaactggtgagcttaaaaatgaaatctacacttatggtgagcagaccatagtcatggacatggatttagtcaatggttctcaaaatagtgaaagacaaaaaactgcagttgaaaaaattgcagaaaaagaaatcttaagaaaaattagaaaaattcttccgaaaaaagctaaagttgatgtggaagttacctctcctgagcgagcaaacatttacattccagaagattttattccaaaaatcattggaaaaaacggtaaaagaattgctgagattgaagaaagtattggaataagtcttggagttgaagtaatcgaatcaaaaccaataaataaacatccaattgaagttgatattatccacacaaaaaaacaattaattttagatttaggtcgtgacaaaggaaggaagaattttgatgtatttatagacggggaatatttacttacagctacaacttctaaaaaaggagaaataaaaattaaaagaggaatagaattatctgatttcattattgaagctattgaaatgggattagaaattactgcaattcaaaaaatgtga

SEQ ID NO: 8060 - DNA, 750 bp, Methanobrevibacter gottschalkii
  source 1..750: mol_type = genomic DNA
atgaaaattggagcatcaacacttgcaggaatagaatataaattagaaaatactttagaatttattgaagatttaggactgaattatgctgaattagtgcaccaatttcctaatgaaagtattgatgttgaattattagaaaattttaatctaaaatattcaattcacacaccttttatggatgttaatattgcaagtttacaaaatcagagcagaataaatgcaatcaatcaaattaaatcctcatttaaactcgcaaataaaattgactgcgaatcggttgtcatacatcctggaactattccctttttagcaaacaaatactttagaagcaaagttattgatgttgctaataaatcgatgatcgaacttggaggatatggagaagatttaggagtacaaactacttttgaaaatatgccccagtttgacaatatgatttacagcaatatcgaaaaattacatgaatttctaacagacaacaacctctcaatgactttagacattggtcatgctaaacatgcaggatattcgtcagaggaaatgtattttgattccattaaacacatacacatccatgataattttggtgatgatgacacacaccttgcattaggtgaggggtcaattgatttaaaccatatagtaaacactttagagaaaaataattacgatggcatctacatcattgaagtaaataactatgattccatcaaaaaaagttacgaatatatgaaaaagaacttttag

SEQ ID NO: 8061 - DNA, 2322 bp, Methanobrevibacter gottschalkii
  source 1..2322: mol_type = genomic DNA
atgactagttatatttctcatcctctattgaaagagaatgcaattgaatcaagattatatcagcaagtgcttgcaggggatgttttaaaaaaaggaaacactatggttgttgcacctactgctttaggtaaaacaattgtggcagttttagttgcagcagataggttgcagaaggttaaaaattctaaaatactgattttagctccttccaaaccattagcaattcaacatgaagctagttttaaagagtttattactctcccatgcgcttcaataactggtgctattaagccagaagagagagttaaaagatgggaagaatcaagaataatttctgcaacacctcaaactgttgagtctgacttattaaatggacgttatgatttgagtagtgtttctttaatggtatttgatgaatgtcatcatggtgtcggatcttattcttatgtatatctggcgtctcgatatgttcaggaatctaagtttaatctaattttagctcttactgcttctccaggttcagataaacttaaaatcaaagaagtttgtgagaatttatacattcaaaacattgttgttaaaacagaagaggatgctgatgtgaaaccttactttaatccagtagaactggattgggttagagtaaagatgagtagtgaaattgagaaaattaaaggatatgtagataaatctctaaaaataagactcaaagctttgaaaaatatgggaattattagaaccgtatctgttggaaaagttgatattttaaaagcaaggggaaaagttcaaggcgagattgcaagatccactaatcctgataaagatttatttcaggctatttctattttaagtgctgttattaatattcaacatgctcaggagttaatcgaaactcagggtgttcaaacatttaataaatatgttgcaaggctacgtaaaaagaaaactaaagccgctaaatcattaatgtgggatgataattttagccgtgctattaaattggcaagggaagctgaaaagcatgggtgggagcatccaaaattaggagaaattacaaaaatcatcaaaaaggaattgggagaaagtgatggtcaacttaaattgactactaatcgttttgatgataagaatgataagaatgcatctaaaattatggtatttactcaatatcgtgatactcttgagatgattcatcagaaacttgaaaaagaaggaattaaatcagttaaattctttggacaagcgtcaaaagatggtgaaaaaggtttaactcaaaaacagcaaaaagcgattatcaaatcatttaaaatgggggaatatgatgttttgatatctaccagtgtggctgaagagggcattgatattcctgctgtggatttggttatattatatgagccagttccctctgaagtacgtatgattcaaagacgtggaagaactggccgtaaaagaactggtcgtgtaaaagtattgatgactaatggaacaagggatgaagcttattactggaccagtgtcaataaagaaagccgtatgaaaaatcaattaatagatccggatgttttagaagagttaaatgcatctgcaattgaacgtatggaaaatcaaagaaatgtaaaagtcattgaaaagcctaaaaaagaaaacaattttccaattgtttatgcggattcccgtgaaggtaattcaaaagtaattaggcacttaactgaaatggaaattgatgttaaagttaattcaatggctgttgctgattatcaggtaagtgatgaagtggcaattgagagaaaaacagcaaaagattttgttgattcaattattgataaaagattatttaaacaagctcgtgaattatcagaggaatttaaacgtcctttattgattcttgaaggtgatgatttatatgctggtatggttaatccaaatgcaattcgcggatcattagcatcaattgcaattgattttggcattagcattattccaacaagaaatgctcaggatactgctgcaatgattaaaagaattgcagttcgtgaacaaaatggtgaaaggactcctattcagattagaacagataaaaaacctgtaagcatgttggaacaacaactgttcattgtcgagtctttaccgaatattggtcctgttaatgctaaaaatttgcttgctcatttcggtagtgttggaaaaataataaatgcaagtgaaagtgaccttcaggaagttgaaggtattggtaaaaaaacagcagaaaatattagaaaggtaattgattcaaaatacctttattttgaaaaggaaattaaagaaaaaaggcttctctaa

SEQ ID NO: 8062 - DNA, 1512 bp, Methanobrevibacter gottschalkii
  source 1..1512: mol_type = genomic DNA
atgaataaaaataaaaccttcggagttattggtgtttgtggagcaaacggaaatttaatagcaaggattcttaaacaaagaggatataatgttatcgggactgatctgtctttcaaaaaggattgccggtttgctaaagcattagaaggttatgatattgaagtattctacggaaatgctccggaagctttctttaaaaaggcagattatataattcctcctgctagtttatctaaagattctagtttatttaaacaaatgggggacaaacctatttttgaattatatgatgtaattgaaatgattcaatctgaaaaaccagtctttggaataactggtactaatggtaagacaaccaccactacattacttaaaaaaattgcttatgataatggaattaaaccatgtgaacatgatttggaaggcatgcaaggtaatgctgagtttattccaattttacaatctagattggatggagatgttggaattattgaagtgggaacttttggtgttccgggaactattggaagaatagttaaaaatactggaatgtccggcggtttaattacaaatattactcctgatcatttaaatgatcttggaagtttcatggattatgcaaaagttaaagcggaattcatttctgaactcggtcttggtcaattaattgtaaatggacaagatccaacaattatgggacttttaagagaacttgattttaaaggagaagtaattacctttggggttgatgaactcccggattcaattggaatgaaagaatgtgtatgcggaaatgaaattgctgttaaagaaataatttcgggctgcggatactacttctgtaaatgcggccttacaactcctcaagctgattatattgcaacaaatattgatttaaaaaatagaacttttgatttgcatactccaactgaaaaattaacagttaagatgggagttgatggacttcacaatgtatacaatttaactggagtcattattgcagctcataaattcttagacttaccttatgataaaattttacctacaattgcaagtttcactggtgtaagtggaagaatggaagaagttgcaaaagttaaagggaaagatatttttgttgattatgcacataatcctgcaggtgtagaaacagttttaaaagaatttaaaaagttatttggagactttacaactgtaattacagtttcatctgaatcaggatatgttggggatattgatatatttaacagtgctttgaaattttcaaaattcattgttccagcatcagttgcatcacaaaaaatagcaattgaaaaacttaaatcaaagcccgaattaaatgataggatatttttaaaccatattgataactttgagaaaactggaactcttggggcttctgaagatgaagttcgggatggtttaagaaaagctttaaatttggattgtgaaatggtaatagctattggagaagctgctactaaattcaagaatgctgtttttgatttataa

SEQ ID NO: 8063 - DNA, 1386 bp, Methanobrevibacter gottschalkii
  source 1..1386: mol_type = genomic DNA
atgaattatttagttgttggtgctggaaatgctagtaggcctgttgcaagattattaaattatttgggtcatgatgttgttgtaacagatttaaaagatatttctgaatttaaaatagaatttcaaagaagtttaattgaaatggaaaaagaaggggtaagattagatatggctaacaaaaatccttcagttgaaggttttgatgctgtttatatgcctcctactttgcccgaaacagctccaatcgctcaaaaaatttatgagtctgacttaaaaattttaactaatgaagaattctctaaaatcgtaaatgatttaattgatgtggatattattggaattactggaactatgggaaaaacaactactacttttattacaactagcttatttaaacaagcaggatataaagtgtggtcatgttcttctcttgtaaataatttagtttcagaagctattgttgacggtattgttaaaggtaaagtcaatgaatgtgatatagctatttttgaacttcctcatggtactattggtcttttaaacaaattaaatattaaaattggtcttttaactaatattgcagaggatcatttatcagagttcggtggttctcttgaaaagtatcagaaacgtaaactgttattgcaggcaatgagtgagattttcatatcaaataattcatgtcatgatataattgaaaaagtccgtgatgatgcaatattttatgctttagatgaagatgttgactttaaaggtactgttggtgataagtcattaactattgcctatggtgataatgaatttacaacaccgtttaatatgatgagttatttctttgaaaactctgttgcagcagcctctattgcattaacatatggagttaatgaaaaagatatcatcgatgctttaaaggcatttaaaggtttgcctgcgcatatggaagatgttggggagtataatggcagaaaagtaattttggattctgcgtttttatatgatggaatgaaaattacccttgattactttaaagatgatagtgttgtattgttcttagatcattttgataccttgtctgtaagggacaaggcagaagttggcaatctaataagtgaatataaccttaaagcagttatagctagcggatttaatgaggttacacaggctgttgaaatggatgctgcaaatgaaattttagatgctataactaatataaacattgaaaaagttgctgttgaaacaatagaaaaagcagctgaattaactttcaaatattccgagcctggagatgttattttacacatggggccacttatagcatatgatagattaactactgttgataaaattattaaaggacttgaaagaggaagtaaaaagtatgaataa

SEQ ID NO: 8064 - DNA, 1188 bp, Methanobrevibacter gottschalkii
  source 1..1188: mol_type = genomic DNA
atgtttttaacaaaaaaagaagaacaaatgtgtgatggggagtttggagaaactatcagaaaaagcatggatatcttagttgctttaggggatatctatggtgcttctaaattggttgatattacttccgcacaggtatctggtgtttcatataaaactattggagatgctggtttagaatatcttgaagatttggctcgtgacggatcaggtaaagctaccattaatgcttcattaaacccgccaggaactgatttggataactggaaagagttaggttttccagaagaatttgcaattaagcaaaatcaaattgtggatgcttatgcaaatctgggaatttataaaacttgtacttgtacaccctatttggtgggtaatgttccaagatttgcagatcatgtgtcctggtcagaatcatctgctgtggcatttgttaattctgttatcggagctaggactaatcgtgaaggtggtccggcggcattggcggcagctattgtcggtaaaactccattatatggattccacttggagcaaaataggaaagctaatttaattgtcaatgttgattgcaaaatcaatggtgcagattttggtgcattaggttatattattggtaaatttgttggtggtggagttccatacttcaatttaatgaattctcccaataataatgatttaaaaactttaggggcggcacttgcatcttcaggttcagttgctctttatcacatggaaaatataactcccgaacataaaaatgctggaaaagatgatgttgaagatatcatgtttgtttcaagagatcaaattaatgaaactcgccaaaaattatccactactgataaaaaaccagatttaatttgtttaggatgtcctcatgcatctcttgatgaaattaaacaagtagctagcattgttcaaggaaaaactattaaaaataaattatggatttgtacgtccgtaagtgtaaaggcaacatctgatagaatgggctatactaagattattgaacaagcaggtggaaatattgtatgtgatacttgtatggttgtagctcctattgaagatatgggctttgaagtaataggtgtgaactcagcaaaagcggcaaactatgttccgtcaatgtgcggacttgatgttgtatataatgatgtggaaaatttaatacagtttaaataa

SEQ ID NO: 8065 - DNA, 1335 bp, Methanobrevibacter gottschalkii
  source 1..1335: mol_type = genomic DNA
ttgttaaatagggctagtgaagcaacagatatgctcaaggagcatattgaaaatgatgacgttataagaataatttctcataacgatgcggatggaatatcctctgcagccgtattagcgaatgctcttgccgaagaggatgtacaattccatactacaattattcctcgtcttaaaggtgatattgtaaatcaattaaggcatgaaaaatatgatttattcatattctcagacatgggaagtccatttattaaagaattcaacacatataaacatgatgttattgttgcagatcatcatcaagtaaatgatactgaagcggaaagcaatgttgtacacttgaatcctcatttgtttggaatagatggtagtaaagatttatgtggtgcaggttcaagttatcttactattcgcgggcttgataaaaaacatttagcttattttgctttaatcggtgcatttggtgatatgcaaggacaaaatggatttactggagtaaacaaactaattgttgatgatgctattgaaagcggaactttagaaattcatgaagggttgaaaattgtttccaaatcatctgaaccaatttttaaatctttagcttatactttttcacctcctcttcctaagattagtggagattttgagggtgcacgtgaatttttagaacgtatgaacttgtcttatggaattaaattcacagatttggaagacgaagagaaagatttattaaaagaagcgttgatgtctattaatccggatatttttggagattgttatacagttccaaaagaagtaccattattgcgtgatctggaggagtattcttatattcttgatgcatgcggtaaaaacaaaaaacaaggccttggtttaagtattgcacttggcgaacgtgatcaagcacttgacactgctttaaaattacaaagtcaatatagggatcaaattgttaaaggtcttgaatggattaagaaacaaggtgctgaacagcttaatagtattcagtacttatattctgaagataaagtattaaagtctgtgatgggtactattgcaagtataggtttgtcagttgaattattggatgattcaaaaccagtgattggtctttcaaggcttcataaggatattaagatatctggcagaaccactcgtaatatggttgcaaagggagttaatttaggtaaagcattgcaagactcttcaaacaactttggtggtaccggaggaggtcatgacatcgcagcgggtgctatggttgcttatgaatttaaagataagttcctacacctagttgatgaaatggttgaatatcaattaacaaatgattaa

SEQ ID NO: 8066 - DNA, 399 bp, Methanobrevibacter gottschalkii
  source 1..399: mol_type = genomic DNA
atggcaagaccagaatgggtaacttatagtgatgaagaaattgaagaaatgattttaaaatttaacaaagaaggtaaaagcacttctgaaatcggtattgtattaagagatcaatatggaattccatctgttaaagatgttactggtgaaagaatcactcaaattttaaaaagaaatgatcaagctggacaatacccggaagatttattaaatttaatcaaaagagctgttaacatcagagatcacttatctgaaaatcctaaagatttacactctaaaagaggtttaactatcatcgaatcaagaatcagaagattagcatcttactatgtaagtgaaggtgcattacctgaaggatggagatataatccaaaagaagcagcactccttgttaaatag

SEQ ID NO: 8067 - DNA, 552 bp, Methanobrevibacter gottschalkii
  source 1..552: mol_type = genomic DNA
atgataacatttataactggtaatgaacataaagttaaagaagcagagaatattttcaaagattatgacattaatttagagcatattgatttaggttatgaagaacctcaaggaactcttgaggaagtagctatatcaggtgcagaatatgcctgtcgtaaacttgataaacctgtgattgttgaagatgctggtttattcattaaagctttaaaaggatttcctggaacatattcacattatgttcaagatacattgggaaatcagggaattttaaagttattagcagatactgatgaccgttatgccgaattcaggtcagttattgggtactgtgctcccaattctgagcccaagatctttttaggtaaggtatcaggtgaaatcgcagttgaagaaagaggagatttagggtttgcctttgatccacttttttatgttccaagtcttggtaaaacatttggtgaacttacaactgaggaaaaaaaccaattttcacatagaaaaaattctttagaacaatttattaaatggtattctagtcaagaataa

SEQ ID NO: 8068 - DNA, 1590 bp, Methanobrevibacter gottschalkii
  source 1..1590: mol_type = genomic DNA
ttgatatgtttaggaattgaaggaactgcagaaaaaacaggtgtaggtattgttgatggtgatggcaatatattggctatgactggaaatcaattatttccagaggaaggtggtattcatccaagaatggcggcagaacatcatgcagaatggattcctaaattaattcctcaggctattgaagaatctggactttcatatgaggatattgatatgatatctttttcacaaggccctggcttgggtccgggtttaagaattgttgcaacttcggcccgtagtctcgcattatctcttaaaaaaccaataattggtgtaaatcattgtattgctcatgttgaagttggaaaacttgatactggtgctgtaaatccggtttctctttatgtaagcggtggaaatagtcaagttattgctcatgaaagtggaagatataggatttttggtgaaaccttagacatagctattggtaattgccttgatcattttggccgtgaaactggtttgggtcatcccggtggtccagttattgaaaaattatctaaacaggggtcttatattgatttgccttatgttgtaaaaggaatggacttttcattttcaggattattgtctgctgcgttaagggaagctaaaaaaggaactcctattgaagacatttgtttttcacttcaggaaactgctttttcaatgcttgttgaagtaacagaacgtgctctttcccatactcagaaagatgaagtaatgttgtgtggtggtgttgcagctaattcaagactaagggaaatgcttaacacaatgtctgaggagcatggtgctaaattttatatgcctgagatgaaactttgtggtgataatggtgtaatgattgcatggttgggtcttttgatgtttcgtgagtttggatctatggacttatctcaaactggtattattcaaaagtttagaactgatgaagttgatattccgtgggttgataatgttaaaacctacttaaaattaagtgatgatttgattgctaaaggtgcagaatctaacattgttaaaagtaactatttgggtgaaaaagctgttctaaaagacagaattcctaaggggtatagaatcgccgaaattgatgataaaattagaagagcaagaacaaaagaggaagctaaacttttatctgatgcaaaatgtgctggtgttaaaactcctattttatatgatattaacttagaagaaaaatcaattttgatggaagaaattaaaggtaaaatggttaaagatgtcatggatgaggatttggcatttaaaataggtgtggaaattgccaaacttcatgctgctgatattattcatggggatattacttcatcaaatatgatgcttcaggatgggaaattggtttttatcgattttggtcttggaaaatattctaatttagatgaagataaagcagttgatttgcttgttttaaagaaatctcttcagagtattgattataatttagcatcgaaatattttgattgcgtattggtgggatatggtgatgaaaatatggttaataaaatatctgacatagagtcacgtgggagatatacccactaa

SEQ ID NO: 8069 - DNA, 501 bp, Methanobrevibacter gottschalkii
  source 1..501: mol_type = genomic DNA
atgggattttataacgctaatactccagaacagaaaagagttaaaaaattaacaggagatattaacatcagtgatctgtttaaaaacgaatgtaaaacccgtggaattgcaatttataatgcttataatattcaaaaaagattattgcacgaggtagaacaagaacaacttcatggtgttaaagaagtagatgatagattaatggaattacttgacgaaaggggaaaaaataaagtaacacatagatatgttgatttcatttccaatgaagatagtgcatcaaaaggaattataccccaaaaaacaaatgaacaaaatccacttcctccaaatcaaattagaattccaccaagagcaagagacggaaaacaattcttaaatgatgatgaattaccagaaatagaaatgttaaagaaaatcatgctacaaaataaaaagattattaatcaaaataaaataattttagaacagttgaggaaacttggtgaaaaagatgattga

SEQ ID NO: 8070 - DNA, 1071 bp, Methanobrevibacter gottschalkii
  source 1..1071: mol_type = genomic DNA
gtgaaaaagatgattgatggaataaaaacatatggatcaactgaacttattgaaaaactgcaggaatgtgatgacccagtattcttacttacaataggaacgactgatacttcaacaattccagatatttcaggagctggcgcaacacctgaattaacagtatttacaccagcagcagatgctgaatttttagttttaggagaagtccattgtacccgaactgcagccgaaacagttgttgatggtgcggcagcaccaacacctgcaagacttacaaaagcggcactccagctttcaaatatcccatttgttattattgatgcaggttcaaaagttaaagcagacgtatcatattacagttttggaaaagaacatgggagagatataagaactggagaaggtattttaaatccattagaaattattgaaaatggaaaagatttaggtaatgagctatctagaagacatgaaatgctcatcattggtgaaagcatacctgcaggaacaacaacagcactaggagttttaaaagccttaggttatgaagctaatgaaaaagttagtggaagtatgcctcacaatccacatgatttaaaatcaaaagttgttgatgaaggtttgagaaatgctggaataatacccggtgaagcagatgccatacaagtgattggtgctgtaggagatccgacaattcctgcaattgcaggtcttgtgttaggttctgatattccaattattttagcaggcgggacacaaatggcagcaacatgtgctgtaataaaatcaattcagccaaactttgatttttcaagaattaatttagctactacagtatttgttgcagctgatgaaactgcagatttattcggtattttaaatcagattgacagcagcattactgttcatgtagtagatcctaaatttgaagattcaaaacatgaaggattaaaaaattatttaactggatttgttaaagaaggtgcaggtgctggaggaatgatgtttacagcacttgttttaggaagttctgttgaagaattaagagaaaaaatagaaaaagtatgtaaatag

SEQ ID NO: 8071 - DNA, 834 bp, Methanobrevibacter gottschalkii
  source 1..834: mol_type = genomic DNA
atggatatattacaggctataataattggtattgttcaagggttaactgaatttttaccagttagtagctcagcacatttagtattcgctcaaaaattagtgggtgttgaaagttctcttacatttgatgttttacttcatttgggaacattgattgctgttctttggttcttccgttgggacataattaaaatgcttaaatcttggtggttgagtattggtgatttattgcaaggaagatttaaacaaggtttttatgatgatccttataagagacttgcatggtatgttattttagcaactattccagttggtattgttggagtcttatttgatgatgcaatagaatcattatttgcaggcgcactttatgttccggcattctttttatttgtaactggtactattctttatttgtctcaaagaatgaatagtggaaagattaacatgaataacatgtctaaggttgaggcattggtaatgggattaggtcaggcatgtgcaatattgccgggtctttcacgttcaggaactacaatcgcagcaggtttggtaatgggtcttgataaagagttcgctgctaaattcagttttattttatccattccagcaatttttggagcattcatttttaaattaaaagacataggttctgcaatggatgttaactttttaccggttttcataggttttattgtatctatacttgcaggatatctggctattaaatggatgttggatttaattaaaaacagaagcttggatatctttgcatattattgctggctgatgggtattatagtgtttatgggatcaatttcccatatattttaa

SEQ ID NO: 8072 - DNA, 924 bp, Methanobrevibacter gottschalkii
  source 1..924: mol_type = genomic DNA
atggcatgggatgacacagctagtaaaatttgggtagatggagacatggttgattggaaagatgcaaaaattcatgtactttctcatgtggtccactatggtacaagtgtttttgaaggaattcgtgcatataaaaatgaaaatggtgtagcggtattccgtttaaaagaacatgtacaacgtttatttgattccgcaaaaatatataaaatggaaattccatttacacaagaagaaattcaagaagcaattttagaagttgttcgtgtaaatgatttaaatggatgttatattcgtcctattgcatttaaaggatatggacaattaggtgtagatccttcaagctgtcctgttaatgtagttattgctgcttgggaatggggatcctatttgggtgaagaaggaatggcaaatggtgtggatattggagtatcttcttggagaaaaccggcacctgataccttcccagcacttgcaaaatgtggtgcaaattatatgaactcccaattagcaaaactcgaagctattgataatggatatgatgaggctatcatgcttgattatgaggggcatgtttccgaaggaagtggggaaaatatcttccttgttgaagatgaaaaactattcactccagcaatgtcatcatcaaaccttaaaggtattacaagagattctataatgactgttgcacgtgatttgggttatgaagttattgaagaagttatttcaagagaaagattatactctgctaatgaagtattttttacaggaactgcagctgaagtaactccgatccgttcaattgatcacagaactataggtataggtaaaaggggaccaatttctgaaaaactacaaactgctttcttcgagattgtggaagctaaagtagaagataaatatggttggttatcttacatctaa

SEQ ID NO: 8073 - DNA, 828 bp, Methanobrevibacter gottschalkii
  source 1..828: mol_type = genomic DNA
atggtagttaaaattgctattattaaaagtggtaatattggtacttcaccagtaattgacctattgttagatgaaagagcagacagaccaaatatcgatgtaagaacatttggatctggagcaaaaatgaaccctgaacaagtagaagacgttgtacctaaaatagatgcattcgaacctgattttgcaatctttatcagcccaaacccaggagcacctggtcctgctaaggcaagagaaatgttatctgaaaaagatattcctgcaattatcgttggtgacgcacctggtaaaggtaaaaaagatgaaatggatgaacaaggattaggttacatcatcgttatgtctgacccaatgattggtgcaaaaagagaatggttagacccaactgaaatggctatcttcaactccgacatcttaaaagtattagctgaaactggagcattaagattagtccaacaaactattgatactgtaatcgaacaagctgaagcaggtgaaatcgaattacctaaacttatagtaactgctgaaaaagctgctgaagcaggtggattcgcaaacccttacgcaaaagcaaaagctattgctgcatatgaaatggctggatccgttgcaaacttagacatgaaaggttgtttcatgaccaaaggtttcgaaaacttcatcccattagtagctgctgctcacgaaattgctgcatgtgctgctaaattagctcaagaagcaagagaaattgaaaaagctaatgatactgttttaagaacccctcacatgaaagaaggaaaccttggttctaaaactgacttaatctcaaaaccagaataa

SEQ ID NO: 8074 - DNA, 579 bp, Methanobrevibacter gottschalkii
  source 1..579: mol_type = genomic DNA
atgactaggaatataaatgtttcaagaaagacatctgaaactgacattaatattaaaatgaatcttgatggtacaggcaaatataatatttcaactggtgtgaacttctttaatcacatgttagaatcgttttcaaagcacagtatgattgatttggatgttcaagccagaggggatattgaaatcgatgaccaccacacaattgaagatgttggaatattacttggtgaagcatttaacaaggctattggtgataaaaagggaattaaaagaatggcacattctattgttccaatggatgaatcagtagcaacaatagcaatagatattagtggacgtagctattgtaatatggacttgaaatttaaaaatgaaaaaataggggatatgacctctgatgttgtaattcatttttttgaatcttttgccggttctgccaaattaaatatctatggtactgttgaaggtgcaaatgatcatcataaggctgaagctgtttttaaagcatttgcaaaatctattaaagaagcaatcaaaattgagcacaatcagattccatcgacaaaaggtgttttatag

SEQ ID NO: 8075 - DNA, 192 bp, Methanobrevibacter gottschalkii
  source 1..192: mol_type = genomic DNA
atgttacaaattttagttgatgaagaaaagtgtattggttgtggaaattgtgctgagatttgtccaaaatctgctaaaatttggaaagttaaggacgttgcacatatattggatttaagatattgtcatgtttgtactttatgtgcaatggaatgccctacacaatgcattaaaattgaacgtaatggttga

SEQ ID NO: 8076 - DNA, 693 bp, Methanobrevibacter gottschalkii
  source 1..693: mol_type = genomic DNA
atggcggatgtaaatgctggtgttgaatataaaattaatgttgatggtaatttatttttattggataataaaaaataccaattattacaatctatcttagatactggttctttaacaaatgcgtctaaggaaattaaagtttcttataggactgctttaagttatattgaaaaaatggaatctgcacttaatgtaaaaattgttaatactactaaaggtggtaaaggtggaggtggaggaacctctcttacagatgagggttactctatcttaaaggagtgtaaaaagattaatgcaatcatggaacttcataaggacgttaatgaaattgaagcggatattgttgacattaatgttgagaagggtgtaatgactattaaaatgaatcagtttgaaataaatgccccgttaaacaggaattatgatattggggataaaattttagctttaataagttatgataatatatttttaatgctggaacctcagtcttcaagtatccgtaatgttttaaaaggccagatcattgaaatgagtcttcaaaatgagataattcgtgttaaagtggatgttggcggagttgttttgtgttctgatattactgtttctgctgaaaaagagttaaatcttaatataggcaccgaagtttatgtaggttttaaagcaatgtctgttgcaacattaaaattatga

SEQ ID NO: 8077 - DNA, 1557 bp, Methanobrevibacter gottschalkii
  source 1..1557: mol_type = genomic DNA
atggcaaataagttaattcgtggtagtttaataattttaataggtaatgtaattttccgtattgggggttatatttaccgtttcttaatggcaattttacttggacctactgcatatggtattttaggaattactttaccatttcaaggaatttttcagactttatctgctggtgggctccctcccgctattgctaaatatgttgcagaatacgaagctattgatgaaaaggacatggctcggcaaacaatctacactgccttaaagattatggtttttctaggtttattctttggagtattgatgattttcattgttgctccatatttggcttatggttatttggggaaacctgaagctttaatccctttacagattgtagggcttattactccattcagtgttattgttggtgcatttagaggagcattccaaggggtatataaaatggagtatattgtatatactcgtgctgtagagcaacttggtatgattttatttgcaactgcatttgtattaataggtttatctacagttggagcgttatggggtactgttttaggatattctctttctgttgtagcggcggtttatattttcaaatatcatatgggaaatttaataccggaacctagtgatgattttgtttttacaagacgtgatgaattaaaacttgcaactgtcctggttaaattttctattcctgtaattattacagctattgctgaaatgcttatttataatatctgtacaattgttatgggtaaatttttaacatttgatgacattggatttttcgctgcggcagatcctattgcaaggcttcctttaattatttcaatttccatcgcaactacaattttaccggcttcttctgaggcattcaagttaaaagacattggcatgcttcaaaaatatgtttcagaagcttataagttttcattgttgtttgttgttccgatgtgtgttggtcttgcattatttgcagaacctactttaagagttctctactttaaaaatcctgcttatgtggctggagcaatggcattagcaattctatctattggaatgaccttttattcaatatttgctatttcaactagtattgttcaaggtattggaaatccaagaattcctatgtatattttagttggcggggctgttgttactggagttcttaattggataatggttccaactcttggaatcgctggtggtgcacttgctactagtgttgcttgttttttaatgatggttccatgtatatactttgtatttagattaacaaaaaccaaagctcctgttgttgcagtagctaaaatattggttgcttctgcagttatgggtatagttgcatactttatcccaaaaagtactttatttttattccctgggatagtattatgtatggttgtttacttttttgctttgattttagttaaatttttccaaaaagatgatattgaaagtttaaggaaattttcatctaaatttggcccgttttctaaacttattaataaaatgttaaattttgttgaaaggattgaatttagatag

SEQ ID NO: 8078 - DNA, 585 bp, Methanobrevibacter gottschalkii
  source 1..585: mol_type = genomic DNA
atgaagatttttggtatttgtgctagtcctagaaataatacaactgaatatgcgttatcaaaagctatgaggagactgaatgaagaaggttttgaaacggaaatgtttacttgccaatcaaaagatattaaaccgtgcatgcattgtgattattgtttggaacataaaaaatgcataatccaagatgacatgggggatgtttataaaggtcttttaactgctgatgggattattttagctactccagttcaaaatggtggtatcagtagttatctgtcagctattatggataggactagagcattagaagctatcgattataatattctaagaggtaaaatcggaatgagcatcactgttggcggcgatcgtacaggtggacaagattttgcccatttaaaaaatattacttatttcatgatacatggtattattccagtaagtggaggtccttttggttctaatttaggtgcttcattctggtcaaaagattctttagatgatattaaagaagattattatggtatggattcattaaacagaactttgcacgaatttgaaaattttctaaataaatatatttaa

SEQ ID NO: 8079 - DNA, 339 bp, Methanobrevibacter gottschalkii
  source 1..339: mol_type = genomic DNA
atgattcgtagaaaaaaaggaaaatttctcagtcaaggtgaagaagatcctatgagtggaacatcaaatttagttgatgtaatgttggttattgctgttggactgctgatatttttagttatttcttggaacatgcagaatattgtatttaatgaaaatatggatgaacaacaaaaagaaaaagtgaaaaatgcaataaaagaggtttcacaaattgaccagggcaatgaattaaatgatactccggatataagtaaatcttctggaaaaggttttactgaaatgggtaaagtttatcgagattctgacacgggtaaattaatcatggttgaaggttaa

SEQ ID NO: 8080 - DNA, 642 bp, Methanobrevibacter gottschalkii
  source 1..642: mol_type = genomic DNA
atggtggctattcctgggagtgagtttttaactgctgctttaaatgtagtttctcaaagtttacagattccagtaattattttcttattgatttttgcagtttttgcagtttttgcttttggaggtcttatttcagattataggactcgtataaaattaaatagggattataaagaaaagttaatattttctttagttaattctaaaacagtcgatgaacttaaacatgctgttgatggttcagagatttataattctcaaaaagaagttctattaaaaatagctgatgcacattcattatcttgtgaatctcgagaatcatgggctttaaatttaattgaggaagaagaggtcgtcatggccaaatctcttgaaaaaatagatattgttactcgtattggtccaactcttggattaatgggtactttaatcccaatgggtcccggtcttgcagcattaggtaatggggatgtttcaacattggctgctgctatcattgtagcattcgacacaacagtcgttggtatcgggtctggtgctgttgcttatgttatatcaaaaattagacgtagatggtatgaggaatattcatctaatcttcagttatttgtaaatgcagttttagagaatttaaacgattag

SEQ ID NO: 8081 - DNA, 684 bp, Methanobrevibacter gottschalkii
  source 1..684: mol_type = genomic DNA
atgagttttagtttgttatggtctgttggatttgctgtttcaatagtggtttttgcgatatctattggtttggttattaattctaaaattaattcgaataaaaatttagtcaaattagtttttgttttatttatatctactttaattcttatttattcgatttgcatttttaaaattcagttaaattcaattataggtagttataattatgttttattgtttttaattgcattcctattaatgtttataggatatattattatcaaagaaaatgggtgcggaagaacttttataaatgttcttttgttatcttacttaagttttatattggtgatgttaatttgtataggttctaaagaatctatttttggattggatgatttacaaattagtttattagcaacactattgtttaattcattgatccttgttgtattctttgcttgtagaaaattaaagttgattgataggtcttatagaagttttggaagcttgtatttaatattgggaatttattgtttaatgatttcattattgcttccaaatatcatctctttgaatatgggggatatgaaacctataaatattgtttcaattgattcaatagcttttatttttattttattgattgtgataatggttttaggtttgttgtattataaaagaaatactttattgaaatga

SEQ ID NO: 8082 - DNA, 516 bp, Methanobrevibacter gottschalkii
  source 1..516: mol_type = genomic DNA
atggaatgtaaaaaattagcattgttgatttcagttatttttattatgtcatttgcagcatctggagtattcgctcatcctggtcatggttctgagtatgtggaagaagtgacttctgatgatgttggttcatcaagtaattccggatcttcttcaggtagttctggttcttcaagtaactctggtggttctaccgttccagcttcatcttcttctagtagctctagttcttcacgtagttctagttattctagttctgacccttattctagtagctctagttcttcaggagctcatgattcaaaccatgattcatatcaaggttcatcatctaattctgttgtaaaagataattcttctcttaaagatgcaaataaaacaaatgaaaatttaactaatgattcaggtgaaattgataatgatgaattatttacagtaaacaatattctattattgattattgtattgttttgtgggtttttcataagtgttattctatttaaattattttcttaa

SEQ ID NO: 8083 - DNA, 2931 bp, Methanobrevibacter gottschalkii
  source 1..2931: mol_type = genomic DNA
atggggggtaaaaatattaacaaacatttaatttcacttttatttttttgcattttagttttgctaatggcaggtggagtttatgcagaagatatcggtaattcagatgtttttgaaaatccaatctctacggatattcagcaagatgatttatctgaagatgatttggatatatctaatttaaatgttaaagttaattatcaatatgctgatgataatggaaaaataaatcctactattaaagttaatgataaacatattatatcaaaagaatttaatagttcatatcaaaattataatgttataattaattctacaaatattgcagataaacttaatatttctatttctgcaccgggatatttgactcaatataaaatagtcactccaaacatgggtaaatctattttggctaatgtcacttttaatatggaatcttctgaaagttacaaattaggtagagatgtaactgcggaagcagataaattacttgattttaaaaatgctgatgatgttttagctattacaactgctggtgttgcaaaatataatggtaagactagtgaagatgcaatggaagcaatggttaattatggaaaaatatcttatagcaatatattaatgttacgtcaaagtgctattgatcctattgattttgcttttattgttaagaaaggaaatgagttaaaagctatcattttccaaaatgcatctactaaatattcatatttgggaactatttctgagaacatgacaaaagctcaatggaataaatattataagtcacttgttggtgaaaattcctgggcatttgctagcttggcaaatggttgggctgctggtgtttctagagaaattcttcaagaagccgcttttcatggccatatttgtgaaggtactttgggtggatatagtattattcaagctttgttgaaatactatccgcctgagcaagaaaataatcctggtggaattggttctcctgcagatattactgcttataaagtactcggagttcctggcggatcggatgatgatgcagcattattctttttagatgatacaattggtaaaactggttatgctggtatgaataccactaatactggggctactgagaatatgattggttttattaaatggaattccaaacaaaagactggtgatttaattatcatgtcatttaattccactaaacttaaaaaacttttcaaaaaagaaactaaaataaatgctgatgctggaagtttggaagaattaaaatactgctcttggtggattaataaaattaataataatcctgaaaaattagttgattttttatatgaatttacaggtttaaatcaagaacaatataattacttgatgggaactactgaaaatataacttatgatggtgaacctgcagagtatggtcttgatggtcatggtttagatttaaactatattttatctttaaatctccccactgctaaaagaacaatcaatagtgttgctcatgctaaattaactgatgctgaacttaaacaaattggtattgatgcagccaataaagctaaaaaaatattcaatgaagaattgggtgttgaaattgatagggatgatattgattttctagctttaactgatgcaggatatgcatttttaaatggccaagatactgtagttgttcgtgatggtcttcatgaagtccttggaggaacattatatagtcaaaatttattaagtcttcaccaagctgtatggaaaccgttgtggtttgcatttgcaattcgttatccggattctgatttagttgatatgatttatttaagatataatccagatactaaagatttctttgttggaactcttgatggtaatagagttgtggatattggttttgaaacattaaataatagtgataaattaaaagctattgcaaaatcttttgttcctgatggaaattggtttaatattcaaagtattgtaaacgcatggaatgaacatcctttatttgatcagatggctactttcttgtatcatgctcatgtatgtcctggcgttcaaccaggtttctttataactgattatattcaggaaaaatatccattaggtgaaaatgaatcttacacttacattgcatctagtatttattgtaaagatgacagtttaacttatctattggatttatctccaggtttaggtactttttatgtacaaaaattaccaaaaaatgaaactgaaaatggaatatctcaaggtgttcttgtcgtatgggataaaaatcttaaaataggtaaggcagtaattgttaattttgatgattggggtacaattgacacaagtatgtatgtaactagtgaagcaaaacgtgctagtcaaattaaagcttatattgacatatatggtaataggaacaatccaaatgttaaatctaaaccaattgtctcaaccgtaaatgaaaaatggattactgaagaacaatttaacatgttaaaacaaggtgctggtgatgattttaatgtactttcatacttgaaaagccttgatgatatcactaaagaagatttattaaaatcaataaatcaaaattccaatagtaattcaaattcaaactctaagcctaacattaaccctaatagtaattcaaattccaattctaacagtagttcaaatgctatagcatctcatacaaattccaatccttcatcttctggaagtgttggaacttctggtgcagtagtttctagtgcatatgttggcgagtttactaaagatgctgaatctgaagattcacaaaacggtcctgatgatgcaaaatcatatgaggtatctaaatctcctgcagcaaaatctgctgattcaaatagtttaatttatgctttaattggtgtattggctattggaattttgcttggtgtaggttatatgaaacgtgataaaaaatag

SEQ ID NO: 8084 - DNA, 624 bp, Methanobrevibacter gottschalkii
  source 1..624: mol_type = genomic DNA
atgcatttacctgatggaataataagtttcgaacaagcaataatctattggacaataacattgataattgtttcactattcttttacaaattttctaatgatgaaaataaagaaaaaagaataatatcaatagctttgtttagtgtttttacaataggcattacatcattatcaatcccatcaccgcttggagtgccaatccacttcttcataataccattaatagctatgttattaggtcccttttctagcacaatagtatcttttgtaactttgattatgcaagcattaactctgaatatgggtggtataacatcattaggtgctaatttcattgtaattggattcatattgtctgtagcaacatatgggttttataaactatttttaaatttaaataaaaaatttgcaatatttggatcaacagttattggaattattattgccacatttggacagataggcattttattaatttcaggagcaatgaaccttgatgtattattatcaacattattgccattttatgtattcatctcatttatagaaggttttgctaatgtgattataataacagctattgaaaaaataaaacccgaaataattgaaataaataaaatttag

SEQ ID NO: 8085 - DNA, 483 bp, Methanobrevibacter gottschalkii
  source 1..483: mol_type = genomic DNA
atgaaatatttaaaaatatcaatattgttattaatattacttttaggaataagtacggtgtcatcacatggagtagatgtaacagcagacaccatggttgttgctaatgacagcaatggaaaaatggtcaaaagtattgcagaatcaaataatattaacattagcgtttataaattcacatctgaagatgaagttacacatatccttgaacatagtataaacaacacaaacaaaagaatattgtttactgcatatcaagagactgctaatgattttttaaaaaagcatcctgacatgtccaatagaataattgtaatagacaatgtaaacgacaatacaactcttgaaggacttcaaaatattatgaatgtgcccgtagaaaatgtaaatagtgaaaataattttggattgccattaacaatcggtatcataataggtttattaattggtattggctgtggagcatatataatgaaaagatag

SEQ ID NO: 8086 - DNA, 840 bp, Methanobrevibacter gottschalkii
  source 1..840: mol_type = genomic DNA
atgaagattggaaaaggtatcgtgaaaaaatattctcggaagtataacagaacacttaaaaatggcgaacaaaagaaatatactaccgaacaaatacaaattaccatccctaaaaatgaagatatttattacaatcaagaagaagttttaattatcccaaatagtgaaattgaaaattttaagagtagagaagaagaaaatgaatttttaaaaatcgctaattatttttatgttgaggaagtgaaacaattgaatgaacagatggatgaaaatttaaactctacttcagaatatgaaaaagaaattgaagagttaaaagctaagattacttctttaaaagatattgaagacaaatataattcaattaaaaaagataatattgaccaactcaaacaagaaaacgagaatattcgagataaacactccaaattgattatcgagaatgaaaacttaaaaaataaatttgtcaatattaaaactgaaaatgaaaacttaaaaagcaaatattcaagtattaaagaagaaaataggaatcttaaaatcaaatgttccaatttaaaagatgaacattccactattaaagatagttacaatcaagtttcaacaaaatacgatcagttaaaacaagaaaacctcaatacaaaaacaggttatgctgaaatctatgaaatcaatgaagaattagaaaaagactatgacactcttcgtttagaatacaatgacctggtcgataaaattaacagtttagaagaagaattatataaaattaaagctatgaaagaccacgacacatatatagccaataaagttaaagaatttattttaaaaagtggaaattaa

SEQ ID NO: 8087 - DNA, 282 bp, Methanobrevibacter gottschalkii
  source 1..282: mol_type = genomic DNA
atgggattttgcaattcatgtggtagaccaattgtaaaagaagattatggaactaacaaggatggaagtttaaaccctgatttttgtaaagattgttatcaaaatggtgaatatacggaacctgatataactctagcagaaatgattacaagaaaaacaaaggaaatgatggaaaaaaatccgagattgcctgaaacacaagctacaggtattactgcagtgtttattccaggacttaagagatggaatccagagtttcaagatgattataaaactctttaa

SEQ ID NO: 8088 - DNA, 1251 bp, Methanobrevibacter gottschalkii
  source 1..1251: mol_type = genomic DNA
atggacccaatgtataaaataggagaagctcttattggagatggccctgaattagcacacattgatttattgattggtgataaattcggacctattggtcaggctttcgctaatggtttatcaaacttatctgtaggacacactcctttaacaagcgtaattagacctaacttaatgactaaaccagctactttaattattcctaaagtaacagttggtgatttagatgatgctggtaaaattttcggacctgcacaaactgctgttgcaagagcagtagctgatgcagtagaagacggatatattccaaaagaaattgtagaagatattgtaattaatgtaagtgtattcattgatccatctgctaaagattacagaaaaatttatcaatacaactacggagcaaccaaattagctatcagaagagcaatggaagattatccatcaattgaaaaagttttagcagaaaaagaccgtggaactcatccaattatgggattcaaagtcaaaaaactttggtcaccaccatacttacaagttgctcttgacttagataatgaagatgctatggaaagaataattaatgatttgcctgataatgacagaatattactcgaagctggcactccactcgttaaaaaattcggtgttggaatcattggcaaaatcagagctttacgtcctgatgcattcattattgctgacttaaaaactttagatgtgggtcgtgttgaagttaaaatggcggcagatgaaactgctgatgcagtagctatttctggtctcggtactgttgaatctattgctaaagctattcatgaaactcaaaaacaaggtatctattccattttagacatgatgaatgtcgcaggatttgaagaaaaattagccaaacttcctaaagacttaaaaccagatattgttttattacacagaaatgtagacatggaaacttacagagcagaacatggtgaagacactagtgacatgactgaatggggtaacattaaagatattaaatcaatgcttggtgataaaggtcttgttgctgttgcaggtggtattagacctaacaatgctgaagaagctattgaaaaaggtgctaacatcattatcgctggtagatacattattggttctaaagatgtaagaagagctgcacaagacttcttagaacattttgaaccagatccagacaacatgagacttgctatggatgaagatgaaaacattgaagtaaaagatgactag

SEQ ID NO: 8089 - DNA, 1827 bp, Methanobrevibacter gottschalkii
  source 1..1827: mol_type = genomic DNA
atgagaattttattaattcattctgattatttaaattataatgtaaaaaataaaacacctgtagctgaagatattgaggaagctaaaaaagaaggttcctttgatgattctttagttgtatttacagctgttgaaaaagatgatgaaaataatccagaaggtattgttaaaaatttagttagtgaagttaaaaaaactaatgatcaagttaaagctgaaaatattgtattatatccgtatgctcacttatcttcttcattaagctctccaaaagttgctatacaaatattaaaagatgtggaagaagctttacttgctgaagattttaatgtaaaaagagtgcctttcggatggtataaagcatttgaaatatcttgtaaaggtcatccattaagtgaactttcaagaactatcactgctgatgatgcagaaaaggctaaagttgaaagaaaaccttcaaaatggcaaattcttgaaggtaacaaaatcactcaaattgaagactttgaatttgataataaaactttcaaacaactagttgattatgaattgggacaaggcgcatctgatgaaggcgaacctcctcatgttaaattaatgagggagaaagaaatttgtgattatgaaccagcttctgatgttggaaaccttagatggtatccaaaaggtagattaataagagatttgctcgctgattatgtttacaaccttactgtagatcatggagcaatgccaattgaaactccaattttctatgatttagataatgaagccatatatcagcatgcttacaaatttggtgaaagacagtatagaactgatactaaaaagaatttaatgcttagatttgcctgttgttttggagcatttagggtaatgtctgattcatatttaacttggaaaaacttacctgctaaagtttatgaattgtctacttatagtttccgttttgagaaaaaaggagaagttgttggtcttaaaagattaagagcatttaccatgcctgatttccattcattctgtgctgatgttccggcatctcttgaagaattttcaaatcaaactgaaatgtgcatgcaaactggaaacgatttaaatttggactttgaagtaattttcagagcaacccaggacttctttgatgagcatgaggaatggatgtatgaagttgctgaaaaattcggaaaacctgtcttattagaaattttaccagaaagacaccattattgggtatgtaaaatagacttagcaaacatcgatgctttaggtcgtccaattgaaaatccaactgttcaaattgatgttgaaagtggtaaaagatttgatatttcttacttaggagaggatggtgaacagcataatccaactatattgcactgttctccaaccggaagtattgaaagagttttatgtgcaatgcttgaaaaaaccgcaattgaattaaacgaaaaatcaccaatgttgccaacttggttaagtccaatccaggcaagaattttaactgttggtgaatctcacaaagaatttgcagaagaattatattctaaaattaatgcttcaaacattcgtgtagatattgatgatagggatgaaagtgtaggtaaaaaaattagaaatgcatctaaagaatggattccatacatttttgtcgttggagataaagaagttgaatctggcaaattccaagtaactgtacgtgagactggtgaaaaagttgacatgacagttgatgagttaattaatgaaatcaacgaaaaatgtgaaggaaaaccttttagaagattacctttgcctaaagatatctcaagaaggattaacttccaataa

SEQ ID NO: 8090 - DNA, 1356 bp, Methanobrevibacter gottschalkii
  source 1..1356: mol_type = genomic DNA
atgagaattattttagcaggaaccggaagtgcagttggaaaaacaacaatagctaccggaataatgaaagcattaagtgaaaaatataatgttcaaccgtttaaggttggaccagattatattgatccatcttaccacacattagctactgaaaatatttcaagaaatttagattcgttttttatgaaagaaggtcaagttagggattcatatcttaagggaatggaaggaaaagatattgcaattattgaaggtgtaagaggactttttgaaggaatagattctgtaaatgacattggaagtacggcttcaatagcgaaatctctaaaagcaccagtaatattaattattaattctagaagcttggttaaaagtgcagcagctatagttttaggatttaaatcactagatcctgaaattaatattgcaggagttattttaaataaagttaaaaataaagcacattatctgaaaactaaaaaatcaattgaagagataacaaataccgaggttattggtggaataatccgtgatgacaatatttccattgaacaaagacatttaggccttgttcctgcccgtgaaagagaaagctcacttaaatttattgaattatggtccgaagttattaaaaattcaattgatttggatagattaattgaaattgcaaaaactgctccaagaattacatccaatattactcctatctggaataaattaaataaacagcaggtaaaaataggtgttgcttatgatgaagtattcaatttttattataaagaaaatattgaatcacttgaagcaaataatgctaaaataaaatatttttcaccattaaaggatgaagagctgcctgatgttgatggaatatacattggtggaggatatccagaactattttcaaaagaacttaatgcaaatcaaaatatgctatcacaaatcaagaacttccacatggaagacagacctatttttgccgaatgtggtggtttaatgtatcttatgaactcaatacatgaagatgcagtggtaaatatatacccttataagtcaattctaacagatagagtacaagcattaaaatacactatcgctgaagttaaagaagataacattatttctaaaaaaggtgaaaaattcaatggtcatgagtttcattactcaaaagttcttgtaaatgacaataatattaaaaacaaactagcatttgagatattaagagggaaaggatcttataataaccaagacggatttatggaaagaaatacgcttgcaagttatgttcacacccatgtagccgctatgccaaacttcggtggaaacttctgtatttcttctctagaaattggaggataa

SEQ ID NO: 8091 - DNA, 1062 bp, Methanobrevibacter gottschalkii
  source 1..1062: mol_type = genomic DNA
atgaatattagaaaaattgattttttcaatccattaattgttgtagttgcaattgtcgtttttttattaatggggtatgccggatcgtttgactacagatttgaagatcctctcaacatgaatgtatttttaacaattatttttgcatgcattgtttttgcaactggctttttagtcatggaaaataaaattattgttgataagactaaggaaatcaattttatttctgaaaggttattaataattcttgttttaatagctttgatattacagactctaaatataatcttaattggaggtattcctctttttaatagtgttttaaagtcaaattcaacaacaaatatttggagaatagcatatccgctatttttgataatgataaaccttttacttgcaaaatattataataaaaaatatttaattttagttgctcttggagctttaatatttggtcttaacggatatagaacatctgttttgggaattttaggaagttcttttattaccctatattatttgaatagaatatctaaaaaaataggaattttattcatagcaataatagctattggatttatggcaatcggatatattgcctcccaatcaatagctaatcagcattggacattgaatcctggtcaattagtactgtatagagcagcatttaccctagaagtttttgaaaaaataattccccttgccggttcaacaaatggacatattttaagtatgattttctcatctggaagccccagaacatttataggcgaatatgtcctgcactacaatgtttgccttacttcaacattattcggaccagttacccttgatttcggattaattggccttgcaattcaaatgttatttatgggagtatttattggaataatatataaattaaaagaaggaataggagttggagtttactccattattttaacacacacattaatttggatagaaacaggtcccacagacattatgatttggtttttatatttccttggattaatcttaataataattaatcataattatattaaattaaacaaaaattaa

SEQ ID NO: 8092 - DNA, 903 bp, Methanobrevibacter gottschalkii
  source 1..903: mol_type = genomic DNA
ttggaaaaaccacaattaattaattttatagctaaagtaatggaggactctggttttaaggtttataagaattttaaaacttctcagagagttatagatatatatgctattttacctactacaattggcgattttggtgttgttgtagcatgtaaaaactatgataaagattttaaaattggagtcgatgtattaagggaaatggaagaagttcaacagagtattaaagcatctaaggtaactattgtttcttcatcttatttttcagatcaagcaaagaactatgctcttagaaaaaacattaaattagtagatagggataatttacttgaacttgctaagaaatatcaggacaggacttcacaaactacattggataatactccttatgatggaggagcatcccaatatattgaagatgaatatcctgaatatacttatgatgcttctgatatggagtatttgatgagaagaagggagcaaaatcctgctgtttataaaaatacattgtataggcaaatcgatgaagataggcacactggattttcatcaattttaaataggggaagttcaagaaatagtagtttatccggtgtaactaatttatataattaccaatccagaaaaagtacttttggacaagattcattgttgtttaatttagttaaaaatccaattgttcttattattttagttgtagcagtttcatatatcatttcttatattgcaggtaatctattaaaagtagatgctggaataagtggattaattgagatgattgtggcattattcctttcatatggtttatcattgtatactgatagaaatagggattttattgttaaaggaacattcatattctttatttcattaattattttaattatattaatttttgtttaa

SEQ ID NO: 8093 - DNA, 777 bp, Methanobrevibacter gottschalkii
  source 1..777: mol_type = genomic DNA
atgaatgcattaataagtaacgatgatggaataaccgcttcaggaattctagcttcaaaaaaagccatggaaaatttatgtgatacatacgttgttgcacctgaaacacaacaaagtggaataggccatgcattaacattatttgaaccattgagagtaaatgaatatactttaagagatggaagcatgggttatggtgtgaatggaacaccaaccgatgctgtaacaattggattatttgaaatattagataaaaaaccagacataatgatttctggaataaatactggttttaatattggaaaagcagaattaacaacatccggaacattaggagcagcaatggaagctgcaagttttggaattcctacaatcgccatttctcaagaagtaacacaggacgatgttaaatttgaaaatggtaaagtagaagtagattttgattttgcagttaaaatgcttaataaattagcaaaaatagtattaaaaaaaggattacctgaaggaattgatttgctaaacgttaatattcctgtaaacccttcagatgatgaatttgaagttgtagaattaggaaataggatgtattcccctgtagtcgaacagcgcttagatccccgtggaaaaccatactactggattgatggcgaaccctatgagtttaatgaacctggaagcgatggttatgaattaaaaataaaacaaaaaactacaattacaccattaaaaattgatttaactggtgatatgagcttaataaaagaatggttaaagtaa

SEQ ID NO: 8094 - DNA, 144 bp, Methanobrevibacter gottschalkii
  source 1..144: mol_type = genomic DNA
atggcaattaatcaattagaaagtaatttagaagctattactcgtacaatagctcaattaaaaagagatggatgtactgatgaaaaaattttaaatgaacttagggaagaaagggataaaatacttaaagatttaaatttataa

SEQ ID NO: 8095 - DNA, 204 bp, Methanobrevibacter gottschalkii
  source 1..204: mol_type = genomic DNA
atgaatcaagataaagataatgtaaataaaatgtttaaacaatttaagaataaatatgtaactgttgatttaagaggaaactatcaaagcgaaggaaaaataatcgcaattgacaattacttaaacatcatccttgaaaatgaaaatggtttggaaactgtcaaaggtggaaatatcatttttattagtgtaaaagaagaataa

SEQ ID NO: 8096 - DNA, 1008 bp, Methanobrevibacter gottschalkii
  source 1..1008: mol_type = genomic DNA
atggtatttattggaatggaccatggaactactggaatctctttttgcataatgtctgatgatggcgaggtactcgatgtttttaaattaggaagagaagaaagtaaaaaaggtttagtttctgcaactgaagaaataacaaaacgtgttgatctggactctgtaaaattaatggctatcacttatgccatgggtgatggaataaaccagattttgcctacagacaaagttgaagatagaggtattttatctattgatggagctggaaaagtaactggaggtggaacttccgtattttccgaattagaatcattggatattgattcaatcatgattcctggtcttcataaagactctaattctttaaatgaattatttagagcagcttattctcatcaggctagtcctgaaaaagtaagtatttgttataatggattaaaggaaacaggatggtctaattttattgtagcagatatttcatctaatagtgtcgatatactgattgaaaacgggaaaattaaaggtgctatggatgcatgtcttggcgctatgggtgttgttcatggacctattgatttaaaaatgattagggatattgatgaaggaaaatcttcggctaatgattgtttttcacatgctggagcaattaaaattgcaggaattagtggtaaagtcgctaatgtgaaagatgtacttttagaaaagtatagaaatggggatgaaaaagcaaagttagctattgatactttaatcatgactgttgcaatggaaattgctggtttggatgtgatatgtgaaaatgaaattgagggaattgtacttactggatctattggaagtgcaattgaaccatttaattttgaagatgaaattaataaatatttcaaaaataagtatcatttaaaagtaatttctaaagaatctggagctattggtgctgctcaaattgcaatggatgtttataatggtaaagaagaaatattgggtattgaagttaatatttcctaa

SEQ ID NO: 8097 - DNA, 993 bp, Methanobrevibacter gottschalkii
  source 1..993: mol_type = genomic DNA
atgaaaatgtattacgatgctgatgtaaatacagatgctcttaaaggaaaaaccatagctgtaatcggttacggttcacaaggcagagcacaatctagaaatatggctgatagtggagctaatgtcattgttggtgtaagaaaaaatggaagttcttggaatttggttcaagaagatggcatgactgtaaaaactatcgaagatgcagcaaaagaagctgatattattcacattttactccctgatgaaattcaagaaaaggtttacaaagaacaaatagctccttatgtggaatctggtaacaccatttcattttctcatggttataacattcattttggtttaattgatcctgctgctgatgtaaatattgtaatgtttgcacctaaagggcctggatctatggtaaggagaacttacgaagaaggatttggtattcctggtttagttgcagtggaaagagatgctactggtgatgcattacaactcgcattaggtatggcaaaagcatgtggtttaactaaagcgggtgttttagaaactactttcaaagaagaaactgaaactgatttatttggtgagcaaacagtattatgtggtggtattactgaattgatcaatgctggatttacaactttagttgaagctggttatcaacctgaaatcgcttacttcgaaacttgccatgaagtaaaactcattgttgatttaatctatgaaaaaggttttgctggaatgtggaatgatgtaagtaacactgctgaatatggtggattaactagaggaaaaaccatcatcactgatgaagcaaaagaaggtatgaaagtcgctttaaaacaaatccaagatggaactttcaaaaaacaatttgctgatgaaaatgctactgatggagctaatttaaaagaaatgagagctgctgaaggtcaaaaagaaatcgaaattgttggtgaaagattaagaaaagcttgcggattacaaaaagatgattaa

SEQ ID NO: 8098 - DNA, 528 bp, Methanobrevibacter gottschalkii
  source 1..528: mol_type = genomic DNA
atgagtattttagaaaatgttttagaagataataagaaatttgttgaaaactttgaaggcgaagaaatgtcccaccatgcacaaaaaaatttagctatcttaacttgtatggattgtagattaattaacttttttgaacctgctttaggtcttaaaagaggggatgcaaaaatagtaagaaatgcaggaaattccatcgttggagaagatgcaatcagatcaattggagcggctttatacaacctcggagctgaagaagtgttagttgttggtcatactgaatgtggtatggcaggtgcagatgttgaagctctaaaagaaaaaatgcttgcaagaggaatcaaagaagaagacatcgctaaatatgatttgtctaaatggattggcggatttgacgacgaagaggaaaatattaagaatgttgttgaaaaaattaaaaaccacccattaatccctgatgtgcctgtacatggtcttattttggatgttgttactggtgaattaaaagttttagtagatggttactaa

SEQ ID NO: 8099 - DNA, 486 bp, Methanobrevibacter gottschalkii
  source 1..486: mol_type = genomic DNA
atgaataaagaatatcatgttatatccacattggtagaggataggccaggggttttacaaaaaattgcagggttatttaataggagaggctttaacattgacagtattactgttggagcatctgaagttgaaggattatctcgtatggtaattagtgtcaatgctgataaacaaggccttgaacaagttacaaaacaactaaataaattagttgatgttataaagattaaagatattacacaaaatgcagttaatagggagttatgccttattaaagtgcatattcctaatgaaaaagcaagagctgaaataatgcaatatacaaatatttttagagcaaaaatagtagatgtttctgaagaaaacttaattattgagcttactggagatataggaaaaattaatgcgtttatatctttaataaaaggttacggaatcaaaactatttcccgtaccggccttaccgctatggctagaggtgtataa

SEQ ID NO: 8100 - DNA, 1698 bp, Methanobrevibacter gottschalkii
  source 1..1698: mol_type = genomic DNA
atgagaggcggagaagcgataattcaatccctaaaaaacatgggggttaaaacaatatttggttatccgggtggacaaaccataccgttttatgacatgttatatgactcagacatggaacatatattagtaagacacgaacaatgcgcagctcatgcagcagatggatatgcaagagcttctggccgtgttggtgtgtgtttagcaacttctggtccaggtgcgactaaccttgttactggtattgctacagcatatatggattcttctccaattgtggctattacaggacaagttcctactcatttgattggaaatgatgcattccaagaagctgatattattggaattacaatgcctattactaaacatagttttcagcctaaaaatccaaattatattccttcaatgataaaatctggttttgaaattgctgcaagcggaagacctggacctgttgtaattgatgttccgaaagaagttcaagaaggtgaactaagtgattttgatgattcgttaattgatacaccgggttacaatcctaccactaaaggtaaccttagacaaataaggaaagcttgcaatttgattaaagatgctaaaaaaccaatgattttagctggtgcaggtgtcattatatctggtgcatgttgtgaactaaaaaaacttgcacatactattaatgctccggtcatgacttctcttttaggtaaaggagcaattgatgaaactgatgatttggcgttaggtatgcttgggatgcatggaagaaaagtttctaatgattatattaatgaatcagatttgttgatagctattggtgttagattttcagatagaactactggtagattagatagttttgctcctgatactaaagttattcatattgatattgatcctgctgaaattggtaagaatgttgatgttgatttaccaattgtaggggatgcacataatgttttaacttcattgaataattatctaaaagaatataaagtttccagggatgtaactgaatgggcaaacatgattaaagaaaaaaaacaaaaattacgtcctagagtttcttattctgatgttcccttaaaaccacaaactgttataaaagaaatagctgaggcattaacttcagattcaatattaacaacagatgttggtcagaatcagatgtgggcagcacatttcttcgaaactcaaaagccacgtaaatttatctcttcaggtggtcttggaactatgggatttggattcccggcagccattggtgctaaagtagcttgtcctgaatatcctgttgtatcacttaatggtgatggcggatttttaatggtttgtcaagaattagcaaccattcgtgaatatgatttgcctgttattgccattgttttggaaaatagaactttaggaatggtatatcaatggcaaagtttattgtataatggaagacactcacaaactttacttggtaatagtccggactttgttaaattagcagaaagctttggtgtaaatggtgttagaattaccgaacctggtgaaactaaaaaagaagtagcttccgcaattaaagataatgaaccagttttattaaatattgtaattgattctgaagaagcattacctatgcttcctcctggagccggaattagtgagatgattggtgaatacaaacttgagaaggatgtgattagatga

SEQ ID NO: 8101 - DNA, 333 bp, Methanobrevibacter gottschalkii
  source 1..333: mol_type = genomic DNA
atggaactaacaaaatatatttgtcacagaaaaccagagcgaagtttccacataaaaaatcatcaattcccagtctgtgcaagatgttgtggattttacacaggattaattgtttatttaatttgttatcaattttacaatcacaattatgatttaaatatgctattaatttctatgattcttatgattcccgttgcaattgatggtttcacacaatattttagtttaagagaaagtaagaacaacttaagatttataacaggtttaattggtgggattggtttaataatctttttaaaaataattataaggtggattttatatgtattgtag

SEQ ID NO: 8102 - DNA, 909 bp, Methanobrevibacter gottschalkii
  source 1..909: mol_type = genomic DNA
atgggtagtttattatcagttacagacattaaagatgatgttaaatatattttggagttagcctctaaaattaaagcaggtgaaattgaagaaaaaccactaaaagataaaacattagcaatgattttccaaaaatcatcaacaagaactagagtttcttttgatgttggaatgtatcagttaggtggaagagcaatttttttatcttctaatgatttgcaaatgggtaggggagaaccaatttctgatactgcaaaagttttaagccgttttgttgacgggataatgattcgtgctattgaacacgatgatgtaattgaattagctaaacactctgatgttcctgttattagtggattaactaatttagaacacccttgtcaggcattggctgacatgttaacaatcaaagaacattttggtgtttggaaaggtaaaaaaatctgttttgttggagatggaaacaatgtatgtaattcccttttattgattgctcctctccttggtatgaatatgtctgttgcttgtccaaaaggttatgaaccttctgaaactattttaaaaactgctaaagagtatgctatggaaaataatactgaaattattgtaagtgatgatattggtgttgcattggaaaatgttgatgtagtttatactgatgtttgggtaagtatgggtgatgaagctgaaacaaaacaaagagaaatagattttgctccatttcaggttaattctgatttaatgagtatagctaatgatgaagctatttttatgcactgtttgcccgcaattagaggtcaagaagtaactggtgatgttattgatggaccaaaatcagttatttttgatgaagctgaaaacagaatgcatgcccaaaaagctgttttatattattatatgaaggattaa

SEQ ID NO: 8103 - DNA, 834 bp, Methanobrevibacter gottschalkii
  source 1..834: mol_type = genomic DNA
atgaataatatgcctaaagatttagataaaataaaatttgagttatctgagaaacttgagtttttaaaagagaatgccgagtcggaagaagaaatagaaaaattaaataattttgcttcatatttggctgataaatattctcagattgatgatgaagatataaaaactgaaaaattaaacagaattaatacaggtctaagttattatcaacgttttaaaaaggctttagagaaaaatatagatattgatcctggaagattaatgggtcttacagacggaatctttggaatggtaatgactcttttggtatttggtattgcacttccagaattacagataacatattattccacatttttgtcatttttttcaagtttggctccaacaattggagttactgttgtcagttttgttttattaagttctttttggatttatcatcatgaatttattaaagtgaataatcttaatattccttacttatggttgaatgttttctttttaatttgtatatcatttgttccatttacaacttcattaattggacattactcacatttctttttatctgaagtcatttttggaattaatattctattaacaataatttccttcttattaatgtatcattatgcaaattcaatgcattttcttgaaaatgcgccttcaaaaaaagagcgaaattatgtttatcaaacttttggaatgataatgggattaaccattgttgtgaacctcttggatttccatgtttcaagttattttatttatttattcttactagttcctgtaatatctacaattagggatattagatttaaaatgaatgaatag

SEQ ID NO: 8104 - DNA, 1311 bp, Methanobrevibacter gottschalkii
  source 1..1311: mol_type = genomic DNA
atgaaggttttagttgttggaactggtgctcgtgaacatgctattgctgatgctttaaaagaggatgtggaattatactgttacatgagtaaagtaaaccctggaatgtctaaaattgctgaatttaaacaaggtgatgagggtgaagttgaaaaagtagcagaatatgctgttgaaaaggatattgatattgcatttattggtcctgaagctcctcttggaaaaggaattgtcgatgaacttcaaaaaaatgggatcagttgtgttggaccaactcaaagtgcagcaagaattgaaactgataaatcattcatgagaaaactttttgaagattataatattgatggatcacttgtttacaaagtatttgataactctgctgatgtttctgcatttttagatgaatttgagagggatgttgttgtaaaacctgttggattaactggaggtaagggagttaaaattgttggtgatcatttaaaagataatgaagaagcaaaagaatattcatgtgaagtaattgacaatgtaatgggtggatttgctcaagtaattattgaagaaagattaattggtgaggaatttacaattcaggcattttgtgatggtgaacacttagctccaatgcctgcagcacaagaccatcctcatgcatttgaaggggatgttggagcaattactggtggtatgggatcttattctgatgttggaggattactgccttttttaactcaaaatgattatgatgatgctgtaaaaattatggaatctactttaaaagctattgctaaagaagctgaaccatacaaaggtattttatatggccaattcatgttaactgctgacggtccaaaactaattgaatacaatgcaagatttggagatccagaagcaatgaatgttttaccattacttaaaactccattaattgatgtttgtcaagctattgttgatggtaacttagataaagtagaatttaaagataaagcaagtgtatgtaaatatgtagtgcctgacggatatcctgaaacagaattcgctggagatctggttgatgtagatgaagaatctatcgagaaattaggtgctaaagtattttatgcagcagtttctgcagaagatgatggtattcacttatctggctcaagggcattaggtattgtagctagtggtaattctattgaagaagctgaaaaaatagctgaaaaagcatgtgaattcgttaaaggtaatgtttaccatagaagagatgtcggtacaactgaacttgttaacaaacgtgttgaacacatgaaagaaattttaagctaa

SEQ ID NO: 8105 - DNA, 1365 bp, Methanobrevibacter gottschalkii
  source 1..1365: mol_type = genomic DNA
atggaaaaaaattcaaatatagaaatgattacaggagatcctaaaaaggcaattaataaattatcaataccaattatcgctagtatgtttttaattttcgccaacaatattattgacagtgtttgggtagcaggacttggtgcagatccattagctgcactaggatatgtaacaccattatttatggtgcttatcggaattggaaacggaataggtgctggcggtaactcattaatttcacgttatattggagctgaaaagagacagtcagccaataatgccgcaattcacaacttaattttaggaataattttatcaatagcagtctcaataattttacttacatttttaaaaccattattaattgttatgggagcatcagctgttttaaaatacgcaatggattacggaattgtaatttttgcattttcatttgctatgttacttccaccaatcttcggaggagcattcagagcagaaggagatgtaaaaagagcaacaataccccttgcaatttcagcaataaccaatatgattattgacccaattttcatttatacattcaatttaggggtcgcaggtgcagcatgggcaactgttattgcacatatattcgcagtagctgcaatgctttattggatgcttgttaaaaaagatacctatcttaaatataatcgtgaaagttttaaaaatgatttaacaatgtataaagatattttagttgtgggtatcccagccagtttagaacaattaatcttatctgcattaacaatagttgtaaatttcatgcttacaattgtatcaggacctgttgcagtagctgtttatacagcaggttggagaataataaacatcggaatgcttccggcaattggagttggaactgcagcaatatcagtttcaggagtagcatatggagctcgtaaatatgaaaatttaagaattacagcaagatatgcagttaaagttgcattaatagcttcaattattgtttgtattatattaaatatatttgcaaatcaaattgcattcatattttcatattctgaaagtagtgctcaattagaaccattaattgcaagtttcttacaaattatgtgtttatttatattatatgtaccatttggagcaagtgcaggaaatgtattccaaggagttggaaaaggatccatttcatttattttaacatcatttagggaatttgtattagtattaatctttgcatatgtacttggatttaccctcaatatgggggaattcggaatatactgtggaatgcttctaggtggaggaattggttcattaatatgttatatttgtattgaactatatatcaacagattaatgaggagtattgaatcatga

SEQ ID NO: 8106 - DNA, 417 bp, Methanobrevibacter gottschalkii
  source 1..417: mol_type = genomic DNA
atgaagtttaatgaaaataaacccagtgctgcatttatttcaataattcataaagaacatgctaaatacattaacgaaaatgtaaaggatgaagacttaagctttggcctccatccaattttaatcataatatatgaaaatgaaggaataaatcaggaaaaattagctgaagtattgcatttaaatgaaagtacaataacaagaaatcttaaaaaacttgaagataaaggatttattgaaagaattaaaaataaaagaaaaaaaattattaaattgacatctaaaggtagaaaaacagctcaaaaagttataaattacgattacaaatgggatgaaaaattaaaacaaaatttaacagaagaagaatatgcaaatttcttagaagcacttagaacaatttgtgaggaattactatga

SEQ ID NO: 8107 - DNA, 534 bp, Methanobrevibacter gottschalkii
  source 1..534: mol_type = genomic DNA
atgaatcaaacaataaatgacttaaaaagtagaagaagcatcagaaaatttaaagacaaacaaatcagtgacgaagatttaaaaactattttagaaactggaacttatgcaccaactgcaagaggaatgcaatcccctaaaattgttgtgattcaaaatccagaaactattaaagaattatcaaaatggaatagaagttatttcccagttgatgttcccgaagatatggatccattttatggagcaaaaacaatattaattgttttagcagatagcaaaatgccaacatttgttgaagatggtgctagcgtacttgcagttcttgtaaatgccgctcatgcaatcggtgttggatcctgctggattcacagagctcgtgatgagttttcatctgaaaaaggaaaagcattacttaaaaaatggggcattcctgaaagttacgaaggaattggccatgtagcccttggttatcctgacatggaatcacctaaaccattaccaagaaaagaagattacatccactatgtggactaa

SEQ ID NO: 8108 - DNA, 1701 bp, Methanobrevibacter gottschalkii
  source 1..1701: mol_type = genomic DNA
atgtattttgaaattgaaaaacaagctattgatgctattaataaagcattagatcaatatgatgtagaagttgatagaaattttaaattagaatttccacctaatccaaatttaggtgatttagcaagcacaattgcatttgcacttactaaaaaattaaaaacttcacctcctgaggttgcaaaaggtttagttgagaaaattgaagtgcctgaaattttttctaaagtacaaaattttggaccttatgttaattttttcattgattacagtaaattctctaaattattattggaaaaagttgatgaaaattatgggcaacttccagcatatggtgaaaagattgtattggaacacacttcagcaaatccaaatggaccattacacattgggcacattagaaattctatttttggggattctctttcaagattgctaaaattagctggaagagatgttataactcaatactatgtaaatgatatgggaagacaaatagctattattgtgtgtggtataactgaatgtggtttaaaaattgaagattatgatggggacaaaatagaccataaaattggaaaactatacttcgatgcaaacaaagctgttgaagaagatgaggctttaaatgataaagttgatgaattaatccgaaaatatgaagaaggctctgataaaaaattaaataaaatcttcgaagatgttgtagctaaatgtatttctggaatgaaagagtctcttttaagaatgaatattgtccatgatgattttgtatgggaaggtcaatttgtaagaagtggggaagtcaataatcttgtaaattacatccaaaaagaaggatttacaagagaagaagatgtactgttcattgatttaactgattttaatattgataaagagttcgtacttagaagatctaacggaacttctctttattctacaagggatttagcttatcacaaatacaaagctactttaggtgatactgtgcttgatattttaggttcagaccataaattagcagctaaacaaattaaagttatctttgaagaaattttaagacaaaaggctcctgaagtaatcttttatgaatttattacacttccggaggggtcaatgtctactagaaaaggtaaatttgtatctgttgatgaattaattaatgaggcagtttcaagagctcatgatgaaatcaaatctagaaaccctgaattaaatgaagaggaaattgcaccgatggctgaagatattggtgttggagcaattaggttctttattgctaaattgtctcctgaaaaacacctgacattcaaatgggatgaagctttaagctttgaaagaggctgtgcttctattcaatatgctcatgcaagggcatgcaaattacttgcaaaatcaggtaaagatattaattctttaactgttagtgatgattggattcctaatgaggatgaacaggaattagtaaggcaaatagctaaattcccacaagttgttgaagattgcgctaacaaacaaagagttcataatattactcagtactgtcaagatttagctggttcatttaataaattctacaaatcacaacaagttattgggtctgatttagaaaatacaagactaattttagttgatagggctaaaacaactattaaaaatgctttagatattttaggtgttgttgcacctgaaaaaatgtag

SEQ ID NO: 8109 - DNA, 426 bp, Methanobrevibacter gottschalkii
  source 1..426: mol_type = genomic DNA
atggaaattgattataaagaaattgcatcatatgtagttatcctcattattgttttaattgccgctcaacatcttaatgttgttgtatctggaagtatggaacctgccttttataggggtgacattgttttagttgaaaaagcagatttctttggtattcatgagtttaatgcaagtgatgtcaaagttggtgatgtagttgtttatgatgcagcttggtataaccagccagttatccatagaattattaatattacagatattaatggaactacgatgtatgtaattaaaggagataataataatgctcctgacccatattatgttacttcaagtcaaataaaagaaaaagtagtaacagttgatgataatttagtcgtaattccaaaaattggttatctttccctttggttaagagggttataa

SEQ ID NO: 8110 - DNA, 1275 bp, Methanobrevibacter gottschalkii
  source 1..1275: mol_type = genomic DNA
atgaattctgaagaattattcaatgaatctaaaaattattttccggggggagtaaattctcctgtacgtgcttttaaaccttatccattttttgttaaaaatgccggaggttcaaaacttactgatgaagatggaaaaagttacattgattattgtttagcatatggtccgttaattttagggcatgctaatcctaaagttgtaagggaggtttctaatcaattaactattggtactgcttatggtactccaactgaaaatgaaattactcttgcaaaagaggttattgatagaattccatctgctgaaatggtaagattctgtaatagtggtactgaagccactatgagtgcaattagattggcacgtggttttacgggtagagataaaattgttaaatttgaaggtgcttatcatggagcacatgattatgtattggttaaaggaggatctggtgctgcaactttgcctgatagtgcaggtattccagttgatactacaaaaaacactttatctgttccatttaatgatgaagagattttaacagatttaattgaaagagaaggtgacaatattgcttgcattataatggaagttgtcatgggtaatgttggttgtattgaaccaaaaccgggatttttagaatttgttagaaaaattacagaagaaaataacatagttctaatttttgatgaagttatcactggttttagagcttccagagggggagctcaagaatattatggagtcactcctgatttaactactcttggtaaaattgttggtggcggacttcctatgggagctttttgtggtaaaaaagaaatcatggaattaattgctccaaatggtcctgtttatcaggcaggtactttttcaggaaatcctatatctgtacaagcaggaatatctactttaactcaattaaataatgcattttacaaagaattagaaaggaaaggtaattttcttagaggcaatattcaatctataattgatgatgaagaatataatgttcaaccggttgggttttcatccatgtttcaaatttatttcaatccagcaccagtttataattatgctgatgctcaggaatctgacagaaaaaaattcttaagatactttaaatcattattaaaacaaggtgtattcattccaccttcccaatttgaatgtaattttatttcaaatgctcatagtatggaagatttacaaaaaacttcagatgctattgaaatttctttacatgaagcttttaaaaaaagaagaaggtag

SEQ ID NO: 8111 - DNA, 630 bp, Methanobrevibacter gottschalkii
  source 1..630: mol_type = genomic DNA
atgtcagacaaaatgttcatgggtgcatcaactaaacaaggtttggatattgctaataaaagtagggaaattatccgtaaccttattggagatgatgtcaaagatttaaatcctgctgaaagggatattgttgagaggattgtccactcaacagctgatcctgaatatgcaaaattagtaaaaattagtcctgattttgtagatgcagctatggcttccctaaaaaataaagaaaccattttaactgatattaatatggttaaatatggtattacaagatatgaaggggaagtagagtgttatataaaaaataaagaagttattaaaatagctaaagaaaatcaaattacaagagcagctgccgcaatgcgttatgctgctgataatggttttgagggtattgtggtttcgggcaatgcgccaactgctgtttttgaagctatggacttatatgaaaaaggtgaaatgaatcttaaagctattgttggagttcctgttggttttgttggagctgctgattcaaaagaagctctacataattctaatattcctaatattattgttgaaggacctaaaggtggaacaccgatagcagttgcttgtgtaaattcattaatacaacatttataa

SEQ ID NO: 8112 - DNA, 1206 bp, Methanobrevibacter gottschalkii
  source 1..1206: mol_type = genomic DNA
atggaagaatatgaaatagctgtaattggtggaggaccggcaggaataatggccgcaatagctgcaagtcaaaattcttcaagcgtaatattacttgaaaaaaatcctaaattgggtcgtaaactcctaactactggtggagggagatgtaatattacgaatgctaaaccaataagagagttattaaaattctatcctcaaaaaaattttttaaaacacgctttttatacactttcaaatgaaaaattactatctttttttgagaataaaggattaaaattcattgaagaagcaaataatagaatatttcctgaaactgaaaaatctattgatatcttaaaaattttaactgattacttagaagatataattataagttataacttcgaagttaaaagcatcgatgaggattttgttataaatgataagttaaaagcagataagataattattgctacaggtggtataacatatccgaaaactggttgcagcattaaaaactattctttaacaaaacagcctattactgatattaaatatggactatcaccattaattacaaaaaaagatttgtctgatattgctggtataacattatatgatgttattgtaagttataagaaaactaaagttaaaggtaatgttttaatttcccattttggtttaactggtccggcaattattgatttaagtaattttatatcagaaagtataagttataacttattggaaaatgataattgtgatattaattttgaaatagctattgacttatgccctgatttcagccgtgaaaaattacaagaaaaattcaatcaagactttcaagttaaaggaaaaacgatgattaaaaattatttaaaattatttttaactaacaacttcattgatttctttttagacgaaataaatcttgacagggaaactcaattatcaagaattaataaaaaaagtaaaaatcgtttaattaaaaatttaaaaagttttaattttaaaataaaaggttttaataatgatttggctaaaataacagttggtggtattgatttaaataatgttaatccaaaaacaatgcaatcaacaatcatacctaatttatactttgcaggtgaagttttagatttacatggacctacaggaggttataatttaaaaattgctttttcaacaggttatctggctgggttatctgcaagtgaaaaataa

SEQ ID NO: 8113 - DNA, 1320 bp, Methanobrevibacter gottschalkii
  source 1..1320: mol_type = genomic DNA
ttgcaaggtttattaaatgactggagaagaactcattatgctaaagaaactacccctgatattgcaggtagtgatgttaccatcatgggatgggtacatgaaatccgtgatttaggcggtattatttttgttgttatccgagatgttactggtagagttcaattaactgctccaagtaaaaaagtagaagcggaaatattagaagatattagaaaattcagaaaagagtcagttgttgctgttagaggattagttcaagaagctccaaaagcacctaatggtgttgaaataattcctaatgaaattaaagtattaaacttatctaatcaacctttaccaatggatcctactgaaaaagttcaggccggaattgataccagattagattcaagattcattgatttaagaaaagaaaatgtttcagcaattttcaaaattaaaggtcaaatgttccatactattagagattatttttataataatggatttcatgaaattaatactcctaaacttgtagcttccgctactgaaggaggtactgaattattcccaattacttactttgaaaaagaagcattcttaggtcaatctcctcaattatacaagcaaatgatgatgggtgctggaatggacaaagtctttgaaattggtcaaattttcagagctgaagaacatgatactttaagacacttgaatgaagctatttccatcgatgcagaagcttctttcatggacgatgttgatgtaatgaaagtattgaatgacatgcttatcaacgtattaactgatgtcaacgataaatgtagtgatgaattatctattttaggatatgaattagatgtgcctaaaggaaatttccctgttgtaacttatgatgaagctgttgatattgtaaattcacgtggagttgaaatggaatggggagaagatttatctcgtgaagctgaaaaagcattaggcgattcaatgggtggattttattttttaactgaatggccgtctgcaattaaaccattttatgtaatgcctcaagaaggagatgaaaaatactcccatgctttcgatttaatgtataataatttagagttatcttctggtgctactcgtgttcatcagcatgatttacttgtaaaacaaatagaagaaagaggattaaatcctgatggatttggaagttatcttaaagcatttgaatatggtatgcctcctcatgcaggttggggtttaggtgctgatagattaactatggtacttactggctctgaaaacatccgtgaatgtgtactattcccaagagacagacacagattaactccttaa

SEQ ID NO: 8114 - DNA, 1284 bp, Methanobrevibacter gottschalkii
  source 1..1284: mol_type = genomic DNA
atggaaatattaaaatattctgatattgatttagttgaaactataaaaagatcagaagaagatgtaaataaagttttaggtattgtttcagatattttggataatgttaaaaacaatcatgatttagctattcgtgagtatactgaaaaatttgatggagttacaatagaaaatttaaaagtatctgaagatgaaataaaggaagcttatgatactttagatgatagtttacttgttgctttaaaacaagcggcatcaaatattgaaaaatttcataaaaaacaaattcctcatgaatgggaaattgaagtaaatccgggtattgttgcaggtcagattgtaaggcctataaactctgctggctgttatattcctggtggaagagcagcatacccttcatcaattttaatgaccgtcattcctgctaaaattgcaggtgttaaaaaggttgtatgcgttactcctccgcaaaaagatggtaaaattttagatgctatactggttgcagcagacattgccggtgctaatgaaatatacaaagttggtggagcacaagctattgcaggtcttgcatatggaactgaatctattccgcaagtagaaaaaattgtgggcccgggaaatatattcgttactgcagctaaaaaattagtgtatggtcaagttgatattgaattccctgcaggaccatctgaagtgttaatattagcagatgaaactgcaaatccggaatttttagcaactgatatattagcacaagcagaacatgatcctaatgcatcttgttttttagttactgactctgaaaaattagctattgaagttgatgaatttgtaaaaaaattaactgaagttgctccaagacgtgaaattattgaaaaatcattatctaaaagtggaaaaattattatcactaacacttttgaagaggctatttatatcacaaatgaatatgctcctgaacatttaatcatatctactaaagatgatgatgatacattatcacacattaataatgctggttctatctttttaggttcttattcaccagtagcagcaggagattatggatccggaactaaccatgttcttccgaccggaggtggagctaagatgtattcaggattatctactgaagcatttattaaaaaacccactgttcagcgaattactaaagagggtcttaaagaattatcaaaaacttcggtacctattgctgagtatgaaggtttctttgaacatgcaaactcatttaaaacaagacttaaagatgattggaaatag

SEQ ID NO: 8115 - DNA, 1650 bp, Methanobrevibacter gottschalkii
  source 1..1650: mol_type = genomic DNA
atgaaaagtgatagtgtaaaaaaaggaattcaaagagctccacacagatctcttttaagagcttgtggtcttgatgatgatgattttaaaaaaccgttcattggtatagcaaatagttttacagatattgttccgggtcatatccatttaagagaacttgttgaatttgtaaaagaaggtattattgctgctggtggtattccatttgaatttgatactatggcaatttgcgatggaattagtatgaatcatgaaggcatgaaatattcacttccttcaagagaaattattgctgctacagttgaaagtatgactaagggtcatgctttcgatggacttgtattaattccaagctgtgataaagtagttcctggaatgattatgggtgcaactagagttaatgttccatctattgttgtaactggcggaccaatgatttcaggtgaatataaaggtaaaagtgctgatttaattactgtgttcgaagctgttggtgctcattctgcaggaaaaatgtctgaagaagaagtttatgaacttgaaaaatgtgcctgtcctggtgctggtagctgttctggattatttactgcaaatacaatggcatgtataactgaaactttaggtttatctcttccaacttgtgcaactactcatgcaagaacagaagagaacaatcaaattgcattagattctggtaaacaaattgttaaacttgttgaagagaatattaaaccatctgatattctgactcaagaatctttcaacaatgctatagctgttgacatggcattaggaggttcttctaatactgctcttcatattcctgctattgcaagtgaagtaaaagatttaaatgttaatttagagttatttgacgaaatttcaagaaatgttcctcatattgctcttatctctcccgctggtgaagattcaatgatggatttacatttagctggtggaattcaagcggtattgaaaacattaggtgataaaattgatattaatcaattaacagtaactggtaagacaattaaagaaaacttagaaactgttgaaaataaaaatactgatgttattcatactttggataatcccgtccatgaagatggtggaattgcaatcttaaaaggtaatcttgcaccaaatggaagtgttgttaaaaaaggtgcagttgctgatcatttaatgcatcttaagggacctgcaaaagtatatgattgtgaagaagatgttacaaaagcaatctttaatcatgaaattaaagaaggggatattgttgtaattagatatgaaggaccaaaaggaggtccgggtatgagggagatgttaaatccaacttcagctcttgctggtatgaacattaaagatgtaggtttaataacagatggaaggttctctggtggaacaagaggtccttgtattggacatgtatctcctgaagcaatggaaaatggtccaattgcagccatcgaaaatggagatattattgaaattgatattaataatagatctattaatgtagaactttcagatgacgaaatcgagaaaagattaaaatcagttaaacaccctgaaagggaattagatggctggttaagattatatcaaaaattagttcactctgctgacacaggtgctattttaaggtag

SEQ ID NO: 8116 - DNA, 1113 bp, Methanobrevibacter gottschalkii
  source 1..1113: mol_type = genomic DNA
atgagtacactagaaaaaatgaaaattttaactgattcggctcaatatgacttatgtgattatgttagtcatcataaaagttctcagataaatttacctggaatttatgaagcaataggtcataatggatgtaaaattccactttttaaaacactcatgaccaataaatgtaaaaatgattgcaaatattgtattaatcaatccaaaagaaattttacaagattagaactatcacctgaagaacttgcaagagcgtttcttggatattataatagaggattagttaatggtttatttttaagttcaggaatatctgatgatgtagactccactatggaaaaacaaatagaaaccgtgagtcttcttagaaaaaaatatggttatgatgattatattcatcttaaagttataccaggagcaagcagagactcgattaaaagagcaatggcattagctaatagagttagtatcaatattgaagctgcaacatcttcaggtcttgcagaattatcatcaacaaaggattataataaagatatattaaaaagattgtcatggataaattctctacagcataaaagtacaacatatccaaattctacacatacaacacaattaattattggagcaaacaatgaaactgataaagagatattaagtagaatggaaaaaatatacaaaaaatcagatctgaagagaacatatttctcagcatttactccaattgaagaaacagaatttaaaaataaggaagcttgttcaacagatagaacatcaaagttatataatgcagatactttaattaattcttacaaatataatgttaaagaattaatatttgatgaaagtgataagttatctcttacacaagatccgaagattctagctgcaaaaaatatgaatatttttccagtagaaataaatagtgcacctattagagaacttatcagggttccgggaattggggtaaaatctgctcatgaaattgtatctattcgtaagaaaaaaccatttacgcataaagaacaacttcaagaattaggtgttataacaaatagagcagatccatatattaaaattaatggagaatatcaaacaacttttaatttctag

SEQ ID NO: 8117 - DNA, 621 bp, Methanobrevibacter gottschalkii
  source 1..621: mol_type = genomic DNA
atggctagaaaaagtcttggtaaaggattagcttcattaattccagatttttataatgaagattttgatagcaattctactcaatctcttgaagatattatgaatgaaactgaaaataatgaagaaattaaggattctgaagaaaaaaatgctcctaaagaaaaatcttccaacgatgttaataataattctaatgaagaagagatttctaaagatgaaactcttgaagaatctggaaatgatgaaactcaaaaaaatatatttgaagagatagaggaagaaaaaaataatcaagaaaagtctattgattcaaatgaaactactttaaaggaagatgtatcggagaatattaaagaatctgaaaacatatctattcaaaataatgaaaaaaacacatcaacaactcaggaaactaaaattcaggaacatatagttgaagttaaggaaattgttgataaaaatcctagaattacgttatggtcttcaagatcctctgcggttttcagatatttaagaaaaactgaacctgagtttagtatttcaaaagaggcttctaacttaattgaagaggctgttgctaaaaaataccctgaaatatgggcattattcgatgattactaa

SEQ ID NO: 8118 - DNA, 843 bp, Methanobrevibacter gottschalkii
  source 1..843: mol_type = genomic DNA
atgagtgaaataatagcagtgatgaatcaaaaagggggttgtggtaaaacaactactgttgttaatactgcaacatctctagcagtaatgggtaaatctgttttagtagtagatatggatcctcaagctaatgctacaactagttttgggattgataaaactaaaatagaaaatacaatatacgatgctcttataggagatattagtgttaaaaaagcaacaattcctacgtttattaaaaatttatttattatcccaagtaatatatctcttagtggagctggaatggagctttctagacgtgaaaattatcatattgttttacaagaaactcttaaagatgttgtaccattatttgattatatattcattgatttgcctccttcattaggtgtcataacagtcaatgccttggtagcttcagatagtgtcttaatacctattcaagctgaatattatgcactcgaaggagtagctgatttgataaatactattaaattagttgaaaaaagacttagaagtccaactcctataaaaggaattctcctcactttattcgataaaagaactagacttagtaaagatgttcgtaaagaactcaaaaattactttggcgaaacaaatttactttttaaaactattattccaagaaatataagattagctgaagctcctagtttcggtaaaccttgtttaatttatgatccagatagcactggtactaaatcttatttgaaattagctaaagaaatcattcaaagagatgaaaatgtccaattaaatattgctaaaaccaatattgacaaagttaaaaaagattctgaagttgctgggggtaaataa

SEQ ID NO: 8119 - DNA, 1302 bp, Methanobrevibacter gottschalkii
  source 1..1302: mol_type = genomic DNA
atggattataaaattacattaaactctaatgaggtaccaaaaaaatggtacaatattaacgctgatttgcctgtcgaacttccaatgcctaaaaacagtgaaggaaatgatcaaatttcttctcttcagaaagcatttacaaaagtaggtttggagcaagaattttcaactgaacgtttcataaaaattccaaaagatgttagaaaactttacatgcagatgggaagaccatctcccctctttagagcaacaaaacttgaagaatatctggacactccggcaaaaatatattataaacgtgaagacacttcccccacggggtctcataaattaaattctgcaattcctcaagcatattttgctaaaaaagaaggtattgaaagattaactacagaaactggtgctggtcaatggggcactgctttatctcttgcatgtaacttgcttgatttagaatgcactgtctatatggttaaagtttctttccagcaaaaacctgatagaaaaagtatcatgaatatttataatggtaatgtatttgcatctccaagtgaaaatactaaagttggtcgtgaaattctagctcaaaatccaaatcaccctggatctttaggtgtagctatttctgaggctatggaagaagctttagagaatgaaaaagttaaatatactttaggaagtgtattgaatcatgtaatgctacatcagacaattatcggtcaagaattgaaaaaacagttggaaattgcaggtgaagaacctgatataatgattgcttgtgctggtggtggaagtaactttgctggttcattattcccatttattaaagataaaattgcggataaatcagatactcaatttattgctgttgaaccaagtgcctgtcctactttaactaaaggaagctatgaatatgattttggggatgtaaatggatttactccaatgcttaaaatgtttactttaggtcatgacttcgttgcaccttctgtacatgcaggtggattaagatatcatggtatgtctccacaagtatctcttttaactaaagaagggtatattgaacctagatctgctcatcaaagagatgtatttgaggcaggaattacatttgctcgtaatgaaggagtattgcctgctcctgaaactactcatgcaattaaagttgctattgacgaagcattgaaatgtaaacaaactggtgaagaaaaaactattgtcatgaacttttcaggacatgggatgttagatttaaaaggatatgcaagttattttgaaggttcaatgcctaattctaaataa

SEQ ID NO: 8120 - DNA, 1074 bp, Methanobrevibacter gottschalkii
  source 1..1074: mol_type = genomic DNA
atgtacactttaattattaataatataaaaaacaataaaaaaatcatgagaattttagctattgatgttggaacagggacacaagacataatgatttatgatacagaaaaagaattagaaaactcaattaaattggttctaccttctccccatttatttatttctcaacaaataagagatatagaaaacgacatttacttcgaaggagaaataatgggaggtggaaaaataaaaaaaagcattatagaacacatcgaaaaaggatacgaagtagttatggaacctacatgtgctaaaacaatacgtgacaatttagaacaagttaaatcatttggaattaaaatagctgatgaatcaaaaaagtatagaaattatacaaaaatcaaaatgggtgatataaacataactaaattatctaaattactattagattatgatttagaatttgattttgataaaattgcaattgcagtacaagatcatgggtatagcgaaaatatgggtgatagagattttagatttgaaaaaataagagaaaaaatttccaaaccaatgtctccattggaattcggatttactgatgatttacctgaatactacacaagaatgaatgcagtaagaagaattgttaaacatgaaggaatagatgaaattcctttaattatggatacaaaattcgcttcaatagctggaatgtgttttgatgaggttgcagaaaaattagaaagttatattgtaatagatattggaaatggacatacaacagcagcatctatagatgaaggtaaaattcaaggagtattcgaacatcatacatctagtttaactggagaatcacttgaaagatacattaaaagattagcagatggaataatcaccaatgaagaagtttataacgatcatggacatggggcgcatgttttaaatccaatatcagaaattgaaaaagtaattgtaagtggacctaaaagagaactaatagaaaaaacaaatcttgattggcatcatgctgctcccggtggagatgtaatgatgacaggcactgttggtttaataaaaacaatattaggatga

SEQ ID NO: 8121 - DNA, 660 bp, Methanobrevibacter gottschalkii
  source 1..660: mol_type = genomic DNA
atgtttaaaatggattcgcatattcatagtgaatactcctccgattcaaattcaaaaattgatgatattttaaaaaaagcaaacaaagaaaatattaatataatatccataagtgaccatgatactgtagatggaactagtgaagttatgagaaaaacaagaaatacagatatacttgccatcccctctatagaaatctcttcatcaaaaggccatattcttggttttgggtgtgaggaaaagatacctaaagacttaccacctcaagaaacaatagacagaattcatgatttaggaggtcttgcaattatccctcatccatactgtttttacagacatggattattgtgtaaaagtgacaatgaaaaattaaaaatagatgctattgaaacaaaaaatgctagattcattgttggatattgtaatagaaaagctaggaaattatctataaaaaaaaatctaccagcattgggtgcaagtgattcacattattggaaatttgtaggggattgttatagtttaattgattgtgaaaaagatatcgatagcgttttaaaagcaatcctaaaaggaaaggttaaagcatgcggaaaaggcacttcaaatattttactttccaaatacctacttgaaaaaaatcttttaaagaaatttaaataa

SEQ ID NO: 8122 - DNA, 276 bp, Methanobrevibacter gottschalkii
  source 1..276: mol_type = genomic DNA
atggagaataatacaatttttgttggaagcaaacccgttatgaattatgttttagctgtggtcacacaatttaatgaaggatctgatagtgttgttctcagagccaggggtaaagctattagtcgtgctgttgatgctgctgaaatagtcagaaataggtttgttcctgcttccgatgttacagatattaaaatttccacagaagaagttgaaaattataataaagaaaaaacaaatgtatctattattgaaattttaattgaaaagggtgaataa

SEQ ID NO: 8123 - DNA, 1542 bp, Methanobrevibacter gottschalkii
  source 1..1542: mol_type = genomic DNA
atgaatgcaaaaaatattgaaactttaaaaaaggaaaatatgaatcttgctgaaaaaatttatattttcgatactactttgagagatggtgaacaaactcctggtgttgccttaactgttgatgaaaaaattcaaatcgcacagaaacttaataatttgggtgtagataagattgaagttgggttcccggcatcatctcctggagaaatggaatctgcaaaaagaattaaaaatagagaactggattctagacttgtcggtttggcccgttcattaacaggagacattgatgcagtcattgatgctgatttggattatattcatacattcattggtacttccccattgcatcgtgattataaacttaaaaaatctaaggaagacattattcactcttcagttgtggctattgactatgcaaaggatcatggccttactgttgaattttcagctgaagatgcaacaagaactgaacgagattttctatttgaaatattcaatgaagttgttgatgctggtgctgattttttagatattcccgacactgtcggtgttttaactcccattgttactcgtgagttaatcacagatattaaaaataattttaaaactccgattagtgttcattttcataatgattttggacttgctacagctaatactttaaccgctattgaatgtggtgccaatcaggcccatgtaacaattaatggattaggtgaaaggactggtaactgttctttagaagaattggtaatggctcttaaatctgcttataatattgatttaggattagatactactagattatacagcttatctaatttggttggtcgtttaacaggagttaaaatgccggttaataaaccaattgtaggggacaatgcatttgctcatgaatccggaattcatgttcatggaattttaaataatgcttctacttatgaaccaatgtcccctgaaatggttggtcactcaagaaaaatcgttttaggtaaacacactggagctaatgctgttaaggctaaattaaaagaacatcacatagatttgaatgaaaaacagtttgacaaggtatttaaaaatattaaatcattaggggataatggtaaatgtgttacggatgatgatttaatagctattgctattacagaacttgcttctgcacgtgaaactccaattgttattaaaggtttgagtatttcaatgggagctaatgtttctcctacggctactgttaaactagaaattgatggtgttgaaaaagaaactgcaagtactggagttgggcctgttgatgcagctttaaatgctattcgtgaattgattcaggatacaatggatattgaattggaagaatataacttagaagctattactggtggtactgatgcattagctgaagtgtttgttatcagttctgattctgatggtaacaaatcaactggccgttcaactaatcaagatattgtaatggcaagtatattggctgttttagattcaattaataaattattgttaattaataggtcaattttataa

SEQ ID NO: 8124 - DNA, 1206 bp, Methanobrevibacter gottschalkii
  source 1..1206: mol_type = genomic DNA
atgtataaaaaattatttattggaatattgatttgtcttttagtaatctctccaattgctgctgcaaattggaattcatttgctggtggagttgatcacaatgcatttagagaagaaagttcggattttgtaactaatctttggacttttaatatggaatcacctattcattcatctcctgcagtttataaagattttatttatgtggtttctacccagggtattttgaaagttattaatatggaaacaggagaaaaagattgggattttgatttagaatcaaatactaattcttcaccaataattaactcaaataaattattcattggaactgaagatggtattaaagctattaatataaataatcataatgaaatatgggattatgattgtgatgatgttgaatctactccctttttatataaagatacaatttactttggaagtgatgatggtcatttatacggacttgataaggataatggaaaagttgtatttaataaaaaattagatggagaacttaaatcctccccaattgtagttgatgatacaatttatattggatctacaaactgtaagttgtatagtatcggaactgacaaagataaaaattgggaattcactactggtgatgaaattttatcttctcctagttttatcaatgacactattgttttcggatcaaatgacggcaatatttattgtttaaatgaatcggatggtgccttaaattggaaagttgatttaaataataaagttctatcttcacctactgttgataatcatgacaataatatttttataggttctgatgaaggtaatttaacttgtattgataatagggatgggactataaaatggagtcattcagttggtggtaaaatacaatcaactcctgccattaaggataatttagttgtttttggttcggataatggtaatctgtatgttttgaataaatatactggtagtgaagaatttacatataatccaggaacaatattatttaattcagctattaattcatcacctgtaattaatggtaacagtttgatatttggagatgattctggcaatgtatattctttaaatattgataaacatgaggtaccgggatcaactcaaatgtatttttccatttctgttttaataattattgttattgtagctcttgttattgttcataaagtaaaaggtagaaaataa

SEQ ID NO: 8125 - DNA, 1155 bp, Methanobrevibacter gottschalkii
  source 1..1155: mol_type = genomic DNA
atgctagagtttaaaaaattttggtggatgattaaaaaagaggtacttagtcttaaaagacatcctgctaggttagtttctattattgcatttcctataattatgattttactttttggttacggaatgggtggcgaaatgacagatttaccaattcttgttgtttcacaaagtcatggtaatttaacagatttaacattagatactattaaaacaactgaaacttataaggttattgaggttattgatgatttggatgagggtaaaaaacgtgttgattcgggtgaagttaaagcagctataatactgccatctgattatgacgataattcaacacaacaaaaatcggttactttgtatttggattcatcagatcaaatggcttctcagattttagattcatcaacacaagctatattctctagactctcaaatatggttgcttcccaaactaatgttgaaaataaagatgctaatattaatccatcaatatcaaattcatttaataactttaaagatgatattagcttacatattaatagaatttatggtaatattaagtatattgactttttagttcctgcaattttaggtatgactgtaatgatgagttgtatgatgggaatgggtgcaacaattgctggtgaacgtgaaactggcgaacttgcaagattattcatgacaccaacatctgtttcaactgtaattggaggtaaaattgctgctaagcttctaattgagttattaagagctttaatattaattttcatggctgtattacttttcaatgttagtataaaaggaggtatacttcaaacttttatagtccttgtagttggagctttatgttttgttggatttggaatgatgttgtctgcaagaacatctactcaagaagattatgttcaaatggtcatgccattttcaatgcctatgatgtttatttctggtgtattttatcctattgaaacaatgccatggattctacagaaattagcatatatattccctcttacttatttaaatgatgcaatgaggggaattatgcttaaaggtcaaacattaggggatgtatggttagatttagctgttcttttaggatttacattgttattctttataattggtgttaaaagatttaatagggacgtatag

SEQ ID NO: 8126 - DNA, 1047 bp, Methanobrevibacter gottschalkii
  source 1..1047: mol_type = genomic DNA
atgaaaaacgcaattgaaactaataatcttactaaggtttacggtaacttcactgcggttaattctcttaatttaaaaattccaaataatagtattttcggaatgttaggtccaaatggtgctggaaaaacaacaacaattaaaatgcttacttgtttaatccaaccgacttctggcaaagctgttgttgggggatatgatgtagaaaaaaatcctgatgaagttagaaatctcttaggcatggttcctcaacaagttagtttgtacaaggatttaacagttatggaaaattcacagatgtgcgctgactattatgggattccatcagatgagagagatgctcgtattgaagatttaatggaattggttgatattaaatatgctaagaataaacgagttggtcaactttcaggtggtcaaaagcaaaaagcatctcttgttgctagtttagtccacagaccagatattttatttttggatgaacctactattggcctagaccctactactaaacgtactttatgggatttaattcgcgatttgaatgatgaaggccatacaataattttatgttcacatgatatgcatgaagtagatatgctttgtgataatgttggaatcattaatacaggtaatcttgtggcttatgatacaccgcaaggtcttaaagattctcttttagaagctaataagaaaaaaatgacagaagctttaggaaagatttctgatgaaactaaaatatcaacttctactaaagaagatattggaaatcttggtttaagaaaaatgtctattcttttaaaaaatcaaaatgaagaaattattgaagctattaaaacatctgattttgtgaaaactgttgagattgctcacaatggtcgtattaatttaagaattgatagttatgatgacatggctgttcaaaatgttttaaaggatattaattcttttggtggtgtaattaaatctatttatactgaagaaccttcacttgaagatgtatttattaaagcaactgccgaggtggatgaaaatgctagagtttaa

SEQ ID NO: 8127 - DNA, 408 bp, Methanobrevibacter gottschalkii
  source 1..408: mol_type = genomic DNA
atgacagataaagaaatttatgatactcaaacaatgttaattaaacattattccaatggtttaacccgtaatttaattctttggattatttcaaaagaaaaaattcatggttatgggataatgaaaaaattagatgaattttttaactttgaagatgttaattatgaaattaaaaatacttcaagtaaagtctatccaattttgagaaaaatggagaaaaatggacttatcattggagaatgggatattaatgaaaataataaaagagtaaaatattactctattactgatgaaggattaataatcttagataaaattcgttctattattaattttatttcaaataatcccgcatggttaaatttttatggggatatgggggttgaaattaatgaaaaacgcaattga

SEQ ID NO: 8128 - DNA, 714 bp, Methanobrevibacter gottschalkii
  source 1..714: mol_type = genomic DNA
atgaagttaggttttacaactcttgcattattcatggaagataacaataaaataatagaactagcaaaacagcacggatttgaaataattgaaattctcggagaagatccattttatgaaaaagataaaggagaatttaaaaattgtggaatagacatgcgaattcatgcagcaacagtagacattaatattgcaagcctaaataaaggaataagaactgaaagtataaaacaaatgattcaatgtggccattatgcagaaagtataaatgcaaatacaataacgctacatcccggaataattggacgtaacgaaccccgccttagaaaatgggcacttgaaattgcagttgaaagtattggaaaaataattgataacacaaatattgaaatatcaattgaaaatatgccagttagaggtaaatttttaggaaataaagttgaagaaattgaaatgattcaagaagaaacaggttgcagcttaacaatagatactgggcatggaaacacttgtggaaacttagaagaaatgttaaatttaaaaaatataagttattgtcatttaaatgataataatggtgttaaagaccaacacattacattaggtgagggtacacttgatttaaatttacttaaaaaaatagatacagcaattattgagctaaataattttaataatattttaaagagtaaaaaagttattgaaaacttataa

SEQ ID NO: 8129 - DNA, 795 bp, Methanobrevibacter gottschalkii
  source 1..795: mol_type = genomic DNA
atgaagaaagctgttgtatttgataattctggaacattaattgaaaggtatagagttattaaagatgttttaaatggtaatttattcacagatattaattcattagatttaattgatgctgctgatgctttagctttagttgtacttcagtttaatacaaataaattattagatttagatcagaataccttaatttctggtgttattagagaatataacattgattttgatgtcagcttttcaacaaatcctatttctaaagctgaagttaaagagattattgataatgaaaaatctgctaccatagcagatattactgatggttttgatattttaagagataaagttcctaatatggaactatgcaatggatctgcattaatcgttgatatggatttaggggttattgcatatactataacgtctgctggtaaattttttcctaaggtttttgaaacaattgaaactttaaaatcacgtggaattgaaatatttattgcttcaggtgatcgaaaaggagctattaatagactggctaacctgcttgatattccagaagataatgcttttggaactgtttcaacaaggggtaaatgtgaagttgtttctatcctaaaagatagtggatataaagtcatgatggttggggatggtattaatgatttattagcttttaaaaatgctgatgttagcgtattaacaatagaacaacaggaagagatatctcctaaagtaatggataaaactgaccatatcattgaggatatttttgaagttactatgattgatttttaa

SEQ ID NO: 8130 - DNA, 1371 bp, Methanobrevibacter gottschalkii
  source 1..1371: mol_type = genomic DNA
atgaatgttattgaaaagttaaactccattaaaaatggagaaataacagctaaagaaaatgttgaaaacttcattaaagttattgacgaaaataacgaaagtattaatgcatttattgaattaaactatgaaaatgcgttaaaacaagcagatgttattgacgcaaaaatagctaacggagaagatgttggtgctttagctggaatagtatttggtattaaagcaaacattaatgttgaagatttaatcatttcagcagcttcaaaaactttggaaaattacattggaagttacaatgcaactgttgttaaagaaattttagatgaagatgggattatcatcggtattttaaatatggatgaatttgcagcaggaagttcaactgaaacttcatactacggacctacacaaaacccagcggcaatgggaagaattccaggaggttcatctggaggatgtgcagcagcaattgcaggtaaaatgtgtgatatttcaattggatctgatactggcggatctataagaaatccagcatctcattgtggtgtaattggatttaaaccaacttatggtgcagtttcaagacaaggattacttgacttatccatgagtttagatcaaattggacctctctcaaatgacgtaagtggtattgcactcacattaaatactattgcaaaatacgatgaaactgaatgtactaccttaaactgggataaaccagattttaccaatgtattagatgataccagcttaaaaggtatgaaaattgcagtatgtaaagaattcattgatgtaactgatgatgaaattaacaaaactgtaaaccaagctatcaataaattagttgaagcaggtgctgaacttgttgaagtaagctttgattacattaacttatgtttaccaacatattacttaattaactatgtagaattcttttctgcaactagaaaatatgatggaagagagtatggttctagaatcgaagaagtgtgtggagatgaagtacttagaagaataaaaataggttctcacattgcagaagctgagtttagtggtaaatactacaaacaagcattaaaagcaagatctgtaatcagatctgaaattacctcaatgcttgaaaatgtggatttaattgtaggaccaactgtgcctaaacttcctcatgaaattggtgctgaattagaaccaatggaaatgtatgcttacgatattttaactgtaattgctaatttagccggtattccagcagcaagcatacctgcaggtgaagtagatggtattcctgtaggattacaattacaagcaaaaccattagatgatttaaaaattattaaagcaatgagtgttttcgaaaacactcaataa

SEQ ID NO: 8131 - DNA, 1506 bp, Methanobrevibacter gottschalkii
  source 1..1506: mol_type = genomic DNA
atgacaagaattgggcttgtttatgttaatggagctgttccgggatttgaagattttggaaatttaccaacagatattgttaaagaaaatggacttattgatggatttaaagctagtaatgaattagatgcattaattattcctggaggaacacttattgagtcaaatgacatcaacatggatctaaatactgaaattaaaaaaatggctagtgatggaaagccagttattggaatttgtgctggttttcagctattatcaaatcaaatagatattgggagaaaatcaccagtaccaattgttaaagaaggtcttggaataattgatgttaacttttcaccattaattacaagtgatcgtgttaaagccaaagtatttaataactcttttttagttaaaggtcaaaaagaagatgttgatggttttcatactcacacttatggtaaagttgaaggagatgctaaaccattgttttattcacaagttcaaagaatgaattatggtgatacaaacaaaaatggagaatacaatatattttcaggtgcttgtaatgatgatggcaatgttattggcacaatgattcatggaatattagatgaaaatccaattcttataaaaaacctattagaacaaatagatgctgcaaatattgatgacatatacagtagaaacattgaaattaaaaaatatttgcaaagtgaagttggaattaacactaacattaaagttcctaaattagatataaaatgcaaaaaacctaaatatttaatgattggaagtaacggatccgattctggaaaaacatttattgtaactggccttgcaggagctttaagaagaagaggatataaagttgcactgcttaagataggtccagatgtacgtgatattataccaggattatatttgacaaaaggaaaaatggaaaaattttcatctataaagattggtcatttaggttggagtgatattgaatctacaatatcaaaacttaattcatcaaactatgatattgttttaattgaaggagtaatgagtgtatttactggccttttaaatgaaaaagtaccattttcagcagcagaaattgcaatgtcttcaaaaataccaatgatattgatttcaggtgttaataaaggtggaatagaatctgctgcagttgatttagtttctcattctaatatgcttgaaaaatttggaattcctgtaaaagcaatattactcaacaaagtatacagtgaagatattttcaacgaagtaataccttatattaagaataacaccactgttgatacagttttaaaattaccaaaaataaaatcagcagatatgaggggatttattccagaagttgagataagatatgaattatttaccaatcatgcaatggatttgattgaaaataacttaaatattgatgaaataataaatatggctcgtgaagtagaatttgaaaaaatatacaattttaatgaaattaaaaataaaatggttaatggttcttaa

SEQ ID NO: 8132 - DNA, 684 bp, Methanobrevibacter gottschalkii
  source 1..684: mol_type = genomic DNA
atgaatcaagaaacaaatttagataaagctttagaagctattagaaatggtgaattcgtactagtttttgatgatgatgatagggaaggagaagtggatatgattatcgcttctgaatttgtaacccctaaatctattgctacaatgagagataatgcaggtggattaatctgtaattgcatacactctgatttttgtgatgaaattcatttacctttcatggttgatattatggaagctgcaagtgaaaaatacccagaattagctaaacttgcaccaaatgacattccgtatgatgaaagatcttcattttcaatttgggtgaatcacagaaaatcattcacaggtgtaacagatcatgacagagcaatgacaattagtgaatgtgctataatgatgaaagaaggaagatttgatgaattcggatctactttcagatcaccgggtcatgtatgtcttttaagaggagcagatggacttgttaaaaatagaagaggacatactgaaataggtctggctttatgtgaaatggctggtgttactccagtttgtgtagtttgtgaaatgatggatggtgaaactggacaagctacatctgttgctgatgctcgtaaatttgcacaagaaaatggattaatattacttaaaggcgaagacatcattaataaatatttagaggattaa

SEQ ID NO: 8133 - DNA, 381 bp, Methanobrevibacter gottschalkii
  source 1..381: mol_type = genomic DNA
atgaaaattgatggtgaagttacaactggtttaggaaaagcagcatattttttatcacaagaattttatacaaatgaatttaagaaaaatttaggttttgttcctttcccaggaacattaaatgttattgttagtgataattatttagatgaaataaatgaaataaaaaataattgtaaaaatttaattaagccagataaaggatttggagctgtaaaatatattaaagctaaattgaatgataatattgatggagctattgtatttcctgcaaaaactacccatgaagagaattatttagaatttatttcaaaaaataagttaagagatgaattagctttaaatgatggggatattgtatctcttgaatttcaaaattaa

SEQ ID NO: 8134 - DNA, 1644 bp, Methanobrevibacter gottschalkii
  source 1..1644: mol_type = genomic DNA
atgaaaataaaaactatttcaacagatgtattaattataggatctggtggagcaggttcaagagcagctattgaagttgataatgctggattaaaagcaataattgtatcaaaaggtctttcatttagatctggttgtactggaatggcggaaggtggatacaatgcagtatttaaaacagtggataaagatgattcaaaggaagctcatatttatgatacacttaaaggtggaagttatcttaacgatgaaaaacttgtagaaattcttgttaatgaatcaccacaaagattaatagatttagaaaattatggtgctttattcgatcgccaagaatcaggtgaaatagatcaaagaccttttggtggacaaacctacagaagaacttgttatcaaggagatagaactggtgctgaattattaaatgctcttaaagaagaaatcattaaaagagatattgaatgcattgaagaagtgatgattacatccctcataactgataaaaatcaggttattggtgcaactggtcttgatttaaaagattctagtttaatttactttaaagcaaaatcaacaatccttgctagtggaggtgctggacaattataccctgtaacatcaaataccttccaaaaaaatggagatggttatgcaatagcttacaaagctggagctaaattaattgatatggaacaagttcaattccatccaactggtatggttgctcctgaatccaaaaaaggagtactagtaacagaagctgtaagggctgaaggtggaaaattattaaataaagacggtgccagatttatgagaaaatatgcacctgaaaaaatggaattagctacccgtgatattgttgcccgttcaatttaccaagaaataattgaaggtagaggaactgaaaaaggtggagtatatcttgatatttcacacttagatgatgactatatagatgaaaaacttgaaacaatggttttgcaattcaataatgtcagtattgatattaaacatgaaccaattgaagtggcaccaactgcacatcactttatgggcggtttgaaaataaatacggatgcatctacatcactaaggaacttatttggtgctggtgaagtttgtggaggagtccatggtgcaaatcgtttaggtggaaatgcattagctgacactcaggtatttggaaaaattgctggtgaaagtgcaagtaaagcatgtgcagatacagaaattaaaacagattatgaacaagtcaaaagagaatcttccagaattgaaaatttgattaaaaaaggtaatatcaaaccacaaaaattcaaagagaatattaaaaacttaatgtgggaaaaagtagctatagtaagagatgaaaaaacattgaatgaaggtttaaaagatctccaagatatgcaaaaagaattaaataacttagatgttagcgataaaaagcaatacaacaccgaattagtgactgcacttgaagtaataaatatggttgaaatttgtattttaattgtaaaatctgcaatattacgtagagaaagtagaggatcacactttaggtctgatttccctgaaagtaaagatgaatggaaaaaaagtattatatttaataaagacaaaatagaatttgaagctagatag

SEQ ID NO: 8135 - DNA, 1305 bp, Methanobrevibacter gottschalkii
  source 1..1305: mol_type = genomic DNA
atgaatgataatactattttaattaaaaatgcattaattttaagtccaaatacaaattttgaaaataaacagtctattttaattaaagataatttaattgctgaaatttcaccagatattgatgagagtaatgtcagtaaaattatagatgcaactggtaaaattttacttccgggattaatcaatactcatactcatttgtccatgacattatttagaggtttagctgatgatttaagtttggatagttggttaaatgattatatatggccgatggaagctaatcttaatggagattactgttatattggggctcttttaggtgctgttgaacttattaaatcaggaacaactactttttctgatatgtatttctacatggaagatgttgctcgtgctgttgatgaatcaggaattagggctgttttatcatatggtatgattgattttggtgatgaagataaaagaaaaaatgaaataaatgaaaatttagaattatttaaatcttgcgagggaatgggaaatgggagaattaaagttttcttaggaccacattcaccttacactgcttctgaagagttattaatccaagtacgtgagctggccgatgaatatgatatgggtattcatattcatgtttctgaaactcaaaaagaaattgtagatatttcatctgaaaaaggtttaagaccttttgaatatttggataaaattggatttttaggccctgatgttgttgctgcacattgtgtatggttaagtgataatgaaattgaaattattaagaaaaataatgtaaaaatttcacataatccatgtagtaacatgaaattagcttcaggaattgctccagtttcaaaattaattgaaaatgatatttgtgtttccattggaactgatggtgcttcttcaaataataatttagatttaattgaagaattaaaaacagcttccttacttcaaaaagtttctactttggatcctaaagttttgacttcagatgaaaccttatctatgggaactattaaaggtgctgagacgttaggtcttgaatctgaaattggttctatagaggttggtaaaaaagcagatattattttaattgacactaattcagctaatatgattccagacagttcttctttaagttcaaacattatttactccgcaaatggtttgaatgttgatacaactatttgtgatggtaaaatattaatggaaaataagaaattaactgttttagatgaaggtgaaatttatcaaaaagctagacaagcaataaaagaattaaaagaagctatctag

SEQ ID NO: 8136 - DNA, 207 bp, Methanobrevibacter gottschalkii
  source 1..207: mol_type = genomic DNA
atgtctgaaataccaaaagctcctgttgcaaggatcattaaagaatctggtgcagaaagagttagtgaagatgctaaagctgaattagcagcatacttagaagatgttgctcgtaatgtagctaaagaagcaaatgctgtagctaaaatcgctaaacgtaaaactgtaaaagcagaagatatcaaattagctatcaaaaacttataa

SEQ ID NO: 8137 - DNA, 864 bp, Methanobrevibacter gottschalkii
  source 1..864: mol_type = genomic DNA
atgatgaaaattaaaattgcaataccatcgaaaggaagaataagtgaaccttctataaacattttagaaaaagcaggtttagggttaattgataaaaataatagaaaactaatttcaaaaacatttaatgaagatatagaagttatgtttgcaagagcatctgatattccagaatttgtcaatgatggagttgcagatatgggaataacaggtgttgatttaattaatgaaaatgaagcagatgttatagaattacttgacttaagatttggtcaaacaaaattagttttagcagctccagaagaatcaaatataaattcagttgatgatattacagaagaaatgaaagtcgctactgaatttccagtattaactaaaaaatacctagataaaaaaggtttaagtttaaaaattgttaaactaagcggatcaacagaagctgcaccatttattggaattgctgatttgattactgatttaacaagtactggaacaactttaaaaatgaatcatctacaaataattgataatattttagatagcacaattaaacttattggaaataaatatagtttaaaaaataaaaaagaattaattgaagccgttagtacaagtattaaaggagttcttgacgctgaacgtaaaaaattaattatgatgaatgtgaaaaatgatgatttggataaagttaaagaagtaatgccttccatgggaggtttaacaatatctgaagtattatcaaatgaaaaaactgttgctgttcaagcagttattgatgaaaaagaagtatttgaacttgtaaactgtttaaggaatgctggtgcaaaagatattcttgtagtaccaattgaaagaataatatga

SEQ ID NO: 8138 - DNA, 495 bp, Methanobrevibacter gottschalkii
  source 1..495: mol_type = genomic DNA
atgaaaattggaataatatattctacttcaaaaaaatctacaaaaaaagcttgtaaaatattagctagtaaaattaacactgatgtacaattaatacctattgaaaaagcaaaaacaacatgcattttaaaatataatttcatcatattcattgcttctgcatataacggtaaatttcagagtagtttaaaaagatatattattagaaatattaaaacaataaaagaaaaaccaattgcactggtcattaatagtgaagaaaatattaatacagaagacatatttaataaaatatttacagaagaattagtaaattcatcatgtattaactcaaattttggatatgaattaaatattaatgaaggaaatttttttgaaaaaataaaaacaaaaaataaaattaaaaataaagaaaaccttccaagtttaaacattgatgaaatcaataaatttagtgattatataaacaatttgattgaaaaaagggttgattaa

SEQ ID NO: 8139 - DNA, 936 bp, Methanobrevibacter gottschalkii
  source 1..936: mol_type = genomic DNA
ttgattaaaatttttagattaaaaaacataatttcagtgaaagattttgaaagaaaagatattgaatatatactagatgaagcatcaaaattagaaaatattgccaaatctagagaaatatctgaagagcttaaaggaaaaattcttggattaatgttttttgaaccttcaacaaggactaaaatgtcatttgaaacatccatgaaacgtttaagtggagaatgtattggatttgaaaatagtggatctagttccgtgtctaaaggtgaaagtattgcagatacggcaaaaatgtttgaaggatattgtgacgcattagttataagacatgaacttgaaggagtatcaaaatttatatcagatattgtagatgtacctgtaattaatgcaggtgatggtgctggtcaacaccctacacaaacattattggatttatatactattaaaaatgaaatcggtgaaattgataatttaaaaatagcattaattggtgatttaaaatttggtcgtacagttcattcattaacacatgctttaggtttatttaaaaatattaaaatatatttaatatcacctcctgagcttaaaatgcctcaagaagttcttcatgatttgaacaaaaccaatgtagaatataaagaaatcggttcaattgaagaaataattgatgatgtaaacgttttatatgtaactagaatacaaaaagaacgttttgcagatattaatgattatttaaaaataaaaggtgcatatattattaataaaaacatgcttgaaggtaaagatttaattattatgcatcctttaccaagaattgatgaaatagatactaatgttgataatacaaaatataataagtattttacacaagctgctaatgctgttcctgtgagaatggccattttaaaaacattaataaaaaacaaccctaaatag

SEQ ID NO: 8140 - DNA, 1164 bp, Methanobrevibacter gottschalkii
  source 1..1164: mol_type = genomic DNA
atgtcaaatatttttgaagatttagaaaatgatgaaacacaagggcctactatatttaaagataaacgtcctttagatcatagatggttacctgataaattagttcacagagaagaacaaattaggcaaattgcaaaaaattggattgatgttttaagcaatgtaactccgtctaatgttactttatatggtaaaacaggaacaggtaaaacagctgcatcaaaatttgcccgtgaacaattaattgatattgctcgtaaaaagaatatttttgttaaagttgaatatattagatgtactgattatacaactgaatatcaggtaattgcagaattatgtaataaacttggacgtgatgttccaaatcgtggttggacaaaaggtgaagttgtaaatacatttagagacatttttaaaacaaatgcatttggtaaaaagttacatttaattgttattttagatgaaattgatattttacttgataaagatggggatggaattttatacactcttacaagaacagaaaatgtttctgtattatgtataagtaattatttagattttaaaaatttgattaaatctagggttacaagtagtttaaatgataaagagatagtatttcctccttatggtgcagatcaattatctgatattttaaaagaaagggcagaattatcttttaatgaaaatgtattggaaaatgatgttattccattatgttcagcaatggccgctaaagaggaaggtgatgcaaggtatgctcttgacttacttaaaaatgctggtgaattagcttttgatgaagattcagaaaaagttacaaataatcatgtaaaaagagcaaaagataaaatagaacacaataaagttattgaaattatatccactttaccacttcaacaacaaagagttttagaatctattttaaatttaacaaaacaaaaagaagaaattacatctggtaaattatatgaagcttatacagatttatataaaaaagatgcagttacttacagaagaatatttgactttattaatgaacttgaaatgttaggaattatttccactaatacaatctcacgcggtcgtggaaaaggaagaactaatattattaaacttcaatgtgatgaaacattacttgaaacaaccttattttctatttag

SEQ ID NO: 8141 - DNA, 459 bp, Methanobrevibacter gottschalkii
  source 1..459: mol_type = genomic DNA
atgattaatgaaaaaacaattgaaaaatggttacttgatgaagacatgttacgtgaaatgaagtttgatgaaaacgctgattttcattttattattgaatttccaaaagacaatataatagatattgtaaaaccgaaacaaaaagattgtattgtttttgcatgtgcaacacaagtttcacaagaacatattaatttgatggtttcagcagatttaaaaactaaaaaagattttattttagaattaaattttggattaaataattttttagttgactatgaacttcaaattcatgacgaaatgttacaacagtttattatcactgatcaaatatttgaagatggattaactaaagataactttattaaaactataaaaagagtttttaaatcaaaattacattgtatttggttaattgaaaaaaaatttaataatccttctttttcacccataaaataa

SEQ ID NO: 8142 - DNA, 1035 bp, Methanobrevibacter gottschalkii
  source 1..1035: mol_type = genomic DNA
atggtgtataatgaattaataaataatataaatttaataaatataaataatattatttcattttatttatttctatttataatatttgcattattactttcacttgtaatagatgtcttatttggtgaacttccaggaaaaatacaccctgttgtaataatgggttcattgattaatttttttaaaaaaaaatttattaatattaaaaattgggcatctggtttgatgcttgttttatgtactagtgttatttcaagtgtattattattaataatttatactattattaaaaataatattattttattatttttagtattttcaattcttttatcttcaacattttctgttaaaatgcttttacaaacagcaattgatgttaaaaatgatttagataatgatattaaaaaagcaagaaaatcagtttcatatttagttagtagaaacacggaagatttatctgaatgtttcattgtttctgcagttattgaaagtttaactgaaaatataactgattcttatgttgcaccaattttttattatattatttttgcaatattcattttattttatccagttcatttgaaattgtatttattattgttagtaccaatgttatatagactttcaaatacgcatgatgcaatgcttggatataaaacacaggaattaatctatattggttttttacctgcaaaaatagatgatattttaaattatattccttcaagaatcgcaggtttatttattgttatgtctgcatatttacttaatttagatgggaaaaatagttttaaaataatgatgagagatgctagaaaatgcccatctccaaattcaggttatacaatggcatcaacagcaggagcattaaatattcaattgataaaaaaagatacatacattttaggagataataataaaataatcactgctaatgacatttcaagtgctgttaaattatctaaattatcaattattttatttacattaacaattatttgtttatttatattaatttatgtgatattatga

SEQ ID NO: 8143 - DNA, 1014 bp, Methanobrevibacter gottschalkii
  source 1..1014: mol_type = genomic DNA
atgaaattagcgattatatctgtttcaaataaaggtcaaaaattagcttttaaattaaaagaaaaattaaatgaggattcaactatattgaaagtagatttatatcataaaaatgttaaaaaatattttcaaatattattttatgaatatgatgcaataatagcaataatggcttctggaattttaattagaacaattgcccctttaatagaatctaaagttactgatccggctattttaaatattgatgataatggtaattttgttatttctactttgtcaggtcatcttgggggtgctaataaattaacagataaaattgctaatttaatcgatgcaatacctgttattacaacatctactgatgttaataaaaaattaggaatagatattttagcaaaagatctttatttgtcaattaataatacaaaggaaatattgttttttaacaaatcaattcttgagggcgaacaacttaattttacaattaatccaaataaaaattttgattatttatttaattatttgaaaaatattacacttgaaatagatgtctctttttcttattcaaataatattaatacagatgaaatacatgttaaattagataatcataaaataatcttaaaagaaagaaaaattgttgttggaattggttgtagacgtggaaaagaatgttctgatatatataaaagtttaataaaatcaataaacgagttaaacattgataaatcacgaattaacatgttttcatcagctgaaataaaaaaaaatgaacaagggatattagaactttcagataaattaaatatacctgttaattttgttgaattagataaattaaaactttttgaatcaaatgatattcaaaaatcggaatttgtatattcaaaatttggtatttatggtgtatgtgaaccttcagcattaatcacggcaggttttgattcaaaattaatatataaaaaaacatcctatgatggtgttacaatatctattgcactttcaaaataa

SEQ ID NO: 8144 - DNA, 246 bp, Methanobrevibacter gottschalkii
  source 1..246: mol_type = genomic DNA
atgagtagtcaaattgacgaagtttgtgaaatacttgaatatatcgcagataacaacactgtacctcgtaacattagagaggctgcaggaaaatccagtactttattaaaagatgaagaacaagatcaatctgtaaaaataagtactgttttaggaaaattagatgaaattagtaatgatccaaacatccctgttcatgcaagaacattaatttgggaagttttgtctaaattagaatcaatctaa

SEQ ID NO: 8145 - DNA, 177 bp, Methanobrevibacter gottschalkii
  source 1..177: mol_type = genomic DNA
atgtcagatataagtagaacaactataaatcttcccgttgatttaaaaaaagaattaaaaaaacttgctattgatgaagatacttcattatctggattaataattaaaatgattaatgaaggaatggaaaatagaaaaaatagtaatatttcttattcagatgaagataatagttag

SEQ ID NO: 8146 - DNA, 582 bp, Methanobrevibacter gottschalkii
  source 1..582: mol_type = genomic DNA
atgaaaaaacatataaatgaaattataaatgtttctaatgaaatttataacaaaggattagtttctggaaaagccggaaatattagtaaaagaattaaaggaagtactggagatattgttgctattactccaacattaaaatcattatcttatttaaaagaagaagatattgtattagttgatatggatgggaatttgttaactagaggaaaaccttcttcagaattaaatatgcatttagaaatttataaaaaaagatctgatgtaaatgctattgttcacactcactcaacatatgctactggatttgctttttcatcaaaaaaacttaaaagattagaaggttttggagaaataaaaaatccttatttaaattcaattgaatattttaaaccaggtactagcgaattagctaaaaatgctagtgagggaataaaaaatgaagatgttttaattttaaaaaatcatggtgtgatttgtgttagtgataagttaaaagaagcaaaattactctcaatttttgttgaagagagtgctaaaacacaatttgtaacatgtatgttaaattcagttgaagactaa

SEQ ID NO: 8147 - DNA, 1722 bp, Methanobrevibacter gottschalkii
  source 1..1722: mol_type = genomic DNA
atgtcaactaataaaattctattaaaatttgcaaaaaaaggaatcaacctatcacctgaagcatataataaggttataaatgctaaagatcctataaattatgcatcatcattaatagttaaattaaaaagtgataaattttcaccaaaagatttaatatctgttagtggagaaatggttgatgaaattaatggtattaaaaaagaagagtcaaataaccaaaaatcattaacagaagatataacacataatgaagaaataaaaattaaaaaagaaagtataaaagaaacaccttctgaaatacagccacaaataaaagttgacacaaaagcagaaaataaacaagatttaagtattatcaaaaaagaagatactatagataacttaaaaaaagaaagtgatactcctgaaaaatatataaataaagaaattttagaagcatctgaaacaattaaagatgaaaaaattaaatttaaaagaaatgaacaaaaaactaatgttaaatacgattttaaaataatacaagatacttctaaaaaatcatatacaagtggtgaaattgaaaacttaatttcttattttaaaagtagatacgaaaaattatctaatatcttatccaaaagaccagaacttaggaattatactaaaatagctgatattgatgattcacaagagaatttaagtttaatattaatggttcgtgaaataagaaccagtaaaaatggtcataaaattatcgaatttgaagatgatactggaacaatttcaattttgttctcacataataatgaagagctatttgctgaagctgaaaaacttgtaaaagatgaagttattggcgttattgcaaataaaagtgatgatccgggatttgcatttggccaacaaatcattgatccgggtgttttaagagttccagataaagaaatggattttggaattgtatttttatcagatgttcacattggtagtttaacatttcttgaagatgctttccaaagatttattgattggataaattgtgaatatggatcagaagagcaaagaagaattgctgaagatgtcaaatatcttgttattggtggagacattgtagatggtattggtgtttatccaaatcaagataaggaattagcaattaaagatattactgaacaatataacgaagcagctagatttttaggaaatattagaagtgatattaagattattattgcacctggaaatcacgatgcatcaagagtagcagaaccacaacctgctgttccagaagaatatgcaaaagcactttatgaacttgataatgtggaattcatatcaaatcctggtgtcgtgtctcttgatggaattaatgttttaatatatcatggccgaagttttgatgatttggtaatggctgttaaacaatttactcatgaaagaaatgatttattaatggaggaattgttgaaaaaaagacatttagcaccaatttatggagaaagaactcctcttgcatcagaacttgaagattatttagtaatagatgaattaccagatatattccatacaggtcatgttcacattaatacatataaaaaattcaaaggaattcacttaattaattctggtactttccagactcaaactgaatttcagaaaatttacaatattgaaccaacgcctgctcaagttccagtaattcacaaaggaaaatataaacatttaaaatttattgaatga

SEQ ID NO: 8148 - DNA, 501 bp, Methanobrevibacter gottschalkii
  source 1..501: mol_type = genomic DNA
atggcgaataaatttgttagaattattttaatagttgttttatttgttatattttttgaagtaggcctctttagttcatatactattgtcactgctgaagctcctaatattcaaggattaattgacatgcaaatacaaaaaatatcttctattttaaatcctgaaactgttaatgaagctttaataaaagatccaactccaatcaatattactaataaaaaagatgttgcactcaaaatgcaagacttgtctaaggttgatggtgttaatgttgattcaatgaatatatctacacgtgataatccaagtaatgataaaaattttactgtaattattgaagctttaggctatgcttcccctaattcaacttcaggacaaattattattagtcaagaaccatcttataagattatagcttctgcacctgcatcttatagaggtgaaggaataatggctgatacaaattcaatgacaataacttcagttttaaaattatattag

SEQ ID NO: 8149 - DNA, 1074 bp, Methanobrevibacter gottschalkii
  source 1..1074: mol_type = genomic DNA
atgatttatgtaataggtattggtcaaaatagagaaaacatgacattaggtgctttaaaagctattgaagagtctgatgtaataatcggttataaaaaatatattgatcaaattgaagatttagttcaagataaagaggtcattaaaaaaggtatgggtgatgagatagctagagctgaattcgctattcaaagaagtttaaatggtcaaaatgtttcattgattagttctggagatcctggcgtatttggaatggcaaatgtattatatcaaattgttagtaaatatgaaggtgttgaaataaaggtttatcctggtgtttctgcattaaattatgcttctagtcatttaggagcacctttaaacgattttgcagcaattagtttaagtaatattttaactcctttatctgaaattgaaaaaaaattagaatatgctcttaaagctaatttagttgttgcaatttataatccgattagtaaaacttgtaaagaaccatttaaaagatttaaacaatgcgtttttaatattaaaggtgaagatgccttaattggtattgttgatagtacatatgaacctccaaaagcaagcattgttaaaattaaagaattaactgaagacatggttaatatgtcttgtactttaattgttggaaatgatttaacttatgttcaagatggaaaacttgtaacaccaagaggatatgtaattagatccaaaattcatgaattatcacgtaatcattatgaaaagttcttaaatggagaaattgccaatggtccaaatagtgaatgtgaattttatccatgtcattatgaaggtcaatattgtgatttctgttattgtccattttatccatgtggggattcttcaactggtggggagtggattaaaggtaaaaatgtttggaattgtaaaaattgtatatggttgcataataaagaaagtattgaatgtttacgcccaccttttgaaaatattttagaagatattgaagatttaaaatcaaagaaaaaaactttattaaagcttagaagagcatgtttattgaaaaataatccaaataatctttag

SEQ ID NO: 8150 - DNA, 603 bp, Methanobrevibacter gottschalkii
  source 1..603: mol_type = genomic DNA
ttgtcaattaaaaatcttttaatagaaatgaaaaatatgtcggaacttatggtggatttagcttactcggctgttttatttaacagtaaagatgcagcagaagaagtgattacattagaaaatgaagttaattcaatgaattatgaaattaagaaagaatcattagttgcagcacgttcatatgaagatgctgaaaaattaaccgcattacttgaaattgctgaagctgctgaaagtatggctaatgctgcaaaagatttagctgatttagtaatcactggttttaaaccacatccggtatttaaaatggtaatggaagaatctgataaaagtattgttagagtaacaattgatgaatcatcagaattagcaaataatacattaggtgatttacttttagttaatcgtactggtatgagagtaattgctattagaagaggtgtgtcttggatttatggtccagataaaaatacaatgcttttagctaatgatgtattaattttaaaaggtacttatgaaggtgctgaattattagaaaaacttgcttctggagcttgttctcttgaagatattccagaagaattagaagaagaattagagtga

SEQ ID NO: 8151 - DNA, 1272 bp, Methanobrevibacter gottschalkii
  source 1..1272: mol_type = genomic DNA
gtgatatatgtgaaaaagcaacagaagaagatacgcagttcactatctactcgaacattttctgaatttttcagtgaacatgactatgttataaaagaaggattaattgctcttttaatctgtgctgttggagatttaatagcaggtattgtattaggtaagatgacttttttccttgagtcttttccaggtttgttggttgttattcctggagctattggaatgaggggaaatatttttggatcatttgcttcaagattatctactagtttacacattggtttaatatctccacattttgaattttcagatgatttaaacaataatatattttcctcatttgttttaacattagttttatctatatttttaggtattgtagcaaagattttttgtattttactacattatcattcaatggatttaattgattttatattaatttgtacaattgctggcttaatttcaaacttaataatgctaccaataactatgtttatttcttttaaaagttttgaacatggttgggatccagacaatattacaagtccgattattgcagcattcggtgatttatttactttacctgcaatcattgtatcaatttttattttgaaatctttaaatttcaatctcattgttaaggatgtaattttagcaattattttaattgcagttttaatgagttttattcattgttataaattatcttatgaaactaaaactattttaagacaatctacaccaatattacttttatgttcttttttaggaggatctgcaggaggaattttaaatagttctgttgaaacattacttagtaatcctagtttacttacattaattccgttattttcaggtgaaagtggaagtttaattagtattttaggtgcaagaatatcatctggtcttcattctggtttaattgagcctttatctaaaccagaaggggaaacaatccataattttggaatttgttatatattagctattgttatatttccattaatcggaatccttgcagagacatcatcaatttcatttggaacaattggtgttggttttgataaaataattctaattagtggattatcaggtattattttagttacagtcatggtatttcttgtttattatatatcaacaagttcatataataataatttagatccggataatattgtaattccgatttcaacaagtgttacagattcaatttctagtttaattttaatttccatgtctttattgatattaggtactttaatttaa

SEQ ID NO: 8152 - DNA, 867 bp, Methanobrevibacter gottschalkii
  source 1..867: mol_type = genomic DNA
atggataatactggaaatatgaccatagaaataacagtagttttattaatagttttattgattattagtgttactattacctcctatgagaatataacagataaactaattaaaacacaagaaaaagaaaatatggaaatattaacctctgagattgttgataacttaatcaacaatcctggagtaccagaaaaatggtttgaatatggtaaaggaacacctggacttgcaattataaatgagggtggtgaaattattccaaatagcgtttcatattcaaagttaatctcgcttaaagaaaattataaaaaacttgttgatgatcagttattcaaatctaaatttcattcatcaatggaattaatccctcaaaagagaactatttcaagtgtaaaaattggttctaatagtgaatcaaataatatattttcagttaatagattggtaaaatgtgatttttacaaaaaatatgttttaaaagactttaaaaatgatggaaaatgtaatcacaatcatgaccaaaaatatcatagttgtaattattttaaaatttttaaaggaaatctaaaaaattcagattactatttattaatcgaggatagtgaaaagtatgatttaaaatatattgttgatacaacaagagttgttaaagaaaaatattgggaaaatgcaatatcaaataaaatttatttaaatgataaaattaatttttatgatgatacaagtgcaatcgtatttattcattttaacaaaccacaatctaaggttgttttagtaagtgttcctaaaaattttgataaaaataaattaaattatgattattttataacaaacgaatgtcaatttgttctaaaagtatggtattaa

SEQ ID NO: 8153 - DNA, 939 bp, Methanobrevibacter gottschalkii
  source 1..939: mol_type = genomic DNA
atgaaaatcaactctaaaggaaatttaatcgtaggaacgacagctattttaattatagcattattatttatttgtatttttgttgtaacatctataaattatattcaaaataaaaatatcggcattgaaagtaacgataatttcaaatatattattgatgattatacacaaaacttagaacttaattgcagagacgcaattgatgaagcaacccaaaaagtttttaacggacttcctgtgacaaacagtgaaaaccaaattaaaaagaacttaaataaaattttagataaaaaaaataaagaatatgaagaaaaatacgacgtaaaaattaattctgaaacattgtctgttgaaaataccaaatcaccatggaaaatactttttaaaattaaattaaacatcaaaaagggtgatgaaaaatattctaaaatagttgaaaaaaatgcatctgttgaaggtttaagagaccccttaccaatagctaaactaaccattatgtctggaattctaacttatgataatcaaattcattataaaactgcattatctacatatatgttattacatcatttagattcgccagaatcatatattgaagcaacagcaccattatacattaaaaaatgcccatatgatccatatatccatcatggagaccctggagtaattgaagactgtcttaaacatggatattttcatgaaagtgcagatggaagttgttatttatgtagattagaaggaaagggaaaatgtcctcattatggtttagaagtattcatacaaactcatacacctctaaaaaatgagtctttatcttgcccagatcacgttgtatttgcagaccattataacggtgaaaaaataaatccagatgattggaatagcctgattttagattcatctcatagaaagaaatacgggttgataaatgatggataa

SEQ ID NO: 8154 - DNA, 399 bp, Methanobrevibacter gottschalkii
  source 1..399: mol_type = genomic DNA
atgtctgatactgtaagaacatggcgtcatattcaacaaagatataatctcattggtactaaatgtaacacctgtggtgaattatttttcccatctcgtgtagtttgtcctaattgtagaagaaaaggagatcttgaacctttccaattttcaggaaaaggtaaaatttatacatattcagtaattagatctgcacctgatgatttcaagaaatcagcaccatatgcagtagctgtaattgagcttgaggaaggagcaaaattaacttcacaacttgtagactgtgatgttgatgaccttgaaatcggtgacgatgttgaaatggtatttagaaaaataagagaagatggaaaagacggagttatctcttatggatacaaattcaaagttatcaaataa

SEQ ID NO: 8155 - DNA, 900 bp, Methanobrevibacter gottschalkii
  source 1..900: mol_type = genomic DNA
atggatacaaattcaaagttatcaaataatgctggtgtgattttagtaagtcatggtagtactttaccttttgcagaagaagttttcacagaaattaaagaaaaattcataaaaaaaagtggtttagctactgaaattggatacatgaaagtatctgaacctactattgccggtgctgttgagatattaaaagaacaagtggatgatttagataaaattattgcacttcctgtatttttagctccaggaattcatactaatattgatattccacagttattaggtttagaacctttggaagttgatccaagatgtcctgatggaaagtatcctgctgaacactatttatcaatagctgatgatgttgattttgatggtgaaattagattattaacttcaattggacctcgtgatgaacttttagatattattgataaaaggattaatgaagcattatctgaatctaaattagatgatagtgctaaaacaggtattttacttgttactcatggttctagattacattacaacaaagaatttgccaccgaattatatgataaattcaaaaaaacatgtgatttaccatctagctttggatttatggaattatgcggtccaagcataccagaatctattaataaattagcagatgaaaatagattagaacgattagttgttgttcctgtatttattgctccaggaatgcatacaactcatgatattccacatatattaggatttttagatgatcatgatcataatcatgaagatcatgggcatgaccatactcatgatttaactcctgttgagtttgatggtgagattctttatcctgaacctattaaatctgatgatatattgattgatatgttagttgcaatggtaaatgaggctttatag

SEQ ID NO: 8156 - DNA, 480 bp, Methanobrevibacter gottschalkii
  source 1..480: mol_type = genomic DNA
atgtctgataaaaaaacaggaattttacttttaagccatggttctaggttagaagaaggtaaaaaagtaattgaagcttataaaaatatgtatttagaagaatttccagaggctattgtagattatgcttttatggaaatcagaaaaccaggtattccagaaacaatcaaaaaattaaccactgaaaatgatttagaaaaaataattgttgtaccggtatttgttgctcatggattacatactaaaagagatattccggatttgctgggtattgaaagtgactttgatattgaagaagtatcttgtcatcatcatgatcatggccatagtcatggacatcatcaccatcatcatgaacacagtcatgaggaagaggaagaggaatttgaatttgatggtgaaataatcttaacagatcctcttggtgttgataaacgtatgtatgaaattattaaagacagagtttcagaacatttatga

SEQ ID NO: 8157 - DNA, 426 bp, Methanobrevibacter gottschalkii
  source 1..426: mol_type = genomic DNA
gtgattggaagacaaacaataaacatcaataaaagtagagagcttgaagaattatatcaaattatggagaaaaaatgggataaagaaaaatataatactttctttttaggaaaaccaaatccgttatccatagaaaaatacatctgtttaccggcaactcaaagatatatgataattgcttatcctagaaaaggaggaaaattcttttctagaaatgataaagttgttttaactatttgtgatactccagatagtatgaaaaatcaaatagttacttcattagctagagacaatatttttaaattaacatatcagattagtgaatccaaatctagaaatgaagaacgtaaaggtccaactgaagaaacgttacaaggatatactgcatacatgaaacaaatacttgaagaagaagatttgctttaa

SEQ ID NO: 8158 - DNA, 1026 bp, Methanobrevibacter gottschalkii
  source 1..1026: mol_type = genomic DNA
atgttatttatattgttagattatatgatattatttttaagacaattaaaatttatacaaagacaaaatttatttattttaaaagttatactaatatttatgagtctaaaagtctctgatattggcgaaaaagaattagttaggtatattattgctaattcaaagaaaattactccggatgatgctgcaattactccattttacaattctaatttaatttcaacttgtgacatgcttattcaatcaagacattttccgaaaaacatgtcttattatgatatgggatttaaatcagtaacagttaatgtgagtgacttagcagctatgggtgcaaaaccattaggatttcttttatcaatggcaataccaaaaaatttggaggtggataattttaaggaaattgttggtggagttttaaaagcttgtgattattattcaattccattaattggtggtgatactaatgaagcatctgaaataataatatctggaacagcattagggttatgtgataatccattaatgaaaaataattataaaaaagatgatttaatagctattactggagatattggtcttgcagcattaggttttgaaatagatgatttggatagtatttatgttaagcatgctctaaggccaaaagctagaattaatgaggggcaaattttaaaaaaatatggtgcaacttctgctacggatattactgatggacttgcaagtgaattatatgaaattaaaaaagatggctttggattcatgattcatgaagagttattgggaattacagatgaatataaaaatttagccagtaatcttaatttagattatttggatttagtctttcatattggtgaggattttgaattgttatttactatatcaaaagagaatttagaaaaattaccaatagagtataaggttattggtattgtatctgattctgatgttattgaacttactttagaaaatgggtttgttgaacaaattaaaaataaaggttatgagcactatgttggtgagtaa

SEQ ID NO: 8159 - DNA, 873 bp, Methanobrevibacter gottschalkii
  source 1..873: mol_type = genomic DNA
atgttggtgagtaatgacttgtataaaaaaagttctaaaacacaaaaaatcaggtgtgagatctgtgctaattattgtaaaatagatgagggtaatgttggtatttgtcatcagcataaaaacattaatggtgagctatttgatgaatcatatggtattgtttcatctttaagtccagatccaattgaaaaaaaaccattgaataaatttttacctcacacgtcaacatattcaattggaggttttgggtgcaatatgagttgtttgcactgtcagaactatataatctctcatgaatatggtaactattcaagaggtattaaaataacaccagaggagattgtggaaaatgcaatcaattacaattgcaagtcaattgcttggacatataatgaacctactatccacttactcttcaacaggaaaacttctttacttgcaaaacaaaaaaatttgaaagtgatatatgtaagtaatggatatttttcagaaaaatctttagaagaagttttatgttttgtcgatgccttcaatatagatttgaaatccatgtctagcaatttctataaaaaagtctgtggtgctgatttagacattgttttggataatttaaaaaggatttatttcgaaaataaacatttagaaattacaaatcttataattaatgaatttaatgattctattgacgaaattacacaattgtgtgattttgttgtaaatgaattaggtccggaagttccactacatttttcaagagcgtttccttattataaaatgaatgatatttcaccaactaatacagaaacattgtttaaggcaaaagaaatagctttaaaaaaaggaattcagaatgtttatttgggcaatatttaa

SEQ ID NO: 8160 - DNA, 1254 bp, Methanobrevibacter gottschalkii
  source 1..1254: mol_type = genomic DNA
atgatattaaaagataaaaacattatagaaattaccgaagaactttcaagtgagtttgaagtagcaaaagttttaagaaaatatccaaaagacactgttctcattaaaaatgtaaaaggtttcgatattccagttatctcaggaatatgtaacacaagggataaaatcgcaaaatcaattaactgtgaagtatctgaaattactgaaaaaattatcgaagctatggaaaacccaattaaagtagacaaatttactgatttttcagattatgatagtttagatattgatttaaataaaattcctattttaactcattatacaagagatggtggagcttacattactgcaggtgttgtatttgcacgtgatccggtaactggaattcaaaatgcatcaatacacagaatgatggtccttgacaataaacgattagttattaggattgttccaagaaatctctatacttacttccaaaatgctcagaaagcaggtgaagatttgcaaattgcaatagctatcggaatggatcctgctattttacttgcaagtactacttcaatacctattgattataatgaaatggatgttgcaaatgcatttaaaaatggtgaattagaattaattaaatgcggagaactagaagttccacaagcggacattatattggaaggtaaaatttcagtgacagaaactattgctgaaggtccatttgtcgatttaactgacacttatgatattattcgtgaccagccaataattaacttagaaaaaatgcacattaaaaaagatgccgcatatcatgcaattttaccagctggatttgaacataaattattacaaggtcttcctcaagaacctagaatattcaaagctgttaaaaatgcagttccaacagttgaaaatgttgttttaactgaaggtggttgttgttggttacattcagttgtttcaattgataaacagacagaaggtgacggtaaaaatgctattatggcagcattatctgcacatccctcactgaaacattgtgttgtagttgacactgatgttaatgtcttcgatgctgaagatgttgaatatgcaatagccacacgtgtaaaaggtgatagagacattatgattgttcctaatgtgcgcggttcttctcttgatccagtagctaagagtgatggtacaactactaaaattggagtagatgcaacaaaatcaattaaaacacttgaaaaatttgaaagagttagtttttctgaataa

SEQ ID NO: 8161 - DNA, 1026 bp, Methanobrevibacter gottschalkii
  source 1..1026: mol_type = genomic DNA
atgacaccaaaaataatgattattcttggaagtggatcggatattgctatagctgaaaaaagtatgaaaatattggaaaaattagaaattccatatagtttaaaaatagcatctgctcacagaacacctgatttagtacgtgaaattgttattcagggcactaatgcaggaattgaagtgtttattggtattgcaggacttgctgcacacttaccaggtgcaattgctgcttatacaccaagaccagttattggtgtaccagtagatgttaaaacaggaggtgttgatgcattagaatccattgtccaaatgccttatccttccccaattgctactgtaggaattgatagaggagacaatgctgcaatattagctgcacaatttattggacttcatgatgatgaaatacgtcaaaaaataattaatttaagaaaaaattacgctttaaaagttaaaaatagtaatgaggaaatcatacaaaaaattgaagataaaaaattcctccaaaatgattttttaagaattaaagacctaaatattaatgatattgaagcggatgaaagtgacccatgctgtaaaaataagaatgctgatgttgcaataattgttggaagacaaacagatgttgtaactgctaaaaaagtagcagtgattttagacagacttaaaatttctcatgacacaaaagttgtttgtcccattaggtccactaaaaaattcacaaattatgtaaaagcaatgaaaaatgcaaaaatattcattggaattagctccaattcttctcaagtaactggtggaattgtaggactaactgatagaccggtaattggcgttccttgtactaatgaaaatggcgatgattatatgcttaccacagttagtatgccacctggagttcctgttgcaaccgtaggaataaacaacggaaaaaatgcggcagtccttgcaggagaaattttatcaattaataatccttctattacagaacttctcggaaaaataaaaaacaaaaaaattaatttatag

SEQ ID NO: 8162 - DNA, 2190 bp, Methanobrevibacter gottschalkii
  source 1..2190: mol_type = genomic DNA
ttgaaaataacattaatatacttaattaaattacgtgaaaaaatgatagcaaaaacactcgaaaaagaattgaatctatcaaattggcaagttaaaaaagtaataaaattaattgatgatggaaataccattccattcattgcaagatataggaaagatgttactggttctttaaatgatgcaacattaagaaaatttgatgaaagattaaaataccttagaaatttagaagaaaaaaaagaaaaaatcatcaaaagaataaatgaacttggaaaattagatgataacctaaaaaataaaattcaaaattctaaaactttagttgaacttgaggatttataccgtccatataaaagtaaaaaacaaacaagagcaacaaaagctcgtgaaaaaggtcttgaatctttagcatccataattttaaaacaagaaattaaagaaaatgttaaaaatattgctaaaaactacataaccgatgaagttaaaacactagaagaagcaattcagggtgcgcaagacattattgcagaggaaatttctaataattctgaatttagaaaaaaaattagaaaaaacaatttctatactgggcaaattgaaacaaaaactaaaaataaagatgaatcgactgaatatgatctttattatgattacgccgaaaacattaaaaaaatacctccccatagaattttagcaattaacagagctgaaaaagagggaataattaaagtaaaaatcaattgtgacaatgaggaaataattaaatatctaaatagacacgttttgaaaaatatatctggaattcctgaaaagattgaatataatccctatacaacccaaattataaaagaatctgttgaagatgcatatacaagattaatttcaccggcaattgaaagagaaattagaaattaccttactaaaaaagcagaagaaaaatcaattgaagtgtttgctaaaaacttaaatcaactattaatggaaagcccattagttggaaaaacaatactcggatgggatcctgcttttagaactggttgtaaactagccatcatagataaaactggtaaagttcttgataccgaattaatttatccaacacaacctcaaaataaagttacagaatcaattaaaactgttaaagatttgattgataaatacagcattgatgtaatagctattggaaatggaactgcttcaagagaatcagaagagattgttgctaaaataattaaaaacactaatgtagaatacattatagtaaatgaagctggtgcatcagtttattcagcttcaaaatatgccgatgaagaatttcctgatttttcagaaggtgaaagaagcgcaatttcaattgcaagaagacttcaagatccattagcagaacttgtaaaaattgacccaaaatcaattggtgttggccaatatcaacatgacatgaatcaaaaacaattaaatgaaacattaactggcgttgttgaaaaagtagtgaatgaagtaggagtagatttaaacactgcatctgtaagtttacttaattatgtatctggaattggaaatacgactgctaaaaatatcataaactatagagaagaaaatggaagttttgactctagaaaagaattattaaaagttaaaaaacttggtaaaaaaacatatgaacaatgcgcaggatttattaaagtcaataaccctaaatatcctcttgataatacgaccatacatccagaatcatatgatgctgcttacaagctacttgaaaaactcaattatagcattgatgatattggaagttcaaatttaaaattagacaatattaatcttgaagaaatttcagtagaattggatattggtcaagaaacacttaaagatattattaaagagcttagaaaacctggtcgtgatcctcgtgatgatatgccaaaaccaatgcttagaaaaaatgtattgtcaattgaagatttagaaataggaatgataatgcaaggaaccattagaaatattgtggattttggagcatttgttgatattggagttcatcaagatggattagtgcatatttcacagttagttgaaaataaatttgtaaaacatccgcttgatatcgttagtgttgggaatatagttgatgtaaaagttttagatgttgatttgaaaagaaatagaattaatctttcaatgatactttaa

SEQ ID NO: 8163 - DNA, 1698 bp, Methanobrevibacter gottschalkii
  source 1..1698: mol_type = genomic DNA
atgtattggttttttgtaatcctttcttttttgcttgcaggtataaaaactcaaaaacctaataaatataaaaaagtttcagttatcattccagcatataatgaggaagagactgtggccaaggttgtaaatgtagttaaaaaagtatcctttgttgatgagattatagttgttaatgatggttcatctgataatactgaaatggaagctttaaaagctggagctattgtaattaatcatgaggttaataaaggaaaaggagaagctttacaaaccggatatagggaagcagaatgtgatattattgcatttattgatgcagatatttataatttgacatcaagtaaagttgaatcaatgattaaacctattttggatggtggagctgatattactaaaactaaattctctagagcaagcggacgtgttactgaacttactgctaaaccattacttaactttttcttcccagaaatttcatttgaacaacctttaagcggtcaatttgcagcacgtaaggaagtattaaagaaaattaattttgaaagcgattatggtgtagatgttggtattgttattgatgctgatgttttaggaatttcaattatggaagttgatattggagctattgaacatgacatgtctccactttctgatttaaatttaatggctaatgaagttgtaagaactattataggtcgtgcaaataagtacggaagagttacaatgattgatgatattgggtattacattagaatgtctatcgttggtttgtctttagtaattcttggtttatttacaatattctttgtaaaatttgttccattagctattggagttataatttcaattataggacttttaattgcaattttttatatttttaaagttattattaaatcaatagtaatgtttaaaaagacaccaggccgcaatttattaaaatcatttgttaaaattcattttccaatgattatttcaattattatattgcttcttatgatttcaacatttctcggtgcagcacattttgatcatggagttttatcaattgaacccaattctagaaatctaattatttatgctgatgattctccaagggatactatctctgttagaggaccatatactattgatactgcaattgaaaatgaatctggtcaaatacgtatgccttctgatgctatgatgacattaggagtcaatattaatgatacgattaaattaggtgcgaatacttataaagtcaatgaaaccagattaggggagcctgatattttaaggttacctattgaagttaaaaagctattgcaagttgaaaatggtgaagttattcaaaacagtcgtttaaaagatgtttttgatggttctttaattactcatgcttatgaatataataatacaacaattaaagaaaaatattttattacatcaaatgaaaaacaatcatctacatatgaaatatttttggataatgaatctattgtgaattcatatggtacttttaaggataacggaacttatgatatttctgtagatgggaattatctaacttcttttagttataaaaataatttgactaaatcatttaaatttgacggtcatgatttagaaattgtatttagggatacaaattccacttcaattaaacaattttctagtggaaatcaaggtgttttcttaaattttaatttttaa

SEQ ID NO: 8164 - DNA, 936 bp, Methanobrevibacter gottschalkii
  source 1..936: mol_type = genomic DNA
atggaaatcttaaaacctaatgaattaagagaaagatttaacgacccatggattgcaccatataaaaaagtattgactatggtggacggaaataaagtagaaatcgttgaatatcatccatgcatatccggttcgcactggttgttaaatcaatacctgaataattctgagttgattgattcagcttatcgtgacggtaacaaacatgtttataaatgtcatgttggtaaagcaccactagaccttaaagcaagctttaatgcagcaggaattgatgagattgttgttgctgatgatgaggttaaagtaactcacagcggacttgccggtgcaggtgttggagctggaatgtgtagaggaatgggtgaaggtgttaaatatattgaacttattcaagttggaggcggttcaaaagcaggaaaagctaccgttgttactccaaaacttaataaaatagtaattggtgttgatgacactgatgttaaagatgctggagctacttggactatggcacataatttaggtgttgaacttgcaaatgaaggttttgaatacttagatcatattattgtccaattatatcctcataatccacataaaactcaaaattgtgtatcaattgctttaacattcgctgttgaagaatctaaaaaagaaaaattaatagacagagttattgaaattcttaaaagagacacattatctgataaaactgcaattgctatcttagaaggtttagatattcctgaaaaattaagaaaatattcaatagctacaaaatcaggaatgatggatattgaaactgcagaatcacttgcaaaagaattaaacataccattaattgctgttactggtgaacaaggaaaagttggtgctcttgctgctttaggtctttacgatgatgtggaagaagcagtgaaagcatatgataaataa

SEQ ID NO: 8165 - DNA, 423 bp, Methanobrevibacter gottschalkii
  source 1..423: mol_type = genomic DNA
atggcaaaatatgaaattgcagcagtagttgcagaatttaattatgatattacacaaatgatgttagaactcgcaaaagcagaagcaaaaaatagaggatgtgaaatcacaaaagtaatcgccgttcctggtgtatttgatatgcctcttataattaaaaaattattaaaatcagaaaaatatgatgcaattgtcaccttgggtgctgtaatagaaggcgcaactgatcacgaccaaattgtagcacaacatgcttctcgtaaaattgctgatttagcattggaatatgatacaccagtagcacttggtattactggtcctggaatgactagattagatgctcacagacgtgttaaaaatgcaaaaagtgcagttgaagcagctattaaaatgtgtgacagattaagtgaattagacgaatag

SEQ ID NO: 8166 - DNA, 102 bp, Methanobrevibacter gottschalkii
  source 1..102: mol_type = genomic DNA
atggattttaaaaaattaacaaaaatacaatttgcagcactttttatcatatttattatggtactgagtggggttgcaggattccttctctatattatttag

SEQ ID NO: 8167 - DNA, 1008 bp, Methanobrevibacter gottschalkii
  source 1..1008: mol_type = genomic DNA
ttgaatacctcaaaaacaaaagataaatataaaattgctgttattccaggtgatggtataggtaatgaagtaatggaagcggcaatatatgttttaaatgctttaaatatcaattttgattatgtttatggtgaagctggtgatgaatgccttgaaaaaaacggtactgcattgcctgatgaaacattagacattattagaaattctgatgcttgcttatttggtgcagcaggggaaactgcagcagatgtaattgttaaaatacgtcaagaaatgaaaatgtttgctaacttaagacctgtgaaatcataccccaacaccaattcattgtcagataatatagatttcatgatagtgcgtgaaaacacagaaggattatacattgcaggtgaagaaagttatactgacgaaggtgcagtagctagacgcattattacacgtgaagcagaaaaacgcattattgaatatgcatttaaatatgcaaaagaaaataataaaagtaaagtaactggtgttcacaaagccaatgtattaaaaaaaagtgatggtttattcaaagatgtattctatgaagttgctaaaagatatcctgaaattgcaacagaggattattatgtagatgcaacagcaatgtatcttattacaaaacctgaaagctttgatgtgattgtaaccacaaatctttttggagacattctctccgatgaaggtgcaggtcttgtcgggggacttggtttaataccatccgccaatattggtgaagatgctgcattatttgaaccggttcatggttcagcaccagatattgcaggtcaaggaaaagcaaatccaatagctatgatgctttcagctatcatgatgcttagatatcttggtgaaaatgaagcggctaatagatttgatggtgcaatattaaaagtacttaatgaagctgatattttaactggtgatttaggtggttctgcaaccactatggaactagctgaggaagttaaaaataatttataa

SEQ ID NO: 8168 - DNA, 480 bp, Methanobrevibacter gottschalkii
  source 1..480: mol_type = genomic DNA
atgaaaggaacagcatggaaattcggaaatgatattgatacagacattatcgttccaggaagatatttaatttatactaatgaagaaagattatcacaacattgtatggaaggtttagatcctgattttaacaaaaaatgtaaaaaaggagattttattgttgcaggaactaactttggatgcggatcttcaagagagcatgcaccaatagcacttaaaggtgctggagtatctgcagtaattgctgaatcttttgctagaattttttatagaaatgctacaaatattggaattcccctattagaagctccaggaattaataaacttatagaagatggggaagaaattgaaattgacatgaacaaagcaactataaaatctcaaaatggagaaataatctcatttaaaaaattacctccattcatgttagaaatattagaacaaggtggtttaattgaatacctcaaaaacaaaagataa

SEQ ID NO: 8169 - DNA, 1245 bp, Methanobrevibacter gottschalkii
  source 1..1245: mol_type = genomic DNA
atgccaacaatgtcagagaaaatattagctaaagcttccggaaaagaaaaggtagaagcaggagatatagttattgcaaatatcgatgtagcgatgacacatgatttgactgggcctctttcagtggaatcttttgaaaaaattggagctgaaaatgtttgggatgcatcaaaaattgttattcctttcgatcaccaagttcccgcagattctattgactccgccaataatcatataataatgagagaatttgttaaaaaatacaatattgaaaatttttatgatgttaatgctggagtgtgtcaccagattctaccagaaaaaggtcatgtagtacccggagaagttattgtaggtgcagactcacatacatgtactcatggagcattaggagcattttcaacaggtatcggatcgactgatatggcaatggtatttgctgaaggtaatttatggttaaaagtacctgaaacaaatagatttaatatcacaggagatttaaaagaaaatgtttatgcaaaagatgtaattttgcacattatcggtgaaatgggtgctgatggttcaacttacaaagcctgtgaatttgctggtgaaactatatcaaatatgagtatttcagatagaatggtattatgcaatatggcaattgaaatgggtggaaaaaccgggttagtagaacctgacaaaaaaacaattgattatgttgaaaaacattctaacaaaccttatgaaatatttaaaactgatttagattcctcttcgcttaacatgattgacattgatgtgagcaacttagaacctcaaatagcatgtccccataatgtagataatgtaaagccaattagtgaagtagaccaagaaatcgaccaagtatttttaggttcttgtactaatggtaggttaagtgatttaagggatgctgctaaaatattaaaaggcaaaaaagtagctaaagacaccagaatgctagttatcccagcatcacaagaaatttatttaaaagcattagatgaagggttacttaaaatatttgttgaagctggtgcacttgtatcagctccatgttgtggtccatgcctcggaggacacacaggaataattggacctgatgaagtaagtctctcaacttccaatagaaactttagaggaagacagggtagtcctgatggaaaagtatttttatcttctgctgctgttgccgctgcttcagcaattgaaggaaaaattgtaagtccagagtga

SEQ ID NO: 8170 - DNA, 1209 bp, Methanobrevibacter gottschalkii
  source 1..1209: mol_type = genomic DNA
atgagtaactcaatttttaaaagatttaaaaaaaaagaaactcctataattgaagaaaaacttcctattttggaggataggattttttgggtttcaactttacaaaaaattgcttttccggtattgaataatttagcaagagattctcttagtaaaaacatgcccgttgaatcaatttctgctgaaggtcattcgtctgcttattttgatgcttttgtaagaatattcaatggaattgcatcttggttggaacttggtgcggataattctgaagaaggtaaaattcgtgagaaatatatttatttaacattaaaagctatttctaatgctattaatccaaaaagcaatgattatatttttgttgttgaacctaaacaatctttggttgatgttgctttatttgctgaaggattactcagagctaaaaatcaaatttggcttaatttacctattaaggttcaagctagaataatcagagaccttaaaagtacaagaatcattgccccttatgaaaatcattggttgttatacacttctatgattgaagctgctcttttagaattcactggggaatgtgataaagaacgtttagtttatggtgtccgtaaatttagggatgaattatatatcggagatgcaatgtattctgatggcgaagattttgagttaggttactataatagcttatttattcatcctatgcttaatgatattttaggtgtaatgagaaaatatggtttggaagatggtgaattcttagatgttcaattaatgaggtcttcaagattagcatctcaacttgaaagagttatttcacctgaaggaacttatccattacttggaaaattcttatcttataggtgtggtgttttccatttgatgtctcaagcctctttacttaaaatattgccaaaaaatattcatccggctcaagttaggtccgctcttacaaaagttttaaaaactcaatttgaatcttacaataactttaattcaaatggatggttaattattggcttggagggatcacaaactgatatttctgatgaaactactaatacaggtactctttactcatgttgttcaatatttttaccattaggtttagataggaatgatatgttctggaaagcaccttctgcagaatggagtagtcttaaagcatggaatgggcatccaattcaaagggatcagcctattaatttttag

SEQ ID NO: 8171 - DNA, 1239 bp, Methanobrevibacter gottschalkii
  source 1..1239: mol_type = genomic DNA
atgaaagtgtgtataataggtcaaggttatattggacttccaactgcagcacttttttcaaaaaatcattgcaaagttgttggagtagatatttctgaaaaaataattaataatttaaacaaaggaattgttcacattgaagaaccgggaataggtgacctaattaaaaatgcagtggaaaaaaaatcatattcagccagtttaactccgcaaaaagctgatgcatttattattactgtgccaacaccatacattgctgaaaattatagttgcgatttaagttatgttattgatgcatgtcactcaatattaccatacttagaaaaaggaaatatagttattattgaatccacagttgcaccaatgtcaactgacgaacaaataaaaccaatatttgaagaagcaggttttagtattggaaaagatttatatcttgcacattgtcctgaaagagttcttccaggaaaaataatgtatgaattagtcaacaataaccgtattattggtggagttacagaagaatgtgctaaaaaagctagtgaagtttatggagaattcgtagaaggtgaattaatacttactgaagcaaagacagctgaattatcaaaatgtatggaaaatacttttagagatgtaaatattgcacttgctaatgaacttacaaaaatttgtgctgaaattggagtaaatgcacttgatgtaattgaaatggcaaataaacatccaagagttaaccttcattccccaggaccaggtgttggaggacattgccttgcaattgatccttactttatttatgcaaaagctcctgaaactgcaaaaattattaaattagcaagggatacaaataactccatgccagattttgtttgcgataatattagaaaaatcattaaaaaaggtaaaatagctgttttaggtgtttcttataaaggaaatactgatgatgatagggaaagtccggcttatgaaattatagataaattaagtaatgattatgagattcaaattcatgaccctcatgttgaaaatcctaattatgtaaactttgatatagcagtgaaagatagtgatttaattttagtgctctgtgaccataacgaatttaaagatttagattataatttaataaaaaaaagtatgaaaaatccagtaatattcgatacaaaaaatataataaaagaagttccatctgaaattaaattatataattatgggaacttatatgaattaaactaa

SEQ ID NO: 8172 - DNA, 840 bp, Methanobrevibacter gottschalkii
  source 1..840: mol_type = genomic DNA
atgaagattttaataactggttctaatgggatgctgggttatgatttgcaggaagttttaaggaggactcatgaattaatacttacaacttctgaaacattagatatcactgataaaaaacatacaatggagtttatttcaaataaaaagccggacattgttataaattcagcagcatatactgatgttgatggttgtgaggaaaatcaagatattgcttatactgtaaatagtgaaggagttaagaatcttgctattgcatgtaaggagattgattgtcctcttgttcatataagtactgattatgttttcaatggtaaaagtgataaaccatggattgaggaggataatgttgatccaataagtgtttatggtaaaagtaaacttaggggagaaaaatatattcttgaaatccttgataaattctttattgtaaggactgcatggttatatggtattaatggccgaaattttcctaaaacaatacttgaacttgcaaaaaatcattctgaaattactgttgtttatgatgaaataggaacacctacatatactcaagatttagctaaagctatttctgaattaataaaaactgatttttatggtatttatcatttaactaattccggaagttgctcttggtgtgagtttgcaagatatatatttgaagtggccaatgttgatgtcaaagtgattccagttaccgcatctgaatttgctcgttctgcttcacgtccaaattattcagtattgaaaaataaaaactggattaaaaatggatttaatccacttagaaattataaagaagctattaaagaatatattgagttaatcatatga

SEQ ID NO: 8173 - DNA, 450 bp, Methanobrevibacter gottschalkii
  source 1..450: mol_type = genomic DNA
atgaataaaaaattaattttaataattgcatctattgtcgcattgtttagtatcgcctctgtaagtgcgggattttttgatttcttacattgggatgacgattcagataatattaatgtagttgaggatggccaatattgcacagtgaatcaggtttcagcttatattaaagaatttcataaacttccaagtaattatataactaaaaaagaggctcaaagtttaggttggcatggcgggccacttaaaaaatacgctccaggaaaaagtataggtggagatacatttactaataggcagcatatacttccagatagtgattataaatacattgaatgtgatataaatgctaatggaacatttcgtggtgctgaaaggattgtttacaatactggcaactataaagtatactatactgatgatcattacaacacatttacagaggtataa

SEQ ID NO: 8174 - DNA, 231 bp, Methanobrevibacter gottschalkii
  source 1..231: mol_type = genomic DNA
atgctaattgatggtaaattgattaaaacagaggggcatgattatttaataaaaatattaaatctgccggactattatggtaaaaatttagatgcactttatgattgtttgtgtgaaatggattgtgaaattcaattaattaatccaaaatatgttaataaggatattattgatacttttttggatgcatctatcgaaaacgaatttctaaaatttgaaatattatattaa

SEQ ID NO: 8175 - DNA, 867 bp, Methanobrevibacter gottschalkii
  source 1..867: mol_type = genomic DNA
atgaaaggtatagtgcttgcaggtggttctggaactcgtctttatcctatcacaaaagcagtttcaaaacaattattgccgttatatgacaaaccaatgatttattatcctatatctgtactgatgcttgcaggaattaaggaaatattgattatttcaactcctcgggatttaccaatgtataaagaccttttaggtagtggagcaagttttggaattaaattatcttatgctattcaagaaaatcctaatggccttgcagaagcgtttataataggtgaagatttcattggaaatgataatgttgctttaattttaggagacaatatatttcatggtcatagatttacagaaattcttgaaagagcaactaaactggatgaaggtgcaataatattcggttattacacaaataatccagaagcttttggtgttgttgaatttgatgataattggaatgtactttctgttgaggaaaaaccaaaaaatcctaaatcaaattatattgttccgggtctttatttttatgataatgatgttatagaaatagcaaaaaatgttaaaccttctgacagaggagaagttgagattacttctgttaatggggagtatttaaaacgtggaaaacttaaagttgaacttttaggaagaggtatggcttggcttgataccggaactcatgaaggacttttagaagcagcaaattttattgaaacaattcaaaaaaggcagggattatatattgcttgtcttgaagaaattgcctatctcaaaggatatattaataaaaaacaattgttaaagacagctgaggaacttaaaaaaacagattatggtcaatatttatttaatttagctaaaatgtga

SEQ ID NO: 8176 - DNA, 561 bp, Methanobrevibacter gottschalkii
  source 1..561: mol_type = genomic DNA
atgggaaagtttaattttatagaaactggtattgaggaaatgtttgtagtagaacctgcaatctttgaagataatagaggatattttatggaaacatacaatgaaaaagattttaaggatgcgggacatgatttgacctttgttcaggataatcaatcaaaatcaagaaaaggagttttaagaggcttgcacctacaagttaaatatcctcaaggaaaattagttcgtgttatcaatggtgaagtatttgatgttggagtagatttaagagctaattcccccacttatggtaaatggtttggaactatcctatctgataaaaataaaaagcagttattcatcccaccaaaatttgctcatggatttttagtattatccgatgaagccgaatttgtatataaatgtacagaattttaccatggtgaagatgaaagtggaattaaatgggatgatgaagatatagctattgattggccattgaatgatattgatgagataattttatctgataaggataagaaatggttaggctttaaagaatctcaaattaaatataagtga

SEQ ID NO: 8177 - DNA, 1008 bp, Methanobrevibacter gottschalkii
  source 1..1008: mol_type = genomic DNA
atgtcaaaaatacttgttactggtggagcaggatttattggaagtaattttgttaggtatatggttaataaatactctgaatatgaaattgttaacttggatgctttaacatactgcggaaaccttgaaaatttaaaagatatcgaaaaaaatgataattattcatttgttaaaggcgatattagggataagaacatcgttgatgatttagttcaacaatgtgattatgttattaattttgcagctgaaagtcatgtagataggagtataaccgaccctgaaatatttattaagtcaaatgttttaggaacacaagttctattaaatgctgctaaaaaatatggtgttgataaatacatacaaatttcaactgatgaagtttatggtactcttggaaaaacaggatattttaaagaaaatactcctttacaacctaatagtccttattcggcttcaaaggctggtggagatttaattactcgtgcttatagtgaaacatttgatttgccgataaatattactcgttgttctaataattatggtccttatcaattccctgagaaattaattcccttgatgatctcaaatgctttggaagataaaaaattaccggtttatggtgacggtaaaaacattagggattggctgcatgtttatgatcactgccgagctattgatttggtgttgcatgaaggtaaacttggtgaagtttataatattggtggaaataacgaaaaacagaaccttgaaatcgttaaattaatattaaatcaattaaataaggatgaatctttaattaaatttgtgaaagataggttgggtcatgataggcgttatgcaattgattcaaataaaattcaagaggaattaggatggtctcctaaatatacatttgaaattgggattaaagaaacaattcaatggtatctggacaatcaagaatggactagtaaggttaaaagtggtcaatacaaagattattataataaaatgtattctggcagataa

SEQ ID NO: 8178 - DNA, 318 bp, Methanobrevibacter gottschalkii
  source 1..318: mol_type = genomic DNA
atgattattgtatacggtaaatattcaatatatttattgggaggaatggaaatgttagaacaatatttgccttttgttgggttaataatttttggaaacattgaaaacttagtattatcttcacaaggtgtagttgcaggcgtcaatccggttaaattagggattgtaagtatcttatttgttatgggatggttattcataggtacagttggtacttcaatgttaatgcaatatgtcgatttcattgattttattggtggtttagctatttttattttgggtttacaagcaatggtagaatctattagaggtgtttaa

SEQ ID NO: 8179 - DNA, 279 bp, Methanobrevibacter gottschalkii
  source 1..279: mol_type = genomic DNA
atgaaagaactaaaaccatttttagcattattagtttttggaaacattgaaaacttaattttagcagctcagggtgttgctgctcatgtagatcctattattttaagtatcttaagtttaattgcagttgtttgctggcttttaattggaacatttggtacaaaattagcaatgaaatattcacgttatattaatttcattggcggttttgctatttttatattaggtattcaagctatgattgagtcattaccgggaatgttaacatttttccattaa

SEQ ID NO: 8180 - DNA, 1080 bp, Methanobrevibacter gottschalkii
  source 1..1080: mol_type = genomic DNA
atgagatattttaaacatagaatttatggtgctttatttaaattattcaaagacaccattattaaaaaaaacagagtttcatttattgtcgattcaaaggaatcatttaaaggtaatttggattatattcaaaaagaatttgaaaatagagggaactttgaatttcattatttttacaagaataaactttctataggtagttttaggaaattatcaagttctaaatttatatttttaaatgataacttttttccattagctttcatggaatttcatcccgaaaccacaattgttcaattatggcatgctccaggggcttctaaaaaatttggggggtctgttgatattcaaaacagggaaatccttgagaaaatttctaaaaatactgactatttgattactacttcagtcaatattaaagattattattctgaagcttttcaaatgcctttaaataagattaaatcactaggtattcctcgtattgattattattttgaaaatcatgatgtcaatactttaaaatcaaattttcttaataaatataatatttcatcaaataaaaaaatacttctctatgctccaacatttagggatgaagaaaaatacaataacgtattcaattacttgaatttggaggaatttaatgaaaatttaggtgatgaatatattttggctttaagacttcatccaaaaattgagaatttttataaaaatgatatttcggataatggtaactacattgatgtaagtgattatgaaagtgagcaggaattaatgttaattagtgatatattaataactgattattcctctataatgattgaatttgccactttaaataaacctataatcttttttacatacgatttagatagttatttgtctaatgaacgtggtttttattatgattttaaaaaaactgtccccggtccaattgttcatacttcacaagaattaatcgatgtaattaaaaaaaatgaatttgataaaagtaagatttctgaatttcttaacacccaatttgatttaatagatggtgattcatctaaaagaattgttgattttctattaaaataa

SEQ ID NO: 8181 - DNA, 960 bp, Methanobrevibacter gottschalkii
  source 1..960: mol_type = genomic DNA
atggacaatattaatgtaagtgtcatagttccagtatataataactgtgaatatatagagagtacactcagttcaattattaatcaaaatttcgataattttgaaataattgttattgacgatggatcaacagataatagtttagaaattgttaaagaaaaattatctgcttcagatatttcttatctgattattcatcaggaaaatgcaggtgtaagttgtgcgagaaatcgtggaattgaagttgcttgtggtgattatttagtttttgttgatgctgatgattatatttctcaaaatcatttatcagaattgtataatggtgaaactgattttagtttaattcagctggttaaaagagaagggaatgatttatctatcccttatcatttttcagaaagttcaatttcatgcaatgattttattaaaatggagttaaatatggaaattccatttaatttctgccaattaatgtataaaacagacattgtaaagaaaaataatattaaattcactcctaatattatttacggggaagatacagaattcgcacttaaagcattgagttttggtgatagaatatctataagtaatgaagtaacttattattatattcaacacgagcaatctgcaattagaacatctgaatttaagcgttttgagattgtaggtatttttgaaaacctagctcaatactataaaaatcagggaaaaactgatttagctaatctgataattacttctagaattccaaaagcaatatttggaaatatgaattattttttctataataattatgattttgatgatgtaattgctaaaatgcaccaactaaatttatttaccaaattgtctaaatttgaaggtgattttaaattcaaatttaaaataagattatttttattaaatccaaaaatttattataaaatatggagaaaagttaaaaattcgattgattaa

SEQ ID NO: 8182 - DNA, 960 bp, Methanobrevibacter gottschalkii
  source 1..960: mol_type = genomic DNA
atgaaagtttcagttgtaacaccaaattataatggtgaaaaatttctaaaaacatttttaaaatcccttaatgaagatagtcaatatatcggagaagttattattgtggataatggatctgatgatggtagtttggactatcttaaaaataatagctttagtttccctttagtattaatagaaaataaggaaaatattggattttctccagctgttaatcagggaattaaaatatctcaaaataatcttattttttcaattaataatgatactgaaattaaaaaaggttcaattaaatcattagtggatttaattaattccagtgatgatattttttctgttcaagctaaaatgctccagtataataataaaaatctaattgatgatgttggagatgaatataatttgcttggttggactaaaaaaataggtgaaaatcatcactctaatgaatataataaagtaaaaaggatattttctagttgtgcaggagcggcgatgtataataagtccattttagatgaaattggactatttgatgataacttttttgcatatatggaagatgtggatttagcaatcagatcccatattaatggttataggaatttgtcatgtcctgatgcaattgtttatcatattggtagtgcaacatcaggaagcagatataatgaatttaaagttaaattagctgcacgtaataatgtatgggtaatttataaaaatttaccagttcctttaaaaattgtaaattttatttttatatttttaggatttttaattaaatacttatttttttataaaaaaggattcggatccacttatttgtcagggattcgtgaaggattatctgcaaaaagtaaaattagcaaagttaaatttgaatcaaagaatacaaaaaattattttaaattggaatttagattaataataaatactattaaatttttaaaaagatga

SEQ ID NO: 8183 - DNA, 858 bp, Methanobrevibacter gottschalkii
  source 1..858: mol_type = genomic DNA
atggatctttcaattgtaattttaaattatcaaacctttgagctaacaaaaaatactattaattctatatttgaatatgaatattcctttgactatgagatcttagtggttgataatgcatcaggtgatgatagtttagttcgcttaaaagaatatttcggtgataaagtcaatttcatcgcatcaaaagagaataatggttttgcagccggtaacaatcaagctttaaaaattgcaaatggcaaatatattcttcttttaaattcagacactatagtttgggaagatacattagaaaatatttataactacatggaaaaacataatgatgttggtgtcagtggttgcagggttcttttagaaaacggtgaacttgataaggcttgtaaaaggagttttcctaatgtgaaaaattcattttttagattatttcatattccaaccagcagtaaagataatgattataacttggataatcttccagatgatggaatttatgaaattgattgtcttactggagcattcatgttcatgcgggctgatgcactaaaagatgcgggtctattggatgaaacattcttcatgtatggtgaagatattgatttttgttttagagttaaaaaaactggttggaagattacttattatggtaagtcaaaaattactcacttaaaaggagctagtagtaaaaaacaaaaatctaagttgatttatgaattttatcgtgcaatgtatatttattataaaaaacatcatgctgatgactctttatttttattaaactggattgtttattttggaatagctattctttgtgttttgaaattatttttaaatttatttaaaaagaaagattaa

SEQ ID NO: 8184 - DNA, 1404 bp, Methanobrevibacter gottschalkii
  source 1..1404: mol_type = genomic DNA
atgattaaagagaatcaaaaattattaaatttttcattggtattgattgatgttattgtcattggactggctcttttatgctctttatggttaagatttaaaactactctatttggtccaattggaggacatttaggcttttttaactatcttttattctttacatttgccgttatacctgtttatttaattttatattttgcatttggtctttataaaccgcgtagaacttataaaaacattttttcagaagcaacacaacttattaaagtaaatatattggcatttattacattagtttctattttatttattataaaccaacctgatttttcaagaataatgttaattttattagccattattgcttcattttttggaataattgaaagatttacaattagaactattttaaggaaaatgcgtattaataatcgtaatattaagcatattcttattgttggggataatgaattagcttttagctttgctcgtaaaattcgtgaaaacccatatttgggatttgttgtaagtggctttttagggcgttcagagcatataggtcgtgaaatagatgggtgcagtgtcatcggatcatttgaagatattgataaaattcttgataaaaacagatttgatagggttgttttggctattcctttaaaatattattataaaatcaatgaccttgtggagagttgtgaaagggttggaattaaagcggaaattattcctgattatattaggtacttcccagctcaaccttctgtggacatgattgaggacatacctattattaacataagatatgttcctttagatgatgattttaataagttcttaaaatatctttctgattatattatttccataattgcaattattattacatctcctataatggtagttactgcaattgcaatcaaattatcttctaatggtccaattatatttaaacaggaaagaataggttacaacagtaaacccttcatgatgtataaattccgtagtatgaaagttcaggatcccagtgaagaaaaagctgaatggacaacaaaagatgaccctagaaaaactaaagtaggacaatttataagaaaaactagtattgatgaattacctcaatttttcaatgtgttgaaaggggatatgagtgttgtaggtcctagacctgaaagaccatattttgttgatcaatttaaagaaactgttccaaaatatatggttaaacatcaagttaaacctggattaactggctgggctcaaattcatggttgtcgtggagacacttctattaaaaaacgtattgaatatgatattgaatatgtagaaaattggcacatgggtttagatttagcaataatgattaaaaccgcattaaagaaaaaccctaatgcatattaa

SEQ ID NO: 8185 - DNA, 2625 bp, Methanobrevibacter gottschalkii
  source 1..2625: mol_type = genomic DNA
atgcaagaaaaaattttaaaattatatgaaaaaatcaaagatcagctttctgaagatgaatttcaagctgaaatggcagaaattcgtgaaaataatgcagatgtaacattttttgatgatttggatattgcacatatggttttacagaatcatggaattgaaaatacaattgctcaaaaagaagaagatactaaccaattatcttttgaatctagtgatgggactggattcacaatgactgaagaaattttggaaaaatataataaggttaaagataaaatttctgaagaagaatttttagctaaaatgaaagttcatgcagaaaaaaatgagcatgcctcattcatgaatgatgttacatttgctgatatggtagttggtgaatttataactgaggaagtagaatcagtctcccaatcaccagaattttctgataaagctattagtgatcttgaagaaaacagtaaagatgtaactgtgtctggtagagtaatatctatttcaaacccaagatcttttaaaacacgtaaaggacaaagtggagaagtttgcaatgttgagttaaaggataattccggttcacttagggctgttttttggactcaaaatattaaacttcttaaaaatgttaatgaaggggatattattcaaattaaaggtgtggatattaaagaaggttattcgggccttgaagctaatttaagaccaagatctattcttgttcatttagaggaggatacttcaaaattcccagaatataaagaagacattactgatattgcagatattaaaccagacactaaagttaacataattgcaagaattattagaattccaacaattagaacttatgaaaagaatggtaaagaaggtaaggttgcatctattgaattacaagattattctggtaaaattacttatactctatggaataaaaatgttgaacttattaatgatttaggtcttgaagatggtgattcagttaaaatcatccaagctcaagctcgtgagagaattaacagggatggtggaagtgaactgtccttaactcattgggatggaagaatcattaaaggggaatttgatgttcctgaagttaagcaggagttcactcctattggtgatgtatttgaagcgcaagatgtttctattaaaggcattgtttcaagactccaagatattaaaacatttttaagaaaaagtgatggtagtgaaggaagactaagaaattttgatgttagagatatcacaggtgagataagagtaactttatggggtgatgacacaactctaccaattaataagggagacattattaaaataattggtggtaatgtaagatatgatgaatatacacaaagtcaatattcaatgaatactaattttaacactcaaattactattaatcctgaaaatttatctactgaagaactggatgaattaaatacattaagagaagaattaagaccaaccccaattggagaaatttacaccattgatgatgatggtattgaaattgatgtacgcggtagaattctttcagtagatgatgtcaatgaattccaaagagatgatggaagtgttggtattgtacgttcaataatttttgctgatgaatctggtaaagtcagattgtctttatggaatgaacgtgctgaagaagaatatatagtaggtgatgcatatcaaattgaaaatgcaagaactagacttggtatgtatagcgttgatttaaatattggtagtggggctcgtcttattaaattatcagaagaacaggcttcatcaatgtttattccagaattatccacattagaaaaagcattatatgactacaaaaaaatcgaagaaatcgatgaagatgatcaagacattattataatcggtagagtaattgaattaaatgatattcgtaactttgaaagagacaatggtgatactggttctgttagaaatattgagcttgcagatgaaaccggttctatgagggttgttttatgggatgatgatgcaaaaagagagtttgaaattggtcaaccaattaaattgcaaaatccacgttttgacttagatagggataatcgtattgaagctattgtaaatcgaagtactgccattttagaacctagtgaaagtgaaatagaaaaattacctactcaagatgaattaatggaagcaatttatgttcctaaacctattgaagcattaacagaagatgatgttaatgtttgtgtaactggtactattagtgatattgaatcagatagagttattcgtaaaaaatgtccttcttgtggaaataatatagaagaaagtgaagatgaatatatttgtgacaattgtggtcatgtatttgatgaacctagatatcttctcatggttcctttaagaattgaagatgataccggttcaattaaagtcactttctttgataagttagctgaagaattaattggaatgaataaagaagaaattatcaatattattgaagatggttatggaattgaagataaacttgaagacttaaatggtcaaactattgaaattatagctaatgttagttttgatgagtacagcgaagagaataggttaaatcctaagaaaattttatcaaagtatatttaa

SEQ ID NO: 8186 - DNA, 936 bp, Methanobrevibacter gottschalkii
  source 1..936: mol_type = genomic DNA
atggttgaattaagtgatttaccaggtgttggagaaaaaacagcagaaaaattaagagatgcaggatttgctgacatgatgagattagcaactgctactgcaaaagaactatccgtaaaagcagaaattggtgaaggtgttgctgaaaaagttattgaagctgctcgtaggtctgaaaatatagattttgaaactgcattagaagttgatgaaagaagaaaagatgttggtcatattactgtaggtagccaagaattcaacgatttaattggtggagggattgaaactcaatctattactgaagtatttggtgaatttggatctggtaaaagtcaaatttctcatgaattagctgtaactgttcaattacctgaagaattaggtggtcttgatggtgaatgtgtatttgttgatactgaaaatactttccgtccagaaaggattagacaaatagctgaaggttttgaattagatgttgaagaggttttaggaagaattcatgttgctcgtgcattcaactcttctcaccaaattttaatggttgataaaattaatgatttaattcaaagtggtaaaaatgttaaattagtcattgttgattcattaatggcccatttcagagcagaatatgttggaagagagtctttagcagtaagacagcaaaaattaaatcaacatttacattcacttcaacaaattgctaatacttataatgttgctgtatttattactaatcaagttcaagctaaacctgattcattctttggaagtcctacaaaagctattggtggtcatgttttaggacatgcttctacttatagaatttggcttaaaaaaggattggctggtaaaagaattgcacgtttagttgattcacctcacttgcctgaaggtgaatgtgtatttaaaattactagtgaaggtattgttagttaa

SEQ ID NO: 8187 - DNA, 906 bp, Methanobrevibacter gottschalkii
  source 1..906: mol_type = genomic DNA
atggatgctatagctattactattttttcaattataataatgattggattaggttattttcttaaaagaattgattttttatctaagaaagatatggatccatttaataaaatagtaatgtatattttaatgccatgtatgatatttcatgcaatttacaatgcagatttatcatcacttccaaaattaagcctattgccttttgttattttggcttcatcaattgtcacaggagttatctcatattttattttaaaaagattaaatcttgatgataaacaggtatggagtgtattagttactgtaatgattgctaatactgcttttatgggttatccagttactttaggaatttatggtcaaactgggtttttaagagcaatattttgtgatattgcaacattatccatgtttttattattgtcttttgttttaattttaagattcggaggaacagttaagacagctattaggaaaattgctatttttccaccattatgggcagttattttaggtttgattttcaatttattgaatattccaattggtgatgtttgtgaatatactgttaattatttaggtcagggtgctattcctttaatcatgattactttaggtttatctattgatttttcagcattagctagaagtaaatccatgattatttttacttcaattatgaagttagcgtttttcccattagttgcatttttacttgcaacaaaattaggactagttgatttacagtataatgtttcaattattgaagcggcaatgccttctggaatgatgtcattattgcttgcgattacatataaattagattatgaattgacgtcagattgtatactgatcaatactgtaatctctttgattacactaccggttatcatatcattattatag

SEQ ID NO: 8188 - DNA, 1992 bp, Methanobrevibacter gottschalkii
  source 1..1992: mol_type = genomic DNA
atggcagaagaaaaaagagataataatgaagaattaaggattggtgtttacgtctgtcactgtggtgtaaacgttggtggagttgtagactgtcctaatgttgcagaatacgctaaaacattaccaaatgtagttcattcaactgactacaaatacatgtgttctgacccaggtcaagctatgattcaagaagacattaaagagaaaaacttaaacagagttgttgttgcagcatgttctcctcgtcttcacgaacctaccttccgtagatgtgttgaagaagctggattaaacaaatttttatttgaatttgctaatttaagagaacaagactcttgggtacacatgaacgaacctgaagcagctactgaaaaagctaaagatttagtacgtatggctgttgcaaaagcaagattgctcgaaccattagaagctactaaagtagctgtagataacaaagcgttagttatcggtggaggagtatgtggtattcaaactgcattagatttaggtgatatgggattcaaaacatacatggtagaaagaaacccaaccattggtggaagaatgggacaattagataaaactttccctactcttgactgttcaatgtgtattttagcacctaaaatggtagactgtgcaaaacacgaaaacatagaattaatttcatacgcagaagttaaagaagttgatggatacattggaaactttactgtaaaagtagagaaaaaagcaagatacgtagatgaagatctctgtaccggatgtggagcttgtgttgaagcttgtcctatcgaaatacctaactactacgatgaaggtgtaggtatggtaaaagctgcatacatcccattccctcaagctgtaccattatgtgcaactattgataaagattactgtattgaatgtatgttatgtactcaagcttgtggacctgatgcaatagatcacaatcaagaagctactgaaatcgaattagaagttggtactattgtagcagctatcggttacgatccatttgatccatctggaatttaccaatacggttacggtcgttacactaacgtaattactgctatggaaatcgaaaggatgattaatgcatccggtcctactggtggacatgtaatcaaaccttccgatggtattgaacctaaacgtgtagcatttatccactgtgttggttcaagagatgaaacaattggtaaaccttactgttccagagtatgttgtatgtactctatgaaaaatgctcaattatgtattgaccacgaacctgatactgaagtaacttgttactacatggatattcgtgcattcggtaaaggatacgaagagttctacaaaacttctcaagaaaaatatggaattgaatttatcagaggtaaaccagcacaaatcttcgaaaatgatgatttaacattaactatcagagcagaagatactttacttggtaaagtaactgaatacacttatgatttagttgtattaagtgtaggtctcgaacatgctgaaggatctgatgaactcagacaaacattaggtgtttccaaatctgcagatggattttacatggaagctcacccaaaactcaggccagttgacacattaactgatggtgtttacattgctggtgtagcacaaggtcctaaagatattcctgactccgtagcacaaggttctgctgcagcatcaagagcagcaattccaatggcacaaggagaagtagaaatcgaacctattattgcatctaacgatgaagctatttgtggtgcttgccaagtatgtgttgaattatgtccatacggcgctattgctatcgcaactggtgtaggtggaaaagaatttgcacaaattaactccgcattatgtaaaggatgtggtacttgtgtaggtgcatgtccatctggtgcaatgaaccaacaacacttcaaaacagagcaaattatggcacaaatcagtgctgctcttgaagacataggtaaatag

SEQ ID NO: 8189 - DNA, 1239 bp, Methanobrevibacter gottschalkii
  source 1..1239: mol_type = genomic DNA
ttgatacattcgcaaaaatttaattattataatgagaatttatcatggattattggtgatactatgaatgagatatttaggacttttacatctgaatctgtaactcagggacatcctgataaaattgcagacattgtttctgatgcaatattggatgcatatatggcaaaagataaaaattcccatgttgcatgtgaaacctgtttaacaactgatttttgtatggtatttggagaaataacatctgcaggtcatttatctgagaatgaaattgaagatattataaggaatacaattattgaaatcggttatgataattctgatttaaaatttgatgggcatagttgtgagattttaaacaaacttcatgaacaatctgcagatattaatcagggagttgatcgtggagatgatgaaaccggagcaggtgatcagggtatgatgtttggttttgcaactaatgaaactgaatcattaatgccgtatccaattgatcttgctcgtaaattaactaataaattaacagaacttagagaaactggagaaattccatatttaagacctgacggtaaagcccaagtatctgtaaattatgataaagaggggaatgttgtttcactcgatgcagtggtattgtcaactcagcatgatgaatcaatgtctgataatcaagaacaattaaaagaggatattcgtgaaaagctatttaaagcagttattccagaggaattaatgactgaaaatactaaagaacatatcaatccaactggaaaatttgaaattggtggtcctcatggagatgcaggattaacaggtcgtaaaatcattgttgatacttatggaggatatgctcgtcatggtggaggagcattttcaggtaaagactgcactaaagttgatagaagtgcatgttacatggcgagatatattgccaaaaatatcgtagcaagcggacttgcttctaaatgtgaaattcaattatcttatgcaattggagttgcagaaccaacttccgtaatggtggatacctttggaactggagcaaatattggagatttaacttttgagaaaatagtacgtgaaaacttcaaattaactccagatggaattattgaaacattaggtttaagagacattacttataaacaaactgctaaatatggccattttggtattgatggtcttccatgggaaaaaactgataaaattgatgagttgagaaaatatattaaaaattaa

SEQ ID NO: 8190 - DNA, 1269 bp, Methanobrevibacter gottschalkii
  source 1..1269: mol_type = genomic DNA
atgactaattatcatgatgaaattttaaattttgaaaaaattgcaaaagaacatactgaatacatgagaaatagtgtaaatctcattgcttctgaaaacgttactagtgtggaagtaactgaagcattagctactgattttgctcacagatatgctgaaggacaagcttttgaaagattttatgaaggatgccagtacgtagatttaattgaagacagaaccaaaaaactttcatgtaaagtatatgactgtgattatgctaatgttcaacctgtttctggtgtaactgcaaatcttgcagcattttttggattttcaaatcctggtgaaaaagttatggctttagaagtaccgtctggaggccatatctctcatgcagatgtaagtgctgcgggtattcgtggattaaaaactgtattccacccattagataaagatatcatgaatattgatattgatgcaatgaacaaaaaaatcattgaagagaaaccaaaaattattttattcggtggaagtttattcttgttccctcatccaattaaagaggcacgtgaagctgctgatgaagttggagcaaaaatcatgtatgatggagctcatgtattaggcttaattgcaggagggcaattccaacaacctcttaaagaaggagctgatttaatgatgggaagtactcacaaaacattccctggtcctcaaggaggaattattctctcacatgaagaaaatgcagaaattattgataatgcagttttccctggtgtagtaagcaaccaccatttacaccacttacttggtttaggtattgctactgctgaaatgttggaatttggtgaagattatgcaaaacaaatcatcaaaaatgctcaagcattaggtcaagcaatgtatgaaagaggatttgatgtattatgtgaagaacaagggttcacccaatcccatcaaattgcagtaaatttaactaatattagatcagcatctgatattgcacgtgaattagctgataataatgttatcttaaacaaaaatcttttacctggagataatagggataattctgatgatccatctggtatcaggataggtactcaagaaattactaggaggggattaaaagaaaaagaaatggatgaagttgctgagtttataaaacgtgttgctgttgataaagaaaatattgctgatgaagtagctgaattcatgaatcaatacactaaactcgactatgcattctctgatagagatgcttaccaatatcacagattatag

SEQ ID NO: 8191 - DNA, 693 bp, Methanobrevibacter gottschalkii
  source 1..693: mol_type = genomic DNA
atgagaataggatttgcatttactggggccggtcatttacttaaagaatcagtacaagtggctgaaaaacttgcaaatgatcatgaggttaccatatttttatctggtgctgcggaagaagttcttaaaatgtatgggctttatgaaagagttaaaagcttaactggtggaaaataccgtgaacttgcaactgattctgatcaaaaattttcatatccaataactggtcgtctttctcttggaaagtatgatttattaattgtttcaccggctacagcaaatacggtttcaaaaatcgtttatgggatagcagatactttagtaacaaatgctgttgctcaatctggtaaaggtgctgttccagtatatatggtgcctgttgatattcacccaggtccgattgatacagttcttccatctaaaatggaattatctaaatgtcaaagttgtgatgattgttttgcatctattgcctgtgaacaaggtgcaattcttccacatgaagaaatagatttaacaaaatgtattggttgcggtttgtgcaggaacacatgtccgtatgatgcaatttctgaaggcaaaatcataacaatctatatgagggatattgatattgaaaatacctgtaagttatcaagtattgataatattcaaatatttgaaaatccacacgaaatcttagataaaatctaa

SEQ ID NO: 8192 - DNA, 318 bp, Methanobrevibacter gottschalkii
  source 1..318: mol_type = genomic DNA
atgatatacaataatgaacaaattaatataaaaataacatatgctaataacttttacaaacgttttaaaggattaatgctgaaaaaagattttgatgacggattattatttacaaatcttaaagattcaagcatccacacattttttatgagatttgaaattgatgtttattttttaaatgaaaagaaatatatttttgaaaagacaagtttaaaaccttggaaattctataaacctaaaaaacaagcaaaatatatcctagaaacaagaaaaaataagttaaaattaaaaataggggatcgtttagattttatctaa

SEQ ID NO: 8193 - DNA, 663 bp, Methanobrevibacter gottschalkii
  source 1..663: mol_type = genomic DNA
atgataattgaatacttaagtgattttaactgtccatattcctatattggattaaatcgtatcatgagtgtttgtaatcatcttaatttagatgttatatgggaaatgaaatctttcgaacttgaacctgaactaaacaatatccctacatgtagcatcgatagatatgcaattagaaatagattatcaattaaagatgcagaaaatgaaattgaagaaatagaaaaaatagctcaagatgaaggattaaatataaattacaaaaacatgcaactttcaagttcaaaagatgcccatagacttgttaaatatgtagaacgtaattatcctacattaactcaagagattgttttaaaaatatttgaatccaattttattaaaaatgagaatatttcagattacaatgttctgataaaaattgctatttcctgtaaattaaatgaaaaagagatatatgaatttctaaaaaaagaaacttattcaattgaagttgatcttgatatggatgaagctatttcaaatggaataaacacaattccatattatttcataaattacaacgatgaaagattaataatacccggagtttttgaaaaagaggattttaaaactgcactagaagatttagttaatggtgaaatgaaaaataaaacatttatctaa

SEQ ID NO: 8194 - DNA, 111 bp, Methanobrevibacter gottschalkii
  source 1..111: mol_type = genomic DNA
atgggattttatagaaaatacaatacaattattagaactatagataattttgtaaaattatacaaagttgctaagaaagattctgaaaaatctaaagatgataaaaaatga

SEQ ID NO: 8195 - DNA, 3237 bp, Methanobrevibacter gottschalkii
  source 1..3237: mol_type = genomic DNA
atgccaatacatgaggcagaaaaatcatatgagcatgataaaatagaaaagaaagtacaaaaattctggaaagaagaagatacttttaaaaaagttaatgaacttagagaaaaaggtcctaagtactcatttttagatggaccaccttactgtagtggtaaaatccacttaggtacagcctggaacaaagttattaaagattcgtaccttagattcaaatcaatgaatggatttggcttaagacgccaagcaggatgggatatgcatggtcttcctattgaaaataaagtagaacatttaatgggcattcaaagcaaacaagaaattgaagaggatattggaatagctgcttttgttgacaaatgtagggaatttgcaattgaaaataaaatagcaatggaacaagaattcgatcaattaggtgtttggatggattgggataatccatacatgacacttgatcctaaatatatggaatcttcttggtggacacttaaaagggcaaatgaacaagatttacttgtaaatgaccaaagagtaatcagttggtgtcctcattgcggaactgcacttgcagctgctgaaattgaatatgaagaaaaagctgatccttctatttatattaaattccctgtaaggggagaagaaaatacttattttctcgtttggacaactactccatggactttacctgcaaatatggcaatttgtgcaaatccggaatttgattatgtttatgtttcaaaagatggtgaaacttacattttagctgaaaacctaattgaggaagtattaggtaaacaagttaaaattcatagaactgaaatttctgatgattctgaagatggtgaaaatcaaattatcgaagaaaaagaaatcatgtatgaaattattaaaacagttaagggtgaagacttgattggcatgagttatgactatattttagctgatgaagttcctatacatgataaatttgacgaaattgatgctgttcacactgttctggaaggcaatcatgttgaactaggtgaaggtactggattagtacatactgcacctgggcatggtccagatgattttgaagtaggtcaagctaataatattcctattttttgtccggtaggtgaagatggatgtttcactgaagaagcaggaaaatataatgctaaatttactaaggatgaaaattcacaaatcatcaaagatttggaagataaaggattaatgtacaaatcagaaacaattgaacacagatatggtgtatgttggagatgtaaaactcctattatctatcgtgctactaaacaatggtttttaaaagtaactgatatcaaacaaaaaatgttagatgaaattggtcgtgttgaatgggtaccaaaatgggctggtgaaggtcgattctacgattgggtagataatgctcgggactggacaatttcaagacaaaggtactggggtattccaattcctatatgggaatgtcctgactgtggggaattaaaagtaattggttctcttaatgaattaaaagaagaatcattaaatgatattaatgtttctgatgctgaacttatacataggccgtatgtcgatgaagttgaagtaaaatgtgataaatgtggaaaagttattaagagaattcctgatgtgttggatgtatggattgattcaggtgtagctggctgggcttcactttactatccagaagaaaaagaaaaattcgaagaatggtatccttatgactttataactgaaggacatgatcaaaccagaggatggttctactcccaattaggtactggagtaatttccatgggtaaaagcccatataaaaaagtattaatgcatggatttgtattggatgaacacggaaataaaatgtctaaatcattaggtaatgtagtatctcctgaagaagtaattgaaaaatatggggctgatgttttaagattttacctgttatgggcttcaaaaccatgggatgatttaaaatttgtttgggatgaacttttaaacattaataaaatgtttaacatcttatggaatgtttatgtattttcaactacttacatgtcattagataactttaaccctattggattaactgaaaaagacatgattctaagagctgaagataaatggattatctctaaagcgaatactttagtcaaagaagtaactgaggatttggataaattattcttccataaggcaacaagaaaaatcaataactttattctggaagatttaagccgttggtatgtaagacttattcgtggaagaacttgggttgagagtgatgatcctgataaattaggtgcttattatagtttatacacagcacttgtcaaattaatttcagtattatgtccaatagctcctcatgtatctgaagagatttatgaaaacctagtaaaaggtgttaatcctgatgcacttgaaagtattcacatgaatgattggggatacgatgatgatgcaattgacacagaactcgaatcaaaaatggatgttgtccgtaatgtaattgatgcatctattagagctcgtgatattgcacaatacaaactcagatggccggtttcagatattactgttgtatctcaagatgaaaatatcttaaaagctattgaagaattaactgatattattaaagaccagtcaaatacaaaagatgtactttgtgctagtgaattcgaaaaattatcatttaatgctaaacctaacctcaaaactttaggtccaagacttaaaggagacatgggtaaagtaatgaaagcattaaaagagagtgatggaaatcaaataaaagaggatattgaagcaaatggaagtattactgtagaaggtcatgaattatcaaatggagatgtattattcgattcagaacttccagatgattttgtttcgtcagaatttgaaggtggaaatgtctttgtaaatactaatgttactttagaaattaaacaagaagctatggcccgtgaattaataagaagaattcaggacatgagaaaagatttagatttggatgttgaggcaaatattaatgttgatgttgaaacttcagatgaatttaaagaattaattgtacctcaatctgaagttatttctcatgaagttagagctaaaagtttaatcatatccactagtgaagaatgtagtaaatattctaaagactataccaaagaatgggatattgaaggagaaaaagtaattatttcaattaaaaattaa

SEQ ID NO: 8196 - DNA, 2139 bp, Methanobrevibacter gottschalkii
  source 1..2139: mol_type = genomic DNA
atgactttagctgattctgaaattgaatatattgaaggaatccttggtaggaaaatgaatgaattggaagagggaatgcttgatgtaatgttttcagaacactgttcttacaaaagtagcagaccatttttaagagcttttccgaccgaaggaaaaaatattattttaggtcccggagatgatgcgggacttgtatctattactgataaatatgccctggctgtaggaatggaatctcacaatcacccttcagctattgaaccttatgggggtgcaggaactggaattggaggtattctaagagatataatatctatgggtgcaatgccaatagcacttttggattcacttagatttggaccattggaagatgataaatcaagatatttatttgaacatgttgttaaaggaatttctgattatgggaatcgtgtaggaattccaactgttgccggtgaaatcgaattcgatgaatcatttaggacaaatcctcttgtaaatgtaatgtgtgtaggacttgttgaaaaagataagattgttcgtgctcaagcaccgaatattggtgatgtatttcttttaatgggaggaacaactggtcgtgatggaattcacggggttacatttgcatctgaagaattaacttcggattctgaaacagaagataggcctgctgtacaggtggcagatccgtttactaaaaaaagagttttagaggcatcattagaaatcttggaaaaaatcaatgttagtggtgtgaaagatttaggtggtggtggtcttacctgctgtatttctgaacttgtagattcatccagtaatggtgcattagtagatttacgttcaattccattaagggaaacaggaatgactccatatgaaatcatgctttctgaatcacaagagaggatggtatttgttattggtcctaatgatgtagaacttgcttgtcaaatctgtgataaacatgaaatttcatcttccattgttggagaagtaattgaaggaaacaacatgattatttcggatgaagggaacgaaattgctaacttaccaactattcttttagcagatccaccttcaatcaatagacctattgtagaaatatctgcagatactgaaaaaattgatgttaaagagccttcaatacttaaatcactcccggcattattatccagttcaaacattgcttcaaaggaatgggtttacaaacagtatgatcatgaggttcaggtaagaactgttgtaaaacctggtgatgatgcagcagttttaagaattgatgaaaacactgcaattgcactcactaccgattcaaatacaattcatactaaattatctccatttgatggggcggcaggttgtgttgcagaagctattagaaatgtaatttcaatgggtgcaactccatacgctgttgttgactgtttaaatttcggaaatcctgaaactccagaaattttatggcaatttaaaacagctattgaaggaatgagtttggttgctgaaaaatttgatgctccagttattagtggaaacgtaagcttctacaatgaaactgaaggtgttaaaattaatccaacacctgctgtgggtgtaattggtgttgaggatattgaaaatataagaacattggacttcaaaaatgaaggagataaaatcattttaataggcaaaacctatgatgaattatctggttctgaatatcatagaactgttcataatattgaaaaaggaactgctccaaaaatcagaattgaagaagaagttgcaaatggtaaaactgttttagatttgataggtaaggataaagataaaaacattactgcagtacacgatgtgtctgctggaggacttgcagtagctttatctgaaatggttattaaatccggacttggctgtgaagtgactttaagagatgatgagttagataaaattcaattgctttactctgaaagtcatgctagatatcttttaactgtaaaagctgatgcagttgatgatattttatctaaaattgatgttgaagcaaatgtcattggtgaagtaaaagggacttcattattcattaatggtcatgaatttaagtttgaagatttagatgatgcatatcatggtgttattgaacaatatatggcttaa

SEQ ID NO: 8197 - DNA, 1218 bp, Methanobrevibacter gottschalkii
  source 1..1218: mol_type = genomic DNA
atgtttttatctaaattagattctctagcaaatgctataaaacttgtcaaggataatcaaaagttcactgaagttgaagaggtaccaatttctgaagcacataaaagggttttagctgaagatattatggcatttcatgattcaccaccttttgataaatcttcaatggatggatatgcggtaattgctgaaaatacgtttggagcatcacaatctgcccctaaaaaatttaaaatcattgatgcaataggcgctggggatttttcatctaaaatagttaatagtaatgaagctattattattgctactggtgctccaattcctgacggagctaatgctgttttaatgaaggaatatactacttctgatgaggatgatttaacaatttattctcaagtaactcctggtgaaaatataagtccaaaatctgaagatatcgaaaaaggtcaaaaagtattgtgtaaaaatacttttataagatatcaggaaatgggtttaatagcttctgcaggatatgatacagttaaagtatttaaaaaacctagggttaaaattattatcactggtaatgaattggtagaacctacaaaagaagagattgataaagctaaaattattaattcaaaccaattcactacaaaagcaatggttgaagattcaggtgctattgctgaaattactcatgctggagatacttttggcgaagtaagggaagctattttggaagcttctttggagtttgatgtaattataactactggtggaacagcaatcagtaaaggagatgttgttttagatgcattagctgacttaggggaaatattattccatggtgtagctgtaaggccgggtaaacctgtaggtgcgggtattgttaatggaaaaatgatatttacactttccggacaaccagtagcatccatgagtcaatttgatatggttgtgagaaaatacttatttgaaatgcagggcagaccttttgaattccatcttcaaaaaagagtatctgagctgaaagtaccttctcagcttggtagaacagattttatacgtgcagttgcagatgatgaatgtgcaaaacatgtcttgaataggggttcgggtattattaggtcaatggttgaggcgaatagctatatcataattgatgaaaatgatgaaggatatcaaaaggatgatatagttgatgtagttttctttgattcactgctttggtaa

SEQ ID NO: 8198 - DNA, 1131 bp, Methanobrevibacter gottschalkii
  source 1..1131: mol_type = genomic DNA
atgaatggtatttactattatttgatagcttttgttatcatctggatgttagtcacaatatttcatgataaattatcaaaccatgggtttgagttaaattttcctattataatgtggaagactcaaaaacttaagggattaatatccaaaatttctaatttttcaccaacattttggaaatggtatatgaatgttgggattgttgtagcatttggtgctatgattcttgttaccggatctataatctcgtccataccatctatttttgaaactccttctgtttcgattttaattcctggtgttgacattccaggttctcagatttatgttccatttatttatggtttgattggtctggcaactgttgttataattcatgaattttctcatggtatccagtctgtttgtgaaaaaatcccaatcaagtctatgggtttattgttgttttttattcttccaggggcatttgtcgaacctgatgaaaaaagtttaaaaaattctaaaaatgcctcaaaattaagaatatatgctgcaggctcagttgctaatattactttagcagtagttgctttgatgttaatatctttaatatcaattggtattccacattactttgcagaagatgggatttctatcgataggattgtttctgattctccttctgagggaatactaaaagagggtatgattttacaagctattgataatcataaaattaatgattctgaatcatatgtcaatattgttaaatcttttaaacccggggataatgtaacggttcaaacgaatcaaggcagttattctgtagtgttaagtaaaaatccaaataacgattctgttggattttttggaattcaagcagctaagcattatgtgttattaaatgatagtttaggaccgataccttggatattatttgagctatttgaattatttaattgggtgtttatcttaaatcttggaatcggattgtttaatctacttccacttaaaccattagatggcgggcatatgcttgaaacactcttgtcttataaatttaaagaacagttagtaaaaaaatttgtaaatgcattgtccggcgttatggcaataataattgtattcagtataattgctggttttttataa

SEQ ID NO: 8199 - DNA, 1227 bp, Methanobrevibacter gottschalkii
  source 1..1227: mol_type = genomic DNA
atgaaagctaatgctcaaaaaatagctgatggagtatactggattggtgtactcgactgggatttaagaacttaccatggttacacattagatggaaccacttataatgcatacatagtgtttggagaagacgaagtagcaattattgataatgcttaccctggaaaaactaaagaaatgatggcgcgtattgacgatgcttttgcacaagaaggaagagatgttaaagttgactacatcgtccagaaccatgttgaaaaagaccattctggagttttagtagatttacacaaaaaattcccagaagcacctatttactgtaccgaaattgcagttaaaggtcttttaaaacattaccctgcacttgaaggtgcagaattcgtcactgtaggaactggtgactccttagatgttggtggaagaactttagcattcttagatgcattcttactacattggccagacagtatgttcactttactcgctgatgaaactggaattttattccctaatgatgcatttggtcaacacttatgtttcacaaaaagattctctgacgaaattccagaaaatgtcttaatggatgcagcacaaaaattctacgcaaacttaattacaccgctttccaaattagtacttaaaaaattaaacgaagttgttgaattaggtttactcgattccattaaaatgattgcaccatctcatggccaaatttggactgacccgatgcaagtaatcggagcttaccagaattgggccactggtgtgtgtgaagataaaattactatcatttatgacactatgcactattcaacccaacaaatggctcatgaaattgctgaaggtgcaatatctgaaggttacgatgtagaaatattctacttacatgaagatgaaaggtctgaaatcgtgaaaagtattttaaccagtaaaggtgttgcaattggtgatcctacaattaacgatgcgccatatccaagtattggagacatcatgtactacttaaaaggacttttattcaacagaacaggtatagaaagaaaagctgttactttcggttcaatgggtggaaaaggaggatctcctgcaaaactcgctgaagaattaggtaactgcggatttgatgttgtagacagtcaagaaatttatttcgtgccaactgctgatgaagaaaatgcaagctttgatttaggtgtaaaattagccaaagcatgtaaagagttataa

SEQ ID NO: 8200 - DNA, 777 bp, Methanobrevibacter gottschalkii
  source 1..777: mol_type = genomic DNA
atgagcgaacaaaaaccaatacaaatattttctgattcaacagaattgcgtgttaatgtagtaaaaagtcccgtcaaactcacaattttagagatgctaagagatcgagatatggaatttgatgaaatagtgattaatactggcaaatcaaaatctacagtttcagtgcatttaaaaaacttaagagaaaatggaattatatcatataggatgcatcctattgacaatcgaaaaaaaatattttatttaaattctaaatatcttggttctgtaaacttttctgaaccaaaagaacttgaagaaacccagtctgattatttgataaggaatattgttgaaggtgatggacagttttcaacattattattccatactttaaaagcaatgcttattcaagaaggaattaatattgatcctattttaaaatcaactggcaatcaaattggcaaatctatcttttataaattgtataatgaagatctagatatctttatggataatttatctaaattttgggagaaaaaaggattaggtagattaacttttgaaataggtcagataattaaaattataatttatgattgttttgaatgtgaattacttccaaaaacaggaaaacctgcctgttttttagatacaggtatcatggaaggtttattcacagaattcttcaaactaccggtcagtgttatagaaacacaatgttatacaatgggtgatggaaagtgtgtctttgaagttgaacctcaaagcataaaacttactaatcatctttaa

SEQ ID NO: 8201 - DNA, 705 bp, Methanobrevibacter gottschalkii
  source 1..705: mol_type = genomic DNA
atggttaaaaaaggaaaattgattggaattggtgttggacctggagatactgaattattaacattgaaagctgcaaaagtattagaaaaagtcccagttattttttcaccaaaatctgcaaaagaaaaagaaagcattgcattatcaatcgtgaggcctattcttaaagaaagaaaagattataaaaaaataatgattgttgaacctatttttcctatgattgaagataaaaaagaacttgaaaaaatatgggatagtgcatctgaattagttgcacaatatcttaatacaggaagagatgttgcattcattacacttggagacacatcaatattcagtacttattcctatttgcaaaaaagattaatggatagatatgagatagaaactattcccgggattacatcatttactgcgtgtgccgctgctaaaaacgaagcattagtagaacaaaatgatattttaactattgttccaaaaattgacagcagaatagaaaatattttagaatatactgattccattgttcttatgaaagcttcaagaaactcaacaaaacttgaattaaaaataaaaaatgataaaagagaaaaagaaatttattccgtgcaaaactgtactcgtgaaaatgaaaaaataattgaaggattttctcacgaaaaaccttaccttacaacatcgatcataaagtttaaagatgattag

SEQ ID NO: 8202 - DNA, 1803 bp, Methanobrevibacter gottschalkii
  source 1..1803: mol_type = genomic DNA
atgttaaaaagtaattgtacttgtggaaaataccctaaaaaagaatctaaaggcccaacaaatttatttagttttactaaatcaaaatcaagaagttcatcaatattagatgatgagattcctgaggtatattatgttgatgaccacaaacaggatgaagggactgcagcatatttgaaagaattatatccaaatatagatgatgatataattgaaaattttccatttgatgaacctagaattggacaattggaaattattcaagatattaatgatgcgattaaaaagggttataaatacattatattggaagcaggaactggaactggtaaatctgcaatagctacaacattagctaaaatgtatgaatctgcttatattttgactatgactaaacaattgcagtcacaatattctgacgaattcgaatttccattggttaaaggtagaggtaattttgcttgtttgcatgataatttagaatctacttgtgatataggggcttgtaaaacatcacctacttcaagtaaatttttctgcccatatggtgttgctaaaaatccaactttagatgcagaattagcttttgaagattcatttgggggaaccgttttttaccaatcaagtgggcattgtcattactggaatcaaaaagccaatgcaattaattccccaatcacattaatgaattatgattatgctattgttgagcttaactatgttaaacactttgggactcgttctttacttattttagatgaagctcataatattgaaagtaaattaatgtctacaatggaagttacattgtataatagggttcttgaaaaagatattaacaaacaaatctctcctcaaactttaaaggatggtgaacttgaagattggataatggaaattgatgcaattagagaggcatatgaagatattgatttgaaagatgtgagtaaaaataaatctgaaaggattcgatcaactattggtagactaaaaactcttagaaataatcttgaaaaagagcctaaaaattgggttattgatactgacgagtctggtgtcacattcaaaccactaagagtccatcattatgctaaaaataatttattaaaatatggggatgtggttattttcatgagtgcaacaattctatctcataaaatgttttcaaaatggttgggattaaatcctaatgaagtttatcacattaaagtggatagtccttttactaaagaaaaaagaccaattgtccttaatttagctggaaaaatgtctgctaatagaattaaaaaaactgctccaaaaacaatccctattttgcaggaaattttaaagaaacatgaaggggataaaggtttaatccatactcatagttataaatgtcaacagtatattataaataatttatataactcaagattaatttcgcatacttcaaaaaatagagaacaaattttggatttctttgaaaaagatgaaaatcctttagttttagtttcaccatctatgagtgaaggggttgatttaccatatgataagtgtaggttccaagttatttataaaatgccgtttccttatctcggagataaacaagtcaatatgagaatgaaacgtgataaaaaatggtatgcttataaaacagtaatgactttaatgcaggcgtatggtcgtggtatgagggcggaagatgattcatgttatacttatattattgatagtgatattaacatgttatttaaaagtccaatgtatagatctttaatcccaaacttctttaaagaagctgttgtcagagttaaaaaatag

SEQ ID NO: 8203 - DNA, 963 bp, Methanobrevibacter gottschalkii
  source 1..963: mol_type = genomic DNA
atgaaagattctaaagaaaaagaacatagaatttctaatttaaaagacttaatcgacaatgtgaaagaagaagattccaatatcgattcacaagaagatagtgaattgataaactatttacacgaagatacagttgattttgatgaattagaaattaacgatgaatttatctatcatccagatgatgatgaagactatgtaataaatttagaagaatctccaattgatgaagaatttataattaacactcccaaagaagaagaattaaaaaacatgtccgatgatttagaagagccagaagacatcattagtgatgtgagtgaaaactttgatcaattttttaatgcaaaaattggtaaaacacctgttttagctattgttagctctgtattagggatcatatttatagcaatctcaataatcattttcgaatcccgtagtgatagagtaatagacaatgttgtatctggtgagactaactttatttctgtcatagttcttggattaggaatcttattattaatttacggaatatacaaagtatttaatattaaaagtcccctaaatggaataacagagagcattaattctattgatggaaaagaaaaagtaaaaactaatgcttctaaggaaaaagaaactgaaaagattatccctaaaagcaacatcccattggacaaagactcctataaaataggtgaattcgacattggagatataaaaaataaatttaaaaaatcaactacttctaaaaaaccaaaaccacgcccagaagatacaaacaatattcctcctgcaaaagaaaaagaggaaaataaaaaagaattaacaattgaaaaaattgaagatattgaatataaacaagcaaaacttgataatgaaactattgatgatatttttgctgaagtagaagatatcgatgaaataccaattatttctattgattctgaagaaaaagaataa

SEQ ID NO: 8204 - DNA, 312 bp, Methanobrevibacter gottschalkii
  source 1..312: mol_type = genomic DNA
atggaattttgtcctgaatgtggagcaatgatgtttccaaacaacaatgttttaaaatgcaatagctgtggttacattaaagaagactccgataataatgattataaagtttcaaagaaaattgaagctgaagaaactgttaaaatgttgggtgaagatgtagacgttggcccaagaacagaagaaacatgtcctgaatgtggacataatatagcaacctacaaattattacagactcgtagtgctgatgaagctcctactcgtatattcacatgcgtaaaatgtaaacatacttggagagcttacgactga

SEQ ID NO: 8205 - DNA, 423 bp, Methanobrevibacter gottschalkii
  source 1..423: mol_type = genomic DNA
atgaataaatacaaaaaaccatctgtaacaactgatatttttatttttgatgaagattttaattttattttaattaaaagaaaaaataatccttttaaaaattattgggcgttgcccggtggatttgttgattatggtgaaactgtagaatcggctgcaataagagaagctaaagaagagacaagtattgatgtagaacttaaagatttagttaatgtttactctaatccagatagagattcaagaggtcataccataagtattacatatactgcaaaaggagatttcaatgaaagaaaagccaatgatgatgcaatagatattggcatattttccgctgaaaaattagatgaaatcaatattgcttttgaccataataaaataataaaagactgcttaaatatagttaaaaatgaaaaataa

SEQ ID NO: 8206 - DNA, 282 bp, Methanobrevibacter gottschalkii
  source 1..282: mol_type = genomic DNA
atggaaaattttgaaattattgaagataaaacattagaattaacttttattgttaaggatgaaagtcatggagtttgtaatgcattaagacacattttaatgcaaaatcctgatgttgaatatgcagtttataatattgatcatccccttactggaaaaccagaaatgaccattaaaacaaaaagaggaaaaagaccaagaaacgcattacagaaagcagcagaacaactccaaaaagaaagtgatgaatttaaaaaacttattgacgaagctttagaataa

SEQ ID NO: 8207 - DNA, 570 bp, Methanobrevibacter gottschalkii
  source 1..570: mol_type = genomic DNA
atgaaaatagaagaagatgaaattgtaatgcctggggataaattaggaataatagaacaatatcttccaggagagggtacttatgatgatgacggagacattaaatcatcagtacttggaaatgttaaaattaatcaaaaaatgaaggtaatttctgttgtgtcagatgcgaaacctgctcttttaaaagttggagatataatttacggccaaataactgatattaaaccacaaagagctaatgttaacattgaatgtattaaagacaacgcaagaccattagcattaccctatatgggagctatacacatctcacaagcaaaaaaagattatttagagaaattatctgatgcttttagaataggagatattattcaagcaaaagttgttaaaattactggagataatgttgatttaggtagtacagatgatgattgtggtgtcctaaaagctatgtgtactcgttgtagagattacatgcatactacccaaaaagctgatgaacttcaatgtaatacttgtaatagaaaagaaaaacgtaaagtttctaaaaactacattaatgattaa

SEQ ID NO: 8208 - DNA, 1005 bp, Methanobrevibacter gottschalkii
  source 1..1005: mol_type = genomic DNA
atgtcaatgtataatctggatttagacaaagtaatccgtaaaataacttcaatggatgctcaaactgttggtcttcaatttcctgaaggtttgaaaatgcaagctataaaaatagctagacaaattgaagaagaaaccgatgcaacagttgttatttcaggtgatccctgttttggagcttgtgatgttagcgattataaaatgaaaggttcagttgatttaatcgttcattacggacacaccccccttcccttaaaatatgaagttccaacattgtttattgaagcatattccaatatagatattaaaaaagatcttgaaaagtcaatagaatatttaaaagattattacagaataggactcgtaacaacaacacaacatttacatcttttaaatgaaactaaagattacttagaagataatggaaaagaagttgttctaggttcttcaccatcgactagaaaaggtcaagttttaggatgcaacttttcatctataaaaaacttagatgctgaagtaatattattcataggaactggaaatttccatccattaggaatcaaattattttcaaacacccccgtaattgccctagacccatacaatagtgaaattagaagtatggatgaatttgcagacaggattttaagaataagatttgcaagaattacaaaagctcgtggtgctaaaaaatggggaattttagtatctacaaaagaaggtcaatacagaatgaccttagcaaaggaaattaaaaaaattctagaagattcaaaaatggaagcatatattattttagttgataatgtatcaccagatgttttacttccttacttggaattagatgcttttgttgttagtgcatgtcccagaatcgcaattgatgattcacaaatgtataaaaaaccattattaaccccacaagaattagaaatagtcctaaataagagaaaatgggaaaattaccaattagatgaaattttatttcatgaacattataaataa

SEQ ID NO: 8209 - DNA, 570 bp, Methanobrevibacter gottschalkii
  source 1..570: mol_type = genomic DNA
atgttagaagaagtaaaaaaatctttagaagcatctcctattgttaaaaaaggtgattataactactttgtaaatccaataagtgatggtgttccagcaatggatcctaaaatgcttagagaattatcattagcagtttataaacatgcagatttagatgttgataaaattgtagcagttgaagctatggggatacatttagccactgcattatcccttacaactgacatcccctttgttgtaatccgtaaaagacaatatggtcttgaaggagaaacagaagtttatcaaaaaacaggatatggttcatccaacctttatgtaaacgatttacatgaaggtgaaaaaatattactaattgatgatgtggtaagtactggaggaacattaatagctttattaaacactttaaaagatttaggattaaaaattaaatctactgttgcagtaatcgaaaaaggtgaaggcaaaaatatcgttaaaaaagaaactggtgttgatgtaatatctattattaaactagatgtcatcaacggaaaagtagttattgaaaaaacaattgaagattaa

SEQ ID NO: 8210 - DNA, 1344 bp, Methanobrevibacter gottschalkii
  source 1..1344: mol_type = genomic DNA
atgcttggaaatttaggagaaaatcttactaatacaatgaaaaaattagtaggaatgtctgttattgataaaaaaactattaaagaagttgttaaagatattcaacgagctttaattcaatctgatgttaatattaaattggttctggagttatcaaaaaaaattgaaagcaggtctcttgaagagaaaccaccaaaaggtattactccaagagagcatgttataacaattatttatgaagaaatggtaaatctgttaggtagtgaaactgttggtttagatattaatgaaagaccttacaaaattttattcttgggtcttcaaggtagtggtaaaacaactacaattggtaaattatgtaggtttttacagaaaaaaggtttcaatcctgcggttgtatgtacagatacatggagaccagctgcctatgtccaattaaaacaattaaccgaggaaatggatgttcctttatatggggatcctgagaataaggatgctcttgatttagctagaaaaggtttgcaggaatttaaaaataggaaagttattattttcgatactgccggcagacataaacaggaagaagatttgattgctgaaatggatgaattggatgatattattaatccaaatgaagctattcttgttattgatggaacaatcggccaacaagcaggtgaacaagcgaaagctttctcacaagctactgatattggatcaataattattacaaaattagatggttcagcaaagggtgggggcgcgatgtctgctgttgcagaaactggtgctccaattaaattcataggtactggtgagagaattgatgattttgaattatttgatcctgaaagatttatttcaagattacttggtatgggtgatataaaatctctcattgaaaaagctgaagagaatattgatgaggatattgcagaaaaaacaatgaccaatatgctcacgggtaaattcactttaatggatatgaaaaatcaatttgaaatgatgaataagatgggtcctatgcaacaagttttaaatatgattcctggcatgggaaataaaatttcaaaagaagcttctaaaatgactgaagataaaataggattatataaggttatgatgtcttccatgactgaagaagaaatgttaaatcctaaaataattaaacagtctcgtgttcaaagaattgctagaggatctggtgttgaagaaagtgaagtaaaagaacttttaaaatattataacaacactaaaaagacaatgaaaggaattggtaaacgtggcggtcgtttaggtggcggcgctatgaatcggatgatgggacaattcatgaatagataa

SEQ ID NO: 8211 - DNA, 1209 bp, Methanobrevibacter gottschalkii
  source 1..1209: mol_type = genomic DNA
atgtacgaattagcaaaacaaattttagaggaaaccggtggtagaatctgtaagaattgtctcggtcgcaaattatctaaaacaattgaaggaacaaacaatattgaaagagcagataaagtttgtgttgaattaaatatcagtttggatgatgtcgattgtgtaatatgtaataatatcttcgataaacttaatgacaagttatataaaaaaattaatgataaaattaatcagttaggtcttgaatttgatacatttttagtgggttcaaaagttcctaaggatgttcaagaacgtgacgattgtttatctgaaaaattcaatttaccagttgagacaatcaaaaaagaaattaatagattgattggtcttgaactttggaaaatctatgacaaagaagccgaatttgaaagtcaggatattgtatttaacattgatttaatagataatcctaaagttagaattcaaattaatcctttatatattgaaggaaaatacaataagttcaaaagaggaattccacaaactaaatggccatgtactaaatgtaaagggaaaggatgttgcgaatgtaacttcactggaaaacaataccctgaatcagttgaagaactaatttccgagcatatattaaaattaactaagggtaaggaagctaaattccatggtgcaggtcgtgaagacattgatgttttaatgttaggttcgggaagaccatttgtattggaaattaaagagccaaaaataagaaaacttaatttagcaaaagttgaagatgaaataaataaaattaacgaaggtaaaacttcatatcataatttacatttatgtaaaagaaatagaaaagcagaaattaaacaatcttctcctgatacttataaagtgtataatgcaattgttgagtgtgatgaaagattcgacgagtcaaaacttgaggaattattaaaactagatgaaattcatcagcaaactccattaagagtattaaggaggcgtgctgataaagttcgtattaaacatgttaaagagttatcttatgaaataattgatgataaacattttagtatgcgtattaaaacagaaggtggattgtatattaaagaattaatctctggggatgggggaagaagtcatcctaatgtgagtgagattttaggtattaaagcaatttgtgaacaattggatgtaatagaagtgagtgagaagtag

SEQ ID NO: 8212 - DNA, 468 bp, Methanobrevibacter gottschalkii
  source 1..468: mol_type = genomic DNA
atggcagaggaatttacacatttaacagaaacaggagtgcatatggttgaagttggtggaaaaccagatcaaaaaagaagggctattgcaagtggaagtatatttctagataaaaatactattaacttaattcaaaatgatgaaattaaaaagggtaatgttttaacaaccgctcagattgcaggaattcaggctgttaaaaacacatcttctataattccactttgtcatccattggcattaactggtattgaactggattttgatgttaaaaaagatgaaataatagctacttgtgctgttaatacattaggtaaaaccggtgttgaaatggaggctattactggtgtaagtgtagctttacttactgtatgggacatggttaaagctgttgaaaaagatgaaaatggacaataccctgatactagaattagtgacattaatgtaattaagaaagaaaaaatctaa

SEQ ID NO: 8213 - DNA, 162 bp, Methanobrevibacter gottschalkii
  source 1..162: mol_type = genomic DNA
atggcgaaaaaagataataaaatttctatgcctcaaacaggtgcaggtttagtaagatattttgatgaagaaagtcttggaccaaaactttctcctgagcatataatagttgctactgttattgtagcgatattatgtttcgtattaagatactcagcttaa

SEQ ID NO: 8214 - DNA, 825 bp, Methanobrevibacter gottschalkii
  source 1..825: mol_type = genomic DNA
atgttaactaaaagaattattccttgtttggattgtgatttacaagtgcctgaaggtagagttgtaaaaggcgtagaatttaaagaaattaaatatgctggaaatccagtagatcttgcaactaaatattatgaagaaggtgcagatgaaattgttgttttagatatcactgcttcacatgaaagacgggctactatggcagatgttattgacatgttaacagaaaatgtattcatgccaatctgtgtaggtggggggataagaaaagttgaagattatattaaaatgcttagagcaggtgctgataaatgttctacaaatacagctgcaattaaaaatccggaattgttaactgaagcttcaaaagttgtaggatcacaagcagttgttattggaattgatgcaaaaagaagatatatctcaaatccagatgacgcaccggataaagtcgttgttgaaactgataaaggcttctgctggtttgattcaagtatttatggcggacgggaatttacaggaatcgatgccattcaatgggctcaaaaatgccaggacttgggtgccggtgaaatccttttaacaagtatggatggtgatgggactcaaaacggatatgatattgagttgaacaaagctattaatgatgcagttgatattccagtcattgctagtggtggtgttggtaaaccaaaagatattttggatgtatttaagaaaactgatgttagtgcagctcttgcagcaagtatatttcattttaaccagtattctattggtgatgtaaaaaagtacttaaaagataataatgtggctgttcgtttatga

SEQ ID NO: 8215 - DNA, 915 bp, Methanobrevibacter gottschalkii
  source 1..915: mol_type = genomic DNA
atgataattgaatctccaattgatttggaattaacacaaatttcaggtcaaacttcacaacctccttggacgaaagttgataattcatatagggaagtcgtattagttaataataatccggttatttttgatgttgaacaatctggagaattctttaattttaattatattggaaatatatctaaaaaagaagccgtatcttctctaaaatatatttttgatttggaatttgatttaaataaattttataaatatttgaatggtcatgcagaactggctgaaatgtctaagttttgccatggtttaagactatttttagcaccaaatccatttgaatgtattatttcatcaatttgttctgcaaataattcaattaaaagatggacaaaatcaatttctgatattaaagagaaatggggaatcaatcataatggttttcacacttttccagaaatctctacttttcaagagatatttttagatgctgaagaagaattggatttaactgatgcaggtgatatttccaattgcaaaaacaatttaaaatcttgtggtgtgggatatagggcttcctacatgagaaaagcatctgaacttttttcattggaaatggacatttcagaaatttcaaaaatgaattatgatgaggcttttgagacaatactgcaagttccaggtgtaggtccgaaagttgctgattgcattttactttatggatttaattttagagaagcatttccatctgatatatggataaaacgcattgtatcttacttatactttgatggtaaagatatttcggttcctaaggtaagggaatttggaatggatgaatttggagataatgcaggttatgttcagttatatatgtttcattatgctagaaaatctggtttaatggctaagttaaaataa

SEQ ID NO: 8216 - DNA, 351 bp, Methanobrevibacter gottschalkii
  source 1..351: mol_type = genomic DNA
atgaaaatcagatatgctacaatgattgttaatgatatggaggaaagtgttaaattttatactgaaactctagattttactgttgatgaagtctttgatgttccggaaggcaaaatcactcttttagatggggagggttttgcaggaattgaactaattgaaagttcaaattttggcagtggcctatattccattggaatggatgttgaagatatccataaagaaattgaaaatttagaagcaaaaggggctaatattgccatgaaacccataaaaatacaggtcggttatatggcaaaagtaatagatccaaatggtattaatattgttttagttcaacataatagataa

SEQ ID NO: 8217 - DNA, 1377 bp, Methanobrevibacter gottschalkii
  source 1..1377: mol_type = genomic DNA
atgaaacttgaaaaaatcgttttaattgtagcaacattgacatcctttttcacagtatttttatcatctgctgtgatggtggcagttccaactttagcttctgaatttggaatgagcaatattatccaaaattgggtcaccatgctatttttcttagcagtagctatttttacaattccatctgggcaattatctggaaaattcggtcttaaaaaatcaatgatatttggctcatcagtttatattctaagctctattgcagctattttttcaataaactcagaaatttttttaatctgtcgattagttcaaggtattggtgtttcatttttaaatgtcgcttcaatggcaatggtcgtatcagcattctctccacaagaacgtggtaaagcaattggaattaacgtaactggagtttatcttgcaacatcaacatctccagtaattgggggatttttaaactttcattttggatggagatctatatttttaacatcagtgccatttttaatcttgattttagttttattaataactgaaattaaggaagaatgggttactatgggggatgttccgattgattggaaaggttctattgtatactcattaggcatattgttatttatttatggattcacacgtcttgatgaaagtactggcattattttgactgttataggtttaattgtattgggagtatttgtagctcttgaacttagagaaaaatatccagtattcgatgttaaattctttaaaaatcctaaattttcatctgcgaactttgcagctctaacagcgtatctcgctacatttgctgttacaactattgtaaattatcatttgcaatatattagaggttatgattctcaaatggcaggtataatcttgttagttgcacctttaattcaagtaattatggctccaatttcaggaagattgtcggataagattaatccacaaaaattagcggctattggaatgttttttggagcaatttcacttgcaatgctttcaatgcttaatgtttcaacaccattatggtttttaattattgcgatggtatctcatggtttgggttttggaatattttcatctccaaatacaaatgcaattatggggtcagttccacaaaaagatactcctgtggcttctgcatcagttgcaacaatgcgtgttattggtcaaacaatgagtatgggtatgttaacattagtatttgcatttgtgatgggtaatgtaccaatgattgagaaatattttcctcttttaattactagttctcaaattacttgcttaatttgtatggtgttatgcgcagcatctgtttttgcttcacttgtaggaattaaatctaaggaaatgttggaatttaattaa

SEQ ID NO: 8218 - DNA, 432 bp, Methanobrevibacter gottschalkii
  source 1..432: mol_type = genomic DNA
atgaaagtcgcaactattgaaaccgataaagggaatattgaacttgaattattcccaaatgaagcacctggaactgtagcaaactttgaaaaattaatcaaagaaggattctatgatggattaacattccacagagtaattcctaattttgtaattcaaggtggttgtcctaaaggaaacggtactggtggaccaggttacactatcaaatgtgaaactgaaggaaacccgcacagacatggaactggtgcattatcaatggcacatgctggaaaagatactggtggaagccagttctttattacacacagtccgcaaccacacttagatggagtacacactgtatttggtcaagttatcaaaggtcaagatgttgttaatgctattcgccaaggcgacaaaatgaacaaattgacagtggaagaaagatag

SEQ ID NO: 8219 - DNA, 1161 bp, Methanobrevibacter gottschalkii
  source 1..1161: mol_type = genomic DNA
atgaatactcaagaattaataaaaatagaagatgattatttcataaacactttcactagacaaccagttgtacttgatcatggtgaaggtgtaagagttactgatattgatggaaatgaatatttggatatgtttgcaggtattgctgtaaattctttgggtcataataaccctaaacttgtaaaagccatacaggatcaagctgcaaaactcattcacatttcaagtatttattataatgaacctgcattaatctatgctaaaagattaattgatttaactagctttgatagaattttttatgcaaacagcggtgctgaagcaaatgagggagctattaaactagctgtaaaatacaccggcaagagtgaaatcatctcaactgttgattcttttcacggaagaacaataatgactcttgcagctactggtcatgaagaataccatgaaccatttaaatcaataatgccgcaaggatttatcaatgttccatataacgaccttgaagctattaaaaatgcaattactgaaaatactgcagctatcattgtcgaacctattcagggtgaaggcggggtacatgttcctgatgttgaatatttaaaaggaattgaagcaatctgtagagaaaaaggcattgtatttattgtggatgaagtacaaacaggattcggaagatgtggaacattatttgcacacgaattatttgatgtcaaaccagatataatgactatggctaagggaataggtggaggagttccaatgggtggaattttagcaaccgagaaaatagctagtgcattcgtacctggagatcatggaacaacattcggcggtgggccacttgtatgtgctgcagctaatgctattttagatgaatttgcagataaaaatattttggataatgttaatgaagttggcggatatttcatttctgaattaaagaaattagataaagatattattgccgatgttcgcggtaaaggtttaatgatcgggcttgaattaaccaaacctggtgctgaatatgttgataaactaagaaaagcaggtttcttaataaactgtactgcaggcaatgttttaagatttgtcccacctttaataattactaaaactgacatcgacgagtttgtagaagctttagatgaaattttatag

SEQ ID NO: 8220 - DNA, 1284 bp, Methanobrevibacter gottschalkii
  source 1..1284: mol_type = genomic DNA
atggatttaaatattaaagtaaacgataaaaaccaccttgatattggtggagcagatgcaattgatattgcagaagaatttggaactccaacctatgtgattgatgagaataggataagagataattacaatagattttattcagctttctcaaaatattatcctgattttaaagtattttacgcatgtaaagctaatactaaccttgcagtaatgaaaattttagaaagtgaaggttgttgtattgatgcggtttcccctggagaagttcatatatcaaaaatgcttggattttcaggagatagaatattattcactggtaacaatattactaatgatgaattaaaatatgttcatgatgaaggtgcagttttaaatatagactcagtatcagcacttaacagattatctaaaatgattgaccctgaaggtgtaaaaatttcctttagagtaaatccaatggtaggtgcaggacatcatgatcattgtattacaggagggataatgagtaaatttggtattatggaatccgaagctgttgaagtttataaaaaagcagaaaaattaggattcaatccagttggtatgcactctcacattggttcaggtatattggatccggaaccatttaaattagctattgaatcaactatggatattgcaggtaaagttcaccaagatgctggaattgactttgaatttgttgactttggtgggggagtgggtattccttacactcctgaagaaaatgttgtagatttagacaaatttgcagaagttaatgtcggattatttaaagaaaaattagaacaatatggcatgggtaatcctacaatgtatcttgaacctggaagattcttggttggagatgcatgtgtgcttttagtaactgttaacagtctaaaacaaagttacaggaaatttattggtgtagatgcaggttttcatactctcttaagaccggcgatgtatgattcataccatcatattgttgatgcaagcagaatgaatgcagaaaatactcaaactgttgatattgcaggaaatgtatgtgaatctggagacttatttgcacgtgacagactaatgcctgatgtggaagagggtgatgtattaggtatattaaatgcaggtgcatatggatttacaatgtcttcaaactataattcaagacctcttgcttcagaaatattggtaactgatggtgaatgctcagttgtacgtgaaagagaaacttttgaagatttatatgcaaaacaaagtattcctccacatttgaaataa

SEQ ID NO: 8221 - DNA, 861 bp, Methanobrevibacter gottschalkii
  source 1..861: mol_type = genomic DNA
atggtagatttaaaaggattaaaattttcaaaaatgcatggaataggtaatgattttccaattattgatgaaacaaaaggaaaagtcatttctgaagaagacaaacctgaagcatgcagaattttatgccacagaaacttcggagtaggtggggatggtgttttattcgtagaaccatctgatgttgcggatattgggtacagaatgttcaatcctgatggaagtgaggctgaaatgtgtggaaatggcataagatgctttggagattttgtatacagaaaaggtattttaaaaaaagagaagatgactgttgagacaagggcaggaatcaaaactattgaaattactttagaagatgatgaaccggtattatttaaagtagatatgggattatcaacattcaaaactcctgaaatcccaatgatttctgaaatggatgaatttttggattgtgagttggaagttttagatactacttttaatttaactgctgttagtgttggaaatcctcatgcaatcatctttgttgatgatttagatgaaatcgacattgacaaatacggtccagctattgaagcacatgaagtattccctgaaaagatcaatgtacattttgttgaagtaatttctaaaaatgaaggtaaaatgagaacatgggagcgtggtgctggtgtaacacttgcatgtggtaccggtgcaacttctacagctatttctggttacaaactaggtttatttgatagtaatatcttacttcacttacctggcggtgacttgaaattcaatgtatatgaaaaagatgatgctcttggcgcattcatgaaaggtccagcagagcttgtttatgatggggaattctaa

SEQ ID NO: 8222 - DNA, 585 bp, Methanobrevibacter gottschalkii
  source 1..585: mol_type = genomic DNA
atgcctgattttaaaattaatattgatgataatgtttatattcccgctgaagacagctatttacttgctgataacttacagattaaaaaaggacaaagtgtgctggaaattggaactggatcgggtattgttgcaatgtatgcttcaagacttacagacaatattactgtaacagacattaattttgatgcatgtgaacttgcatgcaaaaattttgaagcaaataacattgaaaatattgaaatattatttggaaatttgtttgaccccgtgcagaatagaaagtttgatgtaattttattcaatactccatatctgcctactgaaaaaggggaggttttagatgacacaataaattatgcttttgacggtggattagatggtagaaaagttattgatgcctttttaaatgaagtgggaaatcacttaaatgatggcggaatagtgcagatgatacagtcttcactatcagataatgaagaaacactgaaaaaactcgataaattaggttttatttcagaaattgcaaaaaaagagcacttttttttcgaagatataacattgattaatgcgtataaaatttaa

SEQ ID NO: 8223 - DNA, 873 bp, Methanobrevibacter gottschalkii
  source 1..873: mol_type = genomic DNA
ttgaatagtgaaaattccatatccctttctaagacaactaaaagcatcttaaatcaaaatgggataaagttaaataagaatcttggtcaaaattatctaattgataaaaataaaagagatcaaatcattaactttggaaacatcaatgaaaatgatgtaatcttagaaattgggactggaattggaacattaacaattgaacttgccaaaaaagctaaaaaagtaatagctattgaacaagataaaaatatatgtgacatattagccaaaagacttaaagaagaaaaaatagataatgtagaattactcaatgaagatgctttaaatattgaatttccaaaattcaataaaatcatctccaatctaccttatcaaatctcatcacctattacttttaaatttttagaatatgattttgatttagctattttaatgtatcaaaaagagtttgctgatcgtatgaatggggaagttggaactaaaaattattctagactttcagctatgctacatttcaaatgtgatgtgaaaaaattaacagatgtgagttctgaaagttttattccaaaaccaaaaattgattcaacagttgtaaaattaacaccaaaaaagaataaaatttcacttgaagattttaaaatttattccaaatttacaaaagcattatttcagcatagaaacaaaaaaattagaaatgcattgattgattctagacacataataactaatcttgataaaaaagaaatgaaaaaatgtatgaatgaaattgaagatgaaaaactaaataattatctcaaaaaaagagttgttgtagtaacacctgaagaaatactatttttatctaaagatttaaattcaattttaaacggatag

SEQ ID NO: 8224 - DNA, 633 bp, Methanobrevibacter gottschalkii
  source 1..633: mol_type = genomic DNA
atggttgataataaaaaaagaaatggaaaaaaaccaactgtaaaaaaagaacaatatgctgttgttcttgattatttaagcagaggctatgttaagtcagatatgtctaaatttggcggaaaacctattgctcaagctattggtacagaacaattcactttacttgaattagctcctaaaaatggtgttgatttagaaataggagacacagtatttataggacaaggaaaaaaagataaaatatatagagtacttggaagattaaactttgaaagattaactgcaacaagtagaattgaattagattacacaatcagagacattgttgaatcaaacgaagaaaaatatgttaactttttcaatacaactggagccgttagtacaaggctccatacacttgagttaattccaggaatcggtaaaaaatatatgtgggacattattaatgccagagaagaaaaaccatttgaaagtttcaaagatataaccgaaagactcccaacattaaccgaccctgcaggaatgatagtaaacagagttaaacaagaattggatagaaatgcaattaaaagaggcaaaagtaaatattacatatttacacaggttccaaaaaaacctagaaatccaagataa

SEQ ID NO: 8225 - DNA, 354 bp, Methanobrevibacter gottschalkii
  source 1..354: mol_type = genomic DNA
atgatttctatgattggaaaagaaattattgaaagtgaaccaatatcaagtgcagaagtaaaaaaagttcttgaagatttttcagaagacaatgaattaaactacgaacagaatattactttaaatcatcttgcaagatttaaaagatattctgttgaagattcagaagaaattattgaaaaactccaagaagaatttggcctaagagataaagttgctgtacgtatcgtagatttagttccaaaagatttagcagatttaagattaatcttcgctaaagaagctataaaaattgaaaaacccgatatggaaaagatacttgaactcttagaacaatacaatattgaagaatag

SEQ ID NO: 8226 - DNA, 291 bp, Methanobrevibacter gottschalkii
  source 1..291: mol_type = genomic DNA
atgcaaagatcaagaggattaaaaagtagatcaagaaaaaaaatgacaaaaacccaaagaccaggtagaaccaatcctattactaacagaatgcaaaggtttgaagatggagatttagttcatattactatcaacccaagtattcaaaaaggacaaccggctcctagattccatggtaaaactggaaaggttactggtcaaaaaggtaaagcatatattgtatccttaaaagaaggaaacaaagcaaaagaattaattgtaagaccagaccatttaaaattacaaaaatga

SEQ ID NO: 8227 - DNA, 2319 bp, Methanobrevibacter gottschalkii
  source 1..2319: mol_type = genomic DNA
atggaaagaacttcagaattaggaaaaaatttacatgaatctacaaaaattaatgtagaaaaaaataacgggattaaagaaaggttcagctatgaaaagttattgaaatcattagtaatggttgaaactccattttttgaatccgacaaaattgtagcaacagtagtatcacaattatacgacggaatcaaaactaaagaaatcaaaaaaatagtgcatgaatgtttagaagacattgattctgaaattgcaaacaaatatttagcaagtaccagattaaaagtacgtacttctagagatactattgaagcatttgacttatcaaaaattgcaaacactttaattgaagaaactggagcaagccaagaaactgcattcgaaattgcaactgaaacttggaaagaactgaaaaaattaaatgtagaatacttaactgctccaatgatcagagaaattgttaacactaaattagtagaatatggattagaagatttaagaagtcgttacactcgtttaggtattcctgtatacaacattacaaatttaattgaaaacggtaacagggataacgcaaacatgattcacaatcctgaaagtatccacaaacatgttgcagatgaagcattaaaacaatatgcacttttaaaaatgctccctgcacatttagcagatgcacacatgtctggcgatattcacattcatgatttagaattctttgcaggcagacctttaaactgtatgcaacacgacattagaactttcatcaaatacggacttaaagtagacggtactggtgaccacacttccattgcaggagcaccaaaccacatggaaactttaatgaaccacactggcgaaatcatgcttgcagcacaacaaaatatgtccggaggacaaggaatgtcactttggaacgtatttgtagcaccatttgcaagaggaagaacctacgaagaaatcaaacaatcagtacaaatgcttgtttacaacttaaacatggcatatgcagcaagaggatcacaagttccattcacaagtatggcattagaatttggtgttccggacttcttaaaagaagaaactgcatacggaccaaaaggacaagtagttggaacctatgctgacttcgaagaagaaaccagattaattcaaagagcattcactgaaacattattagaaggagataacgaaggaaaacctcatttattccctaacacaatttacaccctccgtaaagaaacaatgactagtgaatacgaagaggatattagattagttcatgaattatctgcaaaatatggttcttcctactttgtaaatatgttccctaaatacagaggaaacatggcaaactacatgggatgtagaacttgtttacaagatacttggactggtgactgggatcaagactgtttaagaactggtaaccttgcatatgttactttaaacttaccaagaataggataccaatctaaagatgaaagtcaagtattcgaatatttagatgaatacatggatcttgcggttgaaactttaatgcttagaagagaacaaggattaaaatgtttaaatgatttccatatcttacccttcttaaaacaacaagtagctgaagattcatactacagaatccaaaattcaactttatcatttggtttcgttggacttaacgaaatgttatcatcattatttggtgcaggtattgaaaatgctgatgcaaacaaatttggagtaaaatgcattgaatatattaatgatagagctaatcaattaaaagatgaaactggactcagatggtctgttattcaaactcctgctgaatctactgcttacagattcgcaactcttgataaaaaacaatatggagatcaagctatcgttcaaggtgaaggaaatgcaaactactacactaactcttcccatgtaccggtagacacaggactttcacttatcgaaaaaatcaaaattgaagaacaatatcacagtataacacctggcggacatatcttccatgcattcatgggtgaatcatactctgatcctgattctttaatgagtttaactaataaaattgctaaaaaatccgatataggattctgggcttacagctcagcattaagtttctgtcttaaatgtaaaactttaatgaaaggattaaacaatgtttgtcctacctgcggtgaaaaagaagatgtagaatggtatgatagaattacaggatacgtacaacaagttggacgtgcaaaatctgcatctggcggatggaacccaggtaaacgtcaagaattaattgacagaagaagatttgaagataactaa

SEQ ID NO: 8228 - DNA, 3297 bp, Methanobrevibacter gottschalkii
  source 1..3297: mol_type = genomic DNA
atggattattttgatagattagaagctgatacccatcacctatacgacatagctaataaagccaggtctagagggttagatgttgaaatagaaacagaagtaccccttgcaaaggatttagctgaaagagtggaagggcttgttggtcctgaaggcgtggctaaaagaattaaaatattagaacaaaacattacaagagaggaagtcgcttttgaaattgcggctgaaattgcttcaggcaaatttgagcttacaggtgagaaagctaactgggatacagaacaaagatgtgaccaaggtcttaggactgcacttgctattcttacagaaggagtggtggcagcaccacttgaaggaatttcagatgtcaaaattaaagataactttgatggaacaaaatatataggagtatattttgcaggaccaatcagaagtgcaggaggaacagcagcagcactagcagtacttttaggggataaaattagacaagctattggcattgatgcattcaaaccaatcgatgatgaaatcgaaagatatgtagaagaagttgaattatacgaatcagaagttacaaatttacaatactcaccaacaccagaagaagtgagatttgcagcaaaccatattcctgtagaagtttcaggagaacagactgacaaagtagaagtatctcatcgtgatttagaacgtgttgaaaccaataatattcgtggcggagctcttcttgcaatggttgaaggagttatccaaaaatctaaaaagattaaaaaaatctcaaataaattaggtctagattggaattggcttgaagaatactcaaaacctaaaaaagacgattcaaaagaggattcaggagacagtgaaattgttagtgaacctaaatatattcaagatatcattggtggaagaccagttcttggatacccctctgagaaaggtgcatttagattaagatatggacgatctagaaatactggtcttgcaactatgggtgttcacccagcaacaatggccttgcttgattttttagcagttggaacacaacttaaaattgagtatcccggaaaaggtaactgtgtggttcccgtggattcaattgaaggacctacagttaaacttaaaaatggtgatgtattaattcttgattctgtaaaaaaagcaagggaagttaaaaaagatgttgttgaaatattattccttggtgatatgcttgttgcatttggagaattcttaagaaacaaccaaacattatatccctccggatggtgtgaagaatggtggattcaattattgatgagaagtgataagtttgatgcagaaaatactgatttagacttgtataagcttgaatatgaatatttatcagctactgaagcatttaatttatctaaggagtataacattcctctccatcctaaatatacatactgttacaatgatgtgacaattgaagatttaaattcattaattgatttgattgaaaatggaaaatcaacatttaataaggatgaaggaatgaaactcgatttatcatatcaaaaaagaattcttgaaatcataggtgtcccccacattgtacgcaatgataaaattatcattgataaagaccattcttattcacttttagaaacattgcccaaaaaactaccagaaaatgaaacaactatagaagcagtaaacgaaatttcacctattgaaataaaaaataaagctccagcatacattggtacccgtgtaggtaggcctgaaaaatcaaaagaaagattaatgaaacccgcccctcatggattaataccaataggaaataatggtggttctagaagacttgtggcaacagctgctaaaaaaggaagtgtgaaagtagatatttctagaagaaaatgtacaaacccagaatgtggaataagttcatttggatcactttgccctaaatgtggcagcccaactgaagtaggaaaaccgtctcaaaaaactattccccttgcaactatgcttaaaaaagcatcagataatgttaaagtaagacgtgttgatgaagttaaaggagtagttggtatgatttctgaatccaaattaccagaacctatcgaaaaaggaatacttagggcaaaacatgaagtattcacttttaaagatggaactattagacacgattcaactgacttgccacttactcattttatcccaaaggaaattggagttacagttgaaaaactacttaaaatgggttatgaaaaagattgttacggaaatccaattgaaaatgaaaatcagatcattgaacttaaagttcaagacatcgtcatttcagacaattgtggcgagtatttacttcgtactgcccaatacattgatgacgaacttgaaagatattacgatatggatccattctataatgttaaagagaaaagtgatttaattgggcatttagtcgcaggacttgctccgcatacatctgcaggagtacttggaagaattgtaggatttacaaaagcattagcttgttatgctcacccttacttccattcagcaaaacgtaggaactgtgacagtgacgaagatgcagtaatgttattattggatgcattaattaacttttcaaaatcatatctgccgaatacccggggaggaagtatggatgctcctttagttttatcttcaagaattgatcctgaagagatagatgatgaatctcacaacttagacatctttgaaagattcccggtggaattttatgaagaaacttatactcctcataagcctgcagaggttttaaaatacattgataatgtagaaatgcatttaggaactccacaacaatatgaaggattaatgttttcccatcatacctcaagcatacatgccggacctactgtctgcctctataaaagattaccttcaatgagagaaaaagttgaagctcaaattgcacttgctgaaactattagagcagtagaccaaagaggtgttgtggaaaaagttttatcatcacatttcttacctgatataatgggtaactcaagagcattctccaaacaaaaagtaagatgccctaaatgcggcgctaaatatagaaggatgccacttactggaaaatgtaagtgtggaggtaatttaattctatcagtttcaaaaggatcagttactaaatatcttgagatatcacaagagcttgttaacagatatcctgtttcacattacttgaaacagcgtcttgaaatccaagaatttggtattaactcattgtttgaaagtgataaatcaaaacagagttctttagatatctttttctaa

SEQ ID NO: 8229 - DNA, 954 bp, Methanobrevibacter gottschalkii
  source 1..954: mol_type = genomic DNA
atgtcaaatgataaaccgattaatgctatgtatggtagcaaaatgaaattagatttagataaactcaaaaataatcgcaaaaaagatgacgaaggaaaagttattgaaacaaaacatatcttggaaggttctgaagaaccagttgttgaagatgctcctgaagaggtagttgaagagactgtcaaaaaggaggctatggaagaagcagttaaagaaaaaccttccaaaaatgttgattccagtgttgtagatagtttaaaagttaaattaggcgaaagagaaaaaaaattatctaatcaatctagtgaacttaattatttaactaataaattaattcccaaacttaaaaaggaaaatgctaatctaaaaagtcttaaaatagaattaaccgatgcacttgaaaaatctactagaaaatactttgatcagttagatattaatgcagatttgagtaataaaattggaaaaattggtgctgaaggtgctgttaataaagtaagggcagataaatttgaagctgaaattaattctgttaaagaagaattgcaggataaaataaaccaatataaagaaaaacttgattcagttaatattgatgggttgaaaaaagaaaacaatgaattgtcatgcgaattaagggatataaaaactgaattggataagactaaaaaagaaaacatgaaactttctgaagaagttaaatcattaagggacgagataatcgaaattggtaactacaaacaagaagttgacaaccaaaataagaaagaaatagaagaatataaagaagaaatttcatcaatttccactaaactcagacttaaggaaagtagctatgataaattgttcaatgaatctagtaaaactatctcaaatttaagaaaacaagttgcgaaacttgaagaagacttggaaaaagaatcaaacaggggattatttaatagattcaaatag

SEQ ID NO: 8230 - DNA, 492 bp, Methanobrevibacter gottschalkii
  source 1..492: mol_type = genomic DNA
atgacaaacgataattattttatggatgaagctattgttgaagctcaaatatctttaaatgaaggaggacttccaattggagcagtccttgtaaaagataatgagataatatccagaggccataataggttaattcaaaataattctgtagttttacatgcagaaatggatgtgcttgaaaaagctggtcgtttaaactatgaggattatattaaatgcactctttatacaacattatcaccatgcccaatgtgttctggagctttaatattatataatataccaagagttgtcattggagaaaatactactcttatgggtgctgagaatttacttgaatctaatgatgttgaggttgttatattaaataatttagaatgtagggagttatttttgaaattcgtcaaagataatcctggagtatgggaaaaagaacttaaaaaagttggaaataatactacggtgaaatatggagattattgtaacaaatga

SEQ ID NO: 8231 - DNA, 378 bp, Methanobrevibacter gottschalkii
  source 1..378: mol_type = genomic DNA
atggagattattgtaacaaatgaaatggatgaaagatttattgaaatatgtaactcttttgagtgcttttcagacgaacctcaggtagttttacttttaaataatttcggtaaaattgttggttgtgcgagttttaaagtttatgatgcagattctgcggagattactacattatttttaaattcacatgataattgtgaaaagatagcttataaattaattagacagctcgaaaaaatagcaatcgattatgaatttaaaagtatagttgttaattttgatagttatgaagatattcttattgaaatctttgaaaaattagattataaattcattgatgaacttttaatgaaaaaagaatttaaaagtttaatttaa

SEQ ID NO: 8232 - DNA, 1584 bp, Methanobrevibacter gottschalkii
  source 1..1584: mol_type = genomic DNA
atgacacattggattgaaaatgtagctaaagaattagcagaaagagatgtagaagaacatgttattgcaagtggaacctctatttcaggctcaatacacattggaaactcttgtgatatatttattgctaatgcaattggaaagaaattaaggaaacttggaaaaaaagcaaaaacaatttggattgcagatgaccatgacccattaagaaaagttccattccctcttccccaagactatgataaatacttaggtatgccatactcagttattccatgccctgatggttgctgcgctaactttgtggaacattttgaaaaaccattactttcagtaatggacgattatggaattgaaatggagaccaaatctggttttgaaatgtataaaaatggagtttacaacgattacattagaacttctcttgaacatactgatgaaatcaaagaaatcttcaacgaatacagaagagaacctttagcagatgattggttaccatacaacccaatttgtgatgaatgtggacgtgtgaatacaacttatgcttatgactttgatggtgacattataaaatatagatgtgaatgtggccatgaaggtgagatggatattaaatcaggtaacggtaaacttacttggagagtagaatgggctgcaagatggaaaatctttaaaacaacatgtgagccgtttggaaaagaccatgctgctagtggcggatcctacgatgtgagtagcataatttcagaaaagatttttgattaccctgcaccttatccggtaccatacgaatggattacactcgatggtgaagcaatgagtaaatctcatggagtattctttgctcctgaagaatggttaaaaattggacctgcagaaagtcttaactattacttatttagatccaaaccaatgaaatcaaaggatttctcaccaaaaatgccttttttagactttatcgaccaatttgatactgttgaaaaagtattctatgatgaagaggaagcaccatctgaaaaagaaggtaaaaaattcaaagaaatatatgaaattgtacaaatcaacgaaggtagtcctttaccattcagaccatctttcagattcttagttaatgcatatcaaattgctggaaatgacttagaaaaaatttatggaattttaaaaagaaactcacaattatccaaaagttttaaagacaaagaatttggtgatttgactgaagcagaattagctcaatatcgtgaaagagttgataatgtaatctactggttagatacttatgcacctaaatttgtaaaattccaagtgcaagagaaaaacattccaaaattgccattaactgatgaacaaactaaatttttaactgatttagctgatttaatggaaaacaatgaatttgcagaagcaactcaattgcatgatgcaatgtatgaaatcttagaatctcaagaattaaaaccacaaaaaggattccaagctatttacaaaatgattcttggtcaaaaacaaggtccaagagcagcttcattcctattgagtttagataaagattttgttgtaaaaagattaagacaagaagcttaa

SEQ ID NO: 8233 - DNA, 1338 bp, Methanobrevibacter gottschalkii
  source 1..1338: mol_type = genomic DNA
ttgactgttttaaaacttattggactatggtgtgataaaatgactcaaattagtgatgcaagaaaaggaattttaaccgaagaaatgaaacatgttgcaaaaattgaaaatgtttcagaagattttattttaaaatcagtagctgaaggtacaattgtaataccaggaaatgtaaacagagatgttgaagctgcaggtattggtgcaggccttagaactaaagtaaatgcaacagttggaacttcaactgatattgttaactttgatgaagaagtacaaaaagcaaaaatcgcaattgaccatggtgcagactgtttaatggaattaagtattggtggagacttagatgaaatcagaagaagggttctcgatatgtcaccgttaccagtaggttccgtaccagtttaccaagcatccattgaaagtattagagaacatggttcagtagttgacatgactgaagatgacctgttcaatgctattgaaaaacaagctaaagacggtattgacttcatggcaatccacagtagcattaatattgaaactttaaccagactaaaaagacaaggccgtgtaactggacttgtatcccgtggagggtcatttatgtccggatggattgttgaaaacgaaaaagaaaatccattatactccaactttgattatgttttagaaattgcaaaagaacacgacgttgttctttcacttgcaaatggtatgagagcaggatctatagctgattcaactgacagggcacaaatccaagaattgatcattttaggagaattaattgatagatctcgtgaagctggagtacaatgtatgattgaaggccctggacacatccctattaatgaaattccaacaaacgttatgattcaaaagaagatgtgttcaaatgctcctttttacatgctaggacctattgtgtgtgatgtagcaccaggttatgaccacattgtttctgcaataggtgctgcatcatctgcaaaagccggagcagacttcatttgttatgtaacacctgccgaacaccttgctctgcctaaccctgatgatgtaagagaaggagtaattgcaactaaaatcggagcttatgctggtgacttagcaactggtcaaattgatggatcacaagatttagctatggctgaagctcgtaaaaatcttgattgggaagcacaatactcatgtgcaatgttccctgaagctgcacgtgcaaaaagggatcaaagaccacctgaagaagaagatacctgtacaatgtgtggtaactactgtgcagtaaaaattgtaaacgaatggttagataaatctgattctgacttaattaaatag

SEQ ID NO: 8234 - DNA, 915 bp, Methanobrevibacter gottschalkii
  source 1..915: mol_type = genomic DNA
atggcaaaaaacagagatttactagctattggtcactctgctcatgactacattattagagtgcctgaatttccaaaagcaaatttttctgctccaataacaaatatgaaaacatttaatggcggagctgcagcaaatgttgcttgtgttggagctaaattaggattaaaaacttctttagtttcagcagttggtggagattttaaaaaaacggaatattatgagcatatgcagaatttagatattgacacggattctttgattattgttccgggtgaatcaacacctactgcatttgtattaactgatgataatgaagatcaaattagttatttctattggggtgctgctcgtgaatttgcagaaagcaaagtacccgcatctgcaattaaaaatactgaagcagtgcatttagcaacaggagatcctaattttaattggagatgttctgaagaagctaaaaatgaagagttacttgtttcattcgatccaggtcaggatctcggaatgtatgatataaaaaagttaagggatgttattgaaaacactactattctttttggaaaccatcatgaaattggaagaatcttagaatccctcgaagtggatttggatggtcttaggacattaggtccaaaaataattgttaaaacatgcggtgctaagggtagtgaaatttattcaaatgaagataagataaaaattgatgctattgaaacagaagttgttgacccaactggagctggagattcttatagagcgggatttttatcaagatttttaaatggtgaatcgttagaagcatctgcaaaatttgcatcaactgtatcctcatttattgtcgagcaccaaggttgtcaaacaaatatgcctacttttgatgattcatttgagagaatgaatagattttactga

SEQ ID NO: 8235 - DNA, 867 bp, Methanobrevibacter gottschalkii
  source 1..867: mol_type = genomic DNA
atggaatttgaaagtaaagggttgataagtttagagatagagggtgaagtttatggatataaactatatgaaagtcttgattcactaacaaaaacaaagtcccaaagaaaatctgcaaaagaactaaatatttcccatacagtatttaatagaagaatacttagagcagaaaaaaaattaggatttaaacttacggaaaaacttggaaatggtactgaacttacaaaagaaggattggacttgttagaagaatttaaaaaatacgcaatccaaattgaaaaaacacccaccatcaacatcgttggaggccatataagtactggtcttttagaaagtatagaattaccatttaaaactaatatttacagtagtaacgatgaagatgcttttgaacttgcaaaaagaggcgtagttgatattttaacattagatgatccattaatagcatttgaaagagatataaacttttatccaatagcctatgattacctggttcttatttcaagtccagactctgaaaaaattgaaagtatttcagatttagagaaccttgattttgtaagtgtgtctggatctgcccaaaggttggcatggaacagtttaaaacattatgacatacatgttaatattaaagaaaatgtaagttcgcaatttgatgcatataaaaaagttagaaactcaaaaaatttacatacatttttaaatgcaagttactttaaaggaaacgaacttttaaaatttaatacccaacatgtaattagcttgattaaagttaatgaagataaagcaaaggttgatgaatttattaaatatttaactaatgaagcccaagaaagcattgaaaaacaaggttttacaccaatgtaa

SEQ ID NO: 8236 - DNA, 591 bp, Methanobrevibacter gottschalkii
  source 1..591: mol_type = genomic DNA
atggaaattatgaaaacttctattaaagctatattggacaatattaaaaacgctgaagattttttagatgaaaaagcaattgatgaatttgaaaatataatcattggttctaaaaatatatttgttactggtgctggaagatctggactcgctgctaaagcttttgcaatgagattaatgcatttaggtttaagtgcttatgttgtgggggaaactatttctccggctatttatgaagatgactgtattattgcaatttctggttctggtgagacaaatacaattgtttcagctgtaaaaattgctaaaaatagaggttcgaaagttttagctttaacatcttatcctgaatctagtttaggacaactagcggatgcttatattctggttaaaggaagaactaaaaaagaagttgatgatgaaaattatatgaaacgtcaaattcatgggaattacacttctttaacacctttaggcactgcatttgaattaactactttagtatttttagatgctattgtttctgagttaatggagaaaatgcaacaaactgaaagtgatttaaaagcaagacatacagttttagagtaa

SEQ ID NO: 8237 - DNA, 750 bp, Methanobrevibacter gottschalkii
  source 1..750: mol_type = genomic DNA
atgaaaatcgaaaaggtaaatgccataaaatataaaaataaccaacatgaagaagtaaaagaaaatgttgtaaaagatgaaactattactttaacaataaatggagaaatttcacgtagtttatctgcaattgaagactcacttaaagaatttgctgttggatacttatttaatgagaatatggttaaatcactagaggatattaaaaaaattgaaattgatggtgttcaaatcaatgcagaaattgatgatacattacttaaaacaaatgaaactgtattatgctctgattcagcaggtggctggagaagtaaaattaaagaagtgaatcctgttgaatctgatctgcaagttaatgttaaagaattacttgatagaatcgaggaattaaaaaataatgcagaaatatggcaagctactgggggaacacatgtagcaggaattgtacataatggacaatttgtcgtaaaagaagatgtaagtcgacatgttgcagttgataaagtaattggatatggattattaaatggttttaacttaaaccagtcctacgtaatttacagtggtagaatgccagcagatatggtaattaagatgagcagagccggcgtgccaattttagcatcaaatgcagcgccagccaattcaggatataatatagcaaaaaaagggaatataactcttgttgggttcctaagaggccaacgctgcaacatatataacaatcaaaatagagtaatttttgattaa

SEQ ID NO: 8238 - DNA, 570 bp, Methanobrevibacter gottschalkii
  source 1..570: mol_type = genomic DNA
atgaatatagatgattatgatgaacaattacaaagagcagttgagtttcatggggaactttgtggaggtatagctattggaactaaacttgggatgtatggtctcgagttattgggtatggaactaaatcaaagacataaaaatctaatagtaattttagaaagtgaaagatgcacatctgatgggattcaatctgtaactaagtgcagtattggtaaaaaatctttaaaactagtttattatggaaaatttgcagctactttttataatatggatactggtgaggcatacagagtttcagatgctgatgcaaataaaaaaaataaatctaatgaaacaaaagatgaattagttgaaagatttagaataactcctcctgaagaattattcaatgttgaaagagttcatgttaaacctttcaaaggggctcaaaaaccggggggtaatcataaaactcgttggtgtagtgtatgtggtgaaaaggtcactgatgattatcataaacttagagcaggcaaaccaatttgtgaatcttgtgcaaatggatcatattatgaaatcattgaataa

SEQ ID NO: 8239 - DNA, 804 bp, Methanobrevibacter gottschalkii
  source 1..804: mol_type = genomic DNA
atgagttcatttaaaagtccagttgatactgcaaaagcaatatctaaaacagctggagcaaaaaactctgcaaatattgttaatgtaatattgctctcattcttagcaggagcttatattgcattcggtggtttattagcaattgtatctagcgcaggtatgattaaagctggtgctccacttggtttagaaaaattcgtatttggtgcagtgttccctgtaggtttaattattgttgttcttgcaggatctgaattattcactggaaatgttatgtttatggttatgggtgttttagatggatccgcttctattggcggactcgctaaaaactgggtactcagttgggttttcaactttgttggtgctttattcgttgcatatgttatagcattcatgggcggtttatgtcctactgacgcatccgtacctgcatatgctattactgctaaagctattgcagtagcagaaggtaaagtaactatgcctttcactgtagctttaattaaagctattggttgtaactggttagtatgtttggctgtatggttagctaatgtatctgacgatgctattggtaagattgttggtatttggttcccaattatggctttcgttacccttggatttgagcacagtgtagcaaacatgtgtttcatcccattaggtatgttcttaggagctaaaggtgtaacctggactactattattgtaaacaatttaatcccagttactattggtaacattattggtggaggactcttcgtagcttgtatttattggtacactttccttaaagaataa

SEQ ID NO: 8240 - DNA, 2166 bp, Methanobrevibacter gottschalkii
  source 1..2166: mol_type = genomic DNA
atggttgaaattaaatatgttccaacaatctgtccatactgtggtactggttgtggactcaatttcgttgtaaaagacggaaaaattgttggtgtagaacctttaaaaagaagccctgtaaacgagggtaaagtatgtccaaaaggaaactttggataccaatttattaatagggaagacagattaactactcctttaataaaagaaaacggtgaatttagagaagcatcttgggatgaagcattagatttagttgctaacaaactcaaggaagtatctgatgaagatcctaataaagtaggattctatgcatgtgctcgttcacctaatgaaaacatttacattactcaaaaattagctagggtggcttgtggtactcaaaatgtagaccactgtgcacgtatatgtcacggacctactgtagcaggtttagcaaatactttcggatcaggggctatgaccaatggtttcgacagtattaaggaagctgattacattttctgtattggatccaacaacatggaagctcacccattattcggacgtaaaatgatccaagctaaagaaaatggtgctaaattagtagtattggatccaagattcactcctactgctaaaattgcagatgaatatgtacaatttgaaactggtactgacgtagctttaatgaatgctatgattaaagtcatcatcgacaaagacttgcaagatgatgagtttattgcaaacagaaccaaaggttacgaagaaatgaaagaaactgtccaaaaatacacattagacaaagtttctgaaattaccggtattaaacctgaaactattgaacacttggctgttgaatatgcatctgctgataaagcagctattgtatactcattaggtattaccgaacactcccacggtgcagataacgtaatgtccactgcaaaccttgcaatgttaactggtaacattggtagacaaggtactggtgtaaacccattaagaggacaaaacaacgtacaaggtgcttgtgatatgggtgcattaccttctgattacgtaggatacagaaaagttaaagacccagaaaccactgcatggttcaacgactactacagtggagatggttatgaagtaaacttaccaactactcctggattaactttagttgaaatgatgaacgcagctcatgctggtgacttaaaagtattatatatccatggggaagatccagttctctccgatgcagatgtaaaacacactaaagaagcacttgaaaacttagaaatgttagttgttcaagaatgtttcttaactgatactgcacaatgtgctgatgttgttttgcctgcagcaggttggggtgaacaagaaggtactttcactagtggtgaaagaagagtacaatgtttacacaaagctcaagaacctcctgaaggcgcatggttagattggaaaatcatggaagaaattgcagtcagaatgggagtacctagatctttattccactacgaaacttctgaagatattttcaacgaaatcagggaatgcgctcctatcatggcaggtatgaaccgtgaaagattagacactcctgaagcacttcactggccttgtccttctgaagatgacccatgtcaaccattaatgcacaaagaaaaatttgcacaccctgatggtttaggagttttccaagcattagaacacaaaggacctgttgaaactactgatgaggaatatccattagtcttaactactactagggtattgttccactatcacgctgcaatgaccagaagatgtgaaacattaaataatgaagtaaaaactggattcatcgaaatcaacactaaagatgctgaagaaagaggaattattaatggtgaagttgtaagagcttactctagaagaggagaaatcgcaattcctgcacgtgtaactgatgatatcagagaaggtattgtaaacatcccaatgcactttgtagaatgtgctgcaaacgtattaactaactccgattctttcgaccctaaatctaaaatggtcgaattaaaagcttgtgctattaacgtagaaaaactccctgaaaaagtagtcatgagaggagaagtctacaaagatggtactgatactgaaattaaagctgaaaacatggctactaccaccattaaagtaggtaaataa

SEQ ID NO: 8241 - DNA, 1206 bp, Methanobrevibacter gottschalkii
  source 1..1206: mol_type = genomic DNA
atgagcgcaaaaattaacgatatgtactacgcatactctgctattgaagatatcaaagaaaaaggagagtacggtggagtagtaactactatcatgaaatacttattagaagaaggtatcgttgacggtgttgttggtgtaaccgaaggtcatgatatgtatgatggtgtacctattctcgtaactgaccctgcagatgtaattaaaactgctggttccgtacactgcggtactttaaacattgctaaatttgtatcaaaatacttagatggtgcaagagacatgaaacttgctgttgcatgtaaaccttgtgatgcaatgaccatcagagaattaatgaaaaaaggtaaaatcatcgaagataatgtaatcatgattggggtaaactgtggaggtactttctcacctgttcctaccatgaacatgattagagatgtatacgaattagatcctaaagatgttatcaaagaagaaatttccaaaggaaaactcattatggaaactgctgatggtgaaaaaggaattgctattggtgagttagaagaacaaggtttaggtagaagagaaaactgtcaaagatgtaatctcaaaattccttccaatgctgatatggctttaggtaactggggtgttattggtgatttagctggaaaagcaactttcattgaagtattcactgaaaaaggtgcagatgctttaggtaaagttatcgatgctggtttaattgctactgaagaacctcttgaaaaaggaatcaaaatcagagaaaatattaacaacttcatgctcaaagagtccttggagaaaaaagatgttgactatgcaggtactactggagatattattgatgtattccacatgtatgaagatgaattctctaaatgtatgaaatgttacggttgtcgtgaagcatgtcctttatgttactgtgatgactgctgtctcgaaactgaaggtcctgaatgggtacctggtggatacactcctgcagctcctttcttccatttgactcgtttagtgcacatggttgacgcatgtactaactgtggacaatgttcagaagtatgtccatgtgaaatacctgtagctaaagtatggagtattgtaaacaataaagtaagagatatctacggatacattcctggtatgggtagtgatgatccacttccattcactgaccatgtatccaaagctaaatggatttaa

SEQ ID NO: 8242 - DNA, 936 bp, Methanobrevibacter gottschalkii
  source 1..936: mol_type = genomic DNA
atgttaaaaaacgtagttaaagataaatatgaaagacctatcctttcactaagaatcacaataacaaatagatgcaacgaaaactgcatatactgtcatcacgatggaatggtttcatcaaaagatgaaatgacaccagatgaattatataaaataagcaaaatagctaggaaaattggtgttaaaagaatgagactttctggtggagatccattggttagaaaagacatagtggaaattgttgaaaaaatagcaagtcttgattttaatgatatttccttgactacaaatggagtactacttgaaaaatatgctaaaggcttaaaagatgcggggttagatagagttaatgttagtttagatacattaaacagagatacatacaaatatgtaactaacatggattatctaaatgaagctaaatcaggtatcttaaaagctgttgaagttggattataccctgttaaaataaacatggttataatgaaagatgtgaatgtccatgaaataaaagatatgtttgaattctgtaaagaacatggaattatccttcaattgatcgaattaattgaaagtgaaaattgtgaagatgataaattcagtgctgaacatcactattcattagactcccttgaaaagaaattaactgatatggctgataaagtacatgaacgtaaatttatgcaagggcgtaagaaatattacattggtgagggtgaaattgaaatagttagaccagttgataatgctaaattctgtgcaagttgttccagattaagaataacaccagatggaaagataaaaccttgtttacttagaaatgataatttagtggaattaatttcacatattagaaatggtaaaagtgaagaagaacttgaagaactatttatcaatggaattaataaccgagaaccatttaacaaagaggattaa

SEQ ID NO: 8243 - DNA, 1038 bp, Methanobrevibacter gottschalkii
  source 1..1038: mol_type = genomic DNA
atgaaaatagtatctatagttggaagaaaaaatactggaaaaacttcactaacagtaaaaattattgaagaacttacaaaaagaggctacaatgtagcatcaatcaaacattctcatcactctatggaaatggataaagaaaataccgatacatggaaacataaacaagcaggatccaatgttgtcgttggaattggttcaacaacatttttcaatgcaagaaaagaaatggatttaaatagattgctatttttaataaaacatatggaccccgtcgacttcgttgtcattgaaggatttaaaaaatataattacccaaaaattgcaacatcccctgatgtagtcgatgaatatacaattaaagagataaattcctttactattgatgataaaggtttaaaagaattagttgatattatcgaagaaagatcccatgatattgtagatacattatttgcaaataattgcggatataacaatggagaaaatattgcatctgaaattcgtgaaggaaacttaactgttgatgaactagataatgtacacagttatctttcaattgataataaagtagttggactgaatagatttgttagtgattttttaaagcaaaatgtgcttggtgtaataaatacattaaatttagatgattataatattgaaaagatatctaacattgaattaataatcccaaatgaagtagataaaactccaattaacgctgaatgtactgttttgatcaatggcaacaatttaaaaatcaacaacttcgcaaaaaatcttgttgcaaactccattaaaggaatgattaattccattaaaactgaagacaatgctaaaatgattgacatagctatttcaaatatcaaaaacaatgaattaaaaaaagctacaattaaccttaaagtaaacaaccataatgttgaaattaacagatttacacagaagatactaaaagaaacaatttttgcaattgtaaattccttaaggattaatgaggaaattgcagaattaagaatcaaagtggaagaaagataa

SEQ ID NO: 8244 - DNA, 450 bp, Methanobrevibacter gottschalkii
  source 1..450: mol_type = genomic DNA
atgccaaaacatattgcgtctggtttaaaatatttggctgcagtcaaattaaaaatggcgggtaaaagtcatcaagaaattgctgacgagttaggtgttgatagatctactatctctcattatttgaatggtagaaacttgtcttggaactctattgatgttgcaaggacaatcatcgacttatgtcccaaagattttttgacaatgactgaagcaatatttaacaatccagaacagagtcgtaaaattgtgaatatttgcagagaaagaaattttgaagcaaaagttgaagattcttgtattggttgcggcttgtgtgtaaatgcatgtacaatgaaagctattaaattagaatcattaaaagcacatgcagactccatgcaatgttgtggttgtcagctttgtgaagatgaatgcccaactaattcgataaaaattttggagatttaa

SEQ ID NO: 8245 - DNA, 1098 bp, Methanobrevibacter gottschalkii
  source 1..1098: mol_type = genomic DNA
atgattagaaatttaaaagaggttaaagacaataactttgacatcacaaggtcagcagacgaagttagaaacttgtctttcaatgaccatgtctgtttaggttgtgggatttgtgaatctacttgtcctgttgaagcgattacattaaatgcagttgctattgatgctcgtaacagactttcaaacgacatctatttcagtgggcacgaaaagattgctcaaaacttccgtgaagattttgatgttcaaagaataagcattgacgaaagtaaatgtgtattatgtggtatgtgcagtggattatgtcctgttgatgcattggtattaactattgatgatgtgccaattagagaaattgaagcatatcctcattataatgctttctcagaaattgatgatgatgaatgtatctactgtaaaagatgtgaaattgcatgtcctcgtgatgcaatcgttatcgaaagagttttaccagaccgtgctgatttagtaactggtgaaatcaatgtcgatgatgatgaatgtatttactgcggcatatgtgaagaattatgtcctgcagaagcaattgttgttgatcatgaaactggtaaagaatctattgttattgacaaagataaatgtgtatactgtcttgtatgtaaaaaatcttgtcctactaatgcgattaacgcaatttgtagattatgtaactatggagaatatgatttagattcttcaaaatcagttgttaaaggtaactccatcattgacccagacctttgtgtctactgtggatggtgtgaaggtgtatgtcctaccgatgctgcaaaagttaaaaaaccgtttaaaggtagtattgaagttgatgatgaaaaatgtcaagcttgtggtgcttgtgtagatatttgtcaatgtaacgctttagcattccctgtatctactggtccgggttccagaatggcacatgttgttgctaatgatgattactgtgtacgttgtaaagcatgtgcaaaagcatgtcctaacggcgctattactgtaaaaagaactgaagttgaccacactcctattaactctgctacttggaaagaagctttagatgctattaaagactag

SEQ ID NO: 8246 - DNA, 231 bp, Methanobrevibacter gottschalkii
  source 1..231: mol_type = genomic DNA
atggaactaaaagttaatcaagataattgtttaggatgcggtatttgtgtaatcgcatgtcctgttaatgcagctatcagtcctgaaaatgctggtggtaacggtgcaaagactgaagaagtcattatgatggttgaaaatggatttatcaaactcttcagtcctgaaaaatgtgaattgtgtggaacatgtcaaatgttttgcccagtaaatgctatatggttagaataa

SEQ ID NO: 8247 - DNA, 570 bp, Methanobrevibacter gottschalkii
  source 1..570: mol_type = genomic DNA
atgtattatgctaatacttatttagaaaaacctgtagtgcctgatgtaaaaattactggtgaaggaaatacagaagttctcaaatgtatgttaaacactggatctgacatataccaaggtgcttgtaaaaaaagaggatctacattaaaacaagaatacaaaaatgtttctggtacttgttacatggatcctagggatatggcaaaattgggtgtaaacaattgggatactgttcttgttaaaacagatttcggtgaagttgttgtgaactgtgcagtatcaagggatgcacctcatgaaggtactgtattcatttgtaaaggtccttgggctaacactattgtaagtcacgacacttactgttgttccgaccctacttacaaaggtattaaatgtactgtagaaaaaactgatagaaaagtattactcatggctgatttaatgagatgggtatacaaaaaatacgttgatgaagaagatgacgatgttgttgaaaacatggaatctttaggtgaattacctgtttatcatggacgtaaatgggaggagttgattgatcatgacttatga

SEQ ID NO: 8248 - DNA, 1377 bp, Methanobrevibacter gottschalkii
  source 1..1377: mol_type = genomic DNA
atgacttatgaaccacctgtaactgattatgaccacattgttgaaaattgtacttgtgcattttgtggttgtaactgtgatgatttagattacttagtaaaagataatcatgttgttgctgtaagacacgcatgcagattaggagcaagtaaaatcatggaagatatggatcaaagattacttgttccaatgattagggatgaaaatggagaactcactgaagttgattgggatactgcattagataaagctgcagagtatattgctaattctatcagacctgtattctatggttggtctgaaacttcaactgaatgtatgaaagaaggtgtagcattaggtgaatacatcggtgctgtattagataaccaagctactatctgtcacggtccttctctccaagctgtacaaaacgcaggttatcctattcaaaccttaggggaagttcaaaatagggctgacatgattgtttactctggaagtaacgctatgaattctcaccctagacatttagcaagatatgctgctttctgtcgtggatacttcagacaaaggggaagatttgacagaactgttgtaactatggatcctaaattctcagatactgcaaaatgttctgataaatggattggatttgaacaaaatggggattatggtttttataatgctattagagctgtacttagaggaaaagaattataccaggatgtaatttctggaattccaaaagaagatatttatgaattggcagaagaaatgaaacaagctgaatttggtgttctcttcttcggtttaggtttaacccacactttatcaaaacaaagaaacattgatattgctattaaaatggtacaggacttaaacaaatacagtaaatggggacttactcctatgagaggtcacttcaacgtaaacggattcaacattttcatggcatttgaatgtggatttgctttcggtgttgactactgtagaggttacccaagatatatgttaggtgaaaccaacactatcgatttattagtcagaaaagaacctgactgtttcatggttattgcagcggatcctggtgctcacttccctaatggagcaaaccaacacttagctgatattcctgttattcaaatcgatattcactggggtccttccactgaactcgctgatgtagtattgcctggttcattcatcgctgtagaatgtgatggtaccagttatcgtatggatggggttcctatatacatgaaaaaagcaatcgacaaacctgaaacttgtcgtgacgatgaatggatcgtccgtgaattgaaagaaagagtaatgaaactcagagaagagcctaatgtagctccaaaatatgtgccaaatccaaacgcactctaa

SEQ ID NO: 8249 - DNA, 1716 bp, Methanobrevibacter gottschalkii
  source 1..1716: mol_type = genomic DNA
atggaatatattcttaaaaatggtattgtctacgacccagctaatgaaattaacggtgagaaaaaggacgtcatgtttaaagatggtattattgtagatgacgtatcctcagatgctaaagtcttagacgttaccgataaaatagtcatgccggcaggtattgaccctcacgcacacattgcaggtcctaaacttgtagttggaagattatacagacctgaagattccagaagaggtgttactcaaaaaaccaaagtattaagatccgaatctggtttctccatcccaagttgtcctgcaactggttacagatactcaagattaggttacggtactgttgttgaagcagctatgcctcctcttgaagcaaaacacactcacgaagaaattgcaactattcctcaattagatattccagctttaccattattcggtaacaactggtttgtaatggaatatgcaaaagataacaatattgaagatatcgcagcatttgtagctgcatggttaaaaatctccaaaggttacggaattaaaatcgtaaatccatgtggaagtgaagcatggggttggggtatgaacgtacatggtgtaaatgataaagcaccttactttgacgtaacttccaaagaagttgttgttgctttagcaaaagctaacgaaatgttaaacttacctcactctattcacattcaccctaatgacttaggacaccctggtaatgtaccaactactcttgaaactatggatgcagttaaaaacattaaaaaaggttctaaagctgctgaaatcagagatcaagttatgcacctttgtcacttacaattccatgcatatactggtaacagttggaaagatgctgcatctggtgcagaagaacttactaagtacattaacaaacatgatcatgttacttgtgatgtaggtcaaattactttcgatgaaactactactatgactgcagatgctcctatggagtacgatttattcaaattatctggtttaaaatggactaacaaagatattgaatgtgaaactgcagcaggtattattccatgtatttactcacctaaaaaccctgttaacactttacaatgggctattggtcttgaattgttcttacaaattgaggatccatggaaagtatgtttaactactgaccaccctaacgcaggtccgttcaccagatatcctagaatcatctcttggttaatgagtaaccaaagaagaatggaaatgattgaaaacagagaagttcacaaatgggcagaaaaaagaactactcttgcaactctcgacagagaatacgatttctatgatattgctactattacaagatctgctcctgctaaaatctacggatttacagatagaggtgcacttacccctggctacagagcagacattgctgtatatgatattaatcctaatgagattgacccatccagacaagctgctgacatcgaaaaaggtttcaacatagctgattacactattaaagatggtcaaatcttagtaaaagataaagaaattgtaaaagttaaagaaagtcaaaacatgtgggttaacgtaaaaggatgggaacaaaacgagcaaaaagttattgataacataatgccgttctttacccaatattactcagtcaaatgggaaaactacccagtacatgaccattacgtatccaacccaattagaatagatgttgatggtaaatag

SEQ ID NO: 8250 - DNA, 867 bp, Methanobrevibacter gottschalkii
  source 1..867: mol_type = genomic DNA
ttgaaaacaataacatttgatcaaataaaaacttcttcaatcgctttagaattcgatgaagtaattcctgatgaaattttttcatggactgaagctgattttgcaaaatatcaagttcctattggaaattctagattcccaattactgacttcttcgacattactgttgaaggggatgctgctggacctgatgaagttaaaatgattctcaacggtgatttaaacagagtaaaatacattggttgtaaaatgagtggtggagacatcgtctgtaacagtagtgtagatttacatgtgggtgcagaaatgtctggcggatccattcttgttaaaggtaatgcggctgctcatgctggaagagaaatgtctggaggataccttgaaatcgaaggtaatactaaagaattcactggtgcttcttacattggtgaatggagaggtatgactggaggacaaattgttgttggcggcaatgctggtaaacaatgtggtgaatgtttaactggtggaagaattcacgttaaaggtaattgtgatatcttagccggtattcacatgactaaaggtattattgaaattgacggtgacgtaaaccgttggcctggcggacaaatgaaaaacggtaacatcattattcacggattccttggaagattacttgaaggttttgttcttgatggtgttgtggaaaatcctgaaatcgaaggtactactttcgaaggtaaatatattaaatatactggagatattggtcttaatggtaaaggtaacctttacttaggtgctgaagctaacaaagaaaaattggcatcttatggtgaaattgacgacgaatatacttcaattagagaatataggaatttataa

SEQ ID NO: 8251 - DNA, 291 bp, Methanobrevibacter gottschalkii
  source 1..291: mol_type = genomic DNA
atgatagaagaaattgaaatgacttttgatgaagtattaagttatgttaaaactaaagtggatgttggtgatgttttagaaatttcttataatcgtatttttgctcctggtgaagttttaggattcacagaagaagatgatatgacaggagaaggttttagagtaggtcttcaattaaatggtgaaattttaaatcaatctattgaaattgattttaatgaaattgaagatgatttaattgaaatgcgtcatattactgacgaaaaagaacttattatagaaattttgtaa

SEQ ID NO: 8252 - DNA, 291 bp, Methanobrevibacter gottschalkii
  source 1..291: mol_type = genomic DNA
atgaaagaattaaaattaacaacaaaagaagctgtaaattacttaaaggaaaatgttgacattcatgataggattgaaatttcatataatagaattttcgctgaaggtgaaatattaaatatggacttttctgaatattttgggaaaccaggttttaaaatgttaatttctcttgatgaaagtcatttaggagctactgttgaaatagatgtttatgaagttgaagatgatattattgaatttaatcattatcctaaagatggtgaagaggtagatgtaactgtaatttag

SEQ ID NO: 8253 - DNA, 1683 bp, Methanobrevibacter gottschalkii
  source 1..1683: mol_type = genomic DNA
atgtcagaatcggaacatcgaatgattgaaattttaaggatactgagtgaacaggaaaaacctactggttccaaattaattgctgatgaactgaaaaacaaaggatttaatcttggcgaacgtgcagtcagatatcatatgcagatattagatgaaaaaggttttactgaaagaattggaaattctggaagaaaaattacaaaacttggtcttgaaaaattagaaaaaggattgatttatgatcaagttgacttcatttattcaaaatttgaagaaatgatatatttaactgacttcaactatatgacacaagaaggaaaagttgttgtcaatacctccaccatctataatgaagaatcagttgatataattaaaaatattatccaaagtgacctttctgttagcccttatgttaatttaaatcgtattggcaataatggtgaaatggaagtaacaacattatgtggaacaacaattgatggagtgctgcttaatgagggaattccttcacaaccaaaatatggaggactactaaaaattgaagattctgaacctgtcaaatttactgaattaatatcctacaaaaaaacatctgttcccccacttgaagcattttcagcaaaaggatgcacatcaatcatggatgtagttgaaaatggtgaaggaattatacctgcaaatttcagattaatacctggaatcggacgagaaaaagctataaatatcattaataaattagataaaataggaattggtggtgtaatagctatttctgaagaagaaaaagatattttaggactttctgtacctgaaggaatggttggaatatcaatagttggtggaatcacaccattttgtgcagttcaagaacagaatcaggatattgaaataaaaatagcagaggaaattaaagattttaaaaccttgtctccaataacctcaaagattaaacccgttttaaaagatataaaacctactcctcaacaaaaaatatcatttttactttcaaaaacatggaatttgatacaacaagtcaattttgacattgaaaaacgaaaaggagatatcatatccaatgtttcttttattgataaagataaaatagacaaatcattatctgtaatggaagaaacatacaatgataatccaaaatatattaatccttattataaattaattaaccatccaactaatgattcaaaaataggcattgcaacaatctgtagtttaagtattgatggaattttaatagacaatggcgtcatgagtaacccaaaatatggcggtttacttgaactgaccgaaccaccattatttattgacctaatttcatacaacggatccacagaagatcctcataaaatatttttagctaaaaatatgacatcaataactaggaataatggatctaacaaaattttagctagttttaaagagataccatatatatctcgtgagcatagtgtccaacttttagagattttaaacaatattggattttcaatatataaaattggaaagccaagagaagtaacatacaatgcaaaagcagacaattataattttggtattgttacaggcagtggtttaaatactattggtgcaataaaagaaaaaggaattgatgttgaagttaaagcaattgaaaaactattaccttttgaaaaaatggatagattataa

SEQ ID NO: 8254 - DNA, 1359 bp, Methanobrevibacter gottschalkii
  source 1..1359: mol_type = genomic DNA
atgagcgatatcccagaagaaaaaatcgaaagaataaccgaaataatgaaagaggacaatattaaatttatccgtttacaatttgttgatattaatggtactgtaaaaaacattgtaataccattcaatcctgaagatgacatgagtgaactgttcaacgaaggtatgttatttgatggttcatcaattgcaggatttgttggcatcaatgacagtgatttagttttaaaaccagatattaacacatattcaagactttcatggagaccggaggaatctgcaacatgcagatttatctgtgatgtatggactcctgagaaaaaaccatttgcaggagatccaagaggagtacttaaaaaatcattatcccatattgcaaaaatgggattaaaatacaatattggtcctgaaccagaattctttattgtagacattgatgaaaatggatatcctatgccttatgacaatgcaggatactttgatgttgaacctctcgataaaggacctgacttcagaagagaattaacattaaacttagaagatctagactttgaagttgaagcatcccaccatgaagtagctcccggccaaaatgaaattgcatttaaatttaaagatgcgcttaaaactgcagacgcagtaattacatttaaacaagcaattaaagctattgtagacaacatggcgactttcgatcaattagattatagagtaacatttatgccaaaaccgtttttcggtgtaagtggcagtggaatgcactgtcatcaatccgtatttaaaggagataaaaacctattttcagaccctgattctgaaaatggactttcaaaagatgctctttacttcatgggaggattattaaaacatgccccagcagttactgctattaccaaccctatagtaaattcatataaacgtttagttccgggttatgaagcgccggtttacagagcatatggtcttagaaacagatctgcattaattagagttccggcagcacgtggaaaagcaacccgtattgaatatagatcccctgatcctgcatgtaacccatacctagcatttactgttatgcttgaagcgggtattgatggtattgtcaataagattgacccgggtgaacctgtagaacttgatatttatagcatgagtgaagaagaaagaattgaaagaggaattaaagtcttgccaacaagtttatgggaagcataccactcacttgaagaagatccattaattcttaatgcgttaggctctcatgtaagtgaaaaattcttagaacttaaatacaaagaatgggatgaataccgtgttcaagtatttggatacgaacagaaaaaatatttagatatctga

SEQ ID NO: 8255 - DNA, 753 bp, Methanobrevibacter gottschalkii
  source 1..753: mol_type = genomic DNA
atgccaacaagatatataggtgacggatattgggaaatagtctcccgtcaaatgagtattgttacaagaagcgaacaacaaaaatttaaagatactaagattactgtgattggatgtggtggtattggaggtcaaaccattgaaatgcttgcaagaatgggtgttggagaaattattctagttgatgaagattcctttgacatgtcaaacttaaataggcagaattttgcaaatttaaatggtattggaatagccaaaagtgaagttgcaaaagacaaagtcaggttaataaatccatatgtaaaagtaactggatttaatgaacatgtcgatgagaccaatattgataagattattggagattcagacattgttattgatgctcttgacaatgtcctaacaagagtcatttcatcaagaaaagctattgagaaaaaaattccattcatacatggagccattcatggaactcttggtcaagttacaacattcttgcccaatactaaaagttatgaagaaatgttcaacctcccatcatttgggaaagacttaactgaagaagtcactgaaagtttaaaaaatattacatcaggtacgccgccagttatcgggccaaccccaaatttaattggctgtcttcaagcgatggaagcttataaaatcattactggtgttggaaaagttactgttgccccaaaaattttaacatttgatttattggatttaggttcatttttactagaagaaatctaa

SEQ ID NO: 8256 - DNA, 1167 bp, Methanobrevibacter gottschalkii
  source 1..1167: mol_type = genomic DNA
atgttatataatacacttggaaaaactggtcttaaagtatcaagacttggttttggaactatgagattgcctacaatcaattccaatgcagatattgataagcaagaagcatctgaaatgttaagttatggaattgaaaatggaattaatataattgatacagcttacccttaccacagcgcaggaatcgacggtaatggaaacagtgaaaaatttcttggtgaatttctaaaagaaaacaatttaagagatgaaatcttactacaaacaaaatcaccatcctggttaatagaaaagaaaactgattttgaatattatttagatattcaacttgaaaaattgcaaacagactacattgacctttatctcctacattcactaaccgttccggattggaataaggtacatgatttggaagtgcttgattttttagatgattgtttaagtagtggtaaaatcaaacatgttggattttcatcccatattgaaatagattatttaattgaaatacttgatgaatatcctaaatgggaagttgcactaactcagatgaattatcttgatgagtattaccaatcaggtgtaatgggccttaattatttaaaagaaatcaatatggggagtatggttatggaacctcttcgtggaggaagacttgttcaaaacatccccaatgaagttcaagaattatggtctacagcagaaaagaaaagaactcctgttgaatgggcattgcaatatttatggaatagaaatgatgttgattgtgtattcagcggtatgaacagtttaaatcaagttaaagaaaatgttagaattgcatctattgaagataaaataagtgaaaatgatcaggaattgataagggaagttgcaagaacttatagaacttttcttggaaacagttgcacccggtgtggttactgcatgccttgtccgcatggtgttgatataataaattgtttaactgaatataatattgcacacatgatgcagaatcctaaagctagtgctatgcaatatttcacattaatagatgatgattcaagagcagatagttgtataaactgtggagaatgcataccattctgtacacaaatgttaaatattccagaagaacttcaaaaagtatacgaatactttggtagtgaatttaatcatttttaa

SEQ ID NO: 8257 - DNA, 1251 bp, Methanobrevibacter gottschalkii
  source 1..1251: mol_type = genomic DNA
atgagtaaagttaaagatatatctttggcacctgagggtatcaggaaaattgaatgggttcaaaaacatatgcctgttttagaacacattaaacaagagtatttggagacccaaccttttaaaggcattactattggttcatgtttacatttggagcctaaaactattaatttaggtttgactttaatggcaggtggggctgaagtagcaatgactggttgtaacccattatccactcatgatgatgcagttgccggtgctgctgatttgggtttaaatgtttatggttggagggaacaagatgatgaagaatattatcaaactattaatatggtacttgatcataaacccgatataattattgacgatggtgcagacatgattatggtgcttcacaatgaaaggactgaattattaagtcgtattaaaggagcttgtgaagagactactactggtgtgcacagattacaagcaatgcatgctgatggggcattaaaatttccagttattgctgtaaatgatgcttatactaaatatttatttgataacagatatggaactggtcaatcaagttttgatgcgataatgggaacaaccaacatggtaatcgcaggaaaaacagtaacaatctgtggttatggatggtgtggaagaggacttgcacttagagctgatggtcttggtgcagatgttattgtaactgaagtagacccaatcagagcacttgaagcaagaatggatgggtacagagtaatgaccataagggaagcagtaaagcaatcagacttaatcatcacagtaacaggtaattcagatattataagtggggatgatttcaaatacatgaaggacgggtgcatgcttgcaaattcaggacattttaatgttgaaatcaacagaccagatttagaagctatttcaactgaggtaaaagaagtacgtgaaagtattgaagagtttaccactaaagatggacgtaagatttatcttttagctgatggtcgtcttgtaaatttatcagctgcacgtggacaaggacatcctgctgaaattatggatatgagttttgctgtacaagcattatctgcaaaacatattcttgaaaatgatttatctgtaggtgtgactaaggcaccagatgaaatcgactacagtgtagcaacaatgaaattaaaagctatgggtattaaaattgactcattaactgataaacaaaaagattatatgtctaattggcaagaaggaacataa

SEQ ID NO: 8258 - DNA, 651 bp, Methanobrevibacter gottschalkii
  source 1..651: mol_type = genomic DNA
atgtctttttttaaatatattgataatggtgaaggtccaacaaaactatttattggtggacttcatggaaatgaaggtaccacatctttaaagttcattaaaagaattaaagatgaaaatctatcctctggacaattctatttttataattttgataaaactccatatatttcgactgttgataaagagtattataaatctgagttgggtcaaaaagttttaggtttaattgaatatctatgtcctgatttttacacagagcttcattgctataatcttaaaaattatgataaattaacttcaatggagagatataaaaaaacaggtattcctccacttattaagctgggaaatcatgttctagtttcgtcagtatctccattaattaggatgacttatttttccactgaaaccgtatgcaaaacattggaatttccgtgttttgaaaaattaaactcggagattattgaaaaatataattttaacaagagtctggcaattgaaacctatgaagagttactcaatttaattttaagttcaccttctagagatcattttgaaagagaaatgttgaaaaaacatgaaaatcaggttcatatagctatgaggtatgcagaaaaggtatttggcaaagatttcccaccatattaa

SEQ ID NO: 8259 - DNA, 336 bp, Methanobrevibacter gottschalkii
  source 1..336: mol_type = genomic DNA
atgaattttttaaataattgtattattgttttccatgttactcataggttcgttaaagatgttcaaattaaagggatattggacatggattattatggtgaaatagaaaatccattacaatattttgatgaggataaaaacttaatttggcatattccaccaaatccttataggggaggcacaaaggaatatgttgcttataaaaaattaattgaagaatttaaaccggacgatggatttattgaacttttggctgtttgcggggaatatccggaatattatcattatgattggtatgatatagagatggaagctttaacttgggaatcaatctaa

SEQ ID NO: 8260 - DNA, 984 bp, Methanobrevibacter gottschalkii
  source 1..984: mol_type = genomic DNA
atgggtgttaaactaaaagatataattgaaccagaatcaattagttttaaagatttagaaggaagaactgtatcaattgatgcattcaatacacttttccaattcttatctacaatcagacaaagagatggcagacccttaactgatgaaaatggaaacatcacatcccatttaagcggaatattatatagaaactcatcaatggtcgaaaaagatataaaaccaatttatatctttgatggaaaagcacccgaactaaaaagtgagactcaagccaaaagaagagaagttagggaagaagctgaaaaaatctacaaagatgcattatcaagaggagatgctgaaaaagcgcgtaaatttgcaatgagatcatcgaaattatcacctgagattatttcatcttctaaaaagttattaacattaatgggaattccttatgttgatgcaaaaggcgaaggtgaagctcaagcagcatatttagttcaaaatggagatgcttatgcagttgcatcacaagactatgattgtctattgtttggagctaaaagagttgttagaaatcttgctgtcaattcaaatcttgggaacctagagttctatcaattggataaagttctaagagaattagatataacaagagaagaattaattgacatgggaatattaattggaactgatttttgtgatggtttaaaaggcgtaggtgctaaaacagcacttaaattagctcataaaggtcaattaaaagaaaaaatagcagaacttcaaaaagaatcagctcatgatttagatgaagttcgtgaaatcttcttaaaccataatgtaaatactgattataaaatcaaatgggaaaaacctcaaaaagataagattattgaatttttatgctatgaacatggattttccgaagatcgtgttttaaaagcatcagataaacttaaaaacttaaattcatcgcaaggaagtcttgatgcttggttttag

SEQ ID NO: 8261 - DNA, 564 bp, Methanobrevibacter gottschalkii
  source 1..564: mol_type = genomic DNA
atgtctgagccgaaaaatgaagcaaatagaggtcttattgataagataactcaagtagaacaagaatatggtaaaaatttctcaaatactcaaaagattttattaacaactgacggatcaattacagcaatattagatgttttatatgggaaaataacattgtctacccttgatcagcatttcgaggatgcggacgaatatcatgctaaattagtcaatgttaataaaggggatgaaattaattaccgtgaagttataatgcatagaaacgggaagcctttaatatatgcaatatcacacattccgttatctagatgcactaaagaagtttgtgctgatttaatcagagcagatataccaattggtagaatcttaaaaaactacaatatcgaatcaagaagagaaatcaataacatatacattgaaaaacctaatgaaactttaaaggaattatttggcactgacgaagacatgcttgcaagagactacgtcattatcaaccatgacaagatattaatgtggattaaagaagtgttcccaatcagctattttacagaaatataa

SEQ ID NO: 8262 - DNA, 1254 bp, Methanobrevibacter gottschalkii
  source 1..1254: mol_type = genomic DNA
atgaatattactgaaaaaatattatctgcaaaagcaggccatgaagtaacatctggcgaaatcattgaaattcccgttgatcttgcaatgtcgcatgacggaacctcaccaccagctattaaaacatttgaaaaagtagcgaaaaatgtatgggatcctgaaaaaatagccattatattcgatcacaacattcctgcaaacacaataggttctgcagaatttcaaaaagtctgtcgtgactttattaaaacacaaaatattactaaaaactttattcatggtgaaggaatatgtcatcaagttgttcctgaaatgggattagttgagcctgggatggttattgttggtgctgactcacacacatgtacttatggtgcatttggagcattttcaacaggtatgggtgcaactgaccttgcaatggtttgggcaactggtaaaacatggtttatggttcctgaagcaattagaatgaaagttgaaggtgaattaaacccatatattgcaccaaaagatataattttaaacattatcggagaaaccggaattgcaggagcaacatacaggactgctgaattctgcggtgaaactatagaaaaaatgggagttgaaggaagagcaaccatgtgtaatatggctattgaaatgggtgctaaaaatggtataatggaaccaaatcgtgaggttattaactatatctgccaaagaactggcaaaaatgaatctgaattaaatattataaagtcagatgaagatgcagtttattcaaaagaaatgcattttgacattgaaggcatggaaccgcaaattgcatgtccaaatgatgtggacaatgttaagggaatttctaaaattgaaggaactgtaataaatcaatgcttaatcggttcatgtaccaacggtagactttctgatttaaaagatgcagcagaaatattggaaggtaagaaaattaacgatgacatcagattaattattcttccagcttcaagagaaatctacaagcaagcaatgcatttaggctatatcgatacatttatagatgcaggagctattatttgcaatccaggatgtggaccatgtcttggaggacacatgggagtattatccgaaggtgaatcatgtatttcaacaaccaatagaaattttaaaggtagaatgggtgatccgaagtcttcagtatatttatctaattcaaaagtagtggcagcatcagcaattaaaggtgttattactaatccaaaagatttatag

SEQ ID NO: 8263 - DNA, 1179 bp, Methanobrevibacter gottschalkii
  source 1..1179: mol_type = genomic DNA
gtgattatattgcaatattttatcagtcattataacaaagaatatgagttaaattttccggaagatttactcatttatgatacaacattaagagatggagagcaaacccctggtgtttgttttagttttgatgaaaaattagaaatagctagaaaacttgatcaattcaaaattcatcaaattgaagctggttttccaatagtttctgaaaaagaaaaggaaactgtaaaggcaattgccaatgaaggtcttgatgctacaattttaggtttgactagaactaaaacagaagacattgatgcagctcttgattgtgatgtgggggggatcattacttttgttggaacttctgacattcatttagaccacaaaatgcacataacacgccaagatgcaattaacctatgcgaaactgcaattgattatgctaaagatcatggattatacgttgcattttcagcagaagatgctacaagaactgatattgaatttttaaaaagaatttattcaaaggcagaagaatgtggtgctgacagagtacacattgcagatactactggtgcaataacaccacaaggtatcgattatcttgtaagagaacttgtaaaagatttagatataaacattgcacttcactgtcacaatgactttggtcttgctgttatcaactcaattaccggtattttggcaggagcaaaaggtatttccacaactgttaatggtattggagaaagagcaggaaatgcttcattagaagaattaattatggctttaaaaatactttacggtaaagattacggatttaaaaccaaatacattaaagaattgtccaatattgtatcagaagccagcggacttccaattccatacaataaacctgttgttggaaataatatatttagacacgaatccggaattcatgttgatgcagttatcgaagaacccctatgttatgaaccatatgttccagaattagttggacaaaaaagacaacttgttttaggtaaacattcaggatgtagagctgtgaaagctaagttaactgaatgtgaacttgatgtgagtgatgatgaacttattcaaatcgtcagagaagttaaaaaatccagagaagaaggaaaatatatcaatgataaagtattcaaagaaatagttaaaaaaatcagcaaaaaggaatag

SEQ ID NO: 8264 - DNA, 552 bp, Methanobrevibacter gottschalkii
  source 1..552: mol_type = genomic DNA
atgatagaagttgaagtgaaagctaaaatcacaagctttagtgaaatggaaaaaaaattagagaatattggggcaacaaaaagcaaaaaagagtttcaagaagacatatacttcaatagccctattgtaaactttgctgagagtgatgaagcattaagaattagaacaacaaaagaaaatgacaacgttgatatatttataacttacaaaggcccgaaaattgataaaaaatcaaaaaccagaaaagaaattgaaatgaaaatagaagatgctgaaaaatgttcagacatctttgaagcaatcggttttaggaaagtaagaactgtcagaaaaaatagacaatactatacttatgaaaacttcgaaatatccctagacgatattgaaggacttgacccttatatggaaatagaaattggattaaaagatggagaagattattctaaagctcaaaaatctatttttgatttatttgaaaaattaaacataacagagggctttgatagaacttcctatttggagcttttggaaaacttaaatataactaattaa

SEQ ID NO: 8265 - DNA, 546 bp, Methanobrevibacter gottschalkii
  source 1..546: mol_type = genomic DNA
ttgaccgatgttgagataaaaattgaaaacattgttgcttctgcaagcattggtaaagacattgttcttactgaagtgtcccaagctttagaaggggttaattttaatcgtgaacagtttccaggattagtatttaaacttaaagatcctaaaacagcagcattaatatttagctctggtaagcttgtatgtactggagcaaaatctatagatgattctaaattagcaatcaaaaaaactgtagatttaatgaggactattgatactgaaattcctcatgagtttgaaattaaaattcagaatattgtggcttctgctaacttggaatccacattaaacttagaagccgtagctttagaacttgaaaatactgaatatgaaccagaacaattccctggtttagtatacagattatctgaccctaaagtggttttattattatttggctcaggtaaagtggtttgtactggagctaaaactaaaagtgacgctaaattaggtgtcgaaagagcttacgatagattaagtgagctagatttaatataa

SEQ ID NO: 8266 - DNA, 1542 bp, Methanobrevibacter gottschalkii
  source 1..1542: mol_type = genomic DNA
ttgattaaacttgtagtatttgacttagataatgttattattgatggtgaagcaatagatgagataggaaaaatagcaaatgttgaagaagacatagctgcaattactgaaaaagctatgcaaggggaaattgactttgaaacttctattaaagacagagttcaacttcttgagggtatatctattgaagatatcgaaaaagttgctgacgaactccctttaatacctggtgctttagaaactatcaaatctttaaaagataataacttagatgtggctattattagcggtagttttgatgtagtggctgaaaaaataaaagataaacttggtgtagacaaagtttacactaatagtttcacagtcgaagatggtaaattaactggtgaagtgactggtcctttagtatctggttctaaattagatgttttaaacgggcttgttgaagaagcaggaattactttagatgaagtagttgctgttggagatggcgctaatgacatttccatgattgaatcagcaggttgcggaattgcattcaatgcaaaagattctgtaaaagaaattgctgatgttgtaatagatgaaaaagacttatgcaaagtctcagaaaaaatccttaatcaattaaccactgataatgctggaaacgaaactgtagaaaaaaaagctgaagaaaaaaatactcttcctaaatctgattttgtccttgctgacaccatggaaggtgtaagaaaacaaaaagatgaaaaagaagctgaaattgctaaagtggctgaagaaagagaaaatttcaacagaatggctaaagaacaacgtaaaattagagatgaattaaacgcatctttaaaagaaaacttaaacaaagctattgaatttagaaatgaacgtaatgaaatcaataaagctgttgaatccgccaaaaaagctcgtaatgaagctaacaataaaattaaaagtttagaatggtcttctggtaaacgcgataaaattaaaatagaaaatgaaatcaaaaaaattgataaaatcattgaaactcgtgttttagacattaaaaaagaaaatcagcttgttaaaaatgcaaatgatctcagaaaacaattaatgaaaattcatgaagatgaatctgttcaaggcgaatctcaagaactcaaaaaattatctgaagaagaacacgaaaaagttatcactctttctgaaaaagcccaagcggctcatgaagaaatgcttacttacttcagaaaaactgatgatataagaactgctgctgacgaagcacacaaaaatttcattgaagcacgtaaaaatgcttctgctaaacatgaagaatttaaaaatatcttaagtgatattcatgttatcaacaaaaaattaggttcccatagacctaagaaaagaagaaatgataacaaaccttctagcggatctaatagaaaccgtgaagaaaaagaaagagctgaagaaatctttgctaaattcaaaaatggtggaaaagtctctactgaagagattttactcttacaaaaatacaatataggttaa

SEQ ID NO: 8267 - DNA, 147 bp, Methanobrevibacter gottschalkii
  source 1..147: mol_type = genomic DNA
atgacggaagaaaaaattgaaacttgtttcatatgtggtaaaaaatttgatatgaataaggcggaacttggatattatcgtaatggtaagtacccgatctgtgacttctgtgctgatttttaccgtttttataatgaagaattataa

SEQ ID NO: 8268 - DNA, 2157 bp, Methanobrevibacter gottschalkii
  source 1..2157: mol_type = genomic DNA
atgcatgaagtaattgtatgtgaaaagccaacatctgctgaaaaaatagcaaaagcactttcaccaagtgcaaaaaagaaagtatataataaaaaagtaaaatattgggaactcaaaaagggttcaaaagatattacggttgtatctgctgtcggacacctttattcacttactcctgataacccaaaagataaagtttactttgatcttcactgggctccggcttatgaagttaataaaaggggaagcggatttactaaagattatgtgagggctattaaaaaacttggaagaaatgcggactcatatattcatgcttgtgattatgatactgaaggaacattaattggttataatgcattaaaatacgcttgcggtcaagaaaatttagataaagtttctcgtatgaaattttccacattaaccaaaaaagacttgcttgaagcttatgacaatagaatagaattggatatgaatcaggtagatactggtattgcaagacatgtattggattattatttcggagtaaacatttccaaagctttaatgaaatcagtaagcaatgctaaacacagatttttaaaattatcagcaggccgtgttcaaacacctactttatcaattttggttgaaagggaaaaagaaattaaggattttgttccagaaccttattggttaatcaaagctgttgttgaaggaaacattgaagtcaatcatattgatggtaaaatttttgatagggatagagctgaggaaatcatgactaaatgtcaaggaaaagatgctattgttgatagaatcagcttttccaattccacaacaaaacctccggtaccatttaacttaggaggacttcaatctgaagcttataatgtattcggattttcccctaaaaaaacacaaactattgctcaaaatctttatacttcaggttatacttcttaccctcgtacctcttcacaaaaattacctgaaagtcttgattttaaatcaatatttactcaattagggtatgatggtgaatttaaaaagcatattgatcagcttccatctaaattaaaaccgaacaatggtaaaaaggatgatgcagcacatcctgcaattcatccaactggaattttaccccaaggcttatctaaagatgataaaaagatttatgagcttattgtttatagatttatttcagtgttctttgaagcagctaaattcgaaacaatgagtgctacattggacattgaaggtgaaaagtttcgttttaaacgtagaagagttactcataagggttggatggaacattatccatttagaaaaattgatgatgaaatattccctgatattaaagaggatgatttaatgaaagtcctggagttaatttctgatgaaaaagaaactaaacctcctgcaagatataatcaagcgtcacttattaaagaacttgaaaaaagagaacttggtactaaagcaactcgtgcagatattattgataaattgtatgaccgtaaatacataacaggcactcaacaaattgaagtgaatcaattaggtgaaaacatgattgatactttgagtatttattgtaataatttaacttcagaggaacttactcgtgacctgcaaatcaaacttgatggtattagcaataataaatcaactcgtagagaaatcatagatgaaggggaaaaagatgttaaagttattttagaggatattactaaaaattcaaatgagattggttctaaattatatgaatcatatcaggaaagtaacattattggaacctgtcccacttgtggaggcaatcttgtaaaaagatattctccaaagactaaaagttcatttgttggttgtgctaattatccggattgcactactagttattctattccaaaaggtaccaacttccttaaaaaaacttgtgaaaaatgtggacttcctataatctcattcggtaaacctcgccagcgtgcatgtttggattctaactgtggaaaagataaaactaaaattcacaaacctactgaagttggtaagtgtccgaattgtggcaaaccacttttaaaacgttcgggacgttatggtgaatttattggatgtaaaggatttccaaaatgcaaattcacatgttccgttgatgaacttgaaagtaaactaaaataa

SEQ ID NO: 8269 - DNA, 2679 bp, Methanobrevibacter gottschalkii
  source 1..2679: mol_type = genomic DNA
atgaataaagaaacaaagatgacaatagtcaaatcagtttttattattttaattctgctcgcagttgtttttgctcttaaaatgcctgctgctgatttacctttaattactgatgaagctaaaggagaatatgttgattcttcaggtcttccttatttcagtgaaatggattcatattataacttaaggttgactgaagattatattgatcatggttatgttggtgatcaaataataaatggtagtgagtgggatatgcacaggtatgctcctactggtaatcagattaattatgaactaggtattgtgtatgtaacttctttcttgcatgatatctttggaggagatcactcagttagagaaatagcattctggacaggagctattatatcaacacttgcagtaattccagcgtatattttctcaagaaggttaactaatgagtatggtgcaattgtagcaacacttattatagctcttgctccaaactactttgcacatacatttccgggattttttgatacagatatgttctattacatattttcattgttcttcatattcttctttgtagagagtataagagcgaaaaaaatagcatataaattgctatttgcaattttatcaattatatctattggattgttctcacaatcatggacaggttatatattttacataggacttatgggaatattttcaattgtttatttaatcgcttgttattactttaatattggtgaagattctcaagatgaatattcaagtaaattacattggtttattaaccaaaatgctttaaaatccattttgattttgggaattattggattcattggtcttgcaatattcaaagggttagatggtgtaactggattattcggaagcttactttcattactttcattacaatccgcttccagagttgttggcggtttccctaatgtacttgtttctgttgcagagatgcaaattccatccatgcttggaagcggtatgaattcattatttttagctaacactaatggtgctgtaaacggtattggtggtattggtgttttatttgctggattaacagttgcatatttattcgtaagaaacatattcaggattaagggaaattctgttaaaacagaatccaatgttaaaccacaaaaatctgaaaggttatcctcatctaaaagacttgataataaacgtaaacttaaaattgatttaagcagatataatcttgaatttgtatctgatattttatctgataaaaaattaacacttttatatggtactttgtttattgtatggcttgtagtaactgctcttgctgtaacaagaggttcaagatttattactacaattgtattgccatttgctcttttaacaggcatatttgtaagtattgcgatggaatatattagaaataaaataaccgatgataggattttattggctatcactgcaattgcagctatttttgttgcagttccagtttctactgtcaattccatttttgcgattttggtgtttgttgctattgtgggcattggtgcagtatctatttatgtgctcaaaccaaaagctacatctggaaggaaacttccaattaaaaagcacattgcaataattgctattgtacttgctttagtaactccatgtatttgtggtgctttcttaacttctgaatctgttgttccaggcacaagcgattcaatgtggaatgcaatgacttgggttaatgaaactcagagtgatgatactgtattgacatcttggtgggactttggttacctctttgagattgctgcagataaacaagtaacattcgatggaggttcacaatctggagatcgtgcattttggcttggccaggccatgacaacggataatctggaattgtctgcaggtatatttagaatgcttgatacaacaggtgataaagctgttgaatcattagtgaatattaccgaggataccggtaaatcagttgatattttaattgatattttaccaatgaaatcagatgatgctcaaaaaacattacaaagtaagtatcacttaacagcggctcaagcaaatgaggtagtccaatattcacaccctaaaaatccacgtcctgtaatatttgtcgcatcttctgatatgcttcaaaaagctggctggtggagttacttcggtgcttggaactttacaaaccaaagctctgaaaactacaattactatgttccaacagagcaggtaaaagttaatccgggttcaactggtaaactggcattacttgatgatcagggtatgactgtaaatgctgtaatccaaagaggctctggcaacaattcaactactgcatatactgaagctgtttatactgatagtggaaaacagattatggtaaatgatactccatacaatccattgaatatttcaaacttaatggttattgaagatggatatgtcatgaagaatcagtctgttggaaatgtaaaagatgcaaactacacactccttttaattggtgaaaagaatcaatacactccaattttaatgagtaatgagctagcgaactcaatgtttactagattatacttatatggtggagccggtcaaaacatttttgaaaatgtccatacggaaaatggagtgatgttgtttaaagtaaactttaataatacggctgctggtgcttaa

SEQ ID NO: 8270 - DNA, 1095 bp, Methanobrevibacter gottschalkii
  source 1..1095: mol_type = genomic DNA
atggggatagaggagaaaataaaagatattgaagatgaaatacaaaagacaccatataataaagctacttcacatcatataggtaagcttaaagctaaattatctaaattaaaagaagaatcattacaaagaagtagcggtggccataaaggtcaaggatttcacgttaaaaaaactggggatgcaactgttgtacttgttggatttccatcagttggtaaatctactctcttaaatgaaattactaacgctgaaagtaaggttggagcttaccaattcacaacattggatattgttccgggtgttatggaacataaaaatgcaaaaatccaggtgtttgatattccaggaattattacaggagcaagtagcggtaaaggtagaggaaaagaaattttatccgttgcaagaactgcagatttaattttaatcgttcttgatactttaaacccacagcatttggatgtgattttaaatgaattgagaaacattggtatcagacctaatgaaaaggaacctgatgtaactgtcaaaaggaaaaaacttggtggcattcacatttcatcaacctgtccgcttactcatttggatgaaaagattatcagatccatcattaatgagtatggtatgcataatgcagacatacttttccgtgatgatgtgactatggatcaatttattgatgttcttgatagaaataaatcatatgttccgatgaaaatcttattaaataaggtggatcttgtagatgattcataccttgaggaactcaagaaatacattccagatttcattccaatttctgcggataaaaaaactaacattgatgagttaaaggatattatttttgacaatcttaatttggttagggtttatttaaaaccccaaggtagaaaggcggacatgaacgatccgttggtcattaaaaaaggcacaaccgtaattggtgcatgccgcaaacttcaccgcgagtttgtgaaaaatttccgtcatgctaaggtctggggaacatcagttaaattcccaggtcaaaaagtaggtcctgaccatgtacttgatgacgaagatgttttaagaattattcttaaaaaataa

SEQ ID NO: 8271 - DNA, 546 bp, Methanobrevibacter gottschalkii
  source 1..546: mol_type = genomic DNA
atgagtgaagctatttttataactggtactccatgcactggaaaaacaactgtcagtgaagtattgtcttctaaattaaactgcaagttaattaagattaatgatttggctattgaaaatgattttgttttagggattgatgaggagaaaggatatagaatcattgatattgaggcacttgatgagaaagtttcagagattatttctgaaagtgatgagttaattatatttgaagggcatttggctcatttatgctcaggagcagataaagtaatagttttgagagtgaatcctgatattctacgtccaagacttgaagctcgtgattattctgaaagcaagattcgtgaaaacttggaagccgaagcaatgggagtatgtacttcagaggcttttgaagaatatggtgataaaatttctgaaattgatgttagcaaattgtcaattgaagagactgttaatgtaatttcatatgtgattgaagataaactagattttccagttggtgaagttgatttcatggactggttaatttcaaacttttaa

SEQ ID NO: 8272 - DNA, 825 bp, Methanobrevibacter gottschalkii
  source 1..825: mol_type = genomic DNA
atgggggaaacaaatgtgaaaatactgtatttaactgatttgtactatgaagccaaaggcagaaagtattttgaagaggatttatatatttctggaatattaaaggaacattttgacattgcattgtgtcatccgaaaaactcaaaggattttgaaaacgatgtggatttaatcgtttttagaaatactggtcctgtaactggttttgaggaggagtatgaatcatttgtcaaaagggtaacttcaaacgatatcaggactttcaatgagtttgtaggcaaagcggacatgaaaggcaaacaataccttttggatttgacattagatggatatcctgttattccaaccattgatgatcttgaaaacataaatctgattccggattgtgaagagtatgtcattaaaccgaaggatggtgcagattcaataggtctggaatttctaacaaagagtgaattatttgaaaaaaacctcgtgaacatgctaatacaacctgcaattgactttgaatatgaggtatcgttctatttcatcaatgacagcttggaatatgcattatatgctccgaataaggacaaacgatgggaacttgaaaaatatgaattcagccaaagggataaggagtttgcagaaaaattcattgcttggaatgacattgaaaacggaatccaaagagtggatgcctgcagaacaaaagagggcgaattattattggtggagcttgaggatttaaatccttatctgtctattttggagctggatgaaaaaacaaaagatgatttcatgaatcatttgattattgctttaaaaaacatttgcgattaa

SEQ ID NO: 8273 - DNA, 387 bp, Methanobrevibacter gottschalkii
  source 1..387: mol_type = genomic DNA
atgaataatgataaaaaagcagaaaaatgcccaatggaacttgccatggaattgattagcagaaaatgggttattcaaatcttgagagatatgttttttggaaaaaaacgtttcaatgaatttaaagatggaaaacctaatctatctaataaagttttaagcaattgtctaaaagaaatggaagaaaacggacttatctctagaaacaacgatgaagataagcaaattattgaatacacattaactgataaagggaaaaaacttaataaggtagtttatgaactcgcaatgtttacattaactaccgatttgggcaatgaattctatgatgatgaaactaaaatcgaattagagaacatattcaaaaatacattgataaacaattag

SEQ ID NO: 8274 - DNA, 447 bp, Methanobrevibacter gottschalkii
  source 1..447: mol_type = genomic DNA
atgaaatttaatgcatggaataataatgagaaatttttctcatcaaaaatcgcacaaaatgtaatttctaccgcttgtggttctgatattaacactgcttgtggcagtgatgtggctgcttctgcttgtggttctgatattaacactgcttgtggcagtgatgtggctgcttctgcttgtggttctgatattaacactgcttgtggcagtgatgtggctgcttctgcttgtggttctgatattaacactgctgtggcagtgatgtggctgcttctgcttgtggttctgatattaacactgcttgtggcagtgatgtggctgcttctgcttgtggttctgatattaacactgcatgtggatcagatatcaccacagcttgtggttcagacagattttaagattaattcaatcttaaatattttatttttttatatactatttttttga

SEQ ID NO: 8275 - DNA, 1029 bp, Methanobrevibacter gottschalkii
  source 1..1029: mol_type = genomic DNA
atggctgatttttttgcatttcaatggcatatccttgatgactgtgaccagcgatgcaagcattgctatattttttcagaagaaaatgacaaggaattaataacaatgaaatatgaggatatggaaattgttttagataactgcttaaaattctgcctgaaaacaaacaggacaccatatttcagcattactggaggagacccgattcttcatcctgatttttggcaattgcttgaaatgttgcacgaaaagaagattcactattcaatactgggaaacccctttcatattaccgatgaagttgcaaaaagacttaaaagcttaagctgcaggcagtatcaactgtctttggatggtctaagagacacccatgactattttagaaaacccggttcgtttgacattacacttgaaaaaattagaatcttgcaggatgcaggagtcagagccagcatcatgacgacagtttccaagacaaacattgatgaaattccagatttgattgatgtcgttgttgaaaataatgcatgtttattcagctttgcaagatattgtccgacaagccttgaaaaagcggcacaaatgacttctgaagaatataaaaaccttttggcaaaggtatgggaaaaatacaatgaatataaagacagcaaaacattttttacactaaaggatcatctatggacattattcttatatgaaaaagggttatatgagattccagaaaatttgaatgatgatattgtctatgatggatgcaattgtggaaacagtcatttgacaattttgccgtcaggtgatgtattcgcatgtcgcagaatggacagtaaggttggaaatgccttaaatgaatcaatatatgatattttcatgggtgataatatggatgaatacagacaatttgaaaaattcgaaaaatgcagccgatgcgaattgctgagattctgcagagggtgtccggcggtaagttacggaacaactcatgacatgtattctccagacccccaatgctggaaagtggtgttataa

SEQ ID NO: 8276 - DNA, 966 bp, Methanobrevibacter gottschalkii
  source 1..966: mol_type = genomic DNA
atgaaagcagttgttttggaaaaaacttgtaatgctgacgagttgaaagtcagcgaagttgaaattcctaaagttaaagatggttgggttttagttaagattctaggctttggaattaacagggctgaagtaattttaagggattatgaagccgatgaagattatattgaattgcctgtaattcccggtattgaatgcgttggaaaagtagttgattcatcaaatactcgatttaaaaacggggataggatagctgcacttatgggtggaatgggaagaagttttgatggaggatatgccgaatatgctctacttcctgaaaaaattgtctttaaaattgatgaagatgtttttgacaaattgacattggaggaaataatagcaattcctgaaacttatttcactgcctatgggtctttaatgtcacttaatcttgtaaaggatgatactctattaatcagaggtgcaacctctgcattgggcctttctgcaatgcaacttgcaaactcaatgggatgtgaaatatttgcaacgtccagaagtgaagaaagatttggtaagttaaagtcaaatggtgcggatgagtgctttgctgatgatggttgtttggctgaaaaattaaattgtgataaggtactggaattgattggccctaaaactcttgaagattcaatgaaatgcattaacagtggaggaatatgctgtgttacaggtgttttgggaggtattgagtatatggatgaattcgatccaatcaagattatcccaaatggcaggtacttgacttcttttttcagcaattatccgacacaggagataatggacaacatatttgatttcattattaaaaataacatcaaacctgaaatttcaagagtattctataatttggaagatattggaaaagctcatactttgatggagtcaaacatggctcaaggaaagattatatttaaattggagtag

SEQ ID NO: 8277 - DNA, 612 bp, Methanobrevibacter gottschalkii
  source 1..612: mol_type = genomic DNA
atggttactaaagaagaatgttttaaacaattaagagatgtgattgatgcggttttatccactgttgatgataatggcaatcctcaatcaagaattattgatataatgcatattgaagatgataaaatatattttctaactggccgtggaaaacatgtttattcagaaataataaatcatccaaaggttagttatttaagcttaaaagacaataaatccattagaattagtggtgaagctcataaattggacaatcaaaaatattggattgatttaatatttgaaaacaatccatttatgaataatgtttatccgggaaatgcgagatatattttagaacctttttgcattgaagattatgaaatggaattctttgatttgacacaaaagcctattttcagacaatccttcaaattcggtgatgttgaaataacagttaagggatttgagataactggtgattgtattgcttgcggtacttgtcaggcatgttgtccgcagcagattccagtttttgttgacgataagtttgaaattccgccggaacattgtttgcattgtggattatgttatgaaaattgtccgaatgatgcgattgttaaaagggaataa

SEQ ID NO: 8278 - DNA, 627 bp, Methanobrevibacter gottschalkii
  source 1..627: mol_type = genomic DNA
atgttaaaatctgaaaatggaatcattaatcaaatagggtctagaatattaactagaaaagccatattaaataattccataaattatatagaaaaatgtgtaagttccaataatatttttaaaagaagaggagttatagaggcaatttcagtagaatttgatgctataaatgattattcctttttaaaacaaattatttcatgttttttaaatgaaaccgatgtagaaattttaagtaatttatctaaggtaatggataaaattactagaaataactgttcttattttaaagatgaaattttaaaatatatttctaaagatttagataatcactactatttacatttaataaatagtttttatgaaatttctggtggagaagaagatgaatttattttaaaagctataaaaccattcatcgattactttgaaaaaaatagcatagatatccgaaaaatagatgcatcaatttcgactagaatatctgatataatattaaagatttatgaagaaaatttaggtgataactctattaaaaatcaatgcttagattatattgatatcatagttaaagatgatttatactattttgaaaataaacttaatgaaaaatttgagttactttaa

SEQ ID NO: 8279 - DNA, 582 bp, Methanobrevibacter gottschalkii
  source 1..582: mol_type = genomic DNA
ttggatcataaaataacggacttacaaatcaatgcattaattggaactaactcaaaatatgaaatttttgagatagacagacaatatgatattatgagtacatcaattaaaatggataaatctaaaaaaataaattttaataatcatatgcctcatgaatgtactcttttaaaaaatgtaattgaattaaataataaggaattatatgataaaataaaagattatttttgtttgtattatatttctgctttggaaaatacaattgaaaattcatttagaaaattttggtcacttagtgaaagaattataaaagatattcatggcggaatgaaagatgaaaaattagtaaaatatatgggaaaattattaaaaatgtgccgatatccggataaaataattcaaagagttaaattcatcaaaattaaacgaaacaatctggttcatgaaaatattcatggtgaaataactcaatctgatcaagctattgtcaaaatcattgctgaaaatttaatattgtttttaatttgttattttaatgaagtaacagatattggagattataagagtttttatgatttgtaa

SEQ ID NO: 8280 - DNA, 645 bp, Methanobrevibacter gottschalkii
  source 1..645: mol_type = genomic DNA
atgaataaaatagaatatactactagaaaattaaattcattaaaacagactttaattaaaagttttgaagctatcaatagtactagcaatgacccaaaatattactatgaaacaatttgggatttgatgaatcaaaaatctaacattaaagaaatgtttgttaaagcaacattatctaagcaaatttatttaataaatatttctagtattttaagaaaaattcaaaataatgatgaatctgatattttagataattttctagtagaattaaataaaatgtatttagagtataacgctatggataaagaacaaattaacattataatttacactaatattcccataaaacttaaaagtaatgataatctaatcgagacattaaaatatttcaatttaaaaatttttgagttttcaagttataattttgaaaatgaacttgatttggatgatgaaataaaatacaaatttaatagttctaaatttttgatgcttaaatatgctgctgatgccagagattatgaatttgttaaatctgaagctttgaatgcaatttattccttttttggatatataacatatattcatagattaattatgatactgaaaagtggcatattaatgaaattacattggatcataaaataa

SEQ ID NO: 8281 - DNA, 423 bp, Methanobrevibacter gottschalkii
  source 1..423: mol_type = genomic DNA
atggtcgatacatttagcaaagagactcgcagttatgttatgtcaagaataaaatgcaaagatactaaaccagaaattattgttcgtagttatttgttctcaagaggccttcgcttcaggaagaacgatgaaagatatcctgggagtccggacattgtcttgccaaaatataaaactattgtgttcgttcatggatgtttttggcatctccatgagggatgcaagtatgcgagaattccaaaatcaaatgttgattactgggaaaagaaactttacagaaacagagaacgtgacaaacataatcagaaagaattagagaaaatgggatggaatgtcatcactgtgtgggaatgtgaattgaaaaaagataaggttgaacaaacacttgaggatttatacgctcaaataacttccaaactgtaa

SEQ ID NO: 8282 - DNA, 174 bp, Methanobrevibacter gottschalkii
  source 1..174: mol_type = genomic DNA
atgagcgacattgtcaaagttagaggaagacatggtacaaaaacattagatataacaattcctgcaaaaattagtaaagaatatgatattcatgcaggtgatgtttttaaagtgggcattgttaaagaaaatgattctattaaaataatttatgaattagtatataaagattaa

SEQ ID NO: 8283 - DNA, 165 bp, Methanobrevibacter gottschalkii
  source 1..165: mol_type = genomic DNA
atgggacaagatggatttgaaaatgaaacactattaatggaagctcttaacaacaaaagattcaatgaattaaataaaaacttaaaagatgtgataacatttacatctgaaaagcccattaatgaaaaatatgctgatacaaggcattgtctaaaattgtcatga

SEQ ID NO: 8284 - DNA, 306 bp, Methanobrevibacter gottschalkii
  source 1..306: mol_type = genomic DNA
atgcccagacatactccaaaatctaatatttgcaataaattatcacctgttgattgtataaataaaattaaaagtgtaataactgaaaaaagaagcattgggcacggtaatgtttatggaatttctggagacaatcaagagattacacaaataaacgaagcgataaagttggataaaggttttcagtttgtattgaactgtgaatctgaagctcatttatcccaattggaggatttgattaaaaaggaattaacttctaatgagtatatatgtggagatgcttcccggtgcagagttttctgttga

SEQ ID NO: 8285 - DNA, 270 bp, Methanobrevibacter gottschalkii
  source 1..270: mol_type = genomic DNA
atgcttcccggtgcagagttttctgttgaaaatgtaatgggaatccatgaactgatatttaaggaagttgtaacccaaaaaagagattgtggaacagctatggttgggtcttcaatatatcatcagggtgctgaatcccagtgcatagaatatgttgcttcggcaaatatcaggtttgattgcaacatatctaatgttaatgtattgataaatgagatagtatcagattttgcagataaaggttatggcgtaagtgttgagtttatctaa

SEQ ID NO: 8286 - DNA, 252 bp, Methanobrevibacter gottschalkii
  source 1..252: mol_type = genomic DNA
atggtttttaatattgatgatattaaaaaaagagttattccaattgtaataaagtatggtattaatacttttagcctttttggatcttatgctcgaggtgatgctaatgaaaatagtgatttggattttgtaatggataaatgtgatttaaaaggattacaatatgtttctttagtccaagatttggaaaaggaatttaactgtcatgttgatgttatcagtaaaggaagttcaaataaaaaaatttcttga

SEQ ID NO: 8287 - DNA, 177 bp, Methanobrevibacter gottschalkii
  source 1..177: mol_type = genomic DNA
atgaacgagaaagataatcgatgggctgaaactataattggatattgtaatcgtattgacgattacttgaatcgttttgatgatgataaagagatttacatgtcagatagtttatataaagatgcttgtgcattagttattattccgattgtgaatttgcaaataattttcagataa

SEQ ID NO: 8288 - DNA, 294 bp, Methanobrevibacter gottschalkii
  source 1..294: mol_type = genomic DNA
atgattagcagtgaagaaaaagagaaaatcaaagaagagatagtggagaaaataaactctgttttagagaaaaataacgaatctttcagattggacaaaataaatgttctgaataaaaatgaaaccgttaaatttatgggaaattacagagtttacgacagaaaaaaatacgacactgtttctagagaaattaattctttcttaaagaaatacggagatgttgaaataaaatctaaaaaaatcagagacagtggaatgaaatttacaacagtgagcttcaattttgaactataa

SEQ ID NO: 8289 - DNA, 1221 bp, Methanobrevibacter gottschalkii
  source 1..1221: mol_type = genomic DNA
atgattaaacgggaattatatttaaatcaaattcgtcatctttttggatctgattttattaaggtgattgtaggattgagaagatgtggtaaaacttctttactaaagagcattattggagaacttcaggataaaggtgttaaaaaagaaaatattatttatatttcctttgagttggttcaatataaaaatatttttaatgcgcatcaattggatgagcttattttaaaattggtcgaaggtcttgaaggtaaaatatatcttctttttgatgaaattcaacaggtggaattttgggaaaaatcaatcaactcctatcaggcttcatttgactgcgatatttatataacagggtcaaactctaaactgttgtcaaacgaattggccacacttctttcaggtcgttatgttaaaatcaatttgtatccgttctcttttgctgaaattttacagtataagcaagaaattaatggtttgaaattaaatgaaatgaatctgaaagaactattcaatgaatatttgttatttgggggaatgcctgggttgcttccgattaaagatgaatcaactaagattaatatacttcatgatatttatgactccattgtaattaatgatgttctttcacgatataagattaatgaaattgatttattcatgagattttcttattatctgatgaattcaaccggtcaaacattctcaaaaacaagtataactaattatttgaaaaatgaaaataaaaaaacttctagaaatacaatatcaaattttacaaaatatcttgaagattcgttgttctgtaaaaaagtaatgcgtcaggatattataggcaaaaaattgttaaaaactgaagagaaatattatttggcagatcagggatttcatcatgctttagttgataataatagtgattggttaggtaggatattggaaaatgttgtttataatgagttgattcggagaggttattctgtaaaaattggtaaaattaaaaataaagaaatagattttgtttgtgaaaaacaggataataagatttatgttcaggtagcttatctcttatcaacaccagaaacaattgaaagagaattttctcctttatttgatgttccagataaatatagagcatatgttttaagtatggatgaagttaacttatctgaaggtgggattattcacgaaaatatcattgatttcttattggattatgaaatttaa

SEQ ID NO: 8290 - DNA, 942 bp, Methanobrevibacter gottschalkii
  source 1..942: mol_type = genomic DNA
atgttcaaatttgataaagaacaacatgtgtttgactttgccggtgtaaaaatgggcggtcaaccgggagaatatcctacagttctatgtggtacaatcttttatggcggacacaacataatcaacgatgaacttaccggtgatttcgatcatgaaagcgctgaaaaattattgaatgatatgattagcatgtccgatataactgggaatccatgtattgcacaggtattcggtcaaactgaagaagcaattgtgaaatatttagaatttgttggtgatttatgtgatatacccttcctgatagattccacttcagcagatgcaagagtagcgggtgctcaatatgcggatgaagtgggattaactgaaagagcaatttataactccatcaatatgtccgcagacaaatctgaaatggatgctctaaaagaaacaaatatcgattcttcaataatcttaggattcaaccctatgaattccacagtgcaaggtaagattgcaatgtgggaaaatggtgatgatggcgcttatgaaaaaggtttgcttgaagtcgctgaagattgcggcatcaccaaattcatgatggatacagccgttaccccattaggtcagggtgcaggtgttgcaggtagagcttcttttgcagaaaaagcaaaatggggttatcctgtaggttccggtatccacaatattccttcagcatgggattggttaagagattataaaaatgagaccggcaataaaactgcattcacagtatgcgatattggagccaacattctccaggtaatgagctgtggtgatttcgtattattcggcccaatagacaatgcaacaatatgcttcccagctattgcacagacagacatgttcattgctgaagcagcaaaagatttaagcacagaaccaattgaaacacacccaataaataatttattataa

SEQ ID NO: 8291 - DNA, 366 bp, Methanobrevibacter gottschalkii
  source 1..366: mol_type = genomic DNA
atggatgaaagatcatataacatttcagagtttgcaattgaaggtgaagaagcagtaaaaacagtattttacacaacagattccacaagcggttctgtatggtgtgtaaaaccaggtcaagaagtagcttgccacacccacaacaattccgatgacatctggatttgcatacagggggaaggagtattctatccggaactgggtgatgagattccaattaaaaaaggacaggttgcggtaactccaaaaggactgtgccatggagctacaaacacagggaatgaagatttcatctttgtaagtattgttgcacctgttccagcagattataatccattatactcttttttattttttatcaattaa

SEQ ID NO: 8292 - DNA, 366 bp, Methanobrevibacter gottschalkii
  source 1..366: mol_type = genomic DNA
ttgagtagaggaaaaagaccaaagtggatgattgaaatagctaaggaaagaatggaaattctttttaatcgtgctgagatggagttcatcaaccatcctgagcgatccaatcgatatgtcgaactggcattgaaattgtctaccaaatacaatactaaaattcctgaaaaatggggtagaagatattgtaggaattgtaaaagtttcctctcacctggtcgcaattgcaccgtccggctagttaactctgaagttaacattttttgtggtgaatgtgatcatgtaatgaaaattccatatcataaggaaaaaaagaataaaaggagagcaaaatatgagtcaatcaaaaaaagaaatgatgaatag

SEQ ID NO: 8293 - DNA, 258 bp, Methanobrevibacter gottschalkii
  source 1..258: mol_type = genomic DNA
atgagtcaatcaaaaaaagaaatgatgaatagagctctttccgctatgacaattaatattggtaagaatggcattaatgaaaatgttattgatgaaattaaacgccaactcgattctaatgaaattgtcaaacttaaatttgcaaaaaatatcgctagagataaagataaattcatagatgatattgtctctcaaacaagagctaagcttattgatgttagaggacatgtcgctgtaatttataaaaaaaagccttaa

SEQ ID NO: 8294 - DNA, 438 bp, Methanobrevibacter gottschalkii
  source 1..438: mol_type = genomic DNA
atgactactgtatttgatgtacctgcagatttattaattaaaaaagtcgcagatgaatttaaaaataatgataagatcaattcccctgcatggtccaattttgttaaaactggtgttcacaaggaaagaaaaccagaaaacgtagattggtggtatgtaaggactgcttccattatcagaagagtgtatatggatggtcctgtgggtgttatgagtttaagaactttctacggtggtaaaaaagaccgtggtgtacgtcctgaagtatttagaaaaggtagtgggtctattgttagaacctcattacatcaattggaagatgcaggacttgttgaaaaagttgaaggtggaagagttgttactccagcaggaagatcattcttggataaactttctgctgaaatcattaaagatgttcctggtcttgaaaaatactaa

SEQ ID NO: 8295 - DNA, 357 bp, Methanobrevibacter gottschalkii
  source 1..357: mol_type = genomic DNA
atgagcgatttagatgaaattcgtcaaaaaagaatggctgaattacaagctcaacaagctgctatgcagaatcaagcacaacaacaagctatggctcaagcacaacagcaagaagcacaagcaaaatttgaatctcagaaaaaacaaattattgctcaaattatgacttctgaagctcgtaataggttgtctaatcttaaattaactaaacctgaacttgttaatcaaattgaacttcaattgattcaatcagctcagtctggaagtttaagaggaaaagtgactgatgaacagcttaaagttcttttaagacaaattgctggtcaaaaaagagagattaaaattacaaggaaataa

SEQ ID NO: 8296 - DNA, 585 bp, Methanobrevibacter gottschalkii
  source 1..585: mol_type = genomic DNA
atgaaagctggtgtattatatagtggtggaaaggattcgtcttttgtagcagtaatgcttaaaagattaggtcttgacgtagaactatgcactgcaaactttggtgtttacgattcatacattccagcaagcaaatctgccgaagcgttaggtttcaagcacaatgtcctgaaaatggattatggcattttggatgatacttgtgacatgattatgaatgacggatttccgaatgatggaatcaagtttattcatgctagaactgttgaaaagcttgcagatgattttgatattattgcagatgggacaagaagagatgataggactccaaaattgaatatcaatcaaatcaaaagtcttgaagacaggaaaaatgttcaatatattaaccttgacagtttcggacacaagtctgttaaactaataacttcaagtctgtttgaaatttcacacgaaagatcaaataaggacaacagttccgattttgaagttgaaataaggactttgattgatgagaaaggaggaaactcattagatatattcccagaacattatcaaactcgtgttataggatataaaaaataa

SEQ ID NO: 8297 - DNA, 156 bp, Methanobrevibacter gottschalkii
  source 1..156: mol_type = genomic DNA
atgagtagaaataaaccattagctaaaaaattaagaatggcaaaagcaaacaaacaaaataggagaattccaatctgggcttatgctaaaactaaccgtaaacttagatacagaccaaaacctagacattggagaagaaacagtcttaaattataa

SEQ ID NO: 8298 - DNA, 246 bp, Methanobrevibacter gottschalkii
  source 1..246: mol_type = genomic DNA
atggaaagagtttacacaattccacttagaaatgttaaagaaattaaaagaactatcagagctcctagagctattagagaagttaaaaatttcttaactaaacacatgaaagctgaagaagtcaaaattgatgaatctatcaatcatgctatttggaaaagaggtatccaaaaaataccttctaaaattactgtaaaagcagttaaagatgatgatggtgttgtaacagctactttagcagaatag

SEQ ID NO: 8299 - DNA, 675 bp, Methanobrevibacter gottschalkii
  source 1..675: mol_type = genomic DNA
atgttaaaaagagtagatatcgttggaaatccaaatattggtgtatttattctggcaactgatgagtatgctattgttccttataatcttttagatgaaaaagccgatattattaaggaaacattggatgttgatgttgttaaatcctcaatttctggatgtagtcttatcggatctttagctgtagctaattcaaacggaatggttgtttcaccacatgttttagatagggaaattaaacagtttgaagatttaggtattaatgtagctactgttcccggtcaatatactgcattaggcaatatcattgcagcaaatgataagggagctcttgcaagtccatttttatctgaaaaagcaattaacattatcgaagaaactttggatgtaaatgttgaatccacttctatggttggaagtgacattattggatccatgattcaagttacaaataaaggatttttaataagttctaatgctgttaaatctgaaattagttttgctcaagaagtatttggtgtagaaggggatattggtactgttggaaaaggtatttctttagtgggtgcttgttccattgctaattcaaaaggagcaattgttgctaaagatagtactggtcctgaaatggctagagttgaagaagcattaggctttttagatgatgatttttaa

SEQ ID NO: 8300 - DNA, 225 bp, Methanobrevibacter gottschalkii
  source 1..225: mol_type = genomic DNA
atgataacaaaaatttacagagttaaaggtacttttgtaatgggtgatgaatatcataaatttactaaagaattcaaagctacttgtgaagcggatatcgaagaaaaaatatacgaacgtttcggaagtaaacacagaattaacaggaaccaaatttctatttcagaaatcgtagaaattgctcctgaagatgttgttgaccctattgtaaaagacattttatag

SEQ ID NO: 8301 - DNA, 435 bp, Methanobrevibacter gottschalkii
  source 1..435: mol_type = genomic DNA
atggaagatcagcaaaaactaaacagtcttcttaacgaaattaatgtatacagacaacaagctgatttaattcaacaacaaattgaattaatcagaacttctatggctgaagtggatgcattattctctgctttggatgatatcgaaggtaaagaatctgtcgaagcttttgtacctgttggtgctggttcattcgttaaaggagaacttaaaagtactgatgaaattattgtaagtattggagcaggacttgctgttaaaaaagatgctgatggcgctcgtgaaattttaaacgggcaaaaaaaagacttaactgatagcttagacaaaatgttagctaacttgcagcaatgcacagacattgtaggcagtcttcaggctcaagctgaacaaattgcagcagcggctcaaggaaaaatgacccaaatgggataa

SEQ ID NO: 8302 - DNA, 6225 bp, Methanobrevibacter gottschalkii
  source 1..6225: mol_type = genomic DNA
ttgaaaaaaatattgatatttctattaatattgatttttgcattatcaattaatataacatttgcaagtaatactactaatagttcagatatttacataagtaatgagggtagtgatttttgtggagacgggtctattgataatccctatcaaactcttaactacacaattgggaaagtctcaaacaattcaaatatttatttaaaaagcggaacatataattctacaggttatgatattgtaaataaatcaatttctattaatggtattggtgatgttactattgatggattaaatggatttatttcacaaagtatttttaaaattaactctaatgcatcattatttttaaacaatattaaatttaaaaatggatattgtgatttagacaatgaaactccttcttgtattataaatcaaggacgattgtttattacaaattccacatttgataattttaaaacaagcgttggagtaattactaatgaaaattatttatgcatcagcaatgtcaaaacaagtaatttgtctaattctcagttattttcagctccatataaatataacattcctattcaatttatttacaatatatggtgttgtgatatttataattcatctattggcgcatcgtataataataaaaacatgactctaacaaattcatttatagagcgatttgtttcaaataaggattattcaaatcaaacttcttatgcttactttaataattcaaatgttcatttaataacagctaatgattgtgacatgttaatttttaataatacttatattaattgttattttgatgttgatgatacaactcatacaattgaatattcaaatttaatttgggataatgtaacactctcaaaatataatgatttattttatttttctttaaaaattggttattctaatttaacagctatttcatcatattttttaacttctattttatttttatcttctaatgcaacaatttcatattcatgtattttatctaatattattactgctgtcgtttctaatgtaaatgttaattataattggtggggggataataaaggacctaatgtaatgaatggtgagttttcaaaaatcacttcaaattattgggtagtaatgatggcggattatgatgattctttagttaaaatagatttaagtaaatatacaaatggcttagatgtatggaatttaaataatccctctaaattaagaactcgtttagttaaattaagaacagaaactggtaatttaacaaaaacttcaggttatttggaaaatgctactttttactctgaattaaatggaaataacattaatactatgctttatgcgatggttgataatcaagttttaagaattgttgttggtgagggtaattctgattatgatttatatatttcagatactgaaggtaatgattatttttgtgatggatctttagagaatccatataaaacacttaaaaaagttgtttcaaaagccattagtggaaataaaatttatatattgccgggatattatactttaagttggaatgccaatattaaaatattaaaaaatttaacatttattggtattggaaatgcaacattatcaagatcaaatgctcgaaatatttttattgttcaagaaaaaggtgtgttgaatatcgaaaatctcacatttacacaagctacttctggatatcacaactactatgatccaataattcatgtaattgatggtgatgtaaatcttaagaattctaacttttataacattacaacttatggggttgttttttcagataaatctgaacatgtgactgttaataacttaactcttctaaatgttgaaggtcctgttgtagtgggtaattctactaaggtttcaatttataattctaaatttttcaatggaagtgaagcatccttttatgattcatattattcatttttaatcccagtttgttctaacttgtctgttgtaaattgtactgttgatggatataaaggtggtttaattaaactaaatcctagatatgaacaaatagctgcaaggtcatatatttataattcaacatttttaagaaattatcagtataattatgtttatgctcctatggtttcaacatattcatataattacatgacaggattttcaataattgaaaactgcacgttttgtaataacattgggaatttagtttttagtaatataataaataattgtacatttgtaagcaataaaaggattcgttatgaggaaactaacatacattacaatgtaaattatccaaaagctctaatttatgcaaaaataattattaattctaattttaataataattctttcatctctaaaaattatgaagacatggtcattcatggcgatgaagtttattattcaacctttataaataattctgcagcatttggaggtgcattatctggttcaaaagagatacattattcaatatttataaataattctgcagcatttggaggtaatgatgtatttgtttataatggggatttaaattgttctagcaactggtgggggtcaaatcaaaagccagattcatctagggtttttgttttcatcggaacattggtattggatgattgggttatattgactatggattataagaatgatagggttattgcatatctggataatttattagacaataatggaaacagttatcctttaaatcatgttttaccatctagggctgttattttttcaactgaaggtggagaattaactccatctaatacttttttggttaataataaagcttcaacttttttaattagattaacttctagcgattttaatgtatttgctcaagtcgataatcaaattacaagtttgactgtttataataacactactcaaatattaatgagtaatgttgtaatatatgggaaagatgtattgtataatttgtctttgataaatattaatggacataaaatttcaaatcaggatttaaatgttataattactcacaaaaattcaattattgattcatttattgtcaccacagataaaagtggggatgcatcatttagtgtagattacgcaatcggtatttatcaggttaatgttgtatatttaggaaatggttattttgaagaatgtaactcttcagctactataaatgtatcttctattaaaactaaacttcaatcttataaccaaacatattcaggtaaaaataataaattttatgcaatattggtcgattatcatggaagatatttgttaaatagggatttaattttaagaatatttgatttaaatgataatttagttaacacagttgatgttaaaacaggtgttggtggaagagcagacgtgttattatctttagatgtgggaaattataaaatgaaatgggattatctgggaaatgaatggtatgaaaagagcacttgtatatcatttgttacaataagacctattgaaactaatatcatacttccaaacacaacattatatggaaaaggaaatgattatgagttcacatttaaagatatgtatggaaatttaatttctaatgaaatgattacctttaaaatatcaaaagaaaatgaatctagtaaatttagtcttataaccaagaaaggaattgcatcaataaatattaatctacttccaggaaaatatgatttagaagcggtgtatgcaggtgataaagtctatggttcttcatttgcttctgcaattttatatgttgaaccaatttttgtaacaatgaatcacaattcttatcaatccctacctaaaaatggtgttttcactgttattttaaaagatatgtatggaactaaagtaagcggtgaaaatctatctcttgaattaattaacaaagatattcataaagtttatgaggctgtaagtgatgctagtggtcaagcaaatttcaaattagatgctcctgaaggagtttattttgcgttaattaattatggaggtaatatttggtatggttcttcagttagtgctgtgactattgaaataaattctaatgtgcctattaatccagtttatattaatggttctaatttagtacaatattacggtgaagataaatattatttaataaagtttaatgatacaaatgcatattcattagaaggaaaacttgtaaatgttttaatcaactctgaagattggtctaactcatatactcttgaaagcaatgtctttggtgaagctagaattcaaatagctttggaacctggaacttataatattacttataattataaaaatgaatattatggtttatttgctcaaaattcaagtactatatttgtttataaaatgcctacaagcttaatagcatcaaacatgattttaaagaaaggcgattcaaaaaatttagaagttaaacttgtaaataaaaatggagatccaattgctaacctcccagtaattattaagatagatgataatgagtataatataactactaatcaaaaaggaattgctaaattacttcttaatttagatttgggcacacataatgttacatattcatttaataataaaaattacatatcttcaaaaggtaatgtaactattttagttgttaatgactcgaaaaaaacaacaacacttgtaggtaatgatgtttatactcgtgaagatcaaacaataaattatactgttttattatctgatttattggataatccaatttcatcttctgaaattgttttaaaaattattaattcagatgatattaatataaaaacatataaaggatatacagatgtaaatggtgttgctacatttaagtttaatttaaaatttggtaactattttgttaatgcttattataatggaaatagtgtaaatttacctagtttcactactaataatctctacattaaagttttagaaaattacacagagacaatattatttggaaatgatattgaaattcataatggtggagatgattactattcagttgttttatctactgttgatggtgaatttattaaaaatcaaataatcgaatttataattaaaaataattcttattttacaaatacagacgaaaatgggatagcatatttaaaaataccattttctccaggttcttatgaagtattaactaaatttcatggttgcgataatttaaccagttcatcaattcacaattatatttcaatttatggagatttatttaatttttactcaaaagatgttgttaaagcatataacaatggtacacattattatgttgcattatatgatacaaacaatgaacctttgtccaataaaacaattaatttctatgtaaataatcagacatatcaggatgttacaaatgctgatggttttgtttgttttgaagtatggttaaatccaggaaaatatatcattaatgcaacttttaaaggcgaatatcctgatgaatttacaagtgttgtaaataacatcacagtcttaccaacaattatgggggaaaacttagatgtttattataatgaaaatacagtattttcactatttttattagattataattgtaaaccattagaaaatacagaagtagtaataacaattggtggagctaaatattctacgatatctacttttggttcagcaagttggaaattaaaattaaatgcaggggtatataatgttatttgtaagaatcctataacaacagaaaaaataactcgtaaaattaatattaaatccacaataatatctaaaaatttggtaaaatattataaagggtcttctaaattttcagtaacatttaaagatcgcttcggtaatttttctcgaaattctaaagttaaatttattattaataaaaaaacgtatgttaaaaccacaaattctagaggtattgtgtcattaaatattaatttaaaaccaggaaaatacacaattaaaacttataatttaaagactggtgaaattaaaacaaataaaataacaatcaaaacattaataatttcaaaaaataagaaagtaaaagctggtaaaaaaattaattataatgttaaagtattcaattctaaaggtaagattgctaaaaaagcaacaattaaatttaaaatcaaaggaataacttacaaaattaaaacaaataaaaaaggcattgcaaagttaaatatagttcttaaaaaaggaaaatatacacttaaaacatcttattttgggttaagtgttaaaaataaaataactgttaaatga

SEQ ID NO: 8303 - DNA, 5712 bp, Methanobrevibacter gottschalkii
  source 1..5712: mol_type = genomic DNA
atgaaaaataaaatatttatcattggattaattattttgattttatttatatcaatttcatcagtgtgtgctaataatgaaaattcaacattaaatacatctattaagatcaacaatgatttaaatcaaataaatttaggcaacgaaataaatttaattgatgaagctccaaaagaagttttacaagatgaaagtgaaatttcaatcactcctcaaaactataataaatattttaatgtctatactggtaaatttaaatctgatattgtctcatctaaaataactactgtaaaaataggtaatgtttcaaaatgtttatttgcatttgaaaaacctgtaaatttaatgccgatagattctagctgtcaaattacaaatggggtaatacatttattgcctggaagtgatggatctacaatttccggtttaaaaattatcaataatgattctgttggggatattaagtatggaggtattttaatttctagagcacatggaatatggcttacaaactcaagtaataatcttatttataataatacaattatcataggcaatcaaaagggttgttatgccatgcctatgggttattcgaataataatagaattttaaataacactataatttctggtcttacgtcttgtattgtaatgggcagatcttgttataataatatttctaataattatattgaaatttgtggctatgaacttttcactacatctaatttaattttctttaacccttggggacatgcagattatgatgatggtgtagccgagtgtaatggaaattatattgcaaataactatttaaaaaattatggaactggaatttgggctataactttatctcttggatattactcaggagatacacaagtcattaataatacaattattaaaggttcatcaggtatttcaactagtgatatgttgttcacacaaccaaaaaatattttgataaaagataatacttttattgattgtccaatatctatacttacatgtagtaataatgtcacaatagaaaaaaataaaatttttggcagttctgaagataatgcaatctatattcaagctaatgatgcacaattgtataatcatagtgtaacaatttcggataattatatagaatttgaaaatttaggttgtgcgatattagtacatagtgacaatgtaacagttgttaataatgaaattcatttatcaaggtatggtactggaattggtatttctccaaccgattttcctaaagcatcatctaataattgtaaaatagaaaataataaattatatctcagtggtgatatgggaattcgtatacttggacataatacaacaatatgtaataattacatctctacaaaggataaaggcattgtaatttcatcttcgggttataaaatatataataatactataattgctaatataattttaagtgatgatgtgccaatctatattgaaggacatgtggtaaattcaacagtaatgtataatgaaatcgaaactaataatagtgaaggtattcatttcaatccttctggtgatttaagtgactattttggcaaggtttctgaaaatacaatcaatggaattattgaaaatactgaaactataattgttaatgatacaaacttttatgattattttgatttatcaggatatttaaattatgaatttaaaccaaattcaaaaaaaattatatttttcacatttttaactaataaaaatatttatttcacagataaaatatttttaagtagtaataaaatgtacaatttattgcataatgtttcgattaaattttttgaaaatgcaagcggatcattaattcaagatttaaatttttataatattgggaataatagtatcattttagatggggttaatgatgtatcaattaataacaatgattttacaattctttcaaataagggaaagaatatttcaacaatttccgttattggtggtgaaaattgcatcatatctaataataatattttcatgaactctaaatcaaatttcactacagcaatttctatttcaaatcctaatggtgccataattaaaaaactttcaaaaaactttaaaatttttaataataatattttgattaaaacaaatggaattgcaagaggaatttatgctgattcacttgttgagacaaatatattagaaaataagatcaatattatatctgattcttcggcttatggtatatcaatagaaaatacaaatgaaatagtatataacataactattgacaataatttagttgttattaattctaaagaaatgagttatttaatcaaacttcaaatgattggcacttctgatataataaacaattatttagttggatcaagtaatggtatttgcggtattggtgcttataattctttgaatttaaatataaatagaaatgaaatttctatttcaggcaaaaaaccaattaattttcctgtttttgatgaattaggtagaaataatgtggctatttatttaaaatccacagtaataaatggtttttcaagaaatatttttgatattgaaaattcaacaatattgattaaagattcttcatcgattattaaaaatttcaatgttaatagttatgttattgcagattataatcatgatttttattttgattctcaaaataaattaaaaagtaatattattaatgataatagtataattttatttaaaaacttcacttttaaaaaaataaccaatattaatattccggtaattataaaaccatataaaaatcttaataatttcactgctacattaattttatctgaaaatgctaataaatcatcaatttatggatttaattttattaatgcaaatattaatttaaatggtgtagataatgttaatatttttaataattcgttcaaatgtagtgaaattacggataataatggtttgaataatattatttttaataattcatttgaatttaaattaaataatgcagatggaattatttttaatggatgtgcaggaggtatttttacaaataattatattctaattgattctaaaaaatctaattttattcttattagaaaagctaatggaactaaggttaataacaattatattaatgctactggtgatagtttagtattaattaaatcagattcgtcagaaaatactcaaattttaaaaaatattattaatgttacatctactggcgattttaatgtgtataatgcttttaaaactcattttgataatatttcaaacaatgaaattaaatgtagaggtacatcaaatagtgctgtaatttattatgattcttcatcttcatgtaataaaattgaatttaatgaaattatttcaagttctagtaatggtagagaatatgcagttgtatttgatacaaaacacgctttatccaatactattgcaaataactatttaattacttctaatgggtataggagaggtaatgatgcagtatatgcaatatttgaattggtctgtaataatactcctgtaactatatatgtatctattaattcaactgaagatggtaatggtagttttacaaatccttatttaacaatccatcaagcattagagaacagtttaagtggagctataatctacatattacctggttattataaggaatctaatttaattgttaataaaaatattacattaaccgcaataaataatgatggagctgtttatattgatgcattaaataatcagttatttacaataactgaaaagggtagtttgactataaatgcattaaagatttttaatggattttcagttgaaggtggatctttgttcttcaattttggttctttaattatcaataattcagttatttataatagttcttcttattatgataattctaacccaacatttaaatttacaaatatacaaactccaactctttcatatagttatgattgtgaaaatcttggtttaggaggggctattcttaattatggtaatttattaataaattcatccaccctatttgataattttgcacataagggtggcctattggctgattttggaaaatcaacaattaaaaattcattaatatttaataatactgcagttcatggcggggcaatttttacagattcatctcatgaatttaacattgaaaatagtagtttcttagaaaatttagctattcaaacattggattactgttatattcaaagaaaatctttagattctggtggttatgagtatcgtagtttatgtgatatgcggccgggatatggtggagcaattttcagtaattcttcattaatcatatccaattgtctttttgagaggaatattgctaaatctggtggcgcaattggtcactactctaaaatagaattgaattcaaatagacaggggcctaattattatgctgttaatcaaaatgtttatagtcaatttagatatgtgcctaaattgaagattgaaaattcgatatttagatataatgaagcaaaagatacaagttgtggtaacttaagtatgatttctgataggatgtataattattattatagtattaactataatggtggagctatttttggttctttaagccaattaacaatctttaattcattatttgagcataatgtagcaaatactgttggtggtgcattatgtgttcaatgtgaaaattcagtaattgagagttgtaagttttataataatactgctggggaatatgggggtgctattgaggcttttggtacttataggatatttaatactgaaatacttaataacaatgcaaaaaatggtggtgctattaaatatacttcatataattcttatggtcatttacaagaaatgatgagtttatttaatgtcacagttactggaaataaagcgttatctagtggaggtgcatttattacacaagttgctaattttgcaatcactaattcaaatatttatgataatagtgccccatatggtaatactttttatggaaaatatgggtatgatagtagttccaatattgatgctcgtaataattggtggggctctgttgatggacctgatgattccgtttggaatagtgcaaatagtaaatttaaaaattggttgaatgagaaagtaaattggcatgttcctcatgttagtggtggaagttctaataatgatgagtctggtattggaaatcaaaataatggtgtaaattcatatattccatctagtgtatcaactggttcgggggtccatacaggttcaacattaacaaacaatgttaaatcttctggtgcttcttcaaaagggttctcattcactggaaattggccttcaggaacagcaaatggttttaataatggtgggtctggtgaaggtaatgctgtcaattcaaaagataattctggaaatagtagaacttctattgcaggcaatgttaaaaatttgaatagtgttagtaaaatcaatagttctaatgttaataatcttttttcagtaggtatggatgcaaatgctgcagattcatcagctagttctgcttcatcatctcaagggggggctgatgagagtttttcaaatgcatacgaaataattaatgaagttaaaaaagaaaataatcaaaaattttcaatatttaatatattgcttattatagcttggattttctttgttgttggattttatagaaaatacaacgataatgaaaaagagatttaa

SEQ ID NO: 8304 - DNA, 5262 bp, Methanobrevibacter gottschalkii
  source 1..5262: mol_type = genomic DNA
atgaaatattctaagttatttttgatatcttttgtcttattgtttttcattgtaagtgctgttaatgctttagatgcatctgaaattactttgaatgcagataattctattgatgaaatatctaatgaagatatgggaatacttaatgaagtttcaccctcaaatgatataaaacatatttatgtaaacgatactggggatgattcaaacataggttcaattaatagtccttattcttcaataagcaaagcaattggtgatgttaattcgtctacaaatacaacgatatatttaagtaaaggaacttttggaaaaaataatgatactaattttcaatttacaaatgaaataaatacttattttgataattgtaatgtgacttttattggtgagggaactgataaaacatttatagatggtaaatcaacatataaattcatgactatactggaaatcactcctaatttagtttttaaagatattacatttgttaattttagaggacgggggagttctgtttttgaacttttggaagcaggaaatttaacaattgataattgtgtttttaaagattcatattctactagtaatggtgatacaatttcatcttcaaatagtggtgatttaaaaattattaattctcaatttattaattcaaatggtggaataattagtttattatatgaggatgtatctcccggaactctttatttagaaaataatacttttgtaaatattactaattctgaaaataatggaattgcagttactagtaattatgctaaagcagtgattaaaaataataaatttaataatatcacttgtattaatcaaaatcaagttaccctttatttagaagctcccgatgaaggtacacttgttttaactgataataattttgttaattgtgagtgtttaaatgaatattttatggctccagtatatttgtgggcatatgaagaatatgtaatatttgaaagaaatatattcttaaattctactggtgcttctggattcaatatattgcttaatggtagaatggataatttaaatattagtataggtgctgatgagattaatgttcataataatgaaattaatcatggtgtaaatattccaattaatataactgatgatgtaggaaacttagttttaattaatagtggaattcaacttaatcttataggtgataataacaattatactccatatttaagtttaaaaaataaaaaactcacatttgctactgttcctgagagtggcatttataatgtaactatcacatataatgatgggttatcaactactgaagtgttaactattataaaaattaatatctctagtagtcctgttaatatttgggtatctcctaaaggttcagattcaaataatggtagtgaagaaaacccatttaagacaattcagcatgcaatagatacgggatttgaaaaatcattcaatgtcataatatatttagatgaaggaatttattatggtgaaagtaatgttaatttaataattacgaataaaggtagtcttcaaattatcggaaaaaaatataataaaactattattgatggggaacattcaaattggtttttgagtgttgatacttgtgatgttgaagttaaaaatttaaaattcattaatggtgctggaaataaaaatttaatttctggttcaaatttacttaatcttaaagattgtattgtagatagtaatattgcttcaagaaattgttatgttttacatcaaacattatttgataatttaacttatacaaacaatactggtacaatttattataattataatagaaatattacaaaatcaaattttattaacaataaaaatatttatgattctactggtattatttatagttcttgggctcctataattattcttgattgtaaattcattaataatactgcattatatgattatggtgtaatatactctaataacaacattatgagtcttaataattactattatggaaataaagctaaaaattatggaatattctatgcttcgtcttattctagtaataaaatgattttaataaatgatacatatattaataatcacgtagatggatcatatggaattggaatttcaccatattcctctgtagtaaattgtaaatttattaataactctgctggtacagatgcgggcataggtagtataacaattacctgttcatttaaaaattgttcattcataaataacagtgctactaagggcggtgtttttgtattaaatgctgttcaacatgcattgggcactacttatgaagaacttatttcatttgacaatgtaacttttgaaaataataaagctagcatgggtgctgatatttatctgcctccaagaagttcaaattcctattactcatatacatatcctattgaattaacaattacctttgataatattactgttacttccttaactgataatttaactgctagtgtttatggagttaatggaataattgttggaggtgcaattcttgaattttatttaaacgagttatatattggttcttctcaaattgttaatagtaatgcaattttagaatatgatggttttagtaatggaaaagctattgttaatggaaatattattcatccttctgtaaaaaataatataaataatgcaacattagatattaaattagataatgtattaaatcatattgatttctgggtttcaaacataggtagtgatgaaaatggcgatggtagtaaaactaagccatttaaaacaattcaatatgctgttaataaagcatttgaaaattgtcgtgatattactatctatcttggagaagaaacatattctggtgagaataacactaatttaactatttcaagtgcaagtaatataacaataattggtaaaggaattggtaaaacaattataaatggtggtaatagcagttattttgtaaaaattctcataggcattaataaaattattattagtgatttgactattattaatatgactccagataatagatttgatcttccaattggttctacatcaccatcaggtatacatagtattattaaaagtggttccacatcaccaatcactgttgataagggagcaacattatatttaaataatgtaaatatcacagaatgtcgtggaggtaatgctataattgatggtgaaggaaacattttcattgataattccatattatataaaaatggagtttcaaagggcattattaaatgtgaaaatttagtaattaataattcaataattgataaacatttagttggaggttatccaataataggaacgaacattataataaataatactaaaattacagatgtatttaatattattagaaatggattttattttatctccaatgctaaaaatactactattgaaaatacatgtgttttaattaataattgggaaaatccattaaatatattggatattattgaatattatgatactcaaatatgtcctgcagcttgtattgcttcaactaatgcaataattaaaaattcatcatttaaaaatgaatttgaattagtgtatttatggcaatcaactactgattattcatatcataatgtttactcaggatctaatattgaagcagttaattcttcattcgaaggttatcaattcattatatattctagaatgcttcaaaatccaatatataagttcgatggatgtacatttaataatattgctaatttgatgattatgatgcaatctagaaattctatagtatctttttcaaattctgtaatgttcatatcaggcaataaaattgcaagtaataatgcatttaataactctttcctgtttaacaataattattggggtaataattcaaaacccgtaattccaaactctgtatctaatttccaaataccttctccagataattggattattttaatttctgaaggagaagaaccagtatttaagcttacagatgggaaaaatgtcactgagtatatatgtaatttgccagctaaaatatcttatgttgccgatgaaaatggtgaaatcattcctgttttaaatttaaacggtaatggatataaatttaatgtggatgaaaacggtaatgttgttcttaatatcagtgctccgatgaaaaatattgttcctaaagttccagttgatgaaactgtattcgcaaatgatattgaagttattgtaaactcttcttctaactttaaggctaaattcactaataaatggggcgattcattaaaaggtattaatgtttcattcatcattggtgaaaatattatcaatataattactaatgaaaatggtactgcaatattgcctgttgactttgatttaggagtatattttgttaaaattgttaatccagttactggtcaatttattttcaaaactattgatgtgatacttgaaaacacggttactgcaaacgatattattgtaaagtacaatgataaatctaaattctctgttatttttactgataaatttggaaatccgttaattaacactaatgtcaaatttaaagtaggaaagtatattattaatagaactactgatgaaaatggtattgcttcatttgttattaacttcaatgttggtaattatgctgtaaatactattaatccagttactaatcaaagtattgataaaataattactgttaataaaatagctactaaattaacttctcctaaattaactgtaacttataatgctggtaaatatttaactttaattttaaaagattttaatggaaaagcattgattaatcaaaaagtttctattaaaattaatggtaaagtttacactaaaattactaattctaaaggacgatctagtttaaaaattaatctccctgttaaaacatacattacaacattaacctatgcaggagatagaaatcatattaaatcctctgcaactactaaagttatagttaaaaaagcaactcctaaaatgactgctaaaaaagcaacttttaaattaaaaacaaaaactaagaaatattcaattattttaaaagataacaggtataaagttatgaaaaaagttaaagtatatcttaaagtaaaaggtaaaacttatagagcaataactaattccaaaggaaaagcaacctttaagattacaaaattaactaaaaaaggaaaatattcggctagaataaaatattcaggtaataaatactttaattcaataacaaaatatgtaaaaataacaattaaaagatag

SEQ ID NO: 8305 - DNA, 492 bp, Methanobrevibacter gottschalkii
  source 1..492: mol_type = genomic DNA
atgtctggaaaatctaagattaatgtttttaacaaaatgacaaaaactgctttggatgaagaaattagtgcttatgtggcttatcataggtactatcaaaggctaattgcagttaaaatagttagtgaaggaaatacaattcttgatgctgcaaagatattgggaaaatcctatcaaactgttcatagatggataaaaacttgtgaatctgaaggattggaaggtttaaaaccgtcttttggtggtggaagaccatcaaaattaacttatgatcaactgatggaattggataaaattattgaaaaaacaccaaacatgtcaatgaaagacgtacatattcttgttaatgaaaaattcaatgtaaattacagtttaaaacaaataggaaaaattgtaagaaaattaggttacaattatagcaaagcatgcccaaaattttcaaaatcccttgaagatgcagaagaacagttaaaaaaacttaaaagaacataa

SEQ ID NO: 8306 - DNA, 237 bp, Methanobrevibacter gottschalkii
  source 1..237: mol_type = genomic DNA
atgccacatgatcatttagcaattaatggaaattcaacaatcacaattacaaattcctcaacagcaccagaaatagtaatggtcattttagaattaagatgtgctaatacaaaaaataaaaattccacaaaatcattaaataaaataattgaagaagttaaactaacaaatgaagaaatatataaaattttaatggaaaataatgaaaataacatagttttcagagaaaaattataa

SEQ ID NO: 8307 - DNA, 1326 bp, Methanobrevibacter gottschalkii
  source 1..1326: mol_type = genomic DNA
ttgtttgaatcattgaaaaagaaattttcacgtacaagtgaaaagctagaagaagaacttattgaagaggctgaaaaagaggacaatcttcaagaagaagagggtaaaaagttttctttcttttcatttggaagtaaaaaagaaaatatggaagaagatgagtctaatttactttctgaagctgaagggactgtaggaaaagaaactgaaaatgaaattcccggaggagactctattgaagaggatgttgatgaaaaatcaggtttactttccagattgagaggttcatctgctaaagaaaatattgaagaaacttctgatgaagaaaaaatcattgaggaatcgcaagatgaggaaaaatctcacttctggagcaggaataaagacaatgaagataattctgttgatggtgaggctggtggtgggatattctcttttgttcgtgaaaaaaccattcaggaaaaacatgtggaggatatattatttgaactggaaatggagctcttacaaggtgatgttgcaatggaagtggctaatgaaattgtagaaagtgtaaaagaagaccttgtaggtaaaaaaatcaaaagaagtaatgatattactgaatacacatttttagctttaaaaaatgcagtatctgatatcatcagtattccaagtaagtctatgactgaaatgattgaagataaaaaagctgaaggggggccgttagttgtaatgtttgttggaataaatggtactggaaaaacaacaactattggtaaactggcgaatttctatatgaaaaaaggttatactcccgttattgctgcttcagatactttcagagcaggggctattgaacaagtgacatatcatgctgataatgttggcgttaaaataattaagcataaaaaaggttcagatccggcggctgttgcatatgatgctgttgaacacgcccgtgcacaaggaaaagaattagtcttaattgatactgctggtaggatgcagactaatactaatcttatggatgaaatgaaaaagattaagagagtttcaaaaccagatttagtaatatttgtaggtgatgctttaacaggtaatgatgcaaccgaacaagctaagaaattcaatgaagctattgatattgatggcgtaatattgaccaaagccgatgcggacagtaaaggaggagcctcactttcaatcggttatgtaattaaaaaaccaattctgttccttggtatgggtcagggatatgatgatatcatggaatatgattctgaatggatgttaaatcagttattcagtgataatgatgaatctgaaatcatagaggattaa

SEQ ID NO: 8308 - DNA, 1083 bp, Methanobrevibacter gottschalkii
  source 1..1083: mol_type = genomic DNA
atgaaaatcagtaagattaatttaatcttaagcgtggttttagctattttaattacaatggctacaactgcatcacttttatcaaatgctaacgattcattttcaaaagcagagccaaaagggaatgtttcaatagctatcacaggggatgttatgtttgctcgtaacatgccgggtgttttaagtgctgattcatctcctttttcaggtgtcagtaatgtaacttccaatgttgatttattactgattaattttgaaaatgcggccacttcttctgaaaatgcagttaagggtgatgttccacttaaatgtgacccgagatatgttccacttgcaaaggggaacaataacacaatagcttctcttgcaaataatcatgcatttgattatggtattgatggaatgaaggatacaattgaaaaccttaaaaatgcaggaataacgcccatcggtgctggtgaaaatgaaaaaacagcgcataatgcagtaactcaggaaattaatggtagaaatataaccatattaaattatatggattcggacaactttgcagaatattcttatgatgtaatgccttatgcaaatggttctaatcccggttactccgtatttgacctagcagatgcacaaaagcagattaaagaaaataatggctctgatttgattgtagtttatatgcactttggaaatgaatattcaaactctccaaatgacaatcaagttaaaattgcgcatgaattaatagattctggtgcagatgtggttttaggatctcaccctcatgtgactcagggaattgagatgtataatggaaaaccgatattttatagtttgggaaacttcatatttgaccaatcaaaccccgcaacgcactctgcttactttgttcaaattgatcttgtaaataatactggtgaatgcagtgtttatccaattgtaatttcgggatacctgccgcattatatggactcagatagcggtaattcattattaaatgaattgaatcctaatgctgatgaattagaagtttcaaatggtgttggtaaattaagatttaatttaacggaaggcgattcaaattaa

SEQ ID NO: 8309 - DNA, 1740 bp, Methanobrevibacter gottschalkii
  source 1..1740: mol_type = genomic DNA
atgatttcttgtgttagtgcaggcgatagtgagatgcaacaagtgaataatgatagtgttgactcagctaatcagtatgtggaaccagtgaagaatgcttcttttagtaaggttagtaatactaattatctaaaggattcaaatttcactgtaagtttaaaagatgaaaataatgaagtaattgtaaataaaacagtttatttcactattgatgatggattagtaataaatacaacaaccgacgggaaaggcagtgcaaaactattattgaatatctcaaaaggaacacacactgtcaaatacatatttaatgaaacgggatttactccatttaaatcttcaactaaagttcttgttattacaacatcaaattctaagataaaagcgtcagcttataaatcttacatcggctttaaaaaacattattcctatgctaaacatatcagctttaaaaatacatataagattacattgactgctgatggaattccgttatcaaataggattgttaaatttacaatcaacggaaaatcttatagtaaaaaaacagattcaaaaggagtggccagccttcctattggtttaaaggcaggcagatatcctattaaattttcatatgctggtgaaaaaaatattaaaaaagtcagtggaagctctattgtatatgtaattaagggcatgcctaaaaagataattaaagcaaattcactgacttataaaaataaagtttcagccccatttaaaataaaattagttaatgggcgaggaaacatacttaaaaataaaaaagtaacattcactcttgatggcagaacatatacaaaatacacggacaataatggtattgcaaccatataccttaaattaagttggggaactcatagtttaaaagtttcatcagccaagacttcttattataaatctgttttaaaaaaatattctatccatataaaatctaaggcggttaataacggactttggatgttcagttcggatatgaaaaaagcaaacttagcatcacttaaaaaggttggaacaaaacatattttcctttatgcaaaagcaattgatgtatggggcagatcggatgttgagaaatttatcaaaactgcatctggttatggtattaaggttcatctctggatgaaagtgtttaatgatgacaatgataaatggattaatccggttaaaaagggcaaaatcaactatggtctgataaaatcaaaaattaatcttgctaaagaatatgcgaaagtaaaaggggttgctggaattcattttgattatttgagatatcccggcaatgcttataaatattcaaatggtgtaaatgcaatcaattactttacaaaagctgcaactagtgcaattcatgcaattaattcaagattcattgtctcagcagcagtaatgccggaaccatcagatatgaaatattactatggtcaggatatttcaacaatgggcaagtgtttggatgtaatcattccaatgatttataaaggcaattataatgcgggatcttcctggattcaaaaaacgactctaaaatttgttaaaaaatcaggtcatgctaaaatatggtctggaattcagacttaccattctgataggtctccgataaagctgacttcatctgctttacttaaagatgctgatgcggcggctgcaggtggagcagatggggtaattttatttaggtatggtctaactaatttgattaactttaataagttatga

SEQ ID NO: 8310 - DNA, 1542 bp, Methanobrevibacter gottschalkii
  source 1..1542: mol_type = genomic DNA
atgatgaataaattaagtgtatttattgttataattatcatagcactatctatttcttcggtatgcgctggtgatagtgatcataataagacggacgattcaattcttggggaagctgatacgtcaacttcttcaaatattactcgcattggtgtgaattcaatatatgatgatggggtaaatgaaacaataaaaactaattcctcttttgtatcttctaacgtagtaacttatgaaaccttttcaaccaaaataactgtcagattattgtcgaataacaatccattaaatggaaaaaatattattatttctgtcggtaatgtttcatacaataaaaccactgatgctaatggtaaagttgttttaaatgttaaactcgcaaaaggaaagtataatgcaatgttttcttatggtggggatgaaaacattaatccttgtcaaaaaacaactactgtaattgttaaaactcccatcaaaacaaaaatttattgtgcagataaaaatattaattataggcaagatttaaagaataccttcattgtccgtttgattgatgggaatggaaaagctcttaaaagtcaaactgtaacttttaaagtcaatggtaagatgtatattgcaaaaaccgataaaaagggttatgctgaagtttgtttaaacttaaaaaaagggtctttcactgtcggattttcattttataaaaaatcaccgtattcacattctcacggatcttataaaataaaggtaaaagctccaattggaaaaggtaacgggtattggctttggccagctcatatgaaacatttgaatctcaaatccctttcaaaacttggaacaaaacatattttcttacatgtgcaggctatttcagtttatggaaaatcttctgttatttcttttgctaaaaaagcacacagatatgggattaaagttcatctgtggatgcaagtatgttgtattcgcggggataaatgggttcgtcctgttaacaaagatggttcatttaaatattcatttataaataaaaaagtcaaagaagcaatcagttatgctaaaatacccggcattgatggggttcacttggattatgtccgttttggcggaactgctcatttgtataaaacatctacacaatctataaattatattgttaaaaaaacaagtttgggaattcataaagttaaacctaattgcattgtttctgctgcagtcatgcccgaaatttcaaagatgatttcttggtatggtcaggatattcctacaatgggaaaatatttggatgtgattgttccaatggtttataaaggtaattttaatcaaaaaactgcttggattacaaaaattgtaagtaaatataaatcacaatcaaaaagtgctgtaatctggggcggtcttcagacataccactcagataataatgttaaaaaattgtcttattccgcactattgaaagatgcaaaatcctctaaagctggcggagctactggttctatactgtttagaattggactaactcattatttgaactttaaaaaagtttag

SEQ ID NO: 8311 - DNA, 378 bp, Methanobrevibacter gottschalkii
  source 1..378: mol_type = genomic DNA
atgaatgcattcgataaatttttaataggagacacatcatcaataaattggtgttttgaaaatcgccatttcctggacaggctgcaagataatggaatctccagacagtatgttgttgattgtctaatgaacgaagaaccaattaaatatgaacatattgacagcagcacttatgctgcagtatatgacgctccatcgaacaaggattataaagaaattcgaattttaatggctgttagtggaaactcgattgaccttgtaacgataatgagaaataatgaaacaacaaccgagcgccagaaaagacaataccagtcccaaaaacataaaaatatagaaaaaaagagattgaatgcaatttcaaaaagaaaatggtga

SEQ ID NO: 8312 - DNA, 1455 bp, Methanobrevibacter gottschalkii
  source 1..1455: mol_type = genomic DNA
atgtctgaacaaccgcaatgggattcatctatatcgtttatttttgcaatgattggagcggcagttggtcttggtaatatctggcgtttcagttatgtgctttattctaatggtgggggatcatttttcattccttatcttattgcaatagctattatggggattccttttttaattttagaatatggtgtgggattttcatttaaggaatctttttcaagtattatgagaaaaatcaagccggagtttgaagtgatcgcctggattttggtattatttgtatttgttgttacaatttattatctggtaattctaagttgggatctggtatatctatttagtagtttcacatttaattggggaacagatactgcatcttactttgtgaacactgttggcggaagctctgatttaactaatgcgaactttttattaattcctactacagtctgtgtgttattattatggatttcagtatggtttatatcacacagggatgttgatagtggtattggtcgggtatctaagattcttattcctgctctattcgttattatgggaattattattgtttatgcattaacacttcccggatctgtggttgggataaatgcccttatacatcctaactggaatggtcttttaaatgtaaatatctggcttgcggcatttgcgcagattatattttcattaagtatgggacaggctatagcaattacatatgccagttatttgcctaaaaactctaaattaattgataatgtactgattgttgtgtttgctaactctgcttttgaagtctgtactgcattcggggtattttcaatattgggttatatgtctttcataaatggaacgcccataactgacttaattactgaaggcactggtttagtatttattgtttttccaatgattttcaatattatggggtcagttggccgtattttagctccaatgttatttttagcaatattatttgcaggtattacttcagctttaggatattttgaaccaatgttgagttcaacttcagcaaaactaggatggtcccgtaaaaaagcggctagtgtactgtcaattattggttgtgcattttcagttcttctaacaactggaattagtagctatgtagttggtattattgattcatttgtaaatgaattcggcattctgcttttaattggtgtgcaatgtataatatttgcatgggtctatggtgttgaacactttttgccgcttttaaatgaatattcatcttttacagttggtaaaaaatggatttttgtaattaaatacttgctcccatttgttttaataattatgtgggttgtgggtattgtgcaactgtttacaactgcagatgtctttgagatagcaattgatttgataattatcgcttcagttttggtatctgctgttttcttaactaaactcaaaccaagtggggaatga

SEQ ID NO: 8313 - DNA, 222 bp, Methanobrevibacter gottschalkii
  source 1..222: mol_type = genomic DNA
atggtaagaaacaaacgtttaaatgcagtaatttcatttatacttccgggattaggtcaaatattaaatggtgatgaaaaaagaggaataaaattccttatcggaatggttgtactccatatagtgatttattatgctttaaataatgtagtgggaagcatgatttcaacactataccatgcatattctgcttatgatgcatacaaaacctgcgaaatgtag

SEQ ID NO: 8314 - DNA, 732 bp, Methanobrevibacter gottschalkii
  source 1..732: mol_type = genomic DNA
atgcaaaatactagtaagtattttaatttaagtgatatgatggttgaatattttaattttgaaaataaagaacgtgacattccatattataatcataatccaagactcacaaagcacgcttggattgtgttactctccagtgtattaatatcattcatattctatgccctttttgaagatgtatctgaattttttgcaagttttatattctgtgctattttactcgttcctttaatgtattattccgactgggatttctccctaatatttcacaggccgacaaaaagtgaaattaaacttgcattaattctttttattggttatttaatttatgcaataatactggggggagttatagaagcacttttaagcattactacaacaaccagcgaacttacagttaatgcagaatcattaatttcgcttgtattttcaatgatggctgaagaattaattaaattcataccatttgtatttataatgagattagtttataaaagtaccagcaatcgtaaattatcaattataacatccacatttatcgttttaatattttttggacttctccactatgattttgaaacatcaattatttcagtgctgttacttcagggacttggatcattatttgagctttatggatacattaaaactaaaaacttatttgtaccctatttaagtcatcttctaacagatgccgtgatttttatattaatattatttggattgtga

SEQ ID NO: 8315 - DNA, 435 bp, Methanobrevibacter gottschalkii
  source 1..435: mol_type = genomic DNA
ttgaataaaaaaattataggtgtattattagttttaatagctgctgttgcttttggttcagttgtttatgctgctgaaactgtaactattggaggatttgattttaatgttccggacggttttacagaagataaaagtcatgaaatcgtaaacatggaaaaagagcaaggtggaatcaaatacattaacaatggtaaattatttgaaaatgacaaaggggatgttgtaaatattcttgttgcaaaatatgatggtcataaagtaaccaataaaattgcaaagggtattgctgatgaacctaaaacaattggtggtgtagatggttacatagtacataatggtacttttacatcatttgattatgcaaaagaaggtaaattagtagtaattactaccaataatgaagatgcaattgaaggatttattatagaataa

SEQ ID NO: 8316 - DNA, 627 bp, Methanobrevibacter gottschalkii
  source 1..627: mol_type = genomic DNA
ttgaataaaaaaataattattgcagctattattgttgttattatagctgttgtggcaggttttatgcttacatcatcaaatagtcaggacaatagtaaaataaccattatgggtaatggatccattcatgaaaatggcactattggaattaaattgacaaatggtgaaaacacagctttaaaaaataaaactgtccatgtttgcgttaaagactcagaaggtaaaatcgtagttgataaaactgctaaaacatatgttaatggtgttgttggagttagattgacaaatgtgagtgctggagaatatgatgttaatgtaacatttgaaggtgatgaaaattacacttcaagtagtgtatctcaaaaattaaaaatcattgcaggagaaagtgatgatgatccaacatatcctgtcgacgaggatacggtaaccactactgctgatgcaagtagtactcagtcaagtcaatcctcatctcaaagccaatcttacacaccaagtagaagtaatgattatggtggtagtagtagcagtgatgatgatggtggtttggatgctgactatgatgaaaatggtaatgaaatgttgcctacagtagatgaagaaggaaatgaagtttcaaattaa

SEQ ID NO: 8317 - DNA, 477 bp, Methanobrevibacter gottschalkii
  source 1..477: mol_type = genomic DNA
atgagtttcaataaaaaaacaataataatatttttaattttaattagtgctttcttaatcattggaagcgtttgtgcagaaaatttaaaggattttaaagcaacaaaaatgcttaaaaaattaaccaaacaaaaaacactaactgttaaaatttataactttaaacctggtgttttatgggctccaaaagcaataaaacttaaaaacggcgacgcaattgcaggctatgttgaatataaaggaaacatgcaatttgaaaaaggtactgggataacttcctggtatatcggatctggtcttgatggagacatagaaccacaccacacaaaacttattaaagcaaaattcttctttaaaaacaaaaaaggaaaagtaaaaacaaaaacagttaaaggaaatggtggtggacatatttctacttcactaataaaagggtatgtaccatataaagctaaggtttcttataaaacatattaa

SEQ ID NO: 8318 - DNA, 1686 bp, Methanobrevibacter gottschalkii
  source 1..1686: mol_type = genomic DNA
atgaattttgaaaagtccattggtgctcatgtcatattctttgatgggaactattgtgttaaggggtataatgatagttttgcaaatttttttgacattgaagaggatttgacaggaaaacatattgatgatttagaaatgcctgctgattttgcggatttcattctttctggggaagaggaaattgaattatcattaaatgttaaaaatcgctggattgatgtaaagaaagagacaattaatactaatggtgctttaattggtcatttctttattctggaagatgtaactgatcaaataattaataatcaggaattaattgcacttaattctgttattggggatgtacaggatgtcatgtccatgtcaattcattttaaagatgctgaaggtaaatatcattggactcctgagacttatgctttaattgaccgtgaacctaggcttggagatgaaaataataatatttttgattctataactgttcaaaatttggataacattgcagataatcgtcccaacatcgatgatgatgtttatgtggaagattttacaattattactgaatcaggtaaaactaaatatctgagaggcactgcccacaatgtttttgatgatgagggtaattttctccgtcttatcatgactgcacaagatcttacaaaagaacatttgcaagaggcaaacctaaaaattttagatagtttaatgtctgatagtaattatcaacttggtgttggtagttatgttcatgagataggcagtgattatttttgtatttcgaaggaggcagttgatattgctgaacttaatgaaaatgaagattcacacatgcagttaaaaagccttagtggaaattttgttgattcggatgcctttaaaaaagaagtgggcaaattaatatcaggtgaattggataaaattgacaatgtgtgggaatacaaatcaccaaaaacaggccaaatcaaaaaattacatgtaattaattctataaaagtcgttggtgggcgaatattttcatttggtggaataaaagatgttacaagtgaaatggaaaaacaagagaaactgaagcatcataatatggaactggaaatgctcatacgtgaaagcaaccataggataaaaaataatttaaatctgctacttagattcatatctcttgaaaaaaggtttaataagaataatcctgagaagattattgaaaatactgttggaagaatcgaatcattttccttacttcatgaaaaaatttataatgtggacaattttaaggatattaatgttgaagaatacttgaattctttaattagcgggttgtattctatatttggtgatgacggcagtattaattataattcaaacaataatgaacttatattgaacagtgaaatacttgttccattatctttgataatcactgaacttgttattaattcaatcaaatatggttatgttgattatgagttggataataaagcaattaatgtctctgttgataaatttgataataaattaatattgcattactctgataatggtaagggattgcctaaagactttaaccctcataaaagtattggtcttggttggagaattattaattctttaatcagtcagttagaaggggaatatgaagtatttaatgatgatggaatgcattttaaattaacatttaatatttaa

SEQ ID NO: 8319 - DNA, 429 bp, Methanobrevibacter gottschalkii
  source 1..429: mol_type = genomic DNA
atggatgctgctaaatataacatcgaggaaaatgttatgaaaacattaaatgtcgttgcagcaattattaaaaaagataataaaattttagcaaccaaaaggggttatggtgaattcactgatatgtgggagtttccaggtggaaaaatagaaaataatgaaacaaaagaggaagctattataagagaaatcaaagaagaacttgactgtgttattgaacctacaaaatttgccttggacttagaatatcaatatcctactttttatcttaaaatgagttgttttgaagctataattaaagaaggaactccaaaactcatagaacacaatgatgcgaaatggttaactaaacaagaattggattcaattaactggattccagcagatattcagataattgactatttaaaagaaacaatgagggattaa

SEQ ID NO: 8320 - DNA, 150 bp, Methanobrevibacter gottschalkii
  source 1..150: mol_type = genomic DNA
atgattgataaaagattggaacttgcaaaaaataaaaaagttgaattagagcttaaacttaaaaaagttaaaggaactccaagagaagaagattttaaactccaaattgaaaaactagaacagttaattgaacatcttcaaaaagagtag

SEQ ID NO: 8321 - DNA, 2958 bp, Methanobrevibacter gottschalkii
  source 1..2958: mol_type = genomic DNA
atgaatatggatgaaatcttaaatggtgcaagaactgcttttattgatgaaaaactggattccagcctagatttcagaccaaaactattgcataatggcaaagaaacaaaagtcattaattcaattcgtgatgaacttcaaaattgtgatgaatttataatatcctcagctttcatcacattaagtggtttgactccccttttagaagagtttaggaacttggagcaaaaaaatatcaaaggtaagattctcacaactgattatttaaattttacagaaccaaaagctttaagaaaacttcaacaattcggtaatattgaagttaagatttacagtcaggaaaaagaaggttttcacactaaaggatatatttttaagaaagatgatgtttataagggtattgttggaagctctaatttaacaatgaatgcattatctgtaaataaggagtggaatgttgaatttacttctctaaaagaaggtgaaatgttatctgaaattaaaagcgaatttttcgcattatggagggaagctgatgatttaaacaatgttcttccagaatatgaaaaaatttacaatgacaataaacgtttcactgatttaaggaaaattacagctgaaattaaaaagaaaaatatcacattaactccaaatattatgcaggaacagtttattgaaaacttaagaaaactcatcaaacaaggtgaaaagagagctattttggtatcagcaacaggaactggtaaaacatatgcatctgcttttgcagtaaatgattttaatcctaaaaaacttttatttttagttcacagggaacaaattgcaaaacaatcaattaatgcttataaaaatgtctttaaagatcatgaaaatttcggattgttgtctggaaattccaaagattatgataaaaattatcttttctcaacaattcagacaatgtcaaaagatgatgtgtttagaagatatgataaaaatcattttgactatattattattgatgaggttcacaaagccggtgcattaagttatcaaaagattttccaatattttgagcctaaattctggctggggatgactgcatcacctgagaggactgatggatttaacatctatgatctgtttgataataatattgcccatgaaattagacttcaggaagctctagaagaggatttgttatgtccatttcattactttgggattgctgatgttgagttttgtgatggtgaaattgatgattcttttgaagactttaatttacttgcatctgataaacgtgttgattatctgatagaaaaatcagagttttatggatattctggcgatagaagaaaagcattggtattttgttctagaaaaaaagaagcagaattattgtcagatgaatttaataggagaggttataactctactgtattaacaggggatgattcacaggagaaaaggattgaagctattgatagattaactaatgatgaaaatccggataagttggaatttattttcactgtggatattttcaatgaaggagttgatattcctgaaattaatcaggtattgcttgttaggccaactgaatctccaattattttcatacagcaacttggaagaggtcttaggaaatatgaaaataaggaatatgttgttataattgattttattggtaattataagaataatttcatgattcccattgcactttcaggagatagatcgtatgataaggataaaattcgtaaatacttaatggaaggaaataaaattattcccggtgcttcttcaattaattttgatgaaatttccagaaaacgtatatatgagtcaattaataattcttctttttcaaaaattggcgtatttaaagaaaaatacaataatttaaaatataagttaggtcgtattccttcattgcatgattttgcaattaacggcgaatttaatcctgaacttatcttaaatcactccagatttgattcatatcataattttttagattatgttgataatgattataattcaacactaagcgatgcagaagttgcatctcttaaattcatttccaaaaagttaataaaaggaataaggcctcatgaacttgttattttaagttgtcttaaatttaataattatttcactgttaatcaaattgaaaagtatttaaatgagaaatatggtctttcaaatcaatttaaatctattaggaatgctattaattatttaagtatgaatttttacagaaaagagacaagtgatgattatcaagccaatactgtcactagttttgtttcaaaagaaaaaatcattgattatgaggacattttctttaactttgatgaagaaatctataatgatttagaaaataataaagattttaaatttgagatttcacattatttcaaatcttgtttaatcaatccagtttatttaaatcattttgaagatgctgtaaaatatgcgatatttaaatatgctcaagtttacaaaagcaatgataaatttagattatatgagaaatactcaagagaagacgttttaagacttttaaattgggaaagattcatgaatgctcaaaatattggaggatataaagtcaaatacaacacttgtccaatttttgtaacttatgataaaaaagatgatatttcagaaactattaattatgaagatcaatttttatcaaaacaactctttagctggatgagtagaaacaatagaaaaatatcaagttcggaactagagccaattgttaactacacagatttggatattgagttatttatccagaaaagtaatgatgaaggcattgaattttattatgttggtaagctaacaccattagaacatgatcagctttatcgtgaaattgaaggtaaacaacatccaattgttaattttaaatttaaaattagtcctgaagttaaagatgaactttacagttattttataaatgattaa

SEQ ID NO: 8322 - DNA, 1182 bp, Methanobrevibacter gottschalkii
  source 1..1182: mol_type = genomic DNA
atggcaagtttaccattaggaaatgacaatgatttagatgacacacagttctataatagagtagaggagatttcattcatatgtgataatttagaactaactaaaaaaggatcaactccaacaatactgcttacaggcattagaggagtaggtaaaactgcattaatgaaaaaattaaaaaaagattttcaaaatgattatttagttgtttatatggacttatcagcaatggataaatttaaaaaaaacgaactaacccgttttagctttatgaaattattttacgagtctattatcaaagcattaaggcattcaaatatcataactattgatacacagattttaaaatattttaaaacacgcaattttaaattagataaactaaaatcagttgataaaattcccatccctattcttaaatcagaagaggattatgcaaaattcactacttttgtaatggatttgccccaacagatatatgatgattgcaaagatcatattgatggtgttttaatatttatggacgaatttcaaatgttaaaacaacttgatgaagatgttaacggatttttatggtacatcagaagtgttattcaatcacaaaaacatattggttatattttttccggaagcatgagcgttaaagatgaattgattgcagatattgcaggtcaaaaaggagcttttggaggtagaatattaaattatgaacttaagacattcccatttaatacaacagaaaattatttaaaagaaaaagcaaactatcttaaatttactgatgatgggattgaaaggttttataaatgtacaaatggaattccatattatgttaatagttttgcaagattattacctcctaatgaagaattaaatgaaaaaaaaataatttctgaatttaaaaaagccttaccttatttattgattcatttgaccaatgaatggtataaactaaataatcaagaacaaagaattatcactgctcttgttgaaaaaccattgaaaagaattgaaatagcaaataaattaggagtaacaagtggagccattggtgcttccctaaaatcattgcaaaataaaactttaatagaattagataaagatggttatatgatatatgattctattttcaaagcatggctaaaaaaggaatacgaagaaaaaggaaattatccatattaa

SEQ ID NO: 8323 - DNA, 939 bp, Methanobrevibacter gottschalkii
  source 1..939: mol_type = genomic DNA
atggataggaaatatctgcgggaaaataaaaattcttttaatatagttaaaaattctaaaatttatgcaaaaataactgcatatgaagatactatttttattagggatttattgatcaaatatgattggaatttggataaaatgccatctattattaaaaacgaagaaaagtatttggttttagccgtaattgatgaaaaattacggttacttgcgaaatacaatactcgacctgattctcaagtaataacaaagcttattagaaaattcaaaagaaatccaaataattcagcatatggtttaaatattacaaaagtatttgatacatatgtaattaaaaagcagattgcaggtgatgagtatatatttggatattatgataatttagatgatgctcaatttgttagaaatattctgttggataataattgggatgtaaacatatttaatgaaatagaatttgatgatgaaacacttaattacagagttattagtgtaattgatagcaatgtttatgttttaggcaattttaaagctaaagatgaaatcgatattaaaaagattcgtgaggaatttttagccaaaatatcaaagcataaatatggtcttgcaagttatcctcacttggatcttctaaaagataaaatctctgaattggaagaaaaattcaatgtcaaaacaaaggatgggatatggtcatttgagaatatcagtgaaaatgaatccgttttgaatcaaattatttttaatttaactccatttcaacaagctgtttttgatgcaatagataaaaatacatcttacgatcaaattaaaaaatcattaatcagatataattctaaaaattttgataaaaagatattgagaaatttagatggtttaattgaattaaagctcatagaaaaaatagatgatggttattctaaaacaaatttataa

SEQ ID NO: 8324 - DNA, 189 bp, Methanobrevibacter gottschalkii
  source 1..189: mol_type = genomic DNA
atgcccgtaattacaatagctggaaataaaggaataactatagaaaagaaaagagaaatggtcaaaaaagtatctgaagtagtatctgaagcatatggtctgccaatagaagcaataaccgtattaattcaagaatatgactttgatgatattggagttgctggtgaattgttaagtgacagaaaataa

SEQ ID NO: 8325 - DNA, 459 bp, Methanobrevibacter gottschalkii
  source 1..459: mol_type = genomic DNA
atgcttggtgaaagagaacttgttaagttatttccagacttcgctgatttagtacagccttctggaattgatttggaattagataagatatatacacaagaaagcggcgggtctttaattgataatgaaaaaaacttgcccgaaattaaagaaatggatggaggcatctacactttaaaaccacatactgcatatcttgcaagtattaaaaggaaaattaaaattccaaaaggatatgccatgctttatcttccaagatcaacacttcttagatcttttgtttctgttcaaacagcagtaggtgatcccggattttatgggactctcatgttcatgatttacaatcatggggactatgaatataaaatcaaatcaggggatagaatcgctcaggctgttgtatttcctgttgttggttctggtgaatataatggatcttatcaggaggtggaagagtga

SEQ ID NO: 8326 - DNA, 1536 bp, Methanobrevibacter gottschalkii
  source 1..1536: mol_type = genomic DNA
gtgaatgtagcagataatattgttaaaattcttgaagaagaaggaatagaaaatatcttcgggatacctggcgagcagataatgccagtttataaagcattatctgaatctaacattaatcacattttaacaaggcatgaacaggcagcagctcatgcagctgatggatattataggtcaagtggcaagattggtgtctgtattgcaactgcatctcccggtgctttgaactttacaatggcagttgctactgcgtttaaagataatgtcccattacttatattgacgggggataatgaattaaaatacagggggtctgatcattttcaatccactcctcaagtagatatttttaaaaacataactcgggcatcttacaatcctttaaatggaactgaggcaatgtatgttttaagggcagctatttatgagcttaaaaccattccaaaagggccaattcatattaacttatcaaaagatatattgcttcaggaagatttcgatgattttgagttatgttatttatgtgaggaggatttgtcaaatatatctaaagctcaagagttaataaatgcatcagaaaaacctttgcttatattaggtgcaggtgcaatttcacaaaaagaaaacattgaaatgcttgcacatatgtatcaaatcccagtcactacaacatttcacgcaaaaggaattatctcagaagaagatgagataaatttgggtattatagggatacgttccacaccaaggtcaaaatatgcaattgaaaatgcagattgtgttattgcgttaggtataaaagcatcagaaaggactttacccgaaatcccaaagaatttgattcatgtaaatattaataaagatgttttaattggtaattgtccaattcagggaaaggttgaagattttttacttaaaattagctttaaaaaagctgaatggttatgtgaaattttagagattaataataaaatcgaaatcgaaggtttggatgtagattttaaacctcaagcatctattaaacgaattttagacaaatttaatgataatatcattgcagcggatgcaggttcacacactacttggacaacacttcttaaaaaatctttaaaaccgggccaattattgttttcaggatctatggctccaatggggtatggtcttccagcagctattggtgctgcaattgcaacagatgaaaagataatagtaatcaatggagatggggatttccatatgaatcttcaggaattggctactattcgcgaaaataacttgaatataattatattcattttaaataattcagaatatgggattatacggcaatggcaggaatccatatatggcatgaaaccataccaagttaaattaaataatcctgactttacaaaattagcttcaagttatggaattgatgctattaaggtagataatttagctgatttggaactaattctagaaaaagagttaacaggaccccttgtagttgaagtaattgtagaaagtgaggacattccattacctaaaaattaa

SEQ ID NO: 8327 - DNA, 258 bp, Methanobrevibacter gottschalkii
  source 1..258: mol_type = genomic DNA
atgaaagaaaatatcaaaagtttcattctagatattgcaaacattaaagaaattattgaatatgatttttatgaaacctgcggttttacattcgtgtttaaaagtgaatttctcaaagtaaaaaatcaaataaattctgcaaccattgcacctattggaataatttattatgaaaatgaagaatattattttgccccgttagccaatgatgttaatgttgacatcattgtcaaaaattatttgaaatttaaaaattga

SEQ ID NO: 8328 - DNA, 558 bp, Methanobrevibacter gottschalkii
  source 1..558: mol_type = genomic DNA
atgattattttaataatcttcttttccattattgttttactctattttggtgttaaaatatcacttatttatgataaaacagacagtaaacttgaaggatgtttacaaatatcaattttaagaaaaattaaaatatacacattaaacctctcatcattaaacaaagataaaaaaaatgatgaaaatgaaaaaaaaacaaataacgatataaaacaactatttaaactacttaaaccttgttttggaccttttaaactatttttaaaatcatttatgaaatgtattaaagttcaaaatcttgaaaatcatctcatttttggcatggactcatacacagatacggcaaaatatattggatacatttggagtttcatcataattataaattcttctcataaaaatgcaaaactaagtgctgaaccttcatttaatggaattgtttttgatgtaaatggcattaatgaacttgagataaatatcttaaaattaatccccccagttttgagattaatttctaaaaaagaagtaaggacattaatcaaagaggttaaaaaatga

SEQ ID NO: 8329 - DNA, 405 bp, Methanobrevibacter gottschalkii
  source 1..405: mol_type = genomic DNA
atgtctgaaaatataaaaacaacagtagaagaattacgtaaacttattaatgtagaaaatgttgttggacaacctattgaaaccgaagacaaacttctaatacctgtaatgagaatgggcgttggatttggcgttggggaaaatatcttaggtgctgacaaaggtgatgccgcaggtgctggcgctggagttgaaccaatttccatggtagtaattcctaagaaaggaaatgattctgaaggagttcgtgtgctcaacttaagtaaaggaaatcaaaccaacaaagcattatccgatctaggtttattaataagtgatttagtcaaaaattatattaataatgatgaaaaaattgacgaatcagaatacattgaaccagaatttaccactgctgatgatgaataa

SEQ ID NO: 8330 - DNA, 1143 bp, Methanobrevibacter gottschalkii
  source 1..1143: mol_type = genomic DNA
atgaacgaaactttattaatgcttccaggtccaactacagtacatcctagagtgcttgctgcaatgtctagagctgttgttaaccatagaggagctaaatatggagaaattttatcagaaactaataaattaatggctgatgttttccaaacctctaatgatgcatatttattaacaggatctggaactgcagctatggaagcaggtatcagtaataccgttgcttctggtgaaaaaatgctcaacattgtgggaggaaaattcggtgaacgtttcatgaaaatcgctcagacccatggaattgatgcgcaagaattagcagtagaatggggaactgctgtaactcctgaagcaattaaagaagctttagatgcagatgaagatattaaagcagtatctgtaattcacaacgaaacttctactggagtagctgcacctattgaggaaattggtaaagtaatgaaaaattacgatgcattatacatcgtagatactgtatcttcccttggaggagattatgtagatgtggacaaatttggaatcgatgtctgcgtaactggttctcaaaaatgtattgccgcaccacctggaatggccgccattactttaagtgatgatgcctgggctgctgcagataaaattgactcacctacattctacttagatatgaaagctgcaagaaaaagtggaaacaaagttccacctcaaactccatacactcctgccgtatcattaacctatgcaatgaacgaagcattgaatatggttatggaagaaggacttgaagctagagttgcacgtcatcataaagctgctgaagctagtgtagcagctgttaaagcattaggtttagaattatttgctgatgaagcagtatcatctgcaactgtaactgccgtaaaaatgcctgaaggaatcagtgatgatcaattcagaggaaccacccgtgataaatatggtgtagaattagccggtggacaggatcatctaaaaggaaacatcttcagaatcggacacatgggaaacatttcttacaaagaactaactcaagcgtttgctgctatcggtatgaccttaaaaggtttaggtgtaattgaagatgctggtgctggtgtagcatccatcgcagaatcatatttatga

SEQ ID NO: 8331 - DNA, 675 bp, Methanobrevibacter gottschalkii
  source 1..675: mol_type = genomic DNA
atgaattttttcagttggggtaaaataaatttcaaaagaatgttcagatatgctgttggtctgtttgtcatgaacattggaattgcattatcaatcaaatccaatttaggttcaactcctgttgtggcagtgccttatgctattagtttaataacttcagttgatctcggttattgcaacatgatatttcaaggttttttagttttagtggagttaattcttcttggaagagcatttaaaccaaaacatttcttacaatttttcgttggagtaatattcggaatatttacttcactttcaatgtttatattgagttttttgcctcttgctaatagtttaacctttcagattattttcttaatttcaggcattgttctcttggcatttggtttattcttatatgttccaatgaatgctgttccagtttccgttgatggtgtaacacaagcattagctattttaactaatcaatcatttgcaaaaaccaaaattatttttgatatatctatgataagcatctcattgattgtattattcaccttcaccggacatattaatgggagtgtgggtattgtaactataattgccgcagtctcaattggagcaactgtgaaattaattaatattgtttatgctaagatatctggaaatgaagctgatttaaagaaaatgtag

SEQ ID NO: 8332 - DNA, 651 bp, Methanobrevibacter gottschalkii
  source 1..651: mol_type = genomic DNA
atgtgggttaaaagaatattgtcatttgttattggtttattaataatgtcattcggtgttgcattttcaattgtgtcacttcttggaacaactcctataagttctatttcttattcgctggcattaattaccaatatcgatattggaattacaacattcatattcaatgcagcattaattgttatgcaattattaatcttaagatcaaaattccataaaaaaagattgcttcaattgattaactgtgtgttattcggatactttaccgatgtagcactttactttgttgcatttattccatttgactcatcattatggatgtctgttttattcttgctcataagtatctttttaactgcatttggaatattcatttacatgccggctaatatcgcaccacttccaggtgaaggatgtgttgaggcaattgcaattgttactggatggagattttcaactataaaaattggttttgatgcttcaatggttgtgatgtcattaataatgtgcggattatggtatacagatatgtttggtgcagtttacattggaacaattatctcagccatcatggttggttttactttaagacaaattaataatatatatgctcacattactggagctcaaattaatgttgtaaataaataa

SEQ ID NO: 8333 - DNA, 720 bp, Methanobrevibacter gottschalkii
  source 1..720: mol_type = genomic DNA
atggaattcggactctgggaaaaatattataaagacataattgaggattttggattttcaagaagtggtgatgagaaatcagcaaaattactcgatgaaattttatcaacagaaggctgccttacattagatgatttatcacaaattgtaggtttttcagataaattcattgtatttggagcaggaccatctctaaaaaatcatgttttaatgttaaaggaaaatcatgatttaaaagattatgttttggttgcagctgatggtgcaacaaccgctttaattgaagagaaaatctctccagatattgtgtgcacggatttagatggaaatgttgatgatatacttcttgcaaatcttagaggggcaaacatggtaatccatgctcatggagataatattgataaagtagctacactgtcctcacttttcagcaatgtccttggaactacacaagcacagcctatagggaatctttacaactttgggggatttactgatggggatagagcattattcctttcagttgcacttggggcatctgaaattatacttgcgggaatggatttcggagataaagtaactaaatattcaagaccggaccttgaagttaaagttgagggtgctgatgaatttaaacgtaaaaaattattgtatgctgaaaaattcactaattggataactgaaaatgaaccagttaatgtgataaacttattagaataa

SEQ ID NO: 8334 - DNA, 1110 bp, Methanobrevibacter gottschalkii
  source 1..1110: mol_type = genomic DNA
atgggaatcgaagatattttaatgcatgatgaaagtctttttcaaaatataaatgcttttgatccagattatgtacctcaagactacaatttcagagatacacaaatggaagcaatggcaatatcaataaggcctgcaatgattggtggtcaaccgtcaaatgctattgttttaggttcacctgcaaccggaaaaacaacagctataagaaaggtatttgaacttgtcgaaaaaagcacagaaaaggttgtttgtgtttatattaactgccagcttcacacaactcgttttggaatattctcacaaatttataaaaagatatttggacatattccacctgaaactggagttccattctcaagaatttatgatcaaatcatgcagaatcttcagaagaataataaatctcttgttattgccttagatgatgtcaattatttattccaatcaaaaacagctaataaagtattttatgacatgcttagggcatatgaagaatatcctggagttaaaacagctatttttgcaattttgtctgatttggaatttaaatatgcatttgataaaaatgtaaactcagtttttattccgcaggaaattaatttccccctatatacttactcagaaattgaggatatattaaaaaatagggcaaaagcaggtttttttccaaatgtactgcctgaggatatattggagcaaattgcaatgtatacttatgaaaatggagatttaagaattgggattaatcttttaaaatcttgcggtaatttcgcagaagcaagtgctagtcgtgaagtaacacaagaacattttgaacaggctattgattcattagtttcaattaatattcgtgaaacattaaattcactaaacgatatggaaaaagatcttctaaaagtaattagtggttgggaaggtgtttgcaaagctggtgaattggctgaaatgtatagggaaaaaacaaattccagttatgcttcttttaaccgtacattggataaattagaatttgtaagattaattgatacgaaatttacaggaaaaggggttagaggaaattctagagaaattatattgcgttttaaccccgacgaataccttatttaa

SEQ ID NO: 8335 - DNA, 180 bp, Methanobrevibacter gottschalkii
  source 1..180: mol_type = genomic DNA
atgttcgaaaataatgacaccacaattcaagtagatttaaggaaaaaaaatagtttaaaagaagaaatcatgtataaaaatatcgatgttcaatcttgcatggtaatgcttgtagtaatagcagcattacttttatctgttatttctgttgtagcagcccaaaatccatacattatctaa

SEQ ID NO: 8336 - DNA, 414 bp, Methanobrevibacter gottschalkii
  source 1..414: mol_type = genomic DNA
atgaaaaaatttgaatattttgaagtaactgcggatattggttttaaagcttatggaaaaaacttaaatgaagcttttgaaaatgcaggtttagctatttttaatataatttcagatacaaattatataaatccgacaaaagaaatatcatttgaaataacctcagaagataatgtatctatgttgtatgattatttggaagaattattgttctatcatgaagtggaattcatgttattttctgaatttagtgttgaaatttcagaaggattctcattaaaagcaacaataatgggtgaagaaattgattgggataaacacgagaggaaatctgaaattaaagcgataaccttccataagatggaagttttagagaccaatcccgtaaaactccaagctattgttgatttataa

SEQ ID NO: 8337 - DNA, 321 bp, Methanobrevibacter gottschalkii
  source 1..321: mol_type = genomic DNA
atgaaaagaactagaatcgtatcaagaaattttgaaatggtacttggtattataggatcaattattgggtcattctctggttctattttattatttttaggaaccttttataatgtccctactccttttttaggttttgtagctataattgcgtcctttttaggattagcttcaagtgtttatgtcaaaaaggatactgaaattgctggtgtaggattcataatcgcaactatgtttgttattgtcggatctgaatatattaatataataagtgcaatttttttacttgttgcaggtgtatccgcattatttaggaaataa

SEQ ID NO: 8338 - DNA, 1449 bp, Methanobrevibacter gottschalkii
  source 1..1449: mol_type = genomic DNA
atgagtattaaagatgaaattaaaaaaattaaagataatgtttatgagattccgggatcttttaataaaaaaatgagggcttctggaaggttttatattgctgatgaatattttgatgaacttgaagagggagctgttgaacaaattgtcaatgtagcttgccttccgggtgttcaaagatattccattggtcttcctgatatccattttggttatggatttccaattggtggtgttgcagcattttcattaagaaatggaatcgtatcacctggaggagttggatttgatattaactgtggagttagattaattaaatccaatttaactattgatgatattgatggcaaattagatgagcttacagaaaaattatttaaaaacattccttctggtgttggaagtaaaggtaaaataagattggaagagaatgaaatcaacgatgtacttgactatggtgctgaatgggctgttaataatggatatggatggcctgaagatttggaagttctggaagaaaatggaagaatggttgatgctgattcaagtatcgtatctgaaaaagctaaaaaaagaggaattccacaattaggttctcttggttcaggcaatcacttcttagaagttcaaattgttgatgagatttacaatgaagaggtggctaaagtattcggacttgaaaaaggaatgattgtagtcatgattcactcaggttctagaggatgcggtcaccaggtatgttcagattacttaagagtaatggataaagcttataaaaaatacaaagttaacattgatgatagacaattagcctgcgcaccacttgattcaaaagaagcacaagaatatatccaagcaatggcagcggctgctaattatgcatgggcaaataggcaaatgatgactcattgggttcgtgaaaccttcgaagaagtacttggaaaatctgcaaaagaaatggaaatggatattgtctatgatgtagctcataatattgcaaaaatggaaactcacaaaatttacaaccgtgaagaagaagtattagttcacagaaaaggtgcaactcgcgcattcggacctggatgtgaagaagtgcctgaaaaatacagggcggttggtcagccagtattaattcccggaacaatgggtactgcgtcatacattttacacggaactgatgttgcaatggaagaaacatttggttcaactgctcatggcgctggaagaatactttcaagatctaaagctaaaaaagattacaatgcggatgaaattactgaagatttagaatcaaaaggtattaaaattaaagctactagtaaaaatgtaattgcagaagaagcgcctggagcttataaagacgtggatagtgtagttagggtgtctgatgaaacaggcattgctaaattagtagctaaagttaaaccgctctcagtttgcaaaggatga

SEQ ID NO: 8339 - DNA, 759 bp, Methanobrevibacter gottschalkii
  source 1..759: mol_type = genomic DNA
atgattggaattattgggggtagtggagtatatgaaattactcaaaaagctgattcatgctcaaaaaaagtagtaaaaaccgattatggtgaagttacagtttcaattttagaaattttttccaaaaaaattgcttttattccgcgtcatgctcaaggtcactcaattccaccacataagattaattatagggcaaacattgatgcattaagaaatgtgggggttactcagataatagctaccaactccgttggatcaatgaatattgatatggctccgggttcattcgttgttccaaatgattttttagatttcacacaaaacagaattaaaacattctatgaggataaggttgtccatgttgatgtgacagaaccatattgtccaaatttaagagatattttggacagatctggtgatgtaattttaggtggaacatatgtgtgcactgaggggccacgttttgaaactcctgctgagattaaaatgtttaaaatgcttggaggggatttggttggaatgactggagttccagaagtaacacttgcacgtgaaaggggaatttgttataattcaatatgtattgtatctaattatgcggcgggcatttcatcaaatactttaacgattgatgaagtcttcgatattgttagtgaaaaagaacatgatttgcttgaattaatttataattttataaaaaatgcagaagattcaccaaactgtgaatgtcatcatgcattaaatggtgctgaagtatag

SEQ ID NO: 8340 - DNA, 324 bp, Methanobrevibacter gottschalkii
  source 1..324: mol_type = genomic DNA
atgagattagctgtagtgtcttccgatggtgagaatgttgatttgcaccttggaaaaggaaaatctgtttatatttatgaatatgtggagaataaattaaattttattgaacgcagggatattgaaatatctgatgattcaaaacatcagggtggtaaagttattaaaacttgtgaagactgtgatgttttaatttctcttcaatacggatttaaatctaaaattaaagcggatgatgtggatttaaagctggttattgatgaaggtccaattgatgaagttctacaaagatatattgatcattataacttcatgcataaataa

SEQ ID NO: 8341 - DNA, 558 bp, Methanobrevibacter gottschalkii
  source 1..558: mol_type = genomic DNA
atgtctaaatatataattgttaccggaagcccacgtgtgggagcaaattcagatgctattgctgaattcatcaaagagtcattaggaactaatgatgtcgaaatttggaatatatatgaaaaagattacacttactgtcatgcagacaatgcttgtaaggaattagggcactgttcaatagatgatgatgctacagatttagtggccgatttaaaagaagctgatggtgcatttttaatctcccccatctactttggacgtttgccgggtcctgtttacactataattgacagattttatggtgtttttaaccctgctaaaggattggatgtgccttctccagataaaaaaataggttttgttctcactatgggtggggatgaagaagcagttaaaaatgccgaacctgtagctgctcaagcaggttttgcattttcagttgttggttttggagcttctgatagtgttattttaggtggcaacaacgatcctactgcatttgcaaatagtgatgaggaacaagcaaaagttaaaactttggtcgactggatgttataa

SEQ ID NO: 8342 - DNA, 582 bp, Methanobrevibacter gottschalkii
  source 1..582: mol_type = genomic DNA
atggcaaaagcaaaagcaagacgtagagtacgtgatacatggaaagaaaaatcctggtatactattaaaaccccagtgaactttgaagataaagaaattggagaaactcctgcaaaagaccctgaacttcttataggaagaggtgtagaagttactatgagagaattaactggagacttctcaaaacagtacatcaaactcagatttgaaattgataatgttgcaggtgaagttgcaaacactaaattcaccggacacaaaactactactgattatgtaagaagcatgattagaagaggaacttctagaattgatgcttctactattgcaactactaaagatggtcgcaaaatcaaacttcaagttcttgctgtaactgtaagaagagcaaaatcttcccaacaaaaatacatgagaaaagtaattgaagatttactcaatgaggcagcagctgaaaaatcattcgacgaattaataaaagttgttgtaaatggtaaattagcatctgaaatttatcacaatgctaaaaaaatatatccacttaaaagagtggaaattatcaaaagtaaagtaatcaaatag

SEQ ID NO: 8343 - DNA, 210 bp, Methanobrevibacter gottschalkii
  source 1..210: mol_type = genomic DNA
atgaaaaaaatcttccaaaatttaattttacaacccagatatgaaactaaaacaactaacaccattaatattgcaaatattggattggcagcatcatttaaattatttactgtaacatcattccccttgaatttaaaccctattgaccataaagcgaaacaagcaaaaataaataattatcaagtagcggacaataatatgtttgtataa

SEQ ID NO: 8344 - DNA, 696 bp, Methanobrevibacter gottschalkii
  source 1..696: mol_type = genomic DNA
atgtatgggataatgattaactggttatatgtaattcttttatttattttaggatttatcacttatagaagacaatccttagatttattcggttctgcagtaatgattattatgggtattgtgattattttttcagctggaaccaactggttattgttaattgttttattccttgttttatctttaattgccactaaattttctaaaaagtataaactatctttaggtgaatttgaaggaagaagaacatctaaaaatgttatttcaaatggtgttgtagcttgttttatggctgcatttggagggtattactctccatttgttggaggtttcattggagcaattgcaacagcaacagcagatacattggcttctgagattggggttttggatcctcatcctcgtttaataaccactcttcaaaaagtagatccgggaactaatggtgctgtttcagtgttgggaactgtttcaggaatcgttggttcagctattattggtattgcagcatatttcttaggaataatgccaaatccatttttagcaattttagtttcaattatatctggtactattggctgttttggggatagcattttaggagctttatttgaaaacaatgggtggcttactaatgaacatgttaatttacttgcaacaatcttcggagcacttgttggaattttactaatttaa

SEQ ID NO: 8345 - DNA, 1239 bp, Methanobrevibacter gottschalkii
  source 1..1239: mol_type = genomic DNA
atgaaaggacttattttaattatggatggtatgggtgatcgtcctattaaggagttaggtaataaaactcctttggaagcggctaatactcctaatatggataaaatggctgaagaaggaattactggtattatggattcaatagctccaggtattattcctggaagtgatactgcacacctttccatcttaggttataatccttatgaggtatatactggaagaggtccgtttgaagcaaatggggttggagtagatgttcttccaggggatattgcattcagatgtaatttttcaactgcagatgaaaatttaattgtaactgataggcgtgcaggaagaatcaaagaaggtactgaagaaatagttgaagaattaaacaaaatggttttggaagactatcctgagattaaaataatctttaaagaatccactggtcacagagcggttttagttttaagaggtgaagggctttccggtaaagtaagcgatgcggaccctaaagttgaaggcaataaacctaaagaagttaaggctttagatgatactcaggaagctaaaaaaactgcagatattttaaacaaattagtttttaaaacttatgaaatggttaaggatcatccagttaacttaaaaagaattgaggaaggaaaacctccggcaaacattgtcatccctcgtggtgcaggtgaagttcctgttgtcgattcattaaatgataaatatgaagtaaactcagcatgtattgcagaaacaggacttatcatgggaattggaagatttgcaggaatggatatcatcgaaatggaggatgtaaccggtggaatagatactaacttagaaaatattcgtgatactatcatagatcaagttaagaactccgaacacgactttttcttagtaaacatcgatggggctgatgaagcagggcatgatggtcaaactaaagagaaaaaagagttcatagaaaaagtcgattgtgttattatgggcgaattaatgaaacttgacaatgtttatatttatttaacagccgatcattcaactccaatttcagtaatgaatcattcaggagatcctgtacctgtgcttattagaggtcctgaagtaagggtggatgatgttaaagaattttctgagagagcctgtgctaaaggaggccttaataggattagaggatcagatgtaatgaatattatgatggatttaatgaattatgctcataaattcggtgcatag

SEQ ID NO: 8346 - DNA, 1338 bp, Methanobrevibacter gottschalkii
  source 1..1338: mol_type = genomic DNA
atggtagcaaaaaaactatttggaacatcaggaatcagaggaagaataggatctgaagtaacttgtgaacttgcattaaatgtaggtaaatctttagcttactatttaggtaattctggaactgtagttttaggttatgatacaagaacaactaatcagatgttggatcaagcaatttgtgcaggtttgcttgaaagtggtgttgatgttataaaaataggtatggttccaactccattagtcggttatgctactgaaaaacttgatgctgatgcaggaatcatgttaaccgcctcccataatccttcacagtataacggaattaaattatggaataaaaatggaatggcatacacttccaaacaagaaacagaaattgaaaaaatttatgcaaataatgattatatttcagttaactgggataaaataggtaagttaagtgtcaatgaagaaatcaaagggcagtatgttgatgatttagttaacctggtggatatcaaagaaggtttaaaggtagtaattgattgcgcgtctggtgcaggtagtgaaatatcacctttagtatttagaaaagcaggatgtgaagttacaacccttaactctcaagtagacggatttttcccaggtaggaatcctgaacctaatgaggaaaacttacaaacattaatgaaaactgttgtagctattggagcagatttaggtattgctcatgatggtgatgcagatagaatgattacggttgatgaaaatggtaatgtttccccctttgattctcttctagcattaatatcaaaagaatttgatggagatattgtaacaacagttgatgcaggattatgtatggatgaatccgtcaaaggtaaagtaataagaactccagtcggtgatgtaaatgttgctgaggcaataattgaaaaagatgctagttttggtggagaaccttctggaacttggttgcatccagacttttgcatgtgtccggacggaatcctttcaggtttaagaatagcttcaattgtttcacgagatggtaaattatctgatcttttggattcgataccatcctatccaaatatccgtgaaaaaatagtatgttcaaaagaagctaaaatcaaagtaatggaaaacatggaaaatttacttattaatgcatttgatgatgttgctgatgtaaatcctctcgatggagttagattaacatttgaagatgatagctgggtacttataagaccttctggtactgaagattatattagaattactttagaatcaagagatgctaaaagagctgaggaaatcaaagaggtttgtgtgaaaataattaatgaaaatttatga

SEQ ID NO: 8347 - DNA, 174 bp, Methanobrevibacter gottschalkii
  source 1..174: mol_type = genomic DNA
atgacaatatacgtttgtttacactgtgaatacagatttgattcagaaaaaggagaccctgcttacaacattccagctggagcaactcctgcagatatgcctgatgattgggtttgcccagaatgtgctgcattaggtattgaagcatttatcgcagaagaagaggaagaataa

SEQ ID NO: 8348 - DNA, 1308 bp, Methanobrevibacter gottschalkii
  source 1..1308: mol_type = genomic DNA
gtgaaagcaattattttatgcgctggtgaagggtctaggatgagaccattaacacttaccaagcctaaaactatgttgcctgttgcagggaaaccaatcatgcaatataacatagaatcattaagagaaaatggtattgaagatattttacttattgttcgttataaagaggaaatggttagaaattactttggtgatggtagcgaatttggagttaatattatttatcagaggcaaaaagatttcttgggaactgctgatgcaatttcttatggaaaaaacttcatcgatgatagcttgatagttttaaacggagatatcattttggatgatgagattattagtgatttcattaataaatatgatgagttaaaaccagatactttaatgcttttaacagaggtagaaaatccttctgcattcggtgtcgttgaaattgaagatggatatattaaaaatattgttgaaaagcctaaaagagaagaagcgccaagcaatttagttaatgcgggaatttatattttcaataaagatatatttgataaaattgataaaactgaaatttcccaaaggggggaatatgaaattactgattctttaactatgcaaattgaagatggattaaaagtaatgggtcataaaactgataaagactggattgatgtaggtcgtccatgggaattgattgaagttaatgaagaactaattggcaatcttaaaactgaaatcagaggcaaagtggaagatggagcccatattcatggggaagtatttttggatgaaggaagtgtaattagggcgggagtttacattgtaggtaatgtgtatattggtaaaaattgtgatataggtcctaattcttatattcggggtaattcttacttcggagataatgttcatgttggaaatgcagttgaaattaaaaattcaattattatggaaaatactaatgttagtcatttaagttatgttggagattctgtaattggttctaattgtaatattgcagcaggaactaacattgctaatttacgttttgacaataaatcagttaaaacaaaaatcaaagatcaaatgattgatagtggaagacgtaaattcggttctatcattggggattctgtaaaaacaggtattaattcaagtttctctccaggtgtaaaagtgggtcataattccactattggttctggagttctattatataatgatgtaccatctgacacaagggtgttagtaaaacaaaattatattattcaagataaaaatataaaaaatgatattcaagataagaatataaaaaaataa

SEQ ID NO: 8349 - DNA, 483 bp, Methanobrevibacter gottschalkii
  source 1..483: mol_type = genomic DNA
atggaaaatattgaagactctattgtaatatgccctggcgcacaagtatttggtgatgttgaattaggtgaaaatgtctctatatggcatggtgctgtaataagaggagatactgactcaattactattggaaataattctaatgttcaagataattgtgttattcactgtactaaaggatttccagttgaaatcggggacaatgtatctgttggtcatggtgcagttgtccatggttgcaaattagatgacaatgttttaatcggaatgaatgcaactgttttagacggtgcacacatctctaaaaattctattgttggagcaggtgctgttgtaagtgaaggtaaagaatttcctgagaatagtttaattttaggaattcctgctaaagcggttaaacaattatctccagaacaagttgaattgattcaaaataatgcggataattatgtaaaactttccaaacaatacatggaagattag

SEQ ID NO: 8350 - DNA, 1101 bp, Methanobrevibacter gottschalkii
  source 1..1101: mol_type = genomic DNA
atgaaagcaagaaaaattgtagatgaaatggattcctatgttccgggcaaatctcaagatgagattgctcaagactttaacttaaaaaaagaagatattattaaattaggttctaatgaaaatccatgggggccctctcctaaagctatggacgcaattaaacaggaaattaacactataaatagatatccggaatcacaattgggggaattggcatcagaaattgccagatactccggtgtagacgattctcaagtgattattggtggcgatggtgctgatgaaataattgatgttttagcaaaaacattcatagatgctggagatgaattcattgtccctttaccttcctatatgtattatgagtacttattaaaacaatatggagccagtccaatttacgcaagatgggatattgaaaaaaatgaactggatgttgattcaatttataatgctataactgacaaaactaaaatgattttcttgtgcagtcctaataatcctaatggcgctttaattgatcaagaagtatttattgacatcgcttctaaaaaccctaatatattgattgttattgatgaagcgtactttgaatattcagaagttactaataaagatttaatcaatgaatttaataatgtttttattattcgtacattttcaaaagttttggggcttgctggaatgagaattggttatggtcttgcatgttctgaaattattgaatatatgcacagaattaaacctgtattctctataacaagattatctttcattgcggcccttaatactcttaaggatactgaatatattgaaaattcaattaaaaaaggtattgaatcaagacagtatctatatgatgaaatttcaaaaatagatggtctttttgtatttccatctaaatctaacttcatgctaatcaatattaaagaaacaggttttacagcctcagaattagcgttagaactaatgaaacaaggtataattgtaagggattgtacttcatttaaaggattggatgagtattggattagaataagtatttgcactcttgatgaagataaaaaattcattgaaatcctaaaagaggttctaggataa

SEQ ID NO: 8351 - DNA, 705 bp, Methanobrevibacter gottschalkii
  source 1..705: mol_type = genomic DNA
atgtatataggtggaactgttatttcttccgttgaatttcatggaaatatgtcattagtcattttcatgtctaaatgccctttggcttgtagatattgtcataatgtggaacttttagaagacaatacggaatggccttttgataaggtaaaacaagaaattgattattctgctgattttttagatgctgttgtcatttctggtggagaacccctggtacaagtagatgcagtaatagaaattttaacttatgttcgtcaaattggattaaaaacaaaattggacactagcggcatatatccggataatcttaaaaagatattggatttaaatttacttgattatgtctcccttgatgttaaaacaacattttctaaatataaaaaaatcactggagctaatgtaggttttcaagttagaaaatcaatgaatttaataaatgatgcgggagttcatttagaagtaagaacaacttatgtcccaacattacatacaaaaaaagacattattaatttagtggatgacatcaaagcggatatttacactatccagcaatttagaaataaaaatgtattggatccagctttagaaaaggtggatgtcccaaatccgcatgatttggtaatgctggctcaggaaattaaaccatattttaatgggattgttaaagttaaatcaggagaatttggagaacaagtaatctaa

SEQ ID NO: 8352 - DNA, 1137 bp, Methanobrevibacter gottschalkii
  source 1..1137: mol_type = genomic DNA
atgccgattttatcattttcaagtaatgatattgatgttattacaggtaaaaaaaccagaacaattcgtaaagcatggaaaactccacttaaagttggagataggctttattgttattggaatttagtatcaaaagaaaaaatgaagatttttgaagcgtttgttacaaagattgaagacatttcttttgatgaacttaaaggtaatgatgaattggctcgtcaagaaggatttaaagattcaaaagacatgctgaaggaatttaaaaagatgtatggtggaagaattgatccttctgataaattccaaataatctattttgaaaaaattcatattgatgattggaaaggcgataaaattgatgaaaaagcaatgatttctaaaagagcagatattctatttgatagtggtaaatttgacaaatccaccatgtgttatgatgctgctttaaaattagatcctcatgatgtttatttattgaataaacaaggagataacttatcaaggttaggtagatttatggatgcaattgagtgttatgataaagcattgatgatcgagcctgataatgtatatatcttaaataataaagctattgcacttctaaactctggaaatatcaatgaagcattaaaagtaagtaatattgcttataattatcgtccaagtagtccgatagttctttattggagaggttttattttagagatgcttggaagatatgataatgctttaaaagtttatgataaacttatagttattgatggggataatcctgaggtatggaattcccgtgggaatttattaactgatatgggcatgctggaagaagctattgaatcatttgataaggcagttgaagtttgtttagatgattctgaaatggatgcttcagctattaataggatgggtaatgcttatattgatttgggaaaacttgatgaggctttggattgttttaataaagctatttctttagaaaaaaataacattgattttttacttaataaaggagtggttttaatggaacttggaaaatttaaagaagcaattgatagtttcaataaagtattacttagaaatcctgataatgaggacgcatttttcttaaaagaggaatgtttggagtatttgtga

SEQ ID NO: 8353 - DNA, 1365 bp, Methanobrevibacter gottschalkii
  source 1..1365: mol_type = genomic DNA
atgtccaacaaaaaaagattatttggaacatttggagttagaagaactgcaaatgatgtgttaactccagaatttgcaacaagattatctgcatgttatggaagtgttgttaaaggcaaaattgcagttggtgcagacaccagaacaactagccctatgttaaaagatgcagttattgctggtttgctttcagctggttgtgatgctgtagatttaggaacattgccaacacctgcagttcaatatgcagtaagacaatattatgatggtggaattatgataacagccagccacaatcctcctgaatttaatggacttaaatttttagatgaattcggtattggtcttcctgacgatattgaattagaaattgaaagtctttattttgatagtgaaccaattagagcaaattgggatgagattggtgagaaatatacaaatgacaacatcattgatgaatacattcaaacagcaatgtcccatgttgatgtcgatgcaattaaagaagctaatttaaaagtagtattagactgtggatccggtgcaggttcttttacagcaccttatttagttagagaacttggatgtgaagtaactactctaaattgtcaagctgatggatttttcccaggcagggatcctgaaccaatagaagaaaacttacaagaactcatttctgttgtaaaagaattgaatgctgatatcggtcttgctcatgatggtgatgcagacagaaccatttgtattgatgaaaacggtgcttttgtcctgggagataaaacattcacattagtagaaaaacaaatgcttaaagaaaatggtggaggaactattgtaacaaccgttgcaacttcacaagctatttatgacatagccgaagaatacaatggagaagtaatagcaactgcagttggagatttacttgtagcacgtaaattaaaagatactgatggtctttttggaggagaagaaaacggtggcctaattttccctaatttcgtttatggaagagacgccgctttaactgttgctaaaatcctagaaataatagctaaagaaaataaaacattatcccaattagtttcagaattaccagtttattattctgctaaaatgaaaactgaatgttctgatgatttaaaagaagaaataatgtccaagatagctgcagaagttaaagaaaccacagattatgaacttgacacaacagatggagttaaaatctttaaagatggtggttgggtcattatcagaccatccggaacagaaccaattttcagaagttattcagaagggaattctcaagaacaagctgatgaaatggcccaatggggaatcagcttaattaaaaaatacagagattag

SEQ ID NO: 8354 - DNA, 399 bp, Methanobrevibacter gottschalkii
  source 1..399: mol_type = genomic DNA
atgagaattacagatgaaaaattattaagaatatccttaataactgcattaattggaataattggattaattatattcacaccatcaattgaagtcaaaaaaattgacattaaagatattacaagatcaatgattgatgaaaaggtatctgttcgtggcataattacagatattaaagaatcaagttcaaaaacaaattattttttgactataagtgatggggaaagtcgaattacattaattatatttgaaaaacaagtttcagagattacttctagaaatttagatattggagattttaaaaataaaaaggttgaagttgtaggaaccataacagaatataaatctgatttagaattaattttatcgagcggagacagtttgcgcataattaattaa

SEQ ID NO: 8355 - DNA, 1659 bp, Methanobrevibacter gottschalkii
  source 1..1659: mol_type = genomic DNA
atgaaatatcaagaattggtagatgtttactcagcacttgaagcaactacaaaaagactcgaaaaaaccgaaataatttctgaatttttaaaaaaattagacacaggcacaattgaaaaagtaggattattaattttaggtgttgtatttccagcatggagttcagaagagataggaattggaggaaaattagttgaaagagcagtagcagaagccgttggaacaacacaagctactgtagaagatgctgttcgtgatgaaggagatattggtcttgcatgtattaaattatatgctaaaaagtcccaaatgacttttttctcacaaccactaacaattgattttgtattcaatagcttacgcaaactatctcagattagcggatctagatcaactaatcgtaaaattgctgttatcttagaattattaagccaagccagtgcaacagaagctaaatatttaacccgtaccattacagaagagttaagaattggcgtaggggatggagtagttagggatgcaatagcacaagcttttgacattgataaaaaagtggttgaaagagcccaaatgcttacaaatgatttttctgttgttgcaaaaacagcgaaagaagaaggcagttctggtttagaaaaacttaatttaactcccggaactccagttaaaccaatgcttgcacagcttgcaccaccattagaagaaatcattcctgaaatgggtgtggcaatttgtgataccaaatatgatggaattagattgcaggttcacaggaacaatgatgaaattaacatattcacccgtagacttgaaaatattactcatgctcttccagaaatcgttagattatttgatgaacatttgccccatgaaaattacatcgtagaaggtgaagtaatagctacaagagatggaaaaccattgcctttccaaaatatattacatcgtgttagaagaaaacataatgttgaagaagctatagaaaatgttcctctaaaagtatatctgtttgatgtaatgtattaccaagttccaatgattgatgaacctttaaaaaacagaagaacaattttagagtcaattgttgatacttcagttgatgaaatgaatttaagtaccatgaaaattggaacagcagaaaacatcaaagaaattcaagaactatttgaaacttcaattaaagaaggtcacgaaggaattatgattaaagatgcatcagaaccatatattccaggacttagaggaaaaaaaatgcttaaatacaaagcagaacctgaaaccctcgatatgattgttataggtggaacctacggaattggtaaaagaggagatttcgttggttcttacttggtagcacttagagatgaaaataatgaatttaaaagtgtggcttatgctgcaacaggtcttgatgatgcaacattagaatatttgactggcaaaatgaaagaacttgaactttcaactaaagggcgtgaaattaaagttgaaccaaaaattgttttagaaatcgcattttctgaaattgttgaatcaccagaatatgaaacgggttattctttaagattccctgttgttaaaaacataagaaaagataaaggtccgatggatgttgatactgttgaaagattaatttccatgtacaatactggaaattaa

SEQ ID NO: 8356 - DNA, 1275 bp, Methanobrevibacter gottschalkii
  source 1..1275: mol_type = genomic DNA
ttgactcaaaaaagtgaagcacaaaaaggtaatattactccggagatggaaattgttgcaaaacaagaaaacatggacataaataaattagtaaaattagtggacttaggaaaaatcgtaattccaaaaaatattaacgggcactcaaaaccatgcggtattggagaaggacttaaaactaaaattaatgcaaatattggttcatcatctaaaattgacgatattgaattagaaattaacaaagcaaaattagcacaagaatatggtgctgatgcattaatggacttatccaccggttctgatttaaaattatttagaaaaaaaattatggatgcagttgatatctgtatcggaactgttccaatatatgaagccggtgttgttacccttggtaaaaataaagaaataattgatatggatcctgatgatatatttaaagctatagaaaatcaagcgaaagaaggagtggatttcatgacgctccattgtggaatcactgaagatttagttcaaaaattaaaagattccaataggatgatgggaattgtgagtcgtggcggaacgtttatggcctcttggattaaccataacaatatggaaaatccattgtacgaaaattatgattatcttttagaattatcttacgaatatgacatcacattatcattaggagatggtttaagaccaggttgtttagctgatgcaagtgacatccctcaaattcaagaacttgtaaacttaggtggccttgttaaaagagcacaagatgcaaatgttcaagtaatggttgaaggtccaggacatatgcccttaaatcagattaaagcaaatatggaacttcagaaaaccatttgtcatggtgctcctttttatgtgctgggaccactcgtaactgatcttgcacctggctatgatcatattacaggagcgataggaggagcaatagccgcatcatccggtgctaacttcttatgttatgtaacaccagcagaacacttatcccttccaagcttagaagatgtaaaagaaggagttatcgcgtccaaaattgctgcagaagctgctgatgttgcaaaaggtcttgaatcctcatggactcaggaacgtgctatggcacaagcaagaaaagaatttgactgggaaaaacaattcaatcttgctttagataaatccaaacctagaacctatcgtgaaaaatgtgaacttgacgatgatgaaatgtgtgcaatgtgtggagaatattgtgcagttaaaatagctaaaggcgatttttaa

SEQ ID NO: 8357 - DNA, 669 bp, Methanobrevibacter gottschalkii
  source 1..669: mol_type = genomic DNA
gtgtttactataaaagttatattttttgatactgaaactacaggtcttgactgttctaggtgtaaaattattgaacttgcaatgttgacagttgaaaatggtattgtaattgacaagtatgatgaatttattgatgttgaggaaccaattccaccaaaaatatctgcattaactggaattacagatgacatgataaaaaatgagggagttagcgaagaaaaagtcgctaatgatttaaaagagagactaacagatgatacattaatgattgctcataattgtcaatttgatttgcaatttatttattatttattaaaacgtcattttccaaatgaagcggacaaaattgtttctaatttaaattggttggatactgtatcagttttaaaagatagaaaaaaatttccccataaattaatcgatgctgttaagcattataatattccggaagttaattttcatagagctattgatgatacaaaagcattatataaagtaacattagcaatgaaaagtgaaagggatgatttaagagattatattaatatttttggttataatccaaaatacggtgtaagcggaagaagatttgatttcattgaatataaatcacagttttatcatcaaagaattgttgcacaagaatttactttaccaaataggagataa

SEQ ID NO: 8358 - DNA, 834 bp, Methanobrevibacter gottschalkii
  source 1..834: mol_type = genomic DNA
atgagcgaacatattattgaagcattaggattaagtaaagtaattattaaagatggcaaagttattgatgtaagtgaaccccaagttgaatattgtcctctttttgatcaccacaggggaattaaaaaattaacatctgaaataatagctaaaaatataaagttcagaatagatgattttggaatgtgcatgccaaatcgccagttaagaatgaaggactttttaaactttggaatttctgaaattatgtgcacattacttgatgaaaaaataattgattctgttgtaatggttttagaaggttgtggaacattaattgttacagaatcagaacttgttcaaggaataggtggaagagtgtctggccttgtaaaaaccagtccaattcctgaattaatagataaaattggtaaagaaaatattgttcaaccagaaaccgctgaaataaaccaaattaaaggattagaacttgcaattaaaaaaggttttaaaaatattgcagttacaataaccttagcaagtgatattgatgaaattgaaagaataaaatctgaaaaccccaatgtgtccatctatgtttttgtcgttcacacaactaaaagaaatgctaaagatgctagaaaattatttgatggatgtgatgttataacctcttgtgcatccaaatatgtgcgtgaaatcggaaaaaaagaaagtataaaaacagttggtcaatccataccaattttcgcacacaccgaagatggaaaaagatttttagaaatgcgtttgaaaaaaattggtggggaaaaacctaaaatagataatccggatttgccatacccgttaatttaa

SEQ ID NO: 8359 - DNA, 2202 bp, Methanobrevibacter gottschalkii
  source 1..2202: mol_type = genomic DNA
atggcagaaaatgaaattactctaaaagttgcagaagcaatttcacaaaaagatgtaggtcagggcgtggcacgacttgaccctaatgttatggatgacttaaatattcatgaaagagatttaatcgaaatcataggtgaaaaaagaactgccgcaatcgctcttccttcacaaaccgacattggacttgaagttataagaattgatggattagtacgtaaaaattctggtgcaactatcggtggggaggttcaaattagaaaaattaaggcagtagaagctaaaaaagttgttttagccccaattgaaaataacatccgtgtacaaggagatgttcgtggtttatttgctggaaaagtaatggtgcaaggagacattattggatctcaaattagagcaccaaaaccaagtatgaatatgggttttggtagcttatttgatgaattaatggatttcacaccagcaatgaaagaaattaaattcgctgttgtatccactaaccctaaagatattgttattgttggtccaaataccgaagtacaactttacgaaaccccagttgatgtaagtaaaatagaaggtgtaggaaaccttgttgatgtaagctatgaagatatcggcggtcttaaagaagaagttaaaaaagtaagagaaatgattgaaattcctctaaaaagaccagaactctttgaaaaattaggtattgcacctccaaaaggagtattgatgcatggtccaccaggtactggtaaaacattactcgctaaagcagtagctagtgaaagtgatgctcatttcattgcaataaatgggcctgaaattatgagcaaatatgtaggtggatctgaagaaaacttaagagaatacttcgaagaagcagaagaaaatgctccttcaatcatatttatcgatgagcttgatgcaattgcaccaaaaagagaagaaaccaacggtgaagttgaaagaagaaccgttgctcaacttcttactttaatggatggtcttaaatcccgtggccaagtagtagtaattggtgcaaccaacagaccagattctcttgaccctgcacttagaaggccaggaagatttgatcgtgaaatagaaattggagtaccggattctgaagaaagaaaagaagtgcttgaaattcacacaagaaatatgcctctctcagaggatgtcgacctcgataaaatttcaaatacaacccatggatttgtaggtgccgatcttgaatccttatgtaaagaagcagctatgagagttgttagaagaatcttacctgaaatccaaaacgatgaggaaattccaaaagaagtgatggaaaaaatcgttgttacaggcgatgactttaaaaatgcgcaaaaagaaatccaaccttcagctttaagagaagtacttgttcaaattccagatattaaatgggatgatataggtggtcttgaagacgtaaaacaagaacttaaagaagctgttgaatggccattaaaacacccagaaacattcaaacgtttaggaataagacctccaaaaggaacattgctttatggaattccaggaactggtaaaactttacttgcaaaagcagtagcaagtgaaagtgaagcaaacttcatttcagtgaaaggtcctgaacttttatccaaatgggttggagaatcagaaaaaggtgttagagaagtatttagaaaagcaaaacaagcagcaccaacagtaatatttttcgatgaaattgatgcaatagctagcacacgtagcggaaatgatactgatagtggtgtaactaaaagagttgtaaaccaactgttaacagaaatggacggtttagaagagcttgaagatgtttcaattattgcagcaaccaacagaccagacattttagatgctggactcatgagacctggaagattcgatagacacatacaagtcgatgaaccagatgaagaaacaagacttgcaatctttaaagtacacactaaaaatatgcctcttgcggaagacgttgatcttaaaaaacttgccaaaaatactgaaaaatatgttggagcagacattgaatcagtatgtagagaagcagcaatgcttactttaagaaaagatcttgatgccaaagaaatcccatataaatacttcaaagaagcaatcgataaagtaaaacctggatatagctccaatgaggagcaattagtccaatacatgtag

SEQ ID NO: 8360 - DNA, 1347 bp, Methanobrevibacter gottschalkii
  source 1..1347: mol_type = genomic DNA
atgaaaatcaaggttattactaatttaaaattattaatgattaaaatgaatgttggaattattggaggtagcgatggtttaggtaaaacaattgtctactacttaagggatgaatttgatgtatacataactggaagagatcataaaaaaggtaaagaagttgcttgtaatttaaatgttaattatattgaatcaaatactgatttagcaaaaattagtgatattataattgtttcagtaccaatacatcatacatcagatgttatacgtgaagttgctcaatttatgaaagcaggatcattgatgattgatgtaacatcagttaaagaagagccctctagaactatggaagaagtattgcctgacaccgtagaatatattccaacacacccaatttttggtccgagaacaacagagttagataaccaggttattgttttaaccgctactaaaaaaggcgaatggtacagaaaagtttatgactatctgaataaacaacatatgcgaataattgaaactactgccaaaaaacacgattatatgatgagtatcgtgcaagttttaactcatttttcatttatttcaactgcatcagctattgaaaaattaaaaatagatatttctgaaactgaagattatgaaagtccaatatataatcttatgattgatatgattgcccgtattgttgcacaaaacccttacttaacttatcacattcaatctatgaacaataatggtccaaaaattagaaatacatttgcagatgcagttattgagttaagagatgtaattaataatgaagatgatgaaaaatttgttgaaatagcaattaaagcaacaaaacatatgggggacattaaaaatgcattaggtagaagtgataaagcaattaatggattaaaccacgaatttacattattaaataaatcaataggtactgaagttggcctaaggcatatttactctggaaaaatccatgttggaattttagagaaaatagaaaataaaactgcaatattaagaaaaagaaataaggttaaaaaattacgtatagctaatattgaggttttaagcgataatgaactttatgaatggaaaattaataatctagataaaaaaagagaatcaatcagttgtgtatttccaaagagagttgatgccgaagtcatacaagatacagttatgaatatcgcaaatataattgatataaaattaactgacacatacaatggtccccaaattagtaaaaattctataagtttgacttttgaagttattgcactatcaaaagaagatattgaaaaaattaaagagttattcactggttttggtggagttataagataa

SEQ ID NO: 8361 - DNA, 4473 bp, Methanobrevibacter gottschalkii
  source 1..4473: mol_type = genomic DNA
ttgaaaaactcaaaaggcaaagtattaactgggaaaaagattacagtcaattattctggtaaaacttactcacgtacaacagattccaaaggttgcgttagttggaatgttcaaaaaaaaccgggaacatattcggtgaaatttactttcaaagcaaaaggatatcaaacaagcagtaaaacagcaaaagtaacggtaaaagcaatgccaacatcattaactgtgaataatcttgctttcacatatggtgacggcaacaataagttaaaagcgacactaaaagataaaaaaagaaaagttttagtaaataaaactgttgtttttaattttaatggtaaaaactataatcaaaaaacaaattcgaaaggagttgcaactctaacaattggagctggaccaaaaaaatacactaccacaatttcatttacaaatgcaaattatttgaaaagtaaaaagacagtaactgtaactgtcaatagtattcctacaagtttaactgtaaatgatttaacttgtaattatgatgacagcaatgcatacttatatgcaactttaaaagatactaagaataataaatttttaagtggacaaacaatcacttttaaaatcaatgataaaagtaaaaatgtagttagtgacagcaatggaaaagcagggattaaaatagaagaaaaatctggaacatataatgttgatgtttcatttgctaaaagtccatatgcaagcattagtaaaaagattaatttaaatgttcaaggagctttaacacctgaaatcaatatgcacaatggtttttataatgtatctaatttattagttgattttactggtgataatgctgagtacattgtctattgtagttttgataatggtgcttcttggtataaagataatcacagtttatcttttaatttaactacatgtaattggagcataatatattattcttcttttagaggattcaacagcacaattaaccatgttaattatgttctagatggggatgttccattggtttgggcaagtcatgggtcaggaatttataatactaattttcaggttaatttaacaagtgttgatttatttgatgaaaaaccaataatatattacaccttagatggtagtgaccctacagttcaaagcactatttactcagaacccattaatgttgtaaaaaacaccaatttacgtttttttgcaatggacacatttaaccatagaagtgaaataattagtgtttattatttcattggaaattgcatagctaatctaaacaatggaaaaacatataataccatacaaaatgcaatcaatgatgataaaacaaaaaaaggagacattattgaagttaataaagatatcataattgaaaatgttgttattaataaaaatatttatttaatttctaataatgtgatttggcaatctaacaataagtcccctataatttacatgaaaaatgtaaataatacctttattgaaggttttacttttaaatcagataatgggtcaggtattgaattaaataatgtttcaaattgtgttattcaaaataacaatttttataataaatatggatttagtattcataatgaaaataaagataatgataatctaaataatatttgtattcaaggaaataatttttatgataattattataattatattaattttgaagttttagaaaattcaaaaattattaataataattttgaatctaataaaaatgtttctgctataaccattttaaattcaaaatccaatattcttataaacaatcaatttactaatttaaactacggaattttaattaataagtcctatgatgatgttttctttggaaataatttctctataaataatattgggctttatttaaattgtgttgatagtaaagtaattagtaatacttttattaataatcattatggtatttactctataaatgcttctaatttaagaattaatttcaatcgtattgtagataattctaaattcggtgtttactgtaaaaagggtattgttgatgcaaataacaattggtggggtaaaaattatataactaataatgccttaaattcaggagatataaataataatgaaaatattggaataaattgttctgcttatttagttttgaatgtttatgaaactaattataaaattgataatggaattgtttataatgtttcttatgttgctaatttaagatcaaataattatggggaaatttttaatcaatattttattccaaattgtaaaattgtttataatatgtattgtgaatatttatatgataatggtgttgtgtataggggtgttaatagaataattgacttaatgttatctgaaggtagttctattaaagaatatagattaggatttttaaataatctaactgttacattggatcatcaaaatatctcatttttccgtgaaagttcatttaatgcatatgcaaccattgatatcgttagttctgctatttttaatggttcaaatcttgatattagtgttagagttccattggttgataatgtagattggtttagtattgtatgcagatatgtggggaactttaaaagtgagttattattaatttataatggagaagtgcgcaatacaatagttattgaaagttccttttataatgaagcaaagaatgtgttttcaaataatttttggaatgctttagatacatatcactcttgtttttcaggttatagaaataagcaaatatgcgcatatgcttatttatatttaaatgaccctagtttgaatacaattgaattattggataataaactaagtaaaagcaatatccaatttaagttacaagatgtttataatttactagctaataataatattactcttaatgatattttattaaatttaatcaagaattcttatagcttgtctgatttagagatgtcatttattgattatgcaaatggaaatttatttgatacaatgagtgtttcattaaaatatcctggaaatgacagattattttttgcatttgaagacactatcaacaaaacttttgtgtggagaggggattcttcagttagtttgtataatattcattatgtaaatggaggatattttgatttgactgcaccattccctattggcgataatggtgatttaatttatgacaatggaaatatttactccattaactataactgtatttatacatttttatcttcagattatgattgtttaaaaacctatacctttgcaaatagcaaaattaataataatgctctaaattattggttaaatcagaagaaccgtactgatgttaatggggaattatattataatataggttatatgaaagcagcttatggtagtttccttgaaggtttactagtaatttattgtaatgatgttgttgctgacgttagtgcagataagttcaatgtatcctggactcgtgtaaaccctatggttatgagtgtttgtgatagtttggaaggttattatctgactggagaatctgattttaactttggtcgtgaagtagttggtgatgtaaataatattaaatcatttaattttgcttgttcagcatcattttctattattgaaaagtatgttattgatgcattattccctaatgaaggaaataaatcttcagctatgttttctttgattgatagtttatttaataatggaactttagaatttattgttgaaggaaattatactttgattcgtagcttaaatgttagtaatgttgtttttgtttacgatgaaactactggaattttacgtgattgtattaatggatgctatggagcatattgttatgccagccaacaaactgaatgggggcataattttggtgaaaattcattgaaattagaagatttaattgttggtattataaatggaattgatacctcgttggacaatatgaataatgattggttaggttttgcaggatgtttggcaattactattggaaccggattgtttttagtttctaatcctgttggatggagtattgcaattggagcaggtttgttaattggttccggaatgttggccacatattacgcagatgatttaaataaaggttggaattataataggggtgcacacttcatatttgatgttggtacttcaatgattcccgcaggtgctccatcatctttaataaaatggaatgttggcagtttaggtaaaattgttttaagtgatggtcatttggttaggcatgttactaaaaattccattaataaaggttttgacaaatatttaatgaatttagctaaatctcatggaggaactattgattacggttctcataaaattataagatatggaactatagaatcaatatcaaatactatgtatggtacaacaaaaaaagattttatatactattccattcaatattatattaacaaatatattattggagacattgtaattaataaaatctttagcaggtaa

SEQ ID NO: 8362 - DNA, 324 bp, Methanobrevibacter gottschalkii
  source 1..324: mol_type = genomic DNA
atgtcttttgatacaaaaagaaaaaaattgataagacatactattttaataaatattatcgtatttttaataatgttatttttatcaatatttttaaataatgaagtgtatctacaatcctgtccctttattttattaatgattggaggttacatatctcgtgaatacactgaattatattttaaatataaacataaatattcatacttccaagttttttttaaagtatgtttattttcagtaattgtgagtattatttgttgtgaagtaatattgagattatatttcggatcaagtatttttttgtttattttaaataaatag

SEQ ID NO: 8363 - DNA, 333 bp, Methanobrevibacter gottschalkii
  source 1..333: mol_type = genomic DNA
atgtcatttaatgaagaaagaggctgtttaatgaaaattactatttgtatatatttgttacttttagttatttttactagtttatccatattatttagtaataaaatttttttagaattgttacccataattattctggtcataagtattgaacatgttagagattatgcatgcatctatgaaaaatattttaaacagaattattccttgtttaaactatatttaaatgtctctactattcccactattttatttgcaatatgttgtgaagcgttattgagagtttatttcaattcaagtataatcttaaaatatctaaagatattaacatga

SEQ ID NO: 8364 - DNA, 384 bp, Methanobrevibacter gottschalkii
  source 1..384: mol_type = genomic DNA
atggaaattcaaccctcacaatttacaaactcctcaacagcacctgaaattgcaatagcacttttagaaataagatacgcaaatacaaagaacaaaaatactgtaaaaatattaaataaaatcataaatgaagtaaatttaactgataaagaaatagacgaaattttaatcgaaaacaacgaaaataataaagttttcacagaaaaaattctaaaaataatagaaaaatataaagacgatacaacctcaacaatcgccagaataataggaaaacactgtaatcgtgaatcaatccaaaatgtgaaaaaaagaagagaaataagaagaaaaataacattaaatctcttaaaaaaagaaaacatattatcaaaaacaaaaaaatga

SEQ ID NO: 8365 - DNA, 483 bp, Methanobrevibacter gottschalkii
  source 1..483: mol_type = genomic DNA
atgtcaggtaaatccaatattaatgttttaaaaaatgtgaaaaaaacagctctggatgaagaaattgcaaaatatgttgcttaccataggtattatcaaagactaattgcaattagaattatcagtgaaggtcatagcattgcggaagctgcaagaataattagaaaatcatatcaaacagttcatcgatgggctaaaacatgcgaaagtgaaggactggaaggtttaaaaccgtcatttggtggtggaagaccttcaaaattaacttatgatcaactaattgaactggacaaaatcattgaaaaaacacctaatatctcaatgaaagacgtacatattcttgttaatgaaaaattcaatgtaaattatagtttaaagcaaataggcaaaattatgaaaaaattaggatacaattacagtaaagcatatccaaaatcttcaaaatctccaaaagatgctgaaaaacagttaaaaaaaacttaa

SEQ ID NO: 8366 - DNA, 1254 bp, Methanobrevibacter gottschalkii
  source 1..1254: mol_type = genomic DNA
ttggcttcatatatcatatggagtttttatattgttattattcatattgacatattagttccacttaatatattatttttacaacttttaaatcaaaaaagaagaaaaagtagaaagaaaaatttttatgactcaaaaattaatcaaaattcagatcacacaagtcgaaagagccaaagtattgtgaaacttatgaaaattataaagcaagacaccaaagaaggaattattgaaattgttccagaaacattggatgatttatggcatttatcccatataattgaagagggagataatgcatcttctaaaacaacaagacgtattcaggataatactggagataaattaagaagtgataggggagttaaaaaaacattttatttaggtttagatattgaaaatatcacttttcatttattcactggaaaactgagattaaccggcaccattacaaaaggtcctgaagatttaattcctctcggatcacatcatactttggaagttaaacttaacactccaatcaaaatcaaaaaaaggttctggccaaaatgggcaattaaaagacttaatcaagctattgatgcatctaaaaaactatctgcaattataattgtttttgaagatgatactgcaacaattggtttaatgaggcaatttggaatagaatattacggtccaattaaaggatatgtgtctggtaaaagaataattgataaaaacaggcagaaaaacattgttcagttttatgataaagttattgaatcaatagaaaaatttgattcaattcagaatattgttattgcaggtcccggttttgttaaaaacgatttttatgaatatattaaggataattataaaaatttagctaaaatatcggttatagaagctactggttctggagggcgcaatggcattagtgaagttctaaaaaagggaactgttgaaaaattaactgcagaaaatagggttgctcaggaaatgggagctattaatagattactcactgaaattggtaaaaattcatctaaaatcgcatatggtataaaacaaacaaaaaacgcaattaatctgggtgctgttagtgaacttttaattttagatactaaagtggctagtgagaacatgggtgaattaatggatatggttgaaaatatgaaaggtgaggtaatggttgttagtagtgaacatgaaggtggtaaacaattagaaagtcttgggggtatggcagctatcctaagatatgaaattgtttaa

SEQ ID NO: 8367 - DNA, 963 bp, Methanobrevibacter gottschalkii
  source 1..963: mol_type = genomic DNA
atgttttattcatcaattattattgcatttattattgtttttatcataactgcagtaagcactgctattttagatatcatttttagattttttggaaaaagaggatatctgggtaatttatatccgaatgtaagagggggaatacctcgtgctataggcataattccttttattgttttgtccttttatatgattcctgtttgcaactcaatgattttaattataggtgtttttgcattaattgatgatattttggggagaaagaaatgtgttccattaggcattgaatggggacaactttcaagaggaattggaattgttttggtgatgattacaggtattcttgaaggatattggatttctgcaattttcattgcattaatggttcaaccgcttaatatttcagatatgcaaccgggcagtgcatgtattgttactatgataatgtctgttataactatgattttcatgttaattgcaggttcgcctatggtaaatgaactgcctgcggtttatacgcctttattaatatttgttgtatgtgcagcttattctcctcttgatttttcaggaaaaataatgttgggtgaagttggaaatcatacattcggtgtagcacttggtttagctttttatctagttggaggattatggtctgttatcttgctcggattcataactgttgctttaattgcatttgttagaagaaataatttaagagtatttttcagacaaaatttaagaatattaaatccaacatttggggattatttcatggatgtattgactggtggaggtttaggagatttatttagaaaattgattcttaaggataaacgatttgatattaagaatcctttattgatctcattaggttttagaagattattgttcaatccatatgcatcacatgcaaaagaatatgctccaaaaaaaataccaaaattaggaaaaggagtgtga

SEQ ID NO: 8368 - DNA, 1053 bp, Methanobrevibacter gottschalkii
  source 1..1053: mol_type = genomic DNA
atgaaagcattttttacagttactggaagaggtttgggtggtgatgcagttgttgcacttaacaccatggcagcacttagaaaaaggggtgtggaatgcataattggtttagataaaactgcttccagtgatttatttgaaaaaaatggttttgaggtatgtaaaatttctattcctcatgctggtggacattctgcaaccaaactttctgcaataagaggtgctctgaaattagtgaccgctacttttaaagcaagatcagctattaaaaaatctaaatctgattttgtcgttgctgttttaggtggaggagctattgtaggttctttaggggcgaaatttgcaagaaaaccctgtttttctttaatttcaacacctttggattctaaagtatgtcctaaatttaattattgttatgctttaccggaattagatgcatttaggtttgacactcttcctaaaaatatggataggtcattttacccattaactgatgatattggtgatggaaaagaagaaattgctcttcaaaaactaaaagaatatcctaatttcgatgaaaataaaaaaacaattatattctcttcaggttcatcaatatttaaaggaatgattgatgctattaacatagtagctaattctactgatgaatataatttagttctaatcggacgtcccttgagagaggaatattatgatttgattgatgatgagaaaataatttatgttggtttcattgattggattaatcatttatttaaatttgctgatttaacaatattgactgatgatggagtttctcttgaagaagcaatgatttgtggaaaaccgattattgctcttactaaagtaaaatggggaagatatcagaatatggctggtgtttttaagggagctatcattgaatcggaagttaaagatgtttgtaaaagtataatgaaagcatttgagaattataattctctaaaagaaaatgctgaagtatatggtaagcaatgttttgaagctgctgatgttcttgcagataaaatattgaaaaaagttgaatattag

SEQ ID NO: 8369 - DNA, 1302 bp, Methanobrevibacter gottschalkii
  source 1..1302: mol_type = genomic DNA
atgaaaaatatcgttattggttctggacctgctggaagattagcatccctgcaacttggaaaattaggagaagatgttactttaattgaaaaaaatcatattgccggcacttgtctaaatgaagggtgcatggttgtttgtgcactaacagacattacaaaatttattgatgcgaacaaaagatttaattcacacggatttttaaaaagtcagcttgaaatatcttatgaaaaaattgttgaaagaattgttgaaacacaagaaaaattaagaaaattaaatcaaatagaaaatgaaagtgttggaaatcgcataatttatggtgaagctaatattggaaataatatagttgaagtaaataatgaaagttttgaatatgataatctacttattgcaacaggtgcacgcccttttattcctaatattaaagggaatgaatttggattaacaaataaggacatattaaaaattgatgatgttcctgaaaaattaaatataattggtggaggaatcatagctggagaaatagctaatatttactcaactttaggtagtgaagtcaatatttttgcaagaaacacatttttaaaagaaattactccaaatacaaaaaaatatatattggaaaacctcatgactgatgttaatatctatgaaaacattaatgttgtagaagtatttaaagataaagttttacttgaaaatggtgaagaactagatggaattccattttttgcaacaggaagaacaccaaacagtgaaattgttaaagatattgttgagctaaaccatgataaaaccataaaagttaatgaaatgatgaaaacttcagttgaaaatatatatgctgcaggagatgttactggaggatatcaactaacaccagtagcaagaaaagagggcatcacagctgcaagaaatatggcagggtactcaaataaaataacctacaattgcattcctcaaagtttaagtttgaacatggaagtaagttttgttgaaaatgaaaaatcagagtgtaatgaagaagacaaacaaacaattgcaatgccggcgattgcaggaccttcagcattttggaatattttaaatgaagatacaggatattcagaaattgaatttgataagagaaataataaaataaacagaattaattcaatttcaccatcttcagtaagcgatgttgcatatttatcttatataatgagaatgaattatgatttaaatgattatgatgaatttttagaaattcacccctcaactgatacaaactacaaaataataaagaacatgtggttatga

SEQ ID NO: 8370 - DNA, 273 bp, Methanobrevibacter gottschalkii
  source 1..273: mol_type = genomic DNA
atgtgtattgcagcacctgctcatgttgttgaaattaatagagaagacaactggttatatgctgactttggtggagcaagacaacaagcaaaaatggatcttttacctgatgtagaaattggtgattatgttcttatccacgctggttatgcaatagaaaaattaactgaagaagctgctaaagaatctttagaagcttgggaagaacttttagaagttcttgaggaagaagataaagaaatggaaaaagcaagaatggctgatttagattaa

SEQ ID NO: 8371 - DNA, 504 bp, Methanobrevibacter gottschalkii
  source 1..504: mol_type = genomic DNA
atgtgggaaaaaattaatgaaaaattcaaaaaataccctgcaagaattagagttgcagaaaaaatgatcgaacttggactatctttaaatgaagatgggaaaatctattgtggaaatttaaaaataagtgataaagcattagctactgctgctgatgtagatagaagagctatcaaatccactattgaagtaatacaagaagatgaagaattgtataatcttttcagcaatataatacctgccggaacacttctaaaaaatattgctaaaaacttaaaattaggagtaatcgaaatcgaagtagggtccgaaagtgaaggcatacttgcaaatactgcaaatttaatcacaaaaaaaggaattgggataagacaagcttatgccgaagatacagaacttcaagaaagtcctatactaaccattataaccgaagaggtcgtaagtggtgatttaataaatgaatttttaaaaataaaaggagtaacaagagtatcaatttattaa

SEQ ID NO: 8372 - DNA, 285 bp, Methanobrevibacter gottschalkii
  source 1..285: mol_type = genomic DNA
atgtctgaagaattagtaaataatattaaagatgctattactgtaattaatgacccacacatggggattagtattgtagaaatgggcattgtacaaaacatcaaagttgatggagatcaagctgaaattacccttaaaccaactaatcctggttgtatgagtatcactcgtattgctgctgatgctaaagtcaaagctgaagctgttgatggaattgaaaaagcgaagattattgttgaaggacatgctatggcagattccattaatgaaatgattaatagataa

SEQ ID NO: 8373 - DNA, 909 bp, Methanobrevibacter gottschalkii
  source 1..909: mol_type = genomic DNA
atgaaagtaatatgttcaagtgaagagtccctataccgtccagaagcagttagatggagacaaagaatggaaatgatggagcctcttggggatagtgttgttttattaccatgcagtatgaaaaaaccttattctaattctaaatcacatcaaaaatttaggaaaattgcacgttcatatcaagaacttattgtgacatccccctttggaatttgtccgagagaacttgaaaatacattcccaattcaatcttatgatgtaagtacaactggttcatggtcacaagatgaaattgaagaaacaggcaaattaattgcaaaatattgtgaagggaaaaatattgttgcaaatctttctggaggatatttggaatcatgtgaatcatatgttgatgatttcattaatgtttgtaaagatggaagaccaacttcccctgattcactttacaatttaagaatggaacttaaaaaacatcagaaaataaacaggaaggaaaaaacattacatgaactaagatccattgccaaatttcaatttggtgaaaatggagataaatttatccccgataatgttaaaaccaaaggaatgtatcataaaagaatattatctgatggaaaacaattagctttactaaacaaagatcatggattatatagattaaatttgtctggtggggaaattttaaaagaattaaatacacatattgttgaaattgactttgaccttacaacaaataccgtttttgcaccaggaatcattaaagcagaccctaaaatagtgccaaatgatgaggttatagttgttaaagatgatgctgttgttggtgttggaaaagctataatgaccggacatgaaatggaagaatgtcgtaatggcattagcgttaaactgaaacacagagtgaaatga

SEQ ID NO: 8374 - DNA, 678 bp, Methanobrevibacter gottschalkii
  source 1..678: mol_type = genomic DNA
atgatagatgatatattagtaaagaaattattatcacaaattgttgaaaaagaccatgaagaaaaccttaaaaaaaattttagagaaagatatccggatgaatcaacccctgatggaattgacaatcttataagagcactagaacttccgccagaagatgtgcagtatattgctaatgatattcgtgaaactgttgaaaaaaccatcagtccaattattaaatcattaatagatggtgttgaaacagatgaagaaatagctgaaaaaacaggtattaaattaaatatcgttagaaaaattttatataaactttatgatttaaaaattgccaattataaaagaagtaaagacccggaaactcaatggtttacttattcttggaaatttgaagaaagtgaattaatcaatagaattaaaagtgatagtgaaactgaattatctgaacttaatgcaaaattagaaaatgaagaacataatatgttttttgtctgtccatacggtcatgttaggtttaattttgatactgcagctgatccttattatgaatttttatgccctgcatgcggtgaagaattagaattccaagataatgctgaaattattgaaaaacttaaaaacaatattgaaattgctgaagataattataattcatttattgaaaaaattgataattcatag

SEQ ID NO: 8375 - DNA, 1200 bp, Methanobrevibacter gottschalkii
  source 1..1200: mol_type = genomic DNA
atgaatattccattttccccaccagatataagcgaaaaagaaattgaagaagttgtagcagcgttaaaatctggatggattacaacaggacctaaaacaaaagaatttgaaaaaaaaatcagtgcatactgtggcagtgacaagactgtttgtttaagtgctgcaaccactgctttagaaatgactttaagattgttaggtattggtgaaggtgatgaagtaatcgtgcctgcatatacatatactgcaacatgtagtgtaatttgccatgtgggagcgacacctgtaatgattgacagccaagaatataaagaggaaatggattactcaaaagtaagtgatgcaataactgaaaaaacaaaagttattatgcccgtcgacattgcaggtatattatgcaattatgataaattatatgaaataattgaaagcaaaaaagaattatttgcagccagtaatggcttacaaaaagcttacggtagaattattgtcttagcagactgtgcccatggtttcggtgctgttcaaaataataaaactgcaggaacacttgctgattttacctgtttttcatttcatgcagttaaaaacttaacaacagctgaaggtggagcagtgacttggaaagaacatgaaggaattgattctgaaaaattatataagcaattacagattctttcacttcacggtcaaaccaaagatgcattagaaaaaaccaaaaaaggatcttgggaatatgatattcttcttccggcatacaaatgtaatatgactgatgttcaagctggaattggacttggacaacttgagagatatgattcactgcttaaaagaagacacgaaatcattaaaaagtatgacgaaggatttaaaaatagtaaaattatatgtcctgaacatttctctgaaaacgcaacatcttctggtcatttatatttaactagaattaaagacattaatctagaacaaagaaatgaaatcatgattaaaatggatgaaaaaggaataagtaccaatgtacattataaaccgcttccaatgcttacggcatatagaaatttaggatttgatattgaagattatcctaatgcatataacttatttaaaaatgaaataagtttaccaatttattccactttaagtgatgaagaagttgagtatattattgaaaattttttagatatattaaaagaatattaa

SEQ ID NO: 8376 - DNA, 1887 bp, Methanobrevibacter gottschalkii
  source 1..1887: mol_type = genomic DNA
atgaatgtagatagttttggaaaatacagaaatttcttattgccattaatggatagtatatctgtaattttaggatattacttgatatctgttttaattactgactcttttttaatggatccgataagtgcaataacaagaaatgaaattttaattagtattatactcgcaataattattttacagacaatttttagattaacaaaaagatattcaaatattatccgttacgaaaataaccaagactatattatgtacattcttctttcaataatatctctgcttattgtctctttaattgaagatataattggtatgaagaatccttcaataaaattcaatttaacaacaggtatcctaattgggacactaaccgttgtttaccgtttagtaataagatatgcattattatcagatattgcaaataaaggaattaactacacacctgaaaatcaggaaaaagtattaatcataggtggagggtattctgcaaataatatcattaaaacattgcaaacctcattaaaaggaaagtacaacattattggtattgttgatgacaataaaaaacgtattggctattccgtagctggagtaaaaattatcggtaacagaaaagatatcctgaaaatatgtgaaaacgaagaaattgatacaatatttttcacaattgtaaatattgacaataaaaataaaaaggaaattttagaaatttgtaataaaacatcagcaaatgtaaaagttttaccggacttacgagaaatcatatcttctgaaaatttatatggtagtttaagggatattgaaattgaagatttgcttggaagagaaccagtagaacttgataataataatattaaaagtctaattaataataaagttgttttagtaaccggtggcgggggatctattggtgaagaactttgtagacagataatgattcaccatcctaaacagttattaatgttagacatatatgaaaatagtttatacaatattgagttagaacttaaagataattatccgaatgatgatatcaaagcaattattgcaaacattagagataaagaaagaatgtttgaaatatttgaagaatattcccctgaaattgtttttcatgcagcagcacataaacatgtgcccctaatggaaaataacccaactgaagcaattaaaaataatgtatttggaacttataatctcgttaatgcatgtgacaaatataacacaaaacgttttattttaatttcaacagacaaagcagttaatccgacaaatataatgggtgctaccaaaagattatgtgaaatgatcatacaagccaaagataaagaaagtgaaactgaatttgtagctgttcgttttggaaatgttttaggaagtaacggatctgttgtacctttatttaaaaaacaaattgcaaatggaggtcctgtaactgtaactcataaagacattacaagatttttcatgaccatacctgaagcagtagctttagtattgcaatcaatcacatatgcaaaaggcggagaaatatttgtattaaatatgggtgaacccgttaaaatttatgatttagctaaaagtttaatcgaattatcaggattaactcttggaaaagatattgacattacatttacaggtttgagacctggagaaaaattatatgaagaaattttaatggatgaggaaaatcttgaaggaacagggcatgaaaaaatattcattacagaacctatgaatttcacaatgagagatgttgaagaaaagttagatgcatttagagaaatcataaacaaagaaattactgataaacaaattattaaagaaactatgaaaaaatgtgttcctacttacaaggaaccaaaagaagttaacggagagtaa

SEQ ID NO: 8377 - DNA, 864 bp, Methanobrevibacter gottschalkii
  source 1..864: mol_type = genomic DNA
atgacaagctctaatgaattaaaaaatattaaacatattattaatggagattacattataattcctattgaaacaggttatattaaaccaaatgaaagtttggacgttattattaaacctgccaaagaactaatgaaagataatgattatttagtaatagctgaaacacctgtttcagtttcacaaggcagactaattgatgaatcaaaatattcaccatcattaactgctaaattcttaacaacagtttggagtaaatatttatggggatatattttaggaccggctttaggaattaaaaaaagaacaattagaaatttaagaaaattgcctaaagaaacttatgcccataaagaattaattttacaactatacggtttaaaacatgcattgaaacctgcatctgaggcaggtgttgatttaagcaatgctcctggaacttatgtttcattacttccggacaatcctgaagaagtcactaaagacttgaaaaagaggattggaaaagatgtttgtgtaatgattattgatactgatgcgacatatatgaaaaatggaaagtattttactggactccccattgcaattgaaggaattgatgccgataatggattttttggatatgtaaaaggacaattatctgaaaacatgggatccacaccattaggttgcagtgaaaaactagatgttgaaactgcattaaaaatagcaaacattgctgaagattatcaaaagtcactttccactgaaatgaaaacaatacatagcgttaaggatgtcctcggtactgaatttgatgaagtaactattgaagatcttgattcaattatccacacacctgcagtaataataaggaaaatataa

SEQ ID NO: 8378 - DNA, 570 bp, Methanobrevibacter gottschalkii
  source 1..570: mol_type = genomic DNA
atggcaagaaaatttattacatattttgataaagaaggtaatgattatactgatgagttaataatggctattaaggataaattagatattactgatattaaaagagttataattgcttctgctagtggtgaatctgcattaaaattatatgaagctattggtgatgaagttgaaattattaatgtgactcatcatgttggatttagtggttctaatgaatcagatatttcaaaaggcatgattaaaaaacttgaaaaggtgggaattaaaacatattttggaagtcatgcatttagtggtgctgcaagaggagtcaccaataaattcggagggtattctccattagatattgtagctaatacttttcgaatgttttcacatgggattaaagttggcgttgaaatatctatcatggctacagatgcgggtttaattcctgctggtgaagaaataattgctgttggtggtagaggtcatggtgttgatagtgctgttattttaactccagttaattcaaaagatttgtttgatttaaagattcatgagattatagcaatgccaagagattga

SEQ ID NO: 8379 - DNA, 1137 bp, Methanobrevibacter gottschalkii
  source 1..1137: mol_type = genomic DNA
gtgaaatttatagatgatgcaatcaaagaatccgaacaaagaatggaagaaaaagtgcctgataaactctcttccgatattgacgatgatcttatagagatgattaaaggagctaaaactaatatatttgttgttggtgctggtggagcaggaaacaatactatttcaagattaaatgaaatgggtatcgaaggagcaactacaattgcagtaaatactgatgctcaagatttattttatagtcaatctgctaaaaaaattcttttaggtagaaaaacttctaaagggttaggtgcaggtggagaaccggctgtcggtgaagaatgtgctgaagaaagtgaagatgagattagagaagaattagaaggtgcagacatggtatttgttacatgtggtcttggtggaggaactggaactggttcagcaccgatcatctctaaactctctaaaaaattaggtgcattaactgttgctgtagctactatgcccttttcagcagaaggtattaaaagaagagaaaatgctgaacaaggtttagaaaaactccaagagtctgctgatactgttattgtaattccaaatgataaattattggaagtagcacctaatttacctctaaacaaagcattcatggtatctgatgaaattttaggaagggctgttaaaggtattactgaattaattactaaaaaaggtcttgtaagtttggactttgcagatattagaagtatcatgggaggttctggaatggctatgattggtatgggtgaatctgatactggtgatagagctttagaatctgtacatgaagcattaagtagtccattattggatattgatatatcaaatgctactggtgcattagttaacatatctggtagttccgacttaacattacatgaagctgagaaaatcgttcaagttgttgctgataaattagatcctgaagctaacattatttggggtactcaaattgatgaaagtcttcaaaacactgttagaactacagttgttgtttcaggcattaaaactggttatgaggaagataattcccctgaaattgaatatgcggaagataattctgaaaataagtcagcagatgatcaattagatgatttcattgatggaattttctaa

SEQ ID NO: 8380 - DNA, 180 bp, Methanobrevibacter gottschalkii
  source 1..180: mol_type = genomic DNA
atgaatgttcaagaaaattttaacaagtttatcaaagacagtaaaagagtattaaaagtagctaaaaaacccgatggtgctgaataccgtgaattggctaaaatttcagttttaggtgttgcagtcattggtgttgttggttttgttattgttttattaggctctttaatcggcttataa

SEQ ID NO: 8381 - DNA, 471 bp, Methanobrevibacter gottschalkii
  source 1..471: mol_type = genomic DNA
atggaagatactaatagttccatatatgctcttaaaacatccgcaggtcaagaaagaaatgttgctaggcttttggcacgtaaagctagaactatagatggtataggcatttcctcaattcttgttccagaatctttaaaagggtatattttagtcgaatcttcaacaaagatagatctcagaaaccctgatttaaaagtacaacatttaagaggggttgttggtggagatgctacaattacttttgaagaagtaaaaagattcttaaaaccagaacctattatttcctctattcaaaaaggaagtattgttgaacttatttctggtcctttcaaaggagaaagagcaaaagtggttcgtattgatgaatcacgtgaagaagtcgttcttgagttaatagaggctgcagtaccaattccagttactgttaaagctgatcaaattagaataattcaaaaggaggctgactga

SEQ ID NO: 8382 - DNA, 480 bp, Methanobrevibacter gottschalkii
  source 1..480: mol_type = genomic DNA
atggctaaagatacagtcgaagttcttatcgaaggtggaactgctactcctggtccaccattaggtccggctttaggacctctcggtattaacatgatgcaagtagttgaagaaattaataagaaaagcgctgattttgcaggaatgaaagtacctgttaaagtcatcgttgacagagatactaaagattttgaaattgaaatcggtactccacctacaactgctcttatcatggaagagttaggcatcgaaaaggcttctcatgaaccaggtttagatattgtaaatgacttaccaatcgaagctgcatttaaaattacaagaatgaaatttgattcattacttgctaatgattataaatcaggtatcaaagaagttatgggaacctgtgttagtatgggattatctgttgatggtaaagacccaagagaagcacaaaaagatgttgatgctggaaaatatgatgatatcttattataa

SEQ ID NO: 8383 - DNA, 639 bp, Methanobrevibacter gottschalkii
  source 1..639: mol_type = genomic DNA
atgacacaagatgtaattaacgcggtgaaggaggcaaaagaacaatctaagccgagaaacttcactgagtccgtagatattattattaatatccgtgacttagatgtcaaaaaaccagaaaataggtttaatgaggaagttactcttcctaacggccgtggcaaagatgttaaaattggagtcattgctgatggggaactcattgttcaagctaaagatgctggtcttgacactgtaattaataaaggagatttagaagcttttggaaaagacaggaaatctgctaaaaaaatggcaaactctgttgatttcttagtggctcaagctgatatgatgccacttgttggtaggttcttaggtccagtacttggtcctcgtggtaaaatgccaaaaccagtgcctgcaagtattaaattagctcctctcttagaaagattacagaacactgtcaaagttggtgtaaaacagcaaccaagtattcaaattgttgttggaagccaagacatgtcagacgaggatatagctgagaatgtggaaactgttcttacagtcttagaccgcaatttagaaaaaggaagaagtcaaatcaagtccatgtttattaaaacaactatgggaccagtagtgagggtgatctaa

SEQ ID NO: 8384 - DNA, 1005 bp, Methanobrevibacter gottschalkii
  source 1..1005: mol_type = genomic DNA
atggctcatgttgcagaatggaaaaaggaagaagtccaagagattaaagaaatcattaatcaacacgaagtaattggtattgttgatttaatgaacattcctgctaaacagctccaagaaatgagaaaatctcttaatggcaaagctgttatcagaatgtctaaaataaatcttattgatttagctcttgaagattgtaatgctgataaaaacaatattgttgatttatctgaacatatggaaggacaagttgcacttattgctactgaaatgaatcctttcaaattatacaaaatattagaagacagcaaaacttctgctcctgccaaaccaggaaccattgcttctgatgatattattgtacctgaaggagacacaggttttgaaccaggtcctttcttaggtgaattacaacaagttggaattcctgcaaaaattgataaaggtaaaatttgcgtacaaaaagaaacagtcgttgtaaaagcaggtgaagaagtttctaaacaagtggcagcaactttatctagaatggatattaatcctatggaagtgggaattgatttaaaagcagtatatgaagatgaagcaatttatacttccgacatacttgcaatcgacgaagaacaaacattagctgacgttcaaaatgcattcagaaatgcatttaatttatctgtaaacgcagcaatccctactgatgaaactatttccactattattactctcgcatacactagagctattaatgttggtgttgcaggagcaattatgacttccgaaactgctgaaccaatccttggtttagctcaagctaaaatgttagctattgcatctgaagttgctgatgcacccggtgctattgatgatgaattagctgaaaaactttctaatgttgctgtagcagctgctccagtaattgaagaagttgttgaagaagaggaagaagaggaagaagaaagtagtgaagaagaagcagcagctgggttaggagctctcttcggttaa

SEQ ID NO: 8385 - DNA, 303 bp, Methanobrevibacter gottschalkii
  source 1..303: mol_type = genomic DNA
atggaatacatatatgcggcaatgattttacacagtgcagaaaaagagattaacgaagaaaatgttaaaagtattatcgaagcagcaggaattgaagctgaagatgctagaatcaaagctttaattgcagctttagaagatgttgacattgatgaagctatggaaactactgctatggcagcagcagctcctgctgcagctcctgcagcagctgaagcagctgaagaagaagaggaagaagaagaggaagaagaagcttctgaagaagaagcagcagctggattaggcgctctcttcggatag

SEQ ID NO: 8386 - DNA, 2703 bp, Methanobrevibacter gottschalkii
  source 1..2703: mol_type = genomic DNA
atgattaatatggtagaaatttttgaaaaacttggttataaactacaaacttgtaaaacttgtggacaagagttttactctcaagtggatagagacacttgtggtgatgctccatgtgatgagtatggttttattgcaaatcctgctactgataaaccatataatttgtatgaaatccaaaaagtttttaaagaatttttagaaagcgaaggccacacagctattgatagatatcctgttttagcaaaaagatggagagatgatgtatttttagttggagcatctatcttttgcttccaaccatggattacttcaggacttgttaaacctcctgcaaatccattggaaatcgcccagccttctattaggttaaacgatgttgataatgttggaaggactggtcgtcacatgacttgttttaccatgggttcccatactgttataaatactgaagatgattttatttactgggaagatgaaactattaggctttgtcatgaatttttcaagtcaattgggattaatacagaagaaattactttcattaaatcctggtggtctggtggaggtaatgagggaccttgttatgaagtatgttgtagaggtgtagagcttgcaacacttgttttcattcaatatgaaactttagacgatggatctaaaaaagaaattcctattaaagttgtggatacaggttacggtcttgaaagaattgcatggatttctcaaggaactccaacagcctatgatgcatgtttcgcgcctgttgttgataaattaatggaattaactggtgttgaaattaatgaagatattcaaggaaaaaatgcccaaatagctggaatgatggatattgaagatataggggacttaaaagatcttcgccaacaagttgcagacagtttaggtctttcattaaatgattatttagaaatagctgaaccgatggaggcaatttatattattgctgatcacactcgttgtcttgcgttcatgattgctgacggtattattccatctaatgtaaaagaaggttatcttgcaaggttagttttaaggagaacaattaggttcatgaaagatttgaacatgaaagaatctcttgcagatattatggcaatacagcttgattttttatctaaattctaccctgaaattcgcgattcagaacagcacatcatgaatattatttctctggaagaagaaagatattccgccactgttaaaaaaggcaaaagtattgttaaaagatccattaaaagactcaaaaaagaaggcaaaaacgaaatgcctcttaatttgctaatagatttatatgatgctcatggaattcctcctgaaacagttgttgaaatcgcaggagatgattttgttgttaatgttccagacaatttctttacacaagtggcgggagctcatgaaaaagataattctagtaaaaaatccactttcaaagtagattttcctgaaactgagttgttattctataaatatttctaccaacaagaatttgaagcggaagttttaggcgtgcttgaaaaggatggaaaacaatgtttaatctttgataagaccatattctatcctgaaggaggaggtcaaccttctgatatgggtgaaatttcaattgatggaaatgtgttaaaagtaagtcatgctgaaaaagtcgatgatgtggtgttacatcatgtagatgaagtttcacaggatattgtcggcaaaacgatcttgggtaaaattgattgggataggagaataacacttgcacgtcaccacacaggaactcacttagttattgcagctgcaagaaaagtgttgggtcagcatatctggcaagcaggatctcaaaatggtcttacaagggcacgtattgatttatctcattacaggcgtattactcaagaggaattaaatgaaattgagaaattagctaatgaatatgtaatggaaaatattgatctggatattcagttccacacaagagatgaagcacaagaattatatggattcgtactttaccagggtggtattgttccgggtaaaatgattcgtgttgttaaaattcctggtgttgatgttcaagcttgtgcaggcactcatgttttaagaactggtgtagttggaccaattaaaattaataaaactgaaagagttcaagatggtgtggaaagaattgatttctcagcaggtcttgcagcaattgattccatgcagcatgataatgaacttttaagggaaagctcatcaatatttaaagttgacaacgaacaactcccaaaaacatgtgataggttctttagtgaatggaaagcacagaaaaatgaaattgacaggttaaaaactcaaattgcttctttaaaaatgaattctttagctgaggattatgaagaaatcaatggattgaaagttgtatctgaattgatggaagcggactttaaagaacttcaaaaaatagctactgactttacggataatggaaaggcagatgtagttattatgggaaacaatgatggtaaaatcgttggtgcagcttctcaaaatgcaattgataatggaattaaaattaataatgttatcaagtctgcagctagtatattgggtggtggcggtggaggtcgtttaacattagcacaaggtgctggtaaaaacacagataaaatgaatgaagctattcaaacagcaattgggttaatcaaaggataa

SEQ ID NO: 8387 - DNA, 3057 bp, Methanobrevibacter gottschalkii
  source 1..3057: mol_type = genomic DNA
atgaaactaaaaaataagattttagttttactattatttttagtgcttatttgctgtcttggggcagtaagtgcagctgaagatattaatgaaaccataactgcggattcttcaatagatgatgtgaatactgtttctgttgaagatgcagttgatgaaactgtatctgatgattcagatagtgataagggaatagttgaaaatcaagatgttgaaaaaacaaccatgttaactgataggggagttaatgttaatgcagcaacatggagtaaattatcacaatatgctggagttattggcactgattatattataactttaactggggatagttacgctactgatagtcaaataaagtttaataatggtgctacaattattggttctccaaataattacataactactggatcttatactaaaactccttttcttaatacaaattctgctctcaccataactttcataaatgtcacttttaagaatatgaatgttgattatcttttaagtttagcaggaacaaatgttttagaaaattgtaatttttataatattactgctggaactggtcataatgcagtaatctataacacagatggaacaatgaatttaactaattgtaacgttattaattcatctgcaggttatggtgttgtaagtaattataaatctggaacttatacaggggttgttatgaatgtaaatcattgtacatttattaataactctgctagtgtagaacctggtgctattaataattgtggtattttaaatgttgataattcagaatttattaataatactgctacttggtgggcaggtgcaattcacactcattacaatgcacaaactataataaataacagtctttttgaaggtaatgtcgcaggatggaatggtggagcattatatacctacagtacattaaaggtatataattccatttttaaaagaaataaatgtcacacaaatattggtggtggagctataggtgcttcaagatggtggagtggaaactatgatattacaatagtgaactgtacttttgaagaaaatgaaaactgtaatactaatggaaatggtggtgcaattactgctttgaatagtggggcattaaatgtgcatgactcaactttcatagccaatgttgcaaaaaatggtcaagcaatatctgctttcagtcaagcatttgaaaatattactgcaggtattccaaacttaaaagtatacaataatactttctacaatcacactttaactacatccgatacagttgaaataagtggaaattacacatttgaaaacaatacatttattaattgttatcagactaatttagggactaataacgtatttattaatcctgtaacacttaataacaataatttgattcttaaatcaaataaagagcatttgttaatgagtaatttatctgaaaatattttaaaaaatgctcctaatgtaatatatgtagatagtaattctgataaggactgtgatgaagatccaaatattgatggtcacaattgggaaactgcttatggaggaatttttgctttatcaagtgcaatatttaacatatgtgatggtggaaaaatttatcttgcagatggtgaatatagttatagaacaaacggtgctattactcatcctaaaaatttaactataattggtcaaggagcaaatactattgttgaccttatttcatgtggagaagaaactacttatacatgtatttttattaatttaacagtttctggtaaggattatggtaggaacaccaattttattaattgtacatttattaaaccaatttcaatatctgctgatataaatttaaatagtgttttaaaagaacatgctgtggaaaatggatatgcaaatacatatttaataaattttgataattgtgtttttaaagatgttgttgacgatagaataatcactttatttgaatatggtgctttgaattttactgattgtgtttttgagaatattactgctgattcaattgtttatcgcaatagtactggctattttgaggatgacagtatttcatttaggaattgtactttcagtaattgtaagtttaatggtgtagttgattctaagactaattttgatgatgctattgttattgaggattgtacttatgatggtgatgttgctttaggtactactgaggttgatggtcatttttatgtaaatgctactaaacttaaggttgttgctgttgctactaatatgagtatttcttcttctcaaagaggggttgtagttattactcttagagatgctgaaggtaatgctgttagtggtgttaatgttagttatactgttaatggtgtgaatatgagtggcgttagtgatgcaaatggcactatcactatttctgatttaactgatgaagttactgttagtgcaaatttcactggtagtgaatcttatttagcttccaataacactgctagctttaatttcacaattcctaaagtttcaactaaactctatgtttctagtgtgactacattttataatgcaggtaagtatttgactgctactttaaaagattccaatggtgaagttttagctaatcagaaagttacaattaaaatcaatggtaaaacatataataaaataactaatgctaaaggtcaggctactttaaaaataagcactcttttacctaaaaaatatactgctactgtaaattatgctggtgatgatacacatattaaatcttcagctaatgctaaagtaattgttaaaaaagcaactcttaaactaacagctaaagcaaaaacatttaaaaaatcattaaaaaccaaaaaatacacaataaccttaaaaaacaatgtaggtaaagtcatgaaaaagaccaaagtcacattaaaaatcaaaggaaaaacatacaaagcatacaccaacagcaaaggaatagccacatttaaaattacaaaactaactaaaaaaggcaaatacaatgcttacattaagtttgcaggaagcaaatactacaacagcttaaacaaaaaagtcaaaataaccttaaaatag

SEQ ID NO: 8388 - DNA, 1155 bp, Methanobrevibacter gottschalkii
  source 1..1155: mol_type = genomic DNA
atgaattatgatttaattattgccagatatggtgaaattggtgttaaaagtccaaaaatcaggtcacgttttgaaagaaagctagttaaaaatattaaagctacttttgattgtgaagttgatagaaatcaaggaagaatttatattcatccaaaagattttgaagatggtgtaaaaaaattgaacagagtattcggtgttgtatcttattctccagccacatctactactgctacttatgaaggtattgatgaaacattaactaaatatgttggggatttaatttcagaagatttaattgatgaaaatacaaaatttgctattaaatgtcgtcgtgttggaaaacatgatttttcatcacaggaaatggctgctcactgtggtggggttgtgagaaatgttgttttagctccagttgacttaacaaatcctgatttaacaatatttgttgagattagagataataatgcttttattttccatgaaaaaattaaaggacctggtggtcttccattaggaacacaaggaaaagttgttgcattgctttcaagcggaattgactctcctgtcgctgcttatttgatgatgaagagaggttgtgaagttattgcactaaattgtgacaattcaccatttacaactccaaaagctagtgaactttttgatgcattagttgatcagttaaatatttatgcaaaaggttctcctattaaaaaacgagttgttcattatggggaatatctgcaagctgctaaggataaggctcctgaaaaaatgacttgtgttttatgtaaatctggaatgtatcatattgcagagaaattagctttgaaacttggagcagatgctattgttgatggaagtagcgtaggtcaagtggcttcacaaacattatcaaatattttagctactagatatggtgttgacatgccaattctatctccattaattggtttggataaagaagagattactcaaattgctaaaaaaattggcacttttgaaatctctaaaattgatgatggtggatgtagtgcggttcctagatatcctgaaacacaggcagatttagaacgtgttaaattagcttgtgaagatatgaatcaggatgaagaaattgaaaaagcttttagaaatattgtaagatttgattaa

SEQ ID NO: 8389 - DNA, 1095 bp, Methanobrevibacter gottschalkii
  source 1..1095: mol_type = genomic DNA
atgaaaactactgttagtgtaattaaagctgatattggaagtgtgtctggacactgtgtagcacacccagaattaattgatatttgtgatgaagttttaaatgaagctttagaagcaggtattataaaagattactatatctcccgttgtggagatgacattgatttaatcatgacccatgataaaggggaagaaaatgaagaagttcataaaactgcatatactgcattcatgaaagctactgaaagagcacgtgaattaaaattatacggtgcaggtcaggatttattaactgatactttctctggaaacatcaaaggtatgggtcctggtgtagcagaaattgaatttgaagaaagaccttctgatcctgtacttgtattctgttgtgataaaactgaacccggtgcatttaatttaccagtattcagaatattcgcagatccattcaacactgcaggtttagtaattgatcctaaattacacgacggttttaaatttgaagtattcgatgtaattgaacacaaaaaagttatcttaaactgtcctgaagaaatgtatgatttactcgcattgattggttctactggcagatatgtaattaaaagagtatggaagaaaaatggtgaaattgctgctgcagtaagtactgaaaggttaaacttaatggctggagaatatgttggtaaagacgacccagtatgtattgtaagagcacaatccggttttcctgctaatggtgaatgcgtagatccatttgcattcccacacatcgtaagtggatggatgagaggatctcacaatggtccaatgatgcctgtatctgaagcagaagcaaacccaatcagattcgatggtcctcctagagtggttggtttaggtttccaagtatctaacggggaattaataggtcctgtagacttatttgatgatccagcatttgatcctactcgtgaacaagctgctaaaattgcaacttatctcagaagacacggtccatttgaacctcacagattacctgctgaagaaatggaatacacttcattacctggtgtaatgaaaaaactagaatccagattcgaagacatggattaa

SEQ ID NO: 8390 - DNA, 276 bp, Methanobrevibacter gottschalkii
  source 1..276: mol_type = genomic DNA
atgccacaaaatgaaatgcgaaaatcaggtgttaaaatgcataaaacatatctgctggaaaatatcgatgaaatacatacaactgaaatgggtattggaagagtgcaaaaaaatttacaaataacatccgaacccgtcagttattgcatttcaaaacttaaacaagaagattcaaaagtaactaaaaaaggaaaaaattattatgtcaaagctgataattgtataataaccattaattcaagcagttttacaataataactgcccataaaaactaa

SEQ ID NO: 8391 - DNA, 1110 bp, Methanobrevibacter gottschalkii
  source 1..1110: mol_type = genomic DNA
atgtcatttttaaaattcattcttaaaaatccatttaggagaaaaaatagtgcaattttggctattgttggtattgcaataggtattgtcgttattgtttctctcggtggcattactgatggtttaattaatacttttgaagatactatacatgcaggtggtgctgacttttcaatttcaggaaaagaaactggaaattcggcatatggaactaatacaattgattctagttggacagaaaaaatagccaaggtacctggagttgatgaagcttatccaatttatgttgttctaacttcggttggtgatgattatatgaatactttaattggtattgatcctgaaggtagtgaacttgcagacatatcaatgaaagaaggtaggatatttgaagacaatacttctgaagttattttaggtgaaatctatgcagaagataataattattctgttggagacagtatcataattaatggtgaggactttaaagtttcaggtatttatgaaactggtgatcaaaacatggctggaggggtttttacatcaatctctaaaattggagagttaatggatgataaagactcaatttcaaatatttatgttaaagtaaataagggggaagatgctcaggctgttgctgatagaattgatactaaatatggggataatatcacaacagtcacatcagttatggaaatgactcaaatggctgatatgttgaatatgcttcaagcatccacttgggcgatttcacttttagctattgtagttggtggtcttggcattatcaatacaatgttaatgtctgtatttgagagaactcgtgaaattggtgttttaaaagctgttggttggtctaataaaaagattcttacaatgattgtaggtgaatcattagtaattacaatagtctcagcaattatcgggtcattaattggatttttagcatgtactctgttaggtccgcaaatgggaataaatccattgttcactccgaaaattttcatacaggcattttcaatagcaattattgttggggttgttggagggttatatcctgcaattaaagcagtaaaacttccaccaacagaagcattgaggtatgaatga

SEQ ID NO: 8392 - DNA, 699 bp, Methanobrevibacter gottschalkii
  source 1..699: mol_type = genomic DNA
atgaatgctgtggaaataaaagagttatataaaagttatgagggcggaaaaataaaagcattaaatgggattaatctcacaattaaacagggagaattcgtatctattattggtccgtcaggttctggcaaatcaacattgctaaatatgctgggcgcattagatattcctgattcaggaacaatcaatgtcaatgggcatgacttaaaaacatctaaaaagttaaatgaattcagatcaaaaaaaatcggttttatttttcagctacataatttaattccaaatatttctgttgttgaaaatgttgaaattccaatgtatactcaaaaattatcttctaaagagatgcgatttcgcgcattaaagttattggatgatgttggtcttagtgaaaaatcaaaaattttaccaaataaattgtctggtggtgaacgtcagagagttgctattgctcgtgcactggcaaacaatccatcaataatattagcagatgaaccaacaggatcacttgattctaaaacaagtagtaaaattcttaaacaattaattgatttgcatgaagacaaaaatgtgactttgataattgtaactcatgatatggatgtagctaaactggctgatagggttattgaagttttagatggtgaaataatatctgcaggtgatgattcattaataaatagtaaaattgatgtttag

SEQ ID NO: 8393 - DNA, 243 bp, Methanobrevibacter gottschalkii
  source 1..243: mol_type = genomic DNA
atgactgaacttgaaagtcctgaaaagatagcgaaagatattttaaaattagaaaggaatttgaatcaagttgccgatattacttttaaaggaaaagaaaaagaagtttatgacagagctattgattactggaatgattcaaaatattatcttgaaaaaaaagatatgaggactgcattcggttgtattgaatacagccacggactgcttgatgctttaaggatgattcatggaatcatctaa

SEQ ID NO: 8394 - DNA, 570 bp, Methanobrevibacter gottschalkii
  source 1..570: mol_type = genomic DNA
atgcttcaaagtttaagaccattattaacaagaatattgaacccaatagctaagagattaaatattaatccgaatattgtgacaataatttcaccatttgttgctctacttgcagcttatggatttgcaaataaattattaattttaggaacaatagcaattctgctttcgggatttttagatgttgttgatggtgctgttgcaagatatcatgaaaaatcttctaaattcggtgcttttcttgattcaacaatggatagatttgcagatgcaataatttacatcggaataatatttggaggatactgtgattggttagttggaatactggcaatccattctgcaatatgtgttagttatgtaagagcaagagccgaatctcaggaagttgattgcaatattggaattgcagaacgtgctgttcgtatgattattttaatgattggagcaataattggatacttcgcaggagacatttactttacatacattatttacattttagtaattttatcttacttcacagttggacaaagaatattacatgtttggaggcaattaaatgactga

SEQ ID NO: 8395 - DNA, 582 bp, Methanobrevibacter gottschalkii
  source 1..582: mol_type = genomic DNA
atgaaagttttaaaaacaagtattgattgtgttgatgaaagaataattaatgaagcggttaatgtattggctaatggtggggttgtattatatcccactgatactgtttatggattgggagctaatatttttgataataaagcagttaaaaaagtttatggtattaaacaaagaagcttattaaaacctttttcaatacttgttaaggatattgaatctattaatctggttgcaaaagtctcatcagctcaaaaaaatctttttaataagtatttgcctggaccttatacgtttattttaaataaacgcaatattgttccgagagttgttacaagtgggttggctaatgttggtgttagggttccggactgtgatattgcttgtaatcttgctaaaatttttccaataactacaactagtgctaatgtttctgatgatgagatgctatctaatcccagagaaattttagaacaattggattgtgatgttgatttggtaattgatgttggagatttagattcaaatgtcccttcatcgattattgatttatcaggattcaaaccaaaaataataagaaaataa

SEQ ID NO: 8396 - DNA, 705 bp, Methanobrevibacter gottschalkii
  source 1..705: mol_type = genomic DNA
atgaaagtattggctaattttgaagacaatcacaaaattccatcaaattctgctcttgatgtgatgttggcagggggatttgagaaaggaacaattactcagatatttggaccacctagttcaggtaaaagcaatataactctttcagttgctgtcaatgttgctaaatttaataaaaaagtgatttacattgatactgagggcggaatctcaattgataggattaaacaaattgcaggtgttgatttttcaaatgttgctaataatattattgttttcgaaccaacaagttttttagaacaaaatgatgcagtaaagtctattgatgcttggcttagaagtaatcataatgatgttgatttaattgttttagattctgctgtggcattgtacagggtagatgatatgaaatcatccaaattaaataaagaattaggtaaacagatgggtcttttatctaaaattgcaagacagtatgatgtcgccattattttgacaaatcaaatttatagttcttatgatgatgagggaaataatgatattaaagcagttggaggaaccattttacaatactggagtaaagtaataattcagcttgaacgtggtgaggaaatcaatcaaagaatcgccacattaaaacgtcatagaagtattcctgaaggaaaacaagttactttttcaattacttcaaaaggaattatttag

SEQ ID NO: 8397 - DNA, 1170 bp, Methanobrevibacter gottschalkii
  source 1..1170: mol_type = genomic DNA
atgaggactgattttgatataaaaaacccaaagaaaaagtttaaaaaaactgaaagggtgcctccaaagggttatgataatgcaaatgatttttttgaagatatgtatatggatgaaaatatgatttggatgggtcaaaacaccaaccatttgcatgatgatacaatagctaatgctatgattgatgctatccgtatgaaaacttattgcagatatccggctccagaagggttttctgaactcaaaaaattagttttgaaagatttaggttttgaagatgaagaagttttattaacctctggtgcaactgaatcattatatttatgtatgcaagctcttttaactcctgaagataatgtgattctatcagatcctggatattttattattggagactttgcaaatagatttgcaaatgaagtaagatatgttcctatttatgatgaaaaatacgggtataagttaactccagatcttttaagagaaaatatggatgaaaatactcgtatggctattttaattgatccattaaatcctttaggttcctcatacacggaagatgaattaaaagaatttgcagaaatcgcaaaagaaaatgatatttaccttttacatgatgttacttacaaagactttgcaagagaacattttcttgtagagaattatgctcctggtcaaactttgacaatttacagtttttcaaaaatattcggaatggcaggtttaagaattggtggggttgtatcctcaaaaccgataattgatgctattaagaatgctgttgtaaatgatttgggagtaaatattatttctcaatatggtgccattgcaggactcaaatcaaaagatgtttggtttgaggatatgaggcaaacttgttttgaaaatcagagattaattaaagaaatggttgatacagtggatggtattttcttacctgtttatccatcagatgcaaacatgatggttatcgatatttatgatacaggtatcaatccaaaagatttgtcaaattatttaattcagaaaggactattcacaagagaaggagaatacacttctgatgaatttggagagagatacttacgtgtcagtttttcaattccaacagaagagattaaaatattctgtgaagagttccctaaagctattgaagctttaagaaaatga

SEQ ID NO: 8398 - DNA, 735 bp, Methanobrevibacter gottschalkii
  source 1..735: mol_type = genomic DNA
atgattaatatggattttaaggggttcagataccacaagccgcttcctaatttttataaaactgataatcctttaactcctaaaagggagatttccgatgatttacttttaaagttagataatttagctaaaaaatataatttcactggaattagctattctaaattatctgatgactttaaaaaggattttaatatagattttgataatgtaattatttttagatttcttatgaaaaatgaattgataaaaatggaatcttcccctgagaaatctaaattaatggatatggagtttcaagtatatgggattcatatctatgaatttgcagattttttaagagaaaacggatttcaagcagatttattgcatccatttgatgatgacttaagtttaaaatcaatagctatgcaatctggggattgtataattactagaagtaacatatgtttatttaaagaagggttgcataatggatttttcatgattcatacatcaattgataatttaccatttaaaaatgaaaatgatatgttatgggttaaagatttctgttcaacttgtggggtttgtattgagagatgtcctaacgatgcatttgattatgaagaaaatctgcttcgaaaattttgtacagctcatagagaaggttgtagtgaatgtattttaatatgtcctttctttaaaagaggttatgataaagttaaaagaagatatgatggaatgaaaaagtag

SEQ ID NO: 8399 - DNA, 378 bp, Methanobrevibacter gottschalkii
  source 1..378: mol_type = genomic DNA
atgaatgataaaatagctttagtttcatgtagtggtttgagcccattaggattagttgtaagagcagcaagtgttgaacttgctttagaaaatgaaaatattgttgcagcatgcattacagaatattcagcacaaccaaacaattgttctccaatactggatgatgcaaaaatagttactataactggttgtggagatgactgtgcatctgttattctaaaagataaaaatattgctgctgttaaaaatatttctctagatcatgttgtaaaagcctatgaattaaaccctttggatgcagttcgtttagatgaggatggtgaaaaggctgttgttgttttgaaaaaatacatcttaaaagaacttgaaaatatctaa

SEQ ID NO: 8400 - DNA, 1779 bp, Methanobrevibacter gottschalkii
  source 1..1779: mol_type = genomic DNA
atgactcgtatttcaattttagacaaagatagatgtcaacctaaaaaatgtgattatctttgtattaattattgtccaggtgttagaatggatgaagacaccataataattgatgaagatacaaaaaaaccgttgatatctgaagaattatgtgaaggatgcggtatttgtacaaaccgctgcccttttgatgctattacaattatcaacttaccagaagctgtaggagagcccattcacagatttggtcaaaatcaattcgaattatttggacttccaactttagaagaaggaacagtattaggtcttctcggacaaaacggtattggtaaatccacaatcatgaatattttatctggtaatctgattccaaattttggagactttgaaaacaagcctgaaaactgggatgaagtaatcgaattttacaagggatcatctcttcagaaatatttcagagatttatccgaaggaaatataaaaaccatcctaaaaccacaaatggttgatcaacttccaaaagttgtaaaaggtaaagttaaagatttactaacaaatgttaatgaaagagataaactggattatgttacccaagaattacaacttgaaaatgtattagaaagaaaaatggaaaacttaagtggtggggaacttcaaagagttgcaatagccgctactgttttaagagaaggggatttttattatttcgatgagcctacttcatggctggatgtatctcaaagattaaatgcagtgaaagtaattcgttcacttgctgatgaaggcaaaagtgtacttgttattgaacacgacctcgctactttagatgcattatctgataacataaatatcctatatggtcaacctggaggatatggagttgtatctggaagaaaaggtgttcgtttgggaattaatgcatatattaatggatttttaaatgaagaaaatgtaagaattagaaaaaatcctattgaatttaccataaggccaccaactccagaagacgagggagatgtacttgcaagttactctgacttaaaaaaagagtatgatggattcagattatctgcagatgctggtgaaatattttacgacgaaattataactgccttcggttcaaacggtattggtaaaaccacttttgctaaaatgcttgcaggagttgaagaaccaaccaatggtgaaattgatgaagaagttaccattgcatacaaaccgcaatacattgtttctaactttgaaggaactgttagtgacttcctatacatgaatgctccaagttttggtagtaaaatcttcgatagtgaaattatgaaaccgttaactttagatgaaatgttagacaaaccagttaatggattaagtggaggggaacttcaaagattagctattgctgcaacactatcgaaagatgctgaaatttatctttttgatgaaccaacagcatttttagatgttgaacagagattaatagctgcaagggttatccgcaaaatggtggaaagtagaaatgccgcttcacttatcgttgaccatgatatcgtatttattgactacatttcagatagggcaatggtattcaacggaactccaggtttaaacggtcatgcatccaaaccaactgaccttagaaatgcaatgaacgaatttttaggaaatcttaatattacatttagaagagataaagaaacaaaaagacctagagtaaataaacttgacagttataaagaccgtgaacaaaaagagaaaggagaatattattacttatcagattaa

SEQ ID NO: 8401 - DNA, 339 bp, Methanobrevibacter gottschalkii
  source 1..339: mol_type = genomic DNA
atgaaacaggtgatgattgtcagaacagatttgaagatgggtaagggaaaaatggctgctcaatgctgtcatggatctatcggttcatataagaaagcttccccagataaaattaaaaaatgggaaaatgaggcttatgctaaggttgttttgaaagttaaaactttagaagaattaacagaacttaagaagatggctgatataaataaagttcctaattatcttgtagttgatgctggaagaactcagatacctacatcaagtgttacagttttagcaatcggtcctgatgaggacgagataattgataagataactggtaatttaaaacttttgtag

SEQ ID NO: 8402 - DNA, 663 bp, Methanobrevibacter gottschalkii
  source 1..663: mol_type = genomic DNA
atgagcataaaacaggttgttaaaattgggggaagtttgtttccagattatgcaatagatttagcaagacatctcaaaaatactgattcactcattattttagggggtggtgaatttgcgaatcttattcgtaaatatgactcagaaattaatttttcacaaaaaactagtcactggacagctattgattgtatggatataattgctaaacttgtaaatgataaagttgaatcaacaaaattggcatattcaattgatgaagttcaaaagatttctgatgaggggttcactccgatatttgtagtttcaggttttttaagatgtgaagatccttttgaatgttcgtggaatgtaacttctgattcaattgcagcttatatttcacaccttctgaatgcaaaccttttaatagtaacaaatgtaaatggtatatatacccatgaacctaaagagtcaggttcaacattcataagtaaaattgatgcaaaaactttactaaattttcaagagtcatcaattgatgtaatgttaccatctcttttgttaaagttcgggactgattgttatgttgtgaatgggaagtaccctgaaagggtgttatctttaatagatgataatataaatgattataacttcgattacacacaaataataggtgattaa

SEQ ID NO: 8403 - DNA, 162 bp, Methanobrevibacter gottschalkii
  source 1..162: mol_type = genomic DNA
atgaaaactgtagaatgcatttcatgtaaacaagaaattccattaactggcacatttgttgaattcaaatgtcctatttgtggagcaaaaatcgcaagatgtgaaaaatgtcgtacctttggtcacgcttacaaatgtgaatgtggttttgaaggaccataa

SEQ ID NO: 8404 - DNA, 270 bp, Methanobrevibacter gottschalkii
  source 1..270: mol_type = genomic DNA
atgggtgaagttttaactacaatgaaaatcatgcctgatagtccagatattgatttagatgctattaaatctactatcgaaaattcaatgccagaaagcgctaaactccatgatatggctgaagaaccaatcgcttttggtttggttgctattatattacagtttattactgatgatggtgaaggtggatctgagcctgttgaagatatggttcaatctatagaaggcgtagctagtattgaaattactggtgtaggaagattaatgtag

SEQ ID NO: 8405 - DNA, 729 bp, Methanobrevibacter gottschalkii
  source 1..729: mol_type = genomic DNA
atgggtaatattatggatagaacaaaaaagattatcattgcacttataattattgttttgattatattggtaggaattattgctagtgtatggttcattggtcatgatgttgatttagatgagggtagcaaaacaatattggtatgtgcaattgatgaaagcgaggatcggccaggtatgggggcttgtgatatggcattccttgttcatttggaaaatggagctattaaaaattatactcctgtttatccgggcggtatgacacacccaactgctcaggagcccgctgaagctcaaagtcagggtgccggatcagatttattacttcacgatgcattctgggatgtggataattctaaaggaatgaatcttgcaaaagaaatagttgaatatcgtacaggtagttcagttgattctgttgtagcaattaatactaaagcattagatgctattttatctgcagcagctcctcttgaagttaatggtaaaataattaatggaagtggaattgatttcattcgcgaagatggaagtaatggtgtgtctaggggtgatgcagtaatggaaatagttaaagctacagcaaactctgcaaaagatccggttaaaaaatctgcaatgataaatgctgcagtggatcaatactctaaaggtaacattattatggatcaacaagggtcttttgttgatttattagcatcaaaagggattgaaactttttttaattaa

SEQ ID NO: 8406 - DNA, 1068 bp, Methanobrevibacter gottschalkii
  source 1..1068: mol_type = genomic DNA
atgtacaaaaagatattagttcctactgatggatcagaggcatcattcaaagaagttataagtgctagtaatttattagcagaagatggtgaaattattgttttatccgttgcaaaacagctaaaacaacatccgcttcaaataaaaaaggatattaaaaaaaccaatgagacatttattgaatatgcaaaagaaaatgttgaagaaatgaaaaagaaatttgattcaaacataaaagtttccactaaagttgttgttggttttccggcagaagccatatgtgatgttgctgaaaaagagggcgttgaattaattgtaatttcttctgcaggtgaaagaggattcagtaaacgtattattggtagtgttgcaggaaaagtatgttctatttccaatataaatgtattgttaatttctaatgaagaaaaagaattaataaaacattcaaccactaaaaaatcagacaataaaaataagatcaatagggattatacaagatttagaaatgatttgtatgttctattaagatttatttctgttgagaaaagacttaacagcgattacccagaagaaattattgattctattgaaagaagaatcaaatatttagatttaatttataaaacacttaacacacattcagaatcagaatatgtaaatgttaaagaatattttaaaaaatatagtgctaatttttattcattatacaaaaataaacagccaggtattgaatttgtaaataaaagtgaagataattttaatattcctgataacattataactccacttacagcaataatcaatgaattaattgttaattcattgaaatttgcatatgaagattatgatgttgagaaaaaaattatcacagaaaaagttacaaaaaataaagatatctgtgaagttttctataaggacaatggtaaaggattaccagatgactttgacaaagataatccaacaggattaggttggaccataataaatgcattagttaaacagcttgatggtgaagtaaaagcatataattctgatggaatgtgctttgaaatgaaatttaaattataa

SEQ ID NO: 8407 - DNA, 915 bp, Methanobrevibacter gottschalkii
  source 1..915: mol_type = genomic DNA
gtgattaatattatagaagaatttttcatagcaattggaggaatttcacttttcctcattgatttttttaaaaatttttcattaaaagaaattgaaattgaaaaaacgaaagacattaaccagaatatagctcaaaaattaaatttacaaaaagatataaaattgcaaaacaacgaaaaagattcaattgataaaattcgaaggttaataatcccctatctgacaaataaaaaaataattggattactcggattactttttctactaataaatttatttataagtttagagatatcaggaatttatattgtattagttttaatgacatacatatttgtattttattatcctcagatccagcagcaaagaaattactccgatataaaccaggaactgccatatgcattaagacatataggtattgaattaaaatccggaaaaggacttcatgacacattaagaacaattaaaaatgcagattatggatctatttcacaagaatttaatagaattttagaagaaattaaatttggtaaatcaacagaagaatcattacttgaaatgtctaccagagttaaatcagaaggtcttacaagagcaatacatcagattatcagtacattacgagttggtggtaacttatccaacagtttagatatcatagctaaagatatatcatttgatatgcaaattaaattaaaagaatattctcaaaaattaaactcatttatcttaatttacacatttattgctattttaacaccagtaattagtttaataatgttaatggcaagttcaactgttatgggtgatatattatcatcaagtttattatttatactctatggagtatttttcccatcaattgtagtttttatgggggtttttattaaaaaattagaacctaaaatttaa

SEQ ID NO: 8408 - DNA, 1419 bp, Methanobrevibacter gottschalkii
  source 1..1419: mol_type = genomic DNA
atgaacaataatggaataataccacaatatgacatcattaaacaagaatatacatctgaagaaaaaatattacttggggaaatcagggaaaacttagttgatttagccatatcaactggagaaaattttcaagtaaatgaaacaaagttaataaataacataaagaattttttatttgaaagattaaatgacaaccaacaaaataataatggcacaaatgaatatttagataacttgtctcggaagttgctcagagatattgttggatatggggaaatagatccattaattcaagatgatgaattagaagaaattatgataatcggaataaataaaccagtatttgtttatcataggaaatatggaatgatgaaaaccaatatcacatttaatgacgaacaagaattaatagatttaatagatgcaatcgcaagacaaattaaccgacgaattgatcaagaatctccaattttagatgggagattaattgacggatcaagaattaacgccacaatacctccaatctcagcagacggcccatcacttacaataagaaaattcaaaaaagatcctcttacaataatcgatttaataaaatcaaaaacaatatctgttgaacttgcagcatttttttggctgtgttttgacggattaggaattaaatccgctaatgccataatatctggcgggacaagttccgggaaaacaacaacactcaatgctctttcagccttcatcaatcctaaagaaagaataataactattgaagatacattagaacttcaaatacctcatgaacatgttatcagaatggaaacaagaccatccaatgttgaaaataaaggcgaattaactatgaatgatttagttaaaaattccttaagacaacgcccagatagaataatagttggagaggtaagagctgaagaagcaataactctatttactgcattaaatactgggcattcaggatttggaaccctacattcaaatgatgcaagagaaaccataaccagattaactaatgaacctatgtctgtaccaaaaataatgattcaagccattgactttatcataatgcagaatagaatttacacatcatctggagtatcatttagaagaataagtgaagtggctgaagtagtcggaattgaagaaggagttgttcagttaaataaaatatttcaatggaatcctgaaaccgatacaattgataatgttagtataagcagtaaaacaatatcccaaattgcaaatctaagtggaaaatcacttaatgaattatatcatgaaattgagaaaagagaattagttttgaaacatatggtgaactacaatattcgttctgttgatgatgtaactgcaattatagaactatactataaaaatcctgaaaaagttttaaataatattatttaa

SEQ ID NO: 8409 - DNA, 897 bp, Methanobrevibacter gottschalkii
  source 1..897: mol_type = genomic DNA
atgattgatttaaatgaacagattaaagcattggattattgtgaaaactgtaatgatattcagattaaaaaattttctccattaaaagatttaattgattttgatgaacttaatggtgaatatatgaaatgtgaatgtggaaaaagaccccttgacattgtaatgagtcatatcttaaaaataatgattgaagaaaaaatagtccctgaaaatgcatcattaagacgtaattctccagttccattatctaatttttactatagtaatttaaatccgcaatttatcggtgaaggtactttaattttacttcatcctgatttcacctcgaatgtcgctttaaagttatttaatgaagttcaggaagttcggtgtgttttaaaagggagtcctcaaagtcacattggtcaatttgataggaattctcaaattaatcattttgaaattctcataggtgatgatgagcagattaatgtaatgagaacattactgggggataagattgttttagtaaaaaatcaatctaaacaccatatagaagtagcaatgaccacagaagagaagttattgaaattacataactatcttgacaataataagattaataaatgtgtagctattgatgggatgtgtggtctcggggcattaggaatttatcttcttaaatatggttttaaaaaagttatattcaacgatataaatcctgaaatgattgaaaacttaaataaaaatttaatttttaataatatttcagagggatttgaaatttttaatgaatcatttgagaatttggatgttggacatgtggatttatgtgtaattgatgcatttcctggtgcagacacctctgagattgtaaaaaaagcagaaaaaatagcggatgatgtattaattatataa

SEQ ID NO: 8410 - DNA, 1254 bp, Methanobrevibacter gottschalkii
  source 1..1254: mol_type = genomic DNA
atgatagaaatagttattgcttgcttcataggcatactaattggaacaacaacaggacttataccaggaatacatgtcaacactgctggagcaatcttatttgcatcatccggattgttactgacacaattttcaccagaattcctatgtgtattaatggtttccatgtcagttgcccatgcattaatcgaatttataccatccatgctattaggagtcccacaagaaggaaccgccacatcaatacttcccggacatagaatggttctagaaggcagatcaaaagaagtaatacgaatagtggctgtgggaggttttggagcaataatagttacaattttaatgcttccaattttttcgatcatattacccatcctacatgatattttaaagccatacacctggataattcttcttgccgcatcactttatctaacatacagattaacagtgaattttagggattttttatggtcactacttctgtttatattatcaggaattttaggttggaccttatttcaaagccccataacttccggagttacattaatgtgtacattctcaggtctttttggaataagtactattttatttagtttaaatgattcatcaacaatgcctcatcaaaatccattttatgagctgaatattgattatgataaacttaaaagcatttttacaggaggcataaccggagccattttaggttttcttccagggtttggacctgcacaaggaactgtaatagctcaagcagtaagtggaactaatgataatagaaatgatgatacagttaatttcttacttgcaacatccggacttaatatttcagactgtttattttctctaatagcaatatatattatcggaaatcccagaagtggaattgcagtttatatgtcttatttaatttcagaaatgaatataaaccatttaataatattcatttttgcatcattgcttgcagtttctgtttcactaatattagccctaaaattaggagattcattttctagactaatgggaattgtaaattataaaaaattatccatatccgtcattttacttcaaattataatattatacatcttcattttttattataaatcgcccacttgttatatgaccctagcattaattacttcaactgctttaggaatgttaccccattatattggtgttggaaagtctcatttaatgggtgttctaataattccggcaattgtaatttatatgaaaatgtttatctaa

SEQ ID NO: 8411 - DNA, 465 bp, Methanobrevibacter gottschalkii
  source 1..465: mol_type = genomic DNA
atgattgaatatgatgacataattaaagattcaccatttctcgcaaaccatttaattacattgaataaaactcatgatttttacattaataagcatattaaaagcggaacagacattttgcctagtcagtactatatgttaatgtttttatattatgaaatgggaacaacacaatcagatattgctaaagcatgtttaatggatagaagtggagtttcaagagcatttaaagattttgaaaaaaaaggattaatcaaaagaaaagttgataatgacaataaaagagcatacaaaataaaattaacacaaaaaggtattgaaactgctgaatttctaattaaaaaagaaaaagaatgggacaatatgatttgtgagcagttatacatatcacgagaagatttgcttaaattattatccaaaatttctttaaaatcattagaatttaatagaaatcaatttcaataa

SEQ ID NO: 8412 - DNA, 498 bp, Methanobrevibacter gottschalkii
  source 1..498: mol_type = genomic DNA
atgaataaaaaagaaattataattattttgatatttattggtttttgttttgtatttgcaggaccggtatttgcaaaagaaaaggttaaagtaaatgtttctattgatgatcatcctttaaataataaaggtttcattgtgataaaacttgttgatagtaggggtaaagatattgaaagtaacggaacaatacattataaaattacggatgagtttggtaattataaatgggcttataaatcatatgatggtgaaatcaggttaaaatatacggcgggtatttataaagttgatgttaaattcgatggtgattttcattataattctgctataaaaaataaatctgttatagttaaaactgagaaatttaatccatatacttattatgataatcataattggggtttaaatcaggaaatagatgattatatagaatataattattgggatgaagatatatatgatgatcctacaaattatgatggtgagggaccttga

SEQ ID NO: 8413 - DNA, 2019 bp, Methanobrevibacter gottschalkii
  source 1..2019: mol_type = genomic DNA
atgaaaaaattgattgtaggattagcaggaaacccgaatgtgggtaaaactacagtatttaatcaattgactggtatgcgtcaacatgttggtaactggccgggtaaaactgtcgaaagggcagagggtcatttcacccacggaaattatgagtatgatgttgttgatttaccgggtaattatgcattaagtgctcattctatggaagaaattgtttccagagattttattgtagatgatgattctgatgttattgttaatgtagttgatgcagctaatctcgaacgtaatttgtatttaacagttcaaatgatggagctgggtgccaatttagtattggctcttaacatgaatgatttcgcaaagaaaaaagatcatattattgatattgatttaatgagtgaactattaggtttctctgttgtggaaattaatgcaaagaataaagatggttttgatgttttattaagtgctgttgaaaaagcggcttcaaaaccaaaaaatacaagtgctaaattatcatatggtgatgaattaaaagaacatttgggtgatcttcaagaattaattgaaagagacaataagttgttggatgttccatctatttggactgcaatcaaattattggaaaaggattcaattgtaattcaaaaagtacaacagtcttcaataagttctcaaatcatggccgaaactgataaggtggcaggtcatcttcatactatttataaagaaggtgctgaagaagttgtcgctaatgctagatatgcatttattgatggtttaatggctgaagctgttaaaagacctgctgttgaaaaggaaacaattactgataaaattgataaaattgttacaaacaggattttagctccgtttatatttattattcttatgtgggcaatgttccaactaacatttacagttggagctcctttccaagatatgattgatcaagcatttggtatgttgagtgaatgggtagctacattccttggtgatggtttattatcttcatttgtctgtgatggtattataggtggggttggtggtgttcttactttcttgccgattattattctaatgttcttgtttttaagtatcttagaagattgtggttatcttgcaagggcagcatttactttagataaaattatgcataagatagttggtcttcatggtaaggcgtttattcctatgattttaggatttggttgtggtgtgcctgctattatggcaacaagaactatggaaaatgaaggggatcgtatgcttgctatgatgcttgttccatttatgtcttgtactgccagattaccaatttatgctatttttgttgccgcattctttgctgacaatggaggtaatgtattacttgcaatttatttactcggtattgttgtagcgcttattgttgcagcaatccttaaaaggaccatgtttaaaggattatccactccgtttgttatggagttgccaacttacaaagttccatccctaaaaggtgtattattgcatacatgggaaaaagtaaaaggattcttaagaaaagcaggtactattatccttgcttgttccatcgtattatggattttacaaaatatattcccatatggcggatcagatcctcaaatgagtcttcttggtatgattggtactgctattgctccaatatttgctccattaggatttggtacatggcaagcagctgtagcaattattgctggtttggctgccaaggaagtagtggttgcaacattcggtactcttgcgggtatggaggaagatgatgaagaaggaattactaacttaatacatgatactttcacaccattatctgcattttcattcatggcatttacattgttatatactccatgttttgcagctattggtgcaattaaacaagaaaccaacagttataaatgggcattaactatgtgcgctattaccttagtaacagcattcattgtttcattcttaatttataatattggtttattggcaggattcggataa

SEQ ID NO: 8414 - DNA, 228 bp, Methanobrevibacter gottschalkii
  source 1..228: mol_type = genomic DNA
atgaaaacattaaaagatgcaaaacctggtgaaacagtaactttagttaaatatcatgatactggagatcttgatttgagaagacatttattgggtatgggatttattaaaggagcaaagattactcttaaaaaagtagctactttaggtgatcctatcgaaatgaatgtaaaaggttatgatgtttgtcttcgtaaggaagaagctgaaaatattgaagttatgtag

SEQ ID NO: 8415 - DNA, 207 bp, Methanobrevibacter gottschalkii
  source 1..207: mol_type = genomic DNA
atgaaatgtcgaatgtgtggttttgagttcgatgaaaatgaattggaaaacagaggatgttctagttgcggtaaacataactgtaatcaagttcattgtccaaattgcggattcggaaattctccagaactaggtcaggagtttgaatttataacaaaacttaaaaatagatttaataaaaatgaatcagaaaatggttctatttaa

SEQ ID NO: 8416 - DNA, 843 bp, Methanobrevibacter gottschalkii
  source 1..843: mol_type = genomic DNA
atggaaaaaattcatttagagacaaaaaatttatcttttacttaccctgacggaactaaagctttaaaaaatgtgaatattcaaattaaaaaaggagagaaaattgcaattatgggacctaatggtgccggcaaatcaacacttttttcacattttaatggtttaacggaacctacatcaggacatgttgaaattgatggtgaaaagataatctttaatcgtgaagagctacttaaagtaagacaaaaagtaggaatcgtatttcaagatcctaatgaccaattatttgcaccaactgttaaagaagatgttgcttttggacctatgaatttaggccttgattatgatgaagttaaaaacagaatcgccgaatcattgaaaatggttggaatgagtggttttgaagataaaacaccacatcatctaagtggaggccaacaaaaaagaatagctattgcaggcatagttgcaatgaaacccgaaattatgattttagatgaaccaacagcaggtcttgatccagaaggtgttgacaaagtattgaatatcttgaataaccttaataatgaaggaatgagtattgtaatatcatcacatgacattgaaatggtaaatcattttgcagataaaatattcattttatacaatggtgaaataatagccaaaggcaataagcaccagatattttcaaataaagaattattaaaaaaagctcacctaaaagcaccgacaacaactgaaattttatataaattaaaagaaaacggacttgatgtcaatactgaaaaaataactgttgatgaaacagttgaagaaatcttaaatattgaaagaattaaatag

SEQ ID NO: 8417 - DNA, 831 bp, Methanobrevibacter gottschalkii
  source 1..831: mol_type = genomic DNA
atggttgacataacacaaataatgaggtttgatgaattatcatcacaaaatagcccaatacataatttagaaggacgtattaaattaataaccactatttttattatccttgttagtgttatttcaaaagaactttttataccaataatattagaaataatcttattaaacatattaaagattgcagatttatcctatattaattctgcaaaaagattattaatgttgcttccttttggcggagcaataattgtattccaaccatttattcaaccaggaaatataatctggagttattcatggttgcatattactgattttggacttaattgggcaattttactacttgttcgtatgattgtctgcttaactgcaataatcatctattcatcaacaacccccctacaagaaatggcaagttcatttagaaaactaaagatgccgagagatttagcaatgattctttcaatcatggtcagatttttatttttatttgttgatgagcttgcagcaatccgaaaaagtcaaaaatctagaaattttaacatacactctaaaaatacaacatacaaatggagagtaaaacaagttggatacacaataggaatgatgtttttaaaatcatatgaacaaggagagcgtgttcacaaaagtatggtaagccgtggattttcagatacatcagaaatgtttgacgaaaagaaatctcctgaaaaaagcgattatatattcattatctcaattattattgtagtaattatacttgagattatcatgttcaaatatagtggtcaattaggttacttcggccaaaatttatctattaactag

SEQ ID NO: 8418 - DNA, 306 bp, Methanobrevibacter gottschalkii
  source 1..306: mol_type = genomic DNA
atggataaaaaagatatgtcattaatcattgttgcagtagtaatatgtattgtaatcagttgtctttcaccatacattgcatctggcgatccagacggtcttgaaaaatctgcagaagatgcgagtgtccctgaagacttccaaattgaaccaataaatggaattccagatgcgatcttcccagattatgcatttgcaagcgccccagataatcaaggattacaaattgtagccctgataataggagcaattttaactcttggtgtaggatacggagttgcaacaattttaaaaagtagaaattaa

SEQ ID NO: 8419 - DNA, 639 bp, Methanobrevibacter gottschalkii
  source 1..639: mol_type = genomic DNA
ttgcatatacctgatggatttatacctatcgcacaatgtcttgtatactatgtaattttaatcgttgcattatacttctctgtgaaatgggccaaatccaacttagatgaaaaacgtatacctcttttagcagtacttgcggcaggtatctttgcaatcatgtccatgaacatgccaatcccatttggtactagtggacacatggttggaggtgctttagtagcaattgtattcttagcacctgaagctgctgttttagtattcacagttgttttacttatccaagcattaatcttcggagacggaggaattactgctctgggagcaaatgtattgaatatggctattgttggaggttttgtaggtttatacacctttaaaacattaaatggaaaaataggaaaatatcctgcagcaggaattgctgcatggttagctacagtacttgctgcattagcatgtgctattgaaatgggcattgctggtacattcccagtaaatgttggtatcccatccatggttttataccacttctttattggaataatcgaagctatattaactgtaatcgttcttgtagcattagacaaatttagaccagacttactctcatggaataaaactgaaggaagtgcatag

SEQ ID NO: 8420 - DNA, 1275 bp, Methanobrevibacter gottschalkii
  source 1..1275: mol_type = genomic DNA
atgagcattatttattccaagataacttcagtgataaacaagataagtgatgaaattcacagatcttttttatttacaacaatattttctattttaagattcattgaactccaatggatcaatagctattttaaggaattatatccaaatgaaaaatttttaaattttttaaataacagtatcttaaaaaaaaatttatttaatccattaatagtccttttactattttctttctttttaattttatcaataaaatcaccatctaaaagtttagttattacattaattgtcggatttatagcattttttataggatcaaccatattaccaaaatatttcttaaataataatatcagaattattgaatttaataaaaaagacatatattcaattggtttttgtttaatattagttagtatcatattttttggaatatgtattgcgtctgttggaggaattcctcttttaaaaccatcaataagatatttactaaaaccaatatttacaatgcctgtgtttttaataataccaggaacctgtttagtggccagtgcttatttaaaagatttccaaatgaaaaatattacacgttcacaagcaagattcagattcatatttttgcttgccatagacactgcattattattactcctaggttatagaacaccactagttgcagcatttctcatcataattataataggtttttatggaaatatcatttcactttgggaagttataataagtggattaattggtataggtgctattataggaatcggttattttagatcacttagtgagatgacaataacatcatcaacaaatccattttacacattacaatcaagagcggatttcacattacatgttttaaacttgcttgattttgttggaggcaatgcaggattaacacacgggcatttgttgaccagttccattccaggaagtgatttaggaccaagaatgctcattggaaaaattattgcatggagaacagaagttacagttacccccacactaattggacagatggttgtagactttggtaaaataggtgtagcagttgaaatgtgtattttaggattcattttaggaattggatttaaaataatgcagaaaacaaaaaactatttttacattgccatttactcattgattttaacatattcaattttaggcatagaaactggaattttagacatacaagttttattttacttcgcaacagccatatttatttatttaattaacatcaaaaaatcccaacaatag

SEQ ID NO: 8421 - DNA, 774 bp, Methanobrevibacter gottschalkii
  source 1..774: mol_type = genomic DNA
atgaaaataaaatttactttaattgattacttaattatcattttggtcgtatgtgctatttcatttgcatttatacacataacaacagataattcatcagaagtgcaaaaaaccgtgtttgatgcatctacaatcaataaaattccagatacttattttaactattatagagatggatatattgtaggaactactgtcgatggatttaatgctagtactggagaaaaaataacactaaatggcactataaaatggattggaaataatggtggaacagacgttaagatattagtcgaatccgacaataccacttatcttgttggtctatataaaagtattccggaagcggatatttatatagataaaatttcacttgaaactaatggcagtacctacccaaatttagtagaaattaaagcaagtccagaaaatatctcaacaatcaatgatttgaataaaaatttatcaaatagtgattttgaaatatctactataatctctcttgattccttggacttggtaaaaatccaagagatagctaacaaaataaattctcacgataaaagaatggctattaaaacacctagttcaggattggggaatagcctgatattggaaaatgctaataaacaaacacttgacgatgcaaattctgttttaggcaatattaacggacttacagatgaacttacaattagaatatacaactgtagtgacagccaattagagcaggtaaagaatagctataatattacaaatataagaacattttaa

SEQ ID NO: 8422 - DNA, 156 bp, Methanobrevibacter gottschalkii
  source 1..156: mol_type = genomic DNA
atggaagaatgtggagtttgtgaagactgtattgatgtatgcgtagaagaagcaattgaaagaaaagcatacactgtaactattgatcctgaaaaatgcgataactgtggagaatgtgttgacgtatgtccagttggagctatttatgaagaatag

SEQ ID NO: 8423 - DNA, 561 bp, Methanobrevibacter gottschalkii
  source 1..561: mol_type = genomic DNA
atgattaaaatagctacagcagaatgctttacccatggaaaaattggaagggaactccatgcactagctcaaaattacgaaggaaattttggaatggaatatatccaaaattctaaacaatatggtaactttgactacaatgaactgaatgtaacctgtagcctatttataccaacacttgaagccgttaaaaaaattttaaatgtgaaaaatcctccgaaaccagatactttaatcaaaggaattaaagtttataatgaagaaaaagataaaactgtaagtaaaattatggcaaaagcggttaaagaactaagtgattgtgatattgctattggaacaagtgcaggaataggtagaggtggaataaccatattaacaaataattttgaaataacaaccaccaccgatatttatgctgatttaacagataacaatagttcagatttattcaagagatcagaatccggaattaaaaaaacattagaaataatattacttcttttaaataataattttgacagaataaactcgttagaaaatgttgaaattataaaaaaataa

SEQ ID NO: 8424 - DNA, 651 bp, Methanobrevibacter gottschalkii
  source 1..651: mol_type = genomic DNA
atgatagatgaaatacaaaaaatggaagatttacaagttccaaaaggcagaatagatctgatcggttgtggaagattaggattaagaatagcaattaacttaatacaaattcatagaggaggaccgaaagtaattggtgcttttgatgggcaaaaaatttctgatggagacataattttcaaattatatggtgcggagcttgatgaatccaaacctgattttataaaaagattatgtacacatgacaaagaatttagaaaaatcgaggtgcataacgaatatatcaacgatgataacttagatttaataactggggatgtgataattattgttatcgctggtggaaacacaatacctactgcttcaaaaataatcaaacatgcgcaaaaaaaaggtgctaaaaccattagtaccgcaggaatattcggatttggtaacgaacacatcgaaataaaagacatttccgaatatgataacaacaatccagctattgaagaattgagagcacaaggagttactgagaaccatttagttttaacaacaaataaattaattagagataatgaaccagtaacaccatacaccttagatgaagttgcaaaactaattaccatatgttcactaaaattattaaaagatcaaaatgattaa

SEQ ID NO: 8425 - DNA, 696 bp, Methanobrevibacter gottschalkii
  source 1..696: mol_type = genomic DNA
atgaaacttaaagaaattattagctttataaatgaaagaatacctgaagatttagcattaaaacacgacaatgttggattgaatggagaatatgatttaaaccaagagataacatctattaaaattttcatggatttattgcctgatgatgataatggtgagaatacattaattattacacatcatcccccattatttatccctaaaacacccacttacacaattcattcaaattgggatgtaattaaaggaggatctaatgatattttagcaaagacattaaaattagatgtaattgatgttttagatgaaaaaacaaatattggaagaatctgtaagactgattattcatttaatcaattgaaaaaaatcatcttagacaaatatgaaaatgtaaggattgtaactcaattaaatgatgattacattttaaataagattggaacaatatctggatttggtcttaaaaactcaaaatatgtcaaattagcaaaagaaaaagaattagacatattaatttctggtgatttgacacaagaaactgcaatccttggaaaaaatttaagcatcacattaattgatttaggacatcatgaaagtgaagtacccggtttatatcaattagcaaacctcttaaaagaaattaatattaatattgaagtgattgataaaacccccatcaaagtgataaaatga

SEQ ID NO: 8426 - DNA, 798 bp, Methanobrevibacter gottschalkii
  source 1..798: mol_type = genomic DNA
atgaatatcgatacgggaattacatcagaagtatttacaatcaaatctcaaataagattattagacatttttaatgagataattaataaaaaatcacaaattgtatatgaatatttgaaaagtttaaatctggataataatgttaaaataattgttattggaacgtattttactggattgggaatagttaaaaaattaagtgaaaaatacaataatattatattagttgacatttatcctcatttagaacagttattatataccaaaattggcggggaattaaaaaataatattaaattttcatcagatctaaatttaatatataatggagatgttgttattgataccacaggatttggcggaatcaatgtagaacagtcttcaaaatttaatgttaatacatttataatcgaagatccgatagcagagaataatgatattttgttgaaacataaaaacaatatcctaaacagaataaatgtggtgaattctcaaaataaagcaattataaaaacaaaaggaattaacacaaaaacttctggaacaatgagtttaacaatgagaatattaacaaatgccctagataactgccttaaaaaagaaggtgttctctatagtgcctgtgaaatgggattttttgaagaaattatttttaaagaaaaaaatattgataaattcatagaactgacaaatatgcctgcaattaaagtatcaacaataaaaccatttaattgtaatgagattattaacagagaacttgataaaataacatcaaaaatgattttaaatgaaacttaa

SEQ ID NO: 8427 - DNA, 486 bp, Methanobrevibacter gottschalkii
  source 1..486: mol_type = genomic DNA
atggcatttgaaaagatgatacatgatgcatttgaagaatctaggaataactctagactcggagatacaactgatgaaataaatgaaattaaagaatatataaaaaatgctaaaaaaatttatgttccaaataaaaatgggattaaagtaaaagttttaaatgaagtattaaataaatatggacttccagaagctgaaatccttcaaattaataccagtactgccgacaccagtagaattcccgcccttgcaaaagcttatatggctcttgatcaaagtgatgctgatttaattattgcaagaggcagattaggaattcccggttctggctcattacttatttttatagacaataaaggaagaatattaacttgtggaacatccccttcccatcccattcataaaaaatctcttgaacaagcagtatatgaagaagcatgtgaagcacttgaaaagattggatttgataaaaggttaaaaaaatga

SEQ ID NO: 8428 - DNA, 999 bp, Methanobrevibacter gottschalkii
  source 1..999: mol_type = genomic DNA
atgattgatgatattttaaataaagcaaaattaggaaaaaaattaactgatgaagaatatttagaactattaaaaattgacaataatgactatttagaaaagttattttcaatagcttgttatatcagaaatagccaatcaaaagaaataaaattaacatcaacagtccatattaccaataaatgccaaatccaaccaagatgcgaatactgcggatttgctgaaaagacctcaagaactggatattatgatgcattttataaatcaaatgaagaaattttaaatgccatcgtctcaattcagaaagcccatattcctcgtgtaagctgctctggaggatatggatataaaggcagacaggcagtaaatgcatgcaaaatagtaaaagaaaattcgaatctggaaattctaattaatgttggtggagatttaactgaaaaatcagtagaagaattagcaaaattaggtgttgatacagtatgctgtaatctcgaaacaatcaatgaggacatatttaatgaaagaaaacccggagattcattgaaacaaagaattttaacttgcagacgagtgagttccgcaggaattggtttatcatcaggattactattgggaattggagaaagtgttgaggatagattaaaacacttgcgttatttatccagctttaaaactcttgaagaaattccgattatgggttttaatccatatccagatactgcaatggctgactatccttcgtttcccttaaaagaacagttgaagattgttgccattacacgtataatgtacccttcaattagaattacaatgcctacaccgactgttgggccagaaaatgttgaattttcactgaaagcaggggcgaataatttagctactgtgattgccgataattaccctcttgaagtaaaaggggttggatcaccagaatatggcaactatacagaagtaattaatgtaattgaaaaattagggttaatacctcaaactatttaa

SEQ ID NO: 8429 - DNA, 1014 bp, Methanobrevibacter gottschalkii
  source 1..1014: mol_type = genomic DNA
atgaaagtagcaattttaggtgcaggatgttatagaacccatgctgcaagtggaattacaaacttcacaagagcttgtgaggttgctgaggcgacaggaaaagaaaatatttcaatgacccactcaacaattgaaatgggtgctgaattattagagttagctggagtagatgaagttgtagtatctgatccaacttttgacggtgaatttactgtagtggatgattttgattatgctgaagtaatagcagcacacaaagccgggaatcctgaagaagtaatgccagcaatcagagcaaaagtagcagaattagccgaaacagttccaaaaccatcaaaaggtgcaattcactttactcacccagaagacttgggaatgaaagtaactactgatgattctgaagcagttgctgatgctgattgggtaatgacatggttacctgaaggcggtatgcagcctgacatcatcaaaaactttgctgatgacatcaaagaaggtgcaatcgtaactcatgcatgcaccatcccaactaccggattaaataaaatctttgaggatctcggaacaaatgttaatgtagcctcctaccatcctggtgctgtacctgaaatgaaaggacaagtttacatagcagaaggttttgctgaccaagattccatcaacacattaatggatttaggtaaaaaagcaagaggatctgcattcacattgccggcaaacatgataggtcctgtatgtgacatgtgttctgcagtaactgcaattacctatgcaggtattttagcatacagagacacagtgactcaaattttaggtgctcctgcaggatttgcacaatccatggctaatgaagctttaacacaagtaactgcattaatgcagaatgaaggaattgacaaaatggatgatgctttaaatccagctgcattattaggtactgcggattccatgaacttcggttccctagcagaaattgttcctactgtattagattacttaggtaaagacgaataa

SEQ ID NO: 8430 - DNA, 1497 bp, Methanobrevibacter gottschalkii
  source 1..1497: mol_type = genomic DNA
atgtatgatttaattaaagaagcagttcatagtgatgaagcggcaattgaaatatcaaaaatgaaaaaagatgtaggttctgtggtggatgcaatatctgaactttcattagatgataccatgaaattgggaatgagttttaaaagatttcctttaggttgtgatttgactgaagttgttgttggtacatgtgcttcggatttggaattaatggatttgttgggtaattgccgtctatctgatatgattggcgctccaattcatatttgtgcttatgctttttctgatattggtgaaaaatttggaatgactggttttgaagtaatgaaaaaggttcatgaaattgttgatgttcctcttgatttggatcattttggtgaaaatggtgcaatgagacttccaaaaaacattacaggttgtggtggtgaatgttacagtaaaggaccttcatttactgaatgtcctcgtggaagaatacatgaacgattaattgataaagaatttgaacaaaaagaagataaagaaaattgggttaaattatcttcatctgttgcagttaatgtttcatcagaacaaactggtgatgctcatgcagctcccttaagtgaagctaaggatattgcagttttggctaaaaaatatggcaagggtttggagtctataatgtttgttggtgatggttatgatgaagtaatcacaggttttgaaaaatccatcgaccttggtgctgatgttattgtagttgaaggaggtccatttaatagatgtgaaaacacaacagaatcatttgcaaaaacaattgcagctgcaagaattttatctcctggaaaagttgtagctactaatggtgcttatgaacatgaacttagaatgggactgaggtctggtttaaatatggtaataaccggttttcctaaaaatcatcatggttatatgtgcggatatgaacctggaactgcaagaagggggaagtttggtcttccaagagtagtgcaaataatcaatgaagaatttccaaatatgggtcttccagttcaaaaacaggatttgattgcaatagccgctgcagtaaaatttgcaggctctgaaaatatttatccaaataaaataggatcatatcatgttggggatgcgcattgggcaacattagttaattccaggatgtatcataatattaaacttaaacatacattaaatgacatagttaatttggttgaaggtagtactgtttcattacatggtgggagatttgtttcttgggttattgccaaagaacttgacaaaaaagttgaagaaataattatttccgatgttgatgattgggttttgagcaatacagttaataatttgcaagatgaattgaatgctacaatcattgctgaaaatgatgataaacgggcatctagtcaggcaaacttttctattgcttcatcaacaatgatttcaattaaagaaaacattttaaagaaagtaccgcatgctttaactatagtttaa

SEQ ID NO: 8431 - DNA, 900 bp, Methanobrevibacter gottschalkii
  source 1..900: mol_type = genomic DNA
atgaactataaaaaacttgtattagttggttgtatttcagcatttgttgctattttaacttcagttatgggtgttgcaggtacaattattggttcagttatttcttctgttctttataatatgcttacagaagtattggaaaatcctattgggaaaaaaacattcagccctagctttgaatgggaaattgcatatgtatttccacttattgtaatagctataattcagtttattttaatttcagctttattatcagaagttggtattttaccttatacttttgtaaatgtttatttatcaattcaggaaattgccaataataatttatacagaattttaggtttagcattgttagttatgagtgtttatccgtttgtattaaaaagaggcattgttaaaaaatcaaatggaacggttattgcatttgtcggtttaatctttttagcccgtgggtttgtggatttgggaaacaggattacagagatttatcatgccgtatttgtatattttgatttaccaatagctattattgcttttgtattgttagtatttgtgataattaacatactcatttcagcaaaatctgttgaaaatgagtttaaagtaattagccatagtactaatgaagaaaatttttcctctccaaatgttcgaagagtacatcactccagaaaacacaatgatttcaactatgctgaaagagacatatcaagacaaaattatcaaaatatgaataaacataaacatggtgataatgttcatgaagtaaaatttaaaaaagtagttaaacaagaatctgatagaagcaagtcatcaaatagtaatcaagaagcaggtattaatgaatcttcaggcaatattcaatttgaatccaatgatttgttggatgattacaaataa

SEQ ID NO: 8432 - DNA, 885 bp, Methanobrevibacter gottschalkii
  source 1..885: mol_type = genomic DNA
atgagtaaaaaagataaaactttgaaagatattttagatattattttatatgacaatccttcaactcaagatgaaattgctgtaaagttgggaataactcgcagatatgttactcaattattgcaacctcttgttaaagatggaactgtaaaaagagcatatatgattgatttaaaaagctatgaaaaagttgccgagtctttaagtgattatgccggatctaatgagacaaaagggaatgtgatagtcaatgatatgattgcaaacatggcaagacatgttcattcacaaatcgaagtttcgtttgatgctgttttagaatatgatgaagaaaaagcaaataaagccttggaaatggattatgccacaaacaatatggttgaaaagataagaacatccgtcgaaacaattgttagtatgaataaacattcggaaatctcaaaatcaatgctttataatgaacttgcttatgatctggagcgtattggtgattattgtggtcatattgctaaatttgtaatcaatgatgtttatgaaattgatgaaaatgttttaaaaaaattaaaaaagatgtataaaatagctcaaaaaatgattcgtttagctattacatcatttattgaaggaaaaactgaacttaaagatgatttaatggaattagaagaatcaatccatattcttcaaactaaagctattaatttaatagcagaacaaatggctgaaaattcatttgatgaaaaagagcgttcaaactattttatttatttatttagagttgtcaaagcatttgaaagaatgggggatatctctgttgaaatgatggatgtttcaatcgaatttcatgaaaatattcctaggtcaactactccgagaaatttcagataa

SEQ ID NO: 8433 - DNA, 843 bp, Methanobrevibacter gottschalkii
  source 1..843: mol_type = genomic DNA
ttgattacaaaagatactattaaagatactgtttatgaactttacaaacaggccgttatcgttttaggtgatgatgtaaagaaatcacttaaagatgctcttaaaattgaagaacatgatcttgcaaggttaaatattgaagctattttaaaaaatattgaacttgctaaagaaaaacaaattccgatgtgccaagatacaggtttgccagtagtttttgttagattaggtaatgttgaagttgaaaatttacgtgaagggattgaagaaggtataaaaaaagcaacaaaagaaatcccaatcagaccaaacattgttgatccattaacaagagaaaatacaaatgttaatgttggagattacatacctccaatagatattgaattaatcgatgaagattacctcgaaataacaatattgcctaaaggattcggttctgaaaataacaatgctttaaaaatggcactccccgccgaaggaattgagggcattaaagaatttgtagtggaatctgttcttaaagctaaaggaaaaccctgccccccaacagttgtaggtgttggaattggtggaacatcagatttatgtttaaaacttggtaaaaaagctttacttggtgaagttggtgtgagaaatcccaatccacaaatagctaaactagaacaagaaattttagatgaaatcaataattctggaattggaccgatgggacttggtggaaagacaacctgtttagatgtaaaaatattaaaagcacatacacacacagcaggtttaccaattggtgtttgtatccaatgttgggcagataggcatgcaacaacaaagatatatgataattag

SEQ ID NO: 8434 - DNA, 246 bp, Methanobrevibacter gottschalkii
  source 1..246: mol_type = genomic DNA
atgagaattatgtattcaggaaactgtacaaattgtacaacctgtggaagttgtcaacaaacacagaatgttgacactcctattttattttgtatgcactgccaaccatcagatgcgccatgtttaaaagtttgcaaggaaaatgcaattgaagtattaggtggagccataacaattaatggtgaaaaatgtaacaaatgcagagattgtgttgaagtctgcccaattaatgtaattaaaatttaa

SEQ ID NO: 8435 - DNA, 501 bp, Methanobrevibacter gottschalkii
  source 1..501: mol_type = genomic DNA
gtggaaagtattcttgtaaatagcgacttatgtgatggatgtatgaattgtgaaaacatgtgtgcatcagtccataatgctagtaggataaaaattattgaacatgattcttccttttattccattgtatgtcaacattgtgaaaatgctccatgtataaaaatctgcccaactgaagcggtcactgaagaaggagtggatactgaaaaatgtattggctgtggattatgtgtaatgatttgcccatttggtgctatgacattccagtccaaagttgctgaaaaatgtgacctgtgtgctgacagggaagaaggacctgcgtgtattaaatcatgtactaaaagagctattagcatcgctgatcctgaaaaaattagatctaaaaaccagcaaaaatatttagctaaaatggctggaatctatgaaccagatagtaaaaaaggcggatttgtccatgtcataacaggtcaggcaagagcaagacttgtttttgatgaataa

SEQ ID NO: 8436 - DNA, 867 bp, Methanobrevibacter gottschalkii
  source 1..867: mol_type = genomic DNA
atggatatacctgataaagatttattagcaccgggacacagaggctgtgctggttgtggagcatcaattgctgtaaaattagctcttaatgcattaggcaaaaatactgtagctatttctgctacaggttgtcttgaagtaatgaccaccccatacccagaaacttcatgggaagtcccatttattcacgttgcatttgaaaattcaggagcagtagcatctggtgttgaaagtgcattaagaattcaaggaaaagatgatgttaatgttgttgctttcggtggtgacggaggaactgtggatataggtttacagtcattatctggagctatggaaaggggacataatatgctctacatctgttatgataatgaagcatacatgaatactggaattcaaagaagtggagctacaccatatggtgcaagtacaactacttcaccaaaaggaagtgcaagttttggggaagacaaacctaagaaaaatatgccaatgattatggccgcacatggaattccatatgtagcaaccgcatctattgcatatcctgaagattatgttaaaaaagtcaaaaaagcagctgaaactaaaggacctgcatacatacatttacaacaaccatgtactaccggttggggatatgcatctgaaaaaactattgaaatgggaagattagcagttgaaaccggatcttggattttatatgaaattgaaaatggtgactttgaaattacatacagacctgaagaaagaaaaccggttaaagattacatatcagtacagaaaagattcaaacacttagatgaagaacaaatcaataaaatccaaaaatatgttgatgcacattgtaaagaattaggattatag

SEQ ID NO: 8437 - DNA, 1146 bp, Methanobrevibacter gottschalkii
  source 1..1146: mol_type = genomic DNA
atgataaaagaagtaatgaccgcaaacaaagcagttgcagaagctgtaagattagctaaaccacaagttattcccgtttatccaattactccgcaaactacaatttctgaatacttagcacaatatgttgcagatgaaaaaattgatgctaaatatattaaagtagagtcagagcacagtgcaataagtgctgctgttggagcaagtggtgctggagtaagagtatttaccgcaacatcttcacaaggattaatgttaatgcatgagattttatttgcagcagcaggtatgagagtgcctatcgttttagcagatgcgaatagagcaatttcagcaccgttaaatatttggaacgatcaacaagattcaattgcacaaagagatgcgggatggttacaaatttatgttgaaaatgctcaagaagcattagattccactttaatggcttataaaatttcagaaaattccaatgtattacttccatcaatggtatgtttagatggatttattttaacacacacagtagaacctgtagaaattcctgatcaagaaagtgtagataaatttttacctccatatgttccagaacatgcatttcttgatccaaatgaacctatgacaatcggtagttttgctgatacaaattattatattgaagcaagacatgacatggaaattgcaatgaacaactcaatagaagttattaaaaagacttgtgatgaatttgctgaaatatttggaagaaaatacggtcttgttgatccatacaaaaccgaagatgcagacatcatttttgttgcaatgggttcactctgcagcacagttagagtaatcgtggaccaattaagagaaaatggggaaaaagtaggtttacttaaaattagagcatacagaccattccctgttgaagaaatcaaagaagttataaaagactgtgaaaaattagctgttattgataaaaacttcacattcggaattggtggagcactttatgcggacatgaaagttaaaattgataaagaaatctatggatttattgcgggtttaggtggaagagacatcacgccagattcaatcatggaaatttatgaaaaaacaaaagaacctgtacaagatgttacatggattggacttaaggaggaatag

SEQ ID NO: 8438 - DNA, 243 bp, Methanobrevibacter gottschalkii
  source 1..243: mol_type = genomic DNA
atggtaagtataggttgtgtaattaaaacaccaggcaatagtaaaatcaacaaaactggaagttggagaacatttaaacccattttagataaagaaaaatgtattgactgtgacaattgtattattttctgtccagactccagtgtaaataaacaacatgatatagattatgattactgcaaaggatgtggaatttgtgcacacgaatgtccatctgatgcaattgaaatggtaaaagaataa

SEQ ID NO: 8439 - DNA, 558 bp, Methanobrevibacter gottschalkii
  source 1..558: mol_type = genomic DNA
atgattatacatgataaatgtatggaggaaaaattaatgattgaaattcgttttcatggaagaggtggacaaggtgctgtaactgctgctgaacttttggctaaagcagcatttaaagacggcaaatattctcaggcttttccattttttggagttgaacgtagaggagctccagttatggctttcacaagaattgataccgaaccaatagctttaagataccaaatctacaatcccgaccatgtattagttttagatgatggattattgaatgtagtagatgttttttcaggaattaaagatactactgaagttataatcaatactaaaacttttgaaggtagtggagaacatactgttaatagtattgatgcaactggagttgcattagacatgttaggacgcaatatcgtaaatactattattttaggatattttgctaagaaaacccaaattgtaagtattgaatcattacttgaagtgattagagaaacattccccggtaaagttggagaattaaatgtagaagctactaaaaaagcttatgatatgggataa

SEQ ID NO: 8440 - DNA, 1605 bp, Methanobrevibacter gottschalkii
  source 1..1605: mol_type = genomic DNA
atgaaagttctgattatcacaggggagttggcatatcctttaataaaagaggtagtttcaaattcaaaagaggatataattgtacacattgcagataatactcaagttgcagcatttttaactcctaaacaaataattaaagaagtaaaaacttgtttttcaaatcaattagatgaaattgatatgattttagttccaggtttgattaaaaaaggaacaaaagaaataactaaagaacttggaattcctacatttaaaggatccactgatggggcggatcttgcaatggttttaaatttagtgggtactattgaattgtctgaagataaacctgcagataagttgattgatgaagaaaagagaaaaaaagcttttaaattcattgacgaatttgaaaatgataaagaaaatattgaaaaacttctaaaaaaaccaaataatattttaatcaagaatcttccagttggggaagattttccaatgagggtattgtctgagattgctaatgcaccttttttatcaaaagaagcattgattaataaatgccagtattttgttgattcaggagcagatatgattgatatagggatggctgcaggtgaagatttctcagataaaattcctgaattaattgatacactgcgccctattgttggtggtaggccattaagtattgacacattaaatacaaatgaaataaaggttgcagctgaaaatggtattgatcttgttttaagtcttgatttaggcaataactctgaagttaaagaaattctaaaagaaaaaaacattcctgctgttttacttccaacaaacttttcacaaggtaagtctccaaaatctccggctgaaagagttgaagcaatgaatcagttgattaaagatactgaaggtttaaaatatgttgcagatttaattttagatcctgtaaatagttctagcattgttgaatccataatcgcttgtaatgaattccataaaacaaatcctgcaccaatgttttttggtgtgggcaatgttactgagttaatggatgctgattctggtggagttaatgttttacttgcaggaattggtatggaattgggtgtaagcatattgtttacacctgaagaaagtgggaagacaagaggtagtgtttatgaattagctacagcatctaaaatgatgtttcttgcaaaacataggaaatccattccaaaagatctggggattaatttagttgcatttaaagataaacataaaagaaatgatattatattaaatgagagggatggcattccagaaactatgcaagaaaagcctatgaaattcataagggataaggcaggcagttttaaaatcaatgttgattatggaactacggttaagcatagtaagattactgccactcacttcaagaaaaataagccggatattgtaattgtagggcataatgctcgggaaatttatgaagaaatcattacaaaagaattggttacaagaatggagcatgcagcatatctaggttcagaattacaaaaagcagaaattgctatgattactggaaaagaatatgttcaggattttgatttattcaaaaatcctgatgaatttaaaaaatag

SEQ ID NO: 8441 - DNA, 405 bp, Methanobrevibacter gottschalkii
  source 1..405: mol_type = genomic DNA
atgaaagctgataatgcaatcataattgtattagtagtattgataatactttgtggagcagttgctcttgttattactaacaatggaatttcatttaataatacaagtgattctgtagtgaacaatacaaccaatacaaccaatatcactgctaatgatactgatgaaactggtgcgactcatgataccggacttgtagcttccagttcagatgatggttccagttacagtagtagtggatatagcagcagtagtggctcaaacagcggttctagttcaggacatcaaagtgacaactctcaaagttcaagcggaagtgaatccagttcaggatcagaatccaattcagaaccagaatctgatagtgcaggacaaagtgaaggctcatccgcagacttcgaataa

SEQ ID NO: 8442 - DNA, 855 bp, Methanobrevibacter gottschalkii
  source 1..855: mol_type = genomic DNA
ttgcaagctgaaaatattagtattaaggatattgataaaagtcttttagattcaaattatgtttcaaacaatgaaatttcaactactttatatttatcattattacttggaaaaccgatgcttatagaaggaccgccgggtgttgggaaaacagaattagcaaaagtagttgcaaaaacattcaatagggatttttttagaatacaatgttatgaaggaattacttttgaacaaattgttggcgaatggaattatcaaaaacaattacttcatttggaagccgctagaaatgattcagttcgtgaagataaaatatttgatgaagagttcttcataagaaggcctttacttaatgcatttttaaatgataatgattcagtattgttaatagatgaaatcgataaagctgatgaggaagtagaaagttttttactccaggcattaggagaacaagaaataactatcaatgatcttggtacttttcaattaaacaatgatttgattgtcattttaacatcaaattctcaaaggtcattacttgatgagacaaaagacagatgtttgtttttatacattccatatcccagcattgaacgtgaaattgaaattgttaaatcaaaattacataatgcagatgatgaaactgtatcatatgttgttaaattagttcatgatatacgtaacctcaacttaatgaaaaaaccatctgttagaggtactgtggattgggttcaatcagttatgaatttaggaactaaaaatttagatcagtccttaaaagatagtgttggtgtagctattaaaactgaaagcgataaaaaaagagttttaaaggatatttttaataaaagataa

SEQ ID NO: 8443 - DNA, 1155 bp, Methanobrevibacter gottschalkii
  source 1..1155: mol_type = genomic DNA
atgttaacaaaaatagcaactttgtccgctcagttaagagaaaaagatttgcccgtaagtgttaggagtactcaggcagctgtgcaaatttataagaatttaggtgaaagcgataggaatctactaaaaaccgcattaatggcaatttatgttaaggatagatatgatattcctaaattcaataaaatatttgatgaagtattcactgttaataaaaaggttgaaatgcctgaacaacttcaaaaaagtaaggcatatgagggtactggacctaaatctaacaaatatgtaatcaaaaaacaaggaagcatggcaagtaaagttcaaaaagagaaaattacaaatgaaaaattaaaaatgctttctggccaaccgttacttgatgaggctaaaaaacttgagcgtgatggtgagttgatgaataaagatttgacaaaattaaatcgttttgatcctcgcatgcttgagatttgccaaaggttgggtaaaagaattgctaataaacgttcacgaagaaaaactaaaacaacttctaataaaattgacattaggagaaccataagagctaacttaaaatatggtggagttccttttgaacttgtaaaagcaaaaccaagacctcacaaaaatgaacatttatttttaaatgatatcagcgggtcatgtgaatggattagcagctggtttttcatgttgatgttttcagcacaaacagcatttaaacgatcaagaactttcgaatttgataacaaagtaattgaaactactgatgctttaaaagaagaatatttaattgattcattcgtaaaagttaaagatttgcgagttaaaaatttaatggttcatggtacttcagatatgtactcctcatttaaaagctttcaagaacaagctaatattaataataaatcttacgtgattattttatcagattgccgtgattgggcaggaccaaaggttaatggtattccagctagtgtggaaattgttgaagagatggtaaaagattctaaaaaacttataattttaaatccggaagataaaaataaatgggatgttgtggacagctgtgtttcattgtatagggatgcaggagcacaaatatttgaagttaatactttaaaccaacttgcacaatttgtagaacagatgtag

SEQ ID NO: 8444 - DNA, 918 bp, Methanobrevibacter gottschalkii
  source 1..918: mol_type = genomic DNA
atgcaatgtagtaaatgtggtaatcctaaggttattattaaaaaggaacaatctggtcaattattatgtaaggattgttttattgaatcaattgagaagaaagctataaagactattagaaaagaaaaactgttagataagggggataaagttttagtagcattatctggtggaaaggatagtgtaacaacacttgaaatattaaatacattccgtcaaatgcacattattgagctttgcgccgttacagttgatgaaggaatcgataattataggcaggatggtgttgatatagctattaggcatgctgagagattgggtattgaacataaagtagtgtccttaaaagatgaatatgggattactctagatgaaataatgcagaaagaaaatcataaaggttcttgtacatactgcggtgtatttagaagaactatcatcaataaagcagctcgagaaatgggtgcaacaaaaatagctacaggacataacttggacgatgaagttcaaggaatcctaatgaattatcttgaaggaaatattgataatttgactaaattaggtgcaaaatcagaatctaaggcagaagaattcacagttaaaatcaaacctttacgtgaaatacctgaacgtgaaatcggattatatgttgttgcaaaagaattggaagttcattttgacagttgtccttatgcgatgcagtcatttagaggtgaaatttctgaagttattaatcatttagctgaaaaacaccctacaattaaatattctacactcagaggatatgataaaattaaaaatgtattgaaaaaggaattaaaaaaagaatttaatcatggaagatgtagtaaatgtggtgaacctgcagctaatgaattatgtaaggcttgttcatttttagaagaattgggaatgtga

SEQ ID NO: 8445 - DNA, 204 bp, Methanobrevibacter gottschalkii
  source 1..204: mol_type = genomic DNA
ttgcaatttatattgaaatataaatcaataaatgagaaaagagtattacctaatgataattatacaattaaagatttgcttgatgaattacaattatctgctcaaactattgtgtcaaaacaaaatggtgaacttgtaattgaggatactgtaattgaaaacggtgatgaaattcaattagttcaaataatatatggtggttaa

SEQ ID NO: 8446 - DNA, 864 bp, Methanobrevibacter gottschalkii
  source 1..864: mol_type = genomic DNA
ttggatattagttatgaatgtgggccttgttttttaagacaggctcgtgaagctttagatttatcaactgatgatgaaaatcttaaaatggaagtaatgggtgaaattttcaaatttttaagtgttactttcagagaaggtactaattcaaatagcaccggttcttcaatgcataatattattaaacaaaaaactggttgcatggatccatattataaagaaaaagttgaaggtaatgaaattgctattaaatacttgcctgaagttaaaaagatattgactgaagatgacagtttggaaaattatgttaaaatagctattattggtaacattctagactttggtgcatttacattagacgatgatattgaaagtgtaattaaaaattcacttaaaaaagatttggctgttaaggatattgaggaatttgaaaattctctaaaaacacatgataaagtgttatatttagtggataatactggtgagattgtatttgataaattacttctaagtaaaattaaagaatatgatttgaatattacaattgcagtcaaatcagaacctattttaaatgatgcaacaatggttgaagcattggaggtgggactcgatgaattcggagaacttgttgatataggggctggaactgttggttatgtggatagtgaaatttcagatgaatttagacaaatttttgatagtcatgaattcataatttcaaaaggtatgggaaattatgaaggattgactgaaatagatctatctgataaagatatttacttcttattatgtgtaaaatgcaatactattgcaagacacattggtgcaaatttgcatgatatgcttctttttaaaaaacaatga

SEQ ID NO: 8447 - DNA, 735 bp, Methanobrevibacter gottschalkii
  source 1..735: mol_type = genomic DNA
atgattattggtttaattggatttggaaatgtttcaaaaaatttagtaaaattaattaaatcagatgatattacatttataacttcgatggaagatagatctcctaaaacaattgatgctattgagaaatctaaaattaaagttctggatacatttaaggatgtggctgttgcttgtgatattttaatttctgcaaattctccaaaaagtgcacttgaagctgcagaaaattatggaaagtttacaaaaggaatctacttagatttaaacaatatttctcctgatactacttttaaaataaatcagcatgttgaaaatcttgttgatggtgcaataattggaaaaatagattctcctaatccttatttatatatctctggtgaaaaagcagaagaattattatttttaaatggatttttgcaaaccaaaaaaattagtgacaatgttggtgatgtagctattttaaaattacttagaagtagttatacaaaaacattgtctgctattttaattgaatcaacagaactttccagagaatatgatttagaagaagagttttttgatattttatcactaacagaaggggataactttagagagaaatctatctcaagaataaataatacattaaataattcaaaaagaaaatctgaagagattgaagaaataataaattattttaataaaaataatttaagtatggttagagcagcattaaaaaagcttaaccaataa

SEQ ID NO: 8448 - DNA, 1269 bp, Methanobrevibacter gottschalkii
  source 1..1269: mol_type = genomic DNA
gtgttaatattgattggaattagtgcagattttgaccctgttcataaaggtcatgaaaagttaattaaagaagctagaaaattagctgataatgaaaacaaaaaagttgttgtttatttaaataagggattcagtgcaaatcacgctcctttttttgttaatttcgaagcgcgtagagatatggcattggctttaggtgttgacgaggttaaatcttttgaaggattgcatcatagattagttctgtcttacagtgtgccgattaggcttaaacaaatgattgatgatggaataactgattatattacatcagcaagcatttcacttgatgaaattaaatcaaaagcacaaaagtttattgatgaaggaaattttgttggaatgccaaaaagttacactaacaggaatgaaatccgttggtatgctataaatcagtttctcggatcaaaacttaattatcatgtagtaaaagaattcaataaagacaaatattccgggagactcattagacaatcaataatcgataacggaatggtaataacagatgatgttaaaaaattactcccaaaaacaactatcgagattcttcaacatgaaattgatgccgatagaattccagaaaatagaaattgggtagaaatctataaaaaaatgaacacatattccagaggaaaccttgaaaaaatagcttaccttaacggaaacacaataaacgaaattattaaaagaagagtttatagagatccggaatctatttgggcagtttttagaagatctaattacggtcccgtaatgacaagattagcaatcagttcaattgaaatgggagttacaaaaaaagaagtaatggatttaatgaaaggttatgaatcacaaggagttattccagataatcaaaaagtccagagagtaattgatagagcatggtatgttgcaactagcagattagatgcacgtgaagctaatgaaaaatttagaaatgaaaagattgaggttaattctccattatgtttagaagcaggcctaaatttaactaaatttgaaacaaaaataaccaaagaaggattgaaaacagatttatatgtagataaaaatggtaaaatatctgttcagtttaaaagtgaaggcaaaaagattaaaacaaatttaagacttccagcagaagaagttacatatttaagatacattatggactctcattttattccggttaatggacatataaaaaaatctgaaaaaggatttaaagttaaagtaattattggttaa

SEQ ID NO: 8449 - DNA, 483 bp, Methanobrevibacter gottschalkii
  source 1..483: mol_type = genomic DNA
atgaaaactaaatttgttagtttactgtccatacttctcggattaataattgtcatttttccaataatgggagttattggagttggttccttaattggtttatccgcattattaatgtctatttatttacttatcgttggaatagcaataatagattataataatagtggtgcgatacttgatttagttttaggacttatacttttattcttaagtatctgtttaatattcaatccatcattacttggatttttaactgaaatttcaatgtattttgcaggaataatgttaattattgttgctgttgtctcattaataaataaccgcaattcaagatacggattttatagtggaatcattggaatcatacttggtttattatatataattattggaacttacctctcaaacccaattattcttggtactttaatcggaatatggttagtgataagtggtattttaaaattaatggatagataa

SEQ ID NO: 8450 - DNA, 1083 bp, Methanobrevibacter gottschalkii
  source 1..1083: mol_type = genomic DNA
atggaaattgaaaatttaacaaaagatataagagcgagagcttttgagaaaaaagatccgaaaactccagagcaagttggagcaagttggtataatgatgatttaacttatgagggtatttcaaaaacattatttatgatattgccaacaccaggatgttcatgggcacttggcgatagtggtggatgtacaatgtgcagttatgtgtctgattgtacattagaaccaattgatactgaaactattcttagaatatttaatgaccatttatcaagacatccaataaatgaagaagataaaatttcagtaaaattattcgcatcaggaagtttcctaaacccctacgaacttccaaaagatgcacgtgatgaaattttaaaaacattggtaaacttaggcaatgttactgaaattattgtcgagtctagaccagaatatgtgaaagaagaatacttagatgaaatatttgaaataataggagatactttatttgaagtaagtattggtcttgaaacatcaaatgattacactagacttaaaaaaataaacaaaggttttacccgtgatgattttgaaaatgctacaaaattaatgcaacatcaaagaaaaacaaaaggatataatttgaaaacaaaagcatatatttttgtaaagccgattctcgtatccgaaaaacaagcgataacagaagcaatagaaactgcagaatattgtgattccattaatgttgatagactttcattctgtcctgcaacaatacatggtggaactgtaatcgaaaggttatggagaaaaggggcttatcaaccaccttggatttggtcatgtgttgaaattataaatactgtacgtgatgaattaagcatacctgcacttttagacacatcaggatttggatcaagacgtggtccatataactgtaagaaatgtaataaagatttaaaacagattataatagctaacaatttaacacaaaacaaaattgaatatgaatgtgaatgtaaaaatgaatggttagctgaaattaataattcagatatgaataactcaactgttaaagttaaacatatcccattatattaa

SEQ ID NO: 8451 - DNA, 960 bp, Methanobrevibacter gottschalkii
  source 1..960: mol_type = genomic DNA
atgaagttcggtatagaattcgtaccaaatcaacctttggatgaaattgtaaaattagtaaaattagctgaagatgtgggttttgaatatgcatggattactgaccactacaacaacaaaaatgtatacgaaaccttagcattacttgcagcaaacactgaaactattaaaatgggtcctggtgtaaccaacccatatgtaagaagccctgcaatcgcagcttctgcaattgcaaccattgatgaaatttcagaaggaagagcaactttcggtattggtcctggtgacaaagcaactttcgatgctttaggaattgagtggactaaacctgtatctacaattaaagcagcaattgctgacattaacactttattggctggtgacaaaactgaaggtggagcagcattaggtggagtaaaagcagtccaagaacacattcctatttacatgggtgcacaaggacctaaaatgttagaaactgctggagaaatcgcagatggtgtattaattaatgcttctaaccctaaagattacgaagcagctatgccaatgattaaaaaaggaattgaagcagctggagataaagaatttgatgtaggtgcatacactgcaacttctatcggacctgactcagatgcagctaaaaatgcagctaaaattgtagttgcattcattgcagcaggatcccctccacaagttatcgaaagacatggattgcctgaaggattcaacgaaaaaatgggtggattcttagctaaaggtgacttcggtggagctatcggtgcagtaactgatgaagcactcgatgcattctcagtatgtggtactcctgatgaattcattccaaaaattgaaggcttagctgaaatgggcgtaactcaatatgtagcaggttctcctgttggtaaaaatgtagaagagtccattaaattattaggagatgtaattgcaagtttctaa

SEQ ID NO: 8452 - DNA, 192 bp, synthetic construct
  source 1..192: mol_type = other DNA
ttgacagtcccagagacgtccgaaattctcgcctcattcggcttcaagaacctgaataagcaggtgtttaccttcaagattatattcatcagcatgctctttgggctggacatccccttcatcctgagtgagctagagtccaaagaaaagcttcggaaatactttaacatctctgaggtgtggagcgcagat

SEQ ID NO: 8453 - DNA, 249 bp, synthetic construct
  source 1..249: mol_type = other DNA
gtgggagacaaacttctgattatgtacaagcaaaacaactgcctgccattcctcatattggaagataagacctataacttcgtcggcgattttgtcgacccgattaggcatgagaataaatgtgagattctagataatagcgtacagatcatcctgcccatccagagtatcctcgacaataacttctttgtgaactccgacggggtgatcgaataccgggagcgccactgctgtaagtgcggcagctga

SEQ ID NO: 8454 - DNA, 1053 bp, synthetic construct
  source 1..1053: mol_type = other DNA
ctctacagtataaagagcgtcaaagaaatacaggatctgaatcccttcatcgtcgtcggttgtgggggaggaggggagaaattctccaacctggaaggggtcgagacggttggcttcatcgatgataatgtgaagaagcagggcaaagaattttgtggctatattgtagcagggagcctggacgagagtctcaaacatgccaagaacgccaagtcattagtgatcatgctccctattggtgctgagggctccgcgcttaaatacgccgtgcaggcgattgacgccggactgaatgtgatcacgtcatttcggtcactgtccataacagaaaacatctcgctaaaaaaatttgctgacgccaagggcgtggtcatcaaggacattggccctagactggacgtggtgaagacaatcgccggagtggctcccaagaagtcttgcgaggtgcttccaaagatttcgtacgaaagcaaagctccagtaatcttcgtgggagggacctcccaggagtgcgggaaacgtaccaccacaaaaaaactgggcatagcaagcatgaagcgcggactgaccccggccattatcagcactgacgagatgggcctcgaggagcccactgatttcaactttagggctggcagtctcagcgcaatggatgtaccagcggccgtcttaagcgcaattaagtacgcagaggagacaaagcaaccggacattatcttcatcgagggtcagagcagtttgaccgaaaagggcaacccccacccaagaggactcagcgccgccatactgatcggcgcagcccccgacgccgttattgtgggacaccggccaaaccacccctacagggaacctcgcgggattgaggaggagatccgagccatcgaagctgttgagcccactaaggtggtgggcttgtccatcaacctgaagaatgctgacctggacctgtgccctgaatttttcgaatccaagtacaacctacctgctgaggacgtttataacaatggtgccgataaacttctggatgcgatcttcgaatatttgggggagtga

SEQ ID NO: 8455 - DNA, 534 bp, synthetic construct
  source 1..534: mol_type = other DNA
atgagcttcatggataatctcaaaaggagtttaggctacgaggaaacagaagatagtgaaaagaaagagggtggcagcttcaacttctctgagtttgtgaatgacttcaccaaaagcgttaagaactcaagagagcagtataagcaatccaaacaacaggagacggcacagcagcagtaccgaccggcgcctgaaccacagcaggctcaccggactgctcccgtgtacgatgacttcgatgacgattttgtgataacccccgaacagtccttttatgagatcgtactgatcaggccaaagactctggacgacatcaattatatggtggaccagatcctcgaagagaagaaccccatcattgtggacctatccttcctggagaaagagagcgaggccaactttaagctcgcaggggataaaattcgccaaatgagaaccaagtacggggcccaggccctgcttttgacacgctcagaagacaagaacctgataattctttcgcctcggaaagtcaagctggtcaacaagggatga

SEQ ID NO: 8456 - DNA, 915 bp, synthetic construct
  source 1..915: mol_type = other DNA
atgctcatcaaaaagatcccaatcccaattgccggactcgccctggctctgctctcactgggcaacctattgcaggacatgaatcctaacgtcaagtacctgttcggagctatgggcgcaattatcattgtgctgacaattcttaaggctatcttctaccccgaggatgtgaaagatgacttcaagaatccagtaatcgcaagcagttccgggactttcagcatgagcctgatgctgtcctctacctatgctctggaatttatgcccaatatttcctacattgtgtggatcattggcatcagcctgcatattttgctcatgatctactttacgtatcacttcatcatacggaattttaacataactgacgtgtatcccagctactggattgtgtatgtgggggtctcgatggctgccattaccgccccccttcacggccacaaggagatcgggttcatatttctggtcatcagttttatctccatgctcataacattgcctttaatgatctaccgctatgtcaaatactccgaaatgcctgatgccaacaagccaaccacctgtattttcacagccctgatgagcatactgcttgtgggatatatcaactccgcgccggcaatctcaacggcgtttataatctgcctctattgtattgcctgcctgttctacatcttctcattctacaagctcgttgagtacagaactctgaagttctatccgagtttcgcagcgtttacatttccctttgtaatcagtgccctcgccacgaaagacatcgtgaagatcgtcggtagcaacaccctactgtctagcgtccagaccgttgagaccttgatcgccgtgattgtggtgttctacgttcttttcgagtactgcgaatttttaaaaaatagcaaaaagtcgaggaactga

SEQ ID NO: 8457 - DNA, 756 bp, synthetic construct
  source 1..756: mol_type = other DNA
atgattgatacgcatattcacgctgacgccaggagcagtgaagactttaaggagatgtacctatccggtatcgattgtgcaataacttgcagctattatccgtacaaaattgacgccgagaacatcctcctcaatcacctcaatagaatcttggaatacgataccctgcgggccagccaatacggcctggatttgaaggtggccctggggattcatcccacaaacagtatcgagaatcctcagatgatcttcgacgagatgtataactggattgaaaacaaacagatcgtggcgataggcgagattgggctggaagatttgactgagacagagatcgacatattcaagaaacagctggacatcgctgatgagaccaattcaaaggtcatcatccacacacccaggaaaaagaagctggaagtgctaaaagtaatcctcgacattgtgccacagcacctggacgaatcccaggcagtgattgaccatgtcaatcaggaggtgatcggagaagtgattgaccgaaactatatgcttgggatcaccgtccagccccaaaagctcgacgttgacggagcgatcgatattctggataatttcggcttcgataactttctgttaaacagcgatatgtctaacaaaccaagtgaccacctttctgttgccaagaccatccgcgagctttcccggctgggctacaaaaagagctcgatagacaagatatcccaccgcaacgcttcagactactttaagatctga

SEQ ID NO: 8458 - DNA, 900 bp, synthetic construct
  source 1..900: mol_type = other DNA
ctgttcctgatcgtcgggagtctgtacgcagtgagcctctttcacattttcagcctgcaggagatcctgtatttcctggtaattaagaacaatgacgtatcgaatactcgactggtgatcaatttggaaaataatgagaactatcttaagagctacgatttgatctcagaagaggtcaaatatcttacgaatagcataattcggcttaagatactggccacattatttaagtgccccttaaacatgaaagacataaacggcatcacctccctaagttactccagcatctccagcaatctgcacaacctcgagctcaaagggcacgtgtacagagaacacaataagtactttctgtccaactccaccaagttggaagtggagcaggttcttaagctggggaaccttattaacctcctgaacgatttctttaacattctggacaaacatctagtcgacatgatcccgaatcagtcagttgcggaattatacttgcttggcaatgcctgcctgatggaatccgatggtgtggacgtctacaggatctataaatatatcgaggatgcactaaacgctgccgaggaggttaaatgtgtgctgcctttttactacgaaacattcaatgataagctcaacgacctggtgaagaacgacaagaaggtggaggccatggtgccactcagtctgttcgaggtctttgatgaaaaatcggagattggaaagttgtcttttttcagcaatgacaagaccttcctgctcattatcactcatgaactcatgatcctcggcctgttcaaggaggatggatatttcgaccaaaaccgcctgctcacctctaagaacagtgactcaataaagtgggctaacaacctgtacgagaacttcaaaatcaaaaacaaatga

SEQ ID NO: 8459 - DNA, 1695 bp, synthetic construct
  source 1..1695: mol_type = other DNA
atgaatcatgacaagatgagcaacataagtagcaagcggggcttcctgtggcctagctttgagatttactcaggcgtgtctgggtttaccgactacggccctctgggagctagcctcaagaataatatcatgcagaaatggagaaagcaatatgtctccggtgagggattttacgagatcgaggggccgaccgtaatgccaaaagaggtgctgaaagccagcgggcatgttgataacttcaccgacccgatgtgcaagtgtgaggactgcggcgaagtattcagagcggatcacatcattgaggaggtgatcggtgaagatgtggagagcctggagaatgaggaactggaccagatcgtaattgacaacaacattaagtgcccggaatgcggcggtaacctttcgaacatctggaattacaatctgatgttcaagaccgaaatcggcgccaagggcgataaaatagggtacatgaggcccgaaactgcccaaggaatcttcattctgttcaagcggttggaaaggttcttccggggaaaactccccttcggcgcggtgcagctcgggaaagcttacagaaacgagatttccccacgccagggcgtgattagactgcgggaatttacacaggccgaggcagaaatcttcctgaaccctaaagagaagacacaccccaagttctcacagatagagaatgtcatattgcgcctaaacagccaggaggtgcaggagaaaaacttagagcccttggagatcacagctcgggaagcactggacaaaggcattgtcgctaacgaaatgctcatctaccagctgtacctggcccgtaagtttctgactgaaatcggcatccccgaggatgtgttgcgcttcaggcagcacttaaagggggagatggcccactatgcacttgactgttgggacgtggaagtgaagaccgacaagtatggctgggtggagatcatcggaatagcggatcgcggggattatgacctcagttcccactccaaatacagtaatgatgagctaaacgtgtttattgagtacgataagcccaagaaggttcagaagaccatcgttaagccaaacctctctaaattcggccctatcttcaaaggggattcgcctaaggtaaagcaggctatcgaggacgccaatgtggaagatattaaatccgcaattaaatctgagggtaaattcacggtcgagcttgataaagtctatgaagtgcccgaggacctgctcatctttgaagacgttgaagaagagataaccggtgagaaaatcatccctcacgttatcgagccatcatttgggattgatcggattacatattccgtcctgctacattcatttacagagactgaaggaaaggattacttcaggtttgacaagagtgtggctccagtgcaactcggaatctttccccttgtgaacaaggagggccctcgtgaaattgcccaggagctgacggaacagttccgaatgaacggattcaaggtcgaatacgacgctaccggaaccattgggaagcgctatgcccgagccgacgagatcggtatccccattgcagtgacggttgactttgatacactcgacgataatcaggtcactgtccgagacagggacagcgaggcccaagaaagaatcccaatagccgagctggcagactacgtggaaaaatattataagtga

SEQ ID NO: 8460 - DNA, 585 bp, synthetic construct
  source 1..585: mol_type = other DNA
atggctattctcagcgataaagacataaagaaatatctggaggaagggaagatcggcatcgaaccgctgctcgacgagaagcagatccagccatcttcagtggatatgcgcctcggagatgagtttaaagtcttcaaagttattcgcaaaccctacattgacccaaaagacgaggaagacatcgcaagctatatggaatccactacggtgaacgagggcgaggcctttattatccaccccaacgagttcgccctggccacgacattggaatacgtgaaggtacctgacgacctagtggcaagggtggagggccggagctccatgggaaggcttggcgttacaatgcacgtcaccgccggtttcatcgatcccgggttcgaggggaagatcactctggaaatatcgaatatcggtgcgatgccggtggctctgtaccccggccagcgggtatgccagattgtctttgagaccatgaccacaccctcagaagtgccttacggacatccagaccgacagagcaagtatatggggcaaaccagtcctgagtccagtagagtcaagttagattacgagctgaagaagtga

SEQ ID NO: 8461 - DNA, 831 bp, synthetic construct
  source 1..831: mol_type = other DNA
atgcgtcggatcaggtttgtggacatcagcatcttcgtccttaaatatattttcaactggcgcttttggattgcggagattaccaagaagagcaaaatctacaagaagttcatcgacaaaatgctgttcgaggaagacgagattgttgtggtgcccaacacggttaacataaataaaaaaatcgagtctgagggctcggaatttctcccaacagacatcatcaaggaagtagtgaagcgcagcgaagacattgtcatcatgaacacatgcctgtgccgggagtcaaacgactgccaggattatcctcacgacatcggatgtatctttctggggccaaccaccagaaagattccgaatcacatcggtaagaaggctaccgtggacgaagccttagcccagatcgacaaagccgatgaggccgggctcacccacattatcggaaggaataaaatcgatactatctggatgaatatccgacctgggaaaggactgctaaccatatgccactgctgtccctgttgttgcttgtggaaggtctaccccaacctggatgaggacatctccgataagatagagaagctgaacggtgtggagataaagctccatgaagacaactgcaaacattgtatgaaatgcctcgatgacatttgcatgtacggctccatcagtttggagaataacaagataactattgattacgatacttgtaagggctgcggcctttgtgtcaatgcttgcaagttcgacgcaattacaatagattatacggcaaaaacaattgacaacatcgtgaatagaatcgatgacctgattgaaattaaggagctgtga

SEQ ID NO: 8462 - DNA, 909 bp, synthetic construct
  source 1..909: mol_type = other DNA
ctgatcaagataggcgacactgccgttagtgaggaaaaagtcgtggaaactacctctctaaactcacctaaagagaaggaaaaaagcgatgacgagaaaaagtccacgtcaaccaaaaaggctaagtctaccagccagtctcgggggactgcccgcgccaaactgatcaaaaagcaggaaaaaaaggagattagtcttttcaaggagaatatttacatcgtctttgtcgagtgtgaaacccccggcaacattgggttccttgcacggaccatggccaatttcggactgaagaacttagtactgattaatccccccacattgacaaatgaagcatactatcaggcgacccatggcaagtacatcgtggagaatgcaaagatataccctaccctggatgacttctatcaatcccagcgcattgactttaaagtggctagcacagggatggccggtgggagttataacctgtcaagaatcccaatccggcccgaagagctgggcaggtccatgaacgtgtcgaacaagatcgccatactgtttggacgagagggaaatggcctcacaaataaggagatcgaggactgcgacatttgcgtgtcgatcccgaccgatccaacgtaccctatcatgaacatttcccacgcagcggccatcatcttttatgaactgttcaggaacaaacacgactacggtgctgaaggactcgatgagagcagcgacttggagaaggagtttctcctcatggatatgaaagagatcatcaacagcctcgatatcccagaccataagaagagaaacggcctgaagacgttcaacaacataattagccgcgctttcattacatccagagaagcccacactttcaagggcatactaaggcgaatgaaaaataagtttggggagcagtga

SEQ ID NO: 8463 - DNA, 1476 bp, synthetic construct
  source 1..1476: mol_type = other DNA
atgatcaaggtctacgttagcaggtttaaccgtgggatcgacacagagccccacctggagtgctacgacatcaacgaaacccccaacatgaaggtgcttgacgcactccaagccattaatgagaagtatgacgcagacatttccttccgaagctcatgtcgggcgggccagtgcggctcctgcggcatcctcttcaacggcaacggagccctggcttgccaaaaagagatcaaggatggagccataattgagccacttaagttcccagtcatcaaggatctgattgtcgatacgagcagcatcgaggcaaaagtcaaagacctggagctctcgctgcagtgcagtcacgagtgcagcgagctggattccagcatcacaaagaaagatactgcagacacgaaaaaggtaaggaattgcattgagtgttactcttgctactccacttgtcctgtggtcaacattgccacagaggagtttgggggcccgtacctgatgcgctacatcaataaattcgacactgatccccgcgacaactttgacaggcttaaggaggccctggacgagggactgtataattgtaccagctgcggcaagtgcctgtctgtgtgtccgaagaacatcaacacctttggcgatgcgatagaaaaaatgcgcgctattgctgtggccaacggttccggtcctctcccaaagcatgttgcattcaaagaaaacattctgaagaccggcagatcggtaaagacagacaaaccaaccttcatcgaagagacaaagaacaaaacaggctcaaaaatagcattcttcactgggtgtatggttgattacaagttcccggaagtggggcacaagttagtgaaaatcctcaaagagaacggcattgacattgatgtgcccgaaggccaggtgtgttgcgggtctccactgctgcggacgggtcagaccgacatcgtacaggatcttgtggacaaaaataaggaagtcttcaaggattatgacaccatcatcaccgtttgttcaggatgtggagctactctcaagaataatcatcctgagtttgggagcaaattaaacgtgatggacattagtgagttcctggtcgacaaactcgatgaaagtaaactcaaggacgtgaatatgacggtgacctatcacgatccctgccacctggcccggagtcagggcatcaaggatgcgcctagagagatcatcgagaagatacccggtgtggaatttaaagaaatgttgtacccctgccagtgttgcggggccgggggaggaatcaagtccggaaagcccgagattgccatggaattggccaaatcaaaggccgaaatggtcaaggataccggggctgatgccgtggtgacaatatgtcctttttgcgagttgaatattcaggacggtctaaatgaaataggctacgacaacatcaagtgcatccatatcttggagctgctagacaaggcttatgaatga

SEQ ID NO: 8464 - DNA, 780 bp, synthetic construct
  source 1..780: mol_type = other DNA
atgaagatcaaggccgtgaaactatttgagaacggattcatgactcagcccttcgcctttgggggcgagaagggcgccgagaactttgatgcaagcgtgaaatacaggtcgagtctccaaaactacgtgatcgacaccggcgacgaggtgatccttgtggacacgggactgccttcagaactgcccgaacagccccgggatgacaacgctcctatctggagcggggataagattaaggactacgttccagcacttaaagaggctggctatgatattgaagacatcacaaagatactcgtcacacacaagcatctggaccacaccggggaactgaaaaagttccccaacgctgaaatcttcatgagcaaaaccgaggccggcgaagtagatctggaatccgacaatataatcggtgtggactttgatgacggggagtattacaatttcaagaaatcccagaagattgccaacggagtgtacttaattgaagcgaagggacataccctcggcaacagtatggtgatcgtcgagtgcgacgatgtcttttacatgctgcacggcgatattacatacactgatgaagccttgtacgagaataagctgagcattgttttcgaggacatcggggcggcaagagagactctcgacaatgtccgcgagttcattaagaacaacaaaaccgtatatctctccacacacacgccactgggttatgagaatctggagaacaacaaaataatcgacttggagaatcctccggaatcaatctatccaaattga

SEQ ID NO: 8465 - DNA, 1887 bp, synthetic construct
  source 1..1887: mol_type = other DNA
atgaatttaaaagaactggtcacaggcgattctggggagaagcgatttctgctagggaacgaggctgccgtccgcgggcttatcgaggccggcatttccatcgcggctacctaccctggcaccccttcatctgagattggaaacgtgctgtcagtcctggctaaggatgccaatatttattttgagttctctacgaacgaaaaggtcgccatggaggtggcagccacggcagcggtgtccggtcttaggtcatttaccttcatgaagcatgtggggatgaatgttgcggctgacagcttcatgacaaccgcctatagcggggtcaacggtggaatggtgatattatccgccgacgatccgtctcttttctcatcgcagaatgagcaggacacccgtaattacgccaagttggccaatgttcctattctcgagccatccaactgccaggaagtgaaagacatggtcaaatatgcattcgacctcagcgagcaatttaagctgcccgtcatcgtgagaacaactactcgcgtgagccacatgaggggcgtggtggaatttggggacgtgcgggacaactcatccaacaatgataaccactggaagcgcggccattttaacaaagacccatccaagtacgttcctgtgccggcgtttgcaggggacatgcatgtcagactttgggacaaaatccgcaaaatcgaggaagtcagcaacaagagcaagtttaactgcgaatgggggaccggtaaaaagtacggattgatagctagcagcagtgcattcaattacgcctgcgacgttgtcaagttcaataatctggatattaagatcctgaagctgggattcagctatccgttcccccagaataaggtcattgagtttttgagtgatctcgacgaggtatttgttgtggaggaagtggacccaatcatcgagcgagatactctggtgtgtattggcagcaaaaacctcaacgtgcaagtgcacgggaagctggacggcaccttcccgatatatcatgaatttaactccgatattgttgcggagggactcaacaaagtcctgaacttcaaggaaaacaagtccgtgcagttcacacaaagtctcgaaaaactaagtgaagacatcccctctcgagcccccgtgctctgtgccggctgccctcaccgggccatgtactatggcatcaatattgccattgaggagctgggcctcaaacccgaggatgtgatcttcgcaagcgatatcggatgctacacactcggcattaacccaccatacaatgcagctgattacctgctgtccatggggtccagtgtgggagacggctgcggattctcggtgtcaacagaccagaaagtagccagtttcatcggagacagcacctttttccacagcggtatctcgcccctgataaatgcagttcacaacaagcacaacttcgtgctaaccgtgctggacaacaggattaccgccatgactggtggccagccaaaccctggaatccccgtggacgggatgggtgatgatgctccagaggtctctattcggaaactggctttggcttgcggctgtgattttgtacgggtaatcaatccctttaacctggagcaggttgtgaagacctaccgggaagccttcgaaagaaaggatgctgccgtcataataagcaaggcgccctgcacgcttatcaaaggcttgacgagaaaaccccctgtgaagttcatcgaaagtaactgtaacaattgcgacaagtgtgtaaaagagctggcctgccctgctatcagcaagatcaatggcaagatcactatcgatgagtcccagtgcgacggatgtacagcatgtattcaggtatgtaaatatggggccctcgaggacggcaggtga

SEQ ID NO: 8466 - DNA, 648 bp, synthetic construct
  source 1..648: mol_type = other DNA
atggacgtccagcacgtattccggtacgtcaacatggtgccctggaagatggtcggggagaagatggacaatcattacaatatttatatctgcggggtgggcggtcagggcatcatcaagacctcaaccattattggggaggccgcaatgaatcaaggtctcgatgtcgttatgtccgaaatccacggcatgtctcagaggggcggaagcgtgagcaccgagctcaagatagggggctacaactcgagcatcatcccaaagcaaggggcagatatgctgcttagttttgaaccggttgagacaatacgcggcttggacaaggtaaactccgaaactaagatcgtgtacaacacccatcccatcatcccctcctcaactgacaagcagtatcctaacgtggacagcattacgaaaacgctgaaggaaaactttaaatatgtgctgccaatagacggaacccagctggctatggatgccggaagtgtgctcgcgctgaacatggtgctgcttggcgccgtcacagccgatgacaagttcccattaacaaaagagtctgtgatcgaggccatgaaaaacaatctaaaacctaaattccacgaaatgaatctgaaagctattgagagtggatacaactccattaagagctga

SEQ ID NO: 8467 - DNA, 279 bp, synthetic construct
  source 1..279: mol_type = other DNA
atggcctataaaatagacaatgcaatcatcaaaaaagatcggaacgggaaggtgaccctcatcgaccccgaaaacgtgttcggcgatgaagatgcattcattgccgtaaaatccgacgacctgattacaattcagttgctcatcaacgccatcatgaagaacgattttaagagttggaaggagcttggcgctattccggaaacggagccaatcaagagcctatttgtccgcctgggatacagcagggaggacatagcgaatatgctgaaggagttctga

SEQ ID NO: 8468 - DNA, 432 bp, synthetic construct
  source 1..432: mol_type = other DNA
atggccgtaaagcagatcagcgtgttcgtggagaacaaggagggccgcatcaaaaaggctattaacacactcgcagaagagaacatcaatatacgggccctgtccatagccgacacgaccaagtacggaatccttaggctcattgtcagcgataatgagaaggccatcgctgcgctggagaaggacggcttcatcgtgaaggagaacgaagtcatactactggcagtgccagataaacccaacgggcttaactcaacattagcaatctttgatgagaaaggtattaacctggaatacctctatgccttcgtctccagtaaaactgacgcggctattgtggttatgagactggaaaatatggaaaaggccatcgaggccctgcaggatagcaatgtgaaaatcttgaagaccgaggacattaaagacctgtga

SEQ ID NO: 8469 - DNA, 1305 bp, synthetic construct
  source 1..1305: mol_type = other DNA
atgttctgggacgagaaggccgagtgtatgagtaaggaagaaaaagaaaagatacagctcaaacgcctgcagaagagcgtgaagctcgcgtacgagaatgttgagttctataagaaaaggtttgacgagatagggcttaagccggaagacatcaaaaccttgaaagatatcgagaaaatccccttcacgactaagagcgatctgagagaggcttacccactcggcttacttgctgttccacgggaagacattgtagaagtacatgcaagctccgggactacggggaaacccacagtgaccgcctatactcagaatgacctggatatctggggggaatgcatagcccggggcctcaaaatggccggtgccaagaaggactacattatccagaacgcatacggctacggactgttcacgggcggctttggaatccaccacggtggcaacatgatgggaaccattacaatcccaatttcagccggcaacacccagcgacagctcgacaccatggtggacttccaaagtgatatactgacttgcaccccgtcgtatgccgcatatatcggagagagccgggagaaggctggaattagcttggatgagattaacctgaaggcgggaatccatggcgccgagatgtggactgacgaaatgcgaaaacgtatcgagaccagcctgggaatcaagacccataacatttacgggctcacagaggtgatgggtcctggggtggctcaggaatgcggcgagcaaaacggaatgcacatacaagatgaccacttttatcccgaaatcattgaccctgagactggtgagacactaggctacggtgagaaaggcgagctggtcttaacgtccttgaccaaaactgggatgcctattctgcgcttcagaacaaaggatctgacctctctcataggggaggcctgtgactgcggacggacaaccgtgagaatgacacgcatcacgggcaggagtgacgatatgctaaagatcaaaggcgtcatggtgttcccatcacagatcgaaaaagccctgctgaagatccaggggatcagccacaattacatgatccacgtcaccagacccgacattcttgacgaggtcgaagtgaaggttgaagcttccaaggaactgttctttgatgagatgaaggaaatggagaaagtggaaaagcagattcaggcatcaatccgaagcgagaccggccttcgcgtggatgtcacaatttgtgagcctgaatccctgcccaggtccgaggggaaggcggtgcgggtcatcgatgagaggaattttgaggactga

SEQ ID NO: 8470 - DNA, 876 bp, synthetic construct
  source 1..876: mol_type = other DNA
ttgatatccattttccatttatttttcaaaaagaccatttacagttcgttgattctaaatctgattggagatatcctgaactttaagtttaaagagtgtaaaacggagttcgacgggggaaatttcgaagaggccctcgatattctgggcgaaattgaaaacgacgacgaggactacaagtttgctctcatgctcaagtataactgcctgatgggtctggggtgctacggcgacgctctgactattataaacatgctcatccatgagaacccctatatgtccctgttttggttcgataaggtgaagtgtcactatttccttaaggaccttacaaacgccgccggcgcgctgtaccacgtggagcacatcattgatctgaaggatgtcgttgaaatcattgactttgtgaagctttgtaacatgatcggagagcacgtaatcgcactcaaatactgtaacatcgtcctcgataccgacgaaaaccagatcgacgcactgctcgaaaaaagcttgatttccaatatcatcgatgacaagaacatgatgaatgaatgcggtgacaagcttttcgagctgagcggcgataatctgagcctgctgatggtgagcttcgccctaaaactctttagcgggatgtaccgcgacagtttcaacatcattctgaacataaattgcatggattcaaaaatggggctcatcctgaagaagataatctataatcagatgctgtgcgacctaaatatccagatcgtgatggaaagcaatgccgagcttacaatcgacgagttcatcttactgttgttcgattatcggtactacggagtggagtcaggcgaggttaaaaacgtcaggtacatgatagtgaaacaagactga

SEQ ID NO: 8471 - DNA, 1611 bp, synthetic construct
  source 1..1611: mol_type = other DNA
atgaacgtcatgattctggccatcgtgttcataatctacatatttagcctagtgtttgtgggctattacgcctacaagaagactaattcctccgaggactttatgatcgctgggaaagacacccaccctttcatcatggccatgagttacggggctacatttatctcgacagcggctatcgttggtttcggaggggtggctagtgagtatgggatgtccgtgctgtggctcgcattcctgaacatcatcattggggtcttcatcgccttcgtctttctgggcaagcgaactcggaggatgggccatgcccttaatagcctaacgtttcccgaatttttaggtaaacgtttcaactccaacttcatccactacttcagcggcctggtgattttctgcgcgatgccgctgtacgcagccgtagtactgatcggagctgcgagattcctggagtctagcctattaatcgatttcagcattgctttgctgatactctcaatcatcattacattctacgtgctcttcgggggtattcggggggtaatgtatactgacgctctccaaggctccatcatggtggtggctatggtatttctgcttgtctttgtttattggctgctcggaggaatcgatattgcaaacactgccctgacaaatatggtcaatttatatcccgccaatgcaatcgcaaccggcggcacgggctggacggcctttccagaatttggcaccccattttggtggtcccttgtgtcttccacactcattggtgttgggatcggagttctggcccagcccagcctcatcgtgagattcatgaccgttaagagcgataaagagttgaaccgctctgtgctgattggaggtattttcattgcaatcatgccaacgaccgcatatatcgtcggctcgctgagcaatgtgtatttctacgacaagctgggcaagatcgcggtcgacgtggtgggcggcaacattgacaaggttatccccacatttatcacaatggccttgcccgagtggtttgtgtacattttcctgttgtcactgatcgcagctgctatgagcaccatatcttctcagctgcacactcaggggacagcattcggtgtcgatatctacggtaccctgcggaacaagtccaaacagaaactcgaccaagtgagcatctcccgcgtcgggatactgattgctattatttcagccctggtcatggcattttcactcccgggcagtgtcgtggcgctcggaaccagtctgttctttgaaatctgtgccgcggccttccttcctgtgtttctgggagccctttactggaaaggcatcaccaggctcggagccatttcagggatcataagcggcactctggtcagtctattctggcttatgttcgtattcaaaaagacggccctcggacttggcatttgcaagtttgtctttggggtggaaaccttgctgcctgtggccccctggccattcattgatgtgatgttgatagctgtgccaatcagcgccatattcaccatcgtggttagtttgctcaccaagcctctggagcaggaggtgattgacaaggccttcgagaacatagatgaaaaaggatcggacgcctga

SEQ ID NO: 8472 - DNA, 114 bp, synthetic construct
  source 1..114: mol_type = other DNA
atgatgattctaggcatcgaggaccccatgatttggggtgtatatgtcggcatcatcctcagcaccctgctgtgcgtggtgtacgggatagtgaactggaataacggagattga

SEQ ID NO: 8473 - DNA, 720 bp, synthetic construct
  source 1..720: mol_type = other DNA
atgaaggaactcttttccaattttggccgcatccagaagaacgatcctgagttccacgagattttcgaaaagttcgcttacggcgaggtattcgaatatagcaatctatcagagaaagaatctatcctggtgacactggccagtctgcttgcatgccaaagccctaaagcatttaagaagatcctcctggcggctctggacatggacctgaccgccgaggagatcaaagaactgctttatcagtcagtgccatacgtgggcttcgcaagagcgcacaactttttcgggatcgtcattaaggtgttcaacaaaaaaggcatagagctcccattgcccaaccggtccaacacgaatccggagaataggcacaagaagggtagggaactgcaggataagtactttggtgctgaaataatccaaatgatgaatgacaacactccagccgatcagcagcatttcaaccgcttcctcgagggattctgctttggcgacttctacacacgagacggactcaacgatcaggaacgggagctgatcaccttcgtctttttggcctccctcggaggatgtgagagccagctaatggggcatattcagggcaacttgaacgccgggaatgacaaagaaaagctgatttcggccttaactgttgtcatgccctatatcgggtttcccagaacccttaacgccctgagcattgtgaatgagagttgcgagtga

SEQ ID NO: 8474 - DNA, 435 bp, synthetic construct
  source 1..435: mol_type = other DNA
atgaatatctccaatcggagtgttaaaatgagcaacatcgagaaggttgacgaaattctgtcaaaagcagaagtcttttaccttgccacagtatatggggaaaagccaaaggtcaggcccctgggcttccatctcctcattgatggcaaaatctactttggggtcggaactttcaaggaggtgtataagcagatagaaagcaatcagaatgtggagatcgctgcctgggacggtgaacacttcttgagatactacggagtggccgatctaaccaagaacgacgccattgtggagaaagccttcgaactgatgccggagatagcggagatgtatgaggctaacggctgggaaatgggggtgttctacctgaacgacgcgaccgcagagatccgcaacatgatgaacgtggaggagacgtatgagtttaagtactga

SEQ ID NO: 8475 - DNA, 1077 bp, synthetic construct
  source 1..1077: mol_type = other DNA
atgctgataatcctgatcgtgctgggtgtggccacccacctttttctcacccctagcagtgtggaaacagaaggctctaagaacataactgacatgcttaaccggaccgtggaggttcccaacggggtgaataacgtcatcgccacgtccccgccaatgaccacggtcctatacatgctttcacctgaaaagctgaaggcagtgaacttccaatggaccgaagacgaattgaagtacgtgccaagcgagtacgccaacctcccagtcgttggaggttggtacggaacacaggacgggagctacgaggaatttatcgccgctgaacccgatattgtgattgagtcaatcgatgaggggggggacggcgacgcattcaccgtgcaggaacgccaggataaatttggcaagattcccgtgctggccgtgaaagacaccacaaacgttgagaagatcggagactccattagcttcatgggcgaggtaatcggcacggaggacaaggcaaaccagctgaacgagttcaacactaaatacctcgatatcgtccatgataaaagctcgaaactcgtggattccaacaagaagacagtctattacgcagcgagtagcgacggcctacaaacttacccctcaggcgcgagccacggccagctgatcgacttgattggggggaaaaatgttgccgacagcctcaatcaaggtaacaccacctcaggcgtccaggtatccattgagcaggtaattaagctggacccggatgtgataataacaaatgacatgcatttctataataaggtgtacaacgactccagttgggctcacttgaaagctgtgaaaaataagaaggtctatgtctctccccagtctccatttaagtggttcgataagcctgttggagccaatatgatcatcggagtgccctggacagctaaagtaatctatcctgaggattataaggatattaatatggtggacgtcactaaagagttctacagtaatttctatcactttgatttaaatgacaaccaggccaaggagatcctgctggattcgggactcaaagaatccaacctgtga

SEQ ID NO: 8476 - DNA, 1014 bp, synthetic construct
  source 1..1014: mol_type = other DNA
atggacaatgattccaaggatgtgatttcaatcatcctgctgatttttctccctatcatcctgtttttcacctcatttttattgggccggtatcctattagtccaatcgacgtgatcaacaccatactgtgcccaatcttccctcaactggaggtctcccctactatcaccacaatcgtctttgagatcagactgcccaggattattgccgccatcgtagttggggccgccctggcgatggcaggagctgcctttcagagtatttttaaaaatcccctagtcagcccggacctcctgggcgtgagcaacggtgcagggttcggggcggctttggccatcctcataagcggggctggtgtggtcactcagatcttcgccttcgctttcggaatcatctccgtgtcagtcacctatctaatctccagagcatacaaagcgggtggaatcctcatcttggtgctgtctggagtggccatcagcgccttcttctccgcactgatttccgctatcaaattcatagccgacccagatgacaagctgcccgagatcgtgtactggctgatgggaagtctcgcttcgatcacgatggatcagctgataatgattattatcccaataattgtgggcatgatcatcctccttaccctccgctggcatatgaacttactggctatgggtgatgaagaggcccagtctttggggctgaacccaacacgagtccgtctactgattattgccggctgtactctccttacgtctgcagccgtttctgtaagtggaattattggctggattggccttgttattccccacatggctcggatgatcgtggggcccgacaataagatactgatccccgcctcactcagcttcggcgcatcgttcctgctgttgattgacaacatcagccgcgccataatcagcatcgaaattccgatcggcatacttacagcgattataggcgtgcctatttttctgtaccttctcaagagggggtacagcgaatgggcatga

SEQ ID NO: 8477 - DNA, 804 bp, synthetic construct
  source 1..804: mol_type = other DNA
atgggcataaccaacaacttttatgaggttaagaatatttcattctcgtatgatggcaacgaaatcttcagcgatatcagtttctcaattgagaagggagacgtcctctgcattttagggccgaacggcactggcaagacaacgcttatcaagtgtcttaatggactgcatgaaatcggtagcggagagatccttatcaaagggaaaaatatcaagaaactgtccttcaaagaaataagccggaatattggttacatccctcagaaccacgcaccctcctttccatttaaagtaattgatgtggtgctcatgggcagagcaccatacctcaacctgatcgacgccccccgcaagaaagacatgggaatcgccctcaacagcctgaagaccctcggtatcgacaatctcaaggacaaggagtacaccaacctgagcgggggggagatgcagctagtcttcttggcccgaatactctgccaacagcccgatattctgatccttgacgagccaacttctcacctggactttggcaaccagattaaactgctggagataattgacaatttggcggcctccggcctatcaatcatcatgagcagccacttccctgatcatgcctttctgtccagcaacaaggttgctatcatgaaagacgggtgctttatagacttcggaagtcctaacgatgtggtgaccgaggaaaatctgaagaaggcttactccatcgatgtcaagttaattgaattggaaaataaaaggaaggtgtgtgtgcccctgaagacaaacttcgagctgagtctgtga

SEQ ID NO: 8478 - DNA, 570 bp, synthetic construct
  source 1..570: mol_type = other DNA
atgaacgagcaggattacgacgagcagctcgccaaagcagcgaagtttcacgggcacatctgcggcggaattgcaataggcactaagctggccatgtatgggcttgagctgctgggaatggagttcaaccagaaacacaaaaacttgattgtctttctagagattgacaggtgtatgtcagacgccgttcagtccgtgacgggctgttctatgggtaagcggacactgaaacaaatgtattatggtaagttcgccgctaccttttacaatcaggacaccggggaagctttacggatcactgatgcggatgctaacaagaagttcaaagatgaagagaccaaggaagaaatgatcgatcgatttagacgcacgctccccgaggagctcttcaaggtgaataaggtaaaaatcgagctgaatcccggagacatgccgggcaagccttacacaaccacattctgctccgtctgcggggaaaaagtgagcgacggcagacatatccttcgcggcgggaagccaatatgcaggagttgtgccgaaggaagctactacgaactgatcgaggactga

SEQ ID NO: 8479 - DNA, 2061 bp, synthetic construct
  source 1..2061: mol_type = other DNA
atgaggaagtgtttcgtgatcatattggttctatgcctcctgttctccctgaacatctgcttcgcgcaggatatcagcaacagcacagattttactttccagaatagtaacttcgactacctggagaagaccgacagcgtgaacctgatcagcacgagcgacaaaattagcacacatattgatgtggtcagtaataccacatttgatgggactgtggactactttaagattaaactcagcgacgaaaacaacaaatcagtgccaaacgctaaagtgatctttacagtgaatggggttagttacgacaagaataccgattcccagggcatcagctcactgcagattaatttggctgatgggtcctacaaagtcattagcaaattcgtgggagactctaactacaaatccagctcaaagtccacaacaatcaccattgacaacacgcgcatcgtcgaagacggcctcaacaatgcggaaattcaaaatataattgacgatgcgaaggaagggaacgtgatactcttcaagggaaatagctactcaaacatcaatctggtgattaataaacggctgaccctaatttctacggttaataccgtcctcaaatcaagctcatcaagcccaacaatcaccattaagggcaaggaagccagctactctatcgtgaagggattcaagatccagggcaacggtgacggtgtggtcgtggatggctcgaactacgtacggatcttaaataatgacatcactgctgacggagtaggcatcacggcctttaatgtgaaatatatcaacattactgggaataacattgtgaagaacgggaagtgcggcatcattctttactccaccgagaagtcctacataatcaataatgtgatcaacaataacaacgccaacggcatcgtcctgaccaaatccgacatcacatacatcgatagcaacactatctcaaacaacgctcgctatggtattctgctgaccaacaaattcaacggcaattcctacaagaacggcccggagaacgtgtacatcacgaagaacactatcaataacaacaagtgggatgggatttctgtcaacaacgcagaggacaacatcaacatcaagggaaatacaatcgttggcaacgacgagagtgggatctcggtgaatgttgtcgggtcctacaaaattcagtccaacatcataactaatagttataccggtgtcagattcgacgaggaccacgtgcagaagaagaaccaagagattacttacaacgccatttatggaaatgctcacgttcaaattgaggccaaatcatataatggggtgaatcccctctctgtaggcgacaactggtataccgatgacggactgttatgtcccaagatcaagacaaacaatttgaagttcactgtcacccagatcggaaagaaccagttccaagccacctttgttgattctaatggcaacatcgcaagtcttctcccggatagggagctgaagtataaaaccaatgacggtaagatcgcaaccgtgatgattaagggaggaataggcacctttactgtcacggcctctgatgcagacattatcaagtctacggtggatcgcacaagcagaaaaaacgtgtatgattcgaacagtcccaccaagaccccccagaacggtcaatctcctacctatgattatcctaacatcgactatggtggcggccagggcaatggaaatggccaggggggtaacgccaataatgggaacgggtcgtcccagaaatccagtgacgactctggaaatagcagcaacagcaaaaagatggaacctaatagtaacccagtaaatcaggcaaacgatgtatctcagagttacgacacttcgcagagcatggctcgagccgacgcctccgagattagtgggggagccaactccggctcacagtctattgcaaaacagatcataatcgaggacgatgaattttttatagtgaaaggtctttccctcatagtcttgctgatacttctgacaataggcttctactaccgtgatgacatcaatgagatgcggtccaagctgtga

SEQ ID NO: 8480 - DNA, 1458 bp, synthetic construct
  source 1..1458: mol_type = other DNA
gtgagtatcaatgataatctcggcgatgcatcgtcagacctggaaaatgagatcattaactcaaagaatggagacataatcttgattaagcctggaacatataacatccacaacattaccattaccaataaaactatcacgctccagggaattggcaatcctagtgatattatcattgacggagggaaacagagcagcatttttttgatcaacaatattaccacctgcgtaacatttaagaacctcacattcatcaatggcctgtcctacaatttcggtggtgccatatgcattaatacagggagtgtttatatcgataactgccagttcatcaacaacacagccctcaacaataccaacgccggtgccatatccaactacggcaacgaagataacaaggcctacctccttgtcaacaacaccctgttcatgaacaaccatgccgaccacgacggaggggctgttaccacatgttacgctaattctgacatgtataattgtgtctttataaacaatacggcagttcgggacgggggagccgtgcgagtgtcggtgtacgggtatggccatgtcgaagattgtatctttatgtacaatcacgctgacgagtggggcggagcgtactacagttggtcagggactagcaagatcaacagatgcatctttatgaacaacactgccgggacgaatggtggcgcagtaatggtgtccggcaacctggaccttgagaacagcatcattgtgaacaatagtgggggaaagactggcgggtccttctacatccaggagccaatgtatcaggctaaaacctatattaatgtgaacaataacctgatcacaaataactcttcccccaagggtcaggagatctatgtcaagtggcgccactcacaaaacctgtaccctgactttaacgataacgattggggcagcgaagatcccaatgactacaaaatcaacgacccggataacgtgacggcgcggagtaaagtgaaaactacgactgataagtccaacctgctggatgagttgaatttcaacgcgctcaacaagtactatgacctgattaaagactacttccccgagaactatctggagaacatcaaaaagcaggccgaaagcaaggctaaccaaaataaagagaacaataagaacaatactccaaataacaaagacgaacacggccttaaggactcaaacaataccaagaacagcttaaatgacagcaagataatcctgtccaacaagacaaccgaaaatatcgagacagagaattacctcattagcagcaacagcaccacccccataggcgatgacgaaaaagcctacgagctaaatgagaccaagagcgtgtccaaatcccagtctccaaggttactatacctggtgatctgcctggtcattaccatcatagcactgttcatcggctatggaaaagaaaactcgaaggacaagtga

SEQ ID NO: 8481 - DNA, 2865 bp, synthetic construct
  source 1..2865: mol_type = other DNA
ctgatcggtgtggtctgtgccgaggataataatgtaacagagaatgccacgaatgaggatttccaagctattcagatcctgattgataacgccaaccccggggactcgatatacctggagaacaagacgtaccagggtagtggatcgcccatcatcgttaacaaaagcgtgaatgtctacggggtggactcttccaagacgatcctggacgccagtaacaaatcaagtatctttctgatctcgaaagatgtcaaggtcaatttcaatggtctcactcttactaacgggtataatgagaccaagggcggagcgatctataacctggggatcttgaacatcaccaactcgaagatttccagtaactacgcggaaagtggtgctatacgtaatgagggcactgggaaactgaccatcagcaattctctctttgataagaactgcggaagcttcggcgccgcgattgacaactacgtcgggtacctgaatattgtggacacaacattcaccaacaatgactgccttgagggcggcgccatctacaacaggtttggtgaatttttagtctacaactgcacatttatcaacaactctgccgcccggggcgggggagtatacaataacaggggcggcatgtatatctacaactccagattcatagccaataacgtttatgacctcggaggcggcatcaagagttgggggtcctgtgaagtgtacaatacagtcctgatcaacaacaccgccaagcaggggggaggcatttacgtatcagagttcacactgattgccgaaaattgttttgtggaaaataattccgctcactggggcggtggaatcgctgtggaggccaaagctactgccaaaattaagaacgccactattataaacaacctcgctgaccgcggtgccgggatagacatcaatatgggctcgatcgatctgcaggactccattgttaataacaatgtggccaagtatggtgcgggcggaatctacttcgccctgctctcttcaaccgtaaagaatacctatatctgcaacaacatcgctaatacctccgggggagggtgctacatttatggatttaggggtgtcgtggtaaatttcactaatgtgatcatcaataacaactctgctagcaagggtggagccatttacagcaccggaaccgcaaacattcagaacagtatcctgaacagcaacaacgcgtataaggggggagccatctataatgaacttaacctgacagtgaaggacagccaattcttcgagaataccgctgacagttggggtggagctatttacaataacctcaattcattcatcgataatgtggtgctaaattcaaatgaagtgaaacagttcgggggcgccatttataacgagaagctcgtcaacgctaaaaacagcctttttgagtccaacaaagcactgcaagcaggagcaatttattctacaaacgacctgatcattgataattctcagtttatcaagaactatgtgaagcggaactattgcgttctaatgcttagtaaaggcgatgtgaatatcacaaacagcttgttcaagttcaacacaaacgctgatgaggggggctgtatttttaactataacgcaaatctgctgatcgacgcttcccagtttattagcaatgacgcacgaagttatggcgcagcgatcgacaactccggcaatttgactataaaaaattcactgttttacaagaataaggcatacggcgcagcagccattgataactccggtaacctcgtgataatcaaatctaatttcaccgacaacgtggccacgaataacggcggcgctattgacagcaacggcaagctgattattatcgggagcatctttaagaacaatctcgccggcaacaacggcggagccctgatacttagaggagatacgaccgtcacccattcgattatctataataatcacgacaaaaacgggtatgcaattttcaataaaggtgtggaaaatataagcctttcaaataattggtggggcagcaacaatcctgattttgaaaaattgctgaacatgggaacgtccgatgatttcaactggatcatcatgagcttcagctccaacaaccagttgattcagtacaagaactccatcttgaatataaacttcgataacgtcaaggataaaatggggaacgtgtacaagatcaacagcacagagctcctgcctatcttcaaaatagcgttgtcaaactacggggaggttaccatatctaacggatttaagtctatgaataaaaacatacccctaatcacatccatctccgccaagattgacaatcagagtatcattctcaaaatcactccgacaaataagcgcataatcgacaacaagaacattgttgttgactacaacggaaaggtgacgtataaggttcgggtggttggcgtggacggcaaaatcgtcggcgcaaacgtcgccgtggtgatgaaaatcgcaggtaagaaatacactgtgaaaactaacaagaacggcttcgtcagcaagttattcagcctcactccaggcaaatactccatcattaccacatacaaaggattcaccgtcaaaaattccataaccgttaagaaggtactgtacgctaagagcatcaccaagaagaagagcaagaagattacatactccgtctcattaaagataagcaacggcaagccaatcgccgggaaaaaaattacgtttaagatcaagagtaaaacctacaccgcgaagaccaataaaaagggggtggccgtggtaagctttaagaacctcaaagtggggaaatactcagtgattgtgaactatctgaactcaaaggtgaaaaccactctaaagatcaagtga

SEQ ID NO: 8482 - DNA, 4419 bp, synthetic construct
  source 1..4419: mol_type = other DNA
atgaagattaacaagatcttagtcctgttatcgtttatacttgtggtgctcatctgcactaactccgtgtccgcctttagcgatgactccaacctcacagacgatctgtccagcttcgcaagtgatttcgacaaaagcaaccttggccagaacatcgaggtgaacctcgacaagctgagtttcagcgaggattctcctctttcggatacgataatcgtggaagaggttgaaaaggatcacaatgagatggacgattcaacaatacagaaggcaatcaacaacgccaaggccggagacaccatcatcatcaacgggacctcctacgtgcactgtcactttatcattgataagaaactgaccataatcagcaacgttggcaccactatggaaccctgcggctccgatgctgtatctggacaccggggcatcttttacatttcgcctgaagcgtccgggactgtcatcagtggcttcactatccgaaatgatgtggctaaggctgatgactatggaattttggtacggggggcggacgacgtcaaaattcagaactgtgttatctataacaacggattgagctctgatgccatcagagtggaaaacaccaagaacacagtcattgaaaacgtctcaataagcaaagcatttaacgggatacgaattttggactcggaaaatgtcaacataagtgacagcttcattgataacgccaagtattgcattaacgtgattgacagcaataaaattaacctggtgtctaacaacatcactaataataaaatttccggaatcgcaatttcaggttcaagtaaaaacattaatattctttctaacaacatctccaaggggcatgtcggcattaatttaaccgtcgctaatcatgtgtacattatcagcaattacatcggcctctcggacaaatacggtgtgtacacaaattgtaatataactaagatggaaattaagggtaacttcatagacaggaacggcaactacaacattttcaacgatcatcgtgtgaaaaacctttttgtcaacggcggggagaataaacaggtcatcaacaataactacatgatcggaggggacaaccaggatcgccccgtctggcaccaagtgtacgagtatcggcccggaaagggggataatacctataatcccgagaccgatacgtacacttacgtgggggaggataacggagactattatgggcaccagtccggcaccttcatggggtatgtactggctatcaatcagttcttgcaatgcccaaacatatacttcacgttccccactaacggggtaactccatggaccaagacgggcaattacaatctgtatctgtccgagattacgcaggtgaaaaagggagtctattcaatttcaatcgttgatgtggacggaaacctagctgaggagatcagtagcgtccctgttacgttttacctcatgaagaataacacggacaacaatggtaagcagaaggcgcctcaggaggacgatgtgtctaaagtggtcatgatgaaaaacggcaccgccaccgtgcggttctacccggacgagtttaaggagtctgataatattctgctggccagtttcccaggtatcggcaataacatatactcgaacatgtatagtccatacaaactgttcagcatcgacgacaaattcatcccaggcaatgtcaccgagacaaaggtcaccgtgagcaatctcaatacatatcctaactccaatgccatcttcaaagtcattcttatcgacctgaccggtaatgcgatcgcaaatgagctggtaaacttcaagattaacgggaaaagctacggcgctaccacagacgtgaacggggtcgccaaaataaagattagccagtccaaagagggaacctacaccatagccgtcaattatatcggtgatgatattgactacacctccagcagtgctcaggctaaggttgccgtcaagaaaatatccactaaaatcctaagctcaaatgtgtatatgatccccaacatagctgaatactattctatcactctgaaggacgcctcaggccacggcatctcataccagaaagtgactttcaagctcaataagaagatatacaccgtcaagaccaacaaaaatggcgtcgccaagctgaaactcaaattcaccaagaagaccacttattatattcacgttaactttgaaggcaattccaagtacaaggcggtgtccaagacaaacaagatcattgttaaatactcctctaaaattgctaaactgaccgtgccgaaggttaccatccttcccaagacatataaatactacacaatcagcctaaaaaatacgaatgggaaaggcatcgcaaagcaaaagatcactgtgaagctcaatggcaagacctatatcaagacaacaaacggtaagggtaacgttgccatcaaagtgaaattctcaaaactgggcgcctataaggtaagcgccatctacaagggaagtaagatttacaaaaaaacgtctagcaacggtaagatcgtagtggccaagtcatccacgaagtttacagcgccgaaagtgacaatcctgccatacgagaagaaggtatacaccacaacgctgaagaccagtgccggaaaggcgctgagcaagcagaagatcaccattgttctgaatggcaagacatactccaagaccacgaactccaaaggccaggctagtatcaatgtgaaattctcctcagagaacgtgtactctgttatcttgaagtattctggaaacggatactataaatcgagtaaggccacaggcaccataacagtgtcaaaaatctctactcagctaatcagttacaataaaaccttcgccattgattcaactaaaaacttcaccatctcgctgaaggacaagtctggcaagaccctgtcaaatcagaatatcacgtttctgttcaacaatcagaatctcaccaaaatcaccgatgaaaatggtatcgcctccgtcaacctggacgccaatgtcggaagctttgaaatcatctcaaaatactgcggaaacaaccaatataagtctatatccaacacaaacatgattaccatttctaataagacaaacgtggtcttcgtggacgccagtttgcccaacagcgagatccagaagatcttcgacgactgcaagaacggaagcaatgtggagtttctggggaactcctacaatgacatctccctcaacatcaacaaacccttaaacatttactctgagaacagaatcacgctaaatgcgaagagcatgagtcctgtatttaaggtgctggccagcgacgtgaagatttgtaacctgtccattgttggaaacagctacgacggaattgagatcaacaacgctgtgaatgttgtcatatttgaaaacaatatcctcaatcgcttggatcaatctaaaatcggggagtacatgttgagtacaatcagcctgccggggtacgggataaacgtgattgactccaagaatgtggaaatttcgaacaatagcatcaacacctttgaaagcggcatttttgtgtcaaacagcaataatctttccattaactccaatgtgctgaaggagaacaattacgggattaagtatggattcaacgtgagcaacagcaacatcacaaacaacatgatctctgaaagtatcggcctgtatacaaatctggttcccgagggtccgcgcggatatggggtcttcctgaataattcagccgttaatgtaaccattgcaaagaacaacatcagctggaaccatctcgggatctccattgatgcaaactatagcacaggtatcctcataactagtaacctcatctccgataatgtactggagggaatcaggtttaatgaagggtatgatttggccaagaatgctattgaacctgtggtgactgacaatgcaatatacagaaacggcaggggtccaagcatgatgattcttggtgagctgagcgcaaaccctgcaggcatttatggccctggtgcattcaacgattctctgaagcttaagctcggcgctaattggtacgggaaaaacctgatcgtgacatgggacaacgacaccggggtcgtgggctacggaacaatgtgcccccgcatcaacaccaccggaatcgcatttaaagagatcacttgtgtgaacccaggcacttattcgattacattttataaaaatgatgaggttgcctcaaaattgcccgtcttcaacatgtacgccacgctcaacgacaatgtggaaattgtgtttgacgtgataaacggcgttggggtgtttactttcgacactcaaaaattcactactggcgagaatgtaatcaaggtgtctagtggctccttaaatgacagcgataggatctttaaggtggaaatgagcaagaccctcgacgacagtgaggtgccaatttga

SEQ ID NO: 8483 - DNA, 549 bp, synthetic construct
  source 1..549: mol_type = other DNA
atgacaattaaaaggtgcagttgggtcacggacgaggagatctatatcaagtaccacgatgaggagtggggcgtcccaacacatgacgaccaggagctgttcgagatgcttgtgctagagtccttccaggccggcctctcctggattaccatactgaaaaaacgggaaaatttcagaaaagcatttgacaacttcgattacatgaagatttctgagtataaagaagataaggtgaacgaattgaaggagaataaaggaatcattcgccacaagggaaagattaacgccgctatcaacaatgcgaaaatattcatggaaatccaaaacgagttcgagagcttcgactcatatatctggggctttagcaacgggaagatcatcaaggccgagtttaaaactgaaagcgaactctcgaagaccatcagcaaggacctgaagaagcgagggatgaaattcgtaggtcccaccatagtgtactcatacctggaaagtatcgggattatcgataaccaccagaagtcctgttttaagtttaataagactgactga

SEQ ID NO: 8484 - DNA, 1353 bp, synthetic construct
  source 1..1353: mol_type = other DNA
atgaataacgctcttaaattgaagctcagcatgtttttcctcatgatgtttgtcatgatcttttacatgctggtgttcggcaaggtgaacatcgtcatcgggcttatggtggttgttgcagcgttgctgaacctgggtaacgatttgagctacaaccccaaattgtccttcatcaaagtctttagcctgctgatgattctgggcttcgcatcctacctcaacaatcctataacggcatttgggtgcattctgacctttttcatagtctttggaacaactttcacttcgtatcacctgttcggcactcatgtgtatctgcccttcctcatgatttactttatgatggtcgtcatcccagtccctcttgaggctctcccgatgaggctcctatctctggccatcggagcgattttcatcgtgggcctgaatctaaaggttaacggaaagaagtattcgaagctgagcaagttcacaatcagcagcctgatcaacgagctgctggaggcaatcgatctgaaactggacggcaaggaagtgtcaatggacagtttcaacgtcgctaacggattttaccgcagtattttcagcaaatttgagtacaagtacttcccgaatcagaagcacgaatgcatccttaatattctaaagtccttccagtatatcgggtggagtttgtccaattatgaactcagcgtaaacgagctcacccacatcaagcgaatcctcaacgacatcaaaaattttaagttctccgagattgaggaaattaccggtgaaacgaaagaaatgaaccttatccttctgaacctgaagatcattgtgaacgaggccagtaaaaaaaacatagaaaaagagaagaaaattcccaataagtacgtggtgttcaatgtactcaaacacttgattaagcggcagttcagctttaagagcgccaaattcactttcgcattcaagatggcggttgtgctgacgctctgggaggtgataaccctgatattcaattttccctacacaaagtggttatattttgccagcattccattaatgctgccatatatcgacgacgtggcccataccgctaaaagtagaatgggaggcacactcattggcgtgagcgcctttgccgtgatcatgattgctctgcagtacatccccatcagctcttacatcgccatgatcatagtactgatagcctcactatttgggatggtgttctccctgcaaaataagctcaaattatcctcattcacaaccttgatgtcagttaccgtatccctgatgtacatcacaccacctaaggccattaagaacaccgtggggtactgttgcaatgattgttgcaacctttattga

SEQ ID NO: 8485 - DNA, 426 bp, synthetic construct
  source 1..426: mol_type = other DNA
atgatcgtggtcaccttcattaactatggcttcctccccttttcggtggagaaagagaccaagaataacctgaaaacttcctatgtgctcaatcggtgcttcgtcaacctaattaagctgaaatgtgaggggaaaaacatcaacaagacaagcttgcttgccgtgagttccatggttcacgagaatattgagctgaccaacaataacaaggaattgtaccagatgcagactaagacaacgaatatcagtaattcaatactgaattacatcgaaatctacggaatatccagcgaaatgaaggtgaaaattatcaaggtaatcgagaacaagggcaattttgacaaccatgaaaacattattctctactctatcaattatgtcgtgaacttactgaacgaggaaaagaacctgatcgagagcatatga

SEQ ID NO: 8486 - DNA, 1143 bp, synthetic construct
  source 1..1143: mol_type = other DNA
atggtcgagctggggctcgggatgatgagactcccggttctggacgagaacgacttctcatccgtagactacgatcagatcacaaagatgatagacgcattgatggacgctggtttcaactgcttcgacactgcctatccctaccatgaaggtttaagtgaagtcgcgctgcggaaatgtctggtggaaagatatcctagggattcttttaaggtcttcgataaattgcccacgtttgccattaccgaagaatcacagcttgaaccaatctttaaagagcagctggagcgctgcggcgtcgaatacttcgattactacttgatgcataatgtaagcggatatagcgagaagggatggttggacgtggattccttctcatttgccaataagaaaaaggaggaaggatacatcaaacacctgggcttatccacgcacgccaacgcagagttcctggataatatgctcacaatccacccagagatggagtttgtgcttctccagatcaactaccttgattgggaagacgagggaatcgagtctaggaagtgctgggaagtggcccggaaacacaacaagccgataatggtgatggaggcctttaaaggcggatttctgtcggacgttcccaaggaggcagagaagctcatgaaggagtatgcgccagacaagagcgtggtcagctgggctatgcgctttgtggctaacctggatggggtattcctagtgctgacaggcgccagcagcctggagcaagtggaagaaaatatcgtggagttcaataacgccaccccactcaatgacgaagaactcaacgtcattagtgaagtgtccgagataatcaatgctaatattactgtcgattgcacaaaatgccgatactgtgtggactcttgcagtgaggagatcgatatcgcaaaactgttcgacctgtacaacaaggagaagattctaggcgagaatgactggtcccccatagggaacgcttatgtgaactattcgaagatccctggtgtgggcattgcgagcgattgtactgagtgtgaactgtgtattgaggagtgccctcaggaaatcaacattcccgaagttcttaaggacgttgccaaaaccttcgagaccgagggctacgggttcaccaactga

SEQ ID NO: 8487 - DNA, 351 bp, synthetic construct
  source 1..351: mol_type = other DNA
atgatacccggaatgaacaaaaggcagatgaagcaaatggaaaagcagatgaagaaaatggggatgaaaatggaggagctggagggagtgagagaagtggtcatacggttcgacgaaaaggagctcattatcgacaatccgagtgtgtccctaatgaacgtgatgggccaggagacctaccaggtggaaggcaaagcgcacgaggtagagctcgattatgagatcgagatcccagaggaggatattgagatggtcgctaatagcgccggcgttagcgccaacaaggcaaaggaagcacttgaagaatgccgcggggacctggccgaagctatcatgaagctgaaccagtga

SEQ ID NO: 8488 - DNA, 744 bp, synthetic construct
  source 1..744: mol_type = other DNA
atgaccctgattgtgcatatttcagacctacatgtgtgtgaaaatgagtttgacgaggatattttcatgcaggctgtgtcggaaatcaacaatctgaagcccgacatgattatcctgactggggacatcaccaatagcgggtactactatgagttccagcaggcaacgaaatacctggagatgtttgaagcaccgcttttcgccgtaccaggaaaccacgacgctcggaacttgggttatcagaccttcgaagagctcattggcgagcgcagttggaagctcactatgggcggcaatttgacggtcattggcctggacagcagctcccccgatgagaaccgaggacacatcggcaatccacagcatatgtggcttgagcaccaattggacgagtgcacaattaacgagaacttttcaatcgtggccctccaccatcacgtaatctctatccctcaaaccggccgcgaacggaacgtgctttctgatgccggggacgtcctgaaaacactgactaaccacgaagttgatctcgtcctgagcggacacaagcacgttcccaacatatggaaactaaacaacaccatcgtcgtgaatgccggttccctgtgctccaaaaagctgagagggaaaataaagaacagttacatgatctataatgtgacagaagatgaaatagagatcttcctcaacaacatcaatggggagaagttcttatttggaaagtacgcgaggaatgtgctgtga

SEQ ID NO: 8489 - DNA, 1026 bp, synthetic construct
  source 1..1026: mol_type = other DNA
atgaaagtggtggtagacgctagcaatgtagcttttagcgtgaagaatgaaatgggacagcctcaaatgtcgaacatactagccgccgttaaggccctggaggaaggggaggacgaatttgtaatcatcgccgacgccagccttcggcatgacattgacgataaagaaacatttctgaaactgctggagagtgagaacgtggaggaagtccccgcagggaatgacgccgatcacttcattctggatatcgcctcacgggagaaggcaaaggtcctgagcaacgataagtttagggactacgcagctgagtttaggaacatctctagcatccggattccattcatcatcgagaacaatcgcctaacatttgggaagccgaagaaagctaagaaggataagaacatccttcagcacatatgcgacgagatcataaaggagctgaacttcaaaaaatgggaaatctacaccggcaaagagggtctcgaaatctccccattgaatattgcgaagcaggcgattattcgcatcgacaatgagaataatacggaatccaagctggagaacatcttttctaaaatccccatgttcaataaaattgtcgagatggtggacgatgtggagatagctgcaccctatgtgattttcgtcctcgtgcaccctaaagactacaagctggcggtgaagaacgcagggaacatctccgtgaccgtggccgatagattgggccttgagaaaaaacccctcatcgccgttcgtaatgacctcttcaccaagcagggcaacttcgagttgaacatcatgctggctgatgaagtcactgagtatgccccctacaacatttcagttcgcgtgtgtgatagtgacgaaatattcattaagagaaacagtaggaacatcgcaagcactattgccggacgactcggctcctggaagttcccattcgtttctgtcaagccggacatgctcctggagaagcctggcgatttcgagatagaactggaaaaaggcggaggattagacggttga

SEQ ID NO: 8490 - DNA, 1203 bp, synthetic construct
  source 1..1203: mol_type = other DNA
atggtgaatccgctgacgaagagcctgattaaggtcactaccaacctgaccccaatcagcgtgggaaccaagtttttccccacaaattcactagagacagaatacgtggaactatttaactacacgcagactatcctgtttgagcttgacaaagcagagatcacctccgattccattctggaaaacctgatccgggacgttggggtggaaaacctgcccaaagattacaacttctatgaactgaagcccgctgagaaccggatcgaagagtatgcattggtaagtaatattatcatgggcaacgaccggtacttctacatcgaacttcagaatccttcgcacctgatcaatattttcgtcaagatcatcgaaaatgagaaaggggaggtggtcgagaagaccgccacagaactcgtggctaaaatgctaagcaagaacgacgccattcgagtcgctatcgaactcattggcatcggactgagcgagggaatccaggtcattagcgctgttggaatgaccggcgcggcatccatcgagagagccatacattacacccaaaacgtaggcagttttcctgggattgcctttactaagttaggcggggagtacgcgcttgtgttcgattctcccttcctcctgcaagagtcaaggcctgtggacttggaaaactatctgttcatcgatctgatcgattcgacaaaattcattgacaagaacggtcgtaaccagctggtggatttgatgacaggtattaagaacttcatcgaaacggagtgcaatggcgagctggaagggtaccgggagggcggggacgactttattgccaggtttccatccaaggaccttgctatacgcgctggactcgatgcagcctggttcgccctggacaatggcgcgaaaataagggcgggagttggcagaagtcgacgcgaggccggtgagcgcgcccagcttgtggacgatttgaaatcaactgccccattgagcctcgtggtctttgagctcgccaacggcctgtacgcctataacatcccgtctgagtttacaagaaccctcattaatttaatagagaatgagaaggccaaactgatcggcgtctttgtgttcgtgttcatcttcgcatttataatgtccattctggggctcggagtcttcagcttcatcggtgttatcatagccctcgtgtatgcattcgtagcttga

SEQ ID NO: 8491 - DNA, 378 bp, synthetic construct
  source 1..378: mol_type = other DNA
atgagacggaagaaggacgacaagagggtcctattttcgcccaatagtaacaggccgaagcactccaacaagcggaaactgaacctgcctaattttcagcgccagccccaacgatcacgcaaacagtccaaatggggcaacgtgaccgtgttccttataatcttggccctggttgcattcgtggtcggcgcgggaatgggggtcagcctcagcttcgacaatgatgatgggccacattggaagaacgtgaccgaagagatgactaccaacctgaatgagacggataactttacttatgacgaggaagtagacggtgtggatttcaacagcaacgagacactgaccgaactcaatgttacagtgaaaccaagctactga

SEQ ID NO: 8492 - DNA, 1224 bp, synthetic construct
  source 1..1224: mol_type = other DNA
atggagttcatcaaggatctgagtggtggattctccgtgatagaaaatcttatggtcagcggagctcgcgaagggaagtttggcgttgcaattatctactcacccaacagtacagccagcgcagtgttcacttccaacaaggtagtggcagctccagttaactacactaaaaacgtcctcaagaaaggcattatcagtgccgtgctggtcaacagcggcaatgccaactgctttaccggcaagaagggatttaaagattgcgagaccctcgcggaattagtgagcaacgacctaaacctacctaaggacgaaattgcgatttcgagcacaggagtcattggccgggagatgccgatcgatattatctcgaaggtggcttacgagagcctgtcaaagcttggcaacggccccgaaaattccctggccgccgcaaaagccataatgaccacggacacattcccaaaggagtgtgccatagaggttaccctcaccacgggggagaccgtgaagattgccggcatcaccaagggaagtggaatgattgctcccaacatgggaaccatgctgtccttcatcgtcactgacgctgttatcccatccgatgagattaataaagccctcaagaaatctgcagacatcagttttaacatgatcgtggtggatggggacgagagcacgaacgatacctgcctgatgatggccaatgggacaagcaacgttgaggtcgtgaatgaaggcaagttggactctaacttccaggaggctctcaattatatttgcatcgacctggctaagaagatggcgagggacggtgagggcgctacgaaattcatcgaagcgaacgtgtacggtgccaaaaacgagacagacgccaaattggccgcaaaaagcatcatatcctcaaatctgttcaagagcgcagtctttggtggggaccccaactgggggcgaatcgtatctgccattggctactccgggtgtgatttgaatcctgacatcgtcacaatagctatcgccgacgattctgacgatgtggaccttgtgtgtaatggcaagatcctggcatttgaaaatacccctaatctgaaaagagcggaaaagataatgcagtcaaaaaacgtgaaggtaaacatcgacatgcacctcggtgatggagaggccactgcttgggggtgcgatctgacctatgattacgtgaaaatcaatgccgagtatactacatga

SEQ ID NO: 8493 - DNA, 105 bp, synthetic construct
  source 1..105: mol_type = other DNA
atggccaaggtgaagggaacgaacagacggacccgccagaaacgaagctacaccaaacccgggagcaagcggggcaggggcgtcaagcagacatggaaaaagtga

SEQ ID NO: 8494 - DNA, 591 bp, synthetic construct
  source 1..591: mol_type = other DNA
atgaacggacaccgcgctcacggcttctcaagtgtccatttcctcgatagcgatgaaatcttgaatgagctgaacctgaaaggggatgaaactttcatggacgccgggtgcggcgacggccacattgccataaaggtgattgaggactaccttccaaaaggcaccgtgtacgccgtggacgtttacggcgcgtcgattgaagatatggagacatacaagaatgagaacaatgtggagaatctgatcaacatcgaagccgatattcccaagggaatcccgggtgtggaagacgagtccgtcgatgtggtgctgatggtcaatgtttttcacggatttaaagccagcaggaccatcgacgatgctatcgaggagctcaaacggatcatcaagaaggacggtaaaatcgcaatcatggactataaggcatgggacgtccccaagggaccacctacggcgtttagatcctctcccgaagagctagaagaaatatttaacaagcacgggctgaagatgacatatctcaacgaagagattggggaggacattcctgagggcaaaagccataacttcatagtattccagaaggagtga

SEQ ID NO: 8495 - DNA, 804 bp, synthetic construct
  source 1..804: mol_type = other DNA
atgaagagcatgaagaccgtcgccgtggcgattatagcaatagtcgttattgtggctgtggggctttacctcacgggctcagtagggacgtccaacggagacctaaacggccaggatgtgcagctggcggccgcagcttccttgaaaaacgtgtacgatgagaaactcatccccatgttcgaggagaagtatcccggggtcaaggttaccccgacttatgcttcaagtggggacctgcagaaacagatcgagaacggcctcaaagcagacgtgttcatgtcggctggcaataagcagatggacgccctgatcaatgaatcctatgtggacaacgattccaatgtgaagtttttagaaaacaagctcgttctgatcgtctctgccgactccaatgtgaacgtctctagctttgaagatctgaaaaacgtgaatggcacaatcgctattggtgacccagaaagcgtgcccgccggacagtacgccaatgagtcactacataacctgggtatttgggacgacgtggaatctaaactgagcttgggaaccgatgtgacagcagtactgaatcaggtagcccagggctcggccgattgcgggctggtctacaccaccgatgcgaagagcagtgatgaggttaaggtgatctgtgaggcacctgaggatagccttaaggacattgtctaccctgtcgccccaatcaaagacagcgagcacgccgacgctgcaaacaagtttatggagttcctccaaactccagaggcccaaagtgtgttcgaagactacggattcacaatccacgaatga

SEQ ID NO: 8496 - DNA, 675 bp, synthetic construct
  source 1..675: mol_type = other DNA
atgatggattggacccctatccttatatcgatgaagactgcgagtctgtcaattttcatcactttcttcctggggctgattgtggcttggggcatcgtgaaaattaaaaaggacagcataaagatagtcctggacggaatctttacactcccaatcgtactgccccccacagtcgtggggtttttcctgctgtacatctttggtgtgagggggccaatcgggagctttcttatagactttttcgccgtgaaaatcgctttctcatggtccgcaacggtgatcgccgcagttgtcatgtctttccctctgatgtatcggagcgcccgcggagcatttgagcaagtcgactctaacctgttggatgctggtcgcaccttaggcatgagtgagtggaagatcttctggaaagtgctctttgcaaatgccctcccgggaatcatcagcggcggaattttggcctacgctcgaggcctaggcgagtttggcgctacagccatgatcgccggtaatattgcaggacagaccagaaccctccccatggcggtttactccgaagtggctgcgggcaacatgggggacgccttcaactatgtaatcttcattattattattgcctttatcgccatcttcattatggatttcgtgtccatacggaaggaaaagcagtggaagtga

SEQ ID NO: 8497 - DNA, 1185 bp, synthetic construct
  source 1..1185: mol_type = other DNA
atgcggtgcgtggggacagtggtgcggggaatacgcacacccatcatcaaagagaacgatgatctggcaaacatagtggtcgatagcgtgatggctgccaaagagagtgagggattcgaatttaaaaataaggatatcgtggcgattaccgaggccgtcgtgggtatctcagaaggcaattatgtcactgtggacgacgttgcccaagacctccagaacaaattcccctcgaaaaatataggcgtaaccaaccctatcctgagccggaatagattctcgatcattctcaaggggatcgcccgaggcatggacaaaatcaccctgctgacttctttccctgcagatgaggtgggcaatggcattctggacgaggaggtcctcgatgctagcgaatataacttggccagcgtgattagcgaggaggagtacaagaagacgttcggctcatggaaacacccatttaccggcattaacatgatcgatttgtacagggagcttatcgaaagcgaggactgcgaagttgaatttgtgttttccaatgatgtaaaaaccatcctggactataataaggacattctgacgtgtgacatacatacaagggagaagacaacaaaattactgaagtccgagggagctaatgtgtatggcctgcacaacgtcctgagtgagccgattggagactccgggttcaaccccgattacggagtgctcggcagcaacaaagccactgaagagaagcttaagctcttccccaagaccggcaacaagttggtcaacgaaattcaaaagcgtttaaataacattacggggaagcagatcgaagttatggtgtacggggacggtgcattcaaagaccctgtaggtcacatttgggagcttgccgaccccgttgtgtccccagcgcataccagtggcctgataggaaccccgaacgaaattaaactgaagtacgtctccgataacaagttcgccaatctgagaggtgaggaactaaaggatgctatcaaggaggaaatcaaaaacaaggacaaggatttgactggtcagatgatcacccaggggaccacaccaaggcgccttactgacctcatcgggtcactctgcgacctgacgagcgggtctggagataagggcacaccagtcatctttatccagggatactttgacaatctagcaaacgactga

SEQ ID NO: 8498 - DNA, 594 bp, synthetic construct
  source 1..594: mol_type = other DNA
atggagcacaagcaccatggcaaatcaagtgccaagtttctagactccgacgagattctgagcgagctcaatcttaaaggagacgaggtcttcatggatgctggctgtggtgacggctacatcaccaaaaaggccatcaaagactatctccccaacggcttcgtgtatgcagtcgacagttacgataaggctatcgaactcatggaaatctacaagaaagataacgccatcgaaaacttgatcaatatcgaagccgacattagcaaggggatacccgatgtggaggaggactcagtcgatgtgctgttaatggtgaacgtatttcatggatttattgaatcctcccatcgggatgcggttatcgaggagctgagccgaatcattcgcaatgacggcaggattgcaatcatggattttagacctgtggagctgtcgttcggacccccaattgaaatcaagtgcggtccggacgagttggagaagctgttcaacgaatatcacttcaaaaagattcacctgaatgaaaagatggggccaaaagggcctaacgggaacagccactacatcataatattcggaaaggagcagttctga

SEQ ID NO: 8499 - DNA, 711 bp, synthetic construct
  source 1..711: mol_type = other DNA
atgatctttgctgccattctggctggtggcataggaagccgaatgggcggaactgacacgccgaaacaattcttaacactgggcaataagcccgtcattattcacactattgaaaagtttgtgataaacgagaagatcgacaagataatcgtgctcacacctaagaatttcattaatcataccaatcatctcattgaggaatacatcttgtataaggatgacatcatcgtcatcgaggggggccggaccagaaacgacacactcatgaacggtatcgactacataaatgaacactatggaatcgatgaggattcaattatcctcacccacgattccgtgcggccatttgtgactcacaggattattgaagacaacattgacgccgccaaaaagtatggcgcctgtgacaccgtcattcctgccaccgataccatcgtggagtccatcaacgggaagactatcgaaagcatccccgtacgcgattactactaccaggggcagacaccacagagcttcaacatcaagaaactgttcaaccttatcaatagtctgacggaggaggagtcgaacattcttaccgacgcgtgcaaaatattcgcactgaaagacgaagacgtgtacctagttgaaggggagctgacaaacatcaagatcacctacccctatgatctgaaattggcaaacacgatactggaggacatccacgattga

SEQ ID NO: 8500 - DNA, 1017 bp, synthetic construct
  source 1..1017: mol_type = other DNA
atgattaacatcgtgtacagattgaagagcccaaagttttttgaggaggcaattgatgaaattgagctggagggggttatcgtacgcccaacgtatctctccatatgccaggccgaccagagatactatcagggctcacggccggcggaaatcctggagaagaaattacctatggccctgattcatgaaggaattggcgaagtggtatttgacgagtcagggaagctgaagagcggagataaagtggtgatgatccccaacacgcccgagggtaaagacgtgtatagggctaattacagctacgactccaagttccgcgggagtggtttcgacgggtttacttccgatctgattaagctccagtcggatagggtggtgaagatccccaatgagttcaaccctcatgtcgccgcatttatcgagctgatgaccgtcagctaccagggcatttcccggttcagtgaaatagccatcactccaaaggatgttctgggcgtgtggggcgacggcaaccttggattcatcaccgccctgttcctcaaggagaagttccccgagagcaaagtgtacgtattcgggaagcacctagaaaacctgaatttgttctccttcgctgacgggatttatcagatacacaacgtgccaaaagatttgctcattgaccacgcctttgagtgcgtcggtagcagcgcgagtcaatcggcaatcgagcagatcatagatttaatcaatccgcaaggctccataaacctgttcggagtcagtgagtaccctatccccctgaatacacgtatggtcctcgagaaaggcctcaccattcagggcaatagccggtctgaacgagaggatttcgtgggagtggtcgaaaccctaaagcaaaaccctaaactttttgaatatctgggaaaactggttacaaacatctgtgaaatcaactcactcaacgaccttaaggaaagctttgacaaggactacatctctaattttggtaagacaatcctgaaatgggacaaatga

SEQ ID NO: 8501 - DNA, 525 bp, synthetic construct
  source 1..525: mol_type = other DNA
atgaagaagcaggatttcctaatgaagacaaagctgatccaggagaccttcaacgacaagcggaaaatcaagtgccagattcctatccagaatctgaagttagagaaccacatccatcaagagggcagcattttcattaccgaaaacgatgagattatcgaccttgagctccagctgacaaactttaccgaggacgagctggtaaagtacgtggaactggcagaagccttgtacgagactaacaacaaatatgtgtcaatctacataatctgcccaaatacggtcaatatttgtgtgaaggaatgtgagatcaaatccgaggcggaatttagcataaaacttgcagctgtcgaggagaatcccgccgaaatcctgctcaacataattaaaaataaaatcatcaagggggaaatcctggacaacgaggatttgtatgccctgagtatgatgccgctcatctgcaagaaggaagagaggaactattttcgcaaagaatacttcaaaataattaataatctcaactga

SEQ ID NO: 8502 - DNA, 1365 bp, synthetic construct
  source 1..1365: mol_type = other DNA
atggtgaacaaaaatgtcgcacttatgaggggggagcctgaaatagctgtcaagaagctggctatccccattatgatttcaatgatcctgactgccctttacaacattatcgacggtatttgggtcgctgggctggggccaacggctatcgccggaatcggctttgtaacgcccatattcatggtgctgaacggcgcgagtgtgggcctgggtaacggagccacatccagtattagcagatttatcggggccaagaaccacgaaatggcaaataaatctgccacgcacagcttattcatctttctcatcgcatcaatcatcctcaccatcattttcatgatgatgcagaagccactgctcgttagttatggagccagcggccagacactgaacgaggcgatcgcatatgctacacccctcttcttgggcttgataggcttcatgttttcaaacggctgcagtggaatccttcgcggggagggagatatgaaacgggccatgtacgttgtaatcctgacagtcatacttaacgccatactagatccgctgtttatctacacgattggactggggtcagctggagcctccctcgccaccatcgcctccagctccattgcggccctggtgatgctgtactggatcttggtgaagaaggacacttacgtgaacgtgactattaaaaagttcaagctagacatgaatctgactaaagacatccttaaggttggaatcccctcctccctggatatgctaatcatggcgattgctatgtccatttatctaatcgtgatctctcaggtgggcggtgattacggcatagcaaccttcacatcgggtcagcgcctgtatctgtttgccataatgccactcaccgctatcggatcggcagtgattgcagtgagcggcagtgcttttggtgctaagaacggggactacctcagccggacccatatttatgggtctaagttcgggttgatcctgggaactatcattactcttatcctggtgatcttcgccacccccctgagcacactcttcgcgtacacccctgagaccaccaatctggtgccgggcattgcattatacctgcaagtcgtttgccctaccttaattctcacaggcatcggtatcccaagcagcttcttttaccaggggattggcaaagggatctattccttgatgttcaccatcctccgtgaaatcatattcgtagtccctcttatcttcctgtttgtgtacatattccacctcgacattctgggcatctggctgggcctctgtataggcagggccattgccagcaccttgaattacatttttgccagatatgaggtccggcgaattaggagcaaatttggaaattga

SEQ ID NO: 8503 - DNA, 1836 bp, synthetic construct
  source 1..1836: mol_type = other DNA
atgagtaaaataaactttggcaacattgtggagatcatcaagcatgactttaaggcgagcttctcaaatcccatagtgacgattgtactgattgcaataattatcctaccttccctgtacgccctgctgaatatccaggcctgctggaacccctatgaaaacactaacgaggtagaatttgctatcgctaacttagacaacggcagcacctttgagggtacctatttaaacgttggcaatgagatcgtgaaggatttgaagaacaacactaagttcgattggaagttcgtcactgaggacgagctgcggaaaggggttcacgacggggactattatgcaggcattataatccctaagaatctgagtgaaaacattgcatccatcacatccgacaatcccaagcaggcggaactcgagtacctggtgaacatcaaatcaaacccagtcgctacaaagctgacggacacaggtgccaataccgtttacactaccgttaacgcaaagattgtgcagattataaacctcgccgcctacggaaaactcggagacctgaaagacggtctgtcttctggtgcagggcagttatacagtgggggaagccagctgtcggcaggggccgcaaaaatttcttccggcgccggacaggtgtccagcggagtgagtgatgttcagaacggcgcaagccaagtgcaaagcggtgctaaccaggttcagcaggggtcctctgcaatcaacaatggggccagtgatgtgaagcagggctcagcctccattaagcagagtgcgagcgacctggagaaagggtcgcagcaaatacagtcacaggtcgacccatcaaccctgcccgaacctatgaagcaatatgtggaaggcaatatcaaactggctaacggaagcggcgaactggctaagggttcatcccagttggccgatggttccgtcaagcttgcagacagcagttcgaaattggctaatggtgctagcaatgttgcggggggggcaaatcaggtagccggaggcagcgtggagctcgccaaaggctcactgagcctggccgccggggcccagatgctgagcggctccgcctcacaggctttgttcagcgctgccggagccctaagcagctctgctaacagcctcagtagcatcactggcatcaatgagacagaacttggagactatttctactccccaattaagctggataggcaggaggtcttctccgtccctgattacggatcaaatgtggcgcctttctatatcgtgcttagcatgtgggtgggggctatcattacgtgtgtaatgatcacaccgggaaccagccaagggaccaaatacaagcccgttgaaatgtactttggcaaggtgatcctgtttgtcgtcatgagcatgctccaggcggccgtgaccatcagtggggcctatatcctcggcatctatataagtaacagcccactcttcattttctctgccatcctggtatcggtcatctttatgatcctggtctattccatcatatccgccttgggccaggtgggaaagggcataggagtcatccttcttgtgctacaaatcagcggaacgggcggcatttaccccatcgagatcatgcaggatttcttccagaccctatacccgtacttgccaatgacatacgctatcacattgattagagaggcccaactcggggtggtgtggtccaattacctccccgcgctcgtggtgctcgtctcgattggcattgtgaccattattgtggctgccctgatcaaacagaaagccgataagtcctctaaatacttcgaggaacgcctgaaggagagtggccttttttga

SEQ ID NO: 8504 - DNA, 204 bp, synthetic construct
  source 1..204: mol_type = other DNA
atgaacctcatactcagcaacgagaaagacattaatatgaagttctgcccaaaatgcatgcgggagctgaagaaggtgttccacggggagcccaccacagagctggccatcgagtccctggaaaacgaaatcatcattggaaatagctgtatgggcaattacaactactattgtgaatactgcgatgaatttttccagctatga

SEQ ID NO: 8505 - DNA, 927 bp, synthetic construct
  source 1..927: mol_type = other DNA
gtgagcgaacaaaagctcgaagtgttcaacgttttaaactttttagataacggctacgagattgacgatatccttaacgagggtaaattcggaacctttccgtcagcccaggactgtattaaatacatgatcgacgagggctacctcaaaggggaatttaacgccgcaatccataacgacggcaagtccctgacagccgaagaggtcagcaagaagtacacagttgcggagttgaaggatctgctccgagagaatgggttgaaggtgtcaggcaagaagcaggaactggtggagagactgttgcctgccctgagtggtgaaatcacagtcgagccagataatggggaatctgtggatctagcactcactgacaaggcacaggaatttcttaatgagaatgattggatggacctgtatatgttcgccctcgtggctttccgcttcgaggattacgaaacctaccggaaaaattccagcgaggacaacatacagacggctctcaaattctgcgacgagatcattagtagggcacttatcgccaatcagtttctggtattcatcgacgccctgagcgctaaggcccacgtgtatgcgtacgacaaggattatgagtcgttcctggactatgacctgcaacgcttcattctaggactgaatcccatagtcatggactcccaaacctacgctaactatgacgcgatcaattacgccaacgtcattaacctgaagaatgtcattgagcagcttgatctgggcagtctgaagaaacggtttgacaagatatgggataagtctaacatcaaaagcatcaccgtgcccaagaagacttgctataaaatcctgcagaaagctttggccgggtccgatgtggaagagctcaacttcaacgtaacgcagaaatacttcgtgaggaaatttggagtttga

SEQ ID NO: 8506 - DNA, 591 bp, synthetic construct
  source 1..591: mol_type = other DNA
atgcgaaacaaagttgcaggaatcgtcttcatcgtgggcagtctgtattatgtcctcgccgaagccgtgagcgcaacgttcttcaatgctagcctatttaacacttattctttccacaccatctccgagctgggcatccctaatgtaaactcccccttgttttggctgatgaacagtgcgttcatcctgattggactcaccctcatttttggtaatttttacaagtttaaggacttcctggtgaagaacaggatcataatctacatcctcacactaatgacctcaactggagtcattatggtaggctggatacacgggggcaatccattcacgcttgggtatcatatgctgggcgctatgatggccattttcggggggaacgttctgctgattgtgatcagccgctccatgtctgagtacagcaagttccagaaaaccacattggtgctcggaatatttggtctggccgtcttttggattatgttcttcaacatggagagcatctacatgccggtgttcgaaagactttcagtgtacacaatgatcatctggtgttttttaaccggctgctacataatttcgcgggagtga

SEQ ID NO: 8507 - DNA, 249 bp, synthetic construct
  source 1..249: mol_type = other DNA
atgacaaacctggacaaatccgtcgaggaggagatcctcgccatcattgagaagtatcaaaaggaagatacaaagctgttgaattacctaattacggatgacgagataacctttttcagccccctggcaaacgggaacagcatcaccgccgaagaccttcacaaagtggctgacatcctcaaaggaaccttcaagggcatgcagattgtgaatcaggaataccggtttactttcgaaatcggcctgtga

SEQ ID NO: 8508 - DNA, 678 bp, synthetic construct
  source 1..678: mol_type = other DNA
atgagcgaggataacgatctcaaaaatttcctcataaaaaaaggagcgagcaaagtcggattcgccaacgtggatggactggctgagggattcatcgatctgccctacggaattagcttggtactcaaaatcccaaaaaaagcaatgatttacatcgagaatgaagattacgagtcctattggagctgttttcattcactaatcgaccggctaacggaaatctccattaagggggagaagtacatcaagaatcacggctacgatgcctttgctcttaccatgagtcgaaatgagtgcgacatgaagcgcttactgagtatactgccttataagacaatcgccaccaagtccgggctgggctggatcggtcggtctgcactttttgtgacgccagactacgggtcggccgtggtcctcggcggcatactcactaacatgccgctgaccttcggcacccagatcacagactcacagtgtgacgactgtgaaaactgtcagaaggcgtgccccgtgggggccattaatccccaaaaatggaacactaagctgaacaggaacgacattatcgacatcggcaagtgcagggaatatattgttgagcagtataagaacggtttgggctgcacaaagtgcatgtatgaatgcaaactgaccaagaagtacctggggagactgtga

SEQ ID NO: 8509 - DNA, 864 bp, synthetic construct
  source 1..864: mol_type = other DNA
atgaaggacatagacgttttaattgaggcgctcccttatatcaaaaagtttcatgacaagaagatactgatcaagtacggcggacatgccatggtggatgataaggcgaagtcctccacagcccgcgatactgtcctgctgaaatacgttggaatgaagcccctgattgtccacggtggaggcccagaaatcagcagatccatgaataaactcggcaaacaggccaaattcatcaaagggttgagggtcactgacgaagaaactatggagataattgaaatggtgctggtgggtaaaatctccacagagatcgtaagcgagcttattaagcacgatgggcaggcaatttcattgagcggaaaagactcaagcctcatattcgctcacaagaaaggcgccagtaagatcgatgaggagcttgtggatctggggctcgtgggtgaggtcgactgcatcaacacgaatctgctcgagatgttcctagacaacgactatatccccgtcattagcccagtggggatcgctgaagacggaaccagtcttaatttgaacgcagataccgccgccggggaggtagcaagtgctatcggtgccgaaaagctaattatcctgaccgatgtgccaggcgtgctgcgagacccttcagacccgacaagcctgatccaaaagattaaggttgacgagataccctctctgatcgacgagggcattatctccggaggcatgattcccaaaatcgaaacgtgcatcaacgctattaacaatggggtgggctcgtgtcacatcattgatggccggaaaaagcacagcatcctcctggagatctttaccacaaacgggataggcaccatgatttacaagtga

SEQ ID NO: 8510 - DNA, 1470 bp, synthetic construct
  source 1..1470: mol_type = other DNA
atgctgaatattactaccttccttgacgccaactcaaaacgactcgacaaggacgtgcttttcaatccaacgaccggagagaagtatagttctggagagattctgtcgatcgtctccgagatcggtaggatcttgaaggagctggggatcaagaagggcgaccgcatcctcatctacctgaaaaattccgaagagtacttgttttcactgtttgcaatctggcggattggggccatcgccattccaaccaaccgggtgttcacagccaacgagctcgaatacattgtcagtgactcgaaggcaaagctgatgattacggatgaagaagcaaaagacctcatcaatgtggaaacatatattcctaagaacatctccagttttaagaattgcaaagtcctggagtctgagaacactgactgggacgatctgtgtcagctgcagtacactagcggcaccacagggcagcctaaaggggccatgctcacccatggaaactattttactgctatacacaacgagtgcgacgtcctgacgctgaaacaggatgatgtatttctcggcatctacccgatggctcatgttggcctcagctgggccatagctgccctccgagccgctgcatactacatcctgatagaaaagttcaacatggacgagtacctggaattatgtgaaaaggagaaggtgagcgttcttactgggatgcctcccgtgatacacagcctgacgaccattgatgcccggaagcaactgaagaccgtgcgcgaaattatctcaggtgggggccccttgcacaagaaaatctggaaagatttccaccagacctaccaaataccaattatcaacgcatatgggctatccgagacaattgtgatcggaactggcaccgtcatcaggccggaagactattgggaggcggatcggtttgagagcgtgggtcacccagtctgtttctccgaggtgaaaatcgtcgatgagcatgattctgacatcatcctgcccaagtacgaacagggggagatcgccctcagaggacccgccgtggccaaaggatactggggcaatgaggagaaaacaaaaagctcattccttgatgacggctggttcttaacaggcgacatcggatatctggatgaagacaaccgcctattcattacagaccggaagaaggatatgattgtaatgagcggctggaaaatctacccaaccgaggtggaggaggtattgatcaaatatcctgcggtgaaggaaatagctattttcagcatcaatgactgccacaggggcgagattcctgttgctgcagttgtgtggaaggacggtgaggagtgcgaaggactggtcagttatgcgcgtaaaaacctatccagatacaaagtgcccagaaagatatttaccctcaatgaactgccccgcgtgaacggctggaagttgcttagacgagagctgaggaagatgttcaaggaatga

SEQ ID NO: 8511 - DNA, 1059 bp, synthetic construct
  source 1..1059: mol_type = other DNA
ttgaactatcatctgaatatcatcaacgctatcctgctgatttacgaacagattgtggtcagtgagatcatgtacgatattgccgtcatctccggtgatggcataggcagggaagtaatgtccgcctgcgaatatctgcttgataaactcgacctgaagctcagcttcaagtacggagaagcggggtttgattgtttcaacaagaatggcacaactctgcccgaggagacaattaaactagctaacgatagtgatgccgtcctcttcggcgcctcgacctcaacccctggacaaccaagtcccatcatcaatttgcggaaggagcttaatgtttatgcaaacataaggcccatcaagtcatacaaaggcattaattccattcacgatgacatcgactttgtgatcgtgcgcgagaataccgagggtctttactcccaggctgagtacggggacgaaaacaaagtgatcgcagagcgtattatcacgcgcagagccagcgagagaatctccaaggccgcatttaatttatgcgtcaagcgagggcaaagcaaagtcacctgcgtgcataaaagcaatgtgctgaaaaagacggacggcgtcttcaaagagagcttttacaagatagccaaggagtaccctcagattaaaactgaagacttctacgtggatgccaccgcaatgtatctcatcacacagcctcagaactttgacgttattgtatcgagcaacttgttcggagacattctgtccgacgaaagtgccggcctggtggggggactgggtctcgccccgtctgggaacataggggatcacaacggcctattcgaacccgttcacggatcagctccagacatcgcgggcaaaaacatcgctaacccatgttctatgattctctctgctagcatgatgctggactatttaggagagtgggagatcagcaacgacatcaagggggcgattgagaaggtgatctccgactgcaagattcggaccccggatctgggtggcgacagctcaactatggaagtgacaaaggcaatagtgaaggagataatctga

SEQ ID NO: 8512 - DNA, 465 bp, synthetic construct
  source 1..465: mol_type = other DNA
atggagagcaccattgaggagctgatagagctactgaacgacaaggatgactacgtagtggaagatgcgataggccagctggagttaaaaggggccgacgcactcgagccccttatggacgcactatcacaccggaagaaaaatgtcagactgcatgccgccacgctcctgggggcaatcaatgatgaaaaggccattccttccctgatcgaaacactgaaagacaacaacaagctcgtgaggcgggaagcatcgaccgccctgtcccgaatgggagccccggctgttgacccactcatcgagactttggccgctgaagattggcgcgtgaggggcgccgccgcgtgggctctcggaaacctgggtgacaagaaagccatccacgaactggagaaattgcttgacgatgagagtgctttcgtcaaggcaggcgcgaagagcgctatcgagagcattcagaagtga

SEQ ID NO: 8513 - DNA, 891 bp, synthetic construct
  source 1..891: mol_type = other DNA
atgcactacaccggccccgtgtaccgccctccccctgaggccaacacaccactgctggaagtcacatatggctgctcttggaacgagtgttccttttgcacaatgtatgacacgcagaagtttggcataagcccaatcgaggacatcgaggaggacctggcggagctaagtcagttctaccccaaagacctcaaacgcatctttctcgtgaacggagacgcttttgccctgcaggcaaagaagctttttgcgatttcagacctgatccacgagtacttccccgaggttgagtgcataacctgttacgcctcgatcaaaaacatcaaaccaaagagcgatgaggacctggaaaaactgaggcagaagggattcaatgaactgtatatcggtctcgagaccgcctataacccggcactcaaccagatgcggaaagaatatactcagaaagatgaatacgaacaactcgagcgtatccagaatgtcggaatggattacaatgctctgttgatgctgggggtcgccggacggggcaactacaaggagaacattgatgcaaccatcaatttgttaaacaccttcaagcctaagattgtggggcccctaacgacatccgtgcaaaatccttcccccctgcatgagatgaagttgaagggggagtttgtggaagccactgaaagggagatgatttgtgaagaattaatgctcctcgagaaccttgagatggatgacgattgcttcttcttcggtgggcacccgtacaatctgatcagattcagtgacagcttcaagaacaaggataaaatgattgaaaaccttaagaatcaggtgttccaaattgacgaactgagacagggcatactggacactgtacttccacgaggcaatttgtga

SEQ ID NO: 8514 - DNA, 528 bp, synthetic construct
  source 1..528: mol_type = other DNA
atgcggatttgtctgtatggctctggaagcgctgaaatcgatgaaatatacaccgatgccgcatatgaattgggctgcatgatggctcagaagggccacactctggtgttcggggggggagacactgggatgatgggtgcatgtgcccatggcgtgcaagacacaaacggcaagtccataggaatagcgcccaagtggatcgagaacttcgagccactgtgcaaggaatgcagcaaattcatttacgtcgacagtatggacgagaggaaaaataaattcctggaaaattcagatgcctttatcatcacaccgggcggaattgggaccctcgacgagttctttgagatcatcacgctaaagaagctcgaacagcacgataaggagattatcgtattcaacatcgatggtttttacaacaaaatgtttgacatgatcgatgacatggcccagaaagggtttctgtacaaccagtatgagattttcaagatcgccaatacccttgaggagatttttaactacttcgactga

SEQ ID NO: 8515 - DNA, 555 bp, synthetic construct
  source 1..555: mol_type = other DNA
atggaatccgagtacatactcatcgagctgaaggagttaagttcccacgacaccatcacaaaaaaggaactcatgggcctcctgaagaaatatgccagcatcatatcggtgtatgacctaatgatggctacggcacatatgcgcaaggacggagagtatgtgcacgctaactaccgagaaaagtacctggaagtgtatatcaagtacttcatcatgcggatgaaagaagtcttggaaaatgaggactacaattataaaactaacattgacaagaagtctttcgatcaaagcttccccatgctcgagagaacatttgagaaggagaggcttacggcgtcaaaggatgacaagttccctttgatctacgtcatcactgccctgtacaccacatttattctggaggaaccgattcacccagttgggagcgagtttcccggcagtctgaaggtagaaaaacggaatggtgagttctactgcccagtgaaagacaaccagaaagataacaccaacgccatctgccatctgtgtcttgcagagcagacccccgatatttga

SEQ ID NO: 8516 - DNA, 645 bp, synthetic construct
  source 1..645: mol_type = other DNA
atgtccgagaattttatggagattaccaaggaggatatcgaaaatatcgagaacgccctcaaaagcaatgcagattacaagctgaataacactaagttcgacattaagagcttcgaaaagggcggggacatcagtctgatccaatatgtcgctgatgtggaaaacgagctcgttttccagaccaaggaggaaaacggcaaatattacatctccgagatatttggcttgtttatggacaacattattaacggaaatgtgtcaagggacgtcttccagagcgtaagcgattacttccatgaggtgatcgcaggagagaagaacgactttgaggacgagaaagaagagcttatcaacttcctcgtgctgacggaggagtacgacgccaacaaattggaaatggatctgaacccctcgaagatacgcgaagactataaaaaagattatggtgaaatctacggggatgacagcctgaacagagtgcagaagagtctagccctgaaggagctcctgcacatgtccatatgccaggtcgtgaacgacattgatctgtttttcacacggccgtacgacttaacaccagaggagaatgctgagaagaataagcaggaacagaaagcgcttgaaaatgaactgcaaatgtcatga

SEQ ID NO: 8517 - DNA, 468 bp, synthetic construct
  source 1..468: mol_type = other DNA
atgataacgattaccaagaaagaagaggtggttctggaccaagtgaagatattcaacctggagtactctgacggaatccccgtaaatattctcaggaaggagctgggttttcacgaatacgacctggtgcacatccttgaggagctgcaggataaggacctcgtcatcttccgcgacaacaaagtgagcttgtccgagagtgaaaaggagattaacaccgtcaatagcaaaaaggatatcgagcagctcgaattaaacctgaaggaaaaggagtcgtataacctgatcaaaagcctagtggacgataaaaatctgatttcaaaatatacactggaggggcacctcctgtacggcgacctgaaactcactaatttccggatgtaccatatcatcttgagtcttcagaacaagggccttctaaagccaatcgataagtccgatggggaatattacctcttggtcgaatga

SEQ ID NO: 8518 - DNA, 438 bp, synthetic construct
  source 1..438: mol_type = other DNA
atgagcctcccaaagaagttgctggccgactttgacgaagtcctaaaggataggggataccagtctcggtcaaaaggcattcgcgatgcacttcaggactatattgtgcgctaccagtggatgaatagcatggaaggtcagcgaatagggatcgtcaccatcatctacgaccaccactatactggggttatggaaaatctggcggaaatccaacacagcttcagaaacgagatcaacacgtcgatgcatatccacatgaccgacaaatactgcatggagattgtggtggtgaacggagacatagctgagattcgggatctgaccgagagaatcatgaggctgaagggcgtggagcacgtaaaactcacatccacagccaacggcgaagagttcagtgagcccgggcactcccatgatcatggctatcaccaccattga

SEQ ID NO: 8519 - DNA, 768 bp, synthetic construct
  source 1..768: mol_type = other DNA
atgaaatttaaaaccacttcataccacttcgatctgctgaaagacaatgaccgggtgagtgccttcttcgaggccatcaacgactacgagggaaacaataatttagcttacgatctcggatgcggtattggtgtgctgtcctacttcctcaaggaccacttcggggaggtcacctccctcgagattgacaaaaaagcatactgttgcgccaaagagaatctgaagagtttcgacaacgtagaagtggttaacgaggatgtcttgaagtataactttacaaagaaggcggacctgattgtgtgcgaaatgcttgacacggcattaatcgatgaggaggagatccctgtgcttaattatgctaaacagttcctgaaagaagatggcaagatcatccctcagggcatcatcaacaccgccgaactggtgaaccttgagaggcattacgtgcactgggacgaggaggtgaactatgaagtgtattcaaagcccatagtctactccgagtttaactttctgaatgaaatcaatccggaatttggggcctatctgacactcaaaaccgataagagcgggattatcaacggcctgaagattacaagctacacgaagctgaacgacaagctaattgttggcccatcgccaatgctgaacccacccctcttgattcccttggatgagaagagcgtcaacgtcaacgacctcataaatgtaaagctaaagtacatcatgggcaatggaatagaaagcatccgcactgaatactattga

SEQ ID NO: 8520 - DNA, 483 bp, synthetic construct
  source 1..483: mol_type = other DNA
ctgtcgtttgacctcgagctgaacgacttcatcatggattttaaaaagttggtggtattgggtgtcggcaacgagcttaagagtgacgacggggtgggccctttcattatcaagaaactcatcgaggaaaatatcgttaacgacaacctgatcctgattaacgccgagacggtccccgaaaatttcacaggcaaaatccgcaaagaacagccaagccacatcatcattgtggatgcatgcctaatgggagcgcagccgggggacatcaaaatcgtggataaggatgattttgccaatattggcatttccactcatagcatgtcactgtcctacttcgtcaggtacttagaacggagcaacgactttaagataatattcgtgggaatcgagcccgaaacaatggagtggggggagaacccaaccgaaaaggtggagaataccgcttattacttcattgacctcctgaaggagtgtatactgtga

SEQ ID NO: 8521 - DNA, 1095 bp, synthetic construct
  source 1..1095: mol_type = other DNA
atgaaactgcttttcatagggagccgcctgtatgatgacatagactggtatgtcaagagaaagaacattgagagtgtgctgacagaaagcaatgaaaacgccatcaaccttgacttgcccgatcaagtatttattgtgcctcggggaatggacgggccaaagcaggttgcactcatgcaaaaggtggacgctatcgtgccactgataggcatcgaccctccattaatggatgttgcactcatgaaggaggaaatcgaggagaagtatggaatccccgtgatcgccgccggtgtcagggcagttgaactgactagcaacaaaatcgagacgaaaaagttctacaaggaaattggggtggtaacccccgattaccagatcctgaacgaccctgaggatctcaccctagacttcccggtcgtgctgaagcagggcgagggtcaaggtggcaaggacatcaaaattgccaaaagcatcgatgatgtcaacgaatactttgagaacttcaatcaggctctgtgcgaggagtttatcgaaggctccgagatcagtattgaggtcctgggattcaacggagagtacgtggctttacccccgatatataagggcgagaccacgctcgaaggtacacaccccctaaataagatcaaaactggcccttgcatggtgcagggcttggataacaatctggtgcagcataccgcctacaagatcgccaagaaccttgcgtccgacggcattttcgagatggacttcatgtactccgcaaagaaggaccagctctacgctatcgaggtaaatacacgcccgaacggcacacggtatctgaccaccgcgacctgcggcgtgaacagcctgtgtgagctggtgaacatggccattggggagttcagcctccacaacatttcggataaattgggatactattactcaactgaaattccaatcggaaattacgaagggcccgctccaataaaacctgaaaaatcctttgagaataatgactttgtggtccacgggcccgcggggtatcagagggttacggcccgagccgatagcaaagacaatcttgaaagtctcgtgtcaaaactggtctga

SEQ ID NO: 8522 - DNA, 1071 bp, synthetic construct
  source 1..1071: mol_type = other DNA
atgaacaacaccgacatgctgattctttttctcataacactgtgtgctacaatattcttcacatggtatatcaaaagaatattgattaaagcccggatcgctgataatcctatcgtatccgagcaccgccataagagtggtacgcccacaatgggggggatcgccttcctcttcaccatctccctgatcattgcgctgtattaccaaaatactccgatcctgctcgtgtcgtttataatgcttgccgggggaatcgtgggcctcgtggacgacctgattgggctgaaggtgaaagaagtgcagaagatcgtggtaaacaccagcagtgacgttattaccctaggaaggctggacgtggagcctaatgaggaagtacgcgtcgctactcccaaggcaaaagctgaagtggacgacctgctcaaggatggcaaggtcgaggtggtgggggaagtgccaattaagactgagcctggcgagcttgagaaaatcatatgtcagatcgtcctgggactcttcttcgctttgacgggcatcattaccgcagtcgggggtttcaagttaggcgtgcttgccattcccgttgtggtcatcgccattctggggtctatcaactctattaacctcatcgatggtatggacggcctggccgcaggcatcgtgggaattgcctcaatcgcttgttgcgtctatggctacctctttggacccgccagcattatccctccattcctaatcctttccggtctgtgcctgggcttcctggtattcaacaagcatcccgcatcaatctttatgggggatacgggaagctttgttttgggtactgggtacgccgcggcggttctcgtctgcgatatcccctactttggagttctggcattgggcgtgccgattatcagcgtggtggtgagtttactgcaccgggcccacattatcaaattgccagtcgaaccactgcaccacaccctgaatcattacggcatgagcgagacacgaattatagtttcctattggggaatcaccttcctgctatgcataatcggcattctcgccaagatgtacgtcttttga

SEQ ID NO: 8523 - DNA, 1431 bp, synthetic construct
  source 1..1431: mol_type = other DNA
atggatattcaggagctggtgagactggtggagggtgagctggtcgggaacgtggacttcttcagcatcgatgggttttcggggcggttcactttcctgaacgacgcccacacaggagacattgttgtccgccactggatcgacggtaacggagtcgccatggcatttaagaagaacatcgcctgcctgataacccagactcccaaggatgatgctattgaaatggcagagaagctgaactttccactcgtgatcacaaataagatcgaacttgccaatgctctcgccctgtcacacaccattgataaatacagccacaatagcactaacgtggtcataaccggcacaaacgggaaatcaacgacttcgcatttaatctatcacattctcaacaatgctggctttcacgtgctcacaaacacggatagtgaatctgagttcaacacgctcatcgatccgatggttagcaagcttatctccgacgaagttaaaaagaacggcaaattggactatttggttatcgaagtgagcgaggtacaaggatggctcggaaagctaatgaagaaccatgccgccctcatgagtgaggctatcaagccccaggtcggcgtcataacaaacattgcgatggaccatattgggctggtaaattccatcgatgacgtgtttaatgagataaccgccgtgcccaaagccataggcgacggaatctgtattctgaatcacgatgacgagctagttaggaaactgaatgcaaagaatccgttctacaccagcatgtctaaaatagacggcgacaatgccgtatatttcgacgacgggaccatctactataacgacaatccaattttgactatcggggagttgccattcaccggcaaacactttatccaaaatatcctgtccgctattggcgcatgtatctccctcaatctgcccatcgaggatattgtggacggcgtgcgctcctacaaggcacttaacagacgattcaccaagctgaacgacgaacctcttatttatgatgattttgcgcataaccctgatggcattaaagccacaatctccgaaaccctcaagctcctgcctgacaaccagaagttatacgtggtctgcgccattaggggatcacggggtgtggagatcaaccagctgaatgtggaagctatcgtcgaatctatggatgatggcattgagctggtattaagtagcagtaatgatgtggtgaacaacctgaattgggtgaacgagaacgaaaaggaagttttcttcaacgtcttgaaccagaataatatcgactacgtgcactttgacaatctaaaagactgcctgaacgaggtgtacaacaaagcagacaagaaagatatcatcctgctgattggtgctcagggaatggaccatgcggagttccttctgaaggacatcatatga

SEQ ID NO: 8524 - DNA, 441 bp, synthetic construct
  source 1..441: mol_type = other DNA
atgttcatcaagattcggcgagacactctgataattctgctactcgccttcatcctgatcctgtgcggccgcctgattacctacgtcgcgtttgcctcctccgatgagataaacgacggtatagccatttcgggcgtgatcattaaagggaacgatatcgtgccggtagataccatcagaagtaatgtgatgcaggcagggttccgcgatggaagcgtcatctatggcgacatcctcaagacttccaaaagggaggtgtcacttcaggatgctattcagacggctcaggaatttgcaacccggagcacagtgcccggaacctcagtacaaccaatcactgccgccgacgtgcaggtggacaagaataccggggtcgttacagtcacggttatcgaggacttcagcagcgtggaattggacaacaagacaagtggcggatga

SEQ ID NO: 8525 - DNA, 1260 bp, synthetic construct
  source 1..1260: mol_type = other DNA
ctgaacaaactgaaacttagcctcgtattttttgcagtcctgttgttgacaatgagcagtgtcgcagccacgtgcaacatcatagtgatcaccgatccctcggggaacgaccctaatggcgccgccgcgggaagtatgagctttgccgacaacatgttccagtcaactttcctgctgtctcgctcgaaccactttgccgtcctgtcgggcggcactgggagtagcgatactaggctcgatagcatcgttgacgcagtggcctccctggaaaacaatgcctccgcagcctccgctgctagcctggctagccaattcaagggagcccgtctcgtagtgggcggccccaacatcggggctgctgtgggaggtagctttaatgcatatgtcattacagttgacgactcaagtaacgacattaaggtcaccccctataacagcggggtggctacactgcagccgggccagaagggagctatcatacacttgcgcaacaccgccggaaacccactctacggtaccgccgattccgtccggaaggaaactgcaatgaatatcgggaagatgattagggatggctaccctgcaaccaccattctggcggaagctatgggcgaggtggcgaaggacagcggcgagaaatatgggggggggggcgtgaaccttgtgtctggcattagcacatcagacatgttcacaccaaaggagctgaatagcaccggatatccgatggacgaggagtactccaaggtgtgtgacagctgcggatgggctatgggtttcccagccgcagaagcctatgagaaatgtcccgtgtgcggtggagacctccggaccgtgtacgcctaccaggccctgggcgacgcgttaacggtgagcagcaaagccgtgagtgtttccgtctacggaagtgatcgaccaggtctggccgaaactaccaaagagatagtggaggcctccgttagcaagtacgggtatgacgcttccgccatctcagggtcaatcaataggggcattaacaatggcctactggtcggggtggatcatgttgaacctaaggacatcaatgtaaagcagggttcaaaagcagtcggagtgtactacaaatccctaccttccgagcgctcctctcccgcgtgggatcttcccatcgatggaaatattctgacaatacttggcagcatccaaacggctgtgggcatcatcttgattctcctggtattattcagaagtagactcctcaagagcttccagaaccggtga

SEQ ID NO: 8526 - DNA, 432 bp, synthetic construct
  source 1..432: mol_type = other DNA
atggccctgattctcatcaggggagaaacaaactcgaagttacttaatgccatcgccgacatggagcggcacgggaacttgaacctgatcacgaagcccaaggtggtcgacagtaagttcgctgacagtctggtggaaaaaattctcaattcaaagctgagaactaaaagcaaagtggccaccgcgttctttgtcaaagaggataccacattgtccataatgcaggtgaaaaagatccatccgccagcacacgtcgttgtggtttccgatgaatacgagggctaccataagctgaagaaactgctggacaacgctaaggtattccagggttactactctcacaaggcaaagaacgatggcctaatcgactatagcattaaggggaagaaacgccacgtgaagaatgagaaactcaacagctatataaaatga

SEQ ID NO: 8527 - DNA, 495 bp, synthetic construct
  source 1..495: mol_type = other DNA
atggagtgcgagatctgcgggaagacagtccccgaaaacaatccaattagagcaaagatcgaaggcagcgtgatggttgtctgtaaggagtgctcgaaactgggcactatacagaaagctccccagcagccaaaattccggcaacagcctaaggggaagaaggccaagaatactaagaacaccggcaattacagcagacgagatgagccctcagaggaactgatcgaggactttaacctcaagattcgtaaggcgcgcgagacgaaaaactggtcccgggaggatcttggtaagaagattaatgaaagggtaagcgtgatcaccaggattgaaaccggaaaaatgacaccggacacgaaattgaccaaaaagattgagaaaactctgaacataaaactgctggaaaaggtgaacaatatcgacctcaaccagttcatcaacacctccacaggggagcgcgccctaggaagtatcatgaagatcaagcggaaatga

SEQ ID NO: 8528 - DNA, 1257 bp, synthetic construct
  source 1..1257: mol_type = other DNA
atggacgatttcaatgacctggagaacagctcaaaggaacagctgatggagaaagtagaggacctgcagaacgaaatcgatttgctgaaggaggaaaagtccaaggccaagagtaacctaatgtggaaagtgagaaagctggaaaaagataaggtcctcatagagaatgagaagatcagactggagcgggagaccaagtccctccggtcagaggtggataggttccgatctccacctctggtgcttgcaaccatcactgaagtcttggacgataaccgcatgacggtgaagagtagcacaggacctagcttcctcgttaattactcaaagttcttagacgaaaagctcctggtgccgggcagccgggttgccttgaaccaacagacgttcggtatcgtggaggtcttgccgtcggaaaaggacgctaatgtgtcgggaatggagatcgagactaaacccgacatcacctacgaaaaaattgggggactggaggagcagatccgcgaggtgaaagagacagtggagcttcccctgactgagccagagctgttcgaaaatgtaggaatcgagcccccaaagggaatactactgtatgggcctcccggcacagggaagacattgcttgccaaagctgtggccaacgagacaaacgctacctttattaagattgtagcctctgagtttgtgaaaaaatacattggggaaggcgcacgccttgtcagggaggttttcgaactggctaaggaaaaagcccctgctattatattcatcgacgaactcgatgcggtggcagcgaagcgactgaaaagctccaccagtggagacagggaggtgcaaagaacactgatgcagctcttagccgagttagacggctttgagtccaggggggatattgggatcatcggtgcaaccaacaggccagacatcctcgatcccgccctgctgcgccctggtcggtttgacagatttattgaagtgcccctgccaaacgttgacggccgccgggagattctgaaaatccacaccaagaatatgagctttgatgaagaagccgaccttgacctcctcgcggatctaactgaaggcctctctggcgccgatctgaaggcagtctgcaccgaagcaggcatgttcgccattcgagagaaacgtgataagataaccgtcacggacttcatggatgctatcgacaaggtcatgtccaaaaacaaggaagacgagatgttcaatactgaggccggcgtcatgtttggttga

SEQ ID NO: 8529 - DNA, 960 bp, synthetic construct
  source 1..960: mol_type = other DNA
atgctcttcaataaaaacgagaataaagcgaatgaacgaatcatctataaaacaaagagcaacgtgattttaggctgcaaaaaagccatctatgggcttgtgctgttgattatagttctgtccattagcccaatcatgatcaagttcattgccaagatgcaggtgtacctgatctctcagatccaacttcctctgactaggtacgcagctatcgctttcttcgtaattattctcatcatcgtcatatacatcatctggcacattatcggatggtactctctggagtacacactcaccgacagcagaattatggtcaagtctggcgtgatatcaaccaagaagaactacatgccctatgccacaattcaggacgtgaccacgtcccagagtatcctcgcaagactgttccacatagggaccgtaagcgtgttcagcgcctacgataacaaccgactggaactgaagaatatttcaaatccatcggaggtggaggagataatcttttcaaacatgcgggggtcccgcacgttccagcctcaacagtccagaccgataaattatcaccaacaggataattacctcgataatggctcgtacctgggcaggaacgagatgtatgatgagtttgaacccattactcccatcacccacgagaaagacagctaccagggacgggactacgagtattacccggaagacaggggattcgaaaacagcgaccagatccgtcatgagtacgagtacgagccatatgacgatattgatcggtttgtcgaagaatttgagcctcataagaactatcccaatgaaatctatgacgatgaattggacgaggattactacgagtttggtagtaagaaccactatgacgaaaaacgcaacgaggttatcgacaacgactccaacagtctatccagtgaaaaggtcatccggcgccattttgataagttcaaaaagtga

SEQ ID NO: 8530 - DNA, 1035 bp, synthetic construct
  source 1..1035: mol_type = other DNA
atggagctcctatgtatacagagtcaagagcaccctgaactgccccttgccgagttaaaggcggtgatggaatgcgagaacatttccgcagagatcgatgttatcacagaaggtctcgtgatcctgaaaaacattagcaatgacaacatcgattcgtactacgaaattctcacccgccggctgggttacacgcacgagatacacgaaatcatcaaggaatccaacaccgacaattttgacgaggacatcctgtctatcaactggagcgagtatattgacgggactttcgccgtgcgggtgaaaagatttaataccgagatcggtacggtcgccaccgagcgacgagcaggcagcctgatcctcagcaactcggataacatcaaagtcaatctgtcacggcctgaaaccctgatccgtatagtggtgcacaagaatgatttttacattgctattgaaaggattaagttgaataagaaacacttcgaagacagcaagccccataagcggccattcttttaccctggctccatgaacccgaagttagcgaggtgtatggttaatctatcaagagtgaaggagggacagctgctccttgaccccttctgtggcaccggaggaatcttgatcgaggcagggttgatcgggtgcaagctggtcggaagcgatatctactggaagatgaaaaacgggacatcaattaacctggactactatggaattaccgattatcgcacattcaacatagatgtccgcgagctgaagatgtacgaaaaggtaatggccgtagttactgacccaccgtatggcatctccacatctactggcgacattgagggcgaagatattttcaaagagtttttcaaatctatctacaacaatatgagggatgacgcctacctttgcatggccagtccccattatgtggacctcaagccaatggctgacgagatagggttcgacatcgtcgagcagtatggcattaaaatgcataggagtctgacgagaataatttccgtgatctgcaagaaacactga

SEQ ID NO: 8531 - DNA, 141 bp, synthetic construct
  source 1..141: mol_type = other DNA
agcattaagcggatcacatacaccacgttcgtcgaaaccaaagaggagctcatcaagctgtttaaaaaggagtactataagataatcaataacgaaagcttcttcaacaaatgggtgtccaagtacattctgaaaagttga

SEQ ID NO: 8532 - DNA, 906 bp, synthetic construct
  source 1..906: mol_type = other DNA
atgttcaaggaccggatagttaactattatatcgataaaagtatggaatacggccacaaccacctcaataagaaggcaattgactgtgtagataaaatacttttcttggacaagaataacgcccgagctctctccttcaaggggctctattatgcttttctcttcgagaaggagaaatcgtttgagtgtttcagtgaaatcctgaaaaacaaccctgacgacgtccattgctactaccgcaagggcttggcctgcatggagctcgagaagtacgagcaggccatcaactgctttaaaaaggtgctggacgtggacccccaccaccccatcgtgttaaggtacatctcctcatgttatttgtacctcgaggagtacgacctggcatttaattccatcaatgacgtgctgaaggaggacatggaaaatcccgaactactgcttagtttaagcctttattacgatgtgttggagatgtatgatgagagcctgaacatcctgaataagataattgaaaagaatccgaacgaggataacgccctgctgcagatggcgattgtttatagaaatcaagaaatgtacgacgatgccctgaaatacattgaactggctctgaatatcaacgccgactgcattgtctcaaagtccatcaaatacaaccttctggcgtacgtgggagatttcgaacattctctccaggggtttgacgagatctctaagacatatttcgatggatggggtgtaatcgaaagctattacagctattacggcgagagcctggaggtgatggggaaatacgaggatgcactaaaggtctacgatgagtacctggaaaagtacccaaacttcccaaaaaaaatgattgaaaacatgaaaaccgacgtcaagaaactcattaagcagtgctga

SEQ ID NO: 8533 - DNA, 204 bp, synthetic construct
  source 1..204: mol_type = other DNA
atggggagtgcagaagaggtgggcaagtacctgaagaagctgtacaagaactataaagacgccaaatccaaaggcgaggtgctcaagtttgtaaagagcaatattaaagagcttttcgcgttgagcctatacttcgaatcaatcgagaccgtcaacctgctcatcaacctgttcctgtatgagctcgaaaaagataagggatga

SEQ ID NO: 8534 - DNA, 753 bp, synthetic construct
  source 1..753: mol_type = other DNA
ctgatagagattcacgacaaacttggtacgctcgacgagctgttggtgatcatcgatgacttactactggatgagagatacgactataatgagctactggtgcagaagggaaacatcctgtccatccagggaaaggataagatcgccatgaaatgctttgacaaggtgctccaggacgatagcaccaatctctgggcctactactttaaatgctacgttctgaataagagcgacgacctgagtaatttcgacaagctctttagcatggtcaagagccagtcgccggacgaatattatatctggctgctgatcggggtcttgttctcccgaaacgacaggttcgatgatgccctatactgcatcgacgaaagcataaatcggtacgatggccaagaagatagttggctgtacaaagggttgattttttacgagatgggcaagtacgacgaagcgctgtctgctatcgatattgctctcaaaattaacccaaaggactcttacttgtatcttacaaaaagcgtgatccttaacgcaatggagaagtatgacggcgcaattttctactccaacaagtgcctcgagctcgataagaacaatgtactgtgtctgtacaacttatccctgagtctttataatcagaacaaattcgatgaatcactcaaatactgtgagtctgccctcaaaatagaccccaactattgtctgtcactgaacctttatgccgagattctgcgccataagaagaaggtgtga

SEQ ID NO: 8535 - DNA, 900 bp, synthetic construct
  source 1..900: mol_type = other DNA
atgtttaaggacagaatcgtgaattactatattgacaaaagcatggagtacggtcacaaccacctgaataaaaaagccatccggtgcgtggacaaaattttgttctttgacaagaacaatgcgagggctctctccttcaaggggctctattacgcgtttctttttgaaaaggagaagagctttgagtgtttctccgaaattctgaagaacaaccacgacgacgtacactgttattatcgcaagggcttggcctgcatggagctgatagaatatgaacaggccgtggattgcttcaaaaaagtcctggacgtggacccccatcatccaatcgttctgcgatacatcagttcgtgttatttgtacctgggagaatacgacctggtattcaattccatcaatgacgtgctcaaggatgacggggagaaccctgagctattacttagtctgagcctttactacgatgccctcgagatgtacgatgagtcattaaacatcctgaacaaaataattgagaagaacccgaatgacaacgatgcactactgcaaatggctacagtttatgaaaaccaggagatgtacgatgatgccctcaagtacatcgagctggccctgaacattaatgtcgacagcatcgtgctcaaatcaataaagtataacctgctagctcacgtgggcgacttcgaacatagcctccagggcttcgatgagatttctaagacctgctttgatggatggggtgtcatggaattgtattacatctactacggaggcgcactggaggtcatggggaagtacgaggatgcacttaacctctatgacgagtatctggaaaaataccccaatttcccaaaagaaatgatcgagaatatgaaggaagatgccctgaagctgatcaagtga

SEQ ID NO: 8536 - DNA, 4041 bp, synthetic construct
  source 1..4041: mol_type = other DNA
atgctgcaggcaaagaagacaataaccgtaacagtcaaatccatccccaccagtttgaccgtaaacgatctgacatgtaattacggggaggacaactcgtacttatatgccaccctgaaagacactaaaaataataaatttctaaacgggcaaaccatcactttcaagatcaatgacaaaattataaacgttgtgtccgataacaaggggagagccaagatcaagatcgacgaaaaaccgggcctctacaacgtgattgtgtcattcaccaaaagcccatacgccagtatcagtaaaaagatcaacgtgaatgtaataagcttcaaccccactgtgaactatgatgggggattctacaataagagctatctgaacctttcactgaacatcaataacgcgaagttgatcaagtattgtctcaacaatgactcctggagtcagtccgacaaaagcgtatcattcatcctcaccaatgggatctacgacctctactactccaatggcagtgggagcattttccatgagcattatttgatcgacaataactgcccggtggtgtggagtaactttggcagcgacctgtacgactctagcattatcgttaatttgtccagttgggacaaccttgacgccaatcctaagatttactactcgctcgatgaatccaattttaagctgtacgaaaacctgctgaacatttccaggacaacactgctgaaattctacagcatcgactttaacggccacaagagcgaaacaaaaacctgcaattacatcttcgaaaagataggcaatctcaatagcggcaggggctttacaacaatccagtcagctatcgatgattcaaatacccacaacggggatataatcaaaattagtgagggcctctacaatgagccactgacggttaacaagttcgtgactatgattgggatcaatgctaccctgacaagtagggacccttcccgcccagtgattggaatcactggggggggaagtaacagtgtgatttacggattcaaaatcaaggactcggagcatggcgtggtcatctaccacgccgacaacgtttcggtcattaataaccagttcatcaacgtggtgaagtctatagagatcgacgatgacaagaacaccttggtcgcctacaatagcatcgattcagacaaatttctgaacttcatgtctggggttgcgattcggaagagcgataacctaatggttttcaataacaatatttccttaaactccgatacgggtgctggtggcatcgttgtgaccaatatcacctccaataatatctctatcgtgaacaaccgaataaccaacaagaacaatctgaacggtatcggcctatacgtcatctgctcaaatgtcagtatcgattccaacaatgtgtctaactttaatgcgggcttgtacgtggtgtcaagcaactctcatgtcactcacaatgagtttaaaaacaataaccacggagtattcctgagagtctcagtgaacaatacctacgctttcaataacatccacgacaatatcctctgtggctttgttttggacacctctcttttatcgtataacgacagctgctacctgaacagactgtgcgacaactctcagtacgatttctactccgaagccaactccgactacgtcattaacgacaactggtggggtgaaaacacgcctaaaatctcaattaaccggtctatccttgctaacatttacaacgccactggaaatgtcatcatgaactcttggatggttgcccatctgttcagcagctcttataagatcaatgagaacaacaacatcgagagggccaagttttatgttgatctgacgtataacaacatcggcaacgatctgtcctacaagggttacattccaaataacctgaagtctttcataggagtctttaacggggacggcgccaaaaagtccaatatctcatatctccatgaggggaagtccttcgtggactttgaacttaatgacctcttcaagaaccacgagaacatcactgtcatgtctatcttcgacaacgtaaagatactaaactccttcaataaaaaggtgaccattgacataatgctattttcgagcgcatgggacttcgagaacaactatttcgtcaataagacctaccagattccattcagcaataacgcctcctggattacattttgctggtccgaaaccggcctgtttaccggcaaaatttatgtcatagttaatggcgagatcctcgatgaaattaacatccacaaccttttctaccagaaattcaaaaataattactccacaaatgtgttcgaagctatcaagctcctggatacggtgtttgcctccacgaaggagggtgtgtgggcaccgaatgggtactacttcagcttcgctaaggccgccaacattgactttagagattacaactcggtttataaccgatttctgaattacattaaactgtattacgacttaacagactctgatctgaacttcgtgaaaaattacaaaggttttttcattgattttatcgatatgactatcgacttccacggggatatgaccccagatatcaacttcgactataacggagtgcacaaacttctcaagccaccctctagctatgctcaccggatcagtaatatttattacaccgacatcgaggacgaaaataacattagtattggctatgaaggtatgcgcagctttgcaatcgtgaaggataatctgacgaatgacgatctgcaattttggcttaatcaaaaggagttgtatgctcccgggctgatgaaggccgcttacggcacttttttaactagcttgctggtgatctatgaaaacgaccgcgtggccgatgaatctgccatcaaattcaacgtgacttggtctcgtatcagcccggtgtgtgtgagcttgtgtaatgactacaattgcctctatgtgaccggggagtctgaccatggaatgggccgggaagcgataggaaatatcagtgatgtgtggaagtttaactttgcaacaagcttcagtttcagcctggtggagcagctggtcggtaataacatttggaatgatacgacaatcggcagcgtgactcttggattaattgagagctactttaacaatgaaaccatggagattttcacatccaacggatatatattcattaaatgtgagaatgacggcaacactctgctgttcctagatctgaagacaggaatcgtgcgggactatttcagttactatggtctgcttgggaccatgccctgctaccacgataacataacagagaacgcatggaaatacggaaataatctactcaacaacatgggccgcgaatttaatgacctgaaaaacattttcggtattggagtaatatccgcaacgctcattggggaggtcgaatttattgggctggagatgtccggaattggaagcgccctgatcgagggatctgaaattggcctcctgtttggggagatttcaatcgcgcccatcatgctgataagcttgcccattatcatgttcctgttccccgagcaggtgaacgaggtctggatgaacttcgcaagcctctttaacccctattacaaggattatcccgatattccaatctacgagaacacctatcctgcaaatatcataaatcctcctaaactcgtcctggacggcaaatcatcagatgactacatcatctcccagcttaaaaacaatcgaaactttaataacaagtacaagaggtataactcgaacgtgaacaaggataacatcaattttaagataaagatcggccctattcctagtggcaagggacccaaggacatggataaccttggctcagccgaggaggttggcaaatatcttaaggagctgtataaaaactataaggacgcgaagagcaagggtgaagtcctcaagttcgtcaagtccaacattaaggagctgttcgctttgtcgctctattttgagtcaatcgaaacggtaaatctcctcataaacttgtttctgtacgaaatagagaaagacaagggatga

SEQ ID NO: 8537 - DNA, 801 bp, synthetic construct
  source 1..801: mol_type = other DNA
gtgaagaagttctacaaggccgttctgctgttgactttctgctttttcatttgtctggactgtgtgtgcgccgtgtcagacaatgtagtcgagaacgacactctgagtgtcgattgtcaggtaggagaactctgctcggacacgatagaggtctcatcagataactattacatcgataataacgttgtcaactccagcgatatcaactttaccgacgtctattccggcaacgtggtgaaaaaggtcaaatctacagtgaagacctcgatcactgcaaaagacataactaagtactttcaggacggtaccagtgttaaagcttacctgaaaaattcaaatgggaaggtgttatctggaaaaaagatcactgtgacgtactctggcaaaacgtactctcggaccacggattccaaagggtgcgtcagttgggacgtgaaaaaggggcctggaacctactccgtgaagttttctttcaaggcctccggctataagagcagcagcaagacagccaaagtgacagtaaaggcaatgccgacaaccctgacagccaataatcttgtcttcacctatggtgataccaacaataaactcaaggcgaccctaaagaataaaaagggcaaatccattgtgaataagaccgtggtgttcaacttctccgggaagaagtatattaagaagacgaacagcaaaggcgttgcgtgcctcacaatcactgcaaagccaaaaacataccccacagccatcagctttaccaacgctaattacgtgaccagcaagaaaaacaacaacagtaacagctga

SEQ ID NO: 8538 - DNA, 945 bp, synthetic construct
  source 1..945: mol_type = other DNA
atgcggaagccttatgtgatactgattggtagtgcaagcgggatcggaaagagcacgatttctgctgagcttgctaaggccctcaatataaagcacctgatcgaaagtgatttcatccgggccgtcgtgcgcgggatcattgggaaagagtacgctccggccctccacagctcatcttatgacgcttacaagcatatcaggaacaaaagcagatacgacagctacgacgaactcgtgtcggccggcttcgacgatcacgcatcctatgtaatccccgcgctggagaagattatccaacgcgcaattaccgactacgatgatatcattatcgagggagttcacctcgtgccaggcttgattaatatcgagcagtttagggatgaggcaaatatctacttcttcattctgatttcggacgaagagtcccataaggagaggttcgtgaaaagagccattcagatccaccgtgggggaaaacagctagatttctttaaagagaatcggatcatacatgaccacctgttgactcaggcccaaaacaataacgttaccatcatagatacagaatccatcgagtccagtctagagggcatcctttccataataaataaaagctgcaccacaatcaagctgatcaacactatcgacgaactcgaggacgtggtggacatcatcagcaataagaacaacggtacgctggaaaagattacatataacattaaaggctttaaggaaccccttatccgaaatattgacgtctacgacaccaaatccgccaacagattcataaacagtattaacgaaaacaaggacaaaaaggaatacctgtcacagttgtacgagttatctgaatttcgagaggcccgcatttgtgcgtcaaatcaggacaacctggataaaatcatcaaggagctgcagaacaagggctatgtcctggatgagtga

SEQ ID NO: 8539 - DNA, 579 bp, synthetic construct
  source 1..579: mol_type = other DNA
atgaacgagatggaaattaatgagatgatcataaagtgtcccgcttgcagcgtggagggagtggccaaatcaatcatgaaggagatcgaaataccccacttcggcaaagtgctggagacaaccattcagtgcccggactgcggatttaaacacagcgacattatcgccctcgagcaaaatgacccagcccggtatgttattgagattaacaagaacaacttgtccgtcagggttgtgagatcccagagcgcaactgtgcttatccccgaactgggggtgaaggtcgaacctgggccaaagtcagaagggtacgtcaccaacgtcgaaggcatcctcacccgctttgaggacgccgtgaaaaaggcgctaaacctgttcgatgatgatgctagccaggagaacggcacaaatacgctgaaagaaatccagaatcttaagaagggaaacggcacggcaactctgatcatcctcgatccattcggtcagtcgaatgtggtaagtgacaatgtagagatttccgagatccctgagaacgagttaaacacactgaagaccggtttcagtcatatagaagaatga

SEQ ID NO: 8540 - DNA, 435 bp, synthetic construct
  source 1..435: mol_type = other DNA
atgagcgaggaggagatgatggaagagacttcagaggaatttattgatgaggacggcgagaagttgccgttcgccaaggcagaagttgtgcggctgatgaaggaaaacctcgacgacgacaagatgatccgcgagcgagtcaaagtagagatgaacaaatttctgggggacgtgcttaagaatgtgtgcaagcagctgaatgactatccatacaccaccgtcgaatacgagatgctaaaagagtccacgtatccttacaccaacatcgaaaggataaaccaggagaaagagagaatcctgctccacctcgaagctattaaggcggattgtaatgccttagcaatggatgtgcaaaagacactgaagctgaaagatgtggtcgaggaagatactttcagcttcacagcccccagtgaagaagacgaggaagagtga

SEQ ID NO: 8541 - DNA, 4248 bp, synthetic construct
  source 1..4248: mol_type = other DNA
atgttaaacaagatccagaagatagtgattggcaagcccttcctcatttccctcatctttgtgtgcctaatcttcacttcccttggagttagcattgagcatagctacgccgccgaccttaacgagagtgataagctcgggtccggtgtaaatgtggaggacaagctcgagaatagccagaagaacaaatcaatgtcggacactaatcagaatcccgctcttaaagccaaaacctacagcgtcaacggaggtacttttagggatatccagaacgctattgacaaatcaagtgccggagatacaataaagttgagcgggaagtttgtgagcaagggggatgacaccattagcatgagcaagaagcttacaatcacgtcaccatcccaggccattctggatggaaaaaactccaccacaatcctgaaaatctttaccggagcaacccaatctaagctgtcgaacctgcgattcgtcaacggctactctgatagtaagggcggagccatcgtcatttcagccaagagcattgcattcgacaagtgtgtgttcgagaacaattacgcaaatctcagctcgggcgcaatacatactccatatagggcaatagccacccaagggatgctcattaagaactgtaacttcacaaacaatggtgccggaattgccgctggcgctctcggaatattcggccacgattttctcattgagaactgtgccttcagtagcaattacgttaaaggatatggcgagtgctatggcggagctatccagataggattggatacggagccgtcctatggtaacgtgagaaactgccgcttcatcaataataaggccatatcctctactggcctgggccatgcaggagctggatgcgttagaaacgggtcttcctattataactgcatttttattaacaatagcgcggattggggcgccgctctgacataccacgccagcggcaacctcaacaactgcacgctgattaataacaccgccacgaagtatggcggcgctgtagctattatgatgaattacctgaacttcatgaacctgaatatcacaaacagtattttcaaaggcaacaaggctcctctggggggcgcggtcaagttggatgggctgaatatcaagattgaggagtccacctttgacgacaactacgcatctgagtatggcggggctgtgaacatcaatgccaccaacgtgaaaatcataaactccaaattcaaccggaacatcgcaaacattgatggtggggcggtattcatcaaggggaaagacacgacagtgaagaatagcaaattcatttccaacgaagccatacctgacgtgaaaaagctgaacgatggactgggcggagccatctatgtgaacagtaccaaggtgctggcccagaataacgagttcaagctaaacaccgcacgcaacggaagtgcaatctacttcgatcggaatgggctcgaatttaagctggtcaacaacacactgtatcagaatcaggcgtgggtttaccgactgccgatttttgcccatgacatctattacggggagtccgagaacatcaagtccgtcatctacggcgggaataacatcgcagacttcgataacttgaaagtctcaaacgccatctacaatgccgccagcaacaataagatcgaaattgacggggaacacccagttctgggcgcaacgaccagcggtaagctgtaccaggatgaccgggaatataacgtgagggtactgatgatggtgcgccacgaagatggcactatcgtctacaacaactccctgaacacgaactatctaggggcagtatccggtaagctggacaacttaaagcccggaaagtattatgtgaccgctaagcatttcgaggacaattactacaaggcaatcgccaataccaccgtcttcaatgttctgcccaaaactgacaacaagatcctcaaaagcagtaacggcaactcaattgcgtataaggacacagtcatctggacattgaacatcacaaacaacgggccaaacgactcaaccggtgtggtggtctacgatgtccttcctgagggactcatctgggtgaatgatgacagtaatggcgcttataatccaaagacgggtgtgctcaccatcggatctctgaaagtgggcgaaacgatcgtgcttaacataatgactaaggttaacgccactggcaagatcgtaaacaaagctaatgtcaccggcaacgagtacgacatcaaccttgacaacaatcacgacgagaaagagatcaacgtgcctcctactgtggatctggccatcattaagaaggtcaacatcaccacgcccaactacggtgattcggttatctggacactcaccgtgtctaattccggcccagacgtggcccacgatgtcaaggtaacagacatctttagcgatagcctgatttggatcgaagacgactctctcggaaaatacaacccgaagactggaatctggaacatcggcacactgaacaagggcaaaaccatcgaactgaacatcgtctcacaagtgaatcaaaccggaaatattaccaataacgtgtctgtgacatcccgtgagcatgacattgacctcagcaacaatgtcgctaataaaactatattcgtgattaagtccggagatttgagcatcttaaaaacagtgaatgtcagtgatgctaattacggtgagattgtgaagtggactctcactgcatacaataatgggcccaacaaagtcaacggggtgaccgtgcaggacattctgcctaagggcctgatgcttcttaactacacggctagtaaaggcttctacgacgatggcgtatgggtcgtgtgctgtctggagaaaggcaagaccgagaccctggagttgatatgcaaagtcaacagaacaggcaatatcacaaatatcgctaaaatctcaggcatagaatacgaccccaacctggacaataatctcgacaacgaatcgatcattgtgccacctgcctcggacatcagcgtcatcaaacaggtggacagtaagaatccttactttggagatattataacttggattatcgaagtgacaaacaagggcccggacagggccaccaatattcgggtgaccgatgaattgccagaaggtctcatctttaaagactatgtgtccacgtgtggtgtttaccagaacggcgtttggttcctggactacctaaatgccggggacagcgagtatctaaacatcagttgtcacgtcgggcagctgggcatcatcgtcaacgacgtgagcgccatagccaacgaatttgacattaacctgagcgacaatcattataacgagagcattaacgtcttgccagtctcagatttgtcaattgagaagttcgtcaacgtttccaatgcgaattacaaggacctgataaaatggacactgatagtgagcaataacgggttcaatgacgcaaccgacgtggtggttgaggatattttacccgactcgttagaatttatcagtgcaaacggggactatgaagaggggatctggtatgtgggggatctgggtgttggtaattcaaaaaccctcgacatagttaccagaatcatcaagaccggagatattaccaatgtagccgcggtctattgtagtgaagacgatcccgatctgagcaacaacgaagctgaggacactgtgcacgttgggcccgcagcggatttgtccatcacaaaaacagtttctaaacacgcctacgaaatcggccaaattcttacttacaatattaatgtgaataacaatgggcctgatgacgcggtaaatgtgaaggtgagtgaggaatttcccaagtctcttcacctgaaatcatttaagatgtccgctggggaatttaatgcgtacagcaacgtgtggtcaatagacaaactggccgctggtggggaggagaaactccgcatggagttcgaggcgctgtctgaaggaatctttaagaatacggcctctgtggtgagcgatactttcgacaatgacctgaacaacaatcacgattcggccctcgtgaaaattattgccaacacctccgacaagatcatcaatgatttgactgataactttaccaaatccaatgtggtgaaagctgagaatatcaagcagcccgtttactgccttgagaagcactctacagccaatttcatagaattactatctatctccgtaatcgtgagcatgatctttggaggcggtgatattttccggaagcgatga

SEQ ID NO: 8542 - DNA, 1149 bp, synthetic construct
  source 1..1149: mol_type = other DNA
atgaagaagcagattgcgattatcttgatgattctgttgattgccgcccccattgtgcagggcgtgtgcgcatcaaagactgcattcatcaccagcgataatctgatcgatgagaaaactgatacaaatatgctaaattccattaagaactacgtggaagagatcagtaacggggaaattcaagtcatcgtcgataacgaagctccgggccctggcgaggggtggcgatccatatcggtaacaagcgatgtgagtattgacattgcagcatcagacgccggcaactacatccagcttgccagcgctgctaccgcgggaaacaagcagatcatcttcataaacacgggtgacttcgacttagataaccactctaactttttgaggagagcatgggacgacaattacagcaatgaatcacttgccggagtgcgggaccccgggacactcctgaacaatgccggaatacagtatatccagctggctaaggactatccggacaatatcgacaataacgggctactcgataagtatgacgacaaaatgaaccacgagattgccgagaagatcgtcaacatcgtgaataactatgacaacagtagcacaaaggagctgagcgataacctgatcgtcaagaacaaaatatcccctaaaggaatggccgatgcctccaaaatgcttgtcgagagcggagataaggagatgaatggcccatatggttcctactccaccccacagctgctctatcagaccagcacctatctcaatggtgatggaattgacattcctaaggactacaagaaaccagacaaccccctggggatctcatttctcaccaaagacacgtacagtgtttatgattacttcaaaatggccgggatcgttaaaaattacatggacgcgaatggcaaagcacccgactcgatcgaatacgagggcgcccacatcagctactacgacctcacctacaactttgctaagatcgttcaaaaccacactgatgctaatcatatgggctttgaaagcgagtatcactttgacaaggtaaacgatagcatcctgttacatatactgcccttcgtgctgatattcgtggtgctgttcctcgcctacatgctgatgaagcgcatcaaaaggttcaagcggaagtga

SEQ ID NO: 8543 - DNA, 684 bp, synthetic construct
  source 1..684: mol_type = other DNA
atgaagcggtatatcagcgagctaataggaaccatggtgcttgtccttttcgggtgcggatcggctgctattgcggggtccatgctgggcacagtggggattgcactggcattcggtttgagcatcgttgctatggcctacgtgatcggcgacatctccggatgccacatcaaccccgctgtttcaattgggatgtggattgacggcaggctggagacaaaggatctggtgatgtacatcgtcttccaatgtatcggagcgatcatcggcatcgggctgttggctattatcattaacagcgccccagtgctgggcggctacgaggccacaggcctgggtcagaatggatttggctctgcctccagtgtcgggttaaatgtgtttggcgccataatcgtggagataattctgacctttgtattcgtcttcactgtgctgggagtgacgaaaaaagccgaaaacggggcggtggcaggcatagttattggtctcactctggcctttgtccatatcatgggaatccctttgaccggaacgtcagtgaacccagcccgcagtatagcacccgcactattcctcgggggccaggctctcgaacaggtctgggtattcattctcgccccgattatcggtgccatcatcgccggtaccctctttaagggccttaccagcgaggacgaatga

SEQ ID NO: 8544 - DNA, 693 bp, synthetic construct
  source 1..693: mol_type = other DNA
atgaactttcaagagcagatttacattcgcaagtcttgcagaaaatacatggacgacgctatcgacatggacctcattcatgatttcatggaatcggtcaagctattaaatagcgaaatcaactacaactatgagattctcacccatgaggaggtgaacgtgcgaaaccggtggtccgccccgtactatctggccatctactccgagaagaaagagaactacctgacgaatataggcttcatattccagcagctgtgcttgtatctgcagagcataagcatcggcacctgttgggttggcatggatgtgccaaagaataagagcagtgattttgtcatcgcaatagcttttggtaagagcgacgagatgacaagggacctgtccaagttcaggcggaaagagctcagcaaaatctgcgattacgaagatgaaaaattgatccctgcacagcttgccccctcagcgattaactcacagccatggtacttcaaacacacaaatgaggggtttgacgtgtatcaggtaaagcagaatatcctgaaacgccaagtccttaagaagtggaatcccatcgatatgggaatcgcgctggcccacatgtatgtgtccaacgaaaaaagattcgagtttgaaatcaaggccaacttcgacagtattgaagggcacacttacattggaagtatcaagatctga

SEQ ID NO: 8545 - DNA, 678 bp, synthetic construct
  source 1..678: mol_type = other DNA
atgaagatcgtcatcgccattggcggaagcattctgctgaaagagtacgattgcaaaaaatttcaggagtatagtgcgattctaaaggatctttccacggaacatgagctgttcgtggtggtcgggggtggaaagcccgctagagagtatatcaatgtggttcgggacttaggggccggggaagcccagtgtgacgacatcggcattgaagtaacacgaatcaatgctaagctcatgctgtcggccctgggggacgcggcataccagagggtcccgcacaatttccaggaggctctggaattttcagccactggcaaaataatagtaatgggagggactgagcctgcacacagtacggatgcagtgtctgccattctggctgagtacatccaagccgacaagctcatcaacctcacctccgttgatggcatgtacacaaaggaccccaataagttcgatgacgccgagctggtgagcgaaatcaccgcaactgagttgcttaactttctcagcgacaaagatgtgaaggctggaacctatgaatttttcgacaccaccgcggtgcagatgattaagcgctccgacttggagacggtgatcacaaacggtttcaaaccagagaacctgatcaaggccgtcaacggcgaaaccgtgggcacaaaaataatcaacgagtga

SEQ ID NO: 8546 - DNA, 789 bp, synthetic construct
  source 1..789: mol_type = other DNA
gtggacaatctcgttgatattggcctgaatcttatgcacagcagcttcaaaaaggaccgggtggaactgatcgaggaggccaaaaaggtcggtgtgaaccagttcattatcacagggacgaacgtccattccagccagatggcagccgagtatgcttcaaagtaccccggcaccttgttctccacgagtggggtccacccccacgacgcgaaaacttgcaatggacacaccatgttcgaactagaaaaaatagcgaagaatgactgtgtggtggccatcggagaatgcggtctggattacaaccggaacttctccccccaggacttgcagcgcaagtggtttgaagctcagatcgaggtggctgagaggataaacatgccgctcttccttcatgagagagaagcacacgaagatctgtacaacatcctgaagcgccatgacaacgttatcgaaaaatcggtcgtgcattgttttactggcacaaaacaggaagctcagaactacatcgatctcggatgttttattggggtgaccgggtggatttgcgacatgaagcgtggacgaaatctccaagaggccgtaagtgcaattcctccagagaaattaatgattgagaccgatgccccctttctgatcccaaagaacttcgagtttaagcctaagaagaacaggaatgagccaaaatatctgcctcacatcctcgagacaatcgccctgtgcatgggcatcgacgccgaggagctgggcgagcaagtaagcagaaataccaaggaatttttcaagatatga

SEQ ID NO: 8547 - DNA, 192 bp, synthetic construct
  source 1..192: mol_type = other DNA
atggccgtggagcctcacaaacattgtcccatctgcggcacaccgatcccactcaacgaactagtgtgcagccccgattgccagaaagtctgggacgctcggctggcgcagacgaagaggacccgcatcatcctgtacatcataattgccattttcctgatcatatgggcaattatgacctttatgaagtga

SEQ ID NO: 8548 - DNA, 324 bp, synthetic construct
  source 1..324: mol_type = other DNA
atgatcttgacctcgagcaacacactcgtgaacaagcagatcgttgaatacaaaggcctagtcaccggggagtcactcatcggaagcaatatctataaggacctgttctccggtgtgcgcgacgtggtcggtggaaggacctccaagtatgaagaggagctgaagaaagcccgggatattgcttttaaaagtatggaagagaaggcggagaatctgggggcaaatgccataattggccttaagattagctacgacaacctgggcggcactatgggaaacacaatcctggtaactgcctacgggacggcagtgaaatgcgaatga

SEQ ID NO: 8549 - DNA, 849 bp, synthetic construct
  source 1..849: mol_type = other DNA
atgaaattcaaagtgccggagaaacccgagaatttgcaagagcggctcatctgcatcatattcggcactttcgtcggaacggccgtctatgtacttttcttatacttgaatatagccatcttgggctggaacctgggcctgatctttgcaccattgctggcaggatacgctgagacgatgctggccgaacgaatgctgagctccgataccggtgctataagcgcattcattctttttgcagggaccacattttattcgttcatcctagtcaatcctacactcggggcgaattttatcacgttcggcgccaccgccgtgatcttacaggccgccttcccaaccctgatcaactacatccttctcgtgatcatcatcggagctatcttctacattctccgcttcgtgaagaagaccctgacacggatttatcttaaaatcaaacacataatctacaagtacattctgaagaagccatttgaagtcaagcctaaagctatcgagtattacgatgagctcagaaacaaccaggaaattaacagcctgggcgttatttttatgaccagtactgatgtgcccgacaaacatgttatcaacctgggtcagtttcagtctacagtgattctggagaaggaacccgacctactggacctgaaccccaaggagagggaaaaccacacactcaccatactgaaatcaggaaaggacaagtgtctgattgggctcactgataagatcaaggcggcgggggggaatggcattattgacctcgacatccaatacattaagattggcttcgggggtgagtcctaccagataagcgccatgggaatgggcgtgtatatcaactga

SEQ ID NO: 8550 - DNA, 204 bp, synthetic construct
  source 1..204: mol_type = other DNA
atggacaagaaaatgattgtaagcatcatcggatacattgtggctttgctcatcccaatcgtcgggctcgtctacggggccatcctgtttttctttaaaaaggaagagcccacatatcggaagcacggcaggctgattatatacttcagcatcgtgattttcgtggcaaccctaatagccaagcttctgatcggcggtttctga

SEQ ID NO: 8551 - DNA, 360 bp, synthetic construct
  source 1..360: mol_type = other DNA
atgaaggagaatcgcaagatcggagaaaactttgacgtgaacgatgcggaggatatttttgacaagcttaggaacgtgaaagggaaaaccaagccaaagggcgaatccaaattcaagaacatttcatacctcatgaatgaggcccagtacctggagaaaaacggccagctgggggaagctgtcgagttgtacaaacagatcatcttcattctccccgacagcatcaaggcctatgaggcaatagccaatatctatcaaaagcagggtgacatcgacagcgaaaaagagattctaaagaaggcaatcagtaactgcaaggagaacgatgagttcaagaaacggctgaatgaaataacatga

SEQ ID NO: 8552 - DNA, 810 bp, synthetic construct
  source 1..810: mol_type = other DNA
atgttcaccatcgagtatttcgtaggtttgattcttattggcatctttgctggtttcgccagcggccttctaggggtgggcggaggattcttaataactcctctccagttcttcctgctgaagtacatcggcgtggcaccagacctggccatactgataagctttggaacgagcctggccatcattatccccacaagcctgagtggtgcttatcggcacaccaaatccatggataacatcctgaagccaggaatcaggctcgggattttcggagtcattggcggtttcgtaggggggttcgttgcctcagcactccccagcagaacgctcgaaattatatttgggctgctactcctcttcatagcgttcaacaacatcgtgaatattaataaggagcgggagaaggctcgaatcccatttaattggaccagtatcggcctcatcgggttgctcgtgggcttttccagcggactgttaggagtcgggggcggaatcttcctgatcgccattcttaccgctctgctgggctttagcatgatcgaagccattggcacctcctccattttcatcagtctaacagcaatcgggggctttctttcgtacatgatcactgggtggggcgttagcacatttccctatagcataggttacgtgaacatcatcaacctggtgctgattgcgtgcttttccgtgcctatggcgtcatttggcgccaaaatggcccatcgcgtgccccagaagaagctgaaaattatcttctcaattgtcatcttgtacatggcattgaaaatgctgggagtcctgccgtga

SEQ ID NO: 8553 - DNA, 1059 bp, synthetic construct
  source 1..1059: mol_type = other DNA
atgaaagtgaataagaccatcctggtgggcttcctcttcctattgattggcgcattcatcttcgtctcggacctcctgaaccccctgattagaccggtcactcacctttttctcatgggatcatcgaaaggaaaagacattatcttctttggtcttctgggcttgctgctaattctgagtcaggtcataccccggaagatcgacgccacccgatacttgaagatatcaattgttatcggcttcgtgctgctggtgtttggaaacctgctggaggtggtattccgcctacaaatgggaatcaaactgaacaccgtgttttgctctatgtccagcacgatgagctctacgagtattctccacactcatttgttgaagtccattctgggggaagtgctcactaagatcatcggacccttcatccagagcaacatcaacacaggggttggtctctacgcctacgtcccagatattagtttcctggtggtgctgatcattccgattctcttcatcacactgatcctcgctaatcagaagcggccttggttcaccaacttcctgatcgcttttttttcaagttgtctgctgatcgggagctttgatggaggtctgtgggccacaccctccctcgtagggctcctgggcctgtggatcgtttataggaacggctattacttaaaccttcatctcggcaagatcataaaggacaagaagcttctgaaggcgaatgaaaatatccagccttcctatagaaatatcgggttgagcgaggcaaaatacctcttcaacaggtttttaccaatcctaataattctgattgtgattgcgctgcgctttacggtggcctttgccggggcagagcccgattattatacagtcgaaatagtcaacatgaccgacaacgtggatttcggcgacatccctatagagaaaatcagcaatgagacctaccacgtagactccaactacaacgagatggaattgattaatgatcttaaagtgccacttaataactcctgcaagtactacaccgtttcttggaatgcctacagctatttatga

SEQ ID NO: 8554 - DNA, 1032 bp, synthetic construct
  source 1..1032: mol_type = other DNA
atgctcaattcaatctttaagtatagctacggggtgatagtttgcctgatcatcgccatcccatccttaatcttggggaaccttttcccagtgatcggcggtccgattatcgcgattatcctgggcatgttgattgctttcgcatggcacgaaaaagagagctttgacgaaggcatcagcttcaccagcaagtacgtcctacagacagccgttgtgctcctgggcttcggactgaacttgaatataattctgaaaacgggcatccaaagcctgcccatcattatcgccacaatatccgtcgccctcatcgttgccttcatcatgcagaaaattctaaacatcgaggagaagtcagccatactaatcggcgtgggttcctcgatttgcgggggctcagcgattgctgccacagcacctgtaattaacgccgacgaggagcaggtggcacagagcatcagcgtgatattcttcttcaatgtgcttgctgccattatcttcccatttctcggcaaaataattggtttctccacagtggacgggggcccttttggtctctttgccggcaccgcaatcaatgacactagctctgtcaccgcagccgctgccacctgggacaacatgtggggactcggaagtcaaactctggataaggctagtactgttaagctcacccggaccctggccattattcccatcaccctggccctgtccgtgttcaccagcaagaaatcagagtacgtgggaggggaattttcgctcaaaaaggcattccctatgttcatcttatattttgtcattgcttccgtaatcacgacgctggcagtcagcctgggggtggatgccaacgtctttcttccctttaaggaactgagtaagttctttatcatattggctatggcggctatcggactgcatacagatatcgtaaagcttgtgaaatccggaacaaagcccataatcctgggagctacctgttggatcgcgatcattattgtgagtatcagcattcagttcactctggggataatttga

SEQ ID NO: 8555 - DNA, 888 bp, synthetic construct
  source 1..888: mol_type = other DNA
atgaaaaagatctatttcattctgcccatcctagccgggatcatgttcggctcaggtggcgtgttcgtccggacactgatggtaaatggcattgactccaccacgctgctcttcttaaggttcagtatagcaatcatccccataatgatagccatcctcgtgaccgacaaaagtctgttgaagatagatctcattgacatttccctattcctggtgtgcggaatatgcatcgtcgggctgaacctgtgctacaacgaatcaatgggcaacatcccccttagcctcgctgccgtgctgctgtcccttgcccctatctatgtcattataattgcttatttcacctttaaggagaagattacacgcaaaaagatcatctgtatggccctcgccatctttggttgtattctaatgacgggggttttggaaactagtttgagcaacatcccattctacggcatcactgctggtattggggcgggcctgttctgggccatctacctcatggctagcaagaagtccattgaaaatggaaagcacacctttacaatcctgatttactccatcaccatcatctccatgggcctgctgccatttacgaactttggccagatcaccaacttcatttcgattaatcccattctggtgatcatcttcctcatcatgcacagcaccttttcgtttgcccttccatacattttcagcacagtgagcctcgagcatattgatagtgggatcgctagcatcctgctctctggagcagaaccgtttgcagcccttatcttcggattaatattctactcagagattcctacatttctgatgttttgcggattcatattgactatcattgcaatgatggcgctgagcagaaaagaggagatcaaatga

SEQ ID NO: 8556 - DNA, 1896 bp, synthetic construct
  source 1..1896: mol_type = other DNA
atgatcctgagcattatcatacccacctacaacgaagaaaagtacctcccaattctccttgagagcatcaaaaaacagagctttgaggattatgagatcatcgtggctgatgccaattcaacagacaatacccgaaacatcgcacaggaatatgggtgcataatcgtcgacggcggcctgccggcaatagggaggaataacggtgctaacgttgcaaaaggagacatcctccttttcctcgactcagacctgaagctcacagacgagtacctacgcgatgtggtatatgaatttaaaatggagagactcggaatagccatcacccgcatggaaccactgtccaacaaggttgaggacaaactattccacgactttgcaaatttcttcatggtgagtgtggagaacattaagccccatggcgcaggatgctacggaatcatctccaaacgcaaattgcacgaggagtgtaatggatttgatgaatccctcaccttcggggaagacactgattatattgagcgactggccaagaaggagcggttcagggtactgcggaaagccaagatcggggtgagcacaaggcgactggaggaggaaggcattacaaccctcatcagacagtacggtaagagcactgtaaatgacttcttggggaagagaactgatgcgaatgagttaaactataaatttgaccatggacacgatcggatcgctgagtccaagatgagcggcatcgagaagagtgccgaaaaaatcaacgtaatcaaggagacttacgatgagtccaaagagaaggtcaacaaggcccgctccctgctcaacacgaagacggagagggacaagaagatcgtcttttactgcgtgtgtggcgaagggatgggtcatgccatacgcactggcgtcatcgttgacaagatcaaggatgagtacgatgtgtacttgttttcaagcgaccgggcctacgagtatttaaagtccaagttcaataatgtgtataagattggcgggttcaacacagtgtacatcaacaataaagtcaacaatttgaagaccctttcgaacgctctgaagagaaaccccggcaacataaagacagggtatgagacgctgtacaagaaggcccgtgagctgaggccagatgtgattgtcaccgactttgaaatctatgctacaatggtgtctaaacttctaaatattcctctgatcagcctggataacatccatatgattacgcaaactaaaatcgactatcctaaggacaaatacgtggagatggttaaggccaaaggggtcatcaagacctatgtcgttaaaccaaaggtccacatcctgaccagcttcttttaccccaagctgaagccgaaaaagaatgcgattatctaccctccaattatacgggaagatattctgaacctgaagcctagtaaaggtgaccacgtcattgtgtaccagacaagtaaagagagtggaaagctcgtgcgtaagttaaaatctcttaacaacgagaagttcatcgtctacggctttaacaaaaacgaaatagatggcaatttgacgtacaaagagtttaacgaggacgtgttctacgacgacttggcaagctctaaggcggttatttgcaatgggggcttcaccttcatctcagaagctatacacctgaaaaaacccatttactctgtgcccgccattggcaacttcgaacaaaccctgaatggctattatgtgcagaagctgggttacggagaataccacgaagtgatgaatgcctctaaggtgaaaaaattcctctcaaggctgtccaagtatcagaagcgccttgacaaagtgaagaaaaccaacaacgatggaattgtgcgggaactgaagtacagaattgaaaagtattcgaaacagtga

SEQ ID NO: 8557 - DNA, 1455 bp, synthetic construct
  source 1..1455: mol_type = other DNA
ttgttgagcaagaagctgatactgattacagtactactcgggctgttggcgatcagcactgtatccgctgctgacaacactgagagtgacattatcggagccgatgggctgaacagcacaagcaatataccgatggacgctccacgcacatttacgcagcttaacgaagccatcacgccctacaccagtatcgatctggagcacgattatagatatgacaatgagacagattccgagtttgctaacggagtgcccattaccaagaatatcacgatcgacggtaaggggcatacccttgacggcaattatctggcccgcattttcattataaaggaagattgcacggcagtgttcaagaacatcaacttcatcaacggcaaggccagcaccaatggcggcgcgatttacggagtgtgtaatgcggaaaactgcaacttcctcaacaatactgccgtcaaagacgggggcgcaatccatctcagtaacgccaataactgtaactttatcaacaactacgtgctgaatgggaggggtggcgcaatgtataagggttacgccaccaactgcatcttcactgacaactccgccgtgactggcggcgcactcttcgagaactctgcaaccaagtgtaagttcaccaataactttgccaaagagaacggtggcgccctgtatggaggctttgctgtgcagtgtaattttaacaagaatagtgcaaagaataacgggggagccctgtataaaggtagcgcccactactgcaatttctcggacaattacgccgtgaatcacggcggaggcatgtacggaggggccggcgaatactgcttcttcaaaaacaacgccgctaaatcaggacatgacgcgtaccggagctccctcaaaaagactaagacaaccatctacatcaagcctaccacgactgcccactacggggattatgtcgtgataaccctgaaaaatatcaaaaacaaggttgtgtctggggtgaaggtctcggtgttcatcaatgggaagaagtatgctaccaaaatcaccaacaaatatggccaaattaaaatcgatacacggaacggctttgttatcaagaagtacactattaagtcaaagtttgcagaggactccaactactacgcaagctcaaaaacagttaagattacgattaagaagagcacaccaaaaataaccgcgaatagcaagacattcaaaaaatcaactaagatcaagaagtacagcataaccctcaaaaccaagcagggcaagattatgaaaaacaagaaaatcaccttaaacgtcaatcacaggtattactatgccacaaccaattataaaggaattgctacattcaaaatcaccaagctactgtacaaaggtaagtttacggctacaactggatatgctgggtccaaatactacaacgcccttactaagaaatccaccattatcgtccgatga

SEQ ID NO: 8558 - DNA, 297 bp, synthetic construct
  source 1..297: mol_type = other DNA
atgatcatcgttcaggccaaggccattcccaaggatgaaacgagtaaaaatcggataattgagtttgctcaagacttgatcaaaaaatccaaagaggagagcgggaacattgattacaacctgttcgtcaataccgacgacaacacactgctgttcgtggagcagtgggactcggtagaaatcctcaagaaccacctaaagaccgaacatttcataaagtttggcgagaacatctcagatcttgtggtgtccgatctggaaatcaatgtcttcgacgcaaacagcattagcctctga

SEQ ID NO: 8559 - DNA, 1077 bp, synthetic construct
  source 1..1077: mol_type = other DNA
atggcgaccttcaaagggttcgccatgaagaagttaaatgagacaggttgggtggagaaggaggtgcctgagtgtgggcccctcgacgctattatcaagcccacatgtgtctccccatgcacgtcagatattcatactgtatgggagggcgccattggagatcggaaggacatgatcctgggccacgaggccgtgggggaggtcgttgaagttggcaaactggttcaaaactttaagcccggcgacaaggtgatcgtgccggcaatcactccagattgggatgatgaagctgcgcagcgcggtttccccagccagaccatggaaccactcgggggatggaaattcagcaactttaaagacggggtgttcggcgagagattccacgtgaatctcgccgatgccaacttggcccatatgccagacgggctgagcgatgagggcgcatgcatgctggtggacatgtggagcaccggcatgatgggctccgagaacgctgatatcccgttaggtggatcggtactggtcatcggcattggagctgtcggactgtcagctatcgcgggggccaagctgctgggggctggaaggctatttgccgccggcacaaggcctattagcgtgaaggtggcaaaaaagtacggtgcaacggacataattaattacaaggaggggcctatcgatgaacaggttatggaactgaccgacggcgcaggagtcgacagcgtagtgattgccggcggcaatctggagaacacatggaaggaagccatctccagtgcaaaggccggcggaaccgtgtccaatgtcaattatctcagtggagcggacaacgttttgatacctcgggtggagtgggggtgtggtatgagcaacataaacatcaaaaacggattgtgccccgggggccgtgtgcgaatggaacgcctcgccgaccttgctctgtgcggcagacaggaccctgagcttctggtcactcacaaatttgagggtctggataaaatcgaagacgccctatacctgatgaaggaaaaaccaaaagatcttatcaagcccgtggtcatgctcgacctcgactga

SEQ ID NO: 8560 - DNA, 261 bp, synthetic construct
  source 1..261: mol_type = other DNA
atggatgacgagacgctgaagaagttcgcgtatgtaaacatcagcagctacagagtgaaaacaatgaaggctctaaaagatgacgtcaagactccaaccaacatcgccaaggaagccggaatcctccccaaccacatttccaaagtcttgcgagagctgaaggaaagtggcatagccgagtgcatcaatgaggaagcacgcaagggccggctttacaggctcaccgacgtgggggaggaaattgtggataaactggactga

SEQ ID NO: 8561 - DNA, 936 bp, synthetic construct
  source 1..936: mol_type = other DNA
atggctaaggcccaggaggaagaacttaaagagcccacagtctgccctgaatgcggctcaactgaactgataggggactatgaaagagcagaagtggtgtgcagccggtgcggactggtgattgatgagaatcttgtggacatgggccctgagtggagggcatttgaccatgaacaaagagacaaacggacacgtgtgggtgctccaatcacatacaccattcacgacaagggtctgagcaccatgatagactggcggaataaggacatctatgggcgggatattcccgccaggaacagggcacaatggtaccgactgcgcaaatggcagaggaaaatcagaatatccggagccaccgagaggaacttagccttcgccctaagtgaactcgaccgggactccagccgcttggggcttccccgaagcgtcagggaggctgccagcgtcgtgtaccgcagtgcagtcgataacaagctgatccgcggacgaagtatcgagggcgtagtagcggcgagcctgtacgctgcatgtagacgttgtaatgttccacggacgctggatgagatcgccgaagtctcccgcgtcactaagaaggaggtgggccggacctaccgcttcttgacccgggagctgaacattaaactcccgcccacttctccagtggattatgtgcctagattcgcctcggaactgggactcagcggcgaggcacagtccaaggctattgagattatcgagaaggccatggagaaaggcctcacgtcaggccgcgggccgacaggcgtagcggctgccgcgctctacatcgccagcgtgttgctgggagatagaaagacccagcgagacgttgctgaaatcgccggggtgactgaggtgaccatcagaaacaggtataaggagctcacagagcagctagagatgggtgttacgctgtga

SEQ ID NO: 8562 - DNA, 303 bp, synthetic construct
  source 1..303: mol_type = other DNA
atgaagctgctgggcaaaagtctgcacatagcgaatagcgggaagctcatcgctcgaaccaccaagacacctagcccgggagccattgtgttcgacagcaacaagaagaaaatcggcaaagtaggctatgtgttcgggccaacggccaatccctacgtgtcgatccgtctatttcggcaggcaaacagggaagagattgagcgcaactgcggagaaaagctcttcgtctccaaaccaaagtccaagaagactagaaagaggcggatgagatcacgccagaagaaaccccaaaacaaaaaatga

SEQ ID NO: 8563 - DNA, 744 bp, synthetic construct
  source 1..744: mol_type = other DNA
atgtcaattagtccaaaggacttactgaataagaataagaacctgaacaagcgactggacattagtgaaatttgcctggacaacgtgaccatcaatgatctaaaattcaatggggataactatgatgagtatataaatctccacagccttttggaaaacataagcacatgccaggttagcgatgcctttaacgggatctcaagacagtccggagtcatccagaagataaaaccaattaataaccggagggtcttcggcaggatctttacagctgaaaccaccagcggggactggggaacttctgctatggcgatcgacgaggcggatgagggagacatactcttcttcaaagtggacagtgaggagatggccatctggggcgagcttgcttccacgtgtgcccgcgacaatggaatcaaagctaccgtgatttacggttccgcccgggatttggatgcactcctgtacatggattaccccgtattcgcaagcaactactgcccgaacgcagggttggccctaggcctgggtagcctgaacgaaagcctcgacatcgaaggctttaaggttaaccctggcgatttcctgattggcgacgagtgtgggattgtggtgatcccccaagagctgttcgtcaagactatgtttgcctctctcgacatcaagatcaaggagtccctcatcattgacaagatcgccctgggcaatacactgtcgcagatcgtgggtcttggaaaaaaatga

SEQ ID NO: 8564 - DNA, 1260 bp, synthetic construct
  source 1..1260: mol_type = other DNA
atgggcaaaggtgaggagcttactacaacaaagtatctgatccacgcccagatcacggctaacgggatcgtagaaaagccggatgtggttggtgccgtattcgggcagacagaaggactcctcagtaacgacctcgatctgagagagttgcagaggactgggcgaatcggccgcatccaagtgaacatccactccaatagcggacgagccaaaggagagattgtcattccatcaagtctggacagagttgagaccgccatcctagccgcctctcttgaaactattaatcgggtcgggccttgcgaagctgaaatccagaccaccaaggtggaggacgtgagggcggtgaaacgggagcaggtggtcaaccgtgctaaggagatttacaagaacatggttgagagcgtggggcccaccagcattaagatgattgaggaagtacgcgaggcaatgcgcgtgcacgaaatctccgaatatggagaagaccgactgcctgccggccctgccatccactcatctgatgcgattatagtcgtggagggcagaagcgacgttctgaacctcctcaaatacggtattaagaacactgtcgccgttgagggggtcagtgtaccccattccatcggtgagctgagcaaaaaaaggaccacaacggcattcgtcgatggagatagaggaggcgagctcatcctgaaagagctgctgcagatcggggatgttgactttataacacgggctccaaagggcaaggaggtggaggacttggagaaggacgaagttttggtcgctctgagggacaaggtgcccacagcacaattcctagctaccaccaatatcctgaatgaaaatcccaagaaagagcacatcaaaaaccggaataataacagaaacaacacgaagtacgataaaaagcagaagtacaataataaccgccgggaagaacagcatgtggtcgatgagccagtgatcgaggacgatgaagtgagcctcatgaaggacatgcttcgcgagtttgagggaaccggcgtgggcgcaatactggatgaggccctgaatatgacgaaagaggtggaagtggagaacatctatgaggaaattaaaaacatagaaggcactgccgacgcggtgatattcgacggcgtgatcagccaaaggttagtggacgcagcctcggaaaagggcattaaaaagttagtggcatttaaatccgtcaacattgtgaagaagccgcataacgtcaagatcataaccattaattga

SEQ ID NO: 8565 - DNA, 612 bp, synthetic construct
  source 1..612: mol_type = other DNA
atgaatatcaacattgaaaactactacagtaccaggaagaatgtgtttgagcgcatccaggacgctgggaccgctaccaaggtgctcatgtcgctcatgatggcatgtttcacggggataatggctcagataattatccctctcccatggactcctgtgcccgtcactgcccagacctttgccgtcctgtgctctgggttgctgttggggaaaaagtatggctgcctaagccagatcctgtacgtggttctaggtgtggcctttattccatggtttggaggaatgaccgggggattcgagacattactcggctcaacgggcggcttccttatcggattcattattgcatcctgcttcatcggcacaataacagagaaatatgccgacgctcggaacttcaagaagatggcggccgtaatcggtatcgcaaatttcagcctcatttacatccccgggttgctgggccttgccctgtggctgaacctgactcaaggcacaagcgttggaattgtggacctgctgatgatgggacttgtcccgtttatcgccggcgatatcgtaaaaatcctgggtgcggcatccgtgagcaaggtcttcctgcccaaagaatga

SEQ ID NO: 8566 - DNA, 399 bp, synthetic construct
  source 1..399: mol_type = other DNA
atgaagctgatccttagggggcaccatctcttgtgtctcaaaggcttccagggctatggatacgacgagaagttcaccaagaacatgactgatatcaactccaagcgaaaatcaccagagacagtaattaagctcacgaactctccggacgacatctgcaaagcctgccccaatctgagaaacaacatatgcgagaatgaagcacagaatgataagattgtgctgatggacgatcaggtcctggaaaaattagactccagcaaggagtacaacagcgtggagctattcaagcggatcgaacacatctttaataccaaagagagtgtgtgtgaaatttgctttaactgcatatggcacgagaagtgtctgttctaccaaaagatcggtaaacgcatttga

SEQ ID NO: 8567 - DNA, 810 bp, synthetic construct
  source 1..810: mol_type = other DNA
atgaaagaaaaagtaaatctgtccggagtcagcgagacaatgctcgtgccattatattcgagggccctggagagcaatcggaagaaccccgccttctatgacaaaacggccatcggaattgtgaaaaatctggattacaatttcaaggagcgatttaaggaatctaagaacaagatgaacttctggggatgcgcggcacgcaccattatcctggatgacgaggttagcaaatacattaaaaacaatcccgaatgtagcgtagtgaacctagcatgcggcttggatgacagattcagtagggtcgacaacgggaagataaactggtacaacatagactttgagaacatcatttccctcagggacaagctcatagataagaaggaccgcgtgaccgacatccctacgtcagccctcgatttctgctggatcgacaagatcgaaaacaaggataacgtgctgatcatcgctgaaggctttctgatgtatctgtccgaggaggatgtgaaaaatctgttcttcaagattagcgagagtttcgggaaggttgaactgcttcttgagctcatgacccattggatggtcaagaaccagaagaaacacgacaccgtcaaacagactggcgctgtgtttcggtggggtataaatgagaccgaggacttcgagatgatttgtcccatgttcaagatgactggggattacaatctgacaaatgtgatgaagagatactcaccgatctttattacaatcgcctctccatttcttaagcctcgtaacaaccggatcggcaaatttgaaaaattgatcctatga

SEQ ID NO: 8568 - DNA, 225 bp, synthetic construct
  source 1..225: mol_type = other DNA
atgttcaactccaagtttctgatccttatcattggcgtactaatcataggcttggccctctcctgctacttctactcgtcagataacttccatgagagtgactctagtctgaatgagcggcacgacgacgtggtgtatctctggatgctggacgataacggaaagctgaaactggtcccaacaaccgaaacgtacagcgaagggagcgcaagcgatcccgactga

SEQ ID NO: 8569 - DNA, 2289 bp, synthetic construct
  source 1..2289: mol_type = other DNA
ctggagaacaagatcaacgcgggctacgggtccaccataacactggagaacgattatgagtatgaggagtctggatatagttcgggaatagaaattactcaggatatcaccattgacgggaaaggtcatacaatcgacgccaaaggacagacacgcattttcgacgtggaggcaggcaaggttaccctgaaaaatattacctttaaaaatggaatgcagaacttctttttcggtgggggcgccattctctggaagtcactcgatggcatcattacgaattgcacctttataaacaactatgctcccagcggtggcgcaatccgcctcgaagcctgggacaataccatatccgattgcacgttcatcagaaacaccgccaaccagggcggagctataaacctcaataccactaactacgctagcatctccaactgtgtgttcgtgaataatgacatttactcagtgcagggtgacggctgcaagataaacaacaatattttcatgagctgtagcatcgggttcgacttcactcggaattacaatattgacaacaactggttcgggaacaatgcctccaattatacttacaagcccaatgagttttgcaataactggttgttcctgaacgccacaacagatcccaacaccgtgtccgtgagcaacacggcagacattatctttaaactgtacgcctataactcaacttcaggaaacatctcgaagtatgataacgcgccattcaagaatcttaatcttaccatcacagccacaaacgggaatattgacaagaatatcgctaaattaggcgagactatcaagtataccgcttccagtgtgggcacgggcaacgtctctgccaaggtggagaatgtcgagtataccatcggcctggacatcattccaatcgaaaccaagctgatactcaactcgaccgacacaattattgacagcatctccaccgtgggcatcaatgtcaccgatattaataacaatcctcttagtggagtggttaagcttacaatcaaggacaacaaggggaatgagtacaacacaactgtaacagtgaaaaccggcatcaccacttacatttaccctgccgataaaacaaatatcagcaagattgtgaacatcaccggtttctacctgggcaatgacaccttggggtacgtggattctcccgtcgccgaaaccaagtttagggtggataagctaaacgctaccgtgaacctggtcgtaaacaactacaccatcaggaacttctcagtcaacattacagtgactggtaagaatacggaccggatcgtcgaaaacggttccttaataatctatgcaaatcgagaaaaaattgacgagatcaacatcacagatgggaaggctgaaaatatcctgctgaacatcaccaaaatcggcaattatgagctgtccgtggcctatagtggcaataacgttttcaacgagaacaatacttttagcaagaatgtcaccgctatcaagataagtaccatcatctcagccaacaacattatcacgacgtataacactgataaatacctggaaatcactttgctggatagcgaaaaaaatccgctcaacaatgcaaccctgtctgttgacctgaacggggctaaaaaatacacaacttataagaatggacagattaagatagcattggggagtctggttccgaagacatacaccgcaaaagtcagttttgccgggaacgacatttacagcccctatagcaccagctttaaggtggtagttgaaaaagcgacaccaacaatcacggcgaaaacaaagatctttaagtttgaggacaagaccaagaagtacacgataaccctcaagaacaacaagggcattgtcatgaagaacaccaaggtgacgcttactattaatggaaaaacctacactgcgacaacaaacactaacggggtagcaactttcaagtttaacaaattgaataaaaagggcacctatacggcctctatcacctactccggagataaatattacaacaaactaatcaagaaggctaagattaagattaaggcccctgcctggaaaacagtggcgaaaggtagcaagaacaaggccatcgtcaagaagatccagaagactctgaaaaacaatggatactacctcaagtacaatggcagatacctcaaaatagacggaattttccagaaatacactcaaatcgccgttaagcacttccaaaaggcaaataaactgaaaacaacgggaaaggtggattacaagacggctaaaaaactaaaaataatctga

SEQ ID NO: 8570 - DNA, 147 bp, synthetic construct
  source 1..147: mol_type = other DNA
atgaaagaaattaatatcgtggagataattaaaaacaaggataagctggagaagcacgaaggctatctaccaatccccatcctgcattggattgacatcgggaaatgggagatcttcctggagaaacacgacaagaagctctactga

SEQ ID NO: 8571 - DNA, 144 bp, synthetic construct
  source 1..144: mol_type = other DNA
atgaagctgttcaaaaccgagatcacagtgctaggaaacgaaaatacgaagggcctggccctgaacggccggtgcagccacgggaaatttcaggacatgctcgagaacatgaactattacctcgaaaagatccataatatttga

SEQ ID NO: 8572 - DNA, 1185 bp, synthetic construct
  source 1..1185: mol_type = other DNA
atggaaaaattgctgctgatcggcattgataccagaagcatgattaacagcgccctccagcttgatttcgaactattctccacctcctatttttcaacttccgacaccccaaccatcaaaaatcagaaaattattctgaaggaaaagtacggggaaagttgcggggcttttgaaaatcagttctccaacctcgacatcctggagttttcaaaagattatctggacgaggttgactatatcattcccatttccggtgtgtctccaagtgatttctctaagcgccataaaaggaagattctggggaccacgaatgtgtgtgacattgaaaacaaattcaaattcttcaaaaagatcaagaatgagtttcttacgcccatgactttcaagttgtctgacgtagatgaggccatcgaaattgataagagctacccgaatagtcaattcatcttgaaacctgtcaagggcagcggaggctataatataaacctcctaaacaacgtcagcgattttcaattcaacgacagcgagtttatcttgcaggagtacgtgacaggaatcaacgtgagtagcagcattttaagcactgcccatgctgccaagaccatcatgaactcgcggttactgaccctgaatgatttcggaaagcaggacaacttcatttacgcgggcaacatactgcccctcaccaacgagtccgtcatggccgagtttaacggaatcgacgacattatcaaggagatgaatgagacttcagagaacctggcactggagtttaacctcctcgggtctaatggtgtcgactatatcatcaatgaaaagggcctgtacgtgatcgagctcaacccaaggctgcaggggacattcgagtgtgtggaaaagacactgggaataaatatgcttgatgcacacattaaagcatgccgaggcgagcttgttgacattcccgagcccaaatgctattcctacaaaaagatcatctactcacctacacggatgaagtacgagaagataaacctggataacatctacgacctgccgcacataggctccatcacggagaagtcggaacctcttctcacaatcatagacagcgataaggactttaagaagctctacgaaaaagtggagctggccagtgaactaatcaataagaaggcgaaactgcaccagagcgacatcaaatga

SEQ ID NO: 8573 - DNA, 234 bp, synthetic construct
  source 1..234: mol_type = other DNA
ctattcatcttcaagatcagctactataatctctttacagtgatcaattttttcacccggaattttctgaagaacggagcaaacatgaagaggaaccccattgaccagttcatgaaagatccagacaacaaggcgaaaattttcatctggatgacccgcgccatgattataactacgtttatgatcacaatcggggtcatactcttcatcctgtacctgatcggcgtgatttga

SEQ ID NO: 8574 - DNA, 684 bp, synthetic construct
  source 1..684: mol_type = other DNA
atggcacaggatattatagatggaatcaacccaactcggatggaactactgagtctgaaaaaccgcaccaaactggccatcaaggggcatgggctgctcaaggaaaaaagggacgcgctaattaaggagttttttgatatcctggatcgtgtcaagggtatccgggaaaacgcagagcagtccctgaaagaagcaaatgacgccctcttggaagcccagatcgccatgggcgatctggcggtccggaaggccgcattgagcgtgaaagagagcatagacgtggagattacatcacgcagtgtgatgggcgtggcggtgcccgtgaccaacgttaagatggaggagagatctattatcgaccgcggctatggattttcggacaccactatccagctggacgaggctgccaagaaattcgaggagagcttaaagtacctcattgaacttggggaagtagagaaaacaattttcctgcttgctgaagaaatcgaggctacaaagcggcgagtcaatgccctggaacacattatgatcccgcgattccagaatacggagaagtacatcgacatgagactccaagagatggaaagggagaacttcgttaggctcaagatgatcagatccaccatagagaagaacgagaaagccgctgctgaggccgctgccgccgaaaatgcagagtga

SEQ ID NO: 8575 - DNA, 1392 bp, synthetic construct
  source 1..1392: mol_type = other DNA
atgaatacaaatattaaaacgcgggaatatactacggtgagcgaagtctcaggtccgctgatggtggtggaaggcgtcgaaggcgttggttacaacgaaatcgtggatattgagacacctaccggtgagaagcgcagtggccaggtgctggaagttactaaggatgttgccgtgatccaggtattcgaaggaaccactgacctgaacacgaaggacacaaaaacccggtttacgggtcagaccgccaaaattggcgtgtccagagacatgatgggacgaatattcaacggtatcggtaagccaattgacgggggacctgagattattccagatgaggagctcgatataaatggggccccaatgaacccggcctcccgtgagttccccgaggagtttatccagactgggatctcgaccatagacggaatgaacacacttgtgcgcggacagaaacttcctatctttagtggctccggcctgccacacaatgacttggctgtgcagatcgctagacaggctaaggtcttaggggctgatgatgagtttgccgtcatttttgcagccatggggatcaccaacgaggaagcaaacttcttcatgcgggacttcgaacgtacgggagcactggaaaagctaacagtcttcatgaacttggcagacgaccctgctatagagcgcatcctgactccaaagatggccctcacaactgctgagtactacgcctttaccctgggcatgcaagtgctagtgatcctgaccgatatgaccaactactgcgaggcgttaagggagatctccgcagcgagagaggaggtacccggacgccgaggctaccctgggtacatgtacacagacctggcagggatttatgagagggccggaagaatcgacggcaaagagggctcgattacccagatgccgatcctcgtcatgccccaggacgatatcacccatccaatccccgatttgacagggtatataaccgaaggacagatagtcctgagcagggagctctcaagaaaggggatttacccccccgtcgacgtgcttccctcactgtcccggttgatgagcgggggcatcggcggagacaaaacacgcgatgaccacagcggcgtgtctgaccagctctattctgcctatgccgaaggccgggaactgcgagaccttgtggcggtggtaggggaagaggctctaactgagagggatcaaaagttcctggagtttgcgcaggccttcgaggaccaattcatcacccaaagcaaagacgaggatcggagtatcttcgaatctctcgatctgggctggaatctgctcaagatcctgcctaaaagcgagctcaagagggttaaggaggaatttattgaacagtacctgcccaaggatgagtga

SEQ ID NO: 8576 - DNA, 1743 bp, synthetic construct
  source 1..1743: mol_type = other DNA
atgatcatcgaaggaaatataatcaagatcgctgggcccgtgatagtcgcagatggtatgcgcggggcccagatgctcgagatggttagggtagggaacgagaagctcatcggagagatcatcgagctggagggagacactgctacgatccaggtttatgaggagacagccggcatccagcccggcgaagtggttgagtgtacgggtggagccctgtccgtggaactggggcccggggtcatgagttccatttttgacggcattcagagacccctcaggatcatccgcgaggcgagcggggatttcattgctagagggatcgacgtagattccattaataaagagaagaaatgggaatttaagccagtggctaaagtcggagatgtcctgaaagccggagatgtgctgggcgaggtccaggaaacaagcgccgtcttgcacaagatcatggtgccccctgcccttgagggcgaagtgacagagattgccgctgaaggtgaatataccattctggaggacattgccgaggtgggcggacaaaaagtccagatgctccagaagtggccggtgaaaaagagccggccctatgtgaggaagctcgatccagacgtgcctttggtgaccggccagcgcgcacaggatactttcttctctgtcgctaaagggggagcggcagccattcctgggcccttcggatcagggaagaccgttacacagcagcagcttgccaaatgggctgatgccgacatcgtggtctacattggatgcggagagcgtggcaacgaaatgaccgaagtgctgaccgaatttccattcctcgacgaccctaagacgggcaacccattgatggaccgcactgtgcttatcgcaaacaccagcaacatgccagtcgcagctcgagaggcctgtgtctacacaggcataaccatagccgagtattaccgggatcagggttacgatgtggcgctcatggctgactcaacctccagatgggcggaggcgatgagggagattagcggccgccttgaagaaatgcccggggaagagggctatccggcctaccttgcgtccaggctggctcaattctacgagcgagcaggacgggtagagaccattggctccgagcctcatgtagcctcgatctctgtggtgggtgcagtgagcccgcccggtggggacttatctgagcctgttacgcagaacacactgcggatctgcaaggtgttctgggcattggatgcatcactggcagataagcggcactttccgtcaattgactggctgcaaagttattcgttatatgtggacagtatcgagggctggtgggctgataatgtcgctgccgactggagagccacccgggaccaggccatgggcctgttgcagaaggaaagcgagctgcaggaaattgttcagctagtgggccctgacgccctgcccgaaaccgaccaagctactctggagacaacacgtatgctaagagaagacttcctacagcaaaatgcctttgacgacgtagacacttactgcgctccaacgaagcagtaccagatgctgaagaccatcctcctgttctacaaggaaagcctcgccgcggttaaccgaggcgctccaatcgcaactattgccgccctgcccgttaaagaagagataggtaagatgaaatacataccacaagatgagtttgatgcaaagatcgccgacatccaagcggccgtggtgaaacagtgcagtgaggcctga

SEQ ID NO: 8577 - DNA, 318 bp, synthetic construct
  source 1..318: mol_type = other DNA
atgtccagtgtcgcggtgattggcgacatcgacaccgtctccggattccgcctaggcggtgtcaagcaggctgtggtggtgaagacatctgaggaagccatcgccgccttcgataagtttctcgaagacgagatttcgattatcatcatcacgcagctgatggcaaacgagataagagaacacatcaataggaaaatcgggagcagtgtgctgccaatgataattgagatccccggcaaggatgggtccagcgaaggatcaagcgatcaaataaacgacctgattcgacgggtgatcggggtagagatggttaaatga

SEQ ID NO: 8578 - DNA, 1155 bp, synthetic construct
  source 1..1155: mol_type = other DNA
atggcagatcaaattgctaccctgataagtagtgtaggactgacccaggaaacattcctcgtgctctgtgtaatctcactgcttgtggtgggtgccgtcgtcgtcatcatcacctcccgacccattctggacatctatccttacctaaacccaagtgccagagtccgcgctagaaaaggcaggttgttcgacgagaaacaaattagcgaaattgtggaaaccagcaatatcgaggaagtggagaactatctcaaaggcgttcctgagtacgctgacgttctggacgaatatccccttgataaggcactggatgtggaacgcgctaatacgtacgagtttatcgcccggctggctcccaaagacatcaaggctcctttcgccgtaatgtcgaagaaggccgacattgacaatatcaaaagccttttaactgccaaggaggtcggttatgacgcggatgagaccaaggagttactcatcccgtgcggggcgctgtacaatgacctggaatccttggccgacgccgagaacgtcactgacattgttacaagtctggacaacacagagtacgccgccgtgttagaagacgctctcccacagtatgagaatacaaacatgatccttccactggagtctgctctcgacaagtactacctgggcaagcttctccggtccactgatgtgccctcggacgagaacaagcagattctgtatgcctatgtgggaacccaggtggatgtaacgaacctgaaactaatcataagggcgaaggaagacggcctagattacgatgcaatcagcccctacatactggacgagggctaccagctccgggagtggaagctcaaagatctgatggaatcccctgacgttacaaacgtcgtgtctggattggaaggaaccaagtatagcagcgcactgacggatgtggtgccagtgtacaacgagactggctcagtggcagtctttgagaaagcactggatgtttacgcatccgagtactcaaagtctctggccagcaaaaaaccattggggatcgggcccattatcgggtatctgtcccagaaggaaaatgagataaagaatctcaagatcattgcccgtgccaagagggaagtggatttcccgaacgcgaaaatcatggagatgttgatatga

SEQ ID NO: 8579 - DNA, 612 bp, synthetic construct
  source 1..612: mol_type = other DNA
atgagctcaggcacagataaaatcgtgagcagcattatgagcgaggcccaagagaaggcagacgtgatcattcaggaggtgaacgcagaggtgtccgccatacaggccaaggcggacaaaaccgctgaggtggaaaagacgcgcatcctagagaacgggaaaaaacagagcgacatgagataccagcagatcatctcggaagctaagatgaacgcccggagggccaagctgggcgccaaggaagaggtgatcgaggccgctttcagtcaggctgtcggtgagctcaaagagaaggcgtcttcccggagtgcagactatgaggattcactgattaagatgattaaagaggcggccgatgagattggcggggacgacctgatcatccaactgaacgaagccgacaccaaccagttcaagtccgaaatatcttccggaaatgccttcgagattgaaggcatcaagttcgaacttggggagcccatcaataccattggtggagcagtcttgaagactaataatggagatatagaagtaaataacacaatcgaagcacgactcgataggtttaagagcatcctccgcagtgaagttgctaacgtcctgtttaaatga

SEQ ID NO: 8580 - DNA, 486 bp, synthetic construct
  source 1..486: mol_type = other DNA
atggtggaaattgctcttggcacggcgctggccgccatcggtgctggcgtcgcaataggatttgccggcctaggcagcgggctggggcaaggcatggccgctgctggcagtgtgggagccgtggcagaagacaacgacatgtttgcccgggggatcatcttctcggccctcccagagacccaggctatctatgggttcttggtcgcaatcctgctgctcgtattctcaggattactgggtggaggccagggactcccgaccgaggccggcattgtcgcgataggtgtgggggcatctatcggttttgccggcctggggtccggaatgggacagggcatggcagccgcctccagcgttggcgcgatcgtggaggacaatgatatgtttgcacgcggtattattttcagcgccctgcccgagacacaggctatttacgggttcttgatagctatcctccttatggtgttcggcggaatcctggggtga

SEQ ID NO: 8581 - DNA, 2001 bp, synthetic construct
  source 1..2001: mol_type = other DNA
atgttcaagaccgctagaatgcggaaaattagaatcgtgacactggataagtatgtcgcccccacagtggatgcgctccacgagagcgggctgatacaggtcagtgatatttcggagagcatccagcaggaccccgaactcgcagaactggtgactccctccaaagccaccccttacaccggcaagctgagctccctgctcatgaagacaaacgggatatccgagctactcggaaatagcataagcgagggccatgggctgaaagacactctaatgtcttttattagtccggacatgccagtgcagaaggaagtagaaaaactggatacacccgctttcatcgagaaagctgaggaaacgctggccaaggtggaaagcaagacctccgtgattgaaggcaagctggctgcactcgactccgaaacaagtgaactaaagtctaacaagagcttggccaagcggttatcccacttcgacatggatttggcgctgttgaaagactcaaagtacaccagcactacggtgggaaggatcaatgccgagtccacttcagagatcaagaatgagctgtccaacttgactgatgagctggagatatttactgttcctatggatgacgatgacggtgaagtcatcgccgtagtgacccttaaagaatttagtgacgacgtgtattccacccttaggaaattcgacttcgagaagatcgaggtggccaatgttgagggcacccctcaacacatcatcagcagtgctgattcgcggctgctgaccatcgagtcagagcgcgccgctgtgaaaaaagaattgcgcgcagtcgccgagcagtgggatgatgagatactggcgctcaaggaacagctggagaatgagaaagacaagaacgaaattctttcatcttttgtgcagacgaaagacgcttatgtgctcgaggcatgggttcctgtaaaggatacagaggaggtcgagcagctggttgaaaagtcctctgagggacattgcgcctttgagacaattgaaatcgaggggacagatgatgaggatgtccccattttgcagcaaaacggatggtatgccaagcctttcgagttcctcgtcgacatgtacagcccagtccgttacaacgaaattgacccaacaatatttgtggcaatcaccttcccgttcttcttcggtttctgcctcaccgacgcaatctatgggctagtggtatctgccatcggcgtcgttatcattagggggctggggaaagttaaagaaagcatgcgctcatttggatggattctggtgtgggccggtctatgggctgtgattctgggtctgcttactaatgggtttatcggggacttcccagagagaattgccggattccggctgccaactgtgttcgctcccgtcgaagcattcaagcaccccgacaccattttattgatagcgatcggagtcggactcctttacacgaacgtgggatttcttctgggcgctatcgacaacctgcgatacggcaatgtgaaggaagccattggatctcagctctgctggtttgtgttcgaggctgggatcattctcctcgccctcggctacatgatgcccgccatcggcatggtgggcatggctctgggcggcattctcatcatcgcaacgattggaatgctggtgtgggccaacggcgcctatggtgtgatggacattttcggctacatgggagacgtgttgtcatacgcacgcctgctggccctgtgtctggccaccggtggcatcgccatgaccgtaaacatcctggcgcaaatgctcaacaacatggttccgcatgtagggatagtgcttgcgatctttgtcttcatctttgggcacatcgcaaactttgctttccaggttttaggtgcctttatcaattcgttacgacttaactacgtcgaatttttcagccagttctttatgagtggcaagggcaaattcgaggcgttcaaagcaaataggacctttacaaagctgaagtga

SEQ ID NO: 8582 - DNA, 315 bp, synthetic construct
  source 1..315: mol_type = other DNA
atggcagagatcagtgacgcaatcgccatgataaaaaaggccgagtcggacgccgagcagctcattgcggattcacaggcccagagcaaggacatgatcgccgacgcaaacctgaaagctgaggaatccgtgagcgaggtgaaaatttcagcagaagaggaagctcaaaagaccgttttcgatgccgaggacaaggccaagaaagaagcccagagcatctccgagcagtccaaagtggaagtaaagagtctaaaggataaggctatgggcaacgtcgatgaggcggctagcattatcgtcaagaatatactgtga

SEQ ID NO: 8583 - DNA, 351 bp, synthetic construct
  source 1..351: mol_type = other DNA
atggccaatattaagatgttcaagctgctaggggtgctggtcagcctgctgttaatcatttggggcattctgcccttcctccggcaccagccaatcaccacagacgtcattgcaacggccatcattctcatcatgatagctgtggcgtacatgattatcatgttcaacccaagctggaccaaggccgtgttcttttttgaaggtatcatcatcgccgttgcaggatacatgctgcttgcctttccctataacctcgagttcgccctggtgggcgtaatcataattgcaatcgcgatccttgcttatctccagaaactgcctccgaaaatattgaggttgttttaccgctga

SEQ ID NO: 8584 - DNA, 330 bp, synthetic construct
  source 1..330: mol_type = other DNA
atggagcgcgcagtctggatcatcctgaacaataacttctccctgaccttggacagtgagattaaagatgaaaaaattgtgaataaaaggttcagcccggggtcggatctatggacaagcgagctccctcagctcagctttagcgacgagaacatccagaaggattacgacgagtttatctcagacatcatctcacttttctctgagcccagtgtagacaagattttcattgatgccaagattggcgaagaatccgagtacgtgaatgcgaagaacccactggtcatacggaagatcgaagaatattccgtggacgagatcataggatga

SEQ ID NO: 8585 - DNA, 339 bp, synthetic construct
  source 1..339: mol_type = other DNA
atgaagcttttcatcctgtccgccaacgactcgagggacatggatgacatcagtcagaagctgtctctgaaaaaattcaaaattacccagaccgagaacaactacattctgatgtgcaagaaacggtatggcaacattctcatccacgcaatctgtctgatcatcgctctgtcatatgtgtggcccgtgctgatagtcaatgtgatttacttcacttactcctacctctgggccagcccaaatgtattaatcacgacagagagtctagacgatgaagggaatccgttggagtttagcagcatggatgaaatacttaagaaggccacagcgatcctctga

SEQ ID NO: 8586 - DNA, 510 bp, synthetic construct
  source 1..510: mol_type = other DNA
atggagttcatcgatgtgataaacgagagatacagtgtccggggatacctcgacaaggaggtagagcaggaaaaactagaatttgtgctgaaggcggccaccatcgctcccacgggcgtcaacaaccagcctttcaaggtctacgtcattgacagcaagaagtacaaggagaagttaagcaaaatctataaagctaaatggttcgttgaagcgccatacgttctggccgtggttgcacttcgaaatgaagcctgggtgaggccatgggattccaaaaacatcgccgacattgatgccaccattgtgatggaccacatgatcctcgcagctactgacgtggggctcggcacatgctatgtcggtgcatttaagaaaaactatgcccataagttcctgggactgaatgaaaacgaggaggtggtgctgttcacccccctggggtatggcaatgtggagccgcgggagacaccccgcaaggacttgaatgattttgtagtgtacaaagactga

SEQ ID NO: 8587 - DNA, 804 bp, synthetic construct
  source 1..804: mol_type = other DNA
atgcaggaaaacaattttaaaatcgataggcactctctgaagacagcgatttcacgggttgaaactgacaagatcgtcacaagagggtataaccagagggatctcattgaaaaaatacgctacagtgacatggtgtttctcctgctcaaaggacgcctgccttccattattgagggcaaaatatttaaccatgtgttggttagcttctgtgatcatggcgtgaccccaccaagtactcagacagcgcggatcgtgaccagctcaggctcgccagtcaacagcgcagtggccggggcactgctgagcttcggacacaagcatgccggggccattgagaagaccatggacctctatcagtccaagatcaacagcctatacctgaccgatgatgctgagattgacaacaagcagatcgctgggctggctatcgaaatctaccaggagtatatccttaaggacaaaaaagtgcctggttttggccacaggtaccacaatatcgatccccgagccgacaaactgatggagatcgtcatcaaggagggcttcatcggaccgcatataaagctggcactcgctcttgaagacctaatctaccaaaagaagcaaattcggctgaatgtggacggtgcaaacgccgccattctgtccgacttagggttcacgcccgacttgggcttgggcatcttcataatcggtcgaatccccggaatcattgcccacattcacgaagagaagatgaatgaggatgagttccgcagattctgcgaccttgatgacgtaatataccagcagagaggaaaatga

SEQ ID NO: 8588 - DNA, 873 bp, synthetic construct
  source 1..873: mol_type = other DNA
atggatattttggaggatatcagcaagacaatcatcgatgcctcaacaactctgtcccaggacaaattcaatgccttgaagcgcagcattgatgcagaagacaacgaaaatgctaaatgggcactggaacagattttagagaactacaaggtggcgcaggacatcaaattccctctgtgcgacgacacgggcatccctcacgttatcattgaaataggggaggaccgagagatcagcggagacctgctcaaccagatccacaagggaatcgagcttggcctgaataatctgccggcccgaccaatggctgtcattggagacgaggttcagcggattgaacaaagtaaagggctctttgagaagcctggaatgcttcgccccgtcagcatcctaatagacaccgcaaacgatgaaagcacatataaaagggacatatcttccgatacgcttaatattcactttttactggagggcgggggccccgaaatcagagctaacacatttagggtgtatcataagagatccttcgacaacgtcattaacaccgcctgtggctggctggaggagagcctacggatgctcggctgcaccccatccatcccctcaatcggtatcggacgtacacatttcgaatcaaccagcctgctgctcaagtccatcgcctacgggaatctggataaccagagtgagcacgaacaaaagataacccagcgcctcaatgagacttgcattgggcccatggggttcggcggcaagaccacggtgttgggtacctacctcaacatcggaaaccagcgggcgagtggtgtgagaatagtgagcgtgaggccgtcgtgttttgtggagccacgggtagccactctgaaactgtga

SEQ ID NO: 8589 - DNA, 903 bp, synthetic construct
  source 1..903: mol_type = other DNA
atggagaacaccaagaagttcctcaaaaagatcgggatcaaggaggtgtacgacgactttaaaagcgataagcggtttgacgatggggggcagtaccggtttgaagtgccgggaatccagtcccccaagacaatggaggcgctattgaccgaatcaatcaaacagggcatcttcattcatagggtcactcaaaccaagggaatcatgatgttgactgacgaggagataggcaagatgattgacctggccatcgactacggatgtgagctgttcttggccgtaggtcccagagccacctatgataccagcgccacagtccacacgaaagagggcagcagaataggataccggctccggggttatgataacctagtgtatgcaattgaggacgtgaagcgagcttgcagacttggcgttcgcggcatactgctgtacgatgagggcctgctctgggcactcaatcagatgagggccgaaggcgaaatcccagagaacgtgcattttaaactcagcgcccacgcaggccacagtaatcccgctagcgctaaactgctggaagctcaggggttaaactcccttaatcccgtgcgagacctgcaaatcagcatgcttgcggctattcgctacgcctgcagtatggccatcgatctgcacactgaaaatccaaagagcacaggagggttcattcgccactacgaagtgcctaaattcattaaggttgcctcccctgtatatctgaagaccggtgggtcggtcgctgcaaaccataactgggacacaacggagaaagaggccctggcgcgtataaagcaggtgtcactcgtcaaaaggattatcgacgaatattacccggacgcaatcgtctctcctgtgaagtccagtgatctgtctatcccagagtga

SEQ ID NO: 8590 - DNA, 1407 bp, synthetic construct
  source 1..1407: mol_type = other DNA
atgtttttgcagaatatctctaaatttatatcgaactaccgatacgagcaggccacggtggaaagcctgaccacggtgaaagctgcctttctggatttctttggagtcacatatcgcggcatgagcgaggaagcgccctcaatcgccctcaataccatcgaggagatactgccaaagaggaacagtaatcttactgcctccatcatcggccagaatttcaaaaccgacattttgagtgcggcttttgttaacgggattgcggcccatgtcctggagctggacgacggccataggggggctcaacttcacctaggggccgtcatattctcaacagccctcgcaatctccgaagcttacgacttaaccggccgagaatttctggaaggtgtgattgtaggctatgaagtgggaatcttgctcggccagcttgtaaatcccaaacacagaaataagggattccataccactggaacaataggaacattcatcgcaggggtcgtggccagcaagctcctcaagctggatgagaagcagacgctgaatgcactcgggctgtgtggaactcaggccgctggtcttctggaatctgatcacgggggctcgatgggcaaggtcctgcacgtgggcaaagcttcatacaacggcattctgtccgccttcctggctcggaacggctttacgggtagtggcactatcttcgatggagatgaggggtttctgaagacaatggtgctggacaacaccaaccacgacattgatgagttttctttcgagaacgccctcaaaaacatcggaaaagtcagggtgcgggatatctactttaagaagtacccgttctgcagacacctgcattcctcaatagataccgcactcaagcttaaggcaagcatcggggacgagtataatcacatacagaacgttgcagtgaagacctacgaaattgccgccgaacacaacaatttccatccaaagaacttggaggagctgaaacagagccttccctatgcggtggccatctctctcgtggtcggcgaagttagtgtggacaagattaaccaactgatcgaatttggtctcctcgagaactatagcactgttgacgacgtgaatgctattaaaaacatcgtaaacgggatgattatcctaagcgacgataagttgaatgagttatatccttccaaaagaccttccaatgtcatcattaaactggacgatgtgttccgcaacggaatcttccagaatatcaccttcctgcccaagggtgacttcgagaacccactacaactgcgcgagttaatcgataagttcaagggcttgaaccctcactacgacattaagaacctaacagttattgacagcctggaggactacaatatgaagtacgtggtgcggaaactgaaagggtga

SEQ ID NO: 8591 - DNA, 489 bp, synthetic construct
  source 1..489: mol_type = other DNA
atggtggatattattgacggctcagagaacatctcggttcacgggatcttaaactgggtgctgcttctaaccatattcagcatcattaccgtggtgggaaattacatcggctataagcatcctatcggcgacgcactcatcggcatgttcctcctgtccctgatcacgctaatcggggtctggatggagcggtatctgcccctggacattagcagtatcatctatatcagcataattgggattgtcctggccttcccgggaatgcccaccagcaagactctgctgtactacgtatcacaggtggaactcatatccatcgtgacagtatttcttgcctacgtgggaattggcatggggaaaagttgggatgaatttaaagcactcggtccaaaggctgtgatcattacaattctcgttatcgcgtccacctacctgggacttgctttggtggcccaagtcatactgatgttgactggtgtccagatctga

SEQ ID NO: 8592 - DNA, 897 bp, synthetic construct
  source 1..897: mol_type = other DNA
ctgtcaataatatcaaagcgcaacaacgatacggaggatattaggcatatttatcgggataagactgacaggcgtattctgaaaaagaacccatggaaggactatggactccacattagcgtactgattctggtggtaatcgccgagctgattggaccaatgaagattcccgtggccaagggcgtcgagatcagcataatgcctctcctctacaccatgatcctagggttaatattttacttagctaaacccatcacctggatacagcgcaagcagtctagagtggctgaaggagccatgatgctctttatcggtgttctgatcgccaaactggccgtgagcagcggccagtctatccacctgattttcgagatgggtccggcgctgatgctgcaggaactcgggcatctggcgacaatcctgatcgcccttcctattgcattgctgcttggattcaagcgggaggccatcggcatgacctcgagcattggccgggagcccgaagtcgcagtggtggtggacaaatatggtttcaattccccggaatcaagaggcatcttcgcacttttcatcgtgggaaccatcatcgggacagtgttcatcagtttcttgaccagtatctgcgtgagcgtcatacccctacacccatacgccttcgctatggccagcggcgtcggctccgcatccatgaacgctgcctccctcgctcccacggtggcggcctttccacaactggcaactcagatcgaggcctttgcaggcttcagtaatctgctctcgttttccgttgggatctacattgtcatatttgttgctatccctttgacagaaaagctttacgggatcttggaacctaaaatcggacgagaccccattgtcgacgaggaggaggggtga

SEQ ID NO: 8593 - DNA, 1269 bp, synthetic construct
  source 1..1269: mol_type = other DNA
gtgatcataatcaatattctacatattggcatagacgacaccgattcccctgacggaatgtgcacgacctacctcgctagccagatcataaataaattcgaggaaaacggcatcaacctggtggactacccacggttgataagactgaatccttttgctcggtttaagactcgaggaaatggtggggtcagttttaggattccaaaggatgacaatgtggatctcgccaagaagatcgttctggaagaggttgaaaaactctccatgttcgactgcgataacacaaaccccggtgtgatattctacgacggagagattacagaagagatggagaattatgcctttcgcgccatctacaagttcatcacaatcgaggaagctgagaagcttgcaaagagcgtaggctgcgagatccacaaattcaaaaagggaaggggcatcatcggatcggtcgcagcgatcagtctgccgttgaaggactacacctttgaactgctgacctatcgcgcaagcgagaactatggaaccaaacgacagattgattacgacagcgtgtacaaaatggataaggagacctttcccgacacgttcgaaaacatcgattactcggaggagtacattgcaattgagcctaagacaccctgccccgtgctgtatgggatcaggagcaataacgttgagtcccttaagatcgccaaagacatcgtgcaggtctccgaacccatcgctgattggtgtatcttcaagacaaaccagcacacggacatgcacatccaaaaagtgagtaacatttcctctatggagcagttcggctgctacgagatcattggcgaggtcaaaaacaagcctaagatcatcgacggagggcatatgttcttctatatctcagacgattctggcgagattgagtgtggtgcctacgaaccaactaagaattttagaaaattaatttcacacctccgtccgggggacattataaaggtcttcggggggattggcgaacagaacacattcaacattgagaaatttcaggtggtcaagctgaacgatactgaatataagaacccaatatgtgaatgtgggaagcgcatgaccagcgccggtaaaaataagggcttcaaatgcaagaaatgcggcaacaagattcaaagcgataagaaagtgcccatcaaggtaactcggttcctcaaaaatgcgcagttttacgaaacccctgtgagcgccaggagacacctatcaaagccaatctgtcggatgtatctggactga

SEQ ID NO: 8594 - DNA, 933 bp, synthetic construct
  source 1..933: mol_type = other DNA
atgctcacgcgaggcaacttgctgcagcagaccgagaagttactgaaatcccaaggctttaagacctcagatatctacgagcacggttcgttcgacatcgtcgcgagaaaaaacttgttaatcctgctgctgaaaacattcctgaatattgacagcattaacgagcagaatgctcacgagatgaaccagctcgcaaatatcttcctggcctccccgatcattatcggcgaaaagtcacgtaacggcatcctggaagagggagtcatctacgaaaggtatgacattccaacaattggatttgagacgttcaagaatatgattctgtacaatgagtaccctgaaatactggctgatcgcggagggtattttgtgaagatcgatgggaacgttataaaacagtaccgggaggagtacagcatgtccctgaaggaccttgcaaacctggcccatgtatcccgcgcgacaatgtataaatacgagaacggcattgtccgggccaacacggaaactgcaatgatcctggaggaaatactcaataccaaagtcacccttgacatcgatttgctcaagcagccccaaaaggataagatagagtatagtgatgacgtgaaggacctctccaaactcgggtatggggtgctaagcactaacaagagccccttcgatgctgttgccaagatgaagaccagcgacaaacacagcccacttatggccaatgtggaaaagaacagaactgagaaaaccttgaaacggatggccattccactaaaggacctgagtctggtgaccacatcagaacctgtgtttatcataaataacgacaagatcaaggagtctattggtaagatccccgtgatcaagtcttgggagcttaaagagttcgaaaacagtaaagaactcctcaagatgatcagggaaaggaaagagaattga

SEQ ID NO: 8595 - DNA, 387 bp, synthetic construct
  source 1..387: mol_type = other DNA
atggagaatctccagattaccaaaatggaaaaccacccaatcaagtggatttgcaacttcaaaggacaaacagctatcgggatctgcggcaaaacccagaagatagccatgttcgcctctgacgaccgggtgagcaaaatcctagatgatattgtgatcggcactgacgaaagccaggagggctacgggtgtgaggaaaagaacaggtgctgtaacttcgactgtgaactttgcgagatttcaccccgccagtacctgcagatcacgggaaagaagccttccaataagaatataaaagacctgatcaacggtctggcagatttgaacaatagtctggaggagaagaacctcgtcccgtttgaggagtatgaagtggtaaatttttga

SEQ ID NO: 8596 - DNA, 795 bp, synthetic construct
  source 1..795: mol_type = other DNA
atgttctttgatgacctgacatttaaagagaagatcatacccaaaaccatcctgggatacagcccattcgtggccgaacccttcttggggcaccgctccatgctttacaagcgggacttgtacgacaatccccaggccatcgccgacgtgattgtggagagttataaccagggagtgagggctatcaatctgttcaatgactcccagctgctgaaagcatacgatatcgcttgcgaccaggggtgcaacatgaaggtaatagctaccatcggtaagaccgaggtggattacctaaacccaaattatgagatcgccaaggagaccgactgggatgatgatatcgagctctttaatagctacgattgtcccctcatgctggttgacgagttcattgtcgacgcctatgactggagactgacttcaaagatattggactgcattaacgatacagatagcctctccggccttatcacggccttcccactgaggacaactaacttaattcctgaaaatctgaacatggatctttttgatttttatatggttcctttcaacgcgatttcttacatgatggacatcacggccttcaacgcatcacagcgagaggaatttaagcaaaagctcaccagtctgaacaaaaaggtcattgccagccggattttcgcatgtggcattctaaagccgaaagaagcattcgagttttacaaaaagatagactacatcgacctcatctcgatcggcgtggctaaggtcgaagaggcgcgcgaagacttcactctgctcaaagaatattga

SEQ ID NO: 8597 - DNA, 339 bp, synthetic construct
  source 1..339: mol_type = other DNA
atggttagcatggaggaatttcccataagctccgccaacttcatttcaggctataagatcgtggagaataaaggcttcgtctacggtctcaccgtacgagccagagggatcgggggagacattggcgctggtctgaagggcctcctgggcggagagatcaagcaatacgtgaccatgatggaggatagccgggaggagtctattcagcgctgcatcgagcacgcgaaagaactgggggcaaacgccataattagtgtcaggatggactccgacagtatctcgcagaacatgcaggaagtgctaacatacggaacggcagtgatcatcgaaaaggaatga

SEQ ID NO: 8598 - DNA, 1575 bp, synthetic construct
  source 1..1575: mol_type = other DNA
atgaaggtactgatcgctgatgccatcaacgagaaggggattgagaacttaaaagaggtcgccgatgtggttgtgaacaccagcatcacccccgacgagctggcagataccatccatgaatacaacgggatcgtagtccgcagccgtacaaagctgactgccgacatcattgagaaagccgacaacctgcagatcatcgcccgagctggggtcggcgtcgacaatatagaccttaacgcggcaactgagaaaggaatcatggtggtaaattccccagagtcaacaagcgtgaccgttgccgaacacacaatgggcttgattctcagtatggcccggaaaattagcatagcagataaatctgttaaagaaggcaagtgggaaaagaaaaagttcatgggggtggaactgagaaacaagaccctgggggtcataggcatgggccgcattgggtctcaggtagtcaacaggtgtaaagcgtttggcatggacgccatggcctacgatccatatctgccagaagaggtggcaaaacagatgtgcgtggatctgacggacctggagaccgtgcttaagaatgcagacttcatcacaatccacgtgcccctgacaccggaaactaaacactcaatttccacagagcagttcgaaataatgaaggacaccgcctttatcgtgaactgtgctcggggtggcatcattgatgaaaaggccctgtatgatgccttggtgaatgacaagatcggtggggccgcactggacgtgtacgaagaggagccgcctgccgaggattcaaagctctttgaactcgacaatatcgtgctaacaccccacatagcagcttcgacgaaggaggctcagcgggacgcggccatcattgtcgctgatgaaattatagacttagccaatggcaacactcccaagaacgtcttgaaccttccacggatcgacaagaacacgtacaatgagctgagcccttacatggaactgtgcgagaagcttgggtgctttgtgagccagggcatcaacggcaagctcaaggagattgagattatttacagcggcgagctctccgagattgacaacctcgagatactctcccgcaccgtcattcagggtgctgtcaatcccttcctaagttcgccagtgaacgcagtgaatgctgccctcgtggcgaaggatcgaggaatcagcatcaccgaagggaggaaaaataattcaaagggctatgagtccctgattaaggttatcgcgaagagtgagaatgaaaccttcacggctgaaggaacccagctgcatgaatccagaatcttgaaagtgaacgactattgggttgatgttattcctaagggacacatgttcatcgctaaatacgaggatgtgcctggaagtatcggtaaaatcggtaccaaactgggcgagcataacgtaaacattggaatcatgcaagtgggaagggacgagaagggtggaagagcaatcatggtgctaactctggataaggaagtgcccaaagaggtcattagcgagatccaagccctcgacaatgtttatgaagccactggaatagagctttga

SEQ ID NO: 8599 - DNA, 681 bp, synthetic construct
  source 1..681: mol_type = other DNA
atgagttttatctcaaagctcttcggcaataacgacgacgagtttgaggaggttagagtcgaccgggaagttctgaacagcgtgatctattacagcaagcaggcctatccaaatgagttcttagcctttctggatggtaagatcaaaaaccggattctctacattactgggctgatctttatccctggtgaaacctgcgagaccggggccgtcatccactccgagatggtgccaatgaacacaaaatacttcggcagcgtgcactcgcaccctggacccagtgcatccccgagcgatgctgacttgatgaccttcagcaaaaacggatacttccatatgatcgtgtgtttgccctactcttacaacacatttaaagcatatgacaggcatggagaatccattgattacattgtgggggattatgcgtatctggtcaacgatgaccttgacgaatttttcgacgaggatgacgtgctgacggacaatgatgagtttaaacccggcttcttcgatgaagatgacgacgaatttttcaagaatctcgatgaggagaaggtgaatcactacgacgagttcgaaaagcgcaaccaaataaacaaccagctaccaaacaatgtaatcaagatagagctgaataatgacggcaacgtcaaaaagatttcaaggcgattcaaggactga

SEQ ID NO: 8600 - DNA, 723 bp, synthetic construct
  source 1..723: mol_type = other DNA
atgaaggagtacgaggtctatagctcgctgaaggtgccaataaactctaaaatcatcgttcgtttggacgggcggaactttcaccaactggctcgggacctcaacctgattaagccatatgatgagaacttctacaaagtgctttctaaggtgtgtgaagaccttttcaaggagttttcacctatctttatctacgcgttctcagacgaaatcagcctactgttggacaatattcccttcaatgggcgcatcgagaagatcgattcagtaatggccagttttgcatccagttcctttgtgattaattacaatgccaaattcaagaaaccccctagctttgacagccgggtgattcccatctccgacgatgatgtgctcgagtacttcaagtggcgacaggacgagtcctggaggaactgcgtcaattcccacggcatcttccacctgcgctcgaactatccggaaaatctgagcaataacaagataaaaggcatgaacctgagtgatatacatgaactcctgttccagaacggcatcaacctgaatgacattgacacatacaaaaagagaggaattggagtctataggaaaaacaaaaaggtggtcgggttcaacaaaaaggaaaataagaaacagatcagctacagaagctatgtttgcaccgattggaatctcccaaaattcaacaaggagtttttcaagaacatgggtgtattaaagtga

SEQ ID NO: 8601 - DNA, 765 bp, synthetic construct
  source 1..765: mol_type = other DNA
atgaaggtcgggattataggctgcggggctatcgctaacatcatcactggcagcatcgccccagaaaacaatggtatagagatcgcatacttttttgataaagacgtcgagcgggcagagaatctggccagtctggctgggggcgtagccgtcctgaattttgatgacatgctgaacgatgtggatctcgtgctggaatgcgcttcacccgactcggttaagaagtacgctcccattatcctcaagaagggaatcgacatgattaccatgagcatcggcgcattcatggacaaagacttctataacgaagtgctgaagatcgccagagagaataacgctaagatacacctcccatcaggcgccgtggtgggcctcgatggaatcaaggcggtggccaaattcggtttgaaggaaattaatctggtaacccgcaagagcccacggtctcttggaaaaaatatcgacattgaggaagttttattcgagggaaaagcctccgaggccgtcaaacagtttcccctgaacatcaacgtcgcggcaacaatttccatggcatgtaacagggacatcgacgtgaagataattgtcgatcctaaagtggaccgcaacgtgcatgagattacggccaaaggggatttcggggagtttaagacaaccactatgaacttcccttgcgaggcaaacccgaagacaagcatgctggcggccctttccgccattcgactattgaaaagcttcaatgaaaccatcagtgtgggcatgtga

SEQ ID NO: 8602 - DNA, 402 bp, synthetic construct
  source 1..402: mol_type = other DNA
atggtggaggtgtccaaattgcgctcactcgatatttatacgaacacaggacactacgttggccgcgtagaggacgtcgtcctgaatatcaggcttggaaccataagcaaactacaggtgagagctattgagcaagagcgaaaacccgccggcgttctgaacagcttcctcgggagtatcaggggggaggtgcccgaagaaaatgatatgaagtctttccaaaatgacctgctcaccgtggactttgataaggtccaggcaatcggcgacatcatgctgattaaccctcgggatatcaagaagataaaccctgaaccgcaggtgccagacgcggtcgccccaaagcagcccgaaactcagccacaggagacacaggtgcagttcgacgccgagcggctgtga

SEQ ID NO: 8603 - DNA, 723 bp, synthetic construct
  source 1..723: mol_type = other DNA
atgtgggacactaccaaagactaccgaattttggtggcttcgaaggcacgggagaattacctcaacctcataccaaccgcgagctttagaggcagttggaacaaaaagcaggctatcgatctaggaaagcagatgaacagcgacttccagtcattgatctatagctacctcgagggggaggaactggtgaactctcctgatgtggcctcattgaaggagaaaggggagaagataattgaatatcttggaggccccgactggaataagaagttcttatccaatgcccctaaagaggatagggaaaaaacccaggagaatatcgcaaaggtccgctttttcctggacaccatcatcggcctgaaggacagactgagcctggggccgatcaatgatcccattatcggggtggacattagggtaggggaggtaatgagcgttacgaaacaccctaagaatgacaagctgctgatctgcaacgtgaacctgggcaaacgggccattacagtcctcactaacgatctgaatgtgaaagacgataacaaggtgggtgtctccctgctccccccccaatcctttagtgacattgtcagtgagggaatgttccttggcatgaatggaaacatactgaagagcgtggagggcgaacttggtgaaatgccaaagggcatcccaatggaatccctcaacgaaacacgcaacctggttgagaactacctaaaatga

SEQ ID NO: 8604 - DNA, 1413 bp, synthetic construct
  source 1..1413: mol_type = other DNA
atggatatgttgatcggcggaaagcacatttcaagcgaagatcttgaagacgtgattaatccgtacactggggaggtaattgacaccgtgccaatcgctcaccggcagactgctgagctggcgattgagtcggcaaacaacgcccgcgagagtctgtcggaaatgagcgcattcaaggtgtcaaataatctgttcaatgttgttcttaagctgaaagaaaagcgtcagatgttcgccgaaagcctgaccctggaggtgggcaaacctataatcgaatctctacttgaggtcgacaggagcattgagaccctgaagctcgcagccgaagaggccaagcgcatttacggggagtccgtacccttggacgccggcatgggcggtaagggatttttcgcttttactcaaaaggtcccactcggggtggtggtggccatcacccctttcaactatcccctcaatttgacaatccacaagatagcacctgctatcgcctgtaagaacaccgtaatcgtcaaacccccaacagaagcccccctgacagtgatgaaattctgcgaactactgaatgaagagtttcccgacggtgttgtcaacgttgtgaccggatacggttctgaggtgggagatcatctggtggtcagcccggaggtgaacaaaatcagctttacgggatcagtcacaaccggcctcatgatctcccaaaaagctggcatgaagaagactaccttggagcttggcggaaacgacccaacagtgatcctgaaggatgcggacctcaataatgccgtcaagggcattgttaatggcgccttcctgaatgcagggcaggtgtgcatgggtgttaagagagtaatcgtcgaggatgagattgccgacgagtttgcagagaagctcgtggcggccacgcagaagctcgtcatgggaaacccactggactctaaaaccactctgggcaccctgatttccgagaaagctgcgatacaggtggaggagacagttaataacgctgtgagtatgggggctaagatactgacgggagggaaccgggatggtgcattctacgaggccactgtgatcgataacgtaacaaccgacatggatttaatcctcaatgagacctttggccctgtcgcacctattatccgggtgaagaacgtcgacggggcgatcgaagtggccaacaacacggactatggcctccaggctggggtcttcacaggcgactacgcctccgctatgagatgcgcccaggagattgaaactggaacggtgttcatcaacaaacagtccacatttaggactgataacatgcccttcgggggctttaaaaacagtggggtgggcaaagaaggaataaaatatgccgtggacgaaatgaccaaaaccaagttaatcggtctaaacctgcgatga

SEQ ID NO: 8605 - DNA, 582 bp, synthetic construct
  source 1..582: mol_type = other DNA
atggaaaccaccagatttgagacattttttgacgcaatcatagccattatcataactgtgcttgtcctaaaagtcccccaaccagcaaccccaacgatcggcgccatcttaaagctgaacacaatcttcattgcttatcttatctccttccttaccctgtacaacctctggtatgccaatcataacctgctcaaaatcatagatattattgacaactccgccgtgtggagctacggagcaatgaccttcatcctgagcctcctcccctattttactctgtggctggctaacgatattaattcgatacctgccgagacaatgttcggactgatcttcattttcacccacattttcaataggttggcgacgaagtcaatttaccgcagcaacccgtacaataagcagttgattgaattgaactttgactcccacatccagagtatccccctgatcattctgatcatcggcttcatcctaacttatacaatctacgcccctgggatctacgtaagctgcctgctggcggtgattttttggatctcactcagtaaaataaagcgggggtgtaataacggcaactga

SEQ ID NO: 8606 - DNA, 573 bp, synthetic construct
  source 1..573: mol_type = other DNA
atggagaccgaaaggtttgaggccctgttcgacgcgattctggcaatcataatcaccatgattgtgctggagattcccctggccagcactggcagttgggaagctctcttcgacttaaagtacgagttcctgatctacgccgtctcgtttatcgtctgctttaacttttggaattacaacaataatatcttccacctcgtaaacaagatcgactacaaagtgatatggaccatggcaattacactgtttgtgttctcctttctaccatacctgacctcatttgtgggcgaaaacttctatttgttcctaccacagtttctgtacggactcagcttcatcatcactgccatcctgagcatgataattgggaacttcctcaaacaggctgatcctggaaacatcgctttgcatattgcactgagtaagcactatccgatgtatgccacgataatcacagttagcatcggcatgatcattggttatttcatctaccctcccgcgatcattgcctgctgtcttctctccattcttggggtgtggttcataccccggattatcttccacatgaagtga

SEQ ID NO: 8607 - DNA, 948 bp, synthetic construct
  source 1..948: mol_type = other DNA
atgaacctggtcttcaaatttatcgaaaagtattactgcctaatccttttgttccttgttgtcatcgccctcatttatccaatcagcttcaactgggtgttgaatagctacggtaacctgaatattctcaacctgctgctgagcattgtcctcttcacgatggggacaaccctcaaggtggacaacttcataagtgtgttcaaaaaccccaaggagattatcattggaatctcctcccagtacattatcatgccgttcctggcctttgcgctggctagcattttctccctcgatgcagccctaactgtcggcgttatcttagtgggcaccgtgccgggggggacggcttccgatgtaatcacatttctggcaaagggcgacgtggcactttcagtctcgctcaccgccatcagtacttttctgtcacctattgtcacccctctgatcaccctggtgctgatcggcaaccagatcgctttcaatcccgtggacatgtttctgtctattgttcagatcgtcatcgtgccagtcatattgggactgttgcttaattataagttccccagcttttgtaaaattctggaggaatacctgcccggcatctccgccatcgtagtgtgcgtgattgttgcggggataatgggtgctaataagcaggctatactgacaagctcgctcgtgatcatggtagtgatcataacccaatacttcttagccatggccttaggatgcctcatgggctaccttttcggaatgaagcgggaacatattattacaatagccatcgagctggcttttcaaaacagcggcctctcaaccagtctggccaaaactcacttcccaaatctattgatcgccacggtgcctggagcactgtattctgtgtggcagaactttgcagggtccataatcgcgtatctcctgaacagttactttattgaggagtga

SEQ ID NO: 8608 - DNA, 183 bp, synthetic construct
  source 1..183: mol_type = other DNA
atggacgactccgcacagaccagcgccgagttcatcctccttttcggcggaatatttgtagtggtcctactggtgatctatatgtacaacaactacatggatgacctcgggggcgagattaagagcaaagaagtcaatgaatttaataaccagctgaacgcgctgaaggtgtacttcaaatga

SEQ ID NO: 8609 - DNA, 927 bp, synthetic construct
  source 1..927: mol_type = other DNA
atgaaattcaacataatcaacaacctgactctttttttagacaataacgttcctgagaagtatctcttcaagataaatgaatttttgctgagcgggtcgatctctaccgaggctagtaaggtgctgagcatcattataatcttcatcctcgtaaccgaaatttttctagtaatcgcgctaactctcttcaacttgcccttcagcatcctgatcttcccatttttcattattccaatcatttttacatatattattgtccaacaggagaaacgcgctcaggagatcgagcataccgccccagactttctgagacagctgtccagcatgcttcaggtgggcctgagcttcgaaaatgccatggaggacatgtcccactacagcagtgggcccctctacgacgaaatcagaagggcaattatcgaaatccggatggggcaaaatttcgatgacgcatggcgggcgatgagtaagcgattaaagtcaaaggagcttgagcggatcttcgggatcattttggatggcaggaaaagtggaagcagcatttcaacagtcctgctcgatgtgtcaaacgatctgagggacctcatggcccttaagcgtgagcgcaaatccgctgtcatgatgtcagtcatgttcctgctcatctcggccattgttgccacgccctttgctatgggtatggtgagtgtctactctaactttatgcagagctacggcatggagtctgaaatgattatttccgccccgctcgtgggcgaaatgtacctgatcatccactctttcttggtgggattcataatctccgtgatcatgtacggcgaggtgaaaacgggactgaagttctccctgcctctggtggccgcaagcttcggaatattttatataatctccacctttggcggcacactgtttatggggggtttctga

SEQ ID NO: 8610 - DNA, 1017 bp, synthetic construct
  source 1..1017: mol_type = other DNA
atgaacctgcacttaaataacatcctaaaagacatcaaaaaagacggtgtgcaggcttaccttctgacccagtttaccaatatcgagtacatttcgggatataagcctaccagtttcgctttctgcatcctgaaggaaaacccaatcatctacgtgtccggcatggatatggagatagcaaatcgcgatagcaccatcgaggtcaagcagtacgagtcctatgacctgatgataaaggagctaaaggaggaaggaattaaaaaccttgcaattgaacccaccctcccttacagtacttacgcccgcttcaaggacgattttgagatctctgacaagtcatacgtggataagcaaagaatgatcaagaccccatctgagattgagaaaatcacaaaggccacggaaatagcccagaaatcatttctccagctggatattctcaataataacggcacagagagggaagtggccttcaatctggttcggtacatgatcgataacggcgcctcaaaagaaagcttcgagacaattgtcactagtggagccaactccagcctgccccatgcgattcctgaggcgaagaaactggaaaggccaatcttgatagattggggagccatcttcaagggctactgtagcgataacacgcgtaccatcgtctatgctgaaagccagcaagaaatttgggacatcgtggcagaggcgcacgacaaggcaataaaatcggttaaggtgggtatgaagtgctgcgaagttgataaggtggctcgagacatcattgctgaatatggttatggggacaactacatccactccacaggccacagcctggggctcaatatccatgagactcccgggttttccgcccgggacgagacggtcattgaaaaagggatggtaatcacagtcgagccgggcatatatttggaggggaagttcggagtgagactggaggacactgtgatcattagcaagaaagccaacgtaattggcgacctcccccttaacattgagtga

SEQ ID NO: 8611 - DNA, 642 bp, synthetic construct
  source 1..642: mol_type = other DNA
atgttcaagttcacgagcagtgagatacgcgacctcataatcgcgtttatcgttatctctctcagctttgccatcgtgaatggtggcaggaacccctctgctgtgcttagcattctgccaattgttatggtgggggtgggagccgggttcattctgcacgagctggggcataaatttgtctcaatgaaatacggctactgggccgagttcaagctctggccccagggattgatatttgcccttgtgagctccttcctgggattcgtgtttgccgctccgggtgctgtctatacttacgcaaattacatgacagatgagatcaatggcaagatttccattgcaggccctgttgtcaacattattctggccctgattttcttggcaatctgtgtcgccatctatcccagtgcctttaactccgaaacctcagtactcatattcatcatctgctccgtagggtattcgatcaacagtttcctggcggcattcaacctaatcccaattggcaacctggacggaagcaaggtgctgacatggaatgctggcatctggactatcacaatcgctatcgccggaataatgaccgtgatgtctatgaccatgggggtggaaaccattgtccggatcatcttaggcttttga

SEQ ID NO: 8612 - DNA, 1203 bp, synthetic construct
  source 1..1203: mol_type = other DNA
atgacggagaagctcacctacttcgaaggaacccaccgagtaatcgcaccgaaaaagacgattgaaataaacgaaaataagctgaggatcgctggcattacacggattgccgacatcacggatctcgacaggatcggaatgcccgtgttcactgcaatcagaccaacggccgaggatggggctatcagcatttatggtggcaaagggatctcaaaagaccacgcaaaagcttccgcgatgatggaggggtttgagcggtattccgctgaaaagcaggaggccgacgagaccctgatcgccactaccagcgccatcactcagaagggaaaatatgccaatcctaaaacactgaatctgccgcaaaagtatgagaaagaggatattagtaagataccccttgaatggaacatagccactgacctcatttcgggggaggaatactacgtgccttcaaatgcagtcttccacccctacaaccacgagaacaacgtgcagagtctgtttaagtcaaacaccaatggcctggcatccgggaatattttagatgaagccatcttgcatggcatcttcgaggtcatcgagcgcgacgcatggagcatctttgagctgactcataagaactatagccagattaagctggacagcatcgaaagcgaacttattaacacaataatcaacaaattcgagtctaacggaattaagattaaactgatggactttaccgccgacattaagattccaacaatcgccgctagcgccgatgacaccattaccaaggatgccggactattgacattaggcatgggcacccacctcgatcctgaggttgccgtcttgagggctctcacagaggttgcgcagtcccgagctacccagatcaatggtgcgcgtgaggacaccgtccgcgccgactttgctcgggaggcaggctatgaaaggatgaagagaataaataaatactacttccgcgaggaggaaaagcaaatcaacttccaggatatcgaaaacaagtccacaactagcatcaacgccgatctggatatcgtgaagaaggaactgatagcgaatgacatcaaacagattctgtacacgaacctaacacggccagaactgaatgtgagtgtggtacgcgtgataatccccgagatggagatctacgccctcgaccccaccagagctggttaccggttccttagagtgtga

SEQ ID NO: 8613 - DNA, 651 bp, synthetic construct
  source 1..651: mol_type = other DNA
atgaagatcataatctataccggattgagtatccccttcgacgaagccaaggagattctggacagccatgacaacatcgaggtgatctacaagaagccgatcaaacgcggagatttggggcacgacattaaggagaatcccgatatcatcgcaataatagatggggttttccaccagaactccgcagttggccatcgggagattcttagcgtgatgaagaagggagtgaaggtgtatggttcgtccagcatgggggctcttagagcgtcagaactggacacactcggcatggagggcgtgggctactgctataatgagtacgccagtggcaatgtcacatccgacgatgatgtcgccgtaatgctggactcagataccctggaagccatcagcgtgccactcataagtatgaactacgtcttcactaacgctgtcaacgaaaatatcctcacccaagaggagaaggacgagctgatcaggatcacgaaagaaacctactatcctaagcgaaactacgctcagacattatccaaatctggtctgaatagggacaaaaaagaaaagctaattaactttattcggactagcgaagatatcaagaaagaggacgcgaaagccctgctcagccacattaaatacgtgattgagtga

SEQ ID NO: 8614 - DNA, 1011 bp, synthetic construct
  source 1..1011: mol_type = other DNA
atgagactggaagacaaaatcaacatcgttaggaatatcctaaaagacaagaacgtggctatcggtttttcaggggggagcgatagcacactgatcatctatctcgctagtatgttcgccaagaacacgctggccgtcacaatagataatcatctgatgcccactgagtttatcgaacacgcaaagagagtgacatcctccctcggggtgaaacacgaaatcatcgacatagatttctacaaggaccctgatttcttgaagaatacgcctaagcgctgctatacctgccggaatttgatgtacggcgaaatcaagaaggtggccaacgagaacggctttgactacatttgtgacggcaataacattagcgacctagtcgacaaccgtccgggcatcctcattacctacgcgaatgaatttaagacaccactgatcgaagcgaagctgacttccaaagagattcatgagtacctggacaaaaacaacattccctactcgaaatctaccacttgccttgcaacacgcattaagaccaacaccccaataactaaagagaaaattgagaatatcagttattgtgaagattacattctgtccaatactgagtgcgagacagtaaaagtgcgagatctcgggagcatatgtatgtgtgaagttgacaagatcgacgaaattatcaacgagaataagttcaaacagattaatgacgaactgaagaaacagggatacgagaaggtcagccttaacctctcagagattaagaataacggcgagatcatcctgaactatatcgatggtagtttcagctataaactgcccttcaccatcaacattgccgacaccaagaagcagcttaagaacaaaatcatttgccaaaccaaagagaagatagagatagagaacatcgatatcttcgacacgggattaataaagggaaacaattttaagaactacgaggatgccctgaataaattcatgcacgtgctcaccaagttgcggaggaacatttga

SEQ ID NO: 8615 - DNA, 459 bp, synthetic construct
  source 1..459: mol_type = other DNA
atggctgttaacccagtcctggtgatcaaggtcgtagataataccagtgtgggcgttcgcgcgcggctgtatgatgacttcagcgaacacaacattgtcctcaactccgtgctaacttactggtgggcaaataacatgcccccagccgtgaaattcctcgaactctttgactcggtcatcaagagaaccatcaatgagataatgccccataaaacacttaacctgaagtacgaggtgaaggccgatgacatactggaaaatgcaagccagatcgaaatcaccttgatttccatcagcgccgatggagtagggtttaaaattgacggcaaatctgtgttcttaaaggacctgaggaaagtggaggaggatttcgagcctaaggaattttcaacaactttcgaccagtgcatcgagacgccggacattgtgctgaagaaatacaaggagatgaagaactga

SEQ ID NO: 8616 - DNA, 846 bp, synthetic construct
  source 1..846: mol_type = other DNA
atgctcgtaaaacggacaatgagcaagaacgtagtgagtgtgtcggtgccaggcaacagagacaaggttctggacttgatgaggaaagagaaaaaggcagtcctgcccgtggttaaaggcgacaccgacatattggtcggaatagtgactcgttccgatctaatcaacaatcccgacgaagaacagatcgctatgctcatgagcagagatctcatcaccgtcagccctggggatgacgtcattgatgcggcccggaaaatgatggacaacgacgtgcgccgcgttccggtggtggacgacgatggcaagctggtgggaattatcacatccttcgatctggtgtcaaatgctctgactaagactgagatcaacgatgttgtggaaaactatatgattactaccgtccccacaacctgggagaaggccccattgaacgtggcatttgaatctatgaatcaatttgggctaaaatccatactggcacttgatgacgatgccaagctgtccggcatcttaaccgaaacagacttcatttccgaaattgagattatctcggagcgaagtgagcacagcagcaccgtgggtacggagggagacaagtggtcttgggacagcacctcagtactgtacatcgagaaaaatcatctgaaattcacggataagacagtctgtgatgtggccgtcggtaatgtcgaagtagctaactctaagacgaaggtgtcagactgcgccaagaaaatgaagaccctgaacatcgagcagattcctgtgatcggggtggaggggaatctcgtgggccttgtcagggcgagtgacctcatcaaggcccttgttccacaggagtga

SEQ ID NO: 8617 - DNA, 423 bp, synthetic construct
  source 1..423: mol_type = other DNA
atgtataaaaagatcctagtcccaacagatggatcggagtttgccaaaaaagcccaaaaacacgctttgttccttgccgagataagcggggcggagataatcgctatctccgttacggagaataacttcgttaacggactgcccctcgacgatgaagtataccagctgaaccagatcttaaaggaaaggtctgaggagaatctgaaggaatttgacaagctgaacgaaaacgatctgaagatcacccatattgtgcgggaggggtcaccggccaaagtgattctcgaggtggcaaaggaagagaacatcgacctcatcgtgatcggcagtagtggtaagagcggcttcgaccgcttcattatgggctccgtcgccgacaaggtggtgaatagcgcgaagtgcgcagtgctggtcattcactga

SEQ ID NO: 8618 - DNA, 1155 bp, synthetic construct
  source 1..1155: mol_type = other DNA
atgttcacgatcgctaatggcatcatcttgaaaggcaaggacctggtgcccactcgcgagaacatcgtggtggatgacggacgaatcattgagatcggaaagggcttcctagagggtaaaatcatcgatgtggacgggagcgtcgtgtgtccttcttttataaacggccatatgcacattggggattctatcattaaggatgaggggtacgggctgagcctgagtgagatggtgaaacctcccaacggggtgaagcacgtcgctctgtccgacgtgagtgacgacgagttgatacaggcgatgaagtactcaatgtgggatatggtttacgggggaaccacccacttcatcgattatcgtgaagggggacttaagggggttaagctgctcaggaaggcctccgaggacattcccatcaaaccaatcattctcggccgggacgacagtttctacggtgacgacccagacctcagcaaggtaaagatcgccattcgcaaactgctgaaattcgcagatggcatcgccccgagtggtttcggcgagataacaatggatgttgccgaactcatttcaaaggaatgtgaaaaagcaggtaagatcagctccattcatgtggccgagtcggaattgaatcagatcgaaagccttaatgcttgcggcttaagcgaaatcgagaagggagtgattaacaacttttctcagcttgtccaccttactaacccaaaaaatgaggatctcaactcggtgtccgtaagcgctcaaaacgtcgttgtctgcccaagagcgaatgcaaccctgaacgtgggcatagtgcctttaaacaaaatgctggacctcggaatcacacccttgctgggaaccgataacgtaatgattaactcaccgaacatgctccgggaactggagtttaccctgaaaataatctctgtctattataagaagtatatcgatccctccaacctgctgaaaatggccacaaccaatatttgcggcttcggcatcaacaatgtgatcgacaagagcctaatcactgaggacaacctggccgaatttaatgtcttcaactcattttccaagaatccttacctcaatataataaatcggtgcgagacgaagaacattctgtacaggattaatagacgcacaatcatttga

SEQ ID NO: 8619 - DNA, 531 bp, synthetic construct
  source 1..531: mol_type = other DNA
gtgtatagggtgaagtacaacaataaagattatggggagtttaagaaactgagcgacgcactctacgagcgagatgccctgtttttctgtaatttcgactatgacctgctggttgaatgcgacctggaaaacaagtatgagaacatggtgctaccacccttccctgagaagagaccgaagggtcgcatcaagggaaccaaagtaaacaaaaaggaacgggagggggagatcctcttcaaccacaaaattaagaagttctacattcaaaaaggcgacgagacaattggccagtacgatacaatgaccgaggctttctactacaaaaagatactgatggccaacaagtgggataagaacatccttaaaaccaatatcactaagaagatcgaggtcaatataattattgacccagcggtggagtatgaagtccagctcaacttttgccccaaatgtaaaaataggttgaagatcggagagacggaatgccccagctgcggcatcaacatcgaagaatacttatttaatcggtga

SEQ ID NO: 8620 - DNA, 3177 bp, synthetic construct
  source 1..3177: mol_type = other DNA
atgccagtggataaggacattaagaaggtgctgattattggctccggccccatccaaatcggccaggccgcggaatttgactactccggatcgcaagcatgcaagtcactacgcgaggagggaatagagacagttctggtgaacagtaatccggccacaatccagacagacatcgacatggcagatactgtgtacacagaaccattgaccccggaagtggtggctaaaataatcaaagaagaaaatgtcgattcaatattgccaactatgggggggcagacaggcctgaatatcgcaacagggctcggagacttgggattgcttgacggcattaaggtgctcggctcggacgtgcagacaatcaaagatgtagaggaccgggacctgttcgcaaatctgatggataaaattggggaggagattcctaagtgtcatgcagttgaaagcgtcgaagcagccctggaagcagttgatgacattggttaccccgtgattgttaggccggccttcaccctcggcggcacggggggtggaatcgctcataacgaggaggaactcattgaaattgccactcacggactggatatgagtttcattaatcaggtcctcatcgacgagagcgttctcggctggaaagagatagagtttgaagtcatgagggacaaggaggacacgtgcatcattgtgtgcaccatggaaaacatagaccctatgggtatccacaccggcgacagtgtggtggtggcccccatccagaacctttgtgatgagacgatccagaagatgagggatgcctccattaagattatcagagccctaggcatccggggcggctgcaacatccaatttgcactgaacccagagaccgatgagtacaaggtcatcgaggtgaacccccgggtctcaagaagtagcgctctggcgagcaaggcaacaggttatccaatcgctaagatctcctctaagatagctctcggattaactctagatgagataaagaacgacatcaccaaggagacaccggcctccttcgagcccgccatcgattacgtggtgattaagatccctcgctggccttttgataaattcaaaggtgtcagccgtgaagtgggcgtgcagatgaaggccaccggcgaggtaatggctatcggacgaacctttgaggaggccttccaaaaagcactgaggtcactagatatgggcttcgacgggttcgagtacatcgactacactgaggaagacttggcgcatcctactgacaagatctacttccagatttattcagccataaaagatgggatggacattgacaagatcagggaaatcaccaatatagataactttttcctgtacaaaatccgaaacatcgtgaactttgaagacagtgtcaccgcggacaaactgaacgacgaggacttcctgagaaaggctaaacagattggctgttccaataaacgcttagccgatctgagcggccagactgaggagtacatcaaaaacctgctgagccgatacaacattaaacccagctacaagatggtcgatacttgtgccgccgaatttgaggccaagaccccctattactacagcagttatgataagggaaatgagctcgtctcaaccaacaagaagaaagtggtcatcctcggagcgggccccatccgaatagggcaggggatcgaatttgattactgttgcgttcacagctctctggctttaaaggaagagggaattgagacgatcctcatcaacaataatcctgagaccgtaagtactgattatgacatttctgacaaactgttcttcgagccacttacatttgaagatgtgatgggggtgattgagcaggaaaagcccgatggggtcatcgtgcagttcggcggtcagacatccattaatctgtcagtgcccttggccaatgcgggcgttaaaatcctggggaccccatatgagagcatcgatcgcgtggaggacagggaactgtttgctgaactgctggagaaattacacattcaccaggcgccctacggcacagctaattccttcgaggaggcaaaggaaatagcagagaaaatcaccttccccgttctcgtccggccatcatatgtcatcgggggcagagcgatggagattgtgtacgacaacaacgagctggaagagtatatgaaggaggctgtaaaagtaagtcctgagcacccaattctcgtggacaagtttttggaggacgctattgagctcgacgttgatattctttgcgacggcgaggacgtgttcatcgcaggaatcatggagcatatcgaggaagccggagtgcactctggagatagcgcctgcgtaataccccctcaaacaattcctgagtatatcctggacacgatccgggaaaattccaccaagctggccctggaactgaatgtgaagggccttatgaacattcagtatgccgtcaagctggatgaggaaatggtgtacattattgaagctaacccccgtgccagccggacggtcccattcgtcagcaaggccattggtgttccactggccaaagtagccacctggattatgcagggagccaaactgcgcgacttcgacctcaccaaggaaatcaagttaaatcacgtggcagtcaaggagagcgtatttcccttccttaagctgccggaatccgataccgtgcttggccccgagatgaaatccacgggtgagagtatcggtatcgatgaaacctatggcatggcgttctataaatcccagctcagcggaggtatggaactacctaaggaggggaagatatttatcagcgtgaaggaggccgacaaaaagaagatcagacctattgctgagactgccgctaacttggggtttgatcttatagccactgacggtactgccgacgccacgggtattgactcggtggagaagatactgaaggtctctcaggggtctcctaacatccgcgatgctatcctcaacaaagaaatcgatttgatcatcaacacctccgaagggaaacagtctgctaaagacgggtatataatccgccggcttgctatcgaactggggattccgtacgttacaacccttgcaggagccagagccgtgctcaacgcaataaaagctatccaaaataacgaaatcaatgttaagtcgctgaacgactacgtgggcggagagtga

SEQ ID NO: 8621 - DNA, 1083 bp, synthetic construct
  source 1..1083: mol_type = other DNA
atggtaaagatagctaagctggccctcgaagacggcacgatcctaaagggtgaggcattcgggtacgagaccactaaattgggcgaacttatcttctctaccggcatgggcgggtacaccgaatctctcactgacccgtcgtttaagggagagattctcatgagcacctacccactggagggaaaccacggtgtgagtgagaagtggtatcaaagcgataaaattcaggcggaagggtttgtgtgccgggaggtgtgccgggaggtgagcaacttcggacctcagaaaacactggatgattttctgaaggagtttaagactcccggaatcagcgggatcgatacccgtgacctgacacttaaaattcgcgagcgaggcagccttaaggccgcaatcacaacggaaaatatctccgacgatgaactaatcaacctggctagtagccagccaagtattgaggacatggacgtggtcccgctcgtgagtacaaaagaaatcaagatgttcaatggagatgctgataggaaggtggcgttgattgactgcggtgttaaaaagaatatcattaactcatttctggagcgcaatatcggcgtcatactgttcccctacgatacggactataagactgttctcgactattcccccaatgggctgatgatcacatcgggccccggcaaccccgatagggtcagcgaaaccatcgagaccatgaagaagctgtccaacagattaccaatattcggtatctgtatggggcagcagctcatagccaagtccttcggagccagatcatataaaatgaaatttgggcaccgcggcgagaaccaacctgtgaaggatctgaatactggcaaggtctttattacgtcacagaaccacggattcaccattgacaaagaatccctgaaagagaccgacctggtactcacccagatcaacttgaatgacggaacaccagaggggatatcccataaggaactgccattacattgtatccagtaccaccctgaggccggccctggccccaacgatacacggaatattttcgacaaattcaaccaaatgatggacgactactga

SEQ ID NO: 8622 - DNA, 1521 bp, synthetic construct
  source 1..1521: mol_type = other DNA
atggatgccaaatctgaggagatattcaagaagcacctgaacaactcgaaagaatatgtcaagttcaagaaacttgtgaatgaaacccgggtttacgacattccaaaggagttgaccggggagttacgggcctaccagaagatcggttattcctggatcgtgcagaacattaaatataactttggatgcatactcgctgacgacatggggctggggaagaccatccaggtgctcacggccattctgcactttaaagagcaaaaacattacgattatgagccatccctcatcatagtaccccctaccttgctgtccaactgggagaatgaaatcaaaaagttcacgcctacactttcctactatatttaccacggcgctaacaggacattccccctggacgagtacgacatcatcctcacctcatatggagtcatcagactggatctggatatgttcctggacaagaaatggttcatctgtgtgatcgatgaggctcagaacatcaagaaccccaacacacagcagaccaaagccatcaagagtgtccccgcatttaacaagattgctctcacaggaaccccaattgagaataagctaactgactactggtcaatctttgattttgtcaataaaggctacctgagtacgctggacaatttcaagagagattacgtttttcgcatcgagaggctagaagagacctcaactctcgagaattttaagactatcactaagccatttgtgcttaggcggctcaaaactgacgacaacatcaaggacgagctgcccgacaaaattgtgaacgacatatactgcagcctaaccaagaaacaagtactgctctataacgcgatcatggaaggcatttttgaggatttggaaggcaagacagggatcgaacgcaaagggatcatcctcaacattataactggcctgaaacaggcctgcaatcacccggcacagtacctccgtagcgacaaccctaagattaacgaaagcggtaaaatggagctgctgatcacaattctggagaatatcttggatgtgaatgaaaaggtcataatcttcacccaatatgccaagatgggggagattattaagaagctggtgtctaagaaactgaagacagacgtgttattcctacacggctcccttacacaggaaaagcgaagcgatataatcagcacgttccaggaagacgaagaccataaaattctcgttgcaacccttaagacgggaggtgtgggcttaaatctgactgccgcccagaatgtgattcactacgacttgtggtggaatccggccatagagaaccaggcgaccgatcgggttcatcgaatcggccaagaaaaagatgtgatggtctaccgcttcatcacaaaaggaaccctggaagaagtaattgacgagatgagcaagaataagttgaacctggctgaaaaggcaattagcaacgatgagactttcatcaccgagatgagtgatgaggagctgaaggagaaactttcgctcagactgtga

SEQ ID NO: 8623 - DNA, 825 bp, synthetic construct
  source 1..825: mol_type = other DNA
ctggacagaataattgaatacatgctcgaggaagacaagggatttggcgacattacgagcgaagcactggtggaaaaggacctggaggtgaacgcctacatcatttcaaaggatgaggggattctggcaggaatgaacattgtcaaagacctattcgaggagtttgacgtggaagttgtatataacctggaggatgggtccaaaattacaaaaaaagacctgctcatgtctgttaagggtaatgcccgcacaattctgctcctggagcgaaccgtgctcaacttatcaatgaggatgagcggagtggcctcggccgctagttactattcctctctcgtgaagaatcacgatgtgcggatcgctggtactcggaagacctccccagccctggctaagtttgacaaatatgcactcaaggtcgggggcgtagatacccaccgcttcagcctggacgatatggtgctcataaaggacaatcatatcgccgtcttcaaatctcccttggacgctctgctaaaggcaaaagccaacgtaagcttcagcaagaaaatcgaaattgaggttgagacactgtccgatgccatagagtgcgtcaagaataaagcggatatcgtgatgctggataacatgagtggaaatgaggtcaaggaggtcatcgacgaacttgaaaagttaaacatcagacagaactcccttatcgaagtgtcgggcggcatcactgaggacaatatcatggattacgtggagagcggggtggacataatctcaatcggcgcgcttacccactccagcaggagtttgaacttcagtttgaagatcgagtga

SEQ ID NO: 8624 - DNA, 894 bp, synthetic construct
  source 1..894: mol_type = other DNA
atggagattatatttctgggcactagtagcgcggtccacagctatacgaggaaccaccctgccattatcctcaaggcattcggtgagattatactgttcgactgcggtgagggaacccagcgccagctgatctttgctaaaatcagtcccatgaagatctctaagatcttcattagtcattaccacggcgaccacatcctcggccttcccggactactgcagagcatgaactttcgcggccgggagaccaagctgacaatatacgggccaaaagggttgaacgccctgaaaaacgcgatcttgaacttgggctactgtaaaatcgacttcccaattgaatttattgaaattgggacagagaccatcgagtgttgcgaagagtacatcatccgatcccagcatgtcaatcaccaagtgccctgcctagcctatgctgtggaagagcttaagaagccaagattcctccgtcaaaaggcaattgaactcggcgtgcctgttggaccggctttcggaaagctccacaatggcgaggaaatagaaatcaatgggaaaatcatcaagccggagcaggtattagggcctgccagaaaaggaattaaaataacttacagcggtgatactgcgccctgcgaagagatgatcgatttcgccaaagactcaaccatcctgatccatgagtcaacctacatgaatgaggacgccgataaggccgaagagaacttccattccacctcttcggatgctgccaggatagctaagaagagcaactccaagcagctggtgctcacacacttctccacgcggtatgcaaccctggacgatctgcttaaagaagccaagaaaatttttaagaatacaaagctggcaaaggactttatgaaaatcgagatttga

SEQ ID NO: 8625 - DNA, 756 bp, synthetic construct
  source 1..756: mol_type = other DNA
atgaacatatcagtaactttgaataatcctgcatggacgctgatctatatcttgattgtgattatcgccacgagcttcctcacgcggctaattgcctttttgatgaacaagatgaaacggttccacaacaatgaggctgccatttaccttaccagagacatcataaactatataatctatttcatcgcgttaatgatcattctgcaattttttggcatcaatctggccggcaccctgctaagtctgggaatcgcaggtatcgctctgagctttgccgcgaaggatctgataagcaatctcttctccgggatcacactcattatcggcaagagtattcaggtgggggacacaattgagattaacaataagaagggcatcgtggaacgcataacccttaggagcaccatcatcagcgatgactccggtgtgaaaaagatcatcccaaactccaccctgacaaattacccctacctccatttcaagactccagaaaagtaccgagttgacatccagaccggactctcactgaacattgatgtcgaggagttcgagaaatacattgtcaagaaaatacttgagtatgacggaatcctgaaaaacccgaaaccctccgtgtacagcaagggcatcacttttgaagagactcagctcaaggtctcgttctgggtgaaagaatttaacagcaaggataagtacaaactgacaattaccaacgaaattaggaagttcacaaaaatgggggagaaggacgagtga

SEQ ID NO: 8626 - DNA, 918 bp, synthetic construct
  source 1..918: mol_type = other DNA
atgagtaataccctgcaaaaagaaatcctgaagctgaaggaggagaagaacgcaataatcctggcccataactaccagcctaaagaggtgcaggagatcgcagattttctcggagactcactggagctgtgcattaaggcctctgaaatcgacgacaaggacctggtcatcttctgcggagtagacttcatggccgagaccgcatttatcctaaaccccgacaaaaagattgttatcccaacacttgaggctgaatgtccaatggcccatatgttgcccgaggatgtgctgctgaaagccaaggaggaaaatcccgacgccggcgtgatcctttacgtaaactccattgctgaagctaagcagcatgccgataccctgtgcacttcggctaacgccgttaaagttgcccagagcttgccgcacgacaaaatactcttcggccccgataaaaatttaggaactcacgtcgccgataaaatcgacaaggtcatcattcctgtgcctaaggatggtcactgttatgtgcacaggctcttccacgtggaggatgtggagctcaagcgggagcaatacccgaacgcggagatcatatgccaccctgaatgtgatatcaaggtgcagaaggcctgcgataaggtgatgtccacgggcgggatgctaaaatacattgcaacaagtgacaaggaggaatttgtcattggcactgaaatcgacatgattacaagaatcaatgcagaggtacccgggaaaaagctgtatcccctgctggagggggctatttgtgaaaccatgaaattgcacacgcttgaaaaaatacgcgatagcctcgtcaacgaagcgccacaggtcaccttaccaaaggacgtggcggacaagagcaaaaaggctgtgcagcatatgctcgacgtgtccaagtga

SEQ ID NO: 8627 - DNA, 1029 bp, synthetic construct
  source 1..1029: mol_type = other DNA
atgtggggtgtgagtatttttcgagagctgaacattgagttcagcaattttatcatgagctctttcgaatttgaaagcggaagaatcttaaaagacgtcaacgttgagtatagtacaatgggattccccaaatatgatgaagacggaaacatcactaatgcgattgtcttctgccccacgcttaagggggagagatctgtgttagccaacctgcataacgccctcactatggataatattagcaatgatgatgagtttgcttttatccgcgacaagaagtatttcttcattcggatcgtgtcactaggctcgccggagtcatgttctccttccaccaccgatctgaagcacaacttccctaactacacattcagggactgcgttaacttcaaaaaacagttcctaaaagagaagtttaatttggactccgttctggctattgtgggcgagggcgtcgggggctgcgaggtcttcacctgggcctgtgaatatcccgactacatggagtttatactctccatgaacaatctggccaaactatccggcacaagttacatctttttcaagagcatggagagtgtacttgagtccaacgataagatctatagcgatgtctacgacccatctctctccaaactcgttgtggccgtgaacaagatgctgttcttgaattacttgagccgcaacatgctgtccaacctgtcaagggacgagcttgacgcgctgctggacaactttgtcgaagatggtttgttccgggacgtgcacgacctcaagtacctttgcgactgtctcctggagtacgacgtgaatgacaaactgagcaatataaaggctaagaccatcctgatcgcaatcgaaggccaatttctcgtcaacgtggagaaggaagtgctgccactggaaaacgcaattgacgatgtggaggtaatggtgatccagctggatgagggggaatttgataatggggagtcatacagctcggtgttcaagatatttagtttcctcaatgaatacggagtagaatga

SEQ ID NO: 8628 - DNA, 279 bp, synthetic construct
  source 1..279: mol_type = other DNA
gtgattgtcaagattctgaactacggggacgtaggtaatctgaaattcattgagtacggcatctacggactgcttagcacacagatcgactatctgatggaaaacctcgaggaggaaaccagcatcaacgaggatgtgctcatcatcaagatgtattttgaatccaagctgtaccccttccagagcggcgccgcaaaattcaggctcgacgatttcgtcgctcgggaggaaatagagatggccatgtttttgtcaagttttctagaggacatggtgtga

SEQ ID NO: 8629 - DNA, 1011 bp, synthetic construct
  source 1..1011: mol_type = other DNA
atgtgggggatcattatttacgatgagaactatttcataagcaaaaacgagtatttcacactcaatagttttgaatttgagaacggcggtgttctgaacgacgtgaacgtggagtatatgtcattcggaactccaatttacgacgacaatggcatcataaagaacgccattgtctattgccacggatctctgggcagttacagctcaatcaaaaaacttgcccccttacttggcgagaacgatgctttcgacgaaaataagtacttcttcatctgtattagtgcgctgggatcgccagggtcctgttccccctccagcaccgatctgaaaaacaaattccccaagtactccatccgcgatgtggtaaagttccagaagaagtttctagctgagaaattcaacatcaatcacgtgctggggatgatcggtaactccatggggggctttgtgtgccttacgtctgcaatcaatttccccgactatgcagactttatcatttgcggcgtcagtagctacaaggtggcggggcatgatttcatactaagccaattcgttaatgaaatcattgaatctgacccggactacaataaaggagatttgacctacagcctcattagaacactccggatcgcctgcttggctgagtttaactttggactgtccaagaaggccctgagggacatgagcaagatcgaattatcctcggaatttgagaacttcggcaacgaaagtatcgagaccgacatctacgacctcaaatattgtaatgaggcatgcatgtactttgacgtggaagaagagctgggcaatatcaaatcaaagaccctgatcatcgcctgcaaccaggaccctcacttcccacctgagctcgatgccattcctatgagcaagatgataaatggcagcaagctggtcataatggattcagacctcgggcatctgtgctttaacgaactggatactattagcaacgagctgaaggagttcatggagggattgggtgattgttga

SEQ ID NO: 8630 - DNA, 783 bp, synthetic construct
  source 1..783: mol_type = other DNA
atgaagtacaagatcctggagaagcccagctgcgaggatgggtacgatctggtccaggaggctctccgtaaaaagacaacgatactaatcttcgcctgctgtaaggttagttatgagggaagggcgctctccgaactcaactggggagagcggatcatcatgattaaaccagatggaacattcctgatccatcaagagaagaaggtcgaacctgtgaactggcagccacccaaaagccggaccagatcctacattaagaatgacaatttgttccttgagagccacaggcgcactcccaaggaattgctgacggtggaaattagaaaaatccagtttataaactatgcaaacatcgaagacttcgaggagctggaacaggccggctatgaaaaagacatgggtgacatgataatggagaaaccacacatgatcgaggaaggttttactcctaccgcccgcgaatactccgtggagcacgggttcatcgacattctgggcaaggacagtgataacaatttaatggtgcttgaactcaaagcccgaaaggctggcatcaccgcagtgaagcaactgcgaaggtacctacaggaccttgagaataccgacaacgattacctcaaagagtgcgaatcgcagaagaaaaaaattagaggcctgctggtggctccttcaattatggacgacgcgttggagctgctggaaaacgaggggatcgagtttgtctctattgagccgccccgggagctgaagcgcgataagaaggtaacactcgatgccttttga

SEQ ID NO: 8631 - DNA, 480 bp, synthetic construct
  source 1..480: mol_type = other DNA
atgcttagtgaagaaatgattgacattaatgatataaattatgctatctacaagatcgggcattgggagaataactacgaaattaaccaaatcggcctgtctaacgaaatcccggtgacaaagaataccctcaagcacgtcaaactttcaatggtggagattcggactagcaggttcgagctgagcgacaaaatcgtgaacggatttgtcgccatagcaatccacttaaattccaacgtgcagaacatggagctcgatgagctgatcgaactggaggaaaaagagtatcagaatattctgaaggagctggataacctggagctcttggacgataacgaatccatccccttggactcggaggactatctcatctacaaactagaaaaagactgccatgtaacgaagagcgttccagccaacctgtacaccataaattaccacaacaacgagctgaagaagattgaggacgcgctcgattga

SEQ ID NO: 8632 - DNA, 693 bp, synthetic construct
  source 1..693: mol_type = other DNA
gtgaagaagtgtcccgaatgcgggaatccttcctatgacggggccccagtgtgcggtaactgcggatataagttccccaaggctaaaaattcagtgcccaagggagaggacatcttcaaaaaagagcacaaaaaggagccttccaacgacgaaagtacactgactattatcaagcagaagaagctaatcattggcataatcttagttatcactctgattttgatttgtgggatctttctgacgggcagcaccaataagagctcaccgatccagaatgtggacacagaaaaatacagcgcaggctcctttagcttcaagtacccaggggattggcaggagctcaaccagacggacgaagagcacccaggcgccatcttttataaagcggccaacaacacaaccgttgaatattacaacgtcagctccagcgcaagctcgcttaaagagatcaaccagaataggatcacccatgcccaaagtgtgggcgcgtcggtcacccttctggagaccataactctcgatggtcgcaacgcctcaaacattatcctggagaacgctgatggcaactacacccggtacgtgagcatgttcagtaatggagagctctacgtattcagactgtctggagattccgtcaactccatcacatctgacgaaattaatagtgtgataaatagcgcagacattgcctga

SEQ ID NO: 8633 - DNA, 828 bp, synthetic construct
  source 1..828: mol_type = other DNA
atgacaaagatcaagctcgccctgtgtcaaatgaatgtggtggacaacaaaaaagaaaatatcaaacgggcccactcaatgattaaggagagcgtatctaagaacgctgatttcataatcctgcccgaaatgttcaactgcccatactccaacgataagtttattgagtacggtgagaaggaaaacaatagcccaacccttaacgagatttctgaactagctaaaaccaacaaggtctacattctcgccggctccattcctgaacgcgaggagaacaaactgtataatactagctatcttttcgacaagcagggaaatgttatcgcaaagcacaggaagatgcatctgtttgacatcgacgtgaaagggaaggtcacattcaaagagtccgatgtgctgaccgcaggcaataaggttactgtcgcggagaccgaatttggaaagataggcatcgggatctgctacgacatccgtttccccgagctggcccgaatcatggtggagaacggagccctgatcttggtgtatccgggtgctttcaacatgacaacggggtcttcccactgggagctgctcttccgcagtagagccattgacaatcaggcattttgcattggcgtggcaccagccctcaataaaaacgcgagctatcacagttacgggcattcgatcattgtaaatccttggggcaaagtcatcgctcaggccagcgaaaaagagagtttgatcatctcagaaattgatctgaacgaaataaagaaaataagggaggagttacccctcataaagaacaagagaaacgacatctacaagatcattctacggtga

SEQ ID NO: 8634 - DNA, 849 bp, synthetic construct
  source 1..849: mol_type = other DNA
atgtctaacctcagttttgatgaggctatctcgaacctgtccgctgaggatgttggcgttagaaaagaggccatcaaatcattggtgggcattacagacgaaaaagctatcgaacccctcattaaggccaccactgatgataacgcacaagtccggttcaaagcggccgaaatcttaggaaatatgggtgatctagccgtggacaaacttatcaacgagtttaataatgcggaaggcaaggataagagattcttggctttcgcactgaaggaaacggaggacaacaggatcattccttacttcgtggaggcaaccgaggacgacgacttcggcgtgagaaaagtggctgtacgcgccctgggagagctgcaggccataaacgagctggagtcaatcagcaagtgcctcaaggacgaagactggggggtacggcttgctactattcaggcgctgggggatttcgcaaccgatgagtccattaagctgatcaaggacgcccgcaagagtgaggatgacaaggacttcaagaagtcttgcaataaggccatcaaaaaagccgaaaaacgccagaaagcaaaggcaagcgggaaggccatagtcaaggtcattccgatgagcaccattaaggagatggagaagagcaatatacagaaagccatcaaggaatatgagcgatatgtggaggccaagcaggcaaaggacgctccatacaagcgactatgtgtcctctacaggaaagccaacgactatgagaacgaagtgagggtgatcgaaacagctatcgaagtgtttgccgataacgacaaaaagctgtcctactttgagaaacggctggcgaaactcaagtga

SEQ ID NO: 8635 - DNA, 771 bp, synthetic construct
  source 1..771: mol_type = other DNA
atgaaaaactatttcgatattaaagacaaggtggccgtgatcacaggggccagcagcgggctgggctggcagattgcccaggcatatgcaagccaaggtgcaaaactcgccctctttgcgcgaagagaggaaaggctgcaggagaatatcgctgaaatagagaaagaatttggaaccgaagcgatctacgccgtctgcgacgtaggcaattacgacagcatcactgaggctgttgcaaaggtgatggatgcttatggaaggattgacattctcgtgaatgcggcaggcatgggaaacaacaagatggtgaccgaccaatccaacgaggagtgggaacgccacatccacatcgacctgagcggtgtgtattacatgtgcaaggctgtgggagaggtcatgatcgagcaggaatacggcaaaatcatcaacattgggtcaatccattcgcgggtgatcttcccaggcggaggcattagtgcttactccagcgcgaagggcggggtcatgaacttgaccaagaacctggccgttgagtgggccaagtataatatcaccgtaaatgctataggccccgccgtcttcgagacagaactaactgtggattcaatcgagatggatggctttatggatcttattaaggcctactgtcctgccgggcggcttggtaagccgggggagttagacggcatagctatctacctggcctctgacgcatccagtttctgcacggggcagctgatttgtattgatggtggatggacagccatatga

SEQ ID NO: 8636 - DNA, 2598 bp, synthetic construct
  source 1..2598: mol_type = other DNA
atgatcgaagagcagactaagatctactcaaagaagcagatcttcaaaaccctgcacccatgggtgcagaagtggttcgacctgcaattcgaggattttacaccggcacagaagaagtccatcatagacatccacaagaggaacaacatcctcattagcagcccaaccggatctgggaagaccttaaccgcctttctctccatcattagtgagcttacaacactggccgataccgatcagctcgaggataaggtgtactgcatctacatttcaccgctaaaggcacttgacaatgatattgaaaaaaacctagaagagccactgaagggaatcgaggagatagctggcaaggatcttggaatacgaaaggctgtccgaaccggtgatacgtcgcaatatcagaggcagaagatgcttaagaagcctccccacattctcatcaccacgcccgagaccctgtccattctgctggtcgccccgaagttcagagagaaactgagcggcgttaaatatgtgattgtggacgaaatccatagcctcgccgaaaataaacgtggagttcacctgagtctgtccctcgagaggttgcaacacctcattggacaatacactcggattggcctttcagccactgtaagtccgctggaggaagttgccagattcctggtcgggtacgagtacgggattgagcgggactgcaagctcgtgaagatcaactatctgaaagagctggatatgcaggtaatgtgtcccgtaagtgacattgtcatagcggatgaagaagatacgcggctggggatgtacgatctgctagatgatctgatccaggagaataaaactaccctgatctttaccaatacccgcagcggtacagagcgttttgtgtataacctcaagaagatgtatcctatgaattataatgactcaaatatcatggcccaccactcctccctgagcaaagaagtccggctggacacagagaacaagctgaaggagggaaagctcaaagtagtcgtttcgagcacatctcttgagctgggaatcgacatcggatacattgaccttgtggtgctgataaactcacccaagtctgtggcacgcgccctgcagagaatcgggcgcagcggacacaagttgcatgagaagtctcgcggcaggattatcgtcacgaatagggacgacttggtggaatgctctgtgttgctgaaaaatgccaaagagggcaagatagacaatatcaacatccccactaactgtctggacgtgctagcccagcatatctacggcatgagtattgaaaacccatgggacatcgattacgcttacgacgtgataaaaaagagctactgctacaaaaacttaccaagggacgactatgaagatgtcctcagttacatggccggcgaataccctgagcttgaggagcgatatgtttacgctaagatttggattgactataaagagaacactttcggcaagcgggggaaactggccagaatgatttattccaccaatattggaacaatccctgatagctctggggtgttggtcaaatgcgacggtgaaacggttggaaagatcgaagagaacttcatggaaagactgaagaaaggcgacactttcgtgctgggtgggaggatctatcgcttcaactatgggaaaggcatgacaatcaacgtcactcccgcaagcggccctccaactataccttcatggttcagccagcagttacccctgtcttttgacctggcaatggacatccaacggttccgctcccatatggagaccaaattcgagtatcgacggagcaaggaagagatcatggacttcatttttgattacctgtacgtggatgattttgcagctaattccatttatgaatatttcgtggagcagtacaaatacgccaagattcccagtaaccgccttctgctcgtggaatactacaaaggctttggtggccgcaacttcgtcatatttcattcacttttcggccgcaaggtcaatgacgccctatcccgggctgtgggttatgtggttgcccatcagtacaacacaaatatcaccatttccattacggacaatgggttctacttgagtagcgatgggaagatcggtggattggagagtttcaagcagctgacccctgaaaacttcgagacaatcctcactaactccctcaacaaaacagagacactcgcgtcgcgatttcggcactgtgctggcagatctctcatgacgctaaggaagtacaaaggcgaatccaagtcagccgggcggcaacaggtgcgtggcaagatcttgctcaagtttgtgcaggacatggacgacaacttcagcatattaaaagaggctagaagggaggcgctggaagattacatggatatcaaaaatgctttgaaagtaataaacatgatcgacaacgagtccatggaaattaaaaccatcaacaccgtgattcccagcccatttgcgtttaatttagtgtcgcagggctatctggatatcctcaaccagaatgacaaggcggagtttaccaaaagaatgcacaaggcaatcctggatcagatcaaggacaaattgaaggacatctactga

SEQ ID NO: 8637 - DNA, 462 bp, synthetic construct
  source 1..462: mol_type = other DNA
atgaaaaccctgctcgtgtattattccaggacagatgtaactaagaagatagccaaaatgattcaggagaagattaactgcgatatcgaagaaatcacggacgacgacaagtactctgggaagctgggatttcttaagggtggaatgaatgccagtatgggccggacaagcgacattaacatcatcagcaagaatccgaccgattatgatctaatcatcattgggacacctgtgtgggcgagcaatatagctactcccatttacacatacctgatgaaatacaacaaggacttcaaaaacgtcgcctcattctgtacctgcatgggcaacgggtacgaaaaaaccctcaaaaatatctcggagatcacgggcaaggagcagatctccaccatgtttttcactgcagaggacattaaaaacccagaggagaagataaatattttcatcaacgaaatcaagtga

SEQ ID NO: 8638 - DNA, 369 bp, synthetic construct
  source 1..369: mol_type = other DNA
atgactaagtggaaagccgtgattatcgggttcatcctggccgtcatagtcaaatcatttttcgcacagtatgagtttattggactgctgtttgtgggcttcatcacaggttacatcgcccacgacggcgccctttccggcctatggaacgcagctgtggccggagcactgggcaccattgtgtgcgctatcttatttgtgctggttgccacgctcgggggcagtctgttcgggatcttcggcggtctcactggattcaccctctccggaattacaagcataaccattgtccttggttacttgatctactatagcatcgtaatgggaatcaccggcgcgctgggggggattatagcgtctaagaagtga

SEQ ID NO: 8639 - DNA, 408 bp, synthetic construct
  source 1..408: mol_type = other DNA
atgaatatgtttagcgagattaatatcaaggccctcgtcttcggagctgccatcgctgccgcatgcattctgatcggataccagtactgggattggctctatcccttcagtgcgataggactaatctatgcaggctacggacagagcaacatcaaaattgggactgcgatgggcgcactggcctccaccccagtagccatactgacactccagggctatttgggcacttttaaagaagggttcttcacgacagagaacggcattcttgccgtgaccctgaccgtcattgctgtgggggcctttatcggtttcgtgggtgcctgggctaagcgggaccgcatcaaagcactggaacaatacaatcaaaagcagaagatcgggaaaaacaaaaacaagaagcagaagtga

SEQ ID NO: 8640 - DNA, 1092 bp, synthetic construct
  source 1..1092: mol_type = other DNA
atgggaaaggtgaagaaggaggatatcttggatatcctggctaagtacgacaaaagtgaaataaccattgctaccctgggaagccacacctccctccatattctccagggggcaaaagaggagggctttagaacagctatcgtttgcgagaaaggaagggagattccataccaacggttcgatgtggcagacgaatacatcctggtcgataagttcaaggacattgtgaacgaggacgtgcagcagaagcttagagacatgaacgccattgtggtgcctcatggatcgttcgtcgcctatgccggtttggataacgtggaagacaagttcaatgtccccatgtttggcaatagggacgtacttcgctgggaggccgagagggacaaagagcgacaactgctggtggaagggggcgtccgaataccattcaagtataatggtcctagcgagatcgacaggccagtcatggttaagttcccgggggcgagaggcggccgggggtactttgtggccagctccacggaggagtttgatgctaagatcgaagctatgaaagcccggggatggctggaagataaggacgtcgaagcggcacacattgaagagtatgtttccgggtgtaactactgcatacactatttctactctgcactggacgacacggtggagctcatgggcatggacacccgctacgagtccagcattgatgggtttgtaagaatgcctgccaaggatcagctcgacatcgacctgagtccctcttatgtggtgacaggcaaccaccctgccgttatccgtgagtctctactgccgcaggtcttcgatatggccgataaactcaccgagagcgctaaaaagcttgtggcccccggactgaacggccccttctgcatgcagactctggtgaacgacaatttggaggtaatctgttttgagatctcagcacggactgacggcggtaccaatacattcatggatgggagcccctactcatacctaacttatggtaaaccaatgagtatgggccgccggattgccctcgaaatcaagcgagcgatcgaacgcgaagagttagaaaaaataatcacatga

SEQ ID NO: 8641 - DNA, 531 bp, synthetic construct
  source 1..531: mol_type = other DNA
atgctcatcggcttaatcagcgacacacacattcccgatagagccaaggagatcccgcagaaggtcatcgacgcttttaaagatgtggatctgatcttgcacgctggagatctcacctccatgaaggtgatcgaggaattggagaaaatcgcacctaccatagttatacagggaaatatggaccgcatcaatgggattgacctgccaaaaacaaaggtaatcacggccgaagacctgaaaattgggcttgtgcatggcgaggtgtacccccgggccgacactcaacagctgctgtatattgcaaagcagcttcaggtcgacattctcgtcagcggccattcacaccagccaaagattgagcaaatagagggggttctcctactgaaccccggcagtcccatcgtgccacgactggccgatcggaccgtgatgctgctcgagattaacaagcaggaagtaaacgtggaaatcaaaaagatcggtgcgcctgtctgcagcgccctggacttcgacaaatacaagagggattga

SEQ ID NO: 8642 - DNA, 639 bp, synthetic construct
  source 1..639: mol_type = other DNA
atggggagccgttggcagatggaaaagcacaacgacccgtactacaagaaagcgaagcaggaggagtatcgctcccgggccagctacaaactcaaacagctggataagaagtacaagctaatcaaggagggcaacacagtcgtagaccttggcgcagcccccggaggctggagtcaagttgctctggaaaaggtgggggacgaaggtattgttgtgggagtggacctgaatagattcaagaagttccatgaggagaattattacgggctcaggggggactttacaacccctgaaattcaagaaaagatcatgaccctcataggcggcaaggctaaagtcgtgatgtccgatgcctcaccatccttgtgcggaatcaagaatattgaccagcttaggtctatcgatctggtgaatgtggtcatcgaaattgccgagaacatattagaggaaaaagggaatctggtaatgaaagtcttccagggtcccgagtataaaaacatgctggatagcttgaagggaaaatttcggcacgtgagaactacgaaaccagcaagctcgcggaagaagagttcagagatgtatgtgatcggcctggagtacatgcccaacaagcgaaaccgcaagaaaaggaaaaactga

SEQ ID NO: 8643 - DNA, 420 bp, synthetic construct
  source 1..420: mol_type = other DNA
atgagaaagtcccgcctgagtctattcaagtctactagcatgatgatttcggtcgttggaatcatcatgataattagcaccattatcgtcgtggcatacgtggggtatagcatcgtgtcatccagtatcaccaacgatatatcctctggcacgcagtacgacgagcttgcagagctgaaggctgagtacagcaacttgagcgtgaagttcgacaatatcaagtcaacatattatgcaggcgacgctgatgacgtgaaagtgtacaacgatgcgaaactggagctgtcccgggccaattccgccattgaaaacgttcagagcgcgctggacgccgataaaccctcgaatgacgtcgacagcaggatcgtatttgccaaagaaaagctcgagtcagccgaaaaggcctacaacagtctctga

SEQ ID NO: 8644 - DNA, 2004 bp, synthetic construct
  source 1..2004: mol_type = other DNA
atgaacagtactaccaaatcacaaaccagcattgcaaagttcgaggaatttttcgccacatcgtataaggacgacgtattcaagatccttgagcaataccctgacgaacgatcacttaacgtcgactaccgtgccctcgagatctttgatccggacctcgcagacctcttgatcgataaacccgaagaagtgatcgatgcggctaagatagccataaagaatattgacccactggtgaaagatgctgacatcaacatccgctttgagcatctgtccaacattatcccccttaagacactgttaagcaaatacatcggtactttcgtggccgccgacgggattgtcaggaaaacggatgagatcagaccccggattgaaaccggagtgtttgagtgtcggggttgcatgagactgcacgaggtggaacaaagcagcgcaaatagaataatagagccgagcctgtgtagcgagtgcggaggacgatcattccgcctgcttcaggaagagtcaaagtatgttgatacgcagactgctcgcatgcaggaaccgctagaaaatctgtctgggggcactgagcccaaacagatgttgatgatcctggaggatgatctggtggacaagctcaaccccggcgataaagtgagaattaccggcacactgaaaactttccgcgaggaaaggagcggcaagtttaaaaattacatttatgtgaatcacatcgagcccctggagcaggaatttgaggaattgcagctctccgaggaagatgaggagcagatcatcgagctgagcaaggaccctaatatctatgataaaatcatcaaaagcacagccccatccatccggggatatagggacgtcaaggaggcgatagccctacagctgttcggcggggccgctaaacagctagaggacgagaccaaactgaggggagacatccatatcctcattgtgggggaccctgggatcgggaagtcccagatcttgaagtacgtgtctagactcgcgccaaggagtatttataccagcgggaaagggacaaccggtgcaggcctcaccgctgctgctgtgcgcgatgagctgggcggctggtctctggaggccggagcactggtgctcggcgatcagggtaatgtttgcgtcgatgagctcgacaagatgcgctcggaggatcgatctgcactgcacgaggctttagagcaacagaccgtgagtattgcaaaggcgggcattatggccacccttaactccagatgctccgtactggccgcagccaaccccaagttcgggcggtttgacagatacaaggtgctcgccgagcagattgacctcccggccccaattatctctcggttcgatttgattttcgtcatcgaagacaagccaagtaaggagcgagatagcaagttagcagagcacattttaaagacgcaccaattcaacacggttgactacgagattgagcctgaactgcttcgcaaatatatcgcctacgctcgtaagaacgtgaacccacgcctgaccgaggaggcgaacgaggtgctgaaagagttttacgtgtcgacaaggaacagcaatcctgaagaacagggagccgtgcctatcactgccaggcagctagaggcaattatccgtctgtccgaagccagtgctaagatcaagctgaaagaaacggttgataaggaagacgccgaaaaggcggttcggctgcagctcgcctgtctgaaggaggtgggggtcgatccagagactggagaactggacgctgacatcgtatccggcggtacacccaagtcagacagggacaagatacaacgggtcacagaggaaatcaagcagcttgaagaagagtacgccggccaggctcctttgaacgtactcatatccaatatgagcgacaaatatggcgtcagtgaagacaaaaccgaacagattgtcaagaacttggtccagaaaggagtcatataccagcccgtgaatggctacttcaagcgggtggtttga

SEQ ID NO: 8645 - DNA, 408 bp, synthetic construct
  source 1..408: mol_type = other DNA
atggacaagtacgaagacctgctggaacgggcaattgaccaactgccacccgaggtgtttgagcataaaaggtttaaaatccccaaggcttacagcgatattcagggcaataggacgttcatcaaaaacttcaaggatgtagccgaaggcctcaaccgtgatccgcagcacttactcaagttcctgatgagagagctaggtaccgccggaaatatcgagggccagagagcgatccttcagggaaagtttactcactacctcataaacgagcggattgaggattatgtggacaaatatgtcatttgccacgaatgtaaccggccagacacccgaatcatccgcgaggggcgcatattcctgcttaagtgcgctgcctgcggggcaacagcccctttgaagagcctgtga

SEQ ID NO: 8646 - DNA, 1044 bp, synthetic construct
  source 1..1044: mol_type = other DNA
atgttctgtcccgagtgcggaagcaccgacaaaaaaatgattggcaacatctgcataaactgtttcctcaaagatttccagatgatcgaactgcctaagcggatcgaggtgcagatctgcagccattgtaactccaaacttgaagaaggaaagtggagcgaagaatttatccccgaggaggaaataatctacagggcactcgagcgaaacataaagattgatgacaaggtctccaatgagattatcaacctggaaatcgaccagatgaaaggtacaatcgccaagtgctatgtggagattgtgggtgatgtggagggaactgagatcgaggaaactcaggaaacggaggtcaagattcttaagaccgtctgtccaacatgcagtaagatccagtctggctattatgagtcagtcatccaattccgggccgataagagggagatcaaaagcgaagagtacgacaaggctgacgaaatagtggaaaaaaccctcatcaaacagctcaaaaatgacaagttagcctactgcccacaaatcgccaagcctaaggaagggcacgattattacattggctcactgaagagtgggcggaaggttgcggaggcgctcaaggaggagttcgggggcacaatcaaggagagcccccgcctgatctcggaagataagtctacgggcaaaggcttgtacagaatttggattagcgtgagaatacccgaatttgagattaatgacttcatcatgtttgaagataaactaattcaagtaactagtatcgataagaaccgtatcgttgggaacgacatcaagaccgggaagaagcagaacattccactgaaaaatatggagaaaattaaactgatcaaaaagtcatccgacattgagaccaccaccatcatttctatgtcgccttccacaatccagattttggacccggctgactactccgcagtggacctggagatgaaggatgagtttgccaattacaacattggagacgagatacgcctgataaaaatcgacaattacacgtatctgctaaactga

SEQ ID NO: 8647 - DNA, 963 bp, synthetic construct
  source 1..963: mol_type = other DNA
atgaacatagaagagaagatccagttaatcgaagagggaaccctggaggtgatagacacggaggagcttaaagaggtgctggccaaaaaagaacctatagcctatacaggctacgagccgagcgggaagatccacctgggacatgctgtgaccgtccaaaagctcaagcagttgcagaagctgggcttcaagataaagatcctcctagcagactaccatgctttcttgaatggcaagggcaccattgaggaaattgccgagaccgccgagtacaataagaagtgttttcaagcgctcgggcttgacgaaaaaactgagtacatttacgggtcaagtttccagctggagcccgactacactgataaggtctatcagttagccacaatgaccacgcttaagagagcaaggcggagtatggatcaagtctcccgagcagacgataaccctaaggtcgcgagcgtgatttatccgatcatgcagactgttgatatggctgcactgaaggtagacatcgctctgggaggtatggagcagaggaaaatccagatgttggcccgggagaacctcgagaagattggggaaaatgtgcccatttgcattcacacccccctgctgcacggtctggatggagatgccaaaatgtcatcctcgaaaggaaattatattgccgtggatgactccattaaagacatcacgaaaaaaatcaacaagagctactgcccccagggggagatcaaaggcaacccaatgatcgagatcgccgagacattcgtttatccaaacgaagaaaagctgctcatcaaacgccctgaaaagttcggcggcgacatcgaactcacacacgacgaactaataaaggaatttagcgaaggtaacctccacccaatggacctgaaaaatggcatcaaggatttcctgatcgagttttttgctcccgtgcgcgaatacatggaggagaactga

SEQ ID NO: 8648 - DNA, 210 bp, synthetic construct
  source 1..210: mol_type = other DNA
atggtcgaggagaaggaggagtttgaaatgggcctgccaaacggggtgggggaacagatgttggcccacgcattcgagaagttcgatatcaagctagagcagacagagtttggacccaaacttatcggcgagtacgacgaactcataaaggtgaaagagttcctggaaaccggaattagggaccggctcaaagaactggagggcgaatga

SEQ ID NO: 8649 - DNA, 579 bp, synthetic construct
  source 1..579: mol_type = other DNA
atgtacatcgtcttcgagggcattgatggggctggaaagtcaactcaaattcagctcctgaagcaatggctcgaggacaacgggttcagagtcgagacgctggtggaaccaacagatagcgaagtgggaaaactaatacggaagatactgcagcgaccagatgccactaccgacaacgttcagaagacactggggctcctcttcgccgcggacaggatgctaatcatggataagctggaagacaagtcgaaaataatcatttccgatcggtcatttatcagtagtttggcctatcaggagcctgtggactggattgaagtgctgaacaagtacgccaagaagccggacttactggtcctgcttgacttggatgttaagaagtccgtggcccgcaccagcggcgaggacaccttcgagaatgaggaatttcttatcggtgtgaaagacaactatctgaagctggctaaaaattacacctccgagattatcgacgcaaataacggcgtaaacaaagtcagcagcgatatcaaaaaagtgattgcaccctacctcggcatctgtcccgactgcatccagtga

SEQ ID NO: 8650 - DNA, 2535 bp, synthetic construct
  source 1..2535: mol_type = other DNA
atgaataatcagagcaggtgtaagaataagatggtgctcaaggagctgctcgctcccgcagggtcctacgatgtcttagtcactgcggtgaacgctggggccgacgcagtttatattgccggaccaaattacggggccagagcctatgctaagaacttcacaatcgaggagctggaaaaggccgtgaactacgctcacctgaacggtgtgaagattcatgtcacagtcaatacactcgtcaataactttgaaatcgcagacgtgttgaactatctgtttaagctctaccagattggagtggacgctgtgattgtacaggattttggccttatctggcttctgaagacttttatccctgacctggaagttcacgcctcgacacaaatgggactgaacaactacagtagcatcaaatgggcttcagacaataatatcaaacgcgtagtgcttcccagagaggttaacataaatcagataaaaaaaacctataatcagctgaagaaggacaacatctccatggatctcgaggtattcgggcacggcgccttgtgctattgtgtgagtggcaaatgctacatgtctagctacaatagcgggcgcagtggcaataggggcgcttgcgcccagccatgccggcgacagtaccgtctcaaatacagagggtacaatatcggaaacggatttctgctcagcacgcatgacctcgctacttacaagaacataaaggaaatctccaatgccggcgtgaaatctctgaagctggagggcaggatgaaatccaaagactacattgggacaatagtcaatagctaccgcaacatcattgatggcaaccccggaaactatgaaaaggacttgcacctggtgtttaaccggaactttaccagcgggtacattatgggcgacaagcctggggaagtcatgggacgagagagcagcggtcacgaaggactttacatcggcgacatcaccaacatcgagggaaccaaagtgactattgagataaagaacaaggaaattccggtgatcctggagcctggcgacggaatcgccttcaaatacaatgggaaaattaaggggatctatctggaaaatatcatcaaacaagatgaaaatgaaatcataatcgataccacccggctcgtgaaagaaggcactgaggtcttcatcagttactctagctcaacccacgagtatctgaaacagtttgaaaaagagaccattaagaatcacatcggccttaacctgagcctcacttgggacaaggaattgaacctgtacaccaaggtggaatactatgttgatggggagctcattaacttcaggcacaagtcgctggacatgttcgagaaagcaaaaaacaagcccgtcgacgagaagacaattgagaatcagcttaacaagacgggtgaaacaccattcttcattgagaagatccagtttaacaacatgccgaacgacatgttcatacaaattcggaagattaatcagatccgacgggagatactagataacgccaccgagttgctgatgaaacactacaccccaacgaagaaggcagtgaaggaagtgcggaagaacctcactaagtttttcgaggactatgagaataacaaagggaagatcaagcaaaagacacccaaattgtccctattcatcgatgacctaagccagataagagcggcctcaggattcggcttgaaacgcatttactttgatggtacctgccattataacaacccagatgattattttaaaaacatcaaagacaccctgatgaagggcagtctgatggcgtcccctaccgagtttgtttgggttctgtcctccttcatgacacagaaggacgccatcaaatgcaacgagattgttaaagagctggaaaatgagggaatcatcatttctgtcatgggcgacttccccggcatgaatgacatcttcgagtgccctgtatatggtaaccataatctgaacgtgtggaatagtttttgtgtcagagatttaaacgaggccggtttcaagagcctgatcttatcatctgagctctcagggcatgagattaaggaactaatccgtaggaatcatgaccgcaacattgacctcgaaatgattgtgaatggaaacctggaggtgatcgtgagtaaagatgacttcacgaacctgaatgacggtaaggatttcattatcagcaacgatgcggactacgcaatcctagaagataagaaaaggaaaaagttcaagtacaaggtgttcttcgactacaaccggcagtcccacatcatcaacaaagattgtctttgtctgatcgaggagataaatgagattaaggaatttggtctggattcattgattcttgattgccgctattctaacgagaagtatactacgcagatattatcgatttataacgaaagcctgcataataaggatcaagatgagctgtccaaatacaaatatcagatcatggacttcagccagtcctacataaacaagggcaattacatcgaaggcagactccacgaggacaagaagtga

SEQ ID NO: 8651 - DNA, 2418 bp, synthetic construct
  source 1..2418: mol_type = other DNA
atgaggattcccgaactactggcccccgtggggtcaatggaccacctcaaagtggctatcaatgctggggcgagttctgtgtacctgtctggcaaggaatatggggcccggaagtatgccaccaacttcaccttagacgaaatcaatgaggcagtcgacacagctcatatacacaatgtgaaagtgtacgttacggtgaatacactcatcaaagaggacgaactggaggatgtcatcaactatgtttccaatctatatgccattggagttgatgctgtgttggtgcaggatctgggattggtcgagttgatcaacaagcacataccaaaactgaagattcatgcctcgacacaaatgacctgtgagaaccagctgaagctgaattacctggaacaaaagggaataaagcgggttgtactcccacgtgaaatgagaaaagaagagatcaaaagcctcaatacaaatatggaacttgagatatttgtccacggggctctttgttactcgtactcaggccagtgcctgatgagtagtttcaaaggtggccggagcggcaaccgcggaacctgcgcgcagccttgtcgccagaaatataaaatcgaggggattggaaaagagaactactacttgtctccctgcgacctctccctgtttaacaaactgaaagaaattctcgagctcaatattgactgtatcaaaatcgagggcaggatgaggaacaaggaatacctggccattgtaattaacgcttaccgtaaagcattgaacaaactgaagagtaaaaaggagattgaaaacgagaacatcaatcttgtattcaatcgcgggctgtgcgagggcttattcaatgattcgccaaaaagaagcctgaaagccggacatatcggtctgaagattgggcacgtgataaaatccgagaagaatcaaatcgccatcaaattagatgattccatcaagaccatacctgagaagggcgatggattgctgataatcaagaataatgacgactatgggttcgagatttcccagaacccaatcattacctccctaaatcacttcaagaccggtaaaaacaagccaatgaagaacctgacccggagagacaagatcctgattgtgaagaaggtttggcaaaacaagaagagcacgtttaatctgaacgaatccgacgtgtacctgacgaagaaaaacaaactgaccaaaaaggtgaaagagatagagtcaaagggcagcagttttatcaagtccaagttagtactcacattttccatcaaaaacaagtatccaactcttaagggcaagctgacgcttcagaacaaaaaggaggtggaaagtgaggtgattggcaatactcccttcgaaaaacccatcaagaagagcattaatcgagaggtcattaagaagcagctccagaagatcgataactacccttacaacatcattcagattaacatcaattatgacggaactctctttattcctataaggaagattaacgagctgcggcgcaatctgttcgagcgcctggagaaggaggccatcaactcctttaaacacgaaaacaagaaaattaagcttaagcagtacaacaatgagactaatgagtccaaatacaacatctctttttacaccaacaacctcaagcacctggaacacatcgaaaacgtcgaaagagtgtatctagagatccctaataatgatgacagccttatcctctcagaggaaaagcctaacatcagttatatgattaactttatcaaacaggcctacgaaatttcttatgataaggattataagctgatctggaagtggcccgacataacgcacgacaacctcatcaaatcattgaacaaggtcaggggcatactgaataaaatgcattacaccctgcccattatgagcaactccttcaatggggagtacggcttctatagcatgaatatcacaaacaatgagaccatcaacagtcttaaggactacaagattctgacattatcaccggagctgactaaaaaggactacgagaacatcatcaagcattgccgataccccaagaaagtggagatcctggtccagggttcagtcgaactcatgaaaactcgatacccgctcctttatggtgcagaagtgaaaaagaactacaaaaactatctgattgacaagaagaacaacaaatacccgatccacaagagcattagctcgcaggaactcagcatcttcaatgacagcgagctctctctaatcaatgagataaagcatttgaagaacatcaattatagcaatttcgcaatagatggaagatacaaggacgatgaatactataagatgattgatatctacaactgcgcaatcaacggctacatcaacgaaaaagagttgaagaagtatagcagcaagaacacaatcgcgaactattga

SEQ ID NO: 8652 - DNA, 1926 bp, synthetic construct
  source 1..1926: mol_type = other DNA
atgcagagggaaataatcacattgcagaatattaagggcatcggtgacaagatctcagagaagatcataaaatcggttggaggtgagaaagagctccagaagatcgtggacaacgctgacgtggaaaaaattaccaacattgacggaataagtcagcggaaagccatcgacatcatgaaccagcttctgaacaacccgaaatctgagtttatcaaaagcgacagggctatggagatttacgaggacatcatcaacaagatcctggcctattctaacactagctattccaagaatcggatactgctgctttcaccttcaaaggatatcaaaaaaatcaacagccagctcgacttcgtcatggatgcaaaagagcacgtgtcaaagctgccgatcatcaagctgaagggtttgatgaagaatctaaaggaggtggaggaagtcaagaccgagtacgatccaagtaaggtcattctggttgagagcgaggaggataacagctatctgaccgatctgggcctgaaccagtactaccccattataacggcaagtgactcgcctctgctccaggaggagatgatgaattacgacttggtcttttacgtatattcccaggggatactggatttcgaggggatgccaaacctcatcatgataaatatcgaggataatgattatgagatagtgcctgaaaagattatcaatttcttcatccagaacaaggacctcttcacacgcgttcatgagatccaaaaaatccgaaacaaagactccgtgctgggcgaaatcgtccccatcattgatgagctcaatatcattgataaacgcgaagtcaacatcgaaaagctggtgtactccctgaaagaggacatggacaatgagctggagaagagcattaagcagattgatctagaggggaatgagatccttaacctcttgaacaataatttccctccaaagatttccaagatttttgacgacatcatcaacaagcggaaagatattatccgtgaaaagactggattgagcttcgacccattcctgagaacctatcccatcgagatcgacgatgctgagatccaacgcataacacttgagcagtcctctaaaaaagaaaacgatatttttgatattaaaagaagtgccgccattgaactgaacagcattaagaagaaagctattgaagaagtggaggacgctatcaagtttgactacgagtttagcttaggcagttttgcctacgaatatgatctgtgtcgccccaagttcagcgaagagatccagctaaccggagccttgcatctcgaactcgcacttaaaaaagacaaggaatttattcagaagatcaattaccaactgacgcaaaaggaaaacatttccctgctaacgggagcgaatagcgggggcaagacaacactgctggagactctcacccagatatcaataatggcgcagatgggcctccctgtgtgcgcggacaatgtgcaaatcaaattattcgacgagatttatcacttctctaagaaaaggtcactcgacgccggagcctttgaatcgtttctgaatgtcttcataccaattgtgactaccaatagtgagaagcttgtacttctcgacgagctggaaggcatcaccgaactggatgccgcagtgaagatcatctccaccttcatcgacatgataaaagaatccaactcttacggcgtaatcgtcacgcacatggcccgggagctcatgaactacactgatattcgagtggatgggatcgaagccaaggggttagatgagaagtacaacctgattgttgacagaacacccagaatgaacttccttgcaaaatccacccccgaactgattttaaagcggatctatgaaaaaagcgacgacaacttgaaggctgtgtactctaggattttggagaagttctga

SEQ ID NO: 8653 - DNA, 1482 bp, synthetic construct
  source 1..1482: mol_type = other DNA
gtgattttcctgaatatcaaagtattcgataccacactgcgggacggagagcagaccccgggcgtttctctgactcagcaagagaagctaagaattgcaaccaagctagatgagatcggcatcgactacatcgaggccgggagcgctataacgagcaagggcgaacggaagagcatcaaaggaattgcacagcaaggttttaacgcagaaatactcagtttctcccgccctctgagcgtggacatcgactattgcttggaatgtgacgtggacggggtgaatctggtggtgccaactagcgatttgcacatcagcgacaagctgaaaatcacacgggacgagctcatccagctgtccaacaacgctgtggattactgcaaggaccatggcctgattgttgagttaagcgccgaagacgcatcaaggagtgacacggatttcctgaaatctgtgtacctaagcgccataaaccacggggccgataggatctgcgtgtgcgacaccgtaggcatactgacaccagactcttcattcgaactcttcgataaactgaacgaggatattaatgttcccatcgctgctcactgccataacgactttgggctggccgtcgctaataccctctccgccttgaaaggcggggccacagaatttcacagtacaattaacggcattggagagcgagcgggaaacacttctttcgaggagtgtgtcgtgagcattgacagactcctgacaaatttctccactaatgtcaacattcatgaaatctatgacatcagcaagctcgtggccaggtcaactggggtgtacatccagcctaacaaggcaatcgtgggtgagaacgcctttgctcacgaatcaggtatccactcggatggcattatcaaaaactccgctacatatgagcctatgacccccgaactcgtgggccgtaaacgaaagtttgttatcggaaagcacatggggacccacgggctcgagaatagactgaaggaaattggcctgtccgtcaataaaacgcagctgcagcagatttgtaatgacatcaaggagcttgctgataaaggaaagaccgtcactgacgtggacttacatgtaatagcggacaacgttctggagataaatcatgaggataggattaagcttgatgagctcaccatcgtgtccggaaacaagataatgccaacggcatcggtgaaaataacctttgacgatgaagagattcttaacgccggagtcggtttgggccccgtcgatgccgccatcaacgccgtgaagacagttgacgcattcagtgacgtcgagctgatcgagtaccacgtagacgctatcaccggcggtaccgatgccttcattgatgtcatcatcaaacttcaaaagggggacaaggtcgtctctgcccggggcacggaacccgatatcatcaatgcgagtgtgaaggcgtacatttccggagtgaaccgccttttgcgcgattga

SEQ ID NO: 8654 - DNA, 492 bp, synthetic construct
  source 1..492: mol_type = other DNA
atgtacatggaaaatatccagatcttggggctcaagggcaccattgactccgtgagtgagactctcaacctgatcgacgggattaaagaagatagcgaaataatccagctgctgaatgcagattccattgcttcaagaaatcatatcatccacggcgtgaaccaagccattcttgccttcgatcggtgtgagaatctcgctaaggacctgagtgttgagatcgtacttcgatgcagcgcccagaggcagatttccaaggcgttcgagatcttgggtttaaaggagggatacatgaacctgtgcgcaatcctggtcaatagcaagaaccacacgtctgagctatcagaaatattctcgctggacgataacgtgtttattcccgacgacgagatactgatgaaaatctataaaattagcgatatcgagataaagaacatgtctctggaagacatcatcatcgaccgcattacaaaactcaccgtcaactactga

SEQ ID NO: 8655 - DNA, 954 bp, synthetic construct
  source 1..954: mol_type = other DNA
atgtttaagtttaagaccccatcagagaaaactcgacagaccatgtctaaggttgccctcggtaagaccaacatcaactttgaggagcgctgcacagaaaagatcaaaaggctcaccgagaaggaagaggtgaaaatcacgtcctccggaaacaactccatctttattgccctttcagctatcaagggcgacatcatcattcccgaccaaggagggtggcacggcttcaaacagattgcaaaattcctgaataagaacatcattacactgaagacagatttgggactaattaacccgaagtacatcgacgagctggacctcagagaggggtctgctctgatttatactagcttcgccggatactgtgccgagcaggacacgaagtccattgcaaagtattgtaagaacaacaacatcctaacgatcgaggatgctagcgccggcattggagatagtgaaaaaaaactgggcaaatactcggacataatccttgccagcaccggcagccctaagatcatcaacgtcgggcagggcgggttcattgcaagcaatgagagtgagatcttcaaagaggatttaatgccccagaaactgagcaagacatcagaaattgtctgcagtgggatagacagcgaactggacaacattgcggaaaagttgaatctgaccgtaaatgctaccaactacctcaagaagtatattaacaatgccctgcacccaaataagcggggtgtgaacgtgatcatactgcatgatgacgcgaaagcaatcggttggaatttgaagaagaagctgactaccgataaatcgggcttcatcacaacttgccccaattacaatcgggtgaaacaaaaggccatatccatagaaatcaaaaatctggactacaactgccttaaaaaagagcacctcgataagataatcgaagaaatggagattaacaatctccagtga

SEQ ID NO: 8656 - DNA, 1173 bp, synthetic construct
  source 1..1173: mol_type = other DNA
atgaagaccactaagaatgcttacctggccaaactaacggagcaaatccagatgaagtccgtcaaggtgggaaagaacctggagggcaccactcccccgtccgtgtttattggacgctggagctatcccaaagtatatgctgggccaatgatgagtagccagatgggcgacacctctatcatggacacaccagaagactggatcgggcagaataagacacaagacgaaattattaactaccggatgaatctggtccgtggcaagcagctgataaaaattgatgacttggagaatccgttcattgagaagctgcaagacatatcactggcatccaagtccatcgatagtgaggcgaccttcggacggcgccccaccggctcagtgcttacagaggacagtatgcctcatggccccagcgccgtgatcgaaaagttcgatattgacgcggtgaagtgggataggcagctggagaaaacattttatgacactgatctgaagtcaacggacgccattgtgaatctccacaataaggacgtgccattcaccgccatgcagaaggcattctcggtgggcgctatcgggactaagaacaagcgaaaacttgtgccaacgcgctggtccattaccgcctgcgactcgacactggccgatgaatttctcaaaaaggtaagaaaattcgagaaactggacacataccgggtcttcgagtttggggcgctaaacaactactacgttatcatcctcacccctaccgagtggcagtacgaatggtacgaagccttcattcggcttatgaagaacgaggagctgatctttagcgattacgaaaccaatgggggcaaaaaagagtatagcatcgtgggtggatgttattatactgcaaagatggttgtcctcgactacttgatgcagatcaaaaaacagagcgggcttctcatcttaagagaggcttatgatggttacgtgcctctgggtgttttcaacgtcagggagaacatcaaggaagccatgcagaggccctacatagagttcgagaccctcgaaagctgcttggaatacgcaggaactaaactgcgaatacctatcaacagatatgtcaagcagggcacgttaatgaacgaaatgctccacacaaagcagaccacactggatatgtactttaaaagcggatga

SEQ ID NO: 8657 - DNA, 936 bp, synthetic construct
  source 1..936: mol_type = other DNA
atgaataaaatgctgagccccaaagagtttatcgaggattccatacagaaaattaaggatcagatcggggacgagaaggccatcatcgccctgtcgggaggcgtagatagttccgtgtgctctgtcctcgtgcaggaagctattggcgacaatctcaccgccgtattcgtggatcacggcctgttacgcgaaggggaggtggaacaagtgacaaacactttcaaggaccggttgaatctcaaatttgtggatgctagtgacgaatttatggatgccctggatggtatcgaagacccggaactgaagaggaagattatcggcaaaatattcgtcgacgttttcgagagggaagcaattaagagcggggctaagttcctagtccagggaacgatcgctcctgactggatcgagactaaaggtgagatcaagtcccatcacaacctggccctgcccagtggcatgaagttgaaggtatgtgagccaatccgggacctctacaaggacgaggtacgcgagatcggggacgagctcaacatacccgccagcacagtttacaggcaaccattcccgggacctgggcttggcgtgcgtgtggtcggagcactgacaaaggagaatgttgaggtgtgccggaaagcaaacaagattgtttgtgatgaaatcgaagcggcaggtatcgacaaagatgtctggcagtatttcgccgtgctgaccaacaccaaagtgaccggcgtgaagggagaccagcgagactttggctacctagtggtcgtgagagtcgtgaactctattgatgctatgacggccagcgtcgcggaactgccttgggaggtgattcagactatatcaaaaagaatcacatcagagatttccgaggtgacccacgtcgcgctttctgttagcgacaagccacccgccaccattgaattttgctga

SEQ ID NO: 8658 - DNA, 258 bp, synthetic construct
  source 1..258: mol_type = other DNA
atgattgacaacgcggatgatctgagggacaaagcaaatgagtttaagatcggactgaaaaagcaatccattaacgtgcagatcggggacgaagaatacagctttcggatctcagggattggccagaagagtgtcaaactcgagaaatatgtgaagttcgacgaaatattcgaagccatcgagagcggcaatgacaacggtctagagaccataatcaagcagttcatcgaggattacgaagaggaggacgatgagtga

SEQ ID NO: 8659 - DNA, 558 bp, synthetic construct
  source 1..558: mol_type = other DNA
atgacaattctggtcattaataacaagggccagtacaaccataggatcgcccggagcctgcaatacctgaagatccccagcaagctagtcagcaacaatctctcaattgaggaaatcgaggccgagaaccctattggcttaatccttgggggtggaccaagcatagaagatgctggtctgtccgaggagtacattaaatattttgacatacccattctggggatatgccttggccaccagctcattgccaaggtgtacgggggcgaagtgaccacttccgatacggaaagttatgcacaggttaagatcgacatcaagaatgacgaaaacctgttcgagggcctcgctcctgagatcgacgtgtggtcgtcccataaggatgaagtgaaaacaatccccgatgagtttgagatcttggcgagttctaacctgtgcaacgtggaatcattcaaacacaaagacaaggacgtctacggaatccagttccacccagaggtacaccacaccccgaagggagaggcaatcttcaataatttttataaaatctgtaaaaagtga

SEQ ID NO: 8660 - DNA, 147 bp, synthetic construct
  source 1..147: mol_type = other DNA
atggagctaaaagacctgatcttcgtgatcgctgcaatcttgatcgccgttgtgctgctgaagatttttttctggcttctccccgtgattgtagtcctcataattgccttctttatctatgtctacctgcaggatcggtacaactga

SEQ ID NO: 8661 - DNA, 915 bp, synthetic construct
  source 1..915: mol_type = other DNA
atgaatcagtatgatatcatcatcatcggggccggccccggtgggctgaccgcaggaatctatgccggccgtcagggaactaagaacctaataattgataaagacctggccggcggcctgggccgggaagtccccgagatggagaactatcctggcttcgataaaatctcaggcctggagctggtggagaaaatgaaggagcaagcaattaaaaactgtgacttgcatgaaatggaaaatgtggaggagatcatacgcaccgacgacgagtaccgcttcactgtgaagacagataaagacgcttaccagtccaagattattatcctcgctaccggcagttcccataggcagctgaacgtgaagggggaggaagagtttagaggaaagggagtgtcgtactgtgccacctgcgatggatttttcttcgctggcagagacatcgtaatggtggggggcggaaacagcgcgctccaagaggcgctctacctcaataatctgggcgccaacgttaccctgattcaccgacggggggagtttagggcccaaaaacacttacaggacatgattaaaaaggagggcattaagacaattttgaacgcaaccgtggaagaaataaagggggatatgcttgtggagagcgtccttctcaaggacaatgaaacgaacgaaatgaaggaagttccaacgaacggtgtgttcatcagtgtcggttacatgccgcacacaaagcttgcctaccagctgggagtcacactagatgagagcgggcacgtcataatcgacaaatctcagaaaactaacatcgactatgtatacgctatcggtgatgtttgcatcggtctgaagcagtgggtggtcgcgtgcggagagggggcagtggccgccacctccgcttttgaagacattcagaattga

SEQ ID NO: 8662 - DNA, 432 bp, synthetic construct
  source 1..432: mol_type = other DNA
atgttttgcgaaaaatgtggcaaagaaattccggacaatacgcgcttctgcagcaattgcggcaaccagattaagaaaccaaacaacaagatcaccgaagagaagaacatgtacctggctctgttcctgtcaatttttttgatgggcctaggaatctattacgcagggaataagaaaaagggaattatcctctttattttcatactgatatccaacagaatgcggaagtttcagatcttcattatcattgccataatcctctggatctatgccatctacgagacatacatcgatgtgaagagggcaaatggggaggagaatcccaacttactggaggacatcaacaacttcaccactagtaaacatttcgtccacatcatcgcgatcgcccttctgttcgctgtgtcttattttcttataagcaagctctga

SEQ ID NO: 8663 - DNA, 750 bp, synthetic construct
  source 1..750: mol_type = other DNA
atgaagatgtgcaatagatgcggagcagaaaataaagacaagagcaacttctgttccaactgcggggctatcttaaacaaccccaaaccaacgcacagctatgacaagaagctgatagagaggttcatggacgcgaatatcattctgaaacttatcatcatcattgtggccgttttcgtattcttcgtcgcgtccgcctggatcgggcatattttcttcggaatgcccttggaattttataccgagggagacgccacataccacctatcccaattcaacaaattggacctggacggggacggcaacctcaccttttacgaagtcaagggcctcgccagcgatatttcgcaggataatctgagcgggatatttgacgccgccgataaaaataacaacggtgtgctgaagggatcggaatttgatggctatcttcagttcattgacaagtactataaggaactgggcaagcagcagaaggctgagcgcaaaaattcagcacaacagaaaagttcctctagcagctccagttctaatccatcatttcaggacgagggacacgagatctgcccggtgtgtggcggcaaccagtttactgagttttacaacagccaatacggggaaatgaactggcagtgtgactactgtggtgagatcttccggagtgatgatgagttctacatagattattgggagtcaaacggcattaagtgcatcctccctgcactggagaacaatctcgatatcatctga

SEQ ID NO: 8664 - DNA, 1041 bp, synthetic construct
  source 1..1041: mol_type = other DNA
atggaagatgagattgtttgtcccaagtgccacaagaggaacgacctgcacaaattctgcatttactgcggtcataagctgttggacgatgaccagatcggactgatcctggacaatcccgaacagtattgcctcaactgtggccggctggtgaagaagggccaaaagaaatgtgagtgcggatacgaatttagtgacattaactgcccagagtgcaacagcaaaaactcctataccaacagattctgcaccacatgtgggaagaagctttggacctctaacgtgtacaattacaagtacagtaagcatctttttgagaagcatattctgaaggaggtgctgccatattcactgcgcaatacatccctgtaccagcggcccaagatggatttcaccctcaaccatttattgtattgcaatgagtaccttaacggcctcaagagcgccaaatcgaaaatcgacgagtacctctgtgaaatcggctcaagatggaaggtggtgtcccctaattattgcataaactgtattaatataatcaagccggatgagtgctcctgtacaaaatgtgggtcgattctctttgccgacaaaaagcgcgtcgactgtctgcagactaaaaataagtatgtcaaacccaagttcgacaacgtggagttgaagtggacttcaaaattctctaatgattacctggattccctagctccagccatcggcgaatcccagtttgaatacagggagcgcctcaagtgggagtttgcggaaaacaactaccacaagataagcatcatcggcgcaattgaccggaaacggaaagatgaaggcagaaaaagacagatcgaagagcgtaagcgactggaggaagagtacataaggcaattcggggggggttattgcagcagcagctgccgataccactacgaggaaatcatcacgcctcgcgggatcagtgcagattatacggacgacatgtatggagtcgactactgctgtaggctaggacacttcgtaagccacggaagtttctgtaaagattatgagtga

SEQ ID NO: 8665 - DNA, 753 bp, synthetic construct
  source 1..753: mol_type = other DNA
atgacgaacaagatttgctttgaatgtggaattgaacaagatgacgcattcaattactgcatcaactgtggggccctgctttcgaacgagaatgatgacagcttgtccaacagtaacgagtaccgcctgcccgaggacatcgagaatcagaatgatgaatacgacaatctcaatgatgtaaaaacttgtcctaaatgcgggattgaacaggaaatcttcgccaagttctgccggaactgtggggcgtcattctcctccgagaacaaggacgagatcacaatcagatgtgagtattgtggtgccgagctgaatgatgaggccttctgtcccgactgcggcaaagccaccggcatcacaatctgcaccaactgcaggcagaaaatagtgaacgaagacttttgcagcatttgtggatatcagattaaccataaaatcaagatctgtgctaactgcggaagtaagatcgacgcaatggccaaggtctgcgcacactgcggcgccaagatcattaaaaagaatccgctgatagctttgggtttcagctttgtgttcccaggactgggccaactgtacaataaccagaaccacaaagggttcattcttattatcgctaacattattagctttatactatgcttcatctttatcggcatcatattagtgatcctgatctggatctatgcaatgtacgatgcggccacctcagcgatagctataaataagggcgaaattctcgaggacaagctcttttga

SEQ ID NO: 8666 - DNA, 1866 bp, synthetic construct
  source 1..1866: mol_type = other DNA
atggactacgaaaaactgggattgaagatgggcctcgaaatccaccagcagctaaactccgagcacaaattgttctgtccttgtaagacagaactggtggatgatgatttcgacggcatagtgcagcgcaagctgcgcccaacccaatccgagctgggagagatcgatcgagccgctctgcaagagagcctccgcggtttaaatttcaaatacgagaacttcgccaaacatacctgcctcgtggagaacgacgacgaaccacctcacagtctcaatgaggaggcgctggacatctgcattacaatagcttgcctgatgaacatgcacatcgttgatgagtttcatacaatgaggaaacaggtgatcgacggctcgaacactggggggttccagaggacaggtatggttgccacggatggctacttggaaaccccatacggaaaagtggtaatcgaaagtcttggcctggaagaagacgcggcacgccgcattgagaccaaggatggattcacggaatttcgcctggacagacttggcatccctctggccgaagtgacaaccgacccctcaatgcaccatcccgatcaggtacgggaggtggcctacatgctggggcagatattgcgaagcaccaatgttaaacgggggctcggcactatcagacaagacctgaatatctccatcgccgagggcgctcgtgtagagatcaagggcgtgcaggacttggatcttatggctgagattgtaaaccgagaaatccagaggcagctggtgttaattgacatcaagaaggagcttgtcgccagaaatgcagaggtcctggatgagatccatgacctggacgagctgttcaaggacacagagtccaagatactaaagtcggccgagacgattaaggccgtggttctgaaagggtatgatgggctcattgggcgggaggtgcagcccggcaggcggtttgggagcgagattgcaagctatgctaagaagagaggagtctctggtattttccactctgatgagctcccggcttacggaattacccaggaagaagtcgataacgtgacggattacttaaacattggtgaggacgacgcgttcatcatcgtcgctcacgacgaagatatcgctatatccgccctggaggaagttaagcgacgcgcgtccctcggcctagatggggtggtggaggaaacccggaaggccttagaagacggcaatactgagtacatgaggccccttccaaccgccaataggatgtatctcgagaccgacatcccgttgtttaagatcactgcggatagaattgaacccatctcaaacaatctccctgaattgccagacgtgaaacaagcaagaatcatcaaggagtataatctgagtgaggatctggcaacacagctggtgaagaggcaggaggcagacatgtttgaagccattattgccgacgtgagcatagacgcaacccctgtcgccagccttctggcttatgacctacgtgagatcaaaagagaaggtcatgacatcaccgcgctcgggcttgatcactttaaggaaatattcactctgctcgctgaaggcaaaattgcaaaggatagtgtgcggaaactggctattgagacaatcaaggcacccgagagcgatgtggccgagatcgccgagataaacaacctcactatgctcagcgaagacgacgtcgtcaagatcatttctgagattgttgccaaaaacgagggcatggtcaaggagcggcagatgggagccatgggtcccctgatgggaatgtgcatgaagcagctgaaaggaaaggccgacggaggcatggtcaacaaaacggtgcggtcagaaattcaaaaactgatctga

SEQ ID NO: 8667 - DNA, 1311 bp, synthetic construct
  source 1..1311: mol_type = other DNA
atgacctacaaagaaaacgctgagaaatttatcgagacctacggcctcagcataggggataaaatccaagtcaacaaggaggatatcacctataccgggatcttactggataggcccgaggatgctgacgatggctatctggtcttgaagctgtccagcggatacaacatcggtgtggccattgagaacaccgctgcggagctgatcgagaagggtgagaagcctaaaatcggattcggcaagagcgaaatcccagccgatccaaagaagcagaacatttcaattgttagcactggcgggacagtgtcctccgtgatcgactataggaccggagcggtgcatcccgccttcacagcttccgacctggtcaaagcaaaccctgagctgttggattatgccaactacaatgtgaaggcactatataatatactgagtgaggatatgaaacccgagtactgggtaaaggctgcccgagaaatagccaacgacatctccaatggcagtgacggggtggtgatagcccacggtactgacacaatgcactacacggcggctgcacttagctttatgctgaagaccccagtgccaattatactcacgggtgcccagcgcagttcagaccggccttcaagcgacgccaacatcaacctgatcgatagcgtggttgcggcaaaatctgacattgccgaggtgtgcgtatgcatgcatggaagcctgaatgacaaatacacatacttgcacaagggcacgaaggtccgaaagatgcacaccagccggagagatacattcaggagtattaatgcccagcccatagccaagattgagaacaagaagatcaacattaacccggactatgcttacaccaaacggggggtgaatgggctggaactcaatgcaaatattgaagagaaggttggattcatcaagagcttcccgggaatctctagcgactacatcgaataccacatcgataatggatataagggcctcgtggttgaaggaacggggcttggccacgtgcccaatgacctcatcgactcatttaaaagagcccgcgacgaaaatattcccgtcatcatgacttcacagtgcctatatggcagagtgaacatgaatgtctactccaccggccgcaacattattgactctggcgtaatctccggcgtggacatgacacctgaaactacttatgtcaaactttgttgggccctcgggcagagcgactcgtacaacgaagtcaaagagatcatgcatgaagatatcgcaggtgagtttagtgagaaatcgtccattaaggatttcctgaactga

SEQ ID NO: 8668 - DNA, 1446 bp, synthetic construct
  source 1..1446: mol_type = other DNA
atgagtgacaaggagattgggaaagactatgagctgaaggtgcggaggaatccacaatccctgttagaggagtacccacggaagggtaacaacatccagagcacgcactattgtgctgggtgcggccacggcattatacacaaacttatcgcagaatgcatggacgaacttggaatacaggatcgatgcgtgatgatctctccggtcggctgtagcgtatacgcctacttctattttaactgtggaaactttcaaacggctcatggaagagcacctgcagtggccacagggattagcagggccgaggataactccattgtgatgagctaccagggcgatggcgacctcgcctccatcgggctgaatgaaaccttgcaggcggctaacagaggggagaaaatcgccgtattcttcgtgaacaatacggtctacggcatgaccggcggtcagatggcgccaacaacactggttggagagaagactgtcacttgccagaccggacgcgatcctaactatacaggccacccgacccacatgtgtgagctaattaacactcttaaagccccagtatacatcgaaagggtgtctctcgccaatcccctgaagatccgactcgccaagtacgccataaagcaggctctcaccgtccagaaggaagggaaaggatattcgttcgttgaaatcctgtccccctgccctaccaacttaaagcaagatgtgaagagtgcccagaaatttatcgaggaacagatggagaaggagttccccgttaagaatttccggaatgatctctacaaacgcgaatctatccagcgcccagtgagtgactttagcacggaaacactggacaaggtgttcaatgtcaacagagacggcaactccgggtacgttgatgacgcaagcatcagtagcaccagcattaaggtgtccggattcggcggccagggtgtactgagcgccgggctgaccatcgctcatgccgcttgcgatgagggaaaacatgtgtcatggtaccctagttatggccccgagcaaaggggtggcaaatccaattgtagcgtggtcatatcaaatgaaaccattgggactcccgttgtggatgagatggatatcctcatcgcactgaataagccttccctagagcagttctcgcaggacgtcaaaaccggcggtacaatactttacgacagcaagatcggggaatttgaaacagatagagacgtcaacgtgatcgctatgccctgcgtggacatcgcagaggagcacggcaatgcccgcactgcaaataccgctctgctcggtggattgaccgagctgactgacgcgctgaaacgtgagtcttatgagaacgcgattcgggacatgtttgcttcaaaacccaaggtcattgacgtgaacattgacgtgctgaaggccggagccgaatggttgaagaacaactcatga

SEQ ID NO: 8669 - DNA, 1116 bp, synthetic construct
  source 1..1116: mol_type = other DNA
atgagcaatcagatggtaaaaggaaacaccgccgtcatcattggtgccatgtatgccgggtgtgactgcttctttggctacccaataacacctgcaagtgagatcctgcacgaagcatccaagtacttcccaatggtgggaagaaattttgtgcaagctgagtccgaagaagccagcattaacatggtctatggcgctagtggaaccgggcatagagtgatgactgcctcatccggacccggtatcagtttgatgcaggaagggttcacctacctggccggtgccgaactcccggctgtgatcgtcgatattatgcgcgcaggccctggcctgggaaacatcgggcccgagcaaggcgactacaatcaaatcgtcaaaggcggcggccatggaaactatcgcaacatagtcctggcacccaactccgtgcaggagatgtgcgacttgaccatgaaggcctttgagctcgccgataagtggcgaaaccctgtggtggtgctcgccgatggtacgctgggccagatggcagaaccgctggagtttccagctgaggctgttaagcctgaaatcgacgagtcttgggccgtgagggggacggagaacacaatgggcaatcttattacatcaatcttcaatgacttcgatgagttagaggacttcaactacaagctgcaggaaaaatacgcgaagatcgacgctgaggaagttatcgttgatgagtatcaggttgaggatgctgatatcgtattggtctcatatggcattagctcccgcatcgcaagatcggctgtggacaagagccgtgagagcgggataaaggtgggactgctgcggcccatcaccctctcgccctttccaactgagaggatcaaagaattagcggacaaaggggtggaatttatatctgtcgagatgagtaatggtcagctgctagccgacgtgcagttcgcagcgctccgacgggaaaagactcaccttgtaaacaggatgggagggaacctaattgaactgaaacagattcttgcgaagatctacgagatagccggcttcgaggaccacgatctcgatctgagcaaacggagcgccgagaaggcctcccccaatattattgactga

SEQ ID NO: 8670 - DNA, 291 bp, synthetic construct
  source 1..291: mol_type = other DNA
atgatcgaagaagagatttcctacccagtgatcaacaaagagatctgcaaaggctgcatgcggtgtatcgtcggctgccctcagaacgccatactactcagtgaggacatgaataacgcagggtaccaatttgcctattatagcggaaatggttgtacagggtgcaaggattgttacttcacctgccccgagccgctgggcctggaagtacaccagataaagaacatcacgaacaattcaatcgccaaaatgattaaggcgaaggtggctagcaaagggggaattaagtga

SEQ ID NO: 8671 - DNA, 1674 bp, synthetic construct
  source 1..1674: mol_type = other DNA
atgacctcgctgataggcaatttcgtagagcgagttgactttaacagctatgaagactttatgaagaatttcaagctcaagtatgagcccgactacaactttggatttgatgtcgtcgacaagtacgcagaaatcgatccggataaagttgctctaatctggactaacgacaatgacgagaaccacactttcacattcaaggacatgaaagagtactccaacaagaccgttaacctcctgagaaaactgggaatcaagaagggcgataaggtaatgctcacgttgaagaaccgctacgaatggtggttctgcatggtggccctgcacaagatcggggccatcgtgattcctgccactcacatgctcaagcttcacgatatcgatttccggctgaagcaggcagaagtgaaagcagtgatcagtgtggaagaagattcgttgctccctgattttgaggaggctgagaagggcctggattgggatctgataaaacttgtcattgagaccgaccgagatggatggattaacttcaatgaagcgatcgagaaggagagttccgtgtatgagaggccgacgggtgacgagaaccctatggctgatgaggtgttccttatctactttaccagcggtacaagcggaaaccccaagatggtgtcacatgcccacacgtatgggttaggccacatccccacggctaagtactggcataacgtcatcgaggacggtgttcatcactccgccgcggacactggctggggaaaagctgtctggggcaacctgtacggccaatggatagccgggacttcagtctttatctatgactacgaacggtttaacggcatcaaactgctcgaaaaaattattgaacacaaagtgaacaccttctgcgcccccccaaccgtttaccgcttcttgattaaggagaatattgaggggtacgactttagtaatctgacctatgtgacaaccgccggggagccgcttccacccgaggtgtctgaaaaattctatgaaatctcaggtctgagaattaaggaaggctttggccagacagaaacaacgctgtctattgcaacattcatctggctcgatgcaaaagttgggtgcttagggaaaccttccccactctacaatctaaagctgctagacgagagcaacaacgaagtcgacattggtgagaaaggagaactctgcttcgacatatccaatggacccaccccaggcctgttcaaggagtattataaagaccctgtaaagcaagcggagcagtgtcacgacgggttttactactgtggcgatactgcctgggtggacgaagacggatacgtgcacttcgtgggaaggaacgatgacatcatcaagtctagcgggtaccgtattggcccattcgaggtcgaaagtgcagtgctgtcccatgaggctgtattgcattgtgccattaccgcctatcctgacgaggtccgggggcagattgtcaaggccagcatcgtgctgcagcccggctatgagcccagcaataagctgacaaaagacatccagaatcatgtgaaaaatgtgacagctccatacaagtacccaaggatggtggagtacgtcgatgatatacccgaaaccataagcggtaaaacccggagagtggagatccgcgagaacgaccagaaaaagtttaattga

SEQ ID NO: 8672 - DNA, 663 bp, synthetic construct
  source 1..663: mol_type = other DNA
atgaattatcatgatttcgaaaagccgctatacaatgataaattcaaactgagtatatgctatactatcaacattattatcaaaatcaactataagaagcaggtgtttattctgaatgagtacaacaaagatatcggaaacagaatccgcgagttacgagagttgagcgacattacaattagtgaaattgcgtctgacctgaacattaaagaggaaacatacatccaatacgagaatggagaagtagacatcccagcgagcttcttgtatgagctggcccatatttttaaggtggatctaggcctgctcctcaccggggaggagagccgcatgagcatctttgacgtgacccgggcaaataagggcgttgccgtcgaccggaggaaggagtacctgcacgaaaacctctgttcaaaattcatccataagaaggccgaaacgttcctcgttgtggtggaccccgaaaaaaaccctgtgccctccctcaattcgcaccccgggcaggagtttaactacgtcctggagggttcccttaagatatacatccacaacaacgagataatacttaatgaaggcgactcaatcttctttgactccgcccacaggcacgctatggtcgcactgaacgataagccagctaagttcctggccgtgatcatctga

SEQ ID NO: 8673 - DNA, 372 bp, synthetic construct
  source 1..372: mol_type = other DNA
atgagcacaaacgagatcgggactaaggtcctcttcaaaaaacaactgggtctgaattacgagatagaccagaagtatgtggggctaaagatgaaggaaaacaatatactctccttcaacttcagggtaccgggagacttgaaggatgaggtggaagcctactttaagcggtttaaactgggcgaacccatcctggtggacatcggcggcacaggcgatatcaaatgcgactttaaggggatttcacctgtcctgaagaacaaggatgagtttgatcagtatttcattagcgcaacccttcaggaagacaaaacctacgacccaatggaagaggagaaatgtgagacgtgcagtggatgcggattccactga

SEQ ID NO: 8674 - DNA, 390 bp, synthetic construct
  source 1..390: mol_type = other DNA
atgtttaacctgatcgatagcaccctcttctttgcctcgtacggcaacattttcgggcttgctaatatagcagttagtccgattgatatcatcctggcctatgtcgtggccattgtgatctccatcatcatggctttcgtgctgaaagtgcccctgttgccaagcaaaccataccggtactcctttgacgtttgcgcggtataccccacgcctattattgccatcgggatcttttcaatattcctagtcctcaactatacattcatctataatggtttagtgctggccatcataatcggcattctgagcgcactgttcgtgaagtaccttttcaactttgtcttccccaagcctctcaatgaggacgagggagacgaaattaacgaatga

SEQ ID NO: 8675 - DNA, 498 bp, synthetic construct
  source 1..498: mol_type = other DNA
atgaacgaggtaattggcatcatcattgccgccgtgctctgctggctgaactttgtgatcgtggacacctattttggacttcccgagcagccaggtgtgcgaggggccgggattatcggtcaggatgtcgaaaagcgcgggggagacattgctggcggatttttccaaggcaacatcacctgtagcccggatgcttccgcgggcacattactcgcctccattggatacctagtgctgggcatccccggcggaataattgccgcattcttcgtcttcattggcaatagattgtgtgccgaccctgggtacgcagggacctgcggaagcctcacagccacgtgcatcatcttcatatgctcatttctgggcatgactccagaaatgttcatcgtggggatggttatcgctatcctgactgtgatgggcatcagtcagaccaaagcgagcgtcatactgggtaaagttgcaaagaagttcaataggcacgctcgggagtga

SEQ ID NO: 8676 - DNA, 249 bp, synthetic construct
  source 1..249: mol_type = other DNA
atgtatggcgaaatcatcggcgtcatcgtcatattcgtggcactgcgagcgctggtaacaagaaacagggccgagcggctactgtacctgaatgtgatcggatttggggtgagcgccatagtggctttcgtgattaacacgccctttgctctcattgttgccgcagccttcttcatctgctccaccattagcgccaacgcgattgcttacaccttgaagcgcctcgatgacgaaatccttctggagtga

SEQ ID NO: 8677 - DNA, 270 bp, synthetic construct
  source 1..270: mol_type = other DNA
atggagttcttcgtgagcattatcgccatcgctctgatgatcatcggtgcatttggcatcatattcatgaagaaacccttggacaaggtcataatgttttccgtgctggacgcggggtttgtactcgtcattgtgctgttcaagtacctggatgtggccatgtttgcagccctagccgacccacttagcaccctggtcttcattctcgctatcgtgaaaatcaacgaagttcggaagaagaaaattatcagtggcggaacagacgattga

SEQ ID NO: 8678 - DNA, 261 bp, synthetic construct
  source 1..261: mol_type = other DNA
atgattagtgtgcccttattcttctattttggaatcttccttgccatcgtaggtagcattgctactgcatgggggccaggcgttaaggacccgattatacggacattcaatacggaagtcgcttccatcggggtctgtctggtgctcctgtgctacaaccacgtgctggcactactgacattgctcgccaccaccgtgattatcagcctcatcctgtttagggccatcatccgcctggaggagatgggcgcgaacatatga

SEQ ID NO: 8679 - DNA, 594 bp, synthetic construct
  source 1..594: mol_type = other DNA
atgcgaataggcgtgctgtggaacaaacttgctgagcccaagaatattccacgtttgtttgcgttcagtctcggaatcatcctgattctcgggcttattgtccccatggccctgaatcctgaccagctgtatgtcagaccggccccacaggagcaaattggcgacgggctatctatcgcaccgtacgacagaggtggagaagttctgactcaacctggccagatcaacccccagtacccagataactcccgggaactgggaatgataacagcctacatgagccccatctcacagtgggtgtcttccatttccccctactttggcaccagtatctacagcagccctggcgggctcatagacgagatattgtattacacccggggtttcgataccatcctcgagtcctcaatcctgatgatgtccttcattatcgctagctggctgagcatcaactatacaatgaaccgcaagaatgatgaatcggagatcaagaaggatgtgaagaaggccatcaaagactcaacgaaagtagcgaatgaaattagtgtgagcgacgctaaagcccgcgcaaagcagttaaggagggacaactga

SEQ ID NO: 8680 - DNA, 696 bp, synthetic construct
  source 1..696: mol_type = other DNA
atggtgtttataccccagttcgttcccgctgccttcctgaatatgtacttgcctgcaatttatgccggtctgatcgttgggtttatcggttcgatggccatcgctctgaaaagggaggagattcacatcctgatcctcaccgatattgtgggccttgccatgatctttattgtgtccgccgtgggaactgaccttgccgaagcactgatcctccccgggctcgtggtggaacttgcagaaaccttagcgattagcgaaattttgatcacacgagagatgcgcataattgagaacaatccgagaaagaacttatctaactccagctccctattcccacagctattcgccctcaacatggagatactcaacacagcccctaatttcatcgccctcgtactgattgcttacgggatcttcttgaccggctttactggcggggcagtagctggcggaggaattgtcctctatgccctcagtaagaaggcccggggcctcccagtgcttgtcttggatggcatcgcgggagtcagcggcatcgcatggtgtctgtggataatcggattcctgtttttctttgtgacgccacaatactggctgctgagtctgttcctggctgcttgcggtctgctgctgaaagtcgcgtcaaaagtggggctgatcggcctactgatgcgggaggacatcgacaaggagtga

SEQ ID NO: 8681 - DNA, 672 bp, synthetic construct
  source 1..672: mol_type = other DNA
atggacttcgtgacactcggtggcaatctacttggaacaatccccctgggagacatcgtgctgtatctgaccccgttcaacctcttccttttcgccgtcctcctaggcttcaccgtaatgataggcctcagcaaacctgaaacccagatagaagccacaatgcactacctgtcgaatacggaggttaaggtgggagaaaaagagtttaagcagagacgctttctgagcgtcctgtgcgggatcgccagcgcaggcgcaatgattacgggggatctctttaacttcaccctgttcatggccttggtgggcatgttgaacatcggcatagtgtcagctgttcggcaaactagtgtattgaactccgcattcaattacgggctcatcgcgatgatgtgtagcctcccactgtttgggggtgctagcatcatccttgcctcaaccggaactctgtcccttgctgtgctgtctcagatgcctgtgtcccccatggtggtcttcggcgccacactcatgctgctgggtattttgggggagagtggagtggcgcccttctttgcctccaaggcagagatgttccgaactgctggcagcccatttatcgttattattcatctgagtagcctgtttatcattgtcagggccgtcgagattctgttactggtgttatggtga

SEQ ID NO: 8682 - DNA, 231 bp, synthetic construct
  source 1..231: mol_type = other DNA
atggtgtccgacagcatggatagtcagaaaagcctgtgtattattctgttggtactatcaacaatcgccattatcgcttgccttgttgtcaacttcgaggcatggatcgtgtataccatcgccatcttcggaatacccgtgtgggtcctgtctctgggcctcctcacgatggccaagccgcggcctgaggacgcggaagaaagggtgaaggagccatttaccgggtactga

SEQ ID NO: 8683 - DNA, 873 bp, synthetic construct
  source 1..873: mol_type = other DNA
atgaacttaatggctgatatcttaatccaggttattatcgccttcattgcaggaagtctgctgcttggcctgcacaggaagatcatggcccgggtccagaagagacccggaccaccgatagtccagcacttgctgcactctctgaagtttttctttaaagagacggccttccccaaaactgtgagcaaattgttttacataggcatcgtcttcatattggccctgatctggattgtgggggtgattgcagggccggttgcgcatgactccctgctgatcctatttggggtgtatgctgtgtacaagatcgttgaacataactccggatcaagttcaggtagcccatacggcaagcttagttgtgtacgcgccgtcctatcggccgctaccgagcttccactttttgcagctatcatatttgtgtatctcgtaaccgggtcaatgaacattggggagatcatcacctaccagtctgttaatggacccctcgtattcacgatccctctggccgccctgatgttctttatgctgattatcacaaaaagcccttacagcccttttgccataaccaaggacaaggccctgatcagcggctttgagaccgaacacttcggatttctgcgaggcttcatgctgttctccgaaagcattgcatggtatgtgatgttgtgggtcttcctcactatcttcttcggtcccctcaatgcggtgggctacgtgattggcatgatcgtcattaccttcattacaggattcattaacgctacaacccccatactctccccaaatcactccgtgatgacgcaaatcactattggcgcgatctgcttctttggcacaatcatcatgctcttcggtggggtggtgctctga

SEQ ID NO: 8684 - DNA, 255 bp, synthetic construct
  source 1..255: mol_type = other DNA
atgaatagcgaggacgtgatagtgtatttcaccgccctggtggccatcgggatcgtggttgtcggcctccttacgaccgtcttccactcgtccgtgatcgctcccatcgtaattattggaatcattttgagcatttttgtcctgtgcactaggagcaacttctcacataaaatagaaagtattgagaagatctgctttgtgataacactgatcgcaatcatttgttccttcatcctactctaccggccaatgtga

SEQ ID NO: 8685 - DNA, 306 bp, synthetic construct
  source 1..306: mol_type = other DNA
atgctagattatatgatctatatcctggtatttgcggtcggctccattctcgggcttctgtacagctacaaactgcacggtgagccatacgtggtcgacaccgagtttaatgtcctgttggctgtggtgtcagttgccggctggtgcctgggcttcctgagtggcaacataattcttagcgctatcgggttcctcctggcaggtttcgtgatggggggacgccccggatatggacggagggaaacagccgtgggcctcatagtggcaatcgttgcctacctcttactgaagtgtgggatgttgtga

SEQ ID NO: 8686 - DNA, 393 bp, synthetic construct
  source 1..393: mol_type = other DNA
atggacgagaacgccaaattaaaggtcatgcaggagcggatcataaagagttacgcatggcagcgcgacatcatcattccccttagcaacgagtttaattgcacgaacgaagagctggaggaactgttcttcgacctgttggatatgaacagccttgaatccctgcacggcacattcgattcagccagggatatttgtctgtaccagaagttcaatgctgatctccgactatgctggtttatcgactcgctcgaagtgatatcccaagaggaaggcaaaaaactcaagatgagactcgtggaggaggtgaaaaaagggcggagctatgacgacgtactgaaggaaggaaggttggaactgtttgagctgctgaagaaggagaccaattactga

SEQ ID NO: 8687 - DNA, 450 bp, synthetic construct
  source 1..450: mol_type = other DNA
atgctggacgccgtcaaggatgctgtgcgcaagagcagcatccacgtctgcatagtgaattgcgggggctgtaacggctgcgacgtggaagttgtcgcactactgtcaccccggtacgacctggagcagtacgggatctacgtgcagaacaatccgcgggaggctgacgtcctgttgctcacaggtgctgtcaccgagcagtggattcataacctcaagagagtttatgataaagcccccgaacccaagattgtggtagccgtaggaaactgcccccagtccggagatgtgttcgcccaagaaggaggccacgtgcacgcccctgcatctaattttatcccagtggatgcggccataccgggttgtccacctcgacctagtgagatccttgaggcgattctgtccgtgggcccacaggccatcgcagaccgcgggagggaagagaaatga

SEQ ID NO: 8688 - DNA, 1125 bp, synthetic construct
  source 1..1125: mol_type = other DNA
atgattgtcccgatcgggcctatccacccagcgcttaaagaacccataaggctgaagctgcaaacggagggggagagagtggttaaggccgaaattgaatatgggtacgttcaccgaggcatcgaaaaaataatcgagggacaaacatggcagaagggaatttacctttctgagcgcgtatgcggtatttgctcctatgaacatacccagacatttgcagagaccattgagaagatcagcaacgtcgatgtgccgctaagggctcagttcctgcgggtcatcaccaatgaactcgaccgcatccagagccacctgctcgctaatagtaccttcttcaagtcaatggaccatgaaacactctttatgcacgttttggaactcagggagtacgccatggatagcatcgagcttctgacgggaaacagagtgaacatgggctggaacgtggtggggggcgtcaggatggatgcggatgagcggcacttcaaacccatactggaaaacctgaaaaaaattgaggagggatttgacaccacacgcgccctgttcgccgagggccccgccttagcattgcgctgtaagggaattggtcacatgagtaaaaaggaggctattaagggacgggccgtcgggcctatcggcagagcctcggacattaaagaggactataggatcggccattacacttatgatgactacttcgactttaaggtaatccgacgtaaagagggcgacaactacgcacgtaccctaactcgattcgacgaaatcccagagtccataagtttgatcagacaggccatcgaaaacatgcccaagggcgagatacggactcctgctgacctgaagagcgggtacgcaatgaataagaatgaggcaccccggggtgaggtgacctacatgattgagacaaatggtaacctgattaagcacatctccatcagaaccccatccatcgcaaacatggatagctgcgccaaatacatgattcgggacgtgccaacggtggccgatgcggtgtcaacctatgccagctgtgatccttgtgtggcttgcgccgaacgcgtcgctatcactaatgaacatggcaagacagaactcaagaacatctatgaggtgatatga

SEQ ID NO: 8689 - DNA, 1026 bp, synthetic construct
  source 1..1026: mol_type = other DNA
gtgagctcgctcatgtggtatatctttgacttcgccaggaaggcatgggctgatgcgttcactaatgctaagactaaccccgagatcgccgaaaagccagagcgctttcgagacttccccaaggtcaacaaggaatattgcatagggtgtggagcctgtacggtttcctgcccttctcccaacgcaattaagattgtaagggagaaagatgacgaaacaggtgaggggtccacatatccagttatcacaccgggcgcctgcatccggtgcggcttctgcgcggaagtctgccccaccgagccaaagacactggaatgtgggttgaatcacctcatcttgcctgaatttaacctcattcccagcaagcggcaattcatcgtggatgactacctctgcatcaagtgcaaaaagtgtatcaaaaaatgtcctgtggaagcaataagtctaatcgacggaaatgtagtagtcgaccaactgaagtgtatcagctgcggggagtgtctagaggtctgtcccgtgaatggtgccatgaagggcgttttcgtggacaacctccaggatcagaaagagctgattctgctcacggtgaactaccttgaagagttcattaatagcaaggaagaggacttgcggagtctggatcataacggcctgctgcagtacgacgtgccgctttccaacatctgggatgaagccctgaagataattcctgacgaggagatctcactggagatcattactaacgctgtgaaccgccttaaggtgagaataattgattgggacaaatcaaagtgcaaaaaatgccagctgtgcatacctgattgtccaaccggatgtatcagctttgatgaaattaacgacaccatcgtcagggacaaggatcgttgcctgagatgcagtatctgttaccagacctgcccatttagcgtgattaaatacttcatcgctaaattcgcctttgacgacggcgagaatatccacgtgaccgtcaaagcatccaatttaaatgaggatattgtggagtga

SEQ ID NO: 8690 - DNA, 1359 bp, synthetic construct
  source 1..1359: mol_type = other DNA
atgattgacagttacaccaagacaccaagaccactgcggcatgtggacgttgagtacctcatcgaccagaccaaatgcgctaactgtaaggataagccttgcctggagtcctgccctattgatgccatctatctggataacgaggaaggcctgattaagatcaaaagcacctgttttggctgtgtactgtgccggaacgcttgcccctacgacgctatcagccttgaagtccacatggacagccccatcaaagagaatgtgcccaatatcaatgtcaaattgtgtaaggcatgcggggcctgtgttcaggcctgcaagaaaggcagcatccacattgtgtccgatggaaaacagccccctcacagtgagatcgacaaggacacgtgtgtgcgatgcggctactgtttccgagtgtgcccgactgatgcgatcaagtacgggcaactgctccctaaaacagtgaagggcgggaaggcagtggtagttaaccaggataattgcatcgggtgcatgacttgtataagagtttgcccatcaatgggagctcttaatgtggccagaactaacaagctgccttacatcaacccgggatattgtgcaaggtgcgaggaatgcatgcatagctgccccagcggcgctattaaatattcatcacgtaagaaagcctataagatgtacagtgagataaagtccttcgatattgtcagcgagatcgtggaccacgatattaagatactgagcctcgacctcatctccctgaacaaggtcctccagaaggtaggcaagtcaatagccttagaatttaacgaccagaactttgagaatttcattgagtataaggtcaacgacctgatggagagggaattgtccatcagtctcaactccaatattgaagtgggagaatttaccaaacttgtcggctcgtacctgatggataggaacatcgaaatctacaataacaaatgtattgcgtgcggagactgttacaatgtctgcccggtgggggcaattgagctaaacggcccaaatccaatctccattagcgataactgcatttattgcggaaagtgcgtggagcagtgtaagtttgacgcgatcggtgcttacgatgactatttctacagcaaagacacagatttgtattatgccaggtcttacctgcggggtcaacgcttaggggacttcacactgtcgaacagcaaatgtcaggcctgtgccatctgtgtgaataattgccccacgggtgccctaaccctcggtgacgacattatcgagttcgatgatgaaaaatgcatctactgtcgcaactgcgaggccatatgtcccctggacgcaatccgcatagtgaacttccggtga

SEQ ID NO: 8691 - DNA, 1047 bp, synthetic construct
  source 1..1047: mol_type = other DNA
atgttcgagaagtcatttatcacggactgcgagggcccactgactctgaacgacaacgcattcgagttggctgccaacttcattgagaacggtgggaaacttttcaaaatacttagtctgtacgatgactatctggtggatattgtgaaaaaggagaactataaggccggcaacacgctgaaactgatcctgccattttttatcgccgaaaatctaaagaatgacgacctcatcgacttcagccaaaagcacatttactccgtggaggactccaagttccttctcacctatctgcagaaagtaatgaacacctatatagtgagtactagctatgggcagtatattgaggccatatctaactacatgaacctcccctttaagaacaccttttacaccaaggtaaatctcgataacatcacacccactgtccaggaaatcaataagattaacgagtttaaacagttgattttagaaaatcctaaggattatgacctattcgatgatatcttcttctcacgaattacaaaaatggacatctacgagaaaatcaagaatgtggaagtggtcggtgggcaaggaaagaaactggctatcgaccagatcatcgaaagagacaatatcgataaggatgaaattttctacattggggacagcatcaccgacgtggaaccgctggatttcgcttgtatcaacaatggaatcagcgtttcctttaatggcaatgagtaccccctcaaggtggccgagatcgcgattgtttctccaagcgcagtggccacagcagtcatagccaacatatacgttaattatgataaaaacaaggtcatggagtttattaagggctacaacaacctgaatgactacgagaagctgttcgacgactacaacgtcgacggcgaaatcaagaataggtttttctcctttttcaattcgggaaagtaccctttaatcgaaattatcaacgagagtaacttcgatgagattttgaaagcgagcaaggaaatgcgcaacaatatccgggggaaagatataggcggactcggctga

SEQ ID NO: 8692 - DNA, 891 bp, synthetic construct
  source 1..891: mol_type = other DNA
atgagctacgaaaaggtaaaagacacattcttcgaggcttttgagggaaaatatgtaagagccctgattaccggacctagtgagaagatcgtcaaatgggcggcctacgattccacgtcaactcccagtgccgtgatcggccgggtggaagggggtgttgagggattcttagacgaatcgcagactcccgatgggcggttcggtgcggtggtccaatactggctggggggcgacgacgtgggcaagttcgcttttgaactctcctacaggctaaggcaggatgtcctcgtcaaaccatttacccgaattttcgattactctgcatccaacagtgacgaatgcatcgaaatgatggatatcgtgggccactgtggtgacggctatgagtggatcgtggaggagtacggccgcaaaatgattaatgtgcccattgccgtgcctgactttcagatcgaagagaaattcaagatcaacaatgggataatgggcggaaacttctggtatttgtgcacgacagcccaggcagttatagaagccggggaggccgtcatcgacgccatcatgaacgtggagggcgctaccacaccattcgacatctgtagcgccgcgagcaagccagaaactaactatcccgaaattgggccgaccaccaatcatgtttactgccctagcctgaaggagagcctcggagacatctctaaggttccggagggcattaactatatccccgagatcgtaataaacgcagtggacgagaagtccatgaataaggccgtgaaggcagggattgatgctgctctggagtttgagggcgtcgtgggaatctcagcaggcaattttgacggtaagcttggagataaaaacataaacctgcttgatattctgaagtga

SEQ ID NO: 8693 - DNA, 948 bp, synthetic construct
  source 1..948: mol_type = other DNA
atggagattctggacgatgacatcaacgcagaggtcgtgggattcggcgcgctgaatgtggataaactttatagtgtggcaaatatcgccgggaaagacgaagagagttttataaaaagcgaaacggacacgcccgggggcagcgctgccaacacaatcgtgggcctaagccggctggggtgttccacatctattataggcaagatcgctgaagacaacgatggggacctcatagagtacaatctggccattaatggtgtttactcaaataacctgatctactccgaaacagggagcactggcaagtgcctcgggtttgtagatgatgagggggagaggtgcctatacatcaacccaggcgtcaacgatgaaatccagcttggtgagatcaatccactgaacataatgagatgcaagatcatgcactacacctcattcgttggggattcgttcaaaacacaaatcgaactgttggacttattaaacgaaaatactgtgctgagctttgacccgggaatgctgtacgtgcagaaaggattcgacgagctgaaacctatccttgatcgcaccggcatcttgctcattaatgagtctgaactccggctgctctgcaacaattataagtcttccttgaaggaattggctattggattccttgatctgggcattgaaaccgtcgtggtaaagcagggtgcgaagggtgtgtttgcaattaacaactcaaccgactgtttcgtcgagtcctacgagtgtgacgttgtcgacactaccggtgccggagacagtttcaacagcggctttctctattcgttcctcaagggatatgatctggagaagtcctgccgaatcggcaactgggtggccagcaaaagcattgagggctttggaatggataagttcccctccgccaaggacctggaggacttcctgagtgagtttaactattga

SEQ ID NO: 8694 - DNA, 828 bp, synthetic construct
  source 1..828: mol_type = other DNA
atgaatgtatctttcataaagcagatgaaggacttagaacgggaagtcctcctcaagtctgtggaacttgacgacgacagcgatgatttccagtttgaactagacgatttcagcgccaatgatgaaatcatcgcagtggcccctaaatgtgtcaggtgcaacacatgtgttggggagtgcccggtgaacgctatcgagccagccaacatctttagaattgccaagatcaccgacaagtgtgttaagtgcgagatttgcgtgcaaagctgccccgtgagcgcaatcaaactcattgataactcaatcgtgtatgacggggagaacgaggaaaatataatcgagtacaagctctccaacatcagttcccggcatagggtagtccgcatgaacaatatttcaatcgattacagttgcgataacaattgggacgactgttccaaactgtgtcccacgaacgcgttcacactggaatttaaggagttctttgatgacctggatatggacctgggtattgagctcatagatgacgagttgtacccatatgtgaacgaaaagatgtgtataggatgcggcgcgtgcgccgaaatatcgcttaatgacaatgcaatcgaactggaccgctatatcggcccaattatccacagccggttcattgatgtcaaccacgatctgtgcgtgaactgttacctgtgcgaggagaattgccccaccggagctatcgagctggttgacggcaaagtggtgctggacgacgacaaatgcattcgatgtatcgagtgcactcgtcactgtcctgtcgtcgccttgaaaagagtggagattgagtga

SEQ ID NO: 8695 - DNA, 636 bp, synthetic construct
  source 1..636: mol_type = other DNA
atgcgcgccaaagagctgatggataagaactttgtataccttaacgccaacgatagcgtcatcgaagtgtccaaggtcatggaggagatacgccggttcacatgtcctgtggtgaatgacaataagcagttgatcggctgggtcacttcttttgacatcaccaaggggttaagggaaggcaacgagaaaatctcggacataatgagcggttatgaggaaatagggactgttcacgccgatgacccagcacgaaaagctgtcatcctaaccgccaacaacaaattcgtcacggtgccggtggtcaacgacgacaagcagatcattggcatggtgagagcgtgcgatatcgtggaactcctgagcgaactctacgacattaaggtttcaaagctgtatgaggcaatgcagaatcagcttaagggagtgacctgggaggagctcatggctgccagtgctctggtttcacaaaaaacaacgggcgtgaagattagccccgaggcctacgaagagaatattatgaatagtacatttggagaggccatctggtccaccgggggtctggagaaattcttcgcgggcctgatctccgtgggggaactggtaattgctcgtagagtgggaaaggcacggaggtga

SEQ ID NO: 8696 - DNA, 642 bp, synthetic construct
  source 1..642: mol_type = other DNA
atgaatctcaattttgactttacggaaaagagggtcatcattactgcatttttctgcatggctttcaccattgcaaatctgatcaccgttaaggtcatcaacatcggattcctggggatggagacgcccgccggggttctgatctatcctctggtgtatatcctgacaaacgtgatcgcagacgtgtacggagaaaaaatagcgcagcggacaataattctcggcctttgtgtggacattctgtttgtcttcatgacaaccctgatactcttcctgccctctccagcgtactacacgggcgattccagcctggcctttgtgtttacccaaaccccaagaattttagttgcctcctacatcagctacttgatcggcaacttcgtgaacgcccgcatcaccgccaaagtcaacgaggggaaggagtattcatcgaccaaaaacttgggtattcttgccttcagtgagctaatcgacaattttgtattcatcggtctcgcattcgtgggcgtcttcgctgtgactgatatcctaataatgattgtgtcccactggattctgagtctcatttggagcgcgatcgctcagccgttcacaaagatgactgtaaagtgggctgaaaagggaaaacccgccgaggcctga

SEQ ID NO: 8697 - DNA, 366 bp, synthetic construct
  source 1..366: mol_type = other DNA
atggaactgaaatatataatcgtcctgttcgacggagaatttatgaaattcaagtctaaattctttatttcactgctcatcatcttcgtgttgagcatcgtggccgtcccggcgtccgacgtcaactccacagactttagccagctcaacgacaccgtgctagactcaagtttcaatgataatcttagtactgtggagactagcaacaactcgaagaccgtaaacaacaccaataatggggatatggtgcagattattaaaaccaatcccaagatcacggttaagtccacatacctcaagagcaaggataagctggagtttaacttcaaaaacgcatctggcaacccactgaagtccaagagctga

SEQ ID NO: 8698 - DNA, 1572 bp, synthetic construct
  source 1..1572: mol_type = other DNA
atggtcttcatcggcaacaaaaagtattcggtgtacaccaactccaaaggggtggctaatctcaacattaacctcgtagccaagacgtataagctgactatttctttcgaaggggacgacaactacaacgctgtcaataaaatcatgtatctgcgcatctccaagctgtcgaccagaatcacgtgctacaaaaacttcgtcgtgaaaggaaataacctgtatttctatctctttgacagctactacaacccagtcagctgtaagaaattgatcgtcaagtacaagggaaagacagtgactaaaacatccaacaaaaacggccggatctcttacaagatcaaatcatcaggaagtaagcactcccttcatgtgaaatttaagggtgacggtcagttcaagtcatcttcaaagtaccacaaattctatataaccaccttttccccactcaagatcggcaactctaagctcttaaccaatggatatctgcggatctacctgaatggcctgactaagagctcaatttctaagaagacaattgtgattaaggtggcgagcaagaagttttctaaaaagtcctcttcggaggggattgtggttctgaagccaaatgtatgcgccaaggcctatacggttagtgcgaaatttggcaagtatgtcgtgtacaagaagatgaagtgcattgagggcaacgtgaaagaccccctgaagtacaacatcccgacaaaaagcggcgtgcccgacattgatgtcatgcctggaaattacgtgatgggagacaacaatgccagatacaccctgaccaagatacaatacaatgaggttataaagagagacagttactgcttgtttctgaataataagttatccaagtacacctttttcaaaacaaagaacaaccccaatactaaccatatcattcagcgagaaaagtggaatgtgatcgaaagggctataaatctgaagattgttgggaaaaacaaggccaattattggctatccgaaatcagcgtgttgcttaagggcaaatcatataaatatcctgaggtcaggaagacccagtccaccaactactactgtggccccaactcagctagcgtttgcactcaggtgctcaagaactactattgtgaaaagtacctcgcaaagctaatggggacaaatcgaagggaggggacaaaatgccagtggatcattgacggtctaaataaactcgggttcaacgcaacctacttctacaaggccagctttgataatgccttgaatgagcttaagaaaggcggtgccgcactggtattccacgcacctcggcactatgttagcatcctggatatcagctcggatggcaaaaaagtgctggtgagcaactcttatggaagctatgacaatatcccgactaaatggacgaaaataagttacatgaaaaccaagttcagtaaatgggaggagagtgtgatcgtccgctccaactacaagctttccgatagcgtaaacgatagcgtcaactgtttctataactccatgggtacaaactggtaccgccacagtacgagtcaaaaaatggggctggtgtga

SEQ ID NO: 8699 - DNA, 1290 bp, synthetic construct
  source 1..1290: mol_type = other DNA
atggttgaggagaatagtaatatgctacttggggtgagagataagcctcccgcgctgaggtgggttttacttgctatacagcatgtctgtgcaatgttcggagccaccatcctggtgccgatagtggtgaacaccacggccggggcagatgttctgtcaattccggtcgccttggtcacatcggggataggtaccctgatctatcttgtgtgcacccgtggcaggagtcccgtgtacctgggaagcagctttgctttcatcgctcctatggtggccgggtatgccctggctggcaagagcagtgtgtttagcgctttgatgctagttggcctcgtctatgtggctgtgagctgcatcatccgcatctccggtaaagcctggattaacaaactgttgcctccggtaatcgttggccccatgattatggtcatcggcctgagccttgccccaactgcgatctccgaaatcggcctggacctcgcagtcgtcccatggaaaaacctggtcgtggcactgattgccttcctcactactgctttcctggcagtgcggggaaagggaatcttacgcgtcatcccttttctgatcgggataatcgtgggatacattgccgcggcggcgctgggtatggtcgacttcactcaggccctcacggccaacgtggttgaaatccccaagttctacctgccatttatgaattacaacttaaactttgccgccgtcctcaccatcgttccaattgctctggtaacaatggtggagcacatcggagaccacaaggtgctgagcgagatcattggccgggatctaattgaagatcctggcctcgacagaaccctcctcggggacgggctagccacattcctggcagccctgttgggaggtcccgcaaacaccacatacggtgagaacactagcgtggtaggcatgacccgagtggcctccgtttacgtgattgctctggcggctattatagccatcatattcgccttctcaggccacctcacgtcactgcttacagcaattcccgctcccgtgttgggcgggatctctgtcctgctgtacgggttcatttgcgtcaatggcctcaaaattttgatccacaaccaagtggactttaacaacacgaagaatgtggtggtagctgccaccatgcttgtgctgggtttggggggagccacactgtccgtggtgtatggcaatctctctctcgccatgtccggaatgtcgctcgcagcagtcatcggcgtaattctgaatcttgtgataccagaggagaagcatgaatga

SEQ ID NO: 8700 - DNA, 627 bp, synthetic construct
  source 1..627: mol_type = other DNA
atgaatgagttcgttctgaatcacccactcataacccacaagttggcatttctgcgcgatatcaatacgggaactaaagaatttcgggagctggtaaccgagatcagcaccattctggtgtacgaggccatgagggacgctcaactcgaaaagaccacgattgaaaccccccttgagaaaatggagaccggcaccctgaacgagaacaactatgcgattgtgcccatactgagagccggaatgggcatgattgacggcgtgctgaatgtcattccaaacgccaagattgggcacatcggcctctacagaaacgaagaaacattcgagcccgtggaatattattacaagatgcctgaagggataaaaaaccgcgaggtcctagtcgttgacccgatgctcgcaacagggggaagtgcaagcgccacaatctcccggctgaaacaggatggggtgactaaaatcaagttgctctgcatcgtagctgcgccacagggcatcgaaacaatcgagaacgaccatcctgatgtgaagatcttctgtgccacggtggaccgagagttaaacgagaatgcctacatccttcccggtctgggcgatgctggtgacagggtctacggaactaagtga

SEQ ID NO: 8701 - DNA, 993 bp, synthetic construct
  source 1..993: mol_type = other DNA
atggtgtccaaagaatttatcgaaaaggaatggattaaagcttataacgccctaaacccctttctcgacgtgaatggagcatacgagctccggaagctgctgtgcgacttgcgcaacaacgaaaagttcatttttatctcagataatgtcgattatacctgtatcattgaactggacgagctgaaggatgacatcccgattttcaaatatgcaagcgactgcttcaagatcttcggcatcttcagtaagtcccagttgagcaaacttcatttcgcctccgtgtacgacattatcgtgtacagttgtgtgagcgagctgaaaagagacctgtcctacaacgagcgcaaaaaaatttactactgcaacttaatccacaagctgactctcaaccaggatatcagctccaacttcaaccaaaactttaaatacaataacgagctatttaaccagatgaagaagatcaggtggaatagttctgccaataagcttaaaaatatcatatacagagacttgatgggtacactcaccctcgagctgaacactgacagcggagtgacctcttcgtttggcgagtgcgcggagtatctggcttgctgtaacgtatttaacgacaatcggctagaagtcatgcctgatgacgtggttaagagctggctcttaacactgaatctgttcctcatggatcttcgtccctatattaaggattttaattcagccagtgacatgattgccgacaccggctcagagttcaagccaatcaatatttcggaggggcagtctaacaataaatcctcatctatcatccgaaaggtccttgcgggcgtgctgagcataattattgtcttcctgctgcttatcgtaatgagcacgatcctgatactgatcttcggagacgctttggataacttcatcgggctgctgaggccagttggtataataggcttggccctcgctgcagccctcgggaagaagatatacgataaactggtgtga

SEQ ID NO: 8702 - DNA, 993 bp, synthetic construct
  source 1..993: mol_type = other DNA
atgtttgagttttattacgaaaaggacatccagaaaaacttcggcgatctggataaatttgatgacgtcctgaacctgtttgaacttaaaaatctgatcaatgacttcatcaacaatgaaaaatatgtgttcattatcgagaacatcgacttcgagatgttcgagacaatggagaagtcaaggaagtattccacattcataaacaatgcctttaacgggcttaaaagcttcaagtactggattcagcccagcatcatgaacttcaactcattcaccagcgtgtactcgataattgtgtattcctgcattattgcctacgggagaatgctgagtaatgacgaattagagtccatcatctttagcgacttcccaatcaaactgactttggtcatggacgatttttacaacatcaacaacgtgccactgctggacaaggatttcttcaggacaattcgggatgttaagttagataaaagcgcaaaaaagctggacaagtttatttaccatggatttctgcttaacctcgccgaacccggcaaccactacgtagcggttgtggtcgagttttcatattgcgccagctacttctcccggtgttacgcctattcacgaaaaaacaagtttgtgaccattaatgacatcgctgacggctggattctgacgttcaaactgttcctcaatgatatacgcggttatatcgatgggctcgagagcaatagtccgtgcgctatcgtcccttctctaaagtcgcacaagaagattaaggtggaggaggaaaacaatggaagtttcaacatcaagaagataatcgcgatattcctctccatcttgtttttttgttttctcatactcgtggtggaagacattagctacatcctaacgggcagttactactattctggtgctcccaccacccgctatgcaatctttggattcattctgttcttgacttccatgttctactctctggtaaagaatatcctcaaattctga

SEQ ID NO: 8703 - DNA, 990 bp, synthetic construct
  source 1..990: mol_type = other DNA
atgtttgactacaatttcaagaagagcatcgaaaaaaactttaatgaactggaaaagttcaattacctcaagaacttcaacgagctcaagaacttattgttgaccatatccgagaacgagcggtacatcttcatatcgaaaaacattgatttcaatgcgcaaccgctcatggataaaccaaagaaccattccaaatttatcatcaacgcctacaacggcctagagagctttaagtattggattaagctttcaattatgaattataactttttcgtgggcgtttattcaattatcatgtatagctgctcctgcagctacggacggcccatggatatcatcgagtttgagcacgtgctaaattccaatcttccatacaaactgaccgtgtatctggatgatttcgataagtacgacgacttcagcagtcttagtgaggaatttttcagaacaatcagagacatgaaactcgataaaaaggctaacgaaatcgaaaagatcatctacaggaagttctggtcaaacctcaccatcaattatggcacagagaaccgagtggacgtccagtttgcgtattgcgccaactacctgagcaggtgttacgccttcaatagggggcgtaatgtagtcagcgtggaggacattgctgacgcctggattctgactctgaaattattcctgaacgacctccggccatatattcgcggtctggaatccaacagtccctgtgctagcctgccttctgtaaactcttacaagaacattgaggtggacaatgacaacgggtcggtgaacgtcaaaaagatattcgcaatattgctgtcaatcttgttcttttccctgatcattatggtcttccagtacaccgccaatctgctcacgggggattattattaccctaattctccccaggaccgctacgttctggcaggcatctttcttttccccactagtatgttttacggaataatcaaaaagattctgaagatctga

SEQ ID NO: 8704 - DNA, 993 bp, synthetic construct
  source 1..993: mol_type = other DNA
atggtacagttcccccagaagactattgacgaatggatcaatgaagactatgagaagctggatgtatttatggatgcggacagcatggaggacctccgcgagctgatcctaagtttcaagtatgacgataaattcgctttccttagcgagaatatccactaccagacagacattaataactacagcgataataacaacctgtacctcgacgccaacgacgtgttgggagacttcgggttcattttcagtaactcccacctctcatctgtgtgcatcgattcactattttttgtgatcgagtgcagctgcattggtgaacttaggcgcgaattgtcaaatattgagaaggaaaaagtctattactccgatctggggtataaactcaccctgggccaggagaattttctgaagataaagaactatgaagtcatcaacaaaacatttttcaagaagctgagcaagatcaagtggagtagtaactccaagaatttggacaaatacatcaagaacttctgggatacgatcacactgcaatacgatacctactatcatattgtgtcctcctttagcgtgtgtgccaattacttcgcctgttgcagagcactgaccagcggtcggctggaggtgtcgaatgagggggtcattcaatcttggttactgaccctgaacctgttcctcatggacttacggccgtacatcaaagactttaacagcgctagtgccatgatctccgacactggcagcgagttcaaacctattaacatctcggaaggccagtctaacaataagtcttcatctatcatccgaaaagtgctcgcgggagtgctcagcataatcattgtctttctgttgctgtttgccatgtccgcaatactcatactaattttcggagacgccgtggataactatgtcgattcccttaggccagttgggataatcggcctggctctggccgcagctctcggcaagaaaatctacgacaagcttgtttga

SEQ ID NO: 8705 - DNA, 960 bp, synthetic construct
  source 1..960: mol_type = other DNA
atgaagcaggagaacacctattctccagttagtagtttgttttccaagcagctgaatcttagcgattttggcttcgaaaagcccgcactcaagaaaattaaagagattaacaaagagataaagcccaataagctcctgaagttcatcaagtatacctttaaatactccaaaattgtgcttaataagtatagcagtcacttctcgaagcacgacttcacgcagcctgccctgttcacgcttctggctgtgaagatctacacccgctccacatacagacagatcactgatctactggagctgtctgacaagatccaggaacatctgcacttgaaaaaggtcccccactacacgaccctccagaagttctttcaacggctgccaacatcaatcctgcaggagttaaacaagctcatcctgcagaatcaccagatcactgggaagatcattgctttggacggaagcggcttcactaatgactacgcagacaaatattacgccatcatgaggcgcaaagaacggaaaagctacatcaagaaccatatttcgatcgatgtcgatacaagattaatcctccatttcgcagctcagcggggcccaaggtttgacacacgatttgccatccctgccataagaaacatcaagaagtataaccctaagtacatactagcggaccgcgcctacgacaccgaacccatcaggaagtgcattaacgaggaagccaaggcggaggatcaaatcccgctgaagacccgtgccaaaaacgggcactaccgactgaaatccaaaaaacagttcaagcaggaaatatattcccgccgaaacaacgtggagtcaatattcagcgtaattaaaaggatctttaacggaacaaaccggagcagaagcctccaactgtcaaataaggagaccaaactcaaaaataccatttataatatttaccggagcactcagattcaatga

SEQ ID NO: 8706 - DNA, 777 bp, synthetic construct
  source 1..777: mol_type = other DNA
gtggaaaaaggaatccggttcgacgagaacttcatcagtgaagtgatcttccggattgagtttcccactattaaaaagctcacgggtaacgacgaggaggtagtgaaggactttgctaacaagatctcaggcaccttccccatcagcgaggtgattcctcacaacaagattaacctcgacattgacattaacagcgggcagctcccaaaaattacccgcgagggcgacctggtttggatatttaagagccacaacaacaagaagatcgtgacattgacagcgaatgaccttgttttggagtaccgagacagggtctatagtggcttcactaacttcttggatgaaatcctgttactgatggacgccttcaatcagttcgactaccagaaactaaactttctcggcctgagatatattaatcagattaccgataagaacgtgaacaataacgtctctgaatttttctccctggatctgacaaacatggccatcatcaataatcttgagaaaaataatgagaatctagtccagatatttaccaaggtaaacttcaaaaaggacgactacctgatgacgatgcaatacgggctcttcaacccgcgcttcccaaatgtggatgcagataagatgttcatactggactacgactgcgtgcttcacaatatctcccatgtcggggaaatcaaagataatctgatcgatatgaaccatctgatctttgataagtttgattattcgataaccgccaagtttgaaaaaatcatcaaaggagagtga

SEQ ID NO: 8707 - DNA, 447 bp, synthetic construct
  source 1..447: mol_type = other DNA
atgagcccccccgaggtgatccgcgacgacgacacatacattaccctgcctgcctccctcaaggacgagtatttcgagtcaaaaccgatatcctacagcaagtatttcgagagcttcgaatttaaatttaatgagctctctaatgactttaaccttatcaacatcatggagattcaggacttcattttacttcatgatgatctgtttgattatttgagtcagatcaagctgctgctccagaagtacttctccgaatatgactactgcctagaattttacagcgatccagaaatacagtcactgaaccaactggtcatctacatcaacggcgatgagagttctttcgacgaggattggagctccctgaaacggatgaatagcgaaattaacgacttgtgtaatttcccaaacagtgtaaagcacctgatctcggtggacctctggtga

SEQ ID NO: 8708 - DNA, 1275 bp, synthetic construct
  source 1..1275: mol_type = other DNA
atggtggttaaatatctgccccgtatactggatgatgatctggagaaatgtcttacaatgattggcgccattctcattgtgggaccaaagtggtgcggcaagaccactacggcagaacagcatgcaaacagtgtcctgaagctccaagacaaagacaattacaaatcaaacatgatgtgggccgacatcgaaccttcccgattgttgaagggggacaagccaaggctgatcgacgagtggcaggtggctccagtcctttgggacagcgtgcgcaccagcgtggatgagagcgaggactatggattgtatattctgaccggttcgacagtcgtcgacgaggacagtataatgcatagcggcaccggccgcatccacaggatgctgatgaggcccatgagcctatatgagagcggcgaatccaacgggcagatttcaatcatggatctgttcaacaatcctgacatcaacatcaacgagtgtgagtccgatctgacaatcgatgacctgatatttgcggcgtgccgcggcgggtggcctgattccctgaaccagaagacccgagagggcaagctgttcgtagcgtacaattatctcgagaacatctgtaatactgatgtgtctgccgtggatggggtgaaacgagatcccgatagagtccggctcttattgcggagcctggcacgcaacaactctactctcgctaaggaccagactatcatcgatgacatgaacgctaatttcatggatataagtaggccaacgtactactcatacgtggacgccctgaaaagactgttcgtaattgaagacaataggggctggagtccgaacatcaaatccaagagcgccatccgctcgggcaacaagaaggtgttcatcgacccgagtatcgccgtagctgccctaaacgctaaccctgaatccatgattaatgacttgaacacattcggtttcatttttgagaacctctgcattcgggacctgagcatctataccaattctcacgggggaaaggtttcctactaccacgacaagtcaggtctggaaatcgactgtgtggtgcacctccgggatggaagatacgcccttattgagtgcaaacttggaaatgatggaatagaagaaggctctcaaaacctactgaaaatcaatggtttaatcgagaagaatgacaagctggacaatcccacatttcttgcagtcctcaccgggggaaaatacgcctacacgcggcccgacggggttaaggtttttcccattggctgcctcagatga

SEQ ID NO: 8709 - DNA, 96 bp, synthetic construct
  source 1..96: mol_type = other DNA
atggtggagaaacagaacctgagcacaaccgaggaggggagggcctccataagtgaacggttcctagaaaagctcctgggcaagatccacagctga

SEQ ID NO: 8710 - DNA, 222 bp, synthetic construct
  source 1..222: mol_type = other DNA
atggccgagacaaccgacaaggttatcgtgattgtcggctacctcctggcgatctttatcccaatacttggcctgattgccggtatagtactatacttcgtgaagaaggaagatcccttctaccagaaacacgcaaaatatatcattatcgtgagcattgtcgtctgggctctgagcgccatctttgtggggatgctcaacgtgggattggacgggttctga

SEQ ID NO: 8711 - DNA, 1116 bp, synthetic construct
  source 1..1116: mol_type = other DNA
atgaataagtcggatttgaaacgggatttctatatgctcaaggggccgctagccaagaagggttatgactggtggtggcattccctgaccgcatatgataaagagacgggggaagagaagcccttcttcattgagtacttcgtctgtaatcccgaactggctgaggaggagcccactctgggacagttgcctgagaaccaaaaagccggcaagaagccatcatactgcatgatcaaggccggcacctgggggaaaaacgccaagcagatccacaacttttactcaatgaagtactttgaatgtccggacgatgaactaaatatcaaggtaggggactgcagcctgacggaaactcatatgagcggattcgccagagtcagtgaggaggaatcccgggatcacccagagtacatgtccgatgccggcgacatgatgtgggacctggacattgacaagcagatcgcatttaatgtggggtacggcgcgaacggtctgttcaggaagctcaattcatttgagatgttttggcacgctgagggcataaagactcagtatagtggaaccatctggcttgatggcagggaatacgaagtgatccctgagaaatcttatggctatgcagataagaactggggaggagacttcacaagcccctggctctggatttccagctgtaacctcacaagcctgaagaccgggaagaaacttaataactctgcttttgaggccggggggggacgaccaaaggccttcggcatatccatacctcgcaagctgctgatcggtttctactacgagggtaaaatgtatgaatataacttcgcgagattctggaacatggttaagattgactttgactttgaggaaggcgaggacgtccatacatggcacgtgaatgcaagtaacaaagacagcaaaatggagttggtgctttattgcaaacgtgaagacatgctgttaatcaactacgaggctcccacagggaaaaaactccacaaccgcctgtggaatggcggaaatggatggggtgaaatcaagctgtacaaaaaagatggcaccctcattgaccacgtgaagatggagaacaccggctgcgaatacggcgagtactgctga

SEQ ID NO: 8712 - DNA, 699 bp, synthetic construct
  source 1..699: mol_type = other DNA
atggttttcacagacatcattgccctaatcgtggtgtacatttacgtggcgatcatttttgtagtggctgaaatggttttgaagacgcggcccgagattagtcgcaaatttttgcacatcatggttgggaacatgatatttgccatgccatttttcgcaaatccgtggaacatggtgtggttcctgaccctgcccattacaatcgctctgttcttcttaactgactactcgccaattaagatagaaaacagtgtcactgagagcggccatgccctgggcctgttcttctacgctggaatctggaccatcctgattgcaatatttacaataatcgctcccgcgagcgactccaagctcttcctttggatcgtcgccctcgcgatcgtcccaatggtctacggtgatggatttgcagccctgattgggcagaagttcgggaaaatcaagtataccgtatttggaggaaccaaatctcttgagggctcactgacaatgttcgtggttacctcagtcatgggcgtctttgtgtggatggtattctattccatcggttgtacgatgcctgagtttaacatcgtgagcatcctagccatatccgcagtggccaccgcctgcgaagccttcagctacgggggcattgataatctcaccgtgcctgtgatcactagcattctgtatttcctcgtggctatcctctga

SEQ ID NO: 8713 - DNA, 420 bp, synthetic construct
  source 1..420: mol_type = other DNA
atgaaggtgaaattaatcgagaagttcgcactcggcgctttcgtgggttgctttattgtgatgtgtgtcatggtgctgatatccctctatcaggggcctcagaacatcaggtttagcggcattgacataatcaacagcttcttcgggagtatcgtcgcaggctggggattcaccttttcaggatttatttatgacaaggaagatttgcccctgaccttccaagtgatcattcagatgggtgtcggcatgacaatactactcctgatcgcgatctaccttaaatggatgccgattaacctgggcatcggaccaatagtaacgtggatcgccatcgcttgcatctttgccatcattttctggtttgggttctacatttactattacctggttgcccgggacttgaataataagctgaaatga

SEQ ID NO: 8714 - DNA, 1779 bp, synthetic construct
  source 1..1779: mol_type = other DNA
atggataataagaagatatttctgtcgttcatattgtttattctcattgcaatctctgtaagcgcagtgagcgccgtggatgccgataacgctacattggccgaggacgcaattccgactgacgcggatgtggtgcagactaaagtcaataacgcaaactcaggagacacaatcacattggaggacaaaacatacgactttgccaatcagaccgttacaatcgacggtagggataagatcaccattcgcgggacgggcaacaccatcatcaaagggcacggtggccaaaattcaaaaacaggcgccctatttatagtctccgagagcatcggggtcacattcaaggacatcacattcattgacaccaaccccaacaataatttcacttatgacggcaatgtggagggatatggtattacattcgacggctcaggcgccgaaaatggcgttgtggacaactgtagctttgcagattttaatactgctgttaacgtgaaatcatgcaactatgttactgttaagaacagtaagttctccgggggttacgccaccaagctgatcaacgatccaacagtcaacaaggaaaaggggtctaaggtggtctccgctggcggaagcctattcctcagtgtgctgaattgcacctttgatggaccaatgctcgacgccgtctccatctatggcggtagtggagatgccaagataattggaaacaccttcaaggacaatgtctatgccatcttcttcgggggggcatctacggaaggcaccttcatcaatgataatacattcatagaatgcgggcagtttgtgaaggacgccaacaccacctggggaggataccctgtaatctccatagagaaggcctctgacagtgtgtacatgaacaataacactttctatgcagttaataacaataagctgattgcagcggagagcgcgaacactgcccacggcgccccaagtaccctgggcgacattaacatcacgaacagcaacgtcaacctggccaatgacaacgtggtggctgggtccgtaactttcctgcacatcctgagccggacaggagacatcaatcccaaggcccctattacccttaccggaaacaaatatgccaagggcgtgaaggccgtggtggtctggtacaacgactggggcgtcgaggattcagagaacatcgtgatcccccaggctcctgaaccgacccccgctcccgtcgccgtgtcaacctcgatctctagcgctaacttagctatttacgcggggaactccggtaagatcaagctcacgctgaaggatgcaaacggggtggcggtggctaataaaaccgtaaatattgtaatcgacggtgttgccaagacggtcactaccgacgataatggcatcgccattctgtcggtgaaatactccaactctggaactcattacgcgacgcttgctttcaccggcgacaacgattacacgggaagcattaaaacagtgaagatcagcgtccttaaaaaagtcactgccctcaccattacgaaaaaaacatttaaagtgaaaactaagaacaaaaaggttaccaccgtgctgaagagcggtaagacagttctcaaatacaagaaggtgaccttaaaggtgaaaggcaaaacctacacggccaaaaccaattccaaagggatcgctacatttaacatcaagatagctaagaaagggacctttaaagcactgactaagttcgcgggcgatggcgcttacaaggcagccagtaagtattcctatgtgtacgtaagatga

SEQ ID NO: 8715 - DNA, 651 bp, synthetic construct
  source 1..651: mol_type = other DNA
atggatttgatcggggggtacctgctcgtcatcctgctattattcacagccaatatcgcgctgatactcggcgactataagcttgataatattaagctcgtggccctgtcttccatctgcttcatcgtttcattcatcctgatgtacgctagtagctttctcaacgtcagtctgtccttcctcattgacaccttcagctatgtcttctttattattttccttgcacttgttgttgtaataatcaagtacataaaaaataacaattttaaacacgccttgtatctaactctggtgaccttcctcatcacaatcttcctgttcgcttcgcagagtaacctgaacgtgtttaacatcatcgtgtacagcttattcatttttatcattctgttcgtggtgtaccagcttagcaaattgctgcaccatgccaagatgcaatacaacgtcatcacaagcgaatacatgtttctgttttccatagtgatcttcattttcgcgctgacgtatgactccacgaagtctctcaactatacctcattcaaggcctttttgatcctgacccccacttaccagctcatctacgtgattattgcatttgtggtaatcctgatcattggtgtctttataaatgagattaaaggcggaaacagctga

SEQ ID NO: 8716 - DNA, 642 bp, synthetic construct
  source 1..642: mol_type = other DNA
atgatcatccagggaaccgagacattaacttcgatcattcacatattttccgaaagcctactgacacccgtagtggtgctgcttgtggtgagcggagtaattatcattctggctttgggcggcttgatcaatgagtatatctcacgcaaaccgatttcctccaacgacctcgagaacttagttaggagaatcagcttcagcaataacgtggaccaaatgaagagtgaaatcaccaatagtaatctgttcaactaccagaaggaaattctgatccggattgctaacaactatgatatcggctgcgatgcccgaaaggcctttgcgagcgagctaatatctgctgaagagacaatactgatcaagaaaacgaataaaaccgacatcctggtccgggttgggccttccttggggcttctgggtacgctcattccactgggccccgggctcgcagcccttggaacgggggatatcgccactctggcccagtcactgaccattgcgttcgacacaaccgtcactggtctcaccattggcgcactcgccttcgtcgtcagcaagtacaaaaagcagtggtacgaggcagagctgatagacgtggagacactcgccgaaaccgagctggaagtgatcaacaactggtga

SEQ ID NO: 8717 - DNA, 300 bp, synthetic construct
  source 1..300: mol_type = other DNA
atgcttcgcaagaagcggaggattagcgagagcgtggacgacgatcccatggggggcctgaacaacctaagcgacgcgatgctcgttctggccctgggctttttgatattcgcaatcatggctctctccgtaaatccagacatgatcaccgagcagacccagaccaaggaggtgtcaacagccaatacattcactcaaaactatacggatgccggcggactggaagattccggatacagtgaagtggggaaagtgtacgaggacccgtcgactgggaaactggtcatggtcagcggttga

SEQ ID NO: 8718 - DNA, 402 bp, synthetic construct
  source 1..402: mol_type = other DNA
atgaagatgccagagacgctggatagcaagctgctcgcaccctgcggcattaactgcatcagctgcgagaaataccaaaatccgtgttccggatgcctgatatctaacgacgggaagagcaaagccagtttgaagtgcaagattaaaacatgtttcgactccaaatcgttctcatattgcgggcggtgctccgaatttccatgtcctctaatgaagaaacactcaaagaagtacgtcaagaggcacgatctgaacactcttgagtctgcgaagagaataaagaccaccggtatcggacgcatgatgagccaggaccatgacgaatggctctgtcccgagtgcggcggggtgatcaaattccagacaaaaaagtgtagtgagtgtggcatcaaaaaggaatga

SEQ ID NO: 8719 - DNA, 741 bp, synthetic construct
  source 1..741: mol_type = other DNA
atgagtatcatcatcagccccgagtttaagaagctcaagaaccgcttaagcgatctcatattgatccaccatgagctgctgctgcagatttgtccaaacatcgaacgcgagtacctgctaaagttcggaagtctcgaatatgagctctataagaaagacgtgaagttatccatgctcaagcgaaagcttcagctgatacagatccaaattagcacggaggaagaaattgatatcgaactgatcgacgagatactcgaggaggagttcttcaagtataaggagaacatcaagaagcacatggatgaactgaatggggccatggaggagcagcacatttgcctactttcaaaaaaagataccaaaaggcttaagctgatctacaaacagtgcgtattgaaactgcatccggacctgaatcctaacctgtctaatcgggagaaagacctcttcattcagattacagaagcattcaagaatggcaacttgaacgccttggagtccctgtactactttgtgccaaacaaaaaagtggaatttgaatcggagatagaacggctccaggagctgatcgaatgtgaggaaaaggagatcgctgagatcaaggagaagtacccctacaataaaaaagagctgctactggacgacaacgaaatctacgagtatgaggtcatgctgaataaccttatcacccaatttgacgacgatattcagagatgcatggatgaaattgacctgatttga

SEQ ID NO: 8720 - DNA, 558 bp, synthetic construct
  source 1..558: mol_type = other DNA
atgtataagtatatccgggatgcatggaagaatccggatgagtcttacgtgcgggagctcatgtggcagagggcccccaagtggcgacgacaaaaggtggtgcagagaattgacaggcccacaagactggacagggcgcgcagcctggggtacagagccaaaaaaggcttcgttctcgtaaggacccgagtgcgccgtgggggcaggagaaagacacggcgcttcaacggtcgtaagcctaaaaggatgggcgttaacaagatcacccaggcaaagtcccttcagcgcatcgcggaagagcgggtcgccaaaaaataccccaacctggaggtgctgaacagttactgggtctgggccgacggaaagtacaagtattttgaagtgattttggtcgatccacaatccccaagcattgtcaacgacaaaaaaatcaattggatatgcagcaagaagcacacgaatcgggccctccgggggctaactagtgctggtaacaagggaagaggcatcaaatcgaagggaaaaggctcagaacaggctcgccgcagaaagctgtga

SEQ ID NO: 8721 - DNA, 423 bp, synthetic construct
  source 1..423: mol_type = other DNA
atgatccataatatcaagtttcgggctttcgtgtatgaaaacgagagtgtggacgaaatctctcaggctattcttaacctgcttcccgaagcagagattaacgtggaggaggccgaggggttgctggaggacaggatactgattctgacgggcgtcgtaagcaaaaaaagatacacaaagacttttttcaacaagctcctggaatccgcggacttggacaagttaaacaatgacctcgagtgtaagatggatgagaagggaaattggtttctgcgattcgataagaccgatgccctagacgaaaagctcaccatactggataaaggcgacagcatccacctcaaaatcaaaatcgccgccttcccagccaaaaaacagatcgcagttgataaggtccgcaaggcgatttcaggttgcgtgtga

SEQ ID NO: 8722 - DNA, 378 bp, synthetic construct
  source 1..378: mol_type = other DNA
atggagaagcaaagtaagattctcatcgtgttgctgatcgtgtttctgatatgtgtgggtgtgttctggtttcagtttaacaacaatgtttcaacattcatgatcgtcaacgaaacccatgtaaccgagaacagctcgttctctgggatgctggtcgatagctatggcaacggcgtcgctaaccagaccatcgcctatcacgagcccggcgggaacgtgggaacactcacgactgacgagaacggggagtttactgttgaacttgccaagtacctatccaatagtacaagcgacaattactacggtgacttcaaattctccggcaatggcaaataccagggatgcgcatatgaagggaatgtgaccgtgggaatttga

SEQ ID NO: 8723 - DNA, 1191 bp, synthetic construct
  source 1..1191: mol_type = other DNA
atgactgatttgccatggggcaataaccagaacttgactgacgaagagttctacaaccgcgaaagcgaactgatcaacatcaagaatatcctgcacagtacgggtcagggccacgcccctgacctcctattgaccggtatcaggggagtggggaaaaccgtgtttctcaagaagctcaagagggagctggatggcgagtacctggttgtatatattgatttctcgaagtccaaatgctaccagaagaatcagatgagcattatcggactcatgggacacttcttcaaagagctgattctggaatcaaagaataaaggactcaacacacttgacaagcagatcgaaaagtatttcaagtccaatgacttcaaaatcagagagtttatacggcttgacaagatacccatcccaatattctccaaggagacaaacgaagaaaagcttattgattttgcgctcaatctgcccgaaaagatatatgatgagaaccaggacaagattaaaggggtgctgattttcattgacgagttccaaattataaaagagctcaacaattacaaggaatcgttcctgtggaagattagaagctacattcagaaccagagaaacatcgcatacatcttttcagggagcatgagcctccaggacaaactaatcagcgaaattgcgagccaaaacggggcatttggcgggcgcatgatttcaattaacatcaaccccttcgaaaaagagacagtcaggaactacttatccaagaaaaccccatatatccaattcacggatgacggctttgaccgattttacaaattcaccagcggcgtcccgagttacgtgaatatcttcgcctccctgcttcctatcaacgagcagctggatgatgatgccatcaagatgtattttgacaaaaagatccaggctatcagttctcatctgatcaatatctgggcccggctgtctttccgagagcagaccataatcatcactctactggagaaaccgctgcggcggatcgacatcgccaatgagtttgggatctccacaggctcattgagcaattatcttaacaacctgcagaatcaaggactgataagtctcaacaatggtttatacgagattgctgagcctattctgaagcgctggttggagctggagtttaaggaaaaaggcatttatccctaccgtaacatctga

SEQ ID NO: 8724 - DNA, 348 bp, synthetic construct
  source 1..348: mol_type = other DNA
atgaaaggggaagtattctacggaaagggaattagagagctggagggcgagtacccagacctctacgagctcgtcacagacattaatgacaccgtgtggaacgggaaggtgctggattataaaactcagaagctaattgccatcggtatcaccgctagtcgagcagatccccgcgcgatcaagaaacaaatacggagcgccatcgaggtcttgggcattaccaaagaggaaatcgtggacgtgctgagggtggtcctgctcacgtctggcatgccggccttttccaagtcacttcagatactgaacagcgttacagcagctatcgaagaagagaagcaggaggaatga

SEQ ID NO: 8725 - DNA, 933 bp, synthetic construct
  source 1..933: mol_type = other DNA
atgaacagcaacaaaaaatttttcagccggataggcttcaactacctgatttatgcagtgttctcactggtcattaccatgatcctcgccaacatcatcgcatacacgagtcccgaaatccttaataatatcaacacctccacaaccattactgcgatttgcaactacatcctgccactccccgttttcatatatttgatgggaaaactggattcaaagaagctcgaaatccacaagatcaacgctagaaccttcctgaaatatctctgcattacctttaccctgatgtggatcgggaatattatcggagtcataataactaccgcgcttagcggggctatccagagcgacatttccaaccccatccaggacctgattaatagcaccggcatctggctgaatatcgtgctgatcagtatcatcggccctgtgtttgaggagtttttctttaggaagctcctgatcgaccgaacaatcaagtacggtgcccgcactagcattgttctgagcgcagtcatgttcggcctgttccatggcaatttgaatcagttcttttactctgccctgatcgggggatttttcgcctatgtgtacattaaaaccggaaagatcacgtacacaatcctcttgcacatgatcattaacctactgggctctgtagtgtcgctgttcttaaacagttccgtgactaacctcatcaccggtacaatcaacccatttgatctgatttttgtacttttgtacctcgccatacttataattacactgattatcgggttaacgaaccttctgaattataagcaagccaagttcaacggccaaaagactgagatttccttgcagaaaccgctgaagacaatattcctaaatctcgggatgttctgtttcatcattttttttacgataaaaatggtcctacaggtgattaattga

SEQ ID NO: 8726 - DNA, 267 bp, synthetic construct
  source 1..267: mol_type = other DNA
atggtgcaccggaacattctgaaaaaatgtgttgagcacaagcatgcgctgctctttgcagccggaattgcgaccgcagtggtggggaagaaggtcatcgaaagcaaaagtgtaaagaacgccgccacaaagggcatggccaacgtgatgagcatcaagaaagacgctgaagaatgcttccaggacatgaaagagaatgctgaggacatagtggtcgacgcccacaaggaggataagaaggagatctacgatgagtcccaggaatga

SEQ ID NO: 8727 - DNA, 2130 bp, synthetic construct
  source 1..2130: mol_type = other DNA
atgaagtacgaggtggtgtacgataacggaagccgcctcagggtgcgttctggccagtgggctttcactaaggaggaaggttatggcctggcctcactgctgctcaaccagaacttcatccacgaggtgctgacctcccatcgcaatggtagtattctgatgtactacgatgaaggcatcgacaataaggataaaatttttgacatcctggataagattgggttggatgatctgtttgaggccgaacctactcagatccaaatctctaaggagatcagtgaggacttctataagaaaatagctaaaatgatcctaaacaggggcatctataagctttttctgccaatccccgtccgaaacgctctgacagtatatcatgccatgaagtacatatggaacggcttcgacagcctgactagctttaacgtggatgtggccctgcttgacggtgctgccgttgcgggcgccctcctgaacaaacattacaagccggcaagttcaatgatgttcctcctcagcatctccgatgccctagaggactacaccctgcagaaggctaaaagcaccctaaaggacagcctcgctctgaacatcgatacagtctgggtcgtcggagaagacggggaagagaaacagtgttcagccgtcgaaatcagcaagggggataagatcaaggttcacatgggggatgtcatccccgtagacggcaaggtcatcgaaggtgaaggactggtcaatgaagccagcatgaccggggaaccactggccgtgcataaaatgaacgggaagacggtgcacgcgggaacggttgtggaagagggcaatctgatcgtggaggtttactcgatgaataaggaaacacgactcaataaaatcattcacctgattgaaaactccgaggaactcaaagctgaaagccagagtaaagcggagaagctggccgattccattgtgccatacagcttcattgcaaccgctcttacctactttattaccggcagccccacaaaggcactgagcgtgttgatggtggatttctcatgcgccatcaaactgaccacacccctatccattatctcagcaatgcgggaagcatccgacaacagaatgatggtgaaagggggaaagttcctcgagaactacgccaacgccgacaccattgtatttgacaagacgggaaccctcaccaacgctgcccctaaggtggtggacgtaattagcatgtctaagaaatacgactgtgacgagatcctgcgcatggctgcatgcattgaggaacacttcgcccacagtattgctacggcgatcgttaaggaggccgaaaaacaaggcctcaaacatgaagaggaccactccgaagtggagtatattgtcgcacacgggattgtcactgagtatgagggcaaacgggcagtgattggctcccggcacttcctcttcgacgatgagaaggtcaaagtgactaagagtcaggagaagaaaatcaacgagaaaatcaaggagcattcggtcgtgtacctggccatcgatggcaaactggagggtatcatctgcattgacgaccctatacgcaaggaggccaaatatgttatagaagagcttaagtctttaggtatcgagaatattataatgctcaccggtgacagtgagagcggggcgcgggctggagccaacgctctgggaataacagactatagaagccaggtacttcctgaggataagtcaagaatcgtggaagagctgaaagccgaaggcaggattgtcataatggtgggggacggaatcaatgactctccagcgcttgccgctgcggacgtgtcggtttcgatgaaacacagctccgacatcgcccgggaggtggcagatatctccctgttgtccgatgatttgtatgacctcgtcactctgaggaagctcagtaccggcatgctggacaagattaataataactaccacaatattgttgcagtaaatggctctcttttagttttgggggtgttgggaataatcccgcccgcaacatcttcaatggtgcataacttatccacgatgttgtttggacttttgagcacaagatccgtgttaactgacgaggagtacataaaggatatagaggtgaaggccatctga

SEQ ID NO: 8728 - DNA, 750 bp, synthetic construct
  source 1..750: mol_type = other DNA
atgcttgataactataaaaacaagtttattcccttgatcctgccagtcgttctcatctttttctggtacatcataaccaatgccctggccctgttcagcagctacatcttgcccggaccgctagatgtggtaaattcagccctggtggttatcgagaacggcaagctcctcaccaatacgattgacacactgtacaaggtgtttgctggattgatcctcgcctccatagtcgctattcctctgggcatcgtgcttggatggtataaaaccctagaagatatatgtactttcgtcatcagcattttacgccccattccacctgtggcatggataccgttctccatcctgtggttcggcatagggaccttccccgcagtgttcatcatattcatgggctgcgtgtttccaatcttagtatacaccatcgacggcgttaagcggacagacaaggtgctggtggaatctgcgcagaccctcggtgcgaacgactggaacattctgagaagggtggtcctgccttctactatcccctacatcgtgtccggcctcaaagtcggtattgggattgctctgatgtgcacgatttcagccgagatgatcggatcgagtagtggcctcggttatatgatcctgatcgcaaccaaccttttcgatacagggacaactgtggttgggatggtggtcattgggctgattggactggtctttgactttgtatttagccgagcccaggacaaaatcttctggtga

SEQ ID NO: 8729 - DNA, 753 bp, synthetic construct
  source 1..753: mol_type = other DNA
atgagcatcgaggtgaaggatatctataagaaatttgagactaagaagtcagagaatctcagtgtcctcgaaaatatcaacctgaccatcgatgacggagaactcgtctgtctgctggggccctctggatgcgggaagacaacgctgctgagattgattgccggactcgacacccccactagcggggaaattgtggcaaacggcgaggtagttaaaaagccatccggtgatcgagcggtgattttccagcagtattccctgttcccatggctgaccgtgcttcagaacgtcaccttcggattggagatgacaaagccaggctccaaagaggagaatattgccgccgctgaacgctacctcaccagtgttgggctgatcgacttcaaggatagctaccctcacgaacttagcggcggcatgaaacagcgcgtggctatcatccgttcgttgcttaaccactcacctatcctcctgatggatgaaccgttttctgcgctggatatgcagaatagacatagtctgcaagaacagctaataggtgtctggaagcggtttgagaacacaatagttttcgtaacgcacgacgtggacgaggccatctacctggccgacaaaattgtcattttagacaagaaccccggcaggatcgcaaacatcgtggaagtggacctagagaggccccggaaacgggagagccaggagtttctcgctctgcaagaatctatagtgtcccagttaaatatggacgagtga

SEQ ID NO: 8730 - DNA, 372 bp, synthetic construct
  source 1..372: mol_type = other DNA
atgaacagggacgacctcgaagactacattgaagacaactattcagcggagcctgagttcccctggctgaagttcccaaattacgaagtgttccgccacgatgataaccggaaatggtttgctctgattatggacgtctccaagagtaagctgggcctcgacggggacgagatccttgatgtcgtgaatttcaagtgcgaccagatcctgatcgacagcctcaccacggaaccgggatttttccccgcataccatatgaataaagagaactggatcaccgtggccttggacggcagcgtatcggatgagaaaatcataatgctactggatataagctttgagttaacagcctccaacaagaaaattgattga

SEQ ID NO: 8731 - DNA, 813 bp, synthetic construct
  source 1..813: mol_type = other DNA
atgaacattctcatctctaacgatgacggggtcaatgcagccgggatcttagcggccaagcaggcagtggaggatctggccaatgtgtatgtggtagccccagacaaaaacaatagcagcgtcggccgccggatttccctattcaagcacctgaaaatagatagctgcgaactggaggacggcagtccagcgtgctctgtctcaggcagccctgctgacgcggtaatcgtgggagcagactacatcatggacgagaagcctgatctggttatcactgggatcaatcagggactgaatatctcatgtgacataacctcgagcggtacggtgtgtgccgctctggaggccgtgagtctgggcattcccgccatcgctgtgtccttgtttatcgacccaaagacttcctataaacaggatgaaaacggtgaatggtacatggattacgatttcaacttcgcaaaaaaggttctccacgatctggtcctcaagataatcgacgaaggatttcccaaaggggtggacctgtttaacttgaacataccgacaaattacaaatcccaagaggttaagattacctacctcagccataagatgattgacaagaaagtcattgataacaccaacgaagagaaaaaggagttgttcaactatcccctcgacgaaaaccaggagagtgacgaccttattatgatcgcttccgaccttatcaaagaatatgaggagggcagcgatggatacgccctgctggtggagaagtgcccttcgctaacaccccttaacgtgaatatgacctcaaagaagctcaattggtga

SEQ ID NO: 8732 - DNA, 735 bp, synthetic construct
  source 1..735: mol_type = other DNA
atgattgtcatgagcatcgccggggtcgatcccagcgccggcgcaggtatctatgccgacctgaagacctttcaggctattggagtgtacggcaccggaatcgtaactgccctaactgcacagaacccttataagttcttctccgctagcccagttctgcccgagtacatcgaggaacaaatggatagcgtgcttgacagttacgaggtggaatttatcaaaactggcatgctctattccccagagattattaagctcgtgtcaaaaaagatcaaggaatatgacctgaaagccgtcgtcgatcctgtgatggtggccacctcaagtggaaacctcacgaaagaggacattgccgatgcattcaacaagtatttacttcccaatagcatactgaccaccccgaacattgcggaggctgaaaaactaaccaaattcgagatcaagacgaaggaggatgcttttaaagcttccaagcggatagtatgcaataacattatcacaggggggcatctggacggcctcaacacgatcaatattgacggggaaatcacaactatcaagcaggagttgatcaagacagacaacctgcacggtacagggtgtaacctgagctcggcaatcgttgcctacctcgcgaaaaacaatgagctggacacaagcatcattaaggccttgaattacgtgtacgaaggaataaagaatggcaactacggcaccctgatcgcgaaaatatga

SEQ ID NO: 8733 - DNA, 672 bp, synthetic construct
  source 1..672: mol_type = other DNA
atggacaatatctatgccataattccagtcagtaagttcaagaacgccaaaaccagactctccccatttctctccgaggaggagagggagaagctactcaaggtcatgctccaggacgtcacggacactcttaagaagcacgtggacaaaatattcattatcagccgtgacgaggatgtgctgaagtatgctaagagcctaaacctggacacgatcctggagaacaaggacagcaacctgaacaaggccctcaagcaagccatgaaggaatgcaaaggcaaggtacgaaaagtgattatcgtgccctcagacgtacctttgattggaaagacaaatattagcatccttatcgaagcctccaagaacctggatttcatcatcgtgccgagtaagggtggcggcaccaatatgattatcatgaagcctatggcaatacccaccaaatttgaggggttctcgtaccgcgagcatgtgaatgtggctgagcgcaaaaaactgaatccacaggttcatgattcatttttcatggcactggatgttaacacagcgcaggatctgggggaaatcatgatccacggggaacacactcacaccaggaaatacttgaaagagctgaaggtgaaagtcgaaccctaccggggaaccgaacggttaaaagtgacaagaggctga

SEQ ID NO: 8734 - DNA, 1404 bp, synthetic construct
  source 1..1404: mol_type = other DNA
atggtggaaaatttcgacgagtggtttcatgatatactggaaaatgcgaacattactgattcgcgctacccgattaagggcatggccatctggatgccctacggttttcaaattcggaaacactcaatgaacattatcaagaaactactggataaagatcatgaggaagtcctttttccaatgctcgtgcctgaaagtgagcttgcaaaggagggcatccacgtaaagggattcgaagacgaagtctattgggttactaaaggtgggcagcgtgaactgaacgagcagcttgccctccgacccaccagtgaaactgccatctaccctatgtatagcctatggattcggacccacatggatctgccaatcaaatattaccagatcgtgaacacattccgatatgagacaaaacacacgagacctctgatccgggtccgcgagattacgacttttaaagaagcccataccgctcacagcactaaggaggagagcgacgagcaaattcaggacttcattgcaatctacaaggaatttttcgacgaactgggaatcccatacctaatcagcaagagacccgaatgggacaagttcccgggggccgattacaccatggccttcgacgtcattatgcctaatgggaagaccctgcagataggcaccatccataacctggggcagacttttgcaaaaacctttgatataacctttgaggataaggatggcgagcacaaactcgtatatcagacctgcgcaggagtgtctgacagggtaatcgcgtccgtgatcgggattcacggagatgaaaccggtttgcggctcccacctaaggtgtcaccaaaccaggtgacgatcattcccatcctgttcaagaagggcaaagaagaggtgttagcaaaatgtgcggagataaaggcccagctggaggaaaccggccttcgcgtcaatatcgacgatagggacataaggcccggcaagaaattccacgactgggagttgaagggaacacccctgaagctggagctgggcccccgggacttggagaacaatattacagtcgctatgagaagagacgagggaaagaaaatcgagatcgctctggacagcagcctcagtgacaacgttattgatctcctgaacaagacccaggaaaacttatctgagtctgcctggaacttccaaaaatcccatgtgaagttcacagagaggctcgacgagattaaggatctcgtggagacaggcaatgtggttaaattccactggtgcggcgacgaggccatcgggcgcgacatcgaggaaaagacgggatatgacatactgggtatccaggaggaaatatccgagggggagtgcatctccggcaaggggaatgccaagtacatcgctttgatggctaaaacatactga

SEQ ID NO: 8735 - DNA, 1044 bp, synthetic construct
  source 1..1044: mol_type = other DNA
atgacgaacaggaagatccagatgcctcgtgaagtgtacatagacccgggtattgtacatgacacggctgagatctgtaactcgctgcatttgggcaatgactttctgatagtcacaggcagccacacttatgatatcggggcacgccctgtgattgaaagcctagagaagaataacctttcttatgacgtcataaaggtggacgtggccagcgaggagtccattagcgaagtggaggagctgatcactcccgaaaccaccgtgctgggcgtgggtggaggaaaagtcattgatgtagctaaactcagctccttcaaccagggtgtctacttcgtatccatgccaacaaccgcctcacacgacggaatcgttagccctttggccagcatcaagaatccaaacaccagcatctctgctacagcacactcccccatcgcagtcattgctgacagcgagattatcgcccagagccccttccgacttcttgccgccggctgcgcggacttaatagccaacttcacagcgattaaagactgggagctggcccaccgcctcaaaaacgaggcgtttagtgaatctgccgccgcactctccatcatgtcagcccatctgatcacggataatatagctaatatcaagcctaacctcgaacccagtgcacggattgtcatgaagtcgctcttcagtggaggaatggccatcagtatcgctggctcctcacggcccgcgagtgggtccgagcacctgttttctcatgcactggataaaattctcgataaaccggccttgcacggcgaacagtgcggcatcggcaccataatgatgatgtatctacacgggggggattggagagtgatcaagaacgccctggaatcagtgcaagctccaacaaccgctgtggaggttggaatctctgacgaggaaattattgatgccctggtgatggcgaataagatcaggccagaaagatacaccattctgggggacaacggggtttcccgggaggcagcctacgagctggcttacaagactgaggtgatctga

SEQ ID NO: 8736 - DNA, 438 bp, synthetic construct
  source 1..438: mol_type = other DNA
atgattacactgatcggcaaagacctcgcgaaggaaggtcaagagtttgtgttcctagggccagctgacgagtgtgaaaactgcaggtttaaatcaagctgtgtgggcaacctggagcttaaccgcaaatacgtggtggtgaacgttaaggagaatgagcagaagtgcccgatccactccagtggacttgtcattcccgttgaaatcgatcgggcacagatcgacgtcctgactgccagcaaaaatatatttgagggaagcaccttcacgttcaacgcccctgattgtgacgaggtatgcgaatttcacgatttgtgcttccccgagggcctccaggaagatgacaagtgtctggtcctgaataacaatggcaagcataatggggagtgcaaaaaggggttcaagctcaacaagctgaccttaggattcgtgatatga

SEQ ID NO: 8737 - DNA, 690 bp, synthetic construct
  source 1..690: mol_type = other DNA
atgatgaagaatacgagcgggaacagttcctcgaagaagaatgccggctacaaagcggcagagtatgtcgaagacggaatggtgctcggactcggaaccggcagcacaactcactttttcattgagaaggtgggcatgaggatcaaggaggaaggaataagcatcaagggcattcccaccagtttccagtccctactgatcgccaagcagtggaacatcccaatcaccactttggaagagaatgacattgacctgtcagtggatggggcagacgaagtggaccgcgagtttaacctgatcaagggcgggggagcagctcatacaaaagaaaagatcgtcgattacgctgccaaacagttcatcgtgattgtggatgagagcaaattcgttgataaattaggtgatttcccggtacctgtcgaggtcctccctgacgcctcccggatggccattaaggagctggaggacatgggggcggagtgcgaaataagaatggctcaacgaaaggatggtcccgtaatcacagacaacggcaattttgtgattgacgccaagttcgataaaatcgaatcaccacggcaccttgagatcgacataaacacgattcccggcgtggtggaaaacgggatatttacccagatggtcgataaagttatcatcggtactgacgagggcaccaaagagctgtga

SEQ ID NO: 8738 - DNA, 222 bp, synthetic construct
  source 1..222: mol_type = other DNA
atgccgatcggtgccggaatgccattcgacctgaaagacatgagctacaagatcgcaattatcttcggcgctctgcttgtgatctatggggtcctctggctgctggcggagctgaaaataatccctgccatcctatttgtgatattcccccagatcgtactcattttgatcggcatttgcattatttactttgccttcgatcggaagaagaagtattactga

SEQ ID NO: 8739 - DNA, 2985 bp, synthetic construct
  source 1..2985: mol_type = other DNA
atgaataagaagggatatatactggttatctcactcgttcttatcatgctgttctgtctctccacagtctctgccaaagatacagatctcaacgcaaatacccttgaaaagagtaatgatgtgactatcctaaatgagggcgacagcaatgtgagtcagatccattcacagcataccgtgaaggttggcagcgacagtgattccatccaaaatacaatcgattgcatgaacgatggagacatactgaacttcgaaaccggaacgtacaaggatatatgtatctatgtaaacaaaagcattacaataaacgggaacggcgcggagcttataggatatgacactccgagcaaaagcaacactcctgaaattatctacaacgacaccggtaagggcggctatgccatcggaaattttgcgactctgtacattgtgaaggctgacaatgtggttattaacgggttgaagatcaccggcggtgcaaattccacctccacgtatagcaacgccctgatctacgcaatgaactcaaaaaatctgactttcaagagcaatgtgcttgagggcagcagctggggcctttacttccagtactgcactgacggtcacgtcacaaacaacatcattaagaaccaggcagtgacgggcttcttgaacttcggatctgcccgtacctcaattgagaacaacaaagtcatcaatgctaaaaaccatggcatcgacgtaagacacgggacaggcccaaacgtgaaaattatcaacaacacagttattggtagcaaggaaggcatctacctcatgcactctacaggccacgttgctgctaacaacaccttaatcaactgcaccatcagttcaattagttgctacggttcgaagaatattaaattaaacgggaacaagatgcagaagtctaggattggcgtgctcctcggaggaggatacgagaacatcactgtgggggaaaacatgttcacgctcgacaatctgccttatccgcctacatttgcatattatattgctgaggccaaatctgagtaccagaacgacgaggacatcatgggtactttctccgacagctcgctctatactcccaactttgtcgcattcactggaattgacgtccccaaagacattggaattaattatgatcccatcctggaaaagacaggaccagagtggatcgtgcctgaaggagcgagctcctctgagatccaaaatatgattaacaacatgaacaatggcgacaccctaagtttcacgcagaatgctatctacaacgagatcagcatctacacagacaagaacatcaaaatactggggaacaatgccactctggtcggctgcagtggcatcaactttaacaatacccactacttggataatgtagccgaaaaggtgcgcaagagcactaatgagggtgggtatgccataggatacaatgccgtactgtacatattgaatacaaccaacgtggtggtgagtgacctcaacatcaaggcacagtaccccaagtatgattccagcaaggtggaaacaaccacgaacgagtacaagacagtggggatctatgccgattccaactcaggactggtaatcactggttgcgatgtaaccggggcctcttgggggattttccaacagtactgtaaaaacagcaccattatcagaaacaatattcatgacatttacacgacaggcatcatgaactttgggagccccaacggcatcattgccggaaatacagttacggatgctgccaaccacggtatcgacgtcaggcatgggacaggaccgaacgtgacgatctttaataacacaatttccggggctaaggaagggatctacctgatgcactctaagggccactcggcttacaataacacgattctaaattgtaagatctccgggatcacagcctacggatcgggaaatgaggtgctgttcaacaacaccatctctggaagtaggctggggattttgctgggaggcggctactacaatataaccataggtaagaatacattcaagctggatagcctcccatttccccccactttcgtgacctatctggcccgggcggacaataagtatcagagcgaggacgacgtcatccgcacgtactccgataaggagactgccgccgtggatgccaacgacataacggtcggctataagaagggggaatttaacattacgctgattggccaaaacggtgataagctgtcatatgaggatctgtccatctctattaacggtgctaatttcaccgcgaagaccgacgagaagggcatcgcagttattcctctgtcattgacaaccggcatttacaatatgaccattaaatttgctgggaacgacaactatgccccaataaacgtgaccaagaccgtgacagttaatgacgaccgaatcaagaccatcttatccgccacctccaagaccctctacctcaccatcattagcaagggctattcctacaaagtcacattcaaagatatgaatggcaaagcaatcgctaataaaaaaataagttttaaaattgatgggaaaacctacagtgccaccacttcgtcaactggcatcgctaatatcaaaataaaagcgacaaccaccggcaataaaaaagccaccatcagctttaagggtgacgacaagtatgctccagtcaccaagaccctgaccgtcaaagtgatcaaacagtcatccaagatcagcgcgtataagaagactttcaaagtcaaaataaaaactaagaagtacaccattactctgaaaaacaataaagggaaagccatctacaagggcacggtgtacattaaagtgaagggcaagacgtataaagcagtgaccaattctaaggggaaggccacatttaagatcaccaagcttactaaaaagggtaagttcactgcaaccatcaagtattacgggaacaaatactacagttccacctccaagcaggtcctaatacgcacacggcggtga

SEQ ID NO: 8740 - DNA, 1716 bp, synthetic construct
  source 1..1716: mol_type = other DNA
ctcaacaaatccctcaacattctgttcatctgcttcgtggctctcctcgtcatctcctgcgttaatgcggcaaacgacaatccaaataattccgacgacatctccaactatcagataagtagcgatctcagcaatactgagatccagaccatgttggataacgccaaggagggagaccagttcgaatttactgacagggagtataagaatatcagcctggtggtagacaaaaagctaaatatcgtctcgaaaaagaatagtaacattcatacgagcaataagatcgccgataaggcccggaatttgggcctgaacaactcgttcggcttctacttcacctccaacagtggtggaagttttttatacgggctcacaattatatctaatagtgactacgggatcgtggtggataagagcgataacacgaccatcaagaatgtggtgatcaaaaacgggaacgtgggtatcctggtcaaaaactccaataacgcggatataatccagaacaacatctcaaaagcaaactccaacagcatccacctggaaaacgtctccaaatcaatcattagcaaaaacaccatctcctacaatgggcggagcggcatccacgctagcaatatatactattgtaatgtaaccaacaacaccgtgcatcacaataaattcaacggaatttcactgtacaacaagacaacgggcaatatcatcaagttcaaccttgcctacgagaaccccaacggaatctacatcaattcccagagtgactttgacgttgttaactcaaacacattcaccaagaaccgacgcaacactgattacgagctgggtgctttcgagagcggcaatggcctgctattcggggccgacttcaaaacggccaaggagggcaagtctagcagattggaggttaagtataatgtgttaacccataacgagggctaccaggcgaagaacaatccggatcttccaacatttaagctgggggacaactggtttgactcaactgatgatgagaacacttttgtgtgccccatgctgcttgcaggcattatgaaaatgggaacgatcagcgtgaagaacgggttcggactgcagatgtatgatacaaatggcgaagcagtcacagaatttggtacctttgacaccacagtgaatgtgaacggaaaccagtacacagccaagttcgtcaacggtaaggcaattattgacgccaacctggaccctgacaaggagtatgagattgaagtcattatcggggataaaccagtgaagtttacttatcgcaccagttcgggggacaaaaacgacgagtcagatagccaaacaagcaccgacggcgacttcggaataaatcaccatgactttattgacgctatgggaaacgacgccagcaaaggcgtggggaacagcgagaacggaaccagcagcgctcacttcgccaactcagaacagtccggcgcccacggaaccaatgcctcgggcaattttcaagatagctccgataatggtgatagtgtactgactaacgggaatgctaatgctggagactccagtaaaggtgagcaatctgaagaaggcaaagcatatgaaatagtgcctcagagcaagatctcaaaggaaatcactgatacctccggcattattgtcctcagcattgttagcatcctgggcatgattatttacgggtactggaggaagcccgaaatagagaattga

SEQ ID NO: 8741 - DNA, 405 bp, synthetic construct
  source 1..405: mol_type = other DNA
atgaaagtgaagtctgtgagcctgaagatcagtagcaacgagaagttcgagataattgatattaccagcaaaatcaacgagttaatcgagatcgacgaaggcatagtcagcatcttctcaaaacactccacatccgcaattgttgtgaatgagaatgaggatggactcctgaaggacttggaggtgagtcttgatgacatcatctccgacaagttcagctattcccatgatatgattgacaataacgcccgcagccacctgaagtcgtttctcctgtcttcaagtgaaaacctgcccatcaaaaacggcagactggacctagggacttggcagagcgtatttttcgtcgaattggatgggccacggtacgacaggaccataattctcacgatggtgggtgaatga

SEQ ID NO: 8742 - DNA, 1659 bp, synthetic construct
  source 1..1659: mol_type = other DNA
atgcccgtgataacattcaaatatcaagatcttaaggacctgggcatcaatatggagaagaatgaactaatagacaccctgccgatgatgagcagtgacatcgaggacttcaacgacgaagaaattaaggtcgaatttttccccaacagaccagacaacctgtcggttgaaggggtggcccgctcatttaaggggtttattgggcaggaggtgggtttcccagactacaagattgaagaaagcggagaatatgtgatcgtggataaggacgttgcagcaatcaggccctacatcggatttgcgaagattaataatgtggatttttctggagataaactaaagtatattatggacttccaggagaacctccactgggtcatcggcagagaccgcaagaaagtagccataggcattcacaatgcagacgccgtcaacggcccctttaaatacatcgcgacgccaaaagatgccaatgcgttcgtgccactggaaaaggatatagagatgacccctgacgaaatcctcaccgagcatgaaaaggggaaagattatgcccacctgatccgaaatttcgataagtaccccttgatccttgataaaaataataacgtgttgagcatgcccccaatcatcaacggagagctcacgaaactcaaggaggacacacataacattatcgtggacgtaaccggtaccgatgccaaagccgtgaaccagacattgaacattatctgctcctccttcgccgaggtggggggccagatcaagtccatggaggtgaagtatgaggataagacactcgtcactcctgatttaactccgcaggaaatgaatgtgcacgttgacactgctaatgagctgatcggtggcaccgatctcacggccgaagatattagagagctgctgctgaaggcccggttcgatgctgagattatcagtgagaacgagataaagaccattatcccctcgtaccgagtagacatcctgcatgaagtcgatatcatcgaaaacatcgccgtacagtaccatattaacgacgtgatagccgaactgccggatatcaatactgtcgcttatgagaataactggtttaaaagcgaggcgaccatccgggaagtcatgatcgcaatgggattccaagaagtgatgtcactgatgctcacgaacgaagaggctcactacaagaagatgaaccaggaggagaagcctcacgttcaagttgcccggcctattacaatcgacaggaccatgattcgcaccagcttaattaactccctgatggagtttctggaggacaacaaacacgaagatctgcctcagaagatatttgagatcggcgacgtgctgtacctggacgagaccaaggagaataaaacagtgagctctaaaaaacttgctgcactcgtttgtcactccactgctaacttcagtgagataaaatcaattatgagcagtgtgctttcaaacctaggatacactatggacattagcgactccgagaataagaccttcatcgagggcagggcagctgacgtggtgggtgaggcccagaaagggataatcaagggcttcttcggcgaggtcagccccgaggtcattacaaactttacattggactacccagtcatcgggttcgaaatcgagtttattaacaagtga

SEQ ID NO: 8743 - DNA, 357 bp, synthetic construct
  source 1..357: mol_type = other DNA
atgcagatgatctggttttacgtggcgattgtgctggcaataagtgacatcctgcacaccacactcatgtggaaggtgctcaacaacttttacatacttttgggcgtgtttattcaacagtctacccacagcacgtggcagacctgggtgatccacgagatcatggaggctgccttccactttatcattctgtcaatcgtgttcctgaaccccactattggactgctagcagccctgattcacttcgtcatcgatgtctcccatacagtactgatacgcaatatgggggaattagaacatcgggcccttcatttcgttgtcgagagcctcttcttcatcttgatctatggcctctga

SEQ ID NO: 8744 - DNA, 2712 bp, synthetic construct
  source 1..2712: mol_type = other DNA
atgtccaatgaggagattcccaaggactacgattttaagaaagagaagttttgggagaaaaagtgggaagatgaggatatctaccggtatatcggcgacggatctcggccccgctacataattgacacccccccaccctacccaacaggattgattcacttgggtcatgttctgaactgggtgtacattgatatgaatgcaagatatcgaaggctgaaaggccacgacgtcctgttcccacagggatgggattgccacggccttccaactgaggtgaaagtggaggaaacacacggcatcaaaaagaatgatgtgtcccgggcgcagttccgagagtattgtgtcgacttaactacaaaaaatattgccagcatgaagtcccagatgaaggcaatgggcttttcacaagattggaatcgtgaatttattaccatgactcccgagtaccgcaagaggacccagtattctttcttaaagatgtacgaggagggacttatctatcaaggcatccacccggtaaactggtgccctcgttgtgagaccgctatcgcttttgcggaggtcgaatatagcgacaatacgacatttttgaactatgtgaacttcccccctgcagttgacgatagctatgacgatattgtgagttcacagagttctggtaagcaggcgagtccgaacgatgagggtatcctgattgccacgacccgacctgaactgatggccgcttgcgtggcagtggtgatccacccagaagacgaaagatacactcatctgctcgggaagtacgtggaagtgcctctgtcacatcagaaagtgaagatcatcgccgacgaggaggtggaccccgagtttggcacaggggccgtgatgatctgtaccttcggcgataagaccgacgtgagctgggtcaataagtatgacctggagatcatcgacatcatggatgagacaggcattctcaccgaggccgccggcaggtatgctggcatggatttgccaagtgcgaagaagcagaccatagaagacctcgacgctgagggctacctgctgaaacaggaacaggttgaccagaacgtcgggcagtgctggcgatgcaagacccccatagaaatcctggtgaagaagcagtggttcgtggccgtcagggagctcatcaaaaagaccaaggatgcagcagaggagatgaactgggtcccggagcacatgaaatcgcggatggtgaactgggcagatagcatggaatgggactggtgtatctcaagacagagaatttttgctactccaattcccgtatggtactgcaaggactgtggcaaagtcattctgcctgatgtggaggatctgcccattgacccaacgcaagacaaacctaaacatgcctgtgagtgcggctgcgaagaatttatccctgaggaagacgtccttgacacgtggatggactccagcataagccccctcagcatcgccggatggcctaatgaagactatattaaccacttccccgcggacatacggccgcaggggcatgatataatccggacttgggcgttctacacaacactccgctgccttgctctcacagggcaaaagcccttctcggacattgtgatcaatggcatggtctttggtgaggatggatacaagatgagtaagtcccggggaaacgtcatcggtcccgaagaggtcatcgaacagtatggggctgacgccctccgcacttgggctgccaacagtgtaccgggatctgatgtaatatttgattggaaagacattaagcacgggtaccggttcttgaggaaattctggaacgccttcaggttcatcagcatgcaaatttttgacgaaaaggtctcctatgacgagatcaaagacgacctggggcctctagatctgtggattctcagcaagctcaacaacctgaataaaaatgtcgacaaggcatttgccgaatacaacttcgcagatacaatcagctcaatcgagggttttttctggcacgacttctgtgatgagtatatagaggccgtgaagtacagactatacactgatgtaagtgacgagagcaaacgcgccgctaagtacacgttacgctgcgttgttgagacctccctgaaattgctggccccaatcgtgcccttcttcgtggaagaagtttaccagtacttcgacaaccaatcaatccataccacttcctggccggaagtaattgaggagctgatcagcgaggaaatggaagtgaagggggagaccacagtggagctcatagacgaggtgagacgcttcaaatccgcctccaagatcccacttaacgccgaactctcagaagtcaatgtctacacctccaacaacgatctgattgacgtatttaatcagttcgatgatgacatcaagggtacgctgaagataaacaacctagaaatcagttctggcaaaccagaggttcatgagaaaaccattgaggttgagcccgatatgagccagatcggccctaaattcaagggagatgctgggaaaattatcggatacttgaagtccaccgacattgaggagatcgccaatgtgctagatgaatcgcacgaactgactatcggggagatagtggtgcctgaagacatgctgaatatcaaaaaggagattgtgggagcaagcgggaagaaggtggacatccttcagtcggagaacctggacatgatcgttgaagttattaggtga

SEQ ID NO: 8745 - DNA, 630 bp, synthetic construct
  source 1..630: mol_type = other DNA
atgcggtacctcgtacacgtccaggaagcggtttctgaaaataagaaactaatcctgctcatgtcagtgattttcatcatatccgtggcggtaggcttcatttttcaggacattatctataaagaaataagccccatttttgagaagatggtccgcgagtttgtgaacgacccgaatagtaatctgggcttcgaaatattcatcaacaacatcagagcatccctcctgacatatgtgctatcagtgttctttgccctgatggctgtctttagcctgatcctcaacggcattatccttggggccgtcggtggcgcatacatgtccgccgatccagtgtacaacgggatcatgtttttggctttaattctgcctcacgggatttttgagattcccgccctgatcttcagctcggtggccggaatccttcttttcaaattcatattcaaatacctcaagaccttcgtcaagagggacgatttgagtctgaaggagatcttggacatgcataaggtgatcattaaacacagcatcatcctgctgatcctgtctttcgttctcttcgtgattgccgcagctatcgagggaaacttcaccggagcttttgccaagtggatacaaacgctgttttga

SEQ ID NO: 8746 - DNA, 165 bp, synthetic construct
  source 1..165: mol_type = other DNA
atgacgaagattaaaatacggctcttcgggatcgtgcgcaacctcggcctactggatctgtgcgtccacttctaccccgaactgaaccagaaaacaaccgagtgtaagaaaatcggagacattatccataacaggaatattaagatcaagtttgagagcatctga

SEQ ID NO: 8747 - DNA, 405 bp, synthetic construct
  source 1..405: mol_type = other DNA
atgggactactcgacaaggtcgtaggacacgccgaggtggggggggacacccagattgtcgaagagtatctcgctcccggtgaggaaattatccagagcttccatttcctgcgggacgccgttatattgacgaattatgggatatacgacattgatgtccagggcctgtccggtaaaaaagtgcaggtgaaattttaccctaagaaaaccatcaagacaatctcattcgaaagtgcgggctcttttgattttgatgtggacatcaaaatcggcgtgtccaacaaccccgttgtgctgatggagggcggagccatgaacatgccaatcagcttcaaggtgccgaaggcacaggctgaagaggcaaagcaaatcattcacctggtcaaggagcactacctgctttga

SEQ ID NO: 8748 - DNA, 1317 bp, synthetic construct
  source 1..1317: mol_type = other DNA
atgattcttaaggtcaagaacatcagcaacatcggaggggaggtgaaggcccccccaagcaagagttactctcacagggccgtgatactggcttcactggccaaaggcacctctaaactgtatgacatgctattttcggaagacactttagcaagcatccgagtgtgtaaggccttgggggcccagattaacaagaaagacgggtacctagaagtgataggaactaacggcaggctccataactcctgcgacgggccaatcgacctggccaatagtggaacgacgctccggttgatgacaagcgtctccgccctgagtgataatgaagttatcctcaccggtgacgaatcccttaagacaagaccgatgggtctcttgatggatgctcttaaaccactcggagtcgaaaccgagtcgctgaacggcgacgacaaagctccgatcttgattaagcccggttatctgggcggtgagactaatatcatgggcaacgttagctcacagttcatcagcagcattttaatatccgcacccctgtcgaaatgtggcgtgaacctctacgtgctgcccgagttcaagtcaaagccttacgtgtatatgacgtgggacatcatgcgcaaattcggcatccgatcagtgaaggcgtactacttaaagcacgattcttgtaatcaggaacaccaaagctgccgcatcgacgaatttaaaatcaagaaacaggagtacattgcctgtgattataccgtcgagggagactattccagcgcaagctacctcctggcattgatcgccattaacggcggcagtgcccgggtgaagaacctgttccggacctccaaacagggtgataaatttattctggatattctgcaacgcatgggcgctaccatcgtacgtggggacgattacgtggagattaccagtaaggggaatcttaaggcgatagacgtcgacctgtccaatgctcctgacctgctcattaccgttgccgtgctggcggcaatggccgagggaacaaccaacatcacaggtgtagctcacgccagagtcaaggagacggatagaatcgataccacttgcagggagctggagaagcttggatgctgcctcgaggaacacgaggatgggatgagcataactggcggggtcagttccggcgttgtggattctcatggagaccaccggctcgcaatggctttttccctaatcggcctgaagcatgacatcaaaattacaaatggggaaatcttcgacgtgtcattccctgatttcatagaaacaatggcgaagctgggatttgagctggagctggtatga

SEQ ID NO: 8749 - DNA, 630 bp, synthetic construct
  source 1..630: mol_type = other DNA
atgaacaaggaagagcgaataatccgcctggtagaatgcttggacaacaccttcgagataaggacatttcagaatcacgatccctaccaggtgctcattcggaccattctcagtcagagaacccgggacgagaacacagaccaggctaccaataacctattcagcaaatacaaagatatttacgaggtggccgaggcacccattgacgacgtcaaggaactgatcaggcctgcgggattttataacgtaaaggccgcacgcatccaggaggtcagccaaattttaatcgaccagtacggcggcgaagtgccaaatacggtcgaggagatgataaagctgcccggggtgggccgtaaaacggccaattgtgtcatggtttttgctttcgaacttccagccattccggtggatacccatgttcaccggatctcaaatagactgggactggtggatactaaaaacccggaagacacagaggtggagctgactaaaatcgcccctaaggatctgtggatcaagctcaacgatttgatggtgcagttcgggcaaaacatctgcaagccaatgtccccccagtgtgagatctgtccttgcagcgaaatctgcgactatttcaaggagaacatctga

SEQ ID NO: 8750 - DNA, 948 bp, synthetic construct
  source 1..948: mol_type = other DNA
atggtaaatgtgccagagttgaagaggggcgtccttgacagcgtggtggatgcgattggaaacacaccaatcataaaactcaacaatctgacgaaggacctagatgcagagatcgatgtaaagatggaagcattcaaccccacaggcagcgtcaaggacagagtggctgtggcaatgattgaagatgccgaggagaaaggattgcttaaggacgattccgtcattatcgagcccactagtggcaataccggtatcggaataggtttcgccgccgctgcaaaaggttacaacgtgatactgaccatgcctgaaaccatgtccgttgaacggaggaagctgctcgcgatctatggggctgaaatcgtcttgaccccagggtcggaagggatggacggcgcgattgccaaggccgaagagctgcaccgcgaaaaccccaacagcgtgatcctgggccagtttgacaacgaggctaatgtggccatacactacaaaacaaccggccaggagatactgcgcgacaccgagggaaatgttgactatgtggtggccggggtcgggactggagggacggtgaccggcattgggaaagcactgaaagaggttcttcctgatgtgaagattgtcgccgtggaaccggaagagtcacaaacactggccaagggcgccaaaggcccccataagatccagggcatcggcgccggattcgttccgtccatctacgacagcgatgtgattgacgagatcatcccagtccctagtgatgaggccggaaaaacgttaatcgctctggcaaaggaggagggtatcttcgcaggtattagctcaggcgctgctacttgggccgccctccagctcgcgatgcggaaggagaacaagggaaaaagaatcattgctatcctacccgacaacggggaacgatacctctctgtagagtggctgtttgagtga

SEQ ID NO: 8751 - DNA, 714 bp, synthetic construct
  source 1..714: mol_type = other DNA
atgttcaataatctgagggcagagatcaaggctattaaggagaaggacccggccgcacgatcaacactggaaatcttcttgtgttaccctggattctacgccctgctcatgcataggatttctcattggctttggaatcgcagcctcaagctcctcgctcgtatgaacagtaacctggctcggtttataacgggcatcgaaatccaccctggtgccacattcggcaaacgggtgttcattgatcacggcatgggggttgttgtgggagagacagcaattgtcggggatgacgtcctgatctatcagggagtcatccttgggggaaccagcacggaaaagaccaaaagacaccccacagttgagaagggagtgattatcggtgccggtgcgaaagtaatgggcaacatcactattggggagtactccaagatcgggaccggcgccgtggtattgaaggacgtgccccccgaatccacttgcgtcggcgtgccaggccggatagtgaagcgcaaaggcgtgccacacgaaaaagtggatctggatcacaacaagctgccagaccccgtcgccgacgcgatcatcaccattaacaagcatctgcaagagaatgatgagcacataaagatactgtttgacaaaaacgagatctgcctcactgacgatatcagggacgaacaggagaccctagaagacttatttaaaagagaggagtga

SEQ ID NO: 8752 - DNA, 375 bp, synthetic construct
  source 1..375: mol_type = other DNA
atgaagccgccttgtgagattgtagtctggtatgtgatacccgccatccggtcagaactggcaaaggaactcttgaacctggggatgaagcaaaaagatgtgagcgagctgatggacatcactcagccagcggtctcccagtacataaccgacaaaagaggcagtggaattaagctagacgacaatgttagggacatgatcaagaacttcgcccgccagctcagcgtgggtgaggctacgaaagccgatcttatcagcaccacatgcaaaatttgcaaccacgtgaagctgtccgacgtgctcgatcagctgaacatcgacaagtcggagctgggcgaagattgccagagttgtttagggtctgaggtcaattga

SEQ ID NO: 8753 - DNA, 1347 bp, synthetic construct
  source 1..1347: mol_type = other DNA
atggatgtctattccaccttgacgcgtagcaaggagaactttgtgacgatcaataagaacagggtgaacttgtttgtatgcgggccaacagtttacgatgatgcccacatcgggcatggccgaacatacatctctttcgacacaatcaagcgatacctggaatacaagggttacgcagtgttttatattcagaatattacagatatcgacgacaagatcatcaacaggtcaaaagagagtggcatcccggcaagcatcctagcccggaagttcgaaaaacgatacatcgaagacatgcacaaattgaatgtcaacggtgtgaatctctttgcaagagccactgaccatgtggacgaaatactggatcaaatacagaggttgatcgataagggcttcgcttatgagaccgaagacggggtgtactttgagatcgataagttcccggagtttggaaagctgtccaaccggaacgtagaagagctagagtcccaccgcgacattgtcgagaccactaagaagaatcctcaggactttgcactgtggaaaaagcggattgatgtagacgaacccacttggccttccccctggggggagggcagacccggatggcatattgaggatacagccatcaccgagtattactttggctcgcagtatgacgcgcatgggggaggcttagacctcattttcccccaccacgaggccgagatcacccagatggaagccgtcagcggaaaggccccaatggtgaaattctggctgcacaccggcttcctgaacgtgaatggcgagaaaatgagcaaatcacttaacaacttcatcaccatacgggagttactcgaggattacgagccagacacgttccggttcttcgtgctttccacccactacaggagtcccatcgattttagcaaggagtcactgcaccagtcggaaaagagccttgaccgcatccgcaagtactatgagctcctggatgttgaggtggacgaaaataaatacgagtgtgacgttctggctcctcacatggaggaatttttcaatagtatggatgacgacttcaacacaccaaaagcgatcgccgctatttttggactgataaacgatactaaaaaagagctctccgaattttctagtgaagacaagagagctattaaatcattcctcgacgatgcctcccatattttcggggtgagcttcgaagctgaagaagtcaacgcgggactggacgatctgcttaacgtgatttctgaagtccgcagtgagctcagggccagcaagcagtatgacctgagcgacaagattagagacgagctgcaaaagctgggttatgagataaatgattga

SEQ ID NO: 8754 - DNA, 210 bp, synthetic construct
  source 1..210: mol_type = other DNA
atgctcaaagtgcggatatggaagctgctgctgggcgtcctgattctgtccaagtcattcgaaaaagagattatcagcgaagacaccgcaaacagcttatggatcgccatggtgaacaatggaatccacctccccaaggatttgttcctcgactactgtagtaggctttatgagatcgactgcgagaagttcctaatggattacttttga

SEQ ID NO: 8755 - DNA, 1299 bp, synthetic construct
  source 1..1299: mol_type = other DNA
atgaataacaaggattatggtctggccaccctcggagtccgggcagggcagcagcccgacccggccactggggcccaggcggtgcccatctaccagaccacctcctacgtgtttaaggacgccagtgaagcggccaggagattcgccctccaggagttcggtcaaatctattcccgccttacgaacccaaccagcgatgtctttgaagcacgcatagctgcgatcgaggggggcaattcaggcctgtcgacatcaagtggcctggccgctatttcatacgccatcttgaacgtgacaggtcccggcgacaacattgtgtctgccgacaacctctacggcggtacctaccaactgtttaactacactttcaaagacctagctcgggaagtcaagttcgtcaatagccaggacctccaggccttcgaagacgccatcgatgagaagaccaaggcaatctacgtggaatctattggcaatccaaagctggatgtgcccgactttgaagcacttgctgaaatagcccactcccatgatatccccttgattgtggacaacacggtgggcgtgggattagttaggccactgctccacggagcggacgtaatcgctgcgagtgccactaagtatgttggcggccacggaactgctgtgggggggtatatcgttgactccgggaagtttaactgggggaatggcaagttcgataatttcacaaaagccgatccatcgtaccacggactagtattttgggatgccttcggcgacgtgccagagctggggaacattgcctttactgtgcgcgcacgggcacgactgttgagagacctgggagctacccaggctccggtacacagcttcatcttcctgcagggacttgaatccctggacgtccgagtcaagagacactctgagaacgccctcaaggtcgcgaaattcttagagagccatcctaaagtgaactgggttaattatcctggattggaatctcacgcaacctatgagaataacaaaaaatacctcaaaaatcatttcgcaggcatccttggatttggggtgaaaggcggagaggaggctggtaagaaggtcattgagaacctcaaactgttctccatacttgcaaacattggggacgccaagagcctggccatacatcctgcaagcacaacccaccagcagctgacgcccgaggagcaggaggccacaggtgtgacacctgactttatcaggctgagcatcggcctcgaggacgctgatgatctgatcgaggatctgagtcaagctctagattgcattgactga

SEQ ID NO: 8756 - DNA, 1206 bp, synthetic construct
  source 1..1206: mol_type = other DNA
atgtatctcgacaacagcgctacaacacaagtgagcaaggaagtgttcgaagagatgaagccatacttccgcgaagagtttggaaaccccagcacgctctataagctgggtcgggaaagcaagaaagcgctggatcaagctcggcagagagtggcgaatgccatcaatgccaagcccgaggagatctatttcaccagtggcggctccgagagcgacaatctggcaattaaggggattgtatttaagctggccaaaaaggggaagcacataatcacaaccgaaatcgaacatcctgccgtcaagaggaccttacagttcctcgagtccctggactttaaagtcacttacctgccggtgtacgagaatggcatcatcaagattgacgacttgaaggaggcgatcaccgacgaaacgatcttaataagtgtcatgcacggcaacaacgagctcggcaccatacagccaattgaggaaatcggtaaggtggctcgggagaaaggaatcaacttccataccgatgctgtgcagactttcgggaagattgaggtggacgttgagaaactaaatgtggacctgctggccctgtcttctcacaaaatcaacggccccaagggtgtcggcgccctctacatcaaaaagggaacccgtctggagcccctgattcatgggggcgggcaggaaaagggcattaggtccggtactgaaaacgtccctggcatcgttggattcggcaaagcctgcgaactggccgccgatcagctggacgagcactatgagaagctaacaagcatccgcaacgagatctctgacaagatattgaacaccattccagaggcttacctgaacggtgacgcagaaaaaagactcccgaacctacttaatttccgctttaaagctattgaaggggagagccttatcttgctgcttgatgcaaaagggtaccaggcttcaacgggatcggcatgctcgtccaatacacttgaggcatcccccgtgctcacagcattgggactcgaccctgtggatgtccacggatcactgcgaatatccctggcccctgaaagtgaggagtttgatgtagatgattttgtgaatactgtggccgagagtgttgcccgacttagagaaatgtcaccactctggaaccaggagattgattacgacggggtaatgtgccggaagaatgacaactgtaaaaggtgttga

SEQ ID NO: 8757 - DNA, 372 bp, synthetic construct
  source 1..372: mol_type = other DNA
atggactactcagagaaagtaatggaccatttcgccaatcctcgcaactcccggaaaatggaggatgccaatggggtgggaaccgtcgggaaccccacatgcggcgacctgatgaccatatatatcaaggtggaggacaacattatcaaggatattagcttccagacgtttggttgcggcgcggctattgccaccagttccatgatcactgaaatagctgtcggaaagacactagaggaagcacttaagatcagcaggaatgacgttgcagaggagctcgatgggctcccaccggtgaaaatgcactgttctaacctggccgccgatggcctgcaagctgcgatcgaaaactactacgaaaacaatcagtga

SEQ ID NO: 8758 - DNA, 372 bp, synthetic construct
  source 1..372: mol_type = other DNA
atggcaaactttgtgaagtgcgataagtgtgggagtatactcggcatgttcgttaagggggagggagaagtctgcagccccgacctgctagagatccctgtacagaccgaaggcgacaaggccccgaaacacaagccagtggtggaggtggacggcgacaagctgacggtcaaagttggagaggtcgcgcaccccatggatgacgaccattatatccagtttgtggccgtggaaatcggtagcgagctctacgctaaatgcttcaaaccaggggatgtggcggaggccaccttcacaattggcgcagacaagtcagctgatgctgtcgcctacgccttctgtaatctgcacggactttggtccagcgaatga

SEQ ID NO: 8759 - DNA, 519 bp, synthetic construct
  source 1..519: mol_type = other DNA
gtgagcagctatagtaagctgataattttcatcctcgtgctgctgtttattagtgccgccattttcttcatcgacagcagcatggattccatcaacaggaccatgcccggagtgagcgattccatcgttaacggggacaaagagtacaacgaagcggtgcagctggtcaatgataaaagttttgacgaagcaaagaccaaggccgtatccgcagagaataactataacaactcccttattaagctcaacggcatacggaataatttttcgagcgacatcaacgaagtgcaggaggaatatattggcactgttatcaaggaattggagttaaagattaatgctgtcaacaacctaaaggaggctatcgactgcttcaaaatcaattcaaactacacaggtacgaattacgccagcaaagccaatgatctcatgtacgaggcgacagagtaccagcacgagcgcaactcaatagtcaaaaataacagcaatctgttcaagcagcaaaactttgtgatctga

SEQ ID NO: 8760 - DNA, 2283 bp, synthetic construct
  source 1..2283: mol_type = other DNA
atgaccaaggagtttttaaagttgaaaaccaagtgccccaagtgtaagggcattggtagtgtcgtggtggactataaggagtgtaaagcctgtgggggaactggctacgaagacgatgctttcaatattgggaaccattttaaaggggtaaacagcaatgccaaggcgaagtttgacttaggcggcgaagaggatattccatgtgaggcctgcaatggaaaagggcagatcgaggtgttcgaggagtgtagccattgccatggcaccggtcagattaacgtctgtcgggactgcgggaagtcaattggagatcaacacgacctgtgcgctgagtgcgaggagaagcggaaattggaaaaagctaagcacgataaattcgaagctcgtcgcagtgcggcccgtgacgtctacatcctggacagcctatgtaagatgagtgatatcgacaaagacaaactgtacaaaggaagaattacccgcgtcgaaaaatatggggcctttgtaactctaaacaataatgtgtggggcctgatgaggggtgacaactttgggtacaatgtgggagacgatgtcatcgtctacgtgacggccattaagagcagagagcggaaaatagacctggctcccgctcacgtggaaagctacaatattaaaaagctgacgaaaacattcccaaggactctgatagggaagctcgaggagaaaaaaggccggatggttcgcatcgacggggaggtgcagcagatccagcaaacctccgggccaaccatattcataatcagtgatgaaactggttctagtgaaatcgccgcgtttgacaaggcaggggagcgctcctatccggaaatcgagctgggcgatgccgtgcaggtggtcggtgaagtgaacgagcacgggggaaagacacaaatcgagtcctcgtccatggtaaaactcaacgaggaaaatacggccaagctccataagctcatcgacgatgccctcaacaagaaggccgagccacagcacgttgatttcctcgtcgaaagcgatattctgaaccggctaaagcctaagatgagggaagcggcccagaagatccgcagggccatacttgacgggaggaccatcttactccggcaccacaacgatgcagacggcatttgctcaggcgtggcaatggagaaggccatcattcccctcatagagaaggtcaaccctagcaatgacgctcagtactactacttcaagcgctctccatccaaagctccattttatgagctggaggacgttgtgaaagacctgtctttcgcactggaggaccaggagaggcacggccagaaattgcccctgattgtgctgctcgacaatggctcaaccgaggaggatatcgtggcgttgatgcaggccaagatttatgatatcgaggtggtggttattgaccaccactcgcccggagaactgctgaccaaaaacatccaagatggcaagatatatggagcgaccgttgccgtggacgaatacgttgactgccacgtcaatccttatttggtgggcggagattcccagctgactgccggagctctggccacagaagttgcccaccttatcaacccggacgtaaaagaagtaatcaaacacctgccggccgtggcagcactgggcgataaggccgaatgcagcgaggctgaccagtatttggagattgcgaaccagaagggtttcgagcgagagcacctagctaagatcgcagaatgtgtggactttgaagcatttttcctgagattcatgaatggccgaggaataatggacacaattcttgctgtggataacatcgataaacatgagaagatgatcgatgcactttacaaggaataccagaagagagttgacacgcaactcaaggccacacttcccaacattaaaagaactcagttcgaaaacggcatttactttaatctcatcgacgtggaaaagtacgcacacaagtttacattccccgctcccgggaagacctgcggtttcgtccatgacaacgtcaagcaggagctgggcgaggataaacctatcgtaacactggggcatggccctgattttggagtgttccgagccaccgatgctgtgaacgagcagtacggattcaatgtcaacgaaatcgtctctaagatgatggactccgtgcctcaagcaggtatcgatggcggaggtcatgagtgcgccggctcaatcaagtatatagagggacttggggaagaagtgctgagcaaagttatcggcgagatccagtccctctctaagaactga

SEQ ID NO: 8761 - DNA, 894 bp, synthetic construct
  source 1..894: mol_type = other DNA
atgacccttgagaattattgcaagaaatgcggccatcggattctcccaaacaatccctactgccccggatgcggctgtaagactatctacacagagaatgacgaatcctacgtgttcaccccaccggtacacgacattggcttcttcaatttttcaatcgacttttccccctatatcatgagcaatcgggatgatttcaagtatgacatatgccactgcgggtacctaaatgacgtcaccaacgagttttgttacatgtgtggggcgaagcgtttccacagcaaactcgcccgcttcttgaagaaccggtccaagccaaaatttaacctcgataatgtgctgtgtgaatgcggagccgttaacagcaaagagaacagtttctgcgagatgtgcgggaagcagctgcatgagcacgaaacgaaaatatacaaaagcaacaattacagcaattttaatctggagttcaagaacagtgtgttctgcttttgcggtgaggaaaacgaggaaagctctcaattctgcagaaactgcggactgccgctgataaattatggtcatctgtcggacatggcattattgtgtgtctgttccaccctcaatgatattaactcctccttttgtattgaatgtggcctgaacctcaagaaagagaatagccttatcgtgtgcgtgtgcggacacaagaaccctatctcggctaagttttgccagaactgtgagcgacccctgaatcctaagagactgattaactcaaagatcctttgttcatgtggggaaatcctggactggaacactgagttctgccctaactgtggcaaaaacatcaaaaacaggatgatcatccgcaatagtattaacaacacagtcaagagtctaaagagcatcttcaggtga

SEQ ID NO: 8762 - DNA, 978 bp, synthetic construct
  source 1..978: mol_type = other DNA
ctgaaaaagtgcgatgtgtgcggaacccttaactttaaggacaacaattactgcacccactgcggcaacaagttcatctttgagcatgtctgcccctactgtggttccattaacgaggactatgcgaatttctgtgctaattgcaacgggcagatcaatccgatttctattaatgatttcgatatactcttcagcgaatttaacgaaaactgtctcctcaacgctaaaataagtgatgagaaatataatgacttactacgcaatatctttctgcgggcagactttacagagatccatggcaacaccataaaagacaagattctaaaccttgccagcatcttcacgcagtgtaaacctaagtcccgaggctacgaaagaggattcatctttctgggcaactacatttactacgatgaccggctggacgaaagcgtgcagatcgcaacgatcattcacgagcttgcccactacctgatcttcagcatcatcgagtccctcctgtgcgatatattcaatgtaaagacatcaaccactttgcaaagcttcatatggtatttcctcatgatccccgagtttaagatcatgaacgaatactgcgcccacactgtggagggcaggttcatcccatacggataccagaactacggttccttcaacctcttggtcaagaacacatcttttgatgaggactcgatcaaaaccatggagatgttcgggaacagctttgccaatgaaataatcatttatctggaaaaatacattgggaacgacctgcgccaggagatcaagctgcaatataaaatggacctgaagagtcccagttatgactcaattctgatggaaactgatgagtgttttaacttaaatgacaagaataggatgctgctcaaaatcttgtatgatgtgttcaaggaagccagcaacccaaatgttatctgtgagctgaagaatattaaggaggggattgacctgaactga

SEQ ID NO: 8763 - DNA, 297 bp, synthetic construct
  source 1..297: mol_type = other DNA
atgggcaacgagaaggacgagcttttgaagctgaccagctatgtccagattagcaaataccgcgaaaagacactcaagtccatcggtgatgacgtgaaaatccccaccaacatcgccaaagactccggcatcagaactaatcacatttcaaaggtgctaagtgaactcaagagcaaagaaattgtggagtgcataaatgaagaggcacggaagggaaggctgtaccgactgacagatacggggaaggacgtactggaaaccatcaaagtcaaggaggagaaagagaacaaggattga

SEQ ID NO: 8764 - DNA, 612 bp, synthetic construct
  source 1..612: mol_type = other DNA
atgaagtgcaagtattgcggcatcgagaacaagaagagtgcaaaattttgtacatcctgcggtaagccactgaacgaatcccccgaaccgaccggagggaacagcaagctgatcatcattgcactcatcgccattataatcattctcgttggaaccatcggcttcttcgtcctgaacaataacttcaatagccatgacagtgagattccaaataacaccgtgagcagccaggagagtaacagtgccaatatccaagactccgacaacgggggggatgtcaaaacgcaggtgacatcatctcagaccacgaactctaaatcatgggagcccatcggaagctactcaggcagcggctcaggcagcaagaccattacggtccccgaaggcaaaataaaagtggagttttcggcgtatcctattaaaaattatgccactaattacctaacagtgtccggctctaacggtgagtcggggggagtagattgggggtctcacagtgctgtgaagaccaagtctgattccttcatctacacctccagctcctccgagacatttactatagactattacgaaactgtgagctgggaagttcacttctaccggtaccagtga

SEQ ID NO: 8765 - DNA, 711 bp, synthetic construct
  source 1..711: mol_type = other DNA
atgttcttcgatctgaatattaaggggagtaccttggagaataatatcaagctggctaaagaggcttccttttacggctggaatcacatcaatttcagttacaatgcgaacaactttctaaacgccctaaacttcaaggacgagctcaacaaggccctgggagatatcattgactttgactatactctcgagatcaagtcgagcaacattaacgatattcggaagtctgtgaacaagttccggaataggtccagctgcatctccgtggttggcggtgacctcaaggtcaaccgcgccacattagaaaacataaaaatagatgtgttgtcacgaccataccttagacgctatgactgcgggctgaaccatgtgcttgcaaaggaagccgagaagaacaatgtagccgtcgagttgtgtttcaaggacgtcctgaaaagctacctgtcttatcggtcaaaaatccttagtaatttcaaagatatatatacactgtaccgcaaatttgactttcccctcgtgctgagcagcagagcggagagcgtgtttgacatccgtactacccacgatttcatcacgttcttcaagcagaccggcctcaccgacgctgaaatcaacaaatcctttaaaacagcagataacattctgaaatacaacaagaatagggaaaacctgattctgaagggagtgatgagggttaccgacgaaacgtga

SEQ ID NO: 8766 - DNA, 357 bp, synthetic construct
  source 1..357: mol_type = other DNA
atgaaactgaaggtactgccacccacactcaggaagaacaatcgctatctgacggtggatgtgaaggtgacctgtcagatcacaaaagacgacctcgtggccattgtctgggacgcatgcatccggtttcagggggagctaaacaccgctaacttcaacctttgggtgatgaagttcttcgaaatcgaaaaacgtgacgattactataggtaccgaagcatcatcagatgccaacgggactatgttgatgaggtccgctcatcttttgccttgaccaatagatacggtaacaatatgattagcattactaccataggactgtccggcactataaaaagttccggcaagtacatctga

SEQ ID NO: 8767 - DNA, 768 bp, synthetic construct
  source 1..768: mol_type = other DNA
atgcagcccctccagaacgccggatatgaccgggccattactgtcttcagcccagatggcagactgttccaggtcgaatatgcaagggaagccgtgaagcgcggaacgacatctataggggtcaaaagtagcgaggggattgtgttggcggtggataaacgtaccacctccaagctggttgaagcctcatctatcgagaagatcttcaagatcgacgatcacattggagccgctactagcggtctggtggctgatgcaagagctcttgttgagagggcccgggtggaggcacagataaacaagataacctacagtgagcctattcgcgtgacaagcctgagcaaaaagctgtgcgacatgttgcagttatacacccagaatgggggagtgcgaccctttgggtcggccctcatcattggtggcgtctacgatggggtatgtaagctgttcgagaccgacccgagcggcgcactgatcgaatacaaggcgacagctatcggctcaggccggtccgccgctatggagatctttgaggagaaatacgaagacgacctcacactggacgaggccatcgagctcgcactgaccgccatcaatgaagctacggaccatgacactgtgtccaacaacgttgaaatcgccgtgattaaggtcgatggcgagaagtatgtgaaactttctcaagatgaagtccagaaatacatcgatgaggtactagtggaagaagaggaggaggagtccgcggacagtcaagaagacgaggaatga

SEQ ID NO: 8768 - DNA, 702 bp, synthetic construct
  source 1..702: mol_type = other DNA
atggtcaacattgacgaggctatcatcgcgaaatacgagtactgcggtgagcatttcgagatattggtggaccccgatctggcagccgacttcaggaaccctgacggcccagacgttgccattgaagatcttctggccgtggaggagatttttaaagactccaagaaaggggataaagccagcgacgaagctatgaataagatatttgaaaccacagatcccatcgaggtgagcaagattatactcgaaaaggggacggtccaactaactgctgaccagaaaaggaagatgcaggaggacaagcggaagctggtcatcaacaaaatcgccaaggaagcagtgaacccgcaaaacggcctgcctcaccccgtccagagaattgagaatgcctgtgacgaggcccgagtgaagttcgatcccttcacctctgtagaccagcaggtacagactgctttaaaagccatcaagccactgatcccaatccggttcgagcgcgtgaaagtggctgttcgcctccctggcgcatcggccggaagtgcgtattccatcatccacggatttggagaaattatcaatgaagaatggcagcaggatggctcatggataggtatcatcgagatgccgggcgggctccaagataagtttagtgcaaagatggccgagattagcgggggaaacgcggaaacaaaaaccattaagtga

SEQ ID NO: 8769 - DNA, 921 bp, synthetic construct
  source 1..921: mol_type = other DNA
atgatctatgtggaaaacaaggacctcgtgattcctggtcagatactggctgacgacgagtactattcgggaagagggacctttaaagagaacgggaaggtttgttctagcttgatgggccttgtgagcctcaggaacaaaaaacttcgggtgattccactgaagtccaaatacgttccaaagaagggcgatgtggtaatagggaagattagtgatgtgaggttcagcatgtggaacgtcgacatcaattcaccttattctggaatcctacccgctttcgaggtgttcggtcgggagaagaaggagctcaacaaagtctacgacatcggggatgtgctatttctgagagtggtcgacgtcgatgagatcaaaaaggcaaagctcggtctgaagggacgaggaatgggcaagtttaaaggaggaatcatcgtagatattgccccaacaaaggtgccccgcctgattggcaagaaagggagcatgatcaacatgattaaggacaaaactaattgcaaaatcgtcgtgggtcagaacggcctggtctgggtaaagggggacaaggacatggaacagctgacgaaaaatataattcacttaatagaggcggaggcgcacacaagcggcctgaccaacaagatcaaaaacaaattgtacctggccattgacggggagctgccccccgaggaagccgaagaagagcaagacttcgttctcgagaagccgaagcttcaggactttaaggaagagttggaacaggaagagcgcgcaaaacatgaagccaaggaaatcaaagaaaaaggcgataagcctaacatcgccgaggtgatcgaggagctgaagcgtaagaataagagtaaaaaagataatggcctgtcatacggcgataactccaataattccttcatcctcaacaataagtga

SEQ ID NO: 8770 - DNA, 696 bp, synthetic construct
  source 1..696: mol_type = other DNA
atgtcggagttcattagaaaggacggtaggaagtatgatgagttacgccccatcaagattgaagccggcgtgctcgaacgggcagatggctcagcttacctagagttcggcggaaacaaaatccttgtagctgtgtacgggcctcgagagagctacatccgcagactgctgaaaccaaacactggagtgattagatgcaggtataacatggccccattctccgtcgacgaccgcaaacgcccaggacccgaccggcggagctccgagatctctaagatcacagcggacgcactcaggcctgccctgatgttggaaaattacccgcggtcaatgattgacgtatatatcgaggtgatagaagccgagggcggcacccgttgtgctggcattaccgcggccagcgttgccctggttgacgcaggaatccctatgaaggatatcgtggtcgggtgcgccgcaggcaaggtggatgatgaggtcgtcctggacctgagtgaatacgaggataaagaagggcaggcggatatccccatcgctataatgccccgaacgggggaaattactctcctccagtccgacggtgacttgaccgaagaggagtttcagaaggccatagacctggccatggaggggtgccttaaagtgagtgagctgcaaaaggaggctctgatgaaaaagtacagcacagaacagtga

SEQ ID NO: 8771 - DNA, 786 bp, synthetic construct
  source 1..786: mol_type = other DNA
atggatatagtcccagagatcacaagacagagcattgctgacctgatcaagaatgacaagcgcgaagacggcagggacctgaccgaatatagggatattactatcgagacagacgtgatctccaaggcggagggctctgcgcgtgtaaagcttgggggcacgcaggtcatcgttgggatcaaaccacagctcggaacacccttccctgatactccggatctgggagtgctaatgaccaactgcgagatgctaccaatggccgatccttgttttgagcccggcccccccagcgaagacagcattgagctggcccgggtggtggatcgagggatacgggaatcgcagctgattgatctcgacaagctgtgcgtggaggagggaaagcatgtttggatgttgtttgtggacttacacattatcgacaactgcggaaatctgtttgacgcctgtgaattggccgtcatggccgctctcaaatccactaaattgccggtcgcaaacatcgtggatgatgaggtagtgataagtgacgatgaaaccttcgacctgcccattaataacgaacttgcactctgcaccttcgtgaaaatcgctgacaagatggtaatcgacccaacactggatgagcaaagagtcgcctgcgcccgcctgaatgttggtgtgacgaaagacgggcacatctgttcaatgcagaagggtggcgaggagcctcttaccaaggacgaaattttctactgtgtgaacaccgcaatgggcaaagtcaacgagctcatcgaaaacctgtga

SEQ ID NO: 8772 - DNA, 630 bp, synthetic construct
  source 1..630: mol_type = other DNA
atgagcaacacaattaaaaatgacgagaatataaaatcttgcatcatcctttgtggcgggcagagtaggagaatgggtcaggacaaagggtcgatgattatccaaaataagcctatgataaaacacatcctgtctactctgaacaagcatatcgatgaggtcataattgtgctgaatgaccaggtacgggttgataaatacgccaagttcatcaaccctgaggaatacacctactccatcacattcctcaaggataaaattaagagcaagggaccactgtccggcattatgactgggctcggcgagataaagagtgactacgcgttaattttgccctgcgacagcccctacgtgagcgaagactatatccaaacgattttctcccagatagatagcgattatcaggcaattgtcccctaccacgacgagaacaacaagttgaagacctcagagccgctgcactcaatctataagaaagacaccattaccgagatcgaaaagctagtgaacgaggacgtgctgcatatcaaaggacttatcgaaaagatcacgacaaagtttatcctgattgataacaaaaagatcgaaaaaaaggagtttcgcaatctcaaccgaccagaagacatctga

SEQ ID NO: 8773 - DNA, 762 bp, synthetic construct
  source 1..762: mol_type = other DNA
atggacgaacatgagaagtggaagattaaattcagcctgctgatggtggtgctcatcatcatcatctatggcagcaattacctcgtgctcggagacggtgaacatattattagctacgtgtggacacacctggggttcattcctgttgatattctcgtggtcgccttcctgcttgagggaatcatcgagcggaaagaaaaggaggccatgcttgagaagctggacatgctcatgagcactttcttctcagagttagggaacgacctgataacccagctaagtaccgcgaaccgacataaggcatccaccgccagtctgaaatcaattaaaaactgggatgacgaggattacgaagataagttggaggagctgaaaaattccccgatcgagtttacagccaatatcgcccccgaaaaccgggagaagtttttggaggatctgcgcgaattgctggtcaacaagagggaatttatcctgaatctcataaataacccaaacctacttgaaaaggaggaatttacttcgttgatcaatgctatccttcacttagacgaggagctggagcacaggaaagacctggctctcgtaaatgatatagacttcggccacctgaacggcgacatgaacagagtgtacaatattctagtccacgaatgggtgtattatctgaaatacctgaacaagcatcacccctacatgatcgcactcatgatacgcacgaacccattcgacgaagatgcgtccgtctatgttaccgagtga

SEQ ID NO: 8774 - DNA, 564 bp, synthetic construct
  source 1..564: mol_type = other DNA
atgctggacgataaggacttcatcaagtcctgtgatgtgccggggcctacaaaggaagctatcagggcgataatcctttacaagtccgaagtgacaagcaaagacaaggtcgtcgattgcggctgcggaacgggcgggattacttgcgagttttcccagcgggccggtgaagtaataagcatcgataccgaccccgaggccattgatgtgacaagtaagaacctgaaaaaattcgggcttggagacaacgtcactctgattaacgacaacggctcgaaggcactgaagaacatcaaagacattgacatagccatcgtgggaggcagcggcagacagctagaaaatatcctggacatcatcaatgagaacctcaattcaaagggccgcatcattatcaccgctatcctggtggacaccaaggttgaggccattaacaagctcaaagatttagggtataatcccaaaatcatggaggtgaacgtttctaatggaagggtcctcgatcggggtgtgttgatgattagtgagaacccaatagcaattatcaccgccaaaaagcgatga

SEQ ID NO: 8775 - DNA, 549 bp, synthetic construct
  source 1..549: mol_type = other DNA
atgatcgtggtcggcattactggcgccagcggagtaatttacgggatcaaactccttgaggcgctcaaggagctgaatatcgagagtgccctggtgataagtgacctggccaaggtggtgatcgaatccgaaaccgattatacctttgaggacgtcataaaactgtcaaacacctacttcgactttcatgatctcactgcatctataaacagcggttcattcaaaacagatggcctagtgatcgtgccatgcacaatgaaaaccttgtccagcattgctaatggatatggggctaataccatcacgcgcgtggccgacgtctccctgaaagaaaagcggccaacaattattgtccctcgagagactccccttagaagcatccacctgcagaacatgctcacactgagccaagagggagccaccatcttacccgcaatgcccgggttttacagcaatccgaagacgatcgatgaccagatcaacttcgttgttggcaagattttggactcgctgaagatcgaaaacaacctgttcaagaggtgggagtga

SEQ ID NO: 8776 - DNA, 1227 bp, synthetic construct
  source 1..1227: mol_type = other DNA
atgagtgagaaaaagaagtttatccgagatagtgtctatggagacattaacctaaacgactttgaagtcaaaattatggatatgccgcagttccaacgcctcagacgaattaagcagctggggttgattagcctgatttatcccggggccacccacactcgctttgagcacagcattggcacaatgaacctgggctccaaactcgcggaggagcttgacctgaagaaagatgagatagagctgatccggtcttcctcactgctccatgacatcggccacggtcccttctcacatgtatccgagggcgtgctatcggtgccccatgaggaactcacgaagtttgttgtcactaagacgtccatgagggaactgctggaagaaaagttcgatgttaacgagatcgtcgatattgtgaatgggaaaggatatcttggcccaatcgtgtctggggagctggacgttgatcgcatggattatctgctccgggactcgcacaacaccggtgtggcctacggcattatagactatgagaggatcatttccaatctgaaactggagaacggattgatactcgatatcaaaggagtccaggctgcggaaggcgcccttgtgagtagatacttcatgtaccctagtgtgtaccagcaccacacaactcgaatcgtcaatagcatgtttagacgggctttaaaaaagattatcgatgagaagataatcaacgaaaaggatatttacaaatacgacgacaccgacatgattagcatcttccggcactgcgacaataccttcgcaaacgacatcatgaaccggctagacaatagacgcatcatgaaaagagtgaaaaccatcaggctcaacaatttcaagtttccagagaagatgtacaagatcaaagcaaaaaccttgaggaaggccgaagaagagattgccgaagattatggtctcgataaggactatgtgttcatcaatatcgctgaataccctcgttttgatgagatgaagacacaagtgaatgtggacgggaagttatacccattgacaaagatatcaaacattatcggcgcactgagcaaggcccgcttcaatatacctgacatcagcgtatacgtagacaacagcgaaaggtccaagtttgataagttcaagctggagaactacctggagctgcccgagatcgaccgggagaagttccacggaatccattacgaccagatcaaacttatatga

SEQ ID NO: 8777 - DNA, 288 bp, synthetic construct
  source 1..288: mol_type = other DNA
atgaaaggctccgtcaaggccaaactaatcgtatttatggtgatcgcactcctcgcgttcgggattagctcggccttcgctagtctgataataagcgacagccctgattcctacaagctgatccccatcaagaacgactcattcgagcccaactacattaacaaggtcccgactatccttccaaaggtggaaacaaacaacacgacaaatattaccaccaataaaactaactataacatgaccaatctgaactataccaatcagtgggtggaaacatacgagaattga

SEQ ID NO: 8778 - DNA, 1218 bp, synthetic construct
  source 1..1218: mol_type = other DNA
atggtgatgttttccgcgggtgacactgcttgggtgcttgtgtgtacccttctggtcctcttgatgtccatccccgccgtcgccttcttttatggcggcctgagcaagcggaagaatgtgctgaacaccattttcctgacttttatcgccttttcaataatatccgtcatctgggtgatttttggttaccaatttgcatttggctcagatattaacggcctgatagggtcacccaccaatttcttcctccagggaatcggcattgatgacctcagtggcagcattcccacactactgttcgtcatgttccagtgcgccttcgccggactgacatgcgcaatcatgtctggcgctttggtcgggagaatgaagacaaaagcttgggttattttcaccgtcttgtgggtatgcctggtttatgtccctatcgctcactgggtctggggaggagggtggctaatgcagatgggagccctggactttgcagggggtgcggtcgttcacattaacagcgggatcagcgcattggctgtggcattagtcctgggacgccgaaagaacaccagcttaatcccacataacctgggatacgctgtgctcggggccgcactactctggttcggatggatgggattcaacggcggatctggccttgccgccaacggcctggcggcaaatgccataatcgtctctaacgttgcagccgccacggggcttattgtgtggacaatcattgatacgtacctggtgggcaagccaaccgtgctgggcgcgatcagcggggcggtggcgggactcgtaggtatcacgccggcagctggcttcgtggacgtttatggagccctgatcattggggctgtagctccactggtatcctactttgccgtatactacctgaagcccaaactcgggtacgacgacgccctggacgtgtggggcatacacggtatgtcgggtgtgtggggggccgtggccactgggatctttgcagtgcctgccgtcaacgaggccgccggcttgatcgctggcaacgcaaatcaggtggtgatccaggtgatgagcgtggtggctaccattgtgtatgccttcacaataagtttcatccttgctaaagtgctcgataaggctatggatggcatcagggttgaagaaagtgatgagatcggtggcctcgacaacaatctgcataaagagtcggcctataatttcaattcctga

SEQ ID NO: 8779 - DNA, 339 bp, synthetic construct
  source 1..339: mol_type = other DNA
atgaagcggatcgtggcaatcatcagaccagaaaaatttgaagatgttaagcgggagctgatcgaggtcggctgtgagggcatgaccgtgtcagaggtaaaaggacgaggcagccagaaaggcataagggagtcctaccgcggtagtaacttctgcatcgacctgatccccaagacgagaatcgagatagtggtcaacgacgaccgcctcgatctaattgtggacaagattattgaaggagcgtatacagggaacattggggacggaaagatcttcatacagagcgtcgataatgtgattaggatcaggaccaatgaacacggggatgaggccgtgtga

SEQ ID NO: 8780 - DNA, 612 bp, synthetic construct
  source 1..612: mol_type = other DNA
atgattcaaatggcgaaaaaaaatattctcgctctgatcatacttattctgatcatcatcatcttcggcatgaacctgtttaataacactgtaaacatctacctcgatggggaaaatgtgagcgtggaaacccagacgttcgaggacatcgattcaaacagtctgaacaaggatatctgtagttatacactgaacgtgatgaataatactacatccgacgtggagaccctgaagaatggagtagagaagctgtgctatcagcacggcttggaggacgccgagataaacatcgatagcagcttgggccacgaccagatcccaatcatcgtccatgtggacggcacctccatgcttcccaccttacagaacggccaaacggtgctcgtcaataaaactcacgacttcgaggttggtgacattgtggtcgcagaatccaaggaatacgggggaattattaagcgggttgacaaaattgacgaaaacaaggtgcatctcataagcgacaacaaaaatatttcatatgagtacatcgatggagccctataccagatcaagggtataacaacctgggtcgatatttcggatgtcaacggggtggttatcgactactga

SEQ ID NO: 8781 - DNA, 678 bp, synthetic construct
  source 1..678: mol_type = other DNA
atgtactcgcagaccaagatcgcaattcccatcttccagaacgattataagaacgtaatcgaggtcgcgaatgactgcatcaagaagggcgcagacgttctggaatttaggatcgatgctctggaaaatccaaacattcgagaaataaaacaaacaattgaagagataaattttcctattatcgctactaaccggataatcacagaaggtgggttcttcaagggaaccgaggaggagagatttaacatcctatacgagtgttgcgaccttgtcgactatgtggacatcgagctgcagtccaacgacgagtacatcaataagattcatgacactggagtgaccaccataatctcttaccacgacttcgagaaaacgcccaaactgagcgaaataacctatattgtggagaaagaacaggagctcggcgatattgccaaagtggcattcatgccgcaaaaccttgatgacacgttaacaatcctggccgtgctctcccactgcaaggatacaatcgccattagtatgggggagttgggcagctacacgcgcatcatggctagcaagttcgactcacccattacctttgcggccgggagcgatgtcaccgccccaggccagattgacatcgagactatgaaggccctgctcaacatgaacctgaatatcatggatgaatga

SEQ ID NO: 8782 - DNA, 726 bp, synthetic construct
  source 1..726: mol_type = other DNA
ttgaaaattactgcaataggcgccgacatctcaaaaaacgacgtcagttgcagtaccatgctagtcgaaaacattgagaaaagcctttacaaggtgaagaaactgggcgcccgcgatgttgcgctcactaatgtcacaggcgacgacgtggtggtaagcgcgttcgtggaagacgatctgcttgagatcgtcaacgaaggaatcgtgaacgtgctcaaggagagtgccgagaacttgggggacctcagcggaattagccagacacccgagggtgccggcgaaggaatctcctatgccgaaagcaccgtgcggaaagatagataccctgacgccattgttctgggctttgatacatatgggggggagccattcgtggcagacgtggctaactccaccatcgatgcggcaaaaggcatgaagaacttaacggatgtgtcggattacatcgagtccaagatccggaagatcccgggcgtcggctatgtgtcacccgagaccgacgaccctgttgtggtcgccaccgtggaaaacatcgagagcgtgggtgtaatcgcttccgcaatgattggggctgccctcggaaataagaatgtgtacctggttaagcgaggaacaacttgtaacgtcctgcccggtagcgtaatatttagcgctaccgccttcatgaatgggaatatcattgacctggctgtcccattcgagaataagacgaggatactgaggtga

SEQ ID NO: 8783 - DNA, 864 bp, synthetic construct
  source 1..864: mol_type = other DNA
atgattctcctgaacaaggacaccaaatgcttggtgcagggcataactggcaagcaagggtccttccacacagagcagatgctgaactacaacaccaatatcgtggccggcatcacgcccggtaagggcggacggatgtttttggaccagattccaatcttcaactccatagaagaagctaaagaggaaacagacatcaacgcctcgattatttttgttcccgccaagttcgccaaggacgctgcatttgaagcaataaggcacctcgatctggttgtgatcatctcagagcacattccagttcatgactccatgcagatcatggcctatgccaagcagatgggaaccaccatcattgggcccaacacgcctggaattatatcaccgggcattggcaaactgggcatcatgcctactcacatctttaaaaaaggtaacgtcggcctaattagccggagtggaacactcacatatgagatcgccaacgaacttacgaatgccggaatcggtcagagtacagcagtaggcattggtggggaccccgtcactggggataattacgtggatattttaaaacgcttcgacgaagacaaggataccgatgccgtggtgctgatcggggagatcggcggcacagctgaagagcgcgcgggaaagttcatcgctgaggagatgaccaaacccgtggtcagctacatagcaggacgaactgcacctccaggcaagaggatggggcatgctggagctatcatccaagggaatagcggtaccgtggagagcaagaccagagcgctgaacgaggcgggggtcgaggtcgccgccaagccgtctgagatcgtaaatctgcttaaaaaggtgatgtga

SEQ ID NO: 8784 - DNA, 1203 bp, synthetic construct
  source 1..1203: mol_type = other DNA
atgtcaaaccaggagattattgacaaactgctgaatggggagatgaagctgtatcaggtggacagggaggtgagcgccaaggaggctacagacattcgcagagaatttctggagcaaaaatatagcatcaagttagacaacatctccaactacactcttgatatggaaagagcctctgcgcgtaacatcgaaaattccatcggagtccttcagctccccatgggcatagccggcccactcaaaatcaatggggagtgctgcagtcgggaggtcttcgtccccctcgccacctcggagggagcactcgtcgcttccatcaataggggggcatcaaccatcactgcgtctgggggggccaacgtgcgaataacctcagacattatgactcgggcaccagtcattaagtgtgaaggcgtgggtgatgccttaaaaattaagcaatggtttatcgacaatttcgatgagctgaaaagcattgcggaaagcaccacctcccacgggaagctaatcaagatcgaccccatcctgatcgtgggaagctacgtttacccacgcttcgtgttctccaccggggacagtatgggcatgaacatggtaacaatcgcttctgagaagatcctcgataaactggcccaggacaccagcgctgtccatgtggccctctccggtaatgtatgtgtggataagaagcctgccgcgatcaacattgtggaaggccgaggcaaaagcgtcatagccgatatattggtgcctaaggatatcgtgctgaagaagctgaaaacaacggctgaggcaatcgtggaagtgaacatggcgaagaacctgatcggttcggcagccgcgggcagtatgggctttaatgcccattatgccaacatggttgctgcaatattcttggcaactgggcaggaccctgcccacgttgctgagggttcactgggcattacaacagccgaagacagggatggagacctgtacttcagcgtgaacctgccggacttgcccgtagctacggttggcggcggcaccagtctagaagtagctcacgagggattggagattcttggtgttgccgggtctgataaagcacgggaatttgcagagattgtggcctgcacggtcctggccggagaactctccctcgtgggagctctggccgcaggacaccttgctagagcccaccaggagctgggccgcggatga

SEQ ID NO: 8785 - DNA, 207 bp, synthetic construct
  source 1..207: mol_type = other DNA
atggacgacttcctggacgaactataccccgaaatcacgctcgaaaccgaggacattgtgatgacaatatccctgaaaaaggattatagtcagactaaggacgtcaacgtgcggaaaaaggaatttatcaaggatctgaatgatttcatcaaagagtttgaggagaccagcgagagcctcgagttcatgaggtacttcgacgattga

SEQ ID NO: 8786 - DNA, 639 bp, synthetic construct
  source 1..639: mol_type = other DNA
atgattttcgactccttctacacattcttaggtcagcttgtcgtgtttttggcaatcctcattatcatcctcttcattgtcatccttgtgctgggcgtgctgatagccaggaagaatgagatcaagttcccaagattcatcctttttgtggttgattccctctacttcccgttcaaatcaatcgcgaactttctcaaactggacgagtacctgattgatgatatctcgatcaaagtccgggatgagctgaacaaagagaaatttcgcagcatcccctccgagaaaaccctgatattcctaccccactgcctccgacacaagaattgtcctgcaaccctccaaaaggaggggctgaactgcactgaatgcgggctgtgtagcattggggtcgttaagaagaaggccgaaccaatgggctataagatgtatattgtgcccggaagcagttttgtaaagaagatcgtgaaggagaacaagttcaaggccgtgctgggcgtggcttgccatgaagacctgaaccagatgatgatgctgctgagtgacttttgccctcagggagtgttgctagaaaaaacaggctgttttgaaacgaaagtaaatattaagaaaatattcgagaagttggacagcaaatactga

SEQ ID NO: 8787 - DNA, 453 bp, synthetic construct
  source 1..453: mol_type = other DNA
atgaacatcgacttcaagaacaatgagatactcttcctggaaggggaaaccggcatcgtgggcattgttaaggtagcacatgataataaaatgctgtttattgccacacacgacaaccaggaaatagtccaatttctggaatcggacgatatcattgctgtgtccaacttcaagaaggataaacggacaatccgcagccaggcctacctcagtagggaggagtcttcacctctgatcatcctcaacaaggaccacccgtccactaagagattagagactgtcatcagcattggcgatgaggtgaacctaaactgcaatattatccccggaacccaccccgaacagaacgtgctgtgctcctgtgacagtctgagcggacttaaaataattaaaaccccaacggggatcaagttgaataaggagttcgacaattttaccatcgagaaattctga

SEQ ID NO: 8788 - DNA, 156 bp, synthetic construct
  source 1..156: mol_type = other DNA
atgtgctccggtggcgggcccatggccgatatcgacataaaaaaactgaagaccaaaaagtacttctgtaaagactgcggaaatagctttaagggcctcgggaagaaggtggtgtgtccaagctgccagagtgaaaacgtagagctggtcgagtga

SEQ ID NO: 8789 - DNA, 1017 bp, synthetic construct
  source 1..1017: mol_type = other DNA
atgtacgagaagatcatcaacaatatcaagctgaatctcggcgaaaacaaggatctgaatcggaagtatctggcatcacagatagagaactataaagatcacccatataacctggagatcacaaaagagatcagccgcatgatgtgggactgtctcagtgatgaggaaaaacgggagtttatagaaatcagcgagaatgagactcctgtcatcgacatcctggaggagatttacccaatgattgagatgggcaagtacgacaatgcactcgacaagcttaatgggttcatgaaaactttccaacccatgttcgaggacgacgccgtaaatgaataccacttcttcaccaaccagttggaggaggaaatcttcaacaaatatattggagctaagaaagaaatgcgctacatccccaacaaccaccctctcctggatttgtattacgtgtacggattcctcctcctcgaaaagcacgagctaaaagaggcggaattttacctaaagaaggccctgaagattaacccagtttctagtaggatactgttagagttatccgatatttataagaccaaagcacctaattttaacaagttttacatgtacacaatacaggctctggagtatgcctattacccgcaggacctggcgcgatgctacaggaacctagggcagttttacatggaagagatgaatttcgagatggccgccgccctgtacaattattccatgaaatacgaacttaaccccatcgtctacagcaaacttcagtatatcaagtcgaaaggcaccaacattgagttggagcttgaagaatgcctgaacacgctgaaggacaagaagatccagatcgatgtgaatccctttattctgaaaaccttggaggagctgtccgataagtatgacgaaaagcaggccctgcatcaagctctctacttctacgaactccagtatgacctgaaccacgaacaagacatccttgaaaagattaataacattaaaagagtgatgaaccattga

SEQ ID NO: 8790 - DNA, 1644 bp, synthetic construct
  source 1..1644: mol_type = other DNA
atggccaatcagccaattttcatcctgccggaggggaccgaacgctattccaagcgcgacgccctacgcatgaatatcactgccgccaaagtgctcgccgggattgtaagaaccacattaggccccaaaggtatggataaaatgctggttaactccctgggggatgtcacggtcactaacgacggggccacaatcatgagtgaaatggatattgcacagcctgcagcccggatgctggtggaaacagccaaaaagcaggaagaaatagttggcgatgggacgacatccgtggttgtcattgctggggaactgttatccaaggccgaggagctgctggacgacggaatcgccacctccgtggtggtaaaaggatttaggaacgcaacagagaaagccgtggaactgcttcaaggtattgcgattgacgctgacgacaaggagaccctgaagaaggtggcagttactgcaatgagtggtaaaggaagcgattacgccaaggagcatctggctgaccttgtggtggaggctgctctgcgaatcgaagaagatggaaaaagcgacattgagaatataaatatccaacgggtctccggagactcagtggaagatagcttcttggctgaaggcatcgtaatcgacaaagcccccctcagcaaggccatgcccaaggacataaagaacgcaaagatcgccatcatgaagtatcctatcgagctcaaggatattaacacggacgccaagatagatattaccagtcccgatcagtttgaaatgtttctgaaaaacgaggagcagatgataagggacttggtggataaggtggtggatagcggagctaatgtcctgttctgccagaagggtatcgacgacatggcggagcactacctgaaaaaggcaggcatcatgaccttcaaaagggtgaagaagagcgacatggagagaatcgcaaaggctacgggcgccaaactggtcaccgatattgaggatctctctgaagacaagctgggctcagccggccacgtctacctcgacaagctgtttgatcatgaattgacattcattgaggagtgcgagaacccaaaggcgtcgtctattgtgcttcgaggcagcacccggtatgtcaccgagcagatctcaagagccatcgacgacgcgctcggcgttgtggccgctaccatcgaggagggcaaagtcctcatcgggggcggcgcctgtgagatcgatttggtcaaacagctgagggattacggggaaacagtaaatggacgcgagcaactggcgatccttaagtacgctgaggccttagaagtgataccacgtaccctcgtggagaatgcaggtctggacactatcaacttgattgccgatcttaaagcagctcacgaggagtctaacctgatcggtatcaatgtcttcactggggaggttgtggacatgaaggaagctggggtgatcgagccgctacgggtgaagatccaggctctccagtcagcgggcgctgccagtgaaatgatactccggattgacgatatgattgcagcgagaaacgcactaaactctactggacccgacgagtcgggcaacgacgccagcgggatgccacctatgcctggcatgggcggaggaatgcccccaatgatgtga

SEQ ID NO: 8791 - DNA, 3939 bp, synthetic construct
  source 1..3939: mol_type = other DNA
ctcaacaaacagttgttgctcacctttctgtttgtcctggccgtgatattgtctgtaagtgcaatttccgccagtgatgtcaatgtgacagactcgtacacaacaagcgtcgcggatggcgcatcaaatgtctcagtgccaatcgaaaattctgatgactcaagcgtgcttagcctaagcagcgagtccgacgttggcaatgtatccagcaagaatagtgagtctgtaaagtcaaatactttatcaaccaactcggacacgaactcgttaagtaacaggggaaatgatgttctggaagtgaacaacaccgcctcgccaaccattaatgcctctgaaactattgctagcaaagatatcactaagtactacaagggcagcacagggtatactgcgaaatttctggatatgcatggtaaccccctgaacgggtccgatgttaaaattaccgttaacggggtgacctataccaagaagaccaacagcgtaggggtggcttccctggcgatcaaccttaagcccggaacttacaagatcgtgtccgaaaacctcataacaggctataagctgaccaatacgattaaagtcttgtcaaccattaacgcaaatgacgtgaccaaagtgtataccgacggcaagaagttctacgcaacctttttgaagagtaacggcaaggctctcgcgaacgcctatatcaagtttaagattaatggaaaaacatactctaagaagacgaacagcaagggggtggctagtctatccatgacgaacctgaaaaaagggacctataaaatggtctcctataacaaggatggcctaaccaagacgaatactgtgaaagtggtttccaagacgagttccaagctgaataccaatgcctatactttccttaaaagcgatagtaagaatatcaaggtgactttacttaacggcctgggctacgcaccaggctcaggcaagataatcaagttcaccgtcaatgggaaaacgtactccgccaaaaccaacagcaagggtgtcgcttcccttaaactgccttacctgaaggccggtacatatacagtcaagtacaagttttctggaaacacattttataccgcaagcagtgcatccaataagctgtacatccttccaagtaaaaccgccaccttcaccgtgaagagcacaacaactttcggcaagggtgctaatacgccgttcaaggtggccctcacctcaggtagcgtgccgttggtcaaaaagactattactctgacggtcaacggaaagtcatacgacaagaccaccgatagtaacggaatcgttagcataccgattgacctccagaacggcaagtatacagtaacctacaagttcaacggggactctaaagtcaatgctaaaaccggatcttcgagcattatcgtgaaggaaagaacttccaccaaagttacttggaagagtggaaccagcttctatcagggcgctcagtcttataaagtgcttctgcaggactcgaacggcaaagctctcgcaagtaaagtggtgaagctgacggtaaacggcaagacctattcagccacaacctcatcaaatggctatgctacattcaacgtcaatctcgcgcctggaaattacagcattagcctaaagtaccccggcgacaattcgtacgctcccagcaatggcaatgtgaaagtcagtgtggagaagaaggaaaacacaggatacgggtactgggtgtacggtgaggacatgagcaatgtggacctcaagtcactggcctccaaaggaaccagcgacctgttcctgaactttaaagccatcgagctgcatgggcagtctaaagtggaatcctggatcgccagcgctaataagctcggaatgcgcgtgcatatttggatgcagatattctacgaagggggcaaatgggtcaatcccgtgaaaaacggaaaaccctacgaggcattctttgagaagaaaatcaccgaagctcaaggatatgcaaagatcaaaggggtggccggcatacacttcgactacctgcggtatagcggaaacggggagagcgcggctcataaaactcctggcggtgcggccgcaataagtcagttcgtggaggatgcgacggaggccattcacaatatcgacagcaatatcatcgtttcagctgcactcatgcctgaaactaccagcatcctgaagtactacggtcaggactactcggtgatcagtaagtacctggacgtagtgattcccatgatttacaaaggcaactacggcaagacgtccgcttggattacgacaactacaaagtggtttgtcgataactctaatggggcccaagtctgggccggcttacagggatacaagtccgatagcaacgtgaccaagctgtccgcctccacaatcaagactgacgcacaggcggccctggatggtaaagcgccaggcgtcattatatttcgatggggcgtgaccaacttcgtcgatttcagttccctgtctgacaaatccacatccccaagtactactggatcggtaacgattgccgacatcatcgcagccgccaataatctgaaaaatgtgattaactcaaagaacacaatccctgccacagtgagcgttggggggtcaagttattctacggctcagtttctgtacatgatgaccgaggccgttaagaagatcaacgggggcaaaacgtccagccagatactgcctataagcgtgggagtgccaacaaacccctctggcagcttcaagtcagggaacatcgcctccagcgagtatgtgaacatggcaatcagtatcaatagcttcattatggagaacggtcgggcgccgaacttcgctagctcaagcagcctgggcactatcgactacgattctttagttgagatgtttgctgatatcctcacagactataaggacaacaataaactcccaacttccgtaaaagtggacaacgggacaaaatccgaggtcataaccgccaaaacaatatccatcaaggacatcgtgactggggcgaccaatttgaagaaatactacaacgattataagaagctgccctccactgtgactgcaggtaagattacattcaagctgtcggagtttgtttacttgatgagcaaggctatcaaccaaatcggcaagtccaatacaaaggccatcaccatcatcacggggatcggtaaccccaccaatccttctggcgataatattaattcaaaatacctgagcaagagcgagtaccttaaggttgccctcaacgtgactaattatatcaacaaaaacaaagtagcccctaactatgttagctccagtcttggtaaaatcatctactctgagtatgtcgatgcattctcccgtatcctggccttctatggcaacgagaatcggctgcccaacacagtcaccattagttattcaagcggcagcggaagcaacagcggaaccggtgccaccggaaccggcttgaatgaagccctaaagaatgggacggagctctcccaataccttaaggccaccaaaaactgccaggtggacaattctaagattaaagacatcgtgaacaaggtgaccaagggtttgacatctgttaaggacaaggctaccgcaatttacaactacgtcagagacaacctcgactattccttctactacaacaccaaatacggggccgtgggcgctctcaacgccaaaaagggaaactgcgtcgaccactcacacctgctggtcgccatgtttaggactgctgatattcacgccaggtatgtgcacggtaagtgtacattctccagtggatcgacttatgggcacgtatgggtgcaggtgctcgttgataagaaatggacagtggcagatgccacaagtagccgcaacagcctgggaaaggtcgccaactggaataccaacaaattttcctttaacaactactactccgaactcgggttctga

SEQ ID NO: 8792 - DNA, 714 bp, synthetic construct
  source 1..714: mol_type = other DNA
atggccaacggaaagatctccgaaaatatagaggaatacctagaggtgctctactgcaatggaagtaacggggaacaggtgtcgaccactaaactgtccgacgaacttggtatcgcacccggcagcgtcacacaaatgcttaaaaagctagaaaaactgggatacatcgactacactccatataagggggccaccctgacgcatgaaggcatgaagatagctcggaagatcacacgaaaacaccggattttagaaaaattcctcctggacgtgctcaaagtcaaggaggagaatatccatgagcaggcctgcgagatggagcacgcgttgagcgatgaggcggagagagctctgtgtaacatgctgcagcacccggatgtatctccagacgacaatgtgattcccgcttgtaatttcaactttgaaagctgcagtcagtgttttagccagaaggatttcgaccaaatcatcaacagggagtttaacctgctgtccatctcagaactcaccagcgatacggagggcacaatatcattcatccgcggcaacaccgaccttctggactccatcgcagacctcaacattaaggttgggtgccagctgaactatgccattaacgataacaaggacgaggacagctatttggtgttcattgatgatgaggagttcaatattcctaaggagatggccaataatatttttatccgcatctga

SEQ ID NO: 8793 - DNA, 516 bp, synthetic construct
  source 1..516: mol_type = other DNA
atgcgggggtccctgagcaacgatattgtcagcatcaagattgaggagggcagcaagaagccaatagccctgcacgagaagagtcttttcggcaagattgaggctgattcactgaatctctccctcatcgaggcctgctatctcttggagaaaggtcgcttgaatatttatgaagatgatttcgagtgttcggtggggtacatcatcgaccttctgaaagaacaggacctgtttggaaaatacgttgtctacagagacttaaaggaccgagggttcgtaataaagacgggcttcaaatatggaagtgaatttaggctgtataaccgcggccggggtcccgggcagggccattccgactacctcgtcaagatcatctttgaaaattatgaaatcaacgccctggacttcgcaagctacgtgagggtgtcacacggagtgaacaagaaactactgctggcgatagtggatgacgactttgatatcacatactacaacattgagtggaccagaccgtga

SEQ ID NO: 8794 - DNA, 1116 bp, synthetic construct
  source 1..1116: mol_type = other DNA
gtgtccgttggtgataatatggggaacttgatcgatccatgggcctcatttagtctggactatgataagctggtgaatcagttcggcatcggcaagttttcagacattatcaacgaaatcaaaaacccccaaagactgatgaagagaggcgtgatctttggacacagggaattttccgaaattaataacctcatcaatcagaacaaggacttcgcggtcgtgaccggcatgatgcccagcggccaaatgcatattggccacaagatggtggtggaccaactgaagtggtatcaggagaaaggcgcaatgctgtcgctgcctattgcagatctggaatcatacgcggctcgcggaatgagtttcgagaagggccgggaaattgcagtcaacgaatacctcacaaactggatagccctagggctggacttggaaaaagacaacgtcaacgtatacctgcagtctcaaaataaggcccttcaggatctcgcgttcatggcctccagcaagacgaacttcaaccagctcaagagcatctacggattcacaccttctaccaatatcgcccacatacaggccccactcgtgcaggtggctgacatactgctccctcagattgaggagttcggcggccccaagaaggttgtagtcccggtgggaatcgaccaggacccccacattcgcctcaccagggacattgctcagaaacttcacgaggatttggggctgctcactccggcatctacttatcatcggtttctgaccgggttgactggggacaagatgagttcctccaagccatcgacagccatctatcttaatgacgacacaaaagaggccgtgaaaaaagtccggagcgccaaaacgggtgggcgagagagcctgaaggagcagcaggagctaggtggagaggttgacaagtgcgtaatctacgaaatgctgctgtaccactttatcgatgatgatggtgagcttgaaaagatccgccatgaatgcctgagcggaaccctcagatgcggggactgtaaagtgaggaccgccgaactagtggagaagttcatggatgagctgaaagagaaacaggtcgaggctcgagagatagctaaaaccttattatga

SEQ ID NO: 8795 - DNA, 1197 bp, synthetic construct
  source 1..1197: mol_type = other DNA
atgatccggtgcgttagctgtggagaagaatacggggatgacgaggtcatctacacatgtgaaaaatgcggatcagtcctcgagctcgtcaacgaaatagacgtgagcaaagacatttttgatgggaggaaggacaccctctggaaatttaaagaatgcattcctgtagatgaaaacaaaattgtttcccttgaagagggtgggactccattctgcaagtgcgataaactgggaaaagagcttggcgttaatctctacgtgaaggtcgagggtagcaatcctaccggcagttttaaggacaggggcatgaccgtgggcatgacgaaagcaatggagcttggggtggataccgtgggctgcgcgtcaactggcaacacttccgcctcgctgtctgcctatgccgcccgggccggattgagatgtatcgtgttcctgccttccggcaaggttgctctgggcaagttagcccaggcaatgttccacggagcggaggtcatgtccattgatggcaacttcgacgaggccctggaggcaatgacagccctggccttggaaaaacatctgtacctgctcaacagcatcaatccgtacagactggaaggccagaagaccatagggtatgagattgtgcgggacttaggctggcaagctcccgacaggatcattctgccagttggcaacgctggaaatatctctgcaatctggaagggggtgtcagagttctacaatgccggattcatcaaagatctgccaatgatgacaggtatccaggctgaaggtgcttgtcctgtcaccaacgcatttaagaagggagatcgcaaggtggtacccgtcgagaacccagagacgattgccacagctatacgtataggagcccccgtaagtgatattaaagccctaaatgccatctatgatagtaacggctattccgaaacggtcacggacgaggaaatcctcgacgcgcagaagctgctcgcccgaacagaggggatcggtgtggagccggcgagcgccgctagcatcgcagggcttaagaagctggtggacgagggggtggtggacaagggggagacaatcacttgcgtggtgactggccacctgttgaaggaccccaataccgctattgaggcatgtaccaaacccacccaggtggatgctgacatagacaccctacgcaagatcttgatgaacaagtga

SEQ ID NO: 8796 - DNA, 201 bp, synthetic construct
  source 1..201: mol_type = other DNA
atggctgaactgcccttcgctccagtaggtagaattttgaagaatgccggggcacagcgcgtgagcgatgacgcaaaggtggccctggccgaggccatcgaagactacggaaacgatatcgcggccaaggccataggctttgcccggcacgctggcaggaaaaccgtcaaagcggaggacgtgaaactcgcaatcaagtga

SEQ ID NO: 8797 - DNA, 369 bp, synthetic construct
  source 1..369: mol_type = other DNA
atggcaaacatatatgtcaagtttgacacaccagaggagctggccaagcaggctgaagaggcactcgaaacagccttcaccaccgggaaggtggccaagggcaccaatgaagtcactaaattcatcgaacggggagacgccgccctagtcgtgatcgcagaagacgtcgatcctgcggagattgtggctcacatcccggtacttgctgacgagaaagaaataccctacgtttacctgcccaccaaagagcaggtggggggcgcggccggactcacggtgggtactgccagcgcatgcattgtggacgcgggcgatgccgaggctgccgttgctgagatcgtagagaaagtggccgagctgaaggattga

SEQ ID NO: 8798 - DNA, 207 bp, synthetic construct
  source 1..207: mol_type = other DNA
atggaggaaggaacaccggccgaagtcatcaaggtactgaagaggactggcatgaccggcgaggtgatgcagatcaaatgcagaatcctcgatgggcgcgacaaaggacgcatactgacccgaaacattatggggccagtgagggagggcgacatactaatgctcctggacacaatccgggaggcaaaggaaattcggacgccctga

SEQ ID NO: 8799 - DNA, 162 bp, synthetic construct
  source 1..162: mol_type = other DNA
atgagaacctgctccttctgcggtaaggagattgaagaggggacaggcaaaatgtacgtcaaaagggacggcagcatctatttcttttgtagcagtaaatgcgaaaaaaacatgatcaagctgggacgggtgccccgcaaggtaaagtgggtgaaggagtga

SEQ ID NO: 8800 - DNA, 453 bp, synthetic construct
  source 1..453: mol_type = other DNA
atgattcagaagagttttgtgatgatgaaacccgacgccgttcaaagacggttaatggggaaggtcttgagccggtttgagcagaagggcctcaaaatcgtcgcgtgtaaactgattcagatcgacgaagaactcgccaagacgcactacggtgagcatgccgataagccgttcttccccgggctggtggaatacattacctctagcccatcactcgctatggtaatagaaggcgacgaggctatcaccactattaggaaactggtgggcgcaacaaacccactagaggccgatcttggaaccatcaggggcgattttgggatggacacaggacgaaacattatacacgcatccgatgcccctgaatccgcggagcgcgagatcgctctgttcttcaatgaggacgagatctgcgactaccagatcgtggataacgacctgatctatgagtga

SEQ ID NO: 8801 - DNA, 1791 bp, synthetic construct
  source 1..1791: mol_type = other DNA
atgaaaatccgctccccgattgtctcagtcctgggacatgtggaccacggcaagaccaccctgctggattacatccgcggatcgaccattgccgataaagaagccggcgggatcactcaacacatcggggcgacagagattccaaacgacacgatcgaggaaatctgcggcaatttcataagcagactgaccatcaaagacttaatccccggcttgttcttcatcgatacgcctggccacgctgcctttacgtccctaaggaagcgtggtggagccctggctgacctggccattttgattgtggacatcaacgatggatttaagccacagacctatgaggccctgaacattcttaagatgtacaagaccccctttatcgttgtggcgaataagatcgaccgaatttttggctgggagacccatgagggcgcgtcctttagcgagagcttcaaccagcaggcccaaagtgtgaagcaggagctggatctgaaactttacgaactggtggggaccctccataaggagggcttccaatctgagagattcgacagagtcagtaattttgcctcccagatcagcatcattcctattagtgctcggtcaggggaaggcattattgaggtactggccatgctgctcggactcgcccaggaatacctcaccgaacagttggagattaatgaagatgcccctgctaaaggcaccatcctagaaataaaggaggaggtaggactcgggcttactgtggactccattatctacgacggggttctacgaacgaatgatgaaatagccctcatcaacagctcaaacgaggtggtcacaaccaagatcaggtctatcttgcggccactcccccttgaagagatgagagatagcaaaaagaagttccgaaaactcgatgaggttgtggcagctgcaggtataaagattgctgcaccaaacctggacgacgtggtctcaggatcaccactgagggtactaagtgaggaggaggacgtggaggagcaactcctgaaggagatcgaagatattacaatcaacacagaagacgagggactgctcgttaaagcagatacactggggtctctggaggctgtcgttaagttgctcagagacttgaatatacccatccgggaggccgacatcggcgatgtaagtcggagggatattatcaacagcaaaatcgcattgaatgaaaatgaggcgcatggggccataattgcgttcaacgtggacgtgcaccctaactcgctggacgacttaagcaactccgatgtcaaactgttcaaaggcgacgtgatatatcagatcattgaggactatcaggaatggactgacgaaatcgagcgcgctaagaagaaggcattctacgacgccatagtgaaacccgcaaaatttgtcgcactgcccaagctggtgttccggcagagcaagccggccatcataggcatcgagagccttagcggcacagtgaaacagggccaggtgttaatcaacaagaatggagagtatgttggggtcatagcctccatggaggacaaaggtgaaacactgccttctattccccgcggtcagagggtggccatggctattaaggatgctattgtgggaaaacacttcgatgagggtgatgaactttacatcgacgtgtccgagaagcactataagttcatcgaacgcgaatttaaggacaagctgactgaggatgaatttgaaactctgtacgaactcgtcgagatcaagcggaaaaaagatccggactggggtaagttcgggctttttgaatga

SEQ ID NO: 8802 - DNA, 384 bp, synthetic construct
  source 1..384: mol_type = other DNA
atggcattcaaagtggttgtatcccagggggctgagacccaccaaattgaggtcgatgagacaaaggcattcaatgggctgacgatcggtgaagagtttgacggcggactagtcggcctcgacgggtataccctgaaggttaccggcggtagcgataaaaacggattcactatgaaaaaggacgtgactggcacacgaaggatcaagagtctcctgaccggcgggatcggctaccatcccaaggctgacggagtgaagcgcagaaaaacggtgcggggaaacaccattgccgaagatatagtgcagatcaacacagtcgtgactcaggcgggaaataagagcatagccgacattatcggcgccggggaagaggaggaggaatga

SEQ ID NO: 8803 - DNA, 1215 bp, synthetic construct
  source 1..1215: mol_type = other DNA
gtgaacgtccagtccgacgttaacataggcctggtgggacacgtcgaccatgggaaaaccaccctgacaaaagccttgtcaggaatctggaccgacacccacagtgaggagacaaagagagggatttctatccggctgggatacgcagacatcgaatttaggaaatgtcccgagtgcggcgaacctgagtgctacaccactgatgacaagtgtccgatctgtgggagtgagacagagctcatcagaaaagtgagcttcgtagacgctccagggcacgaaacccttatggccactatgttgagcggtgcagcaattatggacggagccgtactggtgatagccgccaacgagacgtgcccacaaccacagacgaaggaacatctcatggcgctggacgtcatcggtgtgaaggatgttatcgtggtgcagaacaagattgatattgtgagcaaggagagggctattgaatcctataacgaaattaaggagtttgtgaaggggacttgcgcggaggatgctctgatcatccctgtgagcgcccagcagggagctaatgtagatattctgatagaagccatgctgaagcagattcaaccccccgaaaggaatgtggatgacaccgccctgatgcacgtcgcacgaagcttcgatattaataagcccgggtcaggcgcggacaagatcaaaggcggggttatcggaggcaccttgatccagggcaaattcaaactgggcgacacgatcgagatccggcctggcccaactaatgatggtaagcgcatgacgctgaccagcgagattatcgggctggaggccaacggggaacaggtggaggagataggacccggagggctcgtgggcatagcaactaagcttgatccatccctgaccaagtcagacagcctctccggcacagtggctggcgaagagggaacgcttcccgatgtcctagattcgttcaaaatggacgccaatttacttgaccgggtggtcggcactaaagaggagcgtgacgtggcccctatcaagctcaaagaacccctcatgataaactgcggtactacaaccacaatcggtgttgtcacaagcaccaagaaaaacgacgtcgaagtaacactaaagctccctgtgtgtgcatccccgggcgatcgcgtcgctttaagtcggcgcgttggagcccgatggagactgattggctacggtatcatcaagtga

SEQ ID NO: 8804 - DNA, 393 bp, synthetic construct
  source 1..393: mol_type = other DNA
atgaactccaaagaagtcgtaattgacaccaactttttcatggtgccgtttcagttcaatgtcgacatcatcactgagctggagaagctactcccatcctataatctgaccacacccagcttcgttatcaacgaactgaagggactcaagcgcaacaagaatgccaaaacaaggctcaatgccaacctggctttgaagcttgccaattcttcaaaagtggaaataaaggacatcagtctgctcgagaacgaaactgtggatgacgcgctgcttagagtgagcgaggtgttagctacgaacgatattgagctgaagaaccgagcaaaggacaaagggatcaccgtcgcctacttgcggcagaaaaaatacattgcagtggatggcaagatatga

SEQ ID NO: 8805 - DNA, 585 bp, synthetic construct
  source 1..585: mol_type = other DNA
ttgtattacagaacaaagattaaggacactgtccgaatcccaccttacaagtttgagagtcccataaatgaagtcgccatagaaactttaaacgagcagtatgctgggagactggataaaaaactgggcctgctcatctgcgtcaacgatatccttgagatcggtgaggggaagctcattataggcgacggagcgacataccacaatgttgttttcgaggcaatcttctttaagcccgagcagcacgaaatcttcgatggcgaagtaatcgatattgtggactacggagcctttgtgcgaatcggaagcatggacggccttatccatgtgtcccaggtaacggacgattatattacctacgacgccaaacgcggtgctctgctggcaaaagagtccaacaaagtgctagaagagggggacctggtgagggcgcgggccgtgtcggtgagcatcaaggacgagtcaaataacaacattgagaacagcaggaatagcaagattccgctcaccatgcggcaaaccaacctgggccgcttcgaatggatcgaggaagccaagcagaaaagtaagaaggtcaaagagtga

SEQ ID NO: 8806 - DNA, 177 bp, synthetic construct
  source 1..177: mol_type = other DNA
atgaaggcatgcaccgtgtgcaagatgatcagtaataaagatcactgccccaactgtgggaacccaaccagcgacaactggagcggactactcatcataacggacccggaagagtccaatgtggcccgggaactgaacattacagtagcgggcgagtactgtctgagggtccgctga

SEQ ID NO: 8807 - DNA, 507 bp, synthetic construct
  source 1..507: mol_type = other DNA
gtgctccgcttggatacagagaacaaagacataatgtccgagctcaagcggcctctcggcaagctctatccaaacttcgaggacgccatcgatgaaattaagtcttccgagttcctgattagcgtgggtgacgcaacattcggaaatctgacgaagtacgaactgtacccgaacattgggataatcgataatgtcattcagaggaaaaaccacactcatgagatcatcagagcagagcacatcttgaaagctgaaaatcccgcgggaaccatcaccgatgacctatgggaaaccataggacacgctctggagttaagcaactcaggcgaatgttacgtcattgaggtagccggggaagaggacctggccgtgctgccctgcatcatcatggccaaccccgagactaccatcctgtatggccagccaaatgagggccttgtgctgctcaaagttagtgacctgaagaacaaagccaagaagcttattgacgggtttatcaaggaatga

SEQ ID NO: 8808 - DNA, 315 bp, synthetic construct
  source 1..315: mol_type = other DNA
atggagatcgagtttatcgaagaaaaggagaataagctattcaaccggaaagagataaagttctacgtggactatgacggagaagcaacacccaagatcctggatatcaaaagcaagctcgtggccttgctcaacacgaagaaagatctgattgtagtggacaatgtccagcctcactacggggagccaaaggcacttggctatgccaaagtttacgccaccgtcgacgacctgaagtacattgagaccaaccatgtgctggcgaaaaacgaagagccggaagaagctgccgaagaggctgaggatgaggagtga

SEQ ID NO: 8809 - DNA, 153 bp, synthetic construct
  source 1..153: mol_type = other DNA
atggtgaagaaaagcgacctgtataaggtcgatggcgacaagatagagcgcaaaaaccccatctgcccacggtgtggggagggggtgttcatggccgatcacggtgacaggtttgcatgcggcaaatgcggatacaccgaaatgaagaagtga

SEQ ID NO: 8810 - DNA, 1422 bp, synthetic construct
  source 1..1422: mol_type = other DNA
ctcgataacatcagaaacggtcggttcaaaacgggaatgactgatgaggctgcaatctacaccagctcccttgaggcggataagcttcttttcgaggctgatataaaaactaatttcgcccacacatcaatgctcaaacacgaggggattgttgacgaggagattgcggacaagatcctgtgtgccctggactctcttaaggaggagggctatgatgccctggtattcgaccccagtgtcgaggacgtgcacatggctattgagaactacgtgaccagcaagatcggcccggatgcggggtttatgcacaccgccaaatcccggaacgatcaggtggcctgtgatgtgcgcttagtgttgcgcgaggagatcatcaacatacaggtggggatcttggaatttatggaaggcctcgtggagatggccggtgaacacctggaggatgtcttcatcggcttcacccacctgcagcacgcccagccaatcaccattgcccatcatctgatggcccatgtacaggccctgaagcgggactatgagcggttaaatgacacctataagagagtgaatctaaacccactggggtccgctgccatggcaaccacgagtttccccattaataggcagctaacaacagacttgctgggcttcgatgcatacttggaaaactcaatggatggagtttccacacgcgacttcatcgctgagagtgttttcgacctggtaagcctctgcactacactgtcgaaaatctgcgaagagctcgttttgtggagcacctacgaatttggcgtcattgaaatggccgatgagtattccagcacgagctccataatgcctcaaaagaagaatcccgacgtggccgaacttgcccgaggtaagtgcgcaattgtcaacggcgagctggtgacgatcctcactatcctgaaggccatagcatacacttacaatcgcgacttacaggagattaccccgcacctatggaacagtctgaaggtcacaaaagacaccctgtctatcgtgactaaaatgctgctgtctgttgaatttaaaaccgaaagatgcgctgagctcgcaggcaagaatttcgccaccgcaacggatctcgctgacataatggtgcgtgaaaaacaaatcccatttaggactgcgcataagatcgtcggacgaatcgtgaatgaggctacaacaaaaaacatggtggaagaggacatcacctcgaagttcatcgacgacatttcagccgagctcgggtttgacaagctgaacctggctgatgacctgatacagagagcgctcaaccccgtggaaaatgtcaggattaggagcgtgcctgggggacccgcacctgagatggtcgaaattgctcgggaaaacatcaaggaatttctgaacgccgaatttgagaaacatggaatttga

SEQ ID NO: 8811 - DNA, 189 bp, synthetic construct
  source 1..189: mol_type = other DNA
atgatgcataagatttgtccaaggtgcgggtcccggaaagtgaagtggatcatcccgcagaattggagccagtgggtgtgctacgactgcgattacaccggacccgtcatcgagggcaacgatgacctcgccgaggaaatacacgaaaactatctgaaaagcaagaacaagaagaacaaaaatgactga

SEQ ID NO: 8812 - DNA, 1017 bp, synthetic construct
  source 1..1017: mol_type = other DNA
atgtataccgaagagttcattctgaatgaggttaactccatcagggaagacatcggccatgataaagtaaacatttatattgaggaaatttactttaatgagaacaccaacgagctatggattatcactgaggacaggccagataaaagcgccattatcggcaagggcgggtgggtggtcggcaaactccgcgagaagctggggctggagagcattcacgtcgaaagctacggtgacttcctcaacaaaaaatacaagcttgacctgagcaaaaagacgatcctaaaccttaatagcgacagcgtcggcttaaagaacctggaaaaggtgatcgacgacaagatatccagtatctactcctttaatttcgagaactatctttcggagaatgaatttaagaagagctacaagcacgaagccgtagtggcattgtccggaggtgtggacagtagtttcagcctgatcctggctaagaagctcggattcaaccccattgctgtgacagttgatcctggaaccatcatactccccaaacagttcaagcggaatatcaaaaaaatatgcgatgaactggacatctctcatgagtacctcaggactgattacagtgaggtgattaacgagtcgtttacagggaaggtgcacccgtgcggccgttgttccaagaatacggaggagctcgtccgggagtacgccaagagcaaagaaatccccataattatctttggggatatgctggcgactggttcccagtgtatcaactcacaatatgactcattataccgattgaatctgcccgcaagcctgtccaccagcaagcaggagatcaaaagcttgatcgaaaagtacaacctgagtaccttcaaaggcttcgggtgcccactgctctatgaagtgcaccgcaagtttccacacatgaagaaattctcaatacagagaatcttgagagagacacggtcaggagcccttgaacctggagaggccctggatctgatctggagcttctataagatttga

SEQ ID NO: 8813 - DNA, 2049 bp, synthetic construct
  source 1..2049: mol_type = other DNA
atggggagaggctttaagctcaagatcgacaaattcctcctactgatcttgatattttttatcttgctgagctgcgtaagtctggtgagcgcctccaatacggttgataccaacttaacccatgacgcaagtagcgacgcgaatatcggaatcaatgatatcgaatcttacagctcgggtgtcttctctgacgacgtgaagtcaacaggtaacgtgattgtgaaccagcgaaattataagatgtatttcgacgatagcaatgtgctaaaaaaggagtacggcggcaagatcatcgcgtttagtgggaagttcactgataaaggtgtcatcacgatcgactccgaaaatactaaaatcaccgggcgcaatacactgttcaacaacaccgtttttaacatcaagagcaatggcgtgatgctgaccaacctgaatttcgttctcaataaggagttctccgacaacgagggggcctgtgtcctgattaatggggacaacgtcactgtctacaatgtggacattgattataacgtgccaaagaacgtgaccggatttggaatctactccaatggtctggacgagagcctgagcgatgttaaactggtcaacaacacggtgcggcttcatggcaacgccctgaatgatgggtataactacggggtggtattgacaaatacccgggacgccattgtgtatggtaatatcatcgattgccagcttccattgagggctgtgaactggatggccgagatatatggaggcataagcatggatgccgtatccgggctggctgcgggctcatgcaatggcttaagactttccaacaactacatccggtgcgtggtcaatggtgtggctcagggcgaacctacactggacgccgtactgatctacgcatgtcacaattcgacaatagaaaacaacacaattattgaaaatgactacgttaccaagaagggggatgttaattatctctacgggctggatctctatctctctaacgacgttgtcatctacggcaacgacattcatattcgcaccagcggagggaaagaggcccacgggactgcttatccgattcaggtaaccggacaggcagagaatatcctgattgctttcaacaatttgagctcctacagtaacggccccaacatagggatttactcacagaactactacggcgtaactcacctggacattataagcaatttcatcaacgttacagggcatgccagcaaacacagttgggctctggtggctggaatcgaagtgcaggattccgatgacaggataatgaacaacaccattatcgtggacacggtgaacaaattcgagaaaggatacaacgtgtacggcataagctattcacaacgaaccgatggagatcacaactacaacatccagtataacaacgtctcaaccaatagtgaccacgcggtcgccctgaagggctcgggcagttccacggtcagtaactccattgtggccaataacatcttgaagggcaggaagtatggtggaaaccgggcagcatacatcactggaggcacaggcaatgtgattatcaacaataccgacgggtcccgtcccgtgcataaaatgactgatgatgagtactccgacaatctcaagttctacctttcatcgccctttaagggaaacgggctgggactggggtggcttgacggtgatggaaactccataatcggcaacggggacagaaatggcaacagcctcaataatggaaatagcggtctcgtcaacaataaggtgtacggtaataaccttaactacagtgagtcgcaagcacgcaacggagtgttaaactccacatattacacctatggctcttcaggcacagacattgccagtgcttcttcaagctctggctcaggcgccggaagcagcaactctgagagctctgatgtgaaatcctatgaggtcactaagaagattaacgacaacctcatccacattcctatcgtcatcatggccgtgattgcactcattctgctaatcatcggctacaaacgcaaggaacacaaagaatga

SEQ ID NO: 8814 - DNA, 3300 bp, synthetic construct
  source 1..3300: mol_type = other DNA
ctcaagctgaataaaatcatcgtgctttcattattcctcgtactgatctgctttattggcgccgcaagtgccaccgaggatgtcaacgacacagcaatcgctgattcagagattgatgaggtaagtgcggtcgacattgaacaatctgtggacgacaacgagataacagaaatccagagcagcgacgagtcaaacaaggtcctggcaaggggcacacctacgactgcgaaggattggaacaccctccgcaccaaatgcgaaaaaaccaccgatcagtatatcacactgacggggacttcctatcccatcggcacttatataacttttaaaaatagtgctacaatcgtgggtagtgatgtcagttacattactggcgggtcgacgtccaacactcctttcgtcaacaacaacagcgctttgacactacattttattaacgtgaagttccttaatgtgaacgcgaagaatctgttggagctcgacggtacggtgtatttggataactgcactttcgacaatgtgcaaaccgcaaccggacacaacagcgtaatctataacaccaacaacctcatgtacctgactggttgtaacattaccaactgtcatactgggtacggggctgttagcaattacaactcgggaagtacaacatcccccgtaatgtacgttgacgactgcaggttcatcaataatagcgccagcgttgagccgggggctattaataattgcggcatcctgtacgtcaacaactcggaatttgacggtaaccacgcaaactggtgggccggagccatccatactcacacaaatgcccagacagaaattgagaacactaacttccggagaaacacagctggatggaatggaggggccctgttcacctacagcaaactgaagataaaaaattgtactttcgaggacaacaactgtaccaccaacaatggcgggggagcaatcggagcctacaactatggaagcggatacaatataaccatcgactcctctcgatttaactacaacacaaacctgtgctatgcatacacaaatatcagcaccacctcagttggacggggaggagccatcagcgtacttaacggcggttatttgacggtgtacaactcaaatttcactggaaactatgccaaaatcggtcaggccatcgcagcggccacctataactacgagaatggcactgggggcaacccacacattaagatctgcaacaataagtttacagaccacaccgcaactggcattgacaccgtagtgatcacgggcaatgactacatattcaacaacaacgtgtttatcaatagctatcagaacaccatttatacaggcactggaaacacctacaattctgccgccttgcccgggaatctgaatagtaagctgaatcttaagacaaagctcagagccaccaatactgagatcctgtctgactaccaggatcacgacgtggtctacgtgaacgtgagctcagacaaggatgcagaggatgacaatgtgcatgggcagagctgggacgacgcgtacggggggctggagtgttttgtcatggcgataaactacctacacaataatgggatcatttacattgcagacgggcgttacaatgaggactacggctatgaatactcaatagcccatggcaacttcacgatgatcgggcagggcccaaagactaacatagagaagattataaccacggtatatggcgggtccgaccaaaactctactcacaactttatcaatttatccttcaccggcaaagattttggcatcaatgctaatttcatcaactgcacatttctgggttccatcagcatctccaagggcctcacctaccacgaccctaatcatgttgtggagtacgggtatgctcagacctacttcatgaacttcaacaactgcgtgttcaaggatgtcaatacgaccaatgccctcgtgaccctctataagtacggggccgtgaacttcaccaactgtattttcgaaaatattaccgctgactccatcgtgtatcggaacgatatcaattattttgaagaggatggaatttcctttaaaaactgcactttcaccaactgtaagtacaacggtattgctgactccctggctaattttgatgatgctgtggttattgaggattgcacgtatgacagtgaagtggccctcggaacaactgaagtgaacggccattactatataaatgctacgaagcttaaggttaccgcggtgggcacaagtatttcaatcaaatcgaacgaaaacaatgtaattgtgaatttaactgatgttaacggcaatccggtggccaatgcagggataatttactccatcgccggcaccaatgccagtgcaaccacgggcgctgacggtactttcacgctgtctaacctgaaggggatcgtcaacatcaccgtgtactattcaggcaatgagagctatcttgcttcgaacaaaagcgacaatttcatatttaaatacaatacggccgtgtccagtgcggtgaatggtgatgacatcctaatcattctcaaggatgacgagaacaatccaattgcaaacgccaatgtcatctatacagtcaacggcattgactacaatgcaaccacagatgaaaacggaacagtcactgtgtccaacctgaaaggtaagtttgcattcaacgtcctgtataagggagacacactacacacagcctccaatgcgtcaaacaccttcatcttcaaatatggtacaaaaatcacagccaaaaaagtcacagccacttacaatgttgcgaaaaacctggttatcacactgaaggatgaaaacggaattgccattgccggcaagaaggtgaccgtgaaggtcggatctatccgcaagaccttgactacgaacgctaaggggcaggctaccttaaaagtcagcaaccttttgcccaagacatactctgccaccgttacgtatgctggcgatgatacccacatcaagtccagcgtgaaggtgaaggtggtggtgaaaaaagccaccctgaaggtctctgccaaggctaagaagttcaaaaagtccctgaaaaccaagaaatatagcatcgttctgaaaaacaatgtgggcaaagtcctgaagaagacgaaagtgacactgaagatcaagggaaagaccttcaaggcctacaccaacagcaagggcattgccacatttaaaatcaccaagctcaccaaaaaaggtaagtacaatgcctacattaagtttgctggcagcaaatactacaacagcctcaacaagaaagtcaaaataaccctcaagtga

SEQ ID NO: 8815 - DNA, 360 bp, synthetic construct
  source 1..360: mol_type = other DNA
ctgcggaaaataaagtccttaatcaatctgaggatcgtcaattgcacaaacaacgagcttaagtcagaacttaagaatattttgaccgacgacaagctagatgagaataagatctacaacaagctgaaagaggagaatacactggaaacgctcaagaacgagttcaatgaatttataagcaacagcaacagttctgaaaagcagttcctggtgaaaatcaagaacaaggccaacaaactcaaccccgagaaacacaccaacattgagaatatccagaaagaaatcatcattaaactgctcaacaaagacaatataatcaacaatctgcaaaagaagaagatttgtactaacattggctga

SEQ ID NO: 8816 - DNA, 5595 bp, synthetic construct
  source 1..5595: mol_type = other DNA
ctgaagaactccgacgacgttctcaacatcgacgtgttgaaccaaaactccactgtcaattacccaaggagccataaaacaatcgagatcacccaggacaattacgagaattactttaatattagaacaggaaagatcattgatgccagctgcatctctaagggcgacactttaaaaatcggcaacattagcaacagggcttttgttatagaccggcaacttatcctcatgcccatctcttctaatgacaagattagtaacggtttcatccatcttatcaagggctccgacggctccactgtaacaaatcttaccatcaataatacaaaagatagactcaacattctcgggggaaacgtagggcagctccacgggatctggctgtccaacagcaataataatcttatttcatataatacaatccgaatcgcaaatgccgcaggcgtctacgccatgcccatggggtggtcaagcaataacagaatcatttacaataatatgaaaacctatatcacatgcaatatggtgatgggacagtgccattacaatctgatctcacataatagtctggagttgctgagttactccgataccagcgttacaaacctgatttacttcaaccctttcgggcatgccgattatagcggtagcggcctgtgcaaatataacatgatctcattcaatgactttaagggcttttcgaacgggccgatgtccatccttctccagagtgtttacgaaaaccacgatggcactgtgatcgcaaacaacacttttagcaagggctcctacgccattcacctgtttgggaacaatatttcggtttacggcaatgtcgtgctcaatagtgggatcgggatcagcgtttttggacggaacttctctgtgcataataacgccgtgatcggcgactcccaggggtacgggatcatggcagaagcgaacggcggctcgctgtgtaatgtttataataataacatcacctttatagacgtttataacgccatatttattgggaaccatgtcaaggcctataacaactatatcaacatcaaagaatatggggtgtccatatttatcaagggcaactgctccaatattcacgataataggatcaataacaagcacgatgcggggatcagcgtcttaggcaacaacaacacgataaacaacaacatcatcaacaccaagaatatcggcatcacactacctgcgcgctccacgaactgccgctactacaacaacacattcaccaataacaagattaatagtgagagttacgggatttacattgacggcctggtgtataactgcataatactggataacatcattgagactaacagtaccatgggcattttcaaggacataaccgatgaactgtccaacattgaagaaaacaacatggtcaatggggtgatcctggatagcacatatatcattgtcaataataccaactaccataaatacttcgataaatacgggcatctgacattcaaattcgagaagaacaagactaaaataatatttctgacatttttgacaaacaaaaacctgatctttcaggaaaagataaacgtaattagtaacaaaatgaacaacttgctcatcaacgtgaccattacgtttgagaccaatgccagtggctccctgatccgtgactttaattttatcaatcacgacaaagaggctattattctaaatggtgtgaatgacgtgaccgtcaccaggaacaacatcacaaacttatttagaaatggcagcctgagcaattcagccgtattgattcaggacgtgtgtgagaaccttataatatcctataacaacatatatgtcaactcacgcacccactgctatacgtatgcaatcaacgcgccttccattaacccagctactcataaaatgaacaacaagctgtctaaacgcgtgaacattctggataatacaataatcatgatttctagcggtatcacagaggccatctacacggatactctcagcgaaagtaacttcatcagcaacaagattaacatcatttccaaaaactacggatacggtatcgccgtgtcgaacatgattggaaggttgtctgacattaacgtctccaataatgagattgttatccacagcgagcagatggcatatctgatcgaacttctccaagtggataattccaccatcgaaaataacaagctgtacggtaaaagtaatggagtctatgctattggtatctactggtctgataatatttccgtgaacaacaacgccattagcgtgtttggcggcaatttatctaaaattctcgagatatctgacgtcctgggtatcggcaacagcgcgatagccatccttaggaacagtagcaaaattatcatttccgagaacatcatttacgctaacctttcaaagacaatcttcgacaatacgacggacgggattatcaatgcatccttcaattcatttatcattgacaacgagaactataactgctattttaatgaggtgggagagctgtattccaatgtggtgataaagaacagtactttgctaatccacaatctgacaaaaaatcagttgctcatcataaatgacctagtgaaaatcagcagctacgatctcaacagcccctctagcatctccatcatcttcaagaacaatgccagcaacagcattatttccaacgcatctttcatcaactcgtcaatcgacctcatcaacgtgtcaaacattaacatcataaacaacactttcaactcgtccaacagttgcatactgaatattaatggtggagagaaaaatctgttcgtgaataatgagctcttcatcaacagcaccgacatctccgtgattaacctcaacaagactctgctcaacatcataaaaaataacaacatcaagttcaacaccagcaactctaagatcataaccatcaataactctaacttcaccctgattagtaataatgtaataataggcatctccgatagcctgatcttcatctgttctaaggggagcagttatgataatatctacaaaaatatcttgaacgctaatgcctcgagcatatgcggctacctggccagcaacgcaaaatggagcagtattagttataataacattctgatcaataaatccaccaaccagtcagcgatctattactgtaataactcatcgaacaatacaattaacgaaaactatatcattagctattcactcaacgctaatgactatgccgtcagcgtcatttcaaatgagagtttgagcaacctaataatcaagaactacctgataagttctaatggatttaagcgagctaattttgcagtgtacgctcccttcgatttggttaaggacaatagcccatttgacatttacgtttcatgtaatggaagtgacgttgtaggagacggtagtattgataacccttacgcgaccatcaagaaagcgattgagaacagcctcaacctgtatgtcatacacgtatttgacggaaactatactgagtctaacatcattatcgataagaatctgacccttgtggctgtcaacctgggtaaagttttcatcgacgtgcagattaatcagctctttgacatacttgaggataacactctgagcatttctggcttccttattggcaacgcacacaacgtggatggaggcagcgtgttcatcaacaacggcaagttgttcatcaacaatgtagtgatctttaattcctcatcctactttgataattcccaccccatattcgaccagaacataacctaccacgaggataacctgatcgataaggcacacaccgtggactgctccaatacagggaagggcggagcaatcctcaacaacggggaactgatcattaactcatctatcttcttcaataatttcgggcatcggggcggcgtaatcgctgactacggcaaaacgattatcaatagctccatcttttacaataatcggggaatccatggaggatgcatttactcagatagcaagaataatttgttcgtgatcaactctattttcaacaataacacagcagtgacttcaatagacttctgtaagatcatgttgcactccattggttggtcaattggagagaactatatctacaattataagagcgaatgtgacagccccattggtgctggtggcgtcatttatacgaaaaatacgtcagtgctcattaaaaacagcagcttcatctacaactctgcccggatcggtggtgtcatagccacccaatgtgacatcttcacccaactatccaatttcatttcggatgtgaacctgtatattgacaactgttacttcaacagtaataaggccaacgatactagatttaaggatgatccactttacctgaagaactacgactacttcaacgactacaatggaggcgtggtctatggaacctacaacaagctatacataaatgccagcaatttttattacaaccaggtgatcaacaacggaggagtgttatacgctaaagccaacgatggcaagatcatcgactctatcttcaacaataaccgggccggcagtaatggcggggccctggacatttcaaagaacttccttatcatgagaagtattatctccaacaatagcgcgcgctatgggggagccatcgaatacgactcctacacctactacgggcacattcaggacaactttaacatttataactccaccatctcgaataataaggctctgaatgccggcggggccttcaacatcggctctggaaacgtgtctgtccacgattccaacatcgtgaataattttgcccctagcgggaccaccataaactcccatggaatcaagtacgctatcgacatgcgatacaactattggggcgtgctgccaaatggtcacattggacctgacgactcagtttggaatgtgaatcacaatctgtttaaaccctggtacaagcagtgggtcgagtggaagcccaaggtcatcgaaagcaacaactcggggttcaacagcaactccagcaaccacaacccctatatcaatcctaattccaactctggcggaaacaaccataataatccaatctccaccggatctagttcgtccactacaacgtccattgggggcgctaatgggaataaccacggctacggcaacgggaaatactttggttcaggcgatggaaacaacctggggccgagtagtggcaatggaggcttctacttagccattccaggttacaataagtataacgggcagaatgtgaatagcaacacctcaagcaacagccacaagtcgcaaaaccgtggcaacgttgactccgatagcctcagtaagtccaatagctcaaaatacaatccggacttagtgtctgctgggttcacggtgaatgccgccagctcgccgtcaagctcccagcgcggcatagaacgggctagtaaggagagcggttcgctcagtgactcagcaagctacgagattactaagaaaattaaggaagtcttctatgatgagaaccacatcactacgttcatcctgttcatcatcattatcctgtttctgatcatcctgggatacaagtatggagtcggtaagttcgatgaatga

SEQ ID NO: 8817 - DNA, 6582 bp, synthetic construct
  source 1..6582: mol_type = other DNA
atgtcatatactaaatttattctgatattatcaatcatattcctactgtttgcttccatagccttcgttagtgctgctgacacgaacacgagcattgtagaggaaccaatggatgtgaaacataacctgtgcgacattaacaattccttggaaaaccaggagatctatgtcagtccactgggggacgatgatgccaacggaagttttcagaatcccgtctcctccattcaccacgcggtggccatggccaaaaacaattctaaggttattctgatggagggggaatacaagggtgcaaacaatacctttattttgattaataagaatctgaccattgaatctttctccaataatgtggtgatcaacggagagaacaagcatgcattcttcaaaataaccccctctagcagcctcatcctcaacaatatcaagttcattaatggctacacagatagctactctcagttggggatcattaacaacctcggaacactcgtgatcaacaattcgtcattcaataacatgaacagcatcatgggcacctttttcaatgaaggaacgttaaagatcgagaacaccaaggtgaccaatgccgtgagcctgaccatggcccaaatcctgactaatattgggaatactactatcctcaattcccagctcatcgagaacaacgagtattcttccattgacgttgtggtgtataactacaacaggatcagtatcgtcaatagccaagtgaataaccttttctccaataagaagtattccgaagactcctataatttagcctccattctgattaataactctaagttggacaacattgacctggaggacgcatttgtgtgcatccacaactctcagatcacatttaaatctatttttaacggttgcaatgtgagcgtcgatgagagtacatttctgtacaacaagagcctcttttcaataattaacgtcatgaacagtaactttacagcgattcacagcgtctttaattctccgatcagcaccaaacgttcgcatgtgaatataacatactcggcaattttacgctcaatctcgggcaacgcctacaagtgttacctctatgctccctataactggtggggtattaacagcggtccatcgtatcagtacttcacagacgtgaacgttagctactgggcaataagcaccttcgagtatgagagcgactacatccccatcaatcccaattccacgtttaccacaacactgaataagtggagtgatgggaatagtaccttcgagtttaagacagaggagtacctcccgttcagacacttgaaattcgaatctcaaaacggtaagttcctctattcctctgcaaatatcgagaaggtcttctccaattatttaattggcaacaacctggactgtcaggtgcatgtgatcatcgacttccagaggttgacccttagaattggagaaggtctgacgaactataactactttgtcagcaccgaggggcacgacggactgggcaatgggactttcgaacatccatttaagacaataaactatgctgtgtccaaagtaggaaacggaaacactatctgtctgctggaggggatttacaaaggcaattggaatagcaacgtgacaatcacgaagaatataacgattgtcggcctcggaaatgtaaacctgctaagatctaacgattacagtatcttcaacatcaaagaatggggcagtctgtctctcaagaacatcaacttctccgtcgatataatcgactacgcacatccactgattattctgaacggggggaacctgtctattatcaattgctccttctccaacatcacttctaccaacgttatccacacaagcaatgggatcgaacacaatggaattgtgaacatatctgactcgtactttgcagatatctcaggctccatacttatcgggtcggccaaagtaagtgtgtcaaatagcctctttgagaagatcaaatgctacaggataattcagggctacgagtattataatgtcctattcgcaatctcatcgtccatagaaatctacagttcctgtttccagaataacctcatgggcatcgtaaacctccatccctttttctattcatcctcaaagctgagatactctcaatatagtaatgcctattcaagatatgcttatatcaagaacaccaagtttgagaacaatgtattcttcgataagaacagttactacagcagcaacggaattggactcgatatctacaacgagaatgagcacttctatggaattatcgataactgcagcttcatcaataataaggggcaactggccatcgccaccagcgttaattcatccattttcatgaataattttgagtcccggtacggttatagtatggtgtacgcggatctgatcaacaactcagttttcattaataataaaaacctgtatgaggactacaacaatgtatttatcggtaatggcatcgctagtgccggatgcatattggagtctatcttcatgtacaatgaggctgcttttggtggagctattgcagataccaaagaagcccactattgcgtgtttgtcaacaacacttctaagtatgggggtaacgacatctactcgtactccggagacgtcgactactcttccaattggtggggtgacaatcagaaacctaacagcgacaaagtgttcattttcctgggcactcttactctgaataactgggtcatcatgacctttgagtctgtttcaaattcgatcattaaagcttcccttaacgcgcttaacaatggggaggggaacatctgtaaaatcaaccacaacatgcctagccgcatggtctatttcaagatcaaccacggcagcctcagccctgagaacactcttctgatcaacaactctgcctacaccaacatgacctacaatctgaatcttgacttcaaggtctacgcacgcattgacaatcagctattagagcttgacatccgcaacacaaagactctcttgataatggaagatgtgatttttaaagggaaaagcaacaacttcgccgtcgatcttatcaacatcaacgggtacaagatctttaaccagaccttggtggtggagattatcgacgagaacaacacacagaatatcttcacaattcagacggatgataatggtcacgccgaatttaatgtcgactatccagttggaatctaccaggtcaatattaattaccttggcaatggctacttcgataaatgcaattctacttctataatgaaaatcataaagagcaacacctacctcattagttacaaccaaacctactacggcaaaaataacctgtttaaatccgtcttgttcggcgagggaaacaagaagctgagcaacatgaccataaagttcacgatcatcgactctaagggtaacttgcgggagatctatagcctgaccaaccaagacgccactagtgaaattatcatcaatttggacgtcggggagtacacaatcaggtcggaatttcttggggatctgtggtactcttactcaagcagtatctcccacatactggtcaatccggttagttccacactaatcgttagcaacgtgacattatacggggtgggtgacgtgtataatatcactcttaaagatatccacggctcattgataaggggggaaaatattattgtcaccatcactcagggagcctcatgtgataagttcaccctgaagacagacaataatggtgttgccaagttaactatcaactatctgcctggagtgtacaacgttaaagcccagttcctgggcgacagtatatatgccccgacgagcggtgagggcgtgattaaggttgaaaaaattttcaccatcatttcagggttccaccattgcattctgccacttaacgggatctacacagtggttcttagtgatatgtatgggcgacgggtcaataacgagtcggtaacactgtccctgtataaaggcaatctcatcaagaaatacacaattaacaccgacgccaatggcgaggctgacttcgtgataaacctggaagagggaacgtacctaacaaccttcgagtacggcggaaataagtggtattgtgatgcaaccaacgccgcaacgattgtgatcagtaaaaaggtgaacctgtccaacattaacatcaactccacagacctggtgcagtactacggggaaaacaagtacttcataataaagttcaatgaccctaacgcatacagccagtacggcaaaaaaatcggcgtcaccatatctagcggctcctggtcccaaagctacgaagtgttcaccgatattttcgggcttgcccggttgaaaatcaacttgaaccctggcgaatacaacattacttacaagtattcaaacagccactataatatctttggcacatcgtcaaatactatccatgtttataagatgcccgctgtgcttatagcgaacaatattgtgatgaaaagtaatgagcagcagctatacgagatcaatctccgtgacatcaacaataatcctatcaaaaacatgctggtaaacattgacattgacggggtgaagtataactccactacaaacgacgagggcatagccaagatcttgcttagtctgggcgttggaaagcacattattagttacaacttcatcaatccaaactacttgtcctccaactccagctctgtgatcctagttgtggacagtgacaagataccgagcaatctgtactcacaggatattaacgcttttgacaatcagatcctgaatttcactatccgactgtccgacatgctgaacaatagcataagcagcagcgaagtaatactggagctgtttaccttctatggcgagagcattattaatattaccgggatcaccgattccaacggacgaattagctttgatttgaatctcgattacggaaagtatatagctaatctgcactacaacggaaacgccttgtatcttgctagctactcaacgaatacgattaacattgaaagcgccgacaatcgcacaaaaaccattctgttcaacgtcgagaccaagcttaccaatagcaagtactacgtgatcctctccgatatcaatggcactctccttgtcaacaaggaaatcaagttcatcattggcaacaagaccattacttccatcacggatgagaagggcagagcttacctggagttaaacctaaaccctaactactatatcatcaaggctatctttaacggggacaaggactacaaatcagtgtccagtctcaaaaagatcttcatctccggtgaactcacgcatctgtatgcgatcccattagtgaaatactataggaacggaactcagttccatgcccggctggtgaacagcaagggagtccccctcattaataaaatcctgtctatcctcttggaggggaactattataactgtacaaccgatgaaaacggctggatcaccctgaatatcgacctgaaacccggcttttacgacgtggaatgctactactattcaaataataccgacgaaaactcttttgacaagaccaacatcaccgtactgagcaccgtgctgggtcagagtgaagtgaagtattatggcgattacccctatctgacaatcaagttcctggacggcgcgggaaatctaatcaaaaacaccagttttgtgattgatattgatggcaagaaatactctgcacagaccaacgacgagggcatctttaactttaacctcaatctcaactcaggcagtcatctcatctcagtgaacaatccttacgatgggctgtttgtgacgtacaaactcgatattctgaccactatctgctccaacaatctcgtgaaagtctttaacaacggagtgtcatacaccgcgcagctgctggatagctttggcaacccactgaagaataaaaacgtaaaaataatcattaacggtgttctgtactataagaagacagatgtgaagggcatcctggaactgaacatggactttaatcccaaaatctacctggtgacagtgttcaatcccgtgactaaagagtatatcgaaaataccgtgaaaatcttgcccacactcatcaacaacaagaacataaatatgtatttctcgaactgtgctttttataaggttcgggccattggctccgacggcaaaattgtggagtcgggggtaattgtgaaaattaaagtgaacggaaaaagctacaagatcaagacaaacaaggacgggtacgccctgttcaagataaacctcaagcctggcaagtatatcatcactgcagaatacaactcctacatcgtcagcaacaagattaacgtcaagagcctcctaaccgcgaagaacatttttcacaagaaggccaagaagatcaagttcagctctaagctcgtcgatattaagggaaaagccctgaagggtaagaagatcactttcaagttcaagggaaaggtctacaaagtgaagacgaacaaaaatggcatcgccaccctcacgattaagaatctgaaagtgggcaagtatactatcatgagcatatggaacaaattccgcataaaaaacactatcaaaatcaaaaagtga

SEQ ID NO: 8818 - DNA, 5736 bp, synthetic construct
  source 1..5736: mol_type = other DNA
gtgagtaagatcctgaagatcaacaaaatcatcctagtggggattgtgctcttgactatcctgtcacttaatgccgtttccgcctatgataattcaaataacactgaggagtacctgagctcggaaaattacgaggaaatcctcagtgccgactccttcaatgataacaatattcttgcttcagcctcctataacaaaaccatctatgtgaattacactggcgatgactccggatcaggcagccaaaacagcccatacgctacacttaataaggccatatcaaacgtcaatgacagcgataacgcagttgtctacctgtccgccggacgctttagtggtgagaataatacggaccttagcatcaacctggcccacaggaattataacagtagtctgactattatcggcgccggtaatgggcagactatactcgatggcaacgatgaatcagccatcttcacaagcattagcgccgattctattgtcacgttgatcaatattacctttacccacggcaagagcgagatcgggtcagttatgacgacttccggaaacctgaccatcgacaactgcattttcgataacaactatgccacgtccagcgccgccatctacgccgagaacacagaggatataaagattaccaactcagtgttcaagaataactacggccatgagggatgtgcagatttttactgtgagggcagtgagtcaacaatcattgatattatcaattcgacatttataaattcaacaaccccctacctgtatagccttccctcttttctgatccagtattccaacgccaacatcattggcaacaagtttgaaaacatcacgggagtctatcactctggcacgttcgaactgaaatatggatacgggaagcggaaagtcattaacaacacctttattaattgcaattacactggcaacaacgacggaggcatcatctacatctcaaacacctacctcaagaataaccagttcataaactgtacttccaaaaaagcgttgatctactctctgacggaatttaatgcctacctcaagttcaaaaacgcgacaatcaatggaactgagtttaaattgtattgcgaggtcacagatgatctgaacaatagtgtgtccacgtatggcgaagtgcatttcttcatcaatgatgaaaaaatcaagtccagccgctccaacaacggtactgcttcaataagcgtgatcaagctcctggataatggtgattacaccttgagtggcacgtactactattatgaaaaccccttcgaagttaatgtgaaaaatgcaacactccacgttgattttaatcatgaccccctagagctgtgggtcagcaacgacgggaatgataccactgggaacggctcggaaaataatccatttaagacactgaagcatgccctcaattacggattcgaaaacacaatagacctgactattcacatgaaagacggagtttacacgggcagtgacaataaggaccttagctactctaacgtggggaagctgactattttcggtgaatcttacaggaacaccatcatcgacgcagaaaacaccaagaagatcttcaacttcggtgagtatctaaacgtgaccctggcaaacctgaccctcaggaacacaagcggaaatgtcatctcggcgtacatcctaaaaatctatgattctgtgatcgaacacgctgactctttgaacggagaatacagtgatacatcgaaaataatttttaataacctcacttacactaactccgggggcatctacatctacaatgcagagatttacaactccaagtttaagaactgtaacaatacgaagaataactgcctgctgcggatcgggagccttggaaacaacataatacacattgagaacactactatcatcaacaacaccgttaacgggcgacacgggtcttcgatcgtgtccatctcgggcaattccgtcctgataaataacgactacattaataatactgttattagcgaaaactcgaagtatatttttcaaagttatagcaacaagctgatatctgtcaacgagactttcataggcaacaacgtgtccagttatatcgcctattatgatatcaatggcaacaacgtagaaataataatcgagaatattactttcaaaaacaattatgtaaaaaccgatggcagcgggctcgctatcaagaccggacgcattaaaggggcaaagttcatcaacaatactgctttaaataacggcggagcgattattatcctgcctcattataccggcagtcaggtgccgaaatgcattcttgagaacgtatttttcgagaacaatagtgcaaataacgggaaggacatatttattgagaaggccaacatcgggtacgaaaacgggcaacttgacaacattaccgtaactttcaatagcttgattacacacaacctccaggacatcgtgatcgccaatatctcccatgtgtcgggagctgttatcgggggtggcatgattgaatttgacctgaacggcagctacatgggcgtggctgaggtgattaacggtgtcgcgaaactgaattacctgggcttcaccaagaacggcaattacactctgagcggtagctacaactatgagtcaaacaccaccatttacaatagcgccgtggtgaatgtgattctcaatcccctgaaagagaatatcacgagctatgtgtctgactccagaggagatgacgagaatggcaatgggtcatacgagaatccgtacaaaaccattgaaaatgccctcaacgagggttataaacagagcaaggtcattttcatcaaggtattggaggggaactataccgggaaattcaataataacatcaccatttacgactctctgaacatcacaatcattggtgagggcattgataagacaatcatcacaggaaataacactaaaaacaactggtttataaccgtcctgcacgcagggaacggctttctgaagttgatcaatatgaccattagtgagatcaactataactataaaaacatgaacagtcagaagtctgcggtggttatcgagaaaggggctaacgtatttatcgatagcgttaagttcactaaaaatcgcggctacaacggcggggccatcaataatcaggggacactgaacattatcaactctattttctacaacaatggggactcaagttatggtggctctatctacaacaaggggataacaatcattgacaacagcagcttcattgccaaccatgctaagtattgctcggacatgtttaatgagggtatcctgaatatttacaattcaaacatccaagattcgatgcgtaccaatggttggacaggcaacaccctggtcattggcggccttggcaatatcagcattattaattccaagatatttaggacaggtaaaatgcctttggagctcattgatcccgacgatacatatgccgacaatccagccttcacgataagcattggaaccatcggatcaataacactcatcaacaccaccatcgacgggcacgatgccaagtacactggacctaacttttacattacaaacaacgctgcgatctcctggagcgtctctacaaatatcaagattcacaactcctccttcctgaatctgaataacattctaaataatcagatgggaaatctgataataaagtccagcttcatcaagaacgtctccaacctgatcatgagcacaagcaactataatctcacggtaatcaactcttacttcgcagacggcaccatctccactgaaaagtacgatatatccaacatttacttaaacaacaactggtggggaagcaacagcaagcctacgtataaagtcgataacgttgacaccactcctgagacctggctcatactcaccctgaaccagagtaataaagagagtttactgaaagacatcatcttgtccttcaaagtgacggatggtgagaacatcaccgactataccggctacttatatccccggcccttcaccatgagcgctataaacgccacactggaatatgccaatggaaatatcattaaccaccttatcaaccagatcaatatggcgaagaatgctactagttattatatcgaagctaagatagacaaccagaccgtgaacctgaccagtaacataacccacaatgtgacgatcattgctaatgacatcgagtttgattatggcacgaagaccattactgtgaacgtgctgttcgacaacttgtctgccgacgacgaaatcatcacgctgaaggtgaacaataaggagtattctactaagatcaataatgggatcgctatcttcaatattgacaccttagttcgaggaacctacaccctgaactacagtataaacgctactgagctgcatgacaacgtaatcaactcatccacactaattgtaaacggcatagacccaaacattaatgccagtagcaaagccgtgctggtgggaaacaacgtgaccgtgaccatcaccatcccttctgacttgacaggcaccatcaatgtgatcttgaataataagacatatgtggcagagatacacgataataaagcgattgcaatcatccctaatttagcacagggaaattacctggcaaacgtgatctacagcggcgacgagaagtacctcgcgaagaataccacattaaacatcaaagtcctggaaatcaatatttcagcaccgaacgtggagaaatactacaaggggtctgagaaactacgagtgatcgtcatagacagtgaaggcaacgcaattgtgggtcagtccgtgcaaattaagcttaataatgtcaactacaccgagatcaccaaccaggaggggattgtctcagtaaatctcgacctgaatgttggaaagtactctgccacaattctagtgaacgataagaaaatcaacaccgaaatcactatcaaatccacaatccagggatttaacatgatcagggggtataactccggcttagattatcaggccacgctgctgaatgacgacggaacaccactcgacaacacactggtaaaactcaaaatcggaaactccatttacgaggtgcggagcaacgccaacggagttgtgaagttgaacaaaaaactcgccattggcacatacacggtcctgattacaaaccccagcaatttcgaaacacagacagctacgctgaagattgtgagcagaatcaataataataagaacataattggtgactacctcagcgggttcagctacaaggtgcgcatcatcggggacaatgggaagtccgtcggcgctagagaaattgtgaaatttaagattaacaagaaaacttacaacatcaagacagacaaaaacggctacgcatccttgaagataacacttactccaaaaacctatcagattactgctacctacaagggtcaaagcgtgaagaacaagatcaccgtgaaacagattcttaagaccgcgaaaaagattaacatccggaaatccgccaagaaactgacgctcaaagccaccctcaagaaatccaacaagaagccacttaagaacaagaagataaccttcaaattcaagggtaagacctacaccacgaagacaaacaacaaaggcatcgctaagattatcatcaaaaagaacgtgattaagaagctcaaggcaggtaagaaatacaccgtcaaagtgacctacgtcaaggacatcatcaccggatcagtcaaggttaagagatga

SEQ ID NO: 8819 - DNA, 1152 bp, synthetic construct
  source 1..1152: mol_type = other DNA
atgaaataccggaagctcggcaacacgggcgtagaagtctctgagatagcgtttggtgctgaatttctggtagagcgcccctacagggatacagaagttctgatcaaagcgtgtgaggaacacgggatcaatttcgtggactgctggatgtcagaacctgatgtccgaagccacttggggaaggctattaaacctaaccgggaaaaatgggtcatacaaggccacatcggagctacttggcaaaacaaccagtatgtaaggacgcgggaaatggacaaggtcatccctgccttcgaggactttatggagagattccagatcgacaccctcgacttcggcatgatccactacgtggatcagatcgatgactataacgagataatcaatggccagttcatcgaatatgtgcgcaagttgaaggaagagggaaccatcgcgcatatcggacttagtacccacaatccggacattggactgttagctgcccaaaatcccgaaattgaactgttgatgttcagcattaatcctgcctttgacatgttcggcccaatggaggatatcgaggagtatcgaaaagaggacgcctatggcgacgagaagctgtcctctattaacccccagcgcgccgaactctacgagtcatgcgagaagagtgggacggccctcacagtgatgaagggattcgccggcggaaacctcctgagcgctgaaacctccccattcggtgttgtcctcactcccgtgcagtgtattcattacgccctagagcagaaaggggtgtccagcatcttcgtgggtgtgaaaaccgttgatgaactgctggagtccctaaagtactgtgaggccacagagaacgagaaggactacgcagaaatccttagaacagccccaaagcactcgtttgagggccagtgcacctactgtgggcactgcactccctgcaccagcgaaatagacatatcaatggtcatcaagctgtttgaccttgcaaagaaccatgacgaggtgccggcaagcattagggagcattataataatctgaaatacgatgcaacagattgcagtgcatgcggggactgtgaggagagatgtccatttgatgtggctattgtggatgtgatggagaacattcagtgcctgttctcccagtga

SEQ ID NO: 8820 - DNA, 1452 bp, synthetic construct
  source 1..1452: mol_type = other DNA
atgtatgagaaggaagagattatcagcgactacattaaggaggaactttccgatgtacccaatatcctggataatgaactgacattggatggccgcagtttcgagcaccggaaagagtttgaatttattaaacatcatattgacgagtttctcgagaaaactaccaacaaccggtatttcgctctgcccggcttaagaggtgtggggaaaacgactctcctctaccaaacctatgagtacctgtttaagtccaaaaacatcaaccccaatcagatactgttcattagctgtgaaaacctaaatgacattgtggatttcaagatcatagatgttgtgaaacagttcctggaaacctaccacaacaccaccctacggcgtctggacaagaagatattcctgctcatcgacgagagccagcatgacaagaagtgggccttgtccgggaagaggatttacgacaaaaccaagaatatcttcatgattttcacgggtagctcagccttgaatctggagtacgacgcagatagcgcccgaagactgctcaaggagaacatcactccactcaactacaatcagcacctgaaattgaagtacaactacaacgccgccaacgtgtcagcatccctcaagaaattaatcttcgaaggcgacatcaccgatgccgtcagctgcgaacagcagataaatcaggatctgatcaacatcaatggctatagtacgaccgactggaacgagtttttgaagtacgggggattcccgacgtcactctttgaaaacaacccccacatcatctgcaaaaacataactggaatgatcaataaggtaattagtcacgatatgggtacaatctccagcattaccagtaccagccaaactcacgccaaccgccttctgcgatttctggctctccagaagccaggggacatctcgcaggagaagatgggaacataccttggaacctccaagggcaatgtgaggaacatcctagacatcctggagaagacccagctcatttttcactgcgaaccccatatcgcatcacctaaacgctccatcaagagctgggagtactttttcgcaacaagcagcatcaaacacatcctgacaagctcaataggcaatctgaacagtaacaagaacgcttatcttggggtgcttttggagaaccttgttgcttccacactgttctatctgagcaacgaggaagggaactatttcacgctgtactacgatccggaagacagagtcaatgtcgattttgtcatccagggcgagttccagaaggccatacctatcgaggtgagcatgggcaaaaagaagaaaaggcaaatcgcgactgccatcgagcggtacaatgcggactatggaattattatttcgaatacaactaaaacaatagctaagaaagacaatattatttatctgcctccaaagaccttcagctttttatga

SEQ ID NO: 8821 - DNA, 846 bp, synthetic construct
  source 1..846: mol_type = other DNA
atgcaattcctgatactaaacaatggaatcaagatgccgatcctcggattcggcacctaccaaataccccccgaggaaacaaaacaggccgtcctcgatgccatcgatgtagggtacagactgattgataccgcacagttctacaaaaatgagaaagaagttggcgaagcgattaaggagtgcggtgtggaccgtgaggagctgttcattaccacgaaggtgtggataaacaactatgggtacgaaaactgtctggattcgattaaggaatccttggagaaacttggtctggactatatcgacctggtcctgatccaccagcctttcagcgactattacggggcttatagcgctttggaagatctttacgaggccggcattatcaaggcgattggggtgtccaacttctacccagaccgcttaactgacatctgcctgtttaaccgccggatcatcccccagatcaatcaggtggaggtcaatccatttaatgggcagtatgctgcccaggccaacatggagaaaaatggagtgcagatgcaggcctgggcaccatttggacaaggcaggcatggcatgttcgagaatgaaacactcaagaagattggcgagaagaacggtggccggacacctgctcaggtcatcctgcgatggctagttgagagaagcatcgtagtgctcgcaaaatcaactcacaaggaacggatggccgaaaacatcgacattttcgactttgcacttgatgaggaggacatgatggagatcatgaacctcgataacggagaaaccctgtttttcaaccaccagaatcccgaagtggtggagaggtttgaggacataagttga

SEQ ID NO: 8822 - DNA, 1287 bp, synthetic construct
  source 1..1287: mol_type = other DNA
atggcatatgagatcaaaaacaagaagaatattagtaccattggagtgcatgcaggccaggaggaagtggatgagactgggagccgggttacgcccatctaccagactacatcgtacgtctttgactcacccgaacaggccgcaaaccggtttgccctgaaagagggcggcaacatttacagcagactgaccaaccccactacggaagcctttgaacgccgcatggccgctgtggaaggtggcacatctgcctacgcaacggccacgggcatgtctgccatcttttatgctatcatcaacataacctccgtgggcgataacattgtatctgccgacaacctctatggcggaacctacgagctgttcgaaaatacactggaggacttgggcaggagtgtcactttcgtggactcacagtcccccgagctgttcgaggaggcgattgatgacaagaccaaggccatttatgtggagagcataggcaatccaaagctggacatccccgattttgacaggttagccgagatagcccacagtcatggaatcccacttattgccgacaacactgtgggaatcgggagcgtaagacccttcgaccacgggaccgacattatcgcctcctccgctacaaaatacattggcgggcacggaaccacccttggcgggatcatcatcgagaagggtgactttgactggatgagtggaaaattcccaagcctgtccgaacctgacgctacatacaatggactcgttttcggcgaggccttcaaggatagcgcgtttacaacccgcatccgaacagtcgtgggaagagacaccggtgctgtccctagcccattcggcagcttcctgctgttacaagggctcgaaacactaggcctgcggatcgagaggcacgcctcaaacgcaatggccgtggcagagcacctggaggcacatcctaaggtcgcttgggtaacctactccggtttggaaagtagccctaaccacaagatagctaagaagtatgcggagaaaggatatgggggaatagtgtcattcgggcttaaagcaggttacgatggggcgctgaaattcatcgagaatgttgagctcatctcattcctggcgaatattggtgacgctaagagcctggttactcacccggcttccactacccattcccagttgagcgaagagcaacagctttctacgggggtcaccccggatctcatccgattttcggtgggcatcgaagatctcgaagatatactagctgacgtggatcaggccctcgataaaatttga

SEQ ID NO: 8823 - DNA, 5112 bp, synthetic construct
  source 1..5112: mol_type = other DNA
atgaagttttttcgcaagaagccaagaatcttcttgatcctcctcattgtcatgatctgcttctgcctcttcagccagctggctttcgccgagaacatcaatgagagtgaagtggtgggaaatgctgaaatcgagaacaacctcagcagtactaatgacaatttcgaagtgagcaaagatataggttataacgtctccaagaagatctccacggacaacagcaacgagaatctgagaaactctcagcacatgaccctttttatcattagtgacaaccccggaacaaatatcctggacaaagccatcctggaactctccaacgaaaacaagatcaacggcgtaaatcttattatccgcaatggcaaccaggtaaagtccatgaacgagaacgagcttagttacctgctatcggattgtgatgcttttatcggtgagtggatttccagtgatgtcgactctgtcttgaccagcgtgctcgtaaagaatcctgatctgtctaataaaaagctctttctggtcttggagcccccctcaggcaacctgaactcggggtccagtagcctcaacctaattaggaataacaccttgaattataacaagatattcacaaactattccaacgaggagctgatcaattatttcaagaatactaagaggggcaactcatattccaacattaataactacctcacaaatggcaacggcaaaaatttcgattccatcttcaatcgattggttctgtacaaggatctgaatgacaagaataacctgaaaaatcagatactgttcattcttaactacttgggcgttgatgtgtcctatgagcagcctacatttaccggggtgaagaactatggtatctaccgggatcgatggtactccctcgacgagtatatttctactttttttaaggctaccaacaaccggacggtggggattctcgagagtaagatgtacatcgagtctcagcagctcaacacgtgctacagcattataaacagcttggagagccggaactataacgtaattcctgtctttgcggacggcggatctgctgaacaattgaaggtcatggttgaatcctggacaagtgcgggagacgacatttccggcttcctttctaattcttctaatttcgacgtgtatattgacgcgatcgtatcgatggtggcttatggggtgggtggggaaaacttcaccaaagccacaagcttttttgaggaggctggggttcaggtctttagggcggtgcactcggatcacgtttcaaatgagcagtgggagttagggtctaccgggttaacgacagaaaagagtgacaaatggtggcacatcactattgccgaagcgcagggaataatcgacgccaccttcataggcggtaatagcagctatatctcaaatttgaccggcgcccagattaccacgtacattccgcacgaagggaacatcgggctgcttgcggacagaatcgattcgtgggtggaccttaaatacaccttgaacgaggataaactgatctcgatcatttactataactaccctccgggaaaacagaacatcggctccagttacttagatacaataaaaagcatttataacatcctgtacactctgaaggctgccggatacactgttggaagtctgccagttgatgtgagtgagctcgaatatctaatgctgacctgcggtataaatgtcgcgacatgggcacccggcgagctggagaaaatcgccaatcggtcgtgcataaccctgctccccgtcagtgagtacaactcctggttcaattcactggacgagatcgtaagaatccaagtgtccaacggcactgtggcctacattggggagctgactaaaagagccgttgaattagactacaccaagacaatcggaagcaccatcgacgactggtacaaccaggtggtgtccctgctgccagatgagaagtcagtggaggccaaagaggtgctgagtaatattgtccgggctctgaaggactatgccaacactcattcccaggactactatcgcctctacctgaagtacttcgacgaatttaaggaactgaacattcagggacttaatggatggggggagactccaggcaacgtcatggtcgttaacaaaaatggtaccgactacttcgtcatccccggattgacatttggcaatatattcgtggctccggaacctcaacgaggctgggagtcggacattaaaaacctttaccactgtactgccgtggccccaacccatcagtacttggccgcatattattacatgcagactcgcaacccaaatgccatgatcttcaccggacgccacgccacacacgagtggctgccaggcaaggagatcctgctgtctgccacggactacggatcagtggttgttggcgatgtccctcaattatacttttacatcagcgatggcctcggtgaggctatccaggctaagcgacggggctttgcagtgatcatcagccacctgacgtccccaatgtcctatactcatctctacggcaatctgacgttccttgctaatctgatcaacgattaccaaaaggcagggagcagctcagagaaaaataagattggagagaaaatccaggatctcataatcagcaacgattactcaaccaatctgggcctcaataagagccaaatcaaaagcatttctatcgactccctgatagagaagatcaacatctttctgaaatcaactcaggacaccctccacccgctgggcctgcacgcactcggcgagtactggtccgaggaggacatcgcgagtaccgtttctgccatgctgtcgcatgacttcgtgttggagaacaaccagggaacactgaatcttttcaccgagctgagcaactactactattcaaagagctacggtgaccttactccgtttgaaagggaatttgtcctcaataagagctacgatatctgtaaggcattgatttactgggacgtgaacagcgtaagcaatgtgttaattaacggcaatgttaagtttaacaattctaacttctatgcttgtctcaatttggccaaaagctacataaatctgattaaccaatccatttccaacgaactaaatgccatgctggatgggctgaacggccgctacatccctacaggcgaggggggggaaatcgtggtgaagccaagtattctcccaacaggcaccaacattttccaggaccagtcatccgagctaccaacacaggacgcctggaactacgcaaaaattcttgccctgctgactttagccgacttgaacgacaccacggaaaaaattatcatggggatatggtgtgtagaaacagctagggatgacggggccctcgtgtcaacggtgctctacctcctgggcatgaaacccgtgtggacaaactcctcaagcgccggctttgacgatgagggaaatcctacgggcaaaaaggtgggggcaatgcctgaagtcatcaaacttaacgacctgacccgtcccgagggatggaacaagaagcggatagatgtgaccataatcaccagcggactcttcagagatctctacagttctcagtctgttttaatggataacgcctttagggtcgcattggcccgctcatatctgacactgattaacaataaaactctgatgaacggaaaatatggcaaggaactgagacaggctctggactgtgtcatggaggggatcaactactacagggcttcgaatgaggctttgaaggacaactatgtcgcccagcattggatcaaagactgcctatattatctcagtattggttataatgcctcttacgccggggaatgcgccattacccgtatcttcgcaccacccaacggcgattatggtgcaggaatctcaaagttggtgtcaatgtcctggacctggaacaacaccgacgaactcgctcagttctacctcgggcgaatgggaaacatgtattctaaaaactactggggagatacaaatcccctggtattcctaaaggcactgtctaacagcgacacaataatcaccagccgcaatacaaatcagtacggtgtcatggacaatgatgacttcttcgattattggggggggttatccatggcggtggaacacgtgtccggtaagagccccaagatgaacgtgctaatgtacgccgataaggataacgcatatatcagctcgctcgaagaagtcatgtaccgggagatcgcctcaaggtatgacaaccccgagtggattaagggcatgatgaaagaaggatacagcggggctcgttatatgtccaacaagtttgtgagcaatctactggggtggcaagtgacccgcccggacagcgtgtcagatgatctgtggaacagggtgtacaatacctattacaaagacaagtacaacctgggggtgaaggactggctgatgagtggaaataatgcctactcccttattagcatgagtggcacaatgctcagctcaatccataagggatactggaacgctgacgatgcaaccataagagatatcgccaacacctgggcgcaggcaaccgtgaagaacggtgttgcctgttgcgactgcagctgcggtaatgtggccatgatgcagtgggccgtgcagtatgtaaaccccgatattctggcacagcttctgccgaaactgtatgacgccacggaaaatcctgtcttcctgaacaatacgcataaccccaatactaagcctgagaacaacaacgaccctcaagtcgagcccagcactcccaaccccaccgacggctcttcctctagttcaacgattagcaataacgcaacttccacaaattctaatcagcactccctgagcaatagtcagaatagccagggcaacgcggtgtctgatgtgggcgactccagttccagtgatagcggtactttctcctctgaaggggctgacgttaagaaggcaatcgaaattaaccctatcacccaacaatcggctagcgaagtgggtatgagtcttctggcagtgcttggcgtcatctgcctgatccttatagtgggagtcgggtattttcgggacaatggaaaagagaagaaaggctccaacctggatgagctattcaacgaaaaactgtga

SEQ ID NO: 8824 - DNA, 708 bp, synthetic construct
  source 1..708: mol_type = other DNA
atggacgtaatcaatatcctctggcagctgggcattctctctgccgtgctaatctttggcatcaagctgggactggctaccggattggctaatatgtcgaagaagtacctcgcactggtcagcatagggtacggtgggggtgtgctgatattgaccgagatctcctccttcttcaccgaacagatcacagggttaatttactcctacaatttcgaatttttcctcatcatggccatcataatgatactagcgggaattttcactattcgggagtacaaggtctttgagaaaaatactgccgccgctacatgtatggccgtggtcgcgccttgcccatgctgcttcggcagcataatcgtgagcattatgctcgtcgcccccgctgtggggctggggcttttaaacttgagtgtttatgtggcggccgccctggtgctcaccattgtcctcacatactttgcaagcaactatcttattaaattcatcaacaaaccctatcccatcgttctcggcaacttcatgctgttcctgggcatctacttcctgttgtcagcactgtttctgccaaacatcacgtctatgatccaaaaccctatggatgccattgagatcgcatcaccggaatatctggtggctgtgctggtacttatgattatcatgatgttccttggcggattttactttaagaataacagttatctggactga

SEQ ID NO: 8825 - DNA, 645 bp, synthetic construct
  source 1..645: mol_type = other DNA
atggtgacaaccatacccggaagcgagatactcacctcgggcctgaatatgatcagccagagcctgcaagtgcctgtaatcatctttcttgtcatcttcgcattcttcgccgtggtgactctgggcagcctcatcgcagagtacaccagccgtaaaaaagtctccccagacctacttgagaaactgatttacagcatctcccgagcagactccgtggaggagttgatgagtatcatcaagaacgccggaatatacgagaaccagaaggttattcttgtcaaaatactgcgggccgatagtttgcccaataagacaagagaaacattagccaggaagctgatcgaatttgaagagacggagctgggaaagaccatcgagaaaaccgatatcattactcggattgggcccaccctgggcctcatgggcacgctcattccaatgggtccgggactggctgctctgggggccggtgacgtaaatactctggccaacgccattatcgtggcgtttgacacaacggtggtcggcattggggctggggcggtgggctatttcgtttctaagatcagacgcaggtggtatgaagaagatctgtcaaactcagatgccctagctgacgcattgctcgacaagctcaaccgctga

SEQ ID NO: 8826 - DNA, 336 bp, synthetic construct
  source 1..336: mol_type = other DNA
atggcgaggcgcaaatgcaagaagcggttcagcgataatgaggaagatcccatgaccggaacctccaacctggtcgatgccatgctggtgattgcagtcggattcctcatctttgtggtaatatcatggaacatgcagagtatcgtgttctcagacacatcccacgaccaaagccagagcgttcaggatagccatatgaacgtgacagaggtcagcgagggtcaggagctaaatgacactctggactccgttgaaagttcggggcagggctacatggagatggggaaggtgtataaagacccaagcacgggcaagctcatcatggtggaaggctga

SEQ ID NO: 8827 - DNA, 2541 bp, synthetic construct
  source 1..2541: mol_type = other DNA
atgatagtgcttagcattagttccgtgtctgccgacgatctgcagacaaaatacgccggcgaagtgagcggggacgtgaatgtcgtgacggtgaacccctggaccacgagcggcagcctgacatacgacattcctagcgaagctaaggacatcaggtccgccgatgtgtatgtcaacgtgtacgggggcagtgctaagaacacctacggagcaaacgccaatgtaagtcttaaaactgcaaatggggagaatcaaatagccaacgaatcgctttggatcgaggagggaagtagtgatggaactatctacgctgtgaatgatcacatcaataagtgttattctgactaccagatgcactacgatattacaaatagcataaaggggctcaacgggtcgtcaattacaatcaaagtggacactttcaagatggagaataagtcgttcgatggtaaaattaagctcatagctctaatcctcgcatatgacgacggggacagtgatgtaatcaattattgggttgacgccacccagaagtggaccaagactaatgtgacaacaatcttcaatacagaaaaactgtccaacatcaatggtgccaacctgatcaatgtggctctgtctagcggggacggaagcttcaaagttaatggcgaaataataggagatcccatcgtccacgatagcggcaactactatcagtataatagctgggacatttccgataagatgaaaaagggtcagaacacggaattgctgtccatgaatgtggggagcggctcgtacgcaagccttaaaaatgtgttgtctgtgctgaaggtgaacccgatcaaggcgaatgtgtccctagcaaccgagtacgccgacacttgctacgcaggcaccaataatacaatcagcatcaacgttatctccgataagaaagagaagtattcaatcgagctgctggccgacggcaatgtggtaaacagcacggaaattgagctggatggcgagaaccagaccattctgttcttaaccgaccctacggtgcgggaggtggatgactctaccgtgaacggggccgataatgtgaaggtcaactacatggtcaacgtcagatttaacgacgtggttgtgtcaagtgccaacaagacggtgcctgtgttatacaacggtaatctgggcaaagatttgtcctatccctcaagcggattcgcctccttcgagaatatcagctttactggggatatcgtcattgacattaagaatgaaagtagctataaatccggcagtaccggcacaatcgaaatcttcaacgttaacctcggcaaggattccacgatcgtcaaaggatttatctacgtgccttacaactggtttaacggaaagaaatacgtggagaatgaaaccatgtttaacgtaacattcaacaaccagactatctgcccggctggattccatcgggaccagagtaacctcggcaactatggcaagtacggatacggggtcgtggtgtatgatgtcacaaactcaattaaaaacgggaacaacacattcgtcctgaataaaatcaacccaacaccaacgatatacccctccacgctgatctacatgtacaacaccaccggttccgaggtcattaagaacatctacattattaatggtgcggatctcctgtcaaacacaagtaacaacgcgggaagggtcgtgcaagccaactccaacatcaacattaactctaaggacattctcgacgccaagctctatgtatttgcttcgggggctcaaactaatgagggaaatataatcataaacaataacgtctttgagaatgtttggaatggaactagtaagaccacagacctcttcgcgacagacataaccgacatcgtcaaagactcaaacgacatccgctttgttgccactggctctaccatcttagccctgcagcagtttattgtaaccaccaaggacgctccaatcaagactagcgtcaagccaaccaagctgtccactacctatgattcaggtaaatattttaacattaaagttcttgacaaccacaagaaatcagttaaaggtctgaagctgaagttgaaagtgttcaccggcaaacgctatgcaaattattatgtcaccaccgggtcaaacggcgttgctagcttcaagaaagcttctaagctctccattggaactcacaaggtggagatcacaaccaataataagaactacgtggttaaaaagaccatctcttacattaaggtttataaagcgaaaaccatcgttaaggcacccaagataactgtcaaatttaaaaagagcaagtacttcaaagtcaacgtgaagaacaaggccactaagaaagcggtgaagaacattgcagtgaagctaaaagtcttcacaggcaaaaagtacaagatctacaagattaaaaccaacaagtacggtaccgcctacctgaagacgaaatacttgaaggtggggagccataaggtgattgtatattctggcaattctaagtatagcatcggcgccaaatcctccatcaaggtacgatggtga

SEQ ID NO: 8828 - DNA, 741 bp, synthetic construct
  source 1..741: mol_type = other DNA
atggccaaaaatgcgataattaccggcggatctagaggaattgggaaggccatggcactaaagctgggtgagcttggctataacgtggccatcaactacaggagtgactcatccaagcagctgacagaggacctcattgaagaaataaagtccgagtacggtgtggatgcgatcgccgttcaggcagacgtctcgaagtttgaggactgcaaaaagctggtggaggctgctgttgatgccttcggagatgagatcgacgccctggtcaacaatgccggcattaccaacaatagcaacttcatcgacctggaacccgagaagtatggggctgttatcaacacaaacctcgtgagcatgatgcacatgtgccatctctgtttgccatacatggtggaccgggataccgcaatcgtgtgcaccgcaagtgtaggcggcctgacgggcgtgatcaaccaagcagattactgtgcggccaaaacgggggtgatcgggctgtgccgagctctggcgcttgagtttgccccacgcaaagtgagggtcaatagcatcgctccgggcatgattatgactgatatgctccggggagtaaaccaggacgaactaaatgccctcgctgcaacaattcctcttggacacatcggcgaggtcgaggaaatagccggggctctggaatacatcctgaccgccggatatttaactgggcaggtgatttcccccaatggtggcttcgtcttgcagtga

SEQ ID NO: 8829 - DNA, 1806 bp, synthetic construct
  source 1..1806: mol_type = other DNA
atgtccccacgccctattaagcggaggcctcccgaaaaggcagtggacaataagaaagctatcatgaatatcttaagtatcctgaagtgccacaagttcaaattggccctcactatcgtgtgtgcggtgatcagcacggcctttacaataatagccccgctgattattgggaaagccacaaccaccatttttaatggaatcaatagcatttccaaacacaccggcaccatggatttcaacacactgttcaatctgctgactattgttgtgatattgtacatcatttccagcttgttcagttacctgcagagcttcttcctggtggaggtaagcaccaagataagctacgaactacgcgagcgactaatggataagattctcagcctgccaatggaatccgtggatgagaacaagcgcggcgatatcctatcacgaatcactaacgatgtcgattctctccagcacgggatcacccagtcgttcttacagctgactacagcagtgatcacccttatcggcgtatttgtcatgatgttaacgattaacatctggatgacgcttgccacagtcatcctcatccccattgcattcctcgtcattaggtctatcactaaattctctcaaagttatttcctgaagcaactcgtctttaaaggttcccttaacggtcagatcgaggagacttttactggccatgacatcatccgtatcttcaaccaagaagaaatctcaatgaacaagtttgagagtgacaacgagaattggttcgaccaggagtggaaatcccagttctactccagcctgaacggacctctgatgaacttcatttcaaacttcacctacgtgatcatagctgtgttgggcgccatatttgtgcttcagaaggcaatagctgttggcgatatcctcgccttttttcagtacacacagagtttcacacgcccaatccagcagatcacccgggtgatgaaccagattcaaacggcaatggccgccagcgaacggatattcgagtttctcgattatgacgatgaggagaacccctccgacaagcagttgactgagataaaagagggaattgcgttcgagaatgtgtccttcagctacacaccgaacgagaaaatcatcaagaacatgacctttgacattaaaaaggggcagaaaatagctatcgttggagaaacgggagctggcaaaacaactattgtgaagctcctgatgagattttatgaaatcgacagcggtagcataaaaatcgacggggtggacatcgaggaatatgacaagcattcgctgaggtcacacatagggatggtgctccaagattcctggctattctccgataccattgagagcaatattcggtatgggaacctggacgtcagtgaccatgagatcattaaggcgagcaagcaggtgtacgttgataactttgtaagaaagctctctgatgggtacaaaaccattctgaacgaagactcagacaatatttcccatggtcagaaacagttgatcaccatcgcccgaaccatcctttcgtcaaaagaggtcctgatcctggatgaagccacgtcgagtgttgacacacggaccgagaagctgattcagaaagcaatggacaagctgatggagaataagaccagctttattattgcccacagactgtcaacaatcaagaatgctgacaagattatcgtcattgaaaacggcaggatcatcgagaagggcagtcacgaggaactgcttagactgaagggatattactataatactctcaatacccaatctgaagacagccccatctga

SEQ ID NO: 8830 - DNA, 1707 bp, synthetic construct
  source 1..1707: mol_type = other DNA
atgaagaaattaatcgcccccctcaaaaacaaaatcggccaaatcttcgcaatcttcctgttcctcgtggtgcaggtgtattgtgacttgacactgccacagtacacctcagacattgtggacataggtattcagaacgcaaacttccagtttattatcgatacgggcatgatgatgcttctgatggtggctatatctgctctggccaccgtcggagtgtcctactttagcagccgcgtttccagcggttatgctaaggacctcagaaaaatagtgtacagcaaggtgttaaaattctccaatcacgaactaaacaagatcagccgatcttcgctgatcaccagatcaaccaacgacattaaccagctccagagcgtgctggctatgatcttcacaacaatactgtttgcccctctcctgggagttggaagtatcataaaagccttcgagttgggcacaaacctaagctggatcatcttcgtaacttttattggcgtggtcatcctcctggttatcgtgattgtccgcgtgctgccgtacttcaaggtcatccaggaaattatggacaagatcaatagaacatccagggagattcttataggcatccctgtgattaaggccttcgtacgccaggactacgaagaagagaagttccgaaagatcaacgaggagttttacgatgtcaacatctatgtgtttcggaatatgctgataatgctgccactgatgactctgcttatgaatttgatgattgttctgatcctgtatttcggcgcctacgatgccatgcgggggagcatcctcaccggcgatattatcgcattcattcagtattccacccaagtcgtaacctcatttctaatgattggggcctttttcatcatccttccacgattactggtgagcggcaggcgggtgaacgaggtcctgactactgatttaaccataacggatggggaactgacggacatttcagaaaaccccacaattgaatttaagaatgtttcatacaaataccccaatagcgagaaagagactataaaggacatcagcttctcccttaagcccagtaagaccacggccattattggtggcacaggtagtggaaaaagcactatcctgaacctgatcccccggcttcaagacccgagttcgggggaaatcctgatcgatgggaagaatatcaaactcttcaagctgaagggtctccgggataagatcagtttcacccctcagaaggctattctgtttcagggggacattaagtccaacatgttgactggaaaaaatgatgcaacagacgaggaaatcgaaaatgcgcttaagatggcccaagttgatttcgtgtccaacctcaaggaggaggtcagccagggcgggtccaattattctggaggccagaagcagcgtctaagcattgcgagggcgattattggaaaacatgacttttacttgtttgatgactgctttagcgcactggacatgaacacggagagactgataaaaaacaatctcaagaatctgaaagacagctccattctcatcgtctctcagaggatttccaccatcattgacgctgatgagatcctcgtaatcgacaacggggagatcatcgatcgcggcacacactcggagttggtgggaagttgcgagatatataccgaaatcgtgaacacccaaatcgacagtatggaggccttgtcatga

SEQ ID NO: 8831 - DNA, 645 bp, synthetic construct
  source 1..645: mol_type = other DNA
atgaaaaagcttgcaatcttcgactttgacggcaccatctttaacagcatcaccgatgtcataatctgctttaataaggccctgtctaccaatgacttccccacactgacatatgacgagtacgtggagattcttggtggcaacatagatgagctcgtgtcctcctgtctcaaggataacaatacgccgcagaacatggagctcgtgaaaaatacctataacacgatctacggcaaaagcaacaaggagaatagtctgcccttcgacggaatgcatgatgtgctgttaaagctgcaggagaagggaattttgctgaccatcaacagcaaccggaataacgacagcatcaggacttttgttgataaatattactccgacatcgatttccaggctatcgaagggcacaatcctgtgtacccctcgaagccaagtcctttcggaatcaataagattttgaaccagctaaacgtctcaaagaaagaagcgctctacattggggactcttcaactgacattaagacaactcagaacgccgaggtggactgcattattgttaaatggggttacgggaaccaaaacgattatggcaatgaatacgtactgaacgtcatcgaaaaaccatatgacatactgaattacttctga

SEQ ID NO: 8832 - DNA, 351 bp, synthetic construct
  source 1..351: mol_type = other DNA
atgctgttcgtgcagtacccaaagtgcagcacttgtagaaaagccaaaaactggctcgacgaacacaatattgagtatgagtccaagcatatcgtcgaggataaccccaccgcatctgaactacgagagtggtggaaaatctcagatttgcccctcaagcgctttttcaacacaagtgggatgaagtaccgggaacttaaactcaaggacaaactgcctgagatgagcgaagaggaacagctgaatcttttagcgacggacggcatgctggtgaagaggccgatagtagtcaccgacaactttgtgctggtgggattcaaggttaaggagtgggaggagaagctgctgtga

SEQ ID NO: 8833 - DNA, 372 bp, synthetic construct
  source 1..372: mol_type = other DNA
atgaatgcaaacgcccagctgatgaatttcccaatcgataacgtcattcagctgatcaggaaaaaatgggtggtacaaataataaacgacttgttcttcgggaagacccggttccacgaatttaaggagaacaagcccaaactgtccaacagagttctgagcagttgccttaaagacatggaggacaacggactgattcagcgcattgtcgacaagtacgacaagaagaatgtgcgatactacctcacggagaagggccagagcctaaataaaatcatctatgaaatggcgatctttagcgtggattcagaaaactatactgataagacaaagaccgagctcaagacagtgtttaaagagaaactcttatga

SEQ ID NO: 8834 - DNA, 1278 bp, synthetic construct
  source 1..1278: mol_type = other DNA
ctgttagatataaagcttttccgagagaaccccgagatcatcattgactcggagaagaagcgatttagagacaccataaatgtcgaaaaggtaatcgagtatgataacctttggagagagggtgagcgcaaactgaactcccttcggagcgagaaaaataaactgtccaagtcattcaaaaaggcaaaagaagagggcaattttgaagaggtgatcgccaagtccaagcaggtcgccagcgacattaaggaactaagtgctaagaacgtggagtatctgaaactgagggacgactaccggtataaagttggaaacctacttgatgaggatgtgcctatttcggatactgaagatgacaacgttgtcgtgcgcacatacggagagattccggaacatgatttcgaactgctaaaccacgtggacctcattaaaaagatcgacggagccgacctggagacggccgcagacattgccggggcccgtttttactacctcaagcgagatattctccacctgaatctggccttgatccaattcgctctgagcgaactggaagcggaggggtatattccaatgcaaaccccattcttcgtaaagggggaggtggcagccgagacatcagagctgggtgagtttgaggaaacattatacaaggtggaaaatgaggacatgtacctgatcgcgactgctgagcagaccttggccgctttgcacagaaatgaaataatatcacccgaagatctcccgctcaggtactgcgcccttagtacctgcttccgcaaagaagcgggatctcatgggaaagataccctgggaatattcagagtgcaccagtttgagaagattgagcagttcatctactccactcctgaagacagccgcaaccagcacgatcatctcatggaagtaaccgagggcatctatcagaagctgggcattccataccaggtgatcgctatcgtcagctctgccctcaatgacaatgccgccatcaagtatgatctggaggcatggtttcccgggagcaaagcattcagggaactcgtgtcctgtacaaactgcaaagactaccaagcacggaagaccaagacacggtatggccgggcaggtagcggcgacgctcaggttctgcacaccctgaacagtacagctatcgctacggagaggactatgtgctgtatcttggagaactatcagcaggcggacggcagcgtgaagatccctgaggtgctcgtcccctacatgaacggcaagacggtcatcgaagccaaatactga

SEQ ID NO: 8835 - DNA, 633 bp, synthetic construct
  source 1..633: mol_type = other DNA
atgaaaaccatcatcgtgaatgccagtccccggaaaaaatggaacaccgctgagatcatgcagtccgctcagaagggagcagagagcgtgggagcggaaactgagtatttcaacctctacgacctggtattcaccggctgccgatcctgccttgcctgcaagctcaaggaaaaaactaagggtaagtgctactggagagatgatctcacagaagtcatcgaaaagatcctggatgctgacgcactgcttatcgggtctccgatttacttcggccaaccaacgagtgagttcagggcattggtggagcgcctgatattctgtataatgtcctacgacgacggcagcagctatttcacaggcaacgtcaacgtggggattttttacaccatgaatgcccccttggacttttatgagcaggccatgaaggagagcctgtccagcacggagtttctgttctcattcctgaacggagaaattgttgcctatcctgtctgtgatacaatccaggtgagcgactactcgaaattcaatatggctggtttttcacaagaggccaaggagaaacagtggatcttacagtttccaaaagacctagaaaaggcgtttgaaattggggccaacctcagtaagtga

SEQ ID NO: 8836 - DNA, 876 bp, synthetic construct
  source 1..876: mol_type = other DNA
atgtacacattctacaaaaatgaatacatttacatctcctgccactacaatattgtattgtataccaaaatatactttgtcatacaggatgggtgtgatattgtgaccaaccagaagagaactaggaaattcgcgttcggtaacgagcgcttcggaggctcatatactccaggggaatttgagtttaacttcccggaagacatgacacgggaagagttcgagaagatctttaccagccggatgcaggctctgcacaagaaaggcaatgacctggccgaggagatgtttgaccataaatcacgtaaggagaacctcaagcccctcagtattcgcgtcaagcagcacacaaaggagtttttcaaaagccagtctatcttaagccccagggacgtgcttgagatgtacgaggaatacaataatggcagtgaagcatttataaatagcctgatcgaggaccaaaaggagctggaaaacgaactgacggaaatccaggagaagctacacaacgcaaagttgttcagagataagctgagcgagatgaaacctccaagcgagatctccaccgatgaggacaacataattaagctgcaaaacaagtatcagaactccgaaatcaagtccatcgggaatgagacatcggtgggaaaagccgaaagcgacattataagggatattcagatgtacaacacgctggacgttcatatccggaacaaccagtaccttatcatcactgtgtataccaatgcccaacccattctctattacttcaaaaatgaatattgcgaggaggatatcctcaatgtgatctcacgcattgaagagtattgcgagagcaacggcatcgacttctcccgaagtgaaaacgaggagatctga

SEQ ID NO: 8837 - DNA, 2235 bp, synthetic construct
  source 1..2235: mol_type = other DNA
gtgcgcaaactcagcaactcaacgaaggtcctgttactcatcttggtaacgttcctcagcctgaccgtggtttcagctcacgatgccaatgccacagagctgatcagcgataactcaaacggcacgtgtattgtctccagcgccgcggtggccgaggacaaccagatccttggggaggtggataaaccggatctggtggtgaacattacttcggacaacatcgatgattatttcattagggggcgactcaagtccatttacgcttacgcgacactctgcataagcgaggacatcgatgatttgggcatcctgacaatcaagtccaataacgttacaatcaacgggaacaatcacaccctgaaaaacacggtgttcagcattgaggccaatggcgtcacactgaacaacatcattctgaacataaccgaaaagtttgaggacaatgaaaacagcgcaatcctgatctggcgcgcaaacaatgtgaatatctacaatacaaacattaactatattcctccccaggataccaccgcctacggcatttacagcgaaggcaccaagcggagtctgaatagtaatctaaagatcattaacaacaccatcaactttgaaggcaacaacccctctgaggggagggattatgctgtgtgcctggagtactcccccaactgcatatttgagaacaacacggtgaacgccagactgcccctgagaaccatcgcattcgacctgacaaccgcttatctttactcagagtttgccctggccatggggatcagcaactgcaataactcaacctttaaagggaacatcatcaattgtgacgtgaacgagcggccggagtgcagctttcccacattggacgcaatattcatttgcgacagcaaagactgtgagtttatcggtaaccaattgacgcttactgatttcaagagctacaagaaccagccaaattacttgtacggtcttgacatctatcgagccgacaacctacttgttgaagggaataatattcatgtagagacctccggaggcactttcgcggcaggcactgcgtatccaattcagttaacagggcctgccagtggaatcatcattaaatacaacgagatattcagcaagtgtaatggtccaaatatcgggatatactcacagaacttcaatggtgaaaactacattactatcctgaacaatcacatcaacgtgactggcctggccggaaatcatagttgggcactggtcgcgggaatcgaagcccaggacgataacgacatcataatgaacaatatcatagagatccataatattcgcaaaaccaccaaggaggataacctgtacggcatcagctactcacaagagacaaaagggacccactcttataaagtcgtgaacaatactgtaattagcgacggctactacctttcgcacatgctggatgctgacaatacaaccgtaacgaataatacactcgtgcggacctacaagtatgcagataccaactatgaccccttcaagcgtggggatgcaatcggtaaggacactgacgaaatcaagaacaatgacttctccggcaatcgcgttatcaccatctttgaatatgaaattgaacaacagggcgatgagatcgacgaaggggacgagtttaactatgagccacccactaacactggcaaccactccaatattattaatggaagtggaatttcgccactgaagcctggcttccccggaggcaacccattaatccctggaagcaactcgggaggaaccatcaacaccggaggtaatgggaatgtgggcggattcacaaatcctgacgttgctgacggtgacaaggggtatattggtctgcctgacctcagcggagacgacgggaagagtctctcccggaaattcaaccagagggccaatgtgaaaacagtcaatagctttaataatcagggcgatgccagtaactcttataacaacctggtctcaactgagaactccacctcttctgagtccccctccgtgaacggagtcaccgcttccggcacgattagcaagtccgcctctagcgccggagcagctggctccagtggggctgcccaggagagtctaaaggcttacgaaataactaagaatattgtcgaaaatggtccgtacgatatgataagattcatcggcttggccatcatatgcgaactcctactcattgtgggctacaaaaggaaagaaacaaagaacctcgactga

SEQ ID NO: 8838 - DNA, 5568 bp, synthetic construct
  source 1..5568: mol_type = other DNA
atggaggcaatcattaaaatgaaaatcaagaagtacatgctgatcatcttcattctgttgacactggtgaacatcacttgcatcgctgctatggacaacgatacgttcacaacaaatgtgtcccagaacatttccaacatcaacacagatgagcagataaatatcctcacacagaagacggaaaacatcaatgagattcaccaaaccactgagaatgatcaactctcattctctatgcatccgccagacgacaattattataataataagaagggggaaatttatcacacccagttgatattaaccatcgagaacttcaccaccttctcgactgcgaatactacaatgaatgtccatctagattgggacctgtacatgtcaaaagattattatgatacctgccagatacgaatctacgagaacaacaccaaaatccacgcatttaacgtctccgaccaaaacaatgctgaatatgagcacaacgcccatcagacactcgacgtgacatttccctatacaatcaaagacagaactgaactgaaagccgtgattttacagatcgaatcaaacacactgagctttgaagaaatcaagaagatcaacttaactaatttgaacaacaataatattatagtcaataatacttatttttcaaatgaaaactggaccaatcagatcaagtacctgaaaaaggcaataaatgacgcgcccacaaatagtatcatctacctgaacaatatggaaatcctgaacgatgaggacattacgatcactatcgataagaacatcacaatcatcgcaaacaacaccataataaacggactcgaccacggcacgatctttaccataaactcccaagccaccctaaccttgataaacctcaccttcaccaacatctccactaattacataatgcagaacaatgggaacctcaaaattgtgaacaataatttcaacaacaatattggacgcctcataagtaataatggtaatctgactatagaggacagcattattgagaatacaacaaagtactatgccctgttcctgaacaatatcaaaaccacatccgagaacggcctgatatacaataagaagacacttaacattaaaaatacgacgtttaataatattaatttgaatccactgaccaacaataacaagaagctggactggaacgcaattatcgtgaactacgggaaagccattgtaacggactcaaaatttacaaacatcaattacagaactatttacaacaatgcgatccttgagatcaagaacaccattatggaaaacataaccagcacagacattttttctcacaccatccaatacacccggcagttaaacaacacgggaaaatattttagctacatccgggccaccagctctcttgagggaggcgcaatctacaacatcaagcactccactataacaaacaccacattccaaaagatcaccggcaagtcgggtgccatttacaataaaaaaacactcaacattacaaacaccaccttccaatcaataaacaacggagccatttacaacaacgaggatctgactattagcaactccaccttccagactataagcggagaagccatttatactaaaaacgccaatataaccaattcccgctttcaaaccatcagtggaaaggcactgtacaacatcggcaccctcaacataaacaacatactgattaacaagtccaccggaatccacaacgacggaatcctgaccataaataatacgataataaataaatgtggaggcatctataataacaaccaactgaatgtcaataataccctatttaaccgctgttcgggggtcggtgcagccgtctacaataataacattgcaaatatcgagaactgtgagattatcgagaaccacggcgatgctgacaccaagtggcggtatgtcgagcagcccaatggtcaggtctttagctacattgttgaagtctattccggtgtaatttataattataaaaatgctaagatcaacattacaaaatcaattatcaagaacaatgatatttcagaggaaagcaatggcaactgggatacctattatggaatcattaagaacgacggggaaatgaaaatcactggctgcattctcgatggcaataaaccacgtgagtggatcgctttctggggtggcgacggcagcatcaacatctacaacactggaaagcttacatacaagtacaactacctgctcaatacacagtattacaccggaaacattcataaacccagcagctttttgttcaatacggggaacggggcctgtgatgtcaattacaacttctactgcctgaaaccatccagtatcttcgccaacgccaattacaattattattttgtgccttatttcggtgagtacattccgattaagctgaacgaaacccggaatatcacgttgtcgcttggtctgaccaatggcgctgattacatgaccttcaacgattgggacaagttactgactcccggactgaacgcgaccattacaacaattgatgaaaacggcgagtacaagaacatcacaactctgctcaaagacaaatacacctttaatttcaactacacccacgtgaaaggcgagtacattatatacagcaacatcctcaactttaagagttcggctttggtggacgtgggaaaagagtttgccgaaatggaagtcaactacaacaacatcacctacaaggagggcaacatcacattccacattaagattaagggaaacctcaccacccagccaaccggaaacataacgcttcgctacaacaacgaaaaaatcatcctgaacctcacggattccgaatgcagcttcaccatccccgaaatcttaaagcctgacaattacactatgaggatcgactacgacggcgacgacgagtattttaagatcctaaatcagtattttatctttgctgtgtataagatccctaccaatattactgtggtggctcccgaagttaaatatgggcagaccgggctgattaccatcaccatcacaccaggggaggcgaagctcaaaggcaagctatacatcaacggaatctacactaagaatgctgacacacagggccataggattctgaggatcaataggaaccctggtgtgtataacattagtgtggtgtttgaaagtgatgagtattatatgggtggcgtggccaacactacgtttattgtaagcaaatggaaaaccaacctgaccctgaccggcaaggatattaacgctggggaggatgcaatcgtcaatattactattgatcccggcgacgtgcgaggggatgcgatactgatcattaacggggtgaaccagacaatatttataaacaacacagtaacacccatcactattagtaacctgcagaacggaacatatcacgtgagtgtgtactatccgggcgataaaaaatacgctccatctaacgccagcactacgttcactgtttcaatgaagacaacaaaacttactgtaaacatcactaacaatgatgacttgaccggcaatatccacgtgaatactgattataatgactgtactggcgaagtgggcgtgtatatcaataatgataacgttttgatcatgaatttgacgaacgggtcttgcaacttccccgtgaagttcaagcgtggcaacaattacatctacatccattatattggtgacaaatactactcctatgcctcttggaacacgaccagattcatcgagggaaaagccattatcaacacaaactacaaccataccatcgacgagcaggagctcgggtactacatcattaaaatctttgacagcgacaataacccctacgagtataccaatttcactgccctcttccagaacaaggagattcatcttactactgatgagaacggggtggcaaagctgccgatacagtgcagggccggaacctacaacatcactgtcaaatacaaaaataccgttaaaaagagtactgttgtggtgaacgccacccggatggacattgacattaaggacattctggcaggcgagaatgaaaccatcacaatccgactgccttacaacgccacgggaaacatcacattcaaggtagacaatacggtaattagtaaaagactgagtaacggtctcgcgatcgtcaacatctctgctttgacgcttggagagcacaaactgacagtcttctattccggcgacaacaactacactgatcagaagatagaaaaaatcttcagcatcaaacactccctatcccagatcattgcgtcaagctccggcgtcacatacggcgaggacgttatcgtcactagcaaggtgaccagcggcgccagcgggagcgtgacattcgtccttaaccatgagaccataactgtgaaccttacggacagccaggcaaacgctgcctttactaatgttcctgccggaaattatgttataactaccaggtataatggggacaagacatataaagggtctgtgtgcgacgttaagatcaacgttaagaaggcagtgcccaacatcatggttaatacatcgcctttgctgttaaacgagaatatcaggattgatgctctcctcaacaatgatgccatgggcaatgtcaccttccacatccagggccagtatagcccacggaaccgaaccgtgaacaacggggtcagttcatggctcatcagcccactgagtaaggggtcatacaatctgattgtcacatactgtggtgacagaaattacgaatccatcacaacgtccaaaatcctggtactcaatcagaacgagactgtcctgaatgtgaatattggcgacgtaaacgcggatgacgatctgatggtctatgccacactaaactcggacaataagtataaaatcaccggcaacattacgcttgagatcaacgacaagtactacaaggtggtggtgagtgatggtgtgggactgagaaatcttggggagttcaaagccggccggtacacttacacggccacctatacagggtcagatctgttcagcatgtccaccatcaagggttccttcaatgtgcgctgcaatagctataagatcacaggcaacaagaatattgtgcagtattatggcacctacaagtcttataaggtgcgcttgcttaacaataatgtccctgtgaagaaggcaatcattaccgtgaagataaataagaagaacattaaggtgaaaacggacaacaaagggtacgctaccctgaagctgaagctcaaggccggtaagtacagcattacggcttcttacaagaaggtcactgtgaagaacaaggtcaccgtgaagcctatcctgatcaccaagaacatggtggttaagaagggcaaaaccgtaacctacacggccaagctgctcaacaagtacgggaaaaaggttaaaaacaaaaaggtgatcttcaaggttaaagggaagaagtacattgttaaaacgaataagaaggggatcgccaagattaagattaaaaagctgaaagtgggaaagtacaaaatccagagcatctacgggaaggtgaaaaacaccaacaccatcaagatcaaatga

SEQ ID NO: 8839 - DNA, 2589 bp, synthetic construct
  source 1..2589: mol_type = other DNA
atgaagtacaaaaacattctgtttttttcaatcttcatcctgtttattgtcggaatcagttgtgtgtctgcccagaacatagacgaaattggcaattcatccagcgacgacacgatcagtctagatgacgatataagtaccatcaacatcgtggacaatgagatttcaactaatgtcgatggagaggtgatttgtgacgggaaatccacgcgcgacacctattcttgggctgacttcaaaagcgaggtcgaaaacgcgaacatcaatacaatagagttgaataagggaaacattgccccaagcagcgacagttccaatcagatcagtatcaaccacgacataaatatcattggcggttatggctattatatcgggggggacagctggagcagtagcaccaagtacaactacattcccattattacgtctggcagcaacctgaacgtcaagttcgagaatgtgaccttccaatacctttctgacaatgtgtttatgaaattgatggggaacggcaattatacattcaagaactgcgtctttagcaatatcaatgccactggctcccaccagtccgtcatctggctgaattatggacacgccttaatcgaaaactgcagcttcatcaaatgtaactgctccttcggggcggtaactaattactattcctcctggggcactgctgttaacaatgctaggatgacagtgcgggattcgacattcaaagataactatgctactactgaaccgggagcaattaataattgcggacagctcgtcgtgtacgactcaacatttgaaaataatgaagcagtgtggtgggctggagccatccacacccacagcaacgctaacacaaccatcatccgatcgaagttcaaaaacaactacgcaggatggaacggtggggcgttatacacctacagttacctgaccgtcatcaactcaaccttcacagccaacacggcaaagaccaatactgggggaggtgctattggagccagcagttatatgagcacaccaaaagtggtgattaaaaactcagaatttaaatacaacaccgctctcacaggtaatggtggcgcaatcgtgataagttcaggcacactgaatgtggagagtagcgagtttaccaacaatactgccctcgagttaaacggtggtgcaatctccagcagcagctgcactgccgccatctcgaactgcaagttcatcaacaacactctgaacaagacagccggaaaaggcggggccgtgtacggtacgggcaagggcagactgacagtggataagtgcgaatttattaacaacgcggcgaaggacaacaactctggccatgcactggcctattactatacgggcaacagcaacactgcagcctacttgacctataccaataacatattccggggaaaggataatggcactgggtctgtgtttgtagccaacgataaggtcaacattgtgcaatacaataacagcattgacgacattactaattacattgagccagaaaacaacacaaacggcaccagcagcggaaatataaccatccctataggcaccgatatactgtcctcgtcctgggacgtgatcctgggggacaacctgaatgggaccagcgtgattgccggtaactacattcttatccccgcaagtcatgatttgtactgttacaattacatcacccaggatctcgtttggaatttcacaaccgaatttggttacttccatgagctgttggtggatggaaatatcgtgtacgcacccgcctcatgggacgcactttacatcttcaacctgacaaatggggagtcgcttacctattcaaacatctaccagggaagcagcctctataagccagtaatctacaataacactctctatgtctcctccgagtacgggtatgggattaattccaacaattggatctccatgattaagcatgactctgactactactactatggcagtattctggagctcaacaacgtttcttatggcacgccggctatactgtcccagccctatatccacggcaataccctttacgtgaacaccatccaggggctgatcgcctataatttggtggacggcacgagccacaatgtgagtggcacggtcggcaaccctattatcgatgccaacggcaacatctgtatcctctcaaacaatggtgcggctatcagcctgctcaactccaatctggaggttgttgcctcaaccacactcgatgggacctgcaacaagctgattagcgatgccaacgggaatatctacactgtggataacaatggctatatctattatgctacatacacctccagctccatcacctgcagcaagactaagttcaacattaaccctgtttcctcagctatggcctgttacgacggcaagctttacataggagacaacaacggaatcctatgggccttcaacacgagcaaactagatgagcccgtactgaacaacgctgtctacagggttttcgacgctgggtcggccatcgtaggaaatattgcggttgacaatgatggcaccatatatatcggtacagataatgggcacttttacgccatagagtactga

SEQ ID NO: 8840 - DNA, 4578 bp, synthetic construct
  source 1..4578: mol_type = other DNA
atgagactgaataaatccgtgctgtttgtcttcatgattatcttcctgctgagtctgaactttattgtcgcaaaagatatcaacgaaactaacttaaacgccgactcttttgaaatagactatgatgatagcatctctagttcatacgataccaacttacagaagctgaaccagaacgacatcgagaagaccgacgagtcattagaaaaatcggacaactcgagcaatcgtctactcaacgaagacaataacaatgggttgctgggggatggcgatggtctgaagcatctgtatgtggctccaaacgctaccggcagcgggctcgatgaaaacgacccaggagacttcataaccatcctgaacaatactgaggataacacggtgatccacatgctggaaggaacttacctactttccaacatcacccccatttaccaggatggttactaccactttatttccattaagtcaaagaataacataagcatcgtgggagagaatccagacaaagtaaagataatttccaaccttacacctaaaaaacgaacttcgttcatattcagcctgcataacaccaataacttcaagttcgagaatatcaccttcagcgcgatcaaaaaagatcccaagaaagagaagacgaagagctatttcctcctcaataagaacaattacatctttgaaaactgcaaattcatagacgcctactccaaattcgctattatagaactggacgagggcacgcacctaaccattaataactgttattttacatccacggacggacatgttggaagggagatatctccaaggctcttttgctcagtcctgttgaacaacacgatctttaaaaattgttgcagatattctgattataagataggggtgatggggaactacagcatctttaacagccaattcctagagtatgacgacaatccactgttgtattttcaaccctactgtaacttgatttttgagaacaactatgttgaccacccatacaatttcgttttcttccagccctctgaccactacgagggttcaaatcgcatgttttgtagccacacgactctgactttcctcaatggggaggatagtgtcaacgttaattgcggagatgttatcaatcttaatgcctcgctcgtcgatgacctgggtaacattcttagtctctataagttgaagttcaacctgttcgagaacgacctcacctataccaatggggtctatcagaaggaggtgaccgtgcctgatgtgcccggcgaatattacatcgacgtgagtgatgagatgttcaccaaatacctgggcaattgtacagtgaaggcccctatttttattgtgaaagaggcgcctgaatttctatttgatgataaaaacagcagcacctacggcgaggacgttatcatcaacgtggactcactggatattcccgacggaaagttaactttccgcttcaacaacagcgaaatcatcaaaaacatcacagactaccgctgcagcatcaatctgggagtcctgcctgcaggggagtacgccatcaccgcgtactatgccggggatgaagtgtacggagctaaatcctacacaaaaacatttaacgtcaccaaggcaaaaagcacaatcagcctgacgaaaggccacgtggacgccattaaggataatggcgacgtgggcttctacttcagcacaactgagaacggcaacgaaaacaccataggcattatccttccggataatgcaaccgggaagctgacattcaaattggacaccgacacgtactccatcgacatcaccaaacgaaaagtactgctcggcaatctcgactacggctcctatatcatcgcggtgaagtacgatggggataacaacttcaatgaatccgaggagtgcaccttcaccttggtgaactccaagccaagcgtggaccttaccctgaattacagtaatatcaattacaccaacccgtttaacgttaacgtaaccctgaaccaggacgtggtgaaggatacaatcatcttcgaggtgagagacctggaggacaatctgattaactcaaccactggaattatcagcaacaagagcgccaatgccaccttcacaggcctaaatgcaggcgaatacaacatcattgccatttacgaaggcgacgagacttattgtaactccattgccagtcagcggttcaacgtgaacaagatcgacctcgaatacttcaccctcaaggctgacaagaccatcagtatccacgataatatcaaagtggaagctctgataccagtcaacgtggggggcagcataaccttccggatcaatgggcaggacatgacggtggagattttcaataatcgggcggaggctatcttcgataaccccggcctcggcaactatacagtgtatgcgacgttcaacggtgatgataattacaacccccacgaggaaaacatcaatatcactgtcattaaggccgacgccaatctgagtgtttctgccgagaatgtggattggggagaggagttagttgtggtggtgaaaaccgacaccaggttcacaggcaacctgagtgtgaagatagacggggtggagaagatcgttgagatcaccgaaggccaaggcaacgtgtcattctctaacctcaaggccggaaaatacaatgtggctgtggaatttaatgagagcgaatttttcacctcatcccaaaaggacattaatgtcacggtcaacaaaatagattccgccctcacgctggacaacgacgagatggtctttgactacggtggatcggcttcagtaacatttggctatgatggcgcagtgaatgtgacagccgaagtcgtgaatcaccccgaggctgtaattaagattaacgaggactgcattgtggtttctgatttggacgcggggcagtataccttgaaagtcactactgtgcccgacgagaaccacactggggtagataaggagtttgaagtgactgtcaacaagatagacagcgcactcactctggataacgacgagatggtcttcgattacggtggatcggctagcgtcacatttgactatgatggtgccgtgaacgtgacagccgaggtcgtcaaccaccctgaggctgtaatcaagatcaatgaggattgcattgtggtttctgacctggacgcggggcagtataccctgaaagtcactacggtgcccgacgagaaccacaatagtgtggataagacaatcagcattacagtaaataaggtaaacgccaacatcaatatcgaggacatcgttctggactatggttctcatgacattacagtctttacaggcgaaggtattgaaagtgtcaatgcaaatatccttaatcagagttacgcaaacgtcattgttagcggcaataatattagcatctacaatctgaatgtcggagagtacgtgcttcagctgattgtgaatccagatgaaaaccacaactccgtgagtaagaatgtgaaggtaactgttaataagatcgattctgtgatcgatatccggaatgaagtggtcttcacatacggagatgctgggtattgcgatgtgtatagtgagggggcggtggactttacggtaaaagtcatcaatcatccggaggccgtgatcaacatcaacaagaacgggatcgtcaaggtgtccgctctgaatgcaggaacatacattatggaagttaccacgaacccggacactaaccataactcagtgaccgggagagttaacgtcacggtaaacaaggctgactctaaaatcattatccccgatatcatctttgattacggtaacagcgggtccgtgaatatactcgtgtacaacgcaacgggaattggcaacgtcaacgttgtggggcatccggaagccataacaaccattaacggcactaagatctccgtgggcggtctgaacgccggatcatatattttaacagctaccgcactgaccggcgacaattacaaccctgtcaacgtctccgccaacgtcattgttaataaactcaccaccattattggcgtgaaaaaggtgaatggcgtttacggctcctccggtaagctgatcgtgactcttaaggacagcaacgggaaccttctcaccggcaagttgctccgggtgaaggtaggctcgatttccaagactttgactacgaatcgccatgggcaggtcagcgttaatgttgcatatcttattcctaagagctacaacgccaagatcagctttgccggtgacaacgacctggtcgagtcatccaacactgctaaggtggtgatcaagaaggccactcctaaattgacagccaaaactctcaagacaaaggtgaaaacaaaaaataaaaagcttaagataactctgaagaacaaaaagggaaaagctcttaagaataccaaggtgaccctgaaactcaagggcaagacctataaagccaagaccaacaagaaaggaatcgccacatttaagataacaaaactaaataagaggggaacatttaagggaaccgtcaagttcgcaggaaacaagtacttcaaagccatcaacaagaaagtaaaagttatagtgaaaaagtga

SEQ ID NO: 8841 - DNA, 486 bp, synthetic construct
  source 1..486: mol_type = other DNA
atggagcgcgagaacctgagcggcatttttagtattgttctcggtttgatcttcatacttttccccatgttttcaagcaacctcatttccatcatcgtggggttgagtctgctattcttcgggctgagcgcggccttcatggggtttacgatgaggcggaatggaatcccatactctctgatctccatcatcattggcattgtggccgtgatcctcggattcggattcatcttctatctcgatgcactttcatttttggtgggattccagctgtacattgtcggctttattatgattgtctttggcataaccggcctgatctcgaagctaaatagaatctccagctttacatccatacttgtcctgctgatgggtattgtgagcatagctctggccatcttcgctctcaaccagccgatatacattgcaatcatcatcgggatcgtgctgatcattgaaggcgtaagcttcctgttaaacgactga

SEQ ID NO: 8842 - DNA, 519 bp, synthetic construct
  source 1..519: mol_type = other DNA
atgagcgactttgaggagatcataaacaccagaaggagcgtgcgccagtatcaggacaaggacattgctgaggaactgattctaaagatcctgaaagccggcatgcaggcacccgggtcacgcctcggagctgagccttgggaatttgtggtcatcaagaaccgggagattttaagtaaactgggcgaaatcaagccgcgagtcacgaacgccccagttgccattgtactggtcgccaacattggaagggcattctacaaaaccgtgtggcaacaggacatgggtgccgcggccgagaacatgctgctggaagcagtgaatcttggattgggtgggctttggaatggggtggcgcccgacgaggagaaaatggctaagatcgggaatataatcggcatcgatgacatcgccgatctcaaaccattctgcattatcacactcggctatcccgctgagggctttgagaacaagttcatggataagttcgatgaatcccggatacactacgaaaagtactga

SEQ ID NO: 8843 - DNA, 1176 bp, synthetic construct
  source 1..1176: mol_type = other DNA
atgaaaaatacggactacgatttcgaaagtgtcatcgatcgccataacaccaactgcgtcaaatgggactactttgatgatgagttgcctatgtgggtcgcagatatggactttaaggtggccccggccatcgaaaacgctgttctcaagcgggcgatgcacccgatatatggctacacaattgtgtcagatgaactattcgagtcgtacataaactggtgggacagacgctacggattcaaaatgtatcgggaggacatgctgtatagcatcggcgtcatgccctccatcagcagcatgataaggtgcctgaccgatatcggagatgggattctgatccagagcccagtgtaccatgtgttttaccatgtgatcgaggagaacaaccgaaaagtggttgagaatgagttggtctatgaaaatgggagatataacattgactttgacgacttggacaagaaactgtccaaggtaaaaatgatgattgtgtgcaatccccacaatccaatcggcaagatctggtcacgcgaggaactggctaagatcgggtacctttgcagtaaatatgatgtgattctggtcagcgacgagattcactgcgacctcacagaccctgatatcaggtacaaccccttcgaaattagcagcggctacgaaaaggcagtaacttgcctctctcctagcaagagcttcaatatcgccggttttaagagttccattgtgcacaccaagaacaccgaactgttcgagaaaatcagaacccagctgcacattgacaactcggactcctgtaatgtcttcgccgcaagtgccgtaattgccgcttacaatgaatcagaggagtggctgaatcagcttaaggaagtgttattcgagaacaaacagatcgtgaaggagtatctggagaaggagctgccagtgataaagctcgtggactgtgatgccacttatctattgtggcttgattgttcagccctcaacgcgccctccaaggttctatccgagtttctccgaacaaatcacggactgtttttatctgcagggattgacttcggccagaacggtgacaacttcctgaggatgaacatcgcctgtccccaaatcctgctcaaagacgggctggaacggcttaaggctggcatcacggctctcagctacataaataacggactgtga

SEQ ID NO: 8844 - DNA, 801 bp, synthetic construct
  source 1..801: mol_type = other DNA
atgatcgagaagtccatctacgaaaactaccagatcgacttcaacgaggagatgacccccgccgacgatgattacatctttatttttaaccatgaccgggaactgtacctcaataaggacaaacagctcgcgaatagtctggatgacttcgacgtgaatttttgtttatacatcggcaaatataacaataagaaggctttcgtcgcaaacgttaacacttcagattcattctatcaactgatggaagtgtacgagtttaacaaatccctgtacttgatggggggaaaggccgttctggtcaacgattggtacatctcgcaccagtattgcggacgctgcggtacgaaaacccagatagatgagaaagacatgatgcttaagtgtcccgagtgcgggcagaaccactatcctcgcatcgctccggccattatcgtagctatcaggaagggggaggagctgctcatggcaaatcacagttatcatgagacaatacgatacgccctaatagccggtttcgtggaacctggcgagagcattgaggaagcggtcaaacgggaggtgagcgaggaggtgggcattgaaattaaaaatcttgaatacaaaagaagccagtcctggccattcccaaactccttgatggtgggattcacagcagaatatgagaacggcgacatcaaggtggacggcgatgaaattctcaaggccaagtggttcaagaaggacgaaataattaggtatgactctgacatcagcatcagcgattggctgattcaagattttatcgacagcgccaatccctga

SEQ ID NO: 8845 - DNA, 507 bp, synthetic construct
  source 1..507: mol_type = other DNA
atggtaagcaagaatatggagaaagccttgaatgctcagttgaacgccgaaatctactcaggatatctttacctgtccatggcggcgtatttcgaggacgaggacctagcaggctttgctaactggatgcgagtccaagcaaacgaagaactcgggcacggaatgaaattctatgattacataatcagacgcgggagctctgttaccctcaccgccatagatgcaccgcagactgaatgggacagtccactggccgccttcaagcacgtgctggagcacgaacagatggtgacgggccttatcaacgatctcgtgaacatctccattgaggagaaagaccatgccacaaataacttcctgcagtggtttgtggaggagcaagtggaagaggaggagaacgccatggacctcctggcaaaggctaagctggccgatggcgacaataggttaatttacgaactgaataaggagctggctacacgggtccccagcgaatcgcaggactga

SEQ ID NO: 8846 - DNA, 648 bp, synthetic construct
  source 1..648: mol_type = other DNA
atgaactaccccgatggccccacctccgaagctcaagtggattcaacggagtttgacgccgacttgctgcatgagaatgatttggggtcagtccacattcatggtcacttcggcaacgtcgagtctgaggtgaaaatagcctacctcattgggatgcaccctctcgagagcaaaagccaccgcgccctgtttgaaaagctgatctcgaaggaagacctgaagtattgctactatctgtataacatcaacgtcagcaacaagaacagtgagtccgagggacggaatgagggtcagctcctggcgcaggagagcgtgcagaaggacattatttctaagaattacgacctttttctagacatccacagcaatagggggcctgatggacccggagactataaaataaccaactttctgttcgctccaggcttcgatgacaaatccagtaaattcatgaatgaaatcctggatcagatcgacgaaatcgtatactatgcaccgaagttcagaagctcccccagttacattactgagccaaccgccgaggcaggcatccctactcttgtgtacgaatgttactcctcagagccaatggaatacacactatatctcgccgaaaagttaatctctgtggttgacacactgttctga

SEQ ID NO: 8847 - DNA, 981 bp, synthetic construct
  source 1..981: mol_type = other DNA
atgataatccgcgccccctcccgcatccacatgtccctgattgatctgaatggctcatataggcgagttgacgggggcatcggattagcactcgctgacccccagttcgtgctagaagtgaagcagattgaaaatggcatagaacttgagttcgccgacaacgtcacagacgaggaggccatcgaggagtgtcgggaaaaaatccccgatgccgccaggaagactatcgaacactttaacatcgactccggtttcaagtttattgttcacgaaacataccctccacactccggctttggcagcggaacccaaattgctatctcaaccgcccatctgataacagagacgatggacatagaagtcgagagcagagtactcagcagtgtggtgggacgggggggaacctccggtattggcacctacacacatgatctcggtggcttcatcttggacggcggccacagtaaggaggagaaaccactcttcctgccttcaggcgcaagccaggcaaaaccagccacgctgatcgccagatacgattttccggaggagtggaacattctgatcgcaattcccgaaatcgagaagcatatggagggggacgatgaggtggatgtgttccagacttactgccctatcccaaaggaggaggtggagcaggtgagccacctgatcctgatgaacctagtgcccttcatgctggaaaaggatattaaaaacttcggctgggcggtgagtgaacttcaaaaagttggatttaataagctggagcatagccttgacgccagctatttgcctaccatgcaggctattgaaaaggctggggcttatggggtggggatatctagcttcggaccggtcctctacaccttctttgacgaatcgaacgaggacatcgtcgaaaagacaaaagagatcatcggagagaatgggaccgtctttgtaacgaaagcgcagaaccacggtttcactattgaatga

SEQ ID NO: 8848 - DNA, 993 bp, synthetic construct
  source 1..993: mol_type = other DNA
atggaaaacaaccgcacggtgttcattgactacctgaaggtaatcggtctcctttgcattatcctggcccatatctcaactgatgagtccattctgcagattagaaactttgacgtgcccctgatggtcataatttcggggtttcttgcagtcaattcttttaagcgaaatctcaaacagaaccgctccttcctgaggtattactggaagagaattagccgtcttctgttccccacatggacctttctaatcattttctttattgtcatggcctttttaccaatcaatggcatctaccactatgatgccgacttcatcctcaacagcttcctcctccttgatgggctcccctacgtgtggatcataaggatcttcctgatttgtaccttcataacgcctgtaatctattacttcgacaagatcgagaatgactacatccaattcctcattctgctcctgatctacattttgtacgaactctcaatcttcttaaaaatcaacgagacaaacatcatttttgagtttatcctggcttatgttatcccttatgggattatatatttgctgggaatgatcagcaccaagacaagtccaaagatggacaggaatgtctccattatctgcctaatcgcattcatcattcaggcggtcataatttatctgaatactggcatattccagccgactcagattatgaagtacccgccaacagtgtactacataagctacgccctgtttgtttctttcatgctacttagcatcttcaaacggattgatttgaagcccaaccgggtgatagagttttgttctaaaagttccctgtggatctatctgtggcacatactgttcctgaccgtgattcctctgatctttggcgaactcaactggatcttgagttacatcatcattgtggtgtgcgcggtgggcgctacctatatccaaaataagatcctggacttgaccaacgccgatatcaaagttctgcggggatga

SEQ ID NO: 8849 - DNA, 432 bp, synthetic construct
  source 1..432: mol_type = other DNA
atgaagatcaagcagctgtctatatttctgcagaataggatgggcagcctgagcaagcccctggaagtgctttcaaagaacggcgtgaacatccgcgcaatgtgcatggccgatacttcggagttcggtattttgcggctggtagtggataaccctgagatgggaaaagaggtgctggaagagcacaacttcctggtcaagatcacagaaatcattggggttgaaatgaatgacaccccggggggcctcaccagtgtgttgaaagttatcaaggataacggaattgaccttgagtatctgtacgccttcacgcatgacaaagaggggaaagctattctcctgctccacgcggatgatatcgacaagctcatcagctccctacaagacaatgacatagtcatcgtgccatccgacgaggtctacaacttatga

SEQ ID NO: 8850 - DNA, 1302 bp, synthetic construct
  source 1..1302: mol_type = other DNA
atgttttggaatgaggagattgagacgatgagcaggcccgacctagaagaactgcagctgaagaaactgcaggcgaccgtcaaaagggcattcaacaagataccttactataataaacggtactcagaggtggaagtgtatccagaggacatcgagactctcaaggatattgaaaaactccccttcatcacaaaggatgacctgcgcgaaagctatccatttggcctgttcgccgtcgacataaaagacataaaagagttacatagcagttctggaaccacaggcaaaccagtagtttcgggctacactgaaaaggacttggacacatgggcggagacaacagcccgggggcttacaatgatggggctgggtgaaaacgacatcatccaaaatacccacggctacggaatgtttaccggggggtttggggttcattatggatctcacaagatcggggctgccatcattccgatctcaaccggccagacccgccgacagatcgaaattatgagtgatttcggcactaccggacttatttttactccatcctacggaatacacatcggggaggtggctctcgacgatggcattgatccgaagaaactcggcattaaggctatcggctttggcgctgaaatgtggacggaagagatcagacagagagtggaggagctattcggggccaaagcatacaatatctacgggctgaccgagctcatgggacctggtgtgggggtggaatgtgaggcccagaaaggactgcacattgcagaggatatctactatcctgaaatcatcgaccccaacacagagaaagtgattggtggagacaagcctggtgagctggtgctgactaacctcgaacgagagggaatgcccatcataagattccggaccaaggacctgaccaccctgacttatgagaagtgcagctgcggccgaactcacgccagaatgagtcggatcacgggccggtccgatgacatgatcaaggtaaagggtgtcgctattttccccagccagatcgagaaggccctgttgaaggttggtgatgtagagcctcattacatgattatagtgacccgccccggaacgctcgatgagatcgaagtgaaggtcgaggcatcccaagacattttcttcgatggcgtgaaggagatgatggccatccagaacaagataggcaaatccattgaaaacgagacaggcattcgtgtcaaagtgaccttggttgaacccaagacgcttccaaggttcgaagggaaggccaagcgcgtcatcgacgagaggaacttacactga

SEQ ID NO: 8851 - DNA, 711 bp, synthetic construct
  source 1..711: mol_type = other DNA
atggacatgatcagcgtgctgtggcaggttggaatctttgcgtccgtcctagttttcggcataaaaatcgggctggcaagcggtctggctaacttgccaaagaaactttttgccgtaatttgcatgtcttacggagggggagtgatcctgatttcgtacattgcttcgtttttcgccgagcagctggtgcaagctatatacagttataataccatcttttatatcatcatggcttccatcatgatcattgcgggcctcttcaccatcagggaatggaaaatacacgacaaaaacacatcaacggccacttctctagcgattattgcaccctgcccctgctgtttcggcagcatcatcgccagtgtgctcatcgtggcacccactataggtatcagttccctgaatctcagctggtacgcctcagcagcccttgtcgctgtgatggtcgtcacgtatttcgcatccaatacaatcatccgctttactaataagccataccctattgtgctcgggaatttcatgttattgctcggcgcctacttcttgcttagcgccatcgtaattccaaacattgcctcctcactgaccaagaacaccagcccgatcaccatcgcctctcctcagaacatactcatggtgattctgacattcgttatactgctggtgggaggcatggtcctgaacaagaaggggcggaacattctggattga

SEQ ID NO: 8852 - DNA, 645 bp, synthetic construct
  source 1..645: mol_type = other DNA
atggtgctgaacatcccaggcggagaatttctgactgggagcctggacgttatcagccagagcctgacaatccctgtccttgtgattctactcgtcattgtgatcataagtatcattacactgggaggcattatagcggagtatacttccagaaaaaaggtgcccataggaacaatccgcgacttgatttatgatatcaacctgtcggaatctattgacggccttaagaatataatctcaaaggccaaaatcccaaactcccagaaaaaggtgttaatcgaaatcgcatcagccgagtccctcggcgtgaatagccgggaggcgctggctcggaaactgttcgagtttgaggaggagaagaccatggaaacactcaagaagaccgacatcatcaccaggatcggcccgacccttggtctcatgggcaccctcattcccatggggcccggactggccgcactcggggccggggatataaataccctagccaactccctgacggttgcattcaacacgactattgtcggtattggcagtggggccttatgctacttcattggaaagatcaggtctagctggtacgatcgatacctgagtgacttggatgctctgatcgatagcgtattggactacatggacaaatga

SEQ ID NO: 8853 - DNA, 324 bp, synthetic construct
  source 1..324: mol_type = other DNA
atggtaagaaaaagtaataggcgccggtccaaacgagtcgaggaggaccctatggcaggcacaagcaacctggtcgatgccatgctggtgattgctgttgggttcctagtgtttgtgatcatatcctggaacatgcaggccatgatcgatcccgatcagagcatccaggaaaagatgcagcagcagaagaccaccgaggtggaccagggccaacagctcaatgagactccggacacatcaaacagctcgggtcaagggtataccgaaatgggaaaggtctacaaagacccagcgacgggaaagctgattatggtggaaggctga

SEQ ID NO: 8854 - DNA, 318 bp, synthetic construct
  source 1..318: mol_type = other DNA
atggagttttgccccgattgcggcgccatgctcatgccgaaaaagggtaagattaagtgtacatgtggctatgagaagtctctgagtgacgacgacctagtggagcagtaccacatgaagggggaaacgaaccctgagaccaaagtaatagtcacggatagcaacaatgtggcgctgcccaccaccaagatcacctgctacaaatgcggagggacaaaaggatactggtggaccgtgcagacaaggagcgccgacgaagcaccaactaatttcatccgctgtgctaagtgcggcaacacttggcggtcctcaaactga

SEQ ID NO: 8855 - DNA, 816 bp, synthetic construct
  source 1..816: mol_type = other DNA
atgaaaaatacaaaaaagatcgtgatcgtcgccattattatcgtgatcgtggcagggattgcccttctgagcggcgttggcagttcagagaacatagacatcgtaggctccacatcggtgcagcccgtcgcggagaaactcgtcgaaacttacaaacagacccatccggacgctaacattaatgtgcaaggcggagggtccagtgtaggaattaagtctgcccaagatggtagcgccgacattggcaccagctccaaggagctgaaagaggatgaaaagcaaggacttacggagtataacatcgggcaggatggcattgtcatagcggttaacaacgagaacactgttaacgatttatcaaaggatcagctcaaggacatattcagcggcaaaatcaccaattggaaccaggttggagggcaggacggtgagatcaacattatcacccgggaagagggtagcggtactctggacgcattcgaaaatattgtgatgggcaaggacaccaagatccgctccgatgccgtggtgcagagctcgacagaggctgtgaaacagtccgtcaagcaggactcaaacgccataggcttcgtgtcatttgctcacatgtccaatgacgtaaaggccctgagcatcgggggggtcagcccaagtaccgatacgatcgcagacggaagctacgagctgcagaggccttttttgttcctagtgaagggaacgcccagcggcgatctgaaagaatttatcgactgggtgaatagttccgaagggcagaaggtgctcaatgaggaaaagatcatcaaaagcacaaactga

SEQ ID NO: 8856 - DNA, 864 bp, synthetic construct
  source 1..864: mol_type = other DNA
atgagcgaacagttcatcgagaaaggtctgctgataaccgcgatgttctcaatctttatcatattgatcatcctgggattcatcataatcgagggactcccggcttttcaggactacgggttcatccagttcctcttcggacagacttggtctcccaatgaagggcaatatggcctattctcaatgatcataggctcgatttgtgtgaccatcttcgccctgattattgccgtgccactctccattctgtgcagcatatttatggcagaggtggccaatgaaaacattaagaatttcctgaagcctgtgattcagactctgtccggcatccctagcgtcgtgtatggattcttcgggcttatcgtgcttgttcccatcgtaagattctacttcggaggcacggggtttagtatttttacagcaggcattatcttatccgtgatgatcctgcccacgattattagcgtgagctttgacagcctctgcgccgtcccaaatgagtacaaggaggcctcccttgggctcggcgctacaaactggcaaaccatcaacaaggtcatatttccggccagtttgccagggatcgtgacggcaatcatcctcgggatgggtcgcgcgatcggcgagacactggcggtcatcatggtggccggtaacgtgcctggcatccccaactccatatttagccccgttaggactctgacctcaaatatcgctttggaaatgagttacgcaacaggactgcatcacaacgccctattcgccaccgctaccatcctgtttgttattattttattgctcctggtaattgctaactatattcagcggaaatacaaaatggatgtcggcggtggcaccctgtga

SEQ ID NO: 8857 - DNA, 852 bp, synthetic construct
  source 1..852: mol_type = other DNA
atgaaattcaactacatctcccccaagcgcagccaaaagataatgaacggcatattcatatttagtggcgttcttaccctctccatcctgattattattctcgggtacatcctgattaatgccgtgcctatacttagcttcgattttatcttcgggcaggtgattgacgcaggcaaaagcggcggcatttcccccatgattgtctccagtctatacgtgacctttatctcaatcctgatcgcgactcctctgggggttggtgcagcgatctacgtgacagaatacagcaagaacggattgttaatccgactgatccggttcggtgctgagacgctggcgtcgattccctcaattgtatttggcctgtttggactgacattctttgtagtgttcctgaacctcggatggtccattctcagcggtgggcttgtccttgccatcatggccatcccaacaatcttccaggtgacagaggtctccttgtcatctgtgcccagcagctataaagaaggaagtttcggcctaggagccaccaagtggcagacaatctgccacgtgattctccctgccgctatcccaggcattgtcaccggaattatcttgggcctgacgcggagtatttcggaggctgcagctgtgatgtatgccgtcggttctgccactaccataccgatatctatgtttgacccagggaggcccctcccactgcatttatatgtgctggcaaccgagggggtgtctctgccgaacgcttacggcactgccgccgtgctggttatcatcgtcctcatcatcacgttcttcaccaattacatcgtaaacagatatcagaagaaaatcatggggaattga

SEQ ID NO: 8858 - DNA, 753 bp, synthetic construct
  source 1..753: mol_type = other DNA
atggaccgcatcatcgtgaaggacttgaacacctatttcggtaactcccatatcctccgaaacattaacgtcacattccctgagaacaatgtcacggcattgatcggacccagcgggtgcggcaagtccacctttttaaggtccattaataggatgaacgacctgatctccacctttcaccacgacgggtacatttacatcgataataaagatatttacgacagcgatgtggatgttgtggagctgcggaagaaggtcgggatggtcttccagaaaccaaaccccttccctaaatcaatatttgagaacgtggcatatgggctgcgtatccatggttacgatgacgaggattttataaaggaacgggtaatcgagagcctgaaagcttcggccatctgggatgaagtaaaggacaaacttgaccagtctgccatgggcctatctggcggacagcaacagcggctttgtatcgccagaactatcgccaacaatccagaagtgatcctgatggacgaaccgtgcagcgctctcgaccccattagcacgctcaagatcgaagacctgatgcacgaactcaagaaagattacagtattattattgtgacacacaacatgcagcaagcgagccgcgttagtgactatacttcattcttcctgaatggcgagataatcgagagtggaaagaccgaacagatatttgtgaatccaaaggaggagaaaaccgaggagtacattacaggcagattcggatga

SEQ ID NO: 8859 - DNA, 657 bp, synthetic construct
  source 1..657: mol_type = other DNA
atggacaaggagtaccccagtatctcatttaaaaaccgctttaaaaaaatcgagagtgacatagaagagctaaacgacctggctatcaaaagcaacatggacgtggtgaagctctttgaagaatttaacgaaaatctttacttcgatatcctgaatcggagcaatgagatggacattaagaccattgatctcgagcgcgaatgcattaagttcatggccacagagcagcctgttgcgcatgaccttatcttcatggagtccgtaattcgggtcataagccacattaagcgaattgggcggctcttcctgaaaattgctcaaagcatcaagaacatcaaggatgtggagattccagaactgataataaaaaaattatgttacatgggagattatatcgaagtcatgctgaagaaatccatcttcgcattcttgaataaggacacccagaaggccaaggagctgtcccacgatgacgacgagatcgatgaactctatgagttcatcctgaacgattcgatcgacatgatcgaggatcgtaagattttgatcgagattatctcaatcgcaaggcacttcgagagaattgccgacaagacggtgaacatcggcagcagaatcttctttgtgatggattttaaaaggccggacatagaatga

SEQ ID NO: 8860 - DNA, 1299 bp, synthetic construct
  source 1..1299: mol_type = other DNA
atgtcaagaaatgcgtacattaacaaggacattccacttagcaaaattcacgaagtgaaagccgacctgaagcactacatagaggtgtatgagaaaatcacattcattgaggacatatatgctggtgagaccgtgaagtatgccatcgaaaagcgggggaagacaattcccactggccacacctggctcaagtcttggaacgaggaggggtttgacggactgctcaggaaagaaggatcggggcgcaaaaccaagctcactgagaatcagttcaaacagctaaaagaaaacatcataaagaaacaactgaccagcgtgcgggaagtgaagcatgaaatcttcgaggagtttagtgtgtcctattccgatcgacagattcgacgcattatgaagaagctgggctttggctacggtaagccttatgtcatacccgccgaagcgccaaaaaacgccagcgagcagctcaagaaaaacaccgaaaaaatcgatctgaagaaagacattctgatcttcactgatcagacagccgttcaaaacaaggacaatacgaacagaatatactacgaactgggaacaaagaatcgtcagaccaaaatcactacaagaataaagctgaacgctaacggctaccaggcagtaaacggcaactccctcatcctcttccagcagaatacccatacattcgaggaaatcaagtcactgatcaatcttaggattgtcaattgcatcaacaaggagttaaaatcagagcttaagaatattttgaccgacgatgaactcgacgaaaacaagatttacaataaactgaaagacgagaacacgctggagactctgaaaaatgagtttaacgaatttatctccaacagcaatagtagcgagaagcaatttttggttaagatcaagaataaggcaaataaattgaacccgaagaaacacaccaacatcgagaacattcagaaggagataatcattaagctgctaaataaggacaatatcatcaataacctgcagaacgagaggaagcttgtcgtggtattggataattacagcgttcacaaggctaacctcgtgattcaagcatgtgaaatcctgaatatcaagctcattcatctacctccccatagcccccacctgaacccaatcgaacaggtctggaaaagcatcaagaagtatatggcctactatttattcgatacgatcaaatttatggaggagctgttcgagaaggagttctaccgcatcgtcaaccgggattcctactacaaaaactggatcagtaaattcatcatggtgaactga

SEQ ID NO: 8861 - DNA, 888 bp, synthetic construct
  source 1..888: mol_type = other DNA
ctgacgcggtccaataagacactagaagacatcctcgacgttattttctacgacaagccctccacgcaggaggagatcgctgagacactgggcataagccgcaggtacgtgacccagctgcttaaacctctgattgaagaggacattgtaaaaaggagctatgtcatcgatctcaataagtacgatgagatctatggtagctcaaacccaatttttaactcgaagcagcatagcgcgtacttcttgatcgagaacatgctgaagaacatggccgaacacgtgaaaaaggaagtgcaaatgagcttcgatgcgatcttgaacaacgatgaaaagatggccgaagaggcattggaactggatttcaccacaaacaacatgtttgaaaaagtgcggtcgtctgtggagaccgtagtgaacatcgatcctcattccaaactttctaaaatcctcctattcaacgaggcagcctataattatgagcgaatcggagactactccgggcacatcgccaaattcgtcataaatgaaaagaccccggtggatgaggagctccttgacatactgaagaagatgcacaagtacgctcaaaagagcatttcatacgcaaccgacgcctttgtgagtgaaaagttagagctgcgtggcgacctcatggatattgaagagaaaatgcacgagaagcagcatgacgctctgaatctggttgctagtcagatggccgagaatagtttcgaggacattgaaaagtacaattattatatctacatttcaagagtcgtgaaatccttcgagcggatgggggacatcgccgtcgagataatcgagctggccgcagaatttcacaaagacatcccaaggcccactactccccgcagctttagaaagtga

SEQ ID NO: 8862 - DNA, 1062 bp, synthetic construct
  source 1..1062: mol_type = other DNA
atgaagggcctggccagaatagaccaggatgtaatggactgggtggagaaggacaaaccaaaatgtgggccatatgatgctattgtcaggcccatcgctctggccccctgcacgtctgacgtgcatattgtgtggggtaatgcttacatgagcgatgcacctaaccgcatcctcgggcatgagtccaccggtgtggtggaagaagtgggggacttcgtcactgatttcaagccgggagatcgggtgattgtcccagcaattaccccaaattggaaccgcgttcctagccagaaaggcttcggacagcactgcgacggaatgggcaccggaatgacatttatcacattcaaagatggcacatttgccgagtactttaacgtcaatcatgccgatggcaacttggcgcacctgccggacaatgtgagccttgaccaggcggtgatgatatcggacatgatgactaccggcttctacggtgctgagctcgctgagatcaaaccaggcgaaaccgttgcggtctttggcattgggcctgtgggactcatgggcgtggccggggcccacttcatgggggcctcaagaatcctggccgttggaagcaggcccgtctccgtgaaggtagctaaggagtacggtgcaaccgagattgtggactaccacgagggcgacacggtcgaacaaataatggacctgacagacggggagggggtcgacaaggtcgtggtagccggaggaaacgcaaatacggtgggtgaagccctgtccgttctgaaggttggagggatcttggggaacgtaaaccactacgatggcgtggaatcaatccccctacccgcacttgcatggggcgcgggactcgccgataagacaatcagagggggcgtgtgccctggcggccgggcccgaatggagcagctggtgaagctagttgaatatggtcggttcgatagtagtaagttaatcactcaccgctttaccaacttcgacgatctctatgaggccatgatccttatgagggacaaacctcgagatctgattaaacccgctgtgatcctggagtga

SEQ ID NO: 8863 - DNA, 1557 bp, synthetic construct
  source 1..1557: mol_type = other DNA
atgaagaatcttgaaaagacactgaaaagcgtgactgaaaacccaaagtacatcttccggctgaccgtgcagggattaatggtgggcatcttcgctgggctgatggtctgtctgtatcgatttctgctttatgggtcggaacatattctgagagattacctcaacattatacacggcaacatactatacatcattcttttcttcatcgcactggccatcatgggactcctggtcgattggcttatcaaatgggaagttgattcggctggcagtggcataccccaggtgtacgcggaggtaaaggggcacatggaggccaactgggtgaagattctcttttccaaaatggtcagcggcgtgctcaccgcgctgggcgggttgagcctggggcccgagggcccttcagtgcaaattgggggcatggccggaaagggggtggcccggctctttaagggctccaagacggatgagctgagactaatcttggttggttccgctgtaggcattaccgccgccttcaacgcgcccctggcaggagtcctgtttgtgctggaggaaatcaatcatggatttgacaaaacattggtcttcattgctctggtaagcgctatcgtcagcgattttataagcaaagttatctttggtcagtccactgccctgacattccccatccacaacatccccttaggaaactattggctcctgcttgtgctgggcgttctgatcggccttctgggctatgtgtacaatatcggtatgataaagtcaagtgatttcgtcaatcagctcaaaatcccgagctggcttaaatttgtcctcgtgttcatggtgtccggtgtggtggccctgctaatccctgaaataagtgacggcggacactttatgatggacatgctggatgtggctatgccctctctgggcgtgctcgtcttcctgctagttctcaaatacttgttctccctcttctcattctcctcaggtgcgcctggaggtatatttctcccgattctggtcctgggagcctatattggggcagtcttcggggtggtaatcgtttctgtattcggattggagcatacattgatctacaagttcgtggtcattagcatggcaggattcttcgccgcaaccgtccgcagccctatcaccggggttgttttaatcgctgagatgtgcggcagtaccgagagcctcattgcaatgatcatcgtgtctctgatagcctacgtggtgcctactctcttggggaatgagccgatttatgagagcctgtacgacaggctgctgttaaagaagaacagggaatttgtgaagaagccctcaaagcacgtgctttccgagtacctagtgccactggactgcaactatattaacttcaaggtcaaagacatcccatttccaaaaaacgccatcgtagtgagcgtgatccgtaatgggaagtacgtcattcccacggaggacttcaagatcaaatatagtgaccagatccacattttggccgacgtgaatgactacccatttgttcgcgaggaaattgaagagctctttggtggctga

SEQ ID NO: 8864 - DNA, 501 bp, synthetic construct
  source 1..501: mol_type = other DNA
atgagcctcattttcaagcgaaagtccgtgcggaaatttaaggatgagaaggtgtcggaggaggtgataaccaaccttctcaaggccggcatgcaggcaccttccagttgcaatagccaaccctgggagttcatcgtggtaagcaagaaggaagataagttagccatttcacagatgcaccagttcgcgaaacccgctgccaatgcaagccatttgatcatcacggtcggaaacctgaacgaagccaaagtcatcaggatgatcgagcaggacctgggggcttgcaatgagaacattctgctgcaggcgacccacgagggcctcggggctgtgtggctgggattccatccaatcgaagaccgcacactaaaactgaaagagtacttgaacatcccggaccactgcatcccattttcagtcatttgtgttggctaccccgcccacgagagtgaaataaagattagatatgacgaatccaaggtgcactttgataaatactga

SEQ ID NO: 8865 - DNA, 714 bp, synthetic construct
  source 1..714: mol_type = other DNA
atgtataagaggatattctcaatcctgattgtcatggtctttttgatgttctcagttagcgccgtgtttgcggagtcggacgccgtgcaagacacgggtggggagagtactagcagaatcatcaatgtcaaggtgatctggaatgacgatggccaaacaaacaatcgaccggacagcgtgacagtccgccttctgaacaatgggagtgtggttgacagcgtaatattaaatgaaagcaatttctggaacggaaccttcaaaatcctcgacaatggaaactacgacgttgaggagaccggcgatctgtcctcatactcgatttccctcaccggcgacatggataatggctttgtgattacgaacactattaagcaggccccaaacaacggcagcgacgatatgatcgtggacgaaaactctacagataatagctccgacgacgtgaacggtatcattgatgactccaaccacactgttgaccagaatgatgctaaggatgagaaccagaccgaaaacatctcccaggcaaagaacacaacctacaacaataacgataaagaaaaacaggtaattaaaaaggagaacaaatctgtgaaaaagaataacacaaacatcacggggatcaaactgaagaacaccggactgcctgtggtggtgctcgtagtcgtgctattcatcatagtcatcacccccattagtcggtggaagaagtga

SEQ ID NO: 8866 - DNA, 972 bp, synthetic construct
  source 1..972: mol_type = other DNA
atggtgagtgtcaacatcgaagccaaaaagaccgtcgacgtcatgattgagaaagccgacgccctgaacatcgctgtagaaaccctgaagaatggggccactgtgctggattgtggtgtaaatgtggatggaagttttaaagcaggggaactttatacgaaggtgtgcctcggcggccttgccgatgttggcatatctatcccaggagatctgagcgagaaattcgctctacctagcgtcaaaattaagacagacagcccatccatctcaacattgggttcgcagaaagccggatggtccgtctcagtgggcgatttctttgcactagggtccgggcccgcacgggcaatcgccctgaagccagctgagacttacgaggaaattgattatgtggacagtgaagccgacctggccatcttaacgctcgaggctgacgtactgcctggtgaggaggtggcccagtacattgctgatgaatgcaaagtggacgtgaaaaatgtgtacttgctcgtcgcccccacaagctcgctcgttggatctatacaaatatccgggcgcgtagttgagaacggaacctacaagatgttggaggcgatcaagttcgacgtgaccaaggtgaaacacgccgcggggatcgcacccatcgcccccattgacccggatggcctcaaggcgatgggcaagacaaacgacgcggtcctctttgggggcaggacctattactatgtggaaagcgacgagaacgatgacatcagcgacgttgcagctaagctgccctcatctgccgcagacggctatggcaagccgttctttgatgtcttcaaagaggctgagtttgacttctacaaaattgataagggaatgttcgcccctgctgaagtggtgatcaatgacctgactaccggtaagatttacaaggagggctttgttaacgtggagctgcttaagaagtccttcggactggatgaatga

SEQ ID NO: 8867 - DNA, 846 bp, synthetic construct
  source 1..846: mol_type = other DNA
atgaaggtgtttaacatggagatcatagacatcatcaaagaggcctttatcttcccatccaacaatctcgaaaagctcgcaatctatatcgtgctgaccttcgtcatgggaatgctcgtggtggggggaatattcagcttcgtcttcagtagccagagcagtgccctgctgattgttgggcttatcttgtgcattgcggcaatcattctggccttgatcatctcaggttatcagctgaaaatcatgaagtctgggattgaccaggatgaggaggcccccgcctttgactggaagaacgatggcataaacggcattaaagtcatcgtgctcggtatcgtatactttatcatccctgccatcatcgtgggaattgttgctctgatcacaaatgttccgggcaacttagtgcaaatcattcaggaatactcgacaagtataaatgcaactgccgctgtgaactccactgcttccgcaatgccagcggtatcaagcgcgagctgggccgcgctgggcacctccctcgctattaccgccattatcgcttttgtgctgttcataatcttcgccttcatccagaccatgggccaggcacgcctggccaatacggggtctctaggcaacggactaaatatcgtggaagcagccaaagacattagccggatcggcgtcgggaaggtcattgctgtcattctgctggtgtttatagtgatcatggttatccagggcattcttggatatatttacggtcagatcccccaactctcaattatttccatcataataacgccctacttcgtattctttacacaaagggcttacgggcttttgtactctgatattgcctga

SEQ ID NO: 8868 - DNA, 546 bp, synthetic construct
  source 1..546: mol_type = other DNA
atgtcagacctaaagggcaccaagactgaggagaacctgaaggccgccttcgccggcgagagccaggcacatacaaagtatcagtacttcgccgccaaggctaaggaagagggctatgtccaaatccacgacatcttcatggaaaccagtaagaatgaaagggaacacgctaaaatctggtttaaactgctgaatgatgaagctattcctgatacaatcgcgaacctcaacgctgccgcggacggtgaaaacgaggagtggacctccatgtacaaggagtttgccgagaccgctaaggaggaggggttcccaatgattgcattcctctttgaaaaagtgggggccatcgagaaagagcatgaggcacggtaccgcacattgctggacaatgtggaaaaagagacggtattcaacaaggccgaagatattgagtggaagtgcgaaaactgcggatttatatttagcgggcccaatgcccccgagaagtgtccagtgtgcggacttccgaaagcacacttcgaagagagagcgactaacttcaaatga

SEQ ID NO: 8869 - DNA, 546 bp, synthetic construct
  source 1..546: mol_type = other DNA
atggccgatctgaaaggcactaagaccgaagagaacctgaaggctgcactcgccggcgagagccaggctcgcgtaaagtatgagttttacgcatcccaggcgaaaaaggacggctatgtggaaatcaaggagattttccaggagtcatccgacaatgaaaaggagcacgcaaagatatggttcaagctgctaaatgggggaaaggtccccgataccaaaatcaaccttgcagacgccgcggctggtgagcacgaagaatggacaagcatgtacaaaggattcgccgcaacggcaagagaggaggggctggatgacattgccgacttgtttgacgctgccgccgctacagaaaaagcccacgaagaccggtacaatgctctgagcgacaagattaaagccgggaaggtgtttaaaaaggatgaggaaatcgcctggaaatgcaacaactgcggctacatccattatggaaaggaggccccggaggtgtgtcctctctgcgatcacccacaagcgcatttcaggaaacaggataccagttacatctga

SEQ ID NO: 8870 - DNA, 1410 bp, synthetic construct
  source 1..1410: mol_type = other DNA
atgatcgaaaataacatatgcctgttaacagatagctataaggtgacacaccattacttctaccccaaaggaacagagaagatctacagctacctggagagccggctgggttcggagtttaacaagactattttttatggcctccagtatatcatcaaaaagtatctggagggttccgtcgtcaaccagcagaaaattgaggaagctgacaaacttatttccaatcacattggggaagacatattcaacaaggatggctggtattacatccttgacaactacgatggttaccttccaattgaaataaaggcagtacccgagggaaccccagttaatgttagtaacgtcctcatgagcgtagaaaataccgataaaaaatcattctggcttgtgaattacctcgagtcgttgttactgcaagtctggtatccctcgactgtggcaaccctgagcgccgaggtgcgcaagctgagcaagttctacctggaggtgaccgggtcctcaaaagacaacttagacttcatgctgcatgacttcggctaccgcggcgctagttcaaccgagtccagcatgctggccgggagcgcccatctgctcagtttctccggcaccgacacgatccctgccctattgattcctaagaactactacaacgattccaacttgtacggatttagcgtgcaggcaacggaacacagtgtgatgacgagcctgggtcctaagggggaatttgaccagattctaaatgtgatcgataatgccaagaatggaatcctctctatggttatagatagctatgactacaagaactttttgaccgaggcgggaaaaagcgatagccaactcaacaaagctatcaacgattttttggccgtagaaggcaataaggtggtgtttagaccggacagtggggagcccgtgagcacaaccatcgactgtctgaacatcctgggaaaagggttcggctcttatctaactgacaaaggctataaggtgtttgactcaaatatcgggctgctgtggggtgatggcctcgactatcacaagattagggatatccttttcgcgatgaagtctaacggctgggcggctgagaacattatcttcggaatggggggcggcctccacacctatgtcaacagagatactcagcggaatgccttcaaatgctcagcccagctgcgtgacggcaagtggttcgacatttacaagaatccactggattccagtaagaagtctaaaacaggtaggttcaagctgatcaacgaaaacaattcctttaagacaatctcaattgatggatacggggacgactgcctccgaactgtctttaaaaatggaaagctgctcatcgaggacaccttcgcagacataaagtccaaaacgcttaactactccaacttcctgtga

SEQ ID NO: 8871 - DNA, 3657 bp, synthetic construct
  source 1..3657: mol_type = other DNA
cttcacaagattcgaaaagccattatcatctgcctgatattactgatcgtattcattccaactgcctacgctgcggacaatcaaacaaatttggggcttaacagcaacgatgtcatgctttcggattcatactattttgacgcgaacgttgacgatgacttggggaatggctcactggattttccttacaagcagctgaagagcaacagagtgatcgacaatagcaccatctacctcaacgatggaatatattacggctttaataaagagtttagtaatctgacggtcatcggtaaaaacagcgagaaaactatcataaagaacatccaattcgacattaagggttctctcatcattcagaatgtcaccctgatcaactctaaaattaccaataatgccaacatcaccctggtgaacagcatcttcaaggattctagctcattcatcggaggagttctcaagagcaacccaaatacttttgtaacgattacgaactgcacatttctcaacaatcatgcaaacaggtatgccggagtgatctacagcaacaattctaacttgaacatctgtaactcaagtttcgtgggcaattacgctaactactatgggggcgccatttactgcgagaagaacagcaagctgacaattataaacactgacttcacaaataaccacgcaaaaaacgacgctggaggagcaatctacggtatggattccgatattcttgccaactacctgagcatcagcaattccagctccacgttcggtggtgccataactgccctcaacacaaatctgaacctgactaacttcaacgcgtggaacaacaaagccaagtatcggggcggggtgatctattccgtgtacggatattatattgtgatgaactccacattcgagaacaacacagcatcggatggcggggcgttgttcatcgactccccccattcagtgaatgtgagctcgaacaagttcattaagaacaacgctctcaatattgggggagctgtttatataatctccaataaaaattacttcattcccgacaatctattcctgaataacagcgccagttttaacaatgacttctacaaaaccatgttgtccaatctgaccatcggcaacaacaactacgtgctcatcaactacaatggaagccacatagggaaccttcccagcagctacgacttgagggaactgaatcagacaacctcggtcaagaaccagggaagcgggggcaactgttgggcctttgccgcaatcgccagtctggagtcctgcattctgaaggcgaccggaaacgcatataacctgtctgaagaaaacatgaagaatctcatgacattatactccaattacggctggaaagtgtctcccaacgacgggggctacaccagcatgggcatcggatatcttacttcctggctcggcgccataaacgaaagtgacgatagttattacgagagtagcgcattatccccagtcctggacagttttattcacgtgcagaacattctatttcttaagcgcaacagttacacggacaatgacgaaatcaagagagctatcatcgaacacggtgctgtgtcaacaagtgtattctggaaggtcgagaagtatgctaatggggagaattactacaattacgagtatgcttcgggctctaatcacgcagtagttattgtcggctgggatgataattattccaagaacaactttattaagaaggctccaggcgatggagcctggatcattaaaaacagttggggtacggggagcggggacggcggatactattatgtgtcttattatgacgctcggctggcacctataaatacaagcagcgttacctacacattcgtgctggcagactcgattaaatatgataagaactatcagtatgatatccccggcatgacggactatctactgaatagttcggatcgtgtctggtacaaaaataagttcacagcgacggacgatgaatatttaaccgcggtgtccacatacttccagaaagaaacttcctgggacttgtcaatctatgtaaacaataagctgatgctgactcagtcaggcaattctagcgccagctactcaaccattgaattgaaccgattcatcattcttaagaaaggggacatctttgaaattgaatttaaaatcactgtggacggggatgcaggggtcccgatctccgagatagcttctcttaacaacctgttttacggtgaaaatatttcatacgtgagttatgatgggaagaagtggattgacttgtttgacgtccggtggacctaccctggccacacatataatgattcgcaggtcgcttgcatcaaggcattcacggtactgaataagatcaactccaccattgtcctaaccattacagatgagaacaaccctgtggaaataactgccaaagttttaaaccagtatggcaaccccatcaaaacgggtaaagtcaccttcaacatcgagggaaaagattacatcgctaagattaataacggctttgcaaaactcatccatattttcaacggcaatgagaacaagctaatcatcgcctccttcagcggggccggctttatcgagagcttctccgacatcactttttgtccagagcaggttagtattaaggccagtgacatggtgagctattacaacaagaactcttactccatcactctcctcgacatatacagcaagccggtggcagataaggaggtgaaattcaagatcaacaatctggaatacgtggccataacgaatgagaacgggattgccgccatcacctttaacctgtatcctaacgtgtatgacgtgatcatcgggttcaattctatcaatttcgataattacaacgtgaccaagaaaatcactatcaaatctacaatttccatcccagagaataccgtgtatacctataattcaaaatatcccatcaaactcctcaacaataatggaaatcccctgtccaattgtaagttcaaactggtgattaacggcataacaaactacgcccataccgacagcaacggggcctttaaatacaacattaacctgaagccgggaaagcacacgataacagttatcaacaccaaaacaggggagaaatctacccagaagattaaagtggtctcacgcatcactcaaaataaagacttttcaatgtattacggtgccggtaggaactacaaagtcaaggttgctgacgattacggcaaggttaagaagaacctcaagatctcctttcgcgtgaacggcaagacatactacagatacactaacgagaaaggttacgcttacctcaagatctccctgaagcctggcaagtacactataaccgccaattataaaggatacaaagtatccaataaaattcgggtgaaacccacaatcataactaaaagcattgccgtcaagaagggaaagaccggcaagttcaccgccaagctgctcaataacaaaggcaagatcctgaagtacaagaccatcaatttcaagttccgcggcaagacctacaaagtgaagaccaacaagtacggaatcgcgaccctgaagatcgctaaaaagtataaaatcaccaggtactcaataatcaccagttaccggagcgagaagataaagaataccattaagattaaaagatga

SEQ ID NO: 8872 - DNA, 699 bp, synthetic construct
  source 1..699: mol_type = other DNA
atgctcaccattaatcagtgctatttagattttgtggataagatcctgaagcaaggaaaggaaacttacaaagacagcaatcaccatctgatagagtcgctggggaacttctatatcatcgatgatccactcgatttgaagttcagggctaaatatcagcactacaccacaaagatgatgcttgacgacatcaagtctggaaagtttgacatagaggggtgtcccattaaaagcgatgcactctacgagtatgtcaagtccgcggagaatccggacgatcagggatttgtgtacacgtacccaaacaggatctttgcacattttgacgtggatcagttcaacactatgaagaaacgaatcttgactgccaccggtagtaaccgggccgtagccgtgacaatcgaccctgaactggacgctgacagagaggatattccctgcctccagttcctgcaatgtattgtccgggacaacgagctaaccattcactgcatattccgcagcaacgacatcttcggtgctttctactccaatatgtttttcattgcgtatcttggcctgaaaatgaaggaagaagtgaacaaagaaatcgtcggggagaagctgaacttcggcggcgttcactaccactcaaccagcggccatatctacaatacggacctgaaggccgcccgcaaactgatcaagacaaacaaatga

SEQ ID NO: 8873 - DNA, 573 bp, synthetic construct
  source 1..573: mol_type = other DNA
atggagctggaagaatatctggagtacgtaaacagcggaaagcggatctatgccggctccacacaacatctgttcatgcacgaatccctgaataacgccttgaagatcacccacaagatcaacagcgagtaccacactcctgaagaaattcagaagttatttgctgagctcaccaataaacccatcaacaagacccttgggctaattcctcccttcaatacagacttcggtaaaaacatccatattggggagaacgtgtttataaattcgggctgcaaaatgcaggaccagggtgggatcttcatcgatgacgaggtgctcatagggcacaacgtctgtctgctcacactgaaccatgcaaaagagcccgagaacagggctgacatgtacccaagccccatccacatcgaagacaaagtttggattggatcaaacgtgaccatccttccaggcgtgacgatcggcaagggcgccattgtggcggcaggcgccgttgtcactaagaatgtggagccagagacgattgtgggaggagtaccggtcaagtttataaagaatgtcagtgatgattga

SEQ ID NO: 8874 - DNA, 573 bp, synthetic construct
  source 1..573: mol_type = other DNA
atgacaaacgagaattttgcgaagaagattaaggacatacgcgctagacagaacatgaccattgaggatcttgcggagcgaagtggggtgaagcttgaagtgttgaaggccatggagtccggagaggttattccatccctcacccccctgaccaagatggccagggccctaggggtgcggttaggcacattcctggacgatactccggaactgggccccgtcgttacaaggaacggaaaaaccgaaaattccctgtacttctcagggcgcgaggatgtgacgaacgcaactaacctcgagtttcacagcttgggagctgggaagatcgatcggaacatagaccctttcatcattgacatcgagtttgaggagggtgaaaaagagctgagcagtcatgaaggcgaggaatttatctatgtgctggagggtgaaatcgaagtcatctacggaaaggacagcttcactattggcaaaggcgacaccatcttctacgactcggtagtgccacaccatctccacgccagcggcgaaaataaagcaaaaatcctcgccgtcctgtacacgccctattga

SEQ ID NO: 8875 - DNA, 156 bp, synthetic construct
  source 1..156: mol_type = other DNA
atgtttgagatagagcttaagcagcagaagattagcaacggcctgatccggtttttcaccagcatcctagacctccactccctcttgctgtgcctgcaagaatacttcacaagtatgaataacgtggaaatcaaaaaaatggaggtcttccagtga

SEQ ID NO: 8876 - DNA, 1665 bp, synthetic construct
  source 1..1665: mol_type = other DNA
atgagcgagctgttcaccgagctgcccctcgggaagttcttcgagtcaatggtggagaagcagcccgatcatgagtttatcatctatccggataggaacctgagattcacatataaggaatttgatgaacgagtggacaatctcgccaaaggaatgctagctattggcattgaaaaaggagatcacgtgggcatctgggctaagaatgtccctgaatggttaacctacatgtttgcaacggcaaagatcggagccaccattgttaccgtgaatactgcttatcagtcccatgaattggaatacgtgcttggccaatctgacatgcgcgccctggctatgactgatgcctttagggacattaactactttgatattataagtgagcttgtacctgaacttaagacgtgtgcccgcggccacttggttagtgagaaatttccccacctgaaattcgtgttccatgtcgggcaggaaaagcatcggggcatgtacaacaccaacgagctcctgctgctgggcatgagctacgacggagaaaagtaccaggaaatcaaggactcagtctcccagaacgatgtcatcaatatgcagtatacatcgggcacggaaggtttcccgaagggtgtcatgctgaccagccgcaacatcgtaaacgatggttattacatcggggagaatatgaattacacaagcaatgacaagctactgctccaggtgccactcttccactgcttcggaaccgtacttggggttatggcggttattacgcacggctccactatggtggtcctggaagagtacgaccccctgttggccatctcctccatccagaaggagaagtgcacagctatttacggggtccctacaatgtttatcggcatgatgaaccacccaatgttcgacatgttcgacatgagctcgctgcgtaccggtatcatggcaggaagcacttgtcccgtggagacaatgaaagatgcgatagaaaaaatgaacatgaaggagatcactagtgtatatggactgactgaagcggcccccggcttcacacagaccaacgctgccgacagctttgagaaaaagatcaacactgtgggacggaagttcccaaatatcgaagtcaagatagtggaccctgagacgggggaggaagtgggcgttggagagacaggcgagatcatgtgcagagggttcaacgtgatgaagggctattataacatgcccgagaagacagccgagaccatagagcccgacggatggctccactccggcgacctggcaaccgttgacgaggacggctattattcaattgtcggtcggatcaaagacatgatcattagggggggggaaaacatttacccgcgggaaatcgaggagtacctattcaccaatgaatgtgtgcaagatgtgcaagtggccgggatacctgacgagaagtacggcgaaatcgtcggggcctttatcattaaggaggacgggtttgatgatgtgactgaggcagacattcgggacttctgcattggcagcatcgcaagatacaaagtgccaaaatacgtgttctttgtggatgagtttccactcaccaccagtggtaaaatacagaaatacaaattgggagatctcggtctgcgattactcgacgagaggcgccagagaggagagctgtga

SEQ ID NO: 8877 - DNA, 3609 bp, synthetic construct
  source 1..3609: mol_type = other DNA
atgaggaagaataactatctggtcttcctactcatattctcactgtttctgacgatttcttccgtaagcgcccttaacgtggacgacaacgcgacaatagaagacacaaatttgaacagtatggatgtgaacttcgatatctccaatggcgagtttaatagtatcaatattgataaaacgttcgatacaaatatcgacgctgatgccggaaaagacacaaatatcgaggaaaagaccatctccatcactaattctaacaactccatcctgtccaccaaagagaacaatgtgaagaacaattttaagctgaactccggttccctgagagccggcaacataatctacatcagttctgacggcactggggatggcttgacgagtaataatccaacaaactgggcgaacggatacatcaatgcccagtcaggcgacacaattagcttcctggacggaacctataatctggtaaacgtcaacttaaacaaggaccttgtgctcaaagcgttcaacgaaggaaacgcaatcatcaacgccaatcgggccggaaacgtcttttcaattaacaacaaccgcaatataaccataaacggccttacatttatcaacgggaagtcgacgggaaatgggggcgccatctcctttaacagtggcgccctaactgtcattaattgtcgcttcatcaataacacggccagcagctatggtggagccatctacctgcgcgatggcaagcttaccatcgtcaatacaacgttcgtaaacaatagcgctgacgttggcggagctgccatcgcagacaccatcagtatcactcactctgatttcattaataacactgcagacggttctgggggcgcgatccgggcctatgacaacctgacaattgttgactcgatctttaccaacaacacgtctatcaacgggcagggtggcgccctgtacacgccaaacgttgacataaataactcaatctttgttaataatacttcactgaatggtggaggggccatatactccagcaacgagtatctgattaacaacagcgtattcgtgaataactcggctattgatggggacggtggcgcagtgtccagctaccgtaccggcaatatcaacaacagcaacttcaccaacaactctgcgaagaagagcggcggagccgcctacgccagagagagcattgagattgataattcgagcttcaacaaaaactatgccggggctggcggagccgtccgggcgcaaagcgaggttaatattactaactcaaacttcaccaacaacgtggccaacaacgagggcggagccatatattctaatggaaagatcgtggttaacaatctgacattcatcaacaactccgccattgaatccgatggtggagccatattcagcgtcgaggatgtggaagtcgataattccaatttcataaacaattatgcaggtgaactgggtggggcaatcagcgcttacaatgaactgaccgtgaacaattcgaatttcaccaacaacaacgccaagtattacgggggcggagtgtacgctaatgtgttgaatagtaaccgagataattttgttaacaacacggcagagtacaacggcggcggagcttacgtcttctctaatgctaacattaatgggtcaaattttgattcaaacaccgctgtgaatgggggaggcctgttcagcactggcaacagcagtgtgaataactctaacttcattaataacaatgcctatgacggaagcgccattatctccggaaacctgcatttaaacaacaacaacctggagaacaacacatcgcgaggctacggaatcgtctacgcggagaatgcaacgattgagaacaacaaatttatagataacgatgcactcgaagacaaagagatctacgtcctaaatgagttgagtcagagcaacaacacgctgagccctaaccagatagaaaacatcaatgctaacacagtcaaagtgaacactattaatggtacgacctatttggtggacctcgaggacgggctgaaaggctattgcctgcagaggacactcaacttccccgattacgtatatttactcaataatctgagtttagcacataaccaactgactggggaggacgtgagcgaatacttaaagattctgatctacaagtactacttcagcgacaagaaggacaatatcacctacagtctgtgggactttacagacagcgatttccgaaattccaataacaatctgactaagaaagtgattgcactgtataattcgggcttccgggtccccgacagcaatgctagcctcatcttggacaatgggactcaggtactctttgacttttatagtgctggaagttccacaacccagaaccttttcctctttaatattacatacatgggaaacaattatgacatgaaggtggaaaagattacacttaacaagtctgtcatcaacggaaacaaaacaaagttcatcattcgggtcacaaacattggcgatacaattctccacggcgttactgtctttgaaaaagagtacgatggtctggtttacgattcatacattgacgagggaaataattggaactataacaatgggaaatggatttacaagaaacaactcaacatcaatgaatctgcagagtttaccgtggtatttaaaacaatcaaatccggcaatttcacaaacatcatcatcagctcatccaacgaaactacaaacaagaccacgaacaacaccactaccgtgtacaccccgaatctaaccgtcgagaagctgagcttgaacagaaccgtgtatgtgggtaatcagactgtctttactattgttgtccgcaataccggtgactgcgacctcggcgaggtgtttgtcgtggaaaaggctccagagggtctggcttacagttcattcaaaggcaccgactggtcatacaacaacggcaaatttacctatgggaagactcttaaggtgggcgagtctgtgtcctttgagatcgtgttcgacgctgttagttctgggaattggacgaatgtggtggtggcggggtccaacctgacagggaataagactggtaataacaccaccaaggtgtacaaccctgggttgaaggtggagaaaatcaccttggaccccgtggtgtctgtgggggagatcacaagctttgagatcatagtgaccaacaccggggattgcaagcttggcgatgtttttgtccatgaagactcctatgaagggctgaggttccactccttcaggggtgatatgtggaagcagaagggggatactttctattaccagggcgtgcttaatcccggcgagtcagcctcattcgtcatcctctttactaccctcaagcctggaaacttcacaaacattgtaactgccgggtccaatgttaccaacaacaccaccaccgaaaacaagaccaaagtaatagaaaatcacacgaacaataatactaacggcatcaataaaacagtgaataatgaaaccaaggaggtgaacgtgcacaaggttgacacctccagagccaccggcaacccgctgctagcactcctcatggtgctgctcatgattagtgtgacctctgtgcgcaagttcaaaaaatga

SEQ ID NO: 8878 - DNA, 966 bp, synthetic construct
  source 1..966: mol_type = other DNA
atgacattccttgataacatcagcgacaaaattaactacgaaacgctgaacaacattataaaatttgagtttgacggtgtctcaaccaactggatggacgaaaacgatcccttcattgaacgaatccagaaatcgtccttgaacaaggtgttcttaaaagagcacatcctaaaggagatcgagatcaagaacattctcgatgagggcatcgactttttaaacagccaaaaatacgttaatgcaatcgaaagctttgacgaggtgctgttttacgatgaggggtatgccgaagctctcatcaataaatcatacgcccttttcggacagaaacactttgtcaagtctctgcggtattacaagcgggccatcaaggtgaataatgacctgaaagatgtggagtaccataaactgctgctcagctgctccaataaggaaagaagtaatttctcaaagcttaagctgaatatttactctggggacgaactcttcgccaaaggagagtacaagaaggcactcgaacgctatgatggtgctctggctaatccatcgctgttcaaagacaagatcctcttcaagttgctcaacaaaaaggcgaccacactgctcaagctcaacgactttgagaatgcactggcctgttttaaggagtctctgaacgctaagatttccgactacgcatattacggctgcggcgtatgccagtacgaactgaagcttgatggggcgagcgagagcctaagccacgccaacaatgtgaagaagaatcagctgctggaaaagggactgatcttcaacgagattggcttgtatgagaacgccctgagtactttcaacgagatattcaacaaccacttcaaggtcgacgagctgtatatcaagtcccttaatggcaaaatgcatgccatgaggagtttgaaaatggatatggacgaaatcgaggatatatattccatattgctaaactga

SEQ ID NO: 8879 - DNA, 375 bp, synthetic construct
  source 1..375: mol_type = other DNA
atgaagttttcaggcttcatgaacgtctaccagctggatgacatgagctgggaataccagttcggaggcaaatccctgaaggcccaaacattgaaagaactcgaggtgctggtgggtctatacgggctgaagtggggggtcctggacaaaaatctggtggagaagtctcttgagatcgataaaaacaacgtcaccgggttcctgaatgtttataaaaaggagggcttctggcactatcgcggaacggacttgaagtcccatagtctcgaggtgttaaagaagaaggtgctgagcgaaaacctcgattgggtagaaaccgacagggagcttgcatacaagaattggaaactggacctccggaagtttaaaaagtga

SEQ ID NO: 8880 - DNA, 843 bp, synthetic construct
  source 1..843: mol_type = other DNA
atgtccgtgttcgtgcccggtcacgtaaccggctttttcaatattgagaatcacgagtccaagctaaagaacggatcttgtggcgtgggattcctcctaacaaagggggtgatgacaacggttattgagtcagacaacttcgagtttgaggtgaatcttggcgacgacactatcgtctgcgaggtcctgaggattttgaacctggataacagcaactttaagatcatacaggatatccagctgcccatcggggcaggattcggaacctctgctgccagcgctcttagtctgaccctggccctgaacgatttcctgaatctgggttactcaaaagaactctgcgggcaaattgcacacatggctgaagtgaacttgggtgcggggctgggcgacgtaatagcgcagacaggcagcgggctcgtgctccggacaaaatccggcgcaccggggatcggcgagatcaaaagcttcaaccaggacgtgtacatagcctacaaaactttcggaccaattgaaacctcagagatcatcacggatgccaactataagaagatcatcagcgaagtcggtctgaagtatctggaactgtttgaagagaagcctagtctcgataactttctgatcttttcgaagaagttttcctgcgagactggactcatgtccccagaagtgaagaaacagatcgagtacttcgaatctatcgacgacgtcctgggcagtagcatggccatgcttggcaataccgtcttcgccctctcgtacaatgaggacaccttcaaaaagttaaacattgaagagttgcatatagataaattaaataataacgggattgtttatgactga

SEQ ID NO: 8881 - DNA, 534 bp, synthetic construct
  source 1..534: mol_type = other DNA
atgatcaaacttagctacgacataaagaactacagaaagcagatcctggacctgactcagaacggagatactattatagaactcgggtgtcatgtgggcaacacgacaaaaatcctactggacaatttccgagactccaagatcatggcactggataacagccctgaagccaccataaaaatgaatgaaatcttgtgcgataacttggagtttattaatgctgacgtccggctccacgaaaccctgctggaggtattcaagcgcatccagaagtgcgatattctgtccatcgatctgggtggaggctatcatcccgacacagtgttcaaggtgttctacatttggtcctcaacctttaaaccaaagcacacactgattcggaacaggggcattttagagttttttaactcggccgggagcagtgacgaggactacgagagttgcgagggcttcctcgactcatatcacgatagcggaatccccccacaaatcaaagagttcgaactctggaccccgaatcttgggaagtattga

SEQ ID NO: 8882 - DNA, 792 bp, synthetic construct
  source 1..792: mol_type = other DNA
atgataggtaagaagatccgcctggagaggatcatcaaccgaaataccggccgtactgtgattgcaccaatggatcacggagtgtcaagcggcccaatccctgggataataaacatggatgagaccgtggaggagatcgctcagggaggagctgatgccatcctgatgcacaagggcatcgtgcaacagggccaccggggttatggtaaggatatcggactaatcgtccatttatccgcttcgactagtcttgcaccggacccaaacgacaaagtcactgtcacaagtgtcgagaaggccattcagctgggagccgacgcggtctcaattcatgtcaatctaggaagcgagacagaaagcctgatgctgcaggagctgggccaggtggcagagacgtgcgactactgggggatgcctctccttgccatgatgtaccccagggggcagaaagtggaaaatgaacacgacgtggaatttgtaaaacacgcggcccgcgtagggtccgaactgggcgtggacattgtcaagaccaactacaccggcgaccctgatacattcaaggaggtggttgaaggtgctatcgtgcccgtggttattgccggcggccccaaagtcgaaacggacgaagagttgctccagatggtgagagacagcctcgacgttggcggggcaggggtggccttcggacggaacctgttccaagccgagaaccccgggaagattaccagagccatctccgaggtagttcaccatgatttggatgtggaagaggctctggagtttctcaaatga

SEQ ID NO: 8883 - DNA, 1131 bp, synthetic construct
  source 1..1131: mol_type = other DNA
atgcaaaacaagttcgcgtggataagtactcctgacgagctttgggatgataagaaggagatgatcaccaccgcactggagagcggtatcgactacgtgctggactttgacgacatcgaagagattaggaaacttggcaatgtgaagatcattgcaaatactgatgatgccgatatctacctcgtcgggattaacggggagggagacggctttgtggagttgaatgacgacttcaccgacagcattgacattgctaacgcaaagaaagccaagagcgaaggaaagactgtatgcgcctatataaagataacggacaaagcccatgagcaacttgccgtcagactgggtagcatcgtggattacattattctgattggcaccgactggacaatcatcccactagagaacattatcgccgacctgcagaagctggacgtcaagatcattgccgcggtgcgggacgtggatggggcccgtgtcgccctggagaccctggagcacggaacggatggcataatattcgaggcaaatgacttcaacaacatcaaaaaaatcgcccagaacgttatcgaagcctcacaggtaaagtacgaactcaagctagctacggtcaccaaagtcaaacccctggggtcaggcgatagggtttgtgttgatacaacggacatgatgaagcccggagaggggatgttaatcgggtcctactccaaatccatgtttctcgtgcacagtgaaagcctcgagagtgaatacgtcgctagccgaccattccgagtaaatgcgggccccgtgcaggcatatgtgatggtgcccggaaacaagacacgctacttgtctgagctggtggccggcgatgaaatcctcatcgtcaataccgaaggtgaaacacgcaccgcttatgttggccggtcgaagatcgagagaaggcctttactcctgctggaggcgaagtatgaaggtaaaactatcagaacactcctgcagaacgctgaaaccattcgcatagtggatgagaacaacaatccattgtccgtggctgacgttaaaccgggagataaagtgaaggtgtatattgagactaatgcacggcactttggcatcgctatcgacgagacaatcattgaacagtga

SEQ ID NO: 8884 - DNA, 558 bp, synthetic construct
  source 1..558: mol_type = other DNA
atgagtcagctccgggcatttttagctatcgaccttgacgacgggctgaagccgaagattaacaagattattaagcagttcaaacagattgacgccaaaataaggtatgtggagctgaataatatgcatctcaccctcaagttcttcggagagattgacaccgatggcttggagctgttggaaaataaaatcgccgatgtggtatctgaatttaaacccttcaatataaagattaagggctgcggcgcgttcccaaactacagccacataaaggtgatctggatcggaatcgatgaggattccatcatcaaggaactgcacgacaaccttgatggggagtttgtgaagctgggtttcggcaaagataaaaacttttcaacacacctgactatcggaagaatgaaaagtgccaagaacaaagttcaagtccgctccacgatcggggaatttagcgacattgagatcggcgagatgacagtgaacagcatcaccctgaaaaagtcgaccctaactccctccggtcctatctacgaagacctgaaggtcttcgagctctga

SEQ ID NO: 8885 - DNA, 1356 bp, synthetic construct
  source 1..1356: mol_type = other DNA
atggactacagtttaatcctgaatgacatcaagcctacaacagacgagaccaaagagatcaatgaagtaagctcaagaataatcaacttcctgcaagtgctgtgcgatgagaataacataaatgcgaaagttaacctcgtggggagcgtcgctaaaaacacggctcttaagggcaaatccgacattgatattttcatagcctttcccctggacactgataagctgtatctgaaggaaaccgggcttgacttggcccacaaatgttgcagggagtttaaaagcgtgccagaacaccattttgcctcacacccgtacgtcaccgctgacatcgaagggtacgaggtggatatcgtcccctgctacgcaatcgaggacggaagccagctaaagtctgccgtggatcgcacaatactgcacacgcggttcgtgaaaagcaatttggtggagggacaggaagacgaggtgctgctactcaagagattcatggcaatgaccggcacatacgggagcgagtttaaggttggtggattcgcagggtatctgtgcgagctgttgattatccattacggaactttcgaaaacacactcaagtcagcgatcaactggcagtatggccatgtcattgatctggagaattatggcacttccaggttattcaatgatcccctgattgtgattgatccaaccgacatgaaccgcaacgtaggcgctgcactgcggattaataagctctctgaatttatccagtcggcccgtaactacatcttctcggacaacaagaagaactacttttaccctataaagcgaaatctgaacaagaatgaactgataaaggagtttaatactagaaatagtgatattattgctattaaattcaacgttccgaatatccccatcgatacccttcatccccagctcaagaagaccacggaggccctcgaacgaaagcttaatgacgaggaatttaacgtgtttaaggccgactattggagtgatgaactgttttcctgtgtcattctccttgagatggcctccagcaacctaaacgacatcaaagtcaacgtaggccctaaaatcttcttcaataaagcgtgcgagaacttcgtgaaaaaatacggtcgggaaaactgttatatccaggaggatttcttggttcacacacaaaagagggacttcaacaacgccctgaagttgatcgagcacattttcacctccgaacacatcggtctgatcaaggtgggaaagaacctgaaaaagagcatcattaacacctatgagtttatcgatctcgacgaaatctccagtgaggagttcctcgacgactttatccatccaggccagcacataattcgctga

SEQ ID NO: 8886 - DNA, 552 bp, synthetic construct
  source 1..552: mol_type = other DNA
atgagtgagattaagaagctgaccgccgacgtggatgtcggggagtattttgaaaagtatgtggactttgagaagttcagcaagctttgcatcgaggagcaggaggagctcgggtacaattggaactaccctccctttgattttgacgtcgaggaactctggaaaagctacaacaagcttaaaattatcgcttttaaaatcgatttctccaaagaagaattggaccacaccttcgaggagaaggaactggagttcgtgttaaaaagattcgagcggataaaaggccgcctgatgaatgatgtttatatgctggaaaatgaagactcaatgggactctatatgggcaagtgcaacctctgcatgcgatgtacacgggagtttggcatgccctgtaagatgccagtgaagatgaggtacgccttcgaaggcctgggtgcagacgtggataaaacgattgaggacctattcgggtacaagatcctgtacgcgcataacggtaagctgccggaatacctgatcttcgtaggaggattgctgtatgacaagaaatga

SEQ ID NO: 8887 - DNA, 687 bp, synthetic construct
  source 1..687: mol_type = other DNA
atgatcgtcagtgtgatagggggcaccggcccacagggcctgggcatcgcagaaagactagccattgccggactcgaggttattgtggggtcccggaaggaggaaaaggcccttgacatagtggctaaggctaaggaagagtttgcggactatgacttgaacatgaccggtatggcaaatgaggatgccgcaaaggccggcgatgtactgatcatcaccgtccccctcgcggctcagaaaccgacgctggaggggatcaaagagttttgtaatgataagattgttatggacgccactgtgccattagaaacagcgattggtggaaaacccttccgcttcgtggacttgatggaagggagcgccgctgagaggacagccagcatactgaagggaaccggcgcaaaagtgatatgcgctttctgcaatatttcaaactcgcatctggccaacatccccgaggaaatcgactgtgactgcctgattgccggggatgataaggagagcaaagagattgcagctgaaatcatcgacaaaatccctggagtcaaaacaatcgactgcggcattctggagaaagcacggatcatcgagaagatcacgccactgctcataggacttaacatcaagtacaagtcccactacggtgggctccgaattactggcatccctgccctggataaggaatga

SEQ ID NO: 8888 - DNA, 624 bp, synthetic construct
  source 1..624: mol_type = other DNA
atgaaagaaatcaagttcaacctcgacgagaatccctttatcaacttcctaagcgcaaggtacagcatgagtgctaagatcaacgtggagaaattatggaagtggtgccatgagaacaacaagtcctttttcatcatgagtctgggctgtctgatgaacgccgtaaattcagtgccggaactcaaaaggcgcataatcaatgggaaggccattgagcacgactacctggacggcgtgtcgccaattatggatgaagggaataaaatttaccgagagatgcgggtcaaaacaccacaggagtttaatgacattcttaagtggcacgattatataaaggactactcaaagaacattctgagcgggaaggaagagggattcaccatcgaaatggagaagagagatttggagaatatcgcgaacttcagctgcatcccttgggttgacttcgatatgattactaactgcgtcctgtccggtaaccaaatccagcccctgattacctggggaaaagtgaatgaaaagtatgaaatgagcatatccatcacggtcagccacatcttcgtgaatggccgggagctcggctatttttacgagaacgcccagaaggagttcgacaaattttga

SEQ ID NO: 8889 - DNA, 1332 bp, synthetic construct
  source 1..1332: mol_type = other DNA
atgaaagtgataatcgtcggtgggggagctgggggtatatccaccgcttcaaacatacgtaaactggacgagaatatcgagattacagtcatcacacgagataataaagtcgcctactccccatgtgccattccctacgtattgtccggcacaatcgaatcttttgacgacattgtcatgcgcaccccggaggactataagaacaagaacattgatgtgattattgaggcagaggtgaccgctgtggacagcaataaaaaaacagttacctaccaaaagaacgggaaggaaaccgtcatggattacgacaagttagtgctggccactggcgggaatccttttatcccccccatgcagggcgtggacttggacggtgtattccggattaggaacatagacgatggcatgaaggtgcaggaagcgcttaaggatgctaaatgcgccattgtcactggcgccggcctaattggcatcgagatcgccttcgcactgaagaaacgcgggctcaacgtgatcctgagcgagatgctgccccagatagtcccaaggtcgctggacaaagacatgtctgatatcctggtgaagtatcttgagatggagggaatccaagttgtgctcggaaagcccatcaccaagttaatcggtgatggaaaggttgagaaggcatgctttggagatgaggatatctacgacgcagacatggtgatcatggccacgggtgtgcgcgcggagttggatctcgcggagatggccggctgtgaaatcggacggtgggcaattctggtcaatgaccgaatggaaacgagcgtcgaggacgtgtacgccgtgggagattgcgtggagtcgaaggatctgattctggggtcaaacaccatctcacagctaggcaccactgcagttcgggagtccaaaacactggctcgcaccatctgcggcaagaagtctaagttcaatccggtgctcaacagcatggtttccaaagtgggggacctggaatttggggccgtgggctacactaccagtttcgcccaacagaatagaatcatgcctgttgtccagaaggtacaggccctgacaagagctcggtattatcctaacgccaagcccatggacatcaaagtgatctgtgatgggaacggaacgattattggctgccagatcatagcggaagaaagggtagccgaaagaattgacactatgacgctggctatcactgagggcctcacctgtttcgatcttagcaacatggagttcgcttatgcaccacctgttagcatggtgacagacccactcatactcgccgtggaagaagtcagtaagaaattcagttga

SEQ ID NO: 8890 - DNA, 981 bp, synthetic construct
  source 1..981: mol_type = other DNA
atggcggcccatggacatggccatcacgggcacggaggccagatgacacctgagcagcagaaacagatgatagagcaggatctgagactggcgaagaatctcggccagatcaaacacaagattgtggtcatgagcgggaagggcggagtgggaaagtccaccgtggccgccaacatcgctgaaaccctgcagaaactcgggtttaagacaggaatccttgacgcagacattcacggcccgaatatacctaaaatgctcggggtggacctgtatggcgaacaattcaacgaataccaattcaaggtctttaaggagattactgaatccggaatggcagataaggacttcaagaacgacgaggaaaagctagcgttcatcgaggccaaaaaggaggaatataagcactccatgtttccagtagtcgctcccagcggtctaaaagtcatgagtatggccttcttgctggatgggatcgacaggcctatcatctggcgcggcccccagaaaacaggcgctatcaagcaattaatctcagatgctcattggggtagcctggattatctgatcatcgacaacccgccaggaaccggcgacgagcccctgaccgttttgcagaccatccctgatgccgatgcagttattatggtcactacgcccaatgtggtgagccaggaggacgtgctgaaatgcgtaaaaatggtggaaatgatgaacatcaagcagattggtctcatagaaaacatggcttactacatctgcccacactgtgacgagaagctttacatatttggcgaaggtaacggggaggcattcgccgaggaaatggagatcacgtacctgggcgacctccccattgaggaaaaggtgagtgatgccccaaataatgagggggccatttcggtcattgaccccaacgacgaggtgtcaaaacggttcgtggagatcgttaaagatattcagaaggagtttataaaggagtga

SEQ ID NO: 8891 - DNA, 396 bp, synthetic construct
  source 1..396: mol_type = other DNA
atgaaactcaaagaaattaaacaccccgagttgaagaatcacatcaacatgatctacatgcatggtgagaaccagaacaaaaccgcaatcaataagaccgaggaggagatcaagggctatatcaggaataaggaatttataatcagcattgaaaacggcaagccagtgcggattccctatgccaacgacggggagtatctcgtaccaatctatacagacgaaaaggagtacatcatcgccatggattacttcagcctaaatgacatggctgaaaacaaggagtacataattgagaaactggattacttcaagaagctgaaaaaggaccctaatttcctgggatacattgtgaacattgcgcgcgtctcctacatcataaacccgacgcttctgtga

SEQ ID NO: 8892 - DNA, 870 bp, synthetic construct
  source 1..870: mol_type = other DNA
atgttcgccaatcaaaaagtcatttacttggctggggggtgcttttggggcgtcgaggcattcatttcccgtctcaaaggagtgaaccagactgaggtcggctatgccaacggtagagatttagcgcccacctatgagaaggtgtgcagcggaaagaccgggcacgcagagacggttaaagtgacatacaaccctaagatcatcacactggaagagatcctcgagaattattacaaaataattgatcctttcagtgagaaccgccagggtaacgacatcggaacccagtacagaaccggaatctactggcaggaaaacccgcaaaagaatatcatcctcaagttcataaaagacaaacaaaaactcgaatcaaatcgcatatctattgaactgtctccaatcaactgtttttacgctgccgaggagtatcatcagaagtaccttgagaagaaccctcagggctactgtcacgtggatctgaatcttatcaacaacgaggaatttaaccacctgacgaaggaggagtacgagataacacagctatccatgacagaagcgccatttagtggcaagtatactaacttttttgaggacggcgtatatgtggatgtcgtgagcggggaagtgctgttcagcagccaggacaagttcgactccggctgcggctggccctcattctcgaagccgattaataaggaagccgttatcaaaaatagggactattcccacggtaccactcggatcgaaatccggagcgctaagagcaactcccatctggggcacttgttctacgatgggcccggcggaagtccccgatactgcattaattcaagcgccctgaggttcatcccaaaagacgaaattgagtga

SEQ ID NO: 8893 - DNA, 195 bp, synthetic construct
  source 1..195: mol_type = other DNA
atgttctactccacaatcatgaagattgacagcatcgatcggctgagggacatccgggacgccctactcgtggagcaggggataaaccccaccaggcagggcgagcaggccataaaagtcgtggtagaacgcatcgacgaaattcaagctaccctggataagagcgcaacgaaaaatctgaaccgaaacagatga

SEQ ID NO: 8894 - DNA, 276 bp, synthetic construct
  source 1..276: mol_type = other DNA
gtgataagacgtgtcaccagtggccgccggctgctgcgaaaacggatgtacaagagcccacacgcacgccacaagaatgccacatatcatcgggagaacaagagcctagtgaagattcaccagaataagttcaaagacatgaacggacccaacatcaaacctaaacgcaggccgaaaagggaggtactcgacgggtttaagatgtcttacagatataagtactacaacagggatatcgtggaagaaacggaggaatccgatgagaagtcagactga

SEQ ID NO: 8895 - DNA, 309 bp, synthetic construct
  source 1..309: mol_type = other DNA
atgtgtagagataaaaaactgctggagaagatcgcctacgtccaaggttcagagcacaggaagaatatcatcctgtacatggaatacaatctatatacgcccaaggagttgggagacgcgatcggcgtgcgcaccaaccatatcagtaacctcctcagccagctgaaaaagcagaatattgtgtattgcgcaacaccaaacatacacaagggcaagctgtattccctcaccgacgaagggaaacacattttcgagtaccttaaaagcaaggaggaagacaagataaaccggatcaacaacagcatttga

SEQ ID NO: 8896 - DNA, 264 bp, synthetic construct
  source 1..264: mol_type = other DNA
ctcgacaattcagtcaagtacatcctgaaaagcagctatcgggtacgagtgctgcaggcaatcgggcacgacgtgaagaccccctcccagatcgccaaagatagctccgtgctcaacaaccacatcagcaggacactgcgccaactgtacgagcacgacctcatagagctaattaacccagaaatgcattgcggccggttgtacagacttacggaaaagggactggttgtgttaagtataattaacaatgagtcggtccagtga

SEQ ID NO: 8897 - DNA, 4830 bp, synthetic construct
  source 1..4830: mol_type = other DNA
atgaagttatttaacaacaactttatctctgtccttctgatactgttcgttttagtgctggctgtcaattcagtgagtgcgacggacaacaatattacggacataaacaatgtgaacagcaacctgtccaatgtcttgaagagctcttctagtctgaatgacggagatgccatttcatatgatctgatggacaataaggatgtgatctcccagaaattctcctcaaacagcaatacaaacgataagtcaaacatgtccgacgtggtggactctatcgaatcggttgcagaacctacttccctcgattcccccatactcaggtccgtggtgcccagcggcatcacattcgacggagtgttccacgtggggactggacaacagtactcaaacatccaggacgcattagaccagtgcaggcgaggcggatacaattaccagattatcatccacgaaggcacatatactggatacggcaacaaaaatctggtcatcgagccgaccacttggtggaacccaaattttggctacctcgatatccgcactgcaaacgatggtgatgtggtcatcttaaatgcagaacgctctccaagcatcctcactattaacagccgcaatgttcatattaccggattgacattcatgaatgcgtataactatgggtcaggcggaacatctggcgccggggtcgccataaatatcaggaagggaacagtatccatcgataattgtagcttcatcaacaacgaggccagaaacctttggggaggggcagtccatattgactcatccataacaaatcgcatctctaacatagacattacaaactcgcttttcgtgaacaatagcgcggaggtagggggagccttccggagcgagcggtactcctccaacattaacataattaataccacattcatcaacaacaccgccaccgaacacgggggagtagcatgcctattctccacagacgtgacattcgcaaactgtacattcatcaacaactcggctccttcaagcggagggatacacttccacgttggcggatcacacatcgataattgtacgtttatcaacaacagcgcctatggtacgggctcctctgaagagggttatggaggagctatagcgctggtctattccactagtgacggcgtcatcatctccaactcgagcttctccaacaacttcgccggcaagtatggcggcgccattgatgtaaatggcagcggcagcaatgctaaaatactgaactgcaattttgagaacaataccgccggttatggcggcgccatccgtgtccaggggtcgaacaccgtgattgataacaacagcctaatcaataacaaggcgattaacaccgacggcgggggaatccatgtggaggggagtaacacccagattagcaataccattttccgcaacaactctgccgccgccaacggaggggccctggctattgtggctggcgacaacacatttgtgtccaattcagtcatcgccaataacaccgccgtgaatggtgcgggggcctacatccaaggaagaagagtaacaatatccgactccatcgtcgctaacaatacggcagaccaaaacggggcaggagtttacattgacggaagctacgccacgatcaaagactctacaatttacaacaataacgccaccgtgaatgggggcggagcttacataaatgggagggatgccaccatctccaacgtgaactttgtgctcaacaatgccattcccgacgaagaagctttggacgatgggctggggggagctatttttatcgctggcagcaatagctacattgaggattccaatttcacctacaacactgcccggaacggttctgctatctatatcgatccgacatcctcgatagcaaataattacatttataactgtaatttcaccgagaatcaggcttggagctattggttacctattttctacaatgatgtcaccaaaactatcgagtcgaacctgaccggcggaaacaacatactgaacgcgatttacaataacggaagtaaccttcacatcttcatcgacggcgtaaatcctgttttgggatgggagaactcccagaatggcacaataatgtaccaggataaccgggagttcaaccaaacgatcgtcacactcgtgtgggaccgacatggtaacctcgtctttaacgaaactgcagtgacggatttagcagggaatgtttgctatgacatccctcaggatacacacctttggtttatagtgagcatgactcaccttgaggacacttattataaagaaatcacgaacattacgggtatcaacatcaatccggggctgacaattaccgacgtcaccatgtatgagggcaattcaaccccccagacaatctacatcgttctggccgatgacgacgccaaccccatcccaaatgaaggtccaatcatgatctacgtcatggttaacgggaacaagatcctgcttgggagcgggaacaccagcaagaacgcagtattgattcttaacgagagcgctgtcttcaagacactgaaccccggcaattacactattattgcagagtgtacatatgcatattacaatgaaaccacccagtccatctcgaataagactgtatcaaccgagggcattctagaagtcctgccatatatctggtcacttaataagactatctctcatgtgaacggcatcccatatatcgagggcatggtgatccagataaacgacaatgtcactttcaacataactgtattcaatgaggttaataccacgctgtacggactcaagctcatcgacctgaacacagaaggactgagttacgtctcgaccctaccttccaattggaattacgaaggcaacaacgtatggacacttgataacctagttaactacggaaacagctcactgtttgtgacctttaaggtactgaaaacggggaacctgacaaatatcgttaattgcagtttcctggacgggttcaaaaacaagagcgccaacatcacctttgcagttaatctgaccgctgacctcggtgtttccaaggtggtgaacgttagcaatcctaattacggagactttatcaagtatacggtagtcgtgtctaatgctggccccgacgatgctactggcgtggtggtgaatgagacgttgcctgtgggtctcgtgtacgtgagcgatgacgctagcgtgggtagctacgaccacgtggctgggttgtggacggtggggagtctggccaagggtgatagtgctacattgatcgtggtggtgagggtgggggggactggcaatatccagaacttcgtgaatgtcagcggtgctgagtacgacaacaacaccggaaataacaaggccaatgtgaccgttgcggtgaacgcgtccgccgatctgggggtcagcaaggtggtcaatgtgtctaatccaaactacggcgatttcatcaagtataccgtagttgtgagcaacgctggacccgacgatgcgaccggggtcgtggtgaacgagaccctgcccgtgggtttggtgtacgtgtccgacgacgccagtgtgggcagttatgatcacgttgccggtctgtggaccgttgggagtctcgccaagggcgacagtgctacattgattgttgtggtgcgagtgggcggcactggcaacattcagaattttgtgaacgtaagcggtgccgagtacgataacaacaccggtaacaataaggccaatgtgaccgtggccgtcaatcagctgaagacgtacatcatcgtcttcaacaacaccgtctatcccggtgatgatgtcacggtgattgttacggtgaccacccaaaacggcagcctgtttaacggcaatgtgaacgtcgcgctcaatgataccgcaaacactacgaaggtggtgactattgttgacggcaccggctcctttaaggtgacagtggacaaaaacctcgttaacggctacgtcattggtattaacgccagttatgacggcaacgatacctatattggatctaaaggctttggttggattaaggtcctgccagtcaagttccatgttgagaaaaccattgtcaaaggcaacgaatttttcatcggagatgagataatctttaacatcactgtgtacaacgactgcaatgggaccctgtacaacctggtggtgagtgacgtcctccctaatggcgtcgtgctgatcaatagtggtttcgggctctggacctacgacggcggcagcagctggagctacggcgacctctcagcaggcgcctccgccactctgatcattaagtctagtgcagttaaagctggcagcttcaccaatgacgccaaagcgacagtaaacgacgtgcttgacaactccagtctagttgatttcagtatcagcaaattgaatactagcatcagcgtctctaacgtgacagggcaccccggggacgtcgtggtcataactattaaggtgagtaccggagacaacgtgccgttcaacggtgatgtggatgtgattctgctcgacgggaagaagattattgtgcacgtcaccaacgggatcgccaagtttaaatggacaatccccaaaaatgccaagaacaacactatatttagtattttcgtatcatttgccggctcctcaaagtactttggatcgaataataccggatttatcaaagtaatcgacaataagcagaacaaaactaaccatacagataacaatgattttaccgacaaatgcaataaagggatcattaagaatactggcaatccactcctggtgctgctcatctcaattgtgattctggtcataagcctgaaacggagaaaagactactga

SEQ ID NO: 8898 - DNA, 270 bp, synthetic construct
  source 1..270: mol_type = other DNA
atgaactttatctgccccaccataggcgagggtcacgaaaaggattttcttgtgacaggaagtctggacgacttcaagataatcgtgttcagcaacatggaagagtacaaaaaggggtttgaatacctgaagctcgcagattatatcccatacgaggtctcaatcgagttgttcaaaaagctcgccaataacgacgatgagttctccggcatcattctagacatccatagcaagaataagattattctgaaagaggaactgctgaaatga

SEQ ID NO: 8899 - DNA, 444 bp, synthetic construct
  source 1..444: mol_type = other DNA
atgaatatcaaggattacgaggactaccagaaaaacaatgtgaaagcttcaaaaagccagctgaaggagtatattcagatatatgccgatatggccaagaagctcaagagcgaaaacgctctagagcttgaagtcatcaagaaaaacattaagaacacctttcccaacgagatttatttcaccttagtggacgagagtgggaagcctgtgaaattgacgctgactgaaaagagcaaaaaatacattatcccgatcttcacagatatccgggagtacgccatcggcagtgcaaagatatccaaactcttcctggacaagctggagatgaatgtcctctcgccagaggacatctctaagctggcagacgaagatgaatacttccaaggattcgtaatcaacccccactcccagaactttaatatggacaggaatgcgtccttttga

SEQ ID NO: 8900 - DNA, 549 bp, synthetic construct
  source 1..549: mol_type = other DNA
atgttcatctgcttcaaaaaaaaaacttattttaacgattactacacctacggcgatataatgtccgagctcaaggaactggtgaagaagttcattgagatagatgacgacttgaacgagaagatcgaggcggcactaagcgagtcagaagagctggatgacacatttgaggaagagcacaaggaacagatcgaacagctggggaacatctatcatgacattgaacacatcgttttcagcgaagaatttattattgtctcgaacgccaagagtgagcagaaggagatcgtcgccctgatcatatccgaggaggacgaagaggtcgaggagtttgtgattcccgtgttcaccgatgaagaggaggctaataaggctatcgagctcttcaaggaacaattcgaagagaacgagtttgtgtgcgacaaaaaaacgggtaatgagattgtgagcgagtacgccgaagacgaggaatttatcggacttgccatcaatgcaccacagtgggatttcgtaatcgggggcgaagacgtgcacgaatgctgtgagtga

SEQ ID NO: 8901 - DNA, 1743 bp, synthetic construct
  source 1..1743: mol_type = other DNA
atgaacattaacaataatatgaagctgggtctaattgcagctatatccattatagctctgtttgtgctgagcctgtggatctcccagacacctgctaatgacgataatagcatccgttttggcattctcacattattgccgcccctggtcgctatcgggttggcgttcattactaaggagacaatcttgtccctatttatgggcgtctttgtgggggaatttatgctgtgcgtcaatgatctgaacattgtgtccacagcaatcaacgcatttctgcagatgggctctcaaatcatctcctgcatggccgacccctggaacgcagggatcatcctccagtgccttcttatcggagggataatccaactcgtgacaaaaatgggtggagcaaaggctctggccgatacatttgcccgccgcgcggacactccaagaaaagctcaattgttcacctggtttctcggcctgtgtgtcttcttcgatgattacgcaaactctctaatcgtgggtcctattatgagacccgtgatggacaaactgaaagtatctagggagaagctggccttcatcgtcgatgcaacggccgcgcctgtggccggtattgccattatctcgacgtggattggtctggaaatcagtctgatcgctgccggattcgagtctgttggcgtcaccaatgtcaccggcttcgggatattcctccagactatcccctacaggttctacaacatcttcatcctccttttcatagtgatctcatcaataacgctctatgaatttgggcccatgaagaaggcggaacagaccgcacggaagcgaaaggagaatgaagaaatcatcgtgccaaacgcccctggctttgacgaggttaaaccagtggaaggaattaagctaagcatatggaacgcaatcataccgattggcactctgattataggggctctgattgccttctattggagtggatacaccacgatcctgggtggagaggaccaggctctcattgcgatcatgaaaagcagcccactttcctttaacggggtgttcactgccttaagccagagcgacgcttccgttgcgcttttccaggccgccctgctcgcctcgatcgtggctatagtgatggccgttggggagcggatactcaccattgaggacgccatcagcgagtggattggagggatgaagactatcgtgatcaccggcgtaatcttgctgctcgcctggtctctgggcggagtcattggcgacgtgggaacagccaactatttggtgggcgtgctcaagaataccctgccccagttcattgtgccggcactgatcttcattctgggcgctttaatcagctttgcgaccgggaccgcctacggcacgatgagtatcctcatgcctctggccatcccattggcttgggccgtaggtagtggcgacatgagctttaccattgtctgtaccagtggcgtcctgactggcgctatcttcggcgatcactgttcgcctatttcagatacaaccatcctttccagcatgggaaccagttgcaaccacatcgatcatgttcagacacagatttattatgcaatattcgttgccagcgtggccatcttcatcggctacatcccagccgggcttggaatcccctggttcattagcatccccattggtgttgtggtaatgtacgtgggactgaaaattctggggcagaaggtcgactttgacgaggtggaggagtcatcctcatga

SEQ ID NO: 8902 - DNA, 711 bp, synthetic construct
  source 1..711: mol_type = other DNA
atgaagctgagcaagagcaaagttaacacgtacctcaagtgtcctctggagtttaaattccaatacatagatgaggtggaggtgccgcagaacaaatacatggctcttggcagtgacgtacacctcatcgccgaaaaattcgcgaagaagttcggggacaacctcgacaatattgacattgacaacgagctgttaaagatagtgcacgaagaggacatcggctacgacttgaccccccatgtggataatctatcctccttttttgaagaagtgttcgtggagaatgatttcaaactctattcacaggaggagtatctgctggacgaagaaaatcgcttctctggaatctgcgacattattttggaggacgagaatggcgagctggtagtcatcgattataagacctccaactcaagtagcttttcgaaataccggagagagctgtgttactacaagttgcttgtggagaatgtttgcaggaagcccgtcagccgagtgggagtcttctttacaaagaatgggcggctaaggctgctggatatctgcgacgaagaaaacaagcgcaaatatctgaactacaaagaaatcgatgaggcaatcaagacacttcatgaggtcagaaacaacatcaacaacgaaaagttcccagccaagaaacagtttctctgcaagtactgcacttataaacacctgtgtgatgcctatttctga

SEQ ID NO: 8903 - DNA, 507 bp, synthetic construct
  source 1..507: mol_type = other DNA
atgaaacggctgtacgccctgcttattatattgatcgtgatctacattgggataaactcgttcagtctgatcttcaacgataatgggactaatgacgccaatgatgtcaacgaaagcatgatcaccgtaggagccagctccctccccgagattgaaaactttacagacaacacgctcaacgataccaccatttctctggtggatagcaacaaaaacatgacaatcctcgtttccgagatcgataactcccagtcaatttccgacatcttcaacaattttgtcagcagcaatgacatctcctcaacccagactatcgaccaaaacggtgtgacaacgtatctagcatacagcagtggcagtgactcctataacgctgacattttctttaataagaatggccagaattattgcatcagcggcgacaacatcctgtctagcgacagcgattacttcatcaaccactgtaagggaattatagacgcgatctcgataaattcaaccagttga

SEQ ID NO: 8904 - DNA, 543 bp, synthetic construct
  source 1..543: mol_type = other DNA
atgaagattgtcgcactgcaagcgagtcctagaaaggacggaaattgtgacgtgctcatggatgaaatgatcagggggattgaagagaacggcggcaaggtgactaaatactatctagaaaatcaggagatcgccccatgcaaggcctgcctctactgcgctgagaatccggagtgtgtgcgggcagacgacggcaacaagatactggacgaaatgatcgaggctgacggagtcatattcgctaccccagtttactatggtcaaatgagcgctcagggtaaattgatcatcgatcgcttttactccatcggccagaaccctaacaagtccctgtctggcaaggcagccctcattttcacggaaaaccagcccgagcacacctatgatagctacatcgagcttacaaaggcctcacccttcgaatttatggggtatgatgtaattggacatgtggatgcggggaacgccggacccgcaggcatcgtggccgaggagcagaaagacaaattaaaagaagcctacgagctggggctgaagttctga

SEQ ID NO: 8905 - DNA, 240 bp, synthetic construct
  source 1..240: mol_type = other DNA
atgggactgtccagcttcttcaagagggtgaagaaagatgccaagaacgaagagattgtggagtgtcacatcgacatcaataccgacgactgtgacgggtgcgaaaaatgcggcattgcgtgcccaaataatgtgtttatgatggtagacaacgtgagtaaggtccgggatagccaggtctgcaagaactgcaaaatatgcatggcaatctgtcccaacgattgtatcacagttaactga

SEQ ID NO: 8906 - DNA, 297 bp, synthetic construct
  source 1..297: mol_type = other DNA
atggattttctcctggtgttagccaagatccagccgaaggaggggtgtcaggacagcatcctcgaacttgcggaagagctgatttacgagtcgctcttggaggaaggcaacatcgattaccagcttctgaagtccagtgaggacgacagcctaacctttgtcgagaaatgggagtccccagaatatctgaaaaaacatatggcctcaccccacttcctgaacttcaacgcagactgcgaagagttcatcgagagcaatgatattcaactgatcgaagctaataagatagagatttga

SEQ ID NO: 8907 - DNA, 693 bp, synthetic construct
  source 1..693: mol_type = other DNA
atgatatatagcacagaaattgagaatatgtgcctggtgcgcaaaggggccaaccatgaccccgcgcccatccctgaggaggggaaatgggtgaaagcaaaagagataagtgacatctcgggtttcacacacggtattgggtggtgcgccccgcaacaggggtgttgcaagctcaccctgaatgtgaaggatggaatcatcgaggaagcccttattgaaaccctcggatgttcaggaatgacccactccgcagctatggctggggaaattctcgtgggcaagacaattctggaggccctgaacactgacctagtatgcgacgctatcaacacggccatgcgagagttattcctgcagattgtttacgggcggactcagtctgccttttccgagggcggccttcagattggcgccggcctggaggacctcggcaagggccaccggagccaggtcggaaccatctacagtacaaaggagaagggcccaaggtacttggaactgaccgagggatatatcacggaaatcgggctcgatggagataacgaaatcatcggctacaagtatatcaatctgggcgtcatgctggattttatcaaggagggtatcgacccattggaagctataaagaaagcgactggtcaatacggaagattcgacgacgcagtgaagaaaatagatcccaggagcgagtga

SEQ ID NO: 8908 - DNA, 1002 bp, synthetic construct
  source 1..1002: mol_type = other DNA
atgagtctgtttgaaagctatgagaggcgcatcaatcagatcactccggtgctcgagaagtacgggattaaagacctggaggaagccaaacagatatgcctcgacaaggggtttaacccatacgatattgtgaagaatgtgcaacctatctgctttgagaacgcatgctgggcctacacgctgggcgccgcgattgccatcaaacagggctgtgtgaaggctagcgacgccgcaaaggccattggcgaaggcttacaggccttctgtatccccggaagcgttgccgacgaccgacaggtcggcctagggcatggcaacctggcttcaatgcttttgagcgacgaaagtgagtgcttcgcattccttgcaggccacgagagtttcgcagctgcggaaggagctattggcatcgccaacagcgccaacgaagtacgcaagaagcccctcagagttatcttgaacggactcggaaaggatgctgctctcattatcagccggatcaatggtttcacccacgtggaaacagagtttgactacttcacgggtgaggtaaaaatagtgaaagagaaggcatattccgacggcgagagggctaaagtcagatgttacggcgccgatgatgtgcgtgagggtgtcgctatcatgcatctggaaggagtggatgtctcgatcaccggcaactccaccaatcctacacggttccaacaccccgtcgccggaacctataagaaggaatgcattctgcaggggaagaagtacttttccgttgcttctgggggcggaaccgggaggactctgcacccagacaatatggcagcgggccctgcgtcatatgggatgactgacacactgggacggatgcacagcgatgcccagttcgccggttcttcatccgtgcccgctcatgtggagatgatgggactgatagggatgggtaacaacccaatggtgggggcctccgtagcagtggccgtcgcggttgagaaagccatgaaacagtga

SEQ ID NO: 8909 - DNA, 420 bp, synthetic construct
  source 1..420: mol_type = other DNA
atgtccacgctgtggggcctaactgcacgcggaatctgccagttcaacgataagattctcctgctgaagatccggtcgaacagcgctcacgacgcggagaaatgggagatccccggcgggaaggttaaaaaatgcgaatttttcgatgacgcccttaagagagaatacctggaggagacagggttggaaattgacgtccaggagctgtataatgtggtaaggaatgattacaccgcctgcaagacaaaggaggacgtcaagtcaattcaattaataatgaaagtgtcctgtgacaacgacgaagtgaaaatcagcggagagcatgacgattttggctggttcagctggaacgagatagatgaaatgatcgccggtgagctcctcaccccagctgcaatcatggccttcagtaaggactga

SEQ ID NO: 8910 - DNA, 798 bp, synthetic construct
  source 1..798: mol_type = other DNA
atgcagaagatcatcaacgcccactgccacatttacccagaaaagatagcctcaaaggccgtagttggcatcaaggacttctacgacctagatatgtctcttaacggcaaggtctcgggcctgatagaagatgggaacaaagtgggtgttacgcactacctgatccattcagtggccacaaccccaaaacaggtcaaatccattaatgaatttatcgctgagtctgtgaatacccacccagacatctttacaggcttcggaacgctacacccggacagcgaggacattcaaggggatttcgactacctcattgagctgggccttaaaggagtcaaaatccaccctgactttcagcagtttgcgatgaatgaggagcgcgcattcaagatcggcgacgtggtgaataaggggaatgtacctctgatggtgcattgtggcgacttccggtataactactccaaccctgatcaaataaaaccctttttggataagttccccaatatcacatttattggtgctcatttcgcagggtggagtgtgtgggaagaggctactgaaaagctcgctggaacccccaacctgtacgtggacctgagctccagtctctatgacctgaccccggaaactgccgtcaacctcatccatgcatatggggcggataaggtgttatggggaaccgattaccccatgtgggagagcgtcagcgagatggagtatttcaacaagctggatctgactgagaaagaaaagagccagattctgtatgagaacgccgccaaaatcctcggattgatttga

SEQ ID NO: 8911 - DNA, 651 bp, synthetic construct
  source 1..651: mol_type = other DNA
atgaccaacaacgagctcaagctagagactaaatgctacgacgctaacgaatatggctacctgtacggactgaacaagaagattccagatgaagagttcgagaaagtcaaacccttttttaaggattttcggagaatggacttcgtggaaggcaacgtccaagtcaccggaaggcctgagggttaccgatgccttgagaaggacgtgagcaaggtagaggagatcttgggaatcaccaacactctggaaaaaaggcagaataaggtgaaagaagcctttgcagaccccgtgaaaaaggccaatcttatcgaccagtcttatgaatggctcaagatactcttcgacaagggtggcacaagacccgagcaggatttgagccggttagccgtgcactcaacaaaaatctatgatccaaaagacagcttcaaacggggctgtgagaagggggagggagaactgttcatttacacccctcatggcatgtggtatatcatcaacaattgcggcgagttctccgataagtcgctgaacaatgttcagacgccgcaagggggggcggtggggtatcgcctgatgtactacgatctgatcgaccgcctgattcgtatttacagtgaagagaatatatactccgggaagcagctctattga

SEQ ID NO: 8912 - DNA, 948 bp, synthetic construct
  source 1..948: mol_type = other DNA
atggtcaaggtcagtatctttggcagcacgggcacaatagggaaaaatgtggcctttaccctagcacgcatggacacagtggatgagattgtgatggtgagccgcccaaaaagtctcgacaaagttaaaggggagacttacgatatgtacgacgcattggccgcccgtgatattgactgtaagctcatccccacctgcgatttcaatgagatccggggctctgaaatcgtactcattgccgcgggcatccaccggcagcccggaatgaataggcttgaactggctattccaaacgccaagattgtaaggtattattccaagcagatagctaaatacgccccagactcgatcatcctggtggctaccaaccctgtggacgtgatgactacaatcgccctggaagcaagcggcttcaacaagatgaaagtcatcggggtcggaaaccacctggactcgttgagactgaagaactatttcagcagaaagatcaatattaatagttccgaagtgcacacaagggtggtaggcgaacacggcaaccatatggtgcccctgttaagctcaacatccattggaggtatccctctcaagtacttcgagtttgctaagctggacgttgacgcactggtggagcaacttaagaacgcgggcaataccattatcagcaaaaagggagccactgagtatggtcctgcctttgcaatctcaaaccttatctcaaccatgataaccgactcccacaaagtgctaacggtgagcttctacctggagggtgaggttgaaggggttcgaaacgtctccctcggggtgccggccattacgtctaagaatggaatagaaatgatcgtccccatccatatgaatgatgtggagaaagagagcttcatagaggctgcgaacgtcgtccgggataccacttacaaggttaaggagaacctgaacatttga

SEQ ID NO: 8913 - DNA, 444 bp, synthetic construct
  source 1..444: mol_type = other DNA
atgaagctggtggttcagagagttacgcatgccagtgtggaagtcaataatgaggtggtgggtgagataggcaacgggttgatggtgcttgtaggcttcggcgtgaacgacactaaaaacgaggctgactatctgtcccggaagctggtcaaactgaggatctttcaagatgaaaatgggcgcatgaacaaaagcgtgaaagatattggaggaaagctgctactgatcccccagttcacactctacgcctcaaacaagaagaaccgaccttccttccacaaggcactgaccccagacatcgctaccaagttatttgactacttcgcgagcaaatgctctgaagaggtggatgtcgagaccggggagtttggagcatacatgaaggtagatctcttgaataacggcccggtcacaattcttctcgagaaggaagccgacgaatga

SEQ ID NO: 8914 - DNA, 1143 bp, synthetic construct
  source 1..1143: mol_type = other DNA
atgaccgaattttcactgaacgtggatgagataaaagaaaacgtggaaacaactctgaaagaggaggaaaagaaattagaggattccaacatcaagaatcaggctcaggacaacgccgtggcaatcttcgacgctgatttaaataacccgcaagcaagggaaaagatcttgaaaccactggacaatttcgggctcaacgagatgagccgcagcgccgcccacaacgaaatgctggccacgagatttgttgaccttacaaaaggaggcaaagagtcggacaacattggagagaacctgatggagctgaatcgcgagataaaggatttggaccccagtaagataaactttgccaaaaaggggctgctcggcaatctgatgaaccccgtgagaaaatactttgcgaaatatgaaaaggccgaaaacgctattagtgatatcgtacagtcactggacaaaagctccaaagtcctccagaatgacaacacaactctgctcaatgaggagaactacctcagggaagttaccaataagcttcttgcagacatcgaactggccaagcaaatggatgcctcgattgaagcacagatacagactgcagaaatcgaagggattgatgaggagaagattaagttcgtgcgagaagagatcctcttccctctgagacagcgaatcatggacatgcaacagatgattgtggtcaaccagcagggcattgtcagcctgaatgtaatccggaggaacaataaggagttgattcgcggcgtgaagcgggcgcagaacgtcaccgtttcagctcttcggaccggtgtaatggtggccagcgctctgtacgatcagaagatcgtcatggacaagattaatatcatcaacagcacaaccgagcacatcatagagtccacgtcccatatgctcaaagagcaaggaagtgaaatccagaagcacagtgcggagaccatgatcagccccgaggtgctaaaggtgagcttctccgaggcaattcaggctatcgaggatgtcagcacctataaagagcaggccctgccaaagatgaaagaaaccattgtgatgttctccgacctagccactgagggtcaaaaggttgtggagaagatcgagacaacgaacgaaaatttgctcaagtga

SEQ ID NO: 8915 - DNA, 459 bp, synthetic construct
  source 1..459: mol_type = other DNA
atgagacgcataaagcagcaactcactcaggaagagtgcattgagatcctgactaacgaacctcgcggagtactggcactgctcggggataatgagtacccctacacggtgccaatcagccatgtgtatgcggacggtaagatctacttccatggggcccaggaaggccacaaaaatgacgctgccaaaaagtatccgaaagtgagctattgtgtgatcgacaaaggcgtcaaaaagaaggagaactggtggtacaccttcaagtccgttatcgtctttggaaagattaagatactgacaaacaacaacgagaaaagggatcggctcacataccttggggataagtttttccccacacacgaagaaaccatcgacgaaattaataaactattggaccggaccgaggtgtacgagatcaccattgagcacatgagtggcaagctggtccgagagaagtga

SEQ ID NO: 8916 - DNA, 660 bp, synthetic construct
  source 1..660: mol_type = other DNA
atgattaacaacgattgggacctggccctgaacgacgagttcgaaaaggactacttcctcaaaattaaggattttgtcagtgaggaatacaactcaaagaccatctaccctccgtacgaggacatatttaactcattcaaactgaccccactgtccaatacaaaagtggtgatcctcggccaggacccctatcatgaggagggtcaagcgcacgggcttgcattttccacgccggaggggagaccaatccccaggtccttgaaaaacatcttcaaggaaatcaataatgagtatagctatcccattccagagagcggctgtctcgagaaatgggctaagcagggcgtctttctactgaatactgtgctgaccgtggagaagggcaatgccaacagccacagtaattgcggatggcagaccttcacagataacgtaatccggatactgaacaaccagactcgacctattgtgttcttgctttggggaaagcaggccgaaaagaagaaggaactgataacgaatcccaaccatctggttctaattacatcgcacccttctccctttagcgcacggcgcgggttcctgggatctaaccactttaaattagctaataaattcctcaaggaaaacaacatcgatgaaatcaattggaagctctga

SEQ ID NO: 8917 - DNA, 567 bp, synthetic construct
  source 1..567: mol_type = other DNA
atggaaatcactgcagacgagatgaagaaaaccatacggaagatatatgaccggctcgataaagtgagccccgttgattttgactgcggaaagttgtgtggcgagatctgctgtgtctacgacgccgacgactaccacaatgaggatttggccctatatcttctccccggtgaggaactcatgtacgaggacagtgacagctacaagctgtattacatcgactcatccgaaattaaatatcctcactcttggaaaggccaaatttacctggtgaagtgtattaaccctccaaagtgcgatcgcagtatccgacccatccagtgcagaacattcccactgattccgcacctgaataagaaaggggagttccatctgatcttcgatgagtccgaatttccttacaagtgccccattgtccagaaccatattaagcttaacgatgatttcatccaggtgacctacgagatctggagcatactgatcgctaacccactggtgtatgacttagtagacatggattcgcgcatgagggacaataggaaaacggattacgaaattatcatctga

SEQ ID NO: 8918 - DNA, 1386 bp, synthetic construct
  source 1..1386: mol_type = other DNA
atgaagatcgagtttgagacatatgtaatttttgtctcctttatcacttccttctttgccgtgtttttatcaaacggtataattatcggcgtgccagccatcgcacaggactttgctatgaacaacgttatccaaaattgggtgcctacgatcttcttccttgtggttgctgtctttacagttcccgcagggcaaatctcgggcaagttcggagtgaaaaagagcctcctggccggaatcacggtcttcctcttggggagtatcggagcgtgtcttgcctttagcacggaatcgttcctgatatttagaatcatccagggggccggagtggcttttctgaatgtctctgccatggcaatggtcgtgcacgcagttaaacctcagaaccgaggcaaagctttgggcttcaccgtgactggggtgtatctggctacaagccttagccccgtgatttgtgggttcctggtgcataacttgggttggagggccatgttttacttcgtaatccccttcctcgtgttgtgcatcatactgctgattctgaagattccacaggaatggaagacctatcagcacgataccatcgataaagtaggctcaataatttatgctattggcatcctactcttcatttacggcttcactactctgatcaccaccaatgggaagattctgaccgtgactggcatcatcttactggtgatattcggagcctacgaactgcggcagaaatcccccgtcttcaacatgaacctctttaaaaacaagaagttcacctcatccaatattgctgccctgtgcagttacctggccattatggtcgtgacaaccatcctaaactaccatcttcagtatgtcaggggttgggacgcacaaatgtctggaatgatactgattatcacccccatcatcatggccattatggcgccgaacgccggaaagctcagcgataaaatacacccgcagaagctggcggcaactggcatggcaattgccaccattgccctgggaattttgacattcctcaatggggagacaccaatttacttcgtgatcatagctatgatcctacagggtatcggtatggggctgttctcatctcccaatatgaatgccattatgagctccgttccacctaaggacgcccctaccgcatccgctagccaggccaccatgcgcacgatcggccaaaccatgagtctgggccttctgactctcgtatttgcttggataatggggaacctcgagttatctccacagtacacaaccatgatcatccaggcgtcccagacgatttgcggcatctgtacagccgcctgcattctggcgatcttcgcaagcctcatcggcatcaaatctagtgacaagtttaatacaggacggtga

SEQ ID NO: 8919 - DNA, 444 bp, synthetic construct
  source 1..444: mol_type = other DNA
atggacaagagcccggacgtgttcgacaatgctcctattattgggtggatacacaacatctccaaaaaccagctgaagtacctcaatagccaaatccaggagctgaatctagggcgcgaggtgcgctatataatgctgatccatgacaatcccaactgcagccaggatgacctcgtcaacatttacggtgagagtaaggcaaacgtagcgaagtcccttaagaaattggaaaacaacggctatatcaccagaaatatgaatcccgaaaaccgacggaagtacatgctgaaaacgacaaaaaaggccgatgaactcatcccaaaaataaggaaaatctcactggattgggaaatcaaggtgggaattgacgagaatgattacgagttaaaggagaagatccggcagattgccatcaacggcatgaaactgattgacaacaactga

SEQ ID NO: 8920 - DNA, 300 bp, synthetic construct
  source 1..300: mol_type = other DNA
atgaataaaatcgaaatcgagctaaccgacgaacagcttgagaaggtcaagcaactggaggcacagaacattagtgtgggccaggcgatagacatgctctttgaggtaaaggagaaggccctgttcgagatcgagaagatcgagaaatccgggctcatagataaggtgagcaacattaatgtcaacaataaaacggagaacctggaagagaactacggcgatagcgaaaaaacatatgaaatggaagtgcaggacatcaagcaccggattaaatggggaaaggacttctttaagttctga

SEQ ID NO: 8921 - DNA, 687 bp, synthetic construct
  source 1..687: mol_type = other DNA
ttgaacagaaagaccaaaatcattatcattgctatctttctaatcatagccagcatcctcttcgtgggcaaccggttcttcataccccattacgagacgattgctgacacggatatagggaccgtagaagtggctacgtacggaaacgcaaatgccacaaaatgcattgcactgattaccggcatccaccccagggaaaccctggctatcaaccctgaaatcgatgcagccaagcaatttgccaatgacgatgttaagatcattcactataaggtcactgtgacaaaaaatgcacaggactacagtaaaggccgcgccaatggggagtccctggttcataactacgtgaacccgaatgtcaccgcctccgacgctgacgcggtgatcatctcgcacagccacattcctgagtatggtgaaggattttacgtagccactccagccatggacaacgccagtgtgaagatcggtgagaatatcaatcagagcagcgatttcaactactatcccgtcaccgggaatgagacatacaaatcaacttccgcggtgctggtgtcaaagccaatcgccgaggcgggatacccaacattcgtctatgaggtgcccgagaacgtcatggagtttatcataaccggcaagacaaaggaccttttccagctcattattgaaaacacttatgataactga

SEQ ID NO: 8922 - DNA, 1455 bp, synthetic construct
  source 1..1455: mol_type = other DNA
atggattatgacgtgatctacatcggctcgggaaatgcggcctggcagggaggccggtttctgagaaaggcggggcttaagatactgatcattgaagagagcctgtttggcggagcatgtgctaacagaggttgtaactccaaagccttgctggatgcaccatacgaaatcaaagccctggcggacaactttgaaggggttgggaagtccggcaactttgaggtcaattggcccgacttaatgaaattcaagcagcagcggattagcggcatgagcaaattcctcgatggtaaattcaaggaatatgacttggacgttgcccacggaaaaggaatcctggtcgacgaacatacagttaaggtgggagatgacacattcaccacagataagatcgtaatctgcaccggtctcaaacccgtgatcccagatattaagggcaaggagtacctgcacgatagtacagactttttggacatcgcagagcttcctaagcacaccattatcataggggcaggattcgtgggcatggagttcgcatcgatcatcgcggaggccgggctagaggcagacgtgatcattcgaggcaacatggctcttaaatacttccaccagccttacgtgcaaaatgtgatcgaaattctaaagaagaagaatattcgtttccatttcaaccaaactgtaaaggaaatcattaaggacaacaacgtcataattgacgatcccgaaagtaaggtgtcaaacgtggaaaacagcatgaacagtgacgagctcctgcgcgaccctcaggccaagatcaataacaaggcctacgagaacgcttttactgtgaatctcgacagcggatgcagtataacgggcgattacgtgattgccgctatgggaagggaagctaacgtcgaggatatcgggctcgagaatgtgggcctgacctacaccaaaaaagggatcaaagtgaacgggcacctgcagacagccgtttccaatatctatgcttcaggcgacgtggcagatgtcggcattgctaaactggtcactgtggccatccatcactccaagtacctcgccaaagagctgctgggtaaggcagacgaaattacgtacccagtgatccccgccgtggcctataccatcccgcgcatcgccacagttggtgtaccggcctatattgcagaggagagcgacgattatgacgtgcacactatacggtacggcaattcctattcactcgagcttaagaacgataggacggctgaggccaaagtcattgttgataaggatctcaatattgtcggggctgaaatatacgcggccgacgctgagaatgtcgccaacatgtttaccttcattatcaataaaaagataaccctgaaggacctggacgagatgatctacgccttccccagcagcagctccgtatgcctgtataagttgcacaacatccattataaattatga

SEQ ID NO: 8923 - DNA, 2955 bp, synthetic construct
  source 1..2955: mol_type = other DNA
atgaacaaaaaaatactgatcctgctgctgatagccattctaaccttttccgtagctaccgttagtgcgtcagataacacaactgatgactctgtcatcgactcaagcaatcgcgacgtggtgagcgtcgacgataacaacgtggtgtcggacgagtacgcggtgaacaaagtgtctaatggggcgctggctgatgttaatggtgaggaaaacgtcaacaacgacgtggacatggttattgaccccatcaacaatgtatctgtccttcaaggcgacaacgttgacgtgaacatcactgtgaagaatataggggaaaacaatgcttctaacgtgacagtgaattttgagctccccgacggattttcacttattgactcgaacaacgtatcagacaatacgtggcacataggcgacttgcagagctccaaatccaccaacatcaccgtgaagctgaacaacagcggaattaacaacggtgactacgtgatcaacctgacactacgggccaatgaagggatcgaggagatctttaagcagaatgtcactgtgaacgttatcaagaaactcatccagaccaacctcactatcgacttcgataaagagagctacgtctacggggacgatgttggaattgatgtgaagttacctgacgacgctactggtaacgtgactataaaaatcaatggcacagaaaataatgcaagcatcaatgaggtcttgatcctgtctaacctgacacccggcaattatgaggtgaacgtcacctatagcggggacgacaagtacaatggaagctctgggaaggcccggttcaccatatccaaggccaacacaacagctgcaattgacattgtcagtattaaggtggatgatgagctcaatatcacgattaactacgattctgagattaacgggaatgccactatctatgtggacaatatcaaaaaccagaccattgagattattgatggcaacggaaatgttaccatcaaaggcctgtccaaaggcatgtacgacatcaaggtcgcctttgatggaaatgattgctataactcatccgaaacgaacaaaacgattgaaatctctaaaaacacagtcaacatgttgatcaatgtcggcgatatcgtgtacgggaatgatctggtgattaacctcaagctccccgataaccttacctcaaacgtcacggtatccctcggcgatattaatcgaagtatcaactgcagcggcaatgtaacctttaaagatatgaacgccggcaactacacggctattgtcagttatggcggtgatgagaattactttaatgaaacaaagtacgtggacttcaagatctataaggcctccacacagaccaccgtcaatacctcggacatcaacataggcggcgtgctcaatgtcagtgtcgaccctaagattgatggaacagcgactgtgtatcttaacggcacgaagtattccgacgacatcgtaatagttaatggtagtggcaacgtggttattagcaacctcatcgaaggaacttataatgtgcttgctgtcttcaacggaaatgataactacaattcctccctgaccaacaagtccatcaaggtatcaaggaatgtgttcaacattactgtgaacgtgaccgatgtgtgttatggtcaggatgtcataatcaacatcacactgccgggcgacgtgaccaacacagtcgacgttgtgttcgggtacaactcccagaatattaatctggaaaatggggtgggcaccgtgaagttctccgatttggatgtggggaactacaatgccactgtgatctattacggcgacgcgaagtacctaaagagcacccaaatcattagtttcaacgtgaccaaagctaagccaacagttgatgtgaatatttcaggcaataagctaggacaggacttagtgatcaatatcgcattgcctagcgacgtcaagaataacgtgacggtgggaatcgacaacatctcccaggacgtgaaagttacaaatggggtgggtaaggcaatatttaaggacttaaccatcggagagcatgtgctgatcatcgactacagtggtgactctaactacttgaacacgaccgagggcatttacttcaacgtctctaaggcaataccggtcatcgacatcgatgtgaaaaacatctatgtgaaggggaaggaggtgatagatatagcccttccagacgatgccacaggctcggtaaccatctttattaatggagtggagcagaagaccgttaatgacaacatcagcagcattgttttgaccaagtcggggctggccgccggaacgtataatgtgatggttagctacaccggagattccaagtatgaatcggccaacaccactgtgcaattcaaagtgtcaaagtacaaggctaaactgaccgcctcctcaaagacctataacgtgaaagtaaaaaccaagtactactacattactctgaagaacaacaagaataaggtaatgaaaaagatcaaggtctatctgaaggttaacggtgtcacatattccgccacaaccaacagctacggtaaagcaagcttcaagctgagcaagctgacgaagaaaggcacctatgatgctcttatcacatacaagggcacgagttactacaacaagctcactaaaaaagtcactattgcggttaaagcaactccaaaactgactgcttatagcgccaagctcaaaaaatctgtgaacgccaagaagtacagtgtaacgctcagaacagacaaatacaaggcaatgaagtatacaaaggtcactctgaaggttaacgggaaaatctataccctgaagacaaatagcctcggaaaagccactttcaaaattaccaacctgaataagaaagccaagttcctggcagtgattagttacagcgggagtaaatactactattctgcaaccaaaaaagtgatactgacagtcaggtga

SEQ ID NO: 8924 - DNA, 483 bp, synthetic construct
  source 1..483: mol_type = other DNA
atgagccagttctcaattaggtttgcggaaaaggaagatgtctccttagtcctgcagttcatcaccgaactcgccgaatacgaaaaaatgctgaacgaggtgatagctagtgaggagctcctgaacgagtggatttttgataagaaggtggccgaggtgatatttgcaatggaggacgacaaggagatcggttttgccctgttcttccacaacttcagcacgttcctggggcggggaggcatctatcttgaagatttgtatgttaaaccagaatatcgcggcaaagggtacgggaagaatctcattaaacgcctagccgagatcgcagtggacaggggttgcggacggctcgaatggtggtgtctggactggaatcgaacatccatcgagttctacctgtcgcttggagctgagcccatggaggactggactgtatacagaatcagcggcgataccctggaagagttgggcaagaaggagtga

SEQ ID NO: 8925 - DNA, 288 bp, synthetic construct
  source 1..288: mol_type = other DNA
atgaactccaacaagattaagatcgagtttgaaaaagaggacaacagcagtattgcttatgatgggaatcggcagatcggccaatgccacttcgcaaggctaaagcagaattggataattaccctgacagacgtggaaaaggactaccagggtcagggaatcggcaagaaactggtagaaaaggtcatcaacgaggcccgcaaagagaaagtcaaaatcgtgccaagctgctcatacgccaaaaagctgatgttcgaaaatcccaaggagtgtaaggatgtgctctga

SEQ ID NO: 8926 - DNA, 237 bp, synthetic construct
  source 1..237: mol_type = other DNA
ctcagtaaacaagaggaactagagcagaaaggctacaagacctactccaacgacgagatcaatgtgttttggaacccgaagctgtgtcagcacgccacggagtgcatcaggggaaataacaaagtgttcgacgtcagccgcagaccctgggtggatgtaagccaggctcctgcaaaggaaatagcggagattatcgaccggtgcccaacaggggccctgctgtatgaactcaagtga

SEQ ID NO: 8927 - DNA, 1650 bp, synthetic construct
  source 1..1650: mol_type = other DNA
atgaaagtgattgccagtaccagaaatgacgacctcaaaagactcaatgaaatctacaaggtgcttaagaagaacgatttcggctacctcatcgaggagaacaccttcttcaggaaatttccatttttacggaactacaaaatcgagaaggaagataacttctccgacgagtctgtccccctccgaatcagaaaggtgctggaagagctgggtccagcctacatcaaactggggcaaatgttgagcacaaggcccgatttggttggcctcgagatcgcagaagaacttcagcagttaagagacaatacccccataacgccttttgatgaaataaaagaagtcattgaagaggagctgggcaaacctatggaggacatctacagtgatattgaccagaatcccctgggatcggctagtatcgggcaggtgtttaaggcccagcttaagaggaatggggaggaggtggctattaaggtgcagaagcctaactcccgcgagatcatagaatcggatatcaagatcatgaaattcctggcaaagaggatagataaatacatttccagcagcaaaacattcaacctacccaccatagtgaacgagtttgagcgcagcattctcaaggaaattaactacctggaagaagtaatgaatatgcaaaacctgtcaaagaacttcaagaatgtgaattacatcaagattccaaacgtgtacattgactactgcagcgagaagataatcactatggagctgatcaaaggaattaccgtcacggagttaatcgagggggactatcctcatattaataagcgattgatcgccaattatggccttaagtcctatttcaaacagatcatgatcgacggttatttccatgccgatccccaccccggaaacctcatcgtaacacgggataataagctgtgttatattgacatgggtatgatggggatcttgagtgaggatttcaaagaaaatctggctgaatttatgttgctgttgataagtggaaatacagacaacatcataaaacaactcatctatatgaacataatctccccctcacagaatacaccggaactccgggcggacattaacgacctcctcaatctgtattacggggcggagctgaagaacatggacggcgccatggaagatctgcttaacgctatggtgaagaacaacgttgttctgccaaacgagttcgtgatgattggccggggtattgccctgattgaggatacgggcaagaagctcgacccaaacttcaacgcggctactgagttgaagaaactgtctcgcaagatcgtagtcaataagtacaaacctgaacgcctggcaaaagtcagcctgaactatcttctgcagctcgaacacctagcaaaggacttaccggacaccataaacagcaccatctccaagctggaggaggggaatattgaggtcaaactgaagcacgagggcatcggccacctaattaaccagctctccatctctctgatcctgtcaagcctgattattgggtcatctctggccctcatcactgacgtgggcccggacctatttgattttccaatccttggattgatcggattcgtgtttagcggagttcttggcgcctacctggtgctgatcaacgtcatcgagcgttga

SEQ ID NO: 8928 - DNA, 1338 bp, synthetic construct
  source 1..1338: mol_type = other DNA
atgctgaacgagtttttcaagctcagcgagaacaacaccgacgtgaagactgaagttattgccggactcacgacattccttgcgatgtcctacattttaggagtgaaccctggaatgctggctgagggaggaatgcccgcaaccggcgtatttttcgctacggccctggcgagcggcatcgcgtgtattatcatggggctggtgagcaagtatcccgtgggactggcgcctggtatgggtatgaatgccctctttacttacacgatcattctcggcatggggaacacatgggaggctgcccttgccgcagtcttcatttccagtatcatatttttactgataactgtttccggccttagggaagccattcttaatgctatcccgcacaacctgaaactagcgattggggcaggcattggtttcttcctcgcattcattggcctcaaaggtgccggaattatcgtggccgacccaagcacaatggttactctgggatcattgttctctgctccggcactgttggcactgatcgggatcgccgttacgctgatcttgtatgtccgcaaggtgcctgccgccgtctttatagggctcgtgattaccgccatactgggcatcatctttaccgctgccggctttggagtgggagacatagcgatgcccagcgtgccaactgagtttgtctcgacaacaatcgacacctcggtatttggggccttcgcaagcggatttagccagttgttcacaaatatccccaatctgatcctaatcctgttctcactgctgttcgtgacatttttcgacaccaccggcaccctgattcccctggcaaaccaatgcgggttcatcgatgaggagggcaacgctgatggaatagacaaggcattcctgggggatgccatcgggggcattatcggcgctattctcggtaccagcacactgactgcttatgtcgaaagtgcaactggcatcgggcttggtggccggaccggcttgactgccatagtcacaggcattctatttctcatttccatcatcttcgccccaaccgtcttagccctgtttacaagttctgtgacggctgctgcactggtgatcgtgggcatcctcatgatgattcagctgaaagacgtggattgggatgacttggtggtcgttgcctccgtattcatgaccatcatcatgatgcttctgacctactccatctcactcggtattgctttcgggttcgtcacctacgccatcaccagtatcgctgccgggaaagccaaggaactgaattggcttgtgtggataatggtgctcgtatttatcatatacctattcttcggcttgtga

SEQ ID NO: 8929 - DNA, 2079 bp, synthetic construct
  source 1..2079: mol_type = other DNA
atgctgaatatgtattacgacatgatgatcaataagtacattaaccaaatcgacacatccattgacgccctggagctgaagctacgcgtctgggactttatcaatagcctggataaaaccgatttgtctgaggaggagattaagaacatcgtgtctaacatagggaacctgggcactactctggaggagtccaacagccctaaattcgagtggtacttaaacaccatcgtggataatgatctctgcgccaaatgcggagcctgtagcattgtctgtccaaaccacatcgtggagtttgaggaaaaacctttcatcgttaaagagtgtctgcgtaaagggaacgggatgtgtcaggaagtatgtccgagagtaaacgcagggtcctacgaaattcgaacacggctcaattccttcgaagagtactactacggaaaatcagacatcaagggccagtcagggggggtcgtcactaagttcctggagtacctgttaaacgataagaagattgacggggccgtggtgatcggaggtagtcactggaagccctcaagtatgctagtgacaaactcgcaggatctgctgaatttgcacaagattgacattgacagcacacccaagagccgatacagcatctcgagccttaatgcaataatggaagccggagaaatggggtttgaaaagatcgctgtggtcggacttccatgtcaggtagcgggcctgagaaatatccagtatcaccagttcaattccaaacatgacgccgaacggggctggaatggtcggcccgccaagatcccaaagatcgaatacgtgctcggactcttctgcactgagaaatttgagtacagcaagattctggataagatcaacactcttggaattaatgtggatgatatagtgaagtttgacgttaagggccctaatttcctgatatccacagaaacagaagactacgagattaagctcaacgagatggaaccatcccccggctgtctgatgtgccgggactttgatgctgagcttgcagacattagttttggcgagaaagggagccccaaaggcttcagcaccgtggtgatcaggaccgagaaaggcaaaatcatcaaggactactttgatttcaacaacgatgtggatattgaagaaattgaatttatgaggaacttcaaggagaagcgtttccagaaggagatcaaacaccgcaaagagagtggcaaggccaattcttactactatctctggaggtttggtggtgttggcatgggtcaaaagggcagagcgtatctccggttcaggaccaccatcggaggctattatgacgctgatctgctgatggagatttccgctatcgctaaaaagtacgggggaatcatcaaactcacgtcccgcgaggagattgaaattcagggaatcaagctcgatgacgtggaagacatcgtctatgactgcaaggatctgccgttggttaacggcaccgaaggacccctcgtcaggtctttgatgtcttgtccggggaaagagagatgtctgcttggcttgatcaacaccagtgagatcgccgaaaagatagaggaaaagtatgcggagaagcccgcaaattacaagttcaaaataggaattacagggtgcccaaacaagtgcctgtcggtttctaccaccgactttggtattcacggggtgaagacacctcttactaatgacaactgcaacggctgcggacgctgtgaggatgtgtgtaaaataaacgcaatagagatcacgggcaagaacgctataacggactatgatagctgcatttcatgcggcaaatgcatccccgcatgccctaataatgccaaggacatcaaatacaagggctactgcctgtcaatcggtggaaaggggggccgggagacgatcctaggccatgaaatgtatgtggacagcgaagacgagatttataaaaccctcgacgccgtcttcgaggtgtataacaaacatgctaaaaacccacagcgagaacgcctggccagtaccataaaaagaatcggtcaattgaatttcttcaacgaggtcgagaaggtaaagttatccaagtga

SEQ ID NO: 8930 - DNA, 1386 bp, synthetic construct
  source 1..1386: mol_type = other DNA
atgatatacaagtgtctaatttgcggccacatccataatgaggaggccacgggagtactgttgaaggacctggacaagtgtcccacttgtaaacaggatatctcaaacttcgttgaatttgagaacagcgattccgactataaaattcaaaatgaacccaccgacctgtcataccccaaggagttcgccaaaagtgataaggatattcggcacatggataccatacatcagatcgccatcagcggtgaaagtataatctctagcatgtatacagagctccccatgcctaactgggatgacattctaatcttgggttgtcagctcaacccccagcctatcgaatcgaacatcgatgtcaacaccaccaccgtgatcggaaagaacgcgaagatccccttagtgatcgagagtccaatctatatcactcacatgtcattcggcgcactgagccgcgaaagcaagattgcacttgctaagggcagcgccagcgtgaaaactgcccagtgcagtggcgaggggggcatcctgccggaagaaatggagaatgcttacaaatacatttttgagtacgtgcccaataagtattccgtgaatgacgaaaatttgaagaacagtgacgccattgagataaaaataggccagtctaccaagcctggtctggggggccagctccagggcgtgaaagtcaccccggagatcgccaagatccggaacaagccagtagggcaggatattcacagcccggctacaatcccagaggtgaactccaagcatgacctgaaagagctggtgtcatacctccgcaagaagtcccgaggaaggcctatcggactgaaattcgcagcggggcgaattgaggaggacctggagtatgcgtgctatgcggaaccagacttcataacgattgatggtaggggcggatctacaggggcaagtccaaagatcattcgggacagcacatccgtccctaccatttacgctctctccagggccagaaagtaccttgatgaacatgacaaggacatttctctgattatcaccggtgggctgcgcgtttcatcggatttcgccaaagcccttgctatgggcgctgacgcaatagctattggaaccggggccctgatcgcctccgcatgccagcagtataaaatctgccagactggccactgccccgtcggggtggccacgcaagatatggagaaccgtgaaagatttaaaatcgaatctgctgccaaacgggttgaaaactacttaaaggtgtccaatgaggagctcaagcaattttcgagaattactggacacgacaatgtccacgacctgaacatgaacgacctctgcacaatcaactccgagatcagcaattacacaaatatcaaacacacgtga

SEQ ID NO: 8931 - DNA, 3186 bp, synthetic construct
  source 1..3186: mol_type = other DNA
atgctcatcacattgctttgcctgttcaccgtgagtgctaaagaaatatatgtgagcagcgatggtagcgatgacctcaacgggacagacctgaacaacccttgtagttttcataaggccatcaacatctccgaggacggcgactctatcaaaatgaaggcaggcaattattccataagcgaggaagttgacaagtccctgaacattagtgcctatagtgacgacgtggtcaacatcaagaacaagttcagctatgtgtttaaggtgaagaacaacaatagcctagttctcaacagcctgaacttcaagaatttcaacaccgccatcgagagttattcctacccaaacataatgatcaaaaactgccttttcgagaaaagcagctatatgtgtctaaatatgcggggaggcaccactatcatcacagactcaatatttcggaataataccggtagtcagggtagtgcaatcaacttccagaatacgctctacaagaatagatcctacctgcacatcaacaacaccattttcgattcaaaccacggcacaaacctgggaggagtgatctacattagcctctccaacatgtatctgtacaataatacattcattaacaataaggccgggtataccggcggagtcatcttcaatgatgtatcgaaagtgtatgataatcggtctagatatataaataacggtgcactgtactcggggggggcgatttacattaggggggataaggatctgggttcgtactatggagaccatgtggaatttatcaataattcggccccctataagaacggcgactctggaggctacgggactagcggaggagctttcaccgccgtagacgggggagagatagtgctgaagaacagcgtccttgagggaaataaagcaatgagcagagggggcgccatttggtccgatcagaaagtcagtatcataaacacgctcatttcaaataattcggcttataacgagaccggcctaacggtggggggcggactgtactgccccctgcttaaagtcaacataatcaattccacattctcaaacaatcacgccaaagaataccctgacatcttcaacgacataacatttccttcagtggacattgtggaaaatatcaataacaccgacggtaaaaaaatcagtatcaagaaccttacgaaacccgtaagctactgcttgcaacctggaattttgaacatcgcttcaagccccatcatcgagacgggcacaaataagctgctggggtctggaggctatttcaatgggaagcctattggcgaactgttgaaaatttttatcgttcaaaactaccagcgggtgcttgacaagaaaatcagtgaaaataccttcaagagcatgttgggttttatatcaagtggctgctcatccctacctagccccttcaacgattcttactacctgtcccaccgactgatcaaggagacccttgacgaatatgaaaagggcgttcgctacccagatgtaaacgcaacaggcccaatcaattggttaaccaaaaagtacttaacattcgacttctaccagttcagcaacgaagaccaccaggatttgattgtgttcaccttcaatgagtccaacacaactctcaacccccccattaatgtaactaaaaaatccaacaccacaaatcccgactttaacacggtggtctcctacgtcatcactgtaaaaaacactaacaaaacatcaatggtttttgacgcgctggttattgatactttaagtgagggacttgtgtacaatggtgcttcccataatggagtatataacaacacaaccaataccgtgacttggattctcaatatccccgctgattccgaaatcaacctgttcgtgaacgcaacagtggagaagtttggcaagctcaacaacacagtcaacgtgttcaataaaacggccaacgttaccgtgaacgtcccaaacactgatgtcacaaaggctgtgaatgtgacacgacctagtttcaacgatacgatctgctacaccatcacagtatttaatcgtaaccccaatgtggatctgatgaatctcgtcgtgagggatgttttagatgatggcctggttttcaacggagcctccagcgggggtgtgtttgaccctatctctcgcaccattatttggaccatcaacattacgaaagggggccaggccgtgatttacgtgaatgtcaccgttaacaaatatggcatgctggttaacaaggtgtttgtggataataagactgccaattctactgtgtacgtgccaatcgagcctcctgtaaacccggatatgactgttgtgaagctgtctttgaataggactgtttatgtggggaaccagactgtctttactattgtggtccgaaacacgggcgactgtgacctgggggaggtgtttgtggttgagaaggctccagaggggctggcctacagcagctttaagggcaccgactggtcctacagcaatggcaagtttacctacgggaaggtgctcaaagtcaacgagtctgccggctttgagattgtcttcgatgcggtgagccccgggaactggaccaacgtggtcgtggccggttcaaatctcacagacaacaagaccggaaacaacacgactaaggtgtacaagccggacatggctgttgagaagctgtctttgaacaggactgtgtatgtgggtaatcagaccgtatttaccattgttgtccggaacaccggggattgtgacctgggggatgtctttgtggtggaaaaggccccaatgggactcgtgtacaactccttcaagggcaccgactggtcctacagcaacggcaagttcacctatggcaaggtgctgaaagtcaatgagtcggcgagcttcgacatcgtatttgacaccatcagtcccggcaactggactaacgtggtcgtcgcaggctccaatgtcaccgataacaagacaggaaacaacaccacgaaggtctacaaacccccggtcaatccccccgtcaagccaccagtgaaccctccggtgaatccacacaaaatagagaaaccagacaatgaaaaggacaagatcattaaaaaggactccagcatcaatatcagaaaaacaggtaactcaatcttcctcatgatgctgtctgtgatcatttcaattccgctcatacgccgcaatcaaaagtga

SEQ ID NO: 8932 - DNA, 1350 bp, synthetic construct
  source 1..1350: mol_type = other DNA
atgaagacaaagtacgacgtcgtggtcattggatttggcaaggctggcaagactctggccgccaaattgggaaaaaacggtaagaacgtggcactgatcgaaaaagatgcgaatatgtatgggggaacctgcataaatgtaggttgcattccttcgaaacgactaataacggattctctcaatgctcccaagggggagttctcgctgaagagcgaatactaccgcaacgcgatcgatgagaagaggaaactgaccgcagccctgcggaaagctaactacgacaaactcgcccagtccggcgtggacattatagatggcatcgcctcattcaccaatgagaaccacatcagcgttcaaaccaatgacggcatcaggagtatagaggcagagcagtttgtcatcaatacaggctctgctcccgttatccctaaaatcgacggattaactgaaagccagaacgtgtacgtggctgaaactattatggatctggaggagttgccttcttccctgaccgtcgtggggggagggtatattggccttgagttcgcttctatgtacgccaatttcggcagccgggtgactatcattcaacgcggcaacatattcctccccaaagaggacgaagatatttccgagtccattcgggaggtcctggaagccaagggcgtacagattatcaccggggccaagacaaccaagatccaggacggctccctttactatgatgccaacggagaatcccacgtgctgaagggagatgccatcctactcgcaacgggccgcatgccaaacacagatggactgggatgtgaaaatgcagggatcgctctcacctccagaggtgctgttgtgacggatgagcacctgagaaccaccgcaaatcatatctgggctgccggtgacgtctgtggcaacctcatgtttacctacatttcacttgacgatagtagaatcatcttggacgacatgaacggcaacgggaagcggacaacggagaataggggtgcatttagctattctgtgttcatcgacccgccgttcagccgtgtggggatgagtgaaaaagaggctgaggacgcccagatcgaatatcatgtaactaaccttccagcgaactcaatccccaaggcaaaggtgctgcgagaaactgagggaatgctgaaggccataattgccgaggacgggacaattctgggtgccgagctcttttgcgccgaaagccccgagatcatcaatctgattaaattagccatggaccaccagttgaaggcggagacaatcggggatttcatattcacacacccaaccattagcgaaagtctgaacgacctcttttcaaacgcgaagtga

SEQ ID NO: 8933 - DNA, 246 bp, synthetic construct
  source 1..246: mol_type = other DNA
atgcagctaatcacaaaagacaataattaccggaggatcaacgagctgctcgaaaaaatactggacaagaccgtgaagcgcaagcacggtatcagccaggagcagcccattttcatgggggatgacaagccgataacgtggacagagctcaaggagagcgaaactggcactacctggtcccagggaaacatcacccttaccgccctgtttaaatataaccaaggcgggttcccaagattcatttga

SEQ ID NO: 8934 - DNA, 576 bp, synthetic construct
  source 1..576: mol_type = other DNA
atgaacaaaaaggtggtagtcgccatcgtggttgtggtgattgtggctattctggccatattgatgttcatcggaagctctaacgtgaccctgatggcaggtgatagctgcataacactgccttcggactacatgcttgacaacaaggggatcgcctataagaatgatatcggcatcttttttattagcgtctcagggaacagtccaaaagaccagaaagaactctttgatgccatcaaatctaacggcaagagctccggatataaaaacgtcacgaaggacaaagttaatgggttcaagctgtacgaatacgaagcaaatcccgataagctcaagaacgtgtcatccgaccggaaaattagcggcagttatgagacctggaagacctacagtccgtacactccctacgaagatgtttccgacatggatgtgactaagttcaggtacatcgcttatgtaaacgagaatacggacgacatctccgagctatacatattcaccaataacacaaatgtcgacctgtattctggcgagattacaaagatcattgacagcatcgcggtggtcgaggagtga

SEQ ID NO: 8935 - DNA, 357 bp, synthetic construct
  source 1..357: mol_type = other DNA
atgatgatcataacaactattctgggaacccttgtcgcactggagtttttctatattatgtatcttgagacgttcgcgaccaattccgataggacatcaaaagtgttcgacatggacaagtccgaattggaacgggagtcggtcaatactctctttaagaaccagggggtgtacaacggcctgctggccgtgatgattctactggcactcttcgtatttgttagtaaaaccgctttaagcgtgctgatggcctacatcatactcgtggctatctacggagggattacaagcaaccccaagatcatcttcatgcagggcggcttggccatcattaccctgatcagctgcatcttttga

SEQ ID NO: 8936 - DNA, 222 bp, synthetic construct
  source 1..222: mol_type = other DNA
atgttcaactcgaaattcctgatattaattcttggcgtgctaatcatcggtctggccctgtttgggtacttcggcctctcagacaatgcactggagtccgactccagcctgaacgaaagccacgacgacgtcgtgtatctctggatgttggatgataacgataatctgaagctcatccccaccacagaaacgtactctgaggggagcggaagtaacagttga

SEQ ID NO: 8937 - DNA, 1029 bp, synthetic construct
  source 1..1029: mol_type = other DNA
ctcataaataagcgcttcatcctggtatttgtaatcatcatgatcctgcactgcagtgcggtgagtgcatatgagaattatgacgacttcgtgtttaataacatcaccatcgacgatagcgggcatgacgataccaagctgattgacgaaaagagcttctactattatgaagaggactcggggtacctctccgacaacattgtggggggcaagaacatcaagaacactaccggagtcgtgatggctgatgatgagtatagttgtggtgcagcctctttcgccaccgttctgaacaacctcgggaataatattaccttatacgaagctaagatcgccactaataccactctgaacggcacgaccatgaagggcataatcgatgccactaagaagtatgacctgatgggagtgggagtgaaactggagaccgttcagctgaaggagaactatattgtgaatatgaacatcttgggcatcacgcactggtccgtcgtgaaggaaattaacgaggagttcatcattcttgccgactctaacttgggtaactataaattcgatatcatggaatttaatcaatactacacgaaccagacaattgttatccttaataaacaacagtataacaaccacatcagcatcgtctcaaacaatacgaattacatcagtaacattgaccagaagtacatctcggggaatggctacgccttctatgtcagcaaatctatgagctacatcaacgccaaccccaagggttacgcatttaaatacacaatcatagtacccaaatggggcggaaaagtcgtgaagctatccaccaaaaaactgacaaagcaccggataacagtgaaagtgatatacaagattaaggtgtactccaaatcacactttaagggaaaagtggagaccattcatcagccagctattttcaatctcgctcataaagcgggcacaaagtttagcgtctcaaggcctacatccttcccgatacagagcattaagtacactgtttcctactctcacttcccatga

SEQ ID NO: 8938 - DNA, 1512 bp, synthetic construct
  source 1..1512: mol_type = other DNA
atgattctcgccgtcgcatttcccgagtccttcagacaaatcactaactcaatcagggattttctaggcatccacttcggctggttttatctgatggtggtgttcttatgcgtcgtcattagtgtcattgtgatattccatcctatgggtaaaatccgactcggggaccccaattcaaagcctgagtatagcacgttcagctggatagcgatgctgttctcggccgggatgggcatcgggctggtcttttatggagccgccgagccactgagccactacgctgttatggctccggagaccacggtctttacgcagcaggcaatgcttgacgctttgaaatacagcttcttccactatgggattagcgcctgggccgtttacggcatggtagccttggcaatcgcctactttaaatacagaaagaaggaggtgcccaacatctcctccaccctgaagccaattttcggcaagtatactgaaggaaatatcgggtacgttgtggacgccctgacaatcttcgccaccgtggtgggtgtggccacttccctcggattgggtgcagttcagatcaacagtggattaaactatctgttcggtataacacagagcatcaatgtgcagattatcatcattatcattgccagcatcctctttctaaccagcgccgtctccggcatcaataagggggtgcgtatactgagcaatacaaacattcttctggctattcttctgatgctcattgcatttgtgattggacccagcctcgatatcgccaacttcttcattgaaagtattggcgcttacatgaatgacttcatccggatgagtttccgcacggccgcaagcggtacagtggctcagcaggggtgggtccaaagctggacaatctactactgggcctggtggatttcttggtcaccttttgtaggggtcttcattgcgaacatctccaagggcaggaccatccgcgaatttctcacttacattctactggtgccaagcatcttttcctttgtgtggttctcaatattcggcaccttggctatgaatgggactacccctggaagtcccatcatcaagatgccaatatctaatatgctgttcggaatcttcaaccaatatcctctggcgatcatcctgtccatattggcgattatcctgataatcatatactttatcacaagcgcagattcagctaccgtagtactggccatcttatcggaaaacggcaacgaggagacctccaagaaaattaaagtgatatggggcatcatcctcagcagtaccgcaaccatactcctcattaacggcggacttgacggcctgcagaacattctgattattactgcgtttccattttccatcatcctgatgcttatcgttgtgagcgtcttcaaggaactggtgtatgagaaagacgagatgcggctgtttgtgaaggctgaacggcatccgacagtggacaggcccttcaaatcgtacgagaaccagaataaggaggatgaagagtga

SEQ ID NO: 8939 - DNA, 402 bp, synthetic construct
  source 1..402: mol_type = other DNA
atgaaaatcttcctggatagctctttcctgatcgccctgatcaatgataacgattcattacataaaaaggcactggaatatgtcaaactcactgaagacaacgagtgctacattagcaacctaattattaatgaggtgataacaattatcgggaacaaacttggcctgaccgtggccatttcctcctatgacctcctgacgagcgtattcaacattgtgaacgaatacaagttggctgattttaatagcaaggtgatgcttatctacgaagtttacaacacaaagctcagtttcaccgactcaagtataatacacatcatggagaaagagaagatcaataacctcctgtcgtttgacaaggagtttaagcgggtcgaggacatcaatctgatctccttgtga

SEQ ID NO: 8940 - DNA, 237 bp, synthetic construct
  source 1..237: mol_type = other DNA
atggtgaatatcggcaccactaaaatatacaaaaacaaccagataaccatccccagcaaaatcaggaaagagctgaacatttcgaaggaaagcgtgattatttggagtttgaacccggacaagacaatcacactcaaagtggagaataagaagccatccgtcaaggatctgatcgggcttggaagctccaaggaagtcacgaatgccgtagacctaaagcggtcactgtatctctga

SEQ ID NO: 8941 - DNA, 333 bp, synthetic construct
  source 1..333: mol_type = other DNA
atggcagaatacacttccatcaggatacgcaaggacctagccgagcagatgcaaatcataaaaaagcagaacaactacaaaagcattaatgaacttctcgagaagacgctcgacaagacagtaaacgagaacatggaagtgatccaggagcaggccctgttctatattggcgaaacccccatcacatggacagagctgaaacagagcaccaatgggaccagatggaatcagggaaatgagaccgtcactatcctgttcaaggataaccaaggcgcttttatccggtttgaatatgagaacgaggtggaggtggaatactaccacttcatttga

SEQ ID NO: 8942 - DNA, 1206 bp, synthetic construct
  source 1..1206: mol_type = other DNA
atgatgaacattgaaactagagaatcacttttccaacccggacagccagtgagcgcggatcgcttcaagggacgggaagagatcatcgaagaaatactaaaatattttcctagtgtcaaatccggtaacccccaccatttcttcattacgggaaagagaggcatgggcaaaacctccctcgccaacttcatctccgactttgccaacaaaaattactctatgatcacagcccacatcatgaatgacggcgtccacagcatagatgaactgatagtgcagatcattgaggggattctgaactccatcaagtctgagaagtggtccgaaaagatatttggatttctggaggaccacattgaatcagtgggtcttggtggcatgaacatcaagttcaaaccctcaaatcaagagttaaagaacatcaaggataactttgcattctacctgtctgatctggtgaataattttaaggacaaagatggcttgtttattgtcatcgatgacattaacggactgtctgaaaccccggacttcgccaattggtacaagagcttcgttgatacgctcgcaacctcggtggataacgccccaatttgcattatgctgacaggataccctgagaagtttatcaagctgcatgagcagaatccttccgtgaaccgcatatttcacgttcatgagctgaaccgattggacgacgatgagatcaaaaatttctacacagatatcttcttaatatatgacattaacgtcgaggggatggctttggaggcaatgaccaagtactcttcgggcatgccgaccatgatgcaggaaatcggggacgccactttctggtcagacactgatggcttcatcgacagggaagacgcctttaaaggcatcatcgaggcgggcaatcggattggtcttaagtacctccagcccctcctggaccagaaaatccgtagtgagaactatctgagcctgtttaaaaagatcgggaatgagctcgctgcttcccccaacagcacatttaccaaaaaaacatttagcgatgtactcaacgacaatgagagtaaggtgttcaaggacttcattagtagggctaagaagctcgggatcattgaactggcaagcagcaagaagcaaggggagtatcagttcacgaaccagctgtatccaatgtacttcatgatccagaccttcaaagaggaggccctatga

SEQ ID NO: 8943 - DNA, 237 bp, synthetic construct
  source 1..237: mol_type = other DNA
atgagcggcaccgatgagctgctcctgaagatctttttccggaactacgacgaggaagaacgcaggaacggacttatcgacaacaagaatagtcagatgatcgtgctgacgggcacaatgctgactctccaggccacattgttctccgtggggctactcaatgagtttgtgtacaacaaaatcataattaatcccgtcaaattctggatttatgcagtactgaacaacagcacctga

SEQ ID NO: 8944 - DNA, 345 bp, synthetic construct
  source 1..345: mol_type = other DNA
atggagaaagtgtattgtaccgagtgcggaaatgagctagaagggggcagcaagttttgccccaaatgcggcaataaggtcgatgacgaaacattcagcatcgaggtatccccatcaaagagctacaaaagttatatcatcattggatacattcttgctatcctcggcataatcctgccgattttggcgatcttcggcgccatagtgggattttatctgatttacaggaactacggtgacctcctgtccgggaagtttaataagacgaacgtgaacgccctgctcatcctgatcttctcgatctttgcaattgttttcatgttcaacgtcgggttcatacggtga

SEQ ID NO: 8945 - DNA, 516 bp, synthetic construct
  source 1..516: mol_type = other DNA
atgaagattggcgactttgaaatcggcctgaagaccattatcctagtgatcgttgctctcatcgtgatcttcgggataatctccttttttagcggaggtgactcagttaacgtcacggacgtgggcatgactgtaaactataactacaagactaacgtggcgtttacaattataccaacggacacaatcacggaggtgaataacgtgcagctgaagaacatcgaggtgacctaccacaatgggaaaacccagcacctcgaagatgtgacattcaactccaaaaatacctacgtgaaggataatgagtatgggttcaagttcgactataccatcagcgatgactgcattgacgggctggatgaatatgatttcggacacgcaacacaccatattaaaggagacatcgtcataaacactgtcggtggaaatgagaaagtggttggccatattgattacgacgtccccgcctcggccaccgtatacaagtacagcagcggcagtggcagcgtcatctga

SEQ ID NO: 8946 - DNA, 477 bp, synthetic construct
  source 1..477: mol_type = other DNA
ctcagcaaaaagatcttcgctatactgatcgtggtaatggcatttgtcagtctcgcgagtgtgttcgcagtggagaccacaactcacgatttcgacggcctattcaacatgagcgtgccctcggatgaggagtttgtaacacttgactccaatatcaccggcgccagcgtcttcggatacaacttcaactatggcgacccaatcggggacaatataatcgtgtattactttaatgaatccattgtggacgacaatgacacgaacatcaccgagtacgtcatcaacattctggatgagaacagcacctttaaacacccgtcagttgaggatggcttcactgtcctgtataaccagatggtgcagcatgacggaggttacatgctgattgcctcaaatgataacgaaacggaagtggtggggattgttggggataatttggacgacctgaagacatacgccaactccatcgaattttga

SEQ ID NO: 8947 - DNA, 279 bp, synthetic construct
  source 1..279: mol_type = other DNA
atgtccgaaaacgagagcgaaccaaacttctggagcctgattggttatattaaagtgagtccggcgcgcctgaattgcatcacgtgcatcggcactgagtacaaaatgcccaaggaaattgtggatgccaccggcatgcggatcacacagatctcaaacgcactgcacgacctcaaagaaaagaagatagtagtctgtcttaatgaggagaacatcaaggggaggctataccaaaataccgagctgggactccagctgttggaggagctcaaaaagtga

SEQ ID NO: 8948 - DNA, 552 bp, synthetic construct
  source 1..552: mol_type = other DNA
atgcagagggagatggacgagcagaaagagcagtacgaaaaaaagatccggcatgtggaaagtgtcaatagcgccctttctagccaagtactggacattcagaaccaattagataacctggccaacgcgaacgacctcaaacgcatccaggagtacatcagtggacacgaattggtggagaaatacaatctcgcttcgactattatcggctattacaaggaagatgtgaagaaagaggactttaccggtgttacggattattacattgaggacctgataacacaggccttcaataccacaagcgcattccagtctaccgcaatccgggacgagtattatcgaaccgacgacaattggaagcgcatctacagcgagattggcctctacgaacacgactacattgagagcaacgggtatgtgctatcaaagtcccagagtaagaagatcactgatgagctggagtcctactcaatcaaactgtgggaagataacgaaaaggtgaagaagtccaaagtccaatccataatcgataacatagtcctgagacactga

SEQ ID NO: 8949 - DNA, 996 bp, synthetic construct
  source 1..996: mol_type = other DNA
atgaaaatcataatcgacgggtacaacaaatcaatccacaagaaggataacatgattatcatagaggagaacagccaaactattgacgcgattaaggccaacatgatcaccgacattacaatcactggaaagggatatgtgacgtttgacgcccttaatctcatggcccagaacaatatcaagctgatggccatcaatccccgcggacagctaaactatattctggagtcacccgattggcggaatgtaaagctcaaaaaacagcagtacatgctaagtgagaacacactgggcctggagctgtcgaaggagctcatcaagagcaagatgaagaaccaaaaagcaaccctgacaacactcaacaaaaataagcaacttaaaagggtgttcaatcacaggctgaagatcgatgaaatgatagctgagcttgagaaaattaacctgaatggcgacaacgagaaaattaggatgaagatcatgggcttggaaggaaaggccagcaacgagtactggcgggccataaaatatttcattcctggcgaaataggctttgacggtcgcaccaaaaagccaacggacctgctcaactccatgctgaactacgggtatgcaatccttgcaagcgaaattaccaagaacatcttgtatgccggtctcgacccatactgcgggttcctgcattacgacatggataagcgaaccagcctgacctttgacttaatcgagccgtttagacagcagatcgttgataagaccgtgatcagcctgatcaacaagaagcaggtcacgaataacgatttggacaaacggaacaatacaataaaactcgaagcgcgcaagctgattgctaataagattctcaagaaactgttctccaccatcacatacaatgatgaaactgtgacttactccgatctaattagaaagcagagcgagaatctggtcagtgctttattgtacggggaaaaattcatcggcttctatctgcgttggtga

SEQ ID NO: 8950 - DNA, 270 bp, synthetic construct
  source 1..270: mol_type = other DNA
atgctggtaagcttcgatataaaatttaagaccaaccgggaaaagattgaaagagtgttcgagtgcctggggctaaggaaaattcagaatgaactttatataggcgagatggacaacaaggagcagaataacttggtggagaagatcaacgccatcatcaaggactatgacagcgtcctcatcatgcccatttgtcaaaattgctacctgaaaaaagaaacatgcggacgagagatcaagttccagaacgatctctaccgcgtgtactga

SEQ ID NO: 8951 - DNA, 1083 bp, synthetic construct
  source 1..1083: mol_type = other DNA
atgattgaagtcaacgagctcacggactacctcgacgaatacctggaggaaaaacaagaggtcaaaaacttaaccgaggaaacaatcaagaagcagaccttcaatatctccaaattcattgagtaccttgaaaacgagggaatcgatgagctgaacaacagcaatgtcaaaaaacagctacgacactaccggcgctactgcttgaagcaacgagggaataagcgaacaacggtcaagacatatatgatgaatatcttggagttcatcaacagtgaggatgtgcaggaggaaatacagcacgaccccatcaagatgaaggacatcatcgaagttaaagcagaagatcctgaaaccgccaaaaaacgcattgagaaaatctccctcacgtggccacagtctaatttcttcctcgatacaatcaagcagagcgggaacataagagactatgccatttgcaggacgttcattgacagcggcatgaggctgaaggagctggtgttgctaaacaaggacgatatccaagtgccgatagacgacaacggattttacatcctgcccgaggacaccaatgagtttattgatgtgtacctcagagcggaaaccactaagggggaactgaaagaccgtactacttttataacctatgatacccttgtgagcctgaacgacatgatgatgaacaggatcaccaaacttcgcaagaatactcacaatgtgtaccggcccgtggtgcagaggaataaggccgccgaagaggtaaatcgggaggagctgttcaccaatatcaagggtaaccggattggtaagcgcggcgtgcaggatattatcaagaagcatgcacgcgagtgcgacgagagaattgagagtgaaggaatcgattgtccagtaaactacggcaagaacgtgagcgttcacatcctgagacacacagctctgtcgcattatgctgagattctgaccgtggccgaggttcagtcaatagcgggccattcaaactcccagacaactgataaatatattcacatcgaccgggaacagatgaagcagaagctcaaagtcaattctatgaggtttaacaactga

SEQ ID NO: 8952 - DNA, 258 bp, synthetic construct
  source 1..258: mol_type = other DNA
atgtctaacattgtctacctctacaactatgtgctcatctacatttacgtgttttataaggaaatacacttccggcatatcaaatacttcacaaaccgcatccactccaaagacaacgacagtatgaagctctttttcgataatatgagcaagtacctgatcttctcactgatcttgctgtatctaaacgagcttaacctgataattatcattagctttgtgctgacccacatcaatgtatatgccttcaagaattga

SEQ ID NO: 8953 - DNA, 555 bp, synthetic construct
  source 1..555: mol_type = other DNA
atgagcttcaacattatctccatcagcctgatcgccgtggctctggccatggatgcgttcagcgtatctatgacgaaggggtttacacagaaaaacctaagcaagagccagatcctgtattacgggctgttttttgggggcttccaggctttgatgcccgttttgggatacttctgcgggaatgctatcgccagtatcgtcgagaccctcgcctccattatcggattcatcctccttctgggcatcggactgaacatgattcgggaaagtttgtcttccgacgacgaggagattactgatgtcttttcatttaaagaagtcacattactggccattgcaacctccatcgatgccttcgctgtgggaattgcgatagcactgctgaaagacccaatcctcatctcaagcataatcattggcgccgtggcattcatattcagtgtgtcgggcatatttatcgggaaaaagatcggtcactttgtgggcgacaagttccaaattctgggtggcgtgatcctcatactaatcggcattaagattcttctcggattctga

SEQ ID NO: 8954 - DNA, 342 bp, synthetic construct
  source 1..342: mol_type = other DNA
atgaacgcaaagagtatattctccatttttgtgttctttgtgatccttatcgcctgcaccaacgtcgccttcgctagcgagaacatcgacgactcaaaatttagtgaagagtctgatctggacgaagtggactccgacctggacgaagtagactccgacttagatgaagtcgattctgacctggatgatctcaatgacgactcagacctagacgacctcaatgatgatagcgatctggacgagttcgacgatgacagcgatttggacgagttcgacgacgattcggatctcgatgagtttgacgacgacagcgatctggatgagttcgatgacgacagcgat

SEQ ID NO: 8955 - DNA, 360 bp, synthetic construct
  source 1..360: mol_type = other DNA
tacaccccgcaccggaacacaaagttcaaaaaggcatgcaagttgctcaatattattctggtgcatcttcctccatactcaccacagcttaatcccatagagcaggtgtggaaaagcatcaaaaggatcacatacacgactttcgtcgaaaccaaagaggagttaattaaactgtttaaaaaggaatactataagatcatcaacaataagagcttctttaacaaatgggtgtccaagtacattctgaagagtaaggtatttaactataagctgcgcaccatggggctgggcctctctgagaagtatttcctggacatcatcatatccctagccatgctgaaatgtctcatgaagccctga

SEQ ID NO: 8956 - DNA, 195 bp, synthetic construct
  source 1..195: mol_type = other DNA
atgatcaccattaacccagaacttacgaaaatgcagaaggagttcgagcagaacttgaagaaaatggacctaaatctctcagacaaccaaatcaaagaaaagctggccctgtccgatctcgtgctgatgtttagcttcgtggatttctgcacatctttcgaccccagtgatgtcgtaaagttttacagcgactga

SEQ ID NO: 8957 - DNA, 180 bp, synthetic construct
  source 1..180: mol_type = other DNA
atgaagcagaaaaccaacagcccagtgctcttcaacgcagaggagatatataagacgttcttttgcaacggccggtgtctcatcgacctggatttccccatgacatttctgtacttcctaaataatattgcccaagacgacgataaaatcattctgatcaacgtcaatcaggaaaagtga

SEQ ID NO: 8958 - DNA, 2664 bp, synthetic construct
  source 1..2664: mol_type = other DNA
atggccgtggtgatgccggcctacaattccgctaagtacatacagaaggctctcgatagcattattgatcagagcctggacttcagggatatccagatcattgtggtcaatgacgcaagtaatgacagtacaaaaagtgtggtggaagagtacatcaaggaataccctaaaaacatcactttaatcaacaacgacgagaacaggggcccggcatactccagaaacgtcggacttcaaaacgtaaacgccgagtttgtgaacttcctcgacagtgatgattgtattagccgcaatgcattcgaaaaggcatatctgttcctgaaaaataacgaggagatcgacattgcttcaattccaatctattattttggtatcaaaaacaggccccacaatctcaacttcaaattcagcaaaacgcaggtgataaacttggacgagcatcccgagtacatccagctttcaggaccctccagctttttccgattcgagaagctcaaacattacagattcaatgaaaacctgagggtaagtgaagaccctctactcatcaaccagatgctgatcgacaaccctaacattggcttcataaacggggctaagtactactaccgtcaggatactcttcaaaatagtctgattgctacgagcacaagtcacaagtcttacttcacgtcccgtgttgataattacttcatcggcctgattaattacgcgattaataagaagggctacgtgcccaggtttatccaacacattttgatgtacgacctgcaatggattgttgagatccggtttatccacctgctcctgagccagagcgagattgatgagctttacgataaaatattcttcatcttaaagtatatcgacagcgacgtgatttatcatcagctgtctcttccaatcgagctcaagcaccacctggccttactgaaggatcatgggactgcctatcgcctcaataaggacaatttccaggaggacttcaacttgaacaccgtatatatcgacaattacgagtttctcgacaaggataagatctacatctcgggggtcttgactaactttttgcgcagcaccgacgtgtatgcgatcgccgacggcaagatttacaacaccaacaagctgaatttcacccagcggcggaacttttcgcttgacttcgactatgggtacaatcacagcttcgacgtggtgctaccagtcaagcctggcatgaagatctccttcaagacgaacgcctctaatctgttgattgactataatcagacctcaagactgagcggaacttcccggtaccgcttttccaaggattatctgagcatcgattgccgcaaccatatccagattatcgagaagacaatcaccaaaggagttaagcttgaactgagcgttctgaagcagattctcaaggagaagaaacaggggtggcgtacaggtatcctcttacgcatattgtacttcatgttttatttttacttcaggaataagcacatctggatatttatggacctgccgaatagctccggggacaacggatatttcttgtttaaaaaagccattaagagcgataagctgaagaacattaaaaagtattatgtcttctcaaagtccaaaaaccttcatgagacattcgccgagcaggaaaataaatatgtggcaagttccaaatttatgaaagccagaaccctgagcggctttataacccccaatgaagaatttgaaagactcaagaaaataggcaatgtcctacagtacaaatcaatcaagcacaggctgtatctgttattcgccgattacatcattgcctcccacccagataacggaatcatctaccccttttggggaaactaccaccatttgtcggggctcgcccgatccaaaaccatatttctacagcacggtgttacaaaagacgatatctcctactggctcaaccggtacgacaaacggatagggctgattgtcaccgtatccgacctggagaaagaatcattcctcaaccccaagtacggatatgacgagagctgcatccaggtccttggttttccacgcttcgactttctcaaaaagggcgaggacaagaaggaaatcgtgctgatgccttcttggcgaagacagcactctcaactcagtgaggacgagttcatccagaccgactacttcaaatctataaacgaactgatgaataacgagtatctgattaaattccttaagagcaagggctacaggctaatattcaaacctcaccggaatgtgttgaaattcattgacagcttcgatatccccgacgaggcggaactgggcatcgagatgtcatacaacgagatattcaaccatgcgtcactgatgatcacagattattcgtccgttgcattcgattttgcttacctcaaaaagccactgatctattatcaccatgacgatgattatcactttaacctggatgacagttactttaagtacgataccatgggctttggtcccgtggctacacaaatcgacgagctgaaggatgaaatcatccgactggtcgaaaatgactgccagatggacgagaagtatattaagagagtggatgatttctttaagtacactgataaaaacaactctaagcgggtgattgataagattctggaatttgacgaaatgttttattactga

SEQ ID NO: 8959 - DNA, 519 bp, synthetic construct
  source 1..519: mol_type = other DNA
atgacattgatcgacatcatgcttaagagacggagtacaagaaccttcgccgacgagccagtcactaaagaggagctcgataaaatattgcaggcggcactgctggctcccacctcgatgaaccggaaaccgtgcaattttatggttgtggagcggagtgagactctacgacaacttgcgaattgcaaggaccacggcgcaaacctcctcgaaaacgccgataaggcaattgttgtgctcgccgacaccatgattgccgacacatggtgtgaagattcatccgtggctctgacctatatgcatttaatggccacggaactgggtctggggagctgctgggtgcaggtgcacctgcgctccaaggacaaaattcctgccgaagaggtggtaagggagatcctcaatgtggactcccactacaggatagtcggcatgctggctatcggacgctctgacaacatcccaaagccccacagcctagatgaactggataagagccgtatccatttcctggtctga

SEQ ID NO: 8960 - DNA, 396 bp, synthetic construct
  source 1..396: mol_type = other DNA
atgagtgagaagagcctgattgtgaaccacgacgctatcgacgaggacctcacagagaaattcattaacatgcacgacggacttccagtcctgcttatgaatattttggacgacttcgatgatggcatctggatcagaaggtatgagctatacctgaagtatccggagctggaaaacctggacgggaaggagatggaaatcacctccgagctcttaaaggaaggcaaaataaaagaagccgaggattttcagataaattacgccctggacttcctcgacaagcacccccaattcaaacagatgattgatggggtgcatcggcagggcagcaaggatctggaaatcttgctcaactcaatcaaggaggcattcatcggagattttgactacttttga

SEQ ID NO: 8961 - DNA, 291 bp, synthetic construct
  source 1..291: mol_type = other DNA
atgcatgttaaagacgtgctcgacgatctggacattagggtcaagctgccccagcactggtactccaccgacgtaagcaatgagtttgaggacgccgaacttgtgcgcaacgacgagataattaagatccgggtggaaggcgagaaaaacacaaaagttatcatcatcgatgtggatgacgggatgagtgtggtctcactactgccggataagaaggtcatcggagtgaagtacttgaaaaacaaggatgacttcgagtacattggcaagccaagcgaactctatttctga

SEQ ID NO: 8962 - DNA, 549 bp, synthetic construct
  source 1..549: mol_type = other DNA
atggtggataagaaagcacccgccgagggatggccgccaatttccggagactacattgtcggagaccctgaaagcccagtcgctgtgacaacactcgcctcccacatcgaagctgacctctctggcgcagccattgctggcccatgtaaaaccgaaaacctggggatagagaaggtcgtagcaaatgtgatctcaaatccgaatattcggttcctgatcctggcgggggctgaggtgcaaggtcacataactggtcagagttttaaggccctgcatgagaacggggcggaccctgacaaaaagaagatagtgggcgcaacgggagccatccccttcgtagagaacgtgcctcttgaaggcgttgagaggttccagcagcaactagaaatcgttgacctcatcgacaccgaggatatcggcaatattcagagcaagatcaacgagtgcattgaaaaggaccccggggccctggaggaagatcccatcgtcatggaagtggatgaggagaaccagaaattggtgatcgtgaacgatgacgccgaggattga

SEQ ID NO: 8963 - DNA, 354 bp, synthetic construct
  source 1..354: mol_type = other DNA
atgaacaattgccagagcagctccgtcaattggagtgaaaaggtgcgcatcctggacgaaaagatacggagagagatcggcctggaaggggagagcgaagcaaagcacattctcatcaaggttcagaccaaatccgccgagaccatcgagccagcgttcatagtgggagaggacgagactttcctggatctatttgtgctctcaccccaggagtcaaacattatttccacagccgtcctgaaaaacaacatccagagtatcggtgtaattggcgggatgtctgctgagaaaacggatgcctcggaaatccctgacaggccggcacttgacgatgctagcacattgtaccaatga

SEQ ID NO: 8964 - DNA, 609 bp, synthetic construct
  source 1..609: mol_type = other DNA
gtgaaacagaagctgattgccaaagcgcaagaactccggcagcacggctttacaaccggcgagatcgccgacgagctgaatgtctcgatggacaccgcccgatggttgactctgcagaaggcggaggaaaagaccgaggtccccgtcgacttcgccatcaactggaagagtatcgggggaaactccacccggcttagctacgtttcaggggctctgagcgatatggccttatcccatggtgaagtggacacggtggtgggtatcgcagtaagcggagtgccctttgcaacagtgatggctgatttcattgaggacatgacgggaattgacacctcaatagctatcttccacccgaacaagcaccgcaaaaatcaggactccagtgatgatgaaggcgccataagcacgaacttcggaaccgtggagggcaagaaggtggttatagtcgatgacgtcattacttccgggaagacagtaagggaggtgatccatacagttaaagacctcggcggggagccaacttgcgtcaccgtgctaattgataaagcagggctgtctgaaattgaaggcatccctgtggagtctctgatcaagatcagcagactctga

SEQ ID NO: 8965 - DNA, 954 bp, synthetic construct
  source 1..954: mol_type = other DNA
ctcaggacggtcaacgtcggagtgatcggggtaggggctatgggtgagaaccacgttcgggtctaccacaaaatggaggaggcaaacctggtcgccgtcagtgatgtgagcgaaagagccctgaagaagattgaaaagaagtatggggctacaggctacactgagtactctgaactccttgagaatcccgagatcgaggccgtgagcatatgtgtgccaaccaccttccaccatgcggcagtcatggaagccatcaagcatggaaaacacatactggtggaaaaaccgatcgccttcaccttggaagaggccgaggaaatgattgcagctgcgaaggaagccggagtgctgctggcaacagggcatgtggagcggttcaatcccgctgttagaaaggccaaggagctcattgacgacggagtaattggcgacatcgtaaccggatttgcaaagcgcgtgggtcctctaccccctcgaatcaaggatgttggcgtgtccatcgatctcgctatccatgacctggacattctgaattatctctttgaagaggagatcacacaagtgtacggcactatgaacagcatattggacgactgcgacttcgaagaccacgctgagatcatggtgaatttcgataacgaatcaacgggcattatcgaagtcaactggctaaccccatacaaacgtcgcgagttggaactgaccggtaccgccggcatcataagcgtggattatatccagcagagtatcgaggtgtacggcaaatttgcccaggatatcgagattaaacacgaggagcccttaaagtcagagcttacttccttcctgaatgcagtcgtgacagggagcgagccagagataacgggggaggacggcctgaaggcgcttaagatggttattgccgccaacaggtcctcgaaagaacacaaacctattagctttgatgaactgtga

SEQ ID NO: 8966 - DNA, 870 bp, synthetic construct
  source 1..870: mol_type = other DNA
atgattgtgggaacacgcggcagccagttagccttagcccagaccaagcaggtatgcgcctggctggaaaaaataacgggggaggctattgatctcgagattatcaagacaaaaggagataagatcaccacttcccaactatacaacatggactcgaaagggttgttcactaaagagttggacattgcccttcttgaagaggaagtcgacttcgctgtgcacagttttaaggacctcccgacggagctaaatgaggacctcgagattgccgcagttcccaaacgggagtctccaaacgaggtgctgatcagctcaaaaacctgggcggagctggggcccggcagcaagctgggcaccagcagcctgaggagagaagcattctgcaatcactacgagaaggaatttgagcttaagcctatccgggggaacatagaaaccaggatcgacaaggcgctcaacagtgacctggatgcaacaataatggctgaagccgggctcaagagactgaacctgacaaagtacatcaaagaggtgttcccaatagactatatcacgccacctgccggccagggtgccctcgcaatcatcactcggaaagactctgataagaaggagattatccaaaagctgaacgatcatatctccatgcaggaagtgcttgctgagaagatggtcctggaggagctcggtgtcggctgtcagtggcccattggcgctatcgcccgtgtgaataacaaagagtttaagctgtattccatcctgctgaccaaacaaggagaaatcttgaagaaggaaacccagaaaggatcaattaaggatgcggttgaactgggccgacgcattggagaacacttccagaattacgtgtga

SEQ ID NO: 8967 - DNA, 1419 bp, synthetic construct
  source 1..1419: mol_type = other DNA
atgaatcatcttgtcattgatctaacccacggcggagttaaaatcgccatcagcctggccaaaaaggggaaaaatgtgctggcatatgatatctacaacacgctcaacgacattgaggcgaaaatgttgtccatttacaaaatcgatctgatacagctgagtgatctggccagttttaagggcgacatgaacatcatctaccccatccacatgcctatcagctttaaagacattgctaagcacaatcccgacctcaactacaccttccagacccaccacgaaattatctgcgaactgttagaggattggggaggggacttcccaaaggttgaggtgactggagtgaagggcaagacatccagcgtgttcatgctcaaggagattctgatcgacgagaacccgctcattttatcaagccttggcgccatgctgtatgaagaccgaaagaagatcatgctcaagcagaatatcagcatagcgcctgcaaatatcaaggaaacaatcgacctggcctataaaatatccaatcccctctgtaagatcgccggcggcatcgcggaaagtgagaacccacgcaggtataactcggcaatttttgaatcatcccttggtgtgagcgggattggggatgtgggcgtactgctgaacatcgctgaggattacccgattgcaaaaggtaaatccagcgcaagtaaagccaaaagacaagtattccgctgcgggacggtcgtgtgtcagaaggaggcttatgacacatactacaacgacataaagcatgataaagtcaacacgttttccctaagcgacgaaaactcaaacctctatctggacgacgtgaaatacaccccagataagaccaagatggacatcatcttcagccacgtggaaaccatcaatggcaacataatctctggtgagattagcatgaccgctttcgcccctggtaagcataacgtgagcaatgtgttgggagctgtcctcactgccctaagtctggaaatcccaaaagacaaaattataaacgggattgagaactacaagggcatccccggcagaacaaataagaaacaaatcggcaatatcactgtaattgaggagatcaatcccgggatcaataccaagtcaattgaagagtccataaacatgatatgcaatctgaacgactacctgatcgccgttggtggagactacgggataacttgcgaggagattgatgaggagaaagtcagcgaacttctggacaacgtctcctgcaatattattctgacaggagatgttggaagctcgatccagaagaagatgtctaagaaatgtcagctgattgagaactacaatgacgtgtatgatatcgctttgaagaacaacaagaacctccttttcatctatcggtcagattacaggaagttgaagcagcggtga

SEQ ID NO: 8968 - DNA, 1872 bp, synthetic construct
  source 1..1872: mol_type = other DNA
atggatgccaaggacaaacagattgccaccgacctcgcctatgagattatccgggaggtgtcaagggtgattcgcccctacgttggcaagcccgaatctggtgagaaggtgaagatcggggctgacggcaccccaacctccctcattgacatcatcgccgaagacaagatgatcaacatcctcaaaaatgcccctgttctgagctacatcgtcagtgaggagatcggtgagttgaaactgggccggggcacgaagaggagcattaagctgacggatgaactccgccggactgaccttaaagaagatgaaatccccaagttcatcttcttagtcgatccaatcgatgggaccaataatgccatcaaggagattcctgctttcggtatcagcatagccgtctccagtgtcaaccaggggcgtcttgccactttaaatgatgtggagctggggttcatatccaacttcgccaatggtaacttttttgaggctgaaaaaggcaaaggctgctggctgaacaacgaggaagtccaccccagcaacatcataaacattagtgacatgacacttggcggatttacaaaaagcggcaccagccaagcttccaagttggtcgacaacgctcggcggatgcgagtgctgggctcggttgtgctggaattgtcttatgtcgccagcggaagatatgatgcgtttttggacctgagaggaagccgcatcattgatatcgccgcatccaagctgattcttgaagaggcgggttgcatcatcacaaacaagtacgggcagaaactcaacaatatactaagcatttatgagaaaaccattatcgtagctgccaacaacataatactccataagcagatgattgatatcctaaatgacaaccagaccgacttcatcggcaaggtaggaatagtctccagaattgaccagacccgcccgattctgtttgctgccaaaattattgactacctgctcacaaatggaagagaagtgacaattgaggagggcctggctcataggttgacggagctcaaggagaaccccgaaatcgataaaataatcaatgaggttaaggagaagcacccggagatggcggattcatttgaggatctcaacctgaatatcaatttcaagcagctgggagaaaagatctttgactttgattgtgacatggcaattatcctcggcggagacggcaccctgctacgcgcccagggtaagatgaatcctgagatcccactgttcggaatcaacatgggcacagtggggtttctgactgaaattgagacgccacacacattcgaggccctgaatagtattttaaagggagattattataaggagaagagaagcaggcttgtggtgtcgcacgagaacaaccagtacagtgtcatgaatgaggtagtggtaatgaccaacaagcctgcaaagatgatgcattttgagatccaggtggatggggagattatcgaggaagtgagggcagacggactgatcatttcaactcccagcgggtcaaccgcttacgcaatgtctgccggaggcccgatcgttgaccctaaagtggcggggttcgtgataataccaatttgcccatacaagctgggcgcacgacccttcgtggtgtcggactccagtgaaatcacagtcaaattgcttaagaaggggaaaactgcagtgttcgtgatcgacggtcaaatcaatgaagaggcggcatacgaagaagaaatcaagttcaaaaaatccgacaaagacgcttacttcatccgaacttcaaccaaatacttctatgaaaaggttaaagataaactgagcgaggggggcatccccaagatacaaggggccaacaacgagtcctcttgtcactga

SEQ ID NO: 8969 - DNA, 462 bp, synthetic construct
  source 1..462: mol_type = other DNA
atgaagatagctattgtgtctggcaaggacgaaggtcccagtaaactgaacgccttcgataacgccctaaccgatgctggaataggggatgtgaacctgatcaaagtcagctccatgcttgcaggcaatgcggagatcaataagctccctaagctcaaagcaggctcgatggtgaactgtgttctgagtgaggtgacaagcgacaacccaggagacgagattaccgcggtaattgccgtagccatcggggaggagctcggttgcgtggtggaaacgaccggaatcaatgaagacccgaatgagctgattgaagaagcagaaatgatggtcaactacatgatggacaagcggggcgtcaagatcaaaggggatttgatcgtggagagctccacagccactgtgcgcgagatcgcttcagtcgttgcctccgtcgtgtatctgaaggacgagttaatcgagtga

SEQ ID NO: 8970 - DNA, 354 bp, synthetic construct
  source 1..354: mol_type = other DNA
atgatcctcaataagtatctgtcaatgatcctctcggcatgctttttcatgctcctaatgatgattgtgagtgctgtgacagtggtgttctttaatgggggctccatcccctacgtgggcattgtttttgttgtcatcttctattttatggcacggatgttctacaactacctgcgcaacgacgaactgtacaaaaacaacaaaaattacaccagcgacgccccggatgaggagtacatgatcaagggtccaagggacgccaagaagatattcattatcttctgggtaataattgtgctgatcttggcggccgtctccctttggctgtatagcttcaacatgggaagcgtctga

SEQ ID NO: 8971 - DNA, 399 bp, synthetic construct
  source 1..399: mol_type = other DNA
atgagcacgaaagtcgtagagattaaaacactcaaggttggaaagtacatcgtgctggggggcgaagcatgcaagatcatcagctacaccacctcatcccccgggaagcacggcgcggccaaagcccgaattgaggcagtcggagtgttcgacaaccaaaagagaagtctcgtcaagccagtggataacaaagtcgatatcccgatcatcgataagcgcctggggcaggtgatttcgatccagggagccaatgtgcagctgatggacatggaaaactatgacactcttgatctgcccatgcctgaagacctaaaggactccatcgttgagggtattgaggtggagtacattgtggctttgggcaatatgaaaataatgaggatacggggcagcaactga

SEQ ID NO: 8972 - DNA, 867 bp, synthetic construct
  source 1..867: mol_type = other DNA
atgcttctcaacacatacgaaccatggaagttcgccttctccagtgagaacgagaacattaaagagaatagcttcgggataatcggcgtgccctttgacagcactacgagctatcactccggagcacggtcgggcccaattgtggtgagggaggccagcttcggtttcgagaagtacaatacgatcttcaataaggaactgaacaccgtgttttatgattttggcgatgtgaacgtagtgcccggaaattgcagtaagacctgccggatcatcgaggatacagtgaatgaactctccgacttgaaaattaaacctataatcatcggcggagaacatagcgcctcaatcggagctattaaggcactctccgaaaagtatgaaagactcaccgtcatacacatggacgcgcacagagacctggcttttgacttcatcggtgagaaatgtagccacgccacagttatgcgccgcgctcatgagctgggagtcaacctggttcagatcggcatccgaagctctagcaaggacgaggaggacttcgtcaaatcaacctacaacattcagacatttaagaacaaggacgtgcacaagcacatggacgcaattgaatactacttgaccaacatcgatggccctatttatatatccgtagacatggacgtcattgatccggccatcgcccccagtgttgggaatccaactcccggggggttattcgtctcggaaatggagaccctgcttaaaaccctgtcacataagaatgtggtgggcttcgatgtcgtggagacagcaagcgataggctgggggataacactgcggtggtagccgctaaactgatctacgattttctaacgctgatggactga

SEQ ID NO: 8973 - DNA, 1221 bp, synthetic construct
  source 1..1221: mol_type = other DNA
atgaataagagaaccattgagctgtcaggccatatcatcgatagcctgacgttgacaaagacaatgggcatcatcatggacaaggggggagaatttgacattcttgaaatagacgtgggacgcaagaaatccgatataagtcatgccaaaatcgaggtttcagcagactctcccgagctgttggagagcattttggacgaactgagcgtactgggtgctgcaatcgatgagatcaaggaggtcaacctcgtggccagcgtgaaagataaggtggcgccggagggcttttatagtagctcgaaccatagcactcatattttctacgacggggattggatacctgtggaggaaattgagatggactgcctggtagtggtggatgaagatgaaaagcgtgcttttgtcaaacccatcgccgacgtgaaggtgggcgacaaaatagtagttgggctggacggggttaaagtcacaccaccccaccgctcaagggacgagcagcaggtcttcgagttcatgaacagtgaggtcagcagcgagaagccactgatgaatctcatcaaggggattgcaagtgagatgaaggaaatcaaggcgaaaggcggaaaaatcgggattgtgggtggacctgctatcgtccacactggttccggcaagtacctggctgcactcgtcaaagaggggtacatcgacgtgataatggccggcaacgcccttgccacgcacgatattgagagcaacttattcggtacgagcctgggcattgaagtggaaacaggcaaaatcgtggctcacggccacacccaccatatgcgggccatcaacagaatcaatcggtccgggtcgatcaaaaatgcggtggaagacggcactctgaccggaggaattatgtatgaatgcattaagaatgatgtgccatatgtgcttgccgggtccatccgggatgacggcccgctccccgacgtcataaccgacaccgccgaatcacaaaagctgatgcgacactacgcccaggaggtcgacatggtgatcatgatcgcaacaatgctgcactccattgccaccggcaacctactccctagcagggtaaagagtatctgtgtggatatcaacccatccactgttaccaagttatccgaccgcggaagcgcacaggttgtgggtattgtcaccgatattggaacattcctacccctgctctacaacgctctccacgaggagtga

SEQ ID NO: 8974 - DNA, 1716 bp, synthetic construct
  source 1..1716: mol_type = other DNA
atggagtttacagcatacattctggacgtcctcacagactcggcatatcccgcaaggattaaaattgaggacggaattttcaaggagatcactccaatttccgccgactgtgagattgagttggacgtggaagggttattgctgccgggcttcattgatagccacatccacatcgagagtagcatgctgactccggcacagtttgccaaaatcgctgtaatgcacggcacgaccagcgtggtctgcgacccccatgaaatcgctaacgtgtgtggaatcgaggggattgaatttatgatcgaaaatgcaagtcaggtgccattcaacttctattttagcgccccttcctgtgttcctgccacttccttcgaaacatccggcgctgtgctggactcggaggacatcgaatttctactgaaaaaggatgaggtggtcgccctcggggaaatgatgaatttccctggtgttatagacggggatgtggaggtgatagagaaactcgagttggctcggaagtacaagaagcctattgacgggcatgctccactgctgagcggtaaggaactggacaagtacctggagcaatacataattactgaccatgagtgcagcaatttctctgaagctatcgagaagaagcagaagggtatgaagatcatggtgcgtgatggaagctctgcgaagaacatggaggcgctcttcgatttctcacaacggatcgaatacctccgcaaccaggatagctttggcataattccgagcgaagtgctggagagaagaatccacagccccatctttgactttatcgtaagtgacgacaagcaccccaacgacctgatcaaaggccatctgaacaaaagcgtgaaaaaggccgccgagctcggtgtggacatcatcaaggcgatcgaaatggtcaccataaaccccgcagcgcactacggtttggaagccgggtccatcgtcaccggcgccaaggccgactttgtcgtaatcgacaatctgatcgattttaacattctaaaaacatacgtggccggcaggtgcgtcttcgatggcgaaaaggttctgttcgatgctcccgaggttgatgcacgaaatagcatcaaaaccacgaagaagacggaagaggacttcgaagtctactttgatggggacgagtgcgaggttaacgtgatagagtgttataacggcgagctgctcacctccaaatctggggctaatctgaaggtgataaacggcgtcgtgaagcctgacatctacgatgatattctgaagatatccgtagtggagcgctatggcaaaaacaacatgaccaatgcgttcatcaagggctttggtctcaaaaaaggagccatcgcctcatcagtggctcacgactcccacaacattattgtggtgggatatgactcagccatgatggctgaagctgtcaacaccatcattgagaacaaggggggattcgccatcgccagtgaagacttcagtgagtcactctctctccccatcgccggacttatgagtaatgaggatgcattcgtggttgcaaataaattggaggtcttacataaaatgtctcaggccctaggatgcaagcttgactccccattcatgacaatggccttcatggcgctgcttgttatcccatctcttaagatatccgatctgggccttttcgatggagattcgtttgaatttattgatgtgattaaaaattga

SEQ ID NO: 8975 - DNA, 627 bp, synthetic construct
  source 1..627: mol_type = other DNA
atgaagacagatctggcgttaattggcatggaaaaaggtcgccagtacgaaacgatcatcacaacaaaaaattgcgagaatatcaagaatgccgccccaattggtgtcatctgcgcaggcagagacaagattctcaaccggatcttcaaaggcagtcagactctggagaacattatctctcagagagagttcatcgtaaatatcacgcacaatccggagctgtttaccgtgtcaaccattggaaagctgccccaggactacttcagcgaggacaactccctcaagtgtgcggatgcatacttcaaatgcgaagtgattagcctaaccgatgccatcaagcagtccgatcctattaagaagaacggcgccgctgttgtcatcaagtcgaaagtcacccaactcatgatcaacaaaccaactcaagccatgaaccgcggatttgggtacgtgatcgagagtctggctgacttgagccgttttgacatggctggagaagacaaaaaggaggagtatcttaaaaagttccgagaagcaaaccgggtggtgaccaaggtggggtatagggaggacataaaggccatgggcgaaataaaaaaggagctgataaggaaagggtataagccctga

SEQ ID NO: 8976 - DNA, 1011 bp, synthetic construct
  source 1..1011: mol_type = other DNA
atgaactacaaaatgtatgacgagatgatggagcagcctgaatcgctctcaaaaaccttcaaaagtgagctgtctaagatggaagatgtgtccaagttagtgagcgatgccgacaaggtgtatctcattggttgcggaagctcaatttcaacttgttatagtgtgcgggatgcaatccggatgtctagtaccaacatcaatattgaggtcttcacgggctacgagttctactacaacaagaagctagtggagaacgagaatagtgttgcgatatttaccagccagtccggcgagacagccgatacactggcgagcctccgcaggtgcaacgacctggggattcatacagtgtcaatctccaacgaatctgagtcctccatgaccaaagaagctatcaccagcattatcactcgatgtgaaactgagaccgcaatcctcgggacgaagacctacattacacaattggcctgtctgtaccagatactgttcgccgtaagtgactacgagaataaaaccgaattgctggctgagctgcgtgacctccccaagactctggagaagcttttggaaagcacggagtatgagaataaagccctagcccaggaatttaaagatgaggacatcctgtactgcctcggcagcggccctaacttcgggcttgcatacaagctggcaatgaccatgctgatggaaggagccatcaagcacgcctgccccctctatgctgctgaatttagacatggactaatcgagcgggctgaaaaggacgttcccgccatattcttaaaaagcggtattgagtctgacgaggtcacagataaagccatcgaattttccaagaacctggagctcaagtatcttgtgtacgacctggactcctacgcgggattggatcgcctgctgtcgccattcgtactggtcatcccactggagtggtttgtgtattatcttgctcacttcaatggggaagacccgggcgcaacaaggcacatcggcaaggtcagatactga

SEQ ID NO: 8977 - DNA, 582 bp, synthetic construct
  source 1..582: mol_type = other DNA
atggtcaaatctgaaacaatcgatgccgagtttagcgaaaaaaaggaaaaatttgatgagaagaaggaggaaacaaaggagagaatcaacgaaaccaaagagaaatttgatgagaagaaggagaagggcaagaacatcgcagataacgtaatcaatgatttctacaaaagtattgacgagtttaaggacagtatcaaaaacatgcaaaaaacagccgaccagcgctattcggagtacaagaagtcaaccgttcagactattgacattgacctggtcgagaccaaggagatgtatttcatcaaggcggcagttccaggggtgacgaaagaggatgtgagcatagaagccggggacaatgacctgactattgaaacgaccttcaagccctacatcgaagagttcgacgaagaagagggtgctgaggtcatcgtgtccgccatcaagtccggcaggtgcgtgaaaaccgtgcggttcagcaactccattgacatcgaaaagattactgctaaattcacaaacggaatcgtgaagataaccattcctaagctcatcataccgaaacacaaggtcaatgtggagtga

SEQ ID NO: 8978 - DNA, 1164 bp, synthetic construct
  source 1..1164: mol_type = other DNA
atgaaacacaatccttttagaaagcggaccggaatactgccctcttacttcacggggcgggagaacgaacttaatgaactgaacgaaatatactgctcgaccaagagaggaatccccggccacttaattctctacggaccgaagggcattgggaagacgagcctgctcctgaagttccaggatgaaatttccaacttcgatgacgtgtattccgtgaggatacctctgatggagggaaattttgacgacatctacacactgatcatcgaaaagtgctccgatgctctgaacatcaacattggtcatttctgggagaagattaattcacttggcattaacatacccctgattggtggcataagcttctcacgtgagattccaaagaccagccctgctgtggccttcgagaaaatcctgaacgtcatttatgacgagctagattcagacaaccccgtgctgatcctcttgctagatgatctgcagcgcatcatcggcgatgacgagacaatgaaaatcttgagcatcttgcagaatgccctggtcgaattaaatctgcagggaaaaaacattatgtttgttgccaccgggtctgaggacatcttctacaaaatccaggacaagctggacagcgcagtgcggatattcgagccttatctcatcgggcccctctcctatgatgaactgtgtgaagccattaacgttccaaacaagaaacagaacgtgagttttgaggaagatgtcctgaaggaaatctactacctgtccaatggcatcccatattacatgcaaatcctggcctacagttgctttgaagagataaatgcagacaacaaagtcaccatgactgagtttaaaaaggcctctgtacactccctgaatattctagctcagcgcgagtttaaggtattgttcagcaaatcgactacagaggagcgaaagatcctctgtctgatggcggagagtgacaagacagtgcttagctatagctatatcaaggacaacgcgaacctcaattcagagccgagcgcacttctcaagaatttgatcaacaaaaacatgattatcaagccaagtagggggaaatacaaattaaagaacaatcttttcaagctttacctccaaaacctgaggattaatcaggacactggcctcatcaacgagtga

SEQ ID NO: 8979 - DNA, 1029 bp, synthetic construct
  source 1..1029: mol_type = other DNA
atgatgatccccacaatccccacgccacaggagttgctcgataaaggcttcagccgcggcaaaaagcaagctgacctgcttcgggggcagaaaatccctaagcacctgaagggtaagagaattgaggagcggagggtggtcaccagttgtcaggtgatcaaagataagttaaagagcatcctggatgccgttccggaaattgaaagtcttcatcccttttatcaggattacattgatatcacagtgggcgtggacgacatgaagcaggcactgggtgctctgaactgggcctatggtataataacccagctcgagaaggaatacgggtccaaaatcaggaaaaaccctagcgaacgagcaactgcgattcaaaagcaggcctatggacggattgcctccgtggtaaacaagatcaaaaaagacctggacttcctagactttgctaaacagaatctccgcaatatgccaaccattgactttgatgccacgacgattgtgattgccgggttccctaacgtcggaaagtccacattgctcagacagatcaccggagccgatccccaagtggccaattacccattcaccacaaagggcatccagattgggcacactgagagacactggaagaacatccagattatcgacaccccgggactgctcgacaggcctgttttagaaatgaacgacatcgaaatgaatgccattgtcgcgctagagcatctggctgatgcaatcctgtttatcttcgatggctcagagacttgcggcttccacctggacaatcaatacaacctcctgaagcagatagagaagatcttctcggagatcccagtaatatatctttttaacaagatggacttggtcgaggatgcagagtacctgaaagaatacattgatgacgaggaaaactcaatattcatcagcgccatcgagggcgaagggatagacaagatcaatgcgaaaattgaccgaatcaagaaaatcgaccgcacccccgctgaagaggaggatgaagagggatattactga

SEQ ID NO: 8980 - DNA, 3516 bp, synthetic construct
  source 1..3516: mol_type = other DNA
atgctcaagttggaatcaatcgagtcaagcatctttgaggagctatcgaactccatcatttactttcagtacggtattaatatcatttcgacaggcctaaaccgggaaggcaagcccatcaaatgtcctatcgatgcaatcggcaccatcaagaacgatgataaaactgagtttgtatttatcgaagccaccaccacacaagtgaatagtttgaaagataaatggttaagtaagtccgatgataaacccggcgacattattaagacgtataaaaaggcaaaggagtttttcaacctcaacaaaaactcctccttcaagctcttcctgatgacaaaccgggacctgtctggggataaggggctggacctgataacagaggtggagaatgagaattttgatattcccctgaaaattgaaatcatggaacaggggtccatcaagcaattcctcgactacgacagcgacggccagtacttgcggaagaagtttctccagatcgatgtggaaaggctgtctaagccgttgctgcacaaaatctgtgacgagaacctgcaggcttatgagaacttcatcaacaccacgggattcaacaatctcatcgagagagaggagctccctagcattgaaaagcatatcagtaataataatctgagctttctgattggagagtccggatacggcaagagtgtcatcagcttccaaatactcaagcgccacatcaacaacggaggctatggtctctggatctctgaagaatttttgaaaaatagcagcaacctcaattacacactggatgaacttctgcaccagtactgtccaaaactggagaagaatagtggattcaaggccctgaacttcaactccaatgacaatttcctcctcattttcgatgacctgaataggagtgaaaaccctaaaaagctgatcgacaagatcatcaattggtcgaaaaacattaagtcggggaaggaaaacactgatgagaactaccacgataagatccggcttatttgtccaatctggcagaagaacatgaaaaactatgggagtaatctagacaacgactcaaatatcatcatcgagaagctaaaggacgaagacgggatcaagattctcaaaaacaccgccaaagacaagggcatcgtcctgagcgacctggaggtcaaaaactacctaaagaaactggataacgacccattttatattggtcttttcatcagcgagttgaacaagttcaagaattgggacgatctgatcaataacgcctttcagatcttcttaaaccgaaaattcgaggagctggatgaagaagagtttctgccgcaggactatgaaaggattctcctgaagctctcccagaacatgctggagaattatatcctgacccccaatctacttgaaatcgattcctggtttgtcagtgacagagataaaaaaattctgcgaatactgattaaggatagaaagatatgctacctgaacaataaccaaaacctgtactttattcatgacaggataaaattctactacctgatcagcgcatgcacaaagataattaatgataatcctcaatctgagatattcaaggaacctttctatgcagagatcattggggcttccctgtataacattgggaagaataaaaaattcatcgaatttctcgccaacaataaccttttagctcttttcgcgtccataaagtacatcgacgatgccaacgagaactacgaacaaatcctgggcatactgaccgagtggtccaacgaaaagcatgaatcatatcccagctttcaggaggaggtggtcaaaactttgtatacgtatgacagcgagctggtggtaacgctcttgggcaacattaattctcttttcaccagtattccttgttttagaaatggatcaacaatacatgggatcaagaaggcactaaacatattcggctacaattatccactgttcaagcagacaatagagcacgtgaagatccactacaaaagcaaaatcattgaggacatcaagcgcatattgtcgtctgataaactagacgacgacctgttatgcggtaccttcctgctggccggctacctcggctttgaggaactggaggagatcatcaagagctcagttaagctctttgagattaaagaggacaacctgtacatcatcctttttgccgccttcaggtgcataaataatgatatggattttattaagaaccttctggaaaaatgggacatgttcggaaagaaggacgacgagattcgatttcccttcatcgaggaactccggctgaccttccgcgactaccccgtcactgacaacgtgttaaattacctgggctttaactttcaggagttcagcaacattaagcattcaatctggtatatctgcagcgagctgaacaagccactcagctttaagatgactctggattacctttccgataacgagtacttgttcgacatccttccctttttccgcagaatccagatctctagcgagtcccggattttcctggagaactactataaaaaggaggacatcaagggtcacagcaaaaaatatgcgttccggttatgggccatgaattgtaacgagaacgatcttccaaagttacagaaaattgacaaggataacatccttttttctgagtcactcatcactcgcattagattgggtgacctcacggcgctcaattcatttattaagaacttcgatgaaaacgtggttttgaatgaaatccacaatgtgtggaacgacgaggccaagttgtttgttgaaaagtgcttcaaggatatggaacttaacgagaacaaggaaattcaggatggatatgactatgtgcatctgatgcagtgtcttgctaagattccgctggaggacgctgaatactacatcaagcaatactgggacaagattaagtactacagaatcttcattcagctgaacttttatttgtgcaccaacttaagcatcggcctcaataacgagctgttcgtggagatcaaacccgacgagaccctcttcgagcacttcaccatcaatttcctgtacatggaaggatacgacaaattcagcacagagtcccactttaacgaaataattcagtatctggtgtacttcaaaaattctgatcttgacctgatattccgtaaagctgaagagttggggtattgcaggtggattcgcaaagcctgccgaaatctggacaaaaatcagttctccaagtactgtaagaccgataaaaacatagtatccgacatggagctgtacgataattacagtttctggcagataaatttcgaaaacaactgcctcaacaagaacaggataaacaatatcctgcggctctatctcaacaacaatcagaacatcgaatcattcattaatgtggcaaaatttattaaagaaaacggaaatcgtgacgatttgaaaattctgtttgagtctaatatcaaggaagacaatatgctgtatgacgttgagtttagtgtcaagtgccgcactctggactga

SEQ ID NO: 8981 - DNA, 1311 bp, synthetic construct
  source 1..1311: mol_type = other DNA
atgattattatgggaattacagactatattaagacgagactcctgaacaaccgcgtggagcagtataacactaagcgcagctattgtggggaggacgagagacaacctcgcaccgatggaatcaacactggccttgacctgcccgatgcactgcccccagtgatcaacaagacaataaccaacgcccgttatgccgtgaaacttgacggatacacctcagggatcttgaaaaatcggatcgataaagccaacgttaatatggtgcttgttgataaggaaaacaaattgagccaagagcagaagctgactctgatcctctgggcgagaaaaattgacatctcccaagtcgctaagaacattctgcagggtggaatggtagatggggaaggtctgatcaagcctgtacagcggtgggacaagagcattggcaaatacattaaacccgtgtttttagaaataggcgcccacgggtacggcttgaaaaaagaatttaatgatgacaatgaggtgcagctatacctgcatgagatgcccaaggacattgttaatggatctccggaggagtttgataattatgtcagtgtcgaagagggcacactcacggtcaagtacgagcctgaggaagtgatcaacttcatgtacaatgagatatactgtgaagcccagagcatcatcctaaattgcctggatgacatataccacaagtgcaatctggaacgaaaccaagtggaacggatcaacaaggacaatattattgaggtaaagcctgcgatggacgcaaacggccagccatacatcaccgaactatcaagcaccgctaaggaaaacctgtatgcagactatggcaccaccgccggctccaatgtcgctatcgtgccaccaggaatcgagtccaaaatccttggggggaacaactaccagtctgactatacacgccaaacagaaatctttaggaacaatatcctcaggactttcgtcaccccgcagtctcaggcaggtaacgagaagtcgaatcagaacgtggccgagtacattaacgactcagctataacaggattcatcgttaatgtggccaacgaccagaaatgggtgctgaagtactgcaaccagctcttgaacctgcagctcgagttaatgggcatcagcgaaacgctggacatatatttcagctattcccgggatgatgtgctgcgatacatcatggaactgtcgtccgagggtgatgagatctacaagaattacctcagtaacttcgaagaggagcagcccgtcggggagaggattctcagtgagaatggcgtggaggtctga

SEQ ID NO: 8982 - DNA, 1899 bp, synthetic construct
  source 1..1899: mol_type = other DNA
atgaaggaaaaaatgggaatatatcaaagatacaacctgggccctcaacactatcacagttacttcgagttcgatttcaagaacaagaaggcacagctcatcagccaggacattacagaggatttccggaaggataatgccctgatttacaccgacgattctaatctgaagattgcaaactcccttctcatcgccgaagagaataaaatctttgacctcaatgaggatgactgccagaagctctacagcgaatttgacaaaattaagtactctcatgatgaggaaattcctggaatctggcagctgagcaacattacattcagcgagaaaaatttttacgacgacgccccggaaatatttaaaattcacgagagcaattaccaatacgtcaacaactaccccaaaaattggattccactgggcaacctgattatcgacctcctgggctttgacctactgaatatcaatctcaataacctgatcactcccctgtattataacataacgtcagagggggtgtacgaaaagcagacaaataataagctgaacctcaaaaaactcaacttcaacattgtgtcgtttgaggaaccattcaatccttttaacttttccatcgattcagaagatagtgactttgagaagatcattgaactattggaggattacggcgtgtataagtggtatgacaaagactacgctgaaaatatcatcgagagcgacgacttcaatgactttaagggaaattcatggttcatcgagttgatattcgagaacgggagggttctgaaccttcgaggcgacaatgcttatccagacacgtatatccatctcggaaacgaaatcctgaactttaaggaggacctgttgcgcattaatgagatagacaaggagcagcagaacttcattaaatccttcggtgagaacaagttagcgaaaaagaggaacataatcaaaaagattgagatctcgcagactattcttttggatgaccgcaagcactatgagttcactttagattgtgaaaacagcgtgattatcccttacgacaactatgatctttacgagccgcgggagcacatcagcagagacctcagcaagaagaattacagcgtgtccaaactgttctacgaaaacatcgtcaaagaagaaatcaagttggacgagcagaagctggacaacttcctaaatgagatcaatgagttgaagttcatcgatgagaagccccacatgtggttctatgacaagaactattatcagaaccttatcaccatccacacccccatgggtgagaaatcctacaacctgaccaacaactatgagctctggaaaaaactgggcagtctctttgaagagctgctaggcttcgacgtactgaacatcaaaaacttcaagaacataatcaatccattcgattacgacatttgcaatgatggtgtgtatgacaaggaaacgggggataagctgtcactggagtacatcgaatatgggcatgaggccgttttacattttggcatagggtacaacatctacgtggatttattgaaaggaaccacctccgggttgattgagaaggacgacctgtccaacgatgaaattgagaagatagtctctctgcttgagaagaaccgtgtgtatgaatgggtctttgatgagttttggaacaaggccatctaccataaatggtgcggcttcgatggctacaactggtatctgagtctcgttttcgaaggaaataaagtgcttaatattggagacgggaatgactaccccgatacctttgtcaacctcgcggaagaggtgatcgagttcagtggcaaggatatactgaaactgaaaacagtatacgaagatgacatcaagatctacaagaagtacgctgaacttcacctgaacggttga

SEQ ID NO: 8983 - DNA, 954 bp, synthetic construct
  source 1..954: mol_type = other DNA
atgcagtgctacaactgtaacggcatttataatgattacctgagctattgtccatactgcgggatcgagaaggtagagttcaacgtctgtagcaactgcgaggaaaagctgactaaggacattctggtgtgccccaagtgcggtggaaaacccatcgaagaaaccaacgaaatgaagtctgaccggttgaatagagaggggctcatgcacggaatgacaagttcccccagtgattactttaatgaggccatcaagtttaataagtacaatatcgacgcttgggtgaataagtcagaatttctgaacgatcgcacaatgcacaaggcgaaaaaatgctgtgacgcaggcctgaagatcaacaaagacaacatgaagctgttactgtctaaatcgaaggcccttaagaaagacgagcgcaggagcgatgagaacaatgcggagatcatcctcaataacttgctgaaacggtgtaaccaggaacttcaagaaaacgaattgaatgaggagatctggattctgaagggcgaggttctgaacgaactggacaaaaaggaagatgccatcgagtgctattccaaggccctcgagataaacccgaaaaatgaggagctctggatacgaaaggcattcctgtgctatcttaacaacgactattactgtgagatagagtcctacaaaaaggccattgaactgaatccaaccaatgagaaatactacgagaagattggagacgtgtatcatctttacatccacgataatgaaaaggcaattgaatattataacaaaagcttagagctcaaccctgataacaaacagctctgggacaccaaagggaggctagaaaaggaaattggcaagtatgaggaggccctcaaatcattcacggtcgacgctgagctgaaccctatcatgatggagcattactacctaaagcagaagtacttcgtgaattga

SEQ ID NO: 8984 - DNA, 237 bp, synthetic construct
  source 1..237: mol_type = other DNA
atgatgaggcacgaactttttgaagtggggtcctatgattatagtgacctcgatgaccggctggacaaaccggtaatatggagcgaagacgatctcaagctgatcgccgaaaactaccgcggcggtatcccattgaccagcgagcatgacaatatctacgtcggcatcgggaacaacattgagtacgagaaaggaaagctattcattgaggtgcccgacgagctggatatggagtga

SEQ ID NO: 8985 - DNA, 663 bp, synthetic construct
  source 1..663: mol_type = other DNA
atgagcttaatagatgtgggggtgactaaaaacccgcggaagatcaccttgctgaatagtgaaatcacgggaaacactggtgcaacaggaaatcccaatcccgcaccacagggacagccccagcccgcgcctagcaaggacgctaacgtcgctaccagcctcttgctggaaaagcttcagggcaaggacgtagagatcggaaagcttcaggacgagatcaataatctaaaggaagagtccaaaaagtatgatgagatcaaaaaagccattgaggaaaataaggaatttattgactctaaggacgatattctcaaagagctctctgaactgcgaaaagcggagaatgaaaggaagattaaagagtacgaggccaaatacaacttcaactacaacgagaacgcccaagacaaagagataatcgataagctcctgtcaggggatgtcgatatggaactgatggagaagctggccgaaaggcggatcaagattgaggctagtaacgacggctccacacctgggggtcgcaacccatcaaactccggggacgtgggggagaccggcgaaaccggcagcacgggcaacgaagacgccccatcgttcacaactcgcgaggagtataataagatactgaaggacatgggcttcaacagaaccagaatctga

SEQ ID NO: 8986 - DNA, 1959 bp, synthetic construct
  source 1..1959: mol_type = other DNA
gtggtgtcaaataatatcttcatctcacccatcgagtttaaagattgggagaattggaaaaacaagattaacaacagtaacgacaacgaagagctatgccacatcgcagaaacagaccgggaatggtacatccgcgccttagctgttaataagataaacgatgaaagcatattggcagatattgccattaacaacagcaattcgtacatatgcaggctggctgttagtaaggttcaaaacgacgagctcctgaaggagattgtagacaagagcccaatatacgaggtctgggaggacgcactcagccagatcgatgatgaatatatactgatggatttcgcagaaaatggacgcgatttccacatcaaatggcatgccatcaaaaagatcaagaacgagaatttgctagtgaatttcgtgaagaaacgcctgaaacatacccgaaaagatttcatcgacaaatccaagagctttgatgagagccgtgaatattcactgtgtacgatcgctgtagagaacattcacgatgagtcgctcttaaaagaaattgtcataaatgactataaccaggcgatgggcatcgaggccctaaagaatatacacaaccaggagtttctgattgacgtggccttgaacaattatgatgtgcactacaagctgtctgcgatccggaacattaccaatgacgacgtgctcatcgatatcgccaaaaaccacccccagcgattcgtgcgagagaaggccatagaaaaaatatctaatcaagccatcgccaccgacatcatcgccaatgatcatgaaattgaggtcgataagctggacatccaacacattgatgacagcctgctgttcaatcttgtgaagaaagacaacaactggcttcgcaggacatactttgtgaaggccattcagaacacagactacctgaaggaagtagtctgcaatgacgtggattcccatgtgtgcaaagccgccgtggagaagatccatgatgagtcctttctcaaagacctggttaatcgggatttcagttcagaagcatttgcgtgggatgtcatcccggctgcgctgaaaaacatccatgacgatagctttctgaaggacattgtgaacaacactaagtacggccgttacgctctcaagaacatcaccgacgaatccttcctcatccagattgcactcaattgtcgggacagccactgccgcagtgaggcgttggagaatatctatgacgaaagcattctgactcagatcgctctcactgaccctcagatgcacgttagacggaaggcagtcagtaagatctcgaatgatttcgccctcatcaacatctccattatggaccctgggttccaggagtacgatagaccatactgtgtcatctacttggtgcgccaagaggccgagtccagactgaaagtattacttgaaaatcccgacataaaaacgaacacagagtacgttgacgtgattcagagaatcaggtatgagcttgacgagaaaaggaagacatccacccagaagggaattatccacatcccttacaacgagatgaaagactttactcagaacaaaaccataatcaaagagaagaacaagaagcggaagatcacaaagaacaagagggacgaaaagtctaacctggaagtcgagatcaacaaactgcttgaaaactataagaatgacgtcctgatcaccattatatcatttaataacaagagcctgttcaagaagggctccattttcaacattgtcaaggagccagacaatccctatgatatggaggccattgctgttaaatccgacaacattaccatcgcttatgtggcaaacagtgtgagaacggtggtcaaagggaccatgagcgccgggagaatttacgataagtttggtgaagactgtgagattgaagtgatcttcgtgagggatcagattatcgctaagctgatcttcgactga

SEQ ID NO: 8987 - DNA, 273 bp, synthetic construct
  source 1..273: mol_type = other DNA
ctgattatccatttcacacggcagaaccactacgtgatcaagataataggcaagctgagttattacatcaatgactcacaggatgagaaaggcatcaagatcgagaagctcaaaaacaaaatgaggaactatgggctaaacgacctcgaatttgatgccctgatcaacaaattaattgacattggatacctcaataagagcaacgaatgcaatatttccctttgtgaggataattactacagcctgtatgacgtcctgaccttgcacaagtga

SEQ ID NO: 8988 - DNA, 1017 bp, synthetic construct
  source 1..1017: mol_type = other DNA
atgctgaacatcattaacaagaatcaggagattaaggaggagtttttttacctcgagaggaaggcgctgaggttctataaaagaaagaagtataagcaaagcttcgaatactataagaaggtgctgaaagccagtaacgagtttaagaataattccaatgaatcgcatttcaaatggtatgacgagatcctcagcaactgcctcaagaaatactctgacaattacgacgagttctttaaatgcatctattcaatgaacatagaaaattacgatgcctggttcgacaaggccaagttgtacggcaataataataagcgcaatgaagccatcatctactgttacaaattacttaagattcggccagatgatctggacctgcttgagttcaccggccacaacctctgtttctcacatagatatgacgaaagcctgaaaatctatgacatcgcactgagtatagacaaaaacaacaaagacctcattcaggacaagtggtatgtctactacaccagcgaccggatctacgatacactagaattttgcaaaaacctggagaacactgatgatattacgtccaccgattatcaggcattgggatttcgtttcgaggaaaaagaggagtacgaaactgctttgtggtgctataaaaaggggtttgagatcgaggagaccgaccacaaggagttcgatacggactctgtagacgctatcaagcgcatgctacttaagctgtccatcgacgactacagctacattaacgaattttacctggaatggattagcaagatcgagcacaagttcgaaaccacaaactgttccaagtgtggtggcaaactgactcccataatttacgggctcgtggtgggggatgaggtcttcgaggaacaggaaaagggcaacatcatcgtgggtggatgctccgttgatgagtcaagtcctacacactattgcaaaaagtgcgatgaagagtttaacttccgattcaacggactgaaaatagattacccgttctactga

SEQ ID NO: 8989 - DNA, 1668 bp, synthetic construct
  source 1..1668: mol_type = other DNA
atgacactccagaaaaaactgcaaatcaatattgtcatgagcaattacaaccagaggagcagtagctattcatccggccacgactacatcttcctggacaatctggccagcagctcttactccaactatttcagaagtgacttgaagaacctgaagatcaagacatccaatgggacggagtgtcaggtggtgtacatcccatcttatggatcgcaaggcgcagctatacttgccagggttagcgtggggcagatctcccagaacaccaagctactcctagacgtgcacgacaccggaacagcattcgctagcactctgtccacggggaatgaagtgttgatgtttgatgcaaacaacgatacatactcacagtttttcatgaactactccggtctgagttcaaacaatgactcaacagacgggggccagtttctccgcgctcgatttgtgcctaacctcgaaggcacttcgcccacggacctgttcaccaccttcgcgagcggccagcccctcgccaacaaccgtgtggttgtcgcccgcttcaagtacatcaacggtaacgtttttgtgaacgataatgcaacataccacgggtccaccattggaggcatcatgatgcagattgacggaactctcagccccgacgagagcaacgtaaaggctactgtcaactactgggggggggagaaagattattgcatgttcactggtgcgaagacgcttgtactggccagtagctttgatgcctacaaccagggaagtgacgaggagggaaactggaagcaataccattttcataatcgggttggcaccggaacctcgaatacatccgattatatagaggggttcagccgcaataatccgactaaaatttatctggggtgtttcaaaatgatcattgactatgacgtgaactcaaccatcggccatggccggggatacccaaccggcctggaacacacagagaaaatggatgtcatcgcctgcctcctggatgagggcgaacgaacatatgttaatgatgagcacactgcctggatttgttccaatcaatgtgctgtcggcgatatggtgactctggacatgtcttccacaatggagcacaccattgtgagaaaagcgcaagctggagaactggccttcggttatctgctgggtaaggtccaggttaagacctccggattaaccttagtggcggtggccgtgctaggtgatgtctttcggcttaagctcaaaaggccagtggctgaagacatattgccgaacaccagaatctacatcgacagtgccggggaatgcaaccccgtggaaggccatgaccttaggctgttgagcatcgtgaaccttcagaataacgaggatacggattacattagagtgtaccgccagatgtctgaggtggaaatgtatcgggagtctcagaactgcattgacctgggggactgcagtttcgaacaggatgagataacccacgttgtgaatatgatcgtgccttcagagagcaacatcatggcccaggcaaattacgtaaaggacgcagacggcgtcacctactgcgagctgcctgacgtggccatcgtcaataacgtccggttcgtatgggaggacaacaagctctacatggaatgggagggctgcgatgatggccagaatgtctattttatatga

SEQ ID NO: 8990 - DNA, 192 bp, synthetic construct
  source 1..192: mol_type = other DNA
atgaccatccggaagctggtggggacgctggagaacaaaggcccctacattgaccagagcacaggccactggttctactggaacggtactaggtatgtcgatagcgggtatccatacgccgtgaaactcattatcgaatttaagatcgaaaatggaatactatattactccatcacctgggaggcacagtga

SEQ ID NO: 8991 - DNA, 150 bp, synthetic construct
  source 1..150: mol_type = other DNA
atgaaatatataaaatacttcgaaaccatcgaagagtacgaatcctggatgaaggtggaagagaacgccgaggaggtctatcagagcgaggagaagattctggtggacggcgtaatcatcagccacacatacaaggaggaggaaatttga

SEQ ID NO: 8992 - DNA, 252 bp, synthetic construct
  source 1..252: mol_type = other DNA
atgatctacgagtttctggaagcaaacagaaaggacatagacattctaaccagcttccttgtaacagcgattccaatcgtcatgctctattccgaggctctgggtattacggagaataccatcccgtactgcattctgatgatcatcttgggaatcgccagtcactacgcaagccggataaggggcgagggggatgtggaagacgccaaacagaaggccaaacgcgtgctcggcttccccgaagagaagtga

SEQ ID NO: 8993 - DNA, 270 bp, synthetic construct
  source 1..270: mol_type = other DNA
atgaacaagatcaaaaagaagatcttcatatgcaactttaccaaaactattagcagcgccgtgctgacagcggtcgccatcaacatcataatgaccaacgcaacaaagtacgccctgatcgagggactgctccccttcacgcttgctatcgtaattgtgggcctcatcgatttgtacgagtataggtgtgagcgcgaggacaagattaatctagacgaactggaagagagaattgaaaaactggaaggcaatgtggacggggagcggtga

SEQ ID NO: 8994 - DNA, 357 bp, synthetic construct
  source 1..357: mol_type = other DNA
atgtggatggagaaaggcaagattctcattgcggtcccgacctttgaaaacataaaaccacagtgcttcaagagcatctatgggctgactaatcccaaggacttcaacctgtacttcgattatgtgaaaggctatgattgcgcacgggccaggaacgaaatcgccaaacttgccatcaaacacgactttgactacgtgctgatggtagattccgatgttagtgtgcagaaggacgcactagtgaagctgttggagtgtgagaccgacatagctctcggatggtacttcaagaagagaacacgaacggacgagtcagtcatctttgatttcggtaaggactacagcaatcaacgctga

SEQ ID NO: 8995 - DNA, 603 bp, synthetic construct
  source 1..603: mol_type = other DNA
atgatgaaatttatgatcaccatcaccatcaacaatatcgagaacaaggaactgaagtccaaactgaagaagataatcaataatgacgagctgctcctcgagaacatactgaatactataaacaaggagaagaactataacaagctgctgctcactttcaaaaacttgtcagagaaaaacaacacaattaaaaaactatacgaacgccttgaaaaaaatcccctcagtttcaagaccaaaagtaaatccgtcctcgagaaccttcagaagggcatgctgttggccttcttctcggacaatgagctcaaacacgagctgatcctggaaaagccaatcgcagtgattctggacaattacagcgtccaccacgcgatctttttcacggaactttgcaagattttaaatatggatttgattcatctgcctccctattccccgaagtataacccaatcgagcaagtatggcggacaatcaaggctaagatttctaggaagtacatctcaagcattgcccagttaaaatacctattcaagaccgaatttaaaaaggtggtggataatagcagcttttggaagaactgggaggaaaacttcctgcagtga

SEQ ID NO: 8996 - DNA, 489 bp, synthetic construct
  source 1..489: mol_type = other DNA
atgtccaaccaaaaactcatcaaggagtacctggggatcatttcggagatccaggcggagattaagaagctggagaacgatacacgagtcttgaacaagctttacgtgattcttgacgttttgcatgatgaaccaattccgtacatcgtggaaaagcacggtatcagccaaggaacagtctataattggatcagggagtggaatgaggggggcatggaaggcctgaaacgcaaaaagggctccaaggggcagtcaaagctaactgacgagcagctgatattactggacgagattatccaggaagagaacctccagacggcaagagaggtgaaggataaaatcgaaaaggaatttgaggtaaaatacagcattcggagtatagagcggataatgaagaaactgggatatagctacaccaaaccttacaaaatctatgccaaaatgcccgctgacgccgaagaacagctgaagaagaccctcgacatctga

SEQ ID NO: 8997 - DNA, 384 bp, synthetic construct
  source 1..384: mol_type = other DNA
ctctttaaaaccacatatgtatctaacttcggcgaaatcaaccacatcctgaattactgctatgaggagctcgagtggggagagctgatcaagttgtcaaacgagctgctggacattgaaaaaaaccatcagaacaatcggaggagtgacaatatccaatacagcgtcatcctgattgcaatagttacgctttgttcccagctgctgatttactattccaacttcaaggacgtgatacttttcattggcgggatcgcctttttatttttcctaagcctgatcttcaaggaaaagatttactacgtctggcagatcctcaagctggtgcccaaatttatttacaatttgatagtgctgctcctaaagcgcatcaaagatctctga

SEQ ID NO: 8998 - DNA, 993 bp, synthetic construct
  source 1..993: mol_type = other DNA
atgatcgaagggcactatactcagaagctgacaaatggagaatgtccatatgagctggtgtacttcgaggtcgacctgctcagaaatattatcgacaaccccaggtacgtgatcagcaacaactcgttcaagtacaatataagcatcacagagaaatatgacaatgatgagacacttgatgagaagtttaagtttatcttggacaatgtgggtctcggctttgatgaaaacaatgagcggattttcgcagtcctgctgaaagagctgtctgagctccaccctgagatgcaaaagcggttcagtgtgtatgaagtgaaaaagaagagttacgtcgacccatcatacatcaaatctatgaacgacggagaatggcccgaccccagcgtgttcagtgctatattataccagatcgaacaactgaacaacctctgctccgacaatgagattaagctgttcaaatccaactacaagaaaaagcccccgattgagtttaacatactggttctgtccaccaaaaaggagtatgacaatttcatcaagatctttgacatcatgctctccgataacatcaacaagaaattcttcgaagggaagttggatctcatcgaatttactaacaaagacggcaccaaaaagaaagataagggcaccatcacgttattcaaggagtggttgggggagattggcgttagcccagccaccatcaaaaagacgataaagattatcaataaagtacgtagcgagcgctctaaaccttcacacaacattcgagataacgaatttgacattaaataccttcagaagcagaacaaaattgtactggaagtgtacaataccttccgccttctaatcgatgagctatcgaggataaaccagatcaaggtcaagcattcaaagtggtacgtggaaaatagaatcgccatacagagcctggatgagattaagaatgaagacaacgagaactatcagctgaagatttgccagtccaagtga

SEQ ID NO: 8999 - DNA, 570 bp, synthetic construct
  source 1..570: mol_type = other DNA
atggacctgaactttatttcaatcatcctagacattattctcaccatcgtcacgggcttcatggcattcgccacgtataaaatggcccgcagcactaatgaatcggtggaagagatgaagaaaacaagagtggaggcgaacagcgctgaggtaataatgtactttaaggtcgaaaataacaggatgtacctcattgttgagaacatagggaacaccgtggcaaaggatatcagcatcgaggtcgaacccgaattaaaagacagccataacaaagactacgaacacctgaaggagatttcattcctgccgccaaattaccagatcaaagccttctttgatatgggatttaattacctgaaaaatgaggacaatcctgtgaagtacaagttcatcatcaccttcaccaacatctataacactaagataacccgggagtatatcagtgatttgagctatatcaagagtgtgtcttatctgacatccgagtccgactccattgaaatgtctctgactaaaattaaggacgagctcaagaacacaaatgattaccttaagaagcttaacaactga

SEQ ID NO: 9000 - DNA, 165 bp, synthetic construct
  source 1..165: mol_type = other DNA
atgaagatcaacgaagagacaaaggtgcggaaccagggcgagatcagcctcatcacaaccatccccaagacgtacgtcaaagccctaaatattaaaagcggggacatcctggaatggattctggatactgaaaaggagaccctggagctcaaaataattaagtga

SEQ ID NO: 9001 - DNA, 1002 bp, synthetic construct
  source 1..1002: mol_type = other DNA
atgattaaggttatagaactgtgtgccggggcgggcgggcttgcgcttggatttgaaaaagccggtctcgagcatgaggtgctggtggaaattgacaaggattgtgtggccaccctgaacaagaatagacctgattggaatgtgctgcacgctgacataaaggaagttgacttcacccagtaccacccagatatcgtggtcgcaggcctgccttgccagccatttagctacgctgggaagaagctgggattcgatgacacacgcggcaccttgttcttcgattatgccagatgcattaaggagacgaaccccaaaatgtgcatcatcgaaaacgtcgaagggttagtgaggcatgacaaagggcgaacaatggagacaatagtgaacgtcttggagaacgagctgggttatgatgtgcagtataaagtcctaaacgcagtggactacggggtagcacagaaacggaaaaggatgtttctggtcggaactaagaagggaatcatcttcaactatccgaaaaaggttaaaggcaatcctgtgctgcgtgacgccttgaaagatgtgccggagagtgagggaaccgagtactccgacaagaagaaggaggtccttgagctcgttccccctggcggctgttgggtggacctgcccgaagacgtgcaaaaggagtacatggggaaaagcttctattcgggtgggggcaagcgcggtatggctcggcgaatcagctgggatgagccatgtctcacactcaccacgtcaccctgccagaagcagaccgagcggtgccacccagaagaagtacggccattcacggtcagggagtacgccagaatccagtccttccccgacgactgggaatttgagggcggaattacttctaagtacaagcagattggcaatgccgtacccgttaaagtggctgaggccgtcggaaaagaggtgatcaaggcactcaacggcgaaaataaacgcaaggaaggccaaaccactctattttga

SEQ ID NO: 9002 - DNA, 729 bp, synthetic construct
  source 1..729: mol_type = other DNA
atgaataagtacgtcaccttcgtgagcgatgaaatctttctcgaggaggtgaagaaggttgtagacgcctatgcaacggatgaagacctgtcaaaaacaccttgggaggttctgagcaacagcagggaaaccattgaccagttcaagacactctttgacatttacagcaataggttcagcttaagtgagtggatcaactttgaaattcccagacaacatgataagacggcaagtaaccgggtgggcgatttccaccagaaccttctgggtcgggtggatgggtgggtcaatctgggccgcgggcacccatccggcatggacttgaaaaaggaggatgacaccatatggatcgagctgaaaaacaaatacaacaccatgaatagctcgtctctcagagacactcgattcaaatgcgaggagctcgccgagaaatatccaaatgctaagatctattgggcgtacatagtgtcccaaaactacgagtcattcgataaaacatgggtgtaccgcgacaataaagagaacgtggtgcatgaaatcaacgacaatattcgtaacatcgccggaaaggacgtgtatacacttgtcactggagatgaaactgctttcgagcagctgtttgacgccctgcccaacgccatcaatgatattaagaagtccaagcacatcttgaccccgaaggaccaggtagtcttcgaaaagtacaagcagctaatatttaaagactga

SEQ ID NO: 9003 - DNA, 495 bp, synthetic construct
  source 1..495: mol_type = other DNA
atggccgactccataattctcctggaagagaggaaggaggtgacaaccttcctactggacgaggggaccatcaccgcaaccacagtgacgactcccacaggtgaaactccagggtacgagtacgccggcaccaagataaaagtcgacgatgtggtgaccctctccgtcaatagtgacatcggaaaaccgactgtcaagaagtttacgggcgcggaaggcgagatcatcctgggcattgccgtgaacgatcccgttacaatgaccggagggaaacgaaagacagctatcctcgtgttggggcaccttttccggctgaaactggccagcggaattagcaacattgctgttaataacagaatagccttaaccagtacaggcgcgatcaagtctgatgagggcgaatatattgcaatgcatcctgtaactagctcagatgactacaagtacatcgaggtgttccgcccatatgacatcggaacgaccggttcgacttga

SEQ ID NO: 9004 - DNA, 939 bp, synthetic construct
  source 1..939: mol_type = other DNA
atgattaccaaaggaaatgataccaaagttcagaatgaggtaatagcgcagaccattactgatgaaactgctaagaggctcaagttagcccgcctctttccgaaacaagaaatcaaagagaacagcgactactacacatactttagacagaacatcaatctcgatgaggctatcaagaagggcctgcttggcgaagccaaagacatcgcccccggggcaagcttgcaagaactgaacatccgcaaacctgtgaccgacaccatcagtatcgatactgtggggggagtcttgaatgtcaataaggacgtgttcgactcggatatcgtgagttttgaggacctgctcggcgatgtggctaccgtgatcgcgaaccgaattgaatacaacatctacgacaccttaataagctcaccgaacgtgccccagtataacacaacgcagaccgatgacacgatggatgccttcgggaactttgtcatcaaggcccaggaggcattcaagggcaatgctggggcgggcgccgatctcaccataatggccgagtcctacaaaacactctcatacgtgaagcagttggcttactcctccaacaagctggttcagcctgtggaagacattaaggagtactatggtattgacaacatcgatcttctaggaacgacccaggccgacggcggatctctaataggggaaaaacagtatattggtttcgatctgcggaatgcaccactgacggtactgtattccaagtctagcggcactacagtcgcacccattacaagcgacgagaacattgccgacttctatcccatcattgagatcatgcggaaggacatctacgacgagctgcctcagtatacaaaactgttcatacaaagtaaggtcggcatcctgctgaataagccaggacttgccctgaagggtacttgcaggccatga

SEQ ID NO: 9005 - DNA, 927 bp, synthetic construct
  source 1..927: mol_type = other DNA
atgctgacaaaaggaaatgatgctaaggtacaaaatgaggtgatggcacagattgtggccgatacttctgcaaagtggatgaaatttacacgtttattgccaaagcaggaaattgaagagaactcacagtattacacgtacatgtctcaacgcgtcaacatagaggaagctattcagtcgggcgttctcggcgaagccaaagacattgcgcccggcgccactcttcaggagctgaacgtccgaaaacccataagtgagacgatctccatcgacacaattgggggcgtgctcaacgtgtccgctcaaatgctggattccaatctaatctccgtgaatgacatgctgcaggatgtgggaatcctcataggcaggagcattgaaaaggcagccattgacatgattatgaatagttctaaagtggcgacctacaacttcgagagtggcgatgacactggtatgaccatcctcaaagcccaggagaagttcaaggaatcggctggtagctatgccaacctgaacagcatggccgtcagctacaagtctttgacaaccctgaaatcagacatattcagtagcaacagacaggtcgaaccggtggagcttatcaaaagctattacggggttgacaacatcgatatcctgggaacagcagtatgcgacggcgggtccgagatgggggacaagacctacatcggtatggactacatcaacccaggaatgaagctactttactcccgcacgaccggcactaccgtggctcccctgggacctgacggggagatgtatgatttctatccattgattgagtttatgagaaaggacatcagggatgagctgcccatgtacaccaagctctttatcctgtcaagcgttggagtcctgatgaatgcccctaaccggatcatcaaggggaatttccgggcctga

SEQ ID NO: 9006 - DNA, 417 bp, synthetic construct
  source 1..417: mol_type = other DNA
atgaaactgatcctcgatacggaaaattcacaccccactaccattactgtcaagggaaaggaaattacacttctgctcattgagtctagtatactgattgatagctcccagatcgccaagatcttcgacaaaaaggagaagacagtagttaccaaagtcctgaaaagcaaactggagaagtacgagaccgagaacgtgaagctactcaagaactacggcttgatgcaccctgacgcagtgaagccaagaccgttctatgacttaaggcagatgctggagggtcccgcttattactacttcaagaaagaagacgaagtggatataatcaaggtgatcatccgagtcgccatcggcaaacatcgggagtggattcacaaccggtgcatcgacaagtttagggtggggtgtgtgcgctga

SEQ ID NO: 9007 - DNA, 1638 bp, synthetic construct
  source 1..1638: mol_type = other DNA
atgctgggtatcaaagagtttctcaagccttccgttttgggatactataaacgttgcgaagtgactcagatcagcttttacaaagacaaccacgaagaggagagcaacttgttaaccctgtttatcttcgacgaagaaaatttccaggggaggaacgaaatcttcttgacgggcaagaagaataagatcaactccaagtacaaactgtgcatcaaacggttttacctgtcgattgaagaaagcatcgagcttttcaactgtctgaaccagggcgtgagcaagaccagctccctcaagaagtacatttttaatgacaaccccctgaagctgctgcctcagcagttcatcacaaccaatgaggacatcagattcaataagatccttaaaaacaacttccattccgggagctatatatttgagttttttgacgaagaaaaggactttgagttactcttcggcctaaataagtcgggaaggttgaaaaagattagcaagatgatcggggaagttgtcccaattgatctgctcagctgtaccgactgcctcggaaactacatcttccagctgcccatcaccatcctcaatgtgcacacaaacaagaataagaacatccttggcatcgatttttactggcacaacaacttgattaacgaggtcaagcccaactgcctgatcaacatctatagtaaggtggacaacaattatctattcgatattttcgaggaatataacaaagaaaatcatcagaaaatcaacatactgccctccggcaagaattatgtgctgaaaatatggaacaacgatctgaagatactcctatacgaaatgaacagtaaatacttcgaaaagttcagggtgtcactgagtatgagtgagtgtgagcggaagttcattgaggataacggagaatctgaggtcacgatcatgagcaaccccaaattgagcgacgacattagttatctgaattaccgcaacgatgcaatgtataagaagaacttgaaggagctggaggataaccttaaattcaacacatatatgcagaatgagaacgccctggaagacataaaaactctaattaatgagtacgggaaaaatggtgtgaacatcattgacccttacctcgagccgaatgacctcatccgaacagtagtccacctcaaattctacgacgcgccaataaaggcaattacctctttaaaaaattcattcaatgaactgctcattatgaaggaaatgctggagcaacttccaaaccagaatatcgtgcaaaatttcaagaatgtgctgaatgagaaaattgagaaggagaaaaagtctaaccttgagtgcatcgaggattacaaaaaggagctggacgagaaaatcattaatagctgtggcctgaacctggtatttcgggcccagtttgatagatacggccaaccattccatgaccgcttcctgattttccctggagatgacgagaagctccttgaacccatagtcttttccctgggcacttcactgaatgcctttggtaaacacttccacatactccaagaggtttcacacccgcagcatgtggctgatgtgtttgataagttatgggggattctcgaacagaaggaggagtgcctgatctggaactccaaggagtga

SEQ ID NO: 9008 - DNA, 1521 bp, synthetic construct
  source 1..1521: mol_type = other DNA
atgggggacatccggactaaacgcggagtgagcgacttggaatttaaaggcatcattgataacttcgacgagtttaacatgattctcgttaatgaagagctgatactcttatttgagagtctgcatgacttttccttcgacgaacttatgtactttgaagaccccctccattacgaaaacatcggtgtgcagaagatcatgagccagattgatgagatcataagcgtgctgttctacaacattgacattaaaacaaccgacgatgtcatcagcatcgtcaaaagtgatattctattgttcaagcgggctatggaccagatcgatctgaaatactttattttcttctcgtacctaaactcctatttgaacgttgatgtggactatctcatcaaccactttaactacgaactaaacatgatcaagatggaggaaaagatcaatgagctgttcaatcaaattcaggtgttccctaagccgaacgacaacaacctctcaccacttctgaagaacgtgctcttcaagtccctcaaaaaggacgacatcatgcactcctcactgaagctgctgaacatcagtaaagaccccttcattttttacaacttcaagatttactgtccaaagctgctcacttccatgctgatacttattaagaagataaactatgatttctttctgcggaatatgtttgacgtaaacaacctgatcatggcagtacttttctgtaaagaactcgacataagcgagatcttagagtgctactacgagaacgacatcagcaacattgatctgctgttcacctttttgaagaagtccatagattctaatgagttgatagatgataacatcgtgttcatcaaggacatcctacttgacatcctcgagctgaacgagaacctgtttcgtaaaattatcagattattcaagcacaaaaagctctttaatagaagcatcgggctcctgctgtccggcatcaacaaatgggaagtggaactcatcgttaatgaatttgaccttaacttcggggccaataatcacctaatcaatcttagggagaatatcctgatcaacctcgataaaaagtcggacaactttaaattagtcctgaaactggtgtataagaattgggatctcaacctcaattctctgattgatgacgatgagaatggatgggatctgctgtgcagtgactttaacagcttcatcctggagtattacaatcaattttatgacgacgacatgctggtcgaggagatgaagttgaatttcaacttccttgaaaaaatcaactcaacctggtcatctaacttcacaaattacaagaataggatacacgtgtactacacgaaattgtatctgttgagtagcatttataaaaaacgcaatattaataatatagagatcctgggctgctatgagaatttcttcaagaacaagtacctgattgaggtcctgctgcgagataaggccaagaagagcatcattgatttcaaaaaggattataatatgatgaagattcagtga

SEQ ID NO: 9009 - DNA, 1488 bp, synthetic construct
  source 1..1488: mol_type = other DNA
atgttcaaggagggcatcaataccatcataatcgaaagttatgatgaactggcatgcatcataaagggcaagcatgaaaagaacaagatggaccttcgtgaggactttatattttggggcctgagcaacatcgagtatgaactgatcccttctgctctccggcgcaacaagctgaaccagcttgaaatcaatgagctgatcgagtctgaccacatcttcaaggtgtcaatcgatgaaaatgatgccaaaatgttcaacctggagtattccgagtcaataaatgatggggaagttatcattggcgtcgacaaatacgggaatctgattcacgacgtgaagtcggattacaaagttctcgaatgtgacctgcagagagagcgcgagaactaccttctactgaagttctttaattgcgcagacaagtcaggtctgaaagttaaaagtgagggcttcctgcgcgagctgattcacaactatagcagtaagcgactggaagagtactggctggattttgacattttagagaccatctccctggcccagcactacggtctgccgaccaaagcgctagattggtcctatgactacaaggtgagcctctattttgccgtgaaagacgtcatcgaatccaatctgagttccgatggcgtcttgtgggccctgaattacaagctgattgaaaaccacaacttcaatgaggaatattatgtgaacctccacattcacaggcccgagtataacacaaaccctaacttaaatgctcaaaaaggactcttcactttcctggagaggtacgtgggagattacgacaagccactgaacaaaataatttcggacgaactgaataaaactcttgaccaaatgccatgggacaatctttacgaatctaagatcaggacaatccccgatgacatatccaaaaatgacacgattttctataaattcattattccaaaggagatcaaacagaacatcctcaacgagctgtatctcgaggggtactctgaggagtacctctttcccggatacaagggagtgtgtgaaagcgtaatcaaccgggtcaagctcaacgagatacttaagaataacgacgaacatatcaaaaagagcatcctcttgtccgtggactggaacttgaacgaaatcattaacaagaatcagctttacgtcttcgtaaacctggatttcaaagaagagatcgataagatctttatttaccataacaatgacgtggtcggctactttcggggaaacgagatcattaaagatagcctaaacgtgttatgggaacagttcggggagcatagcggtctgagtgaggataagtttgatgagtgctttaaggggaacgatgagtcattcgccattagaattaacgatttgaatatctttaagcacagcattaaactctgcgacttcgagttggagaacgacttctgtttcgtggaggacaatgaagacctcaagttcctattgaattttaattga

SEQ ID NO: 9010 - DNA, 819 bp, synthetic construct
  source 1..819: mol_type = other DNA
atgtcagataacaaaaacaataacattagttggacatccttttgccaggctatgaatagcatcgcctactggctcctccaaaataaaaagaagtacaagaaacgcgaccattaccaaatcctgacgcttaaggggagttgcagcgacatagagaagaaggccaagaagttggggaacgataaactagtgtcgatgtatacaatggccctaatcaaagataatacgtctttagacttcctgccaaactatgtgaccctgaagaacggcgagcagattgataaggccgaatatgtggacatggccattaggaccgaggcatatatccgcgccaacaaaaggcttccggctattgtgtacagaatgagcaccctgcccgactacaaagattccaccatgaagctctttatcaatgtcttcaacttcaaaggaaacacaatcgatgaagcactggctattatcagcaagatgaagctgtacagcaaatacttcgattcgcagaagaccgacaagaaaaccatcaatgacgctagcctgggtaagggtagcaattgtgtggactggggacaggtatactatcgaatcgcgaaatcactggggtacgacgtgcagtttgtccacgtcaagtgccgggtgagtggcactggccatataaaactcagattgaagcacaagaagcacactggaggcaactggattaaccgggaccccgcagcagttgcggacaccacttccggcaatgttaaatcaatctggtgtgaggatgggtacctcatcgcctatgacccttcctggatattcacagatctgtatagctcctga

SEQ ID NO: 9011 - DNA, 789 bp, synthetic construct
  source 1..789: mol_type = other DNA
atgggagcctttgaggattacagaaagcgcatcagaaaggagatccccgactctacagagtacttcaattacttctttaataacgattatgacaatgccatcaaagtggtgaagagggacatggacaagtacaaccagaagtatggcatcgtcccgttggaactggaaagacggctggaagacgccaagatgatgaaatattccaacatttattacaagaacaacgagaaagctgaagagctggagaaagaaggcaaaattgatgaggcaatcgaggtgctggagagcaatattcttattcatacggacaccccattcacatattaccacctctccagcatatatcaggaccgcaacgaaatcgacaacagtatccgcgtattaaagcatggtatcaagaactgcaggaagatccctaacaaatctcacgttaatagtcttaagcgagatctggagaaagcaaagaagattaagaaggagaccaaatcgcagcggttgccatccgcaaacgaggaacacaagcagcgtgataaggaggccgacgacctcctcaagcaggggaaacaggacgaggcgattaagctgtacgaaataaatctaaatgaaaggactatcagcaacaactcctatagcaaactgtttaagatctacttcgattcagagaaatatgacgatgcccagcgggtgtgtgaacaagctatcgaaatttacaaacccataaatgcggccaaggtcagccagtaccgacaatacctctcaaaagtgtacaacaagaaagaggatctgtga

SEQ ID NO: 9012 - DNA, 198 bp, synthetic construct
  source 1..198: mol_type = other DNA
atggccaacataaataacacatcatcctacatggacgaggacaaaaagcaaattatcaaggagagcaactacacctttcgggatgcactggaagtcagtagctacctcatcgaagtgggcaagttcgagaggttctataaagaaatgcagatccacgatctacagaaggagctggacgaaatggatgacggggagtga

SEQ ID NO: 9013 - DNA, 249 bp, synthetic construct
  source 1..249: mol_type = other DNA
atgttgctggaaaagaccaacatcagcgcccgcgtggacatcacgctcaagaagattgtcgaggatagcaccttcacacacaaggacgcctatgaactgggggcaaaactgatagctatgggcaatgcggaagagacaattgtactaataaacaccaaccccgactttgagcggatcatgaaacagactgagtactcccttatcgaggccaggaaactggagctggaacgagagctcagagtgctctga

SEQ ID NO: 9014 - DNA, 813 bp, synthetic construct
  source 1..813: mol_type = other DNA
atggggcgcggaaatagcgatatcatctattttttagagcagcacgagcaggaaataattaactgttgcaagaagggaatgagcaacaacgaagtcatcgagctcctaaaaacaaagtacggccgtgatgtggcagatattacttatcgaaagttcaaggcgggcctcaatctcaccaagagtgatttcctggagacattgttggacgagattatggtcatgaagacctctggggccacagatgccaatgtccggcgatggctggaggaggagcatgagatcgaagtgagccgctccaccttcagtagattcaagaagaaatatcacataacagacaaagagaaggaccccagggcacgggataaagattccctcaccaacagggccatcactcagggccagattatagacaatgaagttcacaccgacaacatcgacctggctattgatacgatacttcagcaacaggtgactgatatcaaaacgggtctggacaaccttgacaagattaccaaaaacgctgtggggatcgagattgactttgccaagctcgaccaggaggtaagatacaatgccaacgagaaatccctggcgagatacctgatcgacctcaccgaactgaagattcgctacttggaactgtcagtgaaagcctttgaggctaaaaacaggctgttcaaggatgaaatggaccggctatttaaaaatcgggttcttgaactggaggacaagaagatcgaaatctcgcagaaagacatcatgaacgaaattgagatcctggcaaagcaaatcgatgacaacaatgtgcaatga

SEQ ID NO: 9015 - DNA, 1419 bp, synthetic construct
  source 1..1419: mol_type = other DNA
atgatcaccatgtacaacgagaacaacgaattttacttggacgctagggacaaggtcattctccagaaatgtgtgtatgagaatccctatattcctttctctccatttccaaagcaggccgaaatgatcttggctcgcgaaaaggaagtcctgatcgggggggcggcgggagattccaagagcacaagtctcttgatgagggccctgttctacgtgcaggatgacatgaatgaataccatgccctcatcctgaggcggaccctttctgacttgaagcggaagggcgctctgattcacaaggctagtcaatggctcaatcgaaaggaaattcagaataatgccagtatcaaaccgaagtgggacggaaccgagcacagctggaccttccccaatggaaacagcctaactttcggctatctccgtaacatcaatgacctcgatacctatcagggttccgagtaccagttcattggcattgatgagctgacacagctggagaggtttaaatacatctacatgaggtcaagggttcggaagaccaaagacaataagcttcctacacagctgatggccagcagcaatcccggtaagcgcggcaacaagtgggtgcgggagcgcttcatcgagaaaatagacactgacatccaggataaatcgcaaataagattcatttcctccagctacttggacaacatctatctagacagaaacgactacgaagaatatctgatgggcctggatagagtaacaagagagcaactgatgaacggaaactggtatgcctcagtcaaaggccagctttttgacgagtcagacttccacataatctctcaggacgagtgcctgaaaattccaatcgtgcgagtcatccgctactgggatctggcaacgaccgaagtactgaacgacgacaaactgagaggaagtgatcctgattatacggctggtgttcttcttgcgaaagatctaaacgggaatatctacatctgggactcctacgagtttcagctcgagtcgcgaaacctgatcaatgaaatactgaacacggcagcacgtgacaagagcgatgtccagtatatcgaactcgacggcagcaccgggaaaaacttcggattattaatcattgatgagctcaacagacgaggcttcactaccggtaccgggaactcacgcgagaataaggtggaccgggcccgccgggtgtccgcagatattcagaagaacggaatattcctggtggggaaggatcgcacagggtttacgaagaaatgggccatggagtttctggagaagattactgcttaccccaatgaggccatccatgatgactgcgtggtggcatttactggcggctacgaaaagatagtggccgagaaacagagccaacgggttaacgtggataagtggtactccacatga

SEQ ID NO: 9016 - DNA, 267 bp, synthetic construct
  source 1..267: mol_type = other DNA
atgaccgaccggagcgcggaaatcagcaaaatcaacgacgagaatcaggaagaagacgaggagctcttcaatagcctggatgagatcattagtcaaaacatagatgaaatcgacggggtcgtgatttcctttccagagaaaattaactcaaagaatggcatcgcccacacagcaagggctttcatgtggatatgcgacctcgcccttaagtcgatcctagatgagaagtactcccagcccgtgtggattctgatgaacaacctgtga

SEQ ID NO: 9017 - DNA, 1779 bp, synthetic construct
  source 1..1779: mol_type = other DNA
atgaagaatgcccctaagaattggtctctggctgagcctagtgaagattacggtaacgactatttcgtgaaagtgtttgataaagatactgacgaggccacaaagatctcattcataatccagctaaaaggtaccgaagattacaaaaaggatgagaaacacgtgaagttctcaatccgcacggactatctcaaatactactacagtaaggttgacatgcccgtgttcctggttgtggtagacacaattaacgaggagtactgctggctgtttgtgcagaaatacattaacgaagagctcaatgtcgaaaagccaaactggcactcgcaggagaccgtgaccctgtatattccgatcgaaaatgattttagcaaccccaaaattatagaacaaacagctgagaaggggagccagtattgtaacattctcgtaaatggcacccccacacaggagctgatttggaaagtgaagaatattattgacaatcctctcgagaaatctaaggacttaaaaaagcaatatagcgagatattcaacgccgagacaaaggtgggcttcgagtttatccataaccaaaataatccccaaaacgcaaagaagcacttccggagcgtttatgacaagaccaaagacgacaatgactacgtactagcccatttgaacagcatcatcggattaaccccgtttcttgattgtcagaacaaaatcgaggccgagaagctttttgaatacatcaaggagggcgagacattgtccaaaaagaacaacatcaaatatctagaacactatttttacgggctcagactggagaagctgtgcttcatcctgcagagtcagcttcgagacctgctggtcacccagaagatatctaacctaggcaaaacaatcttatcctttgtggtcgaccccgagacgactgaagggatcaaggagatctttgagatcctccataagctctacgccgacttttgcaagaacttgatcgagaccctggatgacaaggacttgtttatattcctggagttacttcgcatgctgatcgggatgcagctccaccacatagaagcggtgttcacctccactgatgataacaccaaaaaggcactgttcaaccagatggatcagctgctgtctatcttccgtgacttgattaacttcacctccgaatttgatattttcaggtacgaccttctgtcattcgagaccacttacctctacttgatcggagataaacagtataatgagacggtggatgaatacatcaacttcgcaaaggaaaacaagtcccagtaccacctcaagagagccgaatcacttaaagaaaagctgtccaagccactgaacaggcaaaaagacattagtgagatgagcgatgaagaaatccatgatctcttcaagacgctgattttgatcattgaaaagatcgatattgatgtcgatgagactgacgaagctatggtcctgaggtgcgcagtgcgggacctgaatccaaagcgcgtcctggacaattgcaagcaccttgagctccattatggacacgggggacagtacgcgaaattcttcggactggctagcgacggcctcaaaacgatctattgtgagcacggcggcattatcacaaaccggaatctggacaacacttatgaagaattttacaataagtactgcaaggagtgtgagcataagatcaaacaggacttcaagtggaatcctgacaagctgtcgtatgtcaaaagcaagaaatttaaagagatactggacaagaacccattcatttga

SEQ ID NO: 9018 - DNA, 348 bp, synthetic construct
  source 1..348: mol_type = other DNA
atgactaatattgagatcaacgcagaaaccaagaataagctagaggcgatcgggaagatactcagcccatacctcgacatcggttacgacgactttgatgaaattatcggcattttgatcaataacttcaataatcacaaactgaaagccgagtacgatgagaaggaaaacatcattaagatcggatatgaaaacagcaaaatatactccatccccattctgatattcgagcttaagaaggggtgctatgagaagatcggcatttggatgcagaaaaacaactttattccggagatcaacaccgatgtgacggaatatatcaaaaagtgtgaggacacattcctgtga

SEQ ID NO: 9019 - DNA, 657 bp, synthetic construct
  source 1..657: mol_type = other DNA
atgaaggggtatgtgggcccggagtttaagaaggacgcattcaactgtccctactgcgaggtgtacgctcatcagaagtggagatatcggctgatgatattcaacagcaacggggagcaccctgccgaccccatctacgaccaactgggagtcagggggtggtccacaagcaagtgcgaccactgcggcgaaatctcgttttggcatgatgagcaactcatctatccaaaatcaagtatcgccccactgcctaatgacgacatgcccaatgatgtgaaggaagattacatcgaggcccgcaacattgtcaatgattcaccacgcggggcttgtgcgcttctgcgactggcgttgcagaaattaatgccgcacctcggcgagtccggaaagaatctgaacgaggatattggcaatctcgttaaaaaaggtatttccagtgaagtgcagaaagcattcgatagcgttagagtcattggaaacaacgctgtgcaccctggtgaactcgacttgaaggacgatgtacagaccgccattagcctattccggctgatcaattacattgtggacaaccagatcagcagcaaaaaagagatcgacggaatatttgaaggccttccccagataaacatcgaggccatcaagcgtagggacaagtga

SEQ ID NO: 9020 - DNA, 987 bp, synthetic construct
  source 1..987: mol_type = other DNA
atggagtacaagttgaaaaagtacttcattcatgacgtgctgaccccctggatgcacctggaagacatctaccttaacgagaatcacccggctcacgaggatttgaagtatgacttggacgcgattaaggaacaggaagtgctcacatactacaagaagcacgaagagcgaataaattttttgaaccggaaaatcaagaacaagataatctacagcaagatcctcctattcggagaactgcttgccaactccatctttgaagataggctcgaggcactcctgaagaacgagccctatgacaggaaagagttcgagaacttttatgataaggagaatctgatcaaggtggataagttttccaaagtgtatgactcgatcattattaacggcaatagatacggcctgtgtctccctatcaatgccttcaactcaagctattggattagtcaggaactgaacaagcttaacctggacgatgtggacctgaagatccgagtcgaccccttcctgaagaatttctccctgatctgtcaaaaatccacggtcttctcaaagccactcaactggaacaagatccgcgacttaaaaaccgttgataagggccagttccggaattacaagaccggggaacttaccgagtacatgtggaaacctagaaaaaacaaccgggttgtatttacttgcgaggaactgccaagcgaagatttaataaatctccgcgggagcagatatttccatgccatttttgagaaagatagtggtcgctttattcactgcgacggaagcataaaaatttacaacaaaaatagctttaagaaaaggtgcaagtacacaatcaataacaacgagatcaatgacatcgggaaggaggtgaaaatcttccgtgtcgacaaaaatattccaaaagagatgttcatgagcctaataaacagttatttctattggaactacgatctgatcgactactttctgaagaaaactatttga

SEQ ID NO: 9021 - DNA, 417 bp, synthetic construct
  source 1..417: mol_type = other DNA
atgttcaggtgtgggtgctaccccaatcacgagatctgcaagaacaagaacacatgcgaattttggataccgctgaaccagaagctcaagcaactgaatcagcagatcagttacgagttgaaaatcctggagagcctcaaccagagaaaacgcgactacttccgtattttatccgagattcaacagggaaggtataccgaaatcgtggcaattgacggtcgactaaagcgggtgcctaaaaagaatgcccgcggcgagtcaatcctgaagccagatgatgtacaggtcggcctgaacttcaatgtgatcagcaaagagatcacggacacagaaaccatcattcatgaactccggattagagagaagaacatacttaaaatactgaagaaacagtattggactatcgcgtgtaagtga

SEQ ID NO: 9022 - DNA, 639 bp, synthetic construct
  source 1..639: mol_type = other DNA
atggacagtcccaaagattgtctgttccatcacctgaagtacctggcggactttgtggtgaacgaaattaacgaggatatcgagctccttagactgccttggcaggaactgagcaatcaactgatcaagcgggcatacgcccagtgtgagcgggaatgccccgactggctgctcacttttgccgaaagcgtaacccctgaggatctggacgatgaggagatagaatatctgcgaatgtttttcattgacgagatcaacaagcacaacaaaagcattaaggtctactccgccgaagacggatatccgataaaatatcacgactacttcaccgattcggtgaaagactcaaacgacttctatgagagggtctttaacatcatcaatgagcgcctagtgccatatatggtgctgcaccatggccgcgacgggctcgactacgtctgctttacaagcggccttaaaaaggcattgaagaatgctaatgaggtgtgctacgatgtgaaggggatcgctgaattgttaggttgggagtacaaatccgttaagattccaaaatccacgaaggttatggtggtaaggttcgataagttcctaacattcctctaccccaacctcagtgaaaaggaggtcaataagtga

SEQ ID NO: 9023 - DNA, 681 bp, synthetic construct
  source 1..681: mol_type = other DNA
atgtccgagggaagttcagccattcagatcaaaaaggctatcggtaatgtctataagcccgactacgagtttacatactttaaaaacataatcagtgcgttctatctgcaggggaccgacccagaggtggtggagaagattcttactgagttatacaaccagcttccttctcacgagaagacactggatgaaatcatcaaactgttcgaggacatttatctgggtgacgagaaccctaacagcgggataaagggcatcgaaaggttcattagcgataagtacgataaaaagaccagcattctcgtggggcgagagttgaatagggcaatcattccatatgataccaacaagatttacaaactccaaactggctccaacaagtatatcgtgatggactaccgcaacaatgaggtcactacacagacgatcgaatggaaaaagggaaatgaggtggccgattacaccagagtactgttctgctaccccatgcggatcacgatccacgacaatccgatatcggaagccggcataaccttcagcatcgaatggcggaccacagacggagggcattttcacaccaaggacatgaacatcgttgaaattgaacattatctcatcgagcacggctacgtcctatcacgctaccagtccaaagatgtggttcccggcctgattcaatga

SEQ ID NO: 9024 - DNA, 501 bp, synthetic construct
  source 1..501: mol_type = other DNA
atgagcttcgagaacagcaaacagacaatttttaccggtacacaactggactacgaggagattgtcgaaatccccgagggatatgaaaaggcagagctgaaagactttgaagacgggaccctaataaggggccgcccagagatggcttcagtgtcctcgtttaccttcgacgacgacggcgaagagaagacagtgaacagattcaagctctacatcttccaggatgccgacaaaatatatgtggaaatcaatgttaatcttaagaatgatggagatatccacaagaacgtcaggaagggcagcgtactgtttgatttcttaaccagcattctcgagttggagaacgccgggagcgttggcaaatccaacattctgagaaatgtggatctgtccgagtatcgggagtttgtgaaccgactcagtgaaatgactatccaggtcaaggaacggtcagggacttacacgttctacagtttcatcgtgcgcgacgtgcaggtctga

SEQ ID NO: 9025 - DNA, 549 bp, synthetic construct
  source 1..549: mol_type = other DNA
atggtaaaagccgagctgatagagaatccacaggaaactgagatcgtcaaagtggataccgtcccggatgtagatgttgcgattgagcagtgggacgcctatcagcggctgtgcaagggcctattgaacgacaacgactaccaggagatcatcgtgaaggaaaaagatgagaacggaaactacgtgaaggtgaagcgccacttcaagaaaaagtcagcatggcagaagctctcccgggcattcaatgtcgataccgaaattgtggaccgggacattgagcgaacaaagatggggagagtcagggaagcgtattactgtgttagagcaagccttcccaacggccgcagcgtggagagcgatgctctctgctcgaggtccgagaaaggtaaggacaaagtgagtgaccataccatcatgtccactgccaagacacgcgctacgaaccgtgccatagctgagctgatcggcgccggagaagtgagcgccgaagaaatgtcagctgagaagatcgccgggcaaagtaaatttctgaaggaggacaatagctga

SEQ ID NO: 9026 - DNA, 300 bp, synthetic construct
  source 1..300: mol_type = other DNA
atggacagctatctacccgattgcgggatcgaacataatcagttcgaagacaactaccacggcattcttacgcacagcggagagatcaaagtggccaaaggcgatgtggagcaggagatcctctacattgacgatgacggtatagtactggtggacggcggcaagaaggcataccagacactgatccacaccaagctgttggccctgattcaatatgccaaagcgggggatatcggactcatcaagttcatacggggagaggctttcattgtcgggtttaggaagaaacgctccgactga

SEQ ID NO: 9027 - DNA, 105 bp, synthetic construct
  source 1..105: mol_type = other DNA
atgctcgaacaggaggtgaacgggaagacccacgtgctggtccccaaggacatatgggacgatatcatggccatgttcaatgagcatctgaacaaaggcgaatga

SEQ ID NO: 9028 - DNA, 159 bp, synthetic construct
  source 1..159: mol_type = other DNA
atgtgcgaagtgataaaacccagaatgaacgaaattatcattttcaataacttcagggccctcgaggaggtcatcgcagagattcaggaaaccgagaacatccgcaatgagcgggaatttttccagagctacaagatcaagatcatgaaactggactga

SEQ ID NO: 9029 - DNA, 1038 bp, synthetic construct
  source 1..1038: mol_type = other DNA
atgaagaagtactgcgaatttaatgggatgagcctgcaggagctgcttgacgaggcggagaaggaagaagcagacaatgtcaagtggaagcaccgccgtgttaaaaccaaactactgaagtaccggcaattccttttagacaactatagcatcaacacagtcagaatacacatgtcggccgtctccaaattttaccgcttttacgacatcgaaatcaatcccctaccaagactgaacatgaaggcggtgaagaagccaacatcaatctattacaaagatctccctgataaggaaattattagggaggctctggccatttccccacccgtgatgaaggccatcatattgttttcctgcagcagcgggtgtgcccgggctgaaaccctctccctgacgattcaggactatatcgatgccttatcagagtacctgcccaacaaaagaatggacatctaccagattatcgattatctcaacgacaatgacaacgtgataccgacctttaacctcaggaggattaaaaccaacaagtattacacgacttactgcagtcccgaggctgtgaaagccatcaacgcatacattctgaccaggactgacaatgtaactcccgagagtcaactcttcaagatgtacgagtcttatttcattggatacttccagcgcatcaatgatgagcttggcctgggtagagtggggcactacagccgcttccgaagccacatgctccgaaagttccatgcgtcagcactgtacaacgacggcatgagtttggataacgtgaatgatttgcagggaaaggccaagaacaagaccgaccaggcctacttcatgatcaaccctgacgatctcaaatatgaatatatcaagcatctgcctgccattacaatcaatacagatgttgaaaaactgtccatcaaatctccggagtatatgcagatggagaaggagaataacgagtataaacaaaaggtggagcggatggaagctaatatagctaacatcatggaacggctgggccaggaggaggcaaaatga

SEQ ID NO: 9030 - DNA, 558 bp, synthetic construct
  source 1..558: mol_type = other DNA
atgatctccgacaaggccggccagtacttagtgaagctggctggaaatgcgatccggcaatatctggaaacgggggagaaaatcaaaaagagcgaagactaccctattgaactagatgagaaactcggtgtctttgttactctgaacaagaacagtaatctgagagggtgtatcggatacgccgagccaatcatgtcggcaattgaagctaccatagacgtggccatcgcagccgccgtgaacgatccacgattcccccaagtgtccctggatgagttggagacacttgacttggaagtgaccgtgcttacaaagccggagctcattcccgtcgcacattataaccagtacttcgacgagattgaaataggccgcgatgggctgatcattcagaaaggctattcaaggggtctgctcctcccccaggtagccaccgaaaatcggttcagtgttgaggactttctggagcacacctgcatgaaggcgggaatcagcactgacagctggatggacgagagctgcgatgtctacaagttccagggccagatatttaaatga

SEQ ID NO: 9031 - DNA, 1395 bp, synthetic construct
  source 1..1395: mol_type = other DNA
atgatcaatctgctgagtgataaaatggaagagtacatcgatttgttcgaaaaagtgattgccaagacaagcagccagatcgactacattgacatcagggcgggcatcggagacaacacgtcaatacttatgaaagacggcaatgtagatgagatcaacaccggtatgagcctggccgcacgggtgagggtgcttaacaatggcgcctggggtttcgcgtacaccacagatttgagcaaaataaatgagattacagatactgctatccgattttccaactccctcaagggcgacgtcgagctatccgagaccgacattatcaaagacaagataagcgttgacgttaaaattccatttagcgatatttctattgaggagaaaaaggacatcatgaagcaagccaatgacgctgcgattatcgataaggtcaacagcaccactgtgagttacggagactccgaggtcaacgagctcttcatgagcagcgaggggagtgagatccaggtaaagaccagccgggtccgcatggctctaaacgcatctgccacaaacggggagataatccagttcggacatgggagtctcggcggcgtgaagggcttcgaggcaatctcggataaggacctggaagaatttggaagaacgattgggcagaaggctgttagactgctcgacgccaagcctgcaccgtctggaaactttccagtgatagccgatcctgagctgactggtgtgcttgtccacgaggccctgggccacgccgtggagggggacttgatcctgcagaatgattcgatccttaaggataagatgggttgtcagattgcctcagacattgtcaatatcttcgatgatgcaagtctgaaggaaggattcggatattatccctatgatgttgaaggcgtgaagacttccccaaaccagttagtgaaagatggcaagctcgtgtccctcctcaattcacgggaaacctcatctaaactgaacatgaaatcttccggtaatgcccgttccttgatcgcagaccagcccatcgtacgcatgagcaacacatacctccagcctcgcgacaacagctttgaggaactgctggaagacattcaagacgggatttacctgaaaggctcaagaggcgggcaagtggataccgggaagggcatcttccagttcaacgctgctgaagggtatctgattaaggacggggaaatcacaaccccgctcagggacgtgtcgctatccggcaacatcctggagactctgaaaaacatagatgctgtcggcaatgactttaagctgagtgtgggattctgcggaaaggacgggcagacggcgcccgtgggtgacgggggcccccacacccgaatcttaaatgcccttgtcggaggcatgggatga

SEQ ID NO: 9032 - DNA, 1206 bp, synthetic construct
  source 1..1206: mol_type = other DNA
atgattgtgattgtcggaactggtgctggtggcggaatattggcccgggagatcgccaaggaaggtattgacgtaacaatccttgagaagggaccatacatccactcaaaagacgcctttaattattatgatacgtacagcggcgacgtggacctcctcacaacgacttgcatcggcggttccaccatcgtgtccatgtcgaacatggtaagggccctcgacgatgaactgctcgattacgacattgacctgagcgacgcctatgagtacgttgaggacttgatcaatgtgcaccctattgatgattcgcatattggaaagggcaccaaggcatttctggacgcaggcaatgagcttggcctgcagacaatgaaaatgccaaaggcgattagggaggaggaatgcattcaatgtggaaaatgcgccttcggatgccccgtggatgctaaattttctggaaaggatttcatcgacgaggcagtggagtacggggccgcactgatctgcgaagctgatgttcgggaagtgacaagcaacgatggggtggtatacggcgtcaagtacatcaaggacgggaaagaagagatcataaaggctgataaggtggtcttgtctgctggggccattggcagcaccctcatcttaagaaaatccggcatttccaaggcgggcagagaaatattcttcgatcccttcgtcagtgtgggcggatacttaaaagatgttaacttcaatagtgaggttcagatggccgggctgattatagggaaaaacttcgtgctggcgccccactactcctcatttattccgggaaacatcgacgacgactcagtaaccgaaaacgacatccttagtataatggtcaagacctctgatgagtgtaagggctatgtgaccgacgatggtgatgtggtgaaaatcaacaccatccaggacatccgctatctggctgagggaaccgccactgcaggttttgtgctagagcgtgctggcgttgacccgaacactatcgggtccacggtgtatcgaggcgcccatcctgggggcaccgccaagattggggaaatcgtcaacagtaacctcgagacagaaatcgacaatctgttcgtctgtgacgcaagcgtcctccctatcagccccgggaaacccccaatcctaacaatactggccctgagcaagcgcctggcggactacctgaagaattga

SEQ ID NO: 9033 - DNA, 477 bp, synthetic construct
  source 1..477: mol_type = other DNA
atggccaacaacaaaagcgagctcaagatcaaagctattgagaacgggacggtgatcgaccacattacagccaataagacattgcacatcttaaaaatactgggccttcctgacaacgagaccaagaacatcaccgtcgcaatgaacgtgagttccaaagagctcggacggaaggacatcctcaagattgagaacagggaactaggccatgaagaactgaatcaggtggcgctgatcgccccggaggcaacaatcaatataatccgcgatttcaaacctatcaagaagaacaagatcgtactgcccaagaagatcacgagcatcattaagtgcaccaacccaaaatgcattactaactacgaaaatgaaccaataaccaccatttttaatgtggttactgagaatccccccgtggtcagatgccactattgtgagaagctgataaaaactgaagatatttacaaacagttcgagtga

SEQ ID NO: 9034 - DNA, 495 bp, synthetic construct
  source 1..495: mol_type = other DNA
atggcgacactaatcatttactacagccagagcgggaagacggaattagtcgctcacactctggccaagaacctccgcgccaatgtgctgcgtatccaggacttgaagaatcgaaacggattcaagaacaaattcattgcctcaatctccgcatttagggaaagtaagacggatatcactccggccagagtggatctcaccgattatgacacaatcatctttggcacacctacatgggccggaaatccaactcccgccattctgactataatagaccggtgcaacctgaccgggaaagacgtgatcctgttcgctaccatggacggcagccggggtgataccaacatcgagagacttgaggaaaaagtaaaaatgcggggcgcgcgcgtcattgaatccttcaccatagcaaccaaggacaaagattcggagaagctcattaccgacacggaggcagttatcgagatgaaggacctgaagatgtacacaaggtga

SEQ ID NO: 9035 - DNA, 1023 bp, synthetic construct
  source 1..1023: mol_type = other DNA
atgaagaacgtcgccatcgtcggggcaagcggatataccggcggcgagctgctccgcatgctcagtgtgcatccggaagttgaggtgaccgagatcacatcccgaaaattggacggacagccggtgcacaaaacccacccccatatccgtgacacaggacttgttttcaaggacaagaaaccaagtgatatagacgccgacgtcatcttcactgctacgccccacggcgcctcaatgaagattgtgccagaactgctcgagaccggcgctaaggtggtggacctaagtggtgattaccggtatcgcaacaccgaggtgtacgaaaaatggtacggaatgaaacacacggataaaaagaataagggggcttttggcctgcctgagctgtacagggacgaaatagagaaggccaacttggtatcgaatccaggctgcttcccaaccggggcaatactgtcctcatatcctctggttaaaaatgatttggtggaaaagatcgtcattgactcgaaatccggagttagcggtgcgggggtgaccccctccggtactacacactatcctaacatagcagacaatgtaaacccctacaagatcagcgcccacaggcacacatccgagattcagcaggagctgcacggcttcgatgatgtgaaggtgagctttaccccccacttagtcccagtcaacagaggcatccaaactacaagtcacagcttcctgaaggaagagcatctggacatcacgcccgatgaaatccggagcctttacgaggaggaatacggagacgagtactttattaaactcatggatgagggtgaaattcctcatcttagcagcgtgagaggctctaactttgtccatatcggagggttcgagattgacgagactggtcggatcgtaatgctctcctgtatcgataacctggtgaagggcgcctcagggcaagcgattcagaatatgaacatcgtgctaggcctgaaggaacagctcgggctgcagcatttagggatttatccttga

SEQ ID NO: 9036 - DNA, 453 bp, synthetic construct
  source 1..453: mol_type = other DNA
atgaaggtcatggcgaccggcaccttcgatatcctccatcccggccacgtccttttcctcaaaaaggctaaggaactggggggagaagacgccgtcctagcagttgtaatcgccagagactcaaccgtggagaagcgcaaacggacaccaatcataccccaggaacaaaggctggagatgatcaagagtctgaaacctgtggatgaagcctatctcgggcatgctggtgacatgtttaagatcgtggaggagattaagccggacattatcgcaatagggagcgatcaggaccacaatgtggataagttacaggagtccctggacaagcgaggcattaacgccaaagccatgcgcgtggaggactacatgttcggagaactggacagcacttgcaaaatcattaagcggatcaaacacacggattttaaggataaaacaggcgagttgtactga

SEQ ID NO: 9037 - DNA, 738 bp, synthetic construct
  source 1..738: mol_type = other DNA
atgtccttcaagaaagatgagatgctgatcatgcccgcagtggacatcaagaacggcaagtgcgtacagcttgtgcagggcgaacctgggtcggagatggtcgaactcgagaatcccgaactggtggccaaacattgggaggatctaggagcccggaacatccacgtgattgacctcgatggaacaattaacggtattgcttccttggacaccatcgaaaaaatcctaaacgaaatcagcattccaatccagctgggtgggggtattaggagcttggactatgcccgacagctgctgaaccttgatatagagcgcctcataatcggaaccatgggcatccagcacccagaaaccattactgagctctccgatgagtatgggtcagatagaataatgatttcactggactccaaggacaacaaggtcgttattaagggatggcgggaaaagatcgacaaaagtccggtggagctgagcagtgagtttaaggaatatggggctggcagtatcctgttcacaaatgttgatgtcgaaggactgctgggcggcttctacaccgaccctgtggtcgagctcaaagagtctgtggacatccccattgtgtacagcggaggcatcacaactatagatgacatcaagaaattaaatgagagcggggtggacggcatagtaatcgggtctgcactttacaaggataaaatcgacctgacggaggcgttgaagtaccaaaagaggtga

SEQ ID NO: 9038 - DNA, 951 bp, synthetic construct
  source 1..951: mol_type = other DNA
atgaacgagaaactctacgaactgtttgatgttgtgctcaagtccgaattttcaataaaggagtatgatgacaagaccatcatcgagttgggggaaaacagcaaatacggcaagatggaaacgtattcgctttttccggggatcatcctggcctatatcgacgtgaatattgaaaacgtggaggacgtgttcatcgaggaaaaaatggagagcagactcctagaaatcaatcactgtgccaggggccgctatgcatatgctgtcggtgatgataagataatttactttggacggggagacctttgcgtgagcatttacgatttaacgaaatcactgagcgagttcccattaggttactacgagggactcgagattttcattgacgtggatatggctgacgaatacataaaggactatgtacctgacttcgacctgattgagttttacgaaacactagagaagaataacgggttcgtcctcctgagggccaatgaaaagattgatcatgtaatcggggagctgtacgatgtggacgagcgaatcaaacaatcgtattacaagctcaaatgcctggaactcctgctgttcttttccatcactaacttcactaagacagagagcttcagcctgtctaagaagcaggtcaaaatcatcgagtccgtgaaaaacgatttgaccgagaacctggaaaccaaaataaccattgaccagcttgccaacaagtacggcatgagtaaaaccacactgaagaactgctttaaggaaatctatggaaagcccatattcaaatggagaaaggagtatcgcttggactacgcctgtcacctgatcgaggagggccactactctatcagtgagatctcaaaaattgttggctactctagccattccaagttcagtcaggcgttccgggagtatgtcggctgcgcaccctccaagtacaagaattga

SEQ ID NO: 9039 - DNA, 1791 bp, synthetic construct
  source 1..1791: mol_type = other DNA
atgtccaacaaccagaacaagaataagttcatacgactgctgaattattcgggaaactataaatatctgaccattctgggtatgatctttagcggcctgagtgccattagcctcctggtcccattcatatacatctggaacgtggtcaacgctctgcttgttgtcgctccagactttgccaaagcccagaatttggaaagctatgcggtgggggcgttcttctacgcgtttctcgggattgccctgaacttttgcggactgatgtgcactcacctgtccgcttttaaaaacgagaagaacatgaaggatgccacaatcaaccatctgctcaatctccctcttggttacttctcaaaccacaccagtggcggcctgcggaaggtaatcgattttagtactgccaaaactgaaggcttcttagctcataatcttttcgatctggtgggggccatagtcacccccatcgtatttctcatattgctgttcagctttgatttgttgctgggcctgatctgcatcatccccattatcctatgtttcctattcatgtaccccatgttttctaaggacagccaaaacatcatggcccagtatcagagttacctggagaaaatgaatagcgaggcggtggaatacgtcaggggaatcccagttaccaaagccttccagcagactgtctacagcttccgcaacttcattgacgcaattaagaactacggaaaattcgctgccgactattctctatcaacacagctccccatgacggcatttacagtatccatcaatggctttttcgccctcctgatccctgccggcatactcattgccggaactcttgttgatgtgaagtttctggctaatttcattttctatgtgattttcaccccgatatgcgccgtgatgatgaacaagataatgacaatatcccaagactggatgctggcaagctatgcactcgatggtattgaagccatcctgaatgaaaagccattagccgagcccgcaaaccctcagaaacctaaaaaccactccatcaaatttgagggagtcttcttcgactatgaagagtcgaactccgaagagcacatccttaatgatatcaatctcaagataaacgagaacgactctgttgcgctcgtcgggccaagcggtggcggcaagaccaccattgcttccttgatccccagattttgggatgtggacgaggggtcaattaagattggggaggttgatgtgcgtgacatctcaacaaaggacttgatggagaatatctcctttgtattccagaacacgcggctgttcaaagactcaatctacaataatgtcgccatcggcaaaaagggcgcttcccgggaagagattctaaatgcactgagcctcgctcaatgtgacgacatcatcgatgagttgccggatggaatcgacacagtcattggcacagagggaacctaccttagcggcgggcagcagcagcgcatcgcccttgccagggcaattctgaaggatgcccctatcatcattctggacgaagcaaccgcactggcggaccccgaaaacgaatacatgattcaaaaggctatttcggagatcaccaaagataagacggtgataatgatcgctcataggttatctaccgtgaagaacgtggacaagatttacgtggtggaaaacgggagagtggtggaggaaggtaatcacagtacgctggtggagaatgaggggctctactctaaaatgtgggacgagtttaaccgcagcatccagtggaaggtgaagagtgaggtgatctga

SEQ ID NO: 9040 - DNA, 1746 bp, synthetic construct
  source 1..1746: mol_type = other DNA
atgctgtctgaattgtttattgagagattcggcctcactaaggaggggtctgataatctcatcaaaggaattatctacaccgccctgcagaacattagcttcatgttcccagtgggactgtatgctgcgctgctctatatctggatcaatccccttatggggggggagataatcagtcccgatctcggaatctttattctcggcattctcatcatactgggaattatattcgccttttcctggaaacagtatcacttcgtctacaacacaacctacgtggagagtacaaacagacgaataaacctaggtgaaaacttgagaaaactccctctgagcttttttgaacggagggacctggctgacctgaccgccaccatcatgaacgattgcactgacctcgaacatgtgttctcccacgccatccctcaattgctcgggtccatactgtccctgattctggtgtccattggtcttctgatctttgactggaggctggccgtcgcccttctctgggtcgttcccgtatcgttcataatactgtacatctccaagcgcatgatctaccgcggcagtaaaattgtgacaaacgatctgcttgaatgcggcgactcaatgcaggagtgtatcgattccattcgggacctaaaatcatataactacgagaacgagtatctctcgaagttgaatgatatcaccagcaaaatagaaaagagccgcattaaatcagaactgatgcttagcagtggagttatcaccggaaaggtcattctcaacctcggaatagttagcgtcatcctgctaggttcaaatctaatcatgaatggccaggtgacaatctacacgttcttgatcttcctgatcgctagcgccactatttatgctccagttgaaaacggacttatgttcctgagcgagatcctcatgatggatatcaaaattgagcgcgcgaaggaaatagaaatgctggtgacagaagaggggctgaaggactactctcttgacggttacgacctggaatttcggaatgtaaagtttaactacgacaatttaaaggacgtgttatctgacatcgatttcattgcaaaacagggtgaggtgactgcactggtcggacccagcggcggcgggaaatcaacggtgagtaagctcgccgcccgattctgggacccggtgagcggtgaggtttccattggagggcagaatctggcagagctcgattcagagaaactcctggagaacttctcgatcgtattccaggacgtaattttgtttaataacaccatcatggagaatatccgggtgggcaagaaggatgcaagtgacgatgaggtgattaacgcagccaagctggccgagtgcgaggagtttgtgcagaagctgcctaatggctataataccattatcggggagaacggggagttactgtccggcggccagcgacagagaatctctatcgcgcgggctctgctgaagaacgccaatatcgtccttttagatgaagccactagtttcttggacgtggaaaacgaatctaaaatccaaaaggctatttccaccctaattaagaacaaaacggtcatcatcattgcgcataggatgcgtacaatcgcaaatgccgataagatcgtggtcttggacgacggcaggatcgtggagcaaggcagcccagacgagctgcttgctcagaacggcctgtttaagcacatggtggaattgcagaagctgagcgggaagtgggagatatga

SEQ ID NO: 9041 - DNA, 582 bp, synthetic construct
  source 1..582: mol_type = other DNA
atgtccgaaattctgaacgtgaaggacctcattactgtggggatcttcagcgtgatcatggtggtactaattttcctgttcggaatgctgggatacatcccaatactgatgctggctcttcccatcatcgccgccttgatttgtggagtgccatacatgctgttcctcacaagagtcaccaagttcggaatggtgacgttgctggggctcgtgttgggcattgtcatgttcctcagcggtcatacctgggtgcctatcgtaatattcaccctgtttgcttttgtcgccgactgcatcttaaaaatgggcgactatagctctgtcaaaaattccattattagttacagttgctttatagtgggtatcatggggaatatgctccccttcttcgttctcagggattatttcatcggctcgatccgcaattcaatggggaacgattacgtgaacgtgatcgcaccgtttcttaactatgaggtttttatcattctagttattctgacatttatctttggcctgatctccgcataccttggcaagatagtcctgaagaaacacttcgagcgggcgggcatcgcctga

SEQ ID NO: 9042 - DNA, 723 bp, synthetic construct
  source 1..723: mol_type = other DNA
gtggagctgaaactaaacaataaccctggcctcaatgtggaccctcggaccaaaatcatccttctgatcattataagtttcatggttttcaacgaggcacccctgtacgtgagcggcatcctcgtcttaattccatttttctgcctgttcttcagtgattacaagaaggtcgccctaatttacattgccgtatactccatggccatttatgtccagatttatttgatcccgacttccacaggcatcttgtcgatcatcctgatcaccttcagctataccagctccaggatgctcccgattttcatgatggggtactatacaatcagctccactaaggtgtccgaatttataacctcaatggagaatattaacgtgccaaaggagatcattatccccctctccgtcgtattccgctacgtgccatcagtttatgacgaaatcaagagcataacgaacgcaatgaagatgaggggttttgggctgacagtcaaaagccttaagtcgcccctgaagatgattgagttttacatgattcccatcttgataagcgctgtgaagactagtgatgaactgtcagccgcgtctcttacccgaggactgagtaaccctcggaaaagaacgcacctcctggaagtgaaattcagcaaaatagactactttctgatcatgatcgccgtgatcgggttcatcatctttgcttactattttataggaggccattga

SEQ ID NO: 9043 - DNA, 1434 bp, synthetic construct
  source 1..1434: mol_type = other DNA
ttgataaacattaacaatgtgagcttctcatacaacgatgacatcaatctggagaacattaacctcaacatcaaaaaaggcgaggtgattctgctttgcggcgaaagcggctgcggaaaaacaacactgactcggtttctcaacggactgatcccaaatttcttcgacggaaataggaagggttcagtctacatgaacggcaacctgatcgacgagatgaagatctatgaaatatcggaatacatcggctcggtgttccagaatcctaaaacccagtttttcaatgtggatacaaccagcgagctggtctttggctgtgagaatctcgctattgacaaggacgagatcgagaggcgactcgagatggtggtcaacgactttgaccttgaacatctgttaaacaagaacattttcgagctttccgggggtgagaaacagaaaatcgcatgcgcatccgttagcgcggttttcccagatatattggttttggatgaaccctcctccaatctggatagccaatcaacgtggtatctgggagaaataatcaaaaagtggaagagtcagggcaagacggtgattatcgccgaacacaagctgttctttctcgaaaatgtggtagataaggtcatcttcatcaagaacgggcgcattactaacatttggccaatttcagaatttaagaacatttctcataaagactggggtctgcggcaactgaacctcgggaatttaaccgcaaaatgtggggaatactattccaatgcccaggagtttctcgagttcaaaaattttaaattcaaatacaaaaaaatccccgtgctggatatgggtaatttcaaagtccccaaaaatgagatcatcgccattattggcaagaacggggctggaaagtctacctttgcgaattgcttgtgcggtcttaagcgtagcttcaacggggagctcattttcaacaataactccctaaagagaaaggatagattgaaaaagagttatatggtgatgcaggacgtcaaccaccaattattcaccgaaagcgtgctcgatgaggtactcctgagtatggatgaagaagacatagactttgctgagtctattttgacgaacctgaaccttatccacctaaaggacgctcaccctatggtgctgagcggcggggagaagcagcgcgtggccatcgcatctgccatcgccagcaagaaggagatactgatcttcgacgagccgacaagtggcctcgacctaaacaatatgatgaaggtaagcgagaatctgaagtacctgcagagcctggggatgacttccttcatcataacccacgattttgagctaatcatggaagcctgttcccatatcatccacctggaggacggcaagcttattggaaactacaagatcaacggagaaaagctgagtgagttctttctgaactga

SEQ ID NO: 9044 - DNA, 705 bp, synthetic construct
  source 1..705: mol_type = other DNA
atgagtacaatcattgagttcaagaacgtgtgcaaggagtacaaatcaggagaccacatcctgaaggccatggataacgttaatttcacaatcggcgagggggagttcgtggtcatacttgggccgagcggcgcagggaaatccacactactgaacctgttaggaggcctcgatagtgtgacttcgggtcagatcatcgtgaatgataaccacgtggaatccttcaccgacaatcaacttaccgagtaccgcgccaagaatgtcggctttatcttccagttttataacctgatcccaaatctgaccgctctggagaacgtggaactcatgaaggacatcgtggatgtcaaaatcaatggactggacgtgctaaattcagtgggcctcgaggaccatgccaaccagtttccagcacagttgtccggcggggagcagcagagagtatctattgcacgggctgttgccaaacagcctacaatgctgctgtgtgacgagcccaccggtgcccttgacagcaaaacgggggtcctgatcctcaatctgctccaggacatgagcaacaacaagaatactaccgtggttattgtaactcacaacgcgattttggcggatgccgccgataaggtcatcaggattaagaacggacaaatagaaagcattgctataaacgaaaaccccaacaaggtgacggacttggaatggtga

SEQ ID NO: 9045 - DNA, 2271 bp, synthetic construct
  source 1..2271: mol_type = other DNA
atgctggcaaagaagatgctgcgcgacatcaaaaagcacaaaactcaattcctgagcatctttctgatggccttccttggagtctttgtgttcgccggcgttggcggggagtccgtcggcctcgaggtaaatgtaaataattactataacgatactaacttggcggacggttggatctattcacccaacctagatatgaacttcattgacgatgtgaacaacttaactccaacgactcagagtgagcggcagctggtgttagacagcattgcggatttcagcaacaatcccgagatcaaactgcacttcatcgagaacaacactatctccaaattctacctaatggatggcgaaccactcaatatcagtgacgaggacggggtgtggctggacaaaagttttgccgacgctaagaacttgaaggtgggcgacaacattactttcgagttcaacggatttaaaatcaagaaggaaattaagggaatcggatattcgccggaatacgtgtatcatgccagcacctcctcagtcatccctgactttaacaagattggttttgcttacatgtcttacaaggctttccccaccgataatatcccatacaacgttcttaatgtgaaattcaccggaagccccgaggagtacaacaatctgttgagcgataaactcgacggggagtacaactctttcgttgagcagtccgaacattctagtgtgagccagttctcagaagaaatcaaccagcacaagatgatgggggatattttccctgtcgtctttatcttgatcgccatgctgatcctcctgaccacaatgactcgcattattgcacatcagcgaacgcaaatcggcattcttaaagcaagtggattcaccaataaaagcatcatgattcattacgttagctacggtttctggttggtactgattggcagcatcttaggcctgatcattgggcccgtgacactccctcagctattctacccaagcatgagtagcacttacaagttaccctcatggaatcccgcttggagtatggattttgtgtatgtggccgtggtcatgattatcatgagcctgctcgtaagctattttgcagtgagaagcatcagcaaggagaaccctgctgataccatcaagccaaagatccccaaaatcagtagttccggcctggtggagaagatcggcttctggaaacacctgagcttcaattcccgctggaactatcgggacgccaagagaaataaattcagggcccttatgacaataatcggagtcattggctgcactgccctcctagtcagcgccttcgggatgtacgacggcatgaatgacctgaaggaatgggagtttaaccagataaatcactatgattcaaagctggtcattgacaacgacgcctccctttccgagatcgacgatgttgcccgggacgtggacggggacaaaataatggaatcagctatcgaaattgaatcggattcggctaagaagagcggctctctgatagctctcaaccacacggatctcatcacaccaacagactatgactggaataaaatggagataggagacgacgaagtttctatttcacaaaagatggcggacatgctcgatatcagtgttggggacaccgtcaaatggcacattatcggttcggataagtggattaagaccaaaattgacaagattcacgccgatccgacctcacagggcatcgtgatgagcagcgataagctagagaatctggatctgaactacacccccaccagcattgtgaccgaacagcatgtggacaagaactactctattattaaaacagtcaacagcatgaaggatataacctccagctgggatgagctgaccgagtccatgtggctcctgatttatatcttgatattctttgcatccctgctggccatcgtggtactgtacaaccttggtttgctgtccttcacagagatcgaaagggagatagcaacccttaaggtgctcggattcaaaaccggttcactgaggaagcttctgctcacacagaacctgtggtttacgttcgcaggatttatcttggggcttcctgtggggtactatgtgctgaagatgatgtgggactccagcggcgactccttttacatattgccttccatatccccgatgaattttatcctcacggcgacaatcacatttacgctgtcgatactggtcaatctcatgttttcacgtaaaatcaagaagctgaatatggtggaatccctcaaaagtggggagtga

SEQ ID NO: 9046 - DNA, 222 bp, synthetic construct
  source 1..222: mol_type = other DNA
atggccaagataacggcagactccaagtatatggagcttctaaacaagtaccccctgctgaagcgggatctgtctcagaaaaactggaaattcgagttcctcgtgaccccaatgggcaagatcagcctctgggaagctaatctggaagaagtcagcaaacacgccgagttgagtgtagatgagacagtgaccctgtttcaggacctcgtggactcatactga

SEQ ID NO: 9047 - DNA, 2259 bp, synthetic construct
  source 1..2259: mol_type = other DNA
atgtcgttatccaaaaagatgctgagggacatacgcatcaatagaacccaatttattgccatatttctcatggctttcttaggcatctttgcttattgcggcatctgtagcgaatactatggactcgaacagaccagtgcggatttctataacgaaaccaatctggctgacggttggatctacaagaccagtttcgataacgccgatctggacaagataaataatctggcaatgcaaaccgagagacaacatgtcatttcaagcgtcggggagtttgataacgaccctgacatcacactgcacttcgttgaaaacaataccatctccaaatttcacgtgttccagggaaaggatttcgacattaatgacgagtccggggtctggttggataagcggttcgcggactcaaaagagctgaatgtcggagacaatattacttttaagtttgatgggaagaccatcgaaaaagagattaaaggtatcggctacagccccgagtacgtgtacgagtcatcggccactagcatcacgccaaatttcgaggacgtgggtttcgcctacctgtcatacaagagctaccccgacaacgtggaatttaaccggctcctggtaaagtacaatcagagcgatgatagcttcaaagagaagctggacgattccattagctacttgtcatttacaaagcaggaggaccacgtgagcgtggcccagtttagtgaggagatggcgcagcacaagatgatgggggacgtgttccccattctgtttatcctgattacatttctaacacttctaacaacaatgacaagggtggtaacataccagcgaactcagatcggcatcttgaaggccgtcggcttcaaagatcgaaccataatcctgcacttcatctcctacggattcttccccgtgctgataggctctatactcggactcatcgcaggcccgatggttattcccaagatgttctatccaagcatgactacgcgttatactttaccttcctggaatcccgggttcgatatgagctttgtttatgtggccgcagcacttgtgatctccagcgtcatcgttacgtacctgacctgcagacgcatttccaaggagaaccctgccaacaccatgcgccctaaggccccaaacgtctcctcaaacagcttttttgagaaaagcaaactttggaaccatctaagtttcaatttccggtggaactggagagacgcacgacggaataaattcagggccctgatggccatcattggcgtgatgggctgtgtgagcctcctcatcgcagcctttgggatgaacgacagtatggatgacctgaaaacgtgggaatacgatgacattaaccatttcgagagcaagctggtgatttccaataacgcttctcaggaggagttgtattacgtcatcaatggcaccaacggcagttttataatgcagatgccgatcgagatcaagtcgaacaatcacgaaaacacgggtgtactgctcgtcagcaacaacaccgacttgatcagctacacggacagtaacaaaaacccaatcgaaattaaggagggggatatctcaatttccaccaaactcgctcaggactttaacctcagcatcggtgacaagatcaagtggcacatcgttggaaacgatgactgggtgaaaagcgagattggtcaaattcatgccgagcccattagccagggccttataatgtcgcccgataccttggaagacgagggcctgaactttacaccaaccagtatcctaacttccgagaagttcggggaaaacatcaattcaattaaatccgtaagcactctggaagacatggaggagagttggagtgagatgacttcttcggtgatgatgatggtgtatgtgataaccgtggtcgcctgccttcttgctatcctcgtcctttacaatctgggcatcctgagcttcacggaaatggaaagggaggtggccacattaaaggtgctcggattcaagaccaacttcctgcggcgcctcctgctgactcagaacctgatcttcacagccattgggtttattcttggaatcccgctcggattctatttcatgacattgatgatggacgctgcaggggaatctttgtattatgtgcctatgctgacttggggaaacatcatgctgtctgctgtgataaccttctcaatatccatcgctgttaatctgatgttttccgacaaaattcgcgatctcaatatggttgaagcgctgaaggatgtagaatga

SEQ ID NO: 9048 - DNA, 717 bp, synthetic construct
  source 1..717: mol_type = other DNA
atgaagagaagcaagaagctaattatcgccatcctgctggtgatcctgctcggcttggtcgcgttcattgtgggtactttattcatgacccccgaccttagccatgagacgaagaacatactggtactggcatcggacaaggaggagcagccaaacgggggcgttgacatggcattcatgatccggctcgagaacgggtcccttaaaaactacacccccatctaccctggtggaatgacgcacccgaccaagtcagcccccggcggccttcagggaccaatgatgctccacgactgcctatggaacgggctgggggagggtatgcaaaacgccaaggaaattgtcgaggttcgaaccggcatgcatgctgacgccgtcgtggtggtgtatgataaaggcattgacagcattattgattcaatcaggcccctgaaaataaatgggactgaaacaaacctgagtgcaaccgacatcatacggcagaacgatgcctataatgggtacccaggaaatgaacacgtgcagggaacaatgtctcgctccgatgcggtaatggtcttggctaaagccctggctaatacagctaaagatcctgtgaagaaaagtactatggtgcagacagccctcaaggaatactccaatggaaacatcatcatggagcctcaaggcagctttaccaaactgctcgcaacgaagggctttgaaagcatcacctga

SEQ ID NO: 9049 - DNA, 378 bp, synthetic construct
  source 1..378: mol_type = other DNA
atgaccatggagaataacaaccttggaaacaaggatgatttgtgtgaagtgttcgattcccacgaggacgtggtaaaccgggtgaaggaacgaatccccgacgaaagtgactttactgaactcagcgagttctttaagatcttcggcaacccaacaagactgaagatcatctccctgcttagcatcgaggatctgtgcgtctgcgacatctgcgaggcactggacctcaatcaaaccacggtttcaaaccagctaaggatactgcgggcgaataatattgtcaagtaccagaaagagggcaaaatggcccgctattctctcacagacctgcacattgagatgatttacaaagtggggctggaacatatattagagtga

SEQ ID NO: 9050 - DNA, 2355 bp, synthetic construct
  source 1..2355: mol_type = other DNA
atggtcaagaaccggtgctacgatgccgattgtgacaaagataactgtcacaatcccgaacactacaattatatctgttttgaccccaactgtgatgaaatcaagtgcaatgacagcgaccattatgacaagcagctcttgcgggattaccagaagaatacagatttaagtgtgtatgatcacggagaggagatagattacgacgaggatgttgatataagcctgtgcggctgtcctgactgcgccgacgaccacgaccacgaccatgatcaccaccacgatcacagccacgaccaccatgagcacgacgaggacgattcctgttctgatgaaagttgtagttgccatgaccatgacgagcacgaccatcacgaccatgacgatgtggacataagtctttgcggctgccctgactgcgcagacgatggccatgaacatggccacggagacgaagaactgctcgctgaaggaaaaccacttatcgctaacaggccaatacaaatcatcgtgtccagcggcatattgtttgtcctgggtcatgtgttcgagtggctatcattcagccccgccgtcgttacaataatctacatgctcggcgctttaatcgccggctacgaaatagccgtgttggcatacaactccctggtgaaaagacacacggtgggtccggccatgcttatgtgcgttgcctgtgtcgcttcattcatcatcgggcatcccgaagagggcgctgccgtcacttttttatattacatagcggagtttctggaggactacgcggagcacagagccaagcggagcattaagtcgcttgtggagattgctcctgaaactgcacgcgtcaaactgaacgactccgaggagctgagaaatgtggacgacgttgacatcggtgagatcgtgattgtcaaacctggagacaaagttcctctggatggcgaggtggttttgggaagttccagcattaaccagtcttccattactggggaaagtgtgccagtgctaaaggagactggcgatgaagtattctccggaaccgtgaatgaagacggctacctggaaatcgcggtcacgaagaaggcgaaggatagcgtgatttcaaaaattgtcactctggtgaagcgaagccagctcaacaggtctgaaaccgagtccctcgttgagaaggtggctaaatactatacgcctatcatgatggttgcagctatttgcgtggcattaatcccctcgtttgtctttggtcaaaacctcgtggattgggtgtataaggcgctttcactgctggtaatcagctgtccatgcgcattcctgatctcaacaccggtagggatggtatccgccatcaccagcgctaccaaaaatggtgttctgattaagggctccacctatgtggaggagatgcgggatgtcaaggctgtcatcttcgacaaaacggggactctcacagagggaaaactgatactctccgatgtggaggtgctggacgaaaacttcagtaaagaagacattatcaggatcgccgcaagcctggagaaccaatcttcccacccaatcgcacaggccatcgtcaattatgccaccgtaaacgggatcaagtttagtgagattaatgacttcaagaacgtgcccggaaagggcattgtcgctaatatcggggaggaacagtactacgcggccaacgaaagcctgatagaggacgggagctttgaggtgtcaagagacgaaatcaataggtattctgccgagggcaaaacgatcgtcttcattggaaactcaaagaacgtgctggccattattacagtctctgataaaatccgcccaaacgctcacgaggtcatttctgacctgaaggagcagggtgtacagacaatcatgctcaccggggacaataaactcgccgcaaagagtgtggcatcggagatcggaatggattacgtgtatagcaatctaatgcccgaagataagctcaacattctggacaccatccgaaacaagtttggtgatgtggccatggtgggggacggcattaacgacgccccggccctcgcccgcgccaacatcgggattgccatgggcgctgctggttcggatgtggccatcgagaccgcggatgtggcattgatgcaggacgatatttcaaaactcccctacctgttcaccttgagccgtaagaccatggggattattaagcagaatatcaccgtggccatcgcagttaagctgctgtgcgtaatactggccatccttggcatcattacattgatgatgagcgtcggcttcggggacctgggactgacaatgcttgttatcctcaattccttccgcatcggaatggtgaaagatcccctattctga

SEQ ID NO: 9051 - DNA, 1371 bp, synthetic construct
  source 1..1371: mol_type = other DNA
atgctgagcaacgacttggtgaatggtgtggaactgatgctgcaaaaccccaagaaagcactgatcgagatgtccataccattgatcatttccctcctcatcactagtttctacaacctgattgacgctgcttgggtgtctggtctgggcgccgacgccctggcaggggtaggattctttacaccaatcttcatgattctggtgggctttggaaacggccttggctctggagccgcgttcgccctgtccaaatacctggggggaaacaataaacagaaggcggacaacgcagcgattcattccatcatcatcgatctaattgcctcactcatcatcactcttgccttactggtgctattaaacccgatactgaatgcgatgggcgcgggccagactatcggttatgccacggattatggcatgatcatcatccttggctctgcctttattatactctccaacgcactgtacggcatctccagaggagagggggataccacccggcccatgtacgctataatcgccagcgccattctcaatatgatcttggaccccatctttatctacaatctcaacttgggggttaagggcgccgctatcgccacgatcgttagcagcgtttttgtcattctaattctgctctactggttttatattaagggcgacacatacctcaagcctaatctgagtaattttgattttaaaaaggatattagcatagacatcattaaggtgggagtgcctgccagcatccagcttctgaataacgctttcttcgctgcagtgttcagcgccctcctgaccttcgtcgggagtaccgactcggtggccgtctactcgacagggtggcggatagtcaccattggcacaacacccttaatagccataggaacggccctgatcagcgtcattgctgccaactatggggcaaagaactataaaaacatccaaatcgtgcacaggtacgccatgaaagtatcaatcgcactggctattattgtggctattttgaccaatgtcttcgcaggagatatctcctcagtgtttgcttcttccggaagcagtgtacgaatcgctgccgagcttacaggcttcctgtcatggatcgtcatttactatccaaccatggctgtgggtgtggccagcacctacgttttccaggggatcgggaaggggatcactgcaatgttccagaccatcatacgcgagacagggttcaccataactttcgcagtgttgtttgctgtagtgctcaattacggcgtctggggagcctggatgggtattgttcttggcgaaattgtcagcaacaacctgacgatgctgtgggcggactatctggtgaagaaactcatcgacattagtggttga

SEQ ID NO: 9052 - DNA, 615 bp, synthetic construct
  source 1..615: mol_type = other DNA
atggagcttaaagggagcaatatcagctttaagtatcccagtactaagaagtacatcttgaaagatatcgacatatgcatcgacaacaccaagatcaccgctttagtcggcgatagcggtagcggaaaatcgacgctttgcaaaatcctctccggttacacaaataatttcgagggggcagtcactctggacgggaaagaactccctaagaaagaattttgccctgtgcagctgattttccaacatccagaaaaggtgatgaaccccaaatggaagatgaaccacattctagaggagtcatggatgccggacgataacctcctgaaggaatttggcatccagaagacgtggctgacaagattcccccaggaactgtcaggaggcgagctgcagcgcttctccgtgctgagggccctgaacccaaagacccagttcatcatagccgatgagatgaccaccatgctcgacgcgataacacaagtccagatcctaacttccgtgattgagatcgttaagaagcggaacatgggaatgctcatcgtaagtcacgacatgccactggtggagacaatctgtgacgagattatttacttgaaagatattaatggcatttga

SEQ ID NO: 9053 - DNA, 960 bp, synthetic construct
  source 1..960: mol_type = other DNA
atggagaagttactggatgtggagaatgtgtccatcagcttcatccagtatacgcaggggctgaatcagcgcgatctgaaggttatcacagacctcactttggatgtttttgaaggcgagatcctggccattctcgggagcagcggttctggcaaaagtctgctcgcccatgcgatattcggcattttacccgagaacgcaaacctgaacgggaccatcaaatacaagggaaaggaactgtcacagaaggacaaagaggagatccgtggaaaggagatcgcccttatcccacagagcgtaaacttcctagaccccttgatgaagattagcgatcaggcaatcggggagactaaagatgatgctgagaagaaggaaaagaagcagaagcagagagagatttttgaacattacaatctcggtcctgaagtggatgacatgtaccccttccaactttccggcggtatggcaaggcgagtgcttgtaagtacagccctgctctccaatcccaagctcgtcgtggcagacgaaccgaccccaggactggaccaaaagaccgtcaaagaaaccttgaatcacttcaagcacatgaaagaagacggagtgggagtcctcctgattacacacgacattcacgcggctttggaggtggctgataggatcggcatattctattcgggctacgtgatagagattgccgagaacaaagacttctcaggcaacggagaaaacctcctgcacccctacacgaaggccctatacaaagctctgcctgccaacgggtttgagctgacagagggacaccaaccactgcatggggagatccctaaaggctgtccatattatgacagatgcgagatgcggatgggcatctgcaaggaagaacggccggagctgaccgaccttggcaacaagaaagtccgctgctttaaatacgaaggcgggctgaaaaatggtacttga

SEQ ID NO: 9054 - DNA, 855 bp, synthetic construct
  source 1..855: mol_type = other DNA
atgaacaactcaaataagagcatctatagcccaattagcaagatgaatctccgaaccaagactttgctcacaatcgggcttaccgtgagcctgttaataattgttatgatcacgtccctgctgattaattctacagacatcacaactaacttcagtgccatgaacttacctcccagctttgagcacctattcggtaccgattggctggggcgcgacatgttcatacggactttgaaaggcctgggcctgtccgtgcagattggtgccggagcatcaatactgagttccctcattgccattatcctgtcctttgtgtgcagcattaacaaaaagttcgacagcttcgtcgcgtggatcgtggatctgtttctgtccataccccacattttgcttatcattctcatcagcatctcactgggcgggggagcctttggcgtcacggtgggcgtcgcacttactcactggaccaccctcaccagggtcctgcgggcggagatcaaacagatcaaaacctcggattacgttaagctatctgaacaattcggaaaatcgaaattttggattgccagaaagcatatcttgcctttggtgattacgcagatcatagtaggcaccatcctgatctttccccacgcaatcatgcacgaggctagtgtgacattcctcgggttcgggctcgcaccacatgagccggccatcggaattatcctatctgaatccatgaagtaccttgctacaggtaactggtggctcgccctgttcccaggcctcgctctgctgatcctggtactgctgttcgacatcgctggagagaacattaagaagatacttgaccccacaagtgccaatgaatga

SEQ ID NO: 9055 - DNA, 996 bp, synthetic construct
  source 1..996: mol_type = other DNA
atgctgaaaaatgagaagattcttaagtttctggggaagaaaattatccggtttataatccttctcatctttgtgatcatcctgtcgtttatcctcattgacatgtccccgattaaccccgtgaaaacctacatctccgctctcgggtcagttagctctgaaaagattgctatcctggaggcctactggggggtgaatgaacccattaccacgaaggtcattagttggttaggaaagatagtgcaaggcgactttggaacaagcctgatcttcagaatgcctgttatcgacgtgatcaaggagaggtttattgcctctctggtcctgatgctgacttcctggctattcagcggccttctgggattcatactgggcacgatcgccgggtttaaaaaggacaccattatcgataaagcaataaaagtgtattgctacattctccagagcgcccccactttctggattgcgcttctcttcctcatgattttcagcgtctacctgggttggttcccaaccggcttaggcgtacccatcggaacactgagcgagaatgtgtctatctgggagtggctgcacaggctgattctccctatgattaccttgagcgtcgtgggaatcgcctccatcactctgtatacccgtgataagttgatcgaagtgatgaacagtgattatttcttgtttgcaaaggcccgaggagagtcaggttggaacctaattaagcgccatgggatacggaacatcctactcccagcaataacaatccagtttttgggcttctcagaattgttcggcggggctgtcctggtagaacagatcttcacatatccgggtatcggccaggccgcagtgtccgctggcctgaaaagtgacgtgcctcttctgctgggcattgtaatcttctcggcgatattcgtttactgtgggaacctcatcgccgacatcctctacaacttcgtcgacccaagaatccgcgagggtgaagaggatgagtga

SEQ ID NO: 9056 - DNA, 1629 bp, synthetic construct
  source 1..1629: mol_type = other DNA
atggaacagaagtacattatcggcataattgtactgatcctgattgcaattattggtggcactctttttatgagcggaggcaataccagcaccagggctgataatgagctggtcgtgagcgcgtttgtccacggcagtgagccagaaaccgggtacgacccgatgtatgggtggggagaccggggagagccactgatccagagcacgttgatgaagatgaaccgcaacatgacctatgacaatgatctggctacaagttggtcttctaacaacaactttaccgagtatactgtcaatatcagagacggcgttaagttcactgacaacacaaccctcgacgcggaagatgtggccttttcatataaccaagccaaaagcaccggaaataccattgatctcagtagtctggacaacgtgagtgcaatcaataagaccactattaagttcaagctgaataagccggactcgacatttaccgacaagctgctccacgtggggatcgtcccttccgactcatatgacaataatacgtatggatcgaaccccataggatctggacccttcaaacttgcccaatgggacaagggtcagcaggtgatcttcgagaaaaaccccaactattatggcaaacagccaaaatttgataagttgaccatcagcttccagaaaaacgaggcgagcttcaatgccgctaaaaatcacgagctggatattgctgccgttccactctcgtacgcaaatgagacaatcgatgggtaccactcatttctgtccgaatccaacgacgtgcgaggcatttccttacccatgaagaacaatactggggaaacgaacgaagatggcatagcactgggaaataatgtgacggccgataaatcaatcaggctcgccctaaactatgggattaacagagaagacatatgcaagggtgcactgaacggcgccggcgtacctaactacgacgggatcgcgcatttcctgccctggtacaataatgactccacgatcaaggatgctgatattgacaaagcgaaagatttcttgaagaaggggggctggaaagacacagacggggatggaatagttgagaaggacggtaagaaggccagctttaacctatactactcctccgacgcaccggagcgccaggccattgccgtcgccgtgagcgagcaggcaaaggagtttggcatcgaaattaatgccacagggagcaattgggacgagatagataagatcaaattctccgaaccagtggtttggggattcggtagcactgatccttacgtgatgtacggcgaatactatagtaaccaggctggtatcggctacaacaacccctcccttgtaaacaacagtgctgtggatagccacatcgacaaggccatgagcgagccccgggagcaatcctacgctgactggtctgcagtgtcatgggatgggcagaccggcatttcacccaagggtgacgccgcctggctctggatcagcgagatcaagtacacatacttcgtcgatgacagcctcgatatctccaaagacaccttcaaactgcagcctcatggcggcgacttattcggaaacatctacgattggactcgtatctctcctatcaacgctacaaactga

SEQ ID NO: 9057 - DNA, 1620 bp, synthetic construct
  source 1..1620: mol_type = other DNA
atggaacagaagtacatcataggaatcatcgcagtgattctgattgcaatcgtgggtggggctatcctaatcggcggcccttctaccgagcgagcagacaatgagcttatcgtggcggcgtacagtcacggtggagagcccgaagctgggtttgacccaatcctgggctggaactactactcagagcccctgatccagtccactctgctgaagatgacaaggggtatggagtatgaaaacgatctcgctaagagctgggaggccaacagcgattttacagagtatacagtcaagatcagggacgacgttaaattcacagacaacaccactttggatgcagaagatgtggccttcacatacaacgaagctaaaaagtccggagctagcctggacctcagttccatggagaacgccacggcagtcgacaagcaaaccattaaatttgagctgaaccggcctgactccaccttcgtggataagtttgcctacattgggattgtgcccagcgatagttacaacaatgagacctatggggcaaatcccataggaagcggaccatttaagttcgtacagtgggacaaaggccagcaggtcatcctggagaagaacccagattactatggcaaagagatcaagttcgacaagttaacaatcctattcgagcaaaatgaagccgccttcaatgcggcgaagaataaagaagtggatatcgctgccgtaccgctctcgtatgccaacgaaactgtcgatggctacaatatgcacctcatggataccattgatgtccgcggccttagcttgcccgtgcagaacaacaccggtaaattgagcgaagacggcaatcccataggcaacaacattaccgccgacaagagcatccgggaagcccttaactatggggttaatagaaccgccatatgcaaaggcgcactgaatggcataggagtgccaaactacgacgggatcgcccatctgctcccctgggcgaataacgagagcgcaattgacgatggcgatgtggataaagcgaaggacatcctgaagaaggggggatggaaggataccgatggcgatggaatcgtggaaaaagacgggaagaaggccagcataaatgtctattacagctcaaatgcacctgagagacaggctattgccgtgacgatcgccgaggaggccaaggagtttggtattgaagtgaatgccacggggtcaaactgggacgaaatggacaaaattaaaaacacggacccagtcgtttggggattcgggtcaactgacccgagcacaatgtggtccgagtactacagtgaccaagcaactgtcggctataataatccggctctgattaacaatagtgctgttgacaagcatatcgataacgctatgaagtctgatcgtgagtcctcatatgccgaatggtcggctgtatcctgggacgggcagactgggatcagccctaagggtgacgccgcctggctgtgggttggagaaattaaatacggctatttcgtggacgagagtttagacatctccaacaacaccgagctcatccagcctcacggcggagacatcttcggcaacatatacgactggtcccgcgtgtcgagcattgagaaatga

SEQ ID NO: 9058 - DNA, 615 bp, synthetic construct
  source 1..615: mol_type = other DNA
atggaacttaaagggaacaatgttagcttcaagtatccatccactaagaagtacatcctgaaggatatagacatatgcatcgacaacaccaagatcaccgctctggtcggagacagcggcagcggaaaatcaacgctatgcaaaattctcgccggatacgtgcagaacttcgagggcgaggtgacattaaataataacaagttgcccaagaaggagttttgccctgtgcagctgattttccagcatcccgagaaagtgatgaatcctaaatggaagatgaaccgcattctcgaggaaagttggatgccggacgataacctcctgaaggagtttggcatccagaaaacttggctaactcgatttccccaggagctgtctggtggggaactgcaacggttctccgtgctgagggcactgaacccaaaaacccagttcatcatcgccgatgagatgaccacgatgcttgacgcgattacacaagtccagatcctcacctcggtcatcgaaatcgtgaagaaaagaaacatgggcatgctcattgttagtcacgacatgccactggtagagacaatctgtgacgaaataatctacttgaaggatattaatgggatttga

SEQ ID NO: 9059 - DNA, 960 bp, synthetic construct
  source 1..960: mol_type = other DNA
atggagaaactgttggacgtggagaatgtttcaatcagttttatccagtatacgcagggtctgaaccaaagggatctgaaggttattacagacctcactctggatgtatttgaaggcgagatcctggccatcctaggtagcagcggatctggcaagagtttgctcgcacatgcgattttcgggattttaccagagaatgccaatctgaatgggaccatcaagtacaagggcaaggagctttcacagaaggataaggaggagatccgtggcaaagagatagccctgattccgcagagcgtaaacttcctcgatcccttaatgaaaattagcgatcagtccatcgggcagaccgagaacgaggaggaaaagaaggagaagaaacagaagcagcgagaaatttttgaacaatacaatctcggtcccgaggtggatgacatgtacccctttcagctttccgggggcatggctcgcagagtcctggtctcgacagcgctcctgtccaatccaaaactagtggtggccgacgagccaacaccaggattggaccaaaagaccgtgatggaaactcttaaccacttcaagcatatgaaggaggacggcgtgggagtgctgctcatcacccatgacatccacgccgcactggaagtcgctgatcggatcggcatcttctattctggatacgtgatagaaattgccgaaaacaaggacttcagcggaaacggcgagaacctcctccacccctacacgaaagccctgtacaaagctcttcctgcaaacgggttcgaactgaccgagggacaccagcctttgcacggggagatccctaaggggtgcccctattatgaccgctgcgagatgcggatgggaatatgcaaggaagaaagaccggaactgacagacctgggcaacaaaaaagtcaggtgtttcaaatacgagggcggtctgaaaaacggcacttga

SEQ ID NO: 9060 - DNA, 561 bp, synthetic construct
  source 1..561: mol_type = other DNA
atggatgtgataatcaaggagttaggcaaaaatagcaaagaaattgccgaagtccaggagtttctgttcaagatgatcaagctcgagtttggctacgactacgtcccgcaatggcatcaggatattatcaaccttgagaagtattacatcgacccaaaaagaaataacttcttcatcgcgtataccaagactggtgaaatcatcgccaccatcgggattcgggcctacgacaaagactttcccgagttcaggcatctatactccatagataacacttcatccatttggcgactgttcgtcgaccggcgctataggcgctgcggattggcttctaaaatgttcggcatagtggaaaactttgccaataccctggggtacgacaatatttacctgcacacgcacaagacactcgatggggctattgagttttggacaaagatgggcttcgtggtggcactggacagcaacgatgagctggaaaccgttcacatggataagaagatccagggagtgaacatcagtgacaacatcgtggactataaatatgcagtaaagctctga

SEQ ID NO: 9061 - DNA, 693 bp, synthetic construct
  source 1..693: mol_type = other DNA
atgagcctctctctgaagctgaagcagtaccttaccgaccaaggtgctgatgaggtagggttcgccgacatcaccaacttcacccccaagaagaacttaaataaaggggtggtgttttacatcacatatcagaaagagaccctaaggcagatgcagaatgcacccaccaaggagtacctgaatgaactgatcaatctaaatctcaaactggatgaactcggtatgaaatgcgaggagttccttattgagcggggctacaacgcatacgcgcaaacaaagaaacgcctgggatatgactttggggagtttaactccttcgaactgcctcataagactatcgcaacgcgagccggcattggctggatcgggaagtcagcgctccttatcacagaaaagcacgggtgtgctttgagactcagttccgtgttgactgacgccccactgaacccgggcaagcccattctgaaatcgaaatgcggaaagtgtatggaatgtaagacggcctgtttcggaggcgccataagcggaaaaaagtggaactataagatcaaccggacagatttttatgacgacaaaaagtgcgagaagtacgccttgaagataagcaaagagaacctgggcaaatccgataccgtctgcggcaagtgcatctacgcttgcccatacactcagaaatatattaagaagagttga

SEQ ID NO: 9062 - DNA, 1617 bp, synthetic construct
  source 1..1617: mol_type = other DNA
atggataaaaagataatcatcggcgcgatcgtcgtggtgctggtggtgattataggcgccttcgccttcatgggcgggagccatgacagtgatccaacccacctgactgtagctgcccacagcaacatcaaagagcccgaggcggggttcaacccgctgactggctggggatgtggacaccagaactataacccacttgtgcagagttgtctcttcaagacggacaagaacggaagcattgtgccagatctggctacgggttactccgtaagcggggacggcaaaacctggaccgttaacgtgagggacgatgtgaaattttccgataacagcacgtttgatgctgaagacgtggcattcacattcaacacagcaaaacagactgagagcgagttggacctgacaaacatcgccaatgtgactgcagtaaacaacacatgcgttaaatttaacctggtggaagcccgctcaacctttatctacgatctgcgatatcttggaatcgtgccgagcgactcgtacgacaatagtacgtacggcgagaaccccattggcaccggaccttacgtcctggaccattgggataagggtcaacaggctatatttaagatcaatgataattactatggggataaaccgtactttacccaaatcaccctcctgttccccgaggaggctacatggctggaactagctaagtccggggaaatagatgtcgtgcccgttgcaacctctgcactcaaccagacagtcgatggctaccagtttattgagaagtcagccggcagagcccagggcgtcagcctcccatatcttaacgacaccggaatcatgtacaatggcaccatgaaagtcgggaacaacgtgaccgcggataagtccatccgtgaggccttgaacgttggtatcaaccggcaaactatgtgcgacgaaattttcgcaggacacgcttctcctgagtttaccggggttgatacacggacttatgccaatcctgacgccaaggtcgcggacggggacgtatccaaagcaaagcagatcttgaaggatgggggctggactgatactgacggcgatggaattgtcgagaagaatggcctgaaggcatcattcgacctctactatcctccagattatctcgacagacagagtatgtcgacggtgttcgccgaacaggcaaaggaattagggatcgaggtgaagctcgtcggggccgactgggacacaatttataagaacctatatagctcagccgccctgatgcagcaaacctcccccgacccatacaagagtatctaccagcaataccacagcaaagagatggacggattctacatgaaccccaacctgtataataattccgcctctgaccgcttaatggacgaagctatgcataccagtgacctgaaccaggccgactcattgtggtcgcagtctgcccttgtgaatggtggagggtggggccctgccggagacgctccctgggtttggattgctaattacgattataattacttcattaaggacggtattgatatcggcaaacagcccgatggtctcggcaatgacgtgctgatcaatatatgcgactggtccaggaccaattccacagcgtga

SEQ ID NO: 9063 - DNA, 990 bp, synthetic construct
  source 1..990: mol_type = other DNA
ctgaataaaaatcaattgctcaagttcttcgggtacaagttgatacggtttctcatcttgatgatcgccgtgtcaattttcagttttgtcctgttagatctatcccctatagaccctgtgaacgcgtatctcaaacaggcggccgtgagcgaagctcaacgacagatccttcaggagtattttggcacaaacgtccccctgaccactaagatctttcattggttaatcgacttattccagggtaatctgggcacttccctcatataccgcgctccagtggtcgacattatcctggagaaagcttcggcttctatcgtgctgatggcgatcagctggctgctgtccggaatcatcggatttttgctgggggttgtggccggtaaaaacaagggaagctggattgacaaagccgtcaaggtttactgctacgcaattcagtctgccccatccttctgggttggtatgcttattctgatggtgttcgccgtgtatctgggatggtttccaattggatttggggtgcccattggcgtgcgcagtaccgacgtaaccttcgcagagtgggccacccggctcgttcttcctacgctgaccctgagtctggtggggctcgccccgattgcaatgtacacgagaaacgaactgatccaggttttgagctctgacttcgtcttgtttgcaaaatccaggggagaaaagggctggaacctggtaaagaaccacggcatcagaaatatcctgctgcccgcaataacacttcagttcctcagcttcagcgaactgttcgggggggccgtgctcgtggagcaggtcttctcatatccgggcatcggccaaacagctgtggccgcaggccttcagaacgatgtgcccctgtttctgggtatcgtactattctcggctatatttgtcttcgtcggcaatctactcgccgatctttcatactacctcattgaccccaggatcaaggagaaggagttcaacgattga

SEQ ID NO: 9064 - DNA, 852 bp, synthetic construct
  source 1..852: mol_type = other DNA
atgatcaaaaaggctgacgacaagaagcaatggtttctctaccctgccaacctgaggaccaagaccattgtcattatcattctgtcggcattggtgatcctaagcatttttatctccgggtacttcatacgggacatccccacaagtttcatcaatgccaaccagatgccctccttagagcacctcttcggcaccgactggatgggccgggacatgttccagagaaccatcgccggcctcggacttagcctgatggttgggtttatcgcgagcatcgtgagtactgtcatcagcattatcctgggcctgttttccagtttcaataagttcaccgatgagttcgtggccggcatcatcgatctgtttggttcaatacctcatattctgttgataatcctcatttcgatgatgtttggagggggcgtaatcggagtagtgatgggtgtcgggctcacgcactggacgccgctggcacgagtgctgcgctctgaggttaaagaaatcaggacaaaggagtacatttcccttgccgagaatctgggaaagagcaaaatgtggatagcgataaaacatattctgccactggttatatcacagatcatcgtgggggtgattctaatgtttccccacgccatcatgcacgaggctgccattacattcctcgggttcggcttgcctccacacgagccagctattggcgtcatcttaagcgaatcaatgaactatctttcctctggatactggtggctggcattttatccgggtatgagccttttgattgtggtcctcctgttcgatttcatcggagagaacgtggaaaaactgctcaaccccgaaactgctcaggaatga

SEQ ID NO: 9065 - DNA, 693 bp, synthetic construct
  source 1..693: mol_type = other DNA
atggatctgactcagaagctgaggaagtatctgattaagaacggcgctacggaagtcggattcgcagatatcatcaattttactccaatcaccggtttgaacaacggcatcgtgttctacataacctatccaaaagagaccattaggaacatgaaaaatgcgcccacgaaagagtacaacgaagaatatgacaaaatcaattacaaactcgatgagttaggcatgaagtgcgaggagtttctaatcaagtatggttacaatgcctacgcccaaacacgccagagacttgggaacgacttcggggagcacaactcattcaagctgcctcataagacgatcgccacccgagccggcatcggctggattggaaaatccgcgcttctgatcacaaagaaatacggcagcgctctgcggctctcctctgtgttgactgacgcccccataaagaccggactcccgacaattaagagcgagtgtggaaagtgtatggaatgtaaaaacgcctgtagcgggggggcaatcagtgggacagaatggaactacaagctcaaccggaatgatttttacgacgacaaaaagtgcgagaaatatgccctgaaggtatcgaaagaaaatctgggcgacgagaagacaatatgcggaaaatgcatttatgcttgcaccttcacccagaagtacattaagaaggcatga

SEQ ID NO: 9066 - DNA, 867 bp, synthetic construct
  source 1..867: mol_type = other DNA
atgaaacgcacagccctcaagattgggtatattggcaccaatttccacgggtttcagcggcaacccgacctgcgaaccgtggaagaagaactcatatatcacctccgtaaacttaattacatcgacgatttgaaaaagagcagatttcgcatagccgggcggacggacgccggtgtgcacagtttaggcaatgtgattagctttcagtctgaaaaggatgtgaggataaacgagatcaacaactccctccctgatgacattcaaatccttgccagtgcacccgtacggtacgcctttaagccgcgctatgcccagatgcgacagtatcgatacatgctgttccaggatctggacattgataagctgaaggagtgtgcggacatttttaaaggaacgcatgacttcactaactttaccaagagattccagaagacaaccacccgcactattgacgacatcaagatcaaaaagtttgacctagaggattaccacaagaaaggcttcccaaaccttcatgatacactgtccccaatcttcgttgacatctacggcgagtcattcctgtggaatatggtcaggaaaatgatgagggttttcgtggatgtggctataggaaaaatggacctggatgaggtcgaaagactcctaaaccccgaggagaacgagtcacgggcgaacatcaaggtgatggaggcagaatacttgatcctgatgaatatccagtacgacggaatcaagttcaggtacgatgactacgcttgcgagagattcaagcgggatctggtcgatagcctgtccgacttgcaaaaacgctatgcaatcagggagtcgatgatcaagagcctccaggacctgcacgaatggtga

SEQ ID NO: 9067 - DNA, 1323 bp, synthetic construct
  source 1..1323: mol_type = other DNA
atgaaaatcgctaccattctgggaacccggccagagatcatcaagatggcccctattattgacgagatctccaagaggaacattgaccaaatcgtgctgcacacaggccagcactacgatgaggagatgtctgacaccttctttagggacttggatattcgcacccccgactataatattcaggtgggttccggcacacatgggaaacagacaggcttaatgatgaagggcatcgagaaggtgctactcgacgagaagccggacatcgtcctggttcagggggataccaatgcggttctggccggtgcgcttgtcgcctctaaactccacatcgcaatcggccacgtggaagccggactcagaagctttgatatgacgatgcctgaggaaataaaccgtcgagctgctgatgtctgctcaacaatgtactttatacccaccgccgagtccgctatcaacctgttggccgaggggtattcgcgaaagaatctgttcataactggcaatactgtggtggatgcctgtttcagacatctgaagattgccaaaaaacggggaattaaagagaaaagcctgaaggaacttaatatcgataaaatggacaacatcctcaccctgaccatgcatagggcagagaacgtggatgtgaaggaacgcgtggtcggtatcatcgaagcactcaaggaactggatgacgcggatattattttccccatccacccacgaacaaagaacacactggagaaatttggactcttcgatgagctgaataacttggagcatgtgcacatcataaagccattgggctacctggacttcttgctgctgacgagcgctagcactctcatcctgaccgacagcggcggccttcaggaggaggcaataacactcagtgttcccagtttaaccctgagatataacaccgagcggccggaaacggtaactgccggcggaaatatccttgtcgggtcagatagggaagcgatcgtctccaatgcccggaaaattcttgataataagaatttcgcagacaagatgaagaacgctatcaacccatacggtcaaggggacagcgccaaactgacggtagacgcaattgaagactaccacgcccgcggactactcgacatcgtggctcctgaggatataatgaacagtttcaagagaaagatgaagaacattcgggaagacatttctgtgaaagacttcgaaaggaaagagaacgccctggtacacatggtttttgacgggaagaatatgcagtttcccactgacgagctaaacctcaacgggatggtgatcaactacgacaagcgcgaatga

SEQ ID NO: 9068 - DNA, 1089 bp, synthetic construct
  source 1..1089: mol_type = other DNA
atgacaaaagagaatgagtccatcttggtcttcgagtacttcacggcttctggggaaaaggacaagtgcattatctccgaagccgaagccctcctattctcactgttagacgaccttaaagagtttaacgtagatttgatcatcaatgagtcttacggcagtgtggtcaaaaactacgggaatgtaaacccaatcctaatcaaccaggatgtcgtgagctggcttgaggagaatgcagatcagtttaacaaggctatcttcatcagcgcagaaaacaacaacaatctctacaacattaccaagattctggaagagaacgacgtgaagatatacaattcttcagccgaggcctgcctgaagtcctccgacaaatatgagacttacgaagccctgccgaataccattccccaaccacgaagcttcaggttcaagattgatagcaagggctactggaaaagagcaatcgagaatctccacgaacgttggcaggctgaagatcctctgactcccctgaaactgatcatcaaaccactcatgggcgtggactgtgaggatatagtgatcatcgagaaaatcgaagacctgaccttggacctggacaaaatttttacccccggctctcgggttctggttcaggaatatatcgagggcagcgatattagtgtgagcctcatctcagacggtaagaacgccctgcctataagtctgaatgaacagtacgtggagctgaaggagaacaaaggaatttatatgggcggccggctcccttttgagtctaagttcaaggatgaggcgtttgacattgccaccaaggcgatcgagtccatagaggggatgaagggatttgtcggggtggacctgcgcattaattcggatgaaaaggacatttattccctttaccttctcgaaatcaacagccgcttcacaacgccctatgtgggattaagcaaaatagctaatttcaacataagtaagacaatcatcgacctgattgatggaaacatcaacattggggacttggacatctcgctcgatggtgaaatcgagttcaagaagtcaggaaactccctggagattaggagaatatga

SEQ ID NO: 9069 - DNA, 1023 bp, synthetic construct
  source 1..1023: mol_type = other DNA
atgaaggtggccggatttgacatcggcggagcgaacaccgatctcgcagtcatcgacttcgacggtgaggaaatcaaaaacattgaagtggactttgcataccttccgatgtggagtaacaatgacgatctctcacgagtgttgaccgaactgatcgagaatatctgtccagtgtccgaaattgacgctgtaggcattagcatgacggccgagcttgtggatgcctacgacactaagaaggacggagtgctggatgtggtgaagaaatgtgaaaaaacattcgactgtcccatagcatacgtggggatcgacgggatgctcagtaaggaggagatcatcaagacgccactaaaagctgctgcggccaattggattgccaccgctcagattgccacactgatttcggataactgcatttttattgacaccggcagcacaacaacagatatcatacccatcaaggatggagttgaatgcgcaatcggcaaatccgacttcgacaggtctgctaccggcgagctagtctacaccggtaccttgcgcacgaacttaacaagcttcttggataagatagaattaaatggcaaggagtatcgggtagctagcgaactgtttgcccagactgccgacgtgtacacggtgctggacctgattaccgaggaggattatgtttgtgacactttcgacggggagggcaagtcaaagatcgagtgcgcaaaaagaatagctcgggtagtctgcgccgatctggagatgatgactatggatgagattgtgggcatgtctaaattcatccaccagaagcaagttgaacaaatcgccgatgggctgaagcaggtcgtcgagacccagaacctcgacctgatcgtgacaaccgggcttggaaaagacatcctggacaagaaggcggcagaactgctcggtctggaagtcaaatccatgggggatatactgactgatgaggagtgcgttgtggcccctgccatcggaaccagcgtcatgatgaataaatatctcaactga

SEQ ID NO: 9070 - DNA, 567 bp, synthetic construct
  source 1..567: mol_type = other DNA
atgactatcaatatccagatcctgctgattgcctgcgtcacaacgctctatttcatcctgccagcgtacttctcaaacggggcgggactgttgtttggtggaggcatgcctgtggattttgccaaatctgacaggtacggtatccgatggatcggcgatggcgtcacctggcggggattattcgccggcaccattattgggattatcaccgggatcgtgcagggcttcattgctccgcacatactgccagcttatggacaatacataataactcccatagtcacaaacattaactccgggatcttgatcggcttcctgctcgggtttggcgccctacttggagacgccatgggcagctttctgaagcgcagactggggattggtcggggaaagcccgctccccttttggaccagttagacttcctcatcatcgcactcattctcgtgagccttgtggtaaagatcgatctgctgttcattgcaattagtatcatcctaacactggttatacatctgatcgccaatacctgtgcatatctcctgggcatcaaagacgtgtggtactga

SEQ ID NO: 9071 - DNA, 1509 bp, synthetic construct
  source 1..1509: mol_type = other DNA
ttgaagatcaaaagcaccaagtccctctgccccgagtgtgggaagccaatcgacgccgaggtgtacgatgaagacggcaaagtgttcatcaaaaaaacgtgcgatgagcatggcgagtttatcaacacttattggggggacgatgagttgtataacagggccaacaactacctgccatccatcacctcgatcgaaaacccatgcatcgaggataccgccagctgccccagcaattgtggcctgtgttcaaaacacgaaacaagcactgttctgggtctgatcgatgtaacaaatcgatgcaatctcagatgccctgtttgttttgcgaatgcggctgccgccggatacgtatatgagcctacacaggatgagattcgacagatgctcaagaacctaaggaatctaaagcccaatccaaccccggctatacagtacgccggcggagaacctacggtgagaaaggacattgttgaactgattgcaatggccaaggaagagggctttactcacgtgcagatagctaccaatggaataaggctggctaaaagggaaaacttggccaaagatttaaaggcggccgggctcaacaccgtgtacttggcatttgacggggtcaccccagagccttatattaacaaccggggcaaggacttactcccctttaaactcgaggcaattgagaattgcagaaaggccggcctgggcgtcgtactggtgcccacactcatcaaaggaatcaacgaccaccagattggggagataattaagttcgcatttgacaacaatgatattatttacggagtgaatttccagcctgtttcattctctggacgcactcctgccgatcaagtggaagcccaaagaattacaatccccgacttcgtgaaaatcatcgaagagcagacggagggtcaggttaagaccacggatttctacccgccctccgccgtggagcccgtcgcacggttcatcagcgcccttgacggtgaagagcgacctccagtgacactgaactgccaccagcactgtggtgtcggcacctatgtgttccgggagaagaccgaagggagcggccgggataagctgatcccaattacaaactttatcgacgtggagggactctttgaaaaactggacgagtatgctgacaagcttatcgaaggcaagttcggtgcgcgcaagaaggtgatagctagtgtgactaagaacctgccaaagctgatccatcccagtaagaccccggattacctggacattaagaagattcttttcgacgtctttgctaagcggtcctactccgctcttggggacttctctaaagacgcaatgctgatcagctgcatgcatttcatggaccccttcaacttcgatgaagaccgcgtcaagaaatgtgtcatccactatgccactccggatgggcgcatcatccctttctgtaccatgaatagtatataccgtcagtcagtcgagcagaactttgcaaagcccctgaaacaaaaaaaagagtga

SEQ ID NO: 9072 - DNA, 486 bp, synthetic construct
  source 1..486: mol_type = other DNA
atggacattatcaagggaaagacctggacgtttggggagaacatcgacaccgacgtgattatccccggacgatacctgcggacattcaacccacaagacctggccgatcacgtcctcgagggcgagaggcctgacttcacacagaatgtccagaagggagatatcatcgtcgcggatgaaaactttggctgcggctcctcacgcgagcaggcacccgtggccattaaaaccgccggtgtgagtgcaatcgttgctaagtcgtttgcccggattttttatagaaacgctatcaacatcgggctgccagtgattgttagcgacatcgaggccgaagacggggacgtaataagcatagatctgtctgaaggcaaactggtgaatgagactactggtgatagcaagaatttcgaaccgttcaaagagttcatgctcaacatattggaagatggcgggctagtgaatcattaccttaacgagtccgactga

SEQ ID NO: 9073 - DNA, 630 bp, synthetic construct
  source 1..630: mol_type = other DNA
atggaatgcccaatttgcggctctgataatgtagagatcctgaacgctaaacagaaatcaagtaagaagaagcttatggaggaatatctgctgaagtgtgaggactgcggacatgtgtttaaggacatcttctccgcaaaaaagcctaaaccctacaggctcatcattagcgcccatgataagtcccacaagaccaccattgacctaagcccaagcgacgagctgaagagtggtgacgtcctccttagcgacctggggcaggtggaagtgaccagtattgaggttggggacaagcgggtcaataaagctaagatcgaggacatcaacacgatatgggccgccagcactgagattccggcacgaatcggcttcagcgtagatctccacggcgaggtggattcttacaagttagatctggaacgcgatttcgagatagcccccggggacatcgtgaagatcgacaaacacatcgtcaaagttcacgtgatcaaaacaaaggacagaaaactgacatcgggatttgccaaggcggaagtgattaaacgggtgtattcaaagcccgtcaagtttaacaacttcgattacgatttgactaaggacatattcaagaaaaccaaaaagtcctcctga

SEQ ID NO: 9074 - DNA, 1278 bp, synthetic construct
  source 1..1278: mol_type = other DNA
atgaaggtctatattgaatcctacggttgcaccttcaacaaggctgacggccagatcatagctgggaacctccaagaaaatgatattgatatcgtcgggagcatggaggaggccgacgtgatcatcgtgaatacatgttacgtgaagctccccaccgaaaacaaagtgacgtatcgcatccagaagcttcaaaacgattttccagataaaaaaatcatcgttgggggctgcatggtcgagatcgaccctgaaaagttggataaagtagcccccaatgcgtcatggatcggccctcatcagctgaacaaaagcgcagaggttgtgaaatccacatactgtggggaggtcgtgcgggagtccggatttagcaaggagtctaaggtggatgtgcccaaagtcatggatgacagcctgattcatatcatccaaatatgcgagggttgcctgggcgcctgcacattctgttgcacacgcttcgcccggggcccactgaacagctatccgattgaggacattaaggaagaagctcgaaaggccattgagcagggggcctgtgagatccagctgaccgcacaggacactgccgcgttcggcaaggatagtggcgaaaagctatccgacctcatcaaagaggtggctaacctagacggggactttcgcatccgggtgggaatgatgcaccctaagaacattctcaacgatgtggatgaaatcatcgatgcgatgaagcacccgaaggtatataatttcatccatctgcccatccagagcggatcggacaaagtgctgtcagacatgaggagagggcacagtgtgaatcagtacctggacatcgtctccaaattcaagtccgagatccccagcctcacgctggctgtggacattattgtgggttatccaaccgagtccgaggaggactttaatctgaccgttgaattacttgaaaagataaagccaagtctgattcacctgagcaagtaccagcacaggaaaggtgcagtgtctagctcacttcccgaaattccacacgaaaccatgaagagacgtagtaaattcttatctgagattaagtcaaaaataacggaggaggagaataaggaactcgtcaattccaaccagaaggtcctggtcattgagaaaggctcgaaaggaggatttatagcaaagacaaacagctacatccctgtaatcgtggacaacgttagcctgggaaccttcgttgacgtaaaaataactgatgccactgccacttacttgaagagtgaactcttgggctga

SEQ ID NO: 9075 - DNA, 201 bp, synthetic construct
  source 1..201: mol_type = other DNA
atgagcgagctccccatagccccagtcgggaggatcttgaagaatgcgggcgcacagcggattagcgatgacgctaagattgccctggccgaagccctagaggagaagggcgacgagatcgcacagaaagccgtgaacttcgcacgccacgctggaagaaagaccgtgaaagccgaagacatcaagctggcgatcaaatga

SEQ ID NO: 9076 - DNA, 723 bp, synthetic construct
  source 1..723: mol_type = other DNA
atgacatacaatataaaaaattccaaggagctcgccgggctcattaattacactaacctgaataacataatcactgaaagcgagatggtggagtttctcgagaaggccaaagagaccaacttcaattcagtggtggtgtctcctacttacgtcaagctggccaaggaaacactgaaagacaccaatatcaaggtgggatcggtcattggcttccccttaggtttcgaagacacggagagcaaggtcgaggctgccaaatccctcctggacaagggggtggatgagtttgaggtagtccttaacctgagctacctaaaggatgagaaatacgaactgctggaaaacgagatcaaacagataaaggaggcaatcggcgataaggtgctgaaagttattattgagaccaaagcgttggaagactaccaaaaggctaacgccgccaagttggctgagaagagtggtgccgactacgtaaagacctccaccgggttcgtttcaccaagccacatctttgagaatgtgaatgacattaacatcatccagaagcatgcaccgacaatcaagatcgaaatttatggcggaatcaacaactataaattcgcgaaccagatcctcacgggcggagcagatgtcatagggagtgaccagggctatgaaattgtgaagaggtataaagatcttcgggaaaacacacaggttaagcccaaaccaatcaccctgtga

SEQ ID NO: 9077 - DNA, 1674 bp, synthetic construct
  source 1..1674: mol_type = other DNA
atggagaaggcatgccgaattataattaacgatatccttaacggggagataagcacgcgacgtgatcttgaggtggcaaaaaggcagctatgcagggacctgaacctgagccgcttcatgagcaacgccgacatactcgaatttgccaagccggaggagaaagaactggtttcgggcatcctgaagaagaaaccaactaggaccatgtccggtgtggcggtggtcgctgtaatgtgccatccacacaaatgccctcacggaaggtgtttctattgtccggagagcgacatcgcgcctccaagttatactggtgaggaacccgccgcactgcgcgggagaatgtacgaatttcacccctacatccagtgttttaaccgactgaagcagctcaagaaaatcggccaccctattgataaggtggagctaatcatcatgggcgggacatttcctagcagagacttgtgttatcaagagtggttcgtcagccagtgcttgaaggccatgaccgactttgggctgattcttgagaataagccaaccaactacgagtacaatttggatttcaatgagattcgcagcttcgagaaaggtatcctgaagacatatcctccgaatgattacgttttaataagtgatgtgcagaaagctaacgaaaacagcaaggtaagatgtgtgggcatgactttcgagacacggcccgactactgtaaaaaagatcacattaacagaatgctggacttcggggtaacgcgcgttgagctcggggttcaaacactgtctgacgacatctactccaaaataaaacgggggcataaaatcgctgacgtgatcgagtcaaaccagctcctgcgggattcggccattaaagtcgccatgcacatgatgcccggtctgtttagcgacgagaagcaagatctgaagatgtttaagcagctgttccatgacgataattttaagcctgacatgttaaagatttatccctgcctggtgaccaaaggcagtgaactgtatgacttgtgggcggagggcaagtacgcaccatataccgacgaggaagccgtcgaactcattgtcaagatcaagaaaattcttcccaagtgggtgaggactatgcgaatccagcgtgatatcccctccaccctcattgaggctggcgtgaaaaagtcaaacttaggggagctggtgtacaacaggctggacgaggagcacatcaactgccagtgcatacggtgccgggaaattggccataaaaagacatcaaagcagtatagccttgacgagttcgagctcttcaatgagagttacaaggcctgtggaggagtggaaaacttcctgtccatcgaagacatcaatgaagagtccgtcgccggatttctgaggttgcggttcccctcaaaggatcacttccgcgatgagatctccgacaagaccgcacttgtccgcgaactccatgtgtacggcaatatgatcaagatcggcaacagaaacccccacataggccagcacacgggatttggcgaacggctgctaaaagaggctgaaaatctcgctattgataatggtaaggaagaagtggccatcatcagcggaattggaaccagaaattactaccgcaaattcgggtacgaaaaagtgggaccatacatggtcaagaagctctataagaacatctga

SEQ ID NO: 9078 - DNA, 276 bp, synthetic construct
  source 1..276: mol_type = other DNA
atgcagataaaagagtttctggggagcgtggtgctggataagaatgcctatgaggtcggcaaggtcagtaatgtggagttcgatgcagcaacgggcaaaataaacgagattaccctcaccctacagaagaacatcttcagcaaagacgaactcgtaatttccttcgacgatatcgctacaatcggagcgtacgttatcctgaacaaagaaattcccaaggacgccgagtttgaggaggccgaagctgtggaagtggagatcgaagaggacaagtga

SEQ ID NO: 9079 - DNA, 297 bp, synthetic construct
  source 1..297: mol_type = other DNA
atggtgtttgatgcacgcgacattgagatccccctgaatagccatgtccggtacgtcgacaccgggacaatgggcgaagtggtggatgaaaggatcaccgacggcattggatgggttaaactgggcaaaacgggcctatggtataagtcaagccacgtggagttgctcgccgagaaggatatcaaaaagtcgtcctggggtgctgggaaggacctggatgtagaagacctgaaggagaaagccataagcttcgaggagctcgaactttccagtgacgcggggaacggaggaggttga

SEQ ID NO: 9080 - DNA, 2070 bp, synthetic construct
  source 1..2070: mol_type = other DNA
atggaaaacctagatacggatatcaagaaaataatcaacagcgcctatccctacatcaaagatttcaatcctgcccaaaaagccgtgatcgagtccggctacctcgaggacaactccaattacatcattagcatccctactgcaagtggcaaaacggttctgggagttttacctgccctgaagaccatattgaacgggggcaaggccgtttacgccgcaccgctcctctcaattcagaacgagaaggttaaggaatttaaggccttcgaggagtacggcatcaatgtagggaaacatccatcaagcgccgacctctcagtgatggtgttcgagtcattcgacgcactgacacgcttttcctggaatgtattgcgagaggtcgacaccctgataatcgacgagttccacatgattggagagtactcccggggccccaccctggaagcggccatcacaagggcgaagatcataaaccctaacattaaaatcatcgctctttcagctactctacgaaatattgaggaaatagaggggtggcttgacggaacgtgtgtggagcacgattatcgcccagtgcccctgcacaaggaggtcctcgatgcggaaatgtttaatacaaagaataaaaacgatgtgatcgtgaagattgttgagaaggccatgaaagacagctcccaggcactggctttcgtctctactagaagattcaccgaaagtctcgcgacctatgtggctaagaaaattaataaaaagatcgacaaaaagcagcgagagaagttcaaggaggtggctgagaaactattggacgtgccaaagaaaaaaggctcgctgcccaccagcacctgcctgaagctcgctgagtctgtagaacttggggtggcatttcaccatgccggactgttcaacgagcagaaggagatcatcgaagatgagtttcgcaacggaaacatcctgatgattacagctactccaagtcttatgtacggagtgaatttgcccagcaagacggttgtcattcgcgaccacacacgttggacaagtaacggcccgcaaccaatacccgtgtttgactacgaacaaatgtccggcagagcaggtagaccccagtacgacgatgtggggtattcttacctcattgccaagaccatggatgaagcgcagaatctcgaggagtattatgtggaaggagagatcgaaaagaccaacagcaaactggtggacaataaagatgccatctacaagcagattattgcccagatcgcttccagcctgagcaaaaacctggacgagcttgtcgacttcttcgggaaaactctgtacggttaccagatgaacaacaatcccagtatgtcttcttttgcagagtacaccatcaagtatgaactggaaacggcactcgaatttctcctgcagaacgggatcatcagggccacaccggaggggctgaagactaccgatttcggttacctgattgctaaatccaactatgccgtagaaaccgccgtgaagattaaagagtatataagcaacatgaacgagatcaacgtcgaagagtttatctacgcgctgagcgagacacctgatttgcccttaatcagctttaagggcaggaagagcaaagatcctgtgcgggacagacttagcgagtgcggattgttcgccatggacatcggtgtctccgaggcaactacagtctcactgattgaatggattgacgagaggaatgaatacgagatagaaaacaagtataatgtttattcggcaagtaccaggcgctctgcctacgaagcctcccgtctggtgaagttcgccaaagacacttcggagatccttggcgactactctaatttaaaagaatatgatatcctctccgctcggctgtactatggcgtgaagaccgacattattccactggtcatcggcgtgaagcggctcggccgcaagcgggctcggaatctggtcaagttgttcgggaacaacctgagtaacattagcgagaatgaactgcagaaggtcgaaggaatcggtcctaaactagctgagaagataaggttatttgtgaagaactga

SEQ ID NO: 9081 - DNA, 264 bp, synthetic construct
  source 1..264: mol_type = other DNA
atggcaattaaggtcgaggtttttagcacctccacatgcccccactgtcctgccgccatcgatgccgctatgaaggcaaaggacaaactgggaaacgccatcgacgtggagagcgtgaaaatagatgggaatatggataaccggcagagggccatggactaccagataatggctgtaccaacgattgtgatcgacggcgaagtggctttcgtcggcgcgccggcggaatcagagctaatcgaaaagctcgagagtatgctgtga

SEQ ID NO: 9082 - DNA, 1077 bp, synthetic construct
  source 1..1077: mol_type = other DNA
atgaccaatgacaactacacctgtgtcacaacgggcaccgtcgcaaccgcatgtagccttgccgcactcgacgcgatactgaacactccggatatcgcctgcgtcaaagtggaaactcccaaaaaggtattgaatattatcatcgacgagtgcaaatgcatcagcaacaataaggcttatgccatcgctcacaaaaatccatataatgaccctgatgtgacagtaaacctcgacatcatcagcacagtggagctgttggacaaaaatgacgaggaatctaacgtgattattacgggaggggaaggggtgggcgtaatcaccaagccgggcctgcagatccctgtgggagagtacgccataaacccagtgccccggcgaatgattattaagaatctttcctccaagatccctaaggggaaggtcgctaaggtcacaatctcaatccccgagggcagaaagatagcgaagaaaactatgaacccaaaactaggtatcgtgaatggcatatccgtgctgggaaccactgggatcgcacggagcatgtcgagtgaggcttacaaaaattccatcgtgacacaaattgatgttgccatcgcctctgatatcgacgatctgattttcgtgcccggcaacattggcgagaagttggcactcaagcaacttgatgttaaaaaagagcagatcatccagaccgggaactttgtggggttcatgtttgacgaggcggctaaacgcggaatcgccaagtttaccttctttggtcatatcggtaagctcattaaggtcgccgggggcattttcgacacgaagcacgccattgccgacggcaggcgcgaaataatggtgacccacgctgcactgtgtggtgtcgataaaattaacctgcagaagttattcgatagcaagacaactgatgaaatgatgagcattctggatggactaggagtgagtgtggaagtttcaaatagtattgccagcgccatccatgacaggtgcatgcagagattcgacctggacctgaacgtcatactcgttgacatggagggcaactacctgaacaacaacttcatcatatga

SEQ ID NO: 9083 - DNA, 1083 bp, synthetic construct
  source 1..1083: mol_type = other DNA
atgaagatagctatggtaggccagttcccgcctcatgtaggcggcgtgggggtccatatccatacgctctcaaaaaagttggtggacgaagggcacgaggtgtatgtgatcacttatcctcaccgcaacatcgaggacattgatggaatccatgtcattggaaccaaaggactaaatctgccaggcgtgcgggggctgatgtttaagatgaatgctaagaaggccctggaagacctcctggagaaagaggatatcgacattattcacggccactacttgttccccgcaggagccgcggcggtggaggttggccgggagcacaacatcaaaacatacgtaactgcccacggttccgacatgtttgagctgtacaagaagcagccctttatgagaagccccatcaaaaaagtgctgcgcgatgccgacggggtgtttgccgtcagcaacgctctgcgacacgagataatcgcaaccggggttaccggtatcgccaataagacaaagctcagctggaacagtgttgacatcaataaattttcctccaagacaaacgacctctttaagaaggaaaataaacttgaggacaagccaatagtgcttttcgtgggaaatctgattaaaaggaagaacgtcgatagcctcctggacgccaagaaggtctcacagagtgagtactacctggtcattgtgggtgacggcccccagttcaaaaaacttaacaagaaagtggaagaagaaaacatccacgatgtgattttcaccgggtctaggaatgatgttgagaatatcataccaagttgcgacgtcctaatcctcccgagcttcagcgaaagcttcggtctcgtgttaattgaagctttggcatgtggaaagcctgtgattggctccgatgttgggggcataactgagattatcaatgatgatgtcggcctgctggtaaacccaaacaagatttcatctatagccaaggccatcgatacgatcatccaagacgatgacttaagactggtgttctccctgaacgctcgtaaccgggcattcgacttctcggaagtcaccatcccctatgacgaggtgaactga

SEQ ID NO: 9084 - DNA, 867 bp, synthetic construct
  source 1..867: mol_type = other DNA
atgaagactatcgtgagaagcccagggtccgcaacaatcattaacgcgattgccaccggcttcggcagcgcattcgggattgatctggacatcaaatgcatcgccaaaaccacggacaagggcatcacttgcctcaatgacgtcggggcagatattgggtttatggagctctgcgtgcagcgcgtgttcaaccactacaatattgacacgtcagaatttgggatcgacctaaaaacagagagcaatctgccaatggcctcaggactgtcgagtagcagtgccagctctaacgctattgttaaggccgttagcagtgtcatctccgaggagtttaacttaaaacctctggacgacttggagttgatcaatatggccattgacgcaagccttgaggccggcgtgaccatcaccggttccttcgatgatgcgaccgcatcctacttcggcggggtggtggtaaccaacaacaagaaccgagagttcatcatcagggagaagatggaagagtatcccgtgctcgtctacatgccgaattattactccaagtctggagatagcaattcggaccggatgaagctgcttgctccccttgtggaaactgcttttgagttcgcctgtaataaggactactttaaagccctgaacctaaatggactgctgtatagtgctgcgctgggattcaactcatcaatcgctatcgatgccctcgaaagtggagccatagcttccggtctgtctggcacaggcagctcctttgtagcagtgagcaacgaagacaccatcgacgatattatatacagctgggagaaatatgaaggcacggtcatagaaacaaagattgataacgtcggttgtaagatactctga

SEQ ID NO: 9085 - DNA, 1272 bp, synthetic construct
  source 1..1272: mol_type = other DNA
atgaagaaaatatattcgatgctgctcctgatcgtgatgctgtgcagcctgagcatcgtcagcgcctccgagaatctatctacgagcgacaaccccgtggtcgtggacaacgtggatatgagcagtaaaaacatcggaagcatcccggatgtgacatctgcatcaaatgacgtcgtagtttcagaaaattcgtcggttgaatggaagagctatgagaacgagaaggacgataacgtctccgacaaccaatctaacagctccagtaactcaacgtccaacggcagttacaaagaggagtccgtggtaagtaatgtcgtcaccaagaatgtgtcctccagctacgggactgtggtgaactacaacatcaaggtgctggatcagtttaagaaaccaatggttgggaagaccgtgagcgttaccattggcaagaagactgtggagaagatcaccgatagcgatggcatggtgacattcaccctcaactgtcaggcgggcaaatacgtaatcaaatacaaggtggataatataaacggttccaacagctatatagtgaagaataagatttcacttaccgtcctcaactggaatctgaagggcgacgtttctaagattaatttaatcaagaagaacatgcccaacaatacctgggtgaagaaggcggtcgcagctacgaaaaaaggcattcctctgcttaaattcaagggtggaaaaggcaagattgtgttcatgactgccggtgtgcacgggaacgaactatcctcccaggtggctgcaatgaaaatgattaaatacttgtcagataatccaatcagtggaaccgtgtatataatgccgttcgtgaatgtgaaggccattgctaaaaaggtcaggtatacagacaaggactataaccggatagcttctagttccggcactatcccaaacaagatcgttaaactggtcgtcaaatacaaatgcaattcctacggggacttccacacgaccaaacccggtggagcccctgggaaggacatcgtaatgggaagcaagagcctgaaatcaaagagtgccgacctcaccaactacattgccaagaaatgcaaggtgaacaagcgcatctacagtcatattggccaggaatatcctggagcattgtttgagaacgtgaataagaaggggatcacctcagttatctgtgaagttgcccttccccacaatactgtaacaacaaaaacagtcaaaacatcgtttaacatgatgaagtacctcctgaaatacaatagcgtgatctga

SEQ ID NO: 9086 - DNA, 351 bp, synthetic construct
  source 1..351: mol_type = other DNA
gtgatcttcctcaacagaagctatgagatcaaaagctttaagaacaaaaaggaagccgaggagcttctaaagaaatcacgaaagagcattgacgagatcgacaatcaattattcgatctcatctcgcagaggaccgctctggccaaggacatagcgagttctaaagagtacctggaaattcccatcttcgataagtcccgcgagaaagtcattcacgacaagattcggcgcctgtccgaagagaaagggctggatgtggatatcattaatcagatagtggacatgttgacaatcctgaataagaacgcacagaaggaaatcctcaggcggaacgtagacggcaagtactga

SEQ ID NO: 9087 - DNA, 198 bp, synthetic construct
  source 1..198: mol_type = other DNA
atgggcaatattcgcaccagcttcgtgaagcggctcgccaaggagctgatcgagacacacaagggggtgttcacgaccgactttgagcagaacaaaaagctggtccaggaatacagcactgtgtccactaaacatctgagaaacaaaatagcaggatatgtaacaaggctaatccgactcgagcaaacccgggaatga

SEQ ID NO: 9088 - DNA, 1221 bp, synthetic construct
  source 1..1221: mol_type = other DNA
atggatctcatagtagtcaaattcggaggaaccagcgtgggtgacgggtccaggatcaaaaaggcggcgcagtccgtcgtaaacgagtacatgaagggcagccaggttgtcgtggtagtgtcagctgtcaacaagaccacggatgagctcatcggcctctctaatgacgctatcggcactggtctgacggacaagcagaaggcggagattatggccatgggtgagttgacgagtgctcgactattcagtgccaccattgagtctctgggggttaagtcggagtttatcgacccttacaataagttatggccaataataacagatagcaattctttggaagccaaaatagacctcaacactagcaacaagaaaaccgaagggattaaacagctggtgaaccagggggtgattccggtgatctgcggctttctgggaaaagggcccagcggtgaaatcacaacactgggaaggggcggaagtgatatcaccgcattcttgatggggcattgcctggacgccaacgaggtggtgatcgtgactgatgtcgatggggtaatgtccaccgatcctaacaagatcgaagacgccgaactcttggatacaatctctgtggaggagctgcgggacctggctacccacggcgcccaggtgttgcacccgcatgcactgaagtacaaagacccacttatcagcgcaaaaatcattaacttcgctaatgaggacttaagctccaagggtactcggatcgtcgggcccttcgagggcgaaatgctgaaatgtgttacactgtataaggaccctatctcactcatcgccattgtgggagaggccatgctcaagaaagttggacttatggccaagctcactacagcccttgcagatgacggcatcaatatttttggcatgagtgcaggccaaaactcaattacagttttcgtcaacaaggtggactcaaataaggcatatcttctgcttcaccaactggtcatcgacacggacgtgctaagctcgctgtccctgggaagagacactgccatgataacctttgtgagtcccgatattatcgaaacccccggcattatatccgatatcaccgagccactgcgcaaaaataacattaatattctcgaaattacctccagccagaccgctgtcgtgctgttcgtggattgggaagacggcgagaaggcccacaagctgatcacagaggtgctagaatga

SEQ ID NO: 9089 - DNA, 894 bp, synthetic construct
  source 1..894: mol_type = other DNA
atgaattttgagggcacatacgttgccatggtcactcccttcacaaaagacggaaccttcgatgaggaaggcttccggtcaaacataaattacctgatcgaccagggggtcaatggtcttgtgggggccggcacgaccggggagagcgctaccatgacgcatgaggaacatcacaaagtcatcgaagttttagtagatgaagtggacgggaaggtggacacaatagccggaaccggcagcaactccacatccgaggccttgtctctcaccaagtttgcgtgcgatgctggcgtggacgcagctctgctcatcactccatactacaacaaaccacaacagcacgctttagtaaagcactatggcactatcgccgaagcttgcgatctgcccattatcgcgtataacgtgcccagccgaactggatgtgatattgaggtcgagaccgcagtggagttggccaaaattgacggtgtggacgctatcaaggaggccagcgggagtgttgacaaggtgtcggacatttatcgggcactggccaatgaagacctggaatctgagttcaacatcctctccggggaggactccctgaccctacctattatgtccgtgggaggcaccggagtcatcagtgccagcgccaacatcgatgcaaagagaatggtgttgatggtggatagtatcctgaacgatgattacacacgcgcacttgaactgcactacgagatgctggaactaatcagggcgatctttgtggaatcaaatccggtccctgtaaagacggcaatgaacctcatgggcctgccttcaggtcccctgagggagccactgtgcgagatgaaggacgagaacctggagattctcaagatagccctcaaaaatagcaaccttatttga

SEQ ID NO: 9090 - DNA, 822 bp, synthetic construct
  source 1..822: mol_type = other DNA
atgatcaaggtggccgtcactggcgccgctggacgcatgggctccggcattatcaagaagatcacggagcaggatgatatggaagtagttgcagccatcgaaatgccaaacacccccctggccgggaaagatgcaggtctccaagcaggcattggggagatcggcgtgggaatcgtgggctctgaacgactcgaagagacactgaagagctcgggtgcggaggtcttagttgattttacgatagcccctgccgccgtggaaaccattaagacagcgaccagctgcggagtgaatgtcgtggtgggcaccacaggctttacagacgaccagatggctttgaatatcaagaacgttgaggacaacaaggtcggggctgtgatttcaagcaatatggctattggggtgaacgtgttcttcaacacactcaaaaaactggctccccttctgtacgacttcgacatcgagatcattgaggcccaccacaaccagaagaaagacgccccaagcggaaccgctatgactgccttcgaagtaataactgatgcacttaataggaaccccgaagaggtgggagtattcggacggaaggggctggtgggaaagagaacgcctgaggaaattggcgtgcatgccatccgtgggggggacatagtgggcgaccacaccgtcatgtttgttggtgagggggaaagatttgaggtgaaacaccaggcacatactagggaggtcttcatcgcgggcgtcatccgcgccgtccggtatgtgccgaccgcacagaaaggtgttgtcagttccatgaatgatgtgctgggtctagagtga

SEQ ID NO: 9091 - DNA, 1050 bp, synthetic construct
  source 1..1050: mol_type = other DNA
atggtgaaggtcggggtacttggggcaacgggaatggtggggcagcgctttatccagctgctcgaaaaccacccagatttcgaggtcactgctttagccgcctcctcccgttcggccggcaagcggtacgaggacgctacaacatggtatctggatagtgaaatgccaaatagcgtaaaagatatcattgtctgtgaaaccaaccttgaggatatggacaacgacatagacataatattttcatcgttgcccacggagtttgcctccaaggtggaaaagaagttcgcgaaggactatgtggtggctagcaacgctagtgcacacaggatgaagaaaaatattccactggtgattccggaggttaaccccgaatatctggacatgattgatgctcagcagaaggagaataactgggatggcttcattgtcaccaatccgaactgcagcactatcgccctcaccctcacattgaaacctatcgtggacaattttaatgtaaacagcatcagggtatcaaccatgcaagcagtgtctggagccggctacaacggagtgccctccatggcgatcgttgacaacttggttccctacatcgggaatgaggaggagaaaatggagtccgagacactacacctgctgggtagctacgacggaaacgtggtcactaacgcggatttccgactgagtgcctcttgccaccgggtgcctgtgattgacggccataccgaagccgtctttgtggagctggatgacgagttcgacatcggcgacgttaagaacaagatggcaaactttaaggcactcccccagaagctgaatctgttcagcgcccccgagaatcctgtcatcgtcaaagaagaaaatgaccggccacaacctcgcatggatagaaacgcaggcaatggcatggccgtgaccgtgggtaggatgagaaaggacaaaatattcgagaacagcttcaaatacgttcttgtggggcataatacgatccgcggtgccgctggagcttcaattctaaacgccgaactgatcaacgataaaatcctctga

SEQ ID NO: 9092 - DNA, 1158 bp, synthetic construct
  source 1..1158: mol_type = other DNA
atggagttaggaatggatgttgaaaaggataccctgcagtccctgatccgaagttgcttactggagcttaataaactgaagtacgacttaactgagctcgaagtggaaagggccaacgataacacaccacagaggattaaggagctagagaaggacatcgtggataaggagaaagaggtgtccgtcatcaagttcaaagccgaagacgaaattaacctgttgaaaaagcagctcggggaaaaagacatactgatcaaaaatcaggaagatcgaatctacgagttggattacgtcaacaactcactggatgagataaaggagtattttgcggagcagctgcgggactacaagaaaaaagaattggccgacgtaaatgagcgcctgactgactctttcaaaagcattgctgagaaggaggccactattaacacgctatcacgcaccatcgacgactataagatcaaggttatcaagctcgaaaacaatgtggagagccaggcgcagatcctggagcttgaaaagcagctggagcttaaagagaatgagattcgcataaaggacagtgaaatcaacaagatggatggtgagttggataatctgaaacaacagaccatccccaaagatgagtacgtgaacctgcaaagcaagttcaagtccgaaattacggcaatggacgctgaaataacgaacctgaagcaggaaaccatccccaagaaggactatgagcaccttcaaagcaagtttgactcagaaatcaaaaacctggacaatcagattaacagcctcaaagaaaacactatccctaaagatgaatatgtgagcctccagacacggtttgagaacgaactgtcggcccgtaatagtgaactggagtacctcaaagaaagatccatccccaaagaggactacctgaccctcaagacccaactgcagaatgaaataagctccagggagaatgagcttagatttctgaaggagcagaccgtcccacgggaggattatctcaagctgcagaatgagctcacaaagaaagacggcaagattaagcgcttggaggagattaacgcattcttcaacgagctacaggaagagcaggaggcttacgagacccaggaaacaacaccgcctttcagactcgagaagaaacaaggccggtga

SEQ ID NO: 9093 - DNA, 1611 bp, synthetic construct
  source 1..1611: mol_type = other DNA
atggcccagggacagccaatctttatcctgcctgaaggcactaacaggagcgtcggccgcgacgcacagcgaaataacatcctggctggtaaggtccttgctgaaaccgttcgcaccacactggggcccaagggcatggacaagatgttagttgacggacttggggacattgtggtaaccaacgatggggtgacaatactgaaagaaatggatattgagcatccagccgcaaaaatgctcgtggaggtcgccaaaacgcaggaagacgaagtgggcgatggaactacaacagcagtgatcattgctggcgaactgctgaagaagagcgaaaatctgctcgattccgacattcacccaacgatcatagctatgggctacagaaaagctgccgaaaaagcccaagaagttctagacgaaatcgccattgacgatgtggatagcgagaccctggttaaggtggccatgaccgcaatgaccgggaagggcaccgaggcagcccgggagccactcgccaagctcatcgtggacgcggtcgaggccgttgccgaggatggcgaggtggatatagacaacatcaagatcgagaagaaggacggggctgtggtggaggagagcaccctggtggagggggtgatagtcgacaaagagcgggtccaccccggtatgccttcagagatcaaagatgccaagatcgccctggtgaacgctccgttggaggttaaagagacagaggtggacgcggagatcaggatcacagatcccgcccaaatgcaagcgttcatagagcaggaagagaagatggtgaaggacatggtggaccaaatcgtggccgccggggcaaatgtactgttcgcccagaagggaatcgacgatctggcccagcattacctttctaaggctggcgtgctggctgtccgcagggttaaaaaatcagacatccagaagctatcgagggccactggcgccaacgtcatcaccaatctggacgacctcactgccgaggacctcggccaggccggcattgtggaggaaagaaaggtctccggtgaggaaatgatctttgtcgaagagtgcagcggagcgaagtcagtgactctcttcgtgcgtggaagtactaagcacattgtggatgagattgtacgagcaattgaggacgccattggtgtcgtggcggccacagtggaagatgataaggttgtggctgggggaggagccccggaaattgccatggctaagaaactcaaagattatgcagaaagcatcagtggacgggagcagctggccgtgaatgcttttgcagaagcgctagaggttgtacccaaaaccttggcggagaacgctggcttggacagtatcgatagcctggtagatcttcgcgcagctcaggagacgtcccactacatgggattggatgtgttcacgggggaagtcgccgacatgaaggaagcgggggtaatagagcccaaacgggtcaaaaagcaggctatccagtcggcatccgaggcagctgaaatgattttaagaatcgatgacgtcattgcctctaccaaaggtccagaggacgcaggtatggacccttccgcaatgggcggcatgcctcccatgatgtga

SEQ ID NO: 9094 - DNA, 219 bp, synthetic construct
  source 1..219: mol_type = other DNA
atggagaacctgagcttcgaagaatccctggagaagctcgagcggattgtgaacaacctcgagaacggcaatgtgccacttgataatgcgatcgacgagttcaacaatgccatgaaattggtgaagatctgcaacgagaaactgaacgcagccgaggaaagcatagctaagatcgtaaaggagaatggggaactagtcgaatttaatcccaccgagtga

SEQ ID NO: 9095 - DNA, 1257 bp, synthetic construct
  source 1..1257: mol_type = other DNA
atggagaaagagactataacagtgtctcagatcaactcatacatcaatcggaagttgaagaccgatccgaatttgaaaaatattctcatcaaaggtgagatttccaactacaagtcgagctttagcggccacagttatttcacccttaaagacgagaaatcccagatcgatgcagtgatgtttaaaggcaataaagaccgattccttaaatttgagcctgaaaacgggatgaaggtcatcgtcaaggggaagatcgaagtgtatgagaagacaggcaagtaccagttatacgctactaagattacggaagacggaatcggaaatctacaccttgcttatgagcagctgaagaagaagctggacaaggagggcctgttcgataatgcacataagaaggagatacccaagtaccctaaaattatcggggtagtcaccgcccagagcggggcggccatccgcgatatcattacaaccataaagaaaagatatccagtgtccaacattctcgtattctccactctggtgcagggcgaccaggcagcccaacagattgtcaagcagatcaaatacgcacaagagtttaatatagacacactgatcgttggaagaggtggcgggagtatcgaagatctgtggcccttcaatgaggagattgttgcccatgctatctacaactgtaagatcccaataatcagtgctgtgggccacgagatcgattacaccatatctgatttcgtagcggataaaagggccccgacccccacgggagctgccgtgcttgccgtccccgacataaacgaagttaagaacaacctgaacaatctctcaaacagggcgaacaagaatatcacaaaccggatcaagcaaaacaagactaaactgacacacattagcgagaagcagattctcaaaaacccagaatccatctacgaaatcaaaggaatggggctggacaacattgtcaacaagttgcacttcatcagcaagaacataatcaacagcaacaagactaaactattcaagctcgaaaattcaattgttctgaagaaccccattgagatcaccaaaagcaagcgtgacgcctgcctgcgcaatattgaaaaattagagatcctcaatcctctgctgaccttgaagcggggttataccctcgccaaaacgaacgacaaagtggtgagctcggccaaagacgtgaagaccggcgaccagctggacattgaatttgatgacggaattgtgaatacgaaggtgatctga

SEQ ID NO: 9096 - DNA, 231 bp, synthetic construct
  source 1..231: mol_type = other DNA
atgcggattaaggaggaactattcggcaaagaggtgctcgacgcagaaatccagattgtggggaaggtgaacgatgtgatcttcgacaaggacacgtttgaaatcaccgatcttgtaatcaaaaaaacaggactgagcgaacagattaaggccagcgagaatatagtccccatagagctggtcaaggttattggcgacaagatcctcctgaaaggtgaggatgacatctga

SEQ ID NO: 9097 - DNA, 528 bp, synthetic construct
  source 1..528: mol_type = other DNA
atggtgtccagggaatacctgatcaatctactgaaagacaacaacgtatttctcgaaggtgacttcacactgagcagcggacagaagagtaactattacatcaatatgaaaaaggcgatcacggagcccgagattctcagcacaatttcgaaactgatcacttcaaaaatcgatttggatgacatcgacaaggtggccgggcctgcactgggggcagttccaatcgccaccgctgtttccttggagtccaagattccgctcctgatgattagaaaagaaaagaagggctacgggaccagcaagttaattgagggcgaacttaacgaaggcgacaatgtgatcgtcgtggaggacgtctcaaccactggaggaagtctgcttaaagccataaaggctatcaatgataatggcgggaacgtgatacgggccttcgtcgtcgtggaccgccaggagggtgccattgagaagttcgaaaaagagggcatcaagctcgagcccctgataaacgtgaacgagtttttcgattga

SEQ ID NO: 9098 - DNA, 507 bp, synthetic construct
  source 1..507: mol_type = other DNA
atgaaaagtaagacaaccatcgaacaccagaaaatgtcatccaatgacattacgtgcggtgtaatcacgctctccgatagtaggaagagcaagaaggtggacctctcgggccagtacatggccgaagaaattgaggctcggtacactctgaaatctagaagcctcattccagacgagaaggaggacttgatcaacaccatcgagaccatgatagacgatgacatcgatgtgattctgacaactggcggaaccgggctggacagccgggacatcacagtggagaccgtggaaagcctattcgagaaaaagctggatgggtttggcgagatgttccgagccaagtcttatgatgagattggggctgcggcactgctttcacgcgccaccgccggaatctacaagaaaacagttatattttccatgccgggcagccccaacgcagtgaagactgccttcaacataatcattgatgaaatccctcacttcgtccatcacgtcaagaaatga

SEQ ID NO: 9099 - DNA, 339 bp, synthetic construct
  source 1..339: mol_type = other DNA
atgttcaataccgagctcatctcaaagatggggaagatcaaggacaagaagctttccaacctgctgatcggcagaaaaggcggagccaccacaattaagattaccgatcagatattgcaccaaccatccaatgcaaaccagctgtctaaacgcctgcacttagactacaagacaataacgtaccacctcaacatcatgatcgaccataagtatgtggaaaaagagaaaattactaacagctacatctattaccccagcaagaagctgtataactgcatcgaggaatatagtctaatcaggaattttctcaaaattgaatacgagcggtacaaaaaatga

SEQ ID NO: 9100 - DNA, 801 bp, synthetic construct
  source 1..801: mol_type = other DNA
atgaccaacatccagaccaagaaggagctgaatgaagagtacaaaaatgtgaaatacattctgacctccagtatgcgcactaaactgctcctggcgctttacgagcacagtaagaagttagaggagataagaaaggacctgaaaaaaccgtcagccactatcttgcatgggcttaaggagttggagaacaagaacttaattcggaaaattcagaagcactatgaactgacttcaaatggatacattctcacaacaaacatgataaagctgattgaaaattggtattctatcaataaaagcaagcaattttggaataagcacgatctgtcggacatccccaaggagatgctgaaagacatctatctgctgaaaaacgtagaatacgagaccagcacaacaagcgacctatccaacgccttcaacaaatatatcaaacttcttctcaaaagtacggagctaaaaatcattctcccaatctactctgaaaatcactttaagcacatgatagatttcctcaacaagcatgaacaggcaaagttggagctgatcgtcaatgagaagattctaaattccatcaaacagaacaagaacctcgaaaggaagcttctcgagaatgaaaaggtgatcgtgaaatgcatcgaacaggatctgaagctgttcctcacctgtagcgataacttcatgtccctgacgttgttcctgaacgatggccattacgacgactctcagatcctcatcggcaaggacaagaacgccataaagtgggctctgaacctgattcaatgctttagccacaactga

SEQ ID NO: 9101 - DNA, 792 bp, synthetic construct
  source 1..792: mol_type = other DNA
atggacattcacaatgaaattaacaacaatatcaaattccttgccaagtcagagattcgcctgaaaatcctgagcgagttgcagaacagccccaacagcgtccatggcctcgtgaagaagactaagataacatacagttctgtctccagcaacatcaacaagttggagcagaacaactacattaagaaaataaagtccaagtactacctaaacccgatgacgaaaatctatttccagacactgatggattttaaaaactcggtagagatcataactagctattccgagttttgggacaagcacaatctgaatcagatcaacatcgacagcttaaaaaatattacggatttgaaagattccaaactgattgaaaccaccccccttgacatctataaacctcacaacaccattaagagccaaataagtaacagcaagtcacttaaagccatattcccatacctccatccagaataccctcaactgatcgaaaacatcctgaaggacaatggacaggtggagctcattatccccaagagcatctccaatgcaatcacatcaaagattgatctgaagacccggaagactgccatcaaagagaagaagctgacaatttacccaattgaaaacaatctcaagatctatctaaccatctgcgataagagcatgagtttcgggctctttaaaaatgacgagagtttcgaccagaacaggatactgatctcggattccgagaaatcacaggcgtgggctgacaatctgtttaagaatatcaagtatgacgtgatcaaatga

SEQ ID NO: 9102 - DNA, 507 bp, synthetic construct
  source 1..507: mol_type = other DNA
atggaaatttgctacatcctggatgcctccgctttcatcaatgggtttaagctggactccaacaacaacttcacggtccccgaaatcactgccgagatcaaagacttcgaaagccggttgatgttcgacatggccatcgacgagtgtaaactgaccatccaggacgtgccaaataagtacacaaattgcgtgaacaagattatctccgagagcggggatatcctgaggctatcatttccggacaagaaactcatagcactcgcgtacatgttcagtaaggaggggagaaacgtaaaagtcatcagtgacgactataccattcagaatacacttaagattatgggtattccttacagcggcattataaccgagggcatcaaaggaatctacaactggaaaaaggtttgcgagggctgcaagaaggaatatgacgatgattatccctttgatgattgtgagatttgtggatcgaaaatatacaagaaacgcatcaaggtgagcaagtga

SEQ ID NO: 9103 - DNA, 1116 bp, synthetic construct
  source 1..1116: mol_type = other DNA
atgcgcattgggatcgttgtgcacggccccaacatcatcgattcaggctacgcgctcaagctcattgatctacttaagaactacggcaatattagcgtcagacttgggggcaccatgggccgcacagcggtgattgacgctagcttggagaatataattgacataactcgtaagctggtgcccagcgattccttaaagatcttctccgacgagggggtcgacttgatttttctcctcaactacggtaaatccaacgttaccggacaagttttcggctataaggtgtataaccattacgccgacaaggtaacagaaaataacgttccagtgattcagatcgagcgacctggtgaggaagacggtagcatcatcccatggaataatgatctggacattgtgcatgatctgtctaaaaagctgaacttggccattgtctatccaaatgaagtctatgagaaccacatcaaacaggacaacgctaatgttaatcagagaattgtccacggtgtaagtccggacgaaaatatcatggtgaatagtgtggtcatcggcaagactaactcggataaactgacacttatagcccgggacaaccacatcgtggatatcatcggaggggagctgaagcagcacggactggagaagctcggggaagtggacctggacagcgcaatcgtcaagaccggcctcctgagacatgcaaaagtaacccctcgggtgatttcaaccaacaagtccaacgattacaagattacgttcttagaccacgccggggaggacgtctacaaattccgcgattcatctctggtaattactgtgggggatgatacaaccctaattagctcggatatcctgtataggttcgatatacccgtcatcggaataacggatggagacctggacaaggtggtggaggatggattcaaggtgaaaaattccatcatcttcgaggtggagaggggctttgacgacgttgtgggacgggacatcaaaaggataatgtttgacggcgcccaggaaagctttaattacctgaacattgaggaggtgcgagacaaaatcatcgaaatcatcaacaacatcaactgcaagtacaaaataagttacatcgaatga

SEQ ID NO: 9104 - DNA, 975 bp, synthetic construct
  source 1..975: mol_type = other DNA
ctaaattttaaaaatctggtgaaggagatccaggagtttaagggcgtgtcccggaaaagtagcattaataacgtcattagcctgttagaggagtcatacaatgtgagcggtgatgttgtaatcgaaattggggatgacgcttccgccatcgacatcggaaataaccaggtcatgctcattgccgccgacggtatttggggcgacatcatgaacgtgaacccctattgggccggatactgcagcgttctggtgaacgtaaatgacattgcagcgatggggggcaagccactggcgatggtcaacataatgtccataagcaacgatgaaatttacgaggacctgttgaaaggcatcaaggacggatgtctcaagttcggggtgccaatggtgggtgggcatctgcaccccgatggggaggtagacagcttgggagtcgcgatagtcggaatcgctcagaaagataagatcataacaagttttggagccgaagtgggggacaaggtgatcgtcgcaatcgatctggacggcaaacctcacgagatgttcaatctcaactgggacacaacctacgacaaggacagccagcttgtgagggatcagattactgctgtgcaatacctcgccgaacacgactatatcaaatctggcaaggatatctccaaccctggaatcttgggcactctcgaaatgctacttgagacctcaaaaaagggcgctatcgtcaatctggaagatatcccgcgaaacgaaacgctggggtgggcagattggctccgctcatacccaggttccggctttgtgttcaccgcagatgaggacaaatgcgaatatattcgggagtatcttgccaagtattcgatcgaagccgccgttgtgggcgagataaccgacagcaatagtctgtacctgaactacgccgacgagcaagctgagattttcaaccaggataagaaccccgttttcatcttcagatga

SEQ ID NO: 9105 - DNA, 741 bp, synthetic construct
  source 1..741: mol_type = other DNA
atggccattactaaaaaacatgtcttctccttactcatcatcttgattatcgctcttggcactatctctatatctagtgcttacgtgggcaccgggttttcccatgatattcccacctcaaaatatcacgatctgtctgcctcagacattctgaacaagtataacacgacaaattgccacgtcgaagaaaacggcgtctgcacaaaagtggttgatggcgacaccatctaccttgataacgggaagaagattcggttcgtgggagtaaacaccccagaaaggggggtggaggggtacattacctcgaagaatttcgtgcagaagctatgcctcaacaagaaggtcgggctggatatcgacgacagcaaatttacggaccgatatggaagaactctggccgttgtgatcgtggacggaaagaatgtgaatgagatgctcctgaaggaaggtctggccgagatcatgtacatgccgccttccgagtttaatccattcgagtggggcaccaccaacacacatgtggacaccacacactcgagctcttccacaacgcataccagtacagagtccaccagcagtagcgatagcgcaaaatacatcggcaatgcaaacactggcaagttccacactgcgggttgtagcagtgtcaaccacatgtccgagcacaataaagtatttttctcaagccgcacggacgccataaaccagggatacacaccctgcgaaatatgtaacccctga

SEQ ID NO: 9106 - DNA, 1548 bp, synthetic construct
  source 1..1548: mol_type = other DNA
atgctgattaagattaacggcgaggagatggacgtggccgaggcttccacaatccaggacgtgatcgaggagaccaacgccccatatactcctggcagcattgtttgtctgataaaggggaagaaggaacttgagaagaatatcagtaagtataaaatccgaaccaacaagggcagcattgttatccaattggacgaatctgacgaagccaagcctcttgtggatatttggaagaatcagtatgatgaatttgtggacctcaacatccggtggtcgacgacaactgaggtggccattgggcctatcgtaaccgatctcgaaccaacttcagaggaatacaagtactacgagggagatgttgttttaagtttatcaagtttctccaacgagtcgacccatcttatattgctcaaagacaacaccactaatgtctatagtgtccccccattcaacaagggcatcttcgctcgcgtgatcggggggaagaaaacgctggataacctgactgacgacgacagcgtatcctccatcgagcccattatcgagcgcagcacaaccaaggatatcgtctcagtctctgacctcacgaccgtgcttgaagaaggcaacgaactctacacctacatgagcttcgacattgatgaggagtccccagtgtgcgtggagcacctctttgcactgataaaagatggcaagatgaaggtgagctacgaatccgaatcattcctgggtttctatgaactagccagcctggagaagcccaaggagcacgtgacaaagaggaatagaggaacaatcaccgtgcgcagcgacggcgtcggggtgggaaaactgttcatctaccgagagaacagagtgttgagccccaatcacaccaccgtgggaaatgtagtgaaggggatggagctgatcgatgccgcaaaagaaaacgaatttattacagtgaaagctgagcaaggcaggctgatgctcctgaacaaaacgcaggcggaggcgaccgaaatgctgtctgccgcaggtgtcgaacatatgatagatggactcgtggatgacaatgccatcatcgtggagcagacgccccagcacacaattgatatcctaaaagagggtaaagttatcactaaagctattaataaggacgacctatgcacaattaagttcaccgacaacgccccacggagcgtccggtactttaaactgctgtccggtctcctggagaatcctgtagggcagattaagatccacttcgcagtcccgggaatgcatatcgtcattttcgaaggggacaagaaagcagctaaagggttggtccctgagaataatcccgtggacaaagtcataaggggccagataggaattactaacatggcttcaaaaagtgcaggtctgatcggcatcagatttgaggataattctgactttggcccgaccgccgagacctttgatgcgacaaacataatcggagacatcacttcggactacgattaccttgagaacctgaaggaaggcgttgtggtgtatgttgccgaatctaacaacgagtcctga

SEQ ID NO: 9107 - DNA, 474 bp, synthetic construct
  source 1..474: mol_type = other DNA
atgctgccgaacctcaccatgtcccccaatttggggacagaggactgggaccctgatgtcatcactcgcatgatctttataggccccggcgcccacgtctcagaacagcaagtagtgaacgagtttcatatgcttggactcccactgacaatcaagaatacctgctatggctctatgatctccggaaagagtgaggatgtgtacaaagccattaaagagattcggaagctggaccctagccacattttcacgaaagagcgaggattcgcacctggcgatccccgccggtgcagaggtcatagattcgggccaagggaaggtttccaccagatggaaaaagagtacaagatactagggttcgtgagcgaggctctggagaaccccaaggaggtggaaattgaagagaagaaaccaatcgacgttgacgaatttaagaagatcatgaacaaatgtctggataagaagaataggtga

SEQ ID NO: 9108 - DNA, 456 bp, synthetic construct
  source 1..456: mol_type = other DNA
atggttaagatcgccctctaccctccaaactcattgattttagcagatctcctggagaggaaagggcacgtccctctggtccttcagaagcagattcgccaaaaaataaaggacccggagatcgattctcccccaatgaatattacggaagaagatcctctcaacgggctgaaatacgccgccatcgaagtgccgtccggagtgcgaggacggatgagcctaattggtcccctcatagatgaggccgaagcggctatcatagtggacggcgccccatacggcttcggatgcatcggctgtgcaagaacaaatgaactgagtatctttttgcttcggaacaagggcatccccgtgctggagctgaagtatcccgacaatcaggacgagacctatgtcatggtgaacgctatcaacgagttcgtagacagcctggaagagaccattggggaggagtga

SEQ ID NO: 9109 - DNA, 1242 bp, synthetic construct
  source 1..1242: mol_type = other DNA
atggtcaaaatcgccctggtgtcgtgcgggaccgaatatagtgggatacaaaaggaaattgaaaaggccgccaacaagtttggtgccgagatcatccttccggaaatcgacctggactacatcgatgagagctatgtcaaattcggattcagcgcgcaaagctcaagcctgaaactgatgatcgcacgcgcaatggctatcgtggaaggaagatgcaggcccgacgccgtcttcattgcaacgtgtttcaggtgtgcagaggcagcactagttaggaacgaggttagacgattcatacagaataatacacggattccagttgttacgtattcatttaccgaacggacaaaggccgacgaactgttcattcggatggaggccttggctaccaccgtcactcggagaaatatcctggcgcgggagaagcaagaggggctgactctgggcctggactcgggctccaccacaacaaaagcagtgctcatggaaaacaacaatgtgatagggaccgggtggacaagtacgaaggacatcatcgaaagcgcaaatatcgccgctgctgaggccttcgagggcactggctacacctgggatgatatcgatggtatcggaacgaccggttacgggcgctttacaatgggtgagaagttcggtgctgagcttgtccaggaagaattgagcgttaatgccaagggcgccgtctacctggccgactgccagaagggagaggctaccgtattagatattggcggcatggataacaaagtgatcaccgtgaacaacggcattcccgacaactttactatgggaggcatttgtgccggcgccagcggaaggtttctcgatatgacttcccgtcgactagacgtggatataaccgagttaggcccactcgctgtgcagggggactggagaaacgctatgctcaactcatactgtatcgtgtttggcatccaggacctggtgaccacactggcggcgggcgggtctaaggctgacgtggcggccgccgcctgccactccgtgtccgagcaggtgtatgagcagcagctccaggagatcgatattcgcgagcccttgatacaggtggggggaacaagtctcatttctggcctggtggaagccgtcagtgagactctgggaggaatcgacgtgattgtacctgagtactcccagcatattggggctgtaggctgcgcacttctcgtctccggtatgggacaccgccaggacgataaatga

SEQ ID NO: 9110 - DNA, 561 bp, synthetic construct
  source 1..561: mol_type = other DNA
atgctcgtggagtgctacgatgagaggggcgccgaggtctatgagatcatcattaaacagatcttccaggatctggtgctaggttccagcgttgatgacctgaaggcctacgtgaacccagacgacccggtctttgtgctggcgatcaaaatgcggaagaccagtaatgtgatcaagtttgaagacgtggctaatttaatgtacaacaaacagaacgacgttaccacaattttgattgataacgagaattaccttcccaatattctcaaggagctctggaagagattctcaagagacgaaatctatcaaccaaacaggtatcagctggagatcaaaggggatttcacggagctggggagcattgtggtagacgacccccacagcaaccttcgacgccgcatctacgacgcagtcttccggatactgcctgaaggattcaagatcattaaagatttgtccactgaagatatcgtgacagtagtcgcaaccgacgagctgatcaaggatgcctggattgaaaaggctctggaatttatagacgagctcaacaagggcatatga

SEQ ID NO: 9111 - DNA, 867 bp, synthetic construct
  source 1..867: mol_type = other DNA
atgaatgagcacaagggcagtcgcttcgctcatatcacacgcgcccacccatgttttaacgaaaagatgcacgacaaggtcggacgggcacacgtgccagttgcaccaaaatgcaacatcttttgtaacttctgcacccgggatatcaacaacgaagaagacaggcctggtgtgaccagctgcattatgcagcccgatgacgccatcaatcatattaacgatgtgaccgccgacggtcccatctcagttgtaggggtcgcggggcccggcgacagcctagccaatgacgagactttcgagttttttgagaagctggccaccgaacagcctgatctgattaaatgcatgtccacaaatgggctgttactgccaaaatacgcagatcgactcgccgagctgggcgtgaactccgtcacggtgacaataaatgcgattgatccggatatcgctgtagacatctattcgttcatcaagtacgaaggcaaagtctacaagggatatgaggctgtggagattctcatcaaaaaccagttggaaggggtggagaaggccgcagccaatgggctggtagtgaaggtcaattccgtgctgatacccggagtcaacgacgagcacatagttgaaattgcccgtgaggtggagaagcggggcgcagctctcatgaacatcctgcccctcatcccgcttggaaaaatgaaacacttgcaaaggcctgactgctctatgatggagaaggtcagagaggaggtggaagagattatacctgtgttcagggcctgtacgcagtgtagagcggacgcttatggaatcccaggcaagaagagcgaagaccatcaccttggcatgactccccagagtcattactga

SEQ ID NO: 9112 - DNA, 921 bp, synthetic construct
  source 1..921: mol_type = other DNA
atggtcaagacgtacgtgtttggacacaagagcccggactccgatagcatcactagcagtctggtcatgaccaaccttgagaaggagctcgggaatacagaagttcaagcgtataggctcggaaacatcaacaaagaaacagagttcatcctgaactacctggatattgacgcgcctgagctgctggagaatatcgaagatgacgctaacgtgatcttagtcgatcataactccccttccgaatctgtggagaacctagaaaatgccaacatcctgaaggttgttgaccaccacaaactggctctcaaaactagctatcccttgttcctgcggtttgaaccagtgggctgcaccgagactattttatgtaagttgtacgaagagaacaacgtggagatcacaaaggaaatggccaccctgatgctgtcggccattatctctgacacgctactcctgaagtcccccaccacgaccgaggacgataaaaaagctgtgacaaaactttctaagatagccgagatcgatgtcgaagagtacgggctgaaaatgctgaaagccggcaccgacttgagcagtttctccattgaggagatcctagcccttgacgcaaagcagatagactttaagaacgtaaagtcgatcgtaaatcaggtaaatacagctagtattcccgacgttctcgagatgaaggatgaactcgaggagggtatgaataaaatcattgagaaggagaaccttgatttgttcatgctgctcataaccgacatcgtcaatagcaattcacaggtcattgcactcggcaaaaatgccgatctggtggaaaagtcatatgacattaaactggaggacaacatggtgctgctcgaaggggtggtgtcacgcaagaagcaggtggtgccaataatgactgaaaacgcatga

SEQ ID NO: 9113 - DNA, 930 bp, synthetic construct
  source 1..930: mol_type = other DNA
atgaaaacactggaatgggaggataacaagctcaagctgatagatcaaacaaagctgcctgacgagctcacctatgtgtactgcgaaaactaccaggacgtgataatagccattaaggacatgatcgttcggggcgccccagctataggggtgtcagctgcgttcggaatggcactcgccgatattgagggtgtggacttaaataaagccgctctcgaaatcaagaccgcccgcccaactgcggtcaacctattctgggcagtggacagagtgctcaactcggacgatgccctgaccgaagcactgcgcatgtatgaagaggacatggccacaaacagggctattggaaaattcggctctgagatcatcgacgatggggataccgtgttgacgcactgtaatgctggggctcttgcatgtgtggactacggcacagcactgggagtattcagagcggcccacgagcagggaaaaaacattaatgtcatctgcgacgagacccggcctcggggacagggggcaagcctgagtgtctgggaaatgcagcaagagaacattcctgtcaagctgattcccgacgtggcgtccggctttctgatgtcccagggaaaaatagacaaggtggtcattggcgccgataggattgctcgcggcggtgttgtcaacaaagttggcagctttatggtggcccttgctgccaagcaccatgacatccccttctacgtagccgccccatacagcacctttgacaacgatattagcatctttgacactgtgatcgaggaaagggatggtgatgaggttcgttactatgggggggcacgaatttgccccaagaataccgaggtaatcaatcccgccttcgatatcactccgaaagagttgatcacgggcatcatcacggaaaagggcatcatcgacccgatctga

SEQ ID NO: 9114 - DNA, 447 bp, synthetic construct
  source 1..447: mol_type = other DNA
atgaacaagaaaatcgtaatactagtcattgtggtaatcattgctgtgctgctcttattcctggtttacgccaacaatgactcatcaagtaatagcaacaggacgatcctcaatgtgagttccgagggtcccatcgagcttagcaaaatcaccgacgacatcaaaaacaattcctactacgagggatatgacgtcgaaaccctgcgctggatggaatcgctgggggacaagtatgttttcaagagcaacgatgaaattgtcatcatggacaagtgggacgcagacaaaattccatccgcctatgtgtgtgatgcgtacttccgggagatatttagctgcaacgtgttggagaacagaacactgggcgatggcaatcacttcaaggatgtcctctttatcaagaacgtggaatttatcgatgaggaggtgcattacatacagatttga

SEQ ID NO: 9115 - DNA, 999 bp, synthetic construct
  source 1..999: mol_type = other DNA
atgaagtgtgtcaaggttcccctgaggcaactgaatgacactcgcataaagctgatggagaacggtctgatgaacatggagtataaaatcaagaccgatgataagtgggggtacatcccagtaaatgaatatgtgaacgattatgaaatcgtggatgtagaactcgaagctatgaaaaagttcccacataactttgcggaactcctcaaagacgagcttagcagcgaagaaattgagaatcttaggacaagctttgacacaattggcgacattgtcatcctagagatccctgaaaacctgcaggataagaaacagataatcggcgatgccgcccttgagtttacaaagagaagatcaatttacatgaagaagagcgccgtgaaaggaactacacgggtccgggacctggaatttctgagcggggtggacgataccgtgaccattcacaaggaacatagcgctcgcctgaaattagacgtgcgcgaggtgtacttcagcccccgactggcaacggagagaaaacgagtgatggagagtgtcgaggatggtgagaagatcctcgatatgttttgtggaatcggacccttcccaatagtcatcgcacacaataagaacgtggatatcgtggccgttgacattaataagtcggccatcaaatacttggacgagaacatcaagctcaataagttgaaggggaatgtaaaaacttattgcggggatatcaggcaggtgagtgacgatttcaacctgaaattcgaccgcataattatgaacttgcctggcctggcttacacgttcctcgacgtcgcagttgacctgattgaggacgggggcatcatcaattactatgagttctccgactcatacgaccggggcgtgaagcggctaaccgacgcctgcagtgcggttggcaaaaaggtcgacataattaactgccgtaaggtgaaatccacctccccgggcgagtggcacatctccattgatggaaaaatcaactga

SEQ ID NO: 9116 - DNA, 792 bp, synthetic construct
  source 1..792: mol_type = other DNA
atgttttacctcgtggggcttggactcttcgacgaaaaggatatctccctcaagggcctggaatgcttgagaaacgttgataagatatacgccgaatttttcacctcccgcctgttcggcagcaacttcaacgcgattgaagagctggtcggccagaaaatcgagatcttagttcgaggagaggtggaggaggagagtaagttcatcgaggaggccaagacacaggacgtggctttgatcatggggggcgaccccctcatagcaactacccacagtgattttctggtgcagtgcagcaaaaaagggattgactacgaggtaattcacggctcatccatcctgtctagcgcaccagccatatcaggtctccaaggatataagttcggtaaggtcaccacaattccgtttccagactacaatttttatcccaaatcgccttatgaggctatcgaggaaaacctaaaaatggacctgcacacactcgtgctccttgacatccaggctcataaggaccggtatatgacggtgaaccagggtctggagtacctgatgaatattcatgatacgttggacagggacgggctgattaatgaaaatactcttgccgtgggcatcgcccgggtcggcagcaaagatgtgtgtgttaaagcgggaaccataaacgagttaattgatttcgacttcgggggccccctgcactgcatcgtaatccctagcaagctgcacattgtcgaagccgaatacctagtggaaatcgccggagcaaactctaagctgctggatatcgtctga

SEQ ID NO: 9117 - DNA, 516 bp, synthetic construct
  source 1..516: mol_type = other DNA
atgtgcagcatctacaatatttataactgtctgtacaaactctacctgatgaagttcgagaagaccatgggcttttatgactcaaataggatgggagacatcctattcatcttccacaagaatcacaagaagtacctgaacgacgagcttagcaagtacaacatgtcgctgatacatgccctttgcattatcatgattcatgaatccgacgaactcaatcagaaggacctctccgatgggttgcacctcacaaaaagtgcaatcaccaaagctgtgaagaaactggaggacgagggttggattttgcgcgaaagaagcattgaagataagcgacacttcatcctgaagctgacggacaaaggcaacgatttcatacccatcatgaacgacatcaacaagaaatgggagtctgagatggggttatatgagctcgatccaaactttatgcagatatttaacgaactgactcaccgggccatcaatctaaacctgaagaaagagatgaaaaaggattga

SEQ ID NO: 9118 - DNA, 936 bp, synthetic construct
  source 1..936: mol_type = other DNA
atgagcataaaaaaggtcgtggtcgccggcggcggcgtactcggtagccagattgctctgcagaccgcatactgtgggtttgatgtgacaatctggctgcggagtgaaggatcgatcgaacgcgctcagccaaaactggaacgatttaagaacatctatgttgacactctggagaagatgaagacagatgcctccgcatactgcagaggtttgtctaaaaaggctgatctgagttctgaagagctcgatgccctaaaggagcaagcgcaaaacgcgtacgattccctgaagctcaccacgagctacgaagaggccgcaaaggacgcggacttaatcatagaggcgatctccgagaaccccgagcagaaaattgccttctaccaggagttagccaaacatatggaagacaaaaccatactggtcaccaatagttcaacattgctccccagcatgttcgctgagtatactggcaggcctgagaaatatctgagcttgcacttcgccaacaccatctgggctaataataccgccgaggtgatgggacaccccggcaccgagcagaagtactacgacgaagttgtcaagtttgctgaggatattaacatgattcctctcaaacttaaaaaggaacagccagggtatatcctgaactcacttctggtgccattcctaaacgccgggcaggcactccttgcaaatgacgtggccgatcatgagacaatcgacaaaacgtggatactggccacagggtctccggccggacccttccacattctcgacatcgtgggcctggagactgcctacaacattgtgatcatgaatcctgaatccaaggacccggagactacccccgggaagatcgccaagatgctgaaggaaaaaatcgacgcaggagagacgggtattaacgctggaaagggcttttatgaatactga

SEQ ID NO: 9119 - DNA, 525 bp, synthetic construct
  source 1..525: mol_type = other DNA
atggtcaggcctcggcgcatgagaagagtggtggaatgtcacaagtacaatcttaatgaaaaccgaaagccaatcgagctgagcgtcgacgaatttgaggccattaggttcaaagattatcgcaacataaaacaaattgacgccgcggaatttatgggcatttcgcagtccaccttccataggattctcaactctgcacgccacaaattggctatctccctcatcgaggggcgccggatcgtggtggtgcggggagacacaatgatcgatcagaacaaatacctgtgcaacgactgtggattccagtggtcaaaccctgagaagacgtacgagaagtgcccagattgcgggagcaagaatatccagcgactaaatagagacaagctgaggggcagtagccccgataagtgtcgttgccccgagtgcgggtatgaagagcccaaggtaaagggtgttccgtgccggaccaaaatctgcccagagtgtggctccagtctgcagggcagaggaatgtgtcggatatga

SEQ ID NO: 9120 - DNA, 285 bp, synthetic construct
  source 1..285: mol_type = other DNA
atgaacgacaatctgaagtacaactgtaacgagtgcggcttcacgtggatcaccctcaacggccagcattccatctgtcctaagtgtcacagcgagaaaattgaatatctgggtgaagtggaggacctggatataaactcaatcctagagcacaacaagagacgcgggggatgctgcgggagtgcccgggggaaaggaccactcacatgcggcaagccctaccccgaccaccatgatcccaatattccgcacgacccaagcaggtgttgcggccacaatgaatga

SEQ ID NO: 9121 - DNA, 231 bp, synthetic construct
  source 1..231: mol_type = other DNA
atgaaccatgtcaagaccgtaaagaacgaaacaaatgtggcacagcctcacaagcacacagaaccaagccagaacaccgatcataagatgcaaaaagccatgaaccagaagatggagaaaaacaggaatataaaggacgaatacactaaaagatccagcgtggaggagcccatcctggagaatatcaagcgaacgattccgaaccggaaacgctcaagtcaccggaaatga

SEQ ID NO: 9122 - DNA, 918 bp, synthetic construct
  source 1..918: mol_type = other DNA
atggataacgaggagcttcggactgtgagagtttacacaaagaagtataccagtaaagacaaggagggaaacatcgtggagaaagagtctcaacagaagcaggtcagcctgaagaaagaagatcccttcgaagacaatgatttggtaaaggtcttggccaaaagggagtacgagtcactcctggacaaccaattctctgatagcaagctcgatgagttctacaataggctcgaggcaaaggacgctgagatcgagaagttaaacagtcagattcagacactcaagggctcgtttttcgacgacgtcaatagtctgaaggaacagctcacttataaggatgaactactgaacgccaaagatgagatccataaactgaataagaagataactaagatcgacgacgaacgtgtggccatctttaaggagctggattacaagaacaagatgatcctggcctacaatgtcgagctcaataagtctatcctgaatgcgataaacgtggtgatcgatgaggcacgcgacaacattaaccgcagaaacgcacagctggtggaggacttggaaaaaagcattgaaaaatccaagcacgacgtgaatgagaagaacaaagccatagcctacgagatcaagagcacggttgaggacatgaacgaacagattcggaacaccagcacccttaaaatgatcctgaacaaaaagcggattaatttacgagtgcccaccgatgacctgcttaaaccatttgacttcgactttgatgtggagcaactgctgtccggccaggctctggaacttgacgctgcggagattctaaaagaggtcatgccgaagctccccgaaccattctccaaatatatcgatacgatcgaagaagaacctgaaaccattgaggtatcctcaacaaaacagggggaatga

SEQ ID NO: 9123 - DNA, 417 bp, synthetic construct
  source 1..417: mol_type = other DNA
atgagaaccttcaatgcgggaaagatcacttttgaatacccggataactgggaggtggaaaaagccgacatcttgagcaacccagattgcattgccaccctgtccaaagggcaggataatctgttcaatgcagtgagttttcccacggctacaaacctcgacgactataagattttcatggaggatgtaatctcggacgacggcggtgtgatcctgagctccgatttcgtgcagatcgcagataagaacgctatcaaagttcacgccaacatggacacccctgaaatcaacttcgacatccatacttacgtctttatagagaacagggagatttacattttcgagctccggacacttgacgtcagtggcgagagcgagcgcgaatttaagaatatgataagctcactacgattctga

SEQ ID NO: 9124 - DNA, 744 bp, synthetic construct
  source 1..744: mol_type = other DNA
atgatcaagaagttcgaaatcaagagccatgatggccctggacggatcggaaaggtggacggtgaactgaccccccggatattttttaaggaggagctgaaaatcgctccaaaccagggtagcgcccacaatatcgaccgcgaaatcgccgagtttaacgtaaaagaaacactgaaactcgctaaagagaacgcggaaacctgtaacatcgccgtgattcaggggtcgaagtacattgacctgcgaattgaatgcctcaaaaagctggaggagatcggctacaatggatttataatagcgaacggggatgcactgctaactaattcaagggagctggtggatattatcatctcccttaagaaggaagctaaaaagacaagttatttcatatttccattcgccgagctgtccttcatgccgctcctaacatatatggggatcgatggcttcttagccgacagcgcaaattattacagctacatgaatgtgctgcagacgcccactaaaagctacgacttgaacaattaccctatttatgagaatattagtcagaaggacctggagaaaaagaacctcgagaacatgaagttcgtcatcaaagagattcacgtccacatgaagaacaaatcccttagaaacctggttgaagaacgcagcggcaccaccccccaaaacatctcaaccttgaagattcttgacaagaatcatatgaactacttgctcgagtatacgcagatcttctga

SEQ ID NO: 9125 - DNA, 951 bp, synthetic construct
  source 1..951: mol_type = other DNA
atgattgtccgaggggtgttcttgatgtcgataataaatcggcttaaatccctatttaaaggcgacatcgataaggaggaaactgacatcaacaacgatgtgagcaacacatctgacgacgtcgaagtcacatctagcaagatggaggaatccatcagtcccgaaatggaggacagtaagaaggacctgactttcaagaaggacatcgagatcgtggaggactcatccgagattgcggaggaggttgaggccttcgaaaagacaatcccggaggagcaagagatcgtggccgaggaagccaagacaatagaagatgaggagaagacaaccgatgaagacgtggttgaggaagttgaggagaacagcaatgacaaagacaaaaagagagatacgatgacgctgctgaccgataaggaactgctaaacgatacgaaccgcgatccagattttactgctgagttcatcgacgctggaattgaaacagtaaagcactgtttccagtgcgggacctgcagcggttcatgcccatccggaagaaggacgccttacaaagtcaggcagattgtccgcaagtgtctgctcgggctgaaagaggaggtgatcgccgacgatgctctgtggatgtgcactacctgctacacctgtcaggagcggtgtctcaggagtgtgaaaatcgtggagatcatcaagaaggcccgtaacatcgcagctcatgcaggctacatggccaagagccacaaaatgaccggcgtctatgtactgaataccgggcatgccgtgcctattaatgacaagataaaagcgttacgggtgaaaattggccttcccgaagtgcccccaacaacccacacttatcccgaagcactcgaggaggtaaagaaattgtgcaagattaccgcctttgacgaactcattggttacgatgaagcaaccggcggactgaaagaatga

SEQ ID NO: 9126 - DNA, 888 bp, synthetic construct
  source 1..888: mol_type = other DNA
atggagatagcatacttcctagggtgcataatgaacaaccgctatcctggtgttgagaaagccacccggaaactctttgaagccctggatattgagctgaaagacatggaaggcgctagctgttgtccggcccccggagtattcggttcgttcgatgaggagacgtgggccaccgtcgccgcaaggaacctaaccctggctgaggatatgggtgtcgacatagtgacagaatgcaatggatgcttcgggtcactctttgaatgtaatcatatcttgaaggaggacgaggataagaaggctaagatcaatgccaacctggcggaaatcggcagggaatacaagggaactacgaacgtgaagcatatcgctcaggtgttgcgagacgatgtggggtttgagaaacttgcttcccttattgagaaacccctggacctgaacgtggctgtgcactatggatgccacttcttaaagccaaccgagactattggcatcgaagaccaggctgagaacccaagcatcctcgacgatcttgtcgagattactggcgcaaagagtgtggactacaaggacaaaatgatgtgctgcggggcaggcgggggcctgcgctcccgggacctcgatgtgacagccagttacaccaaggaaaagctggaacacatgtctgaggccggggtggacgccatcgtgaatgtctgtcccttctgccacatgcagttcgaccagggccaagttgaagttaatgaaagatacggaaccgactttgcaatccctgtattccacctggcccagctctatggcctcgccattggactgccagtggaggatttgacatttgacgcgcaaaaaatcgatgccacaagcgcggtcaaaaaggcactgggcgagtga

SEQ ID NO: 9127 - DNA, 267 bp, synthetic construct
  source 1..267: mol_type = other DNA
atgttcgtggccacattggacggaatcttcaaatacagcgacctgccagaagagtacgaaccctacgtccagtttaaggccactatagataagcgggagctaaagccgaccgacgaaatggcgatcctcaacattgctggcacgagcacacaccatgtgcttttcctggatgcctattccagtatcgcagagatcgaggccgaactgaaagaggcagacgctaagattaatcacaccaccctcaaaatcattgggggccacctgtga

SEQ ID NO: 9128 - DNA, 528 bp, synthetic construct
  source 1..528: mol_type = other DNA
atgagcctgccatctgagcagaactggctagtacttcagaatctcataatcgaccttacaaaaaaggggtacgaaatacccaacggaattaaccctgagatgggcctgatccggtcctcaatcagcagctacaagcgcgatccttcccatcccgagttgatcaacggcctggcaaaggcggaaatggccttgaataatatccagggaaccctgctgacgattgccgaagaagaaggggagaattatgtggattactggctcgatctacttaaacaggtcatgaaaggggaggaactgttcgaatttgccaagagtaggagcaagttcttggttaacacaccaccgggtttaaccaccggcaaaattaacctcaaggtgcccctggctgaggagagagtccaagaaattgcagagtggaacggcctgatcatcgagtttgaggatgacatgactgtgcaactccacggcgaccaggaggacctcaaaactggtctgaaggagatgggatcgttcttcctggacgactga

SEQ ID NO: 9129 - DNA, 690 bp, synthetic construct
  source 1..690: mol_type = other DNA
atgacaaagatcctcgcaatcagtgacattcacggcgaagagaacgagaatctctacacttacctgggcaataacgatatcgatctcgtgctgattctgggcgacatcactgacttcgggcccttggactttgtagagacatttattaacaagctgtatgaatatgacgtggacgtgatcgcgatccccggaaactgtgatccacaggggatatgcaacgcaattaacgatgtcgcattctgcctccacaacaatatcgtggcctacggggacgccattctgttcgggtacggcggaagcaatccaaccccattcaacacgcccggcgagacagacgatgatcacatctataagtcagtgtacgatttattggccaattatgactatgtctacaataccgaggtgccgaaagtcaaaatccttgccacccatgcccctcctttcaatactgacgctgaccgggtttccaacggcgagcacgtaggctcgtcaggaatccagaagagcattcacgagtttgaacccgaaatcaacgtgtgcgggcatatacatgaggcgaaaagtctatccaagatcggaaccaccacggacgttgccaaccctggaatgcttaaggataatggtgctgtcctgatcgacattaaagatggttccaactacgacataagcatagtgagcctggatgaatga

SEQ ID NO: 9130 - DNA, 903 bp, synthetic construct
  source 1..903: mol_type = other DNA
atgatctgggtgacttccaatgtggatggcgaggagtacaaagagccattctccaagggaattatgagccgttcactcaatatctcttacattggctctaaaagagcatacgaactcgcctccgagatcgaggaggaactcatcaaaaaggacatgagcgtgattagccgggatgagctggccgacattgtcctgaaccatctgatcacggtagaccccaagatcgccgaaaaatataaaagcctacgacttctgaggaactctaaaaagccgctgattatactgatcggaggctcctcgggggtcgggacctctagcatggcgttcgaactggctaatagattaaggctcaagaacatcataagtaccgacatgattcgggaagtaatgcggaagattgtgtcaaaagatttgagccccgtcatccacaagtcctcatatgatgcttacgaaagtatacgaaccccatcgctgaagatggacaagattgttgaaggttttatcacccatgcggacgtggtgaatgtgggaatcgaggccatcatcgaaaggagcattaaggaaggcatctccatcattatagagggcgtccacgtcgtgcccgggttcatcagtaaagacctgatggagaacaacaacattatcatgtttacactaatgatagacgacgaggagctgcacaagcagcggttctacctcagatgcagtcaaccttgggtgaaacgctctcttgagaactatatggagaacttcgaatcaatccgcaagactcaggattttttcgttgagcaggcaaagatttacgacagccacataatcaataacatcgagattaatgaaacaatcaatcagatggtttccgccatcttggagaagtttgtcggtgtgaacgatgtgcgctga

SEQ ID NO: 9131 - DNA, 387 bp, synthetic construct
  source 1..387: mol_type = other DNA
atgctggacaagaaggtcaaggagatcatgacatctgatgtcctaaccaccacgtcagacgtggacgtggtcttcgcatttgagaaactgatggagaacaaaatttccagcctgcccgtggtggaagacgacgagcttattggcatcattaccgccactgacgttgggcacaatctcattctggataaatacgaactcggcacaagcgtgaaggaaatcatgataactcctgtggtgacagtgagtccagacagcaccatcgaagaggcggtttgcataatgaaggataacgtctcgagcgggatactgaatcagctcccggtggtagagaacggaaaattggtaggaatcatttccgatggcgatatcatccaggagatcttctga

SEQ ID NO: 9132 - DNA, 909 bp, synthetic construct
  source 1..909: mol_type = other DNA
atggatgagctgcgcaacaagggtgggaagaaggcggtgactgttgcaataatcgccaatacttttctgaccgtgtttaacatcattgtgggaatgctgtctggcagttatgccctgatcagcgaaggcgggcatactctgagcgatatcaccacaacaatcattgcctatattggcttcaagatcggtcagaagcccgcagacaaggaacaccccctaggccacggacgggccgaggccatcagtggactgataatcatgctcttcctgaccatggtcgcttacgaaattatgtccggcgctattgaaaaattattcaacccctccacaatcaccacccccgacatttacgcggcagtgatggctatcttcggaatatttatcaactacataatctcggagtacattattagactgggtaaacagatcaacagcccggccatcgtggctgacggaaagcatcagaagacggacatcttttcctcaattgcaatcctcattggcgtacttgtgagcaacatagggtaccctatcctcgatccaatcattgggttgattatcggattcctcatcctcaaaaccgcctacggcatcgggaaggagaatcttgacaacattatgggtaagattccatctgagaaattcgttaatgagatcaggaaaatagccaacgagagtagcgattatgccaacaacgcgcataatatcaaagtagactacctagggtcctatgctgcagtgacactgcacatcgaaatcgatggcaacatgacgctgaatgagtcacacaaaattgtgcatattgtccagaacaatatcatcgaacgaatacctgacgtcaaatatgtgaacgtccacgcctgcccaaagggcttggactacaatcacaatcaagagatagataagtga

SEQ ID NO: 9133 - DNA, 1122 bp, synthetic construct
  source 1..1122: mol_type = other DNA
atgatcaatccggcaagcaggaccaagagcatcgagctgagcctcataagaaaaatgtttgaagtgaccaaccccaatgctataaatctgggcatcggcgaaccggacttcgacgttcccgagaacatcaagaatgctatgaagagaagcattgatgagaacgacactcactacacacccaacaaggggtatattgaactcagggaggaaattagcaagaaattcaagaaggagaatgacataaacacaaatcctgatgatattatcgtgacggtcggggccagtgaaggcctgtatatgtgcacccaggccttcgtggagaagggagatgaggtcctcctgcccaaccctagctttctctcgtacgaatcatgcatcaagctagctgacgggaacatcgtgccagtggattgtaagatggagaacgagtttaagctgaaggccgaagatgtgcaggagaagataagcaacaaaacaaaggcaataattcttaacagtccatctaacccaaccggtgcggtgatggagaaagaagacatcaaagctatcgcagacttatccatcgatgaaaatttccttattatctccgacgagatatacgagaagattatctacgggaaaaaaaactactcccctgcaaaatacagtgacaatgttattactctgaatggcttctcaaagacatatgccatgaccggcctgcgcatcggttatctggcgacgactaacgaaaactacaccgagcagttgctgaaaattcaccagtacaacatcgcctgcgccaataccactgcacaaaggggagcctatgaggcattgaccggccctcaggatgaggtggagaaaatggttttcgaatttcaaaagcgacgggatctgattatccgccggctcaacgagatggaatacgaaacggtaaacgccgagggtgctttttatgtatttcccaaaatcgaggacgaggacttcgtcatgaaggccgctgacgccggagtcatcacagtgccagggatcgcgttcggaacaaatggcaaaaatcatgtgcgtatgtcttacgccaattcctatgaaaacattgagaaggccatgaacatcctagaagagcgggtcgtgaacggatga

SEQ ID NO: 9134 - DNA, 1551 bp, synthetic construct
  source 1..1551: mol_type = other DNA
atgctctacgagaagaacatcttccagaaaaacatcaaaaacatgaacattcacatgggcctggcctatcccaatatctataggacggccatgtcttccctgggatataacattctgtacaataagattaacgaacgggaaaacacttggtgtgagcggatcatcttccccaataccaacagcatcgagtcaaacacccccagcaagtattttaatattataagcttcaccgtccaattcgaagaggactactttaatgttctgaagatgctcaaggacgccgaaatccccctcaaacgtgaggacagaagtgagagcgatcctctcattatcgccggagggccctgtgtgaccgcgaacccgatgcctctttacgattacattgatatctttgtcatcggtgagggcgaatttgtgattgatgaaatcctgaacacctacaagaagcatggaaaaaacttggaaaaatatcttgggctgcttggcgtgtacatcccaaagtacaacaacaggacaaagataaacatcatcccaaacatggacaacacttaccacatcacagaacatattgtgagtaagagtgatgacgagaattaccagaccattttcaataacaccataatgctgaatgtgtcccgcggctgcacacgcgggtgcagattttgcatgtcaggctacttatacaggcccatgcgggaaaccaagtataaaaagctcatcgacatagctattaaaaatcgggaaaacacgggcttgaacaaaattacactgataggggctgccgtgtcagattattcggacctgaagaatcttattgatggtctggagaaagagggcttccagatctccaccccgtccctccggatcgagagcataaccaaggagactttagagtcgttaaagagaagcggactgaaaacgatcacgcttgcactggagtcaacggagaagttgcgaaaagtgatcaataaggagatactggaggaaaagatcttcacagtaataaaaaacgctatcgaactcgacttcaagatcaaactatattttctgatcggaatccctggggaaactatggaagacattgaggagctgtgccagtacatgaagaagattgcaaacatgcacaaaagtatcaaaaacgtcaagttctccgtaaatccactgattccaaagccacacacacctttgcagtgggagccttacgacttcaaggacattaagaagaaaactcgatatatcaataaagaaatgaggaaatacaatgtgaagtgtgaaagccctaagaagggtctgatccaatatatactgtcttgtggaaatcgcagcatcggggcgatcattgagaagactctcacaaagaatccgacactgaaagagtggaaggagctactaccaaaatatgacattgatgatgttctgccctgggacaatattgacgtcggcgtgaataagagatttttgaaaatcgagaacaagcgcctccgatccctcaaacagaccccctggtgtgagaccaacccctgctacaactgcggctcttgcgagaagtga

SEQ ID NO: 9135 - DNA, 2877 bp, synthetic construct
  source 1..2877: mol_type = other DNA
atgttcttcctggtcttgggggtcgtgggtgccacagagtttaataacgcctccaatacagaggactcaaacctgatgactgacaacgttgacagcctgagcgtggaaaataaactagaggttagcaacgaggatagcatctcagaggctaatctagtgaactctcacgacgataacttgaacaactattctgacagtgatgttctgagcaactacgaggacgattacggcaacgtgcaggccagcaattacgctgaaatagggaataccaactctgttcggagcgatgtgttgagcgttagcaatgacgataacctggccgctagttctaaggtatccgccaaggttgacgtcgtggacacacattactccaaatccgctacatatttcaaagtgactttgaaggacactaagggtaattctatcagcaatcagaaaatcagcttcaaggtgaacggcgtgacttacacggctactaccgacaagaatgggatcgcaagcgtgaagaccgccgctctctctgtcggaacatacactgtggcaatcaagtacgctggcagttccaaatatgccgcggtcgccctctcaaagaaggtgaaagtcctctcatcggtgagtggaagcgatatcaccaaatattatggccctgtggtccagtactcagtcaaattctggaagaattacaacgcccttgcaaatactaaggtatcctttaaggttaatgggataacctataccaaaaccactgacaaaaatggagtcgccaagctgcccgttaatctcgcccctggaaagtatgtgattaccacaatcaacccctacagcggcgaaaaactgtccaacaagtgtatctccctgcgagacggcacaacccttacccacggctcaacgaatacatacattactcccaataagaagcactcatttaccgtcaccctgaagtccaaacacgggatcttaatcaagaacaaaaacgtcgtatttaaatataacaacaaaaaggtaaccgtgaagactaactcgaatgggaaggcgacgctgtccattcctgcccttagcaagggtacgtactatatcagttatagctacagcggagacaaatattacagcgggtcctccggatctggcaaattgtacgtcaagaatccaacgacgaagatcacatcttccaagctgaagatgcaatataaggacggctctaagttcgcggtgaagctcacaaagaatggcaaagtgctggcgaacaaaaaagtgaagctgacctttaacggcaagacgtataccgagaaaaccaacagcaaggggatcgcctatctcaccgtccctacagtaaagccagccacctacaacattaaataccagtatctgactccaagctatttcaattattgttacggcagcaacaagatcgttgtgtcgaagcagaccgccaaggtcagcgccggggacttggtgatgaactataaggatggcagcgtttacaaggtggtggtcaagaacaaattcggaaaccctcttaagaatatcaaagtcaaatttacaataaacggaaagacctacactaagactacggactccaatggagtggctaagcagtcgattggcttaaatattgggtactacagcgtgaagacagtactgtcgaacaactactacgcccatggcgccatatataaacacatttccgtgaagggcacgaagttcgtcggcggaaacatccatgtcgccgtaggtaagacggcatactattccgtcaagctcttggattataagaacaacccgattaagagtaccgaagtgacctttattctggacggtaaaaaatacacagccacaaccagttcaaaaggtgtggctaaagtaaatcttggggtgctctctgcaggtacccataatgtgaagtattcccaaggagagtacagcgggtcctccaacatatacgtagctgataaagtgaccatcaagcagattattgcggcaagcggcaacgtgcagaagtatatccagaagaaccacagactgccatccacagtgaacattgggggtgtgacatattcaaccaaccagtatctgtacctggtgtcaaaagctatcgtcaacctgaaatctaatgttaaaagcgcaatctacgtcaagaacgtcgacggcccaagtaatcccagcagcacctacgctgccgggaatctttacgactacctgtcagttgcaaatagtgttgtgaagaactctgattcaaaaggtagtgtaccgaataccgttagttcgaaagtgggaacgatcggctataaaagtctcgtgtacgcgtttgcgcgggtggtggccttctacggcgatgacgatcgcctcccctcatttgtggaaataaagtccctaagtggcacctcctccgatagtaatattaactccaaaaatactatctcaaacttaaaggcctacctggcagcctcaactaattgccaggtgaacaacgctaagatcaagcaactagtgggcaaattaactaatgggctcaagagcgagaaaagcaaagccaccgcaatttacaactacgtgcgtgatacaatttcctacagcttctactatgataccaaacacggcgcggttggcacactgaacgccaagtcgggaaattgcgtggaccattcccacctgctggccgctatgttcaggacggccggtcttgcaaccagatacgtgcacgggagctgcacattctctagtggaagtacatatgggcacgtgtggactcaggtcctcatcgacaacacttggaccgtcgctgatgcaacaagctctcgcaactcgctgggaaaaatagcaaactggaataccaagtcttacaggctcaacggatactattccagtctgcccttctga

SEQ ID NO: 9136 - DNA, 459 bp, synthetic construct
  source 1..459: mol_type = other DNA
atgaatagtaagaaatattccaaagtggctgtcgggggcaccttcgataagtttcatgatgggcacaagaagctgctcacaaccgccttcgaactgggtaaccagatcgaaatcggtgtgaccagcgacgcattcggcgggttgaaaggagacatcgacccatgcaaagagcgaatgagcaacctaaaggcgttctttagcgacaagtcagattttgttgtcattcctctgaatgacccctacggaactacaatttacgatgaggactttgacgccatagtggtgagtgaagagacggagccaactgcagttgaaatcaacgagatccgcatctctaagggcatgaaaccgcttgacattgtcgtagtctccttcgtgctcgcctacgatggaaatcccatatcgtccaccaggatcagacggggcgagattaaccagaagggcaacgtggtggagtga

SEQ ID NO: 9137 - DNA, 192 bp, synthetic construct
  source 1..192: mol_type = other DNA
atggccgtaaagatcgattccgacctctgcggccacatcaaggactgccccgtccaggggctgtgcattaaactgtgcgagcagggcgcaatcatcgagaaggatggagacgtgagcattatcccggaaaactgcgatgactgtgacctatgtattcagaactgtccaaatcaagcgataagcaaagtgtga

SEQ ID NO: 9138 - DNA, 1011 bp, synthetic construct
  source 1..1011: mol_type = other DNA
atgtttaacatagagcgcaatggggaagagcaccgcaacctgagctataatgatataaactgtgtggggtgtggtatttgtacggacatctgcccgaccagctccctccggctgggacccatagtgcccgtcgcgaggggactgattgaaatggacctggtctccattaaagaggactcatgcgtgttctgtggactgtgttcgatcgcttgccccttcgacgcactctccatgagcgtcgatggggaatatatcaaaaacattgagtcgtatcctatttggaacaaagagagcgtggtggacgacggcgagtgtatgtactgtagtaagtgttacaacatatgtcctagtgacgccattatctttgagaggaatcttccaaaccctgccgacctcgtgcggggggagatcgaaataaatgaggaagattgcatatactgcagcttttgcgccgatatgtgccctgcggaggcaatcacaatcaagaatatccccatctcctccgttgataaactcaacaatttcattgatgtcgactcttctaagtgtattttctgcggagtttgtaagaaggtttgccccgagaatgctatcaagcagatctgctcaacatgcatgctgaatgaggagatcgaagtgccggagatcaccggcaacgtaatgattctcgaagacctgtgtgtctactgcagctggtgctccgaggtgtgtcccgtcgatgccatcgacatcaccaagccatttgacggcactctagaactggtggaaagtgaggagaagatctgtaagggtgatagttgccatgcctgccaggacgtatgcccatgcaacgccgttagcatcgtggacggcaagtcagtaacagatctgtctttctgcaacttatgtggcgcttgcgtgaaagcatgcccacaagatattagaattttgacccgaacggacttgaaccttgaaaacatcaactctgaaagctggaatgatatcctgacttcaattctagtgggcaaatga

SEQ ID NO: 9139 - DNA, 183 bp, synthetic construct
  source 1..183: mol_type = other DNA
atgtttaggaaacgcatcgacagcaaaggccaggggtccgcagagctgatccttatcattggcggactgattgtggtggtcctcctgatcgccagttacattagcaacatcacggagaagacacagaccaatatccaaaacctcctaaagaccgaacgggatttcttgataaacaagatatga

SEQ ID NO: 9140 - DNA, 207 bp, synthetic construct
  source 1..207: mol_type = other DNA
atgaaaaacatgaagaagctcatcaaggagaatagcggccagggggctgccgagtacatcttgctgttcggaggcgtgctcgtaatcgcactgctagcccttacgatttaccggagctatatggaaacaagtgacgtctccctgaaagcgaaggatgacataattgatgtgaggaacaccatcctggacaaccgcacccacgtgtga

SEQ ID NO: 9141 - DNA, 1149 bp, synthetic construct
  source 1..1149: mol_type = other DNA
gtgggaaacaccataaagttagtaagcgggtttattctcttcgtcattggtgtcctcatagcttacgaggccagcgtgtacaacctactcgatatcctgctgataattgggctgatcatcgcaattgtaggcataatcatgatgatcagccattttgtggaatccaacgcggataggacaacaaataaaattaaagagtttctggagtccaaggagagtaattcaagtttcgagagaaagaatttcacgggtgaggagcccctcaaaatccgtcacgattataacgactttgacgatgcagagtatgatgacctgggcatcgaggactataatgactccacccccagtgagtactacggagacagctttgaagacaaccccaatagagtcctgcgcaccgttccaaggcaagaaaaggaacttaatctggataaccagctagtgttcactcccaattacggcaggccattgaaggttacccgcactcctaaaaagcggcaatccgattacttcgagaaagaaatgcccccgttcgtggtggaaacggacaagtcagatgaaattaagcgggccttagaggaaccaacccctgtcgagaaggccgttaacaatcacaccttggccccagaagtgaagcagcctagagacattaaaatagacatcaacgaccctgagagtctgccggtgccaaaatccctcagtagccatatcctttgcaatgactccgtgatcacttcacaggaagctttcgaccagctggccatctacgtgaataaggagatcatgttggagattccttcgctgaacgagctgtcagaccgcttcctgtctcacgtgcccacatcctatagccgagtaatcattgacgaatttgataccagcgacatgtcttacatgttcctgatcagctcgcttctcaaacagggggtgcacatcaagacggtccccaaagtccacacagtgaacctcatcactgatgattcccatgcaatgatcataagcgagggacagaacgacatggaatatggcgccatctacgatgaccgaaagtcgatttcaaacatccgggctagcttcgagaagacatggaacatcgcctctaacctggatgagaacattattatgggcagcgttgggggaagcgcgtga

SEQ ID NO: 9142 - DNA, 720 bp, synthetic construct
  source 1..720: mol_type = other DNA
atggaaataagatggctgggccactcggcattcgaaatcatctcagatgataacgtgcgcatactgatagatccgttcatcagcaacaaccctacatgccaggtccctgtggaggagctcaatccagatattattctgcttacccacggacactctgaccattttggggacgcgctagagatctccaatagtactaatgcccccattgcctgcattcacgagatctcactcttcttggccaaacaaggaattaggaacattagtgttaacatcggcggtagcttcgtctaccggaacatcaagttcacaatgctcgaagctaaacactctagcgacattgacatggtggaagagatcgccccaggcggcaccgccgcaagcttcttaatcacctttgaagacggaactaagatatatcattgtggtgacaccggactgttcggggatatgaagaacattatcggcgccatctacaaacccgacgtggtcatgatcccaataggggataagtttacgatggggcccttcgaagctgctctggcctccatgtggatgaatcccaaggtggtgatccccatgcattacaatacatttccaccaattgagcaggaccctgcaatctttgcgaactttgtatcccagttcaacccgaacatcgatatcgtggttatgaatcctgacgagtacttcgagtataatcccgaggactatcaggactga

SEQ ID NO: 9143 - DNA, 2007 bp, synthetic construct
  source 1..2007: mol_type = other DNA
atgaaatccatgtccaacgtcgacatttatacgatctccgatgaactaaataacctcttgagcggggccagggtcgataagtcgttccagcctgccaacgacattgttgtaatcaggttccacgttcctggcactggccgcatcgacctggtaatgcagtgcgggtctagaatccacaccagccaatacccacttgagaaccccaccattcccccatcattccccatgctgttacggaagaggatcaagggcgcgcatgtggaaagtatcaaacagcacgagtttgaccgggtcattgagattaaagtgaagaaagacaagtattacaccataattgttgagttattcgacaaaggcaatataatcctgctggatgatgagaacaacatcatccagcccctgaaaagaaaacagctcagtgcacgcgacattagttccaaacgtgaatacaagttcccggagaagcgaggcataaaccctatcacaattacggaagaggagctcaagaaattgttcaagaacgccgagagtgacgtggttcgtacgctcgctatgaatgggcttggaagcttatacgctgaagagatcatccagcgcgccaacggaatcatcgagattgataagaacaccctcacatcacaacttaccgacactcaaacggcagagatctataagtgccttaaagagctgttcgataaccttaagaagggagccattaagccacaaatcgtaaagaaagactcaaaagaagatgtgatcccattggatctggtgaagtacgctgattttgaaaagactttttataaggactttaacgaggcctgtgacgaattttactctaaaaaggtcaacagcaccatcaaaaacgtcaaagaggctgcttggaataaaaaggtcaataagttcgagaaaaggctgaagctgcagcaggagaccctggataattttacacgaactatcgaagaaagtcagcataagggagaggtgatctactctaattactccaccattgaaaacataatcaacgttatcaacactgcctggagcaacgactacagcttcaaagaaattggcaagatactcaagaaagccaagaaggagggaatgcccgaagcccagatttatgagtccattgacaagatggggattctgacactgaatattgatgacacggccttgaacataaatcccaaaagcaccatacctgaaaatgcggaaatatactacgagaaagctaaaaaggccaaaagaaaaacaaagggtgcaatcattgctatcgagaatactaagaagcagctcgacgacattaagtccaaaaaggacatagcgatggaacaggtcgaattgcctaagaagagaattaaaaaggacttgaagtggtatgagaagctccgctggttcatcagcagcgataacatcctggtgatcggtggccgggatgctaacagcaacgaaatggtggtgaagaagtacctggagcccaacgacatttacctgcacgccgacatccatggtgcaagctccaccgcaatcaagctgaacgggaatgagctgaatgacaatatcatcaaagagtccggggaatttgccgccgcattcagctcggcctggtcaatgggattcacaacccaggacgtgttctgggtgcacccagaccaggtgacaaagacaccggaggcaggggagtttctctcgaagggctcttttgtcatccggggacaccggaattatatccgcagtgccagggtcaagctggctatcgggattgtggattatgagggtaagcggatcatggcgggccccgtggaggcactggaggcccactgtgacaactatgtggtgctcaaaccgggcttcgccaagaaagaggcgatcgctaagaagataataaacaagattaatgaagatgatctactgacccttgatgacattatcagagtgctgccatcaggcaaatgcgatatcgatgaggagtaccatctacgaaaaaaatacgaaaagaattga

SEQ ID NO: 9144 - DNA, 273 bp, synthetic construct
  source 1..273: mol_type = other DNA
atggacataactgtgaaggtcacaagtatccacattgtggcagggataattgccgctctcatctccaccgggctaacgctgggctggttcggattcaaaaacgacatcttcgccttttttattgcggtaatcattctctacttcgtcggtcaggcttgccaaaagatcgccggcgatgagattagcggctttagccagtggctgtgggacggaatcgcacccttctattttacatgggtgatagcctacaccatcttcgccatctacctgtga

SEQ ID NO: 9145 - DNA, 1821 bp, synthetic construct
  source 1..1821: mol_type = other DNA
atgtcctcgatgtcctcggtggccggactctcaaagtacattaaaaccctccccaagaccaaattcagcataatcgggatgctaattattagtttcttgattggcagcatctattatttgatagatttgaacccgaccatgggcatcctcgaagattttattgccggcgggctgttcgggttaatcgtatttggaatctcttccataatgagcggagcactgaatcagcagacaatcagcgtggtgcacggcatcaacctgaaaattaaacacagcatgtttctctctgttctgtccatgaccatcctcggcataatcatcattatcggctgtatcatttcccagatactaaaaatcgatttatttctcaacagcatgctcttcggttgtgttcttatttacggcttcggcacactggtgttctgggccacatcaaaggtgcggtttgtcactgctgccattacggggctgattcagccactgctcattctggcgatgtatacactcattacattcctgttcattgacacatcgttcatcggacctgcaattttgcagataactctgaaggccatagtagctgccataatctttgtgatggccatatatgccttcattaaggtgattgcctccccctttaagaagaacttgggtattggtgtgctcgatctgctgagtctctttattgcccacatgaatgagggcagcaactccctggaaggactgttcgagaacatgagtgaggctatcgacaccatcgtcaccttcgttagtttcaagactgagaatgggatcaaagcgctgtttatatctccttctgtgcaccctgggcctcttggggatctggggggctccaatatgccaacgctgctggctaataagttcgaccatttcactatggttgctcatggaccatccacccatgacttcaaccccattgccgtaagcgagatcgacaagatcgaagagtctgtgcgcaacggcctcaagaccgtcgaatactcaagcaacgccagccgttttatcaggtataatgttgagaaggcaaacatcggtgtgcagttgtttaataagggtatggtgattctttcaactttcgctccggatgcggtggatgacatcgaatttggggtgggcctgactatgatggctcaaagcagaagccggtgcaatgtggaggactcgataatcgtagactgccacaactccttcacccccgagtccggcgaaatcctgcccggaaactcagaggtcttccagctgatcgacgttattgacacaatcaaccctaagcagggacggtacgatgtaaaggtcggctgctacgaggataaccttgaatccctcgacaaacacgacggggtcggagacagcgggatcaaaaccatgatcgtggaggtcggcaatcaaagaaccgcgtacgtccttttcgatgcaaacaacatggagatcggatttcgacaagagattattgatgccgtcagtgacctggagatagacgaaatcgaagtgatgaccactgacacccatactgtgaatacactttctaggggatacaatcccatcggcatcgcaaaaaggcccgaaatcatcgaatacgtccgcattagtatcgaggaggccataaaggatttggaaaaggtggaggtgggaacggggacggagaaaatcgagaatctgaacaccttcggcccaaaaaactcaacggaactaatcagcaccatcagttcagtcgtggccgtgagtaagattatcgctccagttctgctgattacagcattactaatcgcatttatctggatcttctttggtggtctttga

SEQ ID NO: 9146 - DNA, 522 bp, synthetic construct
  source 1..522: mol_type = other DNA
atggaacggaagcttaatgtgccgattaaagatgaaaacctaaatgaactcaaagccggagacgtggtttatttaacaggcaacattctgaccgcacgggaccaggctcacaaacgcatcatcgagcaaggcgcgccctttgatatctccggggccgcattgttccatgctggacccatcgtcacaaaggaggatgagaactacaagatggtcgccatcggaccaacgaccagcatgagaatgaatccatatcagagcgatgtactggacatgggggctaagattataatcggtaagggcggcatggacgataccgtcagggaagcactcgtgcgaaataacgccatctacgtcgtggcaactggagggtgcgctgccctgtacgtagacgccgtggagaaaattgagggtgttgactggctggacctcggcatgcccgaggccatctggaacctgaaggtgaagaacttcggccctcttatagtggcgatggacagtgaggggaactcactgtacgattga

SEQ ID NO: 9147 - DNA, 330 bp, synthetic construct
  source 1..330: mol_type = other DNA
atggctgatattaacgagctcgcggaaaagaagctgaagtcaaggatgaccaagatacgcaagtgcaacagagaacccgaggaaaaggcaaagttcagcgagaaattgggagtcagcttcgacgtggaatttcacaacaaaaatccagacaaacttgccgacgggatcactttcatcacaacgcctgagggccggatcttactcgccgagtactactatgagatccccgaaacccaggagtatacatccctgccgattgacgagaagaagctgaaaagtatactggagtttttcgatgagtacaaactagaatttgatgactctgattga

SEQ ID NO: 9148 - DNA, 1155 bp, synthetic construct
  source 1..1155: mol_type = other DNA
atgatcgtgaacaactcgttggacgaggttaagaagagagataatgctctgaccatcatcaaaaatcttgttgagaccaaaggccgctcttccctcttcgatctgactggtctggccggtggatttatcgccagctctagcgaaattagtctgctggagacctatgtgggtccggccatctttgaagacgccattcaggaggtgggaaaggagcacatgggcggggaaaaagtcctggcagtaaacaggacctcttccggcatacttgctacaatattgtctctggtgagtaaggactccaacgtcgtgcattacctggcggaattacctgcccacccatcgattccacggagctgcaacctcgtgggcgcgaactacttcgagacggacgtgttcgaggagttctcaatcccgaataatacttcactggtggtcatcaccggctccacgatggatcataaggtcattgacgaagaggagttcaaacagattattgagatggcacacgccaaagacattcctgtcatggtcgacgatgcttctggggccaggcttagaaccgttgtgtttaaccaagccaaggcctgtgatctgggcgcggacatcgctatcacgagcactgacaagctcatgcctgggccccgaggaggattgatgtccgggcgtgccgagctaatcgacgaaatcaagattaaagtgaaccagttcggacttgaagctcagccccccgcagtactcgcaatggtgaacgggatcaagaacttcaaggaagagaacctcattaaaagtttcaagcggaaagacgagctgtacaaactgctcagcttgaagttcagcaattttaagaagagccccacaggggtcatgatttaccctgaaggcctgagcagtgaaatcaacgttccacacaagctgagcgacgacgatctcgcctatgtgttctcgttcattctactgcgggattatggaataatcacaatccccccagtgtcaatgcccggcgcttcagccacaatacgctttgagttatcctcaagtgacgcagtgaatctggatctgaactccctaggcaaaaagatcgtctccgcatttgagaagctccaggatataatcaccaatgaagagaaatgcagggagatcgtatttaatagctga

SEQ ID NO: 9149 - DNA, 918 bp, synthetic construct
  source 1..918: mol_type = other DNA
atgaaggaggaaataatgaacttgctgaagaaggagggtaagctgagcactgagactatcgatgagataaagcaagtggacatcaatgacttcaagaacctagtggaggaaatcggaaagcagaaaacagagcacattatcgctgacgagatttccaagaatctgaatacaaaatacattggcaagaacctctacgtattcaacgaagtcaagtcaacaaacactatcgccaagttcctgagcaccaataacattgcggacggaagcgtgatcatctctgaaaagcagacagccgcaaggggccgatctgggaagtcctggaaatccccactggggggagtatggctctccatcgttctgaatccccatgtcgatcactcgaagctacccctcatcaccttggccaccggggtggctgtggccaaaacgcttgagaaagttggaatcaaaaatcctgagatcaagtggcccaacgacatcctgattaacggtaaaaagatctgcggcatattaaccgaggctgtggccaagtttaacacgattgaaaatgtcatcatcggcgtgggtatagatgcaaatgtggatatcgaaaaattcccggaggaactgaaaaacggcagcaccaccctcgagatagaactggggaggaaagagaacgaaaacctcctcattaaacttttcttagaagagtttgagaaaattagtgagctgtttgaccacgaaggctatgaggagatcttgaaggaatggcggaagcggtcatacagtatcggaaaaattgtggaagtccgcgagccatttaacaaatattatgatggctacgtgctgggcattagtagagaaggggcgcttgtggttgagaagattgacgggaccctggagaaggtcattagcggagagtgtataatcaagaattga

SEQ ID NO: 9150 - DNA, 1494 bp, synthetic construct
  source 1..1494: mol_type = other DNA
atgttcgaaaaggtgctgatcgcaaatcgcggagaaatcgcaatccgagtgatgcgggcttgtcgggaacttgacatcaagagcgtctccatatactccgatgccgataagacttcgctatacaccaactacgcagatgagagctacccactgggcaatccgtcaccggcgaaaagctacctcaatatcgagaagatcattaacattgcactggaatccggggccgatgcaatccacccaggctacggatttctggctgagaacagcaagttcggggaggagtgcaaaaagaacggaattaaactcatcggcccaagtggagacgtcatcaataagatgggcgataagatcacctccaaagccctcatgaagaaggctggcgtgcctgtaatcgagggtacacccgaagggattacagacattgaggaggcgaaggacatagcccggcagattggctaccctgtaattgtaaaggctagtgcaggtgggggcggtattggtatgcgagctgtgtacgaggaggatgaactggttcgggccatcgagagcacccagtctgtggcgtccacgaacttcggggattccaccgtgtttatcgaaaagtatctggaaaagccccgccacattgaatttcaactcttggccgatgaacatggaaacgtcatccacgtgggcgatcgggaatgctcgatccagaggcgccatcagaagctactcgaggaggcgccctccccgattatgaccgaggagttgagagacgagatgggcggcagtgccgtgaaggctgccgagtatataggttacactagtgcaggtacagtggagttcctctatgacaatggacaatattacttcctggagatgaatacaaggattcaggtcgagcaccccattactgaactggtgaccaacactgacttaataaagcagcaaatcctgatagccaatggggatgaactgagctacgagcagaaggatatcaaaataacaggccatgccattgaatgccgtattaacgccgaggaccctctgaacgactttgcccccaaccccggaaaaatcaccgggtaccgaagccccggaggcccaggggtccgcctcgacagtggagtctacatgaattacaccatcccaacattctatgacagcatgatctcaaaactgatcgcctacggaagggacaggaatgacgccattaacaggatgaaaagagctcttagcgaatatatcatcttaggcgtgaaaacgaccatccccttccataaggcgatattgcgcaatcctaacttcatctcaggcgacctgaacacgcactttatcgacacttataaaaaggggattgagaaggagatggagaatgttattgccgaggaccacgaatatgttaacagacttaaatcaacctttatgcctggcaagaaaatagccgcaatctctgctgctgtggggtcttatcagaacatggccagaagccacaacatgcagaaaaaatga

SEQ ID NO: 9151 - DNA, 828 bp, synthetic construct
  source 1..828: mol_type = other DNA
atgtacaaagacgagctatccatatttattccgaactcatttctgtcggagagcaaagaccttaaaatccggacttataaggtgggtattctaggcagggctttagccattttccaagcggataatgtaatcatctacaatgatgataatgtcaagaatgaggatggagaaatggacggagagttcatcgctgagattttgaactacatgaacacgcctcagtacttgaggaaaaaggcattccctatacggagcgaactgaagcacgtgggaatcctcccccctctccgaaccccgcatcaccccatcaacagtcaaccagacgtgggggattaccgtcaggggtttaccgtgaagagaaacaagaagggcacctatgtggacataggtatggacaaactggcattctgtaaagagcagctgagcgtgaaacgcatctttgactttaagattacaaagattgccaagaaggaagtaatagtcacacccgataagcccgacgacgtgtactggggctataacgttatctccagcacgaagagtcttaagaatagcctgaaactcatcaagccagaccttgtcgtggaaactacacggtacggggattatatcaattccatcttcgatgaactgaaaagcaaactcaacgagagcaaatccattgccatcctgttcgggggcccatattcctcaattcaggaggacgtgtcaaacccaaactgggacctgttcaagctcaataccatccccggccagggaaccgaaactgttagaagtgaggaggccgtcgtcgccacactgtctctgttcaactgcatgcgcttttga

SEQ ID NO: 9152 - DNA, 1011 bp, synthetic construct
  source 1..1011: mol_type = other DNA
atggtgcggcatcaccagccaagaaaggggtctgttgcttttagcccaaggaaacgcgcggccaaggagaccccgcgggtcaaatcgtggcctcagatcgatgaacccaagctgctcggcctcgctggctataaagtcgggatgactcatgttctgatgactgactccgataagaacagtcccacaaacgggatggaggttttcacaccagtcactgtactagaggtaccgccggtcgtggtgatgggcattcgcgcttacgaaaagacctctcgtggactgaaagtgatcaccgaagtgctggcagacaacttagataaggaacttagtaggaaaatctccctgcccaaggagtacaataaatctgaggccattgccaagatacaaggcgccctggagaacacagaagagatcagggtcctcgtgcacacaaacccaaaagtgacgagcgtccctaagaagaagccagacatatttgagtgcggtattggcggctccaatcccgaagaaaaactgaacacagccctcgagttgctgggcaatgaggtgaaagctagtgagatcttcaatgagggcgagttcgtggacgcgatcgcaacgaccaagggaaaaggcttccagggtgtcgttaaacgctggggaattagaatccaatacggcaaggcggtgcgggccggtaaagggagacacgtaggttccatcgggccttggactccccgaagaaccatgtggacggtcgcccaggcagggcagatgggctaccacaagcggaccgaatttaacaagaggattctcaagatagcctcagcagatgaagtggatcagatcaaccctgacgggggattcataaagtatggactggtgaagaatgactacgtgcttgtgaaaggatcactgccaggacctagcaagcgcctagtgattttgcgacaacccattcggcccaacaataaggctgaggacatcccccagatcaactatatcagcaccaaaagcaagcagggggcctga

SEQ ID NO: 9153 - DNA, 765 bp, synthetic construct
  source 1..765: mol_type = other DNA
atgaaggtaaatgtttatagcatcaatggggaagtgaaggaagagattgaacttcccgctatcttcgacgaagtctacaggccagatctgatcaagagggccgtactctccgcccaaagtgctcgagtacagccatggggcaacgatcccatggccgggaagagaacctcggcgaaggggtggggcagcggccggggaaccgcgcgcgtgcccaggattaagaacggttccaaggcagcatttgtcccaatggccgtgggtgggcggaaggcccaccctacgcgagctgagaaaaaccaccacgagaaaatcaacataaaggagcggcgctttgccatcagatcagccgtggcagccacgactaataaagagattgtggaaaacagaggccacaaggtcgcagacctggagcaggtgcctatcattgttgaggatgaaatcgaagctgttaagacagccaagcagacacgggagattttccagaacctgggcgtgtatgacgacatactccgtgccaaggaaggaaagagaatccgcgccgggcgaggcaaaacccgcggaaggaaatacaagaaagtcaaaggaccgcttgtcgtggttggtgagaataaaggcatccacctgggcgctcggaaccatgcaggtgtcgacgtggtggtggctgagaacctgaatgcggagctactcgcccccgggacccatgcaggaaggctgactatatacacaaaaagcgctgtggagaaattgggaggcttattccagtga

SEQ ID NO: 9154 - DNA, 261 bp, synthetic construct
  source 1..261: mol_type = other DNA
atgaatgcatatagcattatcattaaaccccatgttacagaaaagaccatgaacctgattgaccagaacaacgtgatcacctttgtggtcaatcgggagtccaacaaaagccagatcaagcgcgctttcgaggaactatacgaggaaaaagtagccaaggtgaatacacacatcactacgaaaggggtgaaggtggcctacatcaagctggtggaggaggaaatggccgaggagctcgcggtcaggataggcgtcttctga

SEQ ID NO: 9155 - DNA, 726 bp, synthetic construct
  source 1..726: mol_type = other DNA
atgggcaagcgactgatacatcaacgacgcggaaggggaactcccgcccaccgggtcgctagccaccgtttcaaggataaaatccgctacagatcctacgatgccctggaaaaggagggcagcatcaaagggaaagtgatagacatactgcatgaccctgcaaggaccgccccgattgcggaggtgaaattcgagaatggtgaaaagaaatatatcctagcacctgaaagcatccagattaacgacgaaatcgagtgtggtatctccgctcccattaagtttgggaacacactgccactcgcggagatccccgagggaacccccatctatgacattgagaacacacctggcgacggcggacggtttgtgcgctcaagcggaacgtatgcctcggtagtgactcatgacgccaaccaggcggtagtggagctgcccagtggagaattgaagtacctcaaccccaattgccgagcaagtattggcgtcgtggccggcggagggcggaaagataaaccattccttaaggctggcaagagatggcacgcctacaaagctaaggggaagaaattcatgacagttaggggcgtcgcaatgaatgccgtcgatcaccctcacgggggcgggaaccgccagcacccagggcggccaacgaccgtttccagacatgccccgccaggcaggaaggtgggttcaatcgccgctaagagaaccggtctcaagcggtga

SEQ ID NO: 9156 - DNA, 411 bp, synthetic construct
  source 1..411: mol_type = other DNA
ctcgcacgcaagatattcaagtacaagggttatacactagaggagctccagcaaatgagcctggaggaggtcatggagctgttcccggccaggcaacggcggagtctgaaacggggcttccttcccagacagcagattgtcttggacaaaatgcgaaagctgaataaggaaggcacgaaagatggccgtcctgttgtgatcaggacccactgccgcgacatgattgtcatccctgagatggtgggaaccacttttgggatctatgatgggcagaactttgtggaagtgactatagcgcccgaaatgatcgggcattacttcggagaatacgccccaacaagaaaacgcgtgcagcacggagaccccggcatgggtgctaccaggagctccatgtttgtaccactgaagtga

SEQ ID NO: 9157 - DNA, 465 bp, synthetic construct
  source 1..465: mol_type = other DNA
atggctaacaagtatgcctacaatgaggaagtggatgaagccaaaacggcccgggctatggcaaagagcctgaagatttcccccaagcactccgtggagatttgctcagcaatccgaggcatggatgtagggaaagcgaaggactacctggaagacgttatagagatgaaaaaagccgtgcccttcaagaggcacaacaaaaaggtcggccacagaaaaggcctcaagggatgggcgtctggcaggtacccggtcaaggctgctgagcaaatactaaaagtgctcgaaaacgcagaggccaatgccgagtacaagggtatggacacagaaaagcttttcatcgagcatatcagcagtcataagggggtggtgatccccggatatatcccacgggcctttgggcgcatgaccccattcaatacacctactacccacatccagattgtcctgcaggaggcaaactga

SEQ ID NO: 9158 - DNA, 756 bp, synthetic construct
  source 1..756: mol_type = other DNA
atgatagaaaaggactttgtcacagagggcctcaaacgaacgagaatcgatgagtacctggagaaggaactagagcgcgcgggatacggtgggatggacgtgcagattactcccctgggaaccatggtggtggtgtatgcagaaagaccagggatggttatcggcagggggggcaagaacgtaagggctattaccaacacacttaaaactgattttggcctggataatcctcagattgaagtgaaggaggtggaggttcccgagcttaatcctaagatcatggcctataagataagcaacatgttgcaaaggggaatgcacttccggcgcgttgcctactcaaccatccgtcgcatcatgggcgcaggagcgcagggtgtggaagtcaccatatccgggaagattagaggcagccggtccgccgtcgccaagttcgttgaaggatacattaaaaaatgcggcgaaccaagcatccggctcgtggaagaagggttcgctacagcccagctgaagccgggtgtgctgggcatctatgtccgaatcatgcccccagagactgtgctgcctgattctgtggaaattttacccccgaaaataatcatcgaggaggacggggaggtgacagaggaggaaattgacatcgagaccgaggaagtcatcgaggaggacatcattgaggaagtcgaggacctcgatgagctggaggaagtggtagaggaagagtcgacggaggaagtagaggaggacgacagttga

SEQ ID NO: 9159 - DNA, 207 bp, synthetic construct
  source 1..207: mol_type = other DNA
atggcgattctgaggagtaaggagatctgggacatggaggtcgatgagatccaggacaaactagtggaactcagagccgaactgagcaagaacatcagcaagtccgcagccgccgggattaatgaaaaccccggcaagatccgcgaactcaaacgaaccatagctcgggtgctgacaataatgaacgagaaacagaaggagaattga

SEQ ID NO: 9160 - DNA, 339 bp, synthetic construct
  source 1..339: mol_type = other DNA
atgagcaagatttgcgacgtctgtgggctgcccgaagagctttgcgtgtgcgaagaaatcgccagggaggttcagagtttgaaggtgttcacagtacgacggagatttggaaaactcatgacgatcatcgagggtatagacgagcacgatatcgacatacgggagctgacaaagaccctaaaggcaaagtgcgcctgtgggggcaccgctaaaaacggccaaatcgaactccagggagatcataaagtgaaggtcaagaaagtgctgtctgacatgggcttctcctcagatactattgagattcgcgagagcaagaaaaacaataagaaaaggcgctga

SEQ ID NO: 9161 - DNA, 279 bp, synthetic construct
  source 1..279: mol_type = other DNA
atgatcacgagcaacaatctggtccaccacgagtttatcggcctgcgcatccatgccatgaatcccaagaatcccagcctaaatctgaaaggaacagtgattgatgagaccaagaacaccatcattatcgaggaggaagacaacaacgaaaagatgatcccgaagaacggtactttcttcgtgtttgaactcccaaacggggaaaagattaaaattgacggcaacatcctctccatcagacctgaggaccggataaaaaaaaggttcaagaagatatga

SEQ ID NO: 9162 - DNA, 318 bp, synthetic construct
  source 1..318: mol_type = other DNA
atggtggggctgaacgtccaggaacccgagaccacatgcaatgaccctaactgcccgttccacggaacactcagcgtaagagggcaggtcctagagggcatcgttgtgtccaacaaagccgaacgcactattacggtggagcggagctactataaattcataaagaagtacgagcggtacgaaaagaggaagagcaagatcaatgtccacaagccagattgcctcaatgtgaacgtgggcgactcagtcaaaatcgcagaatgtcgacccctgagtaaaaccaagcattttgtgctggttgaggtgaaaggtgagtga

SEQ ID NO: 9163 - DNA, 399 bp, synthetic construct
  source 1..399: mol_type = other DNA
atgaaacccctaacctcaagtgtaacgaaagccctgccgattggagcaaccctccagtgcgtggataacacaggggctcgtgagatcgagatcattagcgtcaagggatttaagggagtgagacgacgcctcgatgtggccggggtgggcgaccttgtggtggcctccgtgaaaaaaggcacagccgacatgcggagggaggtggtcaatgccgttgtagtcagacagaagaaggaatacaggcgggcggatggcctgcgggtgaagttcgaagacaacgccgcggttattatcactccagagggtatcctgaagggctccgagatccgcggtcccgttgcaaaggaagcagctgacaggtggcctagcgtcgggtctgctgccaacatattggtctga

SEQ ID NO: 9164 - DNA, 351 bp, synthetic construct
  source 1..351: mol_type = other DNA
atgtcaatccagccaaggaaacagcgtaaagctcggtatacagcgcccgcccacgcccggggtaaatacctgagtgcctccgtgagcaaggacctcagggagaaggtggggaagcgaagcctaccggtgataacaggcgacaaggtgagagtggtccgcggagactttaagggacatgaaggcgaggttctcaccgtagattacacgtcctacaaggttactatcgaggaagtgacccttagcaaacctgacgggactgtcaccttcctgccagtcgatccctcgaacctggtgattattgatgcaaacttgaaagacgacagacgcatcaagaacaagggcgataattga

SEQ ID NO: 9165 - DNA, 729 bp, synthetic construct
  source 1..729: mol_type = other DNA
atggcgaagatgggatctcggaaacatctcaagcggtacaaagcacccaaaagctggccgattcatcctaaagaggacacttggactgtcaaacctagcgcaggctcacactccataaatgatagcataccccttacgctggtgattcgagacgtgcttaaattggccgacaacgcccgcgaggcaaaaaggattatcaactccgggaacatctttataaacggcatcatcgtgaaggattataagttccctgtcggcttcatggacgtcctggacatcccaaagaccgaggagagctacagggtgctcctagaccgcaagggaagactgcagctcaagctgatagaggacgctagtgccaagctctcaaagattgtgaacaaaaccacaattaagggcggcaaaacccaactgaacctccacgacggcaagaacgtgatcattgacgaagatgcgtactcggttggggatgtgatttgcctgaaagtccccgagcaggaaatcgttgaagcctaccccttacaggagggagctacaatcctggttacaggtggtaagcacaccggggagctgggaacggtatctgagattatcgaaaacaagtccacaaacccaaatactatcatcatcgaaaatagtgccaaggacgaatttctaaccctgaaggaatatgccttcgtagtggggaatgatgctccagtcatcgatctgttggaggtgaataagtga

SEQ ID NO: 9166 - DNA, 513 bp, synthetic construct
  source 1..513: mol_type = other DNA
atgaaccccatgaatgaggttcggatcgagaaagccacggtgagtatcggagtgggtgaggccggcgagaaactctcccgggcaattaccctgctggaaaacatgttcgaccagacacctgtgaagacattttccaaggtcactaaccccgagtggggaatcaggaagaagcaacctatcgcgtgcaaactaacccttcgtggagagaaggccgataaagctatcgacatggtactggagggcattagccgaaatatcaagcccacccagttcgatgcacaaggcaacctcagctttgggattaaggagcatattgacataccaggtatgagatataacccagacattgggatcttcggcatgaatgtgtcggtgactttcgaaaaaccagggtaccgcatatcacgcagaaaaatccagcagaagaaggtgccgcagaagcacaggataagcaaggaggaaacaatgaaattcatggaagaaaactttaaggtcaattacgtcaccgaatga

SEQ ID NO: 9167 - DNA, 144 bp, synthetic construct
  source 1..144: mol_type = other DNA
ctgccaagaaaatacggcaaggccgccaagaaatgcagccggtgcggcgaccactccgctatgattagccgatatggactgaacctctgccgccagtgtttcagggagatcgcacccaagatcgggtttaaaaagtacaattga

SEQ ID NO: 9168 - DNA, 393 bp, synthetic construct
  source 1..393: mol_type = other DNA
atgtccctgatggacccccttgccgacgctctaaccaatatccgaaataacgagctgcaagtgaacgggagttgcgttattagccccgcgtcaaagctcattggccaggtgctcagcacaatgcagaaggagaactatatcggcaattttgagtacgtcgatgacaacagggcagggaaattcacggtggaactgataggaaacataaacaagtgtggtgtgatcaagccgcggcatgctgtaaagaaagatgagtttgaaaaattcgaaaagcgctacctcccagccaaaaacttcggcattttgatcgtcactacccctcagggaatcatgacacacaatgaggccaaggaaagaggcatcgggggacggctgctggcatacatgtattga

SEQ ID NO: 9169 - DNA, 537 bp, synthetic construct
  source 1..537: mol_type = other DNA
atggtcgtggctgccgctatacgagaggagattgccatccccgagggcgtggaggtgataatagaaaacaacgaggtgagtgtaaaaggccctaatggagaggactccaggaagtttacttatcccaatgtcaacattaaggaagaagaaaacgttgtgatcctcgagactgtgtttccgaagaagaaggataaggcaatgattggaaccacaagggcacatatcaacaatatgattgtcggcgtcacggatggctttacctaccacatgaagatcgtattcgctcacttcccaatgactgtgaaagtgcagaaagacaccgtcgttattgacaacttcctgggggaacgccacccacggacagcgaaaatcgttgggagcgccaaagtggccgtcaagggtgatgaggtgacaatcaccggtattaacaaggaacatgtggggcagacgatggcgaatctagagcaggccaccaagatcaaaggccgcgaccccagagtattccaagacggaatctacctgatcagccgggagtga

SEQ ID NO: 9170 - DNA, 330 bp, synthetic construct
  source 1..330: mol_type = other DNA
atggcgaataagagatttaagcgccaggagtacgcccgttacaaaaaactgggaatcaagtggcgccgcccccggggaaagacatccaagatgagaaggtatgaagctggcaaaccagacatgcccgccatcgggtaccgaacccctcgggccattagggacctccacccgagcggcttcaaagatgtcctcgtgcataacatgcaggaactggaggaccttgatccagcgacggaggctgcccggataagtgccagcatcgggaaaaggaagaaggacctgatgctggcaaaagcactagagctgggcattaaggtgttgaacaagtga

SEQ ID NO: 9171 - DNA, 456 bp, synthetic construct
  source 1..456: mol_type = other DNA
atgaatctgacaactcagaaacgattggctgctagtatcctcaaggtggggctgaaccgggtgtggattgacccagaaagactggaagaagtgagcatggcgataacacgagagggagtcaagcagctgatcaacgacggcgcaatcaaggcaaaaccgcaaaaaggtatcagcagctaccgctcgaagaagattaaagaacagaaggccaagggcaagaggaaggggaggggatcaattaagggcgccaagaaagcccgtacccccaagaaaaaggcctggatgaccacgatcagggccctaagaaaggatcttaaagagatgcgcgaggatgaggtaatcgacgtcactacctaccggaagctctataaaatggcgaaggggggcgcattcagatccaaatcctacatgcgcaactatgcccgggaccacgatctgataaaaggagacgagtga

SEQ ID NO: 9172 - DNA, 582 bp, synthetic construct
  source 1..582: mol_type = other DNA
atggcacacggaaccaactacaaggtggctttccgcaggcgccgagagggcaagacagactacgcagcacgtatgaaactggtcagttacgacaaaccccggctggtggtgagggtgagcaactcccatgccactgtgcaggttattaattatgctccagagggcgacttgactgtagcgtcagcggtctcgaagcagctggccaagtatgggtacctgggccacacggggaacctaacaagcttttacttaaccgcttatctttgcgccaagagagcactggctaagggcgtggagtccgcaatactggacatcggtcttaaaagtccaataaaaggaagcaaagtctttgccgctctgaagggtgccgtggatgccgggctcgaaatcccccacggcgatttcatcttcccggaggacgaccggattaatggcggacatatcgccgcctatgccgagtccctcgacgcggaggaagttgctaagaaattcagcaagtacttcgaaagaggactcaaccccaaggatttgcctgccaactttgaggaaaccattaaaaatatcgatgaggccggggaatga

SEQ ID NO: 9173 - DNA, 642 bp, synthetic construct
  source 1..642: mol_type = other DNA
atgtcgtttaacattgacgaatgggagccaaaaacaaagttgggtcgcctggtgaaagatggcaccatcactgacatcgatgaaatcttcgaaaaggggctcccgataatggaactggagatagtggatgccctgatcccagatctggaggaggaggtcatggacgtgaacttagtgcagaggatgcacaagtctggtcggaaagtgaatttccgcgtcatcgttgcggtaggcaataagaatgggtatgtgggactgggccagggcaaagctaaggaggttggccccgccattcggaaggctgtcgacaatgctaaatacaatctgattaaggtcagaaggggctgtggagactgggggtgcgtgtgcggacgagagcataccgtgccctttaaagtacagggtaagaccagtagcgtgagcgtcaaccttatccctgcacccgccggagtcgggcttgtgatcggggatgtggggaagacaattttgaagctcgccggcatccacgacgtatggtcccagtcattcggacaaacccaaacgactgtcaacttcgcgaacgcagtgtttgccgccctgaaggagctatccaacgttaaagcaagccaggaagacctcaagaaaatgggcgtgaactactga

SEQ ID NO: 9174 - DNA, 459 bp, synthetic construct
  source 1..459: mol_type = other DNA
atgtttttggtgatccgagtgcgcggcacgaccggtgtgatcaagaatattgcgaacaccctggacatgctgagacttaacagaatcagccatgccgtactcgtggaagagaatcctagtttcgagggtatgctgcagaaagctaaggattacatcacatggggagagatagacgccgagacactgtcagcactcattgctaaaaggggccggctcccagggaatgtgaaagtcactgacgagtacgttgcagaaaacaccgactacaaggacattgccgatctggcgcaggctctgattgagtccaaagttaagttagccgatgtgggcatcaagcccgtcttccgtctccacccgccccgcaaaggctataaggatatccggttgtctgtccaagaggggggaagcctggggtataggggagaaaacataaaggaactagccaagaagatgctttga

SEQ ID NO: 9175 - DNA, 438 bp, synthetic construct
  source 1..438: mol_type = other DNA
atgatcaggacgaaacggaagattaacaagcagcggggcagcagatccaacggcggcggctgcaccaagaagcgccgcggggcaggcaacaagggcggaaagggaaaggccggtatgggcaagcagcattggacctggactgtaatccacgaccccaaccacttcgggaaacacgggttcaagcgaccgcagaaaatgatcaataaggtcaacgcggtcaacctgaattatctagaagagcaggctgacaaactgcttgccaatggtaaggccagccaagatggggacgcgattgtgatcgatgttacagagttgggttacgacaaagtgctcggaaaagggaaaattacaaagaccttcaaaatcagtgccccacagttttcagcatctgctgtggagaagatagaagagctcggaggagaggccatagaactgtga

SEQ ID NO: 9176 - DNA, 1362 bp, synthetic construct
  source 1..1362: mol_type = other DNA
atgtcatccctagagtttctggagcctgtctttaaaatcgtgcccgaggtcaagtctcccgtgcatcgcgaagactttaatgagaaactgaagtggaccgctctggtgttagtgctatattttatactcactcaaattccactctacgggctcgcgcctggagctatcgattcattcgcccagctgcgggccgtgatggcaggaagtttcggctccatcctgacattaggtatcgggccgattgtgaccgccagcatcgtgctccagctgctggttggctccaatctcttggatctggatctttcttctcataaggataagtctcacttccaggctactcagaaaatcctgtctatcgttttcacattttttgaagcaagtgtgttggtactcaccggcaacttggtaccaatcgacggcagctacactctgatactgatcatccagctggttgtcggggccctcgtaattatctatctggacgaagtggtgagcaagtggggattcggcagcggcattgggttgttcatcgcggccggcgtctgccaggccatcatcgtaggcacattcagcatcctgaatgggtccgacggactgctggcaggtattatccccaagttcatccaactggctaccggcggaacatttgacttctcaattctcgttccattaatagccaccattatcgtatttgtggtggtgctgtacggggaggctatgaaagtcgaaattcctatatcgcacgggcaagttaagggtcacggccggattaggggaagcgtgggcaagtaccccctgaaattcgtgtactcaagcaacatgcccgtcattttaacgtccgcactgcttgtcaacgttacgctctttgccaacgtgttccagaaaatcggcgttccaatcctaggacaccttcagaacggcaaggctgtggacgggatcgcctggttgttgtccacacctaacctgaccatgtttatcacagagccgatccatgtgctggtctatgccctattcttcattgcctgctgtatattgttctcctacctgtgggtggaaatcagtggactcaacgcgaagaagattagcgagcagctgcacaagtccggcatccagataccagggtttagaagtagtaaacgacagctctataaaattctgaagaaatatattcccgcacttaccattataagcggggtgtacgtcgggctcattgccttcctcgccgacttgactggtgcgctgggtggaggcaccggtgtcctgctcacggtcggcatccttcacaagctttacgaggaaatggctcaagagcagcttatgtcggcaaatcctgtgctgaggaaggtgcttggaggagattga

SEQ ID NO: 9177 - DNA, 576 bp, synthetic construct
  source 1..576: mol_type = other DNA
atgcggggaatcaagttgaagctcgtcgtccttactggcatacccggcagcggaagtacaaccctgctcaataaggcgttggagcaggtggactacgtgcatctaaattacggggacataatgaccgagattgcaattaatgagaatatcgccgataaccgggattccctccgaaaactgccagccgaaacacagaaaaaaatacaagctaaggcagcgaaggagattaagcagagatcggagaacgacaacgttattgtagatactcactgcacgatcaacacacctgccggctttctgcccgggctaccaaactgggtgctggaacagctgcagccggaccttttcatcctgatcgaggccaatgccgatgaaatcatctacaggcgcctgaatgacgatacgcgccagagagacgtgcagaaagctaaggaaattcagctccatcaagaaatgaacagggccactagcatggcttatgcaaccctgaccggtgccaccgttaaaatcgtcgagaaccacgacaaccacctggatagctccgtgtcaaagttagtggacgtgctgaacctctga

SEQ ID NO: 9178 - DNA, 579 bp, synthetic construct
  source 1..579: mol_type = other DNA
atgtttgatatcatgggaatgatctatggtgtgctgaacacaattttcgacccaattctggcgatggaccccaacccaagtaacccggccctgacagtcttgataatcgcctttatcgtaagcctgatcacaaccatcgctaacaagtacctggttgaccaggacgcattgaatgagaaacaggcaaagatgaaggagttcaataaagaactgagggatgctcagaagcgcggcgatgggaagaaaattgccgaactgcaagcccggcagaccgagatgatgaaggagaataccgcgatgatgtcagaacaatttaaaccaatgattgtgacgtttgtccccatcatcttaatatttttctggatgagagcctctgcaattcacgacctcgtcatcatactccctaccactgtgtactgggtgactctcacgcctctctggcatgtgatcggcagcatgttctacggcggtcaggccactatcccctatgggattggctggctgctttggtacatgatttgcaccttcggaatgtcccagatccttcgaaagttcctaggattcaaacaggggttctga

SEQ ID NO: 9179 - DNA, 267 bp, synthetic construct
  source 1..267: mol_type = other DNA
atgcccgctaacaggtttagatcacggagttacaagagagtgcacaagaagacgcctggaggcgtaaatgtgctacgctataaaaagaaaaagccatctaagcacgtgtgcgcggaatgtggcgcagtcctgcacggcgtcccccgcggacgcccatatgagatccgaaagctgtccaaaacagcccggaggccgagccgtccctacggggggtacctctgcagcgcctgcacccggaagcatttcaaaaaagaggccaggaagtga

SEQ ID NO: 9180 - DNA, 522 bp, synthetic construct
  source 1..522: mol_type = other DNA
atgattataacaatcggcggactagccgggactggaacaactaccctggccgaggtcctgagtgagaaattaaacgtgccctatatttccgcaggttttatcttcagggaaatggccgctgagagagggatgagcgtactggagtttagtgagtttgctgaggggaacgccgaaatcgacaaggaaattgacaagcggcaggcagaaaaagccaagtcctcagacaatctgatcctcgagggccgcctgtctgcattcttcgttgaaaacgccgatttgaagatttgcctgatgacgccattcgaggtgcgatctaagagaatcgcgcagagggagggcaagagcgtcgatgtggcgaaaaacgagattatcattcgtgaagagtcagaatccctccgctacaaagaaatccacaacattgacatccggaacatggaaatctacgacctcatcataaataccgatagcttcaatccggagagcatatcggagatcatcaccacaacccttaaggtgatatga

SEQ ID NO: 9181 - DNA, 222 bp, synthetic construct
  source 1..222: mol_type = other DNA
atggccagcatagaggtgggcagggtgtgcgtgaaaaccgctgggcgcgaggcaggcaagaagtgtgcgattgtggagatcatcgacgaaaatttcgtcgaagtgattggtgaggcggtaaaaaaccggagatgcaacgtcgctcacctggagcccacagcagatagtatcgatgttagcggagacgccgaatccatcaaggccgccctcgccgacctgtga

SEQ ID NO: 9182 - DNA, 966 bp, synthetic construct
  source 1..966: mol_type = other DNA
atgaagttcaataggatggtcaagtctaagagtttcactagtccggacttcgggtgcaagccagaggaaagagagatttccgagtacatttccaaaggcgtaatcaatctagataagccctccggcccaacgagccacgaaatcgacagctgggtaaaacgaattttgagtctggagaagagcgggcatggtggaacattggaccctaaggtgactggaatattaccagtggggttaaatgacgccaccagagccatacagctgctgctgactgccccaaaggagtatgtgtgcctgctgacactccaccaagatgttcccgaagagagaatccgtgaagtgttcgctgagtttaccggcaagatttaccagctccctcccgtgaaatccgctgtgaaacgagaacttaggacacggaatatttactatgcaacaatctacgaaatagatgggcgggatgttctcttcaggatagggtgtgaggcaggaacttacgtgcgcacgtactgccacaacatcggtgaggcgcttggcgtgggagcccacatggcggaactccgccgcacccaggtcggtagctttaacgaaaagaacaacctggtaaccctgcaagatgtcacggacgcatatcatttttatatcgaggatggcgatgagtcgtttttgcggcaggcgatcatgcccatggagatggctgctgactatctgccgaaagtcatcgtgaaagacagcgccgtggacgccatctgccacggggccgacctggcttgtggaggcatcgcagaactgacagataacatccagaagaacgacattgtcgccatcctgaccctcaagggagagctcgtgggcgccgggtccagccttctgacctcaggcgagattctcgagtcagactcaggtttcgccgtgaacgtttctaaagtcctaatgaagcccggcacctaccctcggttctggaaatga

SEQ ID NO: 9183 - DNA, 1767 bp, synthetic construct
  source 1..1767: mol_type = other DNA
atgaacgttaagaacacattcgtgattatcctgctgtttctaatcctgttctcaacagttacctttgtgtctgcagatgacgatcgcagctattccatcgatcaggtgattaccgacctcactgtgaaaaacaacggcctactccacgtggaagagcagtacgactacagctttgacggcgccttcaatggcgtgtacagggacatccccctaaaatccggagaaagcattgagaacattaaaattcacgtggacggggcatatgccacatatgaagaaagtgacgatgacggctacaagcacgtcaaaatttatctctattccgacgccgcccatactaaagggatcaaggattgcaatgtgaaggtctacatcagctacgatttgatcggtgcagtcacgattttcaatgatgtgagtggtcttcagtacaaactctggggggaggagtgggacgttggagcgaacaatctgaaagctaccgtccacctgcctggcaataatggaaacgagtactatctgaccccctccgagtacaatgacacttcctcccttaaaggcaacaccataactgcagagagttcttacatcccaaagggcgaatactacgagctgcttgtgcttatgcctgtggacgacttcaataagtcccccaacgccaagcatgtaaatcaaaatgggcatgacatgatcatgaagaacctcaagaacaccattaacgaacgggacttttggaacacaacttacctggtgctgggcttactgacgcttataagccccatcagtgctatcatagtctacttgaaatacggtagagagccagaagtgaattatgacgggatctacgagagggatttgcccaccaacgatcctccggagatcgtgaacgctctgatcgagaacaagatcagcattggacatccgaatattaagggtttcgaagcctcgattatgaatcttattgatcgtaagttcatcactctctccagccaggagaacattgagagcaataccaaagacctgatgctcaccttgaataacaaggccggattgagcgcaagtgaacaaatcgtctttgacacgctcaaccactttagcacaaataacattttaaatctgtcaaccctgaacggccagctgtcttcggaaacaaatggtaagtggtttatggaaaagatccgggaatgggagtcctccgttgagaatgatatggacgtctcaagatttttcgatgaccggggttcttcaataatgaacgtaatcgggttactcggcatacccttcgccatcgctctgatcgttctgggatttatcacaaacctaaataacggactgtatagtatcgcgggcggcatattcctgataatcttcagcatcgtaatcaccatgagcgatgacgatatcttcggccgatggaccgaggagggtcgcgtatactatctcaagtggaaaaacttgaagaactttctggaagacaacagtctgattaaggagcaccctccagaatcaataatcatttggaagaagtacctcatctatggtgctgctctcggagtcgccgacaaagtgtacgagtcaatgaaactgcaggtgccaaacattagcgattacgataacgatggcctgttcatgtatcactattacgggggatatggcatgatgaatatggccttctccacgggggagatttcggccaacccatctgactctagcgggttcggggggtctggcggaggctctggcgggggagggggcggagcgttttga

SEQ ID NO: 9184 - DNA, 558 bp, synthetic construct
  source 1..558: mol_type = other DNA
atggattttatcctaacgattgtcattatcatagtcgtcctgtttattattgtgacactgatacacatgtacaataatctggtgggactcagaaatcgggttaagaactcgtacgcccaaattgatgtgcagctgaagcggcgcaacgacttgatccccaatcttgttgaaacagtaaaagggtatgcttcacatgagaaaggcgtgctcgaggaggtgaccaaggcccgcaacagtgtgatgaacgcgtcctccatcaaagaaaccagcgtcgcagacaaccaattgactggcgcactcaagtccctgttcgccgtagctgaaaattaccctgaccttaaggcgaatagcaacttccagcagttacagaacgagctgagtgagaccgaggacaaaatcgcttattcaaggcagttctataacgatgtggtgctcaagtacaacaacgcctgccagcagtttccaagcagcatcctggcacgaatcttcggttacaagatcgaggactacttcgaagcccccgaggccgagaggactgtgccgaaagtcgaattttga

SEQ ID NO: 9185 - DNA, 450 bp, synthetic construct
  source 1..450: mol_type = other DNA
atggaagacgactttaagcacttagtgcgcattagccgaaaggacgtgaacggcaataaaaccattgagcaggcactcactgaaatcaaaggggtcggaatctcgctctctaagacgatgtgccgtactttggacctggatctagatgccaagataggatacatcgcggatgaagatgttctgaggattgaggagatcctggagaacccgcaaaaattcgacatcccccgctggatgttgaaccggagggaggactatgaaacaggggacgacatccacctgatagagagcgatcttgacatgaccctgagagacgatctgaatcgcatgaagaagaccaggtcctacaagggccggagacatgaggtggggctcccagtaagaggccagcgcaccaagtccacattccgaaaaagtagtagcgtgggtgtcaaacggtcacggggctga

SEQ ID NO: 9186 - DNA, 540 bp, synthetic construct
  source 1..540: mol_type = other DNA
atgggccaacctcgcaaatcaaggaagaagtataacacaccaccccacccgtggaacgcggagaggataaagaacgagaacaagctgatgacgaagtacggcctcaaaaataaaaaggaaatttggaaagccgacacactcgtccgcagatacagtagggaggcaagatatttgcttggcttctccaccgatcagatgcaggaggagaagctggaattactgggccacctggcccgaaccggaattttgcctgaaggggccgcccttgaagagatcctagatctgaacgtggaagacatcctgagacggcggctccagaccatcgtgtacaataaggggctggcccggactcccaaagaagcacgaatgtttgtggtacatggacacatagctctcaatgggaaaaagatcaactccccaagctatgtggtgctgaagggtcaggaagacgatatcggattctaccgctctagccccgtcgctaaacagattgaggagtacaacaatagcaagtcggacaaggttaatactgaggagtga

SEQ ID NO: 9187 - DNA, 393 bp, synthetic construct
  source 1..393: mol_type = other DNA
atggcaaaagacgaaaagtgggggatcgctaatatctactcaagcttcaacaacaccattatcacggtcacagacatcaccggggccgagaccatctcccagtggtctgggggaaaggtcgtgcgggcagacaggcagcaggccagcccgtttgcggccatggctgccgcaacccgtattgcggatgatgccaaggaaaaaggattcgtaggtctccatattaaagtgagagctcccggcggcaacggcccccgcagtccaggccctggggcacaagccactatccgggccctggctcgcgccggcatcaaaataggaaagatagaggatatcacaccaattcctcacgacggtactggcaggcccgggggcaagagaggacggcgagtgtga

SEQ ID NO: 9188 - DNA, 819 bp, synthetic construct
  source 1..819: mol_type = other DNA
atggaggggttcaacatggagatcgaagttaaaagtcagaaggatgacgagatcgtcttcattgtgcgggatgcggaagtccccttcgtgaacgccattcgcaggtgcgctatggtgaacgtcccaaaaatagccatcgaagacgtgaatattatccggaacgacagcgccatgtttaatgaggtgctggcgcaccgtctgggtctcactcccttagtgagcgatcttgatgccctggaagggctatctttgccggaggacgacgattgggaagagtataccaatggcatcatgttcacacttaaggaggagggcccgaaggtagtttactccaaggatctgataagctcagactcaaaaattaagccagtgtacgacaccatccctctggtaaagctgaaagacaatgagaaactcaacatagaatccgtggcaaaagttggatacggaaaggaccatgccaagtggatgccaaccactgtctgcgcttacaagcagtatcctgaaatcaccttcaacgatgacttggagatcgattacgactgcgcctctgcatgccctaggggtgtgctgaagtcggataagagaagcaagaagattaagattctggacattgagaactgctccatgtgtaaaagctgtgtgcgagcttccacgaacggctacatcaatgtcgggtatcgggaaaacgacttcatctttcgcatcgagacagacggcagcatgccccccaaagaagtgctcctcaaagcctgtgaggtcctgggggagaaggcagataagtttatcagatttagtgaggaaggcggaagtaaatga

SEQ ID NO: 9189 - DNA, 366 bp, synthetic construct
  source 1..366: mol_type = other DNA
atggctaagaagatcataaagaccaatcccaacctcatcgagctcattaataaactgtacgagcagtcacggaacgaaaacgcagccatctggaaggacgttgccaaaaggctggaaaggtcgaaccgaagaaccgccgaggtgaacttgagcgacatcgcccgccacgctgaggccggtgaaacgattctagtcccggggaaagtgctttccaatggcaatctgacagagaaggtggacgtcgtagcactgaaattcagcgccaaggcgcaggaaaaaatcgagagtgcgggcggagagtgcattgcaatcgatgagataatcgagtccaacccaaaggggagcaacattcggatcatggaatga

SEQ ID NO: 9190 - DNA, 423 bp, synthetic construct
  source 1..423: mol_type = other DNA
atgattattgacggagaggggtgcgtgctgggccggctggcctcagtcacaagtaaaaatctactggaaggcgaggaggtgattatcatcaacgctgagaaaataatgctgacgggtaataaggattgggcctacgccaagtacaaacagagagtggacagggctagcatctctaacccccgagacctcgggccaaagtatccacggagaccggacgatatattcaggcgcaccgtgcgcggcatgttgcctttcaagaagagcaaggggaaaactgcattcaagggactcaaagcgtttgtgggcgtccccgccgaatatgctgatgtagaactcacagcagttcccgaagcggagtacaagaacatcaagaagggtatcgagttaggagagatctccaaacttctgggcgccaccttttga

SEQ ID NO: 9191 - DNA, 402 bp, synthetic construct
  source 1..402: mol_type = other DNA
atggtcaaagtgattcacaccagcggcaagcgcaaaacagcgatcgcaagaggcactgtccgggaaggaacgggtaaggtgaggataaaccgaatccccctagagctctacagccctgagctcgctaacctcaaactgcaggagccactgaccctggccggcgacctggcgaatgaggtggacataaacatccatgtgatcggcggaggagtaatgggccaggccgaagctgcccggatggttattgccaaggggcttgtgcagtggtcacaagatatggatttgaaggaaaagttcacccagtacgacaggacaatgctggtcggtgacccaaggcggtccgagccgaaaaagtatggggggcccggggcaagagcccgcaaacagaagagttaccgttga

SEQ ID NO: 9192 - DNA, 171 bp, synthetic construct
  source 1..171: mol_type = other DNA
atgattccaatccggtgtctcagctgcggaaaacccgtaagtgcagtcttcgacgagtataacaaacgcgtggcggccggggagaagagcaaggatgtgctggacgacctgggcctgacccgatactgctgcaggagaatgctaatctcccacgtgcagacatgggaatga

SEQ ID NO: 9193 - DNA, 183 bp, synthetic construct
  source 1..183: mol_type = other DNA
atggatgtggagaagaaactgaccaggttcgagcgagcccgcctcctcggggctagagcaatccagatcagcatgggcgccaagcccctggtcgagattaaggacagcctggacccgattgatatagcctacgaagagctaaaagcgggagtacttccattggacgtgatccggtatgaatga

SEQ ID NO: 9194 - DNA, 1245 bp, synthetic construct
  source 1..1245: mol_type = other DNA
ctcgtgagtataatagaggacgtccaggtccgaaagattttggatagccgcggcaaccccaccatagaggtggatgtcattacttggaacagtaagggcagagccgccgcccctagcggcgcgagtacaggctcctatgaggtcgtaccctatcctaagggggggattgacgaggttgttagcgaaatggaagacctgatcgcttctgaactgattggaatggatgctgaggacctggtaacaattgatgaagtcctgaaggaggtggacggcacagacaacctcagcgccatcgggggtaataccaccgtggccatctcaatggcagtggccaaagctgcagctgcatcctacaatatgcccctttataaatacattggcggaaaccttgtcaatgagctgcctttccccctcggaaacatgatgaacggtggagcacacgcgggtatcaacgccccggatattcaggagtttctggtggtgcctgtgggagctactaacatatctgatgcagttttcgccaatgcctccgttcacaaaagactgaaggagctgatccagagcaaggacagcaactttactggcggaaagggggatgaaggtggctgggtgcccaacatctcaaatgatgcggctttagaaatccaggcccgggcctgcgaggaggttggggatgaacttggtatcgaaatccgcccatccctcgacatcgccgcatccgaattatggaacgcagccgagcaaaagtacatatacgctcaggatgggattaagagggacaccggagatcaaatcgacttcgtaaaagacatcatcgatacatacaacatgttttatgtggaagacccattcgacgagtctgacttcggcggattctcgcagttgacggcgaaggtgggcgacaagtgcctgatctgtggcgacgacctgtttgtgacaaacaaggaactgctggctaaggggattgaaatgaaggccgcaaacgccatcatcattaagcccaatcagattggctccctgagcgagacgtacgctaccgtgaaactcgctaaagagaataatattgtcccggtggtcagtcacaggagcggcgagaccaccgacgagacgatcgcccatctcgcggtggggttctcatcgccattgatcaaaaccggagccatcggtggggagcgtatagccaaactcaatgagctaatccggattgaagaggagctaccaaatccaactatgaacaaattttga

SEQ ID NO: 9195 - DNA, 195 bp, synthetic construct
  source 1..195: mol_type = other DNA
atggcgaaagtaaccatcgattatgataaatgcgacggcgccgactgtgcagaatgcagcgacgtctgtccgatggaggtgctggtgctcaagggggacaagatcgaaattgtcgatcccagcgagtgctcctactgcgaggtgtgcatggacgtttgtccaaacgattgtatcaagatagaggacgacttctga

SEQ ID NO: 9196 - DNA, 603 bp, synthetic construct
  source 1..603: mol_type = other DNA
atggccaatgatgagctgctaatagatctggataactacctggcagctgggttacacatcggaacacaacagaaaaccagcgatatggagaaatatatattccgggtccggtcagacgggctatacgtcttggacattcagaaaactgatgaacgtatccggcagattgctaagctcctggccaagtacgacccagaggacatcctggtagtggccaccagacagtatggtcaggctcctgttaagaaattcggcgagatcaccggggctaagacgatcccgggcaggttcatccccggcaccctgacaaaccccaattatgcgaagtttatcgagccaaaggtgatcgtggtcacggacccaaggtctgatgcacaggccgtgctggagagcaagcagaacggaatattggttgtggccctctgcgacactgaaaatctccttagtttcgtggacattgccgtgcccgtaaacaacaagggtagaaaagccattgcgctcgtctactggctgcttgcacgccaaattctgcgagagcgcggagacattcctgaagacggcgacctggatatcgattccacagactttgaactcaagttttga

SEQ ID NO: 9197 - DNA, 849 bp, synthetic construct
  source 1..849: mol_type = other DNA
atgcttcgccagcctgctgtagccggctcattttaccccaacgatgcggaaaatctcaaaaaaatcattgagagctgctttctggacaagtcgggtgtggggttcatacccgagctcaacaagttcaacggcaaggactacccgatcaacgtgatggtgccacatgcaggctatcagtattccggtgccatcgcgtcccatagctactgtgacatcgtcaggaacggcttccctgaggtgttcatcattatcagtccaaaccacactggacttggaagtgaaatctctgtgtttaatgaaggtgagtggataacacccctgggggatgtcgaggtggacaacgagttcgccaatgagataatctctatcagcgatattgcatcgtccgatttccatgcccacgtccacgaacacagtatcgaagtgcagctacccttcctgcagtacttctcaagcgactttaagattgttccaattacgatgggaacacagaccttcgcaacttcaaacgacctggctaatgccattttcgaggccggcaataagctgagcaagtcttattgcgtgatcgcaagcaccgacctcagccacttcaacaaccaagagaaggctaacaaggtggatggcttcgttctggaggacattgaggagatgaatgaatttaaattgtttgaagaggtggttcaatacaatatcacaatgtgcggctatgggcctgtaatgaccaatatctccctgtccaaacggtgcgggaaaaactcttgtgaaatattagcctaccagacgagtggggatgtcaccggcgactttagctccgtcgtgggatacgcttcaggagtctttaagtga
